(19) United States
(12) Patent Application Publication
(10) Pub. No.: US 2026/0207734 A1
(43) Pub. Date: Jul. 23, 2026

(54) CORONAVIRUS VACCINES AND METHODS OF USE

(71) Applicant: BioNTech SE, Mainz (DE)

(72) Inventors: Richard B. Gaynor, Carmel, IN (US); Lakshmi Srinivasan, Lexington, MA (US); Asaf Poran, Stoneham, MA (US); Dewi Harjanto, Brookline, MA (US); Christina Murphy Arieta, Lexington, MA (US); Daniel Abram Rothenberg, Melrose, MA (US); John Srouji, Medford, MA (US); Stefanie Krumm, Partenheim (DE); Kaushik Thanki, Wiesbaden (DE); Annette Vogel, Mainz (DE); Ugur Sahin, Mainz (DE); Yushu Joy Xie, Cambridge, MA (US)

(21) Appl. No.: 18/694,596

(22) PCT Filed: Sep. 22, 2022
(86) PCT No.: PCT/US2022/044400

§ 371 Date: Mar. 22, 2024

Related U.S. Application Data
(60) Provisional application No. 63/246,902, filed on Sep. 22, 2021.
(60) Provisional application No. 63/320,187, filed on Mar. 15, 2022.

(51) Int. Cl. A61K 39/215; A61K 9/127; A61K 39/00; A61P 37/04

(52) U.S. Cl. CPC A61K 39/215; A61K 9/127; A61P 37/04; A61K 2039/53

(57) ABSTRACT

Compositions and methods for the prevention and/or treatment of a viral infection, in particular of the Coronaviridae family.

### CROSS-REFERENCE TO RELATED APPLICATIONS

[0001] This application claims the benefit of U.S. Provisional Application No. U.S. 63/246,902 filed Sep. 22, 2021, and U.S. Provisional Application No. 63/320,187 filed Mar. 15, 2022, the content of each of which is hereby incorporated herein in its entirety.

### BACKGROUND

[0002] Newly emerging acute respiratory virus infections caused by novel coronavirus is a significant public health concern. Importantly, there are no vaccines or specific antivirals at the time of an outbreak, specifically, for example the MERS-CoV of 2015, or 2019 SARS CoV-2 infections. The 2019 SARS COV-2 infection outbreak in December of 2019 claimed more than 2000 lives in less than 2 months from the first reported case. Accordingly, novel and easily scalable therapeutics are necessary to combat a disease caused by such a viral infection.

[0003] The present application contains a Sequence Listing which has been submitted electronically in XML format and is hereby incorporated by reference in its entirety. Said XML file copy, created on Sep. 15, 2025, is named 2013237-0996.xml and is 23,117,867 bytes in size.

### SUMMARY

[0004] Patients who are immunocompromised because of autoimmunity, organ transplant or immunosuppressive treatment have reduced ability to produce antibody responses to vaccinations (Rousseau et al., A H1N1v 2009 vaccine in cancer patients treated with cytotoxic chemotherapy and/or targeted therapy: the VACANCE study. Ann Oncol. 2012 February;23 (2): 450-7). Seropositivity after vaccination is decreased in immunocompromised patients (Haidar et al., Immunogenicity of COVID-19 Vaccination in Immunocompromised Patients: An Observational, Prospective Cohort Study Interim Analysis. medRxiv 2021.06.28.21259576). While immunocompromised patients were excluded from the original clinical trials testing current SARS-CoV-2 vaccines targeting spike protein, follow-up analysis of immunocompromised patients have shown reduced capacity for patients to mount broad and durable anti-spike antibody responses, particularly in older patient cohorts (Boyarsky, et al., Immunogenicity of a Single Dose of SARS-CoV-2 Messenger RNA Vaccine in Solid Organ Transplant Recipients. JAMA. 2021; 325 (17): 1784-1786; Rincon-Arevalo, et al., Impaired antigen-specific memory B cell and plasma cell responses including lack of specific IgG upon SARS-CoV-2 BNT162b2 vaccination among Kidney Transplant and Dialysis patients. medRxiv 2021.04.15.21255550). Thus, induction of T cell responses to other SARS-CoV-2 viral proteins may be beneficial to enhance both cellular and humoral immunity. Thus, there is a need for a SARS-CoV-2 vaccine that specifically targets T cell responses. Patients undergoing anti-CD20 treatment were shown to be able to develop functional T cells with vaccination (Apostolidis et al., Altered cellular and humoral immune responses following SARS-CoV-2 mRNA vaccination in patients with multiple sclerosis on anti-CD20 therapy. Nature Medicine, vol. 27, pp. 1990-2001 (2021)), indicating that patients with impaired B cells may still develop SARS-CoV 2-specific T cells in response to vaccination.

[0005] Provided herein is an immunogenic composition (e.g., a vaccine) that specifically targets one or more T cell responses to a pathogen (e.g., in some embodiments a virus), including CD4+ T cell responses and/or CD8+ T cell responses, and/or leverages long term persistence of T cell immunity. In some embodiments, an immunogenic composition (e.g., vaccine) provided herein can specifically target one or more T cell responses to one or more polypeptide antigens of a pathogen (e.g., in some embodiments one or more viral antigens), including, e.g., non-structural proteins, nucleocapsid, membrane protein and/or envelope protein of one or more viruses.

[0006] In one aspect, provided herein is a SARS-CoV-2 immunogenic composition (e.g., a vaccine) that specifically targets one or more T cell responses, including CD4+ T cell responses and/or CD8+ T cell responses, and/or leverages long term persistence of T cell immunity. In some embodiments, a SARS-CoV-2 vaccine provided herein can specifically target one or more T cell responses to a polypeptide antigen of SARS-CoV-2, including, e.g., nucleocapsid, membrane protein and/or envelope protein of SARS-CoV-2. SARS-CoV-2 immunogenic compositions (e.g., a vaccines) provided herein can be useful for eliciting one or more T cell responses to SARS-CoV-2 in all patients. Protection from COVID19 has been observed in patients deficient in humoral immunity when T cell responses were present (Bange, et al., CD8+ T cells contribute to survival in patients with COVID-19 and hematologic cancer. Nat Med 27, 1280-1289 (2021)) and the longevity of T cell responses from related infections from the original SARS-CoV epidemic (Le Bert et al., SARS-CoV-2-specific T cell immunity in cases of COVID-19 and SARS, and uninfected controls. Nature 584, 457-462 (2020)). In some embodiments, the present disclosure, among other things, provides a particular insight that SARS-CoV-2 immunogenic compositions (e.g., a vaccines) provided herein can be particularly useful for eliciting one or more T cell responses to SARS-CoV-2 in patients that have been immunocompromised in their humoral immunity, such as, for example, in some embodiments through cancer (e.g., B cell lymphoma), treatment with rituximab, methotrexate or other immunosuppressive treatment targeting the humoral immune response, or patients undergoing organ transplant. In some embodiments, T cell responses induced by SARS-CoV-2 immunogenic compositions (e.g., a vaccines) described herein can protect patients from severe COVID-19 and provide long lasting protection through T cell immunity to the SARS-CoV-2 immunogenic composition (e.g., a vaccine) provided herein. Additionally or alternatively, in some embodiments, SARS-CoV-2 immunogenic compositions (e.g., a vaccines) provided herein can be used to overcome SARS-CoV-2 variants that could reduce efficacy of other vaccines, such as those that do not target T cell responses (Davis et al., Reduced neutralisation of the Delta (B.1.617.2) SARS-CoV-2 variant of concern following vaccination. PLoS Pathog., 17 (12): e1010022 (2021); Tada et al., Comparison of Neutralizing Antibody Titers Elicited by mRNA and Adenoviral Vector Vaccine against SARS-CoV-2 Variants. bioRxiv 2021.07.19.452771). In some embodiments, the immunogenic compositions described herein are used to treat a subject with SARS-CoV-2B1.1.529 (omicron) variant or to immunize a subject against SARS-CoV-2 B1.1.529 (omicron) variant. In some embodiments, SARS-CoV-2 immunogenic compositions (e.g., a vaccines) provided herein can be used to complement and/or enhance other immunogenic compositions (e.g., a vaccines), such as those that do not target T cell responses. For example, in some embodiments, SARS-CoV-2 immunogenic compositions (e.g., a vaccines) provided herein can be used to enhance B cell responses through increased CD4+ T cell activation.

[0007] Coronaviruses are single positive stranded RNA viruses that have emerged occasionally from zoonotic sources to infect human populations. Most of the infections in humans cause mild respiratory symptoms, though some recent coronavirus infections in the last decade have resulted in severe morbidity and mortality. These include the severe acute respiratory syndrome coronavirus (SARS-CoV), middle east respiratory syndrome coronavirus (MERS-CoV) and the currently ongoing pandemic of SARS-CoV-2. Infection with these viruses can lead to acute respiratory distress resulting in a high mortality rate. SARS-CoV originated in 2002 in South China and its global spread led to 8096 cases and 774 deaths. The first case of MERS-CoV emerged in 2012 in Saudi Arabia and since then a total of 2494 cases and 858 associated deaths have been reported. 2019 SARS CoV-2 emerged in Wuhan, China at the end of December 2019 and by Mar. 8, 2020 had resulted in 118,096 cases including 4262 deaths globally. The rapid spread of 2019 SARS-CoV-2 resulted in the World Health Organization declaring a global pandemic of international concern.

[0008] All three coronaviruses SARS-CoV, MERS-CoV and the recently emergent SARS CoV-2 belong to the genus beta coronaviridae. SARS CoV-2 has a genome size of 30 kilobases that encodes for at least four (4) structural (spike [S], envelope [E], membrane [M], and nucleocapsid [N]) and at least sixteen (16) non-structural (NSP 1-16) proteins. S protein facilitates viral entry into target cells and entry depends on binding of the spike protein to a cellular receptor ACE2 for both SARS-CoV and SARS-CoV-2. Both viruses share a 76% amino acid identity across the genome.

[0009] The field of the present disclosure relates to immunotherapeutic peptides, nucleic acids encoding the peptides, peptide binding agents, and their use, for example, in the immunotherapy of a viral disease. In one aspect, the present disclosure provides viral epitopes expressed in virus infected cells, useful alone or in combination with other anti-viral, or immunomodulatory agents to treat viral infection. The present disclosure is useful in immunotherapy for a coronavirus infection.

[0010] Provided herein is a method of treating or preventing an infection by a virus (e.g., SARS-CoV-2) or treating a respiratory disease or condition associated with an infection by a virus (e.g., SARS-CoV-2) comprising administering to a subject with a B cell immunodeficiency a pharmaceutical composition comprising: (i) a polypeptide comprising at least two of the following (a) a sequence comprising an epitope sequence from ORF1ab, (b) a sequence comprising an epitope sequence from membrane glycoprotein (M) and (c) a sequence comprising an epitope sequence from nucleocapsid phosphoprotein (N); (ii) a polynucleotide encoding a polypeptide, wherein the polypeptide comprises at least two of the following (a) a sequence comprising an epitope sequence from ORF1ab, (b) a sequence comprising an epitope sequence from membrane glycoprotein (M) and (c) a sequence comprising an epitope sequence from nucleocapsid phosphoprotein (N); (iii) a T cell receptor (TCR) or a T cell comprising the TCR, wherein the TCR binds to an epitope sequence of the polypeptide in complex with a corresponding HLA class I or class II molecule; (iv) an antigen presenting cell comprising (i) or (ii); or (v) an antibody or B cell comprising the antibody, wherein the antibody binds to an epitope sequence of the polypeptide.

[0011] In some embodiments, the subject has a reduced ability to produce an antibody response to an antigen compared to a subject without a B cell immunodeficiency.

[0012] In some embodiments, the subject has a reduced ability to produce an antibody response to a vaccination compared to a subject without a B cell immunodeficiency.

[0013] In some embodiments, the subject has a reduced ability to produce an anti-spike protein antibody response and/or an anti-RBD antibody response compared to a subject without a B cell immunodeficiency.

[0014] In some embodiments, the subject can produce a T cell response or does not have a reduced ability to produce a T cell response compared to a subject without a B cell immunodeficiency.

[0015] In some embodiments, the pharmaceutical composition is protective against a variant of 2019 SARS CoV-2.

[0016] In some embodiments, the variant of 2019 SARS CoV-2 is alpha, beta, gamma, delta, epsilon, zeta, eta, theta, iota, kappa or lambda.

[0017] In some embodiments, the subject produces a T cell response to an epitope of the polypeptide.

[0018] In some embodiments, the subject produces a T cell response to the epitope sequence from ORF1ab, the epitope sequence from membrane glycoprotein (M) and/or the epitope sequence from nucleocapsid phosphoprotein (N).

[0019] In some embodiments, the subject is an organ transplant recipient.

[0020] In some embodiments, the organ transplant recipient is a sold organ transplant recipient, a stem cell transplant recipient or a bone marrow transplant recipient.

[0021] In some embodiments, the subject received an organ transplant less than 1 year, less than 6 months or less than 3 months after the pharmaceutical composition is administered.

[0022] In some embodiments, the subject is expected to receive an organ transplant less than 1 year, less than 6 months or less than 3 months prior to the pharmaceutical composition being administered.

[0023] In some embodiments, the subject has a cancer.

[0024] In some embodiments, the cancer is a B cell cancer.

[0025] In some embodiments, the B cell cancer is a B cell lymphoma or a B cell leukemia.

[0026] In some embodiments, the subject has an autoimmune disease or condition.

[0027] In some embodiments, the autoimmune disease or condition is Addison disease, Anti-NMDA receptor encephalitis, antisynthetase syndrome, Aplastic anemia, autoimmune anemias, Autoimmune hemolytic anemia, Autoimmune pancreatitis, Behcet's Disease, bullous skin disorders, Celiac disease-sprue, chronic fatigue syndrome, Chronic inflammatory demyelinating polyneuropathy, chronic lymphocytic leukemia, Crohn's disease, Dermatomyositis, Devic's disease, Erythroblastopenia, Evans syndrome, Focal segmental glomerulosclerosis, Granulomatosis with polyangiitis, Graves disease, Graves' ophthalmopathy, Guillain-Barre syndrome, Hashimoto thyroiditis, idiopathic thrombocytopenia purpura (ITP), IgA nephropathy, IgA-mediated autoimmune diseases, IgG4-related disease, Inflammatory bowel disease, Juvenile idiopathic arthritis, Multiple sclerosis, Myasthenia gravis, myeloma, non-Hodgkin's lymphoma, Opsoclonus myoclonus syndrome (OMS), Pemphigoid, Pemphigus, pemphigus vulgaris, Pernicious anemia, polymyositis, Psoriasis, pure red cell aplasia, Reactive arthritis, Rheumatoid arthritis, Sarcoidosis, scleroderma, Sjögren syndrome, Systemic lupus erythematosus, Thrombocytopenia purpura, Thrombotic thrombocytopenia purpura, Type I diabetes, Ulcerative colitis, Vasculitis and Vitiligo.

[0028] In some embodiments, the subject does not have congenital agammaglobulinemia or congenital IgA deficiency.

[0029] In some embodiments, the subject does not have HIV or AIDS.

[0030] In some embodiments, the subject is receiving an immunosuppressive agent or has received an immunosuppressive agent less than 1 year, less than 6 months or less than 3 months prior to the administering of the pharmaceutical composition.

[0031] In some embodiments, the immunosuppressive agent is abatacept, abrilumab, acalabrutinib, adalimumab, adrenocorticotropic hormone, agatolimod sodium, aldesleukin, alefacept, alemtuzumab, alisertib, alvespimycin hydrochloride, alvocidib, ambrisentan, aminocamptothecin, amiselimod, anakinra, andecaliximab, andrographolides, anifrolumab, antithymocyte Ig, apatinib, apelisib, asparaginase, atacicept, atezolizumab, avelumab, azacitidine, azathioprine, bafetinib, baminercept, baricitinib, basiliximab, becatecarin, begelomab, belatacept, belimumab, bemcentinib, bendamustine, bendamustine, betalutin with lilotomab, bevacizumab, BIIB033, BIIB059, BIIB061, bimekizumab, binimetinib, bleomycin, blinatumomab, bortezomib, brentuximab vedotin, bryostatin 1, bucillamine, buparlisib, busulfan, canakinumab, capecitabine, carboplatin, carfilzomib, carmustine, cediranib maleate, cemiplimab, ceralifimod, cerdulatinib, certolizumab, cetuximab, chidamide, chlorambucil, cilengitide, cirmtuzumab, cisplatin, cladribine, clazakizumab, clemastine, clioquinol, corticosteroids, cyclophosphamide, cyclosporine, cytarabine, cytotoxic chemotherapy, daclizumab, dalfampridine, daprolizumab pegol, daratumumab, dasatinib, defactinib, defibrotide, denosumab, dexamethasone, diacerein, dimethyl fumarate, dinaciclib, diroximel fumarate, doxorubicin, doxorubicin, durvalumab, duvelisib, duvortuxizumab, eculizumab, efalizumab, eftilagimod alpha, a neuropeptide combination of metenkefalin and tridecactide, elezanumab, elotuzumab, encorafenib, enfuvirtida, entinostat, entospletinib, enzastaurin, epacadostat, epirubicin, epratuzumab, eritoran tetrasodium, etanercept, etoposide, etrolizumab, everolimus, evobrutinib, filgotinib, fingolimod, firategrast, fludarabine, fluorouracil, fontolizumab, forodesine hydrochloride, fostamatinib, galunisertib, ganetespib, ganitumab, gemcitabine, gemtuzumab ozogamicin, gerilimzumab, glasdegib, glassia, glatiramer acetate, glembatumumab vedotin, glesatinib, golimumab, guadecitabine, hydrocortisone, hydroxychloroquine sulfate, hydroxyurea, ibritumomab tiuxetan, ibrutinib, ibudilast, idarubicin, idebenone, idelalisib, ifosfamide, iguratimod, imatinib, imexon, infliximab, inotuzumab ozogamicin, interferon alfa-2, interferon beta-la, interferon beta-1b, interferon gamma-1, ipilimumab, irofulven, isatuximab, ispinesib, itacitinib, ixazomib, lapatinib, laquinimod, laromustine, ld-aminopterin, leflunomide, lenalidomide, lenvatinib, letrozole, levamisole, levocabastine, lipoic acid, lirilumab, lonafarnib, lumiliximab, maraviroc, masitinib, mavrilimumab, melphalan, mercaptopurine, methotrexate, methoxsalen, methylprednisone, milatuzumab, mitoxantrone, mizoribine, mocetinostat, monalizumab, mosunetuzumab, motesanib diphosphate, moxetumomab pasudotox, muromonab-CD3, mycophenolate mofetil, mycophenolic acid, namilumab, natalizumab, navitoclax, neihulizumab, nerispirdine, neurovax, niraparib, nivolumab, obatoclax mesylate, obinutuzumab, oblimersen sodium, ocrelizumab, ofatumumab, olokizumab, opicinumab, oprelvekin, osimertinib, otelixizumab, oxaliplatin, oxcarbazepine, ozanimod, paclitaxel, pacritinib, palifermin, panobinostat, pazopanib, peficitinib, pegfilgrastim, peginterferon beta-la, pegsunercept (peg stnf-ri), pembrolizumab, pemetrexed, penclomedine, pentostatin, perifosine, pevonedistat, pexidartinib, picoplatin, pidilizumab, pivanex, pixantrone, pleneva, plovamer acetate, polatuzumab vedotin, pomalidomide, ponatinib, ponesimod, prednisone/prednisolone, pyroxamide, ravulizimab-cwvz, recombinant il-12, relatlimab, rhigf-1, rhigm22, rigosertib, rilonacept, ritonavir, rituximab, ruxolitinib, sarilumab, secukinumab, selumetinib, simvastatin, sintilimab, siplizumab, siponimod, sirolimus (rapamycin), sirukumab, sitravatinib, sonidegib, sorafenib, sotrastaurin acetate, sunitinib, sunphenon epigallocatechin-gallate, tabalumab, tacrolimus, talabostat mesylate, talacotuzumab, tanespimycin, tegafur/gimeracil/oteracil, temozolomide, temsirolimus, tenalisib, terameprocol, teriflunomide, thalidomide, thiarabine, thiotepa, tipifarnib, tirabrutinib, tislelizumab, tivozanib, tocilizumab, tofacitinib, tregalizumab, tremelimumab, treosulfan, ublituximab, umbralisib, upadacitinib, urelumab, ustekinumab, varlilumab, vatelizumab, vedolizumab, veliparib, veltuzumab, venetoclax, vinblastine, vincristine, vinorelbine ditartrate, visilizumab, vismodegib, vistusertib, voriconazole, vorinostat, vosaroxin, ziv-aflibercept or any combination thereof.

[0032] In some embodiments, the immunosuppressive agent is A2aR antagonist, Akt inhibitor, anti CD20, Anti-amyloidotic (AA) Agent, anti-CD37 protein therapeutic, anti-CTLA4 mAb, Anti-CXCR4, anti-huCD40 mAb, anti-LAG3 mAb, anti-PD-1 mAb, anti-PD-L1 agent, anti-PD-L1 agent, anti-PD-L1 mAb, anti-TGFb mAb, anti-TIGIT mAb, anti-TIM-3 mAb, Aurora kinase inhibitor, Bcl-2 Inhibitor, bifunctional fusion protein targeting TGFb and PD-L1, bispecific anti-PD-1 and anti-LAG3 mAb, CD1d ligand, CD40 agonist, Complement C5a inhibitor, CSF1R inhibitor, EZH2 inhibitor, FGFR3 inhibitor, FGFR4 inhibitor, FGFrR3 inhibitor, glucocorticoid-induced tumor necrosis factor receptor-related gene agonist, glutaminase inhibitor, Human monoclonal antibody against IL-12, ICOS agonist, IDO1 inhibitor, IL2 mutein, IL2 receptor agonist, MEK inhibitor, multitargeted receptor tyrosine kinase inhibitor, neutrophil elastase inhibitor, Notch Inhibitor, p38 MAPK inhibitor, PD-1 inhibitor, recombinant human Flt3L, ROCK inhibitor, selective sphingosine-1-phosphate receptor modulator, Src kinase inhibitor, TLR4 agonist, TLR9 agonist, or any combination thereof.

[0033] In some embodiments, the subject is greater than 55, 56, 57, 58, 59, 60, 65, 70, 75 or 80 years of age.

[0034] In some embodiments, the polypeptide comprises (a) a sequence comprising an epitope sequence from ORF1ab, (b) a sequence comprising an epitope sequence from membrane glycoprotein (M) and (c) a sequence comprising an epitope sequence from nucleocapsid phosphoprotein (N).

[0035] In some embodiments, the sequence comprising an epitope sequence from ORF1ab is C-terminal to the sequence comprising an epitope sequence from nucleocapsid phosphoprotein (N).

[0036] In some embodiments, the sequence comprising an epitope sequence from ORF1ab is N-terminal to the sequence comprising an epitope sequence from membrane glycoprotein (M).

[0037] In some embodiments, the sequence comprising an epitope sequence from nucleocapsid phosphoprotein (N) is N-terminal to the sequence comprising an epitope sequence from membrane glycoprotein (M).

[0038] In some embodiments, the polypeptide comprises (a) 2, 3, 4, 5, 6, 7, 8, 9 or 10 or more epitope sequences from ORF1ab, (b) a sequence comprising an epitope sequence from membrane glycoprotein (M) and (c) a sequence comprising an epitope sequence from nucleocapsid phosphoprotein (N).

[0039] In some embodiments, the epitope sequence from ORF1ab is an epitope sequence from a non-structural protein (NSP).

[0040] In some embodiments, the non-structural protein (NSP) is selected from the group consisting of NSP1, NSP2, NSP3, NSP4 and combinations thereof.

[0041] In some embodiments, the polypeptide comprises a sequence comprising an epitope sequence from NSP1, a sequence comprising an epitope sequence from NSP2, a sequence comprising an epitope sequence from NSP3 and a sequence comprising an epitope sequence from NSP4.

[0042] In some embodiments, the epitope sequence from ORF1ab is selected from the group consisting of YLFDESGEFKL, YLFDESGEF, FGDDTVIEV, QLMCQPILL, TTDPSFLGRY, PTDNYITTY, PSFLGRY, AEAELAKNV, KTIQPRVEK and any combination thereof.

[0043] In some embodiments, the epitope sequence from nucleocapsid glycoprotein (N) is LLLDRLNQL.

[0044] In some embodiments, the epitope sequence from membrane phosphoprotein (M) is VATSRTLSY.

[0045] In some embodiments, the polypeptide comprises an epitope sequence from nucleocapsid glycoprotein (N) that is LLLDRLNQL and an epitope sequence from membrane phosphoprotein (M) that is VATSRTLSY.

[0046] In some embodiments, the polypeptide comprises (a) each of the following epitope sequences from ORF1ab: YLFDESGEFKL, YLFDESGEF, FGDDTVIEV, QLMCQPILL, TTDPSFLGRY, PTDNYITTY, PSFLGRY, AEAELAKNV, KTIQPRVEK; (b) an epitope sequence from nucleocapsid glycoprotein (N) that is LLLDRLNQL; and (c) an epitope sequence from membrane phosphoprotein (M) that is VATSRTLSY.

[0047] In some embodiments, the sequence comprising an epitope sequence from ORF1ab is selected from the group consisting of the following sequences or fragments thereof:

MVTNNTFTLKVPHVGEIPVAYRKVLLKTIQPRVEKYLFDESGEFKLSEVG
PEHSLAEYYIFFASFYY; MVTNNTFTLKVPHVGEIPVAYRKVLLKTIQP
RVEKYLFDESGEFKLSEVGPEHSLAEY; APKEIIFLEGETLFGDDTVIE
VAIILASFSAST; APKEIIFLEGETLFGDDTVIEV; HTTDPSFLGRYM
SALFADDLNQLTGYHTDFSSEIIGYQLMCQPILLAEAELAKNVSLILGTV
SWNL; TTDPSFLGRYMSALFADDLNQLTGYHTDFSSEIIGYQLMCQPIL
LAEAELAKNVSLILGTVSWNL; LLSAGIFGAITDVFYKENSYKVPTDNY
ITTY; and combinations thereof.

[0048] In some embodiments, the sequence comprising an epitope sequence from membrane glycoprotein (M) is selected from the group consisting of the following sequences or fragments thereof:

ADSNGTITVEELKKLLEQWNLVIGFLFLTWICLLQFAYANRNRFLYIIKL
IFLWLLWPVTLACFVLAAVYRINWITGGIAIAMACLVGLMWLSYFIASFR
LFARTRSMWSFNPETNILLNVPLHGTILTRPLLESELVIGAVILRGHLRI
AGHHLGRCDIKDLPKEITVATSRTLSYYKLGASQRVAGDSGFAAYSRYRI
GNYKLNTDHSSSSDNIALLVQ; FAYANRNRFLYIIKLIFLWLLWPVTLA
CFVLAAVYRINWITGGIAIAMACLVGLMWLSYFIASFRLF; LGRCDIKD
LPKEITVATSRTLSYYKLGASQRVA; KLLEQWNLVIGF; NRNRFLYII
KLIFLWLLWPVTLACFVLAAVY; SELVIGAVILRGHLRIAGHHLGR;
VATSRTLSYYKLGASQRV; GLMWLSYF; and combinations
thereof.

[0049] In some embodiments, the sequence comprising an epitope sequence from nucleocapsid phosphoprotein (N) is selected from the group consisting of the following sequences or fragments thereof:

KDLSPRWYFYYLGTGPEAGLPYGANKDGIIWVATEGALNTPKDHIGTRNP
ANNAAIVLQLPQGTTLPKGFYAEGSRGGSQASSRSSSRSRNSSRNSTPGS
SRGTSPARMAGNGGDAALALLLLDRLNQLESKMSGKGQQQQGQTVTKKSA
AEASKKPRQKRTATKAYNVTQAFGRRGPEQTQGNFGDQELIRQGTDYKHW
PQIAQFAPSASAFFGMSRIGMEVTPSGTWLTYTGAIKLDDKDPNFKDQVI
LLNKHIDAYKTFPPTEPKKDKKKKADETQALPQRQKKQQTVTLLPAADLD
DFSKQLQQSMSSADSTQA; RMAGNGGDAALALLLLDRLNQLESKMSGKG
QQQ; YKHWPQIAQFAPSASAFFGMSRIGMEVTPSGTWLTYTGAIKLDDK
DPNFKDQVILLNKHIDAYKTFP; SPARMAGNGGDAALALLLLDRLNQLE
SKMSGKGQQQQGQTVTKKSAAEASKKPRQKRTATKAYNVTQAFGRRGPEQ
TQGNFGDQELIRQGTDYKHWPQIAQFAPSASAFFGMSRIGMEVTPSGTWL
TYTGAIKLDDKDPNFKDQVILLNKHIDAYKTFPPTEPKKDK and
combinations thereof.

[0050] In some embodiments, the polypeptide comprises one or more linker sequences.

[0051] In some embodiments, the one or more linker sequences are selected from the group consisting of GGSGGGGSGG, GGSLGGGGSG.

[0052] In some embodiments, the one or more linker sequences comprise cleavage sequences.

[0053] In some embodiments, the one or more cleavage sequences are selected from the group consisting of FRAC, KRCF, KKRY, ARMA, RRSG, MRAC, KMCG, ARCA, KKQG, YRSY, SFMN, FKAA, KRNG, YNSF, KKNG, RRRG, KRYS, and ARYA.

[0054] In some embodiments, the polypeptide comprises a transmembrane domain sequence.

[0055] In some embodiments, the transmembrane domain sequence is C-terminal to the sequence comprising an epitope sequence from ORF1ab, the sequence comprising an epitope sequence from membrane glycoprotein (M) and the sequence comprising an epitope sequence from nucleocapsid phosphoprotein (N).

[0056] In some embodiments, the transmembrane domain sequence is EQYIKWPWYIWLGFIAGLIAIVMVTIMLCCMTSCCSCLKGCCSCGSCCKFDEDDSEPVLKGVKL HYT.

[0057] In some embodiments, the polypeptide comprises an SEC sequence.

[0058] In some embodiments, the SEC sequence is N-terminal to the sequence comprising an epitope sequence from ORF1ab, the sequence comprising an epitope sequence from membrane glycoprotein (M) and the sequence comprising an epitope sequence from nucleocapsid phosphoprotein (N).

[0059] In some embodiments, the SEC sequence is MFVFLVLLPLVSSQCVNLT.

[0060] In some embodiments, the composition comprises the polynucleotide encoding the polypeptide.

[0061] In some embodiments, the polynucleotide is an mRNA.

[0062] In some embodiments, the polynucleotide comprises a codon optimized sequence for expression in a human.

[0063] In some embodiments, the polynucleotide comprises a dEarI-hAg sequence.

[0064] In some embodiments, the dEarI-hAg sequence is ATTCTTCTGGTCCCCACAGACTCAGAGAGAACCC, optionally wherein each T is a U.

[0065] In some embodiments, the polynucleotide comprises a Kozak sequence.

[0066] In some embodiments, the Kozak sequence is GCCACC.

[0067] In some embodiments, the polynucleotide comprises an F element sequence.

[0068] In some embodiments, the F element sequence is a 3 UTR of amino-terminal enhancer of split (AES).

[0069] In some embodiments, the F element sequence is CTGGTACTGCATGCACGCAATGCTAGCTGCCCCTTTCCCGTCCTGGGTACCCCGAGTCTCCC CCGACCTCGGGTCCCAGGTATGCTCCCACCTCCACCTGCCCCACTCACCACCTCTGCTAGTTC CAGACACCTCC, optionally wherein each T is a U.

[0070] In some embodiments, the polynucleotide comprises an I element sequence.

[0071] In some embodiments, the I element sequence is a 3′ UTR of mitochondrially encoded 12S rRNA (mtRNR1).

[0072] In some embodiments, the I element sequence is CAAGCACGCAGCAATGCAGCTCAAAACGCTTAGCCTAGCCACACCCCCACGGGAAACAGCA GTGATTAACCTTTAGCAATAAACGAAAGTTTAACTAAGCTATACTAACCCCAGGGTTGGTCA ATTTCGTGCCAGCCACACC, optionally wherein each T is a U.

[0073] In some embodiments, the polynucleotide comprises a poly A sequence.

[0074] In some embodiments, the poly A sequence is AAAAAAAAAAAAAAAAAAAAAAAAAAAAAAGCATATGACTAAAAAAAAAAAAAAAAAAA AAAAAAAAAAAAAAAAAAAAAAAAAAAAAAAAAAAAAAAAAAAAAAAAAAA, optionally wherein each T is a U.

[0075] In some embodiments, each of the epitope sequences from the ORF1ab, the membrane glycoprotein, and the nucleocapsid phosphoprotein are from 2019 SARS-CoV-2.

[0076] In some embodiments, one or more or each epitope elicits a T cell response.

[0077] In some embodiments, one or more or each epitope has been observed by mass spectrometry as being presented by an HLA molecule.

[0078] In some embodiments, the composition comprises (i) a polypeptide with at least 70%, at least 75%, at least 80%, at least 85%, 90%, at least 95%, or 100% sequence identity to a sequence selected from the group consisting of RS Clp1full, RS C2p1full, RS C3p1full, RS C4p1full, RS C5p1, RS C5p2, RS C5p2full, RS C6p1, RS C6p2, RS C6p2full, RS C7p1, RS C7p2, RS C7p2full, RS C7p4, RS C7p4full, RS C8p1, RS C8p2 and RS C8p2full; (ii) a polynucleotide encoding a polypeptide with at least 70%, at least 75%, at least 80%, at least 85%, 90%, at least 95%, or 100% sequence identity to a sequence selected from the group consisting of RS Clp1full, RS C2p1full, RS C3p1full, RS C4p1full, RS C5p1, RS C5p2, RS C5p2full, RS C6p1, RS C6p2, RS C6p2full, RS C7p1, RS C7p2, RS C7p2full, RS C7p4, RS C7p4full, RS C8p1, RS C8p2 and RS C8p2full; or (iii) a polynucleotide with at least 70%, at least 75%, at least 80%, at least 85%, at least 90%, at least 95%, or 100% sequence identity to a sequence selected from the group consisting of SEQ ID NOs: RS C1n1, RS C2n1, RS C3n1, RS C4n1, RS C5n1, RS Con1, RS C7n1, RS C8n1, RS C5n2, RS Con2, RS C7n2, RS C7n4, RS C7n4full, RS C8n2, RS C5n2full, RS Con2full, RS C7n2full and RS C8n2full.

[0079] In some embodiments, the composition comprises (i) a polypeptide with at least 70%, at least 75%, at least 80%, at least 85%, at least 90%, at least 95%, or 100% sequence identity to a sequence selected from the group consisting of RS C7p1, RS C7p2, RS C7p2full, RS C7p4 and RS C7p4full; or (ii) a polynucleotide with at least 70%, at least 75%, at least 80%, at least 85%, at least 90%, at least 95%, or 100% sequence identity to a sequence selected from the group consisting of SEQ ID NOs: RS C7n1, RS C7n2, RS C7n2full, RS C7n4 and RS C7n4full.

[0080] In some embodiments, the pharmaceutical composition comprises a pharmaceutically acceptable excipient, carrier, or diluent.

[0081] Provided herein is a method of treating or preventing an infection by a virus or treating a respiratory disease or condition associated with an infection by a virus comprising administering to a subject with a B cell immunodeficiency a pharmaceutical composition comprising: (i) a polypeptide comprising an epitope sequence of Table 1A, Table 1B, Table 1C, Table 2Ai, Table 2Aii, Table 2B and/or Table 16; (ii) a polynucleotide encoding the polypeptide comprising an epitope sequence of Table 1A, Table 1B, Table 1C, Table 2Ai, Table 2Aii, Table 2B and/or Table 16; (iii) a T cell receptor (TCR) or a T cell comprising the TCR, wherein the TCR binds to the epitope sequence in complex with a corresponding HLA class I or class II molecule; (iv) an antigen presenting cell comprising (i) or (ii); or (v) an antibody or B cell comprising the antibody, wherein the antibody binds to the epitope sequence.

[0082] In some embodiments, the epitope sequence comprises one or more or each of the following: YLFDESGEFKL, YLFDESGEF, FGDDTVIEV, LLLDRLNQL, QLMCQPILL, TTDPSFLGRY, PTDNYITTY, PSFLGRY, AEAELAKNV, VATSRTLSY and KTIQPRVEK.

[0083] In some embodiments, the epitope sequence comprises one or more or each of the following: SAPPAQYEL, AVASKILGL, EYADVFHLY, DEFTPFDVV, VRIQPGQTF, SFRLFARTR, KFLPFQQF, VVQEGVLTA, RLDKVEAEV, FGADPIHSL, NYNYLYRLF, KYIKWPWYI, KWPWYIWLGF, LPFNDGVYF, QPTESIVRF, IPFAMQMAY, YLQPRTFLL and RLQSLQTYV.

[0084] In some embodiments, the epitope sequence is from an orflab protein.

[0085] In some embodiments, the epitope sequence is from an orfla protein

[0086] In some embodiments, the epitope sequence is from a surface glycoprotein(S) or a shifted reading frame thereof.

[0087] In some embodiments, the epitope sequence is from a nucleocapsid phosphoprotein (N).

[0088] In some embodiments, the epitope sequence is from an ORF3a protein.

[0089] In some embodiments, the epitope sequence is from a membrane glycoprotein (M).

[0090] In some embodiments, the epitope sequence is from an ORF7a protein.

[0091] In some embodiments, the epitope sequence is from an ORF8 protein.

[0092] In some embodiments, the epitope sequence is from an envelope protein (E).

[0093] In some embodiments, the epitope sequence is from an ORF6 protein.

[0094] In some embodiments, the epitope sequence is from an ORF7b protein.

[0095] In some embodiments, the epitope sequence is from an ORF10 protein.

[0096] In some embodiments, the epitope sequence is from an ORF9b protein.

[0097] Provided herein is a method of treating or preventing an infection by a virus or treating a respiratory disease or condition associated with an infection by a virus comprising administering to a subject with a B cell immunodeficiency a pharmaceutical composition comprising: a polypeptide having an amino acid sequence with at least 70%, at least 75%, at least 80%, at least 85%, at least 90%, at least 95% or 100% sequence identity to a sequence of any one of the sequences depicted in column 2 of Table 11, column 2 of Table 12 or column 3 of Table 15; or a recombinant polynucleotide encoding a polypeptide having an amino acid sequence with at least at least 70%, at least 75%, at least 80%, at least 85%, at least 90%, at least 95%, or 100% sequence identity to a sequence of any one of the sequences depicted in column 2 of Table 11, column 2 of Table 12 or column 3 of Table 15.

[0098] In some embodiments, the pharmaceutical composition comprises a polypeptide with at least 70%, at least 75%, at least 80%, at least 85%, 90%, at least 95% or 100% sequence identity to a sequence selected from the group consisting of RS Clp1full, RS C2p1full, RS C3p1full, RS C4p1full, RS C5p1, RS C5p2, RS C5p2full, RS C6p1, RS C6p2, RS C6p2full, RS C7p1, RS C7p2, RS C7p2full, RS C7p4, RS C7p4full, RS C8p1, RS C8p2 and RS C8p2full; or a polynucleotide encoding a polypeptide with at least 70%, at least 75%, at least 80%, at least 85%, at least 90%, at least 95%, or 100% sequence identity to a sequence selected from the group consisting of RS C1p1full, RS C2p1full, RS C3p1full, RS C4p1full, RS C5p1, RS C5p2, RS C5p2full, RS C6p1, RS C6p2, RS C6p2full, RS C7p1, RS C7p2, RS C7p2full, RS C7p4, RS C7p4full, RS C8p1, RS C8p2 and RS C8p2full.

[0099] In some embodiments, the pharmaceutical composition comprises a polynucleotide with at least 70%, at least 75%, at least 80%, at least 85%, at least 90%, at least 95% or 100% sequence identity to a sequence selected from the group consisting of SEQ ID NOs: RS C1n1, RS C2n1, RS C3n1, RS C4n1, RS C5n1, RS Con1, RS C7n1, RS C8n1, RS C5n2, RS Con2, RS C7n2, RS C8n2, RS C5n2full, RS Con2full, RS C7n2full, RS C8n2full, RS C7n4, and RS C7n4full.

[0100] In some embodiments, the polynucleotide is an mRNA.

[0101] In some embodiments, the pharmaceutical composition further comprises one or more lipid components.

[0102] In some embodiments, the one or more lipid components comprise a lipid nanoparticle (LNP).

[0103] In some embodiments, the LNP encapsulates the recombinant polynucleotide construct.

[0104] In some embodiments, the polypeptide is synthetic.

[0105] In some embodiments, the polypeptide is recombinant.

[0106] In some embodiments, the polypeptide is from 8-1000 amino acids in length.

[0107] In some embodiments, the epitope sequence binds to or is predicted to bind to an HLA class I or class II molecule with a KD of 1000 nM or less.

[0108] In some embodiments, the epitope sequence binds to or is predicted to bind to an HLA class I or class II molecule with a KD of 500 nM or less.

[0109] In some embodiments, the epitope sequence comprises a sequence of a viral protein expressed by a virus-infected cell of the subject.

[0110] In some embodiments, the virus is a coronavirus.

[0111] In some embodiments, the virus is 2019 SARS-CoV 2.

[0112] In some embodiments, an HLA molecule expressed by the subject is unknown at the time of administration.

[0113] In some embodiments, the ability of the virus to avoid escape of recognition by an immune system of the subject is less compared to the ability of the virus to avoid escape of recognition by an immune system of a subject administered a pharmaceutical composition containing an epitope from a single protein or epitopes from fewer proteins than in the pharmaceutical composition administered according a method described herein.

[0114] In some embodiments, the subject expresses an HLA molecule encoded by an HLA allele of any one of Table 1A, Table 1B, Table 1C, Table 2Ai, Table 2Aii, Table 2B and Table 16 and the epitope sequence is an HLA allele-matched epitope sequence.

[0115] In some embodiments, the epitope sequence comprises one or more or each of the following: SAPPAQYEL, AVASKILGL, EYADVFHLY, DEFTPFDVV, VRIQPGQTF, SFRLFARTR, KFLPFQQF, VVQEGVLTA, RLDKVEAEV and FGADPIHSL.

[0116] In some embodiments, the method further comprises administering to the subject an additional therapy for a 2019 SARS-CoV 2 viral infection.

[0117] In some embodiments, the method further comprises administering to the subject (a) a polypeptide having an amino acid sequence of a 2019 SARS-CoV 2 spike protein or a variant or fragment thereof; (b) a recombinant polynucleotide encoding a 2019 SARS-CoV 2 spike protein or a variant or fragment thereof; or a 2019 SARS-CoV 2 spike protein pharmaceutical composition comprising (a) or (b).

[0118] In some embodiments, the vaccine or therapeutic of (a) or (b) is administered to the subject once.

[0119] In some embodiments, the vaccine or therapeutic of (a) or (b) is administered to the subject more than once.

[0120] In some embodiments, the vaccine or therapeutic is administered at least two times, wherein the first administered dose is a priming dose, and the second and subsequent doses are booster dose(s).

[0121] In some embodiments, the priming and the booster doses are administered at an interval of at least 21 days.

[0122] In some embodiments, an interval between two booster doses is at least 30 days, at least 60 days, or at least 90 days.

[0123] In some embodiments, the vaccine or therapeutic is administered once each year.

[0124] In some embodiments, the vaccine or therapeutic is administered twice each year.

[0125] In some embodiments, the vaccine or therapeutic is administered at a high priming or loading dose for the first dose, and at a reduced boosting or maintenance dose for the subsequent doses.

[0126] In some embodiments, the subject receives a lower dose of or a lower frequency of a SARS-CoV spike vaccine than a subject receiving the SARS-CoV spike vaccine alone.

[0127] Provided herein is a method of treating or preventing an infection by a virus or treating a respiratory disease or condition associated with an infection by a virus comprising administering to a subject in need thereof a pharmaceutical composition comprising: (i) a recombinant polynucleotide encoding a polypeptide comprising at least two of the following: a sequence comprising an epitope sequence from ORF1ab, a sequence comprising an epitope sequence from membrane glycoprotein (M), and a sequence comprising an epitope sequence from nucleocapsid phosphoprotein (N); and (ii) a recombinant polynucleotide encoding a 2019 SARS-CoV 2 spike protein or a variant or fragment thereof; wherein the ratio (e.g., mass ratio) of (i):(ii) is greater than 20:1 or less than 1:20.

[0128] In some embodiments, the ratio (e.g., mass ratio) of (i):(ii) is greater than 20:1, 30:1, 40:1, 50:1, 60:1, 70:1, 80:1, 90:1 or 100:1

[0129] In some embodiments, the ratio (e.g., mass ratio) of (i):(ii) is less than 1:20, 1:30, 1:40, 1:50, 1:60, 1:70, 1:80, 1:90 or 1:100.

[0130] Provided herein is a method of treating or preventing an infection by a virus or treating a respiratory disease or condition associated with an infection by a virus comprising administering to a subject in need thereof: (i) a first pharmaceutical composition comprising a first recombinant polynucleotide encoding a polypeptide comprising at least two of the following: a sequence comprising an epitope sequence from ORF1ab, a sequence comprising an epitope sequence from membrane glycoprotein (M), and a sequence comprising an epitope sequence from nucleocapsid phosphoprotein (N); and (ii) a second pharmaceutical composition comprising a second recombinant polynucleotide encoding a 2019 SARS-CoV 2 spike protein or a variant or fragment thereof; wherein the ratio (e.g., mass ratio) of the recombinant polynucleotide in (i) to the recombinant polynucleotide in (ii) is from 1:50 to 50:1.

[0131] In some embodiments, the ratio (e.g., mass ratio) of the recombinant polynucleotide in (i) to the recombinant polynucleotide in (ii) is from about 1:25 to 25:1.

[0132] In some embodiments, the ratio (e.g., mass ratio) of the recombinant polynucleotide in (i) to the recombinant polynucleotide in (ii) is from about 1:10 to 10:1.

[0133] In some embodiments, the ratio (e.g., mass ratio) of the recombinant polynucleotide in (i) to the recombinant polynucleotide in (ii) is about 1:10, 1:9, 1:8, 1:7, 1:6, 1:5, 1:4, 1:3, 1:2, 1:1, 2:1, 3:1, 4:1, 5:1, 6:1, 7:1, 8:1, 9:1, 10:1, 1:9.5, 1:8.5, 1:7.5, 1:6.5, 1:5.5, 1:4.5, 1:3.5, 1:2.5, 1:1.5, 2.5:1, 3.5:1, 4.5:1, 5.5:1, 6.5:1, 7.5:1, 8.5:1, 9.5:1, 2:9, 2:8, 2:7, 2:6, 2:5, 2:4, 2:3, 3:2, 4:2, 5:2, 6:2, 7:2, 8:2, 9:2, 3:8, 3:7, 3:5, 3:4, 4:3, 5:3, 7:3, 8:3, 4:9, 4:7, 4:5, 5:4, 7:4, 9:4, 5:9, 5:8, 5:7, 5:6, 6:5, 7:5, 8:5, 9:5, 6:7, 7:6, 7:8, 8:7, 8:9 or 9:8. In some embodiments, the ratio (e.g., mass ratio) of the recombinant polynucleotide in (i) to the recombinant polynucleotide in (ii) is about 1:6. In some embodiments, the ratio (e.g., mass ratio) of the recombinant polynucleotide in (i) to the recombinant polynucleotide in (ii) is about 1:3. In some embodiments, the ratio (e.g., mass ratio) of the recombinant polynucleotide in (i) to the recombinant polynucleotide in (ii) is about 1:2.

[0134] In some embodiments, the recombinant polynucleotide in (i) is present in a pharmaceutical composition at a dose of from 0.1 microgram to 100 micrograms, or 1 microgram to 50 micrograms, or 1 microgram to 30 micrograms, or 1 microgram to 20 micrograms, or 3 micrograms to 20 micrograms, or 5 micrograms to 15 micrograms. In some embodiments, the recombinant polynucleotide in (i) is present in a pharmaceutical composition at a dose of from 0.05 microgram to 10 micrograms, or 0.1 microgram to 5 micrograms, or 0.3 microgram to 5 micrograms. In some embodiments, the recombinant polynucleotide in (i) is present in a pharmaceutical composition at a dose of from 0.1 microgram to 20 micrograms or from 0.5 microgram to 15 micrograms.

[0135] In some embodiments, the recombinant polynucleotide in (ii) is present in a pharmaceutical composition at a dose of from 0.1 microgram to 100 micrograms, or 1 microgram to 100 micrograms, or 1 microgram to 30 micrograms, or 1 microgram to 20 micrograms, or 3 micrograms to 30 micrograms.

[0136] In some embodiments, the recombinant polynucleotide in (i) is present in a pharmaceutical composition at a dose of about 5 micrograms and the recombinant polynucleotide in (ii) is present in a pharmaceutical composition at a dose of about 30 micrograms. In some embodiments, the recombinant polynucleotide in (i) is present in a pharmaceutical composition at a dose of about 10 micrograms and the recombinant polynucleotide in (ii) is present in a pharmaceutical composition at a dose of about 30 micrograms. In some embodiments, the recombinant polynucleotide in (i) is present in a pharmaceutical composition at a dose of about 15 micrograms and the recombinant polynucleotide in (ii) is present in a pharmaceutical composition at a dose of about 30 micrograms.

[0137] In some embodiments, the recombinant polynucleotide in (ii) encompasses at least two separate recombinant polynucleotides, each encoding a SARS-CoV-2 S protein of a different strain or variant thereof, or an immunogenic variant or fragment thereof (e.g., in some embodiments RBD). For example, in some embodiments, the recombinant polynucleotide in (ii) encompasses a recombinant polynucleotide encoding a SARS-CoV-2 S protein of an ancestral strain (e.g., Wuhan strain) or an immunogenic variant or fragment thereof (e.g., in some embodiments RBD) and a recombinant polynucleotide encoding a SARS-CoV-2 S protein of a SARS-CoV-2 variant strain that is prevalent or rapidly spreading at the time of administration. For example, in some embodiments, the recombinant polynucleotide in (ii) encompasses a recombinant polynucleotide encoding a SARS-CoV-2 S protein of an ancestral strain (e.g., Wuhan strain) or an immunogenic variant or fragment thereof (e.g., in some embodiments RBD) and a recombinant polynucleotide encoding a SARS-CoV-2 S protein of a variant strain having one or more mutations that are characteristics of a SARS-CoV-2 variant (e.g., in some embodiments an Omicron variant such as, e.g., a Omicron BA.1, BA.2, BA.4 or BA.5 variant), or an immunogenic variant or fragment thereof. In some embodiments, at least two recombinant polynucleotides, each encoding a SARS-CoV-2 S protein of a different strain or variant thereof, or an immunogenic variant or fragment thereof, can be present in a pharmaceutical composition at a ratio (e.g., mass ratio) of 3:1 to 1:3, or 2:1 to 1:2 or 1:1.

[0138] In some embodiments, a pharmaceutical composition described herein may further comprise (iii) a recombinant polynucleotide encoding a peptide or polypeptide antigen from a pathogen associated with a non-SARS-CoV-2 respiratory disease. In some embodiments, such a non-SARS-CoV-2 respiratory disease may be flu (influenza), and/or respiratory syncytial virus.

[0139] Provided herein is a method of treating or preventing an infection by a virus or treating a respiratory disease or condition associated with an infection by a virus comprising administering to a subject in need thereof a pharmaceutical composition comprising a nanoparticle, wherein the nanoparticle comprises: (i) a first recombinant polynucleotide encoding a polypeptide comprising at least two of the following: a sequence comprising an epitope sequence from ORF1ab, a sequence comprising an epitope sequence from membrane glycoprotein (M), and a sequence comprising an epitope sequence from nucleocapsid phosphoprotein (N); and (ii) a second recombinant polynucleotide encoding a 2019 SARS-CoV 2 spike protein or a variant or fragment thereof. In some embodiments, a first recombinant polynucleotide encodes a polypeptide comprising all of the following: a sequence comprising an epitope sequence from ORF1ab, a sequence comprising an epitope sequence from membrane glycoprotein (M), and a sequence comprising an epitope sequence from nucleocapsid phosphoprotein (N).

[0140] In some embodiments, the nanoparticle is present in the pharmaceutical composition at a dose of from 100 ng to 500 micrograms.

[0141] In some embodiments, the nanoparticle is present in the pharmaceutical composition at a dose of from 1 microgram to 100 micrograms.

[0142] In some embodiments, the nanoparticle is present in the pharmaceutical composition at a dose of from 1 microgram to 30 micrograms, 5 micrograms to 40 micrograms or 10 microgram to 50 micrograms.

[0143] In some embodiments, the nanoparticle is present in the pharmaceutical composition at a dose of 0.1, 0.2, 0.3, 0.4, 0.5, 0.6, 0.7, 0.8, 0.9, 1, 2, 3, 4, 5, 6, 7, 8, 9, 10, 15, 20, 25, 30, 35, 40, 45, 50, 55, 60, 65, 70, 75, 80, 85, 90, 95, 100, 150, 200, 250, 300, 350, 400, 450, 500, 600, 700, 800, 900 or 1,000 micrograms.

[0144] In some embodiments, the ratio (e.g., mass ratio) of the first recombinant polynucleotide to the second recombinant polynucleotide is from about 1:50 to 50:1.

[0145] In some embodiments, the ratio (e.g., mass ratio) of the first recombinant polynucleotide to the second recombinant polynucleotide is from about 1:25 to 25:1.

[0146] In some embodiments, the ratio (e.g., mass ratio) of the first recombinant polynucleotide to the second recombinant polynucleotide is from about 1:10 to 10:1.

[0147] In some embodiments, the ratio of the first recombinant polynucleotide to the second recombinant polynucleotide is about 1:10, 1:9, 1:8, 1:7, 1:6, 1:5, 1:4, 1:3, 1:2, 1:1, 2:1, 3:1, 4:1, 5:1, 6:1, 7:1, 8:1, 9:1, 10:1, 1:9.5, 1:8.5, 1:7.5, 1:6.5, 1:5.5, 1:4.5, 1:3.5, 1:2.5, 1:1.5, 2.5:1, 3.5:1, 4.5:1, 5.5:1, 6.5:1, 7.5:1, 8.5:1, 9.5:1, 2:9, 2:8, 2:7, 2:6, 2:5, 2:4, 2:3, 3:2, 4:2, 5:2, 6:2, 7:2, 8:2, 9:2, 3:8, 3:7, 3:5, 3:4, 4:3, 5:3, 7:3, 8:3, 4:9, 4:7, 4:5, 5:4, 7:4, 9:4, 5:9, 5:8, 5:7, 5:6, 6:5, 7:5, 8:5, 9:5, 6:7, 7:6, 7:8, 8:7, 8:9 or 9:8. In some embodiments, the ratio (e.g., mass ratio) of the first recombinant polynucleotide to the second recombinant polynucleotide is about 1:6. In some embodiments, the ratio (e.g., mass ratio) of the first recombinant polynucleotide to the second recombinant polynucleotide is about 1:3. In some embodiments, the ratio (e.g., mass ratio) of the first recombinant polynucleotide to the second recombinant polynucleotide is about 1:2.

[0148] In some embodiments, the first recombinant polynucleotide is present in a pharmaceutical composition at a dose of from 0.1 microgram to 100 micrograms, or 1 microgram to 50 micrograms, or 1 microgram to 30 micrograms, or 1 microgram to 20 micrograms, or 3 micrograms to 20 micrograms, or 5 micrograms to 15 micrograms. In some embodiments, the first recombinant polynucleotide is present in a pharmaceutical composition at a dose of from 0.05 microgram to 10 micrograms, or 0.1 microgram to 5 micrograms, or 0.3 microgram to 5 micrograms. In some embodiments, the first recombinant polynucleotide is present in a pharmaceutical composition at a dose of from 0.1 microgram to 20 micrograms or from 0.5 microgram to 15 micrograms.

[0149] In some embodiments, the second recombinant polynucleotide is present in a pharmaceutical composition at a dose of from 0.1 microgram to 100 micrograms, or 1 microgram to 100 micrograms, or 1 microgram to 30 micrograms, or 1 microgram to 20 micrograms, or 3 micrograms to 30 micrograms.

[0150] In some embodiments, the second recombinant polynucleotide encompasses at least two separate recombinant polynucleotides, each encoding a SARS-CoV-2 S protein of a different strain or variant thereof, or an immunogenic variant or fragment thereof (e.g., in some embodiments RBD). For example, in some embodiments, the second recombinant polynucleotide encompasses a recombinant polynucleotide encoding a SARS-CoV-2 S protein of an ancestral strain (e.g., Wuhan strain) or an immunogenic variant or fragment thereof (e.g., in some embodiments RBD) and a recombinant polynucleotide encoding a SARS-CoV-2 S protein of a SARS-CoV-2 variant strain that is prevalent or rapidly spreading at the time of administration. For example, in some embodiments, the second recombinant polynucleotide encompasses a recombinant polynucleotide encoding a SARS-CoV-2 S protein of an ancestral strain (e.g., Wuhan strain) or an immunogenic variant or fragment thereof (e.g., in some embodiments RBD) and a recombinant polynucleotide encoding a SARS-CoV-2 S protein of a variant strain having one or more mutations that are characteristics of a SARS-CoV-2 variant (e.g., in some embodiments an Omicron variant such as, e.g., an Omicron BA.1, BA.2, BA.4 or BA.5 variant), or an immunogenic variant or fragment thereof. In some embodiments, the two recombinant polynucleotides, each encoding a SARS-CoV-2 S protein of a different strain or variant thereof, or an immunogenic variant or fragment thereof, can be present in a pharmaceutical composition at a ratio (e.g., mass ratio) of 3:1 to 1:3, or 2:1 to 1:2 or 1:1.

[0151] In some embodiments, a pharmaceutical composition described herein may comprise a third recombinant polynucleotide encoding a peptide or polypeptide antigen from a pathogen associated with a non-SARS-CoV-2 respiratory disease. In some embodiments, such a non-SARS-CoV-2 respiratory disease may be, but not limited to flu (influenza), and/or respiratory syncytial virus.

[0152] Provided herein is a method of treating or preventing an infection by a virus or treating a respiratory disease or condition associated with an infection by a virus comprising administering to a subject in need thereof: (i) a first pharmaceutical composition comprising a first nanoparticle, wherein the first nanoparticle comprises a recombinant polynucleotide encoding a polypeptide comprising at least two of the following: a sequence comprising an epitope sequence from ORF1ab, a sequence comprising an epitope sequence from membrane glycoprotein (M), and a sequence comprising an epitope sequence from nucleocapsid phosphoprotein (N); and (ii) a second pharmaceutical composition comprising a second nanoparticle, wherein the second nanoparticle comprises a recombinant polynucleotide encoding a 2019 SARS-CoV 2 spike protein or a variant or fragment thereof. In some embodiments, a first pharmaceutical composition comprising a first nanoparticle, wherein the first nanoparticle comprises a recombinant polynucleotide encoding a polypeptide comprising all of the following: a sequence comprising an epitope sequence from ORF1ab, a sequence comprising an epitope sequence from membrane glycoprotein (M), and a sequence comprising an epitope sequence from nucleocapsid phosphoprotein (N).

[0153] In some embodiments, the ratio (e.g., mass ratio) of the recombinant polynucleotide in (i) to the recombinant polynucleotide in (ii) is from about 1:50 to 50:1.

[0154] In some embodiments, the ratio (e.g., mass ratio) of the recombinant polynucleotide in (i) to the recombinant polynucleotide in (ii) is from about 1:25 to 25:1.

[0155] In some embodiments, the ratio (e.g., mass ratio) of the recombinant polynucleotide in (i) to the recombinant polynucleotide in (ii) is from about 1:10 to 10:1.

[0156] In some embodiments, the ratio (e.g., mass ratio) of the recombinant polynucleotide in (i) to the recombinant polynucleotide in (ii) is about 1:10, 1:9, 1:8, 1:7, 1:6, 1:5, 1:4, 1:3, 1:2, 1:1, 2:1, 3:1, 4:1, 5:1, 6:1, 7:1, 8:1, 9:1, 10:1, 1:9.5, 1:8.5, 1:7.5, 1:6.5, 1:5.5, 1:4.5, 1:3.5, 1:2.5, 1:1.5, 2.5:1, 3.5:1, 4.5:1, 5.5:1, 6.5:1, 7.5:1, 8.5:1, 9.5:1, 2:9, 2:8, 2:7, 2:6, 2:5, 2:4, 2:3, 3:2, 4:2, 5:2, 6:2, 7:2, 8:2, 9:2, 3:8, 3:7, 3:5, 3:4, 4:3, 5:3, 7:3, 8:3, 4:9, 4:7, 4:5, 5:4, 7:4, 9:4, 5:9, 5:8, 5:7, 5:6, 6:5, 7:5, 8:5, 9:5, 6:7, 7:6, 7:8, 8:7, 8:9 or 9:8. In some embodiments, the ratio (e.g., mass ratio) of the recombinant polynucleotide in (i) to the recombinant polynucleotide in (ii) is about 1:6. In some embodiments, the ratio (e.g., mass ratio) of the recombinant polynucleotide in (i) to the recombinant polynucleotide in (ii) is about 1:3. In some embodiments, the ratio (e.g., mass ratio) of the recombinant polynucleotide in (i) to the recombinant polynucleotide in (ii) is about 1:2.

[0157] In some embodiments, the recombinant polynucleotide in (i) is present in a pharmaceutical composition at a dose of from 0.1 microgram to 100 micrograms, or 1 microgram to 50 micrograms, or 1 microgram to 30 micrograms, or 1 microgram to 20 micrograms, or 3 micrograms to 20 micrograms, or 5 micrograms to 15 micrograms. In some embodiments, the recombinant polynucleotide in (i) is present in a pharmaceutical composition at a dose of from 0.05 microgram to 10 micrograms, or 0.1 microgram to 5 micrograms, or 0.3 microgram to 5 micrograms. In some embodiments, the recombinant polynucleotide in (i) is present in a pharmaceutical composition at a dose of from 0.1 microgram to 20 micrograms or from 0.5 microgram to 15 micrograms.

[0158] In some embodiments, the recombinant polynucleotide in (ii) is present in a pharmaceutical composition at a dose of from 0.1 microgram to 100 micrograms, or 1 microgram to 100 micrograms, or 1 microgram to 30 micrograms, or 1 microgram to 20 micrograms, or 3 micrograms to 30 micrograms.

[0159] In some embodiments, the recombinant polynucleotide in (ii) encompasses at least two separate recombinant polynucleotides, each encoding a SARS-CoV-2 S protein of a different strain or variant thereof, or an immunogenic variant or fragment thereof (e.g., in some embodiments RBD). For example, in some embodiments, the recombinant polynucleotide in (ii) encompasses a recombinant polynucleotide encoding a SARS-CoV-2 S protein of an ancestral strain (e.g., Wuhan strain) or an immunogenic variant or fragment thereof (e.g., in some embodiments RBD) and a recombinant polynucleotide encoding a SARS-CoV-2 S protein of a SARS-CoV-2 variant strain that is prevalent or rapidly spreading at the time of administration. For example, in some embodiments, the recombinant polynucleotide in (ii) encompasses a recombinant polynucleotide encoding a SARS-CoV-2 S protein of an ancestral strain (e.g., Wuhan strain) or an immunogenic variant or fragment thereof (e.g., in some embodiments RBD) and a recombinant polynucleotide encoding a SARS-CoV-2 S protein of a variant strain having one or more mutations that are characteristics of a SARS-CoV-2 variant (e.g., in some embodiments an Omicron variant such as, e.g., a Omicron BA.1, BA.2, BA.4 or BA.5 variant), or an immunogenic variant or fragment thereof. In some embodiments, at least two recombinant polynucleotides, each encoding a SARS-CoV-2 S protein of a different strain or variant thereof, or an immunogenic variant or fragment thereof, can be present in a pharmaceutical composition at a ratio (e.g., mass ratio) of 3:1 to 1:3, or 2:1 to 1:2 or 1:1.

[0160] In some embodiments, a third pharmaceutical composition (iii) may be administered to a subject in need thereof, which comprises a third nanoparticle, wherein the third nanoparticle comprises a recombinant polynucleotide encoding a peptide or polypeptide antigen from a pathogen associated with a non-SARS-CoV-2 respiratory disease. In some embodiments, such a non-SARS-CoV-2 respiratory disease may be flu (influenza), and/or respiratory syncytial virus.

[0161] In some embodiments, the first nanoparticle is present in the first pharmaceutical composition at a dose of from about 100 ng to 500 micrograms.

[0162] In some embodiments, the first nanoparticle is present in the first pharmaceutical composition at a dose of from about 1 microgram to 100 micrograms.

[0163] In some embodiments, the first nanoparticle is present in the first pharmaceutical composition at a dose of from about 1 microgram to 30 micrograms, 5 micrograms to 40 micrograms or 10 microgram to 50 micrograms.

[0164] In some embodiments, the first nanoparticle is present in the first pharmaceutical composition at a dose of about 0.1, 0.2, 0.3, 0.4, 0.5, 0.6, 0.7, 0.8, 0.9, 1, 2, 3, 4, 5, 6, 7, 8, 9, 10, 15, 20, 25, 30, 35, 40, 45, 50, 55, 60, 65, 70, 75, 80, 85, 90, 95, 100, 150, 200, 250, 300, 350, 400, 450, 500, 600, 700, 800, 900 or 1,000 micrograms.

[0165] In some embodiments, the second nanoparticle is present in the second pharmaceutical composition at a dose of from about 100 ng to 500 micrograms.

[0166] In some embodiments, the second nanoparticle is present in the second pharmaceutical composition at a dose of from about 1 microgram to 100 micrograms.

[0167] In some embodiments, the second nanoparticle is present in the second pharmaceutical composition at a dose of from about 1 microgram to 30 micrograms, 5 micrograms to 40 micrograms or 10 microgram to 50 micrograms.

[0168] In some embodiments, the second nanoparticle is present in the second pharmaceutical composition at a dose of about 0.1, 0.2, 0.3, 0.4, 0.5, 0.6, 0.7, 0.8, 0.9, 1, 2, 3, 4, 5, 6, 7, 8, 9, 10, 15, 20, 25, 30, 35, 40, 45, 50, 55, 60, 65, 70, 75, 80, 85, 90, 95, 100, 150, 200, 250, 300, 350, 400, 450, 500, 600, 700, 800, 900 or 1,000 micrograms.

[0169] Provided herein is a method of treating or preventing an infection by a virus or treating a respiratory disease or condition associated with an infection by a virus comprising administering to a subject in need thereof: (i) a pharmaceutical composition comprising (a) a polypeptide comprising at least two of the following: a sequence comprising an epitope sequence from ORF1ab, a sequence comprising an epitope sequence from membrane glycoprotein (M), and a sequence comprising an epitope sequence from nucleocapsid phosphoprotein (N); or (b) a polynucleotide encoding a polypeptide comprising at least two of the following: a sequence comprising an epitope sequence from ORF1ab, a sequence comprising an epitope sequence from membrane glycoprotein (M), and a sequence comprising an epitope sequence from nucleocapsid phosphoprotein (N); and (ii) a pharmaceutical composition comprising (a) a polypeptide having an amino acid sequence of a 2019 SARS-CoV 2 spike protein or a variant or fragment thereof; or (b) a recombinant polynucleotide encoding a 2019 SARS-CoV 2 spike protein or a variant or fragment thereof; or a 2019 SARS-CoV 2 spike protein pharmaceutical composition comprising (ii)(a) or (ii)(b); wherein the subject receives a dose of (ii)(a) or (ii)(b) that is lower than a dose of (ii)(a) or (ii)(b) administered to a subject alone.

[0170] Provided herein is a method of treating or preventing an infection by a virus or treating a respiratory disease or condition associated with an infection by a virus comprising administering to a subject in need thereof: (i) a pharmaceutical composition comprising (a) a polypeptide comprising at least two of the following: a sequence comprising an epitope sequence from ORF1ab, a sequence comprising an epitope sequence from membrane glycoprotein (M), and a sequence comprising an epitope sequence from nucleocapsid phosphoprotein (N); or (b) a polynucleotide encoding a polypeptide comprising at least two of the following: a sequence comprising an epitope sequence from ORF1ab, a sequence comprising an epitope sequence from membrane glycoprotein (M), and a sequence comprising an epitope sequence from nucleocapsid phosphoprotein (N); and (ii) a pharmaceutical composition comprising (a) a polypeptide having an amino acid sequence of a 2019 SARS-CoV 2 spike protein or a variant or fragment thereof; or (b) a recombinant polynucleotide encoding a 2019 SARS-CoV 2 spike protein or a variant or fragment thereof; or a 2019 SARS-CoV 2 spike protein pharmaceutical composition comprising (ii)(a) or (ii)(b).

[0171] Provided herein is a method of treating or preventing an infection by a virus or treating a respiratory disease or condition associated with an infection by a virus comprising administering to a subject in need thereof: (i) a pharmaceutical composition comprising (a) a polypeptide comprising at least two of the following: a sequence comprising an epitope sequence from ORF1ab, a sequence comprising an epitope sequence from membrane glycoprotein (M), and a sequence comprising an epitope sequence from nucleocapsid phosphoprotein (N); or (b) a polynucleotide encoding a polypeptide comprising at least two of the following: a sequence comprising an epitope sequence from ORF1ab, a sequence comprising an epitope sequence from membrane glycoprotein (M), and a sequence comprising an epitope sequence from nucleocapsid phosphoprotein (N); and (ii) a pharmaceutical composition comprising (a) a polypeptide having an amino acid sequence of a 2019 SARS-CoV 2 spike protein or a variant or fragment thereof; (b) a recombinant polynucleotide encoding a 2019 SARS-CoV 2 spike protein or a variant or fragment thereof; or a 2019 SARS-CoV 2 spike protein pharmaceutical composition comprising (ii)(a) or (ii)(b); wherein the subject receives a number of doses of (ii)(a) or (ii)(b) that is lower than a number of doses of (ii)(a) or (ii)(b) administered to a subject alone.

[0172] In some embodiments, the subject receives a dose of (ii)(a) or (ii)(b) that is at least 1.1, 1, 1.5, 2, 3, 4, 5, 6, 7, 8, 9, 10, 20, 30, 40, 50, 60, 70, 80, 90 or 100 times lower than a dose of (ii)(a) or (ii)(b) administered to a subject alone.

[0173] In some embodiments, the subject receives 1, 2, 3, 4, 5, 6, 7, 8, 9 or 10 fewer doses of (ii)(a) or (ii)(b) than the number of doses of (ii)(a) or (ii)(b) administered to a subject alone.

[0174] In some embodiments, the pharmaceutical composition of (i) is co-formulated with the pharmaceutical composition of (ii).

[0175] In some embodiments, the pharmaceutical composition of (i) is formulated separately from the pharmaceutical composition of (ii).

[0176] In some embodiments, the pharmaceutical composition of (i) is administered separately from the pharmaceutical composition of (ii).

[0177] Provided herein is a method of treating or preventing an infection by a virus or treating a respiratory disease or condition associated with an infection by a virus comprising administering to a subject in need thereof: (i) a pharmaceutical composition comprising (a) a polypeptide comprising at least two of the following: a sequence comprising an epitope sequence from ORF1ab, a sequence comprising an epitope sequence from membrane glycoprotein (M), and a sequence comprising an epitope sequence from nucleocapsid phosphoprotein (N); or (b) a polynucleotide encoding a polypeptide comprising at least two of the following: a sequence comprising an epitope sequence from ORF1ab, a sequence comprising an epitope sequence from membrane glycoprotein (M), and a sequence comprising an epitope sequence from nucleocapsid phosphoprotein (N); and (ii) a pharmaceutical composition comprising (a) a polypeptide having an amino acid sequence of a 2019 SARS-CoV 2 spike protein or a variant or fragment thereof; (b) a recombinant polynucleotide encoding a 2019 SARS-CoV 2 spike protein or a variant or fragment thereof; or a 2019 SARS-CoV 2 spike protein pharmaceutical composition comprising (ii)(a) or (ii)(b); wherein the subject receives a dose of (i)(a) or (i)(b) that is lower than a dose of (i)(a) or (i)(b) administered to a subject alone.

[0178] Provided herein is a method of treating or preventing an infection by a virus or treating a respiratory disease or condition associated with an infection by a virus comprising administering to a subject in need thereof: (i) a pharmaceutical composition comprising (a) a polypeptide comprising at least two of the following: a sequence comprising an epitope sequence from ORF1ab, a sequence comprising an epitope sequence from membrane glycoprotein (M), and a sequence comprising an epitope sequence from nucleocapsid phosphoprotein (N); or (b) a polynucleotide encoding a polypeptide comprising at least two of the following: a sequence comprising an epitope sequence from ORF1ab, a sequence comprising an epitope sequence from membrane glycoprotein (M), and a sequence comprising an epitope sequence from nucleocapsid phosphoprotein (N); and (ii) a pharmaceutical composition comprising (a) a polypeptide having an amino acid sequence of a 2019 SARS-CoV 2 spike protein or a variant or fragment thereof; (b) a recombinant polynucleotide encoding a 2019 SARS-CoV 2 spike protein or a variant or fragment thereof; or a 2019 SARS-CoV 2 spike protein pharmaceutical composition comprising (ii)(a) or (ii)(b); wherein the subject receives a number of doses of (i)(a) or (i)(b) that is lower than a number of doses of (i)(a) or (i)(b) administered to a subject alone.

[0179] In some embodiments, the subject receives a dose of (i)(a) or (i)(b) that is at least 1.1, 1, 1.5, 2, 3, 4, 5, 6, 7, 8, 9, 10, 20, 30, 40, 50, 60, 70, 80, 90 or 100 times lower than a dose of (i)(a) or (i)(b) administered to a subject alone.

[0180] In some embodiments, the subject receives 1, 2, 3, 4, 5, 6, 7, 8, 9 or 10 fewer doses of (i)(a) or (i)(b) than the number of doses of (i)(a) or (i)(b) administered to a subject alone.

[0181] In some embodiments, the pharmaceutical composition of (i) is co-formulated with the pharmaceutical composition of (ii).

[0182] In some embodiments, the pharmaceutical composition of (i) is formulated separately from the pharmaceutical composition of (ii).

[0183] In some embodiments, the pharmaceutical composition of (i) is administered separately from the pharmaceutical composition of (ii).

[0184] In some embodiments, the pharmaceutical composition is a coformulation.

[0185] In some embodiments, the first pharmaceutical composition is administered with or on the same day as the second pharmaceutical composition

[0186] In some embodiments, the first pharmaceutical composition is administered simultaneously with the second pharmaceutical composition.

[0187] In some embodiments, the first pharmaceutical composition is administered at a first location of the subject and the second pharmaceutical composition is administered at a second location of the subject that is different than the first location.

[0188] In some embodiments, the first location is at an appendage of the subject and second location is at an opposing appendage of the subject,

[0189] In some embodiments, the first appendage is an arm and the second appendage is an arm.

[0190] In some embodiments, the first pharmaceutical composition and the second pharmaceutical composition are administered to the same location of the subject.

[0191] In some embodiments, the pharmaceutical composition is administered at a first time point and a second time point, wherein the second time point is at least about, at most about or about 2, 3, 4, 5, 6, 7, 8, 9, 10, 11, 12, 13, 14, 15, 16, 17, 18, 19, 20, 21, 22, 23, 24, 25, 26, 27, 28, 29, 30, 31, 32, 33, 34, 35 or 36 days after the first time point; at least about, at most about or about 1, 2, 3, 4, 5, 6, 7, 8, 9, 10, 11, 12, 13, 14, 15, 16, 17, 18, 19, 20, 21, 22, 23, 24, 25, 26, 27, 28, 29, 30, 31, 32, 33, 34, 35 or 36 weeks after the first time point; or at least about, at most about or about 1, 2, 3, 4, 5, 6, 7, 8, 9, 10, 11, 12, 13, 14, 15, 16, 17, 18, 19, 20, 21, 22, 23, 24, 25, 26, 27, 28, 29, 30, 31, 32, 33, 34, 35 or 36 months after the first time point.

[0192] In some embodiments, the pharmaceutical composition is administered at a third time point, wherein the third time point is at least about, at most about or about 2, 3, 4, 5, 6, 7, 8, 9, 10, 11, 12, 13, 14, 15, 16, 17, 18, 19, 20, 21, 22, 23, 24, 25, 26, 27, 28, 29, 30, 31, 32, 33, 34, 35 or 36 days after the second time point; at least about, at most about or about 1, 2, 3, 4, 5, 6, 7, 8, 9, 10, 11, 12, 13, 14, 15, 16, 17, 18, 19, 20, 21, 22, 23, 24, 25, 26, 27, 28, 29, 30, 31, 32, 33, 34, 35 or 36 weeks after the second time point; or at least about, at most about or about 1, 2, 3, 4, 5, 6, 7, 8, 9, 10, 11, 12, 13, 14, 15, 16, 17, 18, 19, 20, 21, 22, 23, 24, 25, 26, 27, 28, 29, 30, 31, 32, 33, 34, 35 or 36 months after the second time point.

[0193] In some embodiments, the third time point is at least about, at most about or about 2, 3, 4, 5, 6, 7, 8, 9, 10, 11, 12, 13, 14, 15, 16, 17, 18, 19, 20, 21, 22, 23, 24, 25, 26, 27, 28, 29, 30, 31, 32, 33, 34, 35, 36, 37, 38, 39, 40, 41, 42, 43, 44, 45, 46, 47, 48, 49 or 50 days after the first time point; at least about, at most about or about 1, 2, 3, 4, 5, 6, 7, 8, 9, 10, 11, 12, 13, 14, 15, 16, 17, 18, 19, 20, 21, 22, 23, 24, 25, 26, 27, 28, 29, 30, 31, 32, 33, 34, 35 or 36 weeks after the first time point; or at least about, at most about or about 1, 2, 3, 4, 5, 6, 7, 8, 9, 10, 11, 12, 13, 14, 15, 16, 17, 18, 19, 20, 21, 22, 23, 24, 25, 26, 27, 28, 29, 30, 31, 32, 33, 34, 35 or 36 months after the first time point.

[0194] In some embodiments, the first pharmaceutical composition is administered at a first time point and a second time point, wherein the second time point is at least about, at most about or about 2, 3, 4, 5, 6, 7, 8, 9, 10, 11, 12, 13, 14, 15, 16, 17, 18, 19, 20, 21, 22, 23, 24, 25, 26, 27, 28, 29, 30, 31, 32, 33, 34, 35 or 36 days after the first time point; at least about, at most about or about 1, 2, 3, 4, 5, 6, 7, 8, 9, 10, 11, 12, 13, 14, 15, 16, 17, 18, 19, 20, 21, 22, 23, 24, 25, 26, 27, 28, 29, 30, 31, 32, 33, 34, 35 or 36 weeks after the first time point; or at least about, at most about or about 1, 2, 3, 4, 5, 6, 7, 8, 9, 10, 11, 12, 13, 14, 15, 16, 17, 18, 19, 20, 21, 22, 23, 24, 25, 26, 27, 28, 29, 30, 31, 32, 33, 34, 35 or 36 months after the first time point.

[0195] In some embodiments, the first pharmaceutical composition is administered at a third time point, wherein the third time point is at least about, at most about or about 2, 3, 4, 5, 6, 7, 8, 9, 10, 11, 12, 13, 14, 15, 16, 17, 18, 19, 20, 21, 22, 23, 24, 25, 26, 27, 28, 29, 30, 31, 32, 33, 34, 35 or 36 days after the second time point; at least about, at most about or about 1, 2, 3, 4, 5, 6, 7, 8, 9, 10, 11, 12, 13, 14, 15, 16, 17, 18, 19, 20, 21, 22, 23, 24, 25, 26, 27, 28, 29, 30, 31, 32, 33, 34, 35 or 36 weeks after the second time point; or at least about, at most about or about 1, 2, 3, 4, 5, 6, 7, 8, 9, 10, 11, 12, 13, 14, 15, 16, 17, 18, 19, 20, 21, 22, 23, 24, 25, 26, 27, 28, 29, 30, 31, 32, 33, 34, 35 or 36 months after the second time point.

[0196] In some embodiments, the third time point is at least about, at most about or about 4, 5, 6, 7, 8, 9, 10, 11, 12, 13, 14, 15, 16, 17, 18, 19, 20, 21, 22, 23, 24, 25, 26, 27, 28, 29, 30, 31, 32, 33, 34, 35, 36, 37, 38, 39, 40, 41, 42, 43, 44, 45, 46, 47, 48, 49 or 50 days after the first time point; at least about, at most about or about 1, 2, 3, 4, 5, 6, 7, 8, 9, 10, 11, 12, 13, 14, 15, 16, 17, 18, 19, 20, 21, 22, 23, 24, 25, 26, 27, 28, 29, 30, 31, 32, 33, 34, 35 or 36 weeks after the first time point; or at least about, at most about or about 1, 2, 3, 4, 5, 6, 7, 8, 9, 10, 11, 12, 13, 14, 15, 16, 17, 18, 19, 20, 21, 22, 23, 24, 25, 26, 27, 28, 29, 30, 31, 32, 33, 34, 35 or 36 months after the first time point.

[0197] In some embodiments, the second pharmaceutical composition is administered at the first time point.

[0198] In some embodiments, the second pharmaceutical composition is administered at the second time point.

[0199] In some embodiments, the second pharmaceutical composition is administered at the third time point.

[0200] In some embodiments, the second pharmaceutical composition is administered at least about, at most about or about 2, 3, 4, 5, 6, 7, 8, 9, 10, 11, 12, 13, 14, 15, 16, 17, 18, 19, 20, 21, 22, 23, 24, 25, 26, 27, 28, 29, 30, 31, 32, 33, 34, 35 or 36 days after the first time point; at least about, at most about or about 1, 2, 3, 4, 5, 6, 7, 8, 9, 10, 11, 12, 13, 14, 15, 16, 17, 18, 19, 20, 21, 22, 23, 24, 25, 26, 27, 28, 29, 30, 31, 32, 33, 34, 35 or 36 weeks after the first time point; or at least about, at most about or about 1, 2, 3, 4, 5, 6, 7, 8, 9, 10, 11, 12, 13, 14, 15, 16, 17, 18, 19, 20, 21, 22, 23, 24, 25, 26, 27, 28, 29, 30, 31, 32, 33, 34, 35 or 36 months after the first time point.

[0201] In some embodiments, the second pharmaceutical composition is administered at least about, at most about or about 2, 3, 4, 5, 6, 7, 8, 9, 10, 11, 12, 13, 14, 15, 16, 17, 18, 19, 20, 21, 22, 23, 24, 25, 26, 27, 28, 29, 30, 31, 32, 33, 34, 35 or 36 days after the second time point; at least about, at most about or about 1, 2, 3, 4, 5, 6, 7, 8, 9, 10, 11, 12, 13, 14, 15, 16, 17, 18, 19, 20, 21, 22, 23, 24, 25, 26, 27, 28, 29, 30, 31, 32, 33, 34, 35 or 36 weeks after the second time point; or at least about, at most about or about 1, 2, 3, 4, 5, 6, 7, 8, 9, 10, 11, 12, 13, 14, 15, 16, 17, 18, 19, 20, 21, 22, 23, 24, 25, 26, 27, 28, 29, 30, 31, 32, 33, 34, 35 or 36 months after the second time point.

[0202] Provided herein is a method of treating or preventing an infection by a virus or treating a respiratory disease or condition associated with an infection by a virus comprising administering to a subject in need thereof: (i) a pharmaceutical composition comprising (a) a polypeptide comprising at least two of the following: a sequence comprising an epitope sequence from ORF1ab, a sequence comprising an epitope sequence from membrane glycoprotein (M), and a sequence comprising an epitope sequence from nucleocapsid phosphoprotein (N); or (b) a polynucleotide encoding a polypeptide comprising at least two of the following: a sequence comprising an epitope sequence from ORF1ab, a sequence comprising an epitope sequence from membrane glycoprotein (M), and a sequence comprising an epitope sequence from nucleocapsid phosphoprotein (N); wherein the pharmaceutical composition is administered at a first time point, a second time point and a third time point, wherein the second time point is at least about 2 days after the first time point and the third time point is at least about 2 days after the second time point.

[0203] In some embodiments, the second time point is at least about 3, 4, 5, 6, 7, 8, 9, 10, 11, 12, 13, 14, 15, 16, 17, 18, 19, 20, 21, 22, 23, 24, 25, 26, 27, 28, 29, 30, 31, 32, 33, 34, or 35 days after the first time point, at least about 1, 2, 3, 4, 5, 6, 7, 8, 9, 10, 11, 12, 13, 14, 15, 16, 17, 18, 19, 20, 21, 22, 23, 24, 25, 26, 27, 28, 29, 30, 31, 32, 33, 34, or 35 weeks after the first time point, or at least about 1, 3, 4, 5, 6, 7, 8, 9, 10, 11, 12, 13, 14, 15, 16, 17, 18, 19, 20, 21, 22, 23, 24, 25, 26, 27, 28, 29, 30, 31, 32, 33, 34, or 35 months after the first time point.

[0204] In some embodiments, the second time point is at most about 3, 4, 5, 6, 7, 8, 9, 10, 11, 12, 13, 14, 15, 16, 17, 18, 19, 20, 21, 22, 23, 24, 25, 26, 27, 28, 29, 30, 31, 32, 33, 34, or 35 days after the first time point, at most about 1, 2, 3, 4, 5, 6, 7, 8, 9, 10, 11, 12, 13, 14, 15, 16, 17, 18, 19, 20, 21, 22, 23, 24, 25, 26, 27, 28, 29, 30, 31, 32, 33, 34, or 35 weeks after the first time point, or at most about 1, 3, 4, 5, 6, 7, 8, 9, 10, 11, 12, 13, 14, 15, 16, 17, 18, 19, 20, 21, 22, 23, 24, 25, 26, 27, 28, 29, 30, 31, 32, 33, 34, or 35 months after the first time point.

[0205] In some embodiments, the second time point is about 3, 4, 5, 6, 7, 8, 9, 10, 11, 12, 13, 14, 15, 16, 17, 18, 19, 20, 21, 22, 23, 24, 25, 26, 27, 28, 29, 30, 31, 32, 33, 34, or 35 days after the first time point, about 1, 2, 3, 4, 5, 6, 7, 8, 9, 10, 11, 12, 13, 14, 15, 16, 17, 18, 19, 20, 21, 22, 23, 24, 25, 26, 27, 28, 29, 30, 31, 32, 33, 34, or 35 weeks after the first time point, or about 1, 2, 3, 4, 5, 6, 7, 8, 9, 10, 11, 12, 13, 14, 15, 16, 17, 18, 19, 20, 21, 22, 23, 24, 25, 26, 27, 28, 29, 30, 31, 32, 33, 34, or 35 months after the first time point.

[0206] In some embodiments, the third time point is at least about 3, 4, 5, 6, 7, 8, 9, 10, 11, 12, 13, 14, 15, 16, 17, 18, 19, 20, 21, 22, 23, 24, 25, 26, 27, 28, 29, 30, 31, 32, 33, 34, or 35 days after the second time point, at least about 1, 2, 3, 4, 5, 6, 7, 8, 9, 10, 11, 12, 13, 14, 15, 16, 17, 18, 19, 20, 21, 22, 23, 24, 25, 26, 27, 28, 29, 30, 31, 32, 33, 34, or 35 weeks after the second time point, or at least about 1, 2, 3, 4, 5, 6, 7, 8, 9, 10, 11, 12, 13, 14, 15, 16, 17, 18, 19, 20, 21, 22, 23, 24, 25, 26, 27, 28, 29, 30, 31, 32, 33, 34, or 35 months after the second time point.

[0207] In some embodiments, the third time point is at most about 3, 4, 5, 6, 7, 8, 9, 10, 11, 12, 13, 14, 15, 16, 17, 18, 19, 20, 21, 22, 23, 24, 25, 26, 27, 28, 29, 30, 31, 32, 33, 34, or 35 days after the second time point, at most about 1, 2, 3, 4, 5, 6, 7, 8, 9, 10, 11, 12, 13, 14, 15, 16, 17, 18, 19, 20, 21, 22, 23, 24, 25, 26, 27, 28, 29, 30, 31, 32, 33, 34, or 35 weeks after the second time point, or at most about 1, 2, 3, 4, 5, 6, 7, 8, 9, 10, 11, 12, 13, 14, 15, 16, 17, 18, 19, 20, 21, 22, 23, 24, 25, 26, 27, 28, 29, 30, 31, 32, 33, 34, or 35 months after the second time point.

[0208] In some embodiments, the third time point is about 3, 4, 5, 6, 7, 8, 9, 10, 11, 12, 13, 14, 15, 16, 17, 18, 19, 20, 21, 22, 23, 24, 25, 26, 27, 28, 29, 30, 31, 32, 33, 34 or 35 days after the second time point, about 1, 2, 3, 4, 5, 6, 7, 8, 9, 10, 11, 12, 13, 14, 15, 16, 17, 18, 19, 20, 21, 22, 23, 24, 25, 26, 27, 28, 29, 30, 31, 32, 33, 34, or 35 weeks after the second time point, or about 1, 2, 3, 4, 5, 6, 7, 8, 9, 10, 11, 12, 13, 14, 15, 16, 17, 18, 19, 20, 21, 22, 23, 24, 25, 26, 27, 28, 29, 30, 31, 32, 33, 34, or 35 months after the second time point.

[0209] In some embodiments, the third time point is at least about 4, 5, 6, 7, 8, 9, 10, 11, 12, 13, 14, 15, 16, 17, 18, 19, 20, 21, 22, 23, 24, 25, 26, 27, 28, 29, 30, 31, 32, 33, 34, 35 or 36 days after the first time point, at least about 1, 2, 3, 4, 5, 6, 7, 8, 9, 10, 11, 12, 13, 14, 15, 16, 17, 18, 19, 20, 21, 22, 23, 24, 25, 26, 27, 28, 29, 30, 31, 32, 33, 34, or 35 weeks after the first time point, or at least about 1, 2, 3, 4, 5, 6, 7, 8, 9, 10, 11, 12, 13, 14, 15, 16, 17, 18, 19, 20, 21, 22, 23, 24, 25, 26, 27, 28, 29, 30, 31, 32, 33, 34, or 35 months after the first time point.

[0210] In some embodiments, the third time point is at most about 4, 5, 6, 7, 8, 9, 10, 11, 12, 13, 14, 15, 16, 17, 18, 19, 20, 21, 22, 23, 24, 25, 26, 27, 28, 29, 30, 31, 32, 33, 34, 35 or 36 days after the first time point, at most about 1, 2, 3, 4, 5, 6, 7, 8, 9, 10, 11, 12, 13, 14, 15, 16, 17, 18, 19, 20, 21, 22, 23, 24, 25, 26, 27, 28, 29, 30, 31, 32, 33, 34, or 35 weeks after the first time point, or at most about 1, 2, 3, 4, 5, 6, 7, 8, 9, 10, 11, 12, 13, 14, 15, 16, 17, 18, 19, 20, 21, 22, 23, 24, 25, 26, 27, 28, 29, 30, 31, 32, 33, 34, or 35 months after the first time point.

[0211] In some embodiments, the third time point about 4, 5, 6, 7, 8, 9, 10, 11, 12, 13, 14, 15, 16, 17, 18, 19, 20, 21, 22, 23, 24, 25, 26, 27, 28, 29, 30, 31, 32, 33, 34, 35 or 36 days after the first time point, about 1, 2, 3, 4, 5, 6, 7, 8, 9, 10, 11, 12, 13, 14, 15, 16, 17, 18, 19, 20, 21, 22, 23, 24, 25, 26, 27, 28, 29, 30, 31, 32, 33, 34, or 35 weeks after the first time point, or about 1, 2, 3, 4, 5, 6, 7, 8, 9, 10, 11, 12, 13, 14, 15, 16, 17, 18, 19, 20, 21, 22, 23, 24, 25, 26, 27, 28, 29, 30, 31, 32, 33, 34, or 35 months after the first time point.

[0212] In some embodiments, the method further comprises administering to the subject: (ii)(a) a polypeptide having an amino acid sequence of a 2019 SARS-CoV 2 spike protein or a variant or fragment thereof; (b) a recombinant polynucleotide encoding a 2019 SARS-CoV 2 spike protein or a variant or fragment thereof; or a 2019 SARS-CoV 2 spike protein pharmaceutical composition comprising (ii)(a) or (ii)(b).

[0213] In some embodiments, the subject has an immunodeficiency.

[0214] In some embodiments, the subject has a B cell immunodeficiency.

[0215] In some embodiments, the pharmaceutical composition is administered prophylactically.

[0216] Provided herein is a pharmaceutical composition comprising: (i) a recombinant polynucleotide encoding a polypeptide comprising at least two of the following: a sequence comprising an epitope sequence from ORF1ab, a sequence comprising an epitope sequence from membrane glycoprotein (M), and a sequence comprising an epitope sequence from nucleocapsid phosphoprotein (N); and (ii) a recombinant polynucleotide encoding a 2019 SARS-CoV 2 spike protein or a variant or fragment thereof; wherein the ratio (e.g., mass ratio) of (i):(ii) is greater than 20:1 or less than 1:20.

[0217] In some embodiments, the ratio (e.g., mass ratio) of (i):(ii) is greater than 20:1, 30:1, 40:1, 50:1, 60:1, 70:1, 80:1, 90:1 or 100:1

[0218] In some embodiments, the ratio (e.g., mass ratio) of (i):(ii) is less than 1:20, 1:30, 1:40, 1:50, 1:60, 1:70, 1:80, 1:90 or 1:100.

[0219] Provided herein is a composition comprising: (i) a first pharmaceutical composition comprising a first recombinant polynucleotide encoding a polypeptide comprising at least two of the following: a sequence comprising an epitope sequence from ORF1ab, a sequence comprising an epitope sequence from membrane glycoprotein (M), and a sequence comprising an epitope sequence from nucleocapsid phosphoprotein (N); and (ii) a second pharmaceutical composition comprising a second recombinant polynucleotide encoding a 2019 SARS-CoV 2 spike protein or a variant or fragment thereof; wherein the ratio (e.g., mass ratio) of the recombinant polynucleotide in (i) to the recombinant polynucleotide in (ii) is from 1:50 to 50:1.

[0220] In some embodiments, the ratio (e.g., mass ratio) of the recombinant polynucleotide in (i) to the recombinant polynucleotide in (ii) is from about 1:25 to 25:1.

[0221] In some embodiments, the ratio (e.g., mass ratio) of the recombinant polynucleotide in (i) to the recombinant polynucleotide in (ii) is from about 1:10 to 10:1.

[0222] In some embodiments, the ratio (e.g., mass ratio) of the recombinant polynucleotide in (i) to the recombinant polynucleotide in (ii) is about 1:10, 1:9, 1:8, 1:7, 1:6, 1:5, 1:4, 1:3, 1:2, 1:1, 2:1, 3:1, 4:1, 5:1, 6:1, 7:1, 8:1, 9:1, 10:1, 1:9.5, 1:8.5, 1:7.5, 1:6.5, 1:5.5, 1:4.5, 1:3.5, 1:2.5, 1:1.5, 2.5:1, 3.5:1, 4.5:1, 5.5:1, 6.5:1, 7.5:1, 8.5:1, 9.5:1, 2:9, 2:8, 2:7, 2:6, 2:5, 2:4, 2:3, 3:2, 4:2, 5:2, 6:2, 7:2, 8:2, 9:2, 3:8, 3:7, 3:5, 3:4, 4:3, 5:3, 7:3, 8:3, 4:9, 4:7, 4:5, 5:4, 7:4, 9:4, 5:9, 5:8, 5:7, 5:6, 6:5, 7:5, 8:5, 9:5, 6:7, 7:6, 7:8, 8:7, 8:9 or 9:8. In some embodiments, the ratio (e.g., mass ratio) of the recombinant polynucleotide in (i) to the recombinant polynucleotide in (ii) is about 1:6. In some embodiments, the ratio (e.g., mass ratio) of the recombinant polynucleotide in (i) to the recombinant polynucleotide in (ii) is about 1:3. In some embodiments, the ratio (e.g., mass ratio) of the recombinant polynucleotide in (i) to the recombinant polynucleotide in (ii) is about 1:2.

[0223] In some embodiments, the recombinant polynucleotide in (i) is present at a dose of from 0.1 microgram to 100 micrograms, or 1 microgram to 50 micrograms, or 1 microgram to 30 micrograms, or 1 microgram to 20 micrograms, or 3 micrograms to 20 micrograms, or 5 micrograms to 15 micrograms. In some embodiments, the recombinant polynucleotide in (i) is present at a dose of from 0.05 microgram to 10 micrograms, or 0.1 microgram to 5 micrograms, or 0.3 microgram to 5 micrograms. In some embodiments, the recombinant polynucleotide in (i) is present at a dose of from 0.1 microgram to 20 micrograms or from 0.5 microgram to 15 micrograms.

[0224] In some embodiments, the recombinant polynucleotide in (ii) is present at a dose of from 0.1 microgram to 100 micrograms, or 1 microgram to 100 micrograms, or 1 microgram to 30 micrograms, or 1 microgram to 20 micrograms, or 3 micrograms to 30 micrograms.

[0225] In some embodiments, the recombinant polynucleotide in (ii) encompasses at least two recombinant polynucleotide, each encoding a SARS-CoV-2 S protein of a different strain or variant thereof. For example, in some embodiments, the recombinant polynucleotide in (ii) encompasses a recombinant polynucleotide encoding a SARS-CoV-2 protein of a Wuhan strain and a recombinant polynucleotide encoding a SARS-CoV-2 protein having one or more mutations that are characteristics of a SARS-CoV-2 variant (e.g., in some embodiments an Omicron variant such as, e.g., a Omicron BA.4 or BA.5).

[0226] In some embodiments, the recombinant polynucleotide in (i) is present at a dose of about 5 micrograms and the recombinant polynucleotide in (ii) is present at a dose of about 30 micrograms. In some embodiments, the recombinant polynucleotide in (i) is present at a dose of about 10 micrograms and the recombinant polynucleotide in (ii) is present at a dose of about 30 micrograms. In some embodiments, the recombinant polynucleotide in (i) is present at a dose of about 15 micrograms and the recombinant polynucleotide in (ii) is present at a dose of about 30 micrograms.

[0227] Provided herein is a pharmaceutical composition comprising a nanoparticle, wherein the nanoparticle comprises: (i) a first recombinant polynucleotide encoding a polypeptide comprising at least two of the following: a sequence comprising an epitope sequence from ORF1ab, a sequence comprising an epitope sequence from membrane glycoprotein (M), and a sequence comprising an epitope sequence from nucleocapsid phosphoprotein (N); and (ii) a second recombinant polynucleotide encoding a 2019 SARS-CoV 2 spike protein or a variant or fragment thereof.

[0228] In some embodiments, the nanoparticle is present in the pharmaceutical composition at a dose of from 100 ng to 500 micrograms.

[0229] In some embodiments, the nanoparticle is present in the pharmaceutical composition at a dose of from 1 microgram to 100 micrograms.

[0230] In some embodiments, the nanoparticle is present in the pharmaceutical composition at a dose of from 1 microgram to 30 micrograms, 5 micrograms to 40 micrograms or 10 microgram to 50 micrograms.

[0231] In some embodiments, the nanoparticle is present in the pharmaceutical composition at a dose of 0.1, 0.2, 0.3, 0.4, 0.5, 0.6, 0.7, 0.8, 0.9, 1, 2, 3, 4, 5, 6, 7, 8, 9, 10, 15, 20, 25, 30, 35, 40, 45, 50, 55, 60, 65, 70, 75, 80, 85, 90, 95, 100, 150, 200, 250, 300, 350, 400, 450, 500, 600, 700, 800, 900 or 1,000 micrograms.

[0232] In some embodiments, the ratio (e.g., mass ratio) of the first recombinant polynucleotide to the second recombinant polynucleotide is from about 1:50 to 50:1.

[0233] In some embodiments, the ratio (e.g., mass ratio) of the first recombinant polynucleotide to the second recombinant polynucleotide is from about 1:25 to 25:1.

[0234] In some embodiments, the ratio (e.g., mass ratio) of the first recombinant polynucleotide to the second recombinant polynucleotide is from about 1:10 to 10:1.

[0235] In some embodiments, the ratio (e.g., mass ratio) of the first recombinant polynucleotide to the second recombinant polynucleotide is about 1:10, 1:9, 1:8, 1:7, 1:6, 1:5, 1:4, 1:3, 1:2, 1:1, 2:1, 3:1, 4:1, 5:1, 6:1, 7:1, 8:1, 9:1, 10:1, 1:9.5, 1:8.5, 1:7.5, 1:6.5, 1:5.5, 1:4.5, 1:3.5, 1:2.5, 1:1.5, 2.5:1, 3.5:1, 4.5:1, 5.5:1, 6.5:1, 7.5:1, 8.5:1, 9.5:1, 2:9, 2:8, 2:7, 2:6, 2:5, 2:4, 2:3, 3:2, 4:2, 5:2, 6:2, 7:2, 8:2, 9:2, 3:8, 3:7, 3:5, 3:4, 4:3, 5:3, 7:3, 8:3, 4:9, 4:7, 4:5, 5:4, 7:4, 9:4, 5:9, 5:8, 5:7, 5:6, 6:5, 7:5, 8:5, 9:5, 6:7, 7:6, 7:8, 8:7, 8:9 or 9:8. In some embodiments, the ratio (e.g., mass ratio) of the first recombinant polynucleotide to the second recombinant polynucleotide is about 1:6. In some embodiments, the ratio (e.g., mass ratio) of the first recombinant polynucleotide to the second recombinant polynucleotide is about 1:3. In some embodiments, the ratio (e.g., mass ratio) of the first recombinant polynucleotide to the second recombinant polynucleotide is about 1:2.

[0236] In some embodiments, the first recombinant polynucleotide is present in a pharmaceutical composition at a dose of from 0.1 microgram to 100 micrograms, or 1 microgram to 50 micrograms, or 1 microgram to 30 micrograms, or 1 microgram to 20 micrograms, or 3 micrograms to 20 micrograms, or 5 micrograms to 15 micrograms. In some embodiments, the first recombinant polynucleotide is present in a pharmaceutical composition at a dose of from 0.05 microgram to 10 micrograms, or 0.1 microgram to 5 micrograms, or 0.3 microgram to 5 micrograms. In some embodiments, the first recombinant polynucleotide is present in a pharmaceutical composition at a dose of from 0.1 microgram to 20 micrograms or from 0.5 microgram to 15 micrograms.

[0237] In some embodiments, the second recombinant polynucleotide is present in a pharmaceutical composition at a dose of from 0.1 microgram to 100 micrograms, or 1 microgram to 100 micrograms, or 1 microgram to 30 micrograms, or 1 microgram to 20 micrograms, or 3 micrograms to 30 micrograms.

[0238] In some embodiments, the second recombinant polynucleotide encompasses at least two recombinant polynucleotide, each encoding a SARS-CoV-2 S protein of a different strain or variant thereof. For example, in some embodiments, the second recombinant polynucleotide encompasses a recombinant polynucleotide encoding a SARS-CoV-2 S protein of a Wuhan strain and a recombinant polynucleotide encoding a SARS-CoV-2 S protein having one or more mutations that are characteristics of a SARS-CoV-2 variant (e.g., in some embodiments an Omicron variant such as, e.g., an Omicron BA.1, BA.2, BA.4 or BA.5 variant).

[0239] Provided herein is a composition comprising: (i) a first pharmaceutical composition comprising a first nanoparticle, wherein the first nanoparticle comprises a recombinant polynucleotide encoding a polypeptide comprising at least two of the following: a sequence comprising an epitope sequence from ORF1ab, a sequence comprising an epitope sequence from membrane glycoprotein (M), and a sequence comprising an epitope sequence from nucleocapsid phosphoprotein (N); and (ii) a second pharmaceutical composition comprising a second nanoparticle, wherein the second nanoparticle comprises a recombinant polynucleotide encoding a 2019 SARS-CoV 2 spike protein or a variant or fragment thereof.

[0240] In some embodiments, the ratio (e.g., mass ratio) of the recombinant polynucleotide in (i) to the recombinant polynucleotide in (ii) is from about 1:50 to 50:1.

[0241] In some embodiments, the ratio (e.g., mass ratio) of the recombinant polynucleotide in (i) to the recombinant polynucleotide in (ii) is from about 1:25 to 25:1.

[0242] In some embodiments, the ratio (e.g., mass ratio) of the recombinant polynucleotide in (i) to the recombinant polynucleotide in (ii) is from about 1:10 to 10:1.

[0243] In some embodiments, the ratio (e.g., mass ratio) of the recombinant polynucleotide in (i) to the recombinant polynucleotide in (ii) is about 1:10, 1:9, 1:8, 1:7, 1:6, 1:5, 1:4, 1:3, 1:2, 1:1, 2:1, 3:1, 4:1, 5:1, 6:1, 7:1, 8:1, 9:1, 10:1, 1:9.5, 1:8.5, 1:7.5, 1:6.5, 1:5.5, 1:4.5, 1:3.5, 1:2.5, 1:1.5, 2.5:1, 3.5:1, 4.5:1, 5.5:1, 6.5:1, 7.5:1, 8.5:1, 9.5:1, 2:9, 2:8, 2:7, 2:6, 2:5, 2:4, 2:3, 3:2, 4:2, 5:2, 6:2, 7:2, 8:2, 9:2, 3:8, 3:7, 3:5, 3:4, 4:3, 5:3, 7:3, 8:3, 4:9, 4:7, 4:5, 5:4, 7:4, 9:4, 5:9, 5:8, 5:7, 5:6, 6:5, 7:5, 8:5, 9:5, 6:7, 7:6, 7:8, 8:7, 8:9 or 9:8. In some embodiments, the ratio (e.g., mass ratio) of the recombinant polynucleotide in (i) to the recombinant polynucleotide in (ii) is about 1:6. In some embodiments, the ratio (e.g., mass ratio) of the recombinant polynucleotide in (i) to the recombinant polynucleotide in (ii) is about 1:3. In some embodiments, the ratio (e.g., mass ratio) of the recombinant polynucleotide in (i) to the recombinant polynucleotide in (ii) is about 1:2.

[0244] In some embodiments, the recombinant polynucleotide in (i) is present at a dose of from 0.1 microgram to 100 micrograms, or 1 microgram to 50 micrograms, or 1 microgram to 30 micrograms, or 1 microgram to 20 micrograms, or 3 micrograms to 20 micrograms, or 5 micrograms to 15 micrograms. In some embodiments, the recombinant polynucleotide in (i) is present at a dose of from 0.05 microgram to 10 micrograms, or 0.1 microgram to 5 micrograms, or 0.3 microgram to 5 micrograms. In some embodiments, the recombinant polynucleotide in (i) is present at a dose of from 0.1 microgram to 20 micrograms or from 0.5 microgram to 15 micrograms.

[0245] In some embodiments, the recombinant polynucleotide in (ii) is present at a dose of from 0.1 microgram to 100 micrograms, or 1 microgram to 100 micrograms, or 1 microgram to 30 micrograms, or 1 microgram to 20 micrograms, or 3 micrograms to 30 micrograms.

[0246] In some embodiments, the recombinant polynucleotide in (ii) encompasses at least two recombinant polynucleotide, each encoding a SARS-CoV-2 S protein of a different strain or variant thereof. For example, in some embodiments, the recombinant polynucleotide in (ii) encompasses a recombinant polynucleotide encoding a SARS-CoV-2 protein of a Wuhan strain and a recombinant polynucleotide encoding a SARS-CoV-2 protein having one or more mutations that are characteristics of a SARS-CoV-2 variant (e.g., in some embodiments an Omicron variant such as, e.g., a Omicron BA.4 or BA.5).

[0247] In some embodiments, the first nanoparticle is present in the first pharmaceutical composition at a dose of from about 100 ng to 500 micrograms.

[0248] In some embodiments, the first nanoparticle is present in the first pharmaceutical composition at a dose of from about 1 microgram to 100 micrograms.

[0249] In some embodiments, the first nanoparticle is present in the first pharmaceutical composition at a dose of from about 1 microgram to 30 micrograms, 5 micrograms to 40 micrograms or 10 microgram to 50 micrograms.

[0250] In some embodiments, the first nanoparticle is present in the first pharmaceutical composition at a dose of about 0.1, 0.2, 0.3, 0.4, 0.5, 0.6, 0.7, 0.8, 0.9, 1, 2, 3, 4, 5, 6, 7, 8, 9, 10, 15, 20, 25, 30, 35, 40, 45, 50, 55, 60, 65, 70, 75, 80, 85, 90, 95, 100, 150, 200, 250, 300, 350, 400, 450, 500, 600, 700, 800, 900 or 1,000 micrograms.

[0251] In some embodiments, the second nanoparticle is present in the second pharmaceutical composition at a dose of from about 100 ng to 500 micrograms.

[0252] In some embodiments, the second nanoparticle is present in the second pharmaceutical composition at a dose of from about 1 microgram to 100 micrograms.

[0253] In some embodiments, the second nanoparticle is present in the second pharmaceutical composition at a dose of from about 1 microgram to 30 micrograms, 5 micrograms to 40 micrograms or 10 microgram to 50 micrograms.

[0254] In some embodiments, the second nanoparticle is present in the second pharmaceutical composition at a dose of about 0.1, 0.2, 0.3, 0.4, 0.5, 0.6, 0.7, 0.8, 0.9, 1, 2, 3, 4, 5, 6, 7, 8, 9, 10, 15, 20, 25, 30, 35, 40, 45, 50, 55, 60, 65, 70, 75, 80, 85, 90, 95, 100, 150, 200, 250, 300, 350, 400, 450, 500, 600, 700, 800, 900 or 1,000 micrograms.

[0255] In some embodiments, the recombinant polynucleotide in (i) is present in the first pharmaceutical composition at a dose of from about 50 ng to 250 micrograms.

[0256] In some embodiments, the recombinant polynucleotide in (i) is present in the first pharmaceutical composition at a dose of from about 0.5 to 50 micrograms.

[0257] In some embodiments, the recombinant polynucleotide in (i) is present in the first pharmaceutical composition at a dose of from about 0.5 microgram to 15 micrograms, 2.5 micrograms to 20 micrograms or 5 microgram to 25 micrograms.

[0258] In some embodiments, the recombinant polynucleotide in (i) is present in the first pharmaceutical composition at a dose of about 0.05, 0.1, 0.2, 0.3, 0.4, 0.5, 0.6, 0.7, 0.8, 0.9, 1, 2, 3, 4, 5, 6, 7, 8, 9, 10, 15, 20, 25, 30, 35, 40, 45, 50, 55, 60, 65, 70, 75, 80, 85, 90, 95, 100, 150, 200, 250, 300, 350, 400, 450 or 500 micrograms.

[0259] In some embodiments, the recombinant polynucleotide in (ii) is present in the second pharmaceutical composition at a dose of from about 50 ng to 250 micrograms.

[0260] In some embodiments, the recombinant polynucleotide in (ii) is present in the second pharmaceutical composition at a dose of from about 0.5 to 50 micrograms.

[0261] In some embodiments, the recombinant polynucleotide in (ii) is present in the second pharmaceutical composition at a dose of from about 0.5 microgram to 15 micrograms, 2.5 micrograms to 20 micrograms or 5 microgram to 25 micrograms.

[0262] In some embodiments, the recombinant polynucleotide in (ii) is present in the second pharmaceutical composition at a dose of about 0.05, 0.1, 0.2, 0.3, 0.4, 0.5, 0.6, 0.7, 0.8, 0.9, 1, 2, 3, 4, 5, 6, 7, 8, 9, 10, 15, 20, 25, 30, 35, 40, 45, 50, 55, 60, 65, 70, 75, 80, 85, 90, 95, 100, 150, 200, 250, 300, 350, 400, 450 or 500 micrograms.

[0263] In some embodiments, the nanoparticle is a lipid nanoparticle.

[0264] Provided herein is a method of treating or preventing an infection by a virus or treating a respiratory disease or condition associated with an infection by a virus comprising administering to a subject in need thereof a pharmaceutical composition comprising: (i) a polypeptide comprising at least two of the following (a) a sequence comprising an epitope sequence from ORF1ab, (b) a sequence comprising an epitope sequence from membrane glycoprotein (M) and (c) a sequence comprising an epitope sequence from nucleocapsid phosphoprotein (N); (ii) a polynucleotide encoding a polypeptide, wherein the polypeptide comprises at least two of the following (a) a sequence comprising an epitope sequence from ORF1ab, (b) a sequence comprising an epitope sequence from membrane glycoprotein (M) and (c) a sequence comprising an epitope sequence from nucleocapsid phosphoprotein (N); (iii) a T cell receptor (TCR) or a T cell comprising the TCR, wherein the TCR binds to an epitope sequence of the polypeptide in complex with a corresponding HLA class I or class II molecule; (iv) an antigen presenting cell comprising (i) or (ii); or (v) an antibody or B cell comprising the antibody, wherein the antibody binds to an epitope sequence of the polypeptide.

[0265] In some embodiments, the subject has an immunodeficiency.

[0266] In some embodiments, the subject has a B cell immunodeficiency.

[0267] In some embodiments, the subject has a reduced ability to produce an antibody response to an antigen compared to a subject without an immunodeficiency.

[0268] In some embodiments, the subject has a reduced ability to produce an antibody response to a vaccination compared to a subject without an immunodeficiency.

[0269] In some embodiments, the subject has a reduced ability to produce an anti-spike protein antibody response and/or an anti-RBD antibody response compared to a subject without an immunodeficiency.

[0270] In some embodiments, the subject can produce a T cell response or does not have a reduced ability to produce a T cell response compared to a subject without an immunodeficiency.

[0271] In some embodiments, the pharmaceutical composition is protective against a variant of 2019 SARS CoV-2.

[0272] In some embodiments, the variant of 2019 SARS CoV-2 is alpha, beta, gamma, delta, epsilon, zeta, eta, theta, iota, kappa or lambda.

[0273] In some embodiments, the subject produces a T cell response to an epitope of the polypeptide.

[0274] In some embodiments, the subject produces a T cell response to the epitope sequence from ORF1ab, the epitope sequence from membrane glycoprotein (M) and/or the epitope sequence from nucleocapsid phosphoprotein (N).

[0275] In some embodiments, the subject is an organ transplant recipient.

[0276] In some embodiments, the organ transplant recipient is a sold organ transplant recipient, a stem cell transplant recipient or a bone marrow transplant recipient.

[0277] In some embodiments, the subject received an organ transplant less than 1 year, less than 6 months or less than 3 months after the pharmaceutical composition is administered.

[0278] In some embodiments, the subject is expected to receive an organ transplant less than 1 year, less than 6 months or less than 3 months prior to the pharmaceutical composition being administered.

[0279] In some embodiments, the subject has a cancer.

[0280] In some embodiments, the cancer is a B cell cancer.

[0281] In some embodiments, the B cell cancer is a B cell lymphoma or a B cell leukemia.

[0282] In some embodiments, the subject has an autoimmune disease or condition.

[0283] In some embodiments, the autoimmune disease or condition is Addison disease, Anti-NMDA receptor encephalitis, antisynthetase syndrome, Aplastic anemia, autoimmune anemias, Autoimmune hemolytic anemia, Autoimmune pancreatitis, Behcet's Disease, bullous skin disorders, Celiac disease-sprue, chronic fatigue syndrome, Chronic inflammatory demyelinating polyneuropathy, chronic lymphocytic leukemia, Crohn's disease, Dermatomyositis, Devic's disease, Erythroblastopenia, Evans syndrome, Focal segmental glomerulosclerosis, Granulomatosis with polyangiitis, Graves disease, Graves' ophthalmopathy, Guillain-Barre syndrome, Hashimoto thyroiditis, idiopathic thrombocytopenia purpura (ITP), IgA nephropathy, IgA-mediated autoimmune diseases, IgG4-related disease, Inflammatory bowel disease, Juvenile idiopathic arthritis, Multiple sclerosis, Myasthenia gravis, myeloma, non-Hodgkin's lymphoma, Opsoclonus myoclonus syndrome (OMS), Pemphigoid, Pemphigus, pemphigus vulgaris, Pernicious anemia, polymyositis, Psoriasis, pure red cell aplasia, Reactive arthritis, Rheumatoid arthritis, Sarcoidosis, scleroderma, Sjögren syndrome, Systemic lupus erythematosus, Thrombocytopenia purpura, Thrombotic thrombocytopeniaurpura, Type I diabetes, Ulcerative colitis, Vasculitis and Vitiligo.

[0284] In some embodiments, the subject has congenital agammaglobulinemia or congenital IgA deficiency.

[0285] In some embodiments, the subject has HIV or AIDS. In some embodiments, the subject has an age-related decline in immunity, immunosenescence, multifactoral immunodeficiency, or is an elderly or older adult with an age-related immunodeficiency.

[0286] In some embodiments, the subject is receiving an immunosuppressive agent or has received an immunosuppressive agent less than 1 year, less than 6 months or less than 3 months prior to the administering of the pharmaceutical composition.

[0287] In some embodiments, the immunosuppressive agent is abatacept, abrilumab, acalabrutinib, adalimumab, adrenocorticotropic hormone, agatolimod sodium, aldesleukin, alefacept, alemtuzumab, alisertib, alvespimycin hydrochloride, alvocidib, ambrisentan, aminocamptothecin, amiselimod, anakinra, andecaliximab, andrographolides, anifrolumab, antithymocyte Ig, apatinib, apelisib, asparaginase, atacicept, atezolizumab, avelumab, azacitidine, azathioprine, bafetinib, baminercept, baricitinib, basiliximab, becatecarin, begelomab, belatacept, belimumab, bemcentinib, bendamustine, bendamustine, betalutin with lilotomab, bevacizumab, BIIB033, BIIB059, BIIB061, bimekizumab, binimetinib, bleomycin, blinatumomab, bortezomib, brentuximab vedotin, bryostatin 1, bucillamine, buparlisib, busulfan, canakinumab, capecitabine, carboplatin, carfilzomib, carmustine, cediranib maleate, cemiplimab, ceralifimod, cerdulatinib, certolizumab, cetuximab, chidamide, chlorambucil, cilengitide, cirmtuzumab, cisplatin, cladribine, clazakizumab, clemastine, clioquinol, corticosteroids, cyclophosphamide, cyclosporine, cytarabine, cytotoxic chemotherapy, daclizumab, dalfampridine, daprolizumab pegol, daratumumab, dasatinib, defactinib, defibrotide, denosumab, dexamethasone, diacerein, dimethyl fumarate, dinaciclib, diroximel fumarate, doxorubicin, doxorubicin, durvalumab, duvelisib, duvortuxizumab, eculizumab, efalizumab, eftilagimod alpha, a neuropeptide combination of metenkefalin and tridecactide, elezanumab, elotuzumab, encorafenib, enfuvirtida, entinostat, entospletinib, enzastaurin, epacadostat, epirubicin, epratuzumab, eritoran tetrasodium, etanercept, etoposide, etrolizumab, everolimus, evobrutinib, filgotinib, fingolimod, firategrast, fludarabine, fluorouracil, fontolizumab, forodesine hydrochloride, fostamatinib, galunisertib, ganetespib, ganitumab, gemcitabine, gemtuzumab ozogamicin, gerilimzumab, glasdegib, glassia, glatiramer acetate, glembatumumab vedotin, glesatinib, golimumab, guadecitabine, hydrocortisone, hydroxychloroquine sulfate, hydroxyurea, ibritumomab tiuxetan, ibrutinib, ibudilast, idarubicin, idebenone, idelalisib, ifosfamide, iguratimod, imatinib, imexon, infliximab, inotuzumab ozogamicin, interferon alfa-2, interferon beta-la, interferon beta-1b, interferon gamma-1, ipilimumab, irofulven, isatuximab, ispinesib, itacitinib, ixazomib, lapatinib, laquinimod, laromustine, ld-aminopterin, leflunomide, lenalidomide, lenvatinib, letrozole, levamisole, levocabastine, lipoic acid, lirilumab, lonafarnib, lumiliximab, maraviroc, masitinib, mavrilimumab, melphalan, mercaptopurine, methotrexate, methoxsalen, methylprednisone, milatuzumab, mitoxantrone, mizoribine, mocetinostat, monalizumab, mosunetuzumab, motesanib diphosphate, moxetumomab pasudotox, muromonab-CD3, mycophenolate mofetil, mycophenolic acid, namilumab, natalizumab, navitoclax, neihulizumab, nerispirdine, neurovax, niraparib, nivolumab, obatoclax mesylate, obinutuzumab, oblimersen sodium, ocrelizumab, ofatumumab, olokizumab, opicinumab, oprelvekin, osimertinib, otelixizumab, oxaliplatin, oxcarbazepine, ozanimod, paclitaxel, pacritinib, palifermin, panobinostat, pazopanib, peficitinib, pegfilgrastim, peginterferon beta-la, pegsunercept (peg stnf-ri), pembrolizumab, pemetrexed, penclomedine, pentostatin, perifosine, pevonedistat, pexidartinib, picoplatin, pidilizumab, pivanex, pixantrone, pleneva, plovamer acetate, polatuzumab vedotin, pomalidomide, ponatinib, ponesimod, prednisone/prednisolone, pyroxamide, ravulizimab-cwvz, recombinant il-12, relatlimab, rhigf-1, rhigm22, rigosertib, rilonacept, ritonavir, rituximab, ruxolitinib, sarilumab, secukinumab, selumetinib, simvastatin, sintilimab, siplizumab, siponimod, sirolimus (rapamycin), sirukumab, sitravatinib, sonidegib, sorafenib, sotrastaurin acetate, sunitinib, sunphenon epigallocatechin-gallate, tabalumab, tacrolimus, talabostat mesylate, talacotuzumab, tanespimycin, tegafur/gimeracil/oteracil, temozolomide, temsirolimus, tenalisib, terameprocol, teriflunomide, thalidomide, thiarabine, thiotepa, tipifarnib, tirabrutinib, tislelizumab, tivozanib, tocilizumab, tofacitinib, tregalizumab, tremelimumab, treosulfan, ublituximab, umbralisib, upadacitinib, urelumab, ustekinumab, varlilumab, vatelizumab, vedolizumab, veliparib, veltuzumab, venetoclax, vinblastine, vincristine, vinorelbine ditartrate, visilizumab, vismodegib, vistusertib, voriconazole, vorinostat, vosaroxin, ziv-aflibercept or any combination thereof.

[0288] In some embodiments, the immunosuppressive agent is A2aR antagonist, Akt inhibitor, anti CD20, Anti-amyloidotic (AA) Agent, anti-CD37 protein therapeutic, anti-CTLA4 mAb, Anti-CXCR4, anti-huCD40 mAb, anti-LAG3 mAb, anti-PD-1 mAb, anti-PD-L1 agent, anti-PD-L1 agent, anti-PD-L1 mAb, anti-TGFb mAb, anti-TIGIT mAb, anti-TIM-3 mAb, Aurora kinase inhibitor, Bcl-2 Inhibitor, bifunctional fusion protein targeting TGFb and PD-L1, bispecific anti-PD-1 and anti-LAG3 mAb, CD1d ligand, CD40 agonist, Complement C5a inhibitor, CSF1R inhibitor, EZH2 inhibitor, FGFR3 inhibitor, FGFR4 inhibitor, FGFrR3 inhibitor, glucocorticoid-induced tumor necrosis factor receptor-related gene agonist, glutaminase inhibitor, Human monoclonal antibody against IL-12, ICOS agonist, IDO1 inhibitor, IL2 mutein, IL2 receptor agonist, MEK inhibitor, multitargeted receptor tyrosine kinase inhibitor, neutrophil elastase inhibitor, Notch Inhibitor, p38 MAPK inhibitor, PD-1 inhibitor, recombinant human Flt3L, ROCK inhibitor, selective sphingosine-1-phosphate receptor modulator, Src kinase inhibitor, TLR4 agonist, TLR9 agonist, or any combination thereof.

[0289] In some embodiments, the subject is greater than 55, 56, 57, 58, 59, 60, 65, 70, 75 or 80 years of age.

[0290] In some embodiments, the polypeptide comprises (a) a sequence comprising an epitope sequence from ORF1ab, (b) a sequence comprising an epitope sequence from membrane glycoprotein (M) and (c) a sequence comprising an epitope sequence from nucleocapsid phosphoprotein (N).

[0291] In some embodiments, the sequence comprising an epitope sequence from ORF1ab is C-terminal to the sequence comprising an epitope sequence from nucleocapsid phosphoprotein (N).

[0292] In some embodiments, the sequence comprising an epitope sequence from ORF1ab is N-terminal to the sequence comprising an epitope sequence from membrane glycoprotein (M).

[0293] In some embodiments, the sequence comprising an epitope sequence from nucleocapsid phosphoprotein (N) is N-terminal to the sequence comprising an epitope sequence from membrane glycoprotein (M).

[0294] In some embodiments, the polypeptide comprises (a) 2, 3, 4, 5, 6, 7, 8, 9 or 10 or more epitope sequences from ORF1ab, (b) a sequence comprising an epitope sequence from membrane glycoprotein (M) and (c) a sequence comprising an epitope sequence from nucleocapsid phosphoprotein (N).

[0295] In some embodiments, the epitope sequence from ORF1ab is an epitope sequence from a non-structural protein (NSP).

[0296] In some embodiments, the non-structural protein (NSP) is selected from the group consisting of NSP1, NSP2, NSP3, NSP4 and combinations thereof.

[0297] In some embodiments, the polypeptide comprises a sequence comprising an epitope sequence from NSP1, a sequence comprising an epitope sequence from NSP2, a sequence comprising an epitope sequence from NSP3 and a sequence comprising an epitope sequence from NSP4.

[0298] In some embodiments, the epitope sequence from ORF1ab is selected from the group consisting of YLFDESGEFKL, YLFDESGEF, FGDDTVIEV, QLMCQPILL, TTDPSFLGRY, PTDNYITTY, PSFLGRY, AEAELAKNV, KTIQPRVEK and any combination thereof.

[0299] In some embodiments, the epitope sequence from nucleocapsid glycoprotein (N) is LLLDRLNQL.

[0300] In some embodiments, the epitope sequence from membrane phosphoprotein (M) is VATSRTLSY.

[0301] In some embodiments, the polypeptide comprises an epitope sequence from nucleocapsid glycoprotein (N) that is LLLDRLNQL and an epitope sequence from membrane phosphoprotein (M) that is VATSRTLSY.

[0302] In some embodiments, the polypeptide comprises (a) each of the following epitope sequences from ORF1ab: YLFDESGEFKL, YLFDESGEF, FGDDTVIEV, QLMCQPILL, TTDPSFLGRY, PTDNYITTY, PSFLGRY, AEAELAKNV, KTIQPRVEK; (b) an epitope sequence from nucleocapsid glycoprotein (N) that is LLLDRLNQL; and (c) an epitope sequence from membrane phosphoprotein (M) that is VATSRTLSY.

[0303] In some embodiments, the sequence comprising an epitope sequence from ORF1ab is selected from the group fragments thereof: consisting of the following sequences or

MVTNNTFTLKVPHVGEIPVAYRKVLLKTIQPRVEKYLFDESGEFKLSEVG
PEHSLAEYYIFFASFYY; MVTNNTFTLKVPHVGEIPVAYRKVLLKTIQP
RVEKYLFDESGEFKLSEVGPEHSLAEY; APKEIIFLEGETLFGDDTVIE
VAIILASFSAST; APKEIIFLEGETLFGDDTVIEV; HTTDPSFLGRYM
SALFADDLNQLTGYHTDFSSEIIGYQLMCQPILLAEAELAKNVSLILGTV
SWNL; TTDPSFLGRYMSALFADDLNQLTGYHTDFSSEIIGYQLMCQPIL
LAEAELAKNVSLILGTVSWNL; LLSAGIFGAITDVFYKENSYKVPTDNY
ITTY; and combinations thereof.

[0304] In some embodiments, the sequence comprising an epitope sequence from membrane glycoprotein (M) is selected from the group consisting of the following sequences or fragments thereof:

ADSNGTITVEELKKLLEQWNLVIGFLFLTWICLLQFAYANRNRFLYIIKL
IFLWLLWPVTLACFVLAAVYRINWITGGIAIAMACLVGLMWLSYFIASFR
LFARTRSMWSFNPETNILLNVPLHGTILTRPLLESELVIGAVILRGHLRI
AGHHLGRCDIKDLPKEITVATSRTLSYYKLGASQRVAGDSGFAAYSRYRI
GNYKLNTDHSSSSDNIALLVQ; FAYANRNRFLYIIKLIFLWLLWPVTLA
CFVLAAVYRINWITGGIAIAMACLVGLMWLSYFIASFRLF; LGRCDIKD
LPKEITVATSRTLSYYKLGASQRVA; KLLEQWNLVIGF; NRNRFLYII
KLIFLWLLWPVTLACFVLAAVY; SELVIGAVILRGHLRIAGHHLGR;
VATSRTLSYYKLGASQRV; GLMWLSYF; and combinations
thereof.

[0305] In some embodiments, the sequence comprising an epitope sequence from nucleocapsid phosphoprotein (N) is selected from the group consisting of the following sequences or fragments thereof:

KDLSPRWYFYYLGTGPEAGLPYGANKDGIIWVATEGALNTPKDHIGTRNP
ANNAAIVLQLPQGTTLPKGFYAEGSRGGSQASSRSSSRSRNSSRNSTPGS
SRGTSPARMAGNGGDAALALLLLDRLNQLESKMSGKGQQQQGQTVTKKSA
AEASKKPRQKRTATKAYNVTQAFGRRGPEQTQGNFGDQELIRQGTDYKHW
PQIAQFAPSASAFFGMSRIGMEVTPSGTWLTYTGAIKLDDKDPNFKDQVI
LLNKHIDAYKTFPPTEPKKDKKKKADETQALPQRQKKQQTVTLLPAADLD
DFSKQLQQSMSSADSTQA; RMAGNGGDAALALLLLDRLNQLESKMSGKG
QQQ; YKHWPQIAQFAPSASAFFGMSRIGMEVTPSGTWLTYTGAIKLDDK
DPNFKDQVILLNKHIDAYKTFP; SPARMAGNGGDAALALLLLDRLNQLE
SKMSGKGQQQQGQTVTKKSAAEASKKPRQKRTATKAYNVTQAFGRRGPEQ
TQGNFGDQELIRQGTDYKHWPQIAQFAPSASAFFGMSRIGMEVTPSGTWL
TYTGAIKLDDKDPNFKDQVILLNKHIDAYKTFPPTEPKKDK and
combinations thereof.

[0306] In some embodiments, the polypeptide comprises one or more linker sequences.

[0307] In some embodiments, the one or more linker sequences are selected from the group consisting of GGSGGGGSGG, GGSLGGGGSG.

[0308] In some embodiments, the one or more linker sequences comprise cleavage sequences.

[0309] In some embodiments, the one or more cleavage sequences are selected from the group consisting of FRAC, KRCF, KKRY, ARMA, RRSG, MRAC, KMCG, ARCA, KKQG, YRSY, SFMN, FKAA, KRNG, YNSF, KKNG, RRRG, KRYS, and ARYA.

[0310] In some embodiments, the polypeptide comprises a transmembrane domain sequence.

[0311] In some embodiments, the transmembrane domain sequence is C-terminal to the sequence comprising an epitope sequence from ORF1ab, the sequence comprising an epitope sequence from membrane glycoprotein (M) and the sequence comprising an epitope sequence from nucleocapsid phosphoprotein (N).

[0312] In some embodiments, the transmembrane domain sequence is EQYIKWPWYIWLGFIAGLIAIVMVTIMLCCMTSCCSCLKGCCSCGSCCKFDEDDSEPVLKGVKL HYT.

[0313] In some embodiments, the polypeptide comprises a secretory signal sequence (SEC sequence).

[0314] In some embodiments, the SEC sequence is N-terminal to the sequence comprising an epitope sequence from ORF1ab, the sequence comprising an epitope sequence from membrane glycoprotein (M) and the sequence comprising an epitope sequence from nucleocapsid phosphoprotein (N).

[0315] In some embodiments, the SEC sequence is MFVFLVLLPLVSSQCVNLT.

[0316] In some embodiments, the composition comprises the polynucleotide encoding the polypeptide.

[0317] In some embodiments, the polynucleotide is an mRNA.

[0318] In some embodiments, the polynucleotide comprises a codon optimized sequence for expression in a human.

[0319] In some embodiments, the polynucleotide comprises a dEarI-hAg sequence.

[0320] In some embodiments, the dEarI-hAg sequence is ATTCTTCTGGTCCCCACAGACTCAGAGAGAACCC, optionally wherein each T is a U.

[0321] In some embodiments, the polynucleotide comprises a Kozak sequence.

[0322] In some embodiments, the Kozak sequence is GCCACC.

[0323] In some embodiments, the polynucleotide comprises an F element sequence.

[0324] In some embodiments, the F element sequence is a 3 UTR of amino-terminal enhancer of split (AES).

[0325] In some embodiments, the F element sequence is CTGGTACTGCATGCACGCAATGCTAGCTGCCCCTTTCCCGTCCTGGGTACCCCGAGTCTCCC CCGACCTCGGGTCCCAGGTATGCTCCCACCTCCACCTGCCCCACTCACCACCTCTGCTAGTTC CAGACACCTCC, optionally wherein each T is a U.

[0326] In some embodiments, the polynucleotide comprises an I element sequence.

[0327] In some embodiments, the I element sequence is a 3′ UTR of mitochondrially encoded 12S rRNA (mtRNR1).

[0328] In some sequence is embodiments, the I element CAAGCACGCAGCAATGCAGCTCAAAACGCTTAGCCTAGCCACACCCCCACGGGAAACAGCA GTGATTAACCTTTAGCAATAAACGAAAGTTTAACTAAGCTATACTAACCCCAGGGTTGGTCA

[0329] ATTTCGTGCCAGCCACACC, optionally wherein each T is a U.

[0330] In some embodiments, the polynucleotide comprises a poly A sequence.

[0331] In some embodiments, the poly A sequence is AAAAAAAAAAAAAAAAAAAAAAAAAAAAAAGCATATGACTAAAAAAAAAAAAAAAAAAA AAAAAAAAAAAAAAAAAAAAAAAAAAAAAAAAAAAAAAAAAAAAAAAAAAA, optionally wherein each T is a U.

[0332] In some embodiments, each of the epitope sequences from the ORF1ab, the membrane glycoprotein, and the nucleocapsid phosphoprotein are from 2019 SARS-CoV-2.

[0333] In some embodiments, one or more or each epitope elicits a T cell response.

[0334] In some embodiments, one or more or each epitope has been observed by mass spectrometry as being presented by an HLA molecule.

[0335] In some embodiments, the composition comprises (i) a polypeptide with at least 70%, at least 75%, at least 80%, at least 85%, at least 90%, at least 95% or 100% sequence identity to a sequence selected from the group consisting of RS Clp1full, RS C2p1full, RS C3p1full, RS C4p1full, RS C5p1, RS C5p2, RS C5p2full, RS C6p1, RS C6p2, RS C6p2full, RS C7p1, RS C7p2, RS C7p2full, RS C7p4, RS C7p4full, RS C8p1, RS C8p2 and RS C8p2full; (ii) a polynucleotide encoding a polypeptide with at least 70%, at least 75%, at least 80%, at least 85%, at least 90%, at least 95%, or 100% sequence identity to a sequence selected from the group consisting of RS C1p1full, RS C2p1full, RS C3p1full, RS C4p1full, RS C5p1, RS C5p2, RS C5p2full, RS C6p1, RS C6p2, RS C6p2full, RS C7p1, RS C7p2, RS C7p2full, RS C7p4, RS C7p4full, RS C8p1, RS C8p2 and RS C8p2full; or (iii) a polynucleotide with at least 70%, at least 75%, at least 80%, at least 85%, at least 90%, at least 95%, or 100% sequence identity to a sequence selected from the group consisting of SEQ ID NOs: RS C1n1, RS C2n1, RS C3n1, RS C4n1, RS C5n1, RS Con1, RS C7n1, RS C8n1, RS C5n2, RS C6n2, RS C7n2, RS C8n2, RS C5n2full, RS Con2full, RS C7n2full, RS C8n2full, RS C7n4, RS C7n4full.

[0336] In some embodiments, the composition comprises (i) a polypeptide with at least 70%, 80%, 90% or 100% sequence identity to a sequence selected from the group consisting of RS C7p1, RS C7p2, RS C7p2full, RS C7p4, and RS C7p4full; or (iii) a polynucleotide with at least at least 70%, at least 75%, at least 80%, at least 85%, at least 90%, at least 95%, or 100% sequence identity to a sequence selected from the group consisting of SEQ ID NOs: RS C7n1, RS C7n2, RS C7n2full, RS C7n4, RS and C7n4full.

[0337] In some embodiments, the pharmaceutical composition comprises a pharmaceutically acceptable excipient, carrier, or diluent.

[0338] Provided herein is a method of treating or preventing an infection by a virus or treating a respiratory disease or condition associated with an infection by a virus comprising administering to a subject in need thereof a pharmaceutical composition comprising: (i) a polypeptide comprising an epitope sequence of Table 1A, Table 1B, Table 1C, Table 2Ai, Table 2Aii, Table 2B and/or Table 16; (ii) a polynucleotide encoding the polypeptide comprising an epitope sequence of Table 1A, Table 1B, Table 1C, Table 2Ai, Table 2Aii, Table 2B and/or Table 16; (iii) a T cell receptor (TCR) or a T cell comprising the TCR, wherein the TCR binds to the epitope sequence in complex with a corresponding HLA class I or class II molecule; (iv) an antigen presenting cell comprising (i) or (ii); or (v) an antibody or B cell comprising the antibody, wherein the antibody binds to the epitope sequence.

[0339] In some embodiments, the subject has an immunodeficiency.

[0340] In some embodiments, the subject has a B cell immunodeficiency.

[0341] In some embodiments, the epitope sequence comprises one or more or each of the following: YLFDESGEFKL, YLFDESGEF, FGDDTVIEV, LLLDRLNQL, QLMCQPILL, TTDPSFLGRY, PTDNYITTY, PSFLGRY, AEAELAKNV, VATSRTLSY and KTIQPRVEK.

[0342] In some embodiments, the epitope sequence comprises one or more or each of the following: SAPPAQYEL, AVASKILGL, EYADVFHLY, DEFTPFDVV, VRIQPGQTF, SFRLFARTR, KFLPFQQF, VVQEGVLTA, RLDKVEAEV, FGADPIHSL, NYNYLYRLF, KYIKWPWYI, KWPWYIWLGF, LPFNDGVYF, QPTESIVRF, IPFAMQMAY, YLQPRTFLL and RLQSLQTYV.

[0343] In some embodiments, the epitope sequence is from an orflab protein.

[0344] In some embodiments, the epitope sequence is from an orfla protein

[0345] In some embodiments, the epitope sequence is from a surface glycoprotein(S) or a shifted reading frame thereof.

[0346] In some embodiments, the epitope sequence is from a nucleocapsid phosphoprotein (N).

[0347] In some embodiments, the epitope sequence is from an ORF3a protein.

[0348] In some embodiments, the epitope sequence is from a membrane glycoprotein (M).

[0349] In some embodiments, the epitope sequence is from an ORF7a protein.

[0350] In some embodiments, the epitope sequence is from an ORF8 protein.

[0351] In some embodiments, the epitope sequence is from an envelope protein (E).

[0352] In some embodiments, the epitope sequence is from an ORF6 protein.

[0353] In some embodiments, the epitope sequence is from an ORF7b protein.

[0354] In some embodiments, the epitope sequence is from an ORF10 protein.

[0355] In some embodiments, the epitope sequence is from an ORF9b protein.

[0356] Provided herein is a method of treating or preventing an infection by a virus or treating a respiratory disease or condition associated with an infection by a virus comprising administering to a subject in need thereof a pharmaceutical composition comprising: a polypeptide having an amino acid sequence with at least 70%, at least 75%, at least 80%, at least 85%, at least 90%, at least 95%, or 100% sequence identity to a sequence of any one of the sequences depicted in column 2 of Table 11, column 2 of Table 12 or column 3 of Table 15; or a recombinant polynucleotide encoding a polypeptide having an amino acid sequence with at least 70%, at least 75%, at least 80%, at least 85%, at least 90%, at least 95%, or 100% sequence identity to a sequence of any one of the sequences depicted in column 2 of Table 11, column 2 of Table 12 or column 3 of Table 15.

[0357] In some embodiments, the subject has an immunodeficiency.

[0358] In some embodiments, the subject has a B cell immunodeficiency.

[0359] In some embodiments, the pharmaceutical composition comprises a polypeptide with at least 70%, at least 75%, at least 80%, at least 85%, at least 90%, at least 95%, or 100% sequence identity to a sequence selected from the group consisting of RS C1p1full, RS C2p1full, RS C3p1full, RS C4p1full, RS C5p1, RS C5p2, RS C5p2full, RS C6p1, RS C6p2, RS C6p2full, RS C7p1, RS C7p2, RS C7p2full, RS C7p4, RS C7p4full, RS C8p1, RS C8p2 and RS C8p2full; or a polynucleotide encoding a polypeptide with at least 70%, at least 75%, at least 80%, at least 85%, at least 90%, at least 95%, or 100% sequence identity to a sequence selected from the group consisting of RS Clp1full, RS C2p1full, RS C3p1full, RS C4p1full, RS C5p1, RS C5p2, RS C5p2full, RS C6p1, RS C6p2, RS C6p2full, RS C7p1, RS C7p2, RS C7p2full, RS C7p4, RS C7p4full, RS C8p1, RS C8p2 and RS C8p2full.

[0360] In some embodiments, the pharmaceutical composition comprises a polynucleotide with at least 70%, at least 75%, at least 80%, at least 85%, at least 90%, at least 95%, or 100% sequence identity to a sequence selected from the group consisting of SEQ ID NOs: RS C1n1, RS C2n1, RS C3n1, RS C4n1, RS C5n1, RS Con1, RS C7n1, RS C8n1, RS C5n2, RS Con2, RS C7n2, RS C8n2, RS C5n2full, RS Con2full, RS C7n2full, RS C8n2full, RS C7n4, and RS C7n4full.

[0361] In some embodiments, the polynucleotide is an mRNA.

[0362] In some embodiments, the pharmaceutical composition further comprises one or more lipids.

[0363] In some embodiments, the one or more lipids comprise a lipid nanoparticle (LNP).

[0364] In some embodiments, the LNP encapsulates the recombinant polynucleotide construct.

[0365] In some embodiments, the polypeptide is synthetic.

[0366] In some embodiments, the polypeptide is recombinant.

[0367] In some embodiments, the polypeptide is from 8-1000 amino acids in length.

[0368] In some embodiments, the epitope sequence binds to or is predicted to bind to an HLA class I or class II molecule with a KD of 1000 nM or less.

[0369] In some embodiments, the epitope sequence binds to or is predicted to bind to an HLA class I or class II molecule with a KD of 500 nM or less.

[0370] In some embodiments, the epitope sequence comprises a sequence of a viral protein expressed by a virus-infected cell of the subject.

[0371] In some embodiments, the virus is a coronavirus.

[0372] In some embodiments, the virus is 2019 SARS-CoV 2.

[0373] In some embodiments, an HLA molecule expressed by the subject is unknown at the time of administration.

[0374] In some embodiments, the ability of the virus to avoid escape of recognition by an immune system of the subject is less compared to the ability of the virus to avoid escape of recognition by an immune system of a subject administered a pharmaceutical composition containing an epitope from a single protein or epitopes from fewer proteins than in the pharmaceutical composition administered according to a method described herein.

[0375] In some embodiments, the subject expresses an HLA molecule encoded by an HLA allele of any one of Table 1A, Table 1B, Table 1C, Table 2Ai, Table 2Aii, Table 2B and Table 16 and the epitope sequence is an HLA allele-matched epitope sequence.

[0376] In some embodiments, the epitope sequence comprises one or more or each of the following: SAPPAQYEL, AVASKILGL, EYADVFHLY, DEFTPFDVV, VRIQPGQTF, SFRLFARTR, KFLPFQQF, VVQEGVLTA, RLDKVEAEV and FGADPIHSL.

[0377] In some embodiments, the method further comprises administering to the subject an additional therapy for a 2019 SARS-CoV 2 viral infection.

[0378] In some embodiments, the method further comprises administering to the subject (a) a polypeptide having an amino acid sequence of a 2019 SARS-CoV 2 spike protein or a variant or fragment thereof; (b) a recombinant polynucleotide encoding a 2019 SARS-CoV 2 spike protein or a variant or fragment thereof; or a 2019 SARS-CoV 2 spike protein pharmaceutical composition comprising (a) or (b).

[0379] In some embodiments, the vaccine or therapeutic of (a) or (b) is administered to the subject once.

[0380] In some embodiments, the vaccine or therapeutic of (a) or (b) is administered to the subject more than once.

[0381] In some embodiments, the vaccine or therapeutic of (a) or (b) is administered at least two times, wherein the first administered dose is a priming dose, and the second and subsequent doses are booster dose(s). In some embodiments, the vaccine or therapeutic of (a) or (b) is administered at least three times, wherein the first administered dose is a priming dose, and the second, third, and subsequent doses are booster dose(s).

[0382] In some embodiments, the priming and the booster doses are administered at an interval of at least 21 days.

[0383] In some embodiments, an interval between two booster doses is at least 30 days, at least 60 days or at least 90 days.

[0384] In some embodiments, the vaccine or therapeutic is administered once each year.

[0385] In some embodiments, the vaccine or therapeutic is administered twice each year.

[0386] In some embodiments, the vaccine or therapeutic is administered at a high priming or loading dose for the first dose, and at a reduced boosting or maintenance dose for the subsequent doses.

[0387] In some embodiments, the subject receives a lower dose of or a lower frequency of a SARS-CoV spike vaccine than a subject receiving the SARS-CoV spike vaccine alone.

[0388] Provided herein is a method of treating or preventing an infection by a virus or treating a respiratory disease or condition associated with an infection by a virus comprising administering to a subject in need thereof a pharmaceutical composition comprising: (i) a recombinant polynucleotide encoding a polypeptide comprising at least two of the following (a) a sequence comprising an epitope sequence from ORF1ab, a sequence comprising an epitope sequence from membrane glycoprotein (M), and a sequence comprising an epitope sequence from nucleocapsid phosphoprotein (N); and (ii) a recombinant polynucleotide encoding a 2019 SARS-CoV 2 spike protein or a variant or fragment thereof.

[0389] In some embodiments, provided herein is a method of treating or preventing an infection by a virus or treating a respiratory disease or condition associated with an infection by a virus comprising administering to a subject in need thereof: (i) a first pharmaceutical composition comprising a first recombinant polynucleotide encoding a polypeptide comprising at least two of the following (a) a sequence comprising an epitope sequence from ORF1ab, a sequence comprising an epitope sequence from membrane glycoprotein (M), and a sequence comprising an epitope sequence from nucleocapsid phosphoprotein (N); and (ii) a second pharmaceutical composition comprising a second recombinant polynucleotide encoding a 2019 SARS-CoV 2 spike protein or a variant or fragment thereof.

[0390] In some embodiments, the ratio (e.g., mass ratio) of the recombinant polynucleotide in (i) to the recombinant polynucleotide in (ii) is from 20:1 to 1:20.

[0391] In some embodiments, the ratio (e.g., mass ratio) of the recombinant polynucleotide in (i) to the recombinant polynucleotide in (ii) is from 1:10 to 10:1.

[0392] In some embodiments, the ratio (e.g., mass ratio) of the recombinant polynucleotide in (i) to the recombinant polynucleotide in (ii) is from about 1:5 to 5:1.

[0393] In some embodiments, the ratio (e.g., mass ratio) of the recombinant polynucleotide in (i) to the recombinant polynucleotide in (ii) is from about 1:3 to 3:1.

[0394] In some embodiments, the ratio (e.g., mass ratio) of the recombinant polynucleotide in (i) to the recombinant polynucleotide in (ii) is about 1:10, 1:9, 1:8, 1:7, 1:6, 1:5, 1:4, 1:3, 1:2, 1:1, 2:1, 3:1, 4:1, 5:1, 6:1, 7:1, 8:1, 9:1, 10:1, 1:9.5, 1:8.5, 1:7.5, 1:6.5, 1:5.5, 1:4.5, 1:3.5, 1:2.5, 1:1.5, 2.5:1, 3.5:1, 4.5:1, 5.5:1, 6.5:1, 7.5:1, 8.5:1, 9.5:1, 2:9, 2:8, 2:7, 2:6, 2:5, 2:4, 2:3, 3:2, 4:2, 5:2, 6:2, 7:2, 8:2, 9:2, 3:8, 3:7, 3:5, 3:4, 4:3, 5:3, 7:3, 8:3, 4:9, 4:7, 4:5, 5:4, 7:4, 9:4, 5:9, 5:8, 5:7, 5:6, 6:5, 7:5, 8:5, 9:5, 6:7, 7:6, 7:8, 8:7, 8:9 or 9:8.

[0395] In some embodiments, a method of treating or preventing an infection comprises administering the first pharmaceutical composition (i) and the second pharmaceutical composition (ii), to a subject who has previously been administered one or more doses of a SARS-CoV-2 vaccine (e.g., a SARS-CoV-2 vaccine that comprises (a) a polypeptide that includes a SARS-CoV-2 spike protein, or a fragment or variant thereof, or (b) a recombinant polynucleotide comprising a sequence that encodes a SARS-CoV-2 spike protein or a fragment or variant thereof). In some embodiments, a method of treating or preventing an infection comprises administering the first pharmaceutical composition (i) and the second pharmaceutical composition (ii) to a subject who has previously been administered two or more (e.g., three) doses of a SARS-CoV-2 vaccine.

[0396] In some embodiments, provided herein is a method of treating or preventing an infection by a virus or treating a respiratory disease or condition associated with an infection by a virus comprising administering to a subject in need thereof a pharmaceutical composition comprising: (i) a first recombinant polynucleotide encoding a polypeptide comprising at least two of the following (a) a sequence comprising an epitope sequence from ORF1ab, a sequence comprising an epitope sequence from membrane glycoprotein (M), and a sequence comprising an epitope sequence from nucleocapsid phosphoprotein (N); and (ii) a second recombinant polynucleotide encoding a 2019 SARS-CoV 2 spike protein or a variant or fragment thereof.

[0397] In some embodiments, the pharmaceutical composition comprises a nanoparticle, wherein the nanoparticle comprises the first recombinant polynucleotide and the second recombinant polynucleotide.

[0398] In some embodiments, the nanoparticle is present in the pharmaceutical composition at a dose of from 100 ng to 500 micrograms.

[0399] In some embodiments, the nanoparticle is present in the pharmaceutical composition at a dose of from 1 microgram to 100 micrograms.

[0400] In some embodiments, the nanoparticle is present in the pharmaceutical composition at a dose of from 1 microgram to 30 micrograms, 5 micrograms to 40 micrograms or 10 microgram to 50 micrograms.

[0401] In some embodiments, the nanoparticle is present in the pharmaceutical composition at a dose of 0.1, 0.2, 0.3, 0.4, 0.5, 0.6, 0.7, 0.8, 0.9, 1, 2, 3, 4, 5, 6, 7, 8, 9, 10, 15, 20, 25, 30, 35, 40, 45, 50, 55, 60, 65, 70, 75, 80, 85, 90, 95, 100, 150, 200, 250, 300, 350, 400, 450, 500, 600, 700, 800, 900 or 1,000 micrograms.

[0402] In some embodiments, the ratio (e.g., mass ratio) of the first recombinant polynucleotide to the second recombinant polynucleotide is from about 1:50 to 50:1.

[0403] In some embodiments, the ratio (e.g., mass ratio) of the first recombinant polynucleotide to the second recombinant polynucleotide is from about 1:25 to 25:1.

[0404] In some embodiments, the ratio (e.g., mass ratio) of the first recombinant polynucleotide to the second recombinant polynucleotide is from about 1:10 to 10:1.

[0405] In some embodiments, the ratio (e.g., mass ratio) of the first recombinant polynucleotide to the second recombinant polynucleotide is about 1:10, 1:9, 1:8, 1:7, 1:6, 1:5, 1:4, 1:3, 1:2, 1:1, 2:1, 3:1, 4:1, 5:1, 6:1, 7:1, 8:1, 9:1, 10:1, 1:9.5, 1:8.5, 1:7.5, 1:6.5, 1:5.5, 1:4.5, 1:3.5, 1:2.5, 1:1.5, 2.5:1, 3.5:1, 4.5:1, 5.5:1, 6.5:1, 7.5:1, 8.5:1, 9.5:1, 2:9, 2:8, 2:7, 2:6, 2:5, 2:4, 2:3, 3:2, 4:2, 5:2, 6:2, 7:2, 8:2, 9:2, 3:8, 3:7, 3:5, 3:4, 4:3, 5:3, 7:3, 8:3, 4:9, 4:7, 4:5, 5:4, 7:4, 9:4, 5:9, 5:8, 5:7, 5:6, 6:5, 7:5, 8:5, 9:5, 6:7, 7:6, 7:8, 8:7, 8:9 or 9:8.

[0406] Provided herein is a method of treating or preventing an infection by a virus or treating a respiratory disease or condition associated with an infection by a virus comprising administering to a subject in need thereof: (i) a first pharmaceutical composition comprising a recombinant polynucleotide encoding a polypeptide comprising at least two of the following (a) a sequence comprising an epitope sequence from ORF1ab, a sequence comprising an epitope sequence from membrane glycoprotein (M), and a sequence comprising an epitope sequence from nucleocapsid phosphoprotein (N); and (ii) a second pharmaceutical composition comprising a recombinant polynucleotide encoding a 2019 SARS-CoV 2 spike protein or a variant or fragment thereof.

[0407] In some embodiments, the ratio (e.g., mass ratio) of the recombinant polynucleotide in (i) to the recombinant polynucleotide in (ii) is from about 1:50 to 50:1.

[0408] In some embodiments, the ratio (e.g., mass ratio) of the recombinant polynucleotide in (i) to the recombinant polynucleotide in (ii) is from about 1:25 to 25:1.

[0409] In some embodiments, the ratio (e.g., mass ratio) of the recombinant polynucleotide in (i) to the recombinant polynucleotide in (ii) is from about 1:10 to 10:1.

[0410] In some embodiments, the ratio (e.g., mass ratio) of the recombinant polynucleotide in (i) to the recombinant polynucleotide in (ii) is about 1:10, 1:9, 1:8, 1:7, 1:6, 1:5, 1:4, 1:3, 1:2, 1:1, 2:1, 3:1, 4:1, 5:1, 6:1, 7:1, 8:1, 9:1, 10:1, 1:9.5, 1:8.5, 1:7.5, 1:6.5, 1:5.5, 1:4.5, 1:3.5, 1:2.5, 1:1.5, 2.5:1, 3.5:1, 4.5:1, 5.5:1, 6.5:1, 7.5:1, 8.5:1, 9.5:1, 2:9, 2:8, 2:7, 2:6, 2:5, 2:4, 2:3, 3:2, 4:2, 5:2, 6:2, 7:2, 8:2, 9:2, 3:8, 3:7, 3:5, 3:4, 4:3, 5:3, 7:3, 8:3, 4:9, 4:7, 4:5, 5:4, 7:4, 9:4, 5:9, 5:8, 5:7, 5:6, 6:5, 7:5, 8:5, 9:5, 6:7, 7:6, 7:8, 8:7, 8:9 or 9:8.

[0411] In some embodiments, the first pharmaceutical composition comprises a first nanoparticle, wherein the first nanoparticle comprises the recombinant polynucleotide encoding a polypeptide comprising at least two of the following (a) a sequence comprising an epitope sequence from ORF1ab, a sequence comprising an epitope sequence from membrane glycoprotein (M), and a sequence comprising an epitope sequence from nucleocapsid phosphoprotein (N); and wherein the second pharmaceutical composition comprises a second nanoparticle, wherein the second nanoparticle comprises the recombinant polynucleotide encoding a 2019 SARS-CoV 2 spike protein or a variant or fragment thereof.

[0412] In some embodiments, the first nanoparticle is present in the first pharmaceutical composition at a dose of from about 100 ng to 500 micrograms.

[0413] In some embodiments, the first nanoparticle is present in the first pharmaceutical composition at a dose of from about 1 microgram to 100 micrograms.

[0414] In some embodiments, the first nanoparticle is present in the first pharmaceutical composition at a dose of from about 1 microgram to 30 micrograms, 5 micrograms to 40 micrograms or 10 microgram to 50 micrograms.

[0415] In some embodiments, the first nanoparticle is present in the first pharmaceutical composition at a dose of about 0.1, 0.2, 0.3, 0.4, 0.5, 0.6, 0.7, 0.8, 0.9, 1, 2, 3, 4, 5, 6, 7, 8, 9, 10, 15, 20, 25, 30, 35, 40, 45, 50, 55, 60, 65, 70, 75, 80, 85, 90, 95, 100, 150, 200, 250, 300, 350, 400, 450, 500, 600, 700, 800, 900 or 1,000 micrograms.

[0416] In some embodiments, the second nanoparticle is present in the second pharmaceutical composition at a dose of from about 100 ng to 500 micrograms.

[0417] In some embodiments, the second nanoparticle is present in the second pharmaceutical composition at a dose of from about 1 microgram to 100 micrograms.

[0418] In some embodiments, the second nanoparticle is present in the second pharmaceutical composition at a dose of from about 1 microgram to 30 micrograms, 5 micrograms to 40 micrograms or 10 microgram to 50 micrograms.

[0419] In some embodiments, the second nanoparticle is present in the second pharmaceutical composition at a dose of about 0.1, 0.2, 0.3, 0.4, 0.5, 0.6, 0.7, 0.8, 0.9, 1, 2, 3, 4, 5, 6, 7, 8, 9, 10, 15, 20, 25, 30, 35, 40, 45, 50, 55, 60, 65, 70, 75, 80, 85, 90, 95, 100, 150, 200, 250, 300, 350, 400, 450, 500, 600, 700, 800, 900 or 1,000 micrograms.

[0420] Provided herein is a method of treating or preventing an infection by a virus or treating a respiratory disease or condition associated with an infection by a virus comprising administering to a subject in need thereof: (i) a pharmaceutical composition comprising (a) a polypeptide comprising at least two of the following (a) a sequence comprising an epitope sequence from ORF1ab, a sequence comprising an epitope sequence from membrane glycoprotein (M), and a sequence comprising an epitope sequence from nucleocapsid phosphoprotein (N); or (b) a polynucleotide encoding a polypeptide comprising at least two of the following (a) a sequence comprising an epitope sequence from ORF1ab, a sequence comprising an epitope sequence from membrane glycoprotein (M), and a sequence comprising an epitope sequence from nucleocapsid phosphoprotein (N); and (ii)(a) a pharmaceutical composition comprising a polypeptide having an amino acid sequence of a 2019 SARS-CoV 2 spike protein or a variant or fragment thereof; (b) a recombinant polynucleotide encoding a 2019 SARS-CoV 2 spike protein or a variant or fragment thereof; or a 2019 SARS-CoV 2 spike protein pharmaceutical composition comprising (ii)(a) or (ii)(b);

[0421] wherein the subject receives a dose of (ii)(a) or (ii)(b) that is lower than a dose of (ii)(a) or (ii)(b) administered to a subject alone.

[0422] Provided herein is a method of treating or preventing an infection by a virus or treating a respiratory disease or condition associated with an infection by a virus comprising administering to a subject in need thereof: (i) a pharmaceutical composition comprising (a) a polypeptide comprising at least two of the following (a) a sequence comprising an epitope sequence from ORF1ab, a sequence comprising an epitope sequence from membrane glycoprotein (M), and a sequence comprising an epitope sequence from nucleocapsid phosphoprotein (N); or (b) a polynucleotide encoding a polypeptide comprising at least two of the following (a) a sequence comprising an epitope sequence from ORF1ab, a sequence comprising an epitope sequence from membrane glycoprotein (M), and a sequence comprising an epitope sequence from nucleocapsid phosphoprotein (N); and (ii)(a) a pharmaceutical composition comprising a polypeptide having an amino acid sequence of a 2019 SARS-CoV 2 spike protein or a variant or fragment thereof; (b) a recombinant polynucleotide encoding a 2019 SARS-CoV 2 spike protein or a variant or fragment thereof; or a 2019 SARS-CoV 2 spike protein pharmaceutical composition comprising (ii)(a) or (ii)(b);

[0423] wherein the subject receives a number of doses of (ii)(a) or (ii)(b) that is lower than a number of doses of (ii)(a) or (ii)(b) administered to a subject alone.

[0424] In some embodiments, the subject receives a dose of (ii)(a) or (ii)(b) that is at least 1.1, 1, 1.5, 2, 3, 4, 5, 6, 7, 8, 9, 10, 20, 30, 40, 50, 60, 70, 80, 90 or 100 times lower than a dose of (ii)(a) or (ii)(b) administered to a subject alone.

[0425] In some embodiments, the subject receives 1, 2, 3, 4, 5, 6, 7, 8, 9 or 10 fewer doses of (ii)(a) or (ii)(b) than the number of doses of (ii)(a) or (ii)(b) administered to a subject alone.

[0426] In some embodiments, the pharmaceutical composition of (i) is co-formulated with the pharmaceutical composition of (ii).

[0427] In some embodiments, the pharmaceutical composition of (i) is formulated separately from the pharmaceutical composition of (ii).

[0428] In some embodiments, the pharmaceutical composition of (i) is administered separately from the pharmaceutical composition of (ii).

[0429] Provided herein is a method of treating or preventing an infection by a virus or treating a respiratory disease or condition associated with an infection by a virus comprising administering to a subject in need thereof: (i) a pharmaceutical composition comprising (a) a polypeptide comprising at least two of the following (a) a sequence comprising an epitope sequence from ORF1ab, a sequence comprising an epitope sequence from membrane glycoprotein (M), and a sequence comprising an epitope sequence from nucleocapsid phosphoprotein (N); or (b) a polynucleotide encoding a polypeptide comprising at least two of the following (a) a sequence comprising an epitope sequence from ORF1ab, a sequence comprising an epitope sequence from membrane glycoprotein (M), and a sequence comprising an epitope sequence from nucleocapsid phosphoprotein (N); and (ii) a pharmaceutical composition comprising (a) a polypeptide having an amino acid sequence of a 2019 SARS-CoV 2 spike protein or a variant or fragment thereof; (b) a recombinant polynucleotide encoding a 2019 SARS-CoV 2 spike protein or a variant or fragment thereof; or a 2019 SARS-CoV 2 spike protein pharmaceutical composition comprising (ii)(a) or (ii)(b); wherein the subject receives a dose of (i)(a) or (i)(b) that is lower than a dose of (i)(a) or (i)(b) administered to a subject alone.

[0430] Provided herein is a method of treating or preventing an infection by a virus or treating a respiratory disease or condition associated with an infection by a virus comprising administering to a subject in need thereof: (i) a pharmaceutical composition comprising (a) a polypeptide comprising at least two of the following (a) a sequence comprising an epitope sequence from ORF1ab, a sequence comprising an epitope sequence from membrane glycoprotein (M), and a sequence comprising an epitope sequence from nucleocapsid phosphoprotein (N); or (b) a polynucleotide encoding a polypeptide comprising at least two of the following (a) a sequence comprising an epitope sequence from ORF1ab, a sequence comprising an epitope sequence from membrane glycoprotein (M), and a sequence comprising an epitope sequence from nucleocapsid phosphoprotein (N); and (ii) a pharmaceutical composition comprising (a) a polypeptide having an amino acid sequence of a 2019 SARS-CoV 2 spike protein or a variant or fragment thereof; (b) a recombinant polynucleotide encoding a 2019 SARS-CoV 2 spike protein or a variant or fragment thereof; or a 2019 SARS-CoV 2 spike protein pharmaceutical composition comprising (ii)(a) or (ii)(b); wherein the subject receives a number of doses of (i)(a) or (i)(b) that is lower than a number of doses of (i)(a) or (i)(b) administered to a subject alone.

[0431] In some embodiments, the subject receives a dose of (i)(a) or (i)(b) that is at least 1.1, 1, 1.5, 2, 3, 4, 5, 6, 7, 8, 9, 10, 20, 30, 40, 50, 60, 70, 80, 90 or 100 times lower than a dose of (i)(a) or (i)(b) administered to a subject alone.

[0432] In some embodiments, the subject receives 1, 2, 3, 4, 5, 6, 7, 8, 9 or 10 fewer doses of (i)(a) or (i)(b) than the number of doses of (i)(a) or (i)(b) administered to a subject alone.

[0433] In some embodiments, the pharmaceutical composition of (i) is co-formulated with the pharmaceutical composition of (ii).

[0434] In some embodiments, the pharmaceutical composition of (i) is formulated separately from the pharmaceutical composition of (ii).

[0435] In some embodiments, the pharmaceutical composition of (i) is administered separately from the pharmaceutical composition of (ii).

[0436] In some embodiments, the pharmaceutical composition is a coformulation.

[0437] In some embodiments, the first pharmaceutical composition is administered with or on the same day as the second pharmaceutical composition.

[0438] In some embodiments, the first pharmaceutical composition is administered simultaneously with the second pharmaceutical composition.

[0439] In some embodiments, the first pharmaceutical composition is administered at a first location of the subject and the second pharmaceutical composition is administered at a second location of the subject that is different than the first location.

[0440] In some embodiments, the first location is at an appendage of the subject and second location is at an opposing appendage of the subject,

[0441] In some embodiments, the first appendage is an arm and the second appendage is an arm.

[0442] In some embodiments, the first pharmaceutical composition and the second pharmaceutical composition are administered to the same location of the subject.

[0443] In some embodiments, the pharmaceutical composition is administered at a first time point and a second time point, wherein the second time point is at least about, at most about or about 2, 3, 4, 5, 6, 7, 8, 9, 10, 11, 12, 13, 14, 15, 16, 17, 18, 19, 20, 21, 22, 23, 24, 25, 26, 27, 28, 29, 30, 31, 32, 33, 34, 35 or 36 days after the first time point; at least about, at most about or about 1, 2, 3, 4, 5, 6, 7, 8, 9, 10, 11, 12, 13, 14, 15, 16, 17, 18, 19, 20, 21, 22, 23, 24, 25, 26, 27, 28, 29, 30, 31, 32, 33, 34, 35 or 36 weeks after the first time point; or at least about, at most about or about 1, 2, 3, 4, 5, 6, 7, 8, 9, 10, 11, 12, 13, 14, 15, 16, 17, 18, 19, 20, 21, 22, 23, 24, 25, 26, 27, 28, 29, 30, 31, 32, 33, 34, 35 or 36 months after the first time point.

[0444] In some embodiments, the pharmaceutical composition is administered at a third time point, wherein the third time point is at least about, at most about or about 2, 3, 4, 5, 6, 7, 8, 9, 10, 11, 12, 13, 14, 15, 16, 17, 18, 19, 20, 21, 22, 23, 24, 25, 26, 27, 28, 29, 30, 31, 32, 33, 34, 35 or 36 days after the second time point; at least about, at most about or about 1, 2, 3, 4, 5, 6, 7, 8, 9, 10, 11, 12, 13, 14, 15, 16, 17, 18, 19, 20, 21, 22, 23, 24, 25, 26, 27, 28, 29, 30, 31, 32, 33, 34, 35 or 36 weeks after the second time point; or at least about, at most about or about 1, 2, 3, 4, 5, 6, 7, 8, 9, 10, 11, 12, 13, 14, 15, 16, 17, 18, 19, 20, 21, 22, 23, 24, 25, 26, 27, 28, 29, 30, 31, 32, 33, 34, 35 or 36 months after the second time point.

[0445] In some embodiments, the third time point is at least about, at most about or about 2, 3, 4, 5, 6, 7, 8, 9, 10, 11, 12, 13, 14, 15, 16, 17, 18, 19, 20, 21, 22, 23, 24, 25, 26, 27, 28, 29, 30, 31, 32, 33, 34, 35, 36, 37, 38, 39, 40, 41, 42, 43, 44, 45, 46, 47, 48, 49 or 50 days after the first time point; at least about, at most about or about 1, 2, 3, 4, 5, 6, 7, 8, 9, 10, 11, 12, 13, 14, 15, 16, 17, 18, 19, 20, 21, 22, 23, 24, 25, 26, 27, 28, 29, 30, 31, 32, 33, 34, 35 or 36 weeks after the first time point; or at least about, at most about or about 1, 2, 3, 4, 5, 6, 7, 8, 9, 10, 11, 12, 13, 14, 15, 16, 17, 18, 19, 20, 21, 22, 23, 24, 25, 26, 27, 28, 29, 30, 31, 32, 33, 34, 35 or 36 months after the first time point.

[0446] In some embodiments, the first pharmaceutical composition is administered at a first time point and a second time point, wherein the second time point is at least about, at most about or about 2, 3, 4, 5, 6, 7, 8, 9, 10, 11, 12, 13, 14, 15, 16, 17, 18, 19, 20, 21, 22, 23, 24, 25, 26, 27, 28, 29, 30, 31, 32, 33, 34, 35 or 36 days after the first time point; at least about, at most about or about 1, 2, 3, 4, 5, 6, 7, 8, 9, 10, 11, 12, 13, 14, 15, 16, 17, 18, 19, 20, 21, 22, 23, 24, 25, 26, 27, 28, 29, 30, 31, 32, 33, 34, 35 or 36 weeks after the first time point; or at least about, at most about or about 1, 2, 3, 4, 5, 6, 7, 8, 9, 10, 11, 12, 13, 14, 15, 16, 17, 18, 19, 20, 21, 22, 23, 24, 25, 26, 27, 28, 29, 30, 31, 32, 33, 34, 35 or 36 months after the first time point.

[0447] In some embodiments, the first pharmaceutical composition is administered at a third time point, wherein the third time point is at least about, at most about or about 2, 3, 4, 5, 6, 7, 8, 9, 10, 11, 12, 13, 14, 15, 16, 17, 18, 19, 20, 21, 22, 23, 24, 25, 26, 27, 28, 29, 30, 31, 32, 33, 34, 35 or 36 days after the second time point; at least about, at most about or about 1, 2, 3, 4, 5, 6, 7, 8, 9, 10, 11, 12, 13, 14, 15, 16, 17, 18, 19, 20, 21, 22, 23, 24, 25, 26, 27, 28, 29, 30, 31, 32, 33, 34, 35 or 36 weeks after the second time point; or at least about, at most about or about 1, 2, 3, 4, 5, 6, 7, 8, 9, 10, 11, 12, 13, 14, 15, 16, 17, 18, 19, 20, 21, 22, 23, 24, 25, 26, 27, 28, 29, 30, 31, 32, 33, 34, 35 or 36 months after the second time point.

[0448] In some embodiments, the third time point is at least about, at most about or about 4, 5, 6, 7, 8, 9, 10, 11, 12, 13, 14, 15, 16, 17, 18, 19, 20, 21, 22, 23, 24, 25, 26, 27, 28, 29, 30, 31, 32, 33, 34, 35, 36, 37, 38, 39, 40, 41, 42, 43, 44, 45, 46, 47, 48, 49 or 50 days after the first time point; at least about, at most about or about 1, 2, 3, 4, 5, 6, 7, 8, 9, 10, 11, 12, 13, 14, 15, 16, 17, 18, 19, 20, 21, 22, 23, 24, 25, 26, 27, 28, 29, 30, 31, 32, 33, 34, 35 or 36 weeks after the first time point; or at least about, at most about or about 1, 2, 3, 4, 5, 6, 7, 8, 9, 10, 11, 12, 13, 14, 15, 16, 17, 18, 19, 20, 21, 22, 23, 24, 25, 26, 27, 28, 29, 30, 31, 32, 33, 34, 35 or 36 months after the first time point.

[0449] In some embodiments, the second pharmaceutical composition is administered at the first time point.

[0450] In some embodiments, the second pharmaceutical composition is administered at the second time point.

[0451] In some embodiments, the second pharmaceutical composition is administered at the third time point.

[0452] In some embodiments, the second pharmaceutical composition is administered at least about, at most about or about 2, 3, 4, 5, 6, 7, 8, 9, 10, 11, 12, 13, 14, 15, 16, 17, 18, 19, 20, 21, 22, 23, 24, 25, 26, 27, 28, 29, 30, 31, 32, 33, 34, 35 or 36 days after the first time point; at least about, at most about or about 1, 2, 3, 4, 5, 6, 7, 8, 9, 10, 11, 12, 13, 14, 15, 16, 17, 18, 19, 20, 21, 22, 23, 24, 25, 26, 27, 28, 29, 30, 31, 32, 33, 34, 35 or 36 weeks after the first time point; or at least about, at most about or about 1, 2, 3, 4, 5, 6, 7, 8, 9, 10, 11, 12, 13, 14, 15, 16, 17, 18, 19, 20, 21, 22, 23, 24, 25, 26, 27, 28, 29, 30, 31, 32, 33, 34, 35 or 36 months after the first time point.

[0453] In some embodiments, the second pharmaceutical composition is administered at least about, at most about or about 2, 3, 4, 5, 6, 7, 8, 9, 10, 11, 12, 13, 14, 15, 16, 17, 18, 19, 20, 21, 22, 23, 24, 25, 26, 27, 28, 29, 30, 31, 32, 33, 34, 35 or 36 days after the second time point; at least about, at most about or about 1, 2, 3, 4, 5, 6, 7, 8, 9, 10, 11, 12, 13, 14, 15, 16, 17, 18, 19, 20, 21, 22, 23, 24, 25, 26, 27, 28, 29, 30, 31, 32, 33, 34, 35 or 36 weeks after the second time point; or at least about, at most about or about 1, 2, 3, 4, 5, 6, 7, 8, 9, 10, 11, 12, 13, 14, 15, 16, 17, 18, 19, 20, 21, 22, 23, 24, 25, 26, 27, 28, 29, 30, 31, 32, 33, 34, 35 or 36 months after the second time point.

[0454] Provided herein is a method of treating or preventing an infection by a virus or treating a respiratory disease or condition associated with an infection by a virus comprising administering to a subject in need thereof: (i) a pharmaceutical composition comprising (a) a polypeptide comprising at least two of the following (a) a sequence comprising an epitope sequence from ORF1ab, a sequence comprising an epitope sequence from membrane glycoprotein (M), and a sequence comprising an epitope sequence from nucleocapsid phosphoprotein (N); or (b) a polynucleotide encoding a polypeptide comprising at least two of the following (a) a sequence comprising an epitope sequence from ORF1ab, a sequence comprising an epitope sequence from membrane glycoprotein (M), and a sequence comprising an epitope sequence from nucleocapsid phosphoprotein (N); wherein the pharmaceutical composition is administered at a first time point and a second time point, wherein the second time point is at least about 2 days after the first time point.

[0455] In some embodiments, the pharmaceutical composition is administered at a third time point, wherein the third time point is at least about 2 days after the second time point.

[0456] In some embodiments, the second time point is at least about 3, 4, 5, 6, 7, 8, 9, 10, 11, 12, 13, 14, 15, 16, 17, 18, 19, 20, 21, 22, 23, 24, 25, 26, 27, 28, 29, 30, 31, 32, 33, 34, or 35 days after the first time point, at least about 1, 2, 3, 4, 5, 6, 7, 8, 9, 10, 11, 12, 13, 14, 15, 16, 17, 18, 19, 20, 21, 22, 23, 24, 25, 26, 27, 28, 29, 30, 31, 32, 33, 34, or 35 weeks after the first time point, or at least about 1, 3, 4, 5, 6, 7, 8, 9, 10, 11, 12, 13, 14, 15, 16, 17, 18, 19, 20, 21, 22, 23, 24, 25, 26, 27, 28, 29, 30, 31, 32, 33, 34, or 35 months after the first time point.

[0457] In some embodiments, the second time point is at most about 3, 4, 5, 6, 7, 8, 9, 10, 11, 12, 13, 14, 15, 16, 17, 18, 19, 20, 21, 22, 23, 24, 25, 26, 27, 28, 29, 30, 31, 32, 33, 34, or 35 days after the first time point, at most about 1, 2, 3, 4, 5, 6, 7, 8, 9, 10, 11, 12, 13, 14, 15, 16, 17, 18, 19, 20, 21, 22, 23, 24, 25, 26, 27, 28, 29, 30, 31, 32, 33, 34, or 35 weeks after the first time point, or at most about 1, 3, 4, 5, 6, 7, 8, 9, 10, 11, 12, 13, 14, 15, 16, 17, 18, 19, 20, 21, 22, 23, 24, 25, 26, 27, 28, 29, 30, 31, 32, 33, 34, or 35 months after the first time point.

[0458] In some embodiments, the second time point is about 3, 4, 5, 6, 7, 8, 9, 10, 11, 12, 13, 14, 15, 16, 17, 18, 19, 20, 21, 22, 23, 24, 25, 26, 27, 28, 29, 30, 31, 32, 33, 34, or 35 days after the first time point, about 1, 2, 3, 4, 5, 6, 7, 8, 9, 10, 11, 12, 13, 14, 15, 16, 17, 18, 19, 20, 21, 22, 23, 24, 25, 26, 27, 28, 29, 30, 31, 32, 33, 34, or 35 weeks after the first time point, or about 1, 2, 3, 4, 5, 6, 7, 8, 9, 10, 11, 12, 13, 14, 15, 16, 17, 18, 19, 20, 21, 22, 23, 24, 25, 26, 27, 28, 29, 30, 31, 32, 33, 34, or 35 months after the first time point.

[0459] In some embodiments, the third time point is at least about 3, 4, 5, 6, 7, 8, 9, 10, 11, 12, 13, 14, 15, 16, 17, 18, 19, 20, 21, 22, 23, 24, 25, 26, 27, 28, 29, 30, 31, 32, 33, 34, or 35 days after the second time point, at least about 1, 2, 3, 4, 5, 6, 7, 8, 9, 10, 11, 12, 13, 14, 15, 16, 17, 18, 19, 20, 21, 22, 23, 24, 25, 26, 27, 28, 29, 30, 31, 32, 33, 34, or 35 weeks after the second time point, or at least about 1, 2, 3, 4, 5, 6, 7, 8, 9, 10, 11, 12, 13, 14, 15, 16, 17, 18, 19, 20, 21, 22, 23, 24, 25, 26, 27, 28, 29, 30, 31, 32, 33, 34, or 35 months after the second time point.

[0460] In some embodiments, the third time point is at most about 3, 4, 5, 6, 7, 8, 9, 10, 11, 12, 13, 14, 15, 16, 17, 18, 19, 20, 21, 22, 23, 24, 25, 26, 27, 28, 29, 30, 31, 32, 33, 34, or 35 days after the second time point, at most about 1, 2, 3, 4, 5, 6, 7, 8, 9, 10, 11, 12, 13, 14, 15, 16, 17, 18, 19, 20, 21, 22, 23, 24, 25, 26, 27, 28, 29, 30, 31, 32, 33, 34, or 35 weeks after the second time point, or at most about 1, 2, 3, 4, 5, 6, 7, 8, 9, 10, 11, 12, 13, 14, 15, 16, 17, 18, 19, 20, 21, 22, 23, 24, 25, 26, 27, 28, 29, 30, 31, 32, 33, 34, or 35 months after the second time point.

[0461] In some embodiments, the third time point is about 3, 4, 5, 6, 7, 8, 9, 10, 11, 12, 13, 14, 15, 16, 17, 18, 19, 20, 21, 22, 23, 24, 25, 26, 27, 28, 29, 30, 31, 32, 33, 34 or 35 days after the second time point, about 1, 2, 3, 4, 5, 6, 7, 8, 9, 10, 11, 12, 13, 14, 15, 16, 17, 18, 19, 20, 21, 22, 23, 24, 25, 26, 27, 28, 29, 30, 31, 32, 33, 34, or 35 weeks after the second time point, or about 1, 2, 3, 4, 5, 6, 7, 8, 9, 10, 11, 12, 13, 14, 15, 16, 17, 18, 19, 20, 21, 22, 23, 24, 25, 26, 27, 28, 29, 30, 31, 32, 33, 34, or 35 months after the second time point.

[0462] In some embodiments, the third time point is at least about 4, 5, 6, 7, 8, 9, 10, 11, 12, 13, 14, 15, 16, 17, 18, 19, 20, 21, 22, 23, 24, 25, 26, 27, 28, 29, 30, 31, 32, 33, 34, 35 or 36 days after the first time point, at least about 1, 2, 3, 4, 5, 6, 7, 8, 9, 10, 11, 12, 13, 14, 15, 16, 17, 18, 19, 20, 21, 22, 23, 24, 25, 26, 27, 28, 29, 30, 31, 32, 33, 34, or 35 weeks after the first time point, or at least about 1, 2, 3, 4, 5, 6, 7, 8, 9, 10, 11, 12, 13, 14, 15, 16, 17, 18, 19, 20, 21, 22, 23, 24, 25, 26, 27, 28, 29, 30, 31, 32, 33, 34, or 35 months after the first time point.

[0463] In some embodiments, the third time point is at most about 4, 5, 6, 7, 8, 9, 10, 11, 12, 13, 14, 15, 16, 17, 18, 19, 20, 21, 22, 23, 24, 25, 26, 27, 28, 29, 30, 31, 32, 33, 34, 35 or 36 days after the first time point, at most about 1, 2, 3, 4, 5, 6, 7, 8, 9, 10, 11, 12, 13, 14, 15, 16, 17, 18, 19, 20, 21, 22, 23, 24, 25, 26, 27, 28, 29, 30, 31, 32, 33, 34, or 35 weeks after the first time point, or at most about 1, 2, 3, 4, 5, 6, 7, 8, 9, 10, 11, 12, 13, 14, 15, 16, 17, 18, 19, 20, 21, 22, 23, 24, 25, 26, 27, 28, 29, 30, 31, 32, 33, 34, or 35 months after the first time point.

[0464] In some embodiments, the third time point about 4, 5, 6, 7, 8, 9, 10, 11, 12, 13, 14, 15, 16, 17, 18, 19, 20, 21, 22, 23, 24, 25, 26, 27, 28, 29, 30, 31, 32, 33, 34, 35 or 36 days after the first time point, about 1, 2, 3, 4, 5, 6, 7, 8, 9, 10, 11, 12, 13, 14, 15, 16, 17, 18, 19, 20, 21, 22, 23, 24, 25, 26, 27, 28, 29, 30, 31, 32, 33, 34, or 35 weeks after the first time point, or about 1, 2, 3, 4, 5, 6, 7, 8, 9, 10, 11, 12, 13, 14, 15, 16, 17, 18, 19, 20, 21, 22, 23, 24, 25, 26, 27, 28, 29, 30, 31, 32, 33, 34, or 35 months after the first time point.

[0465] In some embodiments, the method further comprises administering to the subject: (ii)(a) a polypeptide having an amino acid sequence of a 2019 SARS-CoV 2 spike protein or a variant or fragment thereof; (b) a recombinant polynucleotide encoding a 2019 SARS-CoV 2 spike protein or a variant or fragment thereof; or a 2019 SARS-CoV 2 spike protein pharmaceutical composition comprising (ii)(a) or (ii)(b).

[0466] In some embodiments, the subject has an immunodeficiency.

[0467] In some embodiments, the subject has a B cell immunodeficiency.

[0468] In some embodiments, the pharmaceutical composition is administered prophylactically.

[0469] Provided herein is a pharmaceutical composition comprising: (i) a recombinant polynucleotide encoding a polypeptide comprising at least two of the following (a) a sequence comprising an epitope sequence from ORF1ab, a sequence comprising an epitope sequence from membrane glycoprotein (M), and a sequence comprising an epitope sequence from nucleocapsid phosphoprotein (N); and (ii) a recombinant polynucleotide encoding a 2019 SARS-CoV 2 spike protein or a variant or fragment thereof.

[0470] In some embodiments, the ratio (e.g., mass ratio) of (i):(ii) is from 20:1 to 1:20.

[0471] In some embodiments, the ratio (e.g., mass ratio) of (i):(ii) is less than 20:1, 30:1, 40:1, 50:1, 60:1, 70:1, 80:1, 90:1 or 100:1.

[0472] In some embodiments, the ratio (e.g., mass ratio) of (i):(ii) is greater than 1:20, 1:30, 1:40, 1:50, 1:60, 1:70, 1:80, 1:90 or 1:100.

[0473] Provided herein is a composition comprising: (i) a first pharmaceutical composition comprising a first recombinant polynucleotide encoding a polypeptide comprising at least two of the following (a) a sequence comprising an epitope sequence from ORF1ab, a sequence comprising an epitope sequence from membrane glycoprotein (M), and a sequence comprising an epitope sequence from nucleocapsid phosphoprotein (N); and (ii) a second pharmaceutical composition comprising a second recombinant polynucleotide encoding a 2019 SARS-CoV 2 spike protein or a variant or fragment thereof.

[0474] In some embodiments, the ratio (e.g., mass ratio) of the recombinant polynucleotide in (i) to the recombinant polynucleotide in (ii) is from 1:50 to 50:1.

[0475] In some embodiments, the ratio (e.g., mass ratio) of the recombinant polynucleotide in (i) to the recombinant polynucleotide in (ii) is from about 1:25 to 25:1.

[0476] In some embodiments, the ratio (e.g., mass ratio) of the recombinant polynucleotide in (i) to the recombinant polynucleotide in (ii) is from about 1:10 to 10:1.

[0477] In some embodiments, the ratio (e.g., mass ratio) of the recombinant polynucleotide in (i) to the recombinant polynucleotide in (ii) is about 1:10, 1:9, 1:8, 1:7, 1:6, 1:5, 1:4, 1:3, 1:2, 1:1, 2:1, 3:1, 4:1, 5:1, 6:1, 7:1, 8:1, 9:1, 10:1, 1:9.5, 1:8.5, 1:7.5, 1:6.5, 1:5.5, 1:4.5, 1:3.5, 1:2.5, 1:1.5, 2.5:1, 3.5:1, 4.5:1, 5.5:1, 6.5:1, 7.5:1, 8.5:1, 9.5:1, 2:9, 2:8, 2:7, 2:6, 2:5, 2:4, 2:3, 3:2, 4:2, 5:2, 6:2, 7:2, 8:2, 9:2, 3:8, 3:7, 3:5, 3:4, 4:3, 5:3, 7:3, 8:3, 4:9, 4:7, 4:5, 5:4, 7:4, 9:4, 5:9, 5:8, 5:7, 5:6, 6:5, 7:5, 8:5, 9:5, 6:7, 7:6, 7:8, 8:7, 8:9 or 9:8.

[0478] Provided herein is a pharmaceutical composition comprising: (i) a first recombinant polynucleotide encoding a polypeptide comprising at least two of the following (a) a sequence comprising an epitope sequence from ORF1ab, a sequence comprising an epitope sequence from membrane glycoprotein (M), and a sequence comprising an epitope sequence from nucleocapsid phosphoprotein (N); and (ii) a second recombinant polynucleotide encoding a 2019 SARS-CoV 2 spike protein or a variant or fragment thereof.

[0479] In some embodiments, the pharmaceutical composition comprises a nanoparticle, wherein the nanoparticle comprises the first recombinant polynucleotide and the second recombinant polynucleotide.

[0480] In some embodiments, the nanoparticle is present in the pharmaceutical composition at a dose of from 100 ng to 500 micrograms.

[0481] In some embodiments, the nanoparticle is present in the pharmaceutical composition at a dose of from 1 microgram to 100 micrograms.

[0482] In some embodiments, the nanoparticle is present in the pharmaceutical composition at a dose of from 1 microgram to 30 micrograms, 5 micrograms to 40 micrograms or 10 microgram to 50 micrograms.

[0483] In some embodiments, the nanoparticle is present in the pharmaceutical composition at a dose of 0.1, 0.2, 0.3, 0.4, 0.5, 0.6, 0.7, 0.8, 0.9, 1, 2, 3, 4, 5, 6, 7, 8, 9, 10, 15, 20, 25, 30, 35, 40, 45, 50, 55, 60, 65, 70, 75, 80, 85, 90, 95, 100, 150, 200, 250, 300, 350, 400, 450, 500, 600, 700, 800, 900 or 1,000 micrograms.

[0484] In some embodiments, the ratio (e.g., mass ratio) of the first recombinant polynucleotide to the second recombinant polynucleotide is from about 1:50 to 50:1.

[0485] In some embodiments, the ratio (e.g., mass ratio) of the first recombinant polynucleotide to the second recombinant polynucleotide is from about 1:25 to 25:1.

[0486] In some embodiments, the ratio (e.g., mass ratio) of the first recombinant polynucleotide to the second recombinant polynucleotide is from about 1:10 to 10:1.

[0487] In some embodiments, the ratio (e.g., mass ratio) of the first recombinant polynucleotide to the second recombinant polynucleotide is about 1:10, 1:9, 1:8, 1:7, 1:6, 1:5, 1:4, 1:3, 1:2, 1:1, 2:1, 3:1, 4:1, 5:1, 6:1, 7:1, 8:1, 9:1, 10:1, 1:9.5, 1:8.5, 1:7.5, 1:6.5, 1:5.5, 1:4.5, 1:3.5, 1:2.5, 1:1.5, 2.5:1, 3.5:1, 4.5:1, 5.5:1, 6.5:1, 7.5:1, 8.5:1, 9.5:1, 2:9, 2:8, 2:7, 2:6, 2:5, 2:4, 2:3, 3:2, 4:2, 5:2, 6:2, 7:2, 8:2, 9:2, 3:8, 3:7, 3:5, 3:4, 4:3, 5:3, 7:3, 8:3, 4:9, 4:7, 4:5, 5:4, 7:4, 9:4, 5:9, 5:8, 5:7, 5:6, 6:5, 7:5, 8:5, 9:5, 6:7, 7:6, 7:8, 8:7, 8:9 or 9:8.

[0488] Provided herein is a composition comprising: (i) a first pharmaceutical composition comprising a recombinant polynucleotide encoding a polypeptide comprising at least two of the following (a) a sequence comprising an epitope sequence from ORF1ab, a sequence comprising an epitope sequence from membrane glycoprotein (M), and a sequence comprising an epitope sequence from nucleocapsid phosphoprotein (N); and (ii) a second pharmaceutical composition comprising a recombinant polynucleotide encoding a 2019 SARS-CoV 2 spike protein or a variant or fragment thereof.

[0489] In some embodiments, the first pharmaceutical composition comprises a first nanoparticle, wherein the first nanoparticle comprises the recombinant polynucleotide encoding a polypeptide comprising at least two of the following (a) a sequence comprising an epitope sequence from ORF1ab, a sequence comprising an epitope sequence from membrane glycoprotein (M), and a sequence comprising an epitope sequence from nucleocapsid phosphoprotein (N); and wherein the second pharmaceutical composition comprises a second nanoparticle, wherein the second nanoparticle comprises the recombinant polynucleotide encoding a 2019 SARS-CoV 2 spike protein or a variant or fragment thereof.

[0490] In some embodiments, the ratio (e.g., mass ratio) of the recombinant polynucleotide in (i) to the recombinant polynucleotide in (ii) is from about 1:50 to 50:1.

[0491] In some embodiments, the ratio (e.g., mass ratio) of the recombinant polynucleotide in (i) to the recombinant polynucleotide in (ii) is from about 1:25 to 25:1.

[0492] In some embodiments, the ratio (e.g., mass ratio) of the recombinant polynucleotide in (i) to the recombinant polynucleotide in (ii) is from about 1:10 to 10:1.

[0493] In some embodiments, the ratio (e.g., mass ratio) of the recombinant polynucleotide in (i) to the recombinant polynucleotide in (ii) is about 1:10, 1:9, 1:8, 1:7, 1:6, 1:5, 1:4, 1:3, 1:2, 1:1, 2:1, 3:1, 4:1, 5:1, 6:1, 7:1, 8:1, 9:1, 10:1, 1:9.5, 1:8.5, 1:7.5, 1:6.5, 1:5.5, 1:4.5, 1:3.5, 1:2.5, 1:1.5, 2.5:1, 3.5:1, 4.5:1, 5.5:1, 6.5:1, 7.5:1, 8.5:1, 9.5:1, 2:9, 2:8, 2:7, 2:6, 2:5, 2:4, 2:3, 3:2, 4:2, 5:2, 6:2, 7:2, 8:2, 9:2, 3:8, 3:7, 3:5, 3:4, 4:3, 5:3, 7:3, 8:3, 4:9, 4:7, 4:5, 5:4, 7:4, 9:4, 5:9, 5:8, 5:7, 5:6, 6:5, 7:5, 8:5, 9:5, 6:7, 7:6, 7:8, 8:7, 8:9 or 9:8.

[0494] In some embodiments, the first nanoparticle is present in the first pharmaceutical composition at a dose of from about 100 ng to 500 micrograms.

[0495] In some embodiments, the first nanoparticle is present in the first pharmaceutical composition at a dose of from about 1 microgram to 100 micrograms.

[0496] In some embodiments, the first nanoparticle is present in the first pharmaceutical composition at a dose of from about 1 microgram to 30 micrograms, 5 micrograms to 40 micrograms or 10 microgram to 50 micrograms.

[0497] In some embodiments, the first nanoparticle is present in the first pharmaceutical composition at a dose of about 0.1, 0.2, 0.3, 0.4, 0.5, 0.6, 0.7, 0.8, 0.9, 1, 2, 3, 4, 5, 6, 7, 8, 9, 10, 15, 20, 25, 30, 35, 40, 45, 50, 55, 60, 65, 70, 75, 80, 85, 90, 95, 100, 150, 200, 250, 300, 350, 400, 450, 500, 600, 700, 800, 900 or 1,000 micrograms.

[0498] In some embodiments, the second nanoparticle is present in the second pharmaceutical composition at a dose of from about 100 ng to 500 micrograms.

[0499] In some embodiments, the second nanoparticle is present in the second pharmaceutical composition at a dose of from about 1 microgram to 100 micrograms.

[0500] In some embodiments, the second nanoparticle is present in the second pharmaceutical composition at a dose of from about 1 microgram to 30 micrograms, 5 micrograms to 40 micrograms or 10 microgram to 50 micrograms.

[0501] In some embodiments, the second nanoparticle is present in the second pharmaceutical composition at a dose of about 0.1, 0.2, 0.3, 0.4, 0.5, 0.6, 0.7, 0.8, 0.9, 1, 2, 3, 4, 5, 6, 7, 8, 9, 10, 15, 20, 25, 30, 35, 40, 45, 50, 55, 60, 65, 70, 75, 80, 85, 90, 95, 100, 150, 200, 250, 300, 350, 400, 450, 500, 600, 700, 800, 900 or 1,000 micrograms.

[0502] In some embodiments, the recombinant polynucleotide in (i) is present in the first pharmaceutical composition at a dose of from about 50 ng to 250 micrograms.

[0503] In some embodiments, the recombinant polynucleotide in (i) is present in the first pharmaceutical composition at a dose of from about 0.5 to 50 micrograms.

[0504] In some embodiments, the recombinant polynucleotide in (i) is present in the first pharmaceutical composition at a dose of from about 0.5 microgram to 15 micrograms, 2.5 micrograms to 20 micrograms or 5 microgram to 25 micrograms.

[0505] In some embodiments, the recombinant polynucleotide in (i) is present in the first pharmaceutical composition at a dose of about 0.05, 0.1, 0.2, 0.3, 0.4, 0.5, 0.6, 0.7, 0.8, 0.9, 1, 2, 3, 4, 5, 6, 7, 8, 9, 10, 15, 20, 25, 30, 35, 40, 45, 50, 55, 60, 65, 70, 75, 80, 85, 90, 95, 100, 150, 200, 250, 300, 350, 400, 450 or 500 micrograms.

[0506] In some embodiments, the recombinant polynucleotide in (ii) is present in the second pharmaceutical composition at a dose of from about 50 ng to 250 micrograms.

[0507] In some embodiments, the recombinant polynucleotide in (ii) is present in the second pharmaceutical composition at a dose of from about 0.5 to 50 micrograms.

[0508] In some embodiments, the recombinant polynucleotide in (ii) is present in the second pharmaceutical composition at a dose of from about 0.5 microgram to 15 micrograms, 2.5 micrograms to 20 micrograms or 5 microgram to 25 micrograms.

[0509] In some embodiments, the recombinant polynucleotide in (ii) is present in the second pharmaceutical composition at a dose of about 0.05, 0.1, 0.2, 0.3, 0.4, 0.5, 0.6, 0.7, 0.8, 0.9, 1, 2, 3, 4, 5, 6, 7, 8, 9, 10, 15, 20, 25, 30, 35, 40, 45, 50, 55, 60, 65, 70, 75, 80, 85, 90, 95, 100, 150, 200, 250, 300, 350, 400, 450 or 500 micrograms.

[0510] In some embodiments, the nanoparticle is a lipid nanoparticle.

[0511] Provided herein is a composition comprising: (i) a polypeptide comprising at least two of the following (a) a sequence comprising an epitope sequence from ORF1ab, (b) a sequence comprising an epitope sequence from membrane glycoprotein (M) and (c) a sequence comprising an epitope sequence from nucleocapsid phosphoprotein (N); (ii) a polynucleotide encoding a polypeptide, wherein the polypeptide comprises at least two of the following (a) a sequence comprising an epitope sequence from ORF1ab, (b) a sequence comprising an epitope sequence from membrane glycoprotein (M) and (c) a sequence comprising an epitope sequence from nucleocapsid phosphoprotein (N); (iii) a T cell receptor (TCR) or a T cell comprising the TCR, wherein the TCR binds to an epitope sequence of the polypeptide in complex with a corresponding HLA class I or class II molecule; (iv) an antigen presenting cell comprising (i) or (ii); or (v) an antibody or B cell comprising the antibody, wherein the antibody binds to an epitope sequence of the polypeptide; and a pharmaceutically acceptable excipient.

[0512] In some embodiments, the polypeptide comprises (a) a sequence comprising an epitope sequence from ORF1ab, (b) a sequence comprising an epitope sequence from membrane glycoprotein (M) and (c) a sequence comprising an epitope sequence from nucleocapsid phosphoprotein (N). In some embodiments, the sequence comprising an epitope sequence from ORF1ab is C-terminal to the sequence comprising an epitope sequence from nucleocapsid phosphoprotein (N). In some embodiments, the sequence comprising an epitope sequence from ORF1ab is N-terminal to the sequence comprising an epitope sequence from membrane glycoprotein (M). In some embodiments, the sequence comprising an epitope sequence from nucleocapsid phosphoprotein (N) is N-terminal to the sequence comprising an epitope sequence from membrane glycoprotein (M).

[0513] In some embodiments, the polypeptide comprises at least two of the following (a) a sequence comprising an epitope sequence from ORF1ab, (b) a sequence comprising an epitope sequence from membrane glycoprotein (M) and (c) a sequence comprising an epitope sequence from nucleocapsid phosphoprotein (N)

[0514] In some embodiments, the polypeptide comprises (a) 2, 3, 4, 5, 6, 7, 8, 9 or 10 or more epitope sequence from ORF1ab, (b) a sequence comprising an epitope sequence from membrane glycoprotein (M) and (c) a sequence comprising an epitope sequence from nucleocapsid phosphoprotein (N).

[0515] In some embodiments, the epitope sequence from ORF1ab is an epitope sequence from a non-structural protein. In some embodiments, the non-structural protein is selected from the group consisting of NSP1, NSP2, NSP3, NSP4 and combinations thereof. In some embodiments, the polypeptide comprises a sequence comprising an epitope sequence from NSP1, a sequence comprising an epitope sequence from NSP2, a sequence comprising an epitope sequence from NSP3 and a sequence comprising an epitope sequence from NSP4.

[0516] In some embodiments, the epitope sequence from ORF1ab is selected from the group consisting of YLFDESGEFKL, YLFDESGEF, FGDDTVIEV, QLMCQPILL, TTDPSFLGRY, PTDNYITTY, PSFLGRY, AEAELAKNV, KTIQPRVEK and any combination thereof.

[0517] In some embodiments, the epitope sequence from nucleocapsid glycoprotein (N) is LLLDRLNQL. In some embodiments, the epitope sequence from membrane phosphoprotein (M) is VATSRTLSY. In some embodiments, the polypeptide comprises an epitope sequence from nucleocapsid glycoprotein (N) that is LLLDRLNQL and an epitope sequence from membrane phosphoprotein (M) that is VATSRTLSY.

[0518] In some embodiments, the polypeptide comprises (a) each of the following epitope sequences from ORF1ab: YLFDESGEFKL, YLFDESGEF, FGDDTVIEV, QLMCQPILL, TTDPSFLGRY, PTDNYITTY, PSFLGRY, AEAELAKNV, KTIQPRVEK; (b) an epitope sequence from nucleocapsid glycoprotein (N) that is LLLDRLNQL; and (c) an epitope sequence from membrane phosphoprotein (M) that is VATSRTLSY.

[0519] In some embodiments, the sequence comprising an epitope sequence from ORF1ab is selected from the group consisting of the following sequences or fragments thereof:

MVTNNTFTLKVPHVGEIPVAYRKVLLKTIQPRVEKYLFDESGEFKLSEVG
PEHSLAEYYIFFASFYY; MVTNNTFTLKVPHVGEIPVAYRKVLLKTIQP
RVEKYLFDESGEFKLSEVGPEHSLAEY; APKEIIFLEGETLFGDDTVIE
VAIILASFSAST; APKEIIFLEGETLFGDDTVIEV; HTTDPSFLGRYM
SALFADDLNQLTGYHTDFSSEIIGYQLMCQPILLAEAELAKNVSLILGTV
SWNL; TTDPSFLGRYMSALFADDLNQLTGYHTDFSSEIIGYQLMCQPIL
LAEAELAKNVSLILGTVSWNL; LLSAGIFGAITDVFYKENSYKVPTDNY
ITTY; and combinations thereof.

[0520] In some embodiments, the sequence comprising an epitope sequence from membrane glycoprotein (M) is selected from the group consisting of the following sequences or fragments thereof:

ADSNGTITVEELKKLLEQWNLVIGFLFLTWICLLQFAYANRNRFLYIIKL
IFLWLLWPVTLACFVLAAVYRINWITGGIAIAMACLVGLMWLSYFIASFR
LFARTRSMWSFNPETNILLNVPLHGTILTRPLLESELVIGAVILRGHLRI
AGHHLGRCDIKDLPKEITVATSRTLSYYKLGASQRVAGDSGFAAYSRYRI
GNYKLNTDHSSSSDNIALLVQ; FAYANRNRFLYIIKLIFLWLLWPVTLA
CFVLAAVYRINWITGGIAIAMACLVGLMWLSYFIASFRLF; LGRCDIKD
LPKEITVATSRTLSYYKLGASQRVA; KLLEQWNLVIGF; NRNRFLYII
KLIFLWLLWPVTLACFVLAAVY; SELVIGAVILRGHLRIAGHHLGR;
VATSRTLSYYKLGASQRV; GLMWLSYF; and combinations
thereof.

[0521] In some embodiments, the sequence comprising an epitope sequence from nucleocapsid phosphoprotein (N) is selected from the group consisting of the following sequences or fragments thereof:

KDLSPRWYFYYLGTGPEAGLPYGANKDGIIWVATEGALNTPKDHIGTRNP
ANNAAIVLQLPQGTTLPKGFYAEGSRGGSQASSRSSSRSRNSSRNSTPGS
SRGTSPARMAGNGGDAALALLLLDRLNQLESKMSGKGQQQQGQTVTKKSA
AEASKKPRQKRTATKAYNVTQAFGRRGPEQTQGNFGDQELIRQGTDYKHW
PQIAQFAPSASAFFGMSRIGMEVTPSGTWLTYTGAIKLDDKDPNFKDQVI
LLNKHIDAYKTFPPTEPKKDKKKKADETQALPQRQKKQQTVTLLPAADLD
DFSKQLQQSMSSADSTQA;RMAGNGGDAALALLLLDRLNQLESKMSGKGQ
QQ;YKHWPQIAQFAPSASAFFGMSRIGMEVTPSGTWLTYTGAIKLDDKDP
NFKDQVILLNKHIDAYKTFP;SPARMAGNGGDAALALLLLDRLNQLESKM
SGKGQQQQGQTVTKKSAAEASKKPRQKRTATKAYNVTQAFGRRGPEQTQG
NFGDQELIRQGTDYKHWPQIAQFAPSASAFFGMSRIGMEVTPSGTWLTYT
GAIKLDDKDPNFKDQVILLNKHIDAYKTFPPTEPKKDK and
combinations thereof.

[0522] In some embodiments, the polypeptide comprises one or more linker sequences. In some embodiments, the one or more linker sequences are selected from the group consisting of GGSGGGGSGG, GGSLGGGGSG. In some embodiments, the one or more linker sequences comprise cleavage sequences. In some embodiments, the one or more cleavage sequences are selected from the group consisting of FRAC, KRCF, KKRY, ARMA, RRSG, MRAC, KMCG, ARCA, KKQG, YRSY, SFMN, FKAA, KRNG, YNSF, KKNG, RRRG, KRYS, and ARYA.

[0523] In some embodiments, the polypeptide comprises a transmembrane domain sequence. In some embodiments, the transmembrane sequence is C-terminal to the sequence comprising an epitope sequence from ORF1ab, the sequence comprising an epitope sequence from membrane glycoprotein (M) and the sequence comprising an epitope sequence from nucleocapsid phosphoprotein (N). In some embodiments, the is transmembrane sequence EQYIKWPWYIWLGFIAGLIAIVMVTIMLCCMTSCCSCLKGCCSCGSCCKFDEDDSEPVLKGVKL HYT.

[0524] In some embodiments, the polypeptide comprises an SEC sequence. In some embodiments, the SEC sequence is N-terminal to the sequence comprising an epitope sequence from ORF1ab, the sequence comprising an epitope sequence from membrane glycoprotein (M) and the sequence comprising an epitope sequence from nucleocapsid phosphoprotein (N). In some embodiments, the SEC sequence is MFVFLVLLPLVSSQCVNLT.

[0525] In some embodiments, the composition comprises the polynucleotide encoding the polypeptide. In some embodiments, the polynucleotide is an mRNA. In some embodiments, the polynucleotide comprises a codon optimized sequence for expression in a human.

[0526] In some embodiments, the polynucleotide comprises a dEarI-hAg sequence. In some embodiments, the dEarI-hAg sequence is ATTCTTCTGGTCCCCACAGACTCAGAGAGAACCC, optionally wherein each T is a U.

[0527] In some embodiments, the polynucleotide comprises a Kozak sequence. In some embodiments, the a Kozak sequences is GCCACC.

[0528] In some embodiments, the polynucleotide comprises an F element sequence. In some embodiments, the F element sequence is a 3 UTR of amino-terminal enhancer of split (AES). In some embodiments, the F element sequence is CTGGTACTGCATGCACGCAATGCTAGCTGCCCCTTTCCCGTCCTGGGTACCCCGAGTCTCCC CCGACCTCGGGTCCCAGGTATGCTCCCACCTCCACCTGCCCCACTCACCACCTCTGCTAGTTC CAGACACCTCC, optionally wherein each T is a U.

[0529] In some embodiments, the polynucleotide comprises an I element sequence. In some embodiments, the I element sequence is a 3′ UTR of mitochondrially encoded 12S rRNA (mtRNR1). In some embodiments, the I element sequence is CAAGCACGCAGCAATGCAGCTCAAAACGCTTAGCCTAGCCACACCCCCACGGGAAACAGCA GTGATTAACCTTTAGCAATAAACGAAAGTTTAACTAAGCTATACTAACCCCAGGGTTGGTCA ATTTCGTGCCAGCCACACC, optionally wherein each T is a U.

[0530] In some embodiments, the polynucleotide comprises a poly A sequence. In some embodiments, the poly A sequence is AAAAAAAAAAAAAAAAAAAAAAAAAAAAAAGCATATGACTAAAAAAAAAAAAAAAAAAA AAAAAAAAAAAAAAAAAAAAAAAAAAAAAAAAAAAAAAAAAAAAAAAAAAA, optionally wherein each T is a U.

[0531] In some embodiments, each of the epitope sequences from the ORF1ab, the membrane glycoprotein, and the nucleocapsid phosphoprotein are from 2019 SARS-CoV-2.

[0532] In some embodiments, one or more or each epitope elicits a T cell response.

[0533] In some embodiments, one or more or each epitope has been observed by mass spectrometry as being presented by an HLA molecule.

[0534] In some embodiments, the composition comprises (i) a polypeptide with at least 70%, at least 75%, at least 80%, at least 85%, at least 90%, at least 95%, or 100% sequence identity to a sequence selected from the group consisting of RS C1p1full, RS C2p1full, RS C3p1full, RS C4p1full, RS C5p1, RS C5p2, RS C5p2full, RS C6p1, RS C6p2, RS C6p2full, RS C7p1, RS C7p2, RS C7p2full, RS C7p4, RS C7p4full, RS C8p1, RS C8p2 and RS C8p2full; (ii) a polynucleotide encoding a polypeptide with at least 70%, at least 75%, at least 80%, at least 85%, at least 90%, at least 95%, or 100% sequence identity to a sequence selected from the group consisting of RS C1p1full, RS C2p1full, RS C3p1full, RS C4p1full, RS C5p1, RS C5p2, RS C5p2full, RS C6p1, RS C6p2, RS C6p2full, RS C7p1, RS C7p2, RS C7p2full, RS C7p4, RS C7p4full, RS C8p1, RS C8p2 and RS C8p2full; or (iii) a polynucleotide with at least at least 70%, at least 75%, at least 80%, at least 85%, at least 90%, at least 95%, or 100% sequence identity to a sequence selected from the group consisting of SEQ ID NOs: RS C1n1, RS C2n1, RS C3n1, RS C4n1, RS C5n1, RS Con1, RS C7n1, RS C8n1, RS C5n2, RS Con2, RS C7n2, RS C8n2, RS C5n2full, RS Con2full, RS C7n2full, RS C8n2full, RS C7n4, RS C7n4full.

[0535] Also provided herein is a pharmaceutical composition comprising any of the compositions described herein.

[0536] Also provided herein is a pharmaceutical composition comprising: (i) a polypeptide comprising an epitope sequence of Table 1A, Table 1B, Table 1C, Table 2Ai, Table 2Aii, Table 2B and/or Table 16; (ii) a polynucleotide encoding the polypeptide; (iii) a T cell receptor (TCR) or a T cell comprising the TCR, wherein the TCR binds to the epitope sequence in complex with a corresponding HLA class I or class II molecule; (iv) an antigen presenting cell comprising (i) or (ii); or (v) an antibody or B cell comprising the antibody, wherein the antibody binds to the epitope sequence; and a pharmaceutically acceptable excipient.

[0537] In some embodiments, the epitope sequence comprises one or more or each of the following: YLFDESGEFKL, YLFDESGEF, FGDDTVIEV, LLLDRLNQL, QLMCQPILL, TTDPSFLGRY, PTDNYITTY, PSFLGRY, AEAELAKNV, VATSRTLSY and KTIQPRVEK. In some embodiments, the epitope sequence comprises one or more or each of the following: SAPPAQYEL, AVASKILGL, EYADVFHLY, DEFTPFDVV, VRIQPGQTF, SFRLFARTR, KFLPFQQF, VVQEGVLTA, RLDKVEAEV, FGADPIHSL, NYNYLYRLF, KYIKWPWYI, KWPWYIWLGF, LPFNDGVYF, QPTESIVRF, IPFAMQMAY, YLOPRTFLL and RLQSLQTYV.

[0538] In some embodiments, the epitope sequence is from an orflab protein. In some embodiments, the epitope sequence is from an orfla protein In some embodiments, the epitope sequence is from a surface glycoprotein(S) or a shifted reading frame thereof. In some embodiments, the epitope sequence is from a nucleocapsid phosphoprotein (N). In some embodiments, the epitope sequence is from an ORF3a protein. In some embodiments, the epitope sequence is from a membrane glycoprotein (M). In some embodiments, the epitope sequence is from an ORF7a protein. In some embodiments, the epitope sequence is from an ORF8 protein. In some embodiments, the epitope sequence is from an envelope protein (E). In some embodiments, the epitope sequence is from an ORF6 protein. In some embodiments, the epitope sequence is from an ORF7b protein. In some embodiments, the epitope sequence is from an ORF10 protein. In some embodiments, the epitope sequence is from an ORF9b protein.

[0539] Also provided herein is a pharmaceutical composition comprising: a polypeptide having an amino acid sequence with at least 70%, at least 75%, at least 80%, at least 85%, at least 90%, at least 95%, or 100% sequence identity to a sequence of any one of the sequences depicted in column 2 of Table 11, column 2 of Table 12 or column 3 of Table 15; or a recombinant polynucleotide encoding a polypeptide having an amino acid sequence with at least at least 70%, at least 75%, at least 80%, at least 85%, at least 90%, at least 95%, or 100% sequence identity to a sequence of any one of the sequences depicted in column 2 of Table 11, column 2 of Table 12 or column 3 of Table 15.

[0540] In some embodiments, the pharmaceutical composition comprises a polypeptide with at least at least 70%, at least 75%, at least 80%, at least 85%, at least 90%, at least 95%, or 100% sequence identity to a sequence selected from the group consisting of RS C1p1full, RS C2p1full, RS C3p1full, RS C4p1full, RS C5p1, RS C5p2, RS C5p2full, RS C6p1, RS C6p2, RS C6p2full, RS C7p1, RS C7p2, RS C7p2full, RS C7p4, RS C7p4full, RS C8p1, RS C8p2 and RS C8p2full; or a polynucleotide encoding a polypeptide with at least 70%, at least 75%, at least 80%, at least 85%, at least 90%, at least 95%, or 100% sequence identity to a sequence selected from the group consisting of RS Clp1full, RS C2p1full, RS C3p1full, RS C4p1full, RS C5p1, RS C5p2, RS C5p2full, RS C6p1, RS C6p2, RS C6p2full, RS C7p1, RS C7p2, RS C7p2full, RS C7p4, RS C7p4full, RS C8p1, RS C8p2 and RS C8p2full. In some embodiments, the pharmaceutical composition comprises a polynucleotide with at least 70%, at least 75%, at least 80%, at least 85%, at least 90%, at least 95%, or 100% sequence identity to a sequence selected from the group consisting of SEQ ID NOs: RS C1n1, RS C2n1, RS C3n1, RS C4n1, RS C5n1, RS Con1, RS C7n1, RS C8n1, RS C5n2, RS C6n2, RS C7n2, RS C8n2, RS C5n2full, RS Con2full, RS C7n2full, RS C8n2full, RS C7n4 and RS C7n4full,.

[0541] In some embodiments, the polynucleotide is an mRNA.

[0542] In some embodiments, the pharmaceutical composition further comprises one or more lipid components. In some embodiments, the one or more lipids comprise a lipid nanoparticle (LNP). In some embodiments, the LNP encapsulates the recombinant polynucleotide construct.

[0543] In some embodiments, the polypeptide is synthetic. In some embodiments, the polypeptide is recombinant.

[0544] In some embodiments, the polypeptide is from 8-1000 amino acids in length.

[0545] In some embodiments, the epitope sequence binds to or is predicted to bind to an HLA class I or class II molecule with a K_{D} of 1000 nM or less. In some embodiments, the epitope sequence binds to or is predicted to bind to an HLA class I or class II molecule with a K_{D} of 500 nM or less.

[0546] In some embodiments, the epitope sequence comprises a sequence of a viral protein expressed by a virus-infected cell of a subject.

[0547] Also provided herein is a method of treating or preventing an infection by a virus or treating a respiratory disease or condition associated with an infection by a virus comprising administering to a subject in need thereof a pharmaceutical composition described herein.

[0548] In some embodiments, the virus is a coronavirus. In some embodiments, the virus is 2019 SARS-CoV 2. In some embodiments, an HLA molecule expressed by the subject is unknown at the time of administration. In some embodiments, the ability of the virus to avoid escape of recognition by an immune system of the subject is less compared to the ability of the virus to avoid escape of recognition by an immune system of a subject administered a pharmaceutical composition containing an epitope from a single protein or epitopes from fewer proteins than in a pharmaceutical composition described herein. In some embodiments, the subject express an HLA molecule encoded by an HLA allele of any one of Table 1A, Table 1B, Table 1C, Table 2Ai or Table 2Aii, Table 2B or Table 16 and the epitope sequence is an HLA allele-matched epitope sequence.

[0549] In some embodiments, the epitope sequence comprises one or more or each of the following: SAPPAQYEL, AVASKILGL, EYADVFHLY, DEFTPFDVV, VRIQPGQTF, SFRLFARTR, KFLPFQQF, VVQEGVLTA, RLDKVEAEV and FGADPIHSL.

[0550] Also provided herein is a method of treating or preventing a 2019 SARS-CoV 2 infection in a subject in need thereof, comprising administering to the subject a pharmaceutical composition described herein.

[0551] In some embodiments, the pharmaceutical composition is administered in addition to one or more therapeutics for the 2019 SARS-CoV 2 viral infection in the subject. In some embodiments, the pharmaceutical composition is administered in combination with (a) a polypeptide having an amino acid sequence of a 2019 SARS-CoV 2 spike protein or a variant or fragment thereof; (b) a recombinant polynucleotide encoding a 2019 SARS-CoV 2 spike protein or a variant or fragment thereof; or a 2019 SARS-CoV 2 spike protein pharmaceutical composition comprising (a) or (b). In some embodiments, the 2019 SARS-CoV 2 spike protein or a variant or fragment thereof is a SARS-CoV-2 spike protein or a fragment thereof.

[0552] In some embodiments, the pharmaceutical composition is administered 1-10 weeks after a first administration of the 2019 SARS-CoV 2 spike protein pharmaceutical composition. In some embodiments, the pharmaceutical composition is administered 1-6 weeks, 1-6 months or 1-2 years or later after a first administration of the 2019 SARS-CoV 2 spike protein pharmaceutical composition. In some embodiments, the pharmaceutical composition is administered on the same day or simultaneously with an administration of the 2019 SARS-CoV 2 spike protein pharmaceutical composition. In some embodiments, the pharmaceutical composition is co-formulated with the polypeptide having an amino acid sequence of a 2019 SARS-CoV 2 spike protein or a variant or fragment thereof or the recombinant polynucleotide encoding a 2019 SARS-CoV 2 spike protein or a variant or fragment thereof. In some embodiments, the pharmaceutical composition is administered before an administration of the 2019 SARS-CoV 2 spike protein pharmaceutical composition, such as 2-10 weeks before an administration of the 2019 SARS-CoV 2 spike protein pharmaceutical composition. In some embodiments, the pharmaceutical composition is administered prophylactically. In some embodiments, the pharmaceutical composition is administered once every 1, 2, 3, 4, 5, 6 or more weeks; or once every 1-7, 7-14, 14-21, 21-28, or 28-35 days; or once every 2, 3, 4, 5, 6, 7, 8, 9, 10, 11, 12, 13, 14, 15, 16, 17, 18, 19, 20, 21, 22, 23, 24, 25, 26, 27, 28, 29, 30, 31, 32, 33, 34, or 35 days.

[0553] Also provided herein is a use of a composition described herein for preparing a therapeutic for treating or preventing a respiratory viral infection caused by 2019 SARS CoV-2 virus.

[0554] Also provided herein is a composition described herein or a pharmaceutical composition described herein for use as a medicament.

[0555] Also provided herein is a composition described herein or a pharmaceutical composition described herein for use in the treatment or prevention of a respiratory viral infection caused by 2019 SARS CoV-2 virus.

[0556] Provided herein is an antigenic peptide comprising an epitope sequence from Table 1A, Table 1B, Table 1C, Table 2Ai, Table 2Aii or Table 2B. Also provided herein is a polynucleotide encoding and antigenic peptide comprising an epitope sequence from Table 1A, Table 1B, Table 1C, Table 2Ai, Table 2Aii or Table 2B. The antigenic peptide and/or polynucleotide may be recombinant. The antigenic peptide and/or polynucleotide may be isolated or purified. The antigenic peptide may be synthetic or expressed from a polynucleotide.

[0557] Also provided herein is an antibody or B cell comprising an antibody that binds to an antigenic peptide comprising an epitope sequence from Table 1A, Table 1B, Table 1C, Table 2Ai, Table 2Aii or Table 2B.

[0558] Also provided herein is a T cell receptor (TCR) or T cell comprising a TCR that binds an epitope sequence from Table 1A or Table 1B in complex with a corresponding MHC class I molecule according to Table 1A or Table 1B. For example, the TCR can bind to an epitope sequence from column 2 (set 1) of Table 1A in complex with a corresponding MHC class I molecule from column 3 (set 1) in the same row of Table 1A. For example, the TCR can bind to an epitope sequence from column 4 (set 2) of Table 1A in complex with a corresponding MHC class I molecule from column 5 (set 2) in the same row of Table 1A. For example, the TCR can bind to an epitope sequence from column 6 (set 3) of Table 1A in complex with a corresponding MHC class I molecule from column 7 (set 3) in the same row of Table 1A. For example, the TCR can bind to an epitope sequence from column 2 (set 1) of Table 1B in complex with a corresponding MHC class I molecule from column 3 (set 1) in the same row of Table 1B. For example, the TCR can bind to an epitope sequence from column 4 (set 2) of Table 1B in complex with a corresponding MHC class I molecule from column 5 (set 2) in the same row of Table 1B.

[0559] Also provided herein is a T cell receptor (TCR) or T cell comprising a TCR that binds to an epitope sequence from Table 2Ai or Table 2Aii in complex with a corresponding MHC class II molecule according to Table 2Ai or Table 2Aii. For example, the TCR can bind to an epitope sequence from column 2 (set 1) of Table 2Ai in complex with a corresponding MHC class II molecule from column 3 (set 1) in the same row of Table 2Ai. For example, the TCR can bind to an epitope sequence from column 4 (set 2) of Table 2Ai in complex with a corresponding MHC class II molecule from column 5 (set 2) in the same row of Table 2Ai. Likewise, a TCR can bind to an epitope sequence from the left column of Table 2Aii in complex with a corresponding MHC class II molecule from the right column of Table 2Aii.

[0560] Provided herein is a method of treating or preventing viral infection in a subject in need thereof comprising administering to the subject an antigenic peptide comprising an epitope sequence from Table 1A, Table 1B, Table 1C, Table 2Ai, Table 2Aii or Table 2B. Also provided herein is a method of treating or preventing viral infection in a subject in need thereof comprising administering to the subject a polynucleotide encoding and antigenic peptide comprising an epitope sequence from Table 1A, Table 1B, Table 1C, Table 2Ai, Table 2Aii or Table 2B.

[0561] Also provided herein is a method of treating or preventing a viral infection in a subject in need thereof comprising administering to the subject an antibody or B cell comprising an antibody that binds to an antigenic peptide comprising an epitope sequence from Table 1A, Table 1B, Table 1C, Table 2Ai, Table 2Aii or Table 2B.

[0562] Also provided herein is a method of treating or preventing viral infection in a subject in need thereof comprising administering to the subject a T cell receptor (TCR) or T cell comprising a TCR that that binds an epitope sequence from Table 1A or Table 1B in complex with a corresponding MHC class I molecule according to Table 1A or Table 1B.

[0563] For example, the method can comprise administering to the subject a TCR or T cell comprising a TCR that can bind to an epitope sequence from column 2 (set 1) of Table 1A in complex with a corresponding MHC class I molecule from column 3 (set 1) in the same row of Table 1A. For example, the method can comprise administering to a TCR or T cell comprising a TCR that can bind to an epitope sequence from column 2 (set 1) of Table 1A in complex with a corresponding MHC class I molecule from column 3 (set 1) in the same row of Table 1A to a subject that expresses the corresponding MHC class I molecule from column 3 (set 1). For example, the method can comprise administering to the subject a TCR or T cell comprising a TCR that can bind to an epitope sequence from column 4 (set 2) of Table 1A in complex with a corresponding MHC class I molecule from column 5 (set 2) in the same row of Table 1A. For example, the method can comprise administering to a TCR or T cell comprising a TCR that can bind to an epitope sequence from column 4 (set 2) of Table 1A in complex with a corresponding MHC class I molecule from column 5 (set 2) in the same row of Table 1A to a subject that expresses the corresponding MHC class I molecule from column 5 (set 2). For example, the method can comprise administering to the subject a TCR or T cell comprising a TCR that can bind to an epitope sequence from column 6 (set 3) of Table 1A in complex with a corresponding MHC class I molecule from column 7 (set 3) in the same row of Table 1A. For example, the method can comprise administering to a TCR or T cell comprising a TCR that can bind to an epitope sequence from column 6 (set 3) of Table 1A in complex with a corresponding MHC class I molecule from column 7 (set 3) in the same row of Table 1A to a subject that expresses the corresponding MHC class I molecule from column 7 (set 3).

[0564] For example, the method can comprise administering to the subject a TCR or T cell comprising a TCR that can bind to an epitope sequence from column 2 (set 1) of Table 1B in complex with a corresponding MHC class I molecule from column 3 (set 1) in the same row of Table 1B. For example, the method can comprise administering to a TCR or T cell comprising a TCR that can bind to an epitope sequence from column 2 (set 1) of Table 1B in complex with a corresponding MHC class I molecule from column 3 (set 1) in the same row of Table 1B to a subject that expresses the corresponding MHC class I molecule from column 3 (set 1). For example, the method can comprise administering to the subject a TCR or T cell comprising a TCR that can bind to an epitope sequence from column 4 (set 2) of Table 1B in complex with a corresponding MHC class I molecule from column 5 (set 2) in the same row of Table 1B. For example, the method can comprise administering to a TCR or T cell comprising a TCR that can bind to an epitope sequence from column 4 (set 2) of Table 1B in complex with a corresponding MHC class I molecule from column 5 (set 2) in the same row of Table 1B to a subject that expresses the corresponding MHC class I molecule from column 5 (set 2).

[0565] For example, the method can comprise administering to the subject a TCR or T cell comprising a TCR that can bind to an epitope sequence from column 2 (set 1) of Table 2Ai in complex with a corresponding MHC class II molecule from column 3 (set 1) in the same row of Table 2Ai. For example, the method can comprise administering to a TCR or T cell comprising a TCR that can bind to an epitope sequence from column 2 (set 1) of Table 2Ai in complex with a corresponding MHC class II molecule from column 3 (set 1) in the same row of Table 2Ai to a subject that expresses the corresponding MHC class II molecule from column 3 (set 1). For example, the method can comprise administering to the subject a TCR or T cell comprising a TCR that can bind to an epitope sequence from column 4 (set 2) of Table 2Ai in complex with a corresponding MHC class II molecule from column 5 (set 2) in the same row of Table 2Ai. For example, the method can comprise administering to a TCR or T cell comprising a TCR that can bind to an epitope sequence from column 4 (set 2) of Table 2Ai in complex with a corresponding MHC class II molecule from column 5 (set 2) in the same row of Table 2Ai to a subject that expresses the corresponding MHC class II molecule from column 5 (set 2). For example, the method can comprise administering to the subject a TCR or T cell comprising a TCR that can bind to an epitope sequence from the left column of Table 2Aii in complex with a corresponding MHC class II molecule from the right column in the same row of Table 2Aii.

[0566] In one embodiment, the antigenic peptide is a viral antigen. In another embodiment, the antigenic peptide is a non-mutated overexpressed antigen. In some embodiments, the viral antigen is derived from publicly disclosed information on the viral genetic information. In some embodiments, the viral antigen is derived from analysis of the viral genome to predict suitable epitopes for T cell activation. In some embodiments, the viral antigen is derived from analysis of the sequence of the viral genome in a MHC-peptide presentation prediction algorithm implemented in a computer processor. In some embodiments, the viral antigen is derived from analysis of the viral sequences in an MHC-peptide presentation prediction algorithm implemented in a computer processor that has been trained by a machine learning software, which predicts the likelihood of binding and presentation of an epitope by an MHC class I or an MHC class II antigen. In some embodiments, the MHC-peptide presentation predictor is neonmhc2.

[0567] In some embodiments, the MHC-peptide presentation prediction algorithm or MHC-peptide presentation predictor is NetMHCpan or NetMHCIIpan and in addition, further analyzed in MHC-peptide presentation predictor NetMHCpan or NetMHCIIpan for comparison. In some embodiments, a skilled artisan may use hidden markov model approach for MHC-peptide presentation prediction. In some embodiments, the peptide prediction model MARIA may be utilized. In some embodiments, the MHC-peptide presentation prediction algorithm or MHC-peptide presentation predictor used is not NetMHCpan or NetMHCIIpan. In some embodiments, the viral sequences are analyzed in MHC-peptide presentation prediction algorithm implemented in a computer processor where the MHC-peptide presentation predictor is neonmhc 1 or neonmhc2, that refer respectively to class I and class II binding prediction. In some embodiments, the MHC-peptide presentation predictor model is RECON, which offers high quality MHC-peptide presentation prediction based on expression, processing and binding capabilities.

[0568] In one aspect, provided herein is a method of treating a viral disease in a subject caused by a coronavirus, comprising: administering to the subject a composition comprising one or more viral peptide antigens, wherein the viral peptide antigens are predicted to bind to an MHC class I or an MHC class II peptide of the subject, and are predicted to be presented by an antigen presenting cell to a T cell of the subject such that an antiviral response is initiated in the subject. In some embodiments, the viral antigen is derived from analysis of the sequence of the viral genome in a MHC-peptide presentation prediction algorithm implemented in a computer processor. In some embodiments, the viral antigen is derived from analysis of the viral sequences in an MHC-peptide presentation prediction algorithm implemented in a computer processor that has been trained by a machine learning software, which predicts the likelihood of binding and presentation of an epitope by an MHC class I or an MHC class II antigen. In some embodiments, the MHC-peptide presentation predictor is neonmhc2. In some embodiments, the method further comprises analyzing nucleic acid sequence derived from viral genome in an MHC-peptide presentation prediction model, comprising an algorithm implemented in a computer processor that has been trained by a machine learning software, wherein the MHC-peptide presentation prediction model predicts the likelihood of binding and presentation of an epitope encoded by the viral genome by an MHC class I or an MHC class II antigen. In some embodiments, the method further comprises analyzing a biological sample from a subject for identification of the MHC class I and MHC class II repertoire, wherein the analyzing comprises analyzing by genome or whole exome sequencing or by analysis of proteins encoded by an HLA gene. In some embodiments, the method further comprises matching the epitopes predicted by the MHC-peptide presentation prediction model that have a high affinity for an MHC class I or an MHC class II peptide encoded by an HLA gene of the subject, and selecting one or more peptides that are predicted to bind an MHC peptide encoded by an HLA gene of the subject with a high affinity ranked by the MHC-peptide presentation prediction model. In some embodiments, the one or more peptides that are selected have been predicted to bind an MHC peptide encoded by an HLA gene of the subject with an affinity of at least 1000 nM. In some embodiments, the one or more peptides that are selected have been predicted to bind an MHC class I peptide encoded by an HLA gene of the subject with an affinity of at least 500 nM. In some embodiments, the one or more peptides that are selected have been predicted to bind an MHC class II peptide encoded by an HLA gene of the subject with an affinity of at least 1000 nM.

[0569] In some embodiments, the MHC-peptide presentation prediction model is programmed to provide a ranking order in decreasing order of a likelihood for a particular epitope or antigenic peptide to bind to an HLA allele that would present the peptide to a T cell receptor. In some embodiments, epitope sequences that have the highest likelihood of binding and being presented by an HLA are selected for preparing a therapeutic. In some embodiments, the selection of the HLA may be restricted by HLA expressed in a subject. In some embodiments, the selection of the HLA may be based on the prevalence (e.g., higher prevalence) of the allele in a population. In some embodiments the epitopes may be selected for preparing a therapeutic based on the higher likelihood for the peptide (epitope) of binding to and being presented by an HLA allele, e.g., an HLA allele of interest. In some embodiments, this % rank value may be determined by evaluating the percentile in which a query peptide scores for a specific allele compared to a fixed set of reference peptides (with a different set of reference peptides for class I and class II). In some embodiments the top 10% of the epitopes that have the highest likelihood of binding to an HLA allele may be selected. In some embodiments the top 2% of the epitopes that have the highest likelihood of binding to an HLA allele may be selected. In some embodiments the top 5% of the epitopes that have the highest likelihood of binding to an HLA allele may be selected. In some embodiments the top 8% of the epitopes that have the highest likelihood of binding to an HLA allele may be selected. In some embodiments the top 1% of the epitopes that have the highest likelihood of binding to an HLA allele may be selected. In some embodiments the top 0.5% of the epitopes that have the highest likelihood of binding to an HLA allele may be selected. In some embodiments the top 0.1% of the epitopes that have the highest likelihood of binding to an HLA allele may be selected. In some embodiments the top 0.01% of the epitopes that have the highest likelihood of binding to an HLA allele may be selected. In some embodiments the selection of the cut off may be dependent on the availability and number of epitopes predicted to have a high likelihood of binding to an HLA allele as determined by the prediction model.

[0570] In some embodiments, the subject may be infected by the virus. In some embodiments, the subject may be at risk of infection by the virus. In some embodiments, the virus is a coronavirus. In some embodiments, the coronavirus is selected from a SARS virus, a MERS coronavirus or a 2019 SARS COV-2 virus. In some embodiments, the one or more viral peptide antigen comprises a peptide comprising at least 8 contiguous amino acids of a sequence in Table 1A, Table 1B, Table 1C, Table 2Ai, Table 2Aii, Table 2B, Table 9, Table 10, Table 11, Table 12, Table 14A, Table 14B, Table 15 or Table 16. In some embodiments, the one or more viral peptide antigen comprises a peptide comprising at least 7 contiguous amino acids of a sequence in Table 1A, Table 1B, Table 1C, Table 2Ai, Table 2Aii, Table 2B, Table 9, Table 10, Table 11, Table 12, Table 14A, Table 14B, Table 15 or Table 16. In some embodiments, the one or more viral peptide antigen comprises a peptide comprising at least 6 contiguous amino acids of a sequence in Table 1A, Table 1B, Table 1C, Table 2Ai, Table 2Aii, Table 2B, Table 9, Table 10, Table 11, Table 12, Table 14A, Table 14B, Table 15 or Table 16.

[0571] In one embodiment, the antigenic peptide is between about 5 to about 50 amino acids in length. In another embodiment, the antigenic peptide is between about 15 to about 35 amino acids in length. In another embodiment, the antigenic peptide is about 15 amino acids or less in length. In another embodiment, the antigenic peptide is between about 8 and about 11 amino acids in length. In another embodiment, the antigenic peptide is 9 or 10 amino acids in length. In one embodiment, the antigenic peptide binds major histocompatibility complex (MHC) class I. In another embodiment, the antigenic peptide binds MHC class I with a binding affinity of less than about 500 nM.

[0572] In one embodiment, the antigenic peptide is about 30 amino acids or less in length. In another embodiment, the antigenic peptide is between about 6 and about 25 amino acids in length. In another embodiment, the antigenic peptide is between about 15 and about 24 amino acids in length. In another embodiment, the antigenic peptide is between about 9 and about 15 amino acids in length. In one embodiment, the antigenic peptide binds MHC class II. In another embodiment, the antigenic peptide binds MHC class II with a binding affinity of less than about 1000 nM.

[0573] In one embodiment, the antigenic peptide further comprises flanking amino acids. In another embodiment, the flanking amino acids are not native flanking amino acids. In one embodiment, the antigenic peptide is linked to at least a second antigenic peptide. In another embodiment, the peptides are linked using a poly-glycine or poly-serine linker. In another embodiment, the second antigenic peptide binds MHC class I or class II with a binding affinity of less than about 1000 nM. In another embodiment, the second antigenic peptide binds MHC class I or class II with a binding affinity of less than about 500 nM. In another embodiment, both of the epitopes bind to human leukocyte antigen (HLA)-A, -B, -C, -DP, -DQ, or -DR. In another embodiment, the antigenic peptide binds a class I HLA and the second antigenic peptide binds a class II HLA. In another embodiment, the antigenic peptide binds a class II HLA and the second antigenic peptide binds a class I HLA.

[0574] In one embodiment, the antigenic peptide further comprises modifications which increase in vivo half-life, cellular targeting, antigen uptake, antigen processing, MHC affinity, MHC stability, or antigen presentation. In another embodiment, the modification is conjugation to a carrier protein, conjugation to a ligand, conjugation to an antibody, PEGylation, polysialylation HESylation, recombinant PEG mimetics, Fc fusion, albumin fusion, nanoparticle attachment, nanoparticulate encapsulation, cholesterol fusion, iron fusion, acylation, amidation, glycosylation, side chain oxidation, phosphorylation, biotinylation, the addition of a surface active material, the addition of amino acid mimetics, or the addition of unnatural amino acids, for example, synthetic amino acids, or f-moc amino acids, D-amino acids N-methyl amino acids. In one embodiment, the cells that are targeted are antigen presenting cells. In another embodiment, the antigen presenting cells are dendritic cells. In another embodiment, the dendritic cells are targeted using DEC205, XCR1, CD197, CD80, CD86, CD123, CD209, CD273, CD283, CD289, CD184, CD85h, CD85j, CD85k, CD85d, CD85g, CD85a, CD141, CD11 c, CD83, TSLP receptor, or CD1a marker. In another embodiment, the dendritic cells are targeted using the CD141, DEC205, or XCR1 marker.

[0575] In one embodiment, provided herein is an in vivo delivery system comprising an antigenic peptide described herein. In another embodiment, the delivery system includes cell-penetrating peptides, nanoparticulate encapsulation, virus like particles, or liposomes. In another embodiment, the cell-penetrating peptide is TAT peptide, herpes simplex virus VP22, transportan, or Antp.

[0576] In one embodiment, provided herein is a cell comprising an antigenic peptide described herein. In another embodiment, the cell is an antigen presenting cell. In another embodiment, the cell is a dendritic cell.

[0577] In one embodiment, provided herein is a composition comprising an antigenic peptide described herein. In another embodiment, the composition comprises at least 2, at least 3, at least 4, at least 5, at least 6, at least 7, at least 8, at least 9, at least 10, at least 11, at least 12, at least 13, at least 14, at least 15, at least 16, at least 17, at least 18, at least 19, at least 20, at least 21, at least 22, at least 23, at least 24, at least 25, at least 26, at least 27, at least 28, at least 29, or at least 30 of the antigenic peptides comprising an epitope of Table 1A. In another embodiment, the composition comprises at least 2, at least 3, at least 4, at least 5, at least 6, at least 7, at least 8, at least 9, at least 10, at least 11, at least 12, at least 13, at least 14, at least 15, at least 16, at least 17, at least 18, at least 19, at least 20, at least 21, at least 22, at least 23, at least 24, at least 25, at least 26, at least 27, at least 28, at least 29, or at least 30 of the antigenic peptides comprising an epitope of Table 1B. In another embodiment, the composition comprises at least 2, at least 3, at least 4, at least 5, at least 6, at least 7, at least 8, at least 9, at least 10, at least 11, at least 12, at least 13, at least 14, at least 15, at least 16, at least 17, at least 18, at least 19, at least 20, at least 21, at least 22, at least 23, at least 24, at least 25, at least 26, at least 27, at least 28, at least 29, or at least 30 of the antigenic peptides comprising an epitope of Table 2B. In another embodiment, the composition comprises between 2 and 20 antigenic peptides. In another embodiment, the composition further comprises at least 1, at least 2, at least 3, at least 4, at least 5, at least 6, at least 7, at least 8, at least 9, at least 10, at least 11, at least 12, at least 13, at least 14, at least 15, at least 16, at least 17, at least 18, at least 19, at least 20, at least 21, at least 22, at least 23, at least 24, or at least 25, at least 26, at least 27, at least 28, at least 29, or at least 30 additional antigenic peptides. In another embodiment, the composition comprises between about 4 and about 20 additional antigenic peptides. In another embodiment, the additional antigenic peptide is specific for coronavirus.

[0578] In one embodiment, provided herein is a polynucleotide encoding the antigenic peptide described herein. In another embodiment, the polynucleotide is RNA, optionally a self-amplifying RNA. In some embodiments the polynucleotide is DNA. In another embodiment, the RNA is modified to increase stability, increase cellular targeting, increase translation efficiency, adjuvanticity, cytosol accessibility, and/or decrease cytotoxicity. In another embodiment, the modification is conjugation to a carrier protein, conjugation to a ligand, conjugation to an antibody, codon optimization, increased GC-content, incorporation of modified nucleosides, incorporation of 5′-cap or cap analog, and/or incorporation of a poly-A sequence e.g., an unmasked poly-A sequence, or a disrupted poly-A sequence in which two segments of contiguous A sequences linked by a linker.

[0579] In one embodiment, provided herein is a cell comprising a polynucleotide described herein.

[0580] In one embodiment, provided herein is a vector comprising a polynucleotide described herein. In another embodiment, the polynucleotide is operably linked to a promoter. In another embodiment, the vector is a self-amplifying RNA replicon, plasmid, phage, transposon, cosmid, virus, or virion. In another embodiment, the vector is an adeno-associated virus, herpesvirus, lentivirus, or pseudotypes thereof

[0581] In one embodiment, provided herein is an in vivo delivery system comprising an polynucleotide described herein. In another embodiment, the delivery system includes spherical nucleic acids, viruses, virus-like particles, plasmids, bacterial plasmids, or nanoparticles.

[0582] In one embodiment, provided herein is a cell comprising a vector or delivery system described herein. In another embodiment, the cell is an antigen presenting cell. In another embodiment, the cell is a dendritic cell. In another embodiment, the cell is an immature dendritic cell.

[0583] In some embodiments, provided herein is a composition comprising at least one polynucleotide described herein. In some embodiments, provided herein is a composition comprising one or more antigenic peptides described herein in combination with one or more 2019 SARS CoV-2 vaccines (e.g., mRNA-based vaccines, DNA-based vaccines, AAV-based vaccines, protein-based vaccines). In some embodiments, provided herein is a composition comprising one or more polynucleotides encoding at least one antigenic peptide described herein in combination with one or more 2019 SARS CoV-2 vaccines (e.g., mRNA-based vaccines, DNA-based vaccines, AAV-based vaccines, protein-based vaccines). In some embodiments, provided herein is a single polynucleotide encoding more than one antigenic peptide as described herein. In some embodiments, provided herein is a single polynucleotide encoding (i) at least one antigenic peptide as described herein and (ii) a 2019 SARS CoV-2 protein (e.g., S protein) and/or immunogenic fragments thereof (e.g., receptor binding domain (RBD) of S protein). In another embodiment, the composition comprises at least 2, at least 3, at least 4, at least 5, at least 6, at least 7, at least 8, at least 9, at least 10, at least 11, at least 12, at least 13, at least 14, at least 15, at least 16, at least 17, at least 18, at least 19, at least 20, at least 21, at least 22, at least 23, at least 24, at least 25, at least 26, at least 27, at least 28, at least 29, or at least 30 of the polynucleotides. In another embodiment, the composition comprises between about 2 and about 20 polynucleotides. In another embodiment, the composition further comprises at least 1, at least 2, at least 3, at least 4, at least 5, at least 6, at least 7, at least 8, at least 9, at least 10, at least 11, at least 12, at least 13, at least 14, at least 15, at least 16, at least 17, at least 18, at least 19, at least 20, at least 21, at least 22, at least 23, at least 24, at least 25, at least 26, at least 27, at least 28, at least 29, or at least 30 additional antigenic polynucleotides encoding for additional antigenic peptides. In another embodiment, the composition comprises between about 4 and about 20 additional antigenic polynucleotides. In another embodiment, the polynucleotides and the additional antigenic polynucleotides are linked. In another embodiment, the polynucleotides are linked using nucleic acids that encode a poly-glycine or poly-serine linker.

[0584] In one embodiment, provided herein is a T cell receptor (TCR) capable of binding at least one antigenic peptide described herein. In another embodiment, the TCR is capable of binding the antigenic peptide in the context of MHC class I or class II.

[0585] In one embodiment, provided herein is a chimeric antigen receptor comprising: (i) a T cell activation molecule; (ii) a transmembrane region; and (iii) an antigen recognition moiety capable of binding an antigenic peptide described herein. In another embodiment, CD3-zeta is the T cell activation molecule. In another embodiment, the chimeric antigen receptor further comprises at least one costimulatory signaling domain. In another embodiment, the signaling domain is CD28, 4-1BB, ICOS, OX40, ITAM, or Fc epsilon RI-gamma. In another embodiment, the antigen recognition moiety is capable of binding the antigenic peptide in the context of MHC class I or class II. In another embodiment, the chimeric antigen receptor comprises the CD3-zeta, CD28, CTLA-4, ICOS, BTLA, KIR, LAG3, CD137, OX40, CD27, CD40L, Tim-3, A2aR, or PD-1 transmembrane region.

[0586] In one embodiment, provided herein is a T cell comprising the T cell receptor or chimeric antigen receptor described herein. In one embodiment, the T cell is a helper or cytotoxic T cell.

[0587] In one embodiment, provided herein is a nucleic acid comprising a promoter operably linked to a polynucleotide encoding a T cell receptor described herein. In another embodiment, the TCR is capable of binding the at least one antigenic peptide in the context of major histocompatibility complex (MHC) class I or class II. In one embodiment, the nucleic acid comprises a promoter operably linked to a polynucleotide encoding a chimeric antigen receptor described herein. In another embodiment, the antigen recognition moiety is capable of binding the at least one antigenic peptide in the context of major histocompatibility complex (MHC) class I or class II.

[0588] In one embodiment, provided herein is an antibody capable of binding a peptide comprising an epitope of Table 1A, Table 1B, Table 1C, Table 2Ai, Table 2Aii, Table 2B, Table 9, Table 10, Table 11, Table 12, Table 14A, Table 14B, Table 15 or Table 16. In one embodiment, provided herein is an antibody capable of binding a peptide comprising an epitope of Table 1B. In one embodiment, provided herein is an antibody capable of binding a peptide comprising an epitope of Table 2Ai or Table 2Aii.

[0589] In one embodiment, provided herein is a modified cell transfected or transduced with a nucleic acid described herein. In one embodiment, the modified cell is a T cell, tumor infiltrating lymphocyte, NK-T cell, TCR-expressing cell, CD4+ T cell, CD8+ T cell, or NK cell.

[0590] In one embodiment, provided herein is a composition comprising a T cell receptor or chimeric antigen receptor described herein. In another embodiment, a composition comprises autologous patient T cells containing a T cell receptor or chimeric antigen receptor described herein. In another embodiment, the composition further comprises an immune checkpoint inhibitor. In another embodiment, the composition further comprises at least two immune checkpoint inhibitors. In another embodiment, each of the immune checkpoint inhibitors inhibits a checkpoint protein selected from the group consisting of CTLA-4, PDL1, PDL2, PD1, B7-H3, B7-H4, BTLA, HVEM, TIM3, GAL9, LAG3, VISTA, KIR, 2B4, CD160, CGEN-15049, CLIK 1, CHK2, A2aR, and B-7 family ligands or a combination thereof. In another embodiment, each of the immune checkpoint inhibitors interacts with a ligand of a checkpoint protein selected from the group consisting of CTLA-4, PDL1, PDL2, PD1, B7-H3, B7-H4, BTLA, HVEM, TIM3, GAL9, LAG3, VISTA, KIR, 2B4, CD160, CGEN-15049, CHK 1, CHK2, A2aR, and B-7 family ligands or a combination thereof.

[0591] In one embodiment, the composition further comprises an immune modulator or adjuvant. In another embodiment, the immune modulator is a co-stimulatory ligand, a TNF ligand, an Ig superfamily ligand, CD28, CD80, CD86, ICOS, CD40L, OX40, CD27, GITR, CD30, DR3, CD69, or 4-1BB. In another embodiment, the immune modulator is at least one an infected cell extract. In another embodiment, the infected cell is autologous to the subject in need of the composition. In another embodiment, the infected cell has undergone lysis or been exposed to UV radiation. In another embodiment, the composition further comprises an adjuvant. In another embodiment, the adjuvant is selected from the group consisting of: Poly(I:C), Poly-ICLC, STING agonist, 1018 ISS, aluminum salts, Amplivax, AS15, BCG, CP-870,893, CpG7909, CyaA, dSLIM, GM-CSF, IC30, IC31, Imiquimod, ImuFact IMP321, IS Patch, ISS, ISCOMATRIX, JuvImmune, LipoVac, MF59, monophosphoryl lipid A, Montanide IMS 1312 VG, Montanide ISA 206 VG, Montanide ISA 50 V2, Montanide ISA 51 VG, OK-432, OM-174, OM-197-MP-EC, ISA-TLR2 agonist, ONTAK, PepTel®. vector system, PLG microparticles, resiquimod, SRL172, virosomes and other virus-like particles, YF-17D, VEGF trap, R848, beta-glucan, Pam3Cys, Pam3CSK4, acrylic or methacrylic polymers, copolymers of maleic anhydride, and QS21 stimulon. In another embodiment, the adjuvant induces a humoral when administered to a subject. In another embodiment, the adjuvant induces a T helper cell type 1 when administered to a subject.

[0592] In one embodiment, provided herein is a method of inhibiting infection by a virus by administering to a subject who has a likelihood of getting infected by the virus, a vaccine composition comprising one or more peptides comprising at least 8 contiguous amino acids from the epitopes defined in Table 1A, Table 1B, Table 1C, Table 2Ai, Table 2Aii or Table 2B, comprising contacting a cell with a peptide, polynucleotide, delivery system, vector, composition, antibody, or cells of the present disclosure.

[0593] In one embodiment, provided herein is a method of treating a viral infection specifically, a coronaviral infection, for example a 2019 SARS CoV-2 infection by enhancing, or prolonging an antiviral response in a subject in need thereof comprising administering to the subject the peptide, polynucleotide, vector, composition, antibody, or cells described herein.

[0594] In one embodiment, the subject is a human. In another embodiment, the subject has a viral infection. In one embodiment, the subject is infected by a respiratory virus, such as an acute respiratory virus, for example, a SARS-like virus or a MERS or MERS-like virus, or more specifically, a coronavirus of the 2019 SARS CoV-2 strain. In some embodiments, the subject is infected with a 2019 SARS CoV-2 coronavirus. In some embodiments, the subject has been detectably infected with the 2019 SARS CoV-2 coronavirus. In some embodiments, the subject is asymptomatic. In some embodiments, the subject is symptomatic. In some embodiments, the subject is not detected to have been infected by a 2019 SARS CoV-2 virus or a related virus, but the subject is in close proximity of an infected person, in an infected area or otherwise at risk of infection.

[0595] In one embodiment of the method, a peptide is administered. In another embodiment, the administration is systemic. In another embodiment of the method, a polynucleotide, optionally RNA, is administered. In one embodiment, the polynucleotide is administered parenterally. In one embodiment, the polynucleotide is administered intravenously. In another embodiment, the polynucleotide is administered intradermally or intramuscularly, or subcutaneously. In one embodiment, the polynucleotide is administered intramuscularly. In one embodiment of the method, a cell is administered. In another embodiment, the cell is a T cell or dendritic cell. In another embodiment, the peptide or polynucleotide comprises an antigen presenting cell targeting moiety.

[0596] In one embodiment, the peptide, polynucleotide, vector, composition, or cells is administered prior to administering concurrent with another therapy, such as another antiviral therapy. In another embodiment, the peptide, polynucleotide, vector, composition, or cells is administered before or after the another antiviral therapy. In another embodiment, administration of the another antiviral therapy is continued throughout antigen peptide, polynucleotide, vector, composition, or cell therapy.

[0597] In one embodiment of the method, an additional agent is administered. In another embodiment, the agent is a chemotherapeutic agent, an immunomodulatory drug, an immune metabolism modifying drug, a targeted therapy, radiation an anti-angiogenesis agent, or an agent that reduces immune-suppression. In another embodiment, the administration of a pharmaceutical composition described herein elicits or promotes a CD4+ T cell immune response. In another embodiment, the administration of a pharmaceutical composition described herein elicits or promotes a CD4+ T cell immune response and a CD8+ T cell immune response.

[0598] In another embodiment, the patient received a chemotherapeutic agent, an immunomodulatory drug, an immune metabolism modifying drug, targeted therapy or radiation prior to and/or during receipt of the antigen peptide or nucleic acid vaccine. In another embodiment, the autologous T cells are obtained from a patient that has already received at least one round of T cell therapy containing an antigen. In another embodiment, the method further comprises adoptive T cell therapy. In another embodiment, the adoptive T cell therapy comprises autologous T cells. In another embodiment, the autologous T cells are targeted against viral antigens. In another embodiment, the adoptive T cell therapy further comprises allogenic T cells. In another embodiment, the allogenic T cells are targeted against viral antigens.

[0599] In one embodiment, provided herein is a method for evaluating the efficacy of treatment comprising: (i) measuring the number or concentration of target cells in a first sample obtained from the subject before administering the modified cell, (ii) measuring the number or concentration of target cells in a second sample obtained from the subject after administration of the modified cell, and (iii) determining an increase or decrease of the number or concentration of target cells in the second sample compared to the number or concentration of target cells in the first sample. In another embodiment, the treatment efficacy is determined by monitoring a clinical outcome; an increase, enhancement or prolongation of antiviral activity by T cells; an increase in the number of antiviral T cells or activated T cells as compared with the number prior to treatment; B cell activity; CD4 T cell activity; or a combination thereof. In another embodiment, the treatment efficacy is determined by monitoring a biomarker. In another embodiment, the treatment effect is predicted by presence of T cells or by presence of a gene signature indicating T cell inflammation or a combination thereof.

[0600] Provided herein a pharmaceutical composition comprising: one or more polypeptides having an amino acid sequence of any one of the sequences depicted in column 2 of Table 11 and 12; or one or more recombinant polynucleotide constructs each encoding a polypeptide having an amino acid sequence of any one of the sequences depicted in column 2 of Table 11 and 12.

[0601] In some embodiments, the one or more polypeptides comprises at least 2, 3, 4, 5, 6, 7 or 8 different polypeptides having an amino acid sequence of any one of the sequences depicted in column 2 of Table 11 and 12; or wherein the one or more recombinant polynucleotide constructs comprises at least 2, 3, 4, 5, 6, 7 or 8 recombinant polynucleotide constructs each encoding a different polypeptide having an amino acid sequence of any one of the sequences depicted in column 2 of Table 11 and 12. In some embodiments, the pharmaceutical composition comprises at least 8 recombinant polynucleotide strings. In some embodiments, the one or more recombinant polynucleotide strings encoding a plurality of coronavirus peptide antigens, comprises a sequence selected from a group of sequences depicted in SEQ ID RS C1n, RS C2n, RS C3n, RSC4n, RS C5n, RS Con, RS C7n, and RS C8n, or a sequence that is at least 70%, at least 75%, at least 80%, at least 85%, at least 90%, at least 95%, or 100% sequence identity to any one of the above. In some embodiments, the recombinant polynucleotide construct comprises an mRNA. In some embodiments, the recombinant polynucleotide construct is an mRNA. In some embodiments, the pharmaceutical composition further comprises one or more lipid components. In some embodiments, the one or more lipids comprise a lipid nanoparticle (LNP). In some embodiments, the LNP encapsulates the recombinant polynucleotide construct. In some embodiments, the pharmaceutical composition is administered to a subject in need thereof.

[0602] Provided herein is a method of treating COVID in a subject in need thereof, comprising administering to the subject a pharmaceutical composition described above. In some embodiments, the pharmaceutical composition is administered in addition to one or more therapeutic for COVID. In some embodiments, the pharmaceutical composition is administered in combination with one or more polypeptides having an amino acid sequence of a 2019 SARS CoV-2 spike protein or fragment thereof; or one or more recombinant polynucleotide constructs encoding a 2019 SARS CoV-2 spike protein or fragment thereof. In some embodiments, the 2019 SARS CoV-2 spike protein or fragment thereof is a SARS-CoV-2 spike protein or a fragment thereof. In some embodiments, the pharmaceutical composition is administered 2-10 weeks after a first administration of the 2019 SARS CoV-2 spike protein or fragment thereof. In some embodiments, the pharmaceutical composition is administered 1-6 months after a first administration of the 2019 SARS CoV-2 spike protein or fragment thereof. In some embodiments, the pharmaceutical composition is administered simultaneously with an administration of the 2019 SARS CoV-2 spike protein or fragment thereof. In some embodiments, the pharmaceutical composition is administered 2-10 weeks before an administration of the 2019 SARS CoV-2 spike protein or fragment thereof. In some embodiments, the pharmaceutical composition is administered 2-10 weeks after the first administration of vaccine comprising a SARS-CoV-2 spike protein or polynucleotide encoding the same. In some embodiments, the pharmaceutical composition is administered 1-6 months after the first administration of a SARS-CoV-2 spike protein or polynucleotide encoding the same. In some embodiments, the pharmaceutical composition is administered simultaneously with the administration of a SARS-CoV-2 spike protein or polynucleotide encoding the same. In some embodiments, the pharmaceutical composition is administered prophylactically. In some embodiments, the pharmaceutical composition is administered once every 1, 2, 3, 4, 5, 6 or more weeks.

[0603] Provided herein is an use of any one of the compositions described herein for preparing a therapeutic for treating or preventing a respiratory viral infection caused by 2019 SARS CoV-2 virus.

[0604] Where aspects or embodiments of the present disclosure are described in terms of a Markush group or other grouping of alternatives, the present disclosure encompasses not only the entire group listed as a whole, but also each member of the group individually and all possible subgroups of the main group, and also the main group absent one or more of the group members. The present disclosure also envisages the explicit exclusion of one or more of any of the group members in the embodiments of the present disclosure.

### BRIEF DESCRIPTION OF THE DRAWINGS

[0605] FIG. 1A depicts an exemplary flow diagram of a method to identify peptides most relevant to the generation of CD8+ T cell responses against the viral epitopes described herein.

[0606] FIG. 1B shows a graphic representation of the SARS-CoV 2 genome.

[0607] FIG. 2 depicts exemplary graphs of results obtained using a T cell epitope prediction algorithm applied to class I peptide-MHC allele pairs in a validation dataset and comparison of the computed percent-ranks of these pairs with reported MHC-binding assay results. The percent-ranks of peptide-MHC allele pairs which had a binary “Positive” result in the MHC-binding assay were significantly lower than pairs with a “Negative” result. In the more granular positive results, stronger assay results (low<intermediate<high) were associated with significantly lower percent-ranks.

[0608] FIG. 3 depicts experimental validation of HLA-A02:01 predicted epitopes from 2019 SARS COV-2 in human T cell induction assays. 23 peptides that were predicted to be high binders to HLA-A02:01 (see Table 4 of Example 8) were synthesized and assayed in T cell inductions using PBMCs from three human donors. Epitopes were considered to be immunogenic if at least one donor raised a T cell response to the peptide as determined by pMHC multimer technology. Representative flow cytometry plots of pMHC staining using peptides from Table 4 of Example 8 are shown. Multimer positive populations are circled, with the frequency of multimer positive CD8+ T cells shown in the upper right-hand corner of each plot.

[0609] FIG. 4A depicts exemplary graphs of cumulative USA population coverage of HLA alleles for the indicated peptides predicted to be MHC class I epitopes (left) and the cumulative USA population coverage of HLA alleles for 25mer peptides predicted to be MHC class II epitopes (right).

[0610] FIG. 4B depicts a small number of predicted multi-allele binding epitopes from individual 2019 SARS-CoV-2 proteins (alternatively termed 2019-CoV-2 proteins) can achieve broad population coverage. The upper panel shows cumulative HLA-I coverage for USA, EUR, and API populations versus the number of included prioritized HLA-I epitopes for M, N, and S proteins, respectively. Peptide sequences corresponding to the upper panel are shown in Table 6. The lower panel shows cumulative HLA-II coverage for each population versus the number of included prioritized HLA-II 25mers for M, N, and S proteins, respectively. Peptide sequences corresponding to the lower panel are shown in Table 7.

[0611] FIG. 5 depicts results from analysis of publicly available proteomic datasets showing relative 2019 SARS CoV-2 protein expression levels that can be leveraged to prioritize potential vaccine targets. Three datasets examining the proteomic response to 2019 SARS CoV-2 infection (alternatively termed 2019 SARS CoV-2 infection) were re-analyzed and protein abundance was estimated by spectral counts normalized to protein length. Any annotated ORF not shown in the figure was not detected in these proteomic studies. Across all three studies, the nucleocapsid protein is the most abundant protein during 2019 SARS CoV-2 infection.

[0612] FIG. 6A depicts a graphical representation of a string construct described as group 1, also described in Tables 9 and 11.

[0613] FIG. 6B provides a detailed and expanded view of the constructs in FIG. 6A.

[0614] FIG. 7A depicts a graphical representation of a string construct described as group 2, also described in Tables 10 and 12.

[0615] FIG. 7B provides a detailed and expanded view of the constructs in FIG. 7A.

[0616] FIG. 8Ai-8Aii show characterization of BNT mRNA vaccine-induced T cells on a single epitope level. Included data shows epitope responsive T cells for the indicated epitopes in three different participants. The vaccine comprises mRNA encoding a SARS-CoV-2 spike protein of 2019 SARS COV-2 encapsulated in a lipid nanoparticle.

[0617] FIG. 8B shows multimer positive CD8+ cells analysed by flow cytometry for cell surface markers, CCR7, CD45RA, CD3, PD-1, CD38, HLA-DR, CD28 and CD27.

[0618] FIG. 8C shows a mRNA vaccine including the spike proteins S1 and S2, with indicated epitope regions that can bind to specific MHC molecules indicated by the solid shapes along the length, corresponding HLA allele to which it binds is indicated below.

[0619] FIG. 8D shows time course of T cell responses after vaccination of patients with Spike protein mRNA vaccines at different doses (10, 20 and 30 micrograms as indicated). Upper panel shows CD4+ T cell responses, indicated by IFN-g expression using ELISPOT assay. Lower panel shows CD8+ T cell responses, indicated by IFN-g expression using ELISPOT assay. CEF and CEFT are controls CMV, EBV and influenza pools.

[0620] FIG. 8E shows time course of CD4+ T cells and CD8+ T cell responses in older adult population who are administered Spike protein mRNA vaccine (30 microgram each).

[0621] FIG. 9 shows design of vaccine strings comprising ORF-1ab epitopes, with specific use of MS-based HLA-I cleavage predictor information in ordering the epitopes. The design utilizes minimum number of linker sequences.

[0622] FIG. 10A shows experimental design for validating immunogenicity of the string vaccine compositions in an animal model.

[0623] FIG. 10B shows a representative experimental set up of an animal model study to determine the immunogenicity of the four CorVac 2.0 strings when administered in vivo. 5 Groups (16 animals/8-10 take down at d14/8-10 at d28).

[0624] FIG. 11A is a schematic of different dosing schedules for spike vaccine (BNT162b2) and CorVac 2.0.

[0625] FIG. 11B depicts a schematic of an animal study for determining the immune responses elicited by different formulation ratios and doses of CorVac 2.0 strings with BNT162b2 in HLA-A02 transgenic mice.

[0626] FIG. 11C depicts a schematic of an animal study for determining the immune responses elicited by different formulation ratios and doses of CorVac 2.0 strings with BNT16262 in transgenic mice expressing human ACE2.

[0627] FIG. 12A demonstrates sequence variants and mutants across the spike protein in various SARS CoV-2 isolates, and the respective mapping of the vaccine epitope sequences.

[0628] FIG. 12B is a chart showing spike variant frequencies over time.

[0629] FIG. 13A demonstrates sequence variants and mutants across the nucleocapsid protein in various SARS CoV-2 isolates, and the respective mapping of the vaccine epitope sequences.

[0630] FIG. 13B is a chart showing nucleocapsid variant frequencies over time.

[0631] FIG. 14 demonstrates sequence variants and mutants across the membrane protein in various SARS CoV-2 isolates, and the respective mapping of the vaccine epitope sequences.

[0632] FIG. 15 demonstrates sequence variants and mutants across the NSP1 protein in various SARS CoV-2 isolates, and the respective mapping of the vaccine epitope sequences.

[0633] FIG. 16 demonstrates sequence variants and mutants across the NSP2 protein in various SARS CoV-2 isolates, and the respective mapping of the vaccine epitope sequences.

[0634] FIG. 17 demonstrates sequence variants and mutants across the NSP3 protein in various SARS CoV-2 isolates, and the respective mapping of the vaccine epitope sequences.

[0635] FIG. 18 demonstrates sequence variants and mutants across the NSP4 protein in various SARS CoV-2 isolates, and the respective mapping of the vaccine epitope sequences.

[0636] FIG. 19A shows CorVac 2.0-String Design for maximal CD8 and CD4 T cell responses.

[0637] FIG. 19B shows RS-C7 is enriched for known ORF1ab T cell epitopes and avoids most variants of concern/variants of interest (VOC/VOI) mutations.

[0638] FIG. 19C shows RS-C7 is enriched for known nucleocapsid and membrane T cell epitopes and avoids most variants of concern/variants of interest (VOC/VOI) mutations.

[0639] FIG. 20 shows an exemplary experimental set up outlined to test the polynucleotide strings for peptide presentation in complex with the MHC protein.

[0640] FIG. 21 depicts representative data showing an exemplary target epitope presentation verified by mass spectrometry; endogenous, in an experimental set up when the epitope is expressed on A375 cells expressing endogenous HLAs; synthetic, in an experimental set up when the epitope is expressed in cells expressing exogenous HLA.

[0641] FIG. 22 shows a diagrammatic representation of a list of epitopes identified by the above methods using mass spectrometry. The identified epitopes span the viral genome, covering epitopes of the nucleocapsid protein, ORF1ab domains and the membrane protein.

[0642] FIG. 23 shows a representation of a map of all identified CorVac 2.0 epitopes across the viral nucleocapsid, ORF1ab and membrane regions.

[0643] FIG. 24 shows representative data demonstrating Corvac 2.0 strings elicit T cell responses from the nucleocapsid region after one injection at day 0 in BALB/C mice. Immunoreactive T cells are determined by elispot assay (#spots/1×10\hat{ }6 cells). Statistical significance determined by two-way ANOVA with Sidak's multiple comparisons tests.

[0644] FIG. 25 shows representative data demonstrating Corvac 2.0 strings elicit T cell responses from the membrane region. after one injection at day 0 in BALB/C mice. Immunoreactive T cells are determined by elispot assay (#spots/1×10\hat{ }6 cells). Statistical significance determined by two-way ANOVA with Sidak's multiple comparisons tests.

[0645] FIG. 26 shows a graphical representation of the summary of performances of the different strings tested thus far. Number of stars are proportional to the statistical significance of immunogenicity of each string compared to the vehicle control.

[0646] FIG. 27 shows representative data demonstrating Corvac 2.0 strings elicit T cell responses to epitopes from the nucleocapsid region after one injection at day 0 in HLA-A2tg mice (mice that express humanized HLA-A02:01). T cell immunoreactivity was determined by ELISpot assay (#spots/1×10\hat{ }6 cells). Statistical significance was determined by two-way ANOVA with Sidak's multiple comparisons tests. Data is from mice at day 28 after injection of the string composition.

[0647] FIG. 28 shows representative data demonstrating Corvac 2.0 strings elicit T cell responses to epitopes from the membrane region after one injection at day 0 in HLA-A2tg mice (mice that express humanized HLA-A02:01). T cell immunoreactivity was determined by ELISpot assay (#spots/1×10\hat{ }6 cells). Statistical significance was determined by two-way ANOVA with Sidak's multiple comparisons tests. Data from mice at day 28 after injection of the string composition.

[0648] FIG. 29 shows representative data demonstrating Corvac 2.0 strings elicit T cell responses to epitopes from the ORF1ab region after one injection at day 0 in HLA-A2tg mice (mice that express humanized HLA-A02:01). T cell immunoreactivity was determined by ELISpot assay (#spots/1×10\hat{ }6 cells). Statistical significance was determined by two-way ANOVA with Sidak's multiple comparisons tests. Data is from mice at day 28 after injection of the string composition.

[0649] FIG. 30 is a graphical representation summarizing the statistical significance of immunogenicity of the different strings tested in the HLA-A02 transgenic mouse model compared to vehicle controls and results depicted in FIG. 27, FIG. 28 and FIG. 29. The representation indicates RS-C7 has the most T cell responses across pools in the HLA-A02 transgenic mouse model.

[0650] FIG. 31 shows a graphical representation of the RS-C7 string design showing regions of the string that elicited immune responses as determined by ELISpot assay and epitopes that were confirmed process and presented by HLA using mass spectrometry.

[0651] FIG. 32A shows a graphical representation of the string designs where the encoded nucleocapsid sequence contain, inter alia, tiled overlapping 15-mer epitope sequences with 11 amino acid overlaps.

[0652] FIG. 32B shows a graphical representation of the string designs where the encoded membrane sequence contain, inter alia, tiled 15-mer sequences with 11 amino acid overlaps.

[0653] FIG. 32C shows a graphical representation of the string designs where the encoded ORF 1ab sequence contain, inter alia, tiled 15-mer sequences with 11 amino acid overlaps.

[0654] FIG. 32D shows results from the experimental design shown in FIG. 10B indicating CorVac 2.0 strings do not raise T cell responses from the ORF1ab region in the BALB/C mouse model. In contrast, results shown in FIG. 29, (left, pool 11), (right, pool 12) indicates CorVac 2.0 strings do raise T cell responses from the ORF1ab region in an HLA-A02 transgenic mouse model. Statistical significance determined by one-way ANOVA with Sidak's multiple comparisons tests.

[0655] FIG. 32E is a graphical representation of the summary of performances of the different strings tested in the BALB/C mouse model and demonstrates that RS-C7 has the most T cell responses across pools in the BALB/C mouse model. The RS-C7 string raised the most T cell responses across pools in the BALB/C mouse model.

[0656] FIG. 33 is a graphical representation showing that the CorVac 2.0 String C7 epitopes overlap with few or no regions with mutations of variants of concern.

[0657] FIG. 34A depicts data related to assessment of B cell responses by ELISA for S1 binding antibodies in mouse serum at the indicated timepoints and serum dilutions using the indicated dosing schedules according to FIG. 11A.

[0658] FIG. 34B depicts data related to assessment of B cell responses by ELISA for NP binding antibodies in mouse serum at the indicated timepoints and serum dilutions using the indicated dosing schedules according to FIG. 11A.

[0659] FIG. 35 shows results from ELISA for serum IgG concentrations at day 14, 21 and 35 after treatment (injection) with saline control (NaCl), BNT162b2, the C7 string, or the combinations as indicated using the dosing schedules according to FIG. 11A. Results indicate that inclusion of CorVac 2.0 in a co-formulation setting does not impact Spike-specific Ab development.

[0660] FIG. 36 shows results from a pseudovirus neutralization test (pVNT) using viral particles pseudotyped with VSV envelope containing SARS-CoV-2 spike protein at day 14, 21 and 35 after treatment (injection) with saline control (NaCl), BNT162b2, the C7 string, or the combinations as indicated using the dosing schedules according to FIG. 11A. Results indicate that CorVac 2.0 does not negatively impact formation of neutralizing antibodies against the SARS-CoV-2 viral protein (Wuhan strain).

[0661] FIG. 37A shows lymph node phenotyping results at day 35 using the dosing schedules according to FIG. 11A. B cell populations are indicated by the % of CD19+ cells of the CD45+ cell population. Percentage of activated B cells was determined by the % of IgD-CD3-CD4-CD8-cells; switched B cell percentage is determined by the % of Activated/B220+IgM-CD19+CD138-cells; and % GC B cells was determined by the % of Activated/B220+IgM-CD19+CD138-cells of the total CD45+ cells in the population. Results indicate that inclusion of CorVac 2.0 in a 1:1 coformulation does not affect BNT162b2-driven B cell response, and slightly enhances it.

[0662] FIG. 37B shows lymph node phenotyping results at day 35 using the dosing schedules according to FIG. 11A. Results indicate that inclusion of CorVac 2.0 maintains the frequency of Tfh cells in the lymph node.

[0663] FIG. 38 depicts activation of splenocyte cells that have been stimulated with peptides present in BNT162b2 on day 35 and assessed by flow cytometry for the presence of the activation marker CD69 on bulk T cell population (left panel) or CD4 T cells (middle panel) or CD8 T cells (right panel) using the dosing schedules according to FIG. 11A. Results indicate that activation of T cells when restimulated with spike peptides (spike 1 pool) are increased in vaccine groups that have BNT162b2 (Group 2) and not inhibited in groups that have both CorVac 2.0 and BNT162b2 (Groups 4-7).

[0664] FIG. 39 depicts activation of splenocyte cells that have been stimulated with peptides present in BNT162b2 on day 35 and assessed by flow cytometry for the presence of the activation marker IFN-gamma on bulk T cell population (left panel) or CD8 T cells (middle panel) or CD4 T cells (right panel) using the dosing schedules according to FIG. 11A. Results indicate that activation of T cells when restimulated with spike peptides (spike 1 pool) are increased in vaccine groups that have BNT162b2 (Group 2) and not inhibited in groups that have both CorVac 2.0 and BNT162b2 (Groups 4-7) in the CD3 T cell population and CD8 T cell population, but not significantly increased in any groups in the CD4 T cell population.

[0665] FIG. 40 depicts activation of splenocyte cells that have been stimulated with peptides present in BNT162b2 on day 35 and assessed by flow cytometry for the presence of the activation marker CD69 on bulk T cell population (left panel) or CD4 T cells (middle panel) or CD8 T cells (right panel) using the dosing schedules according to FIG. 11A. Results indicate that activation of T cells when restimulated with spike peptides (spike 2 pool) are increased most dramatically in groups that have been given the BNT162b2 co-formulated in the same LNP (Groups 5-7).

[0666] FIG. 41A depicts activation of splenocyte cells that have been stimulated with peptides present in the nucleocapsid sequence present in the CorVac 2.0 string on day 35 and assessed by flow cytometry for the presence of the activation marker CD69 on bulk T cell population (left panel) or CD4 T cells (middle panel) or CD8 T cells (right panel) using the dosing schedules according to FIG. 11A. Results indicate that activation of T cells when restimulated with nucleocapsid peptides are increased in vaccine groups that have CorVac 2.0 (Group 3) and separately formulated and co-formulated strings of both BNT162b2 and CorVac 2.0 (Group 4 and 5) in the CD3 T cell population and CD8 T cell population, and modestly in the CD4 T cell population.

[0667] FIG. 41B depicts activation of splenocyte cells that have been stimulated with peptides present in the nucleocapsid sequence present in the CorVac 2.0 string on day 35 and assessed by flow cytometry for the presence of the functional marker IFN-gamma on bulk T cell population (left panel) or CD8 T cells (middle panel) or CD4 T cells (right panel) using the dosing schedules according to FIG. 11A. Results indicate that production of INF-gamma in T cells when restimulated with nucleocapsid peptides are increased in vaccine groups that have CorVac 2.0 (Group 3) and co-formulated strings of both BNT162b2 and CorVac 2.0 at the same ratio (Group 5) in the CD3 T cell population and CD4 T cell population, and modestly in the CD8 T cell population.

[0668] FIG. 42 depicts results showing Spike (N and C-terminal) antigen-specific T cell responses by ELISpot assay on samples from day 35 using the dosing schedules according to FIG. 11A. Results indicate that Ag-specific Spike T-cell responses are not inhibited by addition of CorVac 2.0 and are slightly enhanced by the 1:1 co-formulation.

[0669] FIG. 43 depicts results showing nucleocapsid, membrane and Orflab antigen-specific T cell responses by ELISpot assay on samples from day 35 using the dosing schedules according to FIG. 11A. Results indicate that CorVac 2.0 string responses are stronger in the CorVac 2.0 only group but are still present when CorVac 2.0 string is combined with BNT162b2.

[0670] FIG. 44 depicts the effect of BNT162b2 and CorVac 2.0 alone or in combination on the anti-Spike antigen T cell responses by ELISPOT at day 14 and day 35 using the dosing schedules according to FIG. 11A. The kinetic study depicted herein indicates that Spike T cell responses increase after boost in all groups.

[0671] FIG. 45 depicts the effect of booster doses on the CorVac 2.0 immune responses at day 14 and day 35 using the dosing schedules according to FIG. 11A. The kinetic study depicted herein indicates that CorVac 2.0 responses did not increase after boost.

[0672] FIG. 46 depicts polyfunctionality of CD4 and CD8 responses elicited by BNT162b2 and CorVac 2.0 using the dosing schedules according to FIG. 11A after restimulation with cognate peptide groups (Spike N-term, Spike C-term, Nucleocapsid and Membrane, as noted) assayed by flow cytometry. CD4 and CD8 T cell responses were determined to be polyfunctional by the expression of IFNγ+IL-2+TNFα+.

[0673] FIG. 47 shows a graphical representation that summarizes the effects of the different formulations indicated on the left-hand column on spike N-terminal antigen specific responses by CD4/CD8 cells using the dosing schedules according to FIG. 11A. The number of stars is proportional to the statistical significance and intensity of the response compared to the vehicle control.

[0674] FIG. 48 shows a graphical representation summarizes the effects of the different formulations indicated on the left-hand column on spike C-terminal antigen specific responses by CD4/CD8 cells using the dosing schedules according to FIG. 11A. The number of stars is proportional to the statistical significance and intensity of the response compared to the vehicle control.

[0675] FIG. 49 shows a graphical representation that summarizes the effects of the different formulations indicated on the left-hand column on nucleocapsid antigen specific responses by CD4/CD8 cells using the dosing schedules according to FIG. 11A. The number of start is proportional to the statistical significance and intensity of the response compared to the vehicle control.

[0676] FIG. 50 shows a graphical representation that summarizes the effects of the different formulations indicated on the left-hand column on membrane antigen specific responses by CD4/CD8 cells using the dosing schedules according to FIG. 11A. The number of stars is proportional to the statistical significance and intensity of the response compared to the vehicle control.

[0677] FIG. 51 depicts a schematic of an animal study for determining the immune responses elicited by different formulation ratios and doses of CorVac 2.0 strings with BNT162b2 in transgenic mice expressing human ACE2.

[0678] FIG. 52 shows data from the animal study depicted in FIG. 51, demonstrating that boosting with separately formulated CorVac2.0 at 0.3 μg dose enhances anti-spike IgG production (quantified at day 56). CorVac2.0 alone slightly boosts anti-spike IgG production, separately formulated 3:1 boosts anti-spike IgG production and inclusion of multiple doses of separately formulated CorVac2.0 does not negatively impact anti-spike IgG responses.

[0679] FIG. 53 shows data from the animal study depicted in FIG. 51, demonstrating that boosting with separately formulated CorVac2.0 at 0.3 μg dose enhances anti-spike IgG production (as measured by optical density (OD) at day 56). CorVac2.0 alone slightly boosts anti-spike IgG production, separately formulated 3:1 boosts anti-spike IgG production and inclusion of multiple doses of separately formulated CorVac2.0 does not negatively impact anti-spike IgG responses.

[0680] FIG. 54 shows data from the animal study depicted in FIG. 51, demonstrating anti-spike IgG kinetics over time. A third boost increased anti-spike IgG under all CorVac2.0 variations.

[0681] FIG. 55 shows ELISA data from the animal study depicted in FIG. 51, demonstrating anti-spike IgG levels in serum on the indicated days using the indicated serum dilutions.

[0682] FIG. 56 shows pseudovirus neutralization test (pVNT) data from the animal study depicted in FIG. 51, demonstrating that inclusion of CorVac2.0 does not negatively impact neutralizing titers on the indicated days following treatment with indicated dosing regimens. The pVNT was performed using viral particles pseudotyped with VSV envelope containing SARS-CoV-2 spike protein at the indicated dilutions.

[0683] FIG. 57 shows tetramer staining data using PBLs from the animal study depicted in FIG. 51, showing the percentage of CD8+ T cells specific to the indicated membrane and spike epitopes or epitope combinations indicated, demonstrating that anti-spike responses are not impacted by addition of CorVac2.0.

[0684] FIG. 58 shows tetramer staining data using PBLs from the animal study depicted in FIG. 51, showing the percentage of CD8+ T cells specific to the indicated spike epitopes, demonstrating that anti-spike responses are not impacted by addition of CorVac2.0.

[0685] FIG. 59 shows a spot forming assay from the animal study depicted in FIG. 51, showing the number of spots formed per 1×10\hat{ }6 cells after treatment with the indicated regimens at day 56, demonstrating that addition of CorVac2.0 in the third booster shot as a separate formulation slightly improves anti-spike T cell responses. CorVac2.0 alone slightly boosts anti-spike T cell responses, separately formulated 3:1 and 9:1 slightly boost anti-spike T cells, and inclusion of multiple doses of separately formulated CorVac2.0 does not negatively impact anti-spike T cell responses.

[0686] FIG. 60 shows a spot forming assay from the animal study depicted in FIG. 51, showing the number of spots formed per 1×10\hat{ }6 cells after treatment with the indicated regimens at day 56, demonstrating that weak anti-nucleocapsid responses were seen with 1 booster dose, and multiple doses of separately formulated BNT162b2+CorVac2.0 leads to increases in responses. Weak responses to nucleocapsid in K18-hACE2 mice with one CorVac2.0 boost was observed. Increased anti-nucleocapsid responses with increasing number of CorVac2.0 doses was also observed.

[0687] FIG. 61 shows a spot forming assay from the animal study depicted in FIG. 51, showing the number of spots formed per 1×10\hat{ }6 cells after treatment with the indicated regimens at day 56, demonstrating that the strongest anti-membrane responses were seen in separately formulated groups as a booster; multiple doses of separately formulated BNT162b2+CorVac2.0 lead to increases in responses. Strongest anti-membrane responses were seen in separately formulated conditions. Increased anti-mmbrane responses with increasing number of CorVac2.0 doses was observed.

[0688] FIG. 62 shows data from the animal study depicted in FIG. 51, in which harvested inguinal lymph nodes (a draining lympgh node (dLN)) were dissected and live cell counts were determined after treatment with the indicated regimens. Three samples with 0% viability were removed (G5, G7, G9). The data demonstrate that groups containing a CorVac2.0 boost in combination with BNT162b2 show increased live LN cell counts.

[0689] FIG. 63 shows data from the animal study depicted in FIG. 51, in which harvested lymph nodes were dissected and cell counts of the indicated cell populations as a percentage of CD45.2 cells were determined after treatment with the indicated regimens. The data demonstrate a trend for increased germinal center (GC) cells and CD27+ memory B cells in groups treated with with separately formulated CorVac2.0+BNT162.

[0690] FIG. 64A shows data from the animal study depicted in FIG. 51, in which harvested lymph nodes were dissected and cell counts of the indicated cell populations as a percentage of CD45.2 cells were determined after treatment with the indicated regimens. The data demonstrate slightly higher class-switched B cells in groups treated with with separately formulated CorVac2.0+BNT162.

[0691] FIG. 64B shows data from the animal study depicted in FIG. 51, in which harvested lymph nodes were dissected and toal cell counts of the indicated cell populations were determined after treatment with the indicated regimens. The data demonstrate slightly higher class-switched B cells in groups treated with with separately formulated CorVac2.0+BNT162

[0692] FIG. 65 shows tetramer-specific staing data from the animal study depicted in FIG. 51, from harvested lymph node samples showing the percentage of CD8+ T cells specific to spike or membrane epitopes. Also depicted is a graph showing the percentage of central memory T cells, effector memory T cells, naive T cells and effector T cells cells as a percentage of spike positive CD8 T cells. Slightly less differentiated cells in CorVac2.0 treated groups were observed.

[0693] FIG. 66 depicts a schematic of an animal study for determining the immune responses elicited by different formulation ratios and doses of CorVac 2.0 strings with BNT162b2 in HLA-A02 transgenic mice.

[0694] FIG. 67A shows a spot forming assay from the animal study depicted in FIG. 66, showing the number of spots formed per 1×10\hat{ }6 cells after treatment with the indicated regimens at day 14, demonstrating that CorVac2.0 induces the strongest immune responses at the highest dose.

[0695] FIG. 67B shows a spot forming assay from the animal study depicted in FIG. 66, showing the number of spots formed per 1×10\hat{ }6 cells after treatment with the indicated regimens at day 35, demonstrating that Spike T cell responses are enhanced with CorVac2.0 inclusion. The dose of 1 μg yielded the strongest responses.

[0696] FIG. 67C shows a spot forming assay from the animal study depicted in FIG. 66, showing the number of spots formed per 1×10\hat{ }6 cells over time. Improved T cell responses to all regions were observed after the boost.

[0697] FIG. 67D shows a co-culture spot forming assay from the animal study depicted in FIG. 66, showing the number of spots formed per 1×10\hat{ }6 cells after treatment with the indicated regimens at day 35. Spike responses were seen in CD4 and CD8 T cells. Spike CD8 T cells show more cytokine secretion and degranulation than CD4 T cells.

[0698] FIG. 67E shows a co-culture spot forming assay from the animal study depicted in FIG. 66, showing the number of spots formed per 1×10\hat{ }6 cells after treatment with the indicated regimens at day 35. Membrane responses were seen in CD4 and CD8 T cells and were strongest at the highest dose. IL2 secretion was seen in CD4 and CD8 T cells.

[0699] FIG. 67F shows a spot forming assay from the animal study depicted in FIG. 66, showing the number of spots formed per 1×10\hat{ }6 cells after treatment with the indicated regimens at day 56. Spike responses were not negatively impacted by CorVac2.0. CorVac2.0 alone boosted spike responses. Boost with CorVac2.0 alone increased spike responses. No statistically significant changes in spike responses were seen with inclusion of CorVac2.0. The strongest membrane responses were observed in the highest dose groups. The strongest N responseswere observed in CorVac2.0 alone at the highest dose. The strongest Orf1ab responses were observed in CorVac2.0 alone and the separately formulated 3:1 dose.

[0700] FIG. 67G shows a co-culture spot forming assay from the animal study depicted in FIG. 66, showing the number of spots formed per 1×10\hat{ }6 cells after treatment with the indicated regimens at day 56. Spike responses were seen in CD4 and CD8 T cells and some were boosted by inclusion of CorVac2.0.

[0701] FIG. 67H shows a co-culture spot forming assay from the animal study depicted in FIG. 66, showing the number of spots formed per 1×10\hat{ }6 cells after treatment with the indicated regimens at day 56. Polyfunctional spike CD4 and CD8 T cells were slightly enhanced in higher dose CorVac2.0 conditions.

[0702] FIG. 67I shows a co-culture spot forming assay from the animal study depicted in FIG. 66, showing the number of spots formed per 1×10\hat{ }6 cells after treatment with the indicated regimens at day 56. Membrane responses seen more strongly in CD8 T cells.

[0703] FIG. 67J shows a co-culture spot forming assay from the animal study depicted in FIG. 66, showing the number of spots formed per 1×10\hat{ }6 cells after treatment with the indicated regimens at day 56. Polyfunctional membrane CD4 and CD8 T cells were observed.

[0704] FIG. 68A shows phenotyping data from the animal study depicted in FIG. 66, in which harvested lymph nodes were dissected and cell counts of the indicated cell populations as a percentage of CD45.2 cells were determined after treatment with the indicated regimens at day 14. Memory B cells: CD3-IgD-IgM-CD27+; Activated B cells: IgD-CD3-CD4-CD8-; Switched B cells: IgD-CD3-CD4-CD8-B220+IgM-CD19+CD138-. GC B cells: IgD-CD3-CD4-CD8-B220+IgM-CD19+CD138-CD95+CD38-.

[0705] FIG. 68B shows phenotyping data from the animal study depicted in FIG. 66, in which harvested lymph nodes were dissected and cell counts of the indicated cell populations as a percentage of CD45.2 cells were determined after treatment with the indicated regimens at day 35. Memory B cells: CD3-IgD-IgM-CD27+; Activated B cells: IgD-CD3-CD4-CD8-; Switched B cells: IgD-CD3-CD4-CD8-B220+IgM-CD19+CD138-. GC B cells: IgD-CD3-CD4-CD8-B220+IgM-CD19+CD138-CD95+CD38-. The addition of CorVac2.0 to BNT162b2 slightly enhances class-switching and GC B cells. CorVac2.0 leads to a slight increase in Tfh cells.

[0706] FIG. 68C shows phenotyping data from the animal study depicted in FIG. 66, in which harvested lymph nodes were dissected and cell counts of the indicated cell populations as a percentage of CD45.2 cells were determined after treatment with the indicated regimens at day 56. Memory B cells: CD3-IgD-IgM-CD27+; Activated B cells: IgD-CD3-CD4-CD8-; Switched B cells: IgD-CD3-CD4-CD8-B220+IgM-CD19+CD138-. GC B cells: IgD-CD3-CD4-CD8-B220+IgM-CD19+CD138-CD95+CD38-. Boosting with CorVac2.0 alone enhances B cell responses compared to no boost. CorVac2.0 does not significantly affect B cells responses in combination with BNT162b2.

[0707] FIG. 69 shows an exemplary clinical study design to evaluate safety of CorVac 2.0 vaccines in healthy human subjects.

[0708] FIG. 70 shows an exemplary clinical study design to evaluate safety of CorVac 2.0 vaccines in immunocompromised human subjects.

[0709] FIG. 71 shows an exemplary clinical study design to evaluate safety of CorVac 2.0 vaccines in immunocompromised human subjects.

[0710] FIG. 72 demonstrates sequence variants and mutants across the Spike protein in various SARS CoV-2 isolates as indicated on the right hand side. The data shows that the Spike protein is highly mutated putitively due to selective pressure.

[0711] FIG. 73 demonstrates sequence variants and mutants across the nucleocapsid (N) and membrane (M) protein in various SARS CoV-2 isolates as indicated on the right hand side, and the respective mapping of the vaccine epitope sequences in encoded by CorVac 2.0. The data shows that the CorVac2.0 vaccine sequence is rarely impacted by variant mutations in N, M.

[0712] FIG. 74 demonstrates sequence variants and mutants across the ORF 1ab in various SARS COV-2 isolates as indicated on the right hand side, and the respective mapping of the vaccine epitope sequences in encoded by CorVac 2.0. The data shows that the CorVac2.0 vaccine sequence is rarely impacted by variant mutations in ORF1ab.

[0713] FIG. 75A shows a representation of a map of an exemplary CorVac2.0 RS-C7 string depicting linkers, the SEC domain, the transmembrane (TM) domain and the viral epitopes contained within the string, including nucleocapsid epitopes, ORF1ab epitopes, and membrane epitopes.

[0714] FIG. 75B shows a representation of a map of an exemplary CorVac2.0 RS-C7 string depicting the viral epitopes contained within the string that were observed as being presented by mass spectrometry (MS), including nucleocapsid epitopes, ORF1ab epitopes, and membrane epitopes.

[0715] FIG. 76 shows a representation of an MS-based HLA-I cleavage predictor used to optimize ordering of candidate ORF1ab sequences, adding as few linkers as possible while retaining efficient epitope cleavage (top) and 18 ORF1ab epitopes optimized for GSS linker contexts.

[0716] FIG. 77A-C shows a representation of a map of an exemplary CorVac2.0 RS-C7 string Antigens chosen for CorVac 2.0 are rarely mutated: across all WHO-designated variants, RS-C7 is only impacted by 3 mutations, leaving the vast majority of epitopes unchanged. As shown in FIG. 77B-C, even in the highly mutated Omicron variants, only one mutation impacts CorVac 2.0 strings (in contrast to ~39 amino acid changes in Spike protein).

[0717] FIG. 78A-78B shows kinetics of the antibody concentration against the Spike protein.

[0718] FIG. 79 depicts an exemplary structure of RS C7, and illustrates certain factors that were considered when designing a CorVac 2.0 string. “Count”, as used in FIG. 79, refers to the number of pMHC-allele pairs that overlap with an indicated residue of a protein sequence. Counts can be determined by reference to a database of epitopes (e.g., a database of epitopes that have been observed, for example, in experimental studies, and/or predicted). “Entropy” as used in FIG. 79 refers to Shannon entropy, and is a measure of conservation level (where lower entropy indicates higher conservation).

[0719] FIG. 80A depicts epitopes present in an exemplary CorVac 2.0 string (e.g., RS C7 string) that were observed via mass spectrometery as processed and presented by MHC complexes.

[0720] FIG. 80B depicts data for one exemplary epitope observed by mass spectrometry (epitope 23 of Table 19).

[0721] FIG. 81 depicts a study design to test the immunogenicity of various BNT162b2+CorVac2.0 string dosing regimens in K18-hACE2 mice.

[0722] FIG. 82A-82B show anti-Spike protein, IgG concentrations measured over time, from serum samples collected from the experiment depicted in FIG. 81. IgG concentrations measured by ELISA. Error bars indicate standard error of the mean.

[0723] FIG. 83A-83B show neutralization titers measured from the serum samples collected from the experiment depicted in FIG. 81. Neutralization titers were measured using a pseudovirus neutralization assay, using pseudoviruses comprising an SARS-CoV-2 S protein from a Wuhan stain.

[0724] FIG. 84 depicts an experimental protocol for measuring the efficacy of a CorVac2.0 string, administered alone or in combination with RNA encoding a SARS-CoV-2 S protein in Syrian Hamsters.

[0725] FIG. 85 shows results from the study depicted in FIG. 84. Specifically, FIG. 85 shows changes in body weight of hamsters, following challenge with SARS-CoV-2 (Wuhan strain).

[0726] FIG. 86 shows an exemplary protocol for clonotype analysis of Spike-specific B cells and T cells.

[0727] FIG. 87 summarizes T cell clonotypes observed in animals administered (i) two doses of RNA encoding a SARS-CoV-2 S protein (BNT162b2) or (ii) two doses of RNA encoding a SARS-CoV-2 S protein and one dose of CorVac2.0 (String C7). Circles correspond to samples having the same clonotype, with clonotypes in the same “clonotype cluster” (i.e., clonotypes having similar sequences) indicated with lines connecting dots. As shown in the figure, administration of a CorVac2.0 construct increases the trend towards higher clonal expansion, but does not negatively impact clonality.

[0728] FIG. 88 shows an exemplary clinical study design to evaluate safety of CorVac 2.0 vaccines in healthy human subjects. “Spike Vac” refers to RNA encoding a SARS-CoV-2 S protein and comprising one or more mutations that stabilize the prefusion conformation (e.g., one or more mutations disclosed herein or known in the art); in the exemplary clinical study design, a bivalent vaccine is administered, comprising RNA encoding a SARS-CoV-2 S polypeptide of a Wuhan strain and a SARS-CoV-2 S polypeptide comprising one or more mutations characteristic of a BA.4/5 Omicron variant (e.g., one or more mutations disclosed herein). ^{a}Further dosing of subjects or opening of new cohorts may proceed if acceptable tolerability is shown and no stopping/pausing rules are met. ^{b}An exemplary Spike Vac Bivalent is BNT162b2 Bivalent (Wuhan+OMI BA.4/BA.5). Abbreviations: d=days; h=hour(s); FIH=first-in-human; IRC=Internal Review Committee; N=number of subjects; OMI=Omicron; WT=Wild Type. Trial population: Healthy volunteers aged 18-55 years, who have been previously vaccinated with at least three doses of any authorized COVID19 RNA vaccine (the last COVID19 RNA vaccine dose must have been administered at least 4 months before Visit 1). Subjects who have had SARS-CoV-2 infection 60 d or more prior to randomization are not excluded from the trial.

### DETAILED DESCRIPTION

[0729] Described herein are novel therapeutics and vaccines based on viral epitopes. Accordingly, the present disclosure described herein provides peptides, polynucleotides encoding the peptides, and peptide binding agents that can be used, for example, to stimulate an immune response to a viral antigen, to create an immunogenic composition or vaccine for use in treating or preventing a viral infection.

### Definitions

[0730] To facilitate an understanding of the present disclosure, a number of terms and phrases are defined below.

[0731] “Viral antigens” refer to antigens encoded by a virus. They include, but are not limited to, antigens of coronaviruses, such as COVID19.

[0732] Throughout this disclosure, “binding data” results can be expressed in terms of “IC50.” IC50 is the concentration of the tested peptide in a binding assay at which 50% inhibition of binding of a labeled reference peptide is observed. Given the conditions in which the assays are run (i.e., limiting HLA protein and labeled reference peptide concentrations), these values approximate K_{D} values. Assays for determining binding are well known in the art and are described in detail, for example, in PCT publications WO 94/20127 and WO 94/03205, and other publications such Sidney et al., Current Protocols in Immunology 18.3.1 (1998); Sidney, et al., J. Immunol. 154:247 (1995); and Sette, et al., Mol. Immunol. 31:813 (1994). Alternatively, binding can be expressed relative to binding by a reference standard peptide. For example, can be based on its IC50, relative to the IC50 of a reference standard peptide. Binding can also be determined using other assay systems including those using: live cells (e.g., Ceppellini et al., Nature 339:392 (1989); Christnick et al., Nature 352:67 (1991); Busch et al., Int. Immunol. 2:443 (1990); Hill et al., J. Immunol. 147:189 (1991); del Guercio et al., J. Immunol. 154:685 (1995)), cell free systems using detergent lysates (e.g., Cerundolo et al., J. Immunol 21:2069 (1991)), immobilized purified MHC (e.g., Hill et al., J. Immunol. 152, 2890 (1994); Marshall et al., J. Immunol. 152:4946 (1994)), ELISA systems (e.g., Reay et al., EMBO J. 11:2829 (1992)), surface plasmon resonance (e.g., Khilko et al., J. Biol. Chem. 268:15425 (1993)); high flux soluble phase assays (Hammer et al., J. Exp. Med. 180:2353 (1994)), and measurement of class I MHC stabilization or assembly (e.g., Ljunggren et al., Nature 346:476 (1990); Schumacher et al., Cell 62:563 (1990); Townsend et al., Cell 62:285 (1990); Parker et al., J. Immunol. 149:1896 (1992)).

[0733] The term “derived” when used to discuss an epitope is a synonym for “prepared.” A derived epitope can be from a natural source, or it can be synthesized according to standard protocols in the art. Synthetic epitopes can comprise artificial amino acid residues “amino acid mimetics,” such as D isomers of natural occurring L amino acid residues or non-natural amino acid residues such as cyclohexylalanine. A derived or prepared epitope can be an analog of a native epitope.

[0734] A “diluent” includes sterile liquids, such as water and oils, including those of petroleum, animal, vegetable or synthetic origin, such as peanut oil, soybean oil, mineral oil, sesame oil and the like. Water is also a diluent for pharmaceutical compositions. Saline solutions and aqueous dextrose and glycerol solutions can also be employed as diluents, for example, in injectable solutions.

[0735] An “epitope” is the collective features of a molecule, such as primary, secondary and tertiary peptide structure, and charge, that together form a site recognized by, for example, an immunoglobulin, T cell receptor, HLA molecule, or chimeric antigen receptor. Alternatively, an epitope can be a set of amino acid residues which is involved in recognition by a particular immunoglobulin, or in the context of T cells, those residues necessary for recognition by T cell receptor proteins, chimeric antigen receptors, and/or Major Histocompatibility Complex (MHC) receptors. Epitopes can be prepared by isolation from a natural source, or they can be synthesized according to standard protocols in the art. Synthetic epitopes can comprise artificial amino acid residues, “amino acid mimetics,” such as D isomers of naturally-occurring L amino acid residues or non-naturally-occurring amino acid residues such as cyclohexylalanine. Throughout this disclosure, epitopes may be referred to in some cases as peptides or peptide epitopes.

[0736] It is to be appreciated that proteins or peptides that comprise an epitope or an analog described herein as well as additional amino acid(s) are still within the bounds of the present disclosure. In certain embodiments, the peptide comprises a fragment of an antigen.

[0737] In certain embodiments, there is a limitation on the length of a peptide of the present disclosure. The embodiment that is length-limited occurs when the protein or peptide comprising an epitope described herein comprises a region (i.e., a contiguous series of amino acid residues) having 100% identity with a native sequence. In order to avoid the definition of epitope from reading, e.g., on whole natural molecules, there is a limitation on the length of any region that has 100% identity with a native peptide sequence. Thus, for a peptide comprising an epitope described herein and a region with 100% identity with a native peptide sequence, the region with 100% identity to a native sequence generally has a length of: less than or equal to 600 amino acid residues, less than or equal to 500 amino acid residues, less than or equal to 400 amino acid residues, less than or equal to 250 amino acid residues, less than or equal to 100 amino acid residues, less than or equal to 85 amino acid residues, less than or equal to 75 amino acid residues, less than or equal to 65 amino acid residues, and less than or equal to 50 amino acid residues. In certain embodiments, an “epitope” described herein is comprised by a peptide having a region with less than 51 amino acid residues that has 100% identity to a native peptide sequence, in any increment down to 5 amino acid residues; for example 50, 49, 48, 47, 46, 45, 44, 43, 42, 41, 40, 39, 38, 37, 36, 35, 34, 33, 32, 31, 30, 29, 28, 27, 26, 25, 24, 23, 22, 21, 20, 19, 18, 17, 16, 15, 14, 13, 12, 11, 10, 9, 8, 7, 6, or 5 amino acid residues.

[0738] “Human Leukocyte Antigen” or “HLA” is a human class I or class II Major Histocompatibility Complex (MITC) protein (see, e.g., Stites, et al., IMMUNOLOGY, 8TH ED., Lange Publishing, Los Altos, Calif. (1994).

[0739] An “HLA supertype or HLA family”, as used herein, describes sets of HLA molecules grouped on the basis of shared peptide-binding specificities. HLA class I molecules that share somewhat similar binding affinity for peptides bearing certain amino acid motifs are grouped into such HLA supertypes. The terms HLA superfamily, HLA supertype family, HLA family, and HLA xx-like molecules (where “xx” denotes a particular HLA type), are synonyms.

[0740] The terms “identical” or percent “identity,” in the context of two or more peptide sequences or antigen fragments, refer to two or more sequences or subsequences that are the same or have a specified percentage of amino acid residues that are the same, when compared and aligned for maximum correspondence over a comparison window, as measured using a sequence comparison algorithm or by manual alignment and visual inspection.

[0741] An “immunogenic” peptide or an “immunogenic” epitope or “peptide epitope” is a peptide that comprises an allele-specific motif such that the peptide will bind an HLA molecule and induce a cell-mediated or humoral response, for example, cytotoxic T lymphocyte (CTL), helper T lymphocyte (HTL) and/or B lymphocyte response. Thus, immunogenic peptides described herein are capable of binding to an appropriate HLA molecule and thereafter inducing a CTL (cytotoxic) response, or a HTL (and humoral) response, to the peptide.

[0742] As used herein, a “chimeric antigen receptor” or “CAR” refers to an antigen binding protein in that includes an immunoglobulin antigen binding domain (e.g., an immunoglobulin variable domain) and a T cell receptor (TCR) constant domain. As used herein, a “constant domain” of a TCR polypeptide includes a membrane-proximal TCR constant domain, and may also include a TCR transmembrane domain and/or a TCR cytoplasmic tail. For example, in some embodiments, the CAR is a dimer that includes a first polypeptide comprising a immunoglobulin heavy chain variable domain linked to a TCR-beta constant domain and a second polypeptide comprising an immunoglobulin light chain variable domain (e.g., a lc or 2\., variable domain) linked to a TCRα constant domain. In some embodiments, the CAR is a dimer that includes a first polypeptide comprising a immunoglobulin heavy chain variable domain linked to a TCRα constant domain and a second polypeptide comprising an immunoglobulin light chain variable domain linked to a TCRβ constant domain.

[0743] The phrases “isolated” or “biologically pure” refer to material which is substantially or essentially free from components which normally accompany the material as it is found in its native state. Thus, peptides described herein do not contain some or all of the materials normally associated with the peptides in their in situ environment. An “isolated” epitope refers to an epitope that does not include the whole sequence of the antigen from which the epitope was derived. Typically, the “isolated” epitope does not have attached thereto additional amino acid residues that result in a sequence that has 100% identity over the entire length of a native sequence. The native sequence can be a sequence such as a viral antigen from which the epitope is derived. Thus, the term “isolated” means that the material is removed from its original environment (e.g., the natural environment if it is naturally occurring). For example, a naturally-occurring polynucleotide or peptide present in a living animal is not isolated, but the same polynucleotide or peptide, separated from some or all of the coexisting materials in the natural system, is isolated. Such a polynucleotide could be part of a vector, and/or such a polynucleotide or peptide could be part of a composition, and still be “isolated” in that such vector or composition is not part of its natural environment. RNA molecules include in vivo or in vitro RNA transcripts of the DNA molecules described herein, and further include such molecules produced synthetically.

[0744] “Major Histocompatibility Complex” or “MHC” is a cluster of genes that plays a role in control of the cellular interactions responsible for physiologic immune responses. In humans, the MHC complex is also known as the human leukocyte antigen (HLA) complex. For a detailed description of the MHC and HLA complexes, see, Paul, FUNDAMENTAL IMMUNOLOGY, 3.sup.RD ED., Raven Press, New York (1993).

[0745] A “native” or a “wild type” sequence refers to a sequence found in nature. Such a sequence can comprise a longer sequence in nature.

[0746] A “T cell epitope” is to be understood as meaning a peptide sequence which can be bound by the MHC molecules of class I or II in the form of a peptide-presenting MHC molecule or MHC complex and then, in this form, be recognized and bound by cytotoxic T-lymphocytes or T-helper cells, respectively.

[0747] A “receptor” is to be understood as meaning a biological molecule or a molecule grouping capable of binding a ligand. A receptor may serve, to transmit information in a cell, a cell formation or an organism. The receptor comprises at least one receptor unit, for example, where each receptor unit may consist of a protein molecule. The receptor has a structure which complements that of a ligand and may complex the ligand as a binding partner. The information is transmitted in particular by conformational changes of the receptor following complexation of the ligand on the surface of a cell. In some embodiments, a receptor is to be understood as meaning in particular proteins of MHC classes I and II capable of forming a receptor/ligand complex with a ligand, in particular a peptide or peptide fragment of suitable length.

[0748] A “ligand” is to be understood as meaning a molecule which has a structure complementary to that of a receptor and is capable of forming a complex with this receptor. In some embodiments, a ligand is to be understood as meaning a peptide or peptide fragment which has a suitable length and suitable binding motifs in its amino acid sequence, so that the peptide or peptide fragment is capable of forming a complex with proteins of MHC class I or MHC class II.

[0749] In some embodiments, a “receptor/ligand complex” is also to be understood as meaning a “receptor/peptide complex” or “receptor/peptide fragment complex”, including a peptide- or peptide fragment-presenting MHC molecule of class I or of class II.

[0750] “Proteins or molecules of the major histocompatibility complex (MHC)”, “MHC molecules”, “MHC proteins” or “HLA proteins” are to be understood as meaning proteins capable of binding peptides resulting from the proteolytic cleavage of protein antigens and representing potential lymphocyte epitopes, (e.g., T cell epitope and B cell epitope) transporting them to the cell surface and presenting them there to specific cells, in particular cytotoxic T-lymphocytes, T-helper cells, or B cells. The major histocompatibility complex in the genome comprises the genetic region whose gene products expressed on the cell surface are important for binding and presenting endogenous and/or foreign antigens and thus for regulating immunological processes. The major histocompatibility complex is classified into two gene groups coding for different proteins, namely molecules of MHC class I and molecules of MHC class II. The cellular biology and the expression patterns of the two MHC classes are adapted to these different roles.

[0751] The terms “peptide” and “peptide epitope” are used interchangeably with “oligopeptide” in the present specification to designate a series of residues connected one to the other, typically by peptide bonds between the α-amino and carboxyl groups of adjacent amino acid residues.

[0752] “Synthetic peptide” refers to a peptide that is obtained from a non-natural source, e.g., is man-made. Such peptides can be produced using such methods as chemical synthesis or recombinant DNA technology. “Synthetic peptides” include “fusion proteins.”

[0753] A “PanDR binding” peptide, a “PanDR binding epitope” is a member of a family of molecules that binds more than one HLA class II DR molecule.

[0754] “Pharmaceutically acceptable” refers to a generally non-toxic, inert, and/or physiologically compatible composition or component of a composition.

[0755] A “pharmaceutical excipient” or “excipient” comprises a material such as an adjuvant, a carrier, pH-adjusting and buffering agents, tonicity adjusting agents, wetting agents, preservatives, and the like. A “pharmaceutical excipient” is an excipient which is pharmaceutically acceptable. The term “motif refers to a pattern of residues in an amino acid sequence of defined length, for example, a peptide of less than about 15 amino acid residues in length, or less than about 13 amino acid residues in length, for example, from about 8 to about 13 amino acid residues (e.g., 8, 9, 10, 11, 12, or 13) for a class I HLA motif and from about 6 to about 25 amino acid residues (e.g., 6, 7, 8, 9, 10, 11, 12, 13, 14, 15, 16, 17, 18, 19, 20, 21, 22, 23, 24, or 25) fora class II HLA motif, which is recognized by a particular HLA molecule. Motifs are typically different for each HLA protein encoded by a given human HLA allele. These motifs differ in their pattern of the primary and secondary anchor residues. In some embodiments, an MHC class I motif identifies a peptide of 9, 10, or 11 amino acid residues in length.

[0756] A “supermotif’ is a peptide binding specificity shared by HLA molecules encoded by two or more HLA alleles. In some embodiments, a supermotif-bearing peptide described herein is recognized with high or intermediate affinity (as defined herein) by two or more HLA antigens.

[0757] The term “naturally occurring” as used herein refers to the fact that an object can be found in nature. For example, a peptide or nucleic acid that is present in an organism (including viruses) and can be from a source in nature and which has not been intentionally modified by man in the laboratory is naturally occurring.

[0758] According to the present disclosure, the term “vaccine” relates to a pharmaceutical preparation (pharmaceutical composition) or product that upon administration induces an immune response, for example, a cellular or humoral immune response, which recognizes and attacks a pathogen or a diseased cell such as a cell infected with a virus. A vaccine may be used for the prevention or treatment of a disease.

[0759] A “protective immune response” or “therapeutic immune response” refers to a CTL and/or an HTL response to an antigen derived from an pathogenic antigen (e.g., a viral antigen), which in some way prevents or at least partially arrests disease symptoms, side effects or progression. The immune response can also include an antibody response which has been facilitated by the stimulation of helper T cells.

[0760] “Antigen processing” or “processing” refers to the degradation of a polypeptide or antigen into procession products, which are fragments of said polypeptide or antigen (e.g., the degradation of a polypeptide into peptides) and the association of one or more of these fragments (e.g., via binding) with MHC molecules for presentation by cells, for example, antigen presenting cells, to specific T cells.

[0761] “Antigen presenting cells” (APC) are cells which present peptide fragments of protein antigens in association with MHC molecules on their cell surface. Some APCs may activate antigen specific T cells. Professional antigen-presenting cells are very efficient at internalizing antigen, either by phagocytosis or by receptor-mediated endocytosis, and then displaying a fragment of the antigen, bound to a class II MHC molecule, on their membrane. The T cell recognizes and interacts with the antigen-class II MHC molecule complex on the membrane of the antigen presenting cell. An additional co-stimulatory signal is then produced by the antigen presenting cell, leading to activation of the T cell. The expression of co-stimulatory molecules is a defining feature of professional antigen-presenting cells.

[0762] The main types of professional antigen-presenting cells are dendritic cells, which have the broadest range of antigen presentation, and are probably the most important antigen presenting cells, macrophages, B-cells, and certain activated epithelial cells.

[0763] Dendritic cells (DCs) are leukocyte populations that present antigens captured in peripheral tissues to T cells via both MHC class II and I antigen presentation pathways. It is well known that dendritic cells are potent inducers of immune responses and the activation of these cells is a critical step for the induction of antiviral immunity.

[0764] Dendritic cells are conveniently categorized as “immature” and “mature” cells, which can be used as a simple way to discriminate between two well characterized phenotypes. However, this nomenclature should not be construed to exclude all possible intermediate stages of differentiation.

[0765] Immature dendritic cells are characterized as antigen presenting cells with a high capacity for antigen uptake and processing, which correlates with the high expression of Fey receptor and mannose receptor. The mature phenotype is typically characterized by a lower expression of these markers, but a high expression of cell surface molecules responsible for T cell activation such as class I and class II MHC, adhesion molecules (e. g. CD54 and CD11) and costimulatory molecules (e. g., CD40, CD80, CD86 and 4-1 BB).

[0766] The term “residue” refers to an amino acid residue or amino acid mimetic residue incorporated into a peptide or protein by an amide bond or amide bond mimetic, or nucleic acid (DNA or RNA) that encodes the amino acid or amino acid mimetic.

[0767] The nomenclature used to describe peptides or proteins follows the conventional practice wherein the amino group is presented to the left (the amino- or N-terminus) and the carboxyl group to the right (the carboxy- or C-terminus) of each amino acid residue. When amino acid residue positions are referred to in a peptide epitope they are numbered in an amino to carboxyl direction with position one being the residue located at the amino terminal end of the epitope, or the peptide or protein of which it can be a part.

[0768] In the formulae representing selected specific embodiments of the present disclosure, the amino- and carboxyl-terminal groups, although not specifically shown, are in the form they would assume at physiologic pH values, unless otherwise specified. In the amino acid structure formulae, each residue is generally represented by standard three letter or single letter designations. The L-form of an amino acid residue is represented by a capital single letter or a capital first letter of a three-letter symbol, and the D-form for those amino acid residues having D-forms is represented by a lower case single letter or a lower case three letter symbol. However, when three letter symbols or full names are used without capitals, they can refer to L amino acid residues. Glycine has no asymmetric carbon atom and is simply referred to as “Gly” or “G”. The amino acid sequences of peptides set forth herein are generally designated using the standard single letter symbol. (A, Alanine; C, Cysteine; D, Aspartic Acid; E, Glutamic Acid; F, Phenylalanine; G, Glycine; H, Histidine; I, Isoleucine; K, Lysine; L, Leucine; M, Methionine; N, Asparagine; P, Proline; Q, Glutamine; R, Arginine; S, Serine; T, Threonine; V, Valine; W, Tryptophan; and Y, Tyrosine.)

[0769] The terms “polynucleotide” and “nucleic acid” are used interchangeably herein and refer to polymers of nucleotides of any length, and include DNA and RNA, for example, mRNA. The nucleotides can be deoxyribonucleotides, ribonucleotides, modified nucleotides or bases, and/or their analogs, or any substrate that can be incorporated into a polymer by DNA or RNA polymerase. In some embodiments, the polynucleotide and nucleic acid can be in vitro transcribed mRNA. In some embodiments, the polynucleotide that is administered is mRNA.

[0770] The terms “identical” or percent “identity” in the context of two or more nucleic acids or polypeptides, refer to two or more sequences or subsequences that are the same or have a specified percentage of nucleotides or amino acid residues that are the same, when compared and aligned (introducing gaps, if necessary) for maximum correspondence, not considering any conservative amino acid substitutions as part of the sequence identity. The percent identity can be measured using sequence comparison software or algorithms or by visual inspection. Various algorithms and software that can be used to obtain alignments of amino acid or nucleotide sequences are well-known in the art. These include, but are not limited to, BLAST, ALIGN, Megalign, BestFit, GCG Wisconsin Package, and variations thereof. In some embodiments, two nucleic acids or polypeptides described herein are substantially identical, meaning they have at least 70%, at least 75%, at least 80%, at least 85%, at least 90%, and in some embodiments at least 95%, at least 96%, at least 97%, at least 98%, at least 99% nucleotide or amino acid residue identity, when compared and aligned for maximum correspondence, as measured using a sequence comparison algorithm or by visual inspection. In some embodiments, identity exists over a region of the sequences that is at least about 10, at least about 20, at least about 40-60 residues, at least about 60-80 residues in length or any integral value between. In some embodiments, identity exists over a longer region than 60-80 residues, such as at least about 80-100 residues, and in some embodiments the sequences are substantially identical over the full length of the sequences being compared, such as the coding region of a nucleotide sequence.

[0771] A “conservative amino acid substitution” is one in which one amino acid residue is replaced with another amino acid residue having a similar side chain. Families of amino acid residues having similar side chains have been defined in the art, including basic side chains (e.g., lysine, arginine, histidine), acidic side chains (e.g., aspartic acid, glutamic acid), uncharged polar side chains (e.g., glycine, asparagine, glutamine, serine, threonine, tyrosine, cysteine), nonpolar side chains (e.g., alanine, valine, leucine, isoleucine, proline, phenylalanine, methionine, tryptophan), beta-branched side chains (e.g., threonine, valine, isoleucine) and aromatic side chains (e.g., tyrosine, phenylalanine, tryptophan, histidine). For example, substitution of a phenylalanine for a tyrosine is a conservative substitution. Methods of identifying nucleotide and amino acid conservative substitutions which do not eliminate peptide function are well-known in the art.

[0772] The term “vector” as used herein means a construct, which is capable of delivering, and usually expressing, one or more gene(s) or sequence(s) of interest in a host cell. Examples of vectors include, but are not limited to, viral vectors, naked DNA or RNA expression vectors, plasmid, cosmid, or phage vectors, DNA or RNA expression vectors associated with cationic condensing agents, and DNA or RNA expression vectors encapsulated in liposomes.

[0773] A polypeptide, antibody, polynucleotide, vector, cell, or composition which is “isolated” is a polypeptide, antibody, polynucleotide, vector, cell, or composition which is in a form not found in nature. Isolated polypeptides, antibodies, polynucleotides, vectors, cells, or compositions include those which have been purified to a degree that they are no longer in a form in which they are found in nature. In some embodiments, a polypeptide, antibody, polynucleotide, vector, cell, or composition which is substantially pure. In one embodiment, a “polynucleotide” encompasses a PCR or quantitative PCR reaction comprising the polynucleotide amplified in the PCR or quantitative PCR reaction.

[0774] The term “substantially pure” as used herein refers to material which is at least 50% pure (i.e., free from contaminants), at least 90% pure, at least 95% pure, at least 98% pure, or at least 99% pure.

[0775] The term ‘subject” refers to any animal (e.g., a mammal), including, but not limited to, humans, non-human primates, canines, felines, rodents, and the like, which is to be the recipient of a particular treatment. Typically, the terms “subject” and “patient” are used interchangeably herein in reference to a human subject.

[0776] The terms “effective amount” or “therapeutically effective amount” or “therapeutic effect” refer to an amount of a therapeutic effective to “treat” a disease or disorder in a subject or mammal. The therapeutically effective amount of a drug has a therapeutic effect and as such can prevent the development of a disease or disorder; slow down the development of a disease or disorder; slow down the progression of a disease or disorder; relieve to some extent one or more of the symptoms associated with a disease or disorder; reduce morbidity and mortality; improve quality of life; or a combination of such effects.

[0777] The terms “treating” or “treatment” or “to treat” or “alleviating” or “to alleviate” refer to both 1) therapeutic measures that cure, slow down, lessen symptoms of, and/or halt progression of a diagnosed pathologic condition or disorder and 2) prophylactic or preventative measures that prevent or slow the development of a targeted pathologic condition or disorder. Thus, those in need of treatment include those already with the disorder; those prone to have the disorder; and those in whom the disorder is to be prevented.

[0778] As used in the present disclosure and embodiments, the singular forms “a”, “an” and “the” include plural forms unless the context clearly dictates otherwise.

[0779] The term “therapeutic” refers a composition that is used to treat or prevent a disease or a condition, such as viral infection, e.g., in some embodiments coronaviral infection. For example, in some embodiments, a therapeutic is or comprises a vaccine. In some embodiments, a therapeutic may be a drug, e.g., a small molecule drug. A therapeutic may be administered to a subject in need thereof, to prevent a disease or an infection, or to reduce or ameliorate one or more symptoms associated with a disease. A therapeutic may also be considered to treat at least a symptom of the disease.

[0780] It is understood that terms such as “comprises”, “comprised”, “comprising” and the like can have the meaning attributed to it in U.S. Patent law; e.g., they can mean “includes”, “included”, “including”, and the like; and that terms such as “consisting essentially of and “consists essentially of have the meaning ascribed to them in U.S. Patent law, e.g., they allow for elements not explicitly recited, but exclude elements that are found in the prior art or that affect a basic or novel characteristic of the present disclosure. Nothing herein is intended as a promise.

[0781] The term “and/or” as used in a phrase such as “A and/or B” herein is intended to include both A and B; A or B; A (alone); and B (alone). Likewise, the term “and/or” as used in a phrase such as “A, B, and/or C” is intended to encompass each of the following embodiments: A, B, and C; A, B, or C; A or C; A or B; B or C; A and C; A and B; B and C; A (alone); B (alone); and C (alone).

[0782] The term “2019 SARS-CoV 2” when, for example, referring to a virus, includes, but is not limited to, the 2019 SARS-CoV 2 virus and any mutant or variant thereof. A variant of a 2019 SARS-CoV 2 virus, or simply a variant as referred to here may mean a virus strain that is mutated with respect to the originally sequenced 2019 SARS-CoV 2 virus strain, e.g., the Wuhan strain. A mutation can be present in a coding region, e.g., spike protein encoding region, a nucleocapsid protein encoding region or any viral protein encoding region. A mutation may be in the genome of the virus that changes or has the potential to change its infectivity and/or virulence.

[0783] 2019 SARS-CoV 2 variants include, but are not limited to, the variants in the table below:

TABLE A
Exemplary 2019 SARS-COV 2 variants

| Name | SNPs | Notes |
|---|---|---|
| Alpha (B.1.1.7; | orf1ab:T1001I | Initially a UK lineage, associated with a variant of concern with |
| 201; S.501Y.V1) | orflab:A1708D | N501Y, P681H and numerous other mutations. |
| | orf1ab:I2230T | Pangolin assigns B.1.1.7 to sequences with at least 5 of the 17 |
| | del : 11288:9 | defining B.1.1.7 SNPs |
| | del:21765:6 | |
| | del:21991:3 | |
| | S:N501Y | |
| | S:A570D | |
| | S:P681H | |
| | S:T716I | |
| | S:S982A | |
| | S:D1118H | |
| | Orf8:Q27* | |
| | Orf8:R52I | |
| | Orf8 : Y73C | |
| | N:D3L | |
| | N:S235F | |
| | S:H69- | Announced on the 14 Dec. 2020, this variant appears to have arisen |
| | S:V70- | and/or initially expanded in the South East of England. |
| | S : Y144- | |
| | S:N501Y | |
| | S:A570D | |
| | S:D614G | |
| | S:P681H | |
| | S:T716I | |
| | S:S982A | |
| | S:D1118H | |
| | ORF1a:T1001I | |
| | ORF1a:A1708D | |
| | ORF1a:I2230T | |
| | ORF1a:S3675- | |
| | ORF1a:G3676- | |
| | ORF1a:F3677- | |
| | N:D3L | |
| | N:R203K | |
| | N:G204R | |
| | N:S235F | |
| | ORF1b:P314L | |
| | ORF8:Q27* | |
| | ORF8:R52I | |
| | ORF8:Y73C | |
| Beta (B.1.351; | E:P71L | A lineage first identified in South Africa and defined by new |
| 20H; S.501Y.V2) | N:T205I | variant of concern 501Y.V2 |
| | orf1a:K1655N | Pangolin assigns B.1.351 to sequences with at least 5 of the 9 |
| | S:D80A | defining B.1.351 SNPs |
| | S:D215G | |
| | S:K417N | |
| | S:A701V | |
| | S:N501Y | |
| | S:E484K | |
| | S:D80A | Announced in December 2020, 20H (Beta, V2) originated and/or |
| | S:D215G | initially expanded in South Africa |
| | S:L241- | |
| | S:L242- | |
| | S:A243- | |
| | S:K417N | |
| | S:E484K | |
| | S:N501Y | |
| | S:D614G | |
| | S:A701V | |
| | ORF3a:Q57H | |
| | ORF1a:T265I | |
| | ORF1a:K1655N | |
| | ORF1a:K3353R | |
| | ORF1a:S3675- | |
| | ORF1a:G3676- | |
| | ORF1a:F3677- | |
| | N:T205I | |
| | ORF1b:P314L | |
| | E:P71L | |
| Delta (B.1.617.2; | S:T19R | A lineage circulating with variants of biological significance |
| 21A; | S:L452R | S:P681R and S:L452R, first detected in India and international |
| 21A/S:478K) | S:T478K | cases with travel history from India. |
| | S:P681R | Pangolin assigns B.1.617.2 to sequences with at least 5 of the 15 |
| | S:D950N | defining B.1.617.2 SNPs |
| | ORF3a:S26L | |
| | M:I82T | |
| | ORF7a:V82A | |
| | ORF7a:T120I | |
| | N:D63G | |
| | N:R203M | |
| | N:D377Y | |
| | S:T19R | B.1.617 was first detected in late 2020 in India, and has appeared to |
| | S:E156- | expand rapidly |
| | S:F157- | |
| | S:R158G | |
| | S:L452R | |
| | S:T478K | |
| | S:D614G | |
| | S:P681R | |
| | S:D950N | |
| | ORF1b:P314L | |
| | ORF1b:P1000L | |
| | M:I82T | |
| | N:D63G | |
| | N:R203M | |
| | N:D377Y | |
| | ORF3a:S26L | |
| | ORF7a : V82A | |
| | ORF7a:T120I | |
| Gamma | orflab:S1188L | A lineage first identified in Brazil with variants of biological |
| (B.1.1.28.1; P.1; | orflab:K1795Q | significance E484K, N501Y and K417T |
| 20J; S.501Y.V3) | del : 11288:9 | Pangolin assigns P.1 to sequences with at least 10 of the 17 defining |
| | S:L18F | P.1 SNPs |
| | S:T20N | |
| | S:P26S | |
| | S:D138Y | |
| | S:R190S | |
| | S:K417T | |
| | S:E484K | |
| | S:N501Y | |
| | S:H655Y | |
| | S:T1027I | |
| | orf3a:G174C | |
| | orf8:E92K | |
| | N:P80R | |
| | S:L18F | Announced in January 2021, originated and/or initially expanded in |
| | S:T20N | Brazil, and was particularly associated with Manaus, Amazonas |
| | S:P26S | |
| | S:D138Y | |
| | S:R190S | |
| | S:K417T | |
| | S:E484K | |
| | S:N501Y | |
| | S:D614G | |
| | S:H655Y | |
| | S:T1027I | |
| | S:V1176F | |
| | ORF3a:S253P | |
| | ORF1a:S1188L | |
| | ORF1a:K1795Q | |
| | ORF1a:S3675- | |
| | ORF1a:G3676- | |
| | ORF1a:F3677- | |
| | N:P80R | |
| | N:R203K | |
| | N:G204R | |
| | ORF1b:P314L | |
| | ORF1b:E1264D | |
| | ORF8:E92K | |
| Epsilon (21C; | S:S13I | Was first identified in California and appears to have increased in |
| 20C/S:452R) | S:W152C | frequency |
| | S:L452R | |
| | S:D614G | |
| | ORF1a:I4205V | |
| | ORF1b:D1183Y | |
| Eta (B.1.525; | orflab:L4715F | International lineage with variants of biological significance |
| 21D; | S:Q52R | E484K, Q677H, F888L and a similar suite of deletions to B.1.1.7. |
| 20A/S:484K) | S:E484K | |
| | S:Q677H | |
| | S:F888L | |
| | E:L21F | |
| | E:I82T | |
| | del11288:9 | |
| | del:21765:6 | |
| | del:28278:3 | |
| | S:Q52R | Appears to have arisen in late 2020, and as of March 2021 has been |
| | S:A67V | detected in North America, Europe, Asia, Africa, and Australia |
| | S:H69- | |
| | S:V70- | |
| | S:Y144- | |
| | S:E484K | |
| | S:D614G | |
| | S:Q677H | |
| | S:F888L | |
| | ORF1b:P314F | |
| | N:S2- | |
| | N:D3Y | |
| | N:A12G | |
| | N:T205I | |
| | M:182T | |
| | ORF1a:T2007I | |
| | ORF1a:S3675- | |
| | ORF1a:G3676- | |
| | ORF1a:F3677- | |
| | E:L21F | |
| | ORF6:F2- | |
| Iota (B.1.526; | S:L5F | Largely found within the USA, particularly in New York state, and |
| 21F; | S:T95I | seems to have arisen in late 2020. |
| 20C/S:484K) | S:D253G | A lineage predominantly circulating in New York but with a few |
| | S:E484K | exports to other countries. Characterised by spike mutations T95I |
| | S:D614G | and D253G, plus others. The most frequent spike mutation pattern |
| | S:A701V | is L5F T95I D253G E484K D614G A701V, with a smaller fraction |
| | ORF1b:P314L | having S477N instead of E484K. Spike mutation E484K is present |
| | ORF1b:Q1011H | in about half of this lineage (as of 2021 Feb. 10) |
| | ORF3a:P42L | |
| | ORF3a:Q57H | |
| | ORF1a:T265I | |
| | ORF1a:L3201P | |
| | ORF1a:S3675- | |
| | ORF1a:G3676- | |
| | ORF1a:F3677- | |
| | N:P199L | |
| | N:M234I | |
| | ORF8:T11I | |
| Kappa | S:E154K | Predominantly India lineage with 484Q |
| (B.1.617.1; 21B; | S:L452R | B.1.617 was first detected in late 2020 in India, and has appeared to |
| 21A/S:154K) | S:E484Q | expand rapidly |
| | S:D614G | |
| | S:P681R | |
| | S:Q1071H | |
| | ORF1b:P314L | |
| | ORF1b:G1129C | |
| | ORF1b:M1352I | |
| | ORF1b:K2310R | |
| | ORF1b:S2312A | |
| | N:R203M | |
| | N:D377Y | |
| | M:I82S | |
| | ORF3a:S26L | |
| | ORF1a:T1567I | |
| | ORF1a:T3646A | |
| | ORF7a : V82A | |
| Lambda (C.37; | S:G75V | Lineage in Peru, Chile, USA and Germany. |
| 21G; B.1.1.1.37) | S:T76I | |
| | S:R246- | |
| | S:S247- | |
| | S:Y248- | |
| | S:L249- | |
| | S:T250- | |
| | S:P251- | |
| | S:G252- | |
| | S:D253N | |
| | S:L452Q | |
| | S:F490S | |
| | S:D614G | |
| | S:T859N | |
| | ORF1a:T1246I | Appears to have arisen in late 2020 in South America. Early |
| | ORF1a:P2287S | sequences are predominantly from Peru and Chile. |
| | ORF1a:F2387V | |
| | ORF1a:L3201P | |
| | ORF1a:T3255I | |
| | ORF1a:G3278S | |
| | ORF1a:S3675- | |
| | ORF1a:G3676- | |
| | ORF1a:F3677- | |
| | ORF1b:P314L | |
| | N:P13L | |
| | N:R203K | |
| | N:G204R | |
| | N:G214C | |
| Mu (B.1.621; | S:T95I | Lineage predominantly in Colombia with several spike mutations. |
| 21H) | S:Y144S | Appears to have arisen in early 2021 in South America. |
| | S:Y145N | |
| | S:R346K | |
| | S:E484K | |
| | S:N501Y | |
| | S:D614G | |
| | S:P681H | |
| | S:D950N | |
| | ORF1a:T1055A | |
| | ORF1a:T1538I | |
| | ORF1a:T3255I | |
| | ORF1a:Q3729R | |
| | ORF1b:P314L | |
| | ORF1b:P1342S | |
| | N:T205I | |
| | ORF3a:Q57H | |
| | ORF3a:V256I | |
| | ORF3a:N257Q | |
| | ORF3a:P258* | |
| | ORF8:T11K | |
| | ORF8:P38S | |
| | ORF8:S67F | |
| Omicron | del:6513:3 | A lineage detected in a number of countries with a high number of |
| (B.1.1.529) | del:11283:9 | spike protein mutations. Since initial detection, a number of |
| | nuc:C241T | Omicron variants have arisen, including BA.1, BA.2, BA.2.12.1, |
| | ORF1A:K856R | BA.4, BA.5, and BA.2.75 (mutations shown in the present table |
| | nuc:C3037T | correspond to the BA.1 Omicron variant). |
| | nuc:T5386G | First reported to WHO from South Africa on 24 November 2021. |
| | ORF1A:A2710T | |
| | ORF1A:T3255I | |
| | ORF1A:P3395H | |
| | ORF1A:I3758V | |
| | nuc:T13195C | |
| | ORF1B:P314L | |
| | nuc:C15240T | |
| | ORF1B:I1566V | |
| | S:A67V | |
| | S:T95I | |
| | S:G339D | |
| | S:S371L | |
| | S:S373P | |
| | S:K417N | |
| | S:N440K | |
| | S:G446S | |
| | S:S477N | |
| | S:T478K | |
| | S:E484A | |
| | S:Q493R | |
| | S:G496S | |
| | S:Q498R | |
| | S:N501Y | |
| | S:T547K | |
| | S:D614G | |
| | S:H655Y | |
| | S:N679K | |
| | S:P681H | |
| | S:N764K | |
| | S:D796Y | |
| | S:N856K | |
| | S:Q954H | |
| | S:N969K | |
| | nuc:C25000T | |
| | E:T9I | |
| | M:D3G | |
| | M:Q19E | |
| | M:A63T | |
| | nuc:A27259C | |
| | nuc:C27807T | |
| | N:RG203KR | |

[0784] In some embodiments, sequencing methods may be used to identify virus specific epitopes. Any suitable sequencing method can be used according to the present disclosure, for example, Next Generation Sequencing (NGS) technologies. Third Generation Sequencing methods might substitute for the NGS technology in the future to speed up the sequencing step of the method. For clarification purposes: the terms “Next Generation Sequencing” or “NGS” in the context of the present disclosure mean all novel high throughput sequencing technologies which, in contrast to the “conventional” sequencing methodology known as Sanger chemistry, read nucleic acid templates randomly in parallel along the entire genome by breaking the entire genome into small pieces. Such NGS technologies (also known as massively parallel sequencing technologies) are able to deliver nucleic acid sequence information of a whole genome, exome, transcriptome (all transcribed sequences of a genome) or methylome (all methylated sequences of a genome) in very short time periods, e.g. within 1-2 weeks, for example, within 1-7 days or within less than 24 hours and allow, in principle, single cell sequencing approaches. Multiple NGS platforms which are commercially available or which are mentioned in the literature can be used in the context of the present disclosure e.g. those described in detail in WO 2012/159643.

[0785] In certain embodiments a viral epitope peptide described herein molecule can comprise, but is not limited to, about 5, about 6, about 7, about 8, about 9, about 10, about 11, about 12, about 13, about 14, about 15, about 16, about 17, about 18, about 19, about 20, about 21, about 22, about 23, about 24, about 25, about 26, about 27, about 28, about 29, about 30, about 31, about 32, about 33, about 34, about 35, about 36, about 37, about 38, about 39, about 40, about 41, about 42, about 43, about 44, about 45, about 46, about 47, about 48, about 49, about 50, about 60, about 70, about 80, about 90, about 100, about 110, about 120 or greater amino acid residues, and any range derivable therein. In specific embodiments, a viral epitope peptide molecule is equal to or less than 100 amino acids.

[0786] In some embodiments, viral epitope peptides described herein for MHC Class I are 13 residues or less in length and usually consist of between about 8 and about 11 residues, particularly 9 or 10 residues. In some embodiments, viral epitope peptides described herein for MHC Class II are 9-24 residues in length.

[0787] A longer viral protein epitope peptide can be designed in several ways. In some embodiments, when HLA-binding peptides are predicted or known, a longer viral protein epitope peptide could consist of (1) individual binding peptides with extensions of 2-5 amino acids toward the N- and C-terminus of each corresponding peptide; or (2) a concatenation of some or all of the binding peptides with extended sequences for each. In some embodiments, use of a longer peptide is presumed to allow for endogenous processing by patient cells and can lead to more effective antigen presentation and induction of T cell responses. In some embodiments, two or more peptides can be used, where the peptides overlap and are tiled over the long viral epitope peptide.

[0788] In some embodiments, the viral epitope peptides and polypeptides bind an HLA protein (e.g., HLA class I or HLA class II). In specific embodiments the viral epitope peptide or polypeptide has an IC50 of at least less than 5000 nM, at least less than 500 nM, at least less than 100 nM, at least less than 50 nM or less.

[0789] In some embodiments, a viral protein epitope peptide described herein can be in solution, lyophilized, or can be in crystal form.

[0790] In some embodiments, a viral protein epitope peptide described herein can be prepared synthetically, by recombinant DNA technology or chemical synthesis, or can be from natural sources such as native viruses. Epitopes can be synthesized individually or joined directly or indirectly in a peptide. Although a viral epitope peptide described herein will be substantially free of other naturally occurring host cell proteins and fragments thereof, in some embodiments the peptide can be synthetically conjugated to be joined to native fragments or particles.

[0791] In some embodiments, a viral protein epitope peptide described herein can be prepared in a wide variety of ways. In some embodiments, the peptides can be synthesized in solution or on a solid support according to conventional techniques. Various automatic synthesizers are commercially available and can be used according to known protocols. (See, for example, Stewart & Young, Solid Phase Peptide Synthesis, 2D. ED., Pierce Chemical Co., 1984). Further, individual peptides can be joined using chemical ligation to produce larger peptides that are still within the bounds of the present disclosure.

[0792] Alternatively, recombinant DNA technology can be employed wherein a nucleotide sequence which encodes a peptide inserted into an expression vector, transformed or transfected into an appropriate host cell and cultivated under conditions suitable for expression. These procedures are generally known in the art, as described generally in Sambrook et al., MOLECULAR CLONING, A LABORATORY MANUAL, Cold Spring Harbor Press, Cold Spring Harbor, N.Y. (1989). Thus, recombinant peptides, which comprise or consist of one or more epitopes described herein, can be used to present the appropriate T cell epitope.

[0793] In one aspect, the present disclosure described herein also provides compositions comprising one, at least two, or more than two viral epitope peptides. In some embodiments a composition described herein contains at least two distinct peptides. In some embodiments, the at least two distinct peptides are derived from the same polypeptide. By distinct polypeptides is meant that the peptide vary by length, amino acid sequence or both. The peptides are derived from any polypeptide known to or have been found to contain a viral-specific epitope.

### Viral Epitope Polynucleotides

[0794] Polynucleotides encoding each of the peptides described herein are also within the scope of the present disclosure. As appreciated by one of ordinary skill in the art, various nucleic acids can encode the same peptide due to the redundancy of the genetic code. Each of these nucleic acids falls within the scope of the present disclosure. This embodiment of the present disclosure comprises DNA and RNA, for example, mRNA, and in certain embodiments a combination of DNA and RNA. In one embodiment, the mRNA is a self-amplifying mRNA. (Brito et al., Adv. Genet. 2015; 89:179-233). It is to be appreciated that any polynucleotide that encodes a peptide described herein falls within the scope of this present disclosure.

[0795] The term “RNA” includes and in some embodiments relates to “mRNA”. The term “mRNA” means “messenger-RNA” and relates to a “transcript” which is generated by using a DNA template and encodes a peptide or polypeptide. Typically, an mRNA comprises a 5′-UTR, a protein coding region, and a 3′-UTR. mRNA only possesses limited half-life in cells and in vitro. In one embodiment, the mRNA is self-amplifying mRNA. In the context of the present disclosure, mRNA may be generated by in vitro transcription from a DNA template. The in vitro transcription methodology is known to the skilled person. For example, there is a variety of in vitro transcription kits commercially available.

[0796] The stability and/or translation efficiency of RNA may be modified as required. For example, RNA may be stabilized and its translation increased by one or more modifications having a stabilizing effects and/or increasing translation efficiency of RNA. Such modifications are described, for example, in PCT/EP2006/009448, PCT/EP15/073180, and PCT/EP2015/065357, each of which are incorporated herein by reference. In order to increase expression of the RNA used according to the present disclosure, it may be modified within the coding region, i.e. the sequence encoding the expressed peptide or protein, without altering the sequence of the expressed peptide or protein, so as to increase the GC-content to increase mRNA stability and to perform a codon optimization and, thus, enhance translation in cells.

[0797] The term “modification” in the context of the RNA used in the present disclosure includes any modification of an RNA which is not naturally present in said RNA. In one embodiment of the present disclosure, the RNA used according to the present disclosure does not have uncapped 5′-triphosphates. Removal of such uncapped 5′-triphosphates can be achieved by treating RNA with a phosphatase. The RNA according to the present disclosure may have modified ribonucleotides in order to increase its stability and/or decrease cytotoxicity. For example, in one embodiment, in the RNA used according to the present disclosure cytidine may be substituted by 5-methylcytidine; 5-methylcytidine is substituted partially or completely, for example, completely, for cytidine. Alternatively, or additionally, in one embodiment, in the RNA used according to the present disclosure uridine may be substituted by a modified uridine. In some embodiments pseudouridine or 1-methyl pseudouridine; pseudouridine or 1-methyl pseudouridine is substituted partially or completely, for example, completely, for uridine.

[0798] In one embodiment the term “modification” relates to providing an RNA with a 5′-cap or 5′-cap analog. The term “5′-cap” refers to a cap structure found on the 5′-end of an mRNA molecule and generally consists of a guanosine nucleotide connected to the mRNA via an unusual 5′ to 5′ triphosphate linkage. In one embodiment, this guanosine is methylated at the 7-position. The term “conventional 5′-cap” refers to a naturally occurring RNA 5′-cap, to the 7-methylguanosine cap (m G). In the context of the present disclosure, the term “5′-cap” includes a 5′-cap analog that resembles the RNA cap structure and is modified to possess the ability to stabilize RNA and/or enhance translation of RNA if attached thereto, in vivo and/or in a cell.

[0799] In certain embodiments, an mRNA encoding a viral epitope is administered to a subject in need thereof. In one embodiment, the present disclosure provides RNA, oligoribonucleotide, and polyribonucleotide molecules comprising a modified nucleoside, gene therapy vectors comprising same, gene therapy methods and gene transcription silencing methods comprising same. In one embodiment, the mRNA to be administered comprises at least one modified nucleoside.

[0800] The polynucleotides encoding peptides described herein can be synthesized by chemical techniques, for example, the phosphotriester method of Matteucci, et al., J. Am. Chem. Soc. 103:3185 (1981). Polynucleotides encoding peptides comprising or consisting of an analog can be made simply by substituting the appropriate and desired nucleic acid base(s) for those that encode the native epitope.

[0801] A large number of vectors and host systems suitable for producing and administering a viral epitope peptide described herein are known to those of skill in the art, and are commercially available. The following vectors are provided by way of example. Bacterial: pQE70, pQE60, pQE-9 (Qiagen), pBS, pD10, phagescript, psiX174, pBluescript SK, pbsks, pNH8A, pNH16a, pNH18A, pNH46A (Stratagene); ptrc99a, pKK223-3, pKK233-3, pDR540, pRIT5 (Pharmacia); pCR (Invitrogen). Eukaryotic: pWLNEO, pSV2CAT, pOG44, pXT1, pSG (Stratagene) pSVK3, pBPV, pMSG, pSVL (Pharmacia); p75.6 (Valentis); pCEP (Invitrogen); pCEI (Epimmune). However, any other plasmid or vector can be used as long as it is replicable and viable in the host.

[0802] As representative examples of appropriate hosts, there can be mentioned: bacterial cells, such as E. coli, Bacillus subtilis, Salmonella typhimurium and various species within the genera Pseudomonas, Streptomyces, and Staphylococcus; fungal cells, such as yeast; insect cells such as Drosophila and Sf9; animal cells such as COS-7 lines of monkey kidney fibroblasts, described by Gluzman, Cell 23:175 (1981), and other cell lines capable of expressing a compatible vector, for example, the C127, 3T3, CHO, HeLa and BHK cell lines or Bowes melanoma; plant cells, etc. The selection of an appropriate host is deemed to be within the scope of those skilled in the art from the teachings herein.

[0803] Thus, the present disclosure is also directed to vectors, and expression vectors useful for the production and administration of the viral epitope peptides described herein, and to host cells comprising such vectors.

[0804] Host cells are genetically engineered (transduced or transformed or transfected) with the vectors which can be, for example, a cloning vector or an expression vector. The vector can be, for example, in the form of a plasmid, a viral particle, a phage, etc. The engineered host cells can be cultured in conventional nutrient media modified as appropriate for activating promoters, selecting transformants or amplifying the polynucleotides. The culture conditions, such as temperature, pH and the like, are those previously used with the host cell selected for expression, and will be apparent to the ordinarily skilled artisan.

[0805] For expression of the viral epitope peptides described herein, the coding sequence will be provided operably linked start and stop codons, promoter and terminator regions, and in some embodiments, and a replication system to provide an expression vector for expression in the desired cellular host. For example, promoter sequences compatible with bacterial hosts are provided in plasmids containing convenient restriction sites for insertion of the desired coding sequence. The resulting expression vectors are transformed into suitable bacterial hosts.

[0806] Generally, recombinant expression vectors will include origins of replication and selectable markers permitting transformation of the host cell, e.g., the ampicillin resistance gene of E. coli and S. cerevisiae TRP1 gene, and a promoter derived from a highly-expressed gene to direct transcription of a downstream structural sequence. Such promoters can be derived from operons encoding glycolytic enzymes such as 3-phosphoglycerate kinase (PGK), acid phosphatase, or heat shock proteins, among others. The heterologous structural sequence is assembled in appropriate phase with translation initiation and termination sequences, and in some embodiments, a leader sequence capable of directing secretion of translated protein into the periplasmic space or extracellular medium. Optionally, the heterologous sequence can encode a fusion protein including an N-terminal identification peptide imparting desired characteristics, e.g., stabilization or simplified purification of expressed recombinant product.

[0807] Yeast, insect or mammalian cell hosts can also be used, employing suitable vectors and control sequences. Examples of mammalian expression systems include the COS-7 lines of monkey kidney fibroblasts, described by Gluzman, Cell 23:175 (1981), and other cell lines capable of expressing a compatible vector, for example, the C127, 3T3, CHO, HeLa and BHK cell lines. Mammalian expression vectors will comprise an origin of replication, a suitable promoter and enhancer, and also any necessary ribosome binding sites, polyadenylation site, splice donor and acceptor sites, transcriptional termination sequences, and 5′ flanking non-transcribed sequences. Such promoters can also be derived from viral sources, such as, e.g., human cytomegalovirus (CMV-IE promoter) or herpes simplex virus type-1 (HSV TK promoter). Nucleic acid sequences derived from the SV40 splice, and polyadenylation sites can be used to provide the non-transcribed genetic elements.

[0808] Polynucleotides encoding viral epitope peptides described herein can also comprise a ubiquitination signal sequence, and/or a targeting sequence such as an endoplasmic reticulum (ER) signal sequence to facilitate movement of the resulting peptide into the endoplasmic reticulum.

[0809] Polynucleotides described herein can be administered and expressed in human cells (e.g., immune cells, including dendritic cells). A human codon usage table can be used to guide the codon choice for each amino acid. Such polynucleotides comprise spacer amino acid residues between epitopes and/or analogs, such as those described above, or can comprise naturally-occurring flanking sequences adjacent to the epitopes and/or analogs (and/or CTL, HTL, and B cell epitopes).

[0810] In some embodiments, a viral epitope peptide described herein can also be administered/expressed by viral or bacterial vectors. Examples of expression vectors include attenuated viral hosts, such as vaccinia or fowlpox. As an example of this approach, vaccinia virus is used as a vector to express nucleotide sequences that encode the viral epitope peptides described herein. Vaccinia vectors and methods useful in immunization protocols are described in, e.g., U.S. Pat. No. 4,722,848. Another vector is BCG (Bacille Calmette Guerin). BCG vectors are described by Stover et al., Nature 351:456-460 (1991). A wide variety of other vectors useful for therapeutic administration or immunization of the viral epitope polypeptides described herein, e.g. adeno and adeno-associated virus vectors, retroviral vectors, Salmonella typhi vectors, detoxified anthrax toxin vectors, Sendai virus vectors, poxvirus vectors, canarypox vectors, and fowlpox vectors, and the like, will be apparent to those skilled in the art from the description herein. In some embodiments, the vector is Modified Vaccinia Ankara (VA) (e.g. Bavarian Nordic (MVA-BN)).

[0811] Standard regulatory sequences well known to those of skill in the art can be included in the vector to ensure expression in the human target cells. Several vector elements are desirable: a promoter with a downstream cloning site for polynucleotide, e.g., minigene insertion; a polyadenylation signal for efficient transcription termination; an E. coli origin of replication; and an E. coli selectable marker (e.g. ampicillin or kanamycin resistance). Numerous promoters can be used for this purpose, e.g., the human cytomegalovirus (hCMV) promoter. See, e.g., U.S. Pat. Nos. 5,580,859 and 5,589,466 for other suitable promoter sequences. In some embodiments, the promoter is the CMV-IE promoter.

[0812] Polynucleotides described herein can comprise one or more synthetic or naturally-occurring introns in the transcribed region. The inclusion of mRNA stabilization sequences and sequences for replication in mammalian cells can also be considered for increasing polynucleotide expression.

[0813] In addition, a polynucleotide described herein can comprise immunostimulatory sequences (ISSs or CpGs). These sequences can be included in the vector, outside the polynucleotide coding sequence to enhance immunogenicity.

### Viral Epitopes

[0814] Coronaviruses are enveloped positive-stranded RNA viruses that belong to the family Coronaviridae and the order Nidovirales. Coronaviruses frequently infect people around the globe. There are a large number of coronaviruses, most of which circulate among peridomestic animals including pigs, camels, bats and cats. Of the seven coronaviruses identified in human so far, Coronaviruses 229E, NL63 were classified as Group 1 antigenic viruses, OC43 and HKU1 were classified as Group 2 antigenic viruses. They typically infect upper respiratory tract in human and can bring about acute respiratory syndrome and can be fatal. Coronaviruses may be zoonotic in origin. The SARS-CoV, MERS-CoV and 2019 SARS COV-2 have human transmission and infective capability and have caused major public health concern worldwide over a short period within the century. The expansion of genetic diversity among coronaviruses and their consequent ability to cause disease in human beings is mainly achieved through infecting peridomestic animals, which serve as intermediate hosts, nurturing recombination and mutation events. The spike glycoprotein (S glycoprotein), which attaches the virion to the host cell membrane, is postulated to play a dominant role in host range restriction. While SARS-CoV and 2019 SARS CoV-2 infect type 2 pneumocytes and ciliated bronchial epithelial cells utilizing angiotensin converting enzyme 2 (ACE2) as a receptor, MERS-CoV exploits dipeptidyl peptidase 4 (DPP4), a transmembrane glycoprotein, to infect type 2 pneumocytes and unciliated bronchial epithelial cells.

[0815] Coronaviruses first replicate in epithelial cells of the respiratory and enteric cells. Human airway epithelial cells facilitate high growth rate for the 2019 SARS CoV-2 virus. Coronavirus infected human beings can present with influenza-like symptoms and can develop pneumonia. Associated symptoms with the disease include cough, fever, dyspnea, myalgia or fatigue. Some human patients present with mild clinical manifestation of the disease. However, the manifestation of the disease in human population can span a wide range from asymptomatic to fatal. In some cases, human coronavirus has an incubation period of 2-4 days; 2019 SARS CoV-2 is estimated to be 3-6 days, and SARS-CoV can be 4-6 days. SARS coronavirus was identified in 2003 and may have originated from an animal reservoir, and first infected humans in Guangdong province in southern China in 2002. Patients presented respiratory distress and diarrhea. MERS-CoV was identified in Saudi Arabia in 2012. Dromedary camels may have been the major reservoirs of MERS-CoV. Typical MERS symptoms include fever, cough, shortness of breath, pneumonia, gastrointestinal symptoms including diarrhea. 2019 SARS CoV-2 is also called SARS CoV-2 or simply CoV-2.

[0816] Human-to-human transmission of SARS-CoV occurred after early importation of cases were Toronto in Canada, Hong Kong Special Administrative Region of China, Chinese Taipei, Singapore, and Hanoi in Viet Nam during the global epidemic of 2003; at least four resurgences have since been reported. MERS is reported to have spread to countries, including at least Algeria, Austria, Bahrain, China, Egypt, France, Germany, Greece, Islamic Republic of Iran, Italy, Jordan, Kuwait, Lebanon, Malaysia, the Netherlands, Oman, Philippines, Qatar, Republic of Korea, Kingdom of Saudi Arabia, Thailand, Tunisia, Turkey, United Arab Emirates, United Kingdom, United States, and Yemen during the 2012 outbreak. The 2019 SARS CoV-2 was first identified in Wuhan, China and spread worldwide between December 2019 and early 2020.

[0817] As of Mar. 20, 2019, no vaccines had been approved for these viruses. Novel therapeutics against the virus are needed. The present disclosure comprises methods and compositions for developing immunotherapy using subject's own immune cells to activate immune response against the virus.

[0818] In one aspect the method comprises one or more of the following:
[0819] Analyzing the virus genome sequence to obtain information on potential viral epitopes.
[0820] Analyzing a subject's MHC class I and MHC class II expression profiles.
[0821] Analyzing the viral sequences in MHC-peptide presentation prediction algorithm implemented in a computer processor wherein the MHC-peptide presentation prediction algorithm implemented in a computer processor has been trained by a machine learning training module that incorporates a large number of characteristics related to the peptide and peptide MHC interactions in order to provide an output of a selection of peptides that are predicted to bind to a certain MHC molecule. In some embodiments, the MHC-peptide presentation predictor is neonmhc2. In some embodiments, a further analysis using MHC-peptide presentation predictor NetMHCpan or NetMHCpan II is performed for comparison. In some embodiments, the MHC-peptide presentation predictor is NetMHCpan. In some embodiments, the MHC-peptide presentation predictor is NetMHCpan II.
[0822] Identifying which viral epitopes can bind to an MHC present in the subject.
[0823] Ranking aided by a machine learning the viral peptides that bind to the subjects' MHC molecules according to the binding affinities, where higher rank infers higher binding affinity and presentation efficiency.
[0824] Select at least one, at least two, at least three or at least four or more viral peptides from the ranked peptides that have high binding affinity to the subject's one or more MHC molecules and prepare a composition. The viral peptides that are selected, taken together may bind to one or more class I MHCs, or a class II MHCs or a mixture of class I and class II MHCs, wherein each of the MHCs is expressed by the subject.

[0825] Provided herein an antigenic peptide comprising an epitope sequence from Table 1A, Table 1B, Table 1C, Table 2Ai, Table 2Aii, Table 2B, Table 9, Table 10, Table 11, Table 12, Table 14A, Table 14B, Table 15 or Table 16. Also provided herein is a polynucleotide encoding and antigenic peptide comprising an epitope sequence from Table 1A, Table 1B, Table 1C, Table 2Ai, Table 2Aii, Table 2B, Table 9, Table 10, Table 11, Table 12, Table 14A, Table 14B, Table 14C, Table 15 or Table 16. The antigenic peptide and/or polynucleotide may be recombinant. The antigenic peptide and/or polynucleotide may be isolated or purified. The antigenic peptide may be synthetic or expressed from a polynucleotide.

[0826] Also provided herein is an antibody or B cell comprising an antibody that binds to an antigenic peptide comprising an epitope sequence from Table 1A, Table 1B, Table 1C, Table 2Ai, Table 2Aii, Table 2B, Table 9, Table 10, Table 11, Table 12, Table 14A, Table 14B, Table 14C, Table 15 or Table 16.

[0827] Also provided herein is a T cell receptor (TCR) or T cell comprising a TCR that that binds an epitope sequence from Table 1A or Table 1B in complex with a corresponding MHC class I molecule according to Table 1A or Table 1B. For example, the TCR can bind to an epitope sequence from column 2 (set 1) of Table 1A in complex with a corresponding MHC class I molecule from column 3 (set 1) in the same row of Table 1A. For example, the TCR can bind to an epitope sequence from column 4 (set 2) of Table 1A in complex with a corresponding MHC class I molecule from column 5 (set 2) in the same row of Table 1A. For example, the TCR can bind to an epitope sequence from column 6 (set 3) of Table 1A in complex with a corresponding MHC class I molecule from column 7 (set 3) in the same row of Table 1A. For example, the TCR can bind to an epitope sequence from column 2 (set 1) of Table 1B in complex with a corresponding MHC class I molecule from column 3 (set 1) in the same row of Table 1B. For example, the TCR can bind to an epitope sequence from column 4 (set 2) of Table 1B in complex with a corresponding MHC class I molecule from column 5 (set 2) in the same row of Table 1B.

[0828] Also provided herein is a T cell receptor (TCR) or T cell comprising a TCR that that binds to an epitope sequence from Table 2Ai in complex with a corresponding MHC class II molecule according to Table 2Ai. For example, the TCR can bind to an epitope sequence from column 2 (set 1) of Table 2Ai in complex with a corresponding MHC class II molecule from column 3 (set 1) in the same row of Table 2Ai. For example, the TCR can bind to an epitope sequence from column 4 (set 2) of Table 2Ai in complex with a corresponding MHC class II molecule from column 5 (set 2) in the same row of Table 2Ai. Also provided herein is a T cell receptor (TCR) or T cell comprising a TCR that that binds to an epitope sequence from Table 2Aii in complex with a corresponding MHC class II molecule according to Table 2Aii. For example, the TCR can bind to an epitope sequence from column 2 (set 1) of Table 2Aii in complex with a corresponding MHC class II molecule from column 3 (set 1) in the same row of Table 2Aii.

[0829] Provided herein is a method of treating or preventing viral infection in a subject in need thereof comprising administering to the subject an antigenic peptide comprising an epitope sequence from Table 1A, Table 1B, Table 1C, Table 2Ai, Table 2Aii, Table 2B, Table 9, Table 10, Table 11, Table 12, Table 14A, Table 14B, Table 14C, Table 15 or Table 16. Also provided herein is a method of treating or preventing viral infection in a subject in need thereof comprising administering to the subject a polynucleotide encoding and antigenic peptide comprising an epitope sequence from Table 1A, Table 1B, Table 1C, Table 2Ai, Table 2Aii, Table 2B, Table 9, Table 10, Table 11, Table 12, Table 14A, Table 14B, Table 14C, Table 15 or Table 16.

[0830] Also provided herein is a method of treating or preventing a viral infection in a subject in need thereof comprising administering to the subject an antibody or B cell comprising an antibody that binds to an antigenic peptide comprising an epitope sequence from Table 1A, Table 1B, Table 1C, Table 2Ai, Table 2Aii, Table 2B, Table 9, Table 10, Table 11, Table 12, Table 14A, Table 14B, Table 14C, Table 15 or Table 16.

[0831] Also provided herein is a method of treating or preventing viral infection in a subject in need thereof comprising administering to the subject a T cell receptor (TCR) or T cell comprising a TCR that that binds an epitope sequence from Table 1A, Table 1B, Table 1C, Table 2Ai, Table 2Aii, Table 2B, Table 9, Table 10, Table 11, Table 12, Table 14A, Table 14B, Table 15 or Table 16 in complex with a corresponding MHC class I molecule according to Table 1A, Table 1B, Table 1C, Table 2Ai, Table 2Aii, Table 2B, Table 9, Table 10, Table 11, Table 12, Table 14A, Table 14B, Table 14C, Table 15 or Table 16.

[0832] For example, the method can comprise administering to the subject a TCR or T cell comprising a TCR that can bind to an epitope sequence from column 2 (set 1) of Table 1A in complex with a corresponding MHC class I molecule from column 3 (set 1) in the same row of Table 1A. For example, the method can comprise administering to a TCR or T cell comprising a TCR that can bind to an epitope sequence from column 2 (set 1) of Table 1A in complex with a corresponding MHC class I molecule from column 3 (set 1) in the same row of Table 1A to a subject that expresses the corresponding MHC class I molecule from column 3 (set 1). For example, the method can comprise administering to the subject a TCR or T cell comprising a TCR that can bind to an epitope sequence from column 4 (set 2) of Table 1A in complex with a corresponding MHC class I molecule from column 5 (set 2) in the same row of Table 1A. For example, the method can comprise administering to a TCR or T cell comprising a TCR that can bind to an epitope sequence from column 4 (set 2) of Table 1A in complex with a corresponding MHC class I molecule from column 5 (set 2) in the same row of Table 1A to a subject that expresses the corresponding MHC class I molecule from column 5 (set 2). For example, the method can comprise administering to the subject a TCR or T cell comprising a TCR that can bind to an epitope sequence from column 6 (set 3) of Table 1A in complex with a corresponding MHC class I molecule from column 7 (set 3) in the same row of Table 1A. For example, the method can comprise administering to a TCR or T cell comprising a TCR that can bind to an epitope sequence from column 6 (set 3) of Table 1A in complex with a corresponding MHC class I molecule from column 7 (set 3) in the same row of Table 1A to a subject that expresses the corresponding MHC class I molecule from column 7 (set 3).

[0833] For example, the method can comprise administering to the subject a TCR or T cell comprising a TCR that can bind to an epitope sequence from column 2 (set 1) of Table 1B in complex with a corresponding MHC class I molecule from column 3 (set 1) in the same row of Table 1B. For example, the method can comprise administering to a TCR or T cell comprising a TCR that can bind to an epitope sequence from column 2 (set 1) of Table 1B in complex with a corresponding MHC class I molecule from column 3 (set 1) in the same row of Table 1B to a subject that expresses the corresponding MHC class I molecule from column 3 (set 1). For example, the method can comprise administering to the subject a TCR or T cell comprising a TCR that can bind to an epitope sequence from column 4 (set 2) of Table 1B in complex with a corresponding MHC class I molecule from column 5 (set 2) in the same row of Table 1B. For example, the method can comprise administering to a TCR or T cell comprising a TCR that can bind to an epitope sequence from column 4 (set 2) of Table 1B in complex with a corresponding MHC class I molecule from column 5 (set 2) in the same row of Table 1B to a subject that expresses the corresponding MHC class I molecule from column 5 (set 2).

[0834] For example, the method can comprise administering to the subject a TCR or T cell comprising a TCR that can bind to an epitope sequence from column 2 (set 1) of Table 2Ai in complex with a corresponding MHC class II molecule from column 3 (set 1) in the same row of Table 2Ai. For example, the method can comprise administering to a TCR or T cell comprising a TCR that can bind to an epitope sequence from column 2 (set 1) of Table 2Ai in complex with a corresponding MHC class II molecule from column 3 (set 1) in the same row of Table 2Ai to a subject that expresses the corresponding MHC class II molecule from column 3 (set 1). For example, the method can comprise administering to the subject a TCR or T cell comprising a TCR that can bind to an epitope sequence from column 4 (set 2) of Table 2Ai in complex with a corresponding MHC class II molecule from column 5 (set 2) in the same row of Table 2Ai. For example, the method can comprise administering to a TCR or T cell comprising a TCR that can bind to an epitope sequence from column 4 (set 2) of Table 2Ai in complex with a corresponding MHC class II molecule from column 5 (set 2) in the same row of Table 2Ai to a subject that expresses the corresponding MHC class II molecule from column 5 (set 2). Likewise, the method can comprise administering to the subject a TCR or T cell comprising a TCR that can bind to an epitope sequence from column on the left of Table 2Aii in complex with a corresponding MHC class II molecule from the respective column on the right in the same row of Table 2Aii. A protein encoded by the corresponding allele to the right adjacent column of a peptide in any single row of Table 2Ai or Table 2Aii is an MHC protein that binds to the peptide and is presented to T cells by APCs. A peptide listed on the immediate left column of an HLA allele(s) in each row is matched with the HLA in the row.

TABLE 1A
Peptides and Alleles

| | Set 1 | Set 1 | Set 2 | Set 2 | Set 3 | Set 3 |
|---|---|---|---|---|---|---|
| | Peptide | Allele | Peptide | Allele | Peptide | Allele |
| 1 | AACCHLAKAL | L61 | TPLVPFWI | L47 | FLVLLPLV | L2; L47; L4 |
| 2 | AADLDDFSKQL | L68 | TPLVPFWITIA | L50 | FLYENAFLP | L12; L2; L4 |
| 3 | AADPAMHAAS | L68 | TPLVPFWITIAY | L31 | FMGRIRSVY | L14; L43; L69 |
| 4 | AAGLEAPFLYL | L67 | TPNNTDFSRV | L51 | FNATRFASV | L3; L20; L73 |
| 5 | AAISDYDY | L54 | TPRDLGAC | L51 | FNIDYDCVSF | L43; L71; L72 |
| 6 | AAISDYDYYR | L15 | TPSFKKGAKLL | L39 | FPDLNGDVVAI | L68; L50; L49 |
| 7 | AAITILDGI | L10 | TPSKLIEYT | L49 | FPFNKWGKA | L50; L51; L46 |
| 8 | AAITILDGISQY | L14 | TPVYSFLPGVY | L31 | FPLCANGQVF | L31; L50; L32 |
| 9 | AAKKNNLPFK | L13 | TQEVFAQV | L48 | FPLNSIIKT | L50; L31; L47 |
| 10 | AALALLLLDR | L7 | TQFNYYKK | L24 | FPLNSIIKTI | L47; L50; L49 |
| 11 | AALCTFLL | L74 | TQGNFGDQEL | L34 | FRIDGDMVP | L66; L35; L34 |
| 12 | AALQIPFA | L50 | TQGNFGDQELI | L34 | FRKSNLKPF | L66; L30; L58 |
| 13 | AALQPEEEQ | L67 | TQHGKEDLKF | L26 | FRLTLGVYDY | L66; L30; L12 |
| 14 | AAMQRKLEK | L7 | TQLPPAYTNSF | L8 | FRSSVLHST | L66; L35; L64 |
| 15 | AANTVIWDYKR | L15 | TQLSTDTGV | L24 | FSALEPLV | L48; L47; L70 |
| 16 | AARDLICAQ | L43 | TQLYLGGMSYY | L14 | FSKLINIIIW | L52; L69; L70 |
| 17 | AARDLICAQK | L13 | TQQLIRAA | L48 | FSSLPSYAAF | L59; L60; L43 |
| 18 | AARVVRSIFSR | L15 | TQRNFYEPQI | L48 | FSTVFPPTSF | L43; L60; L59 |
| 19 | AARYMRSLK | L13 | TQSLLIVNN | L24 | FTSLEIPRR | L19; L17; L21 |
| 20 | AASGNLLLD | L69 | TQYEYGTEDDY | L14 | FTYICGFIQQK | L7; L6; L19 |
| 21 | AASGNLLLDK | L7 | TRAGCLIGA | L30 | FVDGVPFVVS | L68; L5; L67 |
| 22 | AAVDALCEKAL | L67 | TRCLAVHEC | L35 | FVDSDVET | L63; L68; L62 |
| 23 | AAVINGDRWF | L52 | TRCNLGGAV | L35 | FVENPDILRV | L20; L5; L63 |
| 24 | AAVNSVPW | L54 | TRDIASTD | L65 | FVENPDILRVY | L14; L1; L31 |
| 25 | AAVYRINW | L54 | TRDIASTDT | L35 | FVETVKGL | L63; L68; L60 |
| 26 | AAYSRYRIGNY | L14 | TRDIASTDTCF | L34 | FVETVKGLDY | L1; L12; L18 |
| 27 | ACLVGLMWL | L4 | TREVGFVV | L35 | FVFKNIDGYF | L11; L58; L12 |
| 28 | ACPLIAAVI | L57 | TRFASVYAWNR | L30 | FVKATCEF | L58; L59; L43 |
| 29 | ACTDDNALA | L42 | TRFQTLLALH | L30 | FVLAAVYR | L17; L15; L21 |
| 30 | ACTDDNALAYY | L14 | TRFQTLLALHR | L30 | FVRIIMRL | L74; L59; L23 |
| 31 | ACVEEVTTTL | L36 | TRGATVVIG | L65 | FVRIIMRLW | L52; L49; L10 |
| 32 | ACYNGSPSGV | L3 | TRKLMPVCV | L64 | FVTVYSHLLL | L74; L60; L61 |
| 33 | ACYNGSPSGVY | L14 | TRLQSLENVAF | L30 | FYKGVITH | L71; L66; L72 |
| 34 | ADAQSFLN | L33 | TRNPANNAA | L35 | FYLCFLAFLLF | L9; L12; L8 |
| 35 | ADAQSFLNGF | L33 | TRNPAWRKAVF | L65 | FYPKLQSS | L71; L72; L66 |
| 36 | ADDLNQLT | L33 | TRQVVNVVT | L35 | FYPKLQSSQ | L71; L72; L66 |
| 37 | ADKFPVLHD | L65 | TRSTNSRI | L35 | FYTSKTTVA | L72; L71; L46 |
| 38 | ADLKSFDL | L33 | TRYVDNNFC | L34 | FYVLGLAA | L50; L72; L71 |
| 39 | ADLVYALR | L33 | TSALLAGTI | L55 | FYVLPNDDTL | L67; L9; L71 |
| 40 | ADLVYALRH | L33 | TSAMQTML | L74 | FYYLGTGPEA | L50; L71; L72 |
| 41 | ADLYKLMGH | L33 | TSDLATNNLVV | L68 | GADLKSFDL | L68; L63; L60 |
| 42 | ADLYKLMGHF | L33 | TSFGPLVRKIF | L52 | GADPIHSLRV | L18; L63; L5 |
| 43 | ADNKFALTC | L33 | TSGDGTTS | L65 | GAPTKVTF | L23; L63; L57 |
| 44 | ADPAMHAA | L33 | TSHTVMPL | L57 | GAWNIGEQK | L13; L7; L19 |
| 45 | ADPIHSLR | L33 | TSITSAVLQ | L19 | GCDGGSLY | L1; L18; L14 |
| 46 | ADPIHSLRV | L33 | TSLEIPRRNV | L13 | GCDGGSLYV | L18; L2; L45 |
| 47 | ADQAMTQM | L33 | TSLLVLVQ | L48 | GDDYVYLPY | L18; L1; L65 |
| 48 | ADQAMTQMY | L14 | TSNPTTFH | L43 | GDFKLNEEI | L37; L24; L34 |
| 49 | ADQLTPTW | L33 | TSNPTTFHLD | L65 | GDFSHSQL | L25; L33; L37 |
| 50 | ADSFVIRG | L33 | TSPDVDLGD | L65 | GEAANFCALI | L45; L36; L41 |
| 51 | ADSIIIGG | L33 | TSQWLTNI | L48 | GEAVKTQFN | L45; L36; L40 |
| 52 | ADSIIIGGA | L33 | TSQWLTNIF | L53 | GEIKDATP | L38; L46; L37 |
| 53 | ADSKIVQLS | L33 | TSSIVITSG | L65 | GEIPVAYRKVLL | L36; L40; L41 |
| 54 | ADSTLIGD | L33 | TSTDVVYRA | L20 | GELGDVRETM | L36; L41; L37 |
| 55 | ADVFHLYL | L33 | TSWQTGDFVK | L7 | GEVITFDNLKTL | L36; L37; L41 |
| 56 | ADVFHLYLQ | L33 | TTAAKLMV | L73 | GEVPVSIINN | L36; L37; L41 |
| 57 | ADVTKIKP | L33 | TTADIVVFDEI | L20 | GEYTFEKGD | L45; L46; L37 |
| 58 | ADYNYKLPD | L65 | TTAPAICHD | L20 | GFELTSMKY | L12; L18; L1 |
| 59 | ADYSVLYN | L33 | TTAPAICHDGK | L19 | GFFKEGSSV | L72; L24; L71 |
| 60 | AEASKKPRQK | L46 | TTAYANSV | L20 | GFMGRIRSVY | L71; L14; L72 |
| 61 | AECTIFKD | L33 | TTDNTFVS | L1 | GFNEKTHVQL | L8; L71; L62 |
| 62 | AEETRKLM | L45 | TTDPSFLGRYM | L1 | GFNFSQIL | L62; L72; L71 |
| 63 | AEGSRGGSQ | L40 | TTEMLAKALR | L19 | GFSTGVNL | L72; L71; L62 |
| 64 | AEIRASAN | L45 | TTETAHSC | L18 | GHMLDMYSV | L35; L28; L34 |
| 65 | AELAKNVS | L46 | TTEVVGDIILK | L7 | GHNLAKHCL | L35; L34; L28 |
| 66 | AENVTGLFKDC | L40 | TTFHLDGEV | L20 | GHTDLMAAY | L27; L12; L14 |
| 67 | AESHVDTD | L33 | TTFHLDGEVI | L20 | GHVETFYPKL | L28; L34; L35 |
| 68 | AEVAVKMFD | L41 | TTFHLDGEVITF | L52 | GIATVREV | L48; L3; L64 |
| 69 | AFACPDGVKHVY | L14 | TTKGGRFV | L70 | GIFGADPIHSL | L16; L2; L10 |
| 70 | AFASEAARV | L24 | TTLPVNVAFEL | L52 | GIIAMSAF | L43; L26; L59 |
| | | | W | | | |
| 71 | AFDIYNDK | L62 | TTNIVTRCLNR | L15 | GINASVVNI | L24; L3; L4 |
| 72 | AFDIYNDKV | L62 | TTRQVVNV | L48 | GLDSLDTY | L18; L1; L14 |
| 73 | AFDKSAFVN | L62 | TTSPISEHD | L20 | GLEAPFLY | L1; L18; L12 |
| 74 | AFEHIVYG | L62 | TTTIQTIV | L48 | GLIAIVMVTI | L3; L24; L2 |
| 75 | AFFGMSRI | L48 | TTTLNGLW | L52 | GLNDNLLEIL | L4; L2; L3 |
| 76 | AFGEYSHVVA | L42 | TTTNIVTRCL | L20 | GLNLEEAARY | L14; L12; L18 |
| 77 | AFHTPAFDK | L7 | TTTYKLNVGDY | L14 | GLPGTILRT | L24; L5; L2 |
| 78 | AFKQIVESC | L13 | TTYKLNVGD | L19 | GLVASIKNF | L10; L27; L26 |
| 79 | AFLLFLVLIM | L71 | TTYPGQGLN | L14 | GMPSYCTGY | L26; L27; L12 |
| 80 | AFLPFAMGIIAM | L71 | TVAAFHQEC | L20 | GNFGDQELI | L34; L24; L36 |
| 81 | AFVNLKQLP | L46 | TVAYFNMV | L20 | GPFVDRQTA | L51; L50; L46 |
| 82 | AFVNLKQLPFFY | L12 | TVCTVCGMW | L10 | GQVDLFRNA | L24; L13; L46 |
| 83 | AGDSGFAAYSRY | L18 | TVDNINLH | L1 | GRCDIKDL | L66; L25; L64 |
| 84 | AGFAKFLK | L7 | TVDNINLHT | L68 | GRVDGQVDLF | L30; L34; L65 |
| 85 | AGGIVAIV | L48 | TVDSSQGSEYD | L18 | GSSVELKHF | L53; L52; L26 |
| | | | Y | | | |
| 86 | AGLEAPFLYL | L67 | TVFFDGRV | L20 | GTAVLRQW | L52; L54; L55 |
| 87 | AGLEAPFLYLY | L14 | TVHTANKW | L54 | GTDLEGNF | L1; L62; L63 |
| 88 | AGSYKDWSY | L14 | TVIEVQGYKSV | L10 | GTDTTITV | L18; L63; L68 |
| 89 | AHISTIGVCSM | L34 | TVKGLDYKA | L51 | GTGPEAGLPY | L18; L12; L7 |
| 90 | AHVASCDAIM | L28 | TVKNYFITD | L13 | GTGTSTDVVYR | L7; L15; L19 |
| 91 | AICHDGKAH | L43 | TVKSVGKFCL | L39 | GTITVEEL | L67; L55; L54 |
| 92 | AIDAYPLTKH | L6 | TVLKKCKSA | L23 | GTITVEELK | L7; L13; L19 |
| 93 | AIDGGVTRDI | L68 | TVLKKCKSAF | L23 | GTLMIERF | L54; L52; L53 |
| 94 | AIFYLITPVHV | L20 | TVLSFCAFAV | L4 | GTLSYEQF | L54; L53; L52 |
| 95 | AIKCVPQAD | L43 | TVMFLARGI | L55 | GTLSYEQFK | L7; L6; L13 |
| 96 | AILTALRLC | L14 | TVRTNVYLAVF | L52 | GTNLPLQL | L73; L55; L60 |
| 97 | AILTALRLCAY | L14 | TVSALVYDNK | L7 | GTSKFYGGW | L10; L54; L52 |
| 98 | AIMQLFFSYF | L12 | TVVIGTSK | L19 | GVAGALNK | L7; L6; L19 |
| 99 | AISSVLNDI | L24 | TVVIGTSKFY | L14 | GVEHVTFFIY | L12; L18; L1 |
| 100 | AIVFITLCFTLK | L7 | TVVVNAANV | L20 | GVLTESNKK | L7; L13; L6 |
| 101 | AKCWTETDL | L44 | TVVVNAANVY | L14 | GVYYHKNNK | L7; L6; L13 |
| 102 | AKEIKESVQTF | L27 | TVYEKLKPVL | L20 | GWTAGAAAY | L12; L14; L27 |
| 103 | AKFLKTNCC | L27 | TVYSDVENP | L49 | GYFCTCYF | L72; L71; L9 |
| 104 | AKFLKTNCCRF | L27 | TVYSHLLLVAA | L51 | GYLPQNAV | L48; L71; L72 |
| 105 | AKHCLHVVG | L44 | TWICLLQFAY | L12 | GYQPYRVV | L72; L71; L64 |
| 106 | AKKNNLPFK | L13 | TWLDMVDTSL | L8 | HAEETRKLM | L32; L63; L49 |
| 107 | AKKPTETIC | L27 | TWLTYTGAI | L8 | HDVSSAINR | L19; L17; L15 |
| 108 | AKNRARTV | L48 | TWLTYTGAIKL | L8 | HEHEIAWYTE | L37; L46; L29 |
| 109 | AKNVSLDNVL | L44 | TYERHSLSH | L71 | HEVLLAPLLSA | L46; L41; L38 |
| 110 | AKPFLNKVV | L64 | TYGQQFGPTYL | L9 | HFAWWTAF | L72; L71; L62 |
| 111 | AKRFKESPF | L27 | TYKLNVGDYF | L9 | HFDGQQGEV | L62; L68; L63 |
| 112 | AKSASVYY | L27 | TYNCCDDDY | L14 | HFISNSWL | L72; L71; L62 |
| 113 | AKVGILCIM | L44 | TYTGAIKLD | L9 | HFPREGVF | L62; L72; L71 |
| 114 | ALAPNMMVTN | L3 | TYYLFDESGEF | L9 | HFPREGVFV | L62; L71; L72 |
| 115 | ALGGSVAI | L24 | VAAIFYLI | L47 | HFVCNLLL | L62; L71; L72 |
| 116 | ALGGSVAIKI | L24 | VAAIVFITLCF | L52 | HFVCNLLLLF | L8; L12; L9 |
| 117 | ALGKLQDV | L24 | VAALTNNVA | L50 | HFVNLDNL | L71; L62; L72 |
| 118 | ALHRSYLTP | L46 | VADAVIKTLQ | L63 | HFVNLDNLR | L17; L15; L19 |
| 119 | ALITLATC | L3 | VAEWFLAYIL | L67 | HFYSKWYIR | L17; L15; L21 |
| 120 | ALKGGKIVNNW | L16 | VAFELWAKRN | L69 | HGHVMVEL | L23; L25; L59 |
| 121 | ALLADKFPVLH | L6 | VAGDSGFAA | L50 | HHANEYRLYL | L34; L28; L35 |
| 122 | ALLAVFQSASK | L6 | VAGFAKFLK | L7 | HHSIGFDYV | L34; L28; L35 |
| 123 | ALLLLDRLNQL | L4 | VAGVSICST | L43 | HIDAYKTF | L63; L62; L68 |
| 124 | ALLTLQQIELK | L6 | VAIDYKHYTP | L67 | HLAKALNDF | L26; L11; L10 |
| 125 | ALNKATNNA | L3 | VAIHADQLTPT | L52 | HLYLQYIRK | L6; L13; L7 |
| | | | W | | | |
| 126 | ALRANSAV | L3 | VAKSHNIALI | L70 | HPLADNKF | L32; L31; L47 |
| 127 | ALTGIAVEQ | L24 | VAKSHNIALIW | L52 | HPNPKGFCD | L32; L49; L39 |
| 128 | ALWEIQQVVD | L2 | VALLAVFQSA | L50 | HQKLLKSI | L48; L25; L23 |
| 129 | ALWEIQQVVDA | L2 | VAMKYNYEPL | L67 | HQSDIEVT | L24; L35; L44 |
| 130 | AMDEFIERYKL | L5 | VANGDSEVVLK | L7 | HSDKFTDGV | L18; L1; L63 |
| 131 | AMPNMLRI | L48 | VANYQKVGM | L58 | HSMQNCVLK | L7; L13; L19 |
| 132 | AMQMAYRF | L33 | VAPGTAVLRQW | L52 | HTDLMAAY | L18; L1; L68 |
| 133 | AMRNAGIVGV | L3 | VARDLSLQFK | L13 | HTIDGSSGVV | L11; L20; L10 |
| 134 | AMRPNFTI | L48 | VASCDAIMTR | L19 | HTPAFDKSAF | L57; L11; L10 |
| 135 | AMSAFAMMF | L12 | VASPNECNQM | L70 | HTQVVDMSMTY | L18; L14; L1 |
| 136 | ANFCALIL | L73 | VAVLYQDVN | L67 | HTSPDVDL | L53; L20; L54 |
| 137 | ANFCALILA | L46 | VAYSNNSIAI | L47 | HVDILGPL | L68; L63; L62 |
| 138 | ANFCALILAY | L12 | VCRFDTRV | L48 | HVDTDLTKPY | L18; L1; L14 |
| 139 | ANGDSEVVLKK | L7 | VCRFDTRVL | L39 | HVSGTNGTK | L19; L7; L6 |
| 140 | ANGGKGFCK | L7 | VCRLMKTI | L48 | HVYQLRAR | L17; L15; L21 |
| 141 | ANLDSCKRV | L4 | VCSVIDLL | L62 | IADTTDAV | L68; L63; L67 |
| 142 | ANLDSCKRVL | L65 | VCTNYMPYF | L9 | IAMSAFAM | L59; L61; L70 |
| 143 | ANLGERVRQA | L65 | VCTNYMPYFF | L9 | IASFRLFAR | L17; L19; L15 |
| 144 | ANNAAIVLQL | L73 | VCVETKAI | L48 | IAVLDMCASL | L67; L31; L60 |
| 145 | ANNCTFEYV | L73 | VDALCEKAL | L33 | IAYIICISTK | L19; L47; L43 |
| 146 | ANNTKGSL | L23 | VDDIVKTD | L33 | ICISTKHFY | L14; L12; L58 |
| 147 | ANQFNSAIGK | L7 | VDGQVDLF | L33 | IDYVPLKSA | L46; L51; L43 |
| 148 | ANQVIVNNL | L72 | VDGVVQQL | L33 | IEELFYSY | L29; L18; L1 |
| 149 | ANRNRFLYI | L73 | VDNSSLTI | L48 | IEELFYSYA | L38; L42; L46 |
| 150 | ANSIVCRF | L33 | VDSDLNDF | L33 | IELKFNPPA | L46; L38; L42 |
| 151 | ANSIVCRFD | L65 | VDSVTVKN | L33 | IELKFNPPAL | L36; L37; L29 |
| 152 | ANYQKVGM | L33 | VDSYYSLL | L33 | IELSLIDFYL | L40; L36; L41 |
| 153 | ANYQKVGMQKY | L14 | VDSYYSLLM | L33 | IERFVSLAI | L45; L48; L46 |
| 154 | APAHISTIG | L22 | VDTDLTKPY | L43 | IEYTDFATSA | L46; L38; L42 |
| 155 | APFLYLYALVY | L31 | VDTSLSGF | L33 | IFFASFYY | L12; L71; L72 |
| 156 | APHGVVFLH | L56 | VDTVRTNVY | L29 | IFYLITPVH | L72; L71; L48 |
| 157 | APHGVVFLHVT | L56 | VDTVSALV | L33 | IGIVNNTVY | L26; L27; L29 |
| 158 | APHGVVFLHVTY | L56 | VDVELFENK | L7 | IGVTQNVLY | L12; L52; L14 |
| 159 | APISAMVRMY | L31 | VDVVNFNL | L33 | IHADQLTPTW | L28; L52; L54 |
| 160 | APKEIIFLEG | L51 | VEAEVQID | L29 | IIAYTMSL | L59; L60; L61 |
| 161 | APLIELCV | L47 | VEAEVQIDR | L19 | IKDATPSDF | L62; L27; L63 |
| 162 | APLIELCVDEA | L50 | VEAFEYYHT | L38 | IKDLPKEI | L68; L62; L63 |
| 163 | APLLSAGIFGA | L50 | VEAFEYYHTT | L38 | IKNFKSVLY | L27; L12; L18 |
| 164 | APLTVFFD | L65 | VECTTIVN | L29 | IKWDLLKY | L27; L18; L66 |
| 165 | APRITFGGP | L51 | VECTTIVNGV | L45 | ILAYCNKTV | L3; L2; L4 |
| 166 | APRITFGGPSD | L22 | VEEAKTVLK | L38 | ILHCANFNV | L4; L2; L5 |
| 167 | APRTLLTKGTL | L22 | VEEVLSEA | L38 | ILLLDQALV | L2; L4; L5 |
| 168 | APTHLSVDT | L56 | VEFLRDGW | L29 | ILPDPSKPS | L57; L43; L5 |
| 169 | APTKVTFGD | L56 | VEGFNCYF | L33 | ILQKEKVNI | L24; L2; L4 |
| 170 | APTLVPQEHY | L31 | VEIIKSQD | L45 | ILSDDAVVC | L2; L26; L4 |
| 171 | AQAAGTDTT | L44 | VEIIKSQDLSV | L38 | ILSPLYAFA | L3; L2; L5 |
| 172 | AQFAPSASAFF | L27 | VEKGIYQTS | L45 | ILTLTRAL | L23; L59; L57 |
| 173 | AQLPAPRT | L48 | VELGTEVN | L29 | IMSDRDLY | L18; L14; L1 |
| 174 | AQLPAPRTLL | L44 | VENPTIQK | L29 | INIIIWELL | L73; L9; L8 |
| 175 | AQLPAPRTLLTK | L7 | VENPTIQKDV | L45 | INIIIWFLLL | L73; L8; L67 |
| 176 | AQSFLNGFAV | L24 | VENPTIQKDVL | L36 | IPARARVEC | L56; L22; L39 |
| 177 | AQTGSSKCV | L24 | VESDDYIA | L38 | IPCSVCLSGL | L56; L22; L39 |
| 178 | AQVDVVNFNL | L44 | VESSSKLW | L40 | IPCTCGKQA | L51; L50; L39 |
| 179 | AQVLSEMV | L48 | VETKAIVS | L29 | IPIGAGICA | L51; L50; L22 |
| 180 | AQYELKHG | L48 | VEVEKGVLPQL | L36 | IPLMYKGL | L39; L47; L23 |
| 181 | ARARVECF | L35 | VEVQPQLEMEL | L36 | IPMDSTVKN | L49; L31; L32 |
| 182 | ARARVECFDK | L30 | VEVVDKYF | L29 | IPYNSVTSS | L51; L47; L50 |
| 183 | ARDGCVPLNII | L34 | VEWKFYDA | L46 | IQASLPFGW | L52; L16; L54 |
| 184 | ARDLICAQK | L30 | VEYCPIFFITG | L46 | IQLSSYSL | L44; L35; L25 |
| 185 | ARDLSLQFK | L30 | VFAFPFTI | L9 | IRGWIFGTTL | L35; L30; L66 |
| 186 | ARDLSLQFKR | L30 | VFAFPFTIYSL | L8 | IRKLHDEL | L25; L66; L67 |
| 187 | ARFPKSDGT | L30 | VFAQVKQI | L48 | ISAARQGF | L54; L53; L52 |
| 188 | ARFPKSDGTGT | L30 | VFDEISMA | L62 | ISAMVRMY | L55; L70; L52 |
| 189 | ARFYFYTS | L65 | VFDEISMATN | L62 | ISQYSLRLI | L55; L48; L73 |
| 190 | ARGIVFMC | L65 | VFDGKSKCE | L62 | ISSDVLVNN | L53; L54; L52 |
| 191 | ARHINAQVAK | L30 | VFDKNLYD | L62 | ISTKHFYWFF | L53; L54; L52 |
| 192 | ARIVYTACSH | L30 | VFDKNLYDK | L62 | ISTSHKLV | L48; L70; L73 |
| 193 | ARLRAKHY | L66 | VFDKNLYDKL | L62 | ITEGSVKGL | L63; L60; L39 |
| 194 | ARLRAKHYV | L30 | VFITLCFTLK | L13 | ITFELDER | L21; L15; L17 |
| 195 | ARLTPCGTGT | L30 | VFKNIDGYFK | L13 | ITISSFKW | L54; L52; L53 |
| 196 | ARLYYDSM | L66 | VFKNIDGYFKI | L8 | ITPVHVMSK | L57; L6; L7 |
| 197 | ARQGFVDSD | L65 | VFLGIITTVA | L8 | ITSAVLQSGF | L52; L54; L53 |
| 198 | ARSEDKRAK | L30 | VFLHVTYVP | L8 | IVAAIVFI | L20; L47; L74 |
| 199 | ARSVSPKLFIR | L30 | VFNATRFA | L71 | IVDEPEEHVQI | L5; L68; L63 |
| 200 | ARTAPHGHV | L30 | VFNATRFASV | L71 | IVFDGKSKC | L16; L11; L14 |
| 201 | ARTVYDDGAR | L30 | VFNATRFASVY | L71 | IVMVTIML | L74; L68; L60 |
| 202 | ARTVYDDGARR | L30 | VFNGVSFS | L62 | IVNGVRRSFY | L14; L12; L18 |
| 203 | ARVECFDKFK | L30 | VFNGVSFST | L8 | IVNNATNVV | L58; L51; L73 |
| 204 | ARVECFDKFKV | L30 | VFPLNSIIK | L62 | IVVFDEISM | L31; L32; L67 |
| 205 | ARVVRSIF | L66 | VFSAVGNICY | L12 | IYDEPTTT | L62; L63; L68 |
| 206 | ARVVRSIFSR | L30 | VFTGYRVTK | L13 | IYLYLTFY | L71; L72; L12 |
| 207 | ASALGKLQD | L65 | VFVLWAHGFEL | L71 | IYSKHTPINL | L9; L8; L66 |
| 208 | ASANIGCNH | L43 | VGDFKLNEEI | L68 | KAGQKTYER | L21; L15; L17 |
| 209 | ASCTLSEQL | L53 | VGEIPVAYR | L15 | KAKKGAWNI | L55; L53; L70 |
| 210 | ASDTYACWHH | L18 | VGHTDLMAAY | L14 | KASMPTTI | L55; L70; L54 |
| 211 | ASEAARVV | L48 | VGKPRPPLNR | L15 | KCVPQADVEW | L54; L52; L16 |
| 212 | ASEFSSLPS | L1 | VGPEHSLAE | L57 | KCYGVSPTK | L13; L6; L7 |
| 213 | ASEYTGNYQC | L18 | VGPKQASL | L57 | KDFGGFNF | L33; L54; L65 |
| 214 | ASFSASTS | L55 | VGYLQPRT | L48 | KDGHVETF | L33; L54; L65 |
| 215 | ASFSTFKC | L54 | VGYQPYRVVVL | L67 | KDQVILLNK | L13; L7; L6 |
| 216 | ASFYYVWKS | L69 | VHFISNSW | L28 | KEGFFTYIC | L42; L38; L37 |
| 217 | ASHMYCSF | L43 | VHFISNSWLM | L28 | KEIIFLEG | L45; L37; L46 |
| 218 | ASIKNFKSVLY | L18 | VHFVCNLLLL | L34 | KEIIFLEGE | L46; L37; L42 |
| 219 | ASIKNFKSVLYY | L18 | VHFVCNLLLLF | L34 | KEIIFLEGETL | L36; L37; L41 |
| 220 | ASIVAGGI | L55 | VHNQDVNLH | L34 | KEILVTYN | L33; L45; L29 |
| 221 | ASIVAGGIVA | L42 | VIDLLLDD | L68 | KEITVATSRTL | L36; L37; L41 |
| 222 | ASKIITLK | L13 | VIGAVILR | L21 | KEKVNINI | L45; L33; L37 |
| 223 | ASKIITLKKR | L15 | VIHFGAGSD | L43 | KFCLEASF | L62; L71; L72 |
| 224 | ASKIITLKKRW | L52 | VIKVCEFQF | L26 | KFKVNSTL | L71; L72; L62 |
| 225 | ASKILGLPT | L43 | VILLNKHI | L48 | KFNPPALQD | L65; L13; L8 |
| 226 | ASLVLARK | L7 | VISTSHKL | L60 | KFPVLHDI | L62; L71; L72 |
| 227 | ASPNECNQM | L57 | VIWDYKRD | L43 | KGEDIQLL | L63; L55; L65 |
| 228 | ASQGLVASIK | L7 | VIYLYLTFYL | L67 | KGLPWNVVR | L15; L21; L7 |
| 229 | ASQSIIAYT | L14 | VKDCVVLH | L62 | KGLPWNVVRI | L8; L4; L16 |
| 230 | ASQSIIAYTM | L55 | VKGLDYKAF | L27 | KGPKVKYL | L57; L64; L66 |
| 231 | ASRELKVT | L43 | VKIGPERTC | L27 | KGTHHWLLL | L73; L69; L8 |
| 232 | ASSRSSSRSR | L15 | VKLQNNEL | L44 | KGTLEPEYF | L54; L52; L9 |
| 233 | ASTEKSNII | L55 | VKNGSIHL | L66 | KHFYWFFSNY | L27; L14; L16 |
| 234 | ASTEKSNIIR | L7 | VKNGSIHLYF | L27 | KHLIPLMYK | L6; L13; L7 |
| 235 | ASTSAFVET | L73 | VKNKCVNF | L27 | KHYTPSFKK | L6; L7; L13 |
| 236 | ASVVNIQK | L7 | VKPGGTSSG | L57 | KIAEIPKEE | L16; L43; L3 |
| 237 | ASVYAWNR | L15 | VKPTVVVN | L66 | KIFVDGVPFV | L13; L2; L4 |
| 238 | ASVYAWNRK | L7 | VKQGDDYVYL | L44 | KIKACVEEV | L13; L3; L58 |
| 239 | ASVYYSQLM | L54 | VKRHTFSNY | L27 | KIVDEPEEH | L16; L43; L54 |
| 240 | ASWFTALTQ | L18 | VKSREETGL | L44 | KIYSKHTPI | L16; L24; L6 |
| 241 | ASWVMRIM | L55 | VKSREETGLL | L44 | KKAGGTTEM | L27; L44; L66 |
| 242 | ASYQTQTN | L48 | VKSVGKFCL | L44 | KKQQTVTL | L44; L27; L66 |
| 243 | ATAEAELAKN | L10 | VKYLYFIKGL | L27 | KLALGGSVA | L51; L3; L46 |
| 244 | ATALLTLQQI | L53 | VLAAVYRI | L24 | KLASHMYCSF | L16; L43; L26 |
| 245 | ATAQEAYEQ | L53 | VLCNSQTSLR | L21 | KLDNDALNNI | L5; L2; L18 |
| 246 | ATEGALNT | L18 | VLDMCASLK | L1 | KLFDRYFK | L13; L6; L21 |
| 247 | ATEGALNTPK | L7 | VLGSLAATVR | L21 | KLIEYTDFA | L2; L5; L3 |
| 248 | ATEVPANST | L18 | VLHDIGNPKA | L2 | KLINIIIW | L16; L54; L69 |
| 249 | ATEVPANSTV | L18 | VLHSTQDLFL | L57 | KLKDCVMYA | L3; L13; L2 |
| 250 | ATHGLAAVN | L14 | VLKKCKSA | L23 | KLLKSIAAT | L16; L2; L4 |
| 251 | ATHSDKFTD | L53 | VLKLKVDT | L23 | KLMPVCVET | L2; L5; L4 |
| 252 | ATKMSECVL | L70 | VLKTGDLQPL | L3 | KLMPVCVETK | L6; L16; L13 |
| 253 | ATKYLVQQE | L13 | VLLFLAFVVFL | L4 | KLNDLCFTN | L16; L4; L21 |
| 254 | ATNKATYK | L7 | VLLILMTA | L23 | KLNVGDYFV | L2; L4; L5 |
| 255 | ATNYDLSV | L73 | VLLPLVSS | L23 | KLPDDFTGCV | L5; L2; L57 |
| 256 | ATREAVGTN | L10 | VLLRKNGNK | L6 | KLRGTAVMSL | L16; L3; L2 |
| 257 | ATREAVGTNL | L53 | VLMDGSIIQ | L2 | KLRSDVLLP | L6; L16; L13 |
| 258 | ATRFASVYA | L13 | VLMSNLGMPSY | L12 | KMADQAMTQM | L18; L14; L16 |
| | | | | | Y | |
| 259 | ATRFASVYAW | L52 | VLPFNDGV | L57 | KNLREFVFK | L13; L6; L7 |
| 260 | ATRGATVV | L70 | VLQKAAITIL | L74 | KNNLPFKL | L73; L55; L33 |
| 261 | ATRVECTTI | L53 | VLQVRDVL | L23 | KNSIDAFKL | L55; L53; L73 |
| 262 | ATSACVLAA | L42 | VLSDRELHLSW | L16 | KPLEFGATS | L51; L56; L50 |
| 263 | ATSRTLSYYK | L7 | VLSEARQHLK | L6 | KPRPPLNRN | L51; L22; L39 |
| 264 | ATTAYANSVF | L52 | VLSTFISAAR | L21 | KPRQKRTA | L51; L39; L65 |
| 265 | ATVCGPKK | L7 | VLSVNPYV | L2 | KPRQKRTAT | L22; L51; L39 |
| 266 | ATYYLFDES | L67 | VLTAVVIPTK | L6 | KPTVVVNAA | L51; L50; L56 |
| 267 | AVDAAKAYKDY | L18 | VLTAVVIPTKK | L6 | KQEILGTVSW | L16; L52; L18 |
| 268 | AVDALCEK | L7 | VLVPHVGEIPV | L2 | KQQTVTLL | L48; L33; L44 |
| 269 | AVDALCEKA | L5 | VLYENQKLIA | L2 | KQVEQKIAEI | L44; L3; L24 |
| 270 | AVDALCEKALKY | L18 | VLYNSASFSTF | L26 | KQVVSDIDY | L26; L27; L14 |
| 271 | AVDINKLCE | L18 | VLYNSASFSTFK | L6 | KRGDKSVY | L65; L66; L14 |
| 272 | AVFISPYNS | L7 | VLYQDVNCTEV | L2 | KRSDARTA | L65; L66; L55 |
| 273 | AVGTNLPLQL | L6 | VLYYQNNV | L48 | KRTIKGTHHW | L16; L54; L52 |
| 274 | AVHECFVK | L7 | VMAYITGGV | L3 | KRVDFCGKGY | L30; L66; L14 |
| 275 | AVHECFVKRV | L3 | VMCGGSLYV | L2 | KRWQLALSK | L30; L13; L6 |
| 276 | AVILRGHL | L74 | VMCGGSLYVK | L7 | KSASVYYSQ | L54; L55; L53 |
| 277 | AVILRGHLRI | L24 | VMFTPLVPFW | L52 | KSHFAIGL | L55; L73; L54 |
| 278 | AVINGDRW | L54 | VMHANYIFWR | L21 | KSHFAIGLALY | L14; L18; L52 |
| 279 | AVINGDRWFL | L16 | VMLTNDNTSR | L15 | KSVGKFCL | L65; L54; L55 |
| 280 | AVITREVGFV | L3 | VMLTNDNTSRY | L14 | KSWMESEF | L53; L55; L54 |
| 281 | AVKRTIKGTHHW | L52 | VMPLSAPTLV | L5 | KSYVHVVD | L55; L65; L54 |
| 282 | AVKTQFNY | L14 | VMRIMTWL | L48 | KTDGTLMIER | L21; L18; L15 |
| 283 | AVLQSGFRKM | L14 | VMYASAVVLL | L74 | KTFPPTEP | L54; L55; L73 |
| 284 | AVSKGFFK | L7 | VNAANVYL | L74 | KTIQPRVEKK | L13; L7; L6 |
| 285 | AVTAYNGY | L14 | VNAANVYLK | L7 | KTLLSLREVR | L21; L15; L52 |
| 286 | AVTAYNGYL | L74 | VNASSSEAF | L9 | KTQSLLIV | L73; L70; L18 |
| 287 | AVVLLILM | L74 | VNEFYAYL | L62 | KTQSLLIVN | L53; L13; L21 |
| 288 | AVVLLILMT | L7 | VNINIVGDF | L9 | KTTEVVGDI | L55; L53; L54 |
| 289 | AVVLLILMTA | L51 | VNKGEDIQL | L39 | KTTEVVGDII | L53; L54; L55 |
| 290 | AWPLIVTA | L62 | VNLHSSRLSF | L12 | KTYERHSLSH | L16; L6; L18 |
| 291 | AWPLIVTALR | L21 | VNLKQLPFFY | L12 | KVAGFAKFLK | L7; L6; L21 |
| 292 | AWQPGVAMPNL | L14 | VNLKQLPFFYY | L12 | KVEGCMVQV | L63; L5; L13 |
| | Y | | | | | |
| 293 | AWRKAVFISP | L42 | VNLVAVPTGY | L12 | KVFTTVDNI | L16; L54; L24 |
| 294 | AWYTERSEKSY | L14 | VNNATNKATY | L14 | KVGGNYNY | L54; L14; L18 |
| 295 | AYEQAVAN | L71 | VNNATNVV | L48 | KVKPTVVVNA | L13; L51; L3 |
| 296 | AYFNMVYMPAS | L9 | VNSFSGYLK | L7 | KVLNEKCSAY | L14; L16; L6 |
| | W | | | | | |
| 297 | AYSRYRIGNY | L14 | VNSTLEQYVF | L9 | KVNINIVGD | L16; L21; L65 |
| 298 | AYTKRNVIP | L42 | VNSVLLFL | L73 | KVNSTLEQYVF | L16; L54; L52 |
| 299 | AYTKRNVIPTI | L9 | VNSVLLFLAF | L12 | KVTLADAGF | L54; L52; L53 |
| 300 | AYTNSFTR | L15 | VNVVTTKI | L48 | KVTSAMQTM | L54; L16; L53 |
| 301 | AYTNSFTRG | L9 | VPANSTVLS | L56 | KVVSTTTNI | L54; L16; L24 |
| 302 | AYTNSFTRGVY | L14 | VPAQEKNF | L39 | KWDLIISDMY | L18; L14; L1 |
| 303 | AYTVELGTEV | L72 | VPATVSVSSP | L51 | KWGKARLY | L55; L14; L18 |
| 304 | AYYFMRFR | L15 | VPEVKILNN | L49 | KWPWYIWL | L57; L62; L71 |
| 305 | AYYNTTKGG | L72 | VPFVVSTG | L47 | KWYIRVGAR | L21; L15; L6 |
| 306 | CAFAVDAA | L50 | VPFWITIAYII | L47 | KYAISAKNR | L15; L21; L17 |
| 307 | CAFAVDAAK | L19 | VPGLPGTI | L47 | KYCALAPNM | L71; L72; L9 |
| 308 | CAKEIKES | L43 | VPGLPGTILR | L21 | KYFKNHTSP | L8; L46; L71 |
| 309 | CALAPNMMV | L47 | VPHVGEIPVAY | L31 | KYKGIKIQE | L13; L8; L15 |
| 310 | CALDPLSET | L59 | VPINTNSSP | L51 | KYNYEPLTQ | L9; L8; L65 |
| 311 | CAMRPNFTI | L47 | VPLKSATCI | L47 | KYTQLCQYL | L9; L8; L64 |
| 312 | CANDPVGFTLK | L6 | VPLNIIPLTT | L50 | KYVQIPTTC | L8; L9; L66 |
| 313 | CANFNVLF | L58 | VPLNIIPLTTAA | L50 | KYVRNLQHR | L15; L17; L8 |
| 314 | CAQVLSEM | L59 | VPQEHYVRIT | L39 | KYWDQTYHP | L8; L9; L66 |
| 315 | CATTRQVV | L70 | VPVAIHAD | L51 | LAAVYRINW | L49; L52; L69 |
| 316 | CAYCCNIVN | L69 | VPVSIINNTVY | L31 | LAFVVFLLVT | L31; L47; L50 |
| 317 | CAYCCNIVNV | L69 | VPYNMRVIH | L47 | LAGTITSGW | L49; L52; L54 |
| 318 | CAYWVPRASA | L50 | VQAGNVQLRV | L24 | LAVFDKNL | L60; L61; L74 |
| 319 | CCSLSHRF | L33 | VQELYSPIF | L27 | LAYILFTR | L47; L17; L59 |
| 320 | CDAMRNAGI | L33 | VQELYSPIFL | L68 | LDDDSQQTV | L5; L68; L63 |
| 321 | CDGTTFTY | L65 | VQHMVVKAA | L51 | LDDFSKQL | L33; L68; L62 |
| 322 | CDIRQLLF | L33 | VQIGEYTFEK | L7 | LDGEVITF | L33; L65; L29 |
| 323 | CDIRQLLFV | L73 | VQIPCTCGK | L13 | LDNVLSTF | L33; L59; L43 |
| 324 | CDLKGKYV | L33 | VQIPTTCA | L48 | LEAPFLYLYA | L46; L42; L38 |
| 325 | CDQLREPML | L33 | VQLHNDILLAK | L6 | LEAPFLYLYAL | L41; L40; L36 |
| 326 | CDTLKEIL | L33 | VQLRVIGHSM | L14 | LECIKDLLA | L38; L46; L42 |
| 327 | CDTLKEILV | L33 | VQLSEISM | L44 | LEMKSEKQV | L45; L38; L37 |
| 328 | CEEMLDNRATL | L36 | VQLSLPVLQ | L44 | LENVAFNV | L33; L29; L45 |
| 329 | CEFQFCNDPF | L29 | VQLSLPVLQVR | L15 | LEYHDVRV | L45; L48; L37 |
| 330 | CEFQFCNDPFL | L36 | VQMAPISAMVR | L21 | LEYHDVRVVL | L36; L37; L41 |
| 331 | CEIVGGQIVTC | L36 | VQMLSDTLK | L7 | LFFSYFAVH | L71; L72; L12 |
| 332 | CEKALKYL | L37 | VQPTESIV | L48 | LFLPFFSNVTW | L52; L9; L8 |
| 333 | CFDKFKVNS | L62 | VQQESPFV | L48 | LFLTWICL | L71; L72; L62 |
| 334 | CFKMFYKGV | L13 | VQSKMSDV | L48 | LFLTWICLLQF | L8; L9; L12 |
| 335 | CFLGYFCTC | L8 | VQSTQWSLFF | L9 | LFLVLIML | L71; L72; L62 |
| 336 | CFLGYFCTCYF | L8 | VQTFFKLV | L48 | LFLVLIMLI | L47; L9; L8 |
| 337 | CFVDDIVKT | L8 | VQTFFKLVNK | L7 | LFVAAIFY | L72; L71; L12 |
| 338 | CGFIQQKLAL | L65 | VQVTCGTTTL | L44 | LGDIAARDL | L68; L63; L62 |
| 339 | CGPKKSTNL | L57 | VRDLPQGFSAL | L68 | LGDVRETM | L63; L62; L68 |
| 340 | CGYLPQNAV | L48 | VRFPNITNLC | L30 | LGLPTQTV | L47; L48; L25 |
| 341 | CHATREAV | L28 | VRKIFVDGV | L64 | LHCANFNVL | L35; L28; L34 |
| 342 | CHDGKAHFP | L34 | VRLQAGNAT | L30 | LHSTQDLFL | L28; L34; L35 |
| 343 | CHIDHPNPK | L28 | VRMYIFFASF | L30 | LIAAVITR | L19; L21; L17 |
| 344 | CHIDHPNPKGF | L8 | VRTNVYLAVF | L66 | LIDSYFVV | L68; L63; L5 |
| 345 | CHNKCAYWV | L35 | VRVLQKAA | L25 | LIRKSNHNF | L58; L26; L52 |
| 346 | CIKDLLARA | L3 | VSAKPPPGD | L43 | LITPVHVM | L59; L61; L60 |
| 347 | CINANQVIV | L73 | VSALVYDNK | L7 | LIVAAIVFI | L20; L47; L5 |
| 348 | CIRCLWSTK | L13 | VSELLTPLG | L1 | LIVGVALL | L74; L60; L61 |
| 349 | CISTKHFY | L14 | VSGNCDVVI | L53 | LIVNSVLL | L60; L74; L61 |
| 350 | CISTKHFYW | L54 | VSGTNGTKRF | L52 | LKEILVTY | L27; L18; L1 |
| 351 | CKDGHVETFY | L27 | VSIINNTVYTK | L7 | LKRGDKSVY | L27; L26; L43 |
| 352 | CLAVHECFV | L2 | VSKVVKVT | L43 | LKVGGSCVL | L44; L27; L61 |
| 353 | CLAVHECFVKR | L19 | VSKVVKVTIDY | L43 | LKVPATVSV | L50; L51; L64 |
| 354 | CLAYYFMR | L21 | VSLAIDAYPL | L55 | LLALHRSYL | L74; L3; L4 |
| 355 | CLFLLPSLA | L3 | VSLLSVLLS | L52 | LLDQALVSD | L5; L68; L1 |
| 356 | CLFWNCNVDR | L21 | VSLLSVLLSM | L52 | LLEIKDTEKY | L1; L18; L12 |
| 357 | CLGDIAAR | L21 | VSMTKTSV | L48 | LLFVVEVV | L3; L23; L47 |
| 358 | CLLNRYFR | L21 | VSTIQRKYK | L13 | LLKSIAATR | L21; L15; L17 |
| 359 | CLNRVCTNY | L26 | VSTQEFRY | L54 | LLLDQALV | L2; L4; L5 |
| 360 | CLSGLDSLDTY | L14 | VTCLAYYF | L62 | LLLSVCLGSL | L4; L2; L5 |
| 361 | CLVGLMWL | L74 | VTFFPDLNG | L7 | LLPPKNSI | L57; L5; L23 |
| 362 | CNVKTTEV | L48 | VTFGDDTVIEV | L20 | LLPSLATV | L5; L57; L3 |
| 363 | CPACHNSEV | L22 | VTFQSAVK | L7 | LLPSLATVAY | L12; L57; L5 |
| 364 | CPDGVKHV | L47 | VTFQSAVKRTI | L52 | LLSAGIFGA | L3; L2; L4 |
| 365 | CPIFFITG | L50 | VTHSKGLYRK | L7 | LLSVCLGSL | L57; L4; L3 |
| 366 | CPNFVFPL | L22 | VTIDYTEISFM | L11 | LLSVLQQL | L4; L59; L23 |
| 367 | CPNFVFPLN | L50 | VTKGKAKK | L13 | LLTKSSEY | L26; L43; L1 |
| 368 | CQAVTANV | L48 | VTKNSKVQIGEY | L14 | LLVTLAIL | L74; L23; L59 |
| 369 | CQEPKLGSL | L44 | VTLACFVL | L55 | LMNVLTLV | L48; L62; L47 |
| 370 | CQPILLLD | L48 | VTLADAGF | L54 | LMWLIINL | L47; L62; L74 |
| 371 | CQVHGNAHV | L24 | VTLADAGFI | L55 | LNDILSRL | L63; L68; L62 |
| 372 | CQYLNTLTLAV | L48 | VTLADAGFIKQY | L14 | LNLEEAARY | L12; L14; L31 |
| 373 | CRFDTRVLSN | L65 | VTLIGEAV | L48 | LNRYFRLTL | L65; L73; L22 |
| 374 | CRFDTRVLSNL | L30 | VTLIGEAVK | L7 | LNVGDYFVL | L65; L67; L32 |
| 375 | CRFQEKDED | L65 | VTLKQGEI | L55 | LPDDFTGCV | L32; L49; L47 |
| 376 | CRFVTDTPK | L30 | VTLKQGEIK | L7 | LPFKLTCAT | L50; L32; L51 |
| 377 | CRHHANEY | L66 | VTQNVLYENQK | L7 | LPGVYSVIY | L31; L65; L49 |
| 378 | CRKVQHMVV | L25 | VTQQLIRAA | L51 | LPGVYSVIYL | L56; L39; L22 |
| 379 | CRMNSRNY | L65 | VTRCLNRV | L48 | LPIDKCSRI | L47; L49; L32 |
| 380 | CRMNSRNYI | L34 | VTRCLNRVC | L52 | LPLTQYNRY | L31; L49; L12 |
| 381 | CSFYPPDED | L65 | VTRDIAST | L43 | LPLVSSQCV | L47; L50; L51 |
| 382 | CSLSHRFY | L55 | VTSAMQTM | L70 | LPNNTASW | L49; L50; L56 |
| 383 | CSQHTMLV | L48 | VTSNYSGVV | L70 | LPQLEQPYV | L47; L50; L51 |
| 384 | CSQHTMLVK | L7 | VTTTLEETK | L7 | LPQLEQPYVF | L31; L32; L39 |
| 385 | CSRIIPAR | L48 | VTYKLDGVV | L73 | LPTGTLLV | L47; L50; L51 |
| 386 | CTDDNALA | L1 | VTYNCCDDDY | L14 | LPVLQVRDVL | L31; L22; L32 |
| 387 | CTFEYVSQPFL | L20 | VVDGCNSSTCM | L63 | LPWNVVRI | L47; L50; L49 |
| 388 | CTLKSFTVEK | L7 | VVDMSMTYG | L68 | LPWNVVRIK | L31; L47; L32 |
| 389 | CTQHQPYVV | L73 | VVFVLWAH | L59 | LPWNVVRIKI | L47; L50; L39 |
| 390 | CTTIVNGVRR | L19 | VVGPNVNK | L7 | LPWNVVRIKIV | L50; L39; L47 |
| 391 | CVCSVIDL | L74 | VVIGIVNN | L74 | LPYPDPSR | L47; L50; L51 |
| 392 | CVDEAGSKS | L63 | VVIGIVNNT | L20 | LQAIASEF | L26; L59; L27 |
| 393 | CVDTVRTNVYL | L68 | VVIGIVNNTV | L20 | LQSINFVRI | L24; L48; L34 |
| 394 | CVEYCPIFF | L62 | VVIPTKKAG | L43 | LRIAGHHL | L66; L35; L25 |
| 395 | CVIAWNSNNL | L10 | VVKAALLA | L51 | LSDRELHLS | L1; L53; L18 |
| 396 | CVLGQSKR | L17 | VVKAALLAD | L51 | LSFKELLV | L73; L48; L47 |
| 397 | CVLSGHNL | L60 | VVLHSYFTSDY | L14 | LSKGRLIIR | L15; L17; L21 |
| 398 | CVRGTTVL | L59 | VVLKKLKKSL | L23 | LSPRWYFYY | L1; L12; L18 |
| 399 | CVVADAVIKTL | L10 | VVLKTGDL | L74 | LSTDTGVEH | L43; L61; L59 |
| 400 | CVVLHSYF | L74 | VVNARLRAKHY | L14 | LSYFIASFR | L19; L15; L17 |
| 401 | CWHHSIGFDY | L14 | VVQQLPETYF | L12 | LTAFGLVAEW | L52; L10; L54 |
| 402 | CYDHVIST | L62 | VVREFLTRN | L43 | LTALRLCAY | L1; L59; L18 |
| 403 | CYDHVISTS | L62 | VVRIKIVQ | L23 | LTENKYSQL | L1; L63; L60 |
| 404 | CYDTNVLE | L62 | VVSDIDYV | L20 | LTENLLLY | L1; L18; L12 |
| 405 | CYDTNVLEG | L62 | VVSTGYHF | L54 | LTENLLLYI | L1; L18; L73 |
| 406 | CYDYCIPY | L62 | VVTCLAYY | L14 | LTESNKKFL | L1; L63; L60 |
| 407 | CYDYCIPYN | L62 | VVTTVMFL | L74 | LTGHMLDMY | L1; L18; L12 |
| 408 | CYTPSKLI | L9 | VVVNAANVYL | L20 | LTILTSLLV | L73; L1; L18 |
| 409 | DAALALLLLDR | L19 | VVVNAANVYLK | L7 | LTKEGATTC | L55; L53; L52 |
| 410 | DADSTLIGD | L49 | VWTLMNVLTL | L9 | LTLQQIELK | L6; L7; L52 |
| 411 | DAFKLNIK | L47 | VYAADPAMH | L9 | LTLQQIELKF | L52; L12; L53 |
| 412 | DAGFIKQY | L70 | VYANLGER | L17 | LTNDNTSR | L21; L15; L17 |
| 413 | DALCEKALK | L19 | VYCCREHEH | L72 | LTNMFTPL | L59; L61; L60 |
| 414 | DAMRNAGI | L47 | VYCFLGYFC | L9 | LTPVVQTI | L47; L55; L57 |
| 415 | DAMRNAGIV | L47 | VYDDGARR | L62 | LTRNPAWRK | L13; L6; L7 |
| 416 | DAQGMDNL | L74 | VYDNKLKA | L62 | LVAEWFLAYI | L20; L3; L4 |
| 417 | DATPSDFV | L47 | VYDPLQPE | L62 | LVASIKNF | L74; L52; L58 |
| 418 | DATPSDFVRA | L50 | VYDPLQPELDSF | L9 | LVASIKNFK | L6; L7; L19 |
| 419 | DAVIKTLQP | L49 | VYDYLVST | L62 | LVAVPTGY | L26; L43; L1 |
| 420 | DAVNLLTN | L47 | VYFASTEKS | L9 | LVDFQVTI | L68; L63; L62 |
| 421 | DAVNLLTNMF | L10 | VYFASTEKSNI | L9 | LVDLPIGI | L68; L62; L63 |
| 422 | DAVVCFNSTY | L10 | VYFLQSINFVR | L15 | LVEVEKGVL | L68; L63; L1 |
| 423 | DAYKTFPPT | L47 | VYIGDPAQ | L71 | LVFLFVAAIF | L31; L12; L52 |
| 424 | DAYNMMIS | L47 | VYKQFDTYNLW | L9 | LVKQGDDYVY | L14; L26; L52 |
| 425 | DAYNMMISAGF | L11 | VYLAVFDKNLY | L12 | LVKQLSSNF | L26; L58; L52 |
| 426 | DAYVNTFSS | L47 | VYNPFMID | L66 | LVPFWITIAY | L12; L26; L6 |
| 427 | DAYYRARAG | L25 | VYNPFMIDVQ | L9 | LWLDDVVYC | L31; L4; L8 |
| 428 | DCATVHTANK | L19 | VYNPFMIDVQQ | L9 | LYDANYFL | L62; L68; L63 |
| | | | W | | | |
| 429 | DCSARHINA | L25 | VYQCAMRPN | L72 | LYFDKAGQKTY | L71; L14; L12 |
| 430 | DCVVLHSY | L29 | VYRAFDIY | L66 | LYLDAYNM | L71; L72; L66 |
| 431 | DCVVLHSYF | L29 | VYSVIYLYLT | L9 | LYPTLNISD | L71; L72; L9 |
| 432 | DDFTGCVI | L25 | VYYSQLMCQ | L72 | MADSNGTI | L68; L63; L47 |
| 433 | DDFVEIIKS | L29 | VYYTSNPTTFHL | L9 | MADSNGTIT | L63; L68; L32 |
| 434 | DDKKIKAC | L23 | WCKDGHVET | L43 | MAFPSGKV | L47; L70; L69 |
| 435 | DDNALAYY | L29 | WDLIISDM | L33 | MCDIRQLL | L62; L63; L68 |
| 436 | DDNLIDSY | L29 | WDLLKYDF | L33 | MDEFIERY | L18; L1; L29 |
| 437 | DDNLIDSYF | L29 | WDLTAFGL | L33 | MEVTPSGTWL | L36; L37; L41 |
| 438 | DDQIGYYR | L17 | WEIVKFISTC | L45 | MFVFLVLL | L62; L71; L72 |
| 439 | DDQIGYYRR | L17 | WEPEFYEA | L42 | MFYKGVITH | L71; L72; L17 |
| 440 | DDTLRVEA | L25 | WESGVKDCVV | L38 | MHAASGNLL | L34; L28; L35 |
| 441 | DDTVIEVQGY | L29 | WESGVKDCVVL | L36 | MHAASGNLLL | L28; L34; L35 |
| 442 | DDVVYCPRH | L29 | WEVGKPRP | L46 | MISAGFSL | L60; L61; L28 |
| 443 | DDYQGKPL | L25 | WEVGKPRPPL | L36 | MLDMYSVM | L63; L68; L62 |
| 444 | DDYVYLPY | L29 | WFHAIHVSG | L71 | MLTNDNTSRY | L14; L12; L18 |
| 445 | DEAGSKSPIQY | L29 | WFLAYILFT | L12 | MLVKQGDDY | L26; L14; L12 |
| 446 | DEDDNLID | L29 | WFLNRFTTT | L8 | MPVCVETKA | L50; L51; L32 |
| 447 | DEDDNLIDS | L29 | WHNMLKTV | L48 | MPYFFTLLLQL | L31; L50; L47 |
| 448 | DEDDNLIDSYF | L41 | WHNMLKTVY | L27 | MSAFAMMFV | L73; L20; L70 |
| 449 | DEDDSEPV | L29 | WHTNCYDYCI | L34 | MSKFPLKLR | L15; L17; L21 |
| 450 | DEDEEEGD | L29 | WICLLQFAY | L12 | MSYEDQDALF | L54; L53; L52 |
| 451 | DEEQPMEID | L29 | WKSYVHVVD | L44 | MTQMYKQAR | L17; L15; L21 |
| 452 | DEFIERYK | L29 | WLCWKCRSK | L13 | MVTNNTFTLK | L6; L7; L19 |
| 453 | DEFIERYKLEGY | L29 | WLDDVVYCPR | L21 | MVYMPASWVM | L21; L19; L15 |
| | | | | | R | |
| 454 | DEGNCDTL | L29 | WLDDVVYCPRH | L5 | MYKGLPWNV | L13; L64; L3 |
| 455 | DEISMATN | L29 | WLDDVVYCPRH | L5 | NADIVEEA | L68; L67; L63 |
| | | | V | | | |
| 456 | DELGTDPY | L29 | WLDMVDTSLS | L1 | NADLYKLM | L63; L68; L62 |
| 457 | DELTGHMLDM | L29 | WLGFIAGLI | L24 | NAGDYILAN | L67; L69; L43 |
| 458 | DELTGHMLDMY | L29 | WLKQLIKVT | L3 | NAGIVGVL | L67; L70; L74 |
| 459 | DEMIAQYT | L29 | WLKQLIKVTLV | L3 | NALDQAISMW | L10; L49; L52 |
| 460 | DEMIAQYTS | L29 | WLLWPVTLA | L2 | NAVASKILGL | L31; L49; L10 |
| 461 | DEPEEHVQ | L29 | WLSYFIASFR | L21 | NCTEVPVAI | L35; L20; L34 |
| 462 | DEPEEHVQIH | L29 | WMVMFTPLV | L48 | NDFNLVAM | L29; L33; L25 |
| 463 | DEPTTTTS | L29 | WNLVIGFLFL | L73 | NDNLLEIL | L33; L25; L29 |
| 464 | DERIDKVLN | L29 | WNVKDFMSL | L32 | NEFYAYLRK | L41; L40; L29 |
| 465 | DETQALPQR | L29 | WNVVRIKIV | L69 | NEKTHVQLSL | L37; L41; L36 |
| 466 | DEVRQIAPG | L29 | WPLIVTALRA | L50 | NENGTITDA | L42; L38; L46 |
| 467 | DEWSMATY | L29 | WPQIAQFAP | L50 | NETLVTMPL | L37; L29; L41 |
| 468 | DFAVSKGFF | L9 | WPQIAQFAPSA | L50 | NEYRLYLDAY | L29; L41; L40 |
| 469 | DFCGKGYHL | L8 | WPVTLACFV | L47 | NFKSVLYY | L72; L71; L12 |
| 470 | DFGDFIQTT | L17 | WPVTLACFVLA | L50 | NFNVLFSTV | L62; L71; L72 |
| 471 | DFIDTKRGV | L11 | WPWYIWLGFI | L47 | NFSKLINII | L8; L34; L9 |
| 472 | DFIPMDSTV | L71 | WPWYIWLGFIA | L50 | NFYGPFVDR | L17; L19; L15 |
| 473 | DFLEYHDVR | L17 | WQTGDFVKA | L24 | NGDFLHFL | L68; L63; L62 |
| 474 | DFLHFLPR | L17 | WRVYSTGSNV | L30 | NGLMLLEI | L25; L47; L48 |
| 475 | DFLHFLPRVF | L9 | WSFNPETNIL | L60 | NGYPNMFITR | L19; L17; L15 |
| 476 | DFQENWNTK | L17 | WSLFFFLYE | L73 | NHDLYCQVH | L35; L34; L28 |
| 477 | DFVEIIKS | L29 | WSYSGQSTQ | L55 | NHTSPDVDL | L28; L35; L34 |
| 478 | DGADVTKIK | L19 | WTAFVTNV | L20 | NIALIWNVK | L19; L7; L6 |
| 479 | DGCVPLNI | L47 | WTAFVTNVNA | L20 | NIIPLTTA | L3; L25; L23 |
| 480 | DGCVPLNII | L47 | WTAGAAAYYV | L20 | NINLHTQV | L25; L23; L48 |
| 481 | DGDMVPHI | L47 | WTIEYPIIG | L69 | NIVNVSLVK | L19; L7; L6 |
| 482 | DGGSLYVNK | L19 | WTLMNVLTLVY | L52 | NKGAGGHSY | L27; L66; L14 |
| 483 | DGHVETFY | L29 | WVATEGAL | L74 | NLAKHCLHVV | L3; L2; L4 |
| 484 | DGIIWVAT | L25 | WVLNNDYY | L14 | NLIDSYFVVKR | L19; L17; L21 |
| 485 | DGKMKDLSP | L23 | WYDFGDFI | L62 | NLIIKNLSK | L6; L23; L7 |
| 486 | DGKSKCEE | L23 | WYDFVENP | L62 | NLLEILQK | L6; L7; L4 |
| 487 | DGTLMIERF | L29 | WYIRVGAR | L17 | NLLKDCPAV | L4; L2; L5 |
| 488 | DGVDVELF | L29 | WYIRVGARK | L8 | NLLLQYGSF | L10; L27; L12 |
| 489 | DGVKHVYQLR | L19 | WYIWLGFIA | L50 | NLSDRVVFVL | L4; L3; L2 |
| 490 | DGVPFVVSTGY | L11 | WYTERSEKSY | L14 | NLWNTFTR | L21; L17; L19 |
| 491 | DGVVCTEI | L25 | YAADPAMHAAS | L67 | NLYKMQRML | L64; L23; L74 |
| 492 | DGWEIVKFI | L47 | YAAFATAQ | L59 | NNDYYRSL | L68; L62; L63 |
| 493 | DGYVMHANYI | L47 | YAAFATAQEAY | L31 | NNLDKSAGF | L8; L12; L11 |
| 494 | DHCGETSW | L28 | YAAVINGDR | L19 | NNLNRGMVL | L25; L23; L71 |
| 495 | DHIGTRNPA | L28 | YADSFVIRGD | L49 | NPDILRVY | L31; L49; L1 |
| 496 | DHSSSSDNIALL | L34 | YAFASEAA | L50 | NPFMIDVQQW | L49; L31; L41 |
| 497 | DHVISTSH | L28 | YAFEHIVYGD | L49 | NQKLIANQF | L26; L27; L58 |
| 498 | DIAANTVIWDY | L11 | YAFEHIVYGDF | L31 | NQMCLSTL | L25; L48; L35 |
| 499 | DIAKKPTET | L23 | YALVYFLQSI | L47 | NRATLQAI | L25; L35; L64 |
| 500 | DIDYVPLKS | L1 | YANGGKGFC | L58 | NRNYVFTGY | L30; L66; L65 |
| 501 | DIGNPKAIK | L19 | YANGGKGFCKL | L60 | NRPQIGVV | L66; L64; L25 |
| 502 | DILGPLSA | L25 | YASAVVLLILM | L31 | NRQFHQKL | L25; L35; L66 |
| 503 | DINGNLHPD | L11 | YASQGLVASI | L20 | NRVCGVSAA | L25; L35; L30 |
| 504 | DINKLCEEM | L29 | YATHSDKFTD | L49 | NSFSGYLK | L19; L55; L7 |
| 505 | DIPGIPKD | L11 | YAWNRKRIS | L69 | NSFTRGVY | L14; L1; L70 |
| 506 | DIPGIPKDMTY | L11 | YAYLRKHFS | L23 | NSPNLAWPL | L57; L67; L66 |
| 507 | DIPIGAGIC | L11 | YCALAPNMM | L28 | NSRNYIAQV | L13; L70; L48 |
| 508 | DIQLLKSA | L23 | YCPACHNSE | L57 | NSSPDDQIGYY | L1; L14; L18 |
| 509 | DIRQLLFV | L23 | YCPACHNSEV | L57 | NSTNVTIATY | L14; L43; L10 |
| 510 | DISGINASVV | L20 | YCPIFFITG | L57 | NSVPWDTIANY | L52; L14; L11 |
| 511 | DISTEIYQA | L11 | YCPIFFITGNTL | L57 | NTFSSTFNV | L20; L70; L19 |
| 512 | DITPCSFGGV | L11 | YCRHGTCER | L43 | NTVIWDYKR | L17; L19; L15 |
| 513 | DIVEEAKK | L19 | YDANYFLCW | L49 | NVAKYTQL | L74; L25; L56 |
| 514 | DIVEEAKKVK | L19 | YDDGARRVW | L49 | NVGDYFVL | L67; L66; L65 |
| 515 | DIVKTDGTLM | L11 | YDHVISTSH | L43 | NVLSTFISA | L50; L51; L17 |
| 516 | DIVVFDEI | L47 | YDKLVSSFL | L33 | NVLTLVYK | L7; L17; L6 |
| 517 | DKAGQKTY | L27 | YDNKLKAH | L33 | NVPMEKLKTL | L57; L10; L5 |
| 518 | DKAGQKTYER | L19 | YDPKTKNV | L33 | NVSLVKPSF | L31; L39; L12 |
| 519 | DKKIKACV | L23 | YDSMSYED | L33 | NVYADSFVI | L49; L10; L20 |
| 520 | DKNTQEVF | L29 | YDYVIFTQ | L33 | NVYLAVFDK | L7; L19; L6 |
| 521 | DKVEAEVQI | L44 | YDYYRYNL | L33 | NWLKQLIKV | L4; L8; L25 |
| 522 | DKYVRNLQH | L25 | YDYYRYNLP | L33 | NWYDFGDF | L9; L71; L62 |
| 523 | DLATNNLVVM | L11 | YEAMYTPHTVL | L36 | NWYDFGDFI | L34; L8; L9 |
| 524 | DLICAQKF | L11 | YECDIPIGAGI | L45 | NYIAQVDVVNF | L8; L9; L71 |
| 525 | DLKGKYVQ | L23 | YECLYRNRD | L45 | NYIFWRNTN | L72; L8; L71 |
| 526 | DLKPVSEE | L23 | YEDFQENWN | L45 | NYKLPDDF | L62; L9; L71 |
| 527 | DLLIRKSN | L23 | YEDLLIRK | L45 | NYQKVGMQKY | L8; L14; L12 |
| 528 | DLLIRKSNH | L23 | YEDLLIRKSN | L41 | PASWVMRIM | L70; L32; L69 |
| 529 | DLNDFVSD | L23 | YEGNSPFHP | L38 | PAYTNSFTR | L19; L17; L15 |
| 530 | DLNGNWYDF | L11 | YEGNSPFHPL | L36 | PEAGLPYGA | L46; L42; L38 |
| 531 | DLPIGINITR | L19 | YELKHGTFT | L45 | PETTADIVV | L38; L37; L36 |
| 532 | DLPIGINITRF | L11 | YELKHGTFTC | L38 | PETTADIVVF | L29; L41; L40 |
| 533 | DLPKEITV | L23 | YELKHGTFTCA | L46 | PGIPKDMTY | L43; L26; L14 |
| 534 | DLPKEITVA | L11 | YENFNQHEVLL | L36 | PGLPGTILR | L15; L21; L17 |
| 535 | DLSVVNAR | L17 | YEPLTQDH | L33 | PHGHVMVEL | L35; L34; L28 |
| 536 | DLSVVSKVVK | L19 | YEPQIITT | L29 | PLADNKFAL | L4; L2; L16 |
| 537 | DLTAFGLVAEW | L10 | YEQAVANGD | L38 | PLHGTILTR | L21; L19; L17 |
| 538 | DLYCQVHGN | L11 | YEQFKKGVQ | L46 | PLQPELDSF | L9; L26; L16 |
| 539 | DMCASLKEL | L25 | YEQFKKGVQIP | L38 | PPIKDFGGF | L49; L11; L10 |
| 540 | DMFLGTCR | L17 | YEQYIKWP | L38 | PPTSFGPLV | L50; L51; L47 |
| 541 | DMYSVMLTN | L47 | YERHSLSH | L29 | PQNAVVKIY | L26; L14; L27 |
| 542 | DNGPQNQR | L17 | YERHSLSHFV | L45 | PRPPLNRNY | L64; L65; L66 |
| 543 | DNIALLVQ | L25 | YFDCYDGG | L62 | PTITQMNLKY | L11; L12; L18 |
| 544 | DNLACEDL | L25 | YFDCYDGGC | L62 | PTLVPQEHY | L52; L12; L16 |
| 545 | DNLKTLLSLR | L17 | YFDCYDGGCI | L62 | PTMCDIRQL | L55; L53; L10 |
| 546 | DNQDLNGNW | L49 | YFDKAGQK | L62 | PTSFGPLVR | L19; L7; L21 |
| 547 | DNSSLTIKK | L19 | YFDKAGQKT | L62 | PVAYRKVLL | L23; L20; L74 |
| 548 | DNVTDFNAI | L10 | YFFTLLLQ | L48 | PVLDWLEEK | L7; L6; L13 |
| 549 | DNYYKKDNSY | L11 | YFFTLLLQLC | L12 | PVSELLTPL | L20; L67; L56 |
| 550 | DPAQLPAP | L50 | YFGLFCLLNR | L17 | PVYSFLPGVY | L14; L11; L12 |
| 551 | DPAQLPAPRTL | L22 | YFIASFRLFAR | L17 | PWDTIANY | L1; L18; L62 |
| 552 | DPIHSLRV | L47 | YFIKGLNNLNR | L17 | PYFFTLLL | L9; L71; L72 |
| 553 | DPKTKNVT | L23 | YFKNHTSP | L71 | PYIKWDLLKY | L12; L8; L14 |
| 554 | DPKTKNVTK | L23 | YFLQSINFVR | L17 | PYPDPSRI | L9; L8; L62 |
| 555 | DPLSETKC | L47 | YFLQSINFVRI | L8 | QAAGTDTTI | L32; L49; L67 |
| 556 | DPNFKDQVILL | L31 | YFRLTLGV | L48 | QADVEWKF | L63; L68; L62 |
| 557 | DPQTLEILD | L32 | YFRLTLGVYDY | L12 | QADVEWKFY | L1; L18; L70 |
| 558 | DPQTLEILDI | L47 | YFTQSRNLQEF | L9 | QAPTHLSV | L57; L47; L70 |
| 559 | DPSRILGA | L50 | YFYTSKTTVAS | L71 | QECVRGTTVL | L36; L40; L37 |
| 560 | DPVGFTLK | L47 | YFYTSKTTVASL | L71 | QEEVQELYSP | L42; L38; L46 |
| 561 | DPYEDFQE | L47 | YGADLKSFDL | L44 | QEFRYMNSQ | L46; L29; L45 |
| 562 | DPYEDFQENW | L49 | YGDFSHSQ | L68 | QEFRYMNSQGL | L40; L36; L41 |
| 563 | DQALVSDV | L25 | YGDSATLP | L63 | QEILGTVSWNL | L40; L41; L36 |
| 564 | DQDALFAY | L1 | YGFQPTNGV | L47 | QEKNFTTAP | L46; L42; L38 |
| 565 | DQFKHLIP | L25 | YGFQPTNGVGY | L27 | QELIRQGTD | L40; L33; L46 |
| 566 | DQLREPML | L25 | YHDVRVVLDF | L34 | QESPFVMMSA | L42; L46; L38 |
| 567 | DQLTPTWR | L17 | YHDVRVVLDFI | L34 | QEVFAQVKQI | L41; L45; L40 |
| 568 | DQVILLNK | L25 | YHTTDPSF | L28 | QFAYANRNR | L17; L15; L21 |
| 569 | DQVILLNKH | L29 | YHYQECVR | L28 | QHEETIYNL | L34; L35; L28 |
| 570 | DRCILHCA | L25 | YICGDSTEC | L43 | QHEETIYNLL | L34; L28; L35 |
| 571 | DRCILHCAN | L25 | YIDIGNYTVS | L68 | QHMVVKAAL | L28; L35; L34 |
| 572 | DRDAAMQRKL | L35 | YIDIGNYTVSC | L68 | QIAPGQTGK | L6; L7; L19 |
| 573 | DRLITGRL | L25 | YIFFASFYYV | L20 | QKKQQTVTL | L44; L27; L39 |
| 574 | DRLITGRLQ | L25 | YILANTCTER | L17 | QLDEEQPMEI | L5; L2; L68 |
| 575 | DRLITGRLQSL | L25 | YIRVGARK | L43 | QLHNDILLA | L3; L2; L24 |
| 576 | DRLNEVAK | L25 | YITTYPGQGL | L60 | QLPAPRTLL | L57; L5; L22 |
| 577 | DRLNQLES | L25 | YIWLGFIA | L50 | QLPPAYTNSF | L9; L57; L5 |
| 578 | DRLNQLESKM | L30 | YKAFKQIVE | L44 | QLPQGTTL | L57; L23; L5 |
| 579 | DRQTAQAA | L25 | YKAIDGGVTR | L19 | QMAPISAMV | L20; L3; L28 |
| 580 | DRVVFVLW | L25 | YKENSYTTT | L27 | QPGVAMPNL | L22; L56; L39 |
| 58 | DRYFKYWD | L25 | YKENSYTTTI | L34 | QPITNCVKML | L32; L39; L22 |
| 582 | DRYFKYWDQ | L25 | YKHITSKETL | L44 | QPPQTSITSA | L50; L51; L22 |
| 583 | DRYFKYWDQTY | L30 | YKHWPQIAQF | L27 | QPQLEMEL | L39; L22; L56 |
| 584 | DSAEVAVK | L19 | YKKVDGVVQ | L27 | QPRTFLLKY | L31; L11; L22 |
| 585 | DSATLPKGI | L10 | YKLEGYAFE | L44 | QPSVGPKQA | L51; L22; L39 |
| 586 | DSATLVSDI | L10 | YKLMGHFAW | L27 | QPTSEAVEA | L50; L51; L32 |
| 587 | DSCKRVLNV | L73 | YKLNVGDY | L27 | QQLIRAAEI | L48; L25; L24 |
| 588 | DSCNNYMLTY | L18 | YKLNVGDYFVL | L44 | QQQQGQTV | L48; L24; L28 |
| 589 | DSDLNDFV | L1 | YKLPDDFTGC | L27 | QSASKIITLK | L7; L6; L19 |
| 590 | DSDLNDFVS | L1 | YKNTCDGTTF | L27 | QSIIAYTM | L55; L48; L54 |
| 591 | DSEPVLKGV | L20 | YKNTCDGTTFT | L27 | QSINFVRI | L48; L73; L55 |
| | | | Y | | | |
| 592 | DSFKEELDK | L19 | YKSVNITFEL | L44 | QSINFVRIIMR | L19; L21; L7 |
| 593 | DSFVIRGD | L65 | YKYFSGAM | L27 | QSSYIVDSV | L20; L73; L70 |
| 594 | DSFVIRGDEV | L20 | YKYFSGAMD | L27 | QTFFKLVNKF | L11; L10; L52 |
| 595 | DSKEGFFTYI | L10 | YLALYNKYK | L6 | QTLLALHRSY | L52; L14; L40 |
| 596 | DSVEEVLSEAR | L19 | YLASGGQPIT | L2 | QTNSPRRAR | L15; L21; L17 |
| 597 | DSVTVKNGSI | L10 | YLDGADVT | L1 | QVDLFRNAR | L21; L17; L15 |
| 598 | DSYFVVKRH | L19 | YLGKPREQI | L2 | QVRDVLVR | L21; L15; L17 |
| 599 | DTANPKTPKYK | L19 | YLGTGPEAGL | L2 | QVTCGTTTL | L32; L56; L10 |
| 600 | DTDLTKPYI | L1 | YLITPVHVMSK | L6 | QVVSDIDYV | L20; L11; L5 |
| 601 | DTFNGECPNFV | L20 | YLKHGGGVAGA | L3 | QWLPTGTL | L33; L71; L9 |
| 602 | DTKRGVYCC | L10 | YLKLRSDV | L23 | QWNLVIGF | L33; L62; L29 |
| 603 | DTLRVEAF | L29 | YLKLRSDVL | L23 | QYIDIGNYT | L9; L8; L72 |
| 604 | DTPNNTDF | L11 | YLKLRSDVLL | L23 | QYIDIGNYTV | L8; L20; L9 |
| 605 | DTSLSGFKLK | L19 | YLNSTNVTIA | L3 | QYNRYLAL | L71; L72; L66 |
| 606 | DTTEAFEK | L19 | YLNTLTLA | L3 | RAAEIRASA | L51; L50; L46 |
| 607 | DTTITVNVLAW | L10 | YLPIDKCSR | L57 | RAFDIYND | L65; L54; L55 |
| 608 | DTVRTNVYLAVF | L10 | YLPYPDPSRIL | L57 | RAFGEYSHVV | L24; L70; L69 |
| 609 | DTYPSLET | L25 | YLRKHFSM | L23 | RAKVTSAM | L43; L70; L59 |
| 610 | DVDLGDISGI | L10 | YLRKHFSMM | L3 | RALTGIAVE | L52; L44; L53 |
| 611 | DVENPHLMGWD | L1 | YLVQQESPF | L26 | RDAAMQRKL | L33; L55; L37 |
| | Y | | | | | |
| 612 | DVETKDVV | L23 | YLVQQESPFV | L2 | REAACCHL | L33; L37; L36 |
| 613 | DVGDSAEV | L20 | YLYALVYFLQ | L12 | REAACCHLA | L38; L42; L46 |
| 614 | DVGDSAEVAV | L20 | YLYRLFRKS | L24 | REAACCHLAKA | L46; L38; L42 |
| 615 | DVGDSAEVAVK | L19 | YMGTLSYEQF | L9 | REAVGTNLPL | L36; L41; L40 |
| 616 | DVKCTSVV | L23 | YMPASWVMRI | L5 | REEAIRHVRAW | L40; L38; L41 |
| 617 | DVKCTSVVLL | L11 | YMRSLKVPA | L50 | REGYLNSTNV | L45; L38; L36 |
| 618 | DVLECNVKT | L11 | YMRSLKVPATV | L3 | RELGVVHN | L33; L37; L29 |
| 619 | DVLECNVKTT | L10 | YNLWNTFTR | L17 | RELNGGAY | L29; L14; L27 |
| 620 | DVLLPLTQ | L25 | YNYEPLTQ | L48 | RELNGGAYT | L36; L45; L40 |
| 621 | DVLLPLTQYNR | L17 | YNYKLPDDF | L12 | RFASVYAWNR | L15; L21; L17 |
| 622 | DVLVRGFGD | L17 | YNYLYRLFR | L17 | RFLYIIKLIF | L8; L9; L12 |
| 623 | DVQQWGFTGN | L10 | YPANSIVC | L47 | RFYRLANEC | L72; L71; L8 |
| 624 | DVRVVLDF | L23 | YPGQGLNGYTV | L50 | RGFGDSVEE | L65; L44; L27 |
| 625 | DVSFLAHI | L20 | YPLECIKDLL | L31 | RGIVFMCVEY | L26; L43; L27 |
| 626 | DVTQLYLGG | L11 | YPLECIKDLLA | L50 | RHFDEGNCDTL | L34; L28; L16 |
| 627 | DVVECLKLSH | L11 | YPLTKHPNQEY | L31 | RHHANEYRLY | L14; L27; L18 |
| 628 | DVVIGIVNNTV | L20 | YPNMFITREEA | L50 | RHVRAWIGF | L27; L34; L53 |
| 629 | DVVYCPRHV | L20 | YPSLETIQIT | L31 | RIMTWLDMV | L73; L4; L24 |
| 630 | DWTIEYPII | L47 | YPSLETIQITI | L47 | RKGGRTIAF | L27; L44; L33 |
| 631 | DWYDFVENP | L11 | YPTLNISD | L50 | RLANECAQVL | L16; L24; L44 |
| 632 | DYDCVSFC | L62 | YQCAMRPNF | L58 | RLIDAMMF | L26; L16; L54 |
| 633 | DYDCVSFCYM | L62 | YQCGHYKHI | L24 | RLISMMGF | L26; L27; L16 |
| 634 | DYDYYRYNL | L62 | YQLYSTQLS | L24 | RLKLFDRY | L14; L18; L26 |
| 635 | DYFNKKDWYDF | L8 | YQPYRVVV | L48 | RLNQLESKM | L14; L16; L24 |
| 636 | DYGARFYF | L9 | YRAFDIYNDK | L30 | RLQSLENVAF | L16; L26; L56 |
| 637 | DYGARFYFY | L12 | YREAACCHL | L34 | RLYECLYR | L21; L15; L6 |
| 638 | DYIATNGPLKV | L8 | YREGYLNST | L35 | RLYECLYRNR | L21; L15; L6 |
| 639 | DYIINLIIK | L17 | YRINWITGG | L30 | RMYIFFASFYY | L14; L18; L12 |
| 640 | DYILANTC | L71 | YRKVLLRKN | L64 | RNLQHRLY | L55; L14; L65 |
| 641 | DYILANTCTER | L17 | YRLANECAQV | L30 | RNSTPGSSR | L15; L21; L17 |
| 642 | DYKAFKQIV | L23 | YRLANECAQVL | L35 | RNYVFTGY | L27; L26; L65 |
| 643 | DYLVSTQEFR | L17 | YRLFRKSNLK | L30 | RPINPTDQSSY | L14; L27; L31 |
| 644 | DYNYKLPDDF | L9 | YRLYLDAY | L66 | RPLLESEL | L56; L22; L39 |
| 645 | DYVPLKSA | L25 | YRNRDVDTD | L65 | RPNFTIKGSF | L39; L22; L56 |
| 646 | DYYQLYSTQ | L17 | YRRLISMM | L66 | RPNFTIKGSFL | L56; L39; L22 |
| 647 | DYYRSLPGV | L47 | YRVVVLSFELL | L30 | RPPLNRNYV | L39; L22; L51 |
| 648 | DYYRSLPGVF | L9 | YSDSPCES | L1 | RPPLNRNYVF | L22; L39; L56 |
| 649 | EAACCHLAK | L19 | YSDSPCESHG | L63 | RPQIGVVR | L56; L15; L39 |
| 650 | EAALCTFL | L74 | YSDVENPHLMG | L1 | RQALLKTV | L48; L24; L33 |
| | | | W | | | |
| 651 | EAANFCALI | L20 | YSFLPGVYSVIY | L1 | RQKKQQTV | L48; L24; L26 |
| 652 | EAARVVRSIFSR | L19 | YSFVSEET | L43 | RQKKQQTVT | L26; L27; L44 |
| 653 | EAELAKNVSL | L68 | YSLLLCRM | L59 | RQKRTATKAY | L26; L27; L14 |
| 654 | EAEVQIDR | L17 | YSLRLIDAM | L67 | RQRLTKYTM | L27; L44; L26 |
| 655 | EAFLIGCNYL | L20 | YSPIFLIVAA | L50 | RSDVLLPLTQY | L18; L1; L14 |
| 656 | EAGLPYGANK | L19 | YSVIYLYLTFY | L1 | RSGETLGV | L73; L48; L24 |
| 657 | EAIRHVRAWI | L20 | YSVLYNSA | L50 | RSVSPKLFIR | L15; L21; L7 |
| 658 | EAKTVLKKC | L10 | YTDFATSACV | L1 | RTTNGDFL | L55; L54; L53 |
| 659 | EASFNYLK | L19 | YTDFATSACVL | L68 | RTVAGVSI | L55; L54; L53 |
| 660 | EAVGTNLPLQL | L20 | YTEISFMLWC | L1 | RVDFCGKGYHL | L18; L63; L68 |
| 661 | EAVMYMGTLSY | L11 | YTEKWESGV | L1 | RVDGQVDLFR | L21; L7; L18 |
| 662 | EAYEQAVA | L50 | YTEKWESGVK | L1 | RVEAFEYY | L18; L1; L14 |
| 663 | ECAQVLSEMV | L20 | YTELEPPCR | L1 | RVESSSKL | L63; L18; L54 |
| 664 | ECFDKFKVN | L10 | YTELEPPCRF | L1 | RVLNVVCK | L7; L13; L6 |
| 665 | ECFVKRVD | L65 | YTERSEKS | L1 | RVLNVVCKT | L13; L24; L6 |
| 666 | ECNQMCLSTL | L10 | YTGNYQCGHY | L1 | RVLSNLNLP | L6; L16; L15 |
| 667 | ECNVKTTEV | L23 | YTKRNVIPTI | L10 | RVQPTESI | L54; L16; L24 |
| 668 | ECTTIVNGV | L20 | YTKVDGVDVEL | L52 | RVQPTESIV | L24; L14; L28 |
| | | | F | | | |
| 669 | ECTTIVNGVRR | L19 | YTMADLVYA | L20 | RVRQALLK | L13; L6; L7 |
| 670 | ECVRGTTV | L48 | YTPHTVLQA | L11 | RVRQALLKT | L13; L6; L51 |
| 671 | ECVRGTTVLL | L20 | YTSALLAGT | L20 | RVRQALLKTV | L13; L3; L51 |
| 672 | EDDSEPVL | L28 | YTSKTTVASL | L20 | RVYSSANNCTF | L16; L54; L52 |
| 673 | EDDSEPVLK | L19 | YTSNPTTFH | L58 | RWVLNNDYY | L14; L18; L12 |
| 674 | EDIQLLKSA | L46 | YTTTIKPV | L70 | RYWEPEFYE | L65; L8; L9 |
| 675 | EDIQLLKSAY | L40 | YTVELGTEVNEF | L10 | SAEVAVKM | L63; L62; L68 |
| 676 | EDLLFNKVTL | L23 | YTVSCLPFTI | L20 | SAFFGMSR | L19; L17; L15 |
| 677 | EDMLNPNY | L29 | YVDNSSLTIK | L6 | SAFYILPSII | L69; L20; L70 |
| 678 | EDNQTTTI | L48 | YVDNSSLTIKK | L7 | SAGFPFNKW | L49; L52; L54 |
| 679 | EEAALCTFLLN | L41 | YVGCHNKCAY | L43 | SAIGKIQDS | L43; L49; L58 |
| 680 | EEAARYMRS | L42 | YVMHANYIFW | L10 | SARHINAQV | L20; L58; L70 |
| 681 | EEAKKVKPT | L42 | YVPLKSAT | L57 | SAVGNICY | L70; L58; L69 |
| 682 | EEEEFEPST | L42 | YVPLKSATC | L57 | SCKRVLNVV | L51; L3; L39 |
| 683 | EEEGDCEEE | L42 | YVSQPFLMDL | L20 | SDDAVVCF | L33; L62; L63 |
| 684 | EEHFIETIS | L42 | YVTQQLIRAA | L50 | SDRVVFVL | L33; L65; L29 |
| 685 | EELFYSYATH | L40 | YVYIGDPA | L50 | SEAFLIGCNY | L40; L41; L29 |
| 686 | EEMLDNRA | L42 | YVYIGDPAQ | L67 | SEAFLIGCNYL | L40; L36; L41 |
| 687 | EEQEEDWL | L29 | YVYNPFMI | L47 | SEAKCWTET | L46; L42; L37 |
| 688 | EEQPMEID | L29 | YVYNPFMIDV | L20 | SEETGTLI | L45; L36; L37 |
| 689 | EERLKLFDR | L17 | YWDQTYHP | L62 | SEFRVYSS | L29; L33; L37 |
| 690 | EERLKLFDRYF | L40 | YWDQTYHPN | L62 | SEGLNDNL | L33; L36; L37 |
| 691 | EESSAKSASVYY | L41 | YWEPEFYEAMY | L1 | SEISMDNSPNL | L36; L41; L40 |
| 692 | EETGLLMPLKA | L42 | YWFFSNYLK | L7 | SEKQVEQKIA | L42; L38; L46 |
| 693 | EETGTLIVNSVL | L41 | YWFFSNYLKR | L19 | SEKSYELQTP | L42; L46; L38 |
| 694 | EETIYNLLKD | L41 | YYDSMSYE | L62 | SELLTPLGIDL | L36; L41; L40 |
| 695 | EETKFLTENLL | L41 | YYDSMSYED | L62 | SEQLDFIDT | L42; L40; L38 |
| 696 | EETKFLTENLLL | L41 | YYFMRFRR | L17 | SFCYMHHM | L62; L72; L71 |
| 697 | EEVGHTDLMA | L42 | YYFMRFRRA | L46 | SFCYMHHMEL | L71; L72; L62 |
| 698 | EEVKPFIT | L29 | YYGNALDQ | L71 | SFGGASCCL | L72; L71; L62 |
| 699 | EEVLSEAR | L29 | YYGNALDQAI | L9 | SFGGVSVI | L72; L71; L48 |
| 700 | EEVQELYSPIFL | L41 | YYHTTDPS | L71 | SFIEDLLEN | L12; L8; L72 |
| 701 | EEVTTTLEE | L41 | YYLFDESG | L71 | SFIEDLLENK | L7; L13; L6 |
| 702 | EEVVLKTG | L29 | YYLGTGPE | L71 | SFKKGAKL | L72; L62; L71 |
| 703 | EFCSQHTML | L8 | YYLGTGPEAGL | L9 | SFLEMKSEK | L71; L72; L13 |
| 704 | EFDRDAAM | L62 | YYNTTKGGR | L17 | SFNYLKSPNF | L9; L8; L12 |
| 705 | EFDRDAAMQR | L17 | YYRARAGEA | L72 | SFTRGVYY | L72; L71; L12 |
| 706 | EFEPSTQY | L1 | YYRRATRR | L17 | SFTVEKGIY | L14; L12; L72 |
| 707 | EFIERYKL | L8 | YYRSLPGV | L48 | SFVSEETGTL | L8; L72; L71 |
| 708 | EFKLASHMY | L14 | YYSLLMPILTL | L9 | SFYPPDED | L72; L71; L62 |
| 709 | EFLRDGWEIVKF | L8 | AAAYYVGY | L43; L58 | SGVKDCVVL | L44; L32; L56 |
| 710 | EFLTRNPAWR | L17 | AADPAMHA | L63; L68 | SHAAVDAL | L35; L28; L34 |
| 711 | EFQFCNDPF | L72 | AAFATAQEA | L69; L46 | SHEGKTFYV | L34; L35; L28 |
| 712 | EFYAYLRKH | L17 | AAIMQLFFSY | L12; L14 | SHEGKTFYVL | L34; L35; L28 |
| 713 | EGDCEEEEF | L34 | AAISDYDYYRY | L12; L14 | SHFVNLDNL | L34; L28; L35 |
| 714 | EGFFTYICGF | L11 | AAKLMVVI | L70; L69 | SHQSDIEVT | L28; L34; L35 |
| 715 | EGKTFYVL | L23 | AAKLMVVIP | L69; L42 | SHSQLGGLHL | L34; L28; L35 |
| 716 | EGKTFYVLP | L42 | AALALLLLD | L12; L7 | SHSQLGGLHLL | L34; L28; L35 |
| 717 | EGNFYGPFVDR | L17 | AALCTFLLNK | L7; L6 | SHVVAFNTLL | L34; L28; L35 |
| 718 | EGVLTAVV | L48 | AALGVLMSNL | L74; L67 | SIFSRTLET | L43; L6; L3 |
| 719 | EGVVDYGAR | L17 | AALLADKF | L33; L54 | SIINNTVYTK | L7; L19; L6 |
| 720 | EGYAFEHIVY | L27 | AALLADKFPVL | L67; L31 | SIIQFPNTYL | L11; L20; L6 |
| 721 | EGYLNSTNV | L48 | AANFCALILAY | L12; L31 | SIKNFKSVLYY | L12; L14; L6 |
| 722 | EHDYQIGGYTE | L34 | AAYSRYRI | L70; L47 | SKLINIIIW | L44; L27; L52 |
| 723 | EHEIAWYTE | L34 | AAYSRYRIG | L69; L70 | SKPSKRSF | L27; L66; L57 |
| 724 | EHFIETISLA | L28 | ACFVLAAV | L48; L33 | SKRSFIEDL | L44; L27; L66 |
| 725 | EHIVYGDFS | L34 | ADDLNQLTGY | L18; L1 | SKVQIGEYTF | L27; L44; L34 |
| 726 | EHIVYGDFSH | L34 | ADLDDFSKQL | L40; L37 | SLAEYHNESGL | L2; L3; L4 |
| 727 | EHSWNADLY | L34 | ADLVYALRHF | L40; L33 | SLDNVLSTFI | L5; L68; L2 |
| 728 | EHVNNSYECDI | L34 | ADSFVIRGD | L65; L33 | SLFDMSKFPLK | L6; L7; L13 |
| 729 | EHVTFFIY | L29 | ADVEWKFYD | L65; L33 | SLFDMSKFPLKL | L2; L3; L4 |
| 730 | EHYVRITGLY | L11 | AEETRKLMPV | L42; L38 | SLGAENSVAY | L12; L26; L14 |
| 731 | EIDRLNEVA | L42 | AEHVNNSYEC | L42; L38 | SLIDLQELG | L2; L4; L12 |
| 732 | EIIGYKAI | L10 | AEILLIIMRTFK | L40; L41 | SLKELLQNG | L3; L13; L4 |
| 733 | EIIGYKAID | L11 | AEIPKEEVKPF | L41; L40 | SLKVPATV | L3; L23; L43 |
| 734 | EIIGYKAIDGG | L11 | AEIVDTVSALVY | L41; L40 | SLPSYAAF | L57; L43; L72 |
| 735 | EIIKSQDL | L23 | AELAKNVSLD | L40; L41 | SLPVLQVRDV | L57; L64; L5 |
| 736 | EIIKSQDLSV | L11 | AELEGIQYGRSG | L41; L40 | SLREVRTIK | L13; L6; L21 |
| 737 | EIKDATPSD | L11 | AETLKATEE | L45; L46 | SLRVCVDTV | L3; L4; L2 |
| 738 | EIKDTEKYCAL | L10 | AETLKATEETF | L41; L36 | SLSEQLRKQ | L3; L4; L14 |
| 739 | EIKLAKKF | L23 | AEVAVKMFDAY | L40; L41 | SLSHFVNL | L74; L56; L4 |
| 740 | EILGTVSW | L10 | AEVQIDRLIT | L41; L40 | SLVVRCSFY | L14; L12; L26 |
| 741 | EILQKEKV | L23 | AEWFLAYILFT | L40; L41 | SNHNFLVQA | L46; L51; L42 |
| 742 | EIPKEEVKP | L11 | AEYHNESGLKTI | L45; L41 | SNYLKRRV | L48; L45; L33 |
| 743 | EIPVAYRKVL | L57 | AFATAQEA | L72; L71 | SPCESHGKQV | L39; L51; L22 |
| 744 | EISFMLWCK | L19 | AFDKSAFV | L62; L63 | SPFVMMSA | L50; L51; L25 |
| 745 | EITVATSRTL | L10 | AFDKSAFVNL | L62; L68 | SPIFLIVA | L50; L51; L22 |
| 746 | EIVGGQIV | L20 | AFFGMSRIGM | L71; L72 | SPISEHDYQI | L32; L49; L34 |
| 747 | EKCSAYTVEL | L44 | AFKLNIKL | L62; L71 | SPNLAWPL | L22; L56; L39 |
| 748 | EKDEDDNLI | L34 | AFLIGCNY | L71; L72 | SPSGVYQCAM | L22; L32; L39 |
| 749 | EKGDYGDAVVY | L27 | AFPFTIYS | L71; L72 | SQCVNLTTR | L15; L21; L17 |
| 750 | EKQEILGTV | L20 | AFPSGKVE | L71; L72 | SQDLSVVSKV | L63; L68; L24 |
| 751 | ELAKNVSLD | L11 | AFPSGKVEG | L72; L71 | SQILPDPSK | L13; L7; L28 |
| 752 | ELDSFKEELDKY | L1 | AFQTVKPG | L72; L71 | SQLGGLHLLI | L24; L34; L8 |
| 753 | ELFYSYATH | L10 | AFVETVKGLDY | L12; L71 | SQNAVASKI | L24; L48; L34 |
| 754 | ELGKYEQYI | L24 | AFVNLKQL | L72; L71 | SQWLTNIF | L27; L48; L26 |
| 755 | ELGTDPYEDF | L11 | AFVTNVNAS | L72; L71 | SRELKVTFF | L34; L30; L62 |
| 756 | ELHLSWEV | L23 | AGFPFNKW | L54; L48 | SRIGMEVTP | L35; L34; L30 |
| 757 | ELIRQGTDYKHW | L10 | AGFPFNKWGK | L7; L13 | SRIIPARAR | L30; L17; L15 |
| 758 | ELKHGTFTC | L10 | AGGIVAIVV | L69; L73 | SRNYIAQV | L64; L35; L48 |
| 759 | ELKINAAC | L23 | AGLIAIVMV | L4; L73 | SRNYIAQVD | L65; L64; L35 |
| 760 | ELKINAACR | L17 | AGNVQLRV | L48; L73 | SRVPDLLV | L64; L35; L25 |
| 761 | ELKKLLEQ | L23 | AGNVQLRVI | L55; L48 | SRYRIGNYKL | L30; L35; L34 |
| 762 | ELSLIDFY | L1 | AGSDKGVAP | L46; L42 | SRYWEPEF | L65; L66; L28 |
| 763 | ELSLIDFYL | L20 | AGTDLEGNFY | L14; L12 | SSRGTSPAR | L21; L15; L13 |
| 764 | ELSPVALRQM | L11 | AHIQWMVM | L28; L35 | SSRSRNSSR | L15; L21; L17 |
| 765 | ELSRVLGL | L23 | AHISTIGV | L28; L35 | SSSDNIALLV | L73; L20; L18 |
| 766 | ELTGHMLDM | L11 | AHKDKSAQCF | L43; L34 | SSVELKHFFF | L52; L53; L54 |
| 767 | ELTPVVQTIEV | L20 | AHVASCDAI | L34; L28 | STASALGK | L7; L19; L6 |
| 768 | ELTSMKYFV | L20 | AIAMACLVGL | L3; L4 | STASDTYACW | L10; L52; L54 |
| 769 | ELVAELEGIQY | L11 | AIGKIQDSL | L67; L44 | STDGNKIADKY | L18; L1; L14 |
| 770 | ELVIGAVI | L23 | AINRPQIGVVR | L21; L15 | STFNVPMEKLK | L7; L6; L13 |
| 771 | EMELTPVV | L48 | AIPTNFTISV | L57; L5 | STKPVETSNSF | L52; L53; L10 |
| 772 | EMIAQYTSA | L42 | AITILDGISQY | L14; L18 | STMTNRQF | L52; L55; L53 |
| 773 | EMIAQYTSAL | L10 | AKDTTEAF | L27; L68 | STQLGIEFLKR | L15; L7; L19 |
| 774 | EMKSEKQV | L48 | AKHDFFKF | L27; L66 | STYASQGLV | L20; L73; L14 |
| 775 | EMLAKALR | L17 | AKHDFFKFR | L15; L21 | SVEEVLSEA | L3; L5; L51 |
| 776 | EMLAKALRK | L6 | AKKVKPTVV | L23; L3 | SVITPGTNT | L13; L11; L7 |
| 777 | EMVMCGGSL | L10 | AKNLNESL | L44; L27 | SVMLTNDNTSR | L7; L19; L15 |
| 778 | EMYLKLRSD | L23 | AKNRARTVA | L42; L46 | SVQTFFKLVNK | L7; L6; L15 |
| 779 | ENFNQHEVLL | L20 | AKSHNIALI | L44; L34 | SVVNARLRAK | L7; L10; L6 |
| 780 | ENSYTTTI | L48 | ALALLLLDRL | L4; L3 | SVVNIQKEI | L20; L10; L24 |
| 781 | ENVAFNVVNK | L19 | ALAPNMMVT | L3; L2 | SVVSKVVK | L7; L19; L13 |
| 782 | EPEFYEAMY | L31 | ALDPLSETKC | L5; L18 | SYCTGYREGY | L14; L72; L71 |
| 783 | EPIYDEPTT | L32 | ALDQAISMWAL | L5; L68 | SYELQTPF | L71; L72; L62 |
| 784 | EPKKDKKKK | L23 | ALEPLVDLP | L1; L18 | SYFVVKRH | L71; L48; L72 |
| 785 | EPKKDKKKKAD | L23 | ALFAYTKR | L21; L15 | SYGIATVREV | L72; L64; L71 |
| 786 | EPLTQDHV | L47 | ALFAYTKRN | L24; L3 | SYKDWSYSG | L8; L66; L15 |
| 787 | EPLTQDHVD | L32 | ALFAYTKRNV | L3; L2 | TAALGVLM | L70; L31; L74 |
| 788 | EPLVDLPI | L47 | ALGGSVAIK | L6; L7 | TADIVVFD | L68; L63; L62 |
| 789 | EPLVDLPIG | L31 | ALGKLQDVV | L24; L2 | TADIVVFDEI | L67; L68; L49 |
| 790 | EPMLQSADA | L50 | ALIISVTSN | L3; L26 | TANVNALL | L62; L68; L63 |
| 791 | EPQIITTD | L23 | ALITLATCEL | L2; L4 | TAYNGYLTS | L49; L43; L69 |
| 792 | EPTTTTSVPL | L22 | ALKGGKIV | L23; L39 | TCCSLSHRF | L49; L8; L34 |
| 793 | EQDKNTQEVF | L34 | ALKGGKIVN | L43; L26 | TDDNALAYY | L1; L18; L14 |
| 794 | EQIDGYVM | L35 | ALKGGKIVNN | L3; L21 | TDNYITTY | L29; L65; L33 |
| 795 | EQIDGYVMHA | L11 | ALLADKFPV | L2; L4 | TEAFEKMV | L45; L37; L38 |
| 796 | EQKSILSPL | L10 | ALLAGTITS | L2; L4 | TEAFEKMVSLL | L36; L40; L41 |
| 797 | EQKSILSPLY | L14 | ALLLLDRL | L4; L74 | TECSNLLL | L45; L36; L37 |
| 798 | EQLDFIDTKR | L17 | ALLSDLQDLK | L6; L7 | TEGSVKGL | L37; L33; L45 |
| 799 | EQPTSEAV | L48 | ALLSTDGNK | L6; L7 | TEGSVKGLQP | L38; L42; L46 |
| 800 | EQYIKWPW | L48 | ALLSTDGNKI | L24; L2 | TEIYQAGSTP | L38; L46; L42 |
| 801 | EQYIKWPWYI | L48 | ALLTKSSEYK | L6; L7 | TEKYCALAP | L46; L42; L38 |
| 802 | EQYVFCTVN | L48 | ALLTLQQI | L4; L24 | TELEPPCRFV | L45; L38; L36 |
| 803 | ERLKLFAA | L25 | ALNDFSNSG | L43; L16 | TENLLLYIDI | L41; L40; L36 |
| 804 | ERLKLFDR | L17 | ALPETTAD | L57; L43 | TESNKKFLP | L38; L42; L46 |
| 805 | ERLKLFDRYF | L30 | ALPETTADIV | L5; L2 | TETICAPLTV | L45; L38; L46 |
| 806 | ERSEAGVC | L35 | ALPETTADIVV | L5; L2 | TETICAPLTVF | L40; L41; L29 |
| 807 | ERVRQALL | L35 | ALQDAYYR | L21; L15 | TFEEAALCTF | L62; L8; L9 |
| 808 | ERVRQALLK | L30 | ALQDAYYRAR | L21; L15 | TFGAGAAL | L72; L71; L62 |
| 809 | ERYKLEGY | L25 | ALRANSAVK | L13; L6 | TFISDEVAR | L17; L19; L15 |
| 810 | ESCGNFKVTK | L19 | ALRKVPTDNY | L26; L14 | TFLLNKEMY | L12; L72; L71 |
| 811 | ESDDYIAT | L1 | ALSKGVHF | L26; L74 | TFTYASAL | L72; L71; L62 |
| 812 | ESDDYIATN | L1 | ALTCFSTQF | L26; L27 | TFVTHSKGL | L71; L8; L72 |
| 813 | ESFGGASCC | L19 | ALTNNVAF | L26; L43 | TGSNVFQTR | L19; L17; L15 |
| 814 | ESGLKTIL | L23 | ALYYPSAR | L21; L6 | TGYKKPASR | L17; L19; L15 |
| 815 | ESGLKTILRK | L19 | AMACLVGL | L56; L3 | THDVSSAIN | L28; L35; L34 |
| 816 | ESLRPDTR | L17 | AMMFTSDL | L71; L72 | THHWLLLTIL | L28; L34; L35 |
| 817 | ESLVPGFNE | L17 | AMPNMLRIM | L64; L57 | THSDKFTDGVC | L34; L35; L28 |
| | | | | | L | |
| 818 | ESPFELEDF | L11 | ANGDSEVVLK | L7; L6 | THTGTGQAI | L35; L34; L28 |
| 819 | ESSAKSASV | L20 | ANGQVFGL | L65; L33 | THTGTGQAITV | L28; L34; L35 |
| 820 | ESSAKSASVY | L14 | ANGQVFGLYK | L7; L6 | THVQLSLPVL | L28; L34; L35 |
| 821 | ESVQTFFKLV | L20 | ANKDGIIWVA | L51; L42 | TIDGSSGVV | L68; L63; L28 |
| 822 | ETAHSCNV | L20 | ANSTVLSF | L33; L65 | TIFKDASGK | L19; L6; L7 |
| 823 | ETAQNSVRVLQK | L19 | ANYAKPFLNK | L6; L7 | TISLAGSY | L14; L18; L1 |
| 824 | ETDLTKGPH | L1 | ANYQKVGMQK | L6; L7 | TISLAGSYK | L6; L19; L7 |
| 825 | ETDLTKGPHEF | L1 | APFLYLYA | L50; L51 | TITQMNLKY | L12; L18; L14 |
| 826 | ETFKLSYGIA | L11 | APGQTGKIA | L51; L39 | TITVNVLAW | L10; L16; L49 |
| 827 | ETFKLSYGIATV | L20 | APGTAVLRQWL | L56; L22 | TKDVVECL | L62; L68; L63 |
| 828 | ETFVTHSKGLY | L11 | APHGHVMVE | L51; L39 | TKHPNQEY | L27; L66; L43 |
| 829 | ETFYPKLQS | L20 | APKEIIFLE | L39; L56 | TKPYIKWDL | L44; L66; L57 |
| 830 | ETGLLMPLK | L19 | APLLSAGIF | L22; L31 | TKVDGVDVEL | L44; L32; L66 |
| 831 | ETGTLIVNSV | L20 | APNMMVTNNTF | L39; L22 | TLADAGFIK | L6; L7; L19 |
| 832 | ETICAPLTVFF | L11 | APRTLLTK | L22; L51 | TLADAGFIKQY | L11; L10; L14 |
| 833 | ETIQITISSFK | L19 | APRTLLTKG | L51; L22 | TLEPEYFNSV | L5; L2; L4 |
| 834 | ETISLAGS | L11 | APSASAFF | L22; L56 | TLIVNSVL | L23; L68; L28 |
| 835 | ETIYNLLK | L19 | APSASAFFGM | L22; L56 | TLKATEETF | L26; L9; L16 |
| 836 | ETKDVVEC | L17 | APYIVGDV | L47; L51 | TLKKRWQLAL | L23; L3; L39 |
| 837 | ETKDVVECLK | L19 | APYIVGDVVQ | L56; L51 | TLLSLREVR | L15; L21; L17 |
| 838 | ETKFLTENLL | L20 | AQAAGTDTTI | L34; L24 | TLNGLWLDDV | L2; L4; L3 |
| 839 | ETKFLTENLLLY | L1 | AQALNTLV | L24; L48 | TLQAENVTGL | L4; L3; L2 |
| 840 | ETLGVLVPHV | L20 | AQCFKMFYK | L7; L6 | TLSYEQFKK | L6; L7; L19 |
| 841 | ETLPTEVLT | L17 | AQDGNAAISDY | L14; L18 | TLVFLFVAA | L50; L46; L51 |
| 842 | ETLYCIDGALL | L20 | AQEAYEQAV | L24; L28 | TMCDIRQLLF | L12; L8; L9 |
| 843 | ETNILLNVPL | L20 | AQNSVRVLQ | L44; L15 | TNNLVVMAY | L14; L31; L65 |
| 844 | ETQALPQRQ | L20 | AQSFLNRV | L48; L24 | TPLVPFWIT | L31; L47; L50 |
| 845 | ETQALPQRQK | L19 | AQTGIAVLD | L44; L24 | TPLVPFWITI | L47; L50; L22 |
| 846 | ETRKLMPVCV | L20 | AQVAKSHNI | L24; L48 | TPTWRVYST | L23; L32; L39 |
| 847 | ETSNSFDV | L20 | AQVDVVNEN | L24; L44 | TQLGIEFL | L25; L35; L34 |
| 848 | ETSNSFDVLK | L19 | AQVKQIYKT | L24; L44 | TQLGIEFLK | L7; L30; L6 |
| 849 | ETSWQTGDFV | L20 | AQYTSALLA | L24; L28 | TQVVDMSMTY | L26; L27; L14 |
| 850 | ETTADIVV | L20 | ARAGKASCTL | L30; L35 | TQWSLFFFLY | L14; L12; L27 |
| 851 | ETTADIVVFD | L20 | ARDGCVPLNI | L30; L34 | TRAKVGILC | L30; L34; L35 |
| 852 | ETYFTQSRN | L11 | ARHINAQV | L35; L25 | TREEAIRHV | L64; L35; L34 |
| 853 | EVARDLSL | L20 | ARLRAKHYVY | L66; L30 | TRLQSLENV | L30; L34; L35 |
| 854 | EVAVKMFDAYV | L20 | ARNGVLIT | L65; L35 | TRQVVNVV | L35; L25; L64 |
| 855 | EVFAQVKQ | L20 | ARNGVLITEG | L65; L30 | TRVECTTI | L25; L35; L34 |
| 856 | EVFNATRFAS | L20 | ASAVVLLILM | L52; L7 | TRVECTTIV | L64; L35; L25 |
| 857 | EVFNATRFASV | L20 | ASDTYACWH | L18; L1 | TSAFVETV | L48; L20; L70 |
| 858 | EVGKPRPPL | L20 | ASEAARVVR | L15; L21 | TSAMQTMLF | L53; L52; L54 |
| 859 | EVGKPRPPLNR | L17 | ASEFSSLP | L1; L18 | TSDLATNNLV | L1; L68; L18 |
| 860 | EVGPEHSLA | L20 | ASEYTGNY | L1; L18 | TSFGPLVRKI | L55; L20; L10 |
| 861 | EVITFDNLKT | L11 | ASEYTGNYQ | L1; L18 | TSLEIPRR | L48; L17; L15 |
| 862 | EVKILNNL | L23 | ASFYYVWK | L7; L13 | TSNSFDVL | L73; L55; L67 |
| 863 | EVKILNNLGV | L11 | ASGKPVPY | L43; L65 | TSPISEHDY | L14; L1; L26 |
| 864 | EVKPFITE | L23 | ASGNLLLDK | L7; L6 | TSSGDATTAY | L18; L14; L1 |
| 865 | EVLLAPLL | L74 | ASKKPRQK | L13; L55 | TSTDVVYR | L19; L17; L15 |
| 866 | EVLLAPLLSA | L50 | ASLPFGWLIV | L73; L69 | TSVDCTMYI | L70; L69; L73 |
| 867 | EVLSDRELH | L17 | ASLVLARKH | L55; L52 | TSVVLLSV | L48; L73; L59 |
| 868 | EVLSDRELHL | L10 | ASSSEAFL | L74; L73 | TTCCSLSHR | L17; L15; L19 |
| 869 | EVNEFACV | L20 | ASTDTCFANK | L7; L13 | TTCFSVAAL | L20; L68; L57 |
| 870 | EVPANSTV | L20 | ATALLTLQQ | L7; L18 | TTFTYASALW | L52; L10; L54 |
| 871 | EVPVSIINNTV | L20 | ATCDWTNAGDY | L14; L18 | TTIAKNTVK | L7; L19; L6 |
| 872 | EVQELYSPIF | L11 | ATCFSTASDTY | L18; L14 | TTIKPVTYKL | L20; L53; L11 |
| 873 | EVQELYSPIFL | L20 | ATEETFKLS | L1; L18 | TTLDSKTQSL | L10; L16; L8 |
| 874 | EVQGYKSVNI | L20 | ATEGALNTP | L42; L18 | TTLEETKF | L53; L54; L52 |
| 875 | EVQPQLEMEL | L20 | ATLVSDIDITF | L52; L53 | TTLNGLWL | L55; L61; L60 |
| 876 | EVRQIAPGQ | L11 | ATNNAMQV | L73; L70 | TTTLEETKF | L53; L52; L54 |
| 877 | EVRTIKVFT | L20 | ATNNLVVMA | L42; L69 | TTVDNINL | L20; L70; L60 |
| 878 | EVRTIKVFTTV | L20 | ATNVVIKVCEF | L52; L16 | TTYKLNVGDY | L14; L11; L10 |
| 879 | EVTGDSCNNYM | L11 | ATTAYANSV | L73; L70 | TVCTVCGMWK | L7; L6; L19 |
| 880 | EVTTTLEET | L10 | ATVAYFNMV | L73; L20 | TVEEAKTVLK | L19; L7; L6 |
| 881 | EVVDKYFD | L20 | ATVAYFNMVY | L14; L18 | TVELGTEV | L63; L68; L23 |
| 882 | EVVENPTI | L20 | ATVREVLSD | L65; L10 | TVFFDGRVD | L65; L55; L32 |
| 883 | EWKFYDAQP | L42 | AVAKHDFF | L74; L54 | TVMPLSAPTL | L20; L28; L32 |
| 884 | EYCRHGTCER | L17 | AVAKHDFFK | L7; L6 | TVNVLAWL | L62; L59; L23 |
| 885 | EYDYVIFT | L62 | AVANGDSEVVL | L44; L56 | TVQFCDAMR | L19; L21; L17 |
| 886 | EYDYVIFTQ | L17 | AVANGDSEVVL | L7; L6 | TVYDDGARRV | L16; L52; L10 |
| | | | K | | W | |
| 887 | EYFNSVCR | L17 | AVCRHHANEY | L18; L14 | TVYDPLQPE | L6; L43; L20 |
| 888 | EYRLYLDAY | L14 | AVDAAKAYK | L7; L6 | TVYSHLLLVA | L51; L3; L46 |
| 889 | EYTDFATSA | L17 | AVINGDRWFLN | L7; L15 | TVYTKVDGV | L3; L20; L11 |
| | | | R | | | |
| 890 | EYTFEKGDY | L14 | AVKMFDAY | L14; L26 | TWFSQRGGSY | L14; L10; L12 |
| 891 | EYVSQPFL | L9 | AVKTQFNYYK | L13; L7 | TWICLLQF | L8; L9; L59 |
| 892 | FAAYSRYR | L17 | AVKTQFNYYKK | L7; L13 | TYASALWEI | L9; L8; L64 |
| 893 | FAFACPDGVKH | L31 | AVLQSGFRK | L7; L6 | TYEGNSPF | L72; L71; L62 |
| 894 | FAKFLKTN | L70 | AVRDPQTLE | L13; L6 | TYICGFIQQ | L8; L17; L9 |
| 895 | FAKFLKTNC | L58 | AVSKGFFKE | L7; L24 | TYKLNVGDY | L14; L72; L71 |
| 896 | FAMMFVKH | L59 | AVVIPTKK | L7; L6 | TYLDGADVTK | L8; L9; L17 |
| 897 | FANKHADFD | L58 | AVVIPTKKA | L51; L46 | TYLEGSVRVV | L8; L72; L71 |
| 898 | FANKHADFDTW | L49 | AVVYRGTTTYK | L7; L6 | TYNKVENM | L71; L72; L62 |
| 899 | FASEAARVVR | L19 | AVYRINWI | L48; L24 | TYNLWNTFTR | L17; L15; L21 |
| 900 | FASFYYVWKSY | L31 | AWQPGVAMP | L42; L38 | TYRRLISM | L72; L71; L66 |
| 901 | FATSACVLAA | L50 | AYANRNRFLY | L12; L14 | VAALTNNVAF | L31; L52; L58 |
| 902 | FAVDAAKA | L50 | AYANRNRFLYI | L9; L8 | VAFNVVNKG | L69; L70; L47 |
| 903 | FAYANRNR | L17 | AYCNKTVGEL | L72; L71 | VAITRAKV | L70; L47; L48 |
| 904 | FAYANRNRFLY | L12 | AYIICIST | L71; L72 | VAKYTQLCQY | L43; L14; L58 |
| 905 | FAYANRNRFLYI | L47 | AYIICISTKHFY | L14; L40 | VANGDSEV | L70; L58; L63 |
| 906 | FAYTKRNVIPTI | L47 | AYITGGVV | L72; L71 | VAYESLRPD | L43; L49; L59 |
| 907 | FCAFAVDAA | L50 | AYKIEELFYSY | L14; L12 | VAYSNNSI | L47; L70; L68 |
| 908 | FCGKGYHL | L74 | AYNGYLTS | L65; L71 | VCTEIDPKL | L8; L9; L5 |
| 909 | FCLLNRYFR | L17 | AYNMMISA | L71; L72 | VDDPCPIHFY | L18; L1; L14 |
| 910 | FCSQHTML | L74 | AYNMMISAG | L72; L71 | VDILGPLSA | L46; L50; L51 |
| 911 | FDEDDSEPVL | L67 | AYNVTQAFGR | L15; L21 | VDYGARFY | L65; L14; L55 |
| 912 | FDEGNCDTL | L67 | AYPLTKHP | L72; L71 | VEGCMVQV | L45; L37; L33 |
| 913 | FDEISMATNY | L1 | AYPLTKHPN | L72; L71 | VEHVTFFI | L45; L33; L48 |
| 914 | FDKSAFVNL | L58 | AYRFNGIGV | L13; L72 | VEHVTFFIY | L29; L40; L41 |
| 915 | FDRDAAMQR | L17 | AYRKVLLR | L15; L17 | VEKKKLDGF | L33; L37; L29 |
| 916 | FDTRVLSNL | L74 | AYTRYVDNNF | L9; L8 | VELKHFFFA | L46; L42; L38 |
| 917 | FDVEGCHATR | L19 | AYVDNSSLT | L8; L9 | VEQDKNTQEV | L38; L45; L37 |
| 918 | FEEAALCTFL | L36 | AYWVPRAS | L71; L72 | VEQKIAEIP | L38; L42; L29 |
| 919 | FEHIVYGD | L33 | AYYFMRFRRA | L46; L42 | VESSSKLWA | L46; L38; L42 |
| 920 | FEKGDYGDA | L46 | AYYFMRFRRAF | L71; L72 | VETSNSFDV | L45; L38; L46 |
| 921 | FEKGDYGDAV | L45 | AYYNTTKGGRF | L8; L9 | VEWKFYDAQP | L46; L42; L38 |
| 922 | FELEDFIP | L38 | AYYRARAG | L71; L72 | VFAQVKQIY | L12; L14; L72 |
| 923 | FELLHAPA | L50 | AYYVGYLQPR | L15; L21 | VFCGVDAV | L71; L62; L72 |
| 924 | FELLHAPAT | L38 | CANGQVFGLY | L14; L12 | VFCTVNAL | L72; L71; L62 |
| 925 | FELTSMKY | L29 | CASLKELL | L23; L74 | VFDEISMATNY | L12; L18; L62 |
| 926 | FELTSMKYFV | L45 | CATVHTANKW | L54; L49 | VFHLYLQY | L71; L72; L12 |
| 927 | FELWAKRN | L29 | CAYWVPRA | L50; L47 | VFKNIDGY | L14; L71; L72 |
| 928 | FENKTTLP | L38 | CAYWVPRAS | L59; L69 | VFLFVAAI | L71; L72; L48 |
| 929 | FFASFYYV | L62 | CCDDDYFNK | L13; L7 | VFLLVTLAIL | L9; L62; L8 |
| 930 | FFDGRVDG | L62 | CCYDHVIST | L69; L43 | VFPLNSII | L62; L71; L72 |
| 931 | FFDGRVDGQ | L62 | CDNIKFAD | L65; L33 | VFPPTSFG | L62; L72; L71 |
| 932 | FFDGRVDGQV | L62 | CDVTDVTQL | L37; L33 | VFQSASKIITL | L72; L71; L8 |
| 933 | FFIYNKIV | L71 | CEEEEFEP | L38; L42 | VFQTRAGCL | L72; L71; L62 |
| 934 | FFSNYLKRR | L17 | CEEMLDNRA | L38; L42 | VFTTVDNINL | L9; L8; L72 |
| 935 | FFTLLLQLC | L12 | CEFQFCNDP | L46; L42 | VGSDNVTDF | L26; L9; L8 |
| 936 | FFYVLGLA | L62 | CEIVGGQI | L45; L48 | VHFVCNLL | L28; L34; L35 |
| 937 | FFYVLGLAAIM | L71 | CFSTQFAF | L72; L71 | VHFVCNLLL | L34; L28; L35 |
| 938 | FGADPIHSLR | L19 | CFTNVYADSF | L9; L72 | VHNQDVNL | L28; L34; L35 |
| 939 | FGDDTVIEVQ | L68 | CFVLAAVY | L72; L71 | VIAWNSNNL | L60; L74; L58 |
| 940 | FGDFIQTT | L68 | CFVLAAVYR | L17; L15 | VILRGHLRI | L24; L8; L48 |
| 941 | FGDFIQTTP | L68 | CGFIQQKL | L48; L25 | VINGDRWFLNR | L15; L21; L17 |
| 942 | FGGCVFSY | L66 | CGPDGYPL | L57; L66 | VIVFDGKSK | L7; L13; L43 |
| 943 | FGLFCLLNR | L17 | CHDGKAHF | L62; L63 | VKDCVVLHSY | L14; L18; L27 |
| 944 | FGLFCLLNRY | L12 | CIDCSARHI | L68; L63 | VKQGDDYVY | L27; L66; L14 |
| 945 | FGLVAEWF | L59 | CIKDLLAR | L17; L15 | VKRVDWTIEY | L43; L27; L26 |
| 946 | FGPLVRKIF | L57 | CLAYYFMRF | L12; L10 | VLAAECTIF | L26; L9; L74 |
| 947 | FGWLIVGVA | L50 | CLDDRCILH | L5; L18 | VLHSTQDLF | L9; L12; L26 |
| 948 | FHAIHVSGT | L28 | CLDDRCILHC | L18; L5 | VLHSYFTSDY | L43; L26; L14 |
| 949 | FHLVDFQVT | L35 | CLEASFNY | L1; L18 | VLITEGSVK | L6; L13; L7 |
| 950 | FHLVDFQVTI | L34 | CLEASFNYL | L5; L1 | VLKKCKSAF | L23; L43; L26 |
| 951 | FHQKLLKSI | L34 | CLLQFAYANR | L21; L15 | VLLFLAFVV | L4; L2; L24 |
| 952 | FHTPAFDKSAF | L28 | CLTPVYSF | L23; L26 | VLLILMTAR | L21; L15; L6 |
| 953 | FIASFRLFA | L69 | CMMCYKRNR | L15; L17 | VLLSVLQQLR | L21; L15; L6 |
| 954 | FIDTKRGVYC | L63 | CNIVNVSLV | L73; L48 | VLNNDYYRSL | L43; L57; L4 |
| 955 | FIEDLLEN | L1 | CNLLLLFV | L73; L48 | VLPNDDTL | L57; L5; L62 |
| 956 | FIETISLAGSY | L1 | CPAEIVDTVSA | L50; L51 | VLPNDDTLR | L21; L15; L5 |
| 957 | FISDEVARD | L3 | CPDGVKHVYQL | L32; L39 | VLPNDDTLRV | L5; L2; L57 |
| 958 | FISDEVARDL | L60 | CPFGEVENA | L50; L51 | VLPPLLTD | L57; L5; L43 |
| 959 | FISNSWLM | L58 | CPIFFITGNTL | L56; L22 | VLPQLEQPY | L12; L26; L57 |
| 960 | FISPYNSQN | L58 | CPIHFYSKW | L49; L10 | VLQAVGACV | L2; L5; L4 |
| 961 | FIYNKIVDE | L69 | CPLIAAVI | L47; L48 | VLQKAAITI | L4; L24; L2 |
| 962 | FKDQVILLN | L1 | CRFDTRVLS | L65; L30 | VLQVRDVLV | L2; L4; L5 |
| 963 | FKEELDKY | L1 | CRSKNPLL | L35; L66 | VLSFELLHA | L3; L2; L4 |
| 964 | FKEELDKYF | L27 | CSDKAYKI | L55; L63 | VLSTFISAA | L3; L2; L51 |
| 965 | FKELLVYAA | L50 | CSVIDLLL | L73; L74 | VLYQPPQTS | L43; L3; L24 |
| 966 | FKFVCDNIKF | L27 | CTCGKQATK | L7; L19 | VMCGGSLY | L18; L1; L14 |
| 967 | FKHLIPLM | L66 | CTEIDPKLDNY | L1; L18 | VMFLARGI | L48; L55; L47 |
| 968 | FKLASHMY | L27 | CTEIDPKLDNYY | L1; L18 | VPFWITIA | L50; L51; L47 |
| 969 | FKLNEEIAI | L44 | CTFEYVSQP | L11; L10 | VPNQPYPNA | L51; L50; L22 |
| 970 | FKLSYGIAT | L44 | CTFLLNKEM | L70; L69 | VPQADVEW | L56; L49; L39 |
| 971 | FKVNSTLEQY | L27 | CTVCGMWKGY | L10; L11 | VPVSIINNTV | L51; L50; L47 |
| 972 | FKVSIWNLDY | L12 | CVFSYVGCHNK | L7; L6 | VQIDRLITG | L26; L69; L27 |
| 973 | FKWDLTAFGL | L44 | CVLAAECTIFK | L7; L6 | VQLHNDILL | L44; L8; L34 |
| 974 | FKYWDQTYH | L27 | CVLSGHNLAK | L6; L7 | VQQESPFVM | L66; L35; L28 |
| 975 | FLAHIQWM | L74 | CVVADAVIK | L7; L19 | VQQLPETY | L26; L27; L48 |
| 976 | FLALITLA | L3 | CYFGLFCLLNR | L15; L17 | VQQLPETYF | L26; L27; L9 |
| 977 | FLALITLATC | L3 | CYKRNRATR | L17; L15 | VRAWIGFDV | L64; L30; L35 |
| 978 | FLAYILFTRFFY | L12 | CYNGSPSGV | L62; L72 | VRCSFYEDF | L66; L30; L34 |
| 979 | FLEGETLPTEV | L2 | CYNGSPSGVY | L14; L72 | VRETMSYLF | L9; L66; L34 |
| 980 | FLGIITTVAA | L2 | DAAMQRKL | L47; L70 | VRIKIVQM | L66; L35; L25 |
| 981 | FLGYFCTCY | L12 | DALFAYTKR | L17; L19 | VRTNVYLAV | L35; L64; L30 |
| 982 | FLIGCNYLG | L2 | DALNNIINN | L47; L17 | VSCLPFTI | L55; L48; L68 |
| 983 | FLIGCNYLGK | L6 | DALNNIINNAR | L17; L19 | VSDIDITFLK | L1; L18; L7 |
| 984 | FLKKDAPY | L43 | DAMMFTSDL | L25; L61 | VSDIDITFLKK | L18; L1; L7 |
| 985 | FLKTNCCRF | L43 | DANYFLCW | L49; L47 | VSDVGDSAE | L68; L1; L63 |
| 986 | FLLKYNENG | L2 | DAPYIVGDV | L47; L20 | VSGTNGTKR | L15; L19; L21 |
| 987 | FLLNKEMY | L12 | DAQSFLNR | L17; L19 | VSNGTHWFV | L73; L58; L70 |
| 988 | FLLNKEMYLK | L6 | DATPSDFVR | L19; L17 | VSTSGRWV | L48; L70; L55 |
| 989 | FLLPSLATVA | L2 | DAYPLTKHP | L47; L49 | VSWNLREML | L53; L16; L67 |
| 990 | FLLVTLAI | L59 | DDFTGCVIAW | L10; L29 | VTDFNAIAT | L68; L1; L18 |
| 991 | FLLVTLAILTA | L2 | DDPCPIHFY | L11; L29 | VTDTPKGPKV | L63; L1; L18 |
| 992 | FLMDLEGKQ | L2 | DDYQGKPLEF | L10; L49 | VTHSKGLY | L1; L14; L18 |
| 993 | FLMDLEGKQG | L2 | DEFTPFDV | L29; L25 | VTLLPAADL | L60; L61; L53 |
| 994 | FLNKVVST | L23 | DEFTPFDVVR | L29; L19 | VTMPLGYVT | L52; L55; L53 |
| 995 | FLNRVCGV | L3 | DEFTPFDVVRQ | L41; L29 | VTMPLGYVTH | L52; L53; L7 |
| 996 | FLPFAMGI | L57 | DELTGHMLD | L29; L25 | VTQLYLGGMSY | L1; L14; L18 |
| 997 | FLPFFSNVT | L57 | DEMIAQYTSA | L38; L42 | VTRDIASTD | L43; L55; L13 |
| 998 | FLPFFSNVTWF | L57 | DESGEFKL | L29; L37 | VTTEILPV | L73; L48; L70 |
| 999 | FLPGVYSVIYLY | L12 | DEVRQIAP | L29; L46 | VTVYSHLL | L60; L55; L70 |
| 1000 | FLRDGWEIVK | L13 | DEWSMATYYLF | L41; L40 | VVDADSKIV | L63; L5; L68 |
| 1001 | FLRDGWEIVKF | L43 | DFATSACVL | L72; L71 | VVDADSKIVQL | L68; L5; L63 |
| 1002 | FLVFLGIITT | L2 | DFLELAMDEF | L9; L8 | VVDDPCPI | L68; L63; L62 |
| 1003 | FLVLIMLI | L74 | DFLHFLPRV | L47; L4 | VVDDPCPIH | L63; L68; L5 |
| 1004 | FLWLLWPV | L2 | DFMSLSEQLR | L17; L19 | VVDYGARFYF | L1; L63; L12 |
| 1005 | FLWLLWPVT | L2 | DFTGCVIAW | L49; L10 | VVFDEISM | L69; L59; L58 |
| 1006 | FLYIIKLIFLW | L12 | DFVENPDIL | L62; L67 | VVFLLVTLA | L50; L51; L3 |
| 1007 | FMRFRRAF | L59 | DFVENPDILR | L17; L19 | VVFNGVSFSTF | L16; L26; L52 |
| 1008 | FMRIFTIGTV | L3 | DFVRATATI | L10; L8 | VVIPDYNTYK | L7; L6; L13 |
| 1009 | FNDGVYFAS | L68 | DGADVTKI | L47; L25 | VVKRHTFSNY | L14; L10; L26 |
| 1010 | FNICQAVTA | L50 | DGISQYSL | L23; L25 | VVLLILMTAR | L15; L21; L17 |
| 1011 | FNKWGKARLY | L14 | DGNAAISDY | L14; L29 | VVLSFELLH | L12; L7; L6 |
| 1012 | FNLVAMKYNY | L12 | DGYFKIYSK | L23; L19 | VVNAANVY | L26; L18; L14 |
| 1013 | FNPETNILLNV | L5 | DIAKKPTETI | L10; L11 | VVNARLRAK | L6; L7; L13 |
| 1014 | FNPPALQDAY | L12 | DIASTDTCF | L11; L10 | VVNPVMEPIY | L12; L14; L31 |
| 1015 | FNVAITRAKV | L20 | DILGPLSAQ | L10; L11 | VVNVVTTKI | L24; L49; L48 |
| 1016 | FNYLKSPNF | L59 | DILRVYANL | L10; L11 | VVPGLPGTI | L5; L57; L9 |
| 1017 | FPDLNGDV | L68 | DIPGIPKDM | L11; L57 | VVREFLTR | L15; L21; L17 |
| 1018 | FPFNKWGKAR | L50 | DIQLLKSAY | L14; L29 | VVRQCSGVTF | L26; L52; L53 |
| 1019 | FPFNKWGKARLY | L31 | DIVKTDGTL | L10; L11 | VVRSIFSR | L15; L21; L17 |
| 1020 | FPKSDGTGTI | L49 | DIYNDKVAGF | L11; L10 | VVRSIFSRTL | L13; L39; L55 |
| 1021 | FPLQSYGF | L31 | DKFPVLHDI | L47; L20 | VVYCPRHV | L48; L47; L64 |
| 1022 | FPLQSYGFQP | L50 | DKLQFTSL | L25; L23 | VVYCPRHVI | L16; L47; L39 |
| 1023 | FPNITNLC | L47 | DKVFRSSVL | L25; L44 | VYAADPAM | L71; L72; L66 |
| 1024 | FPNITNLCP | L50 | DLEGKQGNF | L11; L10 | VYANLGERV | L9; L8; L72 |
| 1025 | FPNTYLEG | L50 | DLGDELGTD | L10; L11 | VYCPRHVIC | L8; L66; L9 |
| 1026 | FPPTEPKKD | L49 | DLNDFVSDA | L3; L11 | VYDDGARRVW | L9; L62; L52 |
| 1027 | FPQSAPHGVVFL | L31 | DLNQLTGY | L11; L26 | VYDNKLKAH | L62; L71; L72 |
| 1028 | FPSGKVEG | L50 | DLQDLKWARF | L11; L10 | VYDYLVSTQEF | L8; L9; L62 |
| 1029 | FQEKDEDDNL | L34 | DLQELGKYEQY | L11; L10 | VYLAVFDKN | L9; L8; L12 |
| 1030 | FQQFGRDI | L48 | DLSVVNARL | L20; L4 | VYLKHGGGV | L72; L71; L8 |
| 1031 | FQSASKII | L48 | DLSVVNARLR | L19; L17 | VYLPYPDPS | L9; L72; L71 |
| 1032 | FQTRAGCLI | L24 | DLTKPYIKW | L10; L49 | VYMPASWV | L72; L71; L62 |
| 1033 | FQTVKPGNF | L58 | DLVYALRHF | L10; L11 | VYMPASWVMR | L15; L9; L21 |
| 1034 | FQVTIAEI | L48 | DLYDKLQFTSL | L10; L11 | VYPVASPNE | L9; L71; L72 |
| 1035 | FQVTIAEILL | L44 | DLYKLMGHF | L11; L10 | VYPVASPNEC | L72; L9; L71 |
| 1036 | FRIDGDMV | L35 | DMSKFPLKLR | L17; L19 | VYQLRARSV | L72; L71; L64 |
| 1037 | FRIDGDMVPH | L30 | DMVDTSLSGF | L10; L11 | VYSDVENPH | L72; L9; L71 |
| 1038 | FRIDGDMVPHI | L34 | DMVPHISRQ | L11; L10 | VYSVIYLYLTF | L9; L8; L12 |
| 1039 | FRKMAFPSG | L66 | DMVPHISRQR | L19; L17 | VYYGNALDQ | L71; L72; L8 |
| 1040 | FRLTLGVY | L66 | DNINLHTQV | L25; L20 | VYYHKNNKSW | L9; L8; L71 |
| 1041 | FRLTLGVYD | L30 | DNLLEILQK | L17; L7 | WAHGFELTSM | L58; L43; L59 |
| 1042 | FRRAFGEY | L66 | DPAQLPAPR | L19; L17 | WAKRNIKPV | L70; L58; L69 |
| 1043 | FRVQPTES | L66 | DPLQPELDSF | L31; L47 | WEVGKPRPP | L38; L46; L42 |
| 1044 | FRYMNSQGLL | L30 | DPLSETKCTL | L32; L23 | WFFSNYLKR | L17; L15; L19 |
| 1045 | FSALEPLVD | L69 | DPNFKDQV | L23; L47 | WFLAYILFTRF | L8; L12; L9 |
| 1046 | FSGYLKLTD | L65 | DQIGYYRRA | L11; L24 | WFLLLSVCL | L71; L72; L62 |
| 1047 | FSHSQLGGLHL | L60 | DQLTPTWRV | L24; L48 | WFLNRFTTTL | L71; L8; L72 |
| 1048 | FSLELQDH | L59 | DQLTPTWRVY | L27; L14 | WHHSIGFDY | L14; L12; L43 |
| 1049 | FSNVTWFHA | L50 | DRAMPNML | L25; L35 | WLDDDSQQT | L5; L2; L1 |
| 1050 | FSNVTWFHAI | L61 | DRDLYDKL | L25; L35 | WLDDDSQQTV | L5; L2; L24 |
| 1051 | FSNYLKRRVV | L73 | DRDLYDKLQF | L34; L35 | WLKQLIKVTL | L23; L3; L56 |
| 1052 | FSSLPSYAA | L50 | DRELHLSW | L25; L35 | WLPTGTLL | L57; L74; L62 |
| 1053 | FSSNVANYQK | L19 | DRLNQLESK | L30; L25 | WSYSGQSTQL | L60; L55; L53 |
| 1054 | FSYVGCHNK | L7 | DRVVFVLWA | L25; L35 | WVMRIMTW | L10; L54; L52 |
| 1055 | FTDGVCLFWN | L1 | DRYPANSIVC | L25; L35 | WWTAFVTNV | L20; L3; L64 |
| 1056 | FTEERLKLFD | L1 | DSAEVAVKMF | L10; L11 | YAADPAMHAA | L50; L67; L61 |
| 1057 | FTGNLQSNHDLY | L1 | DSGFAAYSR | L19; L17 | YAAVINGDRW | L52; L49; L54 |
| 1058 | FTIGTVTLKQ | L11 | DSIIIGGAK | L19; L11 | YACWHHSIG | L59; L69; L70 |
| 1059 | FTPLIQPI | L57 | DSIIIGGAKL | L20; L11 | YAFASEAAR | L19; L17; L31 |
| 1060 | FTPLIQPIGAL | L57 | DSSQGSEY | L1; L18 | YAFASEAARV | L20; L47; L58 |
| 1061 | FTRGVYYPDK | L13 | DSVEEVLSE | L10; L11 | YAKPFLNK | L13; L59; L70 |
| 1062 | FTRSTNSRIK | L13 | DSYFVVKR | L19; L17 | YAKPFLNKVV | L70; L69; L58 |
| 1063 | FTSDLATN | L59 | DTANPKTPKY | L11; L10 | YALRHFDEG | L67; L59; L61 |
| 1064 | FTVEKGIY | L1 | DTDFVNEFYAY | L1; L18 | YALVYFLQS | L59; L61; L47 |
| 1065 | FTYASALW | L54 | DTDLTKPY | L1; L18 | YANLGERVR | L17; L19; L32 |
| 1066 | FVCNLLLLFV | L20 | DTFNGECPNF | L10; L11 | YANRNRFLYI | L47; L49; L73 |
| 1067 | FVDDIVKTDGTL | L68 | DTGVEHVTFF | L10; L11 | YANSVENI | L47; L70; L49 |
| 1068 | FVDGVPFVVST | L68 | DTIANYAKP | L11; L10 | YATHSDKF | L58; L49; L54 |
| 1069 | FVDRQTAQ | L68 | DTIANYAKPF | L10; L11 | YCIPYNSV | L28; L47; L45 |
| 1070 | FVEIIKSQDL | L68 | DTLKEILVT | L10; L11 | YCQVHGNAH | L71; L72; L59 |
| 1071 | FVETVKGLD | L1 | DTLRVEAFEY | L12; L10 | YDDGARRV | L63; L33; L62 |
| 1072 | FVFLVLLP | L50 | DTPKGPKV | L11; L47 | YDFTEERL | L33; L65; L29 |
| 1073 | FVIRGDEV | L67 | DTPKGPKVK | L19; L11 | YDKLQFTSL | L23; L37; L33 |
| 1074 | FVLTSHTV | L47 | DTPKGPKVKY | L11; L10 | YDKLVSSF | L33; L43; L23 |
| 1075 | FVMMSAPPA | L50 | DTPNNTDFSR | L19; L17 | YDYLVSTQEF | L33; L43; L27 |
| 1076 | FVNLDNLRA | L50 | DTSLSGFKL | L20; L19 | YEDQDALF | L62; L33; L63 |
| 1077 | FVNLKQLPFFY | L12 | DTTDAVRDP | L11; L10 | YEKLKPVLD | L45; L46; L23 |
| 1078 | VNLKQLPFFYY | L12 | DTWFSQRGGSY | L11; L14 | YELKHGTF | L33; L29; L37 |
| 1079 | FVRATATI | L48 | DVDTDFVNEFY | L1; L18 | YENAFLPF | L29; L33; L59 |
| 1080 | FVSDADSTLI | L20 | DVEGCHATR | L19; L17 | YENAFLPFAM | L29; L36; L40 |
| 1081 | FVSEETGTLI | L20 | DVENPHLMGW | L10; L11 | YENQKLIA | L46; L38; L42 |
| 1082 | FVSGNCDVVI | L32 | DVFHLYLQYI | L20; L10 | YENQKLIANQF | L29; L40; L41 |
| 1083 | FVSLAIDA | L50 | DVNLHSSR | L17; L19 | YEQYIKWPWY | L41; L29; L40 |
| 1084 | FVSNGTHWFV | L20 | DVNLHSSRL | L11; L10 | YESLRPDTRY | L29; L40; L41 |
| 1085 | FVTDTPKGPKV | L20 | DVRETMSYL | L11; L10 | YEYGTEDDY | L29; L14; L27 |
| 1086 | FVTNVNASS | L20 | DVRETMSYLF | L11; L10 | YFAVHFISN | L71; L72; L46 |
| 1087 | FVVEVVDK | L19 | DVSFLAHIQW | L19; L10 | YFKNHTSPD | L71; L43; L72 |
| 1088 | FVVFLLVT | L59 | DVTQLYLGGM | L11; L10 | YFLCWHTNC | L71; L72; L8 |
| 1089 | FVVFLLVTLA | L50 | DVVECLKLS | L11; L10 | YFLCWHTNCY | L72; L71; L12 |
| 1090 | FVVKRHTFS | L74 | DVVECLKLSHQ | L10; L11 | YFNKKDWYDF | L8; L9; L12 |
| 1091 | FVVKRHTFSNY | L10 | DVVNQNAQA | L11; L20 | YFNSVCRL | L62; L71; L72 |
| 1092 | FVVPGLPG | L61 | DVVQEGVLTA | L11; L10 | YFNSVCRLM | L62; L71; L72 |
| 1093 | FVVPGLPGTILR | L19 | DVVQEGVLTAV | L11; L20 | YFSGAMDTTSY | L71; L72; L12 |
| 1094 | FVVSTGYHFREL | L60 | DVVRQCSGVTF | L11; L10 | YFTQSRNL | L71; L72; L62 |
| 1095 | FYDAQPCSD | L62 | DVVYRAFDIY | L10; L11 | YFVKIGPER | L17; L19; L8 |
| 1096 | FYDFAVSKGFF | L62 | DWYDFVEN | L25; L29 | YFYTSKTTVA | L71; L72; L46 |
| 1097 | FYFYTSKT | L71 | DYDCVSFCY | L12; L1 | YFYYLGTGP | L72; L71; L46 |
| 1098 | FYGPFVDRQ | L66 | DYIATNGPL | L72; L71 | YHFRELGV | L28; L35; L48 |
| 1099 | FYILPSIISN | L72 | DYIINLII | L47; L25 | YHNESGLKT | L28; L35; L34 |
| 1100 | FYKENSYTTTI | L9 | DYPKCDRAM | L72; L71 | YHNESGLKTI | L34; L28; L35 |
| 1101 | FYKGVITHD | L66 | DYTEISFM | L72; L62 | YIATNGPLK | L6; L7; L19 |
| 1102 | FYLTNDVS | L71 | DYTEISFMLW | L9; L8 | YIDINGNLHP | L1; L68; L18 |
| 1103 | FYPPDEDEEE | L66 | DYVYNPFMI | L8; L9 | YILFTRFFY | L12; L14; L1 |
| 1104 | FYSKWYIR | L17 | EAALCTFLL | L20; L74 | YKHYTPSF | L66; L27; L59 |
| 1105 | FYSYATHSDKF | L9 | EAANFCALIL | L69; L20 | YKIEELFY | L27; L66; L12 |
| 1106 | FYVYSRVK | L71 | EAEVQIDRL | L32; L63 | YKKDNSYF | L58; L27; L66 |
| 1107 | GAAAYYVGYL | L74 | EAGVCVSTSGR | L19; L17 | YKLNVGDYF | L27; L9; L12 |
| 1108 | GAALQIPFA | L50 | EAMYTPHTVL | L67; L32 | YKQFDTYNL | L44; L66; L34 |
| 1109 | GADLKSFD | L63 | EAPFLYLYAL | L57; L20 | YLALYNKYKY | L12; L1; L14 |
| 1110 | GADVTKIKP | L63 | EAPLVGTPV | L57; L20 | YLCFLAFLLF | L12; L9; L1 |
| 1111 | GAISSVLND | L49 | EASKKPRQK | L19; L17 | YLFDESGEFK | L6; L2; L13 |
| 1112 | GAISSVLNDIL | L67 | EASKKPRQKR | L17; L19 | YLFDESGEFKL | L2; L4; L5 |
| 1113 | GALDISASI | L44 | EAVKTQFNYY | L11; L10 | YLKRRVVF | L23; L26; L27 |
| 1114 | GATTCGYL | L74 | EAVMYMGTL | L10; L61 | YLKSPNFSK | L13; L6; L43 |
| 1115 | GAVILRGHLR | L19 | ECFDKFKV | L20; L24 | YLKSPNFSKL | L3; L10; L5 |
| 1116 | GAWNIGEQKS | L24 | ECPNFVFPL | L57; L20 | YLPQNAVVKI | L5; L3; L2 |
| 1117 | GCDVTDVTQL | L34 | ECVLGQSKR | L19; L17 | YLTNDVSF | L43; L26; L74 |
| 1118 | GCDVTDVTQLY | L18 | EDLLFNKV | L33; L48 | YLVSTQEFRY | L12; L14; L1 |
| 1119 | GCINANQV | L48 | EEAIRHVR | L29; L42 | YMPASWVM | L57; L66; L71 |
| 1120 | GCVPLNII | L48 | EEAKTVLKKC | L41; L40 | YNDKVAGF | L62; L33; L63 |
| 1121 | GCVPLNIIPL | L44 | EEEEFEPSTQY | L41; L40 | YNGSPSGVY | L65; L14; L12 |
| 1122 | GDAALALL | L33 | EEEFEPSTQY | L41; L40 | YPDKVFRSS | L32; L49; L39 |
| 1123 | GDAALALLL | L40 | EEFEPSTQYE | L41; L40 | YPDKVFRSSV | L32; L22; L39 |
| 1124 | GDCEEEEF | L33 | EEGDCEEEEF | L40; L41 | YPKLQSSQA | L51; L50; L22 |
| 1125 | GDELGTDPY | L18 | EEIAIILASFS | L40; L41 | YPNMFITR | L50; L17; L47 |
| 1126 | GDELKINAA | L46 | EELDKYFKNH | L41; L40 | YPNMFITRE | L49; L32; L50 |
| 1127 | GDFIQTTP | L65 | EELFYSYAT | L42; L40 | YQIGGYTEKW | L49; L10; L24 |
| 1128 | GDFLHFLP | L33 | EELKKLLEQW | L40; L41 | YQPPQTSI | L48; L24; L57 |
| 1129 | GDFLHFLPR | L7 | EESSAKSA | L42; L38 | YQVNGYPNM | L58; L28; L61 |
| 1130 | GDFLHFLPRV | L33 | EESSAKSASV | L42; L38 | YQVNGYPNMF | L34; L27; L58 |
| 1131 | GDFVKATC | L33 | EESSAKSASVY | L41; L40 | YRENGIGV | L25; L35; L64 |
| 1132 | GDIAARDL | L37 | EETFKLSYGI | L40; L41 | YRENGIGVTQ | L30; L35; L34 |
| 1133 | GDMVPHISR | L15 | EETGLLMP | L42; L46 | YRVVVLSFEL | L66; L30; L35 |
| 1134 | GDQFKHLI | L33 | EETKFLTENL | L41; L40 | YSGVVTTV | L48; L73; L70 |
| 1135 | GDSAEVAV | L33 | EETRKLMP | L42; L46 | YSVIYLYLTF | L52; L54; L10 |
| 1136 | GDSCNNYM | L33 | EETRKLMPV | L42; L45 | YTDFATSA | L1; L68; L63 |
| 1137 | GDSEVVLK | L33 | EEVLSEARQ | L41; L40 | YTEISFML | L1; L68; L60 |
| 1138 | GDSEVVLKKL | L37 | EEVLSEARQHL | L40; L41 | YTERSEKSY | L1; L18; L14 |
| 1139 | GDSVEEVL | L33 | EEVQELYSPI | L41; L40 | YTRYVDNNF | L53; L52; L58 |
| 1140 | GDVRETMSY | L27 | EEVQELYSPIF | L40; L41 | YTSNPTTFHL | L20; L60; L61 |
| 1141 | GDVVQEGV | L33 | EEVTTTLEETKF | L40; L41 | YVMHANYIF | L58; L12; L31 |
| 1142 | GDYFVLTSH | L43 | EEVVLKTGDL | L41; L40 | YVPAQEKNF | L5; L10; L12 |
| 1143 | GEGSEGLNDNL | L36 | EFEPSTQYEY | L12; L1 | YVRITGLY | L1; L14; L26 |
| 1144 | GEGSEGLNDNLL | L36 | EFGATSAAL | L72; L71 | YVRNLQHRLY | L12; L14; L13 |
| 1145 | GEIPVAYR | L45 | EFIERYKLEGY | L11; L10 | YVVDDPCPI | L20; L67; L49 |
| 1146 | GEQKSILSPL | L36 | EFLRDGWEI | L8; L9 | YVVDDPCPIHFY | L11; L14; L12 |
| 1147 | GETFVTHSKGL | L36 | EFTPFDVVR | L17; L19 | YVWKSYVHVV | L2; L5; L3 |
| 1148 | GETLPTEVLT | L36 | EFVFKNIDGY | L11; L10 | YVYNPFMID | L61; L60; L59 |
| 1149 | GEVFNATR | L45 | EFYEAMYTP | L42; L8 | YWVPRASA | L50; L46; L51 |
| 1150 | GEVPVSIINNTV | L36 | EGYAFEHI | L48; L47 | YYFMRFRRAF | L71; L72; L9 |
| 1151 | GEYSHVVAFNTL | L36 | EGYAFEHIV | L48; L47 | YYKKDNSY | L66; L72; L71 |
| 1152 | GEYTFEKGDY | L41 | EHEHEIAW | L35; L28 | YYRRATRRI | L8; L48; L9 |
| 1153 | GFDVEGCH | L62 | EHSWNADL | L35; L28 | YYSDSPCES | L66; L72; L9 |
| 1154 | GFDYVYNP | L62 | EHSWNADLYKL | L34; L35 | AACRKVQHM | L70; L69; L58; |
| | | | | | | L63 |
| 1155 | GFDYVYNPF | L62 | EIAWYTER | L17; L19 | AADLDDESK | L68; L7; L63; L18 |
| 1156 | GFDYVYNPFM | L62 | EIKDATPSDF | L10; L11 | AAFATAQEAY | L31; L27; L14; |
| | | | | | | L21 |
| 1157 | GFFKEGSSVEL | L44 | EIKESVQTFF | L10; L11 | AAIFYLITP | L69; L42; L38; |
| | | | | | | L46 |
| 1158 | GFLFLTWI | L48 | EILGTVSWNLR | L19; L17 | AAKAYKDY | L43; L70; L58; |
| | | | | | | L14 |
| 1159 | GFQPTNGV | L48 | EILLIIMR | L17; L19 | AAKKNNLPF | L58; L43; L70; |
| | | | | | | L52 |
| 1160 | GFSALEPL | L72 | EIPKEEVKPF | L10; L11 | AARVVRSI | L48; L55; L70; |
| | | | | | | L47 |
| 1161 | GFSTGVNLV | L64 | EIPVAYRKV | L11; L10 | AATRGATVV | L69; L70; L58; |
| | | | | | | L24 |
| 1162 | GFTLKNTV | L48 | EITVATSR | L17; L19 | AAVDALCEK | L7; L19; L67; L69 |
| 1163 | GGAYTRYV | L48 | EIVDTVSALV | L20; L11 | ADAVIKTL | L33; L37; L25; |
| | | | | | | L23 |
| 1164 | GGDGKMKDL | L63 | EIVDTVSALVY | L11; L10 | ADFDTWFSQR | L15; L21; L7; L19 |
| 1165 | GGFNFSQI | L48 | EIYQAGSTP | L10; L11 | ADSKIVQL | L33; L37; L56; |
| | | | | | | L65 |
| 1166 | GGIVAIVV | L48 | EKFKEGVEFL | L44; L20 | AEAELAKNVSL | L36; L41; L40; |
| | | | | | | L37 |
| 1167 | GGIVAIVVT | L44 | ELAMDEFIERY | L11; L10 | AECTIFKDA | L42; L46; L38; |
| | | | | | | L40 |
| 1168 | GGKIVNNWL | L44 | ELGDVRETMSY | L10; L11 | AEILLIIMRTF | L41; L40; L37; |
| | | | | | | L29 |
| 1169 | GGKPCIKV | L48 | ELKFNPPAL | L23; L3 | AEIRASANLA | L38; L42; L46; |
| | | | | | | L40 |
| 1170 | GGNYNYLYR | L15 | ELKKLLEQW | L10; L11 | AESHVDTDL | L36; L37; L41; |
| | | | | | | L40 |
| 1171 | GGQPITNCV | L48 | ELLQNGMNGR | L17; L19 | AEWFLAYI | L45; L33; L48; |
| | | | | | | L37 |
| 1172 | GGRFVLALL | L44 | ELSPVALRQ | L24; L20 | AFATAQEAY | L72; L71; L12; |
| | | | | | | L14 |
| 1173 | GGSVAIKI | L48 | ELSRVLGLK | L19; L6 | AFAVDAAKAY | L14; L72; L71; |
| | | | | | | L12 |
| 1174 | GGTTEMLAK | L7 | ELTGHMLDMY | L11; L10 | AFEKMVSL | L62; L72; L71; |
| | | | | | | 3L6 |
| 1175 | GGVAGALNK | L7 | ELYHYQECV | L24; L20 | AFLPFAMGI | L71; L72; L8; L9 |
| 1176 | GHFAWWTA | L28 | ENFNQHEV | L48; L20 | AFNTLLFL | L62; L71; L72; |
| | | | | | | L73 |
| 1177 | GHFAWWTAFV | L28 | EPEEHVQI | L49; L25 | AFYILPSI | L48; L71; L72; |
| | | | | | | 7L4 |
| 1178 | GHHLGRCDI | L34 | EPKLGSLV | L23; L51 | AGNGGDAAL | L44; L57; L56; |
| | | | | | | L61 |
| 1179 | GHMLDMYSVM | L28 | EPKLGSLVVR | L17; L19 | AGSKSPIQY | L26; L27; L14; |
| | | | | | | L18 |
| 1180 | GHMLDMYSVML | L28 | EPTTTTSV | L23; L50 | AGTDTTITV | L24; L69; L48; L2 |
| 1181 | GHSMQNCV | L28 | EQLDFIDTK | L24; L7 | AHISTIGVC | L35; L28; L34; |
| | | | | | | L72 |
| 1182 | GHSMQNCVLKL | L28 | ERFVSLAI | L25; L35 | AHSCNVNRF | L34; L35; L28; |
| | | | | | | L27 |
| 1183 | GHTDLMAA | L28 | ERHSLSHFV | L35; L64 | AIDAYPLTK | L6; L7; L18; L68 |
| 1184 | GHTDLMAAYV | L28 | ERIDKVLNE | L30; L35 | AIMTRCLAV | L23; L73; L3; L4 |
| 1185 | GHVETFYPK | L7 | ERIDKVLNEK | L30; L11 | AISDYDYY | L14; L18; L1; L58 |
| 1186 | GHVMVELV | L28 | ESELVIGAV | L20; L1 | AISDYDYYRY | L12; L14; L18; |
| | | | | | | L16 |
| 1187 | GIDLDEWSMATY | L18 | ESIVRFPNI | L48; L20 | ALALLLLDR | L21; L6; L7; L15 |
| 1188 | GIKIQEGVVDY | L26 | ESLRPDTRY | L11; L14 | ALCEKALKYL | L3; L2; L4; L5 |
| 1189 | GIPKDMTY | L26 | ETAHSCNVNRF | L11; L10 | ALDQAISM | L63; L68; L62; |
| | | | | | | L18 |
| 1190 | GIVAIVVTC | L19 | ETAQNSVR | L17; L19 | ALLKTVQF | L26; L27; L33; |
| | | | | | | L74 |
| 1191 | GIVNNTVY | L26 | ETFVTHSK | L19; L17 | ALNHTKKWKY | L14; L12; L18; |
| | | | | | | L16 |
| 1192 | GIYQTSNF | L26 | ETFVTHSKGL | L10; L20 | ALNLGETFV | L2; L4; L24; L3 |
| 1193 | GKASCTLSE | L44 | ETFYPKLQSS | L20; L10 | ALYYPSARI | L24; L45; L2; L3 |
| 1194 | GKASCTLSEQL | L44 | ETICAPLTVF | L10; L11 | AMDEFIER | L15; L21; L62; |
| | | | | | | L68 |
| 1195 | GKFCLEASFNY | L27 | ETKDVVECLKL | L11; L10 | ANGQVFGLY | L14; L12; L18; |
| | | | | | | L40 |
| 1196 | GKGYHLMSF | L27 | ETLVTMPLGY | L11; L12 | APAHISTIGV | L56; L22; L51; |
| | | | | | | L39 |
| 1197 | GKIADYNY | L27 | ETMSYLFQHA | L20; L10 | APHGHVMVEL | L56; L39; L22; |
| | | | | | | L32 |
| 1198 | GKIADYNYKL | L44 | ETNILLNV | L48; L73 | APPAQYEL | L56; L39; L22; |
| | | | | | | L66 |
| 1199 | GKIQDSLSS | L27 | ETQALPQR | L17; L19 | AQNSVRVLQK | L7; L6; L13; L24 |
| 1200 | GKIQDSLSST | L27 | ETSWQTGDF | L11; L10 | AQYTSALL | L28; L48; L44; |
| | | | | | | L27 |
| 1201 | GKIVNNWL | L44 | ETVKGLDY | L11; L1 | ARDGCVPL | L35; L66; L63; |
| | | | | | | L68 |
| 1202 | GKIVNNWLKQL | L44 | ETVKGLDYKAF | L10; L11 | ARDLSLQF | L35; L33; L65; |
| | | | | | | L62 |
| 1203 | GKMKDLSPRWY | L27 | ETYFTQSR | L17; L19 | ARHINAQVA | L35; L25; L46; |
| | | | | | | L28 |
| 1204 | GKPCIKVAT | L44 | EVAVKMFDAY | L10; L11 | ARNGVLITE | L30; L65; L66; |
| | | | | | | L35 |
| 1205 | GKPREQIDGY | L27 | EVEKGVLPQL | L11; L20 | ARTRSMWSF | L66; L30; L35; |
| | | | | | | 4L3 |
| 1206 | GKPVPYCY | L66 | EVFNATRFA | L20; L11 | ASAVVLLI | L73; L48; L55; |
| | | | | | | L24 |
| 1207 | GKSHFAIGL | L44 | EVGFVVPGL | L20; L11 | ASFRLFARTR | L15; L19; L21; |
| | | | | | | L55 |
| 1208 | GKVEGCMVQ | L27 | EVGHTDLMAAY | L11; L10 | ASFYYVWKSY | L43; L16; L14; |
| | | | | | | 2L5 |
| 1209 | GKVEGCMVQV | L27 | EVITFDNL | L20; L74 | ASKKPRQKR | L15; L13; L21; |
| | | | | | | L17 |
| 1210 | GKYEQYIKWP | L27 | EVITFDNLKTL | L10; L11 | ASMPTTIAK | L7; L6; L13; L43 |
| 1211 | GKYEQYIKWPW | L27 | EVKPFITESK | L11; L10 | ASSSEAFLI | L55; L24; L53; |
| | Y | | | | | L54 |
| 1212 | GKYVQIPTTC | L27 | EVLSDREL | L23; L55 | ATAEAELAK | L7; L6; L19; L13 |
| 1213 | GLAAIMQLFF | L12 | EVLSEARQHL | L10; L20 | ATCELYHY | L18; L1; L14; L54 |
| 1214 | GLCVDIPGIPK | L6 | EVNEFACVV | L20; L11 | ATEETFKL | L63; L1; L18; L68 |
| 1215 | GLFCLLNRYF | L12 | EVNSFSGYLKL | L11; L10 | ATLQAIASEF | L52; L53; L16; |
| | | | | | | L10 |
| 1216 | GLHLLIGL | L23 | EVPANSTVLSF | L11; L10 | ATNGPLKV | L73; L70; L48; |
| | | | | | | L24 |
| 1217 | GLHLLIGLA | L24 | EVPVAIHAD | L10; L11 | ATNNLVVM | L70; L73; L59; |
| | | | | | | L58 |
| 1218 | GLHLLIGLAK | L6 | EVPVSIINN | L17; L11 | ATNYDLSVV | L73; L70; L58; |
| | | | | | | L18 |
| 1219 | GLHPTQAP | L43 | EVQIDRLITGR | L17; L19 | ATRFASVY | L18; L14; L26; L1 |
| 1220 | GLKTILRKG | L3 | EVTPSGTW | L10; L54 | ATRGATVVI | L53; L70; L52; |
| | | | | | | L10 |
| 1221 | GLKTLATHGL | L3 | EVTPSGTWLTY | L11; L10 | ATSRTLSY | L18; L1; L54; L14 |
| 1222 | GLLMPLKAPK | L6 | EVVDKYFDCY | L10; L11 | AVDALCEKAL | L68; L5; L67; L63 |
| 1223 | GLMWLSYF | L26 | EVVENPTIQ | L11; L20 | AYANRNRF | L9; L71; L72; L8 |
| 1224 | GLNGYTVEE | L2 | EWFLAYILFTR | L17; L19 | AYANSVENI | L9; L8; L72; L34 |
| 1225 | GLPGTILR | L21 | EWSMATYYLF | L9; L8 | AYFNMVYM | L71; L72; L62; |
| | | | | | | L66 |
| 1226 | GLTGTGVL | L74 | EYCPIFFI | L9; L8 | AYFNMVYMP | L42; L71; L66; |
| | | | | | | L72 |
| 1227 | GLTGTGVLT | L2 | EYHDVRVVLDF | L8; L9 | AYIICISTK | L13; L72; L7; L71 |
| 1228 | GLVAEWFL | L74 | EYHNESGL | L71; L72 | AYIICISTKHF | L8; L9; L72; L40 |
| 1229 | GLVAEWFLA | L2 | EYKGPITDV | L17; L11 | AYITGGVVQ | L71; L72; L8; L9 |
| 1230 | GLWLDDVVYC | L2 | EYSHVVAFNTL | L8; L9 | AYNGYLTSS | L72; L71; L15; L8 |
| 1231 | GLYRKCVKS | L24 | EYYHTTDPSF | L9; L8 | AYSNNSIAI | L72; L9; L71; L8 |
| 1232 | GLYRKCVKSR | L21 | FADDLNQLTG | L67; L68 | AYVDNSSLTI | L8; L9; L71; L72 |
| 1233 | GMSRIGMEV | L24 | FALTCFSTQ | L59; L61 | AYVNTFSSTF | L8; L9; L71; L72 |
| 1234 | GMVLGSLAA | L46 | FAMGIIAMSA | L50; L61 | AYYFMRFRR | L15; L17; L21; |
| | | | | | | L12 |
| 1235 | GNAAISDYDY | L12 | FASTEKSNI | L49; L70 | CCNIVNVSL | L56; L44; L32; |
| | | | | | | L35 |
| 1236 | GNCDVVIGI | L24 | FATSACVLA | L50; L69 | CEFCGTENL | L37; L36; L29; |
| | | | | | | L45 |
| 1237 | GNFGDQEL | L65 | FCDLKGKY | L1; L18 | CFSTASDTY | L14; L72; L71; |
| | | | | | | L12 |
| 1238 | GNFKVTKGK | L13 | FCLEASFNY | L12; L31 | CLHVVGPNV | L2; L24; L4; L5 |
| 1239 | GNFYGPFV | L48 | FCNDPFLGVYY | L31; L12 | CLVGLMWLSY | L12; L16; L10; |
| | | | | | | L11 |
| 1240 | GNFYGPFVD | L65 | FDAYVNTF | L33; L29 | CSNLLLQY | L18; L59; L1; L48 |
| 1241 | GNVQLRVI | L48 | FDESGEFKL | L32; L63 | CTSVVLLSV | L73; L20; L69; |
| | | | | | | L70 |
| 1242 | GPDGYPLEC | L49 | FEKMVSLL | L33; L23 | CVDIPGIPK | L7; L6; L13; L68 |
| 1243 | GPEAGLPY | L18 | FEKMVSLLSV | L45; L46 | CVPLNIIPL | L57; L5; L74; L64 |
| 1244 | GPEQTQGNF | L49 | FELDERIDKVL | L40; L41 | CVRGTTVLL | L74; L58; L13; |
| | | | | | | L56 |
| 1245 | GPITDVFYK | L7 | FERDISTEIY | L43; L29 | CYLATALL | L71; L72; L9; L62 |
| 1246 | GPKQASLNGV | L51 | FEYYHTTD | L25; L45 | CYLATALLTL | L8; L9; L71; L72 |
| 1247 | GPKQASLNGVTL | L56 | FFGMSRIGM | L72; L71 | CYTPSKLIEY | L12; L72; L66; |
| | | | | | | L71 |
| 1248 | GPKVKYLY | L23 | FFITGNTLQ | L71; L72 | DAAKAYKDY | L10; L11; L58; |
| | | | | | | L49 |
| 1249 | GPLKVGGSCV | L51 | FFITGNTLQC | L71; L72 | DAYNMMISA | L47; L50; L25; |
| | | | | | | L69 |
| 1250 | GPLKVGGSCVL | L56 | FFIYNKIVD | L72; L71 | DDTLRVEAF | L33; L29; L23; |
| | | | | | | L25 |
| 1251 | GPLVRKIF | L23 | FFKEGSSVE | L71; L72 | DEDDNLIDSY | L29; L41; L40; L1 |
| 1252 | GPNVNKGED | L49 | FFLYENAFLPF | L12; L8 | DEFSSNVAN | L29; L46; L25; |
| | | | | | | L41 |
| 1253 | GQAITVTP | L48 | FFYYSDSP | L71; L72 | DEISMATNY | L29; L41; L11; |
| | | | | | | L40 |
| 1254 | GQINDMILS | L24 | FFYYSDSPC | L71; L72 | DELTGHML | L25; L29; L23; |
| | | | | | | L37 |
| 1255 | GQIVTCAKE | L24 | FGAGAALQI | L64; L47 | DEPTTTTSV | L45; L29; L57; |
| | | | | | | L37 |
| 1256 | GQKTYERHSL | L44 | FGATSAAL | L61; L59 | DFMSLSEQL | L8; L71; L9; L72 |
| 1257 | GQQDGSEDN | L24 | FGLVAEWFL | L61; L44 | DISGINASV | L20; L11; L28; |
| | | | | | | L19 |
| 1258 | GQQGEVPV | L24 | FHPLADNKF | L34; L62 | DIVEEAKKV | L11; L10; L20; |
| | | | | | | L24 |
| 1259 | GQQGEVPVS | L24 | FIAGLIAIVMV | L20; L2 | DKFKVNSTL | L44; L25; L27; |
| | | | | | | L35 |
| 1260 | GQQGEVPVSI | L24 | FIDTKRGV | L63; L68 | DKVAGFAKF | L10; L11; L27; |
| | | | | | | L29 |
| 1261 | GQQQQGQTVTK | L7 | FIEDLLFNKV | L5; L20 | DLKGKYVQI | L23; L10; L11; L3 |
| 1262 | GQQQTTLKG | L24 | FIERYKLEGY | L1; L18 | DLPQGFSAL | L57; L10; L11; L5 |
| 1263 | GQSTQLGIEFL | L44 | FIKGLNNLNR | L17; L21 | DLQDLKWAR | L17; L19; L21; |
| | | | | | | L15 |
| 1264 | GQTFSVLAC | L24 | FIPMDSTV | L57; L5 | DLQELGKY | L14; L11; L1; L10 |
| 1265 | GQTFSVLACY | L14 | FISDEVAR | L19; L17 | DLSPRWYFYY | L11; L12; L1; L18 |
| 1266 | GQTGKIADYNY | L14 | FISNSWLMW | L49; L69 | DLYDKLQF | L23; L11; L43; |
| | | | | | | L25 |
| 1267 | GQTVTKKS | L48 | FITGNTLQC | L60; L58 | DLYDKLQFT | L11; L2; L3; L10 |
| 1268 | GQVDLFRN | L24 | FITLCFTLK | L6; L7 | DMILSLLSK | L6; L19; L17; L7 |
| 1269 | GQVDLFRNAR | L15 | FIYNKIVD | L43; L23 | DNLKTLLSL | L25; L23; L8; L73 |
| 1270 | GQVFGLYKN | L24 | FKESPFEL | L66; L68 | DPCPIHFY | L49; L29; L31; |
| | | | | | | L47 |
| 1271 | GRCDIKDLPK | L30 | FKKGAKLL | L66; L64 | DPFLGVYY | L31; L29; L47; |
| | | | | | | L49 |
| 1272 | GRDIADTTD | L34 | FKLKDCVMY | L27; L31 | DPIHSLRVC | L47; L32; L49; |
| | | | | | | L31 |
| 1273 | GRFVLALLS | L30 | FKLVNKFLAL | L61; L44 | DPNFKDQVIL | L39; L32; L56; |
| | | | | | | L23 |
| 1274 | GRFVLALLSD | L30 | FKNLREFVF | L66; L27 | DPSFLGRYM | L31; L32; L49; |
| | | | | | | L22 |
| 1275 | GRLIIREN | L65 | FKYWDQTY | L27; L66 | DPVGFTLKN | L49; L11; L47; |
| | | | | | | L32 |
| 1276 | GRLIIRENN | L30 | FLALITLAT | L2; L3 | DQAISMWAL | L25; L44; L35; |
| | | | | | | L28 |
| 1277 | GRLIIRENNR | L30 | FLAYILFTRF | L12; L10 | DSNGTITV | L48; L47; L70; |
| | | | | | | L73 |
| 1278 | GRLQSLQTYV | L30 | FLEYHDVRVV | L3; L2 | DTDFVNEF | L62; L1; L68; L63 |
| 1279 | GRSGETLGVLV | L30 | FLGIITTVA | L2; L3 | DTTEAFEKM | L11; L10; L29; |
| | | | | | | L20 |
| 1280 | GRTIAFGGC | L30 | FLKKDAPYI | L2; L3 | DTTITVNVL | L10; L25; L35; |
| | | | | | | L11 |
| 1281 | GRTILGSALL | L30 | FLKKDAPYIV | L3; L2 | DTVSALVYD | L11; L20; L19; |
| | | | | | | L17 |
| 1282 | GRVDGQVD | L65 | FLKRGDKSV | L3; L2 | DTYNLWNTFTR | L19; L17; L21; L7 |
| 1283 | GRVDGQVDLFR | L30 | FLLNKEMYLKL | L4; L2 | DVDTDFVNEF | L10; L11; L68; |
| | | | | | | L49 |
| 1284 | GRWVLNNDY | L30 | FLLPSLATVAY | L12; L31 | DVKCTSVVL | L23; L10; L11; |
| | | | | | | L39 |
| 1285 | GRWVLNNDYY | L30 | FLNRVCGVSA | L2; L50 | DYFNKKDWY | L72; L12; L14; |
| | | | | | | L71 |
| 1286 | GRWVLNNDYYR | L30 | FLPFAMGII | L57; L5 | DYFVLTSH | L71; L25; L72; |
| | | | | | | L17 |
| 1287 | GRYMSALNH | L30 | FLPFFSNV | L57; L5 | DYGDAVVYR | L17; L19; L15; |
| | | | | | | L21 |
| 1288 | GRYMSALNHT | L30 | FLPFFSNVTW | L57; L5 | EAANFCAL | L67; L59; L61; |
| | | | | | | L20 |
| 1289 | GRYMSALNHTK | L30 | FLTWICLLQF | L12; L5 | EDQDALFAY | L40; L10; L14; |
| | | | | | | L29 |
| 1290 | GSCGSVGF | L54 | FLVFLGIITTV | L2; L3 | EEAALCTFL | L41; L40; L36; |
| | | | | | | L20 |
| 1291 | GSEGLNDNL | L1 | FLVLIMLII | L69; L67 | EEAALCTFLL | L41; L40; L42; |
| | | | | | | L20 |
| 1292 | GSEYDYVIF | L53 | FLVLIMLIIF | L74; L69 | EEAKTVLKK | L42; L19; L41; |
| | | | | | | L40 |
| 1293 | GSGVPVVD | L65 | FLYENAFLPFA | L2; L3 | EEEQEEDWL | L36; L41; L40; |
| | | | | | | L34 |
| 1294 | GSIHLYFDK | L7 | FMGRIRSV | L48; L64 | EEHFIETI | L45; L29; L48; |
| | | | | | | L37 |
| 1295 | GSLIYSTAA | L46 | FNGECPNFV | L73; L64 | EEKFKEGVEF | L40; L41; L42; |
| | | | | | | L37 |
| 1296 | GSLVVRCSFY | L14 | FNGVSFSTF | L59; L9 | EELDKYFKN | L41; L40; L29; |
| | | | | | | L42 |
| 1297 | GSLYVNKHAF | L52 | FNQHEVLL | L62; L74 | EELKKLLEQ | L42; L41; L40; |
| | | | | | | L46 |
| 1298 | GSNVFQTR | L15 | FNVLFSTV | L47; L48 | EEMLDNRATL | L40; L41; L36; |
| | | | | | | L42 |
| 1299 | GSRGGSQAS | L43 | FNVPMEKL | L67; L74 | EETKFLTEN | L42; L46; L29; |
| | | | | | | L45 |
| 1300 | GSSVELKHFF | L52 | FPDLNGDVVA | L50; L32 | EEVVLKTGD | L41; L42; L46; |
| | | | | | | L40 |
| 1301 | GSTPCNGV | L48 | FPFNKWGKARL | L56; L31 | EHDYQIGGY | L1; L11; L10; L18 |
| 1302 | GTCGLVEVEK | L7 | FPKSDGTGTIY | L31; L49 | EHEHEIAWY | L11; L34; L1; L10 |
| 1303 | GTDLEGNFYG | L1 | FPLCANGQV | L50; L47 | EHVQIHTI | L34; L48; L35; |
| | | | | | | L28 |
| 1304 | GTDTTITVNV | L18 | FPLKLRGTA | L50; L51 | EIIFLEGETL | L20; L10; L34; |
| | | | | | | L11 |
| 1305 | GTGVLTESNK | L7 | FPNITNLCPF | L31; L49 | EIKDTEKY | L11; L10; L26; |
| | | | | | | L43 |
| 1306 | GTHHWLLL | L73 | FPPTSFGPLV | L47; L50 | EILLIIMRTF | L10; L11; L40; |
| | | | | | | L41 |
| 1307 | GTHWFVTQRNF | L52 | FPQSAPHGVV | L50; L22 | EIVGGQIVTC | L11; L10; L19; |
| | | | | | | L20 |
| 1308 | GTILTRPLL | L13 | FPREGVFVS | L50; L31 | EKSNIIRGW | L10; L40; L41; |
| | | | | | | L49 |
| 1309 | GTKRFDNPVL | L53 | FPSGKVEGC | L49; L31 | ELAKNVSL | L23; L20; L35; |
| | | | | | | L56 |
| 1310 | GTLIVNSV | L48 | FPVLHDIGN | L50; L31 | ELGTEVNEF | L10; L9; L11; L26 |
| 1311 | GTLIVNSVLLF | L52 | FSALEPLVDL | L74; L60 | ELIRQGTDY | L11; L10; L26; |
| | | | | | | L12 |
| 1312 | GTNGTKRF | L54 | FSGAMDTTSY | L43; L1 | ELLHAPATV | L2; L4; L20; L3 |
| 1313 | GTNGTKRFD | L65 | FSNSGSDV | L58; L70 | ELNGGAYTRY | L11; L10; L14; |
| | | | | | | L26 |
| 1314 | GTNTSNQVAVLY | L18 | FSSEIIGYK | L19; L7 | ELVAELEGI | L10; L20; L24; |
| | | | | | | L11 |
| 1315 | GTRNPANNA | L13 | FSTASDTY | L1; L54 | ENFNQHEVL | L25; L20; L35; |
| | | | | | | L34 |
| 1316 | GTSTDVVY | L18 | FTALTQHGK | L19; L7 | EQYIKWPWY | L26; L27; L11; |
| | | | | | | L48 |
| 1317 | GTSTDVVYRAF | L52 | FTEERLKLFDRY | L1; L18 | ERDISTEIY | L1; L34; L35; L18 |
| 1318 | GTTEMLAK | L7 | FTIYSLLLCR | L19; L17 | ERSEAGVCV | L35; L34; L28; |
| | | | | | | L20 |
| 1319 | GTTLPKGF | L55 | FTLLLQLCTF | L52; L53 | ESKPSVEQR | L17; L19; L11; |
| | | | | | | L15 |
| 1320 | GTTSPISEHDY | L14 | FTPLVPFWI | L64; L20 | ETAHSCNVNR | L19; L17; L20; |
| | | | | | | L21 |
| 1321 | GTTTYKLNV | L73 | FTRSTNSR | L17; L21 | ETICAPLTV | L20; L73; L11; |
| | | | | | | L10 |
| 1322 | GTVSWNLREM | L10 | FTSDLATNNL | L20; L60 | ETISLAGSYK | L19; L11; L17; L7 |
| 1323 | GVAMPNLY | L18 | FTTTLNDF | L59; L58 | ETLGVLVPH | L17; L20; L7; L11 |
| 1324 | GVAPGTAVLRQ | L52 | FTVLCLTPV | L20; L59 | ETVKGLDYK | L19; L11; L20; |
| | W | | | | | L17 |
| 1325 | GVCSMTDIAK | L7 | FVCDNIKFA | L3; L69 | EVFAQVKQIYK | L19; L7; L6; L20 |
| 1326 | GVCSMTDIAKK | L7 | FVDRQTAQA | L5; L63 | EVFNATRF | L11; L10; L29; |
| | | | | | | L20 |
| 1327 | GVDIAANTVI | L68 | FVFKNIDGYFK | L6; L7 | EVNSFSGY | L11; L10; L26; |
| | | | | | | L14 |
| 1328 | GVDVELFENK | L7 | FVIRGDEVR | L19; L17 | EVPANSTVL | L10; L11; L57; |
| | | | | | | L20 |
| 1329 | GVEGFNCYF | L12 | FVLWAHGF | L59; L60 | EVVDKYFDC | L11; L10; L20; |
| | | | | | | L19 |
| 1330 | GVEHVTFF | L63 | FVNLKQLPFF | L58; L59 | EVVGDIILKP | L11; L10; L20; |
| | | | | | | L19 |
| 1331 | GVEHVTFFI | L24 | FVTHSKGL | L60; L61 | EYHDVRVV | L64; L72; L48; |
| | | | | | | L71 |
| 1332 | GVGYQPYRV | L24 | FVTHSKGLYR | L19; L17 | EYVSQPFLM | L9; L8; L17; L66 |
| 1333 | GVITHDVSSA | L3 | FVVPGLPGT | L11; L20 | FAAETLKA | L50; L69; L59; |
| | | | | | | L61 |
| 1334 | GVKHVYQL | L23 | FVVSTGYHFR | L19; L17 | FACPDGVKHV | L70; L69; L58; |
| | | | | | | L47 |
| 1335 | GVKHVYQLRAR | L15 | FWITIAYI | L62; L47 | FASFYYVWK | L7; L67; L19; L69 |
| 1336 | GVLTAVVI | L55 | FWRNTNPIQL | L62; L74 | FATAQEAY | L59; L31; L58; |
| | | | | | | L70 |
| 1337 | GVLTESNKKF | L52 | FYDFAVSKG | L62; L68 | FAVHFISNS | L69; L70; L58; |
| | | | | | | L49 |
| 1338 | GVPVVDSY | L26 | FYDFAVSKGF | L62; L9 | FAWWTAFVTN | L67; L50; L49; |
| | | | | | | L31 |
| 1339 | GVQIPCTCGK | L7 | FYEAMYTPH | L71; L72 | FCGPDGYPL | L67; L61; L66; |
| | | | | | | L60 |
| 1340 | GVSAARLT | L55 | FYFYTSKTT | L71; L72 | FCTQLNRAL | L61; L60; L64; |
| | | | | | | L32 |
| 1341 | GVSICSTMTNR | L19 | FYFYTSKTTV | L71; L72 | FDKAGQKTY | L58; L43; L14; |
| | | | | | | L70 |
| 1342 | GVSPTKLND | L65 | FYGPFVDR | L17; L66 | FDYVYNPF | L33; L59; L71; |
| | | | | | | L43 |
| 1343 | GVTFQSAVK | L7 | FYKENSYTT | L66; L9 | FEEAALCTF | L38; L41; L36; |
| | | | | | | L40 |
| 1344 | GVTRELMREL | L10 | FYLCFLAFLL | L9; L8 | FELDERIDKV | L45; L36; L38; |
| | | | | | | L37 |
| 1345 | GVVCTEIDPK | L7 | FYLITPVH | L71; L72 | FELLHAPATV | L45; L46; L38; |
| | | | | | | L36 |
| 1346 | GVVDYGARFYF | L12 | FYPPDEDE | L66; L71 | FELTSMKYF | L41; L40; L29; |
| | | | | | | L33 |
| 1347 | GVVFLHVTYV | L20 | FYRLANEC | L72; L71 | FENKTTLPV | L45; L38; L37; |
| | | | | | | L42 |
| 1348 | GVVGEGSEGL | L10 | FYSKWYIRV | L64; L62 | FEPSTQYEY | L66; L12; L40; |
| | | | | | | L41 |
| 1349 | GVVTTVMF | L74 | FYSYATHSD | L72; L71 | FERDISTEI | L45; L43; L36; |
| | | | | | | L37 |
| 1350 | GVVTTVMFL | L74 | FYTSKTTV | L71; L72 | FFPDLNGDV | L62; L72; L71; L5 |
| 1351 | GVYDYLVSTQ | L10 | FYTSKTTVASL | L71; L72 | FFSNVTWF | L72; L62; L71; L9 |
| 1352 | GVYYHKNNKSW | L16 | FYVLGLAAIM | L71; L72 | FGAISSVL | L61; L59; L28; |
| | | | | | | L25 |
| 1353 | GWEIVKFI | L48 | FYVYANGGKGF | L8; L9 | FGDSVEEV | L63; L68; L62; |
| | | | | | | L67 |
| 1354 | GWLIVGVALL | L8 | FYVYSRVKNL | L71; L72 | FHLDGEVIT | L35; L34; L28; |
| | | | | | | L44 |
| 1355 | GYKAIDGGVTR | L15 | FYYLGTGP | L71; L72 | FIASFRLF | L58; L59; L74; |
| | | | | | | L60 |
| 1356 | GYKKPASREL | L13 | FYYLGTGPE | L72; L71 | FISAARQGF | L58; L12; L60; |
| | | | | | | L16 |
| 1357 | GYLNSTNV | L71 | FYYSDSPC | L71; L72 | FKWDLTAF | L59; L27; L66; |
| | | | | | | L71 |
| 1358 | GYLQPRTFLLK | L6 | FYYVWKSYVH | L71; L72 | FLARGIVE | L74; L59; L26; |
| | | | | | | L23 |
| 1359 | GYLQPRTFLLKY | L12 | GAALQIPF | L74; L59 | FLCWHTNCY | L43; L59; L26; L1 |
| 1360 | GYLTSSSK | L71 | GAENSVAY | L18; L27 | FLEYHDVRV | L2; L63; L5; L4 |
| 1361 | GYREGYLNS | L13 | GALLTKSSEY | L27; L14 | FLIVAAIVFI | L2; L3; L4; L5 |
| 1362 | GYRVTKNSK | L13 | GCFVDDIVK | L7; L13 | FLMSFTVLC | L2; L4; L12; L5 |
| 1363 | GYVMHANYI | L9 | GDDTVIEV | L33; L37 | FLNKVVSTT | L3; L2; L4; L43 |
| 1364 | HAASGNLLLD | L49 | GDYGDAVVYR | L15; L19 | FLPGVYSVIY | L12; L66; L26; |
| | | | | | | L43 |
| 1365 | HAAVDALCE | L49 | GEAANFCA | L38; L46 | FLPGVYSVIYL | L2; L5; L57; L74 |
| 1366 | HADQLTPTWR | L63 | GEAANFCALIL | L36; L41 | FLQSINFVR | L21; L17; L15; |
| | | | | | | L19 |
| 1367 | HADQLTPTWRV | L18 | GEAVKTQFNY | L40; L41 | FLTENLLLYI | L3; L2; L4; L5 |
| | Y | | | | | |
| 1368 | HAFHTPAFD | L49 | GECPNFVFPL | L37; L36 | FLVQAGNVQL | L2; L4; L5; L74 |
| 1369 | HAFLCLFLLP | L50 | GEDIQLLKSAY | L41; L40 | FLYLYALV | L62; L2; L3; L47 |
| 1370 | HANEYRLYLD | L49 | GEQKSILSPLY | L40; L41 | FMIDVQQW | L49; L69; L54; L3 |
| 1371 | HANLDSCKR | L17 | GERSGARSK | L13; L45 | FPLKLRGTAV | L50; L51; L22; |
| | | | | | | L32 |
| 1372 | HDELTGHM | L33 | GETFVTHSK | L37; L38 | FPREGVFVSN | L50; L51; L31; |
| | | | | | | L22 |
| 1373 | HDELTGHMLDM | L18 | GETSWQTGD | L46; L37 | FRNARNGVL | L25; L66; L64; |
| | Y | | | | | L35 |
| 1374 | HDFFKFRI | L33 | GEVFNATRFA | L46; L38 | FSASTSAFV | L58; L70; L20; |
| | | | | | | L73 |
| 1375 | HDFFKFRID | L65 | GEYTFEKG | L45; L29 | FSHSQLGGL | L58; L60; L57; |
| | | | | | | L61 |
| 1376 | HDIGNPKAI | L37 | GFAAYSRY | L12; L14 | FSKLINII | L70; L48; L55; |
| | | | | | | L47 |
| 1377 | HDLYCQVH | L33 | GFAAYSRYR | L15; L17 | FSKLINIII | L70; L69; L55; |
| | | | | | | L68 |
| 1378 | HEFCSQHT | L29 | GFCDLKGKY | L12; L14 | FSNYLKRRV | L73; L64; L70; |
| | | | | | | L69 |
| 1379 | HEIAWYTE | L29 | GFNEKTHV | L62; L48 | FSQRGGSY | L1; L14; L59; L18 |
| 1380 | HEVLLAPLLS | L41 | GGAKLKAL | L23; L44 | FSSNVANY | L58; L1; L70; L59 |
| 1381 | HFDEGNCD | L62 | GGDAALAL | L68; L63 | FSTGVNLVA | L50; L61; L69; |
| | | | | | | L73 |
| 1382 | HFDEGNCDT | L62 | GGHSYGADL | L57; L44 | FSTGVNLVAV | L20; L73; L58; |
| | | | | | | L50 |
| 1383 | HFISNSWLMW | L8 | GGLHLLIGL | L44; L4 | FTEQPIDLV | L1; L20; L18; L63 |
| 1384 | HFYSKWYI | L48 | GGRFVLAL | L48; L23 | FTISVTTEIL | L60; L67; L61; |
| | | | | | | L20 |
| 1385 | HGFELTSMK | L13 | GHFDGQQG | L28; L35 | FTIYSLLLC | L73; L1; L12; L58 |
| 1386 | HGGGVAGAL | L44 | GHFDGQQGEV | L28; L35 | FTQSRNLQEF | L58; L10; L59; |
| | | | | | | L60 |
| 1387 | HGHVMVELV | L48 | GHLRIAGHHL | L34; L44 | FVCDNIKF | L58; L74; L68; |
| | | | | | | L63 |
| 1388 | HGKQVVSD | L23 | GHSYGADL | L28; L35 | FVENPDILR | L19; L17; L21; |
| | | | | | | L15 |
| 1389 | HGLNLEEAA | L50 | GHVMVELVA | L28; L35 | FVFPLNSIIK | L6; L7; L13; L19 |
| 1390 | HGLNLEEAARY | L14 | GIGVTQNVLY | L12; L18 | FVKHKHAF | L23; L59; L58; |
| | | | | | | L43 |
| 1391 | HGVVFLHV | L48 | GINASVVNIQK | L7; L6 | FVLAAVYRI | L4; L47; L5; L20 |
| 1392 | HHMELPTG | L28 | GISQYSLRL | L24; L73 | FVLWAHGFEL | L60; L61; L67; |
| | | | | | | L59 |
| 1393 | HHSIGFDYVY | L34 | GKFCLEASF | L27; L44 | FVNEFYAYLR | L15; L21; L17; |
| | | | | | | L19 |
| 1394 | HIDAYKTFP | L63 | GKQGNFKNL | L44; L27 | FVNLKQLPF | L59; L12; L58; |
| | | | | | | L60 |
| 1395 | HIDHPNPKG | L63 | GKYVQIPTT | L27; L44 | FVRIQPGQTF | L26; L43; L10; |
| | | | | | | L58 |
| 1396 | HIDHPNPKGF | L63 | GLALYYPSA | L2; L3 | FVSGNCDVV | L58; L67; L20; |
| | | | | | | L69 |
| 1397 | HISRQRLTK | L6 | GLDSLDTYPSL | L2; L5 | FVVPGLPGTI | L20; L10; L67; L3 |
| 1398 | HITSKETL | L23 | GLFCLLNR | L15; L21 | FWNCNVDRY | L58; L12; L49; |
| | | | | | | L14 |
| 1399 | HKHAFLCLFL | L44 | GLIAIVMVT | L3; L2 | FYDFAVSK | L62; L71; L68; |
| | | | | | | L72 |
| 1400 | HKLVLSVNP | L44 | GLKTILRK | L13; L6 | FYEDFLEYH | L62; L72; L71; |
| | | | | | | L12 |
| 1401 | HKPIVWHV | L48 | GLMWLSYFI | L24; L2 | FYGGWHNM | L72; L66; L71; |
| | | | | | | L62 |
| 1402 | HKPIVWHVN | L44 | GLNGYTVEEA | L3; L2 | FYILPSII | L62; L71; L72; |
| | | | | | | L47 |
| 1403 | HLIPLMYK | L6 | GLNLEEAAR | L21; L15 | FYWFFSNY | L72; L71; L66; |
| | | | | | | L12 |
| 1404 | HLIPLMYKG | L24 | GLQPSVGPK | L6; L7 | GANKDGIIW | L54; L49; L52; |
| | | | | | | L53 |
| 1405 | HLKDGTCGLV | L3 | GLVEVEKGVL | L44; L2 | GEAVKTQF | L33; L29; L37; |
| | | | | | | L45 |
| 1406 | HLKDGTCGLVEV | L3 | GLYKNTCV | L24; L2 | GECPNFVF | L29; L37; L33; |
| | | | | | | L36 |
| 1407 | HLLIGLAKRF | L12 | GLYPTLNIS | L24; L3 | GEDIQLLKS | L45; L46; L37; |
| | | | | | | L41 |
| 1408 | HLMGWDYPK | L6 | GNKGAGGHSY | L14; L26 | GEDIQLLKSA | L46; L38; L42; |
| | | | | | | L37 |
| 1409 | HLRIAGHHL | L26 | GNLQSNHDLY | L12; L14 | GEFKLASHMY | L40; L29; L41; |
| | | | | | | L27 |
| 1410 | HLSVDTKFK | L6 | GNYNYLYRL | L4; L24 | GEIPVAYRKVL | L36; L41; L40; |
| | | | | | | L37 |
| 1411 | HLSWEVGKP | L24 | GNYQCGHYK | L7; L6 | GGDAALALL | L63; L62; L68; |
| | | | | | | L34 |
| 1412 | HLVDFQVTIA | L3 | GPKKSTNLV | L51; L39 | GGFNFSQIL | L44; L64; L28; |
| | | | | | | L69 |
| 1413 | HLYFDKAGQK | L6 | GPLVRKIFV | L23; L47 | GHFDGQQGE | L28; L34; L35; |
| | | | | | | L24 |
| 1414 | HLYLQYIR | L21 | GPPGTGKSH | L39; L22 | GHSMQNCVL | L35; L28; L34; |
| | | | | | | L44 |
| 1415 | HMELPTGV | L48 | GQGLNGYTV | L24; L48 | GIATVREVL | L44; L16; L28; |
| | | | | | | L67 |
| 1416 | HMLDMYSV | L48 | GQGVPINTN | L24; L26 | GIDLDEWSM | L68; L63; L28; |
| | | | | | | L18 |
| 1417 | HMLDMYSVM | L72 | GQINDMIL | L28; L44 | GIVFMCVEY | L26; L43; L12; |
| | | | | | | L27 |
| 1418 | HMLDMYSVML | L44 | GQIVTCAKEI | L24; L48 | GIYQTSNFR | L21; L7; L6; L19 |
| 1419 | HNLAKHCL | L23 | GQPITNCV | L48; L24 | GKYEQYIKW | L27; L44; L49; |
| | | | | | | L10 |
| 1420 | HNSHEGKTFY | L12 | GQSKRVDF | L27; L26 | GLAAIMQL | L3; L74; L2; L4 |
| 1421 | HPTQAPTH | L50 | GQSTQLGI | L48; L24 | GLAAVNSV | L3; L2; L4; L24 |
| 1422 | HQECSLQSC | L24 | GQSTQLGIEF | L26; L27 | GLCVDIPGI | L4; L2; L24; L3 |
| 1423 | HQSDIEVTGD | L44 | GRIRSVYPV | L30; L35 | GLEAPFLYLY | L18; L12; L1; L14 |
| 1424 | HRFYRLAN | L25 | GRRGPEQTQ | L65; L30 | GLFKDCSKV | L24; L3; L2; L4 |
| 1425 | HRFYRLANE | L25 | GRSGETLGVL | L30; L35 | GLIAIVMV | L24; L2; L3; L4 |
| 1426 | HRLYECLY | L65 | GSALLEDEF | L53; L52 | GLPNNTASW | L57; L10; L16; L5 |
| 1427 | HRLYECLYR | L30 | GSDNVTDEN | L1; L18 | GLYPTLNI | L24; L48; L3; L2 |
| 1428 | HRLYECLYRNR | L30 | GSGVPVVDSY | L14; L18 | GPEHSLAEY | L49; L31; L18; |
| | | | | | | L12 |
| 1429 | HSCNVNRFN | L55 | GSSGVVNPV | L20; L24 | GPKKSTNL | L56; L39; L23; |
| | | | | | | L22 |
| 1430 | HSMQNCVL | L55 | GSTPCNGVEGF | L52; L54 | GQQFGPTY | L26; L27; L48; |
| | | | | | | L14 |
| 1431 | HSSSSDNIAL | L44 | GSVAYESL | L67; L55 | GQQFGPTYL | L44; L28; L24; |
| | | | | | | L34 |
| 1432 | HSTQDLFLP | L53 | GSVAYESLR | L19; L7 | GQTGKIADY | L26; L14; L27; |
| | | | | | | L12 |
| 1433 | HSTQDLFLPF | L52 | GTAVLRQWL | L53; L16 | GRSGETLGV | L30; L24; L35; |
| | | | | | | L34 |
| 1434 | HSTQDLFLPFF | L52 | GTDPYEDFQ | L1; L18 | GSFCTQLNR | L7; L15; L19; L21 |
| 1435 | HSWNADLYKL | L53 | GTDPYEDFQEN | L52; L54 | GSLPINVI | L48; L55; L47; |
| | | | W | | | L53 |
| 1436 | HTGTGQAITV | L20 | GTDTTITVN | L18; L1 | GTDLEGNFY | L1; L18; L14; L12 |
| 1437 | HTKKWKYPQV | L13 | GTEDDYQGK | L13; L7 | GTGTIYTEL | L53; L10; L67; |
| | | | | | | L65 |
| 1438 | HTPINLVRD | L11 | GTGTSTDVVY | L18; L52 | GTITVEELKK | L7; L13; L6; L19 |
| 1439 | HTPINLVRDL | L11 | GTILTRPL | L55; L60 | GTLEPEYF | L52; L55; L54; |
| | | | | | | L53 |
| 1440 | HTTCCSLSHRF | L54 | GTLIVNSVLL | L53; L13 | GTLIVNSVL | L53; L44; L55; |
| | | | | | | L52 |
| 1441 | HTTDPSFLG | L20 | GTLSYEQFKK | L7; L6 | GTTLPKGFY | L14; L1; L12; L18 |
| 1442 | HTVLQAVGA | L50 | GTNLPLQLGF | L12; L52 | GVAMPNLYK | L6; L7; L13; L19 |
| 1443 | HTVMPLSA | L50 | GTPVCINGL | L57; L10 | GVCVSTSGR | L19; L15; L21; L7 |
| 1444 | HTVMPLSAP | L10 | GTSSGDATTAY | L18; L14 | GVKHVYQLR | L15; L21; L19; |
| | | | | | | L17 |
| 1445 | HVDILGPLS | L1 | GTTSPISEH | L7; L10 | GVPFVVSTGY | L11; L12; L26; |
| | | | | | | L14 |
| 1446 | HVDTDLTK | L18 | GTTTLNGLW | L52; L54 | GVVDYGARFY | L12; L14; L10; |
| | | | | | | L11 |
| 1447 | HVICTSEDM | L11 | GTVSWNLR | L19; L15 | GVYFASTEK | L7; L6; L13; L19 |
| 1448 | HVISTSHKLV | L20 | GVAGALNKA | L51; L3 | GWHNMLKTV | L24; L3; L48; L45 |
| 1449 | HVMSKHTD | L23 | GVALLAVF | L26; L59 | GYLPQNAVV | L72; L8; L71; L9 |
| 1450 | HVNNATNKA | L51 | GVDAVNLLT | L18; L1 | HADFDTWFS | L68; L49; L18; |
| | | | | | | L63 |
| 1451 | HVNNATNKATY | L14 | GVEGFNCY | L18; L1 | HCANFNVL | L35; L28; L25; |
| | | | | | | L44 |
| 1452 | HVRAWIGF | L26 | GVFVSNGTHW | L10; L52 | HDVRVVLDF | L33; L49; L65; |
| | | | | | | L29 |
| 1453 | HVSGTNGTKRF | L11 | GVFVSNGTHWF | L16; L26 | HDYQIGGY | L29; L33; L14; |
| | | | | | | L11 |
| 1454 | HVTFFIYNKI | L20 | GVGGKPCIK | L6; L7 | HEETIYNL | L37; L33; L29; |
| | | | | | | L36 |
| 1455 | HVTYVPAQE | L20 | GVKDCVVLH | L13; L7 | HEFCSQHTML | L37; L36; L45; |
| | | | | | | L25 |
| 1456 | HVTYVPAQEK | L19 | GVLITEGSVK | L6; L7 | HEGKTFYV | L33; L45; L37; |
| | | | | | | L29 |
| 1457 | HVYQLRARSV | L24 | GVLPQLEQPY | L12; L14 | HEHEIAWY | L29; L37; L33; |
| | | | | | | L45 |
| 1458 | HWFVTQRN | L48 | GVLTAVVIPTK | L7; L6 | HFISNSWLM | L8; L72; L12; L71 |
| 1459 | HWFVTQRNFY | L12 | GVLTAVVIPTKK | L7; L6 | HFRELGVVH | L72; L71; L13; |
| | | | | | | L43 |
| 1460 | HYQECVRGT | L72 | GVTFQSAVKR | L19; L7 | HGFELTSMKY | L14; L12; L11; |
| | | | | | | L29 |
| 1461 | HYVYIGDPA | L50 | GVTLIGEAV | L20; L24 | HHANEYRL | L34; L35; L28; |
| | | | | | | L44 |
| 1462 | IAARDLICA | L50 | GVTQNVLY | L12; L18 | HISRQRLTKY | L11; L14; L18; |
| | | | | | | L10 |
| 1463 | IAARDLICAQKF | L52 | GVVTTVMFLAR | L7; L19 | HKDKSAQCF | L34; L49; L27; |
| | | | | | | L63 |
| 1464 | IADKYVRN | L63 | GVYYPDKV | L48; L24 | HKPPISFPL | L66; L44; L57; |
| | | | | | | L64 |
| 1465 | LADYNYKLP | L63 | GWTAGAAAYY | L12; L14 | HLIPLMYKGL | L3; L11; L10; L5 |
| 1466 | IAFGGCVFS | L69 | GYINVFAFP | L9; L12 | HNIALIWNV | L20; L24; L73; L4 |
| 1467 | IAGLIAIVMV | L50 | GYKKPASR | L15; L17 | HNSHEGKTF | L49; L34; L32; |
| | | | | | | L53 |
| 1468 | IAIILASFSA | L50 | GYLKLTDNVY | L12; L14 | HPNCVNCL | L32; L56; L39; |
| | | | | | | L23 |
| 1469 | IAKKPTET | L43 | GYLNSTNVTI | L8; L9 | HPNQEYADVF | L32; L31; L49; |
| | | | | | | L39 |
| 1470 | IALIWNVKDF | L52 | GYLPQNAVVK | L13; L7 | HSIGFDYV | L73; L20; L48; |
| | | | | | | L67 |
| 1471 | IALKGGKI | L47 | GYLPQNAVVKI | L9; L8 | HSWNADLY | L18; L1; L14; L54 |
| 1472 | IALKGGKIVNNW | L52 | GYLQPRTFLL | L9; L8 | HTSPDVDLG | L52; L53; L18; |
| | | | | | | L20 |
| 1473 | IAMACLVGLMW | L52 | GYVDTPNNTDF | L8; L9 | HTTDPSFLGRY | L14; L11; L18; |
| | | | | | | L10 |
| 1474 | IANQFNSA | L50 | GYVMHANY | L71; L72 | HVDTDLTKP | L63; L18; L49; |
| | | | | | | L11 |
| 1475 | IANYAKPF | L59 | GYVMHANYIF | L8; L9 | IAANTVIWD | L69; L70; L74; |
| | | | | | | L49 |
| 1476 | IAQFAPSA | L50 | GYYRRATR | L15; L17 | IAANTVIWDY | L31; L12; L58; |
| | | | | | | L14 |
| 1477 | IASEFSSLPSY | L31 | GYYRRATRR | L15; L17 | IAPGQTGKI | L47; L49; L63; |
| | | | | | | L57 |
| 1478 | IASTDTCF | L54 | HAIHVSGTN | L32; L49 | ICHDGKAHF | L43; L49; L8; L9 |
| 1479 | IAYIICIS | L47 | HANYIFWR | L17; L15 | ICYTPSKL | L74; L48; L47; |
| | | | | | | L25 |
| 1480 | IAYTMSLG | L47 | HANYIFWRN | L49; L32 | IDHPNPKGF | L33; L43; L29; |
| | | | | | | L52 |
| 1481 | IAYTMSLGA | L50 | HDELTGHML | L37; L34 | IDYDCVSF | L33; L43; L71; |
| | | | | | | L29 |
| 1482 | ICHDGKAH | L43 | HDVRVVLD | L65; L33 | IEFLKRGD | L33; L45; L46; |
| | | | | | | L65 |
| 1483 | ICISTKHFYWF | L8 | HECFVKRVDW | L41; L40 | IFFASFYYV | L47; L62; L72; |
| | | | | | | L71 |
| 1484 | ICLLQFAYA | L50 | HEGKTFYVLP | L38; L42 | IFGADPIHSL | L72; L9; L8; L71 |
| 1485 | IDAFKLNI | L33 | HFAWWTAFV | L62; L20 | IFLIVAAI | L71; L48; L72; |
| | | | | | | L47 |
| 1486 | IDCSARHI | L55 | HFIETISLAGSY | L14; L12 | IFLIVAAIV | L71; L72; L47; |
| | | | | | | L62 |
| 1487 | IDFYLCFL | L33 | HFLPRVFSAV | L71; L72 | IGFLFLTW | L48; L47; L54; |
| | | | | | | L52 |
| 1488 | IDFYLCFLAF | L33 | HFRELGVV | L48; L62 | IGINITRF | L29; L54; L27; |
| | | | | | | L26 |
| 1489 | IDGGVTRD | L65 | HFYWFFSNYL | L71; L72 | IIIGGAKLK | L7; L6; L19; L13 |
| 1490 | IDLDEWSM | L33 | HGLAAVNSV | L48; L47 | IINNTVYTK | L7; L6; L19; L21 |
| 1491 | IDLLLDDF | L33 | HGLNLEEA | L25; L50 | IKLIFLWLL | L44; L4; L64; L8 |
| 1492 | IDLVPNQPY | L12 | HGVVFLHVTY | L29; L26 | ILANTCTER | L21; L19; L15; L6 |
| 1493 | IDVQQWGF | L33 | HKHAFLCLF | L27; L34 | ILLNKHIDAY | L12; L14; L6; L16 |
| 1494 | IDYKHYTP | L33 | HLDGEVIT | L62; L63 | ILLNVPLHG | L4; L12; L6; L2 |
| 1495 | IDYKHYTPSF | L33 | HLLIGLAK | L6; L23 | ILSDDAVVCF | L26; L9; L16; L49 |
| 1496 | IEELFYSYAT | L38 | HMVVKAAL | L23; L25 | INDMILSL | L68; L63; L62; |
| | | | | | | L67 |
| 1497 | IEFLKRGDK | L46 | HMVVKAALL | L23; L62 | INDMILSLL | L68; L62; L63; L5 |
| 1498 | IEFLKRGDKSV | L45 | HNESGLKTI | L49; L34 | INFVRIIMR | L17; L21; L15; |
| | | | | | | L19 |
| 1499 | IELKFNPP | L46 | HNMLKTVY | L29; L65 | IPIQASLPF | L22; L31; L49; |
| | | | | | | L50 |
| 1500 | IELSLIDFYLC | L40 | HPDSATLVS | L32; L49 | IPKEEVKPF | L39; L49; L31; |
| | | | | | | L22 |
| 1501 | IELSLIDFYLCF | L41 | HPDSATLVSD | L49; L32 | IQPGQTFSV | L5; L24; L48; L57 |
| 1502 | IERFVSLA | L46 | HPLADNKFA | L51; L50 | IRKSNHNFL | L25; L66; L64; |
| | | | | | | L30 |
| 1503 | IETISLAGS | L46 | HPNCVNCLD | L32; L49 | ISAGFSLW | L54; L52; L53; |
| | | | | | | L18 |
| 1504 | IEVNSFSGYL | L36 | HPTQAPTHLSV | L50; L51 | ISDEFSSN | L68; L1; L63; L18 |
| 1505 | IEVNSFSGYLKL | L36 | HSCNVNRF | L53; L54 | ISDEVARD | L63; L1; L68; L54 |
| 1506 | IEVQGYKS | L29 | HSDKFTDGVCL | L63; L68 | ISDEVARDLSL | L68; L63; L67; L1 |
| 1507 | IEVQGYKSVN | L46 | HSMQNCVLKL | L73; L53 | ISMWALII | L55; L48; L47; |
| | | | | | | L73 |
| 1508 | IEVTGDSC | L29 | HSQLGGLHLL | L53; L18 | ISVTTEIL | L67; L74; L60; |
| | | | | | | L54 |
| 1509 | IEYPIIGDE | L46 | HSSRLSFKEL | L53; L73 | ITEEVGHTDL | L63; L68; L1; L60 |
| 1510 | IEYPIIGDELKI | L45 | HSTQDLFL | L73; L74 | ITHDVSSAI | L53; L61; L70; |
| | | | | | | L68 |
| 1511 | IFFASFYYVW | L9 | HSWNADLYK | L13; L7 | ITHDVSSAINR | L19; L21; L15; |
| | | | | | | L17 |
| 1512 | IFLEGETLP | L8 | HSYFTSDYYQL | L1; L18 | ITSKETLY | L1; L18; L54; L53 |
| | | | Y | | | |
| 1513 | IFLWLLWPV | L71 | HTANKWDLI | L20; L53 | ITTYPGQGL | L60; L61; L53; |
| | | | | | | L20 |
| 1514 | IFWRNTNPI | L8 | HTDFSSEIIGY | L18; L1 | IVDEPEEH | L63; L68; L62; |
| | | | | | | L67 |
| 1515 | IFYLITPVHV | L62 | HTFSNYQHE | L10; L11 | IVFDGKSK | L13; L19; L7; L6 |
| 1516 | IGAEHVNNSY | L14 | HTQVVDMSM | L32; L53 | IVFITLCF | L26; L59; L54; |
| | | | | | | L52 |
| 1517 | IGEAVKTQF | L63 | HVASCDAIM | L32; L11 | IVGVALLAV | L73; L4; L51; L5 |
| 1518 | IGEAVKTQFNYY | L18 | HVDILGPLSA | L18; L50 | IVKTDGTLM | L58; L53; L11; |
| | | | | | | L52 |
| 1519 | IGEQKSIL | L63 | HVGEIPVA | L50; L51 | IYQTSNFRV | L8; L9; L71; L72 |
| 1520 | IGGAKLKAL | L23 | HVMVELVAEL | L20; L10 | KADETQALP | L63; L54; L18; |
| | | | | | | L68 |
| 1521 | IGGYTEKW | L54 | HVVDGCNSS | L10; L11 | KAPKEIIF | L63; L74; L54; |
| | | | | | | L53 |
| 1522 | IGKIQDSL | L23 | HVVDGCNSST | L11; L10 | KATNNAMQV | L70; L73; L69; |
| | | | | | | L58 |
| 1523 | IGPERTCC | L57 | HYTPSFKKG | L9; L8 | KAVFISPY | L70; L43; L59; |
| | | | | | | L54 |
| 1524 | IGPERTCCL | L57 | HYVYIGDPAQL | L8; L9 | KCTSVVLL | L56; L73; L55; |
| | | | | | | L74 |
| 1525 | IGVTQNVL | L25 | IADTTDAVR | L68; L63 | KCYGVSPTKL | L6; L8; L73; L30 |
| 1526 | IGYYRRATR | L15 | IADTTDAVRD | L63; L49 | KESPFELEDF | L36; L41; L33; |
| | | | | | | L40 |
| 1527 | IHFGAGSDK | L28 | IAEILLII | L47; L68 | KGEDIQLLK | L18; L13; L7; L6 |
| 1528 | IHFYSKWY | L27 | IAGLIAIV | L47; L70 | KGGKIVNNW | L54; L16; L52; |
| | | | | | | L53 |
| 1529 | IHFYSKWYI | L34 | IALKGGKIV | L47; L70 | KGGRFVLAL | L73; L65; L44; |
| | | | | | | L67 |
| 1530 | IHSLRVCV | L28 | ICISTKHFYW | L52; L54 | KHTDFSSEI | L35; L34; L28; L8 |
| 1531 | IHTIDGSSG | L28 | ICYTPSKLI | L47; L45 | KIAEIPKEEV | L2; L3; L20; L5 |
| 1532 | IHTIDGSSGV | L28 | IDFLELAM | L33; L29 | KIITLKKRW | L54; L52; L16; |
| | | | | | | L14 |
| 1533 | IHTIDGSSGVV | L28 | IDLQELGKY | L14; L12 | KILGLPTQTV | L16; L24; L2; L4 |
| 1534 | IHVSGTNGT | L28 | IDSYFVVKR | L19; L21 | KKLDGFMGR | L21; L15; L27; |
| | | | | | | L17 |
| 1535 | IICISTKHF | L26 | IDYTEISF | L33; L29 | KKPASREL | L66; L57; L27; |
| | | | | | | L64 |
| 1536 | IICISTKHFY | L18 | IEDLLFNKVTL | L36; L41 | KLDGVVCTEI | L5; L68; L63; L2 |
| 1537 | IIGDELKI | L24 | IELSLIDF | L33; L29 | KLFAAETLK | L6; L21; L7; L13 |
| 1538 | IIKLIFLW | L52 | IERYKLEGY | L29; L26 | KLIEYTDF | L26; L43; L27; |
| | | | | | | L54 |
| 1539 | IIKSQDLSV | L3 | IETISLAGSY | L40; L41 | KLIFLWLL | L74; L4; L55; L2 |
| 1540 | IIKSQDLSVV | L3 | IEYTDFATS | L46; L45 | KLKTLVATA | L3; L51; L13; L2 |
| 1541 | IIKTIQPR | L21 | IFLWLLWPVTL | L9; L8 | KLLEQWNLVI | L16; L2; L4; L8 |
| 1542 | IILKPANNSL | L16 | IFYLITPVHVM | L71; L72 | KLNDLCFTNVY | L14; L16; L18; |
| | | | | | | L26 |
| 1543 | IIMRLWLCWK | L6 | IGFLFLTWI | L47; L48 | KLTDNVYIK | L6; L13; L16; L7 |
| 1544 | IIMRTFKV | L48 | IGIVNNTV | L48; L47 | KNVSLDNVL | L44; L73; L67; |
| | | | | | | L36 |
| 1545 | IIPARARV | L5 | IGNYTVSCL | L57; L65 | KPANNSLKI | L24; L47; L49; |
| | | | | | | L51 |
| 1546 | IIPARARVE | L57 | IHADQLTP | L35; L28 | KPPPGDQF | L39; L56; L22; |
| | | | | | | L66 |
| 1547 | IIRENNRV | L48 | IIIWFLLLS | L73; L6 | KPRPPLNRNY | L52; L13; L14; |
| | | | | | | L22 |
| 1548 | IISDMYDPK | L6 | IILFLALI | L48; L47 | KRFDNPVLP | L64; L30; L65; |
| | | | | | | L66 |
| 1549 | IISDMYDPKTK | L6 | IILFLALITL | L4; L67 | KRSFIEDLL | L64; L34; L66; |
| | | | | | | L30 |
| 1550 | IISNEKQEI | L24 | IIMRLWLCW | L54; L52 | KSAFVNLKQ | L54; L73; L18; |
| | | | | | | L53 |
| 1551 | IITTDNTF | L54 | IIPLTTAAK | L57; L6 | KSATCITRC | L54; L53; L18; |
| | | | | | | L52 |
| 1552 | IITTVAAF | L59 | IIPLTTAAKL | L57; L5 | KSEDAQGM | L55; L18; L54; |
| | | | | | | L63 |
| 1553 | IKESVQTF | L27 | IIQFPNTY | L26; L18 | KSFTVEKGIY | L54; L14; L18; |
| | | | | | | L52 |
| 1554 | IKESVQTFF | L27 | IISVTSNY | L18; L26 | KSHFAIGLAL | L57; L61; L73; |
| | | | | | | L60 |
| 1555 | IKIQEGVVD | L27 | IKFADDLNQL | L27; L44 | KSNIIRGWIF | L53; L54; L55; |
| | | | | | | L52 |
| 1556 | IKIQEGVVDY | L27 | IKGTHHWLL | L66; L44 | KSQDLSVVSK | L13; L7; L6; L15 |
| 1557 | IKLDDKDPNF | L9 | IKNFKSVLYY | L27; L12 | KSREETGL | L53; L55; L65; |
| | | | | | | L54 |
| 1558 | IKLIFLWLLW | L52 | IKWPWYIWLGF | L27; L8 | KTCGQQQTT | L54; L53; L55; |
| | | | | | | L16 |
| 1559 | IKNADIVEE | L27 | ILANTCTERL | L4; L2 | KTCGQQQTTL | L53; L16; L55; |
| | | | | | | L54 |
| 1560 | IKNLSKSL | L27 | ILDGISQYS | L5; L1 | KTFPPTEPKK | L13; L7; L6; L52 |
| 1561 | IKPVTYKL | L66 | ILFTRFFY | L12; L18 | KTFYVLPND | L13; L53; L54; |
| | | | | | | L52 |
| 1562 | IKRSDARTA | L27 | ILLNVPLHGT | L2; L4 | KTGDLQPL | L55; L73; L54; |
| | | | | | | L53 |
| 1563 | IKTIQPRV | L48 | ILNNLGVDI | L24; L4 | KTIGPDMF | L54; L52; L55; |
| | | | | | | L53 |
| 1564 | IKWADNNCY | L27 | ILPDPSKPSK | L6; L5 | KTLLSLREV | L73; L13; L52; |
| | | | | | | L55 |
| 1565 | ILASFSAST | L43 | ILPSIISNE | L5; L57 | KTLQPVSELL | L53; L16; L54 |
| | | | | | | L52 |
| 1566 | ILCIMSDRDLY | L18 | ILPSIISNEK | L6; L57 | KTTLPVNVAF | L53; L52; L16; |
| | | | | | | L54 |
| 1567 | ILFLALITLA | L3 | ILPVSMTKT | L57; L5 | KVFRSSVLH | L6; L7; L21; L54 |
| 1568 | ILFTRFFYVL | L4 | ILRGHLRIA | L3; L51 | KVPTDNYITTY | L18; L11; L16; |
| | | | | | | L14 |
| 1569 | ILGTVSWNLR | L21 | IMLVYCFLGY | L12; L6 | KVTIDYTEI | L53; L55; L54; |
| | | | | | | L24 |
| 1570 | ILHCANFNVL | L57 | IMQLFFSY | L18; L26 | KVTLVFLF | L54; L55; L52; |
| | | | | | | L33 |
| 1571 | ILKPANNSLK | L6 | IMQLFFSYF | L9; L26 | KWDLIISDM | L62; L63; L68; |
| | | | | | | L18 |
| 1572 | ILLAKDTTEA | L2 | INASVVNIQK | L19; L7 | KWDLTAFGL | L62; L68; L63; |
| | | | | | | L36 |
| 1573 | ILLIIMRTFK | L6 | INLIIKNL | L48; L25 | KWGKARLYY | L12; L18; L14; |
| | | | | | | L16 |
| 1574 | ILLLDQAL | L23 | INRPQIGVV | L3; L73 | KYLVQQESPF | L8; L9; L72; L71 |
| 1575 | ILLNKHIDA | L2 | IPARARVECF | L49; L31 | KYNENGTI | L9; L71; L8; L72 |
| 1576 | ILMTARTV | L48 | IPDYNTYKN | L49; L32 | KYNENGTIT | L8; L72; L9; L71 |
| 1577 | ILPSIISN | L57 | IPFAMQMA | L50; L51 | LAAVNSVPW | L49; L52; L61; |
| | | | | | | L31 |
| 1578 | ILPVSMTK | L57 | IPFAMQMAYRF | L31; L49 | LAFVVFLLVTL | L31; L69; L59; |
| | | | | | | L47 |
| 1579 | ILRGHLRI | L48 | IPMDSTVKNY | L31; L49 | LALYNKYKY | L12; L31; L52; |
| | | | | | | L14 |
| 1580 | ILSDDAVV | L2 | IPVAYRKV | L47; L51 | LATNNLVV | L47; L70; L50; |
| | | | | | | L69 |
| 1581 | ILSLLSKGR | L21 | IPYNSVTSSI | L47; L22 | LAVPYNMRVI | L47; L69; L70; |
| | | | | | | L55 |
| 1582 | ILTALRLCAY | L12 | IQEGVVDY | L26; L27 | LAWLYAAV | L47; L50; L59; |
| | | | | | | L67 |
| 1583 | IMASLVLARK | L6 | IQKDVLEC | L48; L26 | LAYCNKTV | L47; L70; L69; |
| | | | | | | L48 |
| 1584 | IMLIIFWF | L33 | IQLLKSAY | L27; L26 | LAYYFMRFR | L17; L69; L59; |
| | | | | | | L47 |
| 1585 | IMLIIFWFSL | L4 | IQPGQTFSVL | L57; L26 | LDYIINLI | L47; L48; L33; |
| | | | | | | L25 |
| 1586 | IMMNVAKY | L14 | IQPIGALDI | L24; L48 | LEFGATSAA | L46; L38; L42; |
| | | | | | | L37 |
| 1587 | IMRLWLCW | L48 | IRASANLAA | L35; L46 | LEFGATSAAL | L36; L41; L37; |
| | | | | | | L40 |
| 1588 | IMRLWLCWK | L13 | IRENNRVVI | L34; L35 | LEGSVRVV | L45; L37; L38; |
| | | | | | | L48 |
| 1589 | IMRTFKVSI | L48 | IRQEEVQELY | L30; L14 | LETAQNSV | L45; L46; L37; |
| | | | | | | L38 |
| 1590 | IMRTFKVSIW | L52 | IRQLLFVV | L25; L35 | LETIQITI | L45; L48; L37; |
| | | | | | | L29 |
| 1591 | IMTRCLAV | L48 | IRQLLFVVEV | L64; L30 | LFDRYFKY | L1; L62; L12; L18 |
| 1592 | INFVRIIMRLW | L52 | ISAMVRMYI | L55; L73 | LFENKTTL | L62; L71; L72; |
| | | | | | | L23 |
| 1593 | INGDRWFLNR | L17 | ISDEFSSNVA | L46; L68 | LFFFLYENAF | L72; L71; L12; L9 |
| 1594 | INGLMLLEI | L73 | ISDEFSSNVANY | L1; L18 | LFLPFFSNV | L47; L8; L71; L72 |
| 1595 | INIIIWFL | L73 | ISEHDYQIGGY | L1; L18 | LGFSTGVNL | L44; L56; L61; |
| | | | | | | L49 |
| 1596 | INLHTQVV | L48 | ISGINASVV | L73; L48 | LIDLQELGKY | L1; L18; L14; L12 |
| 1597 | INNTVYTKV | L73 | ISLAGSYKD | L54; L55 | LIIFWFSLEL | L60; L61; L73; |
| | | | | | | L59 |
| 1598 | INRPQIGV | L48 | ISMDNSPNLAW | L52; L54 | LITLATCEL | L60; L59; L61; |
| | | | | | | L67 |
| 1599 | IPGIPKDMTY | L31 | ISMMGFKMNY | L1; L18 | LKAPKEIIF | L27; L44; L66; |
| | | | | | | L69 |
| 1600 | IPIGAGICASY | L31 | ISNCVADY | L54; L18 | LKSPNFSKL | L44; L66; L64; |
| | | | | | | L27 |
| 1601 | IPKDMTYRRL | L39 | ISNSWLMW | L54; L73 | LLALHRSY | L26; L59; L1; L18 |
| 1602 | IPKDMTYRRLI | L39 | ISQYSLRL | L73; L60 | LLFLAFVVFL | L4; L2; L3; L5 |
| 1603 | IPKEEVKP | L51 | ISSVLNDIL | L67; L53 | LLFLMSFTV | L5; L2; L4; L3 |
| 1604 | IPKEEVKPFI | L47 | ISTKHFYW | L54; L52 | LLHKPIVWHV | L3; L5; L4; L2 |
| 1605 | IPMDSTVKNYF | L31 | ITDAQTGSS | L1; L18 | LLLDKRTTC | L4; L23; L16; L2 |
| 1606 | IPRRNVATLQA | L51 | ITDAQTGSSK | L18; L1 | LLSDLQDL | L4; L3; L57; L59 |
| 1607 | IPTITQMNLKY | L31 | ITDAQTGSSKC | L18; L1 | LLTILTSL | L23; L59; L74; |
| | | | | | | L25 |
| 1608 | IPYNSVTS | L47 | ITDVFYKEN | L1; L68 | LLTLQQIEL | L74; L68; L2; L56 |
| 1609 | IPYNSVTSSIV | L47 | ITDVFYKENSY | L1; L18 | LMCQPILLL | L5; L4; L61; L34 |
| 1610 | IPYNSVTSSIVI | L47 | ITEHSWNADLY | L1; L18 | LNDFNLVAM | L68; L62; L63; |
| | | | | | | L32 |
| 1611 | IQDSLSSTA | L28 | ITFDNLKTLL | L20; L53 | LNDLNETL | L68; L63; L62; |
| | | | | | | L67 |
| 1612 | IQFPNTYLE | L24 | ITGGIAIAM | L70; L58 | LNDLNETLV | L63; L62; L1; L68 |
| 1613 | IQITISSFK | L13 | ITGRLQSL | L53; L54 | LPDPSKPSK | L32; L22; L31; |
| | | | | | | L49 |
| 1614 | IQITISSFKW | L54 | ITILDGISQ | L53; L52 | LPETTADIVVF | L31; L39; L32; |
| | | | | | | L49 |
| 1615 | IQKEIDRL | L48 | ITLCFTLK | L6; L7 | LPFGWLIV | L47; L50; L51; |
| | | | | | | L39 |
| 1616 | IQRKYKGI | L48 | ITLCFTLKRK | L7; L6 | LPFGWLIVGVAL | L56; L31; L22; |
| | | | | | | L39 |
| 1617 | IQRKYKGIKI | L48 | ITQMNLKY | L18; L1 | LPGTILRTT | L51; L50; L32; |
| | | | | | | L56 |
| 1618 | IQTIVEVQ | L48 | ITREEAIRH | L53; L52 | LPIDKCSRII | L47; L32; L49; |
| | | | | | | L39 |
| 1619 | IQTTPGSGV | L28 | ITREEAIRHV | L13; L52 | LPKGIMMNV | L51; L47; L39; |
| | | | | | | L50 |
| 1620 | IQWMVMFTP | L24 | ITVNVLAW | L54; L52 | LPPLLTDEM | L31; L22; L47; |
| | | | | | | L32 |
| 1621 | IRAAEIRAS | L64 | IVAGGIVA | L51; L50 | LPVLQVRDV | L47; L50; L51; |
| | | | | | | L39 |
| 1622 | IRENNRVV | L64 | IVAGGIVAIV | L20; L3 | LQFTSLEI | L48; L24; L47; |
| | | | | | | L25 |
| 1623 | IRGGDGKMK | L30 | IVAIVVTCLAY | L12; L18 | LQKAAITIL | L44; L58; L26; |
| | | | | | | L69 |
| 1624 | IRHVRAWIGF | L30 | IVDEPEEHVQ | L63; L68 | LQSLENVAF | L26; L27; L31; |
| | | | | | | L34 |
| 1625 | IRQGTDYKH | L30 | IVDSVTVK | L63; L68 | LRGTAVMSL | L65; L66; L35; |
| | | | | | | L64 |
| 1626 | IRVGARKSA | L30 | IVEVQPQL | L63; L68 | LSDRELHLSW | L52; L1; L54; L18 |
| 1627 | ISAARQGFV | L73 | IVFITLCFTLK | L6; L7 | LSDRVVFV | L63; L68; L62; L1 |
| 1628 | ISAGFSLWVYK | L7 | IVFMCVEY | L26; L59 | LSGLDSLDTY | L18; L1; L52; L14 |
| 1629 | ISAMVRMYIF | L53 | IVNNATNVVIK | L7; L6 | LTILTSLL | L60; L1; L59; L61 |
| 1630 | ISDEFSSNVAN | L68 | IVVTCLAYYF | L12; L52 | LTILTSLLVL | L67; L60; L59; |
| | | | | | | L73 |
| 1631 | ISDEVARDLS | L1 | IWNVKDFMSL | L8; L9 | LTKPYIKW | L52; L54; L53; |
| | | | | | | L55 |
| 1632 | ISDYDYYR | L1 | IWVATEGAL | L28; L67 | LVFLGIITT | L50; L51; L69; |
| | | | | | | L13 |
| 1633 | ISFPLCAN | L59 | IYDEPTTTTS | L62; L9 | LVKNKCVNF | L58; L26; L43; |
| | | | | | | L52 |
| 1634 | ISFPLCANGQVF | L52 | IYDEPTTTTSV | L62; L5 | LVSTQEFRY | L12; L14; L18; L1 |
| 1635 | ISLAGSYKDW | L52 | IYKTPPIKD | L9; L13 | LWAHGFEL | L61; L59; L60; |
| | | | | | | L56 |
| 1636 | ISMATNYDL | L53 | IYKTPPIKDF | L9; L8 | LYDANYFLC | L62; L1; L9; L12 |
| 1637 | ISPYNSQNAV | L57 | IYLYLTFYLT | L9; L8 | LYDKLQFTSL | L62; L9; L68; L8 |
| 1638 | ISRQRLTK | L13 | IYNDKVAG | L71; L72 | LYFIKGLNNL | L9; L8; L71; L72 |
| 1639 | ISSDVLVN | L73 | IYNDKVAGFAK | L9; L8 | LYIIKLIFLW | L9; L8; L52; L12 |
| | | | F | | | |
| 1640 | ISTCACEI | L55 | IYQAGSTP | L71; L72 | LYLDAYNMM | L71; L72; L8; L9 |
| 1641 | ISTEIYQAG | L43 | IYQAGSTPC | L71; L72 | LYLTFYLTN | L8; L9; L71; L72 |
| 1642 | ITDAQTGS | L1 | IYQTSNFR | L71; L72 | LYNKYKYF | L9; L62; L72; L71 |
| 1643 | ITDVFYKE | L1 | IYSLLLCRM | L62; L9 | LYNSASFSTF | L8; L9; L72; L71 |
| 1644 | ITEEVGHTDLM | L18 | IYSTAALGV | L72; L71 | LYYQNNVFM | L72; L71; L62; L9 |
| 1645 | ITFELDERIDK | L7 | IYSTAALGVL | L9; L8 | MADQAMTQMY | L1; L18; L31; L49 |
| 1646 | ITGLYPTL | L67 | IYTELEPPCRF | L9; L8 | MAFPSGKVE | L69; L70; L61; |
| | | | | | | L32 |
| 1647 | ITGNTLQCI | L53 | KACPLIAA | L50; L51 | MEKLKTLV | L45; L33; L23; |
| | | | | | | L48 |
| 1648 | ITLATCEL | L60 | KAFKQIVESC | L54; L52 | MEKLKTLVA | L42; L46; L38; |
| | | | | | | L37 |
| 1649 | ITLATCELYHY | L12 | KAIVSTIQRKY | L14; L52 | MELTPVVQTI | L45; L40; L41; |
| | | | | | | L36 |
| 1650 | ITNCVKML | L73 | KALRKVPTD | L54; L52 | MGYINVFAF | L27; L26; L47; |
| | | | | | | L59 |
| 1651 | ITNLCPFGEVF | L52 | KATEETFKLSY | L14; L18 | MIDVQQWGF | L63; L1; L68; L54 |
| 1652 | ITPCSFGGV | L57 | KCDRAMPNML | L63; L68 | MIERFVSL | L60; L63; L68; |
| | | | | | | L23 |
| 1653 | ITPGTNTSN | L57 | KCKSAFYIL | L39; L13 | MLDNRATL | L62; L63; L68; L5 |
| 1654 | ITREVGFVVP | L52 | KDAPYIVGD | L65; L33 | MPLGYVTHGL | L31; L32; L56; |
| | | | | | | L22 |
| 1655 | ITSGDGTTS | L53 | KDKSAQCF | L33; L55 | MRIFTIGTV | L35; L64; L30; |
| | | | | | | L28 |
| 1656 | ITSKETLYC | L18 | KDLSPRWY | L55; L14 | MRNAGIVGV | L30; L64; L35; |
| | | | | | | L25 |
| 1657 | ITSKETLYCI | L53 | KDMTYRRL | L33; L55 | MRNAGIVGVL | L65; L35; L66; |
| | | | | | | L30 |
| 1658 | ITTDNTFV | L73 | KDVVECLKL | L33; L37 | MSDVKCTSV | L63; L68; L18; L1 |
| 1659 | ITTYPGQGLNGY | L1 | KEDLKFPRG | L45; L36 | MVSLLSVL | L59; L67; L25; |
| | | | | | | L74 |
| 1660 | ITVATSRTLSY | L18 | KEELDKYFK | L36; L38 | MWLIINLV | L48; L47; L25; |
| | | | | | | L33 |
| 1661 | ITVEELKK | L7 | KEGFFTYI | L45; L33 | MWLSYFIASF | L9; L8; L12; L10 |
| 1662 | ITVEELKKLL | L53 | KEGQINDM | L33; L37 | MYMGTLSY | L71; L72; L66; |
| | | | | | | L12 |
| 1663 | IVAAIVFIT | L20 | KEGQINDMI | L45; L36 | NANQVIVNN | L49; L17; L31; |
| | | | | | | L19 |
| 1664 | IVAGGIVAIVV | L20 | KEGSSVELKHF | L41; L40 | NAVASKIL | L70; L60; L61; |
| | | | | | | L69 |
| 1665 | IVAIVVTCLAYY | L18 | KEGVEFLRD | L45; L65 | NDPVGFTL | L33; L57; L66; |
| | | | | | | L71 |
| 1666 | IVEEAKKV | L63 | KENDSKEGFFTY | L40; L14 | NEFACVVAD | L29; L46; L37; |
| | | | | | | L42 |
| 1667 | IVGDVVQEGV | L20 | KESVQTFF | L33; L29 | NEYRLYLDA | L42; L46; L38; |
| | | | | | | L25 |
| 1668 | IVGGQIVTC | L26 | KETLYCIDGA | L38; L42 | NFCALILAY | L12; L72; L71; |
| | | | | | | L31 |
| 1669 | IVGVALLAVF | L52 | KFKEGVEFLR | L15; L21 | NFKNLREF | L71; L72; L62; |
| | | | | | | L23 |
| 1670 | IVKFISTCA | L51 | KFLKTNCCRF | L8; L9 | NFVFPLNSI | L8; L71; L9; L72 |
| 1671 | IVNNWLKQLIK | L6 | KFLPFQQFGR | L15; L21 | NFVRIIMRL | L20; L8; L29; L9 |
| 1672 | IVNSVLLFLAF | L12 | KFNGLTVLP | L8; L62 | NGVEGENCY | L29; L49; L27; |
| | | | | | | L10 |
| 1673 | IVNVSLVKPSF | L52 | KFNPPALQDAY | L14; L12 | NIKPVPEV | L3; L48; L23; L58 |
| 1674 | IVQLSEISM | L28 | KFTDGVCLFW | L8; L9 | NKWGKARLY | L27; L64; L14; |
| | | | | | | L66 |
| 1675 | IVQMLSDTL | L67 | KFVRIQPGQTF | L8; L9 | NLAKHCLHV | L3; L24; L2; L4 |
| 1676 | IVRFPNITNL | L13 | KFYDAQPC | L72; L71 | NLDSKVGGNY | L1; L18; L14; L12 |
| 1677 | IVSTIQRKYK | L13 | KGRLIIREN | L55; L13 | NLEEAARY | L1; L18; L12; L14 |
| 1678 | IVVTCLAY | L59 | KGSLPINVI | L16; L44 | NLIDSYFVVK | L6; L19; L7; L13 |
| 1679 | IVWHVNNATNK | L6 | KGVEAVMY | L54; L27 | NLKTLLSL | L23; L3; L25; L57 |
| 1680 | IVYTACSHAA | L51 | KGYHLMSF | L54; L59 | NLKTLLSLR | L15; L17; L21; |
| | | | | | | L19 |
| 1681 | IWLGFIAGLI | L8 | KHFSMMIL | L28; L35 | NLLEILQKE | L4; L24; L2; L5 |
| 1682 | IWNLDYIINL | L62 | KHITSKETLY | L14; L18 | NLPGCDGGSLY | L14; L12; L11; |
| | | | | | | L18 |
| 1683 | IWNVKDFM | L62 | KHLIPLMY | L27; L18 | NLQSNHDLY | L1; L18; L12; L14 |
| 1684 | IYSKHTPIN | L9 | KHSSGVTR | L21; L15 | NPETNILL | L39; L56; L23; |
| | | | | | | L32 |
| 1685 | IYTELEPPC | L9 | KHSSGVTREL | L34; L28 | NPFMIDVQQ | L49; L32; L31; |
| | | | | | | L50 |
| 1686 | KAHFPREGV | L13 | KHTPINLVR | L35; L21 | NPKAIKCV | L39; L23; L51; |
| | | | | | | L47 |
| 1687 | KAHKDKSAQ | L43 | KHVYQLRAR | L15; L21 | NPNYEDLLI | L49; L32; L34; |
| | | | | | | L47 |
| 1688 | KAHKDKSAQCF | L54 | KIADKYVR | L21; L15 | NQFNSAIGK | L7; L19; L13; L6 |
| 1689 | KAIDGGVT | L55 | KIADKYVRN | L43; L16 | NQPYPNASF | L27; L26; L57; L9 |
| 1690 | KAIDGGVTRD | L54 | KIITLKKR | L21; L15 | NQVIVNNL | L48; L25; L35; |
| | | | | | | L28 |
| 1691 | KALRKVPTDNY | L14 | KILGLPTQT | L6; L16 | NRGMVLGSL | L66; L25; L35; |
| | | | | | | L30 |
| 1692 | KARLYYDSM | L43 | KIQDSLSST | L14; L16 | NRNRFLYII | L35; L34; L64; |
| | | | | | | L30 |
| 1693 | KASCTLSEQL | L54 | KITEHSWNADL | L14; L18 | NRPQIGVVR | L66; L19; L30; |
| | | | Y | | | L35 |
| 1694 | KASMPTTIAK | L6 | KIVNNWLKQL | L16; L60 | NSTLEQYVF | L53; L54; L55; |
| | | | | | | L52 |
| 1695 | KAYKDYLAS | L43 | KIYSKHTPINL | L16; L6 | NTCDGTTF | L53; L54; L70; |
| | | | | | | L58 |
| 1696 | KAYNVTQA | L69 | KKFDTFNGE | L27; L44 | NTKHSSGVTR | L17; L19; L15; |
| | | | | | | L21 |
| 1697 | KAYNVTQAFGR | L15 | KKIKACVEE | L44; L27 | NTSNQVAVLY | L12; L18; L1; L14 |
| 1698 | KCAYWVPR | L21 | KKKADETQAL | L44; L27 | NTWCIRCLW | L52; L16; L54; |
| | | | | | | L53 |
| 1699 | KCDHCGETSW | L54 | KKLLEQWNL | L44; L27 | NTYLEGSVR | L17; L19; L21; |
| | | | | | | L15 |
| 1700 | KCDRAMPNM | L63 | KKPNELSRV | L5; L24 | NVAFELWAK | L7; L19; L6; L17 |
| 1701 | KCEESSAKSA | L38 | KKPNELSRVL | L44; L66 | NVLTLVYKV | L4; L20; L24; L5 |
| 1702 | KCKSAFYI | L55 | KKQQTVTLL | L44; L27 | NVLTLVYKVY | L10; L14; L12; |
| | | | | | | L11 |
| 1703 | KCRSKNPLL | L13 | KKVDGVVQ | L27; L44 | NYITTYPGQGL | L8; L72; L71; L9 |
| 1704 | KCSRIIPAR | L21 | KKVDGVVQQ | L27; L44 | NYLGKPREQ | L71; L72; L8; L17 |
| 1705 | KDASGKPVP | L46 | KKVDGVVQQL | L44; L27 | NYLKRRVV | L71; L25; L23; |
| | | | | | | L72 |
| 1706 | KDASGKPVPY | L43 | KKVKPTVVV | L44; L27 | NYLKSPNF | L9; L8; L71; L72 |
| 1707 | KDATPSDF | L33 | KKWKYPQVN | L44; L27 | NYNYLYRL | L66; L62; L8; L71 |
| 1708 | KDATPSDFVR | L21 | KLALGGSVAI | L16; L2 | NYQKVGMQK | L17; L13; L71; L8 |
| 1709 | KDCPAVAK | L33 | KLCEEMLDNR | L21; L15 | NYQVNGYPNMF | L9; L8; L72; L71 |
| 1710 | KDCPAVAKH | L33 | KLDGFMGR | L21; L15 | NYSGVVTTVM | L66; L71; L72; L8 |
| 1711 | KDEDDNLIDSY | L18 | KLDGFMGRIR | L21; L15 | NYTVSCLPF | L72; L9; L71; L8 |
| 1712 | KDFMSLSE | L33 | KLDGVVCTE | L5; L2 | NYYKKDNSYF | L8; L71; L9; L72 |
| 1713 | KDFYDFAV | L33 | KLDNDALNN | L18; L5 | PAFDKSAF | L43; L59; L58; |
| | | | | | | L70 |
| 1714 | KDFYDFAVSK | L13 | KLDNYYKKDNS | L18; L1 | PAFDKSAFV | L20; L58; L69; |
| | | | Y | | | L70 |
| 1715 | KDGHVETFY | L14 | KLFAAETLKA | L3; L2 | PEEHFIETI | L45; L37; L36; |
| | | | | | | L42 |
| 1716 | KDGIIWVA | L65 | KLGSLVVR | L21; L15 | PFFSNVTWF | L9; L72; L8; L71 |
| 1717 | KDGTCGLV | L33 | KLHDELTGHML | L2; L16 | PINPTDQSSY | L43; L14; L26; |
| | | | | | | L18 |
| 1718 | KDHIGTRN | L33 | KLINIIIWELL | L4; L16 | PLIAAVITR | L21; L19; L17; |
| | | | | | | L15 |
| 1719 | KDKKKKAD | L23 | KLKKSLNVA | L3; L51 | PLIQPIGAL | L4; L10; L3; L11 |
| 1720 | KDKSAQCFK | L13 | KLKKSLNVAK | L13; L6 | PLNSIIKTI | L24; L3; L4; L16 |
| 1721 | KDLLARAG | L33 | KLKPVLDW | L16; L54 | PLVDLPIGI | L3; L2; L4; L5 |
| 1722 | KDLPKEIT | L33 | KLKVDTANPK | L13; L6 | PTLNISDEF | L53; L52; L9; L12 |
| 1723 | KDMTYRRLI | L55 | KLLHKPIVWHV | L4; L2 | PYCYDTNVL | L9; L8; L72; L71 |
| 1724 | KDMTYRRLISM | L33 | KLLKSIAATR | L21; L15 | PYNSVTSSI | L9; L8; L72; L71 |
| 1725 | KDPNFKDQV | L33 | KLMGHFAW | L16; L54 | QAGNVQLRV | L73; L69; L24; |
| | | | | | | L70 |
| 1726 | KDQVILLN | L33 | KLQFTSLEI | L24; L16 | QEAYEQAVA | L42; L38; L46; |
| | | | | | | L40 |
| 1727 | KDTEKYCAL | L33 | KLQNNELSPV | L2; L3 | QEGVLTAV | L45; L33; L48; |
| | | | | | | L37 |
| 1728 | KDVLECNV | L33 | KLQSSQAW | L54; L16 | QEGVLTAVVI | L40; L41; L36; |
| | | | | | | L45 |
| 1729 | KDYLASGG | L33 | KLRSDVLLPL | L6; L3 | QEHYVRITG | L42; L41; L38; |
| | | | | | | L29 |
| 1730 | KEELDKYF | L33 | KLSYGIATVR | L21; L15 | QEHYVRITGL | L37; L41; L36; |
| | | | | | | L40 |
| 1731 | KEELDKYFKN | L38 | KLWAQCVQLH | L6; L16 | QELGKYEQYI | L40; L45; L41; |
| | | | | | | L36 |
| 1732 | KEEVKPFI | L45 | KMFDAYVNT | L13; L16 | QELYSPIFLI | L41; L40; L36; |
| | | | | | | L45 |
| 1733 | KEEVKPFIT | L38 | KMFYKGVITH | L16; L6 | QGDDYVYL | L63; L62; L68; |
| | | | | | | L67 |
| 1734 | KEGATTCGY | L14 | KMKDLSPR | L15; L21 | QIDRLITGR | L21; L17; L19; |
| | | | | | | L15 |
| 1735 | KEGATTCGYL | L36 | KMQRMLLEK | L13; L6 | QLCQYLNTL | L4; L3; L5; L57 |
| 1736 | KEGQINDMIL | L36 | KMSDVKCTSV | L3; L2 | QLIKVTLV | L48; L3; L24; L23 |
| 1737 | KEGQINDMILSL | L36 | KMVSLLSV | L48; L73 | QLLFVVEV | L4; L2; L23; L48 |
| 1738 | KEGSSVELK | L36 | KNADIVEEA | L3; L46 | QPILLLDQAL | L22; L32; L31; |
| | | | | | | L56 |
| 1739 | KEIKESVQTFF | L36 | KNIDGYFKIY | L14; L27 | QPRVEKKKL | L39; L22; L23; |
| | | | | | | L56 |
| 1740 | KEILVTYNCC | L38 | KNKCVNFNF | L53; L52 | QPVSELLTP | L32; L51; L50; |
| | | | | | | L31 |
| 1741 | KEITVATS | L37 | KNLREFVF | L54; L53 | QRNAPRITF | L30; L65; L34; |
| | | | | | | L66 |
| 1742 | KELLVYAADP | L38 | KPFLNKVVS | L56; L50 | QSTQWSLFF | L73; L53; L55; |
| | | | | | | L54 |
| 1743 | KENDSKEGFF | L40 | KPFLNKVVST | L56; L50 | QTIEVNSFSGY | L11; L14; L1; L10 |
| 1744 | KENSYTTTIKP | L38 | KPGNFNKDF | L39; L56 | QTYVTQQL | L55; L70; L48; |
| | | | | | | L25 |
| 1745 | KEPCSSGTY | L14 | KPHNSHEGKTF | L39; L56 | QTYVTQQLI | L55; L48; L24; |
| | | | | | | L53 |
| 1746 | KESPFELE | L33 | KPIVWHVNNA | L51; L50 | QVRDVLVRGF | L10; L11; L52; |
| | | | | | | L26 |
| 1747 | KESPFELEDFI | L36 | KPLEFGATSA | L51; L50 | QWNLVIGFLF | L9; L40; L41; L8 |
| 1748 | KESVQTFFKLV | L45 | KPPISFPL | L22; L56 | QYELKHGTF | L9; L62; L8; L72 |
| 1749 | KFADDLNQLTGY | L14 | KPSFYVYSR | L21; L15 | QYGSFCTQL | L9; L66; L72; L8 |
| 1750 | KFCLEASFNY | L12 | KPSKRSFIED | L56; L39 | QYIDIGNY | L72; L71; L14; |
| | | | | | | L66 |
| 1751 | KFDEDDSE | L62 | KPTETICA | L51; L50 | QYIKWPWYI | L9; L8; L64; L55 |
| 1752 | KFDEDDSEP | L62 | KPTETICAPL | L56; L22 | QYNRYLALY | L14; L12; L72; L9 |
| 1753 | KFDTFNGE | L62 | KPTVVVNA | L51; L50 | RAFDIYNDK | L13; L7; L6; L19 |
| 1754 | KFDTFNGEC | L62 | KQDDKKIKA | L24; L63 | RAMPNMLRIM | L69; L70; L52; |
| | | | | | | L55 |
| 1755 | KFISTCAC | L71 | KQEILGTV | L48; L24 | RDLSLQFKR | L15; L21; L30; L7 |
| 1756 | KFISTCACEI | L8 | KQFDTYNLWNT | L16; L27 | RDVLVRGF | L33; L65; L37; |
| | | | F | | | L29 |
| 1757 | KFKTEGLCV | L13 | KQGNFKNLR | L21; L15 | REEAIRHVRA | L38; L42; L46; |
| | | | | | | L37 |
| 1758 | KFLKTNCCR | L15 | KQIYKTPPI | L48; L24 | REFLTRNPA | L46; L38; L42; |
| | | | | | | L37 |
| 1759 | KFLPFQQFG | L8 | KQYGDCLGD | L27; L24 | REGVFVSN | L33; L45; L37; |
| | | | | | | L29 |
| 1760 | KFLTENLLLYI | L8 | KRAKVTSAM | L66; L30 | RELKVTFFP | L38; L42; L46; |
| | | | | | | L33 |
| 1761 | KFLVFLGI | L8 | KRHTFSNY | L66; L65 | RELNGGAYTR | L21; L36; L15; |
| | | | | | | L38 |
| 1762 | KFLVFLGII | L8 | KRISNCVADY | L30; L14 | REPMLQSA | L33; L37; L38; |
| | | | | | | L46 |
| 1763 | KFNPPALQ | L62 | KRNVIPTI | L48; L66 | RFPNITNLC | L8; L9; L72; L71 |
| 1764 | KFNPPALQDAYY | L14 | KRRVVFNGV | L13; L30 | RGDKSVYY | L18; L1; L54; L27 |
| 1765 | KFPRGQGV | L71 | KRSFIEDL | L65; L66 | RHINAQVAK | L7; L28; L13; L6 |
| 1766 | KFYDAQPCSDK | L6 | KRSFIEDLLF | L30; L34 | RHSLSHFVNL | L34; L56; L28; |
| | | | | | | L35 |
| 1767 | KFYGGWHNMLK | L6 | KSAQCFKM | L54; L55 | RIFTIGTV | L48; L24; L3; L33 |
| 1768 | KGAKLLHKP | L46 | KSAQCFKMFY | L18; L14 | RIFTIGTVTLK | L6; L7; L13; L21 |
| 1769 | KGDYGDAVV | L63 | KSATCITR | L21; L15 | RIMASLVL | L73; L61; L60; |
| | | | | | | L56 |
| 1770 | KGFCDLKGK | L13 | KSAYENFNQ | L54; L53 | RIMASLVLAR | L21; L6; L7; L15 |
| 1771 | KGFCDLKGKY | L14 | KSDGTGTIYT | L18; L1 | RKYKGIKI | L24; L27; L48; |
| | | | | | | L44 |
| 1772 | KGGAPTKVTF | L65 | KSDGTGTIYTEL | L18; L68 | RLANECAQV | L3; L24; L2; L4 |
| 1773 | KGGRTIAF | L54 | KSIAATRGA | L46; L55 | RLFRKSNLK | L6; L21; L13; L7 |
| 1774 | KGIKIQEGV | L24 | KSLNVAKSE | L55; L53 | RLQSLENV | L4; L24; L2; L3 |
| 1775 | KGIMMNVAKY | L14 | KSNHNFLV | L73; L18 | RNFYEPQII | L24; L55; L65; |
| | | | | | | L73 |
| 1776 | KGLDYKAF | L27 | KSNHNFLVQ | L73; L18 | RNRDVDTDF | L27; L26; L65; |
| | | | | | | L53 |
| 1777 | KGLDYKAFK | L13 | KSNIIRGWI | L55; L73 | RQALLKTVQF | L27; L44; L26; |
| | | | | | | L16 |
| 1778 | KGLNNLNR | L15 | KSTNLVKNK | L13; L7 | RQCSGVTF | L27; L26; L44; |
| | | | | | | L54 |
| 1779 | KGLPWNVV | L48 | KSVLYYQNNVF | L54; L52 | RQFHQKLL | L48; L44; L24; |
| | | | | | | L27 |
| 1780 | KGLYRKCVKSR | L15 | KSWMESEFR | L21; L15 | RQGTDYKHW | L54; L16; L52; |
| | | | | | | L14 |
| 1781 | KGPITDVFY | L14 | KSYVHVVDG | L73; L53 | RQIAPGQTG | L24; L26; L27; |
| | | | | | | L44 |
| 1782 | KGPKVKYLYF | L8 | KTHVQLSLP | L18; L53 | RQKKQQTVTL | L44; L26; L27; |
| | | | | | | L56 |
| 1783 | KGVAPGTAV | L51 | KTILRKGGR | L21; L15 | RQVVNVVTT | L44; L26; L27; |
| | | | | | | L24 |
| 1784 | KGVAPGTAVL | L44 | KTPEEHFI | L55; L53 | RQWLPTGTLL | L44; L27; L30; |
| | | | | | | L24 |
| 1785 | KGVEAVMYM | L69 | KTPKYKFVR | L21; L15 | RRVVFNGVSF | L30; L65; L54; |
| | | | | | | L53 |
| 1786 | KGVHFVCNL | L69 | KTQFNYYKK | L13; L7 | RSEDKRAKV | L63; L73; L18; |
| | | | | | | L13 |
| 1787 | KHADFDTW | L54 | KTTEVVGD | L54; L55 | RSQMEIDFL | L55; L73; L53; |
| | | | | | | L65 |
| 1788 | KHAFLCLFLL | L34 | KTTEVVGDIILK | L6; L7 | RSVASQSI | L55; L54; L53; |
| | | | | | | L48 |
| 1789 | KHDFFKFRI | L34 | KTTVASLI | L55; L54 | RTIAFGGCVFSY | L18; L14; L16; |
| | | | | | | L52 |
| 1790 | KHFYWFFSN | L16 | KTVQFCDAM | L54; L53 | RTLLTKGTL | L55; L53; L16; |
| | | | | | | L44 |
| 1791 | KHKHAFLCL | L13 | KTYERHSLS | L18; L73 | RTTNGDFLH | L54; L53; L52; L7 |
| 1792 | KIADYNYK | L6 | KVATVQSK | L13; L6 | RVDFCGKGY | L18; L14; L1; L26 |
| 1793 | KIALKGGKI | L24 | KVGGNYNYLYR | L21; L15 | RVESSSKLW | L54; L18; L52; |
| | | | | | | L16 |
| 1794 | KIFVDGVPFVV | L16 | KVPATVSV | L5; L57 | RVQPTESIVR | L21; L15; L7; L13 |
| 1795 | KILNNLGV | L73 | KVTIDYTEISF | L16; L52 | RVVTTFDSEY | L14; L18; L26; |
| | | | | | | L54 |
| 1796 | KINAACRKV | L73 | KVTKGKAKK | L13; L6 | RYFRLTLGV | L24; L13; L8; L71 |
| 1797 | KIVDEPEEHV | L2 | KVYYGNALD | L14; L21 | RYMNSQGL | L71; L72; L8; L9 |
| 1798 | KKAGGTTE | L27 | KWADNNCY | L54; L18 | RYRIGNYKL | L8; L9; L13; L66 |
| 1799 | KKAGGTTEML | L44 | KWDLIISD | L62; L68 | RYWEPEFYEA | L8; L13; L9; L65 |
| 1800 | KKCKSAFY | L27 | KWDLTAFGLV | L62; L18 | SAAKKNNL | L74; L23; L56; |
| | | | | | | L58 |
| 1801 | KKCKSAFYIL | L44 | KWPWYIWLGF | L8; L9 | SAFAMMFVK | L7; L6; L19; L69 |
| 1802 | KKGAKLLHK | L6 | KYFSGAMDTTS | L14; L71 | SAMQTMLF | L58; L59; L74; |
| | | | Y | | | L70 |
| 1803 | KKKLDGFMGR | L15 | KYFVKIGPER | L15; L21 | SAMVRMYIF | L59; L58; L69; |
| | | | | | | L70 |
| 1804 | KKLKKSLNV | L73 | KYLPIDKCSRI | L8; L9 | SCVLSGHNL | L60; L36; L56; |
| | | | | | | L34 |
| 1805 | KKRWQLAL | L27 | KYLVQQESP | L71; L8 | SDIDITFLK | L7; L19; L6; L13 |
| 1806 | KKSTNLVKN | L44 | KYNENGTITD | L8; L9 | SDIDITFLKK | L7; L13; L19; L6 |
| 1807 | KLALGGSVAIK | L6 | KYPQVNGLTS | L8; L9 | SDIDYVPLK | L7; L13; L6; L19 |
| 1808 | KLASHMYCSFY | L18 | KYPQVNGLTSI | L9; L8 | SDNGPQNQR | L15; L21; L17; |
| | | | | | | L19 |
| 1809 | KLDDKDPNFK | L6 | KYVRNLQHRL | L8; L9 | SDYDYYRY | L29; L65; L43; |
| | | | | | | L14 |
| 1810 | KLDGVVCT | L63 | LAAECTIFK | L7; L19 | SEAFLIGC | L33; L45; L37; |
| | | | | | | L29 |
| 1811 | KLDNDALN | L18 | LAAIMQLFFSY | L31; L12 | SEDNQTTTIQTI | L40; L45; L36; |
| | | | | | | L41 |
| 1812 | KLDNYYKK | L18 | LAATKMSEC | L70; L58 | SEPVLKGV | L33; L48; L45; |
| | | | | | | L37 |
| 1813 | KLDNYYKKD | L5 | LAATVRLQA | L50; L51 | SEPVLKGVKL | L36; L41; L37; |
| | | | | | | L40 |
| 1814 | KLEGYAFEH | L18 | LACEDLKPV | L47; L70 | SETKCTLKSF | L40; L41; L29; |
| | | | | | | L37 |
| 1815 | KLEGYAFEHI | L18 | LACFVLAAVY | L31; L12 | SEVGPEHSLA | L38; L42; L46; |
| | | | | | | L41 |
| 1816 | KLEGYAFEHIVY | L18 | LADNKFALT | L63; L1 | SFLAHIQWM | L71; L72; L12; L8 |
| 1817 | KLGASQRV | L24 | LAHIQWMVMF | L31; L49 | SFNPETNI | L62; L48; L71; |
| | | | | | | L72 |
| 1818 | KLGSLVVRCSF | L16 | LAIDAYPLT | L61; L31 | SFPLCANGQVF | L72; L71; L9; L8 |
| 1819 | KLHDELTGHM | L14 | LAIDAYPLTK | L7; L61 | SFRLFARTR | L17; L15; L21; |
| | | | | | | L48 |
| 1820 | KLHNWNCVN | L16 | LAKALNDF | L58; L59 | SFSGYLKL | L62; L8; L72; L71 |
| 1821 | KLIANQFNSA | L46 | LAKDTTEA | L43; L50 | SFYVYSRV | L48; L62; L71; |
| | | | | | | L72 |
| 1822 | KLINIIIWFLLL | L6 | LAKHCLHV | L70; L47 | SFYVYSRVK | L13; L71; L72; L7 |
| 1823 | KLKALNLGETF | L16 | LALITLAT | L59; L47 | SGAMDTTSY | L43; L26; L27; |
| | | | | | | L14 |
| 1824 | KLKKSLNV | L13 | LALLSDLQDL | L31; L60 | SIIIGGAKLK | L7; L19; L13; L6 |
| 1825 | KLLEQWNLVIGF | L16 | LANECAQV | L47; L70 | SIVCRFDTR | L19; L17; L21; |
| | | | | | | L15 |
| 1826 | KLLGVGGK | L6 | LAPLLSAG | L57; L59 | SLDTYPSLE | L1; L62; L63; L18 |
| 1827 | KLLGVGGKP | L14 | LAPLLSAGI | L47; L57 | SLENVAFNV | L4; L5; L2; L24 |
| 1828 | KLLHKPIVWH | L6 | LATHGLAA | L50; L61 | SLETIQITI | L24; L5; L2; L68 |
| 1829 | KLMGHFAWWTA | L16 | LCDRRATCF | L63; L62 | SLIDLQELGK | L6; L7; L13; L19 |
| 1830 | KLMGHFAWWTA | L16 | LCEKALKY | L1; L18 | SLIDLQELGKY | L14; L11; L12; |
| | F | | | | | L10 |
| 1831 | KLMVVIPDYNTY | L18 | LCPFGEVF | L72; L71 | SLKVPATVSV | L43; L3; L2; L13 |
| 1832 | KLNEEIAIILA | L2 | LDEWSMATY | L18; L1 | SLNGVTLI | L24; L3; L74; L48 |
| 1833 | KLNTDHSSS | L16 | LDEWSMATYY | L1; L18 | SLRPDTRY | L26; L43; L27; |
| | | | | | | L14 |
| 1834 | KLNVGDYF | L62 | LDISASIVA | L46; L38 | SLVKPSFYV | L5; L2; L4; L20 |
| 1835 | KLNVGDYFVL | L16 | LDSCKRVL | L65; L33 | SMDNSPNL | L62; L68; L63; |
| | | | | | | L28 |
| 1836 | KLQDVVNQNA | L2 | LDSFKEEL | L33; L65 | SMMGFKMNY | L26; L14; L12; |
| | | | | | | L16 |
| 1837 | KLQNNELSP | L16 | LDWLEEKF | L33; L29 | SMQNCVLKL | L4; L3; L73; L8 |
| 1838 | KLRGTAVMSLK | L6 | LEASFNYL | L45; L29 | SNSGSDVLY | L14; L12; L27; |
| | | | | | | L18 |
| 1839 | KLRSDVLL | L74 | LEDEFTPF | L29; L62 | SPDAVTAY | L31; L49; L1; L22 |
| 1840 | KLSHQSDIEV | L2 | LEGETLPTEV | L45; L38 | SPFELEDF | L31; L49; L56; |
| | | | | | | L39 |
| 1841 | KLTCATTR | L21 | LEGYAFEHI | L45; L41 | SPFHPLAD | L50; L51; L65; |
| | | | | | | L49 |
| 1842 | KLTDNVYI | L2 | LEILDITP | L38; L46 | SPFHPLADN | L51; L49; L56; |
| | | | | | | L22 |
| 1843 | KLVLSVNPYV | L2 | LEILDITPC | L38; L29 | SPIQYIDIGNY | L31; L11; L14; |
| | | | | | | L49 |
| 1844 | KLVSSFLEMK | L6 | LEILDITPCSF | L40; L41 | SPNECNQMC | L49; L32; L56; |
| | | | | | | L39 |
| 1845 | KMADQAMTQ | L16 | LEIPRRNVAT | L38; L46 | SPNECNQMCL | L56; L39; L32; |
| | | | | | | L22 |
| 1846 | KMKDLSPRWYF | L16 | LEKCDLQNY | L29; L26 | SPNLAWPLI | L47; L22; L50; |
| | | | | | | L39 |
| 1847 | KMSECVLGQ | L16 | LELAMDEF | L29; L33 | SPTKLNDL | L56; L39; L22; |
| | | | | | | L23 |
| 1848 | KMVSLLSVLL | L44 | LEPPCRFV | L45; L64 | SRELKVTF | L65; L35; L66; |
| | | | | | | L34 |
| 1849 | KNLSDRVV | L73 | LEQWNLVIGF | L40; L41 | SRLDKVEA | L65; L25; L35; |
| | | | | | | L66 |
| 1850 | KNSKVQIGEY | L14 | LEQYVFCTVNA | L38; L42 | SSAKSASVYY | L18; L1; L58; L14 |
| 1851 | KNTVKSVGK | L13 | LETAQNSVRV | L45; L38 | SSQGSEYDY | L14; L1; L18; L26 |
| 1852 | KPASRELKVTF | L39 | LETIQITISSF | L40; L41 | SSVLNDILSR | L19; L7; L15; L17 |
| 1853 | KPGGTSSGD | L65 | LFARTRSM | L72; L71 | STECSNLLL | L1; L18; L68; L63 |
| 1854 | KPIVWHVNN | L56 | LFDESGEFK | L62; L1 | STFEEAALCTF | L16; L52; L10; |
| | | | | | | L53 |
| 1855 | KPLEFGATSAA | L51 | LFDMSKFPL | L62; L68 | STFISAAR | L21; L15; L19; |
| | | | | | | L17 |
| 1856 | KPNELSRVLGL | L56 | LFFSYFAV | L71; L72 | STLEQYVF | L53; L54; L52; |
| | | | | | | L55 |
| 1857 | KPNTWCIRC | L56 | LFIRQEEV | L48; L71 | STVLSFCAF | L10; L52; L60; |
| | | | | | | L59 |
| 1858 | KPPPGDQFKHL | L39 | LFLAFVVFLL | L8; L9 | SVAYESLR | L19; L21; L17; |
| | | | | | | L15 |
| 1859 | KPREQIDGYVM | L39 | LFLALITLA | L50; L12 | SVIDLLLDD | L11; L7; L12; L49 |
| 1860 | KPRSQMEI | L39 | LFSTVFPPTSF | L9; L8 | SVPWDTIANY | L11; L10; L12; |
| | | | | | | L14 |
| 1861 | KPRSQMEIDF | L39 | LFTRFFYVL | L8; L9 | SVQTFFKLV | L13; L20; L73; |
| | | | | | | L64 |
| 1862 | KPSKRSFIEDL | L56 | LFVTVYSH | L71; L72 | SVSSPDAVTAY | L14; L6; L11; L12 |
| 1863 | KPTETICAP | L51 | LFVTVYSHLL | L8; L9 | SVTSNYSGV | L11; L3; L10; L20 |
| 1864 | KPVPEVKI | L47 | LFYSYATH | L71; L72 | SVVNARLR | L19; L15; L17; |
| | | | | | | L21 |
| 1865 | KPVSEEVV | L51 | LFYSYATHS | L72; L71 | SYEDQDAL | L72; L71; L62; |
| | | | | | | L66 |
| 1866 | KPYIKWDLLK | L6 | LGDELGTDPY | L1; L18 | SYFIASFR | L17; L71; L15; |
| | | | | | | L72 |
| 1867 | KQARSEDKR | L21 | LGDVRETMSY | L18; L1 | SYLTPGDSS | L71; L72; L9; L8 |
| 1868 | KQASLNGV | L24 | LGFIAGLI | L47; L48 | SYYKLGASQR | L17; L15; L19; |
| | | | | | | L21 |
| 1869 | KQASLNGVT | L44 | LGLAAIMQL | L4; L61 | SYYSLLMPI | L71; L8; L72; L9 |
| 1870 | KQATKYLV | L24 | LGSLAATV | L47; L48 | TACTDDNAL | L32; L67; L57; |
| | | | | | | L68 |
| 1871 | KQATKYLVQ | L44 | LGVLVPHV | L47; L48 | TAFGLVAEWF | L31; L49; L52; |
| | | | | | | L58 |
| 1872 | KQIRSAAKK | L24 | LGYVTHGL | L25; L47 | TAHSCNVNR | L17; L19; L15; |
| | | | | | | L21 |
| 1873 | KQIVESCGNF | L26 | LHAPATVC | L28; L35 | TANKWDLII | L32; L47; L73; |
| | | | | | | L49 |
| 1874 | KQIYKTPPIK | L13 | LHNDILLAK | L6; L7 | TASDTYACW | L49; L54; L52; |
| | | | | | | L10 |
| 1875 | KQLPFFYYS | L15 | LIAIVMVTI | L47; L24 | TCGQQQTTL | L34; L35; L28; |
| | | | | | | L65 |
| 1876 | KQQTVTLLP | L24 | LIANQFNSA | L46; L50 | TCLAYYFMR | L17; L15; L21; L7 |
| 1877 | KQRRPQGL | L44 | LIIMRTFKV | L4; L5 | TDPSFLGRY | L14; L11; L12; |
| | | | | | | L10 |
| 1878 | KQVEQKIAE | L44 | LIKVTLVFLF | L52; L12 | TEDDYQGKP | L38; L42; L46; |
| | | | | | | L45 |
| 1879 | KQYGDCLGDI | L24 | LIPLMYKGL | L57; L5 | TEEVGHTDL | L36; L25; L37; |
| | | | | | | L45 |
| 1880 | KRDAPAHI | L63 | LIVAAIVF | L59; L60 | TEHSWNADLY | L41; L29; L14; |
| | | | | | | L40 |
| 1881 | KRFKESPF | L66 | LKAPKEIIFL | L44; L64 | TEISFMLW | L41; L40; L29; |
| | | | | | | L45 |
| 1882 | KRHTFSNYQH | L30 | LKFNPPAL | L66; L59 | TENKYSQL | L33; L37; L29; |
| | | | | | | L45 |
| 1883 | KRISNCVAD | L30 | LKFPRGQGV | L25; L64 | TENLLLYI | L45; L48; L33; |
| | | | | | | L41 |
| 1884 | KRNIKPVP | L65 | LKPANNSL | L57; L66 | TENLLLYID | L42; L29; L40; |
| | | | | | | L41 |
| 1885 | KRNIKPVPE | L30 | LKQLIKVTL | L44; L56 | TENLTKEGA | L42; L38; L46; |
| | | | | | | L37 |
| 1886 | KRNIKPVPEV | L30 | LKQLPFFYY | L27; L12 | TERLKLFAA | L42; L46; L38; |
| | | | | | | L37 |
| 1887 | KRNIKPVPEVK | L30 | LLADKFPVLH | L6; L3 | TESNKKFL | L33; L37; L45; |
| | | | | | | L36 |
| 1888 | KRNRATRVE | L65 | LLAKDTTEA | L3; L2 | TEVNEFACVV | L38; L37; L45; |
| | | | | | | L36 |
| 1889 | KRNVIPTIT | L30 | LLAKDTTEAF | L26; L43 | TFCAGSTF | L72; L71; L62; L9 |
| 1890 | KRNVIPTITQ | L30 | LLAPLLSAG | L3; L4 | TFISAARQGF | L8; L9; L12; L72 |
| 1891 | KRNVIPTITQM | L30 | LLEKCDLQNY | L1; L18 | TFLKKDAPY | L12; L71; L72; |
| | | | | | | L14 |
| 1892 | KRPINPTD | L66 | LLFLAFVV | L47; L23 | TFYLTNDV | L48; L71; L62; |
| | | | | | | L72 |
| 1893 | KRRVVFNGVSF | L30 | LLKDCPAVA | L3; L51 | TFYPKLQSS | L8; L43; L72; L71 |
| 1894 | KRTATKAY | L66 | LLKSAYENF | L43; L26 | THDVSSAI | L28; L35; L68; |
| | | | | | | L34 |
| 1895 | KRTIKGTHH | L30 | LLLCRMNSR | L21; L15 | TIAEILLIIMR | L19; L21; L17; |
| | | | | | | L15 |
| 1896 | KRVDWTIEYP | L65 | LLLDDFVEII | L4; L2 | TIKKPNEL | L23; L39; L58; |
| | | | | | | L74 |
| 1897 | KRVLNVVCK | L30 | LLLDQALVSD | L4; L2 | TKHSSGVTR | L17; L19; L21; |
| | | | | | | L15 |
| 1898 | KRWQLALSKG | L30 | LLMPILTLTR | L21; L6 | TLACFVLAA | L3; L46; L2; L4 |
| 1899 | KRWQLALSKGV | L30 | LLPLTQYNRY | L12; L1 | TLACFVLAAV | L3; L2; L4; L20 |
| 1900 | KSAFVNLK | L55 | LLPLVSSQC | L57; L5 | TLATCELYHY | L12; L10; L18; |
| | | | | | | L14 |
| 1901 | KSAFYILPSI | L52 | LLPSLATVA | L5; L57 | TLATHGLAA | L3; L51; L46; L2 |
| 1902 | KSAPLIELCV | L73 | LLQFAYANR | L21; L15 | TLATHGLAAV | L3; L4; L2; L20 |
| 1903 | KSAQCFKMFYK | L7 | LLQLCTFTR | L21; L15 | TLAVPYNMR | L21; L19; L17; |
| | | | | | | L15 |
| 1904 | KSDGTGTIYTE | L18 | LLQNGMNGR | L21; L15 | TLEETKFL | L62; L63; L23; |
| | | | | | | L68 |
| 1905 | KSEDAQGMD | L18 | LLSKGRLII | L24; L16 | TLGVLVPHV | L4; L2; L5; L3 |
| 1906 | KSEDAQGMDNL | L18 | LLSVCLGSLIY | L18; L12 | TLKGVEAVMY | L26; L12; L14; |
| | A | | | | | L43 |
| 1907 | KSEFDRDAA | L18 | LLSVLQQLR | L21; L15 | TLNDFNLVA | L2; L3; L46; L4 |
| 1908 | KSEFDRDAAM | L18 | LLTNMFTPL | L5; L74 | TLNDFNLVAM | L4; L2; L3; L43 |
| 1909 | KSEKQVEQK | L18 | LLWPVTLA | L2; L3 | TLPKGIMMNV | L5; L57; L2; L3 |
| 1910 | KSEKQVEQKI | L53 | LLWPVTLACF | L5; L12 | TLSEQLDFI | L3; L4; L2; L5 |
| 1911 | KSFDLGDELG | L52 | LMCQPILL | L74; L62 | TMADLVYALR | L19; L21; L15; |
| | | | | | | L17 |
| 1912 | KSFTVEKG | L54 | LMRELNGGAY | L14; L43 | TNPIQLSSY | L26; L72; L14; |
| | | | | | | L71 |
| 1913 | KSHFAIGLALYY | L18 | LNDLCFTNVY | L1; L18 | TPCGTGTST | L51; L39; L22; |
| | | | | | | L32 |
| 1914 | KSIAATRG | L54 | LNDNLLEI | L68; L62 | TPCNGVEGF | L49; L31; L34; |
| | | | | | | L39 |
| 1915 | KSILSPLYA | L73 | LNHTKKWKY | L12; L14 | TPEEHFIET | L31; L32; L39; |
| | | | | | | L49 |
| 1916 | KSKCEESSAK | L13 | LNIIPLTTA | L50; L46 | TPEEHFIETI | L49; L34; L39; |
| | | | | | | L32 |
| 1917 | KSLTENKYS | L52 | LNRVCGVSA | L51; L50 | TPFDVVRQ | L49; L47; L50; |
| | | | | | | L56 |
| 1918 | KSPIQYIDI | L53 | LNSIIKTI | L48; L47 | TPFEIKLA | L50; L51; L47; |
| | | | | | | L23 |
| 1919 | KSPIQYIDIGNY | L18 | LPAPRTLLTK | L22; L6 | TPGSGVPV | L51; L50; L39; |
| | | | | | | L22 |
| 1920 | KSQDLSVVS | L53 | LPDDFTGCVI | L49; L32 | TPKGPKVKYL | L39; L56; L22; |
| | | | | | | L32 |
| 1921 | KSTNLVKN | L54 | LPETTADIV | L32; L47 | TPLIQPIGAL | L22; L56; L31; |
| | | | | | | L32 |
| 1922 | KSYELQTPFEI | L55 | LPFFSNVT | L47; L50 | TPNNTDFSR | L32; L19; L17; |
| | | | | | | L15 |
| 1923 | KTCGQQQTTLK | L6 | LPFGWLIVGVA | L50; L51 | TPRDLGACI | L39; L51; L49; |
| | | | | | | L22 |
| 1924 | KTDGTLMIE | L18 | LPFKLTCA | L50; L51 | TPSFKKGAKL | L56; L39; L32; |
| | | | | | | L22 |
| 1925 | KTGDLQPLEQ | L73 | LPFNDGVYFA | L50; L51 | TPSKLIEY | L31; L49; L56; |
| | | | | | | L39 |
| 1926 | KTILRKGGRTI | L55 | LPFQQFGRD | L49; L50 | TQHQPYVV | L48; L35; L24; |
| | | | | | | L28 |
| 1927 | KTIQPRVE | L55 | LPFQQFGRDI | L39; L47 | TQLYLGGMSY | L27; L14; L26; |
| | | | | | | L12 |
| 1928 | KTKNVTKEN | L13 | LPGCDGGSLY | L31; L18 | TQYNRYLALY | L14; L27; L26; |
| | | | | | | L12 |
| 1929 | KTLLSLREVRTI | L55 | LPGVFCGVDA | L50; L51 | TRAKVGIL | L35; L66; L65; |
| | | | | | | L64 |
| 1930 | KTNCCRFQ | L55 | LPKGIMMNVA | L51; L50 | TRELMREL | L25; L35; L64; |
| | | | | | | L66 |
| 1931 | KTNCCRFQE | L16 | LPLQLGFST | L50; L31 | TRNPAWRKA | L64; L30; L51; |
| | | | | | | L65 |
| 1932 | KTNCCRFQEK | L13 | LPNDDTLRVEA | L50; L51 | TSAVLQSGF | L53; L52; L54; |
| | | | | | | L26 |
| 1933 | KTPEEHFIETI | L16 | LPPKNSIDA | L51; L50 | TSDYYQLY | L1; L18; L54; L55 |
| 1934 | KTPKYKFVRI | L53 | LPPKNSIDAF | L39; L56 | TSFGPLVR | L19; L17; L7; L15 |
| 1935 | KTSVDCTM | L54 | LPRVFSAVG | L51; L22 | TSRTLSYY | L1; L18; L14; L58 |
| 1936 | KTSVDCTMYI | L53 | LPSLATVA | L50; L51 | TSTDVVYRAF | L10; L52; L55; |
| | | | | | | L43 |
| 1937 | KTTLPVNV | L73 | LPSYAAFA | L50; L51 | TTEILPVSM | L63; L18; L1; L62 |
| 1938 | KTTLPVNVA | L51 | LPSYAAFATA | L50; L51 | TTITVNVLAW | L10; L52; L54; |
| | | | | | | L19 |
| 1939 | KTTVASLINTL | L16 | LPTEVLTE | L47; L50 | TTRQVVNVV | L20; L13; L70; |
| | | | | | | L73 |
| 1940 | KTVGELGD | L65 | LPTEVLTEEV | L50; L51 | TTSPISEHDY | L14; L18; L12; L1 |
| 1941 | KTVGELGDVR | L21 | LPTGVHAGTDL | L56; L22 | TTTNIVTR | L19; L17; L21; |
| | | | | | | L15 |
| 1942 | KTVQFCDAMR | L21 | LPTMCDIRQL | L39; L32 | TVATSRTLSYY | L11; L14; L10; |
| | | | | | | L18 |
| 1943 | KVDGVVQQ | L63 | LPVNVAFELW | L49; L31 | TVCGMWKGY | L26; L14; L10; |
| | | | | | | L11 |
| 1944 | KVDTANPKT | L63 | LPYPDPSRILGA | L50; L51 | TVDSSQGSEY | L1; L18; L14; L10 |
| 1945 | KVDTANPKTPK | L6 | LQDLKWARF | L63; L62 | TVEEAKTV | L23; L39; L48; |
| | | | | | | L63 |
| 1946 | KVDTANPKTPKY | IL18 | LQELGKYEQY | L18; L1 | TVEELKKL | L39; L63; L23; |
| | | | | | | L68 |
| 1947 | KVEAEVQI | L63 | LQIPFAMQMAY | L27; L26 | TVGELGDVR | L19; L17; L21; |
| | | | | | | L15 |
| 1948 | KVFTTVDNINL | L16 | LQTYVTQQL | L44; L24 | TVYDDGARRV | L20; L11; L14; |
| | | | | | | L24 |
| 1949 | KVGGSCVL | L65 | LRAKHYVY | L66; L65 | TYACWHHSI | L8; L9; L71; L72 |
| 1950 | KVKPTVVVNAA | L51 | LRAKHYVYI | L64; L34 | TYHPNCVNCL | L72; L8; L71; L9 |
| 1951 | KVKYLYFI | L55 | LRDGWEIVK | L30; L35 | TYLDGADVT | L8; L72; L71; L9 |
| 1952 | KVKYLYFIKG | L13 | LREVRTIKV | L25; L64 | TYLEGSVR | L17; L15; L71; |
| | | | | | | L72 |
| 1953 | KVLLRKNGNK | L6 | LRKGGRTI | L55; L65 | TYPGQGLNG | L8; L72; L9; L71 |
| 1954 | KVNINIVGDF | L26 | LRPDTRYV | L64; L66 | VAEWFLAY | L59; L18; L1; L31 |
| 1955 | KVQHMVVK | L13 | LRSDVLLP | L65; L64 | VAEWFLAYI | L47; L68; L63; |
| | | | | | | L69 |
| 1956 | KVQIGEYTFEK | L7 | LRVEAFEY | L66; L65 | VAFNVVNK | L7; L13; L19; L70 |
| 1957 | KVTSAMQTMLF | L16 | LRVIGHSM | L25; L66 | VAGFAKFL | L70; L74; L60; |
| | | | | | | L61 |
| 1958 | KVVSTTTN | L54 | LSAPTLVPQEHY | L1; L52 | VAGGIVAIVV | L69; L70; L58; |
| | | | | | | L67 |
| 1959 | KVVSTTTNIVTR | L19 | LSAQTGIAV | L61; L50 | VAIKITEH | L43; L59; L74; |
| | | | | | | L58 |
| 1960 | KWDLLKYD | L62 | LSDTLKNLS | L1; L18 | VAIKITEHSW | L52; L54; L49; |
| | | | | | | L53 |
| 1961 | KWDLTAFG | L62 | LSDTLKNLSD | L1; L18 | VAIVVTCLAY | L43; L12; L59; |
| | | | | | | L31 |
| 1962 | KWKYPQVNG | L13 | LSEARQHL | L63; L1 | VATSRTLSYY | L58; L14; L69; |
| | | | | | | L12 |
| 1963 | KWYIRVGARK | L6 | LSEARQHLK | L1; L18 | VAVPTGYV | L70; L58; L47; |
| | | | | | | L69 |
| 1964 | KYDFTEER | L62 | LSEMVMCGGSL | L1; L18 | VCLSGLDSL | L67; L4; L8; L44 |
| | | | Y | | | |
| 1965 | KYFDCYDGGCI | L8 | LSETKCTL | L63; L68 | VCRHHANEY | L43; L59; L26; |
| | | | | | | L58 |
| 1966 | KYFSGAMDT | L71 | LSFELLHAP | L46; L50 | VDADSKIVQL | L56; L37; L4; L3 |
| 1967 | KYKFVRIQP | L13 | LSKGRLII | L55; L70 | VDGVDVELF | L9; L33; L52; L34 |
| 1968 | KYLPIDKC | L8 | LSKGVHFV | L70; L58 | VDSSQGSEY | L14; L26; L43; |
| | | | | | | L18 |
| 1969 | KYLPIDKCS | L8 | LSKGVHFVC | L70; L52 | VEAPLVGTP | L46; L38; L42; |
| | | | | | | L29 |
| 1970 | KYLPIDKCSR | L15 | LSKSLTENKY | L14; L1 | VEFLRDGWEI | L45; L36; L40; |
| | | | | | | L41 |
| 1971 | KYLYFIKGLNNL | L8 | LSLLSKGRLI | L55; L52 | VELFENKTT | L38; L45; L41; |
| | | | | | | L40 |
| 1972 | KYPQVNGLT | L9 | LSMQGAVDI | L55; L53 | VENMTPRDL | L37; L36; L40; |
| | | | | | | L45 |
| 1973 | KYTQLCQY | L14 | LSPVALRQM | L57; L59 | VEQKIAEI | L45; L48; L33; |
| | | | | | | L37 |
| 1974 | KYVRNLQHRLY | L14 | LSRLDKVEA | L50; L43 | VETFYPKL | L37; L45; L29; |
| | | | | | | L36 |
| 1975 | KYWDQTYH | L71 | LSTDGNKI | L55; L48 | VETKAIVST | L37; L45; L38; |
| | | | | | | L29 |
| 1976 | KYWDQTYHPNC | L8 | LSVCLGSL | L59; L60 | VETVKGLDY | L29; L41; L40; |
| | | | | | | L12 |
| 1977 | LAAVYRINWI | L47 | LSVCLGSLIY | L18; L1 | VFCGVDAVNL | L62; L8; L72; L71 |
| 1978 | LACFVLAA | L50 | LSVLQQLRV | L73; L48 | VFFDGRVD | L72; L71; L65; |
| | | | | | | L55 |
| 1979 | LADKFPVLHDI | L68 | LSVVSKVV | L48; L70 | VFISPYNSQ | L8; L72; L71; L9 |
| 1980 | LAFLLFLVLIM | L31 | LSWEVGKPR | L15; L19 | VFLFVAAIFY | L12; L72; L71; |
| | | | | | | L14 |
| 1981 | LAHAEETRKL | L32 | LTAVVIPTKK | L6; L7 | VFLHVTYV | L72; L71; L62; |
| | | | | | | L48 |
| 1982 | LAHIQWMV | L47 | LTDEMIAQ | L1; L68 | VFLVLLPL | L71; L72; L59; |
| | | | | | | L62 |
| 1983 | LAKNVSLDN | L43 | LTDNVYIKN | L1; L18 | VFMSEAKCW | L71; L72; L9; L8 |
| 1984 | LALCADSI | L47 | LTEEVVLKT | L1; L18 | VFNICQAV | L71; L48; L72; |
| | | | | | | L62 |
| 1985 | LALCADSII | L47 | LTKGTLEPEY | L52; L14 | VFQSASKI | L48; L71; L72; |
| | | | | | | L62 |
| 1986 | LALCADSIII | L47 | LTLVYKVY | L52; L55 | VGPEHSLAEY | L43; L57; L14; |
| | | | | | | L12 |
| 1987 | LALGGSVA | L50 | LTNNVAFQTV | L73; L20 | VGVALLAVF | L9; L31; L52; L27 |
| 1988 | LALLSDLQDLKW | L52 | LTPLGIDL | L57; L62 | VHFISNSWL | L28; L35; L34; |
| | | | | | | L25 |
| 1989 | LALSKGVHFV | L47 | LTPTWRVY | L55; L1 | VIDLLLDDF | L62; L1; L68; L63 |
| 1990 | LALYNKYKYF | L52 | LTPVYSFL | L57; L62 | VIPDYNTYK | L6; L7; L57; L5 |
| 1991 | LALYYPSA | L50 | LTQYNRYL | L55; L60 | VKCTSVVLL | L44; L66; L62; |
| | | | | | | L64 |
| 1992 | LALYYPSAR | L17 | LTQYNRYLALY | L1; L18 | VLAWLYAAV | L3; L2; L4; L5 |
| 1993 | LARAGKASC | L43 | LTSHTVMPL | L61; L60 | VLDMCASL | L68; L62; L63; L5 |
| 1994 | LATNNLVVMA | L50 | LTSLLVLV | L73; L1 | VLHDIGNPK | L6; L13; L43; L7 |
| 1995 | LATNNLVVMAY | L31 | LTVLPPLL | L60; L55 | VLIMLIIF | L74; L26; L23; |
| | | | | | | L59 |
| 1996 | LAVHECFV | L47 | LTWICLLQFAY | L1; L12 | VLLPLTQYN | L4; L12; L2; L5 |
| 1997 | LAVHECFVKR | L19 | LTYNKVENM | L70; L58 | VLLPLVSSQ | L4; L16; L3; L2 |
| 1998 | LAVPYNMRVIHF | L31 | LVAAGLEA | L51; L50 | VLPFNDGVYF | L9; L12; L57; L5 |
| 1999 | LAYILFTRFFY | L12 | LVDFQVTIA | L68; L63 | VLTESNKKF | L9; L26; L16; L12 |
| 2000 | LCADSIII | L47 | LVDFQVTIAEI | L5; L68 | VPATVSVSS | L51; L56; L39; |
| | | | | | | L22 |
| 2001 | LCANGQVF | L59 | LVDLPIGIN | L68; L1 | VPFWITIAYI | L20; L47; L49; |
| | | | | | | L50 |
| 2002 | LCFLAFLL | L47 | LVDLPIGINI | L68; L63 | VPHVGEIPV | L51; L50; L47; |
| | | | | | | L22 |
| 2003 | LCNSQTSL | L57 | LVDSDLNDFV | L5; L1 | VPLNIIPLT | L47; L50; L31; |
| | | | | | | L51 |
| 2004 | LCNSQTSLR | L21 | LVFLFVAA | L50; L51 | VPTDNYITT | L49; L56; L50; |
| | | | | | | L51 |
| 2005 | LCVDIPGI | L47 | LVFLFVAAIFY | L12; L31 | VPTDNYITTY | L49; L31; L43; |
| | | | | | | L12 |
| 2006 | LDDFVEII | L68 | LVIGFLFLT | L12; L20 | VPVAIHADQL | L31; L32; L56; |
| | | | | | | L39 |
| 2007 | LDERIDKVL | L32 | LVKPSFYVYSR | L15; L21 | VPYNMRVI | L47; L48; L39; |
| | | | | | | L25 |
| 2008 | LDGEVITFD | L65 | LVLIMLIIFWF | L52; L12 | VQEGVLTAV | L24; L48; L68; |
| | | | | | | L63 |
| 2009 | LDGISQYSL | L65 | LVLVQSTQW | L52; L54 | VQLSLPVL | L48; L25; L44; |
| | | | | | | L59 |
| 2010 | LDMYSVML | L33 | LVQAGNVQLR | L21; L19 | VQPQLEMEL | L57; L44; L64; L5 |
| 2011 | LDSKTQSL | L33 | LVQMAPISA | L50; L51 | VQPTESIVRF | L26; L9; L8; L27 |
| 2012 | LDSKVGGNY | L14 | LVRGFGDSV | L51; L58 | VRDPQTLEIL | L35; L34; L66; |
| | | | | | | L68 |
| 2013 | LDYIINLII | L47 | LVSDIDITFLK | L6; L7 | VRFPNITN | L25; L66; L65; |
| | | | | | | L35 |
| 2014 | LDYKAFKQI | L47 | LVSDVGDSA | L50; L51 | VRGTTVLL | L66; L65; L64; |
| | | | | | | L35 |
| 2015 | LEASFNYLK | L38 | LVSSFLEM | L59; L67 | VRGTTVLLK | L30; L65; L7; L6 |
| 2016 | LEASFNYLKSP | L46 | LVSSFLEMK | L6; L7 | VRIIMRLWL | L25; L64; L66; |
| | | | | | | L30 |
| 2017 | LEDEFTPFDV | L38 | LVSSQCVNL | L74; L56 | VSDVGDSAEV | L63; L68; L1; L18 |
| 2018 | LEETKFLTE | L46 | LVTLAILTA | L50; L51 | VSELLTPL | L68; L59; L63; L1 |
| 2019 | LEGETLPTEVL | L36 | LWAKRNIKP | L38; L46 | VSFCYMHHM | L70; L73; L58; |
| | | | | | | L69 |
| 2020 | LEGSVAYESL | L36 | LWLDDVVY | L71; L31 | VSIWNLDY | L1; L43; L18; L54 |
| 2021 | LEGSVRVVT | L38 | LWPVTLAC | L71; L57 | VSLDNVLST | L43; L55; L52; |
| | | | | | | L73 |
| 2022 | LEGYAFEHIVY | L41 | LYAFASEA | L72; L71 | VSTTTNIVTR | L19; L15; L7; L21 |
| 2023 | LEIPRRNVATL | L36 | LYCIDGAL | L72; L71 | VTGDSCNNY | L18; L1; L14; L58 |
| 2024 | LELAMDEFI | L36 | LYDKLVSSFL | L62; L63 | VTTTLEETKF | L52; L53; L54; |
| | | | | | | L12 |
| 2025 | LELQDHNETC | L36 | LYECLYRNR | L17; L15 | VTTVMFLAR | L7; L15; L17; L19 |
| 2026 | LEMELTPV | L45 | LYFDKAGQK | L13; L72 | VVADAVIKT | L20; L19; L7; L6 |
| 2027 | LEQPTSEA | L38 | LYFIKGLNN | L71; L72 | VVAFNTLLFL | L74; L20; L6; L60 |
| 2028 | LEQPTSEAVEA | L38 | LYIDINGNLH | L8; L9 | VVDKYFDCY | L18; L1; L12; L14 |
| 2029 | LEQPYVFI | L45 | LYKMQRMLL | L9; L71 | VVDMSMTY | L18; L1; L68; L63 |
| 2030 | LEQPYVFIK | L38 | LYLDAYNMMI | L8; L9 | VVENPTIQK | L7; L6; L13; L19 |
| 2031 | LEQWNLVI | L45 | LYLYALVYFL | L9; L8 | VVEVVDKYF | L63; L52; L62; |
| | | | | | | L12 |
| 2032 | LEQWNLVIGFLF | L40 | LYQDVNCT | L72; L71 | VVGDIILK | L7; L6; L13; L19 |
| 2033 | LESELVIGAVI | L41 | LYQDVNCTEV | L72; L71 | VVHNQDVNL | L74; L56; L67; |
| | | | | | | L63 |
| 2034 | LETAQNSVRVL | L41 | LYQPPQTS | L71; L72 | VVIGIVNNTVY | L14; L11; L12; |
| | | | | | | L26 |
| 2035 | LETIQITIS | L46 | LYRKCVKSR | L17; L15 | VVISSDVL | L67; L74; L60; |
| | | | | | | L61 |
| 2036 | LFDMSKFP | L62 | LYSPIFLIVA | L50; L51 | VVLSFELL | L74; L67; L60; |
| | | | | | | L23 |
| 2037 | LFDMSKFPLKL | L62 | LYVNKHAFH | L71; L72 | VVPGLPGTIL | L57; L67; L56; L5 |
| 2038 | LFDRYFKYW | L62 | LYYDSMSYE | L72; L71 | VVPGLPGTILR | L19; L21; L7; L15 |
| 2039 | LFFFLYENA | L50 | MAPISAMV | L47; L57 | VVTTKIAL | L23; L74; L56; |
| | | | | | | L60 |
| 2040 | LFKDCSKVI | L8 | MATNYDLSVV | L69; L70 | VVTTKIALK | L7; L6; L13; L19 |
| 2041 | LFLLPSLAT | L71 | MAYITGGV | L47; L48 | VVTTVMFLAR | L7; L19; L6; L15 |
| 2042 | LFLMSFTV | L71 | MAYRENGI | L47; L48 | VYCFLGYF | L9; L62; L72; L71 |
| 2043 | LFLPFFSNVTWF | L8 | MAYRFNGIGV | L50; L47 | VYCPRHVI | L9; L71; L8; L72 |
| 2044 | LFMRIFTI | L47 | MCASLKEL | L25; L59 | VYKQFDTY | L66; L14; L71; |
| | | | | | | L72 |
| 2045 | LFTMLRKL | L62 | MCASLKELL | L34; L20 | VYKVYYGNAL | L71; L72; L9; L66 |
| 2046 | LFVAAIFYLI | L8 | MDNSPNLAW | L49; L16 | VYQCAMRPNF | L9; L8; L71; L72 |
| 2047 | LFVVEVVDKY | L12 | MDSTVKNY | L29; L33 | VYSDVENPHL | L9; L8; L66; L72 |
| 2048 | LFWNCNVDR | L17 | MELPTGVH | L29; L33 | VYSHLLLVA | L9; L8; L50; L51 |
| 2049 | LFWNCNVDRY | L12 | MESEFRVYS | L42; L46 | VYYTSNPTT | L9; L71; L72; L8 |
| 2050 | LGERVRQAL | L32 | MESLVPGF | L33; L29 | WEIQQVVDA | L46; L38; L42; |
| | | | | | | L37 |
| 2051 | LGFIAGLIA | L50 | MEVTPSGTWLT | L41; L40 | WFSQRGGSY | L14; L71; L72; |
| | | | Y | | | L12 |
| 2052 | LGFSTGVNLV | L47 | MFITREEA | L71; L72 | WFVTQRNFY | L71; L12; L72; |
| | | | | | | L14 |
| 2053 | LGGLHLLI | L47 | MFITREEAI | L71; L72 | WLLWPVTL | L23; L74; L4; L2 |
| 2054 | LGGSVAIKI | L47 | MGHFAWWTA | L50; L51 | WLMWLIINLV | L3; L2; L4; L5 |
| 2055 | LGIITTVAA | L50 | MHHMELPTG | L28; L34 | WLTNIFGTVY | L12; L14; L26; |
| | | | | | | L43 |
| 2056 | LGLPTQTVD | L65 | MIELSLIDFY | L1; L18 | WSMATYYLF | L54; L53; L55; |
| | | | | | | L52 |
| 2057 | LGQSKRVD | L65 | MILSLLSK | L6; L7 | WVMRIMTWL | L20; L74; L60; |
| | | | | | | L10 |
| 2058 | LGRYMSAL | L59 | MILSLLSKGR | L17; L21 | YADVFHLYLQY | L1; L18; L49; L12 |
| 2059 | LGTDPYEDF | L49 | MISAGFSLW | L16; L10 | YAWNRKRI | L47; L70; L69; |
| | | | | | | L48 |
| 2060 | LGTEVNEF | L59 | MKDLSPRWY | L27; L1 | YEDQDALFA | L38; L46; L42; |
| | | | | | | L45 |
| 2061 | LHAPATVCG | L28 | MKFLVFLGI | L47; L27 | YEDQDALFAY | L1; L40; L41; L29 |
| 2062 | LHCANFNVLF | L34 | MLTNDNTSR | L21; L17 | YENAFLPFA | L46; L38; L42; |
| | | | | | | L50 |
| 2063 | LHDIGNPKA | L28 | MPASWVMRIM | L32; L22 | YENFNQHEVL | L37; L36; L41; |
| | | | | | | L29 |
| 2064 | LHDIGNPKAI | L28 | MPILTLTR | L50; L47 | YEPQIITTD | L45; L37; L36; |
| | | | | | | L29 |
| 2065 | LHFLPRVESA | L50 | MPILTLTRA | L50; L51 | YEQFKKGV | L45; L33; L38; |
| | | | | | | L37 |
| 2066 | LHLLIGLAK | L6 | MPLGYVTH | L50; L47 | YEQFKKGVQI | L45; L37; L38; |
| | | | | | | L36 |
| 2067 | LHNDILLA | L50 | MPLGYVTHG | L50; L31 | YEQYIKWPW | L40; L41; L38; |
| | | | | | | L42 |
| 2068 | LHPTQAPTHL | L57 | MPLSAPTLVP | L50; L51 | YFCTCYFGL | L72; L62; L8; L71 |
| 2069 | LHSSRLSF | L28 | MPNLYKMQRM | L32; L31 | YFIASFRL | L71; L72; L62; L8 |
| 2070 | LHTQVVDM | L28 | MPNMLRIM | L47; L32 | YFVLTSHTV | L71; L48; L72; |
| | | | | | | L62 |
| 2071 | LHVTYVPAQ | L28 | MPNMLRIMA | L50; L51 | YGVSPTKL | L74; L67; L25; |
| | | | | | | L61 |
| 2072 | LHVVGPNV | L28 | MPTTIAKNTV | L50; L32 | YHDVRVVLD | L34; L62; L28; |
| | | | | | | L35 |
| 2073 | LHVVGPNVN | L28 | MPYFFTLLLQ | L50; L47 | YICGFIQQK | L7; L13; L6; L19 |
| 2074 | LIAAVITREV | L3 | MQNCVLKL | L48; L73 | YIDINGNLH | L1; L68; L18; L63 |
| 2075 | LIDAMMFTSDL | L68 | MRIFTIGTVTL | L34; L35 | YIVDSVTVK | L19; L7; L6; L60 |
| 2076 | LIDFYLCFLAF | L68 | MRPNFTIKG | L64; L66 | YLALYNKY | L1; L26; L18; L27 |
| 2077 | LIDLQELG | L1 | MSALNHTKK | L7; L19 | YLAVFDKNLY | L1; L12; L18; L26 |
| 2078 | LIDLQELGK | L1 | MSDVKCTSVV | L63; L68 | YLDAYNMM | L62; L1; L63; L68 |
| 2079 | LIGCNYLGK | L6 | MSLSEQLRK | L7; L6 | YLEGSVRV | L2; L63; L1; L62 |
| 2080 | LIIKNLSKSL | L60 | MTNRQFHQK | L7; L13 | YLKLTDNVY | L26; L27; L1; L14 |
| 2081 | LIINLVQM | L59 | MTPRDLGAC | L10; L11 | YLQPRTFLLKY | L12; L1; L14; L18 |
| 2082 | LIINLVQMA | L3 | MTYGQQFGPTY | L14; L11 | YLQYIRKL | L64; L23; L4; L74 |
| 2083 | LIISVTSN | L43 | MVLGSLAA | L50; L51 | YNYLYRLF | L33; L27; L59; |
| | | | | | | L55 |
| 2084 | LINTLNDL | L59 | MVPHISRQRL | L20; L5 | YPANSIVCR | L19; L17; L49; |
| | | | | | | L31 |
| 2085 | LIRQGTDY | L26 | MVYMPASWV | L20; L47 | YPDPSRILGA | L50; L51; L49; |
| | | | | | | L32 |
| 2086 | LITPVHVMSK | L6 | MYASAVVLLI | L9; L8 | YPIIGDELKI | L47; L49; L32; |
| | | | | | | L34 |
| 2087 | LIVGVALLAV | L5 | MYDPKTKNV | L62; L5 | YPSARIVYT | L49; L32; L31; |
| | | | | | | L22 |
| 2088 | LIVNSVLLFL | L60 | MYIFFASFYY | L12; L14 | YQHEETIY | L26; L27; L43; |
| | | | | | | L58 |
| 2089 | LKALNLGETF | L27 | MYKGLPWNVV | L15; L17 | YRLFRKSNL | L25; L23; L30; |
| | | | R | | | L66 |
| 2090 | LKATEETF | L27 | MYMGTLSYEQF | L8; L9 | YRVTKNSKV | L64; L30; L25; |
| | | | | | | L35 |
| 2091 | LKATEETFKL | L44 | NAAISDYDY | L49; L31 | YRYNLPTMC | L64; L66; L25; |
| | | | | | | L30 |
| 2092 | LKEPCSSGTY | L27 | NAANVYLKH | L69; L19 | YSDSPCESH | L68; L43; L1; L63 |
| 2093 | LKGVEAVMY | L27 | NADIVEEAK | L67; L68 | YSDVENPHLM | L63; L1; L68; L62 |
| 2094 | LKKLKKSL | L23 | NALPETTAD | L31; L32 | YSGQSTQL | L74; L61; L60; |
| | | | | | | L65 |
| 2095 | LKLFAAETL | L44 | NARLRAKHY | L58; L70 | YSHLLLVAA | L50; L46; L67; |
| | | | | | | L51 |
| 2096 | LKLRSDVLL | L44 | NASSSEAF | L49; L54 | YSKWYIRV | L70; L43; L58; |
| | | | | | | L69 |
| 2097 | LKLTDNVY | L27 | NASVVNIQK | L19; L7 | YSNNSIAI | L48; L59; L43; |
| | | | | | | L61 |
| 2098 | LKNLSDRVVF | L27 | NCDVVIGI | L62; L68 | YTEISFMLW | L1; L52; L18; L49 |
| 2099 | LKRGDKSVYY | L27 | NCYLATALL | L28; L62 | YTMADLVY | L1; L18; L59; L70 |
| 2100 | LKYDFTEER | L27 | NDFNLVAMKY | L12; L29 | YTVEEAKTVL | L60; L53; L10; |
| | | | | | | L20 |
| 2101 | LKYDFTEERL | L44 | NDMILSLL | L33; L25 | YVDTPNNTD | L68; L63; L1; L32 |
| 2102 | LLADKFPV | L2 | NEEIAIILASF | L41; L40 | YVDTPNNTDF | L68; L63; L1; L60 |
| 2103 | LLAGTITSG | L3 | NEFYAYLRKH | L29; L41 | YVFTGYRVTK | L7; L13; L19; L6 |
| 2104 | LLAPLLSAGI | L3 | NEFYAYLRKHF | L41; L40 | YVLGLAAIM | L31; L12; L67; |
| | | | | | | L32 |
| 2105 | LLAVFQSASK | L6 | NEKQEILGTVSW | L40; L41 | YVLPNDDTLR | L17; L15; L21; |
| | | | | | | L19 |
| 2106 | LLDDFVEIIKS | L5 | NELSPVALRQ | L41; L40 | YVMHANYIFWR | L7; L21; L19; L15 |
| 2107 | LLDKRTTC | L63 | NELSPVALRQM | L40; L41 | YVTHGLNL | L60; L61; L74; |
| | | | | | | L59 |
| 2108 | LLDQALVS | L1 | NELSRVLGLKTL | L41; L40 | YYHKNNKSW | L71; L9; L72; L8 |
| 2109 | LLDQALVSDV | L5 | NESGLKTILR | L19; L41 | YYKLGASQR | L17; L15; L21; |
| | | | | | | L71 |
| 2110 | LLDRLNQLE | L1 | NETLVTMPLGY | L41; L40 | YYQNNVFM | L71; L72; L62; |
| | | | | | | L66 |
| 2111 | LLDRLNQLES | L1 | NEVAKNLNESL | L36; L41 | YYQNNVFMS | L72; L66; L71; L9 |
| 2112 | LLEQWNLV | L1 | NFGAISSV | L72; L71 | YYVGYLQPR | L17; L15; L71; |
| | | | | | | L72 |
| 2113 | LLEQWNLVI | L68 | NFKNLREFVF | L8; L9 | YYVGYLQPRTF | L9; L8; L72; L71 |
| 2114 | LLFLVLIM | L59 | NFLVQAGNV | L72; L71 | AAIVFITLC | L69; L74; L58; |
| | | | | | | L70; L7 |
| 2115 | LLFLVLIMLI | L3 | NFNFNGLTG | L72; L71 | AAIVFITLCF | L59; L52; L43; |
| | | | | | | L69; L12 |
| 2116 | LLFVTVYSH | L4 | NFTIKGSF | L72; L71 | AAKAYKDYL | L58; L67; L70; |
| | | | | | | L69; L74 |
| 2117 | LLFVVEVVDK | L6 | NFTTAPAI | L71; L72 | AAVITREV | L48; L70; L59; |
| | | | | | | L69; L64 |
| 2118 | LLFVVEVVDKY | L12 | NGDSEVVLK | L19; L7 | ACTDDNALAY | L12; L14; L40; |
| | | | | | | L18; L41 |
| 2119 | LLHAPATV | L3 | NGDVVAIDY | L1; L18 | ADAQSFLNR | L7; L15; L21; L19; |
| | | | | | | L17 |
| 2120 | LLHKPIVW | L23 | NGIGVTQNV | L24; L20 | AEAELAKN | L46; L45; L37; |
| | | | | | | L33; L42 |
| 2121 | LLHKPIVWH | L43 | NGLTGTGVL | L25; L44 | AEAELAKNVS | L46; L42; L40; |
| | | | | | | L36; L41 |
| 2122 | LLIGLAKR | L21 | NGMNGRTI | L55; L48 | AEHVNNSY | L29; L45; L33; |
| | | | | | | L26; L41 |
| 2123 | LLIIMRTFK | L6 | NGTITVEEL | L67; L25 | AEIVDTVSAL | L36; L40; L41; |
| | | | | | | L37; L45 |
| 2124 | LLKDCPAV | L3 | NGVSFSTF | L29; L27 | AENSVAYSN | L42; L38; L40; |
| | | | | | | L41; L37 |
| 2125 | LLKDCPAVAK | L6 | NGYPNMFI | L47; L25 | AENVTGLFK | L40; L7; L41; L6; |
| | | | | | | L42 |
| 2126 | LLKEPCSS | L43 | NHDLYCQV | L35; L28 | AEVAVKMF | L33; L29; L41; |
| | | | | | | L37; L40 |
| 2127 | LLKEPCSSG | L43 | NHNFLVQA | L35; L28 | AEWFLAYILF | L40; L41; L36; |
| | | | | | | L37; L42 |
| 2128 | LLKEPCSSGT | L43 | NIDGYFKI | L68; L63 | AFEKMVSLL | L62; L72; L63; |
| | | | | | | L71; L8 |
| 2129 | LLKEPCSSGTY | L14 | NIFGTVYEKL | L11; L10 | AFGLVAEWF | L72; L9; L62; L71; |
| | | | | | | L12 |
| 2130 | LLKSIAAT | L43 | NIIPLTTAAK | L19; L6 | AFLIGCNYL | L71; L72; L8; L9; |
| | | | | | | L62 |
| 2131 | LLLDKRTT | L23 | NILLNVPL | L23; L25 | AFYILPSII | L62; L72; L71; |
| | | | | | | L48; L69 |
| 2132 | LLLFVTVY | L26 | NIQKEIDRL | L4; L34 | AGFSLWVY | L27; L69; L14; |
| | | | | | | L26; L59 |
| 2133 | LLLLDRLNQL | L4 | NITFELDER | L19; L17 | AIDGGVTR | L21; L63; L68; |
| | | | | | | L15; L19 |
| 2134 | LLLQLCTF | L23 | NITRFQTL | L60; L23 | AISDYDYYR | L21; L15; L7; L19; |
| | | | | | | L17 |
| 2135 | LLLQLCTFTR | L21 | NIVTRCLNR | L19; L17 | AIVSTIQR | L21; L19; L7; L15; |
| | | | | | | L17 |
| 2136 | LLLTILTSLL | L4 | NKSWMESEF | L27; L66 | AIVSTIQRK | L7; L6; L19; L24; |
| | | | | | | L13 |
| 2137 | LLLVAAGL | L23 | NKWDLIISD | L44; L27 | ALDPLSET | L1; L68; L5; L62; |
| | | | | | | L63 |
| 2138 | LLMPLKAPK | L6 | NLAWPLIVTA | L3; L2 | ALIISVTSNY | L26; L14; L6; L18; |
| | | | | | | L12 |
| 2139 | LLNKEMYL | L74 | NLDKSAGF | L63; L62 | ALIWNVKDF | L26; L10; L27; |
| | | | | | | L16; L11 |
| 2140 | LLNKEMYLKL | L4 | NLDSKVGGNYN | L18; L1 | ALLEDEFTPF | L6; L12; L9; L2; |
| | | | Y | | | L16 |
| 2141 | LLNRYFRLTL | L4 | NLEEAARYM | L62; L63 | ALNNIINNA | L3; L4; L2; L5; L24 |
| 2142 | LLPLTQYNR | L21 | NLGERVRQA | L3; L2 | ALPETTADI | L57; L5; L3; L24; |
| | | | | | | L2 |
| 2143 | LLPLTQYNRYL | L57 | NLGETFVTH | L5; L2 | ALYNKYKY | L14; L12; L26; |
| | | | | | | L18; L16 |
| 2144 | LLPLVSSQ | L57 | NLKPFERDI | L64; L3 | ALYYPSARIVY | L27; L6; L16; L14; |
| | | | | | | L12 |
| 2145 | LLPLVSSQCV | L5 | NLKQLPFFY | L12; L14 | AMYTPHTV | L48; L3; L69; L70; |
| | | | | | | L47 |
| 2146 | LLPPKNSID | L5 | NLKQLPFFYY | L12; L14 | APHGHVMV | L51; L39; L56; |
| | | | | | | L22; L50 |
| 2147 | LLSDLQDLK | L6 | NLLEILQKEKV | L2; L4 | APHGVVFL | L56; L22; L39; |
| | | | | | | L65; L23 |
| 2148 | LLSDLQDLKW | L12 | NLLLLFVTVY | L12; L27 | APISAMVRM | L56; L22; L32; |
| | | | | | | L31; L39 |
| 2149 | LLSKGRLI | L55 | NLNRGMVL | L23; L57 | APKEIIFL | L56; L39; L23; |
| | | | | | | L22; L51 |
| 2150 | LLSKGRLIIR | L21 | NLPFKLTCA | L3; L5 | AQEKNFTTA | L42; L46; L27; |
| | | | | | | L24; L26 |
| 2151 | LLSLREVRTI | L3 | NLQHRLYEC | L23; L4 | AQFAPSASAF | L26; L27; L16; |
| | | | | | | L71; L28 |
| 2152 | LLSTDGNKI | L24 | NLREFVFKN | L4; L3 | AQVDVVNF | L26; L27; L58; |
| | | | | | | L33; L69 |
| 2153 | LLSVLLSM | L59 | NLREMLAHA | L3; L2 | AQYELKHGT | L24; L27; L14; |
| | | | | | | L44; L26 |
| 2154 | LLTILTSLL | L74 | NLSDRVVF | L23; L26 | AQYELKHGTF | L27; L26; L14; |
| | | | | | | L44; L10 |
| 2155 | LLVAAGLEA | L51 | NLTTRTQL | L23; L25 | ARAGEAANF | L30; L34; L66; |
| | | | | | | L65; L35 |
| 2156 | LLVDSDLNDF | L26 | NNLVVMAY | L71; L29 | ARFYFYTSK | L30; L7; L13; L66; |
| | | | | | | L6 |
| 2157 | LLVTLAILTA | L3 | NPETNILLN | L49; L32 | ARSVASQSI | L35; L34; L28; |
| | | | | | | L64; L30 |
| 2158 | LLYDANYFLCW | L6 | NPHLMGWDY | L31; L49 | ASAFFGMSR | L7; L19; L15; L21; |
| | | | | | | L17 |
| 2159 | LMIERFVSLA | L3 | NPKAIKCVP | L39; L51 | ASCDAIMTR | L7; L21; L19; L15; |
| | | | | | | L17 |
| 2160 | LMNVLTLVYK | L6 | NPKGFCDL | L39; L23 | ASVYYSQL | L74; L60; L61; |
| | | | | | | L70; L67 |
| 2161 | LMSFPQSA | L50 | NPPALQDAY | L31; L12 | ASWVMRIMTW | L52; L53; L54; |
| | | | | | | L16; L10 |
| 2162 | LMSNLGMPSY | L12 | NPTDQSSYI | L49; L47 | ATEETFKLSY | L1; L18; L12; L14; |
| | | | | | | L16 |
| 2163 | LMWLSYFI | L47 | NQEYADVFHLY | L14; L1 | ATVHTANKW | L54; L52; L53; |
| | | | | | | L10; L16 |
| 2164 | LMWLSYFIA | L50 | NQHEVLLA | L24; L25 | ATVVIGTSK | L7; L19; L6; L13; |
| | | | | | | L15 |
| 2165 | LMYKGLPWNV | L3 | NQHEVLLAP | L24; L25 | ATYKPNTW | L54; L52; L16; |
| | | | | | | L55; L53 |
| 2166 | LNDILSRLD | L65 | NQRNAPRITF | L27; L26 | AVANGDSEV | L3; L20; L2; L58 |
| | | | | | | L28 |
| 2167 | LNGDVVAID | L65 | NRARTVAGV | L35; L30 | AVDCALDPL | L68; L5; L67; L63; |
| | | | | | | L62 |
| 2168 | LNGDVVAIDY | L12 | NRDVDTDF | L62; L35 | AVFQSASKI | L24; L16; L10; |
| | | | | | | L45; L3 |
| 2169 | LNGGAYTRY | L12 | NRDVDTDFV | L34; L35 | AVHFISNSW | L16; L10; L54; |
| | | | | | | L52; L26 |
| 2170 | LNGYTVEEA | L65 | NRFLYIIKLI | L30; L64 | AVKLQNNEL | L26; L68; L39; |
| | | | | | | L56; L67 |
| 2171 | LNIKLLGV | L73 | NRFNVAIT | L25; L35 | AVNLLTNMF | L26; L16; L12; |
| | | | | | | L52; L58 |
| 2172 | LNKEMYLKL | L73 | NRFTTTLNDF | L30; L34 | AYWVPRASA | L72; L42; L71; |
| | | | | | | L46; L51 |
| 2173 | LNTLTLAV | L48 | NRVCGVSA | L25; L35 | AYYVGYLQP | L46; L72; L42; |
| | | | | | | L71; L38 |
| 2174 | LPDDFTGCVIA | L50 | NRVVISSDV | L25; L35 | CAKEIKESV | L43; L70; L58; |
| | | | | | | L23; L69 |
| 2175 | LPDPSKPSKRSF | L39 | NRYFRLTLG | L25; L30 | CASEYTGNY | L58; L49; L14; |
| | | | | | | L18; L70 |
| 2176 | LPETTADIVV | L32 | NRYFRLTLGV | L25; L30 | CIMSDRDLY | L14; L18; L12; L1; |
| | | | | | | L16 |
| 2177 | LPFAMGII | L47 | NRYLALYNK | L30; L25 | CRFDTRVL | L65; L25; L64; |
| | | | | | | L66; L35 |
| 2178 | LPFAMGIIAMSA | L50 | NSASFSTFK | L7; L19 | CSFYEDFLEY | L18; L12; L1; L65; |
| | | | | | | L59 |
| 2179 | LPFFSNVTWFHA | L50 | NSFDVLKSE | L69; L70 | CTLSEQLDF | L53; L12; L52; |
| | | | | | | L54; L16 |
| 2180 | LPFFYYSD | L50 | NSGSDVLY | L1; L18 | CYMHHMEL | L71; L72; L25; |
| | | | | | | L66; L62 |
| 2181 | LPFNDGVY | L31 | NSLKITEEV | L73; L48 | DAIMTRCL | L23; L61; L70; |
| | | | | | | L47; L60 |
| 2182 | LPFQQFGRDIA | L50 | NSPRRARSV | L57; L64 | DAVNLLTNM | L11; L31; L19; |
| | | | | | | L58; L17 |
| 2183 | LPFTINCQ | L47 | NSQNAVASK | L19; L7 | DAVTAYNGY | L10; L11; L49; |
| | | | | | | L31; L19 |
| 2184 | LPFTINCQEP | L32 | NSTPGSSR | L19; L17 | DCSKVITGL | L20; L11; L34; |
| | | | | | | L25; L35 |
| 2185 | LPGVFCGV | L47 | NSVPWDTI | L67; L55 | DESGEFKLA | L42; L38; L46; |
| | | | | | | L41; L29 |
| 2186 | LPGVYSVI | L47 | NSWLMWLI | L48; L55 | DFVKATCEF | L8; L9; L72; L10; |
| | | | | | | L71 |
| 2187 | LPGVYSVIYLY | L31 | NTDFSRVSA | L68; L1 | DGARRVWTL | L25; L23; L10; |
| | | | | | | L29; L47 |
| 2188 | LPIDKCSRIIPA | L50 | NTDHSSSSD | L1; L18 | DIDITFLKK | L1; L6; L7; L18; |
| | | | | | | L19 |
| 2189 | LPIGINIT | L47 | NTLQCIMLV | L73; L20 | DILSRLDKV | L23; L11; L4; L47; |
| | | | | | | L25 |
| 2190 | LPKGFYAEG | L51 | NTLTLAVPY | L12; L14 | DKAYKIEEL | L44; L25; L23; |
| | | | | | | L20; L10 |
| 2191 | LPLQLGFSTG | L50 | NTPKDHIGTR | L11; L19 | DLDEWSMATY | L1; L18; L10; L11; |
| | | | | | | L14 |
| 2192 | LPLTQYNRYL | L32 | NTQEVFAQVK | L19; L13 | DLLFNKVTL | L23; L4; L44; L2; |
| | | | | | | L25 |
| 2193 | LPNDDTLRVEAF | L31 | NTWCIRCL | L55; L70 | DPNFKDQVI | L32; L47; L49; |
| | | | | | | L23; L39 |
| 2194 | LPNNTASWFTA | L50 | NVAKSEFDR | L19; L17 | DPSKPSKRSF | L39; L49; L32; |
| | | | | | | L23; L22 |
| 2195 | LPNNTASWFTAL | L56 | NVANYQKV | L24; L20 | DRYPANSIV | L25; L35; L28; |
| | | | | | | L64; L47 |
| 2196 | LPQGTTLPKGF | L39 | NVATLQAEN | L19; L20 | DTGVEHVTF | L53; L54; L10; |
| | | | | | | L52; L11 |
| 2197 | LPQLEQPY | L31 | NVLYENQKL | L25; L24 | DTVSALVY | L11; L1; L29; L10; |
| | | | | | | L18 |
| 2198 | LPQNAVVKIY | L31 | NVNKGEDIQL | L32; L56 | DVRETMSY | L11; L10; L29; |
| | | | | | | L43; L26 |
| 2199 | LPSLATVAYF | L31 | NVNRFNVAI | L20; L32 | DVVECLKL | L25; L11; L23; |
| | | | | | | L10; L74 |
| 2200 | LPSYAAFAT | L50 | NVNRFNVAITR | L19; L17 | DYGDAVVY | L66; L72; L65; |
| | | | | | | L71; L29 |
| 2201 | LPTEVLTEEVV | L50 | NVSLDNVL | L67; L25 | DYKHWPQIAQF | L9; L11; L8; L17; |
| | | | | | | L01 |
| 2202 | LPTEVLTEEVVL | L31 | NVSLVKPSFY | L12; L14 | DYKHYTPSF | L9; L66; L8; L72; |
| | | | | | | L71 |
| 2203 | LPTGVHAGT | L56 | NVTQAFGR | L17; L19 | DYLVSTQEF | L9; L8; L72; L71; |
| | | | | | | L12 |
| 2204 | LPTGVHAGTD | L49 | NVTQAFGRR | L19; L17 | EAKKVKPTV | L23; L20; L70; |
| | | | | | | L58; L47 |
| 2205 | LPTQTVDSS | L50 | NVVTTKIALK | L19; L7 | ECSNLLLQY | L11; L41; L12; |
| | | | | | | L40; L10 |
| 2206 | LPVLQVRD | L50 | NVYIKNAD | L23; L25 | EEIAIILA | L42; L46; L38; |
| | | | | | | L29; L37 |
| 2207 | LPVLQVRDVLV | L50 | NYEDLLIRK | L17; L8 | EETGTLIV | L45; L48; L42; |
| | | | | | | L37; L29 |
| 2208 | LPVNVAFELWA | L50 | NYFITDAQ | L71; L72 | EETGTLIVN | L42; L41; L40; |
| | | | | | | L29; L46 |
| 2209 | LPVSMTKTSV | L50 | NYFLCWHTNCY | L72; L71 | EEVGHTDLM | L29; L41; L36; |
| | | | | | | L45; L42 |
| 2210 | LPYGANKD | L47 | NYGDSATLP | L9; L8 | EEVQELYSP | L42; L46; L38; |
| | | | | | | L41; L40 |
| 2211 | LPYGANKDGI | L47 | NYIAQVDV | L71; L72 | EFSSNVANY | L12; L17; L11; |
| | | | | | | L14; L72 |
| 2212 | LQCIMLVY | L26 | NYIAQVDVV | L72; L71 | EILPVSMTK | L19; L7; L6; L17; |
| | | | | | | L13 |
| 2213 | LQFAYANR | L21 | NYLGKPREQI | L8; L9 | ELNGGAYTR | L17; L21; L19; |
| | | | | | | L15; L11 |
| 2214 | LQFAYANRNR | L21 | NYLKSPNFS | L9; L8 | ELVIGAVIL | L20; L28; L23; |
| | | | | | | L74; L11 |
| 2215 | LQGPPGTGK | L6 | NYLKSPNFSKL | L8; L9 | EQDKNTQEV | L24; L35; L48; |
| | | | | | | L34; L63 |
| 2216 | LQHRLYECLY | L14 | NYLYRLFRK | L17; L8 | ETIQITISS | L20; L11; L19; |
| | | | | | | L10; L17 |
| 2217 | LQKAAITI | L48 | NYMPYFFTLLL | L9; L8 | ETKDVVECL | L20; L10; L11; |
| | | | | | | L13; L70 |
| 2218 | LQLGFSTGV | L24 | NYNYLYRLFR | L17; L15 | EVITFDNLK | L19; L11; L7; L20; |
| | | | | | | L17 |
| 2219 | LQNNELSPV | L24 | NYQHEETI | L71; L72 | EVKPFITES | L11; L10; L20; |
| | | | | | | L17; L43 |
| 2220 | LQPEEEQEE | L24 | NYQHEETIYNL | L8; L9 | EVLTEEVVLK | L19; L7; L17; L6; |
| | | | | | | L13 |
| 2221 | LQPELDSF | L26 | NYQVNGYPN | L71; L72 | EVRTIKVF | L10; L23; L11; |
| | | | | | | L29; L26 |
| 2222 | LQPRTFLLK | L6 | NYSGVVTTVMF | L9; L8 | EYSHVVAF | L9; L71; L72; L62; |
| | | | | | | L66 |
| 2223 | LQQIELKF | L26 | PALQDAYYR | L17; L15 | FAAYSRYRI | L70; L67; L69; |
| | | | | | | L47; L49 |
| 2224 | LQSLQTYV | L48 | PDDQIGYY | L1; L18 | FASFYYVW | L67; L70; L69; |
| | | | | | | L59; L54 |
| 2225 | LQTYVTQQLI | L24 | PELDSFKEEL | L36; L41 | FAVSKGFFK | L60; L19; L61; L7; |
| | | | | | | L58 |
| 2226 | LQVRDVLV | L48 | PETNILLNV | L45; L37 | FELWAKRNI | L45; L41; L37; |
| | | | | | | L40; L36 |
| 2227 | LQYGSFCTQ | L26 | PFAMGIIAM | L72; L71 | FEYVSQPF | L29; L33; L43; |
| | | | | | | L59; L71 |
| 2228 | LQYIRKLH | L48 | PFHPLADNKF | L9; L8 | FFKEGSSV | L71; L72; L62; |
| | | | | | | L43; L23 |
| 2229 | LRARSVSPK | L30 | PFLYLYAL | L71; L72 | FFLYENAFL | L72; L71; L62; L9; |
| | | | | | | L8 |
| 2230 | LRARSVSPKLF | L30 | PFMIDVQQW | L9; L8 | FFYVLGLAA | L50; L71; L72; |
| | | | | | | L46; L51 |
| 2231 | LRCGACIRR | L30 | PFNKWGKAR | L17; L15 | FGWLIVGVAL | L67; L68; L44; |
| | | | | | | L61; L31 |
| 2232 | LRDGWEIV | L35 | PFTIYSLLL | L9; L8 | FIAGLIAI | L59; L67; L74; L3; |
| | | | | | | L61 |
| 2233 | LREPMLQSA | L25 | PFVVSTGYHF | L8; L9 | FISNSWLMWL | L60; L59; L58; |
| | | | | | | L61; L74 |
| 2234 | LRIAGHHLGR | L30 | PFWITIAY | L72; L71 | FITLCFTL | L60; L59; L23; |
| | | | | | | L61; L67 |
| 2235 | LRLIDAMMF | L30 | PGCDGGSLY | L14; L18 | FKHLIPLMY | L66; L12; L27; |
| | | | | | | L31; L59 |
| 2236 | LRPDTRYVLM | L66 | PGLPGTIL | L23; L25 | FLCLFLLPSL | L2; L4; L3; L5; L59 |
| 2237 | LRQWLPTGT | L30 | PIFLIVAAI | L20; L3 | FLFVAAIFYL | L2; L4; L5; L3; L74 |
| 2238 | LRTTNGDFLH | L30 | PIYDEPTTT | L43; L3 | FLIGCNYL | L74; L67; L2; L61; |
| | | | | | | L59 |
| 2239 | LRVCVDTVR | L30 | PLCANGQVF | L26; L9 | FLLFLVLI | L4; L74; L2; L47; |
| | | | | | | L23 |
| 2240 | LRVIGHSMQ | L25 | PLLESELVI | L2; L4 | FLMSFTVLCL | L3; L2; L4; L5; L74 |
| 2241 | LSAPTLVPQEH | L52 | PMDSTVKNY | L1; L18 | FLNGSCGSV | L3; L2; L4; L57; L5 |
| 2242 | LSAQTGIAVL | L53 | PPISFPLCA | L50; L51 | FLPRVESAV | L5; L57; L2; L3; L4 |
| 2243 | LSDDAVVCFN | L1 | PPKNSIDAF | L39; L56 | FLRDGWEIV | L3; L43; L2; L4; L5 |
| 2244 | LSDLQDLK | L1 | PPQTSITSA | L51; L50 | FLYLYALVYF | L74; L12; L59; L2; |
| | | | | | | L62 |
| 2245 | LSEISMDNS | L1 | PPTSFGPL | L56; L22 | FMIDVQQWGF | L43; L8; L12; L11; |
| | | | | | | L9 |
| 2246 | LSEQLDFI | L1 | PQNAVVKI | L48; L24 | FNVLFSTVF | L59; L31; L27; |
| | | | | | | L26; L60 |
| 2247 | LSETKCTLK | L1 | PQSAPHGVVF | L26; L27 | FQFCNDPFL | L44; L58; L61; |
| | | | | | | L69; L28 |
| 2248 | LSFELLHA | L50 | PRRNVATL | L66; L65 | FQSAVKRTI | L24; L48; L34; |
| | | | | | | L64; L44 |
| 2249 | LSFELLHAPA | L50 | PRWYFYYL | L65; L66 | FRVQPTESI | L34; L35; L30; |
| | | | | | | L66; L28 |
| 2250 | LSGFKLKD | L65 | PSGTWLTY | L65; L18 | FSNSGSDVLY | L1; L14; L18; L58; |
| | | | | | | L52 |
| 2251 | LSHQSDIEV | L73 | PTSFGPLVRK | L7; L6 | FSSTFNVPM | L70; L61; L58; |
| | | | | | | L69; L59 |
| 2252 | LSHRFYRL | L60 | PVAYRKVLLR | L19; L21 | FTVEKGIYQ | L60; L58; L20; |
| | | | | | | L61; L69 |
| 2253 | LSKSLTEN | L43 | PVLKGVKL | L23; L74 | FVTHSKGLY | L12; L14; L1; L49; |
| | | | | | | L58 |
| 2254 | LSKSLTENK | L13 | PVNVAFELW | L54; L52 | FVTVYSHL | L74; L60; L59; |
| | | | | | | L61; L68 |
| 2255 | LSLIDFYL | L55 | PVPEVKIL | L57; L64 | FVVPGLPGTIL | L60; L67; L74; |
| | | | | | | L31; L61 |
| 2256 | LSLIDFYLC | L52 | PYEDFQENW | L9; L8 | FWITIAYII | L69; L34; L8; L9; |
| | | | | | | L55 |
| 2257 | LSLIDFYLCF | L52 | PYFFTLLLQL | L9; L8 | FYAYLRKHF | L9; L72; L71; L66; |
| | | | | | | L12 |
| 2258 | LSLPVLQVRD | L52 | PYIKWDLLK | L8; L9 | FYEPQIITT | L62; L72; L66; |
| | | | | | | L71; L9 |
| 2259 | LSLQFKRPI | L55 | PYIVGDVV | L71; L72 | FYLITPVHVM | L71; L72; L66; L9; |
| | | | | | | L8 |
| 2260 | LSLREVRTIKVF | L52 | PYPNASFDNF | L9; L8 | FYLTNDVSFL | L72; L71; L9; L62; |
| | | | | | | L8 |
| 2261 | LSPRWYFY | L1 | QAENVTGLF | L49; L63 | FYPPDEDEE | L66; L72; L62; L9; |
| | | | | | | L71 |
| 2262 | LSPRWYFYYL | L57 | QAITVTPEA | L50; L32 | FYYVWKSY | L71; L72; L43; |
| | | | | | | L66; L59 |
| 2263 | LSRVLGLKTL | L52 | QASSRSSSR | L17; L19 | GADPIHSLR | L63; L19; L15; |
| | | | | | | L18; L68 |
| 2264 | LSSYSLFD | L65 | QAVTANVNAL | L67; L61 | GAMDTTSYR | L15; L19; L17; L7; |
| | | | | | | L21 |
| 2265 | LSTDGNKIADKY | L1 | QEAYEQAV | L33; L45 | GCINANQVI | L24; L34; L36; |
| | | | | | | L28; L45 |
| 2266 | LSTDTGVEHVTF | L52 | QEAYEQAVAN | L38; L40 | GDSEVVLKK | L7; L6; L19; L13; |
| | | | | | | L24 |
| 2267 | LSVCLGSLI | L55 | QEEVQELY | L29; L1 | GEFKLASH | L45; L37; L29; |
| | | | | | | L46; L33 |
| 2268 | LSVVNARL | L60 | QEFKPRSQ | L29; L48 | GEQKSILSP | L38; L42; L46; |
| | | | | | | L37; L45 |
| 2269 | LSYEQFKK | L55 | QEGVVDYGA | L42; L38 | GERVRQAL | L37; L25; L33; |
| | | | | | | L45; L36 |
| 2270 | LSYFIASFRLF | L52 | QEGVVDYGARF | L40; L41 | GERVRQALL | L36; L45; L37; |
| | | | | | | L40; L33 |
| 2271 | LTAESHVD | L55 | QEHYVRITGLY | L40; L41 | GETLPTEV | L45; L48; L37; |
| | | | | | | L46; L36 |
| 2272 | LTAFGLVA | L50 | QEILGTVSWN | L41; L40 | GEVITFDNL | L36; L37; L45; |
| | | | | | | L41; L40 |
| 2273 | LTAFGLVAEWF | L52 | QEKNFTTA | L46; L42 | GEVPVSII | L45; L48; L37; |
| | | | | | | L36; L29 |
| 2274 | LTCATTRQV | L70 | QELGKYEQYIK | L40; L41 | GEYSHVVA | L46; L38; L25; |
| | | | W | | | L37; L42 |
| 2275 | LTDEMIAQYT | L1 | QELIRQGTDY | L40; L41 | GFFTYICGF | L72; L12; L9; L71; |
| | | | | | | L8 |
| 2276 | LTDNVYIK | L1 | QELYSPIF | L29; L33 | GFIAGLIAI | L71; L72; L24; L8; |
| | | | | | | L34 |
| 2277 | LTEEVVLK | L1 | QEPKLGSL | L33; L57 | GFIQQKLAL | L72; L71; L8; L23; |
| | | | | | | L37 |
| 2278 | LTESNKKF | L1 | QEPKLGSLV | L45; L36 | GFQPTNGVGY | L14; L12; L72; |
| | | | | | | L26; L71 |
| 2279 | LTFYLTNDV | L20 | QEPKLGSLVV | L42; L36 | GHFAWWTAF | L27; L28; L35; |
| | | | | | | L34; L26 |
| 2280 | LTFYLTNDVSF | L52 | QESPFVMM | L29; L33 | GHYKHITSK | L27; L28; L6; L7; |
| | | | | | | L35 |
| 2281 | LTKEGATT | L55 | QEVFAQVKQIY | L41; L40 | GLAAIMQLF | L12; L9; L26; L16; |
| | | | | | | L24 |
| 2282 | LTKGTLEPEYF | L52 | QEYADVFHLYL | L41; L40 | GLTVLPPLL | L4; L2; L74; L3; L5 |
| 2283 | LTKPYIKWD | L70 | QFAPSASAFF | L9; L12 | GLVEVEKGV | L2; L5; L3; L24; L4 |
| 2284 | LTLDNQDL | L60 | QFDTYNLWNTF | L9; L8 | GLWLDDVVY | L27; L26; L18; |
| | | | | | | L14; L12 |
| 2285 | LTLDNQDLN | L52 | QFKHLIPL | L71; L72 | GPKVKYLYF | L39; L23; L49; |
| | | | | | | L22; L43 |
| 2286 | LTLDNQDLNGN | L52 | QFPNTYLEG | L72; L71 | GQQQQGQTV | L24; L48; L28; |
| | W | | | | | L26; L35 |
| 2287 | LTLGVYDY | L1 | QGAVDINKL | L64; L34 | GRFVLALL | L25; L64; L35; |
| | | | | | | L66; L30 |
| 2288 | LTNDNTSRYW | L52 | QGDDYVYLPY | L18; L1 | GSDNVTDF | L63; L62; L68; |
| | | | | | | L74; L54 |
| 2289 | LTNDVSFLA | L1 | QHEVLLAPL | L34; L28 | GSIIQFPNTY | L26; L14; L55; |
| | | | | | | L52; L27 |
| 2290 | LTNDVSFLAH | L6 | QHEVLLAPLL | L28; L34 | GSKSPIQYI | L55; L13; L24; |
| | | | | | | L70; L53 |
| 2291 | LTPGDSSSG | L57 | QHMVVKAALL | L28; L34 | GSLAATVRL | L44; L53; L73; |
| | | | | | | L74; L60 |
| 2292 | LTPLGIDLDEW | L52 | QIDGYVMHANY | L18; L1 | GSLVVRCSF | L52; L53; L54; |
| | | | | | | L55; L16 |
| 2293 | LTPVVQTIEV | L5 | QIGEYTFEK | L7; L6 | GTDPYEDF | L1; L54; L62; L18; |
| | | | | | | L63 |
| 2294 | LTRPLLES | L59 | QIGGYTEKW | L54; L16 | GTHWFVTQR | L21; L7; L15; L19; |
| | | | | | | L17 |
| 2295 | LTRPLLESE | L52 | QIVESCGNF | L10; L11 | GVAPGTAV | L28; L20; L51; |
| | | | | | | L23; L24 |
| 2296 | LTSMKYFVK | L7 | QLDEEQPM | L63; L62 | GVDAVNLL | L63; L74; L68; |
| | | | | | | L62; L1 |
| 2297 | LTSQWLTNI | L53 | QLDFIDTKRGVY | L1; L18 | GVFCGVDAV | L20; L3; L24; L4; |
| | | | | | | L2 |
| 2298 | LTSQWLTNIF | L52 | QLGIEFLKR | L21; L6 | GVPVVDSYY | L12; L14; L26; |
| | | | | | | L18; L11 |
| 2299 | LTTAAKLM | L55 | QLMCQPILLL | L4; L2 | GVVQLTSQW | L10; L52; L54; |
| | | | | | | L49; L16 |
| 2300 | LTTAAKLMV | L73 | QLNRALTGI | L3; L4 | GVVQQLPETY | L12; L26; L10; |
| | | | | | | L14; L52 |
| 2301 | LTVFFDGRV | L20 | QLPETYFTQ | L5; L57 | GVYSVIYL | L74; L67; L64; |
| | | | | | | L69; L58 |
| 2302 | LTVFFDGRVD | L55 | QLRKQIRSA | L3; L51 | GVYYPDKVFR | L7; L15; L19; L21; |
| | | | | | | L6 |
| 2303 | LVAAGLEAPFLY | IL12 | QLRVIGHSM | L43; L26 | GYINVFAF | L72; L71; L9; L8; |
| | | | | | | L66 |
| 2304 | LVAVPTGYV | L20 | QLTPTWRV | L48; L4 | GYINVFAFPF | L8; L9; L12; L72; |
| | | | | | | L71 |
| 2305 | LVKQGDDY | L26 | QMAPISAMVR | L21; L19 | GYLQPRTFL | L9; L8; L72; L71; |
| | | | | | | L36 |
| 2306 | LVLARKHTT | L23 | QNAQALNTL | L34; L28 | HECFVKRV | L48; L45; L37; |
| | | | | | | L33; L29 |
| 2307 | LVLIMLII | L47 | QNYGDSATL | L28; L65 | HFAIGLALYY | L12; L18; L14; |
| | | | | | | L72; L71 |
| 2308 | LVLIMLIIFW | L52 | QPEEEQEED | L32; L49 | HFDEGNCDTL | L62; L34; L68; |
| | | | | | | L67; L63 |
| 2309 | LVLLPLVSS | L50 | QPIGALDISA | L50; L51 | HFIETISLA | L8; L46; L62; L11; |
| | | | | | | L72 |
| 2310 | LVPFWITI | L47 | QPILLLDQA | L50; L51 | HGFELTSM | L25; L48; L29; |
| | | | | | | L59; L23 |
| 2311 | LVPFWITIAYI | L5 | QPITNCVKM | L32; L22 | HHMELPTGV | L28; L35; L3; L34; |
| | | | | | | L2 |
| 2312 | LVPHVGEI | L47 | QPLEQPTSEA | L50; L51 | HITSKETLY | L12; L14; L11; |
| | | | | | | L18; L58 |
| 2313 | LVPHVGEIPV | L5 | QPSVGPKQASL | L56; L22 | HLLIGLAKR | L21; L15; L17; L6; |
| | | | | | | L11 |
| 2314 | LVPQEHYV | L5 | QPVSELLTPL | L22; L31 | HLLLVAAGL | L44; L4; L2; L5; |
| | | | | | | L23 |
| 2315 | LVPQEHYVRI | L5 | QQQTTLKGV | L48; L24 | HLMSFPQSA | L3; L2; L43; L46; |
| | | | | | | L50 |
| 2316 | LVRKIFVD | L65 | QRNFYEPQI | L34; L30 | HLYLQYIRKL | L3; L64; L24; L4; |
| | | | | | | L44 |
| 2317 | LVSDIDITFLKK | L6 | QRVAGDSGF | L30; L34 | HPDSATLV | L63; L62; L47; |
| | | | | | | L50; L32 |
| 2318 | LVTLAILTAL | L56 | QSADAQSFLNR | L15; L7 | HPLADNKFAL | L32; L56; L31; |
| | | | | | | L23; L39 |
| 2319 | LVYAADPAM | L32 | QSAPHGVV | L70; L48 | HPNPKGFCDL | L32; L39; L56; |
| | | | | | | L22; L49 |
| 2320 | LVYDNKLKAH | L43 | QSAVKRTI | L55; L48 | HPNQEYADV | L51; L50; L32; |
| | | | | | | L49; L39 |
| 2321 | LVYDNKLKAHK | L6 | QSDIEVTGD | L65; L1 | HSKGLYRKC | L55; L13; L14; |
| | | | | | | L52; L10 |
| 2322 | LVYFLQSINF | L12 | QSFLNRVC | L55; L48 | HSYFTSDY | L18; L43; L14; |
| | | | | | | L26; L1 |
| 2323 | LWCKDGHVETF | L8 | QSYGFQPTN | L48; L55 | HTDFSSEI | L68; L63; L62; |
| | | | | | | L18; L1 |
| 2324 | LWLLWPVTLA | L50 | QTLEILDI | L55; L48 | HTDESSEII | L68; L34; L18; |
| | | | | | | L63; L1 |
| 2325 | LWNTFTRL | L62 | QTMLFTMLRK | L7; L6 | HTDLMAAYV | L62; L63; L18; L1; |
| | | | | | | L68 |
| 2326 | LYALVYFLQ | L9 | QTSITSAVL | L28; L53 | HVSGTNGTKR | L19; L21; L17; |
| | | | | | | L11; L15 |
| 2327 | LYDKLQFT | L62 | QTTETAHSC | L55; L54 | HVVAFNTLLF | L11; L12; L10; |
| | | | | | | L49; L52 |
| 2328 | LYDKLVSS | L62 | QTTTIQTI | L55; L48 | HWPQIAQF | L62; L33; L9; L11; |
| | | | | | | L71 |
| 2329 | LYIDINGN | L72 | QTVDSSQGSEY | L14; L11 | HYVRITGLY | L14; L12; L11; |
| | | | | | | L49; L66 |
| 2330 | LYIDINGNLHP | L8 | QVAKSHNIAL | L56; L20 | IAANTVIW | L54; L69; L52; |
| | | | | | | L49; L70 |
| 2331 | LYKLMGHF | L9 | QVEQKIAEI | L20; L10 | IAATRGATV | L58; L70; L47; |
| | | | | | | L61; L69 |
| 2332 | LYKMQRML | L71 | QVIVNNLDK | L7; L6 | IAEIPKEEV | L63; L68; L67; |
| | | | | | | L49; L47 |
| 2333 | LYPTLNISDEF | L9 | QVNGLTSIK | L6; L7 | IAIVMVTIML | L74; L60; L61; |
| | | | | | | L67; L31 |
| 2334 | LYSPIFLIVAA | L50 | QVNGYPNMF | L16; L58 | IANQFNSAI | L68; L47; L32; |
| | | | | | | L70; L57 |
| 2335 | MADLVYALRH | L68 | QVNGYPNMFIT | L21; L17 | IAQYTSALL | L60; L61; L63; |
| | | | R | | | L32; L74 |
| 2336 | MADQAMTQ | L68 | QVVDADSKI | L10; L20 | IAYIICIST | L43; L69; L67; |
| | | | | | | L47; L50 |
| 2337 | MAFPSGKVEG | L31 | QWMVMFTPL | L71; L72 | IFGTVYEKL | L8; L9; L62; L72; |
| | | | | | | L71 |
| 2338 | MAGNGGDAA | L50 | QWNLVIGFL | L62; L40 | IFVDGVPF | L72; L71; L62; L9; |
| | | | | | | L8 |
| 2339 | MAGNGGDAAL | L32 | QYIKWPWY | L71; L72 | IFWFSLEL | L72; L62; L71; |
| | | | | | | L68; L67 |
| 2340 | MAPISAMVR | L57 | QYIKWPWYIW | L9; L8 | IFYLITPV | L48; L72; L71; |
| | | | | | | L47; L62 |
| 2341 | MASLVLAR | L17 | QYIKWPWYIWL | L8; L9 | IGAGICASY | L14; L26; L12; |
| | | | | | | L43; L27 |
| 2342 | MASLVLARK | L19 | QYIRKLHDEL | L9; L8 | IIIWFLLLSV | L3; L73; L4; L5; |
| | | | | | | L20 |
| 2343 | MAYITGGVVQ | L49 | QYLNTLTLA | L8; L9 | IIKTIQPRV | L58; L48; L5; L13; |
| | | | | | | L3 |
| 2344 | MAYITGGVVQL | L69 | QYVFCTVNAL | L72; L71 | IIRENNRVV | L3; L13; L58; L39; |
| | | | | | | L48 |
| 2345 | MDGSIIQF | L33 | RAFDIYNDKV | L24; L20 | IKDFGGFNF | L27; L34; L68; |
| | | | | | | L63; L9 |
| 2346 | MDLFMRIF | L33 | RAGEAANF | L54; L53 | ILDGISQYSL | L5; L68; L63; L2; |
| | | | | | | L67 |
| 2347 | MDNLACEDL | L33 | RAMPNMLR | L15; L21 | ILGLPTQTV | L2; L24; L5; L4; L3 |
| 2348 | MDSTVKNYF | L33 | RARSVASQSI | L55; L53 | ILGTVSWNL | L2; L4; L5; L74; L9 |
| 2349 | MEKLKTLVAT | L42 | RARTVAGVSI | L53; L44 | ILRKGGRTI | L55; L3; L24; L39; |
| | | | | | | L48 |
| 2350 | MELPTGVHAG | L40 | RARVECFDKF | L52; L53 | ILTSLLVL | L74; L23; L59; L4; |
| | | | | | | L73 |
| 2351 | MELTPVVQ | L29 | RATRVECTTI | L54; L53 | IMASLVLAR | L19; L17; L6; L21; |
| | | | | | | L15 |
| 2352 | MESEFRVYSS | L42 | RCNLGGAVCR | L21; L15 | INPTDQSSY | L14; L12; L43; |
| | | | | | | L72; L71 |
| 2353 | MFDAYVNT | L62 | RDLPQGFSA | L51; L46 | IPFAMQMAY | L31; L49; L12; |
| | | | | | | L50; L71 |
| 2354 | MFLGTCRR | L17 | RDLPQGFSAL | L33; L37 | IPTITQMNL | L56; L39; L32; |
| | | | | | | L22; L49 |
| 2355 | MFTPLIQPI | L9 | RDPQTLEIL | L33; L57 | IQYGRSGETL | L25; L27; L26; |
| | | | | | | L28; L44 |
| 2356 | MFTPLVPFWI | L9 | REFVFKNIDGY | L29; L41 | ITIAYIICI | L20; L69; L70; |
| | | | | | | L73; L53 |
| 2357 | MGIIAMSA | L50 | REGYLNSTN | L45; L36 | ITLKKRWQL | L53; L16; L73; |
| | | | | | | L60; L4 |
| 2358 | MGIIAMSAF | L59 | RELNGGAYTRY | L40; L41 | IVDSVTVKN | L63; L5; L68; L49; |
| | | | | | | L18 |
| 2359 | MHAASGNL | L28 | REQIDGYVMHA | L42; L38 | IWLGFIAGL | L4; L8; L9; L30; |
| | | | | | | L62 |
| 2360 | MHHMELPTGV | L28 | RETMSYLF | L33; L29 | IYDEPTTTT | L62; L68; L9; L8; |
| | | | | | | L36 |
| 2361 | MISAGFSLWVY | L14 | REVLSDRELHL | L36; L40 | KAFKQIVES | L69; L53; L70; |
| | | | | | | L73; L58 |
| 2362 | MLAHAEETR | L21 | RFASVYAW | L54; L71 | KAGGTTEM | L70; L58; L54; |
| | | | | | | L59; L63 |
| 2363 | MLDNRATLQ | L1 | RFDTRVLSN | L18; L62 | KAIVSTIQR | L21; L15; L19; |
| | | | | | | L17; L7 |
| 2364 | MLDNRATLQAI | L5 | RFQTLLAL | L72; L71 | KCRSKNPLLY | L13; L18; L6; L12; |
| | | | | | | L14 |
| 2365 | MLFTMLRK | L6 | RFQTLLALH | L14; L15 | KDCVVLHSY | L14; L16; L18; |
| | | | | | | L26; L33 |
| 2366 | MLKTVYSD | L23 | RFVSLAIDAY | L14; L12 | KDLPKEITV | L33; L73; L2; L37; |
| | | | | | | L4 |
| 2367 | MLKTVYSDV | L3 | RFYFYTSK | L71; L72 | KDLSPRWYF | L33; L16; L8; L52; |
| | | | | | | L9 |
| 2368 | MLLEIKDTEK | L6 | RGGSQASSR | L15; L21 | KEIDRLNEVA | L38; L46; L42; |
| | | | | | | L36; L37 |
| 2369 | MLLEIKDTEKY | L12 | RHSLSHFV | L33; L28 | KELLQNGM | L33; L37; L36; |
| | | | | | | L45; L29 |
| 2370 | MLLEKCDL | L23 | RIDGDMVPHI | L5; L63 | KELLVYAA | L33; L38; L46; |
| | | | | | | L42; L37 |
| 2371 | MLRIMASL | L23 | RIIMRLWLCW | L54; L16 | KELLVYAAD | L38; L33; L46; |
| | | | | | | L40; L42 |
| 2372 | MLWCKDGHV | L2 | RIIPARAR | L21; L15 | KESVQTFFKL | L36; L37; L41; |
| | | | | | | L40; L45 |
| 2373 | MMFVKHKH | L48 | RIKIVQML | L23; L39 | KFLTENLL | L71; L8; L62; L72; |
| | | | | | | L9 |
| 2374 | MMFVKHKHAF | L16 | RILGAGCFV | L73; L13 | KFNGLTVL | L62; L71; L72; L8; |
| | | | | | | L56 |
| 2375 | MMISAGFSLW | L10 | RIMASLVLARK | L6; L7 | KFTDGVCL | L72; L71; L62; L8; |
| | | | | | | L56 |
| 2376 | MNLKYAISA | L50 | RIQPGQTFSV | L16; L4 | KFYGGWHNML | L71; L8; L72; L9; |
| | | | | | | L16 |
| 2377 | MPASWVMRIMT | L49 | RIRSVYPVA | L51; L13 | KGFCKLHNW | L16; L54; L52; |
| | W | | | | | L49; L53 |
| 2378 | MPILTLTRALTA | L50 | RKHFSMMIL | L44; L27 | KGIYQTSNF | L54; L27; L8; L26; |
| | | | | | | L16 |
| 2379 | MPLKAPKE | L47 | RKHTTCCSL | L44; L27 | KGPKVKYLY | L14; L12; L66; |
| | | | | | | L54; L18 |
| 2380 | MPLKAPKEII | L47 | RKIFVDGVPF | L27; L44 | KHAFLCLFL | L28; L34; L73; |
| | | | | | | L44; L35 |
| 2381 | MPLKAPKEIIF | L31 | RKLDNDAL | L44; L27 | KHTPINLV | L28; L48; L73; |
| | | | | | | L64; L35 |
| 2382 | MPLSAPTLVPQ | L50 | RKVQHMVVK | L44; L27 | KIADKYVRNL | L3; L16; L4; L13; L |
| | | | | | | 64 |
| 2383 | MPNLYKMQR | L17 | RKYKGIKIQ | L27; L44 | KIILFLALI | L73; L3; L48; L24; |
| | | | | | | L16 |
| 2384 | MPNLYKMQRML | L39 | RLIIRENNR | L21; L15 | KLDGFMGRI | L5; L18; L63; L2; |
| | | | | | | L24 |
| 2385 | MPNMLRIMAS | L50 | RLIIRENNRV | L24; L2 | KLGSLVVRC | L4; L2; L16; L21; |
| | | | | | | L42 |
| 2386 | MPNMLRIMASL | L22 | RLISMMGFK | L6; L13 | KLKDCVMY | L26; L13; L43; |
| | | | | | | L14; L18 |
| 2387 | MPVCVETKAI | L32 | RLITGRLQS | L16; L13 | KLLEQWNL | L2; L4; L55; L16; |
| | | | | | | L5 |
| 2388 | MQNCVLKLKV | L24 | RLKLFAAETL | L16; L26 | KLNEEIAIIL | L16; L2; L4; L5; |
| | | | | | | L44 |
| 2389 | MQRKLEKM | L48 | RLKLFDRYFKY | L14; L18 | KLVSSFLEM | L16; L5; L73; L6; |
| | | | | | | L27 |
| 2390 | MQTMLFTML | L44 | RLQAGNATEV | L2; L24 | KMKDLSPRWY | L14; L13; L55; |
| | | | | | | L16; L26 |
| 2391 | MQVESDDY | L26 | RLWLCWKCR | L21; L15 | KNFKSVLY | L27; L54; L65; |
| | | | | | | L18; L26 |
| 2392 | MQVESDDYI | L34 | RLYLDAYNM | L21; L16 | KNGSIHLY | L14; L65; L18; |
| | | | | | | L55; L54 |
| 2393 | MRELNGGAY | L1 | RNAGIVGV | L24; L33 | KPCIKVATV | L51; L39; L47; |
| | | | | | | L23; L22 |
| 2394 | MRLWLCWKC | L30 | RNARNGVLI | L53; L24 | KPFERDIST | L56; L51; L39; |
| | | | | | | L32; L50 |
| 2395 | MRLWLCWKCR | L30 | RNLQEFKPR | L15; L21 | KPFLNKVV | L47; L39; L51; |
| | | | | | | L25; L50 |
| 2396 | MRTFKVSI | L35 | RNRFLYIIKL | L13; L44 | KPNELSRV | L51; L39; L56; |
| | | | | | | L47; L48 |
| 2397 | MRTFKVSIWNL | L30 | RNTNPIQL | L73; L56 | KPYIKWDLL | L23; L39; L56; |
| | | | | | | L22; L47 |
| 2398 | MRVIHFGA | L25 | RNYIAQVD | L65; L55 | KQGDDYVY | L26; L14; L65; |
| | | | | | | L27; L66 |
| 2399 | MSALNHTKKW | L52 | RNYIAQVDV | L73; L24 | KQLIKVTLV | L48; L24; L73; |
| | | | | | | L33; L4 |
| 2400 | MSALNHTKKWK | L1 | RNYVFTGYR | L15; L21 | KQLIKVTLVF | L16; L27; L26; L8; |
| | Y | | | | | L52 |
| 2401 | MSDNGPQNQ | L1 | RPQGLPNNTA | L51; L22 | KQLPFFYY | L27; L14; L26; |
| | | | | | | L12; L16 |
| 2402 | MSDRDLYD | L1 | RPQIGVVRE | L56; L39 | KRFDNPVLPF | L30; L66; L65; |
| | | | | | | L16; L6 |
| 2403 | MSDRDLYDK | L1 | RQALLKTVQ | L44; L24 | KRFKESPFEL | L65; L66; L30; |
| | | | | | | L35; L16 |
| 2404 | MSDRDLYDKL | L1 | RQLLFVVE | L27; L44 | KSAFVNLKQL | L55; L53; L73; |
| | | | | | | L13; L44 |
| 2405 | MSDVKCTSVVL | L68 | RQLLFVVEVV | L24; L48 | KSAGFPFNKW | L52; L54; L16; |
| | | | | | | L53; L18 |
| 2406 | MSLSEQLR | L17 | RQVVNVVTTK | L30; L7 | KSASVYYSQL | L55; L53; L44; |
| | | | | | | L54; L73 |
| 2407 | MSRIGMEV | L48 | RRAFGEYSH | L30; L65 | KSDGTGTI | L55; L68; L63; |
| | | | | | | L54; L18 |
| 2408 | MSYEDQDALFAY | L1 | RRATCFSTA | L65; L30 | KSFTVEKGI | L55; L53; L54; |
| | | | | | | L52; L16 |
| 2409 | MSYLFQHA | L50 | RRCPAEIVD | L65; L30 | KSHNIALI | L55; L48; L73; |
| | | | | | | L53; L54 |
| 2410 | MSYLFQHAN | L48 | RRGPEQTQG | L65; L30 | KSILSPLYAF | L52; L53; L54; |
| | | | | | | L16; L26 |
| 2411 | MTYRRLISMM | L11 | RRLISMMGF | L30; L33 | KSLNVAKSEF | L53; L52; L54; |
| | | | | | | L16; L55 |
| 2412 | MVDTSLSG | L68 | RRSFYVYAN | L65; L30 | KSPNFSKL | L57; L73; L63; |
| | | | | | | L55; L54 |
| 2413 | MVDTSLSGFKL | L68 | RRVWTLMNV | L30; L64 | KSPNFSKLI | L55; L64; L53; |
| | | | | | | L57; L73 |
| 2414 | MVLGSLAATV | L20 | RRVWTLMNVL | L65; L30 | KSQDLSVV | L73; L70; L48; |
| | | | | | | L69; L18 |
| 2415 | MVMCGGSLYVK | L7 | RSDVLLPLT | L18; L1 | KSREETGLLM | L52; L13; L53; |
| | | | | | | L18; L55 |
| 2416 | MVMFTPLV | L48 | RSEKSYELQ | L18; L1 | KSWMESEFRVY | L14; L18; L52; |
| | | | | | | L55; L16 |
| 2417 | MVMFTPLVP | L50 | RSFIEDLLFNK | L7; L6 | KTDGTLMIERF | L18; L54; L52; |
| | | | | | | L53; L16 |
| 2418 | MVRMYIFFA | L50 | RSGARSKQR | L21; L15 | KTHVQLSL | L73; L53; L55; |
| | | | | | | L54; L60 |
| 2419 | MVVKAALL | L74 | RSKNPLLYD | L13; L15 | KTLATHGL | L54; L55; L16; |
| | | | | | | L33; L53 |
| 2420 | MWKGYGCSC | L43 | RSLPGVFC | L55; L54 | KTPPIKDF | L53; L54; L52; |
| | | | | | | L55; L66 |
| 2421 | MWLSYFIA | L50 | RSLPGVFCGV | L13; L73 | KTYERHSLSHF | L16; L53; L54; |
| | | | | | | L11; L52 |
| 2422 | MYDPKTKN | L62 | RSSVLHST | L55; L54 | KVFRSSVL | L54; L53; L56; |
| | | | | | | L44; L55 |
| 2423 | MYLKLRSDVL | L9 | RSVASQSII | L55; L54 | KVGGNYNYLY | L14; L18; L16; |
| | | | | | | L12; L54 |
| 2424 | MYTPHTVLQ | L9 | RSVASQSIIAY | L18; L14 | KVKYLYFIK | L13; L7; L6; L21; |
| | | | | | | L15 |
| 2425 | NAAIVLQLP | L49 | RSVYPVASP | L65; L54 | KVTLVFLFV | L73; L13; L20; |
| | | | | | | L24; L5 |
| 2426 | NAANVYLK | L19 | RTAPHGHV | L73; L18 | KWADNNCYL | L44; L8; L9; L73; |
| | | | | | | L36 |
| 2427 | NADLYKLMG | L68 | RTAPHGHVMVE | L16; L52 | KWDLLKYDF | L62; L53; L9; L63; |
| | | | | | | L33 |
| 2428 | NALPETTA | L50 | RTCCLCDRR | L21; L15 | KYKYFSGAM | L66; L71; L72; |
| | | | | | | L13; L14 |
| 2429 | NANQVIVNNL | L31 | RTFKVSIWNLDY | L18; L14 | KYTMADLVY | L14; L66; L72; |
| | | | | | | L71; L12 |
| 2430 | NAPGCDVTD | L49 | RTIAFGGCV | L73; L13 | LADAGFIKQ | L63; L49; L68; |
| | | | | | | L32; L18 |
| 2431 | NAPGCDVTDV | L57 | RTIKVFTT | L55; L54 | LADAGFIKQY | L18; L1; L49; L70; |
| | | | | | | L31 |
| 2432 | NAQALNTLV | L70 | RTLETAQNS | L53; L54 | LAFLLFLVLI | L47; L50; L69; |
| | | | | | | L31; L52 |
| 2433 | NARNGVLI | L47 | RTLETAQNSVR | L21; L15 | LAKKFDTF | L58; L59; L23; |
| | | | | | | L47; L52 |
| 2434 | NARNGVLIT | L69 | RTNVYLAV | L73; L18 | LALHRSYL | L60; L61; L59; |
| | | | | | | L47; L74 |
| 2435 | NATNKATY | L70 | RTQLPPAY | L18; L14 | LALITLATC | L47; L50; L59; |
| | | | | | | L52; L31 |
| 2436 | NATNKATYK | L19 | RTVAGVSIC | L54; L16 | LATCELYHY | L31; L49; L12; |
| | | | | | | L52; L58 |
| 2437 | NATRFASV | L47 | RTVYDDGAR | L21; L15 | LAYILFTRFF | L52; L49; L47; |
| | | | | | | L60; L31 |
| 2438 | NCDTLKEI | L68 | RTVYDDGARR | L15; L21 | LCLFLLPSL | L4; L31; L50; L59; |
| | | | | | | L47 |
| 2439 | NCDVVIGIV | L62 | RVAGDSGF | L54; L26 | LEEKFKEGV | L45; L46; L42; |
| | | | | | | L38; L37 |
| 2440 | NCVADYSVLY | L31 | RVCGVSAARL | L56; L14 | LEFGATSA | L46; L25; L38; |
| | | | | | | L29; L37 |
| 2441 | NCVLKLKV | L25 | RVCVDTVR | L21; L15 | LEQPTSEAV | L38; L45; L42; |
| | | | | | | L46; L36 |
| 2442 | NDFNLVAMK | L19 | RVIGHSMQN | L13; L11 | LEQYVFCTV | L45; L38; L42; |
| | | | | | | L37; L46 |
| 2443 | NDLCFTNV | L33 | RVIHFGAGSDK | L6; L7 | LFCLLNRYF | L62; L72; L9; L71; |
| | | | | | | L12 |
| 2444 | NDLCFTNVY | L29 | RVLQKAAITI | L16; L53 | LFDESGEFKL | L62; L68; L63; L5; |
| | | | | | | L8 |
| 2445 | NDPFLGVYY | L12 | RVVFVLWAH | L7; L6 | LFFSYFAVHF | L71; L9; L72; L12; |
| | | | | | | L8 |
| 2446 | NDSKEGFF | L33 | RVVFVLWAHGF | L16; L52 | LFVAAIFYL | L72; L62; L71; L9; |
| | | | | | | L8 |
| 2447 | NDSKEGFFTY | L29 | RVYANLGERVR | L21; L15 | LFVTVYSHL | L72; L8; L71; L62; |
| | | | | | | L9 |
| 2448 | NEFACVVADA | L46 | RYFRLTLGVY | L14; L12 | LHDELTGHM | L62; L63; L28; L1; |
| | | | | | | L5 |
| 2449 | NEFYAYLR | L29 | RYLALYNKYKY | L14; L12 | LHPDSATLV | L5; L28; L64; L57; |
| | | | | | | L34 |
| 2450 | NEKQEILGT | L42 | RYMSALNH | L71; L72 | LIDFYLCF | L68; L1; L62; L63; |
| | | | | | | L60 |
| 2451 | NEKTHVQLS | L29 | RYMSALNHT | L9; L8 | LIDSYFVVK | L7; L6; L5; L68; L1 |
| 2452 | NENGTITD | L29 | RYPANSIV | L71; L72 | LIIFWFSL | L23; L60; L61; |
| | | | | | | L59; L67 |
| 2453 | NESLIDLQ | L29 | RYPANSIVCR | L15; L21 | LIKVTLVF | L59; L43; L26; |
| | | | | | | L23; L58 |
| 2454 | NETLVTMP | L29 | RYPANSIVCRF | L8; L9 | LINIIIWF | L59; L26; L74; |
| | | | | | | L23; L43 |
| 2455 | NEVAKNLN | L29 | RYVLMDGSIIQF | L9; L8 | LIQPIGAL | L61; L59; L60; |
| | | | | | | L23; L74 |
| 2456 | NEYRLYLD | L29 | SAAKKNNLPF | L58; L43 | LLEDEFTPF | L5; L1; L26; L12 |
| | | | | | | L9 |
| 2457 | NFGDQELIR | L17 | SADAQSFLN | L68; L63 | LLFNKVTLA | L3; L2; L4; L6; L5 |
| 2458 | NFVRIIMR | L17 | SADAQSFLNR | L7; L19 | LLIIMRTF | L26; L55; L59; |
| | | | | | | L43; L23 |
| 2459 | NFYEPQIITT | L71 | SAINRPQI | L70; L47 | LLLLFVTV | L47; L23; L50; L4; |
| | | | | | | L2 |
| 2460 | NGDRWFLNR | L17 | SAINRPQIG | L69; L70 | LLMPILTLT | L2; L5; L3; L4; L6 |
| 2461 | NGGAYTRYV | L64 | SAINRPQIGV | L20; L58 | LLTDEMIAQY | L11; L14; L12; |
| | | | | | | L26; L18 |
| 2462 | NGLTGTGV | L25 | SALNHTKKWKY | L12; L14 | LLYDANYF | L59; L62; L26; |
| | | | | | | L74; L72 |
| 2463 | NGMNGRTIL | L25 | SAMVRMYIFF | L58; L43 | LNEEIAIIL | L32; L31; L63; |
| | | | | | | L68; L62 |
| 2464 | NGNKGAGGHSY | L14 | SAQTGIAV | L70; L23 | LPAPRTLLT | L22; L47; L31; |
| | | | | | | L51; L49 |
| 2465 | NGQVFGLY | L14 | SASAFFGMSR | L19; L17 | LPFFSNVTWF | L31; L49; L32; |
| | | | | | | L39; L47 |
| 2466 | NGSPSGVY | L14 | SASKIITLKK | L7; L19 | LPGCDGGSL | L39; L22; L32; |
| | | | | | | L56; L31 |
| 2467 | NGYLTSSS | L25 | SAVGNICYT | L69; L58 | LPKEITVA | L50; L51; L23; |
| | | | | | | L39; L47 |
| 2468 | NGYTVEEA | L25 | SAVKLQNNEL | L67; L32 | LPNNTASWF | L49; L31; L32; |
| | | | | | | L39; L22 |
| 2469 | NHNFLVQAG | L35 | SAVLQSGFRK | L7; L19 | LQAGNATEV | L24; L58; L28; L3; |
| | | | | | | L64 |
| 2470 | NHTKKWKY | L29 | SDFVRATAT | L33; L25 | LQAVGACVL | L44; L28; L61; |
| | | | | | | L35; L25 |
| 2471 | NICYTPSKL | L63 | SDIDYVPL | L43; L71 | LRVEAFEYY | L66; L30; L31; |
| | | | | | | L12; L65 |
| 2472 | NIFGTVYEKLK | L19 | SDNIALLV | L33; L48 | LSDDAVVC | L68; L63; L1; L62; |
| | | | | | | L18 |
| 2473 | NIGEQKSIL | L67 | SDRELHLSW | L49; L52 | LSLPVLQV | L73; L48; L47; |
| | | | | | | L70; L59 |
| 2474 | NIIIWFLL | L23 | SDVENPHLM | L29; L33 | LSSTASAL | L57; L61; L60; |
| | | | | | | L59; L55 |
| 2475 | NIIRGWIF | L29 | SDYDYYRYN | L65; L43 | LSVVNARLR | L55; L19; L15; |
| | | | | | | L52; L17 |
| 2476 | NIKFADDL | L23 | SEAARVVR | L29; L42 | LSYGIATVR | L19; L15; L17; |
| | | | | | | L21; L69 |
| 2477 | NIKPVPEVK | L13 | SEAARVVRSIF | L41; L40 | LTAVVIPTK | L7; L13; L6; L52; |
| | | | | | | L19 |
| 2478 | NINLHTQVV | L73 | SEDAQGMDNL | L36; L37 | LTLGVYDYL | L67; L60; L53; |
| | | | | | | L61; L73 |
| 2479 | NITRFQTLL | L74 | SEDKRAKVTSA | L38; L42 | LVFLGIITTV | L3; L20; L50; L51; |
| | | | | | | L47 |
| 2480 | NIVNVSLV | L48 | SEDNQTTT | L45; L37 | LVQSTQWSL | L32; L39; L60; |
| | | | | | | L56; L4 |
| 2481 | NKDGIIWVA | L35 | SEETGTLIVN | L36; L42 | LVYALRHF | L59; L55; L47; |
| | | | | | | L52; L58 |
| 2482 | NKFALTCF | L27 | SEEVVENP | L42; L38 | LVYDNKLKA | L50; L46; L51; |
| | | | | | | L24; L3 |
| 2483 | NKGEDIQL | L66 | SEFSSLPSYAA | L46; L42 | LYCIDGALL | L9; L62; L8; L72; |
| | | | | | | L71 |
| 2484 | NKHADFDTW | L49 | SEFSSLPSYAAF | L41; L40 | LYLGGMSY | L71; L72; L66; |
| | | | | | | L12; L14 |
| 2485 | NKHIDAYKTF | L27 | SEGLNDNLLEI | L41; L45 | LYLGGMSYY | L71; L72; L12; |
| | | | | | | L14; L8 |
| 2486 | NKKDWYDF | L66 | SEMVMCGGSLY | L40; L41 | LYLYALVY | L72; L71; L65; |
| | | | | | | L12; L66 |
| 2487 | NKKFLPFQQF | L27 | SEQLRKQIRSA | L42; L38 | LYQPPQTSI | L9; L8; L72; L71; |
| | | | | | | L28 |
| 2488 | NKWGKARLYY | L27 | SEVGPEHSLAEY | L41; L40 | LYVNKHAF | L72; L71; L9; L8; |
| | | | | | | L66 |
| 2489 | NKYKYFSGA | L46 | SEVVLKKLK | L41; L40 | MACLVGLMW | L49; L31; L54; |
| | | | | | | L50; L52 |
| 2490 | NLAWPLIV | L3 | SEYKGPITDVF | L29; L41 | MADLVYALR | L19; L68; L17; |
| | | | | | | L63; L1 |
| 2491 | NLAWPLIVTAL | L4 | SFCTQLNR | L17; L15 | MCQPILLL | L74; L28; L73; |
| | | | | | | L25; L61 |
| 2492 | NLDKSAGFP | L1 | SFCTQLNRAL | L71; L72 | MELPTGVHA | L46; L42; L38; |
| | | | | | | L50; L40 |
| 2493 | NLDSCKRV | L63 | SFGGASCCLY | L14; L12 | MELTPVVQT | L42; L29; L38; |
| | | | | | | L46; L33 |
| 2494 | NLDSCKRVLNV | L5 | SFLAHIQW | L71; L72 | MESEFRVY | L29; L40; L46; |
| | | | | | | L45; L41 |
| 2495 | NLDYIINLII | L68 | SFLGRYMSAL | L71; L72 | MFTPLVPF | L72; L62; L71; L9; |
| | | | | | | L59 |
| 2496 | NLHPDSATLV | L2 | SFLNGFAV | L71; L72 | MFTPLVPFW | L9; L49; L54; L52; |
| | | | | | | L8 |
| 2497 | NLIDSYFV | L2 | SFLNGSCG | L72; L71 | MLAKALRKV | L3; L2; L4; L24; |
| | | | | | | L64 |
| 2498 | NLKYAISA | L23 | SFLNRVCGV | L71; L72 | MLNPNYEDL | L5; L4; L3; L74; L2 |
| 2499 | NLKYAISAK | L6 | SFLPGVYS | L71; L72 | MMSAPPAQY | L14; L12; L26; |
| | | | | | | L31; L16 |
| 2500 | NLLLDKRTT | L23 | SFLPGVYSVI | L8; L9 | MPASWVMRI | L47; L49; L32; |
| | | | | | | L50; L20 |
| 2501 | NLPFKLTC | L57 | SFPQSAPH | L71; L72 | MPILTLTRAL | L32; L22; L31; |
| | | | | | | L50; L39 |
| 2502 | NLPGCDGGSL | L57 | SFSTFEEAAL | L72; L71 | MPLKAPKEI | L47; L50; L39; |
| | | | | | | L32; L49 |
| 2503 | NLPLQLGF | L57 | SFSTFKCY | L72; L71 | MPLSAPTLV | L47; L50; L51; |
| | | | | | | L22; L31 |
| 2504 | NLPTMCDI | L57 | SFVIRGDEV | L72; L71 | MSKFPLKL | L70; L73; L55; |
| | | | | | | L74; L69 |
| 2505 | NLPTMCDIRQL | L57 | SFYVYANGG | L72; L71 | MVELVAEL | L68; L62; L63; |
| | | | | | | L67; L59 |
| 2506 | NLREFVFK | L13 | SGDATTAY | L1; L18 | MVPHISRQR | L19; L17; L15; |
| | | | | | | L11; L21 |
| 2507 | NLREFVFKNI | L3 | SGDGTTSPI | L68; L63 | MVVIPDYNTY | L10; L11; L26; |
| | | | | | | L12; L14 |
| 2508 | NLREMLAH | L43 | SGLKTILR | L15; L17 | MWALIISV | L50; L25; L47; |
| | | | | | | L28; L33 |
| 2509 | NLSKSLTEN | L3 | SGLKTILRK | L7; L6 | MYIFFASFY | L72; L12; L71; |
| | | | | | | L14; L66 |
| 2510 | NLVAMKYNY | L12 | SGTNGTKRF | L49; L27 | NCVADYSVL | L35; L25; L28; |
| | | | | | | L10; L67 |
| 2511 | NMFITREE | L48 | SGVPVVDSYY | L14; L12 | NCYDYCIPY | L43; L69; L6; L72; |
| | | | | | | L71 |
| 2512 | NMFTPLIQP | L46 | SGYLKLTD | L48; L65 | NEEIAIIL | L29; L25; L37; |
| | | | | | | L36; L45 |
| 2513 | NMLRIMASL | L8 | SHAAVDALC | L34; L28 | NEKCSAYTV | L37; L45; L42; |
| | | | | | | L38; L29 |
| 2514 | NNATNKATY | L12 | SHFAIGLALYY | L12; L41 | NELSPVALR | L17; L40; L41; |
| | | | | | | L19; L15 |
| 2515 | NNATNVVIK | L19 | SHNIALIW | L35; L28 | NESGLKTI | L45; L48; L29; |
| | | | | | | L37; L25 |
| 2516 | NNLDSKVGGNY | L14 | SHQSDIEV | L28; L35 | NESLIDLQEL | L40; L41; L36; |
| | | | | | | L29; L37 |
| 2517 | NPDILRVYA | L50 | SHSQLGGL | L28; L35 | NFNQHEVL | L71; L25; L72; |
| | | | | | | L62; L23 |
| 2518 | NPIQLSSY | L31 | SHSQLGGLH | L28; L34 | NFNVLFSTVF | L62; L9; L72; L71; |
| | | | | | | L8 |
| 2519 | NPKAIKCVPQA | L51 | SHTVMPLSA | L28; L35 | NFTIKGSFL | L72; L71; L8; L62; |
| | | | | | | L9 |
| 2520 | NPKTPKYKFV | L39 | SIAIPTNF | L74; L26 | NGGDAALAL | L67; L61; L35; |
| | | | | | | L66; L57 |
| 2521 | NPLLYDANY | L31 | SIDAFKLNIK | L7; L6 | NIDGYFKIY | L18; L1; L14; L58; |
| | | | | | | L29 |
| 2522 | NPLLYDANYF | L31 | SIVAGGIVAI | L10; L20 | NIFGTVYEK | L7; L19; L6; L17; |
| | | | | | | L13 |
| 2523 | NPTDQSSY | L31 | SKEGFFTY | L27; L66 | NIIPLTTAA | L28; L3; L11; L50; |
| | | | | | | L46 |
| 2524 | NPVLPFNDGVY | L31 | SKHTPINLV | L28; L64 | NPANNAAIV | L47; L22; L50; |
| | | | | | | L39; L51 |
| 2525 | NPVLPFNDGVYF | L31 | SKIITLKKRW | L41; L40 | NPANNAAIVL | L56; L39; L31; |
| | | | | | | L22; L32 |
| 2526 | NPVMEPIY | L31 | SKSLTENKY | L27; L14 | NPAWRKAV | L39; L25; L23; |
| | | | | | | L22; L51 |
| 2527 | NPVMEPIYD | L49 | SKTPEEHFI | L44; L34 | NPIQLSSYSL | L56; L22; L32; |
| | | | | | | L39; L31 |
| 2528 | NQFNSAIGKI | L24 | SKTTVASL | L44; L66 | NPKTPKYKF | L39; L49; L23; |
| | | | | | | L31; L22 |
| 2529 | NQNAQALNTL | L34 | SKVGGNYNY | L27; L14 | NQDLNGNWY | L1; L26; L27; L18; |
| | | | | | | L68 |
| 2530 | NQRNAPRI | L48 | SKVQIGEY | L27; L66 | NRALTGIAV | L35; L25; L30; |
| | | | | | | L28; L64 |
| 2531 | NRARTVAG | L35 | SLAATVRLQ | L3; L64 | NSSPDDQIGY | L1; L18; L52; L54; |
| | | | | | | L14 |
| 2532 | NRATLQAIA | L35 | SLAEYHNES | L2; L3 | NSSRVPDLL | L74; L67; L53; |
| | | | | | | L73; L20 |
| 2533 | NRATRVEC | L25 | SLAGSYKDWSY | L14; L18 | NTQEVFAQV | L20; L13; L73; L5; |
| | | | | | | L11 |
| 2534 | NRATRVECT | L25 | SLAIDAYPL | L2; L4 | NVVRIKIVQM | L19; L11; L20; |
| | | | | | | L32; L10 |
| 2535 | NRFLYIIK | L25 | SLAIDAYPLTK | L6; L7 | NYMPYFFTLL | L9; L8; L71; L66; |
| | | | | | | L27 |
| 2536 | NRFLYIIKLIF | L30 | SLDTYPSLETI | L68; L5 | NYQHEETIY | L72; L66; L71; |
| | | | | | | L14; L12 |
| 2537 | NRFNVAITRA | L30 | SLFDMSKFPL | L2; L4 | PEVKILNNL | L37; L36; L29; |
| | | | | | | L41; L45 |
| 2538 | NRFTTTLND | L65 | SLIDFYLCFLAF | L12; L10 | PFNDGVYF | L62; L72; L9; L71; |
| | | | | | | L8 |
| 2539 | NRNRFLYI | L35 | SLKEGQIND | L13; L43 | PLVPFWITI | L3; L2; L5; L4; L69 |
| 2540 | NRNRFLYIIK | L30 | SLKEGQINDM | L11; L3 | PQLEQPYVF | L8; L9; L16; L27; |
| | | | | | | L26 |
| 2541 | NRNRFLYIIKL | L30 | SLKELLQN | L3; L43 | PVVDSYYSL | L10; L67; L20; |
| | | | | | | L60; L61 |
| 2542 | NRNYVFTG | L65 | SLKITEEV | L23; L3 | QAIASEFSSL | L61; L67; L60; |
| | | | | | | L10; L32 |
| 2543 | NRPQIGVVREF | L66 | SLLSKGRLIIR | L21; L15 | QAISMWAL | L67; L61; L59; |
| | | | | | | L70; L60 |
| 2544 | NRQFHQKLLK | L30 | SLLVLVQST | L4; L2 | QASLPFGWL | L67; L61; L60; |
| | | | | | | L59; L74 |
| 2545 | NRVCGVSAAR | L30 | SLPINVIV | L57; L5 | QELGKYEQY | L29; L41; L40; |
| | | | | | | L42; L36 |
| 2546 | NRVCTNYMPY | L66 | SLPSYAAFA | L5; L57 | QEYADVFHLY | L41; L40; L14; |
| | | | | | | L29; L42 |
| 2547 | NRVVISSD | L25 | SLRCGACIR | L21; L15 | QLFFSYFAV | L4; L24; L3; L2; L5 |
| 2548 | NRVVISSDVL | L35 | SLREVRTIKVF | L10; L43 | QLLFVVEVV | L4; L2; L24; L3; L5 |
| 2549 | NRYFRLTLGVY | L30 | SLRPDTRYVL | L16; L13 | QLMCQPILL | L74; L4; L2; L5; L3 |
| 2550 | NRYLALYN | L25 | SLSEQLRK | L6; L7 | QLPAPRTL | L57; L64; L55; L5; |
| | | | | | | L66 |
| 2551 | NRYLALYNKY | L30 | SLSHRFYR | L21; L15 | QLYLGGMSYY | L18; L1; L6; L14; |
| | | | | | | L26 |
| 2552 | NSEVGPEHSL | L68 | SLTIKKPNEL | L3; L4 | QMEIDFLEL | L1; L67; L34; L68; |
| | | | | | | L18 |
| 2553 | NSHEGKTFYVL | L67 | SLVKPSFY | L26; L14 | QPYPNASF | L22; L39; L47; |
| | | | | | | L31; L56 |
| 2554 | NSIAIPTN | L48 | SLWVYKQF | L43; L26 | QQFGPTYL | L48; L28; L74; |
| | | | | | | L69; L25 |
| 2555 | NSIIKTIQPR | L19 | SLYVKPGGT | L43; L3 | QSLENVAF | L54; L52; L55; |
| | | | | | | L53; L33 |
| 2556 | NSIVCRFDTR | L19 | SNYQHEETI | L34; L28 | QTMLFTMLR | L21; L15; L17; L7; |
| | | | | | | L19 |
| 2557 | NSNNLDSKV | L73 | SPDAVTAYN | L49; L22 | QVDVVNFNL | L68; L5; L63; L1; |
| | | | | | | L26 |
| 2558 | NSPFHPLAD | L57 | SPDVDLGDI | L49; L22 | QVVNVVTTK | L19; L7; L6; L13; |
| | | | | | | L20 |
| 2559 | NSQGLLPPK | L7 | SPFHPLADNKF | L31; L49 | RANNTKGSL | L56; L44; L57; |
| | | | | | | L58; L61 |
| 2560 | NSVLLFLAFV | L20 | SPFVMMSAP | L51; L22 | RARSVSPKLF | L52; L53; L55; |
| | | | | | | L58; L27 |
| 2561 | NSVRVLQK | L19 | SPIFLIVAAI | L22; L50 | RCLAVHECF | L54; L8; L33; L53; |
| | | | | | | L52 |
| 2562 | NSVTSSIV | L70 | SPIFLIVAAIVF | L31; L41 | RDGWEIVKF | L33; L65; L53; |
| | | | | | | L37; L54 |
| 2563 | NSVTSSIVI | L70 | SPKLFIRQ | L39; L51 | REAVGTNL | L33; L37; L36; |
| | | | | | | L45; L56 |
| 2564 | NSWLMWLII | L67 | SPKLFIRQE | L39; L51 | REEAIRHVR | L38; L42; L36; |
| | | | | | | L37; L40 |
| 2565 | NTCTERLKLF | L10 | SPLYAFASE | L51; L50 | REETGLLM | L45; L33; L36; |
| | | | | | | L37; L18 |
| 2566 | NTDHSSSS | L1 | SPLYAFASEA | L51; L50 | REFLTRNPAW | L40; L41; L36; |
| | | | | | | L38; L37 |
| 2567 | NTKGSLPINV | L20 | SPNFSKLI | L39; L47 | REFVFKNI | L45; L48; L33; |
| | | | | | | L37; L29 |
| 2568 | NTLNDLNETL | L53 | SPNFSKLINI | L56; L39 | RELKVTFF | L33; L29; L37; |
| | | | | | | L27; L36 |
| 2569 | NTSNQVAV | L20 | SPNLAWPLIVTA | L50; L51 | RENNRVVIS | L33; L38; L42; |
| | | | | | | L37; L46 |
| 2570 | NTSRYWEPEF | L53 | SPRRARSVA | L51; L22 | REVGFVVPG | L38; L46; L37; |
| | | | | | | L36; L42 |
| 2571 | NTSRYWEPEFY | L1 | SPYNSQNAVA | L51; L50 | REVGFVVPGL | L36; L37; L41; |
| | | | | | | L40; L45 |
| 2572 | NTTKGGRF | L54 | SQASSRSSSR | L21; L15 | RFNGIGVTQ | L8; L15; L71; L56; |
| | | | | | | L72 |
| 2573 | NTTKGGRFV | L20 | SQLDEEQPM | L24; L44 | RFNVAITR | L15; L71; L21; |
| | | | | | | L17; L72 |
| 2574 | NTTKGGRFVL | L16 | SQRGGSYTN | L26; L27 | RFRRAFGEY | L14; L13; L27; |
| | | | | | | L72; L12 |
| 2575 | NTVCTVCGM | L11 | SQRVAGDSGF | L26; L27 | RFTTTLNDF | L8; L9; L72; L71; |
| | | | | | | L62 |
| 2576 | NTVKSVGK | L19 | SREETGLL | L66; L35 | RGDEVRQI | L55; L48; L63; |
| | | | | | | L33; L45 |
| 2577 | NTYLEGSVRV | L20 | SRGTSPARM | L66; L30 | RHHANEYRL | L44; L34; L35; |
| | | | | | | L28; L56 |
| 2578 | NVAFELWAKR | L19 | SRILGAGCF | L30; L34 | RIDKVLNEK | L6; L7; L18; L13; |
| | | | | | | L5 |
| 2579 | NVAFQTVK | L19 | SRLDKVEAE | L30; L35 | RIFTIGTVT | L44; L13; L6; L21; |
| | | | | | | L16 |
| 2580 | NVAFQTVKP | L19 | SRYRIGNY | L65; L66 | RKAVFISPY | L27; L26; L43; |
| | | | | | | L18; L6 |
| 2581 | NVAITRAKV | L20 | SRYRIGNYK | L30; L6 | RLKLFDRYF | L26; L55; L27; |
| | | | | | | L14; L52 |
| 2582 | NVAKYTQLCQY | L11 | SSFLEMKSEK | L7; L13 | RQFHQKLLK | L6; L24; L13; L7; |
| | | | | | | L30 |
| 2583 | NVATLQAENV | L20 | SSKCVCSV | L70; L48 | RQIAPGQTGK | L6; L7; L30; L13; |
| | | | | | | L21 |
| 2584 | NVDRYPANSI | L68 | SSKLWAQCV | L13; L70 | RSFIEDLL | L55; L53; L54; |
| | | | | | | L65; L73 |
| 2585 | NVGDYFVLT | L20 | SSRVPDLLV | L73; L13 | RSLPGVFCG | L54; L52; L55; |
| | | | | | | L16; L53 |
| 2586 | NVIPTITQMNL | L20 | SSSSDNIALL | L53; L20 | RSVSPKLF | L55; L54; L52; |
| | | | | | | L53; L73 |
| 2587 | NVIVFDGKSK | L19 | SSTASALGK | L7; L19 | RTAPHGHVMV | L73; L18; L20; |
| | | | | | | L53; L13 |
| 2588 | NVKTTEVV | L23 | SSYIVDSV | L48; L47 | RTFKVSIW | L54; L16; L52; |
| | | | | | | L53; L55 |
| 2589 | NVLAWLYAA | L50 | SSYIVDSVTV | L48; L73 | RTFKVSIWN | L53; L13; L54; |
| | | | | | | L55; L7 |
| 2590 | NVLEGSVA | L25 | SSYIVDSVTVK | L7; L6 | RTIKGTHHWL | L53; L16; L55; |
| | | | | | | L54; L73 |
| 2591 | NVLSTFISAAR | L17 | STDGNKIAD | L68; L1 | RTLSYYKL | L55; L54; L53; |
| | | | | | | L73; L16 |
| 2592 | NVLTLVYKVYY | L12 | STDVVYRAFDIY | L1; L18 | RTRSMWSF | L55; L53; L16; |
| | | | | | | L54; L52 |
| 2593 | NVPLHGTILTR | L19 | STECSNLL | L1; L63 | RVAGDSGFAAY | L14; L18; L16; L6; |
| | | | | | | L26 |
| 2594 | NVTDFNAI | L20 | STECSNLLLQY | L1; L18 | RVCGVSAAR | L21; L15; L7; L19; |
| | | | | | | L6 |
| 2595 | NVTDFNAIA | L20 | STGVNLVAV | L73; L20 | RVCTNYMPY | L18; L6; L14; L13; |
| | | | | | | L16 |
| 2596 | NVTWFHAIHV | L20 | STIGVCSM | L70; L58 | RVFSAVGNI | L16; L24; L3; L6; |
| | | | | | | L10 |
| 2597 | NVVNKGHFD | L11 | STKPVETSN | L43; L53 | RVYSSANNC | L16; L6; L21; L15; |
| | | | | | | L14 |
| 2598 | NVVRIKIVQ | L20 | STLEQYVFC | L7; L13 | RYPANSIVC | L72; L71; L8; L9; |
| | | | | | | L66 |
| 2599 | NVYIKNADI | L25 | STLQGPPGTGK | L6; L7 | SAFAMMFV | L47; L70; L69; |
| | | | | | | L58; L73 |
| 2600 | NVYLKHGGGV | L11 | STMTNRQFHQK | L7; L6 | SALVYDNKL | L32; L74; L61; |
| | | | | | | L67; L60 |
| 2601 | NWITGGIAIAM | L71 | STNLVKNK | L13; L7 | SAPLIELCV | L64; L57; L69; |
| | | | | | | L47; L70 |
| 2602 | NWNCVNCDTF | L8 | STPCNGVEGF | L11; L10 | SAQCFKMFY | L58; L14; L59; |
| | | | | | | L69; L12 |
| 2603 | NYDLSVVN | L62 | STQDLFLPFF | L52; L12 | SEAGVCVST | L42; L38; L36; |
| | | | | | | L37; L41 |
| 2604 | NYDLSVVNA | L62 | STSHKLVL | L73; L70 | SEDKRAKVT | L45; L38; L42; |
| | | | | | | L37; L40 |
| 2605 | NYDLSVVNAR | L17 | STSHKLVLSV | L20; L73 | SEDMLNPNY | L41; L29; L40; |
| | | | | | | L36; L1 |
| 2606 | NYDLSVVNARL | L62 | STYASQGL | L60; L25 | SEEVVENPTI | L36; L41; L38; |
| | | | | | | L45; L42 |
| 2607 | NYEDLLIR | L17 | SVAYSNNSI | L20; L10 | SEFDRDAA | L46; L42; L37; |
| | | | | | | L29; L38 |
| 2608 | NYITTYPG | L71 | SVDCTMYI | L68; L63 | SEGLNDNLL | L36; L40; L41; |
| | | | | | | L37; L45 |
| 2609 | NYLYRLFR | L17 | SVELKHFF | L63; L68 | SEHDYQIGGY | L40; L41; L14; |
| | | | | | | L11; L29 |
| 2610 | NYMLTYNKV | L62 | SVELKHFFF | L12; L63 | SEISMDNSP | L42; L38; L46; |
| | | | | | | L37; L36 |
| 2611 | NYQCGHYKH | L8 | SVLHSTQDL | L60; L56 | SEQLRKQI | L45; L48; L33; |
| | | | | | | L29; L37 |
| 2612 | NYQVNGYPNM | L71 | SVLHSTQDLF | L12; L52 | SEQLRKQIR | L42; L38; L40; |
| | | | | | | L33; L29 |
| 2613 | NYVFTGYR | L17 | SVLQQLRV | L48; L24 | SEYDYVIFTQ | L42; L37; L40; |
| | | | | | | L41; L38 |
| 2614 | NYVFTGYRV | L8 | SVNITFELD | L65; L49 | SFNPETNILL | L62; L8; L9; L71; |
| | | | | | | L72 |
| 2615 | NYYKKVDGV | L71 | SVNPYVCNA | L65; L3 | SGFAAYSRY | L14; L27; L12; |
| | | | | | | L10; L26 |
| 2616 | PANSIVCR | L17 | SVRVLQKAA | L51; L13 | SHKLVLSV | L48; L28; L23; |
| | | | | | | L35; L51 |
| 2617 | PAQLPAPRTL | L60 | SVYAWNRK | L7; L6 | SHLLLVAA | L50; L35; L25; |
| | | | | | | L28; L51 |
| 2618 | PARARVECF | L58 | SVYPVASP | L51; L43 | SHVDTDLTK | L34; L7; L28; L35; |
| | | | | | | L19 |
| 2619 | PAVAKHDFF | L58 | SVYPVASPN | L6; L43 | SICSTMTNR | L21; L15; L19; |
| | | | | | | L17; L7 |
| 2620 | PCIKVATV | L48 | SVYYSQLMC | L6; L7 | SIDAFKLNI | L5; L68; L63; L34; |
| | | | | | | L24 |
| 2621 | PCSDKAYKI | L8 | SWEVGKPRP | L42; L38 | SIKNFKSV | L23; L39; L13; |
| | | | | | | L43; L48 |
| 2622 | PDGVKHVY | L65 | SWFTALTQH | L7; L6 | SIVAGGIVA | L51; L46; L38; |
| | | | | | | L28; L42 |
| 2623 | PDILRVYAN | L33 | SWFTALTQHGK | L7; L6 | SLFFFLYEN | L4; L3; L2; L24; |
| | | | | | | L12 |
| 2624 | PEEEQEEDWL | L36 | SWLMWLIINL | L4; L8 | SLIDFYLCFL | L4; L2; L3; L5; L20 |
| 2625 | PEEHVQIHTI | L45 | SWMESEFRV | L4; L2 | SLREVRTI | L48; L3; L55; L23; |
| | | | | | | L24 |
| 2626 | PEFYEAMY | L29 | SWNLREML | L62; L71 | SLTENKYSQL | L3; L10; L2; L4; L5 |
| 2627 | PEHSLAEY | L29 | SYAAFATAQ | L71; L72 | SLVPGFNEK | L7; L6; L13; L19; |
| | | | | | | L21 |
| 2628 | PEYFNSVCRL | L37 | SYEDQDALFAY | L12; L14 | SPDDQIGY | L49; L1; L18; L31; |
| | | | | | | L65 |
| 2629 | PFAMQMAYR | L17 | SYFTEQPI | L71; L72 | SPFELEDFI | L47; L49; L34; |
| | | | | | | L31; L32 |
| 2630 | PFAMQMAYRF | L9 | SYFTSDYYQLY | L14; L12 | SPNLAWPLIV | L22; L50; L51; |
| | | | | | | L47; L39 |
| 2631 | PFDVVRQC | L62 | SYGIATVR | L15; L17 | SQLGGLHL | L48; L25; L35; |
| | | | | | | L27; L24 |
| 2632 | PFELEDFI | L62 | SYIVDSVT | L71; L72 | SQYSLRLI | L48; L24; L64; |
| | | | | | | L25; L47 |
| 2633 | PFFSNVTW | L71 | SYIVDSVTVK | L13; L7 | SREETGLLM | L34; L35; L30; |
| | | | | | | L66; L65 |
| 2634 | PFLGVYYHK | L8 | SYLFQHAN | L71; L72 | SRLSFKEL | L25; L66; L35; |
| | | | | | | L30; L64 |
| 2635 | PFLNKVVST | L71 | SYQTQTNSP | L71; L72 | SSANNCTF | L54; L53; L43; |
| | | | | | | L58; L70 |
| 2636 | PFLYLYALVY | L12 | SYSLFDMSKF | L9; L8 | SSANNCTFEY | L18; L1; L43; L58; |
| | | | | | | L14 |
| 2637 | PFMIDVQQWGF | L8 | SYTNDKACPL | L72; L71 | SSKTPEEHF | L43; L58; L52; |
| | | | | | | L53; L26 |
| 2638 | PFNKWGKARL | L8 | SYTTTIKPV | L72; L71 | SSQCVNLTTR | L19; L15; L21; |
| | | | | | | L17; L7 |
| 2639 | PFNKWGKARLY | L14 | SYYKLGASQ | L72; L71 | SSRSSSRSR | L15; L21; L17; |
| | | | | | | L13; L19 |
| 2640 | PFWITIAYI | L62 | TAESHVDTD | L49; L32 | STCMMCYKR | L17; L7; L15; L21; |
| | | | | | | L19 |
| 2641 | PGQTGKIADY | L14 | TAESHVDTDL | L32; L63 | STDTCFANK | L13; L7; L19; L1; |
| | | | | | | L6 |
| 2642 | PGSGVPVVD | L65 | TAHSCNVNRF | L49; L58 | STDTGVEH | L63; L68; L1; L62; |
| | | | | | | L18 |
| 2643 | PHNSHEGKTF | L34 | TAPHGHVMVEL | L57; L67 | STDTGVEHVTF | L53; L68; L63; |
| | | | | | | L54; L52 |
| 2644 | PHVGEIPVA | L28 | TAVVIPTKK | L19; L7 | STEKSNIIR | L17; L19; L21; |
| | | | | | | L15; L7 |
| 2645 | PIDKCSRI | L63 | TCYFGLFCL | L34; L35 | STFISDEVAR | L7; L19; L15; L17; |
| | | | | | | L21 |
| 2646 | PIDLVPNQPY | L1 | TDDNALAY | L1; L18 | STFNVPMEKL | L20; L53; L11; |
| | | | | | | L10; L16 |
| 2647 | PIFLIVAA | L50 | TDFSRVSAK | L33; L6 | STGSNVFQTR | L19; L21; L15; L7; |
| | | | | | | L17 |
| 2648 | PIHFYSKWY | L43 | TDGTLMIER | L19; L17 | STQLGIEFL | L20; L53; L60; |
| | | | | | | L73; L68 |
| 2649 | PIIGDELKI | L24 | TDLTKGPHEF | L33; L8 | STQWSLFFFLY | L14; L12; L1; L18; |
| | | | | | | L7 |
| 2650 | PILLLDQAL | L67 | TDVTQLYL | L65; L33 | SVAALTNNV | L20; L3; L64; L58; |
| | | | | | | L4 |
| 2651 | PILTLTRAL | L60 | TDVVYRAF | L33; L29 | SVAIKITEH | L11; L43; L6; L7; |
| | | | | | | L10 |
| 2652 | PIQYIDIGNY | L14 | TDYKHWPQI | L33; L47 | SVIDLLLDDF | L11; L10; L12; |
| | | | | | | L52; L14 |
| 2653 | PISAMVRMY | L14 | TEAFEKMVS | L46; L38 | SVLLFLAFV | L4; L20; L73; L2; |
| | | | | | | L5 |
| 2654 | PKGPKVKYL | L64 | TECSNLLLQY | L41; L40 | SVLNDILSRL | L4; L10; L11; L6; |
| | | | | | | L14 |
| 2655 | PKLGSLVVR | L17 | TEERLKLFD | L45; L42 | SVNITFEL | L23; L68; L59; |
| | | | | | | L56; L65 |
| 2656 | PKSDGTGTIY | L27 | TEGALNTP | L38; L46 | SYLFQHANL | L72; L9; L8; L71; |
| | | | | | | L62 |
| 2657 | PLIVTALR | L21 | TEGLCVDIP | L38; L42 | TAAKLMVV | L70; L47; L69; |
| | | | | | | L23; L58 |
| 2658 | PLKLRGTAV | L23 | TEIDPKLD | L45; L29 | TCANDPVGF | L34; L9; L31; L26; |
| | | | | | | L28 |
| 2659 | PLKSATCITR | L21 | TEIDPKLDNYY | L41; L40 | TCFSVAAL | L35; L28; L71; |
| | | | | | | L72; L56 |
| 2660 | PLLESELV | L2 | TERSEKSYEL | L36; L37 | TCTERLKLF | L40; L9; L8; L10; |
| | | | | | | L41 |
| 2661 | PLLYDANYF | L9 | TESIVRFP | L33; L38 | TEDDYQGKPL | L36; L41; L45; |
| | | | | | | L40; L37 |
| 2662 | PLSETKCTL | L2 | TESIVRFPNI | L45; L41 | TEERLKLF | L29; L33; L37; |
| | | | | | | L41; L40 |
| 2663 | PLYAFASEA | L3 | TESNKKFLPF | L41; L40 | TEHSWNADL | L37; L36; L41; |
| | | | | | | L40; L45 |
| 2664 | PMEKLKTL | L23 | TETDLTKGPHEF | L41; L40 | TEIDPKLDNY | L41; L40; L29; |
| | | | | | | L14; L36 |
| 2665 | PNFKDQVIL | L44 | TEVNEFACVVA | L46; L38 | TEILPVSMT | L36; L38; L41; |
| | | | | | | L45; L46 |
| 2666 | PNLAWPLIV | L73 | TEVPANST | L29; L45 | TEKSNIIRGW | L40; L41; L10; |
| | | | | | | L45; L37 |
| 2667 | PNYEDLLIR | L17 | TEVPANSTVLSF | L41; L40 | TENKYSQLD | L40; L65; L38; |
| | | | | | | L45; L46 |
| 2668 | PPGDQFKHL | L39 | TEVPVAIHADQL | L36; L41 | TEQPIDLV | L33; L45; L29; |
| | | | | | | L48; L38 |
| 2669 | PPKNSIDA | L51 | TEVVGDII | L45; L36 | TEQPIDLVP | L38; L42; L46; |
| | | | | | | L40; L41 |
| 2670 | PPLNRNYV | L47 | TFCAGSTFI | L8; L62 | TETAHSCNV | L45; L38; L46; |
| | | | | | | L33; L37 |
| 2671 | PPLNRNYVF | L8 | TFLLNKEM | L72; L71 | TEVNEFACV | L45; L37; L46; |
| | | | | | | L38; L36 |
| 2672 | PQADVEWKFY | L14 | TFPPTEPK | L71; L72 | TFDNLKTL | L62; L68; L71; |
| | | | | | | L72; L63 |
| 2673 | PQIITTDNTF | L26 | TFPPTEPKK | L8; L9 | TFHLDGEVI | L8; L72; L34; L9; |
| | | | | | | L71 |
| 2674 | PQLEQPYV | L48 | TFQSAVKR | L17; L15 | TFKVSIWNL | L72; L8; L62; L9; |
| | | | | | | L17 |
| 2675 | PQNQRNAPR | L21 | TFSVLACY | L72; L71 | TFNGECPNF | L9; L8; L62; L71; |
| | | | | | | L72 |
| 2676 | PQTLEILDI | L24 | TFTCASEY | L72; L71 | TFNVPMEKL | L62; L8; L72; L9; |
| | | | | | | L71 |
| 2677 | PQTSITSAV | L24 | TFTRLQSL | L71; L72 | TFYLTNDVSF | L62; L9; L72; L71; |
| | | | | | | L8 |
| 2678 | PQTSITSAVL | L44 | TFTRSTNSR | L17; L19 | TGPEAGLPY | L57; L72; L66; |
| | | | | | | L12; L71 |
| 2679 | PQVNGLTSI | L24 | TFVTHSKGLY | L14; L12 | THHWLLLTI | L34; L35; L28; |
| | | | | | | L24; L47 |
| 2680 | PREGVFVS | L65 | TGTIYTEL | L23; L25 | TIAEILLI | L24; L48; L47; L3; |
| | | | | | | L73 |
| 2681 | PRPPLNRNYV | L64 | TGTLIVNSV | L48; L64 | TICAPLTVF | L26; L10; L58; |
| | | | | | | L59; L39 |
| 2682 | PRVEKKKL | L25 | TGTSTDVVY | L14; L27 | TKFLTENLL | L44; L34; L64; |
| | | | | | | L27; L28 |
| 2683 | PSDSTGSNQ | L1 | TGTSTDVVYR | L19; L17 | TLAILTALR | L21; L19; L17; |
| | | | | | | L15; L6 |
| 2684 | PSFKKGAKL | L53 | TGVNLVAV | L48; L23 | TLDSKTQSLL | L63; L1; L5; L2; |
| | | | | | | L68 |
| 2685 | PSFLGRYM | L55 | THGLAAVNSV | L28; L35 | TLKNTVCTV | L3; L2; L4; L24; |
| | | | | | | L23 |
| 2686 | PSFYVYSRVK | L13 | THSDKFTD | L35; L65 | TLLLQLCTF | L26; L9; L16; L27; |
| | | | | | | L12 |
| 2687 | PSLATVAYF | L52 | THSKGLYRK | L34; L35 | TLLSLREV | L4; L23; L2; L3; |
| | | | | | | L48 |
| 2688 | PSLETIQI | L48 | THVQLSLPV | L28; L35 | TLMNVLTLVY | L12; L6; L14; L18; |
| | | | | | | L26 |
| 2689 | PSVEQRKQ | L55 | THWFVTQR | L17; L19 | TLNDLNETLV | L2; L4; L3; L5; L24 |
| 2690 | PSYAAFATA | L46 | TICAPLTV | L48; L73 | TLQQIELKF | L12; L26; L16; L9; |
| | | | | | | L8 |
| 2691 | PTDQSSYI | L1 | TIDGSSGV | L63; L68 | TLRVEAFEY | L26; L43; L12; |
| | | | | | | L14; L1 |
| 2692 | PTITQMNLK | L7 | TIDYTEISFM | L63; L62 | TNYDLSVV | L48; L25; L47; |
| | | | | | | L73; L69 |
| 2693 | PTNGVGYQPY | L14 | TIEVNSFSGY | L1; L18 | TPSDFVRAT | L32; L51; L31; |
| | | | | | | L39; L49 |
| 2694 | PVLKGVKLHY | L12 | TIKVFTTV | L23; L48 | TPVCINGLML | L32; L56; L22; |
| | | | | | | L31; L39 |
| 2695 | PVLPFNDGVY | L14 | TINCQEPKL | L4; L32 | TQDLFLPFF | L62; L34; L68; |
| | | | | | | L63; L58 |
| 2696 | PVLPFNDGVYF | L52 | TIPIQASL | L57; L23 | TQFNYYKKV | L24; L48; L64; L3; |
| | | | | | | L69 |
| 2697 | PVPEVKILN | L5 | TIQPRVEKK | L7; L6 | TREAVGTNL | L35; L34; L30; |
| | | | | | | L28; L66 |
| 2698 | PVPEVKILNNL | L5 | TIQTIVEV | L23; L48 | TSITSAVL | L61; L55; L65; |
| | | | | | | L54; L60 |
| 2699 | PVSIINNTV | L20 | TISVTTEIL | L34; L28 | TSNQVAVL | L65; L73; L48; |
| | | | | | | L55; L70 |
| 2700 | PYFFTLLLQ | L9 | TITSGWTF | L54; L55 | TSRYWEPEF | L43; L65; L52; |
| | | | | | | L53; L58 |
| 2701 | PYGANKDGI | L9 | TITVNVLAWLY | L12; L14 | TTFDSEYCR | L19; L17; L15; |
| | | | | | | L21; L7 |
| 2702 | PYIKWDLL | L9 | TIVNGVRR | L19; L17 | TTNIVTRCL | L55; L65; L73; |
| | | | | | | L64; L60 |
| 2703 | PYNSVTSSIVI | L9 | TIVNGVRRSF | L10; L16 | TTTLNGLWL | L60; L61; L73; |
| | | | | | | L55; L1 |
| 2704 | PYPDPSRILG | L9 | TKVDGVDVELF | L27; L34 | TTVDNINLH | L19; L11; L20; L7; |
| | | | | | | L10 |
| 2705 | PYPNASFDN | L9 | TLATCELY | L18; L1 | TVATSRTL | L55; L65; L39; |
| | | | | | | L28; L23 |
| 2706 | PYVFIKRSD | L65 | TLAVPYNMRV | L2; L4 | TVKGLDYKAF | L10; L39; L26; |
| | | | | | | L43; L11 |
| 2707 | PYVVDDPCPIHF | L9 | TLDNQDLNGNW | L1; L18 | TVLCLTPVY | L12; L14; L31; |
| | | | Y | | | L52; L16 |
| 2708 | QAENVTGL | L63 | TLGVYDYLV | L2; L4 | TVSWNLREM | L32; L64; L58; |
| | | | | | | L39; L59 |
| 2709 | QAGNATEV | L70 | TLIGEAVKT | L24; L2 | TVYSHLLL | L25; L74; L67; |
| | | | | | | L73; L23 |
| 2710 | QAGNVQLRVI | L55 | TLKEILVT | L23; L43 | TYPGQGLNGY | L14; L72; L12; |
| | | | | | | L71; L8 |
| 2711 | QAISMWALI | L47 | TLKGGAPTK | L13; L6 | TYPSLETI | L9; L8; L71; L72; |
| | | | | | | L62 |
| 2712 | QAISMWALII | L69 | TLKGGAPTKV | L3; L2 | VAIDYKHYT | L69; L67; L70; |
| | | | | | | L58; L43 |
| 2713 | QALPQRQK | L55 | TLKGVEAV | L3; L23 | VAPGTAVLR | L19; L7; L15; L17; |
| | | | | | | L21 |
| 2714 | QALPQRQKK | L13 | TLKKRWQL | L23; L39 | VAYFNMVY | L59; L70; L69; |
| | | | | | | L43; L58 |
| 2715 | QAPTHLSVD | L57 | TLKKRWQLA | L23; L3 | VCINGLML | L61; L71; L60; |
| | | | | | | L72; L74 |
| 2716 | QCIMLVYCF | L34 | TLKNLSDRV | L3; L2 | VECFDKFKV | L37; L45; L38; |
| | | | | | | L42; L36 |
| 2717 | QDDKKIKAC | L33 | TLLFLMSFTV | L2; L4 | VEEAKKVKP | L38; L42; L46; |
| | | | | | | L45; L37 |
| 2718 | QDKNTQEV | L33 | TLLPAADL | L23; L74 | VEEAKTVL | L37; L36; L45; |
| | | | | | | L23; L25 |
| 2719 | QDLFLPFF | L33 | TLMIERFVSL | L2; L4 | VEELKKLL | L45; L33; L23; |
| | | | | | | L37; L36 |
| 2720 | QDLKWARF | L33 | TLMNVLTLVYK | L6; L7 | VELFENKTTL | L36; L37; L45; |
| | | | | | | L41; L40 |
| 2721 | QDLSVVSKV | L33 | TLNDFNLV | L4; L2 | VESCGNFKV | L45; L37; L38; |
| | | | | | | L42; L36 |
| 2722 | QEGVVDYGARF | L40 | TLNISDEF | L26; L62 | VETKDVVEC | L37; L45; L36; |
| | Y | | | | | L29; L38 |
| 2723 | QEHYVRIT | L29 | TLPTEVLTE | L57; L5 | VFHLYLQYI | L62; L8; L9; L71; |
| | | | | | | L72 |
| 2724 | QEILGTVS | L29 | TLPVNVAFEL | L57; L5 | VFKNIDGYF | L9; L8; L12; L62; |
| | | | | | | L72 |
| 2725 | QEKDEDDNL | L36 | TLQGPPGTGK | L6; L7 | VFVSNGTHW | L9; L8; L72; L71; |
| | | | | | | L54 |
| 2726 | QEKDEDDNLI | L41 | TLVSDIDITF | L26; L10 | VFVSNGTHWF | L8; L9; L72; L71; |
| | | | | | | L12 |
| 2727 | QEKNFTTAPA | L42 | TLVSDIDITFL | L4; L2 | VGDSAEVAV | L63; L68; L62; L5; |
| | | | | | | L67 |
| 2728 | QENWNTKH | L29 | TLYCIDGAL | L2; L4 | VGYQPYRVV | L47; L48; L64; |
| | | | | | | L69; L51 |
| 2729 | QENWNTKHS | L40 | TMCDIRQL | L64; L48 | VLEGSVAY | L1; L18; L26; L43; |
| | | | | | | L27 |
| 2730 | QESPFVMMS | L42 | TMLFTMLRK | L6; L7 | VLGSLAATV | L2; L3; L5; L4; L24 |
| 2731 | QEVFAQVK | L29 | TNDNTSRY | L1; L18 | VLNDILSR | L21; L15; L17; L6; |
| | | | | | | L43 |
| 2732 | QFAYANRNRF | L9 | TNVTIATY | L65; L29 | VLTLVYKVY | L26; L14; L43; |
| | | | | | | L27; L12 |
| 2733 | QFCNDPFL | L62 | TNYDLSVVNAR | L19; L17 | VPQEHYVRI | L49; L47; L39; |
| | | | | | | L56; L32 |
| 2734 | QFDTYNLW | L62 | TPFEIKLAKK | L19; L31 | VPVVDSYYSL | L56; L39; L32; |
| | | | | | | L22; L31 |
| 2735 | QFKHLIPLMY | L12 | TPFEIKLAKKF | L39; L31 | VPYCYDTNVL | L39; L22; L32; |
| | | | | | | L47; L56 |
| 2736 | QFKKGVQI | L48 | TPHTVLQA | L51; L50 | VPYNMRVIHF | L31; L49; L47; |
| | | | | | | L39; L22 |
| 2737 | QFNYYKKV | L48 | TPHTVLQAVGA | L50; L51 | VQIGEYTF | L26; L27; L34; |
| | | | | | | L58; L8 |
| 2738 | QFTSLEIPR | L17 | TPKGPKVK | L39; L51 | VQMAPISAM | L26; L28; L27; |
| | | | | | | L58; L61 |
| 2739 | QGLNGYTV | L48 | TPLGIDLDEW | L31; L49 | VQSTQWSLF | L26; L9; L58; L27; |
| | | | | | | L8 |
| 2740 | QGLPNNTASW | L52 | TPLIQPIGA | L50; L51 | VRNLQHRLY | L66; L64; L30; |
| | | | | | | L65; L14 |
| 2741 | QGNFGDQEL | L32 | TPSDFVRA | L50; L51 | VSKVVKVTI | L53; L55; L43; |
| | | | | | | L52; L70 |
| 2742 | QGTTLPKGFY | L14 | TPSDFVRATA | L51; L50 | VSLVKPSF | L59; L52; L43; |
| | | | | | | L54; L53 |
| 2743 | QGYKSVNI | L48 | TPVCINGL | L56; L39 | VSSPDAVTA | L53; L52; L54; |
| | | | | | | L55; L69 |
| 2744 | QHGKEDLKF | L34 | TPVCINGLM | L32; L31 | VSTQEFRYM | L55; L52; L73; |
| | | | | | | L60; L70 |
| 2745 | QHLKDGTCGL | L34 | TPVHVMSKH | L32; L49 | VSWNLREM | L59; L70; L55; |
| | | | | | | L48; L43 |
| 2746 | QHMVVKAA | L28 | TPVYSFLPGV | L51; L50 | VTANVNAL | L70; L67; L60; |
| | | | | | | L59; L61 |
| 2747 | QHQPYVVD | L28 | TQALPQRQK | L13; L7 | VTCGTTTL | L60; L70; L68; |
| | | | | | | L63; L57 |
| 2748 | QHQPYVVDD | L28 | TQDLFLPF | L68; L62 | VTIDYTEI | L55; L67; L70; |
| | | | | | | L59; L53 |
| 2749 | QIAQFAPSA | L28 | TQHQPYVVD | L26; L44 | VTLAILTALR | L21; L15; L7; L19; |
| | | | | | | L17 |
| 2750 | QIGYYRRATR | L21 | TQMNLKYAI | L24; L34 | VTPSGTWL | L57; L63; L72; |
| | | | | | | L71; L60 |
| 2751 | QIPFAMQM | L57 | TRAKVGILCI | L34; L35 | VTSSIVITS | L20; L53; L70; |
| | | | | | | L19; L69 |
| 2752 | QITISSFKW | L54 | TRALTAESH | L35; L30 | VTVKNGSIHLY | L14; L18; L52; |
| | | | | | | L11; L1 |
| 2753 | QIYKTPPI | L48 | TREVGFVVP | L35; L42 | VTYVPAQEK | L13; L7; L43; L6; |
| | | | | | | L91 |
| 2754 | QIYKTPPIK | L6 | TRFASVYA | L35; L65 | VVDSYYSLLM | L1; L18; L63; L5; |
| | | | | | | L68 |
| 2755 | QKAAITIL | L44 | TRFQTLLA | L35; L25 | VVDYGARF | L63; L62; L68; L1; |
| | | | | | | L54 |
| 2756 | QKFNGLTV | L48 | TRGATVVI | L35; L65 | VVGDIILKP | L12; L24; L6; L11; |
| | | | | | | L7 |
| 2757 | QKLIANQF | L27 | TRNPANNAAI | L35; L34 | VVGEGSEGL | L16; L54; L2; L67; |
| | | | | | | L56 |
| 2758 | QKRTATKAY | L27 | TRTQLPPAY | L66; L30 | VVISSDVLV | L20; L5; L2; L73; |
| | | | | | | L58 |
| 2759 | QKTYERHSL | L44 | TSAFVETVK | L19; L7 | VVQEGVLTAV | L3; L2; L4; L5; L51 |
| 2760 | QKVGMQKY | L27 | TSDLATNN | L68; L1 | VVQTIEVNSF | L16; L26; L52; L9; |
| | | | | | | L10 |
| 2761 | QLDEEQPME | L5 | TSDYYQLYS | L1; L18 | VVSKVVKV | L24; L48; L73; |
| | | | | | | L20; L63 |
| 2762 | QLDFIDTKR | L21 | TSEAVEAPL | L63; L68 | VVSTGYHFR | L21; L15; L19; L7; |
| | | | | | | L17 |
| 2763 | QLGGLHLL | L74 | TSEDMLNPNY | L1; L18 | VVSTTTNIVTR | L19; L7; L21; L15; |
| | | | | | | L17 |
| 2764 | QLGGLHLLI | L24 | TSGDGTTSP | L43; L65 | VVVLSFELL | L74; L67; L60; |
| | | | | | | L20; L31 |
| 2765 | QLHNDILL | L74 | TSKETLYCI | L55; L53 | VVYRAFDIY | L14; L12; L26; |
| | | | | | | L18; L6 |
| 2766 | QLHNDILLAK | L6 | TSLEIPRRN | L55; L52 | VYADSFVI | L9; L8; L66; L72; |
| | | | | | | L71 |
| 2767 | QLIRAAEIR | L21 | TSLSGFKL | L55; L54 | VYGDFSHSQ | L9; L66; L8; L72; |
| | | | | | | L71 |
| 2768 | QLPAPRTLLTK | L6 | TSNSFDVLK | L7; L19 | VYGDFSHSQL | L8; L9; L66; L71; |
| | | | | | | L72 |
| 2769 | QLPETYFTQS | L5 | TSRTLSYYK | L13; L7 | VYSHLLLV | L62; L64; L73; |
| | | | | | | L48; L9 |
| 2770 | QLPPAYTNS | L5 | TSRYWEPEFY | L43; L1 | VYSRVKNL | L72; L71; L9; L66; |
| | | | | | | L62 |
| 2771 | QLPQGTTLPK | L6 | TTAAKLMVVI | L20; L10 | WEPEFYEAM | L29; L36; L57; |
| | | | | | | L37; L33 |
| 2772 | QLRARSVSPK | L6 | TTADIVVFDE | L20; L19 | WFLAYILF | L71; L9; L62; L72; |
| | | | | | | L8 |
| 2773 | QLREPMLQSA | L3 | TTDNTFVSG | L1; L18 | WMESEFRVY | L27; L1; L18; L14; |
| | | | | | | L26 |
| 2774 | QLRVESSSK | L13 | TTDPSFLG | L1; L18 | WNLVIGFLF | L12; L9; L8; L52; |
| | | | | | | L40 |
| 2775 | QLSLPVLQVR | L21 | TTEAFEKM | L18; L1 | WTAGAAAY | L18; L14; L1; L59; |
| | | | | | | L54 |
| 2776 | QLTSQWLTNI | L3 | TTIAKNTV | L20; L48 | WVLNNDYYR | L17; L15; L21; |
| | | | | | | L19; L7 |
| 2777 | QMAPISAM | L28 | TTITVNVLA | L20; L19 | YAADPAMH | L59; L43; L69; |
| | | | | | | L70; L74 |
| 2778 | QMNLKYAI | L48 | TTITVNVLAWL | L1; L18 | YACWHHSIGF | L58; L43; L49; |
| | | | Y | | | L59; L60 |
| 2779 | QMYKQARS | L48 | TTIVNGVRRSF | L52; L10 | YADSFVIR | L67; L63; L68; |
| | | | | | | L17; L74 |
| 2780 | QNCVLKLKV | L73 | TTLKGVEAV | L20; L4 | YANLGERV | L50; L47; L48; |
| | | | | | | L58; L70 |
| 2781 | QNGMNGRTI | L55 | TTLNDFNLV | L20; L73 | YASALWEI | L59; L47; L70; |
| | | | | | | L69; L67 |
| 2782 | QPIDLVPNQ | L31 | TTLPKGFY | L14; L1 | YASQGLVAS | L59; L50; L31; |
| | | | | | | L67; L32 |
| 2783 | QPIDLVPNQPY | L31 | TTNGDFLHFL | L20; L53 | YDPLQPEL | L33; L57; L66; |
| | | | | | | L59; L67 |
| 2784 | QPIGALDI | L47 | TTPGSGVPV | L57; L20 | YEAMYTPHTV | L45; L38; L46; |
| | | | | | | L37; L36 |
| 2785 | QPYPNASFD | L22 | TTPGSGVPVV | L20; L57 | YFLQSINFV | L72; L47; L71; L4; |
| | | | | | | L62 |
| 2786 | QPYRVVVLS | L47 | TTRTQLPPAY | L52; L14 | YGQQFGPTY | L59; L26; L14; |
| | | | | | | L27; L12 |
| 2787 | QPYVFIKR | L47 | TTTIKPVTYK | L6; L7 | YHFRELGVV | L28; L35; L46; L3; |
| | | | | | | L34 |
| 2788 | QPYVFIKRS | L48 | TTTIQTIVEV | L20; L73 | YIATNGPLKV | L3; L2; L73; L58; |
| | | | | | | L4 |
| 2789 | QQESPFVMM | L28 | TTTNIVTRC | L20; L19 | YILPSIISN | L4; L60; L43; L61; |
| | | | | | | L6 |
| 2790 | QQGQTVTK | L48 | TTVASLINTL | L10; L20 | YINVFAFPF | L59; L43; L12; |
| | | | | | | L58; L60 |
| 2791 | QQIELKFN | L48 | TTVMFLAR | L17; L19 | YKGPITDVF | L66; L27; L9; L44; |
| | | | | | | L58 |
| 2792 | QQLPETYF | L27 | TVAGVSICS | L19; L20 | YKIEELFYSY | L27; L12; L66; |
| | | | | | | L31; L10 |
| 2793 | QQQGQTVTK | L7 | TVAGVSICST | L19; L20 | YKLEGYAF | L27; L66; L71; |
| | | | | | | L59; L72 |
| 2794 | QQTTLKGV | L48 | TVEEAKTVLKK | L6; L7 | YLASGGQPI | L24; L2; L3; L43; |
| | | | | | | L49 |
| 2795 | QQTVTLLP | L48 | TVFPPTSFG | L20; L6 | YLAVFDKNL | L2; L4; L3; L74; |
| | | | | | | L64 |
| 2796 | QQWGFTGNL | L44 | TVIWDYKR | L19; L17 | YLCFLAFL | L62; L74; L59; |
| | | | | | | L57; L68 |
| 2797 | QRGGSYTN | L65 | TVIWDYKRD | L10; L11 | YLDGADVTK | L5; L2; L68; L63; |
| | | | | | | L1 |
| 2798 | QRKYKGIKI | L30 | TVKSVGKF | L10; L11 | YLITPVHV | L2; L3; L4; L5; L62 |
| 2799 | QRLTKYTM | L66 | TVKSVGKFC | L13; L39 | YNSASFSTF | L9; L34; L49; L58; |
| | | | | | | L27 |
| 2800 | QRNFYEPQII | L30 | TVREVLSD | L65; L43 | YPDPSRILG | L32; L49; L22; |
| | | | | | | L31; L1 |
| 2801 | QRQKKQQTV | L35 | TVSCLPFTI | L20; L24 | YPQVNGLTSI | L22; L47; L32; |
| | | | | | | L50; L39 |
| 2802 | QSAPHGVVFLH | L52 | TVTLLPAA | L51; L50 | YQGKPLEF | L58; L27; L43; |
| | | | | | | L26; L59 |
| 2803 | QSCTQHQPY | L18 | TVYDDGAR | L17; L19 | YRENGIGVT | L65; L35; L66; |
| | | | | | | L64; L25 |
| 2804 | QSFLNGFAV | L48 | TWFHAIHV | L48; L47 | YRGTTTYKL | L66; L65; L35; |
| | | | | | | L64; L34 |
| 2805 | QSRNLQEFK | L13 | TYACWHHSIGF | L9; L8 | YRIGNYKL | L35; L25; L66; |
| | | | | | | L34; L64 |
| 2806 | QTNSPRRA | L55 | TYASQGLVASI | L9; L8 | YSKWYIRVG | L70; L55; L65; |
| | | | | | | L43; L69 |
| 2807 | QTPFEIKLAK | L7 | TYCTGSIPC | L71; L72 | YSLFDMSKF | L53; L52; L54; |
| | | | | | | L58; L60 |
| 2808 | QTQTNSPRR | L21 | TYERHSLSHF | L8; L9 | YSLLMPILTL | L60; L67; L61; |
| | | | | | | L73; L59 |
| 2809 | QTRAGCLI | L55 | TYFTQSRNLQEF | L8; L9 | YSPIFLIVA | L50; L69; L46; |
| | | | | | | L59; L64 |
| 2810 | QTSITSAV | L48 | TYGQQFGPTY | L12; L14 | YSRYRIGNY | L43; L58; L1; L14; |
| | | | | | | L10 |
| 2811 | QTTPGSGVPV | L20 | TYHPNCVNC | L8; L72 | YTDFATSAC | L68; L1; L18; L63; |
| | | | | | | L60 |
| 2812 | QTTTIQTIV | L20 | TYICGFIQQK | L17; L13 | YWEPEFYEA | L38; L50; L46; |
| | | | | | | L42; L8 |
| 2813 | QTVKPGNFNK | L7 | TYICGFIQQKL | L8; L9 | YYLFDESGEF | L9; L71; L72; L8; |
| | | | | | | L12 |
| 2814 | QTYHPNCV | L48 | TYKNTCDGTTF | L8; L9 | YYLGTGPEA | L71; L72; L8; L9; |
| | | | | | | L50 |
| 2815 | QVAVLYQDV | L20 | TYKPNTWCI | L8; L9 | YYPDKVFR | L71; L66; L72; |
| | | | | | | L62; L17 |
| 2816 | QVHGNAHVA | L51 | TYKPNTWCIR | L15; L17 | YYPDKVFRSS | L72; L71; L66; L9; |
| | | | | | | L8 |
| 2817 | QVNGLTSI | L48 | TYLDGADV | L71; L72 | YYRYNLPTM | L66; L71; L9; L72; |
| | | | | | | L59 |
| 2818 | QVTIAEILL | L74 | TYLDGADVTKI | L8; L9 | YYVWKSYVH | L66; L71; L8; L72; |
| | | | | | | L9 |
| 2819 | QVVNVVTTKI | L20 | TYNCCDDDYF | L8; L9 | AADPAMHAA | L68; L67; L61; |
| | | | | | | L63; L42; L38 |
| 2820 | QWLPTGTLLV | L8 | TYNLWNTFTRL | L8; L9 | AARYMRSL | L59; L70; L55; |
| | | | | | | L61; L43; L60 |
| 2821 | QWNLVIGFLFL | L40 | TYPSLETIQI | L9; L8 | ACPDGVKHV | L57; L64; L5; L3; |
| | | | | | | L24; L69 |
| 2822 | QYLNTLTLAV | L71 | TYVPAQEK | L72; L71 | AEYHNESGL | L37; L36; L45; |
| | | | | | | L41; L40; L33 |
| 2823 | RAFGEYSH | L54 | TYVPAQEKN | L8; L9 | AFGGCVFSY | L12; L65; L14; |
| | | | | | | L72; L71; L26 |
| 2824 | RAGEAANFCAL | L67 | TYVPAQEKNF | L8; L9 | AFKLNIKLL | L13; L62; L64; |
| | | | | | | L39; L9; L72 |
| 2825 | RAKHYVYI | L70 | TYVTQQLI | L9; L8 | AFLLFLVLI | L9; L8; L48; L62; |
| | | | | | | L40; L41 |
| 2826 | RALTAESH | L54 | TYVTQQLIR | L17; L15 | AFPFTIYSLL | L72; L9; L71; L62; |
| | | | | | | L57; L8 |
| 2827 | RALTGIAV | L50 | VAAFHQEC | L70; L59 | AGDSGFAAY | L18; L14; L1; L27; |
| | | | | | | L12; L43 |
| 2828 | RARAGEAA | L51 | VAAFHQECSL | L67; L61 | AIKITEHSW | L16; L14; L26; |
| | | | | | | L54; L10; L52 |
| 2829 | RARAGEAANF | L52 | VAAGLEAPFLY | L12; L31 | AIVFITLCF | L26; L12; L58; |
| | | | | | | L60; L43; L41 |
| 2830 | RARSVSPK | L13 | VAAIFYLIT | L69; L43 | APYIVGDVV | L51; L50; L47; |
| | | | | | | L39; L22; L24 |
| 2831 | RCILHCANF | L33 | VAALTNNV | L47; L70 | AQFAPSASA | L46; L28; L51; |
| | | | | | | L27; L44; L42 |
| 2832 | RCLAVHEC | L33 | VADAVIKT | L63; L68 | ARSVSPKLF | L30; L66; L34; |
| | | | | | | L64; L35; L9 |
| 2833 | RCSFYEDF | L33 | VAFELWAK | L59; L7 | ARYMRSLKV | L25; L64; L30; |
| | | | | | | L73; L24; L35 |
| 2834 | RCSFYEDFLEY | L18 | VAFNTLLFLM | L31; L69 | ATNNLVVMAY | L14; L16; L18; |
| | | | | | | L12; L10; L6 |
| 2835 | RDAAMQRK | L33 | VAITRAKVG | L69; L70 | AVFDKNLYD | L6; L7; L12; L13; |
| | | | | | | L11; L16 |
| 2836 | RDAPAHIS | L33 | VATVQSKM | L70; L63 | AVILRGHLR | L15; L21; L19; |
| | | | | | | L17; L7; L6 |
| 2837 | RDAPAHIST | L33 | VAYESLRP | L43; L47 | AVVYRGTTTY | L26; L10; L18; |
| | | | | | | L12; L14; L11 |
| 2838 | RDAPAHISTI | L33 | VAYRKVLLRK | L6; L7 | AWQPGVAM | L71; L72; L28; |
| | | | | | | L33; L62; L59 |
| 2839 | RDIADTTDA | L46 | VAYSNNSIA | L69; L70 | AYILFTRFFY | L12; L14; L72; |
| | | | | | | L71; L41; L40 |
| 2840 | RDISTEIY | L29 | VCNLLLLF | L62; L59 | CANDPVGFTL | L61; L60; L68; |
| | | | | | | L32; L67; L31 |
| 2841 | RDLICAQK | L33 | VCNLLLLFV | L73; L64 | CFANKHADF | L8; L71; L72; L9; |
| | | | | | | L62; L12 |
| 2842 | RDPQTLEI | L33 | VCSVIDLLL | L73; L34 | CFLAFLLF | L9; L8; L12; L71; |
| | | | | | | L72; L62 |
| 2843 | RDVDTDFV | L33 | VCVSTSGRW | L49; L54 | CFLAFLLFL | L71; L8; L72; L73; |
| | | | | | | L9; L62 |
| 2844 | REAVGTNLPLQL | L36 | VDIAANTV | L48; L33 | CKDGHVETF | L27; L34; L62; |
| | | | | | | L63; L49; L68 |
| 2845 | REETGLLMPL | L36 | VDLPIGINI | L8; L9 | CRSKNPLLY | L66; L30; L64; |
| | | | | | | L12; L65; L18 |
| 2846 | REGYLNST | L45 | VDMSMTYGQQF | L8; L9 | CSAYTVEL | L59; L70; L67; |
| | | | | | | L61; L74; L60 |
| 2847 | RELHLSWEVG | L36 | VDTPNNTDF | L9; L8 | CTDDNALAYY | L18; L1; L11; L14; |
| | | | | | | L12; L58 |
| 2848 | RELKVTFFPDL | L36 | VDTVSALVY | L12; L18 | CTNYMPYFF | L53; L62; L55; |
| | | | | | | L54; L16; L58 |
| 2849 | RELMRELN | L33 | VDYGARFYF | L9; L12 | CVADYSVL | L67; L61; L74; |
| | | | | | | L59; L10; L60 |
| 2850 | RELMRELNG | L33 | VDYGARFYFY | L14; L12 | CYFGLFCLL | L9; L8; L64; L62; |
| | | | | | | L66; L13 |
| 2851 | REMLAHAE | L33 | VEAEVQIDRLI | L41; L40 | CYGVSPTKL | L62; L9; L66; L72; |
| | | | | | | L8; L71 |
| 2852 | REMLAHAEE | L33 | VEGCHATREA | L38; L46 | DAQSFLNGF | L11; L49; L10; |
| | | | | | | L58; L31; L47 |
| 2853 | RENNRVVISS | L38 | VEGFNCYFP | L38; L42 | DEPEEHVQI | L45; L36; L41; |
| | | | | | | L25; L29; L37 |
| 2854 | REQIDGYV | L33 | VELKHFFF | L33; L29 | DFVNEFYAY | L12; L10; L29; |
| | | | | | | L11; L71; L72 |
| 2855 | REQIDGYVMH | L38 | VELVAELEGI | L41; L36 | DGWEIVKF | L29; L47; L23; |
| | | | | | | L49; L25; L11 |
| 2856 | REVLSDRELH | L36 | VENPHLMGWD | L41; L29 | DHVDILGPL | L35; L20; L34; |
| | | | Y | | | L11; L28; L10 |
| 2857 | REVRTIKVFT | L36 | VESDDYIAT | L38; L36 | DLSPRWYFY | L12; L1; L23; L11; |
| | | | | | | L18; L14 |
| 2858 | RFDNPVLP | L62 | VETKAIVSTI | L45; L36 | DPYEDFQEN | L49; L47; L31; |
| | | | | | | L25; L32; L10 |
| 2859 | RFDTRVLS | L62 | VETKDVVECL | L36; L37 | DRYPANSI | L25; L47; L35; |
| | | | | | | L28; L64; L66 |
| 2860 | RFDTRVLSNL | L62 | VETSNSFDVL | L36; L45 | DSLDTYPSL | L25; L61; L60; |
| | | | | | | L67; L10; L74 |
| 2861 | RFFYVLGLAA | L51 | VEYCPIFF | L29; L33 | DTLKEILVTY | L11; L10; L52; |
| | | | | | | L53; L14; L16 |
| 2862 | RFLYIIKLIFL | L8 | VFDEISMAT | L62; L68 | DVTDVTQL | L74; L11; L20; |
| | | | | | | L25; L10; L23 |
| 2863 | RFPKSDGTGTI | L8 | VFDGKSKC | L62; L63 | DVVIGIVNN | L11; L19; L17; |
| | | | | | | L49; L10; L20 |
| 2864 | RFPNITNLCPF | L8 | VFFDGRVDG | L71; L72 | EAFEYYHTT | L10; L49; L11; |
| | | | | | | L20; L69; L32 |
| 2865 | RFQTLLALHR | L15 | VFLGIITT | L71; L72 | EAMYTPHTV | L70; L20; L47; |
| | | | | | | L32; L69; L50 |
| 2866 | RFQTLLALHRSY | IL14 | VFMCVEYC | L71; L72 | ECVRGTTVL | L35; L10; L32; |
| | | | | | | L11; L34; L8 |
| 2867 | RGATVVIGT | L44 | VFPPTSFGP | L8; L9 | EEAARYMRSL | L40; L41; L42; |
| | | | | | | L10; L25; L37 |
| 2868 | RGDEVRQIA | L46 | VFQSASKII | L72; L9 | EEHFIETISL | L40; L37; L41; |
| | | | | | | L42; L36; L29 |
| 2869 | RGGDGKMKD | L65 | VFQTRAGC | L71; L72 | EEVKPFITE | L29; L46; L42; |
| | | | | | | L41; L37; L45 |
| 2870 | RGIVFMCV | L48 | VFYKENSY | L71; L72 | EIDPKLDNY | L1; L18; L11; L10; |
| | | | | | | L14; L12 |
| 2871 | RGTAVMSLK | L13 | VGDVVQEGV | L63; L5 | EQIDGYVMH | L11; L24; L43; |
| | | | | | | L34; L10; L35 |
| 2872 | RGTTTYKL | L54 | VGDVVQEGVL | L68; L63 | ETKAIVSTI | L10; L20; L11; |
| | | | | | | L70; L55; L17 |
| 2873 | RGVYYPDKV | L73 | VGFTLKNTV | L48; L47 | ETMSYLFQH | L11; L17; L20; L7; |
| | | | | | | L10; L19 |
| 2874 | RHFDEGNCD | L34 | VGFVVPGL | L48; L47 | EVFAQVKQI | L20; L10; L48; |
| | | | | | | L11; L19; L24 |
| 2875 | RHINAQVA | L28 | VGGNYNYLY | L14; L12 | EVLTEEVVL | L20; L32; L44; |
| | | | | | | L10; L31; L23 |
| 2876 | RIAGHHLGRC | L14 | VGLMWLSYF | L9; L8 | EVVENPTIQK | L19; L11; L7; L20; |
| | | | | | | L17; L6 |
| 2877 | RIDGDMVPH | L6 | VGVALLAV | L48; L47 | FAVSKGFF | L58; L74; L59; |
| | | | | | | L60; L70; L49 |
| 2878 | RIDKVLNEKC | L18 | VGYQPYRV | L48; L47 | FAYTKRNV | L47; L70; L64; |
| | | | | | | L69; L58; L59 |
| 2879 | RIIMRLWL | L73 | VHTANKWDL | L35; L34 | FDNPVLPF | L33; L59; L43; |
| | | | | | | L71; L72; L66 |
| 2880 | RIIMRLWLC | L21 | VIGIVNNTVY | L43; L26 | FEYVSQPFL | L36; L45; L37; |
| | | | | | | L61; L74; L60 |
| 2881 | RIIMRLWLCWK | L6 | VILRGHLR | L21; L15 | FFKEGSSVEL | L62; L71; L72; |
| | | | | | | L43; L67; L8 |
| 2882 | RIKASMPTT | L13 | VIPTITQM | L57; L63 | FFTLLLQL | L62; L59; L72; |
| | | | | | | L71; L74; L67 |
| 2883 | RIKASMPTTI | L3 | VIPTITQMNL | L57; L5 | FIKGLNNL | L58; L74; L59; |
| | | | | | | L60; L23; L67 |
| 2884 | RIKASMPTTIAK | L6 | VKCTSVVL | L44; L66 | FKDQVILL | L74; L62; L68; |
| | | | | | | L63; L66; L64 |
| 2885 | RIMASLVLA | L6 | VKPSFYVY | L66; L27 | FLAFLLFLVL | L67; L74; L2; L3; |
| | | | | | | L61; L20 |
| 2886 | RINWITGGI | L24 | VLAAECTIFK | L6; L7 | FLAFVVFLLV | L2; L20; L3; L12; |
| | | | | | | L4; L5 |
| 2887 | RIRGGDGK | L13 | VLALLSDL | L74; L23 | FLFLTWICLL | L74; L2; L4; L3; |
| | | | | | | L64; L5 |
| 2888 | RIRGGDGKM | L14 | VLDMCASLKEL | L68; L5 | FLGIITTV | L3; L2; L23; L48; |
| | | | | | | L42; L4 |
| 2889 | RIRGGDGKMK | L13 | VLDWLEEK | L68; L1 | FLLFLVLIM | L2; L74; L4; L12; |
| | | | | | | L69; L67 |
| 2890 | RKIFVDGVP | L44 | VLHSTQDL | L57; L43 | FLLNKEMYL | L2; L74; L4; L5; |
| | | | | | | L23; L61 |
| 2891 | RKLDNDALN | L44 | VLHSYFTSD | L43; L57 | FLPGVYSVI | L57; L5; L3; L10; |
| | | | | | | L64; L2 |
| 2892 | RKLHDELTG | L44 | VLHSYFTSDYY | L14; L12 | FLYENAFLPF | L59; L12; L6; L2; |
| | | | | | | L5; L10 |
| 2893 | RKMAFPSGK | L6 | VLIMLIIFWF | L12; L9 | FLYIIKLI | L48; L47; L64; |
| | | | | | | L23; L24; L3 |
| 2894 | RKRISNCVADY | L27 | VLKKCKSAFY | L43; L14 | FNEKTHVQL | L63; L32; L68; |
| | | | | | | L62; L74; L34 |
| 2895 | RKSNHNFL | L44 | VLKLKVDTA | L3; L23 | FPFTIYSLLL | L31; L32; L47; |
| | | | | | | L22; L50; L49 |
| 2896 | RKSNLKPFER | L21 | VLLFLAFV | L4; L2 | FPPTSFGPL | L57; L22; L66; |
| | | | | | | L47; L56; L72 |
| 2897 | RKVPTDNY | L27 | VLLFLAFVVF | L9; L12 | FPREGVFV | L50; L47; L51; |
| | | | | | | L23; L22; L39 |
| 2898 | RKVPTDNYI | L44 | VLLPLTQYNR | L15; L21 | FPRGQGVPI | L50; L22; L49; |
| | | | | | | L47; L39; L51 |
| 2899 | RKVPTDNYITT | L44 | VLLPLTQYNRY | L12; L14 | FQSASKIITL | L44; L34; L28; |
| | | | | | | L35; L69; L58 |
| 2900 | RKVPTDNYITTY | L27 | VLLSMQGAV | L2; L4 | FSKQLQQSM | L58; L70; L43; |
| | | | | | | L55; L69; L53 |
| 2901 | RKYKGIKIQE | L27 | VLLSVLQQLRV | L4; L2 | FSTFEEAAL | L61; L60; L67; |
| | | | | | | L68; L74; L59 |
| 2902 | RLCAYCCNI | L24 | VLNEKCSA | L23; L43 | FSTGVNLV | L70; L73; L64; |
| | | | | | | L48; L69; L58 |
| 2903 | RLDKVEAEVQ | L18 | VLNNDYYR | L21; L15 | FTEQPIDL | L63; L60; L68; |
| | | | | | | L62; L1; L61 |
| 2904 | RLFARTRSMW | L16 | VLPPLLTDE | L5; L57 | FTRFFYVL | L59; L60; L67; |
| | | | | | | L70; L61; L66 |
| 2905 | RLIDAMMFT | L2 | VLPPLLTDEM | L5; L57 | FVDDIVKT | L63; L68; L62; L5; |
| | | | | | | L1; L74 |
| 2906 | RLISMMGFKMNY | L18 | VLPQLEQPYV | L5; L2 | FVENPDIL | L67; L62; L74; |
| | | | | | | L63; L68; L60 |
| 2907 | RLITGRLQ | L55 | VLQLPQGTTL | L57; L26 | FVVEVVDKYF | L11; L12; L60; |
| | | | | | | L52; L10; L58 |
| 2908 | RLKLFDRYFK | L13 | VLQSGFRKM | L14; L13 | FVVKRHTF | L58; L59; L54; |
| | | | | | | L60; L23; L26 |
| 2909 | RLMKTIGPDMF | L16 | VLQVRDVLVR | L15; L21 | FYVLGLAAI | L72; L71; L9; L59; |
| | | | | | | L62; L50 |
| 2910 | RLTKYTMADLV | L18 | VLRQWLPTG | L3; L4 | FYYVWKSYV | L64; L71; L62; |
| | Y | | | | | L72; L47; L69 |
| 2911 | RLWLCWKCRSK | L6 | VLSFCAFAV | L4; L2 | GAEHVNNSY | L18; L31; L12; L1; |
| | | | | | | L14; L49 |
| 2912 | RMNSRNYIA | L38 | VLSGHNLAK | L6; L7 | GAKLKALNL | L23; L70; L74; |
| | | | | | | L60; L58; L13 |
| 2913 | RNFYEPQI | L48 | VLTLVYKV | L48; L24 | GECPNFVFP | L46; L42; L38; |
| | | | | | | L37; L45; L36 |
| 2914 | RNPANNAAI | L57 | VLTLVYKVYY | L12; L14 | GEFKLASHM | L36; L29; L37; |
| | | | | | | L45; L41; L40 |
| 2915 | RNPAWRKAV | L57 | VLYQPPQTSI | L6; L3 | GFGDSVEEV | L72; L2; L24; L3; |
| | | | | | | L62; L71 |
| 2916 | RNRATRVEC | L13 | VMFLARGIVF | L26; L9 | GFMGRIRSV | L3; L64; L72; L48; |
| | | | | | | L45; L71 |
| 2917 | RNRDVDTD | L65 | VMMSAPPAQY | L14; L12 | GIMMNVAKY | L26; L12; L14; |
| | | | | | | L10; L11; L18 |
| 2918 | RNRFLYIIK | L13 | VMYASAVV | L48; L47 | GLPWNVVRI | L24; L5; L3; L2; |
| | | | | | | L4; L64 |
| 2919 | RNTNPIQLSSY | L14 | VNLKQLPFF | L9; L8 | GLVAEWFLAY | L12; L6; L26; L10; |
| | | | | | | L27; L18 |
| 2920 | RNVIPTITQM | L65 | VNQNAQAL | L71; L72 | GRLQSLQTY | L30; L27; L14; |
| | | | | | | L34; L12; L26 |
| 2921 | RPLLESELV | L51 | VPAQEKNFTTA | L51; L50 | GRTILGSAL | L30; L35; L28; |
| | | | | | | L25; L34; L66 |
| 2922 | RPNFTIKGS | L39 | VPEVKILNNL | L39; L56 | GSVGFNIDY | L26; L18; L27; |
| | | | | | | L14; L58; L7 |
| 2923 | RPQGLPNNT | L56 | VPHVGEIPVA | L51; L50 | GSYKDWSY | L55; L18; L27; |
| | | | | | | L14; L54; L26 |
| 2924 | RPQIGVVREFL | L56 | VPLHGTILT | L50; L31 | GTSTDVVYR | L7; L21; L15; L19; |
| | | | | | | L17; L6 |
| 2925 | RQCSGVTFQ | L24 | VPLNIIPLTTA | L50; L51 | GVAPGTAVLR | L19; L7; L21; L15; |
| | | | | | | L6; L17 |
| 2926 | RQFHQKLLKS | L24 | VPMEKLKTLVA | L50; L51 | GVKDCVVLHSY | L14; L10; L11; |
| | | | | | | L26; L12; L52 |
| 2927 | RQGFVDSDV | L24 | VPNQPYPNASF | L22; L31 | GVRRSFYVY | L26; L14; L10; |
| | | | | | | L12; L27; L52 |
| 2928 | RQHLKDGTC | L14 | VPQADVEWKF | L31; L49 | GVVREFLTR | L7; L19; L15; L17; |
| | | | | | | L10; L21 |
| 2929 | RQKRTATKA | L24 | VPRASANI | L47; L22 | GVYYPDKVF | L26; L27; L52; |
| | | | | | | L10; L39; L16 |
| 2930 | RQRLTKYT | L48 | VPVSIINNT | L49; L51 | GYLQPRTF | L55; L9; L72; L71; |
| | | | | | | L65; L8 |
| 2931 | RQVVNVVT | L44 | VPWDTIAN | L50; L51 | GYPNMFITR | L17; L15; L7; L9; |
| | | | | | | L27; L71 |
| 2932 | RQVVNVVTTKI | L24 | VPWDTIANYA | L51; L50 | GYQPYRVVV | L72; L13; L71; |
| | | | | | | L38; L64; L66 |
| 2933 | RQWLPTGTLLV | L24 | VPYCYDTNV | L47; L51 | GYVTHGLNL | L71; L8; L72; L9; |
| | | | | | | L66; L65 |
| 2934 | RRAFGEYSHV | L30 | VQIDRLITGR | L21; L15 | HADFDTWF | L63; L68; L32; |
| | | | | | | L74; L62; L49 |
| 2935 | RRARSVASQ | L30 | VQIPTTCAN | L43; L26 | HECFVKRVD | L37; L38; L65; |
| | | | | | | L42; L45; L46 |
| 2936 | RRGPEQTQ | L65 | VQLSLPVLQV | L4; L24 | HEVLLAPL | L29; L37; L25; |
| | | | | | | L33; L36; L45 |
| 2937 | RRGPEQTQGNF | L30 | VQLTSQWL | L25; L44 | HFLPRVFSA | L50; L8; L72; L71; |
| | | | | | | L38; L46 |
| 2938 | RRIRGGDGK | L30 | VQPTESIVR | L21; L15 | HFVCNLLLL | L8; L62; L72; L73; |
| | | | | | | L9; L71 |
| 2939 | RRIRGGDGKM | L30 | VQSTQWSL | L44; L35 | HHWLLLTIL | L34; L35; L28; |
| | | | | | | L44; L25; L31 |
| 2940 | RRIRGGDGKMK | L30 | VRDLPQGF | L62; L63 | HQSDIEVTG | L44; L24; L26; |
| | | | | | | L34; L35; L28 |
| 2941 | RRLISMMGFK | L30 | VRITGLYPTL | L66; L30 | HVASCDAIMTR | L19; L21; L17; |
| | | | | | | L11; L15; L7 |
| 2942 | RRLISMMGFKM | L30 | VRNLQHRL | L66; L65 | HVETFYPKL | L32; L63; L11; |
| | | | | | | L49; L13; L5 |
| 2943 | RRNVATLQA | L30 | VRQALLKTV | L64; L30 | HVTFFIYNK | L7; L13; L19; L20; |
| | | | | | | L6; L17 |
| 2944 | RRPQGLPNNT | L30 | VRRSFYVY | L66; L65 | HVVGPNVNK | L19; L7; L13; L6; |
| | | | | | | L20; L17 |
| 2945 | RRSFYVYA | L65 | VSDADSTLIG | L18; L1 | HWLLLTIL | L25; L23; L62; |
| | | | | | | L33; L59; L48 |
| 2946 | RRVVFNGV | L30 | VSDIDYVPLK | L1; L18 | HYVRITGL | L72; L65; L66; |
| | | | | | | L71; L25; L8 |
| 2947 | RRVWTLMN | L65 | VSDVGDSA | L1; L68 | IAIAMACLV | L47; L69; L70; |
| | | | | | | L58; L73; L64 |
| 2948 | RSDARTAPH | L18 | VSEETGTLIV | L18; L1 | IAMSAFAMM | L61; L59; L60; |
| | | | | | | L58; L70; L31 |
| 2949 | RSDARTAPHGH | L18 | VSEEVVEN | L63; L68 | IELSLIDFY | L40; L41; L29; |
| | | | | | | L12; L14; L36 |
| 2950 | RSDVLLPLTQ | L18 | VSFLAHIQ | L55; L48 | IEVQGYKSV | L45; L46; L38; |
| | | | | | | L37; L29; L36 |
| 2951 | RSEAGVCV | L18 | VSFSTFEEA | L43; L50 | IEYPIIGD | L29; L33; L45; |
| | | | | | | L46; L25; L48 |
| 2952 | RSEKSYELQT | L18 | VSICSTMTNR | L19; L15 | IFLIVAAIVF | L8; L9; L71; L72; |
| | | | | | | L12; L31 |
| 2953 | RSFYVYAN | L65 | VSIINNTV | L48; L70 | IIKNLSKSL | L39; L43; L58; |
| | | | | | | L60; L26; L13 |
| 2954 | RSFYVYANG | L13 | VSIWNLDYI | L73; L55 | IIQFPNTYL | L68; L60; L61; |
| | | | | | | L74; L63; L28 |
| 2955 | RSGETLGVLV | L73 | VSKGFFKEG | L43; L13 | IKVTLVFLF | L66; L9; L27; L52; |
| | | | | | | L8; L12 |
| 2956 | RSKNPLLYDANY | L14 | VSLAIDAY | L14; L1 | ILSPLYAF | L59; L26; L23; L9; |
| | | | | | | L54; L33 |
| 2957 | RSKQRRPQ | L55 | VSPTKLNDL | L57; L64 | IPLTTAAKL | L47; L32; L31; |
| | | | | | | L39; L22; L56 |
| 2958 | RSKQRRPQG | L13 | VSSQCVNL | L74; L70 | IPVAYRKVLL | L31; L56; L22; |
| | | | | | | L32; L49; L39 |
| 2959 | RSKQRRPQGL | L55 | VSSQCVNLTTR | L19; L15 | IQLSSYSLF | L27; L9; L8; L26; |
| | | | | | | L34; L16 |
| 2960 | RSLKVPATVS | L53 | VSTTTNIV | L48; L70 | IQYIDIGNY | L26; L27; L14; |
| | | | | | | L18; L43; L11 |
| 2961 | RSQMEIDFLEL | L73 | VSVSSPDAV | L67; L73 | IRGDEVRQI | L64; L65; L34; |
| | | | | | | L66; L30; L35 |
| 2962 | RSRNSSRNS | L13 | VTDFNAIATC | L18; L1 | ISAGFSLWV | L73; L70; L69; |
| | | | | | | L58; L64; L18 |
| 2963 | RSSSRSRNS | L55 | VTDTPKGPK | L1; L7 | ISNEKQEI | L55; L48; L43; |
| | | | | | | L73; L54; L53 |
| 2964 | RSSVLHSTQ | L53 | VTDTPKGPKVK | L1; L18 | ITEEVGHTD | L53; L55; L18; |
| | | | Y | | | L49; L54; L1 |
| 2965 | RSTNSRIK | L55 | VTDVTQLYLG | L1; L18 | ITFELDERI | L20; L53; L54; |
| | | | | | | L52; L16; L34 |
| 2966 | RSTNSRIKA | L13 | VTFFIYNK | L7; L13 | ITLCFTLKR | L7; L21; L6; L17; |
| | | | | | | L15; L19 |
| 2967 | RSYLTPGD | L48 | VTFFIYNKIV | L70; L20 | ITVNVLAWLY | L12; L14; L52; |
| | | | | | | L18; L54; L1 |
| 2968 | RTFLLKYNE | L53 | VTKENDSKEGF | L52; L53 | IYLYLTFYL | L8; L9; L71; L72; |
| | | | | | | L66; L62 |
| 2969 | RTIKGTHH | L54 | VTKNSKVQI | L53; L70 | KEILVTYNC | L38; L33; L36; |
| | | | | | | L37; L42; L45 |
| 2970 | RTLETAQN | L54 | VTLADAGFIK | L7; L6 | KEITVATSR | L15; L21; L38; |
| | | | | | | L36; L37; L45 |
| 2971 | RTLETAQNSV | L16 | VTLVFLFV | L73; L47 | KEKVNINIV | L45; L37; L42; |
| | | | | | | L38; L46; L36 |
| 2972 | RTNVYLAVFDK | L7 | VTLVFLFVA | L52; L50 | KFVCDNIKF | L8; L53; L54; L9; |
| | | | | | | L52; L12 |
| 2973 | RTRSMWSFN | L13 | VTMPLGYV | L73; L70 | KFYGGWHNM | L71; L72; L14; L8; |
| | | | | | | L13; L16 |
| 2974 | RTTNGDFLHFL | L53 | VTQLYLGGMSY | L1; L18 | KGAGGHSY | L14; L55; L26; |
| | | | Y | | | L27; L54; L18 |
| 2975 | RTVYDDGARRV | L52 | VTSAMQTML | L73; L70 | KGDYGDAVVY | L18; L14; L27; |
| | W | | | | | L65; L54; L1 |
| 2976 | RVAGDSGFA | L14 | VTTEILPVSM | L52; L20 | KHAFHTPAF | L28; L27; L34; |
| | | | | | | L33; L35; L9 |
| 2977 | RVAGDSGFAA | L51 | VTTFDSEY | L1; L18 | KKADETQAL | L44; L27; L66; |
| | | | | | | L16; L64; L24 |
| 2978 | RVCGVSAA | L51 | VTVKNGSIHL | L53; L60 | KLNDLCFTNV | L5; L3; L2; L4; |
| | | | | | | L13; L21 |
| 2979 | RVCTNYMPYFF | L16 | VTVYSHLLLV | L73; L20 | KLNEEIAII | L3; L4; L16; L24; |
| | | | | | | L2; L5 |
| 2980 | RVCVDTVRTNVY | L18 | VTYKLDGVVC | L53; L52 | KLPDDFTGC | L5; L57; L6; L2; |
| | | | | | | L16; L26 |
| 2981 | RVDFCGKGYH | L18 | VVADAVIK | L7; L19 | KLVLSVNPY | L26; L16; L6; L27; |
| | | | | | | L18; L14 |
| 2982 | RVDFCGKGYHL | L18 | VVAFNTLL | L74; L68 | KMKDLSPRW | L54; L52; L16; |
| | M | | | | | L14; L13; L53 |
| 2983 | RVDWTIEYP | L18 | VVCFNSTY | L26; L18 | KMNYQVNGY | L26; L16; L14; |
| | | | | | | L27; L18; L6 |
| 2984 | RVEAFEYYH | L18 | VVCTEIDPK | L7; L6 | KNGSIHLYF | L73; L65; L12; L9; |
| | | | | | | L54; L8 |
| 2985 | RVECFDKF | L18 | VVDADSKI | L63; L68 | KNIDGYFKI | L8; L24; L73; L55; |
| | | | | | | L16; L45 |
| 2986 | RVECFDKFK | L13 | VVDGCNSST | L68; L63 | KPASRELKV | L73; L51; L24; |
| | | | | | | L39; L22; L47 |
| 2987 | RVECTTIVN | L18 | VVDYGARFYFY | L1; L18 | KPNTWCIRCL | L39; L56; L32; |
| | | | | | | L55; L22; L65 |
| 2988 | RVIHFGAGSD | L14 | VVEVVDKY | L1; L18 | KPYIKWDL | L23; L56; L25; |
| | | | | | | L39; L65; L22 |
| 2989 | RVKNLNSSRV | L13 | VVEVVDKYFDC | L18; L1 | KRFDNPVL | L65; L66; L25; |
| | | | Y | | | L35; L64; L28 |
| 2990 | RVLGLKTLA | L24 | VVFDEISMATNY | L14; L12 | KSAAEASKK | L13; L7; L54; L55; |
| | | | | | | L18; L6 |
| 2991 | RVLGLKTLAT | L6 | VVKVTIDY | L43; L26 | KSAQCFKMF | L53; L52; L55; |
| | | | | | | L54; L16; L73 |
| 2992 | RVTKNSKV | L24 | VVLLILMTA | L50; L51 | KSILSPLY | L55; L54; L18; |
| | | | | | | L52; L1; L14 |
| 2993 | RVVVLSFELL | L20 | VVLLSVLQQ | L6; L7 | KSLTENKY | L55; L54; L14; |
| | | | | | | L18; L52; L53 |
| 2994 | RVWTLMNV | L13 | VVNAANVYLK | L7; L6 | KSNIIRGW | L55; L54; L52; |
| | | | | | | L65; L53; L48 |
| 2995 | RVWTLMNVLTL | L16 | VVNIQKEI | L48; L55 | KSNLKPFER | L21; L15; L73; |
| | | | | | | L55; L17; L7 |
| 2996 | RVYANLGERV | L24 | VVQLTSQWL | L60; L74 | KSYELQTP | L55; L54; L53; |
| | | | | | | L43; L46; L48 |
| 2997 | RWFLNRFT | L55 | VVRSIFSRT | L13; L43 | KTDGTLMI | L18; L68; L63; L1; |
| | | | | | | L54; L73 |
| 2998 | RWFLNRFTT | L16 | VVSDIDYVPL | L20; L67 | KVGGNYNYL | L65; L74; L16; |
| | | | | | | L73; L67; L58 |
| 2999 | RYFRLTLGVYDY | L14 | VVSDIDYVPLK | L6; L7 | LAAIMQLF | L59; L47; L52; |
| | | | | | | L49; L74; L58 |
| 3000 | RYLALYNK | L15 | VVSKVVKVTI | L20; L53 | LACFVLAAV | L50; L59; L47; |
| | | | | | | L20; L67; L70 |
| 3001 | RYLALYNKYK | L13 | VVTCLAYYF | L12; L52 | LAFLLFLV | L47; L50; L70; |
| | | | | | | L69; L59; L64 |
| 3002 | RYMNSQGLLP | L8 | VVYRGTTTYK | L6; L7 | LAKALRKV | L70; L47; L58; |
| | | | | | | L64; L23; L69 |
| 3003 | RYRIGNYK | L13 | VWTLMNVL | L62; L25 | LAKHCLHVV | L70; L47; L69; |
| | | | | | | L58; L50; L32 |
| 3004 | RYVDNNFCG | L8 | VYANLGERVR | L15; L17 | LALLLLDRL | L67; L47; L31; |
| | | | | | | L74; L50; L60 |
| 3005 | RYWEPEFYEAM | L14 | VYAWNRKRI | L9; L8 | LAMDEFIERY | L31; L49; L12; |
| | Y | | | | | L52; L18; L14 |
| 3006 | SAAEASKK | L19 | VYDPLQPELD | L62; L9 | LARGIVFM | L58; L70; L59; |
| | | | | | | L74; L47; L69 |
| 3007 | SAAEASKKPR | L19 | VYDYLVSTQ | L62; L9 | LAWPLIVT | L47; L59; L69; |
| | | | | | | L50; L31; L70 |
| 3008 | SAEVAVKMFDA | L18 | VYFASTEK | L71; L72 | LEIPRRNVA | L46; L38; L42; |
| | Y | | | | | L25; L37; L29 |
| 3009 | SAFAMMFVKHK | L7 | VYIGDPAQLP | L9; L8 | LENVAFNVV | L45; L29; L46; |
| | | | | | | L38; L42; L37 |
| 3010 | SAFVETVKG | L49 | VYIKNADI | L71; L8 | LFDESGEF | L62; L72; L68; |
| | | | | | | L63; L71; L1 |
| 3011 | SAGFPFNK | L7 | VYIKNADIV | L71; L72 | LFLMSFTVL | L72; L71; L8; L9; |
| | | | | | | L61; L62 |
| 3012 | SAGFSLWVYK | L7 | VYKQFDTYNL | L8; L9 | LFLTWICLL | L8; L9; L62; L72; |
| | | | | | | L71; L4 |
| 3013 | SAKPPPGD | L43 | VYLAVFDKNL | L9; L8 | LGAENSVAY | L26; L43; L27; |
| | | | | | | L12; L31; L59 |
| 3014 | SAKPPPGDQ | L43 | VYLPYPDPSR | L9; L15 | LHDELTGHML | L34; L35; L28; |
| | | | | | | L68; L63; L5 |
| 3015 | SALGKLQD | L65 | VYLPYPDPSRI | L9; L8 | LIMLIIFWF | L12; L26; L9; L52; |
| | | | | | | L60; L58 |
| 3016 | SALLAGTI | L47 | VYMPASWVMRI | L9; L8 | LIYSTAAL | L59; L61; L60; |
| | | | | | | L67; L43; L57 |
| 3017 | SALLEDEF | L59 | VYPVASPN | L72; L71 | LLAPLLSA | L3; L51; L50; L43; |
| | | | | | | L2; L23 |
| 3018 | SALVYDNKLK | L7 | VYRGTTTYK | L13; L6 | LLDRLNQL | L68; L1; L63; L5; |
| | | | | | | L26; L74 |
| 3019 | SAPTLVPQ | L57 | VYRGTTTYKL | L8; L9 | LLIGLAKRF | L12; L26; L11; |
| | | | | | | L43; L49; L9 |
| 3020 | SAPTLVPQEH | L57 | VYSDVENPHLM | L9; L8 | LLWPVTLAC | L6; L5; L4; L2; |
| | | | | | | L12; L43 |
| 3021 | SAQCFKMFYK | L7 | VYSRVKNLN | L9; L8 | LMWLIINLV | L47; L48; L5; L64; |
| | | | | | | L50; L4 |
| 3022 | SARIVYTA | L50 | VYSSANNCTF | L9; L8 | LNDNLLEIL | L68; L67; L62; |
| | | | | | | L63; L5; L34 |
| 3023 | SARIVYTAC | L43 | VYSTGSNV | L71; L72 | LPAADLDDF | L31; L49; L56; |
| | | | | | | L32; L22; L39 |
| 3024 | SASIVAGGI | L49 | VYYHKNNKS | L8; L9 | LPINVIVED | L50; L31; L32; |
| | | | | | | L49; L56; L47 |
| 3025 | SASKIITLKKR | L19 | VYYPDKVFRS | L8; L9 | LPQGFSAL | L22; L56; L39; |
| | | | | | | L47; L32; L31 |
| 3026 | SASTSAFV | L58 | VYYSQLMC | L71; L72 | LPQNAVVKI | L47; L50; L49; |
| | | | | | | L39; L32; L31 |
| 3027 | SAVLQSGF | L58 | VYYTSNPT | L71; L72 | LPRVFSAV | L47; L51; L50; |
| | | | | | | L22; L39; L23 |
| 3028 | SAVLQSGFR | L19 | WEIQQVVD | L37; L29 | LPSLATVAY | L31; L50; L49; |
| | | | | | | L22; L56; L51 |
| 3029 | SAYENFNQHEV | L67 | WESGVKDCV | L45; L42 | LPTEVLTEE | L31; L56; L50; |
| | | | | | | L32; L49; L51 |
| 3030 | SAYENFNQHEVL | L67 | WFFSNYLKRR | L17; L15 | LQSADAQSF | L26; L31; L27; |
| | | | | | | L34; L28; L58 |
| 3031 | SCGNFKVTK | L7 | WFLAYILFTR | L17; L15 | LRDGWEIVKF | L30; L34; L65; |
| | | | | | | L49; L63; L35 |
| 3032 | SCKRVLNV | L48 | WFVTQRNF | L71; L72 | LRVESSSKL | L30; L25; L66; |
| | | | | | | L35; L64; L28 |
| 3033 | SCLPFTINC | L7 | WIFGTTLDSK | L6; L7 | LSDRVVFVLW | L52; L53; L1; L54; |
| | | | | | | L18; L49 |
| 3034 | SDADSTLI | L33 | WLDDVVYCP | L5; L2 | LSDTLKNL | L68; L63; L1; L60; |
| | | | | | | L62; L74 |
| 3035 | SDDYIATN | L33 | WLKQLIKV | L3; L23 | LSLREVRTI | L55; L48; L53; |
| | | | | | | L47; L52; L65 |
| 3036 | SDEFSSNV | L33 | WLLLTILTSL | L4; L2 | LTLQQIEL | L55; L60; L53; |
| | | | | | | L59; L67; L61 |
| 3037 | SDEFSSNVA | L38 | WPLIVTALR | L21; L17 | LTLVYKVYY | L52; L1; L12; L18; |
| | | | | | | L14; L65 |
| 3038 | SDEVARDL | L33 | WPVTLACFVL | L32; L56 | LTQDHVDIL | L67; L69; L73; |
| | | | | | | L60; L61; L70 |
| 3039 | SDFVRATATI | L33 | WQLALSKGV | L24; L48 | LTWICLLQF | L53; L52; L59; |
| | | | | | | L16; L1; L18 |
| 3040 | SDGTGTIY | L65 | WRKAVFISPY | L66; L30 | LVFLFVAAI | L47; L20; L3; L50; |
| | | | | | | L59; L64 |
| 3041 | SDIEVTGD | L33 | WSFNPETNI | L24; L53 | LVGLMWLSY | L12; L1; L18; L43; |
| | | | | | | L6; L59 |
| 3042 | SDKFTDGV | L33 | WSLFFFLY | L1; L18 | LVIGFLFLTW | L10; L52; L12; |
| | | | | | | L16; L49; L6 |
| 3043 | SDLATNNL | L33 | WSMATYYL | L74; L55 | LVLIMLIIF | L52; L31; L59; |
| | | | | | | L12; L74; L53 |
| 3044 | SDLATNNLV | L33 | WSYSGQST | L43; L55 | LVLSVNPYV | L4; L5; L2; L47; |
| | | | | | | L13; L20 |
| 3045 | SDRDLYDKLQF | L65 | WTIEYPIIGD | L11; L10 | LVYCFLGY | L18; L59; L12; L1; |
| | | | | | | L26; L6 |
| 3046 | SDRVVFVLW | L52 | WTNAGDYIL | L32; L55 | LVYCFLGYF | L11; L58; L59; |
| | | | | | | L12; L10; L52 |
| 3047 | SDSPCESH | L33 | YAISAKNR | L17; L19 | LVYFLQSI | L47; L59; L24; |
| | | | | | | L48; L55; L25 |
| 3048 | SDVENPHL | L33 | YAISAKNRA | L50; L46 | LWPVTLACF | L62; L9; L57; L71; |
| | | | | | | L8; L72 |
| 3049 | SDVETKDV | L33 | YAISAKNRAR | L17; L19 | LYALVYFL | L62; L66; L72; |
| | | | | | | L71; L9; L64 |
| 3050 | SDVETKDVV | L37 | YASALWEIQ | L67; L49 | LYENAFLPF | L9; L8; L72; L71; |
| | | | | | | L62; L12 |
| 3051 | SDVKCTSV | L33 | YASQGLVA | L50; L61 | LYIDINGNL | L8; L9; L72; L71; |
| | | | | | | L62; L66 |
| 3052 | SDVKCTSVV | L33 | YCIDGALLTK | L7; L6 | LYIIKLIF | L71; L72; L9; L8; |
| | | | | | | L56; L23 |
| 3053 | SDVLLPLTQY | L29 | YDFAVSKGF | L33; L27 | LYSPIFLI | L9; L47; L8; L64; |
| | | | | | | L66; L62 |
| 3054 | SEAFLIGCN | L40 | YDLSVVNAR | L17; L19 | LYYQNNVF | L9; L72; L71; L8; |
| | | | | | | L26; L66 |
| 3055 | SEAGVCVS | L29 | YDYLVSTQ | L33; L48 | MATNYDLSV | L70; L69; L50; |
| | | | | | | L32; L73; L47 |
| 3056 | SEAKCWTETDL | L36 | YECLYRNRDV | L45; L38 | MAYITGGVV | L47; L50; L70; |
| | | | | | | L69; L61; L49 |
| 3057 | SECVLGQSK | L40 | YEDFLEYHDV | L38; L45 | MCDIRQLLF | L1; L18; L33; L49; |
| | | | | | | L62; L34 |
| 3058 | SEDAQGMDNLA | L38 | YEKLKPVLDW | L41; L40 | MEIDFLELAM | L46; L40; L41; |
| | | | | | | L36; L29; L42 |
| 3059 | SEDKRAKVTS | L42 | YELQTPFEIKL | L36; L41 | MFLARGIVF | L71; L72; L9; L8; |
| | | | | | | L12; L31 |
| 3060 | SEFDRDAAMQ | L40 | YEPLTQDHV | L45; L36 | MKIILFLAL | L67; L27; L61; |
| | | | | | | L44; L73; L59 |
| 3061 | SEFSSLPSYA | L46 | YERHSLSHF | L29; L58 | MSAPPAQYEL | L20; L67; L60; |
| | | | | | | L61; L53; L54 |
| 3062 | SEHDYQIG | L29 | YESLRPDTR | L33; L29 | MSYEDQDAL | L67; L55; L61; |
| | | | | | | L53; L60; L59 |
| 3063 | SEIIGYKAID | L42 | YFCTCYFGLF | L9; L62 | MYIFFASF | L72; L9; L71; L62; |
| | | | | | | L8; L59 |
| 3064 | SEKQVEQK | L29 | YFDKAGQKTY | L1; L12 | NAFLPFAM | L70; L59; L67; |
| | | | | | | L31; L50; L47 |
| 3065 | SEKSYELQT | L42 | YFGLFCLL | L62; L67 | NCDTLKEIL | L68; L34; L63; |
| | | | | | | L67; L62; L35 |
| 3066 | SEMVMCGGSL | L36 | YFIKGLNN | L71; L72 | NEEIAIILA | L42; L38; L46; |
| | | | | | | L37; L40; L29 |
| 3067 | SEPVLKGVKLHY | L41 | YFITDAQTG | L71; L72 | NEFACVVA | L46; L29; L25; |
| | | | | | | L37; L42; L38 |
| 3068 | SEVGPEHS | L29 | YFNKKDWY | L71; L72 | NEKTHVQL | L23; L25; L37; |
| | | | | | | L29; L33; L45 |
| 3069 | SEVVLKKLKK | L41 | YFPLQSYG | L62; L71 | NFKDQVIL | L62; L71; L72; |
| | | | | | | L67; L66; L23 |
| 3070 | SEYDYVIFTQTT | L41 | YFTSDYYQLY | L12; L14 | NFNKDFYDF | L8; L9; L49; L12; |
| | | | | | | L62; L72 |
| 3071 | SEYKGPIT | L29 | YFVLTSHTVM | L71; L72 | NFYEPQII | L48; L62; L25; |
| | | | | | | L71; L72; L47 |
| 3072 | SEYTGNYQ | L45 | YFYTSKTT | L71; L72 | NGDSEVVL | L63; L68; L62; |
| | | | | | | L67; L35; L28 |
| 3073 | SFDLGDELG | L62 | YGRSGETL | L23; L59 | NIDYDCVSF | L68; L63; L62; |
| | | | | | | L49; L34; L5 |
| 3074 | SFDNFKFV | L62 | YHKNNKSWM | L28; L58 | NKGEDIQLL | L64; L34; L44; |
| | | | | | | L66; L35; L27 |
| 3075 | SFDNFKFVC | L62 | YHNESGLKTIL | L28; L34 | NLDSCKRVL | L23; L63; L68; L5; |
| | | | | | | L62; L32 |
| 3076 | SFDVLKSE | L62 | YHYQECVRG | L34; L28 | NLDYIINL | L74; L62; L68; L5; |
| | | | | | | L63; L1 |
| 3077 | SFDVLKSED | L62 | YIDIGNYT | L1; L68 | NLYDKLVSS | L23; L3; L43; L4; |
| | | | | | | L2; L5 |
| 3078 | SFGPLVRKIF | L9 | YIICISTKH | L11; L43 | NMMVTNNTF | L34; L9; L8; L71; |
| | | | | | | L72; L26 |
| 3079 | SFKEELDKYF | L9 | YIKWPWYIW | L43; L16 | NNELSPVAL | L68; L35; L67; |
| | | | | | | L62; L28; L25 |
| 3080 | SFLGRYMSA | L71 | YILFTRFF | L60; L59 | NPTIQKDVL | L23; L39; L32; |
| | | | | | | L31; L56; L22 |
| 3081 | SFLPGVYSVIY | L12 | YIWLGFIAG | L67; L59 | NRQFHQKLL | L64; L66; L35; |
| | | | | | | L30; L34; L25 |
| 3082 | SFVSEETGTLI | L8 | YKGPITDVFY | L27; L12 | NRYFRLTL | L25; L35; L66; |
| | | | | | | L65; L64; L28 |
| 3083 | SFYVYSRVKNL | L71 | YKHWPQIAQ | L27; L43 | NSASFSTF | L70; L54; L55; |
| | | | | | | L59; L58; L53 |
| 3084 | SGARSKQRR | L19 | YKLDGVVC | L27; L44 | NSHEGKTFY | L43; L1; L14; L18; |
| | | | | | | L58; L26 |
| 3085 | SGETLGVLV | L63 | YKLDGVVCT | L44; L27 | NVAFNVVNK | L19; L7; L6; L13; |
| | | | | | | L17; L20 |
| 3086 | SGFAAYSR | L15 | YKSVNITF | L27; L66 | NVYADSFVIR | L19; L17; L7; L21; |
| | | | | | | L15; L6 |
| 3087 | SGFAAYSRYR | L15 | YLGGMSYY | L1; L43 | NYYKKDNSY | L71; L72; L66; |
| | | | | | | L14; L12; L8 |
| 3088 | SGFRKMAF | L29 | YLKHGGGVA | L51; L3 | PANSIVCRF | L58; L49; L54; |
| | | | | | | L43; L70; L69 |
| 3089 | SGINASVV | L48 | YLKRRVVFN | L3; L23 | PVYSFLPGV | L3; L20; L4; L11; |
| | | | | | | L5; L2 |
| 3090 | SGNLLLDKR | L15 | YLPQNAVV | L57; L5 | PYNMRVIHF | L9; L8; L72; L71; |
| | | | | | | L66; L62 |
| 3091 | SGVTFQSAV | L48 | YLPQNAVVK | L57; L6 | QALLKTVQF | L33; L52; L31; |
| | | | | | | L53; L27; L59 |
| 3092 | SGVTFQSAVKR | L19 | YLPYPDPSR | L5; L57 | QEGVLTAVV | L42; L45; L38; |
| | | | | | | L37; L36; L40 |
| 3093 | SGVVTTVMF | L49 | YLPYPDPSRI | L5; L57 | QELYSPIFL | L36; L41; L40; |
| | | | | | | L37; L29; L45 |
| 3094 | SGWTAGAAA | L51 | YLQPRTFLLK | L6; L7 | QESFGGASC | L40; L42; L38; |
| | | | | | | L36; L41; L45 |
| 3095 | SGWTAGAAAY | L14 | YLYFIKGLNNL | L2; L4 | QEVFAQVKQ | L40; L41; L36; |
| | | | | | | L38; L37; L46 |
| 3096 | SGWTAGAAAYY | L14 | YMLTYNKV | L48; L47 | QLIKVTLVFL | L2; L4; L3; L5; |
| | | | | | | L74; L20 |
| 3097 | SHEGKTFY | L1 | YMPYFFTLLL | L57; L5 | QPGQTFSVL | L22; L39; L56; |
| | | | | | | L32; L65; L31 |
| 3098 | SHFAIGLA | L28 | YNVTQAFGR | L19; L17 | QPYRVVVLSF | L31; L22; L49; |
| | | | | | | L47; L39; L32 |
| 3099 | SHGKQVVSD | L35 | YNYEPLTQD | L46; L43 | QQGEVPVSI | L24; L44; L34; |
| | | | | | | L48; L35; L28 |
| 3100 | SHKPPISFP | L28 | YPANSIVCRF | L49; L31 | QSINFVRII | L55; L70; L69; |
| | | | | | | L64; L48; L73 |
| 3101 | SHKPPISFPL | L28 | YPDKVFRSSVL | L32; L22 | QSTQLGIEF | L53; L55; L52; |
| | | | | | | L54; L58; L26 |
| 3102 | SHLLLVAAGL | L40 | YPGQGLNGY | L49; L31 | QYGRSGETL | L9; L72; L8; L71; |
| | | | | | | L66; L34 |
| 3103 | SHNIALIWNV | L28 | YPIIGDELK | L49; L32 | QYLNTLTL | L72; L71; L9; L8; |
| | | | | | | L66; L48 |
| 3104 | SHQSDIEVTG | L34 | YPKCDRAM | L39; L32 | RAFGEYSHV | L58; L69; L24; |
| | | | | | | L70; L13; L73 |
| 3105 | SHSQLGGLHLLI | L34 | YPLECIKD | L50; L47 | RAGKASCTL | L53; L54; L44; |
| | | | | | | L56; L58; L61 |
| 3106 | SHTVMPLSAPTL | L28 | YPNASFDNFKF | L31; L49 | RDLICAQKF | L33; L55; L53; L8; |
| | | | | | | L37; L54 |
| 3107 | SHVVAFNTLLF | L34 | YPPDEDEEE | L49; L32 | RDLYDKLQF | L33; L65; L53; |
| | | | | | | L16; L8; L52 |
| 3108 | SIAATRGATV | L3 | YPQVNGLTS | L50; L49 | REAVGTNLP | L38; L42; L46; |
| | | | | | | L45; L36; L37 |
| 3109 | SIDAFKLNIKL | L68 | YPSARIVY | L31; L22 | REEAIRHV | L45; L37; L33; |
| | | | | | | L38; L48; L42 |
| 3110 | SIFSRTLETA | L3 | YPSARIVYTA | L50; L51 | REETGLLMP | L38; L42; L46; |
| | | | | | | L36; L37; L45 |
| 3111 | SIIKTIQPRV | L48 | YPTLNISDEF | L31; L49 | REFLTRNP | L33; L46; L38; |
| | | | | | | L37; L45; L48 |
| 3112 | SIISNEKQEI | L24 | YQHEETIYN | L26; L24 | REHEHEIA | L38; L46; L37; |
| | | | | | | L42; L29; L33 |
| 3113 | SIKWADNNCY | L14 | YQLRARSV | L48; L25 | RENNRVVI | L37; L45; L36; |
| | | | | | | L33; L48; L29 |
| 3114 | SINFVRII | L48 | YQTSNFRV | L24; L48 | RFFYVLGL | L71; L72; L65; |
| | | | | | | L33; L48; L62 |
| 3115 | SINFVRIIM | L39 | YRAFDIYND | L65; L30 | RFLYIIKL | L8; L33; L72; L71; |
| | | | | | | L62; L48 |
| 3116 | SIPCSVCL | L57 | YRARAGEAA | L35; L46 | RFPNITNL | L72; L62; L71; |
| | | | | | | L57; L8; L9 |
| 3117 | SIVRFPNI | L48 | YRIGNYKLN | L30; L64 | RIAGHHLGR | L21; L15; L6; L19; |
| | | | | | | L7; L17 |
| 3118 | SIWNLDYII | L24 | YRLYLDAYNM | L30; L66 | RISNCVADY | L14; L18; L26; |
| | | | | | | L16; L6; L12 |
| 3119 | SKFPLKLR | L15 | YRRATRRI | L48; L64 | RLQSLQTYV | L2; L4; L24; L5; |
| | | | | | | L3; L13 |
| 3120 | SKFPLKLRG | L44 | YRSLPGVF | L66; L35 | RLSFKELLV | L24; L73; L2; L18; |
| | | | | | | L4; L3 |
| 3121 | SKFYGGWHN | L27 | YRSLPGVFC | L35; L30 | RLSFKELLVY | L18; L6; L12; L14; |
| | | | | | | L16; L26 |
| 3122 | SKFYGGWHNM | L27 | YSDVENPH | L1; L68 | RLTLGVYDY | L14; L26; L18; |
| | | | | | | L16; L12; L27 |
| 3123 | SKFYGGWHNML | L44 | YSDVENPHLMG | L1; L18 | RMYIFFASFY | L14; L27; L18; |
| | | | | | | L26; L6; L12 |
| 3124 | SKGRLIIRE | L44 | YSFLPGVYSV | L50; L20 | RNAGIVGVL | L44; L65; L73; |
| | | | | | | L56; L39; L69 |
| 3125 | SKHTPINL | L66 | YSGVVTTVMF | L53; L43 | RPDTRYVL | L39; L22; L56; |
| | | | | | | L32; L65; L63 |
| 3126 | SKILGLPTQ | L27 | YSHLLLVA | L50; L59 | RPQIGVVREF | L39; L56; L22; |
| | | | | | | L49; L31; L65 |
| 3127 | SKLIEYTDF | L27 | YSSANNCTFEY | L1; L18 | RSAAKKNNL | L53; L73; L54; |
| | | | | | | L44; L56; L16 |
| 3128 | SKLINIIIWF | L27 | YSTAALGV | L73; L48 | RSEKSYEL | L55; L54; L63; |
| | | | | | | L65; L18; L53 |
| 3129 | SKLINIIIWFL | L44 | YSTGSNVFQTR | L17; L19 | RSVSPKLFI | L73; L55; L53; |
| | | | | | | L54; L24; L65 |
| 3130 | SKLWAQCVQL | L44 | YSVLYNSASF | L43; L60 | RTATKAYNV | L73; L13; L18; |
| | | | | | | L20; L53; L21 |
| 3131 | SKQRRPQGL | L44 | YSYATHSD | L48; L43 | RVKNLNSSR | L15; L21; L13; |
| | | | | | | L17; L16; L14 |
| 3132 | SKRSFIEDLL | L44 | YSYATHSDKF | L54; L58 | RVLSNLNL | L54; L74; L56; |
| | | | | | | L16; L73; L55 |
| 3133 | SKRVDFCGK | L13 | YTACSHAAV | L20; L70 | RVQPTESIVRF | L54; L16; L52; |
| | | | | | | L53; L26; L14 |
| 3134 | SKSPIQYI | L64 | YTFEKGDY | L1; L14 | RVVISSDVL | L53; L54; L65; |
| | | | | | | L56; L26; L44 |
| 3135 | SKSPIQYID | L44 | YTKVDGVDV | L58; L70 | RYMNSQGLL | L8; L9; L72; L71; |
| | | | | | | L14; L62 |
| 3136 | SKTPEEHF | L27 | YTMADLVYAL | L20; L67 | SAEVAVKMF | L63; L58; L49; |
| | | | | | | L68; L70; L31 |
| 3137 | SKVGGNYNYL | L44 | YTNSFTRGVYY | L1; L12 | SAIGKIQDSL | L67; L61; L32; |
| | | | | | | L10; L58; L60 |
| 3138 | SKVVKVTIDY | L27 | YTPHTVLQAV | L57; L5 | SAKPPPGDQF | L43; L58; L26; |
| | | | | | | L52; L11; L53 |
| 3139 | SLAATVRLQA | L3 | YTQLCQYL | L60; L70 | SALGKLQDV | L58; L24; L69; |
| | | | | | | L70; L4; L64 |
| 3140 | SLAGSYKDW | L10 | YTVEEAKTVLK | L7; L19 | SALNHTKKW | L52; L69; L49; |
| | | | | | | L54; L10; L70 |
| 3141 | SLATVAYF | L74 | YTVSCLPF | L59; L60 | SANLAATKM | L58; L63; L31; |
| | | | | | | L68; L32; L70 |
| 3142 | SLDNVLST | L68 | YVDNNFCGPDG | L1; L18 | SDIDITFL | L74; L37; L33; |
| | | | Y | | | L65; L29; L25 |
| 3143 | SLEIPRRNV | L13 | YVDNSSLT | L1; L63 | SEETGTLIV | L45; L38; L42; |
| | | | | | | L37; L36; L46 |
| 3144 | SLENVAFNVV | L5 | YVDTPNNT | L68; L1 | SEIIGYKA | L38; L46; L42; |
| | | | | | | L37; L29; L45 |
| 3145 | SLKEGQIN | L43 | YVFIKRSD | L65; L23 | SEYCRHGTC | L25; L33; L46; |
| | | | | | | L45; L37; L38 |
| 3146 | SLKVPATVS | L43 | YVFTGYRV | L20; L48 | SEYKGPITDV | L45; L37; L36; |
| | | | | | | L42; L46; L24 |
| 3147 | SLLLCRMNSR | L21 | YVFTGYRVT | L10; L69 | SFDLGDEL | L62; L68; L67; |
| | | | | | | L71; L63; L72 |
| 3148 | SLLMPILTLT | L6 | YVGYLQPRTF | L65; L55 | SFIEDLLF | L8; L9; L62; L72; |
| | | | | | | L71; L12 |
| 3149 | SLLMPILTLTR | L21 | YVKPGGTSSG | L43; L10 | SFKEELDKY | L12; L14; L13; |
| | | | | | | L11; L10; L26 |
| 3150 | SLLSKGRL | L74 | YVLGLAAI | L59; L67 | SFKELLVYA | L13; L3; L51; L42; |
| | | | | | | L17; L15 |
| 3151 | SLLSKGRLII | L16 | YVRNLQHR | L17; L15 | SFSASTSAF | L72; L71; L9; L62; |
| | | | | | | L12; L8 |
| 3152 | SLNGVTLIG | L6 | YVTQQLIRA | L50; L46 | SGLDSLDTY | L14; L27; L12; |
| | | | | | | L26; L16; L52 |
| 3153 | SLPFGWLI | L57 | YWVPRASAN | L71; L61 | SIIKTIQPR | L19; L21; L15; L7; |
| | | | | | | L17; L11 |
| 3154 | SLPFGWLIVGV | L5 | YWVPRASANI | L9; L8 | SIINNTVY | L26; L43; L58; |
| | | | | | | L29; L59; L14 |
| 3155 | SLPSYAAFAT | L57 | YYHKNNKSWM | L71; L72 | SIKNFKSVLY | L12; L43; L14; |
| | | | | | | L13; L58; L26 |
| 3156 | SLPVLQVR | L57 | YYKLGASQ | L71; L72 | SINFVRIIMR | L21; L19; L15; L7; |
| | | | | | | L17; L6 |
| 3157 | SLPVLQVRD | L5 | YYPDKVFRSSV | L71; L72 | SLAATVRL | L74; L56; L4; L2; |
| | | | | | | L44; L3 |
| 3158 | SLQTYVTQQ | L4 | YYPDKVFRSSVL | L71; L72 | SLFDMSKF | L26; L11; L27; |
| | | | | | | L16; L10; L43 |
| 3159 | SLQTYVTQQL | L4 | YYQLYSTQ | L71; L72 | SLNVAKSEF | L43; L26; L62; |
| | | | | | | L16; L57; L72 |
| 3160 | SLRCGACIRR | L21 | YYSDSPCESH | L72; L71 | SLPFGWLIV | L57; L24; L5; L3; |
| | | | | | | L2; L64 |
| 3161 | SLRVCVDTVR | L21 | YYTSNPTTFHL | L8; L9 | SLREVRTIKV | L3; L2; L13; L5; |
| | | | | | | L4; L24 |
| 3162 | SLSEQLRKQI | L3 | YYVWKSYV | L71; L72 | SLSHRFYRL | L4; L23; L5; L2; |
| | | | | | | L74; L3 |
| 3163 | SLSGFKLK | L6 | AAGLEAPFLY | L12; L18; | SLVKPSFYVY | L26; L12; L27; |
| | | | | L14 | | L14; L16; L10 |
| 3164 | SLSGFKLKD | L24 | AAVINGDRW | L54; L52; | SPRRARSV | L48; L51; L39; |
| | | | | L49 | | L22; L23; L47 |
| 3165 | SLSSTASALGK | L6 | AAVYRINWI | L69; L70; | SPRWYFYYL | L39; L22; L32; |
| | | | | L64 | | L56; L65; L13 |
| 3166 | SLVVRCSF | L43 | ACFVLAAVYR | L15; L21; | SPVALRQM | L56; L39; L22; |
| | | | | L7 | | L32; L51; L31 |
| 3167 | SLWVYKQFDTY | L18 | ACPLIAAV | L57; L33; | SQDLSVVSK | L7; L68; L35; L27; |
| | | | | L48 | | L28; L63 |
| 3168 | SMATNYDLSV | L3 | ACWHHSIGF | L33; L27; | SRTLSYYKL | L35; L30; L25; |
| | | | | L26 | | L66; L34; L64 |
| 3169 | SMDNSPNLA | L62 | ADKYVRNL | L33; L65; | SRYWEPEFY | L30; L66; L65; |
| | | | | L37 | | L64; L12; L14 |
| 3170 | SMDNSPNLAW | L68 | ADSNGTITV | L33; L37; | SSPDDQIGYY | L11; L14; L18; |
| | | | | L24 | | L43; L1; L10 |
| 3171 | SMKYFVKI | L48 | AEETRKLMP | L38; L42; | STASALGKL | L10; L20; L11; |
| | | | | L46 | | L58; L53; L73 |
| 3172 | SMMGFKMNYQV | L2 | AEGSRGGSQA | L46; L42; | STFEEAAL | L20; L67; L59; |
| | | | | L38 | | L28; L61; L60 |
| 3173 | SMQGAVDINK | L7 | AEILLIIMRT | L41; L40; | STQLGIEF | L59; L72; L60; |
| | | | | L45 | | L71; L53; L26 |
| 3174 | SNGTHWFVTQR | L19 | AEIRASANLAA | L38; L42; | STQWSLFFF | L53; L58; L7; L52; |
| | | | | L46 | | L12; L9 |
| 3175 | SNGTITVEEL | L65 | AEIVDTVSALV | L38; L40; | SVLLFLAF | L59; L33; L23; |
| | | | | L36 | | L29; L12; L60 |
| 3176 | SNHDLYCQV | L13 | AELEGIQYGR | L40; L15; | SVLYNSASF | L12; L16; L10; |
| | | | | L41 | | L26; L11; L52 |
| 3177 | SNLKPFER | L17 | AENVTGLF | L33; L29; | SYATHSDKF | L9; L8; L71; L72; |
| | | | | L40 | | L66; L12 |
| 3178 | SNNLDSKV | L48 | AENVTGLFKD | L42; L40; | SYFTEQPIDL | L72; L71; L9; L65; |
| | | | | L41 | | L66; L8 |
| 3179 | SNPTTFHL | L57 | AEVAVKMFDA | L42; L46; | SYFTSDYY | L71; L72; L14; |
| | | | | L38 | | L12; L65; L66 |
| 3180 | SNSGSDVL | L65 | AFGEYSHV | L62; L72; | SYFTSDYYQL | L8; L9; L71; L72; |
| | | | | L71 | | L66; L65 |
| 3181 | SNVANYQKV | L73 | AFGEYSHVV | L72; L71; | SYGADLKSF | L9; L72; L8; L71; |
| | | | | L42 | | L66; L10 |
| 3182 | SNYLKRRVVF | L27 | AFGEYSHVVAF | L71; L72; | TAPHGHVM | L57; L63; L70; |
| | | | | L9 | | L32; L59; L66 |
| 3183 | SNYSGVVTTV | L3 | AFGLVAEW | L71; L72; | TAVLRQWL | L70; L60; L67; |
| | | | | L62 | | L59; L74; L61 |
| 3184 | SPCESHGKQVV | L39 | AFHQECSL | L71; L72; | TEAFEKMVSL | L36; L37; L40; |
| | | | | L62 | | L41; L38; L45 |
| 3185 | SPFELEDFIP | L32 | AFLCLFLL | L8; L71; | TESKPSVEQ | L38; L36; L45; |
| | | | | L72 | | L46; L37; L42 |
| 3186 | SPFELEDFIPM | L31 | AFLCLFLLP | L12; L42; | TEVLTEEVVL | L36; L37; L40; |
| | | | | L8 | | L41; L44; L65 |
| 3187 | SPFVMMSAPPA | L50 | AFNVVNKGHF | L9; L62; | TEVPVAIHAD | L40; L37; L38; |
| | | | | 7L2 | | L41; L29; L36 |
| 3188 | SPISEHDY | L49 | AFQTVKPGNF | L72; L9; | TFDNLKTLL | L62; L68; L63; L8; |
| | | | | 7L1 | | L34; L9 |
| 3189 | SPNECNQM | L39 | AFVNLKQLPF | L12; L71; | TFEYVSQPF | L62; L72; L9; L8; |
| | | | | L72 | | L71; L12 |
| 3190 | SPNFSKLINII | L39 | AFVVFLLV | L48; L62; | TIAFGGCVF | L43; L26; L10; |
| | | | | L73 | | L58; L28; L11 |
| 3191 | SPRRARSVAS | L22 | AFVVFLLVTL | L71; L72; | TIYSLLLCR | L17; L6; L19; L15; |
| | | | | L8 | | L7; L21 |
| 3192 | SPTKLNDLCF | L49 | AGFSLWVYK | L7; L6; | TLAILTAL | L23; L3; L25; L59; |
| | | | | 3L1 | | L4; L74 |
| 3193 | SPYNSQNA | L51 | AGLPYGANK | L7; L13; | TLIGDCATV | L3; L2; L4; L24; |
| | | | | 6L | | L5; L20 |
| 3194 | SQAWQPGV | L48 | AHFPREGV | L28; L33; | TLIVNSVLLF | L12; L9; L6; L26; |
| | | | | L25 | | L8; L16 |
| 3195 | SQAWQPGVAM | L28 | AHFPREGVFV | L28; L34; | TLKSFTVEK | L13; L43; L6; L21; |
| | | | | L35 | | L17; L7 |
| 3196 | SQDLSVVS | L68 | AHGFELTSM | L28; L34; | TLQAIASEF | L26; L72; L12; |
| | | | | L35 | | L16; L9; L14 |
| 3197 | SQGLVASI | L48 | AIDGGVTRD | L63; L18; | TLQCIMLVY | L26; L14; L12; |
| | | | | L68 | | L18; L6; L16 |
| 3198 | SQGSEYDYV | L24 | AIGLALYY | L18; L1; | TLVPQEHYV | L2; L5; L4; L3; |
| | | | | L12 | | L20; L64 |
| 3199 | SQHTMLVKQ | L24 | AIHADQLTP | L46; L42; | TPCSFGGVSV | L51; L50; L39; |
| | | | | L38 | | L22; L32; L56 |
| 3200 | SQLMCQPI | L48 | AIILASFSA | L38; L42; | TPKDHIGTR | L17; L51; L39; |
| | | | | L46 | | L49; L15; L19 |
| 3201 | SQLMCQPIL | L44 | AILTALRL | L74; L73; | TPKYKFVRI | L39; L23; L47; |
| | | | | L60 | | L49; L51; L32 |
| 3202 | SQLMCQPILL | L44 | AISAKNRAR | L21; L15; | TQDHVDIL | L63; L35; L68; |
| | | | | L7 | | L62; L28; L34 |
| 3203 | SQMEIDFL | L44 | AISMWALII | L73; L24; | TQWSLFFFL | L44; L24; L34; L4; |
| | | | | L69 | | L35; L8 |
| 3204 | SQNAVASKIL | L44 | AIVVTCLAYY | L14; L12; | TQYEYGTED | L27; L43; L24; |
| | | | | L18 | | L26; L48; L65 |
| 3205 | SQPFLMDL | L57 | AKPPPGDQF | L27; L66; | TRVLSNLNL | L35; L25; L34; |
| | | | | L9 | | L30; L64; L66 |
| 3206 | SQQTVGQQD | L24 | AKSHNIAL | L44; L66; | TSHKLVLSV | L73; L70; L24; |
| | | | | L35 | | L69; L48; L64 |
| 3207 | SQWLTNIFGTVY | L27 | AKYTQLCQY | L27; L14; | TSMKYFVKI | L73; L55; L48; |
| | | | | L26 | | L24; L53; L20 |
| 3208 | SQYSLRLID | L24 | ALAPNMMV | L2; L3; | TTAYANSVF | L53; L52; L10; |
| | | | | L4 | | L54; L70; L58 |
| 3209 | SRGGSQAS | L65 | ALAYYNTTK | L6; L7; | TTDPSFLGRY | L1; L18; L14; L10; |
| | | | | L21 | | L11; L12 |
| 3210 | SRGGSQASS | L65 | ALCTFLLNK | L6; L7; | TTITVNVL | L70; L55; L67; |
| | | | | L13 | | L28; L69; L35 |
| 3211 | SRGGSQASSR | L30 | ALDISASI | L68; L63; | TTIVNGVRR | L19; L17; L15; |
| | | | | L62 | | L21; L7; L11 |
| 3212 | SRIGMEVT | L35 | ALGVLMSNL | L4; L3; | TTLEETKFL | L53; L55; L73; L4; |
| | | | | L74 | | L10; L60 |
| 3213 | SRIIPARARV | L30 | ALILAYCNK | L13; L7; | TVLPPLLTD | L6; L7; L51; L16; |
| | | | | L6 | | L4; L12 |
| 3214 | SRIKASMPTTI | L34 | ALKYLPIDK | L13; L6; | TVREVLSDR | L15; L17; L19; |
| | | | | L7 | | L21; L11; L6 |
| 3215 | SRILGAGCFV | L30 | ALLADKFPVL | L2; L4; | TYASQGLVA | L46; L8; L51; L9; |
| | | | | L5 | | L72; L38 |
| 3216 | SRLDKVEAEV | L30 | ALLEDEFTP | L2; L4; | TYNLWNTF | L62; L9; L72; L8; |
| | | | | L16 | | L71; L33 |
| 3217 | SRLSFKELLV | L30 | ALLKTVQFC | L4; L24; | VADYSVLYN | L68; L67; L63; L1; |
| | | | | 2L | | L74; L18 |
| 3218 | SRLSFKELLVY | L30 | ALLTLQQIEL | L4; L2; | VAFELWAKR | L19; L17; L15; |
| | | | | L44 | | L21; L7; L69 |
| 3219 | SRNLQEFKP | L30 | ALNLGETF | L26; L27; | VAGDSGFAAY | L59; L14; L12; |
| | | | | L23 | | L31; L43; L18 |
| 3220 | SRNLQEFKPR | L30 | ALNNIINNAR | L21; L15; | VAGGIVAI | L67; L70; L47; |
| | | | | L6 | | L68; L74; L69 |
| 3221 | SRNSSRNST | L30 | ALQDAYYRA | L2; L4; | VAIHADQL | L67; L74; L60; |
| | | | | L5 | | L61; L70; L59 |
| 3222 | SRNSTPGSS | L30 | ALVYDNKLK | L7; L6; | VDDPCPIHF | L62; L63; L74; |
| | | | | L13 | | L33; L68; L9 |
| 3223 | SRNSTPGSSR | L30 | AMQVESDDY | L14; L26; | VEAEVQIDRL | L36; L41; L40; |
| | | | | L18 | | L45; L37; L29 |
| 3224 | SRNYIAQVDV | L30 | AMRPNFTIK | L6; L13; | VEVEKGVL | L29; L37; L36; |
| | | | | L7 | | L45; L33; L25 |
| 3225 | SRQRLTKY | L66 | ANDPVGFTLK | L7; L6; | VEVEKGVLP | L38; L46; L42; |
| | | | | L18 | | L45; L36; L37 |
| 3226 | SRQRLTKYTM | L30 | ANNAAIVL | L73; L65; | VEYCPIFFI | L45; L37; L36; |
| | | | | L71 | | L47; L41; L40 |
| 3227 | SRVKNLNSS | L30 | APAHISTI | L47; L22; | VFAFPFTIY | L12; L72; L26; |
| | | | | L39 | | L71; L9; L31 |
| 3228 | SRVKNLNSSR | L30 | APHGVVFLHV | L51; L50; | VFITLCFTL | L8; L9; L72; L71; |
| | | | | L22 | | L62; L67 |
| 3229 | SRVLGLKT | L25 | APLVGTPV | L22; L51; | VFLLVTLAI | L71; L72; L8; L9; |
| | | | | L50 | | L84; L47 |
| 3230 | SRVLGLKTLA | L30 | APLVGTPVC | L22; L51; | VFLVLLPLV | L9; L47; L4; L48; |
| | | | | L31 | | L62; L8 |
| 3231 | SRYWEPEFYE | L30 | APTLVPQEH | L56; L22; | VFPPTSFGPL | L72; L9; L57; L71; |
| | | | | L39 | | L8; L62 |
| 3232 | SRYWEPEFYEA | L30 | AQALNTLVK | L7; L6; | VFVLWAHGF | L9; L8; L62; L72; |
| | | | | L27 | | L71; L12 |
| 3233 | SRYWEPEFYEAM | L30 | AQDGNAAI | L68; L63; | VGMQKYSTL | L23; L25; L57; |
| | | | | L35 | | L61; L8; L44 |
| 3234 | SSAINRPQI | L48 | AQKFNGLTVL | L44; L26; | VGTNLPLQL | L73; L69; L64; |
| | | | | L27 | | L44; L61; L67 |
| 3235 | SSDNIALLVQ | L18 | AQPCSDKAY | L26; L27; | VIGFLFLTW | L12; L16; L67; L9; |
| | | | | L14 | | L73; L52 |
| 3236 | SSDVLVNN | L68 | AQSFLNGF | L26; L33; | VLCNSQTSL | L57; L2; L5; L68; |
| | | | | L27 | | L3; L4 |
| 3237 | SSEAFLIGC | L18 | AQVLSEMVM | L28; L27; | VLPFNDGVY | L12; L26; L14; |
| | | | | L44 | | L57; L18; L1 |
| 3238 | SSEAFLIGCNY | L1 | ARDLICAQKF | L30; L34; | VLYYQNNVF | L26; L16; L27; L9; |
| | | | | L35 | | L8; L12 |
| 3239 | SSEIIGYK | L1 | ARKSAPLIEL | L66; L30; | VPANSTVLSF | L22; L31; L49; |
| | | | | L56 | | L39; L56; L9 |
| 3240 | SSEIIGYKA | L42 | ARLYYDSMSY | L30; L66; | VPGLPGTIL | L22; L39; L56; |
| | | | | L65 | | L31; L51; L47 |
| 3241 | SSGDATTA | L65 | ARSVSPKL | L66; L35; | VPLHGTIL | L56; L47; L22; |
| | | | | L28 | | L23; L39; L31 |
| 3242 | SSGVVNPV | L48 | ARTAPHGHVM | L30; L66; | VQAGNVQLR | L21; L15; L19; |
| | | | | L35 | | L24; L17; L7 |
| 3243 | SSGVVNPVM | L70 | ARTVAGVSI | L35; L30; | VQTIEVNSF | L26; L27; L9; L34; |
| | | | | L34 | | L8; L16 |
| 3244 | SSGWTAGAAAY | L14 | ARVECFDKF | L30; L66; | VRQCSGVTF | L66; L34; L30; |
| | | | | L34 | | L35; L9; L72 |
| 3245 | SSIVITSG | L43 | ASANLAATK | L7; L19; | VSEETGTL | L63; L68; L1; L60; |
| | | | | L13 | | L55; L62 |
| 3246 | SSIVITSGD | L43 | ASDTYACW | L54; L18; | VSEETGTLI | L63; L1; L18; L68; |
| | | | | L1 | | L55; L48 |
| 3247 | SSKCVCSVI | L70 | ASEFSSLPSY | L18; L1; | VSFLAHIQW | L52; L53; L54; |
| | | | | L14 | | L70; L69; L16 |
| 3248 | SSKTPEEH | L43 | ASFNYLKSP | L46; L69; | VSLLSVLL | L74; L55; L60; |
| | | | | L43 | | L53; L73; L48 |
| 3249 | SSNFGAISS | L43 | ASFRLFAR | L15; L21; | VSTGYHFREL | L60; L73; L55; |
| | | | | L7 | | L61; L59; L70 |
| 3250 | SSNVANYQK | L7 | ASFSASTSA | L46; L51; | VSTIQRKY | L55; L48; L52; |
| | | | | L43 | | L54; L14; L1 |
| 3251 | SSPDDQIGYYR | L15 | ASKIITLKK | L13; L7; | VTFFIYNKI | L20; L55; L53; |
| | | | | L6 | | L24; L70; L16 |
| 3252 | SSQAWQPGV | L48 | ASLKELLQN | L7; L73; | VTFGDDTVI | L53; L52; L70; |
| | | | L3 | 5 | | L20; L55; L16 |
| 3253 | SSQGSEYD | L65 | ASRELKVTFF | L52; L53; | VTHSKGLYR | L15; L21; L17; L7; |
| | | | | L43 | | L6; L19 |
| 3254 | SSRVPDLL | L74 | ATNVVIKV | L73; L48; | VTNNTFTL | L70; L60; L55; |
| | | | | L70 | | L54; L53; L73 |
| 3255 | SSSEAFLI | L55 | ATNVVIKVC | L73; L52; | VTNNTFTLK | L7; L6; L13; L21; |
| | | | | L70 | | L19; L15 |
| 3256 | SSSEAFLIG | L73 | ATTRQVVNV | L73; L20; | VTWFHAIHV | L73; L20; L13; |
| | | | | L13 | | L69; L70; L63 |
| 3257 | SSSGWTAGAAAY | L14 | AVDAAKAY | L18; L1; | VVIKVCEF | L58; L74; L43; |
| | | | | L14 | | L26; L59; L54 |
| 3258 | SSSKTPEEHF | L53 | AVFDKNLYDK | L7; L6; | VVIKVCEFQF | L8; L53; L12; L52; |
| | | | | L13 | | L26; L54 |
| 3259 | SSSRSRNSSR | L19 | AVFQSASK | L7; L13; | VVTTFDSEY | L26; L14; L12; |
| | | | | L6 | | L18; L58; L52 |
| 3260 | SSTCMMCYK | L7 | AVIKTLQPV | L24; L3; | VVVLSFEL | L60; L59; L67; |
| | | | | L5 | | L68; L74; L61 |
| 3261 | SSTFNVPMEK | L7 | AVKMFDAYV | L13; L3; | VWKSYVHVV | L70; L3; L69; L39; |
| | | | | L58 | | L58; L51 |
| 3262 | SSVLHSTQ | L48 | AVLDMCASLK | L6; L7; | VYMPASWVM | L71; L66; L9; L72; |
| | | | | L13 | | L8; L62 |
| 3263 | SSVLHSTQD | L65 | AVPYNMRVI | L64; L57; | VYSFLPGVY | L66; L14; L12; |
| | | | | L10 | | L72; L9; L71 |
| 3264 | SSVLHSTQDLF | L52 | AVRDPQTLEI | L43; L10; | VYYPDKVF | L9; L72; L66; L71; |
| | | | | L6 | | L8; L62 |
| 3265 | SSVLNDIL | L67 | AWYTERSEK | L13; L7; | VYYPDKVFR | L15; L17; L9; L21; |
| | | | | L6 | | L8; L72 |
| 3266 | SSYSLFDMSK | L7 | AYCCNIVNV | L13; L62; | WCKDGHVETF | L10; L43; L26; |
| | | | | L72 | | L11; L52; L16 |
| 3267 | STASDTYAC | L7 | AYKDYLASG | L66; L72; | WEIVKFIST | L46; L45; L37; |
| | | | | L15 | | L42; L29; L38 |
| 3268 | STDGNKIADK | L7 | AYKIEELF | L9; L62; | WLIINLVQM | L4; L11; L26; L3; |
| | | | | L71 | | L2; L5 |
| 3269 | STEKSNIIRGW | L52 | AYKTFPPTE | L66; L9; | WLSYFIASF | L16; L26; L12; |
| | | | | L31 | | L43; L10; L27 |
| 3270 | STFISAARQGF | L16 | AYNMMISAGF | L9; L72; | WLTNIFGTV | L24; L3; L5; L2; |
| | | | | L71 | | L20; L4 |
| 3271 | STGSNVFQT | L7 | AYRKVLLRK | L13; L6; | WPWYIWLGF | L49; L31; L39; |
| | | | | L7 | | L50; L22; L32 |
| 3272 | STIQRKYK | L13 | AYVNTFSST | L72; L71; | YACWHHSI | L47; L70; L59; |
| | | | | L8 | | L67; L68; L61 |
| 3273 | STIQRKYKGI | L10 | CAPLTVFF | L62; L59; | YAYLRKHF | L59; L70; L47; |
| | | | | L74 | | 8L5; L60; L69 |
| 3274 | STKHFYWF | L58 | CAYCCNIV | L47; L70; | YAYLRKHFSM | L61; L60; L59; |
| | | | | L69 | | L69; L67; L70 |
| 3275 | STKHFYWFFSNY | L14 | CEESSAKSA | L38; L42; | YECDIPIGA | L46; L38; L42; |
| | | | | L46 | | L37; L50; L36 |
| 3276 | STNSRIKAS | L10 | CEIVGGQIVT | L36; L42; | YELQTPFEI | L45; L36; L37; |
| | | | | L38 | | L40; L41; L8 |
| 3277 | STQLGIEFLK | L7 | CEKALKYLP | L42; L38; | YFPLQSYGF | L62; L9; L72; L71; |
| | | | | L46 | | L12; L8 |
| 3278 | STQWSLFFFL | L20 | CELYHYQEC | L33; L45; | YIAQVDVVNF | L58; L74; L12; |
| | | | | L38 | | L26; L10; L11 |
| 3279 | STQYEYGTEDDY | L14 | CESHGKQV | L45; L48; | YIDINGNL | L68; L63; L1; L62; |
| | | | | L37 | | L74; L60 |
| 3280 | STSAFVETVK | L7 | CGVDAVNLL | L64; L69; | YIFFASFY | L58; L59; L12; L1; |
| | | | | L8 | | L43; L26 |
| 3281 | STSGRWVL | L70 | CIDGALLTK | L7; L6; | YIICISTKHF | L11; L10; L58; |
| | | | | 8L6 | | L43; L60; L26 |
| 3282 | STSHKLVLS | L20 | CINGLMLL | L74; L73; | YIRKLHDEL | L67; L58; L59; |
| | | | | L59 | | L74; L23; L60 |
| 3283 | SVAIKITEHSW | L52 | CLDDRCIL | L62; L63; | YKTPPIKDF | L27; L66; L60; L9; |
| | | | | L68 | | L58; L43 |
| 3284 | SVASQSIIA | L51 | CLFLLPSL | L59; L4; | YLCFLAFLL | L4; L5; L2; L74; |
| | | | | L32 | | L1; L64 |
| 3285 | SVCRLMKTI | L10 | CLLNRYFRL | L4; L23; | YLFQHANL | L74; L23; L3; L2; |
| | | | | L2 | | L95; L4 |
| 3286 | SVFNICQAVT | L20 | CNDPFLGVY | L18; L1; | YLVSTQEF | L43; L59; L26; |
| | | | | L41 | | L27; L49; L74 |
| 3287 | SVIDLLLD | L11 | CNDPFLGVYY | L1; L18; | YLYFIKGL | L23; L3; L74; L4; |
| | | | | L12 | | L34; L2 |
| 3288 | SVIDLLLDDFV | L20 | CNLGGAVCR | L17; L15; | YQHEETIYNL | L34; L44; L4; L24; |
| | | | | L21 | | L35; L3 |
| 3289 | SVLLFLAFVVF | L52 | CPAVAKHDF | L49; L31; | YQIGGYTEK | L43; L27; L26; |
| | | | | L39 | | L24; L7; L58 |
| 3290 | SVLYYQNNV | L4 | CSFGGVSV | L48; L70; | YQKVGMQKY | L26; L43; L58; |
| | | | | L69 | | L27; L14; L24 |
| 3291 | SVLYYQNNVF | L16 | CSHAAVDAL | L67; L61; | YQLYSTQL | L44; L27; L25; |
| | | | | L57 | | L35; L48; L28 |
| 3292 | SVMLTNDNTSRY | L1 | CSLSHRFYR | L15; L17; | YSHVVAFNTL | L60; L67; L61; |
| | | | | L21 | | L53; L59; L57 |
| 3293 | SVNITFELDER | L15 | CSMTDIAKK | L7; L13; | YSLLMPIL | L59; L74; L60; |
| | | | | L19 | | L61; L67; L47 |
| 3294 | SVPWDTIAN | L57 | CSTMTNRQF | L55; L54; | YSPIFLIV | L73; L47; L48; |
| | | | | L52 | | L59; L57; L67 |
| 3295 | SVRVLQKA | L51 | CTCGKQATKY | L11; L18; | YSTGSNVF | L59; L54; L58; |
| | | | | L14 | | L60; L70; L55 |
| 3296 | SVSPKLFIRQ | L20 | CTFEYVSQPF | L10; L16; | YTNSFTRGVY | L1; L14; L11; L10; |
| | | | | L53 | | L18; L12 |
| 3297 | SVSSPDAVTA | L51 | CTFTRSTNSR | L21; L19; | YVKPGGTSS | L43; L26; L58; |
| | | | | L15 | | L51; L11; L10 |
| 3298 | SVTVKNGSI | L10 | CTGSIPCSV | L20; L70; | YVVDDPCPIHF | L31; L60; L11; |
| | | | | L73 | | L12; L10; L58 |
| 3299 | SVTVKNGSIHLY | L14 | CVCSVIDLL | L20; L74; | YVWKSYVHV | L5; L24; L2; L20; |
| | | | | L5 | | L58; L63 |
| 3300 | SVVLLSVLQ | L7 | CVDTVRTNV | L63; L5; | YVYANGGKGF | L10; L11; L26; |
| | | | | L86 | | 8L5; L60; L12 |
| 3301 | SVVNARLRA | L51 | CVDTVRTNVY | L18; L1; | YYHTTDPSFL | L62; L72; L71; L9; |
| | | | | L14 | | L66; L8 |
| 3302 | SVVNIQKEIDR | L19 | CVRGTTVLLK | L6; L13; | YYNTTKGGRF | L8; L9; L71; L72; |
| | | | | L7 | | L62; L12 |
| 3303 | SVVSKVVKVT | L10 | CYFGLFCL | L72; L66; | YYPSARIV | L64; L71; L72; |
| | | | | L71 | | L66; L62; L47 |
| 3304 | SVVSKVVKVTI | L20 | CYFPLQSYGF | L8; L9; | AAGLEAPFL | L74; L61; L69; |
| | | | | L12 | | L70; L60; L63; L31 |
| 3305 | SVYAWNRKRI | L10 | DALCEKAL | L23; L25; | AAIMQLFF | L58; L74; L59; |
| | | | | L47 | | L69; L70; L54; L60 |
| 3306 | SVYPVASPNEC | L7 | DALCEKALKY | L31; L12; | ACPDGVKHVY | L14; L40; L71; |
| | | | | L11 | | L11; L41; L26; L66 |
| 3307 | SWFTALTQ | L48 | DAQSFLNRV | L47; L20; | AEASKKPRQ | L46; L36; L40; |
| | | | | L70 | | L42; L41; L45; L38 |
| 3308 | SWNLREMLA | L42 | DAYPLTKH | L47; L25; | AELEGIQYG | L40; L45; L41; |
| | | | | L11 | | L36; L42; L46; L37 |
| 3309 | SWQTGDFVK | L7 | DCLGDIAAR | L17; L19; | AEVQIDRL | L37; L36; L33; |
| | | | | L11 | | L29; L45; L41; L40 |
| 3310 | SWQTGDFVKA | L42 | DDLNQLTGY | L29; L11; | AFLLFLVL | L71; L72; L67; |
| | | | | L10 | | L59; L62; L23; L8 |
| 3311 | SYELQTPFEI | L9 | DEAGSKSP | L29; L46; | AFNTLLFLM | L62; L12; L9; L15; |
| | | | | L38 | | L71; L8; L72 |
| 3312 | SYFAVHFIS | L66 | DEFSSNVA | L25; L29; | AFVETVKGL | L72; L71; L8; L62; |
| | | | | L46 | | L41; L40; L9 |
| 3313 | SYFTEQPID | L65 | DEFSSNVANY | L29; L41; | AHIQWMVMF | L34; L28; L27; |
| | | | | L40 | | L35; L26; L8; L9 |
| 3314 | SYFVVKRHT | L72 | DELKINAA | L29; L25; | AIVMVTIML | L74; L44; L61; |
| | | | | L46 | | L60; L69; L5; L73 |
| 3315 | SYREAACC | L72 | DELKINAAC | L29; L40; | AIVSTIQRKY | L14; L10; L12; |
| | | | | L41 | | L40; L11; L41; L26 |
| 3316 | SYREAACCH | L72 | DERIDKVL | L29; L25; | ALDPLSETK | L5; L18; L1; L7; |
| | | | | L23 | | L2; L13; L6 |
| 3317 | SYTTTIKPVTY | L12 | DEVARDLSLQF | L41; L40; | ALDQAISMW | L18; L5; L1; L63; |
| | | | | L29 | | L68; L10; L16 |
| 3318 | SYVGCHNKC | L8 | DEWSMATYY | L29; L41; | ALLAVFQSA | L2; L46; L5; L4; |
| | | | | L40 | | L3; L24; L51 |
| 3319 | SYVGCHNKCAY | L71 | DFDTWFSQR | L17; L15; | ALSKGVHFV | L2; L3; L24; L4; |
| | | | | L19 | | L5; L64; L73 |
| 3320 | SYYCKSHKP | L8 | DFIDTKRGVY | L11; L10; | ALWEIQQV | L2; L24; L4; L3; |
| | | | | L14 | | L5; L48; L64 |
| 3321 | SYYSLLMPIL | L9 | DFNLVAMKY | L29; L12; | ASFSASTSAF | L26; L43; L16; |
| | | | | L14 | | L52; L10; L27; L54 |
| 3322 | TACSHAAV | L70 | DFQVTIAEI | L72; L62; | ASHMYCSFY | L18; L43; L14; |
| | | | | L71 | | L26; L1; L58; L70 |
| 3323 | TACTDDNALAY | L31 | DFTEERLKL | L8; L25; | ASLPFGWL | L74; L61; L73; |
| | | | | L9 | | L55; L59; L60; L67 |
| 3324 | TADIVVFDE | L68 | DFTEERLKLF | L9; L8; | ATATIPIQA | L7; L20; L69; L13; |
| | | | | L10 | | L3; L46; L42 |
| 3325 | TAFVTNVNA | L50 | DFVEIIKSQ | L10; L17; | ATVVIGTSKF | L52; L53; L10; |
| | | | | L11 | | L54; L11; L16; L26 |
| 3326 | TAGAAAYYV | L70 | DGISQYSLR | L19; L17; | AVAKHDFFKF | L12; L10; L11; |
| | | | | L11 | | L16; L53; L52; L54 |
| 3327 | TALLTLQQI | L47 | DGNKIADKY | L29; L14; | AYANRNRFL | L64; L72; L71; L9; |
| | | | | L11 | | L8; L66; L40 |
| 3328 | TALLTLQQIEL | L67 | DGVKHVYQL | L25; L29; | AYILFTRF | L9; L72; L8; L71; |
| | | | | L23 | | L62; L27; L12 |
| 3329 | TALRLCAY | L59 | DGYPLECI | L47; L25; | AYLRKHFSM | L71; L8; L72; L9; |
| | | | | L48 | | L66; L12; L33 |
| 3330 | TANKWDLI | L47 | DHSSSSDNI | L34; L28; | AYNVTQAF | L72; L71; L9; L62; |
| | | | | L35 | | L43; L33; L66 |
| 3331 | TAQNSVRV | L70 | DHSSSSDNIAL | L34; L28; | AYVDNSSL | L72; L71; L66; L8; |
| | | | | L35 | | L62; L9; L61 |
| 3332 | TASALGKL | L74 | DHVISTSHKL | L34; L35; | CANGQVFGL | L58; L70; L60; |
| | | | | L28 | | L32; L65; L69; L61 |
| 3333 | TASALGKLQ | L49 | DIAANTVIW | L10; L49; | CLTPVYSFL | L74; L5; L4; L2; |
| | | | | L19 | | L3; L61; L44 |
| 3334 | TATIPIQA | L50 | DIADTTDAV | L11; L20; | DAALALLL | L47; L74; L23; |
| | | | | L10 | | L25; L31; L67; L61 |
| 3335 | TATIPIQASL | L61 | DIADTTDAVR | L19; L11; | DAFKLNIKLL | L47; L32; L69; |
| | | | | L17 | | L10; L20; L74; L49 |
| 3336 | TAYANSVFNI | L47 | DIKDLPKEI | L10; L3; | DAPAHISTI | L47; L57; L10; |
| | | | | L23 | | L49; L70; L69; L11 |
| 3337 | TAYNGYLTSS | L43 | DKFTDGVCL | L44; L35; | DASGKPVPY | L49; L70; L58; |
| | | | | L25 | | L31; L69; L59; L43 |
| 3338 | TCASEYTGNY | L14 | DLATNNLVV | L2; L3; | DEVARDLSL | L25; L29; L41; |
| | | | | L11 | | L37; L36; L40; L23 |
| 3339 | TCATTRQV | L48 | DLDEWSMATYY | L1; L18; | DFSSEIIGY | L11; L12; L17; |
| | | | | L11 | | L10; L14; L29; L49 |
| 3340 | TCATTRQVV | L28 | DMFLGTCRR | L17; L19; | DFYDFAVSK | L17; L19; L13; |
| | | | | L21 | | L72; L71; L7; L6 |
| 3341 | TCDWTNAGDY | L1 | DMSKFPLKL | L73; L35; | DLKPVSEEV | L3; L23; L2; L20; |
| | | | | L74 | | L5; L43; L11 |
| 3342 | TCFSTASDTY | L14 | DMVPHISR | L25; L17; | DSAEVAVKM | L19; L20; L11; |
| | | | | L19 | | L53; L54; L29; L70 |
| 3343 | TCGKQATKY | L14 | DPFLGVYYH | L47; L29; | DTFCAGSTF | L10; L53; L11; |
| | | | | L31 | | L52; L16; L58; L54 |
| 3344 | TCTERLKL | L25 | DPQTLEIL | L23; L25; | EANMDQESF | L49; L43; L54; |
| | | | | L47 | | L31; L10; L52; L32 |
| 3345 | TDAQTGSSK | L19 | DQFKHLIPL | L25; L44; | EAVGTNLPL | L67; L61; L20; |
| | | | | L35 | | L32; L60; L74; L31 |
| 3346 | TDAVRDPQTL | L33 | DRAMPNMLR | L19; L17; | EEAIRHVRA | L42; L46; L38; |
| | | | | L30 | | L25; L40; L29; L37 |
| 3347 | TDFATSAC | L33 | DRYPANSIVCR | L19; L30; | EEAIRHVRAW | L40; L41; L10; |
| | | | | L17 | | L42; L38; L29; L46 |
| 3348 | TDFSRVSA | L46 | DSFKEELDKY | L10; L11; | EEIAIILAS | L41; L40; L42; |
| | | | | L14 | | L46; L29; L20; L37 |
| 3349 | TDFSSEIIGY | L27 | DTANPKTPK | L19; L7; | EEIAIILASF | L40; L41; L10; |
| | | | | L6 | | L11; L29; L37; L20 |
| 3350 | TDFVNEFY | L29 | DTDFVNEFY | L1; L18; | EEVVENPTI | L41; L45; L40; |
| | | | | L12 | | L36; L29; L37; L42 |
| 3351 | TDFVNEFYAY | L29 | DTKFKTEGL | L23; L10; | EHYVRITGL | L25; L23; L28; |
| | | | | L11 | | L35; L34; L10; L11 |
| 3352 | TDGNKIADKY | L14 | DTLKNLSDR | L17; L19; | EPKLGSLVV | L51; L39; L47; |
| | | | | L11 | | L50; L22; L23; L42 |
| 3353 | TDLEGNFY | L29 | DTVRTNVY | L29; L11; | EQWNLVIGF | L27; L26; L34; |
| | | | | L10 | | L11; L10; L30; L24 |
| 3354 | TDLMAAYV | L33 | DTVRTNVYL | L20; L11; | EVTPSGTWL | L11; L10; L20; |
| | | | | L53 | | L74; L61; L60; L28 |
| 3355 | TDLTKPYI | L33 | DTYACWHHSI | L10; L25; | EYPIIGDEL | L9; L72; L71; L8; |
| | | | | L20 | | L66; L62; L57 |
| 3356 | TDQSSYIV | L33 | DVSSAINR | L19; L17; | FACVVADAV | L67; L59; L61; |
| | | | | L21 | | L50; L47; L70; L68 |
| 3357 | TDYKHWPQIA | L46 | DVSSAINRP | L11; L10; | FAFACPDGV | L58; L69; L47; |
| | | | | L19 | | L70; L20; L50; L67 |
| 3358 | TECSNLLLQ | L41 | DVTDVTQLYL | L20; L11; | FANKHADF | L59; L58; L74; |
| | | | | L10 | | L63; L60; L49; L70 |
| 3359 | TEDDYQGKPLEF | L41 | DVVAIDYKH | L11; L20; | FASEAARV | L70; L69; L47; |
| | | | | L19 | | L58; L63; L50; L64 |
| 3360 | TEERLKLFDRY | L41 | DVVAIDYKHY | L10; L11; | FAVHFISN | L59; L61; L67; |
| | | | | L14 | | L50; L60; L69; L70 |
| 3361 | TEEVGHTD | L45 | DVVNQNAQAL | L10; L20; | FAVHFISNSW | L49; L10; L54; |
| | | | | L11 | | L61; L52; L69; L31 |
| 3362 | TEEVGHTDLM | L36 | DVVQEGVLT | L19; L11; | FAWWTAFV | L47; L70; L58; |
| | | | | L20 | | L59; L50; L69; L68 |
| 3363 | TEEVGHTDLMA | L38 | DVVRQCSGV | L11; L10; | FAWWTAFVT | L69; L32; L59; |
| | | | | L20 | | L67; L31; L50; L70 |
| 3364 | TEEVVLKT | L45 | DYTEISFML | L9; L8; | FFASFYYVW | L9; L8; L10; L12; |
| | | | | L66 | | L69; L54; L49 |
| 3365 | TEEVVLKTG | L38 | EAVEAPLV | L47; L20; | FFFLYENAF | L71; L72; L62; |
| | | | | L48 | | L59; L9; L12; L31 |
| 3366 | TEGLCVDI | L45 | EAVKTQFNY | L49; L11; | FIDTKRGVY | L1; L18; L58; L14; |
| | | | | L12 | | L63; L12; L68 |
| 3367 | TEGLCVDIPGI | L41 | EAYEQAVAN | L17; L19; | FIQQKLAL | L23; L59; L60; |
| | | | | L32 | | L61; L67; L74; L68 |
| 3368 | TEHSWNAD | L46 | ECAQVLSEM | L11; L10; | FITESKPSV | L2; L5; L4; L3; |
| | | | | L20 | | L61; L50; L58 |
| 3369 | TEIYQAGST | L45 | ECIKDLLAR | L17; L19; | FLARGIVFM | L74; L2; L3; L4; |
| | | | | L11 | | L69; L64; L11 |
| 3370 | TEKSNIIRG | L45 | EDDNLIDSY | L1; L18; | FLGRYMSAL | L57; L3; L74; L2; |
| | | | | L29 | | L4; L67; L61 |
| 3371 | TEKWESGV | L45 | EEAALCTF | L29; L41; | FLPGVYSV | L5; L57; L2; L3; |
| | | | | L33 | | L64; L4; L62 |
| 3372 | TELEPPCR | L29 | EEAKKVKP | L42; L46; | FPQSAPHGV | L50; L47; L32; |
| | | | | L38 | | L51; L39; L2; L22 |
| 3373 | TEMLAKALR | L40 | EEAKKVKPTV | L42; L37; | FPQSAPHGVVF | L31; L39; L22; |
| | | | | L45 | | L56; L50; L32; L49 |
| 3374 | TEMLAKALRKV | L45 | EEFEPSTQ | L29; L48; | FTIGTVTLK | L7; L19; L6; L17; |
| | | | | L25 | | L13; L58; L11 |
| 3375 | TENLTKEG | L29 | EEFEPSTQYEY | L41; L40; | FTTVDNINL | L53; L60; L68; |
| | | | | L29 | | L61; L20; L70; L58 |
| 3376 | TERSEKSY | L29 | EEKFKEGV | L45; L42; | FVDDIVKTD | L5; L68; L49; L32; |
| | | | | L23 | | L63; L60; L58 |
| 3377 | TETDLTKG | L45 | EEMLDNRAT | L40; L42; | FVDSDVETK | L68; L49; L63; L5; |
| | | | | L41 | | L67; L1; L7 |
| 3378 | TEVNEFAC | L29 | EEQEEDWLD | L42; L40; | FVFLVLLPLV | L20; L50; L47; L5; |
| | | | | L38 | | L2; L3; L4 |
| 3379 | TEVPVAIH | L29 | EERLKLFDRY | L29; L40; | FYLCFLAF | L72; L71; L9; L59; |
| | | | | L41 | | L66; L8; L62 |
| 3380 | TEVVGDIILKP | L38 | EETFKLSY | L29; L41; | GAMDTTSY | L43; L59; L27; |
| | | | | L40 | | L26; L58; L70; L18 |
| 3381 | TFDSEYCR | L62 | EETGLLMPL | L41; L40; | GETLGVLV | L45; L48; L37; |
| | | | | L20 | | L36; L38; L46; L33 |
| 3382 | TFDSEYCRH | L62 | EETIYNLL | L29; L25; | GETLGVLVP | L46; L38; L42; |
| | | | | L45 | | L37; L45; L36; L41 |
| 3383 | TFEEAALC | L62 | EETIYNLLK | L42; L41; | GEVPVSIIN | L36; L37; L46; |
| | | | | L40 | | L38; L29; L45; L41 |
| 3384 | TFELDERI | L62 | EEVGHTDL | L25; L29; | GLEAPFLYL | L5; L6; L2; L1; |
| | | | | L37 | | L18; L4; L74 |
| 3385 | TFFIYNKI | L48 | EEVLSEARQH | L41; L40; | GLLPPKNSI | L24; L2; L4; L16; |
| | | | | L29 | | L23; L44; L5 |
| 3386 | TFFIYNKIV | L48 | EFLTRNPAW | L9; L71; | GSKSPIQY | L55; L70; L43; |
| | | | | L8 | | L26; L13; L58; L27 |
| 3387 | TFFIYNKIVD | L65 | EHVNNSYEC | L35; L34; | GSLPINVIV | L73; L24; L69; |
| | | | | L28 | | L52; L20; L70; L2 |
| 3388 | TFFKLVNK | L17 | EIDFLELAM | L68; L1; | GVDIAANTV | L68; L63; L5; L28; |
| | | | | L67 | | L18; L24; L45 |
| 3389 | TFFPDLNGD | L8 | EIDPKLDNYY | L1; L11; | GVKDCVVL | L23; L39; L67; |
| | | | | 1L8 | | L26; L44; L56; L13 |
| 3390 | TFHLDGEV | L62 | EILDITPCSF | L10; L11; | GYQPYRVVVL | L72; L71; L65; |
| | | | | L16 | | L66; L9; L8; L44 |
| 3391 | TFHLDGEVITF | L8 | EIPRRNVATL | L10; L57; | HEHEIAWYT | L29; L37; L38; |
| | | | | L11 | | L45; L41; L40; L36 |
| 3392 | TFKVSIWNLDY | L12 | EIVGGQIVT | L20; L10; | HHWLLLTI | L48; L34; L35; |
| | | | | L19 | | L47; L25; L28; L24 |
| 3393 | TFLKKDAPYI | L8 | EIVKFISTC | L10; L11; | HPTQAPTHL | L56; L32; L22; |
| | | | | L19 | | L49; L39; L31; L50 |
| 3394 | TFNGECPNFV | L62 | EKTHVQLSL | L44; L35; | HSYGADLKSF | L10; L53; L52; |
| | | | | L20 | | L43; L26; L58; L54 |
| 3395 | TFNGECPNFVF | L8 | ELAMDEFIER | L19; L17; | HTTDPSFLGR | L19; L17; L21; |
| | | | | L21 | | L15; L7; L11; L6 |
| 3396 | TFNVPMEK | L62 | ELEGIQYGR | L17; L19; | HVGEIPVAYR | L19; L21; L17; |
| | | | | L21 | | L15; L11; L20; L6 |
| 3397 | TFSSTFNVP | L8 | ELPTGVHAG | L11; L57; | IAIAMACL | L61; L60; L59; |
| | | | | L10 | | L74; L70; L67; L47 |
| 3398 | TFTYASALW | L9 | ELSPVALR | L19; L17; | IAIVMVTI | L47; L48; L70; |
| | | | | L21 | | L59; L68; L61; L69 |
| 3399 | TFVTHSKGLYR | L17 | ELVIGAVILR | L19; L17; | IAKKPTETI | L43; L70; L49; |
| | | | | L21 | | L47; L53; L52; L58 |
| 3400 | TGDFVKATC | L68 | ELYSPIFL | L74; L23; | IATVREVL | L59; L61; L60; |
| | | | | L20 | | L67; L68; L70; L23 |
| 3401 | TGDLQPLEQ | L68 | ELYSPIFLIV | L20; L11; | IAWNSNNL | L47; L68; L60; |
| | | | | L24 | | L61; L63; L70; L74 |
| 3402 | TGDSCNNY | L1 | ENPDILRV | L48; L11; | IEVNSFSGY | L29; L41; L40; |
| | | | | L20 | | L46; L26; L27; L45 |
| 3403 | TGDSCNNYM | L63 | EPEEHVQIH | L49; L32; | IEYPIIGDEL | L36; L67; L37; |
| | | | | L31 | | L29; L45; L41; L40 |
| 3404 | TGKIADYNY | L14 | EPEEHVQIHTI | L49; L39; | IFLEGETL | L72; L71; L8; L9; |
| | | | | L32 | | L62; L67; L25 |
| 3405 | TGLLMPLKA | L50 | EPEYFNSV | L50; L23; | IIIGGAKL | L60; L74; L61; |
| | | | | L47 | | L63; L58; L67; L59 |
| 3406 | TGLYPTLNI | L8 | EQPYVFIKR | L19; L17; | IINLIIKNL | L60; L4; L39; L64; |
| | | | | L15 | | L73; L58; L5 |
| 3407 | TGNTLQCI | L48 | EQYVFCTV | L48; L24; | IPTNFTISV | L50; L51; L47; |
| | | | | L25 | | L39; L22; L32; L56 |
| 3408 | TGNYQCGHY | L14 | ERDISTEI | L35; L25; | IPVAYRKVL | L39; L32; L22; |
| | | | | L34 | | L56; L31; L47; L25 |
| 3409 | TGQAITVTP | L38 | ERLKLFDRY | L30; L14; | ISDYDYYRY | L1; L18; L54; L14; |
| | | | | L12 | | L53; L52; L49 |
| 3410 | TGRLQSLQTY | L26 | ERYKLEGYAF | L30; L35; | ITLATCELY | L18; L12; L52; L1; |
| | | | | L34 | | L54; L14; L16 |
| 3411 | TGYRVTKN | L48 | ESGLKTILR | L17; L19; | ITREVGFVV | L13; L20; L53; |
| | | | | L21 | | L70; L73; L58; L39 |
| 3412 | THDVSSAINR | L34 | ESLVPGFNEK | L19; L17; | IVDTVSALV | L5; L63; L62; L68; |
| | | | | L7 | | L18; L1; L20 |
| 3413 | THDVSSAINRP | L34 | ESNKKFLPF | L10; L11; | KAGGTTEML | L74; L67; L54; |
| | | | | L73 | | L58; L70; L65; L63 |
| 3414 | THGLNLEEA | L28 | ESVQTFFKL | L20; L10; | KCSAYTVEL | L44; L56; L73; |
| | | | | L11 | | L65; L66; L16; L39 |
| 3415 | THSDKFTDG | L35 | ETAQNSVRV | L20; L11; | KEGSSVEL | L37; L33; L36; |
| | | | | L10 | | L45; L65; L56; L44 |
| 3416 | THWFVTQRN | L34 | ETAQNSVRVL | L10; L20; | KEIKESVQT | L38; L37; L36; |
| | | | | L11 | | L46; L42; L45; L44 |
| 3417 | THWFVTQRNF | L34 | ETFKLSYGI | L20; L10; | KESPFELED | L65; L38; L42; |
| | | | | L11 | | L45; L46; L36; L37 |
| 3418 | TIAEILLIIM | L20 | ETGTLIVNS | L17; L20; | KFLTENLLLY | L12; L14; L8; L18; |
| | | | | L19 | | L13; L6; L52 |
| 3419 | TIAKNTVKSV | L3 | ETIYNLLKD | L11; L20; | KKNNLPFKL | L44; L66; L73; |
| | | | | L10 | | L16; L64; L27; L4 |
| 3420 | TIANYAKPF | L43 | ETKAIVSTIQR | L17; L19; | KLFAAETL | L55; L16; L54; |
| | | | | L21 | | L44; L24; L23; L4 |
| 3421 | TIATYCTGSI | L10 | ETKCTLKSF | L10; L11; | KLFDRYFKYW | L16; L6; L52; L3; |
| | | | | L52 | | L13; L21; L10 |
| 3422 | TIAYIICISTK | L19 | ETKFLTENL | L20; L11; | KLMGHFAWW | L16; L54; L6; L21; |
| | | | | L10 | | L10; L3; L14 |
| 3423 | TIDGSSGVVN | L68 | ETLKATEETF | L53; L52; | KNTCDGTTF | L53; L54; L55; L9; |
| | | | | L10 | | L26; L27; L8 |
| 3424 | TIEYPIIGDEL | L67 | ETLPTEVL | L25; L23; | KPREQIDGY | L14; L26; L49; |
| | | | | L20 | | L27; L31; L18; L16 |
| 3425 | TIGPDMFL | L74 | ETSNSFDVL | L20; L10; | KRGDKSVYY | L65; L66; L30; |
| | | | | L67 | | L64; L14; L12; L18 |
| 3426 | TIKKPNELSR | L17 | EVAKNLNES | L20; L10; | KSREETGLL | L55; L53; L13; |
| | | | | L11 | | L73; L14; L54; L52 |
| 3427 | TIKVFTTVD | L43 | EVAKNLNESL | L20; L10; | KTFPPTEPK | L13; L6; L7; L16; |
| | | | | L11 | | L21; L54; L52 |
| 3428 | TILGSALL | L74 | EVARDLSLQ | L20; L11; | KTSVDCTMY | L18; L53; L54; |
| | | | | L10 | | L14; L16; L52; L1 |
| 3429 | TILRKGGRTI | L10 | EVARDLSLQF | L11; L10; | KVQIGEYTF | L16; L53; L54; |
| | | | | L20 | | L26; L55; L52; L14 |
| 3430 | TILTSLLV | L48 | EVFAQVKQIY | L11; L10; | KVYYGNAL | L67; L59; L55; |
| | | | | L12 | | L60; L56; L61; L71 |
| 3431 | TILTSLLVLV | L4 | EVGPEHSL | L20; L67; | KYDFTEERL | L62; L63; L9; L8; |
| | | | | L23 | | L68; L34; L36 |
| 3432 | TIQRKYKGI | L10 | EVGPEHSLAEY | L11; L14; | LADKFPVLH | L63; L74; L68; |
| | | | | L10 | | L49; L32; L62; L1 |
| 3433 | TISVTTEI | L48 | EVLSEARQH | L11; L17; | LAHIQWMVM | L70; L61; L59; |
| | | | | L10 | | L32; L47; L69; L31 |
| 3434 | TITVEELKK | L7 | EVNSFSGYL | L11; L20; | LASHMYCSF | L43; L49; L32; |
| | | | | L10 | | L59; L58; L31; L70 |
| 3435 | TIYNLLKD | L48 | EVNSFSGYLK | L19; L17; | LAVFDKNLY | L31; L49; L12; |
| | | | | L7 | | L52; L1; L18; L58 |
| 3436 | TIYSLLLC | L48 | EVQELYSPI | L10; L20; | LAWLYAAVI | L47; L68; L67; |
| | | | | L11 | | L31; L50; L70; L59 |
| 3437 | TKAIVSTI | L48 | EVTGDSCNNY | L11; L10; | LCLTPVYSF | L8; L9; L52; L12; |
| | | | | L14 | | L31; L16; L65 |
| 3438 | TKAIVSTIQR | L19 | EVVENPTIQKD | L11; L19; | LEILQKEKV | L45; L38; L37; |
| | | | | L10 | | L46; L29; L36; L42 |
| 3439 | TKFKTEGL | L27 | EVVGDIIL | L74; L20; | LEIPRRNV | L45; L48; L38; |
| | | | | L67 | | L37; L29; L46; L25 |
| 3440 | TKFLTENLLL | L44 | EVVLKKLKK | L19; L11; | LESELVIGA | L42; L46; L38; |
| | | | | L7 | | L37; L29; L41; L50 |
| 3441 | TKFLTENLLLY | L27 | EVVLKTGDL | L11; L10; | LFLAFVVF | L72; L9; L71; L62; |
| | | | | L20 | | L8; L59; L47 |
| 3442 | TKGGRFVL | L66 | EWFLAYIL | L25; L23; | LHKPIVWHV | L3; L28; L64; L69; |
| | | | | L35 | | L70; L58; L4 |
| 3443 | TKGSLPINV | L64 | EWSMATYYL | L20; L34; | LHPDSATL | L57; L28; L35; |
| | | | | L9 | | L66; L71; L72; L62 |
| 3444 | TKGTLEPEY | L66 | EYADVFHLYL | L8; L9; | LLDDFVEI | L5; L68; L62; L63; |
| | | | | L20 | | L2; L1; L67 |
| 3445 | TKHFYWFFSNY | L27 | EYCPIFFIT | L8; L9; | LLDKRTTCF | L63; L62; L1; L5; |
| | | | | L17 | | L74; L68; L49 |
| 3446 | TKIKPHNSH | L27 | EYKGPITDVF | L9; L8; | LLNKHIDAY | L26; L43; L18; |
| | | | | L10 | | L14; L12; L1; L16 |
| 3447 | TKMSECVL | L44 | FACPDGVKHVY | L31; L52; | LLTPLGIDL | L74; L56; L5; L61; |
| | | | | L49 | | L2; L4; L64 |
| 3448 | TKNSKVQIGEY | L14 | FADDLNQLTGY | L1; L18; | LLYDANYFL | L2; L4; L5; L61; |
| | | | | L31 | | L3; L74; L68 |
| 3449 | TKRFDNPVL | L44 | FAFPFTIYSLLL | L61; L31; | LPFAMGIIA | L50; L51; L31; |
| | | | | L74 | | L47; L56; L32; L22 |
| 3450 | TKTSVDCTM | L32 | FAMGIIAMS | L58; L69; | LPFGWLIVG | L50; L31; L47; |
| | | | | L70 | | L51; L32; L56; L39 |
| 3451 | TKTSVDCTMY | L27 | FAMGIIAMSAF | L31; L58; | LPFGWLIVGV | L50; L51; L47; |
| | | | | L61 | | L56; L31; L3; L20 |
| 3452 | TKYTMADLVY | L27 | FAMMFVKHK | L69; L70; | LPIGINITRF | L31; L49; L32; |
| | | | | L59 | | L11; L50; L56; L39 |
| 3453 | TLACFVLAAVY | L14 | FAQDGNAA | L50; L59; | LPTGTLLVD | L49; L51; L32; |
| | | | | L61 | | L50; L31; L65; L56 |
| 3454 | TLADAGFIKQ | L2 | FAQVKQIY | L59; L70; | LRANSAVKL | L64; L35; L66; |
| | | | | L31 | | L30; L34; L28; L25 |
| 3455 | TLAILTALRL | L4 | FARTRSMWSF | L58; L43; | LRPDTRYVL | L66; L65; L64; |
| | | | | L59 | | L35; L57; L5; L25 |
| 3456 | TLDNQDLN | L1 | FASVYAWNR | L17; L19; | LSDRELHL | L63; L1; L68; L74; |
| | | | | L15 | | L60; L62; L67 |
| 3457 | TLEETKFLT | L1 | FAVHFISNSWL | L67; L61; | LSLPVLQVR | L15; L52; L17; |
| | | | | L60 | | L55; L21; L53; L7 |
| 3458 | TLETAQNSV | L2 | FCALILAY | L59; L1; | LVIGAVILR | L19; L21; L7; L17; |
| | | | | L31 | | L15; L6; L20 |
| 3459 | TLKEILVTYN | L3 | FCDLKGKYV | L62; L63; | LVSDIDITFL | L20; L5; L4; L60; L |
| | | | | L68 | | 31; L74; L3 |
| 3460 | TLKGVEAVM | L14 | FCGVDAVNL | L74; L62; | LYYPSARI | L47; L9; L62; L48; |
| | | | | L34 | | L8; L71; L72 |
| 3461 | TLKQGEIKDA | L3 | FCLEASFNYL | L60; L61; | LYYPSARIVY | L71; L72; L12; |
| | | | | L67 | | L27; L66; L14; L31 |
| 3462 | TLKSFTVE | L23 | FCNDPFLGVY | L14; L31; | MAAYVDNSSL | L61; L32; L67; |
| | | | | L59 | | L31; L70; L20; L60 |
| 3463 | TLLALHRSYL | L4 | FCSQHTMLV | L64; L73; | MADSNGTITV | L63; L32; L68; |
| | | | | L58 | | L49; L70; L50; L18 |
| 3464 | TLLFLMSF | L23 | FDNLKTLL | L33; L23; | MEVTPSGTW | L40; L41; L46; |
| | | | | L62 | | L29; L36; L49; L45 |
| 3465 | TLLLQLCTFTR | L21 | FEHIVYGDF | L29; L41; | MFVKHKHAF | L71; L8; L72; L49; |
| | | | | L40 | | L9; L33; L29 |
| 3466 | TLLTKGTL | L23 | FEYYHTTDP | L46; L38; | MHANYIFWR | L19; L17; L21; |
| | | | | L42 | | L34; L15; L7; L35 |
| 3467 | TLNDFNLVAMK | L6 | FFAQDGNAA | L72; L71; | MLDMYSVML | L5; L62; L68; L63; |
| | | | | L50 | | L74; L2; L1 |
| 3468 | TLPKGFYAE | L57 | FFFAQDGNAA | L71; L72; | MLVYCFLGY | L12; L6; L26; L10; |
| | | | | L50 | | L11; L1; L18 |
| 3469 | TLPKGIMM | L57 | FFFLYENAFL | L72; L62; | MSNLGMPSY | L59; L43; L1; L18; |
| | | | | L71 | | L14; L52; L70 |
| 3470 | TLPKGIMMN | L57 | FFKLVNKF | L62; L72; | MVMCGGSLY | L11; L14; L26; |
| | | | | L71 | | L18; L10; L1; L12 |
| 3471 | TLPTEVLTEEV | L5 | FFKLVNKFL | L62; L72; | MVTNNTFTL | L20; L60; L16; |
| | | | | L71 | | L32; L61; L56; L10 |
| 3472 | TLVKQLSSN | L10 | FFLYENAF | L71; L72; | NAGIVGVLTL | L67; L31; L32; |
| | | | | L62 | | L49; L69; L61; L68 |
| 3473 | TLVPQEHY | L26 | FFPDLNGD | L71; L62; | NAQALNTL | L70; L59; L25; |
| | | | | L72 | | L67; L47; L60; L23 |
| 3474 | TLVTMPLGYV | L3 | FFPDLNGDVV | L72; L71; | NATRFASVY | L70; L31; L69; |
| | | | | L62 | | L58; L59; L14; L49 |
| 3475 | TLYCIDGALL | L2 | FFSNVTWFH | L72; L12; | NCYLATAL | L25; L23; L71; |
| | | | | L71 | | L72; L28; L67; L35 |
| 3476 | TMADLVYA | L3 | FFTYICGF | L62; L72; | NFGAISSVL | L72; L71; L8; L9; |
| | | | | L71 | | L28; L35; L62 |
| 3477 | TMLFTMLR | L17 | FFYVLGLAAI | L71; L72; | NFNQHEVLL | L62; L8; L71; L9; |
| | | | | L62 | | L34; L64; L72 |
| 3478 | TMLVKQGDDY | L14 | FGDDTVIE | L62; L63; | NLLLLFVTV | L2; L4; L5; L24; |
| | | | | L68 | | L50; L23; L3 |
| 3479 | TMPLGYVTH | L57 | FGPLVRKI | L47; L48; | NLVAVPTGY | L12; L26; L6; L14; |
| | | | | L64 | | L10; L27; L11 |
| 3480 | TNDNTSRYW | L49 | FGWLIVGV | L47; L48; | NPAWRKAVF | L39; L49; L23; |
| | | | | L50 | | L22; L31; L32; L56 |
| 3481 | TNDVSFLAH | L68 | FHLDGEVI | L35; L34; | NTCDGTTFTY | L11; L18; L10; L1; |
| | | | | L28 | | L16; L14; L12 |
| 3482 | TNGDFLHF | L65 | FIAGLIAIVM | L69; L58; | NTVKSVGKF | L11; L10; L53; |
| | | | | L67 | | L54; L58; L49; L52 |
| 3483 | TNGTKRFD | L65 | FIASFRLFAR | L17; L19; | NVVIKVCEF | L10; L11; L23; |
| | | | | L21 | | L49; L26; L58; L29 |
| 3484 | TNGVGYQPY | L43 | FIEDLLFNK | L7; L19; | NVVTTKIAL | L23; L32; L20; |
| | | | | 6L | | L67; L56; L60; L74 |
| 3485 | TNIFGTVY | L26 | FIKQYGDCL | L58; L67; | NYAKPFLNK | L13; L17; L7; L8; |
| | | | | L60 | | L9; L6; L19 |
| 3486 | TNIFGTVYEK | L19 | FIRQEEVQEL | L3; L58; | PSKPSKRSF | L43; L55; L52; |
| | | | | L10 | | L65; L26; L53; L58 |
| 3487 | TNMFTPLI | L48 | FKEGVEFL | L62; L63; | PYRVVVLSF | L9; L72; L66; L8; |
| | | | | L68 | | L65; L71; L43 |
| 3488 | TNNVAFQTV | L73 | FKLNIKLL | L66; L64; | QAVGACVL | L67; L70; L61; |
| | | | | L44 | | L69; L74; L60; L55 |
| 3489 | TNSFTRGVY | L14 | FKVSIWNL | L66; L74; | QEFKPRSQM | L29; L36; L45; |
| | | | | L44 | | 6L4; L37; L33; L41 |
| 3490 | TNSPRRAR | L17 | FLELAMDEF | L62; L1; | QEYADVFHL | L36; L37; L41; |
| | | | | L68 | | L40; L29; L33; L45 |
| 3491 | TNSSPDDQI | L34 | FLFVAAIF | L59; L62; | QFAPSASAF | L72; L71; L9; L28; |
| | | | | L74 | | L62; L12; L8 |
| 3492 | TNVLEGSVA | L46 | FLHFLPRV | L2; L4; | QLSLPVLQV | L4; L3; L24; L2; |
| | | | | L3 | | L5; L28; L73 |
| 3493 | TPAFDKSA | L51 | FLHVTYVPA | L43; L2; | QSADAQSF | L55; L54; L43; |
| | | | | L05 | | L53; L70; L52; L59 |
| 3494 | TPEANMDQES | L32 | FLKRGDKSVY | L43; L26; | QSRNLQEF | L59; L43; L55; |
| | | | | L14 | | L53; L26; L58; L52 |
| 3495 | TPGDSSSGW | L49 | FLLFLVLIML | L2; L4; | QTFFKLVNK | L7; L13; L6; L19; |
| | | | | L74 | | L15; L21; L17 |
| 3496 | TPGSSRGTSP | L51 | FLLLSVCL | L74; L23; | QWSLFFFLY | L12; L40; L41; L1; |
| | | | | L62 | | L18; L29; L14 |
| 3497 | TPKDHIGT | L51 | FLQSINFV | L2; L4; | RAKVGILCI | L24; L70; L69; |
| | | | | L3 | | L53; L55; L52; L49 |
| 3498 | TPKDHIGTRNPA | L51 | FLQSINFVRI | L5; L2; | RELGVVHNQ | L33; L36; L37; |
| | | | | L4 | | L41; L40; L38; L42 |
| 3499 | TPKYKFVR | L23 | FLRDGWEI | L43; L59; | REVGFVVP | L38; L46; L37; |
| | | | | L2 | | L42; L45; L29; L65 |
| 3500 | TPKYKFVRIQ | L39 | FLTWICLL | L74; L64; | RFDNPVLPF | L62; L8; L9; L72; |
| | | | | L23 | | L71; L12; L68 |

TABLE 1B
Peptides and Alleles

| | Set 1 | Set 1 | Set 2 | Set 2 |
|---|---|---|---|---|
| | Peptide | Allele | Peptide | Allele |
| 1 | RFLYIIKLI | L8; L24; L48; L9; L55; | NLSDRVVFV | L2; L3; L4; L64; L5; L20; L23; L69; |
| | | L13; L40 | | L24; L73 |
| 2 | RLQSLQTY | L26; L14; L18; L16; L27; | NLYDKLVSSF | L10; L11; L16; L26; L43; L71; L3; |
| | | L55; L24 | | L72; L12; L27 |
| 3 | RLRAKHYVY | L26; L18; L16; L14; L27; | NNAAIVLQL | L20; L35; L73; L64; L28; L69; L3; |
| | | L13; L12 | | L34; L31; L41 |
| 4 | RLYECLYRN | L24; L4; L16; L6; L2; L3; | NRFLYIIKL | L35; L64; L66; L25; L30; L65; L34; |
| | | L21 | | L29; L69; L28 |
| 5 | RNIKPVPEV | L73; L24; L13; L4; L3; | NRFNVAITR | L19; L30; L66; L35; L17; L25; L34; |
| | | L51; L48 | | L21; L15; L64 |
| 6 | RTILGSAL | L60; L55; L61; L59; L71; | NYNYLYRLF | L8; L9; L66; L62; L64; L71; L12; |
| | | L72; L54 | | L72; L40; L41 |
| 7 | RVFSAVGNICY | L16; L14; L6; L18; L52; | PTDNYITTY | L18; L1; L10; L11; L16; L53; L54; |
| | | L54; L7 | | L14; L58; L12 |
| 8 | RVVRSIFSR | L15; L21; L7; L19; L17; | QAWQPGVAM | L61; L31; L67; L32; L68; L43; L59; |
| | | L6; L16 | | L22; L70; L63 |
| 9 | RVYANLGER | L21; L15; L6; L7; L17; | QEILGTVSW | L40; L41; L29; L42; L38; L45; L46; |
| | | L19; L14 | | L36; L37; L52 |
| 10 | RYWEPEFY | L72; L71; L65; L14; L62; | QLIKVTLVF | L26; L9; L27; L16; L8; L11; L12; |
| | | L66; L12 | | L10; L43; L74 |
| 11 | SAFFGMSRI | L47; L70; L69; L49; L24; | QLYLGGMSY | L43; L26; L27; L6; L14; L1; L16; |
| | | L20; L10 | | L18; L12; L11 |
| 12 | SASKIITLK | L19; L7; L6; L17; L58; | QPYRVVVL | L56; L47; L39; L22; L23; L32; L25; |
| | | L49; L13 | | L48; L65; L31 |
| 13 | SEARQHLKD | L42; L41; L46; L45; L37; | QSADAQSFL | L73; L70; L20; L58; L61; L60; L53; |
| | | L38; L29 | | L69; L74; L55 |
| 14 | SEDKRAKV | L45; L37; L33; L38; L63; | QTIEVNSF | L54; L55; L11; L53; L10; L52; L29; |
| | | L42; L29 | | L26; L70; L72 |
| 15 | SEFRVYSSA | L46; L42; L38; L37; L29; | RIIPARARV | L73; L24; L3; L5; L4; L13; L20; |
| | | L41; L45 | | L14; L16; L58 |
| 16 | SEKQVEQKI | L45; L37; L24; L36; L41; | RLFARTRSM | L16; L33; L27; L21; L3; L6; L24; |
| | | L40; L42 | | L13; L14; L26 |
| 17 | SELVIGAV | L33; L29; L48; L37; L45; | RLITGRLQSL | L3; L4; L16; L24; L44; L2; L10; |
| | | L25; L46 | | L56; L26; L53 |
| 18 | SELVIGAVIL | L36; L37; L40; L41; L29; | RQEEVQELY | L27; L18; L26; L14; L1; L54; L16; |
| | | L44; L45 | | L24; L12; L44 |
| 19 | SEYKGPITD | L37; L45; L46; L29; L36; | RQWLPTGTL | L44; L27; L26; L24; L16; L68; L33; |
| | | L42; L38 | | L56; L22; L48 |
| 20 | SFKKGAKLL | L8; L13; L39; L72; L71; | RTTNGDFLHF | L16; L52; L53; L54; L18; L10; L8; |
| | | L9; L62 | | L12; L73; L9 |
| 21 | SHVVAFNTL | L34; L28; L35; L60; L44; | RVVVLSFEL | L53; L56; L44; L16; L54; L60; L73; |
| | | L61; L8 | | L55; L20; L65 |
| 22 | SLLSKGRLI | L4; L24; L55; L2; L8; L23; | RVYSTGSNVF | L16; L54; L26; L27; L53; L65; L52; |
| | | L16 | | L11; L8; L14 |
| 23 | SLRPDTRYV | L3; L13; L2; L4; L43; L64; | RYLALYNKY | L14; L12; L8; L13; L71; L72; L16; |
| | | L5 | | L9; L30; L27 |
| 24 | SPDDQIGYY | L49; L31; L1; L18; L14; | SAGFSLWVY | L58; L59; L69; L31; L14; L70; L43; |
| | | L12; L11 | | L12; L18; L52 |
| 25 | SPSGVYQCA | L51; L49; L39; L56; L50; | SASVYYSQL | L70; L60; L61; L58; L74; L67; L57; |
| | | L22; L32 | | L69; L59; L43 |
| 26 | SQSIIAYTM | L24; L28; L35; L26; L34; | SEYDYVIFT | L42; L46; L45; L37; L41; L38; L36; |
| | | L44; L29 | | L29; L40; L69 |
| 27 | SRLSFKELL | L30; L34; L35; L65; L25; | SIKNFKSVL | L23; L58; L43; L39; L26; L56; L69; |
| | | L64; L66 | | L3; L13; L10 |
| 28 | SRVLGLKTL | L25; L64; L30; L35; L66; | SLINTLNDL | L4; L3; L2; L74; L5; L24; L8; L57; |
| | | L34; L28 | | L26; L11 |
| 29 | STTTNIVTR | L19; L21; L7; L17; L15; | SLYVNKHAF | L43; L26; L16; L23; L12; L49; L27; |
| | | L11; L52 | | L59; L72; L11 |
| 30 | SVIYLYLTFY | L12; L11; L14; L6; L7; | SNFGAISSV | L3; L28; L69; L20; L51; L4; L70; |
| | | L10; L58 | | L64; L58; L73 |
| 31 | SVKGLQPSV | L13; L51; L58; L20; L39; | SSFKWDLTAF | L53; L16; L10; L43; L26; L27; L58; |
| | | L3; L5 | | L59; L52; L54 |
| 32 | SVRVVTTF | L26; L43; L58; L29; L23; | SSRLSFKEL | L59; L60; L13; L73; L39; L57; L58; |
| | | L52; L59 | | L27; L61; L68 |
| 33 | SVTTEILPV | L20; L24; L13; L3; L7; L4; | STAALGVLM | L58; L20; L19; L7; L53; L21; L12; |
| | | L11 | | L52; L11; L70 |
| 34 | SVYAWNRKR | L7; L21; L15; L17; L19; | STFEEAALC | L7; L19; L14; L20; L13; L53; L11; |
| | | L6; L11 | | L12; L21; L52 |
| 35 | SWMESEFRVY | L27; L14; L10; L26; L40; | STKHFYWFF | L58; L43; L53; L13; L10; L11; L52; |
| | | L41; L29 | | L12; L70; L69 |
| 36 | SWVMRIMTW | L49; L10; L69; L8; L54; | SVFNICQAV | L24; L20; L13; L3; L64; L58; L4; |
| | | L9; L25 | | L69; L5; L28 |
| 37 | SYFAVHFI | L48; L71; L72; L64; L9; | SYIVDSVTV | L72; L71; L28; L13; L9; L8; L38; |
| | | L47; L62 | | L62; L35; L45 |
| 38 | SYFVVKRHTF | L8; L71; L72; L9; L16; | TASWFTAL | L67; L59; L61; L60; L57; L74; L68; |
| | | L12; L52 | | L23; L70; L32 |
| 39 | TEIDPKLDN | L46; L41; L36; L45; L38; | TEVVGDIIL | L36; L37; L29; L41; L38; L40; L45; |
| | | L37; L40 | | L32; L25; L34 |
| 40 | TEMLAKAL | L33; L29; L25; L37; L45; | TFFKLVNKF | L8; L9; L29; L72; L12; L62; L49; |
| | | L23; L40 | | L71; L16; L34 |
| 41 | TETDLTKGP | L46; L38; L42; L41; L40; | TGYHFREL | L23; L59; L65; L25; L48; L61; L55; |
| | | L45; L37 | | L47; L64; L66 |
| 42 | TEVLTEEVV | L45; L36; L37; L38; L29; | TPFEIKLAK | L31; L50; L49; L19; L7; L6; L32; |
| | | L46; L42 | | L51; L56; L13 |
| 43 | TGVEHVTFF | L69; L8; L65; L33; L9; | TPKGPKVKY | L31; L49; L39; L26; L51; L65; L14; |
| | | L29; L49 | | L56; L13; L12 |
| 44 | THLSVDTKF | L34; L8; L35; L28; L27; | TRFQTLLAL | L35; L25; L65; L64; L30; L34; L66; |
| | | L9; L12 | | L28; L4; L3 |
| 45 | TIKGTHHWL | L23; L39; L58; L67; L60; | TSVVLLSVL | L69; L73; L70; L53; L60; L61; L67; |
| | | L10; L74 | | L59; L55; L64 |
| 46 | TIQITISSF | L26; L10; L28; L43; L16; | TTIKPVTY | L54; L55; L58; L26; L70; L52; L29; |
| | | L72; L39 | | L69; L53; L43 |
| 47 | TLLALHRSY | L12; L14; L16; L27; L26; | TTKGGRFVL | L70; L65; L16; L53; L39; L55; L69; |
| | | L10; L55 | | L10; L20; L58 |
| 48 | TLPVNVAF | L57; L62; L26; L71; L72; | TVEEAKTVL | L63; L68; L32; L39; L23; L31; L62; |
| | | L43; L23 | | L56; L67; L34 |
| 49 | TNGDFLHFL | L65; L73; L4; L64; L20; | TVNVLAWLY | L12; L14; L18; L1; L31; L26; L52; |
| | | L34; L69 | | L55; L6; L16 |
| 50 | TNLPLQLGF | L12; L8; L52; L41; L9; | TVYDDGARR | L19; L17; L15; L21; L11; L6; L7; |
| | | L40; L16 | | L20; L14; L10 |
| 51 | TPAFDKSAF | L31; L49; L22; L32; L39; | TVYDPLQPEL | L67; L20; L60; L28; L61; L5; L2; |
| | | L56; L23 | | L4; L6; L13 |
| 52 | TPGSGVPVV | L47; L51; L39; L32; L50; | VAAGLEAPF | L58; L31; L74; L70; L43; L49; L12; |
| | | L22; L56 | | L59; L52; L53 |
| 53 | TQLGIEFLKR | L15; L7; L17; L21; L30; | VAKNLNESL | L43; L67; L70; L58; L69; L53; L68; |
| | | L19; L6 | | L60; L61; L56 |
| 54 | TQSRNLQEF | L26; L34; L58; L24; L27; | VCINGLMLL | L8; L34; L9; L74; L61; L69; L73; |
| | | L8; L35 | | L60; L4; L59 |
| 55 | TRFASVYAW | L35; L25; L65; L30; L34; | VGYLQPRTF | L55; L27; L47; L26; L52; L69; L9; |
| | | L66; L16 | | L48; L59; L65 |
| 56 | TRFFYVLGL | L65; L35; L30; L25; L64; | VLDWLEEKF | L5; L62; L63; L68; L1; L9; L12; |
| | | L66; L34 | | L49; L74; L18 |
| 57 | TSFGPLVRK | L7; L6; L19; L13; L20; | VLLPLTQY | L26; L59; L27; L43; L6; L14; L12; |
| | | L17; L15 | | L1; L4; L18 |
| 58 | TSKTTVASL | L65; L70; L23; L57; L10; | VLYENQKLI | L48; L3; L2; L24; L5; L16; L55; |
| | | L58; L39 | | L64; L4; L9 |
| 59 | TSLSGFKLK | L7; L13; L19; L17; L6; | VPWDTIANY | L49; L31; L43; L14; L12; L65; L51; |
| | | L15; L55 | | L47; L18; L27 |
| 60 | TTAAKLMVV | L20; L73; L70; L69; L3; | VSDADSTL | L63; L68; L62; L60; L1; L67; L74; |
| | | L10; L58 | | L55; L61; L54 |
| 61 | TTADIVVED | L20; L19; L64; L69; L7; | VSDIDYVPL | L68; L63; L67; L1; L60; L74; L62; |
| | | L17; L65 | | L53; L43; L61 |
| 62 | TTIKPVTYK | L13; L7; L19; L6; L17; | VTANVNALL | L20; L53; L70; L73; L54; L58; L60; |
| | | L20; L15 | | L1; L52; L61 |
| 63 | TTYPGQGLNGY | L11; L14; L1; L18; L6; | VTVYSHLLL | L73; L60; L61; L67; L70; L53; L1; |
| | | L16; L10 | | L8; L20; L69 |
| 64 | TVATSRTLSY | L10; L18; L11; L12; L6; | VVAIDYKHY | L26; L14; L11; L10; L18; L52; L43; |
| | | L14; L26 | | L12; L1; L58 |
| 65 | TVIEVQGYK | L7; L13; L6; L19; L20; | VVDSYYSLL | L63; L68; L5; L74; L1; L62; L67; |
| | | L14; L11 | | L18; L60; L58 |
| 66 | TVKPGNFNK | L7; L13; L19; L17; L15; | VVFLHVTY | L26; L29; L59; L27; L12; L52; L18; |
| | | L6; L21 | | L54; L31; L58 |
| 67 | TYTGAIKL | L62; L72; L66; L71; L8; | WLIVGVALL | L74; L3; L2; L4; L5; L20; L16; L34; |
| | | L64; L9 | | L62; L28 |
| 68 | VAIDYKHY | L43; L58; L70; L59; L69; | WLMWLIINL | L4; L2; L5; L74; L3; L64; L13; L65; |
| | | L14; L26 | | L20; L69 |
| 69 | VANGDSEVV | L58; L70; L49; L32; L68; | WTAGAAAYY | L14; L11; L58; L1; L18; L12; L10; |
| | | L43; L67 | | L54; L70; L52 |
| 70 | VAVPTGYVD | L49; L61; L67; L32; L60; | YANRNRFL | L60; L61; L70; L58; L74; L59; L64; |
| | | L70; L54 | | L63; L68; L55 |
| 71 | VELGTEVNEF | L41; L40; L8; L36; L9; | YANRNRFLY | L58; L12; L1; L59; L70; L49; L69; |
| | | L29; L37 | | L31; L18; L14 |
| 72 | VENPDILRVY | L40; L41; L29; L14; L26; | YCNKTVGEL | L65; L32; L58; L74; L57; L66; L62; |
| | | L52; L27 | | L61; L71; L72 |
| 73 | VEVQPQLEM | L36; L29; L45; L37; L46; | YENFNQHEV | L45; L37; L38; L42; L46; L29; L48; |
| | | L38; L41 | | L33; L36; L73 |
| 74 | VFLFVAAIF | L72; L62; L9; L12; L8; | YGDFSHSQL | L68; L63; L62; L28; L60; L67; L61; |
| | | L71; L31 | | L34; L57; L1 |
| 75 | VFNGVSFSTF | L8; L9; L62; L72; L71; | YLNSTNVTI | L2; L4; L24; L5; L3; L34; L49; L16; |
| | | L26; L12 | | L44; L8 |
| 76 | VINGDRWFL | L58; L60; L16; L73; L74; | YLTNDVSFL | L74; L4; L2; L3; L5; L64; L57; L61; |
| | | L4; L63 | | L62; L44 |
| 77 | VIPDYNTY | L43; L66; L26; L57; L59; | YMPYFFTLL | L57; L5; L64; L67; L62; L9; L66; |
| | | L72; L71 | | L8; L59; L74 |
| 78 | VKNGSIHLY | L14; L27; L66; L18; L12; | YPLECIKDL | L32; L39; L47; L31; L56; L23; L22; |
| | | L26; L58 | | L25; L50; L49 |
| 79 | VLSEARQHL | L4; L2; L5; L57; L16; L3; | YSDVENPHL | L68; L63; L60; L1; L74; L61; L62; |
| | | L9 | | L34; L5; L54 |
| 80 | VLTEEVVLK | L7; L6; L13; L2; L19; L4; | YSKHTPINL | L74; L58; L70; L60; L69; L43; L61; |
| | | L21 | | L67; L73; L64 |
| 81 | VLVPHVGEI | L3; L5; L4; L2; L74; L49; | YTNDKACPL | L61; L73; L60; L70; L43; L58; L59; |
| | | L69 | | L72; L57; L71 |
| 82 | VLYNSASF | L43; L26; L27; L72; L59; | YVRNLQHRL | L58; L20; L4; L10; L67; L11; L60; |
| | | L71; L62 | | L5; L44; L39 |
| 83 | VPANSTVL | L22; L56; L39; L47; L25; | AASGNLLL | L74; L70; L67; L61; L73; L69; L60; |
| | | L51; L31 | | L68; L58; L64; L63 |
| 84 | VPHISRQRL | L56; L39; L22; L32; L49; | AEAELAKNV | L45; L46; L42; L38; L37; L40; L41; |
| | | L31; L25 | | L36; L33; L29; L24 |
| 85 | VSLDNVLSTF | L53; L52; L54; L8; L16; | AIMQLFFSY | L12; L26; L7; L6; L14; L16; L18; |
| | | L9; L59 | | L10; L40; L27; L1 |
| 86 | VTDVTQLY | L18; L1; L54; L62; L63; | ALYNKYKYF | L43; L10; L16; L26; L69; L27; L12; |
| | | L52; L68 | | L11; L9; L3; L6 |
| 87 | VTFQSAVKR | L19; L7; L15; L21; L17; | ANGDSEVVL | L44; L67; L65; L35; L73; L66; L34; |
| | | L6; L52 | | L28; L36; L69; L56 |
| 88 | VTIAEILL | L74; L73; L70; L60; L53; | AQNSVRVL | L65; L44; L48; L27; L64; L35; L55; |
| | | L67; L55 | | L26; L73; L24; L69 |
| 89 | VVDDPCPIHFY | L18; L14; L1; L12; L11; | ASFDNFKFV | L73; L70; L69; L13; L45; L58; L48; |
| | | L5; L6 | | L64; L20; L3; L24 |
| 90 | VVFVLWAHGF | L16; L12; L26; L52; L53; | ASLPFGWLI | L55; L53; L52; L73; L48; L54; L24; |
| | | L11; L31 | | L7; L8; L16; L69 |
| 91 | VVIGTSKF | L58; L26; L74; L11; L54; | ATLPKGIMM | L73; L7; L13; L6; L53; L70; L52; |
| | | L63; L60 | | L61; L60; L58; L69 |
| 92 | VVRIKIVQM | L13; L26; L11; L58; L43; | AVINGDRWF | L10; L11; L26; L52; L55; L16; L58; |
| | | L39; L23 | | L27; L14; L43; L53 |
| 93 | VYEKLKPVL | L9; L8; L66; L62; L72; | DLNETLVTM | L11; L4; L23; L2; L5; L49; L3; L10; |
| | | L71; L63 | | L62; L32; L26 |
| 94 | VYYTSNPTTF | L8; L9; L71; L72; L62; | EPVLKGVKL | L23; L56; L39; L32; L22; L49; L31; |
| | | L12; L66 | | L50; L25; L20; L11 |
| 95 | WADNNCYL | L68; L63; L74; L67; L62; | ETTADIVVF | L11; L10; L53; L20; L52; L54; L31; |
| | | L60; L70 | | L49; L9; L19; L70 |
| 96 | WKYPQVNGL | L27; L44; L64; L25; L28; | FACPDGVKH | L59; L43; L58; L49; L31; L67; L32; |
| | | L66; L3 | | L69; L70; L61; L68 |
| 97 | WLDDVVYC | L62; L5; L63; L68; L74; | FAIGLALY | L59; L58; L69; L70; L12; L31; L14; |
| | | L1; L2 | | L74; L43; L49; L1 |
| 98 | WLIVGVAL | L23; L61; L59; L71; L43; | FAYTKRNVI | L70; L69; L47; L59; L61; L67; L58; |
| | | L72; L74 | | L64; L32; L49; L68 |
| 99 | WLPTGTLLV | L5; L24; L2; L57; L64; L3; | FFSYFAVHF | L62; L72; L71; L12; L9; L59; L58; |
| | | L4 | | L66; L69; L8; L31 |
| 100 | YEKLKPVL | L23; L37; L29; L33; L45; | FLAFVVFL | L74; L2; L62; L64; L3; L4; L68; |
| | | L36; L25 | | L23; L69; L61; L20 |
| 101 | YENQKLIAN | L46; L29; L37; L45; L38; | FLWLLWPVTL | L2; L5; L62; L3; L67; L68; L4; L74; |
| | | L42; L33 | | L44; L57; L69 |
| 102 | YFLQSINF | L71; L72; L9; L8; L62; | FLYENAFL | L74; L2; L62; L61; L68; L59; L5; |
| | | L12; L33 | | L3; L4; L57; L63 |
| 103 | YFMRFRRAF | L71; L72; L59; L9; L12; | FNPETNILL | L64; L57; L5; L62; L66; L67; L74; |
| | | L8; L62 | | L68; L63; L71; L61 |
| 104 | YFRLTLGVY | L72; L27; L14; L71; L12; | FSLWVYKQF | L60; L59; L53; L52; L55; L58; L43; |
| | | L26; L59 | | L61; L70; L69; L10 |
| 105 | YFYTSKTTV | L71; L72; L45; L62; L48; | FSYFA VHFI | L70; L69; L73; L47; L64; L55; L61; |
| | | L46; L47 | | L68; L74; L67; L20 |
| 106 | YGADLKSF | L59; L43; L23; L27; L26; | FVFKNIDGY | L58; L26; L11; L10; L12; L16; L14; |
| | | L69; L66 | | L49; L31; L1; L18 |
| 107 | YHTTDPSFL | L28; L34; L74; L35; L44; | GGAPTKVTF | L27; L26; L44; L65; L54; L49; L52; |
| | | L60; L61 | | L34; L53; L9; L8 |
| 108 | YIKWPWYIWL | L43; L60; L13; L58; L39; | GLFCLLNRY | L12; L26; L6; L14; L27; L18; L16; |
| | | L67; L68 | | L4; L10; L11; L3 |
| 109 | YLDAYNMMI | L5; L68; L1; L2; L34; L24; | GVVFLHVTY | L26; L12; L27; L7; L52; L14; L49; |
| | | L63 | | L13; L31; L18; L10 |
| 110 | YLEGSVRVV | L3; L2; L64; L24; L5; L63; | GYKSVNITF | L8; L9; L66; L13; L26; L27; L12; |
| | | L4 | | L72; L53; L71; L52 |
| 111 | YMPYFFTL | L57; L66; L5; L59; L67; | HLKDGTCGL | L43; L3; L11; L10; L2; L26; L13; |
| | | L47; L71 | | L23; L4; L44; L16 |
| 112 | YPVASPNEC | L49; L32; L31; L50; L51; | IAIVMVTIM | L70; L69; L61; L59; L32; L67; L74; |
| | | L47; L22 | | L31; L60; L58; L47 |
| 113 | YTNSFTRGV | L73; L58; L64; L70; L11; | IANYAKPFL | L61; L60; L58; L63; L59; L74; L68; |
| | | L48; L3 | | L70; L73; L31; L47 |
| 114 | YWFFSNYL | L62; L71; L72; L60; L61; | IFFITGNTL | L72; L71; L8; L9; L62; L28; L48; |
| | | L74; L59 | | L34; L25; L61; L67 |
| 115 | YYKKDNSYF | L8; L9; L58; L72; L71; | IIWFLLLSV | L5; L4; L24; L73; L3; L50; L2; L47; |
| | | L66; L12 | | L67; L18; L69 |
| 116 | YYPDKVFRS | L66; L8; L12; L9; L72; | IKWPWYIWL | L44; L66; L27; L64; L74; L25; L61; |
| | | L64; L71 | | L67; L65; L69; L60 |
| 117 | AAAYYVGYL | L74; L69; L67; L70; L58; | ISTKHFYWF | L53; L54; L55; L8; L52; L59; L73; |
| | | L61; L64; L60 | | L74; L9; L58; L60 |
| 118 | AALQIPFAM | L61; L31; L67; L12; L32; | ITILDGISQY | L11; L18; L10; L14; L52; L1; L26; |
| | | L60; L70; L69 | | L53; L12; L16; L27 |
| 119 | AAYYVGYL | L74; L67; L69; L70; L61; | IYNDKVAGF | L72; L9; L8; L62; L71; L66; L12; |
| | | L58; L59; L60 | | L26; L11; L43; L58 |
| 120 | AEILLIIM | L29; L37; L33; L45; L36; | KACPLIAAV | L69; L70; L73; L3; L67; L58; L5; |
| | | L42; L46; L38 | | L51; L64; L20; L50 |
| 121 | AEIPKEEVK | L36; L37; L42; L38; L46; | KENSYTTTI | L45; L37; L36; L38; L48; L24; L46; |
| | | L45; L40; L41 | | L41; L8; L42; L33 |
| 122 | AEIPKEEVKP | L46; L38; L42; L36; L37; | KFTDGVCLF | L8; L9; L54; L62; L72; L16; L12; |
| | | L40; L41; L45 | | L71; L52; L53; L14 |
| 123 | AHFPREGVF | L27; L28; L34; L35; L33; | KIEELFYSY | L18; L14; L16; L12; L1; L26; L13; |
| | | L69; L26; L44 | | L54; L27; L5; L6 |
| 124 | AIVVTCLAY | L43; L12; L26; L18; L6; | KLKPVLDWL | L3; L5; L4; L16; L2; L13; L74; L26; |
| | | L14; L59; L16 | | L14; L53; L39 |
| 125 | ALEPLVDL | L62; L23; L63; L74; L68; | KMFDAYVNTF | L16; L53; L26; L54; L9; L52; L8; |
| | | L4; L5; L1 | | L27; L3; L72; L71 |
| 126 | ALLSDLQDL | L4; L2; L24; L5; L3; L16; | LADKFPVL | L68; L63; L67; L74; L61; L60; L47; |
| | | L44; L74 | | L59; L32; L70; L62 |
| 127 | AQKFNGLTV | L24; L48; L26; L3; L58; | LIISVTSNY | L26; L43; L58; L14; L11; L12; L6; |
| | | L13; L27; L45 | | L18; L10; L1; L59 |
| 128 | AQTGIAVL | L44; L35; L27; L28; L24; | LLLDDFVEI | L2; L5; L4; L24; L3; L8; L16; L9; |
| | | L26; L25; L48 | | L67; L47; L49 |
| 129 | ASIKNFKSV | L73; L48; L46; L70; L69; | LPPAYTNSF | L31; L39; L49; L22; L47; L32; L56; |
| | | L58; L45; L13 | | L72; L71; L57; L9 |
| 130 | ASQSIIAY | L18; L43; L26; L1; L70; | LQTPFEIKL | L44; L64; L69; L74; L28; L24; L58; |
| | | L14; L27; L59 | | L73; L26; L35; L34 |
| 131 | AVHECFVKR | L15; L21; L7; L19; L17; | LRSDVLLPL | L66; L64; L30; L35; L34; L65; L67; |
| | | L6; L13; L11 | | L59; L25; L61; L4 |
| 132 | AVITREVGF | L26; L10; L11; L58; L52; | LTKHPNQEY | L43; L58; L26; L13; L70; L12; L1; |
| | | L12; L54; L16 | | L52; L14; L53; L18 |
| 133 | AYKIEELFY | L12; L14; L72; L13; L65; | LVRDLPQGF | L58; L52; L26; L43; L12; L16; L49; |
| | | L71; L66; L26 | | L11; L53; L10; L31 |
| 134 | CANDPVGF | L58; L59; L43; L62; L70; | MSAPPAQY | L70; L54; L1; L18; L59; L43; L69; |
| | | L54; L49; L69 | | L14; L58; L26; L55 |
| 135 | CEIVGGQIV | L45; L37; L38; L36; L42; | NATNVVIKV | L20; L70; L69; L64; L47; L58; L24; |
| | | L46; L29; L24 | | L73; L49; L50; L19 |
| 136 | CESHGKQVV | L37; L45; L42; L38; L24; | NSIAIPTNF | L58; L54; L53; L52; L70; L9; L74; |
| | | L46; L36; L29 | | L69; L60; L55; L49 |
| 137 | CPDGVKHVY | L31; L49; L32; L65; L14; | QPTESIVRF | L49; L31; L56; L39; L32; L22; L34; |
| | | L18; L39; L1 | | L11; L50; L9; L29 |
| 138 | DEFIERYKL | L29; L37; L25; L36; L41; | RAMPNMLRI | L73; L69; L24; L54; L47; L70; L52; |
| | | L40; L45; L33 | | L53; L55; L8; L49 |
| 139 | DEFTPFDVV | L29; L45; L37; L46; L47; | REHEHEIAW | L38; L33; L46; L42; L37; L41; L40; |
| | | L25; L36; L42 | | L29; L36; L45; L54 |
| 140 | DLNGDVVAI | L10; L49; L3; L4; L2; L23; | REHEHEIAWY | L14; L29; L41; L40; L38; L27; L46; |
| | | L24; L11 | | L26; L36; L42; L43 |
| 141 | DVFYKENSY | L11; L10; L29; L16; L12; | REVLSDREL | L36; L37; L45; L40; L41; L38; L33; |
| | | L26; L14; L19 | | L55; L27; L65; L29 |
| 142 | DYQGKPLEF | L8; L9; L72; L71; L66; | RSFIEDLLF | L53; L54; L52; L55; L16; L73; L18; |
| | | L12; L10; L62 | | L65; L27; L26; L9 |
| 143 | EAARYMRSL | L10; L32; L60; L70; L61; | RTNVYLAVF | L16; L53; L54; L52; L73; L65; L58; |
| | | L20; L11; L69 | | L26; L18; L14; L59 |
| 144 | EKFKEGVEF | L27; L44; L34; L11; L10; | RYFKYWDQT | L16; L14; L26; L71; L65; L8; L27; |
| | | L49; L26; L8 | Y | L54; L72; L12; L66 |
| 145 | EMLDNRATL | L8; L16; L25; L4; L10; | SALWEIQQV | L24; L4; L47; L69; L70; L32; L73; |
| | | L34; L40; L41 | | L64; L58; L2; L13 |
| 146 | ENPDILRVY | L11; L10; L40; L41; L64; | SANNCTFEY | L58; L43; L59; L49; L70; L12; L14; |
| | | L14; L66; L26 | | L69; L26; L31; L27 |
| 147 | EQFKKGVQI | L24; L48; L44; L34; L35; | SEAVEAPLV | L38; L45; L42; L36; L37; L40; L46; |
| | | L20; L27; L25 | | L28; L41; L24; L29 |
| 148 | ETIQITISSF | L11; L10; L20; L52; L19; | SEDNQTTTI | L45; L37; L34; L36; L42; L41; L68; |
| | | L53; L41; L40 | | L38; L40; L48; L24 |
| 149 | EVVGDIILK | L19; L7; L20; L11; L17; | SEFDRDAAM | L29; L46; L36; L37; L33; L40; L38; |
| | | L6; L10; L13 | | L45; L25; L42; L41 |
| 150 | EWFLAYILF | L9; L41; L40; L8; L34; | SEIIGYKAI | L45; L40; L41; L37; L48; L36; L42; |
| | | L62; L29; L31 | | L46; L38; L29; L25 |
| 151 | EYADVFHL | L9; L8; L66; L20; L72; | SFNPETNIL | L62; L72; L71; L28; L8; L9; L34; |
| | | L71; L65; L35 | | L32; L65; L64; L35 |
| 152 | EYFNSVCRL | L8; L9; L72; L71; L20; | SHKPPISF | L43; L28; L23; L27; L66; L58; L35; |
| | | L34; L64; L10 | | L26; L39; L29; L70 |
| 153 | FAAETLKAT | L59; L43; L61; L69; L60; | SSSDNIAL | L67; L61; L70; L68; L60; L56; L59; |
| | | L58; L70; L32 | | L35; L57; L73; L74 |
| 154 | FAFPFTIYSLL | L67; L61; L31; L74; L60; | SVLNDILSR | L7; L15; L17; L6; L19; L21; L11; |
| | | L69; L58; L70 | | L16; L13; L4; L10 |
| 155 | FEIKLAKKF | L29; L41; L40; L37; L45; | SWNADLYKL | L4; L8; L34; L62; L56; L9; L32; |
| | | L58; L36; L49 | | L35; L37; L30; L39 |
| 156 | FELEDFIPM | L29; L46; L45; L36; L42; | SYSGQSTQL | L9; L72; L8; L66; L71; L28; L65; |
| | | L40; L31; L37 | | L35; L64; L62; L56 |
| 157 | FLAHIQWMV | L2; L20; L4; L24; L5; L3; | TELEPPCRF | L29; L41; L40; L33; L36; L45; L37; |
| | | L69; L64 | | L8; L9; L38; L46 |
| 158 | FLAYILFTR | L19; L21; L17; L15; L4; | TLIVNSVLL | L74; L2; L4; L28; L62; L34; L26; |
| | | L2; L3; L20 | | L9; L8; L5; L44 |
| 159 | FNPETNIL | L57; L66; L62; L67; L71; | TPFDVVRQC | L32; L31; L49; L51; L39; L47; L64; |
| | | L72; L59; L64 | | L65; L19; L56; L50 |
| 160 | FPDLNGDVV | L50; L32; L47; L68; L22; | TPSGTWLTY | L49; L31; L65; L32; L26; L12; L18; |
| | | L62; L39; L31 | | L22; L51; L39; L14 |
| 161 | FQPTNGVGY | L26; L27; L58; L71; L12; | VASKILGL | L74; L70; L61; L60; L58; L59; L23; |
| | | L11; L72; L66 | | L73; L67; L56; L47 |
| 162 | FRYMNSQGL | L25; L64; L35; L30; L66; | VDTDFVNEF | L9; L8; L59; L66; L43; L29; L58; |
| | | L28; L34; L61 | | L49; L72; L69; L26 |
| 163 | FSASTSAF | L59; L58; L43; L60; L70; | VIYLYLTFY | L6; L12; L43; L58; L26; L59; L1; |
| | | L61; L74; L54 | | L18; L14; L69; L27 |
| 164 | FTDGVCLF | L63; L62; L1; L58; L68; | VLYENQKL | L2; L24; L74; L4; L25; L5; L3; L55; |
| | | L70; L74; L60 | | L68; L63; L64 |
| 165 | FVAAIFYLI | L20; L12; L47; L5; L49; | VMFTPLVPF | L9; L43; L26; L59; L6; L16; L71; |
| | | L64; L74; L24 | | L72; L52; L31; L12 |
| 166 | FVLALLSDL | L74; L60; L4; L67; L61; | VSDIDITF | L63; L68; L54; L1; L53; L62; L18; |
| | | L59; L31; L5 | | L74; L52; L55; L60 |
| 167 | FVSLAIDAY | L31; L1; L59; L14; L12; | VTIDYTEISF | L53; L52; L16; L10; L43; L11; L8; |
| | | L26; L58; L18 | | L58; L12; L26; L9 |
| 168 | FYEDFLEY | L12; L59; L72; L71; L66; | VVDDPCPIHF | L5; L63; L68; L62; L60; L12; L74; |
| | | L1; L62; L18 | | L58; L16; L52; L9 |
| 169 | FYLTNDVSF | L71; L72; L9; L8; L66; | VVDYGARFY | L18; L1; L14; L55; L12; L63; L58; |
| | | L12; L62; L52 | | L68; L52; L62; L49 |
| 170 | GEAANFCAL | L37; L36; L46; L45; L40; | VVNQNAQAL | L60; L57; L39; L61; L56; L32; L68; |
| | | L41; L44; L38 | | L58; L16; L59; L26 |
| 171 | GEIPVAYRK | L37; L36; L45; L7; L41; | VVVNAANVY | L26; L12; L14; L31; L58; L52; L10; |
| | | L40; L38; L29 | | L16; L54; L69; L59 |
| 172 | GEIPVAYRKV | L45; L37; L38; L46; L36; | YANSVFNIC | L59; L60; L61; L32; L58; L70; L49; |
| | | L41; L40; L24 | | L69; L67; L31; L47 |
| 173 | GELGDVRET | L37; L45; L46; L41; L40; | YFTEQPIDL | L62; L72; L74; L71; L9; L8; L64; |
| | | L36; L38; L42 | | L61; L67; L60; L66 |
| 174 | GEVFNATRF | L37; L40; L41; L29; L45; | YFVVKRHTF | L71; L72; L8; L9; L49; L62; L12; |
| | | L36; L27; L33 | | L43; L59; L29; L60 |
| 175 | GIITTVAAF | L10; L26; L11; L58; L27; | YIVDSVTV | L58; L28; L43; L48; L61; L20; L2; |
| | | L28; L12; L43 | | L59; L73; L67; L69 |
| 176 | GNFKNLREF | L27; L26; L10; L52; L55; | YKKPASREL | L66; L27; L60; L64; L44; L61; L58; |
| | | L37; L49; L58 | | L59; L43; L39; L70 |
| 177 | GVYSVIYLYL | L6; L74; L67; L10; L13; | YSFLPGVY | L1; L59; L70; L69; L55; L27; L58; |
| | | L7; L20; L11 | | L26; L43; L14; L66 |
| 178 | GWIFGTTL | L28; L71; L37; L72; L60; | YSVIYLYL | L61; L74; L60; L73; L67; L59; L65; |
| | | L48; L61; L35 | | L69; L1; L70; L55 |
| 179 | GYAFEHIVY | L12; L66; L27; L72; L26; | YYTSNPTTF | L9; L8; L66; L72; L71; L62; L58; |
| | | L71; L14; L65 | | L12; L49; L60; L27 |
| 180 | HEFCSQHTM | L29; L37; L36; L45; L46; | AANFCALIL | L73; L61; L69; L70; L74; L59; L67; |
| | | L32; L33; L38 | | L60; L32; L68; L31; L58 |
| 181 | HFAIGLALY | L12; L14; L18; L11; L72; | ACFVLAAVY | L14; L27; L12; L26; L40; L31; L69; |
| | | L71; L26; L49 | | L41; L72; L18; L71; L16 |
| 182 | HSYFTSDYY | L14; L18; L1; L65; L54; | AELEGIQY | L29; L41; L40; L27; L45; L33; L37; |
| | | L43; L58; L12 | | L42; L46; L26; L38; L36 |
| 183 | HTTDPSFL | L73; L60; L20; L70; L62; | ALCEKALKY | L12; L18; L6; L14; L16; L26; L1; |
| | | L55; L61; L63 | | L11; L43; L10; L13; L27 |
| 184 | HVQLSLPVL | L28; L32; L39; L59; L56; | ALLTKSSEY | L26; L12; L14; L27; L16; L18; L6; |
| | | L31; L67; L60 | | L43; L10; L72; L71; L1 |
| 185 | IADYNYKL | L63; L68; L67; L62; L74; | ALWEIQQVV | L5; L24; L2; L4; L3; L64; L13; L16; |
| | | L60; L54; L70 | | L69; L46; L44; L37 |
| 186 | IAEILLIIM | L31; L32; L69; L63; L67; | ATSRTLSYY | L1; L14; L18; L58; L6; L12; L54; |
| | | L68; L70; L47 | | L52; L11; L53; L7; L10 |
| 187 | IIIWFLLL | L74; L73; L60; L61; L67; | AVVCFNSTY | L26; L14; L11; L10; L16; L43; L12; |
| | | L59; L47; L48 | | L18; L58; L54; L27; L52 |
| 188 | ILFTRFFYV | L5; L4; L3; L2; L6; L69; | AYILFTRFF | L9; L72; L71; L8; L40; L64; L62; |
| | | L73; L20 | | L12; L27; L41; L66; L26 |
| 189 | ILTSLLVLV | L2; L4; L5; L3; L24; L64; | DEDDSEPVL | L36; L29; L35; L28; L37; L41; L34; |
| | | L73; L20 | | L32; L68; L25; L40; L63 |
| 190 | IPRRNVATL | L22; L56; L39; L32; L47; | EEHVQIHTI | L45; L37; L42; L41; L29; L48; L40; |
| | | L51; L31; L49 | | L24; L34; L36; L25; L46 |
| 191 | IQITISSF | L26; L27; L43; L58; L28; | EIKESVQTF | L10; L11; L26; L23; L43; L58; L16; |
| | | L48; L71; L72 | | L9; L39; L34; L8; L49 |
| 192 | ISDEFSSNV | L63; L68; L18; L1; L5; | ELTPVVQTI | L24; L20; L3; L10; L4; L49; L9; L8; |
| | | L62; L70; L73 | | L34; L5; L55; L2 |
| 193 | IVDTVSALVY | L18; L1; L12; L14; L68; | ELYSPIFLI | L24; L20; L11; L4; L17; L10; L16; |
| | | L52; L6; L54 | | L6; L2; L9; L8; L34 |
| 194 | IVVTCLAYY | L11; L12; L14; L58; L10; | FAYANRNRF | L58; L70; L69; L59; L60; L49; L74; |
| | | L18; L52; L6 | | L61; L47; L31; L12; L32 |
| 195 | KAALLADKF | L53; L54; L52; L58; L55; | FGDSVEEVL | L67; L68; L63; L62; L32; L34; L44; |
| | | L12; L31; L69 | | L61; L5; L31; L28; L74 |
| 196 | KATYKPNTW | L54; L52; L49; L53; L16; | FHLDGEVITF | L34; L35; L28; L72; L27; L71; L9; |
| | | L69; L55; L70 | | L31; L8; L60; L52; L12 |
| 197 | KAYKIEELFY | L12; L14; L18; L58; L54; | FPFTIYSL | L23; L32; L56; L47; L50; L31; L25; |
| | | L52; L27; L69 | | L66; L39; L22; L61; L49 |
| 198 | KFLTENLLL | L8; L9; L71; L72; L13; | FSYFA VHF | L59; L74; L58; L70; L60; L55; L69; |
| | | L53; L73; L16 | | L68; L62; L61; L43; L54 |
| 199 | KIILFLAL | L73; L59; L67; L60; L61; | FTEERLKLF | L1; L58; L60; L62; L10; L63; L69; |
| | | L23; L74; L68 | | L52; L70; L11; L59; L12 |
| 200 | KKFLPFQQF | L27; L16; L44; L33; L26; | FTNVYADSF | L53; L58; L59; L43; L71; L72; L62; |
| | | L9; L53; L52 | | L54; L52; L12; L60; L16 |
| 201 | KLDDKDPNF | L5; L63; L2; L16; L9; L54; | FVFPLNSI | L59; L47; L20; L64; L69; L48; L3; |
| | | L62; L18 | | L25; L67; L50; L68; L61 |
| 202 | KLFIRQEEV | L3; L2; L24; L5; L4; L16; | FVVSTGYHF | L58; L60; L11; L10; L12; L74; L49; |
| | | L23; L73 | | L54; L59; L31; L9; L52 |
| 203 | KLLHKPIVW | L16; L52; L6; L54; L4; L2; | GAVDINKL | L74; L70; L69; L60; L64; L61; L67; |
| | | L21; L53 | | L58; L44; L37; L59; L55 |
| 204 | KLMVVIPDY | L26; L14; L12; L6; L18; | GSVRVVTTF | L53; L54; L52; L26; L27; L55; L65; |
| | | L16; L43; L13 | | L10; L49; L58; L60; L74 |
| 205 | KLQDVVNQN | L4; L16; L2; L5; L14; L21; | GVVDYGARF | L10; L11; L12; L26; L49; L58; L54; |
| | | L3; L24 | | L52; L43; L14; L20; L27 |
| 206 | KNLSDRVVF | L16; L53; L52; L27; L54; | HAFHTPAF | L59; L49; L31; L58; L32; L70; L50; |
| | | L9; L8; L55 | | L60; L54; L43; L61; L47 |
| 207 | KQASLNGVTL | L44; L56; L27; L26; L16; | HVVAFNTLL | L20; L32; L56; L74; L31; L44; L64; |
| | | L24; L34; L13 | | L53; L34; L73; L11; L28 |
| 208 | KQFDTYNL | L44; L24; L16; L27; L26; | HWFVTQRNF | L49; L8; L9; L53; L52; L27; L65; |
| | | L33; L48; L65 | | L55; L62; L71; L34; L29 |
| 209 | KSAGFPFNK | L7; L6; L13; L54; L21; | IAAVITREV | L70; L64; L69; L58; L43; L47; L59; |
| | | L55; L19; L15 | | L49; L73; L61; L20; L32 |
| 210 | KSAPLIELC | L52; L53; L54; L55; L18; | IAIILASF | L59; L43; L54; L47; L58; L52; L60; |
| | | L73; L16; L69 | | L26; L53; L31; L23; L61 |
| 211 | KVAGFAKF | L54; L26; L58; L16; L53; | IAMACLVGL | L59; L31; L58; L60; L67; L56; L61; |
| | | L11; L52; L74 | | L69; L70; L74; L47; L63 |
| 212 | KVKPTVVV | L13; L51; L39; L23; L58; | IFTIGTVTL | L72; L62; L71; L9; L8; L28; L56; |
| | | L69; L73; L26 | | L61; L68; L49; L67; L34 |
| 213 | KVKPTVVVN | L13; L26; L52; L16; L51; | IFVDGVPFV | L71; L72; L64; L4; L8; L2; L62; |
| | | L69; L21; L39 | | L47; L20; L69; L9; L5 |
| 214 | KYLYFIKGL | L8; L9; L13; L71; L72; | ILKPANNSL | L3; L43; L23; L5; L26; L4; L68; |
| | | L66; L16; L65 | | L57; L2; L16; L39; L9 |
| 215 | KYPQVNGL | L66; L72; L71; L9; L62; | IQFPNTYL | L25; L28; L58; L26; L74; L44; L35; |
| | | L8; L57; L33 | | L48; L69; L27; L68; L64 |
| 216 | LAAECTIF | L59; L70; L69; L74; L58; | IRQEEVQEL | L66; L65; L64; L35; L34; L25; L28; |
| | | L31; L47; L60 | | L30; L72; L4; L71; L32 |
| 217 | LALGGSVAI | L47; L61; L32; L67; L50; | ITVNVLAWL | L20; L53; L60; L61; L73; L67; L59; |
| | | L49; L59; L31 | | L58; L10; L70; L69; L54 |
| 218 | LATHGLAAV | L50; L59; L61; L47; L32; | IVAIVVTCL | L74; L20; L67; L64; L60; L56; L26; |
| | | L70; L20; L58 | | L53; L61; L68; L39; L28 |
| 219 | LAVPYNMRV | L69; L70; L47; L58; L73; | KTIGPDMFL | L73; L60; L53; L61; L55; L54; L16; |
| | | L32; L50; L61 | | L58; L13; L20; L70; L69 |
| 220 | LCFLAFLLF | L31; L12; L9; L47; L59; | LAAIMQLFF | L59; L58; L31; L49; L52; L12; L47; |
| | | L41; L52; L40 | | L74; L60; L69; L53; L70 |
| 221 | LEMELTPVV | L38; L29; L45; L46; L42; | LAFVVFLL | L47; L74; L69; L70; L61; L60; L59; |
| | | L37; L36; L50 | | L31; L64; L55; L68; L23 |
| 222 | LEPEYFNSV | L45; L5; L57; L46; L38; | LEYHDVRVV | L45; L37; L46; L38; L47; L64; L42; |
| | | L37; L29; L42 | | L69; L29; L48; L70; L36 |
| 223 | LHFLPRVF | L28; L55; L27; L59; L29; | LIVNSVLLF | L12; L58; L60; L9; L74; L52; L8; |
| | | L35; L52; L47 | | L31; L26; L69; L49; L16 |
| 224 | LIDFYLCFL | L68; L5; L63; L60; L74; | LLDDFVEII | L5; L2; L68; L62; L63; L3; L1; L49; |
| | | L62; L1; L67 | | L24; L4; L67; L34 |
| 225 | LIKVTLVFL | L58; L23; L56; L39; L60; | LLFLAFVVF | L26; L59; L27; L31; L9; L16; L12; |
| | | L74; L59; L62 | | L62; L52; L69; L50; L5 |
| 226 | LINIIIWFL | L4; L5; L73; L60; L58; | LLLDRLNQL | L4; L2; L5; L23; L3; L59; L25; L8; |
| | | L61; L64; L74 | | L6; L16; L74; L64 |
| 227 | LPAPRTLL | L22; L47; L56; L23; L39; | LTNDVSFL | L62; L70; L60; L73; L55; L61; L63; |
| | | L31; L25; L32 | | L58; L59; L68; L64; L1 |
| 228 | LPFAMGIIAM | L31; L50; L32; L39; L22; | LVAELEGIQY | L12; L26; L18; L11; L6; L14; L31; |
| | | L56; L47; L51 | | L1; L52; L13; L43; L10 |
| 229 | LPIGINITR | L32; L31; L19; L50; L17; | LYIIKLIFL | L9; L72; L8; L71; L62; L64; L23; |
| | | L49; L56; L21 | | 74; L73; L60; L61; L69 |
| 230 | LPKEITVAT | L50; L51; L39; L56; L31; | MPYFFTLLL | L47; L31; L50; L22; L32; L49; L39; |
| | | L32; L43; L22 | | L73; L64; L69; L25; L56 |
| 231 | LPNDDTLRV | L49; L47; L50; L51; L32; | NALDQAISM | L70; L31; L61; L67; L32; L59; L69; |
| | | L39; L31; L4 | | L60; L71; L72; L47; L58 |
| 232 | LPYPDPSRI | L47; L49; L50; L32; L31; | NCYFPLQSY | L43; L26; L27; L31; L12; L59; L29; |
| | | L22; L39; L51 | | L14; L10; L11; L41; L40 |
| 233 | LPYPDPSRIL | L32; L39; L47; L22; L31; | NTNPIQLSSY | L11; L14; L10; L1; L43; L18; L16; |
| | | L56; L49; L51 | | L58; L12; L26; L6; L52 |
| 234 | LQIPFAMQM | L69; L58; L28; L26; L61; | NVFAFPFTI | L20; L69; L16; L47; L24; L55; L3; |
| | | L27; L59; L70 | | L64; L49; L34; L4; L12 |
| 235 | LRIMASLVL | L35; L25; L66; L61; L28; | PANNAAIVL | L61; L67; L70; L69; L32; L60; L58; |
| | | L34; L30; L64 | | L74; L68; L31; L59; L56 |
| 236 | LSDLQDLKW | L1; L54; L18; L52; L68; | PQIGVVREF | L26; L27; L58; L65; L43; L8; L64; |
| | | L63; L53; L49 | | L10; L34; L9; L69; L24 |
| 237 | LSYFIASF | L59; L43; L60; L52; L70; | RANSAVKL | L55; L73; L63; L54; L74; L56; L70; |
| | | L26; L55; L54 | | L58; L53; L44; L69; L39 |
| 238 | LSYGIATV | L48; L47; L70; L73; L69; | RARSVSPKL | L13; L58; L53; L44; L56; L54; L55; |
| | | L59; L43; L58 | | L39; L22; L70; L73; L63 |
| 239 | LVATAEAEL | L20; L56; L67; L61; L60; | RFKESPFEL | L56; L8; L72; L9; L62; L71; L13; |
| | | L28; L74; L32 | | L39; L55; L66; L16; L65 |
| 240 | LYLYALVYF | L9; L8; L62; L72; L71; | RGWIFGTTL | L44; L53; L55; L56; L27; L57; L65; |
| | | L12; L52; L31 | | L48; L26; L8; L16; L37 |
| 241 | LYYDSMSY | L71; L72; L66; L43; L12; | RITGLYPTL | L44; L56; L73; L16; L13; L39; L60; |
| | | L65; L59; L14 | | L54; L4; L5; L24; L61 |
| 242 | MADQAMTQM | L63; L68; L32; L49; L70; | RLYYDSMSY | L27; L26; L14; L43; L16; L6; L18; |
| | | L31; L60; L74 | | L65; L12; L13; L1; L54 |
| 243 | MLSDTLKNL | L4; L3; L2; L5; L64; L57; | RQEEVQEL | L24; L44; L65; L27; L63; L26; L33; |
| | | L74; L16 | | L68; L35; L48; L55; L25 |
| 244 | MPLSAPTL | L47; L50; L31; L22; L32; | SAKSASVYY | L58; L70; L43; L13; L69; L14; L12; |
| | | L56; L39; L25 | | L26; L49; L27; L52; L31 |
| 245 | MPYFFTLL | L47; L50; L22; L31; L23; | SAVVLLILM | L69; L58; L31; L70; L74; L64; L32; |
| | | L25; L74; L39 | | L52; L49; L59; L19; L60 |
| 246 | MSMTYGQQF | L53; L55; L54; L52; L43; | SLIYSTAAL | L3; L4; L57; L2; L28; L5; L72; L61; |
| | | L58; L70; L60 | | L43; L71; L59; L10 |
| 247 | MTYRRLISM | L69; L70; L25; L10; L11; | SLLSVLLSM | L4; L6; L2; L5; L12; L16; L3; L7; |
| | | L58; L59; L53 | | L59; L24; L11; L15 |
| 248 | MVSLLSVLL | L20; L74; L64; L31; L28; | SMWALIISV | L2; L4; L3; L5; L48; L13; L24; L69; |
| | | L56; L32; L67 | | L51; L64; L50; L20 |
| 249 | MYASAVVL | L71; L72; L66; L62; L35; | SQMEIDFLEL | L44; L67; L34; L73; L61; L27; L35; |
| | | L28; L9; L64 | | L8; L26; L4; L2; L5 |
| 250 | NARDGCVPL | L67; L43; L70; L61; L59; | STDVVYRAF | L62; L68; L43; L52; L53; L10; L60; |
| | | L69; L58; L60 | | L63; L1; L49; L58; L54 |
| 251 | NELSPVAL | L25; L29; L37; L36; L23; | SVASQSIIAY | L10; L26; L11; L6; L12; L7; L14; |
| | | L35; L33; L40 | | L43; L16; L18; L19; L27 |
| 252 | NLHSSRLSF | L16; L57; L12; L43; L27; | TEETFKLSY | L41; L29; L18; L46; L40; L42; L1; |
| | | L26; L72; L10 | | L38; L45; L65; L12; L36 |
| 253 | NLIDSYFVV | L5; L2; L3; L24; L4; L35; | TSNPTTFHL | L65; L73; L55; L60; L54; L8; L61; |
| | | L20; L11 | | L74; L70; L58; L68; L53 |
| 254 | NLWNTFTRL | L5; L4; L74; L2; L24; L57; | TTFTYASAL | L71; L20; L70; L10; L61; L72; L60; |
| | | L8; L3 | | L65; L57; L69; L28; L16 |
| 255 | NQTTTIQTI | L24; L48; L34; L35; L28; | TVAYFNMVY | L26; L11; L12; L14; L65; L31; L10; |
| | | L8; L25; L49 | | L18; L16; L58; L1; L69 |
| 256 | NSKVQIGEY | L43; L14; L26; L10; L70; | VAKHDFFKF | L58; L49; L53; L70; L52; L12; L43; |
| | | L1; L58; L18 | | L8; L9; L69; L31; L59 |
| 257 | NTLLFLMSF | L53; L52; L16; L59; L10; | VANGDSEVVL | L67; L32; L68; L31; L44; L56; L53; |
| | | L12; L11; L31 | | L63; L58; L70; L74; L60 |
| 258 | NVFAFPFTIY | L11; L6; L12; L10; L31; | VAYFNMVYM | L70; L69; L58; L59; L74; L61; L67; |
| | | L26; L29; L14 | | L60; L47; L43; L68; L63 |
| 259 | NVKDFMSL | L23; L39; L67; L10; L59; | VFLGIITTV | L48; L8; L72; L2; L71; L4; L9; L24; |
| | | L66; L25; L60 | | L47; L3; L62; L51 |
| 260 | NVPLHGTIL | L57; L67; L63; L39; L66; | VLNEKCSAY | L43; L26; L14; L16; L6; L12; L18; |
| | | L74; L11; L64 | | L10; L72; L27; L1; L57 |
| 261 | NWITGGIAI | L8; L35; L71; L34; L28; | VLWAHGFEL | L4; L2; L5; L57; L68; L61; L16; |
| | | L72; L9; L25 | | L59; L74; L39; L67; L63 |
| 262 | NYGDSATL | L66; L72; L71; L9; L62; | VRDPQTLEI | L35; L34; L68; L64; L65; L66; L62; |
| | | L8; L65; L35 | | L5; L63; L25; L49; L67 |
| 263 | NYLKRRVVF | L8; L71; L9; L72; L23; | VTLAILTAL | L4; L60; L73; L59; L67; L53; L61; |
| | | L66; L25; L27 | | L6; L20; L31; L16; L56 |
| 264 | PQADVEWKF | L44; L24; L26; L8; L9; | VVNAANVYL | L58; L68; L56; L73; L74; L62; L60; |
| | | L34; L58; L27 | | L63; L5; L4; L20; L61 |
| 265 | QIITTDNTF | L54; L9; L34; L26; L10; | WVYKQFDTY | L26; L10; L14; L12; L49; L11; L16; |
| | | L11; L8; L32 | | L27; L58; L18; L59; L6 |
| 266 | QLTPTWRVY | L26; L43; L14; L27; L16; | YFIASFRLF | L9; L8; L12; L72; L71; L62; L27; |
| | | L55; L65; L69 | | L49; L31; L60; L58; L34 |
| 267 | QVVDMSMTY | L11; L10; L26; L12; L43; | YFIKGLNNL | L8; L71; L72; L9; L74; L34; L62; |
| | | L14; L16; L58 | | L58; L67; L64; L3; L59 |
| 268 | REFVFKNID | L46; L37; L45; L36; L29; | YIDIGNYTV | L68; L5; L63; L2; L1; L35; L28; |
| | | L42; L38; L65 | | L24; L34; L18; L67; L32 |
| 269 | RELHLSWEV | L33; L45; L38; L24; L37; | YTTTIKPVTY | L52; L12; L58; L54; L69; L1; L10; |
| | | L42; L46; L36 | | L43; L70; L49; L18; L14 |
| 270 | REQIDGYVM | L36; L38; L37; L42; L29; | AEILLIIMR | L40; L41; L42; L37; L45; L36; L7; |
| | | L33; L45; L40 | | L38; L29; L21; L15; L46; L19 |
| 271 | RKSAPLIEL | L44; L56; L27; L73; L39; | APFLYLYAL | L56; L22; L39; L23; L31; L32; L50; |
| | | L66; L22; L64 | | L25; L44; L33; L51; L4; L67 |
| 272 | RLDKVEAEV | L5; L24; L2; L63; L18; | ASLNGVTL | L55; L61; L53; L67; L60; L54; L59; |
| | | L62; L68; L3 | | L44; L73; L56; L71; L74; L72 |
| 273 | RSGETLGVL | L65; L73; L53; L55; L54; | AYITGGVVQL | L9; L8; L71; L72; L56; L44; L13; |
| | | L44; L56; L14 | | L28; L37; L36; L34; L66; L4 |
| 274 | RSIFSRTL | L55; L73; L65; L60; L48; | CVEEVTTTL | L60; L68; L63; L5; L32; L67; L39; |
| | | L54; L61; L53 | | L61; L62; L44; L56; L20; L34 |
| 275 | RTIAFGGCVF | L54; L16; L53; L52; L55; | DTYNLWNTF | L10; L11; L53; L52; L49; L16; L54; |
| | | L26; L10; L8 | | L25; L29; L58; L70; L19; L69 |
| 276 | RVDGQVDL | L63; L68; L74; L62; L67; | DVFHLYLQY | L10; L11; L12; L49; L6; L14; L29; |
| | | L54; L56; L39 | | L31; L19; L16; L18; L26; L13 |
| 277 | RVYSTGSNV | L13; L24; L51; L58; L6; | FAPSASAFF | L58; L57; L59; L62; L63; L12; L61; |
| | | L14; L16; L3 | | L60; L74; L70; L9; L31; L72 |
| 278 | RYKLEGYAF | L9; L8; L71; L72; L26; | FIAGLIAIV | L3; L20; L58; L69; L2; L64; L4; |
| | | L66; L27; L14 | | L73; L67; L5; L11; L28; L24 |
| 279 | SAKNRARTV | L70; L58; L69; L13; L23; | FKEGSSVEL | L44; L27; L68; L66; L61; L62; L67; |
| | | L64; L43; L39 | | L63; L32; L60; L34; L35; L28 |
| 280 | SAKSASVY | L58; L70; L43; L69; L14; | FLFLTWICL | L74; L2; L69; L64; L4; L5; L62; |
| | | L59; L26; L27 | | L67; L3; L59; L61; L23; L68 |
| 281 | SEHDYQIGG | L42; L37; L46; L38; L36; | FLIVAAIVF | L59; L43; L26; L72; L74; L12; L62; |
| | | L41; L29; L40 | | L69; L71; L31; L61; L9; L68 |
| 282 | SELLTPLGI | L45; L41; L40; L36; L37; | FTDGVCLFW | L1; L68; L54; L18; L49; L63; L62; |
| | | L48; L42; L33 | | L60; L58; L67; L53; L52; L73 |
| 283 | SEYTGNYQC | L42; L45; L37; L46; L38; | HANEYRLY | L55; L49; L14; L43; L18; L59; L70; |
| | | L29; L36; L41 | | L65; L58; L54; L31; L64; L52 |
| 284 | SFGPLVRKI | L64; L8; L9; L48; L24; | HEGKTFYVL | L37; L36; L65; L44; L45; L29; L35; |
| | | L41; L45; L62 | | L32; L40; L41; L8; L42; L33 |
| 285 | SFKELLVY | L72; L71; L43; L26; L12; | IATNGPLKV | L73; L70; L69; L47; L58; L64; L24; |
| | | L14; L59; L66 | | L50; L63; L49; L20; L67; L61 |
| 286 | SFKWDLTAF | L43; L72; L71; L9; L8; | IIFLEGETL | L60; L28; L26; L68; L16; L67; L34; |
| | | L26; L10; L58 | | L61; L31; L53; L59; L36; L54 |
| 287 | SGKPVPYCY | L14; L66; L65; L43; L26; | ISNSWLMWL | L73; L61; L55; L60; L53; L59; L58; |
| | | L12; L69; L13 | | L74; L69; L70; L57; L4; L64 |
| 288 | SLDTYPSL | L63; L68; L5; L62; L74; | KENDSKEGF | L33; L41; L36; L16; L40; L37; L29; |
| | | L2; L28; L57 | | L26; L65; L27; L8; L38; L54 |
| 289 | SLPGVFCGV | L5; L2; L3; L57; L24; L4; | KIQEGVVDY | L14; L26; L16; L18; L65; L43; L13; |
| | | L20; L11 | | L6; L54; L12; L58; L27; L72 |
| 290 | SNYLKRRVV | L73; L25; L48; L64; L23; | KMVSLLSVL | L44; L69; L16; L56; L8; L73; L67; |
| | | L45; L46; L69 | | L3; L53; L36; L4; L27; L5 |
| 291 | SPYNSQNAV | L51; L47; L22; L50; L39; | KPVPEVKIL | L39; L32; L56; L69; L22; L31; L65; |
| | | L25; L28; L32 | | L64; L44; L66; L55; L49; L47 |
| 292 | SSDNIALL | L63; L62; L68; L74; L1; | KRVDWTIEY | L65; L64; L66; L30; L26; L43; L27; |
| | | L18; L60; L73 | | L16; L69; L14; L58; L12; L18 |
| 293 | SSVELKHF | L59; L52; L58; L54; L53; | KVDGVDVELF | L63; L54; L52; L18; L53; L5; L16; |
| | | L10; L43; L70 | | L68; L49; L62; L34; L1; L12 |
| 294 | STSAFVETV | L20; L70; L73; L3; L58; | KVVKVTIDY | L26; L14; L54; L18; L12; L16; L58; |
| | | L69; L4; L64 | | L13; L6; L52; L27; L11; L53 |
| 295 | SVCLGSLIY | L18; L12; L1; L14; L26; | LAWPLIVTA | L50; L69; L31; L47; L49; L51; L32; |
| | | L11; L7; L6 | | L52; L67; L70; L61; L5; L43 |
| 296 | SVSPKLFIR | L15; L7; L21; L19; L17; | LAWPLIVTAL | L67; L31; L61; L60; L68; L69; L74; |
| | | L6; L20; L11 | | L32; L47; L57; L56; L59; L50 |
| 297 | SVVLLSVL | L59; L25; L67; L74; L23; | LEAPFLYLY | L29; L40; L41; L12; L31; L1; L46; |
| | | L60; L56; L68 | | L18; L42; L38; L26; L52; L14 |
| 298 | SYEDQDALF | L62; L8; L9; L12; L72; | LLLTILTSL | L4; L5; L2; L3; L44; L23; L6; L56; |
| | | L34; L71; L66 | | L74; L59; L57; L8; L16 |
| 299 | SYFIASFRL | L9; L8; L72; L71; L66; | LPFNDGVYF | L49; L31; L32; L56; L39; L50; L22; |
| | | L65; L62; L64 | | L47; L52; L58; L9; L34; L12 |
| 300 | SYFIASFRLF | L9; L8; L12; L72; L71; | LQAENVTGL | L44; L3; L26; L28; L4; L25; L58; |
| | | L40; L41; L52 | | L35; L27; L56; L34; L64; L24 |
| 301 | TAPHGHVMV | L57; L69; L70; L63; L64; | MADLVYAL | L68; L67; L63; L62; L74; L60; L61; |
| | | L47; L32; L20 | | L59; L23; L47; L32; L70; L33 |
| 302 | TAYANSVF | L70; L58; L47; L59; L54; | NAAIVLQL | L74; L70; L67; L69; L47; L25; L61; |
| | | L69; L31; L68 | | L59; L60; L64; L23; L31; L35 |
| 303 | TEILPVSM | L29; L45; L37; L36; L33; | NLHPDSATL | L28; L3; L57; L5; L35; L2; L4; L26; |
| | | L38; L25; L46 | | L43; L34; L23; L16; L66 |
| 304 | TEISFMLWC | L46; L45; L37; L41; L38; | NTASWFTAL | L20; L60; L61; L25; L10; L35; L67; |
| | | L42; L40; L36 | | L11; L70; L73; L59; L28; L16 |
| 305 | TEVPANSTVL | L36; L37; L41; L45; L40; | NYSGVVTTV | L64; L20; L66; L35; L8; L72; L9; |
| | | L29; L28; L38 | | L24; L3; L71; L28; L70; L62 |
| 306 | TEVPVAIHA | L38; L46; L42; L37; L29; | QTFSVLACY | L11; L14; L12; L10; L6; L1; L18; |
| | | L41; L36; L40 | | L16; L52; L58; L69; L54; L70 |
| 307 | TGVEHVTF | L29; L23; L54; L26; L25; | QWLPTGTLL | L9; L8; L28; L34; L40; L36; L41; |
| | | L33; L49; L27 | | L74; L62; L61; L71; L22; L30 |
| 308 | TLMNVLTLV | L2; L4; L3; L5; L24; L20; | RIQPGQTF | L54; L26; L16; L55; L33; L39; L53; |
| | | L6; L64 | | L58; L43; L60; L59; L9; L72 |
| 309 | TLVTMPLGY | L12; L6; L26; L18; L16; | RTFKVSIWNL | L53; L44; L65; L20; L16; L13; L21; |
| | | L10; L14; L1 | | L54; L55; L56; L73; L6; L7 |
| 310 | TSDLATNNL | L68; L63; L1; L62; L60; | RTIKGTHHW | L54; L53; L16; L52; L10; L55; L49; |
| | | L74; L67; L34 | | L14; L11; L18; L21; L8; L73 |
| 311 | TTDPSFLGR | L1; L7; L19; L17; L15; | RTILGSALL | L53; L73; L55; L54; L13; L16; L60; |
| | | L18; L21; L6 | | L20; L14; L18; L36; L52; L44 |
| 312 | TVEELKKLL | L32; L39; L63; L23; L20; | SAPHGVVF | L59; L58; L63; L57; L66; L49; L70; |
| | | L1; L5; L68 | | L43; L72; L56; L69; L62; L71 |
| 313 | TVKNGSIHL | L13; L20; L10; L58; L56; | SAVVLLIL | L59; L74; L61; L60; L69; L67; L70; |
| | | L39; L74; L26 | | L47; L73; L25; L23; L31; L68 |
| 314 | TVKNGSIHLY | L14; L11; L10; L26; L12; | SEYDYVIF | L29; L33; L37; L27; L41; L45; L40; |
| | | L16; L52; L18 | | L43; L36; L25; L38; L66; L65 |
| 315 | TYLEGSVRV | L8; L2; L9; L71; L4; L72; | SSDNIALLV | L73; L18; L1; L63; L68; L24; L58; |
| | | L45; L62 | | L5; L70; L64; L62; L20; L69 |
| 316 | VAAGLEAPFL | L74; L67; L58; L60; L61; | TIVEVQPQL | L4; L5; L20; L60; L67; L28; L2; |
| | | L70; L69; L31 | | L61; L32; L74; L39; L8; L56 |
| 317 | VAGGIVAIV | L70; L69; L58; L64; L67; | TQAPTHLSV | L24; L35; L28; L48; L3; L25; L69; |
| | | L20; L47; L73 | | L34; L73; L58; L64; L26; L4 |
| 318 | VAVKMFDAY | L59; L43; L31; L67; L58; | VAIVVTCL | L74; L61; L60; L59; L70; L67; L69; |
| | | L12; L14; L49 | | L47; L68; L63; L72; L23; L62 |
| 319 | VAYRKVLLR | L19; L69; L17; L15; L47; | VASQSIIAY | L58; L70; L69; L31; L59; L49; L43; |
| | | L7; L6; L21 | | L26; L18; L12; L27; L14; L52 |
| 320 | VEEVTTTL | L37; L45; L25; L33; L36; | VLMDGSIIQF | L26; L16; L9; L8; L2; L11; L43; L4; |
| | | L48; L29; L62 | | L10; L27; L6; L12; L5 |
| 321 | VEIIKSQDL | L37; L36; L45; L40; L25; | VPMEKLKTL | L39; L23; L22; L56; L32; L47; L25; |
| | | L33; L41; L29 | | L31; L49; L8; L4; L3; L51 |
| 322 | VEKGVLPQL | L37; L36; L39; L45; L13; | VSTSGRWVL | L55; L70; L60; L61; L53; L69; L73; |
| | | L56; L29; L41 | | L65; L44; L16; L67; L58; L54 |
| 323 | VENPHLMGW | L41; L40; L33; L29; L45; | WTFGAGAAL | L61; L60; L20; L10; L59; L58; L16; |
| | | L52; L54; L38 | | L28; L70; L67; L53; L11; L57 |
| 324 | VLLAPLLSA | L2; L51; L6; L4; L3; L50; | YASAVVLLIL | L67; L69; L31; L60; L61; L59; L74; |
| | | L5; L46 | | L32; L70; L73; L58; L20; L47 |
| 325 | VMPLSAPTL | L57; L5; L9; L72; L66; | YIGDPAQL | L74; L60; L61; L67; L59; L66; L3; |
| | | L62; L71; L47 | | L73; L58; L4; L63; L62; L28 |
| 326 | VPFVVSTGY | L31; L49; L26; L43; L12; | YLQPRTFLL | L4; L74; L23; L2; L5; L64; L9; L1; |
| | | L65; L27; L56 | | L3; L61; L8; L66; L69 |
| 327 | VPLNIIPL | L47; L56; L50; L22; L23; | YVDNSSLTI | L68; L5; L34; L49; L1; L63; L24; |
| | | L39; L25; L31 | | L28; L67; L62; L32; L45; L61 |
| 328 | VQAGNVQL | L44; L35; L26; L28; L56; | YVLPNDDTL | L67; L60; L32; L61; L4; L74; L5; |
| | | L25; L74; L58 | | L2; L44; L34; L31; L53; L59 |
| 329 | VRDVLVRGF | L30; L62; L34; L49; L64; | AAIVFITL | L67; L59; L61; L74; L60; L70; L23; |
| | | L66; L65; L52 | | L69; L73; L68; L56; L58; L47; |
| | | | | L43 |
| 330 | VRIKIVQML | L64; L66; L35; L65; L25; | AELAKNVSL | L37; L33; L36; L44; L40; L42; L45; |
| | | L34; L30; L8 | | L41; L46; L23; L25; L38; L56; |
| | | | | L35 |
| 331 | VSDADSTLI | L63; L1; L68; L18; L53; | AHAEETRKL | L28; L34; L35; L64; L44; L10; L41; |
| | | L55; L62; L54 | | L27; L37; L40; L3; L55; L24; L4 |
| 332 | VSLVKPSFY | L43; L1; L52; L14; L12; | ALNTLVKQL | L4; L3; L2; L64; L5; L44; L16; L56; |
| | | L18; L58; L54 | | L57; L39; L13; L26; L74; L69 |
| 333 | VSSPDAVTAY | L18; L43; L1; L52; L26; | ANKDGIIWV | L13; L3; L43; L51; L69; L24; L70; |
| | | L14; L54; L53 | | L73; L64; L4; L45; L2; L42; L58 |
| 334 | VTPSGTWLTY | L18; L1; L11; L43; L12; | ASAVVLLIL | L73; L69; L61; L74; L59; L67; L60; |
| | | L16; L10; L52 | | L70; L53; L55; L56; L44; L64; |
| | | | | L54 |
| 335 | VVDSYYSL | L63; L68; L67; L62; L74; | ASFSTFKCY | L14; L26; L27; L70; L69; L43; L58; |
| | | L60; L5; L1 | | L18; L13; L16; L10; L7; L52; L1 |
| 336 | VVFDEISMA | L51; L3; L11; L13; L2; | EEFEPSTQY | L29; L41; L11; L40; L27; L26; L45; |
| | | L69; L24; L20 | | L42; L46; L10; L65; L37; L31; |
| | | | | L36 |
| 337 | VVQEGVLTA | L51; L3; L2; L50; L13; | FAFPFTIYS | L58; L70; L69; L59; L74; L64; L60; |
| | | L42; L7; L38 | | L61; L31; L67; L47; L50; L43; |
| | | | | L20 |
| 338 | VYADSFVIR | L17; L15; L9; L19; L21; | FAMQMAYRF | L58; L59; L49; L69; L53; L32; L74; |
| | | L8; L66; L7 | | L31; L12; L60; L70; L61; L63; |
| | | | | L54 |
| 339 | VYANGGKGF | L9; L8; L72; L71; L43; | FLFVAAIFY | L12; L26; L59; L69; L1; L31; L6; |
| | | L26; L12; L66 | | L43; L72; L18; L71; L14; L2; L64 |
| 340 | VYDDGARRV | L62; L64; L63; L45; L5; | FPFTIYSLL | L31; L32; L56; L47; L49; L22; L50; |
| | | L72; L71; L8 | | L64; L69; L44; L58; L39; L20; |
| | | | | L61 |
| 341 | VYNPFMIDV | L64; L72; L62; L71; L8; | FSNSGSDVL | L61; L60; L67; L58; L73; L70; L55; |
| | | L66; L73; L9 | | L59; L68; L74; L57; L53; L32; |
| | | | | L69 |
| 342 | VYRGTTTY | L72; L71; L66; L26; L43; | HFYWFFSNY | L12; L13; L14; L72; L71; L27; L49; |
| | | L27; L65; L14 | | L26; L43; L59; L65; L29; L11; |
| | | | | L10 |
| 343 | VYSTGSNVF | L9; L8; L72; L71; L66; | HSLSHFVNL | L73; L53; L61; L60; L67; L74; L44; |
| | | L62; L65; L53 | | L13; L55; L65; L54; L20; L59; |
| | | | | L69 |
| 344 | VYSVIYLY | L66; L12; L14; L72; L9; | IASEFSSL | L61; L67; L60; L59; L70; L57; L74; |
| | | L62; L71; L18 | | L68; L47; L63; L69; L58; L66; |
| | | | | L31 |
| 345 | VYSVIYLYL | L9; L66; L8; L64; L72; | ISTSHKLVL | L73; L61; L60; L69; L67; L53; L70; |
| | | L62; L71; L73 | | L59; L74; L65; L55; L54; L68; |
| | | | | L58 |
| 346 | WLDMVDTSL | L5; L68; L63; L74; L2; | IVNNWLKQL | L4; L64; L39; L73; L60; L58; L3; |
| | | L32; L62; L1 | | L16; L5; L56; L10; L26; L59; L69 |
| 347 | WNLDYIINL | L4; L65; L73; L74; L44; | IVSTIQRKY | L14; L12; L52; L58; L26; L55; L18; |
| | | L2; L13; L8 | | L64; L49; L54; L11; L6; L16; L13 |
| 348 | WPLIVTAL | L23; L47; L25; L22; L56; | KFKEGVEF | L62; L72; L71; L9; L43; L8; L26; |
| | | L31; L50; L39 | | L55; L27; L39; L56; L53; L23; L66 |
| 349 | YEDLLIRKS | L45; L46; L29; L41; L37; | KIADYNYKL | L16; L4; L2; L44; L73; L54; L24; |
| | | L38; L40; L42 | | L58; L8; L5; L20; L53; L3; L66 |
| 350 | YFTSDYYQL | L8; L9; L32; L72; L71; | KNFKSVLYY | L65; L12; L27; L69; L16; L6; L18; |
| | | L62; L67; L44 | | L14; L73; L26; L58; L52; L54; L13 |
| 351 | YGIATVREV | L64; L48; L69; L3; L73; | KPNELSRVL | L39; L56; L55; L32; L22; L65; L51; |
| | | L47; L46; L70 | | L44; L64; L31; L73; L66; L49; |
| | | | | L16 |
| 352 | YHDVRVVL | L35; L28; L62; L68; L34; | KQFDTYNLW | L16; L54; L44; L52; L24; L27; L26; |
| | | L63; L60; L25 | | L49; L8; L21; L14; L9; L13; L15 |
| 353 | YIIKLIFLWL | L67; L60; L74; L73; L61; | KSDGTGTIY | L18; L54; L1; L14; L63; L53; L27; |
| | | L10; L5; L11 | | L58; L55; L65; L68; L26; L52; L70 |
| 354 | YIINLIIKN | L69; L24; L11; L12; L4; | KVAGFAKFL | L73; L64; L55; L58; L69; L20; L13; |
| | | L58; L10; L19 | | L16; L74; L60; L39; L53; L56; |
| | | | | L44 |
| 355 | YIINLIIKNL | L10; L60; L3; L69; L4; | LQLPQGTTL | L44; L27; L61; L25; L26; L8; L28; |
| | | L20; L11; L5 | | L35; L60; L34; L4; L72; L71; L9 |
| 356 | YKVYYGNAL | L44; L67; L66; L61; L27; | LTNIFGTVY | L1; L26; L59; L18; L52; L58; L31; |
| | | L60; L71; L72 | | L12; L14; L53; L43; L65; L55; L6 |
| 357 | YLDGADVTKI | L5; L63; L2; L68; L62; L3; | NSFTRGVYY | L70; L69; L58; L1; L18; L14; L49; |
| | | L1; L24 | | L27; L52; L11; L13; L12; L54; L29 |
| 358 | YLNTLTLAV | L3; L4; L2; L5; L73; L24; | PANSTVLSF | L58; L49; L59; L43; L70; L32; L31; |
| | | L57; L64 | | L54; L69; L60; L9; L52; L65; L74 |
| 359 | YLQPRTFL | L74; L23; L62; L59; L2; | RQLLFVVEV | L48; L24; L73; L44; L4; L27; L13; |
| | | L72; L4; L61 | | L33; L30; L26; L2; L64; L69; L37 |
| 360 | YLYLTFYL | L74; L23; L59; L67; L68; | RSKNPLLY | L18; L55; L1; L14; L52; L13; L54; |
| | | L62; L2; L4 | | L70; L58; L26; L43; L53; L73; L69 |
| 361 | YPNASFDNF | L49; L31; L32; L22; L39; | SAYENFNQH | L59; L69; L49; L67; L58; L60; L7; |
| | | L47; L56; L9 | | L70; L43; L11; L61; L10; L6; L19 |
| 362 | YPSLETIQI | L49; L47; L32; L31; L22; | SCNNYMLTY | L43; L12; L26; L27; L16; L58; L18; |
| | | L50; L39; L34 | | L59; L14; L72; L49; L71; L29; |
| | | | | L10 |
| 363 | YRYNLPTM | L66; L59; L25; L28; L48; | SGVPVVDSY | L26; L14; L65; L31; L29; L66; L27; |
| | | L47; L35; L64 | | L12; L54; L69; L43; L52; L49; |
| | | | | L11 |
| 364 | YSGVVTTVM | L59; L70; L61; L43; L58; | SSAKSASVY | L58; L26; L18; L14; L1; L52; L54; |
| | | L73; L60; L69 | | L27; L43; L70; L53; L69; L10; L11 |
| 365 | YSSANNCTF | L58; L54; L53; L70; L34; | SSLPSYAAF | L43; L52; L59; L53; L27; L54; L61; |
| | | L60; L55; L52 | | L60; L10; L26; L16; L9; L58; L14 |
| 366 | YTVEEAKTV | L70; L69; L20; L58; L64; | SSVELKHFF | L53; L54; L58; L52; L49; L69; L60; |
| | | L73; L10; L11 | | L73; L40; L14; L55; L11; L70; L9 |
| 367 | YVYIGDPAQL | L3; L60; L67; L74; L20; | TANPKTPKY | L58; L70; L49; L59; L31; L43; L69; |
| | | L61; L28; L59 | | L14; L12; L54; L52; L11; L32; |
| | | | | L18 |
| 368 | YYHTTDPSF | L71; L66; L9; L72; L8; | TIKPVTYKL | L39; L58; L23; L8; L3; L4; L5; L20; |
| | | L62; L12; L32 | | L66; L74; L26; L10; L13; L16 |
| 369 | YYPSARIVY | L66; L71; L72; L12; L9; | TILTSLLVL | L4; L73; L8; L61; L23; L60; L6; |
| | | L64; L27; L8 | | L59; L67; L25; L35; L16; L74; L10 |
| 370 | YYSLLMPIL | L66; L9; L64; L62; L67; | TLQPVSEL | L23; L4; L3; L74; L57; L72; L28; |
| | | L72; L28; L71 | | L62; L71; L26; L2; L68; L66; L59 |
| 371 | AAFHQECSL | L67; L69; L32; L70; L61; | TVYEKLKPV | L3; L20; L23; L2; L10; L11; L5; L4; |
| | | L44; L60; L74; L58 | | L51; L43; L64; L39; L48; L69 |
| 372 | AARVVRSIF | L43; L58; L59; L52; L70; | VAMPNLYKM | L58; L70; L69; L59; L32; L61; L52; |
| | | L69; L27; L26; L22 | | L31; L54; L53; L60; L63; L47; |
| | | | | L74 |
| 373 | AEIRASANL | L36; L37; L40; L45; L41; | VAPGTAVL | L57; L63; L59; L61; L67; L70; L68; |
| | | L42; L38; L33; L46 | | L74; L66; L60; L47; L62; L58; |
| | | | | L56 |
| 374 | AEIVDTVSA | L38; L42; L46; L37; L36; | VATSRTLSY | L58; L59; L70; L43; L69; L49; L12; |
| | | L45; L40; L41; L43 | | L18; L31; L52; L54; L61; L27; |
| | | | | L14 |
| 375 | AEVQIDRLI | L40; L45; L41; L37; L36; | VAYRKVLL | L74; L23; L47; L67; L70; L63; L60; |
| | | L38; L42; L55; L46 | | L61; L69; L59; L68; L58; L56; |
| | | | | L53 |
| 376 | AGLEAPFLY | L12; L14; L7; L40; L16; | VLSDRELHL | L74; L2; L4; L5; L3; L57; L73; L64; |
| | | L6; L52; L27; L41 | | L9; L8; L16; L69; L24; L67 |
| 377 | ALDISASIV | L63; L18; L5; L68; L62; | VMYMGTLSY | L43; L26; L27; L59; L6; L16; L18; |
| | | L1; L2; L24; L28 | | L14; L71; L72; L12; L69; L1; L49 |
| 378 | ALVYFLQSI | L24; L3; L4; L5; L10; L2; | VSDIDITFL | L63; L68; L74; L53; L1; L62; L18; |
| | | L16; L45; L64 | | L60; L73; L67; L34; L61; L5; L58 |
| 379 | ASFDNFKF | L54; L55; L53; L52; L70; | VSIINNTVY | L26; L43; L52; L54; L18; L27; L1; |
| | | L58; L69; L16; L26 | | L53; L58; L70; L14; L69; L55; L59 |
| 380 | ASLNGVTLI | L24; L53; L55; L73; L52; | VTDVTQLYL | L68; L1; L63; L62; L18; L60; L67; |
| | | L48; L7; L16; L34 | | L73; L53; L61; L74; L5; L58; L70 |
| 381 | AVLDMCASL | L4; L16; L67; L10; L61; | VVFLHVTYV | L3; L64; L69; L47; L20; L73; L58; |
| | | L5; L44; L72; L2 | | L5; L4; L13; L2; L33; L48; L67 |
| 382 | AVMYMGTLSY | L26; L18; L6; L12; L16; | VYIGDPAQL | L9; L8; L72; L71; L74; L62; L66; |
| | | L1; L14; L10; L7 | | L67; L3; L28; L64; L60; L34; L13 |
| 383 | CPAEIVDTV | L47; L20; L50; L39; L32; | YADVFHLY | L1; L18; L59; L58; L49; L68; L63; |
| | | L51; L49; L31; L3 | | L70; L31; L62; L12; L60; L47; L54 |
| 384 | CSFGGVSVI | L70; L69; L48; L55; L65; | YIKWDLLKY | L58; L43; L12; L26; L11; L10; L59; |
| | | L16; L10; L53; L64 | | L14; L1; L13; L18; L69; L6; L16 |
| 385 | DLDDFSKQL | L5; L2; L63; L68; L10; | YPIIGDEL | L23; L56; L47; L22; L32; L67; L31; |
| | | L62; L11; L1; L35 | | L50; L61; L71; L59; L39; L25; |
| | | | | L72 |
| 386 | DLFMRIFTI | L23; L47; L25; L24; L20; | AAISDYDYY | L58; L14; L43; L12; L52; L69; L18; |
| | | L3; L10; L4; L16 | | L49; L11; L67; L54; L70; L10; |
| | | | | L31; L27 |
| 387 | DLTKGPHEF | L11; L10; L49; L16; L9; | ADAGFIKQY | L26; L69; L27; L14; L40; L70; L10; |
| | | L23; L74; L26; L29 | | L29; L43; L41; L11; L65; L58; |
| | | | | L16; L64 |
| 388 | DTVIEVQGY | L11; L10; L52; L29; L49; | ASRELKVTF | L53; L52; L43; L26; L54; L58; L27; |
| | | L26; L19; L65; L1 | | L65; L16; L55; L13; L69; L56; |
| | | | | L44; L70 |
| 389 | DVLLPLTQY | L11; L10; L17; L29; L6; | CQYLNTLTL | L48; L25; L44; L27; L26; L24; L35; |
| | | L31; L26; L14; L12 | | L28; L61; L34; L16; L73; L69; |
| | | | | L67; L59 |
| 390 | EAARVVRSI | L20; L10; L47; L49; L32; | DAALALLLL | L47; L74; L31; L67; L60; L73; L61; |
| | | L19; L69; L70; L64 | | L59; L69; L20; L64; L70; L58; |
| | | | | L23; L25 |
| 391 | EAFEKMVSLL | L20; L10; L11; L69; L70; | DAVRDPQTL | L32; L74; L49; L67; L60; L25; L53; |
| | | L31; L23; L74; L32 | | L31; L10; L47; L20; L70; L61; |
| | | | | L69; L58 |
| 392 | EAFLIGCNY | L31; L11; L43; L49; L19; | DVTDVTQLY | L11; L10; L12; L14; L49; L19; L20; |
| | | L58; L17; L12; L70 | | L31; L26; L1; L18; L58; L52; L29; |
| | | | | L16 |
| 393 | EIAIILASF | L11; L10; L20; L26; L40; | FAPSASAF | L57; L59; L58; L72; L43; L63; L61; |
| | | L19; L41; L43; L23 | | L71; L60; L70; L66; L74; L47; |
| | | | | L68; L62 |
| 394 | ELDSFKEEL | L5; L68; L23; L63; L1; L2; | FVDGVPFVV | L5; L63; L68; L2; L67; L20; L58; |
| | | L34; L20; L62 | | L62; L69; L32; L73; L50; L1; L64; |
| | | | | L61 |
| 395 | ERSEKSYEL | L35; L66; L65; L25; L34; | FVSNGTHWF | L58; L49; L59; L60; L16; L10; L11; |
| | | L23; L64; L28; L20 | | L26; L32; L69; L74; L34; L12; |
| | | | | L61; L53 |
| 396 | ESLIDLQEL | L53; L23; L55; L25; L10; | GTFTCASEY | L14; L18; L26; L58; L12; L10; L27; |
| | | L67; L59; L20; L73 | | L16; L52; L11; L70; L54; L13; L1; |
| | | | | L7 |
| 397 | ETISLAGSY | L11; L10; L14; L1; L12; | GTITSGWTF | L53; L52; L54; L10; L55; L11; L26; |
| | | L20; L19; L40; L18 | | L27; L58; L16; L34; L9; L12; L60; |
| | | | | L8 |
| 398 | FADDLNQLT | L68; L67; L63; L1; L49; | HAASGNLL | L74; L61; L60; L70; L58; L55; L63; |
| | | L31; L32; L58; L70 | | L56; L67; L44; L54; L59; L49; |
| | | | | L23; L32 |
| 399 | FLAFLLFLV | L2; L4; L3; L20; L64; L5; | HCANFNVLF | L34; L53; L31; L44; L12; L52; L8; |
| | | L24; L12; L69 | | L9; L58; L40; L35; L49; L54; L28; |
| | | | | L26 |
| 400 | FLLPSLATV | L3; L2; L4; L5; L59; L50; | IAFGGCVFSY | L31; L70; L69; L58; L49; L43; L12; |
| | | L47; L23; L24 | | L16; L27; L26; L52; L14; L54; |
| | | | | L59; L18 |
| 401 | FLLVTLAIL | L2; L4; L74; L59; L5; L61; | IAIPTNFTI | L70; L47; L54; L67; L8; L69; L61; |
| | | L62; L23; L3 | | L49; L32; L52; L53; L34; L68; L55 |
| | | | | L9 |
| 402 | FLTENLLL | L74; L2; L61; L68; L62; | KADETQAL | L68; L63; L67; L61; L60; L62; L54; |
| | | L4; L23; L5; L59 | | L70; L59; L57; L55; L74; L43; L5; |
| | | | | L56 |
| 403 | FLYIIKLIF | L59; L12; L69; L43; L49; | KALNLGETF | L53; L52; L54; L16; L8; L55; L58; |
| | | L26; L74; L23; L16 | | L9; L27; L31; L26; L60; L49; L12; |
| | | | | L70 |
| 404 | FLYIIKLIFL | L2; L74; L4; L5; L3; L69; | KAPKEIIFL | L74; L57; L53; L69; L64; L63; L58; |
| | | L20; L64; L6 | | L44; L56; L5; L73; L70; L66; L61; |
| | | | | L68 |
| 405 | FQVTIAEIL | L44; L69; L67; L58; L28; | KHWPQIAQF | L16; L27; L53; L28; L34; L54; L52; |
| | | L61; L34; L35; L60 | | L8; L35; L26; L9; L65; L49; L44; |
| | | | | L33 |
| 406 | FSAVGNICY | L43; L58; L70; L1; L18; | KPVETSNSF | L54; L49; L39; L31; L56; L32; L27; |
| | | L69; L59; L52; L26 | | L22; L16; L8; L51; L53; L9; L26; |
| | | | | L65 |
| 407 | FTEERLKL | L63; L1; L60; L68; L62; | KSHKPPISF | L43; L53; L16; L54; L52; L55; L26; |
| | | L61; L73; L70; L59 | | L58; L70; L73; L27; L63; L60; |
| | | | | L69; L56 |
| 408 | FTIKGSFL | L58; L60; L61; L59; L74; | KVNSTLEQY | L14; L16; L54; L26; L18; L58; L11; |
| | | L70; L63; L55; L73 | | L13; L6; L52; L12; L27; L53; L10; |
| | | | | L49 |
| 409 | FTIYSLLL | L61; L73; L60; L1; L59; | LATALLTL | L59; L61; L47; L60; L70; L67; L74; |
| | | L70; L67; L55; L58 | | L69; L56; L23; L73; L31; L55; |
| | | | | L68; L58 |
| 410 | FVDGVPFV | L63; L68; L62; L5; L2; | LLFLVLIML | L5; L74; L4; L2; L3; L6; L64; L59; |
| | | L58; L74; L1; L47 | | L69; L56; L44; L23; L26; L31; L62 |
| 411 | FVKHKHAFL | L23; L58; L74; L60; L63; | LTDEMIAQY | L18; L1; L14; L11; L12; L49; L62; |
| | | L20; L61; L59; L69 | | L58; L53; L52; L70; L63; L5; L10; |
| | | | | L68 |
| 412 | FVNEFYAY | L59; L12; L66; L43; L29; | LTNDNTSRY | L1; L58; L18; L14; L11; L26; L12; |
| | | L26; L14; L1; L58 | | L16; L52; L10; L43; L70; L6; L54; |
| | | | | L49 |
| 413 | FVTVYSHLL | L60; L61; L74; L58; L64; | NYMPYFFTL | L66; L8; L9; L72; L71; L65; L35; |
| | | L20; L68; L73; L32 | | L67; L34; L61; L25; L60; L62; L64; |
| | | | | L4 |
| 414 | FYGGWHNML | L9; L66; L71; L72; L74; | RTIKVFTTV | L73; L13; L20; L24; L53; L54; L58; |
| | | L64; L8; L62; L25 | | L3; L16; L15; L45; L37; L48; L11; |
| | | | | L8 |
| 415 | FYLCFLAFL | L72; L71; L62; L9; L8; | SIIQFPNTY | L26; L58; L12; L43; L11; L16; L69; |
| | | L64; L66; L4; L59 | | L10; L14; L59; L29; L6; L27; L7; |
| | | | | L3 |
| 416 | FYLITPVHV | L62; L72; L71; L50; L9; | SILSPLYAF | L16; L59; L12; L10; L43; L4; L6; |
| | | L2; L47; L64; L4 | | L8; L26; L11; L7; L60; L9; L58; L30 |
| 417 | FYWFFSNYL | L72; L62; L71; L64; L9; | STGYHFREL | L65; L73; L60; L13; L61; L59; L67; |
| | | L66; L68; L61; L8 | | L64; L70; L10; L55; L39; L69; |
| | | | | L58; L20 |
| 418 | GDYGDAVVY | L27; L26; L14; L65; L31; | STQDLFLPF | L7; L12; L10; L11; L16; L73; L59; |
| | | L29; L49; L43; L12 | | L53; L60; L52; L58; L72; L9; L6; |
| | | | | L13 |
| 419 | GETLPTEVL | L36; L37; L45; L41; L29; | TIAEILLII | L20; L3; L24; L69; L4; L73; L10; |
| | | L44; L40; L46; L28 | | L64; L34; L67; L47; L6; L11; L2; |
| | | | | L16 |
| 420 | GIVGVLTL | L74; L67; L60; L65; L61; | TSNQVAVLY | L55; L14; L54; L53; L1; L18; L65; |
| | | L24; L48; L28; L59 | | L52; L12; L26; L58; L31; L49; L19 |
| | | | | L69 |
| 421 | GQINDMILSL | L44; L27; L24; L34; L28; | TTTIKPVTY | L52; L26; L12; L69; L18; L54; L70; |
| | | L3; L26; L35; L4 | | L55; L53; L14; L16; L1; L58; L10; |
| | | | | L49 |
| 422 | GSIPCSVCL | L74; L44; L61; L53; L55; | VAFNTLLF | L58; L70; L59; L69; L74; L47; L54; |
| | | L60; L54; L73; L28 | | L52; L60; L49; L12; L31; L9; L43; |
| | | | | L53 |
| 423 | GTYEGNSPF | L11; L53; L10; L16; L27; | VASLINTL | L70; L59; L74; L67; L60; L68; L47; |
| | | L26; L43; L52; L54 | | L61; L69; L23; L57; L64; L55; |
| | | | | L63; L58 |
| 424 | HADQLTPTW | L49; L54; L52; L53; L63; | VTIAEILLI | L73; L24; L53; L55; L20; L7; L8; |
| | | L32; L68; L31; L67 | | L52; L69; L70; L47; L34; L12; L10; |
| | | | | L9 |
| 425 | HEETIYNLL | L36; L37; L41; L45; L40; | VTRELMREL | L13; L55; L64; L70; L73; L53; L60; |
| | | L29; L44; L34; L38 | | L58; L59; L10; L39; L52; L43; |
| | | | | L69; L61 |
| 426 | HEIAWYTER | L46; L37; L29; L17; L15; | YIIKLIFLW | L12; L54; L10; L49; L52; L16; L69; |
| | | L21; L38; L45; L36 | | L4; L58; L9; L8; L24; L11; L74; |
| | | | | L19 |
| 427 | HEVLLAPLL | L29; L37; L36; L41; L40; | YLYALVYFL | L2; L4; L74; L64; L3; L5; L69; L67; |
| | | L45; L33; L28; L44 | | L20; L44; L24; L73; L62; L61; |
| | | | | L66 |
| 428 | HHANEYRLY | L34; L28; L14; L11; L10; | YPDPSRIL | L32; L39; L22; L47; L62; L65; L68; |
| | | L27; L18; L12; L49 | | L63; L49; L31; L60; L61; L66; |
| | | | | L28; L23 |
| 429 | HSQLGGLHL | L60; L61; L73; L55; L53; | AALTNNVAF | L52; L59; L54; L53; L31; L58; L60; |
| | | L18; L68; L59; L63 | | L27; L61; L12; L71; L32; L43; |
| | | | | L72; L56; L40 |
| 430 | HTIDGSSGV | L11; L20; L10; L13; L58; | AANTVIWDY | L58; L14; L69; L43; L12; L65; L31; |
| | | L28; L24; L3; L73 | | L18; L26; L70; L49; L66; L59; |
| | | | | L52; L54; L27 |
| 431 | HVMSKHTDF | L11; L10; L49; L26; L23; | AVRDPQTL | L43; L55; L56; L3; L39; L58; L65; |
| | | L12; L58; L8; L53 | | L26; L67; L59; L13; L23; L66; L22 |
| | | | | L60; L63 |
| 432 | IAKNTVKSV | L70; L69; L58; L43; L47; | EYADVFHLY | L12; L9; L14; L8; L11; L66; L10; |
| | | L64; L39; L13; L3 | | L17; L20; L31; L40; L41; L65; L1; |
| | | | | L19; L72 |
| 433 | IAQYTSAL | L59; L61; L60; L67; L68; | FGDDTVIEV | L2; L5; L63; L62; L68; L67; L64; |
| | | L57; L71; L70; L72 | | L69; L35; L58; L70; L61; L32; L73; |
| | | | | L47; L49 |
| 434 | ICAPLTVF | L59; L26; L53; L9; L54; | FLAFVVFLL | L74; L4; L2; L20; L64; L3; L5; L69; |
| | | L58; L52; L27; L29 | | L68; L61; L44; L1; L9; L67; L66; |
| | | | | L34 |
| 435 | IIKLIFLWL | L13; L67; L60; L73; L39; | FLNRFTTTL | L74; L3; L5; L4; L2; L57; L59; L43; |
| | | L59; L58; L74; L23 | | L61; L32; L68; L26; L62; L44; |
| | | | | L64; L60 |
| 436 | ILDGISQY | L18; L1; L26; L63; L14; | FLYLYALVY | L12; L59; L69; L1; L43; L6; L26; |
| | | L27; L68; L43; L62 | | L27; L31; L18; L72; L14; L66; L71; |
| | | | | L16; L64 |
| 437 | ILLIIMRTF | L26; L55; L52; L16; L9; | FTISVTTEI | L61; L70; L20; L67; L60; L59; L73; |
| | | L8; L27; L12; L53 | | L10; L69; L53; L58; L3; L11; L49; |
| | | | | L55; L68 |
| 438 | ILMTARTVY | L26; L18; L16; L43; L12; | GEYSHVVAF | L37; L46; L33; L27; L29; L36; L41; |
| | | L14; L27; L72; L1 | | L38; L40; L45; L26; L42; L43; |
| | | | | L65; L49; L28 |
| 439 | INITRFQTL | L73; L23; L25; L8; L61; | HFIETISL | L72; L71; L23; L62; L35; L25; L48; |
| | | L60; L9; L32; L28 | | L44; L8; L28; L61; L37; L67; L29; |
| | | | | L59; L43 |
| 440 | ISMDNSPNL | L61; L60; L53; L73; L70; | IADKYVRNL | L63; L68; L74; L60; L32; L67; L61; |
| | | L54; L63; L58; L68 | | L58; L70; L49; L64; L62; L5; L47; |
| | | | | L65; L69 |
| 441 | ISNEKQEIL | L73; L54; L53; L60; L67; | IAQVDVVNF | L53; L49; L31; L52; L43; L58; L32; |
| | | L61; L55; L63; L70 | | L54; L26; L63; L70; L59; L74; L9; |
| | | | | L60; L69 |
| 442 | ISRQRLTKY | L43; L58; L26; L18; L52; | ITVEELKKL | L53; L10; L60; L73; L11; L20; L69; |
| | | L14; L53; L1; L27 | | L70; L64; L54; L55; L52; L8; L58; |
| | | | | L4; L5 |
| 443 | ITDAVDCAL | L68; L67; L63; L62; L60; | KFADDLNQL | L8; L9; L53; L4; L44; L72; L16; |
| | | L32; L1; L5; L61 | | L71; L64; L3; L56; L36; L34; L62; |
| | | | | L13; L2 |
| 444 | ITGGVVQL | L70; L73; L67; L53; L65; | KQGDDYVYL | L44; L65; L13; L73; L34; L26; L24; |
| | | L64; L54; L63; L74 | | L58; L27; L67; L69; L2; L66; L64; |
| | | | | L16; L4 |
| 445 | IVDEPEEHV | L5; L63; L68; L62; L2; | KSVNITFEL | L73; L53; L55; L54; L69; L70; L60; |
| | | L67; L20; L18; L28 | | L67; L16; L61; L44; L20; L58; L8; |
| | | | | L52; L56 |
| 446 | IVNSVLLF | L74; L54; L58; L73; L52; | KTLQPVSEL | L53; L16; L73; L65; L55; L60; L61; |
| | | L49; L12; L62; L26 | | L13; L54; L6; L67; L52; L4; L70; |
| | | | | L63; L8 |
| 447 | IWFLLLSV | L48; L47; L50; L25; L59; | KTYERHSL | L55; L16; L53; L70; L73; L54; L60; |
| | | L45; L33; L46; L62 | | L25; L65; L61; L67; L69; L39; |
| | | | | L59; L63; L71 |
| 448 | KHITSKETL | L34; L28; L35; L44; L36; | LAFVVFLLV | L47; L73; L69; L50; L59; L70; L20; |
| | | L8; L27; L16; L53 | | L61; L31; L64; L58; L49; L24; L5; |
| | | | | L32; L67 |
| 449 | KIFVDGVPF | L16; L53; L43; L54; L26; | LMDGSIIQF | L5; L62; L49; L34; L68; L63; L1; |
| | | L6; L52; L58; L56 | | L31; L74; L27; L26; L18; L58; L32; |
| | | | | L60; L9 |
| 450 | KLAKKFDTF | L16; L26; L53; L9; L8; | LSDDAVVCF | L63; L68; L62; L53; L1; L58; L54; |
| | | L54; L27; L10; L12 | | L60; L49; L52; L70; L74; L5; L18; |
| | | | | L69; L34 |
| 451 | KLLEQWNLV | L2; L4; L5; L3; L16; L73; | LSDRVVFVL | L68; L63; L65; L53; L1; L60; L67; |
| | | L24; L6; L13 | | L32; L74; L61; L55; L70; L54; L73 |
| | | | | L5; L62 |
| 452 | KLWAQCVQL | L2; L5; L4; L16; L44; L3; | LTIKKPNEL | L61; L60; L73; L58; L70; L53; L67; |
| | | L56; L6; L27 | | L20; L55; L23; L59; L69; L74; L8; |
| | | | | L16; L64 |
| 453 | KQLIKVTL | L44; L23; L33; L25; L48; | LTYTGAIKL | L55; L69; L53; L70; L60; L73; L64; |
| | | L27; L24; L65; L26 | | L58; L61; L74; L20; L13; L63; |
| | | | | L68; L47; L52 |
| 454 | KSHNIALIW | L52; L54; L53; L16; L55; | LVKPSFYVY | L26; L59; L14; L58; L12; L52; L13; |
| | | L73; L69; L18; L70 | | L18; L1; L43; L16; L31; L11; L66; |
| | | | | L10; L69 |
| 455 | KTIQPRVEK | L13; L7; L6; L16; L21; | MEIDFLEL | L29; L25; L59; L37; L45; L61; L67; |
| | | L15; L53; L19; L54 | | L73; L36; L41; L60; L40; L35; |
| | | | | L33; L48; L46 |
| 456 | KVSIWNLDY | L18; L16; L14; L26; L12; | MYASAVVLL | L9; L64; L62; L66; L8; L74; L72; |
| | | L6; L54; L1; L52 | | L71; L28; L20; L69; L31; L34; L56; |
| | | | | L35; L44 |
| 457 | LADNKFAL | L68; L63; L60; L67; L61; | REVRTIKVF | L37; L40; L29; L41; L36; L27; L33; |
| | | L23; L59; L32; L62 | | L45; L38; L46; L52; L26; L65; L8; |
| | | | | L53; L44 |
| 458 | LAIDAYPL | L61; L67; L59; L60; L74; | RVDGQVDLF | L54; L63; L18; L53; L62; L52; L74; |
| | | L70; L55; L47; L32 | | L5; L14; L16; L1; L68; L58; L12; |
| | | | | L49; L34 |
| 459 | LANTCTERL | L32; L49; L58; L74; L60; | SEFSSLPSY | L29; L41; L40; L46; L27; L36; L45; |
| | | L61; L63; L31; L70 | | L38; L37; L14; L26; L12; L16; |
| | | | | L31; L6; L11 |
| 460 | LAYYFMRF | L59; L47; L60; L58; L49; | SLPINVIVF | L26; L9; L57; L5; L27; L72; L64; |
| | | L70; L74; L69; L43 | | L11; L62; L66; L16; L8; L12; L71; |
| | | | | L10; L69 |
| 461 | LEAPFLYL | L29; L45; L74; L61; L33; | SSPDDQIGY | L43; L26; L11; L18; L12; L14; L58; |
| | | L59; L36; L37; L25 | | L27; L13; L1; L10; L7; L53; L66; |
| | | | | L52; L54 |
| 462 | LEIKDTEKY | L29; L41; L26; L49; L40; | TQYNRYLAL | L25; L23; L61; L35; L28; L24; L27; |
| | | L27; L36; L37; L45 | | L43; L44; L73; L67; L69; L10; L3; |
| | | | | L48; L71 |
| 463 | LFLAFVVFL | L72; L71; L62; L9; L8; L4; | TVYSHLLLV | L73; L3; L64; L47; L24; L20; L69; |
| | | L31; L64; L47 | | L6; L4; L58; L11; L5; L2; L48; L51; |
| | | | | L7 |
| 464 | LFLALITL | L71; L72; L47; L62; L56; | VAKSHNIAL | L43; L67; L60; L70; L58; L61; L59; |
| | | L23; L25; L8; L59 | | L68; L69; L23; L56; L39; L74; |
| | | | | L57; L63; L32 |
| 465 | LLFNKVTL | L23; L56; L4; L25; L2; | VENPDILRV | L45; L37; L73; L29; L38; L48; L24; |
| | | L44; L26; L74; L59 | | L42; L4; L36; L46; L40; L41; L33; |
| | | | | L3; L64 |
| 466 | LLLLFVTVY | L26; L12; L27; L6; L31; | VLLSVLQQL | L4; L2; L5; L3; L74; L8; L44; L16; |
| | | L59; L1; L16; L14 | | L56; L6; L9; L24; L53; L39; L55; |
| | | | | L59 |
| 467 | LMNVLTLVY | L18; L26; L31; L1; L12; | VVAFNTLLF | L12; L58; L9; L74; L52; L11; L18; |
| | | L43; L59; L16; L14 | | L6; L16; L26; L60; L1; L8; L49; |
| | | | | L31; L54 |
| 468 | LPINVIVF | L31; L47; L50; L56; L39; | VVFNGVSF | L26; L43; L58; L59; L54; L71; L52; |
| | | L32; L23; L49; L22 | | L72; L60; L53; L56; L16; L27; |
| | | | | L39; L55; L23 |
| 469 | LTKGPHEF | L58; L70; L55; L53; L52; | YAKPFLNKV | L69; L70; L58; L47; L3; L59; L64; |
| | | L59; L60; L43; L26 | | L73; L43; L50; L48; L20; L51; L67; |
| | | | | L5; L4 |
| 470 | LVIGAVIL | L74; L67; L60; L61; L59; | YASAVVLLI | L70; L47; L69; L64; L73; L74; L49; |
| | | L32; L55; L56; L69 | | L20; L67; L24; L31; L32; L61; |
| | | | | L34; L58; L55 |
| 471 | LVIGFLFL | L74; L60; L61; L73; L59; | YTVELGTEV | L20; L58; L61; L67; L70; L73; L69; |
| | | L67; L20; L58; L47 | | L11; L64; L5; L2; L10; L59; L50; |
| | | | | L60; L45 |
| 472 | LVNKFLAL | L59; L73; L60; L61; L23; | CVADYSVLY | L12; L11; L26; L58; L18; L6; L14; |
| | | L56; L67; L39; L74 | | L1; L7; L10; L16; L19; L31; L54; |
| | | | | L13; L69; L65 |
| 473 | LYLQYIRKL | L8; L64; L9; L71; L72; | DAFKLNIKL | L20; L74; L32; L47; L58; L69; L70; |
| | | L55; L65; L66; L4 | | L31; L25; L44; L49; L19; L53; |
| | | | | L64; L29; L56; L11 |
| 474 | LYSPIFLIV | L64; L73; L9; L47; L69; | ELFENKTTL | L23; L20; L2; L3; L10; L11; L4; |
| | | L8; L50; L20; L66 | | L44; L5; L25; L26; L16; L24; L34; |
| | | | | L35; L8; L56 |
| 475 | LYYPSARIV | L64; L47; L72; L69; L70; | FAMGIIAM | L59; L61; L67; L70; L58; L60; L69; |
| | | L71; L66; L62; L28 | | L74; L68; L31; L32; L50; L43; |
| | | | | L47; L63; L66; L72 |
| 476 | MEIDFLELA | L46; L42; L38; L41; L50; | FASEAARVV | L69; L70; L64; L61; L58; L59; L47; |
| | | L37; L40; L29; L45 | | L67; L32; L73; L50; L31; L57; |
| | | | | L49; L68; L60; L63 |
| 477 | MFDAYVNTF | L62; L34; L9; L72; L71; | FLTENLLLY | L12; L1; L6; L2; L18; L59; L3; L11; |
| | | L49; L32; L68; L8 | | L69; L26; L14; L4; L16; L64; L5; |
| | | | | L49; L10 |
| 478 | MIAQYTSAL | L61; L10; L60; L28; L59; | GWLIVGVAL | L44; L71; L56; L67; L72; L8; L36; |
| | | L3; L57; L67; L74 | | L35; L28; L61; L25; L37; L30; L34; |
| | | | | L60; L27; L23 |
| 479 | MMISAGFSL | L61; L60; L28; L35; L8; | HAFLCLFLL | L69; L32; L31; L47; L59; L64; L74; |
| | | L34; L32; L4; L72 | | L70; L20; L53; L50; L60; L44; |
| | | | | L67; L73; L58; L61 |
| 480 | MSFTVLCL | L65; L69; L70; L74; L73; | IAFGGCVF | L59; L58; L70; L60; L54; L69; L31; |
| | | L48; L61; L59; L60 | | L43; L47; L61; L52; L27; L26; |
| | | | | L53; L49; L74; L55 |
| 481 | MYTPHTVL | L66; L71; L72; L25; L9; | ICAPLTVFF | L9; L58; L53; L52; L69; L31; L34; |
| | | L62; L8; L74; L61 | | L12; L8; L74; L26; L54; L49; L64; |
| | | | | L27; L40; L62 |
| 482 | NASFDNFKF | L49; L31; L53; L12; L70; | ISDEVARDL | L55; L68; L60; L63; L62; L61; L53; |
| | | L32; L54; L58; L52 | | L1; L67; L64; L54; L73; L5; L74; |
| | | | | L65; L32; L70 |
| 483 | NESGLKTIL | L37; L36; L29; L41; L40; | KAYKIEELF | L54; L53; L58; L52; L49; L69; L55; |
| | | L45; L35; L42; L25 | | L74; L70; L27; L16; L26; L12; L9; |
| | | | | L31; L8; L63 |
| 484 | NLCPFGEVF | L43; L26; L16; L9; L8; | KEIDRLNEV | L45; L46; L37; L38; L3; L73; L36; |
| | | L27; L34; L11; L59 | | L33; L42; L24; L4; L25; L48; L2; |
| | | | | L64; L69; L29 |
| 485 | NLDYIINLI | L5; L24; L62; L68; L1; | KEIKESVQTF | L37; L36; L26; L40; L54; L8; L41; |
| | | L34; L2; L49; L63 | | L53; L27; L16; L33; L29; L52; L38; |
| | | | | L46; L45; L55 |
| 486 | NLNESLIDL | L4; L2; L5; L3; L57; L23; | KHIDAYKTF | L27; L34; L43; L16; L8; L53; L26; |
| | | L62; L74; L56 | | L54; L52; L28; L35; L9; L10; L55; |
| | | | | L58; L44; L41 |
| 487 | NLVIGFLFL | L74; L5; L61; L67; L2; | KLVNKFLAL | L73; L23; L16; L5; L4; L6; L3; L2; |
| | | L20; L73; L4; L8 | | L61; L44; L8; L67; L59; L10; L13; |
| | | | | L57; L56 |
| 488 | NSHEGKTF | L55; L43; L70; L26; L60; | LAILTALRL | L74; L60; L61; L67; L31; L69; L32; |
| | | L29; L54; L53; L59 | | L47; L59; L70; L73; L58; L49; |
| | | | | L68; L63; L64; L50 |
| 489 | NSIDAFKL | L55; L70; L60; L54; L73; | NIIIWFLLL | L73; L67; L60; L74; L61; L23; L8; |
| | | L67; L69; L35; L61 | | L34; L6; L20; L11; L69; L59; L5; |
| | | | | L28; L4; L25 |
| 490 | NSVLLFLAF | L60; L59; L67; L29; L52; | NTFTRLQSL | L25; L23; L10; L70; L20; L69; L64; |
| | | L40; L27; L73; L31 | | L60; L58; L16; L11; L3; L53; L73; |
| | | | | L61; L59; L57 |
| 491 | NTSNQVAVL | L20; L70; L35; L69; L28; | NVLEGSVAY | L12; L11; L26; L31; L10; L14; L27; |
| | | L67; L73; L53; L10 | | L16; L43; L6; L29; L71; L13; L7; |
| | | | | L72; L49; L54 |
| 492 | PYPDPSRIL | L66; L9; L8; L64; L72; | RIFTIGTVTL | L16; L44; L56; L26; L54; L13; L24; |
| | | 1; L65; L62; L57 | | L37; L21; L3; L39; L53; L4; L6; |
| | | | | L20; L5; L36 |
| 493 | QECVRGTTV | L45; L33; L38; L42; L48; | RMYIFFASF | L27; L16; L26; L43; L59; L53; L54; |
| | | L46; L25; L37; L29 | | L9; L65; L8; L12; L48; L72; L33; |
| | | | | L6; L14; L52 |
| 494 | QKFNGLTVL | L44; L27; L28; L64; L66; | RVVFNGVSF | L26; L54; L16; L53; L52; L43; L27; |
| | | L69; L25; L34; L35 | | L56; L44; L58; L60; L12; L11; |
| | | | | L39; L55; L8; L49 |
| 495 | QSAPHGVVFL | L73; L53; L69; L20; L74; | SAFYILPSI | L47; L69; L70; L20; L48; L50; L49; |
| | | L55; L64; L70; L61 | | L59; L32; L64; L4; L67; L31; L3; |
| | | | | L58; L24; L52 |
| 496 | REVRTIKV | L45; L33; L37; L48; L29; | SSSSDNIAL | L53; L56; L67; L57; L35; L44; L68; |
| | | L38; L46; L36; L24 | | L70; L20; L61; L32; L34; L60; |
| | | | | L73; L58; L74; L28 |
| 497 | RNAPRITF | L54; L65; L27; L33; L53; | TAFGLVAEW | L49; L69; L31; L54; L52; L10; L70; |
| | | L26; L55; L52; L16 | | L19; L67; L20; L58; L32; L64; |
| | | | | L53; L16; L47; L59 |
| 498 | RPDTRYVLM | L22; L39; L32; L18; L49; | TTIQTIVEV | L20; L73; L70; L64; L4; L69; L3; |
| | | L63; L56; L33; L62 | | L35; L58; L2; L24; L19; L11; L28; |
| | | | | L48; L10; L13 |
| 499 | RSDVLLPL | L68; L63; L73; L18; L1; | VARDLSLQF | L58; L59; L43; L49; L70; L53; L52; |
| | | L54; L60; L59; L62 | | L12; L26; L27; L60; L31; L69; L9; |
| | | | | L13; L11; L54 |
| 500 | RSLKVPATV | L73; L54; L53; L55; L24; | VPFWITIAY | L43; L31; L49; L50; L51; L26; L12; |
| | | L13; L48; L52; L16 | | L27; L56; L29; L32; L39; L69; |
| | | | | L72; L22; L47; L6 |
| 501 | RVDWTIEY | L18; L1; L65; L26; L54; | VVYRGTTTY | L26; L43; L11; L58; L27; L14; L10; |
| | | L68; L58; L63; L14 | | L6; L12; L49; L16; L59; L54; L18; |
| | | | | L52; L53; L69 |
| 502 | RVLGLKTL | L39; L55; L56; L16; L53; | VYDPLQPEL | L62; L9; L67; L66; L8; L68; L5; L6; |
| | | L54; L73; L23; L60 | | L63; L72; L28; L71; L60; L74; L64; |
| | | | | L61; L1; L34 |
| 503 | RVWTLMNVL | L16; L44; L53; L65; L13; | YCYDTNVL | L59; L25; L67; L61; L66; L71; L35; |
| | | L56; L73; L68; L39 | | L72; L60; L70; L28; L69; L47; |
| | | | | L64; L48; L68; L58 |
| 504 | SADAQSFL | L63; L68; L74; L62; L60; | YLFDESGEF | L26; L43; L10; L27; L11; L12; L59; |
| | | L58; L70; L67; L61 | | L9; L49; L2; L72; L3; L5; L16; |
| | | | | L66; L58; L8 |
| 505 | SEAARVVRS | L42; L46; L33; L38; L40; | YTPSKLIEY | L58; L11; L59; L12; L10; L1; L69; |
| | | L29; L41; L45; L37 | | L43; L64; L70; L66; L26; L72; L18; |
| | | | | L57; L71; L6 |
| 506 | SEAARVVRSI | L40; L45; L41; L42; L38; | AMDEFIERY | L18; L1; L27; L12; L5; L26; L43; |
| | | L37; L36; L33; L46 | | L14; L49; L16; L41; L40; L29; L34; |
| | | | | L2; L54; L62; L10 |
| 507 | SELVIGAVI | L45; L41; L36; L40; L37; | DSKEGFFTY | L10; L11; L43; L55; L26; L14; L29; |
| | | L42; L29; L38; L48 | | L13; L52; L53; L16; L58; L1; L70; |
| | | | | L18; L65; L17; L49 |
| 508 | SEVVLKKL | L29; L37; L45; L25; L33; | FADDLNQL | L67; L68; L63; L74; L59; L60; L61; |
| | | L41; L48; L36; L40 | | L58; L70; L62; L69; L5; L47; L32; |
| | | | | L64; L1; L31; L49 |
| 509 | SFLPGVYSV | L4; L72; L71; L2; L8; L48; | FAVDAAKAY | L59; L70; L58; L61; L43; L31; L69; |
| | | L35; L13; L9 | | L60; L67; L49; L12; L10; L71; |
| | | | | L66; L72; L32; L14; L64 |
| 510 | SFYYVWKSY | L13; L71; L43; L72; L27; | FTIGTVTL | L61; L67; L60; L59; L70; L58; L69; |
| | | L14; L12; L26; L69 | | L74; L20; L73; L68; L71; L63; |
| | | | | L53; L55; L62; L54; L72 |
| 511 | SHFAIGLALY | L12; L14; L41; L40; L34; | FTSDYYQLY | L58; L12; L1; L70; L64; L69; L18; |
| | | L27; L31; L18; L6 | | L14; L11; L49; L43; L10; L31; L59; |
| | | | | L52; L16; L66; L55 |
| 512 | SLSSTASAL | L57; L4; L28; L3; L44; L2; | HANEYRLYL | L73; L32; L61; L60; L67; L70; L69; |
| | | L74; L56; L72 | | L74; L58; L49; L59; L65; L57; |
| | | | | L64; L63; L31; L68; L43 |
| 513 | SPIFLIVAA | L51; L50; L22; L32; L42; | LAYILFTRF | L49; L59; L31; L47; L60; L52; L58; |
| | | L31; L56; L38; L39 | | L53; L69; L12; L74; L43; L70; |
| | | | | L26; L27; L50; L32; L61 |
| 514 | SSGDATTAY | L43; L26; L14; L58; L18; | LITGRLQSL | L23; L60; L59; L61; L58; L39; L3; |
| | | L1; L59; L10; L54 | | L4; L56; L25; L10; L74; L64; L57; |
| | | | | L5; L43; L32; L69 |
| 515 | SSGVTREL | L59; L65; L60; L61; L73; | RLNEVAKNL | L4; L2; L5; L13; L16; L44; L39; |
| | | L70; L43; L55; L48 | | L55; L57; L56; L3; L24; L26; L73; |
| | | | | L14; L21; L64; L6 |
| 516 | STDTGVEHV | L63; L18; L68; L1; L20; | SIIIGGAKL | L11; L28; L60; L10; L61; L58; L20; |
| | | L62; L5; L58; L2 | | L56; L63; L26; L24; L74; L34; L8; |
| | | | | L68; L4; L36; L37 |
| 517 | STFNVPMEK | L7; L13; L6; L19; L20; | TLNDLNETL | L4; L2; L5; L34; L16; L3; L8; L26; |
| | | L69; L17; L73; L21 | | L68; L57; L44; L35; L32; L9; L20; |
| | | | | L24; L62; L56 |
| 518 | TAAKLMVVI | L47; L70; L69; L49; L32; | TTADIVVF | L70; L65; L53; L69; L58; L52; L54; |
| | | L20; L67; L53; L64 | | L10; L20; L55; L26; L11; L59; |
| | | | | L35; L43; L29; L31; L66 |
| 519 | TCDGTTFTY | L18; L1; L65; L49; L14; | TTLPVNVAF | L53; L52; L54; L16; L31; L8; L12; |
| | | L34; L12; L27; L26 | | L9; L20; L59; L26; L35; L60; L55; |
| | | | | L6; L11; L40; L10 |
| 520 | TCFSTOFAF | L35; L16; L9; L34; L40; | VRFPNITNL | L66; L64; L65; L25; L30; L35; L34; |
| | | L27; L12; L8; L65 | | L74; L3; L28; L69; L4; L60; L44; |
| | | | | L8; L9; L61; L70 |
| 521 | TEVLTEEV | L33; L29; L45; L48; L37; | VRIQPGQTF | L34; L30; L43; L26; L8; L9; L35; |
| | | L38; L46; L25; L36 | | L66; L28; L65; L27; L53; L52; L49; |
| | | | | L58; L60; L12; L54 |
| 522 | TEVPANSTV | L45; L37; L38; L36; L46; | YAFEHIVYG | L70; L69; L58; L64; L61; L47; L59; |
| | | L29; L28; L41; L33 | | L49; L67; L74; L31; L60; L20; |
| | | | | L32; L50; L43; L73; L3 |
| 523 | TIDYTEISF | L68; L62; L63; L34; L32; | YLITPVHVM | L61; L32; L5; L69; L11; L70; L2; |
| | | L28; L1; L74; L5 | | L59; L67; L3; L28; L4; L26; L71; |
| | | | | L43; L72; L10; L27 |
| 524 | TLMNVLTL | L23; L4; L3; L2; L57; L72; | YVNTFSSTF | L58; L26; L10; L59; L43; L54; L11; |
| | | L74; L71; L68 | | L60; L49; L9; L12; L16; L32; L71; |
| | | | | L53; L27; L72; L52 |
| 525 | TLQPVSELL | L2; L4; L5; L28; L9; L8; | AIASEFSSL | L10; L3; L61; L60; L28; L16; L44; |
| | | L34; L74; L20 | | L58; L26; L4; L74; L56; L39; L22; |
| | | | | L6; L11; L67; L43; L57 |
| 526 | TMCDIRQLL | L64; L34; L16; L8; L5; | FAFPFTIY | L59; L70; L69; L58; L31; L47; L61; |
| | | L40; L20; L41; L4 | | L66; L74; L67; L60; L43; L27; |
| | | | | L12; L26; L29; L49; L64; L50 |
| 527 | TPHTVLQAV | L51; L50; L47; L39; L32; | FCYMHHMEL | L59; L61; L60; L67; L25; L69; L74; |
| | | L56; L23; L22; L24 | | L73; L58; L71; L70; L66; L43; |
| | | | | L28; L23; L64; L68; L72; L57 |
| 528 | TPINLVRDL | L32; L39; L64; L31; L56; | FVSEETGTL | L60; L61; L10; L32; L68; L20; L58; |
| | | L22; L49; L34; L47 | | L74; L67; L3; L5; L49; L11; L2; |
| | | | | L4; L44; L31; L57; L59 |
| 529 | TPVVQTIEV | L50; L47; L51; L32; L39; | FVVEVVDKY | L12; L31; L58; L11; L14; L69; L10; |
| | | L22; L49; L31; L56 | | L26; L49; L1; L20; L54; L59; L5; |
| | | | | L52; L29; L67; L66; L64 |
| 530 | TRPLLESEL | L64; L66; L57; L35; L65; | GADPIHSL | L68; L63; L67; L60; L74; L61; L70; |
| | | L34; L28; L62; L67 | | L23; L32; L55; L62; L59; L54; |
| | | | | L35; L58; L49; L69; L28; L66 |
| 531 | TTYPGQGL | L55; L25; L60; L61; L54; | KATEETFKL | L54; L53; L55; L69; L70; L60; L44; |
| | | L70; L28; L53; L20 | | L73; L63; L49; L24; L74; L32; |
| | | | | L58; L16; L8; L61; L68; L52 |
| 532 | TVIEVQGY | L11; L26; L10; L43; L14; | LALSKGVHF | L59; L58; L52; L60; L31; L12; L49; |
| | | L29; L54; L12; L55 | | L53; L61; L47; L74; L54; L32; L9; |
| | | | | L8; L43; L63; L70; L50 |
| 533 | TVVIGTSKF | L11; L26; L10; L49; L52; | LVAEWFLAY | L12; L59; L6; L10; L26; L1; L31; |
| | | L54; L16; L58; L53 | | L18; L11; L43; L16; L7; L58; L14; |
| | | | | L27; L49; L69; L52; L61 |
| 534 | TYFTQSRNL | L71; L72; L8; L64; L65; | LVSDIDITF | L49; L26; L58; L32; L52; L31; L5; |
| | | L9; L66; L13; L62 | | L12; L53; L16; L9; L20; L56; L54; |
| | | | | L69; L39; L60; L55; L34 |
| 535 | VADYSVLY | L1; L18; L63; L68; L62; | SEVGPEHSL | L37; L36; L29; L40; L41; L45; L28; |
| | | L58; L70; L54; L49 | | L44; L32; L42; L38; L67; L34; |
| | | | | L65; L33; L56; L35; L46; L61 |
| 536 | VAELEGIQY | L1; L31; L18; L27; L26; | SIIAYTMSL | L43; L60; L61; L4; L58; L10; L3; |
| | | L58; L49; L12; L70 | | L28; L73; L74; L59; L71; L16; L72; |
| | | | | L67; L5; L22; L57; L69 |
| 537 | VATAEAEL | L74; L59; L67; L61; L70; | SQLGGLHLL | L44; L4; L24; L34; L8; L30; L2; |
| | | L60; L63; L68; L56 | | L14; L27; L16; L35; L25; L58; L73; |
| | | | | L64; L26; L28; L56; L40 |
| 538 | VENPTIQKD | L37; L29; L45; L40; L41; | STNVTIATY | L14; L43; L11; L26; L10; L18; L16; |
| | | L36; L49; L38; L65 | | L58; L65; L54; L12; L52; L27; |
| | | | | L49; L1; L53; L7; L6; L70 |
| 539 | VIYLYLTF | L59; L43; L26; L60; L47; | SVVSKVVKV | L20; L73; L69; L3; L4; L58; L11; |
| | | L74; L48; L58; L23 | | L2; L64; L13; L5; L24; L10; L63; |
| | | | | L51; L49; L19; L7; L45 |
| 540 | VLIMLIIFW | L4; L69; L74; L2; L12; L5; | TTNGDFLHF | L53; L10; L73; L52; L11; L58; L16; |
| | | L3; L9; L6 | | L49; L8; L65; L9; L54; L12; L18; |
| | | | | L59; L26; L31; L1; L60 |
| 541 | VLKGVKLHY | L12; L26; L14; L43; L18; | AWPLIVTAL | L57; L62; L72; L71; L64; L67; L5; |
| | | L13; L16; L6; L1 | | L56; L9; L66; L33; L44; L40; L36; |
| | | | | L22; L68; L41; L39; L28; L8 |
| 542 | VLKKLKKSL | L23; L39; L43; L3; L56; | FVCNLLLLF | L12; L58; L69; L11; L74; L59; L31; |
| | | L26; L44; L13; L16 | | L52; L64; L5; L62; L34; L60; L73; |
| | | | | L49; L53; L10; L9; L1; L16 |
| 543 | VLTEEVVL | L74; L44; L62; L23; L67; | FVFLVLLPL | L59; L67; L61; L74; L60; L20; L69; |
| | | L2; L68; L63; L56 | | L64; L73; L31; L68; L6; L50; L5; |
| | | | | L4; L58; L3; L47; L2; L32 |
| 544 | VRSIFSRTL | L64; L65; L66; L25; L35; | HLVDFQVTI | L24; L20; L5; L3; L2; L49; L44; |
| | | L28; L34; L55; L30 | | L34; L4; L10; L16; L48; L8; L32; L69; |
| | | | | L64; L45; L53; L26; L35 |
| 545 | VSNGTHWF | L58; L54; L70; L55; L59; | HSIGFDYVY | L14; L54; L65; L26; L55; L18; L52; |
| | | L60; L43; L74; L26 | | L32; L11; L69; L53; L58; L70; |
| | | | | L43; L27; L29; L59; L10; L12; L49 |
| 546 | VSQPFLMDL | L73; L60; L59; L61; L69; | IVNGVRRSF | L16; L26; L52; L59; L60; L39; L43; |
| | | L70; L74; L53; L58 | | L58; L55; L10; L54; L53; L49; |
| | | | | L32; L12; L14; L11; L65; L27; L31 |
| 547 | VVADAVIKTL | L10; L3; L20; L39; L60; | KAIDGGVTR | L15; L19; L21; L17; L43; L54; L67; |
| | | L56; L16; L4; L11 | | L7; L61; L69; L53; L55; L13; L58; |
| | | | | L52; L70; L49; L60; L44; L27 |
| 548 | VVIGTSKFY | L14; L58; L26; L12; L11; | LLMPILTL | L4; L61; L74; L59; L3; L23; L2; |
| | | L13; L43; L27; L10 | | L55; L25; L47; L68; L73; L64; |
| | | | | L57; L43; L69; L26; L62; L67 |
| 549 | VVQQLPETY | L26; L14; L12; L16; L52; | LSFKELLVY | L69; L1; L58; L26; L52; L18; L59; |
| | | L18; L31; L29; L58 | | L53; L27; L54; L70; L31; L55; L65; |
| | | | | L16; L14; L43; L73; L12; L49 |
| 550 | VYFLQSINF | L9; L72; L71; L8; L62; | LWLLWPVTL | L62; L25; L9; L67; L60; L4; L8; |
| | | L12; L66; L26; L27 | | L31; L47; L61; L50; L71; L44; L55; |
| | | | | L56; L73; L23; L59; L74; L72 |
| 551 | WRNTNPIQL | L64; L66; L65; L35; L30; | NVIPTITQM | L11; L19; L74; L69; L10; L58; L28; |
| | | L25; L34; L28; L74 | | L5; L60; L32; L20; L31; L26; L29; |
| | | | | L17; L35; L49; L3; L34; L6 |
| 552 | WTLMNVLTL | L73; L16; L61; L60; L53; | QASLNGVTL | L32; L67; L61; L60; L56; L70; L68; |
| | | L55; L4; L69; L10 | | L44; L31; L55; L69; L58; L39; |
| | | | | L59; L22; L63; L57; L74; L28; L53 |
| 553 | YAADPAMHA | L61; L50; L69; L58; L60; | QSAPHGVVF | L53; L54; L52; L70; L69; L59; L43; |
| | | L59; L70; L43; L67 | | L55; L58; L65; L61; L26; L28; L9; |
| | | | | L60; L73; L27; L66; L11; L74 |
| 554 | YADSFVIRG | L74; L32; L63; L49; L68; | RTAPHGHVM | L53; L54; L70; L65; L73; L61; L55; |
| | | L69; L58; L70; L67 | | L52; L58; L16; L69; L18; L11; |
| | | | | L14; L60; L59; L21; L39; L15; L26 |
| 555 | YANGGKGF | L58; L59; L60; L43; L49; | SLIDFYLCF | L43; L26; L11; L12; L10; L8; L59; |
| | | L70; L61; L27; L26 | | L16; L5; L9; L27; L6; L69; L3; L49; |
| | | | | L4; L34; L2; L74; L72 |
| 556 | YCIDGALL | L61; L60; L59; L28; L71; | SSPDAVTAY | L43; L57; L72; L71; L26; L66; L10; |
| | | L74; L67; L72; L62 | | L58; L14; L11; L59; L1; L64; L69; |
| | | | | L12; L27; L7; L18; L65; L6 |
| 557 | YFKYWDQTY | L12; L43; L26; L72; L71; | SVGPKQASL | L20; L10; L39; L56; L43; L65; L28; |
| | | L58; L27; L14; L13 | | L58; L74; L67; L5; L44; L61; L16; |
| | | | | L4; L22; L3; L23; L60; L11 |
| 558 | YHPNCVNCL | L28; L64; L57; L35; L34; | TAQNSVRVL | L70; L32; L69; L61; L60; L64; L31; |
| | | L71; L72; L66; L62 | | L59; L39; L67; L28; L58; L55; |
| | | | | L68; L56; L57; L65; L72; L66; L47 |
| 559 | YIFFASFYY | L12; L1; L58; L26; L14; | TILDGISQY | L14; L11; L10; L26; L6; L16; L43; |
| | | L18; L6; L59; L69 | | L12; L27; L4; L18; L7; L17; L58; |
| | | | | L13; L31; L69; L29; L19; L59 |
| 560 | YIIKLIFL | L74; L58; L23; L59; L60; | TLDSKTQSL | L23; L5; L2; L63; L68; L32; L35; |
| | | L73; L61; L67; L69 | | L1; L62; L34; L57; L4; L43; L28; |
| | | | | L39; L3; L16; L49; L74; L10 |
| 561 | YLYALVYF | L74; L59; L62; L26; L43; | VMVELVAEL | L67; L5; L3; L4; L2; L64; L62; L69; |
| | | L69; L27; L12; L58 | | L56; L61; L72; L31; L60; L66; |
| | | | | L71; L8; L44; L9; L20; L73 |
| 562 | YQDVNCTEV | L24; L68; L63; L62; L28; | AAYVDNSSL | L43; L61; L67; L68; L70; L60; L59; |
| | | L48; L35; L58; L5 | | L69; L58; L57; L53; L63; L32; |
| | | | | L44; L56; L72; L31; L74; L54; L26; |
| | | | | L28 |
| 563 | YRVVVLSF | L66; L65; L35; L25; L71; | EYHDVRVVL | L66; L8; L71; L72; L9; L35; L20; |
| | | L59; L72; L64; L30 | | L32; L62; L44; L67; L34; L25; L17; |
| | | | | L41; L65; L56; L39; L13; L23; L64 |
| 564 | YSTAALGVL | L61; L60; L59; L73; L58; | FAIGLALYY | L69; L59; L12; L70; L31; L58; L67; |
| | | L70; L74; L67; L69 | | L74; L64; L61; L49; L60; L43; |
| | | | | L14; L11; L1; L18; L52; L32; L73; |
| | | | | L55 |
| 565 | YTSNPTTF | L58; L70; L60; L54; L59; | HVGEIPVAY | L43; L12; L26; L11; L14; L31; L6; |
| | | L53; L62; L69; L55 | | L49; L29; L10; L16; L20; L58; L13; |
| | | | | L66; L54; L18; L52; L69; L65; |
| | | | | L44 |
| 566 | YYQLYSTQL | L71; L72; L9; L66; L62; | KAYNVTQAF | L59; L43; L54; L58; L53; L69; L70; |
| | | L8; L28; L65; L60 | | L49; L52; L16; L27; L60; L61; |
| | | | | L26; L55; L31; L12; L56; L72; L71; |
| | | | | L14 |
| 567 | YYRSLPGVF | L66; L9; L8; L72; L62; | KLFDRYFKY | L16; L12; L6; L14; L26; L18; L27; |
| | | L71; L12; L58; L27 | | L43; L69; L13; L11; L4; L10; L54; |
| | | | | L21; L2; L24; L5; L55; L66; L3 |
| 568 | AALALLLL | L74; L73; L59; L61; L47; | KSAPLIEL | L73; L59; L55; L74; L69; L70; L53; |
| | | L67; L60; L23; L69; L70 | | L67; L54; L61; L60; L58; L65; |
| | | | | L64; L66; L56; L43; L26; L33; L18; |
| | | | | L44 |
| 569 | AEIPKEEV | L45; L37; L33; L38; L46; | NSFSGYLKL | L25; L73; L70; L69; L55; L35; L74; |
| | | L42; L36; L29; L48; L23 | | L67; L60; L10; L53; L61; L16; |
| | | | | L49; L58; L64; L11; L20; L54; L13; |
| | | | | L24 |
| 570 | AEWFLAYIL | L37; L36; L40; L42; L41; | SLDNVLSTF | L5; L62; L68; L63; L26; L34; L10; |
| | | L44; L45; L33; L38; L29 | | L43; L9; L27; L12; L2; L53; L1; |
| | | | | L49; L16; L18; L74; L8; L3; |
| 571 | AFPFTIYSL | L72; L71; L62; L57; L8; | STVFPPTSF | L43; L60; L53; L52; L58; L16; L12; |
| | | L9; L66; L65; L5; L44 | | L10; L54; L26; L11; L70; L7; L28; |
| | | | | L27; L20; L69; L59; L61; L9; L65 |
| 572 | AIFYLITPV | L24; L3; L4; L69; L20; L2; | TMADLVYAL | L4; L2; L35; L67; L3; L20; L34; |
| | | L5; L7; L6; L13 | | L44; L64; L56; L28; L32; L16; L31; |
| | | | | L5; L66; L65; L40; L69; L8; L36 |
| 573 | AVFDKNLY | L14; L18; L26; L12; L1; | TVFPPTSF | L26; L43; L29; L58; L16; L54; L59; |
| | | L65; L16; L58; L54; L6 | | L74; L52; L23; L28; L65; L69; |
| | | | | L55; L25; L60; L31; L62; L53; L12; |
| | | | | L72 |
| 574 | AVKTQFNYY | L13; L14; L26; L58; L12; | VMYASAVVL | L67; L25; L69; L28; L72; L71; L61; |
| | | L10; L6; L18; L11; L1 | | L35; L44; L31; L60; L66; L62; |
| | | | | L70; L56; L39; L68; L74; L47; L64; |
| | | | | L27 |
| 575 | AVTANVNAL | L56; L10; L61; L16; L60; | VVFLLVTL | L59; L67; L74; L23; L56; L25; L60; |
| | | L67; L4; L44; L3; L74 | | L48; L47; L26; L68; L39; L62; |
| | | | | L69; L44; L64; L20; L55; L53; L63; |
| | | | | L33 |
| 576 | CTDDNALAY | L1; L18; L12; L14; L68; | YASAVVLL | L74; L69; L70; L67; L64; L58; L61; |
| | | L59; L11; L58; L10; L16 | | L60; L47; L63; L31; L59; L73; |
| | | | | L62; L56; L68; L49; L23; L32; L66; |
| | | | | L20 |
| 577 | CYFPLQSY | L71; L72; L66; L59; L12; | GVYSVIYLY | L12; L14; L6; L7; L11; L26; L58; |
| | | L29; L26; L14; L64; L43 | | L18; L24; L27; L16; L13; L10; L49; |
| | | | | L55; L54; L52; L1; L65; L19; L53; |
| | | | | L69 |
| 578 | DFYLCFLAF | L25; L72; L9; L71; L29; | ILFLALITL | L2; L4; L3; L5; L26; L64; L68; L74; |
| | | L59; L47; L12; L8; L11 | | L59; L69; L23; L6; L56; L67; L16; |
| | | | | L44; L62; L27; L53; L47; L57; L61 |
| 579 | DTYPSLETI | L47; L10; L20; L25; L53; | KAYKIEEL | L74; L67; L59; L70; L58; L55; L54; |
| | | L11; L16; L52; L34; L49 | | L69; L73; L23; L53; L61; L63; |
| | | | | L60; L66; L68; L43; L65; L27; L44; |
| | | | | L25; L56 |
| 580 | EAIRHVRAW | L10; L49; L52; L54; L11; | LAFLLFLVL | L67; L59; L61; L47; L60; L69; L31; |
| | | L61; L69; L17; L40; L32 | | L70; L73; L50; L74; L32; L68; |
| | | | | L64; L58; L56; L44; L55; L25; L49; |
| | | | | L52; L53 |
| 581 | EHFIETISL | L34; L28; L35; L25; L23; | LANECAQVL | L32; L61; L60; L70; L59; L31; L69; |
| | | L20; L44; L27; L10; L41 | | L58; L67; L55; L64; L68; L57; |
| | | | | L47; L63; L49; L39; L73; L53; L56; |
| | | | | L43; L23 |
| 582 | EIVDTVSAL | L10; L11; L20; L67; L61; | LLADKFPVL | L2; L4; L5; L3; L61; L59; L69; L74; |
| | | L28; L60; L35; L19; L32 | | L9; L39; L23; L44; L8; L43; L56; |
| | | | | L67; L66; L28; L20; L6; L64; L16 |
| 583 | ELDERIDKV | L5; L2; L24; L1; L11; L23; | SAPPAQYEL | L57; L67; L61; L59; L66; L60; L58; |
| | | L4; L20; L63; L3 | | L64; L5; L65; L69; L74; L70; L63; |
| | | | | L32; L68; L53; L56; L20; L39; L62 |
| | | | | L43 |
| 584 | FAQDGNAAI | L61; L59; L67; L68; L49; | SASKIITL | L74; L70; L58; L69; L23; L56; L61; |
| | | L32; L70; L43; L50; L20 | | L32; L67; L60; L64; L39; L59; |
| | | | | L44; L53; L63; L73; L68; L49; L47; |
| | | | | L35; L66 |
| 585 | FATSACVL | L61; L74; L67; L70; L59; | SHFAIGLAL | L35; L28; L34; L25; L44; L56; L61; |
| | | L60; L69; L58; L55; L68 | | L20; L60; L71; L27; L72; L31; |
| | | | | L22; L41; L37; L39; L32; L64; L67; |
| | | | | L40; L36 |
| 586 | FAYANRNRFL | L60; L61; L58; L69; L70; | SSSDNIALL | L73; L74; L20; L58; L64; L69; L70; |
| | | L74; L64; L67; L68; L32 | | L53; L34; L61; L60; L44; L4; L65; |
| | | | | L1; L63; L56; L19; L35; L3; L28; |
| | | | | L68 |
| 587 | FCNDPFLGV | L73; L5; L59; L50; L58; | SVIYLYLTF | L10; L11; L12; L49; L58; L26; L16; |
| | | L61; L4; L3; L2; L47 | | L52; L43; L53; L7; L8; L9; L34; |
| | | | | L27; L59; L54; L73; L60; L41; L69; |
| | | | | L32 |
| 588 | FFITGNTL | L72; L71; L62; L61; L59; | TLKEILVTY | L43; L26; L3; L14; L13; L12; L10; |
| | | L60; L67; L9; L8; L68 | | L11; L27; L16; L69; L6; L4; L2; |
| | | | | L23; L5; L49; L18; L58; L55; L17; |
| | | | | L15 |
| 589 | FLAFLLFL | L74; L59; L2; L3; L4; L61; | VAFNTLLFL | L69; L74; L60; L58; L59; L61; L70; |
| | | L64; L68; L23; L1 | | L67; L47; L73; L64; L31; L68; |
| | | | | L53; L4; L20; L44; L63; L56; L57; |
| | | | | L49; L32 |
| 590 | FLHFLPRVF | L69; L59; L64; L43; L26; | YADVFHLYL | L67; L68; L74; L59; L61; L60; L63; |
| | | L12; L62; L27; L74; L66 | | L32; L70; L62; L1; L73; L58; L69; |
| | | | | L5; L49; L31; L64; L57; L18; L47; |
| | | | | L34 |
| 591 | FLMSFTVL | L74; L59; L61; L57; L23; | YAFEHIVY | L59; L70; L69; L31; L58; L27; L66; |
| | | L68; L67; L2; L62; L72 | | L67; L26; L29; L47; L43; L61; |
| | | | | L49; L54; L50; L12; L72; L71; L64; |
| | | | | L60; L25 |
| 592 | FSSEIIGY | L1; L58; L69; L70; L43; | ANDPVGFTL | L68; L34; L35; L5; L63; L28; L67; |
| | | L18; L59; L26; L66; L55 | | L65; L61; L60; L62; L55; L39; L36; |
| | | | | L32; L66; L53; L44; L41; L22; |
| | | | | L54; L8; L73 |
| 593 | FTSDYYQL | L67; L60; L70; L61; L59; | FVNEFYAYL | L60; L5; L61; L58; L59; L74; L67; |
| | | L66; L20; L58; L73; L55 | | L64; L62; L73; L20; L4; L68; L10; |
| | | | | L11; L3; L69; L2; L57; L43; L63; |
| | | | | L66; L32 |
| 594 | FVAAIFYL | L74; L20; L58; L60; L61; | FVSDADSTL | L60; L61; L67; L58; L32; L20; L68; |
| | | L64; L69; L59; L67; L4 | | L74; L5; L57; L63; L59; L2; L28; |
| | | | | L4; L34; L69; L66; L3; L10; L44; |
| | | | | L64; L31 |
| 595 | FVCNLLLL | L74; L59; L67; L60; L73; | HAASGNLLL | L74; L32; L44; L61; L70; L67; L69; |
| | | L61; L68; L64; L62; L58 | | L58; L73; L49; L64; L31; L60; |
| | | | | L53; L20; L34; L56; L54; L35; L63; |
| | | | | L68; L11; L28 |
| 596 | FVFPLNSII | L69; L20; L64; L67; L47; | IVAGGIVAI | L20; L3; L10; L24; L49; L11; L67; |
| | | L3; L16; L74; L61; L32 | | L39; L4; L16; L64; L28; L53; L34; |
| | | | | L32; L19; L51; L6; L68; L74; L2; |
| | | | | L69; L26 |
| 597 | FVLTSHTVM | L61; L59; L71; L60; L32; | IVNSVLLFL | L73; L74; L4; L5; L58; L60; L6; |
| | | L31; L74; L72; L67; L58 | | L64; L56; L61; L20; L59; L53; L68; |
| | | | | L39; L67; L31; L3; L62; L63; L32; |
| | | | | L8; L69 |
| 598 | GAAAYYVGY | L43; L58; L12; L27; L31; | SLIDLQEL | L4; L59; L2; L3; L23; L43; L24; |
| | | L49; L18; L14; L10; L26 | | L74; L5; L64; L26; L67; L61; L57; |
| | | | | L72; L25; L56; L68; L10; L71; L69; |
| | | | | L37; L20 |
| 599 | GLNDNLLEI | L3; L24; L4; L2; L5; L16; | VLNDILSRL | L4; L5; L3; L2; L43; L8; L16; L64; |
| | | L10; L73; L6; L8 | | L26; L62; L44; L74; L57; L63; L6; |
| | | | | L56; L24; L73; L9; L69; L11; L14; |
| | | | | L10 |
| 600 | GRVDGQVDL | L30; L35; L65; L64; L66; | VVIPDYNTY | L43; L11; L26; L10; L14; L52; L12; |
| | | L34; L44; L25; L28; L36 | | L54; L58; L59; L16; L49; L18; |
| | | | | L27; L53; L31; L13; L6; L29; L55; |
| | | | | L69; L7; L1 |
| 601 | GSLPINVIVF | L52; L53; L55; L54; L26; | YFFTLLLQL | L71; L72; L64; L69; L9; L8; L4; |
| | | L27; L69; L65; L16; L44 | | L62; L73; L59; L3; L67; L44; L31; |
| | | | | L61; L60; L34; L12; L58; L35; L25; |
| | | | | L20; L74 |
| 602 | GVYDYLVST | L6; L7; L43; L3; L24; L2; | YVYSRVKNL | L74; L60; L64; L61; L58; L69; L23; |
| | | L4; L10; L15; L44 | | L25; L3; L10; L4; L73; L39; L67; |
| | | | | L49; L20; L11; L5; L59; L32; L70; |
| | | | | L47; L16 |
| 603 | HAEETRKL | L63; L32; L49; L60; L68; | DADSKIVQL | L32; L74; L63; L23; L49; L68; L60; |
| | | L70; L61; L55; L23; L62 | | L70; L67; L35; L58; L69; L31; |
| | | | | L61; L34; L20; L47; L10; L62; L11; |
| | | | | L5; L17; L19; L53 |
| 604 | HAFLCLFL | L74; L69; L59; L70; L60; | IIFWFSLEL | L59; L60; L73; L61; L65; L67; L58; |
| | | L47; L61; L67; L73; L25 | | L64; L69; L43; L5; L68; L16; L74; |
| | | | | L3; L26; L6; L4; L32; L57; L28; |
| | | | | L2; L20; L72 |
| 605 | HFAIGLAL | L72; L71; L25; L35; L23; | KSFDLGDEL | L55; L67; L53; L73; L54; L44; L69; |
| | | L28; L61; L59; L62; L67 | | L16; L70; L58; L13; L60; L61; |
| | | | | L66; L56; L20; L65; L52; L14; L27; |
| | | | | L64; L26; L59; L18 |
| 606 | HVVAFNTL | L60; L20; L67; L25; L56; | QSASKIITL | L70; L69; L73; L55; L53; L20; L74; |
| | | L59; L61; L10; L23; L29 | | L44; L61; L64; L58; L56; L65; |
| | | | | L10; L60; L32; L23; L39; L43; L34; |
| | | | | L54; L67; L16; L35 |
| 607 | IAGLIAIVM | L70; L67; L69; L31; L58; | SAFVNLKQL | L69; L59; L60; L70; L58; L64; L61; |
| | | L68; L32; L59; L61; L47 | | L56; L74; L32; L25; L44; L10; |
| | | | | L73; L31; L39; L3; L49; L4; L13; |
| | | | | L47; L20; L57; L53 |
| 608 | IEDLLFNKV | L45; L46; L29; L37; L38; | SAPHGVVFL | L74; L57; L63; L69; L64; L67; L58; |
| | | L42; L36; L33; L5; L62 | | L68; L61; L70; L32; L56; L49; |
| | | | | L20; L66; L62; L60; L5; L59; L72; |
| | | | | L31; L44; L47; L73 |
| 609 | ILDITPCSF | L62; L68; L63; L43; L5; | SAQTGIAVL | L61; L32; L60; L70; L69; L56; L28; |
| | | L18; L1; L74; L9; L26 | | L58; L68; L74; L65; L59; L63; |
| | | | | L44; L67; L39; L10; L31; L72; L57; |
| | | | | L64; L53; L66; L49 |
| 610 | ISAGFSLWVY | L18; L14; L1; L43; L26; | SLLMPILTL | L4; L2; L5; L6; L16; L3; L61; L23; |
| | | L52; L58; L69; L53; L54 | | L44; L74; L24; L27; L8; L73; L9; |
| | | | | L34; L26; L10; L67; L59; L56; L28; |
| | | | | L13; L39 |
| 611 | ITVATSRTL | L55; L60; L61; L53; L70; | VADAVIKTL | L60; L68; L63; L32; L67; L70; L61; |
| | | L54; L65; L10; L64; L73 | | L5; L74; L58; L69; L62; L39; L49; |
| | | | | L47; L31; L44; L55; L53; L56; L64; |
| | | | | L73; L43; L59 |
| 612 | IVAAIVFITL | L20; L56; L67; L31; L60; | YVFCTVNAL | L59; L60; L61; L67; L32; L64; L4; |
| | | L10; L39; L5; L6; L53 | | L20; L10; L58; L74; L3; L69; L71; |
| | | | | L5; L72; L44; L68; L28; L16; L31; |
| | | | | L65; L57; L26 |
| 613 | IVDTVSAL | L68; L63; L62; L67; L74; | AGIVGVLTL | L61; L73; L69; L34; L44; L67; L35; |
| | | L60; L28; L61; L5; L1 | | L72; L71; L28; L27; L16; L59; |
| | | | | L24; L8; L26; L3; L65; L64; L25; L4; |
| | | | | L43; L37; L60; L55 |
| 614 | KFKEGVEFL | L13; L72; L8; L62; L9; | AMYTPHTVL | L25; L61; L28; L67; L44; L56; L27; |
| | | L71; L3; L55; L16; L44 | | L68; L69; L71; L72; L35; L26; |
| | | | | L66; L36; L60; L70; L39; L65; L59; |
| | | | | L22; L16; L3; L8; L74 |
| 615 | KFLPFQQF | L8; L9; L71; L33; L72; | AQLPAPRTL | L44; L55; L61; L27; L73; L4; L26; |
| | | L54; L55; L27; L53; L52 | | L16; L64; L28; L35; L69; L24; L48; |
| | | | | L25; L60; L34; L3; L40; L30; L13; |
| | | | | L66; L41; L8; L67 |
| 616 | KHADFDTWF | L34; L53; L54; L28; L27; | FAFPFTIYSL | L67; L61; L32; L60; L59; L69; L70; |
| | | L16; L35; L26; L8; L9 | | L31; L20; L58; L74; L3; L50; L64; |
| | | | | L43; L66; L47; L65; L44; L4; L49; |
| | | | | L68; L53; L10; L5 |
| 617 | KLHDELTGH | L3; L6; L2; L4; L26; L24; | GVAPGTAVL | L28; L44; L20; L74; L10; L3; L67; |
| | | L21; L43; L16; L5 | | L56; L61; L26; L22; L58; L60; L11; |
| | | | | L16; L35; L59; L53; L4; L64; L39; |
| | | | | L2; L54; L36; L34 |
| 618 | KLIFLWLLW | L16; L52; L54; L12; L6; | HLDGEVITF | L34; L63; L5; L49; L62; L32; L68; |
| | | L24; L18; L9; L73; L21 | | L26; L53; L2; L27; L65; L74; L10; |
| | | | | L18; L16; L35; L54; L24; L12; L9; |
| | | | | L28; L11; L1; L31 |
| 619 | KLINIIIWFL | L4; L3; L5; L2; L16; L44; | KLINIIIWF | L16; L26; L69; L43; L5; L53; L8; |
| | | L6; L20; L13; L24 | | L27; L4; L11; L6; L13; L9; L52; L74; |
| | | | | L12; L24; L54; L21; L3; L2; L64; |
| | | | | L10; L44; L55 |
| 620 | KLNIKLLGV | L3; L73; L4; L2; L5; L23; | KVDGVDVEL | L5; L63; L68; L67; L74; L62; L32; |
| | | L24; L18; L6; L16 | | L56; L53; L54; L60; L2; L39; L73; |
| | | | | L44; L18; L58; L20; L16; L65; L49; |
| | | | | L13; L55; L34; L61 |
| 621 | KLSYGIATV | L3; L2; L4; L24; L5; L16; | QINDMILSL | L73; L4; L65; L43; L16; L61; L5; |
| | | L18; L73; L20; L21 | | L69; L3; L10; L23; L60; L39; L64; |
| | | | | L68; L59; L58; L66; L32; L11; L6; |
| | | | | L35; L57; L72; L67 |
| 622 | KSYELQTPF | L53; L54; L55; L52; L16; | SALEPLVDL | L60; L67; L61; L59; L31; L74; L56; |
| | | L43; L27; L26; L73; L58 | | L68; L4; L44; L58; L69; L53; L63; |
| | | | | L32; L39; L23; L70; L73; L43; L2; |
| | | | | L50; L49; L5; L47 |
| 623 | KVATVQSKM | L54; L14; L53; L58; L6; | YQPYRVVVL | L44; L64; L57; L69; L66; L23; L27; |
| | | L13; L18; L52; L16; L11 | | L65; L67; L25; L71; L28; L58; |
| | | | | L35; L72; L61; L26; L5; L62; L33; |
| | | | | L48; L63; L39; L24; L73 |
| 624 | LAKDTTEAF | L43; L58; L59; L49; L70; | AVASKILGL | L3; L10; L4; L11; L16; L6; L73; |
| | | L52; L31; L26; L60; L32 | | L20; L7; L74; L56; L58; L69; L24; |
| | | | | L39; L44; L23; L61; L13; L2; L60; L5; |
| | | | | L64; L22; L43; L26 |
| 625 | LAMDEFIER | L17; L59; L15; L19; L31; | EAFEKMVSL | L23; L32; L20; L69; L10; L61; L60; |
| | | L7; L61; L21; L60; L69 | | L70; L67; L31; L25; L43; L44; |
| | | | | L59; L11; L19; L35; L58; L49; L56; |
| | | | | L64; L74; L47; L17; L63; L50 |
| 626 | LATNNLVVM | L70; L59; L69; L58; L61; | FVVFLLVTL | L67; L60; L20; L74; L61; L59; L69; |
| | | L31; L32; L60; L50; L47 | | L58; L5; L64; L31; L32; L68; L73; |
| | | | | L50; L4; L44; L3; L56; L49; L10; |
| | | | | L34; L2; L19; L53; L26 |
| 627 | LNNDYYRSL | L43; L65; L32; L73; L64; | HSSGVTREL | L65; L60; L55; L73; L70; L64; L32; |
| | | L55; L61; L66; L39; L60 | | L61; L53; L44; L58; L49; L59; |
| | | | | L69; L67; L57; L20; L39; L54; L35; |
| | | | | L56; L66; L34; L43; L24; L74 |
| 628 | LPFFSNVTW | L49; L31; L50; L47; L32; | LMIERFVSL | L61; L23; L60; L4; L5; L67; L25; |
| | | L56; L52; L39; L22; L51 | | L3; L59; L69; L32; L43; L73; L8; L2; |
| | | | | L72; L39; L71; L56; L44; L26; L31; |
| | | | | L9; L28; L74; L57 |
| 629 | LPVNVAFEL | L32; L56; L31; L39; L47; | TVASLINTL | L20; L4; L10; L3; L64; L34; L16; |
| | | L50; L22; L49; L65; L61 | | L35; L28; L32; L56; L44; L74; L69; |
| | | | | L19; L67; L39; L11; L53; L49; L58; |
| | | | | L31; L26; L55; L24; L2 |
| 630 | LVDSDLNDF | L1; L68; L49; L63; L5; | HVISTSHKL | L11; L32; L10; L24; L20; L44; L60; |
| | | L53; L62; L58; L31; L52 | | L54; L49; L58; L53; L8; L63; L28; |
| | | | | L34; L35; L73; L74; L61; L16; L13; |
| | | | | L14; L37; L67; L5; L55; L39 |
| 631 | LVQAGNVQL | L56; L32; L39; L60; L4; | ITFDNLKTL | L70; L60; L69; L53; L64; L58; L10; |
| | | L28; L20; L31; L61; L74 | | L55; L61; L73; L20; L16; L59; L3; |
| | | | | L4; L52; L11; L13; L26; L39; L25; |
| | | | | L54; L67; L8; L5; L2; L37 |
| 632 | LYDKLVSSF | L62; L9; L8; L72; L63; | SFYEDFLEY | L71; L12; L72; L27; L14; L13; L59; |
| | | L71; L68; L49; L12; L66 | | L43; L49; L26; L6; L31; L65; L10; |
| | | | | L11; L8; L16; L66; L18; L29; L69; |
| | | | | L58; L7; L1; L9; L67; L41 |
| 633 | MLFTMLRKL | L64; L3; L4; L10; L69; L2; | YLATALLTL | L3; L4; L2; L74; L10; L61; L5; L59; |
| | | L16; L5; L74; L24 | | L44; L64; L69; L67; L57; L73; L9; |
| | | | | L28; L16; L23; L68; L1; L24; L34; |
| | | | | L66; L56; L26; L60; L8 |
| 634 | MLIIFWFSL | L4; L23; L5; L43; L2; L16; | VAAIVFITL | L67; L61; L60; L59; L74; L70; L69; |
| | | L69; L61; L20; L26 | | L68; L53; L47; L32; L58; L31; |
| | | | | L56; L20; L73; L44; L49; L39; L43; |
| | | | | L64; L9; L23; L66; L55; L26; L52; |
| | | | | L50; L54 |
| 635 | MVDTSLSGF | L10; L63; L11; L1; L68; | KVDGVVQQL | L5; L63; L68; L2; L74; L54; L53; |
| | | L62; L58; L18; L5; L49 | | L13; L16; L67; L73; L39; L60; L24; |
| | | | | L62; L55; L56; L58; L34; L64; L65; |
| | | | | L44; L49; L18; L32; L20; L4; L3; |
| | | | | L14; L26 |
| 636 | NASSSEAFL | L74; L67; L70; L58; L31; | ATIPIQASL | L61; L20; L67; L53; L54; L16; L58; |
| | | L20; L32; L60; L57; L61 | | L73; L43; L60; L28; L70; L10; |
| | | | | L69; L55; L44; L52; L4; L11; L13; L3; |
| | | | | L40; L59; L36; L5; L14; L26; L35; |
| | | | | L37; L22; L7; L6; L41 |
| 637 | NELSRVLGL | L25; L33; L40; L41; L37; | YITGGVVQL | L74; L60; L2; L61; L58; L4; L67; |
| | | L23; L45; L36; L29; L8 | | L3; L69; L44; L20; L64; L73; L28; |
| | | | | L63; L56; L68; L32; L59; L10; L34; |
| | | | | L5; L35; L49; L11; L26; L39; L65; |
| | | | | L66; L70; L43; L19; L16; L24 |
| 638 | NFKDQVILL | L62; L13; L8; L72; L71; | FGADPIHSL | L61; L60; L67; L59; L44; L69; L64; |
| | | L64; L9; L69; L70; L66 | | L43; L4; L31; L65; L66; L68; L32; |
| | | | | L35; L28; L20; L2; L70; L34; L58; |
| | | | | L10; L3; L16; L39; L5; L11; L63; |
| | | | | L47; L23; L49; L72; L26; L57; L56 |

[0835] The viral genome comprises multiple genes encoded by multiple reading frames spanning a single polynucleotide stretch. For example, the nucleocapsid protein is an abundantly expressed protein in 2019 SARS CoV-2 virus. A short protein ORF9b is encoded by another reading frame spanning the region nucleocapsid sequence. These highly expressed proteins expand the number of potential targets for T cell immunity. Table 1C and Table 2B shows predicted MHC-I binding epitopes and MHC-II binding epitopes from Orf9b respectively.

TABLE 1C
MHC I-binding Epitopes from Orf9b

| Set 1 Peptides | Set 1 Alleles | Set 2 Peptides | Set 2 Alleles |
|---|---|---|---|
| ALRLVDPQI | HLA-A02:04 | RMENAVGR | HLA-A31:01; HLA-A74:01 |
| EELPDEFV | HLA-B18:01 | SPLSLNMA | HLA-B54:01; HLA-B55:01 |
| ELPDEFVV | HLA-A02:07 | TKLATTEEL | HLA-B48:01; HLA-B15:03 |
| EMHPALRL | HLA-B52:01 | TPIAVQMTK | HLA-B35:03; HLA-A68:01 |
| GPKVYPII | HLA-B51:01 | VDPQIQLAV | HLA-C01:02; HLA-A02:07 |
| GPKVYPIILR | HLA-A31:01 | VTRMENAVGR | HLA-A74:01; HLA-A31:01 |
| GRDQNNVGPK | HLA-B27:05 | DEFVVVTVK | HLA-B18:01; HLA-B14:02; |
| | | | HLA-A68:01 |
| GRDQNNVGPKV | HLA-B27:05 | FQLTPIAV | HLA-B52:01; HLA-B54:01; |
| | | | HLA-B14:02 |
| ILRLGSPL | HLA-C01:02 | HPALRLVDP | HLA-B55:01; HLA-B08:01; |
| | | | HLA-B54:01 |
| IQLAVTRM | HLA-B52:01 | ISEMHPALRL | HLA-C05:01; HLA-A36:01; |
| | | | HLA-A01:01 |
| ISEMHPALR | HLA-A01:01 | KLATTEEL | HLA-C17:01; HLA-A02:01; |
| | | | HLA-A02:03 |
| KTLNSLED | HLA-B58:02 | KTLNSLEDK | HLA-A03:01; HLA-A11:01; |
| | | | HLA-A30:01 |
| KTLNSLEDKAF | HLA-B57:01 | LEDKAFQLTP | HLA-B41:01; HLA-B50:01; |
| | | | HLA-B45:01 |
| LATTEELPDEF | HLA-B57:01 | LVDPQIQLAV | HLA-A02:07; HLA-C08:02; |
| | | | HLA-A01:01 |
| LEDKAFQLT | HLA-B49:01 | MHPALRLV | HLA-C06:02; HLA-B51:01; |
| | | | HLA-B52:01 |
| LNMARKTL | HLA-B14:02 | PQIQLAVTR | HLA-A74:01; HLA-A31:01; |
| | | | HLA-A68:01 |
| LPDEFVVVTVK | HLA-B35:01 | RLVDPQIQLA | HLA-A02:01; HLA-B13:02; |
| | | | HLA-A02:03 |
| LRLGSPLSLN | HLA-B27:05 | SPLSLNMAR | HLA-A33:03; HLA-A31:01; |
| | | | HLA-A74:01 |
| LRLGSPLSLNM | HLA-B27:05 | TEELPDEF | HLA-B18:01; HLA-B37:01; |
| | | | HLA-C04:01 |
| LRLVDPQIQ | HLA-B27:05 | VGPKVYPIIL | HLA-C01:02; HLA-B48:01; |
| | | | HLA-C07:02 |
| LRLVDPQIQL | HLA-B27:05 | VYPIILRLG | HLA-A24:02; HLA-C06:02; |
| | | | HLA-A23:01 |
| LSLNMARKT | HLA-B58:02 | AFQLTPIAV | HLA-C14:03; HLA-C04:01; |
| | | | HLA-C14:02; HLA-B41:01 |
| NAVGRDQNN | HLA-B53:01 | ATTEELPDEF | HLA-B57:01; HLA-B58:01; |
| | | | HLA-B57:03; HLA-A29:02 |
| NMARKTLNSL | HLA-A25:01 | DPQIQLAV | HLA-B51:01; HLA-B08:01; |
| | | | HLA-B14:02; HLA-B54:01 |
| NNVGPKVY | HLA-B18:01 | EMHPALRLV | HLA-B52:01; HLA-C06:02; |
| | | | HLA-A02:03; HLA-A68:02 |
| NNVGPKVYP | HLA-C07:01 | GPKVYPIIL | HLA-B42:01; HLA-B81:01; |
| | | | HLA-B07:02; HLA-B08:01 |
| NSLEDKAF | HLA-B58:02 | HPALRLVD | HLA-B08:01; HLA-B55:01; |
| | | | HLA-B14:02; HLA-B54:01 |
| NVGPKVYPI | HLA-A68:02 | KVYPIILRLG | HLA-B57:01; HLA-A30:02; |
| | | | HLA-A03:01; HLA-A32:01 |
| NVGPKVYPIIL | HLA-C08:01 | TEELPDEFV | HLA-B41:01; HLA-B40:01; |
| | | | HLA-B49:01; HLA-B45:01 |
| NVGPKVYPIILR | HLA-A68:01 | TEELPDEFVV | HLA-B41:01; HLA-B40:01; |
| | | | HLA-B45:01; HLA-B49:01 |
| PKVYPIILR | HLA-A68:01 | TEELPDEFVVV | HLA-B40:01; HLA-B41:01; |
| | | | HLA-B45:01; HLA-B49:01 |
| QIQLAVTR | HLA-A74:01 | ARKTLNSL | HLA-C07:02; HLA-B14:02; |
| | | | HLA-B08:01; HLA-C06:02; |
| | | | HLA-B39:01 |
| QNNVGPKV | HLA-B52:01 | ELPDEFVVVTV | HLA-A26:01; HLA-A02:07; |
| | | | HLA-A68:02; HLA-A02:01; |
| | | | HLA-A02:03 |
| QNNVGPKVY | HLA-B18:01 | KAFQLTPIAV | HLA-C12:02; HLA-B54:01; |
| | | | HLA-C12:03; HLA-A02:03; |
| | | | HLA-A68:02 |
| RDQNNVGP | HLA-B37:01 | LEDKAFQL | HLA-B37:01; HLA-B40:02; |
| | | | HLA-C05:01; HLA-B49:01; |
| | | | HLA-B18:01 |
| RDQNNVGPKVY | HLA-A30:02 | LVDPQIQLA | HLA-A02:07; HLA-A01:01; |
| | | | HLA-A36:01; HLA-C05:01; |
| | | | HLA-C08:02 |
| RKTLNSLED | HLA-B15:03 | TPIAVQMTKL | HLA-B35:03; HLA-B81:01; |
| | | | HLA-B07:02; HLA-B35:01; |
| | | | HLA-B42:01 |
| RLGSPLSLN | HLA-A03:01 | TRMENAVGR | HLA-B27:05; HLA-A68:01; |
| | | | HLA-A33:03; HLA-A31:01; |
| | | | HLA-A74:01 |
| RLGSPLSLNM | HLA-A03:01 | ISEMHPAL | HLA-C08:02; HLA-C05:01; |
| | | | HLA-C08:01; HLA-C03:03; |
| | | | HLA-C03:04; HLA-C03:02 |
| TTEELPDEFV | HLA-A68:02 | SEMHPALRLV | HLA-B49:01; HLA-B45:01; |
| | | | HLA-B41:01; HLA-B44:02; |
| | | | HLA-B40:02; HLA-B44:03 |
| VGPKVYPII | HLA-B51:01 | SLNMARKTL | HLA-C01:02; HLA-A02:04; |
| | | | HLA-A32:01; HLA-B42:01; |
| | | | HLA-B08:01; HLA-A02:03 |
| VGRDQNNV | HLA-B52:01 | KVYPIILR | HLA-A74:01; HLA-A31:01; |
| | | | HLA-A03:01; HLA-A11:01; |
| | | | HLA-A33:03; HLA-A68:01; |
| | | | HLA-A30:01 |
| YPIILRLG | HLA-B51:01 | MARKTLNSL | HLA-C03:02; HLA-B35:03; |
| | | | HLA-C02:02; HLA-C17:01; |
| | | | HLA-C12:03; HLA-C03:03; |
| | | | HLA-C01:02 |
| YPIILRLGS | HLA-B54:01 | SLEDKAFQL | HLA-A02:04; HLA-A02:01; |
| | | | HLA-A02:07; HLA-C05:01; |
| | | | HLA-B08:01; HLA-B42:01; |
| | | | HLA-C08:02 |
| YPIILRLGSP | HLA-B54:01 | DEFVVVTV | HLA-B18:01; HLA-B52:01; |
| | | | HLA-B14:02; HLA-B51:01; |
| | | | HLA-B49:01; HLA-B37:01; |
| | | | HLA-B40:02; HLA-B08:01 |
| YPIILRLGSPL | HLA-B07:02 | EELPDEFVV | HLA-B45:01; HLA-B40:02; |
| | | | HLA-B44:02; HLA-B18:01; |
| | | | HLA-B41:01; HLA-B49:01; |
| | | | HLA-B44:03; HLA-B40:01 |
| DQNNVGPKV | HLA-B13:02; | IAVQMTKL | HLA-C17:01; HLA-C03:03; |
| | HLA-B52:01 | | HLA-C03:04; HLA-C05:01; |
| | | | HLA-C12:03; HLA-B51:01; |
| | | | HLA-C08:01; HLA-C03:02 |
| DQNNVGPKVY | HLA-B15:01; | LPDEFVVVT | HLA-B35:01; HLA-B35:03; |
| | HLA-A30:02 | | HLA-B54:01; HLA-B53:01; |
| | | | HLA-B51:01; HLA-B42:01; |
| | | | HLA-B81:01; HLA-B55:01 |
| EDKAFQLTP | HLA-B45:01; | LPDEFVVVTV | HLA-B54:01; HLA-B51:01; |
| | HLA-B50:01 | | HLA-B35:03; HLA-A02:07; |
| | | | HLA-B35:01; HLA-B42:01; |
| | | | HLA-B53:01; HLA-B55:01 |
| EELPDEFVVVT | HLA-B44:03; | EELPDEFVVV | HLA-B45:01; HLA-B44:02; |
| | HLA-B44:02 | | HLA-B50:01; HLA-B40:02; |
| | | | HLA-B44:03; HLA-B49:01; |
| | | | HLA-B18:01; HLA-B41:01; |
| | | | HLA-B40:01 |
| GPKVYPIILRL | HLA-B81:01; | RLGSPLSL | HLA-C17:01; HLA-C15:02; |
| | HLA-B42:01 | | HLA-B58:02; HLA-C01:02; |
| | | | HLA-A02:03; HLA-A32:01; |
| | | | HLA-B81:01; HLA-B48:01; |
| | | | HLA-A02:04 |
| GRDQNNVGP | HLA-B39:01; | SEMHPALRL | HLA-B40:02; HLA-B40:01; |
| | HLA-B27:05 | | HLA-B49:01; HLA-B44:03; |
| | | | HLA-B44:02; HLA-B18:01; |
| | | | HLA-B37:01; HLA-B45:01; |
| | | | HLA-B41:01 |
| IILRLGSPL | HLA-C03:03; | ELPDEFVVV | HLA-A02:07; HLA-A68:02; |
| | HLA-C03:04 | | HLA-B13:02; HLA-A02:01; |
| | | | HLA-A26:01; HLA-C01:02; |
| | | | HLA-A02:03; HLA-A25:01; |
| | | | HLA-A02:04; HLA-C06:02 |
| ILRLGSPLSL | HLA-A02:03; | LVDPQIQL | HLA-C17:01; HLA-C05:01; |
| | HLA-B07:02 | | HLA-C08:02; HLA-A02:07; |
| | | | HLA-C08:01; HLA-A01:01; |
| | | | HLA-C03:03; HLA-C04:01; |
| | | | HLA-C03:04; HLA-B15:09 |
| KAFQLTPIA | HLA-C12:02; | TTEELPDEF | HLA-A01:01; HLA-C04:01; |
| | HLA-B54:01 | | HLA-B57:03; HLA-A29:02; |
| | | | HLA-B57:01; HLA-C05:01; |
| | | | HLA-A36:01; HLA-B35:01; |
| | | | HLA-B53:01; HLA-B38:01 |
| KISEMHPALR | HLA-A74:01; | VYPIILRL | HLA-C14:03; HLA-C04:01; |
| | HLA-A03:01 | | HLA-C07:02; HLA-A24:02; |
| | | | HLA-C14:02; HLA-A23:01; |
| | | | HLA-C06:02; HLA-B52:01; |
| | | | HLA-B51:01; HLA-C01:02 |
| KISEMHPALRL | HLA-C15:02; | LRLGSPLSL | HLA-B14:02; HLA-B39:01; |
| | HLA-A32:01 | | HLA-B27:05; HLA-C07:02; |
| | | | HLA-C07:01; HLA-C06:02; |
| | | | HLA-C03:04; HLA-B38:01; |
| | | | HLA-C03:03; HLA-B15:09; |
| | | | HLA-C08:01 |
| MDPKISEM | HLA-B37:01; | KISEMHPAL | HLA-A02:04; HLA-C08:01; |
| | HLA-C01:02 | | HLA-A32:01; HLA-A02:07; |
| | | | HLA-C15:02; HLA-C01:02; |
| | | | HLA-C03:03; HLA-C03:04; |
| | | | HLA-C07:02; HLA-A02:01; |
| | | | HLA-C03:02; HLA-B42:01 |
| NSLEDKAFQL | HLA-B58:02; | LPDEFVVV | HLA-B51:01; HLA-B54:01; |
| | HLA-B57:03 | | HLA-B42:01; HLA-C04:01; |
| | | | HLA-B55:01; HLA-B35:03; |
| | | | HLA-C08:02; HLA-C05:01; |
| | | | HLA-B08:01; HLA-A02:07; |
| | | | HLA-B53:01; HLA-B07:02 |
| QLTPIAVQM | HLA-A02:07; | RLVDPQIQL | HLA-A02:01; HLA-A02:07; |
| | HLA-A02:04 | | HLA-B48:01; HLA-A32:01; |
| | | | HLA-A30:01; HLA-A02:04; |
| | | | HLA-A03:01; HLA-B15:01; |
| | | | HLA-C07:01; HLA-B81:01; |
| | | | HLA-C17:01; HLA-B15:03; |
| | | | HLA-B40:01; HLA-B13:02; |
| | | | HLA-A23:01; HLA-A02:03; |
| | | | HLA-A68:02; HLA-B40:02; |
| | | | HLA-B57:03; HLA-B42:01; |
| | | | HLA-C15:02; HLA-C12:02; |
| | | | HLA-C03:04 |
| — | — | KVYPIILRL | HLA-A32:01; HLA-C06:02; |
| | | | HLA-C15:02; HLA-C12:02; |
| | | | HLA-A02:04; HLA-A68:02; |
| | | | HLA-C17:01; HLA-B13:02; |
| | | | HLA-A02:03; HLA-A02:07; |
| | | | HLA-B57:03; HLA-A03:01; |
| | | | HLA-C07:01; HLA-B58:01; |
| | | | HLA-C02:02; HLA-A26:01; |
| | | | HLA-C08:01; HLA-C03:03; |
| | | | HLA-A30:01; HLA-B57:01; |
| | | | HLA-A02:01; HLA-A29:02; |
| | | | HLA-B58:02; HLA-B48:01; |
| | | | HLA-C03:04; HLA-A23:01; |
| | | | HLA-B81:01; HLA-B46:01; |
| | | | HLA-B15:01; HLA-C12:03; |
| | | | HLA-B42:01; HLA-A25:01; |
| | | | HLA-A36:01; HLA-B53:01; |
| | | | HLA-A11:01; HLA-A30:02; |
| | | | HLA-C07:02; HLA-B15:03; |
| | | | HLA-B14:02; HLA-B55:01; |
| | | | HLA-C05:01; HLA-B40:02; |
| | | | HLA-B52:01 |

TABLE 1D
(Tables 1A-B Allele key)

| Allele | Alias | Allele | Alias | Allele | Alias | Allele | Alias |
|---|---|---|---|---|---|---|---|
| HLA-A01:01 | L1 | HLA-A68:01 | L19 | HLA-B40:02 | L37 | HLA-B58:02 | L55 |
| HLA-A02:01 | L2 | HLA-A68:02 | L20 | HLA-B41:01 | L38 | HLA-B81:01 | L56 |
| HLA-A02:03 | L3 | HLA-A74:01 | L21 | HLA-B42:01 | L39 | HLA-C01:02 | L57 |
| HLA-A02:04 | L4 | HLA-B07:02 | L22 | HLA-B44:02 | L40 | HLA-C02:02 | L58 |
| HLA-A02:07 | L5 | HLA-B08:01 | L23 | HLA-B44:03 | L41 | HLA-C03:02 | L59 |
| HLA-A03:01 | L6 | HLA-B13:02 | L24 | HLA-B45:01 | L42 | HLA-C03:03 | L60 |
| HLA-A11:01 | L7 | HLA-B14:02 | L25 | HLA-B46:01 | L43 | HLA-C03:04 | L61 |
| HLA-A23:01 | L8 | HLA-B15:01 | L26 | HLA-B48:01 | L44 | HLA-C04:01 | L62 |
| HLA-A24:02 | L9 | HLA-B15:03 | L27 | HLA-B49:01 | L45 | HLA-C05:01 | L63 |
| HLA-A25:01 | L10 | HLA-B15:09 | L28 | HLA-B50:01 | L46 | HLA-C06:02 | L64 |
| HLA-A26:01 | L11 | HLA-B18:01 | L29 | HLA-B51:01 | L47 | HLA-C07:01 | L65 |
| HLA-A29:02 | L12 | HLA-B27:05 | L30 | HLA-B52:01 | L48 | HLA-C07:02 | L66 |
| HLA-A30:01 | L13 | HLA-B35:01 | L31 | HLA-B53:01 | L49 | HLA-C08:01 | L67 |
| HLA-A30:02 | L14 | HLA-B35:03 | L32 | HLA-B54:01 | L50 | HLA-C08:02 | L68 |
| HLA-A31:01 | L15 | HLA-B37:01 | L33 | HLA-B55:01 | L51 | HLA-C12:02 | L69 |
| HLA-A32:01 | L16 | HLA-B38:01 | L34 | HLA-B57:01 | L52 | HLA-C12:03 | L70 |
| HLA-A33:03 | L17 | HLA-B39:01 | L35 | HLA-B57:03 | L53 | HLA-C14:02 | L71 |
| HLA-A36:01 | L18 | HLA-B40:01 | L36 | HLA-B58:01 | L54 | HLA-C14:03 | L72 |
| — | — | — | — | — | — | HLA-C15:02 | L73 |
| — | — | — | — | — | — | HLA-C17:01 | L74 |

TABLE 2Ai
Peptides and Alleles

| | Set 1 | Set 1 | Set 2 | Set 2 |
|---|---|---|---|---|
| | Peptide | Allele | Peptide | Allele |
| 1 | RGPEQTQGNFGDQELI | M51 | QSSYIVDSVTVKNGSI | M36;M12;M48;M36;M12; |
| | RQGTDYKHW | | HLYFDKAGQ | M48 |
| 2 | GPEQTQGNFGDQELIR | M51 | SRILGAGCFVDDIVKT | M9;M10;M6;M63;M8;M11 |
| | QGTDYKHWP | | DGTLMIERF | |
| 3 | LLNVPLHGTILTRPLLE | M28 | RILGAGCFVDDIVKTD | M9;M10;M6;M63;M8;M11 |
| | SELVIGAV | | GTLMIERFV | |
| 4 | TSSIVITSGDGTTSPISE | M28 | AALALLLLDRLNQLE | M58;M10;M53;M51;M17; |
| | HDYQIGG | | SKMSGKGQQQ | M11 |
| 5 | NILLNVPLHGTILTRPL | M28 | DAALALLLLDRLNQL | M58;M10;M53;M51;M17; |
| | LESELVIG | | ESKMSGKGQQ | M11 |
| 6 | VTSSIVITSGDGTTSPIS | M28 | SLRLIDAMMFTSDLA | M50;M36;M44;M50;M36; |
| | EHDYQIG | | TNNLVVMAYI | M44 |
| 7 | SSIVITSGDGTTSPISEH | M28 | RLIDAMMFTSDLATN | M50;M36;M44;M50;M36; |
| | DYQIGGY | | NLVVMAYITG | M44 |
| 8 | SVTSSIVITSGDGTTSPI | M28 | LRLIDAMMFTSDLAT | M50;M36;M44;M50;M36; |
| | SEHDYQI | | NNLVVMAYIT | M44 |
| 9 | ILLNVPLHGTILTRPLL | M28 | LIDAMMFTSDLATNN | M50;M36;M44;M50;M36; |
| | ESELVIGA | | LVVMAYITGG | M44 |
| 10 | VPLHGTILTRPLLESEL | M28 | YPDPSRILGAGCFVDD | M12;M57;M63;M8;M9;M20 |
| | VIGAVILR | | IVKTDGTLM | |
| 11 | SIVITSGDGTTSPISEHD | M28 | PDPSRILGAGCFVDDI | M12;M57;M63;M8;M9;M20 |
| | YQIGGYT | | VKTDGTLMI | |
| 12 | LNVPLHGTILTRPLLES | M28 | PTESIVRFPNITNLCPF | M21;M28;M66;M45;M48; |
| | ELVIGAVI | | GEVFNATR | M41 |
| 13 | IVITSGDGTTSPISEHD | M28 | VNVSLVKPSFYVYSR | M40;M71;M12;M16;M33; |
| | YQIGGYTE | | VKNLNSSRVP | M8 |
| 14 | NVPLHGTILTRPLLESE | M28 | IVNVSLVKPSFYVYSR | M40;M71;M12;M16;M33; |
| | LVIGAVIL | | VKNLNSSRV | M8 |
| 15 | FVSGNCDVVIGIVNNT | M72 | CTGYREGYLNSTNVT | M48;M14;M8;M48;M14;M8 |
| | VYDPLQPEL | | IATYCTGSIP | |
| 16 | VATEGALNTPKDHIGT | M72 | IADYNYKLPDDFTGC | M13;M12;M14;M29;M38; |
| | RNPANNAAI | | VIAWNSNNLD | M67 |
| 17 | TFVSGNCDVVIGIVNN | M72 | ATPSDFVRATATIPIQ | M14;M34;M29;M45;M33; |
| | TVYDPLQPE | | ASLPFGWLI | M9 |
| 18 | NTFVSGNCDVVIGIVN | M72 | ITREVGFVVPGLPGTI | M1;M12;M6;M1;M12;M6 |
| | NTVYDPLQP | | LRTTNGDFL | |
| 19 | IWVATEGALNTPKDHI | M72 | GDISGINASVVNIQKEI | M28;M14;M70;M80;M35; |
| | GTRNPANNA | | DRLNEVAK | M47 |
| 20 | WVATEGALNTPKDHI | M72 | DISGINASVVNIQKEID | M28;M14;M70;M80;M35; |
| | GTRNPANNAA | | RLNEVAKN | M47 |
| 21 | TEGALNTPKDHIGTRN | M72 | DGGCINANQVIVNNL | M73;M58;M50;M33;M51; |
| | PANNAAIVL | | DKSAGFPFNK | M17 |
| 22 | VSGNCDVVIGIVNNTV | M72 | YDGGCINANQVIVNN | M73;M58;M50;M33;M51; |
| | YDPLQPELD | | LDKSAGFPFN | M17 |
| 23 | ATEGALNTPKDHIGTR | M72 | NLHSSRLSFKELLVYA | M48;M57;M36;M41;M49; |
| | NPANNAAIV | | ADPAMHAAS | M20 |
| 24 | KHFFFAQDGNAAISDY | M67 | MLDMYSVMLTNDNT | M64;M7;M34;M61;M36; |
| | DYYRYNLPT | | SRYWEPEFYEA | M22 |
| 25 | FFAQDGNAAISDYDY | M67 | HMLDMYSVMLTNDN | M64;M7;M34;M61;M36; |
| | YRYNLPTMCD | | TSRYWEPEFYE | M22 |
| 26 | YQIGGYTEKWESGVK | M67 | KPSKRSFIEDLLFNKV | M73;M44;M63;M67;M11; |
| | DCVVLHSYFT | | TLADAGFIK | M47 |
| 27 | HFFFAQDGNAAISDYD | M67 | DPSKPSKRSFIEDLLF | M73;M44;M63;M67;M11; |
| | YYRYNLPTM | | NKVTLADAG | M47 |
| 28 | DYQIGGYTEKWESGV | M67 | PSKPSKRSFIEDLLFN | M73;M44;M63;M67;M11; |
| | KDCVVLHSYF | | KVTLADAGF | M47 |
| 29 | FFFAQDGNAAISDYDY | M67 | SKPSKRSFIEDLLFNK | M73;M44;M63;M67;M11; |
| | YRYNLPTMC | | VTLADAGFI | M47 |
| 30 | SHFAIGLALYYPSARIV | M5 | GMEVTPSGTWLTYTG | M19;M41;M8;M35;M11; |
| | YTACSHAA | | AIKLDDKDPN | M23 |
| 31 | HFAIGLALYYPSARIV | M5 | RTIKVFTTVDNINLHT | M51;M26;M67;M51;M26; |
| | YTACSHAAV | | QVVDMSMTY | M67 |
| 32 | SDYDYYRYNLPTMCD | M74 | GSLAATVRLQAGNAT | M55;M51;M10;M55;M51; |
| | IRQLLFVVEV | | EVPANSTVLS | M10 |
| 33 | LLNKHIDAYKTFPPTE | M41 | PINLVRDLPQGFSALE | M31;M34;M45;M36;M52; |
| | PKKDKKKKA | | PLVDLPIGI | M47 |
| 34 | LNKHIDAYKTFPPTEP | M41 | DSYYSLLMPILTLTRA | M12;M16;M58;M8;M17; |
| | KKDKKKKAD | | LTAESHVDT | M15 |
| 35 | ILLNKHIDAYKTFPPTE | M41 | CFDKFKVNSTLEQYV | M40;M29;M6;M50;M18; |
| | PKKDKKKK | | FCTVNALPET | M44 |
| 36 | RQGTDYKHWPQIAQF | M82 | FDKFKVNSTLEQYVF | M40;M29;M6;M50;M18; |
| | APSASAFFGM | | CTVNALPETT | M44 |
| 37 | IRQGTDYKHWPQIAQF | M82 | QDVNLHSSRLSFKELL | M53;M38;M48;M57;M36; |
| | APSASAFFG | | VYAADPAMH | M20 |
| 38 | QGTDYKHWPQIAQFA | M82 | PFGEVFNATRFASVY | M19;M55;M25;M53;M2; |
| | PSASAFFGMS | | AWNRKRISNC | M20 |
| 39 | LAATKMSECVLGQSK | M27 | FGEVFNATRFASVYA | M19;M55;M25;M53;M2; |
| | RVDFCGKGYH | | WNRKRISNCV | M20 |
| 40 | APATVCGPKKSTNLV | M27 | QALNTLVKQLSSNFG | M53;M6;M45;M15;M46; |
| | KNKCVNFNFN | | AISSVLNDIL | M22 |
| 41 | CGPKKSTNLVKNKCV | M27 | NRKRISNCVADYSVL | M7;M74;M67;M27;M15; |
| | NFNFNGLTGT | | YNSASFSTFK | M44 |
| 42 | VCGPKKSTNLVKNKC | M27 | KYLPIDKCSRIIPARAR | M13;M28;M14;M29;M33; |
| | VNFNFNGLTG | | VECFDKFK | M26 |
| 43 | ANLAATKMSECVLGQ | M27 | LKYLPIDKCSRIIPARA | M13;M28;M14;M29;M33; |
| | SKRVDFCGKG | | RVECFDKF | M26 |
| 44 | SFELLHAPATVCGPKK | M27 | YLPIDKCSRIIPARARV | M13;M28;M14;M29;M33; |
| | STNLVKNKC | | ECFDKFKV | M26 |
| 45 | LLHAPATVCGPKKSTN | M27 | ALKYLPIDKCSRIIPAR | M13;M28;M14;M29;M33; |
| | LVKNKCVNF | | ARVECFDK | M26 |
| 46 | FELLHAPATVCGPKKS | M27 | LPIDKCSRIIPARARVE | M13;M28;M14;M29;M33; |
| | TNLVKNKCV | | CFDKFKVN | M26 |
| 47 | NLAATKMSECVLGQS | M27 | DGVYFASTEKSNIIRG | M64;M24;M10;M6;M45; |
| | KRVDFCGKGY | | WIFGTTLDS | M22 |
| 48 | TVCGPKKSTNLVKNK | M27 | VVDSYYSLLMPILTLT | M58;M16;M8;M17;M15; |
| | CVNFNFNGLT | | RALTAESHV | M39 |
| 49 | ATVCGPKKSTNLVKN | M27 | VDSYYSLLMPILTLTR | M58;M16;M8;M17;M15; |
| | KCVNFNFNGL | | ALTAESHVD | M39 |
| 50 | HAPATVCGPKKSTNL | M27 | HTNCYDYCIPYNSVT | M12;M29;M45;M43;M62; |
| | VKNKCVNFNF | | SSIVITSGDG | M42 |
| 51 | PATVCGPKKSTNLVK | M27 | GEIKDATPSDFVRATA | M9;M34;M45;M33;M8;M11 |
| | NKCVNFNFNG | | TIPIQASLP | |
| 52 | ELLHAPATVCGPKKST | M27 | YRGTTTYKLNVGDYF | M16;M34;M43;M42;M39; |
| | NLVKNKCVN | | VLTSHTVMPL | M44 |
| 53 | LHAPATVCGPKKSTNL | M27 | IYNDKVAGFAKFLKT | M4;M73;M55;M78;M79;M8 |
| | VKNKCVNFN | | NCCRFQEKDE | |
| 54 | YYRRATRRIRGGDGK | M60 | KKPRQKRTATKAYN | M19;M70;M78;M5;M25;M2 |
| | MKDLSPRWYF | | VTQAFGRRGPE | |
| 55 | TRRIRGGDGKMKDLSP | M60 | PPGDQFKHLIPLMYK | M56;M12;M1;M60;M18; |
| | RWYFYYLGT | | GLPWNVVRIK | M39 |
| 56 | YRRATRRIRGGDGKM | M60 | FCTQLNRALTGIAVE | M28;M14;M70;M67;M27; |
| | KDLSPRWYFY | | QDKNTQEVFA | M20 |
| 57 | ATRRIRGGDGKMKDL | M60 | SFCTQLNRALTGIAVE | M28;M14;M70;M67;M27; |
| | SPRWYFYYLG | | QDKNTQEVF | M20 |
| 58 | RATRRIRGGDGKMKD | M60 | CTQLNRALTGIAVEQ | M28;M14;M70;M67;M27; |
| | LSPRWYFYYL | | DKNTQEVFAQ | M20 |
| 59 | RRATRRIRGGDGKMK | M60 | TQLNRALTGIAVEQD | M28;M14;M70;M67;M27; |
| | DLSPRWYFYY | | KNTQEVFAQV | M20 |
| 60 | YFTQSRNLQEFKPRSQ | M75 | FLKKDAPYIVGDVVQ | M7;M30;M14;M7;M30;M14 |
| | MEIDFLELA | | EGVLTAVVIP | |
| 61 | LTNDNTSRYWEPEFYE | M75 | TPSGTWLTYTGAIKL | M10;M7;M41;M8;M35;M11 |
| | AMYTPHTVL | | DDKDPNFKDQ | |
| 62 | RVIHFGAGSDKGVAPG | M13 | YRAFDIYNDKVAGFA | M4;M55;M7;M78;M79;M41 |
| | TAVLRQWLP | | KFLKTNCCRF | |
| 63 | FTQSRNLQEFKPRSQM | M75 | RAFDIYNDKVAGFAK | M4;M55;M7;M78;M79;M41 |
| | EIDFLELAM | | FLKTNCCRFQ | |
| 64 | KKKADETQALPQRQK | M13 | TTCFSVAALTNNVAF | M73;M1;M29;M6;M22;M59 |
| | KQQTVTLLPA | | QTVKPGNFNK | |
| 65 | PTEPKKDKKKKADET | M13 | CFSVAALTNNVAFQT | M73;M1;M29;M6;M22;M59 |
| | QALPQRQKKQ | | VKPGNFNKDF | |
| 66 | KADETQALPQRQKKQ | M13 | TCFSVAALTNNVAFQ | M73;M1;M29;M6;M22;M59 |
| | QTVTLLPAAD | | TVKPGNFNKD | |
| 67 | DKKKKADETQALPQR | M13 | LSYFIASFRLFARTRS | M64;M40;M16;M30;M8; |
| | QKKQQTVTLL | | MWSFNPETN | M15 |
| 68 | KKADETQALPQRQKK | M13 | WLSYFIASFRLFARTR | M64;M40;M16;M30;M8; |
| | QQTVTLLPAA | | SMWSFNPET | M15 |
| 69 | EPKKDKKKKADETQA | M13 | SYFIASFRLFARTRSM | M64;M40;M16;M30;M8; |
| | LPQRQKKQQT | | WSFNPETNI | M15 |
| 70 | TEPKKDKKKKADETQ | M13 | FIASFRLFARTRSMWS | M64;M40;M16;M30;M8; |
| | ALPQRQKKQQ | | FNPETNILL | M15 |
| 71 | KKKKADETQALPQRQ | M13 | YFIASFRLFARTRSM | M64;M40;M16;M30;M8; |
| | KKQQTVTLLP | | WSFNPETNIL | M15 |
| 72 | KKDKKKKADETQALP | M13 | ALDISASIVAGGIVAIV | M22;M12;M14;M22;M12; |
| | QRQKKQQTVT | | VTCLAYYF | M14 |
| 73 | KDKKKKADETQALPQ | M13 | LDISASIVAGGIVAIVV | M22;M12;M14;M22;M12; |
| | RQKKQQTVTL | | TCLAYYFM | M14 |
| 74 | PKKDKKKKADETQAL | M13 | FDTFNGECPNFVFPLN | M19;M45;M61;M19;M45; |
| | PQRQKKQQTV | | SIIKTIQPR | M61 |
| 75 | TQSRNLQEFKPRSQME | M75 | NVAKYTQLCQYLNTL | M78;M34;M48;M41;M8; |
| | IDFLELAMD | | TLAVPYNMRV | M49 |
| 76 | QSRNLQEFKPRSQMEI | M75 | MNVAKYTQLCQYLN | M78;M34;M48;M41;M8; |
| | DFLELAMDE | | TLTLAVPYNMR | M49 |
| 77 | PEFYEAMYTPHTVLQ | M75 | DADSKIVQLSEISMDN | M7;M36;M49;M7;M36;M49 |
| | AVGACVLCNS | | SPNLAWPLI | |
| 78 | SRNLQEFKPRSQMEID | M75 | GDKSVYYTSNPTTFH | M50;M45;M44;M50;M45; |
| | FLELAMDEF | | LDGEVITFDN | M44 |
| 79 | LHLLIGLAKRFKESPFE | M3;M20 | RGDKSVYYTSNPTTF | M50;M45;M44;M50;M45; |
| | LEDFIPMD | | HLDGEVITFD | M44 |
| 80 | SGVKDCVVLHSYFTSD | M3;M20 | IASFRLFARTRSMWSF | M64;M40;M16;M30;M8; |
| | YYQLYSTQL | | NPETNILLN | M42 |
| 81 | GLHLLIGLAKRFKESPF | M3;M20 | FDIYNDKVAGFAKFL | M4;M73;M55;M7;M78;M79 |
| | ELEDFIPM | | KTNCCRFQEK | |
| 82 | FGRRGPEQTQGNFGD | M51;M63 | TTIKPVTYKLDGVVC | M36;M6;M59;M36;M6;M59 |
| | QELIRQGTDY | | TEIDPKLDNY | |
| 83 | RRGPEQTQGNFGDQE | M51;M63 | SVAALTNNVAFQTVK | M73;M1;M25;M29;M6;M59 |
| | LIRQGTDYKH | | PGNFNKDFYD | |
| 84 | GRRGPEQTQGNFGDQ | M51;M63 | KLSYGIATVREVLSDR | M7;M5;M6;M49;M11;M59 |
| | ELIRQGTDYK | | ELHLSWEVG | |
| 85 | TVSCLPFTINCQEPKLG | M50;M51 | SGFKLKDCVMYASA | M33;M12;M14;M33;M12; |
| | SLVVRCSF | | VVLLILMTART | M14 |
| 86 | NYTVSCLPFTINCQEP | M50;M51 | GFKLKDCVMYASAV | M33;M12;M14;M33;M12; |
| | KLGSLVVRC | | VLLILMTARTV | M14 |
| 87 | GNYTVSCLPFTINCQE | M50;M51 | SLSGFKLKDCVMYAS | M33;M12;M14;M33;M12; |
| | PKLGSLVVR | | AVVLLILMTA | M14 |
| 88 | VSCLPFTINCQEPKLGS | M50;M51 | LSGFKLKDCVMYASA | M33;M12;M14;M33;M12; |
| | LVVRCSFY | | VVLLILMTAR | M14 |
| 89 | YTVSCLPFTINCQEPKL | M50;M51 | DLLIRKSNHNFLVQA | M12;M14;M70;M12;M14; |
| | GSLVVRCS | | GNVQLRVIGH | M70 |
| 90 | GTSPARMAGNGGDAA | M51;M13 | LLIRKSNHNFLVQAG | M12;M14;M70;M12;M14; |
| | LALLLLDRLN | | NVQLRVIGHS | M70 |
| 91 | TSPARMAGNGGDAAL | M51;M13 | LIRKSNHNFLVQAGN | M12;M14;M70;M12;M14; |
| | ALLLLDRLNQ | | VQLRVIGHSM | M70 |
| 92 | PLSAPTLVPQEHYVRIT | M51;M69 | TQQLIRAAEIRASANL | M64;M40;M12;M48;M22; |
| | GLYPTLNI | | AATKMSECV | M23 |
| 93 | SPARMAGNGGDAALA | M51;M13 | QALPQRQKKQQTVTL | M54;M14;M60;M29;M26; |
| | LLLLDRLNQL | | LPAADLDDFS | M39 |
| 94 | FYYLGTGPEAGLPYGA | M12;M6 | FLNRFTTTLNDFNLV | M14;M63;M66;M14;M63; |
| | NKDGIIWVA | | AMKYNYEPLT | M66 |
| 95 | YFYYLGTGPEAGLPYG | M12;M6 | WFLNRFTTTLNDFNL | M14;M63;M66;M14;M63; |
| | ANKDGIIWV | | VAMKYNYEPL | M66 |
| 96 | ELKHFFFAQDGNAAIS | M36;M67 | DRWFLNRFTTTLNDF | M14;M63;M66;M14;M63; |
| | DYDYYRYNL | | NLVAMKYNYE | M66 |
| 97 | LKHFFFAQDGNAAISD | M36;M67 | NGDRWFLNRFTTTLN | M14;M63;M66;M14;M63; |
| | YDYYRYNLP | | DFNLVAMKYN | M66 |
| 98 | SVMLTNDNTSRYWEP | M36;M22 | GDRWFLNRFTTTLND | M14;M63;M66;M14;M63; |
| | EFYEAMYTPH | | FNLVAMKYNY | M66 |
| 99 | KEGQINDMILSLLSKG | M55;M19 | VINGDRWFLNRFTTT | M14;M63;M66;M14;M63; |
| | RLIIRENNR | | LNDFNLVAMK | M66 |
| 100 | EGQINDMILSLLSKGR | M55;M19 | RWFLNRFTTTLNDFN | M14;M63;M66;M14;M63; |
| | LIIRENNRV | | LVAMKYNYEP | M66 |
| 101 | LKEGQINDMILSLLSK | M55;M19 | INGDRWFLNRFTTTL | M14;M63;M66;M14;M63; |
| | GRLIIRENN | | NDFNLVAMKY | M66 |
| 102 | KNHTSPDVDLGDISGI | M80;M45 | LIRAAEIRASANLAAT | M4;M64;M40;M48;M22; |
| | NASVVNIQK | | KMSECVLGQ | M23 |
| 103 | IVQMLSDTLKNLSDRV | M36;M61 | QLIRAAEIRASANLAA | M4;M64;M40;M48;M22; |
| | VFVLWAHGF | | TKMSECVLG | M23 |
| 104 | KIVQMLSDTLKNLSDR | M36;M61 | KCSRIIPARARVECFD | M28;M10;M50;M33;M9; |
| | VVFVLWAHG | | KFKVNSTLE | M44 |
| 105 | PHEFCSQHTMLVKQG | M29;M14 | CSRIIPARARVECFDK | M28;M10;M50;M33;M9; |
| | DDYVYLPYPD | | FKVNSTLEQ | M44 |
| 106 | HEFCSQHTMLVKQGD | M29;M14 | TVLPPLLTDEMIAQYT | M7;M38;M48;M41;M49; |
| | DYVYLPYPDP | | SALLAGTIT | M26 |
| 107 | TGPEAGLPYGANKDGI | M57;M14 | VLPPLLTDEMIAQYTS | M7;M38;M48;M41;M49; |
| | IWVATEGAL | | ALLAGTITS | M26 |
| 108 | GYTEKWESGVKDCVV | M67;M14 | LKITEEVGHTDLMAA | M63;M14;M70;M63;M14; |
| | LHSYFTSDYY | | YVDNSSLTIK | M70 |
| 109 | SYSLFDMSKFPLKLRG | M67;M14 | NFRVQPTESIVRFPNIT | M21;M28;M48;M41;M26; |
| | TAVMSLKEG | | NLCPFGEV | M22 |
| 110 | IGGYTEKWESGVKDC | M67;M14 | FRVQPTESIVRFPNITN | M21;M28;M48;M41;M26; |
| | VVLHSYFTSD | | LCPFGEVF | M22 |
| 111 | YSLFDMSKFPLKLRGT | M67;M14 | KGYGCSCDQLREPML | M33;M12;M45;M33;M12; |
| | AVMSLKEGQ | | QSADAQSFLN | M45 |
| 112 | QIGGYTEKWESGVKD | M67;M14 | RELMRELNGGAYTRY | M63;M14;M41;M63;M14; |
| | CVVLHSYFTS | | VDNNFCGPDG | M41 |
| 113 | GGYTEKWESGVKDCV | M67;M14 | MRELNGGAYTRYVD | M63;M14;M41;M63;M14; |
| | VLHSYFTSDY | | NNFCGPDGYPL | M41 |
| 114 | DGIIWVATEGALNTPK | M72;M6 | LMRELNGGAYTRYV | M63;M14;M41;M63;M14; |
| | DHIGTRNPA | | DNNFCGPDGYP | M41 |
| 115 | IIWVATEGALNTPKDH | M72;M6 | ELMRELNGGAYTRY | M63;M14;M41;M63;M14; |
| | IGTRNPANN | | VDNNFCGPDGY | M41 |
| 116 | GIIWVATEGALNTPKD | M72;M6 | RELNGGAYTRYVDN | M63;M14;M41;M63;M14; |
| | HIGTRNPAN | | NFCGPDGYPLE | M41 |
| 117 | HSQLGGLHLLIGLAKR | M19;M61 | LSPRWYFYYLGTGPE | M32;M12;M31;M6;M68; |
| | FKESPFELE | | AGLPYGANKD | M52 |
| 118 | DFSHSQLGGLHLLIGL | M19;M61 | TSLSGFKLKDCVMYA | M75;M12;M14;M75;M12; |
| | AKRFKESPF | | SAVVLLILMT | M14 |
| 119 | FSHSQLGGLHLLIGLA | M19;M61 | TNNTFTLKGGAPTKV | M63;M11;M12;M63;M11; |
| | KRFKESPFE | | TFGDDTVIEV | M12 |
| 120 | GDFSHSQLGGLHLLIG | M19;M61 | NTFTLKGGAPTKVTF | M63;M11;M12;M63;M11; |
| | LAKRFKESP | | GDDTVIEVQG | M12 |
| 121 | SHSQLGGLHLLIGLAK | M19;M61 | NNTFTLKGGAPTKVT | M63;M11;M12;M63;M11; |
| | RFKESPFEL | | FGDDTVIEVQ | M12 |
| 122 | YGDFSHSQLGGLHLLI | M19;M61 | VTNNTFTLKGGAPTK | M63;M11;M12;M63;M11; |
| | GLAKRFKES | | VTFGDDTVIE | M12 |
| 123 | TDNTFVSGNCDVVIGI | M72;M12 | TDLMAAYVDNSSLTI | M63;M9;M44;M63;M9;M44 |
| | VNNTVYDPL | | KKPNELSRVL | |
| 124 | TTDNTFVSGNCDVVIG | M72;M12 | RQKKQQTVTLLPAAD | M54;M14;M60;M46;M26; |
| | IVNNTVYDP | | LDDFSKQLQQ | M39 |
| 125 | ITTDNTFVSGNCDVVI | M72;M12 | MPSYCTGYREGYLNS | M49;M45;M8;M49;M45;M8 |
| | GIVNNTVYD | | TNVTIATYCT | |
| 126 | DNTFVSGNCDVVIGIV | M72;M12 | TTEMLAKALRKVPTD | M48;M14;M49;M48;M14; |
| | NNTVYDPLQ | | NYITTYPGQG | M49 |
| 127 | DAVVYRGTTTYKLNV | M42;M44 | TEMLAKALRKVPTDN | M48;M14;M49;M48;M14; |
| | GDYFVLTSHT | | YITTYPGQGL | M49 |
| 128 | AVVYRGTTTYKLNVG | M42;M44 | TETDLTKGPHEFCSQ | M30;M6;M18;M43;M42; |
| | DYFVLTSHTV | | HTMLVKQGDD | M39 |
| 129 | DLKFPRGQGVPINTNS | M73;M44 | YHKNNKSWMESEFR | M70;M5;M2;M48;M41;M82 |
| | SPDDQIGYY | | VYSSANNCTFE | |
| 130 | KFPRGQGVPINTNSSP | M73;M44 | ELTGHMLDMYSVML | M64;M31;M34;M61;M36; |
| | DDQIGYYRR | | TNDNTSRYWEP | M22 |
| 131 | EDLKFPRGQGVPINTN | M73;M44 | MESEFRVYSSANNCT | M64;M5;M2;M48;M41;M82 |
| | SSPDDQIGY | | FEYVSQPFLM | |
| 132 | LKFPRGQGVPINTNSSP | M73;M44 | KNNKSWMESEFRVYS | M64;M5;M2;M48;M41;M82 |
| | DDQIGYYR | | SANNCTFEYV | |
| 133 | FPRGQGVPINTNSSPD | M73;M44 | NKSWMESEFRVYSSA | M64;M5;M2;M48;M41;M82 |
| | DQIGYYRRA | | NNCTFEYVSQ | |
| 134 | PRGQGVPINTNSSPDD | M73;M44 | KSWMESEFRVYSSAN | M64;M5;M2;M48;M41;M82 |
| | QIGYYRRAT | | NCTFEYVSQP | |
| 135 | GDAVVYRGTTTYKLN | M9;M44 | NNKSWMESEFRVYSS | M64;M5;M2;M48;M41;M82 |
| | VGDYFVLTSH | | ANNCTFEYVS | |
| 136 | RTCCLCDRRATCFSTA | M4;M72 | SWMESEFRVYSSANN | M64;M5;M2;M48;M41;M82 |
| | SDTYACWHH | | CTFEYVSQPF | |
| 137 | CDRRATCFSTASDTYA | M4;M72 | WMESEFRVYSSANNC | M64;M5;M2;M48;M41;M82 |
| | CWHHSIGFD | | TFEYVSQPFL | |
| 138 | LCDRRATCFSTASDTY | M4;M72 | GLPWNVVRIKIVQML | M61;M57;M36;M46;M9; |
| | ACWHHSIGF | | SDTLKNLSDR | M20 |
| 139 | CLCDRRATCFSTASDT | M4;M72 | KGLPWNVVRIKIVQM | M61;M57;M36;M46;M9; |
| | YACWHHSIG | | LSDTLKNLSD | M20 |
| 140 | CCLCDRRATCFSTASD | M4;M72 | YKGLPWNVVRIKIVQ | M61;M57;M36;M46;M9; |
| | TYACWHHSI | | MLSDTLKNLS | M20 |
| 141 | TCCLCDRRATCFSTAS | M4;M72 | DDYIATNGPLKVGGS | M80;M29;M14;M80;M29; |
| | DTYACWHHS | | CVLSGHNLAK | M14 |
| 142 | QVILLNKHIDAYKTFP | M41;M14 | VNARLRAKHYVYIGD | M40;M31;M1;M30;M37; |
| | PTEPKKDKK | | PAQLPAPRTL | M57 |
| 143 | VILLNKHIDAYKTFPPT | M41;M14 | VVNARLRAKHYVYIG | M40;M31;M1;M30;M37; |
| | EPKKDKKK | | DPAQLPAPRT | M57 |
| 144 | LPKGFYAEGSRGGSQA | M5;M45 | LFTRFFYVLGLAAIM | M5;M48;M45;M5;M48;M45 |
| | SSRSSSRSR | | QLFFSYFAVH | |
| 145 | TLPKGFYAEGSRGGSQ | M5;M45 | FTRFFYVLGLAAIMQ | M5;M48;M45;M5;M48;M45 |
| | ASSRSSSRS | | LFFSYFAVHF | |
| 146 | TKVDGVDVELFENKT | M29;M48 | ASYQTQTNSPRRARS | M31;M5;M2;M6;M50;M18 |
| | TLPVNVAFEL | | VASQSIIAYT | |
| 147 | YTKVDGVDVELFENK | M29;M48 | TVGQQDGSEDNQTTT | M14;M28;M59;M14;M28; |
| | TTLPVNVAFE | | IQTIVEVQPQ | M59 |
| 148 | QILPDPSKPSKRSFIED | M63;M67 | VGQQDGSEDNQTTTI | M14;M28;M59;M14;M28; |
| | LLFNKVTL | | QTIVEVQPQL | M59 |
| 149 | ILPDPSKPSKRSFIEDLL | M63;M67 | SEDNQTTTIQTIVEVQ | M14;M28;M59;M14;M28; |
| | FNKVTLA | | PQLEMELTP | M59 |
| 150 | QSKRVDFCGKGYHLM | M1;M52 | DGSEDNQTTTIQTIVE | M14;M28;M59;M14;M28; |
| | SFPQSAPHGV | | VQPQLEMEL | M59 |
| 151 | LGQSKRVDFCGKGYH | M1;M52 | QQDGSEDNQTTTIQTI | M14;M28;M59;M14;M28; |
| | LMSFPQSAPH | | VEVQPQLEM | M59 |
| 152 | GQSKRVDFCGKGYHL | M1;M52 | QDGSEDNQTTTIQTIV | M14;M28;M59;M14;M28; |
| | MSFPQSAPHG | | EVQPQLEME | M59 |
| 153 | LIIKNLSKSLTENKYSQ | M11;M28 | GSEDNQTTTIQTIVEV | M14;M28;M59;M14;M28; |
| | LDEEQPME | | QPQLEMELT | M59 |
| 154 | IIKNLSKSLTENKYSQL | M11;M28 | GQQDGSEDNQTTTIQ | M14;M28;M59;M14;M28; |
| | DEEQPMEI | | TIVEVQPQLE | M59 |
| 155 | GVDVELFENKTTLPVN | M29;M28 | VSTSGRWVLNNDYY | M33;M39;M44;M33;M39; |
| | VAFELWAKR | | RSLPGVFCGVD | M44 |
| 156 | VDVELFENKTTLPVNV | M29;M28 | NLQHRLYECLYRNRD | M6;M2;M59;M35;M52;M47 |
| | AFELWAKRN | | VDTDFVNEFY | |
| 157 | DVELFENKTTLPVNVA | M29;M28 | KATNNAMQVESDDYI | M29;M11;M44;M29;M11; |
| | FELWAKRNI | | ATNGPLKVGG | M44 |
| 158 | ELFENKTTLPVNVAFE | M29;M28 | CNVDRYPANSIVCRF | M5;M2;M48;M50;M18;M9 |
| | LWAKRNIKP | | DTRVLSNLNL | |
| 159 | LFENKTTLPVNVAFEL | M29;M28 | NCNVDRYPANSIVCR | M5;M2;M48;M50;M18;M9 |
| | WAKRNIKPV | | FDTRVLSNLN | |
| 160 | VELFENKTTLPVNVAF | M29;M28 | NVDRYPANSIVCRFD | M5;M2;M48;M50;M18;M9 |
| | ELWAKRNIK | | TRVLSNLNLP | |
| 161 | VAAGLEAPFLYLYAL | M54;M12 | ATLPKGIMMNVAKYT | M73;M58;M78;M34;M11; |
| | VYFLQSINFV | | QLCQYLNTLT | M44 |
| 162 | LVAAGLEAPFLYLYAL | M54;M12 | LGLAAIMQLFFSYFA | M48;M9;M45;M48;M9;M45 |
| | VYFLQSINF | | VHFISNSWLM | |
| 163 | IVLQLPQGTTLPKGFY | M75;M45 | GISQYSLRLIDAMMFT | M57;M36;M54;M57;M36; |
| | AEGSRGGSQ | | SDLATNNLV | M54 |
| 164 | AIVLQLPQGTTLPKGF | M75;M45 | ISQYSLRLIDAMMFTS | M57;M36;M54;M57;M36; |
| | YAEGSRGGS | | DLATNNLVV | M54 |
| 165 | VLQLPQGTTLPKGFYA | M75;M45 | SQYSLRLIDAMMFTS | M57;M36;M54;M57;M36; |
| | EGSRGGSQA | | DLATNNLVVM | M54 |
| 166 | LQLPQGTTLPKGFYAE | M75;M45 | SNNLDSKVGGNYNYL | M71;M16;M1;M37;M18; |
| | GSRGGSQAS | | YRLFRKSNLK | M15 |
| 167 | AATKMSECVLGQSKR | M1;M27 | NSNNLDSKVGGNYN | M71;M16;M1;M37;M18; |
| | VDFCGKGYHL | | YLYRLFRKSNL | M15 |
| 168 | GGNYNYLYRLFRKSN | M1;M37 | WNSNNLDSKVGGNY | M71;M16;M1;M37;M18; |
| | LKPFERDIST | | NYLYRLFRKSN | M15 |
| 169 | RVYSTGSNVFQTRAG | M75;M8 | NNLDSKVGGNYNYL | M71;M16;M1;M37;M18; |
| | CLIGAEHVNN | | YRLFRKSNLKP | M15 |
| 170 | WRVYSTGSNVFQTRA | M75;M8 | CPLIAAVITREVGFVV | M32;M63;M12;M32;M63; |
| | GCLIGAEHVN | | PGLPGTILR | M12 |
| 171 | VYSTGSNVFQTRAGCL | M75;M8 | DLFLPFFSNVTWFHAI | M29;M45;M49;M15;M46; |
| | IGAEHVNNS | | HVSGTNGTK | M26 |
| 172 | YSTGSNVFQTRAGCLI | M75;M8 | QDLFLPFFSNVTWFH | M29;M45;M49;M15;M46; |
| | GAEHVNNSY | | AIHVSGTNGT | M26 |
| 173 | STGSNVFQTRAGCLIG | M75;M8 | TQDLFLPFFSNVTWF | M29;M45;M49;M15;M46; |
| | AEHVNNSYE | | HAIHVSGTNG | M26 |
| 174 | TWRVYSTGSNVFQTR | M75;M8 | YDKLQFTSLEIPRRNV | M28;M6;M38;M27;M59; |
| | AGCLIGAEHV | | ATLQAENVT | M20 |
| 175 | SANLAATKMSECVLG | M4;M27 | DLYDKLQFTSLEIPRR | M28;M6;M38;M27;M59; |
| | QSKRVDFCGK | | NVATLQAEN | M22 |
| 176 | ASANLAATKMSECVL | M4;M27 | LYDKLQFTSLEIPRRN | M28;M6;M38;M27;M59; |
| | GQSKRVDFCG | | VATLQAENV | M20 |
| 177 | RASANLAATKMSECV | M4;M27 | LSTDGNKIADKYVRN | M54;M60;M57;M27;M44; |
| | LGQSKRVDFC | | LQHRLYECLY | M20 |
| 178 | HPTQAPTHLSVDTKFK | M7;M35 | ALLSTDGNKIADKYV | M54;M60;M57;M27;M44; |
| | TEGLCVDIP | | RNLQHRLYEC | M20 |
| 179 | LHPTQAPTHLSVDTKF | M7;M35 | LLSTDGNKIADKYVR | M54;M60;M57;M27;M44; |
| | KTEGLCVDI | | NLQHRLYECL | M20 |
| 180 | TQAPTHLSVDTKFKTE | M7;M35 | STDGNKIADKYVRNL | M54;M60;M57;M27;M44; |
| | GLCVDIPGI | | QHRLYECLYR | M20 |
| 181 | PTQAPTHLSVDTKFKT | M7;M35 | DEISMATNYDLSVVN | M19;M25;M50;M18;M33; |
| | EGLCVDIPG | | ARLRAKHYVY | M26 |
| 182 | TGLHPTQAPTHLSVDT | M7;M35 | FDEISMATNYDLSVV | M19;M25;M50;M18;M33; |
| | KFKTEGLCV | | NARLRAKHYV | M26 |
| 183 | GLHPTQAPTHLSVDTK | M7;M35 | MYSFVSEETGTLIVNS | M56;M73;M50;M18;M11; |
| | FKTEGLCVD | | VLLFLAFVV | M44 |
| 184 | SIVCRFDTRVLSNLNLP | M5;M2 | GVSICSTMTNRQFHQ | M64;M1;M60;M30;M37; |
| | GCDGGSLY | | KLLKSIAATR | M22 |
| 185 | TLMIERFVSLAIDAYPL | M5;M2 | VSICSTMTNRQFHQK | M64;M1;M60;M30;M37; |
| | TKHPNQEY | | LLKSIAATRG | M22 |
| 186 | AAEASKKPRQKRTAT | M5;M2 | VSFCYMHHMELPTGV | M43;M6;M28;M43;M6;M28 |
| | KAYNVTQAFG | | HAGTDLEGNF | |
| 187 | ANSIVCRFDTRVLSNL | M5;M2 | DGYPLECIKDLLARA | M64;M12;M28;M64;M12; |
| | NLPGCDGGS | | GKASCTLSEQ | M28 |
| 188 | NSIVCRFDTRVLSNLN | M5;M2 | WDYPKCDRAMPNML | M21;M12;M41;M46;M39; |
| | LPGCDGGSL | | RIMASLVLARK | M23 |
| 189 | LMIERFVSLAIDAYPLT | M5;M2 | MFDAYVNTFSSTFNV | M28;M8;M70;M28;M8;M70 |
| | KHPNQEYA | | PMEKLKTLVA | |
| 190 | QHRLYECLYRNRDVD | M6;M59 | FDAYVNTFSSTFNVP | M28;M8;M70;M28;M8;M70 |
| | TDFVNEFYAY | | MEKLKTLVAT | |
| 191 | LYECLYRNRDVDTDF | M6;M59 | VKMFDAYVNTFSSTF | M28;M8;M70;M28;M8;M70 |
| | VNEFYAYLRK | | NVPMEKLKTL | |
| 192 | VCRLMKTIGPDMFLGT | M6;M37 | KMFDAYVNTFSSTFN | M28;M8;M70;M28;M8;M70 |
| | CRRCPAEIV | | VPMEKLKTLV | |
| 193 | RLYECLYRNRDVDTD | M6;M59 | DAYVNTFSSTFNVPM | M28;M8;M70;M28;M8;M70 |
| | FVNEFYAYLR | | EKLKTLVATA | |
| 194 | HRLYECLYRNRDVDT | M6;M59 | LPTGVHAGTDLEGNF | M6;M28;M37;M6;M28;M37 |
| | DFVNEFYAYL | | YGPFVDRQTA | |
| 195 | PQIITTDNTFVSGNCDV | M12;M23 | MELPTGVHAGTDLEG | M6;M28;M37;M6;M28;M37 |
| | VIGIVNNT | | NFYGPFVDRQ | |
| 196 | MPNLYKMQRMLLEKC | M12;M23 | HMELPTGVHAGTDLE | M6;M28;M37;M6;M28;M37 |
| | DLQNYGDSAT | | GNFYGPFVDR | |
| 197 | FIKGLNNLNRGMVLGS | M12;M12 | ELPTGVHAGTDLEGN | M6;M28;M37;M6;M28;M37 |
| | LAATVRLQA | | FYGPFVDRQT | |
| 198 | SDLATNNLVVMAYIT | M12;M12 | IGAGICASYQTQTNSP | M19;M31;M70;M25;M50; |
| | GGVVQLTSQW | | RRARSVASQ | M18 |
| 199 | YFIKGLNNLNRGMVL | M12;M12 | PIGAGICASYQTQTNS | M19;M31;M70;M25;M50; |
| | GSLAATVRLQ | | PRRARSVAS | M18 |
| 200 | IDKCSRIIPARARVECF | M33;M28 | CTNYMPYFFTLLLQL | M25;M29;M19;M25;M29; |
| | DKFKVNST | | CTFTRSTNSR | M19 |
| 201 | RFYRLANECAQVLSE | M79;M28 | TNYMPYFFTLLLQLC | M25;M29;M19;M25;M29; |
| | MVMCGGSLYV | | TFTRSTNSRI | M19 |
| 202 | FYRLANECAQVLSEM | M79;M28 | SMATNYDLSVVNARL | M19;M25;M37;M50;M18; |
| | VMCGGSLYVK | | RAKHYVYIGD | M26 |
| 203 | NSYECDIPIGAGICASY | M28;M70 | MATNYDLSVVNARL | M19;M25;M37;M50;M18; |
| | QTQTNSPR | | RAKHYVYIGDP | M26 |
| 204 | QIHTIDGSSGVVNPVM | M38;M28 | NARDGCVPLNIIPLTT | M22;M19;M24;M22;M19; |
| | EPIYDEPTT | | AAKLMVVIP | M24 |
| 205 | HVQIHTIDGSSGVVNP | M38;M28 | NNARDGCVPLNIIPLT | M22;M19;M24;M22;M19; |
| | VMEPIYDEP | | TAAKLMVVI | M24 |
| 206 | EHVQIHTIDGSSGVVN | M38;M28 | GPLKVGGSCVLSGHN | M80;M14;M37;M80;M14; |
| | PVMEPIYDE | | LAKHCLHVVG | M37 |
| 207 | HTIDGSSGVVNPVMEP | M38;M28 | VAIVVTCLAYYFMRF | M71;M6;M16;M71;M6;M16 |
| | IYDEPTTTT | | RRAFGEYSHV | |
| 208 | EEHVQIHTIDGSSGVV | M38;M28 | GTGTIYTELEPPCRFV | M6;M2;M59;M6;M2;M59 |
| | NPVMEPIYD | | TDTPKGPKV | |
| 209 | IHTIDGSSGVVNPVME | M38;M28 | DGTGTIYTELEPPCRF | M6;M2;M59;M6;M2;M59 |
| | PIYDEPTTT | | VTDTPKGPK | |
| 210 | VQIHTIDGSSGVVNPV | M38;M28 | TGTIYTELEPPCRFVT | M6;M2;M59;M6;M2;M59 |
| | MEPIYDEPT | | DTPKGPKVK | |
| 211 | PDDQIGYYRRATRRIR | M71;M16 | EFLKRGDKSVYYTSN | M50;M22;M44;M50;M22; |
| | GGDGKMKDL | | PTTFHLDGEV | M44 |
| 212 | SPDDQIGYYRRATRRI | M71;M16 | FLKRGDKSVYYTSNP | M50;M22;M44;M50;M22; |
| | RGGDGKMKD | | TTFHLDGEVI | M44 |
| 213 | PINTNSSPDDQIGYYRR | M55;M71 | ETKFLTENLLLYIDIN | M50;M36;M70;M50;M36; |
| | ATRRIRGG | | GNLHPDSAT | M70 |
| 214 | INTNSSPDDQIGYYRR | M55;M71 | EETKFLTENLLLYIDI | M50;M36;M70;M50;M36; |
| | ATRRIRGGD | | NGNLHPDSA | M70 |
| 215 | TNILLNVPLHGTILTRP | M73;M28 | EWSMATYYLFDESGE | M52;M36;M23;M52;M36; |
| | LLESELVI | | FKLASHMYCS | M23 |
| 216 | PETNILLNVPLHGTILT | M73;M28 | MATYYLFDESGEFKL | M52;M36;M23;M52;M36; |
| | RPLLESEL | | ASHMYCSFYP | M23 |
| 217 | ETNILLNVPLHGTILTR | M73;M28 | WSMATYYLFDESGEF | M52;M36;M23;M52;M36; |
| | PLLESELV | | KLASHMYCSF | M23 |
| 218 | PLEFGATSAALQPEEE | M28;M28 | SMATYYLFDESGEFK | M52;M36;M23;M52;M36; |
| | QEEDWLDDD | | LASHMYCSFY | M23 |
| 219 | LEFGATSAALQPEEEQ | M28;M28 | LKKRWQLALSKGVH | M50;M33;M8;M42;M11; |
| | EEDWLDDDS | | FVCNLLLLFVT | M23 |
| 220 | EFGATSAALQPEEEQE | M28;M28 | EQYVFCTVNALPETT | M40;M29;M38;M6;M18; |
| | EDWLDDDSQ | | ADIVVFDEIS | M49 |
| 221 | IQTIVEVQPQLEMELTP | M28;M28 | LEQYVFCTVNALPET | M40;M29;M38;M6;M18; |
| | VVQTIEVN | | TADIVVFDEI | M49 |
| 222 | FGLYKNTCVGSDNVT | M28;M59 | ARIVYTACSHAAVDA | M28;M60;M29;M38;M67; |
| | DFNAIATCDW | | LCEKALKYLP | M49 |
| 223 | TIQTIVEVQPQLEMELT | M28;M28 | TFTRSTNSRIKASMPT | M33;M11;M14;M33;M11; |
| | PVVQTIEV | | TIAKNTVKS | M14 |
| 224 | TTIQTIVEVQPQLEMEL | M28;M28 | FTRSTNSRIKASMPTTI | M33;M11;M14;M33;M11; |
| | TPVVQTIE | | AKNTVKSV | M14 |
| 225 | FGATSAALQPEEEQEE | M28;M28 | IGIVNNTVYDPLQPEL | M70;M34;M63;M72;M59; |
| | DWLDDDSQQ | | DSFKEELDK | M47 |
| 226 | FVNEFYAYLRKHFSM | M57;M71 | VNNTVYDPLQPELDS | M70;M34;M63;M72;M59; |
| | MILSDDAVVC | | FKEELDKYFK | M47 |
| 227 | VNEFYAYLRKHFSMM | M57;M71 | IVNNTVYDPLQPELDS | M70;M34;M63;M72;M59; |
| | ILSDDAVVCF | | FKEELDKYF | 4M7 |
| 228 | ATRGATVVIGTSKFYG | M72;M17 | GIVNNTVYDPLQPEL | M70;M34;M63;M72;M59; |
| | GWHNMLKTV | | DSFKEELDKY | M47 |
| 229 | AATRGATVVIGTSKFY | M72;M17 | GYPNMFITREEAIRHV | M64;M32;M14;M57;M69; |
| | GGWHNMLKT | | RAWIGFDVE | M20 |
| 230 | TRGATVVIGTSKFYGG | M72;M17 | CLWSTKPVETSNSFD | M39;M6;M41;M39;M6;M41 |
| | WHNMLKTVY | | VLKSEDAQGM | |
| 231 | KVVKVTIDYTEISFML | M71;M67 | QAMTQMYKQARSED | M25;M19;M74;M25;M19; |
| | WCKDGHVET | | KRAKVTSAMQT | M74 |
| 232 | NLLLDKRTTCFSVAAL | M29;M22 | AMTQMYKQARSEDK | M25;M19;M74;M25;M19; |
| | TNNVAFQTV | | RAKVTSAMQTM | M74 |
| 233 | SGNLLLDKRTTCFSVA | M29;M22 | DQAMTQMYKQARSE | M25;M19;M74;M25;M19; |
| | ALTNNVAFQ | | DKRAKVTSAMQ | M74 |
| 234 | GNLLLDKRTTCFSVAA | M29;M22 | RHVICTSEDMLNPNY | M29;M72;M28;M29;M72; |
| | LTNNVAFQT | | EDLLIRKSNH | M28 |
| 235 | ATVVIGTSKFYGGWH | M18;M72 | HVICTSEDMLNPNYE | M29;M72;M28;M29;M72; |
| | NMLKTVYSDV | | DLLIRKSNHN | M28 |
| 236 | QINDMILSLLSKGRLII | M55;M9 | RQVVNVVTTKIALKG | M57;M29;M12;M57;M29; |
| | RENNRVVI | | GKIVNNWLKQ | M12 |
| 237 | AQDGNAAISDYDYYR | M67;M74 | NVVTTKIALKGGKIV | M57;M11;M12;M57;M11; |
| | YNLPTMCDIR | | NNWLKQLIKV | M12 |
| 238 | QDGNAAISDYDYYRY | M67;M74 | VNVVTTKIALKGGKI | M57;M11;M12;M57;M11; |
| | NLPTMCDIRQ | | VNNWLKQLIK | M12 |
| 239 | FAQDGNAAISDYDYY | M67;M74 | TDPYEDFQENWNTKH | M44;M61;M74;M44;M61; |
| | RYNLPTMCDI | | SSGVTRELMR | M74 |
| 240 | VLSNLNLPGCDGGSLY | M11;M73 | ERSEAGVCVSTSGRW | M38;M24;M44;M38;M24; |
| | VNKHAFHTP | | VLNNDYYRSL | M44 |
| 241 | RVLSNLNLPGCDGGSL | M11;M73 | RSEAGVCVSTSGRWV | M38;M24;M44;M38;M24; |
| | YVNKHAFHT | | LNNDYYRSLP | M44 |
| 242 | TRVLSNLNLPGCDGGS | M11;M73 | CERSEAGVCVSTSGR | M38;M24;M44;M38;M24; |
| | LYVNKHAFH | | WVLNNDYYRS | M44 |
| 243 | EFYAYLRKHFSMMILS | M57;M13 | SEAGVCVSTSGRWVL | M38;M24;M44;M38;M24; |
| | DDAVVCFNS | | NNDYYRSLPG | M44 |
| 244 | RNRATRVECTTIVNGV | M29;M29 | TCERSEAGVCVSTSG | M38;M24;M44;M38;M24; |
| | RRSFYVYAN | | RWVLNNDYYR | M44 |
| 245 | YKRNRATRVECTTIVN | M29;M29 | LTYNKVENMTPRDLG | M14;M67;M74;M14;M67; |
| | GVRRSFYVY | | ACIDCSARHI | M74 |
| 246 | ADETQALPQRQKKQQ | M13;M29 | MLTYNKVENMTPRD | M14;M67;M74;M14;M67; |
| | TVTLLPAADL | | LGACIDCSARH | M74 |
| 247 | KRNRATRVECTTIVNG | M29;M29 | PLKLRGTAVMSLKEG | M54;M60;M6;M67;M49; |
| | VRRSFYVYA | | QINDMILSLL | M59 |
| 248 | VNVAFELWAKRNIKP | M66;M74 | YPNASFDNFKFVCDNI | M64;M25;M19;M64;M25; |
| | VPEVKILNNL | | KFADDLNQL | M19 |
| 249 | CEEEEFEPSTQYEYGT | M67;M67 | DLGDELGTDPYEDFQ | M44;M61;M70;M44;M61; |
| | EDDYQGKPL | | ENWNTKHSSG | M70 |
| 250 | NINLHTQVVDMSMTY | M67;M67 | GDELGTDPYEDFQEN | M44;M61;M70;M44;M61; |
| | GQQFGPTYLD | | WNTKHSSGVT | M70 |
| 251 | FGWLIVGVALLAVFQS | M26;M61 | FDLGDELGTDPYEDF | M44;M61;M70;M44;M61; |
| | ASKIITLKK | | QENWNTKHSS | M70 |
| 252 | GWLIVGVALLAVFQS | M26;M61 | SFDLGDELGTDPYED | M44;M61;M70;M44;M61; |
| | ASKIITLKKR | | FQENWNTKHS | M70 |
| 253 | LNTLTLAVPYNMRVIH | M5;M70 | LGDELGTDPYEDFQE | M44;M61;M70;M44;M61; |
| | FGAGSDKGV | | NWNTKHSSGV | M70 |
| 254 | NTLTLAVPYNMRVIHF | M5;M70 | SVTSNYSGVVTTVMF | M29;M38;M14;M29;M38; |
| | GAGSDKGVA | | LARGIVFMCV | M14 |
| 255 | TLTLAVPYNMRVIHFG | M5;M70 | ENMTPRDLGACIDCS | M64;M67;M14;M64;M67; |
| | AGSDKGVAP | | ARHINAQVAK | M14 |
| 256 | TLAVPYNMRVIHFGA | M5;M70 | NKVENMTPRDLGACI | M64;M67;M14;M64;M67; |
| | GSDKGVAPGT | | DCSARHINAQ | M14 |
| 257 | QYLNTLTLAVPYNMR | M5;M70 | NMTPRDLGACIDCSA | M64;M67;M14;M64;M67; |
| | VIHFGAGSDK | | RHINAQVAKS | M14 |
| 258 | YLNTLTLAVPYNMRVI | M5;M70 | KVENMTPRDLGACID | M64;M67;M14;M64;M67; |
| | HFGAGSDKG | | CSARHINAQV | M14 |
| 259 | LTLAVPYNMRVIHFGA | M5;M70 | TPRDLGACIDCSARHI | M64;M67;M14;M64;M67; |
| | GSDKGVAPG | | NAQVAKSHN | M14 |
| 260 | GSDKGVAPGTAVLRQ | M33;M70 | TYNKVENMTPRDLG | M64;M67;M14;M64;M67; |
| | WLPTGTLLVD | | ACIDCSARHIN | M14 |
| 261 | DKGVAPGTAVLRQWL | M33;M70 | YNKVENMTPRDLGA | M64;M67;M14;M64;M67; |
| | PTGTLLVDSD | | CIDCSARHINA | M14 |
| 262 | SDKGVAPGTAVLRQW | M33;M70 | VENMTPRDLGACIDC | M64;M67;M14;M64;M67; |
| | LPTGTLLVDS | | SARHINAQVA | M14 |
| 263 | KGVAPGTAVLRQWLP | M33;M70 | MTPRDLGACIDCSAR | M64;M67;M14;M64;M67; |
| | TGTLLVDSDL | | HINAQVAKSH | M14 |
| 264 | LSFELLHAPATVCGPK | M46;M27 | QRNFYEPQIITTDNTF | M64;M10;M7;M30;M9;M23 |
| | KSTNLVKNK | | VSGNCDVVI | |
| 265 | PAFDKSAFVNLKQLPF | M60;M54 | TQRNFYEPQIITTDNT | M64;M10;M7;M30;M9;M23 |
| | FYYSDSPCE | | FVSGNCDVV | |
| 266 | PLVSSQCVNLTTRTQL | M9;M24 | DTFNGECPNFVFPLNS | M50;M19;M61;M50;M19; |
| | PPAYTNSFT | | IIKTIQPRV | M61 |
| 267 | LLPLVSSQCVNLTTRT | M9;M24 | TFNGECPNFVFPLNSII | M50;M19;M61;M50;M19; |
| | QLPPAYTNS | | KTIQPRVE | M61 |
| 268 | LPLVSSQCVNLTTRTQ | M9;M24 | LEILQKEKVNINIVGD | M35;M27;M44;M35;M27; |
| | LPPAYTNSF | | FKLNEEIAI | M44 |
| 269 | GTDYKHWPQIAQFAPS | M82;M70 | EILQKEKVNINIVGDF | M35;M27;M44;M35;M27; |
| | ASAFFGMSR | | KLNEEIAII | M44 |
| 270 | RIIMRLWLCWKCRSK | M75;M76 | LLEILQKEKVNINIVG | M35;M27;M44;M35;M27; |
| | NPLLYDANYF | | DFKLNEEIA | M44 |
| 271 | VRIIMRLWLCWKCRS | M75;M76 | YTPSFKKGAKLLHKPI | M1;M27;M16;M1;M27;M16 |
| | KNPLLYDANY | | VWHVNNATN | |
| 272 | FVRIIMRLWLCWKCRS | M75;M76 | SDDAVVCFNSTYASQ | M13;M21;M53;M48;M49; |
| | KNPLLYDAN | | GLVASIKNFK | M22 |
| 273 | IIMRLWLCWKCRSKNP | M75;M76 | LSDDAVVCFNSTYAS | M13;M21;M53;M48;M49; |
| | LLYDANYFL | | QGLVASIKNF | M22 |
| 274 | ESGVKDCVVLHSYFTS | M46;M20 | LLSVLLSMQGAVDIN | M67;M45;M49;M67;M45; |
| | DYYQLYSTQ | | KLCEEMLDNR | M49 |
| 275 | GVITHDVSSAINRPQIG | M21;M70 | SLLSVLLSMQGAVDI | M67;M45;M49;M67;M45; |
| | VVREFLTR | | NKLCEEMLDN | M49 |
| 276 | GMSRIGMEVTPSGTW | M5;M23 | KLIEYTDFATSACVLA | M29;M14;M62;M29;M14; |
| | LTYTGAIKLD | | AECTIFKDA | M62 |
| 277 | FGMSRIGMEVTPSGT | M5;M23 | IEYTDFATSACVLAAE | M29;M14;M62;M29;M14; |
| | WLTYTGAIKL | | CTIFKDASG | M62 |
| 278 | LVAEWFLAYILFTRFF | M5;M5 | LIEYTDFATSACVLAA | M29;M14;M62;M29;M14; |
| | YVLGLAAIM | | ECTIFKDAS | M62 |
| 279 | LALHRSYLTPGDSSSG | M5;M75 | SKLIEYTDFATSACVL | M29;M14;M62;M29;M14; |
| | WTAGAAAYY | | AAECTIFKD | M62 |
| 280 | QNSVRVLQKAAITILD | M5;M5 | SRVSAKPPPGDQFKH | M54;M16;M60;M34;M52; |
| | GISQYSLRL | | LIPLMYKGLP | M39 |
| 281 | FGLVAEWFLAYILFTR | M5;M5 | GGSCVLSGHNLAKHC | M1;M80;M37;M1;M80;M37 |
| | FFYVLGLAA | | LHVVGPNVNK | |
| 282 | ALHRSYLTPGDSSSGW | M5;M75 | VGGSCVLSGHNLAKH | M1;M80;M37;M1;M80;M37 |
| | TAGAAAYYV | | CLHVVGPNVN | |
| 283 | GLVAEWFLAYILFTRF | M5;M5 | EVGPEHSLAEYHNES | M13;M39;M48;M13;M39; |
| | FYVLGLAAI | | GLKTILRKGG | M48 |
| 284 | LLALHRSYLTPGDSSS | M5;M75 | VGPEHSLAEYHNESG | M13;M39;M48;M13;M39; |
| | GWTAGAAAY | | LKTILRKGGR | M48 |
| 285 | HFGAGSDKGVAPGTA | M13;M26 | LHNWNCVNCDTFCA | M57;M45;M70;M57;M45; |
| | VLRQWLPTGT | | GSTFISDEVAR | M70 |
| 286 | GAGSDKGVAPGTAVL | M13;M26 | NSYTTTIKPVTYKLDG | M36;M59;M20;M36;M59; |
| | RQWLPTGTLL | | VVCTEIDPK | M20 |
| 287 | FGAGSDKGVAPGTAV | M13;M26 | KSAPLIELCVDEAGSK | M64;M40;M21;M7;M22; |
| | LRQWLPTGTL | | SPIQYIDIG | M23 |
| 288 | IHFGAGSDKGVAPGTA | M13;M26 | SAPLIELCVDEAGSKS | M64;M40;M21;M7;M22; |
| | VLRQWLPTG | | PIQYIDIGN | M23 |
| 289 | VIHFGAGSDKGVAPGT | M13;M26 | GARKSAPLIELCVDEA | M64;M40;M21;M7;M22; |
| | AVLRQWLPT | | GSKSPIQYI | M23 |
| 290 | AHKDKSAQCFKMFYK | M13;M52 | RKSAPLIELCVDEAGS | M64;M40;M21;M7;M22; |
| | GVITHDVSSA | | KSPIQYIDI | M23 |
| 291 | KAHKDKSAQCFKMFY | M13;M52 | ARKSAPLIELCVDEAG | M64;M40;M21;M7;M22; |
| | KGVITHDVSS | | SKSPIQYID | M23 |
| 292 | HKDKSAQCFKMFYKG | M13;M52 | VSFSTFEEAALCTFLL | M13;M44;M49;M13;M44; |
| | VITHDVSSAI | | NKEMYLKLR | M49 |
| 293 | LKAHKDKSAQCFKMF | M13;M52 | GAISSVLNDILSRLDK | M58;M53;M48;M50;M17; |
| | YKGVITHDVS | | VEAEVQIDR | M15 |
| 294 | KLKAHKDKSAQCFKM | M13;M52 | VNINIVGDFKLNEEIAI | M35;M73;M44;M35;M73; |
| | FYKGVITHDV | | ILASFSAS | M44 |
| 295 | EQIDGYVMHANYIFW | M41;M9 | QQTVTLLPAADLDDF | M54;M58;M55;M53;M26; |
| | RNTNPIQLSS | | SKQLQQSMSS | M39 |
| 296 | KPREQIDGYVMHANYI | M41;M9 | KQQTVTLLPAADLDD | M54;M58;M55;M53;M26; |
| | FWRNTNPIQ | | FSKQLQQSMS | M39 |
| 297 | PREQIDGYVMHANYIF | M41;M9 | LMWLSYFIASFRLFAR | M64;M40;M16;M30;M15; |
| | WRNTNPIQL | | TRSMWSFNP | M35 |
| 298 | REQIDGYVMHANYIF | M41;M9 | LPNNTASWFTALTQH | M40;M28;M70;M29;M18; |
| | WRNTNPIQLS | | GKEDLKFPRG | M15 |
| 299 | DYDYYRYNLPTMCDI | M74;M20 | GLPNNTASWFTALTQ | M40;M28;M70;M29;M18; |
| | RQLLFVVEVV | | HGKEDLKFPR | M15 |
| 300 | YDYYRYNLPTMCDIR | M74;M20 | QGLPNNTASWFTALT | M40;M28;M70;M29;M18; |
| | QLLFVVEVVD | | QHGKEDLKFP | M15 |
| 301 | YFVVKRHTFSNYQHE | M34;M20 | LVRDLPQGFSALEPLV | M31;M60;M34;M45;M52; |
| | ETIYNLLKDC | | DLPIGINIT | M47 |
| 302 | FVVKRHTFSNYQHEET | M34;M20 | RDLPQGFSALEPLVDL | M31;M60;M34;M45;M52; |
| | IYNLLKDCP | | PIGINITRF | M47 |
| 303 | SYFVVKRHTFSNYQHE | M34;M20 | NLVRDLPQGFSALEPL | M31;M60;M34;M45;M52; |
| | ETIYNLLKD | | VDLPIGINI | M47 |
| 304 | FDKAGQKTYERHSLS | M70;M70 | VRDLPQGFSALEPLV | M31;M60;M34;M45;M52; |
| | HFVNLDNLRA | | DLPIGINITR | M47 |
| 305 | NMRVIHFGAGSDKGV | M13;M70 | LALYNKYKYFSGAM | M1;M67;M66;M1;M67;M66 |
| | APGTAVLRQW | | DTTSYREAACC | |
| 306 | MRVIHFGAGSDKGVA | M13;M70 | KYKFVRIQPGQTFSVL | M48;M27;M16;M48;M27; |
| | PGTAVLRQWL | | ACYNGSPSG | M16 |
| 307 | YFDKAGQKTYERHSL | M70;M70 | RIQPGQTFSVLACYN | M48;M27;M16;M48;M27; |
| | SHFVNLDNLR | | GSPSGVYQCA | M16 |
| 308 | LIRQGTDYKHWPQIAQ | M69;M82 | VRIQPGQTFSVLACY | M48;M27;M16;M48;M27; |
| | FAPSASAFF | | NGSPSGVYQC | M16 |
| 309 | VESSSKLWAQCVQLH | M82;M82 | FVRIQPGQTFSVLACY | M48;M27;M16;M48;M27; |
| | NDILLAKDTT | | NGSPSGVYQ | M16 |
| 310 | LRVESSSKLWAQCVQ | M82;M82 | QPGQTFSVLACYNGS | M48;M27;M16;M48;M27; |
| | LHNDILLAKD | | PSGVYQCAMR | M16 |
| 311 | QLRVESSSKLWAQCV | M82;M82 | YKFVRIQPGQTFSVLA | M48;M27;M16;M48;M27; |
| | QLHNDILLAK | | CYNGSPSGV | M16 |
| 312 | TISSFKWDLTAFGLVA | M82;M82 | KFVRIQPGQTFSVLAC | M48;M27;M16;M48;M27; |
| | EWFLAYILF | | YNGSPSGVY | M16 |
| 313 | ESSSKLWAQCVQLHN | M82;M82 | IQPGQTFSVLACYNGS | M48;M27;M16;M48;M27; |
| | DILLAKDTTE | | PSGVYQCAM | M16 |
| 314 | ITISSFKWDLTAFGLVA | M82;M82 | KGVHFVCNLLLLFVT | M21;M6;M50;M43;M22; |
| | EWFLAYIL | | VYSHLLLVAA | M23 |
| 315 | DQELIRQGTDYKHWP | M69;M82 | FVCNLLLLFVTVYSH | M6;M37;M41;M43;M42; |
| | QIAQFAPSAS | | LLLVAAGLEA | M22 |
| 316 | RVESSSKLWAQCVQL | M82;M82 | CNLLLLFVTVYSHLLL | M6;M37;M41;M43;M42; |
| | HNDILLAKDT | | VAAGLEAPF | M22 |
| 317 | ISSFKWDLTAFGLVAE | M82;M82 | VCNLLLLFVTVYSHL | M6;M37;M41;M43;M42; |
| | WFLAYILFT | | LLVAAGLEAP | M22 |
| 318 | ELIRQGTDYKHWPQIA | M69;M82 | CGSVGFNIDYDCVSF | M43;M17;M14;M43;M17; |
| | QFAPSASAF | | CYMHHMELPT | M14 |
| 319 | QELIRQGTDYKHWPQI | M69;M82 | STECSNLLLQYGSFCT | M13;M48;M41;M43;M49; |
| | AQFAPSASA | | QLNRALTGI | M46 |
| 320 | ETYFTQSRNLQEFKPR | M75;M31 | DSTECSNLLLQYGSFC | M13;M48;M41;M43;M49; |
| | SQMEIDFLE | | TQLNRALTG | M46 |
| 321 | TYFTQSRNLQEFKPRS | M75;M31 | GDSTECSNLLLQYGSF | M13;M48;M41;M43;M49; |
| | QMEIDFLEL | | CTQLNRALT | M46 |
| 322 | YLQYIRKLHDELTGH | M32;M38 | GTITVEELKKLLEQW | M4;M58;M25;M53;M17; |
| | MLDMYSVMLT | | NLVIGFLFLT | M47 |
| 323 | CALDPLSETKCTLKSF | M75;M21 | CASYQTQTNSPRRAR | M31;M5;M25;M6;M50;M18 |
| | TVEKGIYQT | | SVASQSIIAY | |
| 324 | TLATCELYHYQECVR | M27;M20 | QPRVEKKKLDGFMG | M57;M26;M6;M57;M26;M6 |
| | GTTVLLKEPC | | RIRSVYPVASP | |
| 325 | LATCELYHYQECVRG | M27;M20 | RFASVYAWNRKRISN | M16;M55;M53;M74;M67; |
| | TTVLLKEPCS | | CVADYSVLYN | M27 |
| 326 | AITRAKVGILCIMSDR | M32;M68 | FASVYAWNRKRISNC | M16;M55;M53;M74;M67; |
| | DLYDKLQFT | | VADYSVLYNS | M27 |
| 327 | TRAKVGILCIMSDRDL | M32;M68 | LPNDDTLRVEAFEYY | M29;M6;M41;M29;M6;M41 |
| | YDKLQFTSL | | HTTDPSFLGR | |
| 328 | AKVGILCIMSDRDLYD | M32;M68 | PNDDTLRVEAFEYYH | M29;M6;M41;M29;M6;M41 |
| | KLQFTSLEI | | TTDPSFLGRY | |
| 329 | RAKVGILCIMSDRDLY | M32;M68 | SVVNIQKEIDRLNEVA | M78;M65;M2;M61;M79; |
| | DKLQFTSLE | | KNLNESLID | M82 |
| 330 | ITRAKVGILCIMSDRDL | M32;M68 | LSRVLGLKTLATHGL | M22;M6;M54;M22;M6;M54 |
| | YDKLQFTS | | AAVNSVPWDT | |
| 331 | KLASHMYCSFYPPDED | M20;M20 | IWFLLLSVCLGSLIYS | M29;M6;M31;M29;M6;M31 |
| | EEEGDCEEE | | TAALGVLMS | |
| 332 | ENFNQHEVLLAPLLSA | M20;M20 | KGIMMNVAKYTQLC | M73;M78;M34;M48;M41; |
| | GIFGADPIH | | QYLNTLTLAVP | M49 |
| 333 | NLAKHCLHVVGPNVN | M77;M77 | PKGIMMNVAKYTQL | M73;M78;M34;M48;M41; |
| | KGEDIQLLKS | | CQYLNTLTLAV | M49 |
| 334 | TWLDMVDTSLSGFKL | M75;M75 | TGCVIAWNSNNLDSK | M32;M48;M50;M68;M49; |
| | KDCVMYASAV | | VGGNYNYLYR | M26 |
| 335 | CHNKCAYWVPRASAN | M75;M75 | FTGCVIAWNSNNLDS | M32;M48;M50;M68;M49; |
| | IGCNHTGVVG | | KVGGNYNYLY | M26 |
| 336 | EFKLASHMYCSFYPPD | M20;M20 | NIDGYFKIYSKHTPIN | M64;M40;M71;M16;M15; |
| | EDEEEGDCE | | LVRDLPQGF | M52 |
| 337 | VGCHNKCAYWVPRAS | M75;M75 | SDVGDSAEVAVKMF | M26;M14;M37;M26;M14; |
| | ANIGCNHTGV | | DAYVNTFSSTF | M37 |
| 338 | NFNQHEVLLAPLLSAG | M20;M20 | VSDVGDSAEVAVKM | M26;M14;M37;M26;M14; |
| | IFGADPIHS | | FDAYVNTFSST | M37 |
| 339 | YVGCHNKCAYWVPR | M75;M75 | LNQLTGYKKPASREL | M57;M63;M70;M57;M63; |
| | ASANIGCNHTG | | KVTFFPDLNG | M70 |
| 340 | LAKHCLHVVGPNVNK | M77;M77 | VGTPVCINGLMLLEIK | M14;M9;M61;M14;M9;M61 |
| | GEDIQLLKSA | | DTEKYCALA | |
| 341 | AKHCLHVVGPNVNKG | M77;M77 | PLVGTPVCINGLMLLE | M14;M9;M61;M14;M9;M61 |
| | EDIQLLKSAY | | IKDTEKYCA | |
| 342 | FKLASHMYCSFYPPDE | M20;M20 | GTPVCINGLMLLEIKD | M14;M9;M61;M14;M9;M61 |
| | DEEEGDCEE | | TEKYCALAP | |
| 343 | GCHNKCAYWVPRASA | M75;M75 | LVGTPVCINGLMLLEI | M14;M9;M61;M14;M9;M61 |
| | NIGCNHTGVV | | KDTEKYCAL | |
| 344 | YEGNSPFHPLADNKFA | M1;M3;M70 | TPVCINGLMLLEIKDT | M14;M9;M61;M14;M9;M61 |
| | LTCFSTQFA | | EKYCALAPN | |
| 345 | TYEGNSPFHPLADNKF | M1;M3;M70 | TDDNALAYYNTTKG | M21;M22;M6;M21;M22;M6 |
| | ALTCFSTQF | | GRFVLALLSDL | |
| 346 | EIRASANLAATKMSEC | M4;M27;M3 | MGRIRSVYPVASPNE | M68;M29;M6;M68;M29;M6 |
| | VLGQSKRVD | | CNQMCLSTLM | |
| 347 | IRASANLAATKMSECV | M4;M27;M3 | QGAVDINKLCEEMLD | M21;M45;M49;M21;M45; |
| | LGQSKRVDF | | NRATLQAIAS | M49 |
| 348 | DGTLMIERFVSLAIDA | M5;M2;M3 | GAVDINKLCEEMLDN | M21;M45;M49;M21;M45; |
| | YPLTKHPNQ | | RATLQAIASE | M49 |
| 349 | GTLMIERFVSLAIDAY | M5;M2;M3 | DMVDTSLSGFKLKDC | M15;M75;M14;M15;M75; |
| | PLTKHPNQE | | VMYASAVVLL | M14 |
| 350 | SGTYEGNSPFHPLADN | M3;M44;M70 | WLDMVDTSLSGFKLK | M15;M75;M14;M15;M75; |
| | KFALTCFST | | DCVMYASAVV | M14 |
| 351 | VIGTSKFYGGWHNML | M18;M3;M6 | MVDTSLSGFKLKDCV | M15;M75;M14;M15;M75; |
| | KTVYSDVENP | | MYASAVVLLI | M14 |
| 352 | CRSKNPLLYDANYFLC | M18;M21; | LDMVDTSLSGFKLKD | M15;M75;M14;M15;M75; |
| | WHTNCYDYC | M3 | CVMYASAVVL | M14 |
| 353 | RSKNPLLYDANYFLC | M18;M21; | AGTTQTACTDDNALA | M22;M27;M6;M22;M27;M6 |
| | WHTNCYDYCI | M3 | YYNTTKGGRF | |
| 354 | GVKDCVVLHSYFTSD | M42;M3; | STQYEYGTEDDYQGK | M1;M67;M37;M1;M67;M37 |
| | YYQLYSTQLS | M20 | PLEFGATSAA | |
| 355 | VEIIKSQDLSVVSKVV | M51;M1; | PSTQYEYGTEDDYQG | M1;M67;M37;M1;M67;M37 |
| | KVTIDYTEI | M18 | KPLEFGATSA | |
| 356 | KSQDLSVVSKVVKVTI | M51;M1; | EPSTQYEYGTEDDYQ | M1;M67;M37;M1;M67;M37 |
| | DYTEISFML | M18 | GKPLEFGATS | |
| 357 | IIKSQDLSVVSKVVKV | M51;M1; | QYEYGTEDDYQGKPL | M1;M22;M37;M1;M22;M37 |
| | TIDYTEISF | M18 | EFGATSAALQ | |
| 358 | IKSQDLSVVSKVVKVT | M51;M1; | EYGTEDDYQGKPLEF | M1;M22;M37;M1;M22;M37 |
| | IDYTEISFM | M18 | GATSAALQPE | |
| 359 | EIIKSQDLSVVSKVVK | M51;M1; | YEYGTEDDYQGKPLE | M1;M22;M37;M1;M22;M37 |
| | VTIDYTEIS | M18 | FGATSAALQP | |
| 360 | FVEIIKSQDLSVVSKVV | M51;M1; | LKLKVDTANPKTPKY | M77;M34;M14;M77;M34; |
| | KVTIDYTE | M18 | KFVRIQPGQT | M14 |
| 361 | YVIFTQTTETAHSCNV | M51;M6; | CTLKSFTVEKGIYQTS | M75;M25;M37;M41;M8; |
| | NRFNVAITR | M59 | NFRVQPTES | M23 |
| 362 | DYVIFTQTTETAHSCN | M51;M6; | AVIKTLQPVSELLTPL | M78;M45;M49;M78;M45; |
| | VNRFNVAIT | M59 | GIDLDEWSM | M49 |
| 363 | AQTGSSKCVCSVIDLL | M4;M51; | VIKTLQPVSELLTPLGI | M78;M45;M49;M78;M45; |
| | LDDFVEIIK | M59 | DLDEWSMA | M49 |
| 364 | QTGSSKCVCSVIDLLL | M4;M51; | PRHVICTSEDMLNPN | M72;M28;M59;M72;M28; |
| | DDFVEIIKS | M59 | YEDLLIRKSN | M59 |
| 365 | LNDFVSDADSTLIGDC | M7;M6; | AGTDTTITVNVLAWL | M56;M32;M14;M56;M32; |
| | ATVHTANKW | M36 | YAAVINGDRW | M14 |
| 366 | DLNDFVSDADSTLIGD | M7;M6; | DVVNQNAQALNTLV | M58;M16;M53;M17;M15; |
| | CATVHTANK | M36 | KQLSSNFGAIS | M22 |
| 367 | MPLSAPTLVPQEHYVR | M51;M69; | VVNQNAQALNTLVK | M58;M16;M53;M17;M15; |
| | ITGLYPTLN | M28 | QLSSNFGAISS | M22 |
| 368 | TVMPLSAPTLVPQEHY | M51;M69; | CDIPIGAGICASYQTQ | M28;M31;M70;M25;M50; |
| | VRITGLYPT | M28 | TNSPRRARS | M18 |
| 369 | HTVMPLSAPTLVPQEH | M51;M69; | ECDIPIGAGICASYQT | M28;M31;M70;M25;M50; |
| | YVRITGLYP | M28 | QTNSPRRAR | M18 |
| 370 | VMPLSAPTLVPQEHYV | M51;M69; | YECDIPIGAGICASYQ | M28;M31;M70;M25;M50; |
| | RITGLYPTL | M28 | TQTNSPRRA | M18 |
| 371 | NHTSPDVDLGDISGIN | M14;M80; | EVAVKMFDAYVNTFS | M41;M8;M70;M41;M8;M70 |
| | ASVVNIQKE | M45 | STFNVPMEKL | |
| 372 | SKVVKVTIDYTEISFM | M71;M67; | VAVKMFDAYVNTFSS | M41;M8;M70;M41;M8;M70 |
| | LWCKDGHVE | M51 | TFNVPMEKLK | |
| 373 | ANTVIWDYKRDAPAH | M36;M11; | GYLPQNAVVKIYCPA | M35;M11;M28;M35;M11; |
| | ISTIGVCSMT | M6 | CHNSEVGPEH | M28 |
| 374 | TVIWDYKRDAPAHIST | M36;M11; | EVPVAIHADQLTPTW | M58;M24;M16;M5;M41; |
| | IGVCSMTDI | M6 | RVYSTGSNVF | M17 |
| 375 | NTVIWDYKRDAPAHIS | M36;M11; | TEVPVAIHADQLTPT | M58;M24;M16;M5;M41; |
| | TIGVCSMTD | M6 | WRVYSTGSNV | M17 |
| 376 | VIWDYKRDAPAHISTI | M36;M11; | CTEVPVAIHADQLTPT | M58;M24;M16;M5;M41; |
| | GVCSMTDIA | M6 | WRVYSTGSN | M17 |
| 377 | MYSVMLTNDNTSRY | M7;M22; | QKVGMQKYSTLQGPP | M34;M29;M41;M42;M43; |
| | WEPEFYEAMYT | M36 | GTGKSHFAIG | M39 |
| 378 | YSVMLTNDNTSRYWE | M7;M22; | KVGMQKYSTLQGPPG | M34;M29;M41;M42;M43; |
| | PEFYEAMYTP | M36 | TGKSHFAIGL | M39 |
| 379 | YFDCYDGGCINANQVI | M50;M73; | VDADSKIVQLSEISMD | M7;M54;M49;M7;M54;M49 |
| | VNNLDKSAG | M51 | NSPNLAWPL | |
| 380 | FDCYDGGCINANQVIV | M50;M73; | GEAANFCALILAYCN | M41;M48;M49;M41;M48; |
| | NNLDKSAGF | M51 | KTVGELGDVR | M49 |
| 381 | DCYDGGCINANQVIV | M50;M73; | RAGEAANFCALILAY | M41;M48;M49;M41;M48; |
| | NNLDKSAGFP | M51 | CNKTVGELGD | M49 |
| 382 | SAPTLVPQEHYVRITG | M51;M69; | AGEAANFCALILAYC | M41;M48;M49;M41;M48; |
| | LYPTLNISD | M34 | NKTVGELGDV | M49 |
| 383 | APTLVPQEHYVRITGL | M51;M69; | LVATAEAELAKNVSL | M7;M29;M73;M7;M29;M73 |
| | YPTLNISDE | M34 | DNVLSTFISA | |
| 384 | PTLVPQEHYVRITGLY | M51;M69; | VATAEAELAKNVSLD | M7;M29;M73;M7;M29;M73 |
| | PTLNISDEF | M34 | NVLSTFISAA | |
| 385 | LSAPTLVPQEHYVRIT | M51;M69; | PGVYSVIYLYLTFYLT | M50;M48;M49;M50;M48; |
| | GLYPTLNIS | M34 | NDVSFLAHI | M49 |
| 386 | PTMCDIRQLLFVVEVV | M51;M70; | LPGVYSVIYLYLTFYL | M50;M48;M49;M50;M48; |
| | DKYFDCYDG | M20 | TNDVSFLAH | M49 |
| 387 | IRQLLFVVEVVDKYFD | M51;M70; | NFCALILAYCNKTVG | M79;M41;M48;M79;M41; |
| | CYDGGCINA | M37 | ELGDVRETMS | M48 |
| 388 | NLPTMCDIRQLLFVVE | M51;M70; | CALILAYCNKTVGEL | M79;M41;M48;M79;M41; |
| | VVDKYFDCY | M20 | GDVRETMSYL | M48 |
| 389 | LPTMCDIRQLLFVVEV | M51;M70; | FCALILAYCNKTVGE | M79;M41;M48;M79;M41; |
| | VDKYFDCYD | M20 | LGDVRETMSY | M48 |
| 390 | RYNLPTMCDIRQLLFV | M51;M70; | KSNHNFLVQAGNVQL | M12;M58;M70;M12;M58; |
| | VEVVDKYFD | M20 | RVIGHSMQNC | M70 |
| 391 | DIRQLLFVVEVVDKYF | M51;M70; | RKSNHNFLVQAGNV | M12;M58;M70;M12;M58; |
| | DCYDGGCIN | M37 | QLRVIGHSMQN | M70 |
| 392 | YNLPTMCDIRQLLFVV | M51;M70; | RYFRLTLGVYDYLVS | M43;M6;M31;M43;M6;M31 |
| | EVVDKYFDC | M20 | TQEFRYMNSQ | |
| 393 | VDCTMYICGDSTECSN | M48;M39; | LMSFPQSAPHGVVFL | M64;M21;M28;M70;M53; |
| | LLLQYGSFC | M45 | HVTYVPAQEK | M9 |
| 394 | DCTMYICGDSTECSNL | M48;M39; | NALAYYNTTKGGRFV | M33;M6;M20;M33;M6;M20 |
| | LLQYGSFCT | M45 | LALLSDLQDL | |
| 395 | EQTQGNFGDQELIRQG | M64;M69; | YQGKPLEFGATSAAL | M38;M22;M28;M38;M22; |
| | TDYKHWPQI | M51 | QPEEEQEEDW | M28 |
| 396 | QGNFGDQELIRQGTDY | M64;M69; | KPLEFGATSAALQPEE | M38;M22;M28;M38;M22; |
| | KHWPQIAQF | M51 | EQEEDWLDD | M28 |
| 397 | TQGNFGDQELIRQGTD | M64;M69; | DYQGKPLEFGATSAA | M38;M22;M28;M38;M22; |
| | YKHWPQIAQ | M51 | LQPEEEQEED | M28 |
| 398 | PEQTQGNFGDQELIRQ | M64;M69; | DDYQGKPLEFGATSA | M38;M22;M28;M38;M22; |
| | GTDYKHWPQ | M51 | ALQPEEEQEE | M28 |
| 399 | QTQGNFGDQELIRQGT | M64;M69; | QGKPLEFGATSAALQ | M38;M22;M28;M38;M22; |
| | DYKHWPQIA | M51 | PEEEQEEDWL | M28 |
| 400 | GNFGDQELIRQGTDYK | M64;M69; | GKPLEFGATSAALQP | M38;M22;M28;M38;M22; |
| | HWPQIAQFA | M51 | EEEQEEDWLD | M28 |
| 401 | FGDQELIRQGTDYKH | M64;M69; | VMFTPLVPFWITIAYII | M60;M56;M8;M60;M56;M8 |
| | WPQIAQFAPS | M51 | CISTKHFY | |
| 402 | NFGDQELIRQGTDYKH | M64;M69; | KGGKIVNNWLKQLIK | M57;M55;M11;M57;M55; |
| | WPQIAQFAP | M51 | VTLVFLFVAA | M11 |
| 403 | FVSDADSTLIGDCATV | M7;M24; | FKLKDCVMYASAVV | M33;M75;M12;M33;M75; |
| | HTANKWDLI | M36 | LLILMTARTVY | M12 |
| 404 | VSDADSTLIGDCATVH | M7;M24; | PQTSITSAVLQSGFRK | M1;M38;M62;M1;M38;M62 |
| | TANKWDLII | M36 | MAFPSGKVE | |
| 405 | DFVSDADSTLIGDCAT | M7;M24; | QTSITSAVLQSGFRKM | M1;M38;M62;M1;M38;M62 |
| | VHTANKWDL | M36 | AFPSGKVEG | |
| 406 | LPDPSKPSKRSFIEDLL | M63;M67; | LNRFTTTLNDFNLVA | M63;M73;M66;M63;M73; |
| | FNKVTLAD | M44 | MKYNYEPLTQ | M66 |
| 407 | KLLKSIAATRGATVVI | M72;M2; | PINVIVFDGKSKCEES | M7;M56;M52;M7;M56;M52 |
| | GTSKFYGGW | M14 | SAKSASVYY | |
| 408 | PGDQFKHLIPLMYKGL | M1;M39; | QLSLPVLQVRDVLVR | M43;M63;M70;M43;M63; |
| | PWNVVRIKI | M12 | GFGDSVEEVL | M70 |
| 409 | GDQFKHLIPLMYKGLP | M1;M39; | HVQLSLPVLQVRDVL | M43;M63;M70;M43;M63; |
| | WNVVRIKIV | M12 | VRGFGDSVEE | M70 |
| 410 | SLFDMSKFPLKLRGTA | M67;M14; | VQLSLPVLQVRDVLV | M43;M63;M70;M43;M63; |
| | VMSLKEGQI | M8 | RGFGDSVEEV | M70 |
| 411 | AETLKATEETFKLSYG | M33;M6; | LSLPVLQVRDVLVRG | M43;M63;M70;M43;M63; |
| | IATVREVLS | M44 | FGDSVEEVLS | M70 |
| 412 | ETLKATEETFKLSYGI | M33;M6; | EDDYQGKPLEFGATS | M22;M28;M37;M22;M28; |
| | ATVREVLSD | M44 | AALQPEEEQE | M37 |
| 413 | VQELYSPIFLIVAAIVFI | M25;M12; | TEDDYQGKPLEFGAT | M22;M28;M37;M22;M28; |
| | TLCFTLK | M14 | SAALQPEEEQ | M37 |
| 414 | ELYSPIFLIVAAIVFITL | M25;M12; | YLFQHANLDSCKRVL | M5;M27;M2;M5;M27;M2 |
| | CFTLKRK | M14 | NVVCKTCGQQ | |
| 415 | EVQELYSPIFLIVAAIV | M25;M12; | IDRLITGRLQSLQTYV | M34;M29;M38;M49;M46; |
| | FITLCFTL | M14 | TQQLIRAAE | M22 |
| 416 | QELYSPIFLIVAAIVFIT | M25;M12; | VQIDRLITGRLQSLQT | M34;M29;M38;M49;M46; |
| | LCFTLKR | M14 | YVTQQLIRA | M22 |
| 417 | MMGFKMNYQVNGYP | M44;M48; | QIDRLITGRLQSLQTY | M34;M29;M38;M49;M46; |
| | NMFITREEAIR | M49 | VTQQLIRAA | M22 |
| 418 | MGFKMNYQVNGYPN | M44;M48; | EVQIDRLITGRLQSLQ | M34;M29;M38;M49;M46; |
| | MFITREEAIRH | M49 | TYVTQQLIR | M22 |
| 419 | ISMMGFKMNYQVNGY | M44;M48; | PKSDGTGTIYTELEPP | M38;M6;M59;M38;M6;M59 |
| | PNMFITREEA | M49 | CRFVTDTPK | |
| 420 | SMMGFKMNYQVNGY | M44;M48; | YCPIFFITGNTLQCIML | M40;M39;M11;M40;M39; |
| | PNMFITREEAI | M49 | VYCFLGYF | M11 |
| 421 | LISMMGFKMNYQVNG | M44;M48; | EYCPIFFITGNTLQCIM | M40;M39;M11;M40;M39; |
| | YPNMFITREE | M49 | LVYCFLGY | M11 |
| 422 | KGDYGDAVVYRGTTT | M9;M8; | IVFMCVEYCPIFFITGN | M40;M39;M11;M40;M39; |
| | YKLNVGDYFV | M44 | TLQCIMLV | M11 |
| 423 | DYGDAVVYRGTTTYK | M9;M8; | CVEYCPIFFITGNTLQ | M40;M39;M11;M40;M39; |
| | LNVGDYFVLT | M44 | CIMLVYCFL | M11 |
| 424 | YGDAVVYRGTTTYKL | M9;M8; | MCVEYCPIFFITGNTL | M40;M39;M11;M40;M39; |
| | NVGDYFVLTS | M44 | QCIMLVYCF | M11 |
| 425 | GDYGDAVVYRGTTTY | M9;M8; | VEYCPIFFITGNTLQCI | M40;M39;M11;M40;M39; |
| | KLNVGDYFVL | M44 | MLVYCFLG | M11 |
| 426 | SVELKHFFFAQDGNA | M36;M39; | FMCVEYCPIFFITGNT | M40;M39;M11;M40;M39; |
| | AISDYDYYRY | M67 | LQCIMLVYC | M11 |
| 427 | SSVELKHFFFAQDGNA | M36;M39; | VFMCVEYCPIFFITGN | M40;M39;M11;M40;M39; |
| | AISDYDYYR | M67 | TLQCIMLVY | M11 |
| 428 | VELKHFFFAQDGNAAI | M36;M39; | SDLQDLKWARFPKSD | M4;M60;M38;M4;M60;M38 |
| | SDYDYYRYN | M67 | GTGTIYTELE | |
| 429 | EGSSVELKHFFFAQDG | M36;M39; | PKGPKVKYLYFIKGL | M64;M52;M2;M64;M52;M2 |
| | NAAISDYDY | M67 | NNLNRGMVLG | |
| 430 | GSSVELKHFFFAQDGN | M36;M39; | DTPKGPKVKYLYFIK | M64;M52;M2;M64;M52;M2 |
| | AAISDYDYY | M67 | GLNNLNRGMV | |
| 431 | TFEKGDYGDAVVYRG | M9;M12; | TPKGPKVKYLYFIKG | M64;M52;M2;M64;M52;M2 |
| | TTTYKLNVGD | M44 | LNNLNRGMVL | |
| 432 | REPMLQSADAQSFLNR | M33;M12; | TDTPKGPKVKYLYFI | M64;M52;M2;M64;M52;M2 |
| | VCGVSAARL | M45 | KGLNNLNRGM | |
| 433 | YGCSCDQLREPMLQS | M33;M12; | VLSGHNLAKHCLHVV | M1;M77;M37;M1;M77;M37 |
| | ADAQSFLNRV | M45 | GPNVNKGEDI | |
| 434 | CSCDQLREPMLQSAD | M33;M12; | LSGHNLAKHCLHVVG | M1;M77;M37;M1;M77;M37 |
| | AQSFLNRVCG | M45 | PNVNKGEDIQ | |
| 435 | GYGCSCDQLREPMLQ | M33;M12; | RELKVTFFPDLNGDV | M60;M21;M63;M60;M21; |
| | SADAQSFLNG | M45 | VAIDYKHYTP | M63 |
| 436 | DQLREPMLQSADAQS | M33;M12; | VLQVRDVLVRGFGDS | M63;M68;M70;M63;M68; |
| | FLNRVCGVSA | M45 | VEEVLSEARQ | M70 |
| 437 | QLREPMLQSADAQSFL | M33;M12; | LQVRDVLVRGFGDSV | M63;M68;M70;M63;M68; |
| | NRVCGVSAA | M45 | EEVLSEARQH | M70 |
| 438 | CDQLREPMLQSADAQ | M33;M12; | QVRDVLVRGFGDSVE | M63;M68;M70;M63;M68; |
| | SFLNRVCGVS | M45 | EVLSEARQHL | M70 |
| 439 | GYGCSCDQLREPMLQ | M33;M12; | PVLQVRDVLVRGFGD | M63;M68;M70;M63;M68; |
| | SADAQSFLNR | M45 | SVEEVLSEAR | M70 |
| 440 | SCDQLREPMLQSADA | M33;M12; | RKHTTCCSLSHRFYR | M5;M60;M79;M43;M42; |
| | QSFLNRVCGV | M45 | LANECAQVLS | M39 |
| 441 | LREPMLQSADAQSFLN | M33;M12; | YQKVGMQKYSTLQG | M21;M34;M41;M42;M43; |
| | RVCGVSAAR | M45 | PPGTGKSHFAI | M39 |
| 442 | GCSCDQLREPMLQSA | M33;M12; | ANYQKVGMQKYSTL | M21;M34;M41;M42;M43; |
| | DAQSFLNRVC | M45 | QGPPGTGKSHF | M39 |
| 443 | IGPERTCCLCDRRATC | M4;M7; | NYQKVGMQKYSTLQ | M21;M34;M41;M42;M43; |
| | FSTASDTYA | M72 | GPPGTGKSHFA | M39 |
| 444 | GPERTCCLCDRRATCF | M4;M7; | VANYQKVGMQKYST | M21;M34;M41;M42;M43; |
| | STASDTYAC | M72 | LQGPPGTGKSH | M39 |
| 445 | FKNLREFVFKNIDGYF | M71;M19; | VRRSFYVYANGGKGF | M39;M11;M41;M39;M11; |
| | KIYSKHTPI | M16 | CKLHNWNCVN | M41 |
| 446 | VRFPNITNLCPFGEVFN | M45;M28; | AKNRARTVAGVSICS | M64;M32;M60;M30;M22; |
| | ATRFASVY | M66 | TMTNRQFHQK | M23 |
| 447 | IVRFPNITNLCPFGEVF | M45;M28; | VAGVSICSTMTNRQF | M64;M32;M60;M30;M22; |
| | NATRFASV | M66 | HQKLLKSIAA | M23 |
| 448 | ESIVRFPNITNLCPFGE | M45;M28; | AGVSICSTMTNRQFH | M64;M32;M60;M30;M22; |
| | VFNATRFA | M66 | QKLLKSIAAT | M23 |
| 449 | TESIVRFPNITNLCPFG | M45;M28; | ARTVAGVSICSTMTN | M64;M32;M60;M30;M22; |
| | EVFNATRF | M66 | RQFHQKLLKS | M23 |
| 450 | SIVRFPNITNLCPFGEV | M45;M28; | TVAGVSICSTMTNRQ | M64;M32;M60;M30;M22; |
| | FNATRFAS | M66 | FHQKLLKSIA | M23 |
| 451 | HQKLLKSIAATRGATV | M25;M2; | RARTVAGVSICSTMT | M64;M32;M60;M30;M22; |
| | VIGTSKFYG | M14 | NRQFHQKLLK | M23 |
| 452 | QKLLKSIAATRGATVV | M25;M2; | NRARTVAGVSICSTM | M64;M32;M60;M30;M22; |
| | IGTSKFYGG | M14 | TNRQFHQKLL | M23 |
| 453 | FHQKLLKSIAATRGAT | M25;M2; | RTVAGVSICSTMTNR | M64;M32;M60;M30;M22; |
| | VVIGTSKFY | M14 | QFHQKLLKSI | M23 |
| 454 | VTIDYTEISFMLWCKD | M71;M36; | KNRARTVAGVSICST | M64;M32;M60;M30;M22; |
| | GHVETFYPK | M67 | MTNRQFHQKL | M23 |
| 455 | TEISFMLWCKDGHVET | M71;M36; | SAKNRARTVAGVSIC | M64;M32;M60;M30;M22; |
| | FYPKLQSSQ | M67 | STMTNRQFHQ | M23 |
| 456 | VVKVTIDYTEISFMLW | M71;M36; | GHVMVELVAELEGIQ | M60;M54;M28;M60;M54; |
| | CKDGHVETF | M67 | YGRSGETLGV | M28 |
| 457 | IDYTEISFMLWCKDGH | M71;M36; | PHGHVMVELVAELEG | M60;M54;M28;M60;M54; |
| | VETFYPKLQ | M67 | IQYGRSGETL | M28 |
| 458 | YTEISFMLWCKDGHV | M71;M36; | RTAPHGHVMVELVA | M60;M54;M28;M60;M54; |
| | ETFYPKLQSS | M67 | ELEGIQYGRSG | M28 |
| 459 | VKVTIDYTEISFMLWC | M71;M36; | HGHVMVELVAELEGI | M60;M54;M28;M60;M54; |
| | KDGHVETFY | M67 | QYGRSGETLG | M28 |
| 460 | TIDYTEISFMLWCKDG | M71;M36; | TAPHGHVMVELVAEL | M60;M54;M28;M60;M54; |
| | HVETFYPKL | M67 | EGIQYGRSGE | M28 |
| 461 | KVTIDYTEISFMLWCK | M71;M36; | HVMVELVAELEGIQY | M60;M54;M28;M60;M54; |
| | DGHVETFYP | M67 | GRSGETLGVL | M28 |
| 462 | DYTEISFMLWCKDGH | M71;M36; | APHGHVMVELVAELE | M60;M54;M28;M60;M54; |
| | VETFYPKLQS | M67 | GIQYGRSGET | M28 |
| 463 | NSIAIPTNFTISVTTEIL | M33;M28; | SHGKQVVSDIDYVPL | M25;M34;M18;M43;M42; |
| | PVSMTKT | M45 | KSATCITRCN | M39 |
| 464 | AIPTNFTISVTTEILPVS | M33;M28; | KQVVSDIDYVPLKSA | M25;M34;M18;M43;M42; |
| | MTKTSVD | M45 | TCITRQNLGG | M39 |
| 465 | SNNSIAIPTNFTISVTTE | M33;M28; | GKQVVSDIDYVPLKS | M25;M34;M18;M43;M42; |
| | ILPVSMT | M45 | ATCITRQNLG | M39 |
| 466 | IPTNFTISVTTEILPVSM | M33;M28; | HGKQVVSDIDYVPLK | M25;M34;M18;M43;M42; |
| | TKTSVDC | M45 | SATCITRQNL | M39 |
| 467 | YSNNSIAIPTNFTISVTT | M33;M28; | VVSDIDYVPLKSATCI | M25;M34;M18;M43;M42; |
| | EILPVSM | M45 | TRCNLGGAV | M39 |
| 468 | IAIPTNFTISVTTEILPV | M33;M28; | QVVSDIDYVPLKSAT | M25;M34;M18;M43;M42; |
| | SMTKTSV | M45 | CITRQNLGGA | M39 |
| 469 | AYSNNSIAIPTNFTISV | M33;M28; | RFQTLLALHRSYLTPG | M21;M24;M70;M55;M5; |
| | TTEILPVS | M45 | DSSSGWTAG | M23 |
| 470 | SIAIPTNFTISVTTEILP | M33;M28; | FQTLLALHRSYLTPG | M21;M24;M70;M55;M5; |
| | VSMTKTS | M45 | DSSSGWTAGA | M23 |
| 471 | NNSIAIPTNFTISVTTEI | M33;M28; | IDKVLNEKCSAYTVE | M57;M43;M39;M57;M43; |
| | LPVSMTK | M45 | LGTEVNEFAC | M39 |
| 472 | VAYSNNSIAIPTNFTIS | M33;M28; | KVLNEKCSAYTVELG | M57;M43;M39;M57;M43; |
| | VTTEILPV | M45 | TEVNEFACVV | M39 |
| 473 | PKDMTYRRLISMMGF | M46;M39; | DKVLNEKCSAYTVEL | M57;M43;M39;M57;M43; |
| | KMNYQVNGYP | M44 | GTEVNEFACV | M39 |
| 474 | KDMTYRRLISMMGFK | M46;M39; | ERIDKVLNEKCSAYT | M57;M43;M39;M57;M43; |
| | MNYQVNGYPN | M44 | VELGTEVNEF | M39 |
| 475 | KCVPQADVEWKFYDA | M41;M6; | DERIDKVLNEKCSAY | M57;M43;M39;M57;M43; |
| | QPCSDKAYKI | M8 | TVELGTEVNE | M39 |
| 476 | MFHLVDFQVTIAEILLI | M4;M61; | VLNEKCSAYTVELGT | M57;M43;M39;M57;M43; |
| | IMRTFKVS | M8 | EVNEFACVVA | M39 |
| 477 | EETFKLSYGIATVREV | M12;M6; | RIDKVLNEKCSAYTV | M57;M43;M39;M57;M43; |
| | LSDRELHLS | M59 | ELGTEVNEFA | M39 |
| 478 | TFKLSYGIATVREVLS | M12;M6; | YFTSDYYQLYSTQLS | M40;M41;M43;M42;M39; |
| | DRELHLSWE | M59 | TDTGVEHVTF | M20 |
| 479 | FKLSYGIATVREVLSD | M12;M6; | LHSYFTSDYYQLYST | M40;M41;M43;M42;M39; |
| | RELHLSWEV | M59 | QLSTDTGVEH | M20 |
| 480 | ETFKLSYGIATVREVL | M12;M6; | VVLHSYFTSDYYQLY | M40;M41;M43;M42;M39; |
| | SDRELHLSW | M59 | STQLSTDTGV | M20 |
| 481 | KVDGVDVELFENKTT | M29;M28; | HSYFTSDYYQLYSTQ | M40;M41;M43;M42;M39; |
| | LPVNVAFELW | M48 | LSTDTGVEHV | M20 |
| 482 | DGVDVELFENKTTLPV | M29;M28; | SYFTSDYYQLYSTQLS | M40;M41;M43;M42;M39; |
| | NVAFELWAK | M48 | TDTGVEHVT | M20 |
| 483 | VDGVDVELFENKTTLP | M29;M28; | FTSDYYQLYSTQLST | M40;M41;M43;M42;M39; |
| | VNVAFELWA | M48 | DTGVEHVTFF | M20 |
| 484 | YQTQTNSPRRARSVAS | M5;M2;M6 | VLHSYFTSDYYQLYS | M40;M41;M43;M42;M39; |
| | QSIIAYTMS | | TQLSTDTGVE | M20 |
| 485 | SYQTQTNSPRRARSVA | M5;M2;M6 | ELWAKRNIKPVPEVKI | M54;M66;M74;M57;M49; |
| | SQSIIAYTM | | LNNLGVDIA | M9 |
| 486 | AKKPTETICAPLTVFFD | M7;M63; | KIQDSLSSTASALGKL | M40;M64;M29;M79;M22; |
| | GRVDGQVD | M49 | QDVVNQNAQ | M47 |
| 487 | IAKKPTETICAPLTVFF | M7;M63; | IGKIQDSLSSTASALG | M40;M64;M29;M79;M22; |
| | DGRVDGQV | M49 | KLQDVVNQN | M47 |
| 488 | KKPTETICAPLTVFFDG | M7;M63; | SAIGKIQDSLSSTASA | M40;M64;M29;M79;M22; |
| | RVDGQVDL | M49 | LGKLQDVVN | M47 |
| 489 | PTETICAPLTVFFDGRV | M7;M63; | IQDSLSSTASALGKLQ | M40;M64;M29;M79;M22; |
| | DGQVDLFR | M49 | DVVNQNAQA | M47 |
| 490 | TETICAPLTVFFDGRV | M7;M63; | AIGKIQDSLSSTASAL | M40;M64;M29;M79;M22; |
| | DGQVDLFRN | M49 | GKLQDVVNQ | M47 |
| 491 | KPTETICAPLTVFFDGR | M7;M63; | GKIQDSLSSTASALGK | M40;M64;M29;M79;M22; |
| | VDGQVDLF | M49 | LQDVVNQNA | M47 |
| 492 | YPANSIVCRFDTRVLS | M5;M2; | AARVVRSIFSRTLETA | M34;M2;M59;M34;M2;M59 |
| | NLNLPGCDG | M48 | QNSVRVLQK | |
| 493 | PANSIVCRFDTRVLSN | M5;M2; | NAVVKIYCPACHNSE | M68;M28;M35;M68;M28; |
| | LNLPGCDGG | M48 | VGPEHSLAEY | M35 |
| 494 | DGNAAISDYDYYRYN | M11;M74; | SIIKTIQPRVEKKKLD | M26;M29;M72;M26;M29; |
| | LPTMCDIRQL | M44 | GFMGRIRSV | M72 |
| 495 | ISDYDYYRYNLPTMC | M11;M74; | YLTSSSKTPEEHFIETI | M40;M29;M16;M40;M29; |
| | DIRQLLFVVE | M44 | SLAGSYKD | M16 |
| 496 | AISDYDYYRYNLPTM | M11;M74; | GEDIQLLKSAYENFN | M38;M60;M28;M38;M60; |
| | CDIRQLLFVV | M44 | QHEVLLAPLL | M28 |
| 497 | GNAAISDYDYYRYNL | M11;M74; | GIFGADPIHSLRVCVD | M68;M28;M31;M68;M28; |
| | PTMCDIRQLL | M44 | TVRTNVYLA | M31 |
| 498 | AAISDYDYYRYNLPT | M11;M74; | IFGADPIHSLRVCVDT | M68;M28;M31;M68;M28; |
| | MCDIRQLLFV | M44 | VRTNVYLAV | M31 |
| 499 | NAAISDYDYYRYNLPT | M11;M74; | YVGYLQPRTFLLKYN | M58;M24;M49;M15;M11; |
| | MCDIRQLLF | M44 | ENGTITDAVD | M47 |
| 500 | SGVPVVDSYYSLLMPI | M34;M39; | GYLQPRTFLLKYNEN | M58;M24;M49;M15;M11; |
| | LTLTRALTA | M14 | GTITDAVDCA | M47 |
| 501 | PGSGVPVVDSYYSLL | M34;M39; | YLQPRTFLLKYNENG | M58;M24;M49;M15;M11; |
| | MPILTLTRAL | M14 | TITDAVDCAL | M47 |
| 502 | GSGVPVVDSYYSLLM | M34;M39; | VGYLQPRTFLLKYNE | M58;M24;M49;M15;M11; |
| | PILTLTRALT | M14 | NGTITDAVDC | M47 |
| 503 | IKIVQMLSDTLKNLSD | M46;M61; | YYVGYLQPRTFLLKY | M58;M24;M49;M15;M11; |
| | RVVFVLWAH | M36 | NENGTITDAV | M47 |
| 504 | RIKIVQMLSDTLKNLS | M46;M61; | LQDLKWARFPKSDGT | M38;M28;M59;M38;M28; |
| | DRVVFVLWA | M36 | GTIYTELEPP | M59 |
| 505 | GQINDMILSLLSKGRLI | M55;M9; | AIGLALYYPSARIVYT | M64;M21;M5;M29;M38; |
| | IRENNRVV | M19 | ACSHAAVDA | M17 |
| 506 | KVFRSSVLHSTQDLFL | M72;M67; | FQEKDEDDNLIDSYF | M71;M54;M18;M15;M52; |
| | PFFSNVTWF | M6 | VVKRHTFSNY | M47 |
| 507 | RSSVLHSTQDLFLPFFS | M72;M67; | RFQEKDEDDNLIDSYF | M71;M54;M18;M15;M52; |
| | NVTWFHAI | M6 | VVKRHTFSN | M47 |
| 508 | VFRSSVLHSTQDLFLPF | M72;M67; | LHVVGPNVNKGEDIQ | M60;M77;M28;M60;M77; |
| | FSNVTWFH | M6 | LLKSAYENFN | M28 |
| 509 | SSVLHSTQDLFLPFFSN | M72;M67; | HCLHVVGPNVNKGE | M60;M77;M28;M60;M77; |
| | VTWFHAIH | M6 | DIQLLKSAYEN | M28 |
| 510 | FRSSVLHSTQDLFLPFF | M72;M67; | CLHVVGPNVNKGEDI | M60;M77;M28;M60;M77; |
| | SNVTWFHA | M6 | QLLKSAYENF | M28 |
| 511 | TLDSKTQSLLIVNNAT | M11;M73; | LEPPCRFVTDTPKGPK | M77;M2;M59;M77;M2;M59 |
| | NVVIKVCEF | M44 | VKYLYFIKG | |
| 512 | GTTLDSKTQSLLIVNN | M11;M73; | YTELEPPCRFVTDTPK | M77;M2;M59;M77;M2;M59 |
| | ATNVVIKVC | M44 | GPKVKYLYF | |
| 513 | DSKTQSLLIVNNATNV | M11;M73; | PPCRFVTDTPKGPKV | M77;M2;M59;M77;M2;M59 |
| | VIKVCEFQF | M44 | KYLYFIKGLN | |
| 514 | TTLDSKTQSLLIVNNA | M11;M73; | ELEPPCRFVTDTPKGP | M77;M2;M59;M77;M2;M59 |
| | TNVVIKVCE | M44 | KVKYLYFIK | |
| 515 | LDSKTQSLLIVNNATN | M11;M73; | EPPCRFVTDTPKGPKV | M77;M2;M59;M77;M2;M59 |
| | VVIKVCEFQ | M44 | KYLYFIKGL | |
| 516 | FKIYSKHTPINLVRDLP | M64;M36; | TELEPPCRFVTDTPKG | M77;M2;M59;M77;M2;M59 |
| | QGFSALEP | M40 | PKVKYLYFI | |
| 517 | YSKHTPINLVRDLPQG | M64;M36; | ECTTIVNGVRRSFYV | M5;M39;M41;M5;M39;M41 |
| | FSALEPLVD | M40 | YANGGKGFCK | |
| 518 | IYSKHTPINLVRDLPQG | M64;M36; | CTTIVNGVRRSFYVY | M5;M39;M41;M5;M39;M41 |
| | FSALEPLV | M40 | ANGGKGFCKL | |
| 519 | SKHTPINLVRDLPQGF | M64;M36; | YTERSEKSYELQTPFE | M25;M34;M39;M25;M34; |
| | SALEPLVDL | M40 | IKLAKKFDT | M39 |
| 520 | GYFKIYSKHTPINLVR | M64;M36; | WYTERSEKSYELQTP | M25;M34;M39;M25;M34; |
| | DLPQGFSAL | M40 | FEIKLAKKFD | M39 |
| 521 | YFKIYSKHTPINLVRDL | M64;M36; | AWYTERSEKSYELQT | M25;M34;M39;M25;M34; |
| | PQGFSALE | M40 | PFEIKLAKKF | M39 |
| 522 | KIYSKHTPINLVRDLPQ | M64;M36; | FYTSKTTVASLINTLN | M57;M72;M68;M57;M72; |
| | GFSALEPL | M40 | DLNETLVTM | M68 |
| 523 | PISFPLCANGQVFGLY | M73;M28; | SKTTVASLINTLNDLN | M57;M72;M68;M57;M72; |
| | KNTCVGSDN | M48 | ETLVTMPLG | M68 |
| 524 | EYVSQPFLMDLEGKQ | M46;M36; | YTSKTTVASLINTLND | M57;M72;M68;M57;M72; |
| | GNFKNLREFV | M20 | LNETLVTMP | M68 |
| 525 | KGVITHDVSSAINRPQI | M36;M21; | TSKTTVASLINTLNDL | M57;M72;M68;M57;M72; |
| | GVVREFLT | M70 | NETLVTMPL | M68 |
| 526 | RPLLESELVIGAVILRG | M55;M53; | KTTVASLINTLNDLNE | M57;M72;M68;M57;M72; |
| | HLRIAGHH | M14 | TLVTMPLGY | M68 |
| 527 | PLLESELVIGAVILRGH | M55;M53; | EHEIAWYTERSEKSY | M25;M30;M49;M25;M30; |
| | LRIAGHHL | M14 | ELQTPFEIKL | M49 |
| 528 | LLESELVIGAVILRGHL | M55;M53; | HEHEIAWYTERSEKS | M25;M30;M49;M25;M30; |
| | RIAGHHLG | M14 | YELQTPFEIK | M49 |
| 529 | FMLWCKDGHVETFYP | M15;M36; | ARFYFYTSKTTVASLI | M29;M72;M68;M29;M72; |
| | KLQSSQAWQP | M47 | NTLNDLNET | M68 |
| 530 | MLWCKDGHVETFYPK | M15;M36; | RFYFYTSKTTVASLIN | M29;M72;M68;M29;M72; |
| | LQSSQAWQPG | M47 | TLNDLNETL | M68 |
| 531 | KDKSAQCFKMFYKGV | M13;M52; | FYFYTSKTTVASLINT | M29;M72;M68;M29;M72; |
| | ITHDVSSAIN | M36 | LNDLNETLV | M68 |
| 532 | ETAHSCNVNRFNVAIT | M33;M25; | IIKTIQPRVEKKKLDG | M57;M26;M29;M57;M26; |
| | RAKVGILCI | M19 | FMGRIRSVY | M29 |
| 533 | SCNVNRFNVAITRAKV | M33;M25; | PQLEQPYVFIKRSDAR | M15;M46;M16;M15;M46; |
| | GILCIMSDR | M19 | TAPHGHVMV | M16 |
| 534 | HSCNVNRFNVAITRAK | M33;M25; | QLEQPYVFIKRSDART | M15;M46;M16;M15;M46; |
| | VGILCIMSD | M19 | APHGHVMVE | M16 |
| 535 | AHSCNVNRFNVAITRA | M33;M25; | LEQPYVFIKRSDARTA | M15;M46;M16;M15;M46; |
| | KVGILCIMS | M19 | PHGHVMVEL | M16 |
| 536 | TAHSCNVNRFNVAITR | M33;M25; | VLPQLEQPYVFIKRSD | M15;M46;M16;M15;M46; |
| | AKVGILCIM | M19 | ARTAPHGHV | M16 |
| 537 | CQEPKLGSLVVRCSFY | M29;M14; | LPQLEQPYVFIKRSDA | M15;M46;M16;M15;M46; |
| | EDFLEYHDV | M70 | RTAPHGHVM | M16 |
| 538 | QEPKLGSLVVRCSFYE | M29;M14; | NKEMYLKLRSDVLLP | M39;M61;M53;M39;M61; |
| | DFLEYHDVR | M70 | LTQYNRYLAL | M53 |
| 539 | LFMRIFTIGTVTLKQGE | M5;M72; | LNKEMYLKLRSDVLL | M43;M39;M61;M43;M39; |
| | IKDATPSD | M6 | PLTQYNRYLA | M61 |
| 540 | FMRIFTIGTVTLKQGEI | M5;M72; | TLVSDIDITFLKKDAP | M57;M11;M58;M57;M11; |
| | KDATPSDF | M6 | YIVGDVVQE | M58 |
| 541 | VATLQAENVTGLFKD | M36;M38; | LVSDIDITFLKKDAPYI | M57;M11;M58;M57;M11; |
| | CSKVITGLHP | M47 | VGDVVQEG | M58 |
| 542 | LQAENVTGLFKDCSK | M36;M38; | VSDIDITFLKKDAPYI | M57;M11;M58;M57;M11; |
| | VITGLHPTQA | M47 | VGDVVQEGV | M58 |
| 543 | ATLQAENVTGLFKDCS | M36;M38; | NYLKSPNFSKLINIIIW | M42;M39;M74;M42;M39; |
| | KVITGLHPT | M47 | FLLLSVCL | M74 |
| 544 | TLQAENVTGLFKDCSK | M36;M38; | YLKSPNFSKLINIIIWF | M42;M39;M74;M42;M39; |
| | VITGLHPTQ | M47 | LLLSVCLG | M74 |
| 545 | AENVTGLFKDCSKVIT | M36;M38; | SFNYLKSPNFSKLINIII | M42;M39;M74;M42;M39; |
| | GLHPTQAPT | M47 | WFLLLSV | M74 |
| 546 | QAENVTGLFKDCSKVI | M36;M38; | FNYLKSPNFSKLINIII | M42;M39;M74;M42;M39; |
| | TGLHPTQAP | M47 | WFLLLSVC | M74 |
| 547 | NVATLQAENVTGLFK | M36;M38; | EVNEFACVVADAVIK | M78;M34;M39;M78;M34; |
| | DCSKVITGLH | M47 | TLQPVSELLT | M39 |
| 548 | TSRTLSYYKLGASQRV | M25;M19; | EEAARYMRSLKVPAT | M5;M72;M35;M5;M72;M35 |
| | AGDSGFAAY | M70 | VSVSSPDAVT | |
| 549 | ATSRTLSYYKLGASQR | M25;M19; | EVEKGVLPQLEQPYV | M15;M16;M74;M15;M16; |
| | VAGDSGFAA | M70 | FIKRSDARTA | M74 |
| 550 | PFTINCQEPKLGSLVV | M29;M82; | KKDWYDFVENPDILR | M64;M21;M32;M49;M43; |
| | RCSFYEDFL | M14 | VYANLGERVR | M22 |
| 551 | TINCQEPKLGSLVVRC | M29;M82; | KIQEGVVDYGARFYF | M29;M67;M41;M29;M67; |
| | SFYEDFLEY | M14 | YTSKTTVASL | M41 |
| 552 | FTINCQEPKLGSLVVR | M29;M82; | IKIQEGVVDYGARFYF | M29;M67;M41;M29;M67; |
| | CSFYEDFLE | M14 | YTSKTTVAS | M41 |
| 553 | NRALTGIAVEQDKNT | M67;M14; | GIKIQEGVVDYGARF | M29;M67;M41;M29;M67; |
| | QEVFAQVKQI | M70 | YFYTSKTTVA | M41 |
| 554 | VYGDFSHSQLGGLHLL | M33;M19; | ELKFNPPALQDAYYR | M75;M39;M74;M75;M39; |
| | IGLAKRFKE | M61 | ARAGEAANFC | M74 |
| 555 | EHVTFFIYNKIVDEPEE | M50;M44; | NGTHWFVTQRNFYEP | M24;M31;M5;M79;M50; |
| | HVQIHTID | M49 | QIITTDNTFV | M18 |
| 556 | VTFFIYNKIVDEPEEHV | M50;M44; | AIDYKHYTPSFKKGA | M82;M27;M16;M82;M27; |
| | QIHTIDGS | M49 | KLLHKPIVWH | M16 |
| 557 | HVTFFIYNKIVDEPEEH | M50;M44; | IDYKHYTPSFKKGAK | M82;M27;M16;M82;M27; |
| | VQIHTIDG | M49 | LLHKPIVWHV | M16 |
| 558 | DWTIEYPIIGDELKINA | M73;M17; | DYKHYTPSFKKGAKL | M82;M27;M16;M82;M27; |
| | ACRKVQHM | M44 | LHKPIVWHVN | M16 |
| 559 | IIGDELKINAACRKVQ | M73;M17; | VAIDYKHYTPSFKKG | M82;M27;M16;M82;M27; |
| | HMVVKAALL | M44 | AKLLHKPIVW | M16 |
| 560 | VDWTIEYPIIGDELKIN | M73;M17; | GVFVSNGTHWFVTQR | M24;M31;M79;M50;M18; |
| | AACRKVQH | M44 | NFYEPQIITT | M35 |
| 561 | IGDELKINAACRKVQH | M73;M17; | VFVSNGTHWFVTQRN | M24;M31;M79;M50;M18; |
| | MVVKAALLA | M44 | FYEPQIITTD | M35 |
| 562 | VTLACFVLAAVYRIN | M33;M58; | IETISLAGSYKDWSYS | M64;M30;M68;M64;M30; |
| | WITGGIAIAM | M44 | GQSTQLGIE | M68 |
| 563 | TTADIVVFDEISMATN | M33;M55; | ETISLAGSYKDWSYS | M64;M30;M68;M64;M30; |
| | YDLSVVNAR | M48 | GQSTQLGIEF | M68 |
| 564 | CWTETDLTKGPHEFCS | M18;M39; | FGGCVFSYVGCHNKC | M40;M75;M55;M40;M75; |
| | QHTMLVKQG | M6 | AYWVPRASAN | M55 |
| 565 | WTETDLTKGPHEFCSQ | M18;M39; | GGCVFSYVGCHNKC | M40;M75;M55;M40;M75; |
| | HTMLVKQGD | M6 | AYWVPRASANI | M55 |
| 566 | VVYRGTTTYKLNVGD | M42;M34; | FSYVGCHNKCAYWV | M40;M75;M55;M40;M75; |
| | YFVLTSHTVM | M44 | PRASANIGCNH | M55 |
| 567 | ACFVLAAVYRINWITG | M50;M58; | GCVFSYVGCHNKCA | M40;M75;M55;M40;M75; |
| | GIAIAMACL | M44 | YWVPRASANIG | M55 |
| 568 | DKVAGFAKFLKTNCC | M55;M73; | CVFSYVGCHNKCAY | M40;M75;M55;M40;M75; |
| | RFQEKDEDDN | M8 | WVPRASANIGC | M55 |
| 569 | DETQALPQRQKKQQT | M13;M29; | SYVGCHNKCAYWVP | M40;M75;M55;M40;M75; |
| | VTLLPAADLD | M14 | RASANIGCNHT | M55 |
| 570 | IGEYTFEKGDYGDAV | M39;M9; | VFSYVGCHNKCAYW | M40;M75;M55;M40;M75; |
| | VYRGTTTYKL | M12 | VPRASANIGCN | M55 |
| 571 | QIGEYTFEKGDYGDA | M39;M9; | GICASYQTQTNSPRRA | M31;M70;M5;M25;M50; |
| | VVYRGTTTYK | M12 | RSVASQSII | M18 |
| 572 | TVVIGTSKFYGGWHN | M18;M72; | ICASYQTQTNSPRRAR | M31;M70;M5;M25;M50; |
| | MLKTVYSDVE | M6 | SVASQSIIA | M18 |
| 573 | FPPTSFGPLVRKIFVDG | M71;M1; | LVRGFGDSVEEVLSE | M55;M10;M70;M55;M10; |
| | VPFVVSTG | M54 | ARQHLKDGTC | M70 |
| 574 | VLFSTVFPPTSFGPLVR | M71;M1; | VRGFGDSVEEVLSEA | M55;M10;M70;M55;M10; |
| | KIFVDGVP | M54 | RQHLKDGTCG | M70 |
| 575 | VFPPTSFGPLVRKIFVD | M71;M1; | ATRVECTTIVNGVRR | M5;M29;M41;M5;M29;M41 |
| | GVPFVVST | M54 | SFYVYANGGK | |
| 576 | FSTVFPPTSFGPLVRKI | M71;M1; | TRVECTTIVNGVRRSF | M5;M29;M41;M5;M29;M41 |
| | FVDGVPFV | M54 | YVYANGGKG | |
| 577 | TVFPPTSFGPLVRKIFV | M71;M1; | VECTTIVNGVRRSFY | M5;M29;M41;M5;M29;M41 |
| | DGVPFVVS | M54 | VYANGGKGFC | |
| 578 | LFSTVFPPTSFGPLVRK | M71;M1; | RVECTTIVNGVRRSFY | M5;M29;M41;M5;M29;M41 |
| | IFVDGVPF | M54 | VYANGGKGF | |
| 579 | STVFPPTSFGPLVRKIF | M71;M1; | RATRVECTTIVNGVR | M5;M29;M41;M5;M29;M41 |
| | VDGVPFVV | M54 | RSFYVYANGG | |
| 580 | STDTGVEHVTFFIYNKI | M50;M47; | NRYLALYNKYKYFSG | M67;M66;M31;M67;M66; |
| | VDEPEEHV | M44 | AMDTTSYREA | M31 |
| 581 | LSTDTGVEHVTFFIYN | M50;M47; | RYLALYNKYKYFSGA | M67;M66;M31;M67;M66; |
| | KIVDEPEEH | M44 | MDTTSYREAA | M31 |
| 582 | VECFDKFKVNSTLEQY | M50;M18; | FRRAFGEYSHVVAFN | M55;M60;M56;M55;M60; |
| | VFCTVNALP | M44 | TLLFLMSFTV | M56 |
| 583 | PARARVECFDKFKVNS | M50;M18; | RAFGEYSHVVAFNTL | M55;M60;M56;M55;M60; |
| | TLEQYVFCT | M44 | LFLMSFTVLC | M56 |
| 584 | ARVECFDKFKVNSTLE | M50;M18; | AFGEYSHVVAFNTLL | M55;M60;M56;M55;M60; |
| | QYVFCTVNA | M44 | FLMSFTVLCL | M56 |
| 585 | RVECFDKFKVNSTLEQ | M50;M18; | RRAFGEYSHVVAFNT | M55;M60;M56;M55;M60; |
| | YVFCTVNAL | M44 | LLFLMSFTVL | M56 |
| 586 | ARARVECFDKFKVNS | M50;M18; | RFRRAFGEYSHVVAF | M55;M60;M56;M55;M60; |
| | TLEQYVFCTV | M44 | NTLLFLMSFT | M56 |
| 587 | RARVECFDKFKVNSTL | M50;M18; | TILDGISQYSLRLIDA | M57;M60;M54;M57;M60; |
| | EQYVFCTVN | M44 | MMFTSDLAT | M54 |
| 588 | AWNSNNLDSKVGGNY | M1;M16; | ILDGISQYSLRLIDAM | M57;M60;M54;M57;M60; |
| | NYLYRLFRKS | M37 | MFTSDLATN | M54 |
| 589 | SQLGGLHLLIGLAKRF | M19;M61; | SRIKASMPTTIAKNTV | M11;M9;M24;M11;M9;M24 |
| | KESPFELED | M20 | KSVGKFCLE | |
| 590 | LGGLHLLIGLAKRFKE | M19;M61; | SVLQQLRVESSSKLW | M11;M34;M82;M11;M34; |
| | SPFELEDFI | M20 | AQCVQLHNDI | M82 |
| 591 | GGLHLLIGLAKRFKES | M19;M61; | SEFDRDAAMQRKLEK | M57;M82;M50;M57;M82; |
| | PFELEDFIP | M20 | MADQAMTQMY | M50 |
| 592 | QLGGLHLLIGLAKRFK | M19;M61; | KSEFDRDAAMQRKLE | M57;M82;M50;M57;M82; |
| | ESPFELEDF | M20 | KMADQAMTQM | M50 |
| 593 | RIGMEVTPSGTWLTYT | M41;M19; | AKSEFDRDAAMQRK | M57;M82;M50;M57;M82; |
| | GAIKLDDKD | M23 | LEKMADQAMTQ | M50 |
| 594 | IAATRGATVVIGTSKF | M72;M2; | VAKSEFDRDAAMQR | M57;M82;M50;M57;M82; |
| | YGGWHNMLK | M17 | KLEKMADQAMT | M50 |
| 595 | KSIAATRGATVVIGTS | M72;M2; | RQCSGVTFQSAVKRTI | M33;M9;M71;M33;M9;M71 |
| | KFYGGWHNM | M17 | KGTHHWLLL | |
| 596 | SIAATRGATVVIGTSKF | M72;M2; | HINAQVAKSHNIALI | M32;M72;M68;M32;M72; |
| | YGGWHNML | M17 | WNVKDFMSLS | M68 |
| 597 | LPFGWLIVGVALLAVF | M14;M26; | RHINAQVAKSHNIALI | M32;M72;M68;M32;M72; |
| | QSASKIITL | M61 | WNVKDFMSL | M68 |
| 598 | SLPFGWLIVGVALLAV | M14;M26; | MTARTVYDDGARRV | M5;M11;M20;M5;M11;M20 |
| | FQSASKIIT | M61 | WTLMNVLTLVY | |
| 599 | DLLKYDFTEERLKLFD | M55;M7; | GDCLGDIAARDLICA | M58;M78;M65;M10;M79; |
| | RYFKYWDQT | M53 | QKFNGLTVLP | M50 |
| 600 | CRLMKTIGPDMFLGTC | M6;M16; | MMSAPPAQYELKHG | M33;M65;M66;M33;M65; |
| | RRCPAEIVD | M37 | TFTCASEYTGN | M66 |
| 601 | INDMILSLLSKGRLIIRE | M55;M9; | PAQYELKHGTFTCAS | M33;M65;M66;M33;M65; |
| | NNRVVIS | M48 | EYTGNYQCGH | M66 |
| 602 | NDMILSLLSKGRLIIRE | M55;M9; | MSAPPAQYELKHGTF | M33;M65;M66;M33;M65; |
| | NNRVVISS | M48 | TCASEYTGNY | M66 |
| 603 | MIERFVSLAIDAYPLT | M55;M5; | APPAQYELKHGTFTC | M33;M65;M66;M33;M65; |
| | KHPNQEYAD | M2 | ASEYTGNYQC | M66 |
| 604 | SIGFDYVYNPFMIDVQ | M57;M1; | SAPPAQYELKHGTFT | M33;M65;M66;M33;M65; |
| | QWGFTGNLQ | M20 | CASEYTGNYQ | M66 |
| 605 | IGFDYVYNPFMIDVQQ | M57;M1; | AQYELKHGTFTCASE | M33;M65;M66;M33;M65; |
| | WGFTGNLQS | M20 | YTGNYQCGHY | M66 |
| 606 | RVYSSANNCTFEYVSQ | M57;M1; | PPAQYELKHGTFTCA | M33;M65;M66;M33;M65; |
| | PFLMDLEGK | M20 | SEYTGNYQCG | M66 |
| 607 | GFDYVYNPFMIDVQQ | M57;M1; | LARKHTTCCSLSHRF | M81;M5;M60;M79;M43; |
| | WGFTGNLQSN | M20 | YRLANECAQV | M42 |
| 608 | PSASAFFGMSRIGMEV | M5;M28; | QPITNCVKMLCTHTG | M64;M22;M58;M64;M22; |
| | TPSGTWLTY | M16 | TGQAITVTPE | M58 |
| 609 | KFALTCFSTQFAFACP | M33;M22; | PITNCVKMLCTHTGT | M64;M22;M58;M64;M22; |
| | DGVKHVYQL | M6 | GQAITVTPEA | M58 |
| 610 | FALTCFSTQFAFACPD | M33;M22; | ITNCVKMLCTHTGTG | M64;M22;M58;M64;M22; |
| | GVKHVYQLR | M6 | QAITVTPEAN | M58 |
| 611 | NKFALTCFSTQFAFAC | M33;M22; | NWNTKHSSGVTREL | M60;M22;M74;M60;M22; |
| | PDGVKHVYQ | M6 | MRELNGGAYTR | M74 |
| 612 | IGDPAQLPAPRTLLTK | M29;M6; | VTTTLEETKFLTENLL | M50;M11;M20;M50;M11; |
| | GTLEPEYFN | M58 | LYIDINGNL | M20 |
| 613 | GDPAQLPAPRTLLTKG | M29;M6; | EVTTTLEETKFLTENL | M50;M11;M20;M50;M11; |
| | TLEPEYFNS | M58 | LLYIDINGN | M20 |
| 614 | YIGDPAQLPAPRTLLT | M29;M6; | EEKFKEGVEFLRDGW | M57;M27;M20;M57;M27; |
| | KGTLEPEYF | M58 | EIVKFISTCA | M20 |
| 615 | DPAQLPAPRTLLTKGT | M29;M6; | LEEKFKEGVEFLRDG | M57;M27;M20;M57;M27; |
| | LEPEYFNSV | M58 | WEIVKFISTC | M20 |
| 616 | WESGVKDCVVLHSYF | M46;M14; | WLEEKFKEGVEFLRD | M57;M27;M20;M57;M27; |
| | TSDYYQLYST | M20 | GWEIVKFIST | M20 |
| 617 | EKWESGVKDCVVLHS | M46;M14; | FLQSINFVRIIMRLWL | M75;M24;M10;M76;M9; |
| | YFTSDYYQLY | M20 | CWKCRSKNP | M23 |
| 618 | KWESGVKDCVVLHSY | M46;M14; | LQSINFVRIIMRLWLC | M75;M24;M10;M76;M9; |
| | FTSDYYQLYS | M20 | WKCRSKNPL | M23 |
| 619 | SVFNICQAVTANVNAL | M11;M9; | GVTRDIASTDTCFAN | M64;M22;M47;M64;M22; |
| | LSTDGNKIA | M8 | KHADFDTWFS | M47 |
| 620 | PQIAQFAPSASAFFGM | M28;M16; | VTRDIASTDTCFANK | M64;M22;M47;M64;M22; |
| | SRIGMEVTP | M70 | HADFDTWFSQ | M47 |
| 621 | WPQIAQFAPSASAFFG | M28;M16; | HWFVTQRNFYEPQIIT | M64;M10;M5;M79;M9;M23 |
| | MSRIGMEVT | M70 | TDNTFVSGN | |
| 622 | NKTTLPVNVAFELWA | M55;M28; | EDEFTPFDVVRQCSG | M46;M60;M54;M46;M60; |
| | KRNIKPVPEV | M74 | VTFQSAVKRT | M54 |
| 623 | ENKTTLPVNVAFELW | M55;M28; | AIDGGVTRDIASTDTC | M64;M9;M22;M64;M9;M22 |
| | AKRNIKPVPE | M74 | FANKHADFD | |
| 624 | HFRELGVVHNQDVNL | M53;M38; | YKAIDGGVTRDIAST | M64;M9;M22;M64;M9;M22 |
| | HSSRLSFKEL | M14 | DTCFANKHAD | |
| 625 | NTNSSPDDQIGYYRRA | M55;M16; | GYKAIDGGVTRDIAS | M64;M9;M22;M64;M9;M22 |
| | TRRIRGGDG | M71 | TDTCFANKHA | |
| 626 | NSSPDDQIGYYRRATR | M55;M16; | IDGGVTRDIASTDTCF | M64;M9;M22;M64;M9;M22 |
| | RIRGGDGKM | M71 | ANKHADFDT | |
| 627 | TNSSPDDQIGYYRRAT | M55;M16; | KAIDGGVTRDIASTDT | M64;M9;M22;M64;M9;M22 |
| | RRIRGGDGK | M71 | CFANKHADF | |
| 628 | SSPDDQIGYYRRATRR | M55;M16; | DGGVTRDIASTDTCF | M64;M9;M22;M64;M9;M22 |
| | IRGGDGKMK | M71 | ANKHADFDTW | |
| 629 | DKRTTCFSVAALTNN | M1;M22; | VYFLQSINFVRIIMRL | M75;M24;M10;M25;M9; |
| | VAFQTVKPGN | M73 | WLCWKCRSK | M23 |
| 630 | WKFYDAQPCSDKAYK | M29;M6; | MTWLDMVDTSLSGF | M64;M75;M22;M64;M75; |
| | IEELFYSYAT | M59 | KLKDCVMYASA | M22 |
| 631 | FYDAQPCSDKAYKIEE | M29;M6; | IQQVVDADSKIVQLSE | M60;M54;M49;M60;M54; |
| | LFYSYATHS | M59 | ISMDNSPNL | M49 |
| 632 | YDAQPCSDKAYKIEEL | M29;M6; | EIQQVVDADSKIVQLS | M60;M54;M49;M60;M54; |
| | FYSYATHSD | M59 | EISMDNSPN | M49 |
| 633 | KFYDAQPCSDKAYKIE | M29;M6; | TAVVIPTKKAGGTTE | M78;M58;M17;M78;M58; |
| | ELFYSYATH | M59 | MLAKALRKVP | M17 |
| 634 | EWKFYDAQPCSDKAY | M29;M6; | VETKAIVSTIQRKYKG | M40;M5;M60;M40;M5;M60 |
| | KIEELFYSYA | M59 | IKIQEGVVD | |
| 635 | YTKRNVIPTITQMNLK | M14;M58; | ETKAIVSTIQRKYKGI | M40;M5;M60;M40;M5;M60 |
| | YAISAKNRA | M59 | KIQEGVVDY | |
| 636 | QTGKIADYNYKLPDDF | M13;M67; | EQKIAEIPKEEVKPFIT | M10;M26;M24;M10;M26; |
| | TGCVIAWNS | M12 | ESKPSVEQ | M24 |
| 637 | GQTGKIADYNYKLPD | M13;M67; | TFQSAVKRTIKGTHH | M52;M9;M24;M52;M9;M24 |
| | DFTGCVIAWN | M12 | WLLLTILTSL | |
| 638 | GVYFASTEKSNIIRGWI | M6;M24; | QSAVKRTIKGTHHWL | M52;M9;M24;M52;M9;M24 |
| | FGTTLDSK | M70 | LLTILTSLLV | |
| 639 | NLKQLPFFYYSDSPCE | M32;M41; | FQSAVKRTIKGTHHW | M52;M9;M24;M52;M9;M24 |
| | SHGKQVVSD | M45 | LLLTILTSLL | |
| 640 | LKQLPFFYYSDSPCES | M32;M41; | VTFQSAVKRTIKGTH | M52;M9;M24;M52;M9;M24 |
| | HGKQVVSDI | M45 | HWLLLTILTS | |
| 641 | FVNLKQLPFFYYSDSP | M32;M41; | GSALLEDEFTPFDVVR | M46;M60;M41;M46;M60; |
| | CESHGKQVV | M45 | QCSGVTFQS | M41 |
| 642 | VNLKQLPFFYYSDSPC | M32;M41; | MDTTSYREAACCHLA | M78;M5;M79;M78;M5;M79 |
| | ESHGKQVVS | M45 | KALNDFSNSG | |
| 643 | AFVNLKQLPFFYYSDS | M32;M41; | AMDTTSYREAACCHL | M78;M5;M79;M78;M5;M79 |
| | PCESHGKQV | M45 | AKALNDFSNS | |
| 644 | LRKHFSMMILSDDAV | M57;M13; | HGGGVAGALNKATN | M78;M79;M33;M78;M79; |
| | VCFNSTYASQ | M7 | NAMQVESDDYI | M33 |
| 645 | YAYLRKHFSMMILSD | M57;M13; | GGGVAGALNKATNN | M78;M79;M33;M78;M79; |
| | DAVVCFNSTY | M7 | AMQVESDDYIA | M33 |
| 646 | YLRKHFSMMILSDDA | M57;M13; | YLKHGGGVAGALNK | M78;M79;M33;M78;M79; |
| | VVCFNSTYAS | M7 | ATNNAMQVESD | M33 |
| 647 | FYAYLRKHFSMMILSD | M57;M13; | GVAGALNKATNNAM | M78;M79;M33;M78;M79; |
| | DAVVCFNST | M7 | QVESDDYIATN | M33 |
| 648 | AYLRKHFSMMILSDD | M57;M13; | VAGALNKATNNAMQ | M78;M79;M33;M78;M79; |
| | AVVCFNSTYA | M7 | VESDDYIATNG | M33 |
| 649 | LSDRELHLSWEVGKPR | M5;M12; | LKHGGGVAGALNKA | M78;M79;M33;M78;M79; |
| | PPLNRNYVF | M70 | TNNAMQVESDD | M33 |
| 650 | SDRELHLSWEVGKPRP | M5;M12; | KHGGGVAGALNKAT | M78;M79;M33;M78;M79; |
| | PLNRNYVFT | M70 | NNAMQVESDDY | M33 |
| 651 | DALFAYTKRNVIPTIT | M14;M59; | GGVAGALNKATNNA | M78;M79;M33;M78;M79; |
| | QMNLKYAIS | M10 | MQVESDDYIAT | M33 |
| 652 | LQSLQTYVTQQLIRAA | M21;M12; | HTKKWKYPQVNGLT | M60;M54;M74;M60;M54; |
| | EIRASANLA | M49 | SIKWADNNCYL | M74 |
| 653 | GRLQSLQTYVTQQLIR | M21;M12; | KSEKQVEQKIAEIPKE | M10;M24;M74;M10;M24; |
| | AAEIRASAN | M49 | EVKPFITES | M74 |
| 654 | RLQSLQTYVTQQLIRA | M21;M12; | MKSEKQVEQKIAEIPK | M10;M24;M74;M10;M24; |
| | AEIRASANL | M49 | EEVKPFITE | M74 |
| 655 | LPQGTTLPKGFYAEGS | M75;M42; | EMKSEKQVEQKIAEIP | M10;M24;M74;M10;M24; |
| | RGGSQASSR | M45 | KEEVKPFIT | M74 |
| 656 | QLPQGTTLPKGFYAEG | M75;M42; | SEKQVEQKIAEIPKEE | M10;M24;M74;M10;M24; |
| | SRGGSQASS | M45 | VKPFITESK | M74 |
| 657 | PQGTTLPKGFYAEGSR | M75;M42; | EKQVEQKIAEIPKEEV | M10;M24;M74;M10;M24; |
| | GGSQASSRS | M45 | KPFITESKP | M74 |
| 658 | QGTTLPKGFYAEGSRG | M75;M42; | SFLEMKSEKQVEQKI | M10;M24;M74;M10;M24; |
| | GSQASSRSS | M45 | AEIPKEEVKP | M74 |
| 659 | PFLGVYYHKNNKSWM | M22;M28; | FLEMKSEKQVEQKIA | M10;M24;M74;M10;M24; |
| | ESEFRVYSSA | M70 | EIPKEEVKPF | M74 |
| 660 | DGYVMHANYIFWRNT | M41;M9; | LEMKSEKQVEQKIAEI | M10;M24;M74;M10;M24; |
| | NPIQLSSYSL | M8 | PKEEVKPFI | M74 |
| 661 | MHANYIFWRNTNPIQL | M41;M9; | IGGAKLKALNLGETF | M18;M27;M24;M18;M27; |
| | SSYSLFDMS | M8 | VTHSKGLYRK | M24 |
| 662 | GYVMHANYIFWRNTN | M41;M9; | DSAEVAVKMFDAYV | M26;M41;M37;M26;M41; |
| | PIQLSSYSLF | M8 | NTFSSTFNVPM | M37 |
| 663 | VMHANYIFWRNTNPI | M41;M9; | VGDSAEVAVKMFDA | M26;M41;M37;M26;M41; |
| | QLSSYSLFDM | M8 | YVNTFSSTFNV | M37 |
| 664 | HANYIFWRNTNPIQLS | M41;M9; | GDSAEVAVKMFDAY | M26;M41;M37;M26;M41; |
| | SYSLFDMSK | M8 | VNTFSSTFNVP | M37 |
| 665 | YVMHANYIFWRNTNP | M41;M9; | KGLYRKCVKSREETG | M60;M54;M38;M60;M54; |
| | IQLSSYSLFD | M8 | LLMPLKAPKE | M38 |
| 666 | AGLEAPFLYLYALVYF | M60;M54; | PSYAAFATAQEAYEQ | M33;M68;M31;M33;M68; |
| | LQSINFVRI | M12 | AVANGDSEVV | M31 |
| 667 | AAGLEAPFLYLYALV | M60;M54; | SKGLYRKCVKSREET | M52;M38;M47;M52;M38; |
| | YFLQSINFVR | M12 | GLLMPLKAPK | M47 |
| 668 | KLFDRYFKYWDQTYH | M50;M18; | LGPLSAQTGIAVLDM | M32;M24;M59;M32;M24; |
| | PNCVNCLDDR | M8 | CASLKELLQN | M59 |
| 669 | FDRYFKYWDQTYHPN | M50;M18; | KKWKYPQVNGLTSIK | M60;M54;M23;M60;M54; |
| | CVNCLDDRCI | M8 | WADNNCYLAT | M23 |
| 670 | WDQTYHPNCVNCLDD | M50;M18; | TKKWKYPQVNGLTSI | M60;M54;M23;M60;M54; |
| | RCILHCANFN | M8 | KWADNNCYLA | M23 |
| 671 | KYWDQTYHPNCVNCL | M50;M18; | KWKYPQVNGLTSIK | M60;M54;M23;M60;M54; |
| | DDRCILHCAN | M8 | WADNNCYLATA | M23 |
| 672 | RYFKYWDQTYHPNCV | M50;M18; | YPQVNGLTSIKWADN | M60;M54;M23;M60;M54; |
| | NCLDDRCILH | M8 | NCYLATALLT | M23 |
| 673 | YWDQTYHPNCVNCLD | M50;M18; | WKYPQVNGLTSIKW | M60;M54;M23;M60;M54; |
| | DRCILHCANF | M8 | ADNNCYLATAL | M23 |
| 674 | LFDRYFKYWDQTYHP | M50;M18; | KYPQVNGLTSIKWAD | M60;M54;M23;M60;M54; |
| | NCVNCLDDRC | M8 | NNCYLATALL | M23 |
| 675 | FKYWDQTYHPNCVNC | M50;M18; | VCINGLMLLEIKDTEK | M78;M9;M61;M78;M9;M61 |
| | LDDRCILHCA | M8 | YCALAPNMM | |
| 676 | YFKYWDQTYHPNCVN | M50;M18; | PVCINGLMLLEIKDTE | M78;M9;M61;M78;M9;M61 |
| | CLDDRCILHC | M8 | KYCALAPNM | |
| 677 | DRYFKYWDQTYHPNC | M50;M18; | CINGLMLLEIKDTEKY | M78;M9;M61;M78;M9;M61 |
| | VNCLDDRCIL | M8 | CALAPNMMV | |
| 678 | TVKPGNFNKDFYDFA | M33;M63; | NEKQEILGTVSWNLR | M75;M9;M24;M75;M9;M24 |
| | VSKGFFKEGS | M70 | EMLAHAEETR | |
| 679 | AFQTVKPGNFNKDFY | M33;M63; | SNEKQEILGTVSWNL | M75;M9;M24;M75;M9;M24 |
| | DFAVSKGFFK | M70 | REMLAHAEET | |
| 680 | VKPGNFNKDFYDFAV | M33;M63; | YLKLRSDVLLPLTQY | M69;M53;M61;M69;M53; |
| | SKGFFKEGSS | M70 | NRYLALYNKY | M61 |
| 681 | FQTVKPGNFNKDFYDF | M33;M63; | EMYLKLRSDVLLPLT | M69;M53;M61;M69;M53; |
| | AVSKGFFKE | M70 | QYNRYLALYN | M61 |
| 682 | QTVKPGNFNKDFYDF | M33;M63; | MYLKLRSDVLLPLTQ | M69;M53;M61;M69;M53; |
| | AVSKGFFKEG | M70 | YNRYLALYNK | M61 |
| 683 | AISAKNRARTVAGVSI | M60;M22; | AAFATAQEAYEQAV | M33;M47;M59;M33;M47; |
| | CSTMTNRQF | M2 | ANGDSEVVLKK | M59 |
| 684 | EFRVYSSANNCTFEYV | M1;M82; | AFATAQEAYEQAVA | M33;M47;M59;M33;M47; |
| | SQPFLMDLE | M20 | NGDSEVVLKKL | M59 |
| 685 | NLIIKNLSKSLTENKYS | M11;M73; | YAAFATAQEAYEQA | M33;M47;M59;M33;M47; |
| | QLDEEQPM | M28 | VANGDSEVVLK | M59 |
| 686 | DLLFNKVTLADAGFIK | M41;M48; | GARRVWTLMNVLTL | M37;M24;M20;M37;M24; |
| | QYGDCLGDI | M70 | VYKVYYGNALD | M20 |
| 687 | KQGNFKNLREFVFKNI | M6;M54; | DTKRGVYCCREHEHE | M75;M27;M74;M75;M27; |
| | DGYFKIYSK | M59 | IAWYTERSEK | M74 |
| 688 | PFLMDLEGKQGNFKN | M6;M54; | ESGEFKLASHMYCSF | M23;M52;M20;M23;M52; |
| | LREFVFKNID | M59 | YPPDEDEEEG | M20 |
| 689 | QPFLMDLEGKQGNFK | M6;M54; | DESGEFKLASHMYCS | M23;M52;M20;M23;M52; |
| | NLREFVFKNI | M59 | FYPPDEDEEE | M20 |
| 690 | GKQGNFKNLREFVFK | M6;M54; | TAQEAYEQAVANGD | M33;M13;M59;M33;M13; |
| | NIDGYFKIYS | M59 | SEVVLKKLKKS | M59 |
| 691 | TNSPRRARSVASQSIIA | M5;M6; | SSSKLWAQCVQLHND | M32;M82;M68;M32;M82; |
| | YTMSLGAE | M59 | ILLAKDTTEA | M68 |
| 692 | PYNSVTSSIVITSGDGT | M29;M28; | IICISTKHFYWFFSNYL | M50;M18;M23;M50;M18; |
| | TSPISEHD | M62 | KRRVVFNG | M23 |
| 693 | ECLYRNRDVDTDFVN | M26;M6; | TCANDPVGFTLKNTV | M15;M75;M10;M15;M75; |
| | EFYAYLRKHF | M59 | CTVCGMWKGY | M10 |
| 694 | YECLYRNRDVDTDFV | M26;M6; | IPTTCANDPVGFTLKN | M15;M75;M10;M15;M75; |
| | NEFYAYLRKH | M59 | TVCTVCGMW | M10 |
| 695 | PTWRVYSTGSNVFQT | M75;M82; | TTCANDPVGFTLKNT | M15;M75;M10;M15;M75; |
| | RAGCLIGAEH | M8 | VCTVCGMWKG | M10 |
| 696 | IAWNSNNLDSKVGGN | M50;M1; | PTTCANDPVGFTLKN | M15;M75;M10;M15;M75; |
| | YNYLYRLFRK | M37 | TVCTVCGMWK | M10 |
| 697 | TSTDVVYRAFDIYNDK | M79;M7; | QIPTTCANDPVGFTLK | M15;M75;M10;M15;M75; |
| | VAGFAKFLK | M41 | NTVCTVCGM | M10 |
| 698 | MLRIMASLVLARKHT | M5;M2; | VQIPTTCANDPVGFTL | M15;M75;M10;M15;M75; |
| | TCCSLSHRFY | M35 | KNTVCTVCG | M10 |
| 699 | NMLRIMASLVLARKH | M5;M2; | FIETISLAGSYKDWSY | M64;M32;M68;M64;M32; |
| | TTCCSLSHRF | M35 | SGQSTQLGI | M68 |
| 700 | EASKKPRQKRTATKA | M5;M2; | LPTEVLTEEVVLKTG | M60;M38;M62;M60;M38; |
| | YNVTQAFGRR | M70 | DLQPLEQPTS | M62 |
| 701 | AEASKKPRQKRTATK | M5;M2; | GLDYKAFKQIVESCG | M23;M42;M37;M23;M42; |
| | AYNVTQAFGR | M70 | NFKVTKGKAK | M37 |
| 702 | PIDKCSRIIPARARVEC | M33;M26; | LDYKAFKQIVESCGN | M23;M42;M37;M23;M42; |
| | FDKFKVNS | M28 | FKVTKGKAKK | M37 |
| 703 | EPEFYEAMYTPHTVLQ | M75;M39; | PFLNKVVSTTTNIVTR | M78;M23;M37;M78;M23; |
| | AVGACVLCN | M16 | CLNRVCTNY | M37 |
| 704 | NDNTSRYWEPEFYEA | M75;M39; | KCAYWVPRASANIGC | M75;M9;M38;M75;M9;M38 |
| | MYTPHTVLQA | M16 | NHTGVVGEGS | |
| 705 | TNDNTSRYWEPEFYE | M75;M39; | CAYWVPRASANIGCN | M75;M9;M38;M75;M9;M38 |
| | AMYTPHTVLQ | M16 | HTGVVGEGSE | |
| 706 | WEPEFYEAMYTPHTV | M75;M39; | SGSDVLYQPPQTSITS | M38;M81;M62;M38;M81; |
| | LQAVGACVLC | M16 | AVLQSGFRK | M62 |
| 707 | CQAVTANVNALLSTD | M10;M9; | GSDVLYQPPQTSITSA | M38;M81;M62;M38;M81; |
| | GNKIADKYVR | M8 | VLQSGFRKM | M62 |
| 708 | FWNCNVDRYPANSIV | M50;M18; | ALEPLVDLPIGINITRF | M4;M5;M1;M3;M2;M22; |
| | CRFDTRVLSN | M48 | QTLLALHR | M20 |
| 709 | WNCNVDRYPANSIVC | M50;M18; | LEPLVDLPIGINITRFQ | M4;M5;M1;M3;M2;M22; |
| | RFDTRVLSNL | M48 | TLLALHRS | 0M2 |
| 710 | LLLLFVTVYSHLLLVA | M43;M6; | NNCTFEYVSQPFLMD | M4;M1;M3;M57;M36;M46; |
| | AGLEAPFLY | M37 | LEGKQGNFKN | M20 |
| 711 | LLLFVTVYSHLLLVAA | M43;M6; | LPAPRTLLTKGTLEPE | M4;M58;M16;M1;M29;M3; |
| | GLEAPFLYL | M37 | YFNSVCRLM | M6 |
| 712 | DNKLKAHKDKSAQCF | M13;M63; | RTLLTKGTLEPEYFNS | M4;M13;M16;M1;M3;M6; |
| | KMFYKGVITH | M52 | VCRLMKTIG | M15 |
| 713 | NKLKAHKDKSAQCFK | M13;M63; | PAPRTLLTKGTLEPEY | M4;M13;M58;M16;M1;M3; |
| | MFYKGVITHD | M52 | FNSVCRLMK | M6 |
| 714 | ELTSMKYFVKIGPERT | M27;M28; | APRTLLTKGTLEPEYF | M4;M13;M58;M16;M1;M3; |
| | CCLCDRRAT | M66 | NSVCRLMKT | M6 |
| 715 | AHGFELTSMKYFVKIG | M27;M28; | CLDDRCILHCANFNV | M4;M64;M24;M1;M3;M48; |
| | PERTCCLCD | M66 | LFSTVFPPTS | M23 |
| 716 | VLWAHGFELTSMKYF | M27;M28; | NCVNCLDDRCILHCA | M4;M64;M24;M1;M3;M48; |
| | VKIGPERTCC | M66 | NFNVLFSTVF | M23 |
| 717 | TSMKYFVKIGPERTCC | M27;M28; | CVNCLDDRCILHCAN | M4;M64;M24;M1;M3;M48; |
| | LCDRRATCF | M66 | FNVLFSTVFP | M23 |
| 718 | HGFELTSMKYFVKIGP | M27;M28; | NCLDDRCILHCANFN | M4;M64;M24;M1;M3;M48; |
| | ERTCCLCDR | M66 | VLFSTVFPPT | M23 |
| 719 | LWAHGFELTSMKYFV | M27;M28; | VNCLDDRCILHCANF | M4;M64;M24;M1;M3;M48; |
| | KIGPERTCCL | M66 | NVLFSTVFPP | M23 |
| 720 | GFELTSMKYFVKIGPE | M27;M28; | FLYLYALVYFLQSINF | M4;M12;M54;M19;M60; |
| | RTCCLCDRR | M66 | VRIIMRLWL | M25;M3 |
| 721 | FVLWAHGFELTSMKY | M27;M28; | PFLYLYALVYFLQSIN | M4;M12;M54;M19;M60; |
| | FVKIGPERTC | M66 | FVRIIMRLW | M25;M3 |
| 722 | FELTSMKYFVKIGPER | M27;M28; | NRDVDTDFVNEFYAY | M4;M71;M16;M3;M6;M52; |
| | TCCLCDRRA | M66 | LRKHFSMMIL | M26 |
| 723 | WAHGFELTSMKYFVK | M27;M28; | LYLYALVYFLQSINFV | M4;M54;M19;M60;M25;M3; |
| | IGPERTCCLC | M66 | RIIMRLWLC | M9 |
| 724 | VFVLWAHGFELTSMK | M27;M28; | AGCFVDDIVKTDGTL | M9;M10;M7;M3;M6;M8; |
| | YFVKIGPERT | M66 | MIERFVSLAI | M11 |
| 725 | LTSMKYFVKIGPERTC | M27;M28; | GAGCFVDDIVKTDGT | M9;M10;M7;M3;M6;M8; |
| | CLCDRRATC | M66 | LMIERFVSLA | M11 |
| 726 | LQHRLYECLYRNRDV | M47;M6; | LKSFTVEKGIYQTSNF | M1;M25;M3;M37;M41;M8; |
| | DTDFVNEFYA | M59 | RVQPTESIV | M23 |
| 727 | SSQCVNLTTRTQLPPA | M9;M2; | TLKSFTVEKGIYQTSN | M1;M25;M3;M37;M41;M8; |
| | YTNSFTRGV | M24 | FRVQPTESI | M23 |
| 728 | LVSSQCVNLTTRTQLP | M9;M2; | AEIRASANLAATKMS | M4;M64;M40;M3;M48;M27; |
| | PAYTNSFTR | M24 | ECVLGQSKRV | M23 |
| 729 | VSSQCVNLTTRTQLPP | M9;M2; | AAEIRASANLAATKM | M4;M64;M40;M3;M48;M27; |
| | AYTNSFTRG | M24 | SECVLGQSKR | M23 |
| 730 | VAFQTVKPGNFNKDF | M63;M59; | YGGWHNMLKTVYSD | M32;M6;M45;M3;M18;M43; |
| | YDFAVSKGFF | M70 | VENPHLMGWDY | M59 |
| 731 | LGVYYHKNNKSWME | M41;M28; | KFYGGWHNMLKTVY | M32;M6;M45;M3;M18;M43; |
| | SEFRVYSSANN | M70 | SDVENPHLMGW | M59 |
| 732 | SSQAWQPGVAMPNLY | M9;M12; | FYGGWHNMLKTVYS | M32;M6;M45;M3;M18;M43; |
| | KMQRMLLEKC | M23 | DVENPHLMGWD | M59 |
| 733 | YVFCTVNALPETTADI | M38;M28; | GGWHNMLKTVYSDV | M32;M6;M45;M3;M18;M43; |
| | VVFDEISMA | M49 | ENPHLMGWDYP | M59 |
| 734 | MHAASGNLLLDKRTT | M50;M7; | SKFYGGWHNMLKTV | M32;M6;M45;M3;M18;M43; |
| | CFSVAALTNN | M9 | YSDVENPHLMG | M59 |
| 735 | AMHAASGNLLLDKRT | M50;M7; | FTRGVYYPDKVFRSS | M4;M12;M14;M1;M29;M72; |
| | TCFSVAALTN | M9 | VLHSTQDLFL | M67 |
| 736 | HAASGNLLLDKRTTCF | M50;M7; | SFTRGVYYPDKVFRS | M4;M12;M14;M1;M29;M72; |
| | SVAALTNNV | M9 | SVLHSTQDLF | M67 |
| 737 | SVCRLMKTIGPDMFLG | M6;M59; | VLTSHTVMPLSAPTL | M28;M54;M29;M45;M51; |
| | TCRRCPAEI | M37 | VPQEHYVRIT | M46;M39 |
| 738 | SYECDIPIGAGICASYQ | M31;M28; | IPYNSVTSSIVITSGDG | M28;M14;M12;M29;M45; |
| | TQTNSPRR | M70 | TTSPISEH | M62;M43 |
| 739 | SQCVNLTTRTQLPPAY | M33;M9; | EKALKYLPIDKCSRIIP | M13;M28;M14;M29;M51; |
| | TNSFTRGVY | M2 | ARARVECF | M33;M22 |
| 740 | VYDNKLKAHKDKSAQ | M13;M21; | CVVLHSYFTSDYYQL | M40;M3;M41;M43;M42; |
| | CFKMFYKGVI | M63 | YSTQLSTDTG | M39;M20 |
| 741 | HRFYRLANECAQVLSE | M79;M43; | RFDNPVLPFNDGVYF | M64;M12;M28;M24;M6; |
| | MVMCGGSLY | M28 | ASTEKSNIIR | M45;M22 |
| 742 | LKYAISAKNRARTVA | M35;M2; | DCLGDIAARDLICAQ | M58;M78;M65;M10;M3; |
| | GVSICSTMTN | M18 | KFNGLTVLPP | M79;M50 |
| 743 | NLKYAISAKNRARTV | M35;M2; | CLGDIAARDLICAQKF | M58;M78;M65;M10;M3; |
| | AGVSICSTMT | M18 | NGLTVLPPL | M79;M50 |
| 744 | VKQIYKTPPIKDFGGF | M33;M32; | DYFVLTSHTVMPLSA | M54;M60;M29;M45;M51; |
| | NFSQILPDP | M28 | PTLVPQEHYV | M46;M39 |
| 745 | VDLFRNARNGVLITEG | M33;M30; | LGDISGINASVVNIQK | M28;M14;M70;M80;M45; |
| | SVKGLQPSV | M22 | EIDRLNEVA | M35;M47 |
| 746 | QVDLFRNARNGVLITE | M33;M30; | DLGDISGINASVVNIQ | M28;M14;M70;M80;M45; |
| | GSVKGLQPS | M22 | KEIDRLNEV | M35;M47 |
| 747 | FNVLFSTVFPPTSFGPL | M71;M72; | ILGAGCFVDDIVKTD | M9;M10;M7;M6;M63;M8; |
| | VRKIFVDG | M54 | GTLMIERFVS | M11 |
| 748 | ASAFFGMSRIGMEVTP | M5;M28; | LGAGCFVDDIVKTDG | M9;M10;M7;M6;M63;M8; |
| | SGTWLTYTG | M23 | TLMIERFVSL | M11 |
| 749 | AFFGMSRIGMEVTPSG | M5;M28; | EIKDATPSDFVRATAT | M9;M14;M34;M45;M33;M8; |
| | TWLTYTGAI | M23 | IPIQASLPF | M11 |
| 750 | SAFFGMSRIGMEVTPS | M5;M28; | PFNDGVYFASTEKSNI | M64;M12;M24;M10;M6; |
| | GTWLTYTGA | M23 | IRGWIFGTT | M45;M22 |
| 751 | FFGMSRIGMEVTPSGT | M5;M28; | FNDGVYFASTEKSNII | M64;M12;M24;M10;M6; |
| | WLTYTGAIK | M23 | RGWIFGTTL | M45;M22 |
| 752 | DKCSRIIPARARVECFD | M33;M9; | NDGVYFASTEKSNIIR | M64;M12;M24;M10;M6; |
| | KFKVNSTL | M28 | GWIFGTTLD | M45;M22 |
| 753 | YANSVFNICQAVTAN | M11;M39; | VTPSGTWLTYTGAIK | M19;M10;M7;M41;M8;M35; |
| | VNALLSTDGN | M9 | LDDKDPNFKD | M11 |
| 754 | ANSVFNICQAVTANV | M11;M39; | EVTPSGTWLTYTGAI | M19;M10;M7;M41;M8;M35; |
| | NALLSTDGNK | M9 | KLDDKDPNFK | M11 |
| 755 | EVRQIAPGQTGKIADY | M80;M67; | SEETGTLIVNSVLLFL | M73;M14;M7;M50;M18; |
| | NYKLPDDFT | M38 | AFVVFLLVT | M11;M44 |
| 756 | IAPGQTGKIADYNYKL | M80;M67; | LFDMSKFPLKLRGTA | M54;M14;M60;M6;M67;M8; |
| | PDDFTGCVI | M38 | VMSLKEGQIN | M59 |
| 757 | RQIAPGQTGKIADYNY | M80;M67; | GVPVVDSYYSLLMPI | M58;M16;M14;M34;M8; |
| | KLPDDFTGC | M38 | LTLTRALTAE | M17;M39 |
| 758 | QIAPGQTGKIADYNYK | M80;M67; | TPTWRVYSTGSNVFQ | M75;M14;M5;M6;M41;M8; |
| | LPDDFTGCV | M38 | TRAGCLIGAE | M82 |
| 759 | VRQIAPGQTGKIADYN | M80;M67; | QLTPTWRVYSTGSNV | M75;M14;M5;M6;M41;M8; |
| | YKLPDDFTG | M38 | FQTRAGCLIG | M82 |
| 760 | QPYRVVVLSFELLHAP | M46;M34; | LTPTWRVYSTGSNVF | M75;M14;M5;M6;M41;M8; |
| | ATVCGPKKS | M39 | QTRAGCLIGA | M82 |
| 761 | RVVVLSFELLHAPATV | M46;M34; | ALPETTADIVVFDEIS | M28;M55;M7;M38;M48; |
| | CGPKKSTNL | M39 | MATNYDLSV | M33;M49 |
| 762 | PYRVVVLSFELLHAPA | M46;M34; | NALPETTADIVVFDEI | M28;M55;M7;M38;M48; |
| | TVCGPKKST | M39 | SMATNYDLS | M33;M49 |
| 763 | YQPYRVVVLSFELLHA | M46;M34; | LPETTADIVVFDEISM | M28;M55;M7;M38;M48; |
| | PATVCGPKK | M39 | ATNYDLSVV | M33;M49 |
| 764 | YRVVVLSFELLHAPAT | M46;M34; | YYSLLMPILTLTRALT | M12;M58;M16;M30;M8; |
| | VCGPKKSTN | M39 | AESHVDTDL | M17;M15 |
| 765 | VVVLSFELLHAPATVC | M46;M34; | SLLMPILTLTRALTAE | M12;M58;M16;M30;M8; |
| | GPKKSTNLV | M39 | SHVDTDLTK | M17;M15 |
| 766 | MKTIGPDMFLGTCRRC | M71;M16; | YSLLMPILTLTRALTA | M12;M58;M16;M30;M8; |
| | PAEIVDTVS | M37 | ESHVDTDLT | M17;M15 |
| 767 | TIGPDMFLGTCRRCPA | M71;M16; | SYYSLLMPILTLTRAL | M12;M58;M16;M30;M8; |
| | EIVDTVSAL | M37 | TAESHVDTD | M17;M15 |
| 768 | RLMKTIGPDMFLGTCR | M71;M16; | LMPILTLTRALTAESH | M12;M58;M16;M30;M8; |
| | RCPAEIVDT | M37 | VDTDLTKPY | M17;M15 |
| 769 | KTIGPDMFLGTCRRCP | M71;M16; | LLMPILTLTRALTAES | M12;M58;M16;M30;M8; |
| | AEIVDTVSA | M37 | HVDTDLTKP | M17;M15 |
| 770 | LMKTIGPDMFLGTCRR | M71;M16; | TVSALVYDNKLKAH | M13;M21;M28;M16;M7; |
| | CPAEIVDTV | M37 | KDKSAQCFKMF | M63;M17 |
| 771 | IGPDMFLGTCRRCPAEI | M71;M16; | DYILANTCTERLKLFA | M64;M40;M6;M48;M63; |
| | VDTVSALV | M37 | AETLKATEE | M49;M26 |
| 772 | GQVFGLYKNTCVGSD | M73;M28; | YILANTCTERLKLFAA | M64;M40;M6;M48;M63; |
| | NVTDFNAIAT | M59 | ETLKATEET | M49;M26 |
| 773 | VFGLYKNTCVGSDNV | M73;M28; | DDFVEIIKSQDLSVVS | M4;M48;M18;M8;M43;M15; |
| | TDFNAIATCD | M59 | KVVKVTIDY | M35 |
| 774 | NGQVFGLYKNTCVGS | M73;M28; | ARMAGNGGDAALAL | M13;M56;M58;M53;M51; |
| | DNVTDFNAIA | M59 | LLLDRLNQLES | M17;M11 |
| 775 | QVFGLYKNTCVGSDN | M73;M28; | SYGIATVREVLSDREL | M28;M7;M5;M6;M49;M11; |
| | VTDFNAIATC | M59 | HLSWEVGKP | M59 |
| 776 | VLSFELLHAPATVCGP | M46;M39; | LSYGIATVREVLSDRE | M28;M7;M5;M6;M49;M11; |
| | KKSTNLVKN | M27 | LHLSWEVGK | M59 |
| 777 | SPYNSQNAVASKILGL | M60;M39; | PSRILGAGCFVDDIVK | M9;M10;M6;M63;M8;M11; |
| | PTQTVDSSQ | M54 | TDGTLMIER | M20 |
| 778 | GAVILRGHLRIAGHHL | M55;M58; | GEVFNATRFASVYAW | M19;M16;M55;M25;M53; |
| | GRCDIKDLP | M17 | NRKRISNCVA | M2;M20 |
| 779 | TLPVNVAFELWAKRNI | M55;M66; | NDPFLGVYYHKNNKS | M4;M21;M28;M70;M1;M37; |
| | KPVPEVKIL | M74 | WMESEFRVYS | M22 |
| 780 | PVNVAFELWAKRNIKP | M55;M66; | CNDPFLGVYYHKNN | M4;M21;M28;M70;M1;M37; |
| | VPEVKILNN | M74 | KSWMESEFRVY | M22 |
| 781 | LPVNVAFELWAKRNI | M55;M66; | QFCNDPFLGVYYHKN | M4;M21;M28;M70;M1;M37; |
| | KPVPEVKILN | M74 | NKSWMESEFR | M22 |
| 782 | VNFNFNGLTGTGVLTE | M39;M38; | FCNDPFLGVYYHKNN | M4;M21;M28;M70;M1;M37; |
| | SNKKFLPFQ | M61 | KSWMESEFRV | M22 |
| 783 | CLVGLMWLSYFIASFR | M35;M26; | RLQSLENVAFNVVNK | M4;M71;M16;M24;M1;M27; |
| | LFARTRSMW | M16 | GHFDGQQGEV | M15 |
| 784 | ACLVGLMWLSYFIASF | M35;M26; | KPVPEVKILNNLGVDI | M9;M54;M48;M57;M27; |
| | RLFARTRSM | M16 | AANTVIWDY | M11;M44 |
| 785 | AARDLICAQKFNGLTV | M78;M39; | ISGINASVVNIQKEIDR | M28;M14;M70;M80;M35; |
| | LPPLLTDEM | M58 | LNEVAKNL | M82;M47 |
| 786 | GATVVIGTSKFYGGW | M18;M72; | LTGHMLDMYSVMLT | M64;M31;M7;M34;M61; |
| | HNMLKTVYSD | M17 | NDNTSRYWEPE | M36;M22 |
| 787 | RGATVVIGTSKFYGG | M18;M72; | GHMLDMYSVMLTND | M64;M31;M7;M34;M61; |
| | WHNMLKTVYS | M17 | NTSRYWEPEFY | M36;M22 |
| 788 | NEFYAYLRKHFSMMIL | M57;M13; | TGHMLDMYSVMLTN | M64;M31;M7;M34;M61; |
| | SDDAVVCFN | M71 | DNTSRYWEPEF | M36;M22 |
| 789 | NKCVNFNFNGLTGTG | M42;M39; | TPINLVRDLPQGFSAL | M64;M40;M31;M45;M36; |
| | VLTESNKKFL | M38 | EPLVDLPIG | M52;M47 |
| 790 | KNKCVNFNFNGLTGT | M42;M39; | FPLKLRGTAVMSLKE | M54;M14;M60;M6;M67; |
| | GVLTESNKKF | M38 | GQINDMILSL | M49;M59 |
| 791 | KCVNFNFNGLTGTGV | M42;M39; | KFPLKLRGTAVMSLK | M54;M14;M60;M6;M67; |
| | LTESNKKFLP | M38 | EGQINDMILS | M49;M59 |
| 792 | VKNKCVNFNFNGLTG | M42;M39; | DKFKVNSTLEQYVFC | M40;M29;M6;M44;M50; |
| | TGVLTESNKK | M38 | TVNALPETTA | M18;M47 |
| 793 | SFVIRGDEVRQIAPGQ | M33;M80; | PVVDSYYSLLMPILTL | M58;M16;M34;M8;M17; |
| | TGKIADYNY | M62 | TRALTAESH | M15;M39 |
| 794 | DSFVIRGDEVRQIAPG | M33;M80; | VPVVDSYYSLLMPILT | M58;M16;M34;M8;M17; |
| | QTGKIADYN | M62 | LTRALTAES | M15;M39 |
| 795 | LAMDEFIERYKLEGYA | M15;M58; | IDGYFKIYSKHTPINL | M64;M40;M71;M16;M36; |
| | FEHIVYGDF | M16 | VRDLPQGFS | M15;M52 |
| 796 | EIDFLELAMDEFIERYK | M15;M58; | NNTVYDPLQPELDSF | M70;M34;M6;M63;M72; |
| | LEGYAFEH | M16 | KEELDKYFKN | M47;M59 |
| 797 | MEIDFLELAMDEFIER | M15;M58; | NTVYDPLQPELDSFK | M70;M34;M6;M63;M72; |
| | YKLEGYAFE | M16 | EELDKYFKNH | M47;M59 |
| 798 | ELAMDEFIERYKLEGY | M15;M58; | YSFVSEETGTLIVNSV | M56;M73;M7;M50;M18; |
| | AFEHIVYGD | M16 | LLFLAFVVF | M11;M44 |
| 799 | FLELAMDEFIERYKLE | M15;M58; | FSVAALTNNVAFQTV | M73;M1;M25;M29;M6;M22; |
| | GYAFEHIVY | M16 | KPGNFNKDFY | M59 |
| 800 | IDFLELAMDEFIERYKL | M15;M58; | IMRTFKVSIWNLDYII | M56;M1;M5;M50;M18;M44; |
| | EGYAFEHI | M16 | NLIIKNLSK | M20 |
| 801 | AMDEFIERYKLEGYAF | M15;M58; | RKHFSMMILSDDAVV | M13;M21;M7;M53;M48; |
| | EHIVYGDFS | M16 | CFNSTYASQG | M49;M22 |
| 802 | LELAMDEFIERYKLEG | M15;M58; | KHFSMMILSDDAVVC | M13;M21;M7;M53;M48; |
| | YAFEHIVYG | M16 | FNSTYASQGL | M49;M22 |
| 803 | DFLELAMDEFIERYKL | M15;M58; | ALPQRQKKQQTVTLL | M54;M14;M60;M29;M46; |
| | EGYAFEHIV | M16 | PAADLDDFSK | M26;M39 |
| 804 | MACLVGLMWLSYFIA | M60;M26; | LPQRQKKQQTVTLLP | M54;M14;M60;M29;M46; |
| | SFRLFARTRS | M16 | AADLDDFSKQ | M26;M39 |
| 805 | AMACLVGLMWLSYFI | M60;M26; | QRQKKQQTVTLLPAA | M54;M14;M60;M29;M46; |
| | ASFRLFARTR | M16 | DLDDFSKQLQ | M26;M39 |
| 806 | VVIGIVNNTVYDPLQP | M34;M72; | PQRQKKQQTVTLLPA | M54;M14;M60;M29;M46; |
| | ELDSFKEEL | M47 | ADLDDFSKQL | M26;M39 |
| 807 | VIGIVNNTVYDPLQPE | M34;M72; | IPIGAGICASYQTQTN | M28;M19;M31;M70;M25; |
| | LDSFKEELD | M47 | SPRRARSVA | M50;M18 |
| 808 | DVVIGIVNNTVYDPLQ | M34;M72; | DIPIGAGICASYQTQT | M28;M19;M31;M70;M25; |
| | PELDSFKEE | M47 | NSPRRARSV | M50;M18 |
| 809 | GNCDVVIGIVNNTVYD | M34;M72; | LALSKGVHFVCNLLL | M6;M50;M18;M8;M49;M22; |
| | PLQPELDSF | M47 | LFVTVYSHLL | M23 |
| 810 | CDVVIGIVNNTVYDPL | M34;M72; | SKGVHFVCNLLLLFV | M21;M6;M50;M8;M43;M22; |
| | QPELDSFKE | M47 | TVYSHLLLVA | M23 |
| 811 | SGNCDVVIGIVNNTVY | M34;M72; | LSKGVHFVCNLLLLF | M21;M6;M50;M8;M43;M22; |
| | DPLQPELDS | M47 | VTVYSHLLLV | M23 |
| 812 | NCDVVIGIVNNTVYDP | M34;M72; | ADKYVRNLQHRLYE | M54;M60;M2;M37;M44; |
| | LQPELDSFK | M47 | CLYRNRDVDTD | M52;M47 |
| 813 | LLDKRTTCFSVAALTN | M73;M29; | REEAIRHVRAWIGFD | M64;M32;M14;M48;M57; |
| | NVAFQTVKP | M22 | VEGCHATREA | M69;M20 |
| 814 | LLLDKRTTCFSVAALT | M73;M29; | VTQQLIRAAEIRASAN | M64;M40;M21;M12;M48; |
| | NNVAFQTVK | M22 | LAATKMSEC | M22;M23 |
| 815 | YYKKVDGVVQQLPET | M71;M60; | NFYEPQIITTDNTFVS | M64;M12;M10;M7;M30;M9; |
| | YFTQSRNLQE | M54 | GNCDVVIGI | M23 |
| 816 | YKKVDGVVQQLPETY | M71;M60; | YEPQIITTDNTFVSGN | M64;M12;M10;M7;M30;M9; |
| | FTQSRNLQEF | M54 | CDVVIGIVN | M23 |
| 817 | EQDKNTQEVFAQVKQ | M55;M18; | EPQIITTDNTFVSGNC | M64;M12;M10;M7;M30;M9; |
| | IYKTPPIKDF | M56 | DVVIGIVNN | M23 |
| 818 | VEQDKNTQEVFAQVK | M55;M18; | FYEPQIITTDNTFVSG | M64;M12;M10;M7;M30;M9; |
| | QIYKTPPIKD | M56 | NCDVVIGIV | M23 |
| 819 | AVEQDKNTQEVFAQV | M55;M18; | RNFYEPQIITTDNTFV | M64;M12;M10;M7;M30;M9; |
| | KQIYKTPPIK | M56 | SGNCDVVIG | M23 |
| 820 | IAVEQDKNTQEVFAQ | M55;M18; | VQPTESIVRFPNITNLC | M21;M28;M66;M48;M41; |
| | VKQIYKTPPI | M56 | PFGEVFNA | M26;M22 |
| 821 | QDKNTQEVFAQVKQI | M55;M18; | RVQPTESIVRFPNITNL | M21;M28;M66;M48;M41; |
| | YKTPPIKDFG | M56 | CPFGEVFN | M26;M22 |
| 822 | KNTQEVFAQVKQIYK | M55;M18; | ALSKGVHFVCNLLLL | M6;M50;M18;M8;M43;M22; |
| | TPPIKDFGGF | M32 | FVTVYSHLLL | M23 |
| 823 | NTQEVFAQVKQIYKTP | M55;M18; | VTLADAGFIKQYGDC | M21;M70;M48;M57;M63; |
| | PIKDFGGFN | M32 | LGDIAARDLI | M41;M27 |
| 824 | QPRTFLLKYNENGTIT | M15;M11; | KVTLADAGFIKQYGD | M21;M70;M48;M57;M63; |
| | DAVDCALDP | M58 | CLGDIAARDL | M41;M27 |
| 825 | ADLVYALRHFDEGNC | M52;M17; | NKVTLADAGFIKQYG | M21;M70;M48;M57;M63; |
| | DTLKEILVTY | M49 | DCLGDIAARD | M41;M27 |
| 826 | INRPQIGVVREFLTRNP | M11;M73; | FNKVTLADAGFIKQY | M21;M70;M48;M57;M63; |
| | AWRKAVFI | M49 | GDCLGDIAAR | M41;M27 |
| 827 | RPQIGVVREFLTRNPA | M11;M73; | SNFGAISSVLNDILSRL | M58;M53;M6;M48;M50; |
| | WRKAVFISP | M49 | DKVEAEVQ | M17;M15 |
| 828 | NRPQIGVVREFLTRNP | M11;M73; | NFGAISSVLNDILSRL | M58;M53;M6;M48;M50; |
| | AWRKAVFIS | M49 | DKVEAEVQI | M17;M15 |
| 829 | SAINRPQIGVVREFLTR | M11;M73; | FGAISSVLNDILSRLD | M58;M53;M6;M48;M50; |
| | NPAWRKAV | M49 | KVEAEVQID | M17;M15 |
| 830 | AINRPQIGVVREFLTR | M11;M73; | LEDFIPMDSTVKNYFI | M19;M70;M25;M61;M18; |
| | NPAWRKAVF | M49 | TDAQTGSSK | M43;M39 |
| 831 | PQIGVVREFLTRNPAW | M11;M73; | EDFIPMDSTVKNYFIT | M19;M70;M25;M61;M18; |
| | RKAVFISPY | M49 | DAQTGSSKC | M43;M39 |
| 832 | SSAINRPQIGVVREFLT | M11;M73; | HKNNKSWMESEFRV | M64;M70;M5;M2;M48;M41; |
| | RNPAWRKA | M49 | YSSANNCTFEY | M82 |
| 833 | ANQFNSAIGKIQDSLSS | M79;M29; | FGDFIQTTPGSGVPVV | M40;M9;M58;M16;M34;M8; |
| | TASALGKL | M64 | DSYYSLLMP | M11 |
| 834 | TKHPNQEYADVFHLY | M71;M9; | IAQFAPSASAFFGMSR | M71;M28;M16;M70;M5; |
| | LQYIRKLHDE | M61 | IGMEVTPSG | M18;M17 |
| 835 | ALALLLLDRLNQLESK | M53;M11; | APSASAFFGMSRIGM | M71;M28;M16;M70;M5; |
| | MSGKGQQQQ | M58 | EVTPSGTWLT | M18;M17 |
| 836 | DQDALFAYTKRNVIPT | M55;M59; | AQFAPSASAFFGMSRI | M71;M28;M16;M70;M5; |
| | ITQMNLKYA | M10 | GMEVTPSGT | M18;M17 |
| 837 | VAGDSGFAAYSRYRIG | M71;M13; | QIAQFAPSASAFFGMS | M71;M28;M16;M70;M5; |
| | NYKLNTDHS | M41 | RIGMEVTPS | M18;M17 |
| 838 | QRVAGDSGFAAYSRY | M71;M13; | QFAPSASAFFGMSRIG | M71;M28;M16;M70;M5; |
| | RIGNYKLNTD | M41 | MEVTPSGTW | M18;M17 |
| 839 | GASQRVAGDSGFAAY | M71;M13; | FAPSASAFFGMSRIGM | M71;M28;M16;M70;M5; |
| | SRYRIGNYKL | M41 | EVTPSGTWL | M18;M17 |
| 840 | ASQRVAGDSGFAAYS | M71;M13; | NVTWFHAIHVSGTNG | M64;M40;M29;M45;M15; |
| | RYRIGNYKLN | M41 | TKRFDNPVLP | M22;M23 |
| 841 | RVAGDSGFAAYSRYRI | M71;M13; | TDGNKIADKYVRNLQ | M54;M60;M37;M57;M27; |
| | GNYKLNTDH | M41 | HRLYECLYRN | M44;M20 |
| 842 | SQRVAGDSGFAAYSR | M71;M13; | GAGICASYQTQTNSP | M19;M31;M70;M5;M25; |
| | YRIGNYKLNT | M41 | RRARSVASQS | M50;M18 |
| 843 | PETYFTQSRNLQEFKP | M71;M75; | AGICASYQTQTNSPRR | M19;M31;M70;M5;M25; |
| | RSQMEIDFL | M31 | ARSVASQSI | M50;M18 |
| 844 | NVAFELWAKRNIKPVP | M49;M66; | SNGTITVEELKKLLEQ | M4;M58;M16;M53;M17; |
| | EVKILNNLG | M74 | WNLVIGFLF | M52;M47 |
| 845 | VAFELWAKRNIKPVPE | M49;M66; | ENPDILRVYANLGER | M64;M11;M21;M32;M48; |
| | VKILNNLGV | M74 | VRQALLKTVQ | M49;M22 |
| 846 | NLNESLIDLQELGKYE | M17;M61; | SLSHRFYRLANECAQ | M28;M5;M79;M42;M43; |
| | QYIKWPWYI | M70 | VLSEMVMCGG | M46;M39 |
| 847 | NESLIDLQELGKYEQY | M17;M61; | LSHRFYRLANECAQV | M28;M5;M79;M42;M43; |
| | IKWPWYIWL | M70 | LSEMVMCGGS | M46;M39 |
| 848 | LNESLIDLQELGKYEQ | M17;M61; | QTVTLLPAADLDDFS | M71;M54;M58;M55;M53; |
| | YIKWPWYIW | M70 | KQLQQSMSSA | M26;M39 |
| 849 | VPEVKILNNLGVDIAA | M57;M9; | IRVGARKSAPLIELCV | M64;M40;M21;M7;M57; |
| | NTVIWDYKR | M27 | DEAGSKSPI | M22;M23 |
| 850 | CELYHYQECVRGTTV | M57;M27; | YIRVGARKSAPLIELC | M64;M40;M21;M7;M57; |
| | LLKEPCSSGT | M20 | VDEAGSKSP | M22;M23 |
| 851 | ELYHYQECVRGTTVL | M57;M27; | RVGARKSAPLIELCV | M64;M40;M21;M7;M57; |
| | LKEPCSSGTY | M20 | DEAGSKSPIQ | M22;M23 |
| 852 | TCELYHYQECVRGTT | M57;M27; | VGARKSAPLIELCVDE | M64;M40;M21;M7;M57; |
| | VLLKEPCSSG | M20 | AGSKSPIQY | M22;M23 |
| 853 | ATCELYHYQECVRGT | M57;M27; | WYIRVGARKSAPLIEL | M64;M40;M21;M7;M57; |
| | TVLLKEPCSS | M20 | CVDEAGSKS | M22;M23 |
| 854 | LSDRVVFVLWAHGFE | M46;M60; | SARIVYTACSHAAVD | M28;M60;M29;M38;M67; |
| | LTSMKYFVKI | M54 | ALCEKALKYL | M17;M49 |
| 855 | LKNLSDRVVFVLWAH | M46;M60; | AMPNLYKMQRMLLE | M12;M55;M53;M17;M52; |
| | GFELTSMKYF | M54 | KCDLQNYGDSA | M9;M23 |
| 856 | KNLSDRVVFVLWAHG | M46;M60; | LAFVVFLLVTLAILTA | M54;M16;M60;M25;M17; |
| | FELTSMKYFV | M54 | LRLCAYCCN | M46;M39 |
| 857 | NLSDRVVFVLWAHGF | M46;M60; | AFVVFLLVTLAILTAL | M54;M16;M60;M25;M17; |
| | ELTSMKYFVK | M54 | RLCAYCCNI | M46;M39 |
| 858 | DTLKNLSDRVVFVLW | M46;M60; | FVVFLLVTLAILTALR | M54;M16;M60;M25;M17; |
| | AHGFELTSMK | M54 | LCAYCCNIV | M46;M39 |
| 859 | TLKNLSDRVVFVLWA | M46;M60; | QHEETIYNLLKDCPA | M40;M30;M41;M42;M43; |
| | HGFELTSMKY | M54 | VAKHDFFKFR | M39;M11 |
| 860 | PLMYKGLPWNVVRIKI | M57;M9; | KIITLKKRWQLALSK | M11;M74;M33;M27;M8; |
| | VQMLSDTLK | M20 | GVHFVCNLLL | M42;M82 |
| 861 | GLTGTGVLTESNKKFL | M78;M24; | ATNYDLSVVNARLRA | M1;M25;M37;M57;M50; |
| | PFQQFGRDI | M61 | KHYVYIGDPA | M18;M26 |
| 862 | LTGTGVLTESNKKFLP | M78;M24; | ISAKNRARTVAGVSIC | M64;M32;M60;M30;M2; |
| | FQQFGRDIA | M61 | STMTNRQFH | M22;M23 |
| 863 | TGTGVLTESNKKFLPF | M78;M24; | TLKKRWQLALSKGV | M11;M74;M33;M8;M42; |
| | QQFGRDIAD | M61 | HFVCNLLLLFV | M82;M23 |
| 864 | RQRLTKYTMADLVYA | M10;M52; | KFKVNSTLEQYVFCT | M40;M29;M6;M18;M49; |
| | LRHFDEGNCD | M17 | VNALPETTAD | M35;M47 |
| 865 | ISRQRLTKYTMADLVY | M10;M52; | VNSTLEQYVFCTVNA | M40;M29;M6;M18;M49; |
| | ALRHFDEGN | M17 | LPETTADIVV | M35;M47 |
| 866 | SRQRLTKYTMADLVY | M10;M52; | FKVNSTLEQYVFCTV | M40;M29;M6;M18;M49; |
| | ALRHFDEGNC | M17 | NALPETTADI | M35;M47 |
| 867 | NFNGLTGTGVLTESNK | M24;M38; | STLEQYVFCTVNALP | M40;M29;M6;M18;M49; |
| | KFLPFQQFG | M61 | ETTADIVVFD | M35;M47 |
| 868 | NFNFNGLTGTGVLTES | M24;M38; | NSTLEQYVFCTVNAL | M40;M29;M6;M18;M49; |
| | NKKFLPFQQ | M61 | PETTADIVVF | M35;M47 |
| 869 | FNFNGLTGTGVLTESN | M24;M38; | KVNSTLEQYVFCTVN | M40;M29;M6;M18;M49; |
| | KKFLPFQQF | M61 | ALPETTADIV | M35;M47 |
| 870 | AIRHVRAWIGFDVEGC | M57;M69; | TLEQYVFCTVNALPE | M40;M29;M38;M6;M18; |
| | HATREAVGT | M20 | TTADIVVFDE | M49;M47 |
| 871 | EAIRHVRAWIGFDVEG | M57;M69; | VTQRNFYEPQIITTDN | M64;M10;M7;M30;M79;M9; |
| | CHATREAVG | M20 | TFVSGNCDV | M23 |
| 872 | RHVRAWIGFDVEGCH | M57;M69; | MILSDDAVVCFNSTY | M13;M21;M53;M48;M49; |
| | ATREAVGTNL | M20 | ASQGLVASIK | M26;M22 |
| 873 | IRHVRAWIGFDVEGCH | M57;M69; | MMILSDDAVVCFNST | M13;M21;M53;M48;M49; |
| | ATREAVGTN | M20 | YASQGLVASI | M26;M22 |
| 874 | GVYYHKNNKSWMES | M5;M41; | ILSDDAVVCFNSTYAS | M13;M21;M53;M48;M49; |
| | EFRVYSSANNC | M70 | QGLVASIKN | M26;M22 |
| 875 | FTIYSLLLCRMNSRNYI | M10;M54; | SMMILSDDAVVCFNS | M13;M21;M53;M48;M49; |
| | AQVDVVNF | M24 | TYASQGLVAS | M26;M22 |
| 876 | IYSLLLCRMNSRNYIA | M10;M54; | LSLLSKGRLIIRENNR | M11;M21;M24;M10;M48; |
| | QVDVVNFNL | M24 | VVISSDVLV | M41;M9 |
| 877 | AFPFTIYSLLLCRMNSR | M10;M54; | LLSKGRLIIRENNRVV | M11;M21;M24;M10;M48; |
| | NYIAQVDV | M24 | ISSDVLVNN | M41;M9 |
| 878 | FPFTIYSLLLCRMNSRN | M10;M54; | MILSLLSKGRLIIRENN | M11;M21;M24;M10;M48; |
| | YIAQVDVV | M24 | RVVISSDV | M41;M9 |
| 879 | PFTIYSLLLCRMNSRN | M10;M54; | SLLSKGRLIIRENNRV | M11;M21;M24;M10;M48; |
| | YIAQVDVVN | M24 | VISSDVLVN | M41;M9 |
| 880 | FAFPFTIYSLLLCRMNS | M10;M54; | ILSLLSKGRLIIRENNR | M11;M21;M24;M10;M48; |
| | RNYIAQVD | M24 | VVISSDVL | M41;M9 |
| 881 | TIYSLLLCRMNSRNYI | M10;M54; | GLMWLSYFIASFRLF | M64;M40;M16;M30;M15; |
| | AQVDVVNFN | M24 | ARTRSMWSFN | M35;M26 |
| 882 | VFAFPFTIYSLLLCRM | M10;M54; | TRFASVYAWNRKRIS | M16;M55;M25;M53;M74; |
| | NSRNYIAQV | M24 | NCVADYSVLY | M67;M27 |
| 883 | NVFAFPFTIYSLLLCR | M10;M54; | PQGLPNNTASWFTAL | M40;M28;M70;M29;M38; |
| | MNSRNYIAQ | M24 | TQHGKEDLKF | M18;M15 |
| 884 | VNRFNVAITRAKVGIL | M25;M68; | RRPQGLPNNTASWFT | M40;M28;M70;M29;M38; |
| | CIMSDRDLY | M66 | ALTQHGKEDL | M18;M15 |
| 885 | VITHDVSSAINRPQIGV | M49;M21; | RPQGLPNNTASWFTA | M40;M28;M70;M29;M38; |
| | VREFLTRN | M70 | LTQHGKEDLK | M18;M15 |
| 886 | AFDKSAFVNLKQLPFF | M60;M41; | QRRPQGLPNNTASWF | M40;M28;M70;M29;M38; |
| | YYSDSPCES | M54 | TALTQHGKED | M18;M15 |
| 887 | FDKSAFVNLKQLPFFY | M60;M41; | HFVCNLLLLFVTVYS | M21;M6;M37;M41;M43; |
| | YSDSPCESH | M54 | HLLLVAAGLE | M42;M22 |
| 888 | HFPREGVFVSNGTHW | M50;M18; | VHFVCNLLLLFVTVY | M21;M6;M37;M41;M43; |
| | FVTQRNFYEP | M24 | SHLLLVAAGL | M42;M22 |
| 889 | AHFPREGVFVSNGTH | M50;M18; | VNQNAQALNTLVKQ | M58;M16;M53;M17;M15; |
| | WFVTQRNFYE | M24 | LSSNFGAISSV | M46;M22 |
| 890 | SNVANYQKVGMQKY | M21;M34; | NQNAQALNTLVKQLS | M58;M16;M53;M17;M15; |
| | STLQGPPGTGK | M41 | SNFGAISSVL | M46;M22 |
| 891 | NGTKRFDNPVLPFNDG | M78;M65; | VDTDFVNEFYAYLRK | M71;M16;M18;M35;M15; |
| | VYFASTEKS | M82 | HFSMMILSDD | M52;M26 |
| 892 | LGSLVVRCSFYEDFLE | M21;M41; | DVDTDFVNEFYAYLR | M71;M16;M18;M35;M15; |
| | YHDVRVVLD | M70 | KHFSMMILSD | M52;M26 |
| 893 | GSLVVRCSFYEDFLEY | M21;M41; | LLLQYGSFCTQLNRA | M13;M28;M70;M41;M67; |
| | HDVRVVLDF | M70 | LTGIAVEQDK | M43;M20 |
| 894 | SLVVRCSFYEDFLEYH | M21;M41; | HTFSNYQHEETIYNLL | M40;M34;M30;M41;M27; |
| | DVRVVLDFI | M70 | KDCPAVAKH | M42;M11 |
| 895 | VDFQVTIAEILLIIMRT | M5;M61; | VPVAIHADQLTPTWR | M58;M24;M16;M5;M41; |
| | FKVSIWNL | M37 | VYSTGSNVFQ | M17;M82 |
| 896 | VLLPLVSSQCVNLTTR | M43;M9; | LVYFLQSINFVRIIMR | M4;M75;M24;M10;M25;M9; |
| | TQLPPAYTN | M24 | LWLCWKCRS | M23 |
| 897 | LVLLPLVSSQCVNLTT | M43;M9; | VLARKHTTCCSLSHR | M81;M5;M60;M2;M79;M43; |
| | RTQLPPAYT | M24 | FYRLANECAQ | M42 |
| 898 | PYNMRVIHFGAGSDK | M5;M13; | WFVTQRNFYEPQIITT | M64;M10;M5;M7;M79;M9; |
| | GVAPGTAVLR | M70 | DNTFVSGNC | M23 |
| 899 | LAVPYNMRVIHFGAG | M5;M13; | LPAADLDDFSKQLQQ | M71;M32;M58;M31;M55; |
| | SDKGVAPGTA | M70 | SMSSADSTQA | M53;M33 |
| 900 | VPYNMRVIHFGAGSD | M5;M13; | PNQEYADVFHLYLQY | M71;M32;M16;M61;M52; |
| | KGVAPGTAVL | M70 | IRKLHDELTG | M9;M47 |
| 901 | YNMRVIHFGAGSDKG | M5;M13; | EDQDALFAYTKRNVI | M71;M24;M55;M10;M35; |
| | VAPGTAVLRQ | M70 | PTITQMNLKY | M59;M23 |
| 902 | AVPYNMRVIHFGAGS | M5;M13; | LWAKRNIKPVPEVKIL | M54;M66;M74;M57;M27; |
| | DKGVAPGTAV | M70 | NNLGVDIAA | M49;M9 |
| 903 | TLLALHRSYLTPGDSS | M5;M75; | HAIHVSGTNGTKRFD | M64;M40;M22;M78;M65; |
| | SGWTAGAAA | M70 | NPVLPFNDGV | M82;M23 |
| 904 | AGSDKGVAPGTAVLR | M13;M26; | FHAIHVSGTNGTKRF | M64;M40;M22;M78;M65; |
| | QWLPTGTLLV | M70 | DNPVLPFNDG | M82;M23 |
| 905 | TITQMNLKYAISAKNR | M35;M82; | IDSYFVVKRHTFSNY | M71;M58;M18;M15;M52; |
| | ARTVAGVSI | M18 | QHEETIYNLL | M47;M20 |
| 906 | PTITQMNLKYAISAKN | M35;M82; | VSNGTHWFVTQRNFY | M24;M31;M5;M79;M50; |
| | RARTVAGVS | M18 | EPQIITTDNT | M18;M35 |
| 907 | ITQMNLKYAISAKNRA | M35;M82; | SNGTHWFVTQRNFYE | M24;M31;M5;M79;M50; |
| | RTVAGVSIC | M18 | PQIITTDNTF | M18;M35 |
| 908 | FNVAITRAKVGILCIMS | M32;M68; | FVSNGTHWFVTQRNF | M24;M31;M5;M79;M50; |
| | DRDLYDKL | M66 | YEPQIITTDN | M18;M35 |
| 909 | VAITRAKVGILCIMSD | M32;M68; | LPGCDGGSLYVNKHA | M56;M73;M58;M24;M50; |
| | RDLYDKLQF | M66 | FHTPAFDKSA | M11;M47 |
| 910 | RENVAITRAKVGILCI | M32;M68; | GCDGGSLYVNKHAF | M56;M73;M58;M24;M50; |
| | MSDRDLYDK | M66 | HTPAFDKSAFV | M11;M47 |
| 911 | NVAITRAKVGILCIMS | M32;M68; | LNLPGCDGGSLYVNK | M56;M73;M58;M24;M50; |
| | DRDLYDKLQ | M66 | HAFHTPAFDK | M11;M47 |
| 912 | LYLQYIRKLHDELTGH | M52;M32; | NLNLPGCDGGSLYVN | M56;M73;M58;M24;M50; |
| | MLDMYSVML | M38 | KHAFHTPAFD | M11;M47 |
| 913 | DYYRYNLPTMCDIRQ | M70;M74; | PGCDGGSLYVNKHAF | M56;M73;M58;M24;M50; |
| | LLFVVEVVDK | M20 | HTPAFDKSAF | M11;M47 |
| 914 | YYRYNLPTMCDIRQLL | M70;M74; | NLPGCDGGSLYVNKH | M56;M73;M58;M24;M50; |
| | FVVEVVDKY | M20 | AFHTPAFDKS | M11;M47 |
| 915 | INFVRIIMRLWLCWKC | M75;M76; | GTHWFVTQRNFYEPQ | M24;M31;M5;M79;M50; |
| | RSKNPLLYD | M9 | IITTDNTFVS | M18;M9 |
| 916 | NFVRIIMRLWLCWKC | M75;M76; | SPFELEDFIPMDSTVK | M4;M19;M1;M25;M3;M61; |
| | RSKNPLLYDA | M9 | NYFITDAQT | M18;M43 |
| 917 | KRHTFSNYQHEETIYN | M34;M27; | RFKESPFELEDFIPMD | M4;M19;M1;M25;M3;M61; |
| | LLKDCPAVA | M20 | STVKNYFIT | M18;M43 |
| 918 | VKRHTFSNYQHEETIY | M34;M27; | FKESPFELEDFIPMDS | M4;M19;M1;M25;M3;M61; |
| | NLLKDCPAV | M20 | TVKNYFITD | M18;M43 |
| 919 | VVKRHTFSNYQHEETI | M34;M27; | ESPFELEDFIPMDSTV | M4;M19;M1;M25;M3;M61; |
| | YNLLKDCPA | M20 | KNYFITDAQ | M18;M43 |
| 920 | ECVRGTTVLLKEPCSS | M27;M58; | KESPFELEDFIPMDST | M4;M19;M1;M25;M3;M61; |
| | GTYEGNSPF | M20 | VKNYFITDA | M18;M43 |
| 921 | CVRGTTVLLKEPCSSG | M27;M58; | GLAKRFKESPFELEDF | M4;M19;M1;M25;M3;M18; |
| | TYEGNSPFH | M20 | IPMDSTVKN | M43;M20 |
| 922 | NGYPNMFITREEAIRH | M64;M69; | NLCPFGEVFNATRFAS | M4;M19;M58;M25;M3;M2; |
| | VRAWIGFDV | M32 | VYAWNRKRI | M17;M20 |
| 923 | ISTIGVCSMTDIAKKPT | M9;M59; | TNLCPFGEVFNATRF | M4;M19;M58;M25;M3;M2; |
| | ETICAPLT | M70 | ASVYAWNRKR | M17;M20 |
| 924 | HISTIGVCSMTDIAKKP | M9;M59; | LCPFGEVFNATRFASV | M4;M19;M58;M25;M3;M2; |
| | TETICAPL | M70 | YAWNRKRIS | M17;M20 |
| 925 | TIGVCSMTDIAKKPTE | M9;M59; | FTRLQSLENVAFNVV | M4;M54;M16;M24;M1;M3; |
| | TICAPLTVF | M70 | NKGHFDGQQG | M27;M15 |
| 926 | STIGVCSMTDIAKKPT | M9;M59; | TSIKWADNNCYLATA | M4;M51;M3;M23;M4;M51; |
| | ETICAPLTV | M70 | LLTLQQIELK | M3;M23 |
| 927 | IAGLIAIVMVTIMLCC | M60;M69; | LTSIKWADNNCYLAT | M4;M51;M3;M23;M4;M51; |
| | MTSCCSCLK | M42 | ALLTLQQIEL | M3;M23 |
| 928 | VMVTIMLCCMTSCCS | M60;M42; | GLTSIKWADNNCYLA | M4;M51;M3;M23;M4;M51; |
| | CLKGCCSCGS | M37 | TALLTLQQIE | M3;M23 |
| 929 | IVMVTIMLCCMTSCCS | M60;M42; | LKSEDAQGMDNLAC | M4;M1;M3;M37;M4;M1;M3; |
| | CLKGCCSCG | M37 | EDLKPVSEEVV | M37 |
| 930 | AIVMVTIMLCCMTSCC | M60;M42; | YLYALVYFLQSINFVR | M4;M54;M24;M19;M60; |
| | SCLKGCCSC | M37 | IIMRLWLCW | M25;M3;M9 |
| 931 | GLIAIVMVTIMLCCMT | M60;M42; | GCFVDDIVKTDGTLM | M9;M10;M7;M5;M3;M6;M8; |
| | SCCSCLKGC | M37 | IERFVSLAID | M11 |
| 932 | IAIVMVTIMLCCMTSC | M60;M42; | RAAEIRASANLAATK | M4;M64;M40;M3;M48;M27; |
| | CSCLKGCCS | M37 | MSECVLGQSK | M22;M23 |
| 933 | MVTIMLCCMTSCCSCL | M60;M42; | IRAAEIRASANLAATK | M4;M64;M40;M3;M48;M27; |
| | KGCCSCGSC | M37 | MSECVLGQS | M22;M23 |
| 934 | GFIAGLIAIVMVTIMLC | M60;M69; | FDNPVLPFNDGVYFA | M64;M12;M14;M28;M24; |
| | CMTSCCSC | M42 | STEKSNIIRG | M6;M45;M22 |
| 935 | AGLIAIVMVTIMLCCM | M60;M42; | TRGVYYPDKVFRSSV | M4;M12;M14;M1;M29;M6; |
| | TSCCSCLKG | M37 | LHSTQDLFLP | M67;M72 |
| 936 | LIAIVMVTIMLCCMTS | M60;M42; | YYPDKVFRSSVLHST | M4;M12;M14;M1;M29;M6; |
| | CCSCLKGCC | M37 | QDLFLPFFSN | M67;M72 |
| 937 | FIAGLIAIVMVTIMLCC | M60;M69; | RGVYYPDKVFRSSVL | M4;M12;M14;M1;M29;M6; |
| | MTSCCSCL | M42 | HSTQDLFLPF | M67;M72 |
| 938 | DHVISTSHKLVLSVNP | M64;M10; | GVYYPDKVFRSSVLH | M4;M12;M14;M1;M29;M6; |
| | YVCNAPGCD | M23 | STQDLFLPFF | M67;M72 |
| 939 | LDDRCILHCANFNVLF | M4;M1;M3; | VYYPDKVFRSSVLHS | M4;M12;M14;M1;M29;M6; |
| | STVFPPTSF | M48 | TQDLFLPFFS | M67;M72 |
| 940 | QTVDSSQGSEYDYVIF | M4;M22; | YPDKVFRSSVLHSTQ | M4;M12;M14;M1;M29;M6; |
| | TQTTETAHS | M3;M51 | DLFLPFFSNV | M67;M72 |
| 941 | KTDGTLMIERFVSLAI | M1;M5;M2; | NYLKRRVVFNGVSFS | M4;M3;M6;M49;M4;M3; |
| | DAYPLTKHP | M3 | TFEEAALCTF | M6;M49 |
| 942 | TDGTLMIERFVSLAID | M1;M5;M2; | SNYLKRRVVFNGVSF | M4;M3;M6;M49;M4;M3;M6; |
| | AYPLTKHPN | M3 | STFEEAALCT | M49 |
| 943 | IKVCEFQFCNDPFLGV | M4;M1;M3; | LKRRVVFNGVSFSTFE | M4;M3;M6;M49;M4;M3;M6; |
| | YYHKNNKSW | M37 | EAALCTFLL | M49 |
| 944 | LIGLAKRFKESPFELED | M4;M1;M3; | YLKRRVVFNGVSFST | M4;M3;M6;M49;M4;M3;M6; |
| | FIPMDSTV | M20 | FEEAALCTFL | M49 |
| 945 | KVCEFQFCNDPFLGVY | M4;M1;M3; | GVVQLTSQWLTNIFG | M4;M45;M3;M59;M4;M45; |
| | YHKNNKSWM | M37 | TVYEKLKPVL | M3;M59 |
| 946 | HLLIGLAKRFKESPFEL | M4;M1;M3; | YALVYFLQSINFVRII | M4;M54;M24;M60;M25;M3; |
| | EDFIPMDS | M20 | MRLWLCWKC | M9;M23 |
| 947 | VIKVCEFQFCNDPFLG | M4;M1;M3; | KELLVYAADPAMHA | M12;M24;M48;M33;M36; |
| | VYYHKNNKS | M37 | ASGNLLLDKRT | M8;M46;M39 |
| 948 | IGLAKRFKESPFELEDF | M4;M1;M3; | PSKLIEYTDFATSACV | M29;M3;M14;M62;M29;M3; |
| | IPMDSTVK | M20 | LAAECTIFK | M14;M62 |
| 949 | LLIGLAKRFKESPFELE | M4;M1;M3; | YFVLTSHTVMPLSAP | M28;M54;M60;M29;M45; |
| | DFIPMDST | M20 | TLVPQEHYVR | M51;M46;M39 |
| 950 | GTYEGNSPFHPLADNK | M1;M3;M44; | FVLTSHTVMPLSAPTL | M28;M54;M60;M29;M45; |
| | FALTCFSTQ | M70 | VPQEHYVRI | M51;M46;M39 |
| 951 | GNSPFHPLADNKFALT | M1;M22;M3; | GDAALALLLLDRLNQ | M56;M58;M10;M53;M51; |
| | CFSTQFAFA | M14 | LESKMSGKGQ | M36;M17;M11 |
| 952 | EGNSPFHPLADNKFAL | M1;M3;M14; | ALCEKALKYLPIDKCS | M71;M13;M28;M14;M29; |
| | TCFSTQFAF | M70 | RIIPARARV | M51;M18;M22 |
| 953 | SPFHPLADNKFALTCF | M4;M22;M3; | DALCEKALKYLPIDK | M71;M13;M28;M14;M29; |
| | STQFAFACP | M14 | CSRIIPARAR | M51;M18;M22 |
| 954 | NITNLCPFGEVFNATR | M4;M3;M17; | AKSASVYYSQLMCQP | M51;M7;M60;M36;M51;M7; |
| | FASVYAWNR | M58 | ILLLDQALVS | M60;M36 |
| 955 | HTPAFDKSAFVNLKQL | M4;M60; | SASVYYSQLMCQPILL | M51;M7;M60;M36;M51;M7; |
| | PFFYYSDSP | M54;M3 | LDQALVSDV | M60;M36 |
| 956 | VNKHAFHTPAFDKSAF | M4;M60; | ASVYYSQLMCQPILL | M51;M7;M60;M36;M51;M7; |
| | VNLKQLPFF | M54;M3 | LDQALVSDVG | M60;M36 |
| 957 | FHTPAFDKSAFVNLKQ | M4;M60; | KSASVYYSQLMCQPI | M51;M7;M60;M36;M51;M7; |
| | LPFFYYSDS | M54;M3 | LLLDQALVSD | M60;M36 |
| 958 | KHAFHTPAFDKSAFVN | M4;M60; | KALKYLPIDKCSRIIPA | M13;M28;M14;M29;M51; |
| | LKQLPFFYY | M54;M3 | RARVECFD | M33;M26;M22 |
| 959 | NKHAFHTPAFDKSAFV | M4;M60; | VVTTVMFLARGIVFM | M12;M3;M22;M20;M12;M3; |
| | NLKQLPFFY | M54;M3 | CVEYCPIFFI | M22;M20 |
| 960 | TPAFDKSAFVNLKQLP | M4;M60; | GVVTTVMFLARGIVF | M12;M3;M22;M20;M12;M3; |
| | FFYYSDSPC | M54;M3 | MCVEYCPIFF | M22;M20 |
| 961 | HAFHTPAFDKSAFVNL | M4;M60; | TVMFLARGIVFMCVE | M12;M3;M22;M20;M12;M3; |
| | KQLPFFYYS | M54;M3 | YCPIFFITGN | M22;M20 |
| 962 | AFHTPAFDKSAFVNLK | M4;M60; | VMFLARGIVFMCVEY | M12;M3;M22;M20;M12;M3; |
| | QLPFFYYSD | M54;M3 | CPIFFITGNT | M22;M20 |
| 963 | ADYSVLYNSASFSTFK | M15;M41; | VTTVMFLARGIVFMC | M12;M3;M22;M20;M12;M3; |
| | CYGVSPTKL | M3;M44 | VEYCPIFFIT | M22;M20 |
| 964 | VADYSVLYNSASFSTF | M15;M41; | TTVMFLARGIVFMCV | M12;M3;M22;M20;M12;M3; |
| | KCYGVSPTK | M3;M44 | EYCPIFFITG | M22;M20 |
| 965 | VVIGTSKFYGGWHNM | M18;M72; | TEEVGHTDLMAAYV | M51;M63;M44;M70;M51; |
| | LKTVYSDVEN | M3;M6 | DNSSLTIKKPN | M63;M44;M70 |
| 966 | GTLIVNSVLLFLAFVV | M50;M73; | EVGHTDLMAAYVDN | M51;M63;M44;M70;M51; |
| | FLLVTLAIL | M3;M44 | SSLTIKKPNEL | M63;M44;M70 |
| 967 | TGTLIVNSVLLFLAFV | M50;M73; | EEVGHTDLMAAYVD | M51;M63;M44;M70;M51; |
| | VFLLVTLAI | M3;M44 | NSSLTIKKPNE | M63;M44;M70 |
| 968 | PAQLPAPRTLLTKGTL | M29;M3; | VGHTDLMAAYVDNS | M51;M63;M44;M70;M51; |
| | EPEYFNSVC | M6;M58 | SLTIKKPNELS | M63;M44;M70 |
| 969 | GTSKFYGGWHNMLKT | M6;M18; | IMQLFFSYFAVHFISN | M9;M3;M45;M23;M9;M3; |
| | VYSDVENPHL | M3;M59 | SWLMWLIIN | M45;M23 |
| 970 | IGTSKFYGGWHNMLK | M6;M18; | VEEVTTTLEETKFLTE | M50;M3;M6;M20;M50;M3; |
| | TVYSDVENPH | M3;M59 | NLLLYIDIN | M6;M20 |
| 971 | TSPDVDLGDISGINASV | M14;M80; | RGIVFMCVEYCPIFFIT | M40;M39;M11;M3;M40; |
| | VNIQKEID | M28;M45 | GNTLQCIM | M39;M11;M3 |
| 972 | HTSPDVDLGDISGINAS | M14;M80; | GIVFMCVEYCPIFFITG | M40;M39;M11;M3;M40; |
| | VVNIQKEI | M28;M45 | NTLQCIML | M39;M11;M3 |
| 973 | CLPFTINCQEPKLGSLV | M50;M29; | FLARGIVFMCVEYCPI | M39;M22;M3;M20;M39; |
| | VRCSFYED | M51;M14 | FFITGNTLQ | M22;M3;M20 |
| 974 | SCLPFTINCQEPKLGSL | M50;M29; | LARGIVFMCVEYCPIF | M39;M22;M3;M20;M39; |
| | VVRCSFYE | M51;M14 | FITGNTLQC | M22;M3;M20 |
| 975 | SHTVMPLSAPTLVPQE | M51;M69; | KRAKVTSAMQTMLF | M17;M52;M3;M16;M17; |
| | HYVRITGLY | M39;M28 | TMLRKLDNDAL | M52;M3;M16 |
| 976 | SEYDYVIFTQTTETAH | M51;M22; | KGIYQTSNFRVQPTES | M31;M34;M30;M48;M50; |
| | SCNVNRFNV | M6;M59 | IVRFPNITN | M51;M41;M39 |
| 977 | YDYVIFTQTTETAHSC | M51;M22; | IYQTSNFRVQPTESIV | M31;M34;M30;M48;M50; |
| | NVNRFNVAI | M6;M59 | RFPNITNLC | M51;M41;M39 |
| 978 | EYDYVIFTQTTETAHS | M51;M22; | YQTSNFRVQPTESIVR | M31;M34;M30;M48;M50; |
| | CNVNRFNVA | M6;M59 | FPNITNLCP | M51;M41;M39 |
| 979 | TACSHAAVDALCEKA | M51;M1; | GIYQTSNFRVQPTESI | M31;M34;M30;M48;M50; |
| | LKYLPIDKCS | M60;M49 | VRFPNITNL | M51;M41;M39 |
| 980 | FRKSNLKPFERDISTEI | M36;M53; | VTALRANSAVKLQNN | M51;M11;M73;M44;M51; |
| | YQAGSTPC | M17;M44 | ELSPVALRQM | M11;M73;M44 |
| 981 | LFRKSNLKPFERDISTE | M36;M53; | AVHFISNSWLMWLIIN | M50;M11;M73;M3;M50; |
| | IYQAGSTP | M17;M44 | LVQMAPISA | M11;M73;M3 |
| 982 | RLFRKSNLKPFERDIST | M36;M53; | TFYLTNDVSFLAHIQ | M60;M54;M3;M58;M60; |
| | EIYQAGST | M17;M44 | WMVMFTPLVP | M54;M3;M58 |
| 983 | YRLFRKSNLKPFERDIS | M36;M53; | DPSRILGAGCFVDDIV | M12;M10;M6;M57;M63;M8; |
| | TEIYQAGS | M17;M44 | KTDGTLMIE | M9;M20 |
| 984 | RKSNLKPFERDISTEIY | M36;M53; | EPEYFNSVCRLMKTIG | M12;M14;M16;M5;M6;M17; |
| | QAGSTPCN | M17;M44 | PDMFLGTCR | M15;M59 |
| 985 | DLATNNLVVMAYITG | M51;M12; | LEPEYFNSVCRLMKTI | M13;M12;M16;M14;M5;M6; |
| | GVVQLTSQWL | M51;M12 | GPDMFLGTC | M17;M15 |
| 986 | NSFTRGVYYPDKVFRS | M4;M1; | SEDKRAKVTSAMQT | M38;M52;M3;M62;M38; |
| | SVLHSTQDL | M29;M12 | MLFTMLRKLDN | M52;M3;M62 |
| 987 | FEKGDYGDAVVYRGT | M9;M12; | GTCRRCPAEIVDTVSA | M12;M7;M29;M6;M38;M8; |
| | TTYKLNVGDY | M8;M44 | LVYDNKLKA | M59;M23 |
| 988 | EKGDYGDAVVYRGTT | M9;M12; | LGTCRRCPAEIVDTVS | M12;M7;M29;M6;M38;M8; |
| | TYKLNVGDYF | M8;M44 | ALVYDNKLK | M59;M23 |
| 989 | WTIEYPIIGDELKINAA | M73;M19; | TCRRCPAEIVDTVSAL | M12;M7;M29;M6;M38;M8; |
| | CRKVQHMV | M17;M44 | VYDNKLKAH | M59;M23 |
| 990 | YPIIGDELKINAACRKV | M73;M19; | CRRCPAEIVDTVSALV | M12;M7;M29;M6;M38;M8; |
| | QHMVVKAA | M17;M44 | YDNKLKAHK | M59;M23 |
| 991 | IEYPIIGDELKINAACR | M73;M19; | YDYCIPYNSVTSSIVIT | M12;M14;M29;M38;M45; |
| | KVQHMVVK | M17;M44 | SGDGTTSP | M43;M62;M42 |
| 992 | EYPIIGDELKINAACRK | M73;M19; | NCYDYCIPYNSVTSSI | M12;M14;M29;M38;M45; |
| | VQHMVVKA | M17;M44 | VITSGDGTT | M43;M62;M42 |
| 993 | TIEYPIIGDELKINAAC | M73;M19; | CYDYCIPYNSVTSSIVI | M12;M14;M29;M38;M45; |
| | RKVQHMVV | M17;M44 | TSGDGTTS | M43;M62;M42 |
| 994 | PIIGDELKINAACRKVQ | M73;M19; | DYCIPYNSVTSSIVITS | M12;M14;M29;M38;M45; |
| | HMVVKAAL | M17;M44 | GDGTTSPI | M43;M62;M42 |
| 995 | TLVKQLSSNFGAISSVL | M34;M48; | TNCYDYCIPYNSVTSS | M12;M14;M29;M38;M45; |
| | NDILSRLD | M6;M45 | IVITSGDGT | M43;M62;M42 |
| 996 | NTLVKQLSSNFGAISS | M34;M48; | YCIPYNSVTSSIVITSG | M12;M14;M29;M38;M45; |
| | VLNDILSRL | M6;M45 | DGTTSPIS | M43;M62;M42 |
| 997 | AVASKILGLPTQTVDS | M51;M21; | IQKEIDRLNEVAKNLN | M11;M78;M65;M2;M79; |
| | SQGSEYDYV | M11;M54 | ESLIDLQEL | M51;M67;M82 |
| 998 | NAVASKILGLPTQTVD | M51;M21; | QKEIDRLNEVAKNLN | M11;M78;M65;M2;M79; |
| | SSQGSEYDY | M11;M54 | ESLIDLQELG | M51;M67;M82 |
| 999 | VDALCEKALKYLPIDK | M51;M18; | NIQKEIDRLNEVAKNL | M11;M78;M65;M2;M79; |
| | CSRIIPARA | M22;M71 | NESLIDLQE | M51;M67;M82 |
| 1000 | AQCFKMFYKGVITHD | M36;M11; | KDATPSDFVRATATIP | M9;M14;M34;M29;M45; |
| | VSSAINRPQI | M45;M70 | IQASLPFGW | M33;M8;M11 |
| 1001 | IWDYKRDAPAHISTIG | M36;M11; | IKDATPSDFVRATATI | M9;M14;M34;M29;M45; |
| | VCSMTDIAK | M6;M70 | PIQASLPFG | M33;M8;M11 |
| 1002 | NQVIVNNLDKSAGFPF | M33;M51; | DATPSDFVRATATIPI | M9;M14;M34;M29;M45; |
| | NKWGKARLY | M58;M17 | QASLPFGWL | M33;M8;M11 |
| 1003 | ESSAKSASVYYSQLMC | M57;M51; | DPAMHAASGNLLLD | M12;M7;M57;M50;M33;M8; |
| | QPILLLDQA | M57;M51 | KRTTCFSVAAL | M39;M9 |
| 1004 | KCEESSAKSASVYYSQ | M57;M51; | AADPAMHAASGNLL | M12;M7;M57;M50;M33;M8; |
| | LMCQPILLL | M57;M51 | LDKRTTCFSVA | M39;M9 |
| 1005 | KSKCEESSAKSASVYY | M57;M51; | ADPAMHAASGNLLL | M12;M7;M57;M50;M33;M8; |
| | SQLMCQPIL | M57;M51 | DKRTTCFSVAA | M39;M9 |
| 1006 | CEESSAKSASVYYSQL | M57;M51; | ADQLTPTWRVYSTGS | M75;M14;M16;M5;M6;M41; |
| | MCQPILLLD | M57;M51 | NVFQTRAGCL | M8;M82 |
| 1007 | GKSKCEESSAKSASVY | M57;M51; | DQLTPTWRVYSTGSN | M75;M14;M16;M5;M6;M41; |
| | YSQLMCQPI | M57;M51 | VFQTRAGCLI | M8;M82 |
| 1008 | SKCEESSAKSASVYYS | M57;M51; | MSKFPLKLRGTAVMS | M54;M14;M60;M6;M67;M8; |
| | QLMCQPILL | M57;M51 | LKEGQINDMI | M49;M59 |
| 1009 | EESSAKSASVYYSQLM | M57;M51; | FDMSKFPLKLRGTAV | M54;M14;M60;M6;M67;M8; |
| | CQPILLLDQ | M57;M51 | MSLKEGQIND | M49;M59 |
| 1010 | KSAQCFKMFYKGVIT | M52;M36; | DMSKFPLKLRGTAVM | M54;M14;M60;M6;M67;M8; |
| | HDVSSAINRP | M45;M70 | SLKEGQINDM | M49;M59 |
| 1011 | CYDGGCINANQVIVN | M50;M73; | SKFPLKLRGTAVMSL | M54;M14;M60;M6;M67;M8; |
| | NLDKSAGFPF | M17;M51 | KEGQINDMIL | M49;M59 |
| 1012 | HTPINLVRDLPQGFSA | M64;M40; | VSEETGTLIVNSVLLF | M56;M73;M14;M7;M50; |
| | LEPLVDLPI | M45;M36 | LAFVVFLLV | M18;M11;M44 |
| 1013 | KHTPINLVRDLPQGFS | M64;M40; | FVSEETGTLIVNSVLL | M56;M73;M14;M7;M50; |
| | ALEPLVDLP | M45;M36 | FLAFVVFLL | M18;M11;M44 |
| 1014 | YKGVITHDVSSAINRP | M36;M21; | SFVSEETGTLIVNSVL | M56;M73;M14;M7;M50; |
| | QIGVVREFL | M45;M70 | LFLAFVVFL | M18;M11;M44 |
| 1015 | DNINLHTQVVDMSMT | M51;M67; | TDLTKGPHEFCSQHT | M14;M29;M30;M6;M18; |
| | YGQQFGPTYL | M51;M67 | MLVKQGDDYV | M43;M42;M39 |
| 1016 | VDNINLHTQVVDMSM | M51;M67; | TKGPHEFCSQHTMLV | M14;M29;M30;M6;M18; |
| | TYGQQFGPTY | M51;M67 | KQGDDYVYLP | M43;M42;M39 |
| 1017 | QRKYKGIKIQEGVVDY | M51;M67; | DLTKGPHEFCSQHTM | M14;M29;M30;M6;M18; |
| | GARFYFYTS | M51;M67 | LVKQGDDYVY | M43;M42;M39 |
| 1018 | KYKGIKIQEGVVDYG | M51;M67; | ETDLTKGPHEFCSQH | M14;M29;M30;M6;M18; |
| | ARFYFYTSKT | M51;M67 | TMLVKQGDDY | M43;M42;M39 |
| 1019 | TIKVFTTVDNINLHTQ | M51;M67; | LTKGPHEFCSQHTML | M14;M29;M30;M6;M18; |
| | VVDMSMTYG | M51;M67 | VKQGDDYVYL | M43;M42;M39 |
| 1020 | RKYKGIKIQEGVVDYG | M51;M67; | LWVYKQFDTYNLWN | M71;M58;M16;M14;M19; |
| | ARFYFYTSK | M51;M67 | TFTRLQSLENV | M25;M17;M15 |
| 1021 | NSQNAVASKILGLPTQ | M51;M60; | YVTQQLIRAAEIRASA | M64;M40;M21;M12;M14; |
| | TVDSSQGSE | M21;M54 | NLAATKMSE | M48;M22;M23 |
| 1022 | PYNSQNAVASKILGLP | M51;M60; | LQTYVTQQLIRAAEIR | M64;M40;M21;M12;M14; |
| | TQTVDSSQG | M21;M54 | ASANLAATK | M48;M22;M23 |
| 1023 | YNSQNAVASKILGLPT | M51;M60; | TYVTQQLIRAAEIRAS | M64;M40;M21;M12;M14; |
| | QTVDSSQGS | M21;M54 | ANLAATKMS | M48;M22;M23 |
| 1024 | SQNAVASKILGLPTQT | M51;M60; | QTYVTQQLIRAAEIRA | M64;M40;M21;M12;M14; |
| | VDSSQGSEY | M21;M54 | SANLAATKM | M48;M22;M23 |
| 1025 | VNLHSSRLSFKELLVY | M57;M36; | AGLPYGANKDGIIWV | M64;M40;M14;M30;M6; |
| | AADPAMHAA | M48;M20 | ATEGALNTPK | M57;M49;M22 |
| 1026 | CTMYICGDSTECSNLL | M48;M39; | YSLRLIDAMMFTSDL | M57;M36;M50;M44;M57; |
| | LQYGSFCTQ | M45;M41 | ATNNLVVMAY | M36;M50;M44 |
| 1027 | LLKSIAATRGATVVIG | M17;M72; | QYSLRLIDAMMFTSD | M57;M36;M50;M44;M57; |
| | TSKFYGGWH | M2;M14 | LATNNLVVMA | M36;M50;M44 |
| 1028 | LKSIAATRGATVVIGT | M17;M72; | LLVYAADPAMHAAS | M12;M24;M57;M50;M33; |
| | SKFYGGWHN | M2;M14 | GNLLLDKRTTC | M8;M46;M39 |
| 1029 | TFEYVSQPFLMDLEGK | M1;M36; | LVYAADPAMHAASG | M12;M24;M57;M50;M33; |
| | QGNFKNLRE | M46;M20 | NLLLDKRTTCF | M8;M46;M39 |
| 1030 | FEYVSQPFLMDLEGKQ | M1;M36; | DTVSALVYDNKLKA | M13;M21;M28;M16;M7; |
| | GNFKNLREF | M46;M20 | HKDKSAQCFKM | M50;M63;M17 |
| 1031 | GDQELIRQGTDYKHW | M64;M69; | VHVVDGCNSSTCMM | M55;M39;M8;M44;M55; |
| | PQIAQFAPSA | M82;M51 | CYKRNRATRVE | M39;M8;M44 |
| 1032 | ETGTLIVNSVLLFLAFV | M50;M73; | LATNNLVVMAYITGG | M51;M42;M9;M12;M51; |
| | VFLLVTLA | M14;M44 | VVQLTSQWLT | M42;M9;M12 |
| 1033 | ETTADIVVFDEISMAT | M33;M7; | TRLQSLENVAFNVVN | M4;M71;M54;M16;M24;M1; |
| | NYDLSVVNA | M48;M55 | KGHFDGQQGE | M27;M15 |
| 1034 | RKRISNCVADYSVLYN | M15;M7; | YGIATVREVLSDREL | M28;M70;M5;M7;M6;M49; |
| | SASFSTFKC | M67;M44 | HLSWEVGKPR | M11;M59 |
| 1035 | MCDIRQLLFVVEVVD | M51;M70; | GIATVREVLSDRELHL | M28;M70;M5;M7;M6;M49; |
| | KYFDCYDGGC | M37;M20 | SWEVGKPRP | M11;M59 |
| 1036 | CDIRQLLFVVEVVDKY | M51;M70; | IATVREVLSDRELHLS | M28;M70;M5;M7;M6;M49; |
| | FDCYDGGCI | M37;M20 | WEVGKPRPP | M11;M59 |
| 1037 | TMCDIRQLLFVVEVVD | M51;M70; | LDDFVEIIKSQDLSVV | M4;M48;M18;M8;M43;M15; |
| | KYFDCYDGG | M37;M20 | SKVVKVTID | M35;M47 |
| 1038 | PDPSKPSKRSFIEDLLF | M73;M63; | PANSTVLSFCAFAVD | M36;M32;M12;M28;M36; |
| | NKVTLADA | M67;M44 | AAKAYKDYLA | M32;M12;M28 |
| 1039 | LIIMRTFKVSIWNLDYI | M1;M5; | CTERLKLFAAETLKA | M4;M64;M21;M40;M48; |
| | INLIIKNL | M44;M20 | TEETFKLSYG | M63;M22;M23 |
| 1040 | IIMRTFKVSIWNLDYII | M1;M5; | TCTERLKLFAAETLK | M4;M64;M21;M40;M48; |
| | NLIIKNLS | M44;M20 | ATEETFKLSY | M63;M22;M23 |
| 1041 | LFIRQEEVQELYSPIFLI | M4;M1; | VGGNYNYLYRLFRKS | M4;M71;M16;M1;M37;M18; |
| | VAAIVFI | M11;M54 | NLKPFERDIS | M17;M15 |
| 1042 | KLFIRQEEVQELYSPIF | M4;M1; | SKVGGNYNYLYRLFR | M4;M71;M16;M1;M37;M18; |
| | LIVAAIVF | M11;M54 | KSNLKPFERD | M17;M15 |
| 1043 | EITVATSRTLSYYKLG | M25;M63; | DSKVGGNYNYLYRLF | M4;M71;M16;M1;M37;M18; |
| | ASQRVAGDS | M19;M70 | RKSNLKPFER | M17;M15 |
| 1044 | ITVATSRTLSYYKLGA | M25;M63; | LDSKVGGNYNYLYRL | M4;M71;M16;M1;M37;M18; |
| | SQRVAGDSG | M19;M70 | FRKSNLKPFE | M17;M15 |
| 1045 | VATSRTLSYYKLGASQ | M25;M63; | KVGGNYNYLYRLFR | M4;M71;M16;M1;M37;M18; |
| | RVAGDSGFA | M19;M70 | KSNLKPFERDI | M17;M15 |
| 1046 | TVATSRTLSYYKLGAS | M25;M63; | NLDSKVGGNYNYLY | M4;M71;M16;M1;M37;M18; |
| | QRVAGDSGF | M19;M70 | RLFRKSNLKPF | M17;M15 |
| 1047 | DTWFSQRGGSYTNDK | M36;M6; | PLYAFASEAARVVRSI | M4;M14;M6;M59;M4;M14; |
| | ACPLIAAVIT | M36;M6 | FSRTLETAQ | M6;M59 |
| 1048 | FSQRGGSYTNDKACPL | M36;M6; | LGSLAATVRLQAGNA | M55;M51;M17;M10;M55; |
| | IAAVITREV | M36;M6 | TEVPANSTVL | M51;M17;M10 |
| 1049 | WFSQRGGSYTNDKAC | M36;M6; | IQRKYKGIKIQEGVVD | M51;M5;M67;M40;M51;M5; |
| | PLIAAVITRE | M36;M6 | YGARFYFYT | M67;M40 |
| 1050 | TWFSQRGGSYTNDKA | M36;M6; | KSVYYTSNPTTFHLD | M50;M7;M48;M45;M50;M7; |
| | CPLIAAVITR | M36;M6 | GEVITFDNLK | M48;M45 |
| 1051 | FDTWFSQRGGSYTND | M36;M6; | VRTIKVFTTVDNINLH | M51;M43;M26;M67;M51; |
| | KACPLIAAVI | M36;M6 | TQVVDMSMT | M43;M26;M67 |
| 1052 | IFLWLLWPVTLACFVL | M33;M63; | DQVILLNKHIDAYKTF | M73;M14;M53;M44;M41; |
| | AAVYRINWI | M14;M70 | PPTEPKKDK | M35;M52;M47 |
| 1053 | KLIFLWLLWPVTLACF | M33;M63; | NALLSTDGNKIADKY | M54;M10;M60;M57;M27; |
| | VLAAVYRIN | M14;M70 | VRNLQHRLYE | M8;M44;M20 |
| 1054 | LIFLWLLWPVTLACFV | M33;M63; | ARDGCVPLNIIPLTTA | M24;M22;M19;M14;M24; |
| | LAAVYRINW | M14;M70 | AKLMVVIPD | M22;M19;M14 |
| 1055 | QGNFKNLREFVFKNID | M6;M19; | PLTTAAKLMVVIPDY | M57;M51;M82;M23;M57; |
| | GYFKIYSKH | M54;M59 | NTYKNTCDGT | M51;M82;M23 |
| 1056 | VRITGLYPTLNISDEFS | M34;M73; | TFLKKDAPYIVGDVV | M7;M30;M11;M14;M7;M30; |
| | SNVANYQK | M6;M44 | QEGVLTAVVI | M11;M14 |
| 1057 | SLQTYVTQQLIRAAEI | M64;M21; | ITFLKKDAPYIVGDVV | M7;M30;M11;M14;M7;M30; |
| | RASANLAAT | M12;M14 | QEGVLTAVV | M11;M14 |
| 1058 | DLFMRIFTIGTVTLKQ | M5;M72; | LKKDAPYIVGDVVQE | M7;M30;M67;M14;M7;M30; |
| | GEIKDATPS | M2;M6 | GVLTAVVIPT | M67;M14 |
| 1059 | MDLFMRIFTIGTVTLK | M5;M72; | KKDAPYIVGDVVQEG | M7;M30;M67;M14;M7;M30; |
| | QGEIKDATP | M2;M6 | VLTAVVIPTK | M67;M14 |
| 1060 | LYSPIFLIVAAIVFITLC | M25;M12; | LTENLLLYIDINGNLH | M7;M36;M11;M70;M7;M36; |
| | FTLKRKT | M14;M37 | PDSATLVSD | M11;M70 |
| 1061 | YSPIFLIVAAIVFITLCF | M25;M12; | FLTENLLLYIDINGNL | M7;M36;M11;M70;M7;M36; |
| | TLKRKTE | M14;M37 | HPDSATLVS | M11;M70 |
| 1062 | YPTLNISDEFSSNVAN | M18;M73; | GKPVPYCYDTNVLEG | M46;M29;M12;M14;M46; |
| | YQKVGMQKY | M6;M44 | SVAYESLRPD | M29;M12;M14 |
| 1063 | LNISDEFSSNVANYQK | M18;M73; | LNSIIKTIQPRVEKKKL | M29;M72;M6;M28;M29; |
| | VGMQKYSTL | M6;M44 | DGFMGRIR | M72;M6;M28 |
| 1064 | ITGLYPTLNISDEFSSN | M18;M73; | LGRCDIKDLPKEITVA | M64;M6;M48;M33;M49; |
| | VANYQKVG | M6;M44 | TSRTLSYYK | M46;M22;M23 |
| 1065 | ISDEFSSNVANYQKVG | M18;M73; | KRGDKSVYYTSNPTT | M50;M22;M45;M44;M50; |
| | MQKYSTLQG | M6;M44 | FHLDGEVITF | M22;M45;M44 |
| 1066 | TLNISDEFSSNVANYQ | M18;M73; | LKRGDKSVYYTSNPT | M50;M22;M45;M44;M50; |
| | KVGMQKYST | M6;M44 | TFHLDGEVIT | M22;M45;M44 |
| 1067 | LYPTLNISDEFSSNVAN | M18;M73; | GSFCTQLNRALTGIAV | M28;M14;M70;M41;M67; |
| | YQKVGMQK | M6;M44 | EQDKNTQEV | M27;M43;M20 |
| 1068 | PTLNISDEFSSNVANY | M18;M73; | QYGSFCTQLNRALTGI | M28;M14;M70;M41;M67; |
| | QKVGMQKYS | M6;M44 | AVEQDKNTQ | M27;M43;M20 |
| 1069 | TGLYPTLNISDEFSSNV | M18;M73; | YGSFCTQLNRALTGIA | M28;M14;M70;M41;M67; |
| | ANYQKVGM | M6;M44 | VEQDKNTQE | M27;M43;M20 |
| 1070 | GLYPTLNISDEFSSNVA | M18;M73; | TYNLWNTFTRLQSLE | M54;M16;M14;M25;M34; |
| | NYQKVGMQ | M6;M44 | NVAFNVVNKG | M60;M42;M39 |
| 1071 | NISDEFSSNVANYQKV | M18;M73; | VTSNYSGVVTTVMFL | M38;M29;M12;M14;M38; |
| | GMQKYSTLQ | M6;M44 | ARGIVFMCVE | M29;M12;M14 |
| 1072 | FIRQEEVQELYSPIFLIV | M4;M1; | ANKDGIIWVATEGAL | M64;M40;M34;M30;M6; |
| | AAIVFIT | M54;M25 | NTPKDHIGTR | M72;M49;M22 |
| 1073 | RQEEVQELYSPIFLIVA | M4;M1; | HFSMMILSDDAVVCF | M13;M21;M7;M53;M48; |
| | AIVFITLC | M54;M25 | NSTYASQGLV | M49;M26;M22 |
| 1074 | IRQEEVQELYSPIFLIV | M4;M1; | FSMMILSDDAVVCFN | M13;M21;M7;M53;M48; |
| | AAIVFITL | M54;M25 | STYASQGLVA | M49;M26;M22 |
| 1075 | QEEVQELYSPIFLIVAA | M4;M1; | TREEAIRHVRAWIGF | M64;M32;M14;M48;M57; |
| | IVFITLCF | M54;M25 | DVEGCHATRE | M69;M46;M20 |
| 1076 | RFPNITNLCPFGEVFNA | M45;M17; | QTSNFRVQPTESIVRF | M21;M31;M34;M30;M48; |
| | TRFASVYA | M28;M66 | PNITNLCPF | M50;M41;M39 |
| 1077 | VCEFQFCNDPFLGVYY | M4;M1; | TAAKLMVVIPDYNTY | M51;M41;M82;M23;M51; |
| | HKNNKSWME | M22;M37 | KNTCDGTTFT | M41;M82;M23 |
| 1078 | CEFQFCNDPFLGVYYH | M4;M1; | RVCTNYMPYFFTLLL | M4;M25;M29;M19;M4;M25; |
| | KNNKSWMES | M22;M37 | QLCTFTRSTN | M29;M19 |
| 1079 | IPLMYKGLPWNVVRIK | M57;M1; | NRVCTNYMPYFFTLL | M4;M25;M29;M19;M4;M25; |
| | IVQMLSDTL | M12;M20 | LQLCTFTRST | M29;M19 |
| 1080 | IEDLLFNKVTLADAGFI | M48;M73; | VCTNYMPYFFTLLLQ | M4;M25;M29;M19;M4;M25; |
| | KQYGDCLG | M47;M44 | LCTFTRSTNS | M29;M19 |
| 1081 | EPMLQSADAQSFLNR | M15;M47; | SNYSGVVTTVMFLAR | M29;M12;M14;M20;M29; |
| | VCGVSAARLT | M12;M45 | GIVFMCVEYC | M12;M14;M20 |
| 1082 | CSCDQLREPMLQSAD | M81;M33; | NYSGVVTTVMFLARG | M29;M12;M14;M20;M29; |
| | AQSFLNGFAV | M12;M45 | IVFMCVEYCP | M12;M14;M20 |
| 1083 | YGCSCDQLREPMLQS | M81;M33; | LGSLIYSTAALGVLMS | M29;M73;M6;M44;M29; |
| | ADAQSFLNGF | M12;M45 | NLGMPSYCT | M73;M6;M44 |
| 1084 | GCSCDQLREPMLQSA | M81;M33; | VCLGSLIYSTAALGVL | M29;M73;M6;M44;M29; |
| | DAQSFLNGFA | M12;M45 | MSNLGMPSY | M73;M6;M44 |
| 1085 | PIGALDISASIVAGGIV | M12;M14; | CLGSLIYSTAALGVL | M29;M73;M6;M44;M29; |
| | AIVVTCLA | M12;M14 | MSNLGMPSYC | M73;M6;M44 |
| 1086 | QPIGALDISASIVAGGI | M12;M14; | QEKNFTTAPAICHDG | M56;M24;M7;M45;M79; |
| | VAIVVTCL | M12;M14 | KAHFPREGVF | M33;M35;M82 |
| 1087 | IGALDISASIVAGGIVAI | M12;M14; | AQEKNFTTAPAICHD | M56;M24;M7;M45;M79; |
| | VVTCLAY | M12;M14 | GKAHFPREGV | M33;M35;M82 |
| 1088 | GALDISASIVAGGIVAI | M12;M14; | GAIKLDDKDPNFKDQ | M73;M10;M7;M53;M44; |
| | VVTCLAYY | M12;M14 | VILLNKHIDA | M35;M52;M47 |
| 1089 | ALDPLSETKCTLKSFT | M75;M21; | VESCGNFKVTKGKAK | M25;M41;M19;M8;M25; |
| | VEKGIYQTS | M63;M14 | KGAWNIGEQK | M41;M19;M8 |
| 1090 | DYVYLPYPDPSRILGA | M57;M63; | QIVESCGNFKVTKGK | M25;M41;M19;M8;M25; |
| | GCFVDDIVK | M12;M20 | AKKGAWNIGE | M41;M19;M8 |
| 1091 | YLPYPDPSRILGAGCF | M57;M63; | IVESCGNFKVTKGKA | M25;M41;M19;M8;M25; |
| | VDDIVKTDG | M12;M20 | KKGAWNIGEQ | M41;M19;M8 |
| 1092 | VYLPYPDPSRILGAGC | M57;M63; | PTDQSSYIVDSVTVKN | M50;M18;M12;M36;M50; |
| | FVDDIVKTD | M12;M20 | GSIHLYFDK | M18;M12;M36 |
| 1093 | LPYPDPSRILGAGCFV | M57;M63; | EMLAKALRKVPTDN | M48;M29;M14;M49;M48; |
| | DDIVKTDGT | M12;M20 | YITTYPGQGLN | M29;M14;M49 |
| 1094 | YVYLPYPDPSRILGAG | M57;M63; | TLADAGFIKQYGDCL | M21;M70;M48;M57;M50; |
| | CFVDDIVKT | M12;M20 | GDIAARDLIC | M63;M41;M27 |
| 1095 | PYPDPSRILGAGCFVD | M57;M63; | LADAGFIKQYGDCLG | M21;M70;M48;M57;M50; |
| | DIVKTDGTL | M12;M20 | DIAARDLICA | M63;M41;M27 |
| 1096 | MLKTVYSDVENPHLM | M45;M43; | ADAGFIKQYGDCLGD | M21;M70;M48;M57;M50; |
| | GWDYPKCDRA | M6;M59 | IAARDLICAQ | M63;M41;M27 |
| 1097 | NMLKTVYSDVENPHL | M45;M43; | TYVPAQEKNFTTAPAI | M78;M65;M7;M29;M2;M79; |
| | MGWDYPKCDR | M6;M59 | CHDGKAHFP | M33;M82 |
| 1098 | LKTVYSDVENPHLMG | M45;M43; | VTYVPAQEKNFTTAP | M78;M65;M7;M29;M2;M79; |
| | WDYPKCDRAM | M6;M59 | AICHDGKAHF | M33;M82 |
| 1099 | KRTTCFSVAALTNNV | M1;M22; | HVTYVPAQEKNFTTA | M78;M65;M7;M29;M2;M79; |
| | AFQTVKPGNF | M6;M73 | PAICHDGKAH | M33;M82 |
| 1100 | LYENQKLIANQFNSAI | M4;M1; | SRELKVTFFPDLNGD | M60;M21;M63;M36;M60; |
| | GKIQDSLSS | M33;M37 | VVAIDYKHYT | M21;M63;M36 |
| 1101 | ENQKLIANQFNSAIGKI | M4;M1; | ASRELKVTFFPDLNG | M60;M21;M63;M36;M60; |
| | QDSLSSTA | M33;M37 | DVVAIDYKHY | M21;M63;M36 |
| 1102 | TQNVLYENQKLIANQF | M4;M1; | NAQALNTLVKQLSSN | M58;M16;M53;M45;M17; |
| | NSAIGKIQD | M33;M37 | FGAISSVLND | M15;M46;M22 |
| 1103 | YENQKLIANQFNSAIG | M4;M1; | QNAQALNTLVKQLSS | M58;M16;M53;M45;M17; |
| | KIQDSLSST | M33;M37 | NFGAISSVLN | M15;M46;M22 |
| 1104 | QNVLYENQKLIANQF | M4;M1; | NPTDQSSYIVDSVTVK | M50;M18;M63;M36;M50; |
| | NSAIGKIQDS | M33;M37 | NGSIHLYFD | M18;M63;M36 |
| 1105 | NVLYENQKLIANQFNS | M4;M1; | INPTDQSSYIVDSVTV | M50;M18;M63;M36;M50; |
| | AIGKIQDSL | M33;M37 | KNGSIHLYF | M18;M63;M36 |
| 1106 | VLYENQKLIANQFNSA | M4;M1; | PINPTDQSSYIVDSVT | M50;M18;M63;M36;M50; |
| | IGKIQDSLS | M33;M37 | VKNGSIHLY | M18;M63;M36 |
| 1107 | TEETFKLSYGIATVRE | M33;M12; | KRPINPTDQSSYIVDS | M50;M18;M63;M36;M50; |
| | VLSDRELHL | M6;M59 | VTVKNGSIH | M18;M63;M36 |
| 1108 | SSNFGAISSVLNDILSR | M50;M48; | RPINPTDQSSYIVDSV | M50;M18;M63;M36;M50; |
| | LDKVEAEV | M6;M17 | TVKNGSIHL | M18;M63;M36 |
| 1109 | HLGRCDIKDLPKEITV | M33;M6; | AALGVLMSNLGMPS | M18;M73;M45;M44;M18; |
| | ATSRTLSYY | M48;M49 | YCTGYREGYLN | M73;M45;M44 |
| 1110 | WYFYYLGTGPEAGLP | M32;M12; | LGVLMSNLGMPSYCT | M18;M73;M45;M44;M18; |
| | YGANKDGIIW | M6;M31 | GYREGYLNST | M73;M45;M44 |
| 1111 | PRWYFYYLGTGPEAG | M32;M12; | ALGVLMSNLGMPSYC | M18;M73;M45;M44;M18; |
| | LPYGANKDGI | M6;M31 | TGYREGYLNS | M73;M45;M44 |
| 1112 | RWYFYYLGTGPEAGL | M32;M12; | IRKSNHNFLVQAGNV | M58;M12;M14;M70;M58; |
| | PYGANKDGII | M6;M31 | QLRVIGHSMQ | M12;M14;M70 |
| 1113 | ISFMLWCKDGHVETF | M71;M36; | YTTTIKPVTYKLDGV | M36;M6;M59;M20;M36;M6; |
| | YPKLQSSQAW | M67;M47 | VCTEIDPKLD | M59;M20 |
| 1114 | EISFMLWCKDGHVETF | M71;M36; | SYTTTIKPVTYKLDGV | M36;M6;M59;M20;M36;M6; |
| | YPKLQSSQA | M67;M47 | VCTEIDPKL | M59;M20 |
| 1115 | DKVFRSSVLHSTQDLF | M72;M29; | TTTIKPVTYKLDGVV | M36;M6;M59;M20;M36;M6; |
| | LPFFSNVTW | M67;M6 | CTEIDPKLDN | M59;M20 |
| 1116 | VRIKIVQMLSDTLKNL | M57;M46; | TFSSTFNVPMEKLKTL | M29;M22;M6;M28;M29; |
| | SDRVVFVLW | M61;M36 | VATAEAELA | M22;M6;M28 |
| 1117 | VTQNVLYENQKLIAN | M4;M1; | GVSFSTFEEAALCTFL | M13;M6;M44;M49;M13;M6; |
| | QFNSAIGKIQ | M53;M37 | LNKEMYLKL | M44;M49 |
| 1118 | GVTQNVLYENQKLIA | M4;M1; | YQCAMRPNFTIKGSF | M52;M47;M12;M14;M52; |
| | NQFNSAIGKI | M53;M37 | LNGSCGSVGF | M47;M12;M14 |
| 1119 | IGVTQNVLYENQKLIA | M4;M1; | VYQCAMRPNFTIKGS | M52;M47;M12;M14;M52; |
| | NQFNSAIGK | M53;M37 | FLNGSCGSVG | M47;M12;M14 |
| 1120 | REVLSDRELHLSWEV | M5;M12; | CAMRPNFTIKGSFLN | M52;M47;M12;M14;M52; |
| | GKPRPPLNRN | M28;M70 | GSCGSVGFNI | M47;M12;M14 |
| 1121 | EVLSDRELHLSWEVG | M5;M12; | AMRPNFTIKGSFLNGS | M52;M47;M12;M14;M52; |
| | KPRPPLNRNY | M28;M70 | CGSVGFNID | M47;M12;M14 |
| 1122 | VLSDRELHLSWEVGK | M5;M12; | QCAMRPNFTIKGSFL | M52;M47;M12;M14;M52; |
| | PRPPLNRNYV | M28;M70 | NGSCGSVGFN | M47;M12;M14 |
| 1123 | CVPQADVEWKFYDAQ | M41;M6; | MRPNFTIKGSFLNGSC | M52;M47;M12;M14;M52; |
| | PCSDKAYKIE | M59;M8 | GSVGFNIDY | M47;M12;M14 |
| 1124 | VPQADVEWKFYDAQP | M41;M6; | GPTYLDGADVTKIKP | M55;M53;M12;M48;M55; |
| | CSDKAYKIEE | M59;M8 | HNSHEGKTFY | M53;M12;M48 |
| 1125 | DGYFKIYSKHTPINLV | M64;M36; | DASGKPVPYCYDTNV | M35;M30;M29;M36;M35; |
| | RDLPQGFSA | M40;M71 | LEGSVAYESL | M30;M29;M36 |
| 1126 | QYVFCTVNALPETTAD | M38;M6; | FKDASGKPVPYCYDT | M35;M30;M29;M36;M35; |
| | IVVFDEISM | M28;M49 | NVLEGSVAYE | M30;M29;M36 |
| 1127 | KEITVATSRTLSYYKL | M49;M63; | IFKDASGKPVPYCYD | M35;M30;M29;M36;M35; |
| | GASQRVAGD | M48;M70 | TNVLEGSVAY | M30;M29;M36 |
| 1128 | TERLKLFAAETLKATE | M4;M63; | KDASGKPVPYCYDTN | M35;M30;M29;M36;M35; |
| | ETFKLSYGI | M40;M64 | VLEGSVAYES | M30;M29;M36 |
| 1129 | SPRRARSVASQSIIAYT | M5;M48; | LQKEKVNINIVGDFKL | M7;M27;M44;M35;M7;M27; |
| | MSLGAENS | M6;M59 | NEEIAIILA | M44;M35 |
| 1130 | NSPRRARSVASQSIIAY | M5;M48; | ILQKEKVNINIVGDFK | M7;M27;M44;M35;M7;M27; |
| | TMSLGAEN | M6;M59 | LNEEIAIIL | M44;M35 |
| 1131 | FSLWVYKQFDTYNLW | M71;M25; | DTSLSGFKLKDCVMY | M15;M75;M12;M14;M15; |
| | NTFTRLQSLE | M41;M19 | ASAVVLLILM | M75;M12;M14 |
| 1132 | SFMLWCKDGHVETFY | M15;M36; | VDTSLSGFKLKDCVM | M15;M75;M12;M14;M15; |
| | PKLQSSQAWQ | M67;M47 | YASAVVLLIL | M75;M12;M14 |
| 1133 | TQTNSPRRARSVASQS | M6;M5;M2; | NTFSSTFNVPMEKLK | M29;M22;M28;M8;M29; |
| | IIAYTMSLG | M59 | TLVATAEAEL | M22;M28;M8 |
| 1134 | QTQTNSPRRARSVASQ | M6;M5;M2; | LLSAGIFGADPIHSLR | M68;M36;M28;M31;M68; |
| | SIIAYTMSL | M59 | VCVDTVRTN | M36;M28;M31 |
| 1135 | QTNSPRRARSVASQSII | M6;M5;M2; | LSAGIFGADPIHSLRV | M68;M36;M28;M31;M68; |
| | AYTMSLGA | M59 | CVDTVRTNV | M36;M28;M31 |
| 1136 | CCNIVNVSLVKPSFYV | M33;M12; | AGIFGADPIHSLRVCV | M68;M36;M28;M31;M68; |
| | YSRVKNLNS | M16;M71 | DTVRTNVYL | M36;M28;M31 |
| 1137 | NIVNVSLVKPSFYVYS | M33;M12; | SAGIFGADPIHSLRVC | M68;M36;M28;M31;M68; |
| | RVKNLNSSR | M16;M71 | VDTVRTNVY | M36;M28;M31 |
| 1138 | CNIVNVSLVKPSFYVY | M33;M12; | DISASIVAGGIVAIVVT | M21;M12;M6;M22;M21; |
| | SRVKNLNSS | M16;M71 | CLAYYFMR | M12;M6;M22 |
| 1139 | RRNVATLQAENVTGL | M36;M29; | APLLSAGIFGADPIHS | M36;M31;M28;M20;M36; |
| | FKDCSKVITG | M38;M47 | LRVCVDTVR | M31;M28;M20 |
| 1140 | RNVATLQAENVTGLF | M36;M29; | PLLSAGIFGADPIHSLR | M36;M31;M28;M20;M36; |
| | KDCSKVITGL | M38;M47 | VCVDTVRT | M31;M28;M20 |
| 1141 | DRYPANSIVCRFDTRV | M5;M9;M2; | DFGDFIQTTPGSGVPV | M40;M9;M58;M16;M34;M8; |
| | LSNLNLPGC | M48 | VDSYYSLLM | M15;M11 |
| 1142 | RYPANSIVCRFDTRVL | M5;M9;M2; | YDFGDFIQTTPGSGVP | M40;M9;M58;M16;M34;M8; |
| | SNLNLPGCD | M48 | VVDSYYSLL | M15;M11 |
| 1143 | NYGDSATLPKGIMMN | M73;M11; | NWYDFGDFIQTTPGS | M40;M9;M58;M16;M34;M8; |
| | VAKYTQLCQY | M58;M44 | GVPVVDSYYS | M15;M11 |
| 1144 | YGDSATLPKGIMMNV | M73;M11; | GNWYDFGDFIQTTPG | M40;M9;M58;M16;M34;M8; |
| | AKYTQLCQYL | M58;M44 | SGVPVVDSYY | M15;M11 |
| 1145 | GDSATLPKGIMMNVA | M73;M11; | WYDFGDFIQTTPGSG | M40;M9;M58;M16;M34;M8; |
| | KYTQLCQYLN | M58;M44 | VPVVDSYYSL | M15;M11 |
| 1146 | CYMHHMELPTGVHAG | M6;M28; | KEKVNINIVGDFKLNE | M7;M73;M44;M35;M7;M73; |
| | TDLEGNFYGP | M6;M28 | EIAIILASF | M44;M35 |
| 1147 | MHHMELPTGVHAGTD | M6;M28; | KVNINIVGDFKLNEEI | M7;M73;M44;M35;M7;M73; |
| | LEGNFYGPFV | M6;M28 | AIILASFSA | M44;M35 |
| 1148 | YMHHMELPTGVHAGT | M6;M28; | EKVNINIVGDFKLNEE | M7;M73;M44;M35;M7;M73; |
| | DLEGNFYGPF | M6;M28 | LAIILASFS | M44;M35 |
| 1149 | FCYMHHMELPTGVHA | M6;M28; | KHTTCCSLSHRFYRL | M5;M60;M30;M2;M79;M43; |
| | GTDLEGNFYG | M6;M28 | ANECAQVLSE | M42;M39 |
| 1150 | SFCYMHHMELPTGVH | M6;M28; | DGVVQQLPETYFTQS | M71;M32;M16;M31;M45; |
| | AGTDLEGNFY | M6;M28 | RNLQEFKPRS | M33;M35;M47 |
| 1151 | HHMELPTGVHAGTDL | M6;M28; | IDITFLKKDAPYIVGD | M57;M30;M11;M14;M57; |
| | EGNFYGPFVD | M6;M28 | VVQEGVLTA | M30;M11;M14 |
| 1152 | APGTAVLRQWLPTGT | M33;M30; | DIDITFLKKDAPYIVG | M57;M30;M11;M14;M57; |
| | LLVDSDLNDF | M8;M70 | DVVQEGVLT | M30;M11;M14 |
| 1153 | VAPGTAVLRQWLPTG | M33;M30; | SKIITLKKRWQLALSK | M11;M55;M74;M33;M27; |
| | TLLVDSDLND | M8;M70 | GVHFVCNLL | M8;M42;M82 |
| 1154 | GVAPGTAVLRQWLPT | M33;M30; | DDFTGCVIAWNSNNL | M56;M32;M12;M48;M50; |
| | GTLLVDSDLN | M8;M70 | DSKVGGNYNY | M68;M49;M26 |
| 1155 | GTAVLRQWLPTGTLL | M33;M30; | DFTGCVIAWNSNNLD | M56;M32;M12;M48;M50; |
| | VDSDLNDFVS | M8;M70 | SKVGGNYNYL | M68;M49;M26 |
| 1156 | PGTAVLRQWLPTGTLL | M33;M30; | LSVCLGSLIYSTAALG | M29;M73;M6;M8;M29;M73; |
| | VDSDLNDFV | M8;M70 | VLMSNLGMP | M6;M8 |
| 1157 | ALVYDNKLKAHKDKS | M13;M21; | LLLSVCLGSLIYSTAA | M29;M73;M6;M8;M29;M73; |
| | AQCFKMFYKG | M63;M28 | LGVLMSNLG | M6;M8 |
| 1158 | VSALVYDNKLKAHKD | M13;M21; | LLSVCLGSLIYSTAAL | M29;M73;M6;M8;M29;M73; |
| | KSAQCFKMFY | M63;M28 | GVLMSNLGM | M6;M8 |
| 1159 | SALVYDNKLKAHKDK | M13;M21; | SVCLGSLIYSTAALGV | M29;M73;M6;M8;M29;M73; |
| | SAQCFKMFYK | M63;M28 | LMSNLGMPS | M6;M8 |
| 1160 | LVYDNKLKAHKDKSA | M13;M21; | FLLLSVCLGSLIYSTA | M29;M73;M6;M8;M29;M73; |
| | QCFKMFYKGV | M63;M28 | ALGVLMSNL | M6;M8 |
| 1161 | GNFKNLREFVFKNIDG | M71;M19; | WFLLLSVCLGSLIYST | M29;M73;M6;M8;M29;M73; |
| | YFKIYSKHT | M54;M59 | AALGVLMSN | M6;M8 |
| 1162 | ECIKDLLARAGKASCT | M12;M28; | GMPSYCTGYREGYLN | M18;M49;M45;M8;M18; |
| | LSEQLDFID | M12;M28 | STNVTIATYC | M49;M45;M8 |
| 1163 | PLECIKDLLARAGKAS | M12;M28; | VAIHADQLTPTWRVY | M58;M24;M16;M5;M6;M41; |
| | CTLSEQLDF | M12;M28 | STGSNVFQTR | M17;M82 |
| 1164 | LECIKDLLARAGKASC | M12;M28; | AIHADQLTPTWRVYS | M58;M24;M16;M5;M6;M41; |
| | TLSEQLDFI | M12;M28 | TGSNVFQTRA | M17;M82 |
| 1165 | YPLECIKDLLARAGKA | M12;M28; | PVAIHADQLTPTWRV | M58;M24;M16;M5;M6;M41; |
| | SCTLSEQLD | M12;M28 | YSTGSNVFQT | M17;M82 |
| 1166 | IKDLLARAGKASCTLS | M12;M28; | QGMDNLACEDLKPVS | M1;M49;M45;M37;M1;M49; |
| | EQLDFIDTK | M12;M28 | EEVVENPTIQ | M45;M37 |
| 1167 | GYPLECIKDLLARAGK | M12;M28; | AYVNTFSSTFNVPME | M22;M28;M8;M70;M22; |
| | ASCTLSEQL | M12;M28 | KLKTLVATAE | M28;M8;M70 |
| 1168 | CIKDLLARAGKASCTL | M12;M28; | YVNTFSSTFNVPMEK | M22;M28;M8;M70;M22; |
| | SEQLDFIDT | M12;M28 | LKTLVATAEA | M28;M8;M70 |
| 1169 | VTGLFKDCSKVITGLH | M46;M34; | STSGRWVLNNDYYRS | M33;M34;M39;M44;M33; |
| | PTQAPTHLS | M47;M36 | LPGVFCGVDA | M34;M39;M44 |
| 1170 | KRSFIEDLLFNKVTLA | M11;M73; | DAAMQRKLEKMADQ | M57;M63;M82;M2;M57; |
| | DAGFIKQYG | M47;M44 | AMTQMYKQARS | M63;M82;M2 |
| 1171 | SKRSFIEDLLFNKVTLA | M11;M73; | EFDRDAAMQRKLEK | M57;M63;M82;M2;M57; |
| | DAGFIKQY | M47;M44 | MADQAMTQMYK | M63;M82;M2 |
| 1172 | SFIEDLLFNKVTLADA | M11;M73; | FDRDAAMQRKLEKM | M57;M63;M82;M2;M57; |
| | GFIKQYGDC | M47;M44 | ADQAMTQMYKQ | M63;M82;M2 |
| 1173 | RSFIEDLLFNKVTLAD | M11;M73; | DRDAAMQRKLEKMA | M57;M63;M82;M2;M57; |
| | AGFIKQYGD | M47;M44 | DQAMTQMYKQA | M63;M82;M2 |
| 1174 | SNLKPFERDISTEIYQA | M46;M53; | RDAAMQRKLEKMAD | M57;M63;M82;M2;M57; |
| | GSTPCNGV | M17;M44 | QAMTQMYKQAR | M63;M82;M2 |
| 1175 | ISFPLCANGQVFGLYK | M41;M73; | TVKNGSIHLYFDKAG | M7;M21;M48;M49;M7;M21; |
| | NTCVGSDNV | M28;M48 | QKTYERHSLS | M48;M49 |
| 1176 | CANGQVFGLYKNTCV | M41;M73; | VKNGSIHLYFDKAGQ | M7;M21;M48;M49;M7;M21; |
| | GSDNVTDFNA | M28;M48 | KTYERHSLSH | M48;M49 |
| 1177 | SFPLCANGQVFGLYKN | M41;M73; | KNGSIHLYFDKAGQK | M7;M21;M48;M49;M7;M21; |
| | TCVGSDNVT | M28;M48 | TYERHSLSHF | M48;M49 |
| 1178 | FPLCANGQVFGLYKN | M41;M73; | SVTVKNGSIHLYFDK | M7;M21;M48;M49;M7;M21; |
| | TCVGSDNVTD | M28;M48 | AGQKTYERHS | M48;M49 |
| 1179 | PLCANGQVFGLYKNT | M41;M73; | VTVKNGSIHLYFDKA | M7;M21;M48;M49;M7;M21; |
| | CVGSDNVTDF | M28;M48 | GQKTYERHSL | M48;M49 |
| 1180 | LCANGQVFGLYKNTC | M41;M73; | IVDSVTVKNGSIHLYF | M21;M12;M48;M49;M21; |
| | VGSDNVTDFN | M28;M48 | DKAGQKTYE | M12;M48;M49 |
| 1181 | FLGIITTVAAFHQECSL | M30;M29; | VDSVTVKNGSIHLYF | M21;M12;M48;M49;M21; |
| | QSCTQHQP | M6;M59 | DKAGQKTYER | M12;M48;M49 |
| 1182 | VFLGIITTVAAFHQECS | M30;M29; | SYIVDSVTVKNGSIHL | M21;M12;M48;M49;M21; |
| | LQSCTQHQ | M6;M59 | YFDKAGQKT | M12;M48;M49 |
| 1183 | YIATNGPLKVGGSCVL | M80;M14; | YIVDSVTVKNGSIHLY | M21;M12;M48;M49;M21; |
| | SGHNLAKHC | M80;M14 | FDKAGQKTY | M12;M48;M49 |
| 1184 | ATNGPLKVGGSCVLS | M80;M14; | TLEETKFLTENLLLYI | M50;M36;M11;M70;M50; |
| | GHNLAKHCLH | M80;M14 | DINGNLHPD | M36;M11;M70 |
| 1185 | IATNGPLKVGGSCVLS | M80;M14; | LEETKFLTENLLLYIDI | M50;M36;M11;M70;M50; |
| | GHNLAKHCL | M80;M14 | NGNLHPDS | M36;M11;M70 |
| 1186 | TNGPLKVGGSCVLSG | M80;M14; | ALCTFLLNKEMYLKL | M42;M39;M43;M44;M42; |
| | HNLAKHCLHV | M80;M14 | RSDVLLPLTQ | M39;M43;M44 |
| 1187 | DYIATNGPLKVGGSCV | M80;M14; | LCTFLLNKEMYLKLR | M42;M39;M43;M44;M42; |
| | LSGHNLAKH | M80;M14 | SDVLLPLTQY | M39;M43;M44 |
| 1188 | NGPLKVGGSCVLSGH | M80;M14; | CTFLLNKEMYLKLRS | M42;M39;M43;M44;M42; |
| | NLAKHCLHVV | M80;M14 | DVLLPLTQYN | M39;M43;M44 |
| 1189 | LESELVIGAVILRGHLR | M55;M53; | ATNNAMQVESDDYIA | M10;M29;M11;M44;M10; |
| | IAGHHLGR | M58;M14 | TNGPLKVGGS | M29;M11;M44 |
| 1190 | PGNFNKDFYDFAVSK | M33;M25; | YGTEDDYQGKPLEFG | M1;M22;M28;M37;M1;M22; |
| | GFFKEGSSVE | M19;M70 | ATSAALQPEE | M28;M37 |
| 1191 | KPGNFNKDFYDFAVS | M33;M25; | GTEDDYQGKPLEFGA | M1;M22;M28;M37;M1;M22; |
| | KGFFKEGSSV | M19;M70 | TSAALQPEEE | M28;M37 |
| 1192 | NKDFYDFAVSKGFFKE | M33;M25; | LDGISQYSLRLIDAM | M57;M60;M54;M36;M57; |
| | GSSVELKHF | M19;M31 | MFTSDLATNN | M60;M54;M36 |
| 1193 | FNKDFYDFAVSKGFFK | M33;M25; | DGISQYSLRLIDAMM | M57;M60;M54;M36;M57; |
| | EGSSVELKH | M19;M31 | FTSDLATNNL | M60;M54;M36 |
| 1194 | NFNKDFYDFAVSKGFF | M33;M25; | VVFNGVSFSTFEEAAL | M4;M13;M6;M49;M4;M13; |
| | KEGSSVELK | M19;M31 | CTFLLNKEM | M6;M49 |
| 1195 | INCQEPKLGSLVVRCS | M29;M82; | RVVFNGVSFSTFEEA | M4;M13;M6;M49;M4;M13; |
| | FYEDFLEYH | M14;M70 | ALCTFLINKE | M6;M49 |
| 1196 | NCQEPKLGSLVVRCSF | M29;M82; | VFNGVSFSTFEEAALC | M4;M13;M6;M49;M4;M13; |
| | YEDFLEYHD | M14;M70 | TFLLNKEMY | M6;M49 |
| 1197 | ANGQVFGLYKNTCVG | M48;M73; | FNGVSFSTFEEAALCT | M4;M13;M6;M49;M4;M13; |
| | SDNVTDENAI | M28;M59 | FLLNKEMYL | M6;M49 |
| 1198 | LPFTINCQEPKLGSLVV | M50;M29; | KRRVVFNGVSFSTFEE | M4;M13;M6;M49;M4;M13; |
| | RCSFYEDF | M82;M14 | AALCTFLLN | M6;M49 |
| 1199 | LACFVLAAVYRINWIT | M50;M33; | RRVVFNGVSFSTFEEA | M4;M13;M6;M49;M4;M13; |
| | GGIAIAMAC | M58;M44 | ALCTFLLNK | M6;M49 |
| 1200 | TLACFVLAAVYRINWI | M50;M33; | VENPDILRVYANLGE | M64;M11;M21;M32;M48; |
| | TGGIAIAMA | M58;M44 | RVRQALLKTV | M41;M49;M22 |
| 1201 | QKRTATKAYNVTQAF | M78;M25; | AYTVELGTEVNEFAC | M14;M34;M39;M66;M14; |
| | GRRGPEQTQG | M19;M70 | VVADAVIKTL | M34;M39;M66 |
| 1202 | RTATKAYNVTQAFGR | M78;M25; | AVKMFDAYVNTFSST | M41;M28;M8;M70;M41; |
| | RGPEQTQGNF | M19;M70 | FNVPMEKLKT | M28;M8;M70 |
| 1203 | RQKRTATKAYNVTQA | M78;M25; | TRFQTLLALHRSYLTP | M21;M24;M70;M55;M5; |
| | FGRRGPEQTQ | M19;M70 | GDSSSGWTA | M48;M9;M23 |
| 1204 | KRTATKAYNVTQAFG | M78;M25; | VFLLVTLAILTALRLC | M54;M16;M60;M25;M41; |
| | RRGPEQTQGN | M19;M70 | AYCCNIVNV | M17;M46;M39 |
| 1205 | TEKWESGVKDCVVLH | M46;M67; | VVFLLVTLAILTALRL | M54;M16;M60;M25;M41; |
| | SYFTSDYYQL | M14;M20 | CAYCCNIVN | M17;M46;M39 |
| 1206 | YTEKWESGVKDCVVL | M46;M67; | FLLVTLAILTALRLCA | M54;M16;M60;M25;M41; |
| | HSYFTSDYYQ | M14;M20 | YCCNIVNVS | M17;M46;M39 |
| 1207 | NDKVAGFAKFLKTNC | M79;M55; | LLVTLAILTALRLCAY | M54;M16;M60;M25;M41; |
| | CRFQEKDEDD | M73;M8 | CCNIVNVSL | M17;M46;M39 |
| 1208 | GVEHVTFFIYNKIVDE | M50;M44; | AFGGCVFSYVGCHNK | M40;M75;M19;M55;M40; |
| | PEEHVQIHT | M47;M49 | CAYWVPRASA | M75;M19;M55 |
| 1209 | TDTGVEHVTFFIYNKI | M50;M44; | VVNVVTTKIALKGGK | M57;M29;M11;M12;M57; |
| | VDEPEEHVQ | M47;M49 | IVNNWLKQLI | M29;M11;M12 |
| 1210 | TGVEHVTFFIYNKIVD | M50;M44; | QVVNVVTTKIALKGG | M57;M29;M11;M12;M57; |
| | EPEEHVQIH | M47;M49 | KIVNNWLKQL | M29;M11;M12 |
| 1211 | DTGVEHVTFFIYNKIV | M50;M44; | IGLALYYPSARIVYTA | M64;M21;M28;M5;M29; |
| | DEPEEHVQI | M47;M49 | CSHAAVDAL | M38;M17;M22 |
| 1212 | VEHVTFFIYNKIVDEPE | M50;M44; | YMLTYNKVENMTPR | M14;M11;M67;M74;M14; |
| | EHVQIHTI | M47;M49 | DLGACIDCSAR | M11;M67;M74 |
| 1213 | TSRYWEPEFYEAMYT | M75;M30; | LKWARFPKSDGTGTI | M38;M6;M59;M28;M38;M6; |
| | PHTVLQAVGA | M39;M16 | YTELEPPCRF | M59;M28 |
| 1214 | DNTSRYWEPEFYEAM | M75;M30; | FPKSDGTGTIYTELEP | M38;M6;M59;M28;M38;M6; |
| | YTPHTVLQAV | M39;M16 | PCRFVTDTP | M59;M28 |
| 1215 | NTSRYWEPEFYEAMY | M75;M30; | WARFPKSDGTGTIYT | M38;M6;M59;M28;M38;M6; |
| | TPHTVLQAVG | M39;M16 | ELEPPCRFVT | M59;M28 |
| 1216 | SRYWEPEFYEAMYTP | M75;M30; | DLKWARFPKSDGTGT | M38;M6;M59;M28;M38;M6; |
| | HTVLQAVGAC | M39;M16 | IYTELEPPCR | M59;M28 |
| 1217 | YWEPEFYEAMYTPHT | M75;M30; | RFPKSDGTGTIYTELE | M38;M6;M59;M28;M38;M6; |
| | VLQAVGACVL | M39;M16 | PPCRFVTDT | M59;M28 |
| 1218 | RYWEPEFYEAMYTPH | M75;M30; | KWARFPKSDGTGTIY | M38;M6;M59;M28;M38;M6; |
| | TVLQAVGACV | M39;M16 | TELEPPCRFV | M59;M28 |
| 1219 | VYRGTTTYKLNVGDY | M42;M34; | QDLKWARFPKSDGTG | M38;M6;M59;M28;M38;M6; |
| | FVLTSHTVMP | M43;M44 | TIYTELEPPC | M59;M28 |
| 1220 | TGKIADYNYKLPDDFT | M13;M29; | ARFPKSDGTGTIYTEL | M38;M6;M59;M28;M38;M6; |
| | GCVIAWNSN | M67;M12 | EPPCRFVTD | M59;M28 |
| 1221 | KFLVFLGIITTVAAFHQ | M29;M22; | WYDFVENPDILRVYA | M64;M21;M32;M48;M41; |
| | ECSLQSCT | M6;M59 | NLGERVRQAL | M49;M46;M22 |
| 1222 | HEVLLAPLLSAGIFGA | M36;M20; | DWYDFVENPDILRVY | M64;M21;M32;M48;M41; |
| | DPIHSLRVC | M36;M20 | ANLGERVRQA | M49;M46;M22 |
| 1223 | FNQHEVLLAPLLSAGI | M36;M20; | ISVTSNYSGVVTTVM | M29;M11;M38;M14;M29; |
| | FGADPIHSL | M36;M20 | FLARGIVFMC | M11;M38;M14 |
| 1224 | LAPLLSAGIFGADPIHS | M36;M20; | IISVTSNYSGVVTTVM | M29;M11;M38;M14;M29; |
| | LRVCVDTV | M36;M20 | FLARGIVFM | M11;M38;M14 |
| 1225 | EVLLAPLLSAGIFGAD | M36;M20; | LIISVTSNYSGVVTTV | M29;M11;M38;M14;M29; |
| | PIHSLRVCV | M36;M20 | MFLARGIVF | M11;M38;M14 |
| 1226 | NQHEVLLAPLLSAGIF | M36;M20; | SAYTVELGTEVNEFA | M43;M34;M39;M14;M43; |
| | GADPIHSLR | M36;M20 | CVVADAVIKT | M34;M39;M14 |
| 1227 | ENSYTTTIKPVTYKLD | M36;M20; | CSAYTVELGTEVNEF | M43;M34;M39;M14;M43; |
| | GVVCTEIDP | M36;M20 | ACVVADAVIK | M34;M39;M14 |
| 1228 | VLLAPLLSAGIFGADPI | M36;M20; | AFASEAARVVRSIFSR | M4;M42;M48;M59;M4;M42; |
| | HSLRVCVD | M36;M20 | TLETAQNSV | M48;M59 |
| 1229 | LLAPLLSAGIFGADPIH | M36;M20; | SNYQHEETIYNLLKD | M40;M30;M41;M42;M27; |
| | SLRVCVDT | M36;M20 | CPAVAKHDFF | M43;M39;M11 |
| 1230 | QHEVLLAPLLSAGIFG | M36;M20; | YQHEETIYNLLKDCP | M40;M30;M41;M42;M27; |
| | ADPIHSLRV | M36;M20 | AVAKHDFFKF | M43;M39;M11 |
| 1231 | CYKRNRATRVECTTIV | M29;M14; | NYQHEETIYNLLKDC | M40;M30;M41;M42;M27; |
| | NGVRRSFYV | M29;M14 | PAVAKHDFFK | M43;M39;M11 |
| 1232 | FRVYSSANNCTFEYVS | M57;M1; | KIKACVEEVTTTLEET | M32;M6;M28;M20;M32;M6; |
| | QPFLMDLEG | M82;M20 | KFLTENLLL | M28;M20 |
| 1233 | KTTLPVNVAFELWAK | M55;M28; | KDWYDFVENPDILRV | M64;M21;M32;M48;M43; |
| | RNIKPVPEVK | M66;M74 | YANLGERVRQ | M49;M46;M22 |
| 1234 | TTLPVNVAFELWAKR | M55;M28; | ITLKKRWQLALSKGV | M11;M74;M33;M27;M8; |
| | NIKPVPEVKI | M66;M74 | HFVCNLLLLF | M42;M82;M23 |
| 1235 | IPARARVECFDKFKVN | M50;M18; | IITLKKRWQLALSKG | M11;M74;M33;M27;M8; |
| | STLEQYVFC | M44;M10 | VHFVCNLLLL | M42;M82;M23 |
| 1236 | SIKNFKSVLYYQNNVF | M41;M22; | FVTQRNFYEPQIITTD | M64;M10;M5;M7;M30;M79; |
| | MSEAKCWTE | M48;M49 | NTFVSGNCD | M9;M23 |
| 1237 | FKSVLYYQNNVFMSE | M41;M22; | GGKGFCKLHNWNCV | M42;M39;M45;M41;M42; |
| | AKCWTETDLT | M48;M49 | NCDTFCAGSTF | M39;M45;M41 |
| 1238 | ASIKNFKSVLYYQNNV | M41;M22; | NGGKGFCKLHNWNC | M42;M39;M45;M41;M42; |
| | FMSEAKCWT | M48;M49 | VNCDTFCAGST | M39;M45;M41 |
| 1239 | KNFKSVLYYQNNVFM | M41;M22; | GLDSLDTYPSLETIQIT | M55;M29;M48;M41;M55; |
| | SEAKCWTETD | M48;M49 | ISSFKWDL | M29;M48;M41 |
| 1240 | NFKSVLYYQNNVFMS | M41;M22; | KAIVSTIQRKYKGIKI | M40;M5;M67;M14;M40;M5; |
| | EAKCWTETDL | M48;M49 | QEGVVDYGA | M67;M14 |
| 1241 | IKNFKSVLYYQNNVF | M41;M22; | AIVSTIQRKYKGIKIQE | M40;M5;M67;M14;M40;M5; |
| | MSEAKCWTET | M48;M49 | GVVDYGAR | M67;M14 |
| 1242 | VASIKNFKSVLYYQNN | M41;M22; | VSTIQRKYKGIKIQEG | M40;M5;M67;M14;M40;M5; |
| | VFMSEAKCW | M48;M49 | VVDYGARFY | M67;M14 |
| 1243 | YEDFQENWNTKHSSG | M74;M44; | IVSTIQRKYKGIKIQEG | M40;M5;M67;M14;M40;M5; |
| | VTRELMRELN | M74;M44 | VVDYGARF | M67;M14 |
| 1244 | EDFQENWNTKHSSGV | M74;M44; | TKAIVSTIQRKYKGIKI | M40;M5;M67;M14;M40;M5; |
| | TRELMRELNG | M74;M44 | QEGVVDYG | M67;M14 |
| 1245 | PYEDFQENWNTKHSS | M74;M44; | LPKGIMMNVAKYTQL | M73;M58;M78;M34;M48; |
| | GVTRELMREL | M74;M44 | CQYLNTLTLA | M41;M49;M11 |
| 1246 | LSVVNARLRAKHYVY | M57;M1; | DLQDLKWARFPKSDG | M4;M38;M28;M59;M4;M38; |
| | IGDPAQLPAP | M31;M37 | TGTIYTELEP | M28;M59 |
| 1247 | DTYACWHHSIGFDYV | M57;M1; | NSIIKTIQPRVEKKKL | M26;M29;M72;M28;M26; |
| | YNPFMIDVQQ | M43;M20 | DGFMGRIRS | M29;M72;M28 |
| 1248 | TYACWHHSIGFDYVY | M57;M1; | NSTYASQGLVASIKNF | M64;M21;M54;M48;M68; |
| | NPFMIDVQQW | M43;M20 | KSVLYYQNN | M49;M22;M23 |
| 1249 | LTNNVAFQTVKPGNF | M25;M29; | TDFVNEFYAYLRKHF | M71;M16;M57;M18;M35; |
| | NKDFYDFAVS | M6;M59 | SMMILSDDAV | M15;M52;M26 |
| 1250 | ALTNNVAFQTVKPGN | M25;M29; | DTDFVNEFYAYLRKH | M71;M16;M57;M18;M35; |
| | FNKDFYDFAV | M6;M59 | FSMMILSDDA | M15;M52;M26 |
| 1251 | VFCTVNALPETTADIV | M38;M55; | IKVTLVFLFVAAIFYLI | M1;M34;M39;M18;M1;M34; |
| | VFDEISMAT | M28;M49 | TPVHVMSK | M39;M18 |
| 1252 | IPTITQMNLKYAISAKN | M35;M82; | LKDCVMYASAVVLLI | M75;M39;M12;M46;M75; |
| | RARTVAGV | M18;M14 | LMTARTVYDD | M39;M12;M46 |
| 1253 | LQSADAQSFLNRVCG | M15;M46; | TPKYKFVRIQPGQTFS | M34;M29;M27;M14;M34; |
| | VSAARLTPCG | M47;M45 | VLACYNGSP | M29;M27;M14 |
| 1254 | MLQSADAQSFLNRVC | M15;M46; | YTDFATSACVLAAEC | M70;M29;M14;M62;M70; |
| | GVSAARLTPC | M47;M45 | TIFKDASGKP | M29;M14;M62 |
| 1255 | SADAQSFLNRVCGVS | M15;M46; | EYTDFATSACVLAAE | M70;M29;M14;M62;M70; |
| | AARLTPCGTG | M47;M45 | CTIFKDASGK | M29;M14;M62 |
| 1256 | QSADAQSFLNRVCGV | M15;M46; | SKLWAQCVQLHNDIL | M36;M32;M68;M58;M36; |
| | SAARLTPCGT | M47;M45 | LAKDTTEAFE | M32;M68;M58 |
| 1257 | PMLQSADAQSFLNRV | M15;M46; | GVHFVCNLLLLFVTV | M21;M6;M37;M50;M41; |
| | CGVSAARLTP | M47;M45 | YSHLLLVAAG | M43;M42;M22 |
| 1258 | TNNVAFQTVKPGNFN | M29;M6; | KLKVDTANPKTPKYK | M77;M29;M34;M14;M77; |
| | KDFYDFAVSK | M59;M70 | FVRIQPGQTF | M29;M34;M14 |
| 1259 | NNVAFQTVKPGNFNK | M29;M6; | KGLNNLNRGMVLGS | M55;M12;M17;M10;M55; |
| | DFYDFAVSKG | M59;M70 | LAATVRLQAGN | M12;M17;M10 |
| 1260 | NVAFQTVKPGNFNKD | M29;M6; | PNASFDNFKFVCDNIK | M64;M25;M19;M23;M64; |
| | FYDFAVSKGF | M59;M70 | FADDLNQLT | M25;M19;M23 |
| 1261 | RNVIPTITQMNLKYAIS | M18;M35; | VVFLHVTYVPAQEKN | M28;M66;M70;M78;M79; |
| | AKNRARTV | M58;M14 | FTTAPAICHD | M33;M26;M82 |
| 1262 | SASAFFGMSRIGMEVT | M5;M28; | GVVFLHVTYVPAQEK | M28;M66;M70;M78;M79; |
| | PSGTWLTYT | M16;M23 | NFTTAPAICH | M33;M26;M82 |
| 1263 | DVEWKFYDAQPCSDK | M29;M6; | VFLHVTYVPAQEKNF | M28;M66;M70;M78;M79; |
| | AYKIEELFYS | M59;M41 | TTAPAICHDG | M33;M26;M82 |
| 1264 | QADVEWKFYDAQPCS | M29;M6; | HGVVFLHVTYVPAQE | M28;M66;M70;M78;M79; |
| | DKAYKIEELF | M59;M41 | KNFTTAPAIC | M33;M26;M82 |
| 1265 | VEWKFYDAQPCSDKA | M29;M6; | DGADVTKIKPHNSHE | M55;M21;M53;M48;M55; |
| | YKIEELFYSY | M59;M41 | GKTFYVLPND | M21;M53;M48 |
| 1266 | ADVEWKFYDAQPCSD | M29;M6; | PTYLDGADVTKIKPH | M55;M21;M53;M48;M55; |
| | KAYKIEELFY | M59;M41 | NSHEGKTFYV | M21;M53;M48 |
| 1267 | FRELGVVHNQDVNLH | M21;M53; | LDGADVTKIKPHNSH | M55;M21;M53;M48;M55; |
| | SSRLSFKELL | M38;M14 | EGKTFYVLPN | M21;M53;M48 |
| 1268 | RELGVVHNQDVNLHS | M21;M53; | YLDGADVTKIKPHNS | M55;M21;M53;M48;M55; |
| | SRLSFKELLV | M38;M14 | HEGKTFYVLP | M21;M53;M48 |
| 1269 | ELGVVHNQDVNLHSS | M21;M53; | TYLDGADVTKIKPHN | M55;M21;M53;M48;M55; |
| | RLSFKELLVY | M38;M14 | SHEGKTFYVL | M21;M53;M48 |
| 1270 | VVHNQDVNLHSSRLSF | M21;M53; | CHIDHPNPKGFCDLK | M42;M39;M63;M43;M42; |
| | KELLVYAAD | M38;M14 | GKYVQIPTTC | M39;M63;M43 |
| 1271 | LGVVHNQDVNLHSSR | M21;M53; | CRCHIDHPNPKGFCD | M42;M39;M63;M43;M42; |
| | LSFKELLVYA | M38;M14 | LKGKYVQIPT | M39;M63;M43 |
| 1272 | GVVHNQDVNLHSSRL | M21;M53; | RCHIDHPNPKGFCDL | M42;M39;M63;M43;M42; |
| | SFKELLVYAA | M38;M14 | KGKYVQIPTT | M39;M63;M43 |
| 1273 | STFEEAALCTFLLNKE | M13;M44; | YLALYNKYKYFSGA | M1;M67;M66;M31;M1;M67; |
| | MYLKLRSDV | M13;M44 | MDTTSYREAAC | M66;M31 |
| 1274 | SFSTFEEAALCTFLLNK | M13;M44; | SEVGPEHSLAEYHNE | M13;M39;M68;M48;M13; |
| | EMYLKLRS | M13;M44 | SGLKTILRKG | M39;M68;M48 |
| 1275 | FSTFEEAALCTFLLNK | M13;M44; | HNSEVGPEHSLAEYH | M13;M39;M68;M48;M13; |
| | EMYLKLRSD | M13;M44 | NESGLKTILR | M39;M68;M48 |
| 1276 | TFEEAALCTFLLNKEM | M13;M44; | NSEVGPEHSLAEYHN | M13;M39;M68;M48;M13; |
| | YLKLRSDVL | M13;M44 | ESGLKTILRK | M39;M68;M48 |
| 1277 | FEEAALCTFLLNKEMY | M13;M44; | NASVVNIQKEIDRLNE | M70;M78;M65;M2;M61; |
| | LKLRSDVLL | M13;M44 | VAKNLNESL | M79;M82;M47 |
| 1278 | AVTANVNALLSTDGN | M57;M9; | ASVVNIQKEIDRLNEV | M70;M78;M65;M2;M61; |
| | KIADKYVRNL | M8;M10 | AKNLNESLI | M79;M82;M47 |
| 1279 | QAVTANVNALLSTDG | M57;M9; | PRVEKKKLDGFMGRI | M26;M29;M6;M58;M26; |
| | NKIADKYVRN | M8;M10 | RSVYPVASPN | M29;M6;M58 |
| 1280 | SAFVNLKQLPFFYYSD | M32;M41; | RVEKKKLDGFMGRIR | M26;M29;M6;M58;M26; |
| | SPCESHGKQ | M54;M45 | SVYPVASPNE | M29;M6;M58 |
| 1281 | TKRNVIPTITQMNLKY | M14;M35; | PFEIKLAKKFDTFNGE | M57;M27;M45;M20;M57; |
| | AISAKNRAR | M58;M59 | CPNFVFPLN | M27;M45;M20 |
| 1282 | YAAVINGDRWFLNRF | M14;M66; | KLAKKFDTFNGECPN | M57;M27;M45;M20;M57; |
| | TTTLNDFNLV | M14;M66 | FVFPLNSIIK | M27;M45;M20 |
| 1283 | AAVINGDRWFLNRFTT | M14;M66; | LAKKFDTFNGECPNF | M57;M27;M45;M20;M57; |
| | TLNDFNLVA | M14;M66 | VFPLNSIIKT | M27;M45;M20 |
| 1284 | AVINGDRWFLNRFTTT | M14;M66; | EIKLAKKFDTFNGECP | M57;M27;M45;M20;M57; |
| | LNDFNLVAM | M14;M66 | NFVFPLNSI | M27;M45;M20 |
| 1285 | WLYAAVINGDRWFLN | M14;M66; | FEIKLAKKFDTFNGEC | M57;M27;M45;M20;M57; |
| | RFTTTLNDFN | M14;M66 | PNFVFPLNS | M27;M45;M20 |
| 1286 | LYAAVINGDRWFLNR | M14;M66; | IKLAKKFDTFNGECPN | M57;M27;M45;M20;M57; |
| | FTTTLNDFNL | M14;M66 | FVFPLNSII | M27;M45;M20 |
| 1287 | ICQAVTANVNALLSTD | M10;M11; | AMQRKLEKMADQA | M55;M82;M2;M74;M55; |
| | GNKIADKYV | M9;M8 | MTQMYKQARSED | M82;M2;M74 |
| 1288 | NICQAVTANVNALLST | M10;M11; | FKEGVEFLRDGWEIV | M4;M22;M74;M49;M4;M22; |
| | DGNKIADKY | M9;M8 | KFISTCACEI | M74;M49 |
| 1289 | VFNICQAVTANVNALL | M10;M11; | TDFATSACVLAAECTI | M33;M70;M14;M62;M33; |
| | STDGNKIAD | M9;M8 | FKDASGKPV | M70;M14;M62 |
| 1290 | FNICQAVTANVNALLS | M10;M11; | TTRQVVNVVTTKIAL | M64;M29;M22;M2;M64; |
| | TDGNKIADK | M9;M8 | KGGKIVNNWL | M29;M22;M2 |
| 1291 | YIINLIIKNLSKSLTENK | M11;M73; | MSFPQSAPHGVVFLH | M64;M21;M28;M66;M70; |
| | YSQLDEE | M28;M17 | VTYVPAQEKN | M53;M26;M9 |
| 1292 | IINLIIKNLSKSLTENKY | M11;M73; | DVGDSAEVAVKMFD | M26;M41;M14;M37;M26; |
| | SQLDEEQ | M28;M17 | AYVNTFSSTFN | M41;M14;M37 |
| 1293 | INLIIKNLSKSLTENKY | M11;M73; | KDEDDNLIDSYFVVK | M71;M58;M16;M54;M18; |
| | SQLDEEQP | M28;M17 | RHTFSNYQHE | M15;M52;M47 |
| 1294 | DYIINLIIKNLSKSLTEN | M11;M73; | EKDEDDNLIDSYFVV | M71;M58;M16;M54;M18; |
| | KYSQLDE | M28;M17 | KRHTFSNYQH | M15;M52;M47 |
| 1295 | DFQVTIAEILLIIMRTF | M1;M5; | QEKDEDDNLIDSYFV | M71;M58;M16;M54;M18; |
| | KVSIWNLD | M61;M37 | VKRHTFSNYQ | M15;M52;M47 |
| 1296 | YFNSVCRLMKTIGPD | M17;M5; | LWEIQQVVDADSKIV | M64;M7;M22;M54;M64;M7; |
| | MFLGTCRRCP | M6;M59 | QLSEISMDNS | M22;M54 |
| 1297 | EYFNSVCRLMKTIGPD | M17;M5; | SMQGAVDINKLCEEM | M60;M54;M45;M49;M60; |
| | MFLGTCRRC | M6;M59 | LDNRATLQAI | M54;M45;M49 |
| 1298 | PEYFNSVCRLMKTIGP | M17;M5; | LSMQGAVDINKLCEE | M60;M54;M45;M49;M60; |
| | DMFLGTCRR | M6;M59 | MLDNRATLQA | M54;M45;M49 |
| 1299 | FNSVCRLMKTIGPDMF | M17;M5; | DDTLRVEAFEYYHTT | M29;M6;M59;M41;M29;M6; |
| | LGTCRRCPA | M6;M59 | DPSFLGRYMS | M59;M41 |
| 1300 | PAMHAASGNLLLDKR | M57;M7; | LRVEAFEYYHTTDPSF | M29;M6;M59;M41;M29;M6; |
| | TTCFSVAALT | M9;M50 | LGRYMSALN | M59;M41 |
| 1301 | SVYAWNRKRISNCVA | M7;M67; | DTLRVEAFEYYHTTD | M29;M6;M59;M41;M29;M6; |
| | DYSVLYNSAS | M27;M74 | PSFLGRYMSA | M59;M41 |
| 1302 | VYAWNRKRISNCVAD | M7;M67; | NDDTLRVEAFEYYHT | M29;M6;M59;M41;M29;M6; |
| | YSVLYNSASF | M27;M74 | TDPSFLGRYM | M59;M41 |
| 1303 | GTTLPKGFYAEGSRGG | M5;M42; | TLRVEAFEYYHTTDP | M29;M6;M59;M41;M29;M6; |
| | SQASSRSSS | M75;M45 | SFLGRYMSAL | M59;M41 |
| 1304 | TTLPKGFYAEGSRGGS | M5;M42; | RVEAFEYYHTTDPSFL | M29;M6;M59;M41;M29;M6; |
| | QASSRSSSR | M75;M45 | GRYMSALNH | M59;M41 |
| 1305 | SQPFLMDLEGKQGNF | M6;M46; | ADVFHLYLQYIRKLH | M71;M32;M52;M16;M35; |
| | KNLREFVFKN | M54;M59 | DELTGHMLDM | M46;M9;M47 |
| 1306 | KYKYFSGAMDTTSYR | M1;M67; | YFSGAMDTTSYREAA | M78;M1;M79;M5;M78;M1; |
| | EAACCHLAKA | M1;M67 | CCHLAKALND | M79;M5 |
| 1307 | FEPSTQYEYGTEDDYQ | M1;M67; | FSGAMDTTSYREAAC | M78;M1;M79;M5;M78;M1; |
| | GKPLEFGAT | M1;M67 | CHLAKALNDF | M79;M5 |
| 1308 | LYNKYKYFSGAMDTT | M1;M67; | GAMDTTSYREAACC | M78;M1;M79;M5;M78;M1; |
| | SYREAACCHL | M1;M67 | HLAKALNDFSN | M79;M5 |
| 1309 | EEFEPSTQYEYGTEDD | M1;M67; | SGAMDTTSYREAACC | M78;M1;M79;M5;M78;M1; |
| | YQGKPLEFG | M1;M67 | HLAKALNDFS | M79;M5 |
| 1310 | YNKYKYFSGAMDTTS | M1;M67; | EKFKEGVEFLRDGWE | M57;M4;M27;M20;M57;M4; |
| | YREAACCHLA | M1;M67 | IVKFISTCAC | M27;M20 |
| 1311 | EEEFEPSTQYEYGTED | M1;M67; | LDGFMGRIRSVYPVA | M68;M29;M6;M58;M68; |
| | DYQGKPLEF | M1;M67 | SPNECNQMCL | M29;M6;M58 |
| 1312 | YKYFSGAMDTTSYRE | M1;M67; | GFMGRIRSVYPVASP | M68;M29;M6;M58;M68; |
| | AACCHLAKAL | M1;M67 | NECNQMCLST | M29;M6;M58 |
| 1313 | EEEEFEPSTQYEYGTE | M1;M67; | DGFMGRIRSVYPVAS | M68;M29;M6;M58;M68; |
| | DDYQGKPLE | M1;M67 | PNECNQMCLS | M29;M6;M58 |
| 1314 | ALYNKYKYFSGAMDT | M1;M67; | FMGRIRSVYPVASPNE | M68;M29;M6;M58;M68; |
| | TSYREAACCH | M1;M67 | CNQMCLSTL | M29;M6;M58 |
| 1315 | EFEPSTQYEYGTEDDY | M1;M67; | KLDGFMGRIRSVYPV | M68;M29;M6;M58;M68; |
| | QGKPLEFGA | M1;M67 | ASPNECNQMC | M29;M6;M58 |
| 1316 | NKYKYFSGAMDTTSY | M1;M67; | VEVQPQLEMELTPVV | M56;M29;M60;M6;M56; |
| | REAACCHLAK | M1;M67 | QTIEVNSFSG | M29;M60;M6 |
| 1317 | GNYNYLYRLFRKSNL | M1;M53; | EVQPQLEMELTPVVQ | M56;M29;M60;M6;M56; |
| | KPFERDISTE | M17;M37 | TIEVNSFSGY | M29;M60;M6 |
| 1318 | KKRWQLALSKGVHFV | M50;M49; | VQPQLEMELTPVVQT | M56;M29;M60;M6;M56; |
| | CNLLLLFVTV | M8;M23 | IEVNSFSGYL | M29;M60;M6 |
| 1319 | TRQVVNVVTTKIALK | M29;M12; | KTLVATAEAELAKNV | M38;M29;M73;M6;M38; |
| | GGKIVNNWLK | M29;M12 | SLDNVLSTFI | M29;M73;M6 |
| 1320 | LVDFQVTIAEILLIIMR | M5;M8; | TACTDDNALAYYNTT | M21;M22;M27;M6;M21; |
| | TFKVSIWN | M61;M37 | KGGRFVLALL | M22;M27;M6 |
| 1321 | AASGNLLLDKRTTCFS | M50;M7; | ACTDDNALAYYNTT | M21;M22;M27;M6;M21; |
| | VAALTNNVA | M29;M9 | KGGRFVLALLS | M22;M27;M6 |
| 1322 | ASGNLLLDKRTTCFSV | M50;M7; | TQTACTDDNALAYY | M21;M22;M27;M6;M21; |
| | AALTNNVAF | M29;M9 | NTTKGGRFVLA | M22;M27;M6 |
| 1323 | VYYHKNNKSWMESEF | M5;M41; | QTACTDDNALAYYN | M21;M22;M27;M6;M21; |
| | RVYSSANNCT | M48;M70 | TTKGGRFVLAL | M22;M27;M6 |
| 1324 | FLGVYYHKNNKSWM | M41;M22; | TTQTACTDDNALAYY | M21;M22;M27;M6;M21; |
| | ESEFRVYSSAN | M28;M70 | NTTKGGRFVL | M22;M27;M6 |
| 1325 | YKRDAPAHISTIGVCS | M59;M6; | CTDDNALAYYNTTK | M21;M22;M27;M6;M21; |
| | MTDIAKKPT | M66;M70 | GGRFVLALLSD | M22;M27;M6 |
| 1326 | DYKRDAPAHISTIGVC | M59;M6; | GTTQTACTDDNALAY | M21;M22;M27;M6;M21; |
| | SMTDIAKKP | M66;M70 | YNTTKGGRFV | M22;M27;M6 |
| 1327 | TQTTETAHSCNVNRFN | M33;M25; | IAWYTERSEKSYELQ | M25;M30;M39;M34;M25; |
| | VAITRAKVG | M6;M59 | TPFEIKLAKK | M30;M39;M34 |
| 1328 | TTETAHSCNVNRFNV | M33;M25; | EIAWYTERSEKSYEL | M25;M30;M39;M34;M25; |
| | AITRAKVGIL | M6;M59 | QTPFEIKLAK | M30;M39;M34 |
| 1329 | QTTETAHSCNVNRFN | M33;M25; | SNLGMPSYCTGYREG | M50;M18;M45;M49;M50; |
| | VAITRAKVGI | M6;M59 | YLNSTNVTIA | M18;M45;M49 |
| 1330 | KPNELSRVLGLKTLAT | M22;M6; | LMSNLGMPSYCTGYR | M50;M18;M45;M49;M50; |
| | HGLAAVNSV | M22;M6 | EGYLNSTNVT | M18;M45;M49 |
| 1331 | IKKPNELSRVLGLKTL | M22;M6; | NLGMPSYCTGYREGY | M50;M18;M45;M49;M50; |
| | ATHGLAAVN | M22;M6 | LNSTNVTIAT | M18;M45;M49 |
| 1332 | LTIKKPNELSRVLGLK | M22;M6; | VLMSNLGMPSYCTGY | M50;M18;M45;M49;M50; |
| | TLATHGLAA | M22;M6 | REGYLNSTNV | M18;M45;M49 |
| 1333 | TIKKPNELSRVLGLKT | M22;M6; | MSNLGMPSYCTGYRE | M50;M18;M45;M49;M50; |
| | LATHGLAAV | M22;M6 | GYLNSTNVTI | M18;M45;M49 |
| 1334 | NELSRVLGLKTLATHG | M22;M6; | LGMPSYCTGYREGYL | M50;M18;M45;M49;M50; |
| | LAAVNSVPW | M22;M6 | NSTNVTIATY | M18;M45;M49 |
| 1335 | PNELSRVLGLKTLATH | M22;M6; | ALVYFLQSINFVRIIM | M4;M75;M24;M10;M60; |
| | GLAAVNSVP | M22;M6 | RLWLCWKCR | M25;M9;M23 |
| 1336 | SLTIKKPNELSRVLGL | M22;M6; | DDNALAYYNTTKGG | M21;M22;M6;M20;M21; |
| | KTLATHGLA | M22;M6 | RFVLALLSDLQ | M22;M6;M20 |
| 1337 | KKPNELSRVLGLKTLA | M22;M6; | FDVLKSEDAQGMDN | M64;M22;M6;M37;M64; |
| | THGLAAVNS | M22;M6 | LACEDLKPVSE | M22;M6;M37 |
| 1338 | ELSRVLGLKTLATHGL | M22;M6; | SKPSVEQRKQDDKKI | M65;M67;M28;M74;M65; |
| | AAVNSVPWD | M22;M6 | KACVEEVTTT | M67;M28;M74 |
| 1339 | LAYILFTRFFYVLGLA | M5;M45; | KPSVEQRKQDDKKIK | M65;M67;M28;M74;M65; |
| | AIMQLFFSY | M5;M45 | ACVEEVTTTL | M67;M28;M74 |
| 1340 | ILFTRFFYVLGLAAIM | M5;M45; | QEYADVFHLYLQYIR | M71;M32;M16;M61;M35; |
| | QLFFSYFAV | M5;M45 | KLHDELTGHM | M52;M9;M47 |
| 1341 | AYILFTRFFYVLGLAAI | M5;M45; | EYADVFHLYLQYIRK | M71;M32;M16;M61;M35; |
| | MQLFFSYF | M5;M45 | LHDELTGHML | M52;M9;M47 |
| 1342 | YILFTRFFYVLGLAAI | M5;M45; | NQEYADVFHLYLQYI | M71;M32;M16;M61;M35; |
| | MQLFFSYFA | M5;M45 | RKLHDELTGH | M52;M9;M47 |
| 1343 | WFLAYILFTRFFYVLG | M5;M45; | TRCLNRVCTNYMPYF | M69;M29;M6;M20;M69; |
| | LAAIMQLFF | M5;M45 | FTLLLQLCTF | M29;M6;M20 |
| 1344 | FLAYILFTRFFYVLGLA | M5;M45; | MNVLTLVYKVYYGN | M1;M41;M24;M37;M1;M41; |
| | AIMQLFFS | M5;M45 | ALDQAISMWAL | M24;M37 |
| 1345 | EWFLAYILFTRFFYVL | M5;M45; | RVWTLMNVLTLVYK | M1;M41;M24;M37;M1;M41; |
| | GLAAIMQLF | M5;M45 | VYYGNALDQAI | M24;M37 |
| 1346 | AEWFLAYILFTRFFYV | M5;M45; | LMNVLTLVYKVYYG | M1;M41;M24;M37;M1;M41; |
| | LGLAAIMQL | M5;M45 | NALDQAISMWA | M24;M37 |
| 1347 | VAEWFLAYILFTRFFY | M5;M45; | RRVWTLMNVLTLVY | M1;M41;M24;M37;M1;M41; |
| | VLGLAAIMQ | M5;M45 | KVYYGNALDQA | M24;M37 |
| 1348 | DPFLGVYYHKNNKSW | M21;M22; | WTLMNVLTLVYKVY | M1;M41;M24;M37;M1;M41; |
| | MESEFRVYSS | M28;M70 | YGNALDQAISM | M24;M37 |
| 1349 | QLTGYKKPASRELKVT | M57;M63; | TLMNVLTLVYKVYY | M1;M41;M24;M37;M1;M41; |
| | FFPDLNGDV | M57;M63 | GNALDQAISMW | M24;M37 |
| 1350 | NQLTGYKKPASRELK | M57;M63; | NVLTLVYKVYYGNA | M1;M41;M24;M37;M1;M41; |
| | VTFFPDLNGD | M57;M63 | LDQAISMWALI | M24;M37 |
| 1351 | DGKMKDLSPRWYFYY | M52;M32; | VWTLMNVLTLVYKV | M1;M41;M24;M37;M1;M41; |
| | LGTGPEAGLP | M6;M31 | YYGNALDQAIS | M24;M37 |
| 1352 | YICGDSTECSNLLLQY | M13;M41; | TARTVYDDGARRVW | M5;M11;M2;M20;M5;M11; |
| | GSFCTQLNR | M46;M48 | TLMNVLTLVYK | M2;M20 |
| 1353 | LFNKVTLADAGFIKQY | M21;M41; | AANFCALILAYCNKT | M79;M41;M48;M49;M79; |
| | GDCLGDIAA | M48;M70 | VGELGDVRET | M41;M48;M49 |
| 1354 | LLFNKVTLADAGFIKQ | M21;M41; | EAANFCALILAYCNK | M79;M41;M48;M49;M79; |
| | YGDCLGDIA | M48;M70 | TVGELGDVRE | M41;M48;M49 |
| 1355 | ALVSDVGDSAEVAVK | M14;M37; | ANFCALILAYCNKTV | M79;M41;M48;M49;M79; |
| | MFDAYVNTFS | M14;M37 | GELGDVRETM | M41;M48;M49 |
| 1356 | LVSDVGDSAEVAVKM | M14;M37; | DEFTPFDVVRQCSGV | M4;M46;M60;M54;M4;M46; |
| | FDAYVNTFSS | M14;M37 | TFQSAVKRTI | M60;M54 |
| 1357 | VVFVLWAHGFELTSM | M46;M27; | TSEDMLNPNYEDLLIR | M29;M9;M28;M24;M29;M9; |
| | KYFVKIGPER | M28;M66 | KSNHNFLVQ | M28;M24 |
| 1358 | ILLIIMRTFKVSIWNLD | M1;M5; | SVRVVTTFDSEYCRH | M43;M22;M48;M20;M43; |
| | YIINLIIK | M37;M20 | GTCERSEAGV | M22;M48;M20 |
| 1359 | AEILLIIMRTFKVSIWN | M1;M5; | GLFCLLNRYFRLTLG | M18;M56;M14;M37;M18; |
| | LDYIINLI | M37;M20 | VYDYLVSTQE | M56;M14;M37 |
| 1360 | LLIIMRTFKVSIWNLD | M1;M5; | LIDSYFVVKRHTFSNY | M71;M58;M16;M18;M15; |
| | YIINLIIKN | M37;M20 | QHEETIYNL | M52;M47;M20 |
| 1361 | EILLIIMRTFKVSIWNL | M1;M5; | NLIDSYFVVKRHTFSN | M71;M58;M16;M18;M15; |
| | DYIINLII | M37;M20 | YQHEETIYN | M52;M47;M20 |
| 1362 | KCTLKSFTVEKGIYQT | M75;M25; | DNLIDSYFVVKRHTFS | M71;M58;M16;M18;M15; |
| | SNFRVQPTE | M8;M23 | NYQHEETIY | M52;M47;M20 |
| 1363 | DKSVYYTSNPTTFHLD | M50;M45; | EDDNLIDSYFVVKRH | M71;M58;M16;M18;M15; |
| | GEVITFDNL | M50;M45 | TFSNYQHEET | M52;M47;M20 |
| 1364 | IKGLNNLNRGMVLGS | M12;M17; | DDNLIDSYFVVKRHT | M71;M58;M16;M18;M15; |
| | LAATVRLQAG | M12;M17 | FSNYQHEETI | M52;M47;M20 |
| 1365 | STDVVYRAFDIYNDK | M78;M79; | QQVVDADSKIVQLSEI | M7;M60;M54;M49;M7;M60; |
| | VAGFAKFLKT | M7;M41 | SMDNSPNLA | M54;M49 |
| 1366 | SLENVAFNVVNKGHF | M15;M24; | VVDADSKIVQLSEISM | M7;M60;M54;M49;M7;M60; |
| | DGQQGEVPVS | M16;M71 | DNSPNLAWP | M54;M49 |
| 1367 | LENVAFNVVNKGHFD | M15;M24; | QVVDADSKIVQLSEIS | M7;M60;M54;M49;M7;M60; |
| | GQQGEVPVSI | M16;M71 | MDNSPNLAW | M54;M49 |
| 1368 | SKKPRQKRTATKAYN | M78;M5; | SDIDITFLKKDAPYIV | M57;M30;M11;M58;M57; |
| | VTQAFGRRGP | M2;M70 | GDVVQEGVL | M30;M11;M58 |
| 1369 | ASKKPRQKRTATKAY | M78;M5; | VHVMSKHTDFSSEIIG | M26;M53;M48;M41;M26; |
| | NVTQAFGRRG | M2;M70 | YKAIDGGVT | M53;M48;M41 |
| 1370 | LYFIKGLNNLNRGMV | M12;M24; | DSMSYEDQDALFAYT | M71;M24;M55;M10;M53; |
| | LGSLAATVRL | M12;M24 | KRNVIPTITQ | M35;M9;M23 |
| 1371 | YLYFIKGLNNLNRGM | M12;M24; | SYEDQDALFAYTKRN | M71;M24;M55;M10;M53; |
| | VLGSLAATVR | M12;M24 | VIPTITQMNL | M35;M9;M23 |
| 1372 | DMILSLLSKGRLIIREN | M21;M41; | MSYEDQDALFAYTKR | M71;M24;M55;M10;M53; |
| | NRVVISSD | M9;M48 | NVIPTITQMN | M35;M9;M23 |
| 1373 | PSGTWLTYTGAIKLDD | M10;M7; | SMSYEDQDALFAYTK | M71;M24;M55;M10;M53; |
| | KDPNFKDQV | M41;M35 | RNVIPTITQM | M35;M9;M23 |
| 1374 | SRVLGLKTLATHGLA | M54;M6; | SSEIIGYKAIDGGVTR | M43;M26;M41;M48;M43; |
| | AVNSVPWDTI | M54;M6 | DIASTDTCF | M26;M41;M48 |
| 1375 | RVLGLKTLATHGLAA | M54;M6; | ISNEKQEILGTVSWNL | M75;M24;M9;M8;M75;M24; |
| | VNSVPWDTIA | M54;M6 | REMLAHAEE | M9;M8 |
| 1376 | VLGLKTLATHGLAAV | M54;M6; | SIISNEKQEILGTVSW | M75;M24;M9;M8;M75;M24; |
| | NSVPWDTIAN | M54;M6 | NLREMLAHA | M9;M8 |
| 1377 | VICTSEDMLNPNYEDL | M29;M28; | IISNEKQEILGTVSWN | M75;M24;M9;M8;M75;M24; |
| | LIRKSNHNF | M29;M28 | LREMLAHAE | M9;M8 |
| 1378 | CTSEDMLNPNYEDLLI | M29;M28; | AEVAVKMFDAYVNT | M70;M41;M8;M37;M70; |
| | RKSNHNFLV | M29;M28 | FSSTFNVPMEK | M41;M8;M37 |
| 1379 | ICTSEDMLNPNYEDLLI | M29;M28; | LAYYNTTKGGRFVLA | M33;M70;M6;M20;M33; |
| | RKSNHNFL | M29;M28 | LLSDLQDLKW | M70;M6;M20 |
| 1380 | YDNKLKAHKDKSAQC | M13;M21; | ALAYYNTTKGGRFVL | M33;M70;M6;M20;M33; |
| | FKMFYKGVIT | M63;M52 | ALLSDLQDLK | M70;M6;M20 |
| 1381 | NLLLLFVTVYSHLLLV | M42;M6; | VYSVIYLYLTFYLTND | M50;M60;M54;M48;M50; |
| | AAGLEAPFL | M43;M37 | VSFLAHIQW | M60;M54;M48 |
| 1382 | VRNLQHRLYECLYRN | M52;M2; | ANNTKGSLPINVIVFD | M7;M56;M26;M52;M7;M56; |
| | RDVDTDFVNE | M47;M35 | GKSKCEESS | M26;M52 |
| 1383 | ECSNLLLQYGSFCTQL | M13;M41; | NNTKGSLPINVIVEDG | M7;M56;M26;M52;M7;M56; |
| | NRALTGIAV | M43;M48 | KSKCEESSA | M26;M52 |
| 1384 | VFKNIDGYFKIYSKHT | M15;M52; | VTCGTTTLNGLWLDD | M79;M7;M9;M24;M79;M7; |
| | PINLVRDLP | M16;M71 | VVYCPRHVIC | M9;M24 |
| 1385 | REFVFKNIDGYFKIYS | M15;M52; | EGNFYGPFVDRQTAQ | M15;M46;M2;M58;M15; |
| | KHTPINLVR | M16;M71 | AAGTDTTITV | M46;M2;M58 |
| 1386 | FVFKNIDGYFKIYSKH | M15;M52; | YGPFVDRQTAQAAGT | M15;M46;M2;M58;M15; |
| | TPINLVRDL | M16;M71 | DTTITVNVLA | M46;M2;M58 |
| 1387 | FKNIDGYFKIYSKHTPI | M15;M52; | NFYGPFVDRQTAQAA | M15;M46;M2;M58;M15; |
| | NLVRDLPQ | M16;M71 | GTDTTITVNV | M46;M2;M58 |
| 1388 | EFVFKNIDGYFKIYSK | M15;M52; | GNFYGPFVDRQTAQA | M15;M46;M2;M58;M15; |
| | HTPINLVRD | M16;M71 | AGTDTTITVN | M46;M2;M58 |
| 1389 | LREFVFKNIDGYFKIYS | M15;M52; | FYGPFVDRQTAQAAG | M15;M46;M2;M58;M15; |
| | KHTPINLV | M16;M71 | TDTTITVNVL | M46;M2;M58 |
| 1390 | TPSFKKGAKLLHKPIV | M1;M27; | LEGNFYGPFVDRQTA | M15;M46;M2;M58;M15; |
| | WHVNNATNK | M1;M27 | QAAGTDTTIT | M46;M2;M58 |
| 1391 | PSFKKGAKLLHKPIVW | M1;M27; | LNLEEAARYMRSLKV | M5;M72;M16;M35;M5;M72; |
| | HVNNATNKA | M1;M27 | PATVSVSSPD | M16;M35 |
| 1392 | PNMLRIMASLVLARK | M5;M69; | HGLNLEEAARYMRSL | M5;M72;M16;M35;M5;M72; |
| | HTTCCSLSHR | M2;M35 | KVPATVSVSS | M16;M35 |
| 1393 | RLRAKHYVYIGDPAQ | M57;M30; | NLEEAARYMRSLKVP | M5;M72;M16;M35;M5;M72; |
| | LPAPRTLLTK | M40;M31 | ATVSVSSPDA | M16;M35 |
| 1394 | ARLRAKHYVYIGDPA | M57;M30; | GLNLEEAARYMRSLK | M5;M72;M16;M35;M5;M72; |
| | QLPAPRTLLT | M40;M31 | VPATVSVSSP | M16;M35 |
| 1395 | LRAKHYVYIGDPAQLP | M57;M30; | LEEAARYMRSLKVPA | M5;M72;M16;M35;M5;M72; |
| | APRTLLTKG | M40;M31 | TVSVSSPDAV | M16;M35 |
| 1396 | APLIELCVDEAGSKSPI | M64;M7; | THGLNLEEAARYMRS | M5;M72;M16;M35;M5;M72; |
| | QYIDIGNY | M21;M23 | LKVPATVSVS | M16;M35 |
| 1397 | LNRYFRLTLGVYDYL | M6;M31; | KDNSYFTEQPIDLVPN | M64;M55;M39;M60;M64; |
| | VSTQEFRYMN | M6;M31 | QPYPNASFD | M55;M39;M60 |
| 1398 | NRYFRLTLGVYDYLV | M6;M31; | DNSYFTEQPIDLVPNQ | M64;M55;M39;M60;M64; |
| | STQEFRYMNS | M6;M31 | PYPNASFDN | M55;M39;M60 |
| 1399 | TSDLATNNLVVMAYIT | M50;M12; | SLPINVIVFDGKSKCE | M50;M7;M56;M52;M50;M7; |
| | GGVVQLTSQ | M50;M12 | ESSAKSASV | M56;M52 |
| 1400 | SNHNFLVQAGNVQLR | M12;M58; | LPINVIVFDGKSKCEE | M50;M7;M56;M52;M50;M7; |
| | VIGHSMQNCV | M12;M58 | SSAKSASVY | M56;M52 |
| 1401 | NHNFLVQAGNVQLRV | M12;M58; | LKGGKIVNNWLKQLI | M57;M55;M56;M11;M57; |
| | IGHSMQNCVL | M12;M58 | KVTLVFLFVA | M55;M56;M11 |
| 1402 | HNFLVQAGNVQLRVI | M12;M58; | TTIVNGVRRSFYVYA | M5;M39;M11;M41;M5;M39; |
| | GHSMQNCVLK | M12;M58 | NGGKGFCKLH | M11;M41 |
| 1403 | YRARAGEAANFCALIL | M41;M48; | GVRRSFYVYANGGK | M5;M39;M11;M41;M5;M39; |
| | AYCNKTVGE | M41;M48 | GFCKLHNWNCV | M11;M41 |
| 1404 | RARAGEAANFCALILA | M41;M48; | IVNGVRRSFYVYANG | M5;M39;M11;M41;M5;M39; |
| | YCNKTVGEL | M41;M48 | GKGFCKLHNW | M11;M41 |
| 1405 | ARAGEAANFCALILAY | M41;M48; | NGVRRSFYVYANGG | M5;M39;M11;M41;M5;M39; |
| | CNKTVGELG | M41;M48 | KGFCKLHNWNC | M11;M41 |
| 1406 | SCVLSGHNLAKHCLH | M1;M37; | VNGVRRSFYVYANG | M5;M39;M11;M41;M5;M39; |
| | VVGPNVNKGE | M1;M37 | GKGFCKLHNWN | M11;M41 |
| 1407 | CVLSGHNLAKHCLHV | M1;M37; | TIVNGVRRSFYVYAN | M5;M39;M11;M41;M5;M39; |
| | VGPNVNKGED | M1;M37 | GGKGFCKLHN | M11;M41 |
| 1408 | TQYEYGTEDDYQGKP | M1;M37; | ARAGKASCTLSEQLD | M64;M83;M22;M28;M64; |
| | LEFGATSAAL | M1;M37 | FIDTKRGVYC | M83;M22;M28 |
| 1409 | GSCVLSGHNLAKHCL | M1;M37; | RAGKASCTLSEQLDFI | M64;M83;M22;M28;M64; |
| | HVVGPNVNKG | M1;M37 | DTKRGVYCC | M83;M22;M28 |
| 1410 | FGPTYLDGADVTKIKP | M53;M12; | LARAGKASCTLSEQL | M64;M83;M22;M28;M64; |
| | HNSHEGKTF | M53;M12 | DFIDTKRGVY | M83;M22;M28 |
| 1411 | AHISTIGVCSMTDIAK | M63;M9; | TKKAGGTTEMLAKA | M78;M1;M18;M37;M78;M1; |
| | KPTETICAP | M59;M70 | LRKVPTDNYIT | M18;M37 |
| 1412 | PAHISTIGVCSMTDIAK | M63;M9; | KAGGTTEMLAKALR | M78;M1;M18;M37;M78;M1; |
| | KPTETICA | M59;M70 | KVPTDNYITTY | M18;M37 |
| 1413 | SQRGGSYTNDKACPLI | M32;M6; | VIPTKKAGGTTEMLA | M78;M1;M18;M37;M78;M1; |
| | AAVITREVG | M32;M6 | KALRKVPTDN | M18;M37 |
| 1414 | RDVLVRGFGDSVEEV | M63;M70; | IPTKKAGGTTEMLAK | M78;M1;M18;M37;M78;M1; |
| | LSEARQHLKD | M63;M70 | ALRKVPTDNY | M18;M37 |
| 1415 | QPELDSFKEELDKYFK | M75;M63; | KKAGGTTEMLAKAL | M78;M1;M18;M37;M78;M1; |
| | NHTSPDVDL | M59;M70 | RKVPTDNYITT | M18;M37 |
| 1416 | VRDVLVRGFGDSVEE | M63;M70; | AGGTTEMLAKALRK | M78;M1;M18;M37;M78;M1; |
| | VLSEARQHLK | M63;M70 | VPTDNYITTYP | M18;M37 |
| 1417 | LQPELDSFKEELDKYF | M75;M63; | PTKKAGGTTEMLAKA | M78;M1;M18;M37;M78;M1; |
| | KNHTSPDVD | M59;M70 | LRKVPTDNYI | M18;M37 |
| 1418 | RNARNGVLITEGSVKG | M13;M30; | LLTLQQIELKFNPPAL | M48;M73;M58;M74;M48; |
| | LQPSVGPKQ | M22;M46 | QDAYYRARA | M73;M58;M74 |
| 1419 | ARNGVLITEGSVKGLQ | M13;M30; | QKIAEIPKEEVKPFITE | M10;M26;M28;M24;M10; |
| | PSVGPKQAS | M22;M46 | SKPSVEQR | M26;M28;M24 |
| 1420 | NARNGVLITEGSVKGL | M13;M30; | YFYTSKTTVASLINTL | M57;M29;M72;M68;M57; |
| | QPSVGPKQA | M22;M46 | NDLNETLVT | M29;M72;M68 |
| 1421 | KLDGVVCTEIDPKLDN | M6;M59; | GDIILKPANNSLKITEE | M26;M34;M28;M58;M26; |
| | YYKKDNSYF | M6;M59 | VGHTDLMA | M34;M28;M58 |
| 1422 | PTGVHAGTDLEGNFY | M6;M37; | SGKPVPYCYDTNVLE | M46;M30;M29;M35;M46; |
| | GPFVDRQTAQ | M6;M37 | GSVAYESLRP | M30;M29;M35 |
| 1423 | TGVHAGTDLEGNFYG | M6;M37; | VNSFSGYLKLTDNVY | M47;M9;M8;M23;M47;M9; |
| | PFVDRQTAQA | M6;M37 | IKNADIVEEA | M8;M23 |
| 1424 | TIKPVTYKLDGVVCTE | M6;M59; | NSFSGYLKLTDNVYI | M47;M9;M8;M23;M47;M9; |
| | IDPKLDNYY | M6;M59 | KNADIVEEAK | M8;M23 |
| 1425 | YKLDGVVCTEIDPKLD | M6;M59; | SVVLLSVLQQLRVESS | M34;M30;M11;M54;M34; |
| | NYYKKDNSY | M6;M59 | SKLWAQCVQ | M30;M11;M54 |
| 1426 | VTYKLDGVVCTEIDPK | M6;M59; | PPQTSITSAVLQSGFR | M1;M38;M81;M62;M1;M38; |
| | LDNYYKKDN | M6;M59 | KMAFPSGKV | M81;M62 |
| 1427 | GVHAGTDLEGNFYGP | M6;M37; | GLVEVEKGVLPQLEQ | M13;M28;M66;M74;M13; |
| | FVDRQTAQAA | M6;M37 | PYVFIKRSDA | M28;M66;M74 |
| 1428 | IKPVTYKLDGVVCTEI | M6;M59; | CGLVEVEKGVLPQLE | M13;M28;M66;M74;M13; |
| | DPKLDNYYK | M6;M59 | QPYVFIKRSD | M28;M66;M74 |
| 1429 | PVTYKLDGVVCTEIDP | M6;M59; | LVEVEKGVLPQLEQP | M13;M28;M66;M74;M13; |
| | KLDNYYKKD | M6;M59 | YVFIKRSDAR | M28;M66;M74 |
| 1430 | KPVTYKLDGVVCTEID | M6;M59; | TCGLVEVEKGVLPQL | M13;M28;M66;M74;M13; |
| | PKLDNYYKK | M6;M59 | EQPYVFIKRS | M28;M66;M74 |
| 1431 | LDGVVCTEIDPKLDNY | M6;M59; | SLPVLQVRDVLVRGF | M43;M63;M68;M70;M43; |
| | YKKDNSYFT | M6;M59 | GDSVEEVLSE | M63;M68;M70 |
| 1432 | SDGTGTIYTELEPPCRF | M6;M59; | LPVLQVRDVLVRGFG | M43;M63;M68;M70;M43; |
| | VTDTPKGP | M6;M59 | DSVEEVLSEA | M63;M68;M70 |
| 1433 | TYKLDGVVCTEIDPKL | M6;M59; | RSFYVYANGGKGFCK | M42;M39;M11;M41;M42; |
| | DNYYKKDNS | M6;M59 | LHNWNCVNCD | M39;M11;M41 |
| 1434 | DNALAYYNTTKGGRF | M6;M20; | VTRCLNRVCTNYMPY | M64;M69;M6;M20;M64; |
| | VLALLSDLQD | M6;M20 | FFTLLLQLCT | M69;M6;M20 |
| 1435 | KSDGTGTIYTELEPPCR | M6;M59; | QQIELKFNPPALQDA | M75;M48;M73;M74;M75; |
| | FVTDTPKG | M6;M59 | YYRARAGEAA | M48;M73;M74 |
| 1436 | TVTLLPAADLDDFSKQ | M55;M53; | LQQIELKFNPPALQDA | M75;M48;M73;M74;M75; |
| | LQQSMSSAD | M58;M71 | YYRARAGEA | M48;M73;M74 |
| 1437 | HDFFKFRIDGDMVPHI | M55;M26; | LSVLQQLRVESSSKL | M11;M34;M30;M82;M11; |
| | SRQRLTKYT | M10;M71 | WAQCVQLHND | M34;M30;M82 |
| 1438 | IDGDMVPHISRQRLTK | M55;M26; | LLSVLQQLRVESSSKL | M11;M34;M30;M82;M11; |
| | YTMADLVYA | M10;M71 | WAQCVQLHN | M34;M30;M82 |
| 1439 | FAFACPDGVKHVYQL | M46;M39; | KKSLNVAKSEFDRDA | M50;M7;M32;M68;M50;M7; |
| | RARSVSPKLF | M60;M54 | AMQRKLEKMA | M32;M68 |
| 1440 | FACPDGVKHVYQLRA | M46;M39; | KSLNVAKSEFDRDAA | M50;M7;M32;M68;M50;M7; |
| | RSVSPKLFIR | M60;M54 | MQRKLEKMAD | M32;M68 |
| 1441 | ACPDGVKHVYQLRAR | M46;M39; | KHSSGVTRELMRELN | M60;M30;M22;M54;M60; |
| | SVSPKLFIRQ | M60;M54 | GGAYTRYVDN | M30;M22;M54 |
| 1442 | QFAFACPDGVKHVYQ | M46;M39; | NTKHSSGVTRELMRE | M60;M30;M22;M54;M60; |
| | LRARSVSPKL | M60;M54 | LNGGAYTRYV | M30;M22;M54 |
| 1443 | AFACPDGVKHVYQLR | M46;M39; | TKHSSGVTRELMREL | M60;M30;M22;M54;M60; |
| | ARSVSPKLFI | M60;M54 | NGGAYTRYVD | M30;M22;M54 |
| 1444 | CPDGVKHVYQLRARS | M46;M39; | TERSEKSYELQTPFEI | M25;M34;M39;M24;M25; |
| | VSPKLFIRQE | M60;M54 | KLAKKFDTF | M34;M39;M24 |
| 1445 | LDNLRANNTKGSLPIN | M7;M53; | EAARVVRSIFSRTLET | M42;M34;M2;M59;M42; |
| | VIVFDGKSK | M7;M53 | AQNSVRVLQ | M34;M2;M59 |
| 1446 | FISPYNSQNAVASKILG | M21;M39; | EILGTVSWNLREMLA | M75;M9;M28;M24;M75;M9; |
| | LPTQTVDS | M26;M54 | HAEETRKLMP | M28;M24 |
| 1447 | RKAVFISPYNSQNAVA | M21;M39; | KQEILGTVSWNLREM | M75;M9;M28;M24;M75;M9; |
| | SKILGLPTQ | M26;M49 | LAHAEETRKL | M28;M24 |
| 1448 | LTRNPAWRKAVFISPY | M21;M39; | QEILGTVSWNLREML | M75;M9;M28;M24;M75;M9; |
| | NSQNAVASK | M26;M49 | AHAEETRKLM | M28;M24 |
| 1449 | AEIPKEEVKPFITESKP | M26;M28; | ILGTVSWNLREMLAH | M75;M9;M28;M24;M75;M9; |
| | SVEQRKQD | M26;M28 | AEETRKLMPV | M28;M24 |
| 1450 | PKEEVKPFITESKPSVE | M26;M28; | EKQEILGTVSWNLRE | M75;M9;M28;M24;M75;M9; |
| | QRKQDDKK | M26;M28 | MLAHAEETRK | M28;M24 |
| 1451 | EIPKEEVKPFITESKPS | M26;M28; | GARFYFYTSKTTVAS | M15;M29;M72;M41;M15; |
| | VEQRKQDD | M26;M28 | LINTLNDLNE | M29;M72;M41 |
| 1452 | KIAEIPKEEVKPFITESK | M26;M28; | KKLKKSLNVAKSEFD | M33;M68;M32;M28;M33; |
| | PSVEQRK | M26;M28 | RDAAMQRKLE | M68;M32;M28 |
| 1453 | KEEVKPFITESKPSVEQ | M26;M28; | LKKLKKSLNVAKSEF | M33;M68;M32;M28;M33; |
| | RKQDDKKI | M26;M28 | DRDAAMQRKL | M68;M32;M28 |
| 1454 | IPKEEVKPFITESKPSV | M26;M28; | DVFHLYLQYIRKLHD | M71;M32;M52;M38;M35; |
| | EQRKQDDK | M26;M28 | ELTGHMLDMY | M46;M9;M47 |
| 1455 | IAEIPKEEVKPFITESKP | M26;M28; | VTFFPDLNGDVVAID | M7;M69;M60;M37;M7;M69; |
| | SVEQRKQ | M26;M28 | YKHYTPSFKK | M60;M37 |
| 1456 | EEVKPFITESKPSVEQR | M26;M28; | HEIAWYTERSEKSYE | M25;M34;M30;M49;M25; |
| | KQDDKKIK | M26;M28 | LQTPFEIKLA | M34;M30;M49 |
| 1457 | LRANNTKGSLPINVIVF | M7;M56; | TEVNEFACVVADAVI | M78;M25;M34;M39;M78; |
| | DGKSKCEE | M7;M56 | KTLQPVSELL | M25;M34;M39 |
| 1458 | RANNTKGSLPINVIVF | M7;M56; | LLNKEMYLKLRSDVL | M42;M39;M43;M61;M42; |
| | DGKSKCEES | M7;M56 | LPLTQYNRYL | M39;M43;M61 |
| 1459 | VVLSFELLHAPATVCG | M46;M34; | TFLLNKEMYLKLRSD | M42;M39;M43;M61;M42; |
| | PKKSTNLVK | M39;M27 | VLLPLTQYNR | M39;M43;M61 |
| 1460 | QNAVVKIYCPACHNSE | M35;M28; | FLLNKEMYLKLRSDV | M42;M39;M43;M61;M42; |
| | VGPEHSLAE | M35;M28 | LLPLTQYNRY | M39;M43;M61 |
| 1461 | YLPQNAVVKIYCPACH | M35;M28; | PNPKGFCDLKGKYVQ | M42;M39;M43;M31;M42; |
| | NSEVGPEHS | M35;M28 | IPTTCANDPV | M39;M43;M31 |
| 1462 | PQNAVVKIYCPACHNS | M35;M28; | TYYLFDESGEFKLAS | M15;M52;M16;M23;M15; |
| | EVGPEHSLA | M35;M28 | HMYCSFYPPD | M52;M16;M23 |
| 1463 | LPQNAVVKIYCPACHN | M35;M28; | GVDAVNLLTNMFTPL | M15;M52;M16;M62;M15; |
| | SEVGPEHSL | M35;M28 | IQPIGALDIS | M52;M16;M62 |
| 1464 | ESKPSVEQRKQDDKKI | M28;M74; | CGVDAVNLLTNMFTP | M15;M52;M16;M62;M15; |
| | KACVEEVTT | M28;M74 | LIQPIGALDI | M52;M16;M62 |
| 1465 | TESKPSVEQRKQDDK | M28;M74; | FCGVDAVNLLTNMFT | M15;M52;M16;M62;M15; |
| | KIKACVEEVT | M28;M74 | PLIQPIGALD | M52;M16;M62 |
| 1466 | RRSFYVYANGGKGFC | M39;M11; | DAVNLLTNMFTPLIQP | M15;M52;M16;M62;M15; |
| | KLHNWNCVNC | M39;M11 | IGALDISAS | M52;M16;M62 |
| 1467 | ITGRLQSLQTYVTQQLI | M46;M29; | VDAVNLLTNMFTPLI | M15;M52;M16;M62;M15; |
| | RAAEIRAS | M22;M49 | QPIGALDISA | M52;M16;M62 |
| 1468 | GDEVRQIAPGQTGKIA | M80;M67; | GAKLKALNLGETFVT | M55;M18;M27;M24;M55; |
| | DYNYKLPDD | M38;M62 | HSKGLYRKCV | M18;M27;M24 |
| 1469 | DEVRQIAPGQTGKIAD | M80;M67; | GGAKLKALNLGETFV | M55;M18;M27;M24;M55; |
| | YNYKLPDDF | M38;M62 | THSKGLYRKC | M18;M27;M24 |
| 1470 | CVSFCYMHHMELPTG | M43;M28; | IELKFNPPALQDAYYR | M75;M39;M73;M74;M75; |
| | VHAGTDLEGN | M43;M28 | ARAGEAANF | M39;M73;M74 |
| 1471 | VGLMWLSYFIASFRLF | M15;M35; | QIELKFNPPALQDAY | M75;M39;M73;M74;M75; |
| | ARTRSMWSF | M26;M16 | YRARAGEAAN | M39;M73;M74 |
| 1472 | LVGLMWLSYFIASFRL | M15;M35; | SCNNYMLTYNKVEN | M15;M52;M11;M74;M15; |
| | FARTRSMWS | M26;M16 | MTPRDLGACID | M52;M11;M74 |
| 1473 | LVIGAVILRGHLRIAG | M55;M53; | AFEKMVSLLSVLLSM | M69;M67;M22;M61;M69; |
| | HHLGRCDIK | M58;M17 | QGAVDINKLC | M67;M22;M61 |
| 1474 | ELVIGAVILRGHLRIAG | M55;M53; | EAFEKMVSLLSVLLS | M69;M67;M22;M61;M69; |
| | HHLGRCDI | M58;M17 | MQGAVDINKL | M67;M22;M61 |
| 1475 | VIGAVILRGHLRIAGH | M55;M53; | FEKMVSLLSVLLSMQ | M69;M67;M22;M61;M69; |
| | HLGRCDIKD | M58;M17 | GAVDINKLCE | M67;M22;M61 |
| 1476 | IGAVILRGHLRIAGHH | M55;M53; | QEGVVDYGARFYFYT | M15;M29;M40;M41;M15; |
| | LGRCDIKDL | M58;M17 | SKTTVASLIN | M29;M40;M41 |
| 1477 | CPACHNSEVGPEHSLA | M68;M28; | DTIANYAKPFLNKVV | M78;M55;M15;M23;M78; |
| | EYHNESGLK | M68;M28 | STTTNIVTRC | M55;M15;M23 |
| 1478 | YCPACHNSEVGPEHSL | M68;M28; | WDTIANYAKPFLNKV | M78;M55;M15;M23;M78; |
| | AEYHNESGL | M68;M28 | VSTTTNIVTR | M55;M15;M23 |
| 1479 | AVVKIYCPACHNSEVG | M68;M28; | GTGQAITVTPEANMD | M78;M34;M29;M24;M78; |
| | PEHSLAEYH | M68;M28 | QESFGGASCC | M34;M29;M24 |
| 1480 | IYCPACHNSEVGPEHS | M68;M28; | AQEAYEQAVANGDS | M33;M13;M59;M55;M33; |
| | LAEYHNESG | M68;M28 | EVVLKKLKKSL | M13;M59;M55 |
| 1481 | VVKIYCPACHNSEVGP | M68;M28; | RYMSALNHTKKWKY | M5;M24;M54;M74;M5;M24; |
| | EHSLAEYHN | M68;M28 | PQVNGLTSIKW | M54;M74 |
| 1482 | VKIYCPACHNSEVGPE | M68;M28; | VLECNVKTTEVVGDII | M26;M29;M58;M53;M26; |
| | HSLAEYHNE | M68;M28 | LKPANNSLK | M29;M58;M53 |
| 1483 | KIYCPACHNSEVGPEH | M68;M28; | LECNVKTTEVVGDIIL | M26;M29;M58;M53;M26; |
| | SLAEYHNES | M68;M28 | KPANNSLKI | M29;M58;M53 |
| 1484 | EAEVQIDRLITGRLQSL | M46;M29; | GRYMSALNHTKKWK | M5;M24;M25;M74;M5;M24; |
| | QTYVTQQL | M22;M38 | YPQVNGLTSIK | M25;M74 |
| 1485 | AEVQIDRLITGRLQSL | M46;M29; | SEDMLNPNYEDLLIR | M21;M29;M9;M24;M21; |
| | QTYVTQQLI | M22;M38 | KSNHNFLVQA | M29;M9;M24 |
| 1486 | VEAEVQIDRLITGRLQ | M46;M29; | GDVVAIDYKHYTPSF | M69;M82;M16;M37;M69; |
| | SLQTYVTQQ | M22;M38 | KKGAKLLHKP | M82;M16;M37 |
| 1487 | KDLLARAGKASCTLSE | M83;M28; | CVNCDTFCAGSTFISD | M57;M35;M70;M20;M57; |
| | QLDFIDTKR | M83;M28 | EVARDLSLQ | M35;M70;M20 |
| 1488 | TTTIQTIVEVQPQLEME | M28;M59; | YGARFYFYTSKTTVA | M15;M29;M47;M41;M15; |
| | LTPVVQTI | M28;M59 | SLINTLNDLN | M29;M47;M41 |
| 1489 | EDNQTTTIQTIVEVQP | M28;M59; | SSFLEMKSEKQVEQKI | M25;M34;M24;M74;M25; |
| | QLEMELTPV | M28;M59 | AEIPKEEVK | M34;M24;M74 |
| 1490 | DNQTTTIQTIVEVQPQ | M28;M59; | VTCAKEIKESVQTFFK | M43;M53;M24;M17;M43; |
| | LEMELTPVV | M28;M59 | LVNKFLALC | M53;M24;M17 |
| 1491 | DLLARAGKASCTLSEQ | M83;M28; | TCAKEIKESVQTFFKL | M43;M53;M24;M17;M43; |
| | LDFIDTKRG | M83;M28 | VNKFLALCA | M53;M24;M17 |
| 1492 | SEARQHLKDGTCGLV | M13;M28; | EAYEQAVANGDSEV | M55;M13;M53;M59;M55; |
| | EVEKGVLPQL | M13;M28 | VLKKLKKSLNV | M13;M53;M59 |
| 1493 | QTTTIQTIVEVQPQLE | M28;M59; | YEQAVANGDSEVVL | M55;M13;M53;M59;M55; |
| | MELTPVVQT | M28;M59 | KKLKKSLNVAK | M13;M53;M59 |
| 1494 | LLARAGKASCTLSEQL | M83;M28; | AYEQAVANGDSEVV | M55;M13;M53;M59;M55; |
| | DFIDTKRGV | M83;M28 | LKKLKKSLNVA | M13;M53;M59 |
| 1495 | NQTTTIQTIVEVQPQLE | M28;M59; | QYELKHGTFTCASEY | M33;M65;M38;M66;M33; |
| | MELTPVVQ | M28;M59 | TGNYQCGHYK | M65;M38;M66 |
| 1496 | TSDYYQLYSTQLSTDT | M42;M41; | ELKHGTFTCASEYTG | M33;M65;M38;M66;M33; |
| | GVEHVTFFI | M39;M20 | NYQCGHYKHI | M65;M38;M66 |
| 1497 | KKVDGVVQQLPETYF | M33;M71; | YELKHGTFTCASEYT | M33;M65;M38;M66;M33; |
| | TQSRNLQEFK | M54;M31 | GNYQCGHYKH | M65;M38;M66 |
| 1498 | KVDGVVQQLPETYFT | M33;M71; | LKHGTFTCASEYTGN | M33;M65;M38;M66;M33; |
| | QSRNLQEFKP | M54;M31 | YQCGHYKHIT | M65;M38;M66 |
| 1499 | ADIVVFDEISMATNYD | M50;M18; | INAQVAKSHNIALIW | M32;M72;M68;M37;M32; |
| | LSVVNARLR | M33;M55 | NVKDFMSLSE | M72;M68;M37 |
| 1500 | DSLSSTASALGKLQDV | M79;M29; | AQNSVRVLQKAAITIL | M5;M9;M54;M24;M5;M9; |
| | VNQNAQALN | M22;M47 | DGISQYSLR | M54;M24 |
| 1501 | QDSLSSTASALGKLQD | M79;M29; | QMAPISAMVRMYIFF | M23;M55;M9;M20;M23; |
| | VVNQNAQAL | M22;M47 | ASFYYVWKSY | M55;M9;M20 |
| 1502 | TGVLTESNKKFLPFQQ | M78;M41; | MAPISAMVRMYIFFA | M23;M55;M9;M20;M23; |
| | FGRDIADTT | M61;M71 | SFYYVWKSYV | M55;M9;M20 |
| 1503 | LTESNKKFLPFQQFGR | M78;M41; | LIINLVQMAPISAMVR | M23;M55;M9;M20;M23; |
| | DIADTTDAV | M61;M71 | MYIFFASFY | M55;M9;M20 |
| 1504 | TESNKKFLPFQQFGRD | M78;M41; | VQMAPISAMVRMYIF | M23;M55;M9;M20;M23; |
| | LADTTDAVR | M61;M71 | FASFYYVWKS | M55;M9;M20 |
| 1505 | VLTESNKKFLPFQQFG | M78;M41; | NLVQMAPISAMVRM | M23;M55;M9;M20;M23; |
| | RDIADTTDA | M61;M71 | YIFFASFYYVW | M55;M9;M20 |
| 1506 | ESNKKFLPFQQFGRDI | M78;M41; | INLVQMAPISAMVRM | M23;M55;M9;M20;M23; |
| | ADTTDAVRD | M61;M71 | YIFFASFYYV | M55;M9;M20 |
| 1507 | GVLTESNKKFLPFQQF | M78;M41; | IINLVQMAPISAMVR | M23;M55;M9;M20;M23; |
| | GRDIADTTD | M61;M71 | MYIFFASFYY | M55;M9;M20 |
| 1508 | QITISSFKWDLTAFGLV | M30;M82; | WLIINLVQMAPISAM | M23;M55;M9;M20;M23; |
| | AEWFLAYI | M30;M82 | VRMYIFFASF | M55;M9;M20 |
| 1509 | ETIQITISSFKWDLTAF | M30;M82; | LVQMAPISAMVRMYI | M23;M55;M9;M20;M23; |
| | GLVAEWFL | M30;M82 | FFASFYYVWK | M55;M9;M20 |
| 1510 | LETIQITISSFKWDLTA | M30;M82; | TGDLQPLEQPTSEAVE | M60;M54;M58;M17;M60; |
| | FGLVAEWF | M30;M82 | APLVGTPVC | M54;M58;M17 |
| 1511 | IQITISSFKWDLTAFGL | M30;M82; | LLEDEFTPFDVVRQCS | M46;M60;M54;M41;M46; |
| | VAEWFLAY | M30;M82 | GVTFQSAVK | M60;M54;M41 |
| 1512 | SLETIQITISSFKWDLT | M30;M82; | ALLEDEFTPFDVVRQ | M46;M60;M54;M41;M46; |
| | AFGLVAEW | M30;M82 | CSGVTFQSAV | M60;M54;M41 |
| 1513 | TIQITISSFKWDLTAFG | M30;M82; | LEDEFTPFDVVRQCS | M46;M60;M54;M41;M46; |
| | LVAEWFLA | M30;M82 | GVTFQSAVKR | M60;M54;M41 |
| 1514 | ALLLLDRLNQLESKMS | M15;M53; | SALLEDEFTPFDVVRQ | M46;M60;M54;M41;M46; |
| | GKGQQQQGQ | M11;M58 | CSGVTFQSA | M60;M54;M41 |
| 1515 | LALLLLDRLNQLESKM | M15;M53; | SCKRVLNVVCKTCGQ | M15;M5;M52;M58;M15;M5; |
| | SGKGQQQQG | M11;M58 | QQTTLKGVEA | M52;M58 |
| 1516 | LGKLQDVVNQNAQAL | M79;M53; | LNHTKKWKYPQVNG | M5;M60;M54;M74;M5;M60; |
| | NTLVKQLSSN | M22;M15 | LTSIKWADNNC | M54;M74 |
| 1517 | PPALQDAYYRARAGE | M75;M39; | NHTKKWKYPQVNGL | M5;M60;M54;M74;M5;M60; |
| | AANFCALILA | M75;M39 | TSIKWADNNCY | M54;M74 |
| 1518 | LKFNPPALQDAYYRA | M75;M39; | ALNHTKKWKYPQVN | M5;M60;M54;M74;M5;M60; |
| | RAGEAANFCA | M75;M39 | GLTSIKWADNN | M54;M74 |
| 1519 | NPPALQDAYYRARAG | M75;M39; | ASWVMRIMTWLDMV | M64;M83;M22;M70;M64; |
| | EAANFCALIL | M75;M39 | DTSLSGFKLKD | M83;M22;M70 |
| 1520 | FNPPALQDAYYRARA | M75;M39; | PASWVMRIMTWLDM | M64;M83;M22;M70;M64; |
| | GEAANFCALI | M75;M39 | VDTSLSGFKLK | M83;M22;M70 |
| 1521 | KFNPPALQDAYYRAR | M75;M39; | QVEQKIAEIPKEEVKP | M10;M26;M24;M74;M10; |
| | AGEAANFCAL | M75;M39 | FITESKPSV | M26;M24;M74 |
| 1522 | PALQDAYYRARAGEA | M75;M39; | VEQKIAEIPKEEVKPFI | M10;M26;M24;M74;M10; |
| | ANFCALILAY | M75;M39 | TESKPSVE | M26;M24;M74 |
| 1523 | DKNTQEVFAQVKQIY | M55;M18; | KQVEQKIAEIPKEEVK | M10;M26;M24;M74;M10; |
| | KTPPIKDFGG | M32;M56 | PFITESKPS | M26;M24;M74 |
| 1524 | VGMQKYSTLQGPPGT | M42;M34; | DWLEEKFKEGVEFLR | M57;M9;M27;M20;M57;M9; |
| | GKSHFAIGLA | M29;M41 | DGWEIVKFIS | M27;M20 |
| 1525 | GMQKYSTLQGPPGTG | M42;M34; | PVLDWLEEKFKEGVE | M57;M9;M27;M20;M57;M9; |
| | KSHFAIGLAL | M29;M41 | FLRDGWEIVK | M27;M20 |
| 1526 | AYYVGYLQPRTFLLK | M15;M11; | KPVLDWLEEKFKEGV | M57;M9;M27;M20;M57;M9; |
| | YNENGTITDA | M58;M47 | EFLRDGWEIV | M27;M20 |
| 1527 | DGQVDLFRNARNGVL | M33;M42; | LDWLEEKFKEGVEFL | M57;M9;M27;M20;M57;M9; |
| | ITEGSVKGLQ | M22;M43 | RDGWEIVKFI | M27;M20 |
| 1528 | LMYKGLPWNVVRIKI | M57;M46; | VLDWLEEKFKEGVEF | M57;M9;M27;M20;M57;M9; |
| | VQMLSDTLKN | M9;M20 | LRDGWEIVKF | M27;M20 |
| 1529 | MYKGLPWNVVRIKIV | M57;M46; | EHFIETISLAGSYKDW | M64;M32;M29;M68;M64; |
| | QMLSDTLKNL | M9;M20 | SYSGQSTQL | M32;M29;M68 |
| 1530 | HYTPSFKKGAKLLHKP | M27;M16; | HFIETISLAGSYKDWS | M64;M32;M29;M68;M64; |
| | IVWHVNNAT | M27;M16 | YSGQSTQLG | M32;M29;M68 |
| 1531 | YKHYTPSFKKGAKLL | M27;M16; | EEHFIETISLAGSYKD | M64;M32;M29;M68;M64; |
| | HKPIVWHVNN | M27;M16 | WSYSGQSTQ | M32;M29;M68 |
| 1532 | KHYTPSFKKGAKLLH | M27;M16; | ADIVEEAKKVKPTVV | M18;M11;M73;M23;M18; |
| | KPIVWHVNNA | M27;M16 | VNAANVYLKH | M11;M73;M23 |
| 1533 | KVGGSCVLSGHNLAK | M80;M37; | ECNVKTTEVVGDIILK | M26;M34;M58;M53;M26; |
| | HCLHVVGPNV | M80;M37 | PANNSLKIT | M34;M58;M53 |
| 1534 | PLKVGGSCVLSGHNL | M80;M37; | NVKTTEVVGDIILKPA | M26;M34;M58;M53;M26; |
| | AKHCLHVVGP | M80;M37 | NNSLKITEE | M34;M58;M53 |
| 1535 | LKVGGSCVLSGHNLA | M80;M37; | CNVKTTEVVGDIILKP | M26;M34;M58;M53;M26; |
| | KHCLHVVGPN | M80;M37 | ANNSLKITE | M34;M58;M53 |
| 1536 | HPNQEYADVFHLYLQ | M71;M32; | IDTKRGVYCCREHEH | M75;M27;M66;M74;M75; |
| | YIRKLHDELT | M9;M61 | EIAWYTERSE | M27;M66;M74 |
| 1537 | KHPNQEYADVFHLYL | M71;M32; | FIDTKRGVYCCREHE | M75;M27;M66;M74;M75; |
| | QYIRKLHDEL | M9;M61 | HEIAWYTERS | M27;M66;M74 |
| 1538 | HDELTGHMLDMYSV | M34;M22; | LDFIDTKRGVYCCRE | M75;M27;M66;M74;M75; |
| | MLTNDNTSRYW | M38;M31 | HEHEIAWYTE | M27;M66;M74 |
| 1539 | KYTMADLVYALRHFD | M10;M52; | DFIDTKRGVYCCREH | M75;M27;M66;M74;M75; |
| | EGNCDTLKEI | M17;M49 | EHEIAWYTER | M27;M66;M74 |
| 1540 | TKYTMADLVYALRHF | M10;M52; | QLDFIDTKRGVYCCR | M75;M27;M66;M74;M75; |
| | DEGNCDTLKE | M17;M49 | EHEHEIAWYT | M27;M66;M74 |
| 1541 | LTKYTMADLVYALRH | M10;M52; | RIMTWLDMVDTSLSG | M64;M75;M83;M22;M64; |
| | FDEGNCDTLK | M17;M49 | FKLKDCVMYA | M75;M83;M22 |
| 1542 | YTMADLVYALRHFDE | M10;M52; | IMTWLDMVDTSLSGF | M64;M75;M83;M22;M64; |
| | GNCDTLKEIL | M17;M49 | KLKDCVMYAS | M75;M83;M22 |
| 1543 | QRLTKYTMADLVYAL | M10;M52; | MRIMTWLDMVDTSL | M64;M75;M83;M22;M64; |
| | RHFDEGNCDT | M17;M49 | SGFKLKDCVMY | M75;M83;M22 |
| 1544 | MADLVYALRHFDEGN | M10;M52; | YRKCVKSREETGLLM | M60;M54;M38;M31;M60; |
| | CDTLKEILVT | M17;M49 | PLKAPKEIIF | M54;M38;M31 |
| 1545 | TMADLVYALRHFDEG | M10;M52; | KCVKSREETGLLMPL | M60;M54;M38;M31;M60; |
| | NCDTLKEILV | M17;M49 | KAPKEIIFLE | M54;M38;M31 |
| 1546 | RLTKYTMADLVYALR | M10;M52; | GLYRKCVKSREETGL | M60;M54;M38;M31;M60; |
| | HFDEGNCDTL | M17;M49 | LMPLKAPKEI | M54;M38;M31 |
| 1547 | YHYQECVRGTTVLLK | M57;M27; | CVKSREETGLLMPLK | M60;M54;M38;M31;M60; |
| | EPCSSGTYEG | M58;M20 | APKEIIFLEG | M54;M38;M31 |
| 1548 | YQECVRGTTVLLKEPC | M57;M27; | RKCVKSREETGLLMP | M60;M54;M38;M31;M60; |
| | SSGTYEGNS | M58;M20 | LKAPKEIIFL | M54;M38;M31 |
| 1549 | QECVRGTTVLLKEPCS | M57;M27; | LYRKCVKSREETGLL | M60;M54;M38;M31;M60; |
| | SGTYEGNSP | M58;M20 | MPLKAPKEII | M54;M38;M31 |
| 1550 | HYQECVRGTTVLLKEP | M57;M27; | DYKAFKQIVESCGNF | M42;M41;M25;M23;M42; |
| | CSSGTYEGN | M58;M20 | KVTKGKAKKG | M41;M25;M23 |
| 1551 | LYHYQECVRGTTVLL | M57;M27; | YKAFKQIVESCGNFK | M42;M41;M25;M23;M42; |
| | KEPCSSGTYE | M58;M20 | VTKGKAKKGA | M41;M25;M23 |
| 1552 | VSGTNGTKRFDNPVLP | M78;M65; | KAFKQIVESCGNFKV | M42;M41;M25;M23;M42; |
| | FNDGVYFAS | M82;M66 | TKGKAKKGAW | M41;M25;M23 |
| 1553 | IHVSGTNGTKRFDNPV | M78;M65; | FCAGSTFISDEVARDL | M35;M31;M70;M20;M35; |
| | LPFNDGVYF | M82;M66 | SLQFKRPIN | M31;M70;M20 |
| 1554 | AIHVSGTNGTKRFDNP | M78;M65; | DTFCAGSTFISDEVAR | M35;M31;M70;M20;M35; |
| | VLPFNDGVY | M82;M66 | DLSLQFKRP | M31;M70;M20 |
| 1555 | GTNGTKRFDNPVLPFN | M78;M65; | TFCAGSTFISDEVARD | M35;M31;M70;M20;M35; |
| | DGVYFASTE | M82;M66 | LSLQFKRPI | M31;M70;M20 |
| 1556 | TNGTKRFDNPVLPFND | M78;M65; | INGLMLLEIKDTEKYC | M78;M9;M82;M61;M78;M9; |
| | GVYFASTEK | M82;M66 | ALAPNMMVT | M82;M61 |
| 1557 | HVSGTNGTKRFDNPV | M78;M65; | NGLMLLEIKDTEKYC | M78;M34;M9;M82;M78; |
| | LPFNDGVYFA | M82;M66 | ALAPNMMVTN | M34;M9;M82 |
| 1558 | SGTNGTKRFDNPVLPF | M78;M65; | LNDNLLEILQKEKVNI | M10;M9;M27;M24;M10;M9; |
| | NDGVYFAST | M82;M66 | NIVGDFKLN | M27;M24 |
| 1559 | HNQDVNLHSSRLSFKE | M57;M53; | NLLEILQKEKVNINIV | M10;M9;M27;M24;M10;M9; |
| | LLVYAADPA | M38;M20 | GDFKLNEEI | M27;M24 |
| 1560 | GTGVLTESNKKFLPFQ | M78;M24; | NDNLLEILQKEKVNIN | M10;M9;M27;M24;M10;M9; |
| | QFGRDIADT | M61;M41 | IVGDFKLNE | M27;M24 |
| 1561 | YSLLLCRMNSRNYIAQ | M10;M34; | GLNDNLLEILQKEKV | M10;M9;M27;M24;M10;M9; |
| | VDVVNFNLT | M54;M24 | NINIVGDFKL | M27;M24 |
| 1562 | HNWNCVNCDTFCAGS | M57;M70; | DNLLEILQKEKVNINI | M10;M9;M27;M24;M10;M9; |
| | TFISDEVARD | M57;M70 | VGDFKLNEE | M27;M24 |
| 1563 | NCVNCDTFCAGSTFIS | M57;M70; | GPLSAQTGIAVLDMC | M10;M32;M24;M59;M10; |
| | DEVARDLSL | M57;M70 | ASLKELLQNG | M32;M24;M59 |
| 1564 | WNCVNCDTFCAGSTFI | M57;M70; | PLSAQTGIAVLDMCA | M10;M32;M24;M59;M10; |
| | SDEVARDLS | M57;M70 | SLKELLQNGM | M32;M24;M59 |
| 1565 | NWNCVNCDTFCAGST | M57;M70; | GADVTKIKPHNSHEG | M42;M21;M53;M37;M42; |
| | FISDEVARDL | M57;M70 | KTFYVLPNDD | M21;M53;M37 |
| 1566 | GYLTSSSKTPEEHFIETI | M40;M29; | TIANYAKPFLNKVVS | M78;M9;M15;M23;M78;M9; |
| | SLAGSYK | M40;M29 | TTTNIVTRCL | M15;M23 |
| 1567 | QTLLALHRSYLTPGDS | M23;M5; | DMCASLKELLQNGM | M50;M18;M56;M60;M50; |
| | SSGWTAGAA | M24;M70 | NGRTILGSALL | M18;M56;M60 |
| 1568 | VLQQLRVESSSKLWA | M11;M82; | ATAQEAYEQAVANG | M33;M13;M47;M59;M33; |
| | QCVQLHNDIL | M11;M82 | DSEVVLKKLKK | M13;M47;M59 |
| 1569 | LQQLRVESSSKLWAQ | M11;M82; | FATAQEAYEQAVAN | M33;M13;M47;M59;M33; |
| | CVQLHNDILL | M11;M82 | GDSEVVLKKLK | M13;M47;M59 |
| 1570 | QQLRVESSSKLWAQC | M11;M82; | YFCTCYFGLFCLLNR | M60;M56;M18;M37;M60; |
| | VQLHNDILLA | M11;M82 | YFRLTLGVYD | M56;M18;M37 |
| 1571 | WLIVGVALLAVFQSAS | M60;M26; | GYFCTCYFGLFCLLN | M60;M56;M18;M37;M60; |
| | KIITLKKRW | M61;M35 | RYFRLTLGVY | M56;M18;M37 |
| 1572 | LIVGVALLAVFQSASK | M60;M26; | TLLTKGTLEPEYFNSV | M4;M13;M12;M16;M19;M1; |
| | IITLKKRWQ | M61;M35 | CRLMKTIGP | M3;M6;M15 |
| 1573 | IVGVALLAVFQSASKII | M60;M26; | EPLVDLPIGINITRFQT | M4;M21;M5;M1;M3;M2; |
| | TLKKRWQL | M61;M35 | LLALHRSY | M26;M22;M20 |
| 1574 | GDCEEEEFEPSTQYEY | M33;M67; | PLVDLPIGINITRFQTL | M4;M21;M5;M1;M3;M2; |
| | GTEDDYQGK | M33;M67 | LALHRSYL | M26;M22;M20 |
| 1575 | NGLTGTGVLTESNKKF | M78;M24; | NLWNTFTRLQSLENV | M4;M54;M14;M1;M34;M25; |
| | LPFQQFGRD | M38;M61 | AFNVVNKGHF | M60;M3;M39 |
| 1576 | FNGLTGTGVLTESNKK | M78;M24; | LAKRFKESPFELEDFIP | M4;M19;M1;M25;M3;M61; |
| | FLPFQQFGR | M38;M61 | MDSTVKNY | M18;M43;M20 |
| 1577 | DIVVFDEISMATNYDL | M50;M18; | KRFKESPFELEDFIPM | M4;M19;M1;M25;M3;M61; |
| | SVVNARLRA | M25;M33 | DSTVKNYFI | M18;M43;M20 |
| 1578 | HLYLQYIRKLHDELTG | M46;M32; | AKRFKESPFELEDFIP | M4;M19;M1;M25;M3;M61; |
| | HMLDMYSVM | M52;M38 | MDSTVKNYF | M18;M43;M20 |
| 1579 | IQEGVVDYGARFYFYT | M29;M41; | CFVDDIVKTDGTLMIE | M9;M10;M1;M5;M7;M3;M6; |
| | SKTTVASLI | M29;M41 | RFVSLAIDA | M8;M11 |
| 1580 | NRATRVECTTIVNGVR | M29;M41; | LWNTFTRLQSLENVA | M4;M54;M24;M1;M34;M25; |
| | RSFYVYANG | M29;M41 | FNVVNKGHFD | M60;M3;M39 |
| 1581 | IKQYGDCLGDIAARDL | M78;M79; | TFTRLQSLENVAFNV | M4;M54;M16;M24;M1;M60; |
| | ICAQKFNGL | M50;M65 | VNKGHFDGQQ | M3;M27;M15 |
| 1582 | FIKQYGDCLGDIAARD | M78;M65; | FKELLVYAADPAMH | M64;M12;M30;M48;M33; |
| | LICAQKFNG | M79;M50 | AASGNLLLDKR | M36;M8;M39;M44 |
| 1583 | FPREGVFVSNGTHWF | M50;M18; | LYALVYFLQSINFVRII | M4;M54;M24;M19;M60; |
| | VTQRNFYEPQ | M24;M31 | MRLWLCWK | M25;M3;M9;M23 |
| 1584 | REGVFVSNGTHWFVT | M50;M18; | VLPFNDGVYFASTEK | M64;M12;M28;M14;M10; |
| | QRNFYEPQII | M24;M31 | SNIIRGWIFG | M24;M6;M45;M22 |
| 1585 | PREGVFVSNGTHWFV | M50;M18; | PVLPFNDGVYFASTE | M64;M12;M28;M14;M10; |
| | TQRNFYEPQI | M24;M31 | KSNIIRGWIF | M24;M6;M45;M22 |
| 1586 | YKGIKIQEGVVDYGAR | M41;M67; | LPFNDGVYFASTEKS | M64;M12;M28;M14;M10; |
| | FYFYTSKTT | M41;M67 | NIIRGWIFGT | M24;M6;M45;M22 |
| 1587 | KGIKIQEGVVDYGARF | M41;M67; | NPVLPFNDGVYFAST | M64;M12;M28;M14;M10; |
| | YFYTSKTTV | M41;M67 | EKSNIIRGWI | M24;M6;M45;M22 |
| 1588 | AGFIKQYGDCLGDIAA | M50;M65; | DNPVLPFNDGVYFAS | M64;M12;M28;M14;M10; |
| | RDLICAQKF | M27;M70 | TEKSNIIRGW | M24;M6;M45;M22 |
| 1589 | GFIKQYGDCLGDIAAR | M78;M65; | RDVDTDFVNEFYAYL | M4;M71;M16;M3;M18;M35; |
| | DLICAQKFN | M50;M70 | RKHFSMMILS | M15;M52;M26 |
| 1590 | IEFLKRGDKSVYYTSN | M50;M22; | SFPQSAPHGVVFLHV | M64;M21;M28;M66;M70; |
| | PTTFHLDGE | M50;M22 | TYVPAQEKNF | M53;M3;M26;M9 |
| 1591 | PKYKFVRIQPGQTFSV | M29;M27; | LCEKALKYLPIDKCSR | M71;M13;M28;M14;M29; |
| | LACYNGSPS | M29;M27 | IIPARARVE | M51;M33;M18;M22 |
| 1592 | VKMLCTHTGTGQAIT | M78;M29; | CEKALKYLPIDKCSRII | M71;M13;M28;M14;M29; |
| | VTPEANMDQE | M78;M29 | PARARVEC | M51;M33;M18;M22 |
| 1593 | CVKMLCTHTGTGQAI | M78;M29; | AGDYILANTCTERLK | M56;M73;M19;M31;M6; |
| | TVTPEANMDQ | M78;M29 | LFAAETLKAT | M44;M18;M63;M47 |
| 1594 | NVANYQKVGMQKYS | M42;M21; | ELLVYAADPAMHAA | M12;M24;M57;M50;M33; |
| | TLQGPPGTGKS | M34;M41 | SGNLLLDKRTT | M36;M8;M46;M39 |
| 1595 | GTAVMSLKEGQINDMI | M60;M54; | KLQFTSLEIPRRNVAT | M28;M54;M29;M2;M6;M45; |
| | LSLLSKGRL | M59;M49 | LQAENVTGL | M27;M59;M20 |
| 1596 | DKSAFVNLKQLPFFYY | M60;M32; | TLEPEYFNSVCRLMK | M13;M12;M16;M14;M5;M6; |
| | SDSPCESHG | M41;M54 | TIGPDMFLGT | M18;M17;M15 |
| 1597 | NKKDWYDFVENPDIL | M43;M21; | KEIDRLNEVAKNLNE | M11;M70;M78;M65;M2; |
| | RVYANLGERV | M32;M49 | SLIDLQELGK | M79;M51;M67;M82 |
| 1598 | TLVATAEAELAKNVSL | M29;M73; | AIATCDWTNAGDYIL | M56;M73;M19;M31;M6; |
| | DNVLSTFIS | M29;M73 | ANTCTERLKL | M44;M18;M52;M47 |
| 1599 | GGDGKMKDLSPRWYF | M52;M32; | IATCDWTNAGDYILA | M56;M73;M19;M31;M6; |
| | YYLGTGPEAG | M60;M31 | NTCTERLKLF | M44;M18;M52;M47 |
| 1600 | MVSLLSVLLSMQGAV | M69;M67; | ATCDWTNAGDYILAN | M56;M73;M19;M31;M6; |
| | DINKLCEEML | M69;M67 | TCTERLKLFA | M44;M18;M52;M47 |
| 1601 | EKMVSLLSVLLSMQG | M69;M67; | NAIATCDWTNAGDYI | M56;M73;M19;M31;M6; |
| | AVDINKLCEE | M69;M67 | LANTCTERLK | M44;M18;M52;M47 |
| 1602 | KMVSLLSVLLSMQGA | M69;M67; | YNLWNTFTRLQSLEN | M4;M54;M14;M1;M34;M25; |
| | VDINKLCEEM | M69;M67 | VAFNVVNKGH | M60;M42;M39 |
| 1603 | IIGGAKLKALNLGETF | M27;M24; | SLWVYKQFDTYNLW | M71;M58;M16;M14;M19; |
| | VTHSKGLYR | M27;M24 | NTFTRLQSLEN | M25;M41;M17;M15 |
| 1604 | IIIGGAKLKALNLGETF | M27;M24; | GLPYGANKDGIIWVA | M64;M40;M14;M34;M30; |
| | VTHSKGLY | M27;M24 | TEGALNTPKD | M6;M57;M49;M22 |
| 1605 | SYLFQHANLDSCKRVL | M5;M27; | IDRLNEVAKNLNESLI | M11;M70;M78;M65;M61; |
| | NVVCKTCGQ | M5;M27 | DLQELGKYE | M79;M51;M67;M82 |
| 1606 | MSYLFQHANLDSCKR | M5;M27; | VDTVSALVYDNKLK | M21;M28;M16;M7;M38; |
| | VLNVVCKTCG | M5;M27 | AHKDKSAQCFK | M50;M63;M17;M35 |
| 1607 | KSPNFSKLINIIIWFLLL | M74;M31; | PAEIVDTVSALVYDN | M12;M28;M16;M7;M38; |
| | SVCLGSL | M74;M31 | KLKAHKDKSA | M50;M17;M35;M59 |
| 1608 | LKSPNFSKLINIIIWFLL | M74;M31; | VYAADPAMHAASGN | M12;M24;M57;M50;M33; |
| | LSVCLGS | M74;M31 | LLLDKRTTCFS | M8;M46;M39;M9 |
| 1609 | PVCVETKAIVSTIQRK | M5;M60; | YAADPAMHAASGNL | M12;M24;M57;M50;M33; |
| | YKGIKIQEG | M5;M60 | LLDKRTTCFSV | M8;M46;M39;M9 |
| 1610 | VCVETKAIVSTIQRKY | M5;M60; | LHSSRLSFKELLVYAA | M64;M48;M57;M36;M41; |
| | KGIKIQEGV | M5;M60 | DPAMHAASG | M49;M26;M22;M20 |
| 1611 | CVETKAIVSTIQRKYK | M5;M60; | HSSRLSFKELLVYAA | M64;M48;M57;M36;M41; |
| | GIKIQEGVV | M5;M60 | DPAMHAASGN | M49;M26;M22;M20 |
| 1612 | MPVCVETKAIVSTIQR | M5;M60; | EVFNATRFASVYAWN | M19;M16;M55;M25;M53; |
| | KYKGIKIQE | M5;M60 | RKRISNCVAD | M2;M74;M27;M20 |
| 1613 | KEMYLKLRSDVLLPLT | M53;M61; | FNATRFASVYAWNR | M19;M16;M55;M25;M53; |
| | QYNRYLALY | M53;M61 | KRISNCVADYS | M2;M74;M27;M20 |
| 1614 | DKAGQKTYERHSLSH | M31;M70; | VFNATRFASVYAWN | M19;M16;M55;M25;M53; |
| | FVNLDNLRAN | M31;M70 | RKRISNCVADY | M2;M74;M27;M20 |
| 1615 | DTTSYREAACCHLAK | M78;M79; | NATRFASVYAWNRK | M19;M16;M55;M25;M53; |
| | ALNDFSNSGS | M78;M79 | RISNCVADYSV | M2;M74;M27;M20 |
| 1616 | SYREAACCHLAKALN | M78;M79; | LNGNWYDFGDFIQTT | M4;M40;M9;M58;M16;M34; |
| | DFSNSGSDVL | M78;M79 | PGSGVPVVDS | M8;M15;M11 |
| 1617 | TTSYREAACCHLAKA | M78;M79; | DLNGNWYDFGDFIQT | M4;M40;M9;M58;M16;M34; |
| | LNDFSNSGSD | M78;M79 | TPGSGVPVVD | M8;M15;M11 |
| 1618 | YREAACCHLAKALND | M78;M79; | NGNWYDFGDFIQTTP | M4;M40;M9;M58;M16;M34; |
| | FSNSGSDVLY | M78;M79 | GSGVPVVDSY | M8;M15;M11 |
| 1619 | AGALNKATNNAMQV | M78;M79; | TCCSLSHRFYRLANE | M28;M5;M30;M2;M79;M42; |
| | ESDDYIATNGP | M78;M79 | CAQVLSEMVM | M43;M46;M39 |
| 1620 | REAACCHLAKALNDF | M78;M79; | CSLSHRFYRLANECA | M28;M5;M30;M2;M79;M42; |
| | SNSGSDVLYQ | M78;M79 | QVLSEMVMCG | M43;M46;M39 |
| 1621 | AACCHLAKALNDFSN | M78;M79; | CCSLSHRFYRLANEC | M28;M5;M30;M2;M79;M42; |
| | SGSDVLYQPP | M78;M79 | AQVLSEMVMC | M43;M46;M39 |
| 1622 | TSYREAACCHLAKAL | M78;M79; | PPPGDQFKHLIPLMYK | M56;M19;M12;M25;M60; |
| | NDFSNSGSDV | M78;M79 | GLPWNVVRI | M18;M15;M39;M47 |
| 1623 | EAACCHLAKALNDFS | M78;M79; | DNQDLNGNWYDFGD | M4;M40;M9;M58;M16;M70; |
| | NSGSDVLYQP | M78;M79 | FIQTTPGSGVP | M34;M8;M11 |
| 1624 | SNLLLQYGSFCTQLNR | M13;M41; | SNFRVQPTESIVRFPNI | M21;M28;M31;M34;M30; |
| | ALTGIAVEQ | M43;M20 | TNLCPFGE | M48;M41;M26;M22 |
| 1625 | NLLLQYGSFCTQLNRA | M13;M41; | HTTCCSLSHRFYRLA | M28;M5;M60;M30;M2;M79; |
| | LTGIAVEQD | M43;M20 | NECAQVLSEM | M43;M42;M39 |
| 1626 | DVLVRGFGDSVEEVLS | M10;M70; | TTCCSLSHRFYRLANE | M28;M5;M60;M30;M2;M79; |
| | EARQHLKDG | M10;M70 | CAQVLSEMV | M43;M42;M39 |
| 1627 | VLVRGFGDSVEEVLSE | M10;M70; | LPYGANKDGIIWVAT | M64;M40;M34;M30;M6; |
| | ARQHLKDGT | M10;M70 | EGALNTPKDH | M57;M72;M49;M22 |
| 1628 | WVPRASANIGCNHTG | M9;M38; | PYGANKDGIIWVATE | M64;M40;M34;M30;M6; |
| | VVGEGSEGLN | M9;M38 | GALNTPKDHI | M57;M72;M49;M22 |
| 1629 | YWVPRASANIGCNHT | M9;M38; | YGANKDGIIWVATEG | M64;M40;M34;M30;M6; |
| | GVVGEGSEGL | M9;M38 | ALNTPKDHIG | M57;M72;M49;M22 |
| 1630 | AYWVPRASANIGCNH | M9;M38; | GANKDGIIWVATEGA | M64;M40;M34;M30;M6; |
| | TGVVGEGSEG | M9;M38 | LNTPKDHIGT | M57;M72;M49;M22 |
| 1631 | VPRASANIGCNHTGVV | M9;M38; | RGTTTYKLNVGDYFV | M16;M34;M18;M41;M43; |
| | GEGSEGLND | M9;M38 | LTSHTVMPLS | M15;M42;M39;M44 |
| 1632 | ETLPTEVLTEEVVLKT | M38;M62; | GTTTYKLNVGDYFVL | M16;M34;M18;M41;M43; |
| | GDLQPLEQP | M38;M62 | TSHTVMPLSA | M15;M42;M39;M44 |
| 1633 | ARSEDKRAKVTSAMQ | M38;M62; | LVTLAILTALRLCAYC | M54;M16;M60;M25;M63; |
| | TMLFTMLRKL | M38;M62 | CNIVNVSLV | M41;M17;M46;M39 |
| 1634 | KQARSEDKRAKVTSA | M38;M62; | VTLAILTALRLCAYCC | M54;M16;M60;M25;M63; |
| | MQTMLFTMLR | M38;M62 | NIVNVSLVK | M41;M17;M46;M39 |
| 1635 | GETLPTEVLTEEVVLK | M38;M62; | LLQYGSFCTQLNRAL | M13;M28;M14;M70;M41; |
| | TGDLQPLEQ | M38;M62 | TGIAVEQDKN | M67;M27;M43;M20 |
| 1636 | NSGSDVLYQPPQTSITS | M38;M62; | LQYGSFCTQLNRALT | M13;M28;M14;M70;M41; |
| | AVLQSGFR | M38;M62 | GIAVEQDKNT | M67;M27;M43;M20 |
| 1637 | QARSEDKRAKVTSAM | M38;M62; | DYPKCDRAMPNMLRI | M21;M12;M30;M69;M41; |
| | QTMLFTMLRK | M38;M62 | MASLVLARKH | M46;M39;M22;M23 |
| 1638 | RSEDKRAKVTSAMQT | M38;M62; | ILANTCTERLKLFAAE | M64;M40;M21;M48;M63; |
| | MLFTMLRKLD | M38;M62 | TLKATEETF | M49;M26;M22;M23 |
| 1639 | TLPTEVLTEEVVLKTG | M38;M62; | SGINASVVNIQKEIDR | M28;M14;M70;M78;M61; |
| | DLQPLEQPT | M38;M62 | LNEVAKNLN | M79;M35;M82;M47 |
| 1640 | NKCAYWVPRASANIG | M75;M38; | FKVSIWNLDYIINLIIK | M56;M73;M58;M16;M50; |
| | CNHTGVVGEG | M75;M38 | NLSKSLTE | M18;M17;M11;M44 |
| 1641 | HNKCAYWVPRASANI | M75;M38; | VDGVVQQLPETYFTQ | M71;M32;M54;M16;M31; |
| | GCNHTGVVGE | M75;M38 | SRNLQEFKPR | M45;M33;M35;M47 |
| 1642 | KHCLHVVGPNVNKGE | M60;M77; | FLHVTYVPAQEKNFT | M28;M66;M78;M65;M2; |
| | DIQLLKSAYE | M60;M77 | TAPAICHDGK | M79;M33;M26;M82 |
| 1643 | GEFKLASHMYCSFYPP | M23;M20; | DSNGTITVEELKKLLE | M4;M58;M16;M55;M53; |
| | DEDEEEGDC | M23;M20 | QWNLVIGFL | M59;M17;M52;M47 |
| 1644 | SGEFKLASHMYCSFYP | M23;M20; | ATRFASVYAWNRKRI | M16;M55;M25;M53;M2; |
| | PDEDEEEGD | M23;M20 | SNCVADYSVL | M74;M67;M27;M20 |
| 1645 | SGHNLAKHCLHVVGP | M77;M37; | KLDDKDPNFKDQVIL | M56;M73;M53;M44;M17; |
| | NVNKGEDIQL | M77;M37 | LNKHIDAYKT | M35;M52;M11;M47 |
| 1646 | HNLAKHCLHVVGPNV | M77;M37; | DDKDPNFKDQVILLN | M56;M73;M53;M44;M17; |
| | NKGEDIQLLK | M77;M37 | KHIDAYKTFP | M35;M52;M11;M47 |
| 1647 | GHNLAKHCLHVVGPN | M77;M37; | LDDKDPNFKDQVILL | M56;M73;M53;M44;M17; |
| | VNKGEDIQLL | M77;M37 | NKHIDAYKTF | M35;M52;M11;M47 |
| 1648 | IVKTDGTLMIERFVSL | M4;M1;M5; | DKDPNFKDQVILLNK | M56;M73;M53;M44;M17; |
| | AIDAYPLTK | M2;M3 | HIDAYKTFPP | M35;M52;M11;M47 |
| 1649 | VKTDGTLMIERFVSLA | M4;M1;M5; | IKLDDKDPNFKDQVIL | M56;M73;M53;M44;M17; |
| | IDAYPLTKH | M2;M3 | LNKHIDAYK | M35;M52;M11;M47 |
| 1650 | DIVKTDGTLMIERFVS | M4;M1;M5; | VVQQLPETYFTQSRN | M71;M75;M32;M16;M31; |
| | LAIDAYPLT | M2;M3 | LQEFKPRSQM | M45;M33;M35;M47 |
| 1651 | NSPFHPLADNKFALTC | M4;M14; | GVVQQLPETYFTQSR | M71;M75;M32;M16;M31; |
| | FSTQFAFAC | M1;M3;M22 | NLQEFKPRSQ | M45;M33;M35;M47 |
| 1652 | YSSANNCTFEYVSQPF | M4;M1;M3; | QQLPETYFTQSRNLQ | M71;M75;M32;M16;M31; |
| | LMDLEGKQG | M57;M20 | EFKPRSQMEI | M45;M33;M35;M47 |
| 1653 | VYSSANNCTFEYVSQP | M4;M1;M3; | VQQLPETYFTQSRNL | M71;M75;M32;M16;M31; |
| | FLMDLEGKQ | M57;M20 | QEFKPRSQME | M45;M33;M35;M47 |
| 1654 | HSIGFDYVYNPFMIDV | M4;M1;M3; | QLPETYFTQSRNLQEF | M71;M75;M32;M16;M31; |
| | QQWGFTGNL | M57;M20 | KPRSQMEID | M45;M33;M35;M47 |
| 1655 | SGDATTAYANSVFNIC | M4;M1;M29; | LPETYFTQSRNLQEFK | M71;M75;M32;M16;M31; |
| | QAVTANVNA | M3;M39 | PRSQMEIDF | M45;M33;M35;M47 |
| 1656 | SSGDATTAYANSVFNI | M4;M1;M29; | SNVTWFHAIHVSGTN | M64;M40;M29;M45;M49; |
| | CQAVTANVN | M3;M39 | GTKRFDNPVL | M15;M26;M22;M23 |
| 1657 | TVDSSQGSEYDYVIFT | M4;M3;M51; | FSNVTWFHAIHVSGT | M64;M40;M29;M45;M49; |
| | QTTETAHSC | M22;M23 | NGTKRFDNPV | M15;M26;M22;M23 |
| 1658 | PFHPLADNKFALTCFS | M4;M21;M14; | PFFSNVTWFHAIHVSG | M64;M40;M29;M45;M49; |
| | TQFAFACPD | M3;M22 | TNGTKRFDN | M15;M26;M22;M23 |
| 1659 | HPLADNKFALTCFSTQ | M4;M21;M3; | FFSNVTWFHAIHVSG | M64;M40;M29;M45;M49; |
| | FAFACPDGV | M6;M22 | TNGTKRFDNP | M15;M26;M22;M23 |
| 1660 | LYRNRDVDTDFVNEF | M4;M6;M3; | INASVVNIQKEIDRLN | M28;M70;M78;M65;M2; |
| | YAYLRKHFSM | M26;M59 | EVAKNLNES | M61;M79;M82;M47 |
| 1661 | CLYRNRDVDTDFVNE | M4;M6;M3; | GINASVVNIQKEIDRL | M28;M70;M78;M65;M2; |
| | FYAYLRKHFS | M26;M59 | NEVAKNLNE | M61;M79;M82;M47 |
| 1662 | GWHNMLKTVYSDVE | M6;M45;M3; | IHADQLTPTWRVYST | M75;M58;M24;M16;M5;M6; |
| | NPHLMGWDYPK | M43;M59 | GSNVFQTRAG | M41;M17;M82 |
| 1663 | HNMLKTVYSDVENPH | M6;M45;M3; | FVENPDILRVYANLG | M64;M11;M21;M32;M48; |
| | LMGWDYPKCD | M43;M59 | ERVRQALLKT | M41;M49;M46;M22 |
| 1664 | WHNMLKTVYSDVENP | M6;M45;M3; | DFVENPDILRVYANL | M64;M11;M21;M32;M48; |
| | HLMGWDYPKC | M43;M59 | GERVRQALLK | M41;M49;M46;M22 |
| 1665 | ADNKFALTCFSTQFAF | M21;M3;M6; | YDFVENPDILRVYAN | M64;M11;M21;M32;M48; |
| | ACPDGVKHV | M33;M22 | LGERVRQALL | M41;M49;M46;M22 |
| 1666 | LADNKFALTCFSTQFA | M21;M3;M6; | QAWQPGVAMPNLYK | M12;M24;M55;M10;M53; |
| | FACPDGVKH | M33;M22 | MQRMLLEKCDL | M17;M52;M9;M23 |
| 1667 | DNKFALTCFSTQFAFA | M21;M3;M6; | SQAWQPGVAMPNLY | M12;M24;M55;M10;M53; |
| | CPDGVKHVY | M33;M22 | KMQRMLLEKCD | M17;M52;M9;M23 |
| 1668 | PNCVNCLDDRCILHCA | M64;M24; | LHVTYVPAQEKNFTT | M66;M78;M65;M29;M2; |
| | NFNVLFSTV | M3;M48;M23 | APAICHDGKA | M79;M33;M26;M82 |
| 1669 | IAARDLICAQKFNGLT | M58;M78; | TFSNYQHEETIYNLLK | M40;M34;M30;M41;M42; |
| | VLPPLLTDE | M3;M79;M39 | DCPAVAKHD | M27;M43;M39;M11 |
| 1670 | DCVVLHSYFTSDYYQ | M3;M41;M43; | FSNYQHEETIYNLLKD | M40;M34;M30;M41;M42; |
| | LYSTQLSTDT | M42;M39 | CPAVAKHDF | M27;M43;M39;M11 |
| 1671 | KDCVVLHSYFTSDYY | M3;M41;M43; | VAMPNLYKMQRMLL | M12;M55;M53;M17;M35; |
| | QLYSTQLSTD | M42;M39 | EKCDLQNYGDS | M52;M9;M47;M23 |
| 1672 | AVDALCEKALKYLPID | M71;M1;M51; | GVAMPNLYKMQRML | M12;M55;M53;M17;M35; |
| | KCSRIIPAR | M18;M22 | LEKCDLQNYGD | M52;M9;M47;M23 |
| 1673 | PPTSFGPLVRKIFVDGV | M71;M7;M1; | TTTYKLNVGDYFVLT | M16;M25;M34;M18;M41; |
| | PFVVSTGY | M36;M11 | SHTVMPLSAP | M43;M15;M42;M39 |
| 1674 | ACSHAAVDALCEKAL | M1;M60;M51; | YADVFHLYLQYIRKL | M71;M32;M52;M16;M61; |
| | KYLPIDKCSR | M49;M22 | HDELTGHMLD | M35;M46;M9;M47 |
| 1675 | HAAVDALCEKALKYL | M1;M60;M51; | DEDDNLIDSYFVVKR | M71;M58;M16;M54;M18; |
| | PIDKCSRIIP | M49;M22 | HTFSNYQHEE | M15;M52;M47;M20 |
| 1676 | SHAAVDALCEKALKY | M1;M60;M51; | VGVALLAVFQSASKII | M58;M24;M55;M60;M61; |
| | LPIDKCSRII | M49;M22 | TLKKRWQLA | M17;M35;M26;M9 |
| 1677 | CSHAAVDALCEKALK | M1;M60;M51; | GVALLAVFQSASKIIT | M58;M24;M55;M60;M61; |
| | YLPIDKCSRI | M49;M22 | LKKRWQLAL | M17;M35;M26;M9 |
| 1678 | AAVDALCEKALKYLPI | M1;M60;M51; | YEDQDALFAYTKRNV | M71;M24;M55;M10;M53; |
| | DKCSRIIPA | M49;M22 | IPTITQMNLK | M35;M9;M59;M23 |
| 1679 | YTACSHAAVDALCEK | M1;M60;M51; | VDDIVKTDGTLMIERF | M4;M9;M10;M1;M5;M2; |
| | ALKYLPIDKC | M67;M49 | VSLAIDAYP | M3;M6;M8;M11 |
| 1680 | VYTACSHAAVDALCE | M1;M60;M51; | LVDLPIGINITRFQTLL | M4;M21;M24;M5;M1;M3; |
| | KALKYLPIDK | M67;M49 | ALHRSYLT | M2;M26;M22;M20 |
| 1681 | QGSEYDYVIFTQTTET | M64;M6;M51; | KQIYKTPPIKDFGGFN | M4;M32;M28;M14;M31; |
| | AHSCNVNRF | M22;M23 | FSQILPDPS | M1;M3;M33;M27;M35 |
| 1682 | GSEYDYVIFTQTTETA | M64;M6;M51; | CPFGEVFNATRFASV | M4;M19;M58;M55;M25; |
| | HSCNVNRFN | M22;M59 | YAWNRKRISN | M53;M3;M2;M17;M20 |
| 1683 | SQGSEYDYVIFTQTTE | M4;M64;M51; | WNTFTRLQSLENVAF | M4;M54;M24;M1;M34;M25; |
| | TAHSCNVNR | M22;M23 | NVVNKGHFDG | M60;M3;M27;M39 |
| 1684 | KSNLKPFERDISTEIYQ | M53;M36; | NTFTRLQSLENVAFN | M4;M54;M24;M1;M34;M25; |
| | AGSTPCNG | M17;M46;M44 | VVNKGHFDGQ | M60;M3;M27;M39 |
| 1685 | TLKATEETFKLSYGIA | M12;M6;M44; | KSEDAQGMDNLACE | M4;M1;M3;M45;M37;M4; |
| | TVREVLSDR | M33;M59 | DLKPVSEEVVE | M1;M3;M45;M37 |
| 1686 | ATEETFKLSYGIATVR | M12;M6;M44; | NNCYLATALLTLQQI | M4;M58;M3;M48;M51;M4; |
| | EVLSDRELH | M33;M59 | ELKFNPPALQ | M58;M3;M48;M51 |
| 1687 | KATEETFKLSYGIATV | M12;M6;M44; | VVQLTSQWLTNIFGT | M4;M31;M3;M45;M59;M4; |
| | REVLSDREL | M33;M59 | VYEKLKPVLD | M31;M3;M45;M59 |
| 1688 | LKATEETFKLSYGIAT | M12;M6;M44; | GGVVQLTSQWLTNIF | M4;M3;M45;M42;M59;M4; |
| | VREVLSDRE | M33;M59 | GTVYEKLKPV | M3;M45;M42;M59 |
| 1689 | EETGTLIVNSVLLFLAF | M73;M14; | YSGVVTTVMFLARGI | M12;M14;M29;M3;M20; |
| | VVFLLVTL | M7;M50;M44 | VFMCVEYCPI | M12;M14;M29;M3;M20 |
| 1690 | LNTLVKQLSSNFGAISS | M34;M6; | ITEEVGHTDLMAAYV | M14;M70;M51;M63;M44; |
| | VLNDILSR | M48;M45;M22 | DNSSLTIKKP | M14;M70;M51;M63;M44 |
| 1691 | ALNTLVKQLSSNFGAI | M34;M6; | KITEEVGHTDLMAAY | M14;M70;M51;M63;M44; |
| | SSVLNDILS | M48;M45;M22 | VDNSSLTIKK | M14;M70;M51;M63;M44 |
| 1692 | FSQILPDPSKPSKRSFIE | M30;M36; | GTLSYEQFKKGVQIPC | M16;M1;M3;M37;M52;M16; |
| | DLLFNKV | M63;M67;M22 | TCGKQATKY | M1;M3;M37;M52 |
| 1693 | NFSQILPDPSKPSKRSFI | M30;M36; | GGDAALALLLLDRLN | M56;M58;M16;M55;M10; |
| | EDLLFNK | M63;M67;M22 | QLESKMSGKG | M53;M51;M36;M17;M11 |
| 1694 | SQILPDPSKPSKRSFIED | M30;M36; | LAAIMQLFFSYFAVHF | M3;M48;M45;M9;M23;M3; |
| | LLFNKVT | M63;M67;M22 | ISNSWLMWL | M48;M45;M9;M23 |
| 1695 | QLSSNFGAISSVLNDIL | M34;M6; | AIMQLFFSYFAVHFIS | M3;M48;M45;M9;M23;M3; |
| | SRLDKVEA | M48;M45;M50 | NSWLMWLII | M48;M45;M9;M23 |
| 1696 | LVKQLSSNFGAISSVL | M34;M6; | GLAAIMQLFFSYFAV | M3;M48;M45;M9;M23;M3; |
| | NDILSRLDK | M48;M45;M50 | HFISNSWLMW | M48;M45;M9;M23 |
| 1697 | KQLSSNFGAISSVLNDI | M34;M6; | AAIMQLFFSYFAVHFI | M3;M48;M45;M9;M23;M3; |
| | LSRLDKVE | M48;M45;M50 | SNSWLMWLI | M48;M45;M9;M23 |
| 1698 | VKQLSSNFGAISSVLN | M34;M6; | ACVEEVTTTLEETKFL | M28;M3;M6;M50;M20;M28; |
| | DILSRLDKV | M48;M45;M50 | TENLLLYID | M3;M6;M50;M20 |
| 1699 | GPHEFCSQHTMLVKQ | M14;M29; | CVEEVTTTLEETKFLT | M28;M3;M6;M50;M20;M28; |
| | GDDYVYLPYP | M6;M18;M39 | ENLLLYIDI | M3;M6;M50;M20 |
| 1700 | KGPHEFCSQHTMLVK | M14;M29; | LLSDLQDLKWARFPK | M4;M77;M54;M60;M3;M4; |
| | QGDDYVYLPY | M6;M18;M39 | SDGTGTIYTE | M77;M54;M60;M3 |
| 1701 | SAQCFKMFYKGVITH | M70;M45; | ALLSDLQDLKWARFP | M4;M77;M54;M60;M3;M4; |
| | DVSSAINRPQ | M36;M52;M11 | KSDGTGTIYT | M77;M54;M60;M3 |
| 1702 | QNAVASKILGLPTQTV | M21;M54; | LALLSDLQDLKWARF | M4;M77;M54;M60;M3;M4; |
| | DSSQGSEYD | M60;M51;M11 | PKSDGTGTIY | M77;M54;M60;M3 |
| 1703 | NEVAKNLNESLIDLQE | M70;M61; | IKACVEEVTTTLEETK | M32;M28;M3;M6;M20;M32; |
| | LGKYEQYIK | M51;M67;M17 | FLTENLLLY | M28;M3;M6;M20 |
| 1704 | RLNEVAKNLNESLIDL | M70;M61; | KACVEEVTTTLEETK | M32;M28;M3;M6;M20;M32; |
| | QELGKYEQY | M51;M67;M17 | FLTENLLLYI | M28;M3;M6;M20 |
| 1705 | LNEVAKNLNESLIDLQ | M70;M61; | GDYILANTCTERLKLF | M56;M73;M19;M31;M6; |
| | ELGKYEQYI | M51;M67;M17 | AAETLKATE | M48;M44;M18;M63;M47 |
| 1706 | AKNLNESLIDLQELGK | M70;M61; | APHGVVFLHVTYVPA | M64;M21;M28;M66;M70; |
| | YEQYIKWPW | M51;M67;M17 | QEKNFTTAPA | M53;M3;M33;M26;M9 |
| 1707 | KNLNESLIDLQELGKY | M70;M61; | QSAPHGVVFLHVTYV | M64;M21;M28;M66;M70; |
| | EQYIKWPWY | M51;M67;M17 | PAQEKNFTTA | M53;M3;M33;M26;M9 |
| 1708 | VAKNLNESLIDLQELG | M70;M61; | SAPHGVVFLHVTYVP | M64;M21;M28;M66;M70; |
| | KYEQYIKWP | M51;M67;M17 | AQEKNFTTAP | M53;M3;M33;M26;M9 |
| 1709 | EVAKNLNESLIDLQEL | M70;M61; | FPQSAPHGVVFLHVT | M64;M21;M28;M66;M70; |
| | GKYEQYIKW | M51;M67;M17 | YVPAQEKNFT | M53;M3;M33;M26;M9 |
| 1710 | KMFYKGVITHDVSSAI | M21;M70; | PQSAPHGVVFLHVTY | M64;M21;M28;M66;M70; |
| | NRPQIGVVR | M45;M36;M11 | VPAQEKNFTT | M53;M3;M33;M26;M9 |
| 1711 | FYKGVITHDVSSAINR | M21;M70; | TGYKKPASRELKVTF | M21;M70;M3;M57;M63; |
| | PQIGVVREF | M45;M36;M11 | FPDLNGDVVA | M21;M70;M3;M57;M63 |
| 1712 | FKMFYKGVITHDVSSA | M21;M70; | GYKKPASRELKVTFF | M21;M70;M3;M57;M63; |
| | INRPQIGVV | M45;M36;M11 | PDLNGDVVAI | M21;M70;M3;M57;M63 |
| 1713 | CFKMFYKGVITHDVSS | M21;M70; | IVTALRANSAVKLQN | M73;M51;M39;M11;M44; |
| | AINRPQIGV | M45;M36;M11 | NELSPVALRQ | M73;M51;M39;M11;M44 |
| 1714 | QCFKMFYKGVITHDV | M21;M70; | LIVTALRANSAVKLQ | M73;M51;M39;M11;M44; |
| | SSAINRPQIG | M45;M36;M11 | NNELSPVALR | M73;M51;M39;M11;M44 |
| 1715 | MFYKGVITHDVSSAIN | M21;M70; | PRVFSAVGNICYTPSK | M49;M3;M43;M8;M42;M49; |
| | RPQIGVVRE | M45;M36;M11 | LIEYTDFAT | M3;M43;M8;M42 |
| 1716 | DRLNEVAKNLNESLID | M70;M61; | GDYFVLTSHTVMPLS | M54;M55;M60;M34;M29; |
| | LQELGKYEQ | M79;M51;M67 | APTLVPQEHY | M45;M51;M42;M46;M39 |
| 1717 | PARMAGNGGDAALAL | M13;M58; | IPRRNVATLQAENVT | M28;M54;M29;M6;M45; |
| | LLLDRLNQLE | M53;M51;M11 | GLFKDCSKVI | M38;M36;M27;M59;M20 |
| 1718 | TPSDFVRATATIPIQAS | M14;M34; | GKTFYVLPNDDTLRV | M3;M74;M43;M39;M22;M3; |
| | LPFGWLIV | M29;M45;M33 | EAFEYYHTTD | M74;M43;M39;M22 |
| 1719 | CTFEYVSQPFLMDLEG | M1;M57; | YCFLGYFCTCYFGLF | M56;M60;M3;M6;M18;M56; |
| | KQGNFKNLR | M36;M46;M20 | CLLNRYFRLT | M60;M3;M6;M18 |
| 1720 | ANQVIVNNLDKSAGFP | M58;M50; | CFLGYFCTCYFGLFCL | M56;M60;M3;M6;M18;M56; |
| | FNKWGKARL | M33;M51;M17 | LNRYFRLTL | M60;M3;M6;M18 |
| 1721 | INANQVIVNNLDKSAG | M58;M50; | RRCPAEIVDTVSALV | M12;M16;M7;M29;M6;M38; |
| | FPFNKWGKA | M33;M51;M17 | YDNKLKAHKD | M8;M17;M59;M23 |
| 1722 | GCINANQVIVNNLDKS | M58;M50; | WTNAGDYILANTCTE | M56;M73;M19;M31;M6; |
| | AGFPFNKWG | M33;M51;M17 | RLKLFAAETL | M44;M18;M8;M52;M47 |
| 1723 | GGCINANQVIVNNLDK | M58;M50; | TCDWTNAGDYILANT | M56;M73;M19;M31;M6; |
| | SAGFPFNKW | M33;M51;M17 | CTERLKLFAA | M44;M18;M8;M52;M47 |
| 1724 | NANQVIVNNLDKSAG | M58;M50; | DWTNAGDYILANTCT | M56;M73;M19;M31;M6; |
| | FPFNKWGKAR | M33;M51;M17 | ERLKLFAAET | M44;M18;M8;M52;M47 |
| 1725 | CINANQVIVNNLDKSA | M58;M50; | CDWTNAGDYILANTC | M56;M73;M19;M31;M6; |
| | GFPFNKWGK | M33;M51;M17 | TERLKLFAAE | M44;M18;M8;M52;M47 |
| 1726 | PRRNVATLQAENVTG | M29;M38; | VEKGIYQTSNFRVQPT | M31;M34;M30;M37;M50; |
| | LFKDCSKVIT | M45;M36;M59 | ESIVRFPNI | M51;M41;M8;M39;M23 |
| 1727 | WDYKRDAPAHISTIGV | M70;M6; | FYLTNDVSFLAHIQW | M54;M58;M60;M30;M3; |
| | CSMTDIAKK | M36;M11;M59 | MVMFTPLVPF | M54;M58;M60;M30;M3 |
| 1728 | MEVTPSGTWLTYTGAI | M19;M41; | LTNDVSFLAHIQWMV | M54;M58;M60;M30;M3; |
| | KLDDKDPNF | M8;M35;M11 | MFTPLVPFWI | M54;M58;M60;M30;M3 |
| 1729 | DMYSVMLTNDNTSRY | M64;M7; | TNDVSFLAHIQWMV | M54;M58;M60;M30;M3; |
| | WEPEFYEAMY | M34;M36;M22 | MFTPLVPFWIT | M54;M58;M60;M30;M3 |
| 1730 | LDMYSVMLTNDNTSR | M64;M7; | YLTNDVSFLAHIQWM | M54;M58;M60;M30;M3; |
| | YWEPEFYEAM | M34;M36;M22 | VMFTPLVPFW | M54;M58;M60;M30;M3 |
| 1731 | IGMEVTPSGTWLTYTG | M19;M41; | TGYRVTKNSKVQIGE | M40;M14;M31;M24;M41; |
| | AIKLDDKDP | M8;M11;M23 | YTFEKGDYGD | M8;M43;M42;M39;M44 |
| 1732 | DKSAQCFKMFYKGVI | M13;M70; | AEIVDTVSALVYDNK | M12;M28;M16;M7;M38; |
| | THDVSSAINR | M45;M36;M52 | LKAHKDKSAQ | M50;M63;M17;M35;M59 |
| 1733 | PETTADIVVFDEISMAT | M55;M7; | IVDTVSALVYDNKLK | M12;M28;M16;M7;M38; |
| | NYDLSVVN | M48;M33;M49 | AHKDKSAQCF | M50;M63;M17;M35;M59 |
| 1734 | DVNLHSSRLSFKELLV | M38;M48; | EIVDTVSALVYDNKL | M12;M28;M16;M7;M38; |
| | YAADPAMHA | M57;M36;M20 | KAHKDKSAQC | M50;M63;M17;M35;M59 |
| 1735 | MPILTLTRALTAESHV | M12;M16; | DKLQFTSLEIPRRNVA | M28;M54;M29;M2;M6;M45; |
| | DTDLTKPYI | M58;M17;M8 | TLQAENVTG | M38;M27;M59;M20 |
| 1736 | VSQPFLMDLEGKQGN | M54;M6; | LQFTSLEIPRRNVATL | M28;M54;M60;M29;M2;M6; |
| | FKNLREFVFK | M36;M46;M59 | QAENVTGLF | M45;M27;M59;M20 |
| 1737 | KRISNCVADYSVLYNS | M73;M7; | YFAVHFISNSWLMWL | M9;M73;M3;M11;M23;M9; |
| | ASFSTFKCY | M15;M11;M44 | IINLVQMAPI | M73;M3;M11;M23 |
| 1738 | RISNCVADYSVLYNSA | M73;M7; | SYFAVHFISNSWLMW | M9;M73;M3;M11;M23;M9; |
| | SFSTFKCYG | M15;M11;M44 | LIINLVQMAP | M73;M3;M11;M23 |
| 1739 | FIEDLLFNKVTLADAG | M73;M48; | EIDRLNEVAKNLNESL | M11;M70;M78;M65;M2; |
| | FIKQYGDCL | M44;M11;M47 | IDLQELGKY | M61;M79;M51;M67;M82 |
| 1740 | QGEIKDATPSDFVRAT | M34;M45; | YLTFYLTNDVSFLAHI | M54;M58;M60;M3;M50; |
| | ATIPIQASL | M33;M8;M11 | QWMVMFTPL | M54;M58;M60;M3;M50 |
| 1741 | TETAHSCNVNRFNVAI | M19;M25; | YLYLTFYLTNDVSFL | M54;M58;M60;M3;M50; |
| | TRAKVGILC | M6;M33;M59 | AHIQWMVMFT | M54;M58;M60;M3;M50 |
| 1742 | ECFDKFKVNSTLEQYV | M40;M6; | LTFYLTNDVSFLAHIQ | M54;M58;M60;M3;M50; |
| | FCTVNALPE | M50;M18;M44 | WMVMFTPLV | M54;M58;M60;M3;M50 |
| 1743 | QSLQTYVTQQLIRAAE | M64;M21; | IYLYLTFYLTNDVSFL | M54;M58;M60;M3;M50; |
| | IRASANLAA | M12;M14;M49 | AHIQWMVMF | M54;M58;M60;M3;M50 |
| 1744 | LNRALTGIAVEQDKNT | M28;M14; | VIYLYLTFYLTNDVSF | M54;M58;M60;M3;M50; |
| | QEVFAQVKQ | M70;M67;M20 | LAHIQWMVM | M54;M58;M60;M3;M50 |
| 1745 | QLNRALTGIAVEQDK | M28;M14; | LYLTFYLTNDVSFLA | M54;M58;M60;M3;M50; |
| | NTQEVFAQVK | M70;M67;M20 | HIQWMVMFTP | M54;M58;M60;M3;M50 |
| 1746 | PVTLACFVLAAVYRIN | M58;M70; | GRFVLALLSDLQDLK | M77;M54;M70;M60;M3; |
| | WITGGIAIA | M33;M63;M44 | WARFPKSDGT | M77;M54;M70;M60;M3 |
| 1747 | FLWLLWPVTLACFVL | M58;M14; | SSTCMMCYKRNRAT | M14;M8;M39;M11;M44; |
| | AAVYRINWIT | M70;M33;M63 | RVECTTIVNGV | M14;M8;M39;M11;M44 |
| 1748 | EDLLFNKVTLADAGFI | M73;M70; | NSSTCMMCYKRNRA | M14;M8;M39;M11;M44; |
| | KQYGDCLGD | M48;M41;M44 | TRVECTTIVNG | M14;M8;M39;M11;M44 |
| 1749 | PRQKRTATKAYNVTQ | M19;M70; | NVSLVKPSFYVYSRV | M40;M71;M54;M12;M16; |
| | AFGRRGPEQT | M78;M25;M2 | KNLNSSRVPD | M60;M33;M8;M46;M39 |
| 1750 | KPRQKRTATKAYNVT | M19;M70; | VSLVKPSFYVYSRVK | M40;M71;M54;M12;M16; |
| | QAFGRRGPEQ | M78;M25;M2 | NLNSSRVPDL | M60;M33;M8;M46;M39 |
| 1751 | AFDIYNDKVAGFAKFL | M4;M55; | CMMCYKRNRATRVE | M14;M29;M8;M39;M44; |
| | KTNCCRFQE | M7;M78;M79 | CTTIVNGVRRS | M14;M29;M8;M39;M44 |
| 1752 | PLSETKCTLKSFTVEK | M75;M21; | STCMMCYKRNRATR | M14;M29;M8;M39;M44; |
| | GIYQTSNFR | M14;M25;M63 | VECTTIVNGVR | M14;M29;M8;M39;M44 |
| 1753 | DPLSETKCTLKSFTVE | M75;M21; | MMCYKRNRATRVEC | M14;M29;M8;M39;M44; |
| | KGIYQTSNF | M14;M25;M63 | TTIVNGVRRSF | M14;M29;M8;M39;M44 |
| 1754 | LSETKCTLKSFTVEKGI | M75;M21; | MCYKRNRATRVECTT | M14;M29;M8;M39;M44; |
| | YQTSNFRV | M14;M25;M63 | IVNGVRRSFY | M14;M29;M8;M39;M44 |
| 1755 | LDPLSETKCTLKSFTV | M75;M21; | TCMMCYKRNRATRV | M14;M29;M8;M39;M44; |
| | EKGIYQTSN | M14;M25;M63 | ECTTIVNGVRR | M14;M29;M8;M39;M44 |
| 1756 | FPNITNLCPFGEVFNAT | M28;M66; | EVPANSTVLSFCAFA | M28;M48;M36;M8;M49; |
| | RFASVYAW | M58;M45;M17 | VDAAKAYKDY | M28;M48;M36;M8;M49 |
| 1757 | KNLREFVFKNIDGYFK | M71;M19; | ADYNYKLPDDFTGCV | M13;M12;M14;M29;M38; |
| | IYSKHTPIN | M16;M15;M52 | IAWNSNNLDS | M48;M67;M68;M49;M26 |
| 1758 | NLREFVFKNIDGYFKI | M71;M19; | RMAGNGGDAALALL | M13;M56;M58;M16;M55; |
| | YSKHTPINL | M16;M15;M52 | LLDRLNQLESK | M10;M53;M51;M17;M11 |
| 1759 | FQFCNDPFLGVYYHK | M4;M21; | TIQRKYKGIKIQEGVV | M40;M14;M5;M51;M67; |
| | NNKSWMESEF | M1;M37;M22 | DYGARFYFY | M40;M14;M5;M51;M67 |
| 1760 | EFQFCNDPFLGVYYHK | M4;M21; | STIQRKYKGIKIQEGV | M40;M14;M5;M51;M67; |
| | NNKSWMESE | M1;M37;M22 | VDYGARFYF | M40;M14;M5;M51;M67 |
| 1761 | PQADVEWKFYDAQPC | M29;M6; | VVDGCNSSTCMMCY | M71;M55;M8;M39;M44; |
| | SDKAYKIEEL | M41;M8;M59 | KRNRATRVECT | M71;M55;M8;M39;M44 |
| 1762 | CTVNALPETTADIVVF | M28;M55; | HVVDGCNSSTCMMC | M71;M55;M8;M39;M44; |
| | DEISMATNY | M38;M48;M49 | YKRNRATRVEC | M71;M55;M8;M39;M44 |
| 1763 | TVNALPETTADIVVFD | M28;M55; | TSKETLYCIDGALLTK | M10;M36;M35;M39;M44; |
| | EISMATNYD | M38;M48;M49 | SSEYKGPIT | M10;M36;M35;M39;M44 |
| 1764 | FCTVNALPETTADIVV | M28;M55; | VPAQEKNFTTAPAICH | M24;M78;M65;M7;M29;M2; |
| | FDEISMATN | M38;M48;M49 | DGKAHFPRE | M45;M79;M33;M82 |
| 1765 | GPEAGLPYGANKDGII | M64;M14; | YVPAQEKNFTTAPAIC | M24;M78;M65;M7;M29;M2; |
| | WVATEGALN | M30;M57;M22 | HDGKAHFPR | M45;M79;M33;M82 |
| 1766 | EAGLPYGANKDGIIWV | M64;M14; | GCNSSTCMMCYKRN | M71;M8;M39;M11;M44; |
| | ATEGALNTP | M30;M57;M22 | RATRVECTTIV | M71;M8;M39;M11;M44 |
| 1767 | PEAGLPYGANKDGIIW | M64;M14; | LLPSLATVAYFNMVY | M28;M6;M63;M46;M39; |
| | VATEGALNT | M30;M57;M22 | MPASWVMRIM | M28;M6;M63;M46;M39 |
| 1768 | FLGTCRRCPAEIVDTV | M29;M38; | LFLLPSLATVAYFNM | M28;M6;M63;M46;M39; |
| | SALVYDNKL | M6;M8;M23 | VYMPASWVMR | M28;M6;M63;M46;M39 |
| 1769 | MFLGTCRRCPAEIVDT | M29;M38; | FLLPSLATVAYFNMV | M28;M6;M63;M46;M39; |
| | VSALVYDNK | M6;M8;M23 | YMPASWVMRI | M28;M6;M63;M46;M39 |
| 1770 | KIADKYVRNLQHRLY | M54;M60; | YYKKDNSYFTEQPID | M64;M55;M60;M51;M39; |
| | ECLYRNRDVD | M2;M37;M44 | LVPNQPYPNA | M64;M55;M60;M51;M39 |
| 1771 | IADKYVRNLQHRLYE | M54;M60; | NYYKKDNSYFTEQPI | M64;M55;M60;M51;M39; |
| | CLYRNRDVDT | M2;M37;M44 | DLVPNQPYPN | M64;M55;M60;M51;M39 |
| 1772 | ETQALPQRQKKQQTV | M54;M14; | KKDNSYFTEQPIDLVP | M64;M55;M60;M51;M39; |
| | TLLPAADLDD | M29;M26;M39 | NQPYPNASF | M64;M55;M60;M51;M39 |
| 1773 | TQALPQRQKKQQTVT | M54;M14; | YKKDNSYFTEQPIDL | M64;M55;M60;M51;M39; |
| | LLPAADLDDF | M29;M26;M39 | VPNQPYPNAS | M64;M55;M60;M51;M39 |
| 1774 | TKRFDNPVLPFNDGVY | M64;M12; | LANTCTERLKLFAAE | M4;M64;M21;M40;M48; |
| | FASTEKSNI | M24;M28;M22 | TLKATEETFK | M63;M49;M26;M22;M23 |
| 1775 | KRFDNPVLPFNDGVYF | M64;M12; | ANTCTERLKLFAAET | M4;M64;M21;M40;M48; |
| | ASTEKSNII | M24;M28;M22 | LKATEETFKL | M63;M49;M26;M22;M23 |
| 1776 | NKDGIIWVATEGALNT | M64;M30; | NTCTERLKLFAAETL | M4;M64;M21;M40;M48; |
| | PKDHIGTRN | M6;M72;M22 | KATEETFKLS | M63;M49;M26;M22;M23 |
| 1777 | KDGIIWVATEGALNTP | M64;M30; | CYLATALLTLQQIELK | M73;M58;M48;M74;M51; |
| | KDHIGTRNP | M6;M72;M22 | FNPPALQDA | M73;M58;M48;M74;M51 |
| 1778 | FTTAPAICHDGKAHFP | M56;M24; | ATALLTLQQIELKFNP | M73;M58;M48;M74;M51; |
| | REGVFVSNG | M7;M45;M35 | PALQDAYYR | M73;M58;M48;M74;M51 |
| 1779 | TAPAICHDGKAHFPRE | M56;M24; | YLATALLTLQQIELKF | M73;M58;M48;M74;M51; |
| | GVFVSNGTH | M7;M45;M35 | NPPALQDAY | M73;M58;M48;M74;M51 |
| 1780 | NFTTAPAICHDGKAHF | M56;M24; | LATALLTLQQIELKFN | M73;M58;M48;M74;M51; |
| | PREGVFVSN | M7;M45;M35 | PPALQDAYY | M73;M58;M48;M74;M51 |
| 1781 | KNFTTAPAICHDGKAH | M56;M24; | NCYLATALLTLQQIEL | M73;M58;M48;M74;M51; |
| | FPREGVFVS | M7;M45;M35 | KFNPPALQD | M73;M58;M48;M74;M51 |
| 1782 | TTAPAICHDGKAHFPR | M56;M24; | ALLTLQQIELKFNPPA | M73;M58;M48;M74;M51; |
| | EGVFVSNGT | M7;M45;M35 | LQDAYYRAR | M73;M58;M48;M74;M51 |
| 1783 | EKNFTTAPAICHDGKA | M56;M24; | TALLTLQQIELKFNPP | M73;M58;M48;M74;M51; |
| | HFPREGVFV | M7;M45;M35 | ALQDAYYRA | M73;M58;M48;M74;M51 |
| 1784 | SPRWYFYYLGTGPEA | M32;M12; | SSYIVDSVTVKNGSIH | M21;M12;M48;M36;M49; |
| | GLPYGANKDG | M31;M6;M52 | LYFDKAGQK | M21;M12;M48;M36;M49 |
| 1785 | KRDAPAHISTIGVCSM | M66;M70; | HADQLTPTWRVYSTG | M75;M58;M14;M24;M16; |
| | TDIAKKPTE | M6;M63;M59 | SNVFQTRAGC | M5;M6;M41;M17;M82 |
| 1786 | RDAPAHISTIGVCSMT | M66;M70; | WNIGEQKSILSPLYAF | M6;M48;M45;M49;M22;M6; |
| | DIAKKPTET | M6;M63;M59 | ASEAARVVR | M48;M45;M49;M22 |
| 1787 | DAPAHISTIGVCSMTDI | M66;M70; | DPNFKDQVILLNKHID | M56;M73;M14;M53;M44; |
| | AKKPTETI | M6;M63;M59 | AYKTFPPTE | M17;M35;M52;M11;M47 |
| 1788 | APAHISTIGVCSMTDIA | M66;M70; | KDPNFKDQVILLNKHI | M56;M73;M14;M53;M44; |
| | KKPTETIC | M6;M63;M59 | DAYKTFPPT | M17;M35;M52;M11;M47 |
| 1789 | GTKRFDNPVLPFNDGV | M64;M12; | QIRSAAKKNNLPFKLT | M19;M12;M78;M33;M8; |
| | YFASTEKSN | M28;M82;M22 | CATTRQVVN | M19;M12;M78;M33;M8 |
| 1790 | RTTCFSVAALTNNVAF | M73;M1; | KDQVILLNKHIDAYK | M56;M73;M14;M53;M44; |
| | QTVKPGNFN | M6;M22;M59 | TFPPTEPKKD | M41;M35;M52;M11;M47 |
| 1791 | LTVLPPLLTDEMIAQY | M7;M38; | NGVSFSTFEEAALCTF | M4;M13;M6;M49;M44;M4; |
| | TSALLAGTI | M48;M41;M49 | LLNKEMYLK | M13;M6;M49;M44 |
| 1792 | LEAPFLYLYALVYFLQ | M4;M54; | NQDLNGNWYDFGDFI | M4;M40;M9;M58;M16;M70; |
| | SINFVRIIM | M12;M60;M25 | QTTPGSGVPV | M34;M8;M15;M11 |
| 1793 | GLEAPFLYLYALVYFL | M4;M54; | QDLNGNWYDFGDFIQ | M4;M40;M9;M58;M16;M70; |
| | QSINFVRII | M12;M60;M25 | TTPGSGVPVV | M34;M8;M15;M11 |
| 1794 | EAPFLYLYALVYFLQS | M4;M54; | ANSTVLSFCAFAVDA | M32;M12;M28;M36;M69; |
| | INFVRIIMR | M12;M60;M25 | AKAYKDYLAS | M32;M12;M28;M36;M69 |
| 1795 | TVYDPLQPELDSFKEE | M70;M34; | AQGMDNLACEDLKP | M4;M1;M45;M37;M49;M4; |
| | LDKYFKNHT | M6;M63;M59 | VSEEVVENPTI | M1;M45;M37;M49 |
| 1796 | VVRIKIVQMLSDTLKN | M61;M57; | SDDYIATNGPLKVGG | M14;M10;M29;M11;M44; |
| | LSDRVVFVL | M36;M46;M20 | SCVLSGHNLA | M14;M10;M29;M11;M44 |
| 1797 | LPWNVVRIKIVQMLSD | M61;M57; | DITFLKKDAPYIVGDV | M14;M7;M30;M57;M11; |
| | TLKNLSDRV | M36;M46;M20 | VQEGVLTAV | M14;M7;M30;M57;M11 |
| 1798 | NVVRIKIVQMLSDTLK | M61;M57; | TSNFRVQPTESIVRFP | M21;M31;M34;M30;M48; |
| | NLSDRVVFV | M36;M46;M20 | NITNLCPFG | M50;M41;M26;M39;M22 |
| 1799 | WNVVRIKIVQMLSDTL | M61;M57; | SVYYTSNPTTFHLDG | M7;M48;M45;M50;M49;M7; |
| | KNLSDRVVF | M36;M46;M20 | EVITFDNLKT | M48;M45;M50;M49 |
| 1800 | PWNVVRIKIVQMLSDT | M61;M57; | REVRTIKVFTTVDNIN | M29;M51;M43;M42;M26; |
| | LKNLSDRVV | M36;M46;M20 | LHTQVVDMS | M29;M51;M43;M42;M26 |
| 1801 | TVREVLSDRELHLSWE | M28;M70; | YTVELGTEVNEFACV | M14;M66;M34;M8;M39; |
| | VGKPRPPLN | M5;M6;M59 | VADAVIKTLQ | M14;M66;M34;M8;M39 |
| 1802 | ATVREVLSDRELHLS | M28;M70; | DSVTVKNGSIHLYFD | M21;M12;M7;M48;M49; |
| | WEVGKPRPPL | M5;M6;M59 | KAGQKTYERH | M21;M12;M7;M48;M49 |
| 1803 | VREVLSDRELHLSWE | M28;M70; | LDYIINLIIKNLSKSLT | M56;M73;M28;M58;M50; |
| | VGKPRPPLNR | M5;M6;M59 | ENKYSQLD | M18;M17;M15;M11;M44 |
| 1804 | VYDPLQPELDSFKEEL | M75;M70; | NLDYIINLIIKNLSKSL | M56;M73;M28;M58;M50; |
| | DKYFKNHTS | M6;M63;M59 | TENKYSQL | M18;M17;M15;M11;M44 |
| 1805 | PLQPELDSFKEELDKY | M75;M70; | YAFASEAARVVRSIFS | M4;M14;M48;M42;M59;M4; |
| | FKNHTSPDV | M6;M63;M59 | RTLETAQNS | M14;M48;M42;M59 |
| 1806 | DPLQPELDSFKEELDK | M75;M70; | GTEVNEFACVVADAV | M14;M25;M34;M8;M39; |
| | YFKNHTSPD | M6;M63;M59 | IKTLQPVSEL | M14;M25;M34;M8;M39 |
| 1807 | YDPLQPELDSFKEELD | M75;M70; | LLLQLCTFTRSTNSRI | M14;M33;M8;M42;M39; |
| | KYFKNHTSP | M6;M63;M59 | KASMPTTIA | M14;M33;M8;M42;M39 |
| 1808 | PSKRSFIEDLLFNKVTL | M73;M44; | LTTAAKLMVVIPDYN | M57;M51;M41;M82;M23; |
| | ADAGFIKQ | M67;M11;M47 | TYKNTCDGTT | M57;M51;M41;M82;M23 |
| 1809 | FLVFLGIITTVAAFHQE | M30;M29; | TTAAKLMVVIPDYNT | M57;M51;M41;M82;M23; |
| | CSLQSCTQ | M6;M22;M59 | YKNTCDGTTF | M57;M51;M41;M82;M23 |
| 1810 | LVFLGIITTVAAFHQEC | M30;M29; | RDGCVPLNIIPLTTAA | M19;M24;M14;M38;M22; |
| | SLQSCTQH | M6;M22;M59 | KLMVVIPDY | M19;M24;M14;M38;M22 |
| 1811 | PKEITVATSRTLSYYK | M70;M48; | DGCVPLNIIPLTTAAK | M19;M24;M14;M38;M22; |
| | LGASQRVAG | M63;M49;M23 | LMVVIPDYN | M19;M24;M14;M38;M22 |
| 1812 | ESEFRVYSSANNCTFE | M64;M5;M2 | PVPYCYDTNVLEGSV | M12;M14;M5;M29;M46; |
| | YVSQPFLMD | M48;M82 | AYESLRPDTR | M12;M14;M5;M29;M46 |
| 1813 | QPTESIVRFPNITNLCP | M21;M28; | KPVPYCYDTNVLEGS | M12;M14;M5;M29;M46; |
| | FGEVFNAT | M66;M48;M41 | VAYESLRPDT | M12;M14;M5;M29;M46 |
| 1814 | DELTGHMLDMYSVML | M64;M31; | NNDYYRSLPGVFCGV | M25;M45;M8;M43;M39; |
| | TNDNTSRYWE | M34;M36;M22 | DAVNLLTNMF | M25;M45;M8;M43;M39 |
| 1815 | RNLQHRLYECLYRNR | M2;M6; | YRSLPGVFCGVDAVN | M25;M45;M8;M43;M39; |
| | DVDTDFVNEF | M35;M52;M47 | LLTNMFTPLI | M25;M45;M8;M43;M39 |
| 1816 | LPFFYYSDSPCESHGK | M71;M32; | YYRSLPGVFCGVDAV | M25;M45;M8;M43;M39; |
| | QVVSDIDYV | M55;M45;M41 | NLLTNMFTPL | M25;M45;M8;M43;M39 |
| 1817 | QLPFFYYSDSPCESHG | M71;M32; | DYYRSLPGVFCGVDA | M25;M45;M8;M43;M39; |
| | KQVVSDIDY | M55;M45;M41 | VNLLTNMFTP | M25;M45;M8;M43;M39 |
| 1818 | KQLPFFYYSDSPCESH | M71;M32; | NDYYRSLPGVFCGVD | M25;M45;M8;M43;M39; |
| | GKQVVSDID | M55;M45;M41 | AVNLLTNMFT | M25;M45;M8;M43;M39 |
| 1819 | SELVIGAVILRGHLRIA | M58;M14; | RSLPGVFCGVDAVNL | M25;M45;M8;M43;M39; |
| | GHHLGRCD | M55;M53;M17 | LTNMFTPLIQ | M25;M45;M8;M43;M39 |
| 1820 | ESELVIGAVILRGHLRI | M58;M14; | PASRELKVTFFPDLNG | M21;M70;M57;M36;M63; |
| | AGHHLGRC | M55;M53;M17 | DVVAIDYKH | M21;M70;M57;M36;M63 |
| 1821 | NQDVNLHSSRLSFKEL | M53;M38; | PAQEKNFTTAPAICHD | M56;M24;M78;M65;M7; |
| | LVYAADPAM | M57;M36;M20 | GKAHFPREG | M45;M79;M33;M35;M82 |
| 1822 | VDRYPANSIVCRFDTR | M5;M2; | PLNSIIKTIQPRVEKKK | M28;M29;M6;M72;M59; |
| | VLSNLNLPG | M48;M50;M9 | LDGFMGRI | M28;M29;M6;M72;M59 |
| 1823 | PAWRKAVFISPYNSQN | M21;M48; | FASEAARVVRSIFSRT | M4;M2;M48;M42;M59;M4; |
| | AVASKILGL | M49;M26;M39 | LETAQNSVR | M2;M48;M42;M59 |
| 1824 | AWRKAVFISPYNSQN | M21;M48; | ASEAARVVRSIFSRTL | M4;M2;M48;M42;M59;M4; |
| | AVASKILGLP | M49;M26;M39 | ETAQNSVRV | M2;M48;M42;M59 |
| 1825 | TRNPAWRKAVFISPYN | M21;M48; | TSNYSGVVTTVMFLA | M12;M14;M29;M38;M20; |
| | SQNAVASKI | M49;M26;M39 | RGIVFMCVEY | M12;M14;M29;M38;M20 |
| 1826 | RNPAWRKAVFISPYNS | M21;M48; | AKAYKDYLASGGQPI | M12;M37;M33;M8;M39; |
| | QNAVASKIL | M49;M26;M39 | TNCVKMLCTH | M12;M37;M33;M8;M39 |
| 1827 | NPAWRKAVFISPYNSQ | M21;M48; | KAYKDYLASGGQPIT | M12;M37;M33;M8;M39; |
| | NAVASKILG | M49;M26;M39 | NCVKMLCTHT | M12;M37;M33;M8;M39 |
| 1828 | WRKAVFISPYNSQNA | M21;M48; | VNEFACVVADAVIKT | M28;M78;M45;M49;M39; |
| | VASKILGLPT | M49;M26;M39 | LQPVSELLTP | M28;M78;M45;M49;M39 |
| 1829 | TFKVSIWNLDYIINLIIK | M56;M50; | INITRFQTLLALHRSY | M21;M24;M55;M5;M10;M2; |
| | NLSKSLT | M18;M11;M44 | LTPGDSSSG | M48;M20;M9;M23 |
| 1830 | DSATLPKGIMMNVAK | M73;M58; | PYCYDTNVLEGSVAY | M12;M14;M5;M34;M46; |
| | YTQLCQYLNT | M78;M11;M44 | ESLRPDTRYV | M12;M14;M5;M34;M46 |
| 1831 | SATLPKGIMMNVAKY | M73;M58; | NLACEDLKPVSEEVV | M73;M45;M50;M49;M44; |
| | TQLCQYLNTL | M78;M11;M44 | ENPTIQKDVL | M73;M45;M50;M49;M44 |
| 1832 | DGNKIADKYVRNLQH | M54;M60; | EDLKPVSEEVVENPTI | M73;M45;M50;M49;M44; |
| | RLYECLYRNR | M37;M57;M44 | QKDVLECNV | M73;M45;M50;M49;M44 |
| 1833 | EISMATNYDLSVVNAR | M19;M25; | LACEDLKPVSEEVVE | M73;M45;M50;M49;M44; |
| | LRAKHYVYI | M50;M18;M26 | NPTIQKDVLE | M73;M45;M50;M49;M44 |
| 1834 | ISMATNYDLSVVNARL | M19;M25; | CEDLKPVSEEVVENP | M73;M45;M50;M49;M44; |
| | RAKHYVYIG | M50;M18;M26 | TIQKDVLECN | M73;M45;M50;M49;M44 |
| 1835 | ASVYAWNRKRISNCV | M55;M7; | ACEDLKPVSEEVVEN | M73;M45;M50;M49;M44; |
| | ADYSVLYNSA | M74;M67;M27 | PTIQKDVLEC | M73;M45;M50;M49;M44 |
| 1836 | AQALNTLVKQLSSNFG | M53;M45; | KQIVESCGNFKVTKG | M19;M25;M41;M8;M23; |
| | AISSVLNDI | M15;M46;M22 | KAKKGAWNIG | M19;M25;M41;M8;M23 |
| 1837 | YNDKVAGFAKFLKTN | M73;M78; | AFKQIVESCGNFKVT | M19;M25;M41;M8;M23; |
| | CCRFQEKDED | M55;M79;M8 | KGKAKKGAWN | M19;M25;M41;M8;M23 |
| 1838 | NYDLSVVNARLRAKH | M1;M25; | FKQIVESCGNFKVTK | M19;M25;M41;M8;M23; |
| | YVYIGDPAQL | M37;M57;M26 | GKAKKGAWNI | M19;M25;M41;M8;M23 |
| 1839 | TNYDLSVVNARLRAK | M1;M25; | GVLMSNLGMPSYCTG | M73;M45;M18;M49;M44; |
| | HYVYIGDPAQ | M37;M57;M26 | YREGYLNSTN | M73;M45;M18;M49;M44 |
| 1840 | YDLSVVNARLRAKHY | M1;M25; | ASGKPVPYCYDTNVL | M30;M29;M36;M35;M46; |
| | VYIGDPAQLP | M37;M57;M26 | EGSVAYESLR | M30;M29;M36;M35;M46 |
| 1841 | GKIADYNYKLPDDFTG | M13;M12; | EAELAKNVSLDNVLS | M14;M7;M29;M61;M27; |
| | CVIAWNSNN | M29;M38;M67 | TFISAARQGF | M14;M7;M29;M61;M27 |
| 1842 | KIADYNYKLPDDFTGC | M13;M12; | AEAELAKNVSLDNVL | M14;M7;M29;M61;M27; |
| | VIAWNSNNL | M29;M38;M67 | STFISAARQG | M14;M7;M29;M61;M27 |
| 1843 | VVYRAFDIYNDKVAG | M78;M7; | AELAKNVSLDNVLST | M14;M7;M29;M61;M27; |
| | FAKFLKTNCC | M55;M79;M41 | FISAARQGFV | M14;M7;M29;M61;M27 |
| 1844 | TDVVYRAFDIYNDKV | M78;M7; | YPNMFITREEAIRHVR | M64;M32;M14;M34;M57; |
| | AGFAKFLKTN | M55;M79;M41 | AWIGFDVEG | M46;M69;M42;M39;M20 |
| 1845 | VYRAFDIYNDKVAGF | M78;M7; | QGLVASIKNFKSVLY | M21;M54;M55;M60;M48; |
| | AKFLKTNCCR | M55;M79;M41 | YQNNVFMSEA | M41;M49;M26;M22;M23 |
| 1846 | DVVYRAFDIYNDKVA | M78;M7; | VNTFSSTFNVPMEKL | M28;M70;M29;M8;M22; |
| | GFAKFLKTNC | M55;M79;M41 | KTLVATAEAE | M28;M70;M29;M8;M22 |
| 1847 | MKFLVFLGIITTVAAF | M64;M29; | LPFFSNVTWFHAIHVS | M64;M40;M29;M45;M49; |
| | HQECSLQSC | M6;M22;M59 | GTNGTKRFD | M15;M46;M26;M22;M23 |
| 1848 | SVVNARLRAKHYVYI | M40;M31; | FLPFFSNVTWFHAIHV | M64;M40;M29;M45;M49; |
| | GDPAQLPAPR | M1;M37;M57 | SGTNGTKRF | M15;M46;M26;M22;M23 |
| 1849 | DLSVVNARLRAKHYV | M31;M1; | LFLPFFSNVTWFHAIH | M64;M40;M29;M45;M49; |
| | YIGDPAQLPA | M37;M57;M26 | VSGTNGTKR | M15;M46;M26;M22;M23 |
| 1850 | RIVYTACSHAAVDALC | M28;M60; | FSSTFNVPMEKLKTL | M28;M81;M29;M6;M22; |
| | EKALKYLPI | M29;M67;M49 | VATAEAELAK | M28;M81;M29;M6;M22 |
| 1851 | IVYTACSHAAVDALCE | M28;M60; | FTPFDVVRQCSGVTF | M4;M54;M1;M60;M46;M4; |
| | KALKYLPID | M29;M67;M49 | QSAVKRTIKG | M54;M1;M60;M46 |
| 1852 | LVASIKNFKSVLYYQN | M21;M48; | EFTPFDVVRQCSGVTF | M4;M54;M1;M60;M46;M4; |
| | NVFMSEAKC | M41;M49;M22 | QSAVKRTIK | M54;M1;M60;M46 |
| 1853 | GLVASIKNFKSVLYYQ | M21;M48; | QKEKVNINIVGDFKL | M73;M7;M27;M35;M44; |
| | NNVFMSEAK | M41;M49;M22 | NEEIAIILAS | M73;M7;M27;M35;M44 |
| 1854 | DIYNDKVAGFAKFLKT | M4;M73; | ISASIVAGGIVAIVVTC | M21;M12;M60;M6;M22; |
| | NCCRFQEKD | M55;M78;M79 | LAYYFMRF | M21;M12;M60;M6;M22 |
| 1855 | MRTFKVSIWNLDYIIN | M56;M50; | APYIVGDVVQEGVLT | M14;M30;M29;M38;M67; |
| | LIIKNLSKS | M18;M44;M20 | AVVIPTKKAG | M14;M30;M29;M38;M67 |
| 1856 | RTFKVSIWNLDYIINLII | M56;M50; | KDAPYIVGDVVQEGV | M14;M30;M29;M38;M67; |
| | KNLSKSL | M18;M44;M20 | LTAVVIPTKK | M14;M30;M29;M38;M67 |
| 1857 | QKKQQTVTLLPAADL | M54;M55; | DAPYIVGDVVQEGVL | M14;M30;M29;M38;M67; |
| | DDFSKQLQQS | M46;M26;M39 | TAVVIPTKKA | M14;M30;M29;M38;M67 |
| 1858 | SRIIPARARVECFDKFK | M10;M50; | VEAFEYYHTTDPSFL | M1;M29;M6;M41;M59;M1; |
| | VNSTLEQY | M18;M9;M44 | GRYMSALNHT | M29;M6;M41;M59 |
| 1859 | IIPARARVECFDKFKV | M10;M50; | SVAYESLRPDTRYVL | M24;M7;M34;M48;M50; |
| | NSTLEQYVF | M18;M9;M44 | MDGSIIQFPN | M24;M7;M34;M48;M50 |
| 1860 | RIIPARARVECFDKFK | M10;M50; | GMDNLACEDLKPVSE | M1;M45;M37;M50;M49;M1; |
| | VNSTLEQYV | M18;M9;M44 | EVVENPTIQK | M45;M37;M50;M49 |
| 1861 | VIPTITQMNLKYAISAK | M58;M14; | AAMQRKLEKMADQA | M2;M74;M57;M63;M82;M2; |
| | NRARTVAG | M18;M35;M82 | MTQMYKQARSE | M74;M57;M63;M82 |
| 1862 | NVIPTITQMNLKYAISA | M58;M14; | CTFTRSTNSRIKASMP | M14;M33;M42;M39;M11; |
| | KNRARTVA | M18;M35;M82 | TTIAKNTVK | M14;M33;M42;M39;M11 |
| 1863 | CFNSTYASQGLVASIK | M64;M48; | LCTFTRSTNSRIKASM | M14;M33;M42;M39;M11; |
| | NFKSVLYYQ | M49;M22;M23 | PTTIAKNTV | M14;M33;M42;M39;M11 |
| 1864 | FNSTYASQGLVASIKN | M64;M48; | VLYQPPQTSITSAVLQ | M14;M81;M1;M38;M62; |
| | FKSVLYYQN | M49;M22;M23 | SGFRKMAFP | M14;M81;M1;M38;M62 |
| 1865 | VAALTNNVAFQTVKP | M73;M25; | LYQPPQTSITSAVLQS | M14;M81;M1;M38;M62; |
| | GNFNKDFYDF | M29;M6;M59 | GFRKMAFPS | M14;M81;M1;M38;M62 |
| 1866 | AALTNNVAFQTVKPG | M73;M25; | DVLYQPPQTSITSAVL | M14;M81;M1;M38;M62; |
| | NFNKDFYDFA | M29;M6;M59 | QSGFRKMAF | M14;M81;M1;M38;M62 |
| 1867 | INLVRDLPQGFSALEPL | M31;M34; | YQPPQTSITSAVLQSG | M14;M81;M1;M38;M62; |
| | VDLPIGIN | M45;M52;M47 | FRKMAFPSG | M14;M81;M1;M38;M62 |
| 1868 | DAQPCSDKAYKIEELF | M73;M70; | QPPQTSITSAVLQSGF | M14;M81;M1;M38;M62; |
| | YSYATHSDK | M29;M6;M59 | RKMAFPSGK | M14;M81;M1;M38;M62 |
| 1869 | YAWNRKRISNCVADY | M7;M74; | SDVLYQPPQTSITSAV | M14;M81;M1;M38;M62; |
| | SVLYNSASFS | M67;M27;M15 | LQSGFRKMA | M14;M81;M1;M38;M62 |
| 1870 | AWNRKRISNCVADYS | M7;M74; | ATYYLFDESGEFKLA | M16;M36;M15;M52;M23; |
| | VLYNSASFST | M67;M27;M15 | SHMYCSFYPP | M16;M36;M15;M52;M23 |
| 1871 | WNRKRISNCVADYSV | M7;M74; | DKKIKACVEEVTTTL | M32;M28;M6;M67;M20; |
| | LYNSASFSTF | M67;M27;M15 | EETKFLTENL | M32;M28;M6;M67;M20 |
| 1872 | ANVNALLSTDGNKIA | M10;M57; | KKIKACVEEVTTTLEE | M32;M28;M6;M67;M20; |
| | DKYVRNLQHR | M27;M8;M20 | TKFLTENLL | M32;M28;M6;M67;M20 |
| 1873 | NVNALLSTDGNKIAD | M10;M57; | LNRVCTNYMPYFFTL | M4;M29;M6;M69;M20;M4; |
| | KYVRNLQHRL | M27;M8;M20 | LLQLCTFTRS | M29;M6;M69;M20 |
| 1874 | TANVNALLSTDGNKIA | M10;M57; | CLNRVCTNYMPYFFT | M4;M29;M6;M69;M20;M4; |
| | DKYVRNLQH | M27;M8;M20 | LLLQLCTFTR | M29;M6;M69;M20 |
| 1875 | VNALLSTDGNKIADK | M10;M57; | RCLNRVCTNYMPYFF | M4;M29;M6;M69;M20;M4; |
| | YVRNLQHRLY | M27;M8;M20 | TLLLQLCTFT | M29;M6;M69;M20 |
| 1876 | KSAFVNLKQLPFFYYS | M32;M54; | RLTLGVYDYLVSTQE | M31;M6;M43;M8;M42;M31; |
| | DSPCESHGK | M60;M45;M41 | FRYMNSQGLL | M6;M43;M8;M42 |
| 1877 | KQRRPQGLPNNTASW | M40;M28; | FRLTLGVYDYLVSTQ | M31;M6;M43;M8;M42;M31; |
| | FTALTQHGKE | M70;M29;M38 | EFRYMNSQGL | M6;M43;M8;M42 |
| 1878 | KRNVIPTITQMNLKYA | M58;M14; | YFRLTLGVYDYLVST | M31;M6;M43;M8;M42;M31; |
| | ISAKNRART | M18;M35;M59 | QEFRYMNSQG | M6;M43;M8;M42 |
| 1879 | DLPQGFSALEPLVDLPI | M31;M60; | SSGVTRELMRELNGG | M54;M14;M60;M30;M22; |
| | GINITRFQ | M45;M52;M47 | AYTRYVDNNF | M54;M14;M60;M30;M22 |
| 1880 | LPQGFSALEPLVDLPIG | M31;M60; | HSSGVTRELMRELNG | M54;M14;M60;M30;M22; |
| | INITRFQT | M45;M52;M47 | GAYTRYVDNN | M54;M14;M60;M30;M22 |
| 1881 | CGDSTECSNLLLQYGS | M13;M48; | SGVTRELMRELNGGA | M54;M14;M60;M30;M22; |
| | FCTQLNRAL | M41;M49;M46 | YTRYVDNNFC | M54;M14;M60;M30;M22 |
| 1882 | ICGDSTECSNLLLQYG | M13;M48; | FLNKVVSTTTNIVTRC | M4;M78;M1;M37;M23;M4; |
| | SFCTQLNRA | M41;M49;M46 | LNRVCTNYM | M78;M1;M37;M23 |
| 1883 | VTANVNALLSTDGNKI | M10;M57; | LNKVVSTTTNIVTRCL | M4;M78;M1;M37;M23;M4; |
| | ADKYVRNLQ | M8;M9;M20 | NRVCTNYMP | M78;M1;M37;M23 |
| 1884 | LPPLLTDEMIAQYTSA | M38;M48; | VVRQCSGVTFQSAVK | M71;M19;M25;M33;M26; |
| | LLAGTITSG | M41;M49;M26 | RTIKGTHHWL | M71;M19;M25;M33;M26 |
| 1885 | LLTDEMIAQYTSALLA | M38;M48; | PSARIVYTACSHAAV | M64;M21;M28;M5;M60; |
| | GTITSGWTF | M41;M49;M26 | DALCEKALKY | M29;M38;M67;M17;M49 |
| 1886 | PLLTDEMIAQYTSALL | M38;M48; | ESDDYIATNGPLKVG | M10;M29;M18;M11;M44; |
| | AGTITSGWT | M41;M49;M26 | GSCVLSGHNL | M10;M29;M18;M11;M44 |
| 1887 | PPLLTDEMIAQYTSAL | M38;M48; | TTLEETKFLTENLLLY | M70;M50;M36;M11;M20; |
| | LAGTITSGW | M41;M49;M26 | IDINGNLHP | M70;M50;M36;M11;M20 |
| 1888 | MWLSYFIASFRLFART | M64;M40; | TTTLEETKFLTENLLL | M70;M50;M36;M11;M20; |
| | RSMWSFNPE | M16;M30;M15 | YIDINGNLH | M70;M50;M36;M11;M20 |
| 1889 | YYHKNNKSWMESEFR | M70;M5; | ALKGGKIVNNWLKQ | M56;M12;M55;M57;M11; |
| | VYSSANNCTF | M48;M41;M82 | LIKVTLVFLFV | M56;M12;M55;M57;M11 |
| 1890 | IMMNVAKYTQLCQYL | M78;M34; | SNSFDVLKSEDAQGM | M64;M6;M46;M39;M22; |
| | NTLTLAVPYN | M48;M41;M49 | DNLACEDLKP | M64;M6;M46;M39;M22 |
| 1891 | GIMMNVAKYTQLCQY | M78;M34; | NSFDVLKSEDAQGMD | M64;M6;M46;M39;M22; |
| | LNTLTLAVPY | M48;M41;M49 | NLACEDLKPV | M64;M6;M46;M39;M22 |
| 1892 | MMNVAKYTQLCQYL | M78;M34; | VVTTKIALKGGKIVN | M12;M55;M57;M11;M20; |
| | NTLTLAVPYNM | M48;M41;M49 | NWLKQLIKVT | M12;M55;M57;M11;M20 |
| 1893 | PHGVVFLHVTYVPAQ | M28;M66; | VTTKIALKGGKIVNN | M12;M55;M57;M11;M20; |
| | EKNFTTAPAI | M70;M33;M26 | WLKQLIKVTL | M12;M55;M57;M11;M20 |
| 1894 | VTIAEILLIIMRTFKVSI | M1;M5; | SMDNSPNLAWPLIVT | M73;M60;M18;M39;M44; |
| | WNLDYII | M61;M37;M20 | ALRANSAVKL | M73;M60;M18;M39;M44 |
| 1895 | TIAEILLIIMRTFKVSIW | M1;M5; | ISMDNSPNLAWPLIVT | M73;M60;M18;M39;M44; |
| | NLDYIIN | M61;M37;M20 | ALRANSAVK | M73;M60;M18;M39;M44 |
| 1896 | FQVTIAEILLIIMRTFK | M1;M5; | LMTARTVYDDGARR | M5;M6;M72;M11;M20;M5; |
| | VSIWNLDY | M61;M37;M20 | VWTLMNVLTLV | M6;M72;M11;M20 |
| 1897 | IAEILLIIMRTFKVSIWN | M1;M5; | SFYVYANGGKGFCKL | M41;M42;M8;M43;M39; |
| | LDYIINL | M61;M37;M20 | HNWNCVNCDT | M41;M42;M8;M43;M39 |
| 1898 | QVTIAEILLIIMRTFKV | M1;M5; | SEAARVVRSIFSRTLE | M34;M2;M48;M42;M59; |
| | SIWNLDYI | M61;M37;M20 | TAQNSVRVL | M34;M2;M48;M42;M59 |
| 1899 | WQLALSKGVHFVCNL | M50;M18; | SSPDAVTAYNGYLTS | M24;M55;M48;M41;M35; |
| | LLLFVTVYSH | M8;M49;M23 | SSKTPEEHFI | M24;M55;M48;M41;M35 |
| 1900 | KRWQLALSKGVHFVC | M50;M18; | SPDAVTAYNGYLTSS | M24;M55;M48;M41;M35; |
| | NLLLLFVTVY | M8;M49;M23 | SKTPEEHFIE | M24;M55;M48;M41;M35 |
| 1901 | RWQLALSKGVHFVCN | M50;M18; | KLKDCVMYASAVVL | M75;M12;M33;M46;M39; |
| | LLLLFVTVYS | M8;M49;M23 | LILMTARTVYD | M75;M12;M33;M46;M39 |
| 1902 | QLALSKGVHFVCNLLL | M50;M18; | LLILMTARTVYDDGA | M32;M6;M72;M11;M59; |
| | LFVTVYSHL | M8;M49;M23 | RRVWTLMNVL | M32;M6;M72;M11;M59 |
| 1903 | ASFRLFARTRSMWSFN | M64;M40; | GIVAIVVTCLAYYFM | M71;M16;M6;M62;M59; |
| | PETNILLNV | M16;M30;M42 | RFRRAFGEYS | M71;M16;M6;M62;M59 |
| 1904 | NSVCRLMKTIGPDMFL | M5;M6; | IVAIVVTCLAYYFMRF | M71;M16;M6;M62;M59; |
| | GTCRRCPAE | M37;M17;M59 | RRAFGEYSH | M71;M16;M6;M62;M59 |
| 1905 | NGTITVEELKKLLEQW | M4;M58; | GGIVAIVVTCLAYYF | M71;M16;M6;M62;M59; |
| | NLVIGFLFL | M53;M17;M47 | MRFRRAFGEY | M71;M16;M6;M62;M59 |
| 1906 | LKLRGTAVMSLKEGQI | M54;M60; | LKVDTANPKTPKYKF | M40;M77;M14;M34;M29; |
| | NDMILSLLS | M6;M49;M59 | VRIQPGQTFS | M40;M77;M14;M34;M29 |
| 1907 | KLRGTAVMSLKEGQI | M54;M60; | KTTEVVGDIILKPANN | M19;M58;M34;M53;M26; |
| | NDMILSLLSK | M6;M49;M59 | SLKITEEVG | M19;M58;M34;M53;M26 |
| 1908 | LRGTAVMSLKEGQIN | M54;M60; | VKTTEVVGDIILKPAN | M19;M58;M34;M53;M26; |
| | DMILSLLSKG | M6;M49;M59 | NSLKITEEV | M19;M58;M34;M53;M26 |
| 1909 | RGTAVMSLKEGQIND | M54;M60; | KVTLVFLFVAAIFYLI | M32;M1;M34;M18;M39; |
| | MILSLLSKGR | M6;M49;M59 | TPVHVMSKH | M32;M1;M34;M18;M39 |
| 1910 | EEAIRHVRAWIGFDVE | M32;M48; | TNVLEGSVAYESLRP | M19;M34;M50;M18;M46; |
| | GCHATREAV | M57;M69;M20 | DTRYVLMDGS | M19;M34;M50;M18;M46 |
| 1911 | TKCTLKSFTVEKGIYQ | M75;M21; | LLSMQGAVDINKLCE | M54;M60;M45;M67;M49; |
| | TSNFRVQPT | M25;M8;M23 | EMLDNRATLQ | M54;M60;M45;M67;M49 |
| 1912 | ETKCTLKSFTVEKGIY | M75;M21; | SVLLSMQGAVDINKL | M54;M60;M45;M67;M49; |
| | QTSNFRVQP | M25;M8;M23 | CEEMLDNRAT | M54;M60;M45;M67;M49 |
| 1913 | VNIQKEIDRLNEVAKN | M78;M65; | LSVLLSMQGAVDINK | M54;M60;M45;M67;M49; |
| | LNESLIDLQ | M2;M79;M82 | LCEEMLDNRA | M54;M60;M45;M67;M49 |
| 1914 | VVNIQKEIDRLNEVAK | M78;M65; | VLLSMQGAVDINKLC | M54;M60;M45;M67;M49; |
| | NLNESLIDL | M2;M79;M82 | EEMLDNRATL | M54;M60;M45;M67;M49 |
| 1915 | KNIDGYFKIYSKHTPIN | M40;M71; | DCVMYASAVVLLILM | M75;M32;M12;M46;M39; |
| | LVRDLPQG | M16;M15;M52 | TARTVYDDGA | M75;M32;M12;M46;M39 |
| 1916 | TECSNLLLQYGSFCTQ | M13;M48; | KDCVMYASAVVLLIL | M75;M32;M12;M46;M39; |
| | LNRALTGIA | M41;M49;M43 | MTARTVYDDG | M75;M32;M12;M46;M39 |
| 1917 | LMDLEGKQGNFKNLR | M54;M6; | HNDILLAKDTTEAFE | M32;M58;M53;M36;M68; |
| | EFVFKNIDGY | M43;M42;M59 | KMVSLLSVLL | M32;M58;M53;M36;M68 |
| 1918 | LEGKQGNFKNLREFVF | M54;M6; | NDILLAKDTTEAFEK | M32;M58;M53;M36;M68; |
| | KNIDGYFKI | M43;M42;M59 | MVSLLSVLLS | M32;M58;M53;M36;M68 |
| 1919 | DLEGKQGNFKNLREF | M54;M6; | IDHPNPKGFCDLKGK | M31;M63;M43;M42;M39; |
| | VFKNIDGYFK | M43;M42;M59 | YVQIPTTCAN | M31;M63;M43;M42;M39 |
| 1920 | EGKQGNFKNLREFVF | M54;M6; | DHPNPKGFCDLKGKY | M31;M63;M43;M42;M39; |
| | KNIDGYFKIY | M43;M42;M59 | VQIPTTCAND | M31;M63;M43;M42;M39 |
| 1921 | FLMDLEGKQGNFKNL | M54;M6; | HPNPKGFCDLKGKYV | M31;M63;M43;M42;M39; |
| | REFVFKNIDG | M43;M42;M59 | QIPTTCANDP | M31;M63;M43;M42;M39 |
| 1922 | MDLEGKQGNFKNLRE | M54;M6; | HIDHPNPKGFCDLKG | M31;M63;M43;M42;M39; |
| | FVFKNIDGYF | M43;M42;M59 | KYVQIPTTCA | M31;M63;M43;M42;M39 |
| 1923 | DAGFIKQYGDCLGDIA | M21;M70; | DIEVTGDSCNNYMLT | M8;M15;M52;M11;M47;M8; |
| | ARDLICAQK | M48;M50;M27 | YNKVENMTPR | M15;M52;M11;M47 |
| 1924 | MKDLSPRWYFYYLGT | M32;M31; | VLSTFISAARQGFVDS | M16;M70;M33;M18;M63; |
| | GPEAGLPYGA | M6;M68;M52 | DVETKDVVE | M16;M70;M33;M18;M63 |
| 1925 | KDLSPRWYFYYLGTG | M32;M31; | NVLSTFISAARQGFVD | M16;M70;M33;M18;M63; |
| | PEAGLPYGAN | M6;M68;M52 | SDVETKDVV | M16;M70;M33;M18;M63 |
| 1926 | KMKDLSPRWYFYYLG | M32;M31; | AGGIVAIVVTCLAYY | M71;M6;M62;M22;M59; |
| | TGPEAGLPYG | M6;M68;M52 | FMRFRRAFGE | M71;M6;M62;M22;M59 |
| 1927 | GKMKDLSPRWYFYYL | M32;M31; | KLTCATTRQVVNVVT | M64;M40;M29;M2;M22; |
| | GTGPEAGLPY | M6;M68;M52 | TKIALKGGKI | M64;M40;M29;M2;M22 |
| 1928 | DLSPRWYFYYLGTGPE | M32;M31; | TCATTRQVVNVVTTK | M64;M40;M29;M2;M22; |
| | AGLPYGANK | M6;M68;M52 | IALKGGKIVN | M64;M40;M29;M2;M22 |
| 1929 | SEFRVYSSANNCTFEY | M64;M5; | ATTRQVVNVVTTKIA | M64;M40;M29;M2;M22; |
| | VSQPFLMDL | M48;M82;M20 | LKGGKIVNNW | M64;M40;M29;M2;M22 |
| 1930 | QSLENVAFNVVNKGH | M71;M24; | FKLTCATTRQVVNVV | M64;M40;M29;M2;M22; |
| | FDGQQGEVPV | M16;M27;M15 | TTKIALKGGK | M64;M40;M29;M2;M22 |
| 1931 | LQSLENVAFNVVNKG | M71;M24; | CATTRQVVNVVTTKI | M64;M40;M29;M2;M22; |
| | HFDGQQGEVP | M16;M27;M15 | ALKGGKIVNN | M64;M40;M29;M2;M22 |
| 1932 | SHRFYRLANECAQVLS | M28;M79; | LTCATTRQVVNVVTT | M64;M40;M29;M2;M22; |
| | EMVMCGGSL | M42;M43;M46 | KIALKGGKIV | M64;M40;M29;M2;M22 |
| 1933 | GCVIAWNSNNLDSKV | M32;M48; | VEKKKLDGFMGRIRS | M58;M29;M6;M68;M26; |
| | GGNYNYLYRL | M50;M68;M26 | VYPVASPNEC | M58;M29;M6;M68;M26 |
| 1934 | HEETIYNLLKDCPAVA | M40;M30; | EKKKLDGFMGRIRSV | M58;M29;M6;M68;M26; |
| | KHDFFKFRI | M41;M42;M11 | YPVASPNECN | M58;M29;M6;M68;M26 |
| 1935 | EETIYNLLKDCPAVAK | M40;M30; | KKLDGFMGRIRSVYP | M58;M29;M6;M68;M26; |
| | HDFFKFRID | M41;M42;M11 | VASPNECNQM | M58;M29;M6;M68;M26 |
| 1936 | SLVLARKHTTCCSLSH | M81;M5; | KKKLDGFMGRIRSVY | M58;M29;M6;M68;M26; |
| | RFYRLANEC | M60;M2;M79 | PVASPNECNQ | M58;M29;M6;M68;M26 |
| 1937 | LVLARKHTTCCSLSHR | M81;M5; | AQVAKSHNIALIWNV | M32;M1;M37;M72;M68; |
| | FYRLANECA | M60;M2;M79 | KDFMSLSEQL | M32;M1;M37;M72;M68 |
| 1938 | FFKFRIDGDMVPHISR | M71;M24; | NAQVAKSHNIALIWN | M32;M1;M37;M72;M68; |
| | QRLTKYTMA | M55;M10;M26 | VKDFMSLSEQ | M32;M1;M37;M72;M68 |
| 1939 | FKFRIDGDMVPHISRQ | M71;M24; | EYYHTTDPSFLGRYM | M66;M1;M25;M37;M33; |
| | RLTKYTMAD | M55;M10;M26 | SALNHTKKWK | M66;M1;M25;M37;M33 |
| 1940 | FRIDGDMVPHISRQRL | M71;M24; | DAVIKTLQPVSELLTP | M78;M45;M79;M49;M82; |
| | TKYTMADLV | M55;M10;M26 | LGIDLDEWS | M78;M45;M79;M49;M82 |
| 1941 | RIDGDMVPHISRQRLT | M71;M24; | ADAVIKTLQPVSELLT | M78;M45;M79;M49;M82; |
| | KYTMADLVY | M55;M10;M26 | PLGIDLDEW | M78;M45;M79;M49;M82 |
| 1942 | DFFKFRIDGDMVPHIS | M71;M24; | VADAVIKTLQPVSELL | M78;M45;M79;M49;M82; |
| | RQRLTKYTM | M55;M10;M26 | TPLGIDLDE | M78;M45;M79;M49;M82 |
| 1943 | KFRIDGDMVPHISRQR | M71;M24; | WEIQQVVDADSKIVQ | M64;M54;M7;M60;M22; |
| | LTKYTMADL | M55;M10;M26 | LSEISMDNSP | M64;M54;M7;M60;M22 |
| 1944 | RIMASLVLARKHTTCC | M81;M5; | KFKEGVEFLRDGWEI | M4;M74;M49;M22;M20;M4; |
| | SLSHRFYRL | M60;M2;M35 | VKFISTCACE | M74;M49;M22;M20 |
| 1945 | IMASLVLARKHTTCCS | M81;M5; | PSVEQRKQDDKKIKA | M28;M65;M60;M74;M67; |
| | LSHRFYRLA | M60;M2;M35 | CVEEVTTTLE | M28;M65;M60;M74;M67 |
| 1946 | LRIMASLVLARKHTTC | M81;M5; | HVMSKHTDFSSEIIGY | M53;M48;M41;M43;M26; |
| | CSLSHRFYR | M60;M2;M35 | KAIDGGVTR | M53;M48;M41;M43;M26 |
| 1947 | ASLVLARKHTTCCSLS | M81;M5; | MSKHTDFSSEIIGYKA | M53;M48;M41;M43;M26; |
| | HRFYRLANE | M60;M2;M35 | IDGGVTRDI | M53;M48;M41;M43;M26 |
| 1948 | MASLVLARKHTTCCS | M81;M5; | DFSSEIIGYKAIDGGV | M53;M48;M41;M43;M26; |
| | LSHRFYRLAN | M60;M2;M35 | TRDIASTDT | M53;M48;M41;M43;M26 |
| 1949 | YVRNLQHRLYECLYR | M2;M37; | TDFSSEIIGYKAIDGG | M53;M48;M41;M43;M26; |
| | NRDVDTDFVN | M35;M52;M47 | VTRDIASTD | M53;M48;M41;M43;M26 |
| 1950 | KYVRNLQHRLYECLY | M2;M37; | SKHTDFSSEIIGYKAID | M53;M48;M41;M43;M26; |
| | RNRDVDTDFV | M35;M52;M47 | GGVTRDIA | M53;M48;M41;M43;M26 |
| 1951 | DKYVRNLQHRLYECL | M2;M37; | VMSKHTDFSSEIIGYK | M53;M48;M41;M43;M26; |
| | YRNRDVDTDF | M35;M52;M47 | AIDGGVTRD | M53;M48;M41;M43;M26 |
| 1952 | CSNLLLQYGSFCTQLN | M13;M48; | FSSEIIGYKAIDGGVT | M53;M48;M41;M43;M26; |
| | RALTGIAVE | M41;M43;M20 | RDIASTDTC | M53;M48;M41;M43;M26 |
| 1953 | FLAFVVFLLVTLAILTA | M54;M60; | HTDFSSEIIGYKAIDG | M53;M48;M41;M43;M26; |
| | LRLCAYCC | M25;M46;M39 | GVTRDIAST | M53;M48;M41;M43;M26 |
| 1954 | LLFLAFVVFLLVTLAIL | M54;M60; | KHTDFSSEIIGYKAID | M53;M48;M41;M43;M26; |
| | TALRLCAY | M25;M46;M39 | GGVTRDIAS | M53;M48;M41;M43;M26 |
| 1955 | LFLAFVVFLLVTLAILT | M54;M60; | GSVAYESLRPDTRYV | M24;M7;M34;M50;M18; |
| | ALRLCAYC | M25;M46;M39 | LMDGSIIQFP | M24;M7;M34;M50;M18 |
| 1956 | NARLRAKHYVYIGDP | M40;M31; | EGSVAYESLRPDTRY | M24;M7;M34;M50;M18; |
| | AQLPAPRTLL | M30;M37;M57 | VLMDGSIIQF | M24;M7;M34;M50;M18 |
| 1957 | VIRGDEVRQIAPGQTG | M80;M38; | CYFGLFCLLNRYFRLT | M56;M14;M60;M37;M18; |
| | KIADYNYKL | M33;M67;M62 | LGVYDYLVS | M56;M14;M60;M37;M18 |
| 1958 | RGDEVRQIAPGQTGKI | M80;M38; | FCTCYFGLFCLLNRYF | M56;M14;M60;M37;M18; |
| | ADYNYKLPD | M33;M67;M62 | RLTLGVYDY | M56;M14;M60;M37;M18 |
| 1959 | FVIRGDEVRQIAPGQT | M80;M38; | YFGLFCLLNRYFRLTL | M56;M14;M60;M37;M18; |
| | GKIADYNYK | M33;M67;M62 | GVYDYLVST | M56;M14;M60;M37;M18 |
| 1960 | IRGDEVRQIAPGQTGKI | M80;M38; | FGLFCLLNRYFRLTLG | M56;M14;M60;M37;M18; |
| | ADYNYKLP | M33;M67;M62 | VYDYLVSTQ | M56;M14;M60;M37;M18 |
| 1961 | TLLPAADLDDFSKQLQ | M71;M32; | TCYFGLFCLLNRYFRL | M56;M14;M60;M37;M18; |
| | QSMSSADST | M58;M55;M53 | TLGVYDYLV | M56;M14;M60;M37;M18 |
| 1962 | LLPAADLDDFSKQLQQ | M71;M32; | CTCYFGLFCLLNRYF | M56;M14;M60;M37;M18; |
| | SMSSADSTQ | M58;M55;M53 | RLTLGVYDYL | M56;M14;M60;M37;M18 |
| 1963 | VTLLPAADLDDFSKQL | M71;M32; | ARRVWTLMNVLTLV | M24;M1;M37;M41;M20; |
| | QQSMSSADS | M58;M55;M53 | YKVYYGNALDQ | M24;M1;M37;M41;M20 |
| 1964 | RLITGRLQSLQTYVTQ | M34;M29; | SVIYLYLTFYLTNDVS | M54;M58;M60;M48;M50; |
| | QLIRAAEIR | M49;M46;M22 | FLAHIQWMV | M54;M58;M60;M48;M50 |
| 1965 | LITGRLQSLQTYVTQQ | M34;M29; | YSVIYLYLTFYLTNDV | M54;M58;M60;M48;M50; |
| | LIRAAEIRA | M49;M46;M22 | SFLAHIQWM | M54;M58;M60;M48;M50 |
| 1966 | DRLITGRLQSLQTYVT | M34;M29; | KGSLPINVIVFDGKSK | M56;M7;M50;M52;M26; |
| | QQLIRAAEI | M49;M46;M22 | CEESSAKSA | M56;M7;M50;M52;M26 |
| 1967 | DFVNEFYAYLRKHFS | M71;M57; | GSLPINVIVFDGKSKC | M56;M7;M50;M52;M26; |
| | MMILSDDAVV | M18;M15;M35 | EESSAKSAS | M56;M7;M50;M52;M26 |
| 1968 | YDSMSYEDQDALFAY | M71;M55; | NTKGSLPINVIVFDGK | M56;M7;M50;M52;M26; |
| | TKRNVIPTIT | M10;M53;M9 | SKCEESSAK | M56;M7;M50;M52;M26 |
| 1969 | NSAIGKIQDSLSSTASA | M40;M64; | TKGSLPINVIVFDGKS | M56;M7;M50;M52;M26; |
| | LGKLQDVV | M29;M79;M22 | KCEESSAKS | M56;M7;M50;M52;M26 |
| 1970 | FNSAIGKIQDSLSSTAS | M40;M64; | VAGGIVAIVVTCLAY | M60;M6;M62;M22;M59; |
| | ALGKLQDV | M29;M79;M22 | YFMRFRRAFG | M60;M6;M62;M22;M59 |
| 1971 | QFNSAIGKIQDSLSSTA | M40;M64; | DVTKIKPHNSHEGKT | M1;M53;M74;M37;M42;M1; |
| | SALGKLQD | M29;M79;M22 | FYVLPNDDTL | M53;M74;M37;M42 |
| 1972 | NQFNSAIGKIQDSLSST | M40;M64; | ADVTKIKPHNSHEGK | M1;M53;M74;M37;M42;M1; |
| | ASALGKLQ | M29;M79;M22 | TFYVLPNDDT | M53;M74;M37;M42 |
| 1973 | PVPEVKILNNLGVDIA | M11;M54; | VRSIFSRTLETAQNSV | M54;M24;M34;M2;M9;M54; |
| | ANTVIWDYK | M57;M27;M9 | RVLQKAAIT | M24;M34;M2;M9 |
| 1974 | NPDILRVYANLGERVR | M21;M32; | LFQHANLDSCKRVLN | M58;M5;M2;M27;M15;M58; |
| | QALLKTVQF | M22;M49;M11 | VVCKTCGQQQ | M5;M2;M27;M15 |
| 1975 | KWYIRVGARKSAPLIE | M64;M40; | DCVSFCYMHHMELPT | M28;M18;M17;M43;M52; |
| | LCVDEAGSK | M57;M22;M23 | GVHAGTDLEG | M28;M18;M17;M43;M52 |
| 1976 | LQPRTFLLKYNENGTI | M58;M24; | YDCVSFCYMHHMEL | M28;M18;M17;M43;M52; |
| | TDAVDCALD | M49;M15;M11 | PTGVHAGTDLE | M28;M18;M17;M43;M52 |
| 1977 | VSDIDYVPLKSATCITR | M34;M18; | NVYLAVFDKNLYDK | M56;M55;M43;M42;M39; |
| | CNLGGAVC | M43;M42;M39 | LVSSFLEMKSE | M56;M55;M43;M42;M39 |
| 1978 | FAIGLALYYPSARIVYT | M21;M5; | YIICISTKHFYWFFSN | M24;M7;M50;M18;M23; |
| | ACSHAAVD | M29;M38;M17 | YLKRRVVFN | M24;M7;M50;M18;M23 |
| 1979 | AFELWAKRNIKPVPEV | M54;M66; | VEVEKGVLPQLEQPY | M13;M28;M66;M74;M15; |
| | KILNNLGVD | M74;M49;M9 | VFIKRSDART | M13;M28;M66;M74;M15 |
| 1980 | FELWAKRNIKPVPEVK | M54;M66; | VLLSVLQQLRVESSSK | M54;M34;M30;M82;M11; |
| | ILNNLGVDI | M74;M49;M9 | LWAQCVQLH | M54;M34;M30;M82;M11 |
| 1981 | TLPKGIMMNVAKYTQ | M73;M58; | VVLLSVLQQLRVESSS | M54;M34;M30;M82;M11; |
| | LCQYLNTLTL | M78;M34;M11 | KLWAQCVQL | M54;M34;M30;M82;M11 |
| 1982 | DSYFVVKRHTFSNYQ | M71;M58; | VGDIILKPANNSLKIT | M28;M58;M34;M53;M26; |
| | HEETIYNLLK | M34;M18;M20 | EEVGHTDLM | M28;M58;M34;M53;M26 |
| 1983 | VLNDILSRLDKVEAEV | M58;M53; | ARTVYDDGARRVWT | M5;M2;M52;M47;M20;M5; |
| | QIDRLITGR | M50;M17;M15 | LMNVLTLVYKV | M2;M52;M47;M20 |
| 1984 | SVLNDILSRLDKVEAE | M58;M53; | TIEVNSFSGYLKLTDN | M38;M8;M9;M47;M23;M38; |
| | VQIDRLITG | M50;M17;M15 | VYIKNADIV | M8;M9;M47;M23 |
| 1985 | ISSVLNDILSRLDKVEA | M58;M53; | EVNSFSGYLKLTDNV | M38;M8;M9;M47;M23;M38; |
| | EVQIDRLI | M50;M17;M15 | YIKNADIVEE | M8;M9;M47;M23 |
| 1986 | SSVLNDILSRLDKVEA | M58;M53; | IEVNSFSGYLKLTDNV | M38;M8;M9;M47;M23;M38; |
| | EVQIDRLIT | M50;M17;M15 | YIKNADIVE | M8;M9;M47;M23 |
| 1987 | AISSVLNDILSRLDKVE | M58;M53; | TLQQIELKFNPPALQD | M75;M73;M58;M48;M74; |
| | AEVQIDRL | M50;M17;M15 | AYYRARAGE | M75;M73;M58;M48;M74 |
| 1988 | IVVFDEISMATNYDLS | M25;M50; | LTLQQIELKFNPPALQ | M75;M73;M58;M48;M74; |
| | VVNARLRAK | M18;M33;M26 | DAYYRARAG | M75;M73;M58;M48;M74 |
| 1989 | VFDEISMATNYDLSVV | M25;M50; | GVLTAVVIPTKKAGG | M58;M16;M53;M67;M17; |
| | NARLRAKHY | M18;M33;M26 | TTEMLAKALR | M58;M16;M53;M67;M17 |
| 1990 | VVFDEISMATNYDLSV | M25;M50; | KDGTCGLVEVEKGVL | M13;M28;M66;M74;M9; |
| | VNARLRAKH | M18;M33;M26 | PQLEQPYVFI | M13;M28;M66;M74;M9 |
| 1991 | CDGGSLYVNKHAFHT | M56;M73; | GTCGLVEVEKGVLPQ | M13;M28;M66;M74;M9; |
| | PAFDKSAFVN | M58;M50;M11 | LEQPYVFIKR | M13;M28;M66;M74;M9 |
| 1992 | DGGSLYVNKHAFHTP | M56;M73; | DGTCGLVEVEKGVLP | M13;M28;M66;M74;M9; |
| | AFDKSAFVNL | M58;M50;M11 | QLEQPYVFIK | M13;M28;M66;M74;M9 |
| 1993 | LSNLNLPGCDGGSLYV | M56;M73; | ARQHLKDGTCGLVEV | M13;M28;M24;M74;M9; |
| | NKHAFHTPA | M58;M50;M11 | EKGVLPQLEQ | M13;M28;M24;M74;M9 |
| 1994 | SNLNLPGCDGGSLYV | M56;M73; | RQHLKDGTCGLVEVE | M13;M28;M24;M74;M9; |
| | NKHAFHTPAF | M58;M50;M11 | KGVLPQLEQP | M13;M28;M24;M74;M9 |
| 1995 | EGVFVSNGTHWFVTQ | M24;M31; | EARQHLKDGTCGLVE | M13;M28;M24;M74;M9; |
| | RNFYEPQIIT | M50;M18;M35 | VEKGVLPQLE | M13;M28;M24;M74;M9 |
| 1996 | YGDCLGDIAARDLICA | M58;M78; | EVVLKKLKKSLNVAK | M32;M28;M74;M33;M68; |
| | QKFNGLTVL | M65;M79;M50 | SEFDRDAAMQ | M32;M28;M74;M33;M68 |
| 1997 | QYGDCLGDIAARDLIC | M58;M78; | VVLKKLKKSLNVAKS | M32;M28;M74;M33;M68; |
| | AQKFNGLTV | M65;M79;M50 | EFDRDAAMQR | M32;M28;M74;M33;M68 |
| 1998 | KQYGDCLGDIAARDLI | M58;M78; | SEVVLKKLKKSLNVA | M32;M28;M74;M33;M68; |
| | CAQKFNGLT | M65;M79;M50 | KSEFDRDAAM | M32;M28;M74;M33;M68 |
| 1999 | ARKHTTCCSLSHRFYR | M5;M60; | VLKKLKKSLNVAKSE | M32;M28;M74;M33;M68; |
| | LANECAQVL | M79;M43;M42 | FDRDAAMQRK | M32;M28;M74;M33;M68 |
| 2000 | FHLYLQYIRKLHDELT | M32;M52; | KLKKSLNVAKSEFDR | M32;M28;M50;M33;M68; |
| | GHMLDMYSV | M38;M46;M9 | DAAMQRKLEK | M32;M28;M50;M33;M68 |
| 2001 | VFHLYLQYIRKLHDEL | M32;M52; | NIVTRCLNRVCTNYM | M64;M6;M37;M69;M20; |
| | TGHMLDMYS | M38;M46;M9 | PYFFTLLLQL | M64;M6;M37;M69;M20 |
| 2002 | FDGRVDGQVDLFRNA | M10;M33; | TTTNIVTRCLNRVCTN | M64;M6;M37;M69;M20; |
| | RNGVLITEGS | M41;M43;M42 | YMPYFFTLL | M64;M6;M37;M69;M20 |
| 2003 | VDGQVDLFRNARNGV | M10;M33; | IVTRCLNRVCTNYMP | M64;M6;M37;M69;M20; |
| | LITEGSVKGL | M41;M43;M42 | YFFTLLLQLC | M64;M6;M37;M69;M20 |
| 2004 | RVDGQVDLFRNARNG | M10;M33; | TNIVTRCLNRVCTNY | M64;M6;M37;M69;M20; |
| | VLITEGSVKG | M41;M43;M42 | MPYFFTLLLQ | M64;M6;M37;M69;M20 |
| 2005 | DGRVDGQVDLFRNAR | M10;M33; | TTNIVTRCLNRVCTN | M64;M6;M37;M69;M20; |
| | NGVLITEGSV | M41;M43;M42 | YMPYFFTLLL | M64;M6;M37;M69;M20 |
| 2006 | GRVDGQVDLFRNARN | M10;M33; | KGTHHWLLLTILTSLL | M52;M42;M43;M46;M39; |
| | GVLITEGSVK | M41;M43;M42 | VLVQSTQWS | M52;M42;M43;M46;M39 |
| 2007 | SINFVRIIMRLWLCWK | M75;M24; | GTHHWLLLTILTSLLV | M52;M42;M43;M46;M39; |
| | CRSKNPLLY | M76;M9;M23 | LVQSTQWSL | M52;M42;M43;M46;M39 |
| 2008 | QSINFVRIIMRLWLCW | M75;M24; | TFFPDLNGDVVAIDY | M7;M60;M37;M69;M82;M7; |
| | KCRSKNPLL | M76;M9;M23 | KHYTPSFKKG | M60;M37;M69;M82 |
| 2009 | FNKKDWYDFVENPDI | M21;M32; | PDLNGDVVAIDYKHY | M7;M60;M37;M69;M82;M7; |
| | LRVYANLGER | M43;M49;M42 | TPSFKKGAKL | M60;M37;M69;M82 |
| 2010 | THWFVTQRNFYEPQII | M64;M5; | FPDLNGDVVAIDYKH | M7;M60;M37;M69;M82;M7; |
| | TTDNTFVSG | M79;M9;M23 | YTPSFKKGAK | M60;M37;M69;M82 |
| 2011 | YDHVISTSHKLVLSVN | M64;M24; | DLNGDVVAIDYKHYT | M7;M60;M37;M69;M82;M7; |
| | PYVCNAPGC | M10;M9;M23 | PSFKKGAKLL | M60;M37;M69;M82 |
| 2012 | CYDHVISTSHKLVLSV | M64;M24; | FFPDLNGDVVAIDYK | M7;M60;M37;M69;M82;M7; |
| | NPYVCNAPG | M10;M9;M23 | HYTPSFKKGA | M60;M37;M69;M82 |
| 2013 | RRPFLCCKCCYDHVIS | M32;M24; | LNGDVVAIDYKHYTP | M7;M60;M37;M69;M82;M7; |
| | TSHKLVLSV | M10;M9;M23 | SFKKGAKLLH | M60;M37;M69;M82 |
| 2014 | IRRPFLCCKCCYDHVIS | M32;M24; | VAYFNMVYMPASWV | M52;M83;M15;M46;M39; |
| | TSHKLVLS | M10;M9;M23 | MRIMTWLDMVD | M52;M83;M15;M46;M39 |
| 2015 | YFLQSINFVRIIMRLWL | M75;M24; | AYFNMVYMPASWV | M52;M83;M15;M46;M39; |
| | CWKCRSKN | M10;M9;M23 | MRIMTWLDMVDT | M52;M83;M15;M46;M39 |
| 2016 | DDIVKTDGTLMIERFV | M4;M10; | VSSFLEMKSEKQVEQ | M31;M25;M34;M74;M39; |
| | SLAIDAYPL | M1;M5;M2;M3 | KIAEIPKEEV | M31;M25;M34;M74;M39 |
| 2017 | SANNCTFEYVSQPFLM | M4;M1;M3; | YNRYLALYNKYKYFS | M66;M31;M55;M67;M20; |
| | DLEGKQGNF | M57;M36;M20 | GAMDTTSYRE | M66;M31;M55;M67;M20 |
| 2018 | ANNCTFEYVSQPFLM | M4;M1;M3; | QYNRYLALYNKYKY | M66;M31;M55;M67;M20; |
| | DLEGKQGNFK | M57;M36;M20 | FSGAMDTTSYR | M66;M31;M55;M67;M20 |
| 2019 | SSANNCTFEYVSQPFL | M4;M1;M3; | GRWVLNNDYYRSLP | M34;M33;M43;M42;M39; |
| | MDLEGKQGN | M57;M36;M20 | GVFCGVDAVNL | M34;M33;M43;M42;M39 |
| 2020 | PRTLLTKGTLEPEYFN | M4;M13; | RWVLNNDYYRSLPG | M34;M33;M43;M42;M39; |
| | SVCRLMKTI | M16;M1;M3;M6 | VFCGVDAVNLL | M34;M33;M43;M42;M39 |
| 2021 | AQLPAPRTLLTKGTLE | M4;M58;M1; | KGEDIQLLKSAYENF | M32;M28;M60;M38;M68; |
| | PEYFNSVCR | M29;M3;M6 | NQHEVLLAPL | M32;M28;M60;M38;M68 |
| 2022 | QLPAPRTLLTKGTLEP | M4;M58;M1; | NKGEDIQLLKSAYEN | M32;M28;M60;M38;M68; |
| | EYFNSVCRL | M29;M3;M6 | FNQHEVLLAP | M32;M28;M60;M38;M68 |
| 2023 | WHHSIGFDYVYNPFMI | M4;M1;M3; | VQSKMSDVKCTSVVL | M40;M56;M54;M29;M22; |
| | DVQQWGFTG | M57;M43;M20 | LSVLQQLRVE | M40;M56;M54;M29;M22 |
| 2024 | YACWHHSIGFDYVYN | M4;M1;M3; | SKMSDVKCTSVVLLS | M40;M56;M54;M29;M22; |
| | PFMIDVQQWG | M57;M43;M20 | VLQQLRVESS | M40;M56;M54;M29;M22 |
| 2025 | CWHHSIGFDYVYNPF | M4;M1;M3; | QSKMSDVKCTSVVLL | M40;M56;M54;M29;M22; |
| | MIDVQQWGFT | M57;M43;M20 | SVLQQLRVES | M40;M56;M54;M29;M22 |
| 2026 | HHSIGFDYVYNPFMID | M4;M1;M3; | KGFCDLKGKYVQIPT | M40;M31;M30;M43;M42; |
| | VQQWGFTGN | M57;M43;M20 | TCANDPVGFT | M40;M31;M30;M43;M42 |
| 2027 | ACWHHSIGFDYVYNP | M4;M1;M3; | GFCDLKGKYVQIPTT | M40;M31;M30;M43;M42; |
| | FMIDVQQWGF | M57;M43;M20 | CANDPVGFTL | M40;M31;M30;M43;M42 |
| 2028 | VDSSQGSEYDYVIFTQ | M4;M64;M3; | FCDLKGKYVQIPTTC | M40;M31;M30;M43;M42; |
| | TTETAHSCN | M51;M22;M23 | ANDPVGFTLK | M40;M31;M30;M43;M42 |
| 2029 | SSQGSEYDYVIFTQTT | M4;M64;M3; | PKGFCDLKGKYVQIP | M40;M31;M30;M43;M42; |
| | ETAHSCNVN | M51;M22;M23 | TTCANDPVGF | M40;M31;M30;M43;M42 |
| 2030 | DSSQGSEYDYVIFTQT | M4;M64;M3; | CDLKGKYVQIPTTCA | M40;M31;M30;M43;M42; |
| | TETAHSCNV | M51;M22;M23 | NDPVGFTLKN | M40;M31;M30;M43;M42 |
| 2031 | FHPLADNKFALTCFST | M4;M21;M14; | SWLMWLIINLVQMAP | M9;M73;M55;M50;M11; |
| | QFAFACPDG | M3;M6;M22 | ISAMVRMYIF | M9;M73;M55;M50;M11 |
| 2032 | KWADNNCYLATALLT | M4;M51;M3; | LTAVVIPTKKAGGTT | M58;M16;M78;M53;M17; |
| | LQQIELKFNP | M4;M51;M3 | EMLAKALRKV | M58;M16;M78;M53;M17 |
| 2033 | WADNNCYLATALLTL | M4;M51;M3; | VLTAVVIPTKKAGGT | M58;M16;M78;M53;M17; |
| | QQIELKFNPP | M4;M51;M3 | TEMLAKALRK | M58;M16;M78;M53;M17 |
| 2034 | DNNCYLATALLTLQQI | M4;M51;M3; | HVVGPNVNKGEDIQL | M77;M32;M28;M60;M68; |
| | ELKFNPPAL | M4;M51;M3 | LKSAYENFNQ | M77;M32;M28;M60;M68 |
| 2035 | SIKWADNNCYLATAL | M4;M51;M3; | TQYNRYLALYNKYK | M31;M55;M67;M27;M20; |
| | LTLQQIELKF | M4;M51;M3 | YFSGAMDTTSY | M31;M55;M67;M27;M20 |
| 2036 | ADNNCYLATALLTLQ | M4;M51;M3; | LTQYNRYLALYNKY | M55;M67;M27;M42;M20; |
| | QIELKFNPPA | M4;M51;M3 | KYFSGAMDTTS | M55;M67;M27;M42;M20 |
| 2037 | IKWADNNCYLATALL | M4;M51;M3; | YHNESGLKTILRKGG | M13;M58;M16;M53;M17; |
| | TLQQIELKFN | M4;M51;M3 | RTIAFGGCVF | M13;M58;M16;M53;M17 |
| 2038 | ITNLCPFGEVFNATRF | M4;M58;M3; | LAEYHNESGLKTILRK | M13;M58;M16;M53;M17; |
| | ASVYAWNRK | M2;M17;M20 | GGRTIAFGG | M13;M58;M16;M53;M17 |
| 2039 | PLADNKFALTCFSTQF | M4;M21;M3; | AEYHNESGLKTILRK | M13;M58;M16;M53;M17; |
| | AFACPDGVK | M6;M33;M22 | GGRTIAFGGC | M13;M58;M16;M53;M17 |
| 2040 | YRNRDVDTDFVNEFY | M4;M71;M6; | EYHNESGLKTILRKG | M13;M58;M16;M53;M17; |
| | AYLRKHFSMM | M3;M26;M59 | GRTIAFGGCV | M13;M58;M16;M53;M17 |
| 2041 | RNRDVDTDFVNEFYA | M4;M71;M6; | MWLIINLVQMAPISA | M9;M73;M55;M11;M23; |
| | YLRKHFSMMI | M3;M26;M59 | MVRMYIFFAS | M9;M73;M55;M11;M23 |
| 2042 | ISNCVADYSVLYNSAS | M73;M7;M3; | QTMLFTMLRKLDND | M16;M43;M15;M52;M9; |
| | FSTFKCYGV | M15;M11;M44 | ALNNIINNARD | M16;M43;M15;M52;M9 |
| 2043 | FFSNYLKRRVVFNGVS | M4;M3;M6; | MQTMLFTMLRKLDN | M16;M43;M15;M52;M9; |
| | FSTFEEAAL | M4;M3;M6 | DALNNIINNAR | M16;M43;M15;M52;M9 |
| 2044 | FSNYLKRRVVFNGVSF | M4;M3;M6; | PYIVGDVVQEGVLTA | M29;M38;M61;M67;M27; |
| | STFEEAALC | M4;M3;M6 | VVIPTKKAGG | M29;M38;M61;M67;M27 |
| 2045 | NCVADYSVLYNSASFS | M73;M3;M41; | YIVGDVVQEGVLTAV | M29;M38;M61;M67;M27; |
| | TFKCYGVSP | M15;M11;M44 | VIPTKKAGGT | M29;M38;M61;M67;M27 |
| 2046 | SNCVADYSVLYNSASF | M73;M3;M41; | TGTGQAITVTPEANM | M24;M78;M34;M29;M49; |
| | STFKCYGVS | M15;M11;M44 | DQESFGGASC | M24;M78;M34;M29;M49 |
| 2047 | CVADYSVLYNSASFST | M73;M3;M41; | DSCNNYMLTYNKVE | M53;M74;M15;M52;M11; |
| | FKCYGVSPT | M15;M11;M44 | NMTPRDLGACI | M53;M74;M15;M52;M11 |
| 2048 | VLKSEDAQGMDNLAC | M1;M3;M37; | LFDESGEFKLASHMY | M16;M20;M15;M52;M23; |
| | EDLKPVSEEV | M1;M3;M37 | CSFYPPDEDE | M16;M20;M15;M52;M23 |
| 2049 | LTGYKKPASRELKVTF | M57;M63;M3; | FDESGEFKLASHMYC | M16;M20;M15;M52;M23; |
| | FPDLNGDVV | M57;M63;M3 | SFYPPDEDEE | M16;M20;M15;M52;M23 |
| 2050 | TSKFYGGWHNMLKTV | M32;M6;M3; | YLFDESGEFKLASHM | M16;M20;M15;M52;M23; |
| | YSDVENPHLM | M18;M43;M59 | YCSFYPPDED | M16;M20;M15;M52;M23 |
| 2051 | YVLPNDDTLRVEAFEY | M41;M3;M6; | YYLFDESGEFKLASH | M16;M20;M15;M52;M23; |
| | YHTTDPSFL | M41;M3;M6 | MYCSFYPPDE | M16;M20;M15;M52;M23 |
| 2052 | VLPNDDTLRVEAFEYY | M41;M3;M6; | FLGRYMSALNHTKK | M24;M5;M25;M74;M33; |
| | HTTDPSFLG | M41;M3;M6 | WKYPQVNGLTS | M24;M5;M25;M74;M33 |
| 2053 | GHTDLMAAYVDNSSL | M51;M63;M44; | LGRYMSALNHTKKW | M24;M5;M25;M74;M33; |
| | TIKKPNELSR | M51;M63;M44 | KYPQVNGLTSI | M24;M5;M25;M74;M33 |
| 2054 | DIAARDLICAQKFNGL | M58;M78;M65; | VVDYGARFYFYTSKT | M40;M29;M41;M15;M47; |
| | TVLPPLLTD | M10;M3;M79 | TVASLINTLN | M40;M29;M41;M15;M47 |
| 2055 | GDIAARDLICAQKFNG | M58;M78;M65; | VDYGARFYFYTSKTT | M40;M29;M41;M15;M47; |
| | LTVLPPLLT | M10;M3;M79 | VASLINTLND | M40;M29;M41;M15;M47 |
| 2056 | LGDIAARDLICAQKFN | M58;M78;M65; | DYGARFYFYTSKTTV | M40;M29;M41;M15;M47; |
| | GLTVLPPLL | M10;M3;M79 | ASLINTLNDL | M40;M29;M41;M15;M47 |
| 2057 | DKRAKVTSAMQTMLF | M52;M3;M16; | EGVVDYGARFYFYTS | M40;M29;M41;M15;M47; |
| | TMLRKLDNDA | M52;M3;M16 | KTTVASLINT | M40;M29;M41;M15;M47 |
| 2058 | ATHGLAAVNSVPWDT | M55;M54;M3; | GVVDYGARFYFYTSK | M40;M29;M41;M15;M47; |
| | IANYAKPFLN | M55;M54;M3 | TTVASLINTL | M40;M29;M41;M15;M47 |
| 2059 | NDVSFLAHIQWMVMF | M30;M3;M58; | QEAYEQAVANGDSE | M13;M55;M53;M33;M59; |
| | TPLVPFWITI | M30;M3;M58 | VVLKKLKKSLN | M13;M55;M53;M33;M59 |
| 2060 | MFLARGIVFMCVEYCP | M22;M3;M20; | KMLCTHTGTGQAITV | M24;M78;M34;M29;M9; |
| | IFFITGNTL | M22;M3;M20 | TPEANMDQES | M24;M78;M34;M29;M9 |
| 2061 | PDVDLGDISGINASVV | M28;M14;M70; | CDTFCAGSTFISDEVA | M31;M70;M57;M35;M20; |
| | NIQKEIDRL | M80;M45;M47 | RDLSLQFKR | M31;M70;M57;M35;M20 |
| 2062 | VDLGDISGINASVVNI | M28;M14;M70; | VNCDTFCAGSTFISDE | M31;M70;M57;M35;M20; |
| | QKEIDRLNE | M80;M45;M47 | VARDLSLQF | M31;M70;M57;M35;M20 |
| 2063 | DVDLGDISGINASVVN | M28;M14;M70; | NCDTFCAGSTFISDEV | M31;M70;M57;M35;M20; |
| | IQKEIDRLN | M80;M45;M47 | ARDLSLQFK | M31;M70;M57;M35;M20 |
| 2064 | SPDVDLGDISGINASV | M28;M14;M70; | MSALNHTKKWKYPQ | M54;M24;M5;M60;M74; |
| | VNIQKEIDR | M80;M45;M47 | VNGLTSIKWAD | M54;M24;M5;M60;M74 |
| 2065 | EDKRAKVTSAMQTML | M52;M3;M62; | YMSALNHTKKWKYP | M54;M24;M5;M60;M74; |
| | FTMLRKLDND | M52;M3;M62 | QVNGLTSIKWA | M54;M24;M5;M60;M74 |
| 2066 | EEVTTTLEETKFLTEN | M50;M3;M20; | SALNHTKKWKYPQV | M54;M24;M5;M60;M74; |
| | LLLYIDING | M50;M3;M20 | NGLTSIKWADN | M54;M24;M5;M60;M74 |
| 2067 | QLFFSYFAVHFISNSW | M9;M3;M23; | DVVAIDYKHYTPSFK | M16;M37;M69;M27;M82; |
| | LMWLIINLV | M9;M3;M23 | KGAKLLHKPI | M16;M37;M69;M27;M82 |
| 2068 | LFFSYFAVHFISNSWL | M9;M3;M23; | VVAIDYKHYTPSFKK | M16;M37;M69;M27;M82; |
| | MWLIINLVQ | M9;M3;M23 | GAKLLHKPIV | M16;M37;M69;M27;M82 |
| 2069 | FFSYFAVHFISNSWLM | M9;M3;M23; | NGDVVAIDYKHYTPS | M16;M60;M37;M69;M82; |
| | WLIINLVQM | M9;M3;M23 | FKKGAKLLHK | M16;M60;M37;M69;M82 |
| 2070 | MQLFFSYFAVHFISNS | M9;M3;M23; | ASFDNFKFVCDNIKFA | M40;M64;M21;M22;M23; |
| | WLMWLIINL | M9;M3;M23 | DDLNQLTGY | M40;M64;M21;M22;M23 |
| 2071 | FSYFAVHFISNSWLM | M9;M3;M23; | FDNFKFVCDNIKFAD | M40;M64;M21;M22;M23; |
| | WLIINLVQMA | M9;M3;M23 | DLNQLTGYKK | M40;M64;M21;M22;M23 |
| 2072 | CIPYNSVTSSIVITSGD | M12;M14;M29; | DNFKFVCDNIKFADD | M40;M64;M21;M22;M23; |
| | GTTSPISE | M45;M62;M43 | LNQLTGYKKP | M40;M64;M21;M22;M23 |
| 2073 | PDKVFRSSVLHSTQDL | M4;M1;M29; | SFDNFKFVCDNIKFAD | M40;M64;M21;M22;M23; |
| | FLPFFSNVT | M6;M67;M72 | DLNQLTGYK | M40;M64;M21;M22;M23 |
| 2074 | NCTFEYVSQPFLMDLE | M4;M1;M57; | PEEHFIETISLAGSYKD | M64;M40;M32;M29;M68; |
| | GKQGNFKNL | M36;M46;M20 | WSYSGQST | M64;M40;M32;M29;M68 |
| 2075 | LTSHTVMPLSAPTLVP | M28;M54;M51; | LKPVLDWLEEKFKEG | M61;M57;M27;M9;M20; |
| | QEHYVRITG | M69;M46;M39 | VEFLRDGWEI | M61;M57;M27;M9;M20 |
| 2076 | TSHTVMPLSAPTLVPQ | M28;M54;M51; | KLKPVLDWLEEKFKE | M61;M57;M27;M9;M20; |
| | EHYVRITGL | M69;M46;M39 | GVEFLRDGWE | M61;M57;M27;M9;M20 |
| 2077 | LWLLWPVTLACFVLA | M58;M14;M70; | TAQNSVRVLQKAAITI | M56;M54;M24;M5;M9; |
| | AVYRINWITG | M33;M63;M44 | LDGISQYSL | M56;M54;M24;M5;M9 |
| 2078 | WLLWPVTLACFVLAA | M58;M14;M70; | ETAQNSVRVLQKAAI | M56;M54;M24;M5;M9; |
| | VYRINWITGG | M33;M63;M44 | TILDGISQYS | M56;M54;M24;M5;M9 |
| 2079 | WPVTLACFVLAAVYRI | M58;M14;M70; | GQPITNCVKMLCTHT | M64;M21;M58;M22;M23; |
| | NWITGGIAI | M33;M63;M44 | GTGQAITVTP | M64;M21;M58;M22;M23 |
| 2080 | LLWPVTLACFVLAAV | M58;M14;M70; | GKASCTLSEQLDFIDT | M64;M74;M83;M27;M22; |
| | YRINWITGGI | M33;M63;M44 | KRGVYCCRE | M64;M74;M83;M27;M22 |
| 2081 | LWPVTLACFVLAAVY | M58;M14;M70; | AKNTVKSVGKFCLEA | M24;M25;M43;M42;M9; |
| | RINWITGGIA | M33;M63;M44 | SFNYLKSPNF | M24;M25;M43;M42;M9 |
| 2082 | VFTTVDNINLHTQVVD | M51;M67;M6; | IAKNTVKSVGKFCLE | M24;M25;M43;M42;M9; |
| | MSMTYGQQF | M51;M67;M6 | ASFNYLKSPN | M24;M25;M43;M42;M9 |
| 2083 | FTTVDNINLHTQVVD | M51;M67;M6; | SAVKRTIKGTHHWLL | M24;M42;M43;M52;M9; |
| | MSMTYGQQFG | M51;M67;M6 | LTILTSLLVL | M24;M42;M43;M52;M9 |
| 2084 | IKVFTTVDNINLHTQV | M51;M67;M6; | DYDCVSFCYMHHME | M18;M43;M17;M52;M9; |
| | VDMSMTYGQ | M51;M67;M6 | LPTGVHAGTDL | M18;M43;M17;M52;M9 |
| 2085 | TTVDNINLHTQVVDM | M51;M67;M6; | SWVMRIMTWLDMVD | M64;M75;M70;M83;M22; |
| | SMTYGQQFGP | M51;M67;M6 | TSLSGFKLKDC | M64;M75;M70;M83;M22 |
| 2086 | TVDNINLHTQVVDMS | M51;M67;M6; | VMRIMTWLDMVDTS | M64;M75;M70;M83;M22; |
| | MTYGQQFGPT | M51;M67;M6 | LSGFKLKDCVM | M64;M75;M70;M83;M22 |
| 2087 | KVFTTVDNINLHTQVV | M51;M67;M6; | WVMRIMTWLDMVDT | M64;M75;M70;M83;M22; |
| | DMSMTYGQQ | M51;M67;M6 | SLSGFKLKDCV | M64;M75;M70;M83;M22 |
| 2088 | APFLYLYALVYFLQSI | M4;M19;M54; | IVEEAKKVKPTVVVN | M56;M73;M18;M11;M23; |
| | NFVRIIMRL | M12;M60;M25 | AANVYLKHGG | M56;M73;M18;M11;M23 |
| 2089 | LSSNFGAISSVLNDILS | M34;M6;M45; | DIVEEAKKVKPTVVV | M56;M73;M18;M11;M23; |
| | RLDKVEAE | M48;M50;M17 | NAANVYLKHG | M56;M73;M18;M11;M23 |
| 2090 | VNALPETTADIVVFDEI | M28;M55;M7; | GLMLLEIKDTEKYCA | M78;M65;M34;M82;M9; |
| | SMATNYDL | M38;M48;M49 | LAPNMMVTNN | M78;M65;M34;M82;M9 |
| 2091 | SETKCTLKSFTVEKGI | M75;M21;M14; | VKSREETGLLMPLKA | M54;M31;M60;M38;M27; |
| | YQTSNFRVQ | M25;M63;M8 | PKEIIFLEGE | M54;M31;M60;M38;M27 |
| 2092 | QNCVLKLKVDTANPK | M51;M7;M77; | SREETGLLMPLKAPK | M54;M31;M60;M38;M27; |
| | TPKYKFVRIQ | M51;M7;M77 | EIIFLEGETL | M54;M31;M60;M38;M27 |
| 2093 | GHSMQNCVLKLKVDT | M51;M7;M77; | EETGLLMPLKAPKEII | M54;M31;M60;M38;M27; |
| | ANPKTPKYKF | M51;M7;M77 | FLEGETLPT | M54;M31;M60;M38;M27 |
| 2094 | MQNCVLKLKVDTANP | M51;M7;M77; | REETGLLMPLKAPKEI | M54;M31;M60;M38;M27; |
| | KTPKYKFVRI | M51;M7;M77 | IFLEGETLP | M54;M31;M60;M38;M27 |
| 2095 | NCVLKLKVDTANPKT | M51;M7;M77; | KSREETGLLMPLKAP | M54;M31;M60;M38;M27; |
| | PKYKFVRIQP | M51;M7;M77 | KEIIFLEGET | M54;M31;M60;M38;M27 |
| 2096 | SMQNCVLKLKVDTAN | M51;M7;M77; | PTEVLTEEVVLKTGD | M58;M60;M38;M17;M62; |
| | PKTPKYKFVR | M51;M7;M77 | LQPLEQPTSE | M58;M60;M38;M17;M62 |
| 2097 | HSMQNCVLKLKVDTA | M51;M7;M77; | SEGLNDNLLEILQKEK | M24;M10;M61;M27;M9; |
| | NPKTPKYKFV | M51;M7;M77 | VNINIVGDF | M24;M10;M61;M27;M9 |
| 2098 | IGHSMQNCVLKLKVD | M51;M7;M77; | EGSEGLNDNLLEILQK | M24;M10;M61;M27;M9; |
| | TANPKTPKYK | M51;M7;M77 | EKVNINIVG | M24;M10;M61;M27;M9 |
| 2099 | TDQSSYIVDSVTVKNG | M36;M12;M48; | VVGEGSEGLNDNLLE | M24;M10;M61;M27;M9; |
| | SIHLYFDKA | M36;M12;M48 | ILQKEKVNIN | M24;M10;M61;M27;M9 |
| 2100 | DQSSYIVDSVTVKNGS | M36;M12;M48; | EGLNDNLLEILQKEK | M24;M10;M61;M27;M9; |
| | IHLYFDKAG | M36;M12;M48 | VNINIVGDFK | M24;M10;M61;M27;M9 |

TABLE 2Aii
Peptides and Alleles

| | Set 1 | Set 1 |
|---|---|---|
| | Peptide | Allele |
| 1 | GEGSEGLNDNLLEIL | M24;M10;M61;M27;M9;M24;M10;M61;M27;M9 |
| | QKEKVNINIV | |
| 2 | VGEGSEGLNDNLLE | M24;M10;M61;M27;M9;M24;M10;M61;M27;M9 |
| | ILQKEKVNINI | |
| 3 | GSEGLNDNLLEILQ | M24;M10;M61;M27;M9;M24;M10;M61;M27;M9 |
| | KEKVNINIVGD | |
| 4 | TGVVGEGSEGLNDN | M24;M10;M61;M27;M9;M24;M10;M61;M27;M9 |
| | LLEILQKEKVN | |
| 5 | GVVGEGSEGLNDNL | M24;M10;M61;M27;M9;M24;M10;M61;M27;M9 |
| | LEILQKEKVNI | |
| 6 | AVKRTIKGTHHWLL | M34;M42;M43;M52;M9;M34;M42;M43;M52;M9 |
| | LTILTSLLVLV | |
| 7 | KRTIKGTHHWLLLTI | M34;M42;M43;M52;M9;M34;M42;M43;M52;M9 |
| | LTSLLVLVQS | |
| 8 | VKRTIKGTHHWLLL | M34;M42;M43;M52;M9;M34;M42;M43;M52;M9 |
| | TILTSLLVLVQ | |
| 9 | VYMPASWVMRIMT | M32;M70;M83;M15;M52;M32;M70;M83;M15;M52 |
| | WLDMVDTSLSGF | |
| 10 | MVYMPASWVMRIM | M32;M70;M83;M15;M52;M32;M70;M83;M15;M52 |
| | TWLDMVDTSLSG | |
| 11 | NMVYMPASWVMRI | M32;M70;M83;M15;M52;M32;M70;M83;M15;M52 |
| | MTWLDMVDTSLS | |
| 12 | LDMCASLKELLQNG | M56;M24;M60;M50;M18;M56;M24;M60;M50;M18 |
| | MNGRTILGSAL | |
| 13 | GGRFVLALLSDLQD | M77;M32;M54;M70;M60;M77;M32;M54;M70;M60 |
| | LKWARFPKSDG | |
| 14 | PISAMVRMYIFFASF | M24;M20;M35;M9;M23;M24;M20;M35;M9;M23 |
| | YYVWKSYVHV | |
| 15 | ISAMVRMYIFFASFY | M24;M20;M35;M9;M23;M24;M20;M35;M9;M23 |
| | YVWKSYVHVV | |
| 16 | QTGIAVLDMCASLK | M32;M24;M10;M60;M59;M32;M24;M10;M60;M59 |
| | ELLQNGMNGRT | |
| 17 | TGIAVLDMCASLKE | M32;M24;M10;M60;M59;M32;M24;M10;M60;M59 |
| | LLQNGMNGRTI | |
| 18 | SAQTGIAVLDMCAS | M32;M24;M10;M60;M59;M32;M24;M10;M60;M59 |
| | LKELLQNGMNG | |
| 19 | AQTGIAVLDMCASL | M32;M24;M10;M60;M59;M32;M24;M10;M60;M59 |
| | KELLQNGMNGR | |
| 20 | LSAQTGIAVLDMCA | M32;M24;M10;M60;M59;M32;M24;M10;M60;M59 |
| | SLKELLQNGMN | |
| 21 | KGLDYKAFKQIVES | M37;M42;M52;M47;M23;M37;M42;M52;M47;M23 |
| | CGNFKVTKGKA | |
| 22 | VKGLDYKAFKQIVE | M37;M42;M52;M47;M23;M37;M42;M52;M47;M23 |
| | SCGNFKVTKGK | |
| 23 | LKLRSDVLLPLTQY | M53;M61;M69;M27;M20;M53;M61;M69;M27;M20 |
| | NRYLALYNKYK | |
| 24 | LRSDVLLPLTQYNR | M53;M61;M69;M27;M20;M53;M61;M69;M27;M20 |
| | YLALYNKYKYF | |
| 25 | KLRSDVLLPLTQYN | M53;M61;M69;M27;M20;M53;M61;M69;M27;M20 |
| | RYLALYNKYKY | |
| 26 | FVDDIVKTDGTLMI | M4;M9;M10;M1;M5;M7;M2;M3;M6;M8;M11 |
| | ERFVSLAIDAY | |
| 27 | LTKGTLEPEYFNSV | M4;M13;M12;M14;M16;M19;M1;M3;M18;M17;M15 |
| | CRLMKTIGPDM | |
| 28 | KGTLEPEYFNSVCR | M4;M13;M12;M14;M16;M19;M3;M6;M18;M17;M15 |
| | LMKTIGPDMFL | |
| 29 | QIYKTPPIKDFGGFN | M4;M32;M28;M14;M31;M1;M29;M3;M33;M27;M35 |
| | FSQILPDPSK | |
| 30 | IYKTPPIKDFGGFNF | M4;M32;M28;M14;M31;M1;M29;M3;M33;M27;M35 |
| | SQILPDPSKP | |
| 31 | GTLEPEYFNSVCRL | M13;M12;M14;M16;M19;M5;M3;M6;M18;M17;M15 |
| | MKTIGPDMFLG | |
| 32 | FTVEKGIYQTSNFRV | M31;M1;M34;M30;M3;M37;M50;M41;M8;M39;M23 |
| | QPTESIVRFP | |
| 33 | KSFTVEKGIYQTSNF | M31;M1;M34;M30;M3;M37;M50;M41;M8;M39;M23 |
| | RVQPTESIVR | |
| 34 | SFTVEKGIYQTSNFR | M31;M1;M34;M30;M3;M37;M50;M41;M8;M39;M23 |
| | VQPTESIVRF | |
| 35 | SFKELLVYAADPAM | M64;M12;M30;M48;M57;M33;M36;M8;M39;M44;M20 |
| | HAASGNLLLDK | |
| 36 | MAGNGGDAALALL | M13;M56;M58;M16;M55;M10;M53;M51;M36;M17;M11 |
| | LLDRLNQLESKM | |
| 37 | NGGDAALALLLLDR | M13;M56;M58;M16;M55;M10;M53;M51;M36;M17;M11 |
| | LNQLESKMSGK | |
| 38 | AGNGGDAALALLLL | M13;M56;M58;M16;M55;M10;M53;M51;M36;M17;M11 |
| | DRLNQLESKMS | |
| 39 | GNGGDAALALLLLD | M13;M56;M58;M16;M55;M10;M53;M51;M36;M17;M11 |
| | RLNQLESKMSG | |
| 40 | EKGIYQTSNFRVQPT | M31;M34;M30;M48;M37;M50;M51;M41;M8;M39;M23 |
| | ESIVRFPNIT | |
| 41 | RCPAEIVDTVSALV | M12;M28;M16;M7;M29;M6;M38;M8;M17;M59;M23 |
| | YDNKLKAHKDK | |
| 42 | TNAGDYILANTCTE | M56;M73;M19;M31;M6;M44;M18;M63;M8;M52;M47 |
| | RLKLFAAETLK | |
| 43 | NAGDYILANTCTER | M56;M73;M19;M31;M6;M44;M18;M63;M8;M52;M47 |
| | LKLFAAETLKA | |
| 44 | SSRLSFKELLVYAA | M64;M30;M48;M57;M36;M41;M49;M26;M22;M44;M20 |
| | DPAMHAASGNL | |
| 45 | PLNRNYVFTGYRVT | M40;M14;M31;M24;M41;M8;M43;M42;M39;M9;M44 |
| | KNSKVQIGEYT | |
| 46 | VFTGYRVTKNSKVQ | M40;M14;M31;M24;M41;M8;M43;M42;M39;M9;M44 |
| | IGEYTFEKGDY | |
| 47 | RNYVFTGYRVTKNS | M40;M14;M31;M24;M41;M8;M43;M42;M39;M9;M44 |
| | KVQIGEYTFEK | |
| 48 | NRNYVFTGYRVTK | M40;M14;M31;M24;M41;M8;M43;M42;M39;M9;M44 |
| | NSKVQIGEYTFE | |
| 49 | YVFTGYRVTKNSKV | M40;M14;M31;M24;M41;M8;M43;M42;M39;M9;M44 |
| | QIGEYTFEKGD | |
| 50 | LNRNYVFTGYRVTK | M40;M14;M31;M24;M41;M8;M43;M42;M39;M9;M44 |
| | NSKVQIGEYTF | |
| 51 | FTGYRVTKNSKVQI | M40;M14;M31;M24;M41;M8;M43;M42;M39;M9;M44 |
| | GEYTFEKGDYG | |
| 52 | NYVFTGYRVTKNSK | M40;M14;M31;M24;M41;M8;M43;M42;M39;M9;M44 |
| | VQIGEYTFEKG | |
| 53 | WVYKQFDTYNLWN | M71;M58;M14;M16;M19;M25;M34;M53;M17;M15;M39 |
| | TFTRLQSLENVA | |
| 54 | VYKQFDTYNLWNT | M71;M58;M14;M16;M19;M25;M34;M53;M17;M15;M39 |
| | FTRLQSLENVAF | |
| 55 | EIPRRNVATLQAEN | M28;M54;M29;M6;M45;M38;M27;M46;M39;M59;M20 |
| | VTGLFKDCSKV | |
| 56 | LVKPSFYVYSRVKN | M40;M71;M12;M54;M16;M60;M38;M33;M8;M46;M39 |
| | LNSSRVPDLLV | |
| 57 | SLVKPSFYVYSRVK | M40;M71;M12;M54;M16;M60;M38;M33;M8;M46;M39 |
| | NLNSSRVPDLL | |
| 58 | DYNYKLPDDFTGCV | M13;M32;M12;M14;M29;M38;M48;M67;M68;M49;M26 |
| | IAWNSNNLDSK | |
| 59 | IPKDMTYRRLISMM | M40;M58;M16;M25;M30;M44;M46;M43;M42;M39;M47 |
| | GFKMNYQVNGY | |
| 60 | IKPVPEVKILNNLGV | M11;M9;M54;M60;M48;M57;M27;M43;M42;M22;M44 |
| | DIAANTVIWD | |
| 61 | NIKPVPEVKILNNLG | M11;M9;M54;M60;M48;M57;M27;M43;M42;M22;M44 |
| | VDIAANTVIW | |
| 62 | KRNIKPVPEVKILNN | M11;M9;M54;M60;M48;M57;M27;M43;M42;M22;M44 |
| | LGVDIAANTV | |
| 63 | RNIKPVPEVKILNNL | M11;M9;M54;M60;M48;M57;M27;M43;M42;M22;M44 |
| | GVDIAANTVI | |
| 64 | NFKDQVILLNKHID | M56;M73;M14;M53;M44;M41;M17;M35;M52;M11;M47 |
| | AYKTFPPTEPK | |
| 65 | FKDQVILLNKHIDA | M56;M73;M14;M53;M44;M41;M17;M35;M52;M11;M47 |
| | YKTFPPTEPKK | |
| 66 | PNFKDQVILLNKHID | M56;M73;M14;M53;M44;M41;M17;M35;M52;M11;M47 |
| | AYKTFPPTEP | |
| 67 | GLALYYPSARIVYT | M64;M21;M28;M14;M5;M29;M38;M17;M49;M46;M22 |
| | ACSHAAVDALC | |
| 68 | KVSIWNLDYIINLIIK | M56;M73;M28;M58;M16;M50;M18;M17;M15;M11;M44 |
| | NLSKSLTEN | |
| 69 | WNLDYIINLIIKNLS | M56;M73;M28;M58;M16;M50;M18;M17;M15;M11;M44 |
| | KSLTENKYSQ | |
| 70 | IWNLDYIINLIIKNLS | M56;M73;M28;M58;M16;M50;M18;M17;M15;M11;M44 |
| | KSLTENKYS | |
| 71 | VSIWNLDYIINLIIKN | M56;M73;M28;M58;M16;M50;M18;M17;M15;M11;M44 |
| | LSKSLTENK | |
| 72 | SIWNLDYIINLIIKNL | M56;M73;M28;M58;M16;M50;M18;M17;M15;M11;M44 |
| | SKSLTENKY | |
| 73 | NMFITREEAIRHVRA | M64;M32;M14;M34;M48;M57;M46;M69;M42;M39;M20 |
| | WIGFDVEGCH | |
| 74 | PNMFITREEAIRHVR | M64;M32;M14;M34;M48;M57;M46;M69;M42;M39;M20 |
| | AWIGFDVEGC | |
| 75 | FITREEAIRHVRAWI | M64;M32;M14;M34;M48;M57;M46;M69;M42;M39;M20 |
| | GFDVEGCHAT | |
| 76 | ITREEAIRHVRAWIG | M64;M32;M14;M34;M48;M57;M46;M69;M42;M39;M20 |
| | FDVEGCHATR | |
| 77 | MFITREEAIRHVRA | M64;M32;M14;M34;M48;M57;M46;M69;M42;M39;M20 |
| | WIGFDVEGCHA | |
| 78 | AKRNIKPVPEVKILN | M9;M54;M66;M60;M48;M57;M27;M43;M42;M22;M44 |
| | NLGVDIAANT | |
| 79 | ADSNGTITVEELKK | M4;M56;M58;M16;M55;M53;M6;M59;M17;M52;M47 |
| | LLEQWNLVIGF | |
| 80 | PDDFTGCVIAWNSN | M13;M32;M56;M12;M55;M48;M50;M67;M68;M49;M26 |
| | NLDSKVGGNYN | |
| 81 | ITRFQTLLALHRSYL | M23;M21;M24;M70;M55;M5;M10;M2;M48;M9;M20 |
| | TPGDSSSGWT | |
| 82 | NITRFQTLLALHRSY | M23;M21;M24;M70;M55;M5;M10;M2;M48;M9;M20 |
| | LTPGDSSSGW | |
| 83 | KLNVGDYFVLTSHT | M16;M55;M25;M34;M29;M18;M41;M43;M15;M42;M39 |
| | VMPLSAPTLVP | |
| 84 | TTYKLNVGDYFVLT | M16;M55;M25;M34;M29;M18;M41;M43;M15;M42;M39 |
| | SHTVMPLSAPT | |
| 85 | YKLNVGDYFVLTSH | M16;M55;M25;M34;M29;M18;M41;M43;M15;M42;M39 |
| | TVMPLSAPTLV | |
| 86 | TYKLNVGDYFVLTS | M16;M55;M25;M34;M29;M18;M41;M43;M15;M42;M39 |
| | HTVMPLSAPTL | |
| 87 | SQGLVASIKNFKSVL | M21; M54;M55;M60;M48;M41;M68;M49;M26;M22;M23 |
| | YYQNNVFMSE | |
| 88 | ASQGLVASIKNFKS | M21;M54;M55;M60;M48;M41;M68;M49;M26;M22;M23 |
| | VLYYQNNVFMS | |
| 89 | STYASQGLVASIKNF | M64;M21;M54;M55;M60;M48;M68;M49;M26;M22;M23 |
| | KSVLYYQNNV | |
| 90 | YASQGLVASIKNFK | M64;M21;M54;M55;M60;M48;M68;M49;M26;M22;M23 |
| | SVLYYQNNVFM | |
| 91 | TYASQGLVASIKNF | M64;M21;M54;M55;M60;M48;M68;M49;M26;M22;M23 |
| | KSVLYYQNNVF | |
| 92 | WQPGVAMPNLYKM | M12;M24;M55;M10;M53;M17;M35;M52;M9;M47;M23 |
| | QRMLLEKCDLQN | |
| 93 | AWQPGVAMPNLYK | M12;M24;M55;M10;M53;M17;M35;M52;M9;M47;M23 |
| | MQRMLLEKCDLQ | |
| 94 | QPGVAMPNLYKMQ | M12;M24;M55;M10;M53;M17;M35;M52;M9;M47;M23 |
| | RMLLEKCDLQNY | |
| 95 | PGVAMPNLYKMQR | M12;M24;M55;M10;M53;M17;M35;M52;M9;M47;M23 |
| | MLLEKCDLQNYG | |
| 96 | TKGTLEPEYFNSVC | M4;M13;M12;M14;M16;M19;M1;M3;M6;M18;M17;M15 |
| | RLMKTIGPDMF | |
| 97 | LLTKGTLEPEYFNSV | M4;M13;M12;M14;M16;M19;M1;M3;M6;M18;M17;M15 |
| | CRLMKTIGPD | |
| 98 | YKTPPIKDFGGFNFS | M4;M32;M28;M14;M31;M1;M34;M29;M3;M33;M27;M35 |
| | QILPDPSKPS | |
| 99 | KTPPIKDFGGFNFSQ | M4;M32;M28;M14;M31;M1;M34;M29;M3;M33;M27;M35 |
| | ILPDPSKPSK | |
| 100 | TVEKGIYQTSNFRV | M31;M1;M34;M30;M3;M37;M50;M51;M41;M8;M39;M23 |
| | QPTESIVRFPN | |
| 101 | SKCVCSVIDLLLDDF | M4;M52;M14;M16;M3;M48;M18;M8;M43;M15;M35;M47 |
| | VEIIKSQDLS | |
| 102 | KCVCSVIDLLLDDF | M4;M52;M14;M16;M3;M48;M18;M8;M43;M15;M35;M47 |
| | VEIIKSQDLSV | |
| 103 | CVCSVIDLLLDDFVE | M4;M52;M14;M16;M3;M48;M18;M8;M43;M15;M35;M47 |
| | IIKSQDLSVV | |
| 104 | SEDAQGMDNLACE | M4;M1;M3;M45;M37;M49;M4;M1;M3;M45;M37;M49 |
| | DLKPVSEEVVEN | |
| 105 | EDAQGMDNLACED | M4;M1;M3;M45;M37;M49;M4;M1;M3;M45;M37;M49 |
| | LKPVSEEVVENP | |
| 106 | DAQGMDNLACEDL | M4;M1;M3;M45;M37;M49;M4;M1;M3;M45;M37;M49 |
| | KPVSEEVVENPT | |
| 107 | YMGTLSYEQFKKG | M4;M16;M1;M3;M37;M52;M4;M16;M1;M3;M37;M52 |
| | VQIPCTCGKQAT | |
| 108 | MYMGTLSYEQFKK | M4;M16;M1;M3;M37;M52;M4;M16;M1;M3;M37;M52 |
| | GVQIPCTCGKQA | |
| 109 | VMYMGTLSYEQFK | M4;M16;M1;M3;M37;M52;M4;M16;M1;M3;M37;M52 |
| | KGVQIPCTCGKQ | |
| 110 | MGTLSYEQFKKGV | M4;M16;M1;M3;M37;M52;M4;M16;M1;M3;M37;M52 |
| | QIPCTCGKQATK | |
| 111 | VQLTSQWLTNIFGT | M4;M28;M31;M3;M45;M59;M4;M28;M31;M3;M45;M59 |
| | VYEKLKPVLDW | |
| 112 | QLTSQWLTNIFGTV | M4;M28;M31;M3;M45;M59;M4;M28;M31;M3;M45;M59 |
| | YEKLKPVLDWL | |
| 113 | NICYTPSKLIEYTDF | M4;M3;M48;M63;M41;M49;M4;M3;M48;M63;M41;M49 |
| | ATSACVLAAE | |
| 114 | KKPASRELKVTFFP | M21;M70;M3;M57;M36;M63;M21;M70;M3;M57;M36;M63 |
| | DLNGDVVAIDY | |
| 115 | YKKPASRELKVTFF | M21;M70;M3;M57;M36;M63;M21;M70;M3;M57;M36;M63 |
| | PDLNGDVVAID | |
| 116 | KPASRELKVTFFPDL | M21;M70;M3;M57;M36;M63;M21;M70;M3;M57;M36;M63 |
| | NGDVVAIDYK | |
| 117 | SGVVTTVMFLARGI | M12;M14;M29;M3;M22;M20;M12;M14;M29;M3;M22;M20 |
| | VFMCVEYCPIF | |
| 118 | VLALLSDLQDLKW | M4;M77;M54;M70;M60;M3;M4;M77;M54;M70;M60;M3 |
| | ARFPKSDGTGTI | |
| 119 | RFVLALLSDLQDLK | M4;M77;M54;M70;M60;M3;M4;M77;M54;M70;M60;M3 |
| | WARFPKSDGTG | |
| 120 | FVLALLSDLQDLKW | M4;M77;M54;M70;M60;M3;M4;M77;M54;M70;M60;M3 |
| | ARFPKSDGTGT | |
| 121 | WPLIVTALRANSAV | M73;M60;M51;M39;M11;M44;M73;M60;M51;M39;M11;M44 |
| | KLQNNELSPVA | |
| 122 | PLIVTALRANSAVK | M73;M60;M51;M39;M11;M44;M73;M60;M51;M39;M11;M44 |
| | LQNNELSPVAL | |
| 123 | AWPLIVTALRANSA | M73;M60;M51;M39;M11;M44;M73;M60;M51;M39;M11;M44 |
| | VKLQNNELSPV | |
| 124 | CSVIDLLLDDFVEIIK | M4;M52;M14;M16;M48;M18;M42;M8;M43;M15;M35;M47 |
| | SQDLSVVSK | |
| 125 | TSLEIPRRNVATLQA | M28;M54;M60;M29;M2;M6;M45;M27;M46;M39;M59;M20 |
| | ENVTGLFKDC | |
| 126 | FTSLEIPRRNVATLQ | M28;M54;M60;M29;M2;M6;M45;M27;M46;M39;M59;M20 |
| | AENVTGLFKD | |
| 127 | QFTSLEIPRRNVATL | M28;M54;M60;M29;M2;M6;M45;M27;M46;M39;M59;M20 |
| | QAENVTGLFK | |
| 128 | SLEIPRRNVATLQAE | M28;M54;M60;M29;M2;M6;M45;M27;M46;M39;M59;M20 |
| | NVTGLFKDCS | |
| 129 | GGFNFSQILPDPSKP | M32;M14;M31;M7;M34;M29;M30;M33;M36;M27;M35;M22 |
| | SKRSFIEDLL | |
| 130 | FLGYFCTCYFGLFCL | M56;M60;M3;M6;M37;M18;M56;M60;M3;M6;M37;M18 |
| | LNRYFRLTLG | |
| 131 | LGYFCTCYFGLFCL | M56;M60;M3;M6;M37;M18;M56;M60;M3;M6;M37;M18 |
| | LNRYFRLTLGV | |
| 132 | IKDFGGFNFSQILPD | M32;M28;M14;M31;M34;M29;M30;M33;M36;M27;M35;M22 |
| | PSKPSKRSFI | |
| 133 | PIKDFGGFNFSQILP | M32;M28;M14;M31;M34;M29;M30;M33;M36;M27;M35;M22 |
| | DPSKPSKRSF | |
| 134 | SILSPLYAFASEAAR | M14;M6;M48;M45;M49;M22;M14;M6;M48;M45;M49;M22 |
| | VVRSIFSRTL | |
| 135 | CNSSTCMMCYKRN | M71;M14;M8;M39;M11;M44;M71;M14;M8;M39;M11;M44 |
| | RATRVECTTIVN | |
| 136 | YNYKLPDDFTGCVI | M13;M32;M12;M14;M55;M29;M38;M48;M67;M68;M49;M26 |
| | AWNSNNLDSKV | |
| 137 | SPLYAFASEAARVV | M14;M6;M48;M45;M49;M59;M14;M6;M48;M45;M49;M59 |
| | RSIFSRTLETA | |
| 138 | FAVHFISNSWLMWL | M11;M73;M3;M50;M9;M23;M11;M73;M3;M50;M9;M23 |
| | IINLVQMAPIS | |
| 139 | YYTSNPTTFHLDGE | M7;M48;M45;M50;M36;M49;M7;M48;M45;M50;M36;M49 |
| | VITFDNLKTLL | |
| 140 | VYYTSNPTTFHLDG | M7;M48;M45;M50;M36;M49;M7;M48;M45;M50;M36;M49 |
| | EVITFDNLKTL | |
| 141 | LPKEITVATSRTLSY | M64;M56;M12;M70;M29;M6;M48;M33;M49;M46;M22;M23 |
| | YKLGASQRVA | |
| 142 | DGCNSSTCMMCYK | M71;M55;M8;M39;M11;M44;M71;M55;M8;M39;M11;M44 |
| | RNRATRVECTTI | |
| 143 | VDGCNSSTCMMCY | M71;M55;M8;M39;M11;M44;M71;M55;M8;M39;M11;M44 |
| | KRNRATRVECTT | |
| 144 | LLLDDFVEIIKSQDL | M4;M52;M16;M48;M18;M42;M8;M43;M15;M35;M47;M23 |
| | SVVSKVVKVT | |
| 145 | LLDDFVEIIKSQDLS | M4;M52;M16;M48;M18;M42;M8;M43;M15;M35;M47;M23 |
| | VVSKVVKVTI | |
| 146 | DLLLDDFVEIIKSQD | M4;M52;M16;M48;M18;M42;M8;M43;M15;M35;M47;M23 |
| | LSVVSKVVKV | |
| 147 | KNNLPFKLTCATTR | M21;M12;M19;M2;M33;M8;M21;M12;M19;M2;M33;M8 |
| | QVVNVVTTKIA | |
| 148 | NNLPFKLTCATTRQ | M21;M12;M19;M2;M33;M8;M21;M12;M19;M2;M33;M8 |
| | VVNVVTTKIAL | |
| 149 | NSTVLSFCAFAVDA | M32;M12;M28;M48;M36;M69;M32;M12;M28;M48;M36;M69 |
| | AKAYKDYLASG | |
| 150 | LYAFASEAARVVRS | M4;M14;M6;M48;M42;M59;M4;M14;M6;M48;M42;M59 |
| | IFSRTLETAQN | |
| 151 | KPPPGDQFKHLIPLM | M56;M19;M12;M16;M54;M25;M34;M60;M18;M15;M39;M47 |
| | YKGLPWNVVR | |
| 152 | ALYYPSARIVYTAC | M64;M21;M28;M14;M5;M29;M38;M67;M17;M49;M46;M22 |
| | SHAAVDALCEK | |
| 153 | YYPSARIVYTACSH | M64;M21;M28;M14;M5;M29;M38;M67;M17;M49;M46;M22 |
| | AAVDALCEKAL | |
| 154 | LALYYPSARIVYTA | M64;M21;M28;M14;M5;M29;M38;M67;M17;M49;M46;M22 |
| | CSHAAVDALCE | |
| 155 | LYYPSARIVYTACS | M64;M21;M28;M14;M5;M29;M38;M67;M17;M49;M46;M22 |
| | HAAVDALCEKA | |
| 156 | FNGECPNFVFPLNSII | M28;M19;M6;M61;M50;M72;M28;M19;M6;M61;M50;M72 |
| | KTIQPRVEK | |
| 157 | TNNAMQVESDDYIA | M19;M10;M29;M18;M11;M44;M19;M10;M29;M18;M11;M44 |
| | TNGPLKVGGSC | |
| 158 | VLGSLAATVRLQAG | M16;M55;M10;M53;M51;M17;M16;M55;M10;M53;M51;M17 |
| | NATEVPANSTV | |
| 159 | MVLGSLAATVRLQ | M16;M55;M10;M53;M51;M17;M16;M55;M10;M53;M51;M17 |
| | AGNATEVPANST | |
| 160 | RSAAKKNNLPFKLT | M19;M12;M78;M25;M33;M8;M19;M12;M78;M25;M33;M8 |
| | CATTRQVVNVV | |
| 161 | IRSAAKKNNLPFKLT | M19;M12;M78;M25;M33;M8;M19;M12;M78;M25;M33;M8 |
| | CATTRQVVNV | |
| 162 | EQKSILSPLYAFASE | M21;M6;M48;M45;M49;M22;M21;M6;M48;M45;M49;M22 |
| | AARVVRSIFS | |
| 163 | NIGEQKSILSPLYAF | M21;M6;M48;M45;M49;M22;M21;M6;M48;M45;M49;M22 |
| | ASEAARVVRS | |
| 164 | IGEQKSILSPLYAFA | M21;M6;M48;M45;M49;M22;M21;M6;M48;M45;M49;M22 |
| | SEAARVVRSI | |
| 165 | GEQKSILSPLYAFAS | M21;M6;M48;M45;M49;M22;M21;M6;M48;M45;M49;M22 |
| | EAARVVRSIF | |
| 166 | NLKTLLSLREVRTIK | M14;M29;M6;M72;M49;M26;M14;M29;M6;M72;M49;M26 |
| | VFTTVDNINL | |
| 167 | LKTLLSLREVRTIKV | M14;M29;M6;M72;M49;M26;M14;M29;M6;M72;M49;M26 |
| | FTTVDNINLH | |
| 168 | REVGFVVPGLPGTIL | M64;M11;M12;M1;M6;M9;M64;M11;M12;M1;M6;M9 |
| | RTTNGDFLHF | |
| 169 | TREVGFVVPGLPGTI | M64;M11;M12;M1;M6;M9;M64;M11;M12;M1;M6;M9 |
| | LRTTNGDFLH | |
| 170 | EVRTIKVFTTVDNIN | M29;M51;M67;M43;M42;M26;M29;M51;M67;M43;M42;M26 |
| | LHTQVVDMSM | |
| 171 | PYFFTLLLQLCTFTR | M19;M25;M33;M8;M42;M39;M19;M25;M33;M8;M42;M39 |
| | STNSRIKASM | |
| 172 | YFFTLLLQLCTFTRS | M19;M25;M33;M8;M42;M39;M19;M25;M33;M8;M42;M39 |
| | TNSRIKASMP | |
| 173 | QLCTFTRSTNSRIKA | M14;M33;M8;M42;M39;M11;M14;M33;M8;M42;M39;M11 |
| | SMPTTIAKNT | |
| 174 | LQLCTFTRSTNSRIK | M14;M33;M8;M42;M39;M11;M14;M33;M8;M42;M39;M11 |
| | ASMPTTIAKN | |
| 175 | LLQLCTFTRSTNSRI | M14;M33;M8;M42;M39;M11;M14;M33;M8;M42;M39;M11 |
| | KASMPTTIAK | |
| 176 | RVSAKPPPGDQFKH | M56;M19;M16;M54;M25;M34;M60;M18;M15;M52;M39;M47 |
| | LIPLMYKGLPW | |
| 177 | AKPPPGDQFKHLIPL | M56;M19;M16;M54;M25;M34;M60;M18;M15;M52;M39;M47 |
| | MYKGLPWNVV | |
| 178 | VSAKPPPGDQFKHLI | M56;M19;M16;M54;M25;M34;M60;M18;M15;M52;M39;M47 |
| | PLMYKGLPWN | |
| 179 | SAKPPPGDQFKHLIP | M56;M19;M16;M54;M25;M34;M60;M18;M15;M52;M39;M47 |
| | LMYKGLPWNV | |
| 180 | KLVNKFLALCADSII | M34;M45;M41;M67;M8;M39;M34;M45;M41;M67;M8;M39 |
| | IGGAKLKALN | |
| 181 | LGTEVNEFACVVAD | M14;M66;M25;M34;M8;M39;M14;M66;M25;M34;M8;M39 |
| | AVIKTLQPVSE | |
| 182 | ELGTEVNEFACVVA | M14;M66;M25;M34;M8;M39;M14;M66;M25;M34;M8;M39 |
| | DAVIKTLQPVS | |
| 183 | TVELGTEVNEFACV | M14;M66;M25;M34;M8;M39;M14;M66;M25;M34;M8;M39 |
| | VADAVIKTLQP | |
| 184 | VELGTEVNEFACVV | M14;M66;M25;M34;M8;M39;M14;M66;M25;M34;M8;M39 |
| | ADAVIKTLQPV | |
| 185 | TLLLQLCTFTRSTNS | M14;M25;M33;M8;M42;M39;M14;M25;M33;M8;M42;M39 |
| | RIKASMPTTI | |
| 186 | MPNMLRIMASLVLA | M56;M21;M12;M5;M30;M69;M41;M35;M46;M39;M22;M23 |
| | RKHTTCCSLSH | |
| 187 | GLNGYTVEEAKTVL | M19;M78;M60;M45;M39;M9;M19;M78;M60;M45;M39;M9 |
| | KKCKSAFYILP | |
| 188 | VPYCYDTNVLEGSV | M12;M14;M5;M34;M29;M46;M12;M14;M5;M34;M29;M46 |
| | AYESLRPDTRY | |
| 189 | NYITTYPGQGLNGY | M75;M70;M45;M63;M76;M39;M75;M70;M45;M63;M76;M39 |
| | TVEEAKTVLKK | |
| 190 | FYVYANGGKGFCK | M45;M41;M42;M8;M43;M39;M45;M41;M42;M8;M43;M39 |
| | LHNWNCVNCDTF | |
| 191 | YANGGKGFCKLHN | M45;M41;M42;M8;M43;M39;M45;M41;M42;M8;M43;M39 |
| | WNCVNCDTFCAG | |
| 192 | ANGGKGFCKLHNW | M45;M41;M42;M8;M43;M39;M45;M41;M42;M8;M43;M39 |
| | NCVNCDTFCAGS | |
| 193 | VYANGGKGFCKLH | M45;M41;M42;M8;M43;M39;M45;M41;M42;M8;M43;M39 |
| | NWNCVNCDTFCA | |
| 194 | YVYANGGKGFCKL | M45;M41;M42;M8;M43;M39;M45;M41;M42;M8;M43;M39 |
| | HNWNCVNCDTFC | |
| 195 | DTANPKTPKYKFVR | M40;M14;M34;M30;M29;M39;M40;M14;M34;M30;M29;M39 |
| | IQPGQTFSVLA | |
| 196 | TANPKTPKYKFVRI | M40;M14;M34;M30;M29;M39;M40;M14;M34;M30;M29;M39 |
| | QPGQTFSVLAC | |
| 197 | ANPKTPKYKFVRIQ | M40;M14;M34;M30;M29;M39;M40;M14;M34;M30;M29;M39 |
| | PGQTFSVLACY | |
| 198 | NPKTPKYKFVRIQP | M40;M14;M34;M30;M29;M39;M40;M14;M34;M30;M29;M39 |
| | GQTFSVLACYN | |
| 199 | YYHTTDPSFLGRYM | M19;M66;M1;M25;M37;M33;M19;M66;M1;M25;M37;M33 |
| | SALNHTKKWKY | |
| 200 | YHTTDPSFLGRYMS | M19;M66;M1;M25;M37;M33;M19;M66;M1;M25;M37;M33 |
| | ALNHTKKWKYP | |
| 201 | LAKALRKVPTDNYI | M14;M29;M48;M49;M15;M26;M14;M29;M48;M49;M15;M26 |
| | TTYPGQGLNGY | |
| 202 | MLAKALRKVPTDN | M14;M29;M48;M49;M15;M26;M14;M29;M48;M49;M15;M26 |
| | YITTYPGQGLNG | |
| 203 | NFVFPLNSIIKTIQPR | M28;M29;M6;M72;M62;M59;M28;M29;M6;M72;M62;M59 |
| | VEKKKLDGF | |
| 204 | VFPLNSIIKTIQPRVE | M28;M29;M6;M72;M62;M59;M28;M29;M6;M72;M62;M59 |
| | KKKLDGFMG | |
| 205 | PNFVFPLNSIIKTIQP | M28;M29;M6;M72;M62;M59;M28;M29;M6;M72;M62;M59 |
| | RVEKKKLDG | |
| 206 | FVFPLNSIIKTIQPRV | M28;M29;M6;M72;M62;M59;M28;M29;M6;M72;M62;M59 |
| | EKKKLDGFM | |
| 207 | FPLNSIIKTIQPRVEK | M28;M29;M6;M72;M62;M59;M28;M29;M6;M72;M62;M59 |
| | KKLDGFMGR | |
| 208 | YCYDTNVLEGSVAY | M12;M14;M5;M34;M18;M46;M12;M14;M5;M34;M18;M46 |
| | ESLRPDTRYVL | |
| 209 | CYDTNVLEGSVAYE | M12;M14;M5;M34;M18;M46;M12;M14;M5;M34;M18;M46 |
| | SLRPDTRYVLM | |
| 210 | VKDFMSLSEQLRKQ | M56;M19;M66;M25;M6;M18;M56;M19;M66;M25;M6;M18 |
| | IRSAAKKNNLP | |
| 211 | DNLACEDLKPVSEE | M73;M45;M37;M50;M49;M44;M73;M45;M37;M50;M49;M44 |
| | VVENPTIQKDV | |
| 212 | MDNLACEDLKPVSE | M73;M45;M37;M50;M49;M44;M73;M45;M37;M50;M49;M44 |
| | EVVENPTIQKD | |
| 213 | DTNVLEGSVAYESL | M12;M19;M34;M50;M18;M46;M12;M19;M34;M50;M18;M46 |
| | RPDTRYVLMDG | |
| 214 | ASKIITLKKRWQLA | M9;M58;M24;M55;M60;M74;M33;M27;M8;M17;M42;M82 |
| | LSKGVHFVCNL | |
| 215 | SDVLLPLTQYNRYL | M19;M14;M53;M69;M27;M20;M19;M14;M53;M69;M27;M20 |
| | ALYNKYKYFSG | |
| 216 | VLEGSVAYESLRPD | M19;M24;M7;M34;M50;M18;M19;M24;M7;M34;M50;M18 |
| | TRYVLMDGSII | |
| 217 | LEGSVAYESLRPDT | M19;M24;M7;M34;M50;M18;M19;M24;M7;M34;M50;M18 |
| | RYVLMDGSIIQ | |
| 218 | EDLLIRKSNHNFLV | M12;M24;M14;M70;M10;M9;M12;M24;M14;M70;M10;M9 |
| | QAGNVQLRVIG | |
| 219 | NYEDLLIRKSNHNF | M12;M24;M14;M70;M10;M9;M12;M24;M14;M70;M10;M9 |
| | LVQAGNVQLRV | |
| 220 | YEDLLIRKSNHNFL | M12;M24;M14;M70;M10;M9;M12;M24;M14;M70;M10;M9 |
| | VQAGNVQLRVI | |
| 221 | IPGIPKDMTYRRLIS | M40;M58;M16;M31;M25;M34;M30;M43;M15;M42;M39;M47 |
| | MMGFKMNYQV | |
| 222 | VDIPGIPKDMTYRRL | M40;M58;M16;M31;M25;M34;M30;M43;M15;M42;M39;M47 |
| | ISMMGFKMNY | |
| 223 | DIPGIPKDMTYRRLI | M40;M58;M16;M31;M25;M34;M30;M43;M15;M42;M39;M47 |
| | SMMGFKMNYQ | |
| 224 | ADDLNQLTGYKKP | M58;M19;M70;M53;M63;M15;M58;M19;M70;M53;M63;M15 |
| | ASRELKVTFFPD | |
| 225 | AFEYYHTTDPSFLG | M1;M25;M29;M6;M37;M33;M1;M25;M29;M6;M37;M33 |
| | RYMSALNHTKK | |
| 226 | APNMMVTNNTFTL | M11;M12;M24;M10;M6;M9;M11;M12;M24;M10;M6;M9 |
| | KGGAPTKVTFGD | |
| 227 | PNLAWPLIVTALRA | M73;M60;M46;M39;M11;M44;M73;M60;M46;M39;M11;M44 |
| | NSAVKLQNNEL | |
| 228 | SPNLAWPLIVTALR | M73;M60;M46;M39;M11;M44;M73;M60;M46;M39;M11;M44 |
| | ANSAVKLQNNE | |
| 229 | NLAWPLIVTALRAN | M73;M60;M46;M39;M11;M44;M73;M60;M46;M39;M11;M44 |
| | SAVKLQNNELS | |
| 230 | EAFEYYHTTDPSFL | M1;M29;M6;M37;M33;M41;M1;M29;M6;M37;M33;M41 |
| | GRYMSALNHTK | |
| 231 | TTEVVGDIILKPANN | M28;M58;M19;M34;M53;M26;M28;M58;M19;M34;M53;M26 |
| | SLKITEEVGH | |
| 232 | EVVGDIILKPANNSL | M28;M58;M19;M34;M53;M26;M28;M58;M19;M34;M53;M26 |
| | KITEEVGHTD | |
| 233 | VVGDIILKPANNSLK | M28;M58;M19;M34;M53;M26;M28;M58;M19;M34;M53;M26 |
| | ITEEVGHTDL | |
| 234 | TEVVGDIILKPANNS | M28;M58;M19;M34;M53;M26;M28;M58;M19;M34;M53;M26 |
| | LKITEEVGHT | |
| 235 | KEGVEFLRDGWEIV | M4;M21;M6;M74;M49;M22;M4;M21;M6;M74;M49;M22 |
| | KFISTCACEIV | |
| 236 | WAKRNIKPVPEVKI | M9;M54;M66;M60;M74;M48;M57;M27;M43;M49;M42;M22 |
| | LNNLGVDIAAN | |
| 237 | MDNSPNLAWPLIVT | M73;M60;M18;M39;M11;M44;M73;M60;M18;M39;M11;M44 |
| | ALRANSAVKLQ | |
| 238 | KTPKYKFVRIQPGQ | M40;M14;M34;M29;M27;M39;M40;M14;M34;M29;M27;M39 |
| | TFSVLACYNGS | |
| 239 | PKTPKYKFVRIQPG | M40;M14;M34;M29;M27;M39;M40;M14;M34;M29;M27;M39 |
| | QTFSVLACYNG | |
| 240 | TSGRWVLNNDYYR | M34;M33;M43;M42;M39;M44;M34;M33;M43;M42;M39;M44 |
| | SLPGVFCGVDAV | |
| 241 | SGRWVLNNDYYRS | M34;M33;M43;M42;M39;M44;M34;M33;M43;M42;M39;M44 |
| | LPGVFCGVDAVN | |
| 242 | TSNSFDVLKSEDAQ | M64;M6;M41;M46;M39;M22;M64;M6;M41;M46;M39;M22 |
| | GMDNLACEDLK | |
| 243 | GLNNLNRGMVLGS | M12;M16;M55;M10;M53;M17;M12;M16;M55;M10;M53;M17 |
| | LAATVRLQAGNA | |
| 244 | VRQCSGVTFQSAVK | M71;M19;M25;M33;M26;M9;M71;M19;M25;M33;M26;M9 |
| | RTIKGTHHWLL | |
| 245 | PLTQYNRYLALYNK | M19;M55;M67;M27;M42;M20;M19;M55;M67;M27;M42;M20 |
| | YKYFSGAMDTT | |
| 246 | KLNEEIAIILASFSAS | M28;M38;M33;M43;M8;M42;M28;M38;M33;M43;M8;M42 |
| | TSAFVETVK | |
| 247 | ADQAMTQMYKQAR | M56;M19;M55;M25;M74;M18;M56;M19;M55;M25;M74;M18 |
| | SEDKRAKVTSAM | |
| 248 | MADQAMTQMYKQ | M56;M19;M55;M25;M74;M18;M56;M19;M55;M25;M74;M18 |
| | ARSEDKRAKVTSA | |
| 249 | KMADQAMTQMYK | M56;M19;M55;M25;M74;M18;M56;M19;M55;M25;M74;M18 |
| | QARSEDKRAKVTS | |
| 250 | LWSTKPVETSNSFD | M64;M25;M6;M41;M39;M22;M64;M25;M6;M41;M39;M22 |
| | VLKSEDAQGMD | |
| 251 | CVPLNIIPLTTAAKL | M14;M24;M38;M82;M57;M22;M14;M24;M38;M82;M57;M22 |
| | MVVIPDYNTY | |
| 252 | AVANGDSEVVLKK | M71;M13;M55;M1;M53;M17;M71;M13;M55;M1;M53;M17 |
| | LKKSLNVAKSEF | |
| 253 | VANGDSEVVLKKL | M71;M13;M55;M1;M53;M17;M71;M13;M55;M1;M53;M17 |
| | KKSLNVAKSEFD | |
| 254 | LNNDYYRSLPGVFC | M25;M34;M45;M33;M43;M39;M25;M34;M45;M33;M43;M39 |
| | GVDAVNLLTNM | |
| 255 | KIALKGGKIVNNWL | M56;M12;M55;M57;M11;M20;M56;M12;M55;M57;M11;M20 |
| | KQLIKVTLVFL | |
| 256 | TKIALKGGKIVNNW | M56;M12;M55;M57;M11;M20;M56;M12;M55;M57;M11;M20 |
| | LKQLIKVTLVF | |
| 257 | IALKGGKIVNNWLK | M56;M12;M55;M57;M11;M20;M56;M12;M55;M57;M11;M20 |
| | QLIKVTLVFLF | |
| 258 | TTKIALKGGKIVNN | M56;M12;M55;M57;M11;M20;M56;M12;M55;M57;M11;M20 |
| | WLKQLIKVTLV | |
| 259 | PCSVCLSGLDSLDT | M21;M55;M34;M48;M41;M22;M21;M55;M34;M48;M41;M22 |
| | YPSLETIQITI | |
| 260 | IPCSVCLSGLDSLDT | M21;M55;M34;M48;M41;M22;M21;M55;M34;M48;M41;M22 |
| | YPSLETIQIT | |
| 261 | CSVCLSGLDSLDTY | M21;M55;M34;M48;M41;M22;M21;M55;M34;M48;M41;M22 |
| | PSLETIQITIS | |
| 262 | SVCLSGLDSLDTYPS | M21;M55;M34;M48;M41;M22;M21;M55;M34;M48;M41;M22 |
| | LETIQITISS | |
| 263 | SIPCSVCLSGLDSLD | M21;M55;M34;M48;M41;M22;M21;M55;M34;M48;M41;M22 |
| | TYPSLETIQI | |
| 264 | GSIPCSVCLSGLDSL | M21;M55;M34;M48;M41;M22;M21;M55;M34;M48;M41;M22 |
| | DTYPSLETIQ | |
| 265 | VCLSGLDSLDTYPSL | M21;M55;M34;M48;M41;M22;M21;M55;M34;M48;M41;M22 |
| | ETIQITISSF | |
| 266 | WVLNNDYYRSLPG | M34;M45;M33;M43;M42;M39;M34;M45;M33;M43;M42;M39 |
| | VFCGVDAVNLLT | |
| 267 | KLWAQCVQLHNDIL | M21;M32;M58;M36;M68;M22;M21;M32;M58;M36;M68;M22 |
| | LAKDTTEAFEK | |
| 268 | LWAQCVQLHNDILL | M21;M32;M58;M36;M68;M22;M21;M32;M58;M36;M68;M22 |
| | AKDTTEAFEKM | |
| 269 | AQCVQLHNDILLAK | M21;M32;M58;M36;M68;M22;M21;M32;M58;M36;M68;M22 |
| | DTTEAFEKMVS | |
| 270 | WAQCVQLHNDILLA | M21;M32;M58;M36;M68;M22;M21;M32;M58;M36;M68;M22 |
| | KDTTEAFEKMV | |
| 271 | TVSVSSPDAVTAYN | M55;M48;M41;M49;M35;M26;M55;M48;M41;M49;M35;M26 |
| | GYLTSSSKTPE | |
| 272 | ALIISVTSNYSGVVT | M56;M14;M29;M38;M68;M11;M56;M14;M29;M38;M68;M11 |
| | TVMFLARGIV | |
| 273 | ILMTARTVYDDGAR | M5;M6;M72;M11;M59;M20;M5;M6;M72;M11;M59;M20 |
| | RVWTLMNVLTL | |
| 274 | LKKSLNVAKSEFDR | M32;M28;M7;M50;M33;M68;M32;M28;M7;M50;M33;M68 |
| | DAAMQRKLEKM | |
| 275 | NFKFVCDNIKFADD | M40;M64;M21;M19;M22;M23;M40;M64;M21;M19;M22;M23 |
| | LNQLTGYKKPA | |
| 276 | FKFVCDNIKFADDL | M40;M64;M21;M19;M22;M23;M40;M64;M21;M19;M22;M23 |
| | NQLTGYKKPAS | |
| 277 | EQAVANGDSEVVL | M71;M13;M55;M1;M53;M59;M71;M13;M55;M1;M53;M59 |
| | KKLKKSLNVAKS | |
| 278 | VTLVFLFVAAIFYLI | M56;M32;M1;M34;M18;M39;M56;M32;M1;M34;M18;M39 |
| | TPVHVMSKHT | |
| 279 | TLVFLFVAAIFYLITP | M56;M32;M1;M34;M18;M39;M56;M32;M1;M34;M18;M39 |
| | VHVMSKHTD | |
| 280 | QIVTCAKEIKESVQT | M24;M53;M33;M17;M8;M43;M24;M53;M33;M17;M8;M43 |
| | FFKLVNKFLA | |
| 281 | IVTCAKEIKESVQTF | M24;M53;M33;M17;M8;M43;M24;M53;M33;M17;M8;M43 |
| | FKLVNKFLAL | |
| 282 | TGDSCNNYMLTYN | M53;M8;M15;M52;M11;M47;M53;M8;M15;M52;M11;M47 |
| | KVENMTPRDLGA | |
| 283 | VTGDSCNNYMLTY | M53;M8;M15;M52;M11;M47;M53;M8;M15;M52;M11;M47 |
| | NKVENMTPRDLG | |
| 284 | EVTGDSCNNYMLT | M53;M8;M15;M52;M11;M47;M53;M8;M15;M52;M11;M47 |
| | YNKVENMTPRDL | |
| 285 | IEVTGDSCNNYMLT | M53;M8;M15;M52;M11;M47;M53;M8;M15;M52;M11;M47 |
| | YNKVENMTPRD | |
| 286 | GSVGFNIDYDCVSF | M14;M18;M17;M43;M52;M9;M14;M18;M17;M43;M52;M9 |
| | CYMHHMELPTG | |
| 287 | KYCALAPNMMVTN | M11;M24;M10;M6;M50;M9;M11;M24;M10;M6;M50;M9 |
| | NTFTLKGGAPTK | |
| 288 | EKYCALAPNMMVT | M11;M24;M10;M6;M50;M9;M11;M24;M10;M6;M50;M9 |
| | NNTFTLKGGAPT | |
| 289 | TEKYCALAPNMMV | M11;M24;M10;M6;M50;M9;M11;M24;M10;M6;M50;M9 |
| | TNNTFTLKGGAP | |
| 290 | YCALAPNMMVTNN | M11;M24;M10;M6;M50;M9;M11;M24;M10;M6;M50;M9 |
| | TFTLKGGAPTKV | |
| 291 | QRKLEKMADQAMT | M56;M55;M2;M74;M18;M82;M56;M55;M2;M74;M18;M82 |
| | QMYKQARSEDKR | |
| 292 | MQRKLEKMADQA | M56;M55;M2;M74;M18;M82;M56;M55;M2;M74;M18;M82 |
| | MTQMYKQARSEDK | |
| 293 | GQIVTCAKEIKESVQ | M65;M53;M79;M33;M8;M23;M65;M53;M79;M33;M8;M23 |
| | TFFKLVNKFL | |
| 294 | NPKGFCDLKGKYV | M40;M31;M30;M43;M42;M39;M40;M31;M30;M43;M42;M39 |
| | QIPTTCANDPVG | |
| 295 | DGSIIQFPNTYLEGS | M12;M43;M42;M26;M22;M20;M12;M43;M42;M26;M22;M20 |
| | VRVVTTFDSE | |
| 296 | QPQLEMELTPVVQT | M56;M60;M29;M6;M50;M59;M56;M60;M29;M6;M50;M59 |
| | IEVNSFSGYLK | |
| 297 | QLEMELTPVVQTIE | M56;M60;M29;M6;M50;M59;M56;M60;M29;M6;M50;M59 |
| | VNSFSGYLKLT | |
| 298 | LEMELTPVVQTIEV | M56;M60;M29;M6;M50;M59;M56;M60;M29;M6;M50;M59 |
| | NSFSGYLKLTD | |
| 299 | PQLEMELTPVVQTIE | M56;M60;M29;M6;M50;M59;M56;M60;M29;M6;M50;M59 |
| | VNSFSGYLKL | |
| 300 | DGARRVWTLMNVL | M24;M5;M2;M18;M22;M20;M24;M5;M2;M18;M22;M20 |
| | TLVYKVYYGNAL | |
| 301 | GPEHSLAEYHNESG | M13;M58;M16;M53;M17;M39;M13;M58;M16;M53;M17;M39 |
| | LKTILRKGGRT | |
| 302 | SLAEYHNESGLKTIL | M13;M58;M16;M53;M17;M39;M13;M58;M16;M53;M17;M39 |
| | RKGGRTIAFG | |
| 303 | PEHSLAEYHNESGL | M13;M58;M16;M53;M17;M39;M13;M58;M16;M53;M17;M39 |
| | KTILRKGGRTI | |
| 304 | EHSLAEYHNESGLK | M13;M58;M16;M53;M17;M39;M13;M58;M16;M53;M17;M39 |
| | TILRKGGRTIA | |
| 305 | HSLAEYHNESGLKTI | M13;M58;M16;M53;M17;M39;M13;M58;M16;M53;M17;M39 |
| | LRKGGRTIAF | |
| 306 | RSDVLLPLTQYNRY | M14;M53;M61;M69;M27;M20;M14;M53;M61;M69;M27;M20 |
| | LALYNKYKYFS | |
| 307 | ASFYYVWKSYVHV | M24;M1;M34;M37;M35;M23;M24;M1;M34;M37;M35;M23 |
| | VDGCNSSTCMMC | |
| 308 | RSIFSRTLETAQNSV | M54;M24;M5;M34;M2;M9;M54;M24;M5;M34;M2;M9 |
| | RVLQKAAITI | |
| 309 | SIFSRTLETAQNSVR | M54;M24;M5;M34;M2;M9;M54;M24;M5;M34;M2;M9 |
| | VLQKAAITIL | |
| 310 | SIIQFPNTYLEGSVR | M64;M12;M27;M20;M22;M23;M64;M12;M27;M20;M22;M23 |
| | VVTTFDSEYC | |
| 311 | DSCKRVLNVVCKTC | M58;M5;M2;M27;M15;M52;M58;M5;M2;M27;M15;M52 |
| | GQQQTTLKGVE | |
| 312 | TEAFEKMVSLLSVL | M61;M74;M69;M67;M39;M22;M61;M74;M69;M67;M39;M22 |
| | LSMQGAVDINK | |
| 313 | PSIISNEKQEILGTVS | M75;M56;M24;M8;M9;M23;M75;M56;M24;M8;M9;M23 |
| | WNLREMLAH | |
| 314 | ETVKGLDYKAFKQI | M1;M37;M42;M52;M47;M23;M1;M37;M42;M52;M47;M23 |
| | VESCGNFKVTK | |
| 315 | TVKGLDYKAFKQIV | M1;M37;M42;M52;M47;M23;M1;M37;M42;M52;M47;M23 |
| | ESCGNFKVTKG | |
| 316 | QHLKDGTCGLVEVE | M13;M28;M24;M66;M74;M9;M13;M28;M24;M66;M74;M9 |
| | KGVLPQLEQPY | |
| 317 | LKDGTCGLVEVEKG | M13;M28;M24;M66;M74;M9;M13;M28;M24;M66;M74;M9 |
| | VLPQLEQPYVF | |
| 318 | HLKDGTCGLVEVEK | M13;M28;M24;M66;M74;M9;M13;M28;M24;M66;M74;M9 |
| | GVLPQLEQPYV | |
| 319 | TVYEKLKPVLDWLE | M32;M28;M61;M67;M9;M20;M32;M28;M61;M67;M9;M20 |
| | EKFKEGVEFLR | |
| 320 | IANYAKPFLNKVVS | M78;M10;M8;M15;M9;M23;M78;M10;M8;M15;M9;M23 |
| | TTTNIVTRCLN | |
| 321 | KPFLNKVVSTTTNIV | M78;M10;M37;M8;M15;M23;M78;M10;M37;M8;M15;M23 |
| | TRCLNRVCTN | |
| 322 | GTVYEKLKPVLDW | M32;M28;M31;M67;M9;M20;M32;M28;M31;M67;M9;M20 |
| | LEEKFKEGVEFL | |
| 323 | NRATLQAIASEFSSL | M21;M41;M42;M43;M39;M22;M21;M41;M42;M43;M39;M22 |
| | PSYAAFATAQ | |
| 324 | AKLKALNLGETFVT | M71;M24;M55;M50;M18;M27;M71;M24;M55;M50;M18;M27 |
| | HSKGLYRKCVK | |
| 325 | TIKGTHHWLLLTILT | M52;M34;M42;M43;M46;M39;M52;M34;M42;M43;M46;M39 |
| | SLLVLVQSTQ | |
| 326 | IKGTHHWLLLTILTS | M52;M34;M42;M43;M46;M39;M52;M34;M42;M43;M46;M39 |
| | LLVLVQSTQW | |
| 327 | RTIKGTHHWLLLTIL | M52;M34;M42;M43;M46;M39;M52;M34;M42;M43;M46;M39 |
| | TSLLVLVQST | |
| 328 | STTTNIVTRCLNRVC | M64;M78;M6;M37;M69;M20;M64;M78;M6;M37;M69;M20 |
| | TNYMPYFFTL | |
| 329 | YLAVFDKNLYDKL | M70;M41;M42;M49;M43;M39;M70;M41;M42;M49;M43;M39 |
| | VSSFLEMKSEKQ | |
| 330 | LAVFDKNLYDKLVS | M70;M41;M42;M49;M43;M39;M70;M41;M42;M49;M43;M39 |
| | SFLEMKSEKQV | |
| 331 | YFNMVYMPASWV | M32;M52;M83;M15;M46;M39;M32;M52;M83;M15;M46;M39 |
| | MRIMTWLDMVDTS | |
| 332 | NVNKGEDIQLLKSA | M32;M28;M31;M60;M38;M68;M32;M28;M31;M60;M38;M68 |
| | YENFNQHEVLL | |
| 333 | VNKGEDIQLLKSAY | M32;M28;M31;M60;M38;M68;M32;M28;M31;M60;M38;M68 |
| | ENFNQHEVLLA | |
| 334 | PNVNKGEDIQLLKS | M32;M28;M31;M60;M38;M68;M32;M28;M31;M60;M38;M68 |
| | AYENFNQHEVL | |
| 335 | GPNVNKGEDIQLLK | M32;M28;M31;M60;M38;M68;M32;M28;M31;M60;M38;M68 |
| | SAYENFNQHEV | |
| 336 | GETFVTHSKGLYRK | M24;M55;M18;M35;M52;M47;M24;M55;M18;M35;M52;M47 |
| | CVKSREETGLL | |
| 337 | KMSDVKCTSVVLLS | M40;M56;M54;M60;M29;M22;M40;M56;M54;M60;M29;M22 |
| | VLQQLRVESSS | |
| 338 | WLMWLIINLVQMA | M11;M73;M55;M50;M9;M23;M11;M73;M55;M50;M9;M23 |
| | PISAMVRMYIFF | |
| 339 | LMWLIINLVQMAPIS | M11;M73;M55;M50;M9;M23;M11;M73;M55;M50;M9;M23 |
| | AMVRMYIFFA | |
| 340 | AMQTMLFTMLRKL | M16;M43;M15;M52;M9;M47;M16;M43;M15;M52;M9;M47 |
| | DNDALNNIINNA | |
| 341 | SFLGRYMSALNHTK | M24;M5;M25;M61;M74;M33;M24;M5;M25;M61;M74;M33 |
| | KWKYPQVNGLT | |
| 342 | APISAMVRMYIFFAS | M24;M55;M20;M35;M9;M23;M24;M55;M20;M35;M9;M23 |
| | FYYVWKSYVH | |
| 343 | MLCTHTGTGQAITV | M24;M78;M34;M29;M49;M9;M24;M78;M34;M29;M49;M9 |
| | TPEANMDQESF | |
| 344 | THTGTGQAITVTPE | M24;M78;M34;M29;M49;M9;M24;M78;M34;M29;M49;M9 |
| | ANMDQESFGGA | |
| 345 | HTGTGQAITVTPEA | M24;M78;M34;M29;M49;M9;M24;M78;M34;M29;M49;M9 |
| | NMDQESFGGAS | |
| 346 | LCTHTGTGQAITVTP | M24;M78;M34;M29;M49;M9;M24;M78;M34;M29;M49;M9 |
| | EANMDQESFG | |
| 347 | CTHTGTGQAITVTPE | M24;M78;M34;M29;M49;M9;M24;M78;M34;M29;M49;M9 |
| | ANMDQESFGG | |
| 348 | SDVKCTSVVLLSVL | M40;M56;M54;M60;M34;M22;M40;M56;M54;M60;M34;M22 |
| | QQLRVESSSKL | |
| 349 | MPASWVMRIMTWL | M64;M70;M83;M15;M52;M22;M64;M70;M83;M15;M52;M22 |
| | DMVDTSLSGFKL | |
| 350 | EQLDFIDTKRGVYC | M64;M75;M66;M74;M27;M22;M64;M75;M66;M74;M27;M22 |
| | CREHEHEIAWY | |
| 351 | SEQLDFIDTKRGVY | M64;M75;M66;M74;M27;M22;M64;M75;M66;M74;M27;M22 |
| | CCREHEHEIAW | |
| 352 | VLKTGDLQPLEQPT | M54;M58;M60;M38;M17;M15;M54;M58;M60;M38;M17;M15 |
| | SEAVEAPLVGT | |
| 353 | KTGDLQPLEQPTSE | M54;M58;M60;M38;M17;M15;M54;M58;M60;M38;M17;M15 |
| | AVEAPLVGTPV | |
| 354 | EVVLKTGDLQPLEQ | M54;M58;M60;M38;M17;M15;M54;M58;M60;M38;M17;M15 |
| | PTSEAVEAPLV | |
| 355 | LKTGDLQPLEQPTSE | M54;M58;M60;M38;M17;M15;M54;M58;M60;M38;M17;M15 |
| | AVEAPLVGTP | |
| 356 | VVLKTGDLQPLEQP | M54;M58;M60;M38;M17;M15;M54;M58;M60;M38;M17;M15 |
| | TSEAVEAPLVG | |
| 357 | GGQPITNCVKMLCT | M64;M21;M58;M53;M22;M23;M64;M21;M58;M53;M22;M23 |
| | HTGTGQAITVT | |
| 358 | EDMLNPNYEDLLIR | M21;M24;M10;M29;M9;M23;M21;M24;M10;M29;M9;M23 |
| | KSNHNFLVQAG | |
| 359 | KNTVKSVGKFCLEA | M54;M60;M25;M41;M43;M42;M54;M60;M25;M41;M43;M42 |
| | SFNYLKSPNFS | |
| 360 | TLETAQNSVRVLQK | M56;M54;M24;M5;M60;M9;M56;M54;M24;M5;M60;M9 |
| | AAITILDGISQ | |
| 361 | LETAQNSVRVLQKA | M56;M54;M24;M5;M60;M9;M56;M54;M24;M5;M60;M9 |
| | AITILDGISQY | |
| 362 | TEVLTEEVVLKTGD | M54;M58;M60;M38;M17;M62;M54;M58;M60;M38;M17;M62 |
| | LQPLEQPTSEA | |
| 363 | EVLTEEVVLKTGDL | M54;M58;M60;M38;M17;M62;M54;M58;M60;M38;M17;M62 |
| | QPLEQPTSEAV | |
| 364 | KASCTLSEQLDFIDT | M64;M75;M74;M83;M27;M22;M64;M75;M74;M83;M27;M22 |
| | KRGVYCCREH | |
| 365 | ASCTLSEQLDFIDTK | M64;M75;M74;M83;M27;M22;M64;M75;M74;M83;M27;M22 |
| | RGVYCCREHE | |
| 366 | EEAKKVKPTVVVN | M56;M73;M50;M18;M11;M23;M56;M73;M50;M18;M11;M23 |
| | AANVYLKHGGGV | |
| 367 | EAKKVKPTVVVNA | M56;M73;M50;M18;M11;M23;M56;M73;M50;M18;M11;M23 |
| | ANVYLKHGGGVA | |
| 368 | VEEAKKVKPTVVV | M56;M73;M50;M18;M11;M23;M56;M73;M50;M18;M11;M23 |
| | NAANVYLKHGGG | |
| 369 | VYEKLKPVLDWLEE | M32;M61;M67;M27;M9;M20;M32;M61;M67;M27;M9;M20 |
| | KFKEGVEFLRD | |
| 370 | GNALDQAISMWALI | M64;M56;M32;M68;M22;M23;M64;M56;M32;M68;M22;M23 |
| | ISVTSNYSGVV | |
| 371 | NALDQAISMWALIIS | M64;M56;M32;M68;M22;M23;M64;M56;M32;M68;M22;M23 |
| | VTSNYSGVVT | |
| 372 | KPTVVVNAANVYL | M56;M11;M73;M18;M9;M23;M56;M11;M73;M18;M9;M23 |
| | KHGGGVAGALNK | |
| 373 | VLDMCASLKELLQN | M56;M24;M60;M50;M18;M59;M56;M24;M60;M50;M18;M59 |
| | GMNGRTILGSA | |
| 374 | AYYNTTKGGRFVLA | M32;M70;M31;M33;M68;M20;M32;M70;M31;M33;M68;M20 |
| | LLSDLQDLKWA | |
| 375 | KGGRFVLALLSDLQ | M77;M32;M54;M70;M60;M20;M77;M32;M54;M70;M60;M20 |
| | DLKWARFPKSD | |
| 376 | SAMVRMYIFFASFY | M24;M37;M20;M35;M9;M23;M24;M37;M20;M35;M9;M23 |
| | YVWKSYVHVVD | |
| 377 | IAVLDMCASLKELL | M56;M32;M24;M10;M60;M59;M56;M32;M24;M10;M60;M59 |
| | QNGMNGRTILG | |
| 378 | GIAVLDMCASLKEL | M56;M32;M24;M10;M60;M59;M56;M32;M24;M10;M60;M59 |
| | LQNGMNGRTIL | |
| 379 | VQTIEVNSFSGYLKL | M56;M38;M50;M9;M47;M23;M56;M38;M50;M9;M47;M23 |
| | TDNVYIKNAD | |
| 380 | VDLPIGINITRFQTLL | M4;M23;M21;M19;M24;M5;M1;M25;M3;M2;M26;M22;M20 |
| | ALHRSYLTP | |
| 381 | LPIGINITRFQTLLAL | M4;M23;M21;M19;M24;M55;M5;M25;M3;M2;M26;M22;M20 |
| | HRSYLTPGD | |
| 382 | DLPIGINITRFQTLLA | M4;M23;M21;M19;M24;M55;M5;M25;M3;M2;M26;M22;M20 |
| | LHRSYLTPG | |
| 383 | VCSVIDLLLDDFVEII | M4;M52;M14;M16;M3;M48;M18;M42;M8;M43;M15;M35;M47 |
| | KSQDLSVVS | |
| 384 | LSFKELLVYAADPA | M64;M30;M48;M57;M33;M36;M41;M8;M49;M26;M22;M44;M20 |
| | MHAASGNLLLD | |
| 385 | SRLSFKELLVYAAD | M64;M30;M48;M57;M33;M36;M41;M8;M49;M26;M22;M44;M20 |
| | PAMHAASGNLL | |
| 386 | RLSFKELLVYAADP | M64;M30;M48;M57;M33;M36;M41;M8;M49;M26;M22;M44;M20 |
| | AMHAASGNLLL | |
| 387 | CPAEIVDTVSALVY | M12;M28;M16;M7;M29;M6;M38;M50;M8;M17;M35;M59;M23 |
| | DNKLKAHKDKS | |
| 388 | DFGGFNFSQILPDPS | M32;M28;M14;M31;M7;M34;M29;M30;M33;M36;M27;M35;M22 |
| | KPSKRSFIED | |
| 389 | KDFGGFNFSQILPDP | M32;M28;M14;M31;M7;M34;M29;M30;M33;M36;M27;M35;M22 |
| | SKPSKRSFIE | |
| 390 | FGGFNFSQILPDPSK | M32;M28;M14;M31;M7;M34;M29;M30;M33;M36;M27;M35;M22 |
| | PSKRSFIEDL | |
| 391 | LEIPRRNVATLQAE | M28;M54;M60;M29;M2;M6;M45;M38;M27;M46;M39;M59;M20 |
| | NVTGLFKDCSK | |
| 392 | IDLLLDDFVEIIKSQ | M4;M52;M14;M16;M48;M18;M42;M8;M43;M15;M35;M47;M23 |
| | DLSVVSKVVK | |
| 393 | SVIDLLLDDFVEIIKS | M4;M52;M14;M16;M48;M18;M42;M8;M43;M15;M35;M47;M23 |
| | QDLSVVSKV | |
| 394 | VIDLLLDDFVEIIKS | M4;M52;M14;M16;M48;M18;M42;M8;M43;M15;M35;M47;M23 |
| | QDLSVVSKVV | |
| 395 | YKQFDTYNLWNTFT | M71;M58;M14;M16;M54;M25;M34;M53;M60;M19;M17;M15;M39 |
| | RLQSLENVAFN | |
| 396 | DTYNLWNTFTRLQS | M71;M58;M14;M16;M54;M25;M34;M60;M19;M17;M15;M42;M39 |
| | LENVAFNVVNK | |
| 397 | DLPKEITVATSRTLS | M64;M56;M12;M70;M55;M29;M6;M48;M33;M49;M46;M22;M23 |
| | YYKLGASQRV | |
| 398 | MADSNGTITVEELK | M4;M56;M28;M58;M16;M55;M80;M53;M6;M17;M52;M47;M59 |
| | KLLEQWNLVIG | |
| 399 | IGINITRFQTLLALHR | M23;M21;M9;M19;M24;M55;M5;M10;M25;M2;M48;M22;M20 |
| | SYLTPGDSS | |
| 400 | GINITRFQTLLALHR | M23;M21;M9;M19;M24;M55;M5;M10;M25;M2;M48;M22;M20 |
| | SYLTPGDSSS | |
| 401 | YPSARIVYTACSHA | M64;M21;M28;M14;M5;M60;M29;M38;M67;M17;M49;M46;M22 |
| | AVDALCEKALK | |
| 402 | AMPNMLRIMASLVL | M56;M21;M12;M25;M5;M30;M69;M41;M35;M46;M39;M22;M23 |
| | ARKHTTCCSLS | |
| 403 | GIPKDMTYRRLISM | M40;M58;M16;M31;M25;M34;M30;M46;M43;M15;M42;M39;M47 |
| | MGFKMNYQVNG | |
| 404 | PGIPKDMTYRRLISM | M40;M58;M16;M31;M25;M34;M30;M46;M43;M15;M42;M39;M47 |
| | MGFKMNYQVN | |
| 405 | ALLAVFQSASKIITL | M56;M9;M58;M24;M16;M55;M60;M53;M61;M17;M15;M52;M82 |
| | KKRWQLALSK | |
| 406 | LLAVFQSASKIITLK | M56;M9;M58;M24;M16;M55;M60;M53;M27;M17;M15;M52;M82 |
| | KRWQLALSKG | |
| 407 | VALLAVFQSASKIIT | M9;M58;M24;M55;M60;M53;M61;M17;M35;M15;M52;M26;M82 |
| | LKKRWQLALS | |
| 408 | PPLNRNYVFTGYRV | M4;M40;M24;M31;M1;M38;M3;M37;M41;M8;M43;M42;M39;M44 |
| | TKNSKVQIGEY | |
| 409 | RPPLNRNYVFTGYR | M4;M40;M24;M31;M1;M38;M3;M37;M41;M8;M43;M42;M39;M44 |
| | VTKNSKVQIGE | |
| 410 | PIGINITRFQTLLALH | M4;M23;M21;M9;M19;M24;M55;M5;M10;M25;M3;M2;M22;M20 |
| | RSYLTPGDS | |
| 411 | AVMYMGTLSYEQF | M4;M16;M1;M3;M6;M37;M52;M4;M16;M1;M3;M6;M37;M52 |
| | KKGVQIPCTCGK | |
| 412 | KHGTFTCASEYTGN | M4;M66;M1;M65;M3;M38;M33;M4;M66;M1;M65;M3;M38;M33 |
| | YQCGHYKHITS | |
| 413 | HGTFTCASEYTGNY | M4;M1;M65;M3;M38;M33;M42;M4;M1;M65;M3;M38;M33;M42 |
| | QCGHYKHITSK | |
| 414 | ICYTPSKLIEYTDFA | M4;M49;M3;M48;M63;M41;M62;M4;M49;M3;M48;M63;M41;M62 |
| | TSACVLAAEC | |
| 415 | TPSKLIEYTDFATSA | M14;M29;M3;M48;M63;M41;M62;M14;M29;M3;M48;M63;M41;M62 |
| | CVLAAECTIF | |
| 416 | SAVGNICYTPSKLIE | M3;M48;M63;M41;M8;M43;M42;M3;M48;M63;M41;M8;M43;M42 |
| | YTDFATSACV | |
| 417 | PPIKDFGGFNFSQILP | M4;M32;M28;M14;M31;M1;M34;M29;M30;M33;M36;M27;M35;M22 |
| | DPSKPSKRS | |
| 418 | FSAVGNICYTPSKLI | M3;M48;M41;M8;M49;M43;M42;M3;M48;M41;M8;M49;M43;M42 |
| | EYTDFATSAC | |
| 419 | RVFSAVGNICYTPSK | M3;M48;M41;M8;M49;M43;M42;M3;M48;M41;M8;M49;M43;M42 |
| | LIEYTDFATS | |
| 420 | VFSAVGNICYTPSKL | M3;M48;M41;M8;M49;M43;M42;M3;M48;M41;M8;M49;M43;M42 |
| | IEYTDFATSA | |
| 421 | VGDYFVLTSHTVMP | M54;M16;M55;M60;M34;M29;M45;M51;M18;M42;M43;M15;M46; |
| | LSAPTLVPQEH | M39 |
| 422 | LAWPLIVTALRANS | M73;M60;M51;M46;M39;M11;M44;M73;M60;M51;M46;M39;M11; |
| | AVKLQNNELSP | M44 |
| 423 | VPANSTVLSFCAFA | M32;M12;M28;M48;M36;M8;M49;M32;M12;M28;M48;M36;M8;M49 |
| | VDAAKAYKDYL | |
| 424 | KSILSPLYAFASEAA | M21;M14;M6;M45;M48;M49;M22;M21;M14;M6;M45;M48;M49;M22 |
| | RVVRSIFSRT | |
| 425 | QKSILSPLYAFASEA | M21;M14;M6;M45;M48;M49;M22;M21;M14;M6;M45;M48;M49;M22 |
| | ARVVRSIFSR | |
| 426 | IPLTTAAKLMVVIPD | M28;M14;M24;M57;M51;M82;M23;M28;M14;M24;M57;M51;M82; |
| | YNTYKNTCDG | M23 |
| 427 | LSPLYAFASEAARV | M14;M6;M45;M48;M49;M22;M59;M14;M6;M45;M48;M49;M22;M59 |
| | VRSIFSRTLET | |
| 428 | ILSPLYAFASEAARV | M14;M6;M45;M48;M49;M22;M59;M14;M6;M45;M48;M49;M22;M59 |
| | VRSIFSRTLE | |
| 429 | KQFDTYNLWNTFTR | M71;M58;M14;M16;M54;M25;M34;M53;M60;M19;M17;M15;M42; |
| | LQSLENVAFNV | M39 |
| 430 | QFDTYNLWNTFTRL | M71;M58;M14;M16;M54;M25;M34;M53;M60;M19;M17;M15;M42; |
| | QSLENVAFNVV | M39 |
| 431 | FDTYNLWNTFTRLQ | M71;M58;M14;M16;M54;M25;M34;M53;M60;M19;M17;M15;M42; |
| | SLENVAFNVVN | M39 |
| 432 | LPDDFTGCVIAWNS | M13;M32;M56;M12;M14;M55;M29;M38;M48;M50;M67;M68;M49; |
| | NNLDSKVGGNY | M26 |
| 433 | NYKLPDDFTGCVIA | M13;M32;M56;M12;M14;M55;M29;M38;M48;M50;M67;M68;M49; |
| | WNSNNLDSKVG | M26 |
| 434 | KLPDDFTGCVIAWN | M13;M32;M56;M12;M14;M55;M29;M38;M48;M50;M67;M68;M49; |
| | SNNLDSKVGGN | M26 |
| 435 | YKLPDDFTGCVIAW | M13;M32;M56;M12;M14;M55;M29;M38;M48;M50;M67;M68;M49; |
| | NSNNLDSKVGG | M26 |
| 436 | GRCDIKDLPKEITVA | M64;M21;M12;M25;M6;M48;M33;M42;M43;M49;M46;M39;M22; |
| | TSRTLSYYKL | M23 |
| 437 | RGMVLGSLAATVRL | M16;M14;M55;M10;M53;M51;M17;M16;M14;M55;M10;M53;M51; |
| | QAGNATEVPAN | M17 |
| 438 | GMVLGSLAATVRL | M16;M14;M55;M10;M53;M51;M17;M16;M14;M55;M10;M53;M51; |
| | QAGNATEVPANS | M17 |
| 439 | TSNPTTFHLDGEVIT | M21;M7;M48;M45;M50;M36;M49;M21;M7;M48;M45;M50;M36;M49 |
| | FDNLKTLLSL | |
| 440 | YTSNPTTFHLDGEVI | M21;M7;M48;M45;M50;M36;M49;M21;M7;M48;M45;M50;M36;M49 |
| | TFDNLKTLLS | |
| 441 | STVLSFCAFAVDAA | M32;M12;M28;M48;M57;M36;M69;M32;M12;M28;M48;M57;M36; |
| | KAYKDYLASGG | M69 |
| 442 | FTLLLQLCTFTRSTN | M19;M14;M25;M33;M8;M42;M39;M19;M14;M25;M33;M8;M42; |
| | SRIKASMPTT | M39 |
| 443 | FFTLLLQLCTFTRST | M19;M14;M25;M33;M8;M42;M39;M19;M14;M25;M33;M8;M42; |
| | NSRIKASMPT | M39 |
| 444 | YITTYPGQGLNGYT | M75;M70;M45;M36;M63;M76;M39;M75;M70;M45;M36;M63;M76; |
| | VEEAKTVLKKC | M39 |
| 445 | AKKNNLPFKLTCAT | M21;M12;M19;M25;M2;M33;M8;M21;M12;M19;M25;M2;M33;M8 |
| | TRQVVNVVTTK | |
| 446 | KKNNLPFKLTCATT | M21;M12;M19;M25;M2;M33;M8;M21;M12;M19;M25;M2;M33;M8 |
| | RQVVNVVTTKI | |
| 447 | NGECPNFVFPLNSII | M28;M19;M29;M6;M61;M50;M72;M28;M19;M29;M6;M61;M50;M72 |
| | KTIQPRVEKK | |
| 448 | LNVGDYFVLTSHTV | M54;M16;M55;M25;M34;M29;M45;M18;M41;M42;M43;M15;M46; |
| | MPLSAPTLVPQ | M39 |
| 449 | YDTNVLEGSVAYES | M12;M14;M19;M34;M50;M18;M46;M12;M14;M19;M34;M50;M18; |
| | LRPDTRYVLMD | M46 |
| 450 | NVGDYFVLTSHTV | M54;M16;M55;M60;M34;M29;M45;M18;M41;M42;M43;M15;M46; |
| | MPLSAPTLVPQE | M39 |
| 451 | TLLSLREVRTIKVFT | M21;M14;M29;M6;M72;M26;M22;M21;M14;M29;M6;M72;M26;M22 |
| | TVDNINLHTQ | |
| 452 | SAAKKNNLPFKLTC | M21;M12;M19;M78;M25;M33;M8;M21;M12;M19;M78;M25;M33;M8 |
| | ATTRQVVNVVT | |
| 453 | AAKKNNLPFKLTCA | M21;M12;M19;M78;M25;M33;M8;M21;M12;M19;M78;M25;M33;M8 |
| | TTRQVVNVVTT | |
| 454 | MPYFFTLLLQLCTFT | M19;M25;M29;M33;M8;M42;M39;M19;M25;M29;M33;M8;M42;M39 |
| | RSTNSRIKAS | |
| 455 | NYMPYFFTLLLQLC | M19;M25;M29;M33;M8;M42;M39;M19;M25;M29;M33;M8;M42;M39 |
| | TFTRSTNSRIK | |
| 456 | YMPYFFTLLLQLCT | M19;M25;M29;M33;M8;M42;M39;M19;M25;M29;M33;M8;M42;M39 |
| | FTRSTNSRIKA | |
| 457 | EEIAIILASFSASTSA | M28;M14;M38;M33;M8;M43;M42;M28;M14;M38;M33;M8;M43;M42 |
| | FVETVKGLD | |
| 458 | LNEEIAIILASFSAST | M28;M14;M38;M33;M8;M43;M42;M28;M14;M38;M33;M8;M43;M42 |
| | SAFVETVKG | |
| 459 | EIAIILASFSASTSAF | M28;M14;M38;M33;M8;M43;M42;M28;M14;M38;M33;M8;M43;M42 |
| | VETVKGLDY | |
| 460 | NEEIAIILASFSASTS | M28;M14;M38;M33;M8;M43;M42;M28;M14;M38;M33;M8;M43;M42 |
| | AFVETVKGL | |
| 461 | GCVPLNIIPLTTAAK | M19;M14;M24;M38;M82;M57;M22;M19;M14;M24;M38;M82;M57; |
| | LMVVIPDYNT | M22 |
| 462 | LPSYAAFATAQEAY | M12;M28;M31;M70;M6;M33;M68;M12;M28;M31;M70;M6;M33;M68 |
| | EQAVANGDSEV | |
| 463 | DNVLSTFISAARQGF | M14;M70;M16;M29;M33;M18;M63;M14;M70;M16;M29;M33;M18; |
| | VDSDVETKDV | M63 |
| 464 | AKALRKVPTDNYIT | M16;M14;M29;M48;M49;M15;M26;M16;M14;M29;M48;M49;M15; |
| | TYPGQGLNGYT | M26 |
| 465 | FKLVNKFLALCADSI | M34;M45;M41;M67;M8;M42;M39;M34;M45;M41;M67;M8;M42;M39 |
| | IIGGAKLKAL | |
| 466 | TFFKLVNKFLALCA | M34;M45;M41;M67;M8;M42;M39;M34;M45;M41;M67;M8;M42;M39 |
| | DSIIIGGAKLK | |
| 467 | FFKLVNKFLALCAD | M34;M45;M41;M67;M8;M42;M39;M34;M45;M41;M67;M8;M42;M39 |
| | SIIIGGAKLKA | |
| 468 | DVVRQCSGVTFQSA | M71;M19;M1;M60;M25;M33;M26;M71;M19;M1;M60;M25;M33;M26 |
| | VKRTIKGTHHW | |
| 469 | CVMYASAVVLLILM | M75;M32;M28;M6;M72;M46;M39;M75;M32;M28;M6;M72;M46;M39 |
| | TARTVYDDGAR | |
| 470 | AAKAYKDYLASGG | M12;M37;M57;M33;M8;M42;M39;M12;M37;M57;M33;M8;M42;M39 |
| | QPITNCVKMLCT | |
| 471 | VLLPLTQYNRYLAL | M19;M14;M55;M53;M27;M42;M20;M19;M14;M55;M53;M27;M42; |
| | YNKYKYFSGAM | M20 |
| 472 | DVLLPLTQYNRYLA | M19;M14;M55;M53;M27;M42;M20;M19;M14;M55;M53;M27;M42; |
| | LYNKYKYFSGA | M20 |
| 473 | LLPLTQYNRYLALY | M19;M14;M55;M53;M27;M42;M20;M19;M14;M55;M53;M27;M42; |
| | NKYKYFSGAMD | M20 |
| 474 | LPLTQYNRYLALYN | M19;M14;M55;M53;M27;M42;M20;M19;M14;M55;M53;M27;M42; |
| | KYKYFSGAMDT | M20 |
| 475 | DNLKTLLSLREVRTI | M32;M14;M31;M29;M6;M49;M26;M32;M14;M31;M29;M6;M49;M26 |
| | KVFTTVDNIN | |
| 476 | GDFLHFLPRVFSAV | M64;M12;M24;M53;M45;M46;M22;M64;M12;M24;M53;M45;M46; |
| | GNICYTPSKLI | M22 |
| 477 | CPNFVFPLNSIIKTIQ | M28;M29;M6;M61;M72;M62;M59;M28;M29;M6;M61;M72;M62;M59 |
| | PRVEKKKLD | |
| 478 | VDTANPKTPKYKFV | M40;M77;M14;M34;M30;M29;M39;M40;M77;M14;M34;M30;M29; |
| | RIQPGQTFSVL | M39 |
| 479 | KVDTANPKTPKYKF | M40;M77;M14;M34;M30;M29;M39;M40;M77;M14;M34;M30;M29; |
| | VRIQPGQTFSV | M39 |
| 480 | VEQRKQDDKKIKAC | M28;M14;M65;M60;M74;M67;M49;M28;M14;M65;M60;M74;M67; |
| | VEEVTTTLEET | M49 |
| 481 | SVEQRKQDDKKIKA | M28;M14;M65;M60;M74;M67;M49;M28;M14;M65;M60;M74;M67; |
| | CVEEVTTTLEE | M49 |
| 482 | NVLEGSVAYESLRP | M19;M24;M7;M34;M50;M18;M46;M19;M24;M7;M34;M50;M18;M46 |
| | DTRYVLMDGSI | |
| 483 | FEYYHTTDPSFLGR | M66;M1;M25;M29;M6;M37;M33;M66;M1;M25;M29;M6;M37;M33 |
| | YMSALNHTKKW | |
| 484 | ASTSAFVETVKGLD | M54;M16;M1;M60;M6;M37;M52;M54;M16;M1;M60;M6;M37;M52 |
| | YKAFKQIVESC | |
| 485 | CDNIKFADDLNQLT | M64;M19;M70;M38;M63;M22;M23;M64;M19;M70;M38;M63;M22; |
| | GYKKPASRELK | M23 |
| 486 | ELAKNVSLDNVLST | M14;M7;M29;M61;M18;M27;M26;M14;M7;M29;M61;M18;M27; |
| | FISAARQGFVD | M26 |
| 487 | LTSSSKTPEEHFIETI | M64;M40;M16;M30;M29;M68;M8;M64;M40;M16;M30;M29;M68; |
| | SLAGSYKDW | M8 |
| 488 | CALAPNMMVTNNT | M11;M12;M24;M10;M6;M50;M9;M11;M12;M24;M10;M6;M50;M9 |
| | FTLKGGAPTKVT | |
| 489 | LAPNMMVTNNTFTL | M11;M12;M24;M10;M6;M50;M9;M11;M12;M24;M10;M6;M50;M9 |
| | KGGAPTKVTFG | |
| 490 | ALAPNMMVTNNTF | M11;M12;M24;M10;M6;M50;M9;M11;M12;M24;M10;M6;M50;M9 |
| | TLKGGAPTKVTF | |
| 491 | IKFADDLNQLTGYK | M58;M19;M70;M53;M38;M63;M15;M58;M19;M70;M53;M38;M63; |
| | KPASRELKVTF | M15 |
| 492 | FADDLNQLTGYKKP | M58;M19;M70;M53;M38;M63;M15;M58;M19;M70;M53;M38;M63; |
| | ASRELKVTFFP | M15 |
| 493 | NIKFADDLNQLTGY | M58;M19;M70;M53;M38;M63;M15;M58;M19;M70;M53;M38;M63; |
| | KKPASRELKVT | M15 |
| 494 | KFADDLNQLTGYK | M58;M19;M70;M53;M38;M63;M15;M58;M19;M70;M53;M38;M63; |
| | KPASRELKVTFF | M15 |
| 495 | PNYEDLLIRKSNHNF | M12;M24;M14;M70;M10;M9;M23;M12;M24;M14;M70;M10;M9; |
| | LVQAGNVQLR | M23 |
| 496 | NSPNLAWPLIVTAL | M73;M60;M18;M46;M39;M11;M44;M73;M60;M18;M46;M39;M11; |
| | RANSAVKLQNN | M44 |
| 497 | DNSPNLAWPLIVTA | M73;M60;M18;M46;M39;M11;M44;M73;M60;M18;M46;M39;M11; |
| | LRANSAVKLQN | M44 |
| 498 | QDDKKIKACVEEVT | M32;M28;M65;M6;M74;M67;M20;M32;M28;M65;M6;M74;M67;M20 |
| | TTLEETKFLTE | |
| 499 | DDKKIKACVEEVTT | M32;M28;M65;M6;M74;M67;M20;M32;M28;M65;M6;M74;M67;M20 |
| | TLEETKFLTEN | |
| 500 | SASIVAGGIVAIVVT | M21;M12;M60;M6;M62;M22;M59;M21;M12;M60;M6;M62;M22;M59 |
| | CLAYYFMRFR | |
| 501 | SIVAGGIVAIVVTCL | M21;M12;M60;M6;M62;M22;M59;M21;M12;M60;M6;M62;M22;M59 |
| | AYYFMRFRRA | |
| 502 | IVAGGIVAIVVTCLA | M21;M12;M60;M6;M62;M22;M59;M21;M12;M60;M6;M62;M22;M59 |
| | YYFMRFRRAF | |
| 503 | ASIVAGGIVAIVVTC | M21;M12;M60;M6;M62;M22;M59;M21;M12;M60;M6;M62;M22;M59 |
| | LAYYFMRFRR | |
| 504 | FACVVADAVIKTLQ | M28;M78;M45;M79;M49;M82;M47;M28;M78;M45;M79;M49;M82; |
| | PVSELLTPLGI | M47 |
| 505 | VVADAVIKTLQPVS | M28;M78;M45;M79;M49;M82;M47;M28;M78;M45;M79;M49;M82; |
| | ELLTPLGIDLD | M47 |
| 506 | ACVVADAVIKTLQP | M28;M78;M45;M79;M49;M82;M47;M28;M78;M45;M79;M49;M82; |
| | VSELLTPLGID | M47 |
| 507 | EFACVVADAVIKTL | M28;M78;M45;M79;M49;M82;M47;M28;M78;M45;M79;M49;M82; |
| | QPVSELLTPLG | M47 |
| 508 | CVVADAVIKTLQPV | M28;M78;M45;M79;M49;M82;M47;M28;M78;M45;M79;M49;M82; |
| | SELLTPLGIDL | M47 |
| 509 | LSGLDSLDTYPSLET | M21;M55;M34;M29;M48;M41;M22;M21;M55;M34;M29;M48;M41; |
| | IQITISSFKW | M22 |
| 510 | SGLDSLDTYPSLETI | M21;M55;M34;M29;M48;M41;M22;M21;M55;M34;M29;M48;M41; |
| | QITISSFKWD | M22 |
| 511 | CLSGLDSLDTYPSLE | M21;M55;M34;M29;M48;M41;M22;M21;M55;M34;M29;M48;M41; |
| | TIQITISSFK | M22 |
| 512 | KAPKEIIFLEGETLPT | M54;M24;M48;M42;M27;M46;M39;M54;M24;M48;M42;M27;M46; |
| | EVLTEEVVL | M39 |
| 513 | APKEIIFLEGETLPTE | M54;M24;M48;M42;M27;M46;M39;M54;M24;M48;M42;M27;M46; |
| | VLTEEVVLK | M39 |
| 514 | DPSFLGRYMSALNH | M19;M66;M24;M25;M74;M61;M33;M19;M66;M24;M25;M74;M61; |
| | TKKWKYPQVNG | M33 |
| 515 | ERSEKSYELQTPFEI | M12;M58;M24;M25;M34;M17;M39;M12;M58;M24;M25;M34;M17; |
| | KLAKKFDTFN | M39 |
| 516 | EKMADQAMTQMY | M56;M19;M55;M25;M74;M18;M82;M56;M19;M55;M25;M74;M18; |
| | KQARSEDKRAKVT | M82 |
| 517 | LEKMADQAMTQMY | M56;M19;M55;M25;M74;M18;M82;M56;M19;M55;M25;M74;M18; |
| | KQARSEDKRAKV | M82 |
| 518 | LAVFQSASKIITLKK | M56;M9;M58;M24;M16;M55;M60;M53;M74;M27;M17;M15;M52; |
| | RWQLALSKGV | M82 |
| 519 | VSSPDAVTAYNGYL | M24;M55;M48;M41;M49;M35;M26;M24;M55;M48;M41;M49;M35; |
| | TSSSKTPEEHF | M26 |
| 520 | SVSSPDAVTAYNGY | M24;M55;M48;M41;M49;M35;M26;M24;M55;M48;M41;M49;M35; |
| | LTSSSKTPEEH | M26 |
| 521 | VSVSSPDAVTAYNG | M24;M55;M48;M41;M49;M35;M26;M24;M55;M48;M41;M49;M35; |
| | YLTSSSKTPEE | M26 |
| 522 | VLNNDYYRSLPGVF | M25;M34;M45;M33;M42;M43;M39;M25;M34;M45;M33;M42;M43; |
| | CGVDAVNLLTN | M39 |
| 523 | VESDDYIATNGPLK | M11;M73;M10;M29;M18;M9;M44;M11;M73;M10;M29;M18;M9;M44 |
| | VGGSCVLSGHN | |
| 524 | QAVANGDSEVVLK | M71;M13;M55;M1;M53;M17;M59;M71;M13;M55;M1;M53;M17;M59 |
| | KLKKSLNVAKSE | |
| 525 | NASFDNFKFVCDNI | M40;M64;M21;M19;M25;M22;M23;M40;M64;M21;M19;M25;M22; |
| | KFADDLNQLTG | M23 |
| 526 | LHNDILLAKDTTEA | M21;M32;M58;M53;M36;M68;M22;M21;M32;M58;M53;M36;M68; |
| | FEKMVSLLSVL | M22 |
| 527 | CVQLHNDILLAKDT | M21;M32;M58;M53;M36;M68;M22;M21;M32;M58;M53;M36;M68; |
| | TEAFEKMVSLL | M22 |
| 528 | QLHNDILLAKDTTE | M21;M32;M58;M53;M36;M68;M22;M21;M32;M58;M53;M36;M68; |
| | AFEKMVSLLSV | M22 |
| 529 | VQLHNDILLAKDTT | M21;M32;M58;M53;M36;M68;M22;M21;M32;M58;M53;M36;M68; |
| | EAFEKMVSLLS | M22 |
| 530 | QCVQLHNDILLAKD | M21;M32;M58;M53;M36;M68;M22;M21;M32;M58;M53;M36;M68; |
| | TTEAFEKMVSL | M22 |
| 531 | GQQQTTLKGVEAV | M56;M54;M55;M60;M53;M6;M22;M56;M54;M55;M60;M53;M6;M22 |
| | MYMGTLSYEQFK | |
| 532 | VLLILMTARTVYDD | M75;M32;M6;M72;M46;M11;M59;M75;M32;M6;M72;M46;M11;M59 |
| | GARRVWTLMNV | |
| 533 | LILMTARTVYDDGA | M32;M5;M6;M72;M11;M59;M20;M32;M5;M6;M72;M11;M59;M20 |
| | RRVWTLMNVLT | |
| 534 | RATLQAIASEFSSLP | M21;M28;M41;M42;M43;M39;M22;M21;M28;M41;M42;M43;M39; |
| | SYAAFATAQE | M22 |
| 535 | FQHANLDSCKRVLN | M58;M16;M5;M2;M27;M17;M15;M58;M16;M5;M2;M27;M17;M15 |
| | VVCKTCGQQQT | |
| 536 | GDSCNNYMLTYNK | M53;M74;M8;M15;M52;M11;M47;M53;M74;M8;M15;M52;M11; |
| | VENMTPRDLGAC | M47 |
| 537 | LVFLFVAAIFYLITP | M56;M32;M1;M34;M18;M39;M47;M56;M32;M1;M34;M18;M39; |
| | VHVMSKHTDF | M47 |
| 538 | IDYDCVSFCYMHH | M24;M14;M18;M17;M43;M52;M9;M24;M14;M18;M17;M43;M52; |
| | MELPTGVHAGTD | M9 |
| 539 | FNIDYDCVSFCYMH | M24;M14;M18;M17;M43;M52;M9;M24;M14;M18;M17;M43;M52; |
| | HMELPTGVHAG | M9 |
| 540 | NIDYDCVSFCYMHH | M24;M14;M18;M17;M43;M52;M9;M24;M14;M18;M17;M43;M52; |
| | MELPTGVHAGT | M9 |
| 541 | GFNIDYDCVSFCYM | M24;M14;M18;M17;M43;M52;M9;M24;M14;M18;M17;M43;M52; |
| | HHMELPTGVHA | M9 |
| 542 | VGFNIDYDCVSFCY | M24;M14;M18;M17;M43;M52;M9;M24;M14;M18;M17;M43;M52; |
| | MHHMELPTGVH | M9 |
| 543 | SVGFNIDYDCVSFC | M24;M14;M18;M17;M43;M52;M9;M24;M14;M18;M17;M43;M52; |
| | YMHHMELPTGV | M9 |
| 544 | RYVLMDGSIIQFPNT | M48;M41;M43;M49;M42;M26;M22;M48;M41;M43;M49;M42;M26; |
| | YLEGSVRVVT | M22 |
| 545 | TRYVLMDGSIIQFPN | M48;M41;M43;M49;M42;M26;M22;M48;M41;M43;M49;M42;M26; |
| | TYLEGSVRVV | M22 |
| 546 | PDTRYVLMDGSIIQF | M48;M41;M43;M49;M42;M26;M22;M48;M41;M43;M49;M42;M26; |
| | PNTYLEGSVR | M22 |
| 547 | YVLMDGSIIQFPNTY | M48;M41;M43;M49;M42;M26;M22;M48;M41;M43;M49;M42;M26; |
| | LEGSVRVVTT | M22 |
| 548 | VLMDGSIIQFPNTYL | M48;M41;M43;M49;M42;M26;M22;M48;M41;M43;M49;M42;M26; |
| | EGSVRVVTTF | M22 |
| 549 | DTRYVLMDGSIIQFP | M48;M41;M43;M49;M42;M26;M22;M48;M41;M43;M49;M42;M26; |
| | NTYLEGSVRV | M22 |
| 550 | RKLEKMADQAMTQ | M56;M55;M25;M2;M74;M18;M82;M56;M55;M25;M2;M74;M18;M82 |
| | MYKQARSEDKRA | |
| 551 | DSEVVLKKLKKSLN | M32;M28;M55;M53;M74;M33;M68;M32;M28;M55;M53;M74;M33; |
| | VAKSEFDRDAA | M68 |
| 552 | TSVVLLSVLQQLRV | M40;M56;M11;M54;M34;M30;M22;M40;M56;M11;M54;M34;M30; |
| | ESSSKLWAQCV | M22 |
| 553 | IVGDVVQEGVLTAV | M16;M29;M38;M61;M67;M27;M17;M16;M29;M38;M61;M67;M27; |
| | VIPTKKAGGTT | M17 |
| 554 | IFSRTLETAQNSVRV | M54;M24;M5;M34;M60;M2;M9;M54;M24;M5;M34;M60;M2;M9 |
| | LQKAAITILD | |
| 555 | RTVYDDGARRVWT | M5;M2;M18;M52;M22;M47;M20;M5;M2;M18;M52;M22;M47;M20 |
| | LMNVLTLVYKVY | |
| 556 | TVYDDGARRVWTL | M5;M2;M18;M52;M22;M47;M20;M5;M2;M18;M52;M22;M47;M20 |
| | MNVLTLVYKVYY | |
| 557 | EGVLTAVVIPTKKA | M58;M16;M29;M53;M38;M67;M17;M58;M16;M29;M53;M38;M67; |
| | GGTTEMLAKAL | M17 |
| 558 | EGSVRVVTTFDSEY | M64;M48;M27;M20;M43;M22;M23;M64;M48;M27;M20;M43;M22; |
| | CRHGTCERSEA | M23 |
| 559 | GSVRVVTTFDSEYC | M64;M48;M27;M20;M43;M22;M23;M64;M48;M27;M20;M43;M22; |
| | RHGTCERSEAG | M23 |
| 560 | GSIIQFPNTYLEGSV | M64;M12;M20;M43;M42;M22;M23;M64;M12;M20;M43;M42;M22; |
| | RVVTTFDSEY | M23 |
| 561 | VRMYIFFASFYYVW | M21;M24;M1;M37;M35;M9;M23;M21;M24;M1;M37;M35;M9;M23 |
| | KSYVHVVDGCN | |
| 562 | RMYIFFASFYYVWK | M21;M24;M1;M37;M35;M9;M23;M21;M24;M1;M37;M35;M9;M23 |
| | SYVHVVDGCNS | |
| 563 | KALNLGETFVTHSK | M71;M24;M55;M50;M18;M27;M26;M71;M24;M55;M50;M18;M27; |
| | GLYRKCVKSRE | M26 |
| 564 | KLKALNLGETFVTH | M71;M24;M55;M50;M18;M27;M26;M71;M24;M55;M50;M18;M27; |
| | SKGLYRKCVKS | M26 |
| 565 | LNLGETFVTHSKGL | M71;M24;M55;M50;M18;M27;M26;M71;M24;M55;M50;M18;M27; |
| | YRKCVKSREET | M26 |
| 566 | ALNLGETFVTHSKG | M71;M24;M55;M50;M18;M27;M26;M71;M24;M55;M50;M18;M27; |
| | LYRKCVKSREE | M26 |
| 567 | LKALNLGETFVTHS | M71;M24;M55;M50;M18;M27;M26;M71;M24;M55;M50;M18;M27; |
| | KGLYRKCVKSR | M26 |
| 568 | LGETFVTHSKGLYR | M71;M24;M55;M50;M18;M52;M47;M71;M24;M55;M50;M18;M52; |
| | KCVKSREETGL | M47 |
| 569 | HEGKTFYVLPNDDT | M34;M74;M41;M42;M43;M39;M22;M34;M74;M41;M42;M43;M39; |
| | LRVEAFEYYHT | M22 |
| 570 | EGKTFYVLPNDDTL | M34;M74;M41;M42;M43;M39;M22;M34;M74;M41;M42;M43;M39; |
| | RVEAFEYYHTT | M22 |
| 571 | QTIEVNSFSGYLKLT | M56;M38;M50;M8;M9;M47;M23;M56;M38;M50;M8;M9;M47;M23 |
| | DNVYIKNADI | |
| 572 | AYIICISTKHFYWFF | M56;M32;M24;M10;M7;M50;M23;M56;M32;M24;M10;M7;M50; |
| | SNYLKRRVVF | M23 |
| 573 | NYAKPFLNKVVSTT | M78;M10;M37;M8;M15;M9;M23;M78;M10;M37;M8;M15;M9;M23 |
| | TNIVTRCLNRV | |
| 574 | ANYAKPFLNKVVST | M78;M10;M37;M8;M15;M9;M23;M78;M10;M37;M8;M15;M9;M23 |
| | TTNIVTRCLNR | |
| 575 | YAKPFLNKVVSTTT | M78;M10;M37;M8;M15;M9;M23;M78;M10;M37;M8;M15;M9;M23 |
| | NIVTRCLNRVC | |
| 576 | AKPFLNKVVSTTTNI | M78;M10;M37;M8;M15;M9;M23;M78;M10;M37;M8;M15;M9;M23 |
| | VTRCLNRVCT | |
| 577 | LVPFWITIAYIICIST | M56;M32;M24;M10;M7;M60;M23;M56;M32;M24;M10;M7;M60; |
| | KHFYWFFSN | M23 |
| 578 | PLVPFWITIAYIICIST | M56;M32;M24;M10;M7;M60;M23;M56;M32;M24;M10;M7;M60; |
| | KHFYWFFS | M23 |
| 579 | WITIAYIICISTKHFY | M56;M32;M24;M10;M7;M60;M23;M56;M32;M24;M10;M7;M60; |
| | WFFSNYLKR | M23 |
| 580 | TIAYIICISTKHFYWF | M56;M32;M24;M10;M7;M60;M23;M56;M32;M24;M10;M7;M60; |
| | FSNYLKRRV | M23 |
| 581 | ITIAYIICISTKHFYW | M56;M32;M24;M10;M7;M60;M23;M56;M32;M24;M10;M7;M60; |
| | FFSNYLKRR | M23 |
| 582 | FWITIAYIICISTKHF | M56;M32;M24;M10;M7;M60;M23;M56;M32;M24;M10;M7;M60; |
| | YWFFSNYLK | M23 |
| 583 | VPFWITIAYIICISTK | M56;M32;M24;M10;M7;M60;M23;M56;M32;M24;M10;M7;M60; |
| | HFYWFFSNY | M23 |
| 584 | PFWITIAYIICISTKH | M56;M32;M24;M10;M7;M60;M23;M56;M32;M24;M10;M7;M60; |
| | FYWFFSNYL | M23 |
| 585 | TPLVPFWITIAYIICIS | M56;M32;M24;M10;M7;M60;M23;M56;M32;M24;M10;M7;M60; |
| | TKHFYWFF | M23 |
| 586 | SHFVNLDNLRANNT | M64;M40;M31;M53;M43;M46;M39;M64;M40;M31;M53;M43;M46; |
| | KGSLPINVIVF | M39 |
| 587 | TTEAFEKMVSLLSV | M61;M74;M69;M43;M42;M39;M22;M61;M74;M69;M43;M42;M39; |
| | LLSMQGAVDIN | M22 |
| 588 | FNMVYMPASWVMR | M32;M52;M70;M83;M15;M46;M39;M32;M52;M70;M83;M15;M46; |
| | IMTWLDMVDTSL | M39 |
| 589 | LLEIKDTEKYCALAP | M78;M65;M25;M34;M18;M39;M82;M78;M65;M25;M34;M18;M39; |
| | NMMVTNNTFT | M82 |
| 590 | LEIKDTEKYCALAP | M78;M65;M25;M34;M18;M39;M82;M78;M65;M25;M34;M18;M39; |
| | NMMVTNNTFTL | M82 |
| 591 | DVKCTSVVLLSVLQ | M40;M56;M11;M54;M60;M34;M22;M40;M56;M11;M54;M60;M34; |
| | QLRVESSSKLW | M22 |
| 592 | KCTSVVLLSVLQQL | M40;M56;M11;M54;M60;M34;M22;M40;M56;M11;M54;M60;M34; |
| | RVESSSKLWAQ | M22 |
| 593 | VKCTSVVLLSVLQQ | M40;M56;M11;M54;M60;M34;M22;M40;M56;M11;M54;M60;M34; |
| | LRVESSSKLWA | M22 |
| 594 | CTSVVLLSVLQQLR | M40;M56;M11;M54;M60;M34;M22;M40;M56;M11;M54;M60;M34; |
| | VESSSKLWAQC | M22 |
| 595 | MSDVKCTSVVLLSV | M40;M56;M54;M60;M34;M29;M22;M40;M56;M54;M60;M34;M29; |
| | LQQLRVESSSK | M22 |
| 596 | PSFLGRYMSALNHT | M66;M24;M5;M25;M74;M61;M33;M66;M24;M5;M25;M74;M61; |
| | KKWKYPQVNGL | M33 |
| 597 | VGPNVNKGEDIQLL | M77;M32;M28;M31;M60;M38;M68;M77;M32;M28;M31;M60;M38; |
| | KSAYENFNQHE | M68 |
| 598 | VVGPNVNKGEDIQL | M77;M32;M28;M31;M60;M38;M68;M77;M32;M28;M31;M60;M38; |
| | LKSAYENFNQH | M68 |
| 599 | SAMQTMLFTMLRK | M16;M43;M35;M15;M52;M9;M47;M16;M43;M35;M15;M52;M9; |
| | LDNDALNNIINN | M47 |
| 600 | YTVEEAKTVLKKCK | M64;M54;M78;M65;M55;M60;M9;M64;M54;M78;M65;M55;M60; |
| | SAFYILPSIIS | M9 |
| 601 | GYTVEEAKTVLKKC | M64;M54;M78;M65;M55;M60;M9;M64;M54;M78;M65;M55;M60; |
| | KSAFYILPSII | M9 |
| 602 | YEKLKPVLDWLEEK | M32;M61;M57;M67;M27;M9;M20;M32;M61;M57;M67;M27;M9; |
| | FKEGVEFLRDG | M20 |
| 603 | EKLKPVLDWLEEKF | M32;M61;M57;M67;M27;M9;M20;M32;M61;M57;M67;M27;M9; |
| | KEGVEFLRDGW | M20 |
| 604 | LDQAISMWALIISVT | M64;M56;M32;M11;M68;M22;M23;M64;M56;M32;M11;M68;M22; |
| | SNYSGVVTTV | M23 |
| 605 | ALDQAISMWALIISV | M64;M56;M32;M11;M68;M22;M23;M64;M56;M32;M11;M68;M22; |
| | TSNYSGVVTT | M23 |
| 606 | YMPASWVMRIMTW | M64;M32;M70;M83;M15;M52;M22;M64;M32;M70;M83;M15;M52; |
| | LDMVDTSLSGFK | M22 |
| 607 | ITPVHVMSKHTDFSS | M56;M21;M53;M17;M52;M26;M47;M56;M21;M53;M17;M52;M26; |
| | EIIGYKAIDG | M47 |
| 608 | SCTLSEQLDFIDTKR | M64;M75;M66;M74;M83;M27;M22;M64;M75;M66;M74;M83;M27; |
| | GVYCCREHEH | M22 |
| 609 | TLSEQLDFIDTKRGV | M64;M75;M66;M74;M83;M27;M22;M64;M75;M66;M74;M83;M27; |
| | YCCREHEHEI | M22 |
| 610 | LSEQLDFIDTKRGV | M64;M75;M66;M74;M83;M27;M22;M64;M75;M66;M74;M83;M27; |
| | YCCREHEHEIA | M22 |
| 611 | CTLSEQLDFIDTKRG | M64;M75;M66;M74;M83;M27;M22;M64;M75;M66;M74;M83;M27; |
| | VYCCREHEHE | M22 |
| 612 | YLITPVHVMSKHTD | M56;M21;M53;M17;M35;M52;M47;M56;M21;M53;M17;M35;M52; |
| | FSSEIIGYKAI | M47 |
| 613 | IFYLITPVHVMSKHT | M56;M21;M53;M17;M35;M52;M47;M56;M21;M53;M17;M35;M52; |
| | DFSSEIIGYK | M47 |
| 614 | AIFYLITPVHVMSKH | M56;M21;M53;M17;M35;M52;M47;M56;M21;M53;M17;M35;M52; |
| | TDFSSEIIGY | M47 |
| 615 | FYLITPVHVMSKHT | M56;M21;M53;M17;M35;M52;M47;M56;M21;M53;M17;M35;M52; |
| | DFSSEIIGYKA | M47 |
| 616 | MLNPNYEDLLIRKS | M21;M24;M70;M10;M29;M9;M23;M21;M24;M70;M10;M29;M9; |
| | NHNFLVQAGNV | M23 |
| 617 | DMLNPNYEDLLIRK | M21;M24;M70;M10;M29;M9;M23;M21;M24;M70;M10;M29;M9; |
| | SNHNFLVQAGN | M23 |
| 618 | SRTLETAQNSVRVL | M56;M54;M24;M5;M34;M60;M9;M56;M54;M24;M5;M34;M60;M9 |
| | QKAAITILDGI | |
| 619 | FSRTLETAQNSVRV | M56;M54;M24;M5;M34;M60;M9;M56;M54;M24;M5;M34;M60;M9 |
| | LQKAAITILDG | |
| 620 | RTLETAQNSVRVLQ | M56;M54;M24;M5;M34;M60;M9;M56;M54;M24;M5;M34;M60;M9 |
| | KAAITILDGIS | |
| 621 | TEEVVLKTGDLQPL | M58;M54;M60;M38;M17;M62;M15;M58;M54;M60;M38;M17;M62; |
| | EQPTSEAVEAP | M15 |
| 622 | VLTEEVVLKTGDLQ | M58;M54;M60;M38;M17;M62;M15;M58;M54;M60;M38;M17;M62; |
| | PLEQPTSEAVE | M15 |
| 623 | LTEEVVLKTGDLQP | M58;M54;M60;M38;M17;M62;M15;M58;M54;M60;M38;M17;M62; |
| | LEQPTSEAVEA | M15 |
| 624 | EEVVLKTGDLQPLE | M58;M54;M60;M38;M17;M62;M15;M58;M54;M60;M38;M17;M62; |
| | QPTSEAVEAPL | M15 |
| 625 | KVKPTVVVNAANV | M56;M11;M73;M50;M18;M9;M23;M56;M11;M73;M50;M18;M9; |
| | YLKHGGGVAGAL | M23 |
| 626 | AKKVKPTVVVNAA | M56;M11;M73;M50;M18;M9;M23;M56;M11;M73;M50;M18;M9; |
| | NVYLKHGGGVAG | M23 |
| 627 | KKVKPTVVVNAAN | M56;M11;M73;M50;M18;M9;M23;M56;M11;M73;M50;M18;M9; |
| | VYLKHGGGVAGA | M23 |
| 628 | VKPTVVVNAANVY | M56;M11;M73;M50;M18;M9;M23;M56;M11;M73;M50;M18;M9; |
| | LKHGGGVAGALN | M23 |
| 629 | AMVRMYIFFASFYY | M21;M24;M37;M20;M35;M9;M23;M21;M24;M37;M20;M35;M9; |
| | VWKSYVHVVDG | M23 |
| 630 | AVLDMCASLKELLQ | M56;M24;M10;M60;M50;M18;M59;M56;M24;M10;M60;M50;M18; |
| | NGMNGRTILGS | M59 |
| 631 | VVQTIEVNSFSGYL | M56;M38;M50;M26;M9;M47;M23;M56;M38;M50;M26;M9;M47; |
| | KLTDNVYIKNA | M23 |
| 632 | PVVQTIEVNSFSGYL | M56;M38;M50;M26;M9;M47;M23;M56;M38;M50;M26;M9;M47; |
| | KLTDNVYIKN | M23 |
| 633 | NTTKGGRFVLALLS | M77;M32;M70;M31;M33;M68;M20;M77;M32;M70;M31;M33;M68; |
| | DLQDLKWARFP | M20 |
| 634 | YNTTKGGRFVLALL | M77;M32;M70;M31;M33;M68;M20;M77;M32;M70;M31;M33;M68; |
| | SDLQDLKWARF | M20 |
| 635 | YYNTTKGGRFVLAL | M77;M32;M70;M31;M33;M68;M20;M77;M32;M70;M31;M33;M68; |
| | LSDLQDLKWAR | M20 |
| 636 | TPPIKDFGGFNFSQIL | M4;M32;M28;M14;M31;M1;M34;M29;M30;M3;M33;M36;M27;M35; |
| | PDPSKPSKR | M22 |
| 637 | SASKIITLKKRWQLA | M9;M58;M24;M55;M60;M53;M74;M33;M42;M27;M8;M17;M15; |
| | LSKGVHFVCN | M52;M82 |
| 638 | QSASKIITLKKRWQL | M9;M58;M24;M55;M60;M53;M74;M33;M42;M27;M8;M17;M15; |
| | ALSKGVHFVC | M52;M82 |
| 639 | EAVMYMGTLSYEQ | M4;M40;M16;M1;M3;M6;M37;M52;M4;M40;M16;M1;M3;M6;M37; |
| | FKKGVQIPCTCG | M52 |
| 640 | VEAVMYMGTLSYE | M4;M40;M16;M1;M3;M6;M37;M52;M4;M40;M16;M1;M3;M6;M37; |
| | QFKKGVQIPCTC | M52 |
| 641 | TFTCASEYTGNYQC | M4;M1;M38;M3;M41;M8;M43;M42;M4;M1;M38;M3;M41;M8;M43; |
| | GHYKHITSKET | M42 |
| 642 | YTPSKLIEYTDFATS | M4;M14;M29;M3;M48;M63;M41;M62;M4;M14;M29;M3;M48;M63; |
| | ACVLAAECTI | M41;M62 |
| 643 | VGNICYTPSKLIEYT | M4;M3;M48;M63;M41;M8;M49;M42;M4;M3;M48;M63;M41;M8; |
| | DFATSACVLA | M49;M42 |
| 644 | GNICYTPSKLIEYTD | M4;M3;M48;M63;M41;M8;M49;M42;M4;M3;M48;M63;M41;M8; |
| | FATSACVLAA | M49;M42 |
| 645 | GTFTCASEYTGNYQ | M4;M1;M65;M3;M38;M33;M43;M42;M4;M1;M65;M3;M38;M33; |
| | CGHYKHITSKE | M43;M42 |
| 646 | FVETVKGLDYKAFK | M4;M54;M1;M3;M37;M42;M52;M47;M4;M54;M1;M3;M37;M42; |
| | QIVESCGNFKV | M52;M47 |
| 647 | AFVETVKGLDYKAF | M4;M54;M1;M3;M37;M42;M52;M47;M4;M54;M1;M3;M37;M42; |
| | KQIVESCGNFK | M52;M47 |
| 648 | VETVKGLDYKAFK | M4;M54;M1;M3;M37;M42;M52;M47;M4;M54;M1;M3;M37;M42; |
| | QIVESCGNFKVT | M52;M47 |
| 649 | LTSQWLTNIFGTVY | M4;M28;M31;M34;M3;M45;M67;M59;M4;M28;M31;M34;M3;M45; |
| | EKLKPVLDWLE | M67;M59 |
| 650 | AVGNICYTPSKLIEY | M3;M48;M63;M41;M8;M49;M43;M42;M3;M48;M63;M41;M8;M49; |
| | TDFATSACVL | M43;M42 |
| 651 | LNNLNRGMVLGSL | M12;M16;M14;M55;M10;M53;M51;M17;M12;M16;M14;M55;M10; |
| | AATVRLQAGNAT | M53;M51;M17 |
| 652 | LNRGMVLGSLAAT | M12;M16;M14;M55;M10;M53;M51;M17;M12;M16;M14;M55;M10; |
| | VRLQAGNATEVP | M53;M51;M17 |
| 653 | NLNRGMVLGSLAA | M12;M16;M14;M55;M10;M53;M51;M17;M12;M16;M14;M55;M10; |
| | TVRLQAGNATEV | M53;M51;M17 |
| 654 | NRGMVLGSLAATV | M12;M16;M14;M55;M10;M53;M51;M17;M12;M16;M14;M55;M10; |
| | RLQAGNATEVPA | M53;M51;M17 |
| 655 | NNLNRGMVLGSLA | M12;M16;M14;M55;M10;M53;M51;M17;M12;M16;M14;M55;M10; |
| | ATVRLQAGNATE | M53;M51;M17 |
| 656 | RCDIKDLPKEITVAT | M64;M56;M21;M12;M55;M25;M6;M48;M33;M42;M43;M49;M46; |
| | SRTLSYYKLG | M39;M22;M23 |
| 657 | KLKTLVATAEAELA | M12;M81;M28;M29;M6;M45;M38;M49;M12;M81;M28;M29;M6; |
| | KNVSLDNVLST | M45;M38;M49 |
| 658 | EKLKTLVATAEAEL | M12;M81;M28;M29;M6;M45;M38;M49;M12;M81;M28;M29;M6; |
| | AKNVSLDNVLS | M45;M38;M49 |
| 659 | EFSSLPSYAAFATAQ | M12;M14;M28;M70;M31;M6;M68;M52;M12;M14;M28;M70;M31; |
| | EAYEQAVANG | M6;M68;M52 |
| 660 | FSSLPSYAAFATAQE | M12;M14;M28;M70;M31;M6;M68;M52;M12;M14;M28;M70;M31; |
| | AYEQAVANGD | M6;M68;M52 |
| 661 | NIIPLTTAAKLMVVI | M28;M14;M24;M38;M57;M51;M82;M23;M28;M14;M24;M38;M57; |
| | PDYNTYKNTC | M51;M82;M23 |
| 662 | LNIIPLTTAAKLMVV | M28;M14;M24;M38;M57;M51;M82;M23;M28;M14;M24;M38;M57; |
| | IPDYNTYKNT | M51;M82;M23 |
| 663 | IIPLTTAAKLMVVIP | M28;M14;M24;M38;M57;M51;M82;M23;M28;M14;M24;M38;M57; |
| | DYNTYKNTCD | M51;M82;M23 |
| 664 | PLNIIPLTTAAKLMV | M28;M14;M24;M38;M57;M51;M82;M23;M28;M14;M24;M38;M57; |
| | VIPDYNTYKN | M51;M82;M23 |
| 665 | NPTTFHLDGEVITFD | M21;M30;M45;M48;M50;M36;M49;M22;M21;M30;M45;M48;M50; |
| | NLKTLLSLRE | M36;M49;M22 |
| 666 | SNPTTFHLDGEVITF | M21;M30;M45;M48;M50;M36;M49;M22;M21;M30;M45;M48;M50; |
| | DNLKTLLSLR | M36;M49;M22 |
| 667 | ITTYPGQGLNGYTV | M75;M70;M25;M45;M36;M63;M76;M39;M75;M70;M25;M45;M36; |
| | EEAKTVLKKCK | M63;M76;M39 |
| 668 | TTYPGQGLNGYTVE | M75;M70;M25;M45;M36;M63;M76;M39;M75;M70;M25;M45;M36; |
| | EAKTVLKKCKS | M63;M76;M39 |
| 669 | LREVRTIKVFTTVD | M21;M29;M6;M51;M43;M42;M26;M22;M21;M29;M6;M51;M43; |
| | NINLHTQVVDM | M42;M26;M22 |
| 670 | FDVVRQCSGVTFQS | M4;M71;M19;M1;M60;M25;M33;M26;M4;M71;M19;M1;M60;M25; |
| | AVKRTIKGTHH | M33;M26 |
| 671 | PFDVVRQCSGVTFQ | M4;M71;M19;M1;M60;M25;M33;M26;M4;M71;M19;M1;M60;M25; |
| | SAVKRTIKGTH | M33;M26 |
| 672 | KQDDKKIKACVEEV | M32;M28;M14;M65;M6;M74;M67;M49;M32;M28;M14;M65;M6; |
| | TTTLEETKFLT | M74;M67;M49 |
| 673 | KHITSKETLYCIDGA | M10;M36;M43;M35;M46;M39;M9;M44;M10;M36;M43;M35;M46; |
| | LLTKSSEYKG | M39;M9;M44 |
| 674 | HITSKETLYCIDGAL | M10;M36;M43;M35;M46;M39;M9;M44;M10;M36;M43;M35;M46; |
| | LTKSSEYKGP | M39;M9;M44 |
| 675 | YKHITSKETLYCIDG | M10;M36;M43;M35;M46;M39;M9;M44;M10;M36;M43;M35;M46; |
| | ALLTKSSEYK | M39;M9;M44 |
| 676 | ITSKETLYCIDGALL | M10;M36;M43;M35;M46;M39;M9;M44;M10;M36;M43;M35;M46; |
| | TKSSEYKGPI | M39;M9;M44 |
| 677 | VYCPRHVICTSEDM | M64;M28;M6;M45;M72;M49;M59;M20;M64;M28;M6;M45;M72; |
| | LNPNYEDLLIR | M49;M59;M20 |
| 678 | CPRHVICTSEDMLN | M64;M28;M6;M45;M72;M49;M59;M20;M64;M28;M6;M45;M72; |
| | PNYEDLLIRKS | M49;M59;M20 |
| 679 | YCPRHVICTSEDML | M64;M28;M6;M45;M72;M49;M59;M20;M64;M28;M6;M45;M72; |
| | NPNYEDLLIRK | M49;M59;M20 |
| 680 | KTLLSLREVRTIKVF | M21;M14;M29;M6;M72;M49;M26;M22;M21;M14;M29;M6;M72; |
| | TTVDNINLHT | M49;M26;M22 |
| 681 | IWNVKDFMSLSEQL | M56;M19;M66;M25;M6;M45;M18;M59;M56;M19;M66;M25;M6; |
| | RKQIRSAAKKN | M45;M18;M59 |
| 682 | NVKDFMSLSEQLRK | M56;M19;M66;M25;M6;M45;M18;M59;M56;M19;M66;M25;M6; |
| | QIRSAAKKNNL | M45;M18;M59 |
| 683 | WNVKDFMSLSEQL | M56;M19;M66;M25;M6;M45;M18;M59;M56;M19;M66;M25;M6; |
| | RKQIRSAAKKNN | M45;M18;M59 |
| 684 | HFLPRVFSAVGNICY | M64;M12;M45;M42;M8;M43;M46;M22;M64;M12;M45;M42;M8; |
| | TPSKLIEYTD | M43;M46;M22 |
| 685 | FLHFLPRVFSAVGNI | M64;M12;M45;M42;M8;M43;M46;M22;M64;M12;M45;M42;M8; |
| | CYTPSKLIEY | M43;M46;M22 |
| 686 | LHFLPRVFSAVGNIC | M64;M12;M45;M42;M8;M43;M46;M22;M64;M12;M45;M42;M8; |
| | YTPSKLIEYT | M43;M46;M22 |
| 687 | LLSLREVRTIKVFTT | M21;M14;M29;M6;M72;M42;M26;M22;M21;M14;M29;M6;M72; |
| | VDNINLHTQV | M42;M26;M22 |
| 688 | FLPRVFSAVGNICYT | M64;M12;M45;M8;M49;M43;M42;M22;M64;M12;M45;M8;M49; |
| | PSKLIEYTDF | M43;M42;M22 |
| 689 | LPRVFSAVGNICYTP | M64;M12;M45;M8;M49;M43;M42;M22;M64;M12;M45;M8;M49; |
| | SKLIEYTDFA | M43;M42;M22 |
| 690 | QVESDDYIATNGPL | M11;M73;M19;M10;M29;M18;M9;M44;M11;M73;M19;M10;M29; |
| | KVGGSCVLSGH | M18;M9;M44 |
| 691 | NAMQVESDDYIATN | M11;M73;M19;M10;M29;M18;M9;M44;M11;M73;M19;M10;M29; |
| | GPLKVGGSCVL | M18;M9;M44 |
| 692 | NNAMQVESDDYIAT | M11;M73;M19;M10;M29;M18;M9;M44;M11;M73;M19;M10;M29; |
| | NGPLKVGGSCV | M18;M9;M44 |
| 693 | AMQVESDDYIATNG | M11;M73;M19;M10;M29;M18;M9;M44;M11;M73;M19;M10;M29; |
| | PLKVGGSCVLS | M18;M9;M44 |
| 694 | MQVESDDYIATNGP | M11;M73;M19;M10;M29;M18;M9;M44;M11;M73;M19;M10;M29; |
| | LKVGGSCVLSG | M18;M9;M44 |
| 695 | QVAKSHNIALIWNV | M32;M28;M66;M1;M6;M37;M72;M68;M32;M28;M66;M1;M6;M37; |
| | KDFMSLSEQLR | M72;M68 |
| 696 | DILLAKDTTEAFEK | M40;M16;M34;M30;M53;M36;M42;M39;M40;M16;M34;M30;M53; |
| | MVSLLSVLLSM | M36;M42;M39 |
| 697 | SLPSYAAFATAQEA | M12;M28;M31;M70;M6;M33;M68;M52;M12;M28;M31;M70;M6; |
| | YEQAVANGDSE | M33;M68;M52 |
| 698 | CGHYKHITSKETLY | M21;M58;M36;M41;M8;M43;M39;M9;M21;M58;M36;M41;M8;M43; |
| | CIDGALLTKSS | M39;M9 |
| 699 | DNYITTYPGQGLNG | M75;M70;M26;M29;M45;M63;M76;M39;M75;M70;M26;M29;M45; |
| | YTVEEAKTVLK | M63;M76;M39 |
| 700 | RKVPTDNYITTYPG | M16;M14;M29;M48;M41;M49;M15;M26;M16;M14;M29;M48;M41; |
| | QGLNGYTVEEA | M49;M15;M26 |
| 701 | ALRKVPTDNYITTY | M16;M14;M29;M48;M41;M49;M15;M26;M16;M14;M29;M48;M41; |
| | PGQGLNGYTVE | M49;M15;M26 |
| 702 | LRKVPTDNYITTYP | M16;M14;M29;M48;M41;M49;M15;M26;M16;M14;M29;M48;M41; |
| | GQGLNGYTVEE | M49;M15;M26 |
| 703 | KALRKVPTDNYITT | M16;M14;M29;M48;M41;M49;M15;M26;M16;M14;M29;M48;M41; |
| | YPGQGLNGYTV | M49;M15;M26 |
| 704 | SLDNVLSTFISAARQ | M14;M70;M16;M29;M61;M33;M18;M63;M14;M70;M16;M29;M61; |
| | GFVDSDVETK | M33;M18;M63 |
| 705 | LDNVLSTFISAARQG | M14;M70;M16;M29;M61;M33;M18;M63;M14;M70;M16;M29;M61; |
| | FVDSDVETKD | M33;M18;M63 |
| 706 | TPEEHFIETISLAGSY | M64;M40;M32;M14;M16;M29;M6;M68;M64;M40;M32;M14;M16; |
| | KDWSYSGQS | M29;M6;M68 |
| 707 | GQGLNGYTVEEAKT | M75;M19;M60;M25;M45;M76;M39;M9;M75;M19;M60;M25;M45; |
| | VLKKCKSAFYI | M76;M39;M9 |
| 708 | QGLNGYTVEEAKTV | M75;M19;M78;M60;M45;M76;M39;M9;M75;M19;M78;M60;M45; |
| | LKKCKSAFYIL | M76;M39;M9 |
| 709 | YASAVVLLILMTAR | M75;M32;M28;M6;M72;M46;M39;M59;M75;M32;M28;M6;M72; |
| | TVYDDGARRVW | M46;M39;M59 |
| 710 | VMYASAVVLLILMT | M75;M32;M28;M6;M72;M46;M39;M59;M75;M32;M28;M6;M72; |
| | ARTVYDDGARR | M46;M39;M59 |
| 711 | MYASAVVLLILMTA | M75;M32;M28;M6;M72;M46;M39;M59;M75;M32;M28;M6;M72; |
| | RTVYDDGARRV | M46;M39;M59 |
| 712 | VVSTTTNIVTRCLNR | M4;M64;M78;M1;M6;M37;M69;M20;M4;M64;M78;M1;M6;M37; |
| | VCTNYMPYFF | M69;M20 |
| 713 | KVVSTTTNIVTRCL | M4;M64;M78;M1;M6;M37;M69;M20;M4;M64;M78;M1;M6;M37; |
| | NRVCTNYMPYF | M69;M20 |
| 714 | VSTTTNIVTRCLNRV | M4;M64;M78;M1;M6;M37;M69;M20;M4;M64;M78;M1;M6;M37; |
| | CTNYMPYFFT | M69;M20 |
| 715 | TDPSFLGRYMSALN | M19;M66;M24;M1;M25;M61;M37;M33;M19;M66;M24;M1;M25; |
| | HTKKWKYPQVN | M61;M37;M33 |
| 716 | TTDPSFLGRYMSAL | M19;M66;M24;M1;M25;M61;M37;M33;M19;M66;M24;M1;M25; |
| | NHTKKWKYPQV | M61;M37;M33 |
| 717 | HTTDPSFLGRYMSA | M19;M66;M24;M1;M25;M61;M37;M33;M19;M66;M24;M1;M25; |
| | LNHTKKWKYPQ | M61;M37;M33 |
| 718 | AYKDYLASGGQPIT | M56;M12;M24;M53;M37;M33;M8;M39;M56;M12;M24;M53;M37; |
| | NCVKMLCTHTG | M33;M8;M39 |
| 719 | LTLGVYDYLVSTQE | M40;M31;M34;M30;M6;M8;M43;M42;M40;M31;M34;M30;M6;M8; |
| | FRYMNSQGLLP | M43;M42 |
| 720 | KLEKMADQAMTQM | M56;M19;M55;M25;M2;M74;M18;M82;M56;M19;M55;M25;M2; |
| | YKQARSEDKRAK | M74;M18;M82 |
| 721 | ECPNFVFPLNSIIKTI | M28;M29;M6;M61;M50;M72;M62;M59;M28;M29;M6;M61;M50; |
| | QPRVEKKKL | M72;M62;M59 |
| 722 | NEFACVVADAVIKT | M28;M78;M45;M79;M49;M39;M82;M47;M28;M78;M45;M79;M49; |
| | LQPVSELLTPL | M39;M82;M47 |
| 723 | KFVCDNIKFADDLN | M40;M64;M21;M19;M70;M63;M22;M23;M40;M64;M21;M19;M70; |
| | QLTGYKKPASR | M63;M22;M23 |
| 724 | VCDNIKFADDLNQL | M40;M64;M21;M19;M70;M63;M22;M23;M40;M64;M21;M19;M70; |
| | TGYKKPASREL | M63;M22;M23 |
| 725 | FVCDNIKFADDLNQ | M40;M64;M21;M19;M70;M63;M22;M23;M40;M64;M21;M19;M70; |
| | LTGYKKPASRE | M63;M22;M23 |
| 726 | EQRKQDDKKIKACV | M32;M28;M14;M65;M60;M74;M67;M49;M32;M28;M14;M65;M60; |
| | EEVTTTLEETK | M74;M67;M49 |
| 727 | QRKQDDKKIKACVE | M32;M28;M14;M65;M60;M74;M67;M49;M32;M28;M14;M65;M60; |
| | EVTTTLEETKF | M74;M67;M49 |
| 728 | TDNYITTYPGQGLN | M75;M70;M26;M29;M48;M63;M49;M76;M75;M70;M26;M29;M48; |
| | GYTVEEAKTVL | M63;M49;M76 |
| 729 | MDGSIIQFPNTYLEG | M12;M48;M41;M43;M49;M42;M26;M22;M12;M48;M41;M43;M49; |
| | SVRVVTTFDS | M42;M26;M22 |
| 730 | LMDGSIIQFPNTYLE | M12;M48;M41;M43;M49;M42;M26;M22;M12;M48;M41;M43;M49; |
| | GSVRVVTTFD | M42;M26;M22 |
| 731 | DNIKFADDLNQLTG | M64;M58;M19;M70;M53;M38;M63;M15;M64;M58;M19;M70;M53; |
| | YKKPASRELKV | M38;M63;M15 |
| 732 | VVLLILMTARTVYD | M75;M32;M6;M72;M46;M39;M11;M59;M75;M32;M6;M72;M46; |
| | DGARRVWTLMN | M39;M11;M59 |
| 733 | LNGYTVEEAKTVLK | M54;M78;M65;M55;M60;M45;M39;M9;M54;M78;M65;M55;M60; |
| | KCKSAFYILPS | M45;M39;M9 |
| 734 | GHYKHITSKETLYCI | M21;M58;M10;M46;M36;M43;M39;M9;M21;M58;M10;M46;M36; |
| | DGALLTKSSE | M43;M39;M9 |
| 735 | KNVSLDNVLSTFISA | M14;M16;M29;M61;M33;M18;M27;M26;M14;M16;M29;M61;M33; |
| | ARQGFVDSDV | M18;M27;M26 |
| 736 | VSLDNVLSTFISAAR | M14;M16;M29;M61;M33;M18;M27;M26;M14;M16;M29;M61;M33; |
| | QGFVDSDVET | M18;M27;M26 |
| 737 | AKNVSLDNVLSTFIS | M14;M16;M29;M61;M33;M18;M27;M26;M14;M16;M29;M61;M33; |
| | AARQGFVDSD | M18;M27;M26 |
| 738 | NVSLDNVLSTFISAA | M14;M16;M29;M61;M33;M18;M27;M26;M14;M16;M29;M61;M33; |
| | RQGFVDSDVE | M18;M27;M26 |
| 739 | FTPLVPFWITIAYIICI | M56;M32;M24;M10;M7;M60;M8;M23;M56;M32;M24;M10;M7;M60; |
| | STKHFYWF | M8;M23 |
| 740 | MFTPLVPFWITIAYII | M56;M32;M24;M10;M7;M60;M8;M23;M56;M32;M24;M10;M7;M60; |
| | CISTKHFYW | M8;M23 |
| 741 | MPLKAPKEIIFLEGE | M54;M24;M60;M48;M42;M27;M46;M39;M54;M24;M60;M48;M42; |
| | TLPTEVLTEE | M27;M46;M39 |
| 742 | LMPLKAPKEIIFLEG | M54;M24;M60;M48;M42;M27;M46;M39;M54;M24;M60;M48;M42; |
| | ETLPTEVLTE | M27;M46;M39 |
| 743 | LKAPKEIIFLEGETLP | M54;M24;M60;M48;M42;M27;M46;M39;M54;M24;M60;M48;M42; |
| | TEVLTEEVV | M27;M46;M39 |
| 744 | PLKAPKEIIFLEGETL | M54;M24;M60;M48;M42;M27;M46;M39;M54;M24;M60;M48;M42; |
| | PTEVLTEEV | M27;M46;M39 |
| 745 | LLMPLKAPKEIIFLE | M54;M24;M60;M48;M42;M27;M46;M39;M54;M24;M60;M48;M42; |
| | GETLPTEVLT | M27;M46;M39 |
| 746 | NKVVSTTTNIVTRC | M4;M64;M23;M78;M1;M37;M69;M20;M4;M64;M23;M78;M1;M37; |
| | LNRVCTNYMPY | M69;M20 |
| 747 | SHEGKTFYVLPNDD | M34;M74;M63;M41;M42;M43;M39;M22;M34;M74;M63;M41;M42; |
| | TLRVEAFEYYH | M43;M39;M22 |
| 748 | NSHEGKTFYVLPND | M34;M74;M63;M41;M42;M43;M39;M22;M34;M74;M63;M41;M42; |
| | DTLRVEAFEYY | M43;M39;M22 |
| 749 | VAYESLRPDTRYVL | M25;M34;M48;M50;M41;M43;M42;M39;M25;M34;M48;M50;M41; |
| | MDGSIIQFPNT | M43;M42;M39 |
| 750 | ATLQAIASEFSSLPS | M21;M28;M31;M41;M42;M43;M39;M22;M21;M28;M31;M41;M42; |
| | YAAFATAQEA | M43;M39;M22 |
| 751 | NLDSCKRVLNVVCK | M58;M16;M5;M2;M27;M17;M15;M52;M58;M16;M5;M2;M27;M17; |
| | TCGQQQTTLKG | M15;M52 |
| 752 | QHANLDSCKRVLN | M58;M16;M5;M2;M27;M17;M15;M52;M58;M16;M5;M2;M27;M17; |
| | VVCKTCGQQQTT | M15;M52 |
| 753 | LDSCKRVLNVVCKT | M58;M16;M5;M2;M27;M17;M15;M52;M58;M16;M5;M2;M27;M17; |
| | CGQQQTTLKGV | M15;M52 |
| 754 | ANLDSCKRVLNVVC | M58;M16;M5;M2;M27;M17;M15;M52;M58;M16;M5;M2;M27;M17; |
| | KTCGQQQTTLK | M15;M52 |
| 755 | HANLDSCKRVLNV | M58;M16;M5;M2;M27;M17;M15;M52;M58;M16;M5;M2;M27;M17; |
| | VCKTCGQQQTTL | M15;M52 |
| 756 | LNPNYEDLLIRKSN | M21;M14;M70;M24;M10;M29;M9;M23;M21;M14;M70;M24;M10; |
| | HNFLVQAGNVQ | M29;M9;M23 |
| 757 | CAKEIKESVQTFFKL | M16;M24;M53;M17;M43;M42;M39;M47;M16;M24;M53;M17;M43; |
| | VNKFLALCAD | M42;M39;M47 |
| 758 | DTEKYCALAPNMM | M11;M9;M24;M78;M10;M34;M6;M82;M11;M9;M24;M78;M10;M34; |
| | VTNNTFTLKGGA | M6;M82 |
| 759 | LTPVVQTIEVNSFSG | M56;M60;M29;M38;M6;M50;M26;M47;M56;M60;M29;M38;M6; |
| | YLKLTDNVYI | M50;M26;M47 |
| 760 | ELTPVVQTIEVNSFS | M56;M60;M29;M38;M6;M50;M26;M47;M56;M60;M29;M38;M6; |
| | GYLKLTDNVY | M50;M26;M47 |
| 761 | VYDDGARRVWTLM | M24;M5;M2;M18;M52;M22;M47;M20;M24;M5;M2;M18;M52;M22; |
| | NVLTLVYKVYYG | M47;M20 |
| 762 | YDDGARRVWTLMN | M24;M5;M2;M18;M52;M22;M47;M20;M24;M5;M2;M18;M52;M22; |
| | VLTLVYKVYYGN | M47;M20 |
| 763 | DDGARRVWTLMNV | M24;M5;M2;M18;M52;M22;M47;M20;M24;M5;M2;M18;M52;M22; |
| | LTLVYKVYYGNA | M47;M20 |
| 764 | PNTYLEGSVRVVTT | M64;M40;M48;M27;M20;M43;M22;M23;M64;M40;M48;M27;M20; |
| | FDSEYCRHGTC | M43;M22;M23 |
| 765 | TYLEGSVRVVTTFD | M64;M40;M48;M27;M20;M43;M22;M23;M64;M40;M48;M27;M20; |
| | SEYCRHGTCER | M43;M22;M23 |
| 766 | LEGSVRVVTTFDSE | M64;M40;M48;M27;M20;M43;M22;M23;M64;M40;M48;M27;M20; |
| | YCRHGTCERSE | M43;M22;M23 |
| 767 | NTYLEGSVRVVTTF | M64;M40;M48;M27;M20;M43;M22;M23;M64;M40;M48;M27;M20; |
| | DSEYCRHGTCE | M43;M22;M23 |
| 768 | YLEGSVRVVTTFDS | M64;M40;M48;M27;M20;M43;M22;M23;M64;M40;M48;M27;M20; |
| | EYCRHGTCERS | M43;M22;M23 |
| 769 | DYLASGGQPITNCV | M4;M64;M56;M24;M10;M53;M22;M23;M4;M64;M56;M24;M10; |
| | KMLCTHTGTGQ | M53;M22;M23 |
| 770 | VYLAVFDKNLYDK | M56;M70;M55;M41;M42;M49;M43;M39;M56;M70;M55;M41;M42; |
| | LVSSFLEMKSEK | M49;M43;M39 |
| 771 | IIQFPNTYLEGSVRV | M64;M40;M12;M27;M20;M43;M22;M23;M64;M40;M12;M27;M20; |
| | VTTFDSEYCR | M43;M22;M23 |
| 772 | QEGVLTAVVIPTKK | M58;M16;M29;M53;M38;M61;M67;M17;M58;M16;M29;M53;M38; |
| | AGGTTEMLAKA | M61;M67;M17 |
| 773 | VQEGVLTAVVIPTK | M58;M16;M29;M53;M38;M61;M67;M17;M58;M16;M29;M53;M38; |
| | KAGGTTEMLAK | M61;M67;M17 |
| 774 | VVQEGVLTAVVIPT | M58;M16;M29;M53;M38;M61;M67;M17;M58;M16;M29;M53;M38; |
| | KKAGGTTEMLA | M61;M67;M17 |
| 775 | SGGQPITNCVKMLC | M4;M64;M21;M56;M58;M53;M22;M23;M4;M64;M21;M56;M58; |
| | THTGTGQAITV | M53;M22;M23 |
| 776 | EMELTPVVQTIEVN | M56;M60;M29;M6;M38;M50;M47;M59;M56;M60;M29;M6;M38; |
| | SFSGYLKLTDN | M50;M47;M59 |
| 777 | NGYTVEEAKTVLKK | M64;M54;M78;M65;M55;M60;M39;M9;M64;M54;M78;M65;M55; |
| | CKSAFYILPSI | M60;M39;M9 |
| 778 | FFASFYYVWKSYVH | M21;M24;M1;M34;M37;M35;M9;M23;M21;M24;M1;M34;M37;M35; |
| | VVDGCNSSTCM | M9;M23 |
| 779 | FASFYYVWKSYVH | M21;M24;M1;M34;M37;M35;M9;M23;M21;M24;M1;M34;M37;M35; |
| | VVDGCNSSTCMM | M9;M23 |
| 780 | MYIFFASFYYVWKS | M21;M24;M1;M34;M37;M35;M9;M23;M21;M24;M1;M34;M37;M35; |
| | YVHVVDGCNSS | M9;M23 |
| 781 | IFFASFYYVWKSYV | M21;M24;M1;M34;M37;M35;M9;M23;M21;M24;M1;M34;M37;M35; |
| | HVVDGCNSSTC | M9;M23 |
| 782 | YIFFASFYYVWKSY | M21;M24;M1;M34;M37;M35;M9;M23;M21;M24;M1;M34;M37;M35; |
| | VHVVDGCNSST | M9;M23 |
| 783 | TVEEAKTVLKKCKS | M64;M54;M16;M78;M65;M55;M60;M9;M64;M54;M16;M78;M65; |
| | AFYILPSIISN | M55;M60;M9 |
| 784 | MVRMYIFFASFYYV | M21;M24;M1;M37;M20;M35;M9;M23;M21;M24;M1;M37;M20;M35; |
| | WKSYVHVVDGC | M9;M23 |
| 785 | IAYIICISTKHFYWFF | M56;M32;M24;M10;M7;M60;M50;M23;M56;M32;M24;M10;M7;M60; |
| | SNYLKRRVV | M50;M23 |
| 786 | DTTEAFEKMVSLLS | M53;M61;M74;M69;M42;M43;M39;M22;M53;M61;M74;M69;M42; |
| | VLLSMQGAVDI | M43;M39;M22 |
| 787 | TSAMQTMLFTMLR | M16;M17;M35;M15;M52;M43;M9;M47;M16;M17;M35;M15;M52; |
| | KLDNDALNNIIN | M43;M9;M47 |
| 788 | KSVGKFCLEASFNY | M54;M25;M60;M18;M41;M43;M42;M39;M54;M25;M60;M18;M41; |
| | LKSPNFSKLIN | M43;M42;M39 |
| 789 | VKSVGKFCLEASFN | M54;M25;M60;M18;M41;M43;M42;M39;M54;M25;M60;M18;M41; |
| | YLKSPNFSKLI | M43;M42;M39 |
| 790 | TVKSVGKFCLEASF | M54;M25;M60;M18;M41;M43;M42;M39;M54;M25;M60;M18;M41; |
| | NYLKSPNFSKL | M43;M42;M39 |
| 791 | NTVKSVGKFCLEAS | M54;M25;M60;M18;M41;M43;M42;M39;M54;M25;M60;M18;M41; |
| | FNYLKSPNFSK | M43;M42;M39 |
| 792 | LMLLEIKDTEKYCA | M9;M78;M65;M25;M34;M18;M39;M82;M9;M78;M65;M25;M34; |
| | LAPNMMVTNNT | M18;M39;M82 |
| 793 | MLLEIKDTEKYCAL | M9;M78;M65;M25;M34;M18;M39;M82;M9;M78;M65;M25;M34; |
| | APNMMVTNNTF | M18;M39;M82 |
| 794 | LITPVHVMSKHTDF | M56;M21;M53;M17;M35;M52;M26;M47;M56;M21;M53;M17;M35; |
| | SSEIIGYKAID | M52;M26;M47 |
| 795 | DQAISMWALIISVTS | M64;M56;M32;M11;M38;M68;M22;M23;M64;M56;M32;M11;M38; |
| | NYSGVVTTVM | M68;M22;M23 |
| 796 | AISMWALIISVTSNY | M64;M56;M32;M11;M38;M68;M22;M23;M64;M56;M32;M11;M38; |
| | SGVVTTVMFL | M68;M22;M23 |
| 797 | SMWALIISVTSNYSG | M64;M56;M32;M11;M38;M68;M22;M23;M64;M56;M32;M11;M38; |
| | VVTTVMFLAR | M68;M22;M23 |
| 798 | ISMWALIISVTSNYS | M64;M56;M32;M11;M38;M68;M22;M23;M64;M56;M32;M11;M38; |
| | GVVTTVMFLA | M68;M22;M23 |
| 799 | QAISMWALIISVTSN | M64;M56;M32;M11;M38;M68;M22;M23;M64;M56;M32;M11;M38; |
| | YSGVVTTVMF | M68;M22;M23 |
| 800 | TPVHVMSKHTDFSS | M56;M21;M53;M41;M17;M52;M26;M47;M56;M21;M53;M41;M17; |
| | EIIGYKAIDGG | M52;M26;M47 |
| 801 | TKGGRFVLALLSDL | M77;M32;M70;M31;M60;M33;M68;M20;M77;M32;M70;M31;M60; |
| | QDLKWARFPKS | M33;M68;M20 |
| 802 | TTKGGRFVLALLSD | M77;M32;M70;M31;M60;M33;M68;M20;M77;M32;M70;M31;M60; |
| | LQDLKWARFPK | M33;M68;M20 |
| 803 | PKCDRAMPNMLRI | M56;M21;M12;M54;M25;M30;M48;M69;M41;M42;M8;M49;M43; |
| | MASLVLARKHTT | M46;M39;M22;M23 |
| 804 | YPKCDRAMPNMLRI | M56;M21;M12;M54;M25;M30;M48;M69;M41;M42;M8;M49;M43; |
| | MASLVLARKHT | M46;M39;M22;M23 |
| 805 | DIKDLPKEITVATSR | M64;M56;M21;M12;M55;M25;M29;M6;M48;M33;M42;M43;M49; |
| | TLSYYKLGAS | M46;M39;M22;M23 |
| 806 | IKDLPKEITVATSRT | M64;M56;M21;M12;M55;M25;M29;M6;M48;M33;M42;M43;M49; |
| | LSYYKLGASQ | M46;M39;M22;M23 |
| 807 | CDIKDLPKEITVATS | M64;M56;M21;M12;M55;M25;M29;M6;M48;M33;M42;M43;M49; |
| | RTLSYYKLGA | M46;M39;M22;M23 |
| 808 | AVFQSASKIITLKKR | M56;M9;M58;M24;M16;M55;M60;M53;M74;M33;M42;M27;M8; |
| | WQLALSKGVH | M17;M15;M52;M82 |
| 809 | FQSASKIITLKKRWQ | M56;M9;M58;M24;M16;M55;M60;M53;M74;M33;M42;M27;M8; |
| | LALSKGVHFV | M17;M15;M52;M82 |
| 810 | VFQSASKIITLKKRW | M56;M9;M58;M24;M16;M55;M60;M53;M74;M33;M42;M27;M8; |
| | QLALSKGVHF | M17;M15;M52;M82 |
| 811 | CYTPSKLIEYTDFAT | M4;M49;M14;M29;M3;M48;M63;M41;M62;M4;M49;M14;M29;M3; |
| | SACVLAAECT | M48;M63;M41;M62 |
| 812 | SAFVETVKGLDYKA | M4;M54;M1;M3;M6;M37;M42;M52;M47;M4;M54;M1;M3;M6;M37; |
| | FKQIVESCGNF | M42;M52;M47 |
| 813 | RAMPNMLRIMASLV | M56;M21;M12;M54;M25;M30;M48;M69;M41;M42;M8;M49;M43; |
| | LARKHTTCCSL | M46;M39;M22;M35;M23 |
| 814 | CDRAMPNMLRIMA | M56;M21;M12;M54;M25;M30;M48;M69;M41;M42;M8;M49;M43; |
| | SLVLARKHTTCC | M46;M39;M22;M35;M23 |
| 815 | DRAMPNMLRIMASL | M56;M21;M12;M54;M25;M30;M48;M69;M41;M42;M8;M49;M43; |
| | VLARKHTTCCS | M46;M39;M22;M35;M23 |
| 816 | KCDRAMPNMLRIM | M56;M21;M12;M54;M25;M30;M48;M69;M41;M42;M8;M49;M43; |
| | ASLVLARKHTTC | M46;M39;M22;M35;M23 |
| 817 | YPGQGLNGYTVEEA | M75;M19;M70;M25;M45;M36;M63;M76;M39;M75;M19;M70;M25; |
| | KTVLKKCKSAF | M45;M36;M63;M76;M39 |
| 818 | TYPGQGLNGYTVEE | M75;M19;M70;M25;M45;M36;M63;M76;M39;M75;M19;M70;M25; |
| | AKTVLKKCKSA | M45;M36;M63;M76;M39 |
| 819 | KDLPKEITVATSRTL | M64;M56;M21;M12;M70;M55;M25;M29;M6;M48;M33;M42;M43; |
| | SYYKLGASQR | M49;M46;M39;M22;M23 |
| 820 | EVGFVVPGLPGTILR | M64;M11;M12;M24;M1;M6;M45;M8;M9;M64;M11;M12;M24;M1; |
| | TTNGDFLHFL | M6;M45;M8;M9 |
| 821 | WEIVKFISTCACEIV | M12;M29;M6;M45;M74;M72;M8;M22;M20;M12;M29;M6;M45;M74; |
| | GGQIVTCAKE | M72;M8;M22;M20 |
| 822 | TVLSFCAFAVDAAK | M32;M12;M28;M70;M48;M57;M36;M69;M63;M32;M12;M28;M70; |
| | AYKDYLASGGQ | M48;M57;M36;M69;M63 |
| 823 | SLREVRTIKVFTTVD | M21;M14;M29;M6;M51;M43;M42;M26;M22;M21;M14;M29;M6; |
| | NINLHTQVVD | M51;M43;M42;M26;M22 |
| 824 | STFNVPMEKLKTLV | M12;M81;M28;M29;M6;M45;M38;M49;M22;M12;M81;M28;M29; |
| | ATAEAELAKNV | M6;M45;M38;M49;M22 |
| 825 | SSTFNVPMEKLKTL | M12;M81;M28;M29;M6;M45;M38;M49;M22;M12;M81;M28;M29; |
| | VATAEAELAKN | M6;M45;M38;M49;M22 |
| 826 | SEFSSLPSYAAFATA | M12;M14;M28;M70;M31;M6;M68;M52;M22;M12;M14;M28;M70; |
| | QEAYEQAVAN | M31;M6;M68;M52;M22 |
| 827 | ASEFSSLPSYAAFAT | M12;M14;M28;M70;M31;M6;M68;M52;M22;M12;M14;M28;M70; |
| | AQEAYEQAVA | M31;M6;M68;M52;M22 |
| 828 | VPLNIIPLTTAAKLM | M28;M14;M22;M24;M38;M57;M51;M82;M23;M28;M14;M22;M24; |
| | VVIPDYNTYK | M38;M57;M51;M82;M23 |
| 829 | LKTLVATAEAELAK | M73;M12;M81;M28;M29;M6;M45;M38;M49;M73;M12;M81;M28; |
| | NVSLDNVLSTF | M29;M6;M45;M38;M49 |
| 830 | PMEKLKTLVATAEA | M12;M81;M28;M29;M6;M45;M38;M49;M59;M12;M81;M28;M29; |
| | ELAKNVSLDNV | M6;M45;M38;M49;M59 |
| 831 | NVPMEKLKTLVATA | M12;M81;M28;M29;M6;M45;M38;M49;M59;M12;M81;M28;M29; |
| | EAELAKNVSLD | M6;M45;M38;M49;M59 |
| 832 | MEKLKTLVATAEAE | M12;M81;M28;M29;M6;M45;M38;M49;M59;M12;M81;M28;M29; |
| | LAKNVSLDNVL | M6;M45;M38;M49;M59 |
| 833 | VPMEKLKTLVATAE | M12;M81;M28;M29;M6;M45;M38;M49;M59;M12;M81;M28;M29; |
| | AELAKNVSLDN | M6;M45;M38;M49;M59 |
| 834 | RAKVTSAMQTMLF | M16;M3;M17;M35;M15;M52;M43;M9;M47;M16;M3;M17;M35;M15; |
| | TMLRKLDNDALN | M52;M43;M9;M47 |
| 835 | AKVTSAMQTMLFT | M16;M3;M17;M35;M15;M52;M43;M9;M47;M16;M3;M17;M35;M15; |
| | MLRKLDNDALNN | M52;M43;M9;M47 |
| 836 | KVTSAMQTMLFTM | M16;M3;M17;M35;M15;M52;M43;M9;M47;M16;M3;M17;M35;M15; |
| | LRKLDNDALNNI | M52;M43;M9;M47 |
| 837 | VTSAMQTMLFTML | M16;M3;M17;M35;M15;M52;M43;M9;M47;M16;M3;M17;M35;M15; |
| | RKLDNDALNNII | M52;M43;M9;M47 |
| 838 | SSLPSYAAFATAQE | M12;M14;M28;M70;M31;M6;M33;M68;M52;M12;M14;M28;M70; |
| | AYEQAVANGDS | M31;M6;M33;M68;M52 |
| 839 | LIWNVKDFMSLSEQ | M56;M28;M66;M19;M25;M6;M45;M18;M59;M56;M28;M66;M19; |
| | LRKQIRSAAKK | M25;M6;M45;M18;M59 |
| 840 | VGFVVPGLPGTILRT | M64;M11;M24;M1;M6;M45;M8;M9;M23;M64;M11;M24;M1;M6; |
| | TNGDFLHFLP | M45;M8;M9;M23 |
| 841 | TPFDVVRQCSGVTF | M4;M71;M54;M19;M1;M60;M25;M46;M26;M4;M71;M54;M19;M1; |
| | QSAVKRTIKGT | M60;M25;M46;M26 |
| 842 | GECPNFVFPLNSIIKT | M28;M19;M29;M6;M61;M50;M72;M62;M59;M28;M19;M29;M6; |
| | IQPRVEKKK | M61;M50;M72;M62;M59 |
| 843 | DAAKAYKDYLASG | M12;M48;M37;M57;M33;M69;M8;M42;M39;M12;M48;M37;M57; |
| | GQPITNCVKMLC | M33;M69;M8;M42;M39 |
| 844 | VVYCPRHVICTSED | M64;M28;M66;M6;M45;M72;M49;M59;M20;M64;M28;M66;M6; |
| | MLNPNYEDLLI | M45;M72;M49;M59;M20 |
| 845 | DVVYCPRHVICTSE | M64;M28;M66;M6;M45;M72;M49;M59;M20;M64;M28;M66;M6; |
| | DMLNPNYEDLL | M45;M72;M49;M59;M20 |
| 846 | RKQDDKKIKACVEE | M32;M28;M14;M65;M60;M6;M74;M67;M49;M32;M28;M14;M65; |
| | VTTTLEETKFL | M60;M6;M74;M67;M49 |
| 847 | DFLHFLPRVFSAVG | M64;M12;M53;M45;M42;M8;M43;M46;M22;M64;M12;M53;M45; |
| | NICYTPSKLIE | M42;M8;M43;M46;M22 |
| 848 | LSLREVRTIKVFTTV | M21;M14;M29;M6;M72;M43;M42;M26;M22;M21;M14;M29;M6; |
| | DNINLHTQVV | M72;M43;M42;M26;M22 |
| 849 | QTFFKLVNKFLALC | M24;M34;M45;M41;M67;M42;M8;M43;M39;M24;M34;M45;M41; |
| | ADSIIIGGAKL | M67;M42;M8;M43;M39 |
| 850 | RPDTRYVLMDGSIIQ | M7;M30;M48;M41;M43;M49;M42;M26;M22;M7;M30;M48;M41; |
| | FPNTYLEGSV | M43;M49;M42;M26;M22 |
| 851 | ASAVVLLILMTART | M75;M32;M28;M6;M72;M46;M39;M11;M59;M75;M32;M28;M6; |
| | VYDDGARRVWT | M72;M46;M39;M11;M59 |
| 852 | SAVVLLILMTARTV | M75;M32;M28;M6;M72;M46;M39;M11;M59;M75;M32;M28;M6; |
| | YDDGARRVWTL | M72;M46;M39;M11;M59 |
| 853 | AVVLLILMTARTVY | M75;M32;M28;M6;M72;M46;M39;M11;M59;M75;M32;M28;M6; |
| | DDGARRVWTLM | M72;M46;M39;M11;M59 |
| 854 | LAKNVSLDNVLSTFI | M14;M16;M7;M29;M61;M33;M18;M27;M26;M14;M16;M7;M29; |
| | SAARQGFVDS | M61;M33;M18;M27;M26 |
| 855 | FDNLKTLLSLREVR | M32;M14;M66;M31;M65;M29;M6;M68;M49;M32;M14;M66;M31; |
| | TIKVFTTVDNI | M65;M29;M6;M68;M49 |
| 856 | TFDNLKTLLSLREV | M32;M14;M66;M31;M65;M29;M6;M68;M49;M32;M14;M66;M31; |
| | RTIKVFTTVDN | M65;M29;M6;M68;M49 |
| 857 | NPNYEDLLIRKSNH | M21;M12;M14;M70;M24;M10;M29;M9;M23;M21;M12;M14;M70; |
| | NFLVQAGNVQL | M24;M10;M29;M9;M23 |
| 858 | GLPGTILRTTNGDFL | M64;M75;M11;M24;M53;M6;M45;M52;M9;M64;M75;M11;M24; |
| | HFLPRVFSAV | M53;M6;M45;M52;M9 |
| 859 | ETSNSFDVLKSEDA | M64;M34;M30;M6;M41;M42;M46;M39;M22;M64;M34;M30;M6; |
| | QGMDNLACEDL | M41;M42;M46;M39;M22 |
| 860 | GEVITFDNLKTLLSL | M32;M66;M31;M65;M30;M29;M36;M68;M49;M32;M66;M31;M65; |
| | REVRTIKVFT | M30;M29;M36;M68;M49 |
| 861 | PTDNYITTYPGQGL | M75;M70;M26;M29;M48;M63;M49;M15;M76;M75;M70;M26;M29; |
| | NGYTVEEAKTV | M48;M63;M49;M15;M76 |
| 862 | SVGKFCLEASFNYL | M54;M19;M25;M60;M18;M41;M43;M42;M39;M54;M19;M25;M60; |
| | KSPNFSKLINI | M18;M41;M43;M42;M39 |
| 863 | VGKFCLEASFNYLK | M54;M19;M25;M60;M18;M41;M43;M42;M39;M54;M19;M25;M60; |
| | SPNFSKLINII | M18;M41;M43;M42;M39 |
| 864 | IQFPNTYLEGSVRVV | M64;M40;M12;M48;M27;M20;M43;M22;M23;M64;M40;M12;M48; |
| | TTFDSEYCRH | M27;M20;M43;M22;M23 |
| 865 | QFPNTYLEGSVRVV | M64;M40;M12;M48;M27;M20;M43;M22;M23;M64;M40;M12;M48; |
| | TTFDSEYCRHG | M27;M20;M43;M22;M23 |
| 866 | FPNTYLEGSVRVVT | M64;M40;M12;M48;M27;M20;M43;M22;M23;M64;M40;M12;M48; |
| | TFDSEYCRHGT | M27;M20;M43;M22;M23 |
| 867 | TGLLMPLKAPKEIIF | M54;M24;M31;M60;M48;M42;M27;M46;M39;M54;M24;M31;M60; |
| | LEGETLPTEV | M48;M42;M27;M46;M39 |
| 868 | GLLMPLKAPKEIIFL | M54;M24;M31;M60;M48;M42;M27;M46;M39;M54;M24;M31;M60; |
| | EGETLPTEVL | M48;M42;M27;M46;M39 |
| 869 | EVITFDNLKTLLSLR | M32;M66;M31;M65;M29;M30;M6;M68;M49;M32;M66;M31;M65; |
| | EVRTIKVFTT | M29;M30;M6;M68;M49 |
| 870 | VITFDNLKTLLSLRE | M32;M66;M31;M65;M29;M30;M6;M68;M49;M32;M66;M31;M65; |
| | VRTIKVFTTV | M29;M30;M6;M68;M49 |
| 871 | ITFDNLKTLLSLREV | M32;M66;M31;M65;M29;M30;M6;M68;M49;M32;M66;M31;M65; |
| | RTIKVFTTVD | M29;M30;M6;M68;M49 |
| 872 | HNSHEGKTFYVLPN | M31;M34;M74;M63;M41;M42;M43;M39;M22;M31;M34;M74;M63; |
| | DDTLRVEAFEY | M41;M42;M43;M39;M22 |
| 873 | RSEKSYELQTPFEIK | M12;M58;M24;M10;M25;M34;M17;M39;M23;M12;M58;M24;M10; |
| | LAKKFDTFNG | M25;M34;M17;M39;M23 |
| 874 | GDSEVVLKKLKKSL | M71;M32;M28;M55;M53;M74;M33;M68;M17;M71;M32;M28;M55; |
| | NVAKSEFDRDA | M53;M74;M33;M68;M17 |
| 875 | LSHFVNLDNLRANN | M64;M40;M31;M30;M53;M43;M46;M39;M22;M64;M40;M31;M30; |
| | TKGSLPINVIV | M53;M43;M46;M39;M22 |
| 876 | EIKDTEKYCALAPN | M78;M65;M25;M34;M6;M82;M18;M39;M9;M78;M65;M25;M34; |
| | MMVTNNTFTLK | M6;M82;M18;M39;M9 |
| 877 | IKDTEKYCALAPNM | M78;M65;M25;M34;M6;M82;M18;M39;M9;M78;M65;M25;M34;M6; |
| | MVTNNTFTLKG | M82;M18;M39;M9 |
| 878 | GGQIVTCAKEIKESV | M56;M55;M65;M10;M53;M79;M33;M8;M23;M56;M55;M65;M10; |
| | QTFFKLVNKF | M53;M79;M33;M8;M23 |
| 879 | KAGQKTYERHSLSH | M64;M40;M70;M31;M30;M15;M43;M39;M22;M64;M40;M70;M31; |
| | FVNLDNLRANN | M30;M15;M43;M39;M22 |
| 880 | TLQAIASEFSSLPSY | M21;M28;M31;M41;M42;M68;M43;M39;M22;M21;M28;M31;M41; |
| | AAFATAQEAY | M42;M68;M43;M39;M22 |
| 881 | NIFGTVYEKLKPVL | M32;M28;M31;M34;M67;M68;M39;M47;M20;M32;M28;M31;M34; |
| | DWLEEKFKEGV | M67;M68;M39;M47;M20 |
| 882 | FGTVYEKLKPVLDW | M32;M28;M31;M34;M67;M68;M39;M9;M20;M32;M28;M31;M34; |
| | LEEKFKEGVEF | M67;M68;M39;M9;M20 |
| 883 | KDTEKYCALAPNM | M11;M9;M24;M78;M65;M10;M34;M6;M82;M11;M9;M24;M78;M65; |
| | MVTNNTFTLKGG | M10;M34;M6;M82 |
| 884 | ELQTPFEIKLAKKFD | M23;M12;M58;M24;M10;M57;M27;M17;M20;M23;M12;M58;M24; |
| | TFNGECPNFV | M10;M57;M27;M17;M20 |
| 885 | SYELQTPFEIKLAKK | M23;M12;M58;M24;M10;M57;M27;M17;M20;M23;M12;M58;M24; |
| | FDTFNGECPN | M10;M57;M27;M17;M20 |
| 886 | YELQTPFEIKLAKKF | M23;M12;M58;M24;M10;M57;M27;M17;M20;M23;M12;M58;M24; |
| | DTFNGECPNF | M10;M57;M27;M17;M20 |
| 887 | LQTPFEIKLAKKFDT | M23;M12;M58;M24;M10;M57;M27;M17;M20;M23;M12;M58;M24; |
| | FNGECPNFVF | M10;M57;M27;M17;M20 |
| 888 | MELTPVVQTIEVNSF | M56;M60;M29;M6;M38;M50;M26;M47;M59;M56;M60;M29;M6; |
| | SGYLKLTDNV | M38;M50;M26;M47;M59 |
| 889 | VGDVVQEGVLTAV | M58;M16;M29;M53;M38;M61;M67;M27;M17;M58;M16;M29;M53; |
| | VIPTKKAGGTTE | M38;M61;M67;M27;M17 |
| 890 | DVVQEGVLTAVVIP | M58;M16;M29;M53;M38;M61;M67;M27;M17;M58;M16;M29;M53; |
| | TKKAGGTTEML | M38;M61;M67;M27;M17 |
| 891 | GDVVQEGVLTAVVI | M58;M16;M29;M53;M38;M61;M67;M27;M17;M58;M16;M29;M53; |
| | PTKKAGGTTEM | M38;M61;M67;M27;M17 |
| 892 | ASGGQPITNCVKML | M4;M64;M21;M56;M58;M10;M53;M22;M23;M4;M64;M21;M56; |
| | CTHTGTGQAIT | M58;M10;M53;M22;M23 |
| 893 | NLGETFVTHSKGLY | M71;M24;M55;M50;M18;M27;M52;M26;M47;M71;M24;M55;M50; |
| | RKCVKSREETG | M18;M27;M52;M26;M47 |
| 894 | AVFDKNLYDKLVSS | M31;M70;M25;M34;M41;M42;M49;M43;M39;M31;M70;M25;M34; |
| | FLEMKSEKQVE | M41;M42;M49;M43;M39 |
| 895 | ASFNYLKSPNFSKLI | M54;M25;M60;M74;M18;M41;M43;M42;M39;M54;M25;M60;M74; |
| | NIIIWFLLLS | M18;M41;M43;M42;M39 |
| 896 | VFLFVAAIFYLITPV | M56;M32;M34;M53;M18;M17;M52;M39;M47;M56;M32;M34;M53; |
| | HVMSKHTDFS | M18;M17;M52;M39;M47 |
| 897 | FLFVAAIFYLITPVH | M56;M32;M34;M53;M18;M17;M52;M39;M47;M56;M32;M34;M53; |
| | VMSKHTDFSS | M18;M17;M52;M39;M47 |
| 898 | FTCASEYTGNYQCG | M4;M52;M1;M38;M3;M41;M42;M8;M43;M39;M4;M52;M1;M38; |
| | HYKHITSKETL | M3;M41;M42;M8;M43;M39 |
| 899 | STSAFVETVKGLDY | M4;M54;M16;M1;M60;M3;M6;M37;M52;M47;M4;M54;M16;M1; |
| | KAFKQIVESCG | M60;M3;M6;M37;M52;M47 |
| 900 | TSAFVETVKGLDYK | M4;M54;M1;M60;M3;M6;M37;M42;M52;M47;M4;M54;M1;M60; |
| | AFKQIVESCGN | M3;M6;M37;M42;M52;M47 |
| 901 | TSQWLTNIFGTVYE | M4;M28;M31;M34;M3;M45;M47;M67;M39;M59;M4;M28;M31;M34; |
| | KLKPVLDWLEE | M3;M45;M47;M67;M39;M59 |
| 902 | GWEIVKFISTCACEI | M12;M29;M6;M45;M74;M72;M8;M49;M22;M20;M12;M29;M6;M45; |
| | VGGQIVTCAK | M74;M72;M8;M49;M22;M20 |
| 903 | TNIFGTVYEKLKPVL | M32;M28;M31;M34;M3;M67;M68;M39;M47;M20;M32;M28;M31; |
| | DWLEEKFKEG | M34;M3;M67;M68;M39;M47;M20 |
| 904 | LSFCAFAVDAAKAY | M32;M21;M12;M28;M70;M48;M57;M36;M69;M63;M32;M21;M12; |
| | KDYLASGGQPI | M28;M70;M48;M57;M36;M69;M63 |
| 905 | VLSFCAFAVDAAKA | M32;M21;M12;M28;M70;M48;M57;M36;M69;M63;M32;M21;M12; |
| | YKDYLASGGQP | M28;M70;M48;M57;M36;M69;M63 |
| 906 | IVKFISTCACEIVGG | M28;M66;M12;M78;M65;M29;M6;M74;M45;M79;M28;M66;M12; |
| | QIVTCAKEIK | M78;M65;M29;M6;M74;M45;M79 |
| 907 | FNVPMEKLKTLVAT | M12;M81;M28;M29;M6;M45;M38;M49;M22;M59;M12;M81;M28; |
| | AEAELAKNVSL | M29;M6;M45;M38;M49;M22;M59 |
| 908 | TFNVPMEKLKTLVA | M12;M81;M28;M29;M6;M45;M38;M49;M22;M59;M12;M81;M28; |
| | TAEAELAKNVS | M29;M6;M45;M38;M49;M22;M59 |
| 909 | PTTFHLDGEVITFDN | M40;M21;M16;M7;M30;M48;M50;M36;M49;M22;M40;M21;M16; |
| | LKTLLSLREV | M7;M30;M48;M50;M36;M49;M22 |
| 910 | AIILASFSASTSAFVE | M52;M28;M14;M16;M38;M6;M33;M8;M43;M42;M52;M28;M14; |
| | TVKGLDYKA | M16;M38;M6;M33;M8;M43;M42 |
| 911 | IAIILASFSASTSAFV | M52;M28;M14;M16;M38;M6;M33;M8;M43;M42;M52;M28;M14; |
| | ETVKGLDYK | M16;M38;M6;M33;M8;M43;M42 |
| 912 | EIVKFISTCACEIVG | M12;M78;M65;M29;M6;M74;M45;M79;M8;M20;M12;M78;M65; |
| | GQIVTCAKEI | M29;M6;M74;M45;M79;M8;M20 |
| 913 | TSSSKTPEEHFIETIS | M64;M40;M32;M14;M16;M30;M29;M6;M68;M8;M64;M40;M32; |
| | LAGSYKDWS | M14;M16;M30;M29;M6;M68;M8 |
| 914 | KTPEEHFIETISLAGS | M64;M40;M32;M14;M16;M30;M29;M6;M68;M8;M64;M40;M32; |
| | YKDWSYSGQ | M14;M16;M30;M29;M6;M68;M8 |
| 915 | SSSKTPEEHFIETISL | M64;M40;M32;M14;M16;M30;M29;M6;M68;M8;M64;M40;M32; |
| | AGSYKDWSY | M14;M16;M30;M29;M6;M68;M8 |
| 916 | SKTPEEHFIETISLAG | M64;M40;M32;M14;M16;M30;M29;M6;M68;M8;M64;M40;M32; |
| | SYKDWSYSG | M14;M16;M30;M29;M6;M68;M8 |
| 917 | SSKTPEEHFIETISLA | M64;M40;M32;M14;M16;M30;M29;M6;M68;M8;M64;M40;M32; |
| | GSYKDWSYS | M14;M16;M30;M29;M6;M68;M8 |
| 918 | AYITGGVVQLTSQW | M12;M54;M60;M48;M51;M42;M43;M49;M46;M9;M12;M54;M60; |
| | LTNIFGTVYEK | M48;M51;M42;M43;M49;M46;M9 |
| 919 | ATNNLVVMAYITGG | M12;M54;M60;M48;M51;M42;M43;M49;M46;M9;M12;M54;M60; |
| | VVQLTSQWLTN | M48;M51;M42;M43;M49;M46;M9 |
| 920 | TNNLVVMAYITGGV | M12;M54;M60;M48;M51;M42;M43;M49;M46;M9;M12;M54;M60; |
| | VQLTSQWLTNI | M48;M51;M42;M43;M49;M46;M9 |
| 921 | LVVMAYITGGVVQL | M12;M54;M60;M48;M51;M42;M43;M49;M46;M9;M12;M54;M60; |
| | TSQWLTNIFGT | M48;M51;M42;M43;M49;M46;M9 |
| 922 | MAYITGGVVQLTSQ | M12;M54;M60;M48;M51;M42;M43;M49;M46;M9;M12;M54;M60; |
| | WLTNIFGTVYE | M48;M51;M42;M43;M49;M46;M9 |
| 923 | YITGGVVQLTSQWL | M12;M54;M60;M48;M51;M42;M43;M49;M46;M9;M12;M54;M60; |
| | TNIFGTVYEKL | M48;M51;M42;M43;M49;M46;M9 |
| 924 | VMAYITGGVVQLTS | M12;M54;M60;M48;M51;M42;M43;M49;M46;M9;M12;M54;M60; |
| | QWLTNIFGTVY | M48;M51;M42;M43;M49;M46;M9 |
| 925 | VVMAYITGGVVQLT | M12;M54;M60;M48;M51;M42;M43;M49;M46;M9;M12;M54;M60; |
| | SQWLTNIFGTV | M48;M51;M42;M43;M49;M46;M9 |
| 926 | NLVVMAYITGGVV | M12;M54;M60;M48;M51;M42;M43;M49;M46;M9;M12;M54;M60; |
| | QLTSQWLTNIFG | M48;M51;M42;M43;M49;M46;M9 |
| 927 | NNLVVMAYITGGV | M12;M54;M60;M48;M51;M42;M43;M49;M46;M9;M12;M54;M60; |
| | VQLTSQWLTNIF | M48;M51;M42;M43;M49;M46;M9 |
| 928 | VVPGLPGTILRTTNG | M64;M75;M11;M24;M1;M6;M45;M8;M9;M23;M64;M75;M11;M24; |
| | DFLHFLPRVF | M1;M6;M45;M8;M9;M23 |
| 929 | GFVVPGLPGTILRTT | M64;M75;M11;M24;M1;M6;M45;M8;M9;M23;M64;M75;M11;M24; |
| | NGDFLHFLPR | M1;M6;M45;M8;M9;M23 |
| 930 | FVVPGLPGTILRTTN | M64;M75;M11;M24;M1;M6;M45;M8;M9;M23;M64;M75;M11;M24; |
| | GDFLHFLPRV | M1;M6;M45;M8;M9;M23 |
| 931 | VDAAKAYKDYLAS | M12;M48;M37;M57;M33;M69;M41;M8;M42;M39;M12;M48;M37; |
| | GGQPITNCVKML | M57;M33;M69;M41;M8;M42;M39 |
| 932 | SLRPDTRYVLMDGS | M25;M34;M7;M30;M48;M41;M43;M42;M39;M22;M25;M34;M7; |
| | IIQFPNTYLEG | M30;M48;M41;M43;M42;M39;M22 |
| 933 | HYKHITSKETLYCID | M21;M58;M10;M36;M43;M35;M46;M39;M9;M44;M21;M58;M10; |
| | GALLTKSSEY | M36;M43;M35;M46;M39;M9;M44 |
| 934 | SVQTFFKLVNKFLA | M16;M24;M34;M45;M57;M41;M42;M8;M43;M39;M16;M24;M34; |
| | LCADSIIIGGA | M45;M57;M41;M42;M8;M43;M39 |
| 935 | YESLRPDTRYVLMD | M25;M34;M7;M30;M48;M50;M41;M43;M42;M39;M25;M34;M7; |
| | GSIIQFPNTYL | M30;M48;M50;M41;M43;M42;M39 |
| 936 | AYESLRPDTRYVLM | M25;M34;M7;M30;M48;M50;M41;M43;M42;M39;M25;M34;M7; |
| | DGSIIQFPNTY | M30;M48;M50;M41;M43;M42;M39 |
| 937 | ESLRPDTRYVLMDG | M25;M34;M7;M30;M48;M50;M41;M43;M42;M39;M25;M34;M7; |
| | SIIQFPNTYLE | M30;M48;M50;M41;M43;M42;M39 |
| 938 | ILLAKDTTEAFEKM | M40;M16;M34;M30;M53;M36;M43;M42;M39;M22;M40;M16;M34; |
| | VSLLSVLLSMQ | M30;M53;M36;M43;M42;M39;M22 |
| 939 | VPGLPGTILRTTNGD | M64;M75;M11;M24;M6;M45;M8;M52;M9;M23;M64;M75;M11;M24; |
| | FLHFLPRVFS | M6;M45;M8;M52;M9;M23 |
| 940 | VQTFFKLVNKFLAL | M24;M34;M45;M57;M41;M67;M42;M8;M43;M39;M24;M34;M45; |
| | CADSIIIGGAK | M57;M41;M67;M42;M8;M43;M39 |
| 941 | DGEVITFDNLKTLLS | M32;M66;M31;M65;M30;M29;M48;M36;M68;M49;M32;M66;M31; |
| | LREVRTIKVF | M65;M30;M29;M48;M36;M68;M49 |
| 942 | VAKSHNIALIWNVK | M32;M28;M66;M1;M25;M6;M37;M72;M68;M59;M32;M28;M66;M1; |
| | DFMSLSEQLRK | M25;M6;M37;M72;M68;M59 |
| 943 | KFCLEASFNYLKSP | M4;M54;M19;M25;M60;M18;M41;M43;M42;M39;M4;M54;M19;M25; |
| | NFSKLINIIIW | M60;M18;M41;M43;M42;M39 |
| 944 | FCLEASFNYLKSPNF | M4;M54;M19;M25;M60;M18;M41;M43;M42;M39;M4;M54;M19;M25; |
| | SKLINIIIWF | M60;M18;M41;M43;M42;M39 |
| 945 | GKFCLEASFNYLKS | M4;M54;M19;M25;M60;M18;M41;M43;M42;M39;M4;M54;M19;M25; |
| | PNFSKLINIII | M60;M18;M41;M43;M42;M39 |
| 946 | VKFISTCACEIVGGQ | M28;M66;M12;M78;M65;M80;M29;M79;M50;M23;M28;M66;M12; |
| | IVTCAKEIKE | M78;M65;M80;M29;M79;M50;M23 |
| 947 | TLGVYDYLVSTQEF | M40;M31;M34;M30;M6;M33;M8;M43;M42;M47;M40;M31;M34; |
| | RYMNSQGLLPP | M30;M6;M33;M8;M43;M42;M47 |
| 948 | VTKIKPHNSHEGKT | M1;M34;M74;M37;M63;M41;M42;M43;M39;M22;M1;M34;M74; |
| | FYVLPNDDTLR | M37;M63;M41;M42;M43;M39;M22 |
| 949 | YKDYLASGGQPITN | M56;M12;M24;M10;M53;M37;M33;M8;M39;M23;M56;M12;M24; |
| | CVKMLCTHTGT | M10;M53;M37;M33;M8;M39;M23 |
| 950 | NGDSEVVLKKLKKS | M71;M13;M32;M28;M55;M1;M53;M33;M68;M17;M71;M13;M32; |
| | LNVAKSEFDRD | M28;M55;M1;M53;M33;M68;M17 |
| 951 | ANGDSEVVLKKLK | M71;M13;M32;M28;M55;M1;M53;M33;M68;M17;M71;M13;M32; |
| | KSLNVAKSEFDR | M28;M55;M1;M53;M33;M68;M17 |
| 952 | VETSNSFDVLKSED | M64;M34;M30;M6;M41;M42;M43;M46;M39;M22;M64;M34;M30; |
| | AQGMDNLACED | M6;M41;M42;M43;M46;M39;M22 |
| 953 | QTPFEIKLAKKFDTF | M23;M12;M58;M24;M10;M45;M57;M27;M17;M20;M23;M12;M58; |
| | NGECPNFVFP | M24;M10;M45;M57;M27;M17;M20 |
| 954 | TPFEIKLAKKFDTFN | M23;M12;M58;M24;M10;M45;M57;M27;M17;M20;M23;M12;M58; |
| | GECPNFVFPL | M24;M10;M45;M57;M27;M17;M20 |
| 955 | PGLPGTILRTTNGDF | M64;M75;M11;M24;M53;M6;M45;M52;M9;M23;M64;M75;M11; |
| | LHFLPRVFSA | M24;M53;M6;M45;M52;M9;M23 |
| 956 | SASTSAFVETVKGL | M52;M54;M16;M1;M60;M6;M38;M37;M35;M47;M52;M54;M16; |
| | DYKAFKQIVES | M1;M60;M6;M38;M37;M35;M47 |
| 957 | AGQKTYERHSLSHF | M64;M40;M16;M70;M31;M30;M15;M43;M39;M22;M64;M40;M16; |
| | VNLDNLRANNT | M70;M31;M30;M15;M43;M39;M22 |
| 958 | LLAKDTTEAFEKMV | M40;M16;M34;M30;M53;M69;M43;M42;M39;M22;M40;M16;M34; |
| | SLLSVLLSMQG | M30;M53;M69;M43;M42;M39;M22 |
| 959 | ETGLLMPLKAPKEII | M54;M24;M31;M60;M38;M48;M42;M27;M46;M39;M54;M24;M31; |
| | FLEGETLPTE | M60;M38;M48;M42;M27;M46;M39 |
| 960 | VEEAKTVLKKCKSA | M64;M21;M54;M16;M78;M65;M55;M60;M63;M9;M64;M21;M54; |
| | FYILPSIISNE | M16;M78;M65;M55;M60;M63;M9 |
| 961 | WALIISVTSNYSGVV | M64;M56;M32;M11;M14;M29;M38;M68;M22;M23;M64;M56;M32; |
| | TTVMFLARGI | M11;M14;M29;M38;M68;M22;M23 |
| 962 | MWALIISVTSNYSG | M64;M56;M32;M11;M14;M29;M38;M68;M22;M23;M64;M56;M32; |
| | VVTTVMFLARG | M11;M14;M29;M38;M68;M22;M23 |
| 963 | SEKSYELQTPFEIKL | M12;M58;M24;M10;M25;M34;M27;M17;M39;M23;M12;M58;M24; |
| | AKKFDTFNGE | M10;M25;M34;M27;M17;M39;M23 |
| 964 | KPHNSHEGKTFYVL | M31;M34;M74;M37;M63;M41;M42;M43;M39;M22;M31;M34;M74; |
| | PNDDTLRVEAF | M37;M63;M41;M42;M43;M39;M22 |
| 965 | PHNSHEGKTFYVLP | M31;M34;M74;M37;M63;M41;M42;M43;M39;M22;M31;M34;M74; |
| | NDDTLRVEAFE | M37;M63;M41;M42;M43;M39;M22 |
| 966 | AFYILPSIISNEKQEI | M56;M11;M24;M55;M10;M45;M50;M18;M9;M23;M56;M11;M24; |
| | LGTVSWNLR | M55;M10;M45;M50;M18;M9;M23 |
| 967 | FYILPSIISNEKQEIL | M56;M11;M24;M55;M10;M45;M50;M18;M9;M23;M56;M11;M24; |
| | GTVSWNLRE | M55;M10;M45;M50;M18;M9;M23 |
| 968 | LEASFNYLKSPNFSK | M4;M54;M25;M60;M74;M18;M41;M43;M42;M39;M4;M54;M25;M60; |
| | LINIIIWFLL | M74;M18;M41;M43;M42;M39 |
| 969 | EASFNYLKSPNFSKL | M4;M54;M25;M60;M74;M18;M41;M43;M42;M39;M4;M54;M25;M60; |
| | INIIIWFLLL | M74;M18;M41;M43;M42;M39 |
| 970 | LQAIASEFSSLPSYA | M21;M52;M28;M31;M41;M42;M68;M43;M39;M22;M21;M52;M28; |
| | AFATAQEAYE | M31;M41;M42;M68;M43;M39;M22 |
| 971 | TCGTTTLNGLWLDD | M56;M75;M24;M55;M65;M7;M53;M79;M9;M23;M56;M75;M24; |
| | VVYCPRHVICT | M55;M65;M7;M53;M79;M9;M23 |
| 972 | KSYELQTPFEIKLAK | M23;M12;M58;M24;M10;M25;M57;M27;M17;M20;M23;M12;M58; |
| | KFDTFNGECP | M24;M10;M25;M57;M27;M17;M20 |
| 973 | EKSYELQTPFEIKLA | M23;M12;M58;M24;M10;M25;M57;M27;M17;M20;M23;M12;M58; |
| | KKFDTFNGEC | M24;M10;M25;M57;M27;M17;M20 |
| 974 | IFGTVYEKLKPVLD | M32;M28;M31;M34;M67;M68;M39;M9;M47;M20;M32;M28;M31; |
| | WLEEKFKEGVE | M34;M67;M68;M39;M9;M47;M20 |
| 975 | LASGGQPITNCVKM | M4;M64;M21;M56;M58;M24;M10;M53;M22;M23;M4;M64;M21; |
| | LCTHTGTGQAI | M56;M58;M24;M10;M53;M22;M23 |
| 976 | YLASGGQPITNCVK | M4;M64;M21;M56;M58;M24;M10;M53;M22;M23;M4;M64;M21; |
| | MLCTHTGTGQA | M56;M58;M24;M10;M53;M22;M23 |
| 977 | TPVVQTIEVNSFSGY | M56;M60;M29;M38;M6;M50;M26;M9;M47;M23;M56;M60;M29; |
| | LKLTDNVYIK | M38;M6;M50;M26;M9;M47;M23 |
| 978 | VAAIFYLITPVHVMS | M56;M21;M34;M53;M18;M17;M35;M52;M39;M47;M56;M21;M34; |
| | KHTDFSSEII | M53;M18;M17;M35;M52;M39;M47 |
| 979 | LFVAAIFYLITPVHV | M56;M21;M34;M53;M18;M17;M35;M52;M39;M47;M56;M21;M34; |
| | MSKHTDFSSE | M53;M18;M17;M35;M52;M39;M47 |
| 980 | AAIFYLITPVHVMSK | M56;M21;M34;M53;M18;M17;M35;M52;M39;M47;M56;M21;M34; |
| | HTDFSSEIIG | M53;M18;M17;M35;M52;M39;M47 |
| 981 | FVAAIFYLITPVHVM | M56;M21;M34;M53;M18;M17;M35;M52;M39;M47;M56;M21;M34; |
| | SKHTDFSSEI | M53;M18;M17;M35;M52;M39;M47 |
| 982 | TGGVVQLTSQWLT | M4;M3;M45;M48;M51;M42;M43;M49;M46;M9;M59;M4;M3;M45; |
| | NIFGTVYEKLKP | M48;M51;M42;M43;M49;M46;M9;M59 |
| 983 | QWLTNIFGTVYEKL | M4;M32;M28;M31;M34;M3;M45;M47;M67;M39;M59;M4;M32;M28; |
| | KPVLDWLEEKF | M31;M34;M3;M45;M47;M67;M39;M59 |
| 984 | SQWLTNIFGTVYEK | M4;M32;M28;M31;M34;M3;M45;M47;M67;M39;M59;M4;M32;M28; |
| | LKPVLDWLEEK | M31;M34;M3;M45;M47;M67;M39;M59 |
| 985 | PGQGLNGYTVEEAK | M75;M19;M70;M60;M25;M45;M36;M63;M76;M39;M9;M75;M19; |
| | TVLKKCKSAFY | M70;M60;M25;M45;M36;M63;M76;M39;M9 |
| 986 | ALIWNVKDFMSLSE | M56;M28;M66;M19;M25;M6;M45;M37;M18;M72;M59;M56;M28; |
| | QLRKQIRSAAK | M66;M19;M25;M6;M45;M37;M18;M72;M59 |
| 987 | IILASFSASTSAFVET | M52;M28;M14;M16;M54;M38;M6;M33;M8;M43;M42;M52;M28; |
| | VKGLDYKAF | M14;M16;M54;M38;M6;M33;M8;M43;M42 |
| 988 | DGWEIVKFISTCACE | M23;M21;M29;M6;M45;M74;M72;M8;M49;M22;M20;M23;M21; |
| | IVGGQIVTCA | M29;M6;M45;M74;M72;M8;M49;M22;M20 |
| 989 | RDGWEIVKFISTCAC | M23;M21;M29;M6;M45;M74;M72;M8;M49;M22;M20;M23;M21; |
| | EIVGGQIVTC | M29;M6;M45;M74;M72;M8;M49;M22;M20 |
| 990 | VPTDNYITTYPGQG | M75;M14;M70;M26;M29;M48;M63;M41;M49;M15;M76;M75;M14; |
| | LNGYTVEEAKT | M70;M26;M29;M48;M63;M41;M49;M15;M76 |
| 991 | SFSASTSAFVETVKG | M52;M54;M14;M16;M1;M60;M6;M38;M37;M35;M47;M52;M54; |
| | LDYKAFKQIV | M14;M16;M1;M60;M6;M38;M37;M35;M47 |
| 992 | FSASTSAFVETVKGL | M52;M54;M14;M16;M1;M60;M6;M38;M37;M35;M47;M52;M54; |
| | DYKAFKQIVE | M14;M16;M1;M60;M6;M38;M37;M35;M47 |
| 993 | AIASEFSSLPSYAAF | M21;M12;M28;M70;M31;M6;M41;M42;M68;M52;M22;M21;M12; |
| | ATAQEAYEQA | M28;M70;M31;M6;M41;M42;M68;M52;M22 |
| 994 | CLEASFNYLKSPNFS | M4;M54;M19;M25;M60;M74;M18;M41;M43;M42;M39;M4;M54; |
| | KLINIIIWFL | M19;M25;M60;M74;M18;M41;M43;M42;M39 |
| 995 | KDYLASGGQPITNC | M4;M64;M56;M24;M10;M53;M37;M8;M39;M22;M23;M4;M64;M56; |
| | VKMLCTHTGTG | M24;M10;M53;M37;M8;M39;M22;M23 |
| 996 | TKIKPHNSHEGKTF | M31;M1;M34;M74;M37;M63;M41;M42;M43;M39;M22;M31;M1; |
| | YVLPNDDTLRV | M34;M74;M37;M63;M41;M42;M43;M39;M22 |
| 997 | IKPHNSHEGKTFYV | M31;M1;M34;M74;M37;M63;M41;M42;M43;M39;M22;M31;M1; |
| | LPNDDTLRVEA | M34;M74;M37;M63;M41;M42;M43;M39;M22 |
| 998 | KIKPHNSHEGKTFY | M31;M1;M34;M74;M37;M63;M41;M42;M43;M39;M22;M31;M1; |
| | VLPNDDTLRVE | M34;M74;M37;M63;M41;M42;M43;M39;M22 |
| 999 | PVETSNSFDVLKSED | M64;M25;M34;M30;M6;M41;M42;M43;M46;M39;M22;M64;M25; |
| | AQGMDNLACE | M34;M30;M6;M41;M42;M43;M46;M39;M22 |
| 1000 | KPVETSNSFDVLKSE | M64;M25;M34;M30;M6;M41;M42;M43;M46;M39;M22;M64;M25; |
| | DAQGMDNLAC | M34;M30;M6;M41;M42;M43;M46;M39;M22 |
| 1001 | WSTKPVETSNSFDV | M64;M25;M34;M30;M6;M41;M42;M43;M46;M39;M22;M64;M25; |
| | LKSEDAQGMDN | M34;M30;M6;M41;M42;M43;M46;M39;M22 |
| 1002 | STKPVETSNSFDVLK | M64;M25;M34;M30;M6;M41;M42;M43;M46;M39;M22;M64;M25; |
| | SEDAQGMDNL | M34;M30;M6;M41;M42;M43;M46;M39;M22 |
| 1003 | TKPVETSNSFDVLKS | M64;M25;M34;M30;M6;M41;M42;M43;M46;M39;M22;M64;M25; |
| | EDAQGMDNLA | M34;M30;M6;M41;M42;M43;M46;M39;M22 |
| 1004 | GQKTYERHSLSHFV | M64;M40;M16;M70;M31;M30;M42;M15;M43;M39;M22;M64;M40; |
| | NLDNLRANNTK | M16;M70;M31;M30;M42;M15;M43;M39;M22 |
| 1005 | AKDTTEAFEKMVSL | M40;M16;M34;M30;M53;M74;M69;M43;M42;M39;M22;M40;M16; |
| | LSVLLSMQGAV | M34;M30;M53;M74;M69;M43;M42;M39;M22 |
| 1006 | KDTTEAFEKMVSLL | M40;M16;M34;M30;M53;M74;M69;M43;M42;M39;M22;M40;M16; |
| | SVLLSMQGAVD | M34;M30;M53;M74;M69;M43;M42;M39;M22 |
| 1007 | LAKDTTEAFEKMVS | M40;M16;M34;M30;M53;M74;M69;M43;M42;M39;M22;M40;M16; |
| | LLSVLLSMQGA | M34;M30;M53;M74;M69;M43;M42;M39;M22 |
| 1008 | LVSSFLEMKSEKQV | M40;M16;M31;M25;M34;M30;M74;M41;M43;M42;M39;M40;M16; |
| | EQKIAEIPKEE | M31;M25;M34;M30;M74;M41;M43;M42;M39 |
| 1009 | TILRTTNGDFLHFLP | M75;M56;M58;M16;M24;M53;M45;M18;M17;M15;M52;M75;M56; |
| | RVFSAVGNIC | M58;M16;M24;M53;M45;M18;M17;M15;M52 |
| 1010 | YILPSIISNEKQEILG | M75;M56;M11;M24;M55;M10;M45;M50;M18;M9;M23;M75;M56; |
| | TVSWNLREM | M11;M24;M55;M10;M45;M50;M18;M9;M23 |
| 1011 | KEIKESVQTFFKLVN | M58;M16;M24;M53;M17;M35;M15;M42;M43;M39;M47;M58;M16; |
| | KFLALCADSI | M24;M53;M17;M35;M15;M42;M43;M39;M47 |
| 1012 | AKEIKESVQTFFKLV | M58;M16;M24;M53;M17;M35;M15;M42;M43;M39;M47;M58;M16; |
| | NKFLALCADS | M24;M53;M17;M35;M15;M42;M43;M39;M47 |
| 1013 | VFDKNLYDKLVSSF | M40;M16;M31;M70;M25;M34;M41;M43;M49;M42;M39;M40;M16; |
| | LEMKSEKQVEQ | M31;M70;M25;M34;M41;M43;M49;M42;M39 |
| 1014 | KGVEAVMYMGTLS | M4;M56;M40;M54;M16;M55;M1;M53;M3;M6;M37;M22;M4;M56; |
| | YEQFKKGVQIPC | M40;M54;M16;M55;M1;M53;M3;M6;M37;M22 |
| 1015 | TCASEYTGNYQCGH | M4;M52;M31;M1;M38;M3;M41;M42;M8;M43;M39;M9;M4;M52; |
| | YKHITSKETLY | M31;M1;M38;M3;M41;M42;M8;M43;M39;M9 |
| 1016 | LKGVEAVMYMGTL | M4;M56;M21;M40;M54;M55;M1;M53;M3;M6;M37;M22;M4;M56; |
| | SYEQFKKGVQIP | M21;M40;M54;M55;M1;M53;M3;M6;M37;M22 |
| 1017 | ITGGVVQLTSQWLT | M12;M54;M60;M3;M48;M45;M51;M42;M43;M49;M46;M9;M12; |
| | NIFGTVYEKLK | M54;M60;M3;M48;M45;M51;M42;M43;M49;M46;M9 |
| 1018 | WLTNIFGTVYEKLK | M4;M32;M28;M31;M34;M3;M45;M47;M67;M68;M39;M59;M4; |
| | PVLDWLEEKFK | M32;M28;M31;M34;M3;M45;M47;M67;M68;M39;M59 |
| 1019 | LTNIFGTVYEKLKPV | M4;M32;M28;M31;M34;M3;M45;M47;M67;M68;M39;M59;M4; |
| | LDWLEEKFKE | M32;M28;M31;M34;M3;M45;M47;M67;M68;M39;M59 |
| 1020 | QTTLKGVEAVMYM | M4;M56;M21;M40;M54;M55;M60;M53;M3;M6;M37;M22;M4;M56; |
| | GTLSYEQFKKGV | M21;M40;M54;M55;M60;M53;M3;M6;M37;M22 |
| 1021 | QQTTLKGVEAVMY | M4;M56;M21;M40;M54;M55;M60;M53;M3;M6;M37;M22;M4;M56; |
| | MGTLSYEQFKKG | M21;M40;M54;M55;M60;M53;M3;M6;M37;M22 |
| 1022 | QQQTTLKGVEAVM | M4;M56;M21;M40;M54;M55;M60;M53;M3;M6;M37;M22;M4;M56; |
| | YMGTLSYEQFKK | M21;M40;M54;M55;M60;M53;M3;M6;M37;M22 |
| 1023 | SFCAFAVDAAKAYK | M32;M21;M12;M28;M70;M48;M57;M33;M69;M63;M36;M8;M32; |
| | DYLASGGQPIT | M21;M12;M28;M70;M48;M57;M33;M69;M63;M36;M8 |
| 1024 | IALIWNVKDFMSLS | M56;M28;M66;M19;M1;M25;M6;M45;M37;M18;M72;M59;M56; |
| | EQLRKQIRSAA | M28;M66;M19;M1;M25;M6;M45;M37;M18;M72;M59 |
| 1025 | NIALIWNVKDFMSL | M56;M28;M66;M19;M1;M25;M6;M45;M37;M18;M72;M59;M56; |
| | SEQLRKQIRSA | M28;M66;M19;M1;M25;M6;M45;M37;M18;M72;M59 |
| 1026 | IASEFSSLPSYAAFA | M21;M12;M14;M28;M70;M31;M6;M41;M42;M68;M52;M22;M21; |
| | TAQEAYEQAV | M12;M14;M28;M70;M31;M6;M41;M42;M68;M52;M22 |
| 1027 | AVDAAKAYKDYLA | M12;M70;M48;M37;M57;M33;M69;M63;M41;M8;M42;M39;M12; |
| | SGGQPITNCVKM | M70;M48;M37;M57;M33;M69;M63;M41;M8;M42;M39 |
| 1028 | GVEFLRDGWEIVKFI | M4;M64;M21;M23;M29;M6;M45;M74;M48;M49;M22;M20;M4;M64; |
| | STCACEIVGG | M21;M23;M29;M6;M45;M74;M48;M49;M22;M20 |
| 1029 | EGVEFLRDGWEIVK | M4;M64;M21;M23;M29;M6;M45;M74;M48;M49;M22;M20;M4;M64; |
| | FISTCACEIVG | M21;M23;M29;M6;M45;M74;M48;M49;M22;M20 |
| 1030 | KVPTDNYITTYPGQ | M75;M14;M70;M16;M26;M29;M48;M63;M41;M49;M15;M76;M75; |
| | GLNGYTVEEAK | M14;M70;M16;M26;M29;M48;M63;M41;M49;M15;M76 |
| 1031 | NGDFLHFLPRVFSA | M64;M56;M12;M58;M16;M24;M1;M53;M45;M17;M46;M22;M64; |
| | VGNICYTPSKL | M56;M12;M58;M16;M24;M1;M53;M45;M17;M46;M22 |
| 1032 | LRPDTRYVLMDGSII | M25;M34;M7;M30;M48;M41;M43;M49;M42;M26;M39;M22;M25; |
| | QFPNTYLEGS | M34;M7;M30;M48;M41;M43;M49;M42;M26;M39;M22 |
| 1033 | QCGHYKHITSKETL | M40;M21;M52;M58;M31;M36;M41;M42;M8;M43;M39;M9;M40; |
| | YCIDGALLTKS | M21;M52;M58;M31;M36;M41;M42;M8;M43;M39;M9 |
| 1034 | YQCGHYKHITSKET | M40;M21;M52;M58;M31;M36;M41;M42;M8;M43;M39;M9;M40; |
| | LYCIDGALLTK | M21;M52;M58;M31;M36;M41;M42;M8;M43;M39;M9 |
| 1035 | NYQCGHYKHITSKE | M40;M21;M52;M58;M31;M36;M41;M42;M8;M43;M39;M9;M40; |
| | TLYCIDGALLT | M21;M52;M58;M31;M36;M41;M42;M8;M43;M39;M9 |
| 1036 | LPGTILRTTNGDFLH | M64;M75;M56;M11;M58;M16;M24;M53;M6;M45;M52;M9;M64; |
| | FLPRVFSAVG | M75;M56;M11;M58;M16;M24;M53;M6;M45;M52;M9 |
| 1037 | KFISTCACEIVGGQI | M56;M28;M66;M12;M78;M65;M80;M55;M10;M79;M50;M23;M56; |
| | VTCAKEIKES | M28;M66;M12;M78;M65;M80;M55;M10;M79;M50;M23 |
| 1038 | FISTCACEIVGGQIV | M56;M28;M66;M12;M78;M65;M80;M55;M10;M79;M50;M23;M56; |
| | TCAKEIKESV | M28;M66;M12;M78;M65;M80;M55;M10;M79;M50;M23 |
| 1039 | ILRTTNGDFLHFLPR | M75;M56;M58;M16;M24;M1;M53;M45;M18;M17;M15;M52;M75; |
| | VFSAVGNICY | M56;M58;M16;M24;M1;M53;M45;M18;M17;M15;M52 |
| 1040 | LRTTNGDFLHFLPR | M75;M56;M58;M16;M24;M1;M53;M45;M18;M17;M15;M52;M75; |
| | VFSAVGNICYT | M56;M58;M16;M24;M1;M53;M45;M18;M17;M15;M52 |
| 1041 | RTTNGDFLHFLPRV | M75;M56;M58;M16;M24;M1;M53;M45;M18;M17;M15;M52;M75; |
| | FSAVGNICYTP | M56;M58;M16;M24;M1;M53;M45;M18;M17;M15;M52 |
| 1042 | LPSIISNEKQEILGTV | M75;M56;M11;M24;M55;M10;M45;M50;M18;M8;M9;M23;M75; |
| | SWNLREMLA | M56;M11;M24;M55;M10;M45;M50;M18;M8;M9;M23 |
| 1043 | ILPSIISNEKQEILGT | M75;M56;M11;M24;M55;M10;M45;M50;M18;M8;M9;M23;M75; |
| | VSWNLREML | M56;M11;M24;M55;M10;M45;M50;M18;M8;M9;M23 |
| 1044 | HSLSHFVNLDNLRA | M64;M40;M16;M31;M30;M53;M42;M43;M15;M46;M39;M22;M64; |
| | NNTKGSLPINV | M40;M16;M31;M30;M53;M42;M43;M15;M46;M39;M22 |
| 1045 | SLSHFVNLDNLRAN | M64;M40;M16;M31;M30;M53;M42;M43;M15;M46;M39;M22;M64; |
| | NTKGSLPINVI | M40;M16;M31;M30;M53;M42;M43;M15;M46;M39;M22 |
| 1046 | TYERHSLSHFVNLD | M64;M40;M16;M70;M31;M30;M42;M43;M15;M46;M39;M22;M64; |
| | NLRANNTKGSL | M40;M16;M70;M31;M30;M42;M43;M15;M46;M39;M22 |
| 1047 | QKTYERHSLSHFVN | M64;M40;M16;M70;M31;M30;M42;M43;M15;M46;M39;M22;M64; |
| | LDNLRANNTKG | M40;M16;M70;M31;M30;M42;M43;M15;M46;M39;M22 |
| 1048 | KTYERHSLSHFVNL | M64;M40;M16;M70;M31;M30;M42;M43;M15;M46;M39;M22;M64; |
| | DNLRANNTKGS | M40;M16;M70;M31;M30;M42;M43;M15;M46;M39;M22 |
| 1049 | SAFYILPSIISNEKQEI | M56;M21;M11;M16;M24;M55;M10;M45;M50;M18;M9;M23;M56; |
| | LGTVSWNL | M21;M11;M16;M24;M55;M10;M45;M50;M18;M9;M23 |
| 1050 | PGTILRTTNGDFLHF | M75;M56;M58;M16;M24;M53;M45;M18;M17;M15;M52;M11;M75; |
| | LPRVFSAVGN | M56;M58;M16;M24;M53;M45;M18;M17;M15;M52;M11 |
| 1051 | GTILRTTNGDFLHFL | M75;M56;M58;M16;M24;M53;M45;M18;M17;M15;M52;M11;M75; |
| | PRVFSAVGNI | M56;M58;M16;M24;M53;M45;M18;M17;M15;M52;M11 |
| 1052 | KLVSSFLEMKSEKQ | M40;M16;M31;M70;M25;M34;M30;M41;M43;M49;M42;M39;M40; |
| | VEQKIAEIPKE | M16;M31;M70;M25;M34;M30;M41;M43;M49;M42;M39 |
| 1053 | DKLVSSFLEMKSEK | M40;M16;M31;M70;M25;M34;M30;M41;M43;M49;M42;M39;M40; |
| | QVEQKIAEIPK | M16;M31;M70;M25;M34;M30;M41;M43;M49;M42;M39 |
| 1054 | DKNLYDKLVSSFLE | M40;M16;M31;M70;M25;M34;M30;M41;M43;M49;M42;M39;M40; |
| | MKSEKQVEQKI | M16;M31;M70;M25;M34;M30;M41;M43;M49;M42;M39 |
| 1055 | NLYDKLVSSFLEMK | M40;M16;M31;M70;M25;M34;M30;M41;M43;M49;M42;M39;M40; |
| | SEKQVEQKIAE | M16;M31;M70;M25;M34;M30;M41;M43;M49;M42;M39 |
| 1056 | FDKNLYDKLVSSFL | M40;M16;M31;M70;M25;M34;M30;M41;M43;M49;M42;M39;M40; |
| | EMKSEKQVEQK | M16;M31;M70;M25;M34;M30;M41;M43;M49;M42;M39 |
| 1057 | LYDKLVSSFLEMKS | M40;M16;M31;M70;M25;M34;M30;M41;M43;M49;M42;M39;M40; |
| | EKQVEQKIAEI | M16;M31;M70;M25;M34;M30;M41;M43;M49;M42;M39 |
| 1058 | YDKLVSSFLEMKSE | M40;M16;M31;M70;M25;M34;M30;M41;M43;M49;M42;M39;M40; |
| | KQVEQKIAEIP | M16;M31;M70;M25;M34;M30;M41;M43;M49;M42;M39 |
| 1059 | KNLYDKLVSSFLEM | M40;M16;M31;M70;M25;M34;M30;M41;M43;M49;M42;M39;M40; |
| | KSEKQVEQKIA | M16;M31;M70;M25;M34;M30;M41;M43;M49;M42;M39 |
| 1060 | IKESVQTFFKLVNKF | M58;M16;M24;M53;M57;M17;M35;M15;M42;M43;M39;M47;M58; |
| | LALCADSIII | M16;M24;M53;M57;M17;M35;M15;M42;M43;M39;M47 |
| 1061 | EIKESVQTFFKLVNK | M58;M16;M24;M53;M57;M17;M35;M15;M42;M43;M39;M47;M58; |
| | FLALCADSII | M16;M24;M53;M57;M17;M35;M15;M42;M43;M39;M47 |
| 1062 | GTTTLNGLWLDDV | M71;M75;M56;M24;M10;M65;M55;M53;M7;M79;M9;M23;M71; |
| | VYCPRHVICTSE | M75;M56;M24;M10;M65;M55;M53;M7;M79;M9;M23 |
| 1063 | CGTTTLNGLWLDD | M71;M75;M56;M24;M10;M65;M55;M53;M7;M79;M9;M23;M71; |
| | VVYCPRHVICTS | M75;M56;M24;M10;M65;M55;M53;M7;M79;M9;M23 |
| 1064 | GVEAVMYMGTLSY | M4;M56;M40;M54;M16;M55;M1;M53;M3;M6;M37;M52;M22;M4; |
| | EQFKKGVQIPCT | M56;M40;M54;M16;M55;M1;M53;M3;M6;M37;M52;M22 |
| 1065 | ASEYTGNYQCGHY | M4;M40;M52;M31;M1;M34;M3;M41;M42;M8;M43;M39;M9;M4; |
| | KHITSKETLYCI | M40;M52;M31;M1;M34;M3;M41;M42;M8;M43;M39;M9 |
| 1066 | SEYTGNYQCGHYK | M4;M40;M52;M31;M1;M34;M3;M41;M42;M8;M43;M39;M9;M4; |
| | HITSKETLYCID | M40;M52;M31;M1;M34;M3;M41;M42;M8;M43;M39;M9 |
| 1067 | CASEYTGNYQCGH | M4;M40;M52;M31;M1;M38;M3;M41;M42;M8;M43;M39;M9;M4; |
| | YKHITSKETLYC | M40;M52;M31;M1;M38;M3;M41;M42;M8;M43;M39;M9 |
| 1068 | TLKGVEAVMYMGT | M4;M56;M21;M40;M54;M55;M1;M60;M53;M3;M6;M37;M22;M4; |
| | LSYEQFKKGVQI | M56;M21;M40;M54;M55;M1;M60;M53;M3;M6;M37;M22 |
| 1069 | TTLKGVEAVMYMG | M4;M56;M21;M40;M54;M55;M1;M60;M53;M3;M6;M37;M22;M4; |
| | TLSYEQFKKGVQ | M56;M21;M40;M54;M55;M1;M60;M53;M3;M6;M37;M22 |
| 1070 | KSHNIALIWNVKDF | M56;M28;M66;M19;M1;M25;M6;M45;M37;M18;M72;M68;M59; |
| | MSLSEQLRKQI | M56;M28;M66;M19;M1;M25;M6;M45;M37;M18;M72;M68;M59 |
| 1071 | SHNIALIWNVKDFM | M56;M28;M66;M19;M1;M25;M6;M45;M37;M18;M72;M68;M59; |
| | SLSEQLRKQIR | M56;M28;M66;M19;M1;M25;M6;M45;M37;M18;M72;M68;M59 |
| 1072 | HNIALIWNVKDFMS | M56;M28;M66;M19;M1;M25;M6;M45;M37;M18;M72;M68;M59; |
| | LSEQLRKQIRS | M56;M28;M66;M19;M1;M25;M6;M45;M37;M18;M72;M68;M59 |
| 1073 | EFLRDGWEIVKFIST | M4;M64;M21;M23;M29;M6;M45;M74;M48;M8;M49;M22;M20;M4; |
| | CACEIVGGQI | M64;M21;M23;M29;M6;M45;M74;M48;M8;M49;M22;M20 |
| 1074 | VEFLRDGWEIVKFIS | M4;M64;M21;M23;M29;M6;M45;M74;M48;M8;M49;M22;M20;M4; |
| | TCACEIVGGQ | M64;M21;M23;M29;M6;M45;M74;M48;M8;M49;M22;M20 |
| 1075 | QAIASEFSSLPSYAA | M21;M52;M12;M28;M70;M31;M6;M41;M42;M68;M43;M39;M22; |
| | FATAQEAYEQ | M21;M52;M12;M28;M70;M31;M6;M41;M42;M68;M43;M39;M22 |
| 1076 | GNYQCGHYKHITSK | M40;M21;M52;M58;M31;M34;M36;M41;M42;M8;M43;M39;M9; |
| | ETLYCIDGALL | M40;M21;M52;M58;M31;M34;M36;M41;M42;M8;M43;M39;M9 |
| 1077 | VGGQIVTCAKEIKES | M56;M66;M78;M65;M7;M53;M55;M10;M79;M50;M33;M8;M23; |
| | VQTFFKLVNK | M56;M66;M78;M65;M7;M53;M55;M10;M79;M50;M33;M8;M23 |
| 1078 | RHSLSHFVNLDNLR | M64;M40;M16;M70;M31;M30;M53;M42;M43;M15;M46;M39;M22; |
| | ANNTKGSLPIN | M64;M40;M16;M70;M31;M30;M53;M42;M43;M15;M46;M39;M22 |
| 1079 | ERHSLSHFVNLDNL | M64;M40;M16;M70;M31;M30;M53;M42;M43;M15;M46;M39;M22; |
| | RANNTKGSLPI | M64;M40;M16;M70;M31;M30;M53;M42;M43;M15;M46;M39;M22 |
| 1080 | YERHSLSHFVNLDN | M64;M40;M16;M70;M31;M30;M53;M42;M43;M15;M46;M39;M22; |
| | LRANNTKGSLP | M64;M40;M16;M70;M31;M30;M53;M42;M43;M15;M46;M39;M22 |
| 1081 | EEAKTVLKKCKSAF | M64;M21;M9;M16;M31;M78;M65;M60;M63;M42;M43;M39;M22; |
| | YILPSIISNEK | M64;M21;M9;M16;M31;M78;M65;M60;M63;M42;M43;M39;M22 |
| 1082 | TTTLNGLWLDDVV | M71;M75;M56;M24;M78;M65;M10;M55;M53;M7;M79;M9;M23; |
| | YCPRHVICTSED | M71;M75;M56;M24;M78;M65;M10;M55;M53;M7;M79;M9;M23 |
| 1083 | LRDGWEIVKFISTCA | M4;M64;M21;M23;M29;M6;M45;M74;M48;M72;M8;M49;M22;M20; |
| | CEIVGGQIVT | M4;M64;M21;M23;M29;M6;M45;M74;M48;M72;M8;M49;M22;M20 |
| 1084 | FLRDGWEIVKFISTC | M4;M64;M21;M23;M29;M6;M45;M74;M48;M72;M8;M49;M22;M20; |
| | ACEIVGGQIV | M4;M64;M21;M23;M29;M6;M45;M74;M48;M72;M8;M49;M22;M20 |
| 1085 | AKSHNIALIWNVKD | M56;M32;M28;M66;M19;M1;M25;M6;M45;M37;M18;M72;M68;M59; |
| | FMSLSEQLRKQ | M56;M32;M28;M66;M19;M1;M25;M6;M45;M37;M18;M72;M68;M59 |
| 1086 | FAVDAAKAYKDYL | M32;M12;M28;M70;M48;M37;M57;M33;M69;M63;M41;M8;M42;M39; |
| | ASGGQPITNCVK | M32;M12;M28;M70;M48;M37;M57;M33;M69;M63;M41;M8;M42;M39 |
| 1087 | TFHLDGEVITFDNLK | M40;M21;M32;M66;M16;M31;M7;M29;M30;M48;M36;M68;M49;M22; |
| | TLLSLREVRT | M40;M21;M32;M66;M16;M31;M7;M29;M30;M48;M36;M68;M49;M22 |
| 1088 | HLDGEVITFDNLKT | M40;M21;M32;M66;M16;M31;M7;M29;M30;M48;M36;M68;M49;M22; |
| | LLSLREVRTIK | M40;M21;M32;M66;M16;M31;M7;M29;M30;M48;M36;M68;M49;M22 |
| 1089 | FHLDGEVITFDNLKT | M40;M21;M32;M66;M16;M31;M7;M29;M30;M48;M36;M68;M49;M22; |
| | LLSLREVRTI | M40;M21;M32;M66;M16;M31;M7;M29;M30;M48;M36;M68;M49;M22 |
| 1090 | TTFHLDGEVITFDNL | M40;M21;M32;M16;M31;M7;M29;M30;M48;M50;M36;M68;M49;M22; |
| | KTLLSLREVR | M40;M21;M32;M16;M31;M7;M29;M30;M48;M50;M36;M68;M49;M22 |
| 1091 | ILASFSASTSAFVET | M52;M54;M28;M14;M16;M60;M6;M38;M33;M42;M8;M43;M35;M47; |
| | VKGLDYKAFK | M52;M54;M28;M14;M16;M60;M6;M38;M33;M42;M8;M43;M35;M47 |
| 1092 | ASFSASTSAFVETVK | M52;M54;M14;M16;M1;M60;M6;M38;M37;M42;M8;M43;M35;M47; |
| | GLDYKAFKQI | M52;M54;M14;M16;M1;M60;M6;M38;M37;M42;M8;M43;M35;M47 |
| 1093 | DDVVYCPRHVICTS | M64;M75;M56;M28;M66;M24;M55;M65;M6;M45;M72;M49;M59;M20; |
| | EDMLNPNYEDL | M64;M75;M56;M28;M66;M24;M55;M65;M6;M45;M72;M49;M59;M20 |
| 1094 | ESVQTFFKLVNKFL | M58;M16;M24;M34;M53;M45;M57;M41;M8;M17;M15;M35;M43;M39; |
| | ALCADSIIIGG | M58;M16;M24;M34;M53;M45;M57;M41;M8;M17;M15;M35;M43;M39 |
| 1095 | EIVGGQIVTCAKEIK | M56;M28;M66;M78;M65;M80;M7;M53;M55;M10;M79;M50;M8;M23; |
| | ESVQTFFKLV | M56;M28;M66;M78;M65;M80;M7;M53;M55;M10;M79;M50;M8;M23 |
| 1096 | CEIVGGQIVTCAKEI | M56;M28;M66;M78;M65;M80;M7;M53;M55;M10;M79;M50;M8;M23; |
| | KESVQTFFKL | M56;M28;M66;M78;M65;M80;M7;M53;M55;M10;M79;M50;M8;M23 |
| 1097 | TVLKKCKSAFYILPS | M40;M64;M21;M16;M31;M78;M65;M24;M30;M63;M42;M43;M39;M22; |
| | IISNEKQEIL | M40;M64;M21;M16;M31;M78;M65;M24;M30;M63;M42;M43;M39;M22 |
| 1098 | TTNGDFLHFLPRVFS | M64;M75;M56;M58;M16;M24;M1;M53;M45;M18;M17;M15;M52;M22; |
| | AVGNICYTPS | M64;M75;M56;M58;M16;M24;M1;M53;M45;M18;M17;M15;M52;M22 |
| 1099 | TGNYQCGHYKHITS | M4;M40;M21;M52;M58;M31;M1;M34;M3;M41;M42;M8;M43;M39;M9; |
| | KETLYCIDGAL | M4;M40;M21;M52;M58;M31;M1;M34;M3;M41;M42;M8;M43;M39;M9 |
| 1100 | YTGNYQCGHYKHIT | M4;M40;M21;M52;M58;M31;M1;M34;M3;M41;M42;M8;M43;M39;M9; |
| | SKETLYCIDGA | M4;M40;M21;M52;M58;M31;M1;M34;M3;M41;M42;M8;M43;M39;M9 |
| 1101 | EYTGNYQCGHYKHI | M4;M40;M21;M52;M58;M31;M1;M34;M3;M41;M42;M8;M43;M39;M9; |
| | TSKETLYCIDG | M4;M40;M21;M52;M58;M31;M1;M34;M3;M41;M42;M8;M43;M39;M9 |
| 1102 | FCAFAVDAAKAYK | M32;M21;M12;M28;M70;M48;M37;M57;M33;M69;M63;M41;M36;M8; |
| | DYLASGGQPITN | M39;M32;M21;M12;M28;M70;M48;M37;M57;M33;M69;M63;M41;M36; |
| | | M8;M39 |
| 1103 | CAFAVDAAKAYKD | M32;M21;M12;M28;M70;M48;M37;M57;M33;M69;M63;M41;M36;M8; |
| | YLASGGQPITNC | M39;M32;M21;M12;M28;M70;M48;M37;M57;M33;M69;M63;M41;M36; |
| | | M8;M39 |
| 1104 | AFAVDAAKAYKDY | M32;M21;M12;M28;M70;M48;M37;M57;M33;M69;M63;M41;M8;M42; |
| | LASGGQPITNCV | M39;M32;M21;M12;M28;M70;M48;M37;M57;M33;M69;M63;M41;M8; |
| | | M42;M39 |
| 1105 | LASFSASTSAFVETV | M52;M54;M28;M14;M16;M1;M60;M6;M38;M37;M42;M8;M43;M35; |
| | KGLDYKAFKQ | M47;M52;M54;M28;M14;M16;M1;M60;M6;M38;M37;M42;M8;M43; |
| | | M35;M47 |
| 1106 | LDGEVITFDNLKTLL | M40;M21;M32;M66;M16;M31;M7;M65;M29;M30;M48;M36;M68;M49; |
| | SLREVRTIKV | M22;M40;M21;M32;M66;M16;M31;M7;M65;M29;M30;M48;M36M68; |
| | | M49;M22 |
| 1107 | CACEIVGGQIVTCA | M56;M28;M66;M12;M78;M65;M80;M7;M53;M55;M10;M79;M50;M8; |
| | KEIKESVQTFF | M23;M56;M28;M66;M12;M78;M65;M80;M7;M53;M55;M10;M79;M50; |
| | | M8;M23 |
| 1108 | ISTCACEIVGGQIVT | M56;M28;M66;M12;M78;M65;M80;M7;M53;M55;M10;M79;M50;M8; |
| | CAKEIKESVQ | M23;M56;M28;M66;M12;M78;M65;M80;M7;M53;M55;M10;M79;M50; |
| | | M8;M23 |
| 1109 | STCACEIVGGQIVTC | M56;M28;M66;M12;M78;M65;M80;M7;M53;M55;M10;M79;M50;M8; |
| | AKEIKESVQT | M23;M56;M28;M66;M12;M78;M65;M80;M7;M53;M55;M10;M79;M50; |
| | | M8;M23 |
| 1110 | TCACEIVGGQIVTCA | M56;M28;M66;M12;M78;M65;M80;M7;M53;M55;M10;M79;M50;M8; |
| | KEIKESVQTF | M23;M56;M28;M66;M12;M78;M65;M80;M7;M53;M55;M10;M79;M50; |
| | | M8;M23 |
| 1111 | ACEIVGGQIVTCAK | M56;M28;M66;M12;M78;M65;M80;M7;M53;M55;M10;M79;M50;M8; |
| | EIKESVQTFFK | M23;M56;M28;M66;M12;M78;M65;M80;M7;M53;M55;M10;M79;M50; |
| | | M8;M23 |
| 1112 | SPFVMMSAPPAQYE | M40;M58;M16;M31;M19;M25;M34;M46;M41;M43;M35;M15;M52; |
| | LKHGTFTCASE | M39;M44;M40;M58;M16;M31;M19;M25;M34;M46;M41;M43;M35; |
| | | M15;M52;M39;M44 |
| 1113 | IVGGQIVTCAKEIKE | M56;M28;M66;M78;M65;M80;M7;M53;M55;M10;M79;M50;M33;M8; |
| | SVQTFFKLVN | M23;M56;M28;M66;M78;M65;M80;M7;M53;M55;M10;M79;M50; |
| | | M33;M8;M23 |
| 1114 | KTVLKKCKSAFYILP | M40;M64;M21;M16;M31;M78;M65;M60;M30;M24;M63;M42;M43; |
| | SIISNEKQEI | M39;M22;M40;M64;M21;M16;M31;M78;M65;M60;M30;M24;M63; |
| | | M42;M43;M39;M22 |
| 1115 | KESVQTFFKLVNKF | M58;M16;M24;M34;M53;M45;M57;M41;M17;M35;M15;M42;M43; |
| | LALCADSIIIG | M39;M47;M58;M16;M24;M34;M53;M45;M57;M41;M17;M35;M15; |
| | | M42;M43;M39;M47 |
| 1116 | AKTVLKKCKSAFYI | M40;M64;M21;M9;M16;M31;M78;M65;M60;M30;M63;M42;M43;M39; |
| | LPSIISNEKQE | M22;M40;M64;M21;M9;M16;M31;M78;M65;M60;M30;M63;M42;M43; |
| | | M39;M22 |
| 1117 | EAKTVLKKCKSAFY | M40;M64;M21;M9;M16;M31;M78;M65;M60;M30;M63;M42;M43;M39; |
| | ILPSIISNEKQ | M22;M40;M64;M21;M9;M16;M31;M78;M65;M60;M30;M63;M42;M43; |
| | | M39;M22 |
| 1118 | TTLNGLWLDDVVY | M71;M75;M56;M23;M28;M24;M78;M65;M10;M55;M53;M7;M79;M9; |
| | CPRHVICTSEDM | M20;M71;M75;M56;M23;M28;M24;M78;M65;M10;M55;M53;M7; |
| | | M79;M9;M20 |
| 1119 | STQEFRYMNSQGLL | M40;M16;M34;M30;M47;M48;M33;M18;M41;M42;M8;M43;M15;M46; |
| | PPKNSIDAFKL | M39;M44;M40;M16;M34;M30;M47;M48;M33;M18;M41;M42;M8; |
| | | M43;M15;M46;M39;M44 |
| 1120 | ESPFVMMSAPPAQY | M40;M58;M16;M31;M19;M25;M34;M46;M41;M43;M35;M15;M52; |
| | ELKHGTFTCAS | M39;M22;M44;M40;M58;M16;M31;M19;M25;M34;M46;M41;M43; |
| | | M35;M15;M52;M39;M22;M44 |
| 1121 | TNGDFLHFLPRVFS | M64;M75;M56;M12;M58;M16;M24;M1;M53;M45;M46;M18;M17; |
| | AVGNICYTPSK | M15;M52;M22;M64;M75;M56;M12;M58;M16;M24;M1;M53;M45; |
| | | M46;M18;M17;M15;M52;M22 |
| 1122 | KSAFYILPSIISNEKQ | M56;M21;M11;M22;M16;M31;M55;M10;M24;M45;M50;M18;M43; |
| | EILGTVSWN | M39;M9;M23;M56;M21;M11;M22;M16;M31;M55;M10;M24;M45; |
| | | M50;M18;M43;M39;M9;M23 |
| 1123 | TLNGLWLDDVVYC | M71;M75;M56;M23;M28;M24;M78;M65;M10;M55;M53;M7;M79; |
| | PRHVICTSEDML | M72;M9;M20;M71;M75;M56;M23;M28;M24;M78;M65;M10;M55; |
| | | M53;M7;M79;M72;M9;M20 |
| 1124 | VSTQEFRYMNSQGL | M40;M49;M16;M34;M30;M47;M48;M33;M18;M41;M42;M8;M43; |
| | LPPKNSIDAFK | M15;M46;M39;M44;M40;M49;M16;M34;M30;M47;M48;M33;M18; |
| | | M41;M42;M8;M43;M15;M46;M39;M44 |
| 1125 | VQQESPFVMMSAPP | M40;M58;M16;M31;M19;M25;M34;M46;M41;M42;M43;M35;M15; |
| | AQYELKHGTFT | M52;M39;M22;M44;M40;M58;M16;M31;M19;M25;M34;M46;M41; |
| | | M42;M43;M35;M15;M52;M39;M22;M44 |
| 1126 | KQATKYLVQQESPF | M40;M58;M16;M31;M19;M25;M34;M46;M41;M42;M43;M35;M15; |
| | VMMSAPPAQYE | M52;M39;M22;M44;M40;M58;M16;M31;M19;M25;M34;M46;M41; |
| | | M42;M43;M35;M15;M52;M39;M22;M44 |
| 1127 | QQESPFVMMSAPPA | M40;M58;M16;M31;M19;M25;M34;M46;M41;M42;M43;M35;M15; |
| | QYELKHGTFTC | M52;M39;M22;M44;M40;M58;M16;M31;M19;M25;M34;M46;M41; |
| | | M42;M43;M35;M15;M52;M39;M22;M44 |
| 1128 | QESPFVMMSAPPAQ | M40;M58;M16;M31;M19;M25;M34;M46;M41;M42;M43;M35;M15; |
| | YELKHGTFTCA | M52;M39;M22;M44;M40;M58;M16;M31;M19;M25;M34;M46;M41; |
| | | M42;M43;M35;M15;M52;M39;M22;M44 |
| 1129 | TKYLVQQESPFVM | M40;M58;M16;M31;M19;M25;M34;M30;M46;M41;M42;M43;M35; |
| | MSAPPAQYELKH | M15;M52;M39;M22;M44;M40;M58;M16;M31;M19;M25;M34;M30; |
| | | M46;M41;M42;M43;M35;M15;M52;M39;M22;M44 |
| 1130 | ATKYLVQQESPFVM | M40;M58;M16;M31;M19;M25;M34;M30;M46;M41;M42;M43;M35; |
| | MSAPPAQYELK | M15;M52;M39;M22;M44;M40;M58;M16;M31;M19;M25;M34;M30; |
| | | M46;M41;M42;M43;M35;M15;M52;M39;M22;M44 |
| 1131 | KYLVQQESPFVMMS | M40;M58;M16;M31;M19;M25;M34;M30;M46;M41;M42;M43;M35; |
| | APPAQYELKHG | M15;M52;M39;M22;M44;M40;M58;M16;M31;M19;M25;M34;M30; |
| | | M46;M41;M42;M43;M35;M15;M52;M39;M22;M44 |
| 1132 | QATKYLVQQESPFV | M40;M58;M16;M31;M19;M25;M34;M30;M46;M41;M42;M43;M35; |
| | MMSAPPAQYEL | M15;M52;M39;M22;M44;M40;M58;M16;M31;M19;M25;M34;M30; |
| | | M46;M41;M42;M43;M35;M15;M52;M39;M22;M44 |
| 1133 | LVQQESPFVMMSAP | M40;M58;M16;M31;M19;M25;M34;M30;M46;M41;M42;M43;M35; |
| | PAQYELKHGTF | M15;M52;M39;M22;M44;M40;M58;M16;M31;M19;M25;M34;M30; |
| | | M46;M41;M42;M43;M35;M15;M52;M39;M22;M44 |
| 1134 | YLVQQESPFVMMSA | M40;M58;M16;M31;M19;M25;M34;M30;M46;M41;M42;M43;M35; |
| | PPAQYELKHGT | M15;M52;M39;M22;M44;M40;M58;M16;M31;M19;M25;M34;M30; |
| | | M46;M41;M42;M43;M35;M15;M52;M39;M22;M44 |
| 1135 | LNGLWLDDVVYCP | M71;M75;M56;M23;M28;M66;M24;M78;M65;M10;M55;M53;M6; |
| | RHVICTSEDMLN | M79;M72;M9;M59;M20;M71;M75;M56;M23;M28;M66;M24;M78; |
| | | M65;M10;M55;M53;M6;M79;M72;M9;M59;M20 |
| 1136 | NGLWLDDVVYCPR | M71;M75;M56;M23;M28;M66;M24;M78;M65;M10;M55;M53;M6; |
| | HVICTSEDMLNP | M79;M72;M9;M59;M20;M71;M75;M56;M23;M28;M66;M24;M78; |
| | | M65;M10;M55;M53;M6;M79;M72;M9;M59;M20 |
| 1137 | LGVYDYLVSTQEFR | M40;M16;M31;M34;M30;M6;M45;M48;M33;M18;M47;M41;M42; |
| | YMNSQGLLPPK | M8;M43;M15;M46;M39;M44;M40;M16;M31;M34;M30;M6;M45;M48; |
| | | M33;M18;M47;M41;M42;M8;M43;M15;M46;M39;M44 |
| 1138 | LWLDDVVYCPRHVI | M71;M75;M56;M23;M28;M66;M24;M10;M65;M55;M53;M6;M45; |
| | CTSEDMLNPNY | M79;M72;M49;M9;M59;M20;M71;M75;M56;M23;M28;M66;M24; |
| | | M10;M65;M55;M53;M6;M45;M79;M72;M49;M9;M59;M20 |
| 1139 | KKCKSAFYILPSIISN | M40;M56;M21;M11;M22;M16;M31;M55;M10;M24;M30;M45;M50; |
| | EKQEILGTV | M18;M42;M43;M39;M9;M23;M40;M56;M21;M11;M22;M16;M31; |
| | | M55;M10;M24;M30;M45;M50;M18;M42;M43;M39;M9;M23 |
| 1140 | KCKSAFYILPSIISNE | M40;M56;M21;M11;M22;M16;M31;M55;M10;M24;M30;M45;M50; |
| | KQEILGTVS | M18;M42;M43;M39;M9;M23;M40;M56;M21;M11;M22;M16;M31; |
| | | M55;M10;M24;M30;M45;M50;M18;M42;M43;M39;M9;M23 |
| 1141 | CKSAFYILPSIISNEK | M40;M56;M21;M11;M22;M16;M31;M55;M10;M24;M30;M45;M50; |
| | QEILGTVSW | M18;M42;M43;M39;M9;M23;M40;M56;M21;M11;M22;M16;M31; |
| | | M55;M10;M24;M30;M45;M50;M18;M42;M43;M39;M9;M23 |
| 1142 | DYLVSTQEFRYMNS | M40;M49;M19;M16;M25;M34;M30;M47;M45;M48;M33;M18;M41; |
| | QGLLPPKNSID | M42;M8;M43;M15;M46;M39;M44;M40;M49;M19;M16;M25;M34; |
| | | M30;M47;M45;M48;M33;M18;M41;M42;M8;M43;M15;M46;M39;M44 |
| 1143 | LVSTQEFRYMNSQG | M40;M49;M19;M16;M25;M34;M30;M47;M45;M48;M33;M18;M41; |
| | LLPPKNSIDAF | M42;M8;M43;M15;M46;M39;M44;M40;M49;M19;M16;M25;M34; |
| | | M30;M47;M45;M48;M33;M18;M41;M42;M8;M43;M15;M46;M39;M44 |
| 1144 | YLVSTQEFRYMNSQ | M40;M49;M19;M16;M25;M34;M30;M47;M45;M48;M33;M18;M41; |
| | GLLPPKNSIDA | M42;M8;M43;M15;M46;M39;M44;M40;M49;M19;M16;M25;M34; |
| | | M30;M47;M45;M48;M33;M18;M41;M42;M8;M43;M15;M46;M39;M44 |
| 1145 | LDDVVYCPRHVICT | M71;M75;M56;M23;M64;M28;M66;M24;M10;M65;M55;M53;M6; |
| | SEDMLNPNYED | M45;M79;M72;M49;M9;M59;M20;M71;M75;M56;M23;M64;M28;M66; |
| | | M24;M10;M65;M55;M53;M6;M45;M79;M72;M49;M9;M59;M20 |
| 1146 | WLDDVVYCPRHVIC | M71;M75;M56;M23;M64;M28;M66;M24;M10;M65;M55;M53;M6; |
| | TSEDMLNPNYE | M45;M79;M72;M49;M9;M59;M20;M71;M75;M56;M23;M64;M28;M66; |
| | | M24;M10;M65;M55;M53;M6;M45;M79;M72;M49;M9;M59;M20 |
| 1147 | GLWLDDVVYCPRH | M71;M75;M56;M23;M28;M66;M24;M78;M65;M10;M55;M53;M6; |
| | VICTSEDMLNPN | M45;M79;M72;M49;M9;M59;M20;M71;M75;M56;M23;M28;M66; |
| | | M24;M78;M65;M10;M55;M53;M6;M45;M79;M72;M49;M9;M59;M20 |
| 1148 | LKKCKSAFYILPSIIS | M40;M64;M21;M56;M11;M22;M16;M31;M55;M10;M24;M30;M45; |
| | NEKQEILGT | M50;M18;M42;M43;M39;M9;M23;M40;M64;M21;M56;M11;M22; |
| | | M16;M31;M55;M10;M24;M30;M45;M50;M18;M42;M43;M39;M9;M23 |
| 1149 | VLKKCKSAFYILPSII | M40;M64;M21;M56;M22;M16;M31;M78;M55;M10;M30;M24;M45; |
| | SNEKQEILG | M50;M18;M42;M43;M39;M9;M23;M40;M64;M21;M56;M22;M16; |
| | | M31;M78;M55;M10;M30;M24;M45;M50;M18;M42;M43;M39;M9;M23 |
| 1150 | YDYLVSTQEFRYMN | M25;M34;M6;M48;M33;M18;M8;M43;M47;M44;M40;M16;M30;M45; |
| | SQGLLPPKNSI | M42;M39;M19;M41;M49;M15;M46;M25;M34;M6;M48;M33;M18; |
| | | M8;M43;M47;M44;M40;M16;M30;M45;M42;M39;M19;M41;M49; |
| | | M15;M46 |
| 1151 | VYDYLVSTQEFRYM | M25;M34;M6;M48;M33;M18;M8;M43;M47;M44;M40;M16;M30;M45; |
| | NSQGLLPPKNS | M42;M39;M19;M41;M49;M15;M46;M25;M34;M6;M48;M33;M18; |
| | | M8;M43;M47;M44;M40;M16;M30;M45;M42;M39;M19;M41;M49; |
| | | M15;M46 |
| 1152 | GVYDYLVSTQEFRY | M25;M34;M6;M48;M33;M18;M8;M43;M47;M44;M40;M16;M31; |
| | MNSQGLLPPKN | M30;M45;M42;M39;M19;M41;M49;M15;M46;M25;M34;M6;M48;M33; |
| | | M18;M8;M43;M47;M44;M40;M16;M31;M30;M45;M42;M39;M19; |
| | | M41;M49;M15;M46 |

TABLE 2B
MHC II-binding Epitopes from Orf9b

| Peptides | Alleles |
|---|---|
| TLNSLEDKAFQLTPIAVQMTKLATT | DQB1-0602_DQA1 0102; DRB4_0103; DRB1_0402; |
| | DRB1_0407; DPB1-0202_DPA1-0103; DPB1- |
| | 0201_DPA1-0103 |
| ALRLVDPQIQLAVTRMENAVGRDQN | DQB1-0602_DQA1-0102; DPB1-0402_DPA1-0103; |
| | DRB1_0403; DRB1_0402; DRB1_0405; DRB1_0901; |
| | DRB1_0411; DRB1_0404; DQB1-0302_DQA1-0301; |
| | DRB1_0410 |
| RLVDPQIQLAVTRMENAVGRDQNNV | DQB1-0602_DQA1-0102; DPB1-0402_DPA1-0103; |
| | DRB1_0403; DRB1_0402; DRB1_0405; DRB1_0901; |
| | DRB1_0411; DRB1_0404; DQB1-0302_DQA1-0301; |
| | DRB1_0410 |
| LRLVDPQIQLAVTRMENAVGRDQNN | DQB1-0602_DQA1-0102; DPB1-0402_DPA1-0103; |
| | DRB1_0403; DRB1_0402; DRB1_0405; DRB1_0901; |
| | DRB1_0411; DRB1_0404; DQB1-0302_DQA1-0301; |
| | DRB1_0410 |
| PALRLVDPQIQLAVTRMENAVGRDQ | DQB1-0602_DQA1-0102; DPB1-0402_DPA1-0103; |
| | DRB1_0403; DRB1_0402; DRB1_0405; DRB1_0901; |
| | DRB1_0411; DRB1_0404; DQB1-0302_DQA1-0301; |
| | DRB1_0410 |
| LVDPQIQLAVTRMENAVGRDQNNVG | DQB1-0602_DQA1-0102; DPB1-0402_DPA1-0103; |
| | DRB1_0403; DRB1_0402; DRB1_0405; DRB1_0901; |
| | DRB1_0411; DRB1_0404; DQB1-0302_DQA1-0301; |
| | DRB1_0410 |
| VDPQIQLAVTRMENAVGRDQNNVGP | DQB1-0602_DQA1-0102; DPB1-0402_DPA1-0103; |
| | DRB1_0403; DRB1_0402; DRB1_0405; DRB1_0901; |
| | DRB1_0411; DRB1_0404; DQB1-0302_DQA1-0301 |
| EDKAFQLTPIAVQMTKLATTEELPD | DQB1-0602_DQA1-0102; DRB4_0103; DRB1_0402; |
| | DRB1_0407; DQB1-0202_DQA1-0201 |
| VGPKVYPIILRLGSPLSLNMARKTL | DPB1-0601_DPA1-0103; DQB1-0602_DQA1-0102; |
| | DRB1_0102; DRB1_0401; DPB1-1401_DPA1-0201; |
| | DPB1-0301_DPA1-0103; DPB1-0901_DPA1-0201; |
| | DPB1-1001_DPA1-0201; DRB1_1101 |
| NVGPKVYPIILRLGSPLSLNMARKT | DPB1-0601_DPA1-0103; DQB1-0602_DQA1-0102; |
| | DRB1_0102; DRB1_0401; DPB1-1401_DPA1-0201; |
| | DPB1-0301_DPA1-0103; DPB1-0901_DPA1-0201; |
| | DPB1-1001_DPA1-0201; DRB1_1101 |
| QNNVGPKVYPIILRLGSPLSLNMAR | DPB1-1301_DPA1-0201; DRB1_0102; DQB1- |
| | 0602_DQA1-0102; DRB1_0401; DPB1-1401_DPA1- |
| | 0201; DPB1-0301_DPA1-0103; DPB1-0901_DPA1- |
| | 0201; DPB1-1001_DPA1-0201; DRB1_1101 |
| DPQIQLAVTRMENAVGRDQNNVGPK | DQB1-0602_DQA1-0102; DPB1-0402_DPA1-0103; |
| | DRB1_0901; DRB1_0404; DQB1-0302_DQA1-0301 |
| NNVGPKVYPIILRLGSPLSLNMARK | DRB1_0102; DQB1-0602_DQA1-0102; DRB1_0401; |
| | DPB1-1401_DPA1-0201; DPB1-0301_DPA1-0103; |
| | DPB1-0901_DPA1-0201; DPB1-1001_DPA1-0201; |
| | DRB1_1101 |
| KTLNSLEDKAFQLTPIAVQMTKLAT | DPB1-0202_DPA1-0103; DPB1-0201_DPA1-0103; |
| | DRB4_0103; DRB1_0407 |
| NSLEDKAFQLTPIAVQMTKLATTEE | DQB1-0602_DQA1-0102; DRB4_0103; DRB1_0402; |
| | DRB1_0407; DPB1-0202_DPA1-0103 |
| LNSLEDKAFQLTPIAVQMTKLATTE | DQB1-0602_DQA1-0102; DRB4_0103; DRB1_0402; |
| | DRB1_0407; DPB1-0202_DPA1-0103 |
| LEDKAFQLTPIAVQMTKLATTEELP | DRB1_0402; DQB1-0602_DQA1-0102; DRB4_0103; |
| | DRB1_0407 |
| SLEDKAFQLTPIAVQMTKLATTEEL | DRB1_0402; DQB1-0602_DQA1-0102; DRB4_0103; |
| | DRB1_0407 |
| PLSLNMARKTLNSLEDKAFQLTPIA | DQB1-0201_DQA1-0201; DPB1-1101_DPA1-0201; |
| | DRB1_1202; DPB1-0202_DPA1-0103; DQB1- |
| | 0604_DQA1-0102; DPB1-0201_DPA1-0103; DQB1- |
| | 0202_DQA1-0201 |
| LSLNMARKTLNSLEDKAFQLTPIAV | DQB1-0201_DQA1-0201; DPB1-1101_DPA1-0201; |
| | DRB1_1202; DPB1-0202_DPA1-0103; DQB1- |
| | 0604_DQA1-0102; DPB1-0201_DPA1-0103; DQB1- |
| | 0202_DQA1-0201 |
| GPKVYPIILRLGSPLSLNMARKTLN | DRB1_0102; DPB1-0601_DPA1-0103; DQB1- |
| | 0602_DQA1-0102; DRB1_0401; DPB1-0301_DPA1- |
| | 0103; DRB1_1101 |
| MARKTLNSLEDKAFQLTPIAVQMTK | DQB1-0201_DQA1-0201; DRB1_1202; DRB1_0407; |
| | DPB1-0202_DPA1-0103; DQB1-0604_DQA1-0102; |
| | DPB1-0201_DPA1-0103; DQB1-0202_DQA1-0201 |
| ARKTLNSLEDKAFQLTPIAVQMTKL | DQB1-0201_DQA1-0201; DRB1_1202; DRB1_0407; |
| | DPB1-0202_DPA1-0103; DQB1-0604_DQA1-0102; |
| | DPB1-0201_DPA1-0103; DQB1-0202_DQA1-0201 |
| RDQNNVGPKVYPIILRLGSPLSLNM | DPB1-1301_DPA1-0201; DRB1_0102; DQB1- |
| | 0602_DQA1-0102; DRB1_0401; DPB1-1401_DPA1- |
| | 0201; DPB1-0901_DPA1-0201; DPB1-1001_DPA1- |
| | 0201; DRB1_1101 |
| GRDQNNVGPKVYPIILRLGSPLSLN | DPB1-1301_DPA1-0201; DRB1_0102; DQB1- |
| | 0602_DQA1-0102; DRB1_0401; DPB1-1401_DPA1- |
| | 0201; DPB1-0901_DPA1-0201; DPB1-1001_DPA1- |
| | 0201; DRB1_1101 |
| DQNNVGPKVYPIILRLGSPLSLNMA | DPB1-1301_DPA1-0201; DRB1_0102; DQB1- |
| | 0602_DQA1-0102; DRB1_0401; DPB1-1401_DPA1- |
| | 0201; DPB1-0901_DPA1-0201; DPB1-1001_DPA1- |
| | 0201; DRB1_1101 |
| HPALRLVDPQIQLAVTRMENAVGRD | DQB1-0602_DQA1-0102; DRB1_0403; DRB1_0402; |
| | DRB1_0405; DRB1_0901; DRB1_0411; DQB1- |
| | 0302_DQA1-0301; DRB1_0410 |
| LNMARKTLNSLEDKAFQLTPIAVQM | DQB1-0201_DQA1-0201; DRB1_1202; DPB1- |
| | 0202_DPA1-0103; DQB1-0604_DQA1-0102; DPB1- |
| | 0201_DPA1-0103; DQB1-0202_DQA1-0201 |
| NMARKTLNSLEDKAFQLTPIAVQMT | DQB1-0201_DQA1-0201; DRB1_1202; DPB1- |
| | 0202_DPA1-0103; DQB1-0604_DQA1-0102; DPB1- |
| | 0201_DPA1-0103; DQB1-0202_DQA1-0201 |
| SLNMARKTLNSLEDKAFQLTPIAVQ | DQB1-0201_DQA1-0201; DRB1_1202; DPB1- |
| | 0202_DPA1-0103; DQB1-0604_DQA1-0102; DPB1- |
| | 0201_DPA1-0103; DQB1-0202_DQA1-0201 |
| LTPIAVQMTKLATTEELPDEFVVVT | DRB1_0402; DRB4_0103; DQB1-0202_DQA1-0201 |
| KAFQLTPIAVQMTKLATTEELPDEF | DRB1_0402; DRB4_0103; DQB1-0202_DQA1-0201 |
| FQLTPIAVQMTKLATTEELPDEFVV | DRB1_0402; DRB4_0103; DQB1-0202_DQA1-0201 |
| AFQLTPIAVQMTKLATTEELPDEFV | DRB1_0402; DRB4_0103; DQB1-0202_DQA1-0201 |
| TPIAVQMTKLATTEELPDEFVVVTV | DRB1_0402; DRB4_0103; DQB1-0202_DQA1-0201 |
| QLTPIAVQMTKLATTEELPDEFVVV | DRB1_0402; DRB4_0103; DQB1-0202_DQA1-0201 |
| DKAFQLTPIAVQMTKLATTEELPDE | DRB1_0402; DRB4_0103; DQB1-0202_DQA1-0201 |
| VGRDQNNVGPKVYPIILRLGSPLSL | DPB1-1301_DPA1-0201; DQB1-0602_DQA1-0102; |
| | DPB1-1401_DPA1-0201; DPB1-0901_DPA1-0201; |
| | DPB1-1001_DPA1-0201; DRB1_1101 |
| AVGRDQNNVGPKVYPIILRLGSPLS | DPB1-1301_DPA1-0201; DQB1-0602_DQA1-0102; |
| | DPB1-1401_DPA1-0201; DPB1-0901_DPA1-0201; |
| | DPB1-1001_DPA1-0201; DRB1_1101 |
| RKTLNSLEDKAFQLTPIAVQMTKLA | DQB1-0201_DQA1-0201; DRB1_0407; DPB1- |
| | 0202_DPA1-0103; DQB1-0604_DQA1-0102; DPB1- |
| | 0201_DPA1-0103 |
| MHPALRLVDPQIQLAVTRMENAVGR | DRB1_0403; DRB1_0402; DRB1_0405; DRB1_0901; |
| | DRB1_0411; DQB1-0302_DQA1-0301; DRB1_0410 |
| EMHPALRLVDPQIQLAVTRMENAVG | DRB1_0403; DRB1_0402; DRB1_0405; DRB1_0901; |
| | DRB1_0411; DQB1-0302_DQA1-0301 |
| GSPLSLNMARKTLNSLEDKAFQLTP | DQB1-0201_DQA1-0201; DPB1-1101_DPA1-0201; |
| | DPB1-0202_DPA1-0103; DQB1-0604_DQA1-0102; |
| | DRB1_1202; DQB1-0202_DQA1-0201 |
| LRLGSPLSLNMARKTLNSLEDKAFQ | DQB1-0201_DQA1-0201; DPB1-1101_DPA1-0201; |
| | DQB1-0604_DQA1-0102; DRB1_1202; DQB1- |
| | 0202_DQA1-0201 |
| LGSPLSLNMARKTLNSLEDKAFQLT | DQB1-0201_DQA1-0201; DPB1-1101_DPA1-0201; |
| | DQB1-0604_DQA1-0102; DRB1_1202; DQB1- |
| | 0202_DQA1-0201 |
| RLGSPLSLNMARKTLNSLEDKAFQL | DQB1-0201_DQA1-0201; DPB1-1101_DPA1-0201; |
| | DQB1-0604_DQA1-0102; DRB1_1202; DQB1- |
| | 0202_DQA1-0201 |
| SPLSLNMARKTLNSLEDKAFQLTPI | DQB1-0201_DQA1-0201; DPB1-1101_DPA1-0201; |
| | DPB1-0202_DPA1-0103; DQB1-0604_DQA1-0102; |
| | DRB1_1202; DQB1-0202_DQA1-0201 |
| MDPKISEMHPALRLVDPQIQLAVTR | DRB5_0101; DRB1_1303; DRB1_0803; DRB5_0102; |
| | DRB1_1406 |
| VYPIILRLGSPLSLNMARKTLNSLE | DRB1_0102; DPB1-0601_DPA1-0103; DPB1- |
| | 0301_DPA1-0103; DRB1_0401 |
| KVYPIILRLGSPLSLNMARKTLNSL | DRB1_0102; DPB1-0601_DPA1-0103; DPB1- |
| | 0301_DPA1-0103; DRB1_0401 |
| PKVYPIILRLGSPLSLNMARKTLNS | DRB1_0102; DPB1-0601_DPA1-0103; DPB1- |
| | 0301_DPA1-0103; DRB1_0401 |
| DPKISEMHPALRLVDPQIQLAVTRM | DRB5_0101; DRB1_1303; DRB1_0803; DRB1_1406 |
| YPIILRLGSPLSLNMARKTLNSLED | DRB1_0102; DPB1-0301_DPA1-0103; DRB1_0401 |
| SEMHPALRLVDPQIQLAVTRMENAV | DQB1-0302_DQA1-0301; DRB1_0901 |
| PIAVQMTKLATTEELPDEFVVVTVK | DQB1-0202_DQA1-0201 |

TABLE 2C
(Table 2Ai and Table 2Aii Allele key)

| Allele | Alias | Allele | Alias | Allele | Alias | Allele | Alias |
|---|---|---|---|---|---|---|---|
| DPB1-0201 DPA1-0103 | M1 | DRB1 0404 | M22 | DRB1 1602 | M43 | DRB1 0403 | M64 |
| DPB1-0301 DPA1-0103 | M2 | DRB1 0406 | M23 | DRB3 0202 | M44 | DPB1-1001 | M65 |
| | | | | | | DPA1-0201 | |
| DPB1-0401 DPA1-0103 | M3 | DRB1 1401 | M24 | DQB1-0201 | M45 | DPB1-1101 | M66 |
| | | | | DQA1-0501 | | DPA1-0201 | |
| DPB1-0402 DPA1-0103 | M4 | DRB5 0102 | M25 | DRB1 0102 | M46 | DQB1-0604 | M67 |
| | | | | | | DQA1-0102 | |
| DPB1-0601 DPA1-0103 | M5 | DRB5 0202 | M26 | DRB1 0803 | M47 | DRB1 0410 | M68 |
| DQB1-0202 DQA1-0201 | M6 | DPB1-0101 | M27 | DRB1 1501 | M48 | DPB1-0501 | M69 |
| | | DPA1-0202 | | | | DPA1-0201 | |
| DRB1 0301 | M7 | DQB1-0302 | M28 | DRB1 1503 | M49 | DQB1-0502 | M70 |
| | | DQA1-0301 | | | | DQA1-0102 | |
| DRB1 0701 | M8 | DQB1-0303 | M29 | DRB1 0302 | M50 | DRB1 1302 | M71 |
| | | DQA1-0201 | | | | | |
| DRB1 1404 | M9 | DRB1 0401 | M30 | DRB4 0103 | M51 | DQB1-0603 | M72 |
| | | | | | | DQA1-0103 | |
| DRB1 1405 | M10 | DRB1 0405 | M31 | DRB1 0801 | M52 | DRB3 0201 | M73 |
| DRB3 0301 | M11 | DRB1 0411 | M32 | DRB1 1102 | M53 | DPB1-1301 | M74 |
| | | | | | | DPA1-0201 | |
| DQB1-0301 DQA1-0505 | M12 | DRB1 0901 | M33 | DRB1 1201 | M54 | DQB1-0401 | M75 |
| | | | | | | DQA1-0301 | |
| DQB1-0303 DQA1-0301 | M13 | DRB1 1001 | M34 | DRB1 1301 | M55 | DQB1-0402 | M76 |
| | | | | | | DQA1-0401 | |
| DQB1-0602 DQA1-0102 | M14 | DRB1 1303 | M35 | DRB1 1406 | M56 | DQB1-0601 | M77 |
| | | | | | | DQA1-0102 | |
| DRB1 0802 | M15 | DRB3 0101 | M36 | DPB1-0101 | M57 | DPB1-0901 | M78 |
| | | | | DPA1-0201 | | DPA1-0201 | |
| DRB1 1101 | M16 | DPB1-0202 | M37 | DRB1 0804 | M58 | DPB1-1701 | M79 |
| | | DPA1-0103 | | | | DPA1-0201 | |
| DRB1 1104 | M17 | DQB1-0601 | M38 | DQB1-0201 | M59 | DQB1-0301 | M80 |
| | | DQA1-0103 | | DQA1-0201 | | DQA1-0303 | |
| DRB1 1402 | M18 | DRB1 0101 | M39 | DRB1 1202 | M60 | DQB1-0301 | M81 |
| | | | | | | DQA1-0501 | |
| DRB5 0101 | M19 | DRB1 0407 | M40 | DPB1-0501 | M61 | DPB1-1401 | M82 |
| | | | | DPA1-0202 | | DPA1-0201 | |
| DPB1-0101 DPA1-0103 | M20 | DRB1 1502 | M41 | DQB1-0301 | M62 | DQB1-0502 | M83 |
| | | | | DQA1-0601 | | DQA1-0101 | |
| DRB1 0402 | M21 | DRB1 1601 | M42 | DQB1-0501 | M63 | | |
| | | | | DQA1-0101 | | | |

[0836] Selected peptides may be synthetically manufactured, prepared into a pharmaceutical composition and may be administered to a subject as an immunotherapeutic vaccine, where viral epitope peptide antigens stimulate T cells in vivo. Additionally, or alternatively, T cells may be from a subject, and stimulated in vitro with the selected viral epitope peptide antigens. Following adequate activation of the T cells, the activated T cells are administered to the subject as immunotherapy. Additionally, or alternatively, antigen presenting cells (APCs) may be from the subject, and the APCs are contacted with the peptides comprising viral epitope antigens in vitro. The peptides comprising the viral epitope antigen may be longer peptides, comprising 20-100 amino acids, or more. The longer peptides may comprise a plurality of epitope peptides presented as a concatemer. The longer peptides are taken up by APCs and processed for antigen presentation in an efficient manner. The viral antigen activated and viral antigen presenting APCs may be administered to the subject as personalized immunotherapy, for the APCs to activate T lymphocytes in vivo. Additionally, or alternatively, antigen presenting cells (APCs) may be from the subject, and the APCs are contacted with the peptides comprising viral epitope antigens in vitro; thereafter, the activated APCs are incubated with T cells from the subject to activate the T cells in vitro. The subject's T cells thus activated in vitro may be administered into the subject as personalized immunotherapy.

[0837] In some embodiments, the present disclosure disclosed herein also provides a large selection of viral epitope peptide and HLA pairs generated as an information library where the viral epitope: HLA pairs are ranked based on the binding affinity and presentation prediction value (PPV).

[0838] In some embodiments, the present disclosure disclosed herein also provides viral antigenic peptides comprising the epitopes that have been analyzed and selected as described in the steps above, and manufactured synthetically, for shelving and later use as off-the shelf immunotherapy reagents or products for treating coronavirus infection. In some embodiments, the manufactured peptides comprising the epitopes are solubilized in a suitable solution comprising a suitable excipient and may be frozen. In some embodiments, the manufactured peptides may be lyophilized and stored. In some embodiments, the manufactured peptides comprising the epitopes may be stored in a dry powder form. Upon determining an incoming subject's HLA repertoire, wherein the subject is in need for a therapeutic vaccine against a coronavirus, one or more viral antigenic peptides that can bind to the subject's HLA are recovered from the shelved products, mixed into a pharmaceutical composition and administered to the subject in need thereof.

[0839] In some embodiments, the viral genome may be analyzed to identify one or more B cell epitopes. In some embodiments, epitopes identified by analysis of the viral genome can be used for raising antibodies in a suitable host, such as a mammalian host, including but not limited to a mouse, a rat, a rabbit, sheep, pig, goat, lamb. In some embodiments, epitopes identified by analysis of the viral genome can be used for raising antibodies by recombinant technology.

[0840] In certain embodiments, the present disclosure provides a binding protein (e.g., an antibody or antigen-binding fragment thereof), or a T cell receptor (TCR), or a chimeric antigen receptor (CAR) capable of binding with a high affinity to a viral epitope peptide: human leukocyte antigen (HLA) complex. In some embodiments, the present disclosure provides a CAR that is capable of binding with a high affinity to a viral epitope peptide derived from the extracellular domain of a protein. In certain embodiments, an antigen-specific binding protein or TCR or CAR as described herein includes variant polypeptide species that have one or more amino acid substitutions, insertions, or deletions, provided that the binding protein retains or substantially retains its specific binding function.

[0841] In certain embodiments, a viral epitope specific binding protein, TCR or CAR is capable of (a) specifically binding to an antigen: HLA complex on a cell surface independent or in the absence of CD8. In certain embodiments, a viral epitope specific binding protein is a T cell receptor (TCR), a chimeric antigen receptor or an antigen-binding fragment of a TCR, any of which can be chimeric, humanized or human. In further embodiments, an antigen-binding fragment of the TCR comprises a single chain TCR (scTCR).

[0842] In certain embodiments, there is provided a composition comprising a viral epitope-specific binding protein or high affinity recombinant TCR according to any one of the above embodiments and a pharmaceutically acceptable carrier, diluent, or excipient.

[0843] Methods useful for isolating and purifying recombinantly produced soluble TCR, by way of example, can include obtaining supernatants from suitable host cell/vector systems that secrete the recombinant soluble TCR into culture media and then concentrating the media, for example using a commercially available filter or concentrator. Following concentration or filtration, the concentrate or filtrate, in some embodiments, can be purified, for example by application to a single suitable purification matrix or to a series of suitable matrices, such as an affinity matrix or an ion exchange resin. Alternatively or additionally, in some embodiments, one or more reverse phase HPLC steps may be employed to further purify a recombinant polypeptide. Such purification methods can also be employed when isolating an immunogen from its natural environment. Methods for large scale production of one or more of the isolated/recombinant soluble TCR described herein include batch cell culture, which is monitored and controlled to maintain appropriate culture conditions. Purification of the soluble TCR may be performed according to methods described herein and known in the art.

[0844] In one aspect, the viral protein may be a protein from a novel coronavirus, strain 2019 SARS-CoV 2 (available at NCBI Reference Sequence NC_045512.2), such as the proteins listed in Table 3.

TABLE 3
Viral Proteins

| | Length |
|---|---|
| Protein | (AAs) |
| orf1ab polyprotein | 7096 |
| orf1a polyprotein | 4405 |
| surface glycoprotein (S) | 1273 |
| nucleocapsid phosphoprotein (N) | 419 |
| ORF3a protein | 275 |
| membrane glycoprotein (M) | 222 |
| ORF7a protein | 121 |
| ORF8 protein | 121 |
| envelope protein (E) | 75 |
| ORF6 protein | 61 |
| ORF7b | 43 |
| ORF10 protein | 38 |
| ORF9b protein | 97 |

### Immunogenic and Vaccine Compositions

[0845] In one embodiment, provided herein is an immunogenic composition, e.g., a vaccine composition capable of raising a viral epitope-specific response (e.g., a humoral or cell-mediated immune response). In some embodiments, the immunogenic composition comprises viral epitope therapeutics (e.g., peptides, polynucleotides, TCR, CAR, cells containing TCR or CAR, dendritic cell containing polypeptide, dendritic cell containing polynucleotide, antibody, etc.) described herein corresponding to viral-specific viral epitope identified herein.

[0846] A person skilled in the art reading the present disclosure will be able to select viral epitope therapeutics by testing, for example, the generation of T cells in vitro as well as their efficiency and overall presence, the proliferation, affinity and expansion of certain T cells for certain peptides, and the functionality of the T cells, e.g. by analyzing the IFN-γ production or cell killing by T cells. The most efficient peptides can then combined as an immunogenic composition.

[0847] In one embodiment of the present disclosure the different viral epitope peptides and/or polypeptides are selected so that one immunogenic composition comprises viral epitope peptides and/or polypeptides capable of associating with different MHC molecules, such as different MHC class I molecule. In some embodiments, an immunogenic composition comprises viral epitope peptides and/or polypeptides capable of associating with the most frequently occurring MHC class I molecules. Hence immunogenic compositions described herein comprise different peptides capable of associating with at least 2, at least 3, or at least 4 MHC class I or class II molecules.

[0848] In one embodiment, an immunogenic composition described herein is capable of raising a specific cytotoxic T cells response, specific helper T cell response, or a B cell response.

[0849] In some embodiments, an immunogenic composition described herein can further comprise an adjuvant and/or a carrier. Examples of useful adjuvants and carriers are given herein below. Polypeptides and/or polynucleotides in the composition can be associated with a carrier such as e.g. a protein or an antigen-presenting cell such as e.g. a dendritic cell (DC) capable of presenting the peptide to a T cell or a B cell. In further embodiments, DC-binding peptides are used as carriers to target the viral epitope peptides and polynucleotides encoding the viral epitope peptides to dendritic cells (Sioud et al. FASEB J 27:3272-3283 (2013)).

[0850] In embodiments, the viral epitope polypeptides or polynucleotides can be provided as antigen presenting cells (e.g., dendritic cells) containing such polypeptides or polynucleotides. In other embodiments, such antigen presenting cells are used to stimulate T cells for use in patients.

[0851] In some embodiments, the antigen presenting cells are dendritic cells. In related embodiments, the dendritic cells are autologous dendritic cells that are pulsed with the non-mutated protein epitope peptide or nucleic acid. The viral epitope peptide can be any suitable peptide that gives rise to an appropriate T cell response. In some embodiments, the T cell is a CTL. In some embodiments, the T cell is a HTL.

[0852] Thus, one embodiment of the present disclosure an immunogenic composition containing at least one antigen presenting cell (e.g., a dendritic cell) that is pulsed or loaded with one or more viral epitope polypeptides or polynucleotides described herein. In embodiments, such APCs are autologous (e.g., autologous dendritic cells). Alternatively, peripheral blood mononuclear cells (PBMCs) from a patient can be loaded with viral epitope peptides or polynucleotides ex vivo. In related embodiments, such APCs or PBMCs are injected back into the patient.

[0853] The polynucleotide can be any suitable polynucleotide that is capable of transducing the dendritic cell, thus resulting in the presentation of a viral epitope peptide and induction of immunity. In one embodiment, the polynucleotide can be naked DNA that is taken up by the cells by passive loading. In another embodiment, the polynucleotide is part of a delivery vehicle, for example, a liposome, virus like particle, plasmid, or expression vector. In another embodiment, the polynucleotide is delivered by a vector-free delivery system, for example, high performance electroporation and high-speed cell deformation). In embodiments, such antigen presenting cells (APCs) (e.g., dendritic cells) or peripheral blood mononuclear cells (PBMCs) are used to stimulate a T cell (e.g., an autologous T cell). In related embodiments, the T cell is a CTL. In other related embodiments, the T cell is an HTL. Such T cells are then injected into the patient. In some embodiments, CTL is injected into the patient. In some embodiments, HTL is injected into the patient. In some embodiments, both CTL and HTL are injected into the patient. Administration of either therapeutic can be performed simultaneously or sequentially and in any order.

[0854] The pharmaceutical compositions (e.g., immunogenic compositions) described herein for therapeutic treatment are intended for parenteral, topical, nasal, oral or local administration. In some embodiments, the pharmaceutical compositions described herein are administered parenterally, e.g., intravenously, subcutaneously, intradermally, or intramuscularly. In some embodiments, described herein are compositions for parenteral administration which comprise a solution of the viral epitope peptides and immunogenic compositions are dissolved or suspended in an acceptable carrier, for example, an aqueous carrier. A variety of aqueous carriers can be used, e.g., water, buffered water, 0.9% saline, 0.3% glycine, hyaluronic acid and the like. These compositions can be sterilized by conventional, well known sterilization techniques, or can be sterile filtered. The resulting aqueous solutions can be packaged for use as is, or lyophilized, the lyophilized preparation being combined with a sterile solution prior to administration. The compositions can contain pharmaceutically acceptable auxiliary substances as required to approximate physiological conditions, such as pH adjusting and buffering agents, tonicity adjusting agents, wetting agents and the like, for example, sodium acetate, sodium lactate, sodium chloride, potassium chloride, calcium chloride, sorbitan monolaurate, triethanolamine oleate, etc.

[0855] The concentration of viral epitope peptides and polynucleotides described herein in the pharmaceutical formulations can vary widely, i.e., from less than about 0.1%, usually at or at least about 2% to as much as 20% to 50% or more by weight, and will be selected by fluid volumes, viscosities, etc., according to the particular mode of administration selected.

[0856] The viral epitope peptides and polynucleotides described herein can also be administered via liposomes, which target the peptides to a particular cells tissue, such as lymphoid tissue. Liposomes are also useful in increasing the half-life of the peptides. Liposomes include emulsions, foams, micelles, insoluble monolayers, liquid crystals, phospholipid dispersions, lamellar layers and the like. In these preparations the peptide to be delivered is incorporated as part of a liposome, alone or in conjunction with a molecule which binds to, e.g., a receptor prevalent among lymphoid cells, such as monoclonal antibodies which bind to the DEC205 antigen, or with other therapeutic or immunogenic compositions. Thus, liposomes filled with a desired peptide or polynucleotide described herein can be directed to the site of lymphoid cells, where the liposomes then deliver the selected therapeutic/immunogenic polypeptide/polynucleotide compositions. Liposomes can be formed from standard vesicle-forming lipids, which generally include neutral and negatively charged phospholipids and a sterol, for example, cholesterol. The selection of lipids is generally guided by consideration of, e.g., liposome size, acid lability and stability of the liposomes in the blood stream. A variety of methods are available for preparing liposomes, as described in, e.g., Szoka et al., Ann. Rev. Biophys. Bioeng. 9; 467 (1980), U.S. Pat. Nos. 4,235,871, 4,501,728, 4,501,728, 4,837,028, and 5,019,369.

[0857] For targeting to the immune cells, a viral epitope polypeptides or polynucleotides to be incorporated into the liposome for cell surface determinants of the desired immune system cells. A liposome suspension containing a peptide can be administered intravenously, locally, topically, etc. in a dose which varies according to, inter alia, the manner of administration, the polypeptide or polynucleotide being delivered, and the stage of the disease being treated.

[0858] In some embodiments, viral epitope polypeptides and polynucleotides are targeted to antigen-presenting cells (e.g., in some embodiments dendritic cells). In one embodiment, the viral epitope polypeptides and polynucleotides are target to antigen-presenting cells (e.g., in some embodiments dendritic cells) using the markers DEC205, XCR1, CD197, CD80, CD86, CD123, CD209, CD273, CD283, CD289, CD184, CD85h, CD85j, CD85k, CD85d, CD85g, CD85a, TSLP receptor, or CD1a.

[0859] For solid compositions, conventional or nanoparticle nontoxic solid carriers can be used which include, for example, pharmaceutical grades of mannitol, lactose, starch, magnesium stearate, sodium saccharin, talcum, cellulose, glucose, sucrose, magnesium carbonate, and the like. For oral administration, a pharmaceutically acceptable nontoxic composition is formed by incorporating any of the normally employed excipients, such as those carriers previously listed, and generally 10-95% of active ingredient, that is, one or more viral epitope polypeptides or polynucleotides described herein at a concentration of 25%-75%.

[0860] For aerosol administration, the viral epitope polypeptides or polynucleotides can be supplied in finely divided form along with a surfactant and propellant. Representative of such agents are the esters or partial esters of fatty acids containing from 6 to 22 carbon atoms, such as caproic, octanoic, lauric, palmitic, stearic, linoleic, linolenic, olesteric and oleic acids with an aliphatic polyhydric alcohol or its cyclic anhydride. Mixed esters, such as mixed or natural glycerides can be employed. The surfactant can constitute 0.1%-20% by weight of the composition, or 0.25-5%. The balance of the composition can be propellant. A carrier can also be included as desired, as with, e.g., lecithin for intranasal delivery.

[0861] Additional methods for delivering the viral epitope polynucleotides described herein are also known in the art. For instance, the nucleic acid can be delivered directly, as “naked DNA”. This approach is described, for instance, in Wolff et al., Science 247:1465-1468 (1990) as well as U.S. Pat. Nos. 5,580,859 and 5,589,466. The nucleic acids can also be administered using ballistic delivery as described, for instance, in U.S. Pat. No. 5,204,253. Particles comprised solely of DNA can be administered. Alternatively, DNA can be adhered to particles, such as gold particles.

[0862] For therapeutic or immunization purposes, nucleic acids (e.g., in some embodiments mRNA) encoding one or more viral epitope peptides described herein, or peptide binding agents described herein can also be administered to patients. In some embodiments, nucleic acids (e.g., in some embodiments mRNA) encoding one or more viral epitope peptides described herein, or peptide binding agents described herein may be formulated in synthetic lipid nanoparticles. In some embodiments, the mRNA is a modified mRNA. In some embodiments, the mRNA is self-amplifying RNA. In a further embodiment, a mRNA, such as a self-amplifying RNA, is a part of a synthetic lipid nanoparticle formulation (Geall et al., Proc Natl Acad Sci USA. 109:14604-14609 (2012)).

[0863] In some embodiments, nucleic acids (e.g., in some embodiments mRNA) encoding one or more viral epitope peptides described herein or peptide binding agents described herein can be delivered complexed to cationic compounds, such as cationic lipids. In some embodiments, nucleic acids (e.g., in some embodiments mRNA) encoding one or more viral epitope peptides described herein or peptide binding agents described herein can be encapsulated in lipid nanoparticles. In some embodiments, lipid nanoparticles can comprise cationic lipid, non-cationic lipids (e.g., phospholipids and/or sterol), and/or PEG-lipids). In some embodiments, lipid nanoparticle can comprise cationic lipid, non-cationic lipids (e.g., phospholipids and/or sterol), and/or PEG-lipids) as described in WO2021/213924, the entire contents of which is incorporated herein by reference for purposes described herein. Lipid-mediated gene delivery methods are described, for instance, in WO 96/18372, WO 93/24640; Mannino & Gould-Fogerite, BioTechniques 6 (7): 682-691 (1988); U.S. Pat. No. 5,279,833; WO 91/06309; and Felgner et al., Proc. Natl. Acad. Sci. USA 84:7413-7414 (1987). As used in the present disclosure, “nanoparticle” refers to a particle having an average diameter suitable for parenteral administration. In various embodiments, lipid nanoparticles can have an average size (e.g., mean diameter) of about 30 nm to about 150 nm, about 40 nm to about 150 nm, about 50 nm to about 150 nm, about 60 nm to about 130 nm, about 70 nm to about 110 nm, about 70 nm to about 100 nm, about 70 to about 90 nm, or about 70 nm to about 80 nm. In some embodiments, lipid nanoparticles in accordance with the present disclosure can have an average size (e.g., mean diameter) of about 50 nm to about 100 nm. In some embodiments, lipid nanoparticles may have an average size (e.g., mean diameter) of about 50 nm to about 150 nm. In some embodiments, lipid nanoparticles may have an average size (e.g., mean diameter) of about 60 nm to about 120 nm. In some embodiments, lipid nanoparticles in accordance with the present disclosure can have an average size (e.g., mean diameter) of about 30 nm, 35 nm, 40 nm, 45 nm, 50 nm, 55 nm, 60 nm, 65 nm, 70 nm, 75 nm, 80 nm, 85 nm, 90 nm, 95 nm, 100 nm, 105 nm, 110 nm, 115 nm, 120 nm, 125 nm, 130 nm, 135 nm, 140 nm, 145 nm, or 150 nm.

[0864] Lipid nanoparticles (LNPs) (e.g., ribonucleic acid LNPs) described herein may exhibit a polydispersity index less than about 0.5, less than about 0.4, less than about 0.3, or about 0.2 or less. By way of example, the nucleic acid particles (e.g., ribonucleic acid particles) can exhibit a polydispersity index in a range of about 0.1 to about 0.3 or about 0.2 to about 0.3.

[0865] LNPs described herein can be characterized by an “N/P ratio,” which is the molar ratio of cationic (nitrogen) groups (the “N” in N/P) in the cationic polymer to the anionic (phosphate) groups (the “P” in N/P) in RNA. It is understood that a cationic group is one that is either in cationic form (e.g., N⁺), or one that is ionizable to become cationic. Use of a single number in an N/P ratio (e.g., an N/P ratio of about 5) is intended to refer to that number over 1, e.g., an N/P ratio of about 5 is intended to mean 5:1. In some embodiments, an LNP (e.g., a ribonucleic acid LNP) described herein has an N/P ratio greater than or equal to 5. In some embodiments, an LNP (e.g., a ribonucleic acid LNP) described herein has an N/P ratio that is about 5, 6, 7, 8, 9, or 10. In some embodiments, an N/P ratio for an LNP (e.g., a ribonucleic acid LNP) described herein is from about 10 to about 50. In some embodiments, an N/P ratio for an LNP (e.g., a ribonucleic acid LNP) described herein is from about 10 to about 70. In some embodiments, an N/P ratio for a nucleic acid LNP (e.g., a ribonucleic acid LNP) described herein is from about 10 to about 120.

[0866] LNPs (e.g., ribonucleic acid LNPs) described herein can be prepared using a wide range of methods that may involve obtaining a colloid from at least one cationic or cationically ionizable lipid or lipid-like material and/or at least one cationic polymer and mixing the colloid with nucleic acid to obtain nucleic acid particles.

[0867] The term “colloid” as used herein relates to a type of homogeneous mixture in which dispersed particles do not settle out. The insoluble particles in the mixture can be microscopic, with particle sizes between 1 and 1000 nanometers. The mixture may be termed a colloid or a colloidal suspension. Sometimes the term “colloid” only refers to the particles in the mixture and not the entire suspension.

[0868] The term “average diameter” or “mean diameter” refers to the mean hydrodynamic diameter of particles as measured by dynamic laser light scattering (DLS) with data analysis using the so-called cumulant algorithm, which provides as results the so-called Z-average with the dimension of a length, and the polydispersity index (PI), which is dimensionless (Koppel, D., J. Chem. Phys. 57, 1972, pp 4814-4820, ISO 13321, which is herein incorporated by reference). Here “average diameter,” “mean diameter,” “diameter,” or “size” for particles is used synonymously with this value of the Z-average.

[0869] The “polydispersity index” is preferably calculated based on dynamic light scattering measurements by the so-called cumulant analysis as mentioned in the definition of the “average diameter.” Under certain prerequisites, it can be taken as a measure of the size distribution of an ensemble of ribonucleic acid nanoparticles (e.g., ribonucleic acid nanoparticles).

[0870] Different types of nucleic acid particles have been described previously to be suitable for delivery of nucleic acid in particulate form (e.g. Kaczmarek, J. C. et al., 2017, Genome Medicine 9, 60, which is herein incorporated by reference). For non-viral nucleic acid delivery vehicles, nanoparticle encapsulation of nucleic acid physically protects nucleic acid from degradation and, depending on the specific chemistry, can aid in cellular uptake and endosomal escape.

[0871] The present disclosure describes LNPs comprising nucleic acid (e.g., a polyribonucleotide), at least one cationic or cationically ionizable lipid or lipid-like material, and/or at least one cationic polymer which associate with the nucleic acid (e.g., a polyribonucleotide) to form nucleic acid particles (e.g., ribonucleic acid particles, e.g., ribonucleic acid nanoparticles) and compositions comprising such particles. The LNPs (e.g., ribonucleic acid LNPs, e.g., ribonucleic acid LNPs) may comprise nucleic acid (e.g., a polyribonucleotide) which is complexed in different forms by non-covalent interactions to the LNPs.

[0872] Some embodiments described herein relate to compositions, methods and uses involving more than one, e.g., 2, 3, 4, 5, 6 or even more nucleic acid species (e.g., polyribonucleotide species).

[0873] In an LNP (e.g., ribonucleic acid LNP) formulation, it is possible that each nucleic acid species (e.g., polyribonucleotide species) is separately formulated as an individual nucleic acid LNP (e.g., ribonucleic acid LNP) formulation. In that case, each individual nucleic acid LNP (e.g., ribonucleic acid LNP) formulation will comprise one nucleic acid species (e.g., polyribonucleotide species). The individual LNP (e.g., ribonucleic acid LNP) formulations may be present as separate entities, e.g., in separate containers. Such formulations are obtainable by providing each nucleic acid species (e.g., polyribonucleotide species) separately (typically each in the form of a nucleic acid-containing solution) together with a particle-forming agent, thereby allowing the formation of particles. Respective particles will contain exclusively the specific nucleic acid species (e.g., polyribonucleotide species) that is being provided when the particles are formed (individual particulate formulations).

[0874] In some embodiments, a composition such as a pharmaceutical composition comprises more than one individual nucleic acid LNP (e.g., ribonucleic acid LNP) formulation. Respective pharmaceutical compositions are referred to as “mixed particulate formulations.” Mixed particulate formulations according to the present disclosure are obtainable by forming, separately, individual nucleic acid LNP (e.g., ribonucleic acid particle, e.g., ribonucleic acid nanoparticle) formulations, as described above, followed by a step of mixing of the individual nucleic acid LNP (e.g., ribonucleic acid particle, e.g., ribonucleic acid nanoparticle) formulations. By the step of mixing, a formulation comprising a mixed population of nucleic acid-containing particles is obtainable. Individual nucleic acid LNP (e.g., ribonucleic acid particle, e.g., ribonucleic acid nanoparticle) populations may be together in one container, comprising a mixed population of individual nucleic acid LNPs (e.g., ribonucleic acid LNP) formulations.

[0875] Alternatively, it is possible that different nucleic acid species (e.g., polyribonucleotide species) are formulated together as a “combined LNP formulation.” Such formulations are obtainable by providing a combined formulation (typically combined solution) of different nucleic acid species (e.g., polyribonucleotide species) species together with a particle-forming agent, thereby allowing the formation of particles. As opposed to a “mixed particulate formulation,” a “combined particulate formulation” will typically comprise particles that comprise more than one nucleic acid species (e.g., polyribonucleotide species) species. In a combined particulate composition different nucleic acid species (e.g., polyribonucleotide species) are typically present together in a single particle.

[0876] In certain embodiments, nucleic acids (e.g., polyribonucleotides), when present in provided nucleic acid LNPz (e.g., ribonucleic acid LNPs) are resistant in aqueous solution to degradation with a nuclease.

[0877] In some embodiments, lipid nanoparticles are liver-targeting lipid nanoparticles. In some embodiments, lipid nanoparticles are cationic lipid nanoparticles comprising one or more cationic lipids (e.g., ones described herein). In some embodiments, cationic lipid nanoparticles may comprise at least one cationic lipid, at least one polymer-conjugated lipid, and at least one helper lipid (e.g., at least one neutral lipid).

### Cationic Polymeric Materials

[0878] Cationic polymers have been recognized as useful for developing such delivery vehicles, as reported in PCT App. Pub. No. WO 2021/001417, the entirety of which is incorporated herein by reference. As used herein, the term “polymer” refers to a composition comprising one or more molecules that comprise repeating units of one or more monomers. As used herein, “polymer,” “polymeric material,” and “polymer composition” are used interchangeably, and unless otherwise specified, refer to a composition of polymer molecules. A person of skill in the art will appreciate that a polymer composition comprises polymer molecules having molecules of different lengths (e.g., comprising varying amounts of monomers). Polymer compositions described herein are characterized by one or more of a normalized molecular weight (Mn), a weight average molecular weight (Mw), and/or a polydispersity index (PDI). In some embodiments, such repeat units can all be identical (a “homopolymer”); alternatively, in some cases, there can be more than one type of repeat unit present within the polymeric material (a “heteropolymer” or a “copolymer”). In some cases, a polymer is biologically derived, e.g., a biopolymer such as a protein. In some cases, additional moieties can also be present in the polymeric material, for example targeting moieties such as those described herein.

[0879] In some embodiments, a polymer utilized in accordance with the present disclosure may be a copolymer. Repeat units forming the copolymer can be arranged in any fashion. For example, in some embodiments, repeat units can be arranged in a random order; alternatively or additionally, in some embodiments, repeat units may be arranged in an alternating order, or as a “block” copolymer, e.g., comprising one or more regions each comprising a first repeat unit (e.g., a first block), and one or more regions each comprising a second repeat unit (e.g., a second block), etc. Block copolymers can have two (a diblock copolymer), three (a triblock copolymer), or more numbers of distinct blocks.

[0880] In certain embodiments, a polymeric material for use in accordance with the present disclosure is biocompatible. In certain embodiments, a biocompatible material is biodegradable, e.g., is able to degrade, chemically and/or biologically, within a physiological environment, such as within the body.

[0881] In certain embodiments, a polymeric material may be or comprise protamine or polyalkyleneimine.

[0882] As those skilled in the art are aware term “protamine” is often used to refer to any of various strongly basic proteins of relatively low molecular weight that are rich in arginine and are found associated especially with DNA in place of somatic histones in the sperm cells of various animals (as fish). In particular, the term “protamine” is often used to refer to proteins found in fish sperm that are strongly basic, are soluble in water, are not coagulated by heat, and yield chiefly arginine upon hydrolysis. In purified form, they are used in a long-acting formulation of insulin and to neutralize the anticoagulant effects of heparin.

[0883] In some embodiments, the term “protamine” as used herein is refers to a protamine amino acid sequence obtained or derived from natural or biological sources, including fragments thereof and/or multimeric forms of said amino acid sequence or fragment thereof, as well as (synthesized) polypeptides which are artificial and specifically designed for specific purposes and cannot be isolated from native or biological sources.

[0884] In some embodiments, a polyalkyleneimine comprises polyethylenimine (PEI) and/or polypropylenimine. In some embodiments, a preferred polyalkyleneimine is polyethyleneimine (PEI). In some embodiments, the average molecular weight of PEI is preferably 0.75·102 to 107 Da, preferably 1000 to 105 Da, more preferably 10000 to 40000 Da, more preferably 15000 to 30000 Da, even more preferably 20000 to 25000 Da.

[0885] Cationic materials (e.g., polymeric materials, including polycationic polymers) contemplated for use herein include those which are able to electrostatically bind nucleic acid. In some embodiments, cationic polymeric materials contemplated for use herein include any cationic polymeric materials with which nucleic acid can be associated, e.g., by forming complexes with the nucleic acid or forming vesicles in which the nucleic acid is enclosed or encapsulated.

[0886] In some embodiments, particles described herein may comprise polymers other than cationic polymers, e.g., non-cationic polymeric materials and/or anionic polymeric materials. Collectively, anionic and neutral polymeric materials are referred to herein as non-cationic polymeric materials.

### Lipid Particles

[0887] The terms “lipid” and “lipid-like material” are used herein to refer to molecules that comprise one or more hydrophobic moieties or groups and optionally also one or more hydrophilic moieties or groups. Molecules comprising hydrophobic moieties and hydrophilic moieties are also frequently denoted as amphiphiles. Lipids are usually poorly soluble in water. In an aqueous environment, the amphiphilic nature allows the molecules to self-assemble into organized structures and different phases. One of those phases consists of lipid bilayers, as they are present in vesicles, multilamellar/unilamellar liposomes, or membranes in an aqueous environment. Hydrophobicity can be conferred by the inclusion of apolar groups that include, but are not limited to, long-chain saturated and unsaturated aliphatic hydrocarbon groups and such groups substituted by one or more aromatic, cycloaliphatic, or heterocyclic group(s). In some embodiments, hydrophilic groups may comprise polar and/or charged groups and include carbohydrates, phosphate, carboxylic, sulfate, amino, sulfhydryl, nitro, hydroxyl, and other like groups.

[0888] Lipid nanoparticles (also referred to as “lipid nanoparticles”) of the present disclosure comprise (i) a cationic lipid; (ii) a polymer-conjugated lipid, and (iii) one or more helper lipids. Lipid nanoparticles described herein are useful for the delivery of nucleic acid cargo (e.g., a polyribonucleotide) into the cell of a subject. In some embodiments, lipid nanoparticles comprising a nucleic acid (e.g., a polyribonucleotide) described herein are useful for causing increased expression of a protein (e.g., an antibody agent) in a subject. In some embodiments, lipid nanoparticles comprising a nucleic acid (e.g., a polyribonucleotide) described herein are useful for causing a pharmacological effect induced by expression of a protein in a subject. Lipid nanoparticles described herein are characterized by molar percentage (mol %) of components in the lipid nanoparticle. A mol % used in reference to a lipid component of a lipid nanoparticle is relative to the total other lipid components in the lipid nanoparticle.

a. Cationic Lipids

[0889] As described herein, lipid nanoparticles of the present disclosure comprise a cationic lipid. In some embodiments, a lipid nanoparticle for delivery of at least one polyribonucleotide described herein comprises a cationic lipid. A cationic lipid, as described herein, is a lipid that is positively charged or is ionizable, such that the cationic lipid will become positively charged when subjected to particular physiological conditions, e.g., a pH of about 7.4 or less, and can promote lipid aggregation. In some embodiments, a cationic lipid is a lipid comprising one or more amine groups which bear or are capable of bearing a positive charge.

[0890] In some embodiments, a cationic lipid may comprise a cationic, meaning positively charged, headgroup. In some embodiments, a cationic lipid may have a hydrophobic domain (e.g., one or more domains of a neutral lipid or an anionic lipid) provided that the cationic lipid has a net positive charge. In some embodiments, a cationic lipid comprises a polar headgroup, which in some embodiments may comprise one or more amine derivatives such as primary, secondary, and/or tertiary amines, quaternary ammonium, various combinations of amines, amidinium salts, or guanidine and/or imidazole groups as well as pyridinium, piperizine and amino acid headgroups such as lysine, arginine, ornithine and/or tryptophan. In some embodiments, a polar headgroup of a cationic lipid comprises one or more amine derivatives. In some embodiments, a polar headgroup of a cationic lipid comprises a quaternary ammonium. In some embodiments, a headgroup of a cationic lipid may comprise multiple cationic charges. In some embodiments, a headgroup of a cationic lipid comprises one cationic charge.

[0891] In some embodiments, a cationic lipid is selected from 1,2-dimyristoyl-sn-glycero-3-ethylphosphocholine (DMEPC); 2-dimyristoyl-3-trimethylammonium propane (DMTAP); dioleyl ether phosphatidylcholine (DOEPC); N,N-dioleyl-N,N-dimethylammonium chloride (DODAC); N-(2,3-dioleyloxy)propyl)-N,N,N-trimethylammonium chloride (DOTMA); N,N-distearyl-N,N-dimethylammonium bromide (DDAB); N-(2,3dioleoyloxy)propyl)-N,N,N-trimethylammonium chloride (DOTAP); 3-(N-(N′,N′dimethylaminoethane)-carbamoyl) cholesterol (DC-Chol), N-(1-(2,3-dioleoyloxy)propyl)N-2-(sperminecarboxamido)ethyl)-N,N-dimethylammonium trifluoracetate (DOSPA), dioctadecylamidoglycyl carboxyspermine (DOGS), 1,2-dioleoyl-3-dimethylammonium propane (DODAP), N,N-dimethyl-2,3-dioleoyloxy)propylamine (DODMA), and N-(1,2-dimyristyloxyprop-3-yl)-N,N-dimethyl-N-hydroxyethyl ammonium bromide (DMRIE).

[0892] In some embodiments, a cationic lipid is one provided in WO2012/016184, which is incorporated herein by reference in its entirety. For example, in some embodiments, a cationic lipid is selected from 1,2-dilinoleyoxy-3-(dimethylamino) acetoxypropane (DLin-DAC), 1,2-dilinoleyoxy-3morpholinopropane (DLin-MA), 1,2-dilinoleoyl-3-dimethylaminopropane (DLinDAP), 1,2-dilinoleylthio-3-dimethylaminopropane (DLin-S-DMA), 1-linoleoyl-2-linoleyloxy-3dimethylaminopropane (DLin-2-DMAP), 1,2-dilinoleyloxy-3-trimethylaminopropane chloride salt (DLin-TMA.CI), 1,2-dilinoleoyl-3-trimethylaminopropane chloride salt (DLin-TAP.CI), 1,2-dilinoleyloxy-3-(N-methylpiperazino) propane (DLin-MPZ), 3-(N,Ndilinoleylamino)-1,2-propanediol (DLinAP), 3-(N,N-dioleylamino)-1,2-propanediol (DOAP), 1,2-dilinoleyloxo-3-(2-N,N-dimethylamino) ethoxypropane (DLin-EG-DMA), and 2,2-dilinoleyl-4-dimethylaminomethyl-[1,3]-dioxolane (DLin-K-DMA).

[0893] In some embodiments, a cationic lipid is one provided in WO2020/219941, WO2017/075531, WO2016/176330, WO2017/049245, or U.S. Pat. No. 9,670,152, each of which is incorporated herein by reference in its entirety.

[0894] In some embodiments, a cationic lipid is a compound of Formula I:

[chemical structure]

or a pharmaceutically acceptable salt thereof, wherein:
[0895] one of L¹ or L² is —OC(O)—, —C(O)O—, —C(O)—, —O—, —S(O)ₓ—, —S—S—, —C(O)S—, SC(O)—, —NR^{a}C(O)—, —C(O)NR^{a}—, —NR^{a}C(O)NR^{a}—, —OC(O)NR^{a}— or —NR^{a}C(O)O—, and the other of L¹ or L² is —OC(O)—, —C(O)O—, —C(O)—, —O—, —S(O)ₓ—, —S—S—, —C(O)S—, SC(O)—, —NR^{a}C(O)—, —C(O)NR^{a}—, —NR^{a}C(O)NR^{a}—, —OC(O)NR^{a}—, —NR^{a}C(O)O—, or a direct bond;
[0896] G¹ and G² are each independently unsubstituted C₁-C₁₂ alkylene or C1-C₁₂ alkenylene;
[0897] G³ is C₁-C₂₄ alkylene, C1-C₂₄ alkenylene, C₃-C₈ cycloalkylene, C₃-C₈ cycloalkenylene;
[0898] R^{a} is H or C₁-C₁₂ alkyl;
[0899] R¹ and R² are each independently C₆-C₂₄ alkyl or C6-C₂₄ alkenyl;
[0900] R³ is H, OR⁵, CN, —C(O)OR⁴, —OC(O)R⁴ or -R⁵C(O)R⁴;
[0901] R⁴ is C₁-C₁₂ alkyl;
[0902] R⁵ is H or C₁-C₆ alkyl; and
[0903] x is 0, 1 or 2.

[0904] In some embodiments, one of L¹ or L² is —OC(O)— or —C(O)O—. In some embodiments, each of L¹ and L² is —OC(O)— or —C(O)O—.

[0905] In some embodiments, G¹ is C₁-C₁₂ alkylene. In some embodiments, G² is C₁-C₁₂ alkylene. In some embodiments G¹ and G² are each independently C₁-C₁₂ alkylene. In some embodiments G¹ and G² are each independently C5-C₁₂ alkylene.

[0906] In some embodiments, G³ is C₁-C₂₄ alkylene. In some embodiments, G³ is C₁-C₆ alkylene.

[0907] In some embodiments, R¹ and R² are each independently selected from:

[chemical structure]

[0908] In some embodiments, R³ is OH.

[0909] In some embodiments, each of L¹ and L² is —OC(O)—, G¹ and G² are each independently C₅-C₁₂ alkylene, G³ is C₁-C₆ alkylene, R³ is OH, and R¹ and R² are each independently selected from:

[chemical structure]

[0910] In some embodiments, a cationic lipid is a compound of Formula Ia or Ib

[chemical structure]

or a pharmaceutically acceptable salt thereof, where n is an integer from 1 to 15, A is C₃-C₈ cycloaliphatic, each R⁶ is independently selected from H, OH, and C₁-C₂₄ aliphatic, and wherein R¹, R², R³, L¹, L², G¹, and G² are as described in classes and subclasses herein, both singly and in combination.

[0911] In some embodiments, a positively charged lipid structure described herein may also include one or more other components that may be typically used in the formation of vesicles (e.g. for stabilization). Examples of such other components includes, without being limited thereto, fatty alcohols, fatty acids, and/or cholesterol esters or any other pharmaceutically acceptable excipients which may affect the surface charge, the membrane fluidity and assist in the incorporation of the lipid into the lipid assembly. Examples of sterols include cholesterol, cholesteryl hemisuccinate, cholesteryl sulfate, or any other derivatives of cholesterol. Preferably, the at least one cationic lipid comprises DMEPC and/or DOTMA.

[0912] In some embodiments, a cationic lipid is ionizable such that it can exist in a positively charged form or neutral form depending on pH. Such ionization of a cationic lipid can affect the surface charge of the lipid particle under different pH conditions, which in some embodiments may influence plasma protein absorption, blood clearance, and/or tissue distribution as well as the ability to form endosomolytic non-bilayer structures. Accordingly, in some embodiments, a cationic lipid may be or comprise a pH responsive lipid. In some embodiments a pH responsive lipid is a fatty acid derivative or other amphiphilic compound which is capable of forming a lyotropic lipid phase, and which has a pKa value between pH 5 and pH 7.5. This means that the lipid is uncharged at a pH above the pKa value and positively charged below the pKa value. In some embodiments, a pH responsive lipid may be used in addition to or instead of a cationic lipid for example by binding one or more polyribonucleotides to a lipid or lipid mixture at low pH. pH responsive lipids include, but are not limited to, 1,2-dioieyioxy-3-dimethylamino-propane (DODMA).

[0913] In some embodiments, a lipid nanoparticle may comprise one or more cationic lipids as described in WO 2017/075531 (e.g., as presented in Tables 1 and 3 therein) and WO 2018/081480 (e.g., as presented in Tables 1~4 therein), the entire contents of each of which are incorporated herein by reference for the purposes described herein.

[0914] In some embodiments, a cationic lipid that may be useful in accordance with the present disclosure is an amino lipid comprising a titratable tertiary amino head group linked via ester bonds to at least two saturated alkyl chains, which ester bonds can be hydrolyzed easily to facilitate fast degradation and/or excretion via renal pathways. In some embodiments, such an amino lipid has an apparent pKa of about 6.0-6.5 (e.g., in one embodiment with an apparent pKa of approximately 6.25), resulting in an essentially fully positively charged molecule at an acidic pH (e.g., pH 5). In some embodiments, such an amino lipid, when incorporated in lipid nanoparticle, can confer distinct physicochemical properties that regulate particle formation, cellular uptake, fusogenicity and/or endosomal release of polyribonucleotide(s). In some embodiments, introduction of an aqueous RNA solution to a lipid mixture comprising such an amino lipid at pH 4.0 can lead to an electrostatic interaction between the negatively charged RNA backbone and the positively charged cationic lipid. Without wishing to be bound by any particular theory, such electrostatic interaction leads to particle formation coincident with efficient encapsulation of RNA drug substance. After RNA encapsulation, adjustment of the pH of the medium surrounding the resulting lipid nanoparticle to a more neutral pH (e.g., pH 7.4) results in neutralization of the surface charge of the lipid nanoparticle. When all other variables are held constant, such charge-neutral particles display longer in vivo circulation lifetimes and better delivery to hepatocytes compared to charged particles, which are rapidly cleared by the reticuloendothelial system. Upon endosomal uptake, the low pH of the endosome renders lipid nanoparticle comprising such an amino lipid fusogenic and allows the release of the RNA into the cytosol of the target cell.

[0915] In some embodiments, a cationic lipid that may be useful in accordance with the present disclosure has one of the structures set forth in Table B below:

TABLE B
Exemplary cationic lipids

| No. | Structure |
|---|---|
| I-1 | [chemical structure] |
| I-2 | [chemical structure] |
| I-3 | [chemical structure] |
| I-4 | [chemical structure] |
| I-5 | [chemical structure] |
| I-6 | [chemical structure] |
| I-7 | [chemical structure] |
| I-8 | [chemical structure] |
| I-9 | [chemical structure] |
| I-10 | [chemical structure] |
| I-11 | [chemical structure] |
| I-12 | [chemical structure] |
| I-13 | [chemical structure] |
| I-14 | [chemical structure] |
| I-15 | [chemical structure] |
| I-16 | [chemical structure] |
| I-17 | [chemical structure] |
| I-18 | [chemical structure] |
| I-19 | [chemical structure] |
| I-20 | [chemical structure] |
| I-21 | [chemical structure] |
| I-22 | [chemical structure] |
| I-23 | [chemical structure] |
| I-24 | [chemical structure] |
| I-25 | [chemical structure] |
| I-26 | [chemical structure] |
| I-27 | [chemical structure] |
| I-28 | [chemical structure] |
| I-29 | [chemical structure] |
| I-30 | [chemical structure] |
| I-31 | [chemical structure] |
| I-32 | [chemical structure] |
| I-33 | [chemical structure] |
| I-34 | [chemical structure] |
| I-35 | [chemical structure] |
| I-36 | [chemical structure] |
| I-37 | [chemical structure] |
| I-38 | [chemical structure] |
| I-39 | [chemical structure] |
| I-40 | [chemical structure] |
| I-41 | [chemical structure] |
| I-42 | [chemical structure] |
| I-43 | [chemical structure] |
| I-44 | [chemical structure] |
| I-45 | [chemical structure] |
| I-46 | [chemical structure] |
| I-47 | [chemical structure] |
| I-48 | [chemical structure] |
| I-49 | [chemical structure] |

[chemical structure]

or a pharmaceutically acceptable salt thereof. In some embodiments, provided compounds are provided and/or utilized in a salt form (e.g., a pharmaceutically acceptable salt form). Reference to a compound provided herein is understood to include reference to salts thereof, unless otherwise indicated.

[0916] In certain embodiments, a cationic lipid that may be useful in accordance with the present disclosure is or comprises ((3-hydroxypropyl) azanediyl)bis(nonane-9,1-diyl)bis(2-butyloctanoate) with a chemical structure in Table B above as I-45.

[0917] In some embodiments, a cationic lipid is selected from DODAC, DOTMA, DDAB, DOTAP, DC-Chol, DMRIE, I-3, I-45, and combinations thereof.

[0918] In some embodiments, a cationic lipid is I-3. In some embodiments, a cationic lipid is I-45. In some embodiments, a cationic lipid is SM-102. In some embodiments, a cationic lipid is DODAC. In some embodiments, a cationic lipid is DOTMA. In some embodiments, a cationic lipid is DDAB. In some embodiments, a cationic lipid is DOTAP. In some embodiments, a cationic lipid is DC-Chol.

[0919] In some embodiments, lipid nanoparticles of the present disclosure comprise about 30 to about 70 mol % of a cationic lipid. In some embodiments, an lipid nanoparticle comprises about 35 to about 65 mol % of a cationic lipid. In some embodiments, an lipid nanoparticle comprises about 40 to about 60 mol % of a cationic lipid. In some embodiments, an lipid nanoparticle comprises about 41 to about 49 mol % of a cationic lipid. In some embodiments, an lipid nanoparticle comprises about 48 mol % of a cationic lipid. In some embodiments, an lipid nanoparticle comprises about 50 mol % of a cationic lipid.

[0920] Cationic lipids may be used alone or in combination with neutral lipids, e.g., cholesterol and/or neutral phospholipids, or in combination with other known lipid assembly components.

b. Helper Lipids

[0921] As described herein, lipid nanoparticles of the present disclosure comprise one or more helper lipids. In some embodiments, a lipid nanoparticle for delivery of at least one polyribonucleotide described herein comprises one or more helper lipids. A helper lipid may be a neutral lipid, a positively charged lipid, or a negatively charged lipid. In some embodiments, a helper lipid is a lipid that are useful for increasing the effectiveness of delivery of lipid-based particles such as cationic lipid-based particles to a target cell. In some embodiments, a helper lipid may be or comprise a structural lipid with its concentration chosen to optimize lipid nanoparticle particle size, stability, and/or encapsulation.

[0922] In some embodiments, a lipid nanoparticle for delivery of polyribonucleotide(s) described herein comprises a neutral helper lipid. Examples of such neutral helper lipids include, but are not limited to phosphotidylcholines such as 1,2-distearoyl-sn-glycero-3-phosphocholine (DSPC), 1,2-Dipalmitoyl-sn-glycero-3-phosphocholine (DPPC), 1,2-Dimyristoyl-sn-glycero-3-phosphocholine (DMPC), 1-palmitoyl-2-oleoyl-sn-glycero-3-phosphocholine (POPC), 1,2-dioleoyl-sn-glycero-3-phosphocholine (DOPC), phophatidylethanolamines such as 1,2-dioleoyl-sn-glycero-3-phosphoethanolamine (DOPE), sphingomyelins (SM), ceramides, cholesterol, steroids such as sterols and their derivatives. In some embodiments, a steroid is a sterol. In some embodiments, a sterol is cholesterol.

[0923] Neutral lipids may be synthetic or naturally derived. Other neutral helper lipids that are known in the art, e.g., as described in WO 2017/075531 and WO 2018/081480, the entire contents of each of which are incorporated herein by reference for the purposes described herein, can also be used in lipid nanoparticles described herein. In some embodiments, a lipid nanoparticle for delivery of polyribonucleotide(s) described herein comprises DSPC and/or cholesterol.

[0924] In some embodiments, a lipid nanoparticle described herein comprises multiple neutral lipids (e.g., two neutral lipids). It is understood that reference to “a” neutral lipid is intended to refer to lipid nanoparticles that comprise one or more neutral lipids. In some embodiments, a lipid nanoparticle described herein comprises a phospholipid and/or a steroid. In some embodiments, a lipid nanoparticle described herein comprises DSPC and/or cholesterol.

[0925] In some embodiments, a lipid nanoparticle comprises about 5 to about 15 mol % of a phospholipid. In some embodiments, a lipid nanoparticle comprises about 8 to about 12 mol % of a phospholipid. In some embodiments, a lipid nanoparticle comprises about 10 mol % of a phospholipid. In some embodiments, a lipid nanoparticle comprises about 5 to about 15 mol % of DSPC. In some embodiments, a lipid nanoparticle comprises about 8 to about 12 mol % of DSPC. In some embodiments, a lipid nanoparticle comprises about 10 mol % of DSPC.

[0926] In some embodiments, a lipid nanoparticle comprises about 30 to about 50 mol % of a steroid. In some embodiments, a lipid nanoparticle comprises about 35 to about 45 mol % of a steroid. In some embodiments, a lipid nanoparticle comprises about 38 to about 40 mol % of a steroid. In some embodiments, a lipid nanoparticle comprises about 38.5 mol % of a steroid. In some embodiments, a lipid nanoparticle comprises about 40 mol % of a steroid.

[0927] In some embodiments, a lipid nanoparticle comprises about 30 to about 50 mol % of cholesterol. In some embodiments, a lipid nanoparticle comprises about 35 to about 45 mol % of cholesterol. In some embodiments, a lipid nanoparticle comprises about 38 to about 41 mol % of cholesterol. In some embodiments, a lipid nanoparticle comprises about 38.5 mol % of cholesterol. In some embodiments, a lipid nanoparticle comprises about 40.7 mol % of cholesterol.

[0928] In some embodiments, a lipid nanoparticle comprises about 5 to about 15 mol % of phospholipid and about 30 to about 50 mol % of steroid.

[0929] In some embodiments, a lipid nanoparticle for delivery of at least one polyribonucleotide described herein comprises at least two helper lipids (e.g., ones described herein). In some such embodiments, a lipid nanoparticle for delivery of at least one polyribonucleotide described herein comprises DSPC and cholesterol.

c. Polymer-Conjugated Lipids

[0930] As described herein, lipid nanoparticles of the present disclosure comprise a polymer-conjugated lipid. In some embodiments, a lipid nanoparticle for delivery of at least one polyribonucleotide described herein comprises a polymer-conjugated lipid. A polymer-conjugated lipid is typically a molecule comprising a lipid portion and a polymer portion conjugated thereto.

[0931] In some embodiments, a polymer-conjugated lipid is a PEG-conjugated lipid. In some embodiments, a PEG-conjugated lipid is designed to sterically stabilize a lipid particle by forming a protective hydrophilic layer that shields the hydrophobic lipid layer. In some embodiments, a PEG-conjugated lipid can reduce its association with serum proteins and/or the resulting uptake by the reticuloendothelial system when such lipid particles are administered in vivo.

[0932] In some embodiments, a PEG lipid is selected from pegylated diacylglycerol (PEG-DAG) such as 1-(monomethoxy-polyethyleneglycol)-2,3-dimyristoylglycerol (PEG-DMG) (e.g., 1,2-dimyristoyl-rac-glycero-3-methoxypolyethylene glycol-2000 (PEG2000-DMG)), a pegylated phosphatidylethanoloamine (PEG-PE), a PEG succinate diacylglycerol (PEG-S-DAG) such as 4—O-(2′,3′-di(tetradecanoyloxy)propyl-1—O-(ω-methoxy(polyethoxy)ethyl) butanedioate (PEG-S-DMG), a pegylated ceramide (PEG-cer), or a PEG dialkoxypropylcarbamate such as ω-m ethoxy (polyethoxy)ethyl-N-(2,3-di(tetradecanoxy)propyl)carbamate, and 2,3-di(tetradecanoxy) propy 1-N-(ω) methoxy(polyethoxy)ethyl)carbamate.

[0933] Certain PEG-conjugated lipids (also known as PEGylated lipids) were clinically approved with safety demonstrated in clinical trials. PEG-conjugated lipids are known to affect cellular uptake, a prerequisite to endosomal localization and payload delivery. The present disclosure, among other things, provides an insight that the pharmacology of encapsulated nucleic acid can be controlled in a predictable manner by modulating the alkyl chain length of a PEG-lipid anchor. In some embodiments, the present disclosure, among other things, provides an insight that such PEG-conjugated lipids may be selected for an polyribonucleotide/lipid nanoparticle drug product formulation to provide optimum delivery of polyribonucleotides to the liver. In some embodiments, such PEG-conjugated lipids may be designed and/or selected based on reasonable solubility characteristics and/or its molecular weight to effectively perform the function of a steric barrier. For example, in some embodiments, such a PEGylated lipid does not show appreciable surfactant or permeability enhancing or disturbing effects on biological membranes. In some embodiments, PEG in such a PEG-conjugated lipid can be linked to diacyl lipid anchors with a biodegradable amide bond, thereby facilitating fast degradation and/or excretion. In some embodiments, a lipid nanoparticle comprising a PEG-conjugated lipid retain a full complement of a PEGylated lipid. In the blood compartment, such a PEGylated lipid dissociates from the particle over time, revealing a more fusogenic particle that is more readily taken up by cells, ultimately leading to release of the RNA payload.

[0934] In some embodiments, a PEG-lipid is PEG2000-DMG:

[chemical structure]

[0935] In some embodiments, a lipid nanoparticle may comprise one or more PEG-conjugated lipids or pegylated lipids as described in WO 2017/075531 and WO 2018/081480, the entire contents of each of which are incorporated herein by reference for the purposes described herein. For example, in some embodiments, a PEG-conjugated lipid that may be useful in accordance with the present disclosure can have a structure

[chemical structure]

as described in WO 2017/075531, or a pharmaceutically acceptable salt, tautomer or stereoisomer thereof, wherein: R⁸ and R⁹ are each independently a straight or branched, saturated or unsaturated alkyl chain containing from 10 to 30 carbon atoms, wherein the alkyl chain is optionally interrupted by one or more ester bonds; and w has a mean value ranging from 30 to 60. In some embodiments, R⁸ and R⁹ are each independently straight, saturated alkyl chains containing from 12 to 16 carbon atoms. In some embodiments, w has a mean value ranging from 43 to 53. In some embodiments, w is an integer from 40 to 50. In some embodiments, w is 45 to 47. In other embodiments, the average w is about 45. In some embodiments, a PEG-conjugated lipid is or comprises 2-[(Polyethylene glycol)-2000]-N,N-ditetradecylacetamide with a chemical structure as shown as I-3 in Table B above and below:

[chemical structure]

or a pharmaceutically acceptable salt thereof, where n′ is an integer from 45 to 50.

[0936] In some embodiments, a PEG-lipid is selected from PEG-DAG, PEG-PE, PEG-S-DAG, PEG2000-DMG, PEG-cer, a PEG dialkyoxypropylcarbamate, ALC-0159, and combinations thereof. In some embodiments, a PEG-lipid is ALC-0159 or PEG2000-DMG. In some embodiments, a PEG-lipid is ALC-0159. In some embodiments, a PEG-lipid is PEG2000-DMG. In some embodiments, a PEG-lipid is PEG-DAG. In some embodiments, a PEG-lipid is PEG-PE. In some embodiments, a PEG-lipid is PEG-S-DAG. In some embodiments, a PEG-lipid is PEG-cer. In some embodiments, a PEG-lipid is a PEG dialkyoxypropylcarbamate.

[0937] In some embodiments, a PEG group that is part of a PEG-lipid has, on average in a composition comprising one or more PEG-lipid molecules, a number average molecular weight (Mn) of about 2000 g/mol.

[0938] In some embodiments, a PEG-lipid is about 0.5 to about 5 mol % relative to total lipids in the lipid nanoparticle. In some embodiments, an lipid nanoparticle comprises about 1.0 to about 2.5 mol % of a PEG-lipid. In some embodiments, an lipid nanoparticle comprises about 1.5 to about 2.0 mol % of a PEG-lipid. In some embodiments, an lipid nanoparticle comprises about 1.5 to about 1.8 mol % of a PEG-lipid.

[0939] In some embodiments, a molar ratio of total cationic lipid to total polymer-conjugated lipid (e.g., PEG-conjugated lipid) is from about 100:1 to about 20:1. In some embodiments, a molar ratio of total cationic lipid to total polymer-conjugated lipid (e.g., PEG-conjugated lipid) is from about 50:1 to about 20:1. In some embodiments, a molar ratio of total cationic lipid to total polymer-conjugated lipid (e.g., PEG-conjugated lipid) is from about 40:1 to about 20:1. In some embodiments, a molar ratio of total cationic lipid to total polymer-conjugated lipid (e.g., PEG-conjugated lipid) is from about 35:1 to about 25:1.

[0940] In some embodiments, an lipid nanoparticle comprises i) about 30 to about 50 mol % of the cationic lipid; ii) about 1 to about 5 mol % of a PEG-lipid; iii) about 5 to about 15 mol % of a neutral lipid; and iv) about 30 to about 50 mol % of a steroid. In some embodiments, an lipid nanoparticle comprises: i) about 30% to about 50% by weight of ALC-0315; ii) about 1% to about 5% by weight of a ALC-0159; iii) about 5% to about 15% by weight of DSPC; and iv) about 30 to about 50 mol % of cholesterol.

[0941] In some embodiments, an lipid nanoparticle comprises: i) about 47.5 mol % of ALC-0315; ii) about 1.8 mol % of a ALC-0159; iii) about 10 mol % of DSPC; and iv) about 40.7 mol % of cholesterol.

[0942] In some embodiments, an lipid nanoparticle comprises: i) about 30 to about 50 mol % of SM-102; ii) about 1 to about 5 mol % of a PEG2000-DMG; iii) about 5 to about 15 mol % of DSPC; and iv) about 30 to about 50 mol % of a steroid. In some embodiments, an lipid nanoparticle comprises i) about 50 mol % of SM-102; ii) about 1.5 mol % of PEG2000-DMG; iii) about 10 mol % of DSPC; and iv) about 38.5 mol % of cholesterol.

### Exemplary Lipid Nanoparticle Compositions

[0943] In some embodiments, lipids that form lipid nanoparticles described herein comprise: a polymer-conjugated lipid; a cationic lipid; and at least one helper lipid. In some such embodiments, total polymer-conjugated lipid may be present in about 0.5-5 mol %, about 0.7-3.5 mol %, about 1-2.5 mol %, about 1.5-2 mol %, or about 1.5-1.8 mol % of the total lipids. In some embodiments, total polymer-conjugated lipid may be present in about 1-2.5 mol % of the total lipids. In some embodiments, the molar ratio of total cationic lipid to total polymer-conjugated lipid (e.g., PEG-conjugated lipid) may be about 100:1 to about 20:1, or about 50:1 to about 20:1, or about 40:1 to about 20:1, or about 35:1 to about 25:1. In some embodiments, the molar ratio of total cationic lipid to total polymer-conjugated lipid may be about 35:1 to about 25:1.

[0944] In some embodiments involving a polymer-conjugated lipid, a cationic lipid, and a helper neutral lipid in lipid nanoparticles described herein, total cationic lipid is present in about 35-65 mol %, about 40-60 mol %, about 41-49 mol %, about 41-48 mol %, about 42-48 mol %, about 43-48 mol %, about 44-48 mol %, about 45-48 mol %, about 46-48 mol %, or about 47.2-47.8 mol % of the total lipids. In certain embodiments, total cationic lipid is present in about 47.0, 47.1, 47.2, 47.3, 47.4, 47.5, 47.6, 47.7, 47.8, 47.9 or 48.0 mol % of the total lipids.

[0945] In some embodiments involving a polymer-conjugated lipid, a cationic lipid, and a helper neutral lipid in lipid nanoparticles described herein, total neutral lipid is present in about 35-65 mol %, about 40-60 mol %, about 45-55 mol %, or about 47-52 mol % of the total lipids. In some embodiments, total neutral lipid is present in 35-65 mol % of the total lipids. In some embodiments, total non-steroid neutral lipid (e.g., DPSC) is present in about 5-15 mol %, about 7-13 mol %, or 9-11 mol % of the total lipids. In some embodiments, total non-steroid neutral lipid is present in about 9.5, 10 or 10.5 mol % of the total lipids. In some embodiments, the molar ratio of the total cationic lipid to the non-steroid neutral lipid ranges from about 4.1:1.0 to about 4.9:1.0, from about 4.5:1.0 to about 4.8:1.0, or from about 4.7:1.0 to 4.8:1.0. In some embodiments, total steroid neutral lipid (e.g., cholesterol) is present in about 35-50 mol %, about 39-49 mol %, about 40-46 mol %, about 40-44 mol %, or about 40-42 mol % of the total lipids. In certain embodiments, total steroid neutral lipid (e.g., cholesterol) is present in about 39, 40, 41, 42, 43, 44, 45, or 46 mol % of the total lipids. In certain embodiments, the molar ratio of total cationic lipid to total steroid neutral lipid is about 1.5:1 to 1:1.2, or about 1.2:1 to 1:1.2.

[0946] In some embodiments, a lipid composition comprising a cationic lipid, a polymer-conjugated lipid, and a neutral lipid can have individual lipids present in certain molar percents of the total lipids, or in certain molar ratios (relative to each other) as described in WO 2018/081480, the entire contents of each of which are incorporated herein by reference for the purposes described herein.

[0947] In some embodiments, lipids that form the lipid nanoparticles comprise: a polymer-conjugated lipid (e.g., PEG-conjugated lipid); a cationic lipid; and a neutral lipid, wherein the polymer-conjugated lipid is present in about 1-2.5 mol % of the total lipids; the cationic lipid is present in 35-65 mol % of the total lipids; and the neutral lipid is present in 35-65 mol % of the total lipids. In some embodiments, lipids that form the lipid nanoparticles comprise: a polymer-conjugated lipid (e.g., PEG-conjugated lipid); a cationic lipid; and a neutral lipid, wherein the polymer-conjugated lipid is present in about 1-2 mol % of the total lipids; the cationic lipid is present in 45-48.5 mol % of the total lipids; and the neutral lipid is present in 45-55 mol % of the total lipids. In some embodiments, lipids that form the lipid nanoparticles comprise: a polymer-conjugated lipid (e.g., PEG-conjugated lipid); a cationic lipid; and a neutral lipid comprising a non-steroid neutral lipid and a steroid neutral lipid, wherein the polymer-conjugated lipid is present in about 1-2 mol % of the total lipids; the cationic lipid is present in 45-48.5 mol % of the total lipids; the non-steroid neutral lipid is present in 9-11 mol % of the total lipids; and the steroid neutral lipid is present in about 36-44 mol % of the total lipids. In many of such embodiments, a PEG-conjugated lipid is or comprises 2-[(polyethylene glycol)-2000]-N,N-ditetradecylacetamide or a derivative thereof. In many of such embodiments, a cationic lid is or comprises ((3-hydroxypropyl) azanediyl)bis(nonane-9,1-diyl)bis(2-butyloctanoate) or a derivative thereof. In many of such embodiments, a neutral lipid comprises DSPC and cholesterol, wherein DSPC is a non-steroid neutral lipid and cholesterol is a steroid neutral lipid.

[0948] In some embodiments, lipids that form the lipid nanoparticles comprise:
[0949] (a) 2-[(polyethylene glycol)-2000]-N,N-ditetradecylacetamide at about 1-2.5 mol % of the total lipids;
[0950] (b) DPSC and cholesterol, wherein together DPSC and cholesterol are about 35-65 mol % of the total lipids; and
[0951] (c) ((3-hydroxypropyl) azanediyl)bis(nonane-9,1-diyl)bis(2-butyloctanoate) at about 35-65 mol % of the total lipids.

### Exemplary Methods of Making Lipid Nanoparticles

[0952] Lipids and lipid nanoparticles comprising nucleic acids and their method of preparation are known in the art, including, e.g., as described in U.S. Pat. Nos. 8,569,256, 5,965,542 and U.S. Patent Publication Nos. 2016/0199485, 2016/0009637, 2015/0273068, 2015/0265708, 2015/0203446, 2015/0005363, 2014/0308304, 2014/0200257, 2013/086373, 2013/0338210, 2013/0323269, 2013/0245107, 2013/0195920, 2013/0123338, 2013/0022649, 2013/0017223, 2012/0295832, 2012/0183581, 2012/0172411, 2012/0027803, 2012/0058188, 2011/0311583, 2011/0311582, 2011/0262527, 2011/0216622, 2011/0117125, 2011/0091525, 2011/0076335, 2011/0060032, 2010/0130588, 2007/0042031, 2006/0240093, 2006/0083780, 2006/0008910, 2005/0175682, 2005/017054, 2005/0118253, 2005/0064595, 2004/0142025, 2007/0042031, 1999/009076 and PCT Pub. Nos. WO 99/39741, WO 2018/081480, WO 2017/004143, WO 2017/075531, WO 2015/199952, WO 2014/008334, WO 2013/086373, WO 2013/086322, WO 2013/016058, WO 2013/086373, WO2011/141705, and WO 2001/07548, the full disclosures of which are herein incorporated by reference in their entirety for the purposes described herein.

[0953] For example, in some embodiments, cationic lipids, neutral lipids (e.g., DSPC, and/or cholesterol) and polymer-conjugated lipids can be solubilized in ethanol at a pre-determined molar ratio (e.g., ones described herein). In some embodiments, lipid nanoparticles (lipid nanoparticle) are prepared at a total lipid to polyribonucleotides weight ratio of approximately 10:1 to 30:1. In some embodiments, such polyribonucleotides can be diluted to 0.2 mg/mL in acetate buffer.

[0954] In some embodiments, using an ethanol injection technique, a colloidal lipid dispersion comprising polyribonucleotides can be formed as follows: an ethanol solution comprising lipids, such as cationic lipids, neutral lipids, and polymer-conjugated lipids, is injected into an aqueous solution comprising polyribonucleotides (e.g., ones described herein).

[0955] In some embodiments, lipid and polyribonucleotide solutions can be mixed at room temperature by pumping each solution at controlled flow rates into a mixing unit, for example, using piston pumps. In some embodiments, the flow rates of a lipid solution and a RNA solution into a mixing unit are maintained at a ratio of 1:3. Upon mixing, nucleic acid-lipid particles are formed as the ethanolic lipid solution is diluted with aqueous polyribonucleotides. The lipid solubility is decreased, while cationic lipids bearing a positive charge interact with the negatively charged RNA.

[0956] In some embodiments, a solution comprising RNA-encapsulated lipid nanoparticles can be processed by one or more of concentration adjustment, buffer exchange, formulation, and/or filtration.

[0957] In some embodiments, RNA-encapsulated lipid nanoparticles can be processed through filtration.

[0958] In some embodiments, particle size and/or internal structure of lipid nanoparticles (with or with ssRNs) may be monitored by appropriate techniques such as, e.g., small-angle X-ray scattering (SAXS) and/or transmission electron cryomicroscopy (CryoTEM).

[0959] In some embodiments, the viral epitope peptides and polypeptides described herein can be expressed by attenuated viruses, such as vaccinia or fowlpox. This approach involves the use of vaccinia virus as a vector to express nucleotide sequences that encode the peptide described herein. Upon introduction into an acutely or chronically infected host or into a noninfected host, the recombinant vaccinia virus expresses the immunogenic peptide, and thereby elicits a host CTL response. Vaccinia vectors and methods useful in immunization protocols are described in, e.g., U.S. Pat. No. 4,722,848. Another vector is BCG (Bacille Calmette Guerin). BCG vectors are described in Stover et al. (Nature 351:456-460 (1991)). A wide variety of other vectors useful for therapeutic administration or immunization of the peptides described herein will be apparent to those skilled in the art from the description herein.

[0960] Adjuvants are any substance whose admixture into the immunogenic composition increases or otherwise modifies the immune response to the therapeutic agent. Carriers are scaffold structures, for example a polypeptide or a polysaccharide, to which a viral epitope polypeptide or polynucleotide, is capable of being associated. Optionally, adjuvants are conjugated covalently or non-covalently to the polypeptides or polynucleotides described herein.

[0961] The ability of an adjuvant to increase the immune response to an antigen is typically manifested by a significant increase in immune-mediated reaction, or reduction in disease symptoms. For example, an increase in humoral immunity can be manifested by a significant increase in the titer of antibodies raised to the antigen, and an increase in T cell activity can be manifested in increased cell proliferation, or cellular cytotoxicity, or cytokine secretion. An adjuvant can also alter an immune response, for example, by changing a primarily humoral or T helper 2 response into a primarily cellular, or T helper 1 response.

[0962] Suitable adjuvants are known in the art (see, WO 2015/095811) and include, but are not limited to poly(I:C), poly-I and poly C, STING agonist, 1018 ISS, aluminum salts, Amplivax, AS15, BCG, CP-870,893, CpG7909, CyaA, dSLIM, GM-CSF, IC30, IC31, Imiquimod, ImuFact IMP321, IS Patch, ISS, ISCOMATRIX, JuvImmune, Lipo Vac, MF59, monophosphoryl lipid A, Montanide IMS 1312, Montanide ISA 206, Montanide ISA 50V, Montanide ISA-51, OK-432, OM-174, OM-197-MP-EC, ONTAK, PepTel®. vector system, PLG microparticles, resiquimod, SRL172, virosomes and other virus-like particles, YF-17D, VEGF trap, R848, beta-glucan, Pam3Cys, Pam3CSK4, Aquila's QS21 stimulon (Aquila Biotech, Worcester, Mass., USA) which is derived from saponin, mycobacterial extracts and synthetic bacterial cell wall mimics, and other proprietary adjuvants such as Ribi's Detox. Quil or Superfos. Adjuvants also include incomplete Freund's or GM-CSF. Several immunological adjuvants (e.g., MF59) specific for dendritic cells and their preparation have been described previously (Dupuis M, et al., Cell Immunol. 1998; 186 (1): 18-27; Allison A C; Dev Biol Stand. 1998; 92:3-11) (Mosca et al. Frontiers in Bioscience, 2007; 12:4050-4060) (Gamvrellis et al. Immunol & Cell Biol. 2004; 82:506-516). Also, cytokines can be used. Several cytokines have been directly linked to influencing dendritic cell migration to lymphoid tissues (e.g., TNF-alpha), accelerating the maturation of dendritic cells into efficient antigen-presenting cells for T-lymphocytes (e.g., GM-CSF, PGE1, PGE2, IL-1, IL-1b, IL-4, IL-6 and CD40L) (U.S. Pat. No. 5,849,589 incorporated herein by reference in its entirety) and acting as immunoadjuvants (e.g., IL-12) (Gabrilovich D I, et al., J Immunother Emphasis Tumor Immunol. 1996 (6): 414-418).

[0963] CpG immunostimulatory oligonucleotides have also been reported to enhance the effects of adjuvants in a vaccine setting. Without being bound by theory, CpG oligonucleotides act by activating the innate (non-adaptive) immune system via Toll-like receptors (TLR), mainly TLR9. CpG triggered TLR9 activation enhances antigen-specific humoral and cellular responses to a wide variety of antigens, including peptide or protein antigens, live or killed viruses, dendritic cell vaccines, autologous cellular vaccines and polysaccharide conjugates in both prophylactic and therapeutic vaccines. Importantly, it enhances dendritic cell maturation and differentiation, resulting in enhanced activation of TH1 cells and strong cytotoxic T-lymphocyte (CTL) generation, even in the absence of CD4 T cell help. The TH1 bias induced by TLR9 stimulation is maintained even in the presence of vaccine adjuvants such as alum or incomplete Freund's adjuvant (IFA) that normally promote a TH2 bias. CpG oligonucleotides show even greater adjuvant activity when formulated or co-administered with other adjuvants or in formulations such as microparticles, nanoparticles, lipid emulsions or similar formulations, which are especially necessary for inducing a strong response when the antigen is relatively weak. They also accelerate the immune response and enabled the antigen doses to be reduced with comparable antibody responses to the full-dose vaccine without CpG in some experiments (Arthur M. Krieg, Nature Reviews, Drug Discovery, 5, June 2006, 471484). U.S. Pat. No. 6,406,705 B1 describes the combined use of CpG oligonucleotides, non-nucleic acid adjuvants and an antigen to induce an antigen-specific immune response. A commercially available CpG TLR9 antagonist is dSLIM (double Stem Loop Immunomodulator) by Mologen (Berlin, GERMANY), which is a component of the pharmaceutical composition described herein. Other TLR binding molecules such as RNA binding TLR 7, TLR 8 and/or TLR 9 can also be used.

[0964] Other examples of useful adjuvants include, but are not limited to, chemically modified CpGs (e.g. CpR, Idera), Poly(I:C) (e.g. polyi:C12U), non-CpG bacterial DNA or RNA, ssRNA40 for TLR8, as well as immunoactive small molecules and antibodies such as cyclophosphamide, sunitinib, bevacizumab, celebrex, NCX-4016, sildenafil, tadalafil, vardenafil, sorafinib, XL-999, CP-547632, pazopanib, ZD2171, AZD2171, ipilimumab, tremelimumab, and SC58175, which can act therapeutically and/or as an adjuvant. The amounts and concentrations of adjuvants and additives useful in the context of the present disclosure can readily be determined by the skilled artisan without undue experimentation. Additional adjuvants include colony-stimulating factors, such as Granulocyte Macrophage Colony Stimulating Factor (GM-CSF, sargramostim).

[0965] In some embodiments, an immunogenic composition according to the present disclosure can comprise more than one different adjuvants. Furthermore, present disclosure encompasses a therapeutic composition comprising any adjuvant substance including any of the above or combinations thereof. It is also contemplated that the viral epitope therapeutic can elicit or promote an immune response (e.g., a humoral or cell-mediated immune response). In some embodiments, the immunogenic composition comprises viral epitope therapeutics (e.g., peptides, polynucleotides, TCR, CAR, cells containing TCR or CAR, dendritic cell containing polypeptide, dendritic cell containing polynucleotide, antibody, etc.) and the adjuvant can be administered separately in any appropriate sequence.

[0966] A carrier can be present independently of an adjuvant. The function of a carrier can for example be to increase the molecular weight of in particular mutant in order to increase their activity or immunogenicity, to confer stability, to increase the biological activity, or to increase serum half-life. Furthermore, a carrier can aid presenting peptides to T cells. The carrier can be any suitable carrier known to the person skilled in the art, for example a protein or an antigen presenting cell. A carrier protein could be but is not limited to keyhole limpet hemocyanin, serum proteins such as transferrin, bovine serum albumin, human serum albumin, thyroglobulin or ovalbumin, immunoglobulins, or hormones, such as insulin or palmitic acid. In one embodiment, the carrier comprises a human fibronectin type III domain (Koide et al. Methods Enzymol. 2012; 503:135-56). For immunization of humans, the carrier must be a physiologically acceptable carrier acceptable to humans and safe. However, tetanus toxoid and/or diptheria toxoid are suitable carriers in one embodiment of the present disclosure. Alternatively, the carrier can be dextrans for example sepharose.

[0967] In some embodiments, the polypeptides can be synthesized as multiply linked peptides as an alternative to coupling a polypeptide to a carrier to increase immunogenicity. Such molecules are also known as multiple antigenic peptides (MAPS).

[0968] In one aspect, the method presented herein comprises isolating and/or characterizing one or more virus (e.g., in some embodiments coronavirus) antigenic peptides or nucleic acids encoding characterizing one or more virus (e.g., in some embodiments coronavirus) antigenic peptides, wherein the viral (e.g., in some embodiments coronavirus) antigenic peptides are predicted to bind to one or more HLA encoded MHC class I or MHC Class II molecules expressed in a subject, wherein the subject is in need of a virus (e.g., in some embodiments coronavirus) immunotherapy such as a virus (e.g., in some embodiments coronavirus) vaccine thereof. In some embodiments, the method comprises: (a) processing amino acid information of a plurality of candidate peptide sequences using a machine learning HLA peptide presentation prediction model to generate a plurality of presentation predictions, wherein each candidate peptide sequence of the plurality of candidate peptide sequences is encoded by a genome or exome of a virus (e.g., in some embodiments coronavirus), wherein the plurality of presentation predictions comprises an HLA presentation prediction for each of the plurality of candidate viral peptide sequences, wherein each HLA presentation prediction is indicative of a likelihood that one or more proteins encoded by a class II HLA allele of a cell of the subject can present a given candidate viral peptide sequence of the plurality of candidate viral peptide sequences, wherein the machine learning HLA peptide presentation prediction model is trained using training data comprising sequence information of sequences of training peptides identified by mass spectrometry to be presented by an HLA protein expressed in training cells; and (b) identifying, based at least on the plurality of presentation predictions, a viral peptide sequence of the plurality of peptide sequences as being presented by at least one of the one or more proteins encoded by a class II HLA allele of a cell of the subject; wherein the machine learning HLA peptide presentation prediction model has a positive predictive value (PPV) of at least 0.07 according to a presentation PPV determination method.

[0969] Provided herein is a method comprising: (a) processing amino acid information of a plurality of peptide sequences of encoded by a genome or exome of a virus (e.g., in some embodiments coronavirus), using a machine learning HLA peptide binding prediction model to generate a plurality of binding predictions, wherein the plurality of binding predictions comprises an HLA binding prediction for each of the plurality of candidate peptide sequences, each binding prediction indicative of a likelihood that one or more proteins encoded by a class II HLA allele of a cell of the subject binds to a given candidate peptide sequence of the plurality of candidate peptide sequences, wherein the machine learning HLA peptide binding prediction model is trained using training data comprising sequence information of sequences of peptides identified to bind to an HLA class II protein or an HLA class II protein analog; and (b) identifying, based at least on the plurality of binding predictions, a peptide sequence of the plurality of peptide sequences that has a probability greater than a threshold binding prediction probability value of binding to at least one of the one or more proteins encoded by a class II HLA allele of a cell of the subject; wherein the machine learning HLA peptide binding prediction model has a positive predictive value (PPV) of at least 0.1 according to a binding PPV determination method.

[0970] In some embodiments, the machine learning HLA peptide presentation prediction model is trained using training data comprising sequence information of sequences of training peptides identified by mass spectrometry to be presented by an HLA protein expressed in training cells.

[0971] In some embodiments, the method comprises ranking, based on the presentation predictions, at least two peptides identified as being presented by at least one of the one or more proteins encoded by a class II HLA allele of a cell of the subject.

[0972] In some embodiments, the method comprises selecting one or more peptides of the two or more ranked peptides.

[0973] In some embodiments, the method comprises selecting one or more peptides of the plurality that were identified as being presented by at least one of the one or more proteins encoded by a class II HLA allele of a cell of the subject.

[0974] In some embodiments, the method comprises selecting one or more peptides of two or more peptides ranked based on the presentation predictions.

[0975] In some embodiments, the machine learning HLA peptide presentation prediction model has a positive predictive value (PPV) of at least 0.07 when amino acid information of a plurality of test peptide sequences are processed to generate a plurality of test presentation predictions, each test presentation prediction indicative of a likelihood that the one or more proteins encoded by a class II HLA allele of a cell of the subject can present a given test peptide sequence of the plurality of test peptide sequences, wherein the plurality of test peptide sequences comprises at least 500 test peptide sequences comprising (i) at least one hit peptide sequence identified by mass spectrometry to be presented by an HLA protein expressed in cells and (ii) at least 499 decoy peptide sequences contained within a protein encoded by a genome of an organism, wherein the organism and the subject are the same species, wherein the plurality of test peptide sequences comprises a ratio of 1:499 of the at least one hit peptide sequence to the at least 499 decoy peptide sequences and a top percentage of the plurality of test peptide sequences are predicted to be presented by the HLA protein expressed in cells by the machine learning HLA peptide presentation prediction model.

[0976] In some embodiments, the machine learning HLA peptide presentation prediction model has a positive predictive value (PPV) of at least 0.1 when amino acid information of a plurality of test peptide sequences are processed to generate a plurality of test binding predictions, each test binding prediction indicative of a likelihood that the one or more proteins encoded by a class II HLA allele of a cell of the subject binds to a given test peptide sequence of the plurality of test peptide sequences, wherein the plurality of test peptide sequences comprises at least 20 test peptide sequences comprising (i) at least one hit peptide sequence identified by mass spectrometry to be presented by an HLA protein expressed in cells and (ii) at least 19 decoy peptide sequences contained within a protein comprising at least one peptide sequence identified by mass spectrometry to be presented by an HLA protein expressed in cells, such as a single HLA protein expressed in cells (e.g., mono-allelic cells), wherein the plurality of test peptide sequences comprises a ratio of 1:19 of the at least one hit peptide sequence to the at least 19 decoy peptide sequences and a top percentage of the plurality of test peptide sequences are predicted to bind to the HLA protein expressed in cells by the machine learning HLA peptide presentation prediction model.

[0977] In some embodiments, no amino acid sequence overlap exist among the at least one hit peptide sequence and the decoy peptide sequences.

### Combinations of CTL Peptides and HTL Peptides

[0978] Immunogenic or vaccine compositions comprising the viral epitope polypeptides and polynucleotides described herein, or analogs thereof, which have immunostimulatory activity can be modified to provide desired attributes, such as improved serum half-life, or to enhance immunogenicity.

[0979] For instance, the ability of the viral epitope peptides to induce CTL activity can be enhanced by linking the peptide to a sequence which contains at least one epitope that is capable of inducing a T helper cell response. In one embodiment, CTL epitope/HTL epitope conjugates are linked by a spacer molecule. The spacer is typically comprised of relatively small, neutral molecules, such as amino acids or amino acid mimetics, which are substantially uncharged under physiological conditions. The spacers are typically selected from, e.g., Ala, Gly, or other neutral spacers of nonpolar amino acids or neutral polar amino acids. It will be understood that the optionally present spacer need not be comprised of the same residues and thus can be a hetero- or homo-oligomer. When present, the spacer will usually be at least one or two residues, more usually three to six residues. Alternatively, the CTL peptide can be linked to the T helper peptide without a spacer.

[0980] Although the CTL peptide epitope can be linked directly to the T helper peptide epitope, CTL epitope/HTL epitope conjugates can be linked by a spacer molecule. The spacer is typically comprised of relatively small, neutral molecules, such as amino acids or amino acid mimetics, which are substantially uncharged under physiological conditions. The spacers are typically selected from, e.g., Ala, Gly, or other neutral spacers of nonpolar amino acids or neutral polar amino acids. It will be understood that the optionally present spacer need not be comprised of the same residues and thus can be a hetero- or homo-oligomer. When present, the spacer will usually be at least one or two residues, more usually three to six residues. The CTL peptide epitope can be linked to the T helper peptide epitope either directly or via a spacer either at the amino or carboxy terminus of the CTL peptide. The amino terminus of either the immunogenic peptide or the T helper peptide can be acylated.

[0981] HTL peptide epitopes can also be modified to alter their biological properties. For example, peptides comprising HTL epitopes can contain D-amino acids to increase their resistance to proteases and thus extend their serum half-life. Also, the epitope peptides can be conjugated to other molecules such as lipids, proteins or sugars, or any other synthetic compounds, to increase their biological activity. For example, the T helper peptide can be conjugated to one or more palmitic acid chains at either the amino or carboxyl termini.

[0982] In certain embodiments, the T helper peptide is one that is recognized by T helper cells present in the majority of the population. This can be accomplished by selecting amino acid sequences that bind to many, most, or all of the HLA class II molecules. These are known as “loosely HLA-restricted” or “promiscuous” T helper sequences. Examples of amino acid sequences that are promiscuous include sequences from antigens such as tetanus toxoid at positions 830-843 (QYIKANSKFIGITE), Plasmodium falciparum CS protein at positions 378-398 (DIEKKIAKMEKASSVENVVNS), and Streptococcus 18 kD protein at positions 116 (GAVDSILGGVATYGAA). Other examples include peptides bearing a DR 1-4-7 supermotif, or either of the DR3 motifs.

[0983] Alternatively, it is possible to prepare synthetic peptides capable of stimulating T helper lymphocytes, in a loosely HLA-restricted fashion, using amino acid sequences not found in nature (see, e.g., PCT publication WO 95/07707). These synthetic compounds called Pan-DR-binding epitopes (e.g., PADRE, Epimmune, Inc., San Diego, CA) are designed to bind most HLA-DR (human HLA class II) molecules. For instance, a pan-DR-binding epitope peptide having the formula: aKXVWANTLKAAa, where “X” is either cyclohexyl alanine, phenylalanine, or tyrosine, and a is either D-alanine or L-alanine, has been found to bind to most HLA-DR alleles, and to stimulate the response of T helper lymphocytes from most individuals, regardless of their HLA type. An alternative of a pan-DR binding epitope comprises all “L” natural amino acids and can be provided in the form of nucleic acids that encode the epitope.

[0984] In some embodiments it can be desirable to include in a viral epitope therapeutic (e.g., peptides, polynucleotides, TCR, CAR, cells containing TCR or CAR, dendritic cell containing polypeptide, dendritic cell containing polynucleotide, antibody, etc.) in pharmaceutical compositions (e.g., immunogenic compositions) at least one component of which primes cytotoxic T lymphocytes. Lipids have been identified as agents capable of priming CTL in vivo against viral antigens. For example, palmitic acid residues can be attached to the c- and a-amino groups of a lysine residue and then linked, e.g., via one or more linking residues such as Gly, Gly-Gly-, Ser, Ser-Ser, or the like, to an immunogenic viral epitope peptide. The lipidated peptide can then be administered either directly in a micelle or particle, incorporated into a liposome, or emulsified in an adjuvant. In one embodiment, a particularly effective immunogenic construct comprises palmitic acid attached to c- and a-amino groups of Lys, which is attached via linkage, e.g., Ser-Ser, to the amino terminus of the immunogenic peptide.

[0985] As another example of lipid priming of CTL responses, E. coli lipoproteins, such as tripalmitoyl-S-glycerylcysteinlyseryl-serine (P3CSS) can be used to prime virus specific CTL when covalently attached to an appropriate peptide. (See, e.g., Deres, et al., Nature 342:561, 1989). Viral epitope peptides described herein can be coupled to P3CSS, for example, and the lipopeptide administered to an individual to specifically prime a CTL response to the target antigen. Moreover, because the induction of neutralizing antibodies can also be primed with P3CSS-conjugated epitopes, two such compositions can be combined to more effectively elicit both humoral and cell-mediated responses to infection.

[0986] As noted herein, additional amino acids can be added to the termini of a viral epitope peptide to provide for ease of linking peptides one to another, for coupling to a carrier support or larger peptide, for modifying the physical or chemical properties of the peptide or oligopeptide, or the like. Amino acids such as tyrosine, cysteine, lysine, glutamic or aspartic acid, or the like, can be introduced at the C- or N-terminus of the peptide or oligopeptide. However, it is to be noted that modification at the carboxyl terminus of a T cell epitope can, in some cases, alter binding characteristics of the peptide. In addition, the peptide or oligopeptide sequences can differ from the natural sequence by being modified by terminal-NH2 acylation, e.g., by alkanoyl (C1-C20) or thioglycolyl acetylation, terminal-carboxyl amidation, e.g., ammonia, methylamine, etc. In some instances, these modifications can provide sites for linking to a support or other molecule.

[0987] An embodiment of an immunogenic composition described herein comprises ex vivo administration of a cocktail of epitope-bearing viral epitope polypeptide or polynucleotides to PBMC, or DC therefrom, from the patient's blood. A pharmaceutical to facilitate harvesting of dendritic cells (DCs) can be used, including GM-CSF, IL-4, IL-6, IL-1b, and TNFα. After pulsing the DCs with peptides or polynucleotides encoding the peptides, and prior to reinfusion into patients, the DC are washed to remove unbound peptides. In this embodiment, a vaccine or immunogenic composition comprises peptide-pulsed DCs which present the pulsed peptide epitopes complexed with HLA molecules on their surfaces. The composition is then administered to the patient. In other embodiments, such pulsed DCs are used to stimulate T cells suitable for use in T cell therapy.

### Multi-Epitope Immunogenic Compositions

[0988] A number of different approaches are available which allow simultaneous delivery of multiple epitopes. Nucleic acids encoding the viral epitope peptides described herein are a particularly useful embodiment of the present disclosure. In one embodiment, the nucleic acid is RNA. In one embodiment, the nucleic acid is mRNA. In some embodiments, minigene constructs encoding a viral epitope peptide comprising one or multiple epitopes described herein may be used to administer nucleic acids encoding the viral epitope peptides described herein. In some embodiments, a RNA construct (e.g., mRNA construct) encoding a viral epitope peptide comprising one or multiple epitopes described herein is administered.

[0989] Exemplary use of multi-epitope minigenes is described An, L. and Whitton, J. L., J. Virol. 71:2292, 1997; Thomson, S. A. et al., J. Immunol. 157:822, 1996; Whitton, J. L. et al., J. Virol 67:348, 1993; Hanke, R. et al., Vaccine 16:426, 1998. For example, a multi-epitope DNA plasmid encoding super motif- and/or motif-bearing antigen peptides, a universal helper T cell epitope (or multiple viral antigen HTL epitopes), and an endoplasmic reticulum-translocating signal sequence can be engineered.

[0990] The immunogenicity of a multi-epitopic minigene can be tested in transgenic mice to evaluate the magnitude of immune response induced against the epitopes tested. Further, the immunogenicity of DNA-encoded epitopes in vivo can be correlated with the in vitro responses of specific CTL lines against target cells transfected with the DNA plasmid. Thus, these experiments can show that the minigene serves to both: 1). generate a cell mediated and/or humoral response and 2). that the induced immune cells recognized cells expressing the encoded epitopes.

[0991] For example, to create a DNA sequence encoding the selected viral epitope (minigene) for expression in human cells, the amino acid sequences of the epitopes can be reverse translated. A human codon usage table can be used to guide the codon choice for each amino acid. These viral epitope-encoding DNA sequences can be directly adjoined, so that when translated, a continuous polypeptide sequence is created. To optimize expression and/or immunogenicity, additional elements can be incorporated into the minigene design. Examples of amino acid sequences that can be reverse translated and included in the minigene sequence include: HLA class I epitopes, HLA class II epitopes, a ubiquitination signal sequence, and/or an endoplasmic reticulum targeting signal. In addition, HLA presentation of CTL and HTL epitopes can be improved by including synthetic (e.g. poly-alanine) or naturally-occurring flanking sequences adjacent to the CTL or HTL epitopes; these larger peptides comprising the epitope(s) are within the scope of the present disclosure.

[0992] The minigene sequence can be converted to DNA by assembling oligonucleotides that encode the plus and minus strands of the minigene. Overlapping oligonucleotides (30-100 bases long) can be synthesized, phosphorylated, purified and annealed under appropriate conditions using well known techniques. The ends of the oligonucleotides can be joined, for example, using T4 DNA ligase. This synthetic minigene, encoding the epitope polypeptide, can then be cloned into a desired expression vector.

[0993] Standard regulatory sequences well known to those of skill in the art can be included in the vector to ensure expression in the target cells. For example, a promoter with a down-stream cloning site for minigene insertion; a polyadenylation signal for efficient transcription termination; an E. coli origin of replication; and an E. coli selectable marker (e.g. ampicillin or kanamycin resistance). Numerous promoters can be used for this purpose, e.g., the human cytomegalovirus (hCMV) promoter. See, e.g., U.S. Pat. Nos. 5,580,859 and 5,589,466 for other suitable promoter sequences.

[0994] Additional vector modifications can be used to optimize minigene expression and immunogenicity. In some cases, introns are utilized for efficient gene expression, and one or more synthetic or naturally-occurring introns could be incorporated into the transcribed region of the minigene. The inclusion of mRNA stabilization sequences and sequences for replication in mammalian cells can also be considered for increasing minigene expression.

[0995] Once an expression vector is selected, the minigene can be cloned into the polylinker region downstream of the promoter. This plasmid is transformed into an appropriate E. coli strain, and DNA is prepared using standard techniques. The orientation and DNA sequence of the minigene, as well as all other elements included in the vector, can be confirmed using restriction mapping and DNA sequence analysis. Bacterial cells harboring the correct plasmid can be stored as a master cell bank and a working cell bank.

[0996] In addition, immunomodulatory sequences appear to play a role in the immunogenicity of DNA vaccines. These sequences can be included in the vector, outside the minigene coding sequence, if desired to enhance immunogenicity. In one embodiment, the sequences are immunostimulatory. In another embodiment, the sequences are ISSs or CpGs.

[0997] In some embodiments, a bi-cistronic expression vector which allows production of both the minigene-encoded epitopes and a second protein (included to enhance or decrease immunogenicity) can be used. Examples of proteins or polypeptides that could beneficially enhance the immune response if co-expressed include cytokines (e.g., IL-2, IL-12, GM-CSF), cytokine-inducing molecules (e.g., LeIF), costimulatory molecules, or for HTL responses, pan-DR binding proteins. Helper (HTL) epitopes can be joined to intracellular targeting signals and expressed separately from expressed CTL epitopes; this allows direction of the HTL epitopes to a cell compartment different than that of the CTL epitopes. If required, this could facilitate more efficient entry of HTL epitopes into the HLA class II pathway, thereby improving HTL induction. In contrast to HTL or CTL induction, specifically decreasing the immune response by co-expression of immunosuppressive molecules (e.g. TGF-(3) can be beneficial in certain diseases.

[0998] Therapeutic quantities of plasmid DNA can be produced for example, by fermentation in E. coli, followed by purification. Aliquots from the working cell bank are used to inoculate growth medium, and grown to saturation in shaker flasks or a bioreactor according to well-known techniques. Plasmid DNA can be purified using standard bioseparation technologies such as solid phase anion-exchange resins supplied by QIAGEN, Inc. (Valencia, California). If required, supercoiled DNA can be from the open circular and linear forms using gel electrophoresis or other methods.

[0999] Purified plasmid DNA can be prepared for injection using a variety of formulations. The simplest of these is reconstitution of lyophilized DNA in sterile phosphate-buffer saline (PBS). This approach, known as “naked DNA,” is currently being used for intramuscular (IM) administration in clinical trials. To maximize the immunotherapeutic effects of minigene DNA vaccines, an alternative method for formulating purified plasmid DNA can be used. A variety of methods have been described, and new techniques can become available. Cationic lipids can also be used in the formulation (see, e.g., as described by WO 93/24640; Mannino & Gould-Fogerite, BioTechniques 6 (7): 682 (1988); U.S. Pat. No. 5,279,833; WO 91/06309; and Felgner, et al., Proc. Nat'l Acad. Sci. USA 84:7413 (1987). In addition, glycolipids, fusogenic liposomes, peptides and compounds referred to collectively as protective, interactive, non-condensing compounds (PINC) could also be complexed to purified plasmid DNA to influence variables such as stability, intramuscular dispersion, or trafficking to specific organs or cell types.

[1000] In another embodiment, the nucleic acid is introduced into cells by use of high-speed cell deformation. During high-speed deformation, cells are squeezed such that temporary disruptions occur in the cell membrane, thus allowing the nucleic acid to enter the cell. Alternatively, protein can be produced from expression vectors—in a bacterial expression vector, for example, and the proteins can then be delivered to the cell.

[1001] Target cell sensitization can be used as a functional assay for expression and HLA class I presentation of minigene-encoded CTL epitopes. For example, the plasmid DNA is introduced into a mammalian cell line that is suitable as a target for standard CTL chromium release assays. The transfection method used will be dependent on the final formulation. Electroporation can be used for “naked” DNA, whereas cationic lipids allow direct in vitro transfection. A plasmid expressing green fluorescent protein (GFP) can be co-transfected to allow enrichment of transfected cells using fluorescence activated cell sorting (FACS). These cells are then chromium-51 (51-Cr) labeled and used as target cells for epitope-specific CTL lines; cytolysis, detected by 51Cr release, indicates both production of, and HLA presentation of, minigene-encoded CTL epitopes. Expression of HTL epitopes can be evaluated in an analogous manner using assays to assess HTL activity.

[1002] In vivo immunogenicity is a second approach for functional testing of minigene DNA formulations. Transgenic mice expressing appropriate human HLA proteins are immunized with the DNA product. The dose and route of administration are formulation dependent (e.g., IM for DNA in PBS, intraperitoneal (IP) for lipid-complexed DNA). An exemplary protocol is twenty-one days after immunization, splenocytes are harvested and restimulated for 1 week in the presence of peptides encoding each epitope being tested. Thereafter, for CTL effector cells, assays are conducted for cytolysis of peptide-loaded, 51Cr-labeled target cells using standard techniques. Lysis of target cells that were sensitized by HLA loaded with peptide epitopes, corresponding to minigene-encoded epitopes, demonstrates DNA vaccine function for in vivo induction of CTLs. Immunogenicity of HTL epitopes is evaluated in transgenic mice in an analogous manner.

[1003] Alternatively, the nucleic acids can be administered using ballistic delivery as described, for instance, in U.S. Pat. No. 5,204,253. Using this technique, particles comprised solely of DNA are administered. In a further alternative embodiment, DNA can be adhered to particles, such as gold particles.

### Cells

[1004] In one aspect, the present disclosure also provides cells expressing a viral epitope-recognizing receptor that activates an immunoresponsive cell (e.g., T cell receptor (TCR) or chimeric antigen receptor (CAR)), and methods of using such cells for the treatment of a disease that requires an enhanced immune response.

[1005] Such cells include genetically modified immunoresponsive cells (e.g., T cells, Natural Killer (NK) cells, cytotoxic T lymphocytes (CTL) cells, helper T lymphocyte (HTL) cells) expressing an antigen-recognizing receptor (e.g., TCR or CAR) that binds one of the viral epitope peptides described herein, and methods of use therefore for the treatment of neoplasia and other pathologies where an increase in an antigen-specific immune response is desired. T cell activation is mediated by a TCR or a CAR targeted to an antigen.

[1006] The present disclosure provides cells expressing a combination of an antigen-recognizing receptor that activates an immunoresponsive cell (e.g., TCR, CAR) and a chimeric co-stimulating receptor (CCR), and methods of using such cells for the treatment of a disease that requires an enhanced immune response. In one embodiment, viral antigen-specific T cells, NK cells, CTL cells or other immunoresponsive cells are used as shuttles for the selective enrichment of one or more co-stimulatory ligands for the treatment or prevention of neoplasia. Such cells are administered to a human subject in need thereof for the treatment or prevention of a particular viral infection.

[1007] In one embodiment, the viral antigen-specific human lymphocytes that can be used in the methods of the present disclosure include, without limitation, peripheral donor lymphocytes genetically modified to express chimeric antigen receptors (CARs) (Sadelain, M., et al. 2003 Nat Rev Cancer 3:35-45), peripheral donor lymphocytes genetically modified to express a full-length viral antigen-recognizing T cell receptor complex comprising the a and p heterodimer (Morgan, R. A., et al. 2006 Science 314:126-129), and selectively in vitro-expanded antigen-specific peripheral blood leukocytes employing artificial antigen-presenting cells (AAPCs) or pulsed dendritic cells (Dupont, J., et al. 2005 Cancer Res 65:5417-5427; Papanicolaou, G. A., et al. 2003 Blood 102:2498-2505). The T cells may be autologous, allogeneic, or derived in vitro from engineered progenitor or stem cells.

### Co-Stimulatory Ligands

[1008] In one embodiment, the cells of the present disclosure are provided with at least one co-stimulatory ligand which is a non-antigen specific signal important for full activation of an immune cell. Co-stimulatory ligands include, without limitation, tumor necrosis factor (TNF) ligands, cytokines (such as IL-2, IL-12, IL-15 or IL21), and immunoglobulin (Ig) superfamily ligands. Tumor necrosis factor (TNF) is a cytokine involved in systemic inflammation and stimulates the acute phase reaction. Its primary role is in the regulation of immune cells. Tumor necrosis factor (TNF) ligands share a number of common features.

[1009] The majority of the ligands are synthesized as type II transmembrane proteins containing a short cytoplasmic segment and a relatively long extracellular region. TNF ligands include, without limitation, nerve growth factor (NGF), CD40L (CD40L)/CD154, CD137L/4-1BBL, tumor necrosis factor alpha (TNFα), CD134L/OX4OL/CD252, CD27L/CD70, Fas ligand (FasL), CD3OL/CD153, tumor necrosis factor f3 (TNF (3)/lymphotoxin-alpha (LTa), lymphotoxin-beta (ur (3), CD257/B cell-activating factor (BAFF)/Blys/THANK/Ta11-1, glucocorticoid-induced TNF Receptor ligand (GITRL), and TNF-related apoptosis-inducing ligand (TRAIL), LIGHT (TNFSF14). The immunoglobulin (Ig) superfamily is a large group of cell surface and soluble proteins that are involved in the recognition, binding, or adhesion processes of cells. These proteins share structural features with immunoglobulins, they possess an immunoglobulin domain (fold). Immunoglobulin superfamily ligands include, without limitation, CD80 and CD86, both ligands for CD28.

[1010] Compositions comprising genetically modified immunoresponsive cells of the present disclosure can be provided systemically or directly to a subject for the treatment of a neoplasia. In one embodiment, cells of the present disclosure are directly injected into an organ of interest. Alternatively, compositions comprising genetically modified immunoresponsive cells are provided indirectly to the organ of interest, for example, by administration into the circulatory system. Expansion and differentiation agents can be provided prior to, during or after administration of the cells to increase production of T cells, NK cells, or CTL cells in vitro or in vivo.

[1011] The modified cells can be administered in any physiologically acceptable vehicle, normally intravascularly, although they may also be introduced into bone or other convenient site where the cells may find an appropriate site for regeneration and differentiation (e.g., thymus). The modified cells can be autologous or allogeneic. Genetically modified immunoresponsive cells of the present disclosure can comprise a purified population of cells. Those skilled in the art can readily determine the percentage of genetically modified immunoresponsive cells in a population using various well-known methods, such as fluorescence activated cell sorting (FACS). Dosages can be readily adjusted by those skilled in the art (e.g., a decrease in purity may require an increase in dosage). The cells can be introduced by injection, catheter, or the like. If desired, factors can also be included, including, but not limited to, interleukins, e.g. IL-2, IL-3, IL-6, and IL-11, as well as the other interleukins, the colony stimulating factors, such as G-, M- and GM-CSF, interferons, e.g. interferon gamma and erythropoietin.

[1012] Compositions of the present disclosure include pharmaceutical compositions comprising genetically modified immunoresponsive cells or their progenitors and a pharmaceutically acceptable carrier. Administration can be autologous or heterologous. For example, immunoresponsive cells, or progenitors can be obtained from one subject, and administered to the same subject or a different, compatible subject. Peripheral blood derived immunoresponsive cells of the present disclosure or their progeny (e.g., in vivo, ex vivo or in vitro derived) can be administered via localized injection, including catheter administration, systemic injection, localized injection, intravenous injection, or parenteral administration. When administering a therapeutic composition of the present disclosure (e.g., a pharmaceutical composition containing a genetically modified immunoresponsive cell), it will generally be formulated in a unit dosage injectable form (solution, suspension, emulsion).

### Methods of Use and Pharmaceutical Compositions

[1013] The viral epitope therapeutics (e.g., peptides, polynucleotides, TCR, CAR, cells containing TCR or CAR, dendritic cell containing polypeptide, dendritic cell containing polynucleotide, antibody, etc.) described herein are useful in a variety of applications including, but not limited to, therapeutic treatment methods, such as the treatment or prevention of a viral infection. In some embodiments, the therapeutic treatment methods comprise immunotherapy. In certain embodiments, a viral epitope peptide is useful for activating, promoting, increasing, and/or enhancing an immune response or redirecting an existing immune response to a new target. The methods of use can be in vitro, ex vivo, or in vivo methods.

[1014] In some aspects, the present disclosure provides methods for activating an immune response in a subject using a viral epitope therapeutic described herein. In some embodiments, the present disclosure provides methods for promoting an immune response in a subject using a viral epitope therapeutic described herein. In some embodiments, the present disclosure provides methods for increasing an immune response in a subject using a viral epitope peptide described herein. In some embodiments, the present disclosure provides methods for enhancing an immune response using a viral epitope peptide. In some embodiments, the activating, promoting, increasing, and/or enhancing of an immune response comprises increasing cell-mediated immunity. In some embodiments, the activating, promoting, increasing, and/or enhancing of an immune response comprises increasing T cell activity or humoral immunity. In some embodiments, the activating, promoting, increasing, and/or enhancing of an immune response comprises increasing CTL or HTL activity. In some embodiments, the activating, promoting, increasing, and/or enhancing of an immune response comprises increasing NK cell activity. In some embodiments, the activating, promoting, increasing, and/or enhancing of an immune response comprises increasing T cell activity and increasing NK cell activity. In some embodiments, the activating, promoting, increasing, and/or enhancing of an immune response comprises increasing CTL activity and increasing NK cell activity. In some embodiments, the activating, promoting, increasing, and/or enhancing of an immune response comprises inhibiting or decreasing the suppressive activity of Tregs. In some embodiments, the immune response is a result of antigenic stimulation.

[1015] In some embodiments, the present disclosure provides methods of activating, promoting, increasing, and/or enhancing of an immune response using a viral epitope therapeutic described herein. In some embodiments, a method comprises administering to a subject in need thereof a therapeutically effective amount of a viral epitope therapeutic that delivers a viral epitope polypeptide or polynucleotide to a cell. In some embodiments, a method comprises administering to a subject in need thereof a therapeutically effective amount of a viral epitope that is internalized by a cell, and the viral epitope peptide is processed by the cell. In some embodiments, a method comprises administering to a subject in need thereof a therapeutically effective amount of a viral epitope polypeptide that is internalized by a cell, and an antigenic peptide is presented on the surface of the cell. In some embodiments, a method comprises administering to a subject in need thereof a therapeutically effective amount of a viral epitope polypeptide that is internalized by the cell, is processed by the cell, and an antigenic peptide is presented on the surface of the cell.

[1016] In some embodiments, a method comprises administering to a subject in need thereof a therapeutically effective amount of a viral epitope polypeptide or polynucleotide described herein that delivers an exogenous polypeptide comprising at least one antigenic peptide to a cell, wherein the antigenic peptide is presented on the surface of the cell. In some embodiments, the antigenic peptide is presented on the surface of the cell in complex with a MHC class I molecule. In some embodiments, the antigenic peptide is presented on the surface of the cell in complex with a MHC class II molecule.

[1017] In some embodiments, a method comprises contacting a cell with a viral epitope polypeptide or polynucleotide described herein that delivers an exogenous polypeptide comprising at least one antigenic peptide to the cell, wherein the antigenic peptide is presented on the surface of the cell. In some embodiments, the antigenic peptide is presented on the surface of the cell in complex with a MHC class I molecule. In some embodiments, the antigenic peptide is presented on the surface of the cell in complex with a MHC class II molecule.

[1018] In some embodiments, a method comprises administering to a subject in need thereof a therapeutically effective amount of a viral epitope polypeptide or polynucleotide described herein that delivers an exogenous polypeptide comprising at least one antigenic peptide to a cell, wherein the antigenic peptide is presented on the surface of the cell, and an immune response against the cell is induced. In some embodiments, the immune response against the cell is increased. In some embodiments, the viral epitope polypeptide or polynucleotide delivers an exogenous polypeptide comprising at least one antigenic peptide to a cell, wherein the antigenic peptide is presented on the surface of the cell.

[1019] In some embodiments, a method comprises administering to a subject in need thereof a therapeutically effective amount of a viral epitope polypeptide or polynucleotide described herein that delivers an exogenous polypeptide comprising at least one antigenic peptide to a cell, wherein the antigenic peptide is presented on the surface of the cell, and T cell killing directed against the cell is induced. In some embodiments, T cell killing directed against the cell is enhanced. In some embodiments, T cell killing directed against the cell is increased.

[1020] In some embodiments, a method of increasing an immune response in a subject comprises administering to the subject a therapeutically effective amount of a viral epitope therapeutic described herein, wherein the agent is an antibody that specifically binds the viral epitope described herein. In some embodiments, a method of increasing an immune response in a subject comprises administering to the subject a therapeutically effective amount of the antibody.

[1021] The present disclosure provides methods of inducing or promoting or enhancing an immune response to a virus. In some embodiments, a method of inducing or promoting or enhancing an immune response to a virus comprises administering to a subject a therapeutically effective amount of a viral epitope therapeutic described herein. In some embodiments, the immune response is against a virus. In preferred embodiments, the immune response is against a coronavirus. In preferred embodiments, the immune response is against a COVID19. In some embodiments, the virus is selected from the group consisting of: measles virus, varicella-zoster virus (VZV); chickenpox virus), influenza virus, mumps virus, poliovirus, rubella virus, rotavirus, hepatitis A virus (HAV), hepatitis B virus (HBV), Epstein Barr virus (EBV), and cytomegalovirus (CMV). In some embodiments, the virus is varicella-zoster virus. In some embodiments, the virus is cytomegalovirus. In some embodiments, the virus is measles virus. In some embodiments, the immune response has been acquired after a natural viral infection. In some embodiments, the immune response has been acquired after vaccination against a virus. In some embodiments, the immune response is a cell-mediated response. In some embodiments, the existing immune response comprises cytotoxic T cells (CTLs) or HTLs.

[1022] In some embodiments, a method of inducing or promoting or enhancing an immune response to a virus in a subject comprises administering a fusion protein comprising (i) an antibody that specifically binds a viral epitope and (ii) at least one viral epitope peptide described herein, wherein (a) the fusion protein is internalized by a cell after binding to the viral antigen; (b) the viral epitope peptide is processed and presented on the surface of the cell associated with a MHC class I molecule; and (c) the viral epitope peptide/MHC Class I complex is recognized by cytotoxic T cells. In some embodiments, the cytotoxic T cells are memory T cells. In some embodiments, the memory T cells are the result of a vaccination with the viral epitope peptide.

[1023] The present disclosure provides methods of increasing the immunogenicity of a virus. In some embodiments, a method of increasing the immunogenicity of a virus comprises contacting virally infected cells with an effective amount of a viral epitope therapeutic described herein. In some embodiments, a method of increasing the immunogenicity of a virus comprises administering to a subject a therapeutically effective amount of a viral epitope therapeutic described herein. In certain embodiments, the subject is a human.

[1024] In some embodiments, a method can comprise treating or preventing cancer in a subject in need thereof by administering to a subject a therapeutically effective amount of a viral epitope therapeutic described herein. In some embodiments, the cancer is a liquid cancer, such as a lymphoma or leukemia. In some embodiments, the cancer is a solid tumor. In certain embodiments, the tumor is a tumor selected from the group consisting of: colorectal tumor, pancreatic tumor, lung tumor, ovarian tumor, liver tumor, breast tumor, kidney tumor, prostate tumor, neuroendocrine tumor, gastrointestinal tumor, melanoma, cervical tumor, bladder tumor, glioblastoma, and head and neck tumor. In certain embodiments, the tumor is a colorectal tumor. In certain embodiments, the tumor is an ovarian tumor. In some embodiments, the tumor is a breast tumor. In some embodiments, the tumor is a lung tumor. In certain embodiments, the tumor is a pancreatic tumor. In certain embodiments, the tumor is a melanoma tumor. In some embodiments, the tumor is a solid tumor.

[1025] The present disclosure further provides methods for treating or preventing a viral infection in a subject comprising administering to the subject a therapeutically effective amount of a viral epitope therapeutic described herein.

[1026] In some embodiments, a method of treating or preventing a viral infection comprises redirecting an existing immune response to a new target, the method comprising administering to a subject a therapeutically effective amount of viral epitope therapeutic, wherein the existing immune response is against an antigenic peptide delivered to a cell or a cell infected with a virus by the viral epitope peptide.

[1027] The present disclosure provides for methods of treating or preventing a viral infection comprising administering to a subject a therapeutically effective amount of a viral epitope therapeutic described herein (e.g., a subject in need of treatment). In certain embodiments, the subject is a human. In certain embodiments, the subject has a coronavirus infection or is at risk of a coronavirus infection.

[1028] In certain embodiments, in addition to administering a viral epitope therapeutic described herein, the method or treatment further comprises administering at least one additional therapeutic agent. An additional therapeutic agent can be administered prior to, concurrently with, and/or subsequently to, administration of the agent. In some embodiments, the at least one additional therapeutic agent comprises 1, 2, 3, or more additional therapeutic agents.

[1029] In some embodiments, the viral epitope therapeutic can be administered in combination with a biologic molecule selected from the group consisting of: adrenomedullin (AM), angiopoietin (Ang), BMPs, BDNF, EGF, erythropoietin (EPO), FGF, GDNF, granulocyte colony stimulating factor (G-CSF), granulocyte-macrophage colony stimulating factor (GM-CSF), macrophage colony stimulating factor (M-CSF), stem cell factor (SCF), GDF9, HGF, HDGF, IGF, migration-stimulating factor, myostatin (GDF-8), NGF, neurotrophins, PDGF, thrombopoietin, TGF-α, TGF TNF-α, VEGF, P1GF, gamma-IFN, IL-1, IL-2, IL-3, IL-4, IL-5, IL-6, IL-7, IL-12, IL-15, and IL-18.

[1030] In certain embodiments, treatment involves the administration of a viral epitope therapeutic described herein in combination with an additional therapy. In certain embodiments, the additional therapy is or comprises a therapy for another virus, for example influenza. In certain embodiments, the additional therapy is or comprises one or more vaccines (e.g., vaccines against one or more infectious disease). In certain embodiments, a viral epitope therapeutic described herein is administered in combination with a therapy (e.g., in some embodiments a vaccine) for SARS-CoV-2 infection. In certain embodiments, a viral epitope therapeutic described herein is administered in combination with a therapy (e.g., in some embodiments a vaccine) for a non-SARS-CoV-2 pathogen (e.g., a virus) infection, for example, a non-SARS-CoV-2 respiratory disease. Non-limiting examples of non-SARS-CoV-2 respiratory diseases include coronaviruses (e.g., a non-SARS-CoV-2 coronavirus), an Influenza virus, a Pneumoviridae virus, a Paramyxoviridae virus (e.g., a Respiratory syncytial virus (RSV) or a Metapneumovirus), and combinations thereof. In some embodiments, the Metapneumovirus is a human metapneumovirus (hMPV). In some embodiments, the Paramyxoviridae virus is a Parainfluenza virus or a Henipavirus. In some embodiments the parainfluenzavirus is PIV3. In some embodiments, the non-SAR-CoV-2 coronavirus is a betacoronavirus (e.g., SARS-CoV-1). In come embodiments the non-SARS-CoV-2 coronavirus is a Merbecovirus (e.g., a MERS-CoV virus).

[1031] In some embodiments, a viral epitope therapauetic described herein is administered in combination with a therapy (e.g., in some embodiments a vaccine) for influenza.

[1032] In some embodiments, a viral epitope therapeutic described herein is administered in combination with an RSV vaccine (e.g., an RSV A or RSV B vaccine). In some embodiments, the RSV vaccine comprises an RSV fusion protein (F), an RSV attachment protein (G), an RSV small hydrophobic protein (SH), an RSV matrix protein (M), an RSV nucleoprotein (N), an RSV M2-1 protein, an RSV Large polymerase (L), and/or an RSV phosphoprotein (P), or an immunogenic fragment of immunogenic variant thereof, or a nucleic acid (e.g., RNA), encoding any one of the same. In some embodiments, a therapeutic described herein is co-administered with an influenza vaccine. In some embodiments, the influenza vaccine is an alphainfluenza virus, a betainfluenza virus, a gammainfluenza virus or a deltainfluenza virus vaccine. In some embodiments the vaccine is an Influenza A virus, an Influenza B virus, an Influenza C virus, or an Influenza D virus vaccine. In some embodiments, the influenza A virus vaccine comprises a hemagglutinin selected from H1, H2, H3, H4, H5, H6, H7, H8, H9, H10, H11, H12, H13, H14, H15, H16, H17, and H18, or an immunogenic fragment or variant of the same, or a nucleic acid (e.g., RNA) encoding any one of the same. In some embodiments the influenza A vaccine comprises or encodes a neuraminidase (NA) selected from N1, N2, N3, N4, N5, N6, N7, N8, N9, N10, and N11, or an immunogenic fragment or variant of the same, or a nucleic acid (e.g., RNA) encoding any one of the same. In some embodiments, the influenza vaccine comprises at least one Influenza virus hemagglutinin (HA), neuraminidase (NA), nucleoprotein (NP), matrix protein 1 (M1), matrix protein 2 (M2), non-structural protein 1 (NS1), non-structural protein 2 (NS2), nuclear export protein (NEP), polymerase acidic protein (PA), polymerase basic protein PB1, PB1-F2, and/or polymerase basic protein 2 (PB2), or an immunogenic fragment or variant thereof, or a nucleic acid (e.g., RNA) encoding any of one of the same.

[1033] Exemplary therapies for viruses also include but are not limited to oseltamivir, oseltamivir phosphate (available as a generic version or under the trade name Tamiflu®), zanamivir (trade name Relenza®), peramivir (trade name Rapivab®), baloxavir marboxil (trade name Xofluza®), amantadine, moroxydine, rimantadine, umifenovir (trade name Arbidol®) and zanamivir (trade name Relenza®).

[1034] Treatment with an agent can occur prior to, concurrently with, or subsequent to administration of an additional therapy. Dosing schedules for such additional therapies can be determined by the skilled medical practitioner.

[1035] Combined administration can include co-administration, either in a single pharmaceutical formulation or using separate formulations, or consecutive administration in either order but generally within a time period such that all active agents can exert their biological activities simultaneously.

[1036] It will be appreciated that the combination of a viral epitope therapeutic described herein and at least one additional therapeutic agent can be administered in any order or concurrently. In some embodiments, the agent will be administered to patients that have previously undergone treatment with a second therapeutic agent. In certain other embodiments, the viral epitope therapeutic and a second therapeutic agent will be administered substantially simultaneously or concurrently. For example, a subject can be given an agent while undergoing a course of treatment with a second therapeutic agent (e.g., chemotherapy). In certain embodiments, a viral epitope therapeutic will be administered within 1 year of the treatment with a second therapeutic agent. It will further be appreciated that the two (or more) agents or treatments can be administered to the subject within a matter of hours or minutes (i.e., substantially simultaneously).

[1037] For the treatment of a disease, the appropriate dosage of a viral epitope therapeutic described herein depends on the type of disease to be treated, the severity and course of the disease, the responsiveness of the disease, whether the agent is administered for therapeutic or preventative purposes, previous therapy, the patient's clinical history, and so on, all at the discretion of the treating physician. The viral epitope therapeutic can be administered one time or over a series of treatments lasting from several days to several months, or until a cure is effected or a diminution of the disease state is achieved. Optimal dosing schedules can be calculated from measurements of drug accumulation in the body of the patient and will vary depending on the relative potency of an individual agent. The administering physician can determine optimum dosages, dosing methodologies, and repetition rates.

[1038] In some embodiments, a viral epitope therapeutic can be administered at an initial higher “loading” dose, followed by one or more lower doses. In some embodiments, the frequency of administration can also change. In some embodiments, a dosing regimen can comprise administering an initial dose, followed by additional doses (or “maintenance” doses) once a week, once every two weeks, once every three weeks, or once every month. For example, a dosing regimen can comprise administering an initial loading dose, followed by a weekly maintenance dose of, for example, one-half of the initial dose. Or a dosing regimen can comprise administering an initial loading dose, followed by maintenance doses of, for example one-half of the initial dose every other week. Or a dosing regimen can comprise administering three initial doses for 3 weeks, followed by maintenance doses of, for example, the same amount every other week.

[1039] As is known to those of skill in the art, administration of any therapeutic agent can lead to side effects and/or toxicities. In some cases, the side effects and/or toxicities are so severe as to preclude administration of the particular agent at a therapeutically effective dose. In some cases, therapy must be discontinued, and other agents can be tried. However, many agents in the same therapeutic class display similar side effects and/or toxicities, meaning that the patient either has to stop therapy, or if possible, suffer from the unpleasant side effects associated with the therapeutic agent.

[1040] In some embodiments, the dosing schedule can be limited to a specific number of administrations or “cycles”. In some embodiments, the agent is administered for 3, 4, 5, 6, 7, 8, or more cycles. For example, the agent is administered every 2 weeks for 6 cycles, the agent is administered every 3 weeks for 6 cycles, the agent is administered every 2 weeks for 4 cycles, the agent is administered every 3 weeks for 4 cycles, etc. Dosing schedules can be decided upon and subsequently modified by those skilled in the art.

[1041] The present disclosure provides methods of administering to a subject a viral epitope therapeutic described herein comprising using an intermittent dosing strategy for administering one or more agents, which can reduce side effects and/or toxicities associated with administration of an agent, chemotherapeutic agent, etc. In some embodiments, a method for treating or preventing a viral infection in a human subject comprises administering to the subject a therapeutically effective dose of a viral epitope therapeutic in combination with a therapeutically effective dose of another therapeutic agent, such as an anti-viral agent, wherein one or both of the agents are administered according to an intermittent dosing strategy. In some embodiments, a method for treating or preventing a viral infection in a human subject comprises administering to the subject a therapeutically effective dose of a viral epitope therapeutic in combination with a therapeutically effective dose of a second viral epitope therapeutic, wherein one or both of the agents are administered according to an intermittent dosing strategy. In some embodiments, the intermittent dosing strategy comprises administering an initial dose of a viral epitope therapeutic to the subject, and administering subsequent doses of the agent about once every 2 weeks. In some embodiments, the intermittent dosing strategy comprises administering an initial dose of a viral epitope therapeutic to the subject, and administering subsequent doses of the agent about once every 3 weeks. In some embodiments, the intermittent dosing strategy comprises administering an initial dose of a viral epitope therapeutic to the subject, and administering subsequent doses of the agent about once every 4 weeks. In some embodiments, the agent is administered using an intermittent dosing strategy and the additional therapeutic agent is administered weekly.

[1042] The present disclosure provides compositions comprising the viral epitope therapeutic described herein. The present disclosure also provides pharmaceutical compositions comprising a viral epitope therapeutic described herein and a pharmaceutically acceptable vehicle. In some embodiments, the pharmaceutical compositions find use in immunotherapy. In some embodiments, the compositions find use in inhibiting viral replication. In some embodiments, the pharmaceutical compositions find use in inhibiting viral replication in a subject (e.g., a human patient).

[1043] Formulations are prepared for storage and use by combining an antigen therapeutic of the present disclosure with a pharmaceutically acceptable vehicle (e.g., a carrier or excipient). Those of skill in the art generally consider pharmaceutically acceptable carriers, excipients, and/or stabilizers to be inactive ingredients of a formulation or pharmaceutical composition. Exemplary formulations are listed in WO 2015/095811.

[1044] Suitable pharmaceutically acceptable vehicles include, but are not limited to, nontoxic buffers such as phosphate, citrate, and other organic acids; salts such as sodium chloride; antioxidants including ascorbic acid and methionine; preservatives such as octadecyldimethylbenzyl ammonium chloride, hexamethonium chloride, benzalkonium chloride, benzethonium chloride, phenol, butyl or benzyl alcohol, alkyl parabens, such as methyl or propyl paraben, catechol, resorcinol, cyclohexanol, 3-pentanol, and m-cresol; low molecular weight polypeptides (e.g., less than about 10 amino acid residues); proteins such as serum albumin, gelatin, or immunoglobulins; hydrophilic polymers such as polyvinylpyrrolidone; amino acids such as glycine, glutamine, asparagine, histidine, arginine, or lysine; carbohydrates such as monosaccharides, disaccharides, glucose, mannose, or dextrins; chelating agents such as EDTA; sugars such as sucrose, mannitol, trehalose or sorbitol; salt-forming counter-ions such as sodium; metal complexes such as Zn-protein complexes; and non-ionic surfactants such as TWEEN or polyethylene glycol (PEG). (Remington: The Science and Practice of Pharmacy, 22st Edition, 2012, Pharmaceutical Press, London.). In one embodiment, the vehicle is 5% dextrose in water.

[1045] The pharmaceutical compositions described herein can be administered in any number of ways for either local or systemic treatment. Administration can be topical by epidermal or transdermal patches, ointments, lotions, creams, gels, drops, suppositories, sprays, liquids and powders; pulmonary by inhalation or insufflation of powders or aerosols, including by nebulizer, intratracheal, and intranasal; oral; or parenteral including intravenous, intraarterial, subcutaneous, intraperitoneal, intramuscular (e.g., injection or infusion), or intracranial (e.g., intrathecal or intraventricular).

[1046] The therapeutic formulation can be in unit dosage form. Such formulations include tablets, pills, capsules, powders, granules, solutions or suspensions in water or non-aqueous media, or suppositories

[1047] The viral epitope peptides described herein can also be entrapped in microcapsules. Such microcapsules are prepared, for example, by coacervation techniques or by interfacial polymerization, for example, hydroxymethylcellulose or gelatin-microcapsules and poly-(methylmethacylate) microcapsules, respectively, in colloidal drug delivery systems (for example, liposomes, albumin microspheres, microemulsions, nanoparticles and nanocapsules) or in macroemulsions as described in Remington: The Science and Practice of Pharmacy, 22st Edition, 2012, Pharmaceutical Press, London.

[1048] In certain embodiments, pharmaceutical formulations include a viral epitope therapeutic described herein complexed with liposomes. Methods to produce liposomes are known to those of skill in the art. For example, some liposomes can be generated by reverse phase evaporation with a lipid composition comprising phosphatidylcholine, cholesterol, and PEG-derivatized phosphatidylethanolamine (PEG-PE). Liposomes can be extruded through filters of defined pore size to yield liposomes with the desired diameter.

[1049] In certain embodiments, sustained-release preparations comprising the viral epitope peptides described herein can be produced. Suitable examples of sustained-release preparations include semi-permeable matrices of solid hydrophobic polymers containing an agent, where the matrices are in the form of shaped articles (e.g., films or microcapsules). Examples of sustained-release matrices include polyesters, hydrogels such as poly(2-hydroxyethyl-methacrylate) or poly(vinyl alcohol), polylactides, copolymers of L-glutamic acid and 7 ethyl-L-glutamate, nondegradable ethylene-vinyl acetate, degradable lactic acid-glycolic acid copolymers such as the LUPRON DEPOTTM (injectable microspheres composed of lactic acid-glycolic acid copolymer and leuprolide acetate), sucrose acetate isobutyrate, and poly-D-(−)-3-hydroxybutyric acid.

### String Construct Designs and Vaccine Compositions

[1050] In one aspect, provided herein are compositions and methods for augmenting, inducing, promoting, enhancing or improving an immune response against a virus (e.g., as described herein). In one embodiment, the composition and methods described here are designed to augment, induce, promote, enhance or improve immunological memory against a virus (e.g., as described herein). In one embodiment, the composition and methods described here are designed to act as immunological boost to a primary vaccine, such as a vaccine directed to an antigenic polypeptide of a virus. In one embodiments, the composition comprises one or more polynucleotide constructs (designated herein as “Strings”) that encode one or more antigenic epitopes of one or more viruses. Both coding and non-coding strands are contemplated herein. In some embodiments, the strings refer to polynucleotide chains that encode a plurality of antigenic epitopes of one or more viruses in tandem. In some embodiments there are about 2 to about 100, about 2 to about 1000 or about 2 to about 10,000 epitopes encoded in one string. In some embodiments about 2-5000 antigenic epitopes of one or more viruses are encoded in one polynucleotide string. In some embodiments about 2-4000 antigenic epitopes of one or more viruses are encoded in one polynucleotide string. In some embodiments about 2-3000 antigenic epitopes of one or more viruses are encoded in one polynucleotide string. In some embodiments about 2-2000 antigenic epitopes of one or more viruses are encoded in one polynucleotide string. In some embodiments about 2-1000 antigenic epitopes of one or more viruses are encoded in one polynucleotide string. In some embodiments about 10-500 antigenic epitopes of one or more viruses are encoded in one polynucleotide string. In some embodiments about 10-200 antigenic epitopes of one or more viruses are encoded in one polynucleotide string. In some embodiments about 20-100 antigenic epitopes of one or more viruses are encoded in one polynucleotide string. In some embodiments, the virus is or comprises a coronavirus.

[1051] In one aspect, provided herein are compositions and methods for augmenting, inducing, promoting, enhancing or improving an immune response against 2019 SARS CoV-2 virus. In one embodiment, the composition and methods described here are designed to augment, induce, promote, enhance or improve immunological memory against 2019 SARS CoV-2 virus. In one embodiment, the composition and methods described here are designed to act as immunological boost to a primary vaccine, such as a vaccine directed to a spike protein of the 2019 SARS CoV-2 virus. In one embodiments, the composition comprises one or more polynucleotide constructs (designated herein as “Strings”) that encode one or more SARS CoV-2 epitopes. Both coding and non-coding strands are contemplated herein. In some embodiments, the strings refer to polynucleotide chains that encode a plurality of SARS CoV-2 epitopes in tandem. In some embodiments there are about 2 to about 100, about 2 to about 1000 or about 2 to about 10,000 epitopes encoded in one string. In some embodiments about 2-5000 SARS CoV-2 epitopes are encoded in one polynucleotide string. In some embodiments about 2-4000 SARS CoV-2 epitopes are encoded in one polynucleotide string. In some embodiments about 2-3000 SARS CoV-2 epitopes are encoded in one polynucleotide string. In some embodiments about 2-2000 SARS CoV-2 epitopes are encoded in one polynucleotide string. In some embodiments about 2-1000 SARS CoV-2 epitopes are encoded in one polynucleotide string. In some embodiments about 10-500 SARS CoV-2 epitopes are encoded in one polynucleotide string. In some embodiments about 10-200 SARS CoV-2 epitopes are encoded in one polynucleotide string. In some embodiments about 20-100 SARS COV-2 epitopes are encoded in one polynucleotide string.

[1052] In some embodiments the SARS CoV-2 epitopes encoded by the string constructs comprise epitopes that are predicted by a HLA binding and presentation prediction software to be of high likelihood to be presented by a protein encoded by an HLA to a T cell for eliciting immune response. In some embodiments the SARS COV-2 epitopes encoded by the string constructs that are predicted to have a high likelihood to be presented by a protein encoded by an HLA, are selected from any one of the proteins or peptides described in Tables 1-12, 14A, 14B and 15. In some embodiments the SARS CoV-2 epitopes encoded by the string constructs comprise epitopes that are predicted to have a high likelihood to be presented by a protein encoded by an HLA, and the epitope is selected from any one of the proteins described in Table 1A, Table 1B, Table 1C, Table 2Ai, Table 2Aii, Table 2B, Table 9, Table 10, Table 11, Table 12, Table 14A, Table 14B and/or Table 15. In some embodiments, the epitopes in a string construct comprise nucleocapsid epitopes.

[1053] In some embodiments, the epitopes in a string construct comprise spike(S) epitopes. In some embodiments, the epitopes in a string construct comprise nucleocapsid epitopes. In some embodiments, the epitopes in a string construct comprise membrane protein epitopes. In some embodiments, the eptipoes in a string construct comprises ORF1ab epitopes. In some embodiments, the epitopes in a string construct comprise NSP1, NSP2, NSP3, or NSP4 epitopes. In some embodiments, the string constructs comprise a multitude of epitopes that are from 2, 3, 4, or more proteins in a virus. In some embodiments the string constructs comprise the features described in Tables 9-12, and 15. In some embodiments the String constructs comprise a sequence as depicted in SEQ ID RS C1n, RS C2n, RS C3n, RS C4n, SEQ ID RS C5n, RS Con, RS C7n, RS C8n or a sequence that has at least 70% sequence identity to any one of the sequences depicted in SEQ ID RS Cin, RS C2n, RS C3n, RS C4n, SEQ ID RS C5n, RS Con, RS C7n, RS C8n. In some embodiments, the string constructs comprise additional sequences such as linkers, and sequences encoding peptide autocleavage sequences, for example, T2A, or P2A sequences. In some embodiments the string constructs comprises two or more overlapping epitope sequences. In some embodiments a String construct comprise a sequence that is 80%, 81%, 82%, 83%, 84%, 85%, 86%, 87%, 88%, 89%, 90%, 91%, 92%, 93%, 94%, 95%, 96%, 97%, 98%, 99% or 100% sequence identity to any one of the sequences SEQ ID RS Cin, RS C2n, RS C3n, RS C4n, SEQ ID RS C5n, RS Con, RS C7n, RS C8n.

[1054] In some embodiments, the epitopes are arranged on a string to maximize immunogenicity of the string, for example by maximizing recognition by HLA allele repertoire of a subject. In some embodiments, the same string encodes epitopes that can bind to or are predicted to bind to different HLA alleles. For instance, as is well exemplified in the sequences tables, e.g., at least in Tables 9, 10, 11, 12, 14A and 14B, and 15, a string may encode epitope(s) that comprise: (a) a first epitope that binds to or is predicted to bind to a first MHC peptide encoded by a first HLA allele; (b) a second epitope that binds to or is predicted to bind to a second MHC peptide encoded by a second HLA allele; (c) a third epitope that binds to or is predicted to bind to a third MHC peptide encoded by a third HLA allele- and more such epitopes can be added, as in for example in sting sequences of RS-C1, or RS-C2 etc.; wherein the first, second and third epitopes are epitopes from the same viral protein, or from different viral proteins. In this way, the epitope distribution encoded by a single string is maximized for hitting the different MHC based presentation to T cells, thereby maximizing the probability of generating an antiviral response from a wider range of patients in the given population and the robustness of the response of each patent. In some embodiments, the epitopes are selected on the basis of high scoring prediction for binding to an HLA by a reliable prediction algorithm or system, such as the RECON prediction algorithm. In some embodiments, the present disclosure provides an insight that particularly successful strings can be provided by selecting epitopes based on highly reliable and efficient prediction algorithm, in the layout of the epitopes encoded by the string, with or without non-epitope sequences or sequences flanking the epitopes, and is such that the immunogenicity of the string is validated in an ex vivo cell culture model, or in an animal model, specifically in showing T cell induction following vaccination with a string construct or a polypeptide encoded by a string construct with the finding of epitope specific T cell response. In some embodiments, the validation may be from using in human patients, and with a finding that T cells obtained from a patient post vaccination shows epitope specific efficient and lasting T cell response. In one embodiment, the efficiency of a string as a vaccine is influenced by its design, that in part depends on strength of the bioinformatic information used in the thoughtful execution of the design, the reliability of the MHC presentation prediction model, the efficiency of epitope processing when a string vaccine is expressed in a cell, among others.

[1055] In some embodiments the epitope-coding sequences in a string construct are flanked by one or more sequences selected for higher immunogenicity, better cleavability for peptide presentation to MHCs, better expression, and/or improved translation in a cell in a subject. The flanking sequences may comprise a linker with a specific cleavable sequences. In some embodiments the epitope-coding sequences in a string construct are flanked by a secretory protein sequence. In some embodiments a string sequence encodes an epitope that may comprise or otherwise be linked to a secretory sequence such as MFVFLVLLPLVSSQCVNLT, or at least a sequence having 1, 2, 3, 4, or at the most 5 amino acid differences relative thereto. In some embodiments, a string sequence encodes an epitope that may be linked at the N-terminal end by a sequence MFVFLVLLPLVSSQCVNLT or a sequence having 1, 2, 3, 4, or at the most 5 amino acid differences relative thereto. The linked sequences may comprise a linker with a specific cleavable sequences. In some embodiments the string construct is linked to a transmembrane domain (TM). In some embodiments, a string sequence encodes an epitope that may be linked at the C terminal sequence by a TM domain sequence EQYIKWPWYIWLGFIAGLIAIVMVTIMLCCMTSCCSCLKGCCSCGSCCKFDEDDSEPVLKGVKL HYT, or a sequence having 1, 2, 3, 4, or at the most 5 amino acid differences relative thereto. In some embodiments, one or more linker sequences may comprise cleavage sequences. In some embodiments, a linker may have a length of 2, 3, 4, 5, 6, 7, 8, 9, 10 or more amino acid. In some embodiments a linker of not more than about 30, 25, 20, 15, 10 or fewer amino acids is used. In general, any amino acid may be present as a linker sequence. In some embodiments, a linker or cleavage sequence contains a lysine (K). In some embodiments, a linker or cleavage sequence contains an arginine (R). In some embodiments, a linker or cleavage sequence contains a methionine (M). In some embodiments, a linker or cleavage sequence contains a tyrosine (Y). In some embodiments, a linker is designed to comprise amino acids based on a cleavage predictor to generate highly-cleavable sequences peptide sequences, and is a novel and effective way of delivering immunogenic T cell epitopes in a T cell vaccine setting. In some embodiments, the epitope distribution and their juxtaposition encoded in a string construct are so designed to facilitate cleavage sequences contributed by the amino acid sequences of the epitopes and/or the flanking or linking residues and thereby using minimal linker sequences. In some embodiments, a linker sequence comprises a 4 amino acid-linker sequence that induces proteosomal cleavage. Some exemplary cleavage sequences may be one or more of FRAC, KRCF, KKRY, ARMA, RRSG, MRAC, KMCG, ARCA, KKQG, YRSY, SFMN, FKAA, KRNG, YNSF, KKNG, RRRG, KRYS, and ARYA. Among other things, MS data included herein demonstrates that the epitopes that are highly predicted for binding ended up being presented to T cells, and immunogenic. In some embodiments, a linker sequence included in a string construct is enriched in glycine (G) and/or serine(S). For example, in some embodiments, such a linker sequence comprises at least 50% (including, e.g., at least 60%, at least 70%, at least 80%, at least 90%, at least 95%, or more and up to 100%) G and/or S residues. In some embodiments, such a linker sequence comprises GGSGGGGSGG or GGSLGGGGSG. In some embodiments, a linker sequence enriched in G and/or S may be included between an antigenic region and a non-antigenic region (e.g., between a secretory signal and an antigenic region and/or between a transmembrane domain and an antigenic region).

[1056] In some embodiments the string constructs may be mRNA. In some embodiments a pharmaceutical composition may comprise one or more mRNA string construct, each comprising a sequence encoding a plurality of coronavirus (e.g., in some embodiments SARS-CoV-2) epitopes. In some embodiments, the one or more mRNA may comprise a plurality of epitopes from a coronavirus (e.g., in some embodiments SARS-CoV-2) spike protein, wherein each of the plurality of epitopes is predicted by an HLA binding and presentation prediction algorithm to be of high likelihood to be presented by a protein encoded by an HLA to a T cell for eliciting immune response. In some embodiments, the one or more mRNA may comprise a plurality of epitopes from a coronavirus (e.g., in some embodiments SARS-CoV-2) membrane protein, wherein each of the plurality of epitopes is predicted by an HLA binding and presentation prediction algorithm to be of high likelihood to be presented by a protein encoded by an HLA to a T cell for eliciting immune response. In some embodiments, the one or more mRNA may comprise a plurality of epitopes from a coronavirus (e.g., in some embodiments SARS-CoV-2) ORF1ab, wherein each of the plurality of epitopes is predicted by an HLA binding and presentation prediction algorithm to be of high likelihood to be presented by a protein encoded by an HLA to a T cell for eliciting immune response. In some embodiments the one or more mRNA may comprise a plurality of epitopes from a coronavirus (e.g., SARS-CoV-2) nucleocapsid protein, wherein each of the plurality of epitopes is predicted by an HLA binding and presentation prediction algorithm to be of high likelihood to be presented by a protein encoded by an HLA to a T cell for eliciting immune response. In some embodiments the one or more mRNA may comprise a plurality of epitopes from the coronavirus (e.g., SARS-CoV-2) spike, or ORF1ab (e.g., one or more non-structural proteins), or nucleocapsid protein, or membrane protein or any other protein wherein each of the plurality of epitopes is predicted by an HLA binding and presentation prediction algorithm to be of high likelihood to be presented by a protein encoded by an HLA to a T cell for eliciting immune response. In some embodiments the one or more mRNA may comprise a plurality of epitopes from at least two of the following: the coronavirus (e.g., SARS-CoV-2) spike, or ORF1ab (e.g., one or more non-structural proteins), or nucleocapsid protein, or membrane protein or any other protein wherein each of the plurality of epitopes is predicted by an HLA binding and presentation prediction algorithm to be of high likelihood to be presented by a protein encoded by an HLA to a T cell for eliciting immune response. In some embodiments the one or more mRNA may comprise a plurality of epitopes from coronavirus (e.g., SARS-CoV-2) ORF1ab (e.g., one or more non-structural proteins), nucleocapsid protein, and membrane protein, wherein each of the plurality of epitopes is predicted by an HLA binding and presentation prediction algorithm to be of high likelihood to be presented by a protein encoded by an HLA to a T cell for eliciting immune response. In some embodiments the plurality of epitopes may comprise epitopes from a single 2019 SARS CoV-2 protein. In some embodiments the plurality of epitopes may comprise epitopes from multiple 2019 SARS CoV-2 protein. In some embodiments the plurality of epitopes may comprise epitopes from 2019 SARS CoV-2 nucleocapsid protein.

[1057] In some embodiments, a provided mRNA string construct comprises a nucleotide sequence that encodes a polyepitopic polypeptide comprising at least two or more antigenic segments (e.g., from nucleocapsid and/or membrane proteins) interspersed with at least one (including, e.g., at least two, at least three, at least four, at least five, at least six, or more) short epitope of ORF1ab protein. In some embodiments, such a provided mRNA string construct further comprises a nucleotides that encodes a cleavable linker sequence (e.g., in some embodiments a nucleotide sequence encoding a 4 amino acid-linker sequence that induces proteosomal cleavage as described herein, e.g., a cleavable linker sequence independently selected from FKAA, KRNG, YNSF, KKNG, YRSY, RRRG, and ARMA) that separates each antigenic segment and the short epitopes of ORF1ab protein. See for example, FIG. 75A. In some embodiments, such a provided mRNA string construct comprises a nucleotide sequence that encodes a polyepitopic polypeptide comprising two or more antigenic segments (e.g., from nucleocapsid and/or membrane proteins) interspersed with at least two short epitopes of ORF1ab protein, wherein the at least two short epitopes of ORF1ab are separated by a cleavable linker sequence (e.g., a 4 amino acid linker sequence that induces proteasomal cleavage, e.g., a sequenece selected from FKAA, KRNG, YNSF, KKNG, YRSY, RRRG, and ARMA). In some embodiments, such a cleavable linker sequence between the short epitopes of ORF1ab protein is or comprise a sequence of ARMA.

[1058] In some embodiments, the encoded antigenic segments (e.g., from nucleocapsid and/or membrane proteins) can each independently have a length of about 10 amino acids to about 500 amino acids, about 25 amino acids to about 250 amino acids, or about 25 amino acids to 200 amino acids. In some embodiments, a plurality of (e.g., at least two or more including, e.g., at least three, at least four, at least five, at least six, or more) encoded short eptiopes of ORF1ab protein form a polyepitopic segment having a length of about 10 amino acids to about 500 amino acids, or about 15 amino acids to about 250 amino acids, or about 20 amino acids to about 150 amino acids, or about 20 amino acids to about 100 amino acids. In some embodiments, a polyepitopic polypeptide encoded by a provided mRNA string construct has a length of about 150 amino acids to about 2000 amino acids, or about 300 amino acids to about 1500 amino acids, or about 400 amino acids to about 1000 amino acids.

[1059] In some embodiments, the mRNA may comprise a 5′UTR and/or a 3′UTR. In some embodiments, the UTR may comprise a poly A sequence. A poly A sequence may be between 50-200 nucleotides long. In some embodiments the 2019 SARS CoV-2 viral epitopes may be flanked by a signal peptide sequence, e.g., SP1 sequence to enhance epitope processing and presentation. In some embodiments the 2019 SARS CoV-2 viral epitopes are flanked with an MITD sequence to enhance epitope processing and presentation. In some embodiments, the polynucleotide comprises a dEarI-hAg sequence. In some embodiments, the poly A tail comprises a specific number of Adenosines, such as about 50 or more, about 60 or more, about 70 or more, about 80 or more, about 90 or more, about 100 or more, about 120, or about 150 or about 200. In some embodiments a poly A tail of a string construct may comprise 200 A residues or less. In some embodiments a poly A tail of a string construct may comprise about 200 A residues. In some embodiments a poly A tail of a string construct may comprise 180 A residues or less. In some embodiments a poly A tail of a string construct may comprise about 180 A residues. In some embodiments, the poly A tail may comprise 150 residues or less. In some embodiments a poly A tail of a string construct may comprise about 150 A residues. In some embodiments, the poly A tail may comprise 120 residues or less. In some embodiments a poly A tail of a string construct may comprise about 120 A residues. In some embodiments, the vaccine described herein comprises as the active principle single-stranded RNA that may be translated into the respective protein upon entering cells of a recipient. In addition to wildtype or codon-optimized sequences encoding the antigen sequence, the RNA may contain one or more structural elements optimized for maximal efficacy of the RNA with respect to stability and translational efficiency (5′ cap, 5′ UTR, 3′ UTR, poly(A)-tail). In one embodiment, the RNA contains all of these elements. In one embodiment, beta-S-ARCA (D1) (m₂^{7,2′-O}GppSpG) or a cap comprising a Cap1 structure (e.g., in some embodiments a trinucleotide cap, e.g., m₂^{7,3′-O}Gppp(m₁^{2′-O})ApG) may be utilized as specific capping structure at the 5′-end of the RNA drug substances. As 5′-UTR sequence, the 5′-UTR sequence of the human alpha-globin mRNA, optionally with an optimized ‘Kozak sequence’ to increase translational efficiency may be used. As 3′-UTR sequence, a combination of two sequence elements (FI element) derived from the “amino terminal enhancer of split” (AES) mRNA (called F) and the mitochondrial encoded 12S ribosomal RNA (called I) placed between the coding sequence and the poly(A)-tail to assure higher maximum protein levels and prolonged persistence of the mRNA may be used. These were identified by an ex vivo selection process for sequences that confer RNA stability and augment total protein expression (see WO 2017/060314, herein incorporated by reference). Alternatively, the 3′-UTR may be two re-iterated 3′-UTRs of the human beta-globin mRNA. Furthermore, a poly(A)-tail measuring 110 nucleotides in length, consisting of a stretch of 30 adenosine residues, followed by a 10 nucleotide linker sequence (of random nucleotides) and another 70 adenosine residues may be used. This poly(A)-tail sequence was designed to enhance RNA stability and translational efficiency. In some embodiments, a string construct described herein comprises one or more of the following features as described in WO2021/213924: a 5′ cap, a 3′ UTR, a 5′UTR, and a poly(A) tail. In some embodiments, a string construct described herein comprises each of the following features as utilized in BNT162b2 (e.g., as described in WO2021/213924, the entire content of which is incorporated herein by reference for purposes described herein).

[1060] In some embodiments the nucleotide sequence of the string constructs, encoding the plurality of epitopes, may be codon optimized. An example of a codon optimized sequence may be a sequence optimized for expression in a eukaryote, e.g., humans (i.e. being optimized for expression in humans), or for another eukaryote, animal or mammal. Codon optimization for a host species other than human, or for codon optimization for specific organs is known. In some embodiments, the coding sequence encoding a protein may be codon optimized for expression in eukaryotic cells, such as human cells. Codon optimization refers to a process of modifying a nucleic acid sequence for enhanced expression in the host cells of interest by replacing at least one codon (e.g., about or more than about 1, 2, 3, 4, 5, 10, 15, 20, 25, 50, or more codons) of the native sequence with codons that are more frequently or most frequently used in the genes of that host cell while maintaining the native amino acid sequence. Various species exhibit particular bias for certain codons of a particular amino acid. Codon bias (differences in codon usage between organisms) often correlates with the efficiency of translation of messenger RNA (mRNA), which is in turn believed to be dependent on, among other things, the properties of the codons being translated and the availability of particular transfer RNA (tRNA) molecules. The predominance of selected tRNAs in a cell may generally be a reflection of the codons used most frequently in peptide synthesis. Accordingly, genes may be tailored for optimal gene expression in a given organism based on codon optimization. Codon usage tables are readily available, for example, at the “Codon Usage Database” available at kazusa.orjp/codon/and these tables may be adapted in a number of ways. Computer algorithms for codon optimizing a particular sequence for expression in a particular host cell are also available, such as Gene Forge (Aptagen; Jacobus, PA), are also available.

[1061] In some embodiments, the stability and translation efficiency of RNA may incorporate one or more elements established to contribute to stability and/or translation efficiency of RNA; exemplary such elements are described, for example, in PCT/EP2006/009448 incorporated herein by reference. In order to increase expression of the RNA used according to the present disclosure, it may be modified within the coding region, i.e. the sequence encoding the expressed peptide or protein, without altering the sequence of the expressed peptide or protein, so as to increase the GC-content to increase mRNA stability and to perform a codon optimization and, thus, enhance translation in cells.

[1062] In some embodiments, the string construct may comprise an F element. In some embodiments, the F element sequence is a 3 UTR of amino-terminal enhancer of split (AES).

[1063] In some embodiments a String mRNA construct as described above may comprise 1, 2, 3, 4, 5, 6, 7, 8, 9, 10, 11, 12, 13, 14, 15 or more epitopes. In some embodiments the pharmaceutical composition comprises 2, 3, 4, 5, 6, 7, 8, 9, or 10 or more strings. In some embodiments the pharmaceutical composition comprises 6 strings. In some embodiments the pharmaceutical composition comprises 7 strings. In some embodiments the pharmaceutical composition comprises 8 strings. In some embodiments the pharmaceutical composition comprises 9 strings. In some embodiments the pharmaceutical composition comprises 10 strings.

[1064] In some embodiments a string construct may be a polynucleotide, wherein the polynucleotide is DNA.

[1065] In some embodiments the pharmaceutical composition comprising one or more String mRNA construct as described above may be encapsulated in a lipid nanoparticle. As used in the present disclosure, “nanoparticle” refers to a particle having an average diameter suitable for parenteral administration. A lipid nanoparticle (LNP) may be 100-250 nm in diameter. In some embodiments, a plurality of lipid nanoparticles may have an average particle size of less than 200 nm, less than 150 nm, less than 100 nm, less than 80 nm, less than 75 nm, or lower. In some embodiments, a plurality of lipid nanoparticles may have an average particle size of at least 30 nm, at least 50 nm, at least 60 nm, at least 70 nm, at least 80 nm, at least 90 nm, at least 100 nm, at least 125 nm, at least 150 nm, or more. Combinations of the above-mentioned ranges are also possible. In some embodiments, a plurality of lipid nanoparticles may have an average particle size of 30 nm to 200 nm, or 30 nm to 100 nm or 50 nm to 80 nm, or 50 nm to less than 80 nm. In some embodiments, an LNP may comprise a cationic lipid. An LNP may comprise a non-cationic lipid. An LNP may comprise a PEG-modified lipid. An LNP may comprise a sterol or a steroidal lipid.

[1066] In one embodiment, the delivery particles are lipoplex (LPX) particles. In one embodiment, the RNA lipoplex particles are obtainable by mixing the RNA with liposomes. In one embodiment, the RNA lipoplex particles are obtainable by mixing the RNA with lipids.

[1067] In one embodiment, the LNP particles comprise ((4-hydroxybutyl) azanediyl)bis(hexane-6,1-diyl)bis(2-hexyldecanoate), 2-[(polyethylene glycol)-2000]-N,N-ditetradecylacetamide, 1,2-Distearoyl-sn-glycero-3-phosphocholine, and cholesterol. In one embodiment, the RNA is formulated or is to be formulated as colloid. In one embodiment, the RNA is formulated or is to be formulated as particles, forming the dispersed phase of a colloid. In one embodiment, 50% or more, 75% or more, or 85% or more of the RNA are present in the dispersed phase. In one embodiment, the RNA is formulated or is to be formulated as particles comprising RNA and lipids. In one embodiment, the particles are formed by exposing RNA, dissolved in an aqueous phase, with lipids, dissolved in an organic phase. In one embodiment, the organic phase comprises ethanol. In one embodiment, the particles are formed by exposing RNA, dissolved in an aqueous phase, with lipids, dispersed in an aqueous phase. In one embodiment, the lipids dispersed in an aqueous phase form liposomes. In some embodiments the pharmaceutical composition comprising one or more String mRNA construct as described above may be administered with another 2019 SARS COV-2 vaccine, which can be in some embodiments, e.g., protein-based, RNA-based, DNA-based, viral vector-based vaccines, and may be administered either before, after, or simultaneously with. In some embodiments, a pharmaceutical composition comprising one or more String mRNA construct as described above may be administered to a subject in need thereof such that the subject receives a combination of the pharmaceutical composition described herein and an another 2019 SARS CoV-2 vaccine (e.g., a vaccine that induces production of antibodies to SARS CoV-2 protein such as S protein or an immunogenic fragment thereof). For example, in some embodiments, a pharmaceutical composition comprising one or more String mRNA construct as described above may be administered to a subject who is receiving or has received another 2019 SARS CoV-2 vaccine (e.g., a vaccine that induces production of antibodies to 2019 SARS CoV-2 protein such as S protein or an immunogenic fragment thereof).

[1068] In some embodiments the pharmaceutical composition comprising one or more String mRNA construct as described above may be co-administered with a vaccine directed against SARS CoV-2 spike protein. In some embodiments, the vaccine comprises a SARS-CoV-2 spike protein of 2019 SARS COV-2 or a nucleic acid sequence encoding the same, for example which may have any of the following specifications:

### Exemplary Construct Encoding a SARS-CoV-2 Spike Protein

[1069] Structure m₂^{7,3′-O}Gppp(m₁^{2′-O})ApG)-hAg-Kozak-S1S2-PP-FI-A30L70
[1070] Encoded antigen Viral spike protein (S1S2 protein) of the SARS CoV-2 (S1S2 full-length protein, sequence variant)

### Exemplary Nucleotide Sequence Encoding a SARS-CoV-2 Spike Protein

[1071] Nucleotide sequence is shown with individual sequence elements as indicated in bold letters. In addition, the sequence of the translated protein is shown in italic letters below the coding nucleotide sequence (*=stop codon). One of skill in the art reading the present disclosure will recognize that, in some embodiments, different mutations known in the art, e.g., proline subsitutions (e.g., as disclosed in WO 2021243122 A2; Hsieh, Ching-Lin, et al. (“Structure-based design of prefusion-stabilized SARS-CoV-2 spikes,” Science 369.6510 (2020): 1501-1505; WO2022/067010 A1; WO2018/081318A1; WO2021/163365A1; and WO2021/213924A1, the contents of each which are incorporated by reference herein in their entirety) and/or furin cleavage site mutations (e.g., as described in WO2021163365 or WO2021243122) can be introduced to S protein to increase expression and/or stabilize a prototypical prefusion conformation.

```
10 20 30 40 50 53
AGAAUAAACU AGUAUUCUUC UGGUCCCCAC AGACUCAGAG AGAACCCGCC ACC
                                                    hAg-Kozak
                63 73 83 93 103 113
AUGUUUGUGU UUCUUGUGCU GCUGCCUCUU GUGUCUUCUC AGUGUGUGAA UUUGACAACA
    M F V F L V L L P L V S S Q C V N L T T
                                                    S protein
              123 133 143 153 163 173
AGAACACAGC UGCCACCAGC UUAUACAAAU UCUUUUACCA GAGGAGUGUA UUAUCCUGAU
    R T Q L P P A Y T N S F T R G V Y Y P D
                                                    S protein
              183 193 203 213 223 233
AAAGUGUUUA GAUCUUCUGU GCUGCACAGC ACACAGGACC UGUUUCUGCC AUUUUUUAGC
    K V F R S S V L H S T Q D I F L P F F S
                                                    S protein
              243 253 263 273 283 293
AAUGUGACAU GGUUUCAUGC AAUUCAUGUG UCUGGAACAA AUGGAACAAA AAGAUUUGAU
    N V T W F H A I H V S G T N G T K R F D
                                                    S protein
              303 313 323 333 343 353
AAUCCUGUGC UGCCUUUUAA UGAUGGAGUG UAUUUUGCUU CAACAGAAAA GUCAAAUAUU
    N P V L P F N D G V Y F A S T E K S N I
                                                    S protein
              363 373 383 393 403 413
AUUAGAGGAU GGAUUUUUGG AACAACACUG GAUUCUAAAA CACAGUCUCU GCUGAUUGUG
    I R G W I F G T T L D S K T Q S L L I V
                                                    S protein
              423 433 443 453 463 473
AAUAAUGCAA CAAAUGUGGU GAUUAAAGUG UGUGAAUUUC AGUUUUGUAA UGAUCCUUUU
    N N A T N V V I K V C E F Q F C N D P F
                                                    S protein
              483 493 503 513 523 533
CUGGGAGUGU AUUAUCACAA AAAUAAUAAA UCUUGGAUGG AAUCUGAAUU UAGAGUGUAU
    L G V Y Y H K N N K S W M E S E F R V Y
                                                    S protein
              543 553 563 573 583 593
UCCUCUGCAA AUAAUUGUAC AUUUGAAUAU GUGUCUCAGC CUUUUCUGAU GGAUCUGGAA
    S S A N N C T F E Y V S Q P F L M D L E
                                                    S protein
              603 613 622 633 643 653
GGAAAACAGG GCAAUUUUAA AAAUCUGAGA GAAUUUGUGU UUAAAAAUAU UGAUGGAUAU
    G K Q G N F K N L R E F V F K N I D G Y
                                                    S protein
              663 673 683 693 703 713
UUUAAAAUUU AUUCUAAACA CACACCAAUU AAUUUAGUGA GAGAUCUGCC UCAGGGAUUU
    F K I Y S K H T P I N L V R D L P Q G F
                                                    S protein
              723 733 743 753 763 773
UCUGCUCUGG AACCUCUGGU GGAUCUGCCA AUUGGCAUUA AUAUUACAAG AUUUCAGACA
    S A L E P L V D L P I G I N I T R F Q T
                                                    S protein
              783 793 803 813 823 833
CUGCUGGCUC UGCACAGAUC UUAUCUGACA CCUGGAGAUU CUUCUUCUGG AUGGACAGCC
    L L A L H R S Y L T P G D S S S G W T A
                                                    S protein
              843 853 863 873 883 893
GGAGCUGCAG CUUAUUAUGU GGGCUAUCUG CAGCCAAGAA CAUUUCUGCU GAAAUAUAAU
    G A A A Y Y V G Y L Q P R T F L L K Y N
                                                    S protein
              903 913 923 933 943 953
GAAAAUGGAA CAAUUACAGA UGCUGUGGAU UGUGCUCUGG AUCCUCUGUC UGAAACAAAA
    E N G T I T D A V D C A L D P L S E T K
                                                    S protein
              963 973 983 993 1003 1013
UGUACAUUAA AAUCUUUUAC AGUGGAAAAA GGCAUUUAUC AGACAUCUAA UUUUAGAGUG
    C T L K S F T V E K G I Y Q T S N F R V
                                                    S protein
            1023 1033 1043 1053 1063 1073
CAGCCAACAG AAUCUAUUGU GAGAUUUCCA AAUAUUACAA AUCUGUGUCC AUUUGGAGAA
    Q P T E S I V R F P N I T N L C P F G E
                                                    S protein
            1083 1093 1103 1113 1123 1133
GUGUUUAAUG CAACAAGAUU UGCAUCUGUG UAUGCAUGGA AUAGAAAAAG AAUUUCUAAU
    V F N A T R F A S V Y A W N R K R I S N
                                                    S protein
            1143 1153 1163 1173 1183 1193
UGUGUGGCUG AUUAUUCUGU GCUGUAUAAU AGUGCUUCUU UUUCCACAUU UAAAUGUUAU
    C V A D Y S V L Y N S A S F S T F K C Y
                                                    S protein
            1203 1213 1223 1233 1243 1253
GGAGUGUCUC CAACAAAAUU AAAUGAUUUA UGUUUUACAA AUGUGUAUGC UGAUUCUUUU
    G V S P T K L N D L C F T N V Y A D S F
                                                    S protein
            1263 1273 1283 1293 1303 1313
GUGAUCAGAG GUGAUGAAGU GAGACAGAUU GCCCCCGGAC AGACAGGAAA AAUUGCUGAU
    V I R G D E V R Q I A P G Q T G K I A D
                                                    S protein
            1323 1333 1343 1353 1363 1373
UACAAUUACA AACUGCCUGA UGAUUUUACA GGAUGUGUGA UUGCUUGGAA UUCUAAUAAU
    Y N Y K L P D D F T G C V I A W N S N N
                                                    S protein
            1383 1393 1403 1413 1423 1433
UUAGAUUCUA AAGUGGGAGG AAAUUACAAU UAUCUGUACA GACUGUUUAG AAAAUCAAAU
    L D S K V G G N Y N Y L Y R L F R K S N
                                                    S protein
            1443 1453 1463 1473 1483 1493
CUGAAACCUU UUGAAAGAGA UAUUUCAACA GAAAUUUAUC AGGCUGGAUC AACACCUUGU
    L K P F E R D I S T E I Y Q A G S T P C
                                                    S protein
            1503 1513 1523 1533 1543 1553
AAUGGAGUGG AAGGAUUUAA UUGUUAUUUU CCAUUACAGA GCUAUGGAUU UCAGCCAACC
    N G V E G F N C Y F P L Q S Y G F Q P T
                                                    S protein
            1563 1573 1583 1593 1603 1613
AAUGGUGUGG GAUAUCAGCC AUAUAGAGUG GUGGUGCUGU CUUUUGAACU GCUGCAUGCA
    N G V G Y Q P Y R V V V L S F E L L H A
                                                    S protein
            1623 1633 1643 1653 1663 1673
CCUGCAACAG UGUGUGGACC UAAAAAAUCU ACAAAUUUAG UGAAAAAUAA AUGUGUGAAU
    P A T V C G P K K S T N L V K N K C V N
                                                    S protein
            1683 1693 1703 1713 1723 1733
UUUAAUUUUA AUGGAUUAAC AGGAACAGGA GUGCUGACAG AAUCUAAUAA AAAAUUUCUG
    F N F N G L T G T G V L T E S N K K F L
                                                    S protein
            1743 1753 1763 1773 1783 1793
CCUUUUCAGC AGUUUGGCAG AGAUAUUGCA GAUACCACAG AUGCAGUGAG AGAUCCUCAG
    P F Q Q F G R D I A D T T D A V R D P Q
                                                    S protein
            1803 1813 1823 1833 1843 1853
ACAUUAGAAA UUCUGGAUAU UACACCUUGU UCUUUUGGGG GUGUGUCUGU GAUUACACCU
    T L E I L D I T P C S F G G V S V I T P
                                                    S protein
            1863 1873 1883 1893 1903 1913
GGAACAAAUA CAUCUAAUCA GGUGGCUGUG CUGUAUCAGG AUGUGAAUUG UACAGAAGUG
    G T N T S N Q V A V L Y Q D V N C T E V
                                                    S protein
            1923 1933 1943 1953 1963 1973
CCAGUGGCAA UUCAUGCAGA UCAGCUGACA CCAACAUGGA GAGUGUAUUC UACAGGAUCU
    P V A I H A D Q L T P T W R V Y S T G S
                                                    S protein
            1983 1993 2003 2013 2023 2033
AAUGUGUUUC AGACAAGAGC AGGAUGUCUG AUUGGAGCAG AACAUGUGAA UAAUUCUUAU
    N V F Q T R A G C L I G A E H V N N S Y
                                                    S protein
            2043 2053 2063 2073 2083 2093
GAAUGUGAUA UUCCAAUUGG AGCAGGCAUU UGUGCAUCUU AUCAGACACA GACAAAUUCC
    E C D I P I G A G I C A S Y Q T Q T N S
                                                    S protein
            2103 2113 2123 2133 2143 2153
CCAAGGAGAG CAAGAUCUGU GGCAUCUCAG UCUAUUAUUG CAUACACCAU GUCUCUGGGA
    P R R A R S V A S Q S I I A Y T M S L G
                                                    S protein
            2163 2173 2183 2193 2203 2213
GCAGAAAAUU CUGUGGCAUA UUCUAAUAAU UCUAUUGCUA UUCCAACAAA UUUUACCAUU
    A E N S V A Y S N N S I A I P T N F T I
                                                    S protein
            2223 2233 2243 2253 2263 2273
UCUGUGACAA CAGAAAUUUU ACCUGUGUCU AUGACAAAAA CAUCUGUGGA UUGUACCAUG
    S V T T E I L P V S M T K T S V D C T M
                                                    S protein
            2283 2293 2303 2313 2323 2333
UACAUUUGUG GAGAUUCUAC AGAAUGUUCU AAUCUGCUGC UGCAGUAUGG AUCUUUUUGU
    Y I C G D S T E C S N L L L Q Y G S F C
                                                    S protein
            2343 2353 2363 2373 2383 2393
ACACAGCUGA AUAGAGCUUU AACAGGAAUU GCUGUGGAAC AGGAUAAAAA UACACAGGAA
    T Q L N R A L T G I A V E Q D K N T Q E
                                                    S protein
            2403 2413 2423 2433 2443 2453
GUGUUUGCUC AGGUGAAACA GAUUUACAAA ACACCACCAA UUAAAGAUUU UGGAGGAUUU
    V F A Q V K Q I Y K T P P I K D F G G F
                                                    S protein
            2463 2473 2483 2493 2503 2513
AAUUUUAGCC AGAUUCUGCC UGAUCCUUCU AAACCUUCUA AAAGAUCUUU UAUUGAAGAU
    N F S Q I L P D P S K P S K R S F I E D
                                                    S protein
            2523 2533 2543 2553 2563 2573
CUGCUGUUUA AUAAAGUGAC ACUGGCAGAU GCAGGAUUUA UUAAACAGUA UGGAGAUUGC
    L L F N K V T L A D A G F I K Q Y G D C
                                                    S protein
            2583 2593 2603 2613 2623 2633
CUGGGUGAUA UUGCUGCAAG AGAUCUGAUU UGUGCUCAGA AAUUUAAUGG ACUGACAGUG
    L G D I A A R D L I C A Q K F N G L T V
                                                    S protein
            2643 2653 2663 2673 2683 2693
CUGCCUCCUC UGCUGACAGA UGAAAUGAUU GCUCAGUACA CAUCUGCUUU ACUGGCUGGA
    L P P L L T D E M I A Q Y T S A L L A G
                                                    S protein
            2703 2713 2723 2733 2743 2753
ACAAUUACAA GCGGAUGGAC AUUUGGAGCU GGAGCUGCUC UGCAGAUUCC UUUUGCAAUG
    T I T S G W T F G A G A A L Q I P F A M
                                                    S protein
            2763 2773 2783 2793 2803 2813
CAGAUGGCUU ACAGAUUUAA UGGAAUUGGA GUGACACAGA AUGUGUUAUA UGAAAAUCAG
    Q M A Y R F N G I G V T Q N V L Y E N Q
                                                    S protein
            2823 2833 2843 2853 2863 2873
AAACUGAUUG CAAAUCAGUU UAAUUCUGCA AUUGGCAAAA UUCAGGAUUC UCUGUCUUCU
    K L I A N Q F N S A I G K I Q D S L S S
                                                    S protein
            2883 2893 2903 2913 2923 2933
ACAGCUUCUG CUCUGGGAAA ACUGCAGGAU GUGGUGAAUC AGAAUGCACA GGCACUGAAU
    T A S A L G K L Q D V V N Q N A Q A L N
                                                    S protein
            2943 2953 2963 2973 2983 2993
ACUCUGGUGA AACAGCUGUC UAGCAAUUUU GGGGCAAUUU CUUCUGUGCU GAAUGAUAUU
    T L V K Q L S S N F G A I S S V L N D I
                                                    S protein
            3003 3013 3023 3033 3043 3053
CUGUCUAGAC UGGAUCCUCC UGAAGCUGAA GUGCAGAUUG AUAGACUGAU CACAGGAAGA
    L S R L D P P E A E V Q I D R L I T G R
                                                    S protein
            3063 3073 3083 3093 3103 3113
CUGCAGUCUC UGCAGACUUA UGUGACACAG CAGCUGAUUA GAGCUGCUGA AAUUAGAGCU
    L Q S L Q T Y V T Q Q L I R A A E I R A
                                                    S protein
            3123 3133 3143 3153 3163 3173
UCUGCUAAUC UGGCUGCUAC AAAAAUGUCU GAAUGUGUGC UGGGACAGUC AAAAAGAGUG
    S A N L A A T K M S E C V L G Q S K R V
                                                    S protein
            3183 3193 3203 3213 3223 3233
GAUUUUUGUG GAAAAGGAUA UCAUCUGAUG UCUUUUCCAC AGUCUGCUCC ACAUGGAGUG
    D F C G K G Y H L M S F P Q S A P H G V
                                                    S protein
            3243 3253 3263 3273 3283 3293
GUGUUUUUAC AUGUGACAUA UGUGCCAGCA CAGGAAAAGA AUUUUACCAC AGCACCAGCA
    V F L H V T Y V P A Q E K N F T T A P A
                                                    S protein
            3303 3313 3323 3333 3343 3353
AUUUGUCAUG AUGGAAAAGC ACAUUUUCCA AGAGAAGGAG UGUUUGUGUC UAAUGGAACA
    I C H D G K A H F P R E G V F V S N G T
                                                    S protein
            3363 3373 3383 3393 3403 3413
CAUUGGUUUG UGACACAGAG AAAUUUUUAU GAACCUCAGA UUAUUACAAC AGAUAAUACA
    H W F V T Q R N F Y E P Q I I T T D N T
                                                    S protein
            3423 3433 3443 3453 3463 3473
UUUGUGUCAG GAAAUUGUGA UGUGGUGAUU GGAAUUGUGA AUAAUACAGU GUAUGAUCCA
    F V S G N C D V V I G I V N N T V Y D P
                                                    S protein
            3483 3493 3503 3513 3523 3533
CUGCAGCCAG AACUGGAUUC UUUUAAAGAA GAACUGGAUA AAUAUUUUAA AAAUCACACA
    L Q P E L D S F K E E L D K Y F K N H T
                                                    S protein
            3543 3553 3563 3573 3583 3593
UCUCCUGAUG UGGAUUUAGG AGAUAUUUCU GGAAUCAAUG CAUCUGUGGU GAAUAUUCAG
    S P D V D L G D I S G I N A S V V N I Q
                                                    S protein
            3603 3613 3623 3633 3643 3653
AAAGAAAUUG AUAGACUGAA UGAAGUGGCC AAAAAUCUGA AUGAAUCUCU GAUUGAUCUG
    K E I D R L N E V A K N L N E S L I D L
                                                    S protein
            3663 3673 3683 3693 3703 3713
CAGGAACUUG GAAAAUAUGA ACAGUACAUU AAAUGGCCUU GGUACAUUUG GCUUGGAUUU
    Q E L G K Y E Q Y I K W P W Y I W L G F
                                                    S protein
            3723 3733 3743 3753 3763 3773
AUUGCAGGAU UAAUUGCAAU UGUGAUGGUG ACAAUUAUGU UAUGUUGUAU GACAUCAUGU
    I A G L I A I V M V T I M L C C M T S C
                                                    S protein
            3783 3793 3803 3813 3823 3833
UGUUCUUGUU UAAAAGGAUG UUGUUCUUGU GGAAGCUGUU GUAAAUUUGA UGAAGAUGAU
    C S C L K G C C S C G S C C K F D E D D
                                                    S protein
            3843 3853 3863 3873 3878
UCUGAACCUG UGUUAAAAGG AGUGAAAUUG CAUUACACAU GAUGA
    S E P V L K G V K L H Y T * *
                                                    S protein
            3888 3898 3908 3918 3928 3938
CUCGAGCUGG UACUGCAUGC ACGCAAUGCU AGCUGCCCCU UUCCCGUCCU GGGUACCCCG
                                                    FI element
            3948 3958 3968 3978 3988 3998
AGUCUCCCCC GACCUCGGGU CCCAGGUAUG CUCCCACCUC CACCUGCCCC ACUCACCACC
                                                    FI element
            4008 4018 4028 4038 4048 4058
UCUGCUAGUU CCAGACACCU CCCAAGCACG CAGCAAUGCA GCUCAAAACG CUUAGCCUAG
                                                    FI element
            4068 4078 4088 4098 4108 4118
CCACACCCCC ACGGGAAACA GCAGUGAUUA ACCUUUAGCA AUAAACGAAA GUUUAACUAA
                                                    FI element
            4128 4138 4148 4158 4168 4173
GCUAUACUAA CCCCAGGGUU GGUCAAUUUC GUGCCAGCCA CACCCUGGAG CUAGC
                                                    FI element
            4183 4193 4203 4213 4223 4233
AAAAAAAAAA AAAAAAAAAA AAAAAAAAAA GCAUAUGACU AAAAAAAAAA AAAAAAAAAA
                                                    Poly(A)
            4243 4253 4263 4273 4283
AAAAAAAAAA AAAAAAAAAA AAAAAAAAAA AAAAAAAAAA AAAAAAAAAA
                                                    Poly(A)
```

### Exemplary Construct Encoding a SARS-CoV-2 Spike Protein

[1072] Structure m₂^{7,3′-O}Gppp(m₁^{2′-O})ApG)-hAg-Kozak-S1S2-PP-FI-A30L70
[1073] Encoded antigen Viral spike protein (S1S2 protein) of the SARS CoV-2 (S1S2 full-length protein, sequence variant)

### Exemplary Nucleotide Sequence Encoding a SARS-CoV-2 Spike Protein

[1074] Nucleotide sequence is shown with individual sequence elements as indicated in bold letters. In addition, the sequence of the translated protein is shown in italic letters below the coding nucleotide sequence (*=stop codon).

```
                10 20 30 40 50 53
AGAAUAAACU AGUAUUCUUC UGGUCCCCAC AGACUCAGAG AGAACCCGCC ACC
                                                    hAg-Kozak
                63 73 83 93 103 113
AUGUUCGUGU UCCUGGUGCU GCUGCCUCUG GUGUCCAGCC AGUGUGUGAA CCUGACCACC
    M F V F L V L L P L V S S Q C V N L T T
                                                    S protein
              123 133 143 153 163 173
AGAACACAGC UGCCUCCAGC CUACACCAAC AGCUUUACCA GAGGCGUGUA CUACCCCGAC
    R T Q L P P A Y T N S F T R G V Y Y P D
                                                    S protein
              183 193 203 213 223 233
AAGGUGUUCA GAUCCAGCGU GCUGCACUCU ACCCAGGACC UGUUCCUGCC UUUCUUCAGC
    K V F R S S V L H S T Q D L F L P F F S
                                                    S protein
              243 253 263 273 283 293
AACGUGACCU GGUUCCACGC CAUCCACGUG UCCGGCACCA AUGGCACCAA GAGAUUCGAC
    N V T W F H A I H V S G T N G T K R F D
                                                    S protein
              303 313 323 333 343 353
AACCCCGUGC UGCCCUUCAA CGACGGGGUG UACUUUGCCA GCACCGAGAA GUCCAACAUC
    N P V L P F N D G V Y F A S T E K S N I
                                                    S protein
              363 373 383 393 403 413
AUCAGAGGCU GGAUCUUCGG CACCACACUG GACAGCAAGA CCCAGAGCCU GCUGAUCGUG
    I R G W I F G T T L D S K T Q S L L I V
                                                    S protein
              423 433 443 453 463 473
AACAACGCCA CCAACGUGGU CAUCAAAGUG UGCGAGUUCC AGUUCUGCAA CGACCCCUUC
    N N A T N V V I K V C E F Q F C N D P F
                                                    S protein
              483 493 503 513 523 533
CUGGGCGUCU ACUACCACAA GAACAACAAG AGCUGGAUGG AAAGCGAGUU CCGGGUGUAC
    L G V Y Y H K N N K S W M E S E F R V Y
                                                    S protein
              543 553 563 573 583 593
AGCAGCGCCA ACAACUGCAC CUUCGAGUAC GUGUCCCAGC CUUUCCUGAU GGACCUGGAA
    S S A N N C T F E Y V S Q P F L M D L E
                                                    S protein
              603 613 623 633 643 653
GGCAAGCAGG GCAACUUCAA GAACCUGCGC GAGUUCGUGU UUAAGAACAU CGACGGCUAC
    G K Q G N F K N L R E F V F K N I D G Y
                                                    S protein
              663 673 683 693 703 713
UUCAAGAUCU ACAGCAAGCA CACCCCUAUC AACCUCGUGC GGGAUCUGCC UCAGGGCUUC
    F K I Y S K H T P I N L V R D L P Q G F
                                                    S protein
              723 733 743 753 763 773
UCUGCUCUGG AACCCCUGGU GGAUCUGCCC AUCGGCAUCA ACAUCACCCG GUUUCAGACA
    S A L E P L V D L P I G I N I T R F Q T
                                                    S protein
              783 793 803 813 823 833
CUGCUGGCCC UGCACAGAAG CUACCUGACA CCUGGCGAUA GCAGCAGCGG AUGGACAGCU
    L L A L H R S Y L T P G D S S S G W T A
                                                    S protein
              843 853 863 873 883 893
GGUGCCGCCG CUUACUAUGU GGGCUACCUG CAGCCUAGAA CCUUCCUGCU GAAGUACAAC
    G A A A Y Y V G Y L Q P R T F L L K Y N
                                                    S protein
              903 913 923 933 943 953
GAGAACGGCA CCAUCACCGA CGCCGUGGAU UGUGCUCUGG AUCCUCUGAG CGAGACAAAG
    E N G T I T D A V D C A L D P L S E T K
                                                    S protein
              963 973 983 993 1003 1013
UGCACCCUGA AGUCCUUCAC CGUGGAAAAG GGCAUCUACC AGACCAGCAA CUUCCGGGUG
    C T L K S F T V E K G I Y Q T S N F R V
                                                    S protein
            1023 1033 1043 1053 1063 1073
CAGCCCACCG AAUCCAUCGU GCGGUUCCCC AAUAUCACCA AUCUGUGCCC CUUCGGCGAG
    Q P T E S I V R F P N I T N L C P F G E
                                                    S protein
            1083 1093 1103 1113 1123 1133
GUGUUCAAUG CCACCAGAUU CGCCUCUGUG UACGCCUGGA ACCGGAAGCG GAUCAGCAAU
    V F N A T R F A S V Y A W N R K R I S N
                                                    S protein
            1143 1153 1163 1173 1183 1193
UGCGUGGCCG ACUACUCCGU GCUGUACAAC UCCGCCAGCU UCAGCACCUU CAAGUGCUAC
    C V A D Y S V L Y N S A S F S T F K C Y
                                                    S protein
            1203 1213 1223 1233 1243 1253
GGCGUGUCCC CUACCAAGCU GAACGACCUG UGCUUCACAA ACGUGUACGC CGACAGCUUC
    G V S P T K L N D L C F T N V Y A D S F
                                                    S protein
            1263 1273 1283 1293 1303 1313
GUGAUCCGGG GAGAUGAAGU GCGGCAGAUU GCCCCUGGAC AGACAGGCAA GAUCGCCGAC
    V I R G D E V R Q I A P G Q T G K I A D
                                                    S protein
            1323 1333 1343 1353 1363 1373
UACAACUACA AGCUGCCCGA CGACUUCACC GGCUGUGUGA UUGCCUGGAA CAGCAACAAC
    Y N Y K L P D D F T G C V I A W N S N N
                                                    S protein
            1383 1393 1403 1413 1423 1433
CUGGACUCCA AAGUCGGCGG CAACUACAAU UACCUGUACC GGCUGUUCCG GAAGUCCAAU
    L D S K V G G N Y N Y L Y R L F R K S N
                                                    S protein
            1443 1453 1463 1473 1483 1493
CUGAAGCCCU UCGAGCGGGA CAUCUCCACC GAGAUCUAUC AGGCCGGCAG CACCCCUUGU
    L K P F E R D I S T E I Y Q A G S T P C
                                                    S protein
            1503 1513 1523 1533 1543 1553
AACGGCGUGG AAGGCUUCAA CUGCUACUUC CCACUGCAGU CCUACGGCUU UCAGCCCACA
    N G V E G F N C Y F P L Q S Y G F Q P T
                                                    S protein
            1563 1573 1583 1593 1603 1613
AAUGGCGUGG GCUAUCAGCC CUACAGAGUG GUGGUGCUGA GCUUCGAACU GCUGCAUGCC
    N G V G Y Q P Y R V V V L S F E L L H A
                                                    S protein
            1623 1633 1643 1653 1663 1673
CCUGCCACAG UGUGCGGCCC UAAGAAAAGC ACCAAUCUCG UGAAGAACAA AUGCGUGAAC
    P A T V C G P K K S T N L V K N K C V N
                                                    S protein
            1683 1693 1703 1713 1723 1733
UUCAACUUCA ACGGCCUGAC CGGCACCGGC GUGCUGACAG AGAGCAACAA GAAGUUCCUG
    F N F N G L T G T G V L T E S N K K F L
                                                    S protein
            1743 1753 1763 1773 1783 1793
CCAUUCCAGC AGUUUGGCCG GGAUAUCGCC GAUACCACAG ACGCCGUUAG AGAUCCCCAG
    P F Q Q F G R D I A D T T D A V R D P Q
                                                    S protein
            1803 1813 1823 1833 1843 1853
ACACUGGAAA UCCUGGACAU CACCCCUUGC AGCUUCGGCG GAGUGUCUGU GAUCACCCCU
    T L E I L D I T P C S F G G V S V I T P
                                                    S protein
            1863 1873 1883 1893 1903 1913
GGCACCAACA CCAGCAAUCA GGUGGCAGUG CUGUACCAGG ACGUGAACUG UACCGAAGUG
    G T N T S N Q V A V L Y Q D V N C T E V
                                                    S protein
            1923 1933 1943 1953 1963 1973
CCCGUGGCCA UUCACGCCGA UCAGCUGACA CCUACAUGGC GGGUGUACUC CACCGGCAGC
    P V A I H A D Q L T P T W R V Y S T G S
                                                    S protein
            1983 1993 2003 2013 2023 2033
AAUGUGUUUC AGACCAGAGC CGGCUGUCUG AUCGGAGCCG AGCACGUGAA CAAUAGCUAC
    N V F Q T R A G C L I G A E H V N N S Y
                                                    S protein
            2043 2053 2063 2073 2083 2093
GAGUGCGACA UCCCCAUCGG CGCUGGAAUC UGCGCCAGCU ACCAGACACA GACAAACAGC
    E C D I P I G A G I C A S Y Q T Q T N S
                                                    S protein
            2103 2113 2123 2133 2143 2153
CCUCGGAGAG CCAGAAGCGU GGCCAGCCAG AGCAUCAUUG CCUACACAAU GUCUCUGGGC
    P R R A R S V A S Q S I I A Y T M S L G
                                                    S protein
            2163 2173 2183 2193 2203 2213
GCCGAGAACA GCGUGGCCUA CUCCAACAAC UCUAUCGCUA UCCCCACCAA CUUCACCAUC
    A E N S V A Y S N N S I A I P T N F T I
                                                    S protein
            2223 2233 2243 2253 2263 2273
AGCGUGACCA CAGAGAUCCU GCCUGUGUCC AUGACCAAGA CCAGCGUGGA CUGCACCAUG
    S V T T E I L P V S M T K T S V D C T M
                                                    S protein
            2283 2293 2303 2313 2323 2333
UACAUCUGCG GCGAUUCCAC CGAGUGCUCC AACCUGCUGC UGCAGUACGG CAGCUUCUGC
    Y I C G D S T E C S N L L L Q Y G S F C
                                                    S protein
            2343 2353 2363 2373 2383 2393
ACCCAGCUGA AUAGAGCCCU GACAGGGAUC GCCGUGGAAC AGGACAAGAA CACCCAAGAG
    T Q L N R A L T G I A V E Q D K N T Q E
                                                    S protein
            2403 2413 2423 2433 2443 2453
GUGUUCGCCC AAGUGAAGCA GAUCUACAAG ACCCCUCCUA UCAAGGACUU CGGCGGCUUC
    V F A Q V K Q I Y K T P P I K D F G G F
                                                    S protein
            2463 2473 2483 2493 2503 2513
AAUUUCAGCC AGAUUCUGCC CGAUCCUAGC AAGCCCAGCA AGCGGAGCUU CAUCGAGGAC
    N F S Q I L P D P S K P S K R S F I E D
                                                    S protein
            2523 2533 2543 2553 2563 2573
CUGCUGUUCA ACAAAGUGAC ACUGGCCGAC GCCGGCUUCA UCAAGCAGUA UGGCGAUUGU
    L L F N K V T L A D A G F I K Q Y G D C
                                                    S protein
            2583 2593 2603 2613 2623 2633
CUGGGCGACA UUGCCGCCAG GGAUCUGAUU UGCGCCCAGA AGUUUAACGG ACUGACAGUG
    L G D I A A R D L I C A Q K F N G L T V
                                                    S protein
            2643 2653 2663 2673 2683 2693
CUGCCUCCUC UGCUGACCGA UGAGAUGAUC GCCCAGUACA CAUCUGCCCU GCUGGCCGGC
    L P P L L T D E M I A Q Y T S A L L A G
                                                    S protein
            2703 2713 2723 2733 2743 2753
ACAAUCACAA GCGGCUGGAC AUUUGGAGCA GGCGCCGCUC UGCAGAUCCC CUUUGCUAUG
    T I T S G W T F G A G A A L Q I P F A M
                                                    S protein
            2763 2773 2783 2793 2803 2813
CAGAUGGCCU ACCGGUUCAA CGGCAUCGGA GUGACCCAGA AUGUGCUGUA CGAGAACCAG
    Q M A Y R F N G I G V T Q N V L Y E N Q
                                                    S protein
            2823 2833 2843 2853 2863 2873
AAGCUGAUCG CCAACCAGUU CAACAGCGCC AUCGGCAAGA UCCAGGACAG CCUGAGCAGC
    K L I A N Q F N S A I G K I Q D S L S S
                                                    S protein
            2883 2893 2903 2913 2923 2933
ACAGCAAGCG CCCUGGGAAA GCUGCAGGAC GUGGUCAACC AGAAUGCCCA GGCACUGAAC
    T A S A L G K L Q D V V N Q N A Q A L N
                                                    S protein
            2943 2953 2963 2973 2983 2993
ACCCUGGUCA AGCAGCUGUC CUCCAACUUC GGCGCCAUCA GCUCUGUGCU GAACGAUAUC
    T L V K Q L S S N F G A I S S V L N D I
                                                    S protein
            3003 3013 3023 3033 3043 3053
CUGAGCAGAC UGGACCCUCC UGAGGCCGAG GUGCAGAUCG ACAGACUGAU CACAGGCAGA
    L S R L D P P E A E V Q I D R L I T G R
                                                    S protein
            3063 3073 3083 3093 3103 3113
CUGCAGAGCC UCCAGACAUA CGUGACCCAG CAGCUGAUCA GAGCCGCCGA GAUUAGAGCC
    L Q S L Q T Y V T Q Q L I R A A E I R A
                                                    S protein
            3123 3133 3143 3153 3163 3173
UCUGCCAAUC UGGCCGCCAC CAAGAUGUCU GAGUGUGUGC UGGGCCAGAG CAAGAGAGUG
    S A N L A A T K M S E C V L G Q S K R V
                                                    S protein
            3183 3193 3203 3213 3223 3233
GACUUUUGCG GCAAGGGCUA CCACCUGAUG AGCUUCCCUC AGUCUGCCCC UCACGGCGUG
    D F C G K G Y H L M S F P Q S A P H G V
                                                    S protein
            3243 3253 3263 3273 3283 3293
GUGUUUCUGC ACGUGACAUA UGUGCCCGCU CAAGAGAAGA AUUUCACCAC CGCUCCAGCC
    V F L H V T Y V P A Q E K N F T T A P A
                                                    S protein
            3303 3313 3323 3333 3343 3353
AUCUGCCACG ACGGCAAAGC CCACUUUCCU AGAGAAGGCG UGUUCGUGUC CAACGGCACC
    I C H D G K A H F P R E G V F V S N G T
                                                    S protein
            3363 3373 3383 3393 3403 3413
CAUUGGUUCG UGACACAGCG GAACUUCUAC GAGCCCCAGA UCAUCACCAC CGACAACACC
    H W F V T Q R N F Y E P Q I I T T D N T
                                                    S protein
            3423 3433 3443 3453 3463 3473
UUCGUGUCUG GCAACUGCGA CGUCGUGAUC GGCAUUGUGA ACAAUACCGU GUACGACCCU
    F V S G N C D V V I G I V N N T V Y D P
                                                    S protein
            3483 3493 3503 3513 3523 3533
CUGCAGCCCG AGCUGGACAG CUUCAAAGAG GAACUGGACA AGUACUUUAA GAACCACACA
    L Q P E L D S F K E E L D K Y F K N H T
                                                    S protein
            3543 3553 3563 3573 3583 3593
AGCCCCGACG UGGACCUGGG CGAUAUCAGC GGAAUCAAUG CCAGCGUCGU GAACAUCCAG
    S P D V D L G D I S G I N A S V V N I Q
                                                    S protein
            3603 3613 3623 3633 3643 3653
AAAGAGAUCG ACCGGCUGAA CGAGGUGGCC AAGAAUCUGA ACGAGAGCCU GAUCGACCUG
    K E I D R L N E V A K N L N E S L I D L
                                                    S protein
            3663 3673 3683 3693 3703 3713
CAAGAACUGG GGAAGUACGA GCAGUACAUC AAGUGGCCCU GGUACAUCUG GCUGGGCUUU
    Q E L G K Y E Q Y I K W P W Y I W L G F
                                                    S protein
            3723 3733 3743 3753 3763 3773
AUCGCCGGAC UGAUUGCCAU CGUGAUGGUC ACAAUCAUGC UGUGUUGCAU GACCAGCUGC
    I A G L I A I V M V T I M L C C M T S C
                                                    S protein
            3783 3793 3803 3813 3823 3833
UGUAGCUGCC UGAAGGGCUG UUGUAGCUGU GGCAGCUGCU GCAAGUUCGA CGAGGACGAU
    C S C L K G C C S C G S C C K F D E D D
                                                    S protein
            3843 3853 3863 3873 3878
UCUGAGCCCG UGCUGAAGGG CGUGAAACUG CACUACACAU GAUGA
    S E P V L K G V K L H Y T * *
                                                    S protein
            3888 3898 3908 3918 3928 3938
CUCGAGCUGG UACUGCAUGC ACGCAAUGCU AGCUGCCCCU UUCCCGUCCU GGGUACCCCG
                                                    FI element
            3948 3958 3968 3978 3988 3998
AGUCUCCCCC GACCUCGGGU CCCAGGUAUG CUCCCACCUC CACCUGCCCC ACUCACCACC
                                                    FI element
            4008 4018 4028 4038 4048 4058
UCUGCUAGUU CCAGACACCU CCCAAGCACG CAGCAAUGCA GCUCAAAACG CUUAGCCUAG
                                                    FI element
            4068 4078 4088 4098 4108 4118
CCACACCCCC ACGGGAAACA GCAGUGAUUA ACCUUUAGCA AUAAACGAAA GUUUAACUAA
                                                    FI element
            4128 4138 4148 4158 4168 4173
GCUAUACUAA CCCCAGGGUU GGUCAAUUUC GUGCCAGCCA CACCCUGGAG CUAGC
                                                    FI element
            4183 4193 4203 4213 4223 4233
AAAAAAAAAA AAAAAAAAAA AAAAAAAAAA GCAUAUGACU AAAAAAAAAA AAAAAAAAAA
                                                    Poly(A)
            4243 4253 4263 4273 4283
AAAAAAAAAA AAAAAAAAAA AAAAAAAAAA AAAAAAAAAA AAAAAAAAAA
                                                    Poly(A)
```

[1075] In some embodiments, a pharmaceutical composition comprising one or more polynucleotides encoding a polypeptide encoded by a string construct may be co-administered with another vaccine for treating a viral disease. In some embodiments, such a viral disease is an infectious respiratory disease (e.g., but not limited to flu (influenza), respiratory syncytial virus, etc.). In some embodiments, such a viral disease is COVID. In some embodiments, a pharmaceutical composition comprising one or more polynucleotides encoding a polypeptide encoded by a string construct may be co-administered with a coronavirus vaccine (e.g., RNA-based, protein-based, DNA-based, etc.). In some embodiments, a pharmaceutical composition comprising one or more polynucleotides encoding a polypeptide encoded by a string construct may be co-administered with a RNA-based coronavirus vaccine. In some embodiments, the pharmaceutical composition comprising a string construct may be co-administered, for example, with an antibody, such as a neutralizing antibody that can bind to a SARS CoV-2 protein, e.g., orflab polyprotein, orfla polyprotein, surface glycoprotein(S), nucleocapsid phosphoprotein (N), ORF3a protein, membrane glycoprotein (M), ORF7a protein, ORF8 protein, envelope protein (E), ORF6 protein, ORF7b protein or ORF10 protein. In some embodiments, the pharmaceutical composition may be co-administered with an antibody directed to the SARS spike protein. In some embodiments, the pharmaceutical composition comprising one or more polynucleotides encoding a polypeptide encoded by a string construct may be administered before, after or simultaneously with a therapeutic regime comprising another vaccine described above.

[1076] In some aspects, a polypeptide encoded by a string construct, especially comprising SARS COV-2 nucleocapsid protein epitopes are designed to boost the immunogenicity and immune memory against the virus. Certain of the present day vaccines in trial comprise vaccines directed to the viral spike proteins, that are likely to confer an immunogenic response, but do not appear to elicit or promote a T cell response. In some embodiments, vaccines comprising a string construct or a polypeptide encoded by a string construct described herein can elicit or promote a T cell response and/or elicit or promote a lasting immunological memory. In some embodiments, a vaccine against SARS CoV-2 may be accompanied by one or more string vaccine compositions described herein, e.g., as part of an administration regimen, such as for a boost after priming. In some embodiments, a vaccine against SARS CoV-2 may be mRNA-based, viral vector-based (e.g., replicating and/or non-replicating), DNA-based, protein-based (e.g., protein subunit and/or virus like particles), and/or inactivated/attenuated virus-based. In some embodiments, such a vaccine is directed to a spike protein or an immunogenic fragment thereof. In some embodiments, such a SARS CoV-2 vaccine may be or comprise an mRNA-based vaccine against SARs-CoV-2, e.g., in some embodiments a mRNA-based vaccine (mRNA-1273) developed by Moderna that encodes a prefusion stabilized form of SARS CoV-2 Spike protein. In some embodiments, such a SARS CoV-2 vaccine may be or comprise a viral vector based vaccine against SARS-CoV-2, e.g., in some embodiments an adenovirus vaccine vector-based vaccine (AZD1222) developed by AstraZeneca that is made from a virus (e.g., ChAdOx1), which is a weakened version of an adenovirus, and encodes a SARS CoV-2 spike protein.

### Pharmaceutical Composition Comprising String Constructs or a Polypeptide Encoded by a String Construct

[1077] In one aspect, a pharmaceutical composition comprising the string vaccines may be administered to a patient alone or in combination with other drugs or vaccines.

[1078] In some embodiments, the pharmaceutical composition comprising the string vaccine may be administered before, simultaneously or after an initial administration of another vaccine or drug for SARS CoV-2 viral infection.

[1079] In some embodiments, the pharmaceutical composition comprising the string vaccine may be administered 7 days, 2 weeks, 3 weeks, 4 weeks, 5 weeks, 6 weeks, 7 weeks, 8 weeks, 9 weeks, 10 weeks, 11 weeks, 12 weeks, 14 weeks, 16 weeks, 18 weeks, or 20 weeks or more before administering another vaccine or drug for SARS CoV-2 viral infection. The pharmaceutical composition comprising the string vaccine may be administered prophylactically, or as a preventive vaccine, similar to for example, the flu vaccine at the onset of annual flu season.

[1080] In some embodiments, the pharmaceutical composition comprising the string vaccine may be administered 7 days, 2 weeks, 3 weeks, 4 weeks, 5 weeks, 6 weeks, 7 weeks, 8 weeks, 9 weeks, 10 weeks, 11 weeks, 12 weeks, 14 weeks, 16 weeks, 18 weeks, or 20 weeks or more after the administration of a vaccine or a drug for 2019 SARS CoV-2 viral infection. In some embodiments, the pharmaceutical composition comprising the string vaccine may be administered 3 months after another 2019 SARS-CoV-2 vaccine therapy. In some embodiments, the pharmaceutical composition comprising the string vaccine may be administered 6 months after another 2019 SARS-CoV-2 vaccine therapy. In some embodiments, the pharmaceutical composition comprising the string vaccine may be administered 8 months after another 2019 SARS-CoV-2 vaccine therapy. In some embodiments, the pharmaceutical composition comprising the string vaccine may be administered 9 months after another 2019 SARS-CoV-2 vaccine therapy. In some embodiments, the pharmaceutical composition comprising the string vaccine may be administered 10 months after another SARS-CoV-2 vaccine therapy. In some embodiments, the pharmaceutical composition comprising the string vaccine may be administered 12 months after another 2019 SARS-CoV-2 vaccine therapy.

[1081] In some embodiments, the pharmaceutical composition comprising the string vaccine may be administered once every 2 days, 7 days, 2 weeks, 3 weeks, 4 weeks, 5 weeks, 6 weeks, 7 weeks, 8 weeks, 9 weeks, 10 weeks, 12 weeks or more. In some embodiments, the pharmaceutical composition comprising a string vaccine (e.g., as described herein) may be administered once every 20 days, 21 days, 22 days, 23 days, 24 days, 25 days, 26 days, 27 days, 28 days, 29 days, 30 days, or more. In some embodiments, the pharmaceutical composition comprising a string vaccine (e.g., as described herein) may be administered once every 3 months, 4 months, 5 months, 6 months, 7 months, 8 months, 9 months, 10 months, 11 months, 12 months, or longer. In some embodiments, a subject may be administered at least two doses of the pharmaceutical composition comprising a string vaccine (e.g., as described herein), and the at least two doses of the pharmaceutical composition comprising the string vaccine may be administered at an interval of 20 days. In some embodiments, two such doses may be administered at an interval of 21 days. In some embodiments, two such doses may be administered at an interval of 22 days. In some embodiments, two such doses may be administered at an interval of 23 days. In some embodiments, two such doses may be administered at an interval of 24 days. In some embodiments, two such doses may be administered at an interval of 25 days. In some embodiments, two such doses may be administered at an interval of 26 days. In some embodiments, two such doses may be administered at an interval of 27 days. In some embodiments, two such doses may be administered at an interval of 28 days. In some embodiments, the pharmaceutical composition comprising the string vaccine may be administered as a boost (or maintenance) once every 6 months, or once 8 month or once every 12 months after an initial phase of priming dose comprising more frequent dosing. In some embodiments the priming dose may comprise 2, 3, 4, 5, 6, 7, 8, 9, 10 or more doses.

[1082] In some embodiments the string vaccine compositions may be used at a dose between 1-1000 microgram per dose per person. In some embodiments, the string vaccine composition may be administered at a dose of 1-600 micrograms per dose, per person. In some embodiments, the string vaccine composition may be administered at a dose of 1-500 micrograms per dose, per person. In some embodiments, the string vaccine composition may be administered at a dose of 1-400 micrograms per dose, per person. In some embodiments, the string vaccine composition may be administered at a dose of 1-300 micrograms per dose, per person. In some embodiments, the string vaccine composition may be administered at a dose of 1-200 micrograms per dose, per person. In some embodiments, the string vaccine composition may be administered at a dose of 10-300 micrograms per dose, per person. In some embodiments, the string vaccine composition may be administered at a dose of 10-200 micrograms per dose, per person. In some embodiments, the string vaccine composition may be administered at a dose of 10-100 micrograms per dose, per person. In some embodiments, the string vaccine composition may be administered at a dose of 10 micrograms per dose, per person. In some embodiments, the string vaccine composition may be administered at a dose of 20 micrograms per dose, per person. In some embodiments, the string vaccine composition may be administered at a dose of 30 micrograms per dose, per person. In some embodiments, the string vaccine composition may be administered at a dose of 40 micrograms per dose, per person. In some embodiments, the string vaccine composition may be administered at a dose of 50 micrograms per dose, per person. In some embodiments, the string vaccine composition may be administered at a dose of 60 micrograms per dose, per person. In some embodiments, the string vaccine composition may be administered at a dose of 70 micrograms per dose, per person. In some embodiments, the string vaccine composition may be administered at a dose of 80 micrograms per dose, per person. In some embodiments, the string vaccine composition may be administered at a dose of 90 micrograms per dose, per person. In some embodiments, the string vaccine composition may be administered at a dose of 100 micrograms per dose, per person. In some embodiments, the string vaccine composition may be administered at a dose of 120 micrograms per dose, per person. In some embodiments, the string vaccine composition may be administered at a dose of 150 micrograms per dose, per person.

[1083] In some embodiments where a string vaccine composition (e.g., as described herein) is administered in combination with a BNT RNA vaccine composition, e.g., a composition comprising an RNA (e.g., mRNA) encoding a viral spike protein (e.g., a SARS CoV-2 S protein or an immunogenic fragment thereof (e.g., RBD)), which in some embodiments may be encapsulated in a lipid nanoparticle, such a BNT RNA vaccine composition may be administered at a dose ranging from 0.1 micrograms to 100 micrograms, 1 to 60 micrograms, 3 to 50 micrograms, 3-30 micrograms, or 10-30 micrograms. In some embodiments, such a BNT RNA vaccine composition may be administered at a dose of 1, 2, 3, 4, 5, 6, 7, 8, 9, 10, 15, 20, 25, 30 micrograms or more. In some embodiments, a BNT RNA vaccine comprises an RNA (e.g., mRNA) construct encoding a SARS CoV-2 S protein, which can have a structure represented as m₂^{7,3′-O}Gppp(m₁^{2′-O})ApG)-hAg-Kozak-S1S2-PP-FI-A30L70.

[1084] In some embodiments, a BNT RNA vaccine composition (e.g., as described herein) to be administered in combination with a string vaccine composition (e.g., as described herein) may comprise an initial dose, e.g., the priming dose; and a follow up dose, e.g., a booster dose. In some embodiments, the priming dose and the booster dose are administered at an interval of 20 days. In some embodiments, such BNT RNA vaccine composition doses may be administered at an interval of 21 days. In some embodiments, such BNT RNA vaccine composition doses may be administered at an interval of 22 days. In some embodiments, such BNT RNA vaccine composition doses may be administered at an interval of 23 days. In some embodiments, such BNT RNA vaccine composition may be administered at an interval of 24 days. In some embodiments, such BNT RNA vaccine composition doses may be administered at an interval of 25 days. In some embodiments, such BNT RNA vaccine composition doses may be administered at an interval of 26 days. In some embodiments, such BNT RNA vaccine composition doses may be administered at an interval of 27 days. In some embodiments, such BNT RNA vaccine composition doses may be administered at an interval of 28 days. In some embodiments, such BNT RNA vaccine composition may be administered at an interval of longer than 28 days, e.g., including, e.g., every 1 month, 2 months, 3 months, 4 months, 5 months, 6 months, 7 months, 8 months, 9 months, 10 months, 11 months, 12 months, or longer.

[1085] In some embodiments, a BNT RNA vaccine composition (e.g., as described herein) to be administered in combination with a string vaccine composition (e.g., as described herein) may comprise a modified RNA encoding a viral spike protein (e.g., a SARS CoV-2 S protein or an immunogenic fragment thereof (e.g., RBD)), in which one or more uridine nucleotide residues is replaced with a modified uridine nucleotide (e.g., 1-methylpseudouridine). In some embodiments, at least 10%, or at least 20%, or at least 30%, or at least 40%, or at least 50%, or at least 60% or at least 70%, or at least 80% or at least 90% of the U nucleotides of the structure are replaced by a modified uridine nucleotide (e.g., 1-methylpseudouridine). In some embodiments, 100% of the U nucleotides of the structure are replaced by a modified uridine nucleotide (e.g., 1-methylpseudouridine).

[1086] In some embodiments the vaccine comprising a nucleotide sequence encoding a spike protein may be co-administered with an RNA vaccine comprising a string construct. In some embodiments, the vaccine comprising a nucleotide sequence encoding a spike protein vaccine is administered as an initial dose, followed by an RNA vaccine comprising a string construct comprising sequences encoding 2, 3, 4, 5, 6, 7, 8, 9, 10 or more epitopes from 2 or more viral proteins, as a follow up dose, a maintenance dose, a second dose, a third dose or as one or more booster doses. In some embodiments, a vaccine comprising a nucleotide sequence encoding a spike protein is administered as an initial dose, followed by an RNA vaccine comprising a string construct comprising sequences encoding 2, 3, 4, 5, 6, 7, 8, 9, 10 or more epitopes from 2 or more viral proteins as a follow up dose, a maintenance dose, a second dose, a third dose or as one or more booster doses. In some embodiments, an RNA vaccine comprising a string construct comprising sequences encoding 2, 3, 4, 5, 6, 7, 8, 9, 10 or more epitopes from 2 or more viral proteins is administered to a subject as an initial dose, followed by a vaccine comprising a nucleotide sequence encoding a spike protein as a follow up dose, a maintenance dose, a second dose, a third dose or as one or more booster doses.

[1087] In some embodiments, the pharmaceutical composition comprising a string construct may comprise a coformulation vaccine. In some embodiments, the coformulation vaccine composition may comprise a first string vaccine at a first concentration, and a second string vaccine at a second concentration, and third string vaccine at a third concentration and so on. In some embodiments, a first string vaccine may comprise a vaccine comprising a nucleotide sequence encoding a spike protein.

[1088] In some embodiments, a coformulation composition may comprise a first polynucleotide composition, comprising a nucleotide vaccine encoding a spike protein or fragment thereof. In some embodiments, the coformulation may comprise a first nucleotide sequence, having a structure m₂^{7,3′-O}Gppp(m₁^{2′-O})ApG)-hAg-Kozak-S1S2-PP-FI-A30L70, as described above. In some embodiments, the coformulation may comprise a second composition comprising a RS C5, RS C6, RS C7, and RS C8 or a combination thereof. In some embodiments, the coformulation may comprise a second composition comprising a RS C1, RS C2, RS C3, and RS C4 or a combination thereof. In some embodiments, a first nucleotide sequence, having a structure m₂^{7,3′-O}Gppp(m₁^{2′-O})ApG)-hAg-Kozak-S1S2-PP-FI-A30L70 and a second nucleotide sequence having a RS C1, RS C2, RS C3, RS C4, RS C5, RS C6, RS C7, or RS C8 may be present at a ratio of 20:1, 19:1, 18:1, 17:1, 16:1, 15:1, 14:1, 13:1, 12:1, 11:1, 10:1, 9:1, 8:1, 7:1, 6:1, 5:1, 4:1, 3:1, 2:1 or 1:1. In some embodiments, the coformulation may comprise a second composition comprising a RS C1, RS C2, RS C3, and RS C4 or a combination thereof. In some embodiments, a first nucleotide sequence, having a structure m₂^{7,3′-O}Gppp(m₁^{2′-O})ApG)-hAg-Kozak-S1S2-PP-FI-A30L70 and a second nucleotide sequence having a RS C1, RS C2, RS C3, RS C4, RS C5, RS C6, RS C7, or RS C8 may be present at a ratio of 1:10, 1:9, 1:8, 1:7, 1:6, 1:5, 1:4, 1:3, 1:2, 1:1, 2:1, 3:1, 4:1, 5:1, 6:1, 7:1, 8:1, 9:1, 10:1, 1:9.5, 1:8.5, 1:7.5, 1:6.5, 1:5.5, 1:4.5, 1:3.5, 1:2.5, 1:1.5, 2.5:1, 3.5:1, 4.5:1, 5.5:1, 6.5:1, 7.5:1, 8.5:1, 9.5:1, 2:9, 2:8, 2:7, 2:6, 2:5, 2:4, 2:3, 3:2, 4:2, 5:2, 6:2, 7:2, 8:2, 9:2, 3:8, 3:7, 3:5, 3:4, 4:3, 5:3, 7:3, 8:3, 4:9, 4:7, 4:5, 5:4, 7:4, 9:4, 5:9, 5:8, 5:7, 5:6, 6:5, 7:5, 8:5, 9:5, 6:7, 7:6, 7:8, 8:7, 8:9, 9:8, 1:11, 1:12, 1:13, 1:14, 1:15, 1:16, 1:17, 1:18, 1:19 or 1:20.

[1089] In some embodiments, polynucleotides described herein (e.g., a polynucleotide encoding a viral spike protein and/or a polynucleotide encoding a peptide (e.g., comprising an epitope sequence as described herein) may be encapsulated in lipid nanoparticles. In some embodiments, such lipid nanoparticle may comprise one or more cationic or ionizable lipids. In some embodiments, such lipid nanoparticle may optionally comprise neutral lipids (e.g., phospholipids and/or sterols such as, e.g., cholesterol), and/or polymer-conjugated lipids, such as PEGylated lipids.

[1090] In some embodiments, a pharmaceutical composition comprising subject specific T cells may be generated ex vivo, where the subject specific T cell population may be responsive to at least one of the epitopes in Table 1A, Table 1B, Table 1C, Table 2Ai, Table 2Aii, Table 2B, Table 9, Table 10, Table 11, Table 12, Table 14A, Table 14B, Table 14C, Table 15 or Table 16, or any antigen disclosed in the specification corresponding to a viral antigen. In one embodiment, PBMC from a subject may be isolated (e.g., from a leukapheresis sample), and incubated in the presence of one or more epitopes that are disclosed in any one of the tables (Table 1A, Table 1B, Table 1C, Table 2Ai, Table 2Aii, Table 2B, Table 9, Table 10, Table 11, Table 12, Table 14A, Table 14B, Table 14C, Table 15 or Table 16) In some embodiments the antigen may be selected based on the MHC peptides present in the subject, such that the antigen peptides have high affinity and presentation prediction score in combination with the MHC, based on the peptide: MHC pairs disclosed in Table 1A, Table 1B, Table 1C, Table 2Ai, Table 2Aii, Table 2B, Table 9, Table 10, Table 11, Table 12, Table 14A, Table 14B, Table 15 or Table 16.

[1091] In some embodiments, a pharmaceutical composition comprises: (i) a peptide comprising an epitope sequence selected from: NYNYLYRLF; KWPWYIWLGF; QYIKWPWYI; LPFNDGVYF; QPTESIVRF; IPFAMQMAY; YLQPRTELL; and/or RLQSLQTYV; (ii) a polynucleotide encoding the peptide; (iii) a T cell receptor (TCR) or a T cell comprising the TCR, wherein the TCR binds to the epitope sequence in complex with a corresponding MHC class I or class II molecule; (iv) an antigen presenting cell comprising (i) or (ii); or (v) an antibody or B cell comprising the antibody, wherein the antibody binds to the epitope sequence.

[1092] In some embodiments, a pharmaceutical composition comprising T cells may be generated ex vivo wherein the T cells may be responsive to an epitope sequence comprising or consisting of NYNYLYRLF, wherein in some embodiments the subject expresses an MHC protein encoded by HLA-A*2402. In some embodiments, a pharmaceutical composition comprising subject specific T cells may be generated ex vivo wherein the T cells may be responsive to an epitope sequence comprising or consisting of, KYIKWPWYI, wherein in some embodiments the subject expresses an MHC protein encoded by HLA-A*2402. In some embodiments, a pharmaceutical composition comprising subject specific T cells may be generated ex vivo wherein the T cells may be responsive to an epitope sequence comprising or consisting of KWPWYIWLGF, wherein in some embodiments the subject expresses an MHC protein encoded by HLA-A*2402. In some embodiments, a pharmaceutical composition comprising subject specific T cells may be generated ex vivo wherein the T cells may be responsive to an epitope sequence comprising or consisting of QYIKWPWYI, wherein in some embodiments the subject expresses an MHC protein encoded by HLA-A*2402.

[1093] In some embodiments, a pharmaceutical composition comprising T cells may be generated ex vivo wherein the T cells may be responsive to an epitope sequence comprising or consisting of LPFNDGVYF, wherein in some embodiments the subject expresses an MHC protein encoded by HLA-B*3501. In some embodiments, a pharmaceutical composition comprising T cells may be generated ex vivo wherein the T cells may be responsive to an epitope sequence comprising or consisting of QPTESIVRF, wherein in some embodiments the subject expresses an MHC protein encoded by HLA-B*3501. In some embodiments, a pharmaceutical composition comprising T cells may be generated ex vivo wherein the T cells may be responsive to an epitope sequence comprising or consisting of, IPFAMQMAY, wherein in some embodiments the subject expresses an MHC protein encoded by HLA-B*3501.

[1094] In some embodiments, a pharmaceutical composition comprising T cells may be generated ex vivo wherein the T cells may be responsive to an epitope sequence comprising or consisting of YLQPRTFLL, wherein in some embodiments the subject expresses an MHC protein encoded by HLA-A*0201. In some embodiments, a pharmaceutical composition comprising T cells may be generated ex vivo wherein the T cells may be responsive to an epitope sequence comprising or consisting of RLQSLQTYV, wherein in some embodiments the subject expresses an MHC protein encoded by HLA-A*0201.

[1095] In some embodiment, a string vaccine may be formulated to be delivered in an aqueous solution systemically by injection to a subject. The string vaccine may comprise one or more polynucleotides, such as RNA, such as mRNA. In some embodiments the mRNA may be associated with one or more lipids. In some embodiments, the string vaccine may be co-formulated to comprise one or more strings, one or more spike mRNA vaccines and one or more strings comprising epitope sequences covering one or more of the other viral proteins, ORF1ab, nucleocapsid, membrane protein or a combination thereof. In some embodiments, the vaccine is formulated for systemic injection, such as intramuscular, subcutaneous, intravenous, intraocular.

[1096] In some embodiments the string mRNA is contacted to a cell population, comprising antigen presenting cells and T cells. In some embodiments, the string mRNA is electroporated in a cell, such as an APC. In some embodiments, T cells are generated as described elsewhere within the application, that are primed with APCs expressing one or more strings.

[1097] In some embodiments, the pharmaceutical composition comprises a CorVac 2.0 string, e.g., RS-C7 (C7). In some embodiments, C7 string mRNA is encapsulated in a lipid nanoparticle (LNP) in a single mRNA-LNP formulation. In some embodiments, a pharmaceutical composition comprises a lipid nanoparticle formulation that comprises a C7 string mRNA and one or more other LNPs encapsulating one, two, three or four other CorVac 2.0 string mRNAs, or more, such as a RS-C5 (C5) string, a RS-C6 (C6) string and a RS-C8 (C8) string. In some embodiments, a pharmaceutical composition comprises a lipid nanoparticle formulation that comprises a C7 string mRNA and one or more other LNPs formulations each encapsulating a different string mRNA, e.g. a CorVac 2.0 string. In one embodiment, the pharmaceutical composition comprises a mixture of different LNPs, comprising one, two, three or four other CorVac 2.0 string mRNAs, such as a C5 string in an LNP formulation, a C6 string in an LNP formulation, or a C8 string in a separate LNP formulation. In some embodiments, the LNPs are mixed in a specific ratio with respect to each other. In some embodiments, a C7 string-LNP and another string mRNA LNP may be mixed in a ratio (e.g., mass ratio) of 1:10, 1:9, 1:8, 1:7, 1:6, 1:5, 1:4, 1:3, 1:2, 1:1, 2:1, 3:1, 4:1, 5:1, 6:1, 7:1, 8:1, 9:1, 10:1, 1:9.5, 1:8.5, 1:7.5, 1:6.5, 1:5.5, 1:4.5, 1:3.5, 1:2.5, 1:1.5, 2.5:1, 3.5:1, 4.5:1, 5.5:1, 6.5:1, 7.5:1, 8.5:1, 9.5:1, 2:9, 2:8, 2:7, 2:6, 2:5, 2:4, 2:3, 3:2, 4:2, 5:2, 6:2, 7:2, 8:2, 9:2, 3:8, 3:7, 3:5, 3:4, 4:3, 5:3, 7:3, 8:3, 4:9, 4:7, 4:5, 5:4, 7:4, 9:4, 5:9, 5:8, 5:7, 5:6, 6:5, 7:5, 8:5, 9:5, 6:7, 7:6, 7:8, 8:7, 8:9 or 9:8 in a pharmaceutical composition. In some embodiments, the LNPs are mixed in a specific ratio with respect to each other. In some embodiments, a C7 string-LNP and another string mRNA LNP is mixed in a ratio (e.g., mass ratio) of 1:11, 1:12, 1:13, 1:14, 1:15, 1:16, 1:17, 1:18, 1:19 or 1:20 in a pharmaceutical composition. In some embodiments, a C7 string-LNP and another string mRNA LNP is mixed in a ratio (e.g., mass ratio) of 1:25, 1:30, 1:40, 1:50, 1:60, 1:70, 1:80, 1:90 or 1:100 in a pharmaceutical composition. In some embodiments, a C7 string-LNP and another string mRNA LNP is mixed in a ratio (e.g., mass ratio) of 1:0.1, 1:0.2, 1:0.3, 1:0.4, 1:0.5, 1:0.6, 1:0.7, 1:0.8, 1:0.9 or 1:1 in a pharmaceutical composition. In some embodiments, a C7 string-LNP and another string mRNA LNP is mixed in a ratio (e.g., mass ratio) of 1:0.01, 1:0.02, 1:0.03, 1:0.04, 1:0.05, 1:0.06, 1:0.07, 1:0.08, 1:0.09 in a pharmaceutical composition. In some embodiments, a pharmaceutical composition comprises a first CorVac 2.0 string mRNA and a second, a third and/or a fourth CorVac 2.0 string mRNA formulated in a single LNP. In some embodiments a pharmaceutical composition comprises a single LNP comprising one or more different CorVac 2.0 mRNA strings, of which one is a C7 string.

[1098] In some embodiments, provided herein is a pharmaceutical composition, comprising (i) a recombinant polynucleotide encoding a polypeptide comprising at least two of the following: a sequence comprising an epitope sequence from ORF1ab, a sequence comprising an epitope sequence from membrane glycoprotein (M), and a sequence comprising an epitope sequence from nucleocapsid phosphoprotein (N), wherein each epitope can be of the same or different pathogen (e.g., a virus); and (ii) a recombinant polynucleotide encoding a Spike protein of a virus or an immunogenic fragment thereof (e.g., receptor binding domain), or a variant thereof. In some embodiments, a Spike protein of a virus is 2019 SARS-CoV 2 spike protein (SARS-CoV-2 S protein) or a variant or fragment thereof.

[1099] In some embodiments, the recombinant polynucleotide encodes a SARS-CoV-2 S protein of SEO ID NO: Spike p, shown below.

(SEQ ID NO: Spike_p)
MFVFLVLLPLVSSQCVNLTTRTQLPPAYTNSFTRGVYYPDKVFRSSVL
HSTQDLFLPFFSNVTWFHAIHVSGTNGTKRFDNPVLPFNDGVYFASTE
KSNIIRGWIFGTTLDSKTQSLLIVNNATNVVIKVCEFQFCNDPFLGVY
YHKNNKSWMESEFRVYSSANNCTFEYVSQPFLMDLEGKQGNFKNLREF
VFKNIDGYFKIYSKHTPINLVRDLPQGFSALEPLVDLPIGINITRFQT
LLALHRSYLTPGDSSSGWTAGAAAYYVGYLQPRTFLLKYNENGTITDA
VDCALDPLSETKCTLKSFTVEKGIYQTSNFRVQPTESIVRFPNITNLC
PFGEVFNATRFASVYAWNRKRISNCVADYSVLYNSASFSTFKCYGVSP
TKLNDLCFTNVYADSFVIRGDEVRQIAPGQTGKIADYNYKLPDDFTGC
VIAWNSNNLDSKVGGNYNYLYRLFRKSNLKPFERDISTEIYQAGSTPC
NGVEGFNCYFPLQSYGFQPTNGVGYQPYRVVVLSFELLHAPATVCGPK
KSTNLVKNKCVNFNFNGLTGTGVLTESNKKFLPFQQFGRDIADTTDAV
RDPQTLEILDITPCSFGGVSVITPGTNTSNQVAVLYQDVNCTEVPVAI
HADQLTPTWRVYSTGSNVFQTRAGCLIGAEHVNNSYECDIPIGAGICA
SYQTQTNSPRRARSVASQSIIAYTMSLGAENSVAYSNNSIAIPTNFTI
SVTTEILPVSMTKTSVDCTMYICGDSTECSNLLLQYGSFCTQLNRALT
GIAVEQDKNTQEVFAQVKQIYKTPPIKDFGGFNFSQILPDPSKPSKRS
FIEDLLFNKVTLADAGFIKQYGDCLGDIAARDLICAQKFNGLTVLPPL
LTDEMIAQYTSALLAGTITSGWTFGAGAALQIPFAMQMAYRFNGIGVT
QNVLYENQKLIANQFNSAIGKIQDSLSSTASALGKLQDVVNQNAQALN
TLVKQLSSNFGAISSVLNDILSRLDKVEAEVQIDRLITGRLQSLQTYV
TQQLIRAAEIRASANLAATKMSECVLGQSKRVDFCGKGYHLMSFPQSA
PHGVVFLHVTYVPAQEKNFTTAPAICHDGKAHFPREGVFVSNGTHWFV
TQRNFYEPQIITTDNTFVSGNCDVIGIVNNTVYDPLQPELDSFKEELD
KYFKNHTSPDVDLGDISGINASVVNIQKEIDRLNEVAKNLNESLIDLQ
ELGKYEQYIKWPWYIWLGFIAGLIAIVMVTIMLCCMTSCCSCLKGCCS
CGSCCKFDEDDSEPVLKGVKLHYT

[1100] In some embodiments, the recombinant polynucleotide in (ii) encodes a Spike protein of a virus or an immunogenic fragment thereof (e.g., receptor binding domain), or a variant thereof that comprises one or more mutations (e.g., insertions, substitions, or deletions) that increase Spike protein expression and/or stability of a prefusion conformation. In some embodiments, a Spike protein of a virus is 2019 SARS-CoV 2 spike protein (SARS-CoV-2 S protein) or a variant or fragment thereof. In some embodiments, full length spike(S) protein is modified in such a way that the prototypical prefusion conformation is stabilized. Certain mutations that stabilize a prefusion confirmation are known in the art, e.g., as disclosed in WO 2021243122 A2; Hsieh, Ching-Lin, et al. (“Structure-based design of prefusion-stabilized SARS-CoV-2 spikes,” Science 369.6510 (2020): 1501-1505); WO2022/067010 A1; WO2018081318A1; WO2021163365A1; and WO2021213924A1, the contents of each which are incorporated by reference herein in their entirety. In some embodiments, a SARS-CoV-2 S protein may be stabilized by introducing one or more proline mutations. In some embodiments, a Spike protein of a virus (e.g., in some embodiments SARS-CoV-2 S protein) comprises a proline substitution at positions corresponding to residues 986 and/or 987 of SEQ ID NO: Spike_p. In some embodiments, a Spike protein of a virus (e.g., in some embodiments SARS-CoV-2 S protein) comprises proline substitutions at positions corresponding to one or more of residues 817, 892, 899, and 942 of SEQ ID NO: Spike_p. In some embodiments, a Spike protein of a virus (e.g., in some embodiments a SARS-CoV-2 S protein) comprises a proline substitution at positions corresponding to each of residues 817, 892, 899, and 942 of SEQ ID NO: Spike_p. In some embodiments, a Spike protein of a virus (e.g., a SARS-CoV-2 S protein) comprises a proline substitution at positions corresponding to each of residues 817, 892, 899, 942, 986, and 987 of a SARS-CoV-2 S protein of SEQ ID NO: Spike_p.

[1101] In some embodiments, the recombinant polynucleotide in (ii) encodes a Spike protein of a virus that comprises one or more mutations in a furin cleavage site. In some embodiments, a Spike protein of a virus is 2019 SARS-CoV 2 spike protein (SARS-CoV-2 S protein) or a variant or fragment thereof (e.g., in some embodiments, a Spike protein comprises a mutation at a position corresponding to residues 682-685 of SEQ ID NO: Spike_p). In some embodiments, the mutation in the furin cleavage site prevents cleavage by a furin protease (e.g., a human furin protease). In some embodiments, an encoded SARS-CoV-2 S protein described herein comprises a furin mutation disclosed in WO2021163365 or WO2021243122 (e.g., a GSAS mutation), the contents of both of which are incorporated by reference herein in their entirety.

[1102] In some embodiments, the recombinant polynucleotide (ii) encodes a receptor binding domain (RBD) of a virus (e.g., a 2019 SARS-CoV 2 spike protein RBD) or a variant or fragment thereof. In some embodiments, the recombinant polynucleotide (ii) polypeptide comprises a sequence that corresponds to the RBD, and further comprises a trimerization domain (e.g., a trimerization domain as disclosed herein, such as a fibritin domain). In some embodiments an RBD comprises a signaling domain (e.g., a signaling domain as disclosed herein). In some embodiments an RBD comprises a transmembrane domain (e.g., a transmembrane domain as disclosed herein). In some embodiments, an RBD comprises a signaling domain and a trimerization domain. In some embodiments, an RBD comprises a signaling domain, a trimerization domain, and transmembrane domain. In some embodiments, the encoded polypeptide comprises a sequence that comprises two receptor binding domains. In some embodiments, the encoded polypeptide comprises two receptor binding domains in tandem in an amino acid chain, e.g., as disclosed in Dai, Lianpan, et al. “A universal design of betacoronavirus vaccines against COVID-19, MERS, and SARS,” Cell 182.3 (2020): 722-733, the contents of which are incorporated by reference herein in their entirety. In some embodiments, each of the RBDs have the same amino acid sequence. In some embodiments, each of the RBDs in tandem have different amino acid sequences (e.g., in some embodiments, the two RBDs may each separately comprise one or mutations that are characteristic of a different SARS-CoV-2 strain or variant.

[1103] In some embodiments, the recombinant polypeptide (ii) encodes a SARS-CoV-2 S protein comprising one or more mutations characteristic of a SARS-CoV-2 variant or a fragment thereof. In some embodiments, a SARS-CoV-2 variant refers to a variant of concern (e.g., a newly identified variant of concern, e.g., a newly identified variant of concern identified in a relevant jurisidiction). In some embodiments, a SARS-CoV-2 variant refers to a variant that is prevalent and/or rapidly spreading in a relevant jurisdiction. Such variants can be identified based on publicly available data (e.g., data provided in the GISAID Initiative database: https://www.gisaid.org, and/or data provided by the World Health Organization WHO (e.g., as provided at https://www.who.int/activities/tracking-SARS-CoV-2-variants). In some embodiments, a SARS-CoV-2 variant refers to a variant disclosed herein, e.g., a variant listed in Table A. In some embodiments, a SARS-CoV-2 variant refers to an Omicron variant, e.g., a BA.1, BA.2, BA.12.1, or a BA.4/5 variant listed in Table C.

TABLE C
Exemplary Omicron Variants

| Variant | Description |
|---|---|
| BA.1 | A67V, Δ69-70, T95I, G142D, Δ143-145, Δ211, L212I, ins214EPE, |
| | G339D, S371L, S373P, S375F, K417N, N440K, G446S, |
| | S477N,T478K, E484A, Q493R, G496S, Q498R, N501Y, Y505H, |
| | T547K, D614G, H655Y, N679K, P681H, N764K, D796Y, N856K, |
| | Q954H, N969K, and L981F |
| BA.2 | T19I, Δ24-26, A27S, G142D, V213G, G339D, S371F, S373P, |
| | S375F, T376A, D405N, R408S, K417N, N440K, S477N, T478K, |
| | E484A, Q493R, Q498R, N501Y, Y505H, D614G, H655Y, N679K, |
| | P681H, N764K, D796Y, Q954H, and N969K |
| BA.2.12.1 | T19I, Δ24-26, A27S, G142D, V213G, G339D, S371F, S373P, |
| | S375F, T376A, D405N, R408S, K417N, N440K, L452Q, S477N, |
| | T478K, E484A, Q493R, Q498R, N501Y, Y505H, D614G, H655Y, |
| | N679K, P681H, S704L, N764K, D796Y, Q954H, N969K |
| BA.4/BA.5: | T19I, Δ24-26, A27S, Δ69/70, G142D, V213G, G339D, S371F, |
| | S373P, S375F, T376A, D405N, K417N, N440K, L452R, S477N, |
| | T478K, E484A, F486V, Q498R, N501Y, Y505H, D614G, H655Y, |
| | N679K, P681H, N764K, D796Y, Q954H, and N969K |
| BA 2.75: | T19I, Δ24-26, A27S, G142D, K147E, W152R, F157L, I210V, |
| | V213G, G257S, G339H, N354D, S371F, S373P, S375F, T376A, |
| | D405N, R408S, K417N, N440K, G446S, N460K, S477N, T478K, |
| | E484A, Q498R, N501Y, Y505H D614G, H655Y, N679K, P681H, |
| | N764K, D796Y, Q954H, and N969K |

[1104] In some embodiments, provided herein is a pharmaceutical composition, comprising (i) a recombinant polynucleotide encoding a polypeptide comprising at least two of the following (a) a sequence comprising an epitope sequence from ORF1ab, a sequence comprising an epitope sequence from membrane glycoprotein (M), and a sequence comprising an epitope sequence from nucleocapsid phosphoprotein (N); and (ii) a recombinant polynucleotide encoding a 2019 SARS-CoV 2 spike protein or a variant or fragment thereof; wherein the (ii) a recombinant polynucleotide encoding a 2019 SARS-CoV 2 spike protein or a variant or fragment thereof; wherein the ratio (e.g., mass ratio) of (i):(ii) is greater than 20:1 or less than 1:20. Ratios disclosed herein, when used to describe the relative amount of two or more RNAs in a composition or administered to a subject, refer to the amount of one RNA in a composition or administered to a subject relative to one or more additional RNAs in the same composition or administered to the same subject. In some embodiments, a ratio refers to a mass ratio (e.g., the mass of one RNA in a composition or administered to a subject relative to the mass of one or more RNAs in the same composition or administered to the same subject). In some embodiments, a ratio refers to a molar ratio (e.g., the number of moles of one RNA in a composition or administered to a subject relative to the number of moles of one or more RNAs in the same composition or administered to the same subject). In some embodiments, the recombinant polynucleotide in (i) and the recombinant polynucleotide in (ii) is mRNA. In some embodiments, the recombinant polynucleotide in (i) and the recombinant polynucleotide of (ii) are encapsulated in separate LNPs. In some embodiments, the recombinant polynucleotide in (i) and the recombinant polynucleotide of (ii) are encapsulated in the same LNPs. In some embodiments, the LNP comprising the recombinant polynucleotide (i) and the LNP comprising recombinant polynucleotide (ii) are present in a ratio (e.g., mass ratio) of 20:1, 19:1, 18:1, 17:1, 16:1, 15:1, 14:1, 13:1, 12:1, 11:1, 10:1, 9:1, 8:1, 7:1, 6:1, 5:1, 4:1, 3:1, 2:1, 1:1, 1:2, 1:3, 1:4, 1:5, 1:6, 1:7, 1:8, 1:9, 1:10, 1:11, 1:12, 1:13, 1:14, 1:15, 1:16, 1:17, 1:18, 1:19 or 1:20.

[1105] In some embodiments, a pharmaceutical composition comprises one or more LNPs, at least one comprising a CorVac 2.0 string mRNA, and at least one comprising a BNT162b2 string mRNA. In some embodiments, a pharmaceutical composition comprises a C7 string mRNA encapsulated in an LNP, and a BNT162b2 string mRNA encapsulated in an LNP. In some embodiments, a pharmaceutical composition comprises a CorVac 2.0 string mRNA and a BNT162b2 string mRNA formulated in a single LNP. In some embodiments a pharmaceutical composition comprises a CorVac 2.0 string mRNA, e.g. a C7 string mRNA encapsulated in a first LNP formulation, and a BNT162b2 string mRNA encapsulated in a second LNP, wherein the two LNPs are mixed in the pharmaceutical composition to be present in a certain ratio with respect to each other. In some embodiments, the CorVac 2.0 string mRNA-LNP and a BNT162b2 string mRNA-LNP are mixed in a ratio (e.g., mass ratio) of 1:10, 1:9, 1:8, 1:7, 1:6, 1:5, 1:4, 1:3, 1:2, 1:1, 2:1, 3:1, 4:1, 5:1, 6:1, 7:1, 8:1, 9:1, 10:1, 1:9.5, 1:8.5, 1:7.5, 1:6.5, 1:5.5, 1:4.5, 1:3.5, 1:2.5, 1:1.5, 2.5:1, 3.5:1, 4.5:1, 5.5:1, 6.5:1, 7.5:1, 8.5:1, 9.5:1, 2:9, 2:8, 2:7, 2:6, 2:5, 2:4, 2:3, 3:2, 4:2, 5:2, 6:2, 7:2, 8:2, 9:2, 3:8, 3:7, 3:5, 3:4, 4:3, 5:3, 7:3, 8:3, 4:9, 4:7, 4:5, 5:4, 7:4, 9:4, 5:9, 5:8, 5:7, 5:6, 6:5, 7:5, 8:5, 9:5, 6:7, 7:6, 7:8, 8:7, 8:9 or 9:8 in a pharmaceutical composition. In some embodiments, the CorVac 2.0 string mRNA-LNP and a BNT162b2 string mRNA-LNP are mixed in a ratio (e.g., mass ratio) of 1:11, 1:12, 1:13, 1:14, 1:15, 1:16, 1:17, 1:18, 1:19 or 1:20. In some embodiments, the CorVac 2.0 string mRNA-LNP and a BNT162b2 string mRNA-LNP are mixed in a ratio (e.g., mass ratio) of 1:25, 1:30, 1:40, 1:50, 1:60, 1:70, 1:80, 1:90 or 1:100 in a pharmaceutical composition. In some embodiments, the CorVac 2.0 string mRNA-LNP and a BNT162b2 string mRNA-LNP are mixed in a ratio (e.g., mass ratio) of 1:0.1, 1:0.2, 1:0.3, 1:0.4, 1:0.5, 1:0.6, 1:0.7, 1:0.8, 1:0.9 or 1:1 in a pharmaceutical composition. In some embodiments, the CorVac 2.0 string mRNA-LNP and a BNT162b2 string mRNA-LNP are mixed in a ratio (e.g., mass ratio) of 1:0.01, 1:0.02, 1:0.03, 1:0.04, 1:0.05, 1:0.06, 1:0.07, 1:0.08, 1:0.09 in a pharmaceutical composition. In some embodiments, the different mRNA strings are formulated in different LNP compositions, and administered separately. In some embodiments, each mRNA LNP is stored in a separate vial, and are administered in separate times, at a time interval of 5-30 minutes, or 1 hour, or 2 hours, or 4 hours, or 6 hours, or 8 hours, or 12 hours, or 16 hours, or 20 hours, or 24 hours, or 36 hours, or 48 hours, or 72 hours or 96 hours or more. In some embodiments, each mRNA LNP is stored in a separate vial, and are administered in separate times, at a time interval of 5 days, 6 days, 7 days, 8 days, 9 days, 10 days, 11 days, 12 days, 13 days, 14 days, 15 days, 16 days, 17 days, 18 days, 19 days, 20 days, 21 days, 22 days, 23 days, 24 days, 25 days, 26 days, 27 days, 28 days, 29 days or 30 days. In some embodiments, each mRNA LNP are administered in separate times, at a time interval of between 1 month and 3 months, between 1 month and 6 months, between 2 months and 6 months, between 1 month and 1 year.

[1106] In some embodiments, a first pharmaceutical composition comprising a first LNP comprising a first string mRNA, e.g., a BNT162b2 mRNA is administered in one arm of the subject, and a second pharmaceutical composition comprising a second LNP comprising a second string mRNA, e.g., a CorVac 2.0 mRNA is administered in the other arm of the subject, at an interval of 5-30 minutes, or 1 hour, or 2 hours, or 4 hours, or 6 hours, or 8 hours, or 12 hours, or 16 hours, or 20 hours, or 24 hours, or 36 hours, or 48 hours, or 72 hours or 96 hours or more.

[1107] In some embodiments, two or more pharmaceutical compositions comprising one, two or more LNP compositions, each encapsulating a different mRNA string, are mixed at the patient's bedside prior to administration. Instructions for mixing can be adequately provided in vial label, on the kit containing the vials, or in instruction sheet provided in the kit. In some embodiments, the mixing is performed at a given ratio. In some embodiments, the LNPs are provided in the pharmaceutical composition such that mixing the pharmaceutical compositions at a ratio of 1:1 results in the respective LNP compositions to be present in the required ratio suitable for administration.

[1108] In some embodiments, any vaccine composition comprising the spike mRNA vaccine or a string vaccine or a string vaccine in combination with other therapeutics may be administered to a selected patient group, depending on the age, health condition, gender, medical histories, ethnicity in relation to disease propensity and outcome and so forth. In some embodiments, patient population may be categorized as high risk based on age, health condition, gender, medical histories, ethnicity in relation to disease propensity and outcome and so forth. A therapeutic comprising a string vaccine or a string vaccine in combination with a second therapeutic may be administered to a patient population only if the patient population has been categorized as high risk. Conversely, a therapeutic comprising a string vaccine or a string vaccine in combination with a second therapeutic may be administered to a patient population only if the patient population has been categorized as low risk. In some embodiments, the vaccine composition, alone or in combination may be to patients of 19-55 years of age. In some embodiments, the vaccine composition, alone or in combination may be to patients of 12-65 years of age. In some embodiments, the vaccine composition, alone or in combination may be to patients of 12-35 years of age. In some embodiments, the vaccine composition, alone or in combination may be to patients of 19-35 years of age. In some embodiments, the vaccine composition, alone or in combination may be to patients of 35-55 years of age. In some embodiments, the vaccine composition, alone or in combination may be to patients of 40-65 years of age. In some embodiments, the vaccine composition, alone or in combination may be to patients of 65-85 years of age. In some embodiments, the vaccine composition, alone or in combination may be to patients of age 12 or younger. In some embodiments, the vaccine composition, alone or in combination may be to patients of age 10 or younger. In some embodiments, the vaccine composition, alone or in combination may be to adolescent populations (e.g., individuals approximately 12 to approximately 17 years of age). In some embodiments, the vaccine composition, alone or in combination may be to a pediatric population. In various embodiments, the pediatric population comprises or consists of subjects under 18 years, e.g., 5 to less than 18 years of age, 12 to less than 18 years of age, 16 to less than 18 years of age, 12 to less than 16 years of age, or 5 to less than 12 years of age. In various embodiments, the pediatric population comprises or consists of subjects under 5 years, e.g., 2 to less than 5 years of age, 12 to less than 24 months of age, 7 to less than 12 months of age, or less than 6 months of age.

[1109] In some embodiments, a therapeutic comprising a string vaccine or a string vaccine in combination with a second therapeutic may be administered to a patient who has one or more comorbidities, such as a chronic illness, e.g., cancer, diabetes, kidney disease or CFTR. In some embodiments, a therapeutic comprising a string vaccine or a string vaccine in combination with a second therapeutic may not be administered to a patient who has one or more comorbidities, such as a chronic illnesses. In some embodiments, a therapeutic comprising a string vaccine or a string vaccine in combination with a second therapeutic may be administered to subjects whose profession and/or environmental exposure may dramatically increase their risk of getting SARS CoV-2 infection (including, e.g., but not limited to mass transportation, prisoners, grocery store workers, residents in long-term care facilities, butchers or other meat processing workers, healthcare workers, and/or first responders, e.g., emergency responders). In some embodiments, a therapeutic comprising a string vaccine or a string vaccine in combination with a second therapeutic may be administered to healthcare workers and/or first responders, e.g., emergency responders.

[1110] In some embodiments, a therapeutic comprising a string vaccine or a string vaccine in combination with a second therapeutic may be administered to those with a history of smoking or vaping (e.g., within 6 months, 12 months or more, including a history of chronic smoking or vaping). In some embodiments, a therapeutic comprising a string vaccine or a string vaccine in combination with a second therapeutic may be administered to certain ethnic groups that have been determined to be more susceptible to SARS CoV-2 infection. In some embodiments, a therapeutic comprising a string vaccine or a string vaccine in combination with a second therapeutic may be administered to certain populations with a blood type that may have been determined to more susceptible to SARS CoV-2 infection. In some embodiments, a therapeutic comprising a string vaccine or a string vaccine in combination with a second therapeutic may be administered to immunocompromised subjects (e.g., those with HIV/AIDS; those with an age-related decline in immunity, immunosenescence, multifactoral immunodeficiency, or elderly or older alduts with an age-related immuodeficiency; cancer and transplant patients who are taking certain immunosuppressive drugs; autoimmune diseases or other physiological conditions expected to warrant immunosuppressive therapy (e.g., within 3 months, within 6 months, or more); and those with inherited diseases that affect the immune system (e.g., congenital agammaglobulinemia, congenital IgA deficiency)). In some embodiments, a therapeutic comprising a string vaccine or a string vaccine in combination with a second therapeutic may be administered to those with an infectious disease. For example, in some embodiments, a therapeutic comprising a string vaccine or a string vaccine in combination with a second therapeutic may be administered to those infected with human immunodeficiency virus (HIV) and/or a hepatitis virus (e.g., HBV, HCV). In some embodiments, a therapeutic comprising a string vaccine or a string vaccine in combination with a second therapeutic may be administered to those with underlying medical conditions. Examples of such underlying medical conditions may include, but are not limited to hypertension, cardiovascular disease, diabetes, chronic respiratory disease, e.g., chronic pulmonary disease, asthma, etc., cancer, and other chronic diseases such as, e.g., lupus, rheumatoid arthritis, chronic liver diseases, chronic kidney diseases (e.g., Stage 3 or worse such as in some embodiments as characterized by a glomerular filtration rate (GFR) of less than 60 mL/min/1.73 m2). In some embodiments, a therapeutic comprising a string vaccine or a string vaccine in combination with a second therapeutic may be administered to overweight or obese subjects, e.g., specifically including those with a body mass index (BMI) above about 30 kg/m2. In some embodiments, a therapeutic comprising a string vaccine or a string vaccine in combination with a second therapeutic may be administered to subjects who have prior diagnosis of COVID-19 or evidence of current or prior SARS CoV-2 infection, e.g., based on serology or nasal swab.

[1111] In some embodiments, a therapeutic comprising a string vaccine or a string vaccine in combination with a second therapeutic may be administered to a subject with a B cell immunodeficiency. In some embodiments, the subject has a reduced ability to produce an antibody response to an antigen.

[1112] In some embodiments, the subject with a B cell immunodeficiency has a reduced ability to produce an antibody response to a vaccination. In some embodiments, the subject with a B cell immunodeficiency has a reduced ability to produce an anti-spike protein antibody response. In some embodiments, the subject with a B cell immunodeficiency can produce a T cell response or does not have a reduced ability to produce a T cell response.

[1113] In some embodiments, the subject with a B cell immunodeficiency is an organ transplant recipient. In some embodiments, the subject with a B cell immunodeficiency received an organ transplant less than 1 year, less than 6 months or less than 3 months after the pharmaceutical composition is administered. In some embodiments, the subject with a B cell immunodeficiency is expected to receive an organ transplant less than 1 year, less than 6 months or less than 3 months prior to the pharmaceutical composition being administered.

[1114] In some embodiments, the subject with a B cell immunodeficiency has a cancer. In some embodiments, wherein the cancer is a B cell cancer. In some embodiments, wherein the B cell cancer is a B cell lymphoma or a B cell leukemia.

[1115] In some embodiments, the subject with a B cell immunodeficiency has an autoimmune disease or condition. In some embodiments, in the autoimmune disease or condition is Addison disease, Anti-NMDA receptor encephalitis, antisynthetase syndrome, Aplastic anemia, autoimmune anemias, Autoimmune hemolytic anemia, Autoimmune pancreatitis, Behcet's Disease, bullous skin disorders, Celiac disease-sprue (gluten-sensitive enteropathy), chronic fatigue syndrome, Chronic inflammatory demyelinating polyneuropathy, chronic lymphocytic leukemia, Crohn's disease, Dermatomyositis, Devic's disease, Erythroblastopenia, Evans syndrome, Focal segmental glomerulosclerosis, Granulomatosis with polyangiitis, Graves disease, Graves' ophthalmopathy, Guillain-Barre syndrome, Hashimoto thyroiditis, idiopathic thrombocytopeniaurpura (ITP), IgA nephropathy, IgA-mediated autoimmune diseases, IgG4-related disease, Inflammatory bowel disease, Juvenile idiopathic arthritis, Multiple sclerosis, Myasthenia gravis, myeloma, non-Hodgkin's lymphoma, Opsoclonus myoclonus syndrome (OMS), Pemphigoid, Pemphigus, pemphigus vulgaris, Pernicious anemia, polymyositis, Psoriasis, pure red cell aplasia, Reactive arthritis, Rheumatoid arthritis, Sarcoidosis, scleroderma, Sjögren syndrome, Systemic lupus erythematosus, Thrombocytopenia purpura, Thrombotic thrombocytopeniarpura, Type I diabetes, Ulcerative colitis, Vasculitis (e.g., vasculitis associated with anti-neutrophil cytoplasmic antibody) and Vitiligo

[1116] In some embodiments, the subject with a B cell immunodeficiency does not have has congenital agammaglobulinemia or congenital IgA deficiency.

[1117] In some embodiments, the subject with a B cell immunodeficiency is receiving an immunosuppressive agent or has received an immunosuppressive agent less than 1 year, less than 6 months or less than 3 months prior to the administering of the pharmaceutical composition. In some embodiments, the immunosuppressive agent is abatacept (e.g. ORENCIA), abrilumab, acalabrutinib, adalimumab, adrenocorticotropic hormone, agatolimod sodium, AJM300, aldesleukin, alefacept, alemtuzumab, alisertib, alvespimycin hydrochloride, alvocidib, ambrisentan (e.g. LETAIRIS), aminocamptothecin, amiselimod, anakinra, andecaliximab, andrographolides (a botanical medicinal herb also known as IB-MS), anifrolumab, antithymocyte Ig, apatinib, apelisib, asparaginase, atacicept, atezolizumab, avelumab, azacitidine, azathioprine, bafetinib, baminercept, baricitinib, basiliximab, becatecarin, begelomab, belatacept, belimumab, bemcentinib, bendamustine, bendamustine (e.g. bendamustine hydrochloride), betalutin with lilotomab, bevacizumab, BIIB033, BIIB059, BIIB061, bimekizumab, binimetinib, bleomycin, blinatumomab, BNZ-1, bortezomib (e.g. VELCADE), brentuximab vedotin, bryostatin 1, bucillamine, buparlisib, busulfan, canakinumab, capecitabine, carboplatin, carfilzomib, carmustine, cediranib maleate, cemiplimab, ceralifimod, cerdulatinib, certolizumab (e.g. certolizumab pegol), cetuximab, chidamide, chlorambucil, CHS-131, cilengitide, cirmtuzumab, cisplatin, cladribine, clazakizumab, clemastine, clioquinol, corticosteroids, cyclophosphamide, cyclosporine, cytarabine, cytotoxic chemotherapy, daclizumab, dalfampridine (e.g. AMPYRA), daprolizumab pegol, daratumumab, dasatinib, defactinib, defibrotide, denosumab, dexamethasone, diacerein, dimethyl fumarate, dinaciclib, diroximel fumarate (e.g. VUMERITY), doxorubicin, doxorubicin (e.g. doxorubicin hydrochloride), durvalumab, duvelisib, duvortuxizumab, eculizumab (e.g. SOLIRIS), efalizumab, eftilagimod alpha, EK-12 (a neuropeptide combination of metenkefalin and tridecactide), elezanumab, elotuzumab (e.g. EMPLICITI), encorafenib, enfuvirtida (e.g. FUZEON), entinostat, entospletinib, enzastaurin, epacadostat, epirubicin, epratuzumab, eritoran tetrasodium, etanercept, etoposide, etrolizumab, everolimus, evobrutinib, filgotinib, fingolimod (e.g. fingolimod hydrochloride), firategrast, fludarabine, fluorouracil, fontolizumab, forodesine hydrochloride, fostamatinib, galunisertib, ganetespib, ganitumab, gemcitabine, gemtuzumab ozogamicin, gerilimzumab, glasdegib, glassia, glatiramer acetate, glembatumumab vedotin, glesatinib, golimumab (e.g. SIMPONI), guadecitabine, hydrocortisone, hydroxychloroquine sulfate, hydroxyurea, ibritumomab tiuxetan, ibrutinib, ibudilast, idarubicin, idebenone, idelalisib, ifosfamide, iguratimod, imatinib, imexon, IMU-838, infliximab, inotuzumab ozogamicin, interferon alfa-2, interferon beta-la, interferon beta-1b, interferon gamma-1, ipilimumab, irofulven, isatuximab, ispinesib, itacitinib, ixazomib, lapatinib, laquinimod, laromustine, ld-aminopterin, leflunomide, lenalidomide, lenvatinib, letrozole (e.g. FEMARA), levamisole, levocabastine, lipoic acid, lirilumab, lonafarnib, lumiliximab, maraviroc (e.g. SELZENTRY), masitinib, mavrilimumab, melphalan, mercaptopurine, methotrexate, methoxsalen, methylprednisone, milatuzumab, mitoxantrone, mizoribine, mocetinostat, monalizumab, mosunetuzumab, motesanib diphosphate, moxetumomab pasudotox, muromonab-CD3, mycophenolate mofetil (e.g. mycophenolate mofetil hydrochloride), mycophenolic acid, namilumab, natalizumab, navitoclax, neihulizumab, nerispirdine, neurovax, niraparib, nivolumab, obatoclax mesylate, obinutuzumab, oblimersen sodium, ocrelizumab, ofatumumab, olokizumab, opicinumab, oprelvekin, osimertinib, otelixizumab, oxaliplatin, oxcarbazepine, ozanimod, paclitaxel, pacritinib, palifermin, panobinostat, pazopanib, peficitinib, pegfilgrastim (e.g. NEULASTA), peginterferon beta-la, pegsunercept (peg stnf-ri), pembrolizumab, pemetrexed, penclomedine, pentostatin, perifosine, pevonedistat, pexidartinib, picoplatin, pidilizumab, pivanex, pixantrone, pleneva, plovamer acetate, polatuzumab vedotin, pomalidomide, ponatinib, ponesimod, prednisone/prednisolone, pyroxamide, R-411, ravulizimab-cwvz (e.g. (ULTOMIRIS), recombinant il-12, relatlimab, rhigf-1, rhigm22, rigosertib, rilonacept, ritonavir (e.g. NORVIR), rituximab, ruxolitinib, SAR442168/PRN2246, sarilumab, secukinumab, selumetinib, simvastatin, sintilimab, siplizumab, siponimod (e.g. MAYZENT), sirolimus (rapamycin), sirukumab, sitravatinib, sonidegib, sorafenib, sotrastaurin acetate, sunitinib, sunphenon epigallocatechin-gallate, tabalumab, tacrolimus (e.g. tacrolimus anhydrous), talabostat mesylate, talacotuzumab, tanespimycin, tegafur/gimeracil/oteracil, tenalisib, terameprocol, teriflunomide, thalidomide, thiarabine, thiotepa, tipifarnib, tirabrutinib, tislelizumab, tivozanib, tocilizumab, tofacitinib, TR-14035, tregalizumab, tremelimumab, treosulfan, ublituximab, umbralisib, upadacitinib, urelumab, ustekinumab, varlilumab, vatelizumab, vedolizumab, veliparib, veltuzumab, venetoclax, vinblastine, vincristine, vinorelbine ditartrate, visilizumab, vismodegib, vistusertib, voriconazole (e.g. VFEND), vorinostat, vosaroxin, ziv-aflibercept or any combination thereof. In some embodiments, the immunosuppressive agent is 2B3-201, 3PRGD2, 4SC-202, 506U78, 6,8-bis(benzylthio) octanoic acid, 68Ga-BNOTA-PRGD2, 852A, 89Zr-DFO-CZP, ABBV-257, ABL001, ABP 501, ABP 710, ABP 798, ABT-122, ABT-199, ABT-263, ABT-348, ABT-494, ABT-555, ABT-874, ABX-1431 HCl, ACP-196, ACP-319, ACT-128800, ACY-1215, AD 452, Ad-P53, ADCT-301, ADCT-402, ADL5859, ADS-5102, AFX-2, AGEN1884, AGEN2034, AGS67E, AlN457, AK106-001616, ALD518, ALKS 8700, ALT-803, ALT-803, ALX-0061, ALXN1007, ALXN6000, AMD3100, AMG 108, AMG 319, AMG 357, AMG 570, AMG 592, AMG 714, AMG 719, AMG 827, AMP-110, AP1903, APL A12, APO866, APX005M, AQ4N, AR-42, ARN-6039, ARQ 531, ARRY-371797, ARRY-382, ARRY-438162, ART-102, ART621, ASK8007, ASN002, ASP015K, ASP1707, ASP2408, ASP2409, ASP5094, AT-101, AT7519M, AT9283, ATA188, ATN-103, ATX-MS-1467, AVL-292, AVP-923, AZD4573, AZD5672, AZD5991, AZD6244, AZD6738, AZD9056, AZD9150, AZD9567, AZD9668, B-701, BAF312, BAY1830839, BBI608, BCD-054, BCD-055, BCD-063, BCD-089, BCD-100, BCD-132, BCD-145, BEZ235, BG00012, BG9924, BGB-3111, BGB-A333, BGG492, BHT-3009, BI 655064, BI 695500, BI 695501, BI 836826, BI-1206, BIBR 796 BS, BIIB017, BIIB023, BIIB057, BIIB061, BIIL 284 BS, BLZ945, BMMNC, BMN 673, BMS-247550, BMS-582949, BMS-817399, BMS-936558, BMS-936564, BMS-945429, BMS-986104, BMS-986142, BMS-986156, BMS-986195, BMS-986205, BMS-986213, BMS-986226, BMS-986251, BNC105P, BOW015, BP1001, BT061, BTT-1023, C105, CAL-101, CAM-3001, CAT-8015, CB-839, CBL0137, CC-1088, CC-115, CC-122, CC-292, CC100, CCI-779, CCX 354-C, CDKI AT7519, CDP323, CDP6038, CDP870, CDX-1127, CDX-301, CE-224535, CF101, CFZ533, CGP 77116, CH-1504, CH-4051, CHR-5154, CHS-0214, CK-2017357, CLAG-M, CLR 131, CMAB008, CMP-001, CNF2024 (BIIB021), CNM-Au8, CNTO 1275, CNTO 136, CNTO 148, CNTO 6785, CP-195543, CP-461, CpG 7909, CPI-1205, CR6086, CRx-102, CS-0777, CS1002, CT-011, CT-1530, CT-P10, CV301, CX-3543, DAC-HYP, DCDT2980S, DI-B4, DPA-714 FDG, DS-3032b, DT2219ARL, DTRM-505, DTRM-555, DTRMWXHS-12, DWP422, E6011, E7449, EK-12, ELND002, ENIA11, EOC202, ETBX-011, F8IL10, FBTA05, FEDAA1106 (BAY85-8101), FGF401, FKB327, FPA008, FR104, FS118, FTY720, G¹⁰⁰, GCS-100, GDC-0199, GDC-0853, GEH120714, GLPG0259, GLPG0634, GNbAC1, GNKG168, GP2013, GP2015, GRN163L, GS-1101, GS-5745, GS-9219, GS-9820, GS-9876, GS-9901, GSK1223249, GSK1827771, GSK2018682, GSK21110183, GSK239512, GSK2618960, GSK2831781, GSK2982772, GSK3117391, GSK3152314A, GSK3196165, GSK3358699, GSK706769, GW-1000-02, GW274150, GW406381, GW856553, GZ402668, HCD122, HE3286, HL2351, HL237, hLL1-DOX (IMMU-115), HLX01, HM71224, HMPL-523, HSC835, HZT-501, ICP-022, IDEC-C2B8, ILV-094, IMGN529, IMMU-114, IMO-2125, INCAGN02385, INCB018424, INCB028050, INCB039110, INCB047986, INCMGA00012, INNO-406, INT131, INT230-6, INVAC-1, IPI-145, IPX056, ISF35, ISIS 104838, ITF2357, JCARH125, JHL1101, JNJ 38518168, JNJ-39758979, JNJ-40346527, JNJ-63723283, JS001, JTE-051, JTX-2011, KB003, KD025, KPT-330, KW-2449, KW-2478, KX2-391, L-778123, LAG525, LAM-002A, LBEC0101, LBH589, LFB-R603, LMB-2, LX3305, LY2127399, LY2189102, LY2439821, LY3009104, LY3090106, LY3300054, LY3321367, LY3337641, M2951, M7824, M923, MBG453, MBP8298, MBS2320, MD1003, MDG013, MDV9300, MDX-1100, MDX-1342, MDX-1411, ME-401, MEDI-522, MEDI-538, MEDI-551, MEDI4920, MGA012, MGCD0103, MGD007, MIS416, MK-0873, MK-4280, MK-4827, MK-8457, MK-8808, MK0359, MK0457, MK0752, MK0782, MK0812, MK2206, MLN1202, MLTA3698A, MM-093, MN-122, MN-166, monoclonal antibody M-T412, monoclonal antibody mono-dgA-RFB4, MOR00208, MOR103, MORAb-022, MP-435, MP470, MRC375, MRG-106, MS-533, MSB11022, MSC2490484A, MT-1303, MT-3724, MTIG7192A, MTRX1011A, NBI-5788, NC-503, NI-0101, NI-071, NIS793, NKTR-214, NNC 0141-0000-0100, NNC 0151-0000-0000, NNC0109-0012, NNC0114-0000-0005, NNC0114-0006, NNC0142-0002, NNC0215-0384, NNC109-0012, NOX-A12, NT-KO-003, NU100, OMB157, OMP-313M32, ON01910 Na, ONO-2506PO, ONO-4641, ONTAK, OPB 31121, OSI-461, OTS167IV, P1446A-05, PBF-509, PBR06, PCI 32765, PCI-24781, PD 0360324, PDA001, PDR001, PF-04171327, PF-04236921, PF-04308515, PF-04629991, PF-05280586, PF-06342674, PF-06410293, PF-06438179, PF-06650833, PF-06651600, PF-06835375, PG-760564, PH-797804, PLA-695, PLX3397, PLX5622, POL6326, PRO131921, PRO283698, PRTX-100, PS-341, PTL201, R(+) XK469, R788, RAD001, RC18, REGN1979, REGN3767, REGN2810, REGN4659, RFT5-SMPT-dgA, RG2077, RGB-03, RGI-2001, RHB-104, RNS60, RO5045337, RO7123520, Rob 803, RPC1063, RWJ-445380, S 55746, SAIT101, SAN-300, SAR245409, SB-681323, SB683699, SBI-087, SC12267 (4SC-101), SCH 727965, SCIO-469, SD-101, SG2000, SGN-40, SHC014748M, SHR-1210, SHR0302, SHR1020, SJG-136, SKI-O-703, SMP-114, SNS-032, SNS-062, SNX-5422, SPARC1103 I, SPC2996, SSR150106, STA 5326 mesylate, Sunpharma1505, SyB L-0501, Sym022, Sym023, SYN060, T-614, T0001, TA-650, TAB08, TAK-715, TAK-783, TAK-901, TGR-1202, TH-302, TL011, TMI-005, TMP001, TNFa Kinoid, TP-0903, TRU-015, TRU-016, TSR-022, TSR-033, TSR-042, TXA127, VAY736, VP-16, VSN16R, VX-509, VX-702, VX-745, VX15/2503, XCEL-MC-ALPHA, XL228, XL844, XmAb13676, XmAb5574, XOMA 052, YRA-1909, Z102, ZEN003365, or any combination thereof. In some embodiments, the immunosuppressive agent is A2aR antagonist, Akt inhibitor, anti CD20, Anti-amyloidotic (AA) Agent, anti-CD37 protein therapeutic, anti-CTLA4 mAb, Anti-CXCR4, anti-huCD40 mAb, anti-LAG3 mAb, anti-PD-1 mAb, anti-PD-L1 agent, anti-PD-L1 agent, anti-PD-L1 mAb, anti-TGFb mAb, anti-TIGIT mAb, anti-TIM-3 mAb, Aurora kinase inhibitor, Bcl-2 Inhibitor, bifunctional fusion protein targeting TGFb and PD-L1, bispecific anti-PD-1 and anti-LAG3 mAb, CD1d ligand, CD40 agonist, Complement C5a inhibitor, CSF1R inhibitor, EZH2 inhibitor, FGFR3 inhibitor, FGFR4 inhibitor, FGFrR3 inhibitor, glucocorticoid-induced tumor necrosis factor receptor-related gene [GITR] agonist, glutaminase inhibitor, Human monoclonal antibody against IL-12, ICOS agonist, IDO1 inhibitor, IL2 mutein, IL2 receptor agonist, MEK inhibitor, multitargeted receptor tyrosine kinase inhibitor, neutrophil elastase inhibitor, Notch Inhibitor, p38 MAPK inhibitor, PD-1 inhibitor, recombinant human Flt3L, ROCK inhibitor, selective sphingosine-1-phosphate receptor modulator, Src kinase inhibitor, TLR4 agonist, TLR9 agonist, or any combination thereof. In some embodiments, the immunosuppressive agent is a Complement C5a inhibitor, a CD40 agonist, a p38 inhibitor, a CSF1R inhibitor, a MEK inhibitor, a neutrophil elastase inhibitor, FGFrR3 inhibitor, anti-LAG3 mAb, Anti-CXCR, glucocorticoid-induced tumor necrosis factor receptor-related gene [GITR] agonist, IDO1 inhibitor, ICOS agonist, glutaminase inhibitor, recombinant human Flt3L, TLR9 agonist, EZH2 inhibitor, anti-CTLA4 mAb, PD-1 inhibitor, PD-L1 inhibitor, anti-PD-L1 mAb, FGFR4 inhibitor, bispecific anti-PD-1 and anti-LAG3 mAb, TLR4 agonist, Bcl-2 Inhibitor, anti-LAG3 mAb, an inhibitor of a cell degradation pathways, or a proteasome inhibitor. In some embodiments, the immunosuppressive agent is adalimumab (e.g., HUMIRA), alemtuzumab (e.g., LEMTRADA), alemtuzumab (e.g., CAMPATH), azathioprine (e.g., IMURAN), belimumab (e.g., BENLYSTA), bevacizumab (e.g., AVASTIN), bortezomib (e.g., VELCADE), eculizumab (e.g., SOLIRIS), leflunomide, brentuximab vedotin (e.g., ADCETRIS), cetuximab (e.g., ERBITUX), cyclophosphamid, dimethyl fumarate (e.g., TECFIDERA), efalizumab (e.g., RAPTIVA), fingolimod (e.g., GILENYA), fludarabine (e.g., FLUDARA), fumaric acid, imatinib (e.g., GLEEVEC, GLIVEC), infliximab (e.g., REMICADE), methotrexate (e.g., TREXALL, RHEUMATREX), mycophenolate mofetil (e.g., CELLCEPT), natalizumab (e.g., TYSABRI), daclizumab (e.g., ZINBRYTA), rituximab (e.g., RITUXAN), vedolizumab (e.g., ENTYVIO), ruxolitinib (e.g., JAKAFI, JAKAVI), or ocrelizumab (e.g., Ocrevus). In some embodiments, the immunosuppressive agent is abatacept (e.g. ORENCIA), abrilumab, acalabrutinib, adalimumab, adrenocorticotropic hormone, agatolimod sodium, AJM300, aldesleukin, alefacept, alemtuzumab, alisertib, alvespimycin hydrochloride, alvocidib, ambrisentan (e.g. LETAIRIS), aminocamptothecin, amiselimod, anakinra, andecaliximab, andrographolides (a botanical medicinal herb also known as IB-MS), anifrolumab, antithymocyte Ig, apatinib, apelisib, asparaginase, atacicept, atezolizumab, avelumab, azacitidine, azathioprine, bafetinib, baminercept, baricitinib, basiliximab, becatecarin, begelomab, belatacept, belimumab, bemcentinib, bendamustine, bendamustine (e.g. bendamustine hydrochloride), betalutin with lilotomab, bevacizumab, BIIB033, BIIB059, BIIB061, bimekizumab, binimetinib, bleomycin, blinatumomab, BNZ-1, bortezomib (e.g. VELCADE), brentuximab vedotin, bryostatin 1, bucillamine, buparlisib, busulfan, canakinumab, capecitabine, carboplatin, carfilzomib, carmustine, cediranib maleate, cemiplimab, ceralifimod, cerdulatinib, certolizumab (e.g. certolizumab pegol), cetuximab, chidamide, chlorambucil, CHS-131, cilengitide, cirmtuzumab, cisplatin, cladribine, clazakizumab, clemastine, clioquinol, corticosteroids, cyclophosphamide, cyclosporine, cytarabine, cytotoxic chemotherapy, daclizumab, dalfampridine (e.g. AMPYRA), daprolizumab pegol, daratumumab, dasatinib, defactinib, defibrotide, denosumab, dexamethasone, diacerein, dimethyl fumarate, dinaciclib, diroximel fumarate (e.g. VUMERITY), doxorubicin, doxorubicin (e.g. doxorubicin hydrochloride), durvalumab, duvelisib, duvortuxizumab, eculizumab (e.g. SOLIRIS), efalizumab, eftilagimod alpha, EK-12 (a neuropeptide combination of metenkefalin and tridecactide), elezanumab, elotuzumab (e.g. EMPLICITI), encorafenib, enfuvirtida (e.g. FUZEON), entinostat, entospletinib, enzastaurin, epacadostat, epirubicin, epratuzumab, eritoran tetrasodium, etanercept, etoposide, etrolizumab, everolimus, evobrutinib, filgotinib, fingolimod (e.g. fingolimod hydrochloride), firategrast, fludarabine, fluorouracil, fontolizumab, forodesine hydrochloride, fostamatinib, galunisertib, ganetespib, ganitumab, gemcitabine, gemtuzumab ozogamicin, gerilimzumab, glasdegib, glassia, glatiramer acetate, glembatumumab vedotin, glesatinib, golimumab (e.g. SIMPONI), guadecitabine, hydrocortisone, hydroxychloroquine sulfate, hydroxyurea, ibritumomab tiuxetan, ibrutinib, ibudilast, idarubicin, idebenone, idelalisib, ifosfamide, iguratimod, imatinib, imexon, IMU-838, infliximab, inotuzumab ozogamicin, interferon alfa-2, interferon beta-la, interferon beta-1b, interferon gamma-1, ipilimumab, irofulven, isatuximab, ispinesib, itacitinib, ixazomib, lapatinib, laquinimod, laromustine, ld-aminopterin, leflunomide, lenalidomide, lenvatinib, letrozole (e.g. FEMARA), levamisole, levocabastine, lipoic acid, lirilumab, lonafarnib, lumiliximab, maraviroc (e.g. SELZENTRY), masitinib, mavrilimumab, melphalan, mercaptopurine, methotrexate, methoxsalen, methylprednisone, milatuzumab, mitoxantrone, mizoribine, mocetinostat, monalizumab, mosunetuzumab, motesanib diphosphate, moxetumomab pasudotox, muromonab-CD3, mycophenolate mofetil (e.g. mycophenolate mofetil hydrochloride), mycophenolic acid, namilumab, natalizumab, navitoclax, neihulizumab, nerispirdine, neurovax, niraparib, nivolumab, obatoclax mesylate, obinutuzumab, oblimersen sodium, ocrelizumab, ofatumumab, olokizumab, opicinumab, oprelvekin, osimertinib, otelixizumab, oxaliplatin, oxcarbazepine, ozanimod, paclitaxel, pacritinib, palifermin, panobinostat, pazopanib, peficitinib, pegfilgrastim (e.g. NEULASTA), peginterferon beta-la, pegsunercept (peg stnf-ri), pembrolizumab, pemetrexed, penclomedine, pentostatin, perifosine, pevonedistat, pexidartinib, picoplatin, pidilizumab, pivanex, pixantrone, pleneva, plovamer acetate, polatuzumab vedotin, pomalidomide, ponatinib, ponesimod, prednisone/prednisolone, pyroxamide, R-411, ravulizimab-cwvz (e.g. (ULTOMIRIS), recombinant il-12, relatlimab, rhigf-1, rhigm22, rigosertib, rilonacept, ritonavir (e.g. NORVIR), rituximab, ruxolitinib, SAR442168/PRN2246, sarilumab, secukinumab, selumetinib, simvastatin, sintilimab, siplizumab, siponimod (e.g. MAYZENT), sirolimus (rapamycin), sirukumab, sitravatinib, sonidegib, sorafenib, sotrastaurin acetate, sunitinib, sunphenon epigallocatechin-gallate, tabalumab, tacrolimus (e.g. tacrolimus anhydrous), talabostat mesylate, talacotuzumab, tanespimycin, tegafur/gimeracil/oteracil, temozolomide, temsirolimus, tenalisib, terameprocol, teriflunomide, thalidomide, thiarabine, thiotepa, tipifarnib, tirabrutinib, tislelizumab, tivozanib, tocilizumab, tofacitinib, TR-14035, tregalizumab, tremelimumab, treosulfan, ublituximab, umbralisib, upadacitinib, urelumab, ustekinumab, varlilumab, vatelizumab, vedolizumab, veliparib, veltuzumab, venetoclax, vinblastine, vincristine, vinorelbine ditartrate, visilizumab, vismodegib, vistusertib, voriconazole (e.g. VFEND), vorinostat, vosaroxin, ziv-aflibercept or any combination thereof. In some embodiments, the immunosuppressive agent is 2B3-201, 3PRGD2, 4SC-202, 506U78, 6,8-bis(benzylthio) octanoic acid, 68Ga-BNOTA-PRGD2, 852A, 89Zr-DFO-CZP, ABBV-257, ABL001, ABP 501, ABP 710, ABP 798, ABT-122, ABT-199, ABT-263, ABT-348, ABT-494, ABT-555, ABT-874, ABX-1431 HCl, ACP-196, ACP-319, ACT-128800, ACY-1215, AD 452, Ad-P53, ADCT-301, ADCT-402, ADL5859, ADS-5102, AFX-2, AGEN1884, AGEN2034, AGS67E, AlN457, AK106-001616, ALD518, ALKS 8700, ALT-803, ALT-803, ALX-0061, ALXN1007, ALXN6000, AMD3100, AMG 108, AMG 319, AMG 357, AMG 570, AMG 592, AMG 714, AMG 719, AMG 827, AMP-110, AP1903, APL A12, APO866, APX005M, AQ4N, AR-42, ARN-6039, ARQ 531, ARRY-371797, ARRY-382, ARRY-438162, ART-102, ART621, ASK8007, ASN002, ASP015K, ASP1707, ASP2408, ASP2409, ASP5094, AT-101, AT7519M, AT9283, ATA188, ATN-103, ATX-MS-1467, AVL-292, AVP-923, AZD4573, AZD5672, AZD5991, AZD6244, AZD6738, AZD9056, AZD9150, AZD9567, AZD9668, B-701, BAF312, BAY1830839, BBI608, BCD-054, BCD-055, BCD-063, BCD-089, BCD-100, BCD-132, BCD-145, BEZ235, BG00012, BG9924, BGB-3111, BGB-A333, BGG492, BHT-3009, BI 655064, BI 695500, BI 695501, BI 836826, BI-1206, BIBR 796 BS, BIIB017, BIIB023, BIIB057, BIIB061, BIIL 284 BS, BLZ945, BMMNC, BMN 673, BMS-247550, BMS-582949, BMS-817399, BMS-936558, BMS-936564, BMS-945429, BMS-986104, BMS-986142, BMS-986156, BMS-986195, BMS-986205, BMS-986213, BMS-986226, BMS-986251, BNC105P, BOW015, BP1001, BT061, BTT-1023, C105, CAL-101, CAM-3001, CAT-8015, CB-839, CBL0137, CC-1088, CC-115, CC-122, CC-292, CC100, CCI-779, CCX 354-C, CDKI AT7519, CDP323, CDP6038, CDP870, CDX-1127, CDX-301, CE-224535, CF101, CFZ533, CGP 77116, CH-1504, CH-4051, CHR-5154, CHS-0214, CK-2017357, CLAG-M, CLR 131, CMAB008, CMP-001, CNF2024 (BIIB021), CNM-Au8, CNTO 1275, CNTO 136, CNTO 148, CNTO 6785, CP-195543, CP-461, CpG 7909, CPI-1205, CR6086, CRx-102, CS-0777, CS1002, CT-011, CT-1530, CT-P10, CV301, CX-3543, DAC-HYP, DCDT2980S, DI-B4, DPA-714 FDG, DS-3032b, DT2219ARL, DTRM-505, DTRM-555, DTRMWXHS-12, DWP422, E6011, E7449, EK-12, ELND002, ENIA11, EOC202, ETBX-011, F8IL10, FBTA05, FEDAA1106 (BAY85-8101), FGF401, FKB327, FPA008, FR104, FS118, FTY720, G100, GCS-100, GDC-0199, GDC-0853, GEH120714, GLPG0259, GLPG0634, GNbAC1, GNKG168, GP2013, GP2015, GRN163L, GS-1101, GS-5745, GS-9219, GS-9820, GS-9876, GS-9901, GSK1223249, GSK1827771, GSK2018682, GSK21110183, GSK239512, GSK2618960, GSK2831781, GSK2982772, GSK3117391, GSK3152314A, GSK3196165, GSK3358699, GSK706769, GW-1000-02, GW274150, GW406381, GW856553, GZ402668, HCD122, HE3286, HL2351, HL237, hLL1-DOX (IMMU-115), HLX01, HM71224, HMPL-523, HSC835, HZT-501, ICP-022, IDEC-C2B8, ILV-094, IMGN529, IMMU-114, IMO-2125, INCAGN02385, INCB018424, INCB028050, INCB039110, INCB047986, INCMGA00012, INNO-406, INT131, INT230-6, INVAC-1, IPI-145, IPX056, ISF35, ISIS 104838, ITF2357, JCARH125, JHL1101, JNJ 38518168, JNJ-39758979, JNJ-40346527, JNJ-63723283, JS001, JTE-051, JTX-2011, KB003, KD025, KPT-330, KW-2449, KW-2478, KX2-391, L-778123, LAG525, LAM-002A, LBEC0101, LBH589, LFB-R603, LMB-2, LX3305, LY2127399, LY2189102, LY2439821, LY3009104, LY3090106, LY3300054, LY3321367, LY3337641, M2951, M7824, M923, MBG453, MBP8298, MBS2320, MD1003, MDG013, MDV9300, MDX-1100, MDX-1342, MDX-1411, ME-401, MEDI-522, MEDI-538, MEDI-551, MEDI4920, MGA012, MGCD0103, MGD007, MIS416, MK-0873, MK-4280, MK-4827, MK-8457, MK-8808, MK0359, MK0457, MK0752, MK0782, MK0812, MK2206, MLN1202, MLTA3698A, MM-093, MN-122, MN-166, monoclonal antibody M-T412, monoclonal antibody mono-dgA-RFB4, MOR00208, MOR103, MORAb-022, MP-435, MP470, MRC375, MRG-106, MS-533, MSB11022, MSC2490484A, MT-1303, MT-3724, MTIG7192A, MTRX1011A, NBI-5788, NC-503, NI-0101, NI-071, NIS793, NKTR-214, NNC 0141-0000-0100, NNC 0151-0000-0000, NNC0109-0012, NNC0114-0000-0005, NNC0114-0006, NNC0142-0002, NNC0215-0384, NNC109-0012, NOX-A12, NT-KO-003, NU100, OMB157, OMP-313M32, ON01910 Na, ONO-2506PO, ONO-4641, ONTAK, OPB 31121, OSI-461, OTS167IV, P1446A-05, PBF-509, PBR06, PCI 32765, PCI-24781, PD 0360324, PDA001, PDR001, PF-04171327, PF-04236921, PF-04308515, PF-04629991, PF-05280586, PF-06342674, PF-06410293, PF-06438179, PF-06650833, PF-06651600, PF-06835375, PG-760564, PH-797804, PLA-695, PLX3397, PLX5622, POL6326, PRO131921, PRO283698, PRTX-100, PS-341, PTL201, R(−) XK469, R788, RAD001, RC18, REGN1979, REGN3767, REGN2810, REGN4659, RFT5-SMPT-dgA, RG2077, RGB-03, RGI-2001, RHB-104, RNS60, RO5045337, RO7123520, Rob 803, RPC1063, RWJ-445380, S 55746, SAIT101, SAN-300, SAR245409, SB-681323, SB683699, SBI-087, SC12267 (4SC-101), SCH 727965, SCIO-469, SD-101, SG2000, SGN-40, SHC014748M, SHR-1210, SHR0302, SHR1020, SJG-136, SKI-O-703, SMP-114, SNS-032, SNS-062, SNX-5422, SPARC1103 I, SPC2996, SSR150106, STA 5326 mesylate, Sunpharma1505, SyB L-0501, Sym022, Sym023, SYN060, T-614, T0001, TA-650, TAB08, TAK-715, TAK-783, TAK-901, TGR-1202, TH-302, TL011, TMI-005, TMP001, TNFa Kinoid, TP-0903, TRU-015, TRU-016, TSR-022, TSR-033, TSR-042, TXA127, VAY736, VP-16, VSN16R, VX-509, VX-702, VX-745, VX15/2503, XCEL-MC-ALPHA, XL228, XL844, XmAb13676, XmAb5574, XOMA 052, YRA-1909, Z102, ZEN003365, or any combination thereof. In some embodiments, the immunosuppressive agent is A2aR antagonist, Akt inhibitor, anti CD20, Anti-amyloidotic (AA) Agent, anti-CD37 protein therapeutic, anti-CTLA4 mAb, Anti-CXCR4, anti-huCD40 mAb, anti-LAG3 mAb, anti-PD-1 mAb, anti-PD-L1 agent, anti-PD-L1 agent, anti-PD-L1 mAb, anti-TGFb mAb, anti-TIGIT mAb, anti-TIM-3 mAb, Aurora kinase inhibitor, Bcl-2 Inhibitor, bifunctional fusion protein targeting TGFb and PD-L1, bispecific anti-PD-1 and anti-LAG3 mAb, CD1d ligand, CD40 agonist, Complement C5a inhibitor, CSF1R inhibitor, EZH2 inhibitor, FGFR3 inhibitor, FGFR4 inhibitor, FGFrR3 inhibitor, glucocorticoid-induced tumor necrosis factor receptor-related gene [GITR] agonist, glutaminase inhibitor, Human monoclonal antibody against IL-12, ICOS agonist, IDO1 inhibitor, IL2 mutein, IL2 receptor agonist, MEK inhibitor, multitargeted receptor tyrosine kinase inhibitor, neutrophil elastase inhibitor, Notch Inhibitor, p38 MAPK inhibitor, PD-1 inhibitor, recombinant human Flt3L, ROCK inhibitor, selective sphingosine-1-phosphate receptor modulator, Src kinase inhibitor, TLR4 agonist, TLR9 agonist, or any combination thereof. In some embodiments, the immunosuppressive agent is a Complement C5a inhibitor, a CD40 agonist, a p38 inhibitor, a CSF1R inhibitor, a MEK inhibitor, a neutrophil elastase inhibitor, FGFrR3 inhibitor, anti-LAG3 mAb, Anti-CXCR, glucocorticoid-induced tumor necrosis factor receptor-related gene [GITR] agonist, IDO1 inhibitor, ICOS agonist, glutaminase inhibitor, recombinant human Flt3L, TLR9 agonist, EZH2 inhibitor, anti-CTLA4 mAb, PD-1 inhibitor, PD-L1 inhibitor, anti-PD-L1 mAb, FGFR4 inhibitor, bispecific anti-PD-1 and anti-LAG3 mAb, TLR4 agonist, Bcl-2 Inhibitor, anti-LAG3 mAb, an inhibitor of a cell degradation pathways, or a proteasome inhibitor.

[1118] In some embodiments, the immunosuppressive agent is a sphingosine-1-phosphate receptor and/or nicotinic acetylcholine receptor modulator. In some cases, the immunosuppressive medications can be therapeutic antibodies, including Immunoglobulin G. In some cases, the immunosuppressive medications can be asparaginase inhibitors. In some cases, the immunosuppressive medications can be B-lymphocyte stimulator (BLyS)-specific inhibitor. In some cases, the immunosuppressive medications can be T-cell costimulation modulators. In some cases, the immunosuppressive medications can be cyclic polypeptide immunosuppressants and/or synthetic polypeptides that modify immune processes. In some cases, the immunosuppressive medications can be corticosteroids. In some cases, the immunosuppressive medications can be cytotoxic chemotherapy drugs. In some cases, the immunosuppressive medications can be cytotoxic glycopeptide antibiotics and/or mixtures thereof. In some cases, the immunosuppressive medications can be molecules that inhibit pro-inflammatory cytokine production. In some cases, the immunosuppressive medications can be thalidomide analogues. In some cases, the immunosuppressive medications can be inhibitors of RANKL (receptor activator of nuclear factor kappa-B ligand). In some cases, the immunosuppressive medications can be inhibitors of histone deacetylase (HDAC). In some cases, the immunosuppressive medications can be inhibitors of heat shock protein 90 (HSP90). In some cases, the immunosuppressive medications can be inhibitors of cytidine deaminase (CDA). In some cases, the immunosuppressive medications can be inhibitors of Hedgehog signaling pathway (including Sonic hedgehog and Smoothened). In some cases, the immunosuppressive medications can be inhibitors of alpha-1-proteinase. In some cases, the immunosuppressive medications can be inhibitors of cyclooxygenase 2 (COX2). In some cases, the immunosuppressive medications can be inhibitors of complement (C5a). In some cases, the immunosuppressive medications can be inhibitors of colony stimulating factor 1 receptor (CSF1R). In some cases, the immunosuppressive medications can be inhibitors of Notch. In some cases, the immunosuppressive medications can be inhibitors of kinesin. In some cases, the immunosuppressive medications can be inhibitors of farnesyltransferase. In some cases, the immunosuppressive medications can be inhibitors of poly(ADP-ribose) polymerase (PARP). In some cases, the immunosuppressive medications can be inhibitors of Neural Precursor Cell Expressed, Developmentally Down-Regulated (NEDD8). In some cases, the immunosuppressive medications can be inhibitors of dipeptidyl peptidase IV (DPP-IV). In some cases, the immunosuppressive medications can be inhibitors of leucine-rich repeat kinase 2 (LRRK2). In some cases, the immunosuppressive medications can be inhibitors of immune checkpoint proteins. In some cases, the immunosuppressive medications can be inhibitors of indoleamine 2,3-dioxygenase-1 (IDO1). In some cases, the immunosuppressive medications can be inhibitors of chemokine receptors (CCR4, CCR5, CCR7). In some cases, the immunosuppressive medications can be immunosuppression-inducing therapies such as T-cells or regulatory T-cells modified with a chimeric antigen receptor (CAR-T, CAR-Tregs). In some cases, the immunosuppressive medications can be structured lipids. In some cases, the immunosuppressive medications can be Ras mimetic. In some cases, the immunosuppressive medications can be inhibitors of NOD-like receptor pyrin domain-containing protein 3 (NLRP3). In some cases, the immunosuppressive medications can be mTOR and/or calcineurin inhibitors. In some cases, the immunosuppressive medications can be complement inhibitors. In some cases, the immunosuppressive medications can be immunosuppressive antimetabolites, nucleoside metabolic inhibitors, imidazole nucleosides, nucleotide analogs, nucleoside synthesis inhibitors, purine synthesis inhibitors, pyrimidine synthesis inhibitors, or pyrimidine synthase inhibitors. In some cases, the immunosuppressive medications can be recombinant proteins, such as recombinant interferon beta, IL-2, IL-11, Lymphotoxin B fusion protein, Therapeutic T cell receptor peptide vaccine, Keratinocyte growth factor, or Tumor necrosis factor (TNF) receptor.

[1119] In some cases, the immunosuppressive medications can be DNA and/or RNA crosslinking agents, including alkylating agents, nitrogen mustard alkylating agents, topoisomerase inhibitors, anthracyclines, and platinum-based anticancer drugs. In some cases, the immunosuppressive medications can be kinase inhibitors, including phosphoinositide-3-kinase, cyclin-dependent kinase (e.g., CDK9), Aurora kinase, ROCK, Akt, or PKC. In some cases, the immunosuppressive medications can be tyrosine kinase inhibitors, including inhibitors of the fusion protein breakpoint cluster region-Abelson murine leukemia viral oncogene homolog 1 (BCR-ABL), Bruton's tyrosine kinase (BTK), epidermal growth factor receptor (EGFR), Janus kinase (JAK), Syk, Lyn, MEK, FAK, BRAF, AXL, or vascular endothelial growth factor (VEGF). In some cases, the immunosuppressive medications can be monoclonal antibodies and/or antibody-drug conjugates directed at proteins including cluster of differentiation (CD) proteins, such as CD2, CD3, CD11a, CD20, CD30, CD52, CD-19, CD-38, CD-26, CD-37, CD-22, CD-33, CD-23, CD-74, CD-162, CD-79, CD-123, CD-4, CD-137, CD-27, CD-36, CD-39, CD-73, CD-226, CD-155, CD-40; interleukins (IL), such as IL-1, IL-2, IL-6, IL-12, IL-23; tumor necrosis factor (TNF) family proteins, such as TNFα; and integrins, such as integrin α4, αvβ3, αvβ5, αvβ3, or α2. In some cases, the immunosuppressive medications can be monoclonal antibodies and/or antibody-drug conjugates directed at Programmed cell death receptor 1 (PD-1), Programmed cell death ligand 1 (PD-L1), Cytotoxic T-lymphocyte associated protein 4 (CTLA-4), Lymphocyte activation gene 3 (LAG-3), T-cell immunoglobulin and mucin-domain containing-3 (TIM-3), T-cell immunoreceptor with Ig and ITIM domains (TIGIT), also known as WUCAM or Vstm3, B and T lymphocyte attenuator (BTLA), Glucocorticoid-induced TNFR family related gene (GITR), OX40, HSP90, killer-cell immunoglobulin-like receptor (KIR), Toll-like receptor 9 (TLR9), Toll-like receptor 4 (TLR4), Matrix metallopeptidase 9 (MMP), Interferon receptor, Interferon gamma, Transforming growth factor 1b (TGF1BD, Insulin growth factor 1 receptor (IGF1 R), Fibroblast growh factor receptor (FGFrR3, FGFR4), Neuromedin B, Granulocyte-macrophage colony stimulating factor receptor (GM-CSF R), Natural killer cell receptor (NKG-2a), Leucine rich repeat and Immunoglobin-like domain-containing protein 1 (LINGO1), B-cell activating factor (BAFF), Inducible T-cell co-stimulator (ICOS). In some cases, the monoclonal antibody/antibody-drug conjugate can activate the target.

[1120] In some embodiments, the subject with a B cell immunodeficiency can be currently treated with an immunosuppressive medication. In some embodiments, a subject can be previously treated with an immunosuppressive medication. In some embodiments, a subject can be not yet treated with an immunosuppressive medication. The immunosuppressive medication can include but not limited to glucocorticoids, cytostatics, antibodies, drugs acting on immunophilins, interferons, opioids, TNF binding proteins, mycophenolate, or other small biological agents. For example, glucocorticoids can include but not limited to cortisol (hydrocortisone), cortisone, prednisone, prednisolone, methylprednisolone, dexamethasone, betamethasone, triamcinolone, beclometasone, fludrocortisone acetate, deoxycorticosterone acetate (DOCA), or aldosterone. Cytostatics can include but not limited to nitrogen mustards (e.g., cyclophosphamide), nitrosoureas, platinum compounds, folic acid analogues such as methotrexate, purine analogues such as azathioprine and mercaptopurine, pyrimidine analogues such as fluorouracil, protein synthesis inhibitors, cytotoxic antibiotics such as dactinomycin, anthracyclines, mitomycin C, bleomycin, or mithramycin. Antibodies can include but not limited to polyclonal antibodies such as atgam and thymoglobuline, monoclonal antibodies such as CD25- and CD3-directed antibodies, muromonab-CD3, basiliximab (e.g., SIMULECT), and daclizumab (e.g., ZENAPAX). Drugs acting on immunophilins can include but not limited to ciclosporin, tacrolimus, sirolimus, or everolimus. TNF binding proteins can include but not limited to infliximab (e.g., REMICADE), etanercept (e.g., ENBREL), or adalimumab (e.g., HUMIRA). Other small biological agents can include but not limited to fingolimod, myriocin, and rituximab (e.g., RITUXAN).

[1121] In some embodiments, the subject with a B cell immunodeficiency can be diagnosed or undiagnosed with a condition (e.g., disease or disorder), can be asymptomatic or symptomatic, can have increased or decreased susceptibility to a condition (e.g., disease or disorder), can be currently under or previously under or not under a treatment for a condition (e.g., disease or disorder), or any combination thereof. In some embodiments, the condition can be AIDS, cancer, organ transplant, or an autoimmune disease. In some embodiments, the condition can be an age-related decline in immunity, or immunosenescence, or multifactoral immunodeficiency, or an age-related immuodeficiency.

[1122] In some embodiments, the subject with a B cell immunodeficiency can be diagnosed or undiagnosed with AIDS (e.g., individuals infected with HIV), can be asymptomatic or symptomatic, can have increased or decreased susceptibility to AIDS, can be currently under or previously under or not under a treatment for AIDS, or any combination thereof. In some embodiments, a subject can be diagnosed or undiagnosed with cancer (e.g., Hodgkin's disease, leukemia, lymphoma, or myelofibrosis), can be asymptomatic or symptomatic, can have increased or decreased susceptibility to cancer, can be currently under or previously under or not under a treatment for cancer, or any combination thereof. In some embodiments, a subject can be currently diagnosed or previously diagnosed or undiagnosed with an autoimmune disease (e.g., multiple sclerosis, rheumatoid arthritis, psoriasis, systemic lupus erythematosus), can be asymptomatic or symptomatic, can have increased or decreased susceptibility to an autoimmune disease, can be currently under or previously under or not under a treatment for an autoimmune disease, or any combination thereof.

[1123] In some embodiments, the string vaccine described herein may confer resistance, cross protection and generate immunogenicity against other SARS viruses or to a variety of viral strains having similarity to the 2019 SARS-Cov 2.

### Kits

[1124] The viral epitope therapeutic described herein can be provided in kit form together with instructions for administration. Typically, the kit would include the desired antigen therapeutic in a container, in unit dosage form and instructions for administration. Additional therapeutics, for example, cytokines, lymphokines, checkpoint inhibitors, antibodies, can also be included in the kit. Other kit components that can also be desirable include, for example, a sterile syringe, booster dosages, and other desired excipients.

[1125] The present disclosure will be described in greater detail by way of specific examples. The following examples are offered for illustrative purposes, and are not intended to limit the present disclosure in any manner. Those of skill in the art will readily recognize a variety of non-critical parameters that can be changed or modified to yield alternative embodiments according to the present disclosure. All patents, patent applications, and printed publications listed herein are incorporated herein by reference in their entirety.

### EXAMPLES

### Example 1: Sequence-Based Prediction of Vaccine Targets for Inducing T Cell Responses to SARS-COV-2

[1126] Coronaviruses are positive-sense single-stranded RNA viruses that have occasionally emerged from zoonotic sources to infect human populations. Most coronavirus infections cause mild respiratory symptoms. However, some recent coronavirus infections have resulted in serious morbidity and mortality, including the severe acute respiratory syndrome coronavirus (SARS-CoV), Middle East respiratory syndrome coronavirus (MERS-CoV) and 2019 SARS-CoV-2, which is responsible for the current worldwide pandemic, COVID-19. These three viruses belong to the genus Betacoronaviridae. SARS-CoV was identified in South China in 2002 and its global spread led to 8,096 cases and 774 deaths. The first case of MERS-CoV emerged in 2012 in Saudi Arabia, and since then a total of 2,494 cases and 858 associated deaths have been reported. In contrast to the more limited scope of these other coronavirus infections, SARS-CoV-2, which emerged in Wuhan, China at the end of December 2019, has resulted in 4,077,355 cases, including 279,043 deaths globally as of May 9, 2020. The rapid spread of SARS CoV-2 has resulted in the World Health Organization declaring a global pandemic. Thus, there is an urgent need for effective vaccines and antiviral treatments against SARS CoV-2 to reduce the spread of this highly infectious agent.

[1127] The genome of SARS CoV-2 spans 30 kilobases in length and encodes for 13 open reading frames (ORFs), including four structural proteins. These structural proteins are the spike protein(S), the membrane protein (M), the envelope protein (E), and the nucleocapsid protein (N). In addition, there are over 20 non-structural proteins that account for all the proteins involved in the transcription and replication of the virus. All encoded proteins of the virus are potential candidates for developing vaccines to induce robust T cell immunity.

[1128] SARS-CoV and SARS CoV-2 share 76% amino acid identity across the genome. This high degree of sequence similarity allows us to leverage the previous research on protective immune responses to SARS-CoV to aid in vaccine development for SARS-CoV-2. Both humoral and cellular immune responses have been shown to be important in host responses to SARS-CoV. Antibody responses generated against the S and the N proteins have shown to protect from SARS-CoV infection in mice and have been detected in SARS-CoV infected patients. However, the antibody responses detected against the S protein were undetectable in patients six years post-recovery. In addition, higher titers of antibodies have been found in more severe clinical cases of viral infection suggesting that a robust antibody response alone may be insufficient for controlling SARs-COV and SARS CoV-2 infection.

[1129] Together with B cell immunity, T cell responses seem important in the immune response's control of SARS-CoV and is most likely important for the control of SARS-CoV-2. In mice, studies have shown that adoptive transfer of SARS-CoV-specific memory CD8+ T cells provided protection against a lethal SARS-CoV infection in aged mice and that adoptive transfer of effector CD4+ and CD8+ T cells to immunodeficient or young mice expedited virus clearance and improved clinical results. Both CD4+ and CD8+ T cell responses have also been detected in SARS-CoV and SARS-CoV-2-infected patients. Additionally, SARS-CoV specific memory CD8+ T cells have been found to persist for up to 11 years post-infection in patients who recovered from SARS. These viral specific CD8+ T cells can be cytotoxic and can kill virally infected cells to reduce disease severity. In addition to having effector functions, CD4+T cells can promote the production of virus-specific antibodies by activating T-dependent B cells. Given the wealth of data from SARS-CoV, the homology between the SARS CoV-2 and SARS-CoV, as well as emerging data from SARS-CoV-2, T cell immunity likely plays a critical role in providing protection against SARS-CoV-2.

[1130] Here, we utilized mass spectrometry (MS)-based HLA-I and HLA-II epitope binding prediction tools to identify SARS CoV-2 epitopes recognized by CD4+ and CD8+ T cells. These binding predictors were trained on high-quality mono-allelic HLA immunopeptidome data generated via MS. The use of MS for the identification of MHC peptide ligandome yields an extensive and relatively unbiased population of naturally processed and presented MHC binding peptides in vivo. Unlike traditional binding assays which rely on chemical synthesis and a priori knowledge of peptides and ligands to be assayed, MS uses natural peptide-MHC complexes which are subject to the endogenous processing and presentation pathways within the cell. Additionally, the use of engineered mono-allelic cell lines avoids dependence on in-silico deconvolution techniques and allows for allele coverage to be expanded in a targeted manner.

[1131] With this approach, we generated binding predictors for 74 HLA-I and 83 HLA-II alleles. Alleles selected for data collection were prioritized to maximize population coverage. This MS data enabled us to train allele-specific neural network-based binding predictors that outperform the leading affinity-based predictors for both HLA-I and HLA-II. Furthermore, we demonstrated in Abelin et al., 2019 that this improved binding prediction led to improved immunogenicity prediction by validating this approach on a data set of immune responses to a diverse collection of pathogens and allergens. Here, we specifically validated the binding predictors utilizing Coronaviridae family peptides that had been assayed for T cell reactivity or MHC binding from the Virus Pathogen Resource (ViPR) database. The ViPR database integrates viral pathogen data from internally curated data, researcher submissions, and data from various external sources. Our approach provides a significant improvement in both the breadth of predictions, and their validity, compared with a recent study that had a similar aim, but relied upon a smaller validation data set and fewer covered alleles, leading to a much more limited set of bioinformatically predicted SARS CoV-2 epitopes.

[1132] We used our MS-based HLA-I and HLA-II binding predictors to predict the binding potential of peptide sequences from across the entire SARS CoV-2 genome for a broad set of HLA-I and HLA-II alleles, covering the vast majority of USA, European, and Asian populations. We additionally confirm that a subset of these epitopes can raise specific CD8+ T cell responses in T cell induction assays using donor PBMCs. Furthermore, we interrogate publicly available proteomics data and demonstrate that the relative expression of multiple SARS CoV-2 proteins in virally infected cells vary significantly, indicating another parameter that should be considered in vaccine design to induce cellular immunity. Epitopes predicted to have a high likelihood of binding to multiple HLA-I and HLA-II alleles and exhibit high expression in infected human cells are promising vaccine candidates to elicit T cell responses against SARS-CoV-2.

### METHODS

Analysis of Coronaviridae Family T Cell Epitopes from ViPR

[1133] Experimentally determined epitopes for the Coronaviridae family for human hosts were retrieved from the ViPR database (viprbrc.org/; accessed Mar. 5 2020). To build a validation dataset, both positives and negatives for T cell assays and MHC binding assays were obtained. Only assays associated with alleles identified with at least four-digit resolution and supported by our predictors were included for this analysis.

[1134] Positive calls were prioritized-that is, if a given peptide-allele pair was assayed multiple times by a specific assay type and was determined to be positive in any single one of the assays, the peptide-allele pair was classified as positive. Specifically, the priority was given by the following order: Positive-High>Positive-Intermediate>Positive-Low>Positive>Negative (e.g., a peptide allele pairing that was assayed three times with the results Positive-High, Positive, and Negative were assigned a Positive-High result). Of note, alternative approaches such as prioritizing negative assay results, or random choice in cases of multiple results, yielded very similar results (data not shown).

### Binding Prediction for ViPR Coronaviridae Family T Cell Epitopes

[1135] Peptide-HLA-I allele pairs in the ViPR validation dataset were scored using our HLA-I binding predictor, a neural network trained on mono-allelic MS data. Similarly, peptide-HLA-II allele pairs in the ViPR validation dataset were scored using our HLA-II binding predictor, a recently published convolutional neural network-based model also trained on mono-allelic MS data. We scored all 12-20mers contained within a given assay peptide with the HLA-II binding predictor and took the maximum score as the representative binding score for the assay peptide. In vitro MHC binding assays, which represent the vast majority of the ViPR dataset, do not require endogenous processing and presentation for a positive binding result. Since our binding predictor, which is trained on naturally processed and presented ligands observed via MS, is also implicitly learning these endogenous processing rules, we score all potential ligands within an assayed peptide (rather than just the full-length assay peptide itself) to account for this distinction.

### Retrieval of 2019 SARS CoV-2 Sequence

[1136] The GenBank reference sequence for 2019 SARS CoV-2 (accession: NC_045512.2) was used for this study. All twelve annotated open reading frames (ORF1a, ORF1b, S, ORF3a, E, M, ORF6, ORF7a, ORF7b, ORF8, N, and ORF10) were considered as sources of potential epitopes. In addition, due to its high expression level in recently published proteomic datasets, ORF9b, as annotated by UniProt (PODTD2), was also used for epitope predictions.

### Identification of HLA-I Epitopes and Prioritization by Population Coverage

[1137] To identify candidate HLA-I epitopes, we exhaustively scored all possible 8-12mer peptide sequences from 2019 SARS CoV-2 with our HLA-I binding predictor for 74 alleles, including 21 HLA-A alleles, 35 HLA-B alleles, and 18 HLA-C alleles. Peptide-allele pairs were assigned a percent rank by comparing their binding scores to those of 1,000,000 reference peptides (selected from a partition of the human proteome that had not been used for model training) for the same respective allele. Peptide-allele pairs that scored in the top 1% of the scores of these reference peptides were considered strong potential binders.

[1138] Since a vaccine should ideally benefit a large fraction of the population, these top-ranking peptides were then prioritized based on expected population coverage, given all the alleles each peptide was expected to bind to (i.e., all the alleles for which the peptide scored in the top 1%). The estimate of population coverage for each peptide was calculated as:

coverage=1-Π_{loci}(1-Σ_{locus alleles} f_{allele,avg)}²

where f_{allele,avg} is the (unweighted) average allele frequency across the USA, European, and Asian Pacific Islander (API) populations, and the cumulative product taken across the three HLA-I loci: HLA-A, HLA-B, and HLA-C. The cumulative product itself represents the chance that an individual in the population does not express any one of the contained alleles; hence, the complement describes the probability that at least one is present.

[1139] The USA population allele frequency is calculated as the following weighted average of a few subpopulations: 0.623*EUR+0.133*AFA+0.068*API+0.176*HIS, where EUR=European, AFA=African American, API=Asian Pacific Islander, and HIS=Hispanic populations. For alleles where AFA, HIS, or API population frequencies were not available, the USA population allele frequency values were set to match EUR. Missing API allele frequency values were conservatively imputed with 0 for our analyses.

[1140] We then constructed two types of ranked lists of HLA-I epitopes by coverage. The first ranks all SARS CoV-2 epitopes by their absolute coverage, such that peptides predicted to bind similar collections of alleles would be ranked similarly This approach provides the full list of predicted class I epitopes sorted by the expected coverage for each peptide, with the generous assumption that every binding prediction is correct.

[1141] The second type of list, referred to as a “disjoint” list, is constructed in an iterative fashion where the peptide with the greatest coverage is selected first, and then the coverage for the remaining epitopes is updated to nullify contributions from any alleles that have already been selected (Table 6). Disjoint lists were generated for M, N, and S proteins (the most highly expressed structural proteins) individually, instead of across the entire 2019 SARS CoV-2 genome, to provide protein-level prioritizations. This approach produces a parsimonious list of peptides that is designed to maximize cumulative population coverage with the fewest number of selections and was used to generate FIG. 4A (left), and FIG. 4B (Upper Panel).

### Identification of HLA-II Epitopes and Prioritization by Population Coverage

[1142] To identify HLA-II epitopes, we used our MS-based HLA-II binding predictor to score all 12-20mer sequences in the SARS CoV-2 proteome to predict both binding potential and the likely binding core within each 12-20mer. Scoring was performed across all supported HLA-II alleles, consisting of 46 HLA-DR alleles, 17 HLA-DP alleles, and 20 HLA-DQ alleles.

[1143] Peptide-allele pairs were assigned a percent rank by comparing their binding scores to those of 100,000 reference peptides (as before, sampled from a partition of the human proteome that was held out from training). Pairs scoring in the top 1% were deemed likely to bind. Additionally, we define the “epitope” of a 12-20mer to be the predicted binding core within the sequence. As such, overlapping 12-20mers with the same predicted binding core for a given allele would constitute a single epitope. Table 5 shows counts of these epitopes.

[1144] Additionally, we prioritized predicted HLA-II binding 25mers in SARS CoV-2 by population coverage, given the desire to design vaccines that are effective broadly across the global population. To do this, we associated each 25mer with all subsequences that were likely binders and calculated the population coverage of the corresponding HLA-II alleles. Given a collection of alleles, we calculated the coverage as described in the previous section, the only difference being the cumulative product is taken across the following four HLA-II loci: HLA-DRB1, HLA-DRB3/4/5, HLA-DP, and HLA-DQ. HLA-II allele frequencies were obtained from and Allele Frequency Net Database.

[1145] As with HLA-I, two types of sorted lists of predicted binding sequences were generated. The first type ranks every predicted SARS CoV-2 25mer by absolute coverage provided by the HLA-II alleles to which a constituent subsequence is expected to bind. The second type of ranking was again performed for predicted binders in M, N, and S proteins individually, using disjoint coverage, to maximize cumulative population coverage with a parsimonious list of peptides (Table 7). This was used to generate FIG. 4A (right), and FIG. 4B (Lower Panel).

### Comparison of Predicted Epitopes to the Human Proteome

[1146] 8-12mer sequences (corresponding to predicted HLA-I epitopes), 9mer sequences (corresponding to predicted HLA-II binding cores), and 25mer sequences (corresponding to predicted HLA-II sequences that bound multiple alleles) from SARS CoV-2 were compared against all subsequences of the same length from the human proteome, using UCSC Genome Browser genes with hg19 annotation of the human genome and its protein coding transcripts (63,691 entries). Exact matches were identified and omitted from the disjoint coverage ranking analysis to avoid prioritizing peptides that may inadvertently induce an autoimmune response. No exact matches were found for the predicted HLA-II binding cores or 25mer sequences.

### T Cell Induction and Assessment of Peptide-MHC Positive T Cell Responses

[1147] Human PBMCs from HLA-A02:01-positive human donors were isolated using Ficoll separation from apheresis material (AllCells, USA). Twenty three SARS CoV-2 epitopes predicted to be strong binders to HLA-A02:01 were pooled by similar binding potential, with up to 6 peptides per pool. The selected peptides represent high ranking peptides predicted to bind HLA-A02:01 from across the S, N, M, E, and ORF1ab proteins, avoiding sequences also prioritized by Grifoni et al. Five of the 23 peptide sequences are also found in SARS-CoV and were previously assayed and confirmed as HLA-A02:01 binders in ViPR. PBMCs were incubated with peptide pools, matured, and cultured in the presence of IL-7 and IL-15 (CellGenix GmbH, Germany) to promote T cell growth. Cells were then harvested and the frequency of CD8+ T cells specific to peptide-MHC (pMHC) were assayed using combinatorial coding of pMHC multimers. pMHC multimers were prepared as described elsewhere by the Applicants. Briefly, biotinylated HLA-A02:01 monomers loaded with UV cleavable peptides were exchanged under UV light with SARS CoV-2 predicted peptides. The streptavidin labelled fluorophores PE, APC, BV421 (Biolegend, Inc., USA), BV650 and BUV395 (BD Biosciences, USA) were added to UV exchanged monomers to create fluorescently labelled multimer reagents. Harvested cells were then stained with LIVE/DEAD Fixable Near-IR Dead Cell Stain Kit for 633 or 635 nm excitation (Life Technologies Corporation, USA), anti-CD4 FITC, anti-CD14 FITC, anti-CD16 FITC, and anti-CD19 FITC (BD Biosciences, USA) and anti-CD8 AF700 (Biolegend Inc., USA). Only live CD8+ T cells staining for both fluorochromes of the relevant pMHC multimers were considered positive. Samples were analyzed on FACS LSR Fortessa 18 X20 cytometers (BD Biosciences) and data was analyzed using FlowJo (TreeStar). The respective peptides used in the assay are displayed in Table 4.

TABLE 4
Viral epitopes and T cell induction

| | | No. Donors with | |
|---|---|---|---|
| | | pMHC specific | Confirmed |
| Protein | Sequence | T tells | in VIPR |
| Envelope protein (E) | FLAFVVFLL | | |
| Envelope protein (E) | FLAFVVFLLV | | |
| Envelope protein (E) | FLLVTLAIL | | |
| Envelope protein (E) | FLAFVVFL | 2 | |
| Membrane glycoprotein (M) | FLWLLWPVTL | | |
| Membrane glycoprotein (M) | FLYIIKLIFL | | |
| Membrane glycoprotein (M) | FLFLTWICL | 2 | |
| Membrane glycoprotein (M) | KLLEQWNL | | |
| Nucleocapsid phosphoprotein (N) | KLDDKDPNF | 2 | |
| Nucleocapsid phosphoprotein (N) | DLDDFSKQL | | |
| Nucleocapsid phosphoprotein (N) | YLGTGPEAGL | 2 | |
| Nucleocapsid phosphoprotein (N) | ILLNKHIDA | | + |
| Nucleocapsid phosphoprotein (N) | LLLDRLNQL | 1 | + |
| ORF1ab polyprotein | FGDDTVIEV | 3 | |
| ORF1ab polyprotein | FLLPSLATV | 2 | |
| ORF1ab polyprotein | WLMWLIINL | | |
| ORF1ab polyprotein | ALWEIQQV | | |
| Spike protein (S) | SLIDLQEL | | |
| Spike protein (S) | NLNESLIDL | | + |
| Spike protein (S) | KLNDLCFTNV | 2 | |
| Spike protein (S) | GLTVLPPLL | 1 | |
| Spike protein (S) | FIAGLIAIV | 2 | + |
| Spike protein (S) | RLQSLQTYV | 3 | + |

### Analysis of Publicly Available SARS CoV-2 Proteomic Datasets

[1148] 2019 SARS CoV-2 proteomic datasets were downloaded from the PRIDE repository (Bojkova et al.: PXD017710; Bezstarosti et al.: PXD018760; Davidson et al.: PXD018241). In these studies, either Caco-2 human colorectal adenocarcinoma cells (Bojkova) or Vero E6 African green monkey kidney epithelial cells (Bezstarosti and Davidson) were subject to infection with 2019 SARS-CoV-2. Tandem mass spectra (MS/MS) acquired with data-dependent acquisition (DDA) were interpreted using Spectrum Mill MS Proteomics software package v7.0 pre-release (Agilent Technologies). Cysteine carbamidomethylation was selected as a fixed modification. Methionine oxidation, asparagine deamidation, protein N-termini acetylation, peptide N-terminal glutamine to pyroglutamic acid, and peptide N-terminal cysteine pyro-carbamidomethylation were selected as variable modifications. For the Bojkova dataset which employed isobaric mass tags, TMT11 was added as a fixed modification to peptide N-termini and lysines, and 13C6-15N2-TMT11-lysine and ¹³C₆-¹⁵N₄-arginine were added as variable modifications. All datasets were searched against the 2019 SARS CoV-2 proteome (UniProtKB, 28 Apr. 2020, 14 entries) concatenated to databases containing either the Homo sapiens proteome (Bojkova, UCSC Genome Browser hg19 annotation, 63691 entries) or the Chlorocebus sabaeus proteome (Bezstarosti and Davidson, UniProtKB, 9229 entries). Precursor and fragment mass tolerances were set as described in each manuscript, or as 20 ppm when not specified. Database search results were exported as a list of peptide-spectrum matches (PSMs) with a target-decoy based false discovery rate (FDR) estimation of 1%. Individual fractions from each study were combined into a single list. To perform spectral counting, PSMs assigned to a single 2019 SARS CoV-2 protein were counted, with ORF1a and ORF1ab treated as a single protein group. Peptides matched to both a host and SARS CoV-2 protein were discarded. Spectral counts were normalized to the length of each protein, and the maximum value within each dataset was set to 100%.

### RESULTS

### Bioinformatics Predictor Validation for Viral Epitopes Using ViPR

[1149] We first sought to validate the ability of our predictors to identify epitopes from genomes of the Coronaviridae family. Since SARS CoV-2 only emerged recently, specific data on SARS CoV-2 peptide MHC-binding and immunogenic epitopes are currently limited. However, other viruses from the Coronaviridae family have been studied thoroughly, specifically MERS-CoV and SARS-CoV. The latter has significant sequence homology to 2019 SARS-CoV-2. We therefore sought to leverage previously tested epitopes from across the Coronaviridae family to validate our predictions of viral peptides, with special interest in peptide sequences that exactly matched protein sequences of the novel 2019 SARS COV-2 virus. To that end, we used the ViPR database, which lists the results of T cell immunogenicity and MHC peptide-binding assays for both HLA-I and HLA-II alleles for viral pathogen epitopes. We used all assays of Coronaviridae family viruses with human hosts from ViPR as our validation dataset. Assays that did not have an associated four-digit HLA allele or were associated with an allele our models did not support were omitted.

[1150] For HLA-I, within the validation dataset there were a total of 4,445 unique peptide-HLA allele pairs that were assayed for MHC-binding, using variations of: 1) cellular MHC or purified MHC; 2) a direct or competitive assay; and 3) measurement by fluorescence or radioactivity. Two additional peptide-MHC allele pairs were confirmed via X-ray crystallography. Depending on the study from which the data was collected, peptide-MHC allele pairs were either defined in ViPR simply as “Negative” and “Positive” for binding, or with a more granular scale of positivity: Low, Intermediate, and High. We assigned peptide-MHC allele pairs with multiple measurements with the highest MHC-binding detected across the replicates (see Methods).

[1151] We then applied our HLA-I binding predictor to the peptide-MHC allele pairs in the validation dataset and compared the computed HLA-I percent ranks of these pairs with the reported MHC-binding assay results. A low percent rank value corresponds to high likelihood of binding (e.g., a peptide with a percent rank of 1% scores amongst the top 1% in a reference set of random peptides). The percent ranks of peptide-MHC allele pairs that had a binary “Positive” result in the MHC-binding assay were significantly lower than pairs with a “Negative” result. Further, in the more granular positive results, stronger assay results (low<intermediate<high) were associated with increasingly lower percent ranks (FIG. 2, Upper Left). In addition, the two peptide-MHC alleles that were confirmed by X-ray crystallography were predicted as very likely binders, with low percent rank scores of 0.07% and 0.30% r Although our HLA-I binding predictor was initially built with the purpose of supporting neoantigen prediction in cancer, this analysis shows that it can be successfully applied to coronavirus proteomes. We evaluated our predictor by performing a Precision-Recall analysis, demonstrating the tradeoff between accurate calling of positive binders and the fraction of true binders that are detected (FIG. 2, Lower Left).

[1152] Assays of T cell reactivity (e.g., interferon-gamma ELISpots, tetramers), which are stricter measures for T cell immunogenicity to epitopes, were performed in significantly lower numbers compared with MHC-binding assays. For HLA-I, the overlap between peptide-MHC allele pairs for which we had a prediction (supported alleles) and pairs with a reported T cell assay consisted of only 32 pairs, of which 23 had a positive result. We did not detect differences in the percent ranks across the positive and negative groups, however sample sizes are extremely small (data not shown). In addition, for HLA-I epitopes, the validation dataset only contained T cell assay results for peptide-MHC allele pairs that had a positive result in a binding assay, suggesting a highly biased pool of epitopes selected for testing, as also reflected in the high rate of positive T cell assay results. Indeed, the high rate of positive MHC binding assays compared to what would be expected for completely randomly selected peptides also implies that peptides expected to bind based on prediction or prior data were prioritized for testing (or negative results were under-reported). This underlying bias in peptides assayed is important to keep in mind in evaluating the binding predictor performance on this validation dataset. An even more dramatic difference in scores for positives versus negatives could be expected had random peptides been selected for testing.

[1153] In addition to the identification of targets for CD8+ T cells, we have recently demonstrated the ability to predict HLA-II binders, allowing us to target CD4+ T cell responses which could be harnessed for 2019 SARS CoV-2 vaccines. These CD4+ responses can potentially bolster both T cell immunity and enhance humoral immunity.

[1154] In a similar fashion to the HLA-I analysis, we scored all Coronaviridae family peptide-MHC allele pairs with supported HLA-II alleles in ViPR using our HLA-II binding predictor. There were 259 unique peptide-MHC allele pairs assayed by MHC-binding assays in the ViPR validation dataset for HLA-II. As before, we compared their percent rank with their reported ‘best’ (in the case of multiple measurements) MHC-binding assay result. This comparison could not be performed with the “Negative” pairs as an independent group since there was only one negative result in the validation dataset for HLA-II. The low negative counts may be due to under-reporting of negative assay results or biased selection of the peptides to be assayed. Therefore, we merged the “Negative” and “Positive-Low” groups into one group and compared their percent ranks with either the “Positive-Intermediate” or the “Positive-High” groups (FIG. 2, Upper Right). This analysis revealed a trend similar to that observed with HLA-I predictions, indicating that stronger MHC-binding assay results are associated with a lower predicted percent rank for HLA-II binders, as we expect for a robust predictor. We also evaluated our HLA-II binding predictor by performing a Precision-Recall analysis (FIG. 2, Lower Right). The area under the Precision-Recall curve (AUC) indicated only a small advantage to our predictor over a random guess, which is explained by the heavy bias towards peptides with positive HLA-II binding assay results. Similar to the HLA-I T cell assays, there were too few recorded HLA-II T cell assays in our validation dataset to determine percent rank differences between peptide-HLA II allele pairs testing positive and negative. Together, these findings further corroborate the validity of our epitope predictors, as peptide-MHC allele pairs with positive results in binding assays consistently have lower percent ranks (better scores) by both our HLA-I and HLA-II MHC-binding predictors.

### Epitope Prediction for SARS-CoV-2

[1155] We harnessed our MS-based HLA binding prediction ability to identify the peptides most relevant to the generation of SARS CoV-2 T cell responses. We first performed the analysis for HLA-I peptide binding and computed the likelihood of each peptide of lengths 8-12 amino-acids from the 13 SARS CoV-2 ORFs to bind to any HLA-I allele in our database. We then calculated the percent rank of each peptide-MHC allele pair by comparing their binding scores to those of a set of reference peptides; putative binders were identified as sequences predicted to bind to a given allele with a percent rank of 1% or lower (FIG. 1).

[1156] By this metric, we detected a total of 11,897 unique SARS CoV-2 peptides that were predicted to bind at least one HLA-I allele. 16 of these peptides overlapped with a subsequence of the human proteome and were marked for considerations of potential autoimmunity.

[1157] Unlike HLA-I, which has a closed binding groove that constrains bound peptide lengths to approximately 8 to 12 amino acids, peptides binding HLA-II have a wider length distribution (up to 30 amino acids or even longer) since the HLA-II binding groove is open at both ends. Peptides bind with a 9 amino acid subsequence (termed the binding core) occupying the HLA-II binding groove, with any flanking sequence overhanging the edges of the molecule. We consider a group of peptides that differ in the flanking regions but share a common binding core as a single epitope. Using the HLA-II predictor we identified 3,372 unique binding-cores that are predicted to bind at least one HLA-II allele with a percent rank score of 1% or lower (Table 5). The majority of predicted peptide-MHC allele pairs are from ORF1a and ORF1ab, primarily driven by the length of these ORFs. In addition, ORF1a and ORF1ab have very similar sequences, with over 18,000 identical binding peptide-HLA-I allele pairs predicted for both ORFs. We therefore opted to exclude redundant predictions and only reported unique pairs (see * in Table 5). Similarly, all HLA-II predicted epitopes from ORF1a were covered by those reported for ORF1ab.

[1158] To test the validity of the SARS CoV-2 predicted peptide-HLA pairs, we looked for peptide sequences in the Coronaviridae portion of the ViPR database which exactly matched SARS CoV-2 peptide sequences (FIG. 2D). A total of 374 HLA-I peptide-MHC allele pairs from SARS CoV-2 had both a percent rank lower than 1% by our predictor and were found in the HLA-I MHC-binding validation dataset. Strikingly, of these HLA-I peptide-MHC allele pairs, 333 (89%) had a positive assay result. As a comparison, we also tested for overlap between epitopes predicted to have low likelihood of MHC-binding (percent rank 50% or higher) and the validation dataset. 37 peptide-MHC allele pairs overlapped between these sets, of which 36 (97.2%) had a negative assay result, as predicted. Further, we sought to determine whether our highly predicted 2019 SARS CoV-2 peptide-HLA-I allele pairs (percent rank lower than 1%) would be validated by reported T cell assay results. Despite the significantly smaller number of peptide-MHC allele pairs that were tested for T cell reactivity in the validation dataset, 10 assayed pairs were also highly predicted by our HLA-I binding predictor. Nine out of these 10 (90%) predicted pairs had a positive result to the T cell assay. No low-scoring pairs (percent rank of 50% or above) were reported in the validation dataset. These findings demonstrate the validity of our prediction for peptide-HLA-I allele pairs for SARS CoV-2 epitopes. Notably, while our algorithms are not trained on T cell reactivity data and are aimed at peptide-MHC binding, for the few examples in ViPR for which T cell reactivity assay results were reported, we were able to show our highly-scoring peptide-MHC allele pairs are indeed immunogenic in the vast majority of cases.

[1159] For HLA-II peptide-MHC allele pairs, only a single HLA-II peptide-MHC allele pair had both a percent rank lower than 1% and was reported in the validation dataset; this single pair (from the envelope protein) had a “Positive-High” assay result.

TABLE 5

| | | Peptide | | | | | Binding-core |
|---|---|---|---|---|---|---|---|
| | Length | HLA-I pair | Reported | Assay: | Assay: | Percent- | and HLA-II |
| Protein | (AA) | count | in ViPR | Negative | Positive | positive | pair count |
| envelope protein (E) | 75 | 556 | 34 | 3 | 31 | 91.2 | 29 |
| membrane | 222 | 1236 | 41 | 0 | 41 | 100.0 | 68 |
| glycoprotein (M) | | | | | | | |
| nucleocapsid | 419 | 1054 | 40 | 9 | 31 | 77.5 | 107 |
| phosphoprotein (N) | | | | | | | |
| ORF1a | 4405 | 14* | 0 | 0 | 0 | NA | 0* |
| polyprotein* | | | | | | | |
| ORF1ab | 7096 | 28965 | 0 | 0 | 0 | 0NA | 2516 |
| polyprotein | | | | | | | |
| ORF3a protein | 275 | 1408 | 127 | 11 | 116 | 91.3 | 94 |
| ORF6 protein | 61 | 322 | 0 | 0 | 0 | NA | 23 |
| ORF7a protein | 121 | 642 | 3 | 0 | 3 | 100.0 | 28 |
| ORF7b | 43 | 327 | 18 | 1 | 7 | 87.5 | 2 |
| ORF8 protein | 121 | 449 | 20 | 2 | 18 | 90.0 | 27 |
| ORF9b protein** | 97 | 453 | 6 | 1 | 5 | 83.3 | 37 |
| ORF10 protein | 38 | 258 | 0 | 0 | 0 | NA | 4 |
| surface glycoprotein | 1273 | 4686 | 95 | 14 | 81 | 85.3 | 437 |

*peptides unique to orf1a (not found in orf1ab).
**annotated in UniProt.

### Immunogenicity of HLA-A02:01-Predicted 2019 SARS CoV-2 Epitopes

[1160] The MS-based binding prediction algorithms used predict the likelihood of an epitope to be presented by a specific HLA allele, but do not directly predict the ability of a T cell receptor to recognize the epitope presented by the MHC molecule. Due to the process of central tolerance, which deletes T cells that could cross-react with peptides from self-antigens, not every epitope that is a strong MHC binder will elicit a T cell response. Therefore, there is a need to further validate high affinity MHC binding peptides in T cell assays (FIG. 1). To address the immunogenicity of a subset of highly predicted MHC binding peptides, we synthesized 23 highly predicted HLA-A02:01 binding epitopes from each of the following SARS CoV-2 proteins: S, M, N, E, and ORF1ab. Of these highly predicted SARS CoV-2 epitopes, five sequences were positive in ViPR for MHC binding or T cell reactivity in association with HLA-A02:01. Pools of these peptides were cultured with PBMCs from three human donors, and the predicted epitopes were considered immunogenic if they elicited a T cell response as detected by binding to pMHC multimers for HLA-A02:01 in at least one of three donors.

[1161] As shown in FIG. 3, CD8+ T cell responses were validated in at least one donor for 11 of the 23 highly predicted epitopes (Table 7 and FIG. 3). Of the five epitopes previously reported as either immunogenic or strong binders in ViPR, three were confirmed to elicit a CD8+ T cell response, confirming that our binding predictor can identify epitopes that are immunogenic. In addition, we were able to identify eight novel epitopes not previously reported in ViPR that were recognized by specific CD8+ T cells in donor PBMCs. The responses were generally robust, with nine of the 11 epitopes positive in our assay were recognized by specific CD8+ T cell responses in at least two donors (Table 7), and encouragingly, every ORF from 2019 SARS CoV-2 that was assayed had at least one peptide that led to a T cell response (Table 7). Taken together, these data show that many novel 2019 SARS CoV-2 epitopes that were predicted to be strong binders from MHC-I binding predictor were found to be immunogenic.

### Population Coverage of Peptides Predicted to Bind Multiple HLA-I and HLA-II Alleles

[1162] The concordance between the validation dataset and the highly predicted peptide-MHC allele pairs provided herein indicate that the HLA binding predictors significantly expand the list of predicted MHC binding peptides from the ORFs of 2019 SARS-CoV-2. Next, peptides from the M, N, and S proteins were prioritized, that were predicted to provide broad coverage for the USA, European (EU) and Asian Pacific Islander (API) populations based on the prevalence of MHC alleles in these populations. It was found that a subset of the peptides was predicted to bind a broad set of either HLA-I or HLA-II alleles. For each protein, it was determined that a small number of peptide sequences provide saturating coverage for the USA, European, and Asian Pacific Islander populations, with >99% population coverage achieved with selected 8-12mer epitopes for HLA-I, and >95% population coverage achieved with selected 25mer sequences for HLA-II, respectively (FIG. 4B). Even if the generous assumption that all peptide-MHC allele pairs for which a given peptide scores in the top 1% are indeed immunogenic is not fully upheld, this finding could facilitate the design of a parsimonious, broadly effective vaccine to induce broad T cell immunity.

[1163] Table 6 shows the top HLA-I predicted binders from each of the three SARS CoV-2 proteins: spike, nucleocapsid and membrane with the broadest cumulative allele coverage. The table provides the peptide sequence, its rank, the 2019 SARS CoV-2 protein it is derived from, the alleles the peptide is predicted to bind to and the cumulative HLA-I coverage for USA, European (EUR), and Asian Pacific Islander (API) populations for all peptides up to this rank.

[1164] Table 7 shows the top HLA-II predicted binders from each of the three 2019 SARS CoV-2 proteins: spike, nucleocapsid and membrane For each 25mer, the table provides the rank, the peptide sequence, the 2019 SARS CoV-2 protein it is derived from, the cumulative alleles that are covered by all 25mers up to this rank, and the associated USA, European (EUR), and Asian Pacific Islander (API) population coverage. Note that it is not the case that any of these 25mers, or their binding subsequences, are found as subsequences within the human proteome.

TABLE 6

| Rank | Peptide | P | Cumulative Alleles | USA | EUR | API |
|---|---|---|---|---|---|---|
| 1 | YQPYR | S | HLA-A02:07; HLA-B08:01; HLA-B13:02; HLA- | 0.9701 | 0.978332 | 0.973286 |
| | VVVL | | B14:02; HLA-B15:01; HLA-B15:03; HLA-B15:09; | | | |
| | | | HLA-B37:01; HLA-B39:01; HLA-B42:01; HLA- | | | |
| | | | B48:01; HLA-B52:01; HLA-C01:02; HLA-C02:02; | | | |
| | | | HLA-C03:04; HLA-C04:01; HLA-C05:01; HLA- | | | |
| | | | C06:02; HLA-C07:01; HLA-C07:02; HLA-C08:01; | | | |
| | | | HLA-C12:02; HLA-C14:02; HLA-C14:03; HLA- | | | |
| | | | C15:02 | | | |
| 2 | FVFLVL | S | HLA-A02:01; HLA-A02:03; HLA-A02:04; HLA- | 0.9977 | 0.998821 | 0.997513 |
| | LPL | | A02:07; HLA-A03:01; HLA-A68:02; HLA-B08:01; | | | |
| | | | HLA-B13:02; HLA-B14:02; HLA-B15:01; HLA- | | | |
| | | | B15:03; HLA-B15:09; HLA-B35:01; HLA-B35:03; | | | |
| | | | HLA-B37:01; HLA-B39:01; HLA-B42:01; HLA- | | | |
| | | | B48:01; HLA-B51:01; HLA-B52:01; HLA-B54:01; | | | |
| | | | HLA-C01:02; HLA-C02:02; HLA-C03:02; HLA- | | | |
| | | | C03:03; HLA-C03:04; HLA-C04:01; HLA-C05:01; | | | |
| | | | HLA-C06:02; HLA-C07:01; HLA-C07:02; HLA- | | | |
| | | | C08:01; HLA-C08:02; HLA-C12:02; HLA-C14:02; | | | |
| | | | HLA-C14:03; HLA-C15:02; HLA-C17:01 | | | |
| 3 | CVADY | S | HLA-A01:01; HLA-A02:01; HLA-A02:03; HLA- | 0.9996 | 0.999899 | 0.999257 |
| | SVLY | | A02:04; HLA-A02:07; HLA-A03:01; HLA-A11:01; | | | |
| | | | HLA-A25:01; HLA-A26:01; HLA-A29:02; HLA- | | | |
| | | | A30:01; HLA-A30:02; HLA-A32:01; HLA-A36:01; | | | |
| | | | HLA-A68:01; HLA-A68:02; HLA-B08:01; HLA- | | | |
| | | | B13:02; HLA-B14:02; HLA-B15:01; HLA-B15:03; | | | |
| | | | HLA-B15:09; HLA-B35:01; HLA-B35:03; HLA- | | | |
| | | | B37:01; HLA-B39:01; HLA-B42:01; HLA-B48:01; | | | |
| | | | HLA-B51:01; HLA-B52:01; HLA-B54:01; HLA- | | | |
| | | | B58:01; HLA-C01:02; HLA-C02:02; HLA-C03:02; | | | |
| | | | HLA-C03:03; HLA-C03:04; HLA-C04:01; HLA- | | | |
| | | | C05:01; HLA-C06:02; HLA-C07:01; HLA-C07:02; | | | |
| | | | HLA-C08:01; HLA-C08:02; HLA-C12:02; HLA- | | | |
| | | | C14:02; HLA-C14:03; HLA-C15:02; HLA-C17:01 | | | |
| 4 | QPTESI | S | HLA-A01:01; HLA-A02:01; HLA-A02:03; HLA- | 0.9999 | 0.999991 | 0.999754 |
| | VRF | | A02:04; HLA-A02:07; HLA-A03:01; HLA-A11:01; | | | |
| | | | HLA-A24:02; HLA-A25:01; HLA-A26:01; HLA- | | | |
| | | | A29:02; HLA-A30:01; HLA-A30:02; HLA-A32:01; | | | |
| | | | HLA-A36:01; HLA-A68:01; HLA-A68:02; HLA- | | | |
| | | | B07:02; HLA-B08:01; HLA-B13:02; HLA-B14:02; | | | |
| | | | HLA-B15:01; HLA-B15:03; HLA-B15:09; HLA- | | | |
| | | | B18:01; HLA-B35:01; HLA-B35:03; HLA-B37:01; | | | |
| | | | HLA-B38:01; HLA-B39:01; HLA-B42:01; HLA- | | | |
| | | | B48:01; HLA-B51:01; HLA-B52:01; HLA-B53:01; | | | |
| | | | HLA-B54:01; HLA-B58:01; HLA-B81:01; HLA- | | | |
| | | | C01:02; HLA-C02:02; HLA-C03:02; HLA-C03:03; | | | |
| | | | HLA-C03:04; HLA-C04:01; HLA-C05:01; HLA- | | | |
| | | | C06:02; HLA-C07:01; HLA-C07:02; HLA-C08:01; | | | |
| | | | HLA-C08:02; HLA-C12:02; HLA-C14:02; HLA- | | | |
| | | | C14:03; HLA-C15:02; HLA-C17:01 | | | |
| 5 | AEVQID | S | HLA-A01:01; HLA-A02:01; HLA-A02:03; HLA- | 0.9999 | 0.999999 | 0.999879 |
| | RLI | | A02:04; HLA-A02:07; HLA-A03:01; HLA-A11:01; | | | |
| | | | HLA-A24:02; HLA-A25:01; HLA-A26:01; HLA- | | | |
| | | | A29:02; HLA-A30:01; HLA-A30:02; HLA-A32:01; | | | |
| | | | HLA-A36:01; HLA-A68:01; HLA-A68:02; HLA- | | | |
| | | | B07:02; HLA-B08:01; HLA-B13:02; HLA-B14:02; | | | |
| | | | HLA-B15:01; HLA-B15:03; HLA-B15:09; HLA- | | | |
| | | | B18:01; HLA-B35:01; HLA-B35:03; HLA-B37:01; | | | |
| | | | HLA-B38:01; HLA-B39:01; HLA-B40:01; HLA- | | | |
| | | | B40:02; HLA-B41:01; HLA-B42:01; HLA-B44:02; | | | |
| | | | HLA-B44:03; HLA-B45:01; HLA-B48:01; HLA- | | | |
| | | | B49:01; HLA-B50:01; HLA-B51:01; HLA-B52:01; | | | |
| | | | HLA-B53:01; HLA-B54:01; HLA-B58:01; HLA- | | | |
| | | | B58:02; HLA-B81:01; HLA-C01:02; HLA-C02:02; | | | |
| | | | HLA-C03:02; HLA-C03:03; HLA-C03:04; HLA- | | | |
| | | | C04:01; HLA-C05:01; HLA-C06:02; HLA-C07:01; | | | |
| | | | HLA-C07:02; HLA-C08:01; HLA-C08:02; HLA- | | | |
| | | | C12:02; HLA-C14:02; HLA-C14:03; HLA-C15:02; | | | |
| | | | HLA-C17:01 | | | |
| 6 | QSAPHG | S | HLA-A01:01; HLA-A02:01; HLA-A02:03; HLA- | 0.9999 | 1 | 0.999962 |
| | VVF | | A02:04; HLA-A02:07; HLA-A03:01; HLA-A11:01; | | | |
| | | | HLA-A24:02; HLA-A25:01; HLA-A26:01; HLA- | | | |
| | | | A29:02; HLA-A30:01; HLA-A30:02; HLA-A32:01; | | | |
| | | | HLA-A36:01; HLA-A68:01; HLA-A68:02; HLA- | | | |
| | | | B07:02; HLA-B08:01; HLA-B13:02; HLA-B14:02; | | | |
| | | | HLA-B15:01; HLA-B15:03; HLA-B15:09; HLA- | | | |
| | | | B18:01; HLA-B35:01; HLA-B35:03; HLA-B37:01; | | | |
| | | | HLA-B38:01; HLA-B39:01; HLA-B40:01; HLA- | | | |
| | | | B40:02; HLA-B41:01; HLA-B42:01; HLA-B44:02; | | | |
| | | | HLA-B44:03; HLA-B45:01; HLA-B46:01; HLA- | | | |
| | | | B48:01; HLA-B49:01; HLA-B50:01; HLA-B51:01; | | | |
| | | | HLA-B52:01; HLA-B53:01; HLA-B54:01; HLA- | | | |
| | | | B57:01; HLA-B57:03; HLA-B58:01; HLA-B58:02; | | | |
| | | | HLA-B81:01; HLA-C01:02; HLA-C02:02; HLA- | | | |
| | | | C03:02; HLA-C03:03; HLA-C03:04; HLA-C04:01; | | | |
| | | | HLA-C05:01; HLA-C06:02; HLA-C07:01; HLA- | | | |
| | | | C07:02; HLA-C08:01; HLA-C08:02; HLA-C12:02; | | | |
| | | | HLA-C12:03; HLA-C14:02; HLA-C14:03; HLA- | | | |
| | | | C15:02; HLA-C17:01 | | | |
| 7 | VYYPD | S | HLA-A01:01; HLA-A02:01; HLA-A02:03; HLA- | 0.9999 | 1 | 0.999988 |
| | KVFR | | A02:04; HLA-A02:07; HLA-A03:01; HLA-A11:01; | | | |
| | | | HLA-A23:01; HLA-A24:02; HLA-A25:01; HLA- | | | |
| | | | A26:01; HLA-A29:02; HLA-A30:01; HLA-A30:02; | | | |
| | | | HLA-A31:01; HLA-A32:01; HLA-A33:03; HLA- | | | |
| | | | A36:01; HLA-A68:01; HLA-A68:02; HLA-A74:01; | | | |
| | | | HLA-B07:02; HLA-B08:01; HLA-B13:02; HLA- | | | |
| | | | B14:02; HLA-B15:01; HLA-B15:03; HLA-B15:09; | | | |
| | | | HLA-B18:01; HLA-B35:01; HLA-B35:03; HLA- | | | |
| | | | B37:01; HLA-B38:01; HLA-B39:01; HLA-B40:01; | | | |
| | | | HLA-B40:02; HLA-B41:01; HLA-B42:01; HLA- | | | |
| | | | B44:02; HLA-B44:03; HLA-B45:01; HLA-B46:01; | | | |
| | | | HLA-B48:01; HLA-B49:01; HLA-B50:01; HLA- | | | |
| | | | B51:01; HLA-B52:01; HLA-B53:01; HLA-B54:01; | | | |
| | | | HLA-B57:01; HLA-B57:03; HLA-B58:01; HLA- | | | |
| | | | B58:02; HLA-B81:01; HLA-C01:02; HLA-C02:02; | | | |
| | | | HLA-C03:02; HLA-C03:03; HLA-C03:04; HLA- | | | |
| | | | C04:01; HLA-C05:01; HLA-C06:02; HLA-C07:01; | | | |
| | | | HLA-C07:02; HLA-C08:01; HLA-C08:02; HLA- | | | |
| | | | C12:02; HLA-C12:03; HLA-C14:02; HLA-C14:03; | | | |
| | | | HLA-C15:02; HLA-C17:01 | | | |
| 8 | RRARSV | S | HLA-A01:01; HLA-A02:01; HLA-A02:03; HLA- | 0.9999 | 1 | 0.999989 |
| | ASQ | | A02:04; HLA-A02:07; HLA-A03:01; HLA-A11:01; | | | |
| | | | HLA-A23:01; HLA-A24:02; HLA-A25:01; HLA- | | | |
| | | | A26:01; HLA-A29:02; HLA-A30:01; HLA-A30:02; | | | |
| | | | HLA-A31:01; HLA-A32:01; HLA-A33:03; HLA- | | | |
| | | | A36:01; HLA-A68:01; HLA-A68:02; HLA-A74:01; | | | |
| | | | HLA-B07:02; HLA-B08:01; HLA-B13:02; HLA- | | | |
| | | | B14:02; HLA-B15:01; HLA-B15:03; HLA-B15:09; | | | |
| | | | HLA-B18:01; HLA-B27:05; HLA-B35:01; HLA- | | | |
| | | | B35:03; HLA-B37:01; HLA-B38:01; HLA-B39:01; | | | |
| | | | HLA-B40:01; HLA-B40:02; HLA-B41:01; HLA- | | | |
| | | | B42:01; HLA-B44:02; HLA-B44:03; HLA-B45:01; | | | |
| | | | HLA-B46:01; HLA-B48:01; HLA-B49:01; HLA- | | | |
| | | | B50:01; HLA-B51:01; HLA-B52:01; HLA-B53:01; | | | |
| | | | HLA-B54:01; HLA-B57:01; HLA-B57:03; HLA- | | | |
| | | | B58:01; HLA-B58:02; HLA-B81:01; HLA-C01:02; | | | |
| | | | HLA-C02:02; HLA-C03:02; HLA-C03:03; HLA- | | | |
| | | | C03:04; HLA-C04:01; HLA-C05:01; HLA-C06:02; | | | |
| | | | HLA-C07:01; HLA-C07:02; HLA-C08:01; HLA- | | | |
| | | | C08:02; HLA-C12:02; HLA-C12:03; HLA-C14:02; | | | |
| | | | HLA-C14:03; HLA-C15:02; HLA-C17:01 | | | |
| 9 | CPFGEV | S | HLA-A01:01; HLA-A02:01; HLA-A02:03; HLA- | 0.9999 | 1 | 0.999989 |
| | FNA | | A02:04; HLA-A02:07; HLA-A03:01; HLA-A11:01; | | | |
| | | | HLA-A23:01; HLA-A24:02; HLA-A25:01; HLA- | | | |
| | | | A26:01; HLA-A29:02; HLA-A30:01; HLA-A30:02; | | | |
| | | | HLA-A31:01; HLA-A32:01; HLA-A33:03; HLA- | | | |
| | | | A36:01; HLA-A68:01; HLA-A68:02; HLA-A74:01; | | | |
| | | | HLA-B07:02; HLA-B08:01; HLA-B13:02; HLA- | | | |
| | | | B14:02; HLA-B15:01; HLA-B15:03; HLA-B15:09; | | | |
| | | | HLA-B18:01; HLA-B27:05; HLA-B35:01; HLA- | | | |
| | | | B35:03; HLA-B37:01; HLA-B38:01; HLA-B39:01; | | | |
| | | | HLA-B40:01; HLA-B40:02; HLA-B41:01; HLA- | | | |
| | | | B42:01; HLA-B44:02; HLA-B44:03; HLA-B45:01; | | | |
| | | | HLA-B46:01; HLA-B48:01; HLA-B49:01; HLA- | | | |
| | | | B50:01; HLA-B51:01; HLA-B52:01; HLA-B53:01; | | | |
| | | | HLA-B54:01; HLA-B55:01; HLA-B57:01; HLA- | | | |
| | | | B57:03; HLA-B58:01; HLA-B58:02; HLA-B81:01; | | | |
| | | | HLA-C01:02; HLA-C02:02; HLA-C03:02; HLA- | | | |
| | | | C03:03; HLA-C03:04; HLA-C04:01; HLA-C05:01; | | | |
| | | | HLA-C06:02; HLA-C07:01; HLA-C07:02; HLA- | | | |
| | | | C08:01; HLA-C08:02; HLA-C12:02; HLA-C12:03; | | | |
| | | | HLA-C14:02; HLA-C14:03; HLA-C15:02; HLA- | | | |
| | | | C17:01 | | | |
| 10 | SAPHGV | S | HLA-A01:01; HLA-A02:01; HLA-A02:03; HLA- | 0.9999 | 1 | 0.999989 |
| | VFL | | A02:04; HLA-A02:07; HLA-A03:01; HLA-A11:01; | | | |
| | | | HLA-A23:01; HLA-A24:02; HLA-A25:01; HLA- | | | |
| | | | A26:01; HLA-A29:02; HLA-A30:01; HLA-A30:02; | | | |
| | | | HLA-A31:01; HLA-A32:01; HLA-A33:03; HLA- | | | |
| | | | A36:01; HLA-A68:01; HLA-A68:02; HLA-A74:01; | | | |
| | | | HLA-B07:02; HLA-B08:01; HLA-B13:02; HLA- | | | |
| | | | B14:02; HLA-B15:01; HLA-B15:03; HLA-B15:09; | | | |
| | | | HLA-B18:01; HLA-B27:05; HLA-B35:01; HLA- | | | |
| | | | B35:03; HLA-B37:01; HLA-B38:01; HLA-B39:01; | | | |
| | | | HLA-B40:01; HLA-B40:02; HLA-B41:01; HLA- | | | |
| | | | B42:01; HLA-B44:02; HLA-B44:03; HLA-B45:01; | | | |
| | | | HLA-B46:01; HLA-B48:01; HLA-B49:01; HLA- | | | |
| | | | B50:01; HLA-B51:01; HLA-B52:01; HLA-B53:01; | | | |
| | | | HLA-B54:01; HLA-B55:01; HLA-B57:01; HLA- | | | |
| | | | B57:03; HLA-B58:01; HLA-B58:02; HLA-B81:01; | | | |
| | | | HLA-C01:02; HLA-C02:02; HLA-C03:02; HLA- | | | |
| | | | C03:03; HLA-C03:04; HLA-C04:01; HLA-C05:01; | | | |
| | | | HLA-C06:02; HLA-C07:01; HLA-C07:02; HLA- | | | |
| | | | C08:01; HLA-C08:02; HLA-C12:02; HLA-C12:03; | | | |
| | | | HLA-C14:02; HLA-C14:03; HLA-C15:02; HLA- | | | |
| | | | C17:01 | | | |
| 1 | FNPETN | M | HLA-A02:07; HLA-C01:02; HLA-C03:04; HLA- | 0.8460 | 0.8464 | 0.888243 |
| | ILL | | C04:01; HLA-C05:01; HLA-C06:02; HLA-C07:02; | | | |
| | | | HLA-C08:01; HLA-C08:02; HLA-C14:02; HLA- | | | |
| | | | C17:01 | | | |
| 2 | SSSDNI | M | HLA-A01:01; HLA-A02:03; HLA-A02:04; HLA- | 0.9949 | 0.9981 | 0.987775 |
| | ALL | | A02:07; HLA-A68:01; HLA-A68:02; HLA-B15:09; | | | |
| | | | HLA-B38:01; HLA-B39:01; HLA-B48:01; HLA- | | | |
| | | | B57:03; HLA-B81:01; HLA-C01:02; HLA-C02:02; | | | |
| | | | HLA-C03:03; HLA-C03:04; HLA-C04:01; HLA- | | | |
| | | | C05:01; HLA-C06:02; HLA-C07:01; HLA-C07:02; | | | |
| | | | HLA-C08:01; HLA-C08:02; HLA-C12:02; HLA- | | | |
| | | | C12:03; HLA-C14:02; HLA-C15:02; HLA-C17:01 | | | |
| 3 | KLLEQ | M | HLA-A01:01; HLA-A02:01; HLA-A02:03; HLA- | 0.9987 | 0.999727 | 0.992178 |
| | WNLV | | A02:04; HLA-A02:07; HLA-A03:01; HLA-A30:01; | | | |
| | | | HLA-A32:01; HLA-A68:01; HLA-A68:02; HLA- | | | |
| | | | B13:02; HLA-B15:09; HLA-B38:01; HLA-B39:01; | | | |
| | | | HLA-B48:01; HLA-B57:03; HLA-B81:01; HLA- | | | |
| | | | C01:02; HLA-C02:02; HLA-C03:03; HLA-C03:04; | | | |
| | | | HLA-C04:01; HLA-C05:01; HLA-C06:02; HLA- | | | |
| | | | C07:01; HLA-C07:02; HLA-C08:01; HLA-C08:02; | | | |
| | | | HLA-C12:02; HLA-C12:03; HLA-C14:02; HLA- | | | |
| | | | C15:02; HLA-C17:01 | | | |
| 4 | LWLLW | M | HLA-A01:01; HLA-A02:01; HLA-A02:03; HLA- | 0.9997 | 0.99994 | 0.999326 |
| | PVTL | | A02:04; HLA-A02:07; HLA-A03:01; HLA-A23:01; | | | |
| | | | HLA-A24:02; HLA-A30:01; HLA-A32:01; HLA- | | | |
| | | | A68:01; HLA-A68:02; HLA-B08:01; HLA-B13:02; | | | |
| | | | HLA-B14:02; HLA-B15:09; HLA-B35:01; HLA- | | | |
| | | | B38:01; HLA-B39:01; HLA-B48:01; HLA-B51:01; | | | |
| | | | HLA-B54:01; HLA-B57:03; HLA-B58:02; HLA- | | | |
| | | | B81:01; HLA-C01:02; HLA-C02:02; HLA-C03:02; | | | |
| | | | HLA-C03:03; HLA-C03:04; HLA-C04:01; HLA- | | | |
| | | | C05:01; HLA-C06:02; HLA-C07:01; HLA-C07:02; | | | |
| | | | HLA-C08:01; HLA-C08:02; HLA-C12:02; HLA- | | | |
| | | | C12:03; HLA-C14:02; HLA-C14:03; HLA-C15:02; | | | |
| | | | HLA-C17:01 | | | |
| 5 | SELVIG | M | HLA-A01:01; HLA-A02:01; HLA-A02:03; HLA- | 0.9998 | 0.999979 | 0.999644 |
| | AVI | | A02:04; HLA-A02:07; HLA-A03:01; HLA-A23:01; | | | |
| | | | HLA-A24:02; HLA-A30:01; HLA-A32:01; HLA- | | | |
| | | | A68:01; HLA-A68:02; HLA-B08:01; HLA-B13:02; | | | |
| | | | HLA-B14:02; HLA-B15:09; HLA-B18:01; HLA- | | | |
| | | | B35:01; HLA-B38:01; HLA-B39:01; HLA-B40:01; | | | |
| | | | HLA-B40:02; HLA-B41:01; HLA-B44:02; HLA- | | | |
| | | | B44:03; HLA-B45:01; HLA-B48:01; HLA-B49:01; | | | |
| | | | HLA-B51:01; HLA-B52:01; HLA-B54:01; HLA- | | | |
| | | | B57:03; HLA-B58:02; HLA-B81:01; HLA-C01:02; | | | |
| | | | HLA-C02:02; HLA-C03:02; HLA-C03:03; HLA- | | | |
| | | | C03:04; HLA-C04:01; HLA-C05:01; HLA-C06:02; | | | |
| | | | HLA-C07:01; HLA-C07:02; HLA-C08:01; HLA- | | | |
| | | | C08:02; HLA-C12:02; HLA-C12:03; HLA-C14:02; | | | |
| | | | HLA-C14:03; HLA-C15:02; HLA-C17:01 | | | |
| 6 | ATSRTL | M | HLA-A01:01; HLA-A02:01; HLA-A02:03; HLA- | 0.9999 | 0.999999 | 0.999913 |
| | SYY | | A02:04; HLA-A02:07; HLA-A03:01; HLA-A11:01; | | | |
| | | | HLA-A23:01; HLA-A24:02; HLA-A25:01; HLA- | | | |
| | | | A26:01; HLA-A29:02; HLA-A30:01; HLA-A30:02; | | | |
| | | | HLA-A32:01; HLA-A36:01; HLA-A68:01; HLA- | | | |
| | | | A68:02; HLA-B08:01; HLA-B13:02; HLA-B14:02; | | | |
| | | | HLA-B15:09; HLA-B18:01; HLA-B35:01; HLA- | | | |
| | | | B38:01; HLA-B39:01; HLA-B40:01; HLA-B40:02; | | | |
| | | | HLA-B41:01; HLA-B44:02; HLA-B44:03; HLA- | | | |
| | | | B45:01; HLA-B48:01; HLA-B49:01; HLA-B51:01; | | | |
| | | | HLA-B52:01; HLA-B54:01; HLA-B57:01; HLA- | | | |
| | | | B57:03; HLA-B58:01; HLA-B58:02; HLA-B81:01; | | | |
| | | | HLA-C01:02; HLA-C02:02; HLA-C03:02; HLA- | | | |
| | | | C03:03; HLA-C03:04; HLA-C04:01; HLA-C05:01; | | | |
| | | | HLA-C06:02; HLA-C07:01; HLA-C07:02; HLA- | | | |
| | | | C08:01; HLA-C08:02; HLA-C12:02; HLA-C12:03; | | | |
| | | | HLA-C14:02; HLA-C14:03; HLA-C15:02; HLA- | | | |
| | | | C17:01 | | | |
| 7 | LPKEIT | M | HLA-A01:01; HLA-A02:01; HLA-A02:03; HLA- | 0.9999 | 1 | 0.99995 |
| | VAT | | A02:04; HLA-A02:07; HLA-A03:01; HLA-A11:01; | | | |
| | | | HLA-A23:01; HLA-A24:02; HLA-A25:01; HLA- | | | |
| | | | A26:01; HLA-A29:02; HLA-A30:01; HLA-A30:02; | | | |
| | | | HLA-A32:01; HLA-A36:01; HLA-A68:01; HLA- | | | |
| | | | A68:02; HLA-B07:02; HLA-B08:01; HLA-B13:02; | | | |
| | | | HLA-B14:02; HLA-B15:09; HLA-B18:01; HLA- | | | |
| | | | B35:01; HLA-B35:03; HLA-B38:01; HLA-B39:01; | | | |
| | | | HLA-B40:01; HLA-B40:02; HLA-B41:01; HLA- | | | |
| | | | B42:01; HLA-B44:02; HLA-B44:03; HLA-B45:01; | | | |
| | | | HLA-B46:01; HLA-B48:01; HLA-B49:01; HLA- | | | |
| | | | B51:01; HLA-B52:01; HLA-B54:01; HLA-B55:01; | | | |
| | | | HLA-B57:01; HLA-B57:03; HLA-B58:01; HLA- | | | |
| | | | B58:02; HLA-B81:01; HLA-C01:02; HLA-C02:02; | | | |
| | | | HLA-C03:02; HLA-C03:03; HLA-C03:04; HLA- | | | |
| | | | C04:01; HLA-C05:01; HLA-C06:02; HLA-C07:01; | | | |
| | | | HLA-C07:02; HLA-C08:01; HLA-C08:02; HLA- | | | |
| | | | C12:02; HLA-C12:03; HLA-C14:02; HLA-C14:03; | | | |
| | | | HLA-C15:02; HLA-C17:01 | | | |
| 8 | EQWNL | M | HLA-A01:01; HLA-A02:01; HLA-A02:03; HLA- | 0.9999 | 1 | 0.999961 |
| | VIGF | | A02:04; HLA-A02:07; HLA-A03:01; HLA-A11:01; | | | |
| | | | HLA-A23:01; HLA-A24:02; HLA-A25:01; HLA- | | | |
| | | | A26:01; HLA-A29:02; HLA-A30:01; HLA-A30:02; | | | |
| | | | HLA-A32:01; HLA-A36:01; HLA-A68:01; HLA- | | | |
| | | | A68:02; HLA-B07:02; HLA-B08:01; HLA-B13:02; | | | |
| | | | HLA-B14:02; HLA-B15:01; HLA-B15:03; HLA- | | | |
| | | | B15:09; HLA-B18:01; HLA-B27:05; HLA-B35:01; | | | |
| | | | HLA-B35:03; HLA-B38:01; HLA-B39:01; HLA- | | | |
| | | | B40:01; HLA-B40:02; HLA-B41:01; HLA-B42:01; | | | |
| | | | HLA-B44:02; HLA-B44:03; HLA-B45:01; HLA- | | | |
| | | | B46:01; HLA-B48:01; HLA-B49:01; HLA-B51:01; | | | |
| | | | HLA-B52:01; HLA-B54:01; HLA-B55:01; HLA- | | | |
| | | | B57:01; HLA-B57:03; HLA-B58:01; HLA-B58:02; | | | |
| | | | HLA-B81:01; HLA-C01:02; HLA-C02:02; HLA- | | | |
| | | | C03:02; HLA-C03:03; HLA-C03:04; HLA-C04:01; | | | |
| | | | HLA-C05:01; HLA-C06:02; HLA-C07:01; HLA- | | | |
| | | | C07:02; HLA-C08:01; HLA-C08:02; HLA-C12:02; | | | |
| | | | HLA-C12:03; HLA-C14:02; HLA-C14:03; HLA- | | | |
| | | | C15:02; HLA-C17:01 | | | |
| 9 | FVLAA | M | HLA-A01:01; HLA-A02:01; HLA-A02:03; HLA- | 0.9999 | 1 | 0.999987 |
| | VYR | | A02:04; HLA-A02:07; HLA-A03:01; HLA-A11:01; | | | |
| | | | HLA-A23:01; HLA-A24:02; HLA-A25:01; HLA- | | | |
| | | | A26:01; HLA-A29:02; HLA-A30:01; HLA-A30:02; | | | |
| | | | HLA-A31:01; HLA-A32:01; HLA-A33:03; HLA- | | | |
| | | | A36:01; HLA-A68:01; HLA-A68:02; HLA-A74:01; | | | |
| | | | HLA-B07:02; HLA-B08:01; HLA-B13:02; HLA- | | | |
| | | | B14:02; HLA-B15:01; HLA-B15:03; HLA-B15:09; | | | |
| | | | HLA-B18:01; HLA-B27:05; HLA-B35:01; HLA- | | | |
| | | | B35:03; HLA-B38:01; HLA-B39:01; HLA-B40:01; | | | |
| | | | HLA-B40:02; HLA-B41:01; HLA-B42:01; HLA- | | | |
| | | | B44:02; HLA-B44:03; HLA-B45:01; HLA-B46:01; | | | |
| | | | HLA-B48:01; HLA-B49:01; HLA-B51:01; HLA- | | | |
| | | | B52:01; HLA-B54:01; HLA-B55:01; HLA-B57:01; | | | |
| | | | HLA-B57:03; HLA-B58:01; HLA-B58:02; HLA- | | | |
| | | | B81:01; HLA-C01:02; HLA-C02:02; HLA-C03:02; | | | |
| | | | HLA-C03:03; HLA-C03:04; HLA-C04:01; HLA- | | | |
| | | | C05:01; HLA-C06:02; HLA-C07:01; HLA-C07:02; | | | |
| | | | HLA-C08:01; HLA-C08:02; HLA-C12:02; HLA- | | | |
| | | | C12:03; HLA-C14:02; HLA-C14:03; HLA-C15:02; | | | |
| | | | HLA-C17:01 | | | |
| 10 | SELVIG | M | HLA-A01:01; HLA-A02:01; HLA-A02:03; HLA- | 0.9999 | 1 | 0.999989 |
| | AV | | A02:04; HLA-A02:07; HLA-A03:01; HLA-A11:01; | | | |
| | | | HLA-A23:01; HLA-A24:02; HLA-A25:01; HLA- | | | |
| | | | A26:01; HLA-A29:02; HLA-A30:01; HLA-A30:02; | | | |
| | | | HLA-A31:01; HLA-A32:01; HLA-A33:03; HLA- | | | |
| | | | A36:01; HLA-A68:01; HLA-A68:02; HLA-A74:01; | | | |
| | | | HLA-B07:02; HLA-B08:01; HLA-B13:02; HLA- | | | |
| | | | B14:02; HLA-B15:01; HLA-B15:03; HLA-B15:09; | | | |
| | | | HLA-B18:01; HLA-B27:05; HLA-B35:01; HLA- | | | |
| | | | B35:03; HLA-B37:01; HLA-B38:01; HLA-B39:01; | | | |
| | | | HLA-B40:01; HLA-B40:02; HLA-B41:01; HLA- | | | |
| | | | B42:01; HLA-B44:02; HLA-B44:03; HLA-B45:01; | | | |
| | | | HLA-B46:01; HLA-B48:01; HLA-B49:01; HLA- | | | |
| | | | B50:01; HLA-B51:01; HLA-B52:01; HLA-B54:01; | | | |
| | | | HLA-B55:01; HLA-B57:01; HLA-B57:03; HLA- | | | |
| | | | B58:01; HLA-B58:02; HLA-B81:01; HLA-C01:02; | | | |
| | | | HLA-C02:02; HLA-C03:02; HLA-C03:03; HLA- | | | |
| | | | C03:04; HLA-C04:01; HLA-C05:01; HLA-C06:02; | | | |
| | | | HLA-C07:01; HLA-C07:02; HLA-C08:01; HLA- | | | |
| | | | C08:02; HLA-C12:02; HLA-C12:03; HLA-C14:02; | | | |
| | | | HLA-C14:03; HLA-C15:02; HLA-C17:01 | | | |
| 1 | FAPSAS | NP | HLA-B46:01; HLA-B51:01; HLA-C01:02; HLA- | 0.8892 | 0.893062 | 0.909801 |
| | AF | | C02:02; HLA-C03:02; HLA-C03:03; HLA-C03:04; | | | |
| | | | HLA-C04:01; HLA-C05:01; HLA-C07:02; HLA- | | | |
| | | | C08:02; HLA-C12:03; HLA-C14:02; HLA-C14:03; | | | |
| | | | HLA-C17:01 | | | |
| 2 | LLLDRL | NP | HLA-A02:01; HLA-A02:03; HLA-A02:04; HLA- | 0.9837 | 0.98958 | 0.964647 |
| | NQL | | A02:07; HLA-A03:01; HLA-A23:01; HLA-A32:01; | | | |
| | | | HLA-B08:01; HLA-B14:02; HLA-B46:01; HLA- | | | |
| | | | B51:01; HLA-C01:02; HLA-C02:02; HLA-C03:02; | | | |
| | | | HLA-C03:03; HLA-C03:04; HLA-C04:01; HLA- | | | |
| | | | C05:01; HLA-C06:02; HLA-C07:02; HLA-C08:02; | | | |
| | | | HLA-C12:03; HLA-C14:02; HLA-C14:03; HLA- | | | |
| | | | C17:01 | | | |
| 3 | SSPDDQ | NP | HLA-A01:01; HLA-A02:01; HLA-A02:03; HLA- | 0.9973 | 0.999047 | 0.989434 |
| | IGY | | A02:04; HLA-A02:07; HLA-A03:01; HLA-A11:01; | | | |
| | | | HLA-A23:01; HLA-A25:01; HLA-A26:01; HLA- | | | |
| | | | A29:02; HLA-A30:01; HLA-A30:02; HLA-A32:01; | | | |
| | | | HLA-A36:01; HLA-B08:01; HLA-B14:02; HLA- | | | |
| | | | B15:01; HLA-B15:03; HLA-B46:01; HLA-B51:01; | | | |
| | | | HLA-B57:01; HLA-B57:03; HLA-B58:01; HLA- | | | |
| | | | C01:02; HLA-C02:02; HLA-C03:02; HLA-C03:03; | | | |
| | | | HLA-C03:04; HLA-C04:01; HLA-C05:01; HLA- | | | |
| | | | C06:02; HLA-C07:02; HLA-C08:02; HLA-C12:03; | | | |
| | | | HLA-C14:02; HLA-C14:03; HLA-C17:01 | | | |
| 4 | TPSGTW | NP | HLA-A01:01; HLA-A02:01; HLA-A02:03; HLA- | 0.9997 | 0.999954 | 0.994134 |
| | LTY | | A02:04; HLA-A02:07; HLA-A03:01; HLA-A11:01; | | | |
| | | | HLA-A23:01; HLA-A25:01; HLA-A26:01; HLA- | | | |
| | | | A29:02; HLA-A30:01; HLA-A30:02; HLA-A32:01; | | | |
| | | | HLA-A36:01; HLA-B07:02; HLA-B08:01; HLA- | | | |
| | | | B14:02; HLA-B15:01; HLA-B15:03; HLA-B35:01; | | | |
| | | | HLA-B35:03; HLA-B42:01; HLA-B46:01; HLA- | | | |
| | | | B51:01; HLA-B53:01; HLA-B55:01; HLA-B57:01; | | | |
| | | | HLA-B57:03; HLA-B58:01; HLA-C01:02; HLA- | | | |
| | | | C02:02; HLA-C03:02; HLA-C03:03; HLA-C03:04; | | | |
| | | | HLA-C04:01; HLA-C05:01; HLA-C06:02; HLA- | | | |
| | | | C07:01; HLA-C07:02; HLA-C08:02; HLA-C12:03; | | | |
| | | | HLA-C14:02; HLA-C14:03; HLA-C17:01 | | | |
| 5 | MEVTPS | NP | HLA-A01:01; HLA-A02:01; HLA-A02:03; HLA- | 0.9999 | 0.999992 | 0.996542 |
| | GTW | | A02:04; HLA-A02:07; HLA-A03:01; HLA-A11:01; | | | |
| | | | HLA-A23:01; HLA-A25:01; HLA-A26:01; HLA- | | | |
| | | | A29:02; HLA-A30:01; HLA-A30:02; HLA-A32:01; | | | |
| | | | HLA-A36:01; HLA-B07:02; HLA-B08:01; HLA- | | | |
| | | | B14:02; HLA-B15:01; HLA-B15:03; HLA-B18:01; | | | |
| | | | HLA-B35:01; HLA-B35:03; HLA-B40:01; HLA- | | | |
| | | | B42:01; HLA-B44:02; HLA-B44:03; HLA-B46:01; | | | |
| | | | HLA-B49:01; HLA-B50:01; HLA-B51:01; HLA- | | | |
| | | | B53:01; HLA-B55:01; HLA-B57:01; HLA-B57:03; | | | |
| | | | HLA-B58:01; HLA-C01:02; HLA-C02:02; HLA- | | | |
| | | | C03:02; HLA-C03:03; HLA-C03:04; HLA-C04:01; | | | |
| | | | HLA-C05:01; HLA-C06:02; HLA-C07:01; HLA- | | | |
| | | | C07:02; HLA-C08:02; HLA-C12:03; HLA-C14:02; | | | |
| | | | HLA-C14:03; HLA-C17:01 | | | |
| 6 | KHWPQI | NP | HLA-A01:01; HLA-A02:01; HLA-A02:03; HLA- | 0.9999 | 0.999999 | 0.998895 |
| | AQF | | A02:04; HLA-A02:07; HLA-A03:01; HLA-A11:01; | | | |
| | | | HLA-A23:01; HLA-A24:02; HLA-A25:01; HLA- | | | |
| | | | A26:01; HLA-A29:02; HLA-A30:01; HLA-A30:02; | | | |
| | | | HLA-A32:01; HLA-A36:01; HLA-B07:02; HLA- | | | |
| | | | B08:01; HLA-B14:02; HLA-B15:01; HLA-B15:03; | | | |
| | | | HLA-B15:09; HLA-B18:01; HLA-B35:01; HLA- | | | |
| | | | B35:03; HLA-B37:01; HLA-B38:01; HLA-B39:01; | | | |
| | | | HLA-B40:01; HLA-B42:01; HLA-B44:02; HLA- | | | |
| | | | B44:03; HLA-B46:01; HLA-B48:01; HLA-B49:01; | | | |
| | | | HLA-B50:01; HLA-B51:01; HLA-B53:01; HLA- | | | |
| | | | B55:01; HLA-B57:01; HLA-B57:03; HLA-B58:01; | | | |
| | | | HLA-C01:02; HLA-C02:02; HLA-C03:02; HLA- | | | |
| | | | C03:03; HLA-C03:04; HLA-C04:01; HLA-C05:01; | | | |
| | | | HLA-C06:02; HLA-C07:01; HLA-C07:02; HLA- | | | |
| | | | C08:02; HLA-C12:03; HLA-C14:02; HLA-C14:03; | | | |
| | | | HLA-C17:01 | | | |
| 7 | ASAFFG | NP | HLA-A01:01; HLA-A02:01; HLA-A02:03; HLA- | 0.9999 | 1 | 0.999685 |
| | MSR | | A02:04; HLA-A02:07; HLA-A03:01; HLA-A11:01; | | | |
| | | | HLA-A23:01; HLA-A24:02; HLA-A25:01; HLA- | | | |
| | | | A26:01; HLA-A29:02; HLA-A30:01; HLA-A30:02; | | | |
| | | | HLA-A31:01; HLA-A32:01; HLA-A33:03; HLA- | | | |
| | | | A36:01; HLA-A68:01; HLA-A74:01; HLA-B07:02; | | | |
| | | | HLA-B08:01; HLA-B14:02; HLA-B15:01; HLA- | | | |
| | | | B15:03; HLA-B15:09; HLA-B18:01; HLA-B35:01; | | | |
| | | | HLA-B35:03; HLA-B37:01; HLA-B38:01; HLA- | | | |
| | | | B39:01; HLA-B40:01; HLA-B42:01; HLA-B44:02; | | | |
| | | | HLA-B44:03; HLA-B46:01; HLA-B48:01; HLA- | | | |
| | | | B49:01; HLA-B50:01; HLA-B51:01; HLA-B53:01; | | | |
| | | | HLA-B55:01; HLA-B57:01; HLA-B57:03; HLA- | | | |
| | | | B58:01; HLA-C01:02; HLA-C02:02; HLA-C03:02; | | | |
| | | | HLA-C03:03; HLA-C03:04; HLA-C04:01; HLA- | | | |
| | | | C05:01; HLA-C06:02; HLA-C07:01; HLA-C07:02; | | | |
| | | | HLA-C08:02; HLA-C12:03; HLA-C14:02; HLA- | | | |
| | | | C14:03; HLA-C17:01 | | | |
| 8 | DAALA | NP | HLA-A01:01; HLA-A02:01; HLA-A02:03; HLA- | 0.9999 | 1 | 0.999977 |
| | LLLL | | A02:04; HLA-A02:07; HLA-A03:01; HLA-A11:01; | | | |
| | | | HLA-A23:01; HLA-A24:02; HLA-A25:01; HLA- | | | |
| | | | A26:01; HLA-A29:02; HLA-A30:01; HLA-A30:02; | | | |
| | | | HLA-A31:01; HLA-A32:01; HLA-A33:03; HLA- | | | |
| | | | A36:01; HLA-A68:01; HLA-A68:02; HLA-A74:01; | | | |
| | | | HLA-B07:02; HLA-B08:01; HLA-B14:02; HLA- | | | |
| | | | B15:01; HLA-B15:03; HLA-B15:09; HLA-B18:01; | | | |
| | | | HLA-B35:01; HLA-B35:03; HLA-B37:01; HLA- | | | |
| | | | B38:01; HLA-B39:01; HLA-B40:01; HLA-B42:01; | | | |
| | | | HLA-B44:02; HLA-B44:03; HLA-B46:01; HLA- | | | |
| | | | B48:01; HLA-B49:01; HLA-B50:01; HLA-B51:01; | | | |
| | | | HLA-B53:01; HLA-B55:01; HLA-B57:01; HLA- | | | |
| | | | B57:03; HLA-B58:01; HLA-C01:02; HLA-C02:02; | | | |
| | | | HLA-C03:02; HLA-C03:03; HLA-C03:04; HLA- | | | |
| | | | C04:01; HLA-C05:01; HLA-C06:02; HLA-C07:01; | | | |
| | | | HLA-C07:02; HLA-C08:01; HLA-C08:02; HLA- | | | |
| | | | C12:02; HLA-C12:03; HLA-C14:02; HLA-C14:03; | | | |
| | | | HLA-C15:02; HLA-C17:01 | | | |
| 9 | RQKKQ | NP | HLA-A01:01; HLA-A02:01; HLA-A02:03; HLA- | 0.9999 | 1 | 0.999983 |
| | QTV | | A02:04; HLA-A02:07; HLA-A03:01; HLA-A11:01; | | | |
| | | | HLA-A23:01; HLA-A24:02; HLA-A25:01; HLA- | | | |
| | | | A26:01; HLA-A29:02; HLA-A30:01; HLA-A30:02; | | | |
| | | | HLA-A31:01; HLA-A32:01; HLA-A33:03; HLA- | | | |
| | | | A36:01; HLA-A68:01; HLA-A68:02; HLA-A74:01; | | | |
| | | | HLA-B07:02; HLA-B08:01; HLA-B13:02; HLA- | | | |
| | | | B14:02; HLA-B15:01; HLA-B15:03; HLA-B15:09; | | | |
| | | | HLA-B18:01; HLA-B35:01; HLA-B35:03; HLA- | | | |
| | | | B37:01; HLA-B38:01; HLA-B39:01; HLA-B40:01; | | | |
| | | | HLA-B42:01; HLA-B44:02; HLA-B44:03; HLA- | | | |
| | | | B46:01; HLA-B48:01; HLA-B49:01; HLA-B50:01; | | | |
| | | | HLA-B51:01; HLA-B52:01; HLA-B53:01; HLA- | | | |
| | | | B55:01; HLA-B57:01; HLA-B57:03; HLA-B58:01; | | | |
| | | | HLA-C01:02; HLA-C02:02; HLA-C03:02; HLA- | | | |
| | | | C03:03; HLA-C03:04; HLA-C04:01; HLA-C05:01; | | | |
| | | | HLA-C06:02; HLA-C07:01; HLA-C07:02; HLA- | | | |
| | | | C08:01; HLA-C08:02; HLA-C12:02; HLA-C12:03; | | | |
| | | | HLA-C14:02; HLA-C14:03; HLA-C15:02; HLA- | | | |
| | | | C17:01 | | | |
| 10 | SRIGME | NP | HLA-A01:01; HLA-A02:01; HLA-A02:03; HLA- | 0.9999 | 1 | 0.999984 |
| | VTP | | A02:04; HLA-A02:07; HLA-A03:01; HLA-A11:01; | | | |
| | | | HLA-A23:01; HLA-A24:02; HLA-A25:01; HLA- | | | |
| | | | A26:01; HLA-A29:02; HLA-A30:01; HLA-A30:02; | | | |
| | | | HLA-A31:01; HLA-A32:01; HLA-A33:03; HLA- | | | |
| | | | A36:01; HLA-A68:01; HLA-A68:02; HLA-A74:01; | | | |
| | | | HLA-B07:02; HLA-B08:01; HLA-B13:02; HLA- | | | |
| | | | B14:02; HLA-B15:01; HLA-B15:03; HLA-B15:09; | | | |
| | | | HLA-B18:01; HLA-B27:05; HLA-B35:01; HLA- | | | |
| | | | B35:03; HLA-B37:01; HLA-B38:01; HLA-B39:01; | | | |
| | | | HLA-B40:01; HLA-B42:01; HLA-B44:02; HLA- | | | |
| | | | B44:03; HLA-B46:01; HLA-B48:01; HLA-B49:01; | | | |
| | | | HLA-B50:01; HLA-B51:01; HLA-B52:01; HLA- | | | |
| | | | B53:01; HLA-B55:01; HLA-B57:01; HLA-B57:03; | | | |
| | | | HLA-B58:01; HLA-C01:02; HLA-C02:02; HLA- | | | |
| | | | C03:02; HLA-C03:03; HLA-C03:04; HLA-C04:01; | | | |
| | | | HLA-C05:01; HLA-C06:02; HLA-C07:01; HLA- | | | |
| | | | C07:02; HLA-C08:01; HLA-C08:02; HLA-C12:02; | | | |
| | | | HLA-C12:03; HLA-C14:02; HLA-C14:03; HLA- | | | |
| | | | C15:02; HLA-C17:01 | | | |

Index for Table: P, viral protein; S, Surface glycoprotein; M, membrane glycoprotein; NP, nucleocapsid phosphoprotein.

TABLE 7

| S1 | Peptide | P | Cumulative Alleles | USA | EUR | API |
|---|---|---|---|---|---|---|
| 1 | TPPIKD | S | DRB1_1001; DQB1-0602_DQA1-0102; DRB1_0401; | 0.973835 | 0.972746 | 0.757235 |
| | FGGFN | | DRB3_0101; DPB1-0401_DPA1-0103; DPB1-0402_DPA1- | | | |
| | FSQILP | | 0103; DRB1_1303; DQB1-0303_DQA1-0201; DRB1_0405; | | | |
| | DPSKPS | | DRB1_0901; DRB1_0411; DRB1_0404; DPB1-0201_DPA1- | | | |
| | KR | | 0103; DQB1-0302_DQA1-0301; DPB1-0101_DPA1-0202 | | | |
| 2 | EIDRLN | S | DRB4_0103; DPB1-1401_DPA1-0201; DPB1-0301_DPA1- | 0.997968 | 0.997785 | 0.982844 |
| | EVAKN | | 0103; DRB3_0301; DPB1-0901_DPA1-0201; DPB1- | | | |
| | LNESLI | | 1701_DPA1-0201; DPB1-1001_DPA1-0201; DQB1- | | | |
| | DLQEL | | 0604_DQA1-0102; DQB1-0502_DQA1-0102; DPB1- | | | |
| | GKY | | 0501_DPA1-0202; DRB1_1001; DQB1-0602_DQA1-0102; | | | |
| | | | DRB1_0401; DRB3_0101; DPB1-0401_DPA1-0103; DPB1- | | | |
| | | | 0402_DPA1-0103; DRB1_1303; DQB1-0303_DQA1-0201; | | | |
| | | | DRB1_0405; DRB1_0901; DRB1_0411; DRB1_0404; DPB1- | | | |
| | | | 0201_DPA1-0103; DQB1-0302_DQA1-0301; DPB1- | | | |
| | | | 0101_DPA1-0202 | | | |
| 3 | EKGIY | S | DRB1_0701; DRB1_0101; DRB1_1502; DRB1_0406; DPB1- | 0.99924 | 0.999337 | 0.993125 |
| | QTSNF | | 0202_DPA1-0103; DRB1_1501; DRB1_0302; DRB1_1001; | | | |
| | RVQPT | | DQB1-0602_DQA1-0102; DRB1_0401; DRB3_0101; DPB1- | | | |
| | ESIVRF | | 0401_DPA1-0103; DPB1-0402_DPA1-0103; DRB1_1303; | | | |
| | PNIT | | DQB1-0303_DQA1-0201; DRB1_0405; DRB1_0901; | | | |
| | | | DRB1_0411; DRB1_0404; DPB1-0201_DPA1-0103; DQB1- | | | |
| | | | 0302_DQA1-0301; DPB1-0101_DPA1-0202; DRB4_0103; | | | |
| | | | DPB1-1401_DPA1-0201; DPB1-0301_DPA1-0103; | | | |
| | | | DRB3_0301; DPB1-0901_DPA1-0201; DPB1-1701_DPA1- | | | |
| | | | 0201; DPB1-1001_DPA1-0201; DQB1-0604_DQA1-0102; | | | |
| | | | DQB1-0502_DQA1-0102; DPB1-0501_DPA1-0202 | | | |
| 4 | NPVLP | S | DQB1-0301_DQA1-0505; DQB1-0201_DQA1-0501; | 0.999858 | 0.999877 | 0.995801 |
| | FNDGV | | DRB1_0403; DRB1_1401; DRB1_1405; DQB1-0202_DQA1- | | | |
| | YFAST | | 0201; DRB1_1001; DQB1-0602_DQA1-0102; DRB1_0401; | | | |
| | EKSNII | | DRB3_0101; DPB1-0401_DPA1-0103; DPB1-0402_DPA1- | | | |
| | RGWI | | 0103; DRB1_1303; DQB1-0303_DQA1-0201; DRB1_0405; | | | |
| | | | DRB1_0901; DRB1_0411; DRB1_0404; DPB1-0201_DPA1- | | | |
| | | | 0103; DQB1-0302_DQA1-0301; DPB1-0101_DPA1-0202; | | | |
| | | | DRB4_0103; DPB1-1401_DPA1-0201; DPB1-0301_DPA1- | | | |
| | | | 0103; DRB3_0301; DPB1-0901_DPA1-0201; DPB1- | | | |
| | | | 1701_DPA1-0201; DPB1-1001_DPA1-0201; DQB1- | | | |
| | | | 0604_DQA1-0102; DQB1-0502_DQA1-0102; DPB1- | | | |
| | | | 0501_DPA1-0202; DRB1_0701; DRB1_0101; DRB1_1502; | | | |
| | | | DRB1_0406; DPB1-0202_DPA1-0103; DRB1_1501; | | | |
| | | | DRB1_0302 | | | |
| 5 | VFNAT | S | DPB1-1301_DPA1-0201; DRB5_0101; DRB5_0102; | 0.999973 | 0.999978 | 0.997479 |
| | RFASV | | DRB1_1301; DRB1_1102; DRB1_1101; DRB1_1001; DQB1- | | | |
| | YAWN | | 0602_DQA1-0102; DRB1_0401; DRB3_0101; DPB1- | | | |
| | RKRISN | | 0401_DPA1-0103; DPB1-0402_DPA1-0103; DRB1_1303; | | | |
| | CVADY | | DQB1-0303_DQA1-0201; DRB1_0405; DRB1_0901; | | | |
| | | | DRB1_0411; DRB1_0404; DPB1-0201_DPA1-0103; DQB1- | | | |
| | | | 0302_DQA1-0301; DPB1-0101_DPA1-0202; DRB4_0103; | | | |
| | | | DPB1-1401_DPA1-0201; DPB1-0301_DPA1-0103; | | | |
| | | | DRB3_0301; DPB1-0901_DPA1-0201; DPB1-1701_DPA1- | | | |
| | | | 0201; DPB1-1001_DPA1-0201; DQB1-0604_DQA1-0102; | | | |
| | | | DQB1-0502_DQA1-0102; DPB1-0501_DPA1-0202; | | | |
| | | | DRB1_0701; DRB1_0101; DRB1_1502; DRB1_0406; DPB1- | | | |
| | | | 0202_DPA1-0103; DRB1_1501; DRB1_0302; DQB1- | | | |
| | | | 0301_DQA1-0505; DQB1-0201_DQA1-0501; DRB1_0403; | | | |
| | | | DRB1_1401; DRB1_1405; DQB1-0202_DQA1-0201 | | | |
| 6 | ISNCV | S | DRB1_0802; DRB1_0301; DRB3_0201; DRB3_0202; | 0.999997 | 0.999998 | 0.99835 |
| | ADYSV | | DRB1_1001; DQB1-0602_DQA1-0102; DRB1_0401; | | | |
| | LYNSA | | DRB3_0101; DPB1-0401_DPA1-0103; DPB1-0402_DPA1- | | | |
| | SFSTFK | | 0103; DRB1_1303; DQB1-0303_DQA1-0201; DRB1_0405; | | | |
| | CYGV | | DRB1_0901; DRB1_0411; DRB1_0404; DPB1-0201_DPA1- | | | |
| | | | 0103; DQB1-0302_DQA1-0301; DPB1-0101_DPA1-0202; | | | |
| | | | DRB4_0103; DPB1-1401_DPA1-0201; DPB1-0301_DPA1- | | | |
| | | | 0103; DRB3_0301; DPB1-0901_DPA1-0201; DPB1- | | | |
| | | | 1701_DPA1-0201; DPB1-1001_DPA1-0201; DQB1- | | | |
| | | | 0604_DQA1-0102; DQB1-0502_DQA1-0102; DPB1- | | | |
| | | | 0501_DPA1-0202; DRB1_0701; DRB1_0101; DRB1_1502; | | | |
| | | | DRB1_0406; DPB1-0202_DPA1-0103; DRB1_1501; | | | |
| | | | DRB1_0302; DQB1-0301_DQA1-0505; DQB1-0201_DQA1- | | | |
| | | | 0501; DRB1_0403; DRB1_1401; DRB1_1405; DQB1- | | | |
| | | | 0202_DQA1-0201; DPB1-1301_DPA1-0201; DRB5_0101; | | | |
| | | | DRB5_0102; DRB1_1301; DRB1_1102; DRB1_1101 | | | |
| 7 | IGIVNN | S | DQB1-0201_DQA1-0201; DQB1-0603_DQA1-0103; | 0.999999 | 1 | 0.999149 |
| | TVYDP | | DRB1_0803; DQB1-0501_DQA1-0101; DRB1_1001; DQB1- | | | |
| | LQPEL | | 0602_DQA1-0102; DRB1_0401; DRB3_0101; DPB1- | | | |
| | DSFKE | | 0401_DPA1-0103; DPB1-0402_DPA1-0103; DRB1_1303; | | | |
| | ELDK | | DQB1-0303_DQA1-0201; DRB1_0405; DRB1_0901; | | | |
| | | | DRB1_0411; DRB1_0404; DPB1-0201_DPA1-0103; DQB1- | | | |
| | | | 0302_DQA1-0301; DPB1-0101_DPA1-0202; DRB4_0103; | | | |
| | | | DPB1-1401_DPA1-0201; DPB1-0301_DPA1-0103; | | | |
| | | | DRB3_0301; DPB1-0901_DPA1-0201; DPB1-1701_DPA1- | | | |
| | | | 0201; DPB1-1001_DPA1-0201; DQB1-0604_DQA1-0102; | | | |
| | | | DQB1-0502_DQA1-0102; DPB1-0501_DPA1-0202; | | | |
| | | | DRB1_0701; DRB1_0101; DRB1_1502; DRB1_0406; DPB1- | | | |
| | | | 0202_DPA1-0103; DRB1_1501; DRB1_0302; DQB1- | | | |
| | | | 0301_DQA1-0505; DQB1-0201_DQA1-0501; DRB1_0403; | | | |
| | | | DRB1_1401; DRB1_1405; DQB1-0202_DQA1-0201; DPB1- | | | |
| | | | 1301_DPA1-0201; DRB5_0101; DRB5_0102; DRB1_1301; | | | |
| | | | DRB1_1102; DRB1_1101; DRB1_0802; DRB1_0301; | | | |
| | | | DRB3_0201; DRB3_0202 | | | |
| 8 | DEVRQ | S | DQB1-0301_DQA1-0601; DQB1-0601_DQA1-0103; DQB1- | 1 | 1 | 0.999546 |
| | IAPGQT | | 0301_DQA1-0303; DRB1_1001; DQB1-0602_DQA1-0102; | | | |
| | GKIAD | | DRB1_0401; DRB3_0101; DPB1-0401_DPA1-0103; DPB1- | | | |
| | YNYKL | | 0402_DPA1-0103; DRB1_1303; DQB1-0303_DQA1-0201; | | | |
| | PDDF | | DRB1_0405; DRB1_0901; DRB1_0411; DRB1_0404; DPB1- | | | |
| | | | 0201_DPA1-0103; DQB1-0302_DQA1-0301; DPB1- | | | |
| | | | 0101_DPA1-0202; DRB4_0103; DPB1-1401_DPA1-0201; | | | |
| | | | DPB1-0301_DPA1-0103; DRB3_0301; DPB1-0901_DPA1- | | | |
| | | | 0201; DPB1-1701_DPA1-0201; DPB1-1001_DPA1-0201; | | | |
| | | | DQB1-0604_DQA1-0102; DQB1-0502_DQA1-0102; DPB1- | | | |
| | | | 0501_DPA1-0202; DRB1_0701; DRB1_0101; DRB1_1502; | | | |
| | | | DRB1_0406; DPB1-0202_DPA1-0103; DRB1_1501; | | | |
| | | | DRB1_0302; DQB1-0301_DQA1-0505; DQB1-0201_DQA1- | | | |
| | | | 0501; DRB1_0403; DRB1_1401; DRB1_1405; DQB1- | | | |
| | | | 0202_DQA1-0201; DPB1-1301_DPA1-0201; DRB5_0101; | | | |
| | | | DRB5_0102; DRB1_1301; DRB1_1102; DRB1_1101; | | | |
| | | | DRB1_0802; DRB1_0301; DRB3_0201; DRB3_0202; DQB1- | | | |
| | | | 0201_DQA1-0201; DQB1-0603_DQA1-0103; DRB1_0803; | | | |
| | | | DQB1-0501_DQA1-0101 | | | |
| 9 | GDSTE | S | DRB1_0102; DQB1-0303_DQA1-0301; DRB1_1602; | 1 | 1 | 0.999816 |
| | CSNLL | | DRB1_1503; DRB1_1001; DQB1-0602_DQA1-0102; | | | |
| | LQYGS | | DRB1_0401; DRB3_0101; DPB1-0401_DPA1-0103; DPB1- | | | |
| | FCTQL | | 0402_DPA1-0103; DRB1_1303; DQB1-0303_DQA1-0201; | | | |
| | NRALT | | DRB1_0405; DRB1_0901; DRB1_0411; DRB1_0404; DPB1- | | | |
| | | | 0201_DPA1-0103; DQB1-0302_DQA1-0301; DPB1- | | | |
| | | | 0101_DPA1-0202; DRB4_0103; DPB1-1401_DPA1-0201; | | | |
| | | | DPB1-0301_DPA1-0103; DRB3_0301; DPB1-0901_DPA1- | | | |
| | | | 0201; DPB1-1701_DPA1-0201; DPB1-1001_DPA1-0201; | | | |
| | | | DQB1-0604_DQA1-0102; DQB1-0502_DQA1-0102; DPB1- | | | |
| | | | 0501_DPA1-0202; DRB1_0701; DRB1_0101; DRB1_1502; | | | |
| | | | DRB1_0406; DPB1-0202_DPA1-0103; DRB1_1501; | | | |
| | | | DRB1_0302; DQB1-0301_DQA1-0505; DQB1-0201_DQA1- | | | |
| | | | 0501; DRB1_0403; DRB1_1401; DRB1_1405; DQB1- | | | |
| | | | 0202_DQA1-0201; DPB1-1301_DPA1-0201; DRB5_0101; | | | |
| | | | DRB5_0102; DRB1_1301; DRB1_1102; DRB1_1101; | | | |
| | | | DRB1_0802; DRB1_0301; DRB3_0201; DRB3_0202; DQB1- | | | |
| | | | 0201_DQA1-0201; DQB1-0603_DQA1-0103; DRB1_0803; | | | |
| | | | DQB1-0501_DQA1-0101; DQB1-0301_DQA1-0601; DQB1- | | | |
| | | | 0601_DQA1-0103; DQB1-0301_DQA1-0303 | | | |
| 10 | KNIDG | S | DRB1_1302; DRB1_0801; DRB1_0407; DRB1_1001; DQB1- | 1 | 1 | 0.999882 |
| | YFKIYS | | 0602_DQA1-0102; DRB1_0401; DRB3_0101; DPB1- | | | |
| | KHTPIN | | 0401_DPA1-0103; DPB1-0402_DPA1-0103; DRB1_1303; | | | |
| | LVRDL | | DQB1-0303_DQA1-0201; DRB1_0405; DRB1_0901; | | | |
| | PQG | | DRB1_0411; DRB1_0404; DPB1-0201_DPA1-0103; DQB1- | | | |
| | | | 0302_DQA1-0301; DPB1-0101_DPA1-0202; DRB4_0103; | | | |
| | | | DPB1-1401_DPA1-0201; DPB1-0301_DPA1-0103; | | | |
| | | | DRB3_0301; DPB1-0901_DPA1-0201; DPB1-1701_DPA1- | | | |
| | | | 0201; DPB1-1001_DPA1-0201; DQB1-0604_DQA1-0102; | | | |
| | | | DQB1-0502_DQA1-0102; DPB1-0501_DPA1-0202; | | | |
| | | | DRB1_0701; DRB1_0101; DRB1_1502; DRB1_0406; DPB1- | | | |
| | | | 0202_DPA1-0103; DRB1_1501; DRB1_0302; DQB1- | | | |
| | | | 0301_DQA1-0505; DQB1-0201_DQA1-0501; DRB1_0403; | | | |
| | | | DRB1_1401; DRB1_1405; DQB1-0202_DQA1-0201; DPB1- | | | |
| | | | 1301_DPA1-0201; DRB5_0101; DRB5_0102; DRB1_1301; | | | |
| | | | DRB1_1102; DRB1_1101; DRB1_0802; DRB1_0301; | | | |
| | | | DRB3_0201; DRB3_0202; DQB1-0201_DQA1-0201; DQB1- | | | |
| | | | 0603_DQA1-0103; DRB1_0803; DQB1-0501_DQA1-0101; | | | |
| | | | DQB1-0301_DQA1-0601; DQB1-0601_DQA1-0103; DQB1- | | | |
| | | | 0301_DQA1-0303; DRB1_0102; DQB1-0303_DQA1-0301; | | | |
| | | | DRB1_1602; DRB1_1503 | | | |
| 11 | HADQL | S | DPB1-0601_DPA1-0103; DQB1-0401_DQA1-0301; 1 | 1 | 1 | 0.999926 |
| | TPTWR | | DRB1_0804; DRB1_1104; DRB1_1001; DQB1-0602_DQA1- | | | |
| | VYSTG | | 0102; DRB1_0401; DRB3_0101; DPB1-0401_DPA1-0103; | | | |
| | SNVFQ | | DPB1-0402_DPA1-0103; DRB1_1303; DQB1-0303_DQA1- | | | |
| | TRAGC | | 0201; DRB1_0405; DRB1_0901; DRB1_0411; DRB1_0404; | | | |
| | | | DPB1-0201_DPA1-0103; DQB1-0302_DQA1-0301; DPB1- | | | |
| | | | 0101_DPA1-0202; DRB4_0103; DPB1-1401_DPA1-0201; | | | |
| | | | DPB1-0301_DPA1-0103; DRB3_0301; DPB1-0901_DPA1- | | | |
| | | | 0201; DPB1-1701_DPA1-0201; DPB1-1001_DPA1-0201; | | | |
| | | | DQB1-0604_DQA1-0102; DQB1-0502_DQA1-0102; DPB1- | | | |
| | | | 0501_DPA1-0202; DRB1_0701; DRB1_0101; DRB1_1502; | | | |
| | | | DRB1_0406; DPB1-0202_DPA1-0103; DRB1_1501; | | | |
| | | | DRB1_0302; DQB1-0301_DQA1-0505; DQB1-0201_DQA1- | | | |
| | | | 0501; DRB1_0403; DRB1_1401; DRB1_1405; DQB1- | | | |
| | | | 0202_DQA1-0201; DPB1-1301_DPA1-0201; DRB5_0101; | | | |
| | | | DRB5_0102; DRB1_1301; DRB1_1102; DRB1_1101; | | | |
| | | | DRB1_0802; DRB1_0301; DRB3_0201; DRB3_0202; DQB1- | | | |
| | | | 0201_DQA1-0201; DQB1-0603_DQA1-0103; DRB1_0803; | | | |
| | | | DQB1-0501_DQA1-0101; DQB1-0301_DQA1-0601; DQB1- | | | |
| | | | 0601_DQA1-0103; DQB1-0301_DQA1-0303; DRB1_0102; | | | |
| | | | DQB1-0303_DQA1-0301; DRB1_1602; DRB1_1503; | | | |
| | | | DRB1_1302; DRB1_0801; DRB1_0407 | | | |
| 12 | FIAGLI | S | DRB1_1601; DRB1_1202; DPB1-0501_DPA1-0201; | 1 | 1 | 0.999989 |
| | AIVMV | | DRB1_1001; DQB1-0602_DQA1-0102; DRB1_0401; | | | |
| | TIMLC | | DRB3_0101; DPB1-0401_DPA1-0103; DPB1-0402_DPA1- | | | |
| | CMTSC | | 0103; DRB1_1303; DQB1-0303_DQA1-0201; DRB1_0405; | | | |
| | CSCL | | DRB1_0901; DRB1_0411; DRB1_0404; DPB1-0201_DPA1- | | | |
| | | | 0103; DQB1-0302_DQA1-0301; DPB1-0101_DPA1-0202; | | | |
| | | | DRB4_0103; DPB1-1401_DPA1-0201; DPB1-0301_DPA1- | | | |
| | | | 0103; DRB3_0301; DPB1-0901_DPA1-0201; DPB1- | | | |
| | | | 1701_DPA1-0201; DPB1-1001_DPA1-0201; DQB1- | | | |
| | | | 0604_DQA1-0102; DQB1-0502_DQA1-0102; DPB1- | | | |
| | | | 0501_DPA1-0202; DRB1_0701; DRB1_0101; DRB1_1502; | | | |
| | | | DRB1_0406; DPB1-0202_DPA1-0103; DRB1_1501; | | | |
| | | | DRB1_0302; DQB1-0301_DQA1-0505; DQB1-0201_DQA1- | | | |
| | | | 0501; DRB1_0403; DRB1_1401; DRB1_1405; DQB1- | | | |
| | | | 0202_DQA1-0201; DPB1-1301_DPA1-0201; DRB5_0101; | | | |
| | | | DRB5_0102; DRB1_1301; DRB1_1102; DRB1_1101; | | | |
| | | | DRB1_0802; DRB1_0301; DRB3_0201; DRB3_0202; DQB1- | | | |
| | | | 0201_DQA1-0201; DQB1-0603_DQA1-0103; DRB1_0803; | | | |
| | | | DQB1-0501_DQA1-0101; DQB1-0301_DQA1-0601; DQB1- | | | |
| | | | 0601_DQA1-0103;DQB1-0301_DQA1-0303; | | | |
| | | | DRB1_0102;cDQB1-0303_DQA1-0301; DRB1_1602; | | | |
| | | | DRB1_1503; DRB1_1302; DRB1_0801; DRB1_0407; DPB1- | | | |
| | | | 0601_DPA1-0103; DQB1-0401_DQA1-0301; DRB1_0804; | | | |
| | | | DRB1_1104 | | | |
| 1 | KDLPK | M | DQB1-0301_DQA1-0505; DRB1_0102; DQB1-0502_DQA1- | 0.802347 | 0.814186 | 0.610992 |
| | EITVAT | | 0102; DRB1_1601; DRB1_1503; DRB1_0101; DRB1_0403; | | | |
| | SRTLS | | DRB1_0406; DRB5_0102; DQB1-0303_DQA1-0201; | | | |
| | YYKLG | | DRB1_0402; DRB1_1301; DRB1_0404; DRB1_0901; | | | |
| | ASQR | | DRB1_1406; DRB1_1501; DQB1-0202_DQA1-0201; | | | |
| | | | DRB1_1602 | | | |
| 2 | MADSN | M | DRB1_1101; DPB1-0402_DPA1-0103; DRB1_0803; | 0.939299 | 0.942213 | 0.827034 |
| | GTITVE | | DRB1_1104; DQB1-0201_DQA1-0201; DRB1_0804; DQB1- | | | |
| | ELKKL | | 0302_DQA1-0301; DRB1_0801; DRB1_1102; DQB1- | | | |
| | LEQWN | | 0301_DQA1-0303; DQB1-0301_DQA1-0505; DRB1_0102; | | | |
| | LVIG | | DQB1-0502_DQA1-0102; DRB1_1601; DRB1_1503; | | | |
| | | | DRB1_0101; DRB1_0403; DRB1_0406; DRB5_0102; DQB1- | | | |
| | | | 0303_DQA1-0201; DRB1_0402; DRB1_1301; DRB1_0404; | | | |
| | | | DRB1_0901; DRB1_1406; DRB1_1501; DQB1-0202_DQA1- | | | |
| | | | 0201; DRB1_1602 | | | |
| 3 | LWLL | M | DQB1-0602_DQA1-0102; DQB1-0501_DQA1-0101; | 0.987316 | 0.987925 | 0.856152 |
| | WPVTL | | DRB3_0202; DQB1-0301_DQA1-0505; DRB1_0102; DQB1- | | | |
| | ACFVL | | 0502_DQA1-0102; DRB1_1601; DRB1_1503; DRB1_0101; | | | |
| | AAVYR | | DRB1_0403; DRB1_0406; DRB5_0102; DQB1-0303_DQA1- | | | |
| | INWITG | | 0201; DRB1_0402; DRB1_1301; DRB1_0404; DRB1_0901; | | | |
| | | | DRB1_1406; DRB1_1501; DQB1-0202_DQA1-0201; | | | |
| | | | DRB1_1602; DRB1_1101; DPB1-0402_DPA1-0103; | | | |
| | | | DRB1_0803; DRB1_1104; DQB1-0201_DQA1-0201; | | | |
| | | | DRB1_0804; DQB1-0302_DQA1-0301; DRB1_0801; | | | |
| | | | DRB1_1102; DQB1-0301_DQA1-0303 | | | |
| 4 | FIASFR | M | DRB1_0802; DRB1_0701; DRB1_0401; DRB1_0407; DQB1- | 0.99585 | 0.996745 | 0.905042 |
| | LFART | | 0301_DQA1-0505; DRB1_0102; DQB1-0502_DQA1-0102; | | | |
| | RSMWS | | DRB1_1601; DRB1_1503; DRB1_0101; DRB1_0403; | | | |
| | FNPET | | DRB1_0406; DRB5_0102; DQB1-0303_DQA1-0201; | | | |
| | NILL | | DRB1_0402; DRB1_1301; DRB1_0404; DRB1_0901; | | | |
| | | | DRB1_1406; DRB1_1501; DQB1-0202_DQA1-0201; | | | |
| | | | DRB1_1602; DRB1_1101; DPB1-0402_DPA1-0103; | | | |
| | | | DRB1_0803; DRB1_1104; DQB1-0201_DQA1-0201; | | | |
| | | | DRB1_0804; DQB1-0302_DQA1-0301; DRB1_0801; | | | |
| | | | DRB1_1102; DQB1-0301_DQA1-0303; DQB1-0602_DQA1- | | | |
| | | | 0102; DQB1-0501_DQA1-0101; DRB3_0202 | | | |
| 5 | ASQRV | M | DRB1_1302; DQB1-0303_DQA1-0301; DRB1_1502; DQB1- | 0.997289 | 0.997843 | 0.966492 |
| | AGDSG | | 0301_DQA1-0505; DRB1_0102; DQB1-0502_DQA1-0102; | | | |
| | FAAYS | | DRB1_1601; DRB1_1503; DRB1_0101; DRB1_0403; | | | |
| | RYRIG | | DRB1_0406; DRB5_0102; DQB1-0303_DQA1-0201; | | | |
| | NYKLN | | DRB1_0402; DRB1_1301; DRB1_0404; DRB1_0901; | | | |
| | | | DRB1_1406; DRB1_1501; DQB1-0202_DQA1-0201; | | | |
| | | | DRB1_1602; DRB1_1101; DPB1-0402_DPA1-0103; | | | |
| | | | DRB1_0803; DRB1_1104; DQB1-0201_DQA1-0201; | | | |
| | | | DRB1_0804; DQB1-0302_DQA1-0301; DRB1_0801; | | | |
| | | | DRB1_1102; DQB1-0301_DQA1-0303; DQB1-0602_DQA1- | | | |
| | | | 0102; DQB1-0501_DQA1-0101; DRB3_0202; DRB1_0802; | | | |
| | | | DRB1_0701; DRB1_0401; DRB1_0407 | | | |
| 1 | NGGDA | N | DRB4_0103; DRB3_0101; DRB1_1104; DRB3_0301; | 0.825314 | 0.821672 | 0.411628 |
| | ALALL | | DRB1_0804; DRB1_1301; DRB1_1406; DRB1_1405; DQB1- | | | |
| | LLDRL | | 0303_DQA1-0301; DRB1_1102; DRB1_1101 | | | |
| | NQLES | | | | | |
| | KMSGK | | | | | |
| 2 | VTPSG | N | DRB1_0701; DRB5_0101; DRB1_0301; DRB1_1303; | 0.961338 | 0.963945 | 0.661484 |
| | TWLTY | | DRB1_1502; DRB4_0103; DRB3_0101; DRB1_1104; | | | |
| | TGAIK | | DRB3_0301; DRB1_0804; DRB1_1301; DRB1_1406; | | | |
| | LDDKD | | DRB1_1405; DQB1-0303_DQA1-0301; DRB1_1102; | | | |
| | PNFKD | | DRB1_1101 | | | |
| 3 | GLPYG | N | DRB1_1001; DQB1-0602_DQA1-0102; DRB1_0401; | 0.989536 | 0.990346 | 0.762635 |
| | ANKDG | | DRB1_1503; DRB1_0403; DRB1_0404; DRB1_0407; DQB1- | | | |
| | IIWVAT | | 0202_DQA1-0201; DPB1-0101_DPA1-0201; DRB4_0103; | | | |
| | EGALN | | DRB3_0101; DRB1_1104; DRB3_0301; DRB1_0804; | | | |
| | TPKD | | DRB1_1301; DRB1_1406; DRB1_1405; DQB1-0303_DQA1- | | | |
| | | | 0301; DRB1_1102; DRB1_1101; DRB1_0701; DRB5_0101; | | | |
| | | | DRB1_0301; DRB1_1303; DRB1_1502 | | | |
| 4 | RPQGL | IN | DQB1-0601_DQA1-0103; DRB1_1402; DQB1-0303_DQA1- | 0.993939 | 0.993903 | 0.872582 |
| | PNNTA | | 0201; DRB1_0802; DQB1-0302_DQA1-0301; DQB1- | | | |
| | SWFTA | | 0502_DQA1-0102; DRB4_0103; DRB3_0101; DRB1_1104; | | | |
| | LTQHG | | DRB3_0301; DRB1_0804; DRB1_1301; DRB1_1406; | | | |
| | KEDLK | | DRB1_1405; DQB1-0303_DQA1-0301; DRB1_1102; | | | |
| | | | DRB1_1101; DRB1_0701; DRB5_0101; DRB1_0301; | | | |
| | | | DRB1_1303; DRB1_1502; DRB1_1001; DQB1-0602_DQA1- | | | |
| | | | 0102; DRB1_0401; DRB1_1503; DRB1_0403; DRB1_0404; | | | |
| | | | DRB1_0407; DQB1-0202_DQA1-0201; DPB1-0101_DPA1- | | | |
| | | | 0201 | | | |
| 5 | GTTLP | N | DPB1-0601_DPA1-0103; DQB1-0401_DQA1-0301; | 0.996624 | 0.996645 | 0.914328 |
| | KGFYA | | DRB1_1601; DQB1-0201_DQA1-0501; DRB4_0103; | | | |
| | EGSRG | | DRB3_0101; DRB1_1104; DRB3_0301; DRB1_0804; | | | |
| | GSQAS | | DRB1_1301; DRB1_1406; DRB1_1405; DQB1-0303_DQA1- | | | |
| | SRSSS | | 0301; DRB1_1102; DRB1_1101; DRB1_0701; DRB5_0101; | | | |
| | | | DRB1_0301; DRB1_1303; DRB1_1502; DRB1_1001; DQB1- | | | |
| | | | 0602_DQA1-0102; DRB1_0401; DRB1_1503; DRB1_0403; | | | |
| | | | DRB1_0404; DRB1_0407; DQB1-0202_DQA1-0201; DPB1- | | | |
| | | | 0101_DPA1-0201; DQB1-0601_DQA1-0103; DRB1_1402; | | | |
| | | | DQB1-0303_DQA1-0201; DRB1_0802; DQB1-0302_DQA1- | | | |
| | | | 0301; DQB1-0502_DQA1-0102 | | | |
| 6 | IKLDD | N | DRB1_0803; DRB1_0801; DRB3_0202; DRB3_0201; | 0.999218 | 0.999236 | 0.930092 |
| | KDPNF | | DRB4_0103; DRB3_0101; DRB1_1104; DRB3_0301; | | | |
| | KDQVI | | DRB1_0804; DRB1_1301; DRB1_1406; DRB1_1405; DQB1- | | | |
| | LLNKH | | 0303_DQA1-0301; DRB1_1102; DRB1_1101; DRB1_0701; | | | |
| | IDAYK | | DRB5_0101; DRB1_0301; DRB1_1303; DRB1_1502; | | | |
| | | | DRB1_1001; DQB1-0602_DQA1-0102; DRB1_0401; | | | |
| | | | DRB1_1503; DRB1_0403; DRB1_0404; DRB1_0407; DQB1- | | | |
| | | | 0202_DQA1-0201; DPB1-0101_DPA1-0201; DQB1- | | | |
| | | | 0601_DQA1-0103; DRB1_1402; DQB1-0303_DQA1-0201; | | | |
| | | | DRB1_0802; DQB1-0302_DQA1-0301; DQB1-0502_DQA1- | | | |
| | | | 0102; DPB1-0601_DPA1-0103; DQB1-0401_DQA1-0301; | | | |
| | | | DRB1_1601; DQB1-0201_DQA1-0501 | | | |
| 7 | RQKKQ | N | DRB1_0102; DRB1_0101; DRB5_0202; DRB1_1202; | 0.999695 | 0.999724 | 0.960521 |
| | QTVTL | | DRB1_1201; DRB4_0103; DRB3_0101; DRB1_1104; | | | |
| | LPAAD | | DRB3_0301; DRB1_0804; DRB1_1301; DRB1_1406; | | | |
| | LDDFS | | DRB1_1405; DQB1-0303_DQA1-0301; DRB1_1102; | | | |
| | KQLQQ | | DRB1_1101; DRB1_0701; DRB5_0101; DRB1_0301; | | | |
| | | | DRB1_1303; DRB1_1502; DRB1_1001; DQB1-0602_DQA1- | | | |
| | | | 0102; DRB1_0401; DRB1_1503; DRB1_0403; DRB1_0404; | | | |
| | | | DRB1_0407; DQB1-0202_DQA1-0201; DPB1-0101_DPA1- | | | |
| | | | 0201; DQB1-0601_DQA1-0103; DRB1_1402; DQB1- | | | |
| | | | 0303_DQA1-0201; DRB1_0802; DQB1-0302_DQA1-0301; | | | |
| | | | DQB1-0502_DQA1-0102; DPB1-0601_DPA1-0103; DQB1- | | | |
| | | | 0401_DQA1-0301; DRB1_1601; DQB1-0201_DQA1-0501; | | | |
| | | | DRB1_0803; DRB1_0801; DRB3_0202; DRB3_0201 | | | |
| 8 | KPRQK | N | DPB1-0301_DPA1-0103; DRB5_0102; DPB1-0901_DPA1- | 0.999814 | 0.999831 | 0.968823 |
| | RTATK | | 0201; DRB4_0103; DRB3_0101; DRB1_1104; DRB3_0301; | | | |
| | AYNVT | | DRB1_0804; DRB1_1301; DRB1_1406; DRB1_1405; DQB1- | | | |
| | QAFGR | | 0303_DQA1-0301; DRB1_1102; DRB1_1101; DRB1_0701; | | | |
| | RGPEQ | | DRB5_0101; DRB1_0301; DRB1_1303; DRB1_1502; | | | |
| | | | DRB1_1001; DQB1-0602_DQA1-0102; DRB1_0401; | | | |
| | | | DRB1_1503; DRB1_0403; DRB1_0404; DRB1_0407; DQB1- | | | |
| | | | 0202_DQA1-0201; DPB1-0101_DPA1-0201; DQB1- | | | |
| | | | 0601_DQA1-0103; DRB1_1402; DQB1-0303_DQA1-0201; | | | |
| | | | DRB1_0802; DQB1-0302_DQA1-0301; DQB1-0502_DQA1- | | | |
| | | | 0102; DPB1-0601_DPA1-0103; DQB1-0401_DQA1-0301; | | | |
| | | | DRB1_1601; DQB1-0201_DQA1-0501; DRB1_0803; | | | |
| | | | DRB1_0801; DRB3_0202; DRB3_0201; DRB1_0102; | | | |
| | | | DRB1_0101; DRB5_0202; DRB1_1202; DRB1_1201 | | | |
| 9 | LPAAD | N | DRB1_0405; DRB1_0901; DRB1_0411; DRB1_1302; | 0.999905 | 0.999894 | 0.992082 |
| | LDDFS | | DRB4_0103; DRB3_0101; DRB1_1104; DRB3_0301; | | | |
| | KQLQQ | | DRB1_0804; DRB1_1301; DRB1_1406; DRB1_1405; DQB1- | | | |
| | SMSSA | | 0303_DQA1-0301; DRB1_1102; DRB1_1101; DRB1_0701; | | | |
| | DSTQA | | DRB5_0101; DRB1_0301; DRB1_1303; DRB1_1502; | | | |
| | | | DRB1_1001; DQB1-0602_DQA1-0102; DRB1_0401; | | | |
| | | | DRB1_1503; DRB1_0403; DRB1_0404; DRB1_0407; DQB1- | | | |
| | | | 0202_DQA1-0201; DPB1-0101_DPA1-0201; DQB1- | | | |
| | | | 0601_DQA1-0103; DRB1_1402; DQB1-0303_DQA1-0201; | | | |
| | | | DRB1_0802; DQB1-0302_DQA1-0301; DQB1-0502_DQA1- | | | |
| | | | 0102; DPB1-0601_DPA1-0103; DQB1-0401_DQA1-0301; | | | |
| | | | DRB1_1601; DQB1-0201_DQA1-0501; DRB1_0803; | | | |
| | | | DRB1_0801; DRB3_0202; DRB3_0201; DRB1_0102; | | | |
| | | | DRB1_0101; DRB5_0202; DRB1_1202; DRB1_1201; DPB1- | | | |
| | | | 0301_DPA1-0103; DRB5_0102; DPB1-0901_DPA1-0201 | | | |
| 10 | KDGII | N | DQB1-0603_DQA1-0103; DRB4_0103; DRB3_0101; | 0.999927 | 0.999918 | 0.992082 |
| | WVATE | | DRB1_1104; DRB3_0301; DRB1_0804; DRB1_1301; | | | |
| | GALNT | | DRB1_1406; DRB1_1405; DQB1-0303_DQA1-0301; | | | |
| | PKDHI | | DRB1_1102; DRB1_1101; DRB1_0701; DRB5_0101; | | | |
| | GTRNP | | DRB1_0301; DRB1_1303; DRB1_1502; DRB1_1001; DQB1- | | | |
| | | | 0602_DQA1-0102; DRB1_0401; DRB1_1503; DRB1_0403; | | | |
| | | | DRB1_0404; DRB1_0407; DQB1-0202_DQA1-0201; DPB1- | | | |
| | | | 0101_DPA1-0201; DQB1-0601_DQA1-0103; DRB1_1402; | | | |
| | | | DQB1-0303_DQA1-0201; DRB1_0802; DQB1-0302_DQA1- | | | |
| | | | 0301; DQB1-0502_DQA1-0102; DPB1-0601_DPA1-0103; | | | |
| | | | DQB1-0401_DQA1-0301; DRB1_1601; DQB1-0201_DQA1- | | | |
| | | | 0501; DRB1_0803; DRB1_0801; DRB3_0202; DRB3_0201; | | | |
| | | | DRB1_0102; DRB1_0101; DRB5_0202; DRB1_1202; | | | |
| | | | DRB1_1201; DPB1-0301_DPA1-0103; DRB5_0102; DPB1- | | | |
| | | | 0901_DPA1-0201; DRB1_0405; DRB1_0901; DRB1_0411; | | | |
| | | | DRB1_1302 | | | |

Index for Table: SI, Selection; P, viral protein; S, Surface glycoprotein; M, membrane glycoprotein; NP, nucleocapsid phosphoprotein.

### Leveraging Proteomic Data to Infer Relative Viral Protein Abundance

[1165] In addition to peptide-MHC binding, another important consideration in the design of a potential SARS CoV-2 vaccine is the degree of viral protein expression in infected host cells. In order to determine the relative abundance of SARS CoV-2 proteins, we analyzed three publicly available proteomic datasets that acquired unbiased LC-MS/MS on tryptic digestions of SARS-CoV-2-infected host cells. Relative abundance of the viral proteins was estimated by spectral counting, a semi-quantitative approach whereby peptide-spectrum matches are counted, and totals are compared across proteins (Table 8). Table 8 shows spectral counts from published SARS CoV-2 proteomic datasets. MS/MS spectra assigned to peptides from SARS CoV-2 proteins were tallied across datasets, divided by protein length, and normalized within each dataset to generate FIG. 5. This analysis demonstrated the significantly wide range of expression levels of the SARS CoV-2 proteins. Specifically, it confirmed that the N protein is the most abundant viral protein across all three datasets following SARS CoV-2 infection (FIG. 5). This finding is corroborated by reports of N-derived peptides being detected in gargle solution samples from COVID-19 patients. Furthermore, the N protein has been used as a biomarker for diagnosing patients infected with the SARS-CoV virus. On the other hand, based solely on genomic information, ORF10 might be considered a potential target for vaccine development. However, there is very little proteomic and transcriptomic evidence that ORF10 is actually expressed in SARS CoV-2 infected cells. These findings emphasize the value of considering SARS CoV-2 protein expression levels in addition to HLA binding predictions and the immunogenicity of these epitopes in vaccine design strategies.

TABLE 8

| | | | | | | | | PSMs/Length- | | |
|---|---|---|---|---|---|---|---|---|---|---|
| | Seq. | PSMs | | | PSMs/Length | | | relative (%) | | |
| Protein | length | Dav. | Boj. | Bez. | Dav. | Boj. | Bez. | Dav. | Boj. | Bez. |
| S | 1273 | 1778 | 112 | 109 | 1.396700707 | 0.087981147 | 0.085624509 | 12 | 7.68 | 5.57 |
| Pp1ab | 7096 | 1245 | 17 | 131 | 0.175450958 | 0.002395716 | 0.018461105 | 1.51 | 0.21 | 1.20 |
| Orf9b | 97 | 59 | 31 | 43 | 0.608247423 | 0.319587629 | 0.443298969 | 5.23 | 27.9 | 28.84 |
| Orf8 | 121 | 32 | | | 0.26446281 | 0 | 0 | 2.27 | 0.00 | 0.00 |
| Orf7a | 121 | 21 | 2 | 5 | 0.173553719 | 0.016528926 | 0.041322314 | 1.49 | 1.44 | 2.69 |
| Orf6 | 61 | 4 | 8 | 7 | 0.06557377 | 0.131147541 | 0.114754098 | 0.56 | 11.45 | 7.47 |
| Orf3a | 275 | 115 | 22 | 25 | 0.418181818 | 0.08 | 0.090909091 | 3.59 | 6.98 | 5.91 |
| N | 419 | 4876 | 480 | 644 | 11.6372315 | 1.145584726 | 1.53699284 | 100 | 100 | 100 |
| E | 75 | 1 | | 1 | 0.013333333 | 0 | 0.013333333 | 0.11 | 0.00 | 0.87 |
| M | 222 | 293 | 36 | 55 | 1.31981982 | 0.162162162 | 0.247747748 | 11.34 | 14.16 | 16.12 |

Table index:
Boj, Bojkova et al.: PXD017710;
Bez, Bezstarosti et al.: PXD018760;
Dav, Davidson et al.: PXD018241.

### DISCUSSION

[1166] In this work, the utility and validity of the HLA-I and HLA-II binding prediction algorithms used were demonstrated to the Coronaviridae virus family, and specifically to SARS-CoV-2. The strength of the prediction is two-fold: first, we have MS-based validated predictors for both HLA-I and HLA-II binders, which potentially could be leveraged to induce both long-term CD4+ and CD8+ T cell immunity against the virus. Specifically, our HLA-II predictor, which has also been trained on a large set of mono-allelic MS data, has been shown to significantly outperform previously published tools and is used here to identify high-quality CD4+epitopes that may contribute to both cellular and humoral immunity. Second, our expansive database of supported HLA-I and HLA-II alleles provides us with the ability to not only identify many peptide-MHC allele pairs, but to generate a narrow list of peptides with many potential HLA pairings that could be presented by the entire USA, European and Asian Pacific Islander populations. By applying these algorithms to previously assayed peptide-MHC allele pairs in ViPR, we were able to demonstrate excellent concordance between our binding predictions and the results of the binding assays for both HLA-I and HLA-II epitopes. We leveraged the homology within the Coronaviridae family to demonstrate that an exceedingly high portion (~90%) of our high-ranking SARS CoV-2 peptide-MHC allele pairs for which validation was available was indeed confirmed to bind the predicted MHC allele. We also confirmed that our binding predictors can identify epitopes that are immunogenic and can lead to CD8+ T cell responses to multiple SARS CoV-2 proteins in donor PBMCs. It is plausible that our significant fraction of experimentally confirmed epitopes (of all highly predicted, tested epitopes) is only an underestimate for overall immunogenicity, since PBMCs from only three donors were used in this initial experiment. Though we did not perform T cell assays to evaluate the immunogenicity of the HLA-II predicted epitopes, such analysis would be valuable, especially given the importance of CD4+ T cells in both the cellular and humoral anti-viral response. We thus propose that a combination of B and T cell epitopes could provide long-lasting immunity from SARS CoV-2 or mitigate the severity of disease when protection is partial.

[1167] We therefore concluded that using MS-based HLA binding predictors to predict T cell epitopes from the ORFs of SARS CoV-2 provides a significantly expanded, novel set of high-quality T cell vaccine targets for the virus. This was specifically the case when comparing this study to the recent publication by Grifoni, et al., We provide ten-fold more highly predicted epitopes, across many more HLA alleles which allow us to better prioritize vaccine candidates. In addition, we provide not only bioinformatic validation with a larger set of previously reported epitopes from other viruses from the Coronaviridae family in ViPR, but also experimentally validated, novel 2019 SARS CoV-2 T cell epitopes.

[1168] The selection of target sequences can be further guided by protein expression, epitopes predicted to provide coverage to a big fraction of the population, and conserved 2019 SARS CoV-2 epitopes. First, designing therapeutics against predicted epitopes is only effective if the proteins containing those epitopes are expressed at high enough levels for efficient antigen processing and presentation to take place. Therefore, it is crucial that protein expression be considered when selecting therapeutic targets. Second, prioritization of epitopes that are predicted to bind multiple alleles could provide coverage to significant fractions of the population, while including few epitopes in the vaccine. Lastly, during the viral spread and expansion through the population, genomic modifications are acquired, generating sequence diversity among the 2019 SARS CoV-2 population. This diversity may allow evasion of immune pressure, and therefore it is important to prioritize epitopes that are conserved across the 2019 SARS CoV-2 population.

[1169] While limiting epitope selection to highly expressed proteins, epitopes predicted to bind multiple high frequency HLA alleles, and conserved viral epitopes restricts the number of potential epitopes, the breadth of the list we provide increases the likelihood of identifying many high-quality, highly expressed epitopes. The epitopes characterized here, combined with insights on 2019 SARS CoV-2 protein expression along with further efforts to confirm immunogenicity, can provide pre-clinical validation of epitopes that may be vaccine candidates to induce strong cellular immunity.

### CONCLUSIONS

[1170] In summary, the work provides the most extensive set of both CD4+ and CD8+ T cells epitopes that are spanning the entire 2019 SARS CoV-2 genome and binding a wide set of HLA-I and HLA-II alleles. Combining this epitope list to protein expression levels, population coverage and viral sequence conservation will lead to generation of a short list of vaccine epitope candidates that are likely immunogenic in the majority of the population. Our predicted list of CD4+ and CD8+ T cell epitopes will complement B cell epitopes and serve as a resource for the scientific community to generate potent 2019 SARS CoV-2 vaccine epitopes and generate long-lasting T cell immunity.

### Example 2: HLA Class I and Class II Binding Assays

[1171] The following example of peptide binding to HLA molecules demonstrates quantification of binding affinities of HLA class I and class II peptides. Binding assays can be performed with peptides that are either motif-bearing or not motif-bearing. 2019 SARS CoV-2 infected cell lines were prepared. Cell lysates are prepared and HLA molecules purified in accordance with disclosed protocols (Sidney et al., Current Protocols in Immunology 18.3.1 (1998); Sidney, et al., J. Immunol. 154:247 (1995); Sette, et al., Mol. Immunol. 31:813 (1994)). HLA molecules are purified from lysates by affinity chromatography. The lysates are passed over a column of Sepharose CL-4B beads coupled to an appropriate antibody. The anti-HLA column is then washed with 10 mM Tris-HCL, pH 8.0, in 1% NP-40, PBS, and PBS containing 0.4% n-octylglucoside and HLA molecules are eluted with 50 mM diethylamine in 0.15M NaCl containing 0.4% n-octylglucoside, pH 11.5. A 1/25 volume of 2.0M Tris, pH 6.8, is added to the eluate to reduce the pH. Eluates are then concentrated by centrifugation in Centriprep 30 concentrators (Amicon, Beverly, MA). Protein content is evaluated by a BCA protein assay (Pierce Chemical Co., Rockford, IL) and confirmed by SDS-PAGE.

[1172] A detailed description of the protocol utilized to measure the binding of peptides to Class I and Class II MHC has been published (Sette et al., Mol. Immunol. 31:813, 1994; Sidney et al., in Current Protocols in Immunology, Margulies, Ed., John Wiley & Sons, New York, Section 18.3, 1998). Briefly, purified MHC molecules (5 to 500 nM) are incubated with various unlabeled peptide inhibitors and 1-10 nM ¹²⁵I-radiolabeled probe peptides for 48 h in PBS containing 0.05% Nonidet P40 (NP40) (or 20% w/v digitonin for H-2 IA assays) in the presence of a protease inhibitor cocktail. All assays are at pH 7.0 with the exception of DRB1*0301, which was performed at pH 4.5, and DRB1*1601 (DR2w21131) and DRB4*0101 (DRw53), which were performed at pH 5.0.

[1173] Following incubation, MHC-peptide complexes are separated from free peptide by gel filtration on 7.8 mm×15 cm TSK200 columns (TosoHaas 16215, Montgomeryville, PA). Because the large size of the radiolabeled peptide used for the DRB1*1501 (DR2w2 (31) assay makes separation of bound from unbound peaks more difficult under these conditions, all DRB1*1501 (DR2w2 (31) assays were performed using a 7.8 mm×30 cm TSK2000 column eluted at 0.6 mLs/min. The eluate from the TSK columns is passed through a Beckman 170 radioisotope detector, and radioactivity is plotted and integrated using a Hewlett-Packard 3396A integrator, and the fraction of peptide bound is determined.

[1174] Radiolabeled peptides are iodinated using the chloramine-T method. Typically, in preliminary experiments, each MHC preparation is titered in the presence of fixed amounts of radiolabeled peptides to determine the concentration of HLA molecules necessary to bind 10-20% of the total radioactivity. All subsequent inhibition and direct binding assays are performed using these HLA concentrations.

[1175] Since under these conditions [label]< [HLA] and IC50> [HLA], the measured IC50 values are reasonable approximations of the true K_{D} values. Peptide inhibitors are typically tested at concentrations ranging from 120 μg/ml to 1.2 ng/ml, and are tested in two to four completely independent experiments. To allow comparison of the data obtained in different experiments, a relative binding figure is calculated for each peptide by dividing the IC50 of a positive control for inhibition by the IC50 for each tested peptide (typically unlabeled versions of the radiolabeled probe peptide). For database purposes, and inter-experiment comparisons, relative binding values are compiled. These values can subsequently be converted back into IC50 nM values by dividing the IC50 nM of the positive controls for inhibition by the relative binding of the peptide of interest. This method of data compilation has proven to be the most accurate and consistent for comparing peptides that have been tested on different days, or with different lots of purified MHC.

[1176] Because the antibody used for HLA-DR purification (LB3.1) is a-chain specific, 131 molecules are not separated from 133 (and/or 134 and (35) molecules. The 131 specificity of the binding assay is obvious in the cases of DRB1*0101 (DR1), DRB1*0802 (DR8w2), and DRB1*0803 (DR8w3), where no 133 is expressed. It has also been demonstrated for DRB1*0301 (DR3) and DRB3*0101 (DR52a), DRB1*0401 (DR4w4), DRB1*0404 (DR4w14), DRB1*0405 (DR4w15), DRB1*1101 (DR5), DRB1*1201 (DR5w12), DRB1*1302 (DR6w19) and DRB1*0701 (DR7). The problem of13 chain specificity for DRB1*1501 (DR2w2 (31), DRB5*0101 (DR2w2 (32), DRB1*1601 (DR2w21131), DRB5*0201 (DR51Dw21), and DRB4*0101 (DRw53) assays is circumvented by the use of fibroblasts. Development and validation of assays with regard to DRP molecule specificity have been described previously (see, e.g., Southwood et al., J. Immunol. 160:3363-3373, 1998).

[1177] The live cell/flow cytometry-based assays can also be used. This is a well-established assay utilizing the TAP-deficient hybridoma cell line T2 (American Type Culture Collection (ATCC Accession No. CRL-1992), Manassas, Va.). The TAP deficiency in this cell line leads to inefficient loading of MHCI in the ER and an excess of empty MHCIs. Salter and Cresswell, EMBO J. 5:94349 (1986); Salter, Immunogenetics 21:235-46 (1985). Empty MHCIs are highly unstable, and are therefore short-lived. When T2 cells are cultured at reduced temperatures, empty MHCIs appear transiently on the cell surface, where they can be stabilized by the exogenous addition of MHCI-binding peptides. To perform this binding assay, peptide-receptive MHCIs were induced by culturing aliquots of 107 T2 cells overnight at 26° C. in serum free AIM-V medium alone, or in medium containing escalating concentrations (0.1 to 100 μM) of peptide. Cells were then washed twice with PBS, and subsequently incubated with a fluorescent tagged HLA-A02:01-specific monoclonal antibody, BB7.2, to quantify cell surface expression. Samples were acquired on a FACS Calibur instrument (Becton Dickinson) and the mean fluorescence intensity (MFI) determined using the accompanying Cellquest software.

### Example 3: Confirmation of Immunogenicity

[1178] In an exemplary method for confirmation of immunogenicity, in vitro education (IVE) assays are used to test the ability of each test peptide to expand CD8+ T cells. Mature professional APCs are prepared for these assays in the following way. 80-90×10⁶ PBMCs from a healthy human donor are plated in 20 ml of RPMI media containing 2% human AB serum, and incubated at 37° C. for 2 hours to allow for plastic adherence by monocytes. Non-adherent cells are removed and the adherent cells are cultured in RPMI, 2% human AB serum, 800 IU/ml of GM-CSF and 500 IU/ml of IL-4. After 6 days, TNF-alpha is added to a final concentration of 10 ng/ml. On day 7, the dendritic cells (DC) are matured either by the addition of 12.5 mg/ml poly I: C or 0.3 μg/ml of CD40L. The mature dendritic cells (mDC) are harvested on day 8, washed, and either used directly or cryopreserved for future use.

[1179] For the IVE of CD8+ T cells, aliquots of 2×10⁵ mDCs are pulsed with each peptide at a final concentration of 100 micromole, incubated for 4 hours at 37° C., and then irradiated (2500 rads). The peptide-pulsed mDCs are washed twice in RPMI containing 2% human AB serum. 2×10⁵ mDCs and 2×10⁶ autologous CD8+ cells are plated per well of a 24-well plate in 2 ml of RPMI containing 2% human AB, 20 ng/ml IL-7 and 100 μg/ml of IL-12, and incubated for 12 days. The CD8+ T cells are then re-stimulated with peptide-pulsed, irradiated mDCs. Two to three days later, 20 IU/ml IL-2 and 20 ng/IL7 are added. Expanding CD8+ T cells are re-stimulated every 8-10 days, and are maintained in media containing IL-2 and IL-7. Cultures are monitored for peptide-specific T cells using a combination of functional assays and/or tetramer staining. Parallel IVES with the modified and parent peptides allowed for comparisons of the relative efficiency with which the peptides expanded peptide-specific T cells.

### Quantitative and Functional Assessment of CD8+ and CD4+ T Cells

### Tetramer Staining

[1180] MHC tetramers are purchased or manufactured on-site, and are used to measure peptide-specific T cell expansion in the IVE assays. For the assessment, tetramer is added to 1×10⁵ cells in PBS containing 1% FCS and 0.1% sodium azide (FACS buffer) according to manufacturer's instructions. Cells are incubated in the dark for 20 minutes at room temperature. Antibodies specific for T cell markers, such as CD8, are then added to a final concentration suggested by the manufacturer, and the cells are incubated in the dark at 4° C. for 20 minutes. Cells are washed with cold FACS buffer and resuspended in buffer containing 1% formaldehyde. Cells are acquired on a FACS Calibur (Becton Dickinson) instrument, and are analyzed by use of Cellquest software (Becton Dickinson). For analysis of tetramer positive cells, the lymphocyte gate is taken from the forward and side-scatter plots. Data are reported as the percentage of cells that were CD8+/Tetramer+.

[1181] CD4+ T cell responses towards the peptide antigens can be tested using the ex vivo induction protocol. In this example, CD4+ T cell responses were identified by monitoring IFNγ and/or TNFα production in an antigen specific manner.

[1182] Evaluation of Antigen Presentation: For a subset of predicted antigens, the affinity of the viral epitopes for the indicated HLA alleles and stability of the neoepitopes with the HLA alleles was determined. An exemplary detailed description of the protocol utilized to measure the binding affinity of peptides to Class I MHC has been published (Sette et al, Mol. Immunol. 31 (11): 813-22, 1994). In brief, MHCI complexes were prepared and bound to radiolabeled reference peptides. Peptides were incubated at varying concentrations with these complexes for 2 days, and the amount of remaining radiolabeled peptide bound to MHCI was measured using size exclusion gel-filtration. The lower the concentration of test peptide needed to displace the reference radiolabeled peptide demonstrates a stronger affinity of the test peptide for MHCI. Peptides with affinities to MHCI<50 nM are generally considered strong binders while those with affinities <150 nM are considered intermediate binders and those <500 nM are considered weak binders (Fritsch et al, 2014).

[1183] An exemplary detailed description of the protocol utilized to measure the binding stability of peptides to Class I MHC has been published (Harndahl et al. J Immunol Methods. 374:5-12, 2011). Briefly, synthetic genes encoding biotinylated MHC-I heavy and light chains are expressed in E. coli and purified from inclusion bodies using standard methods. The light chain (B2m) is radio-labeled with iodine (125I), and combined with the purified MHC-I heavy chain and peptide of interest at 18° C. to initiate pMHC-I complex formation. These reactions are carried out in streptavidin coated microplates to bind the biotinylated MHC-I heavy chains to the surface and allow measurement of radiolabeled light chain to monitor complex formation. Dissociation is initiated by addition of higher concentrations of unlabeled light-chain and incubation at 37° C. Stability is defined as the length of time in hours it takes for half of the complexes to dissociate, as measured by scintillation counts. MHC-II binding affinity with peptides is measured following the same general procedure as with measuring MHCI-peptide binding affinity. Prediction algorithms utilized for predicting MHCII alleles for binding to a given peptide are described herein. Besides, NetMHCIIpan may be utilized for prediction of binding.

[1184] To assess whether antigens could be processed and presented from the larger polypeptide context, peptides eluted from HLA (class I or class II) molecules isolated from cells expressing the genes of interest were analyzed by tandem mass spectrometry (MS/MS).

### ELISPOT

[1185] Peptide-specific T cells are functionally enumerated using the ELISPOT assay (BD Biosciences), which measures the release of IFNgamma from T cells on a single cell basis. Target cells (T2 or HLA-A0201 transfected C1Rs) were pulsed with 10 μM peptide for 1 hour at 37° C., and washed three times. 1×10⁵ peptide-pulsed targets are co-cultured in the ELISPOT plate wells with varying concentrations of T cells (5×10² to 2×10³) taken from the IVE culture. Plates are developed according to the manufacturer's protocol, and analyzed on an ELISPOT reader (Cellular Technology Ltd.) with accompanying software. Spots corresponding to the number of IFNgamma-producing T cells are reported as the absolute number of spots per number of T cells plated. T cells expanded on modified peptides are tested not only for their ability to recognize targets pulsed with the modified peptide, but also for their ability to recognize targets pulsed with the parent peptide.

### CD107 Staining

[1186] CD107a and b are expressed on the cell surface of CD8+ T cells following activation with cognate peptide. The lytic granules of T cells have a lipid bilayer that contains lysosomal-associated membrane glycoproteins (“LAMPs”), which include the molecules CD107a and b. When cytotoxic T cells are activated through the T cell receptor, the membranes of these lytic granules mobilize and fuse with the plasma membrane of the T cell. The granule contents are released, and this leads to the death of the target cell. As the granule membrane fuses with the plasma membrane, C107a and b are exposed on the cell surface, and therefore are markers of degranulation. Because degranulation as measured by CD107 a and b staining is reported on a single cell basis, the assay is used to functionally enumerate peptide-specific T cells. To perform the assay, peptide is added to HLA-A0201-transfected cells C1R to a final concentration of 20 μM, the cells were incubated for 1 hour at 37° C., and washed three times. 1×10⁵ of the peptide-pulsed CIR cells were aliquoted into tubes, and antibodies specific for CD107 a and b are added to a final concentration suggested by the manufacturer (Becton Dickinson). Antibodies are added prior to the addition of T cells in order to “capture” the CD107 molecules as they transiently appear on the surface during the course of the assay. 1×10⁵ T cells from the culture are added next, and the samples were incubated for 4 hours at 37° C. The T cells are further stained for additional cell surface molecules such as CD8 and acquired on a FACS Calibur instrument (Becton Dickinson). Data is analyzed using the accompanying Cellquest software, and results were reported as the percentage of CD8+CD107 a and b+ cells.

### CTL Lysis

[1187] Cytotoxic activity is measured using a chromium release assay. Target T2 cells are labeled for 1 hour at 37° C. with Na⁵¹Cr and washed 5×10³ target T2 cells were then added to varying numbers of T cells from the IVE culture. Chromium release is measured in supernatant harvested after 4 hours of incubation at 37° C. The percentage of specific lysis is calculated as:

Experimental release−spontaneous release/Total release−spontaneous release×100

### Example 4: Peptide Composition for Prophylactic or Therapeutic Uses

[1188] Immunogenic or vaccine compositions of the present disclosure are used to inhibit viral replication. For example, a polyepitopic composition (or a nucleic acid comprising the same) containing multiple CTL and HTL epitopes is administered to individuals having viral infections. The composition is provided as a single lipidated polypeptide that encompasses multiple epitopes. The composition is administered in an aqueous carrier comprised of alum. The dose of peptide for the initial immunization is from about 1 to about 50,000 lig, generally 100-5,000 ps, for a 70 kg patient. The initial administration is followed by booster dosages at 4 weeks followed by evaluation of the magnitude of the immune response in the patient, by techniques that determine the presence of epitope-specific CTL populations in a PBMC sample. Additional booster doses are administered as required. The composition is found to be both safe and efficacious to inhibit viral replication.

[1189] Alternatively, the polyepitopic composition can be administered as a nucleic acid, for example as RNA, in accordance with methodologies known in the art and disclosed herein.

[1190] Viral epitope binding agents, such as TCR or CARs can be administered in accordance with methodologies known in the art and disclosed herein. The binding agents can be administered as polypeptides or polynucleotides, for example RNA, encoding the binding agents, or as a cellular therapy, by administering cells expressing the binding agents.

[1191] Viral epitope peptides, polynucleotides, binding agents, or cells expressing these molecules can be delivered to the same patient via multiple methodologies known in the art, and can further be combined with other therapies (e.g., anti-viral therapies).

### Example 5. Administration of Compositions Using Dendritic Cells

[1192] Vaccines comprising epitopes of the present disclosure may be administered using dendritic cells. In this example, the peptide-pulsed dendritic cells can be administered to a patient to stimulate a CTL response in vivo. In this method dendritic cells are isolated, expanded, and pulsed with a vaccine comprising peptide CTL and HTL epitopes of the present disclosure. The dendritic cells are infused back into the patient to elicit CTL and HTL responses in vivo. The induced CTL and HTL then destroy (CTL) or facilitate destruction (HTL) of the specific target cells that bear the proteins from which the epitopes in the vaccine are derived.

[1193] Alternatively, ex vivo CTL or HTL responses to a particular viral antigen can be induced by incubating in tissue culture the patient's, or genetically compatible, CTL or HTL precursor cells together with a source of antigen-presenting cells, such as dendritic cells, and the appropriate immunogenic peptides.

[1194] After an appropriate incubation time (typically about 7-28 days), in which the precursor cells are activated and expanded into effector cells, the cells are infused back into the patient, where they will destroy (CTL) or facilitate destruction (HTL) of their specific target cells, i.e., cells displaying viral epitopes.

### Example 6: Identification of Mutant Sequences with Immunogenic Potential

[1195] For each epitope, the full-length amino acid sequence of the viral epitope was derived. Any constituent 9-mer or 10-mer protein sequence was scored for binding potential on six common HLA alleles (HLA-A01: 01, HLA-A02:01. HLA-A03: 01, HLA-A24: 02, HLA-B07:02, and HLA-B08:01) using available algorithms. Any peptide scoring better than 1000 nM was nominated.

[1196] For each epitope, the full-length amino acid sequence of the viral epitope was derived. Any constituent 9mer or 10mer not found in the germline protein sequence was flagged and scored for binding potential on six common HLA alleles (HLA-A01:01, HLA-A02:01. HLA-A03:01, HLA-A24:02, HLA-B07:02, and HLA-B08:01) using available algorithms.

### Example 7: SARS CoV-2 (2019 SARS-Cov 2) Peptide String Designs

[1197] Provided herein are special constructs “strings” of multiple 2019 SARS CoV-2 nucleocapsid epitopes for therapeutic application. These strings are designed to contain specific epitopes of the 2019 SARS CoV-2 nucleocapsid each of which are individually disclosed in the previous examples in this application, and predicted by the MHC-binding algorithm as described above. These strings are designed for therapeutic use in treating COVID 19 and can be administered as the nucleic acid string constructs, e.g. mRNA encapsulated in a lipid nanoparticle.

[1198] The strings are designed to include a 5′UTR and a 3′UTR. Epitopes are interconnected by peptide linkers, encoded by the respective nucleic acid sequences. Some linkers have specific cleavage sites. Table 11 and Table 12 show the complete sequences of amino acids and the nucleotide sequences encoding them. The nucleotide sequences are further codon optimized for efficient translation in human. Tables 9 and 10 provide construct maps, detailing the segments and sequences corresponding to each string in the Table 11 and 12 respectively. FIG. 6A and FIG. 6B exemplify graphically the design of the strings of Group 1, sequences of RS C1-C4. FIG. 6B display a more detailed layout of FIG. 6A. FIG. 7A and FIG. 7B exemplify graphically the design of the strings of Group 2, sequences of RS C5-C8. FIG. 7B displays a more detailed layout of FIG. 7A. In some cases, the strings are also identified as RS C1n, RS-C2n etc.

[1199] The string named “RS_C1 GSS linkers” (abbreviated RS C1) encodes an ORF having an amino acid length of 1266 amino acids, and the nucleotide sequence encoding the ORF is 3798 nucleotides long. The entire string is 4107 nucleotides long and encodes a peptide string that is 1369 amino acids long. Table 11 exemplifies the amino acid and nucleic acid sequences (not codon optimized). An exemplary codon optimized sequence for string named “RS C1 GSS linkers” is:

(SEQ ID RS C1n)
ATGAGGGTAATGGCTCCGCGCACCCTTATATTGCTTCTGTCTGGGGCGCTTGCGCTT
ACGGAAACTTGGGCAGGGTCTGGTGGGTCTGGAGGTGGTGGTTCCGGCGGGAGTGATAATG
GACCTCAGAACCAACGCAACGCACCCAGGATCACATTTGGTGGGCCATCCGACTCCACTGG
CAGCAACCAAAACGGTGAACGAAGTGGCGCGAGATCCAAGCAGCGCCGCCCTCAAGGTTT
GCCGAATAACACAGCCAGCTGGTTCACTGCCTTGACTCAGCATGGCAAGGAAGATTTGAAA
TTCCCACGAGGACAGGGTGTCCCTATAAATACGAATTCCAGTCCCGATGATCAGATCGGTTA
TTATAGAAGAGCTACAAGGCGAATCCGGGGGGGGGATGGCAAGATGAAAGACCTGAGCCC
GCGCTGGTATTTCTATTACCTGGGAACTGGACCTGAAGCGGGCCTCCCTTATGGTGCGAATA
AAGACGGAATAATCTGGGTGGCTACGGAAGGGGCCCTGAACACGCCCAAGGATCACATCG
GCACACGCAATCCGGCGAACAATGCCGCGATAGTGCTGCAGCTGCCACAAGGCACCACACT
GCCAAAGGGGTTTTACGCAGAAGGCTCCAGAGGTGGGTCACAAGCCTCTTCTCGATCCTCTT
CCCGGAGCAGAAATAGCTCACGAAACTCCACCCCGGGCAGTTCCAGAGGCACAAGTCCTGC
TCGCATGGCAGGTAATGGAGGTGACGCCGCTCTCGCGCTTCTTCTCCTCGACAGACTGAATC
AGCTTGAGAGTAAAATGAGTGGAAAGGGACAGCAGCAACAGGGGCAAACAGTGACCAAAA
AATCAGCTGCGGAAGCCAGCAAGAAGCCGCGCCAGAAACGGACAGCGACTAAAGCCTACA
ATGTTACCCAAGCCTTCGGCCGCAGAGGGCCGGAGCAAACTCAGGGCAACTTCGGCGATCA
GGAACTGATCCGCCAGGGAACAGATTATAAACATTGGCCCCAAATCGCACAATTTGCACCC
TCCGCGTCTGCGTTCTTCGGCATGAGCCGGATTGGTATGGAAGTAACACCGAGCGGCACCT
GGCTTACATATACAGGCGCGATTAAATTGGATGACAAGGATCCCAATTTTAAGGACCAAGT
GATATTGCTCAACAAACATATTGATGCGTATAAGACTTTTCCTCCTACTGAACCAAAGAAGG
ATAAGAAAAAAAAGGCTGATGAAACACAAGCTCTTCCTCAACGCCAGAAAAAGCAACAGA
CAGTTACCTTGCTCCCGGCGGCCGATCTTGATGATTTTTCCAAGCAGCTGCAACAGTCTATG
TCATCAGCCGACTCTACCCAAGCAGGCGGTTCAGGTGGCGGCGGTTCTGGTGGCGACCCTA
AGATATCCGAAATGCACCCCGCACTCAGACTGGTAGACCCCCAAATACAACTGGCGGTTAC
ACGGATGGAGAACGCGGTTGGCAGGGACCAGAATAACGTGGGGCCAAAGGTGTATCCTAT
CATCCTCAGATTGGGTAGTCCCCTCAGCTTGAATATGGCTAGAAAAACACTGAATTCATTGG
AAGACAAGGCGTTCCAACTGACACCGATTGCGGTGCAGATGACAAAGCTCGCTACAACCGA
GGAACTCCCAGACGAGTTTGTAGTAGTCACAGTCAAGGGTGGCTCAGGCGGCGGAGGCTCA
GGTGGATACCATTTTTTTCATACGACGGATCCATCTTTTCTCGGCCGATATATGAGCGCGCT
CTTCGCAGACGATCTGAATCAGCTCACGGGATACCACACAGACTTCAGTAGTGAAATTATC
GGTTATCAGTTGATGTGCCAGCCGATATTGTTGGCTGAGGCTGAACTTGCTAAGAATGTCTC
CCTCATCTTGGGGACAGTCAGCTGGAACCTTAAACGCCGCTACTTGCTGTCTGCGGGTATCT
TTGGGGCTATTACGGATGTATTTTACAAAGAAAACAGCTATAAAGTACCGACCGACAATTA
CATCACGACTTATGCACGCATGGCGGCACCAAAGGAAATCATATTTCTTGAGGGGGAAACT
CTGTTCGGAGACGATACAGTAATAGAAGTCGCTATTATACTTGCTTCATTTTCAGCCAGTAC
TCGACGCATGGCTATGGTGACCAATAATACTTTCACGCTGAAGGTTCCTCATGTGGGCGAAA
TCCCCGTCGCCTATCGCAAGGTCCTGCTCAAGACTATTCAACCTCGCGTTGAAAAGTACCTT
TTCGATGAAAGCGGGGAATTTAAACTCAGCGAAGTGGGCCCTGAACACTCACTCGCAGAAT
ATTATATTTTCTTTGCCTCCTTTTATTATAAACGGAATGGCGGCGGCTCTGGCGGAGGTGGG
TCTGGTGGCGATCTCTTTATGCGGATCTTTACAATAGGGACCGTTACATTGAAGCAAGGGGA
AATCAAGGACGCCACACCGTCCGATTTCGTTAGAGCAACCGCCACGATTCCTATCCAGGCA
TCCTTGCCCTTCGGGTGGCTGATAGTAGGTGTAGCACTCCTTGCAGTCTTTCAAAGCGCATC
CAAAATCATTACCCTCAAGAAACGCTGGCAGCTTGCCCTTTCTAAGGGAGTACATTTCGTAT
GTAATCTGTTGCTCCTGTTCGTTACAGTTTATAGCCATCTCTTGCTCGTTGCCGCTGGGCTGG
AAGCCCCATTTTTGTACCTGTACGCCCTTGTGTATTTTCTTCAAAGCATAAATTTCGTGAGGA
TTATCATGCGCCTCTGGCTGTGCTGGAAATGCCGCTCAAAAAATCCACTTCTTTATGACGCA
AACTATTTTCTCTGTTGGCATACAAATTGTTACGATTATTGTATACCTTACAACAGTGTGACG
TCCTCCATAGTCATCACCAGCGGAGATGGTACAACGTCACCCATTTCTGAGCACGACTACCA
AATAGGCGGCTATACGGAGAAGTGGGAATCTGGTGTAAAAGATTGCGTGGTGCTTCACTCT
TATTTTACTTCAGATTACTACCAGCTTTATAGCACTCAACTTTCTACCGATACAGGAGTGGA
ACACGTCACATTTTTTATATACAACAAGATTGTCGATGAACCCGAAGAACACGTGCAAATA
CATACAATCGACGGCTCCTCAGGAGTCGTCAATCCAGTCATGGAACCAATCTACGATGAGC
CGACAACTACCACTAGTGTACCGCTCGGGGGAAGCGGGGGCGGAGGTAGCGGCGGAGCAG
ACAGTAATGGTACTATAACTGTGGAGGAGCTCAAGAAGCTCCTTGAGCAATGGAATCTGGT
CATAGGTTTTCTGTTTCTTACCTGGATATGCCTTCTTCAGTTCGCCTATGCGAATCGCAACCG
CTTCCTGTACATCATAAAGCTCATATTCCTCTGGCTGCTCTGGCCGGTTACTCTTGCCTGTTT
TGTTCTTGCTGCTGTATACCGCATTAATTGGATAACGGGGGGAATAGCGATCGCGATGGCAT
GCTTGGTGGGATTGATGTGGCTGAGCTACTTTATAGCGTCATTTAGGCTTTTTGCGAGGACT
AGATCCATGTGGTCCTTTAATCCCGAAACTAACATTCTTCTCAATGTACCGTTGCATGGAAC
TATTTTGACTAGACCCCTTCTCGAGAGTGAGCTGGTGATAGGAGCCGTGATACTCAGGGGTC
ATCTCCGGATTGCCGGTCACCATTTGGGTAGATGTGACATAAAAGATCTCCCAAAGGAAAT
TACGGTAGCTACGTCTCGAACCCTTTCATACTACAAACTCGGTGCTAGCCAGCGAGTGGCTG
GGGATAGCGGCTTCGCGGCGTATTCTCGCTACAGAATTGGAAACTACAAGTTGAATACGGA
CCACTCATCAAGTAGCGATAACATTGCACTGCTTGTGCAGGGTGGTAGTCTCGGGGGGGGC
GGATCCGGTATCGTGGGCATAGTTGCGGGTCTCGCTGTGCTGGCTGTGGTCGTGATCGGCGC
GGTCGTAGCTACCGTGATGTGTAGGCGGAAAAGCAGTGGTGGTAAAGGTGGATCATATAGT
CAGGCTGCATCATCTGATTCCGCTCAAGGAAGCGACGTCAGCCTGACAGCTTGATAA

[1200] The string named “RS C2 GSS linkers inverted” (abbreviated RS C2) encodes an ORF having an amino acid length of 1266 amino acids, and the nucleotide sequence encoding the ORF is 3798 nucleotides long. The entire string is 4107 nucleotides long and encodes a peptide string that is 1369 amino acids long. Table 11 exemplifies the amino acid sequence and the nucleic acid sequences (not codon optimized) encoding the same. An exemplary codon optimized sequence for string named “RS C2 GSS linkers inverted” is:

(SEQ ID RS C2n)
ATGCGAGTCATGGCGCCGCGCACCCTGATACTTCTGCTTAGCGGCGCTTTGGCCCT
CACCGAGACATGGGCTGGCAGCGGTGGTTCTGGAGGCGGAGGATCAGGCGGAGCGGACAG
CAATGGCACGATCACTGTGGAGGAGCTCAAAAAACTTTTGGAACAATGGAATTTGGTAATT
GGTTTCTTGTTTCTTACTTGGATATGCCTGCTTCAGTTCGCCTATGCGAACAGAAATAGATTT
TTGTATATCATTAAATTGATATTTCTTTGGTTGCTTTGGCCTGTTACTCTGGCTTGTTTCGTCC
TCGCTGCGGTTTATCGGATAAATTGGATTACGGGTGGAATCGCAATTGCCATGGCCTGTCTG
GTCGGTCTGATGTGGCTTTCCTACTTCATAGCATCATTTAGGCTGTTCGCGAGAACGCGAAG
CATGTGGAGTTTCAACCCCGAGACGAATATCCTTTTGAACGTGCCTCTTCATGGCACTATTC
TCACTCGACCTCTGCTTGAATCCGAGCTCGTCATCGGCGCGGTAATCCTCCGGGGTCATCTG
CGGATCGCAGGTCACCACCTCGGGCGGTGTGATATCAAGGATCTTCCGAAAGAAATTACCG
TAGCTACTTCACGCACACTCAGCTACTACAAGCTGGGTGCTTCACAAAGAGTCGCCGGTGAT
TCTGGTTTCGCTGCGTATAGCAGGTACCGAATAGGAAATTACAAGCTCAATACCGATCATTC
CTCCAGCTCAGATAACATAGCCCTGCTTGTGCAAGGGGGATCCGGAGGAGGAGGTTCAGGC
GGTGACTTGTTTATGAGGATCTTTACCATCGGAACAGTGACACTCAAACAAGGGGAAATAA
AGGACGCCACTCCGTCAGACTTTGTTAGAGCAACAGCGACTATTCCGATTCAAGCCAGCCTT
CCTTTCGGGTGGCTCATAGTGGGCGTCGCATTGCTGGCGGTGTTTCAGAGTGCGAGTAAGAT
CATAACCCTCAAAAAGCGGTGGCAGTTGGCGTTGTCTAAAGGGGTACATTTTGTCTGCAACC
TTCTGCTCCTGTTCGTAACAGTTTATTCTCACCTGCTGTTGGTTGCGGCCGGTCTGGAGGCCC
CATTTCTTTATCTTTACGCACTTGTTTATTTCCTTCAATCCATAAATTTCGTTCGGATCATCAT
GAGATTGTGGCTCTGCTGGAAGTGCAGATCCAAAAACCCTCTCCTCTACGACGCGAATTATT
TCTTGTGTTGGCACACAAATTGCTATGACTATTGCATACCGTATAACTCCGTCACTTCTTCAA
TCGTAATCACCTCAGGCGACGGAACCACATCTCCCATCTCTGAGCACGACTACCAGATTGGC
GGATATACTGAAAAGTGGGAATCCGGTGTAAAGGACTGCGTAGTACTCCACTCATACTTCA
CTAGTGATTACTATCAACTCTACAGCACCCAGTTGAGCACTGATACGGGGGTCGAGCATGT
AACCTTCTTCATCTATAACAAAATAGTTGACGAGCCAGAGGAGCATGTACAAATACATACC
ATTGACGGTTCTTCTGGAGTCGTGAATCCGGTAATGGAACCTATTTATGATGAACCCACAAC
TACTACAAGTGTACCCCTTGGAGGCAGCGGCGGGGGTGGGTCTGGCGGATATCATTTCTTTC
ACACGACGGACCCTAGTTTTCTTGGTAGGTATATGAGCGCTCTTTTTGCGGATGATCTCAAT
CAGCTTACGGGCTACCACACGGACTTCAGTAGTGAAATAATCGGGTATCAATTGATGTGCC
AACCTATTCTGCTCGCGGAGGCAGAACTCGCCAAGAACGTTTCTCTGATCCTCGGCACGGTA
TCTTGGAATCTTAAAAGGAGATACCTTCTGAGCGCAGGCATTTTTGGCGCAATAACAGATGT
GTTTTACAAAGAAAATAGCTATAAGGTTCCTACAGACAACTACATAACCACATATGCAAGG
ATGGCAGCCCCGAAAGAAATTATATTCTTGGAGGGGGAGACTTTGTTCGGTGACGACACAG
TCATAGAGGTAGCAATTATACTCGCGAGCTTCTCCGCGTCTACTAGACGAATGGCGATGGTT
ACCAACAACACGTTTACGTTGAAGGTCCCCCACGTTGGCGAAATACCCGTCGCTTACAGAA
AGGTACTTCTCAAGACGATACAACCACGGGTGGAGAAGTATCTCTTCGACGAAAGTGGGGA
GTTTAAGCTTTCAGAAGTTGGGCCGGAACACTCCTTGGCGGAATACTATATTTTTTTTGCGT
CATTTTATTACAAGAGGAATGGGGGGGGTTCTGGGGGGGGTGGATCTGGCGGGGATCCTAA
GATCTCTGAGATGCACCCTGCCCTGCGCCTTGTGGATCCACAGATACAGTTGGCTGTCACGA
GAATGGAGAATGCGGTGGGCAGGGATCAGAATAACGTTGGTCCAAAGGTATACCCGATCAT
TCTCCGACTTGGATCTCCCCTCTCTCTGAACATGGCCAGGAAGACGCTCAACAGTCTCGAGG
ATAAGGCTTTTCAGCTCACGCCGATTGCAGTGCAAATGACAAAACTCGCCACTACAGAGGA
ACTTCCAGATGAATTTGTCGTTGTAACCGTTAAAGGAGGTTCAGGCGGGGGTGGCTCCGGC
GGGAGTGACAACGGGCCGCAAAATCAGAGAAATGCACCTCGCATAACGTTCGGAGGACCG
TCCGACTCTACCGGGAGCAACCAAAATGGGGAGCGGAGCGGTGCGCGAAGCAAACAACGA
CGGCCGCAGGGTCTGCCGAACAACACGGCTTCCTGGTTTACAGCGTTGACTCAGCATGGGA
AAGAGGACCTTAAATTCCCACGGGGGCAGGGGGTTCCTATTAACACAAATTCTAGTCCAGA
CGACCAAATCGGATATTATCGCAGAGCTACACGCAGGATTAGGGGAGGTGATGGCAAAATG
AAAGACTTGTCACCGAGGTGGTATTTTTATTACCTCGGTACAGGCCCTGAAGCTGGCCTCCC
GTATGGAGCGAATAAGGATGGCATCATTTGGGTCGCCACCGAAGGCGCTTTGAATACACCT
AAAGATCATATCGGCACAAGAAACCCCGCGAACAATGCAGCAATAGTATTGCAACTCCCTC
AGGGGACCACTTTGCCTAAAGGTTTCTACGCCGAAGGTAGCCGAGGCGGTTCACAAGCGAG
TAGTAGATCTAGCTCTCGGTCTCGGAACTCTAGTAGGAATAGCACACCTGGTTCTTCACGCG
GCACCAGCCCGGCTAGAATGGCGGGTAACGGCGGCGACGCAGCTTTGGCATTGCTGCTTCT
GGACAGACTCAACCAACTTGAATCTAAAATGAGCGGTAAGGGGCAACAGCAACAAGGGCA
AACTGTTACGAAAAAATCAGCTGCGGAAGCGTCCAAAAAACCACGACAGAAACGGACGGC
CACTAAGGCTTACAATGTGACACAAGCTTTTGGTAGACGGGGCCCTGAACAGACGCAAGGT
AACTTCGGTGATCAAGAACTGATTCGACAAGGAACAGATTACAAGCACTGGCCACAAATTG
CACAATTCGCCCCCAGCGCGTCAGCTTTCTTTGGGATGAGCCGCATTGGAATGGAAGTCACC
CCGAGCGGAACCTGGCTCACCTATACGGGGGCAATCAAACTCGATGATAAAGACCCTAATT
TCAAGGATCAGGTTATTTTGCTTAATAAGCACATAGACGCATATAAAACCTTTCCACCGACG
GAACCTAAAAAGGACAAGAAAAAAAAGGCAGATGAGACGCAAGCACTCCCTCAGAGACAA
AAGAAGCAACAGACGGTGACATTGCTCCCAGCGGCAGATTTGGATGATTTCAGTAAGCAGT
TGCAGCAATCTATGTCTTCCGCGGATTCCACTCAGGCAGGTGGGTCTTTGGGCGGCGGAGGT
TCCGGAATTGTTGGCATAGTGGCGGGCCTCGCTGTGTTGGCCGTGGTTGTCATAGGAGCAGT
CGTTGCCACGGTCATGTGTAGAAGGAAGTCATCAGGTGGGAAGGGGGGCAGTTATTCACAG
GCGGCGAGTTCCGACAGTGCGCAGGGTAGCGACGTATCACTCACTGCCTAGTAA.

[1201] The string named “RS_C3 2A linkers” (abbreviated RS C3) encodes an ORF having an amino acid length of 1326 amino acids, and the nucleotide sequence encoding the ORF is 3978 nucleotides long. The entire string is 4287 nucleotides long and encodes a peptide string that is 1429 amino acids long. Table 11 exemplifies the amino acid sequence and the nucleic acid sequences (not codon optimized) encoding the same. An exemplary codon optimized sequence for string named “RS_C3 2A linkers” is:

(SEQ ID: RS C3n)
ATGCGCGTCATGGCCCCACGAACTTTGATACTTCTGCTGTCCGGCGCATTGGCCCTT
ACGGAAACGTGGGCGGGAAGCGGCGGCTCCGGCGGAGGAGGCAGTGGCGGTTCTGATAAC
GGACCGCAAAATCAAAGGAATGCCCCGAGGATAACCTTCGGCGGACCCAGTGATTCTACCG
GCTCTAATCAGAACGGAGAACGATCCGGCGCTAGATCAAAACAACGACGACCGCAGGGGT
TGCCGAACAATACTGCGAGCTGGTTTACGGCCCTGACCCAACATGGGAAGGAAGATCTCAA
ATTTCCGCGCGGTCAAGGGGTCCCTATTAACACCAATAGTTCTCCTGACGATCAAATTGGAT
ACTACCGGAGAGCCACCCGACGAATACGCGGAGGAGATGGTAAAATGAAAGATCTTTCCCC
ACGCTGGTATTTCTATTACCTCGGGACAGGACCAGAAGCGGGATTGCCTTATGGTGCTAATA
AAGATGGTATCATTTGGGTAGCGACAGAAGGTGCGCTGAATACGCCGAAAGATCACATCGG
GACACGCAACCCAGCTAATAATGCCGCTATCGTATTGCAACTGCCCCAAGGAACAACGCTG
CCTAAGGGATTTTATGCAGAGGGAAGTCGGGGGGGGTCTCAAGCCTCATCTCGGAGCAGTT
CCCGCAGTCGAAATTCCTCTCGCAATTCCACACCAGGAAGTTCCCGAGGAACTTCACCGGC
AAGAATGGCGGGGAACGGCGGTGATGCTGCCCTTGCTCTGCTTTTGCTCGATCGCCTCAACC
AGCTTGAAAGCAAGATGTCTGGGAAGGGACAACAACAGCAGGGCCAAACGGTCACAAAGA
AAAGTGCCGCCGAAGCCTCCAAGAAACCACGACAAAAGCGGACAGCCACTAAAGCTTACA
ACGTGACTCAAGCTTTCGGTCGACGGGGCCCTGAGCAGACCCAAGGGAATTTCGGAGATCA
AGAACTGATACGGCAAGGGACGGATTACAAGCACTGGCCCCAAATTGCCCAGTTTGCTCCT
TCTGCATCTGCCTTTTTCGGTATGTCACGGATCGGAATGGAGGTAACGCCGTCCGGAACATG
GCTGACTTATACAGGAGCCATTAAACTCGACGATAAAGATCCTAACTTTAAAGATCAGGTT
ATACTGCTCAACAAACACATAGATGCATACAAAACTTTCCCCCCTACGGAACCAAAGAAGG
ATAAGAAGAAGAAAGCTGACGAGACGCAGGCCCTCCCGCAAAGACAAAAGAAACAACAGA
CTGTCACCCTGTTGCCGGCGGCTGATCTGGACGACTTCAGCAAGCAATTGCAGCAATCCATG
TCTAGTGCAGACTCCACTCAGGCCGGAAGTGGTGGTTCCGGGGAGGGTAGGGGGTCTCTCT
TGACATGTGGCGACGTGGAAGAAAACCCTGGGCCTGATCCCAAGATTTCAGAAATGCACCC
AGCTCTCAGACTGGTGGACCCTCAAATACAGCTTGCGGTAACAAGAATGGAAAACGCTGTA
GGGCGCGACCAGAATAACGTCGGGCCAAAGGTTTACCCCATAATTCTGCGACTTGGTAGTC
CTCTTTCCCTGAATATGGCGCGCAAAACACTGAATTCATTGGAGGATAAGGCGTTTCAACTT
ACGCCTATAGCAGTCCAAATGACGAAACTGGCAACCACAGAAGAACTCCCGGACGAGTTTG
TTGTAGTGACCGTTAAAGGGAGTGGGGGCAGCGGAGCCACCAACTTCTCACTCCTCAAACA
AGCAGGTGACGTCGAAGAGAATCCCGGACCCTACCACTTCTTCCACACCACTGACCCGAGC
TTCCTGGGTAGATACATGTCTGCCCTCTTTGCAGACGATTTGAATCAACTTACTGGTTACCAT
ACTGACTTTTCAAGTGAAATAATTGGCTACCAGCTCATGTGTCAACCCATCCTGCTTGCGGA
AGCGGAATTGGCCAAAAATGTGTCCCTCATACTGGGGACAGTCAGTTGGAACTTGAAGCGG
CGCTACCTCCTGTCAGCCGGTATTTTTGGGGCAATCACAGATGTATTCTACAAAGAGAACTC
ATACAAAGTGCCTACGGACAACTATATAACTACTTATGCTAGAATGGCTGCTCCAAAAGAA
ATAATTTTTCTGGAGGGCGAGACTCTCTTTGGTGACGACACGGTCATTGAGGTAGCGATAAT
ACTTGCGAGCTTCTCTGCCAGTACAAGACGAATGGCTATGGTAACGAACAACACATTTACG
TTGAAGGTGCCGCACGTTGGAGAAATCCCCGTTGCATATCGAAAAGTTTTGCTGAAAACCA
TTCAGCCTCGAGTAGAGAAATACTTGTTCGACGAATCCGGTGAGTTTAAACTGAGCGAAGT
AGGCCCCGAACACTCCCTCGCAGAATACTATATATTTTTCGCTTCCTTTTACTATAAAAGAA
ACGGTGGCAGTGGTGTCAAGCAAACCCTGAACTTCGATCTCCTCAAGTTGGCAGGGGATGT
AGAGTCTAACCCTGGTCCGGACCTTTTCATGAGGATCTTTACTATCGGTACGGTCACCCTCA
AACAAGGCGAGATAAAAGACGCCACGCCCTCAGACTTCGTGCGAGCTACTGCAACCATCCC
AATACAGGCAAGCCTGCCCTTTGGCTGGTTGATCGTCGGGGTGGCACTCCTGGCTGTGTTTC
AGAGTGCGTCAAAGATAATTACTTTGAAGAAGAGGTGGCAATTGGCACTCTCCAAAGGTGT
CCACTTTGTTTGCAATTTGCTTCTCCTGTTTGTCACCGTCTACAGCCACCTTCTGCTGGTCGC
TGCTGGCCTGGAAGCACCGTTCCTGTACCTTTATGCCTTGGTGTACTTCCTCCAGAGCATTA
ACTTTGTTAGAATCATCATGCGCTTGTGGCTGTGTTGGAAATGTCGGTCCAAGAACCCGCTC
CTCTATGATGCAAATTATTTCCTTTGTTGGCATACGAATTGCTATGACTACTGTATTCCATAT
AATTCTGTAACGTCATCAATTGTTATAACGAGCGGAGACGGTACGACCTCCCCTATTAGCGA
ACATGATTACCAAATTGGTGGCTACACCGAAAAATGGGAATCAGGAGTAAAAGACTGCGTT
GTGTTGCATAGTTATTTTACCAGTGACTATTACCAATTGTACTCAACTCAACTGAGCACTGA
CACAGGTGTGGAGCACGTTACCTTCTTCATTTACAACAAGATTGTGGACGAGCCCGAAGAA
CACGTGCAGATTCATACAATTGATGGGTCCAGTGGTGTTGTCAATCCGGTCATGGAGCCCAT
ATACGATGAGCCGACTACCACAACTTCCGTGCCGCTCGGGAGCGGCGGATCAGGACAATGC
ACAAATTACGCACTCTTGAAGTTGGCCGGTGATGTAGAAAGCAATCCTGGTCCGGCCGACA
GCAACGGAACCATAACTGTAGAGGAATTGAAAAAGCTCCTGGAACAATGGAATCTCGTGAT
CGGTTTCCTCTTCCTTACATGGATCTGTTTGCTTCAGTTTGCGTATGCTAATCGCAATCGCTT
TCTGTATATCATAAAACTTATTTTCCTTTGGCTCCTGTGGCCCGTAACGCTGGCCTGCTTCGT
GCTTGCGGCGGTATATAGAATTAACTGGATCACTGGCGGCATAGCGATCGCTATGGCATGC
TTGGTGGGGCTCATGTGGTTGAGCTACTTTATTGCATCTTTTAGATTGTTCGCGCGAACGCG
ATCCATGTGGAGTTTTAATCCTGAAACGAATATATTGCTGAATGTACCTTTGCATGGAACAA
TTTTGACGCGCCCCTTGTTGGAAAGCGAACTCGTCATAGGCGCTGTGATATTGAGGGGACAC
CTGCGGATCGCGGGTCACCACCTCGGACGATGCGATATTAAGGATCTGCCCAAAGAGATCA
CGGTAGCCACCTCCCGAACCCTGAGTTACTACAAGCTTGGTGCTAGCCAACGAGTGGCTGG
GGACTCAGGTTTCGCGGCCTATAGTCGATATCGCATCGGCAATTACAAGCTGAATACGGAC
CATTCTAGTAGTAGTGATAATATCGCTCTCCTGGTACAAGGGGGAAGCCTCGGTGGAGGGG
GATCCGGTATTGTCGGAATTGTCGCCGGTTTGGCTGTGCTGGCAGTAGTAGTGATTGGAGCA
GTTGTCGCTACTGTAATGTGCAGAAGAAAGTCCAGCGGCGGCAAAGGGGGATCTTATAGCC
AGGCGGCAAGTAGTGATTCAGCGCAGGGATCCGATGTGAGCTTGACGGCTTAGTAA

[1202] The string named “RS C4 ORF1ab as linkers” (abbreviated RS C4) encodes an ORF having an amino acid length of 1234 amino acids, and the nucleotide sequence encoding the ORF is 3702 nucleotides long. The entire string is 4011 nucleotides long and encodes a peptide string that is 1337 amino acids long. Table 11 exemplifies the amino acid sequence and the nucleic acid sequences (not codon optimized) encoding the same. An exemplary codon optimized sequence for string named “RS C4 ORF1ab as linkers” is:

(SEQ ID RS C4n)
ATGCGGGTTATGGCCCCGCGGACCCTTATCCTCCTTCTCTCAGGCGCACTTGCCTTG
ACCGAAACGTGGGCTGGGAGCGGGGGATCTGGTGGTGGGGGTTCAGGGGGCTCCGACAAT
GGACCTCAGAACCAGAGGAATGCCCCTAGAATTACTTTTGGTGGGCCTTCTGACTCCACGG
GCTCCAACCAAAACGGCGAACGATCTGGCGCCAGATCAAAGCAGCGGAGGCCTCAGGGCTT
GCCGAACAACACCGCCTCCTGGTTCACAGCCCTGACCCAGCATGGCAAGGAAGACCTCAAA
TTTCCAAGAGGCCAGGGCGTTCCAATCAACACGAATAGCAGCCCTGATGATCAAATAGGTT
ATTACAGAAGAGCCACCAGAAGGATCAGAGGAGGCGATGGGAAAATGAAGGACCTTAGCC
CAAGGTGGTACTTCTACTATCTCGGAACCGGGCCTGAAGCTGGGTTGCCTTACGGCGCCAAT
AAGGACGGTATAATATGGGTTGCTACAGAAGGGGCGCTTAACACTCCCAAAGATCATATCG
GTACGCGAAATCCCGCAAACAATGCCGCAATAGTGTTGCAGCTGCCGCAAGGAACAACGCT
CCCCAAGGGATTTTATGCAGAGGGTTCTCGGGGAGGCAGTCAGGCATCAAGCCGCTCCAGT
TCAAGATCACGAAATAGCTCTAGGAATTCTACTCCAGGCAGTTCACGAGGAACGTCTCCGG
CCCGAATGGCCGGGAATGGGGGCGATGCCGCTTTGGCGCTTTTGCTGCTGGATAGGCTCAA
CCAACTGGAGAGTAAAATGAGTGGAAAAGGCCAGCAGCAACAAGGGCAGACTGTCACTAA
GAAGTCAGCAGCCGAAGCAAGCAAGAAACCACGACAAAAGCGGACCGCGACTAAGGCATA
TAATGTAACGCAGGCCTTCGGAAGACGAGGGCCAGAGCAAACCCAAGGCAACTTCGGTGA
CCAAGAATTGATCAGGCAAGGCACCGATTATAAACATTGGCCGCAAATCGCGCAATTTGCT
CCTAGCGCAAGCGCCTTTTTCGGCATGAGCAGGATTGGCATGGAAGTCACACCAAGTGGAA
CATGGCTCACGTATACGGGGGCAATTAAACTCGATGACAAGGACCCGAATTTCAAGGATCA
AGTGATTTTGTTGAACAAGCACATAGACGCGTACAAAACTTTCCCGCCAACTGAGCCCAAG
AAGGATAAAAAAAAGAAAGCAGACGAGACACAGGCACTCCCGCAGCGACAAAAGAAACA
ACAGACGGTGACGCTTCTGCCAGCTGCCGACCTCGACGATTTCTCCAAGCAACTTCAGCAAT
CAATGTCAAGCGCAGATTCTACTCAAGCCTTTAGAGCTTGCATGGTCACTAACAATACATTT
ACACTCAAGGTACCGCATGTAGGGGAAATTCCCGTGGCCTACCGGAAGGTACTGCTCAAAA
CGATTCAACCTAGGGTAGAAAAATATCTTTTCGATGAATCAGGCGAATTTAAGCTTAGCGA
AGTGGGCCCAGAACATAGCCTCGCTGAGTATTATATTTTTTTCGCGTCCTTTTATTATAAGA
GAAATGGCGATCCCAAGATTTCAGAAATGCATCCTGCCCTTCGCCTCGTGGATCCTCAAATC
CAGCTCGCCGTTACAAGAATGGAGAACGCGGTAGGTAGAGATCAGAATAATGTTGGGCCTA
AAGTCTATCCGATTATTTTGCGGTTGGGCAGCCCCCTGAGTTTGAACATGGCTCGCAAGACC
TTGAATTCACTTGAGGACAAGGCATTCCAGCTGACGCCTATTGCGGTACAGATGACCAAGC
TGGCAACCACGGAAGAACTGCCGGATGAGTTTGTAGTCGTCACCGTAAAGTTTAACTCCTTC
CATACCACTGATCCCAGTTTTTTGGGGCGGTACATGAGTGCCCTTTTCGCGGACGATCTTAA
TCAACTCACGGGCTATCACACAGACTTTTCCAGTGAAATCATCGGGTATCAACTCATGTGTC
AGCCCATTCTGCTCGCTGAGGCTGAGCTGGCAAAGAACGTTAGCTTGATACTTGGGACGGT
GTCTTGGAACCTCAAAAAACAGGGCGATCTTTTTATGAGGATTTTTACGATTGGTACCGTAA
CGCTTAAACAAGGAGAGATTAAGGACGCAACCCCGAGTGACTTTGTCAGGGCGACAGCGAC
CATCCCTATTCAAGCAAGCCTGCCTTTTGGCTGGCTCATAGTCGGGGTCGCTCTGCTTGCTGT
ATTCCAGAGTGCCAGTAAAATCATCACTCTTAAAAAGCGATGGCAGCTGGCCCTTAGTAAG
GGGGTCCATTTCGTCTGCAACCTTCTGCTTTTGTTTGTCACCGTGTACTCTCATTTGCTCCTG
GTGGCCGCTGGACTGGAGGCTCCTTTCCTCTACCTTTACGCCCTTGTTTATTTTCTTCAATCC
ATCAATTTCGTGCGAATTATAATGCGCCTCTGGTTGTGCTGGAAGTGCCGGAGCAAAAATCC
TCTGCTCTACGATGCTAACTACTTTTTGTGTTGGCACACGAATTGCTACGACTACTGCATACC
TTACAATTCCGTGACCTCATCAATTGTGATAACGAGCGGTGACGGAACGACATCACCAATTT
CTGAGCATGACTACCAGATTGGTGGCTACACGGAAAAATGGGAATCTGGCGTCAAGGACTG
TGTGGTCCTGCATTCCTATTTTACGAGCGACTATTATCAGCTTTACTCCACGCAACTTAGTAC
GGACACCGGTGTCGAGCATGTCACGTTTTTTATTTACAATAAGATTGTTGATGAACCTGAAG
AACACGTGCAGATACATACCATTGACGGCTCTTCTGGAGTTGTGAACCCTGTCATGGAGCCT
ATCTACGACGAGCCAACAACTACGACTTCCGTACCTCTGAGAAGAAGCTACTTGTTGTCAGC
CGGGATATTCGGTGCGATCACCGACGTCTTCTATAAGGAGAATAGTTATAAGGTCCCTACA
GATAATTATATTACCACCTATGCGAGGATGGCGGCTCCTAAGGAGATTATATTCTTGGAGGG
GGAAACCCTGTTTGGCGATGACACCGTGATCGAGGTGGCCATTATACTTGCATCATTTTCTG
CCAGTACTCTCTTGGTACAGGCTGATAGTAATGGGACAATAACGGTTGAAGAACTTAAAAA
GCTTCTGGAACAGTGGAACTTGGTCATTGGATTTCTGTTCCTCACGTGGATTTGCCTCTTGCA
ATTCGCTTATGCAAATAGGAATCGGTTTCTTTATATCATCAAGTTGATATTCCTCTGGCTCCT
GTGGCCAGTGACTCTTGCTTGCTTTGTCCTGGCTGCCGTTTACCGAATAAATTGGATAACCG
GTGGTATCGCAATAGCTATGGCCTGTTTGGTGGGTCTGATGTGGTTGTCTTACTTCATAGCA
TCATTCCGCTTGTTCGCTAGAACTAGATCCATGTGGTCCTTCAACCCTGAAACTAATATTCTT
CTGAATGTGCCTCTTCACGGTACAATTTTGACACGACCACTCCTCGAAAGCGAACTTGTAAT
TGGGGCCGTGATCTTGAGGGGCCACCTTAGGATTGCAGGGCACCACTTGGGCAGATGCGAC
ATTAAGGATTTGCCAAAAGAAATAACGGTCGCGACTTCTCGGACATTGAGTTACTACAAAT
TGGGTGCATCCCAACGGGTGGCGGGTGATAGTGGGTTTGCGGCCTACTCTAGGTATCGAAT
CGGAAATTACAAGCTTAACACCGACCATTCAAGTAGTTCTGACAACATAGCTCTTCTGGTTC
AGGGTGGTTCTCTGGGTGGGGGAGGCTCCGGGATTGTCGGGATTGTCGCCGGTCTTGCTGTA
CTTGCCGTGGTGGTAATCGGAGCAGTCGTAGCTACAGTGATGTGCCGCAGAAAGAGTTCTG
GGGGTAAAGGCGGATCTTATAGCCAGGCAGCAAGCAGTGATTCCGCACAAGGATCCGATGT
GAGTCTTACCGCCTGATAA

[1203] The string named “RS C5 2300” (abbreviated RS C5) encodes an ORF having an amino acid length of 756 amino acids, and the nucleotide sequence encoding the ORF is 2268 nucleotides long. The entire string is 2577 nucleotides long and encodes a peptide string that is 859 amino acids long. Table 12 exemplifies the amino acid sequence and the nucleic acid sequences (not codon optimized) encoding the same. An exemplary codon optimized sequence for string named “RS C5 2300” is:

(SEQ ID: RS C5n)
ATGCGCGTAATGGCGCCACGAACGTTGATTCTGTTGTTGAGTGGTGCTCTCGCGCT
CACGGAGACGTGGGCCGGATCAGGAGGGAGCGGGGGTGGTGGCTCTGGTGGAAAGGACCT
TTCTCCTCGGTGGTATTTTTACTATCTGGGGACCGGTCCTGAAGCGGGGTTGCCATATGGCG
CCAACAAGGATGGCATTATCTGGGTGGCGACAGAGGGCGCGCTTAATACACCGAAGGACCA
TATAGGAACGAGAAATCCAGCGAACAATGCTGCGATTGTCCTTCAGCTGCCGCAAGGAACG
ACCTTGCCCAAGGGTTTTTACGCCGAGGGCTCTAGGGGGGGCTCCCAAGCATCATCCCGATC
CAGCTCCCGGTCTCGAAATAGCTCCCGGAATAGCACTCCTGGTTCCTCCCGGGGAACGTCCC
CAGCGCGAATGGCAGGTAACGGGGGTGACGCCGCATTGGCTCTTCTCTTGTTGGATAGACT
GAATCAGTTGGAATCAAAGATGAGCGGAAAGGGACAACAACAACAGGGACAAACCGTAAC
TAAAAAAAGCGCTGCTGAGGCGAGTAAAAAACCGAGGCAAAAGCGAACTGCTACAAAAGC
GTATAATGTCACACAAGCCTTTGGTCGCAGAGGTCCAGAGCAGACTCAGGGTAACTTCGGA
GACCAGGAGTTGATCAGACAAGGGACTGATTACAAGCACTGGCCGCAGATCGCGCAATTCG
CTCCCAGCGCGAGTGCCTTCTTCGGAATGTCAAGGATCGGAATGGAGGTCACGCCCTCAGG
CACCTGGCTGACGTACACAGGTGCAATTAAGCTGGACGATAAGGATCCCAACTTTAAGGAT
CAAGTCATCCTTCTTAACAAACACATTGATGCCTATAAAACCTTCCCGCCCACGGAGCCGAA
GAAAGATAAGAAAAAAAAAGCTGATGAGACGCAGGCGCTGCCACAAAGACAGAAGAAGC
AACAAACCGTAACCCTCCTCCCTGCAGCGGACTTGGACGACTTCAGTAAGCAACTCCAGCA
ATCCATGTCCAGTGCGGATAGTACTCAGGCGTTTCGAGCCTGTATGGTTACCAACAACACAT
TCACTCTTAAGGTGCCCCATGTTGGGGAGATCCCCGTGGCGTATAGAAAAGTACTCTTGAAA
ACGATCCAACCTCGCGTGGAGAAATACCTCTTTGACGAATCTGGGGAATTCAAACTTAGCG
AGGTAGGCCCGGAACATTCCCTCGCAGAATACTATATTTTTTTCGCTAGTTTTTACTATAAG
CGATGCTTCCATACGACAGACCCCTCTTTTCTGGGACGGTACATGTCCGCCTTGTTTGCGGA
TGACCTTAACCAATTGACGGGCTACCATACAGACTTTTCATCCGAAATAATCGGTTACCAAC
TCATGTGTCAGCCTATACTCCTCGCCGAAGCCGAGCTGGCAAAAAATGTAAGTCTGATTCTG
GGTACTGTGTCATGGAATCTGAAGAAGCGATATCTCCTTTCTGCCGGTATATTCGGTGCAAT
AACCGACGTCTTTTATAAGGAAAACAGTTACAAAGTACCGACAGACAATTATATAACCACC
TATGCACGCATGGCCGCCCCCAAAGAAATCATTTTCCTTGAGGGTGAAACGTTGTTTGGGGA
TGACACAGTTATAGAGGTGGCGATAATCCTGGCTTCATTCAGTGCTTCTACGCGACGCAGCG
GTGCTGATAGTAATGGCACAATTACTGTAGAAGAGTTGAAAAAACTGCTGGAACAATGGAA
CCTTGTTATAGGCTTTTTGTTTTTGACCTGGATATGTCTCTTGCAGTTTGCGTACGCTAATAG
GAACAGGTTCCTGTACATAATCAAGCTCATCTTCTTGTGGCTGCTTTGGCCAGTAACACTTG
CCTGTTTTGTGCTGGCCGCGGTTTATAGGATCAACTGGATAACTGGCGGGATAGCAATAGCT
ATGGCGTGTCTCGTCGGGTTGATGTGGCTGTCCTATTTTATCGCATCTTTCCGACTTTTTGCA
CGGACCAGAAGCATGTGGTCCTTTAACCCGGAGACTAATATTTTGCTCAATGTACCACTGCA
CGGGACAATACTGACACGCCCCTTGTTGGAATCTGAGTTGGTAATAGGGGCTGTAATTCTCC
GCGGTCACCTTAGGATTGCAGGTCACCACCTGGGACGCTGCGATATAAAGGATCTTCCTAA
GGAAATTACGGTAGCAACGTCACGAACTCTCAGTTATTATAAACTTGGCGCCAGTCAGCGA
GTCGCTGGCGATAGCGGATTCGCCGCGTACTCTAGATACAGAATAGGAAACTACAAATTGA
ACACGGATCACAGCTCTTCATCAGACAATATCGCCCTTCTCGTACAGGGAGGCTCACTGGG
AGGGGGCGGCAGTGGTATAGTTGGTATTGTAGCGGGCTTGGCGGTCCTTGCGGTAGTTGTTA
TAGGTGCCGTCGTCGCCACTGTCATGTGCAGGCGGAAAAGCTCTGGTGGAAAGGGCGGGAG
CTATTCACAAGCCGCGTCCTCTGACTCTGCTCAGGGTTCAGATGTTAGTCTTACAGCATGAT
AA

[1204] The string named “RS C6 1200” (abbreviated RS C6) encodes an ORF having an amino acid length of 404 amino acids, and the nucleotide sequence encoding the ORF is 1212 nucleotides long. The entire string is 1521 nucleotides long and encodes a peptide string that is 507 amino acids long. Table 12 exemplifies the amino acid sequence and the nucleic acid sequences (not codon optimized) encoding the same. An exemplary codon optimized sequence for string named “RS C6 1200” is:

(SEQ ID: RS C6n)
ATGCGCGTGATGGCACCGAGGACGCTTATTCTCTTGCTGTCAGGTGCGCTCGCCCT
CACTGAGACATGGGCAGGGTCTGGAGGTAGTGGCGGCGGTGGGAGCGGAGGAAGAATGGC
TGGGAATGGGGGCGACGCTGCGCTCGCACTCTTGCTGTTGGACCGACTGAATCAGCTCGAG
AGCAAAATGAGTGGTAAGGGGCAACAACAGATGCGCGCGTGTATGGTGACTAACAACACC
TTTACCCTTAAAGTGCCGCATGTTGGTGAAATTCCCGTTGCCTACAGAAAGGTTCTCCTTAA
AACCATTCAGCCGAGAGTCGAAAAATATTTGTTCGACGAGAGTGGTGAATTTAAACTTAGT
GAAGTAGGTCCGGAACACAGTTTGGCTGAGTATAAGATGTGCGGATATAAGCATTGGCCAC
AAATAGCCCAGTTCGCCCCTTCCGCCTCCGCCTTTTTCGGTATGTCCCGGATTGGAATGGAA
GTGACCCCATCAGGAACTTGGCTCACATACACCGGGGCTATCAAACTTGATGATAAAGATC
CAAATTTCAAAGACCAAGTTATCCTGCTGAATAAGCACATCGATGCGTACAAAACGTTCCC
CGCGCGATGCGCCACCACCGATCCCTCCTTTCTTGGTAGATATATGAGCGCGTTGTTTGCCG
ACGACCTGAACCAACTCACAGGGTACCATACGGATTTCTCATCAGAAATCATAGGTTATCA
ACTGATGTGCCAGCCAATCCTGCTGGCGGAGGCCGAGCTCGCCAAGAATGTTTCCCTTATAC
TGGGTACTGTGAGCTGGAACCTGAAAAAACAGGGGTTTGCCTATGCAAACAGGAACAGGTT
CTTGTACATCATAAAGTTGATTTTCCTTTGGTTGCTGTGGCCGGTGACCCTTGCCTGTTTTGT
ACTGGCGGCCGTCTATAGAATCAATTGGATTACCGGAGGGATTGCAATTGCTATGGCGTGTC
TTGTGGGATTGATGTGGCTCAGTTACTTCATCGCCTCATTCCGCTTGTTCTACCGCTCTTACT
TGCTGAGCGCTGGGATTTTTGGAGCAATAACAGACGTTTTCTATAAGGAAAATTCATATAAG
GTCCCAACAGATAATTACATAACCACATACGCGCGGATGGCCGCGCCTAAGGAAATTATAT
TCCTTGAGGGGGAGACGCTTTTTGGCGATGACACCGTTATCGAGGTTTCAATGTTTAATTTG
GGAAGATGTGATATTAAGGACCTTCCCAAGGAGATCACCGTTGCAACCTCACGCACGCTCA
GCTATTATAAACTTGGGGCTAGCCAGCGGGTTGCCGGGGGCAGCTTGGGTGGCGGGGGTAG
TGGTATCGTGGGAATAGTTGCTGGATTGGCCGTACTGGCTGTTGTCGTGATAGGGGCGGTAG
TAGCAACAGTTATGTGTAGACGCAAGTCCTCAGGCGGTAAAGGAGGTTCATACAGCCAGGC
GGCATCATCTGATAGTGCCCAGGGGTCCGATGTCTCACTTACCGCCTAGTAA

[1205] The string named “RS C7 1500_M_chunks” (abbreviated RS C7) encodes an ORF having an amino acid length of 492 amino acids, and the nucleotide sequence encoding the ORF is 1476 nucleotides long. The entire string is 1785 nucleotides long and encodes a peptide string that is 595 amino acids long. Table 12 exemplifies the amino acid sequence and the nucleic acid sequences (not codon optimized) encoding the same. An exemplary codon optimized sequence for string named “RS C7 1500_M_chunks” is:

(SEQ ID RS C7n)
ATGCGGGTAATGGCACCACGCACGCTGATCCTTCTTCTCTCCGGTGCACTCGCTCT
GACGGAGACGTGGGCGGGAAGTGGTGGATCAGGGGGTGGGGGGTCTGGAGGCAGTCCCGC
TAGGATGGCAGGAAATGGAGGTGATGCCGCACTGGCCCTTTTGTTGCTCGACCGGCTTAATC
AACTTGAGTCCAAGATGAGCGGCAAAGGTCAACAACAGCAAGGTCAAACTGTTACCAAAA
AGAGCGCGGCAGAAGCAAGTAAGAAGCCCCGACAAAAAAGGACTGCAACGAAGGCGTATA
ACGTAACGCAGGCCTTCGGCCGACGAGGCCCAGAACAGACACAGGGGAACTTTGGGGATC
AGGAGCTGATAAGACAAGGTACTGACTACAAACACTGGCCTCAGATTGCTCAATTCGCTCC
AAGTGCCAGTGCATTCTTCGGAATGAGCCGGATCGGGATGGAGGTAACTCCCAGCGGAACA
TGGTTGACTTACACCGGAGCGATCAAACTGGACGACAAGGACCCTAATTTCAAGGATCAGG
TTATACTGTTGAACAAACATATCGACGCGTACAAGACCTTTCCTCCCACTGAGCCTAAAAAG
GACAAGTTCAAGGCGGCCATGGTAACCAACAACACCTTTACGTTGAAAGTACCCCACGTAG
GTGAAATACCGGTGGCCTATCGAAAGGTCCTTTTGAAGACCATCCAACCCCGCGTTGAAAA
ATACCTCTTTGACGAGTCTGGTGAATTTAAACTCAGCGAAGTCGGTCCTGAGCATAGTTTGG
CGGAATATTATATTTTTTTTGCAAGTTTTTACTATAAAAGAAATGGCTTCGCGTATGCAAAT
AGAAATCGGTTTTTGTACATAATTAAGCTGATATTTCTGTGGCTCTTGTGGCCGGTCACGCT
CGCGTGCTTTGTACTCGCGGCAGTTTACAGGATCAACTGGATTACCGGAGGTATAGCAATA
GCCATGGCTTGCCTTGTTGGCCTCATGTGGCTTTCATATTTCATCGCAAGTTTTAGACTCTTC
TATAATAGTTTTCATACCACAGACCCCAGCTTCTTGGGTAGATACATGTCCGCGCTTTTTGCC
GATGACCTCAACCAGCTTACAGGGTATCACACTGACTTTTCCAGTGAAATAATTGGATATCA
GCTCATGTGTCAGCCCATCCTGCTTGCAGAAGCTGAGCTTGCGAAAAATGTCTCCCTCATCT
TGGGGACGGTTTCCTGGAATCTCAAAAAAAATGGACTGGGTCGGTGCGACATTAAGGATCT
GCCGAAAGAGATCACGGTAGCTACCAGCAGGACCCTGTCTTATTATAAGCTCGGGGCTTCC
CAACGAGTGGCTTATAGGAGTTACTTGCTGAGTGCTGGGATATTTGGTGCAATTACAGATGT
CTTCTATAAGGAGAACTCATACAAAGTACCCACTGATAACTACATAACGACCTACGCAAGA
ATGGCTGCGCCTAAAGAGATTATATTTTTGGAAGGCGAGACGTTGTTCGGTGATGATACTGT
TATAGAAGTAGCTATTATTTTGGCGAGTTTCAGCGCGAGTACTCGACGACGAGGGGGTGGT
TCTCTTGGAGGAGGAGGATCCGGGATAGTAGGCATTGTGGCTGGCTTGGCGGTGCTCGCGG
TGGTAGTAATCGGGGCTGTTGTCGCAACCGTGATGTGTCGCAGAAAATCCTCAGGTGGCAA
GGGTGGCAGCTACTCTCAAGCTGCTAGCAGCGATTCTGCCCAAGGGAGCGACGTTAGTCTT
ACGGCGTAGTAA

[1206] The string named “RS C8 1500_M_epitopes” (abbreviated RS C8) encodes an ORF having an amino acid length of 485 amino acids, and the nucleotide sequence encoding the ORF is 1455 nucleotides long. The entire string is 1764 nucleotides long and encodes a peptide string that is 588 amino acids long. Table 12 exemplifies the amino acid sequence and the nucleic acid sequences (not codon optimized) encoding the same. An exemplary codon optimized sequence for string named “RS C8 1500_M_epitopes” is:

(SEQ ID: RS C8n)
ATGAGGGTGATGGCCCCCAGGACCCTCATATTGTTGTTGAGCGGGGCCCTTGCACT
CACTGAAACTTGGGCTGGGAGTGGGGGTAGTGGTGGGGGTGGCAGTGGCGGGTCACCGGCT
CGAATGGCAGGTAACGGCGGGGATGCCGCATTGGCGCTCTTGCTGCTCGACAGGTTGAACC
AGTTGGAATCCAAGATGAGTGGAAAAGGTCAGCAACAACAGGGGCAGACCGTAACGAAGA
AGAGCGCTGCCGAGGCCTCCAAGAAGCCTCGCCAGAAACGAACGGCCACGAAGGCTTATA
ACGTGACCCAGGCATTCGGTAGAAGAGGTCCTGAACAGACACAAGGAAACTTTGGCGACCA
GGAACTCATCAGGCAAGGGACGGACTACAAGCATTGGCCGCAAATAGCGCAGTTCGCGCCC
AGCGCCAGCGCCTTCTTTGGAATGTCAAGAATTGGAATGGAAGTTACGCCGAGTGGGACTT
GGCTTACTTATACGGGCGCTATTAAGCTCGACGACAAGGACCCCAATTTCAAGGACCAAGT
GATATTGCTCAATAAGCACATCGACGCCTACAAGACTTTCCCTCCCACAGAGCCCAAAAAG
GATAAGTTCCGAGCCTGCATGGTAACGAACAATACTTTTACACTTAAGGTGCCCCATGTAGG
AGAGATACCTGTGGCTTATCGAAAAGTGCTGCTTAAGACTATTCAACCTCGCGTCGAAAAA
TACCTCTTTGACGAGAGTGGTGAGTTTAAGCTGTCAGAAGTAGGACCCGAGCATTCATTGGC
GGAGTATTACATATTCTTCGCCAGTTTTTATTATAAAAGGTGCTTCCACACGACTGACCCGT
CTTTTCTTGGTAGGTACATGAGTGCGCTGTTTGCAGACGATCTGAATCAGCTCACCGGTTAT
CACACGGATTTTAGTTCAGAAATCATAGGCTACCAGTTGATGTGCCAACCAATTCTTCTCGC
CGAGGCGGAACTTGCTAAAAATGTTAGTTTGATTTTGGGCACCGTAAGCTGGAACCTTAAA
AAACGATACCTTCTCTCTGCCGGCATATTTGGTGCTATTACTGACGTGTTCTATAAAGAGAA
TTCATATAAAGTTCCAACTGACAACTATATCACCACCTATGCTAGGATGGCGGCACCGAAG
GAAATAATCTTTCTGGAGGGGGAAACTCTGTTTGGTGATGATACCGTAATTGAGGTTGCCAT
AATACTGGCATCATTCTCAGCCAGCACTAGAAGACGCGGGAAGCTTTTGGAACAGTGGAAT
TTGGTTATTGGATTCAACCGAAACAGGTTTTTGTATATAATTAAGCTCATATTTCTTTGGTTG
TTGTGGCCCGTTACCCTTGCATGCTTCGTTCTTGCCGCCGTCTACAGTGAGCTCGTAATTGGG
GCGGTTATTCTGCGAGGACATCTCCGAATCGCTGGTCACCATCTCGGACGCACAGTCGCTAC
AAGTAGGACGCTTTCATACTATAAATTGGGAGCCAGTCAACGAGTTAAACGGTACTCAGGG
TTGATGTGGTTGAGCTATTTCGCAAGGTACGCCGGAGGATCCCTGGGAGGGGGAGGCAGCG
GTATAGTCGGTATCGTGGCAGGCCTTGCGGTGCTCGCGGTTGTAGTCATAGGCGCAGTGGTT
GCTACAGTCATGTGTCGCCGCAAATCCAGTGGAGGTAAGGGGGGTAGCTATTCCCAGGCCG
CTTCATCTGACTCAGCACAAGGATCAGACGTCTCTCTGACTGCATAATAA

[1207] The sequences as laid out are DNA sequences and can be interchangeably used for interpreting RNA (or mRNA) sequences, as is well known to one of skill in the art.

### Example 8: Pharmaceutical Composition for the Designed SARS COV-2 (2019 SARS-Cov 2) Nucleocapsid Peptide Strings

[1208] Designed strings as exemplified in Example 8, are prepared into a pharmaceutical composition of lipid nanoparticle (LNP) encapsulated mRNA having a sequence delineated in SEQ ID RS C1n, or SEQ ID RS C2n, or SEQ ID RS C3n, or SEQ ID RS C4n, or SEQ ID RS C5n, or SEQ ID RS Con, or SEQ ID RS C7n, or SEQ ID RS C8n, or any combination thereof, or sequences encoding corresponding amino acids described in Tables 11 and 12, having the amino acid sequences disclosed in column 2 of each row of sequences sets RSC1-RSC8 in Tables 11 and 12. An LNP comprise at least a cationic lipid, a non-cationic lipid and/or a PEG modified lipid. The LNP-encapsulated mRNA formulations are lyophilized and stored at a temperature below (−) 20° C., preferable frozen under liquid nitrogen for long term storage. LNP-mRNA compositions can be thawed and reconstituted in aqueous solution for use.

[1209] The LNP-mRNA compositions of the designed strings are administered alone or are co-administered with BNTSpike Vaccine for 2019 SARS CoV-2 infection.

### Example 9: Methods for Generating String Constructs

[1210] Described herein is an exemplary method for generating the string constructs by integration of bioinformatics and molecular biology techniques. Strings are designed to comprise epitopes from 2019 SARS CoV-2 proteins. These epitopes are selected based on ranking in an HLA-binding and prediction algorithm in a computer based program, as well as support from experimental data. In choosing segments of protein, the predicted population coverage based on the population HLA frequencies were taken into account in order to maximize population coverage.

[1211] Briefly the constructs are designed to incorporate from 5′-3′ top predicted and immunogenic epitopes and regions of various viral proteins, including the Nucleocapsid, Membrane, ORF3a, ORF9b and ORF1ab of the SARS CoV-2 proteins.

[1212] RNA strings were designed by concatenating sequences from different open reading frames (ORFs) of 2019 SARS-CoV-2. ORF-derived sequences could be the entire ORF; a section of the ORF (ranging in length from 99 to 954 bp-prioritized based on predicted and observed epitope density); or regions constituting or containing CD8+epitopes that were assembled to optimize for MHC class I cleavability. This last approach was taken for ORF1ab for all string variants; this was also done with the membrane ORF for one string variant (RS C8). MHC class I cleavability was scored using a neural network predictor trained on MHC class I mass spectrometry data, which takes as input a candidate peptide sequence and its context from which it should be cleaved (30 AA on either side). Four AA-long cleavability linkers (selected by testing all potential combinations of amino acids and taking the best scoring by our predictor) were added in between epitopes when efficient cleavage was not otherwise possible, and on the flanks of each region of assembled epitopes, taking into account the neighboring sequence in the given string variant. The ordering of epitopes was determined by selecting the configuration that allowed for most efficient cleavage while adding as few cleavability linkers as possible. Two string variants used putatively non-immunogenic GSS linkers to separate sequences from different ORFs. One string variant used 2A self-cleaving peptide sequences as linkers to separate sequences from different ORFs. The remaining variants used the designed MHC class I cleavable regions as ‘linkers’.

[1213] A variety of factors may be considered when determining the ordering of ORFs in a string. Within strings RS C5 to RS C8, the ordering of ORFs was driven by proteomics abundance and immunogenicity data. One string variant had the order of ORFs reversed as a control in order to evaluate translation efficiency as a function of distance along the string. In some embodiments, ordering of ORFs is driven by relative size of the ORFs (e.g., ordering from largest to smallest, with the largest ORF placed closed to the translation start site). In some embodiments, a string comprises one or more ORFs from each of M, N, and ORF1ab, where the M, N, and ORF1ab ORFs may be arranged in any order. In some embodiments, the M, N, and ORF1ab ORFs may be arranged in terms of size (e.g., from largest to smallest). In some embodiments, the M, N, and Orflab ORFs may be arranged in any of the following orders (arranged from 5′ to 3′): M, N, ORF1ab; M, ORF1ab, N; N, M ORF1ab; N, ORF1ab, M; ORF1ab, N, M; or Orflab, M, and N. In embodiments comprising a plurality of ORFs from the same antigen (e.g., two ORFs from a SARS-CoV-2 M protein), the plurality of ORFs from the same antigen may be interspersed with ORFs from other antigens (e.g., ORFs may be ordered such that a first ORF of a first antigen can be followed by an ORF of a second antigen, followed by a second ORF of the first antigen (e.g., as exemplified in strings RS-C6 and RS-C7)).

[1214] FIG. 79 depicts the C7 T-string construct and factors that were considered when designing the same. The C7 T-string construct was designed based on predicted and reported T cell antigenicity. Based on combined immunogenicity (Ferretti, Andrew P., et al. “Unbiased screens show CD8+ T cells of COVID-19 patients recognize shared epitopes in SARS-CoV-2 that largely reside outside the spike protein.” Immunity 53.5 (2020): 1095-1107; Gangaev, Anastasia, et al. “Profound CD8 T cell responses towards the SARS-CoV-2 ORF1ab in COVID-19 patients.” Research Square (2020); Gauttier, Vanessa, et al. “Tissue-resident memory CD8 T-cell responses elicited by a single injection of a multi-target COVID-19 vaccine.” BioRxiv (2020); Mateus, Jose, et al. “Selective and cross-reactive SARS-CoV-2 T cell epitopes in unexposed humans.” Science 370.6512 (2020): 89-94; Annika, N. “SARS-CoV-2 T-cell epitopes define heterologous and COVID-19-induced T-cell recognition.” Research Square, DOI 10 (2020); Dong, Tao, et al. “Broad and strong memory CD4+ and CD8+ T cells induced by SARS-CoV-2 in UK convalescent COVID-19 patients.” (2020); Sekine, Takuya, et al. “Robust T cell immunity in convalescent individuals with asymptomatic or mild COVID-19.” Cell 183.1 (2020): 158-168; Snyder, Thomas M., et al. “Magnitude and dynamics of the T-cell response to SARS-CoV-2 infection at both individual and population levels.” MedRxiv (2020); and Tarke, Alison, et al. “Comprehensive analysis of T cell immunodominance and immunoprevalence of SARS-CoV-2 epitopes in COVID-19 cases,” Cell Reports Medicine 2.2 (2021): 100204, the contents of each of which is incorporated by reference herein in their entirety) and protein expression data from infected cells (Poran, A., Harjanto, D., Malloy, M. et al, Sequence-based prediction of SARS-CoV-2 vaccine targets using a mass spectrometry-based bioinformatics predictor identifies immunogenic T cell epitopes. Genome Med 12, 70 (2020)), N, M, and nonstructural proteins (NSP) 1-4 from ORF1ab were selected for inclusion in the T cell vaccine. For the N protein, a block of 167 amino acids was selected that includes 155 unique predicted peptide epitopes from 74 unique HLA-I alleles for a total of 525 unique peptide-HLA-I pairs. For the M protein, two blocks were selected with 67 and 33 amino acids, respectively. Together, these two blocks include 148 unique predicted peptide epitopes from 66 unique HLA-I alleles for a total of 602 unique peptide-HLA-I pairs. Since ORF1ab is the longest SARS-CoV-2 ORF and comprises highly immunogenic hotspots throughout, for this protein, the T-string was designed to comprise a greater number of shorter minimal HLA-I-targeting epitopes from throughout the genomic region encoding NSPs 1-4. NSPs 1~4 were specifically chosen because they are amongst the first proteins to be synthesized upon viral infection, and that are present at a greater abundance than other ORF1ab NSPs (Bouhaddou et al., 2020; Weingarten-Gabbay et al., 2021). Considering only predicted epitopes that also demonstrate immunogenicity in the literature, 16 sequence segments of 9-16 amino acids were selected for inclusion in the vaccine. These 16 segments include 113 unique predicted peptide epitopes from 54 unique alleles for a total of 524 unique peptide-HLA-I pairs. Altogether, the antigenic regions selected for inclusion in the vaccine are predicted to cover HLA-I alleles present in 99% or more of the global population.

### Example 10: Epitope Specificity of mRNA Vaccine

[1215] An exemplary study is illustrated in this example, demonstrating T cell specificity in vivo upon administration of a BNT mRNA vaccine directed against SARS CoV-2. Study participants received a priming immunization with BNT162b2 on day 1, and a booster immunization on day 22±2. Serum was obtained on days 1 (pre-prime), 8±1 (post-prime), 22±2 (pre-boost), 29±3, 43±4, 50±4 and 85±7 (post-boost). PBMCs were obtained on days 1 (pre-prime) and 29±3 (post-boost).

[1216] In this study, CD8+ T cell responses were characterized on the epitope level in three BNT mRNA vaccinated participants. PBMCs obtained on day 1 (pre-prime) and day 29 (7 days post-boost) of three vaccinated participants (dose cohorts 10 μg, n=1; 30 μg, n=2) were stained with individual pMHC class I multimer cocktails and analysed for T cell epitope specificity (FIG. 8Ai and 8Aii) and phenotype (FIG. 8B; example from participant 3; YLQPRTFLL) by flow cytometry. In FIG. 8Ai-8C, peptide sequences above dot plots indicate pMHC class I multimer epitope specificity, numbers above dot plots indicate the amino acids corresponding to the epitope within S protein. FIG. 8C shows localization of identified MHC class I-restricted epitopes within S protein. Pre- and post-vaccination PBMCs were stained with individualized peptide/MHC multimer staining cocktails for flow cytometry analysis. Twenty-three (4 for HLA-B*0702, 19 for HLA-A*2402), 14 (HLA-B*3501) and 23 (7 for HLA-B*4401, 16 for HLA-A*0201) diverse peptide/MHC allele pairs were used for participants 1, 2 and 3, respectively, thus probing a selected set of potential reactivities rather than comprehensively capturing the poly-epitopic T cell response. For each participant, de novo induced CD8+ T cell reactivities against multiple epitopes were identified adding up to a total of eight different epitope/MHC pairs spread across the full length of S (FIGS. 8Ai-8Aii, 8C). The magnitude of epitope-specific T cell responses ranged between 0.01-3.09% of peripheral CD8⁺ T cells, and the most profound expansion was observed for HLA-A*0201 YLQPRTFLL (3.09% multimer⁺of CD8⁺), HLA-A*2402 QYIKWPWYI (1.27% multimer⁺of CD8⁺) and HLA-B*3501 QPTESIVRF (0.17% multimer⁺ of CD8⁺). Comparison with the bulk IFNγ+ CD8+ T cell response against full S in these individuals determined by ELISpot and ICS indicated that indicated that pMHC technology may be more useful to assess true extent of the cellular immune response. Phenotyping of the identified pMHC multimer⁺ S antigen-experienced CD8+ T cell specificities revealed an early differentiated effector memory phenotype characterized by low expression of CCR7 and CD45RA and high expression of the costimulatory molecules CD28 and CD27. CD8+ T cells also expressed markers associated with cognate activation, such as CD38, HLA-DR and PD-1 (FIG. 8B). The data presented herein is the first demonstration of epitopes recognized by COVID-19 vaccine-induced T cells.

[1217] A time-course of detecting activated T cells following vaccine administration was followed in human subjects. In the study depicted in FIG. 8D, subjects were administered 10, 20 or 30 micrograms of the mRNA vaccine encoding the spike protein. Activated CD4+ T cells and CD8+ T cells were isolated at time intervals up to 200 days, and IFN gamma release from the cells was detected by ELISPOT. The subjects exhibited a longer persistence of activated both CD4+ and CD8+ T cells determined by IFNg release in a dose dependent manner. The figures also indicate that the cells were responsive to most of the epitopes that the subjects were exposed to, e.g., 7 out of 8 in the 10 microgram group at 200 days in the upper panel, left graph. The same study in an elderly cohort also showed longer persistent vaccinated epitope responsive activated T cells over the course of 200 days (FIG. 8E). Incidentally, the unrelated viral pool epitope controls (CEFT or CEF) showed lower response for CD4+ T cells. The respective epitopes, matching HLA and the response in subjects are listed below:

| | | Position in | Identified in |
|---|---|---|---|
| HLA | Epitope | S Protein | No. Subjects |
| B35:01 | LPFNDGVYF | 84-92 | 1 |
| A03:01 | GVYFASTEK | 89-97 | 1 |
| A02:01 | YLQPRTFLL | 269-277 | 3 |
| B35:01 | QPTESIVRF | 321-329 | 1 |
| A26:01 | CVADYSVLY | 361-369 | 1 |
| B15:01 | CVADYSVLY | 361-369 | 1 |
| A03:01 | KCYGVSPTK | 378-386 | 2 |
| A24:02 | NYNYLYRLF | 448-456 | 3 |
| B15:01 | FQPTNGVGY | 497-505 | 1 |
| B35:01 | IPFAMQMAY | 896-904 | 1 |
| A02:01 | RLQSLQTYV | 1000-1008 | 2 |
| A68:01 | GTHWFVTQR | 1099-1108 | 1 |
| C04:01 | VYDPLQPEL | 1137-1145 | 1 |
| A24:02 | QYIKWPWYI | 1208-1216 | 3 |
| A24:02 | KWPWYIWLGF | 1211-1220 | 1 |

### Example 11. Peptide/MHC Multimer Staining

[1218] In order to select MHC-class I epitopes for multimer analysis, a mass spectrometry-based binding and presentation predictor (e.g., as described in Abelin et al., Immunity 46, 315-326 (2017); and Poran et al., Genome Med. 12, 70 (2020)) was applied to 8-12 amino acid long peptide sequences from the Spike glycoprotein derived from the GenBank reference sequence for SARS CoV-2 (accession: NC_045512.2, ncbi.nlm.nih.gov/nuccore/NC_045512) and paired with 18 MHC-class-I alleles with >5% frequency in the European population. Top predicted epitopes were identified by setting thresholds to the binding percent-rank (≤1%) and presentation scores (>10-2.2) and considered for synthesis of peptides of >90% purity. pMHC complexes were refolded with the easYmer technology (easYmer® kit, ImmuneAware Aps), and complex formation was validated in a bead-based flow cytometry assay according to the manufacturer's instructions. Combinatorial labeling was used for dissecting the antigen specificity of T cells utilizing two-color combinations of five different fluorescent labels to enable detection of up to ten different T cell populations per sample. For tetramerisation, streptavidin (SA)-fluorochrome conjugates were added: SA BV421, SA BV711, SA PE, SA PE-Cy7, SA APC (all BD Biosciences). For three BNT162b2 vaccinated participants, individualized pMHC multimer staining cocktails contained up to ten pMHC complexes, with each pMHC complex encoded by a unique two-color combination. PBMCs (2×106) were stained ex vivo for 20 minutes at room temperature with each pMHC multimer cocktail at a final concentration of 4 nM in Brilliant Staining Buffer Plus (BSB Plus [BD Horizon™]). Surface and viability staining was carried out in flow buffer (DPBS [Gibco] with 2% FBS [Biochrom], 2 mM EDTA [Sigma-Aldrich]) supplemented with BSB Plus for 30 minutes at 4° C. (CD3 BUV395, 1:50; CD45RA BUV563, 1:200; CD27 BUV737, 1:200; CD8 BV480, 1:200; CD279 BV650, 1:20; CD197 BV786, 1:15; CD4 BB515, 1:50; CD28 BB700, 1:100; CD38 PE-CF594, 1:600; HLA-DR APC-R700, 1:150; all BD Biosciences; DUMP channel: CD14 APC-eFluor780, 1:100; CD16 APC-eFluor780, 1:100; CD19 APC-eFluor780, 1:100; fixable viability dye eFluor780, 1:1,667; all ThermoFisher Scientific). Cells were fixed for 15 minutes at 4° C. in 1x Stabilization Fixative (BD), acquired on a FACSymphony™ A3 flow cytometer (BD Biosciences) and analyzed with FlowJo software version 10.6.2 (FlowJo LLC, BD Biosciences). CD8+ T cell reactivities were considered positive, when a clustered population was observed that was labelled with only two pMHC multimer colors.

### Example 12. T Cell Manufacturing

[1219] Provided herein is a T cell therapy where T cells primed and responsive against antigenic peptides specific for a viral epitope is administered to the subject. The therapeutic can comprise generating viral epitope specific T cells ex vivo by priming T cells with APCs expressing viral T cell epitopes and expanding the activated T cells to obtain viral epitope-specific CD8+ and CD4+including a population of these cells exhibiting memory phenotype (see, e.g., WO2019094642, incorporated by reference in its entirety). Target viral antigen responsive T cells are generated ex vivo and immunogenicity is validated using an in vitro antigen-specific T cell assay. Mass spectrometry can be used to validate that cells that express the antigen of interest can process and present the peptides on the relevant HLA molecules. Additionally, the ability of these T cells to kill cells presenting the peptide is confirmed using a cytotoxicity assay.

### Generation of Target Tumor Cell Antigen Responsive T Cells Ex Vivo

### Materials:

[1220] AIM V media (Invitrogen) Human FLT3L, preclinical CellGenix #1415-050 Stock 50 ng/μL; TNF-α, preclinical CellGenix #1406-050 Stock 10 ng/μL; IL-1B, preclinical CellGenix #1411-050 Stock 10 ng/μL; PGE1 or Alprostadil-Cayman from Czech republic Stock 0.5 μg/μL; R10 media-RPMI 1640 glutamax+10% Human serum+1% PenStrep; 20/80 Media-18% AIM V+72% RPMI 1640 glutamax+10% Human Serum+1% PenStrep; IL7 Stock 5 ng/μL; IL15 Stock 5 ng/μL.

### Procedure:

[1221] Step 1: Plate 5 million PBMCs (or cells of interest) in each well of 24 well plate with FLT3L in 2 mL AIM V media
[1222] Step 2: Peptide loading and maturation—in AIMV
[1223] 1. Mix peptide pool of interest (except for no peptide condition) with PBMCs (or cells of interest) in respective wells.
[1224] 2. Incubate for 1 hr.
[1225] 3. Mix Maturation cocktail (including TNF-α, IL-1B, PGE1, and IL-7) to each well after incubation.
[1226] Step 3: Add human serum to each well at a final concentration of 10% by volume and mix.
[1227] Step 4: Replace the media with fresh RPMI+10% HS media supplemented with IL7+IL15.
[1228] Step 5: Replace the media with fresh 20/80 media supplemented with IL7+IL15 during the period of incubation every 1-6 days.
[1229] Step 6: Plate 5 million PBMCs (or cells of interest) in each well of new 6-well plate with FLT3L in 2 ml AIM V media
[1230] Step 7: Peptide loading and maturation for re-stimulation-(new plates)
[1231] 1. Mix peptide pool of interest (except for no peptide condition) with PBMCs (or cells of interest) in respective wells
[1232] 2. Incubate for 1 hr.
[1233] 3. Mix Maturation cocktail to each well after incubation
[1234] Step 8: Re-stimulation:
[1235] 1. Count first stimulation FLT3L cultures and add 5 million cultured cells to the new Re-stimulation plates.
[1236] 2. Bring the culture volume to 5 mL (AIM V) and add 500 μL of Human serum (10% by volume)
[1237] Step 9: Remove 3 ml of the media and add 6 ml of RPMI+10% HS media supplemented with IL7+IL15.
[1238] Step 10: Replace 75% of the media with fresh 20/80 media supplemented with IL7+IL15.
[1239] Step 11: Repeat re-stimulation if needed.

### Analysis of Antigen-Specific Induction

[1240] MHC tetramers are purchased or manufactured on-site according to methods known by one of ordinary skill and are used to measure peptide-specific T cell expansion in the immunogenicity assays. For the assessment, tetramer is added to 1×10⁵ cells in PBS containing 1% FCS and 0.1% sodium azide (FACS buffer) according to manufacturer's instructions. Cells are incubated in the dark for 20 minutes at room temperature. Antibodies specific for T cell markers, such as CD8, are then added to a final concentration suggested by the manufacturer, and the cells are incubated in the dark at 4° C. for 20 minutes. Cells are washed with cold FACS buffer and resuspended in buffer containing 1% formaldehyde. Cells are acquired on a LSR Fortessa (Becton Dickinson) instrument and are analyzed by use of FlowJo software (Becton Dickinson). For analysis of tetramer positive cells, the lymphocyte gate is taken from the forward and side-scatter plots. Data are reported as the percentage of cells that were CD8⁺/tetramer⁺.

### Evaluation of Presentation of Viral Antigens

[1241] The affinity of the viral epitopes for HLA alleles and stability of the viral epitopes with the HLA alleles can be determined. An exemplary detailed description of the protocol utilized to measure the binding affinity of peptides to Class I MHC has been published (Sette et al, Mol. Immunol. 31 (11): 813-22, 1994). In brief, MHCI complexes were prepared and bound to radiolabeled reference peptides. Peptides were incubated at varying concentrations with these complexes for 2 days, and the amount of remaining radiolabeled peptide bound to MHCI was measured using size exclusion gel-filtration. The lower the concentration of test peptide needed to displace the reference radiolabeled peptide demonstrates a stronger affinity of the test peptide for MHCI. Peptides with affinities to MHCI <50 nM are generally considered strong binders while those with affinities <150 nM are considered intermediate binders and those <500 nM are considered weak binders (Fritsch et al, 2014).

[1242] An exemplary detailed description of the protocol utilized to measure the binding stability of peptides to Class I MHC has been published (Harndahl et al. J Immunol Methods. 374:5-12, 2011). Briefly, synthetic genes encoding biotinylated MHC-I heavy and light chains are expressed in E. coli and purified from inclusion bodies using standard methods. The light chain (β2m) is radio-labeled with iodine (125I), and combined with the purified MHC-I heavy chain and peptide of interest at 18° C. to initiate pMHC-I complex formation. These reactions are carried out in streptavidin coated microplates to bind the biotinylated MHC-I heavy chains to the surface and allow measurement of radiolabeled light chain to monitor complex formation. Dissociation is initiated by addition of higher concentrations of unlabeled light-chain and incubation at 37° C. Stability is defined as the length of time in hours it takes for half of the complexes to dissociate, as measured by scintillation counts.

[1243] To assess whether antigens could be processed and presented from the larger polypeptide context, peptides eluted from HLA molecules isolated from cells expressing the genes of interest were analyzed by tandem mass spectrometry (MS/MS).

[1244] For analysis of presentation of viral antigens, cell lines are utilized that have been infected with the virus or were lentivirally transduced to express the viral antigens. HLA molecules are either isolated based on the natural expression of the cell lines or the cell lines are lentivirally transduced or transiently transfected to express the HLA of interest. 293T cells are transduced with a lentiviral vector encoding various regions of a viral polypeptides. Greater than 50 million cells expressing peptides encoded by a viral polypeptide are cultured and peptides were eluted from HLA-peptide complexes using an acid wash. Eluted peptides are then analyzed by targeted MS/MS with parallel reaction monitoring (PRM).

### HLA Class I Binding and Stability

[1245] A subset of the peptides used for affinity measurements are also used for stability measurements using the assay described. Less than 50 nM can be considered by the field as a strong binder, 50-150 nM can be considered an intermediate binder, 150-500 nM can be considered a weak binder, and greater than 500 nM can be considered a very weak binder.

[1246] Immunogenicity assays are used to test the ability of each test peptide to expand T cells. Mature professional APCs are prepared for these assays in the following way. Monocytes are enriched from healthy human donor PBMCs using a bead-based kit (Miltenyi). Enriched cells are plated in GM-CSF and IL-4 to induce immature DCs. After 5 days, immature DCs are incubated at 37° C. with each peptide for 1 hour before addition of a cytokine maturation cocktail (GM-CSF, IL-1B, IL-4, IL-6, TNFα, PGE1β). Cells are incubated at 37° C. to mature DCs.

### Assessment of Cytotoxic Capacity of Antigen-Specific T Cells In Vitro

[1247] Cytotoxicity activity can be measured with the detection of cleaved Caspase 3 in target cells by Flow cytometry. Target cancer cells are engineered to express the viral peptide along and the proper MHC-I allele. Mock-transduced target cells (i.e. not expressing the viral peptide) are used as a negative control. The cells are labeled with CFSE to distinguish them from the stimulated PBMCs used as effector cells. The target and effector cells are co-cultured for 6 hours before being harvested. Intracellular staining is performed to detect the cleaved form of Caspase 3 in the CFSE-positive target cells. The percentage of specific lysis is calculated as: Experimental cleavage of Caspase 3/spontaneous cleavage of Caspase 3 (measured in the absence of mutant peptide expression)×100.

[1248] In some examples, cytotoxicity activity is assessed by co-culturing induced T cells with a population of viral antigen-specific T cells with target cells expressing the corresponding HLA, and by determining the relative growth of the target cells, along with measuring the apoptotic marker Annexin V in the target cells specifically. Target cells are engineered to express the viral peptide or the viral peptide is exogenously loaded. Mock-transduced target cells (i.e. not expressing the viral peptide), target cells loaded with viral peptides, or target cells with no peptide loaded are used as a negative control. The cells are also transduced to stably express GFP allowing the tracking of target cell growth. The GFP signal or Annexin-V signal are measured over time with an IncuCyte S3 apparatus. Annexin V signal originating from effector cells is filtered out by size exclusion. Target cell growth and death is expressed as GFP and Annexin-V area (mm2) over time, respectively.

### Enrichment of Target Antigen Activated T Cells

[1249] Viral antigen responsive T cells may be further enriched. In this example, multiple avenues for enrichment of antigen responsive T cells are explored. After the initial stimulation of viral antigen-specific T cells, an enrichment procedure can be used prior to further expansion of these cells. As an example, stimulated cultures and pulsed with the same viral peptides used for the initial stimulation on day 13, and cells upregulating 4-1BB are enriched using Magnetic-Assisted Cell Separation (MACS; Miltenyi). These cells can then be further expanded, for example, using anti-CD3 and anti-CD28 microbeads and low-dose IL-2.

### Immunogenicity Assays for Selected Peptides

[1250] After maturation of DCs, PBMCs (either bulk or enriched for T cells) are added to mature dendritic cells with proliferation cytokines. Cultures are monitored for viral peptide-specific T cells using a combination of functional assays and/or tetramer staining. Parallel immunogenicity assays with the viral peptides allowed for comparisons of the relative efficiency with which the peptides expanded peptide-specific T cells. In some embodiments, the peptides elicit an immune response in the T cell culture comprises detecting an expression of a FAS ligand, granzyme, perforins, IFN, TNF, or a combination thereof in the T cell culture.

[1251] Immunogenicity can be measured by a tetramer assay. MHC tetramers are purchased or manufactured on-site, and are used to measure peptide-specific T cell expansion in the immunogenicity assays. For the assessment, tetramer is added to 1×10\hat{ }5 cells in PBS containing 1% FCS and 0.1% sodium azide (FACS buffer) according to manufacturer's instructions. Cells are incubated in the dark for 20 minutes at room temperature. Antibodies specific for T cell markers, such as CD8, are then added to a final concentration suggested by the manufacturer, and the cells are incubated in the dark at 4 degrees Celsius for 20 minutes. Cells are washed with cold FACS buffer and resuspended in buffer containing 1% formaldehyde. Cells are acquired on a FACS Calibur (Becton Dickinson) instrument, and are analyzed by use of Cellquest software (Becton Dickinson). For analysis of tetramer positive cells, the lymphocyte gate is taken from the forward and side-scatter plots. Data are reported as the percentage of cells that were CD8⁺/Tetramer⁺.

[1252] Immunogenicity can be measured by intracellular cytokine staining. In the absence of well-established tetramer staining to identify viral antigen-specific T cell populations, antigen-specificity can be estimated using assessment of cytokine production using well-established flow cytometry assays. Briefly, T cells are stimulated with the viral peptide of interest and compared to a control. After stimulation, production of cytokines by CD4+ T cells (e.g., IFNγ and TNFα) are assessed by intracellular staining. These cytokines, especially IFNγ, used to identify stimulated cells.

[1253] In some embodiments the immunogenicity is measured by measuring a protein or peptide expressed by the T cell, using ELISpot assay. Peptide-specific T cells are functionally enumerated using the ELISpot assay (BD Biosciences), which measures the release of IFNγ from T cells on a single cell basis. Target cells are pulsed with 10 μM viral peptide for one hour at 37 degrees C., and washed three times. 1×10\hat{ }5 peptide-pulsed targets are co-cultured in the ELISPOT plate wells with varying concentrations of T cells (5×10\hat{ }2 to 2×10\hat{ }3) taken from the immunogenicity culture. Plates are developed according to the manufacturer's protocol, and analyzed on an ELISPOT reader (Cellular Technology Ltd.) with accompanying software. Spots corresponding to the number of IFN gamma-producing T cells are reported as the absolute number of spots per number of T cells plated. T cells expanded on modified peptides are tested not only for their ability to recognize targets pulsed with the modified peptide, but also for their ability to recognize targets pulsed with the parent peptide.

[1254] CD107a and CD107b are expressed on the cell surface of CD8+ T cells following activation with viral peptide. The lytic granules of T cells have a lipid bilayer that contains lysosomal-associated membrane glycoproteins (“LAMPs”), which include the molecules CD107a and b. When cytotoxic T cells are activated through the T cell receptor, the membranes of these lytic granules mobilize and fuse with the plasma membrane of the T cell. The granule contents are released, and this leads to the death of the target cell. As the granule membrane fuses with the plasma membrane, C107a and b are exposed on the cell surface, and therefore are markers of degranulation. Because degranulation as measured by CD107a and b staining is reported on a single cell basis, the assay is used to functionally enumerate viral peptide-specific T cells. To perform the assay, peptide is added to HLA-transfected cells to a final concentration of 20 μM, the cells are incubated for 1 hour at 37 degrees C., and washed three times. 1×10\hat{ }5 of the peptide-pulsed cells were aliquoted into tubes, and antibodies specific for CD107a and b are added to a final concentration suggested by the manufacturer (Becton Dickinson). Antibodies are added prior to the addition of T cells in order to “capture” the CD107 molecules as they transiently appear on the surface during the course of the assay. 1×10\hat{ }5 T cells from the immunogenicity culture are added next, and the samples were incubated for 4 hours at 37 degrees C. The T cells are further stained for additional cell surface molecules such as CD8 and acquired on a FACS Calibur instrument (Becton Dickinson). Data is analyzed using the accompanying Cellquest software, and results are reported as the percentage of CD8+CD107 a and b+ cells.

[1255] Cytotoxic activity is measured using a chromium release assay. Target T2 cells are labeled for 1 hour at 37 degrees C. with Na51Cr and washed 5×10\hat{ }3 target cells are then added to varying numbers of T cells from the immunogenicity culture. Chromium release is measured in supernatant harvested after 4 hours of incubation at 37 degrees C. The percentage of specific lysis is calculated as: Experimental release−spontaneous release/Total release−spontaneous release×100

[1256] Immunogenicity assays are carried out to assess whether each peptide can elicit a T cell response by viral antigen-specific expansion. A positive result demonstrates that a peptide can induce a T cell response. Several viral peptides are tested for their capacity to elicit CD8+ T cell responses with multimer readouts as described. Each positive result was measured with a second multimer preparation to avoid any preparation biases. In an exemplary assay, T cells were co-cultured with monocyte-derived dendritic cells loaded with viral epitope for 10 days. CD8+ T cells were analyzed for viral antigen-specificity for viral epitope using multimers (initial: BV421 and PE; validation: APC and BUV396).

[1257] While antigen-specific CD8+ T cell responses are readily assessed using well-established HLA Class I multimer technology, CD4+ T cell responses require a separate assay to evaluate because HLA Class II multimer technology is not well-established. In order to assess CD4+ T cell responses, T cells are re-stimulated with the viral peptide of interest. After stimulation, production of cytokines by CD4+ T cells (e.g., IFNγ and TNFα) are assessed by intracellular staining. These cytokines, especially IFNγ, used to identify stimulated cells.

### Cell Expansion and Preparation

[1258] To prepare APCs, the following method is employed (a) obtain of autologous immune cells from the peripheral blood of the patient; enrich monocytes and dendritic cells in culture; load viral peptides and mature DCs.

### T Cell Induction (Protocol 1)

[1259] First induction: (a) Obtaining autologous T cells from an apheresis bag; (b) Depleting CD25+ cells and CD14+ cells, alternatively, depleting only CD25+ cells; (c) Washing the peptide loaded and mature DC cells, resuspending in the T cell culture media; (d) Incubating T cells with the matured DC. Second induction: (a) Washing T cells, and resuspending in T cell media, and optionally evaluating a small aliquot from the cell culture to determine the cell growth, comparative growth and induction of T cell subtypes and antigen specificity and monitoring loss of cell population; (b) Incubating T cells with mature DC.

[1260] Third induction: (a) Washing T cells, and resuspending in T cell media, and optionally evaluating a small aliquot from the cell culture to determine the cell growth, comparative growth and induction of T cell subtypes and viral antigen specificity and monitoring loss of cell population; (b) Incubating T cells with mature DC.

[1261] To harvest peptide activated t cells and cryopreserve the T cells, the following method can be employed (a) Washing and resuspension of the final formulation comprising the activated T cells which are at an optimum cell number and proportion of cell types that constitutes the desired characteristics of the Drug Substance (DS). The release criteria testing include inter alia, Sterility, Endotoxin, Cell Phenotype, TNC Count, Viability, Cell Concentration, Potency; (b) Filling drug substance in suitable enclosed infusion bags; (c) Preservation until time of use.

### Methods of Functional Characterization of the CD4+ and CD8+Viral Antigen-Specific T Cells.

[1262] T cell manufacturing processes were developed to raise memory and de novo CD4+ and CD8+T cell responses to viral antigens through multiple rounds of ex-vivo T cell stimulation, generating a viral antigen-reactive T cell product for use in adoptive cell therapy. Detailed characterization of the stimulated T cell product can be used to test the many potential variables these processes utilize. To probe T cell functionality and/or specificity, an assay was developed to simultaneously detect viral antigen-specific T cell responses and characterize their magnitude and function. This assay employs the following steps. First T cell-APC co-cultures were used to elicit reactivity in viral antigen-specific T cells. Optionally, sample multiplexing using fluorescent cell barcoding is employed. To identify viral antigen-specific CD8+ T cells and to examine T cell functionality, staining of peptide-MHC multimers and multiparameter intracellular and/or cell surface cell marker staining were probed simultaneously using FACS analysis. The results of this streamlined assay demonstrated its application to study T cell responses induced from a healthy donor. Viral antigen-specific T cell responses induced toward peptides are identified in a donor. The magnitude, specificity and functionality of the induced T cell responses are also compared. Briefly, different T cell samples are barcoded with different fluorescent dyes at different concentrations (see, e.g., Example 19). Each sample receives a different concentration of fluorescent dye or combination of multiple dyes at different concentrations. Samples are resuspended in phosphate-buffered saline (PBS) and then fluorophores dissolved in DMSO (typically at 1:50 dilution) are added to a maximum final concentration of 5 μM. After labeling for 5 min at 37° C., excess fluorescent dye is quenched by the addition of protein-containing medium (e.g. RPMI medium containing 10% pooled human type AB serum). Uniquely barcoded T cell cultures are challenged with autologous APC pulsed with the viral antigen peptides as described above.

[1263] The differentially labeled samples are combined into one FACS tube or well, and pelleted again if the resulting volume is greater than 100 μL. The combined, barcoded sample (typically 100 μL) is stained with surface marker antibodies including fluorochrome conjugated peptide-MHC multimers. After fixation and permeabilization, the sample is additionally stained intracellularly with antibodies targeting TNF-α and IFN-γ.

[1264] The cell marker profile and MHC tetramer staining of the combined, barcoded T cell sample are then analyzed simultaneously by flow cytometry on flow cytometer. Unlike other methods that analyze cell marker profiles and MHC tetramer staining of a T cell sample separately, the simultaneous analysis of the cell marker profile and MHC tetramer staining of a T cell sample described in this example provides information about the percentage of T cells that are both viral antigen specific and that have increased cell marker staining. Other methods that analyze cell marker profiles and MHC tetramer staining of a T cell sample, separately determine the percentage of T cells of a sample that are viral antigen specific, and separately determine the percentage of T cells that have increased cell marker staining, only allowing correlation of these frequencies.

[1265] The simultaneous analysis of the cell marker profile and MHC tetramer staining of a T cell sample described in this example does not rely on correlation of the frequency of viral antigen specific T cells and the frequency of T cells that have increased cell marker staining; rather, it provides a frequency of T cells that are both viral antigen specific and that have increased cell marker staining. The simultaneous analysis of the cell marker profile and MHC tetramer staining of a T cell sample described in this example allows for determination on a single cell level, those cells that are both viral antigen specific and that have increased cell marker staining.

[1266] To evaluate the success of a given induction process, a recall response assay may be used followed by a multiplexed, multiparameter flow cytometry panel analysis. A sample taken from an induction culture is labeled with a unique two-color fluorescent cell barcode. The labeled cells are incubated on viral antigen-loaded DCs or unloaded DCs overnight to stimulate a functional response in the viral antigen-specific cells. The next day, uniquely labeled cells are combined prior to antibody and multimer staining. Exemplary materials for T cell culture are provided below:

[1267] Materials: AIM V media (Invitrogen) Human FLT3L; preclinical CellGenix #1415-050 Stock 50 ng/μL TNFα; preclinical CellGenix #1406-050 Stock 10 ng/μL; IL-1β, preclinical CellGenix #1411-050 Stock 10 ng/μL; PGE1 or Alprostadil—Cayman from Czech republic Stock 0.5 μg/μL; R10 media-RPMI 1640 glutamax+10% Human serum+1% PenStrep; 20/80 Media-18% AIM V+72% RPMI 1640 glutamax+10% Human Serum+1% PenStrep; IL7 Stock 5 ng/μL; IL15 Stock 5 ng/μL; DC media (Cellgenix); CD14 microbeads, human, Miltenyi #130-050-201, Cytokines and/or growth factors, T cell media (AIM V+RPMI 1640 glutamax+serum+PenStrep), Peptide stocks-1 mM per peptide viral peptides).

### Example 13. Designing Linkers of Orflab Minimal Epitopes

[1268] This example shows that the strings were designed using the MS-based HLA-I cleavage predictor to optimize ordering of Orflab epitopes or minimal epitope containing stretches, adding as few linkers as possible while retaining efficient epitope cleavage (FIG. 9). The same 18 Orflab sequences is included in each string variant, except RS-C6 where two sequences have been removed. However, the ordering of the sets of sequences and designed cleavage linkers differ based on the flanking context. The string RS C8 was especially designed such that the minimal Orflab minimal epitope sequences are placed in close proximity with each other, utilizing MS-based cleavage predictor on either side of an epitope and requiring minimal linker sequences.

TABLE 13
Exemplary Orf1ab epitopes optimized for cleavage

| Peptide | Start | End | Length | Score | Seq_type |
|---|---|---|---|---|---|
| YHFF | 1 | 4 | 4 | | Linker |
| HTTDPSFLGRYMSAL | 5 | 19 | 15 | 0.376208 | epitope |
| FADDLNQLTGY | 20 | 30 | 11 | 2.947135 | epitope |
| HTDFSSEIIGY | 31 | 41 | 11 | 2.944603 | epitope |
| QLMCQPILL | 42 | 50 | 9 | 1.967348 | epitope |
| AEAELAKNVSL | 51 | 61 | 11 | 0.517577 | epitope |
| ILGTVSWNL | 62 | 70 | 9 | 0.596325 | epitope |
| KRRY | 71 | 74 | 4 | | linker |
| LLSAGIFGA | 75 | 83 | 9 | 0.529516 | epitope |
| ITDVFYKENSY | 84 | 94 | 11 | 2.105188 | epitope |
| KVPTDNYITTY | 95 | 105 | 11 | 1.134409 | epitope |
| ARMA | 106 | 109 | 4 | | linker |
| APKEIIFLEGETL | 110 | 122 | 13 | 1.175399 | epitope |
| FGDDTVIEV | 123 | 131 | 9 | 2.679615 | epitope |
| AIILASFSAST | 132 | 142 | 11 | 0.747335 | epitope |
| RRMA | 143 | 146 | 4 | | linker |
| MVTNNTFTLK | 147 | 156 | 10 | 0.742596 | epitope |
| VPHVGEIPVAYRKVLL | 157 | 172 | 16 | 2.066211 | epitope |
| KTIQPRVEK | 173 | 181 | 9 | 2.922006 | epitope |
| YLFDESGEFKL | 182 | 192 | 11 | 2.269281 | epitope |
| SEVGPEHSLAEY | 193 | 204 | 12 | 1.662412 | epitope |
| YIFFASFYY | 205 | 213 | 9 | 0.210118 | epitope |
| KRNG | 214 | 218 | 4 | | linker |

### Example 14. Immunogenicity Studies of Cor Vac 2.0 Strings (C5-C8) in Animal Models

[1269] FIG. 19A, FIG. 19B and FIG. 19C further demonstrate the string designs for CorVac 2.0, using sequences encoding 2019 SARS Cov-2 portions of Nucleocapsid (N), membrane and ORF1a/b in four strings (C5-C8) that were further tested for immunogenicity in mice. FIG. 23 demonstrates the MS-detected epitope coverages in RS C5-RS C8 designs. In some studies, sequence encoding tiled 15-mer peptide were used with 11 amino acid overlap in the string designs the Nucleocapsid (Nuc) antigen pool, the membrane (M) antigen pool, or the ORF-1ab pool (FIG. 32A, FIG. 32B, FIG. 32C). One objective of the studies exemplified in FIG. 10A and FIG. 10B was to determine the most immunogenic strings between the C5-C8 CorVac 2.0 strings for further development. The studies exemplified in FIG. 10A and FIG. 10B were used to test the C5-C8 mRNA string vaccines, compare the immunogenicities offered by vaccines targeting viral secretory domains (SEC domains) or the cytoplasmic tail TM domains, and test for immunogenic responses. In the studies exemplified in FIG. 10A and FIG. 10B, each set of 6-8 weeks old female BALB/C mice or HLA-A2 transgenic mice are administered intramuscular injections of one of the four mRNA string construct (5 microgram/mouse), and blood samples are collected at 7, 14, 21 and 28 days post injection. Animals are euthanized on day 28 (FIG. 10B) or on day 14 and on day 28 (FIG. 10A) and organs are harvested. FIG. 24 and FIG. 25 show that all 4 strings elicited T cell response, i.e., CorVac 2.0 encoded nucleocapsid epitope pools A, B and C and membrane pools A, B and C (tiled 15mer peptide with 11 aa overlap) elicit T cell response. Similarly, T cell response was elicited in HLA-A2 transgenic mice from the nucleocapsid and membrane regions using the CorVac 2.0 strings (FIG. 27 and FIG. 28). T cell responses to ORF 1ab epitopes were present in the HLA-A2 transgenic mice (FIG. 29). In contrast, as shown in FIG. 32D, ORF1ab epitopes do not elicit T cell response in BALB/c mice which do not express HLA-A2. From these studies overall, specifically summarized in FIG. 26, FIG. 30, FIG. 32E it is evident that the RS-C7 string elicits the most T cell response from nucleocapsid, membrane and ORF1ab regions. FIG. 31 shows the distribution and coverage of the epitope pools in the C7 string. Additionally, the C7 string overlaps with few or no mutations in the variants of SARS-CoV-2 strain that are of concern (FIG. 33).

### Example 15. Correlation of RECON Prediction with Validation from Independent Studies

[1270] A large body of data derived from T cell immunogenicity studies and mass spectrometry studies is currently available worldwide that strongly correlates with and validates the epitope predictions first reported in this study and provided in epitope sequence of Table 1A, Table 1B, Table 1C, Table 2Ai, Table 2Aii, Table 2B, Table 9, Table 10, Table 11, Table 12, Table 14A, Table 14B, Table 14C, Table 15 or Table 16. Such validation and strong correlation in studies performed worldwide renders high confidence on the reliability of the prediction algorithm. RECON predicted 4794 unique peptide-MHC pairs with ≤1% rank. Table 14A and Table 14B exemplify the MS observed validations of the epitopes. FIG. 20 illustrates the workflow for choice of epitopes for string designs, using the presentation prediction by RECON software with mass spectrometric (MS) validation. FIG. 21 demonstrates high confidence of the prediction using an exemplary targeted ORF1ab epitope KTIQPRVEK that binds to A*11:01, encoded in all 4 strings tested. Also, as demonstrated in FIG. 22, twenty five unique CorVac 2.0 epitopes have been identified using MS, of which, there were 17 ORF1ab epitopes, 6 nucleocapsid epitopes, and 2 membrane epitopes.

TABLE 14A
Exemplary epitopes of BNT- Spike Vaccine Construct

| | | | Literature Mentions | |
|---|---|---|---|---|
| Epitope | Allele | Confidence | Exact | Not Exact |
| KIADYNYKL | A*02:01 | High | Yes | Yes |
| YLQPRTFLL | A*02:01 | High | Yes | Yes |
| TLDSKTQSL | A*02:01 | High | Yes | Yes |
| ELLHAPATV | A*02:01 | High | No | Yes |
| RLQSLQTYV | A*02:01 | High | Yes | Yes |
| RLNEVAKNL | A*02:01 | Moderate | Yes | No |
| RLITGRLQSL | A*02:01 | Moderate | Yes | Yes |
| KCYGVSPTKL | A*03:01 | High | No | Yes |
| TGSNVFQTR | A*68:01 | High | Yes | Yes |
| FPQSAPHGVVF | B*35:01 | High | Yes | Yes |
| QPTESIVRF | B*35:01 | High | Yes | Yes |
| VASQSIIAY | B*35:01 | High | Yes | Yes |
| TSNQVAVLY | B*35:01 | High | Yes | Yes |
| TEVPVAIHADQL | B*40:01 | High | No | No |
| VEKGIYQT | B*41:02 | High | No | Yes |
| VRDPQTLEI | C*05:01 | High | No | No |

TABLE 14B
Exemplary Multi-protein Epitope String Constructs

| | | | | Literature Mentions | |
|---|---|---|---|---|---|
| Epitope | Allele | Confidence | ORF | Exact | Not Exact |
| YLFDESGEFKL | A*02:01 | High | 1ab | Yes | Yes |
| YLFDESGEF | A*02:01 | High | 1ab | No | Yes |
| FGDDTVIEV | A*02:01 | High | 1ab | Yes | Yes |
| LLLDRLNQL | A*02:01 | High | N | Yes | Yes |
| QLMCQPILL | A*02:01 | Moderate | 1ab | Yes | Yes |
| TTDPSFLGRY | A*01:01 | High | 1ab | Yes | Yes |
| PTDNYITTY | A*01:01 | High | 1ab | Yes | Yes |
| PSFLGRY | N/A | High | 1ab | No | Yes |
| AEAELAKNV | B*44:03 | High | 1ab | Yes | Yes |
| VATSRTLSY | C*16:01 | High | M | Yes | Yes |
| KTIQPRVEK | A11:01 | High | 1ab | Yes | Yes |

TABLE 14C
This table lists the MS identified epitopes
derived from CorVac 2.0 C5-C8 string designs.

| Epitope | ORF | Allele |
|---|---|---|
| AEAELAKNV | 1ab | B44:03 |
| AEAELAKNVS | 1ab | B08:01 |
| FGDDTVIEV | 1ab | A02:01 |
| HVGEIPVAY | 1ab | A03:01 |
| KTIQPRVEK | 1ab | A11:01, A03:01 |
| PTDNYITTY | 1ab | A01:01 |
| QLMCQPILL | 1ab | A02:01 |
| SEVGPEHSLAEY | 1ab | B44:03 |
| SEVGPEHSL | 1ab | B44:03 |
| TTDPSFLG | 1ab | A01:01 |
| TTDPSFLGR | 1ab | A01:01 |
| TTDPSFLGRY | 1ab | A01:01 |
| TTDPSFLGRYM | 1ab | A01:01 |
| PSFLGRY | 1ab | A01:01 |
| VTNNTFTLK | 1ab | A11:01 |
| YLFDESGEF | 1ab | A02:01 |
| YLFDESGEFKL | 1ab | A02:01 |
| ATSRTLSYYK | M | A11:01 |
| VATSRTLSY | M | C16:01 |
| GQQQQGQTVTK | N | A11:01 |
| KTFPPTEPK | N | A11:01, A03:01 |
| KTFPPTEPKK | N | A11:01 |
| LLLDRLNQL | N | A02:01 |
| NFKDQVIL | N | B08:01 |
| QQQGQTVTK | N | A11:01 |

[1271] The above data represent 19 studies, covering 1180 class I epitopes, including 881 class I unique epitope sequences. As many as 756 (86%) have exact match to RECON predictions. 872 (98%) sequences have either a superstring or a substring in RECON predictions. These studies indicate high degree of correlation of epitope prediction by RECON with actual T cell immunogenicity observed data.

### Example 16. Sequence Variability of SARS CoV-2

[1272] In this example, the sequence variability of the SARS CoV-2 is shown, in light of protection that the string vaccines can offer. FIG. 12A, FIG. 12B, FIG. 13A, FIG. 13B, FIG. 14, FIG. 15, FIG. 16, FIG. 17 and FIG. 18 demonstrates detection/identification of variant or mutated amino acid positions along the SARS CoV-2 genome. This was in turn used to assess the sensitivity of string vaccines to variants. The figures highlight the regions covered by the epitopes covered by the strings. As shown at least in these figures, and also combined with information on the string sequences provided elsewhere in the document, multiple epitopes from multiple different viral proteins are included in each string. That is, if one epitope covers a mutant sequence, the other epitopes are at least spared to offer immune response against a viral strain. This design ensures that the not only a wider and more robust immunogenic response can be triggered by the vaccine, it is also important to note that different variants and mutants of the virus are covered by a string vaccine. It follows that the design of the constructs offers a good mechanism of avoiding viral escape variants, as is demonstrated in the analysis in FIG. 12A, FIG. 12B, FIG. 13A, FIG. 13B, FIG. 14, FIG. 15, FIG. 16, FIG. 17 and FIG. 18. This provides support that the string vaccines can confer protective immunity that is not variant-dependent.

### Example 17. Predictions Using HLA-Peptide Presentation Prediction Algorithm

[1273] An updated run in the machine-learning HLA-peptide presentation prediction algorithm RECON predicted newer epitopes that were predicted with high score, (that is, a score that represents high likelihood that the epitope peptide would actually be presented by the HLA allele). These epitope-HLA pairs are listed below in Table 16. For each pair, the epitope peptide sequence in the left column (column 1 or 3) is predicted to be presented by the HLA in the column immediately to its right (column 2 or column 4 respectively) in the same row.

### Example 18. Immunogenicity Studies of Cor Vac 2.0 C-7 String with BNT162b2 in BALB/C Mice

[1274] In one study design as exemplified in FIG. 11A, different vaccine strategies are compared in BALB/C mice to examine the immunogenicity of CorVac 2.0 strings with BNT162b2, to test the impact of CorVac 2.0 on anti-Spike antibodies induced by BNT162b2, test CorVac 2.0 T cell responses after prime and boost (2 shots), compare combinations of BNT162b2 and CorVac 2.0 either through separate formulation (different LNPs) or co-formulation (same LNP), and to test varying ratios of BNT162b2: CorVac 2.0, keeping BNT162b2 dosage fixed to not reduce Ab titers. As exemplified in FIG. 11A, the different vaccine strategies in BALB/C mice for this study include: (a) the spike mRNA vaccine alone, (b) the string vaccine alone, (c) a first formulation of the spike mRNA vaccine and a separate second formulation of the string vaccine administered on the same day, (d) co-formulation of the spike vaccine and the string vaccine in a first ratio (e.g., 1:1); (e) a co-formulation of the spike vaccine and the string vaccine in a second ratio (e.g., 3:1); and (f) a co-formulation of the spike vaccine and the string vaccine in a third ratio (e.g., 9:1). In this study, about half of the mice of each set are sacrificed on day 14, and the rest on day 35. Samples are collected at day 0, 14, 21 and 35 after the first injection. ELISPOT is performed, cytokine and chemokine generation is analyzed, and T cell subsets are tested for antiviral cytokine responses, surface marker expression, and expression of lineage markers is analyzed by flow cytometry. Antigen specific responsiveness of T cells is also measured in vitro. Tissue samples are also tested for presence of spike antibody, T cell responses and T cell subsets in spleen, draining lymph nodes and blood.

[1275] It was found that the B cell response was primarily driven by BNT162b2 directed against the Spike (S1) epitopes (FIG. 34A, FIG. 34B). No serum antibody response was evident against nucleocapsid (NP) in CorVac 2.0 treated mice. However, as demonstrated herein, inclusion of CorVac 2.0 in a co-formulation setting does not impact Spike-specific Ab development (FIG. 35). Additionally, neutralizing antibody titers were not negatively impacted by CorVac 2.0 (FIG. 36), indicating that CorVac 2.0 can be administered to a population that has received BNT162b2 (or other antigen-stimulating vaccine) and/or has been exposed to and/or infected by SARS-CoV-2. In fact, B cell responses are heavily driven by BNT162b2, but addition of CorVac 2.0 [1:1] co-formulation slightly enhances responses (FIG. 37A and FIG. 37B). Ag-specific Spike T-cell responses were not inhibited by addition of CorVac 2.0 (FIG. 42). Nucleocapsid and membrane specific CorVac 2.0 T cell responses were maximal in mice treated with CorVac 2.0 alone (FIG. 43, Group 3). Ag-specific Spike T cell responses for all groups are shown in FIG. 44. Nucleocapsid and membrane specific CorVac 2.0 T cell responses for all groups are shown in FIG. 45. The studies confirmed that both BNT162b2 and CorVac 2.0 lead to polyfunctional responses in CD4 and CD8 T cells, as exemplified by number of CD4 T cells and CD8 T cell isolated from lymph node analysis considering, for example, interferon release, IL-2 release and expression of activation markers (FIG. 46, FIG. 47, FIG. 48, FIG. 49 and FIG. 50).

### Example 19. Immunogenicity Studies of CorVac 2.0 C-7 String with BNT162b2 in HLA-A2 Transgenic Mice

[1276] In another study design as exemplified in FIG. 11B, different vaccine strategies are compared in HLA-A2 transgenic mice to test the impact of CorVac 2.0 on anti-Spike antibodies induced by BNT162b2, test CorVac 2.0 T cell responses after prime and boost (2 shots) (e.g., for ORF1ab), compare combinations of BNT162b2 and CorVa c2.0 either through separate formulation (different LNPs) or co-formulation (same LNP), test varying ratios of BNT162b2: CorVac 2.0, keeping BNT162b2 dosage fixed to not reduce Ab titers, and to test if separate formulation is better when given in the same site (leg) or different sites (legs). As exemplified in FIG. 11B, the different vaccine strategies in HLA-A2 transgenic mice for this study include: (a) the spike mRNA vaccine alone, (b) the string vaccine alone at a first dosage (1 microgram), (c) the string vaccine alone at a second dosage (0.3 micrograms), (d) a first formulation of the spike mRNA vaccine and a separate second formulation of the string vaccine in a first ratio (e.g., 3:1) administered on the same day, (e) a first formulation of the spike mRNA vaccine and a separate second formulation of the string vaccine in a second ratio (e.g., 1:1) administered on the same day, (f) a co-formulation of the spike vaccine and the string vaccine in a first ratio (e.g., 3:1); and (g) a co-formulation of the spike vaccine and the string vaccine in a second ratio (e.g., 1:1). In this study, about half of the mice of each set are sacrificed on day 14, and the rest on day 35. Samples are collected at day 0, 14, 21 and 35 after the first injection. ELISPOT is performed, cytokine and chemokine generation is analyzed, and T cell subsets are tested for antiviral cytokine responses, surface marker expression, and expression of lineage markers is analyzed by flow cytometry. Antigen specific responsiveness of T cells is also measured in vitro. Tissue samples are also tested for presence of spike antibody, T cell responses and T cell subsets in spleen, draining lymph nodes and blood.

### Example 20. Immunogenicity Studies of CorVac 2.0 C-7 String with BNT162b2 in Transgenic Mice Expressing Human ACE2

[1277] In another study design as exemplified in FIG. 11C, different vaccine strategies are compared in transgenic mice expressing human ACE2 (human version of the receptor SARS-CoV-2 uses to infect cells) to examine CorVac 2.0 as a booster after BNT162b2, test the effects of how a third shot of BNT162b2, CorVac 2.0 or the combination of both (e.g., as a co-formulation, separate formulations, and different BNT162b2: CorVac 2.0 ratios) in mice that have already received BNT162b2 prime and boost, and test immune responses using repeated injections of combined BNT162b2+CorVac 2.0 (e.g., may simulate giving the combination to previously unvaccinated individuals). As exemplified in FIG. 11C, the different vaccine strategies in HLA-A2 transgenic mice for this study include: (a) 2 shots of the spike mRNA vaccine alone (b) 3 shots of the spike mRNA vaccine alone, (c) 2 shots of the spike mRNA vaccine alone followed by 1 shot of a co-formulation of the spike vaccine and the string vaccine in a first ratio (e.g., 3:1) (d) 2 shots of the spike mRNA vaccine alone followed by 1 shot of the string vaccine alone, (e) 2 shots of the spike mRNA vaccine alone followed by a first formulation of the spike mRNA vaccine and a separate second formulation of the string vaccine in a first ratio (e.g., 3:1) administered on the same day, (f) 1 shot of the spike mRNA vaccine alone followed by administration of a first formulation of the spike mRNA vaccine and a separate second formulation of the string vaccine in a first ratio (e.g., 3:1) on the same day followed by administration of a first formulation of the spike mRNA vaccine and a separate second formulation of the string vaccine in a first ratio (e.g., 3:1) on the same day, (g) administration of a first formulation of the spike mRNA vaccine and a separate second formulation of the string vaccine in a first ratio (e.g., 3:1) followed by administration of a first formulation of the spike mRNA vaccine and a separate second formulation of the string vaccine in a first ratio (e.g., 3:1) on the same day followed by administration of a first formulation of the spike mRNA vaccine and a separate second formulation of the string vaccine in a first ratio (e.g., 3:1) on the same day; and (g) 2 shots of the spike mRNA vaccine alone followed by a first formulation of the spike mRNA vaccine and a separate second formulation of the string vaccine in a second ratio (e.g., 9:1) administered on the same day. In this study, mice are sacrificed on day 56. Samples are collected at day 0, 14, 21, 35, 42 and 56 after the first injection. ELISPOT is performed, cytokine and chemokine generation is analyzed, and T cell subsets are tested for antiviral cytokine responses, surface marker expression, and expression of lineage markers is analyzed by flow cytometry. Antigen specific responsiveness of T cells is also measured in vitro. Tissue samples are also tested for presence of spike antibody, T cell responses and T cell subsets in spleen, draining lymph nodes and blood.

### Example 21. Effect of CorVac 2.0 on Spike Antibody and Anti-Spike T Cell Response

[1278] This study was designed to evaluate the effects of CorVac 2.0 strings on antibody levels of spike protein from prior administered BNT162b2 vaccine. Nine groups of mice with 6 mice each were administered a prime-boost-boost regimen as shown in FIG. 51. C7 string was used as exemplary of the CorVac 2.0 strings. Vaccines were administered intramuscularly in a 20 microliter solution in one leg. Retroorbital bleeding was performed to collect blood on a day prior to the first vaccine application (prime), and on days 14, 21, 35, 42 and 56 from prime. On day 56 mice were sacrificed, organs harvested, splenocytes and lymph node preparations were made. Data shown in FIG. 52 indicates that separately formulated CorVac2.0 at 0.3 ug dose enhances spike IgG. CorVac2.0 (e.g., C7 string) alone slightly boosts Spike IgG production (FIG. 52 left graph). Separately formulated (Group 6, G6) 3:1 boosts Spike IgG production (FIG. 52 middle graph). Inclusion of multiple doses of separately formulated CorVac2.0 does not negatively impact Spike IgG responses (FIG. 52, right graph). Similar results were observed in FIG. 53 with optical density measurement of Spike antigen specific antibody levels.

[1279] Spike antibody titer increases with time after administration of BNT162b2 alone (e.g., in Groups 2 and 3; FIG. 54 G2, G3) over 42 days post vaccination, using the regime shown in FIG. 51. With the various separately formulated doses of Corvac 2.0 boosts as shown in the regime of FIG. 51, spike antibody titer continues to remain high, and shows higher titers at day 56, compared to a slight decrease in the same for BNT162b2 treatment alone (FIG. 54). Particularly, third boost increases spike IgG with all Corvac 2.0 variations, as demonstrated in FIG. 54. FIG. 55 shows spike (S1) ELISA results at the indicated dilutions.

[1280] Additionally, data shown in FIG. 56 shows that inclusion of CorVac 2.0 does not impact neutralizing antiviral antibody titers negatively. Pseudovirus neutralizing titers against VSV/SARS-CoV-2S are not reduced.

[1281] T cell responses were evaluated by tetramer staining. Tetramer staining of peripheral blood leukocytes show that Spike responses are not impacted by addition of CorVac 2.0 (FIG. 57). Likewise, FIG. 58 shows T cell responses against three different Spike epitopes AAYYVGYL, VNFNENGL and VVLSFELL. CorVac2.0 alone slightly boosts Spike T cell responses (FIG. 59, left graph); while separately formulated 3:1 and 9:1 slightly boost Spike T cells (FIG. 59, middle graph). Multiple doses of separately formulated CorVac 2.0 does not negatively impact Spike T cell responses (FIG. 59, right graph). In fact, addition of CorVac 2.0 in the 3^{rd} booster shot as a separate formylation slightly improves T cell responses to Spike.

[1282] These results demonstrate that boosting with CorVac2.0 only, or with separately formulated CorVac2.0+BNT162b2 leads to increased Spike IgG titers, but does not affect neutralizing titers. Of the three epitopes tested, combination with CorVac2.0 does not impact tetramer-specific PBLs.

### Example 22. T Cell Responses to Other SARS-CoV-2 Proteins with BNT162b2+CorVac 2.0 Vaccination

[1283] From the study outlined in FIG. 51, T cell responses to Spike and CorVac 2.0 associated proteins (e.g. Membrane protein) were analyzed when BNT162b2 and CorVac 2.0 were co-administered as a third booster. Data presented in FIG. 60 indicate that when used in combination with BNT162b2, antibody and T cell responses to spike are maintained as well as additional T cells specific for additional SARS-CoV2 protein associated epitopes are evidenced.

[1284] T cell response to viral nucleocapsid is a weak response observed when tested in hACE2 mice after one boost dose with CorVac 2.0 (FIG. 60, left graph, G4, G5, G6, G9). However, multiple doses of separately formulated BNT 162b2+CorVac 2.0 leads to increases in the response (FIG. 60, right graph, G7, G8). Response to the viral membrane (M) protein was observed to be the strongest when seen in separately formulated groups as booster (FIG. 61, left). Also, multiple doses of separately formulated BNT162b2+CorVac 2.0 leads to increase in the responses (FIG. 61, right).

[1285] Lymph nodes were analyzed for T cell responses to the various treatments outlined in FIG. 51. Cell counts increased in the lymph nodes (LN), indicative of cellular proliferation (FIG. 62). The LN cells were then phenotyped. Increased GCs and CD27+ memory B cells were observed in the groups that was administered separately formulated CorVac 2.0+BNT162b2 (G4-G9) (FIG. 63). A slightly higher B cell class switching was observed in the groups receiving the seperately formulated BNT162b2+CorVac 2.0 (FIGS. 64A and 64B). The cell types found in the LN are further analyzed as demonstrated in FIG. 65, showing spike-specific CD8 memory cells as % of CD8+ T cells (top left), membrane-specific CD8 memory cells as % of CD8+ T cells (top right), and proportions of T cells that are effector, memory or naïve as % of spike-specific CD8+ T cells (bottom).

[1286] These results indicate that separately formulated CorVac2.0+BNT162 as a third booster leads to high Spike and Membrane T cell responses. Nucleocapsid responses did not appear as high in the K18-hACE2 model. Separately formulated CorVac2.0+BNT162 as a third booster leads to increased GC B cells and memory B cells in the dLNs. Spike-specific T cells in the dLN appear less differentiated in groups including CorVac2.0

### Example 23. Separately Formulated BNT162b2 and Cor Vac 2.0 Study in HLA.A2 Tg Mice

[1287] In this example, HLA.A2 transgenic (HLA.A2Tg) mice were vaccinated with the combination of BNT162b2 and CorVac 2.0 in a study design regime shown in FIG. 66 The design consisted of 13 groups of 8-14 mice per group as shown, that were primed with CorVac 2.0 C7 string as exemplary of CorVac 2.0 vaccines, boosted with C7 (groups 2-4; G2-G4); primed with BNT162b2 and String C7 seperately formulated and were administered the same as prime for boost (G6); prime and 2 boosts both with BNT162b2 (G8) or with the 3^{rd} dose or saline (G7), prime and boost with BNT162b2, with a coformulation of BNT162b2 and String C7 for a third dose (G10); and prime and boost with BNT162b2, with a separate formulation of BNT162b2 and String C7 for a third dose (G 12, G13). Data obtained from this study (FIG. 67A-J) showed that CorVac 2.0 induces the stringest immune response at highest dose. Lymph node cells were phenotyped. Data indicate that separately formulated BNT162b2 and String vaccine showed high Spike-specific response in G6 on D14, and Membrane protein specific response was detectable over the threshold by day 14, 35 and 56 (FIG. 67A, B and F), with high memory B cells, presence of activated B cells and class switching (FIG. 68A-C). The data in FIG. 67B demonstrates that Spike T cell responses are enhanced with CorVac2.0 inclusion and the dose of 1 microgram yielded the strongest responses. The data in FIG. 67C demonstrates improved T cell responses to all regions were observed after the boost. The data in FIG. 67D deomnstrates that at day 35, spike responses were seen in CD4 and CD8 T cells and Ssike CD8 T cells show more cytokine secretion and degranulation than CD4 T cells. The data in FIG. 67E deomnstrates that at day 35, membrane responses were seen in CD4 and CD8 T cells and were strongest at the highest dose. IL2 secretion was seen in CD4 and CD8 T cells. The data in FIG. 67F deomnstrates that at day 56, Spike responses were not negatively impacted by CorVac2.0. CorVac2.0 alone boosted spike responses. Boost with CorVac2.0 alone increased spike responses. No statistically significant changes in spike responses were seen with inclusion of CorVac2.0. The strongest membrane responses were observed in the highest dose groups. The strongest N responseswere observed in CorVac2.0 alone at the highest dose. The strongest Orflab responses were observed in CorVac2.0 alone and the separately formulated 3:1 dose. The data in FIG. 67G deomnstrates that at day 56, spike responses were seen in CD4 and CD8 T cells and some were boosted by inclusion of CorVac2.0. The data in FIG. 67H deomnstrates that at day 56, polyfunctional spike CD4 and CD8 T cells were slightly enhanced in higher dose CorVac2.0 conditions. The data in FIG. 67I deomnstrates that at day 56, membrane responses seen more strongly in CD8 T cells. The data in FIG. 67G deomnstrates that at day 56, polyfunctional membrane CD4 and CD8 T cells were observed.

[1288] Additionally, as shown in FIG. 78A, serum was taken from mice that were injected with a prime injection at the start of study and boosted on day 21 of the study with various concentrations of RS-C7 (String C7), BNT162b2 or co-administration of BNT162b2 and String C7 at a 3:1 ratio. An ELISA against the S1 portion of the SARS-CoV-2 Spike protein was performed with the serum and the OD was used to determine the S1 specific IgG compared to a standard curve. Values were calculated at day 14 (A), day 21 (B), day 35 (C) and plotted over the length of the study (D). FIG. 78B shows serum was taken from mice that were injected with a prime injection of BNT162b2 at the start of study and boosted with BNT162b2 on day 21 of the study, and subsequently given a third dose of saline (0.9% NaCl), BNT162b2, RS-C7 (string C7), BNT162b2 or co-administration of BNT162b2 and String C7 at a 3:1 ratio and 9:1 ratio, and the RNA from BNT162b2 and RS-C7 co-formulated in the same LNP at a 3:1 ratio. An ELISA against the S1 portion of the SARS-CoV-2 Spike protein was performed with the serum and the OD was used to determine the S1 specific IgG compared to a standard curve. Values were calculated at day 21 (A), day 42 (B) and plotted over the length of the study (C).

### Example 24. Clinical Trial Scheme with Cor Vac 2.0 Vaccine

[1289] CorVac 2.0 is a T cell targeting vaccine that can complement and enhance BNT162b2. It can increase stability of the vaccine in the face of emerging SAS-CoV-2 variants including the delta and omicron variants (see FIGS. 72-74), leverage CD4 and CD8 T cell immunity against SARS-CoV-2 to protect afainst severe CoVID 19 in one or more of the following ways, enhance and broaden T cell response, shorten clearance of the virus, provide persistent long-term memory to T cell responses, and potentially enhance B cell response and durability through increased CD4 activation. An important use of CorVac 2.0 is that the vaccine can be protective over a broad range of variants and can overcome variants that could reduce vaccine efficacy. Moreover, as shown in FIGS. 73 and 74, CorVac2.0 sequence is rarely impacted by SAS-CoV-2 variant mutations With the encouraging animal studies described herein, a clinical program is designed on healthy and immunocompromised cohort.

[1290] Healthy subjects cohort: This study participants will receive a combination of CorVac2.0 with BNT162b2 as a booster to: enhance and broaden T cell responses beyond the spike T cell responses from BNT162b2 and potentially shorten time to viral clearance, increase stability in the face of emerging SARS-CoV-2 variants; provide persistent long-term memory of T cell responses. In one aspect, vaccine naïve cohorts could be explored for combination or monotherapy.

[1291] A target product profile could be tested for the following quailities. In a prospective study, (i) one group will receive BNT162b2 and CorVac 2.0 (any variant); (ii) a second group will receive CorVac 2.0 monovaccine as a booster after BNT162b2 vaccinations. For the first group, the product composition will be nucleoside modified RNA encoding spans of the nucleocapsid and membrane proteins and short CD8+targeting epitopes of ORF1ab co-administered with BNT162b2. For the second group, the product composition will be nucleoside modified RNA encoding spans of the nucleocapsid and membrane proteins and short CD8+targeting epitopes of ORF1ab.

[1292] Indication: Prevention of CoVID-19 in adults and children.

[1293] Target population for both grops in this study will include adults 18 years or older, children 6 months of age and above, pregnant women. The immunogenicity relate outcome to be tested will include significant SARS-CoV-2 neutralizing response, antigen-specific CD4+ T cell response, and antigen-specific IFNγ producing CD8+ T cell response, protection against variants of SARS-CoV-2.

[1294] Efficacy of the product: The study will determine if there is (i) clear demonstration of efficacy or observational effectiveness with ≥70% point estimate (lower bound of confidence interval >30%) (ii) Prevention of severe disease (e.g.,, hospitalization, mechanical ventilation, death) in any of the groups. Onset of immunity will be tested within 2 weeks of booster dose. Duration of protection will be tested.

[1295] Dosing schedule and route of administration: intramuscular (IM) injection of 30 microgram/dose total of the product (BNT162b2 and CorVac 2.0 alone or BNT162b2+CorVac 2.0). 2 injections would be administered at an interval of 21 days, and a booster dose 6 months after. Storage can be at 2-8° C. for at least 3 months.

[1296] Drug safety: Increased reactogenicity acceptable, such as local injection site and systemic side effects (if balanced with clinical benefit) and can be administered with other vaccine (e.g., flu vaccine). Table 17 lists some of the above.

TABLE 17
Target Product Profile-SARS-COV-2 T cell targeting vaccine
(CorVac2.0) for healthy vaccinated subjects

| | Co-admiinstration of CorVac 2.0 | CorVac 2.0 mono-vaccine |
|---|---|---|
| Product Attribute | with BNT162b2 (or variant) | booster post BNT162b2 |
| Indication | For the prevention of COVID-19 | For the prevention of COVID-19 |
| | for adults and children | for adults and children |
| Product Composition | Nucleoside modified RNA | Nucleoside modified RNA |
| | encoding spans of the nucleocapsid | encoding spans of the nucleocapsid |
| | and membrane proteins and short | and membrane proteins and short |
| | CD8+ targeting epitopes of ORF1ab | CD8+ targeting epitopes of |
| | co-administered with BNT162b2 | ORF1ab |
| Target Population | Adults 18 years and above, children | Adults 18 years and above, |
| | 6 months of age and above, | children 6 months of age and |
| | pregnant women | above, pregnant women |
| Immunogenicity | Significant SARS-COV-2 | Significant SARS-COV-2 |
| | neutralizing response, antigen- | neutralizing response, antigen- |
| | specific CD4+T cell response, and | specific CD4+T cell response, and |
| | antigen-specific IFNγ producing | antigen-specific IFNγ producing |
| | CD8+T cell response, protection | CD8+T cell response, protection |
| | against variants of SARS-COV-2 | against variants of SARS-COV-2 |
| Efficacy | Clear demonstration of efficacy or | Clear demonstration of efficacy or |
| | observational effectiveness with | observational effectiveness with |
| | ≥70% point estimate (lower bound | ≥70% point estimate (lower bound |
| | of confidence interval >30%) | of confidence interval >30%) |
| | Prevention of severe disease (e.g.., | Prevention of severe disease (e.g.., |
| | hospitalization, mechanical | hospitalization, mechanical |
| | ventilation, death) | ventilation, death) |
| Onset of Immunity | Within 2 weeks of booster dose | Within 2 weeks of booster dose |
| Duration of Protection | Confers protection for at least 1 | Confers protection for at least 1 |
| | year, including T cell protection | year, including T cell protection |
| | against variants of SARS-COV-2 | against variants of SARS-COV-2 |
| Safety and Drug | Confers protection for at least 1 | Confers protection for at least 1 |
| Interaction | year, including T cell protection | year, including T cell protection |
| | against variants of SARS-COV-2 | against variants of SARS-COV-2 |
| Dosing Schedule/Route | IM injection, 30 μg/dose total | IM injection, 30 μg/dose total |
| | 2 injections separated by 21days, | 2 injections separated by 21days, |
| | booster after 6 months | booster after 6 months |
| of Administration | Supplied as SDV and preserved | Supplied as SDV and preserved |
| | MDV | MDV |
| | Storage at 2-8° C. for at least | Storage at 2-8° C. for at least |
| | 3 months | 3 months |

[1297] A proposed Phase 1 trial is outlined in FIG. 69. Part A of the study will be dose escalation and safety evaluation of CorVac 2.0, starting at 3 micrograms, escalating to 10 μg, 15 μg and 30 μg. Subjects may be 18 to 55 years of age, and, may be older than 55 years. Eligibility criteria for inclusion in the study would be that the subjects will have received 2 or more injections of the 30 μg dose of BNT162b2, and 6 months will have elapsed from the last BNT162b2 dose. The subject should have no history of COVID 19 or like and/or no evidence of prior infection with SARS-CoV2 at screening visit (Visit 0). The subject should have been administered no other SARS-CoV-2 vaccine in the past. Based on the dose escalation study's safety evaluation, a Go/No go decision will be established, and Part B will commence. For this, the inclusion criteria include that the subjects will have received 2+injections of 30 ug BNT162b2; currently at least 6 months after the last BNT162b2 dose; should be immunocompetent. With no history of COVID-19 and/or clinical or evidence of prior infection with SARS-CoV-2 at screening (Visit 0). Participant should be adults 18y+. The study will have three groups, one group will be administered BNT162b2 alone, the second group will be administered CorVac 2.0 alone, based on study results of Part A. The third group will receive a combination vaccine, BNT162b2+CorVac 2.0, ratio based on A1.

### Immunocomprised Patients:

[1298] CorVac 2.0 can provide broad T cell immunity to patient cohorts that have compromised B cell immunity, such as solid organ transplant subjects, patients with hematological malignancies, or patients receiving B cell targeting therapies. A target product profile can be tested for the following quailities. In a prospective CorVac2.0, a SARS-CoV-2 T cell-based vaccine could be tested in immunosuppressed patient subjects. These subjects can be divided into 2 groups, (i) in one group, a monovaccine will be administered and (ii) in the second group. A CorVac 2.0 with BNT162b2 (any variant) will be coadministered.

[1299] Indications: For the each group, the indications would be prevention of severe COVID19 and hospitalization in immunocompromised patients who are 18 years of age or older who have received 3 doses of BNT162b2. The product to be administered will be nucleoside modified RNA encoding spans of the nucleocapsid and membrane proteins and short CD8+targeting epitopes of ORF1ab for group 1, and nucleoside modified RNA encoding spans of the nucleocapsid and membrane proteins and short CD8+targeting epitopes of ORF1ab would be delivered with separately formulated BNT162b2.

[1300] The target population for each group would be (a) Patients with B cell malignancies who are either asymptomic, anti-CD20 monotherapy treatments or targeted drug therapy, (b) End stage renal patients (Maintenance hemodialysis treatment secondary to end-stage renal disease and is ≥18 years of age) (c) Subjects, who are on active immunomodulator therapy targeting anti-CD20 for an autoimmune inflammatory disorder (eg, inflammatory arthritis, such as rheumatoid arthritis, psoriatic arthritis, and juvenile idiopathic arthritis, and inflammatory bowel disease, such as ulcerative colitis and Crohn's disease) at a stable dose, (d) Subjects with solid organ transplant (receiving a solid organ transplant at least 3 months (84 days) prior to enrollment (Visit 1) and with no acute rejection episodes within 2 months (60 days) prior to enrollment (Visit 1)).

[1301] Immunogenicity will be tested to show if there was antigen-specific TH1-phenotype CD4+ T cell response, and antigen-specific IFNγ producing CD8+ T cell response in group (i) subjects, and if comparable SARS-CoV-2 Spike neutralizing response, antigen-specific TH1-phenotype CD4+ T cell response, and antigen-specific IFNγ producing CD8+ T cell response in group (ii) subjects.

[1302] Efficacy of the product: The study will determine if there is (i) clear demonstration of efficacy or observational effectiveness with ≥50* % point estimate (lower bound of confidence interval >30%) in any of the groups, and also (ii) prevention of severe disease (e.g., hospitalization, mechanical ventilation, death). Onset of immunity will be tested within 2 weeks of vaccine dose. Duration of protection will be tested.

[1303] Drug safety: Increased reactogenicity acceptable, such as local injection site and systemic side effects (if balanced with clinical benefit) and can be administered with other vaccine (e.g., flu vaccine). For group (i), there will be no combination with other vaccines; for group (ii) there will be coadministration of BNT162b2.

[1304] Dosing schedule and route of administration: intramuscular (IM) injection of 30 microgram/dose total of the product (BNT162b2 and CorVac 2.0 alone or BNT162b2+CorVac 2.0). 2 injections would be administered at an interval of 21 days, and a booster dose 6 months after. Storage can be at 2-8° C. for at least 3 months.

[1305] Table 18 lists some of the above.

TABLE 18
Target Product Profile-SARS-COV-2 T cell-based
vaccine in immunosuppressed patients

| | | Co-adminstration CorVac2.0 |
|---|---|---|
| Product Attribute | Mono-vaccine | with BNT162b2 (or variant) |
| Indication | For the prevention of severe | For the prevention of severe |
| | COVID19 and hospitalization in | COVID19 and hospitalization in |
| | immunocompromised patients 18 | immunocompromised patients 18 |
| | years of age or older who have | years of age or older 3 doses of |
| | received 3 doses of BNT162b2 | BNT162b2 |
| Product Composition | Nucleoside modified RNA | Nucleoside modified RNA |
| | encoding spans of the nucleocapsid | encoding spans of the nucleocapsid |
| | and membrane proteins and short | and membrane proteins and short |
| | CD8+ targeting epitopes of ORF1ab | CD8+ targeting epitopes of |
| | | ORF1ab delivered with separately |
| | | formulated BNT162b2 |
| Target Population | Patients with B cell malignancies | Patients with B cell malignancies |
| | who are either asymptomic, anti- | who are either asymptomic, anti- |
| | CD20 monotherapy treatments or | CD20 monotherapy treatments or |
| | targeted drug therapy | targeted drug therapy |
| | End stage renal patients | End stage renal patients |
| | (Maintenance hemodialysis | (Maintenance hemodialysis |
| | treatment secondary to end-stage | treatment secondary to end-stage |
| | renal disease and is | renal disease and is |
| | ≥18 years of age) | ≥18 years of age) |
| | Is on active immunomodulator | Is on active immunomodulator |
| | therapy targeting anti-CD20 for an | therapy targeting anti-CD20 for an |
| | autoimmune inflammatory disorder | autoimmune inflammatory |
| | (eg, inflammatory arthritis, such as | disorder (eg, inflammatory |
| | rheumatoid arthritis, psoriatic | arthritis, such as rheumatoid |
| | arthritis, and juvenile idiopathic | arthritis, psoriatic arthritis, and |
| | arthritis, and inflammatory bowel | juvenile idiopathic arthritis, and |
| | disease, such as ulcerative colitis | inflammatory bowel disease, such |
| | and Crohn's disease) at a stable dose | as ulcerative colitis and Crohn's |
| | Solid organ transplant (Receiving a | disease) at a stable dose |
| | solid organ transplant at least 3 | Solid organ transplant (Receiving a |
| | months (84 days) prior to | solid organ transplant at least 3 |
| | enrollment (Visit 1) and with no | months (84 days) prior to |
| | acute rejection epi-sodes within 2 | enrollment (Visit 1) and with no |
| | months (60 days) prior to | acute rejection epi-sodes within 2 |
| | enrollment (Visit 1)) | months (60 days) prior to |
| | | enrollment (Visit 1)) |
| Immunogenicity | Antigen-specific TH1-phenotype | Comparable SARS-COV-2 Spike |
| | CD4+T cell response, and antigen- | neutralizing response, antigen- |
| | specific IFNγ producing CD8+T | specific TH1-phenotype CD4+T |
| | cell response Comparable SARS- | cell response, and antigen-specific |
| | CoV-2 Spike neutralizing response, | IFNγ producing CD8+T cell |
| | antigen-specific TH1-phenotype | response2 |
| | CD4+T cell response, and antigen- | |
| | specificIFNγ producing CD8+T | |
| | cell response | |
| Efficacy | Clear demonstration of efficacy or | Clear demonstration of efficacy or |
| | observational effectiveness with | observational effectiveness with |
| | ≥50*% point estimate (lower bound | ≥50*% point estimate (lower |
| | of confidence interval >30%)* | bound of confidence interval >30%)* |
| | | Prevention of severe disease (e.g.., |
| | | hospitalization, mechanical |
| | | ventilation, death) |
| Onset of Immunity | Within 2 weeks of vaccine dose | Within 2 weeks of vaccine dose |
| Duration of Protection | Confers protection from severe | Confers protection for at least 6 |
| | disease for at least 6 months through | months; provides protection of |
| | T cell responses | severe disease against variants of |
| | | concern |
| Safety and Drug | Increased reactogenicity | Increased reactogenicity |
| Interaction | acceptable, such as local injection | acceptable, such as local injection |
| | site and systemic side effects (if | site and systemic side effects (if |
| | balanced with clinical benefit) | balanced with clinical benefit) |
| | No combination with other vaccines | Co-administration with BNT162b2 |
| Dosing Schedule/ | IM injection, 30 μg/dose | IM injection, 30 μg dose (total |
| Route of | 2 injections separated by 21days | dose of both BNT162b2 + |
| Administration | Supplied as SDV and preserved MDV | CorVac 2.0) |
| | Storage at 2-8° C. for at least | 2 injections separated by 21days |
| | 3months | Supplied as SDV and preserved MDV |
| | | Storage at 2-8° C. for at least 3 |
| | | months |

[1306] A proposed Phase 1 trial for clinical evaluation of CorVac 2.0 in immunocompromised patients is outlined in FIG. 70. Part A of the study will be dose escalation and safety evaluation of CorVac 2.0, starting at 3 micrograms, escalating to 10 μg, 15 μg and 30 μg. Subjects may be 18 to 55 years of age, and, may be older than 55 years. Eligibility criteria for inclusion in the study would be that the subjects will have received 2 or more injections of the 30 μg dose of BNT162b2, and 6 months will have elapsed from the last BNT162b2 dose. The subject should have no history of COVID 19 or like and/or no evidence of prior infection with SARS-CoV2 at screening visit (Visit 0). The subject should have been administered no other SARS-CoV-2 vaccine in the past. Based on the dose escalation study's safety evaluation, a Go/No go decision will be established, and Part B will commence on immunocompromised cohort. For this, the inclusion criteria include that the subjects will have received 3+injections of 30 μg BNT162b2; currently at least 6 months after the last BNT162b2 dose, with no history of COVID-19 and/or clinical or evidence of prior infection with SARS-CoV-2 at screening (Visit 0). Participant will not have received any other spike or non-spike vaccine in the past. Participant should be adults 18y+. Patients with B cell malignancies, end stage renal patients, on active anti-CD20 therapy, or solid organ transplant (see TPP) will be included. The study will have three groups, one group will be administered BNT162b2 alone, the second group will be administered CorVac 2.0 alone, based on study results of Part A. The third group will receive a combination vaccine, BNT162b2+CorVac 2.0, ratio based on A1.

### Example 25. MS Validation of C7 T-String

[1307] To examine whether the C7 T-string can generate T cell epitopes that are processed and presented onto HLA complexes, targeted mass spectrometry was used to detect peptides from the C7 T-string bound to HLA-I molecules. To accurately determine which HLA allele an epitope is bound to, monoallelic profiling of tagged allele constructs (MAPTAC) was used to isolate a single allele from the endogenous alleles present in the A375 cell line (in the present example, a protocol similar to that used in Abelin, Jennifer G., et al. “Defining HLA-II ligand processing and binding rules with mass spectrometry enhances cancer epitope prediction.” Immunity 51.4 (2019): 766-779; and Choi, Jaewon, et al. “Systematic discovery and validation of T cell targets directed against oncogenic KRAS mutations.” Cell reports methods 1.5 (2021): 100084 was used, the contents of each of which is incorporated by reference herein in their entirety).

[1308] In addition, the pan-HLA-I antibody W6/32 was used to profile C7 T-string epitopes bound to alleles endogenous to the cell line used. Altogether, 20 unique peptide epitopes were detected across seven HLA alleles with 22 unique peptide-HLA pairs observed (FIG. 80A). Verified peptides spanned the entire length of the C7 T-string and peptides derived from all encoded viral antigens were detected. Notably, of the 20 MS-verified epitopes, 15 were cited as immunogenic in the literature, with 8 of them being cited as “immunodominant” within the respective studies (Ferretti et al., 2020; Francis et al., 2022; Gangaev et al., 2020; Kared et al., 2021; Saini et al., 2021). Table 19, below, lists the epitopes observed in these experiments.

TABLE 19
Observed T-cell Epitopes Encoded
by the C7 T-string Construct

| # | Epitope | Allele(s) |
|---|---|---|
| 1 | LLLDRLNQL | A02:01 |
| 2 | GQQQQGQTVTK | A11:01 |
| 3 | QQQGQTVTK | A11:01 |
| 4 | KTFPPTEPK | A11:01, A03:01 |
| 5 | KTFPPTEPKK | A11:01, A03:01 |
| 6 | VTNNTFTLK | A11:01 |
| 7 | KTIQPRVEK | A11:01, A03:01 |
| 8 | YLFDESGEF | A02:01 |
| 9 | YLFDESGEFKL | A02:01 |
| 10 | SEVGPEHSL | B44:03* |
| 11 | SEVGPEHSLAEY | B44:03* |
| 12 | TTDPSFLG | A01:01 |
| 13 | TTDPSFLGR | A01:01 |
| 14 | TTDPSFLGRY | A01:01, A02:01, A03:01, |
| | | A11:01, B08:01 |
| 15 | TTDPSFLGRYM | A01:01 |
| 16 | PSFLGRY | A01:01 |
| 17 | QLMCQPILL | A02:01 |
| 18 | AEAELAKNV | B44:03* |
| 19 | LPKEITVAT | B08:01 |
| 20 | VATSRTLSY | C16:01* |
| 21 | ATSRTLSYYK | A11:01 |
| 22 | PTDNYITTY | A01:01, A02:01, A03:01, |
| | | A11:01, B08:01 |
| 23 | FGDDTVIEV | A02:01 |

*Allele inferred from score in W6/32 pulldown.

### Example 26. Further Immunogenicity Studies of CorVac 2.0 C-7 String with BNT162b2 in k18-hACE2 Mice

[1309] In the present Example, different dosing regimens strategies were compared in k18-hACE2 mice to test the impact of CorVac 2.0 on anti-Spike antibodies induced by a coronavirus vaccine (e.g., BNT162b2) when administered at different ratios, where the coronavirus vaccine (e.g., BNT162b2) dosage was kept constant so as to not reduce Ab titers.

[1310] The specific dosing regimens tested in the present Example are summarized in FIG. 81, and include (a) two doses of 3 micrograms of a spike mRNA vaccine alone (in the present Example BNT162b2), (b) four doses of 3 micrograms of a spike mRNA vaccine alone, (c) two 3 microgram doses of a spike mRNA vaccine alone followed by two 1.5 microgram doses of CorVac2.0 alone (in the present example, a C7 string), (d) two 3 microgram doses of a spike mRNA vaccine alone followed by a third and fourth dose of separately formulated CorVac2.0 and a spike mRNA vaccine, where the third and four dose comprise 3 micrograms of a spike mRNA vaccine and 1.5 micrograms of CorVac2.0 RNA, and (e) two 3 microgram doses of a spike mRNA vaccine alone followed by a third and fourth dose of separately formulated CorVac2.0 and a spike mRNA vaccine, where the third and four dose comprise 3 micrograms of a spike mRNA vaccine and 0.5 micrograms of CorVac2.0 RNA.

[1311] Compositions were administered on days 0, 21, 42, and 63 (where day 0 corresponds to administration of the first dose). Blood samples were collected on days 0 (before first dose), 21, 42, 56 and 63 and analyzed for concentrations of antibodies that bind the SARS-CoV-2 Spike protein and neutralization titers. On days 56 and 77, half of the animals in each group were sacrificed, and spleens were harvested for anlysis.

### ELISA

[1312] Serum samples were tested in 96-well plates for antigen specific antibody concentrations (in the present Example, concentrations of anti-Spike protein antibody cocentrations). Each well of a MaxiSorp plate was coated with 100 ng/100 μL recombinant Spike protein per well or isotype controls according to plate layout. Plates were incubated at 4° C. o/n. Wells were washed and blocked with 1x blocking buffer and incubated at 37° C. for 1 h on a shaker. Plates were washed and dilutions of the positive control antibody/serum samples were added and incubated at 37° C. for 1 h on a shaker. Plates were washed three times with 300 μL/well PBS-T and the diluted secondary antibodies were incubated at 37° C. for 45 min on shaker. After a wash, TMB substrate was added and incubated for 8 min at RT. The reaction was stopped with 100 μL 25% sulfuric acid and read on plate reader (450 nm, reference: 620 nm).

[1313] For concentration analysis, the signal of the specific samples was correlated to a positive control antibody. For reciprocal serum endpoint titer, the serum dilution that emitted the OD exceeding 4-fold background was used. The background was defined as the OD signal given by the recombinant protein incubated with the secondary detection anti-mouse IgG antibody only.

### Pseudovirus-Based Neutralization Assay

[1314] Replication-deficient vesicular stomatitis virus (VSV) that lacks the genetic information for the VSV envelope glycoprotein VSV-G but contains an open reading frame (ORF) for green fluorescent protein (GFP) was used for SARS-CoV-2—S pseudovirus generation. VSV pseudotypes were generated according to a published protocol (Hoffmann M, Kleine-Weber H, et al. SARS-CoV-2 Cell Entry Depends on ACE2 andTMPRSS2 and Is Blocked by a Clinically Proven Protease Inhibitor Cell. 2020; 181 (2): 271-280, the contents of which are incorporated by reference herein in their entirety). In brief, HEK293T/17 cells cultured in DMEM supplemented with 10% FBS were transfected with a pcDNA3.1-derived expression plasmid (Invitrogen) coding for the SARS-CoV-2 spike protein (GenBank ID: QHD43416.1) with shortened cytoplasmic tail, i.e., pSARS-CoV-2-S-CΔ19, using Lipofectamine® LTX & PLUS™ Reagent (Invitrogen) following the manufacturer's instructions. The cytoplasmic tail was truncated for the 19 C-terminal amino acids to facilitate a more efficient integration of SARS-CoV-2-S into VSV virions analogous to SARS-COV-S pseudotyped VSV (Fukushi et al. 2005). At 24 h post transfection, cells were inoculated with VSV-G Trans-complemented VSV-ΔG-GFP vector (Indiana strain, de novo generated by reverse genetics from plasmid (Lawson et al. 1995)) at a multiplicity of infection (MOI) of three and incubated for 2 h at 37° C. and 5% CO2. Next, the inoculum was removed, cells were washed with PBS, and standard culture medium which contained 0.5 μg/mL anti-VSV-G antibody (clone 8G5F11) was added to neutralize residual input virus. Twenty-four hours after infection, VSV/SARS-CoV-2—S pseudovirus-containing supernatants were harvested, filtered (0.45 μm) and stored at −80° C. in aliquots until further use.

[1315] For titration of VSV/SARS-CoV-2—S pseudovirus, Vero-76 cells (ATCC) were thawed diluted to 2.67×10⁵ cells/mL in assay medium (DMEM and 10% FBS) and seeded in 96-well flat-bottom plates at 4×10⁴ cells per well. Cells were incubated for 4 to 6 h at 37° C. and 7.5% CO2. Meanwhile, two-fold, eight-step serial dilutions were prepared in 96-well V-bottom plates beginning with undiluted pseudovirus supernatant. Vero-76 wells were inoculated with 50 μL of the diluted pseudovirus supernatant and incubated for 16 to 24 h at 37° C. and 7.5% CO2. Each dilution was tested in duplicate wells. After the incubation, the cell culture plates were removed from the incubator, placed in an IncuCyte Live Cell Analysis system (Essen Bioscience) and equilibrated for 30 min prior to the analysis. Whole well scanning for brightfield and GFP fluorescence was performed using a 4×objective. The number of infected GFP-fluorescent cells per well was plotted as a function of pseudovirus supernatant dilution using GraphPad Prism. Data (x=logx) were fitted with linear regression and the derived slope and γ-intercept used to calculate the amount of viral supernatant needed to obtain 144 infected cells/96-well (20% excess for virus neutralization test included).

[1316] For the pVNT assay, Vero-76 cells were thawed, diluted to 2.67×10⁵ cells/mL in assay medium (DMEM and 10% FBS) and seeded in 96-well flat-bottom plates at 4×10⁴ cells per well. Cells were incubated for 4 to 6 h at 37° C. and 7.5% CO2. Initial dilutions of mouse serum samples were prepared by adding 10 μL of serum to 50 μL assay medium in a 96-well V-bottom plate. Seven additional dilutions were subsequently prepared in two-fold dilution steps, by iteratively transferring 30 μL of diluted sera to wells containing 30 μL assay medium. VSV/SARS-CoV-2 pseudovirus was thawed and diluted to obtain 120 infected cells/25 μL (4.8×10³ infectious units [IU]/mL). 30 μL of diluted pseudovirus (corresponds to 144 infected cells) were added to the wells containing the serum dilution series. Pseudovirus/serum dilution mix was incubated for 5 min at RT on a microplate shaker at 750 rpm, and additional 5 min at RT without agitation. Pseudovirus/serum dilution mix was then added to the seeded Vero-76 cells (50 μL mix per well, MOI: 0.003), followed by incubation for 16 to 24 h at 37° C. and 5% CO2. Each dilution of serum samples was tested in duplicate wells. Vero-76 cells incubated with pseudovirus in the absence of mouse sera were used as positive controls. Vero-76 cells incubated without pseudovirus were used as negative controls. After the incubation, the cell culture plates were removed from the incubator, placed in an IncuCyte Live Cell Analysis system and incubated for 30 min prior to the analysis. Whole well scanning for brightfield and GFP fluorescence was performed using a 4×objective. To calculate the neutralizing titer, infected GFP-positive cell number per well was compared with the no-serum pseudovirus positive control. Mean values of the no-serum pseudovirus positive control multiplied by 0.5 represent the pseudovirus neutralization 50% (pVN50); mean values of the no-serum pseudovirus positive control multiplied by 0.1 represent the pseudovirus neutralization 90%. Serum samples with mean values below this cut-off exhibit >50% or >90% virus neutralization activity, respectively.

### Results

[1317] As shown in FIGS. 82A-82B, animals that had been given two doses of a spike specific mRNA followed by two doses of CorVac2.0 showed similar Spike-specific IgG concentrations as animals that had been given only two doses of a spike specific mRNA. Animals administered four doses of a spike specific mRNA also showed similar Spike-specific antibody levels as animals that had been given two doses of a spike specific mRNA followed by two doses of the combination of a spike specific mRNA and CorVac2.0. These IgG results indicate that administration of CorVac2.0 does not impair Spike IgG responses induced by a spike specific mRNA. Similarly, as shown in FIGS. 83A-B, administration of CorVac2.0 was also not found to negatively impact neutralization titers induced by an mRNA encoding an S protein.

### Example 27: Efficacy Studies in Syrian Hamsters

[1318] An efficacy study was performed in Syrian Hamsters to test the efficacy of compositions and dosing regimens disclosed herein. Golden Syrian hamsters were immunized with a prime dose and boost dose of either RNA encoding a SARS-CoV-2 S protein (in the present Example, BNT162b2), CorVac2.0 (in the present Example, RNA encoding RS C7), or a combination of both. Dosing regimens and sample collection protocol are summarized in FIG. 84. Hamsters were administered: (a) two 9 microgram doses of BNT162b2, (b) two 9 microgram doses of CorVac2.0, (c) two 4.5 microgram doses of CorVac2.0, (d) two doses of separately formulated BNT162b2 and CorVac2.0, where each dose comprises 9 micrograms of BNT162b2 and 9 micrgrams of CorVac2.0, and (e) two doses of separately formulated BNT162b2 and CorVac2.0, where each dose comprises 9 micrograms of BNT162b2 and 4.5 micrograms of CorVac2.0. Doses were administered on days 0 and 21, and blood samples were collected on days 0, 14, 21. Animals were challenged on D35 with the WT Wuhan virus variant. Half of the cohort was harvested two days post infection and the remain half was harvested 7 days post infection, and lungs and nasal turbinates were collected at each timepoint. Oral swabs were also taken daily to measure viral load.

[1319] SARS-CoV-2 isolate USA-WA1/2020 was used for viral challenge, and animals were challenged via intranasal inoculation (IN) on Ketamine/Xylazine anesthetized hamsters. . . . The virus was expanded in Calu-3 cells (ATCC® HTB-55) from a seed stock (BEI Resources Cat. #: NR-52281). Animals were challenged with 6×10³ pfu of USA-WA1/2020 SARS-CoV-2, with a total volume of 100 μL per animal (50 μL/nare). The infectious titers of the stock were 2.34×10⁹ TCID50/mL (3.68×10⁷ PFU/mL) in Vero TMPRSS2 cells, and 6.0×10⁵ PFU/mL in VeroE6 cells. Administration of virus inoculum was conducted as follows: Using a calibrated P200 pipettor, 50 μL of the viral inoculum was administered dropwise into each nostril. Anesthetized animals were held upright such that the nostrils of the hamsters were pointing towards the ceiling. The tip of the syringe was placed into the first nostril and virus inoculum was slowly injecting into the nasal passage, and then removed. This protocol was repeated for the second nostril. The animal's head was tilted back for about 20 seconds and then returned to its housing unit and monitored until fully recovered.

[1320] The body weight of each animal was measured starting on the day of viral infection, up to 7 days post infection. Animals immunized with CorVac2.0 showed less weight loss, as compared to animals adminsitered a saline control, in a dose-dependent manner, indicating that CorVac2.0 provides protection against SARS-CoV-2. Animals administered a combination of CorVac2.0 and RNA encoding a SARS-CoV-2 S protein showed comparable protection against infection as compared to animals administered, indicating that inclusion of CorVac2.0 in combination with BNT162b2 does not negatively impact protection, and in the group with the high dose of CorVac2.0, seems to even lead to slightly less weight loss than the BNT162b2 alone.

[1321] The body weight of each animal was measured starting the day of infection to 7 days post infection. As shown in FIG. 85, animals immunized with CorVac2.0 showed less weight loss as compared to a saline control, and this response was observed in a dose-dependent manner, indicating that CorVac2.0 provides protection against SARS-CoV-2. Animals administered a combination of CorVac2.0 and BNT162b2 showed no significant body weight changes as compared to animals administered BNT162b2 alone, indicating that inclusion of CorVac2.0 in combination with RNA encoding a SARS-CoV-2 S protein does not negatively impact protection against SARS-CoV-2 infection. Animals administered 9 micrograms of BNT162b2 and 9 micrograms of CorVac2.0 showed even less weight loss than animals administered 9 micrograms of BNT162b2 alone, indicating that CorVac2.0 administered in combination with an RNA encoding an SARS-CoV-2 S protein (e.g., BNT162b2) may provide improved protection as compared to RNA encoding a SARS-CoV-2 S protein alone.

### Example 28: Sequence Analysis of Spike+ T Cells and B Cells

[1322] Splenocytes were harvested from animals studied in Example 23 (specifically, animals from the groups 8 and 11 described in FIG. 66, which were administered (i) two doses of RNA encoding a SARS-CoV-2 S protein (in the present example, BNT162b2) or (ii) two doses of RNA encoding a SARS-CoV-2 S protein followed by a third dose of CorVac2.0 (in the present Example, RS C7). Spike-specific T and B cells were (a) labelled with Spike pMHC tetramers and tetramerized Spike bait protein, respectively, (b) isolated using FACS, and (c) sequenced using a 10× sequencing system to generate single cell RNA gene expression, VDJ, and CITE-seq libraries so as to understand how administration of CorVac2.0 impacts TCR and BCR clonality and phenotype. In the present example, the 10× sequencing system was used in accordance with manufactuer's recommended protocols, and VDJ and CITE-seq libraries were prepared using a protocol similar to that described in Stoeckius, Marlon, et al. “Simultaneous epitope and transcriptome measurement in single cells.” Nature methods 14.9 (2017): 865-868; and Gao, Shouguo, et al. “Single-cell RNA sequencing coupled to TCR profiling of large granular lymphocyte leukemia T cells.” Nature communications 13.1 (2022): 1-14, respectively, the contents of each of which are incorporated by reference herein in their entirety). Data was analyzed using cellranger using a protocol similar to that described in Zheng, Grace X Y, et al. “Massively parallel digital transcriptional profiling of single cells,” Nature communications 8.1 (2017): 1-12.

[1323] The experimental protocol used in the present example to determine B and T cell clonotypes is depicted in FIG. 87, and is similar to that described in Andersen, Rikke Sick, et al. “Parallel detection of antigen-specific T cell responses by combinatorial encoding of MHC multimers.” Nature protocols 7.5 (2012): 891-902, the contents of which is incorporated by reference herein in their entirety. In brief, Spike-specific T cells were labeled by staining splenocytes with fluorescently-labelled Spike pMHC tetramers (fluorescently labeled multimeric complexes of peptide-MHC (molecular entities recognized by T cell receptosr)) at 37° C. for 15 minutes and spike-specific B cells were labeled by staining splenocytes with fluorescently-labelled, tetramerized Spike bait protein. Cells were washed and labelled with CITE Abs, and surface stained for CD3, CD19, and CD11b for sorting. Sorted cells were collected from each animal, and animals from each group were pooled for single cell library generation.

[1324] Clonotype networks: Sequence-based distance matrices for VJ and VDJ sequences were calculated using alignment distance (BLOSUM62 matrix) of CDR3 aa sequences.

[1325] Clustering cells by similarity of CDR3-sequences: Each fully connected subnetwork shown in FIG. 87 represents a “clonotype cluster” and each dot represents cells with identical receptor configurations (i.e., TCR sequence), with the size of the dot corresponding to the number of cells detecting having a given receptor configuration.

[1326] Clonal expansion: the bar graph in FIG. 87 shows the number of cells belonging to an expanded clonotype per category in stacked bar plot. As shown in the bag graph, introduction of CorVac2.0 trends towards higher conal explansion, with clonality of Spike-specific T cells not negatively impacted.

TABLE 9
Group 1 Construct-maps

| CONSTRUCT | Segment | | | | |
|---|---|---|---|---|---|
| Name | NAME | AA SEQUENCE | DNA SEQUENCE | START | END |
| RS C1 GSS | SP1 | MRVMAPRTLILLLSGALALTETWA | ATGAGAGTGATGGCCCCCAGAACCCTGATCCTGCTGCTGTCT | 1 | 78 |
| linkers | | GS | GGCGCCCTGGCCCTGACAGAGACATGGGCCGGAAGC | | |
| RS C1 GSS | start GSS | GGSGGGGSGG | GGAGGTTCCGGAGGAGGCGGCAGTGGCGGC | 79 | 108 |
| linkers | | | | | |
| RS C1 GSS | nucleocapsid | SDNGPQNQRNAPRITFGGPSDSTGS | TCTGATAATGGACCCCAAAATCAGCGAAATGCACCCCGCATT | 109 | 1362 |
| linkers | phosphoprotein | NONGERSGARSKQRRPQGLPNNTA | ACGTTTGGTGGACCCTCAGATTCAACTGGCAGTAACCAGAAT | | |
| | | SWFTALTQHGKEDLKFPRGQGVPI | GGAGAACGCAGTGGGGCGCGATCAAAACAACGTCGGCCCCA | | |
| | | NTNSSPDDQIGYYRRATRRIRGGDG | AGGTTTACCCAATAATACTGCGTCTTGGTTCACCGCTCTCACT | | |
| | | KMKDLSPRWYFYYLGTGPEAGLPY | CAACATGGCAAGGAAGACCTTAAATTCCCTCGAGGACAAGGC | | |
| | | GANKDGIIWVATEGALNTPKDHIGT | GTTCCAATTAACACCAATAGCAGTCCAGATGACCAAATTGGC | | |
| | | RNPANNAAIVLQLPQGTTLPKGFYA | TACTACCGAAGAGCTACCAGACGAATTCGTGGTGGTGACGGT | | |
| | | EGSRGGSQASSRSSSRSRNSSRNSTP | AAAATGAAAGATCTCAGTCCAAGATGGTATTTCTACTACCTA | | |
| | | GSSRGTSPARMAGNGGDAALALLL | GGAACTGGGCCAGAAGCTGGACTTCCCTATGGTGCTAACAAA | | |
| | | LDRLNQLESKMSGKGQQQQGQTV | GACGGCATCATATGGGTTGCAACTGAGGGAGCCTTGAATACA | | |
| | | TKKSAAEASKKPRQKRTATKAYNV | CCAAAAGATCACATTGGCACCCGCAATCCTGCTAACAATGCT | | |
| | | TQAFGRRGPEQTQGNFGDQELIRQ | GCAATCGTGCTACAACTTCCTCAAGGAACAACATTGCCAAAA | | |
| | | GTDYKHWPQIAQFAPSASAFFGMS | GGCTTCTACGCAGAAGGGAGCAGAGGCGGCAGTCAAGCCTCT | | |
| | | RIGMEVTPSGTWLTYTGAIKLDDK | TCTCGTTCCTCATCACGTAGTCGCAACAGTTCAAGAAATTCAA | | |
| | | DPNFKDQVILLNKHIDAYKTFPPTE | CTCCAGGCAGCAGTAGGGGAACTTCTCCTGCTAGAATGGCTG | | |
| | | PKKDKKKKADETQALPQRQKKQQ | GCAATGGCGGTGATGCTGCTCTTGCTTTGCTGCTGCTTGACAG | | |
| | | TVTLLPAADLDDFSKQLQQSMSSA | ATTGAACCAGCTTGAGAGCAAAATGTCTGGTAAAGGCCAACA | | |
| | | DSTQA | ACAACAAGGCCAAACTGTCACTAAGAAATCTGCTGCTGAGGC | | |
| | | | TTCTAAGAAGCCTCGGCAAAAACGTACTGCCACTAAAGCATA | | |
| | | | CAATGTAACACAAGCTTTCGGCAGACGTGGTCCAGAACAAAC | | |
| | | | CCAAGGAAATTTTGGGGACCAGGAACTAATCAGACAAGGAA | | |
| | | | CTGATTACAAACATTGGCCGCAAATTGCACAATTTGCCCCCA | | |
| | | | GCGCTTCAGCGTTCTTCGGAATGTCGCGCATTGGCATGGAAG | | |
| | | | TCACACCTTCGGGAACGTGGTTGACCTACACAGGTGCCATCA | | |
| | | | AATTGGATGACAAAGATCCAAATTTCAAAGATCAAGTCATTT | | |
| | | | TGCTGAATAAGCATATTGACGCATACAAAACATTCCCACCAA | | |
| | | | CAGAGCCTAAAAAGGACAAAAAGAAGAAGGCTGATGAAACT | | |
| | | | CAAGCCTTACCGCAGAGACAGAAGAAACAGCAAACTGTGAC | | |
| | | | TCTTCTTCCTGCTGCAGATTTGGATGATTTCTCCAAACAATTG | | |
| | | | CAACAATCCATGAGCAGTGCTGACTCAACTCAGGCC | | |
| RS C1 GSS | middle | GGSGGGGSGG | GGAGGTTCTGGGGGCGGCGGTTCAGGGGGC | 1363 | 1392 |
| linkers | GSS | | | | |
| RS C1 GSS | ORF9b | DPKISEMHPALRLVDPQIQLAVTRM | GACCCCAAAATCAGCGAAATGCACCCCGCATTACGTTTGGTG | 1393 | 1680 |
| linkers | protein | ENAVGRDQNNVGPKVYPIILRLGSP | GACCCTCAGATTCAACTGGCAGTAACCAGAATGGAGAACGCA | | |
| | | LSLNMARKTLNSLEDKAFQLTPIAV | GTGGGGCGCGATCAAAACAACGTCGGCCCCAAGGTTTACCCA | | |
| | | QMTKLATTEELPDEFVVVTVK | ATAATACTGCGTCTTGGTTCACCGCTCTCACTCAACATGGCAA | | |
| | | | GGAAGACCTTAAATTCCCTCGAGGACAAGGCGTTCCAATTAA | | |
| | | | CACCAATAGCAGTCCAGATGACCAAATTGGCTACTACCGAAG | | |
| | | | AGCTACCAGACGAATTCGTGGTGGTGACGGTAAAA | | |
| RS C1 GSS | middle | GGSGGGGSGG | GGAGGTTCTGGGGGCGGCGGTTCAGGGGGC | 1681 | 1710 |
| linkers | GSS | | | | |
| RS C1 GSS | cleavage | YHFF | TACCATTTCTTT | 1711 | 1722 |
| linkers | linker | | | | |
| RS C1 GSS | ORF1ab | HTTDPSFLGRYMSAL | CACACAACTGATCCTAGTTTTCTGGGTAGGTACATGTCAGCAT | 1723 | 1767 |
| linkers | NSP3 | | TA | | |
| | 1636- | | | | |
| | 1650 | | | | |
| RS C1 GSS | ORF1ab | FADDLNQLTGY | TTTGCTGATGATTTAAACCAGTTAACTGGTTAT | 1768 | 1800 |
| linkers | NSP3 | | | | |
| | 1937- | | | | |
| | 1947 | | | | |
| RS C1 GSS | ORF1ab | HTDFSSEIIGY | CATACTGACTTTTCAAGTGAAATCATAGGATAC | 1801 | 1833 |
| linkers | NSP4 | | | | |
| | 2799- | | | | |
| | 2809 | | | | |
| RS C1 GSS | ORF1ab | QLMCQPILL | CAGCTTATGTGTCAACCTATACTGTTA | 1834 | 1860 |
| linkers | NSP3 | | | | |
| | 2563- | | | | |
| | 2571 | | | | |
| RS C1 GSS | ORF1ab | | | 1861 | 1893 |
| linkers | NSP3 | AEAELAKNVSL | GCAGAAGCTGAACTTGCAAAGAATGTGTCCTTA | | |
| | 2616- | | | | |
| | 2626 | | | | |
| RS C1 GSS | ORF1ab | ILGTVSWNL | ATTCTTGGAACTGTTTCTTGGAATTTG | 1894 | 1920 |
| linkers | NSP3 | | | | |
| | 1367- | | | | |
| | 1375 | | | | |
| RS C1 GSS | cleavage | KRRY | AAGCGTCGCTAT | 1921 | 1932 |
| linkers | linker | | | | |
| RS C1 GSS | ORF1ab | LLSAGIFGA | TTATTATCAGCTGGTATTTTTGGTGCT | 1933 | 1959 |
| linkers | NSP3 | | | | |
| | 1148- | | | | |
| | 1156 | | | | |
| RS C1 GSS | ORF1ab | ITDVFYKENSY | ATTACGGATGTTTTCTACAAAGAAAACAGTTAC | 1960 | 1992 |
| linkers | NSP3 | | | | |
| | 1863- | | | | |
| | 1873 | | | | |
| RS C1 GSS | ORF1ab | KVPTDNYITTY | AAAGTGCCAACAGACAATTATATAACCACTTAC | 1993 | 2025 |
| linkers | NSP3 | | | | |
| | 1319- | | | | |
| | 1329 | | | | |
| RS C1 GSS | cleavage | ARMA | GCGCGGATGGCT | 2026 | 2037 |
| linkers | linker | | | | |
| RS C1 GSS | ORF1ab | APKEIIFLEGETL | GCCCCAAAAGAAATTATCTTCTTAGAGGGAGAAACACTT | 2038 | 2076 |
| linkers | NSP2 | | | | |
| | 735-747 | | | | |
| RS C1 GSS | ORF1ab | FGDDTVIEV | TTTGGTGATGACACTGTGATAGAAGTG | 2077 | 2103 |
| linkers | INSP3 | | | | |
| | 825-833 | | | | |
| RS C1 GSS | ORF1ab | AIILASFSAST | GCCATTATTTTGGCATCTTTTTCTGCTTCCACA | 2104 | 2136 |
| linkers | NSP2 | | | | |
| | 474-484 | | | | |
| RS C1 GSS | cleavage | RRMA | CGCCGTATGGCA | 2137 | 2148 |
| linkers | linker | | | | |
| RS C1 GSS | ORF1ab | MVTNNTFTLK | ATGGTAACAAACAATACCTTCACACTCAAA | 2149 | 2178 |
| linkers | NSP2 | | | | |
| | 807-816 | | | | |
| RS C1 GSS | ORF1ab | VPHVGEIPVAYRKVLL | GTCCCTCATGTGGGCGAAATACCAGTGGCTTACCGCAAGGTT | 2179 | 2226 |
| linkers | NSP1 | | CTTCTT | | |
| | 108-123 | | | | |
| RS C1 GSS | ORF1ab | KTIQPRVEK | AAGACTATTCAACCAAGGGTTGAAAAG | 2227 | 2253 |
| linkers | NSP2 | | | | |
| | 282-290 | | | | |
| RS C1 GSS | NSP3 | YLFDESGEFKL | TACTTATTTGATGAGTCTGGTGAGTTTAAATTG | 2254 | 2286 |
| linkers | ORF1ab | | | | |
| | 906-916 | | | | |
| RS C1 GSS | ORF1ab | SEVGPEHSLAEY | TCAGAAGTAGGACCTGAGCATAGTCTTGCCGAATAC | 2287 | 2322 |
| linkers | NSP2 | | | | |
| | 376-387 | | | | |
| RS C1 GSS | ORF1ab | YIFFASFYY | TACATCTTCTTTGCATCATTTTATTAT | 2323 | 2349 |
| linkers | NSP3 | | | | |
| | 2384- | | | | |
| | 2392 | | | | |
| RS C1 GSS | cleavage | KRNG | AAACGTAACGGG | 2350 | 2361 |
| linkers | linker | | | | |
| RS C1 GSS | middle | GGSGGGGSGG | GGAGGTTCTGGGGGCGGCGGTTCAGGGGGC | 2362 | 2391 |
| linkers | GSS | | | | |
| RS C1 GSS | ORF3a | DLFMRIFTIGTVTLKQGEIKDATPSD | AGCAAGGTGAAATCAAGGATGCTACTCCTTCAGATTTTGTTC | 2392 | 3213 |
| linkers | protein | FVRATATIPIQASLPFGWLIVGVALL | GATTTGTTTATGAGAATCTTCACAATTGGAACTGTAACTTTGA | | |
| | | AVFQSASKIITLKKRWQLALSKGVH | GCGCTACTGCAACGATACCGATACAAGCCTCACTCCCTTTCG | | |
| | | FVCNLLLLFVTVYSHLLLVAAGLEA | GATGGCTTATTGTTGGCGTTGCACTTCTTGCTGTTTTTCAGAG | | |
| | | PFLYLYALVYFLQSINFVRIIMRLWL | CGCTTCCAAAATCATAACCCTCAAAAAGAGATGGCAACTAGC | | |
| | | CWKCRSKNPLLYDANYFLCWHTN | ACTCTCCAAGGGTGTTCACTTTGTTTGCAACTTGCTGTTGTTG | | |
| | | CYDYCIPYNSVTSSIVITSGDGTTSPI | TTTGTAACAGTTTACTCACACCTTTTGCTCGTTGCTGCTGGCCT | | |
| | | SEHDYQIGGYTEKWESGVKDCVVL | TGAAGCCCCTTTTCTCTATCTTTATGCTTTAGTCTACTTCTTGC | | |
| | | HSYFTSDYYQLYSTQLSTDTGVEH | AGAGTATAAACTTTGTAAGAATAATAATGAGGCTTTGGCTTT | | |
| | | VTFFIYNKIVDEPEEHVQIHTIDGSS | GCTGGAAATGCCGTTCCAAAAACCCATTACTTTATGATGCCA | | |
| | | GVVNPVMEPIYDEPTTTTSVPL | ACTATTTTCTTTGCTGGCATACTAATTGTTACGACTATTGTAT | | |
| | | | ACCTTACAATAGTGTAACTTCTTCAATTGTCATTACTTCAGGT | | |
| | | | GATGGCACAACAAGTCCTATTTCTGAACATGACTACCAGATT | | |
| | | | GGTGGTTATACTGAAAAATGGGAATCTGGAGTAAAAGACTGT | | |
| | | | GTTGTATTACACAGTTACTTCACTTCAGACTATTACCAGCTGT | | |
| | | | ACTCAACTCAATTGAGTACAGACACTGGTGTTGAACATGTTA | | |
| | | | CCTTCTTCATCTACAATAAAATTGTTGATGAGCCTGAAGAACA | | |
| | | | TGTCCAAATTCACACAATCGACGGTTCATCCGGAGTTGTTAAT | | |
| | | | CCAGTAATGGAACCAATTTATGATGAACCGACGACGACTACT | | |
| | | | AGCGTGCCTTTG | | |
| RS C1 GSS | middle | GGSGGGGSGG | GGAGGTTCTGGGGGCGGCGGTTCAGGGGGC | 3214 | 3243 |
| linkers | GSS | | | | |
| RS C1 GSS | membrane | ADSNGTITVEELKKLLEQWNLVIGF | GCAGATTCCAACGGTACTATTACCGTTGAAGAGCTTAAAAAG | 3244 | 3906 |
| linkers | glycoprotein | LFLTWICLLQFAYANRNRFLYIIKLI | CTCCTTGAACAATGGAACCTAGTAATAGGTTTCCTATTCCTTA | | |
| | | FLWLLWPVTLACFVLAAVYRINWI | CATGGATTTGTCTTCTACAATTTGCCTATGCCAACAGGAATAG | | |
| | | TGGIAIAMACLVGLMWLSYFIASFR | GTTTTTGTATATAATTAAGTTAATTTTCCTCTGGCTGTTATGGC | | |
| | | LFARTRSMWSFNPETNILLNVPLHG | CAGTAACTTTAGCTTGTTTTGTGCTTGCTGCTGTTTACAGAAT | | |
| | | TILTRPLLESELVIGAVILRGHLRIAG | AAATTGGATCACCGGTGGAATTGCTATCGCAATGGCTTGTCTT | | |
| | | HHLGRCDIKDLPKEITVATSRTLSY | GTAGGCTTGATGTGGCTCAGCTACTTCATTGCTTCTTTCAGAC | | |
| | | YKLGASQRVAGDSGFAAYSRYRIG | TGTTTGCGCGTACGCGTTCCATGTGGTCATTCAATCCAGAAAC | | |
| | | NYKLNTDHSSSSDNIALLVQ | TAACATTCTTCTCAACGTGCCACTCCATGGCACTATTCTGACC | | |
| | | | AGACCGCTTCTAGAAAGTGAACTCGTAATCGGAGCTGTGATC | | |
| | | | CTTCGTGGACATCTTCGTATTGCTGGACACCATCTAGGACGCT | | |
| | | | GTGACATCAAGGACCTGCCTAAAGAAATCACTGTTGCTACAT | | |
| | | | CACGAACGCTTTCTTATTACAAATTGGGAGCTTCGCAGCGTGT | | |
| | | | AGCAGGTGACTCAGGTTTTGCTGCATACAGTCGCTACAGGAT | | |
| | | | TGGCAACTATAAATTAAACACAGACCATTCCAGTAGCAGTGA | | |
| | | | CAATATTGCTTTGCTTGTACAG | | |
| RS C1 GSS | end GSS | GGSLGGGGSG | GGTGGTTCTCTTGGCGGAGGGGGTTCGGGA | 3907 | 3936 |
| linkers | | | | | |
| RS C1 GSS | MITD | IVGIVAGLAVLAVVVIGAVVATVM | ATCGTGGGAATTGTGGCAGGACTGGCAGTGCTGGCCGTGGTG | 3937 | 4107 |
| linkers | | CRRKSSGGKGGSYSQAASSDSAQG | GTGATCGGAGCCGTGGTGGCTACCGTGATGTGCAGACGGAAG | | |
| | | SDVSLTA** | TCCAGCGGAGGCAAGGGCGGCAGCTACAGCCAGGCCGCCAG | | |
| | | | CTCTGATAGCGCCCAGGGCAGCGACGTGTCACTGACAGCCTA | | |
| | | | GTAA | | |
| RS C2 GSS | ISP1 | MRVMAPRTLILLLSGALALTETWA | ATGAGAGTGATGGCCCCCAGAACCCTGATCCTGCTGCTGTCT | 1 | 78 |
| linkers- | | GS | GGCGCCCTGGCCCTGACAGAGACATGGGCCGGAAGC | | |
| inverted | | | | | |
| RS C2 GSS | start GSS | GGSGGGGSGG | GGAGGTTCCGGAGGAGGCGGCAGTGGCGGC | 79 | 108 |
| linkers- | | | | | |
| inverted | | | | | |
| RS C2 GSS | membrane | ADSNGTITVEELKKLLEQWNLVIGF | GCAGATTCCAACGGTACTATTACCGTTGAAGAGCTTAAAAAG | 109 | 771 |
| linkers- | glycoprotein | LFLTWICLLQFAYANRNRFLYIIKLI | CTCCTTGAACAATGGAACCTAGTAATAGGTTTCCTATTCCTTA | | |
| inverted | | FLWLLWPVTLACFVLAAVYRINWI | CATGGATTTGTCTTCTACAATTTGCCTATGCCAACAGGAATAG | | |
| | | TGGIAIAMACLVGLMWLSYFIASFR | GTTTTTGTATATAATTAAGTTAATTTTCCTCTGGCTGTTATGGC | | |
| | | LFARTRSMWSFNPETNILLNVPLHG | CAGTAACTTTAGCTTGTTTTGTGCTTGCTGCTGTTTACAGAAT | | |
| | | TILTRPLLESELVIGAVILRGHLRIAG | AAATTGGATCACCGGTGGAATTGCTATCGCAATGGCTTGTCTT | | |
| | | HHLGRCDIKDLPKEITVATSRTLSY | GTAGGCTTGATGTGGCTCAGCTACTTCATTGCTTCTTTCAGAC | | |
| | | YKLGASQRVAGDSGFAAYSRYRIG | TGTTTGCGCGTACGCGTTCCATGTGGTCATTCAATCCAGAAAC | | |
| | | NYKLNTDHSSSSDNIALLVQ | TAACATTCTTCTCAACGTGCCACTCCATGGCACTATTCTGACC | | |
| | | | AGACCGCTTCTAGAAAGTGAACTCGTAATCGGAGCTGTGATC | | |
| | | | CTTCGTGGACATCTTCGTATTGCTGGACACCATCTAGGACGCT | | |
| | | | GTGACATCAAGGACCTGCCTAAAGAAATCACTGTTGCTACAT | | |
| | | | CACGAACGCTTTCTTATTACAAATTGGGAGCTTCGCAGCGTGT | | |
| | | | AGCAGGTGACTCAGGTTTTGCTGCATACAGTCGCTACAGGAT | | |
| | | | TGGCAACTATAAATTAAACACAGACCATTCCAGTAGCAGTGA | | |
| | | | CAATATTGCTTTGCTTGTACAG | | |
| RS C2 GSS | middle | GGSGGGGSGG | GGAGGTTCTGGGGGCGGCGGTTCAGGGGGC | 772 | 801 |
| linkers- | GSS | | | | |
| inverted | | | | | |
| RS C2 GSS | ORF3a | DLFMRIFTIGTVTLKQGEIKDATPSD | GATTTGTTTATGAGAATCTTCACAATTGGAACTGTAACTTTGA | 802 | 1623 |
| linkers- | protein | FVRATATIPIQASLPFGWLIVGVALL | AGCAAGGTGAAATCAAGGATGCTACTCCTTCAGATTTTGTTC | | |
| inverted | | AVFQSASKIITLKKRWQLALSKGVH | GCGCTACTGCAACGATACCGATACAAGCCTCACTCCCTTTCG | | |
| | | FVCNLLLLFVTVYSHLLLVAAGLEA | GATGGCTTATTGTTGGCGTTGCACTTCTTGCTGTTTTTCAGAG | | |
| | | PFLYLYALVYFLQSINFVRIIMRLWL | CGCTTCCAAAATCATAACCCTCAAAAAGAGATGGCAACTAGC | | |
| | | CWKCRSKNPLLYDANYFLCWHTN | ACTCTCCAAGGGTGTTCACTTTGTTTGCAACTTGCTGTTGTTG | | |
| | | CYDYCIPYNSVTSSIVITSGDGTTSPI | TTTGTAACAGTTTACTCACACCTTTTGCTCGTTGCTGCTGGCCT | | |
| | | SEHDYQIGGYTEKWESGVKDCVVL | TGAAGCCCCTTTTCTCTATCTTTATGCTTTAGTCTACTTCTTGC | | |
| | | HSYFTSDYYQLYSTQLSTDTGVEH | AGAGTATAAACTTTGTAAGAATAATAATGAGGCTTTGGCTTT | | |
| | | VTFFIYNKIVDEPEEHVQIHTIDGSS | GCTGGAAATGCCGTTCCAAAAACCCATTACTTTATGATGCCA | | |
| | | GVVNPVMEPIYDEPTTTTSVPL | ACTATTTTCTTTGCTGGCATACTAATTGTTACGACTATTGTAT | | |
| | | | ACCTTACAATAGTGTAACTTCTTCAATTGTCATTACTTCAGGT | | |
| | | | GATGGCACAACAAGTCCTATTTCTGAACATGACTACCAGATT | | |
| | | | GGTGGTTATACTGAAAAATGGGAATCTGGAGTAAAAGACTGT | | |
| | | | GTTGTATTACACAGTTACTTCACTTCAGACTATTACCAGCTGT | | |
| | | | ACTCAACTCAATTGAGTACAGACACTGGTGTTGAACATGTTA | | |
| | | | CCTTCTTCATCTACAATAAAATTGTTGATGAGCCTGAAGAACA | | |
| | | | TGTCCAAATTCACACAATCGACGGTTCATCCGGAGTTGTTAAT | | |
| | | | CCAGTAATGGAACCAATTTATGATGAACCGACGACGACTACT | | |
| | | | AGCGTGCCTTTG | | |
| RS C2 GSS | middle | GGSGGGGSGG | GGAGGTTCTGGGGGCGGCGGTTCAGGGGGC | 1624 | 1653 |
| linkers- | GSS | | | | |
| inverted | | | | | |
| RS C2 GSS | cleavage | YHFF | TACCATTTCTTT | 1654 | 1665 |
| linkers- | linker | | | | |
| inverted | | | | | |
| RS C2 GSS | ORF1ab | HTTDPSFLGRYMSAL | CACACAACTGATCCTAGTTTTCTGGGTAGGTACATGTCAGCAT | 1666 | 1710 |
| linkers- | NSP3 | | | | |
| inverted | 1636- | | TA | | |
| | 1650 | | | | |
| RS C2 GSS | ORF1ab | FADDLNQLTGY | TTTGCTGATGATTTAAACCAGTTAACTGGTTAT | 1711 | 1743 |
| linkers- | NSP3 | | | | |
| inverted | 1937- | | | | |
| | 1947 | | | | |
| RS C2 GSS | ORF1ab | HTDFSSEIIGY | CATACTGACTTTTCAAGTGAAATCATAGGATAC | 1744 | 1776 |
| linkers- | NSP4 | | | | |
| inverted | 2799- | | | | |
| | 2809 | | | | |
| RS C2 GSS | ORF1ab | QLMCQPILL | CAGCTTATGTGTCAACCTATACTGTTA | 1777 | 1803 |
| linkers- | NSP3 | | | | |
| inverted | 2563- | | | | |
| | 2571 | | | | |
| RS C2 GSS | ORF1ab | AEAELAKNVSL | GCAGAAGCTGAACTTGCAAAGAATGTGTCCTTA | 1804 | 1836 |
| linkers- | NSP3 | | | | |
| inverted | 2616- | | | | |
| | 2626 | | | | |
| RS C2 GSS | ORF1ab | ILGTVSWNL | ATTCTTGGAACTGTTTCTTGGAATTTG | 1837 | 1863 |
| linkers- | NSP3 | | | | |
| inverted | 1367- | | | | |
| | 1375 | | | | |
| RS C2 GSS | cleavage | KRRY | AAGCGTCGCTAT | 1864 | 1875 |
| linkers- | linker | | | | |
| inverted | | | | | |
| RS C2 GSS | ORF1ab | LLSAGIFGA | TTATTATCAGCTGGTATTTTTGGTGCT | 1876 | 1902 |
| linkers- | NSP3 | | | | |
| inverted | 1148- | | | | |
| | 1156 | | | | |
| RS C2 GSS | ORF1ab | ITDVFYKENSY | ATTACGGATGTTTTCTACAAAGAAAACAGTTAC | 1903 | 1935 |
| linkers- | NSP3 | | | | |
| inverted | 1863- | | | | |
| | 1873 | | | | |
| RS C2 GSS | ORF1ab | KVPTDNYITTY | AAAGTGCCAACAGACAATTATATAACCACTTAC | 1936 | 1968 |
| linkers- | NSP3 | | | | |
| inverted | 1319- | | | | |
| | 1329 | | | | |
| RS C2 GSS | cleavage | ARMA | GCGCGGATGGCT | 1969 | 1980 |
| linkers- | linker | | | | |
| inverted | | | | | |
| RS C2 GSS | ORF1ab | APKEIIFLEGETL | GCCCCAAAAGAAATTATCTTCTTAGAGGGAGAAACACTT | 1981 | 2019 |
| linkers- | NSP2 | | | | |
| inverted | 735-747 | | | | |
| RS C2 GSS | ORF1ab | FGDDTVIEV | TTTGGTGATGACACTGTGATAGAAGTG | 2020 | 2046 |
| linkers- | NSP3 | | | | |
| inverted | 825-833 | | | | |
| RS C2 GSS | ORF1ab | AIILASFSAST | GCCATTATTTTGGCATCTTTTTCTGCTTCCACA | 2047 | 2079 |
| linkers- | NSP2 | | | | |
| inverted | 474-484 | | | | |
| RS C2 GSS | cleavage | RRMA | CGCCGTATGGCA | 2080 | 2091 |
| linkers- | linker | | | | |
| inverted | | | | | |
| RS C2 GSS | ORF1ab | MVTNNTFTLK | ATGGTAACAAACAATACCTTCACACTCAAA | 2092 | 2121 |
| linkers- | NSP2 | | | | |
| inverted | 807-816 | | | | |
| RS C2 GSS | ORF1ab | VPHVGEIPVAYRKVLL | GTCCCTCATGTGGGCGAAATACCAGTGGCTTACCGCAAGGTT | 2122 | 2169 |
| linkers- | NSP1 | | CTTCTT | | |
| inverted | 108-123 | | | | |
| RS C2 GSS | ORF1ab | KTIQPRVEK | AAGACTATTCAACCAAGGGTTGAAAAG | 2170 | 2196 |
| linkers- | NSP2 | | | | |
| inverted | 282-290 | | | | |
| RS C2 GSS | ORF1ab | YLFDESGEFKL | TACTTATTTGATGAGTCTGGTGAGTTTAAATTG | 2197 | 2229 |
| linkers- | NSP3 | | | | |
| inverted | 906-916 | | | | |
| RS C2 GSS | ORF1ab | SEVGPEHSLAEY | TCAGAAGTAGGACCTGAGCATAGTCTTGCCGAATAC | 12230 | 2265 |
| linkers- | NSP2 | | | | |
| inverted | 376-387 | | | | |
| RS C2 GSS | ORF1ab | YIFFASFYY | TACATCTTCTTTGCATCATTTTATTAT | 2266 | 2292 |
| linkers- | NSP3 | | | | |
| inverted | 12384- | | | | |
| | 2392 | | | | |
| RS C2 GSS | cleavage | KRNG | AAACGTAACGGG | 2293 | 2304 |
| linkers- | linker | | | | |
| inverted | | | | | |
| RS C2 GSS | middle | GGSGGGGSGG | GGAGGTTCTGGGGGCGGCGGTTCAGGGGGC | 2305 | 2334 |
| linkers- | GSS | | | | |
| inverted | | | | | |
| RS C2 GSS | ORF9b | DPKISEMHPALRLVDPQIQLAVTRM | GACCCCAAAATCAGCGAAATGCACCCCGCATTACGTTTGGTG | 2335 | 2622 |
| linkers- | protein | ENAVGRDQNNVGPKVYPIILRLGSP | GACCCTCAGATTCAACTGGCAGTAACCAGAATGGAGAACGCA | | |
| inverted | | LSLNMARKTLNSLEDKAFQLTPIAV | GTGGGGCGCGATCAAAACAACGTCGGCCCCAAGGTTTACCCA | | |
| | | QMTKLATTEELPDEFVVVTVK | ATAATACTGCGTCTTGGTTCACCGCTCTCACTCAACATGGCAA | | |
| | | | GGAAGACCTTAAATTCCCTCGAGGACAAGGCGTTCCAATTAA | | |
| | | | CACCAATAGCAGTCCAGATGACCAAATTGGCTACTACCGAAG | | |
| | | | AGCTACCAGACGAATTCGTGGTGGTGACGGTAAAA | | |
| RS C2 GSS | middle | GGSGGGGSGG | GGAGGTTCTGGGGGCGGCGGTTCAGGGGGC | 2623 | 2652 |
| linkers- | GSS | | | | |
| inverted | | | | | |
| RS C2 GSS | nucleocapsid | SDNGPQNQRNAPRITFGGPSDSTGS | TCTGATAATGGACCCCAAAATCAGCGAAATGCACCCCGCATT | 2653 | 3906 |
| linkers- | phosphoprotein | NQNGERSGARSKQRRPQGLPNNTA | ACGTTTGGTGGACCCTCAGATTCAACTGGCAGTAACCAGAAT | | |
| inverted | | SWFTALTQHGKEDLKFPRGQGVPI | GGAGAACGCAGTGGGGCGCGATCAAAACAACGTCGGCCCCA | | |
| | | NTNSSPDDQIGYYRRATRRIRGGDG | AGGTTTACCCAATAATACTGCGTCTTGGTTCACCGCTCTCACT | | |
| | | KMKDLSPRWYFYYLGTGPEAGLPY | CAACATGGCAAGGAAGACCTTAAATTCCCTCGAGGACAAGGC | | |
| | | GANKDGIIWVATEGALNTPKDHIGT | GTTCCAATTAACACCAATAGCAGTCCAGATGACCAAATTGGC | | |
| | | RNPANNAAIVLQLPQGTTLPKGFYA | TACTACCGAAGAGCTACCAGACGAATTCGTGGTGGTGACGGT | | |
| | | EGSRGGSQASSRSSSRSRNSSRNSTP | AAAATGAAAGATCTCAGTCCAAGATGGTATTTCTACTACCTA | | |
| | | GSSRGTSPARMAGNGGDAALALLL | GGAACTGGGCCAGAAGCTGGACTTCCCTATGGTGCTAACAAA | | |
| | | LDRLNQLESKMSGKGQQQQGQTV | GACGGCATCATATGGGTTGCAACTGAGGGAGCCTTGAATACA | | |
| | | TKKSAAEASKKPRQKRTATKAYNV | CCAAAAGATCACATTGGCACCCGCAATCCTGCTAACAATGCT | | |
| | | TQAFGRRGPEQTQGNFGDQELIRQ | GCAATCGTGCTACAACTTCCTCAAGGAACAACATTGCCAAAA | | |
| | | GTDYKHWPQIAQFAPSASAFFGMS | GGCTTCTACGCAGAAGGGAGCAGAGGCGGCAGTCAAGCCTCT | | |
| | | RIGMEVTPSGTWLTYTGAIKLDDK | TCTCGTTCCTCATCACGTAGTCGCAACAGTTCAAGAAATTCAA | | |
| | | DPNFKDQVILLNKHIDAYKTFPPTE | CTCCAGGCAGCAGTAGGGGAACTTCTCCTGCTAGAATGGCTG | | |
| | | PKKDKKKKADETQALPQRQKKQQ | GCAATGGCGGTGATGCTGCTCTTGCTTTGCTGCTGCTTGACAG | | |
| | | TVTLLPAADLDDFSKQLQQSMSSA | ATTGAACCAGCTTGAGAGCAAAATGTCTGGTAAAGGCCAACA | | |
| | | DSTQA | ACAACAAGGCCAAACTGTCACTAAGAAATCTGCTGCTGAGGC | | |
| | | | TTCTAAGAAGCCTCGGCAAAAACGTACTGCCACTAAAGCATA | | |
| | | | CAATGTAACACAAGCTTTCGGCAGACGTGGTCCAGAACAAAC | | |
| | | | CCAAGGAAATTTTGGGGACCAGGAACTAATCAGACAAGGAA | | |
| | | | CTGATTACAAACATTGGCCGCAAATTGCACAATTTGCCCCCA | | |
| | | | GCGCTTCAGCGTTCTTCGGAATGTCGCGCATTGGCATGGAAG | | |
| | | | TCACACCTTCGGGAACGTGGTTGACCTACACAGGTGCCATCA | | |
| | | | AATTGGATGACAAAGATCCAAATTTCAAAGATCAAGTCATTT | | |
| | | | TGCTGAATAAGCATATTGACGCATACAAAACATTCCCACCAA | | |
| | | | CAGAGCCTAAAAAGGACAAAAAGAAGAAGGCTGATGAAACT | | |
| | | | CAAGCCTTACCGCAGAGACAGAAGAAACAGCAAACTGTGAC | | |
| | | | TCTTCTTCCTGCTGCAGATTTGGATGATTTCTCCAAACAATTG | | |
| | | | CAACAATCCATGAGCAGTGCTGACTCAACTCAGGCC | | |
| RS C2 GSS | end GSS | GGSLGGGGSG | GGTGGTTCTCTTGGCGGAGGGGGTTCGGGA | 3907 | 3936 |
| linkers- | | | | | |
| inverted | | | | | |
| RS C2 GSS | MITD | IVGIVAGLAVLAVVVIGAVVATVM | ATCGTGGGAATTGTGGCAGGACTGGCAGTGCTGGCCGTGGTG | 3937 | 4107 |
| linkers- | | CRRKSSGGKGGSYSQAASSDSAQG | GTGATCGGAGCCGTGGTGGCTACCGTGATGTGCAGACGGAAG | | |
| inverted | | SDVSLTA** | TCCAGCGGAGGCAAGGGCGGCAGCTACAGCCAGGCCGCCAG | | |
| | | | CTCTGATAGCGCCCAGGGCAGCGACGTGTCACTGACAGCCTA | | |
| | | | GTAA | | |
| RS C3 2A | SP1 | MRVMAPRTLILLLSGALALTETWA | ATGAGAGTGATGGCCCCCAGAACCCTGATCCTGCTGCTGTCT | 1 | 78 |
| linkers | | GS | GGCGCCCTGGCCCTGACAGAGACATGGGCCGGAAGC | | |
| RS C3 2A | start GSS | GGSGGGGSGG | GGAGGTTCCGGAGGAGGCGGCAGTGGCGGC | 79 | 108 |
| linkers | | | | | |
| RS C3 2A | nucleocapsid | SDNGPQNQRNAPRITFGGPSDSTGS | TCTGATAATGGACCCCAAAATCAGCGAAATGCACCCCGCATT | 109 | 1362 |
| linkers | phosphoprotein | NQNGERSGARSKQRRPQGLPNNTA | ACGTTTGGTGGACCCTCAGATTCAACTGGCAGTAACCAGAAT | | |
| | | SWFTALTQHGKEDLKFPRGQGVPI | GGAGAACGCAGTGGGGCGCGATCAAAACAACGTCGGCCCCA | | |
| | | NTNSSPDDQIGYYRRATRRIRGGDG | AGGTTTACCCAATAATACTGCGTCTTGGTTCACCGCTCTCACT | | |
| | | KMKDLSPRWYFYYLGTGPEAGLPY | CAACATGGCAAGGAAGACCTTAAATTCCCTCGAGGACAAGGC | | |
| | | GANKDGIIWVATEGALNTPKDHIGT | GTTCCAATTAACACCAATAGCAGTCCAGATGACCAAATTGGC | | |
| | | RNPANNAAIVLQLPQGTTLPKGFYA | TACTACCGAAGAGCTACCAGACGAATTCGTGGTGGTGACGGT | | |
| | | EGSRGGSQASSRSSSRSRNSSRNSTP | AAAATGAAAGATCTCAGTCCAAGATGGTATTTCTACTACCTA | | |
| | | GSSRGTSPARMAGNGGDAALALLL | GGAACTGGGCCAGAAGCTGGACTTCCCTATGGTGCTAACAAA | | |
| | | LDRLNQLESKMSGKGQQQQGQTV | GACGGCATCATATGGGTTGCAACTGAGGGAGCCTTGAATACA | | |
| | | TKKSAAEASKKPRQKRTATKAYNV | CCAAAAGATCACATTGGCACCCGCAATCCTGCTAACAATGCT | | |
| | | TQAFGRRGPEQTQGNFGDQELIRQ | GCAATCGTGCTACAACTTCCTCAAGGAACAACATTGCCAAAA | | |
| | | GTDYKHWPQIAQFAPSASAFFGMS | GGCTTCTACGCAGAAGGGAGCAGAGGCGGCAGTCAAGCCTCT | | |
| | | RIGMEVTPSGTWLTYTGAIKLDDK | TCTCGTTCCTCATCACGTAGTCGCAACAGTTCAAGAAATTCAA | | |
| | | DPNFKDQVILLNKHIDAYKTFPPTE | CTCCAGGCAGCAGTAGGGGAACTTCTCCTGCTAGAATGGCTG | | |
| | | PKKDKKKKADETQALPQRQKKQQ | GCAATGGCGGTGATGCTGCTCTTGCTTTGCTGCTGCTTGACAG | | |
| | | TVTLLPAADLDDFSKQLQQSMSSA | ATTGAACCAGCTTGAGAGCAAAATGTCTGGTAAAGGCCAACA | | |
| | | DSTQA | ACAACAAGGCCAAACTGTCACTAAGAAATCTGCTGCTGAGGC | | |
| | | | TTCTAAGAAGCCTCGGCAAAAACGTACTGCCACTAAAGCATA | | |
| | | | CAATGTAACACAAGCTTTCGGCAGACGTGGTCCAGAACAAAC | | |
| | | | CCAAGGAAATTTTGGGGACCAGGAACTAATCAGACAAGGAA | | |
| | | | CTGATTACAAACATTGGCCGCAAATTGCACAATTTGCCCCCA | | |
| | | | GCGCTTCAGCGTTCTTCGGAATGTCGCGCATTGGCATGGAAG | | |
| | | | TCACACCTTCGGGAACGTGGTTGACCTACACAGGTGCCATCA | | |
| | | | AATTGGATGACAAAGATCCAAATTTCAAAGATCAAGTCATTT | | |
| | | | TGCTGAATAAGCATATTGACGCATACAAAACATTCCCACCAA | | |
| | | | CAGAGCCTAAAAAGGACAAAAAGAAGAAGGCTGATGAAACT | | |
| | | | CAAGCCTTACCGCAGAGACAGAAGAAACAGCAAACTGTGAC | | |
| | | | TCTTCTTCCTGCTGCAGATTTGGATGATTTCTCCAAACAATTG | | |
| | | | CAACAATCCATGAGCAGTGCTGACTCAACTCAGGCC | | |
| RS C3 2A | 1 GSG | GSGGSGEGRGSLLTCGDVEENPGP | GGCAGCGGCGGCTCCGGCGAGGGCAGGGGAAGTCTTCTAAC | 1363 | 1434 |
| linkers | T2A | | ATGCGGGGACGTGGAGGAAAATCCCGGCCCA | | |
| RS C3 2A | ORF9b | DPKISEMHPALRLVDPQIQLAVTRM | GACCCCAAAATCAGCGAAATGCACCCCGCATTACGTTTGGTG | 1435 | 1722 |
| linkers | protein | ENAVGRDQNNVGPKVYPIILRLGSP | GACCCTCAGATTCAACTGGCAGTAACCAGAATGGAGAACGCA | | |
| | | LSLNMARKTLNSLEDKAFQLTPIAV | GTGGGGCGCGATCAAAACAACGTCGGCCCCAAGGTTTACCCA | | |
| | | QMTKLATTEELPDEFVVVTVK | ATAATACTGCGTCTTGGTTCACCGCTCTCACTCAACATGGCAA | | |
| | | | GGAAGACCTTAAATTCCCTCGAGGACAAGGCGTTCCAATTAA | | |
| | | | CACCAATAGCAGTCCAGATGACCAAATTGGCTACTACCGAAG | | |
| | | | AGCTACCAGACGAATTCGTGGTGGTGACGGTAAAA | | |
| RS C3 2A | 2 GSG | GSGGSGATNFSLLKQAGDVEENPG | GGCAGCGGCGGCAGCGGCGCCACAAACTTCTCTCTGCTAAAG | 1723 | 1797 |
| linkers | P2A | P | CAAGCAGGTGATGTTGAAGAAAACCCCGGGCCT | | |
| RS C3 2A | cleavage | YHFF | TACCATTTCTTT | 1798 | 1809 |
| linkers | linker | | | | |
| RS C3 2A | ORF1ab | HTTDPSFLGRYMSAL | CACACAACTGATCCTAGTTTTCTGGGTAGGTACATGTCAGCAT | 1810 | 1854 |
| linkers | NSP3 | | TA | | |
| | 1636- | | | | |
| | 1650 | | | | |
| RS C3 2A | ORF1ab | FADDLNQLTGY | TTTGCTGATGATTTAAACCAGTTAACTGGTTAT | 1855 | 1887 |
| linkers | NSP3 | | | | |
| | 1937- | | | | |
| | 1947 | | | | |
| RS C3 2A | ORF1ab | HTDFSSEIIGY | CATACTGACTTTTCAAGTGAAATCATAGGATAC | 1888 | 1920 |
| linkers | NSP4 | | | | |
| | 2799- | | | | |
| | 2809 | | | | |
| RS C3 2A | ORF1ab | QLMCQPILL | CAGCTTATGTGTCAACCTATACTGTTA | 1921 | 1947 |
| linkers | NSP3 | | | | |
| | 2563- | | | | |
| | 2571 | | | | |
| RS C3 2A | ORF1ab | AEAELAKNVSL | GCAGAAGCTGAACTTGCAAAGAATGTGTCCTTA | 1948 | 1980 |
| linkers | NSP3 | | | | |
| | 2616- | | | | |
| | 2626 | | | | |
| RS C3 2A | ORF1ab | ILGTVSWNL | ATTCTTGGAACTGTTTCTTGGAATTTG | 1981 | 2007 |
| linkers | NSP3 | | | | |
| | 1367- | | | | |
| | 1375 | | | | |
| RS C3 2A | cleavage | KRRY | AAGCGTCGCTAT | 2008 | 2019 |
| linkers | linker | | | | |
| RS C3 2A | ORF1ab | LLSAGIFGA | TTATTATCAGCTGGTATTTTTGGTGCT | 2020 | 2046 |
| linkers | NSP3 | | | | |
| | 1148- | | | | |
| | 1156 | | | | |
| RS C3 2A | ORF1ab | ITDVFYKENSY | ATTACGGATGTTTTCTACAAAGAAAACAGTTAC | 2047 | 2079 |
| linkers | NSP3 | | | | |
| | 1863- | | | | |
| | 1873 | | | | |
| RS C3 2A | ORF1ab | KVPTDNYITTY | AAAGTGCCAACAGACAATTATATAACCACTTAC | 2080 | 2112 |
| linkers | NSP3 | | | | |
| | 1319- | | | | |
| | 1329 | | | | |
| RS C3 2A | cleavage | ARMA | GCGCGGATGGCT | 2113 | 2124 |
| linkers | linker | | | | |
| RS C3 2A | ORF1ab | APKEIIFLEGETL | GCCCCAAAAGAAATTATCTTCTTAGAGGGAGAAACACTT | 2125 | 2163 |
| linkers | NSP2 | | | | |
| | 735-747 | | | | |
| RS C3 2A | ORF1ab | FGDDTVIEV | TTTGGTGATGACACTGTGATAGAAGTG | 2164 | 2190 |
| linkers | NSP3 | | | | |
| | 825-833 | | | | |
| RS C3 2A | ORF1ab | AIILASFSAST | GCCATTATTTTGGCATCTTTTTCTGCTTCCACA | 2191 | 2223 |
| linkers | NSP2 | | | | |
| | 474-484 | | | | |
| RS C3 2A | cleavage | RRMA | CGCCGTATGGCA | 2224 | 2235 |
| linkers | linker | | | | |
| RS C3 2A | ORF1ab | MVTNNTFTLK | ATGGTAACAAACAATACCTTCACACTCAAA | 2236 | 2265 |
| linkers | NSP2 | | | | |
| | 807-816 | | | | |
| RS C3 2A | ORF1ab | VPHVGEIPVAYRKVLL | GTCCCTCATGTGGGCGAAATACCAGTGGCTTACCGCAAGGTT | 2266 | 2313 |
| linkers | NSP1 | | CTTCTT | | |
| | 108-123 | | | | |
| RS C3 2A | ORF1ab | KTIQPRVEK | AAGACTATTCAACCAAGGGTTGAAAAG | 2314 | 2340 |
| linkers | NSP2 | | | | |
| | 282-290 | | | | |
| RS C3 2A | ORF1ab NSP3 | YLFDESGEFKL | TACTTATTTGATGAGTCTGGTGAGTTTAAATTG | 2341 | 2373 |
| linkers | 906-916 | | | | |
| RS C3 2A | ORF1ab | SEVGPEHSLAEY | TCAGAAGTAGGACCTGAGCATAGTCTTGCCGAATAC | 2374 | 2409 |
| linkers | NSP2 | | | | |
| | 376-387 | | | | |
| RS C3 2A | ORF1ab | YIFFASFYY | TACATCTTCTTTGCATCATTTTATTAT | 2410 | 2436 |
| linkers | NSP3 | | | | |
| | 2384- | | | | |
| | 2392 | | | | |
| RS C3 2A | cleavage | KRNG | AAACGTAACGGG | 2437 | 2448 |
| linkers | linker | | | | |
| RS C3 2A | 3 | GSGVKQTLNFDLLKLAGDVESNPG | GGCAGCGGCGTGAAACAGACTTTGAATTTTGACCTTCTCAAG | 2449 | 2523 |
| linkers | GSG F2A | P | TTGGCGGGAGACGTGGAGTCCAACCCTGGACCT | | |
| RS C3 2A | ORF3a | DLFMRIFTIGTVTLKQGEIKDATPSD | GATTTGTTTATGAGAATCTTCACAATTGGAACTGTAACTTTGA | 2524 | 3345 |
| linkers | protein | FVRATATIPIQASLPFGWLIVGVALL | AGCAAGGTGAAATCAAGGATGCTACTCCTTCAGATTTTGTTC | | |
| | | AVFQSASKIITLKKRWQLALSKGVH | GCGCTACTGCAACGATACCGATACAAGCCTCACTCCCTTTCG | | |
| | | FVCNLLLLFVTVYSHLLLVAAGLEA | GATGGCTTATTGTTGGCGTTGCACTTCTTGCTGTTTTTCAGAG | | |
| | | PFLYLYALVYFLQSINFVRIIMRLWL | CGCTTCCAAAATCATAACCCTCAAAAAGAGATGGCAACTAGC | | |
| | | CWKCRSKNPLLYDANYFLCWHTN | ACTCTCCAAGGGTGTTCACTTTGTTTGCAACTTGCTGTTGTTG | | |
| | | CYDYCIPYNSVTSSIVITSGDGTTSPI | TTTGTAACAGTTTACTCACACCTTTTGCTCGTTGCTGCTGGCCT | | |
| | | SEHDYQIGGYTEKWESGVKDCVVL | TGAAGCCCCTTTTCTCTATCTTTATGCTTTAGTCTACTTCTTGC | | |
| | | HSYFTSDYYQLYSTQLSTDTGVEH | AGAGTATAAACTTTGTAAGAATAATAATGAGGCTTTGGCTTT | | |
| | | VTFFIYNKIVDEPEEHVQIHTIDGSS | GCTGGAAATGCCGTTCCAAAAACCCATTACTTTATGATGCCA | | |
| | | GVVNPVMEPIYDEPTTTTSVPL | ACTATTTTCTTTGCTGGCATACTAATTGTTACGACTATTGTAT | | |
| | | | ACCTTACAATAGTGTAACTTCTTCAATTGTCATTACTTCAGGT | | |
| | | | GATGGCACAACAAGTCCTATTTCTGAACATGACTACCAGATT | | |
| | | | GGTGGTTATACTGAAAAATGGGAATCTGGAGTAAAAGACTGT | | |
| | | | GTTGTATTACACAGTTACTTCACTTCAGACTATTACCAGCTGT | | |
| | | | ACTCAACTCAATTGAGTACAGACACTGGTGTTGAACATGTTA | | |
| | | | CCTTCTTCATCTACAATAAAATTGTTGATGAGCCTGAAGAACA | | |
| | | | TGTCCAAATTCACACAATCGACGGTTCATCCGGAGTTGTTAAT | | |
| | | | CCAGTAATGGAACCAATTTATGATGAACCGACGACGACTACT | | |
| | | | AGCGTGCCTTTG | | |
| RS C3 2A | 4 GSG | GSGGSGQCTNYALLKLAGDVESNP | GGCAGCGGCGGCTCGGGCCAGTGTACTAATTATGCTCTCTTG | 3346 | 3423 |
| linkers | E2A | GP | AAATTGGCTGGAGATGTTGAGAGCAACCCAGGTCCC | | |
| RS C3 2A | membrane | ADSNGTITVEELKKLLEQWNLVIGF | GCAGATTCCAACGGTACTATTACCGTTGAAGAGCTTAAAAAG | 3424 | 4086 |
| linkers | glycoprotein | LFLTWICLLQFAYANRNRFLYIIKLI | CTCCTTGAACAATGGAACCTAGTAATAGGTTTCCTATTCCTTA | | |
| | | FLWLLWPVTLACFVLAAVYRINWI | CATGGATTTGTCTTCTACAATTTGCCTATGCCAACAGGAATAG | | |
| | | TGGIAIAMACLVGLMWLSYFIASFR | GTTTTTGTATATAATTAAGTTAATTTTCCTCTGGCTGTTATGGC | | |
| | | LFARTRSMWSFNPETNILLNVPLHG | CAGTAACTTTAGCTTGTTTTGTGCTTGCTGCTGTTTACAGAAT | | |
| | | TILTRPLLESELVIGAVILRGHLRIAG | AAATTGGATCACCGGTGGAATTGCTATCGCAATGGCTTGTCTT | | |
| | | HHLGRCDIKDLPKEITVATSRTLSY | GTAGGCTTGATGTGGCTCAGCTACTTCATTGCTTCTTTCAGAC | | |
| | | YKLGASQRVAGDSGFAAYSRYRIG | TGTTTGCGCGTACGCGTTCCATGTGGTCATTCAATCCAGAAAC | | |
| | | NYKLNTDHSSSSDNIALLVQ | TAACATTCTTCTCAACGTGCCACTCCATGGCACTATTCTGACC | | |
| | | | AGACCGCTTCTAGAAAGTGAACTCGTAATCGGAGCTGTGATC | | |
| | | | CTTCGTGGACATCTTCGTATTGCTGGACACCATCTAGGACGCT | | |
| | | | GTGACATCAAGGACCTGCCTAAAGAAATCACTGTTGCTACAT | | |
| | | | CACGAACGCTTTCTTATTACAAATTGGGAGCTTCGCAGCGTGT | | |
| | | | AGCAGGTGACTCAGGTTTTGCTGCATACAGTCGCTACAGGAT | | |
| | | | TGGCAACTATAAATTAAACACAGACCATTCCAGTAGCAGTGA | | |
| | | | CAATATTGCTTTGCTTGTACAG | | |
| RS C3 2A | end GSS | GGSLGGGGSG | GGTGGTTCTCTTGGCGGAGGGGGTTCGGGA | 4087 | 4116 |
| linkers | | | | | |
| RS C3 2A | MITD | IVGIVAGLAVLAVVVIGAVVATVM | ATCGTGGGAATTGTGGCAGGACTGGCAGTGCTGGCCGTGGTG | 4117 | 4287 |
| linkers | | CRRKSSGGKGGSYSQAASSDSAQG | GTGATCGGAGCCGTGGTGGCTACCGTGATGTGCAGACGGAAG | | |
| | | SDVSLTA** | TCCAGCGGAGGCAAGGGCGGCAGCTACAGCCAGGCCGCCAG | | |
| | | | CTCTGATAGCGCCCAGGGCAGCGACGTGTCACTGACAGCCTA | | |
| | | | GTAA | | |
| RS C4 | SP1 | MRVMAPRTLILLLSGALALTETWA | ATGAGAGTGATGGCCCCCAGAACCCTGATCCTGCTGCTGTCT | 1 | 78 |
| ORF1ab as | | GS | GGCGCCCTGGCCCTGACAGAGACATGGGCCGGAAGC | | |
| linkers | | | | | |
| RS C4 | start GSS | GGSGGGGSGG | GGAGGTTCCGGAGGAGGCGGCAGTGGCGGC | 79 | 108 |
| ORF1ab as | | | | | |
| linkers | | | | | |
| RS C4 | nucleocapsid | SDNGPQNQRNAPRITFGGPSDSTGS | TCTGATAATGGACCCCAAAATCAGCGAAATGCACCCCGCATT | 109 | 1362 |
| ORF1ab as | phosphoprotein | NONGERSGARSKQRRPQGLPNNTA | ACGTTTGGTGGACCCTCAGATTCAACTGGCAGTAACCAGAAT | | |
| linkers | | SWFTALTQHGKEDLKFPRGQGVPI | GGAGAACGCAGTGGGGCGCGATCAAAACAACGTCGGCCCCA | | |
| | | NTNSSPDDQIGYYRRATRRIRGGDG | AGGTTTACCCAATAATACTGCGTCTTGGTTCACCGCTCTCACT | | |
| | | KMKDLSPRWYFYYLGTGPEAGLPY | CAACATGGCAAGGAAGACCTTAAATTCCCTCGAGGACAAGGC | | |
| | | GANKDGIIWVATEGALNTPKDHIGT | GTTCCAATTAACACCAATAGCAGTCCAGATGACCAAATTGGC | | |
| | | RNPANNAAIVLQLPQGTTLPKGFYA | TACTACCGAAGAGCTACCAGACGAATTCGTGGTGGTGACGGT | | |
| | | EGSRGGSQASSRSSSRSRNSSRNSTP | AAAATGAAAGATCTCAGTCCAAGATGGTATTTCTACTACCTA | | |
| | | GSSRGTSPARMAGNGGDAALALLL | GGAACTGGGCCAGAAGCTGGACTTCCCTATGGTGCTAACAAA | | |
| | | LDRLNQLESKMSGKGQQQQGQTV | GACGGCATCATATGGGTTGCAACTGAGGGAGCCTTGAATACA | | |
| | | TKKSAAEASKKPRQKRTATKAYNV | CCAAAAGATCACATTGGCACCCGCAATCCTGCTAACAATGCT | | |
| | | TQAFGRRGPEQTQGNFGDQELIRQ | GCAATCGTGCTACAACTTCCTCAAGGAACAACATTGCCAAAA | | |
| | | GTDYKHWPQIAQFAPSASAFFGMS | GGCTTCTACGCAGAAGGGAGCAGAGGCGGCAGTCAAGCCTCT | | |
| | | RIGMEVTPSGTWLTYTGAIKLDDK | TCTCGTTCCTCATCACGTAGTCGCAACAGTTCAAGAAATTCAA | | |
| | | DPNFKDQVILLNKHIDAYKTFPPTE | CTCCAGGCAGCAGTAGGGGAACTTCTCCTGCTAGAATGGCTG | | |
| | | PKKDKKKKADETQALPQRQKKQQ | GCAATGGCGGTGATGCTGCTCTTGCTTTGCTGCTGCTTGACAG | | |
| | | TVTLLPAADLDDFSKQLQQSMSSA | ATTGAACCAGCTTGAGAGCAAAATGTCTGGTAAAGGCCAACA | | |
| | | DSTQA | ACAACAAGGCCAAACTGTCACTAAGAAATCTGCTGCTGAGGC | | |
| | | | TTCTAAGAAGCCTCGGCAAAAACGTACTGCCACTAAAGCATA | | |
| | | | CAATGTAACACAAGCTTTCGGCAGACGTGGTCCAGAACAAAC | | |
| | | | CCAAGGAAATTTTGGGGACCAGGAACTAATCAGACAAGGAA | | |
| | | | CTGATTACAAACATTGGCCGCAAATTGCACAATTTGCCCCCA | | |
| | | | GCGCTTCAGCGTTCTTCGGAATGTCGCGCATTGGCATGGAAG | | |
| | | | TCACACCTTCGGGAACGTGGTTGACCTACACAGGTGCCATCA | | |
| | | | AATTGGATGACAAAGATCCAAATTTCAAAGATCAAGTCATTT | | |
| | | | TGCTGAATAAGCATATTGACGCATACAAAACATTCCCACCAA | | |
| | | | CAGAGCCTAAAAAGGACAAAAAGAAGAAGGCTGATGAAACT | | |
| | | | CAAGCCTTACCGCAGAGACAGAAGAAACAGCAAACTGTGAC | | |
| | | | TCTTCTTCCTGCTGCAGATTTGGATGATTTCTCCAAACAATTG | | |
| | | | CAACAATCCATGAGCAGTGCTGACTCAACTCAGGCC | | |
| RS C4 | cleavage | FRAC | TTCAGGGCTTGC | 1363 | 1374 |
| ORF1ab as | linker | | | | |
| linkers | | | | | |
| RS C4 | ORF1ab | MVTNNTFTLK | ATGGTAACAAACAATACCTTCACACTCAAA | 1375 | 1404 |
| ORFlab as | NSP2 | | | | |
| linkers | 807-816 | | | | |
| RS C4 | ORF1ab | VPHVGEIPVAYRKVLL | GTCCCTCATGTGGGCGAAATACCAGTGGCTTACCGCAAGGTT | 1405 | 1452 |
| ORFlab as | NSP1 | | CTTCTT | | |
| linkers | 108-123 | | | | |
| RS C4 | ORF1ab | KTIQPRVEK | AAGACTATTCAACCAAGGGTTGAAAAG | 1453 | 1479 |
| ORF1ab as | NSP2 | | | | |
| linkers | 282-290 | | | | |
| RS C4 | ORF1ab | YLFDESGEFKL | TACTTATTTGATGAGTCTGGTGAGTTTAAATTG | 1480 | 1512 |
| ORF1ab as | NSP3 | | | | |
| linkers | 906-916 | | | | |
| RS C4 | ORF1ab | SEVGPEHSLAEY | TCAGAAGTAGGACCTGAGCATAGTCTTGCCGAATAC | 1513 | 1548 |
| ORF1ab as | NSP2 | | | | |
| linkers | 376-387 | | | | |
| RS C4 | ORF1ab | YIFFASFYY | TACATCTTCTTTGCATCATTTTATTAT | 1549 | 1575 |
| ORF1ab | NSP3 | | | | |
| as | 2384- | | | | |
| linkers | 2392 | | | | |
| RS C4 | cleavage | KRNG | AAAAGAAATGGC | 1576 | 1587 |
| ORFlab as | linker | | | | |
| linkers | | | | | |
| RS C4 | ORF9b | DPKISEMHPALRLVDPQIQLAVTRM | GACCCCAAAATCAGCGAAATGCACCCCGCATTACGTTTGGTG | 1588 | 1875 |
| ORF1ab as | protein | ENAVGRDQNNVGPKVYPIILRLGSP | GACCCTCAGATTCAACTGGCAGTAACCAGAATGGAGAACGCA | | |
| linkers | | LSLNMARKTLNSLEDKAFQLTPIAV | GTGGGGCGCGATCAAAACAACGTCGGCCCCAAGGTTTACCCA | | |
| | | QMTKLATTEELPDEFVVVTVK | ATAATACTGCGTCTTGGTTCACCGCTCTCACTCAACATGGCAA | | |
| | | | GGAAGACCTTAAATTCCCTCGAGGACAAGGCGTTCCAATTAA | | |
| | | | CACCAATAGCAGTCCAGATGACCAAATTGGCTACTACCGAAG | | |
| | | | AGCTACCAGACGAATTCGTGGTGGTGACGGTAAAA | | |
| RS C4 | cleavage | FNSF | TTCAACTCTTTT | 1876 | 1887 |
| ORF1ab as | linker | | | | |
| linkers | | | | | |
| RS C4 | ORF1ab | HTTDPSFLGRYMSAL | CACACAACTGATCCTAGTTTTCTGGGTAGGTACATGTCAGCAT | 1888 | 1932 |
| ORF1ab | NSP3 | | TA | | |
| as | 1636- | | | | |
| linkers | 1650 | | | | |
| RS C4 | ORF1ab | FADDLNQLTGY | TTTGCTGATGATTTAAACCAGTTAACTGGTTAT | 1933 | 1965 |
| ORF1ab as | NSP3 | | | | |
| linkers | 1937- | | | | |
| | 1947 | | | | |
| RS C4 | ORF1ab | HTDFSSEIIGY | CATACTGACTTTTCAAGTGAAATCATAGGATAC | 1966 | 1998 |
| ORF1ab | NSP4 | | | | |
| as | 2799- | | | | |
| linkers | 2809 | | | | |
| RS C4 | ORF1ab | QLMCQPILL | CAGCTTATGTGTCAACCTATACTGTTA | 1999 | 2025 |
| ORF1ab | INSP3 | | | | |
| as | 2563- | | | | |
| linkers | 2571 | | | | |
| RS C4 | ORF1ab | AEAELAKNVSL | GCAGAAGCTGAACTTGCAAAGAATGTGTCCTTA | 2026 | 2058 |
| ORF1ab | NSP3 | | | | |
| as | 2616- | | | | |
| linkers | 2626 | | | | |
| RS C4 | ORF1ab | ILGTVSWNL | ATTCTTGGAACTGTTTCTTGGAATTTG | 2059 | 2085 |
| ORF1ab | NSP3 | | | | |
| as | 1367- | | | | |
| linkers | 1375 | | | | |
| RS C4 | cleavage | KKQG | AAAAAACAGGGC | 2086 | 2097 |
| ORF1ab as | linker | | | | |
| linkers | | | | | |
| RS C4 | ORF3a | DLFMRIFTIGTVTLKQGEIKDATPSD | ACCTTACAATAGTGTAACTTCTTCAATTGTCATTACTTCAGGT | 2098 | 2919 |
| ORF1ab as | protein | FVRATATIPIQASLPFGWLIVGVALL | GGTGGTTATACTGAAAAATGGGAATCTGGAGTAAAAGACTGT | | |
| linkers | | AVFQSASKIITLKKRWQLALSKGVH | GATTTGTTTATGAGAATCTTCACAATTGGAACTGTAACTTTGA | | |
| | | FVCNLLLLFVTVYSHLLLVAAGLEA | AGCAAGGTGAAATCAAGGATGCTACTCCTTCAGATTTTGTTC | | |
| | | PFLYLYALVYFLQSINFVRIIMRLWL | GCGCTACTGCAACGATACCGATACAAGCCTCACTCCCTTTCG | | |
| | | CWKCRSKNPLLYDANYFLCWHTN | GATGGCTTATTGTTGGCGTTGCACTTCTTGCTGTTTTTCAGAG | | |
| | | CYDYCIPYNSVTSSIVITSGDGTTSPI | CGCTTCCAAAATCATAACCCTCAAAAAGAGATGGCAACTAGC | | |
| | | SEHDYQIGGYTEKWESGVKDCVVL | ACTCTCCAAGGGTGTTCACTTTGTTTGCAACTTGCTGTTGTTG | | |
| | | HSYFTSDYYQLYSTQLSTDTGVEH | TTTGTAACAGTTTACTCACACCTTTTGCTCGTTGCTGCTGGCCT | | |
| | | VTFFIYNKIVDEPEEHVQIHTIDGSS | TGAAGCCCCTTTTCTCTATCTTTATGCTTTAGTCTACTTCTTGC | | |
| | | GVVNPVMEPIYDEPTTTTSVPL | AGAGTATAAACTTTGTAAGAATAATAATGAGGCTTTGGCTTT | | |
| | | | GCTGGAAATGCCGTTCCAAAAACCCATTACTTTATGATGCCA | | |
| | | | ACTATTTTCTTTGCTGGCATACTAATTGTTACGACTATTGTAT | | |
| | | | GATGGCACAACAAGTCCTATTTCTGAACATGACTACCAGATT | | |
| | | | GTTGTATTACACAGTTACTTCACTTCAGACTATTACCAGCTGT | | |
| | | | ACTCAACTCAATTGAGTACAGACACTGGTGTTGAACATGTTA | | |
| | | | CCTTCTTCATCTACAATAAAATTGTTGATGAGCCTGAAGAACA | | |
| | | | TGTCCAAATTCACACAATCGACGGTTCATCCGGAGTTGTTAAT | | |
| | | | CCAGTAATGGAACCAATTTATGATGAACCGACGACGACTACT | | |
| | | | AGCGTGCCTTTG | | |
| RS C4 | cleavage | RRSY | CGCCGGAGTTAC | 2920 | 2931 |
| ORF1ab as | linker | | | | |
| linkers | | | | | |
| RS C4 | ORF1ab | LLSAGIFGA | TTATTATCAGCTGGTATTTTTGGTGCT | 2932 | 2958 |
| ORF1ab as | NSP3 | | | | |
| linkers | 1148- | | | | |
| | 1156 | | | | |
| RS C4 | ORF1ab | ITDVFYKENSY | ATTACGGATGTTTTCTACAAAGAAAACAGTTAC | 2959 | 2991 |
| ORF1ab | NSP3 | | | | |
| as | 1863- | | | | |
| linkers | 1873 | | | | |
| RS C4 | ORF1ab | KVPTDNYITTY | AAAGTGCCAACAGACAATTATATAACCACTTAC | 2992 | 3024 |
| ORF1ab as | NSP3 | | | | |
| linkers | 1319- | | | | |
| | 1329 | | | | |
| RS C4 | cleavage | ARMA | GCGCGAATGGCG | 3025 | 3036 |
| ORFlab as | linker | | | | |
| linkers | | | | | |
| RS C4 | ORF1ab | APKEIIFLEGETL | GCCCCAAAAGAAATTATCTTCTTAGAGGGAGAAACACTT | 3037 | 3075 |
| ORF1ab as | NSP2 | | | | |
| linkers | 735-747 | | | | |
| RS C4 | ORF1ab | FGDDTVIEV | TTTGGTGATGACACTGTGATAGAAGTG | 3076 | 3102 |
| ORFlab as | NSP3 | | | | |
| linkers | 825-833 | | | | |
| RS C4 | ORF1ab | AIILASFSAST | GCCATTATTTTGGCATCTTTTTCTGCTTCCACA | 3103 | 3135 |
| ORFlab as | NSP2 474-484 | | | | |
| linkers | | | | | |
| RS C4 | cleavage | LLVQ | CTGCTGGTCCAG | 3136 | 3147 |
| ORF1ab as | linker | | | | |
| linkers | | | | | |
| RS C4 | membrane | ADSNGTITVEELKKLLEQWNLVIGF | GCAGATTCCAACGGTACTATTACCGTTGAAGAGCTTAAAAAG | 3148 | 3810 |
| ORFlab as | glycoprotein | LFLTWICLLQFAYANRNRFLYIIKLI | CTCCTTGAACAATGGAACCTAGTAATAGGTTTCCTATTCCTTA | | |
| linkers | | FLWLLWPVTLACFVLAAVYRINWI | CATGGATTTGTCTTCTACAATTTGCCTATGCCAACAGGAATAG | | |
| | | TGGIAIAMACLVGLMWLSYFIASFR | GTTTTTGTATATAATTAAGTTAATTTTCCTCTGGCTGTTATGGC | | |
| | | LFARTRSMWSFNPETNILLNVPLHG | CAGTAACTTTAGCTTGTTTTGTGCTTGCTGCTGTTTACAGAAT | | |
| | | TILTRPLLESELVIGAVILRGHLRIAG | AAATTGGATCACCGGTGGAATTGCTATCGCAATGGCTTGTCTT | | |
| | | HHLGRCDIKDLPKEITVATSRTLSY | GTAGGCTTGATGTGGCTCAGCTACTTCATTGCTTCTTTCAGAC | | |
| | | YKLGASQRVAGDSGFAAYSRYRIG | TGTTTGCGCGTACGCGTTCCATGTGGTCATTCAATCCAGAAAC | | |
| | | NYKLNTDHSSSSDNIALLVQ | TAACATTCTTCTCAACGTGCCACTCCATGGCACTATTCTGACC | | |
| | | | AGACCGCTTCTAGAAAGTGAACTCGTAATCGGAGCTGTGATC | | |
| | | | CTTCGTGGACATCTTCGTATTGCTGGACACCATCTAGGACGCT | | |
| | | | GTGACATCAAGGACCTGCCTAAAGAAATCACTGTTGCTACAT | | |
| | | | CACGAACGCTTTCTTATTACAAATTGGGAGCTTCGCAGCGTGT | | |
| | | | AGCAGGTGACTCAGGTTTTGCTGCATACAGTCGCTACAGGAT | | |
| | | | TGGCAACTATAAATTAAACACAGACCATTCCAGTAGCAGTGA | | |
| | | | CAATATTGCTTTGCTTGTACAG | | |
| RS C4 | end GSS | GGSLGGGGSG | GGTGGTTCTCTTGGCGGAGGGGGTTCGGGA | 3811 | 3840 |
| ORF1ab as | | | | | |
| linkers | | | | | |
| RS C4 | MITD | IVGIVAGLAVLAVVVIGAVVATVM | ATCGTGGGAATTGTGGCAGGACTGGCAGTGCTGGCCGTGGTG | 3841 | 4011 |
| ORF1ab as | | CRRKSSGGKGGSYSQAASSDSAQG | GTGATCGGAGCCGTGGTGGCTACCGTGATGTGCAGACGGAAG | | |
| linkers | | SDVSLTA** | TCCAGCGGAGGCAAGGGCGGCAGCTACAGCCAGGCCGCCAG | | |
| | | | CTCTGATAGCGCCCAGGGCAGCGACGTGTCACTGACAGCCTA | | |
| | | | GTAA | | |

TABLE 10
Group 2 Construct-maps

| CONSTRUCT | Segment | | | | |
|---|---|---|---|---|---|
| Name | NAME | AA SEQUENCE | DNA SEQUENCE | START | END |
| RS C5 2300 | SP1 | MRVMAPRTLILLLSGALALTETWAG | ATGAGAGTGATGGCCCCCAGAACCC | 1 | 78 |
| | | S | TGATCCTGCTGCTGTCTGGCGCCCT | | |
| | | | GGCCCTGACAGAGACATGGGCCGGA | | |
| | | | AGC | | |
| RS C5 2300 | start GSS | GGSGGGGSGG | GGAGGTTCCGGAGGAGGCGGCAGTG | 79 | 108 |
| | | | GCGGC | | |
| RS C5 2300 | N without | KDLSPRWYFYYLGTGPEAGLPYGAN | GAGGCTTCTAAGAAGCCTCGGCAAA | 109 | 1062 |
| | Orf9b | KDGIIWVATEGALNTPKDHIGTRNP | AACGTACTGCCACTAAAAAGATCTC | | |
| | | ANNAAIVLQLPQGTTLPKGFYAEGS | AGTCCAAGATGGTATTTCTACTACC | | |
| | | RGGSQASSRSSSRSRNSSRNSTPGS | TAGGAACTGGGCCAGAAGCTGGACT | | |
| | | SRGTSPARMAGNGGDAALALLLLDR | TCCCTATGGTGCTAACAAAGACGGC | | |
| | | LNQLESKMSGKGQQQQGQTVTKKSA | ATCATATGGGTTGCAACTGAGGGAG | | |
| | | AEASKKPRQKRTATKAYNVTQAFGR | CCTTGAATACACCAAAAGATCACAT | | |
| | | RGPEQTQGNFGDQELIRQGTDYKHW | TGGCACCCGCAATCCTGCTAACAAT | | |
| | | PQIAQFAPSASAFFGMSRIGMEVTP | GCTGCAATCGTGCTACAACTTCCTC | | |
| | | SGTWLTYTGAIKLDDKDPNFKDQVI | AAGGAACAACATTGCCAAAAGGCTT | | |
| | | LLNKHIDAYKTFPPTEPKKDKKKKA | CTACGCAGAAGGGAGCAGAGGCGGC | | |
| | | DETQALPQRQKKQQTVTLLPAADLD | AGTCAAGCCTCTTCTCGTTCCTCAT | | |
| | | DFSKQLQQSMSSADSTQA | CACGTAGTCGCAACAGTTCAAGAAA | | |
| | | | TTCAACTCCAGGCAGCAGTAGGGGA | | |
| | | | ACTTCTCCTGCTAGAATGGCTGGCA | | |
| | | | ATGGCGGTGATGCTGCTCTTGCTTT | | |
| | | | GCTGCTGCTTGACAGATTGAACCAG | | |
| | | | CTTGAGAGCAAAATGTCTGGTAAAG | | |
| | | | GCCAACAACAACAAGGCCAAACTGT | | |
| | | | CACTAAGAAATCTGCTGCTAGCATA | | |
| | | | CAATGTAACACAAGCTTTCGGCAGA | | |
| | | | CGTGGTCCAGAACAAACCCAAGGAA | | |
| | | | ATTTTGGGGACCAGGAACTAATCAG | | |
| | | | ACAAGGAACTGATTACAAACATTGG | | |
| | | | CCGCAAATTGCACAATTTGCCCCCA | | |
| | | | GCGCTTCAGCGTTCTTCGGAATGTC | | |
| | | | GCGCATTGGCATGGAAGTCACACCT | | |
| | | | TCGGGAACGTGGTTGACCTACACAG | | |
| | | | GTGCCATCAAATTGGATGACAAAGA | | |
| | | | TCCAAATTTCAAAGATCAAGTCATT | | |
| | | | TTGCTGAATAAGCATATTGACGCAT | | |
| | | | ACAAAACATTCCCACCAACAGAGCC | | |
| | | | TAAAAAGGACAAAAAGAAGAAGGCT | | |
| | | | GATGAAACTCAAGCCTTACCGCAGA | | |
| | | | GACAGAAGAAACAGCAAACTGTGAC | | |
| | | | TCTTCTTCCTGCTGCAGATTTGGAT | | |
| | | | GATTTCTCCAAACAATTGCAACAAT | | |
| | | | CCATGAGCAGTGCTGACTCAACTCA | | |
| | | | GGCC | | |
| RS C5 2300 | cleavage | FRAC | TTCCGCGCGTGC | 1063 | 1074 |
| | linker | | | | |
| RS C5 2300 | 807-816 | MVTNNTFTLK | ATGGTAACAAACAATACCTTCACAC | 1075 | 1104 |
| | ORF1ab | | TCAAA | | |
| | NSP2 | | | | |
| RS C5 2300 | ORF1ab | VPHVGEIPVAY | GTCCCTCATGTGGGCGAAATACCAG | 1105 | 1152 |
| | NSP1 | RKVLL | TGGCTTACCGCAAGGTTCTTCTT | | |
| | 108-123 | | | | |
| RS C5 2300 | ORF1ab | KTIQPRVEK | AAGACTATTCAACCAAGGGTTGAAA | 1153 | 1179 |
| | NSP2 | | AG | | |
| | 282-290 | | | | |
| RS C5 2300 | ORF1ab | YLFDESGEFKL | TACTTATTTGATGAGTCTGGTGAGT | 1180 | 1212 |
| | NSP3 | | TTAAATTG | | |
| | 906-916 | | | | |
| RS C5 2300 | ORF1ab | SEVGPEHSLAEY | TCAGAAGTAGGACCTGAGCATAGTC | 1213 | 1248 |
| | NSP2 | | TTGCCGAATAC | | |
| | 376-387 | | | | |
| RS C5 2300 | ORF1ab | YIFFASFYY | TACATCTTCTTTGCATCATTTTATT | 1249 | 1275 |
| | NSP3 | | AT | | |
| | 2384- | | | | |
| | 2392 | | | | |
| RS C5 2300 | cleavage | KRCF | AAAAGATGTTTT | 1276 | 1287 |
| | linker | | | | |
| RS C5 2300 | ORF1ab | HTTDPSFLGRYMSAL | CACACAACTGATCCTAGTTTTCTGG | 1288 | 1332 |
| | NSP3 | | GTAGGTACATGTCAGCATTA | | |
| | 1636- | | | | |
| | 1650 | | | | |
| RS C5 2300 | ORF1ab | FADDLNQLTGY | TTTGCTGATGATTTAAACCAGTTAA | 1333 | 1365 |
| | NSP3 | | CTGGTTAT | | |
| | 1937- | | | | |
| | 1947 | | | | |
| | ORF1ab | HTDFSSEIIGY | CATACTGACTTTTCAAGTGAAATCA | 1366 | 1398 |
| RS C5 2300 | NSP4 | | TAGGATAC | | |
| | 2799- | | | | |
| | 2809 | | | | |
| RS C5 2300 | ORF1ab | QLMCQPILL | CAGCTTATGTGTCAACCTATACTGT | 1399 | 1425 |
| | NSP3 | | TA | | |
| | 2563- | | | | |
| | 2571 | | | | |
| RS C5 2300 | ORF1ab | AEAELAKNVSL | GCAGAAGCTGAACTTGCAAAGAATG | 1426 | 1458 |
| | NSP3 | | TGTCCTTA | | |
| | 2616- | | | | |
| | 2626 | | | | |
| RS C5 2300 | ORF1ab | ILGTVSWNL | ATTCTTGGAACTGTTTCTTGGAATT | 1459 | 1485 |
| | NSP3 | | TG | | |
| | 1367- | | | | |
| | 1375 | | | | |
| RS C5 2300 | cleavage | KKRY | AAAAAGCGTTAT | 1486 | 1497 |
| | linker | | | | |
| RS C5 2300 | ORF1ab | LLSAGIFGA | TTATTATCAGCTGGTATTTTTGGTG | 1498 | 1524 |
| | NSP3 | | CT | | |
| | 1148- | | | | |
| | 1156 | | | | |
| RS C5 2300 | ORF1ab | ITDVFYKENSY | ATTACGGATGTTTTCTACAAAGAAA | 1525 | 1557 |
| | NSP3 | | ACAGTTAC | | |
| | 1863- | | | | |
| | 1873 | | | | |
| RS C5 2300 | ORF1ab | KVPTDNYITTY | AAAGTGCCAACAGACAATTATATAA | 1558 | 1590 |
| | NSP3 | | CCACTTAC | | |
| | 1319- | | | | |
| | 1329 | | | | |
| RS C5 2300 | cleavage | ARMA | GCCCGAATGGCT | 1591 | 1602 |
| | linker | | | | |
| RS C5 2300 | ORF1ab | APKEIIFLEGETL | GCCCCAAAAGAAATTATCTTCTTAG | 1603 | 1641 |
| | NSP2 | | AGGGAGAAACACTT | | |
| | 735-747 | | | | |
| RS C5 2300 | ORF1ab | FGDDTVIEV | TTTGGTGATGACACTGTGATAGAAG | 1642 | 1668 |
| | NSP3 | | TG | | |
| | 825-833 | | | | |
| RS C5 2300 | ORF1ab | AIILASFSAST | GCCATTATTTTGGCATCTTTTTCTG | 1669 | 1701 |
| | NSP2 | | CTTCCACA | | |
| | 474-484 | | | | |
| RS C5 2300 | cleavage | RRSG | AGGAGGTCTGGA | 1702 | 1713 |
| | linker | | | | |
| RS C5 2300 | membrane | ADSNGTITVEELKKLLEQWNLVIGF | GCAGATTCCAACGGTACTATTACCG | 1714 | 2376 |
| | glycoprotein | LFLTWICLLQFAYANRNRFLYIIKL | TTGAAGAGCTTAAAAAGCTCCTTGA | | |
| | | IFLWLLWPVTLACFVLAAVYRINWI | ACAATGGAACCTAGTAATAGGTTTC | | |
| | | TGGIAIAMACLVGLMWLSYFIASFR | CTATTCCTTACATGGATTTGTCTTC | | |
| | | LFARTRSMWSFNPETNILLNVPLHG | TACAATTTGCCTATGCCAACAGGAA | | |
| | | TILTRPLLESELVIGAVILRGHLRI | TAGGTTTTTGTATATAATTAAGTTA | | |
| | | AGHHLGRCDIKDLPKEITVATSRTL | ATTTTCCTCTGGCTGTTATGGCCAG | | |
| | | SYYKLGASQRVAGDSGFAAYSRYRI | TAACTTTAGCTTGTTTTGTGCTTGC | | |
| | | GNYKLNTDHSSSSDNIALLVQ | TGCTGTTTACAGAATAAATTGGATC | | |
| | | | ACCGGTGGAATTGCTATCGCAATGG | | |
| | | | CTTGTCTTGTAGGCTTGATGTGGCT | | |
| | | | CAGCTACTTCATTGCTTCTTTCAGA | | |
| | | | CTGTTTGCGCGTACGCGTTCCATGT | | |
| | | | GGTCATTCAATCCAGAAACTAACAT | | |
| | | | TCTTCTCAACGTGCCACTCCATGGC | | |
| | | | ACTATTCTGACCAGACCGCTTCTAG | | |
| | | | AAAGTGAACTCGTAATCGGAGCTGT | | |
| | | | GATCCTTCGTGGACATCTTCGTATT | | |
| | | | GCTGGACACCATCTAGGACGCTGTG | | |
| | | | ACATCAAGGACCTGCCTAAAGAAAT | | |
| | | | CACTGTTGCTACATCACGAACGCTT | | |
| | | | TCTTATTACAAATTGGGAGCTTCGC | | |
| | | | AGCGTGTAGCAGGTGACTCAGGTTT | | |
| | | | TGCTGCATACAGTCGCTACAGGATT | | |
| | | | GGCAACTATAAATTAAACACAGACC | | |
| | | | ATTCCAGTAGCAGTGACAATATTGC | | |
| | | | TTTGCTTGTACAG | | |
| RS C5 2300 | end GSS | GGSLGGGGSG | GGTGGTTCTCTTGGCGGAGGGGGTT | 2377 | 2406 |
| | | | CGGGA | | |
| RS C5 2300 | MITD | IVGIVAGLAVLAVVVIGAVVATVMC | ATCGTGGGAATTGTGGCAGGACTGG | 2407 | 2577 |
| | | RRKSSGGKGGSYSQAASSDSAQGSD | CAGTGCTGGCCGTGGTGGTGATCGG | | |
| | | VSLTA** | AGCCGTGGTGGCTACCGTGATGTGC | | |
| | | | AGACGGAAGTCCAGCGGAGGCAAGG | | |
| | | | GCGGCAGCTACAGCCAGGCCGCCAG | | |
| | | | CTCTGATAGCGCCCAGGGCAGCGAC | | |
| | | | GTGTCACTGACAGCCTAGTAA | | |
| RS C6 1200 | SP1 | MRVMAPRTLILLLSGALALTETWAG | ATGAGAGTGATGGCCCCCAGAACCC | 1 | 78 |
| | | IS | TGATCCTGCTGCTGTCTGGCGCCCT | | |
| | | | GGCCCTGACAGAGACATGGGCCGGA | | |
| | | | AGC | | |
| RS C6 1200 | start GSS | GGSGGGGSGG | GGAGGTTCCGGAGGAGGCGGCAGTG | 79 | 108 |
| | | | GCGGC | | |
| RS C6 1200 | N 99 | RMAGNGGDAALALLLLDRLNQLESK | AGAATGGCTGGCAATGGCGGTGATG | 109 | 207 |
| | | MSGKGQQQ | CTGCTCTTGCTTTGCTGCTGCTTGA | | |
| | | | CAGATTGAACCAGCTTGAGAGCAAA | | |
| | | | ATGTCTGGTAAAGGCCAACAACAA | | |
| RS C6 1200 | cleavage | MRAC | ATGAGAGCGTGC | 208 | 219 |
| | linker | | | | |
| RS C6 1200 | ORF1ab | MVTNNTFTLK | ATGGTAACAAACAATACCTTCACAC | 220 | 249 |
| | NSP2 | | TCAAA | | |
| | 807-816 | | | | |
| RS C6 1200 | ORF1ab | VPHVGEIPVAYRKVLL | GTCCCTCATGTGGGCGAAATACCAG | 250 | 297 |
| | NSP1 | | TGGCTTACCGCAAGGTTCTTCTT | | |
| | 108-123 | | | | |
| RS C6 1200 | ORF1ab | KTIQPRVEK | AAGACTATTCAACCAAGGGTTGAAA | 298 | 324 |
| | NSP2 | | AG | | |
| | 282-290 | | | | |
| RS C6 1200 | ORF1ab | YLFDESGEFKL | TACTTATTTGATGAGTCTGGTGAGT | 325 | 357 |
| | NSP3 | | TTAAATTG | | |
| | 906-916 | | | | |
| RS C6 1200 | ORF1ab | SEVGPEHSLAEY | TCAGAAGTAGGACCTGAGCATAGTC | 358 | 393 |
| | NSP2 | | TTGCCGAATAC | | |
| | 376-387 | | | | |
| RS C6 1200 | cleavage | KMCG | AAAATGTGCGGA | 394 | 405 |
| | linker | | | | |
| RS C6 1200 | N 201 | YKHWPQIAQFAPSASAFFGMSRIGM | TACAAACATTGGCCGCAAATTGCAC | 406 | 606 |
| | | EVTPSGTWLTYTGAIKLDDKDPNFK | AATTTGCCCCCAGCGCTTCAGCGTT | | |
| | | DQVILLNKHIDAYKTFP | CTTCGGAATGTCGCGCATTGGCATG | | |
| | | | GAAGTCACACCTTCGGGAACGTGGT | | |
| | | | TGACCTACACAGGTGCCATCAAATT | | |
| | | | GGATGACAAAGATCCAAATTTCAAA | | |
| | | | GATCAAGTCATTTTGCTGAATAAGC | | |
| | | | ATATTGACGCATACAAAACATTCCC | | |
| | | | A | | |
| RS C6 1200 | cleavage | ARCA | GCTCGGTGTGCA | 607 | 618 |
| | linker | | | | |
| RS C6 1200 | ORF1ab | TTDPSFLGRYMSAL | ACAACTGATCCTAGTTTTCTGGGTA | 619 | 660 |
| | NSP3 | | GGTACATGTCAGCATTA | | |
| | 1635- | | | | |
| | 1650 | | | | |
| RS C6 1200 | ORF1ab | FADDLNQLTGY | TTTGCTGATGATTTAAACCAGTTAA | 661 | 693 |
| | NSP3 | | CTGGTTAT | | |
| | 1937- | | | | |
| | 1947 | | | | |
| RS C6 1200 | ORF1ab | HTDFSSEIIGY | CATACTGACTTTTCAAGTGAAATCA | 694 | 726 |
| | NSP4 | | TAGGATAC | | |
| | 2799- | | | | |
| | 2809 | | | | |
| RS C6 1200 | ORF1ab | QLMCQPILL | CAGCTTATGTGTCAACCTATACTGT | 727 | 753 |
| | NSP3 | | TA | | |
| | 2563- | | | | |
| | 2571 | | | | |
| RS C6 1200 | ORF1ab | AEAELAKNVSL | GCAGAAGCTGAACTTGCAAAGAATG | 754 | 786 |
| | NSP3 | | TGTCCTTA | | |
| | 2616- | | | | |
| | 2626 | | | | |
| RS C6 1200 | ORF1ab | ILGTVSWNL | ATTCTTGGAACTGTTTCTTGGAATT | 787 | 813 |
| | NSP3 | | TG | | |
| | 1367- | | | | |
| | 1375 | | | | |
| RS C6 1200 | cleavage | KKQG | AAAAAACAAGGT | 814 | 825 |
| | linker | | | | |
| RS C6 1200 | M 201 | FAYANRNRFLYIIKLIFLWLLWPVT | TTTGCCTATGCCAACAGGAATAGGT | 826 | 1026 |
| | | LACFVLAAVYRINWITGGIAIAMAC | TTTTGTATATAATTAAGTTAATTTT | | |
| | | LVGLMWLSYFIASFRLF | CCTCTGGCTGTTATGGCCAGTAACT | | |
| | | | TTAGCTTGTTTTGTGCTTGCTGCTG | | |
| | | | TTTACAGAATAAATTGGATCACCGG | | |
| | | | TGGAATTGCTATCGCAATGGCTTGT | | |
| | | | CTTGTAGGCTTGATGTGGCTCAGCT | | |
| | | | ACTTCATTGCTTCTTTCAGACTGTT | | |
| | | | T | | |
| RS C6 1200 | cleavage | YRSY | TACCGCTCCTAT | 1027 | 1038 |
| | linker | | | | |
| RS C6 1200 | ORF1ab | LLSAGIFGA | TTATTATCAGCTGGTATTTTTGGTG | 1039 | 1065 |
| | NSP3 | | CT | | |
| | 1148- | | | | |
| | 1156 | | | | |
| RS C6 1200 | ORF1ab | ITDVFYKENSY | ATTACGGATGTTTTCTACAAAGAAA | 1066 | 1098 |
| | NSP3 | | ACAGTTAC | | |
| | 1863- | | | | |
| | 1873 | | | | |
| RS C6 1200 | ORF1ab | KVPTDNYITTY | AAAGTGCCAACAGACAATTATATAA | 1099 | 1131 |
| | NSP3 | | CCACTTAC | | |
| | 1319- | | | | |
| | 1329 | | | | |
| RS C6 1200 | cleavage | ARMA | GCTCGGATGGCT | 1132 | 1143 |
| | linker | | | | |
| RS C6 1200 | ORF1ab | APKEIIFLEGETL | GCCCCAAAAGAAATTATCTTCTTAG | 1144 | 1182 |
| | NSP2 | | AGGGAGAAACACTT | | |
| | 735-747 | | | | |
| RS C6 1200 | ORF1ab | FGDDTVIEV | TTTGGTGATGACACTGTGATAGAAG | 1183 | 1209 |
| | NSP3 | | TG | | |
| | 825-833 | | | | |
| RS C6 1200 | cleavage | SMFN | TCTATGTTTAAC | 1210 | 1221 |
| | linker | | | | |
| RS C6 1200 | M 99 | LGRCDIKDLPKEITVATSRTLSYYK | CTAGGACGCTGTGACATCAAGGACC | 1222 | 1320 |
| | | LGASQRVA | TGCCTAAAGAAATCACTGTTGCTAC | | |
| | | | ATCACGAACGCTTTCTTATTACAAA | | |
| | | | TTGGGAGCTTCGCAGCGTGTAGCA | | |
| RS C6 1200 | end GSS | GGSLGGGGSG | GGTGGTTCTCTTGGCGGAGGGGGTT | 1321 | 1350 |
| | | | CGGGA | | |
| RS C6 1200 | MITD | IVGIVAGLAVLAVVVIGAVVATVMC | ATCGTGGGAATTGTGGCAGGACTGG | 1351 | 1521 |
| | | RRKSSGGKGGSYSQAASSDSAQGSD | CAGTGCTGGCCGTGGTGGTGATCGG | | |
| | | VSLTA** | AGCCGTGGTGGCTACCGTGATGTGC | | |
| | | | AGACGGAAGTCCAGCGGAGGCAAGG | | |
| | | | GCGGCAGCTACAGCCAGGCCGCCAG | | |
| | | | CTCTGATAGCGCCCAGGGCAGCGAC | | |
| | | | GTGTCACTGACAGCCTAGTAA | | |
| RS C7 1500 | SP1 | MRVMAPRTLILLLSGALALTETWAG | ATGAGAGTGATGGCCCCCAGAACCC | 1 | 78 |
| M chunks | | IS | TGATCCTGCTGCTGTCTGGCGCCCT | | |
| | | | GGCCCTGACAGAGACATGGGCCGGA | | |
| | | | AGC | | |
| RS C7 1500 | start GSS | GGSGGGGSGG | GGAGGTTCCGGAGGAGGCGGCAGTG | 79 | 108 |
| M chunks | | | GCGGC | | |
| RS C7 1500 | N 501 | SPARMAGNGGDAALALLLLDRLNQL | TCTCCTGCTAGAATGGCTGGCAATG | 109 | 609 |
| M chunks | | ESKMSGKGQQQQGQTVTKKSAAEAS | GCGGTGATGCTGCTCTTGCTTTGCT | | |
| | | KKPRQKRTATKAYNVTQAFGRRGPE | GCTGCTTGACAGATTGAACCAGCTT | | |
| | | QTQGNFGDQELIRQGTDYKHWPQIA | GAGAGCAAAATGTCTGGTAAAGGCC | | |
| | | QFAPSASAFFGMSRIGMEVTPSGTW | AACAACAACAAGGCCAAACTGTCAC | | |
| | | LTYTGAIKLDDKDPNFKDQVILLNK | TAAGAAATCTGCTGCTGAGGCTTCT | | |
| | | HIDAYKTFPPTEPKKDK | AAGAAGCCTCGGCAAAAACGTACTG | | |
| | | | CCACTAAAGCATACAATGTAACACA | | |
| | | | AGCTTTCGGCAGACGTGGTCCAGAA | | |
| | | | CAAACCCAAGGAAATTTTGGGGACC | | |
| | | | AGGAACTAATCAGACAAGGAACTGA | | |
| | | | TTACAAACATTGGCCGCAAATTGCA | | |
| | | | CAATTTGCCCCCAGCGCTTCAGCGT | | |
| | | | TCTTCGGAATGTCGCGCATTGGCAT | | |
| | | | GGAAGTCACACCTTCGGGAACGTGG | | |
| | | | TTGACCTACACAGGTGCCATCAAAT | | |
| | | | TGGATGACAAAGATCCAAATTTCAA | | |
| | | | AGATCAAGTCATTTTGCTGAATAAG | | |
| | | | CATATTGACGCATACAAAACATTCC | | |
| | | | CACCAACAGAGCCTAAAAAGGACAA | | |
| | | | A | | |
| RS C7 1500 | cleavage | FKAA | TTCAAAGCCGCA | 610 | 621 |
| M chunks | linker | | | | |
| RS C7 1500 | ORF1ab | MVTNNTFTLK | ATGGTAACAAACAATACCTTCACAC | 622 | 651 |
| M chunks | NSP2 | | TCAAA | | |
| | 807-816 | | | | |
| RS C7 1500 | NSP1 | VPHVGEIPVAYRKVLL | GTCCCTCATGTGGGCGAAATACCAG | 652 | 699 |
| M chunks | ORF1ab | | TGGCTTACCGCAAGGTTCTTCTT | | |
| | 108-123 | | | | |
| RS C7 1500 | ORF1ab | KTIQPRVEK | AAGACTATTCAACCAAGGGTTGAAA | 700 | 726 |
| M chunks | NSP2 | | AG | | |
| | 282-290 | | | | |
| RS C7 1500 | ORF1ab | YLFDESGEFKL | TACTTATTTGATGAGTCTGGTGAGT | 727 | 759 |
| M chunks | NSP3 | | TTAAATTG | | |
| | 906-916 | | | | |
| RS C7 1500 | ORF1ab | SEVGPEHSLAEY | TCAGAAGTAGGACCTGAGCATAGTC | 760 | 795 |
| M chunks | NSP2 | | TTGCCGAATAC | | |
| | 376-387 | | | | |
| RS C7 1500 | ORF1ab | YIFFASFYY | TACATCTTCTTTGCATCATTTTATT | 796 | 822 |
| M chunks | NSP3 | | AT | | |
| | 2384- | | | | |
| | 2392 | | | | |
| RS C7 1500 | cleavage | KRNG | AAGAGGAATGGT | 823 | 834 |
| M chunks | linker | | | | |
| RS C7 1500 | M 201 | FAYANRNRFLYIIKLIFLWLLWPVT | TTTGCCTATGCCAACAGGAATAGGT | 835 | 1035 |
| M chunks | | LACFVLAAVYRINWITGGIAIAMAC | TTTTGTATATAATTAAGTTAATTTT | | |
| | | LVGLMWLSYFIASFRLF | CCTCTGGCTGTTATGGCCAGTAACT | | |
| | | | TTAGCTTGTTTTGTGCTTGCTGCTG | | |
| | | | TTTACAGAATAAATTGGATCACCGG | | |
| | | | TGGAATTGCTATCGCAATGGCTTGT | | |
| | | | CTTGTAGGCTTGATGTGGCTCAGCT | | |
| | | | ACTTCATTGCTTCTTTCAGACTGTT | | |
| | | | T | | |
| RS C7 1500 | cleavage | YNSF | TACAATTCTTTC | 1036 | 1047 |
| M chunks | linker | | | | |
| RS C7 1500 | ORF1ab | HTTDPSFLGRYMSAL | CACACAACTGATCCTAGTTTTCTGG | 1048 | 1092 |
| M chunks | NSP3 | | GTAGGTACATGTCAGCATTA | | |
| | 1636- | | | | |
| | 1650 | | | | |
| RS C7 1500 | ORF1ab | FADDLNQLTGY | TTTGCTGATGATTTAAACCAGTTAA | 1093 | 1125 |
| M chunks | NSP3 | | CTGGTTAT | | |
| | 1937- | | | | |
| | 1947 | | | | |
| RS C7 1500 | ORF1ab | HTDFSSEIIGY | CATACTGACTTTTCAAGTGAAATCA | 1126 | 1158 |
| M chunks | NSP4 | | TAGGATAC | | |
| | 2799- | | | | |
| | 2809 | | | | |
| RS C7 1500 | ORF1ab | QLMCQPILL | CAGCTTATGTGTCAACCTATACTGT | 1159 | 1185 |
| M chunks | NSP3 | | TA | | |
| | 2563- | | | | |
| | 2571 | | | | |
| RS C7 1500 | ORF1ab | AEAELAKNVSL | GCAGAAGCTGAACTTGCAAAGAATG | 1186 | 1218 |
| M chunks | NSP3 | | TGTCCTTA | | |
| | 2616- | | | | |
| | 2626 | | | | |
| RS C7 1500 | ORF1ab | ILGTVSWNL | ATTCTTGGAACTGTTTCTTGGAATT | 1219 | 1245 |
| M chunks | NSP3 | | TG | | |
| | 1367- | | | | |
| | 1375 | | | | |
| RS C7 1500 | cleavage | KKNG | AAGAAAAACGGA | 1246 | 1257 |
| M chunks | linker | | | | |
| RS C7 1500 | M 99 | LGRCDIKDLPKEITVATSRTLSYYK | CTAGGACGCTGTGACATCAAGGACC | 1258 | 1356 |
| M chunks | | LGASQRVA | TGCCTAAAGAAATCACTGTTGCTAC | | |
| | | | ATCACGAACGCTTTCTTATTACAAA | | |
| | | | TTGGGAGCTTCGCAGCGTGTAGCA | | |
| RS C7 1500 | cleavage | YRSY | TACCGATCCTAC | 1357 | 1368 |
| M chunks | linker | | | | |
| RS C7 1500 | ORF1ab | LLSAGIFGA | TTATTATCAGCTGGTATTTTTGGTG | 1369 | 1395 |
| M chunks | NSP3 | | CT | | |
| | 1148- | | | | |
| | 1156 | | | | |
| RS C7 1500 | ORF1ab | ITDVFYKENSY | ATTACGGATGTTTTCTACAAAGAAA | 1396 | 1428 |
| M chunks | NSP3 | | ACAGTTAC | | |
| | 1863- | | | | |
| | 1873 | | | | |
| RS C7 1500 | ORF1ab | KVPTDNYITTY | AAAGTGCCAACAGACAATTATATAA | 1429 | 1461 |
| M chunks | NSP3 | | CCACTTAC | | |
| | 1319- | | | | |
| | 1329 | | | | |
| RS C7 1500 | cleavage | ARMA | GCTCGGATGGCG | 1462 | 1473 |
| M chunks | linker | | | | |
| RS C7 1500 | ORF1ab | APKEIIFLEGETL | GCCCCAAAAGAAATTATCTTCTTAG | 1474 | 1512 |
| M chunks | NSP2 | | AGGGAGAAACACTT | | |
| | 735-747 | | | | |
| RS C7 1500 | ORF1ab | FGDDTVIEV | TTTGGTGATGACACTGTGATAGAAG | 1513 | 1539 |
| M chunks | NSP3 | | TG | | |
| | 825-833 | | | | |
| RS C7 1500 | NSP2 | AIILASFSAST | GCCATTATTTTGGCATCTTTTTCTG | 1540 | 1572 |
| M chunks | ORF1ab | | CTTCCACA | | |
| | 474-484 | | | | |
| RS C7 1500 | cleavage | RRRG | AGGCGACGGGGT | 1573 | 1584 |
| M chunks | linker | | | | |
| RS C7 1500 | end GSS | GGSLGGGGSG | GGTGGTTCTCTTGGCGGAGGGGGTT | 1585 | 1614 |
| M chunks | | | CGGGA | | |
| RS C7 1500 | MITD | IVGIVAGLAVLAVVVIGAVVATVMC | ATCGTGGGAATTGTGGCAGGACTGG | 1615 | 1785 |
| M chunks | | RRKSSGGKGGSYSQAASSDSAQGSD | CAGTGCTGGCCGTGGTGGTGATCGG | | |
| | | VSLTA** | AGCCGTGGTGGCTACCGTGATGTGC | | |
| | | | AGACGGAAGTCCAGCGGAGGCAAGG | | |
| | | | GCGGCAGCTACAGCCAGGCCGCCAG | | |
| | | | CTCTGATAGCGCCCAGGGCAGCGAC | | |
| | | | GTGTCACTGACAGCCTAGTAA | | |
| RS C8 1500 | SP1 | MRVMAPRTLILLLSGALALTETWAG | ATGAGAGTGATGGCCCCCAGAACCC | 1 | 78 |
| M epitopes | | S | TGATCCTGCTGCTGTCTGGCGCCCT | | |
| | | | GGCCCTGACAGAGACATGGGCCGGA | | |
| | | | AGC | | |
| RS C8 1500 | start GSS | GGSGGGGSGG | GGAGGTTCCGGAGGAGGCGGCAGTG | 79 | 108 |
| M epitopes | | | GCGGC | | |
| RS C8 1500 | N 501 | SPARMAGNGGDAALALLLLDRLNQL | TCTCCTGCTAGAATGGCTGGCAATG | 109 | 609 |
| M epitopes | | ESKMSGKGQQQQGQTVTKKSAAEAS | GCGGTGATGCTGCTCTTGCTTTGCT | | |
| | | KKPRQKRTATKAYNVTQAFGRRGPE | GCTGCTTGACAGATTGAACCAGCTT | | |
| | | QTQGNFGDQELIRQGTDYKHWPQIA | GAGAGCAAAATGTCTGGTAAAGGCC | | |
| | | QFAPSASAFFGMSRIGMEVTPSGTW | AACAACAACAAGGCCAAACTGTCAC | | |
| | | LTYTGAIKLDDKDPNFKDQVILLNK | TAAGAAATCTGCTGCTGAGGCTTCT | | |
| | | HIDAYKTFPPTEPKKDK | AAGAAGCCTCGGCAAAAACGTACTG | | |
| | | | CCACTAAAGCATACAATGTAACACA | | |
| | | | AGCTTTCGGCAGACGTGGTCCAGAA | | |
| | | | CAAACCCAAGGAAATTTTGGGGACC | | |
| | | | AGGAACTAATCAGACAAGGAACTGA | | |
| | | | TTACAAACATTGGCCGCAAATTGCA | | |
| | | | CAATTTGCCCCCAGCGCTTCAGCGT | | |
| | | | TCTTCGGAATGTCGCGCATTGGCAT | | |
| | | | GGAAGTCACACCTTCGGGAACGTGG | | |
| | | | TTGACCTACACAGGTGCCATCAAAT | | |
| | | | TGGATGACAAAGATCCAAATTTCAA | | |
| | | | AGATCAAGTCATTTTGCTGAATAAG | | |
| | | | CATATTGACGCATACAAAACATTCC | | |
| | | | CACCAACAGAGCCTAAAAAGGACAA | | |
| | | | A | | |
| RS C8 1500 | cleavage | FRAC | TTTCGTGCGTGC | 610 | 621 |
| M epitopes | linker | | | | |
| RS C8 1500 | ORF1ab | MVTNNTFTLK | ATGGTAACAAACAATACCTTCACAC | 622 | 651 |
| M epitopes | NSP2 | | TCAAA | | |
| | 807-816 | | | | |
| RS C8 1500 | ORF1ab | VPHVGEIPVAYRKVLL | GTCCCTCATGTGGGCGAAATACCAG | 652 | 699 |
| M epitopes | NSP1 | | TGGCTTACCGCAAGGTTCTTCTT | | |
| | 108-123 | | | | |
| RS C8 1500 | ORF1ab | KTIQPRVEK | AAGACTATTCAACCAAGGGTTGAAA | 700 | 726 |
| M epitopes | NSP2 | | AG | | |
| | 282-290 | | | | |
| RS C8 1500 | ORF1ab | YLFDESGEFKL | TACTTATTTGATGAGTCTGGTGAGT | 727 | 759 |
| M epitopes | NSP3 | | TTAAATTG | | |
| | 906-916 | | | | |
| RS C8 1500 | ORF1ab | SEVGPEHSLAEY | TCAGAAGTAGGACCTGAGCATAGTC | 760 | 795 |
| M epitopes | NSP2 | | TTGCCGAATAC | | |
| | 376-387 | | | | |
| RS C8 1500 | ORF1ab | YIFFASFYY | TACATCTTCTTTGCATCATTTTATT | 796 | 822 |
| M epitopes | NSP3 | | AT | | |
| | 2384- | | | | |
| | 2392 | | | | |
| RS C8 1500 | cleavage | KRCF | AAGCGCTGTTTT | 823 | 834 |
| M epitopes | linker | | | | |
| RS C8 1500 | ORF1ab | HTTDPSFLGRYMSAL | CACACAACTGATCCTAGTTTTCTGG | 835 | 879 |
| M epitopes | NSP3 | | GTAGGTACATGTCAGCATTA | | |
| | 1636- | | | | |
| | 1650 | | | | |
| RS C8 1500 | ORF1ab | FADDLNQLTGY | TTTGCTGATGATTTAAACCAGTTAA | 880 | 912 |
| M epitopes | NSP3 | | CTGGTTAT | | |
| | 1937- | | | | |
| | 1947 | | | | |
| RS C8 1500 | ORF1ab | HTDFSSEIIGY | CATACTGACTTTTCAAGTGAAATCAT | 913 | 945 |
| M epitopes | NSP4 | | AGGATAC | | |
| | 2799- | | | | |
| | 2809 | | | | |
| RS C8 1500 | ORF1ab | QLMCQPILL | CAGCTTATGTGTCAACCTATACTGTTA | 946 | 972 |
| M epitopes | NSP3 | | | | |
| | 2563- | | | | |
| | 2571 | | | | |
| RS C8 1500 | ORF1ab | AEAELAKNVSL | GCAGAAGCTGAACTTGCAAAGAATGTG | 973 | 1005 |
| M epitopes | NSP3 | | TCCTTA | | |
| | 2616- | | | | |
| | 2626 | | | | |
| RS C8 1500 | ORF1ab | ILGTVSWNL | ATTCTTGGAACTGTTTCTTGGAATTTG | 1006 | 1032 |
| M epitopes | NSP3 | | | | |
| | 1367- | | | | |
| | 1375 | | | | |
| RS C8 1500 | cleavage | KKRY | AAAAAACGTTAC | 1033 | 1044 |
| M epitopes | linker | | | | |
| RS C8 1500 | ORF1ab | LLSAGIFGA | TTATTATCAGCTGGTATTTTTGGTGCT | 1045 | 1071 |
| M epitopes | NSP3 | | | | |
| | 1148- | | | | |
| | 1156 | | | | |
| RS C8 1500 | ORF1ab | ITDVFYKENSY | ATTACGGATGTTTTCTACAAAGAAAAC | 1072 | 1104 |
| M epitopes | NSP3 | | AGTTAC | | |
| | 1863- | | | | |
| | 1873 | | | | |
| RS C8 1500 | ORF1ab | KVPTDNYITTY | AAAGTGCCAACAGACAATTATATAACCA | 1105 | 1137 |
| M epitopes | NSP3 | | CTTAC | | |
| | 1319- | | | | |
| | 1329 | | | | |
| RS C8 1500 | cleavage | ARMA | GCGCGAATGGCA | 1138 | 1149 |
| M epitopes | linker | | | | |
| RS C8 1500 | ORF1ab | APKEIIFLEGETL | GCCCCAAAAGAAATTATCTTCTTAG | 1150 | 1188 |
| M epitopes | NSP2 | | AGGGAGAAACACTT | | |
| | 735-747 | | | | |
| RS C8 1500 | ORF1ab | FGDDTVIEV | TTTGGTGATGACACTGTGATAGAAG | 1189 | 1215 |
| M epitopes | NSP3 | | TG | | |
| | 825-833 | | | | |
| RS C8 1500 | ORF1ab | AIILASFSAST | GCCATTATTTTGGCATCTTTTTCTG | 1216 | 1248 |
| M epitopes | NSP2 | | CTTCCACA | | |
| | 474-484 | | | | |
| RS C8 1500 | cleavage | RRRG | CGCAGGCGCGGA | 1249 | 1260 |
| M epitopes | linker | | | | |
| RS C8 1500 | M 15-26 | KLLEQWNLVIGF | AAGCTCCTTGAACAATGGAACCTAG | 1261 | 1296 |
| M epitopes | | | TAATAGGTTTC | | |
| RS C8 1500 | M 41-71 | NRNRFLYIIKLIFLWLLWPVTLACF | AACAGGAATAGGTTTTTGTATATAA | 1297 | 1389 |
| M epitopes | | VLAAVY | TTAAGTTAATTTTCCTCTGGCTGTT | | |
| | | | ATGGCCAGTAACTTTAGCTTGTTTT | | |
| | | | GTGCTTGCTGCTGTTTAC | | |
| RS C8 1500 | M 136- | SELVIGAVILRGHLRIAGHHLGR | AGTGAACTCGTAATCGGAGCTGTGA | 1390 | 1458 |
| M epitopes | 158 | | TCCTTCGTGGACATCTTCGTATTGC | | |
| | | | TGGACACCATCTAGGACGC | | |
| RS C8 1500 | M 169- | TVATSRTLSYYKLGASQRV | ACTGTTGCTACATCACGAACGCTTT | 1459 | 1515 |
| M epitopes | 187 | | CTTATTACAAATTGGGAGCTTCGCA | | |
| | | | GCGTGTA | | |
| RS C8 1500 | cleavage | KRYS | AAACGCTACAGT | 1516 | 1527 |
| M epitopes | linker | | | | |
| RS C8 1500 | M 89-96 | GLMWLSYF | GGCTTGATGTGGCTCAGCTACTTC | 1528 | 1551 |
| M epitopes | | | | | |
| RS C8 1500 | cleavage | ARYA | GCGCGTTATGCC | 1552 | 1563 |
| M epitopes | linker | | | | |
| RS C8 1500 | end GSS | GGSLGGGGSG | GGTGGTTCTCTTGGCGGAGGGGGTT | 1564 | 1593 |
| M epitopes | | | CGGGA | | |
| RS C8 1500 | MITD | IVGIVAGLAVLAVVVIGAVVATVMC | ATCGTGGGAATTGTGGCAGGACTGG | 1594 | 1764 |
| M epitopes | | RRKSSGGKGGSYSQAASSDSAQGSD | CAGTGCTGGCCGTGGTGGTGATCGG | | |
| | | VSLTA** | AGCCGTGGTGGCTACCGTGATGTGC | | |
| | | | AGACGGAAGTCCAGCGGAGGCAAGG | | |
| | | | GCGGCAGCTACAGCCAGGCCGCCAG | | |
| | | | CTCTGATAGCGCCCAGGGCAGCGAC | | |
| | | | GTGTCACTGACAGCCTAGTAA | | |

TABLE 11
String sequences Group 1

| | | | AA | DNA |
|---|---|---|---|---|
| NAME | AA SEQUENCE | DNA SEQUENCE | LENGTH | LENGTH |
| RS C1- | NAMED SEGMENTS | | | |
| GSS | SP1-start GSS-nucleocapsid phosphoprotein-middle GSS-ORF9b protein-middle GSS- | | | |
| Linker | Orf1ab GSS-middle GSS-ORF3a protein-middle GSS-membrane glycoprotein-end GSS-MITD | | | |
| RS C1 | MRVMAPRTLILLLSGALALTETWAGSG | ATGAGAGTGATGGCCCCCAGAACCCTGATCCTGCTGCTG | 1369 | 4107 |
| GSS | GSGGGGSGGSDNGPQNQRNAPRITFGG | TCTGGCGCCCTGGCCCTGACAGAGACATGGGCCGGAAGC | | |
| linkers | PSDSTGSNQNGERSGARSKQRRPQGLP | GGCGGATCGGGGGGGGGGGGCTCGGGAGGATCTGATAA | | |
| | NNTASWFTALTQHGKEDLKFPRGQGVP | TGGACCCCAAAATCAGCGAAATGCACCCCGCATTACGTT | | |
| | INTNSSPDDQIGYYRRATRRIRGGDGKM | TGGTGGACCCTCAGATTCAACTGGCAGTAACCAGAATGG | | |
| | KDLSPRWYFYYLGTGPEAGLPYGANKD | AGAACGCAGTGGGGCGCGATCAAAACAACGTCGGCCCC | | |
| | GIIWVATEGALNTPKDHIGTRNPANNAA | AAGGTTTACCCAATAATACTGCGTCTTGGTTCACCGCTCT | | |
| | IVLQLPQGTTLPKGFYAEGSRGGSQASS | CACTCAACATGGCAAGGAAGACCTTAAATTCCCTCGAGG | | |
| | RSSSRSRNSSRNSTPGSSRGTSPARMAG | ACAAGGCGTTCCAATTAACACCAATAGCAGTCCAGATGA | | |
| | NGGDAALALLLLDRLNQLESKMSGKG | CCAAATTGGCTACTACCGAAGAGCTACCAGACGAATTCG | | |
| | QQQQGQTVTKKSAAEASKKPRQKRTAT | TGGTGGTGACGGTAAAATGAAAGATCTCAGTCCAAGATG | | |
| | KAYNVTQAFGRRGPEQTQGNFGDQELI | GTATTTCTACTACCTAGGAACTGGGCCAGAAGCTGGACT | | |
| | RQGTDYKHWPQIAQFAPSASAFFGMSRI | TCCCTATGGTGCTAACAAAGACGGCATCATATGGGTTGC | | |
| | GMEVTPSGTWLTYTGAIKLDDKDPNFK | AACTGAGGGAGCCTTGAATACACCAAAAGATCACATTG | | |
| | DQVILLNKHIDAYKTFPPTEPKKDKKKK | GCACCCGCAATCCTGCTAACAATGCTGCAATCGTGCTAC | | |
| | ADETQALPQRQKKQQTVTLLPAADLDD | AACTTCCTCAAGGAACAACATTGCCAAAAGGCTTCTACG | | |
| | FSKQLQQSMSSADSTQAGGSGGGGSGG | CAGAAGGGAGCAGAGGCGGCAGTCAAGCCTCTTCTCGTT | | |
| | DPKISEMHPALRLVDPQIQLAVTRMENA | CCTCATCACGTAGTCGCAACAGTTCAAGAAATTCAACTC | | |
| | VGRDQNNVGPKVYPIILRLGSPLSLNMA | CAGGCAGCAGTAGGGGAACTTCTCCTGCTAGAATGGCTG | | |
| | RKTLNSLEDKAFQLTPIAVQMTKLATTE | GCAATGGCGGTGATGCTGCTCTTGCTTTGCTGCTGCTTGA | | |
| | ELPDEFVVVTVKGGSGGGGSGGYHFFH | CAGATTGAACCAGCTTGAGAGCAAAATGTCTGGTAAAGG | | |
| | TTDPSFLGRYMSALFADDLNQLTGYHT | CCAACAACAACAAGGCCAAACTGTCACTAAGAAATCTG | | |
| | DFSSEIIGYQLMCQPILLAEAELAKNVSL | CTGCTGAGGCTTCTAAGAAGCCTCGGCAAAAACGTACTG | | |
| | ILGTVSWNLKRRYLLSAGIFGAITDVFY | CCACTAAAGCATACAATGTAACACAAGCTTTCGGCAGAC | | |
| | KENSYKVPTDNYITTYARMAAPKEIIFL | GTGGTCCAGAACAAACCCAAGGAAATTTTGGGGACCAG | | |
| | EGETLFGDDTVIEVAIILASFSASTRRMA | GAACTAATCAGACAAGGAACTGATTACAAACATTGGCC | | |
| | MVTNNTFTLKVPHVGEIPVAYRKVLLK | GCAAATTGCACAATTTGCCCCCAGCGCTTCAGCGTTCTTC | | |
| | TIQPRVEKYLFDESGEFKLSEVGPEHSLA | GGAATGTCGCGCATTGGCATGGAAGTCACACCTTCGGGA | | |
| | EYYIFFASFYYKRNGGGSGGGGSGGDL | ACGTGGTTGACCTACACAGGTGCCATCAAATTGGATGAC | | |
| | FMRIFTIGTVTLKQGEIKDATPSDFVRAT | AAAGATCCAAATTTCAAAGATCAAGTCATTTTGCTGAAT | | |
| | ATIPIQASLPFGWLIVGVALLAVFQSASK | AAGCATATTGACGCATACAAAACATTCCCACCAACAGAG | | |
| | UITLKKRWQLALSKGVHFVCNLLLLFVT | CCTAAAAAGGACAAAAAGAAGAAGGCTGATGAAACTCA | | |
| | VYSHLLLVAAGLEAPFLYLYALVYFLQ | AGCCTTACCGCAGAGACAGAAGAAACAGCAAACTGTGA | | |
| | SINFVRIIMRLWLCWKCRSKNPLLYDAN | CTCTTCTTCCTGCTGCAGATTTGGATGATTTCTCCAAACA | | |
| | YFLCWHTNCYDYCIPYNSVTSSIVITSG | ATTGCAACAATCCATGAGCAGTGCTGACTCAACTCAGGC | | |
| | DGTTSPISEHDYQIGGYTEKWESGVKDC | CGGGGGAAGTGGAGGAGGGGGATCTGGAGGGGACCCCA | | |
| | VVLHSYFTSDYYQLYSTQLSTDTGVEH | AAATCAGCGAAATGCACCCCGCATTACGTTTGGTGGACC | | |
| | VTFFIYNKIVDEPEEHVQIHTIDGSSGVV | CTCAGATTCAACTGGCAGTAACCAGAATGGAGAACGCA | | |
| | NPVMEPIYDEPTTTTSVPLGGSGGGGSG | GTGGGGCGCGATCAAAACAACGTCGGCCCCAAGGTTTAC | | |
| | GADSNGTITVEELKKLLEQWNLVIGFLF | CCAATAATACTGCGTCTTGGTTCACCGCTCTCACTCAACA | | |
| | LTWICLLQFAYANRNRFLYIIKLIFLWLL | TGGCAAGGAAGACCTTAAATTCCCTCGAGGACAAGGCGT | | |
| | WPVTLACFVLAAVYRINWITGGIAIAM | TCCAATTAACACCAATAGCAGTCCAGATGACCAAATTGG | | |
| | ACLVGLMWLSYFIASFRLFARTRSMWS | CTACTACCGAAGAGCTACCAGACGAATTCGTGGTGGTGA | | |
| | FNPETNILLNVPLHGTILTRPLLESELVIG | CGGTAAAAGGGGGAAGTGGAGGAGGGGGATCTGGAGGG | | |
| | AVILRGHLRIAGHHLGRCDIKDLPKEITV | TATCATTTCTTTCACACAACTGATCCTAGTTTTCTGGGTA | | |
| | ATSRTLSYYKLGASQRVAGDSGFAAYS | GGTACATGTCAGCATTATTTGCTGATGATTTAAACCAGTT | | |
| | RYRIGNYKLNTDHSSSSDNIALLVQGGS | AACTGGTTATCATACTGACTTTTCAAGTGAAATCATAGG | | |
| | LGGGGSGIVGIVAGLAVLAVVVIGAVV | ATACCAGCTTATGTGTCAACCTATACTGTTAGCAGAAGC | | |
| | ATVMCRRKSSGGKGGSYSQAASSDSAQ | TGAACTTGCAAAGAATGTGTCCTTAATTCTTGGAACTGTT | | |
| | GSDVSLTA** (SEQ ID NO: RS | TCTTGGAATTTGAAGCGCCGTTATTTATTATCAGCTGGTA | | |
| | C1p1full) | TTTTTGGTGCTATTACGGATGTTTTCTACAAAGAAAACAG | | |
| | | TTACAAAGTGCCAACAGACAATTATATAACCACTTACGC | | |
| | | CCGAATGGCGGCCCCAAAAGAAATTATCTTCTTAGAGGG | | |
| | | AGAAACACTTTTTGGTGATGACACTGTGATAGAAGTGGC | | |
| | | CATTATTTTGGCATCTTTTTCTGCTTCCACACGAAGAATG | | |
| | | GCCATGGTAACAAACAATACCTTCACACTCAAAGTCCCT | | |
| | | CATGTGGGCGAAATACCAGTGGCTTACCGCAAGGTTCTT | | |
| | | CTTAAGACTATTCAACCAAGGGTTGAAAAGTACTTATTT | | |
| | | GATGAGTCTGGTGAGTTTAAATTGTCAGAAGTAGGACCT | | |
| | | GAGCATAGTCTTGCCGAATACTACATCTTCTTTGCATCAT | | |
| | | TTTATTATAAACGTAATGGTGGGGGAAGTGGAGGAGGG | | |
| | | GGATCTGGAGGGGATTTGTTTATGAGAATCTTCACAATT | | |
| | | GGAACTGTAACTTTGAAGCAAGGTGAAATCAAGGATGCT | | |
| | | ACTCCTTCAGATTTTGTTCGCGCTACTGCAACGATACCGA | | |
| | | TACAAGCCTCACTCCCTTTCGGATGGCTTATTGTTGGCGT | | |
| | | TGCACTTCTTGCTGTTTTTCAGAGCGCTTCCAAAATCATA | | |
| | | ACCCTCAAAAAGAGATGGCAACTAGCACTCTCCAAGGGT | | |
| | | GTTCACTTTGTTTGCAACTTGCTGTTGTTGTTTGTAACAG | | |
| | | TTTACTCACACCTTTTGCTCGTTGCTGCTGGCCTTGAAGC | | |
| | | CCCTTTTCTCTATCTTTATGCTTTAGTCTACTTCTTGCAGA | | |
| | | GTATAAACTTTGTAAGAATAATAATGAGGCTTTGGCTTT | | |
| | | GCTGGAAATGCCGTTCCAAAAACCCATTACTTTATGATG | | |
| | | CCAACTATTTTCTTTGCTGGCATACTAATTGTTACGACTA | | |
| | | TTGTATACCTTACAATAGTGTAACTTCTTCAATTGTCATT | | |
| | | ACTTCAGGTGATGGCACAACAAGTCCTATTTCTGAACAT | | |
| | | GACTACCAGATTGGTGGTTATACTGAAAAATGGGAATCT | | |
| | | GGAGTAAAAGACTGTGTTGTATTACACAGTTACTTCACT | | |
| | | TCAGACTATTACCAGCTGTACTCAACTCAATTGAGTACA | | |
| | | GACACTGGTGTTGAACATGTTACCTTCTTCATCTACAATA | | |
| | | AAATTGTTGATGAGCCTGAAGAACATGTCCAAATTCACA | | |
| | | CAATCGACGGTTCATCCGGAGTTGTTAATCCAGTAATGG | | |
| | | AACCAATTTATGATGAACCGACGACGACTACTAGCGTGC | | |
| | | CTTTGGGGGGAAGTGGAGGAGGGGGATCTGGAGGGGCA | | |
| | | GATTCCAACGGTACTATTACCGTTGAAGAGCTTAAAAAG | | |
| | | CTCCTTGAACAATGGAACCTAGTAATAGGTTTCCTATTCC | | |
| | | TTACATGGATTTGTCTTCTACAATTTGCCTATGCCAACAG | | |
| | | GAATAGGTTTTTGTATATAATTAAGTTAATTTTCCTCTGG | | |
| | | CTGTTATGGCCAGTAACTTTAGCTTGTTTTGTGCTTGCTG | | |
| | | CTGTTTACAGAATAAATTGGATCACCGGTGGAATTGCTA | | |
| | | TCGCAATGGCTTGTCTTGTAGGCTTGATGTGGCTCAGCTA | | |
| | | CTTCATTGCTTCTTTCAGACTGTTTGCGCGTACGCGTTCC | | |
| | | ATGTGGTCATTCAATCCAGAAACTAACATTCTTCTCAAC | | |
| | | GTGCCACTCCATGGCACTATTCTGACCAGACCGCTTCTA | | |
| | | GAAAGTGAACTCGTAATCGGAGCTGTGATCCTTCGTGGA | | |
| | | CATCTTCGTATTGCTGGACACCATCTAGGACGCTGTGAC | | |
| | | ATCAAGGACCTGCCTAAAGAAATCACTGTTGCTACATCA | | |
| | | CGAACGCTTTCTTATTACAAATTGGGAGCTTCGCAGCGT | | |
| | | GTAGCAGGTGACTCAGGTTTTGCTGCATACAGTCGCTAC | | |
| | | AGGATTGGCAACTATAAATTAAACACAGACCATTCCAGT | | |
| | | AGCAGTGACAATATTGCTTTGCTTGTACAGGGAGGGAGC | | |
| | | CTGGGTGGGGGCGGCAGTGGGATCGTGGGAATTGTGGC | | |
| | | AGGACTGGCAGTGCTGGCCGTGGTGGTGATCGGAGCCGT | | |
| | | GGTGGCTACCGTGATGTGCAGACGGAAGTCCAGCGGAG | | |
| | | GCAAGGGCGGCAGCTACAGCCAGGCCGCCAGCTCTGAT | | |
| | | AGCGCCCAGGGCAGCGACGTGTCACTGACAGCCTAGTA | | |
| | | A (SEQ ID NO: RS C1n1) | | |
| RS C2 | | | | |
| GSS | NAMED SEGMENTS | | | |
| linkers | SP1-start GSS-membrane glycoprotein-middle GSS-ORF3a protein-middle GSS-Orf1ab GSS- | | | |
| inverted | middle GSS-ORF9b protein-middle GSS-nucleocapsid phosphoprotein-end GSS-MITD | | | |
| RS C2 | MRVMAPRTLILLLSGALALTETWAGSG | ATGAGAGTGATGGCCCCCAGAACCCTGATCCTGCTGCTG | 1369 | 4107 |
| GSS | GSGGGGSGGADSNGTITVEELKKLLEQ | TCTGGCGCCCTGGCCCTGACAGAGACATGGGCCGGAAGC | | |
| linkers- | WNLVIGFLFLTWICLLQFAYANRNRFLY | GGCGGATCGGGGGGGGGGGGCTCGGGAGGAGCAGATTC | | |
| inverted | IIKLIFLWLLWPVTLACFVLAAVYRINWI | CAACGGTACTATTACCGTTGAAGAGCTTAAAAAGCTCCT | | |
| | TGGIAIAMACLVGLMWLSYFIASFRLFA | TGAACAATGGAACCTAGTAATAGGTTTCCTATTCCTTAC | | |
| | RTRSMWSFNPETNILLNVPLHGTILTRPL | ATGGATTTGTCTTCTACAATTTGCCTATGCCAACAGGAAT | | |
| | LESELVIGAVILRGHLRIAGHHLGRCDIK | AGGTTTTTGTATATAATTAAGTTAATTTTCCTCTGGCTGT | | |
| | DLPKEITVATSRTLSYYKLGASQRVAGD | TATGGCCAGTAACTTTAGCTTGTTTTGTGCTTGCTGCTGT | | |
| | SGFAAYSRYRIGNYKLNTDHSSSSDNIA | TTACAGAATAAATTGGATCACCGGTGGAATTGCTATCGC | | |
| | LLVQGGSGGGGSGGDLFMRIFTIGTVTL | AATGGCTTGTCTTGTAGGCTTGATGTGGCTCAGCTACTTC | | |
| | KQGEIKDATPSDFVRATATIPIQASLPFG | ATTGCTTCTTTCAGACTGTTTGCGCGTACGCGTTCCATGT | | |
| | WLIVGVALLAVFQSASKIITLKKRWQLA | GGTCATTCAATCCAGAAACTAACATTCTTCTCAACGTGC | | |
| | LSKGVHFVCNLLLLFVTVYSHLLLVAA | CACTCCATGGCACTATTCTGACCAGACCGCTTCTAGAAA | | |
| | GLEAPFLYLYALVYFLQSINFVRIIMRL | GTGAACTCGTAATCGGAGCTGTGATCCTTCGTGGACATC | | |
| | WLCWKCRSKNPLLYDANYFLCWHTNC | TTCGTATTGCTGGACACCATCTAGGACGCTGTGACATCA | | |
| | YDYCIPYNSVTSSIVITSGDGTTSPISEHD | AGGACCTGCCTAAAGAAATCACTGTTGCTACATCACGAA | | |
| | YQIGGYTEKWESGVKDCVVLHSYFTSD | CGCTTTCTTATTACAAATTGGGAGCTTCGCAGCGTGTAGC | | |
| | YYQLYSTQLSTDTGVEHVTFFIYNKIVD | AGGTGACTCAGGTTTTGCTGCATACAGTCGCTACAGGAT | | |
| | EPEEHVQIHTIDGSSGVVNPVMEPIYDEP | TGGCAACTATAAATTAAACACAGACCATTCCAGTAGCAG | | |
| | TTTTSVPLGGSGGGGSGGYHFFHTTDPS | TGACAATATTGCTTTGCTTGTACAGGGGGGAAGTGGAGG | | |
| | FLGRYMSALFADDLNQLTGYHTDFSSEI | AGGGGGATCTGGAGGGGATTTGTTTATGAGAATCTTCAC | | |
| | IGYQLMCQPILLAEAELAKNVSLILGTV | AATTGGAACTGTAACTTTGAAGCAAGGTGAAATCAAGGA | | |
| | SWNLKRRYLLSAGIFGAITDVFYKENSY | TGCTACTCCTTCAGATTTTGTTCGCGCTACTGCAACGATA | | |
| | KVPTDNYITTYARMAAPKEIIFLEGETLF | CCGATACAAGCCTCACTCCCTTTCGGATGGCTTATTGTTG | | |
| | GDDTVIEVAIILASFSASTRRMAMVTNN | GCGTTGCACTTCTTGCTGTTTTTCAGAGCGCTTCCAAAAT | | |
| | TFTLKVPHVGEIPVAYRKVLLKTIQPRV | CATAACCCTCAAAAAGAGATGGCAACTAGCACTCTCCAA | | |
| | EKYLFDESGEFKLSEVGPEHSLAEYYIFF | GGGTGTTCACTTTGTTTGCAACTTGCTGTTGTTGTTTGTA | | |
| | ASFYYKRNGGGSGGGGSGGDPKISEMH | ACAGTTTACTCACACCTTTTGCTCGTTGCTGCTGGCCTTG | | |
| | PALRLVDPQIQLAVTRMENAVGRDQNN | AAGCCCCTTTTCTCTATCTTTATGCTTTAGTCTACTTCTTG | | |
| | VGPKVYPIILRLGSPLSLNMARKTLNSLE | CAGAGTATAAACTTTGTAAGAATAATAATGAGGCTTTGG | | |
| | DKAFQLTPIAVQMTKLATTEELPDEFVV | CTTTGCTGGAAATGCCGTTCCAAAAACCCATTACTTTATG | | |
| | VTVKGGSGGGGSGGSDNGPQNQRNAP | ATGCCAACTATTTTCTTTGCTGGCATACTAATTGTTACGA | | |
| | RITFGGPSDSTGSNQNGERSGARSKQRR | CTATTGTATACCTTACAATAGTGTAACTTCTTCAATTGTC | | |
| | PQGLPNNTASWFTALTQHGKEDLKFPR | ATTACTTCAGGTGATGGCACAACAAGTCCTATTTCTGAA | | |
| | GQGVPINTNSSPDDQIGYYRRATRRIRG | CATGACTACCAGATTGGTGGTTATACTGAAAAATGGGAA | | |
| | GDGKMKDLSPRWYFYYLGTGPEAGLP | TCTGGAGTAAAAGACTGTGTTGTATTACACAGTTACTTC | | |
| | YGANKDGIIWVATEGALNTPKDHIGTR | ACTTCAGACTATTACCAGCTGTACTCAACTCAATTGAGT | | |
| | NPANNAAIVLQLPQGTTLPKGFYAEGSR | ACAGACACTGGTGTTGAACATGTTACCTTCTTCATCTACA | | |
| | GGSQASSRSSSRSRNSSRNSTPGSSRGTS | ATAAAATTGTTGATGAGCCTGAAGAACATGTCCAAATTC | | |
| | PARMAGNGGDAALALLLLDRLNQLESK | ACACAATCGACGGTTCATCCGGAGTTGTTAATCCAGTAA | | |
| | MSGKGQQQQGQTVTKKSAAEASKKPR | TGGAACCAATTTATGATGAACCGACGACGACTACTAGCG | | |
| | QKRTATKAYNVTQAFGRRGPEQTQGNF | TGCCTTTGGGGGGAAGTGGAGGAGGGGGATCTGGAGGG | | |
| | GDQELIRQGTDYKHWPQIAQFAPSASAF | TATCATTTCTTTCACACAACTGATCCTAGTTTTCTGGGTA | | |
| | FGMSRIGMEVTPSGTWLTYTGAIKLDD | GGTACATGTCAGCATTATTTGCTGATGATTTAAACCAGTT | | |
| | KDPNFKDQVILLNKHIDAYKTFPPTEPK | AACTGGTTATCATACTGACTTTTCAAGTGAAATCATAGG | | |
| | KDKKKKADETQALPQRQKKQQTVTLLP | ATACCAGCTTATGTGTCAACCTATACTGTTAGCAGAAGC | | |
| | AADLDDESKQLQQSMSSADSTQAGGSL | TGAACTTGCAAAGAATGTGTCCTTAATTCTTGGAACTGTT | | |
| | GGGGSGIVGIVAGLAVLAVVVIGAVVA | TCTTGGAATTTGAAGCGCCGTTATTTATTATCAGCTGGTA | | |
| | TVMCRRKSSGGKGGSYSQAASSDSAQG | TTTTTGGTGCTATTACGGATGTTTTCTACAAAGAAAACAG | | |
| | SDVSLTA** (SEQ ID NO: RS | TTACAAAGTGCCAACAGACAATTATATAACCACTTACGC | | |
| | C2p1full) | CCGAATGGCGGCCCCAAAAGAAATTATCTTCTTAGAGGG | | |
| | | AGAAACACTTTTTGGTGATGACACTGTGATAGAAGTGGC | | |
| | | CATTATTTTGGCATCTTTTTCTGCTTCCACACGAAGAATG | | |
| | | GCCATGGTAACAAACAATACCTTCACACTCAAAGTCCCT | | |
| | | CATGTGGGCGAAATACCAGTGGCTTACCGCAAGGTTCTT | | |
| | | CTTAAGACTATTCAACCAAGGGTTGAAAAGTACTTATTT | | |
| | | GATGAGTCTGGTGAGTTTAAATTGTCAGAAGTAGGACCT | | |
| | | GAGCATAGTCTTGCCGAATACTACATCTTCTTTGCATCAT | | |
| | | TTTATTATAAACGTAATGGTGGGGGAAGTGGAGGAGGG | | |
| | | GGATCTGGAGGGGACCCCAAAATCAGCGAAATGCACCC | | |
| | | CGCATTACGTTTGGTGGACCCTCAGATTCAACTGGCAGT | | |
| | | AACCAGAATGGAGAACGCAGTGGGGCGCGATCAAAACA | | |
| | | ACGTCGGCCCCAAGGTTTACCCAATAATACTGCGTCTTG | | |
| | | GTTCACCGCTCTCACTCAACATGGCAAGGAAGACCTTAA | | |
| | | ATTCCCTCGAGGACAAGGCGTTCCAATTAACACCAATAG | | |
| | | CAGTCCAGATGACCAAATTGGCTACTACCGAAGAGCTAC | | |
| | | CAGACGAATTCGTGGTGGTGACGGTAAAAGGGGGAAGT | | |
| | | GGAGGAGGGGGATCTGGAGGGTCTGATAATGGACCCCA | | |
| | | AAATCAGCGAAATGCACCCCGCATTACGTTTGGTGGACC | | |
| | | CTCAGATTCAACTGGCAGTAACCAGAATGGAGAACGCA | | |
| | | GTGGGGCGCGATCAAAACAACGTCGGCCCCAAGGTTTAC | | |
| | | CCAATAATACTGCGTCTTGGTTCACCGCTCTCACTCAACA | | |
| | | TGGCAAGGAAGACCTTAAATTCCCTCGAGGACAAGGCGT | | |
| | | TCCAATTAACACCAATAGCAGTCCAGATGACCAAATTGG | | |
| | | CTACTACCGAAGAGCTACCAGACGAATTCGTGGTGGTGA | | |
| | | CGGTAAAATGAAAGATCTCAGTCCAAGATGGTATTTCTA | | |
| | | CTACCTAGGAACTGGGCCAGAAGCTGGACTTCCCTATGG | | |
| | | TGCTAACAAAGACGGCATCATATGGGTTGCAACTGAGGG | | |
| | | AGCCTTGAATACACCAAAAGATCACATTGGCACCCGCAA | | |
| | | TCCTGCTAACAATGCTGCAATCGTGCTACAACTTCCTCA | | |
| | | AGGAACAACATTGCCAAAAGGCTTCTACGCAGAAGGGA | | |
| | | GCAGAGGCGGCAGTCAAGCCTCTTCTCGTTCCTCATCAC | | |
| | | GTAGTCGCAACAGTTCAAGAAATTCAACTCCAGGCAGCA | | |
| | | GTAGGGGAACTTCTCCTGCTAGAATGGCTGGCAATGGCG | | |
| | | GTGATGCTGCTCTTGCTTTGCTGCTGCTTGACAGATTGAA | | |
| | | CCAGCTTGAGAGCAAAATGTCTGGTAAAGGCCAACAAC | | |
| | | AACAAGGCCAAACTGTCACTAAGAAATCTGCTGCTGAGG | | |
| | | CTTCTAAGAAGCCTCGGCAAAAACGTACTGCCACTAAAG | | |
| | | CATACAATGTAACACAAGCTTTCGGCAGACGTGGTCCAG | | |
| | | AACAAACCCAAGGAAATTTTGGGGACCAGGAACTAATC | | |
| | | AGACAAGGAACTGATTACAAACATTGGCCGCAAATTGC | | |
| | | ACAATTTGCCCCCAGCGCTTCAGCGTTCTTCGGAATGTC | | |
| | | GCGCATTGGCATGGAAGTCACACCTTCGGGAACGTGGTT | | |
| | | GACCTACACAGGTGCCATCAAATTGGATGACAAAGATCC | | |
| | | AAATTTCAAAGATCAAGTCATTTTGCTGAATAAGCATAT | | |
| | | TGACGCATACAAAACATTCCCACCAACAGAGCCTAAAA | | |
| | | AGGACAAAAAGAAGAAGGCTGATGAAACTCAAGCCTTA | | |
| | | CCGCAGAGACAGAAGAAACAGCAAACTGTGACTCTTCTT | | |
| | | CCTGCTGCAGATTTGGATGATTTCTCCAAACAATTGCAA | | |
| | | CAATCCATGAGCAGTGCTGACTCAACTCAGGCCGGAGGG | | |
| | | AGCCTGGGTGGGGGCGGCAGTGGGATCGTGGGAATTGT | | |
| | | GGCAGGACTGGCAGTGCTGGCCGTGGTGGTGATCGGAG | | |
| | | CCGTGGTGGCTACCGTGATGTGCAGACGGAAGTCCAGCG | | |
| | | GAGGCAAGGGCGGCAGCTACAGCCAGGCCGCCAGCTCT | | |
| | | GATAGCGCCCAGGGCAGCGACGTGTCACTGACAGCCTA | | |
| | | GTAA (SEQ ID NO: RS C2n1) | | |
| RS C3 | NAMED SEGMENTS | | | |
| 2A | SP1-start GSS-nucleocapsid phosphoprotein-1 GSG T2A-ORF9b protein-2 GSG P2A-Orf1ab | | | |
| linkers | GSS-3 GSG F2A-ORF3a protein-4 GSG E2A-membrane glycoprotein-end GSS-MITD | | | |
| RS C3 | MRVMAPRTLILLLSGALALTETWAGSG | ATGAGAGTGATGGCCCCCAGAACCCTGATCCTGCTGCTG | 1429 | 4287 |
| 2A | GSGGGGSGGSDNGPQNQRNAPRITFGG | TCTGGCGCCCTGGCCCTGACAGAGACATGGGCCGGAAGC | | |
| linkers | PSDSTGSNQNGERSGARSKQRRPQGLP | GGCGGATCGGGGGGGGGGGGCTCGGGAGGATCTGATAA | | |
| | NNTASWFTALTQHGKEDLKFPRGQGVP | TGGACCCCAAAATCAGCGAAATGCACCCCGCATTACGTT | | |
| | INTNSSPDDQIGYYRRATRRIRGGDGKM | TGGTGGACCCTCAGATTCAACTGGCAGTAACCAGAATGG | | |
| | KDLSPRWYFYYLGTGPEAGLPYGANKD | AGAACGCAGTGGGGCGCGATCAAAACAACGTCGGCCCC | | |
| | GIIWVATEGALNTPKDHIGTRNPANNAA | AAGGTTTACCCAATAATACTGCGTCTTGGTTCACCGCTCT | | |
| | IVLQLPQGTTLPKGFYAEGSRGGSQASS | CACTCAACATGGCAAGGAAGACCTTAAATTCCCTCGAGG | | |
| | RSSSRSRNSSRNSTPGSSRGTSPARMAG | ACAAGGCGTTCCAATTAACACCAATAGCAGTCCAGATGA | | |
| | NGGDAALALLLLDRLNQLESKMSGKG | CCAAATTGGCTACTACCGAAGAGCTACCAGACGAATTCG | | |
| | QQQQGQTVTKKSAAEASKKPRQKRTAT | TGGTGGTGACGGTAAAATGAAAGATCTCAGTCCAAGATG | | |
| | KAYNVTQAFGRRGPEQTQGNFGDQELI | GTATTTCTACTACCTAGGAACTGGGCCAGAAGCTGGACT | | |
| | RQGTDYKHWPQIAQFAPSASAFFGMSRI | TCCCTATGGTGCTAACAAAGACGGCATCATATGGGTTGC | | |
| | GMEVTPSGTWLTYTGAIKLDDKDPNFK | AACTGAGGGAGCCTTGAATACACCAAAAGATCACATTG | | |
| | DQVILLNKHIDAYKTFPPTEPKKDKKKK | GCACCCGCAATCCTGCTAACAATGCTGCAATCGTGCTAC | | |
| | ADETQALPQRQKKQQTVTLLPAADLDD | AACTTCCTCAAGGAACAACATTGCCAAAAGGCTTCTACG | | |
| | FSKQLQQSMSSADSTQAGSGGSGEGRG | CAGAAGGGAGCAGAGGCGGCAGTCAAGCCTCTTCTCGTT | | |
| | SLLTCGDVEENPGPDPKISEMHPALRLV | CCTCATCACGTAGTCGCAACAGTTCAAGAAATTCAACTC | | |
| | DPQIQLAVTRMENAVGRDQNNVGPKV | CAGGCAGCAGTAGGGGAACTTCTCCTGCTAGAATGGCTG | | |
| | YPIILRLGSPLSLNMARKTLNSLEDKAFQ | GCAATGGCGGTGATGCTGCTCTTGCTTTGCTGCTGCTTGA | | |
| | LTPIAVQMTKLATTEELPDEFVVVTVKG | CAGATTGAACCAGCTTGAGAGCAAAATGTCTGGTAAAGG | | |
| | SGGSGATNFSLLKQAGDVEENPGPYHF | CCAACAACAACAAGGCCAAACTGTCACTAAGAAATCTG | | |
| | FHTTDPSFLGRYMSALFADDLNQLTGY | CTGCTGAGGCTTCTAAGAAGCCTCGGCAAAAACGTACTG | | |
| | HTDFSSEIIGYQLMCQPILLAEAELAKNV | CCACTAAAGCATACAATGTAACACAAGCTTTCGGCAGAC | | |
| | SLILGTVSWNLKRRYLLSAGIFGAITDVF | GTGGTCCAGAACAAACCCAAGGAAATTTTGGGGACCAG | | |
| | YKENSYKVPTDNYITTYARMAAPKEIIF | GAACTAATCAGACAAGGAACTGATTACAAACATTGGCC | | |
| | LEGETLFGDDTVIEVAIILASFSASTRRM | GCAAATTGCACAATTTGCCCCCAGCGCTTCAGCGTTCTTC | | |
| | AMVTNNTFTLKVPHVGEIPVAYRKVLL | GGAATGTCGCGCATTGGCATGGAAGTCACACCTTCGGGA | | |
| | KTIQPRVEKYLFDESGEFKLSEVGPEHSL | ACGTGGTTGACCTACACAGGTGCCATCAAATTGGATGAC | | |
| | AEYYIFFASFYYKRNGGSGVKQTLNFD | AAAGATCCAAATTTCAAAGATCAAGTCATTTTGCTGAAT | | |
| | LLKLAGDVESNPGPDLFMRIFTIGTVTL | AAGCATATTGACGCATACAAAACATTCCCACCAACAGAG | | |
| | KQGEIKDATPSDFVRATATIPIQASLPFG | CCTAAAAAGGACAAAAAGAAGAAGGCTGATGAAACTCA | | |
| | WLIVGVALLAVFQSASKIITLKKRWQLA | AGCCTTACCGCAGAGACAGAAGAAACAGCAAACTGTGA | | |
| | LSKGVHFVCNLLLLFVTVYSHLLLVAA | CTCTTCTTCCTGCTGCAGATTTGGATGATTTCTCCAAACA | | |
| | GLEAPFLYLYALVYFLQSINFVRIIMRL | ATTGCAACAATCCATGAGCAGTGCTGACTCAACTCAGGC | | |
| | WLCWKCRSKNPLLYDANYFLCWHTNC | CGGCAGCGGCGGCTCCGGCGAGGGCAGGGGAAGTCTTC | | |
| | YDYCIPYNSVTSSIVITSGDGTTSPISEHD | TAACATGCGGGGACGTGGAGGAAAATCCCGGCCCAGAC | | |
| | YQIGGYTEKWESGVKDCVVLHSYFTSD | CCCAAAATCAGCGAAATGCACCCCGCATTACGTTTGGTG | | |
| | YYQLYSTQLSTDTGVEHVTFFIYNKIVD | GACCCTCAGATTCAACTGGCAGTAACCAGAATGGAGAA | | |
| | EPEEHVQIHTIDGSSGVVNPVMEPIYDEP | CGCAGTGGGGCGCGATCAAAACAACGTCGGCCCCAAGG | | |
| | TTTTSVPLGSGGSGQCTNYALLKLAGD | TTTACCCAATAATACTGCGTCTTGGTTCACCGCTCTCACT | | |
| | VESNPGPADSNGTITVEELKKLLEQWNL | CAACATGGCAAGGAAGACCTTAAATTCCCTCGAGGACA | | |
| | VIGFLFLTWICLLQFAYANRNRFLYIIKLI | AGGCGTTCCAATTAACACCAATAGCAGTCCAGATGACCA | | |
| | FLWLLWPVTLACFVLAAVYRINWITGGI | AATTGGCTACTACCGAAGAGCTACCAGACGAATTCGTGG | | |
| | AIAMACLVGLMWLSYFIASFRLFARTRS | TGGTGACGGTAAAAGGCAGCGGCGGCAGCGGCGCCACA | | |
| | MWSFNPETNILLNVPLHGTILTRPLLESE | AACTTCTCTCTGCTAAAGCAAGCAGGTGATGTTGAAGAA | | |
| | LVIGAVILRGHLRIAGHHLGRCDIKDLP | AACCCCGGGCCTTATCATTTCTTTCACACAACTGATCCTA | | |
| | KEITVATSRTLSYYKLGASQRVAGDSGF | GTTTTCTGGGTAGGTACATGTCAGCATTATTTGCTGATGA | | |
| | AAYSRYRIGNYKLNTDHSSSSDNIALLV | TTTAAACCAGTTAACTGGTTATCATACTGACTTTTCAAGT | | |
| | QGGSLGGGGSGIVGIVAGLAVLAVVVI | GAAATCATAGGATACCAGCTTATGTGTCAACCTATACTG | | |
| | GAVVATVMCRRKSSGGKGGSYSQAAS | TTAGCAGAAGCTGAACTTGCAAAGAATGTGTCCTTAATT | | |
| | SDSAQGSDVSLTA** (SEQ ID NO: RS | CTTGGAACTGTTTCTTGGAATTTGAAGCGCCGTTATTTAT | | |
| | C3p1full) | TATCAGCTGGTATTTTTGGTGCTATTACGGATGTTTTCTA | | |
| | | CAAAGAAAACAGTTACAAAGTGCCAACAGACAATTATA | | |
| | | TAACCACTTACGCCCGAATGGCGGCCCCAAAAGAAATTA | | |
| | | TCTTCTTAGAGGGAGAAACACTTTTTGGTGATGACACTG | | |
| | | TGATAGAAGTGGCCATTATTTTGGCATCTTTTTCTGCTTC | | |
| | | CACACGAAGAATGGCCATGGTAACAAACAATACCTTCAC | | |
| | | ACTCAAAGTCCCTCATGTGGGCGAAATACCAGTGGCTTA | | |
| | | CCGCAAGGTTCTTCTTAAGACTATTCAACCAAGGGTTGA | | |
| | | AAAGTACTTATTTGATGAGTCTGGTGAGTTTAAATTGTCA | | |
| | | GAAGTAGGACCTGAGCATAGTCTTGCCGAATACTACATC | | |
| | | TTCTTTGCATCATTTTATTATAAACGTAATGGTGGCAGCG | | |
| | | GCGTGAAACAGACTTTGAATTTTGACCTTCTCAAGTTGG | | |
| | | CGGGAGACGTGGAGTCCAACCCTGGACCTGATTTGTTTA | | |
| | | TGAGAATCTTCACAATTGGAACTGTAACTTTGAAGCAAG | | |
| | | GTGAAATCAAGGATGCTACTCCTTCAGATTTTGTTCGCGC | | |
| | | TACTGCAACGATACCGATACAAGCCTCACTCCCTTTCGG | | |
| | | ATGGCTTATTGTTGGCGTTGCACTTCTTGCTGTTTTTCAG | | |
| | | AGCGCTTCCAAAATCATAACCCTCAAAAAGAGATGGCA | | |
| | | ACTAGCACTCTCCAAGGGTGTTCACTTTGTTTGCAACTTG | | |
| | | CTGTTGTTGTTTGTAACAGTTTACTCACACCTTTTGCTCG | | |
| | | TTGCTGCTGGCCTTGAAGCCCCTTTTCTCTATCTTTATGCT | | |
| | | TTAGTCTACTTCTTGCAGAGTATAAACTTTGTAAGAATAA | | |
| | | TAATGAGGCTTTGGCTTTGCTGGAAATGCCGTTCCAAAA | | |
| | | ACCCATTACTTTATGATGCCAACTATTTTCTTTGCTGGCA | | |
| | | TACTAATTGTTACGACTATTGTATACCTTACAATAGTGTA | | |
| | | ACTTCTTCAATTGTCATTACTTCAGGTGATGGCACAACAA | | |
| | | GTCCTATTTCTGAACATGACTACCAGATTGGTGGTTATAC | | |
| | | TGAAAAATGGGAATCTGGAGTAAAAGACTGTGTTGTATT | | |
| | | ACACAGTTACTTCACTTCAGACTATTACCAGCTGTACTCA | | |
| | | ACTCAATTGAGTACAGACACTGGTGTTGAACATGTTACC | | |
| | | TTCTTCATCTACAATAAAATTGTTGATGAGCCTGAAGAA | | |
| | | CATGTCCAAATTCACACAATCGACGGTTCATCCGGAGTT | | |
| | | GTTAATCCAGTAATGGAACCAATTTATGATGAACCGACG | | |
| | | ACGACTACTAGCGTGCCTTTGGGCAGCGGCGGCTCGGGC | | |
| | | CAGTGTACTAATTATGCTCTCTTGAAATTGGCTGGAGAT | | |
| | | GTTGAGAGCAACCCAGGTCCCGCAGATTCCAACGGTACT | | |
| | | ATTACCGTTGAAGAGCTTAAAAAGCTCCTTGAACAATGG | | |
| | | AACCTAGTAATAGGTTTCCTATTCCTTACATGGATTTGTC | | |
| | | TTCTACAATTTGCCTATGCCAACAGGAATAGGTTTTTGTA | | |
| | | TATAATTAAGTTAATTTTCCTCTGGCTGTTATGGCCAGTA | | |
| | | ACTTTAGCTTGTTTTGTGCTTGCTGCTGTTTACAGAATAA | | |
| | | ATTGGATCACCGGTGGAATTGCTATCGCAATGGCTTGTC | | |
| | | TTGTAGGCTTGATGTGGCTCAGCTACTTCATTGCTTCTTT | | |
| | | CAGACTGTTTGCGCGTACGCGTTCCATGTGGTCATTCAAT | | |
| | | CCAGAAACTAACATTCTTCTCAACGTGCCACTCCATGGC | | |
| | | ACTATTCTGACCAGACCGCTTCTAGAAAGTGAACTCGTA | | |
| | | ATCGGAGCTGTGATCCTTCGTGGACATCTTCGTATTGCTG | | |
| | | GACACCATCTAGGACGCTGTGACATCAAGGACCTGCCTA | | |
| | | AAGAAATCACTGTTGCTACATCACGAACGCTTTCTTATTA | | |
| | | CAAATTGGGAGCTTCGCAGCGTGTAGCAGGTGACTCAGG | | |
| | | TTTTGCTGCATACAGTCGCTACAGGATTGGCAACTATAA | | |
| | | ATTAAACACAGACCATTCCAGTAGCAGTGACAATATTGC | | |
| | | TTTGCTTGTACAGGGAGGGAGCCTGGGTGGGGGCGGCAG | | |
| | | TGGGATCGTGGGAATTGTGGCAGGACTGGCAGTGCTGGC | | |
| | | CGTGGTGGTGATCGGAGCCGTGGTGGCTACCGTGATGTG | | |
| | | CAGACGGAAGTCCAGCGGAGGCAAGGGCGGCAGCTACA | | |
| | | GCCAGGCCGCCAGCTCTGATAGCGCCCAGGGCAGCGAC | | |
| | | GTGTCACTGACAGCCTAGTAA (SEQ ID NO: RS C3n1) | | |
| RS C4 | | | | |
| ORF1ab | NAMED SEGMENTS | | | |
| as | SP1-start GSS-nucleocapsid phosphoprotein-Orf1ab linker 1-ORF9b protein-Orf1ab | | | |
| linkers | linker 2-ORF3a protein-Orf1ab linker 3-membrane glycoprotein-end GSS-MITD | | | |
| ORF1ab | MRVMAPRTLILLLSGALALTETWAGSG | ATGAGAGTGATGGCCCCCAGAACCCTGATCCTGCTGCTG | 1337 | 4011 |
| as | GSGGGGSGGSDNGPQNQRNAPRITFGG | TCTGGCGCCCTGGCCCTGACAGAGACATGGGCCGGAAGC | | |
| linkers | PSDSTGSNQNGERSGARSKQRRPQGLP | GGAGGGAGTGGTGGCGGGGGATCTGGAGGTTCTGATAA | | |
| | NNTASWFTALTQHGKEDLKFPRGQGVP | TGGACCCCAAAATCAGCGAAATGCACCCCGCATTACGTT | | |
| | INTNSSPDDQIGYYRRATRRIRGGDGKM | TGGTGGACCCTCAGATTCAACTGGCAGTAACCAGAATGG | | |
| | KDLSPRWYFYYLGTGPEAGLPYGANKD | AGAACGCAGTGGGGCGCGATCAAAACAACGTCGGCCCC | | |
| | GIIWVATEGALNTPKDHIGTRNPANNAA | AAGGTTTACCCAATAATACTGCGTCTTGGTTCACCGCTCT | | |
| | IVLQLPQGTTLPKGFYAEGSRGGSQASS | CACTCAACATGGCAAGGAAGACCTTAAATTCCCTCGAGG | | |
| | RSSSRSRNSSRNSTPGSSRGTSPARMAG | ACAAGGCGTTCCAATTAACACCAATAGCAGTCCAGATGA | | |
| | NGGDAALALLLLDRLNQLESKMSGKG | CCAAATTGGCTACTACCGAAGAGCTACCAGACGAATTCG | | |
| | QQQQGQTVTKKSAAEASKKPRQKRTAT | TGGTGGTGACGGTAAAATGAAAGATCTCAGTCCAAGATG | | |
| | KAYNVTQAFGRRGPEQTQGNFGDQELI | GTATTTCTACTACCTAGGAACTGGGCCAGAAGCTGGACT | | |
| | RQGTDYKHWPQIAQFAPSASAFFGMSRI | TCCCTATGGTGCTAACAAAGACGGCATCATATGGGTTGC | | |
| | GMEVTPSGTWLTYTGAIKLDDKDPNFK | AACTGAGGGAGCCTTGAATACACCAAAAGATCACATTG | | |
| | DQVILLNKHIDAYKTFPPTEPKKDKKKK | GCACCCGCAATCCTGCTAACAATGCTGCAATCGTGCTAC | | |
| | ADETQALPQRQKKQQTVTLLPAADLDD | AACTTCCTCAAGGAACAACATTGCCAAAAGGCTTCTACG | | |
| | FSKQLQQSMSSADSTQAFRACMVTNNT | CAGAAGGGAGCAGAGGCGGCAGTCAAGCCTCTTCTCGTT | | |
| | FTLKVPHVGEIPVAYRKVLLKTIQPRVE | CCTCATCACGTAGTCGCAACAGTTCAAGAAATTCAACTC | | |
| | KYLFDESGEFKLSEVGPEHSLAEYYIFF | CAGGCAGCAGTAGGGGAACTTCTCCTGCTAGAATGGCTG | | |
| | ASFYYKRNGDPKISEMHPALRLVDPQIQ | GCAATGGCGGTGATGCTGCTCTTGCTTTGCTGCTGCTTGA | | |
| | LAVTRMENAVGRDQNNVGPKVYPIILR | CAGATTGAACCAGCTTGAGAGCAAAATGTCTGGTAAAGG | | |
| | LGSPLSLNMARKTLNSLEDKAFQLTPIA | CCAACAACAACAAGGCCAAACTGTCACTAAGAAATCTG | | |
| | VQMTKLATTEELPDEFVVVTVKFNSFH | CTGCTGAGGCTTCTAAGAAGCCTCGGCAAAAACGTACTG | | |
| | TTDPSFLGRYMSALFADDLNQLTGYHT | CCACTAAAGCATACAATGTAACACAAGCTTTCGGCAGAC | | |
| | DFSSEIIGYQLMCQPILLAEAELAKNVSL | GTGGTCCAGAACAAACCCAAGGAAATTTTGGGGACCAG | | |
| | ILGTVSWNLKKQGDLFMRIFTIGTVTLK | GAACTAATCAGACAAGGAACTGATTACAAACATTGGCC | | |
| | QGEIKDATPSDFVRATATIPIQASLPFGW | GCAAATTGCACAATTTGCCCCCAGCGCTTCAGCGTTCTTC | | |
| | LIVGVALLAVFQSASKIITLKKRWQLAL | GGAATGTCGCGCATTGGCATGGAAGTCACACCTTCGGGA | | |
| | SKGVHFVCNLLLLFVTVYSHLLLVAAG | ACGTGGTTGACCTACACAGGTGCCATCAAATTGGATGAC | | |
| | LEAPFLYLYALVYFLQSINFVRIIMRLWL | AAAGATCCAAATTTCAAAGATCAAGTCATTTTGCTGAAT | | |
| | CWKCRSKNPLLYDANYFLCWHTNCYD | AAGCATATTGACGCATACAAAACATTCCCACCAACAGAG | | |
| | YCIPYNSVTSSIVITSGDGTTSPISEHDYQ | CCTAAAAAGGACAAAAAGAAGAAGGCTGATGAAACTCA | | |
| | IGGYTEKWESGVKDCVVLHSYFTSDYY | AGCCTTACCGCAGAGACAGAAGAAACAGCAAACTGTGA | | |
| | QLYSTQLSTDTGVEHVTFFIYNKIVDEPE | CTCTTCTTCCTGCTGCAGATTTGGATGATTTCTCCAAACA | | |
| | EHVQIHTIDGSSGVVNPVMEPIYDEPTTT | ATTGCAACAATCCATGAGCAGTGCTGACTCAACTCAGGC | | |
| | TSVPLRRSYLLSAGIFGAITDVFYKENSY | CTTTCGGGCCTGCATGGTAACAAACAATACCTTCACACT | | |
| | KVPTDNYITTYARMAAPKEIIFLEGETLF | CAAAGTCCCTCATGTGGGCGAAATACCAGTGGCTTACCG | | |
| | GDDTVIEVAIILASFSASTLLVQADSNGT | CAAGGTTCTTCTTAAGACTATTCAACCAAGGGTTGAAAA | | |
| | ITVEELKKLLEQWNLVIGFLFLTWICLL | GTACTTATTTGATGAGTCTGGTGAGTTTAAATTGTCAGAA | | |
| | QFAYANRNRFLYIIKLIFLWLLWPVTLA | GTAGGACCTGAGCATAGTCTTGCCGAATACTACATCTTC | | |
| | CFVLAAVYRINWITGGIAIAMACLVGL | TTTGCATCATTTTATTATAAGCGGAACGGCGACCCCAAA | | |
| | MWLSYFIASFRLFARTRSMWSFNPETNI | ATCAGCGAAATGCACCCCGCATTACGTTTGGTGGACCCT | | |
| | LLNVPLHGTILTRPLLESELVIGAVILRG | CAGATTCAACTGGCAGTAACCAGAATGGAGAACGCAGT | | |
| | HLRIAGHHLGRCDIKDLPKEITVATSRTL | GGGGCGCGATCAAAACAACGTCGGCCCCAAGGTTTACCC | | |
| | SYYKLGASQRVAGDSGFAAYSRYRIGN | AATAATACTGCGTCTTGGTTCACCGCTCTCACTCAACATG | | |
| | YKLNTDHSSSSDNIALLVQGGSLGGGGS | GCAAGGAAGACCTTAAATTCCCTCGAGGACAAGGCGTTC | | |
| | GIVGIVAGLAVLAVVVIGAVVATVMCR | CAATTAACACCAATAGCAGTCCAGATGACCAAATTGGCT | | |
| | RKSSGGKGGSYSQAASSDSAQGSDVSL | ACTACCGAAGAGCTACCAGACGAATTCGTGGTGGTGACG | | |
| | TA** (SEQ ID NO: RS C4p1full) | GTAAAATTTAACTCTTTTCACACAACTGATCCTAGTTTTC | | |
| | | TGGGTAGGTACATGTCAGCATTATTTGCTGATGATTTAA | | |
| | | ACCAGTTAACTGGTTATCATACTGACTTTTCAAGTGAAAT | | |
| | | CATAGGATACCAGCTTATGTGTCAACCTATACTGTTAGC | | |
| | | AGAAGCTGAACTTGCAAAGAATGTGTCCTTAATTCTTGG | | |
| | | AACTGTTTCTTGGAATTTGAAAAAGCAAGGAGATTTGTT | | |
| | | TATGAGAATCTTCACAATTGGAACTGTAACTTTGAAGCA | | |
| | | AGGTGAAATCAAGGATGCTACTCCTTCAGATTTTGTTCG | | |
| | | CGCTACTGCAACGATACCGATACAAGCCTCACTCCCTTT | | |
| | | CGGATGGCTTATTGTTGGCGTTGCACTTCTTGCTGTTTTT | | |
| | | CAGAGCGCTTCCAAAATCATAACCCTCAAAAAGAGATG | | |
| | | GCAACTAGCACTCTCCAAGGGTGTTCACTTTGTTTGCAA | | |
| | | CTTGCTGTTGTTGTTTGTAACAGTTTACTCACACCTTTTG | | |
| | | CTCGTTGCTGCTGGCCTTGAAGCCCCTTTTCTCTATCTTT | | |
| | | ATGCTTTAGTCTACTTCTTGCAGAGTATAAACTTTGTAAG | | |
| | | AATAATAATGAGGCTTTGGCTTTGCTGGAAATGCCGTTC | | |
| | | CAAAAACCCATTACTTTATGATGCCAACTATTTTCTTTGC | | |
| | | TGGCATACTAATTGTTACGACTATTGTATACCTTACAATA | | |
| | | GTGTAACTTCTTCAATTGTCATTACTTCAGGTGATGGCAC | | |
| | | AACAAGTCCTATTTCTGAACATGACTACCAGATTGGTGG | | |
| | | TTATACTGAAAAATGGGAATCTGGAGTAAAAGACTGTGT | | |
| | | TGTATTACACAGTTACTTCACTTCAGACTATTACCAGCTG | | |
| | | TACTCAACTCAATTGAGTACAGACACTGGTGTTGAACAT | | |
| | | GTTACCTTCTTCATCTACAATAAAATTGTTGATGAGCCTG | | |
| | | AAGAACATGTCCAAATTCACACAATCGACGGTTCATCCG | | |
| | | GAGTTGTTAATCCAGTAATGGAACCAATTTATGATGAAC | | |
| | | CGACGACGACTACTAGCGTGCCTTTGAGACGTTCTTATTT | | |
| | | ATTATCAGCTGGTATTTTTGGTGCTATTACGGATGTTTTC | | |
| | | TACAAAGAAAACAGTTACAAAGTGCCAACAGACAATTA | | |
| | | TATAACCACTTACGCTCGAATGGCTGCCCCAAAAGAAAT | | |
| | | TATCTTCTTAGAGGGAGAAACACTTTTTGGTGATGACAC | | |
| | | TGTGATAGAAGTGGCCATTATTTTGGCATCTTTTTCTGCT | | |
| | | TCCACACTACTTGTCCAGGCAGATTCCAACGGTACTATT | | |
| | | ACCGTTGAAGAGCTTAAAAAGCTCCTTGAACAATGGAAC | | |
| | | CTAGTAATAGGTTTCCTATTCCTTACATGGATTTGTCTTC | | |
| | | TACAATTTGCCTATGCCAACAGGAATAGGTTTTTGTATAT | | |
| | | AATTAAGTTAATTTTCCTCTGGCTGTTATGGCCAGTAACT | | |
| | | TTAGCTTGTTTTGTGCTTGCTGCTGTTTACAGAATAAATT | | |
| | | GGATCACCGGTGGAATTGCTATCGCAATGGCTTGTCTTG | | |
| | | TAGGCTTGATGTGGCTCAGCTACTTCATTGCTTCTTTCAG | | |
| | | ACTGTTTGCGCGTACGCGTTCCATGTGGTCATTCAATCCA | | |
| | | GAAACTAACATTCTTCTCAACGTGCCACTCCATGGCACT | | |
| | | ATTCTGACCAGACCGCTTCTAGAAAGTGAACTCGTAATC | | |
| | | GGAGCTGTGATCCTTCGTGGACATCTTCGTATTGCTGGAC | | |
| | | ACCATCTAGGACGCTGTGACATCAAGGACCTGCCTAAAG | | |
| | | AAATCACTGTTGCTACATCACGAACGCTTTCTTATTACAA | | |
| | | ATTGGGAGCTTCGCAGCGTGTAGCAGGTGACTCAGGTTT | | |
| | | TGCTGCATACAGTCGCTACAGGATTGGCAACTATAAATT | | |
| | | AAACACAGACCATTCCAGTAGCAGTGACAATATTGCTTT | | |
| | | GCTTGTACAGGGTGGCTCGTTAGGTGGCGGAGGGTCAGG | | |
| | | CATCGTGGGAATTGTGGCAGGACTGGCAGTGCTGGCCGT | | |
| | | GGTGGTGATCGGAGCCGTGGTGGCTACCGTGATGTGCAG | | |
| | | ACGGAAGTCCAGCGGAGGCAAGGGCGGCAGCTACAGCC | | |
| | | AGGCCGCCAGCTCTGATAGCGCCCAGGGCAGCGACGTGT | | |
| | | CACTGACAGCCTAGTAA (SEQ ID NO: RS C4n1) | | |

TABLE 12
String Sequences Group 2

| | | | AA | DNA |
|---|---|---|---|---|
| NAME | AA SEQUENCE | DNA SEQUENCE | LENGTH | LENGTH |
| | Named Segments: SP1-start GSS-N without Orf9b-Orf1ab 2300-membrane glycoprotein-end | | | |
| RS C5 | GSS-MITD | | | |
| RS C5 | MRVMAPRTLILLLSGALALTETWAGSG | ATGAGAGTGATGGCCCCCAGAACCCTGATCCTGCTGCT | 859 | 2577 |
| 2300 | GSGGGGSGGKDLSPRWYFYYLGTGPEA | GTCTGGCGCCCTGGCCCTGACAGAGACATGGGCCGGAA | | |
| | GLPYGANKDGIIWVATEGALNTPKDHI | GCGGAGGTTCCGGAGGAGGCGGCAGTGGCGGCAAAGA | | |
| | GTRNPANNAAIVLQLPQGTTLPKGFYA | TCTCAGTCCAAGATGGTATTTCTACTACCTAGGAACTGG | | |
| | EGSRGGSQASSRSSSRSRNSSRNSTPGSS | GCCAGAAGCTGGACTTCCCTATGGTGCTAACAAAGACG | | |
| | RGTSPARMAGNGGDAALALLLLDRLN | GCATCATATGGGTTGCAACTGAGGGAGCCTTGAATACA | | |
| | QLESKMSGKGQQQQGQTVTKKSAAEA | CCAAAAGATCACATTGGCACCCGCAATCCTGCTAACAA | | |
| | SKKPRQKRTATKAYNVTQAFGRRGPEQ | TGCTGCAATCGTGCTACAACTTCCTCAAGGAACAACATT | | |
| | TQGNFGDQELIRQGTDYKHWPQIAQFA | GCCAAAAGGCTTCTACGCAGAAGGGAGCAGAGGCGGC | | |
| | PSASAFFGMSRIGMEVTPSGTWLTYTG | AGTCAAGCCTCTTCTCGTTCCTCATCACGTAGTCGCAAC | | |
| | AIKLDDKDPNFKDQVILLNKHIDAYKTF | AGTTCAAGAAATTCAACTCCAGGCAGCAGTAGGGGAAC | | |
| | PPTEPKKDKKKKADETQALPQRQKKQQ | TTCTCCTGCTAGAATGGCTGGCAATGGCGGTGATGCTGC | | |
| | TVTLLPAADLDDFSKQLQQSMSSADST | TCTTGCTTTGCTGCTGCTTGACAGATTGAACCAGCTTGA | | |
| | QAFRACMVTNNTFTLKVPHVGEIPVAY | GAGCAAAATGTCTGGTAAAGGCCAACAACAACAAGGCC | | |
| | RKVLLKTIQPRVEKYLFDESGEFKLSEV | AAACTGTCACTAAGAAATCTGCTGCTGAGGCTTCTAAG | | |
| | GPEHSLAEYYIFFASFYYKRCFHTTDPSF | AAGCCTCGGCAAAAACGTACTGCCACTAAAGCATACAA | | |
| | LGRYMSALFADDLNQLTGYHTDESSEII | TGTAACACAAGCTTTCGGCAGACGTGGTCCAGAACAAA | | |
| | GYQLMCQPILLAEAELAKNVSLILGTVS | CCCAAGGAAATTTTGGGGACCAGGAACTAATCAGACAA | | |
| | WNLKKRYLLSAGIFGAITDVFYKENSY | GGAACTGATTACAAACATTGGCCGCAAATTGCACAATT | | |
| | KVPTDNYITTYARMAAPKEIIFLEGETLF | TGCCCCCAGCGCTTCAGCGTTCTTCGGAATGTCGCGCAT | | |
| | GDDTVIEVAIILASFSASTRRSGADSNGT | TGGCATGGAAGTCACACCTTCGGGAACGTGGTTGACCT | | |
| | ITVEELKKLLEQWNLVIGFLFLTWICLL | ACACAGGTGCCATCAAATTGGATGACAAAGATCCAAAT | | |
| | QFAYANRNRFLYIIKLIFLWLLWPVTLA | TTCAAAGATCAAGTCATTTTGCTGAATAAGCATATTGAC | | |
| | CFVLAAVYRINWITGGIAIAMACLVGL | GCATACAAAACATTCCCACCAACAGAGCCTAAAAAGGA | | |
| | MWLSYFIASFRLFARTRSMWSFNPETNI | CAAAAAGAAGAAGGCTGATGAAACTCAAGCCTTACCGC | | |
| | LLNVPLHGTILTRPLLESELVIGAVILRG | AGAGACAGAAGAAACAGCAAACTGTGACTCTTCTTCCT | | |
| | HLRIAGHHLGRCDIKDLPKEITVATSRT | GCTGCAGATTTGGATGATTTCTCCAAACAATTGCAACAA | | |
| | LSYYKLGASQRVAGDSGFAAYSRYRIG | TCCATGAGCAGTGCTGACTCAACTCAGGCCTTCCGCGCG | | |
| | NYKLNTDHSSSSDNIALLVQGGSLGGG | TGCATGGTAACAAACAATACCTTCACACTCAAAGTCCCT | | |
| | GSGIVGIVAGLAVLAVVVIGAVVATVM | CATGTGGGCGAAATACCAGTGGCTTACCGCAAGGTTCT | | |
| | CRRKSSGGKGGSYSQAASSDSAQGSDV | TCTTAAGACTATTCAACCAAGGGTTGAAAAGTACTTATT | | |
| | SLTA (SEQ ID NO: RS C5p1full) | TGATGAGTCTGGTGAGTTTAAATTGTCAGAAGTAGGAC | | |
| | | CTGAGCATAGTCTTGCCGAATACTACATCTTCTTTGCAT | | |
| | | CATTTTATTATAAAAGATGTTTTCACACAACTGATCCTA | | |
| | | GTTTTCTGGGTAGGTACATGTCAGCATTATTTGCTGATG | | |
| | | ATTTAAACCAGTTAACTGGTTATCATACTGACTTTTCAA | | |
| | | GTGAAATCATAGGATACCAGCTTATGTGTCAACCTATAC | | |
| | | TGTTAGCAGAAGCTGAACTTGCAAAGAATGTGTCCTTA | | |
| | | ATTCTTGGAACTGTTTCTTGGAATTTGAAAAAGCGTTAT | | |
| | | TTATTATCAGCTGGTATTTTTGGTGCTATTACGGATGTTT | | |
| | | TCTACAAAGAAAACAGTTACAAAGTGCCAACAGACAAT | | |
| | | TATATAACCACTTACGCCCGAATGGCTGCCCCAAAAGA | | |
| | | AATTATCTTCTTAGAGGGAGAAACACTTTTTGGTGATGA | | |
| | | CACTGTGATAGAAGTGGCCATTATTTTGGCATCTTTTTC | | |
| | | TGCTTCCACAAGGAGGTCTGGAGCAGATTCCAACGGTA | | |
| | | CTATTACCGTTGAAGAGCTTAAAAAGCTCCTTGAACAAT | | |
| | | GGAACCTAGTAATAGGTTTCCTATTCCTTACATGGATTT | | |
| | | GTCTTCTACAATTTGCCTATGCCAACAGGAATAGGTTTT | | |
| | | TGTATATAATTAAGTTAATTTTCCTCTGGCTGTTATGGC | | |
| | | CAGTAACTTTAGCTTGTTTTGTGCTTGCTGCTGTTTACAG | | |
| | | AATAAATTGGATCACCGGTGGAATTGCTATCGCAAT | | |
| | | GGCTTGTCTTGTAGGCTTGATGTGGCTCAGCTACTTCAT | | |
| | | TGCTTCTTTCAGACTGTTTGCGCGTACGCGTTCCATGTG | | |
| | | GTCATTCAATCCAGAAACTAACATTCTTCTCAACGTGCC | | |
| | | ACTCCATGGCACTATTCTGACCAGACCGCTTCTAGAAAG | | |
| | | TGAACTCGTAATCGGAGCTGTGATCCTTCGTGGACATCT | | |
| | | TCGTATTGCTGGACACCATCTAGGACGCTGTGACATCAA | | |
| | | GGACCTGCCTAAAGAAATCACTGTTGCTACATCACGAA | | |
| | | CGCTTTCTTATTACAAATTGGGAGCTTCGCAGCGTGTAG | | |
| | | CAGGTGACTCAGGTTTTGCTGCATACAGTCGCTACAGG | | |
| | | ATTGGCAACTATAAATTAAACACAGACCATTCCAGTAG | | |
| | | CAGTGACAATATTGCTTTGCTTGTACAGGGTGGTTCTCT | | |
| | | TGGCGGAGGGGGTTCGGGAATCGTGGGAATTGTGGCAG | | |
| | | GACTGGCAGTGCTGGCCGTGGTGGTGATCGGAGCCGTG | | |
| | | GTGGCTACCGTGATGTGCAGACGGAAGTCCAGCGGAGG | | |
| | | CAAGGGCGGCAGCTACAGCCAGGCCGCCAGCTCTGATA | | |
| | | GCGCCCAGGGCAGCGACGTGTCACTGACAGCCTAGTAA | | |
| | | (SEQ ID NO: RS C5n1) | | |
| RS C6 | Named Segments: SP1-start GSS-N 99-Orf1ab linker1 1200-N 201-Orf1ab linker2 1200-M | | 507 | 1521 |
| 1200 | 201-Orf1ab linker3 1200-M 99-end GSS-MITD | | | |
| RS C6 | MRVMAPRTLILLLSGALALTETWAGSG | ATGAGAGTGATGGCCCCCAGAACCCTGATCCTGCTGCT | | |
| 1200 | GSGGGGSGGRMAGNGGDAALALLLLD | GTCTGGCGCCCTGGCCCTGACAGAGACATGGGCCGGAA | | |
| | RLNQLESKMSGKGQQQMRACMVTNNT | GCGGAGGTTCCGGAGGAGGCGGCAGTGGCGGCAGAAT | | |
| | FTLKVPHVGEIPVAYRKVLLKTIQPRVE | GGCTGGCAATGGCGGTGATGCTGCTCTTGCTTTGCTGCT | | |
| | KYLFDESGEFKLSEVGPEHSLAEYKMC | GCTTGACAGATTGAACCAGCTTGAGAGCAAAATGTCTG | | |
| | GYKHWPQIAQFAPSASAFFGMSRIGME | GTAAAGGCCAACAACAAATGAGAGCGTGCATGGTAACA | | |
| | VTPSGTWLTYTGAIKLDDKDPNFKDQV | AACAATACCTTCACACTCAAAGTCCCTCATGTGGGCGA | | |
| | ILLNKHIDAYKTFPARCATTDPSFLGRY | AATACCAGTGGCTTACCGCAAGGTTCTTCTTAAGACTAT | | |
| | MSALFADDLNQLTGYHTDFSSEIIGYQL | TCAACCAAGGGTTGAAAAGTACTTATTTGATGAGTCTG | | |
| | MCQPILLAEAELAKNVSLILGTVSWNLK | GTGAGTTTAAATTGTCAGAAGTAGGACCTGAGCATAGT | | |
| | KQGFAYANRNRFLYIIKLIFLWLLWPVT | CTTGCCGAATACAAAATGTGCGGATACAAACATTGGCC | | |
| | LACFVLAAVYRINWITGGIAIAMACLVG | GCAAATTGCACAATTTGCCCCCAGCGCTTCAGCGTTCTT | | |
| | LMWLSYFIASFRLFYRSYLLSAGIFGAIT | CGGAATGTCGCGCATTGGCATGGAAGTCACACCTTCGG | | |
| | DVFYKENSYKVPTDNYITTYARMAAPK | GAACGTGGTTGACCTACACAGGTGCCATCAAATTGGAT | | |
| | EIIFLEGETLFGDDTVIEVSMFNLGRCDI | GACAAAGATCCAAATTTCAAAGATCAAGTCATTTTGCT | | |
| | KDLPKEITVATSRTLSYYKLGASQRVAG | GAATAAGCATATTGACGCATACAAAACATTCCCAGCTC | | |
| | GSLGGGGSGIVGIVAGLAVLAVVVIGA | GGTGTGCAACAACTGATCCTAGTTTTCTGGGTAGGTACA | | |
| | VVATVMCRRKSSGGKGGSYSQAASSDS | TGTCAGCATTATTTGCTGATGATTTAAACCAGTTAACTG | | |
| | AQGSDVSLTA (SEQ ID NO: RS C6p1full) | GTTATCATACTGACTTTTCAAGTGAAATCATAGGATACC | | |
| | | AGCTTATGTGTCAACCTATACTGTTAGCAGAAGCTGAAC | | |
| | | TTGCAAAGAATGTGTCCTTAATTCTTGGAACTGTTTCTT | | |
| | | GGAATTTGAAAAAACAAGGTTTTGCCTATGCCAACAGG | | |
| | | AATAGGTTTTTGTATATAATTAAGTTAATTTTCCTCTGG | | |
| | | CTGTTATGGCCAGTAACTTTAGCTTGTTTTGTGCTTGCTG | | |
| | | CTGTTTACAGAATAAATTGGATCACCGGTGGAATTGCTA | | |
| | | TCGCAATGGCTTGTCTTGTAGGCTTGATGTGGCTCAGCT | | |
| | | ACTTCATTGCTTCTTTCAGACTGTTTTACCGCTCCTATTT | | |
| | | ATTATCAGCTGGTATTTTTGGTGCTATTACGGATGTTTTC | | |
| | | TACAAAGAAAACAGTTACAAAGTGCCAACAGACAATTA | | |
| | | TATAACCACTTACGCTCGGATGGCTGCCCCAAAAGAAA | | |
| | | TTATCTTCTTAGAGGGAGAAACACTTTTTGGTGATGACA | | |
| | | CTGTGATAGAAGTGTCTATGTTTAACCTAGGACGCTGTG | | |
| | | ACATCAAGGACCTGCCTAAAGAAATCACTGTTGCTACA | | |
| | | TCACGAACGCTTTCTTATTACAAATTGGGAGCTTCGCAG | | |
| | | CGTGTAGCAGGTGGTTCTCTTGGCGGAGGGGGTTCGGG | | |
| | | AATCGTGGGAATTGTGGCAGGACTGGCAGTGCTGGCCG | | |
| | | TGGTGGTGATCGGAGCCGTGGTGGCTACCGTGATGTGC | | |
| | | AGACGGAAGTCCAGCGGAGGCAAGGGCGGCAGCTACA | | |
| | | GCCAGGCCGCCAGCTCTGATAGCGCCCAGGGCAGCGAC | | |
| | | GTGTCACTGACAGCCTAGTAA (SEQ ID NO: RS C6n1) | | |
| RS C7 | | | | |
| 1500 M | Named Segments: SP1-start GSS-N 501-Orf1ab linker1 1500-M 201-Orf1ab linker2 1500-M | | | |
| chunks | 99-Orf1ab linker3 1500-end GSS-MITD | | | |
| RS C7 | MRVMAPRTLILLLSGALALTETWAGSG | ATGAGAGTGATGGCCCCCAGAACCCTGATCCTGCTGCT | 595 | 1785 |
| 1500 M | GSGGGGSGGSPARMAGNGGDAALALL | GTCTGGCGCCCTGGCCCTGACAGAGACATGGGCCGGAA | | |
| chunks | LLDRLNQLESKMSGKGQQQQGQTVTK | GCGGAGGTTCCGGAGGAGGCGGCAGTGGCGGCTCTCCT | | |
| | KSAAEASKKPRQKRTATKAYNVTQAFG | GCTAGAATGGCTGGCAATGGCGGTGATGCTGCTCTTGCT | | |
| | RRGPEQTQGNFGDQELIRQGTDYKHWP | TTGCTGCTGCTTGACAGATTGAACCAGCTTGAGAGCAA | | |
| | QIAQFAPSASAFFGMSRIGMEVTPSGTW | AATGTCTGGTAAAGGCCAACAACAACAAGGCCAAACTG | | |
| | LTYTGAIKLDDKDPNFKDQVILLNKHID | TCACTAAGAAATCTGCTGCTGAGGCTTCTAAGAAGCCTC | | |
| | AYKTFPPTEPKKDKFKAAMVTNNTFTL | GGCAAAAACGTACTGCCACTAAAGCATACAATGTAACA | | |
| | KVPHVGEIPVAYRKVLLKTIQPRVEKYL | CAAGCTTTCGGCAGACGTGGTCCAGAACAAACCCAAGG | | |
| | FDESGEFKLSEVGPEHSLAEYYIFFASFY | AAATTTTGGGGACCAGGAACTAATCAGACAAGGAACTG | | |
| | YKRNGFAYANRNRFLYIIKLIFLWLLWP | ATTACAAACATTGGCCGCAAATTGCACAATTTGCCCCCA | | |
| | VTLACFVLAAVYRINWITGGIAIAMACL | GCGCTTCAGCGTTCTTCGGAATGTCGCGCATTGGCATGG | | |
| | VGLMWLSYFIASFRLFYNSFHTTDPSFL | AAGTCACACCTTCGGGAACGTGGTTGACCTACACAGGT | | |
| | GRYMSALFADDLNQLTGYHTDFSSEIIG | GCCATCAAATTGGATGACAAAGATCCAAATTTCAAAGA | | |
| | YQLMCQPILLAEAELAKNVSLILGTVSW | TCAAGTCATTTTGCTGAATAAGCATATTGACGCATACAA | | |
| | NLKKNGLGRCDIKDLPKEITVATSRTLS | AACATTCCCACCAACAGAGCCTAAAAAGGACAAATTCA | | |
| | YYKLGASQRVAYRSYLLSAGIFGAITDV | AAGCCGCAATGGTAACAAACAATACCTTCACACTCAAA | | |
| | FYKENSYKVPTDNYITTYARMAAPKEII | GTCCCTCATGTGGGCGAAATACCAGTGGCTTACCGCAA | | |
| | FLEGETLFGDDTVIEVAIILASFSASTRR | GGTTCTTCTTAAGACTATTCAACCAAGGGTTGAAAAGTA | | |
| | RGGGSLGGGGSGIVGIVAGLAVLAVVV | CTTATTTGATGAGTCTGGTGAGTTTAAATTGTCAGAAGT | | |
| | IGAVVATVMCRRKSSGGKGGSYSQAAS | AGGACCTGAGCATAGTCTTGCCGAATACTACATCTTCTT | | |
| | SDSAQGSDVSLTA (SEQ ID NO: RS | TGCATCATTTTATTATAAGAGGAATGGTTTTGCCTATGC | | |
| | C7p1full) | CAACAGGAATAGGTTTTTGTATATAATTAAGTTAATTTT | | |
| | | CCTCTGGCTGTTATGGCCAGTAACTTTAGCTTGTTTTGT | | |
| | | GCTTGCTGCTGTTTACAGAATAAATTGGATCACCGGTGG | | |
| | | AATTGCTATCGCAATGGCTTGTCTTGTAGGCTTGATGTG | | |
| | | GCTCAGCTACTTCATTGCTTCTTTCAGACTGTTTTACAAT | | |
| | | TCTTTCCACACAACTGATCCTAGTTTTCTGGGTAGGTAC | | |
| | | ATGTCAGCATTATTTGCTGATGATTTAAACCAGTTAACT | | |
| | | GGTTATCATACTGACTTTTCAAGTGAAATCATAGGATAC | | |
| | | CAGCTTATGTGTCAACCTATACTGTTAGCAGAAGCTGAA | | |
| | | CTTGCAAAGAATGTGTCCTTAATTCTTGGAACTGTTTCT | | |
| | | TGGAATTTGAAGAAAAACGGACTAGGACGCTGTGACAT | | |
| | | CAAGGACCTGCCTAAAGAAATCACTGTTGCTACATCAC | | |
| | | GAACGCTTTCTTATTACAAATTGGGAGCTTCGCAGCGTG | | |
| | | TAGCATACCGATCCTACTTATTATCAGCTGGTATTTTTG | | |
| | | GTGCTATTACGGATGTTTTCTACAAAGAAAACAGTTACA | | |
| | | AAGTGCCAACAGACAATTATATAACCACTTACGCTCGG | | |
| | | ATGGCGGCCCCAAAAGAAATTATCTTCTTAGAGGGAGA | | |
| | | AACACTTTTTGGTGATGACACTGTGATAGAAGTGGCCAT | | |
| | | TATTTTGGCATCTTTTTCTGCTTCCACAAGGCGACGGGG | | |
| | | TGGTGGTTCTCTTGGCGGAGGGGGTTCGGGAATCGTGG | | |
| | | GAATTGTGGCAGGACTGGCAGTGCTGGCCGTGGTGGTG | | |
| | | ATCGGAGCCGTGGTGGCTACCGTGATGTGCAGACGGAA | | |
| | | GTCCAGCGGAGGCAAGGGCGGCAGCTACAGCCAGGCC | | |
| | | GCCAGCTCTGATAGCGCCCAGGGCAGCGACGTGTCACT | | |
| | | GACAGCCTAGTAA (SEQ ID NO: RS C7n1) | | |
| RS C8 | | | | |
| 1500 M | | | | |
| epitopes | Named Segments: SP1-start GSS-N 501-Orf1ab 1500 M epitopes-end GSS-MITD | | | |
| RS C8 | MRVMAPRTLILLLSGALALTETWAGSG | ATGAGAGTGATGGCCCCCAGAACCCTGATCCTGCTGCT | 588 | 1764 |
| 1500 M | GSGGGGSGGSPARMAGNGGDAALALL | GTCTGGCGCCCTGGCCCTGACAGAGACATGGGCCGGAA | | |
| epitopes | LLDRLNQLESKMSGKGQQQQGQTVTK | GCGGAGGTTCCGGAGGAGGCGGCAGTGGCGGCTCTCCT | | |
| | KSAAEASKKPRQKRTATKAYNVTQAFG | GCTAGAATGGCTGGCAATGGCGGTGATGCTGCTCTTGCT | | |
| | RRGPEQTQGNFGDQELIRQGTDYKHWP | TTGCTGCTGCTTGACAGATTGAACCAGCTTGAGAGCAA | | |
| | QIAQFAPSASAFFGMSRIGMEVTPSGTW | AATGTCTGGTAAAGGCCAACAACAACAAGGCCAAACTG | | |
| | LTYTGAIKLDDKDPNFKDQVILLNKHID | TCACTAAGAAATCTGCTGCTGAGGCTTCTAAGAAGCCTC | | |
| | AYKTFPPTEPKKDKFRACMVTNNTFTL | GGCAAAAACGTACTGCCACTAAAGCATACAATGTAACA | | |
| | KVPHVGEIPVAYRKVLLKTIQPRVEKYL | CAAGCTTTCGGCAGACGTGGTCCAGAACAAACCCAAGG | | |
| | FDESGEFKLSEVGPEHSLAEYYIFFASFY | AAATTTTGGGGACCAGGAACTAATCAGACAAGGAACTG | | |
| | YKRCFHTTDPSFLGRYMSALFADDLNQ | ATTACAAACATTGGCCGCAAATTGCACAATTTGCCCCCA | | |
| | LTGYHTDFSSEIIGYQLMCQPILLAEAEL | GCGCTTCAGCGTTCTTCGGAATGTCGCGCATTGGCATGG | | |
| | AKNVSLILGTVSWNLKKRYLLSAGIFGA | AAGTCACACCTTCGGGAACGTGGTTGACCTACACAGGT | | |
| | ITDVFYKENSYKVPTDNYITTYARMAA | GCCATCAAATTGGATGACAAAGATCCAAATTTCAAAGA | | |
| | PKEIIFLEGETLFGDDTVIEVAIILASFSAS | TCAAGTCATTTTGCTGAATAAGCATATTGACGCATACAA | | |
| | TRRRGKLLEQWNLVIGFNRNRFLYIIKLI | AACATTCCCACCAACAGAGCCTAAAAAGGACAAATTTC | | |
| | FLWLLWPVTLACFVLAAVYSELVIGAVI | GTGCGTGCATGGTAACAAACAATACCTTCACACTCAAA | | |
| | LRGHLRIAGHHLGRTVATSRTLSYYKL | GTCCCTCATGTGGGCGAAATACCAGTGGCTTACCGCAA | | |
| | GASQRVKRYSGLMWLSYFARYAGGSL | GGTTCTTCTTAAGACTATTCAACCAAGGGTTGAAAAGTA | | |
| | GGGGSGIVGIVAGLAVLAVVVIGAVVA | CTTATTTGATGAGTCTGGTGAGTTTAAATTGTCAGAAGT | | |
| | TVMCRRKSSGGKGGSYSQAASSDSAQG | AGGACCTGAGCATAGTCTTGCCGAATACTACATCTTCTT | | |
| | SDVSLTA (SEQ ID NO: RS C8p1full) | TGCATCATTTTATTATAAGCGCTGTTTTCACACAACTGA | | |
| | | TCCTAGTTTTCTGGGTAGGTACATGTCAGCATTATTTGC | | |
| | | TGATGATTTAAACCAGTTAACTGGTTATCATACTGACTT | | |
| | | TTCAAGTGAAATCATAGGATACCAGCTTATGTGTCAACC | | |
| | | TATACTGTTAGCAGAAGCTGAACTTGCAAAGAATGTGT | | |
| | | CCTTAATTCTTGGAACTGTTTCTTGGAATTTGAAAAAAC | | |
| | | GTTACTTATTATCAGCTGGTATTTTTGGTGCTATTACGG | | |
| | | ATGTTTTCTACAAAGAAAACAGTTACAAAGTGCCAACA | | |
| | | GACAATTATATAACCACTTACGCGCGAATGGCAGCCCC | | |
| | | AAAAGAAATTATCTTCTTAGAGGGAGAAACACTTTTTG | | |
| | | GTGATGACACTGTGATAGAAGTGGCCATTATTTTGGCAT | | |
| | | CTTTTTCTGCTTCCACACGCAGGCGCGGAAAGCTCCTTG | | |
| | | AACAATGGAACCTAGTAATAGGTTTCAACAGGAATAGG | | |
| | | TTTTTGTATATAATTAAGTTAATTTTCCTCTGGCTGTTAT | | |
| | | GGCCAGTAACTTTAGCTTGTTTTGTGCTTGCTGCTGTTTA | | |
| | | CAGTGAACTCGTAATCGGAGCTGTGATCCTTCGTGGAC | | |
| | | ATCTTCGTATTGCTGGACACCATCTAGGACGCACTGTTG | | |
| | | CTACATCACGAACGCTTTCTTATTACAAATTGGGAGCTT | | |
| | | CGCAGCGTGTAAAACGCTACAGTGGCTTGATGTGGCTC | | |
| | | AGCTACTTCGCGCGTTATGCCGGTGGTTCTCTTGGCGGA | | |
| | | GGGGGTTCGGGAATCGTGGGAATTGTGGCAGGACTGGC | | |
| | | AGTGCTGGCCGTGGTGGTGATCGGAGCCGTGGTGGCTA | | |
| | | CCGTGATGTGCAGACGGAAGTCCAGCGGAGGCAAGGGC | | |
| | | GGCAGCTACAGCCAGGCCGCCAGCTCTGATAGCGCCCA | | |
| | | GGGCAGCGACGTGTCACTGACAGCCTAGTAA (SEQ ID | | |
| | | NO: RS C8n1) | | |

TABLE 15
Modified String Sequences Group 2

| Con- | | | |
|---|---|---|---|
| struct | Name | Amino Acid sequence | Nucleotide sequence |
| name | | | |
| RS-C5 | dEarI- | | ATTCTTCTGGTCCCCACAGACTCAGAGAGAACCC |
| | hAg | | |
| RS-C5 | Kozak | | GCCACC |
| RS-C5 | SEC | MFVFLVLLPLVSSQCVNLT | ATGTTTGTTTTTCTTGTTTTACTTCCTTTAGTCTCTTCTCAGTGTGTCAAT |
| | | | TTGACA |
| RS-C5 | RS-C5 | GGSGGGGSGGKDLSPRWYFYYLGT | GGCGGCTCTGGAGGAGGCGGCTCCGGAGGCAAAGATCTGAGCCCAAG |
| | | GPEAGLPYGANKDGIIWVATEGALN | ATGGTACTTTTACTACCTGGGAACAGGACCTGAAGCTGGACTGCCTTA |
| | | TPKDHIGTRNPANNAAIVLQLPQGT | TGGAGCAAATAAAGATGGAATCATCTGGGTGGCAACAGAAGGAGCAC |
| | | TLPKGFYAEGSRGGSQASSRSSSRSR | TGAATACACCAAAAGATCACATTGGAACCAGAAATCCAGCAAATAAT |
| | | NSSRNSTPGSSRGTSPARMAGNGGD | GCAGCAATCGTGCTGCAGCTGCCACAGGGAACAACACTGCCAAAAGG |
| | | AALALLLLDRLNQLESKMSGKGQQ | ATTTTACGCAGAAGGAAGCAGAGGAGGAAGCCAGGCAAGCAGCAGAA |
| | | QQGQTVTKKSAAEASKKPRQKRTA | GCAGCAGCAGAAGCAGAAATAGCAGCAGAAATAGCACACCTGGAAGC |
| | | TKAYNVTQAFGRRGPEQTQGNFGD | AGCAGAGGAACAAGCCCTGCAAGAATGGCAGGAAATGGAGGAGATGC |
| | | QELIRQGTDYKHWPQIAQFAPSASA | AGCACTGGCACTGCTGCTGCTGGATAGACTGAATCAGCTGGAAAGCAA |
| | | FFGMSRIGMEVTPSGTWLTYTGAIK | AATGAGCGGAAAAGGACAGCAGCAGCAGGGACAGACAGTGACAAAG |
| | | LDDKDPNFKDQVILLNKHIDAYKTF | AAAAGCGCTGCTGAAGCTTCCAAGAAACCAAGACAGAAAAGAACAGC |
| | | PPTEPKKDKKKKADETQALPQRQK | AACAAAAGCATACAATGTGACACAGGCATTTGGAAGGAGAGGACCTG |
| | | KQQTVTLLPAADLDDFSKQLQQSMS | AACAGACCCAGGGAAATTTTGGAGATCAGGAACTGATCAGACAGGGA |
| | | SADSTQAFRACMVTNNTFTLKVPHV | ACCGATTACAAACACTGGCCTCAGATTGCTCAGTTTGCTCCTTCTGCTT |
| | | GEIPVAYRKVLLKTIQPRVEKYLFDE | CTGCTTTCTTTGGAATGTCCAGAATTGGAATGGAAGTGACACCTTCTGG |
| | | SGEFKLSEVGPEHSLAEYYIFFASFY | AACATGGCTGACATACACAGGAGCAATCAAACTGGATGATAAAGATC |
| | | YKRCFHTTDPSFLGRYMSALFADDL | CAAATTTTAAAGATCAGGTGATTCTGCTGAATAAACACATTGATGCTT |
| | | NQLTGYHTDFSSEIIGYQLMCQPILL | ACAAAACATTTCCACCAACAGAACCAAAGAAAGATAAAAAGAAGAAA |
| | | AEAELAKNVSLILGTVSWNLKKRYL | GCTGATGAAACACAGGCTCTGCCTCAGAGACAGAAGAAACAGCAGAC |
| | | LSAGIFGAITDVFYKENSYKVPTDNY | AGTGACACTGCTGCCTGCTGCTGATCTGGATGATTTTTCCAAACAGCTG |
| | | ITTYARMAAPKEIIFLEGETLFGDDT | CAGCAGTCCATGTCCTCCGCTGATTCCACACAGGCTTTTAGAGCTTGCA |
| | | VIEVAIILASFSASTRRSGADSNGTIT | TGGTGACAAACAACACATTTACACTGAAAGTGCCTCATGTGGGAGAAA |
| | | VEELKKLLEQWNLVIGFLFLTWICLL | TTCCTGTGGCTTACAGAAAAGTGCTGCTGAAAACAATTCAACCAAGAG |
| | | QFAYANRNRFLYIIKLIFLWLLWPVT | TGGAAAAATACCTGTTTGATGAATCTGGAGAATTTAAACTTTCTGAAG |
| | | LACFVLAAVYRINWITGGIAIAMAC | TGGGACCTGAACACTCTCTTGCTGAATACTACATTTTCTTTGCTTCTTTT |
| | | LVGLMWLSYFIASFRLFARTRSMWS | TACTATAAAAGATGTTTTCACACAACTGATCCATCTTTTCTGGGAAGAT |
| | | FNPETNILLNVPLHGTILTRPLLESEL | ACATGTCTGCTCTTTTTGCTGATGATTTAAATCAGTTAACAGGATATCA |
| | | VIGAVILRGHLRIAGHHLGRCDIKDL | CACAGATTTTTCTTCTGAAATCATTGGATACCAGTTGATGTGTCAACCA |
| | | PKEITVATSRTLSYYKLGASQRVAG | ATTTTGTTGGCTGAAGCTGAATTGGCAAAAAACGTGTCTTTGATTCTTG |
| | | DSGFAAYSRYRIGNYKLNTDHSSSS | GAACAGTTTCTTGGAATCTTAAAAAGAGATACTTATTATCTGCTGGAAT |
| | | DNIALLVQGGSGGGGSGG (SEQ ID | TTTTGGAGCTATCACAGATGTGTTTTACAAAGAAAACTCATACAAAGT |
| | | NO: RS C5p2) | GCCAACAGACAATTACATAACAACATACGCCAGAATGGCTGCTCCAAA |
| | | | AGAAATCATCTTCCTTGAAGGAGAAACACTTTTTGGAGATGATACAGT |
| | | | GATTGAAGTGGCAATTATTCTGGCATCTTTTTCTGCATCCACAAGAAGA |
| | | | TCTGGAGCTGATTCCAATGGAACAATTACAGTGGAAGAACTGAAAAAG |
| | | | CTGCTGGAACAGTGGAATCTGGTGATTGGATTTCTGTTTCTGACATGGA |
| | | | TTTGTCTGCTGCAGTTTGCTTACGCTAATAGAAATAGATTTCTGTACAT |
| | | | TATTAAACTGATTTTTCTGTGGCTGCTGTGGCCTGTGACACTGGCTTGC |
| | | | TTTGTGCTGGCTGCTGTGTACAGAATTAATTGGATTACAGGAGGAATT |
| | | | GCAATTGCAATGGCATGCCTGGTGGGACTGATGTGGCTGTCTTACTTTA |
| | | | TTGCTTCTTTTAGACTGTTTGCAAGAACAAGATCTATGTGGTCTTTTAA |
| | | | TCCTGAAACAAATATTCTGCTGAATGTGCCTCTGCACGGAACAATTCTG |
| | | | ACAAGACCTCTGCTGGAATCTGAACTGGTGATTGGAGCTGTGATTCTG |
| | | | AGAGGACACCTGAGAATTGCTGGACACCACCTGGGAAGATGCGATATT |
| | | | AAAGATCTGCCAAAAGAAATTACAGTGGCAACAAGCAGAACACTGAG |
| | | | CTACTACAAACTGGGAGCTTCCCAAAGAGTGGCTGGAGATAGCGGATT |
| | | | TGCTGCTTACAGCAGATACAGAATTGGAAATTACAAACTGAATACCGA |
| | | | TCACAGCTCATCTTCTGATAATATTGCTCTGCTGGTGCAGGGAGGATCC |
| | | | GGTGGTGGCGGCAGCGGCGGC (SEQ ID NO: RS C5n2) |
| RS-C5 | TM | EQYIKWPWYIWLGFIAGLIAIVMVTI | GAACAGTACATTAAATGGCCTTGGTACATTTGGCTTGGATTTATTGCAG |
| | | MLCCMTSCCSCLKGCCSCGSCCKFD | GATTAATTGCAATTGTGATGGTGACAATTATGTTATGTTGTATGACATC |
| | | EDDSEPVLKGVKLHYT** | ATGTTGTTCTTGTTTAAAAGGATGTTGTTCTTGTGGAAGCTGTTGTAAA |
| | | | TTTGATGAAGATGATTCTGAACCTGTGTTAAAAGGAGTGAAATTGCAT |
| | | | TACACATGATGA |
| RS-C5 | | | CTCGAG |
| RS-C5 | F element | | CTGGTACTGCATGCACGCAATGCTAGCTGCCCCTTTCCCGTCCTGGGTA |
| | | | CCCCGAGTCTCCCCCGACCTCGGGTCCCAGGTATGCTCCCACCTCCACC |
| | | | TGCCCCACTCACCACCTCTGCTAGTTCCAGACACCTCC |
| RS-C5 | I element | | CAAGCACGCAGCAATGCAGCTCAAAACGCTTAGCCTAGCCACACCCCC |
| | | | ACGGGAAACAGCAGTGATTAACCTTTAGCAATAAACGAAAGTTTAACT |
| | | | AAGCTATACTAACCCCAGGGTTGGTCAATTTCGTGCCAGCCACACC |
| RS-C5 | | | CTGGAGCTAGC |
| RS-C5 | PolyA | | AAAAAAAAAAAAAAAAAAAAAAAAAAAAAAGCATATGACTAAAAAA |
| | | | AAAAAAAAAAAAAAAAAAAAAAAAAAAAAAAAAAAAAAAAAAAAA |
| | | | AAAAAAAAAAAAAAAAAAA |
| RS-C5 | Full | MFVFLVLLPLVSSQCVNLTGGSGGG | ATTCTTCTGGTCCCCACAGACTCAGAGAGAACCCGCCACCATGTTTGTT |
| | Sequence | GSGGKDLSPRWYFYYLGTGPEAGLP | TTTCTTGTTTTACTTCCTTTAGTCTCTTCTCAGTGTGTCAATTTGACAGG |
| | | YGANKDGIIWVATEGALNTPKDHIG | CGGCTCTGGAGGAGGCGGCTCCGGAGGCAAAGATCTGAGCCCAAGAT |
| | | TRNPANNAAIVLQLPQGTTLPKGFY | GGTACTTTTACTACCTGGGAACAGGACCTGAAGCTGGACTGCCTTATG |
| | | AEGSRGGSQASSRSSSRSRNSSRNST | GAGCAAATAAAGATGGAATCATCTGGGTGGCAACAGAAGGAGCACTG |
| | | PGSSRGTSPARMAGNGGDAALALLL | AATACACCAAAAGATCACATTGGAACCAGAAATCCAGCAAATAATGC |
| | | LDRLNQLESKMSGKGQQQQGQTVT | AGCAATCGTGCTGCAGCTGCCACAGGGAACAACACTGCCAAAAGGATT |
| | | KKSAAEASKKPRQKRTATKAYNVT | TTACGCAGAAGGAAGCAGAGGAGGAAGCCAGGCAAGCAGCAGAAGC |
| | | QAFGRRGPEQTQGNFGDQELIRQGT | AGCAGCAGAAGCAGAAATAGCAGCAGAAATAGCACACCTGGAAGCAG |
| | | DYKHWPQIAQFAPSASAFFGMSRIG | CAGAGGAACAAGCCCTGCAAGAATGGCAGGAAATGGAGGAGATGCAG |
| | | MEVTPSGTWLTYTGAIKLDDKDPNF | CACTGGCACTGCTGCTGCTGGATAGACTGAATCAGCTGGAAAGCAAAA |
| | | KDQVILLNKHIDAYKTFPPTEPKKD | TGAGCGGAAAAGGACAGCAGCAGCAGGGACAGACAGTGACAAAGAA |
| | | KKKKADETQALPQRQKKQQTVTLL | AAGCGCTGCTGAAGCTTCCAAGAAACCAAGACAGAAAAGAACAGCAA |
| | | PAADLDDFSKQLQQSMSSADSTQAF | CAAAAGCATACAATGTGACACAGGCATTTGGAAGGAGAGGACCTGAA |
| | | RACMVTNNTFTLKVPHVGEIPVAYR | CAGACCCAGGGAAATTTTGGAGATCAGGAACTGATCAGACAGGGAAC |
| | | KVLLKTIQPRVEKYLFDESGEFKLSE | CGATTACAAACACTGGCCTCAGATTGCTCAGTTTGCTCCTTCTGCTTCT |
| | | VGPEHSLAEYYIFFASFYYKRCFHTT | GCTTTCTTTGGAATGTCCAGAATTGGAATGGAAGTGACACCTTCTGGA |
| | | DPSFLGRYMSALFADDLNQLTGYHT | ACATGGCTGACATACACAGGAGCAATCAAACTGGATGATAAAGATCC |
| | | DFSSEIIGYQLMCQPILLAEAELAKN | AAATTTTAAAGATCAGGTGATTCTGCTGAATAAACACATTGATGCTTA |
| | | VSLILGTVSWNLKKRYLLSAGIFGAI | CAAAACATTTCCACCAACAGAACCAAAGAAAGATAAAAAGAAGAAAG |
| | | TDVFYKENSYKVPTDNYITTYARMA | CTGATGAAACACAGGCTCTGCCTCAGAGACAGAAGAAACAGCAGACA |
| | | APKEIIFLEGETLFGDDTVIEVAIILAS | GTGACACTGCTGCCTGCTGCTGATCTGGATGATTTTTCCAAACAGCTGC |
| | | FSASTRRSGADSNGTITVEELKKLLE | AGCAGTCCATGTCCTCCGCTGATTCCACACAGGCTTTTAGAGCTTGCAT |
| | | QWNLVIGFLFLTWICLLQFAYANRN | GGTGACAAACAACACATTTACACTGAAAGTGCCTCATGTGGGAGAAAT |
| | | RFLYIIKLIFLWLLWPVTLACFVLAA | TCCTGTGGCTTACAGAAAAGTGCTGCTGAAAACAATTCAACCAAGAGT |
| | | VYRINWITGGIAIAMACLVGLMWLS | GGAAAAATACCTGTTTGATGAATCTGGAGAATTTAAACTTTCTGAAGT |
| | | YFIASFRLFARTRSMWSFNPETNILL | GGGACCTGAACACTCTCTTGCTGAATACTACATTTTCTTTGCTTCTTTTT |
| | | NVPLHGTILTRPLLESELVIGAVILRG | ACTATAAAAGATGTTTTCACACAACTGATCCATCTTTTCTGGGAAGATA |
| | | HLRIAGHHLGRCDIKDLPKEITVATS | CATGTCTGCTCTTTTTGCTGATGATTTAAATCAGTTAACAGGATATCAC |
| | | RTLSYYKLGASQRVAGDSGFAAYSR | ACAGATTTTTCTTCTGAAATCATTGGATACCAGTTGATGTGTCAACCAA |
| | | YRIGNYKLNTDHSSSSDNIALLVQG | TTTTGTTGGCTGAAGCTGAATTGGCAAAAAACGTGTCTTTGATTCTTGG |
| | | GSGGGGSGGEQYIKWPWYIWLGFIA | AACAGTTTCTTGGAATCTTAAAAAGAGATACTTATTATCTGCTGGAATT |
| | | GLIAIVMVTIMLCCMTSCCSCLKGC | TTTGGAGCTATCACAGATGTGTTTTACAAAGAAAACTCATACAAAGTG |
| | | CSCGSCCKFDEDDSEPVLKGVKLHY | CCAACAGACAATTACATAACAACATACGCCAGAATGGCTGCTCCAAAA |
| | | T** (SEQ ID NO: RS C5p2full) | GAAATCATCTTCCTTGAAGGAGAAACACTTTTTGGAGATGATACAGTG |
| | | | ATTGAAGTGGCAATTATTCTGGCATCTTTTTCTGCATCCACAAGAAGAT |
| | | | CTGGAGCTGATTCCAATGGAACAATTACAGTGGAAGAACTGAAAAAG |
| | | | CTGCTGGAACAGTGGAATCTGGTGATTGGATTTCTGTTTCTGACATGGA |
| | | | TTTGTCTGCTGCAGTTTGCTTACGCTAATAGAAATAGATTTCTGTACAT |
| | | | TATTAAACTGATTTTTCTGTGGCTGCTGTGGCCTGTGACACTGGCTTGC |
| | | | TTTGTGCTGGCTGCTGTGTACAGAATTAATTGGATTACAGGAGGAATT |
| | | | GCAATTGCAATGGCATGCCTGGTGGGACTGATGTGGCTGTCTTACTTTA |
| | | | TTGCTTCTTTTAGACTGTTTGCAAGAACAAGATCTATGTGGTCTTTTAA |
| | | | TCCTGAAACAAATATTCTGCTGAATGTGCCTCTGCACGGAACAATTCTG |
| | | | ACAAGACCTCTGCTGGAATCTGAACTGGTGATTGGAGCTGTGATTCTG |
| | | | AGAGGACACCTGAGAATTGCTGGACACCACCTGGGAAGATGCGATATT |
| | | | AAAGATCTGCCAAAAGAAATTACAGTGGCAACAAGCAGAACACTGAG |
| | | | CTACTACAAACTGGGAGCTTCCCAAAGAGTGGCTGGAGATAGCGGATT |
| | | | TGCTGCTTACAGCAGATACAGAATTGGAAATTACAAACTGAATACCGA |
| | | | TCACAGCTCATCTTCTGATAATATTGCTCTGCTGGTGCAGGGAGGATCC |
| | | | GGTGGTGGCGGCAGCGGCGGCGAACAGTACATTAAATGGCCTTGGTAC |
| | | | ATTTGGCTTGGATTTATTGCAGGATTAATTGCAATTGTGATGGTGACAA |
| | | | TTATGTTATGTTGTATGACATCATGTTGTTCTTGTTTAAAAGGATGTTGT |
| | | | TCTTGTGGAAGCTGTTGTAAATTTGATGAAGATGATTCTGAACCTGTGT |
| | | | TAAAAGGAGTGAAATTGCATTACACATGATGACTCGAGCTGGTACTGC |
| | | | ATGCACGCAATGCTAGCTGCCCCTTTCCCGTCCTGGGTACCCCGAGTCT |
| | | | CCCCCGACCTCGGGTCCCAGGTATGCTCCCACCTCCACCTGCCCCACTC |
| | | | ACCACCTCTGCTAGTTCCAGACACCTCCCAAGCACGCAGCAATGCAGC |
| | | | TCAAAACGCTTAGCCTAGCCACACCCCCACGGGAAACAGCAGTGATTA |
| | | | ACCTTTAGCAATAAACGAAAGTTTAACTAAGCTATACTAACCCCAGGG |
| | | | TTGGTCAATTTCGTGCCAGCCACACCCTGGAGCTAGCAAAAAAAAAAA |
| | | | AAAAAAAAAAAAAAAAAAAGCATATGACTAAAAAAAAAAAAAAAAA |
| | | | AAAAAAAAAAAAAAAAAAAAAAAAAAAAAAAAAAAAAAAAAAAAA |
| | | | AAAAAAAA (SEQ ID NO: RS C5n2full) |
| | | | ATGAGAGTGATGGCCCCCAGAACCCTGATCCTGCTGCTGTCTGGCGCC |
| | | | CTGGCCCTGACAGAGACATGGGCCGGAAGCGGCGGCTCTGGAGGAGG |
| | | | CGGCTCCGGAGGCAAAGATCTGAGCCCAAGATGGTACTTTTACTACCT |
| | | | GGGAACAGGACCTGAAGCTGGACTGCCTTATGGAGCAAATAAAGATG |
| | | | GAATCATCTGGGTGGCAACAGAAGGAGCACTGAATACACCAAAAGAT |
| | | | CACATTGGAACCAGAAATCCAGCAAATAATGCAGCAATCGTGCTGCAG |
| | | | CTGCCACAGGGAACAACACTGCCAAAAGGATTTTACGCAGAAGGAAG |
| | | | CAGAGGAGGAAGCCAGGCAAGCAGCAGAAGCAGCAGCAGAAGCAGA |
| | | | AATAGCAGCAGAAATAGCACACCTGGAAGCAGCAGAGGAACAAGCCC |
| | | | TGCAAGAATGGCAGGAAATGGAGGAGATGCAGCACTGGCACTGCTGC |
| | | | TGCTGGATAGACTGAATCAGCTGGAAAGCAAAATGAGCGGAAAAGGA |
| | | | CAGCAGCAGCAGGGACAGACAGTGACAAAGAAAAGCGCTGCTGAAGC |
| | | | TTCCAAGAAACCAAGACAGAAAAGAACAGCAACAAAAGCATACAATG |
| | | | TGACACAGGCATTTGGAAGGAGAGGACCTGAACAGACCCAGGGAAAT |
| | | | TTTGGAGATCAGGAACTGATCAGACAGGGAACCGATTACAAACACTGG |
| | | | CCTCAGATTGCTCAGTTTGCTCCTTCTGCTTCTGCTTTCTTTGGAATGTC |
| | | | CAGAATTGGAATGGAAGTGACACCTTCTGGAACATGGCTGACATACAC |
| | | | AGGAGCAATCAAACTGGATGATAAAGATCCAAATTTTAAAGATCAGGT |
| | | | GATTCTGCTGAATAAACACATTGATGCTTACAAAACATTTCCACCAAC |
| | | | AGAACCAAAGAAAGATAAAAAGAAGAAAGCTGATGAAACACAGGCTC |
| | | | TGCCTCAGAGACAGAAGAAACAGCAGACAGTGACACTGCTGCCTGCTG |
| | | | CTGATCTGGATGATTTTTCCAAACAGCTGCAGCAGTCCATGTCCTCCGC |
| | | | TGATTCCACACAGGCTTTTAGAGCTTGCATGGTGACAAACAACACATT |
| | | | TACACTGAAAGTGCCTCATGTGGGAGAAATTCCTGTGGCTTACAGAAA |
| | | | AGTGCTGCTGAAAACAATTCAACCAAGAGTGGAAAAATACCTGTTTGA |
| | | | TGAATCTGGAGAATTTAAACTTTCTGAAGTGGGACCTGAACACTCTCTT |
| | | | GCTGAATACTACATTTTCTTTGCTTCTTTTTACTATAAAAGATGTTTTCA |
| | | | CACAACTGATCCATCTTTTCTGGGAAGATACATGTCTGCTCTTTTTGCT |
| | | | GATGATTTAAATCAGTTAACAGGATATCACACAGATTTTTCTTCTGAAA |
| | | | TCATTGGATACCAGTTGATGTGTCAACCAATTTTGTTGGGTGAAGCAG |
| | | | AATTGGCAAAAAACGTGTCTTTGATTCTTGGAACAGTTTCTTGGAATCT |
| | | | TAAAAAGAGATACTTATTATCTGCTGGAATTTTTGGAGCTATCACAGAT |
| | | | GTGTTTTACAAAGAAAACTCATACAAAGTGCCAACAGACAATTACATA |
| | | | ACAACATACGCCAGAATGGCTGCTCCAAAAGAAATCATCTTCCTTGAA |
| | | | GGAGAAACACTTTTTGGAGATGATACAGTGATTGAAGTGGCAATTATT |
| | | | CTGGCATCTTTTTCTGCATCCACAAGAAGATCTGGAGCTGATTCCAATG |
| | | | GAACAATTACAGTGGAAGAACTGAAAAAGCTGCTGGAACAGTGGAAT |
| | | | CTGGTGATTGGATTTCTGTTTCTGACATGGATTTGTCTGCTGCAGTTTG |
| | | | CTTACGCTAATAGAAATAGATTTCTGTACATTATTAAACTGATTTTTCT |
| | | | GTGGCTGCTGTGGCCTGTGACACTGGCTTGCTTTGTGCTGGCTGCTGTG |
| | | | TACAGAATTAATTGGATTACAGGAGGAATTGCAATTGCAATGGCATGC |
| | | | CTGGTGGGACTGATGTGGCTGTCTTACTTTATTGCTTCTTTTAGACTGTT |
| | | | TGCAAGAACAAGATCTATGTGGTCTTTTAATCCTGAAACAAATATTCTG |
| | | | CTGAATGTGCCTCTGCACGGAACAATTCTGACAAGACCTCTGCTGGAA |
| | | | TCTGAACTGGTGATTGGAGCTGTGATTCTGAGAGGACACCTGAGAATT |
| | | | GCTGGACACCACCTGGGAAGATGCGATATTAAAGATCTGCCAAAAGA |
| | | | AATTACAGTGGCAACAAGCAGAACACTGAGCTACTACAAACTGGGAG |
| | | | CTTCCCAAAGAGTGGCTGGAGATAGCGGATTTGCTGCTTACAGCAGAT |
| | | | ACAGAATTGGAAATTACAAACTGAATACCGATCACAGCTCATCTTCTG |
| | | | ATAATATTGCTCTGCTGGTGCAGGGTGGTTCTCTTGGCGGAGGGGGTTC |
| | | | GGGAATCGTGGGAATTGTGGCAGGACTGGCAGTGCTGGCCGTGGTGGT |
| | | | GATCGGAGCCGTGGTGGCTACCGTGATGTGCAGACGGAAGTCCAGCGG |
| | | | AGGCAAGGGCGGCAGCTACAGCCAGGCCGCCAGCTCTGATAGCGCCC |
| | | | AGGGCAGCGACGTGTCACTGACAGCCTAGTAA (SEQ ID NO: RS C5n3) |
| RS-C6 | dEarI- | | ATTCTTCTGGTCCCCACAGACTCAGAGAGAACCC |
| | hAg | | |
| RS-C6 | Kozak | | GCCACC |
| RS-C6 | SEC | MFVFLVLLPLVSSQCVNLT | ATGTTTGTTTTTCTTGTTTTACTTCCTTTAGTCTCTTCTCAGTGTGTCAAT |
| | | | TTGACA |
| RS-C6 | RS-C6 | GGSGGGGSGGRMAGNGGDAALAL | GGCGGCTCTGGAGGAGGCGGCTCCGGAGGCAGAATGGCTGGAAATGG |
| | | LLLDRLNQLESKMSGKGQQQMRAC | AGGAGATGCTGCTCTGGCTCTGCTGCTGCTGGATAGACTGAATCAGCT |
| | | MVTNNTFTLKVPHVGEIPVAYRKVL | GGAATCAAAAATGTCTGGAAAAGGACAGCAACAGATGAGAGCTTGCA |
| | | LKTIQPRVEKYLFDESGEFKLSEVGP | TGGTGACAAACAACACATTTACACTGAAAGTGCCTCATGTGGGAGAAA |
| | | EHSLAEYKMCGYKHWPQIAQFAPS | TTCCTGTGGCTTACAGAAAAGTGCTGCTGAAAACAATTCAACCAAGAG |
| | | ASAFFGMSRIGMEVTPSGTWLTYTG | TGGAAAAATACCTGTTTGATGAATCTGGAGAATTTAAACTTTCTGAAG |
| | | AIKLDDKDPNFKDQVILLNKHIDAY | TGGGACCTGAACACTCTCTTGCTGAATACAAAATGTGCGGATACAAAC |
| | | KTFPARCATTDPSFLGRYMSALFAD | ACTGGCCTCAGATTGCTCAGTTTGCTCCTTCTGCTTCTGCTTTCTTTGGA |
| | | DLNQLTGYHTDFSSEIIGYQLMCQPI | ATGAGCAGAATTGGAATGGAAGTGACACCTTCTGGAACATGGCTGACA |
| | | LLAEAELAKNVSLILGTVSWNLKKQ | TACACAGGAGCAATCAAACTGGATGATAAAGATCCAAACTTTAAAGAT |
| | | GFAYANRNRFLYIIKLIFLWLLWPVT | CAGGTGATTCTGCTGAACAAACACATTGATGCTTACAAAACATTTCCT |
| | | LACFVLAAVYRINWITGGIAIAMAC | GCTAGATGTGCTACAACTGATCCTTCTTTTCTGGGAAGATACATGTCTG |
| | | LVGLMWLSYFIASFRLFYRSYLLSA | CTCTTTTTGCTGATGATTTAAATCAGTTAACAGGATATCACACAGATTT |
| | | GIFGAITDVFYKENSYKVPTDNYITT | TTCTTCTGAAATCATTGGATACCAGTTGATGTGTCAACCAATTTTGTTG |
| | | YARMAAPKEIIFLEGETLFGDDTVIE | GCTGAAGCTGAATTGGCAAAAAACGTGTCTTTGATTCTTGGAACAGTT |
| | | VSMFNLGRCDIKDLPKEITVATSRTL | TCTTGGAATCTTAAAAAACAAGGATTTGCATACGCAAATAGAAATAGA |
| | | SYYKLGASQRVAGGSGGGGSGG | TTTCTGTACATTATTAAACTGATTTTTCTGTGGCTGCTGTGGCCTGTGAC |
| | | (SEQ ID NO: RS C6p2) | ACTGGCTTGCTTTGTGCTGGCTGCTGTGTACAGAATAAATTGGATAACA |
| | | | GGAGGAATTGCAATTGCAATGGCATGCTTGGTGGGATTGATGTGGTTG |
| | | | TCTTACTTTATTGCTTCTTTTAGACTGTTTTACAGATCCTACTTATTATC |
| | | | TGCTGGAATTTTTGGAGCTATCACAGATGTGTTTTACAAAGAAAACTC |
| | | | ATACAAAGTGCCAACAGACAATTACATAACAACATACGCTAGAATGGC |
| | | | TGCTCCAAAAGAAATCATCTTCCTTGAAGGAGAAACACTTTTTGGAGA |
| | | | TGATACAGTGATTGAAGTGTCCATGTTTAATCTGGGAAGATGCGATAT |
| | | | TAAAGATCTGCCAAAAGAAATTACAGTGGCAACAAGCAGAACACTGA |
| | | | GCTACTACAAACTGGGAGCAAGCCAGAGAGTGGCAGGAGGATCCGGT |
| | | | GGTGGCGGCAGCGGCGGC (SEQ ID NO: RS C6n2) |
| RS-C6 | TM | EQYIKWPWYIWLGFIAGLIAIVMVTI | GAACAGTACATTAAATGGCCTTGGTACATTTGGCTTGGATTTATTGCAG |
| | | MLCCMTSCCSCLKGCCSCGSCCKFD | GATTAATTGCAATTGTGATGGTGACAATTATGTTATGTTGTATGACATC |
| | | EDDSEPVLKGVKLHYT** | ATGTTGTTCTTGTTTAAAAGGATGTTGTTCTTGTGGAAGCTGTTGTAAA |
| | | | TTTGATGAAGATGATTCTGAACCTGTGTTAAAAGGAGTGAAATTGCAT |
| | | | TACACATGATGA |
| RS-C6 | | | CTCGAG |
| RS-C6 | F element | | CTGGTACTGCATGCACGCAATGCTAGCTGCCCCTTTCCCGTCCTGGGTA |
| | | | CCCCGAGTCTCCCCCGACCTCGGGTCCCAGGTATGCTCCCACCTCCACC |
| | | | TGCCCCACTCACCACCTCTGCTAGTTCCAGACACCTCC |
| RS-C6 | I element | | CAAGCACGCAGCAATGCAGCTCAAAACGCTTAGCCTAGCCACACCCCC |
| | | | ACGGGAAACAGCAGTGATTAACCTTTAGCAATAAACGAAAGTTTAACT |
| | | | AAGCTATACTAACCCCAGGGTTGGTCAATTTCGTGCCAGCCACACC |
| RS-C6 | | | CTGGAGCTAGC |
| RS-C6 | PolyA | | AAAAAAAAAAAAAAAAAAAAAAAAAAAAAAGCATATGACTAAAAAA |
| | | | AAAAAAAAAAAAAAAAAAAAAAAAAAAAAAAAAAAAAAAAAAAAA |
| | | | AAAAAAAAAAAAAAAAAAA |
| RS-C6 | FullSeq | MFVFLVLLPLVSSQCVNLTGGSGGG | ATTCTTCTGGTCCCCACAGACTCAGAGAGAACCCGCCACCATGTTTGTT |
| | | GSGGRMAGNGGDAALALLLLDRLN | TTTCTTGTTTTACTTCCTTTAGTCTCTTCTCAGTGTGTCAATTTGACAGG |
| | | QLESKMSGKGQQQMRACMVTNNT | CGGCTCTGGAGGAGGCGGCTCCGGAGGCAGAATGGCTGGAAATGGAG |
| | | FTLKVPHVGEIPVAYRKVLLKTIQPR | GAGATGCTGCTCTGGCTCTGCTGCTGCTGGATAGACTGAATCAGCTGG |
| | | VEKYLFDESGEFKLSEVGPEHSLAE | AATCAAAAATGTCTGGAAAAGGACAGCAACAGATGAGAGCTTGCATG |
| | | YKMCGYKHWPQIAQFAPSASAFFG | GTGACAAACAACACATTTACACTGAAAGTGCCTCATGTGGGAGAAATT |
| | | MSRIGMEVTPSGTWLTYTGAIKLDD | CCTGTGGCTTACAGAAAAGTGCTGCTGAAAACAATTCAACCAAGAGTG |
| | | KDPNFKDQVILLNKHIDAYKTFPAR | GAAAAATACCTGTTTGATGAATCTGGAGAATTTAAACTTTCTGAAGTG |
| | | CATTDPSFLGRYMSALFADDLNQLT | GGACCTGAACACTCTCTTGCTGAATACAAAATGTGCGGATACAAACAC |
| | | GYHTDFSSEIIGYQLMCQPILLAEAE | TGGCCTCAGATTGCTCAGTTTGCTCCTTCTGCTTCTGCTTTCTTTGGAAT |
| | | LAKNVSLILGTVSWNLKKQGFAYA | GAGCAGAATTGGAATGGAAGTGACACCTTCTGGAACATGGCTGACATA |
| | | NRNRFLYIIKLIFLWLLWPVTLACFV | CACAGGAGCAATCAAACTGGATGATAAAGATCCAAACTTTAAAGATCA |
| | | LAAVYRINWITGGIAIAMACLVGLM | GGTGATTCTGCTGAACAAACACATTGATGCTTACAAAACATTTCCTGCT |
| | | WLSYFIASFRLFYRSYLLSAGIFGAIT | AGATGTGCTACAACTGATCCTTCTTTTCTGGGAAGATACATGTCTGCTC |
| | | DVFYKENSYKVPTDNYITTYARMA | TTTTTGCTGATGATTTAAATCAGTTAACAGGATATCACACAGATTTTTC |
| | | APKEIIFLEGETLFGDDTVIEVSMFNL | TTCTGAAATCATTGGATACCAGTTGATGTGTCAACCAATTTTGTTGGCT |
| | | GRCDIKDLPKEITVATSRTLSYYKLG | GAAGCTGAATTGGCAAAAAACGTGTCTTTGATTCTTGGAACAGTTTCTT |
| | | ASQRVAGGSGGGGSGGEQYIKWPW | GGAATCTTAAAAAACAAGGATTTGCATACGCAAATAGAAATAGATTTC |
| | | YIWLGFIAGLIAIVMVTIMLCCMTSC | TGTACATTATTAAACTGATTTTTCTGTGGCTGCTGTGGCCTGTGACACT |
| | | CSCLKGCCSCGSCCKFDEDDSEPVL | GGCTTGCTTTGTGCTGGCTGCTGTGTACAGAATAAATTGGATAACAGG |
| | | KGVKLHYT** (SEQ ID NO: RS | AGGAATTGCAATTGCAATGGCATGCTTGGTGGGATTGATGTGGTTGTC |
| | | C6p2full) | TTACTTTATTGCTTCTTTTAGACTGTTTTACAGATCCTACTTATTATCTG |
| | | | CTGGAATTTTTGGAGCTATCACAGATGTGTTTTACAAAGAAAACTCAT |
| | | | ACAAAGTGCCAACAGACAATTACATAACAACATACGCTAGAATGGCTG |
| | | | CTCCAAAAGAAATCATCTTCCTTGAAGGAGAAACACTTTTTGGAGATG |
| | | | ATACAGTGATTGAAGTGTCCATGTTTAATCTGGGAAGATGCGATATTA |
| | | | AAGATCTGCCAAAAGAAATTACAGTGGCAACAAGCAGAACACTGAGC |
| | | | TACTACAAACTGGGAGCAAGCCAGAGAGTGGCAGGAGGATCCGGTGG |
| | | | TGGCGGCAGCGGCGGCGAACAGTACATTAAATGGCCTTGGTACATTTG |
| | | | GCTTGGATTTATTGCAGGATTAATTGCAATTGTGATGGTGACAATTATG |
| | | | TTATGTTGTATGACATCATGTTGTTCTTGTTTAAAAGGATGTTGTTCTTG |
| | | | TGGAAGCTGTTGTAAATTTGATGAAGATGATTCTGAACCTGTGTTAAA |
| | | | AGGAGTGAAATTGCATTACACATGATGACTCGAGCTGGTACTGCATGC |
| | | | ACGCAATGCTAGCTGCCCCTTTCCCGTCCTGGGTACCCCGAGTCTCCCC |
| | | | CGACCTCGGGTCCCAGGTATGCTCCCACCTCCACCTGCCCCACTCACCA |
| | | | CCTCTGCTAGTTCCAGACACCTCCCAAGCACGCAGCAATGCAGCTCAA |
| | | | AACGCTTAGCCTAGCCACACCCCCACGGGAAACAGCAGTGATTAACCT |
| | | | TTAGCAATAAACGAAAGTTTAACTAAGCTATACTAACCCCAGGGTTGG |
| | | | TCAATTTCGTGCCAGCCACACCCTGGAGCTAGCAAAAAAAAAAAAAA |
| | | | AAAAAAAAAAAAAAAAGCATATGACTAAAAAAAAAAAAAAAAAAAA |
| | | | AAAAAAAAAAAAAAAAAAAAAAAAAAAAAAAAAAAAAAAAAAAAA |
| | | | AAAAA (SEQ ID NO: RS Con2full) |
| | | | ATGAGAGTGATGGCCCCCAGAACCCTGATCCTGCTGCTGTCTGGCGCC |
| | | | CTGGCCCTGACAGAGACATGGGCCGGAAGCGGCGGCTCTGGAGGAGG |
| | | | CGGCTCCGGAGGCAGAATGGCTGGAAATGGAGGAGATGCTGCTCTGG |
| | | | CTCTGCTGCTGCTGGATAGACTGAATCAGCTGGAATCAAAAATGTCTG |
| | | | GAAAAGGACAGCAACAGATGAGAGCTTGCATGGTGACAAACAACACA |
| | | | TTTACACTGAAAGTGCCTCATGTGGGAGAAATTCCTGTGGCTTACAGA |
| | | | AAAGTGCTGCTGAAAACAATTCAACCAAGAGTGGAAAAATACCTGTTT |
| | | | GATGAATCTGGAGAATTTAAACTTTCTGAAGTGGGACCTGAACACTCT |
| | | | CTTGCTGAATACAAAATGTGCGGATACAAACACTGGCCTCAGATTGCT |
| | | | CAGTTTGCTCCTTCTGCTTCTGCTTTCTTTGGAATGAGCAGAATTGGAA |
| | | | TGGAAGTGACACCTTCTGGAACATGGCTGACATACACAGGAGCAATCA |
| | | | AACTGGATGATAAAGATCCAAACTTTAAAGATCAGGTGATTCTGCTGA |
| | | | ACAAACACATTGATGCTTACAAAACATTTCCTGCTAGATGTGCTACAA |
| | | | CTGATCCTTCTTTTCTGGGAAGATACATGTCTGCTCTTTTTGCTGATGAT |
| | | | TTAAATCAGTTAACAGGATATCACACAGATTTTTCTTCTGAAATCATTG |
| | | | GATACCAGTTGATGTGTCAACCAATTTTGTTGGGTGAAGCAGAATTGG |
| | | | CAAAAAACGTGTCTTTGATTCTTGGAACAGTTTCTTGGAATCTTAAAAA |
| | | | ACAAGGATTTGCATACGCAAATAGAAATAGATTTCTGTACATTATTAA |
| | | | ACTGATTTTTCTGTGGCTGCTGTGGCCTGTGACACTGGCTTGCTTTGTG |
| | | | CTGGCTGCTGTGTACAGAATAAATTGGATAACAGGAGGAATTGCAATT |
| | | | GCAATGGCATGCTTGGTGGGATTGATGTGGTTGTCTTACTTTATTGCTT |
| | | | CTTTTAGACTGTTTTACAGATCCTACTTATTATCTGCTGGAATTTTTGGA |
| | | | GCTATCACAGATGTGTTTTACAAAGAAAACTCATACAAAGTGCCAACA |
| | | | GACAATTACATAACAACATACGCTAGAATGGCTGCTCCAAAAGAAATC |
| | | | ATCTTCCTTGAAGGAGAAACACTTTTTGGAGATGATACAGTGATTGAA |
| | | | GTGTCCATGTTTAATCTGGGAAGATGCGATATTAAAGATCTGCCAAAA |
| | | | GAAATTACAGTGGCAACAAGCAGAACACTGAGCTACTACAAACTGGG |
| | | | AGCAAGCCAGAGAGTGGCAGGTGGTTCTCTTGGCGGAGGGGGTTCGG |
| | | | GAATCGTGGGAATTGTGGCAGGACTGGCAGTGCTGGCCGTGGTGGTGA |
| | | | TCGGAGCCGTGGTGGCTACCGTGATGTGCAGACGGAAGTCCAGCGGAG |
| | | | GCAAGGGCGGCAGCTACAGCCAGGCCGCCAGCTCTGATAGCGCCCAG |
| | | | GGCAGCGACGTGTCACTGACAGCCTAGTAA (SEQ ID NO: RS C6n3) |
| RS-C7 | dEarI- | | ATTCTTCTGGTCCCCACAGACTCAGAGAGAACCC |
| | hAg | | |
| RS-C7 | Kozak | | GCCACC |
| RS-C7 | SEC | MFVFLVLLPLVSSQCVNLT | ATGTTTGTTTTTCTTGTTTTACTTCCTTTAGTCTCTTCTCAGTGTGTCAAT |
| | | | TTGACA |
| RS-C7 | RS-C7 | GGSGGGGSGGSPARMAGNGGDAAL | GGCGGCTCTGGAGGAGGCGGCTCCGGAGGCTCTCCTGCCAGAATGGCT |
| | | ALLLLDRLNQLESKMSGKGQQQQG | GGAAATGGAGGAGATGCTGCTCTGGCTCTGCTGCTGCTGGATAGACTG |
| | | QTVTKKSAAEASKKPRQKRTATKA | AATCAGCTGGAAAGCAAAATGAGCGGAAAAGGACAGCAGCAGCAGGG |
| | | YNVTQAFGRRGPEQTQGNFGDQELI | ACAAACAGTGACAAAGAAATCTGCTGCTGAAGCCAGCAAGAAACCAA |
| | | RQGTDYKHWPQIAQFAPSASAFFGM | GACAGAAAAGAACAGCCACAAAAGCCTACAATGTGACACAGGCCTTT |
| | | SRIGMEVTPSGTWLTYTGAIKLDDK | GGAAGAAGGGGACCTGAACAGACACAGGGAAATTTTGGAGATCAGGA |
| | | DPNFKDQVILLNKHIDAYKTFPPTEP | ACTGATCAGACAGGGAACAGATTACAAACACTGGCCTCAGATCGCCCA |
| | | KKDKFKAAMVTNNTFTLKVPHVGE | GTTTGCCCCATCTGCCTCTGCCTTCTTTGGAATGAGCAGAATTGGAATG |
| | | IPVAYRKVLLKTIQPRVEKYLFDESG | GAAGTGACACCTTCTGGAACATGGCTGACATACACAGGAGCCATCAAA |
| | | EFKLSEVGPEHSLAEYYIFFASFYYK | CTGGATGATAAAGATCCAAATTTTAAAGATCAGGTGATTCTGCTGAAT |
| | | RNGFAYANRNRFLYIIKLIFLWLLWP | AAACACATTGATGCCTACAAAACATTTCCACCAACAGAACCAAAGAAA |
| | | VTLACFVLAAVYRINWITGGIAIAM | GATAAATTCAAAGCTGCTATGGTGACAAACAACACATTTACACTGAAA |
| | | ACLVGLMWLSYFIASFRLFYNSFHT | GTGCCTCATGTGGGAGAAATTCCTGTGGCTTACAGAAAAGTGCTGCTG |
| | | TDPSFLGRYMSALFADDLNQLTGYH | AAAACAATTCAACCAAGAGTGGAAAAATACCTGTTTGATGAATCTGGA |
| | | TDFSSEIIGYQLMCQPILLAEAELAK | GAATTTAAACTTTCTGAAGTGGGACCTGAACACTCTCTTGCTGAATACT |
| | | NVSLILGTVSWNLKKNGLGRCDIKD | ACATTTTCTTTGCTTCTTTTTACTATAAGAGGAATGGATTTGCATACGC |
| | | LPKEITVATSRTLSYYKLGASQRVA | AAATAGAAATAGATTTCTGTACATTATTAAACTGATTTTTCTGTGGCTG |
| | | YRSYLLSAGIFGAITDVFYKENSYKV | CTGTGGCCTGTGACACTGGCTTGCTTTGTGCTGGCTGCTGTGTACAGAA |
| | | PTDNYITTYARMAAPKEIIFLEGETL | TAAATTGGATAACAGGAGGAATTGCAATTGCAATGGCATGCTTGGTGG |
| | | FGDDTVIEVAIILASFSASTRRRGGGS | GATTGATGTGGTTGTCTTACTTTATTGCTTCTTTTAGACTGTTTTACAAC |
| | | GGGGSGG (SEQ ID NO: RS C7p2) | TCTTTTCACACAACTGATCCATCTTTTCTGGGAAGATACATGTCTGCTC |
| | | | TTTTTGCTGATGATTTAAATCAGTTAACAGGATATCACACAGATTTTTC |
| | | | TTCTGAAATCATTGGATACCAGTTGATGTGTCAACCAATTTTGTTGGCT |
| | | | GAAGCTGAATTGGCAAAAAACGTGTCTTTGATTCTTGGAACAGTTTCTT |
| | | | GGAATCTTAAGAAAAACGGACTGGGAAGATGCGATATTAAAGATCTG |
| | | | CCAAAAGAAATTACAGTGGCAACAAGCAGAACACTGAGCTACTACAA |
| | | | ACTGGGAGCAAGCCAGAGAGTGGCATACAGATCCTACTTATTATCTGC |
| | | | TGGAATTTTTGGAGCTATCACAGATGTGTTTTACAAAGAAAACTCATA |
| | | | CAAAGTGCCAACAGACAATTACATAACAACATACGCTAGAATGGCTGC |
| | | | TCCAAAAGAAATCATCTTCCTTGAAGGAGAAACACTTTTTGGAGATGA |
| | | | TACAGTGATTGAAGTGGCAATTATTCTGGCATCTTTTTCTGCATCCACA |
| | | | AGAAGAAGGGGAGGAGGATCCGGTGGTGGCGGCAGCGGCGGC (SEQ |
| | | | ID NO: RS C7n2) |
| RS-C7 | TM | EQYIKWPWYIWLGFIAGLIAIVMVTI | GAACAGTACATTAAATGGCCTTGGTACATTTGGCTTGGATTTATTGCAG |
| | | MLCCMTSCCSCLKGCCSCGSCCKFD | GATTAATTGCAATTGTGATGGTGACAATTATGTTATGTTGTATGACATC |
| | | EDDSEPVLKGVKLHYT** | ATGTTGTTCTTGTTTAAAAGGATGTTGTTCTTGTGGAAGCTGTTGTAAA |
| | | | TTTGATGAAGATGATTCTGAACCTGTGTTAAAAGGAGTGAAATTGCAT |
| | | | TACACATGATGA |
| RS-C7 | | | CTCGAG |
| RS-C7 | F element | | CTGGTACTGCATGCACGCAATGCTAGCTGCCCCTTTCCCGTCCTGGGTA |
| | | | CCCCGAGTCTCCCCCGACCTCGGGTCCCAGGTATGCTCCCACCTCCACC |
| | | | TGCCCCACTCACCACCTCTGCTAGTTCCAGACACCTCC |
| RS-C7 | I element | | CAAGCACGCAGCAATGCAGCTCAAAACGCTTAGCCTAGCCACACCCCC |
| | | | ACGGGAAACAGCAGTGATTAACCTTTAGCAATAAACGAAAGTTTAACT |
| | | | AAGCTATACTAACCCCAGGGTTGGTCAATTTCGTGCCAGCCACACC |
| RS-C7 | | | CTGGAGCTAGC |
| RS-C7 | PolyA | | AAAAAAAAAAAAAAAAAAAAAAAAAAAAAAGCATATGACTAAAAAA |
| | | | AAAAAAAAAAAAAAAAAAAAAAAAAAAAAAAAAAAAAAAAAAAAA |
| | | | AAAAAAAAAAAAAAAAAAA |
| RS-C7 | FullSeq | MFVFLVLLPLVSSQCVNLTGGSGGG | ATTCTTCTGGTCCCCACAGACTCAGAGAGAACCCGCCACCATGTTTGTT |
| | | GSGGSPARMAGNGGDAALALLLLD | TTTCTTGTTTTACTTCCTTTAGTCTCTTCTCAGTGTGTCAATTTGACAGG |
| | | RLNQLESKMSGKGQQQQGQTVTKK | CGGCTCTGGAGGAGGCGGCTCCGGAGGCTCTCCTGCCAGAATGGCTGG |
| | | SAAEASKKPRQKRTATKAYNVTQA | AAATGGAGGAGATGCTGCTCTGGCTCTGCTGCTGCTGGATAGACTGAA |
| | | FGRRGPEQTQGNFGDQELIRQGTDY | TCAGCTGGAAAGCAAAATGAGCGGAAAAGGACAGCAGCAGCAGGGAC |
| | | KHWPQIAQFAPSASAFFGMSRIGME | AAACAGTGACAAAGAAATCTGCTGCTGAAGCCAGCAAGAAACCAAGA |
| | | VTPSGTWLTYTGAIKLDDKDPNFKD | CAGAAAAGAACAGCCACAAAAGCCTACAATGTGACACAGGCCTTTGG |
| | | QVILLNKHIDAYKTFPPTEPKKDKFK | AAGAAGGGGACCTGAACAGACACAGGGAAATTTTGGAGATCAGGAAC |
| | | AAMVTNNTFTLKVPHVGEIPVAYRK | TGATCAGACAGGGAACAGATTACAAACACTGGCCTCAGATCGCCCAGT |
| | | VLLKTIQPRVEKYLFDESGEFKLSEV | TTGCCCCATCTGCCTCTGCCTTCTTTGGAATGAGCAGAATTGGAATGGA |
| | | GPEHSLAEYYIFFASFYYKRNGFAY | AGTGACACCTTCTGGAACATGGCTGACATACACAGGAGCCATCAAACT |
| | | ANRNRFLYIIKLIFLWLLWPVTLACF | GGATGATAAAGATCCAAATTTTAAAGATCAGGTGATTCTGCTGAATAA |
| | | VLAAVYRINWITGGIAIAMACLVGL | ACACATTGATGCCTACAAAACATTTCCACCAACAGAACCAAAGAAAGA |
| | | MWLSYFIASFRLFYNSFHTTDPSFLG | TAAATTCAAAGCTGCTATGGTGACAAACAACACATTTACACTGAAAGT |
| | | RYMSALFADDLNQLTGYHTDESSEII | GCCTCATGTGGGAGAAATTCCTGTGGCTTACAGAAAAGTGCTGCTGAA |
| | | GYQLMCQPILLAEAELAKNVSLILG | AACAATTCAACCAAGAGTGGAAAAATACCTGTTTGATGAATCTGGAGA |
| | | TVSWNLKKNGLGRCDIKDLPKEITV | ATTTAAACTTTCTGAAGTGGGACCTGAACACTCTCTTGCTGAATACTAC |
| | | ATSRTLSYYKLGASQRVAYRSYLLS | ATTTTCTTTGCTTCTTTTTACTATAAGAGGAATGGATTTGCATACGCAA |
| | | AGIFGAITDVFYKENSYKVPTDNYIT | ATAGAAATAGATTTCTGTACATTATTAAACTGATTTTTCTGTGGCTGCT |
| | | TYARMAAPKEIIFLEGETLFGDDTVI | GTGGCCTGTGACACTGGCTTGCTTTGTGCTGGCTGCTGTGTACAGAATA |
| | | EVAIILASFSASTRRRGGGSGGGGSG | AATTGGATAACAGGAGGAATTGCAATTGCAATGGCATGCTTGGTGGGA |
| | | GEQYIKWPWYIWLGFIAGLIAIVMV | TTGATGTGGTTGTCTTACTTTATTGCTTCTTTTAGACTGTTTTACAACTC |
| | | TIMLCCMTSCCSCLKGCCSCGSCCK | TTTTCACACAACTGATCCATCTTTTCTGGGAAGATACATGTCTGCTCTT |
| | | FDEDDSEPVLKGVKLHYT** (SEQ | TTTGCTGATGATTTAAATCAGTTAACAGGATATCACACAGATTTTTCTT |
| | | ID NO: RS C7p2full) | CTGAAATCATTGGATACCAGTTGATGTGTCAACCAATTTTGTTGGCTGA |
| | | | AGCTGAATTGGCAAAAAACGTGTCTTTGATTCTTGGAACAGTTTCTTGG |
| | | | AATCTTAAGAAAAACGGACTGGGAAGATGCGATATTAAAGATCTGCCA |
| | | | AAAGAAATTACAGTGGCAACAAGCAGAACACTGAGCTACTACAAACT |
| | | | GGGAGCAAGCCAGAGAGTGGCATACAGATCCTACTTATTATCTGCTGG |
| | | | AATTTTTGGAGCTATCACAGATGTGTTTTACAAAGAAAACTCATACAA |
| | | | AGTGCCAACAGACAATTACATAACAACATACGCTAGAATGGCTGCTCC |
| | | | AAAAGAAATCATCTTCCTTGAAGGAGAAACACTTTTTGGAGATGATAC |
| | | | AGTGATTGAAGTGGCAATTATTCTGGCATCTTTTTCTGCATCCACAAGA |
| | | | AGAAGGGGAGGAGGATCCGGTGGTGGCGGCAGCGGCGGCGAACAGTA |
| | | | CATTAAATGGCCTTGGTACATTTGGCTTGGATTTATTGCAGGATTAATT |
| | | | GCAATTGTGATGGTGACAATTATGTTATGTTGTATGACATCATGTTGTT |
| | | | CTTGTTTAAAAGGATGTTGTTCTTGTGGAAGCTGTTGTAAATTTGATGA |
| | | | AGATGATTCTGAACCTGTGTTAAAAGGAGTGAAATTGCATTACACATG |
| | | | ATGACTCGAGCTGGTACTGCATGCACGCAATGCTAGCTGCCCCTTTCCC |
| | | | GTCCTGGGTACCCCGAGTCTCCCCCGACCTCGGGTCCCAGGTATGCTCC |
| | | | CACCTCCACCTGCCCCACTCACCACCTCTGCTAGTTCCAGACACCTCCC |
| | | | AAGCACGCAGCAATGCAGCTCAAAACGCTTAGCCTAGCCACACCCCCA |
| | | | CGGGAAACAGCAGTGATTAACCTTTAGCAATAAACGAAAGTTTAACTA |
| | | | AGCTATACTAACCCCAGGGTTGGTCAATTTCGTGCCAGCCACACCCTG |
| | | | GAGCTAGCAAAAAAAAAAAAAAAAAAAAAAAAAAAAAAGCATATGA |
| | | | CTAAAAAAAAAAAAAAAAAAAAAAAAAAAAAAAAAAAAAAAAAAAA |
| | | | AAAAAAAAAAAAAAAAAAAAAAAAAA (SEQ ID NO: RS C7n2full) |
| RS-C7 | SEC | MRVMAPRTLILLLSGALALTETWAG | ATGAGAGTGATGGCCCCCAGAACCCTGATCCTGCTGCTGTCTGGCGCC |
| | | S | CTGGCCCTGACAGAGACATGGGCCGGAAGC |
| RS-C7 | | | GGCGGCTCTGGAGGAGGCGGCTCCGGAGGCTCTCCTGCCAGAATGGCT |
| | | | GGAAATGGAGGAGATGCTGCTCTGGCTCTGCTGCTGCTGGATAGACTG |
| | | | AATCAGCTGGAAAGCAAAATGAGCGGAAAAGGACAGCAGCAGCAGGG |
| | | | ACAAACAGTGACAAAGAAATCTGCTGCTGAAGCCAGCAAGAAACCAA |
| | | | GACAGAAAAGAACAGCCACAAAAGCCTACAATGTGACACAGGCCTTT |
| | | | GGAAGAAGGGGACCTGAACAGACACAGGGAAATTTTGGAGATCAGGA |
| | | | ACTGATCAGACAGGGAACAGATTACAAACACTGGCCTCAGATCGCCCA |
| | | | GTTTGCCCCATCTGCCTCTGCCTTCTTTGGAATGAGCAGAATTGGAATG |
| | | | GAAGTGACACCTTCTGGAACATGGCTGACATACACAGGAGCCATCAAA |
| | | | CTGGATGATAAAGATCCAAATTTTAAAGATCAGGTGATTCTGCTGAAT |
| | | | AAACACATTGATGCCTACAAAACATTTCCACCAACAGAACCAAAGAAA |
| | | | GATAAATTCAAAGCTGCTATGGTGACAAACAACACATTTACACTGAAA |
| | | | GTGCCTCATGTGGGAGAAATTCCTGTGGCTTACAGAAAAGTGCTGCTG |
| | | | AAAACAATTCAACCAAGAGTGGAAAAATACCTGTTTGATGAATCTGGA |
| | | | GAATTTAAACTTTCTGAAGTGGGACCTGAACACTCTCTTGCTGAATACT |
| | | | ACATTTTCTTTGCTTCTTTTTACTATAAGAGGAATGGATTTGCATACGC |
| | | | AAATAGAAATAGATTTCTGTACATTATTAAACTGATTTTTCTGTGGCTG |
| | | | CTGTGGCCTGTGACACTGGCTTGCTTTGTGCTGGCTGCTGTGTACAGAA |
| | | | TAAATTGGATAACAGGAGGAATTGCAATTGCAATGGCATGCTTGGTGG |
| | | | GATTGATGTGGTTGTCTTACTTTATTGCTTCTTTTAGACTGTTTTACAAC |
| | | | TCTTTTCACACAACTGATCCATCTTTTCTGGGAAGATACATGTCTGCTC |
| | | | TTTTTGCTGATGATTTAAATCAGTTAACAGGATATCACACAGATTTTTC |
| | | | TTCTGAAATCATTGGATACCAGTTGATGTGTCAACCAATTTTGTTGGGT |
| | | | GAAGCAGAATTGGCAAAAAACGTGTCTTTGATTCTTGGAACAGTTTCT |
| | | | TGGAATCTTAAGAAAAACGGACTGGGAAGATGCGATATTAAAGATCTG |
| | | | CCAAAAGAAATTACAGTGGCAACAAGCAGAACACTGAGCTACTACAA |
| | | | ACTGGGAGCAAGCCAGAGAGTGGCATACAGATCCTACTTATTATCTGC |
| | | | TGGAATTTTTGGAGCTATCACAGATGTGTTTTACAAAGAAAACTCATA |
| | | | CAAAGTGCCAACAGACAATTACATAACAACATACGCTAGAATGGCTGC |
| | | | TCCAAAAGAAATCATCTTCCTTGAAGGAGAAACACTTTTTGGAGATGA |
| | | | TACAGTGATTGAAGTGGCAATTATTCTGGCATCTTTTTCTGCATCCACA |
| | | | AGAAGAAGGGGAGGTGGTTCTCTTGGCGGAGGGGGTTCGGGA (SEQ ID |
| | | | NO: RS C7n3) |
| RS-C7 | TM | | ATCGTGGGAATTGTGGCAGGACTGGCAGTGCTGGCCGTGGTGGTGATC |
| | | | GGAGCCGTGGTGGCTACCGTGATGTGCAGACGGAAGTCCAGCGGAGG |
| | | | CAAGGGCGGCAGCTACAGCCAGGCCGCCAGCTCTGATAGCGCCCAGG |
| | | | GCAGCGACGTGTCACTGACAGCCTAGTAA |
| RS-C7 | | | AGAATAAACTAGT |
| RS-C7 | dEarI- | | ATTCTTCTGGTCCCCACAGACTCAGAGAGAACCC |
| | hAg | | |
| RS-C7 | Kozak | | GCCACC |
| RS-C7 | SEC | MFVFLVLLPLVSSQCVNLT | ATGTTTGTTTTTCTTGTTTTACTTCCTTTAGTCTCATCTCAGTGTGTCAA |
| | | | TTTGACA |
| RS-C7 | RS-C7 | GGSGGGGSGGSPARMAGNGGDAAL | GGCGGCTCTGGAGGAGGCGGCTCCGGAGGCTCTCCTGCCAGAATGGCT |
| | | ALLLLDRLNQLESKMSGKGQQQQG | GGAAATGGAGGAGATGCTGCTCTGGCTCTGCTGCTGCTGGATAGACTG |
| | | QTVTKKSAAEASKKPRQKRTATKA | AATCAGCTGGAAAGCAAAATGAGCGGAAAAGGACAGCAGCAGCAGGG |
| | | YNVTQAFGRRGPEQTQGNFGDQELI | ACAAACAGTGACAAAGAAATCTGCTGCTGAAGCCAGCAAGAAACCAA |
| | | RQGTDYKHWPQIAQFAPSASAFFGM | GACAGAAAAGAACAGCCACAAAAGCCTACAATGTGACACAGGCCTTT |
| | | SRIGMEVTPSGTWLTYTGAIKLDDK | GGAAGAAGGGGACCTGAACAGACACAGGGAAATTTTGGAGATCAGGA |
| | | DPNFKDQVILLNKHIDAYKTFPPTEP | ACTGATCAGACAGGGAACAGATTACAAACACTGGCCTCAGATCGCCCA |
| | | KKDKFKAAMVTNNTFTLKVPHVGE | GTTTGCCCCATCTGCCTCTGCCTTCTTTGGAATGAGCAGAATTGGAATG |
| | | IPVAYRKVLLKTIQPRVEKYLFDESG | GAAGTGACACCTTCTGGAACATGGCTGACATACACAGGAGCCATCAAA |
| | | EFKLSEVGPEHSLAEYYIFFASFYYK | CTGGATGATAAAGATCCAAATTTTAAAGATCAGGTGATTCTGCTGAAT |
| | | RNGFAYANRNRFLYIIKLIFLWLLWP | AAACACATTGATGCCTACAAAACATTTCCACCAACAGAACCAAAGAAA |
| | | VTLACFVLAAVYRINWITGGIAIAM | GATAAATTCAAAGCTGCTATGGTGACAAACAACACATTTACACTGAAA |
| | | ACLVGLMWLSYFIASFRLFYNSFHT | GTGCCTCATGTGGGAGAAATTCCTGTGGCTTACAGAAAAGTGCTGCTG |
| | | TDPSFLGRYMSALFADDLNQLTGYH | AAAACAATTCAACCAAGAGTGGAAAAATACCTGTTTGATGAATCTGGA |
| | | TDFSSEIIGYQLMCQPILLAEAELAK | GAATTTAAACTTTCTGAAGTGGGACCTGAACACTCTCTTGCTGAATACT |
| | | NVSLILGTVSWNLKKNGLGRCDIKD | ACATTTTCTTTGCTTCTTTTTACTATAAGAGGAATGGATTTGCATACGC |
| | | LPKEITVATSRTLSYYKLGASQRVA | AAATAGAAATAGATTTCTGTACATTATTAAACTGATTTTTCTGTGGCTG |
| | | YRSYLLSAGIFGAITDVFYKENSYKV | CTGTGGCCTGTGACACTGGCTTGCTTTGTGCTGGCTGCTGTGTACAGAA |
| | | PTDNYITTYARMAAPKEIIFLEGETL | TAAATTGGATAACAGGAGGAATTGCAATTGCAATGGCATGCTTGGTGG |
| | | FGDDTVIEVAIILASFSASTRRRGGGS | GATTGATGTGGTTGTCTTACTTTATTGCTTCTTTTAGACTGTTTTACAAC |
| | | GGGGSGG (SEQ ID NO: RS C7p4) | TCTTTTCACACAACTGATCCATCTTTTCTGGGAAGATACATGTCTGCTC |
| | | | TTTTTGCTGATGATTTAAATCAGTTAACAGGATATCACACAGATTTTTC |
| | | | TTCTGAAATCATTGGATACCAGTTGATGTGTCAACCAATTTTGTTGGCT |
| | | | GAAGCTGAATTGGCAAAAAACGTGTCTTTGATTCTTGGAACAGTTTCTT |
| | | | GGAATCTTAAGAAAAACGGACTGGGAAGATGCGATATTAAAGATCTG |
| | | | CCAAAAGAAATTACAGTGGCAACAAGCAGAACACTGAGCTACTACAA |
| | | | ACTGGGAGCAAGCCAGAGAGTGGCATACAGATCCTACTTATTATCTGC |
| | | | TGGAATTTTTGGAGCTATCACAGATGTGTTTTACAAAGAAAACTCATA |
| | | | CAAAGTGCCAACAGACAATTACATAACAACATACGCTAGAATGGCTGC |
| | | | TCCAAAAGAAATCATCTTCCTTGAAGGAGAAACACTTTTTGGAGATGA |
| | | | TACAGTGATTGAAGTGGCAATTATTCTGGCATCTTTTTCTGCATCCACA |
| | | | AGAAGAAGGGGAGGAGGATCCGGTGGTGGCGGCAGCGGCGGC (SEQ |
| | | | ID NO: RS C7n4) |
| RS-C7 | TM | EQYIKWPWYIWLGFIAGLIAIVMVTI | GAACAGTACATTAAATGGCCTTGGTACATTTGGCTTGGATTTATTGCAG |
| | | MLCCMTSCCSCLKGCCSCGSCCKFD | GATTAATTGCAATTGTGATGGTGACAATTATGTTATGTTGTATGACATC |
| | | EDDSEPVLKGVKLHYT** | ATGTTGTTCTTGTTTAAAAGGATGTTGTTCTTGTGGAAGCTGTTGTAAA |
| | | | TTTGATGAAGATGATTCTGAACCTGTGTTAAAAGGAGTGAAATTGCAT |
| | | | TACACATGATGA |
| RS-C7 | | | CTCGAG |
| RS-C7 | F element | | CTGGTACTGCATGCACGCAATGCTAGCTGCCCCTTTCCCGTCCTGGGTA |
| | | | CCCCGAGTCTCCCCCGACCTCGGGTCCCAGGTATGCTCCCACCTCCACC |
| | | | TGCCCCACTCACCACCTCTGCTAGTTCCAGACACCTCC |
| RS-C7 | I element | | CAAGCACGCAGCAATGCAGCTCAAAACGCTTAGCCTAGCCACACCCCC |
| | | | ACGGGAAACAGCAGTGATTAACCTTTAGCAATAAACGAAAGTTTAACT |
| | | | AAGCTATACTAACCCCAGGGTTGGTCAATTTCGTGCCAGCCACACC |
| RS-C7 | | | CTGGAGCTAGC |
| RS-C7 | PolyA | | AAAAAAAAAAAAAAAAAAAAAAAAAAAAAAGCATATGACTAAAAAA |
| | | | AAAAAAAAAAAAAAAAAAAAAAAAAAAAAAAAAAAAAAAAAAAAA |
| | | | AAAAAAAAAAAAAAAAAAA |
| RS-C7 | FullSeq | MFVFLVLLPLVSSQCVNLTGGSGGG | AGAATAAACTAGTATTCTTCTGGTCCCCACAGACTCAGAGAGAACCCG |
| | | GSGGSPARMAGNGGDAALALLLLD | CCACCATGTTTGTTTTTCTTGTTTTACTTCCTTTAGTCTCATCTCAGTGT |
| | | RLNQLESKMSGKGQQQQGQTVTKK | GTCAATTTGACAGGCGGCTCTGGAGGAGGCGGCTCCGGAGGCTCTCCT |
| | | SAAEASKKPRQKRTATKAYNVTQA | GCCAGAATGGCTGGAAATGGAGGAGATGCTGCTCTGGCTCTGCTGCTG |
| | | FGRRGPEQTQGNFGDQELIRQGTDY | CTGGATAGACTGAATCAGCTGGAAAGCAAAATGAGCGGAAAAGGACA |
| | | KHWPQIAQFAPSASAFFGMSRIGME | GCAGCAGCAGGGACAAACAGTGACAAAGAAATCTGCTGCTGAAGCCA |
| | | VTPSGTWLTYTGAIKLDDKDPNFKD | GCAAGAAACCAAGACAGAAAAGAACAGCCACAAAAGCCTACAATGTG |
| | | QVILLNKHIDAYKTFPPTEPKKDKFK | ACACAGGCCTTTGGAAGAAGGGGACCTGAACAGACACAGGGAAATTT |
| | | AAMVTNNTFTLKVPHVGEIPVAYRK | TGGAGATCAGGAACTGATCAGACAGGGAACAGATTACAAACACTGGC |
| | | VLLKTIQPRVEKYLFDESGEFKLSEV | CTCAGATCGCCCAGTTTGCCCCATCTGCCTCTGCCTTCTTTGGAATGAG |
| | | GPEHSLAEYYIFFASFYYKRNGFAY | CAGAATTGGAATGGAAGTGACACCTTCTGGAACATGGCTGACATACAC |
| | | ANRNRFLYIIKLIFLWLLWPVTLACF | AGGAGCCATCAAACTGGATGATAAAGATCCAAATTTTAAAGATCAGGT |
| | | VLAAVYRINWITGGIAIAMACLVGL | GATTCTGCTGAATAAACACATTGATGCCTACAAAACATTTCCACCAAC |
| | | MWLSYFIASFRLFYNSFHTTDPSFLG | AGAACCAAAGAAAGATAAATTCAAAGCTGCTATGGTGACAAACAACA |
| | | RYMSALFADDLNQLTGYHTDFSSEII | CATTTACACTGAAAGTGCCTCATGTGGGAGAAATTCCTGTGGCTTACA |
| | | GYQLMCQPILLAEAELAKNVSLILG | GAAAAGTGCTGCTGAAAACAATTCAACCAAGAGTGGAAAAATACCTG |
| | | TVSWNLKKNGLGRCDIKDLPKEITV | TTTGATGAATCTGGAGAATTTAAACTTTCTGAAGTGGGACCTGAACAC |
| | | ATSRTLSYYKLGASQRVAYRSYLLS | TCTCTTGCTGAATACTACATTTTCTTTGCTTCTTTTTACTATAAGAGGAA |
| | | AGIFGAITDVFYKENSYKVPTDNYIT | TGGATTTGCATACGCAAATAGAAATAGATTTCTGTACATTATTAAACTG |
| | | TYARMAAPKEIIFLEGETLFGDDTVI | ATTTTTCTGTGGCTGCTGTGGCCTGTGACACTGGCTTGCTTTGTGCTGG |
| | | EVAIILASFSASTRRRGGGSGGGGSG | CTGCTGTGTACAGAATAAATTGGATAACAGGAGGAATTGCAATTGCAA |
| | | GEQYIKWPWYIWLGFIAGLIAIVMV | TGGCATGCTTGGTGGGATTGATGTGGTTGTCTTACTTTATTGCTTCTTTT |
| | | TIMLCCMTSCCSCLKGCCSCGSCCK | AGACTGTTTTACAACTCTTTTCACACAACTGATCCATCTTTTCTGGGAA |
| | | FDEDDSEPVLKGVKLHYT** (SEQ | GATACATGTCTGCTCTTTTTGCTGATGATTTAAATCAGTTAACAGGATA |
| | | ID NO: RS C7p4full) | TCACACAGATTTTTCTTCTGAAATCATTGGATACCAGTTGATGTGTCAA |
| | | | CCAATTTTGTTGGCTGAAGCTGAATTGGCAAAAAACGTGTCTTTGATTC |
| | | | TTGGAACAGTTTCTTGGAATCTTAAGAAAAACGGACTGGGAAGATGCG |
| | | | ATATTAAAGATCTGCCAAAAGAAATTACAGTGGCAACAAGCAGAACA |
| | | | CTGAGCTACTACAAACTGGGAGCAAGCCAGAGAGTGGCATACAGATC |
| | | | CTACTTATTATCTGCTGGAATTTTTGGAGCTATCACAGATGTGTTTTAC |
| | | | AAAGAAAACTCATACAAAGTGCCAACAGACAATTACATAACAACATA |
| | | | CGCTAGAATGGCTGCTCCAAAAGAAATCATCTTCCTTGAAGGAGAAAC |
| | | | ACTTTTTGGAGATGATACAGTGATTGAAGTGGCAATTATTCTGGCATCT |
| | | | TTTTCTGCATCCACAAGAAGAAGGGGAGGAGGATCCGGTGGTGGCGGC |
| | | | AGCGGCGGCGAACAGTACATTAAATGGCCTTGGTACATTTGGCTTGGA |
| | | | TTTATTGCAGGATTAATTGCAATTGTGATGGTGACAATTATGTTATGTT |
| | | | GTATGACATCATGTTGTTCTTGTTTAAAAGGATGTTGTTCTTGTGGAAG |
| | | | CTGTTGTAAATTTGATGAAGATGATTCTGAACCTGTGTTAAAAGGAGT |
| | | | GAAATTGCATTACACATGATGACTCGAGCTGGTACTGCATGCACGCAA |
| | | | TGCTAGCTGCCCCTTTCCCGTCCTGGGTACCCCGAGTCTCCCCCGACCT |
| | | | CGGGTCCCAGGTATGCTCCCACCTCCACCTGCCCCACTCACCACCTCTG |
| | | | CTAGTTCCAGACACCTCCCAAGCACGCAGCAATGCAGCTCAAAACGCT |
| | | | TAGCCTAGCCACACCCCCACGGGAAACAGCAGTGATTAACCTTTAGCA |
| | | | ATAAACGAAAGTTTAACTAAGCTATACTAACCCCAGGGTTGGTCAATT |
| | | | TCGTGCCAGCCACACCCTGGAGCTAGCAAAAAAAAAAAAAAAAAAAA |
| | | | AAAAAAAAAAGCATATGACTAAAAAAAAAAAAAAAAAAAAAAAAAA |
| | | | AAAAAAAAAAAAAAAAAAAAAAAAAAAAAAAAAAAAAAAAAAAA |
| | | | (SEQ ID NO: RS C7n4full) |
| RS-C8 | dEarI- | | ATTCTTCTGGTCCCCACAGACTCAGAGAGAACCC |
| | hAg | | |
| RS-C8 | Kozak | | GCCACC |
| RS-C8 | SEC | MFVFLVLLPLVSSQCVNLT | ATGTTTGTTTTTCTTGTTTTACTTCCTTTAGTCTCTTCTCAGTGTGTCAAT |
| | | | TTGACA |
| RS-C8 | RS-C8 | GGSGGGGSGGSPARMAGNGGDAAL | GGCGGCTCTGGAGGAGGCGGCTCCGGAGGCTCTCCTGCCAGAATGGCT |
| | | ALLLLDRLNQLESKMSGKGQQQQG | GGAAATGGAGGAGATGCTGCTCTGGCTCTGCTGCTGCTGGATAGACTG |
| | | QTVTKKSAAEASKKPRQKRTATKA | AATCAGCTGGAAAGCAAAATGAGCGGAAAAGGACAGCAGCAGCAGGG |
| | | YNVTQAFGRRGPEQTQGNFGDQELI | ACAAACAGTGACAAAGAAATCTGCTGCTGAAGCCAGCAAGAAACCAA |
| | | RQGTDYKHWPQIAQFAPSASAFFGM | GACAGAAAAGAACAGCCACAAAAGCCTACAATGTGACACAGGCCTTT |
| | | SRIGMEVTPSGTWLTYTGAIKLDDK | GGAAGAAGGGGACCTGAACAGACACAGGGAAATTTTGGAGATCAGGA |
| | | DPNFKDQVILLNKHIDAYKTFPPTEP | ACTGATCAGACAGGGAACAGATTACAAACACTGGCCTCAGATCGCCCA |
| | | KKDKFRACMVTNNTFTLKVPHVGEI | GTTTGCCCCATCTGCCTCTGCCTTCTTTGGAATGAGCAGAATTGGAATG |
| | | PVAYRKVLLKTIQPRVEKYLFDESG | GAAGTGACACCTTCTGGAACATGGCTGACATACACAGGAGCCATCAAA |
| | | EFKLSEVGPEHSLAEYYIFFASFYYK | CTGGATGATAAAGATCCAAATTTTAAAGATCAGGTGATTCTGCTGAAT |
| | | RCFHTTDPSFLGRYMSALFADDLNQ | AAACACATTGATGCCTACAAAACATTTCCACCAACAGAACCAAAGAAA |
| | | LTGYHTDFSSEIIGYQLMCQPILLAE | GATAAATTTAGAGCTTGCATGGTGACAAACAACACATTTACACTGAAA |
| | | AELAKNVSLILGTVSWNLKKRYLLS | GTGCCTCATGTGGGAGAAATTCCTGTGGCTTACAGAAAAGTGCTGCTG |
| | | AGIFGAITDVFYKENSYKVPTDNYIT | AAAACAATTCAACCAAGAGTGGAAAAATACCTGTTTGATGAATCTGGA |
| | | TYARMAAPKEIIFLEGETLFGDDTVI | GAATTTAAACTTTCTGAAGTGGGACCTGAACACTCTCTTGCTGAATACT |
| | | EVAIILASFSASTRRRGKLLEQWNLV | ACATTTTCTTTGCTTCTTTTTACTATAAAAGATGTTTTCACACAACTGAT |
| | | IGFNRNRFLYIIKLIFLWLLWPVTLA | CCATCTTTTCTGGGAAGATACATGTCTGCTCTTTTTGCTGATGATTTAA |
| | | CFVLAAVYSELVIGAVILRGHLRIAG | ATCAGTTAACAGGATATCACACAGATTTTTCTTCTGAAATCATTGGATA |
| | | HHLGRTVATSRTLSYYKLGASQRVK | CCAGTTGATGTGTCAACCAATTTTGTTGGCTGAAGCTGAATTGGCAAA |
| | | RYSGLMWLSYFARYAGGSGGGGSG | AAACGTGTCTTTGATTCTTGGAACAGTTTCTTGGAATCTTAAAAAGAGA |
| | | G (SEQ ID NO: RS C8p2) | TACTTATTATCTGCTGGAATTTTTGGAGCTATCACAGATGTGTTTTACA |
| | | | AAGAAAACTCATACAAAGTGCCAACAGACAATTACATAACAACATAC |
| | | | GCCAGAATGGCTGCTCCAAAAGAAATCATCTTCCTTGAAGGAGAAACA |
| | | | CTTTTTGGAGATGATACAGTGATTGAAGTGGCAATTATTCTGGCATCTT |
| | | | TTTCTGCATCCACAAGAAGAAGGGGAAAACTGCTGGAACAGTGGAATC |
| | | | TTGTGATTGGATTTAATAGAAATAGATTTCTTTACATTATTAAATTGAT |
| | | | TTTTCTTTGGCTTCTTTGGCCTGTGACACTTGCTTGCTTTGTGCTTGCTG |
| | | | CTGTGTACTCTGAACTGGTGATTGGAGCTGTGATTCTGAGAGGACACC |
| | | | TGAGAATTGCTGGACACCACCTGGGAAGAACAGTGGCAACATCAAGA |
| | | | ACACTTTCTTACTACAAACTGGGAGCTTCTCAGAGAGTGAAAAGATAC |
| | | | TCTGGCCTGATGTGGCTGAGCTACTTTGCTAGATATGCTGGAGGATCCG |
| | | | GTGGTGGCGGCAGCGGCGGC (SEQ ID NO: RS C8n2) |
| RS-C8 | TM | EQYIKWPWYIWLGFIAGLIAIVMVTI | GAACAGTACATTAAATGGCCTTGGTACATTTGGCTTGGATTTATTGCAG |
| | | MLCCMTSCCSCLKGCCSCGSCCKFD | GATTAATTGCAATTGTGATGGTGACAATTATGTTATGTTGTATGACATC |
| | | EDDSEPVLKGVKLHYT** | ATGTTGTTCTTGTTTAAAAGGATGTTGTTCTTGTGGAAGCTGTTGTAAA |
| | | | TTTGATGAAGATGATTCTGAACCTGTGTTAAAAGGAGTGAAATTGCAT |
| | | | TACACATGATGA |
| RS-C8 | | | CTCGAG |
| RS-C8 | F element | | CTGGTACTGCATGCACGCAATGCTAGCTGCCCCTTTCCCGTCCTGGGTA |
| | | | CCCCGAGTCTCCCCCGACCTCGGGTCCCAGGTATGCTCCCACCTCCACC |
| | | | TGCCCCACTCACCACCTCTGCTAGTTCCAGACACCTCC |
| RS-C8 | I element | | CAAGCACGCAGCAATGCAGCTCAAAACGCTTAGCCTAGCCACACCCCC |
| | | | ACGGGAAACAGCAGTGATTAACCTTTAGCAATAAACGAAAGTTTAACT |
| | | | AAGCTATACTAACCCCAGGGTTGGTCAATTTCGTGCCAGCCACACC |
| RS-C8 | | | CTGGAGCTAGC |
| RS-C8 | PolyA | | AAAAAAAAAAAAAAAAAAAAAAAAAAAAAAGCATATGACTAAAAAA |
| | | | AAAAAAAAAAAAAAAAAAAAAAAAAAAAAAAAAAAAAAAAAAAAA |
| | | | AAAAAAAAAAAAAAAAAAA |
| RS-C8 | FullSeq | MFVFLVLLPLVSSQCVNLTGGSGGG | ATTCTTCTGGTCCCCACAGACTCAGAGAGAACCCGCCACCATGTTTGTT |
| | | GSGGSPARMAGNGGDAALALLLLD | TTTCTTGTTTTACTTCCTTTAGTCTCTTCTCAGTGTGTCAATTTGACAGG |
| | | RLNQLESKMSGKGQQQQGQTVTKK | CGGCTCTGGAGGAGGCGGCTCCGGAGGCTCTCCTGCCAGAATGGCTGG |
| | | SAAEASKKPRQKRTATKAYNVTQA | AAATGGAGGAGATGCTGCTCTGGCTCTGCTGCTGCTGGATAGACTGAA |
| | | FGRRGPEQTQGNFGDQELIRQGTDY | TCAGCTGGAAAGCAAAATGAGCGGAAAAGGACAGCAGCAGCAGGGAC |
| | | KHWPQIAQFAPSASAFFGMSRIGME | AAACAGTGACAAAGAAATCTGCTGCTGAAGCCAGCAAGAAACCAAGA |
| | | VTPSGTWLTYTGAIKLDDKDPNFKD | CAGAAAAGAACAGCCACAAAAGCCTACAATGTGACACAGGCCTTTGG |
| | | QVILLNKHIDAYKTFPPTEPKKDKFR | AAGAAGGGGACCTGAACAGACACAGGGAAATTTTGGAGATCAGGAAC |
| | | ACMVTNNTFTLKVPHVGEIPVAYRK | TGATCAGACAGGGAACAGATTACAAACACTGGCCTCAGATCGCCCAGT |
| | | VLLKTIQPRVEKYLFDESGEFKLSEV | TTGCCCCATCTGCCTCTGCCTTCTTTGGAATGAGCAGAATTGGAATGGA |
| | | GPEHSLAEYYIFFASFYYKRCFHTTD | AGTGACACCTTCTGGAACATGGCTGACATACACAGGAGCCATCAAACT |
| | | PSFLGRYMSALFADDLNQLTGYHTD | GGATGATAAAGATCCAAATTTTAAAGATCAGGTGATTCTGCTGAATAA |
| | | FSSEIIGYQLMCQPILLAEAELAKNV | ACACATTGATGCCTACAAAACATTTCCACCAACAGAACCAAAGAAAGA |
| | | SLILGTVSWNLKKRYLLSAGIFGAIT | TAAATTTAGAGCTTGCATGGTGACAAACAACACATTTACACTGAAAGT |
| | | DVFYKENSYKVPTDNYITTYARMA | GCCTCATGTGGGAGAAATTCCTGTGGCTTACAGAAAAGTGCTGCTGAA |
| | | APKEIIFLEGETLFGDDTVIEVAIILAS | AACAATTCAACCAAGAGTGGAAAAATACCTGTTTGATGAATCTGGAGA |
| | | FSASTRRRGKLLEQWNLVIGFNRNR | ATTTAAACTTTCTGAAGTGGGACCTGAACACTCTCTTGCTGAATACTAC |
| | | FLYIIKLIFLWLLWPVTLACFVLAAV | ATTTTCTTTGCTTCTTTTTACTATAAAAGATGTTTTCACACAACTGATCC |
| | | YSELVIGAVILRGHLRIAGHHLGRTV | ATCTTTTCTGGGAAGATACATGTCTGCTCTTTTTGCTGATGATTTAAAT |
| | | ATSRTLSYYKLGASQRVKRYSGLM | CAGTTAACAGGATATCACACAGATTTTTCTTCTGAAATCATTGGATACC |
| | | WLSYFARYAGGSGGGGSGGEQYIK | AGTTGATGTGTCAACCAATTTTGTTGGCTGAAGCTGAATTGGCAAAAA |
| | | WPWYIWLGFIAGLIAIVMVTIMLCC | ACGTGTCTTTGATTCTTGGAACAGTTTCTTGGAATCTTAAAAAGAGATA |
| | | MTSCCSCLKGCCSCGSCCKFDEDDS | CTTATTATCTGCTGGAATTTTTGGAGCTATCACAGATGTGTTTTACAAA |
| | | EPVLKGVKLHYT** (SEQ ID NO: RS | GAAAACTCATACAAAGTGCCAACAGACAATTACATAACAACATACGCC |
| | | C8p2full) | AGAATGGCTGCTCCAAAAGAAATCATCTTCCTTGAAGGAGAAACACTT |
| | | | TTTGGAGATGATACAGTGATTGAAGTGGCAATTATTCTGGCATCTTTTT |
| | | | CTGCATCCACAAGAAGAAGGGGAAAACTGCTGGAACAGTGGAATCTT |
| | | | GTGATTGGATTTAATAGAAATAGATTTCTTTACATTATTAAATTGATTT |
| | | | TTCTTTGGCTTCTTTGGCCTGTGACACTTGCTTGCTTTGTGCTTGCTGCT |
| | | | GTGTACTCTGAACTGGTGATTGGAGCTGTGATTCTGAGAGGACACCTG |
| | | | AGAATTGCTGGACACCACCTGGGAAGAACAGTGGCAACATCAAGAAC |
| | | | ACTTTCTTACTACAAACTGGGAGCTTCTCAGAGAGTGAAAAGATACTC |
| | | | TGGCCTGATGTGGCTGAGCTACTTTGCTAGATATGCTGGAGGATCCGG |
| | | | TGGTGGCGGCAGCGGCGGCGAACAGTACATTAAATGGCCTTGGTACAT |
| | | | TTGGCTTGGATTTATTGCAGGATTAATTGCAATTGTGATGGTGACAATT |
| | | | ATGTTATGTTGTATGACATCATGTTGTTCTTGTTTAAAAGGATGTTGTT |
| | | | CTTGTGGAAGCTGTTGTAAATTTGATGAAGATGATTCTGAACCTGTGTT |
| | | | AAAAGGAGTGAAATTGCATTACACATGATGACTCGAGCTGGTACTGCA |
| | | | TGCACGCAATGCTAGCTGCCCCTTTCCCGTCCTGGGTACCCCGAGTCTC |
| | | | CCCCGACCTCGGGTCCCAGGTATGCTCCCACCTCCACCTGCCCCACTCA |
| | | | CCACCTCTGCTAGTTCCAGACACCTCCCAAGCACGCAGCAATGCAGCT |
| | | | CAAAACGCTTAGCCTAGCCACACCCCCACGGGAAACAGCAGTGATTAA |
| | | | CCTTTAGCAATAAACGAAAGTTTAACTAAGCTATACTAACCCCAGGGT |
| | | | TGGTCAATTTCGTGCCAGCCACACCCTGGAGCTAGCAAAAAAAAAAAA |
| | | | AAAAAAAAAAAAAAAAAAGCATATGACTAAAAAAAAAAAAAAAAAA |
| | | | AAAAAAAAAAAAAAAAAAAAAAAAAAAAAAAAAAAAAAAAAAAAA |
| | | | AAAAAAA (SEQ ID NO: RS C8n2full) |
| | | | ATGAGAGTGATGGCCCCCAGAACCCTGATCCTGCTGCTGTCTGGCGCC |
| | | | CTGGCCCTGACAGAGACATGGGCCGGAAGCGGCGGCTCTGGAGGAGG |
| | | | CGGCTCCGGAGGCTCTCCTGCCAGAATGGCTGGAAATGGAGGAGATGC |
| | | | TGCTCTGGCTCTGCTGCTGCTGGATAGACTGAATCAGCTGGAAAGCAA |
| | | | AATGAGCGGAAAAGGACAGCAGCAGCAGGGACAAACAGTGACAAAG |
| | | | AAATCTGCTGCTGAAGCCAGCAAGAAACCAAGACAGAAAAGAACAGC |
| | | | CACAAAAGCCTACAATGTGACACAGGCCTTTGGAAGAAGGGGACCTG |
| | | | AACAGACACAGGGAAATTTTGGAGATCAGGAACTGATCAGACAGGGA |
| | | | ACAGATTACAAACACTGGCCTCAGATCGCCCAGTTTGCCCCATCTGCCT |
| | | | CTGCCTTCTTTGGAATGAGCAGAATTGGAATGGAAGTGACACCTTCTG |
| | | | GAACATGGCTGACATACACAGGAGCCATCAAACTGGATGATAAAGAT |
| | | | CCAAATTTTAAAGATCAGGTGATTCTGCTGAATAAACACATTGATGCC |
| | | | TACAAAACATTTCCACCAACAGAACCAAAGAAAGATAAATTTAGAGCT |
| | | | TGCATGGTGACAAACAACACATTTACACTGAAAGTGCCTCATGTGGGA |
| | | | GAAATTCCTGTGGCTTACAGAAAAGTGCTGCTGAAAACAATTCAACCA |
| | | | AGAGTGGAAAAATACCTGTTTGATGAATCTGGAGAATTTAAACTTTCT |
| | | | GAAGTGGGACCTGAACACTCTCTTGCTGAATACTACATTTTCTTTGCTT |
| | | | CTTTTTACTATAAAAGATGTTTTCACACAACTGATCCATCTTTTCTGGG |
| | | | AAGATACATGTCTGCTCTTTTTGCTGATGATTTAAATCAGTTAACAGGA |
| | | | TATCACACAGATTTTTCTTCTGAAATCATTGGATACCAGTTGATGTGTC |
| | | | AACCAATTTTGTTGGGTGAAGCAGAATTGGCAAAAAACGTGTCTTTGA |
| | | | TTCTTGGAACAGTTTCTTGGAATCTTAAAAAGAGATACTTATTATCTGC |
| | | | TGGAATTTTTGGAGCTATCACAGATGTGTTTTACAAAGAAAACTCATA |
| | | | CAAAGTGCCAACAGACAATTACATAACAACATACGCCAGAATGGCTGC |
| | | | TCCAAAAGAAATCATCTTCCTTGAAGGAGAAACACTTTTTGGAGATGA |
| | | | TACAGTGATTGAAGTGGCAATTATTCTGGCATCTTTTTCTGCATCCACA |
| | | | AGAAGAAGGGGAAAACTGCTGGAACAGTGGAATCTTGTGATTGGATTT |
| | | | AATAGAAATAGATTTCTTTACATTATTAAATTGATTTTTCTTTGGCTTCT |
| | | | TTGGCCTGTGACACTTGCTTGCTTTGTGCTTGCTGCTGTGTACTCTGAA |
| | | | CTGGTGATTGGAGCTGTGATTCTGAGAGGACACCTGAGAATTGCTGGA |
| | | | CACCACCTGGGAAGAACAGTGGCAACATCAAGAACACTTTCTTACTAC |
| | | | AAACTGGGAGCTTCTCAGAGAGTGAAAAGATACTCTGGCCTGATGTGG |
| | | | CTGAGCTACTTTGCTAGATATGCTGGTGGTTCTCTTGGCGGAGGGGGTT |
| | | | CGGGAATCGTGGGAATTGTGGCAGGACTGGCAGTGCTGGCCGTGGTGG |
| | | | TGATCGGAGCCGTGGTGGCTACCGTGATGTGCAGACGGAAGTCCAGCG |
| | | | GAGGCAAGGGCGGCAGCTACAGCCAGGCCGCCAGCTCTGATAGCGCC |
| | | | CAGGGCAGCGACGTGTCACTGACAGCCTAGTAA (SEQ ID NO: RS |
| | | | C8n3) |

TABLE 16
Highly predicted epitopes within the string sequences of RS C5 - RS C8 strings.

| Peptide (1) | Alleles (1) | Peptide (2) | Alleles (2) |
|---|---|---|---|
| AADLDDFS | HLA-A01:01 | LLNVPLHGTI | HLA-B51:01 |
| AADLDDFSKQ | HLA-A01:01 | LLNVPLHGTIL | HLA-A02:07 |
| AAEASKKPRQK | HLA-C02:02 | LLPAADLDDF | HLA-B13:01 |
| AGDSGFAA | HLA-C08:02 | LLQFAYANRNR | HLA-A31:01; HLA-A74:01 |
| AGDSGFAAYS | HLA-B46:01 | LLWPVTLACFV | HLA-A02:01; HLA-A02:04; HLA-A02:07; HLA-A02:11 |
| AGLPYGANKDG | HLA-C07:01 | LLWPVTLACFVL | HLA-B48:01 |
| AGNGGDAALAL | HLA-C01:02; HLA-C03:02; HLA- | LMWLSYFIASF | HLA-B35:01 |
| | C07:04; HLA-C12:03 | | |
| AIILASFSAS | HLA-C17:01 | LNVPLHGTI | HLA-B14:02 |
| AIKLDDKD | HLA-E01:01 | LNVPLHGTIL | HLA-C15:02; HLA-G01:01; HLA-G01:04 |
| AIKLDDKDPNF | HLA-E01:01 | LPKEITVATS | HLA-B54:01; HLA-B55:01; HLA-B55:02; HLA-B56:01 |
| AIVLQLPQGTTL | HLA-B15:09 | LPKEITVATSR | HLA-A33:03; HLA-A34:01 |
| ALNTPKDHI | HLA-A02:02; HLA-B13:01; HLA-B13:02 | LPQGTTLP | HLA-A25:01 |
| AMACLVGLMW | HLA-A32:01 | LPQGTTLPK | HLA-A30:01; HLA-A34:02 |
| APKEIIFLEGET | HLA-B81:01 | LPQGTTLPKG | HLA-B55:01 |
| APSASAFFG | HLA-B35:02 | LPQRQKKQQTV | HLA-B07:04; HLA-B42:01 |
| ARMAGNGGDA | HLA-C07:01 | LPYGANKDGII | HLA-B51:01; HLA-B55:01; HLA-B81:01; HLA-C02:02 |
| ARMAGNGGDAA | HLA-B39:06 | LPYGANKDGIIW | HLA-B35:01; HLA-B35:07; HLA-B51:01; HLA-B53:01 |
| ARMAGNGGDAAL | HLA-B15:09; HLA-B27:05 | LQLPQGTTLPK | HLA-A03:01; HLA-A11:01; HLA-A11:02 |
| ASAFFGMSRI | HLA-B49:01 | LQQSMSSA | HLA-B39:06 |
| ASKKPRQKRTA | HLA-E01:01 | LSYFIASFRL | HLA-A03:01; HLA-A68:02; HLA-B15:17; HLA- |
| | | | B57:01; HLA-B58:02; HLA-C15:02 |
| ASKKPRQKRTAT | HLA-E01:01 | LSYYKLGASQR | HLA-A31:01 |
| ASQRVAGDSGF | HLA-B57:03 | LTRPLLESEL | HLA-B57:01; HLA-B57:03 |
| ATKAYNVTQAF | HLA-B57:01; HLA-B57:03; HLA-B58:02 | LTYTGAIK | HLA-A03:01; HLA-A34:02 |
| ATSRTLSYYKL | HLA-B57:03 | LWPVTLACFV | HLA-C04:01 |
| AVILRGHLRIA | HLA-B08:01 | LWPVTLACFVL | HLA-A23:01; HLA-A24:07; HLA-C04:01 |
| AVYRINWIT | HLA-B48:01 | MAGNGGDAALAL | HLA-B35:02 |
| AYKTFPPTEP | HLA-C18:01 | MEVTPSGTWLT | HLA-B40:06 |
| AYKTFPPTEPK | HLA-A31:01; HLA-A33:03 | MWLSYFIASFR | HLA-A31:01; HLA-A33:03 |
| AYKTFPPTEPKK | HLA-A30:01 | MWSFNPETNI | HLA-A24:02 |
| AYNVTQAFGRR | HLA-A31:01 | MWSFNPETNIL | HLA-A24:02 |
| AYSRYRIGNYK | HLA-A30:01 | MWSFNPETNILL | HLA-A24:02 |
| DAYKTFPPTE | HLA-B51:01 | NFKDQVILLN | HLA-A24:07 |
| DDFSKQLQQSM | HLA-A33:01 | NFKDQVILLNK | HLA-A30:01; HLA-A33:01; HLA-A33:03 |
| DDKDPNFKD | HLA-B35:02 | NLVIGFLFLTW | HLA-B44:02; HLA-B44:03 |
| DDKDPNFKDQV | HLA-A33:01 | NPANNAAIVLQL | HLA-B35:01 |
| DDKDPNFKDQVI | HLA-B14:01 | NPETNILLNVPL | HLA-B81:01 |
| DHIGTRNP | HLA-B39:06 | NRFLYIIKLIFL | HLA-B27:05; HLA-C18:01 |
| DHSSSSDNIA | HLA-B39:06 | NSSRNSTPG | HLA-B58:01 |
| DIKDLPKEITVA | HLA-A26:01 | NTDHSSSSDNI | HLA-A01:01 |
| DKDPNFKDQVI | HLA-B38:02 | NVPLHGTI | HLA-B14:02; HLA-B51:01; HLA-C01:02 |
| DKKKKADE | HLA-E01:01 | NWITGGIAIA | HLA-B39:06 |
| DLPKEITVATSR | HLA-A68:01 | PARMAGNGGD | HLA-E01:01 |
| DLSPRWYF | HLA-B50:01 | PETNILLNVPL | HLA-C06:02 |
| DLSPRWYFYYL | HLA-A02:04; HLA-A33:01 | PHVGEIPV | HLA-B15:09 |
| DPSFLGRYMSA | HLA-B54:01 | PKDHIGTR | HLA-A33:01 |
| DSGFAAYSRY | HLA-A01:01; HLA-A25:01; HLA-A26:01 | PKEIIFLE | HLA-A33:01; HLA-B57:03 |
| DSGFAAYSRYR | HLA-A33:01; HLA-A66:01; HLA-A68:01 | PKKDKKKKA | HLA-C01:02 |
| DSNGTITVEEL | HLA-C04:03 | PKKDKKKKADE | HLA-C07:01 |
| DYKHWPQI | HLA-A23:01 | PLLESELVIG | HLA-A26:01 |
| DYKHWPQIA | HLA-A33:01 | PPTEPKKD | HLA-B14:01 |
| DYKHWPQIAQ | HLA-A33:03 | PPTEPKKDK | HLA-B81:01 |
| EAGLPYGAN | HLA-A34:01 | PQGTTLPK | HLA-A11:02 |
| EIPVAYRKVLL | HLA-B14:02; HLA-G01:01; HLA- | PQIAQFAPSASA | HLA-B39:06 |
| | G01:03; HLA-G01:04 | | |
| EITVATSRTLSY | HLA-A36:01 | PSFLGRYMSAL | HLA-C03:02 |
| ELIRQGTDYK | HLA-A34:01 | PTEPKKDK | HLA-A11:02 |
| EPKKDKKKKADE | HLA-E01:01 | PTEPKKDKK | HLA-B49:01 |
| EQWNLVIGFLF | HLA-A24:02; HLA-B27:05 | PVAYRKVL | HLA-B07:04; HLA-B42:01; HLA-B46:01 |
| EQWNLVIGFLFL | HLA-A68:02 | PYGANKDGIIW | HLA-A24:02; HLA-A24:07 |
| ESELVIGAVIL | HLA-A01:01 | QASSRSSSRSR | HLA-A33:01 |
| ESELVIGAVILR | HLA-A68:01 | QGNFGDQELI | HLA-B44:02 |
| ETNILLNVPLH | HLA-A26:01 | QGTTLPKGF | HLA-B44:02 |
| ETQALPQRQKK | HLA-A33:03; HLA-A34:02 | QLMCQPIL | HLA-B08:01 |
| EVGPEHSLAE | HLA-C07:04 | QQGQTVTKK | HLA-A11:02; HLA-A30:02 |
| EVTPSGTWLT | HLA-A68:02 | QQQGQTVTKK | HLA-A11:02 |
| FAAYSRYRIGNY | HLA-A26:01 | QQQQGQTVTKK | HLA-A11:02 |
| FAPSASAFFGM | HLA-A02:07; HLA-C02:02; HLA- | QRQKKQQTVTL | HLA-C18:01 |
| | C03:03; HLA-C03:04; HLA-C16:01 | | |
| FARTRSMW | HLA-B53:01 | QRVAGDSGFAAY | HLA-B27:05 |
| FDESGEFK | HLA-A11:02 | QTVTLLPAA | HLA-A02:05; HLA-A02:06 |
| FGMSRIGM | HLA-C12:03; HLA-C16:01 | QVILLNKHIDAY | HLA-A26:01 |
| FLWLLWPVTLA | HLA-A02:01; HLA-A02:04; HLA- | RCDIKDLPK | HLA-A36:01 |
| | A02:07; HLA-A02:11; HLA-B54:01 | | |
| FLYIIKLIFL WL | HLA-C17:01 | RFLYIIKLIFL W | HLA-A24:07; HLA-B44:03; HLA-B57:01 |
| FPPTEPKKDKKK | HLA-C07:01 | RGHLRIAGHHL | HLA-B48:01 |
| FRLFARTRSM | HLA-B14:01 | RGPEQTQGNF | HLA-B37:01 |
| FVLAAVYRINW | HLA-B57:01; HLA-B57:03 | RIGMEVTPSGTW | HLA-A32:01 |
| FYYLGTGPEAG | HLA-C14:02 | RINWITGGIA | HLA-B54:01 |
| FYYLGTGPEAGL | HLA-C03:03; HLA-C07:02; HLA- | RINWITGGIAI | HLA-B13:02; HLA-B27:05; HLA-B44:02; HLA-B55:02 |
| | C14:02; HLA-C14:03; HLA-C18:01 | | |
| GANKDGIIWVA | HLA-B40:06; HLA-B54:01 | RINWITGGIAIA | HLA-B55:02; HLA-B56:01 |
| GDAALALLLL | HLA-B40:02 | RLFARTRSMWSF | HLA-A32:01; HLA-B37:01; HLA-B48:01 |
| GDSGFAAY | HLA-A36:01 | RMAGNGGDAA | HLA-A02:02 |
| GFLFLTWICL | HLA-G01:04 | RMAGNGGDAAL | HLA-A02:02; HLA-A32:01; HLA-B13:01; HLA- |
| | | | B15:01; HLA-B48:01 |
| GGDAALALLLL | HLA-B14:01 | RNPANNAAIVL | HLA-A03:01; HLA-B07:04; HLA-G01:01; HLA- |
| | | | G01:03; HLA-G01:04 |
| GHHLGRCD | HLA-B15:10 | RNRFLYIIKLI | HLA-B14:01 |
| GIAIAMACL | HLA-G01:03 | RNRFLYIIKLIF | HLA-B14:01 |
| GLPYGANK | HLA-A03:01; HLA-A11:02 | RPLLESELVI | HLA-B55:01; HLA-B81:01 |
| GLPYGANKDGI | HLA-B13:01 | RPLLESELVIGA | HLA-B55:01; HLA-B55:02 |
| GNGGDAALAL | HLA-G01:01 | RQKKQQTVTLL | HLA-B13:02; HLA-B15:01; HLA-B48:01; HLA-B52:01 |
| GNGGDAALALLL | HLA-G01:04 | RQKRTATKAYNV | HLA-B13:02 |
| GRCDIKDLPKE | HLA-B14:01 | RSMWSFNPETNI | HLA-B58:02 |
| GSRGGSQASSR | HLA-A31:01 | RSSSRSRNSSR | HLA-A31:01 |
| GSSRGTSPAR | HLA-A68:02 | SAAEASKKPRQK | HLA-A11:02; HLA-B15:02 |
| GTILTRPLLE | HLA-A68:02 | SAFFGMSRIGM | HLA-C12:03 |
| GTITVEELKKL | HLA-B57:01 | SAFFGMSRIGME | HLA-C12:03 |
| GTRNPANNAA | HLA-A30:01 | SELVIGAVILR | HLA-A34:01; HLA-B44:02 |
| HGTILTRP | HLA-A02:02; HLA-A02:07; HLA-B35:03 | SEVGPEHSLAE | HLA-C07:04 |
| HGTILTRPL | HLA-B15:09; HLA-B15:10; HLA-B35:03 | SMWSFNPET | HLA-A02:01; HLA-A02:04; HLA-A02:11 |
| HGTILTRPLL | HLA-B14:02; HLA-B15:09; HLA-G01:04 | SMWSFNPETNI | HLA-A02:01; HLA-A02:04; HLA-A02:11 |
| HHLGRCDI | HLA-B38:01; HLA-B38:02 | SSRGTSPARM | HLA-A30:01; HLA-C02:02 |
| HIDAYKTFPP | HLA-B41:01 | SSRNSTPGS | HLA-A30:01 |
| HLRIAGHHLGR | HLA-A33:03 | SSRNSTPGSSR | HLA-A33:03; HLA-A66:01 |
| HSSSSDNI | HLA-B38:02 | SYFIASFRLFAR | HLA-A31:01; HLA-A33:01 |
| HSSSSDNIALL | HLA-A68:02; HLA-B38:01; HLA- | TATKAYNVTQA | HLA-B54:01 |
| | B38:02; HLA-B57:03; HLA-C05:01 | | |
| HTTDPSFLGRYM | HLA-B57:01 | TDHSSSSDNIAL | HLA-B35:02 |
| HVGEIPVAYRK | HLA-A03:01; HLA-A11:01; HLA- | TDPSFLGR | HLA-A34:02; HLA-A36:01; HLA-A66:01 |
| | A11:02; HLA-A31:01; HLA-A34:02; HLA- | | |
| | A68:01 | | |
| HVGEIPVAYRKV | HLA-A68:02 | TDPSFLGRYM | HLA-A36:01 |
| IAQFAPSASA | HLA-B54:01; HLA-B55:02; HLA-B56:01 | TDVFYKENSY | HLA-B18:01 |
| IAQFAPSASAF | HLA-B46:01; HLA-C02:02; HLA- | TEGALNTPK | HLA-A11:02; HLA-A30:02; HLA-A36:01 |
| | C03:02; HLA-C03:03; HLA-C03:04; HLA- | | |
| | C07:04; HLA-C12:02; HLA-C14:02; HLA- | | |
| | C16:01 | | |
| IASFRLFA | HLA-C16:01 | TEPKKDKKK | HLA-A34:02 |
| IGMEVTPSGTW | HLA-A24:02; HLA-A32:01; HLA- | TGAIKLDD | HLA-B14:01 |
| | B44:02; HLA-B53:01; HLA-B57:01; HLA- | | |
| | B58:01 | | |
| IIKLIFLWLL | HLA-A33:01 | TGGIAIAM | HLA-C07:04 |
| IIKLIFLWLLW | HLA-B44:02; HLA-B57:01 | TGPEAGLPYGA | HLA-A02:07 |
| IIWVATEGA | HLA-A02:11 | TILTRPLL | HLA-A30:01; HLA-B08:01; HLA-B14:02; HLA- |
| | | | B50:01; HLA-C03:02; HLA-C06:02; HLA-G01:01; HLA- |
| | | | G01:03; HLA-G01:04 |
| IIWVATEGAL | HLA-C08:01 | TILTRPLLE | HLA-C03:02 |
| IKDLPKEITV | HLA-B18:01 | TIQPRVEK | HLA-A23:01; HLA-A30:01 |
| IKDLPKEITVA | HLA-C04:03 | TITVEELKKLLE | HLA-B14:01 |
| ILLNVPLHGTI | HLA-A02:07; HLA-B51:01 | TKAYNVTQAF | HLA-B15:03 |
| ILTRPLLESEL | HLA-A02:02; HLA-B27:05 | TLACFVLAAVYR | HLA-A68:01 |
| ITGGIAIAMA | HLA-A02:05; HLA-A68:02 | TLLPAADLDDF | HLA-B38:02 |
| ITVATSRTLSYY | HLA-A36:01 | TLPKGFYA | HLA-A02:11 |
| ITVEELKKLLE | HLA-B08:01 | TLSYYKLGA | HLA-A02:03 |
| IVLQLPQGTTL | HLA-A02:11; HLA-B38:01 | TNILLNVPL | HLA-B15:09; HLA-G01:03 |
| KAYNVTQAFGRR | HLA-A03:01; HLA-A31:01 | TPGSSRGTSPA | HLA-B07:02; HLA-B55:01; HLA-B55:02; HLA-B56:01 |
| KDGIIWVAT | HLA-B37:01 | TPKDHIGTRNP | HLA-B55:01; HLA-B55:02 |
| KDHIGTRNP | HLA-B41:01 | TQALPQRQKK | HLA-A03:01; HLA-A11:02 |
| KDLPKEITVA | HLA-B40:06 | TRNPANNA | HLA-B39:06 |
| KDLSPRWYFYY | HLA-A30:02 | TRNPANNAAIVL | HLA-B15:09; HLA-B38:01 |
| KEIIFLEGET | HLA-B40:06; HLA-B49:01 | TSRTLSYYKL | HLA-B58:02; HLA-G01:04 |
| KEITVATSRT | HLA-B40:02; HLA-E01:01 | TSRTLSYYKLG | HLA-A02:01 |
| KHWPQIAQFA | HLA-B39:06 | TTDPSFLGRYMS | HLA-A01:01 |
| KHWPQIAQFAP | HLA-B39:06 | TTLPKGFYA | HLA-A02:06 |
| KKDKKKKAD | HLA-E01:01 | TVATSRTLS | HLA-B46:01 |
| KKKADETQA | HLA-B15:03 | VATEGALNTPK | HLA-A11:01; HLA-A34:02 |
| KKKKADETQAL | HLA-B48:01 | VEELKKLLEQW | HLA-B44:02 |
| KLDDKDPNFKD | HLA-A02:07 | VGEIPVAY | HLA-A33:01; HLA-A36:01; HLA-B15:03; HLA-B58:02 |
| KLIFLWLLWPV | HLA-A02:04; HLA-A02:11 | VGEIPVAYRK | HLA-A11:01 |
| KPRQKRTATKA | HLA-B07:04; HLA-B55:01; HLA- | VGLMWLSY | HLA-B46:01 |
| | B55:02; HLA-B56:01 | | |
| KSAAEASKKPR | HLA-A74:01 | VIGAVILRGHL | HLA-C04:03 |
| KTFPPTEPKKD | HLA-B58:02 | VILLNKHID | HLA-E01:01 |
| KTFPPTEPKKDK | HLA-A11:01; HLA-A68:02 | VLAAVYRINW | HLA-A32:01; HLA-B57:01 |
| KVPTDNYI | HLA-B38:02 | VPLHGTILTR | HLA-A33:01 |
| KVPTDNYIT | HLA-G01:01 | VTKKSAAEA | HLA-A02:05 |
| LDDKDPNF | HLA-B37:01 | VTLLPAADLD | HLA-A68:02 |
| LDDKDPNFK | HLA-A11:02 | VTQAFGRR | HLA-A66:01 |
| LDRLNQLE | HLA-B14:01 | WPVTLACF | HLA-B35:07 |
| LESELVIGAV | HLA-B08:01; HLA-B49:01 | WSFNPETNILL | HLA-B35:01; HLA-B50:01 |
| LESELVIGAVIL | HLA-B40:01; HLA-B44:02; HLA-B44:03 | YAEGSRGGSQA | HLA-A26:01 |
| LFARTRSMW | HLA-A24:07; HLA-A32:01; HLA-B58:01 | YANRNRFLYII | HLA-B51:01 |
| LFARTRSMWSF | HLA-A24:07 | YFYYLGTGPEA | HLA-B54:01; HLA-C14:02; HLA-C14:03 |
| LGTGPEAGL | HLA-B15:09 | YGANKDGII | HLA-C02:02 |
| LHGTILTRP | HLA-B15:09; HLA-B15:10 | YGANKDGIIW | HLA-B53:01; HLA-B57:01; HLA-B58:01 |
| LHGTILTRPL | HLA-B15:09; HLA-B15:10 | YIIKLIFLWLL | HLA-A02:01; HLA-A02:02; HLA-A02:04; HLA- |
| | | | A02:07; HLA-A02:11; HLA-A29:02; HLA-B13:02 |
| LHGTILTRPLL | HLA-B15:09 | YKLGASQRV | HLA-B15:03 |
| LIFLWLLW | HLA-B57:01 | YLGTGPEA | HLA-A02:01; HLA-B55:01; HLA-C03:03 |
| LIFLWLLWPV | HLA-A02:04 | YLGTGPEAG | HLA-A02:03 |
| LIRQGTDYK | HLA-A30:01 | YLGTGPEAGLPY | HLA-A01:01; HLA-A29:02; HLA-B46:01 |
| LIRQGTDYKHW | HLA-A25:01; HLA-B57:01 | YRINWITGGI | HLA-B27:05 |
| LLESELVIGAV | HLA-A02:07 | YRINWITGGIAI | HLA-B27:05 |
| LLNKHIDAYKT | HLA-B58:02 | YSRYRIGNYK | HLA-A30:01 |
| LLNKHIDAYKTF | HLA-B48:01 | YYKLGASQRV | HLA-C18:01 |

1-61. (canceled)

62. A method of treating or preventing an infection by a virus or treating a respiratory disease or condition associated with an infection by a virus comprising administering to a subject in need thereof a pharmaceutical composition comprising: a polypeptide having an amino acid sequence with at least 70%, at least 75%, at least 80%, at least 85%, at least 90%, at least 95%, or 100% sequence identity to a sequence of any one of the sequences depicted in column 2 of Table 11, column 2 of Table 12 or column 3 of Table 15; or a recombinant polynucleotide encoding a polypeptide having an amino acid sequence with at least 70%, at least 75%, at least 80%, at least 85%, at least 90%, at least 95%, or 100% sequence identity to a sequence of any one of the sequences depicted in column 2 of Table 11, column 2 of Table 12 or column 3 of Table 15.

63. The method of claim 62, wherein the subject has an immunodeficiency.

64. The method of claim 63, wherein the subject has a B cell immunodeficiency.

65. The method of claim 62, wherein the pharmaceutical composition comprises a polypeptide with at least 70%, at least 75%, at least 80%, at least 85%, at least 90%, at least 95%, or 100% sequence identity to a sequence selected from the group consisting of RS Clp1full, RS C2p1full, RS C3p1full, RS C4p1full, RS C5p1, RS C5p2, RS C5p2full, RS C6p1, RS C6p2, RS C6p2full, RS C7p1, RS C7p2, RS C7p2full, RS C7p4, RS C7p4full, RS C8p1, RS C8p2 and RS C8p2full; or a polynucleotide encoding a polypeptide with at least 70%, at least 75%, at least 80%, at least 85%, at least 90%, at least 95%, or 100% sequence identity to a sequence selected from the group consisting of RS Clp1full, RS C2p1full, RS C3p1full, RS C4p1full, RS C5p1, RS C5p2, RS C5p2full, RS C6p1, RS C6p2, RS C6p2full, RS C7p1, RS C7p2, RS C7p2full, RS C7p4, RS C7p4full, RS C8p1, RS C8p2, and RS C8p2full.

66. The method of claim 62, wherein the pharmaceutical composition comprises a polynucleotide with at least 70%, at least 75%, at least 80%, at least 85%, at least 90%, at least 95%, or 100% sequence identity to a sequence selected from the group consisting of SEQ ID NOs: RS C1n1, RS C2n1, RS C3n1, RS C4n1, RS C5n1, RS Con1, RS C7n1, RS C8n1, RS C5n2, RS Con2, RS C7n2, RS C8n2, RS C5n2full, RS Con2full, RS C7n2full, RS C8n2full, RS C7n4, RS C7n4full.

67. The method of claim 62, wherein the polynucleotide is an mRNA.

68. The method of claim 62, wherein the pharmaceutical composition further comprises one or more lipids.

69. The method of claim 68, wherein the one or more lipids comprise a lipid nanoparticle (LNP), and wherein the LNP encapsulates the recombinant polynucleotide construct.

71-115. (canceled)

116. A pharmaceutical composition comprising:
(i) a first recombinant polynucleotide encoding a polypeptide comprising at least two of the following (a) a sequence comprising an epitope sequence from ORF1ab, a sequence comprising an epitope sequence from membrane glycoprotein (M), and a sequence comprising an epitope sequence from nucleocapsid phosphoprotein (N); and
(ii) a second recombinant polynucleotide encoding a 2019 SARS-CoV 2 spike protein or a variant or fragment thereof.

117. The pharmaceutical composition of claim 116, wherein the pharmaceutical composition comprises a nanoparticle, wherein the nanoparticle comprises the first recombinant polynucleotide and the second recombinant polynucleotide.

118. The pharmaceutical composition of claim 117, wherein the nanoparticle is present in the pharmaceutical composition at a dose of from 100 ng to 500 micrograms.

119. The pharmaceutical composition of claim 116, wherein the mass ratio of the first recombinant polynucleotide to the second recombinant polynucleotide is from about 1:50 to 50:1.

120. A composition comprising:
(i) a first pharmaceutical composition comprising a recombinant polynucleotide encoding a polypeptide comprising at least two of the following (a) a sequence comprising an epitope sequence from ORF1ab, a sequence comprising an epitope sequence from membrane glycoprotein (M), and a sequence comprising an epitope sequence from nucleocapsid phosphoprotein (N); and
(ii) a second pharmaceutical composition comprising a recombinant polynucleotide encoding a 2019 SARS-CoV 2 spike protein or a variant or fragment thereof.

121. The composition of claim 120, wherein the first pharmaceutical composition comprises a first nanoparticle, wherein the first nanoparticle comprises the recombinant polynucleotide encoding a polypeptide comprising at least two of the following (a) a sequence comprising an epitope sequence from ORF1ab, a sequence comprising an epitope sequence from membrane glycoprotein (M), and a sequence comprising an epitope sequence from nucleocapsid phosphoprotein (N); and wherein the second pharmaceutical composition comprises a second nanoparticle, wherein the second nanoparticle comprises the recombinant polynucleotide encoding a 2019 SARS-CoV 2 spike protein or a variant or fragment thereof.

122. The composition of claim 121, wherein the mass ratio of the recombinant polynucleotide in (i) to the recombinant polynucleotide in (ii) is from about 1:50 to 50:1.

123. The composition of claim 121, wherein the first nanoparticle is present in the first pharmaceutical composition at a dose of from about 100 ng to 500 micrograms.

124. The composition of claim 121, wherein the second nanoparticle is present in the second pharmaceutical composition at a dose of from about 100 ng to 500 micrograms.

125. The composition of claim 121, wherein the recombinant polynucleotide in (i) is present in the first pharmaceutical composition at a dose of from about 50 ng to 250 micrograms.

126. The composition of claim 121, wherein the recombinant polynucleotide in (ii) is present in the second pharmaceutical composition at a dose of from about 50 ng to 250 micrograms.

127. The composition of claim 121, wherein the nanoparticle is a lipid nanoparticle.

128-149. (canceled)

The application's sequence listing, which the Patent Office published only in electronic form, follows.

SEQUENCE LISTING (17833 sequences)

SEQ ID NO: 1 - protein, 11 aa, synthetic construct
  REGION 1..11: note = Description of Artificial Sequence: Synthetic peptide
YLFDESGEFKL

SEQ ID NO: 2 - protein, 9 aa, synthetic construct
  REGION 1..9: note = Description of Artificial Sequence: Synthetic peptide
YLFDESGEF

SEQ ID NO: 3 - protein, 9 aa, synthetic construct
  REGION 1..9: note = Description of Artificial Sequence: Synthetic peptide
FGDDTVIEV

SEQ ID NO: 4 - protein, 9 aa, synthetic construct
  REGION 1..9: note = Description of Artificial Sequence: Synthetic peptide
QLMCQPILL

SEQ ID NO: 5 - protein, 10 aa, synthetic construct
  REGION 1..10: note = Description of Artificial Sequence: Synthetic peptide
TTDPSFLGRY

SEQ ID NO: 6 - protein, 9 aa, synthetic construct
  REGION 1..9: note = Description of Artificial Sequence: Synthetic peptide
PTDNYITTY

SEQ ID NO: 7 - protein, 7 aa, synthetic construct
  REGION 1..7: note = Description of Artificial Sequence: Synthetic peptide
PSFLGRY

SEQ ID NO: 8 - protein, 9 aa, synthetic construct
  REGION 1..9: note = Description of Artificial Sequence: Synthetic peptide
AEAELAKNV

SEQ ID NO: 9 - protein, 9 aa, synthetic construct
  REGION 1..9: note = Description of Artificial Sequence: Synthetic peptide
KTIQPRVEK

SEQ ID NO: 10 - protein, 9 aa, synthetic construct
  REGION 1..9: note = Description of Artificial Sequence: Synthetic peptide
LLLDRLNQL

SEQ ID NO: 11 - protein, 9 aa, synthetic construct
  REGION 1..9: note = Description of Artificial Sequence: Synthetic peptide
VATSRTLSY

SEQ ID NO: 12 - protein, 67 aa, synthetic construct
  REGION 1..67: note = Description of Artificial Sequence: Synthetic polypeptide
MVTNNTFTLKVPHVGEIPVAYRKVLLKTIQPRVEKYLFDESGEFKLSEVGPEHSLAEYYIFFASFYY

SEQ ID NO: 13 - protein, 58 aa, synthetic construct
  REGION 1..58: note = Description of Artificial Sequence: Synthetic polypeptide
MVTNNTFTLKVPHVGEIPVAYRKVLLKTIQPRVEKYLFDESGEFKLSEVGPEHSLAEY

SEQ ID NO: 14 - protein, 33 aa, synthetic construct
  REGION 1..33: note = Description of Artificial Sequence: Synthetic polypeptide
APKEIIFLEGETLFGDDTVIEVAIILASFSAST

SEQ ID NO: 15 - protein, 22 aa, synthetic construct
  REGION 1..22: note = Description of Artificial Sequence: Synthetic peptide
APKEIIFLEGETLFGDDTVIEV

SEQ ID NO: 16 - protein, 66 aa, synthetic construct
  REGION 1..66: note = Description of Artificial Sequence: Synthetic polypeptide
HTTDPSFLGRYMSALFADDLNQLTGYHTDFSSEIIGYQLMCQPILLAEAELAKNVSLILGTVSWNL

SEQ ID NO: 17 - protein, 65 aa, synthetic construct
  REGION 1..65: note = Description of Artificial Sequence: Synthetic polypeptide
TTDPSFLGRYMSALFADDLNQLTGYHTDFSSEIIGYQLMCQPILLAEAELAKNVSLILGTVSWNL

SEQ ID NO: 18 - protein, 31 aa, synthetic construct
  REGION 1..31: note = Description of Artificial Sequence: Synthetic polypeptide
LLSAGIFGAITDVFYKENSYKVPTDNYITTY

SEQ ID NO: 19 - protein, 221 aa, synthetic construct
  REGION 1..221: note = Description of Artificial Sequence: Synthetic polypeptide
ADSNGTITVEELKKLLEQWNLVIGFLFLTWICLLQFAYANRNRFLYIIKLIFLWLLWPVTLACFVLAAVYRINWITGGIAIAMACLVGLMWLSYFIASFRLFARTRSMWSFNPETNILLNVPLHGTILTRPLLESELVIGAVILRGHLRIAGHHLGRCDIKDLPKEITVATSRTLSYYKLGASQRVAGDSGFAAYSRYRIGNYKLNTDHSSSSDNIALLVQ

SEQ ID NO: 20 - protein, 67 aa, synthetic construct
  REGION 1..67: note = Description of Artificial Sequence: Synthetic polypeptide
FAYANRNRFLYIIKLIFLWLLWPVTLACFVLAAVYRINWITGGIAIAMACLVGLMWLSYFIASFRLF

SEQ ID NO: 21 - protein, 33 aa, synthetic construct
  REGION 1..33: note = Description of Artificial Sequence: Synthetic polypeptide
LGRCDIKDLPKEITVATSRTLSYYKLGASQRVA

SEQ ID NO: 22 - protein, 12 aa, synthetic construct
  REGION 1..12: note = Description of Artificial Sequence: Synthetic peptide
KLLEQWNLVIGF

SEQ ID NO: 23 - protein, 31 aa, synthetic construct
  REGION 1..31: note = Description of Artificial Sequence: Synthetic polypeptide
NRNRFLYIIKLIFLWLLWPVTLACFVLAAVY

SEQ ID NO: 24 - protein, 23 aa, synthetic construct
  REGION 1..23: note = Description of Artificial Sequence: Synthetic peptide
SELVIGAVILRGHLRIAGHHLGR

SEQ ID NO: 25 - protein, 18 aa, synthetic construct
  REGION 1..18: note = Description of Artificial Sequence: Synthetic peptide
VATSRTLSYYKLGASQRV

SEQ ID NO: 26 - protein, 8 aa, synthetic construct
  REGION 1..8: note = Description of Artificial Sequence: Synthetic peptide
GLMWLSYF

SEQ ID NO: 27 - protein, 318 aa, synthetic construct
  REGION 1..318: note = Description of Artificial Sequence: Synthetic polypeptide
KDLSPRWYFYYLGTGPEAGLPYGANKDGIIWVATEGALNTPKDHIGTRNPANNAAIVLQLPQGTTLPKGFYAEGSRGGSQASSRSSSRSRNSSRNSTPGSSRGTSPARMAGNGGDAALALLLLDRLNQLESKMSGKGQQQQGQTVTKKSAAEASKKPRQKRTATKAYNVTQAFGRRGPEQTQGNFGDQELIRQGTDYKHWPQIAQFAPSASAFFGMSRIGMEVTPSGTWLTYTGAIKLDDKDPNFKDQVILLNKHIDAYKTFPPTEPKKDKKKKADETQALPQRQKKQQTVTLLPAADLDDFSKQLQQSMSSADSTQA

SEQ ID NO: 28 - protein, 33 aa, synthetic construct
  REGION 1..33: note = Description of Artificial Sequence: Synthetic polypeptide
RMAGNGGDAALALLLLDRLNQLESKMSGKGQQQ

SEQ ID NO: 29 - protein, 67 aa, synthetic construct
  REGION 1..67: note = Description of Artificial Sequence: Synthetic polypeptide
YKHWPQIAQFAPSASAFFGMSRIGMEVTPSGTWLTYTGAIKLDDKDPNFKDQVILLNKHIDAYKTFP

SEQ ID NO: 30 - protein, 167 aa, synthetic construct
  REGION 1..167: note = Description of Artificial Sequence: Synthetic polypeptide
SPARMAGNGGDAALALLLLDRLNQLESKMSGKGQQQQGQTVTKKSAAEASKKPRQKRTATKAYNVTQAFGRRGPEQTQGNFGDQELIRQGTDYKHWPQIAQFAPSASAFFGMSRIGMEVTPSGTWLTYTGAIKLDDKDPNFKDQVILLNKHIDAYKTFPPTEPKKDK

SEQ ID NO: 31 - protein, 10 aa, synthetic construct
  REGION 1..10: note = Description of Artificial Sequence: Synthetic peptide
GGSGGGGSGG

SEQ ID NO: 32 - protein, 10 aa, synthetic construct
  REGION 1..10: note = Description of Artificial Sequence: Synthetic peptide
GGSLGGGGSG

SEQ ID NO: 33 - protein, 4 aa, synthetic construct
  REGION 1..4: note = Description of Artificial Sequence: Synthetic peptide
FRAC

SEQ ID NO: 34 - protein, 4 aa, synthetic construct
  REGION 1..4: note = Description of Artificial Sequence: Synthetic peptide
KRCF

SEQ ID NO: 35 - protein, 4 aa, synthetic construct
  REGION 1..4: note = Description of Artificial Sequence: Synthetic peptide
KKRY

SEQ ID NO: 36 - protein, 4 aa, synthetic construct
  REGION 1..4: note = Description of Artificial Sequence: Synthetic peptide
ARMA

SEQ ID NO: 37 - protein, 4 aa, synthetic construct
  REGION 1..4: note = Description of Artificial Sequence: Synthetic peptide
RRSG

SEQ ID NO: 38 - protein, 4 aa, synthetic construct
  REGION 1..4: note = Description of Artificial Sequence: Synthetic peptide
MRAC

SEQ ID NO: 39 - protein, 4 aa, synthetic construct
  REGION 1..4: note = Description of Artificial Sequence: Synthetic peptide
KMCG

SEQ ID NO: 40 - protein, 4 aa, synthetic construct
  REGION 1..4: note = Description of Artificial Sequence: Synthetic peptide
ARCA

SEQ ID NO: 41 - protein, 4 aa, synthetic construct
  REGION 1..4: note = Description of Artificial Sequence: Synthetic peptide
KKQG

SEQ ID NO: 42 - protein, 4 aa, synthetic construct
  REGION 1..4: note = Description of Artificial Sequence: Synthetic peptide
YRSY

SEQ ID NO: 43 - protein, 4 aa, synthetic construct
  REGION 1..4: note = Description of Artificial Sequence: Synthetic peptide
SFMN

SEQ ID NO: 44 - protein, 4 aa, synthetic construct
  REGION 1..4: note = Description of Artificial Sequence: Synthetic peptide
FKAA

SEQ ID NO: 45 - protein, 4 aa, synthetic construct
  REGION 1..4: note = Description of Artificial Sequence: Synthetic peptide
KRNG

SEQ ID NO: 46 - protein, 4 aa, synthetic construct
  REGION 1..4: note = Description of Artificial Sequence: Synthetic peptide
YNSF

SEQ ID NO: 47 - protein, 4 aa, synthetic construct
  REGION 1..4: note = Description of Artificial Sequence: Synthetic peptide
KKNG

SEQ ID NO: 48 - protein, 4 aa, synthetic construct
  REGION 1..4: note = Description of Artificial Sequence: Synthetic peptide
RRRG

SEQ ID NO: 49 - protein, 4 aa, synthetic construct
  REGION 1..4: note = Description of Artificial Sequence: Synthetic peptide
KRYS

SEQ ID NO: 50 - protein, 4 aa, synthetic construct
  REGION 1..4: note = Description of Artificial Sequence: Synthetic peptide
ARYA

SEQ ID NO: 51 - protein, 67 aa, synthetic construct
  REGION 1..67: note = Description of Artificial Sequence: Synthetic polypeptide
EQYIKWPWYIWLGFIAGLIAIVMVTIMLCCMTSCCSCLKGCCSCGSCCKFDEDDSEPVLKGVKLHYT

SEQ ID NO: 52 - protein, 19 aa, synthetic construct
  REGION 1..19: note = Description of Artificial Sequence: Synthetic peptide
MFVFLVLLPLVSSQCVNLT

SEQ ID NO: 53 - DNA, 34 bp, synthetic construct
  misc_feature 1..34: note = Description of Artificial Sequence: Synthetic oligonucleotide
  variation 2..3: note = N can be t or u
  variation 5..6: note = N can be t or u
  variation 8: note = N can be t or u
  variation 11: note = N can be t or u
  variation 22: note = N can be t or u
  source 1..34: mol_type = other DNA
anncnncnggnccccacagacncagagagaaccc

SEQ ID NO: 54 - DNA, 136 bp, synthetic construct
  misc_feature 1..136: note = Description of Artificial Sequence: Synthetic polynucleotide
  variation 2: note = N can be t or u
  variation 5: note = N can be t or u
  variation 8: note = N can be t or u
  variation 12: note = N can be t or u
  variation 21: note = N can be t or u
  variation 24: note = N can be t or u
  variation 28: note = N can be t or u
  variation 34..36: note = N can be t or u
  variation 41: note = N can be t or u
  variation 44: note = N can be t or u
  variation 48: note = N can be t or u
  variation 57: note = N can be t or u
  variation 59: note = N can be t or u
  variation 69: note = N can be t or u
  variation 74: note = N can be t or u
  variation 81: note = N can be t or u
  variation 83: note = N can be t or u
  variation 86: note = N can be t or u
  variation 93: note = N can be t or u
  variation 99: note = N can be t or u
  variation 107: note = N can be t or u
  variation 115: note = N can be t or u
  variation 117: note = N can be t or u
  variation 120: note = N can be t or u
  variation 123..124: note = N can be t or u
  variation 134: note = N can be t or u
  source 1..136: mol_type = other DNA
cnggnacngcangcacgcaangcnagcngccccnnncccgnccngggnaccccgagncncccccgaccncgggncccaggnangcncccaccnccaccngccccacncaccaccncngcnagnnccagacaccncc

SEQ ID NO: 55 - DNA, 142 bp, synthetic construct
  misc_feature 1..142: note = Description of Artificial Sequence: Synthetic polynucleotide
  variation 15: note = N can be t or u
  variation 21: note = N can be t or u
  variation 30..31: note = N can be t or u
  variation 36: note = N can be t or u
  variation 63: note = N can be t or u
  variation 66..67: note = N can be t or u
  variation 72..74: note = N can be t or u
  variation 80: note = N can be t or u
  variation 90..92: note = N can be t or u
  variation 96: note = N can be t or u
  variation 101: note = N can be t or u
  variation 103: note = N can be t or u
  variation 106: note = N can be t or u
  variation 117..118: note = N can be t or u
  variation 121: note = N can be t or u
  variation 125..127: note = N can be t or u
  variation 130: note = N can be t or u
  source 1..142: mol_type = other DNA
caagcacgcagcaangcagcncaaaacgcnnagccnagccacacccccacgggaaacagcagngannaaccnnnagcaanaaacgaaagnnnaacnaagcnanacnaaccccagggnnggncaannncgngccagccacacc

SEQ ID NO: 56 - DNA, 110 bp, synthetic construct
  misc_feature 1..110: note = Description of Artificial Sequence: Synthetic polynucleotide
  variation 34: note = N can be t or u
  variation 36: note = N can be t or u
  variation 40: note = N can be t or u
  source 1..110: mol_type = other DNA
aaaaaaaaaaaaaaaaaaaaaaaaaaaaaagcanangacnaaaaaaaaaaaaaaaaaaaaaaaaaaaaaaaaaaaaaaaaaaaaaaaaaaaaaaaaaaaaaaaaaaaaaa

SEQ ID NO: 57 - protein, 9 aa, synthetic construct
  REGION 1..9: note = Description of Artificial Sequence: Synthetic peptide
SAPPAQYEL

SEQ ID NO: 58 - protein, 9 aa, synthetic construct
  REGION 1..9: note = Description of Artificial Sequence: Synthetic peptide
AVASKILGL

SEQ ID NO: 59 - protein, 9 aa, synthetic construct
  REGION 1..9: note = Description of Artificial Sequence: Synthetic peptide
EYADVFHLY

SEQ ID NO: 60 - protein, 9 aa, synthetic construct
  REGION 1..9: note = Description of Artificial Sequence: Synthetic peptide
DEFTPFDVV

SEQ ID NO: 61 - protein, 9 aa, synthetic construct
  REGION 1..9: note = Description of Artificial Sequence: Synthetic peptide
VRIQPGQTF

SEQ ID NO: 62 - protein, 9 aa, synthetic construct
  REGION 1..9: note = Description of Artificial Sequence: Synthetic peptide
SFRLFARTR

SEQ ID NO: 63 - protein, 8 aa, synthetic construct
  REGION 1..8: note = Description of Artificial Sequence: Synthetic peptide
KFLPFQQF

SEQ ID NO: 64 - protein, 9 aa, synthetic construct
  REGION 1..9: note = Description of Artificial Sequence: Synthetic peptide
VVQEGVLTA

SEQ ID NO: 65 - protein, 9 aa, synthetic construct
  REGION 1..9: note = Description of Artificial Sequence: Synthetic peptide
RLDKVEAEV

SEQ ID NO: 66 - protein, 9 aa, synthetic construct
  REGION 1..9: note = Description of Artificial Sequence: Synthetic peptide
FGADPIHSL

SEQ ID NO: 67 - protein, 9 aa, synthetic construct
  REGION 1..9: note = Description of Artificial Sequence: Synthetic peptide
NYNYLYRLF

SEQ ID NO: 68 - protein, 9 aa, synthetic construct
  REGION 1..9: note = Description of Artificial Sequence: Synthetic peptide
KYIKWPWYI

SEQ ID NO: 69 - protein, 10 aa, synthetic construct
  REGION 1..10: note = Description of Artificial Sequence: Synthetic peptide
KWPWYIWLGF

SEQ ID NO: 70 - protein, 9 aa, synthetic construct
  REGION 1..9: note = Description of Artificial Sequence: Synthetic peptide
LPFNDGVYF

SEQ ID NO: 71 - protein, 9 aa, synthetic construct
  REGION 1..9: note = Description of Artificial Sequence: Synthetic peptide
QPTESIVRF

SEQ ID NO: 72 - protein, 9 aa, synthetic construct
  REGION 1..9: note = Description of Artificial Sequence: Synthetic peptide
IPFAMQMAY

SEQ ID NO: 73 - protein, 9 aa, synthetic construct
  REGION 1..9: note = Description of Artificial Sequence: Synthetic peptide
YLQPRTFLL

SEQ ID NO: 74 - protein, 9 aa, synthetic construct
  REGION 1..9: note = Description of Artificial Sequence: Synthetic peptide
RLQSLQTYV

SEQ ID NO: 75 - protein, 10 aa, synthetic construct
  REGION 1..10: note = Description of Artificial Sequence: Synthetic peptide
AACCHLAKAL

SEQ ID NO: 76 - protein, 11 aa, synthetic construct
  REGION 1..11: note = Description of Artificial Sequence: Synthetic peptide
AADLDDFSKQL

SEQ ID NO: 77 - protein, 10 aa, synthetic construct
  REGION 1..10: note = Description of Artificial Sequence: Synthetic peptide
AADPAMHAAS

SEQ ID NO: 78 - protein, 11 aa, synthetic construct
  REGION 1..11: note = Description of Artificial Sequence: Synthetic peptide
AAGLEAPFLYL

SEQ ID NO: 79 - protein, 8 aa, synthetic construct
  REGION 1..8: note = Description of Artificial Sequence: Synthetic peptide
AAISDYDY

SEQ ID NO: 80 - protein, 10 aa, synthetic construct
  REGION 1..10: note = Description of Artificial Sequence: Synthetic peptide
AAISDYDYYR

SEQ ID NO: 81 - protein, 9 aa, synthetic construct
  REGION 1..9: note = Description of Artificial Sequence: Synthetic peptide
AAITILDGI

SEQ ID NO: 82 - protein, 12 aa, synthetic construct
  REGION 1..12: note = Description of Artificial Sequence: Synthetic peptide
AAITILDGISQY

SEQ ID NO: 83 - protein, 10 aa, synthetic construct
  REGION 1..10: note = Description of Artificial Sequence: Synthetic peptide
AAKKNNLPFK

SEQ ID NO: 84 - protein, 10 aa, synthetic construct
  REGION 1..10: note = Description of Artificial Sequence: Synthetic peptide
AALALLLLDR

SEQ ID NO: 85 - protein, 8 aa, synthetic construct
  REGION 1..8: note = Description of Artificial Sequence: Synthetic peptide
AALCTFLL

SEQ ID NO: 86 - protein, 8 aa, synthetic construct
  REGION 1..8: note = Description of Artificial Sequence: Synthetic peptide
AALQIPFA

SEQ ID NO: 87 - protein, 9 aa, synthetic construct
  REGION 1..9: note = Description of Artificial Sequence: Synthetic peptide
AALQPEEEQ

SEQ ID NO: 88 - protein, 9 aa, synthetic construct
  REGION 1..9: note = Description of Artificial Sequence: Synthetic peptide
AAMQRKLEK

SEQ ID NO: 89 - protein, 11 aa, synthetic construct
  REGION 1..11: note = Description of Artificial Sequence: Synthetic peptide
AANTVIWDYKR

SEQ ID NO: 90 - protein, 9 aa, synthetic construct
  REGION 1..9: note = Description of Artificial Sequence: Synthetic peptide
AARDLICAQ

SEQ ID NO: 91 - protein, 10 aa, synthetic construct
  REGION 1..10: note = Description of Artificial Sequence: Synthetic peptide
AARDLICAQK

SEQ ID NO: 92 - protein, 11 aa, synthetic construct
  REGION 1..11: note = Description of Artificial Sequence: Synthetic peptide
AARVVRSIFSR

SEQ ID NO: 93 - protein, 9 aa, synthetic construct
  REGION 1..9: note = Description of Artificial Sequence: Synthetic peptide
AARYMRSLK

SEQ ID NO: 94 - protein, 9 aa, synthetic construct
  REGION 1..9: note = Description of Artificial Sequence: Synthetic peptide
AASGNLLLD

SEQ ID NO: 95 - protein, 10 aa, synthetic construct
  REGION 1..10: note = Description of Artificial Sequence: Synthetic peptide
AASGNLLLDK

SEQ ID NO: 96 - protein, 11 aa, synthetic construct
  REGION 1..11: note = Description of Artificial Sequence: Synthetic peptide
AAVDALCEKAL

SEQ ID NO: 97 - protein, 10 aa, synthetic construct
  REGION 1..10: note = Description of Artificial Sequence: Synthetic peptide
AAVINGDRWF

SEQ ID NO: 98 - protein, 8 aa, synthetic construct
  REGION 1..8: note = Description of Artificial Sequence: Synthetic peptide
AAVNSVPW

SEQ ID NO: 99 - protein, 8 aa, synthetic construct
  REGION 1..8: note = Description of Artificial Sequence: Synthetic peptide
AAVYRINW

SEQ ID NO: 100 - protein, 11 aa, synthetic construct
  REGION 1..11: note = Description of Artificial Sequence: Synthetic peptide
AAYSRYRIGNY

SEQ ID NO: 101 - protein, 9 aa, synthetic construct
  REGION 1..9: note = Description of Artificial Sequence: Synthetic peptide
ACLVGLMWL

SEQ ID NO: 102 - protein, 9 aa, synthetic construct
  REGION 1..9: note = Description of Artificial Sequence: Synthetic peptide
ACPLIAAVI

SEQ ID NO: 103 - protein, 9 aa, synthetic construct
  REGION 1..9: note = Description of Artificial Sequence: Synthetic peptide
ACTDDNALA

SEQ ID NO: 104 - protein, 11 aa, synthetic construct
  REGION 1..11: note = Description of Artificial Sequence: Synthetic peptide
ACTDDNALAYY

SEQ ID NO: 105 - protein, 10 aa, synthetic construct
  REGION 1..10: note = Description of Artificial Sequence: Synthetic peptide
ACVEEVTTTL

SEQ ID NO: 106 - protein, 10 aa, synthetic construct
  REGION 1..10: note = Description of Artificial Sequence: Synthetic peptide
ACYNGSPSGV

SEQ ID NO: 107 - protein, 11 aa, synthetic construct
  REGION 1..11: note = Description of Artificial Sequence: Synthetic peptide
ACYNGSPSGVY

SEQ ID NO: 108 - protein, 8 aa, synthetic construct
  REGION 1..8: note = Description of Artificial Sequence: Synthetic peptide
ADAQSFLN

SEQ ID NO: 109 - protein, 10 aa, synthetic construct
  REGION 1..10: note = Description of Artificial Sequence: Synthetic peptide
ADAQSFLNGF

SEQ ID NO: 110 - protein, 8 aa, synthetic construct
  REGION 1..8: note = Description of Artificial Sequence: Synthetic peptide
ADDLNQLT

SEQ ID NO: 111 - protein, 9 aa, synthetic construct
  REGION 1..9: note = Description of Artificial Sequence: Synthetic peptide
ADKFPVLHD

SEQ ID NO: 112 - protein, 8 aa, synthetic construct
  REGION 1..8: note = Description of Artificial Sequence: Synthetic peptide
ADLKSFDL

SEQ ID NO: 113 - protein, 8 aa, synthetic construct
  REGION 1..8: note = Description of Artificial Sequence: Synthetic peptide
ADLVYALR

SEQ ID NO: 114 - protein, 9 aa, synthetic construct
  REGION 1..9: note = Description of Artificial Sequence: Synthetic peptide
ADLVYALRH

SEQ ID NO: 115 - protein, 9 aa, synthetic construct
  REGION 1..9: note = Description of Artificial Sequence: Synthetic peptide
ADLYKLMGH

SEQ ID NO: 116 - protein, 10 aa, synthetic construct
  REGION 1..10: note = Description of Artificial Sequence: Synthetic peptide
ADLYKLMGHF

SEQ ID NO: 117 - protein, 9 aa, synthetic construct
  REGION 1..9: note = Description of Artificial Sequence: Synthetic peptide
ADNKFALTC

SEQ ID NO: 118 - protein, 8 aa, synthetic construct
  REGION 1..8: note = Description of Artificial Sequence: Synthetic peptide
ADPAMHAA

SEQ ID NO: 119 - protein, 8 aa, synthetic construct
  REGION 1..8: note = Description of Artificial Sequence: Synthetic peptide
ADPIHSLR

SEQ ID NO: 120 - protein, 9 aa, synthetic construct
  REGION 1..9: note = Description of Artificial Sequence: Synthetic peptide
ADPIHSLRV

SEQ ID NO: 121 - protein, 8 aa, synthetic construct
  REGION 1..8: note = Description of Artificial Sequence: Synthetic peptide
ADQAMTQM

SEQ ID NO: 122 - protein, 9 aa, synthetic construct
  REGION 1..9: note = Description of Artificial Sequence: Synthetic peptide
ADQAMTQMY

SEQ ID NO: 123 - protein, 8 aa, synthetic construct
  REGION 1..8: note = Description of Artificial Sequence: Synthetic peptide
ADQLTPTW

SEQ ID NO: 124 - protein, 8 aa, synthetic construct
  REGION 1..8: note = Description of Artificial Sequence: Synthetic peptide
ADSFVIRG

SEQ ID NO: 125 - protein, 8 aa, synthetic construct
  REGION 1..8: note = Description of Artificial Sequence: Synthetic peptide
ADSIIIGG

SEQ ID NO: 126 - protein, 9 aa, synthetic construct
  REGION 1..9: note = Description of Artificial Sequence: Synthetic peptide
ADSIIIGGA

SEQ ID NO: 127 - protein, 9 aa, synthetic construct
  REGION 1..9: note = Description of Artificial Sequence: Synthetic peptide
ADSKIVQLS

SEQ ID NO: 128 - protein, 8 aa, synthetic construct
  REGION 1..8: note = Description of Artificial Sequence: Synthetic peptide
ADSTLIGD

SEQ ID NO: 129 - protein, 8 aa, synthetic construct
  REGION 1..8: note = Description of Artificial Sequence: Synthetic peptide
ADVFHLYL

SEQ ID NO: 130 - protein, 9 aa, synthetic construct
  REGION 1..9: note = Description of Artificial Sequence: Synthetic peptide
ADVFHLYLQ

SEQ ID NO: 131 - protein, 8 aa, synthetic construct
  REGION 1..8: note = Description of Artificial Sequence: Synthetic peptide
ADVTKIKP

SEQ ID NO: 132 - protein, 9 aa, synthetic construct
  REGION 1..9: note = Description of Artificial Sequence: Synthetic peptide
ADYNYKLPD

SEQ ID NO: 133 - protein, 8 aa, synthetic construct
  REGION 1..8: note = Description of Artificial Sequence: Synthetic peptide
ADYSVLYN

SEQ ID NO: 134 - protein, 10 aa, synthetic construct
  REGION 1..10: note = Description of Artificial Sequence: Synthetic peptide
AEASKKPRQK

SEQ ID NO: 135 - protein, 8 aa, synthetic construct
  REGION 1..8: note = Description of Artificial Sequence: Synthetic peptide
AECTIFKD

SEQ ID NO: 136 - protein, 8 aa, synthetic construct
  REGION 1..8: note = Description of Artificial Sequence: Synthetic peptide
AEETRKLM

SEQ ID NO: 137 - protein, 9 aa, synthetic construct
  REGION 1..9: note = Description of Artificial Sequence: Synthetic peptide
AEGSRGGSQ

SEQ ID NO: 138 - protein, 8 aa, synthetic construct
  REGION 1..8: note = Description of Artificial Sequence: Synthetic peptide
AEIRASAN

SEQ ID NO: 139 - protein, 8 aa, synthetic construct
  REGION 1..8: note = Description of Artificial Sequence: Synthetic peptide
AELAKNVS

SEQ ID NO: 140 - protein, 11 aa, synthetic construct
  REGION 1..11: note = Description of Artificial Sequence: Synthetic peptide
AENVTGLFKDC

SEQ ID NO: 141 - protein, 8 aa, synthetic construct
  REGION 1..8: note = Description of Artificial Sequence: Synthetic peptide
AESHVDTD

SEQ ID NO: 142 - protein, 9 aa, synthetic construct
  REGION 1..9: note = Description of Artificial Sequence: Synthetic peptide
AEVAVKMFD

SEQ ID NO: 143 - protein, 12 aa, synthetic construct
  REGION 1..12: note = Description of Artificial Sequence: Synthetic peptide
AFACPDGVKHVY

SEQ ID NO: 144 - protein, 9 aa, synthetic construct
  REGION 1..9: note = Description of Artificial Sequence: Synthetic peptide
AFASEAARV

SEQ ID NO: 145 - protein, 8 aa, synthetic construct
  REGION 1..8: note = Description of Artificial Sequence: Synthetic peptide
AFDIYNDK

SEQ ID NO: 146 - protein, 9 aa, synthetic construct
  REGION 1..9: note = Description of Artificial Sequence: Synthetic peptide
AFDIYNDKV

SEQ ID NO: 147 - protein, 9 aa, synthetic construct
  REGION 1..9: note = Description of Artificial Sequence: Synthetic peptide
AFDKSAFVN

SEQ ID NO: 148 - protein, 8 aa, synthetic construct
  REGION 1..8: note = Description of Artificial Sequence: Synthetic peptide
AFEHIVYG

SEQ ID NO: 149 - protein, 8 aa, synthetic construct
  REGION 1..8: note = Description of Artificial Sequence: Synthetic peptide
AFFGMSRI

SEQ ID NO: 150 - protein, 10 aa, synthetic construct
  REGION 1..10: note = Description of Artificial Sequence: Synthetic peptide
AFGEYSHVVA

SEQ ID NO: 151 - protein, 9 aa, synthetic construct
  REGION 1..9: note = Description of Artificial Sequence: Synthetic peptide
AFHTPAFDK

SEQ ID NO: 152 - protein, 9 aa, synthetic construct
  REGION 1..9: note = Description of Artificial Sequence: Synthetic peptide
AFKQIVESC

SEQ ID NO: 153 - protein, 10 aa, synthetic construct
  REGION 1..10: note = Description of Artificial Sequence: Synthetic peptide
AFLLFLVLIM

SEQ ID NO: 154 - protein, 12 aa, synthetic construct
  REGION 1..12: note = Description of Artificial Sequence: Synthetic peptide
AFLPFAMGIIAM

SEQ ID NO: 155 - protein, 9 aa, synthetic construct
  REGION 1..9: note = Description of Artificial Sequence: Synthetic peptide
AFVNLKQLP

SEQ ID NO: 156 - protein, 12 aa, synthetic construct
  REGION 1..12: note = Description of Artificial Sequence: Synthetic peptide
AFVNLKQLPFFY

SEQ ID NO: 157 - protein, 12 aa, synthetic construct
  REGION 1..12: note = Description of Artificial Sequence: Synthetic peptide
AGDSGFAAYSRY

SEQ ID NO: 158 - protein, 8 aa, synthetic construct
  REGION 1..8: note = Description of Artificial Sequence: Synthetic peptide
AGFAKFLK

SEQ ID NO: 159 - protein, 8 aa, synthetic construct
  REGION 1..8: note = Description of Artificial Sequence: Synthetic peptide
AGGIVAIV

SEQ ID NO: 160 - protein, 10 aa, synthetic construct
  REGION 1..10: note = Description of Artificial Sequence: Synthetic peptide
AGLEAPFLYL

SEQ ID NO: 161 - protein, 11 aa, synthetic construct
  REGION 1..11: note = Description of Artificial Sequence: Synthetic peptide
AGLEAPFLYLY

SEQ ID NO: 162 - protein, 9 aa, synthetic construct
  REGION 1..9: note = Description of Artificial Sequence: Synthetic peptide
AGSYKDWSY

SEQ ID NO: 163 - protein, 11 aa, synthetic construct
  REGION 1..11: note = Description of Artificial Sequence: Synthetic peptide
AHISTIGVCSM

SEQ ID NO: 164 - protein, 10 aa, synthetic construct
  REGION 1..10: note = Description of Artificial Sequence: Synthetic peptide
AHVASCDAIM

SEQ ID NO: 165 - protein, 9 aa, synthetic construct
  REGION 1..9: note = Description of Artificial Sequence: Synthetic peptide
AICHDGKAH

SEQ ID NO: 166 - protein, 10 aa, synthetic construct
  REGION 1..10: note = Description of Artificial Sequence: Synthetic peptide
AIDAYPLTKH

SEQ ID NO: 167 - protein, 10 aa, synthetic construct
  REGION 1..10: note = Description of Artificial Sequence: Synthetic peptide
AIDGGVTRDI

SEQ ID NO: 168 - protein, 11 aa, synthetic construct
  REGION 1..11: note = Description of Artificial Sequence: Synthetic peptide
AIFYLITPVHV

SEQ ID NO: 169 - protein, 9 aa, synthetic construct
  REGION 1..9: note = Description of Artificial Sequence: Synthetic peptide
AIKCVPQAD

SEQ ID NO: 170 - protein, 9 aa, synthetic construct
  REGION 1..9: note = Description of Artificial Sequence: Synthetic peptide
AILTALRLC

SEQ ID NO: 171 - protein, 11 aa, synthetic construct
  REGION 1..11: note = Description of Artificial Sequence: Synthetic peptide
AILTALRLCAY

SEQ ID NO: 172 - protein, 10 aa, synthetic construct
  REGION 1..10: note = Description of Artificial Sequence: Synthetic peptide
AIMQLFFSYF

SEQ ID NO: 173 - protein, 9 aa, synthetic construct
  REGION 1..9: note = Description of Artificial Sequence: Synthetic peptide
AISSVLNDI

SEQ ID NO: 174 - protein, 12 aa, synthetic construct
  REGION 1..12: note = Description of Artificial Sequence: Synthetic peptide
AIVFITLCFTLK

SEQ ID NO: 175 - protein, 9 aa, synthetic construct
  REGION 1..9: note = Description of Artificial Sequence: Synthetic peptide
AKCWTETDL

SEQ ID NO: 176 - protein, 11 aa, synthetic construct
  REGION 1..11: note = Description of Artificial Sequence: Synthetic peptide
AKEIKESVQTF

SEQ ID NO: 177 - protein, 9 aa, synthetic construct
  REGION 1..9: note = Description of Artificial Sequence: Synthetic peptide
AKFLKTNCC

SEQ ID NO: 178 - protein, 11 aa, synthetic construct
  REGION 1..11: note = Description of Artificial Sequence: Synthetic peptide
AKFLKTNCCRF

SEQ ID NO: 179 - protein, 9 aa, synthetic construct
  REGION 1..9: note = Description of Artificial Sequence: Synthetic peptide
AKHCLHVVG

SEQ ID NO: 180 - protein, 9 aa, synthetic construct
  REGION 1..9: note = Description of Artificial Sequence: Synthetic peptide
AKKNNLPFK

SEQ ID NO: 181 - protein, 9 aa, synthetic construct
  REGION 1..9: note = Description of Artificial Sequence: Synthetic peptide
AKKPTETIC

SEQ ID NO: 182 - protein, 8 aa, synthetic construct
  REGION 1..8: note = Description of Artificial Sequence: Synthetic peptide
AKNRARTV

SEQ ID NO: 183 - protein, 10 aa, synthetic construct
  REGION 1..10: note = Description of Artificial Sequence: Synthetic peptide
AKNVSLDNVL

SEQ ID NO: 184 - protein, 9 aa, synthetic construct
  REGION 1..9: note = Description of Artificial Sequence: Synthetic peptide
AKPFLNKVV

SEQ ID NO: 185 - protein, 9 aa, synthetic construct
  REGION 1..9: note = Description of Artificial Sequence: Synthetic peptide
AKRFKESPF

SEQ ID NO: 186 - protein, 8 aa, synthetic construct
  REGION 1..8: note = Description of Artificial Sequence: Synthetic peptide
AKSASVYY

SEQ ID NO: 187 - protein, 9 aa, synthetic construct
  REGION 1..9: note = Description of Artificial Sequence: Synthetic peptide
AKVGILCIM

SEQ ID NO: 188 - protein, 10 aa, synthetic construct
  REGION 1..10: note = Description of Artificial Sequence: Synthetic peptide
ALAPNMMVTN

SEQ ID NO: 189 - protein, 8 aa, synthetic construct
  REGION 1..8: note = Description of Artificial Sequence: Synthetic peptide
ALGGSVAI

SEQ ID NO: 190 - protein, 10 aa, synthetic construct
  REGION 1..10: note = Description of Artificial Sequence: Synthetic peptide
ALGGSVAIKI

SEQ ID NO: 191 - protein, 8 aa, synthetic construct
  REGION 1..8: note = Description of Artificial Sequence: Synthetic peptide
ALGKLQDV

SEQ ID NO: 192 - protein, 9 aa, synthetic construct
  REGION 1..9: note = Description of Artificial Sequence: Synthetic peptide
ALHRSYLTP

SEQ ID NO: 193 - protein, 8 aa, synthetic construct
  REGION 1..8: note = Description of Artificial Sequence: Synthetic peptide
ALITLATC

SEQ ID NO: 194 - protein, 11 aa, synthetic construct
  REGION 1..11: note = Description of Artificial Sequence: Synthetic peptide
ALKGGKIVNNW

SEQ ID NO: 195 - protein, 11 aa, synthetic construct
  REGION 1..11: note = Description of Artificial Sequence: Synthetic peptide
ALLADKFPVLH

SEQ ID NO: 196 - protein, 11 aa, synthetic construct
  REGION 1..11: note = Description of Artificial Sequence: Synthetic peptide
ALLAVFQSASK

SEQ ID NO: 197 - protein, 11 aa, synthetic construct
  REGION 1..11: note = Description of Artificial Sequence: Synthetic peptide
ALLLLDRLNQL

SEQ ID NO: 198 - protein, 11 aa, synthetic construct
  REGION 1..11: note = Description of Artificial Sequence: Synthetic peptide
ALLTLQQIELK

SEQ ID NO: 199 - protein, 9 aa, synthetic construct
  REGION 1..9: note = Description of Artificial Sequence: Synthetic peptide
ALNKATNNA

SEQ ID NO: 200 - protein, 8 aa, synthetic construct
  REGION 1..8: note = Description of Artificial Sequence: Synthetic peptide
ALRANSAV

SEQ ID NO: 201 - protein, 9 aa, synthetic construct
  REGION 1..9: note = Description of Artificial Sequence: Synthetic peptide
ALTGIAVEQ

SEQ ID NO: 202 - protein, 10 aa, synthetic construct
  REGION 1..10: note = Description of Artificial Sequence: Synthetic peptide
ALWEIQQVVD

SEQ ID NO: 203 - protein, 11 aa, synthetic construct
  REGION 1..11: note = Description of Artificial Sequence: Synthetic peptide
ALWEIQQVVDA

SEQ ID NO: 204 - protein, 11 aa, synthetic construct
  REGION 1..11: note = Description of Artificial Sequence: Synthetic peptide
AMDEFIERYKL

SEQ ID NO: 205 - protein, 8 aa, synthetic construct
  REGION 1..8: note = Description of Artificial Sequence: Synthetic peptide
AMPNMLRI

SEQ ID NO: 206 - protein, 8 aa, synthetic construct
  REGION 1..8: note = Description of Artificial Sequence: Synthetic peptide
AMQMAYRF

SEQ ID NO: 207 - protein, 10 aa, synthetic construct
  REGION 1..10: note = Description of Artificial Sequence: Synthetic peptide
AMRNAGIVGV

SEQ ID NO: 208 - protein, 8 aa, synthetic construct
  REGION 1..8: note = Description of Artificial Sequence: Synthetic peptide
AMRPNFTI

SEQ ID NO: 209 - protein, 9 aa, synthetic construct
  REGION 1..9: note = Description of Artificial Sequence: Synthetic peptide
AMSAFAMMF

SEQ ID NO: 210 - protein, 8 aa, synthetic construct
  REGION 1..8: note = Description of Artificial Sequence: Synthetic peptide
ANFCALIL

SEQ ID NO: 211 - protein, 9 aa, synthetic construct
  REGION 1..9: note = Description of Artificial Sequence: Synthetic peptide
ANFCALILA

SEQ ID NO: 212 - protein, 10 aa, synthetic construct
  REGION 1..10: note = Description of Artificial Sequence: Synthetic peptide
ANFCALILAY

SEQ ID NO: 213 - protein, 11 aa, synthetic construct
  REGION 1..11: note = Description of Artificial Sequence: Synthetic peptide
ANGDSEVVLKK

SEQ ID NO: 214 - protein, 9 aa, synthetic construct
  REGION 1..9: note = Description of Artificial Sequence: Synthetic peptide
ANGGKGFCK

SEQ ID NO: 215 - protein, 9 aa, synthetic construct
  REGION 1..9: note = Description of Artificial Sequence: Synthetic peptide
ANLDSCKRV

SEQ ID NO: 216 - protein, 10 aa, synthetic construct
  REGION 1..10: note = Description of Artificial Sequence: Synthetic peptide
ANLDSCKRVL

SEQ ID NO: 217 - protein, 10 aa, synthetic construct
  REGION 1..10: note = Description of Artificial Sequence: Synthetic peptide
ANLGERVRQA

SEQ ID NO: 218 - protein, 10 aa, synthetic construct
  REGION 1..10: note = Description of Artificial Sequence: Synthetic peptide
ANNAAIVLQL

SEQ ID NO: 219 - protein, 9 aa, synthetic construct
  REGION 1..9: note = Description of Artificial Sequence: Synthetic peptide
ANNCTFEYV

SEQ ID NO: 220 - protein, 8 aa, synthetic construct
  REGION 1..8: note = Description of Artificial Sequence: Synthetic peptide
ANNTKGSL

SEQ ID NO: 221 - protein, 10 aa, synthetic construct
  REGION 1..10: note = Description of Artificial Sequence: Synthetic peptide
ANQFNSAIGK

SEQ ID NO: 222 - protein, 9 aa, synthetic construct
  REGION 1..9: note = Description of Artificial Sequence: Synthetic peptide
ANQVIVNNL

SEQ ID NO: 223 - protein, 9 aa, synthetic construct
  REGION 1..9: note = Description of Artificial Sequence: Synthetic peptide
ANRNRFLYI

SEQ ID NO: 224 - protein, 8 aa, synthetic construct
  REGION 1..8: note = Description of Artificial Sequence: Synthetic peptide
ANSIVCRF

SEQ ID NO: 225 - protein, 9 aa, synthetic construct
  REGION 1..9: note = Description of Artificial Sequence: Synthetic peptide
ANSIVCRFD

SEQ ID NO: 226 - protein, 8 aa, synthetic construct
  REGION 1..8: note = Description of Artificial Sequence: Synthetic peptide
ANYQKVGM

SEQ ID NO: 227 - protein, 11 aa, synthetic construct
  REGION 1..11: note = Description of Artificial Sequence: Synthetic peptide
ANYQKVGMQKY

SEQ ID NO: 228 - protein, 9 aa, synthetic construct
  REGION 1..9: note = Description of Artificial Sequence: Synthetic peptide
APAHISTIG

SEQ ID NO: 229 - protein, 11 aa, synthetic construct
  REGION 1..11: note = Description of Artificial Sequence: Synthetic peptide
APFLYLYALVY

SEQ ID NO: 230 - protein, 9 aa, synthetic construct
  REGION 1..9: note = Description of Artificial Sequence: Synthetic peptide
APHGVVFLH

SEQ ID NO: 231 - protein, 11 aa, synthetic construct
  REGION 1..11: note = Description of Artificial Sequence: Synthetic peptide
APHGVVFLHVT

SEQ ID NO: 232 - protein, 12 aa, synthetic construct
  REGION 1..12: note = Description of Artificial Sequence: Synthetic peptide
APHGVVFLHVTY

SEQ ID NO: 233 - protein, 10 aa, synthetic construct
  REGION 1..10: note = Description of Artificial Sequence: Synthetic peptide
APISAMVRMY

SEQ ID NO: 234 - protein, 10 aa, synthetic construct
  REGION 1..10: note = Description of Artificial Sequence: Synthetic peptide
APKEIIFLEG

SEQ ID NO: 235 - protein, 8 aa, synthetic construct
  REGION 1..8: note = Description of Artificial Sequence: Synthetic peptide
APLIELCV

SEQ ID NO: 236 - protein, 11 aa, synthetic construct
  REGION 1..11: note = Description of Artificial Sequence: Synthetic peptide
APLIELCVDEA

SEQ ID NO: 237 - protein, 11 aa, synthetic construct
  REGION 1..11: note = Description of Artificial Sequence: Synthetic peptide
APLLSAGIFGA

SEQ ID NO: 238 - protein, 8 aa, synthetic construct
  REGION 1..8: note = Description of Artificial Sequence: Synthetic peptide
APLTVFFD

SEQ ID NO: 239 - protein, 9 aa, synthetic construct
  REGION 1..9: note = Description of Artificial Sequence: Synthetic peptide
APRITFGGP

SEQ ID NO: 240 - protein, 11 aa, synthetic construct
  REGION 1..11: note = Description of Artificial Sequence: Synthetic peptide
APRITFGGPSD

SEQ ID NO: 241 - protein, 11 aa, synthetic construct
  REGION 1..11: note = Description of Artificial Sequence: Synthetic peptide
APRTLLTKGTL

SEQ ID NO: 242 - protein, 9 aa, synthetic construct
  REGION 1..9: note = Description of Artificial Sequence: Synthetic peptide
APTHLSVDT

SEQ ID NO: 243 - protein, 9 aa, synthetic construct
  REGION 1..9: note = Description of Artificial Sequence: Synthetic peptide
APTKVTFGD

SEQ ID NO: 244 - protein, 10 aa, synthetic construct
  REGION 1..10: note = Description of Artificial Sequence: Synthetic peptide
APTLVPQEHY

SEQ ID NO: 245 - protein, 9 aa, synthetic construct
  REGION 1..9: note = Description of Artificial Sequence: Synthetic peptide
AQAAGTDTT

SEQ ID NO: 246 - protein, 11 aa, synthetic construct
  REGION 1..11: note = Description of Artificial Sequence: Synthetic peptide
AQFAPSASAFF

SEQ ID NO: 247 - protein, 8 aa, synthetic construct
  REGION 1..8: note = Description of Artificial Sequence: Synthetic peptide
AQLPAPRT

SEQ ID NO: 248 - protein, 10 aa, synthetic construct
  REGION 1..10: note = Description of Artificial Sequence: Synthetic peptide
AQLPAPRTLL

SEQ ID NO: 249 - protein, 12 aa, synthetic construct
  REGION 1..12: note = Description of Artificial Sequence: Synthetic peptide
AQLPAPRTLLTK

SEQ ID NO: 250 - protein, 10 aa, synthetic construct
  REGION 1..10: note = Description of Artificial Sequence: Synthetic peptide
AQSFLNGFAV

SEQ ID NO: 251 - protein, 9 aa, synthetic construct
  REGION 1..9: note = Description of Artificial Sequence: Synthetic peptide
AQTGSSKCV

SEQ ID NO: 252 - protein, 10 aa, synthetic construct
  REGION 1..10: note = Description of Artificial Sequence: Synthetic peptide
AQVDVVNFNL

SEQ ID NO: 253 - protein, 8 aa, synthetic construct
  REGION 1..8: note = Description of Artificial Sequence: Synthetic peptide
AQVLSEMV

SEQ ID NO: 254 - protein, 8 aa, synthetic construct
  REGION 1..8: note = Description of Artificial Sequence: Synthetic peptide
AQYELKHG

SEQ ID NO: 255 - protein, 8 aa, synthetic construct
  REGION 1..8: note = Description of Artificial Sequence: Synthetic peptide
ARARVECF

SEQ ID NO: 256 - protein, 10 aa, synthetic construct
  REGION 1..10: note = Description of Artificial Sequence: Synthetic peptide
ARARVECFDK

SEQ ID NO: 257 - protein, 11 aa, synthetic construct
  REGION 1..11: note = Description of Artificial Sequence: Synthetic peptide
ARDGCVPLNII

SEQ ID NO: 258 - protein, 9 aa, synthetic construct
  REGION 1..9: note = Description of Artificial Sequence: Synthetic peptide
ARDLICAQK

SEQ ID NO: 259 - protein, 9 aa, synthetic construct
  REGION 1..9: note = Description of Artificial Sequence: Synthetic peptide
ARDLSLQFK

SEQ ID NO: 260 - protein, 10 aa, synthetic construct
  REGION 1..10: note = Description of Artificial Sequence: Synthetic peptide
ARDLSLQFKR

SEQ ID NO: 261 - protein, 9 aa, synthetic construct
  REGION 1..9: note = Description of Artificial Sequence: Synthetic peptide
ARFPKSDGT

SEQ ID NO: 262 - protein, 11 aa, synthetic construct
  REGION 1..11: note = Description of Artificial Sequence: Synthetic peptide
ARFPKSDGTGT

SEQ ID NO: 263 - protein, 8 aa, synthetic construct
  REGION 1..8: note = Description of Artificial Sequence: Synthetic peptide
ARFYFYTS

SEQ ID NO: 264 - protein, 8 aa, synthetic construct
  REGION 1..8: note = Description of Artificial Sequence: Synthetic peptide
ARGIVFMC

SEQ ID NO: 265 - protein, 10 aa, synthetic construct
  REGION 1..10: note = Description of Artificial Sequence: Synthetic peptide
ARHINAQVAK

SEQ ID NO: 266 - protein, 10 aa, synthetic construct
  REGION 1..10: note = Description of Artificial Sequence: Synthetic peptide
ARIVYTACSH

SEQ ID NO: 267 - protein, 8 aa, synthetic construct
  REGION 1..8: note = Description of Artificial Sequence: Synthetic peptide
ARLRAKHY

SEQ ID NO: 268 - protein, 9 aa, synthetic construct
  REGION 1..9: note = Description of Artificial Sequence: Synthetic peptide
ARLRAKHYV

SEQ ID NO: 269 - protein, 10 aa, synthetic construct
  REGION 1..10: note = Description of Artificial Sequence: Synthetic peptide
ARLTPCGTGT

SEQ ID NO: 270 - protein, 8 aa, synthetic construct
  REGION 1..8: note = Description of Artificial Sequence: Synthetic peptide
ARLYYDSM

SEQ ID NO: 271 - protein, 9 aa, synthetic construct
  REGION 1..9: note = Description of Artificial Sequence: Synthetic peptide
ARQGFVDSD

SEQ ID NO: 272 - protein, 9 aa, synthetic construct
  REGION 1..9: note = Description of Artificial Sequence: Synthetic peptide
ARSEDKRAK

SEQ ID NO: 273 - protein, 11 aa, synthetic construct
  REGION 1..11: note = Description of Artificial Sequence: Synthetic peptide
ARSVSPKLFIR

SEQ ID NO: 274 - protein, 9 aa, synthetic construct
  REGION 1..9: note = Description of Artificial Sequence: Synthetic peptide
ARTAPHGHV

SEQ ID NO: 275 - protein, 10 aa, synthetic construct
  REGION 1..10: note = Description of Artificial Sequence: Synthetic peptide
ARTVYDDGAR

SEQ ID NO: 276 - protein, 11 aa, synthetic construct
  REGION 1..11: note = Description of Artificial Sequence: Synthetic peptide
ARTVYDDGARR

SEQ ID NO: 277 - protein, 10 aa, synthetic construct
  REGION 1..10: note = Description of Artificial Sequence: Synthetic peptide
ARVECFDKFK

SEQ ID NO: 278 - protein, 11 aa, synthetic construct
  REGION 1..11: note = Description of Artificial Sequence: Synthetic peptide
ARVECFDKFKV

SEQ ID NO: 279 - protein, 8 aa, synthetic construct
  REGION 1..8: note = Description of Artificial Sequence: Synthetic peptide
ARVVRSIF

SEQ ID NO: 280 - protein, 10 aa, synthetic construct
  REGION 1..10: note = Description of Artificial Sequence: Synthetic peptide
ARVVRSIFSR

SEQ ID NO: 281 - protein, 9 aa, synthetic construct
  REGION 1..9: note = Description of Artificial Sequence: Synthetic peptide
ASALGKLQD

SEQ ID NO: 282 - protein, 9 aa, synthetic construct
  REGION 1..9: note = Description of Artificial Sequence: Synthetic peptide
ASANIGCNH

SEQ ID NO: 283 - protein, 9 aa, synthetic construct
  REGION 1..9: note = Description of Artificial Sequence: Synthetic peptide
ASCTLSEQL

SEQ ID NO: 284 - protein, 10 aa, synthetic construct
  REGION 1..10: note = Description of Artificial Sequence: Synthetic peptide
ASDTYACWHH

SEQ ID NO: 285 - protein, 8 aa, synthetic construct
  REGION 1..8: note = Description of Artificial Sequence: Synthetic peptide
ASEAARVV

SEQ ID NO: 286 - protein, 9 aa, synthetic construct
  REGION 1..9: note = Description of Artificial Sequence: Synthetic peptide
ASEFSSLPS

SEQ ID NO: 287 - protein, 10 aa, synthetic construct
  REGION 1..10: note = Description of Artificial Sequence: Synthetic peptide
ASEYTGNYQC

SEQ ID NO: 288 - protein, 8 aa, synthetic construct
  REGION 1..8: note = Description of Artificial Sequence: Synthetic peptide
ASFSASTS

SEQ ID NO: 289 - protein, 8 aa, synthetic construct
  REGION 1..8: note = Description of Artificial Sequence: Synthetic peptide
ASFSTFKC

SEQ ID NO: 290 - protein, 9 aa, synthetic construct
  REGION 1..9: note = Description of Artificial Sequence: Synthetic peptide
ASFYYVWKS

SEQ ID NO: 291 - protein, 8 aa, synthetic construct
  REGION 1..8: note = Description of Artificial Sequence: Synthetic peptide
ASHMYCSF

SEQ ID NO: 292 - protein, 11 aa, synthetic construct
  REGION 1..11: note = Description of Artificial Sequence: Synthetic peptide
ASIKNFKSVLY

SEQ ID NO: 293 - protein, 12 aa, synthetic construct
  REGION 1..12: note = Description of Artificial Sequence: Synthetic peptide
ASIKNFKSVLYY

SEQ ID NO: 294 - protein, 8 aa, synthetic construct
  REGION 1..8: note = Description of Artificial Sequence: Synthetic peptide
ASIVAGGI

SEQ ID NO: 295 - protein, 10 aa, synthetic construct
  REGION 1..10: note = Description of Artificial Sequence: Synthetic peptide
ASIVAGGIVA

SEQ ID NO: 296 - protein, 8 aa, synthetic construct
  REGION 1..8: note = Description of Artificial Sequence: Synthetic peptide
ASKIITLK

SEQ ID NO: 297 - protein, 10 aa, synthetic construct
  REGION 1..10: note = Description of Artificial Sequence: Synthetic peptide
ASKIITLKKR

SEQ ID NO: 298 - protein, 11 aa, synthetic construct
  REGION 1..11: note = Description of Artificial Sequence: Synthetic peptide
ASKIITLKKRW

SEQ ID NO: 299 - protein, 9 aa, synthetic construct
  REGION 1..9: note = Description of Artificial Sequence: Synthetic peptide
ASKILGLPT

SEQ ID NO: 300 - protein, 8 aa, synthetic construct
  REGION 1..8: note = Description of Artificial Sequence: Synthetic peptide
ASLVLARK

SEQ ID NO: 301 - protein, 9 aa, synthetic construct
  REGION 1..9: note = Description of Artificial Sequence: Synthetic peptide
ASPNECNQM

SEQ ID NO: 302 - protein, 10 aa, synthetic construct
  REGION 1..10: note = Description of Artificial Sequence: Synthetic peptide
ASQGLVASIK

SEQ ID NO: 303 - protein, 9 aa, synthetic construct
  REGION 1..9: note = Description of Artificial Sequence: Synthetic peptide
ASQSIIAYT

SEQ ID NO: 304 - protein, 10 aa, synthetic construct
  REGION 1..10: note = Description of Artificial Sequence: Synthetic peptide
ASQSIIAYTM

SEQ ID NO: 305 - protein, 8 aa, synthetic construct
  REGION 1..8: note = Description of Artificial Sequence: Synthetic peptide
ASRELKVT

SEQ ID NO: 306 - protein, 10 aa, synthetic construct
  REGION 1..10: note = Description of Artificial Sequence: Synthetic peptide
ASSRSSSRSR

SEQ ID NO: 307 - protein, 9 aa, synthetic construct
  REGION 1..9: note = Description of Artificial Sequence: Synthetic peptide
ASTEKSNII

SEQ ID NO: 308 - protein, 10 aa, synthetic construct
  REGION 1..10: note = Description of Artificial Sequence: Synthetic peptide
ASTEKSNIIR

SEQ ID NO: 309 - protein, 9 aa, synthetic construct
  REGION 1..9: note = Description of Artificial Sequence: Synthetic peptide
ASTSAFVET

SEQ ID NO: 310 - protein, 8 aa, synthetic construct
  REGION 1..8: note = Description of Artificial Sequence: Synthetic peptide
ASVVNIQK

SEQ ID NO: 311 - protein, 8 aa, synthetic construct
  REGION 1..8: note = Description of Artificial Sequence: Synthetic peptide
ASVYAWNR

SEQ ID NO: 312 - protein, 9 aa, synthetic construct
  REGION 1..9: note = Description of Artificial Sequence: Synthetic peptide
ASVYAWNRK

SEQ ID NO: 313 - protein, 9 aa, synthetic construct
  REGION 1..9: note = Description of Artificial Sequence: Synthetic peptide
ASVYYSQLM

SEQ ID NO: 314 - protein, 9 aa, synthetic construct
  REGION 1..9: note = Description of Artificial Sequence: Synthetic peptide
ASWFTALTQ

SEQ ID NO: 315 - protein, 8 aa, synthetic construct
  REGION 1..8: note = Description of Artificial Sequence: Synthetic peptide
ASWVMRIM

SEQ ID NO: 316 - protein, 8 aa, synthetic construct
  REGION 1..8: note = Description of Artificial Sequence: Synthetic peptide
ASYQTQTN

SEQ ID NO: 317 - protein, 10 aa, synthetic construct
  REGION 1..10: note = Description of Artificial Sequence: Synthetic peptide
ATAEAELAKN

SEQ ID NO: 318 - protein, 10 aa, synthetic construct
  REGION 1..10: note = Description of Artificial Sequence: Synthetic peptide
ATALLTLQQI

SEQ ID NO: 319 - protein, 9 aa, synthetic construct
  REGION 1..9: note = Description of Artificial Sequence: Synthetic peptide
ATAQEAYEQ

SEQ ID NO: 320 - protein, 8 aa, synthetic construct
  REGION 1..8: note = Description of Artificial Sequence: Synthetic peptide
ATEGALNT

SEQ ID NO: 321 - protein, 10 aa, synthetic construct
  REGION 1..10: note = Description of Artificial Sequence: Synthetic peptide
ATEGALNTPK

SEQ ID NO: 322 - protein, 9 aa, synthetic construct
  REGION 1..9: note = Description of Artificial Sequence: Synthetic peptide
ATEVPANST

SEQ ID NO: 323 - protein, 10 aa, synthetic construct
  REGION 1..10: note = Description of Artificial Sequence: Synthetic peptide
ATEVPANSTV

SEQ ID NO: 324 - protein, 9 aa, synthetic construct
  REGION 1..9: note = Description of Artificial Sequence: Synthetic peptide
ATHGLAAVN

SEQ ID NO: 325 - protein, 9 aa, synthetic construct
  REGION 1..9: note = Description of Artificial Sequence: Synthetic peptide
ATHSDKFTD

SEQ ID NO: 326 - protein, 9 aa, synthetic construct
  REGION 1..9: note = Description of Artificial Sequence: Synthetic peptide
ATKMSECVL

SEQ ID NO: 327 - protein, 9 aa, synthetic construct
  REGION 1..9: note = Description of Artificial Sequence: Synthetic peptide
ATKYLVQQE

SEQ ID NO: 328 - protein, 8 aa, synthetic construct
  REGION 1..8: note = Description of Artificial Sequence: Synthetic peptide
ATNKATYK

SEQ ID NO: 329 - protein, 8 aa, synthetic construct
  REGION 1..8: note = Description of Artificial Sequence: Synthetic peptide
ATNYDLSV

SEQ ID NO: 330 - protein, 9 aa, synthetic construct
  REGION 1..9: note = Description of Artificial Sequence: Synthetic peptide
ATREAVGTN

SEQ ID NO: 331 - protein, 10 aa, synthetic construct
  REGION 1..10: note = Description of Artificial Sequence: Synthetic peptide
ATREAVGTNL

SEQ ID NO: 332 - protein, 9 aa, synthetic construct
  REGION 1..9: note = Description of Artificial Sequence: Synthetic peptide
ATRFASVYA

SEQ ID NO: 333 - protein, 10 aa, synthetic construct
  REGION 1..10: note = Description of Artificial Sequence: Synthetic peptide
ATRFASVYAW

SEQ ID NO: 334 - protein, 8 aa, synthetic construct
  REGION 1..8: note = Description of Artificial Sequence: Synthetic peptide
ATRGATVV

SEQ ID NO: 335 - protein, 9 aa, synthetic construct
  REGION 1..9: note = Description of Artificial Sequence: Synthetic peptide
ATRVECTTI

SEQ ID NO: 336 - protein, 9 aa, synthetic construct
  REGION 1..9: note = Description of Artificial Sequence: Synthetic peptide
ATSACVLAA

SEQ ID NO: 337 - protein, 10 aa, synthetic construct
  REGION 1..10: note = Description of Artificial Sequence: Synthetic peptide
ATSRTLSYYK

SEQ ID NO: 338 - protein, 10 aa, synthetic construct
  REGION 1..10: note = Description of Artificial Sequence: Synthetic peptide
ATTAYANSVF

SEQ ID NO: 339 - protein, 8 aa, synthetic construct
  REGION 1..8: note = Description of Artificial Sequence: Synthetic peptide
ATVCGPKK

SEQ ID NO: 340 - protein, 9 aa, synthetic construct
  REGION 1..9: note = Description of Artificial Sequence: Synthetic peptide
ATYYLFDES

SEQ ID NO: 341 - protein, 11 aa, synthetic construct
  REGION 1..11: note = Description of Artificial Sequence: Synthetic peptide
AVDAAKAYKDY

SEQ ID NO: 342 - protein, 8 aa, synthetic construct
  REGION 1..8: note = Description of Artificial Sequence: Synthetic peptide
AVDALCEK

SEQ ID NO: 343 - protein, 9 aa, synthetic construct
  REGION 1..9: note = Description of Artificial Sequence: Synthetic peptide
AVDALCEKA

SEQ ID NO: 344 - protein, 12 aa, synthetic construct
  REGION 1..12: note = Description of Artificial Sequence: Synthetic peptide
AVDALCEKALKY

SEQ ID NO: 345 - protein, 9 aa, synthetic construct
  REGION 1..9: note = Description of Artificial Sequence: Synthetic peptide
AVDINKLCE

SEQ ID NO: 346 - protein, 9 aa, synthetic construct
  REGION 1..9: note = Description of Artificial Sequence: Synthetic peptide
AVFISPYNS

SEQ ID NO: 347 - protein, 10 aa, synthetic construct
  REGION 1..10: note = Description of Artificial Sequence: Synthetic peptide
AVGTNLPLQL

SEQ ID NO: 348 - protein, 8 aa, synthetic construct
  REGION 1..8: note = Description of Artificial Sequence: Synthetic peptide
AVHECFVK

SEQ ID NO: 349 - protein, 10 aa, synthetic construct
  REGION 1..10: note = Description of Artificial Sequence: Synthetic peptide
AVHECFVKRV

SEQ ID NO: 350 - protein, 8 aa, synthetic construct
  REGION 1..8: note = Description of Artificial Sequence: Synthetic peptide
AVILRGHL

SEQ ID NO: 351 - protein, 10 aa, synthetic construct
  REGION 1..10: note = Description of Artificial Sequence: Synthetic peptide
AVILRGHLRI

SEQ ID NO: 352 - protein, 8 aa, synthetic construct
  REGION 1..8: note = Description of Artificial Sequence: Synthetic peptide
AVINGDRW

SEQ ID NO: 353 - protein, 10 aa, synthetic construct
  REGION 1..10: note = Description of Artificial Sequence: Synthetic peptide
AVINGDRWFL

SEQ ID NO: 354 - protein, 10 aa, synthetic construct
  REGION 1..10: note = Description of Artificial Sequence: Synthetic peptide
AVITREVGFV

SEQ ID NO: 355 - protein, 12 aa, synthetic construct
  REGION 1..12: note = Description of Artificial Sequence: Synthetic peptide
AVKRTIKGTHHW

SEQ ID NO: 356 - protein, 8 aa, synthetic construct
  REGION 1..8: note = Description of Artificial Sequence: Synthetic peptide
AVKTQFNY

SEQ ID NO: 357 - protein, 10 aa, synthetic construct
  REGION 1..10: note = Description of Artificial Sequence: Synthetic peptide
AVLQSGFRKM

SEQ ID NO: 358 - protein, 8 aa, synthetic construct
  REGION 1..8: note = Description of Artificial Sequence: Synthetic peptide
AVSKGFFK

SEQ ID NO: 359 - protein, 8 aa, synthetic construct
  REGION 1..8: note = Description of Artificial Sequence: Synthetic peptide
AVTAYNGY

SEQ ID NO: 360 - protein, 9 aa, synthetic construct
  REGION 1..9: note = Description of Artificial Sequence: Synthetic peptide
AVTAYNGYL

SEQ ID NO: 361 - protein, 8 aa, synthetic construct
  REGION 1..8: note = Description of Artificial Sequence: Synthetic peptide
AVVLLILM

SEQ ID NO: 362 - protein, 9 aa, synthetic construct
  REGION 1..9: note = Description of Artificial Sequence: Synthetic peptide
AVVLLILMT

SEQ ID NO: 363 - protein, 10 aa, synthetic construct
  REGION 1..10: note = Description of Artificial Sequence: Synthetic peptide
AVVLLILMTA

SEQ ID NO: 364 - protein, 8 aa, synthetic construct
  REGION 1..8: note = Description of Artificial Sequence: Synthetic peptide
AWPLIVTA

SEQ ID NO: 365 - protein, 10 aa, synthetic construct
  REGION 1..10: note = Description of Artificial Sequence: Synthetic peptide
AWPLIVTALR

SEQ ID NO: 366 - protein, 12 aa, synthetic construct
  REGION 1..12: note = Description of Artificial Sequence: Synthetic peptide
AWQPGVAMPNLY

SEQ ID NO: 367 - protein, 10 aa, synthetic construct
  REGION 1..10: note = Description of Artificial Sequence: Synthetic peptide
AWRKAVFISP

SEQ ID NO: 368 - protein, 11 aa, synthetic construct
  REGION 1..11: note = Description of Artificial Sequence: Synthetic peptide
AWYTERSEKSY

SEQ ID NO: 369 - protein, 8 aa, synthetic construct
  REGION 1..8: note = Description of Artificial Sequence: Synthetic peptide
AYEQAVAN

SEQ ID NO: 370 - protein, 12 aa, synthetic construct
  REGION 1..12: note = Description of Artificial Sequence: Synthetic peptide
AYFNMVYMPASW

SEQ ID NO: 371 - protein, 10 aa, synthetic construct
  REGION 1..10: note = Description of Artificial Sequence: Synthetic peptide
AYSRYRIGNY

SEQ ID NO: 372 - protein, 9 aa, synthetic construct
  REGION 1..9: note = Description of Artificial Sequence: Synthetic peptide
AYTKRNVIP

SEQ ID NO: 373 - protein, 11 aa, synthetic construct
  REGION 1..11: note = Description of Artificial Sequence: Synthetic peptide
AYTKRNVIPTI

SEQ ID NO: 374 - protein, 8 aa, synthetic construct
  REGION 1..8: note = Description of Artificial Sequence: Synthetic peptide
AYTNSFTR

SEQ ID NO: 375 - protein, 9 aa, synthetic construct
  REGION 1..9: note = Description of Artificial Sequence: Synthetic peptide
AYTNSFTRG

SEQ ID NO: 376 - protein, 11 aa, synthetic construct
  REGION 1..11: note = Description of Artificial Sequence: Synthetic peptide
AYTNSFTRGVY

SEQ ID NO: 377 - protein, 10 aa, synthetic construct
  REGION 1..10: note = Description of Artificial Sequence: Synthetic peptide
AYTVELGTEV

SEQ ID NO: 378 - protein, 8 aa, synthetic construct
  REGION 1..8: note = Description of Artificial Sequence: Synthetic peptide
AYYFMRFR

SEQ ID NO: 379 - protein, 9 aa, synthetic construct
  REGION 1..9: note = Description of Artificial Sequence: Synthetic peptide
AYYNTTKGG

SEQ ID NO: 380 - protein, 8 aa, synthetic construct
  REGION 1..8: note = Description of Artificial Sequence: Synthetic peptide
CAFAVDAA

SEQ ID NO: 381 - protein, 9 aa, synthetic construct
  REGION 1..9: note = Description of Artificial Sequence: Synthetic peptide
CAFAVDAAK

SEQ ID NO: 382 - protein, 8 aa, synthetic construct
  REGION 1..8: note = Description of Artificial Sequence: Synthetic peptide
CAKEIKES

SEQ ID NO: 383 - protein, 9 aa, synthetic construct
  REGION 1..9: note = Description of Artificial Sequence: Synthetic peptide
CALAPNMMV

SEQ ID NO: 384 - protein, 9 aa, synthetic construct
  REGION 1..9: note = Description of Artificial Sequence: Synthetic peptide
CALDPLSET

SEQ ID NO: 385 - protein, 9 aa, synthetic construct
  REGION 1..9: note = Description of Artificial Sequence: Synthetic peptide
CAMRPNFTI

SEQ ID NO: 386 - protein, 11 aa, synthetic construct
  REGION 1..11: note = Description of Artificial Sequence: Synthetic peptide
CANDPVGFTLK

SEQ ID NO: 387 - protein, 8 aa, synthetic construct
  REGION 1..8: note = Description of Artificial Sequence: Synthetic peptide
CANFNVLF

SEQ ID NO: 388 - protein, 8 aa, synthetic construct
  REGION 1..8: note = Description of Artificial Sequence: Synthetic peptide
CAQVLSEM

SEQ ID NO: 389 - protein, 8 aa, synthetic construct
  REGION 1..8: note = Description of Artificial Sequence: Synthetic peptide
CATTRQVV

SEQ ID NO: 390 - protein, 9 aa, synthetic construct
  REGION 1..9: note = Description of Artificial Sequence: Synthetic peptide
CAYCCNIVN

SEQ ID NO: 391 - protein, 10 aa, synthetic construct
  REGION 1..10: note = Description of Artificial Sequence: Synthetic peptide
CAYCCNIVNV

SEQ ID NO: 392 - protein, 10 aa, synthetic construct
  REGION 1..10: note = Description of Artificial Sequence: Synthetic peptide
CAYWVPRASA

SEQ ID NO: 393 - protein, 8 aa, synthetic construct
  REGION 1..8: note = Description of Artificial Sequence: Synthetic peptide
CCSLSHRF

SEQ ID NO: 394 - protein, 9 aa, synthetic construct
  REGION 1..9: note = Description of Artificial Sequence: Synthetic peptide
CDAMRNAGI

SEQ ID NO: 395 - protein, 8 aa, synthetic construct
  REGION 1..8: note = Description of Artificial Sequence: Synthetic peptide
CDGTTFTY

SEQ ID NO: 396 - protein, 8 aa, synthetic construct
  REGION 1..8: note = Description of Artificial Sequence: Synthetic peptide
CDIRQLLF

SEQ ID NO: 397 - protein, 9 aa, synthetic construct
  REGION 1..9: note = Description of Artificial Sequence: Synthetic peptide
CDIRQLLFV

SEQ ID NO: 398 - protein, 8 aa, synthetic construct
  REGION 1..8: note = Description of Artificial Sequence: Synthetic peptide
CDLKGKYV

SEQ ID NO: 399 - protein, 9 aa, synthetic construct
  REGION 1..9: note = Description of Artificial Sequence: Synthetic peptide
CDQLREPML

SEQ ID NO: 400 - protein, 8 aa, synthetic construct
  REGION 1..8: note = Description of Artificial Sequence: Synthetic peptide
CDTLKEIL

SEQ ID NO: 401 - protein, 9 aa, synthetic construct
  REGION 1..9: note = Description of Artificial Sequence: Synthetic peptide
CDTLKEILV

SEQ ID NO: 402 - protein, 11 aa, synthetic construct
  REGION 1..11: note = Description of Artificial Sequence: Synthetic peptide
CEEMLDNRATL

SEQ ID NO: 403 - protein, 10 aa, synthetic construct
  REGION 1..10: note = Description of Artificial Sequence: Synthetic peptide
CEFQFCNDPF

SEQ ID NO: 404 - protein, 11 aa, synthetic construct
  REGION 1..11: note = Description of Artificial Sequence: Synthetic peptide
CEFQFCNDPFL

SEQ ID NO: 405 - protein, 11 aa, synthetic construct
  REGION 1..11: note = Description of Artificial Sequence: Synthetic peptide
CEIVGGQIVTC

SEQ ID NO: 406 - protein, 8 aa, synthetic construct
  REGION 1..8: note = Description of Artificial Sequence: Synthetic peptide
CEKALKYL

SEQ ID NO: 407 - protein, 9 aa, synthetic construct
  REGION 1..9: note = Description of Artificial Sequence: Synthetic peptide
CFDKFKVNS

SEQ ID NO: 408 - protein, 9 aa, synthetic construct
  REGION 1..9: note = Description of Artificial Sequence: Synthetic peptide
CFKMFYKGV

SEQ ID NO: 409 - protein, 9 aa, synthetic construct
  REGION 1..9: note = Description of Artificial Sequence: Synthetic peptide
CFLGYFCTC

SEQ ID NO: 410 - protein, 11 aa, synthetic construct
  REGION 1..11: note = Description of Artificial Sequence: Synthetic peptide
CFLGYFCTCYF

SEQ ID NO: 411 - protein, 9 aa, synthetic construct
  REGION 1..9: note = Description of Artificial Sequence: Synthetic peptide
CFVDDIVKT

SEQ ID NO: 412 - protein, 10 aa, synthetic construct
  REGION 1..10: note = Description of Artificial Sequence: Synthetic peptide
CGFIQQKLAL

SEQ ID NO: 413 - protein, 9 aa, synthetic construct
  REGION 1..9: note = Description of Artificial Sequence: Synthetic peptide
CGPKKSTNL

SEQ ID NO: 414 - protein, 9 aa, synthetic construct
  REGION 1..9: note = Description of Artificial Sequence: Synthetic peptide
CGYLPQNAV

SEQ ID NO: 415 - protein, 8 aa, synthetic construct
  REGION 1..8: note = Description of Artificial Sequence: Synthetic peptide
CHATREAV

SEQ ID NO: 416 - protein, 9 aa, synthetic construct
  REGION 1..9: note = Description of Artificial Sequence: Synthetic peptide
CHDGKAHFP

SEQ ID NO: 417 - protein, 9 aa, synthetic construct
  REGION 1..9: note = Description of Artificial Sequence: Synthetic peptide
CHIDHPNPK

SEQ ID NO: 418 - protein, 11 aa, synthetic construct
  REGION 1..11: note = Description of Artificial Sequence: Synthetic peptide
CHIDHPNPKGF

SEQ ID NO: 419 - protein, 9 aa, synthetic construct
  REGION 1..9: note = Description of Artificial Sequence: Synthetic peptide
CHNKCAYWV

SEQ ID NO: 420 - protein, 9 aa, synthetic construct
  REGION 1..9: note = Description of Artificial Sequence: Synthetic peptide
CIKDLLARA

SEQ ID NO: 421 - protein, 9 aa, synthetic construct
  REGION 1..9: note = Description of Artificial Sequence: Synthetic peptide
CINANQVIV

SEQ ID NO: 422 - protein, 9 aa, synthetic construct
  REGION 1..9: note = Description of Artificial Sequence: Synthetic peptide
CIRCLWSTK

SEQ ID NO: 423 - protein, 8 aa, synthetic construct
  REGION 1..8: note = Description of Artificial Sequence: Synthetic peptide
CISTKHFY

SEQ ID NO: 424 - protein, 9 aa, synthetic construct
  REGION 1..9: note = Description of Artificial Sequence: Synthetic peptide
CISTKHFYW

SEQ ID NO: 425 - protein, 10 aa, synthetic construct
  REGION 1..10: note = Description of Artificial Sequence: Synthetic peptide
CKDGHVETFY

SEQ ID NO: 426 - protein, 9 aa, synthetic construct
  REGION 1..9: note = Description of Artificial Sequence: Synthetic peptide
CLAVHECFV

SEQ ID NO: 427 - protein, 11 aa, synthetic construct
  REGION 1..11: note = Description of Artificial Sequence: Synthetic peptide
CLAVHECFVKR

SEQ ID NO: 428 - protein, 8 aa, synthetic construct
  REGION 1..8: note = Description of Artificial Sequence: Synthetic peptide
CLAYYFMR

SEQ ID NO: 429 - protein, 9 aa, synthetic construct
  REGION 1..9: note = Description of Artificial Sequence: Synthetic peptide
CLFLLPSLA

SEQ ID NO: 430 - protein, 10 aa, synthetic construct
  REGION 1..10: note = Description of Artificial Sequence: Synthetic peptide
CLFWNCNVDR

SEQ ID NO: 431 - protein, 8 aa, synthetic construct
  REGION 1..8: note = Description of Artificial Sequence: Synthetic peptide
CLGDIAAR

SEQ ID NO: 432 - protein, 8 aa, synthetic construct
  REGION 1..8: note = Description of Artificial Sequence: Synthetic peptide
CLLNRYFR

SEQ ID NO: 433 - protein, 9 aa, synthetic construct
  REGION 1..9: note = Description of Artificial Sequence: Synthetic peptide
CLNRVCTNY

SEQ ID NO: 434 - protein, 11 aa, synthetic construct
  REGION 1..11: note = Description of Artificial Sequence: Synthetic peptide
CLSGLDSLDTY

SEQ ID NO: 435 - protein, 8 aa, synthetic construct
  REGION 1..8: note = Description of Artificial Sequence: Synthetic peptide
CLVGLMWL

SEQ ID NO: 436 - protein, 8 aa, synthetic construct
  REGION 1..8: note = Description of Artificial Sequence: Synthetic peptide
CNVKTTEV

SEQ ID NO: 437 - protein, 9 aa, synthetic construct
  REGION 1..9: note = Description of Artificial Sequence: Synthetic peptide
CPACHNSEV

SEQ ID NO: 438 - protein, 8 aa, synthetic construct
  REGION 1..8: note = Description of Artificial Sequence: Synthetic peptide
CPDGVKHV

SEQ ID NO: 439 - protein, 8 aa, synthetic construct
  REGION 1..8: note = Description of Artificial Sequence: Synthetic peptide
CPIFFITG

SEQ ID NO: 440 - protein, 8 aa, synthetic construct
  REGION 1..8: note = Description of Artificial Sequence: Synthetic peptide
CPNFVFPL

SEQ ID NO: 441 - protein, 9 aa, synthetic construct
  REGION 1..9: note = Description of Artificial Sequence: Synthetic peptide
CPNFVFPLN

SEQ ID NO: 442 - protein, 8 aa, synthetic construct
  REGION 1..8: note = Description of Artificial Sequence: Synthetic peptide
CQAVTANV

SEQ ID NO: 443 - protein, 9 aa, synthetic construct
  REGION 1..9: note = Description of Artificial Sequence: Synthetic peptide
CQEPKLGSL

SEQ ID NO: 444 - protein, 8 aa, synthetic construct
  REGION 1..8: note = Description of Artificial Sequence: Synthetic peptide
CQPILLLD

SEQ ID NO: 445 - protein, 9 aa, synthetic construct
  REGION 1..9: note = Description of Artificial Sequence: Synthetic peptide
CQVHGNAHV

SEQ ID NO: 446 - protein, 11 aa, synthetic construct
  REGION 1..11: note = Description of Artificial Sequence: Synthetic peptide
CQYLNTLTLAV

SEQ ID NO: 447 - protein, 10 aa, synthetic construct
  REGION 1..10: note = Description of Artificial Sequence: Synthetic peptide
CRFDTRVLSN

SEQ ID NO: 448 - protein, 11 aa, synthetic construct
  REGION 1..11: note = Description of Artificial Sequence: Synthetic peptide
CRFDTRVLSNL

SEQ ID NO: 449 - protein, 9 aa, synthetic construct
  REGION 1..9: note = Description of Artificial Sequence: Synthetic peptide
CRFQEKDED

SEQ ID NO: 450 - protein, 9 aa, synthetic construct
  REGION 1..9: note = Description of Artificial Sequence: Synthetic peptide
CRFVTDTPK

SEQ ID NO: 451 - protein, 8 aa, synthetic construct
  REGION 1..8: note = Description of Artificial Sequence: Synthetic peptide
CRHHANEY

SEQ ID NO: 452 - protein, 9 aa, synthetic construct
  REGION 1..9: note = Description of Artificial Sequence: Synthetic peptide
CRKVQHMVV

SEQ ID NO: 453 - protein, 8 aa, synthetic construct
  REGION 1..8: note = Description of Artificial Sequence: Synthetic peptide
CRMNSRNY

SEQ ID NO: 454 - protein, 9 aa, synthetic construct
  REGION 1..9: note = Description of Artificial Sequence: Synthetic peptide
CRMNSRNYI

SEQ ID NO: 455 - protein, 9 aa, synthetic construct
  REGION 1..9: note = Description of Artificial Sequence: Synthetic peptide
CSFYPPDED

SEQ ID NO: 456 - protein, 8 aa, synthetic construct
  REGION 1..8: note = Description of Artificial Sequence: Synthetic peptide
CSLSHRFY

SEQ ID NO: 457 - protein, 8 aa, synthetic construct
  REGION 1..8: note = Description of Artificial Sequence: Synthetic peptide
CSQHTMLV

SEQ ID NO: 458 - protein, 9 aa, synthetic construct
  REGION 1..9: note = Description of Artificial Sequence: Synthetic peptide
CSQHTMLVK

SEQ ID NO: 459 - protein, 8 aa, synthetic construct
  REGION 1..8: note = Description of Artificial Sequence: Synthetic peptide
CSRIIPAR

SEQ ID NO: 460 - protein, 8 aa, synthetic construct
  REGION 1..8: note = Description of Artificial Sequence: Synthetic peptide
CTDDNALA

SEQ ID NO: 461 - protein, 11 aa, synthetic construct
  REGION 1..11: note = Description of Artificial Sequence: Synthetic peptide
CTFEYVSQPFL

SEQ ID NO: 462 - protein, 10 aa, synthetic construct
  REGION 1..10: note = Description of Artificial Sequence: Synthetic peptide
CTLKSFTVEK

SEQ ID NO: 463 - protein, 9 aa, synthetic construct
  REGION 1..9: note = Description of Artificial Sequence: Synthetic peptide
CTQHQPYVV

SEQ ID NO: 464 - protein, 10 aa, synthetic construct
  REGION 1..10: note = Description of Artificial Sequence: Synthetic peptide
CTTIVNGVRR

SEQ ID NO: 465 - protein, 8 aa, synthetic construct
  REGION 1..8: note = Description of Artificial Sequence: Synthetic peptide
CVCSVIDL

SEQ ID NO: 466 - protein, 9 aa, synthetic construct
  REGION 1..9: note = Description of Artificial Sequence: Synthetic peptide
CVDEAGSKS

SEQ ID NO: 467 - protein, 11 aa, synthetic construct
  REGION 1..11: note = Description of Artificial Sequence: Synthetic peptide
CVDTVRTNVYL

SEQ ID NO: 468 - protein, 9 aa, synthetic construct
  REGION 1..9: note = Description of Artificial Sequence: Synthetic peptide
CVEYCPIFF

SEQ ID NO: 469 - protein, 10 aa, synthetic construct
  REGION 1..10: note = Description of Artificial Sequence: Synthetic peptide
CVIAWNSNNL

SEQ ID NO: 470 - protein, 8 aa, synthetic construct
  REGION 1..8: note = Description of Artificial Sequence: Synthetic peptide
CVLGQSKR

SEQ ID NO: 471 - protein, 8 aa, synthetic construct
  REGION 1..8: note = Description of Artificial Sequence: Synthetic peptide
CVLSGHNL

SEQ ID NO: 472 - protein, 8 aa, synthetic construct
  REGION 1..8: note = Description of Artificial Sequence: Synthetic peptide
CVRGTTVL

SEQ ID NO: 473 - protein, 11 aa, synthetic construct
  REGION 1..11: note = Description of Artificial Sequence: Synthetic peptide
CVVADAVIKTL

SEQ ID NO: 474 - protein, 8 aa, synthetic construct
  REGION 1..8: note = Description of Artificial Sequence: Synthetic peptide
CVVLHSYF

SEQ ID NO: 475 - protein, 10 aa, synthetic construct
  REGION 1..10: note = Description of Artificial Sequence: Synthetic peptide
CWHHSIGFDY

SEQ ID NO: 476 - protein, 8 aa, synthetic construct
  REGION 1..8: note = Description of Artificial Sequence: Synthetic peptide
CYDHVIST

SEQ ID NO: 477 - protein, 9 aa, synthetic construct
  REGION 1..9: note = Description of Artificial Sequence: Synthetic peptide
CYDHVISTS

SEQ ID NO: 478 - protein, 8 aa, synthetic construct
  REGION 1..8: note = Description of Artificial Sequence: Synthetic peptide
CYDTNVLE

SEQ ID NO: 479 - protein, 9 aa, synthetic construct
  REGION 1..9: note = Description of Artificial Sequence: Synthetic peptide
CYDTNVLEG

SEQ ID NO: 480 - protein, 8 aa, synthetic construct
  REGION 1..8: note = Description of Artificial Sequence: Synthetic peptide
CYDYCIPY

SEQ ID NO: 481 - protein, 9 aa, synthetic construct
  REGION 1..9: note = Description of Artificial Sequence: Synthetic peptide
CYDYCIPYN

SEQ ID NO: 482 - protein, 8 aa, synthetic construct
  REGION 1..8: note = Description of Artificial Sequence: Synthetic peptide
CYTPSKLI

SEQ ID NO: 483 - protein, 11 aa, synthetic construct
  REGION 1..11: note = Description of Artificial Sequence: Synthetic peptide
DAALALLLLDR

SEQ ID NO: 484 - protein, 9 aa, synthetic construct
  REGION 1..9: note = Description of Artificial Sequence: Synthetic peptide
DADSTLIGD

SEQ ID NO: 485 - protein, 8 aa, synthetic construct
  REGION 1..8: note = Description of Artificial Sequence: Synthetic peptide
DAFKLNIK

SEQ ID NO: 486 - protein, 8 aa, synthetic construct
  REGION 1..8: note = Description of Artificial Sequence: Synthetic peptide
DAGFIKQY

SEQ ID NO: 487 - protein, 9 aa, synthetic construct
  REGION 1..9: note = Description of Artificial Sequence: Synthetic peptide
DALCEKALK

SEQ ID NO: 488 - protein, 8 aa, synthetic construct
  REGION 1..8: note = Description of Artificial Sequence: Synthetic peptide
DAMRNAGI

SEQ ID NO: 489 - protein, 9 aa, synthetic construct
  REGION 1..9: note = Description of Artificial Sequence: Synthetic peptide
DAMRNAGIV

SEQ ID NO: 490 - protein, 8 aa, synthetic construct
  REGION 1..8: note = Description of Artificial Sequence: Synthetic peptide
DAQGMDNL

SEQ ID NO: 491 - protein, 8 aa, synthetic construct
  REGION 1..8: note = Description of Artificial Sequence: Synthetic peptide
DATPSDFV

SEQ ID NO: 492 - protein, 10 aa, synthetic construct
  REGION 1..10: note = Description of Artificial Sequence: Synthetic peptide
DATPSDFVRA

SEQ ID NO: 493 - protein, 9 aa, synthetic construct
  REGION 1..9: note = Description of Artificial Sequence: Synthetic peptide
DAVIKTLQP

SEQ ID NO: 494 - protein, 8 aa, synthetic construct
  REGION 1..8: note = Description of Artificial Sequence: Synthetic peptide
DAVNLLTN

SEQ ID NO: 495 - protein, 10 aa, synthetic construct
  REGION 1..10: note = Description of Artificial Sequence: Synthetic peptide
DAVNLLTNMF

SEQ ID NO: 496 - protein, 10 aa, synthetic construct
  REGION 1..10: note = Description of Artificial Sequence: Synthetic peptide
DAVVCFNSTY

SEQ ID NO: 497 - protein, 9 aa, synthetic construct
  REGION 1..9: note = Description of Artificial Sequence: Synthetic peptide
DAYKTFPPT

SEQ ID NO: 498 - protein, 8 aa, synthetic construct
  REGION 1..8: note = Description of Artificial Sequence: Synthetic peptide
DAYNMMIS

SEQ ID NO: 499 - protein, 11 aa, synthetic construct
  REGION 1..11: note = Description of Artificial Sequence: Synthetic peptide
DAYNMMISAGF

SEQ ID NO: 500 - protein, 9 aa, synthetic construct
  REGION 1..9: note = Description of Artificial Sequence: Synthetic peptide
DAYVNTFSS

SEQ ID NO: 501 - protein, 9 aa, synthetic construct
  REGION 1..9: note = Description of Artificial Sequence: Synthetic peptide
DAYYRARAG

SEQ ID NO: 502 - protein, 10 aa, synthetic construct
  REGION 1..10: note = Description of Artificial Sequence: Synthetic peptide
DCATVHTANK

SEQ ID NO: 503 - protein, 9 aa, synthetic construct
  REGION 1..9: note = Description of Artificial Sequence: Synthetic peptide
DCSARHINA

SEQ ID NO: 504 - protein, 8 aa, synthetic construct
  REGION 1..8: note = Description of Artificial Sequence: Synthetic peptide
DCVVLHSY

SEQ ID NO: 505 - protein, 9 aa, synthetic construct
  REGION 1..9: note = Description of Artificial Sequence: Synthetic peptide
DCVVLHSYF

SEQ ID NO: 506 - protein, 8 aa, synthetic construct
  REGION 1..8: note = Description of Artificial Sequence: Synthetic peptide
DDFTGCVI

SEQ ID NO: 507 - protein, 9 aa, synthetic construct
  REGION 1..9: note = Description of Artificial Sequence: Synthetic peptide
DDFVEIIKS

SEQ ID NO: 508 - protein, 8 aa, synthetic construct
  REGION 1..8: note = Description of Artificial Sequence: Synthetic peptide
DDKKIKAC

SEQ ID NO: 509 - protein, 8 aa, synthetic construct
  REGION 1..8: note = Description of Artificial Sequence: Synthetic peptide
DDNALAYY

SEQ ID NO: 510 - protein, 8 aa, synthetic construct
  REGION 1..8: note = Description of Artificial Sequence: Synthetic peptide
DDNLIDSY

SEQ ID NO: 511 - protein, 9 aa, synthetic construct
  REGION 1..9: note = Description of Artificial Sequence: Synthetic peptide
DDNLIDSYF

SEQ ID NO: 512 - protein, 8 aa, synthetic construct
  REGION 1..8: note = Description of Artificial Sequence: Synthetic peptide
DDQIGYYR

SEQ ID NO: 513 - protein, 9 aa, synthetic construct
  REGION 1..9: note = Description of Artificial Sequence: Synthetic peptide
DDQIGYYRR

SEQ ID NO: 514 - protein, 8 aa, synthetic construct
  REGION 1..8: note = Description of Artificial Sequence: Synthetic peptide
DDTLRVEA

SEQ ID NO: 515 - protein, 10 aa, synthetic construct
  REGION 1..10: note = Description of Artificial Sequence: Synthetic peptide
DDTVIEVQGY

SEQ ID NO: 516 - protein, 9 aa, synthetic construct
  REGION 1..9: note = Description of Artificial Sequence: Synthetic peptide
DDVVYCPRH

SEQ ID NO: 517 - protein, 8 aa, synthetic construct
  REGION 1..8: note = Description of Artificial Sequence: Synthetic peptide
DDYQGKPL

SEQ ID NO: 518 - protein, 8 aa, synthetic construct
  REGION 1..8: note = Description of Artificial Sequence: Synthetic peptide
DDYVYLPY

SEQ ID NO: 519 - protein, 11 aa, synthetic construct
  REGION 1..11: note = Description of Artificial Sequence: Synthetic peptide
DEAGSKSPIQY

SEQ ID NO: 520 - protein, 8 aa, synthetic construct
  REGION 1..8: note = Description of Artificial Sequence: Synthetic peptide
DEDDNLID

SEQ ID NO: 521 - protein, 9 aa, synthetic construct
  REGION 1..9: note = Description of Artificial Sequence: Synthetic peptide
DEDDNLIDS

SEQ ID NO: 522 - protein, 11 aa, synthetic construct
  REGION 1..11: note = Description of Artificial Sequence: Synthetic peptide
DEDDNLIDSYF

SEQ ID NO: 523 - protein, 8 aa, synthetic construct
  REGION 1..8: note = Description of Artificial Sequence: Synthetic peptide
DEDDSEPV

SEQ ID NO: 524 - protein, 8 aa, synthetic construct
  REGION 1..8: note = Description of Artificial Sequence: Synthetic peptide
DEDEEEGD

SEQ ID NO: 525 - protein, 9 aa, synthetic construct
  REGION 1..9: note = Description of Artificial Sequence: Synthetic peptide
DEEQPMEID

SEQ ID NO: 526 - protein, 8 aa, synthetic construct
  REGION 1..8: note = Description of Artificial Sequence: Synthetic peptide
DEFIERYK

SEQ ID NO: 527 - protein, 12 aa, synthetic construct
  REGION 1..12: note = Description of Artificial Sequence: Synthetic peptide
DEFIERYKLEGY

SEQ ID NO: 528 - protein, 8 aa, synthetic construct
  REGION 1..8: note = Description of Artificial Sequence: Synthetic peptide
DEGNCDTL

SEQ ID NO: 529 - protein, 8 aa, synthetic construct
  REGION 1..8: note = Description of Artificial Sequence: Synthetic peptide
DEISMATN

SEQ ID NO: 530 - protein, 8 aa, synthetic construct
  REGION 1..8: note = Description of Artificial Sequence: Synthetic peptide
DELGTDPY

SEQ ID NO: 531 - protein, 10 aa, synthetic construct
  REGION 1..10: note = Description of Artificial Sequence: Synthetic peptide
DELTGHMLDM

SEQ ID NO: 532 - protein, 11 aa, synthetic construct
  REGION 1..11: note = Description of Artificial Sequence: Synthetic peptide
DELTGHMLDMY

SEQ ID NO: 533 - protein, 8 aa, synthetic construct
  REGION 1..8: note = Description of Artificial Sequence: Synthetic peptide
DEMIAQYT

SEQ ID NO: 534 - protein, 9 aa, synthetic construct
  REGION 1..9: note = Description of Artificial Sequence: Synthetic peptide
DEMIAQYTS

SEQ ID NO: 535 - protein, 8 aa, synthetic construct
  REGION 1..8: note = Description of Artificial Sequence: Synthetic peptide
DEPEEHVQ

SEQ ID NO: 536 - protein, 10 aa, synthetic construct
  REGION 1..10: note = Description of Artificial Sequence: Synthetic peptide
DEPEEHVQIH

SEQ ID NO: 537 - protein, 8 aa, synthetic construct
  REGION 1..8: note = Description of Artificial Sequence: Synthetic peptide
DEPTTTTS

SEQ ID NO: 538 - protein, 9 aa, synthetic construct
  REGION 1..9: note = Description of Artificial Sequence: Synthetic peptide
DERIDKVLN

SEQ ID NO: 539 - protein, 9 aa, synthetic construct
  REGION 1..9: note = Description of Artificial Sequence: Synthetic peptide
DETQALPQR

SEQ ID NO: 540 - protein, 9 aa, synthetic construct
  REGION 1..9: note = Description of Artificial Sequence: Synthetic peptide
DEVRQIAPG

SEQ ID NO: 541 - protein, 8 aa, synthetic construct
  REGION 1..8: note = Description of Artificial Sequence: Synthetic peptide
DEWSMATY

SEQ ID NO: 542 - protein, 9 aa, synthetic construct
  REGION 1..9: note = Description of Artificial Sequence: Synthetic peptide
DFAVSKGFF

SEQ ID NO: 543 - protein, 9 aa, synthetic construct
  REGION 1..9: note = Description of Artificial Sequence: Synthetic peptide
DFCGKGYHL

SEQ ID NO: 544 - protein, 9 aa, synthetic construct
  REGION 1..9: note = Description of Artificial Sequence: Synthetic peptide
DFGDFIQTT

SEQ ID NO: 545 - protein, 9 aa, synthetic construct
  REGION 1..9: note = Description of Artificial Sequence: Synthetic peptide
DFIDTKRGV

SEQ ID NO: 546 - protein, 9 aa, synthetic construct
  REGION 1..9: note = Description of Artificial Sequence: Synthetic peptide
DFIPMDSTV

SEQ ID NO: 547 - protein, 9 aa, synthetic construct
  REGION 1..9: note = Description of Artificial Sequence: Synthetic peptide
DFLEYHDVR

SEQ ID NO: 548 - protein, 8 aa, synthetic construct
  REGION 1..8: note = Description of Artificial Sequence: Synthetic peptide
DFLHFLPR

SEQ ID NO: 549 - protein, 10 aa, synthetic construct
  REGION 1..10: note = Description of Artificial Sequence: Synthetic peptide
DFLHFLPRVF

SEQ ID NO: 550 - protein, 9 aa, synthetic construct
  REGION 1..9: note = Description of Artificial Sequence: Synthetic peptide
DFQENWNTK

SEQ ID NO: 551 - protein, 8 aa, synthetic construct
  REGION 1..8: note = Description of Artificial Sequence: Synthetic peptide
DFVEIIKS

SEQ ID NO: 552 - protein, 9 aa, synthetic construct
  REGION 1..9: note = Description of Artificial Sequence: Synthetic peptide
DGADVTKIK

SEQ ID NO: 553 - protein, 8 aa, synthetic construct
  REGION 1..8: note = Description of Artificial Sequence: Synthetic peptide
DGCVPLNI

SEQ ID NO: 554 - protein, 9 aa, synthetic construct
  REGION 1..9: note = Description of Artificial Sequence: Synthetic peptide
DGCVPLNII

SEQ ID NO: 555 - protein, 8 aa, synthetic construct
  REGION 1..8: note = Description of Artificial Sequence: Synthetic peptide
DGDMVPHI

SEQ ID NO: 556 - protein, 9 aa, synthetic construct
  REGION 1..9: note = Description of Artificial Sequence: Synthetic peptide
DGGSLYVNK

SEQ ID NO: 557 - protein, 8 aa, synthetic construct
  REGION 1..8: note = Description of Artificial Sequence: Synthetic peptide
DGHVETFY

SEQ ID NO: 558 - protein, 8 aa, synthetic construct
  REGION 1..8: note = Description of Artificial Sequence: Synthetic peptide
DGIIWVAT

SEQ ID NO: 559 - protein, 9 aa, synthetic construct
  REGION 1..9: note = Description of Artificial Sequence: Synthetic peptide
DGKMKDLSP

SEQ ID NO: 560 - protein, 8 aa, synthetic construct
  REGION 1..8: note = Description of Artificial Sequence: Synthetic peptide
DGKSKCEE

SEQ ID NO: 561 - protein, 9 aa, synthetic construct
  REGION 1..9: note = Description of Artificial Sequence: Synthetic peptide
DGTLMIERF

SEQ ID NO: 562 - protein, 8 aa, synthetic construct
  REGION 1..8: note = Description of Artificial Sequence: Synthetic peptide
DGVDVELF

SEQ ID NO: 563 - protein, 10 aa, synthetic construct
  REGION 1..10: note = Description of Artificial Sequence: Synthetic peptide
DGVKHVYQLR

SEQ ID NO: 564 - protein, 11 aa, synthetic construct
  REGION 1..11: note = Description of Artificial Sequence: Synthetic peptide
DGVPFVVSTGY

SEQ ID NO: 565 - protein, 8 aa, synthetic construct
  REGION 1..8: note = Description of Artificial Sequence: Synthetic peptide
DGVVCTEI

SEQ ID NO: 566 - protein, 9 aa, synthetic construct
  REGION 1..9: note = Description of Artificial Sequence: Synthetic peptide
DGWEIVKFI

SEQ ID NO: 567 - protein, 10 aa, synthetic construct
  REGION 1..10: note = Description of Artificial Sequence: Synthetic peptide
DGYVMHANYI

SEQ ID NO: 568 - protein, 8 aa, synthetic construct
  REGION 1..8: note = Description of Artificial Sequence: Synthetic peptide
DHCGETSW

SEQ ID NO: 569 - protein, 9 aa, synthetic construct
  REGION 1..9: note = Description of Artificial Sequence: Synthetic peptide
DHIGTRNPA

SEQ ID NO: 570 - protein, 12 aa, synthetic construct
  REGION 1..12: note = Description of Artificial Sequence: Synthetic peptide
DHSSSSDNIALL

SEQ ID NO: 571 - protein, 8 aa, synthetic construct
  REGION 1..8: note = Description of Artificial Sequence: Synthetic peptide
DHVISTSH

SEQ ID NO: 572 - protein, 11 aa, synthetic construct
  REGION 1..11: note = Description of Artificial Sequence: Synthetic peptide
DIAANTVIWDY

SEQ ID NO: 573 - protein, 9 aa, synthetic construct
  REGION 1..9: note = Description of Artificial Sequence: Synthetic peptide
DIAKKPTET

SEQ ID NO: 574 - protein, 9 aa, synthetic construct
  REGION 1..9: note = Description of Artificial Sequence: Synthetic peptide
DIDYVPLKS

SEQ ID NO: 575 - protein, 9 aa, synthetic construct
  REGION 1..9: note = Description of Artificial Sequence: Synthetic peptide
DIGNPKAIK

SEQ ID NO: 576 - protein, 8 aa, synthetic construct
  REGION 1..8: note = Description of Artificial Sequence: Synthetic peptide
DILGPLSA

SEQ ID NO: 577 - protein, 9 aa, synthetic construct
  REGION 1..9: note = Description of Artificial Sequence: Synthetic peptide
DINGNLHPD

SEQ ID NO: 578 - protein, 9 aa, synthetic construct
  REGION 1..9: note = Description of Artificial Sequence: Synthetic peptide
DINKLCEEM

SEQ ID NO: 579 - protein, 8 aa, synthetic construct
  REGION 1..8: note = Description of Artificial Sequence: Synthetic peptide
DIPGIPKD

SEQ ID NO: 580 - protein, 11 aa, synthetic construct
  REGION 1..11: note = Description of Artificial Sequence: Synthetic peptide
DIPGIPKDMTY

SEQ ID NO: 581 - protein, 9 aa, synthetic construct
  REGION 1..9: note = Description of Artificial Sequence: Synthetic peptide
DIPIGAGIC

SEQ ID NO: 582 - protein, 8 aa, synthetic construct
  REGION 1..8: note = Description of Artificial Sequence: Synthetic peptide
DIQLLKSA

SEQ ID NO: 583 - protein, 8 aa, synthetic construct
  REGION 1..8: note = Description of Artificial Sequence: Synthetic peptide
DIRQLLFV

SEQ ID NO: 584 - protein, 10 aa, synthetic construct
  REGION 1..10: note = Description of Artificial Sequence: Synthetic peptide
DISGINASVV

SEQ ID NO: 585 - protein, 9 aa, synthetic construct
  REGION 1..9: note = Description of Artificial Sequence: Synthetic peptide
DISTEIYQA

SEQ ID NO: 586 - protein, 10 aa, synthetic construct
  REGION 1..10: note = Description of Artificial Sequence: Synthetic peptide
DITPCSFGGV

SEQ ID NO: 587 - protein, 8 aa, synthetic construct
  REGION 1..8: note = Description of Artificial Sequence: Synthetic peptide
DIVEEAKK

SEQ ID NO: 588 - protein, 10 aa, synthetic construct
  REGION 1..10: note = Description of Artificial Sequence: Synthetic peptide
DIVEEAKKVK

SEQ ID NO: 589 - protein, 10 aa, synthetic construct
  REGION 1..10: note = Description of Artificial Sequence: Synthetic peptide
DIVKTDGTLM

SEQ ID NO: 590 - protein, 8 aa, synthetic construct
  REGION 1..8: note = Description of Artificial Sequence: Synthetic peptide
DIVVFDEI

SEQ ID NO: 591 - protein, 8 aa, synthetic construct
  REGION 1..8: note = Description of Artificial Sequence: Synthetic peptide
DKAGQKTY

SEQ ID NO: 592 - protein, 10 aa, synthetic construct
  REGION 1..10: note = Description of Artificial Sequence: Synthetic peptide
DKAGQKTYER

SEQ ID NO: 593 - protein, 8 aa, synthetic construct
  REGION 1..8: note = Description of Artificial Sequence: Synthetic peptide
DKKIKACV

SEQ ID NO: 594 - protein, 8 aa, synthetic construct
  REGION 1..8: note = Description of Artificial Sequence: Synthetic peptide
DKNTQEVF

SEQ ID NO: 595 - protein, 9 aa, synthetic construct
  REGION 1..9: note = Description of Artificial Sequence: Synthetic peptide
DKVEAEVQI

SEQ ID NO: 596 - protein, 9 aa, synthetic construct
  REGION 1..9: note = Description of Artificial Sequence: Synthetic peptide
DKYVRNLQH

SEQ ID NO: 597 - protein, 10 aa, synthetic construct
  REGION 1..10: note = Description of Artificial Sequence: Synthetic peptide
DLATNNLVVM

SEQ ID NO: 598 - protein, 8 aa, synthetic construct
  REGION 1..8: note = Description of Artificial Sequence: Synthetic peptide
DLICAQKF

SEQ ID NO: 599 - protein, 8 aa, synthetic construct
  REGION 1..8: note = Description of Artificial Sequence: Synthetic peptide
DLKGKYVQ

SEQ ID NO: 600 - protein, 8 aa, synthetic construct
  REGION 1..8: note = Description of Artificial Sequence: Synthetic peptide
DLKPVSEE

SEQ ID NO: 601 - protein, 8 aa, synthetic construct
  REGION 1..8: note = Description of Artificial Sequence: Synthetic peptide
DLLIRKSN

SEQ ID NO: 602 - protein, 9 aa, synthetic construct
  REGION 1..9: note = Description of Artificial Sequence: Synthetic peptide
DLLIRKSNH

SEQ ID NO: 603 - protein, 8 aa, synthetic construct
  REGION 1..8: note = Description of Artificial Sequence: Synthetic peptide
DLNDFVSD

SEQ ID NO: 604 - protein, 9 aa, synthetic construct
  REGION 1..9: note = Description of Artificial Sequence: Synthetic peptide
DLNGNWYDF

SEQ ID NO: 605 - protein, 10 aa, synthetic construct
  REGION 1..10: note = Description of Artificial Sequence: Synthetic peptide
DLPIGINITR

SEQ ID NO: 606 - protein, 11 aa, synthetic construct
  REGION 1..11: note = Description of Artificial Sequence: Synthetic peptide
DLPIGINITRF

SEQ ID NO: 607 - protein, 8 aa, synthetic construct
  REGION 1..8: note = Description of Artificial Sequence: Synthetic peptide
DLPKEITV

SEQ ID NO: 608 - protein, 9 aa, synthetic construct
  REGION 1..9: note = Description of Artificial Sequence: Synthetic peptide
DLPKEITVA

SEQ ID NO: 609 - protein, 8 aa, synthetic construct
  REGION 1..8: note = Description of Artificial Sequence: Synthetic peptide
DLSVVNAR

SEQ ID NO: 610 - protein, 10 aa, synthetic construct
  REGION 1..10: note = Description of Artificial Sequence: Synthetic peptide
DLSVVSKVVK

SEQ ID NO: 611 - protein, 11 aa, synthetic construct
  REGION 1..11: note = Description of Artificial Sequence: Synthetic peptide
DLTAFGLVAEW

SEQ ID NO: 612 - protein, 9 aa, synthetic construct
  REGION 1..9: note = Description of Artificial Sequence: Synthetic peptide
DLYCQVHGN

SEQ ID NO: 613 - protein, 9 aa, synthetic construct
  REGION 1..9: note = Description of Artificial Sequence: Synthetic peptide
DMCASLKEL

SEQ ID NO: 614 - protein, 8 aa, synthetic construct
  REGION 1..8: note = Description of Artificial Sequence: Synthetic peptide
DMFLGTCR

SEQ ID NO: 615 - protein, 9 aa, synthetic construct
  REGION 1..9: note = Description of Artificial Sequence: Synthetic peptide
DMYSVMLTN

SEQ ID NO: 616 - protein, 8 aa, synthetic construct
  REGION 1..8: note = Description of Artificial Sequence: Synthetic peptide
DNGPQNQR

SEQ ID NO: 617 - protein, 8 aa, synthetic construct
  REGION 1..8: note = Description of Artificial Sequence: Synthetic peptide
DNIALLVQ

SEQ ID NO: 618 - protein, 8 aa, synthetic construct
  REGION 1..8: note = Description of Artificial Sequence: Synthetic peptide
DNLACEDL

SEQ ID NO: 619 - protein, 10 aa, synthetic construct
  REGION 1..10: note = Description of Artificial Sequence: Synthetic peptide
DNLKTLLSLR

SEQ ID NO: 620 - protein, 9 aa, synthetic construct
  REGION 1..9: note = Description of Artificial Sequence: Synthetic peptide
DNQDLNGNW

SEQ ID NO: 621 - protein, 9 aa, synthetic construct
  REGION 1..9: note = Description of Artificial Sequence: Synthetic peptide
DNSSLTIKK

SEQ ID NO: 622 - protein, 9 aa, synthetic construct
  REGION 1..9: note = Description of Artificial Sequence: Synthetic peptide
DNVTDFNAI

SEQ ID NO: 623 - protein, 10 aa, synthetic construct
  REGION 1..10: note = Description of Artificial Sequence: Synthetic peptide
DNYYKKDNSY

SEQ ID NO: 624 - protein, 8 aa, synthetic construct
  REGION 1..8: note = Description of Artificial Sequence: Synthetic peptide
DPAQLPAP

SEQ ID NO: 625 - protein, 11 aa, synthetic construct
  REGION 1..11: note = Description of Artificial Sequence: Synthetic peptide
DPAQLPAPRTL

SEQ ID NO: 626 - protein, 8 aa, synthetic construct
  REGION 1..8: note = Description of Artificial Sequence: Synthetic peptide
DPIHSLRV

SEQ ID NO: 627 - protein, 8 aa, synthetic construct
  REGION 1..8: note = Description of Artificial Sequence: Synthetic peptide
DPKTKNVT

SEQ ID NO: 628 - protein, 9 aa, synthetic construct
  REGION 1..9: note = Description of Artificial Sequence: Synthetic peptide
DPKTKNVTK

SEQ ID NO: 629 - protein, 8 aa, synthetic construct
  REGION 1..8: note = Description of Artificial Sequence: Synthetic peptide
DPLSETKC

SEQ ID NO: 630 - protein, 11 aa, synthetic construct
  REGION 1..11: note = Description of Artificial Sequence: Synthetic peptide
DPNFKDQVILL

SEQ ID NO: 631 - protein, 9 aa, synthetic construct
  REGION 1..9: note = Description of Artificial Sequence: Synthetic peptide
DPQTLEILD

SEQ ID NO: 632 - protein, 10 aa, synthetic construct
  REGION 1..10: note = Description of Artificial Sequence: Synthetic peptide
DPQTLEILDI

SEQ ID NO: 633 - protein, 8 aa, synthetic construct
  REGION 1..8: note = Description of Artificial Sequence: Synthetic peptide
DPSRILGA

SEQ ID NO: 634 - protein, 8 aa, synthetic construct
  REGION 1..8: note = Description of Artificial Sequence: Synthetic peptide
DPVGFTLK

SEQ ID NO: 635 - protein, 8 aa, synthetic construct
  REGION 1..8: note = Description of Artificial Sequence: Synthetic peptide
DPYEDFQE

SEQ ID NO: 636 - protein, 10 aa, synthetic construct
  REGION 1..10: note = Description of Artificial Sequence: Synthetic peptide
DPYEDFQENW

SEQ ID NO: 637 - protein, 8 aa, synthetic construct
  REGION 1..8: note = Description of Artificial Sequence: Synthetic peptide
DQALVSDV

SEQ ID NO: 638 - protein, 8 aa, synthetic construct
  REGION 1..8: note = Description of Artificial Sequence: Synthetic peptide
DQDALFAY

SEQ ID NO: 639 - protein, 8 aa, synthetic construct
  REGION 1..8: note = Description of Artificial Sequence: Synthetic peptide
DQFKHLIP

SEQ ID NO: 640 - protein, 8 aa, synthetic construct
  REGION 1..8: note = Description of Artificial Sequence: Synthetic peptide
DQLREPML

SEQ ID NO: 641 - protein, 8 aa, synthetic construct
  REGION 1..8: note = Description of Artificial Sequence: Synthetic peptide
DQLTPTWR

SEQ ID NO: 642 - protein, 8 aa, synthetic construct
  REGION 1..8: note = Description of Artificial Sequence: Synthetic peptide
DQVILLNK

SEQ ID NO: 643 - protein, 9 aa, synthetic construct
  REGION 1..9: note = Description of Artificial Sequence: Synthetic peptide
DQVILLNKH

SEQ ID NO: 644 - protein, 8 aa, synthetic construct
  REGION 1..8: note = Description of Artificial Sequence: Synthetic peptide
DRCILHCA

SEQ ID NO: 645 - protein, 9 aa, synthetic construct
  REGION 1..9: note = Description of Artificial Sequence: Synthetic peptide
DRCILHCAN

SEQ ID NO: 646 - protein, 10 aa, synthetic construct
  REGION 1..10: note = Description of Artificial Sequence: Synthetic peptide
DRDAAMQRKL

SEQ ID NO: 647 - protein, 8 aa, synthetic construct
  REGION 1..8: note = Description of Artificial Sequence: Synthetic peptide
DRLITGRL

SEQ ID NO: 648 - protein, 9 aa, synthetic construct
  REGION 1..9: note = Description of Artificial Sequence: Synthetic peptide
DRLITGRLQ

SEQ ID NO: 649 - protein, 11 aa, synthetic construct
  REGION 1..11: note = Description of Artificial Sequence: Synthetic peptide
DRLITGRLQSL

SEQ ID NO: 650 - protein, 8 aa, synthetic construct
  REGION 1..8: note = Description of Artificial Sequence: Synthetic peptide
DRLNEVAK

SEQ ID NO: 651 - protein, 8 aa, synthetic construct
  REGION 1..8: note = Description of Artificial Sequence: Synthetic peptide
DRLNQLES

SEQ ID NO: 652 - protein, 10 aa, synthetic construct
  REGION 1..10: note = Description of Artificial Sequence: Synthetic peptide
DRLNQLESKM

SEQ ID NO: 653 - protein, 8 aa, synthetic construct
  REGION 1..8: note = Description of Artificial Sequence: Synthetic peptide
DRQTAQAA

SEQ ID NO: 654 - protein, 8 aa, synthetic construct
  REGION 1..8: note = Description of Artificial Sequence: Synthetic peptide
DRVVFVLW

SEQ ID NO: 655 - protein, 8 aa, synthetic construct
  REGION 1..8: note = Description of Artificial Sequence: Synthetic peptide
DRYFKYWD

SEQ ID NO: 656 - protein, 9 aa, synthetic construct
  REGION 1..9: note = Description of Artificial Sequence: Synthetic peptide
DRYFKYWDQ

SEQ ID NO: 657 - protein, 11 aa, synthetic construct
  REGION 1..11: note = Description of Artificial Sequence: Synthetic peptide
DRYFKYWDQTY

SEQ ID NO: 658 - protein, 8 aa, synthetic construct
  REGION 1..8: note = Description of Artificial Sequence: Synthetic peptide
DSAEVAVK

SEQ ID NO: 659 - protein, 9 aa, synthetic construct
  REGION 1..9: note = Description of Artificial Sequence: Synthetic peptide
DSATLPKGI

SEQ ID NO: 660 - protein, 9 aa, synthetic construct
  REGION 1..9: note = Description of Artificial Sequence: Synthetic peptide
DSATLVSDI

SEQ ID NO: 661 - protein, 9 aa, synthetic construct
  REGION 1..9: note = Description of Artificial Sequence: Synthetic peptide
DSCKRVLNV

SEQ ID NO: 662 - protein, 10 aa, synthetic construct
  REGION 1..10: note = Description of Artificial Sequence: Synthetic peptide
DSCNNYMLTY

SEQ ID NO: 663 - protein, 8 aa, synthetic construct
  REGION 1..8: note = Description of Artificial Sequence: Synthetic peptide
DSDLNDFV

SEQ ID NO: 664 - protein, 9 aa, synthetic construct
  REGION 1..9: note = Description of Artificial Sequence: Synthetic peptide
DSDLNDFVS

SEQ ID NO: 665 - protein, 9 aa, synthetic construct
  REGION 1..9: note = Description of Artificial Sequence: Synthetic peptide
DSEPVLKGV

SEQ ID NO: 666 - protein, 9 aa, synthetic construct
  REGION 1..9: note = Description of Artificial Sequence: Synthetic peptide
DSFKEELDK

SEQ ID NO: 667 - protein, 8 aa, synthetic construct
  REGION 1..8: note = Description of Artificial Sequence: Synthetic peptide
DSFVIRGD

SEQ ID NO: 668 - protein, 10 aa, synthetic construct
  REGION 1..10: note = Description of Artificial Sequence: Synthetic peptide
DSFVIRGDEV

SEQ ID NO: 669 - protein, 10 aa, synthetic construct
  REGION 1..10: note = Description of Artificial Sequence: Synthetic peptide
DSKEGFFTYI

SEQ ID NO: 670 - protein, 11 aa, synthetic construct
  REGION 1..11: note = Description of Artificial Sequence: Synthetic peptide
DSVEEVLSEAR

SEQ ID NO: 671 - protein, 10 aa, synthetic construct
  REGION 1..10: note = Description of Artificial Sequence: Synthetic peptide
DSVTVKNGSI

SEQ ID NO: 672 - protein, 9 aa, synthetic construct
  REGION 1..9: note = Description of Artificial Sequence: Synthetic peptide
DSYFVVKRH

SEQ ID NO: 673 - protein, 11 aa, synthetic construct
  REGION 1..11: note = Description of Artificial Sequence: Synthetic peptide
DTANPKTPKYK

SEQ ID NO: 674 - protein, 9 aa, synthetic construct
  REGION 1..9: note = Description of Artificial Sequence: Synthetic peptide
DTDLTKPYI

SEQ ID NO: 675 - protein, 11 aa, synthetic construct
  REGION 1..11: note = Description of Artificial Sequence: Synthetic peptide
DTFNGECPNFV

SEQ ID NO: 676 - protein, 9 aa, synthetic construct
  REGION 1..9: note = Description of Artificial Sequence: Synthetic peptide
DTKRGVYCC

SEQ ID NO: 677 - protein, 8 aa, synthetic construct
  REGION 1..8: note = Description of Artificial Sequence: Synthetic peptide
DTLRVEAF

SEQ ID NO: 678 - protein, 8 aa, synthetic construct
  REGION 1..8: note = Description of Artificial Sequence: Synthetic peptide
DTPNNTDF

SEQ ID NO: 679 - protein, 10 aa, synthetic construct
  REGION 1..10: note = Description of Artificial Sequence: Synthetic peptide
DTSLSGFKLK

SEQ ID NO: 680 - protein, 8 aa, synthetic construct
  REGION 1..8: note = Description of Artificial Sequence: Synthetic peptide
DTTEAFEK

SEQ ID NO: 681 - protein, 11 aa, synthetic construct
  REGION 1..11: note = Description of Artificial Sequence: Synthetic peptide
DTTITVNVLAW

SEQ ID NO: 682 - protein, 12 aa, synthetic construct
  REGION 1..12: note = Description of Artificial Sequence: Synthetic peptide
DTVRTNVYLAVF

SEQ ID NO: 683 - protein, 8 aa, synthetic construct
  REGION 1..8: note = Description of Artificial Sequence: Synthetic peptide
DTYPSLET

SEQ ID NO: 684 - protein, 10 aa, synthetic construct
  REGION 1..10: note = Description of Artificial Sequence: Synthetic peptide
DVDLGDISGI

SEQ ID NO: 685 - protein, 12 aa, synthetic construct
  REGION 1..12: note = Description of Artificial Sequence: Synthetic peptide
DVENPHLMGWDY

SEQ ID NO: 686 - protein, 8 aa, synthetic construct
  REGION 1..8: note = Description of Artificial Sequence: Synthetic peptide
DVETKDVV

SEQ ID NO: 687 - protein, 8 aa, synthetic construct
  REGION 1..8: note = Description of Artificial Sequence: Synthetic peptide
DVGDSAEV

SEQ ID NO: 688 - protein, 10 aa, synthetic construct
  REGION 1..10: note = Description of Artificial Sequence: Synthetic peptide
DVGDSAEVAV

SEQ ID NO: 689 - protein, 11 aa, synthetic construct
  REGION 1..11: note = Description of Artificial Sequence: Synthetic peptide
DVGDSAEVAVK

SEQ ID NO: 690 - protein, 8 aa, synthetic construct
  REGION 1..8: note = Description of Artificial Sequence: Synthetic peptide
DVKCTSVV

SEQ ID NO: 691 - protein, 10 aa, synthetic construct
  REGION 1..10: note = Description of Artificial Sequence: Synthetic peptide
DVKCTSVVLL

SEQ ID NO: 692 - protein, 9 aa, synthetic construct
  REGION 1..9: note = Description of Artificial Sequence: Synthetic peptide
DVLECNVKT

SEQ ID NO: 693 - protein, 10 aa, synthetic construct
  REGION 1..10: note = Description of Artificial Sequence: Synthetic peptide
DVLECNVKTT

SEQ ID NO: 694 - protein, 8 aa, synthetic construct
  REGION 1..8: note = Description of Artificial Sequence: Synthetic peptide
DVLLPLTQ

SEQ ID NO: 695 - protein, 11 aa, synthetic construct
  REGION 1..11: note = Description of Artificial Sequence: Synthetic peptide
DVLLPLTQYNR

SEQ ID NO: 696 - protein, 9 aa, synthetic construct
  REGION 1..9: note = Description of Artificial Sequence: Synthetic peptide
DVLVRGFGD

SEQ ID NO: 697 - protein, 10 aa, synthetic construct
  REGION 1..10: note = Description of Artificial Sequence: Synthetic peptide
DVQQWGFTGN

SEQ ID NO: 698 - protein, 8 aa, synthetic construct
  REGION 1..8: note = Description of Artificial Sequence: Synthetic peptide
DVRVVLDF

SEQ ID NO: 699 - protein, 8 aa, synthetic construct
  REGION 1..8: note = Description of Artificial Sequence: Synthetic peptide
DVSFLAHI

SEQ ID NO: 700 - protein, 9 aa, synthetic construct
  REGION 1..9: note = Description of Artificial Sequence: Synthetic peptide
DVTQLYLGG

SEQ ID NO: 701 - protein, 10 aa, synthetic construct
  REGION 1..10: note = Description of Artificial Sequence: Synthetic peptide
DVVECLKLSH

SEQ ID NO: 702 - protein, 11 aa, synthetic construct
  REGION 1..11: note = Description of Artificial Sequence: Synthetic peptide
DVVIGIVNNTV

SEQ ID NO: 703 - protein, 9 aa, synthetic construct
  REGION 1..9: note = Description of Artificial Sequence: Synthetic peptide
DVVYCPRHV

SEQ ID NO: 704 - protein, 9 aa, synthetic construct
  REGION 1..9: note = Description of Artificial Sequence: Synthetic peptide
DWTIEYPII

SEQ ID NO: 705 - protein, 9 aa, synthetic construct
  REGION 1..9: note = Description of Artificial Sequence: Synthetic peptide
DWYDFVENP

SEQ ID NO: 706 - protein, 8 aa, synthetic construct
  REGION 1..8: note = Description of Artificial Sequence: Synthetic peptide
DYDCVSFC

SEQ ID NO: 707 - protein, 10 aa, synthetic construct
  REGION 1..10: note = Description of Artificial Sequence: Synthetic peptide
DYDCVSFCYM

SEQ ID NO: 708 - protein, 9 aa, synthetic construct
  REGION 1..9: note = Description of Artificial Sequence: Synthetic peptide
DYDYYRYNL

SEQ ID NO: 709 - protein, 11 aa, synthetic construct
  REGION 1..11: note = Description of Artificial Sequence: Synthetic peptide
DYFNKKDWYDF

SEQ ID NO: 710 - protein, 8 aa, synthetic construct
  REGION 1..8: note = Description of Artificial Sequence: Synthetic peptide
DYGARFYF

SEQ ID NO: 711 - protein, 9 aa, synthetic construct
  REGION 1..9: note = Description of Artificial Sequence: Synthetic peptide
DYGARFYFY

SEQ ID NO: 712 - protein, 11 aa, synthetic construct
  REGION 1..11: note = Description of Artificial Sequence: Synthetic peptide
DYIATNGPLKV

SEQ ID NO: 713 - protein, 9 aa, synthetic construct
  REGION 1..9: note = Description of Artificial Sequence: Synthetic peptide
DYIINLIIK

SEQ ID NO: 714 - protein, 8 aa, synthetic construct
  REGION 1..8: note = Description of Artificial Sequence: Synthetic peptide
DYILANTC

SEQ ID NO: 715 - protein, 11 aa, synthetic construct
  REGION 1..11: note = Description of Artificial Sequence: Synthetic peptide
DYILANTCTER

SEQ ID NO: 716 - protein, 9 aa, synthetic construct
  REGION 1..9: note = Description of Artificial Sequence: Synthetic peptide
DYKAFKQIV

SEQ ID NO: 717 - protein, 10 aa, synthetic construct
  REGION 1..10: note = Description of Artificial Sequence: Synthetic peptide
DYLVSTQEFR

SEQ ID NO: 718 - protein, 10 aa, synthetic construct
  REGION 1..10: note = Description of Artificial Sequence: Synthetic peptide
DYNYKLPDDF

SEQ ID NO: 719 - protein, 8 aa, synthetic construct
  REGION 1..8: note = Description of Artificial Sequence: Synthetic peptide
DYVPLKSA

SEQ ID NO: 720 - protein, 9 aa, synthetic construct
  REGION 1..9: note = Description of Artificial Sequence: Synthetic peptide
DYYQLYSTQ

SEQ ID NO: 721 - protein, 9 aa, synthetic construct
  REGION 1..9: note = Description of Artificial Sequence: Synthetic peptide
DYYRSLPGV

SEQ ID NO: 722 - protein, 10 aa, synthetic construct
  REGION 1..10: note = Description of Artificial Sequence: Synthetic peptide
DYYRSLPGVF

SEQ ID NO: 723 - protein, 9 aa, synthetic construct
  REGION 1..9: note = Description of Artificial Sequence: Synthetic peptide
EAACCHLAK

SEQ ID NO: 724 - protein, 8 aa, synthetic construct
  REGION 1..8: note = Description of Artificial Sequence: Synthetic peptide
EAALCTFL

SEQ ID NO: 725 - protein, 9 aa, synthetic construct
  REGION 1..9: note = Description of Artificial Sequence: Synthetic peptide
EAANFCALI

SEQ ID NO: 726 - protein, 12 aa, synthetic construct
  REGION 1..12: note = Description of Artificial Sequence: Synthetic peptide
EAARVVRSIFSR

SEQ ID NO: 727 - protein, 10 aa, synthetic construct
  REGION 1..10: note = Description of Artificial Sequence: Synthetic peptide
EAELAKNVSL

SEQ ID NO: 728 - protein, 8 aa, synthetic construct
  REGION 1..8: note = Description of Artificial Sequence: Synthetic peptide
EAEVQIDR

SEQ ID NO: 729 - protein, 10 aa, synthetic construct
  REGION 1..10: note = Description of Artificial Sequence: Synthetic peptide
EAFLIGCNYL

SEQ ID NO: 730 - protein, 10 aa, synthetic construct
  REGION 1..10: note = Description of Artificial Sequence: Synthetic peptide
EAGLPYGANK

SEQ ID NO: 731 - protein, 10 aa, synthetic construct
  REGION 1..10: note = Description of Artificial Sequence: Synthetic peptide
EAIRHVRAWI

SEQ ID NO: 732 - protein, 9 aa, synthetic construct
  REGION 1..9: note = Description of Artificial Sequence: Synthetic peptide
EAKTVLKKC

SEQ ID NO: 733 - protein, 8 aa, synthetic construct
  REGION 1..8: note = Description of Artificial Sequence: Synthetic peptide
EASFNYLK

SEQ ID NO: 734 - protein, 11 aa, synthetic construct
  REGION 1..11: note = Description of Artificial Sequence: Synthetic peptide
EAVGTNLPLQL

SEQ ID NO: 735 - protein, 11 aa, synthetic construct
  REGION 1..11: note = Description of Artificial Sequence: Synthetic peptide
EAVMYMGTLSY

SEQ ID NO: 736 - protein, 8 aa, synthetic construct
  REGION 1..8: note = Description of Artificial Sequence: Synthetic peptide
EAYEQAVA

SEQ ID NO: 737 - protein, 10 aa, synthetic construct
  REGION 1..10: note = Description of Artificial Sequence: Synthetic peptide
ECAQVLSEMV

SEQ ID NO: 738 - protein, 9 aa, synthetic construct
  REGION 1..9: note = Description of Artificial Sequence: Synthetic peptide
ECFDKFKVN

SEQ ID NO: 739 - protein, 8 aa, synthetic construct
  REGION 1..8: note = Description of Artificial Sequence: Synthetic peptide
ECFVKRVD

SEQ ID NO: 740 - protein, 10 aa, synthetic construct
  REGION 1..10: note = Description of Artificial Sequence: Synthetic peptide
ECNQMCLSTL

SEQ ID NO: 741 - protein, 9 aa, synthetic construct
  REGION 1..9: note = Description of Artificial Sequence: Synthetic peptide
ECNVKTTEV

SEQ ID NO: 742 - protein, 9 aa, synthetic construct
  REGION 1..9: note = Description of Artificial Sequence: Synthetic peptide
ECTTIVNGV

SEQ ID NO: 743 - protein, 11 aa, synthetic construct
  REGION 1..11: note = Description of Artificial Sequence: Synthetic peptide
ECTTIVNGVRR

SEQ ID NO: 744 - protein, 8 aa, synthetic construct
  REGION 1..8: note = Description of Artificial Sequence: Synthetic peptide
ECVRGTTV

SEQ ID NO: 745 - protein, 10 aa, synthetic construct
  REGION 1..10: note = Description of Artificial Sequence: Synthetic peptide
ECVRGTTVLL

SEQ ID NO: 746 - protein, 8 aa, synthetic construct
  REGION 1..8: note = Description of Artificial Sequence: Synthetic peptide
EDDSEPVL

SEQ ID NO: 747 - protein, 9 aa, synthetic construct
  REGION 1..9: note = Description of Artificial Sequence: Synthetic peptide
EDDSEPVLK

SEQ ID NO: 748 - protein, 9 aa, synthetic construct
  REGION 1..9: note = Description of Artificial Sequence: Synthetic peptide
EDIQLLKSA

SEQ ID NO: 749 - protein, 10 aa, synthetic construct
  REGION 1..10: note = Description of Artificial Sequence: Synthetic peptide
EDIQLLKSAY

SEQ ID NO: 750 - protein, 10 aa, synthetic construct
  REGION 1..10: note = Description of Artificial Sequence: Synthetic peptide
EDLLFNKVTL

SEQ ID NO: 751 - protein, 8 aa, synthetic construct
  REGION 1..8: note = Description of Artificial Sequence: Synthetic peptide
EDMLNPNY

SEQ ID NO: 752 - protein, 8 aa, synthetic construct
  REGION 1..8: note = Description of Artificial Sequence: Synthetic peptide
EDNQTTTI

SEQ ID NO: 753 - protein, 11 aa, synthetic construct
  REGION 1..11: note = Description of Artificial Sequence: Synthetic peptide
EEAALCTFLLN

SEQ ID NO: 754 - protein, 9 aa, synthetic construct
  REGION 1..9: note = Description of Artificial Sequence: Synthetic peptide
EEAARYMRS

SEQ ID NO: 755 - protein, 9 aa, synthetic construct
  REGION 1..9: note = Description of Artificial Sequence: Synthetic peptide
EEAKKVKPT

SEQ ID NO: 756 - protein, 9 aa, synthetic construct
  REGION 1..9: note = Description of Artificial Sequence: Synthetic peptide
EEEEFEPST

SEQ ID NO: 757 - protein, 9 aa, synthetic construct
  REGION 1..9: note = Description of Artificial Sequence: Synthetic peptide
EEEGDCEEE

SEQ ID NO: 758 - protein, 9 aa, synthetic construct
  REGION 1..9: note = Description of Artificial Sequence: Synthetic peptide
EEHFIETIS

SEQ ID NO: 759 - protein, 10 aa, synthetic construct
  REGION 1..10: note = Description of Artificial Sequence: Synthetic peptide
EELFYSYATH

SEQ ID NO: 760 - protein, 8 aa, synthetic construct
  REGION 1..8: note = Description of Artificial Sequence: Synthetic peptide
EEMLDNRA

SEQ ID NO: 761 - protein, 8 aa, synthetic construct
  REGION 1..8: note = Description of Artificial Sequence: Synthetic peptide
EEQEEDWL

SEQ ID NO: 762 - protein, 8 aa, synthetic construct
  REGION 1..8: note = Description of Artificial Sequence: Synthetic peptide
EEQPMEID

SEQ ID NO: 763 - protein, 9 aa, synthetic construct
  REGION 1..9: note = Description of Artificial Sequence: Synthetic peptide
EERLKLFDR

SEQ ID NO: 764 - protein, 11 aa, synthetic construct
  REGION 1..11: note = Description of Artificial Sequence: Synthetic peptide
EERLKLFDRYF

SEQ ID NO: 765 - protein, 12 aa, synthetic construct
  REGION 1..12: note = Description of Artificial Sequence: Synthetic peptide
EESSAKSASVYY

SEQ ID NO: 766 - protein, 11 aa, synthetic construct
  REGION 1..11: note = Description of Artificial Sequence: Synthetic peptide
EETGLLMPLKA

SEQ ID NO: 767 - protein, 12 aa, synthetic construct
  REGION 1..12: note = Description of Artificial Sequence: Synthetic peptide
EETGTLIVNSVL

SEQ ID NO: 768 - protein, 10 aa, synthetic construct
  REGION 1..10: note = Description of Artificial Sequence: Synthetic peptide
EETIYNLLKD

SEQ ID NO: 769 - protein, 11 aa, synthetic construct
  REGION 1..11: note = Description of Artificial Sequence: Synthetic peptide
EETKFLTENLL

SEQ ID NO: 770 - protein, 12 aa, synthetic construct
  REGION 1..12: note = Description of Artificial Sequence: Synthetic peptide
EETKFLTENLLL

SEQ ID NO: 771 - protein, 10 aa, synthetic construct
  REGION 1..10: note = Description of Artificial Sequence: Synthetic peptide
EEVGHTDLMA

SEQ ID NO: 772 - protein, 8 aa, synthetic construct
  REGION 1..8: note = Description of Artificial Sequence: Synthetic peptide
EEVKPFIT

SEQ ID NO: 773 - protein, 8 aa, synthetic construct
  REGION 1..8: note = Description of Artificial Sequence: Synthetic peptide
EEVLSEAR

SEQ ID NO: 774 - protein, 12 aa, synthetic construct
  REGION 1..12: note = Description of Artificial Sequence: Synthetic peptide
EEVQELYSPIFL

SEQ ID NO: 775 - protein, 9 aa, synthetic construct
  REGION 1..9: note = Description of Artificial Sequence: Synthetic peptide
EEVTTTLEE

SEQ ID NO: 776 - protein, 8 aa, synthetic construct
  REGION 1..8: note = Description of Artificial Sequence: Synthetic peptide
EEVVLKTG

SEQ ID NO: 777 - protein, 9 aa, synthetic construct
  REGION 1..9: note = Description of Artificial Sequence: Synthetic peptide
EFCSQHTML

SEQ ID NO: 778 - protein, 8 aa, synthetic construct
  REGION 1..8: note = Description of Artificial Sequence: Synthetic peptide
EFDRDAAM

SEQ ID NO: 779 - protein, 10 aa, synthetic construct
  REGION 1..10: note = Description of Artificial Sequence: Synthetic peptide
EFDRDAAMQR

SEQ ID NO: 780 - protein, 8 aa, synthetic construct
  REGION 1..8: note = Description of Artificial Sequence: Synthetic peptide
EFEPSTQY

SEQ ID NO: 781 - protein, 8 aa, synthetic construct
  REGION 1..8: note = Description of Artificial Sequence: Synthetic peptide
EFIERYKL

SEQ ID NO: 782 - protein, 9 aa, synthetic construct
  REGION 1..9: note = Description of Artificial Sequence: Synthetic peptide
EFKLASHMY

SEQ ID NO: 783 - protein, 12 aa, synthetic construct
  REGION 1..12: note = Description of Artificial Sequence: Synthetic peptide
EFLRDGWEIVKF

SEQ ID NO: 784 - protein, 10 aa, synthetic construct
  REGION 1..10: note = Description of Artificial Sequence: Synthetic peptide
EFLTRNPAWR

SEQ ID NO: 785 - protein, 9 aa, synthetic construct
  REGION 1..9: note = Description of Artificial Sequence: Synthetic peptide
EFQFCNDPF

SEQ ID NO: 786 - protein, 9 aa, synthetic construct
  REGION 1..9: note = Description of Artificial Sequence: Synthetic peptide
EFYAYLRKH

SEQ ID NO: 787 - protein, 9 aa, synthetic construct
  REGION 1..9: note = Description of Artificial Sequence: Synthetic peptide
EGDCEEEEF

SEQ ID NO: 788 - protein, 10 aa, synthetic construct
  REGION 1..10: note = Description of Artificial Sequence: Synthetic peptide
EGFFTYICGF

SEQ ID NO: 789 - protein, 8 aa, synthetic construct
  REGION 1..8: note = Description of Artificial Sequence: Synthetic peptide
EGKTFYVL

SEQ ID NO: 790 - protein, 9 aa, synthetic construct
  REGION 1..9: note = Description of Artificial Sequence: Synthetic peptide
EGKTFYVLP

SEQ ID NO: 791 - protein, 11 aa, synthetic construct
  REGION 1..11: note = Description of Artificial Sequence: Synthetic peptide
EGNFYGPFVDR

SEQ ID NO: 792 - protein, 8 aa, synthetic construct
  REGION 1..8: note = Description of Artificial Sequence: Synthetic peptide
EGVLTAVV

SEQ ID NO: 793 - protein, 9 aa, synthetic construct
  REGION 1..9: note = Description of Artificial Sequence: Synthetic peptide
EGVVDYGAR

SEQ ID NO: 794 - protein, 10 aa, synthetic construct
  REGION 1..10: note = Description of Artificial Sequence: Synthetic peptide
EGYAFEHIVY

SEQ ID NO: 795 - protein, 9 aa, synthetic construct
  REGION 1..9: note = Description of Artificial Sequence: Synthetic peptide
EGYLNSTNV

SEQ ID NO: 796 - protein, 11 aa, synthetic construct
  REGION 1..11: note = Description of Artificial Sequence: Synthetic peptide
EHDYQIGGYTE

SEQ ID NO: 797 - protein, 9 aa, synthetic construct
  REGION 1..9: note = Description of Artificial Sequence: Synthetic peptide
EHEIAWYTE

SEQ ID NO: 798 - protein, 10 aa, synthetic construct
  REGION 1..10: note = Description of Artificial Sequence: Synthetic peptide
EHFIETISLA

SEQ ID NO: 799 - protein, 9 aa, synthetic construct
  REGION 1..9: note = Description of Artificial Sequence: Synthetic peptide
EHIVYGDFS

SEQ ID NO: 800 - protein, 10 aa, synthetic construct
  REGION 1..10: note = Description of Artificial Sequence: Synthetic peptide
EHIVYGDFSH

SEQ ID NO: 801 - protein, 9 aa, synthetic construct
  REGION 1..9: note = Description of Artificial Sequence: Synthetic peptide
EHSWNADLY

SEQ ID NO: 802 - protein, 11 aa, synthetic construct
  REGION 1..11: note = Description of Artificial Sequence: Synthetic peptide
EHVNNSYECDI

SEQ ID NO: 803 - protein, 8 aa, synthetic construct
  REGION 1..8: note = Description of Artificial Sequence: Synthetic peptide
EHVTFFIY

SEQ ID NO: 804 - protein, 10 aa, synthetic construct
  REGION 1..10: note = Description of Artificial Sequence: Synthetic peptide
EHYVRITGLY

SEQ ID NO: 805 - protein, 9 aa, synthetic construct
  REGION 1..9: note = Description of Artificial Sequence: Synthetic peptide
EIDRLNEVA

SEQ ID NO: 806 - protein, 8 aa, synthetic construct
  REGION 1..8: note = Description of Artificial Sequence: Synthetic peptide
EIIGYKAI

SEQ ID NO: 807 - protein, 9 aa, synthetic construct
  REGION 1..9: note = Description of Artificial Sequence: Synthetic peptide
EIIGYKAID

SEQ ID NO: 808 - protein, 11 aa, synthetic construct
  REGION 1..11: note = Description of Artificial Sequence: Synthetic peptide
EIIGYKAIDGG

SEQ ID NO: 809 - protein, 8 aa, synthetic construct
  REGION 1..8: note = Description of Artificial Sequence: Synthetic peptide
EIIKSQDL

SEQ ID NO: 810 - protein, 10 aa, synthetic construct
  REGION 1..10: note = Description of Artificial Sequence: Synthetic peptide
EIIKSQDLSV

SEQ ID NO: 811 - protein, 9 aa, synthetic construct
  REGION 1..9: note = Description of Artificial Sequence: Synthetic peptide
EIKDATPSD

SEQ ID NO: 812 - protein, 11 aa, synthetic construct
  REGION 1..11: note = Description of Artificial Sequence: Synthetic peptide
EIKDTEKYCAL

SEQ ID NO: 813 - protein, 8 aa, synthetic construct
  REGION 1..8: note = Description of Artificial Sequence: Synthetic peptide
EIKLAKKF

SEQ ID NO: 814 - protein, 8 aa, synthetic construct
  REGION 1..8: note = Description of Artificial Sequence: Synthetic peptide
EILGTVSW

SEQ ID NO: 815 - protein, 8 aa, synthetic construct
  REGION 1..8: note = Description of Artificial Sequence: Synthetic peptide
EILQKEKV

SEQ ID NO: 816 - protein, 9 aa, synthetic construct
  REGION 1..9: note = Description of Artificial Sequence: Synthetic peptide
EIPKEEVKP

SEQ ID NO: 817 - protein, 10 aa, synthetic construct
  REGION 1..10: note = Description of Artificial Sequence: Synthetic peptide
EIPVAYRKVL

SEQ ID NO: 818 - protein, 9 aa, synthetic construct
  REGION 1..9: note = Description of Artificial Sequence: Synthetic peptide
EISFMLWCK

SEQ ID NO: 819 - protein, 10 aa, synthetic construct
  REGION 1..10: note = Description of Artificial Sequence: Synthetic peptide
EITVATSRTL

SEQ ID NO: 820 - protein, 8 aa, synthetic construct
  REGION 1..8: note = Description of Artificial Sequence: Synthetic peptide
EIVGGQIV

SEQ ID NO: 821 - protein, 10 aa, synthetic construct
  REGION 1..10: note = Description of Artificial Sequence: Synthetic peptide
EKCSAYTVEL

SEQ ID NO: 822 - protein, 9 aa, synthetic construct
  REGION 1..9: note = Description of Artificial Sequence: Synthetic peptide
EKDEDDNLI

SEQ ID NO: 823 - protein, 11 aa, synthetic construct
  REGION 1..11: note = Description of Artificial Sequence: Synthetic peptide
EKGDYGDAVVY

SEQ ID NO: 824 - protein, 9 aa, synthetic construct
  REGION 1..9: note = Description of Artificial Sequence: Synthetic peptide
EKQEILGTV

SEQ ID NO: 825 - protein, 9 aa, synthetic construct
  REGION 1..9: note = Description of Artificial Sequence: Synthetic peptide
ELAKNVSLD

SEQ ID NO: 826 - protein, 12 aa, synthetic construct
  REGION 1..12: note = Description of Artificial Sequence: Synthetic peptide
ELDSFKEELDKY

SEQ ID NO: 827 - protein, 9 aa, synthetic construct
  REGION 1..9: note = Description of Artificial Sequence: Synthetic peptide
ELFYSYATH

SEQ ID NO: 828 - protein, 9 aa, synthetic construct
  REGION 1..9: note = Description of Artificial Sequence: Synthetic peptide
ELGKYEQYI

SEQ ID NO: 829 - protein, 10 aa, synthetic construct
  REGION 1..10: note = Description of Artificial Sequence: Synthetic peptide
ELGTDPYEDF

SEQ ID NO: 830 - protein, 8 aa, synthetic construct
  REGION 1..8: note = Description of Artificial Sequence: Synthetic peptide
ELHLSWEV

SEQ ID NO: 831 - protein, 12 aa, synthetic construct
  REGION 1..12: note = Description of Artificial Sequence: Synthetic peptide
ELIRQGTDYKHW

SEQ ID NO: 832 - protein, 9 aa, synthetic construct
  REGION 1..9: note = Description of Artificial Sequence: Synthetic peptide
ELKHGTFTC

SEQ ID NO: 833 - protein, 8 aa, synthetic construct
  REGION 1..8: note = Description of Artificial Sequence: Synthetic peptide
ELKINAAC

SEQ ID NO: 834 - protein, 9 aa, synthetic construct
  REGION 1..9: note = Description of Artificial Sequence: Synthetic peptide
ELKINAACR

SEQ ID NO: 835 - protein, 8 aa, synthetic construct
  REGION 1..8: note = Description of Artificial Sequence: Synthetic peptide
ELKKLLEQ

SEQ ID NO: 836 - protein, 8 aa, synthetic construct
  REGION 1..8: note = Description of Artificial Sequence: Synthetic peptide
ELSLIDFY

SEQ ID NO: 837 - protein, 9 aa, synthetic construct
  REGION 1..9: note = Description of Artificial Sequence: Synthetic peptide
ELSLIDFYL

SEQ ID NO: 838 - protein, 10 aa, synthetic construct
  REGION 1..10: note = Description of Artificial Sequence: Synthetic peptide
ELSPVALRQM

SEQ ID NO: 839 - protein, 8 aa, synthetic construct
  REGION 1..8: note = Description of Artificial Sequence: Synthetic peptide
ELSRVLGL

SEQ ID NO: 840 - protein, 9 aa, synthetic construct
  REGION 1..9: note = Description of Artificial Sequence: Synthetic peptide
ELTGHMLDM

SEQ ID NO: 841 - protein, 11 aa, synthetic construct
  REGION 1..11: note = Description of Artificial Sequence: Synthetic peptide
ELTPVVQTIEV

SEQ ID NO: 842 - protein, 9 aa, synthetic construct
  REGION 1..9: note = Description of Artificial Sequence: Synthetic peptide
ELTSMKYFV

SEQ ID NO: 843 - protein, 11 aa, synthetic construct
  REGION 1..11: note = Description of Artificial Sequence: Synthetic peptide
ELVAELEGIQY

SEQ ID NO: 844 - protein, 8 aa, synthetic construct
  REGION 1..8: note = Description of Artificial Sequence: Synthetic peptide
ELVIGAVI

SEQ ID NO: 845 - protein, 8 aa, synthetic construct
  REGION 1..8: note = Description of Artificial Sequence: Synthetic peptide
EMELTPVV

SEQ ID NO: 846 - protein, 9 aa, synthetic construct
  REGION 1..9: note = Description of Artificial Sequence: Synthetic peptide
EMIAQYTSA

SEQ ID NO: 847 - protein, 10 aa, synthetic construct
  REGION 1..10: note = Description of Artificial Sequence: Synthetic peptide
EMIAQYTSAL

SEQ ID NO: 848 - protein, 8 aa, synthetic construct
  REGION 1..8: note = Description of Artificial Sequence: Synthetic peptide
EMKSEKQV

SEQ ID NO: 849 - protein, 8 aa, synthetic construct
  REGION 1..8: note = Description of Artificial Sequence: Synthetic peptide
EMLAKALR

SEQ ID NO: 850 - protein, 9 aa, synthetic construct
  REGION 1..9: note = Description of Artificial Sequence: Synthetic peptide
EMLAKALRK

SEQ ID NO: 851 - protein, 9 aa, synthetic construct
  REGION 1..9: note = Description of Artificial Sequence: Synthetic peptide
EMVMCGGSL

SEQ ID NO: 852 - protein, 9 aa, synthetic construct
  REGION 1..9: note = Description of Artificial Sequence: Synthetic peptide
EMYLKLRSD

SEQ ID NO: 853 - protein, 10 aa, synthetic construct
  REGION 1..10: note = Description of Artificial Sequence: Synthetic peptide
ENFNQHEVLL

SEQ ID NO: 854 - protein, 8 aa, synthetic construct
  REGION 1..8: note = Description of Artificial Sequence: Synthetic peptide
ENSYTTTI

SEQ ID NO: 855 - protein, 10 aa, synthetic construct
  REGION 1..10: note = Description of Artificial Sequence: Synthetic peptide
ENVAFNVVNK

SEQ ID NO: 856 - protein, 9 aa, synthetic construct
  REGION 1..9: note = Description of Artificial Sequence: Synthetic peptide
EPEFYEAMY

SEQ ID NO: 857 - protein, 9 aa, synthetic construct
  REGION 1..9: note = Description of Artificial Sequence: Synthetic peptide
EPIYDEPTT

SEQ ID NO: 858 - protein, 9 aa, synthetic construct
  REGION 1..9: note = Description of Artificial Sequence: Synthetic peptide
EPKKDKKKK

SEQ ID NO: 859 - protein, 11 aa, synthetic construct
  REGION 1..11: note = Description of Artificial Sequence: Synthetic peptide
EPKKDKKKKAD

SEQ ID NO: 860 - protein, 8 aa, synthetic construct
  REGION 1..8: note = Description of Artificial Sequence: Synthetic peptide
EPLTQDHV

SEQ ID NO: 861 - protein, 9 aa, synthetic construct
  REGION 1..9: note = Description of Artificial Sequence: Synthetic peptide
EPLTQDHVD

SEQ ID NO: 862 - protein, 8 aa, synthetic construct
  REGION 1..8: note = Description of Artificial Sequence: Synthetic peptide
EPLVDLPI

SEQ ID NO: 863 - protein, 9 aa, synthetic construct
  REGION 1..9: note = Description of Artificial Sequence: Synthetic peptide
EPLVDLPIG

SEQ ID NO: 864 - protein, 9 aa, synthetic construct
  REGION 1..9: note = Description of Artificial Sequence: Synthetic peptide
EPMLQSADA

SEQ ID NO: 865 - protein, 8 aa, synthetic construct
  REGION 1..8: note = Description of Artificial Sequence: Synthetic peptide
EPQIITTD

SEQ ID NO: 866 - protein, 10 aa, synthetic construct
  REGION 1..10: note = Description of Artificial Sequence: Synthetic peptide
EPTTTTSVPL

SEQ ID NO: 867 - protein, 10 aa, synthetic construct
  REGION 1..10: note = Description of Artificial Sequence: Synthetic peptide
EQDKNTQEVF

SEQ ID NO: 868 - protein, 8 aa, synthetic construct
  REGION 1..8: note = Description of Artificial Sequence: Synthetic peptide
EQIDGYVM

SEQ ID NO: 869 - protein, 10 aa, synthetic construct
  REGION 1..10: note = Description of Artificial Sequence: Synthetic peptide
EQIDGYVMHA

SEQ ID NO: 870 - protein, 9 aa, synthetic construct
  REGION 1..9: note = Description of Artificial Sequence: Synthetic peptide
EQKSILSPL

SEQ ID NO: 871 - protein, 10 aa, synthetic construct
  REGION 1..10: note = Description of Artificial Sequence: Synthetic peptide
EQKSILSPLY

SEQ ID NO: 872 - protein, 10 aa, synthetic construct
  REGION 1..10: note = Description of Artificial Sequence: Synthetic peptide
EQLDFIDTKR

SEQ ID NO: 873 - protein, 8 aa, synthetic construct
  REGION 1..8: note = Description of Artificial Sequence: Synthetic peptide
EQPTSEAV

SEQ ID NO: 874 - protein, 8 aa, synthetic construct
  REGION 1..8: note = Description of Artificial Sequence: Synthetic peptide
EQYIKWPW

SEQ ID NO: 875 - protein, 10 aa, synthetic construct
  REGION 1..10: note = Description of Artificial Sequence: Synthetic peptide
EQYIKWPWYI

SEQ ID NO: 876 - protein, 9 aa, synthetic construct
  REGION 1..9: note = Description of Artificial Sequence: Synthetic peptide
EQYVFCTVN

SEQ ID NO: 877 - protein, 8 aa, synthetic construct
  REGION 1..8: note = Description of Artificial Sequence: Synthetic peptide
ERLKLFAA

SEQ ID NO: 878 - protein, 8 aa, synthetic construct
  REGION 1..8: note = Description of Artificial Sequence: Synthetic peptide
ERLKLFDR

SEQ ID NO: 879 - protein, 10 aa, synthetic construct
  REGION 1..10: note = Description of Artificial Sequence: Synthetic peptide
ERLKLFDRYF

SEQ ID NO: 880 - protein, 8 aa, synthetic construct
  REGION 1..8: note = Description of Artificial Sequence: Synthetic peptide
ERSEAGVC

SEQ ID NO: 881 - protein, 8 aa, synthetic construct
  REGION 1..8: note = Description of Artificial Sequence: Synthetic peptide
ERVRQALL

SEQ ID NO: 882 - protein, 9 aa, synthetic construct
  REGION 1..9: note = Description of Artificial Sequence: Synthetic peptide
ERVRQALLK

SEQ ID NO: 883 - protein, 8 aa, synthetic construct
  REGION 1..8: note = Description of Artificial Sequence: Synthetic peptide
ERYKLEGY

SEQ ID NO: 884 - protein, 10 aa, synthetic construct
  REGION 1..10: note = Description of Artificial Sequence: Synthetic peptide
ESCGNFKVTK

SEQ ID NO: 885 - protein, 8 aa, synthetic construct
  REGION 1..8: note = Description of Artificial Sequence: Synthetic peptide
ESDDYIAT

SEQ ID NO: 886 - protein, 9 aa, synthetic construct
  REGION 1..9: note = Description of Artificial Sequence: Synthetic peptide
ESDDYIATN

SEQ ID NO: 887 - protein, 9 aa, synthetic construct
  REGION 1..9: note = Description of Artificial Sequence: Synthetic peptide
ESFGGASCC

SEQ ID NO: 888 - protein, 8 aa, synthetic construct
  REGION 1..8: note = Description of Artificial Sequence: Synthetic peptide
ESGLKTIL

SEQ ID NO: 889 - protein, 10 aa, synthetic construct
  REGION 1..10: note = Description of Artificial Sequence: Synthetic peptide
ESGLKTILRK

SEQ ID NO: 890 - protein, 8 aa, synthetic construct
  REGION 1..8: note = Description of Artificial Sequence: Synthetic peptide
ESLRPDTR

SEQ ID NO: 891 - protein, 9 aa, synthetic construct
  REGION 1..9: note = Description of Artificial Sequence: Synthetic peptide
ESLVPGFNE

SEQ ID NO: 892 - protein, 9 aa, synthetic construct
  REGION 1..9: note = Description of Artificial Sequence: Synthetic peptide
ESPFELEDF

SEQ ID NO: 893 - protein, 9 aa, synthetic construct
  REGION 1..9: note = Description of Artificial Sequence: Synthetic peptide
ESSAKSASV

SEQ ID NO: 894 - protein, 10 aa, synthetic construct
  REGION 1..10: note = Description of Artificial Sequence: Synthetic peptide
ESSAKSASVY

SEQ ID NO: 895 - protein, 10 aa, synthetic construct
  REGION 1..10: note = Description of Artificial Sequence: Synthetic peptide
ESVQTFFKLV

SEQ ID NO: 896 - protein, 8 aa, synthetic construct
  REGION 1..8: note = Description of Artificial Sequence: Synthetic peptide
ETAHSCNV

SEQ ID NO: 897 - protein, 12 aa, synthetic construct
  REGION 1..12: note = Description of Artificial Sequence: Synthetic peptide
ETAQNSVRVLQK

SEQ ID NO: 898 - protein, 9 aa, synthetic construct
  REGION 1..9: note = Description of Artificial Sequence: Synthetic peptide
ETDLTKGPH

SEQ ID NO: 899 - protein, 11 aa, synthetic construct
  REGION 1..11: note = Description of Artificial Sequence: Synthetic peptide
ETDLTKGPHEF

SEQ ID NO: 900 - protein, 10 aa, synthetic construct
  REGION 1..10: note = Description of Artificial Sequence: Synthetic peptide
ETFKLSYGIA

SEQ ID NO: 901 - protein, 12 aa, synthetic construct
  REGION 1..12: note = Description of Artificial Sequence: Synthetic peptide
ETFKLSYGIATV

SEQ ID NO: 902 - protein, 11 aa, synthetic construct
  REGION 1..11: note = Description of Artificial Sequence: Synthetic peptide
ETFVTHSKGLY

SEQ ID NO: 903 - protein, 9 aa, synthetic construct
  REGION 1..9: note = Description of Artificial Sequence: Synthetic peptide
ETFYPKLQS

SEQ ID NO: 904 - protein, 9 aa, synthetic construct
  REGION 1..9: note = Description of Artificial Sequence: Synthetic peptide
ETGLLMPLK

SEQ ID NO: 905 - protein, 10 aa, synthetic construct
  REGION 1..10: note = Description of Artificial Sequence: Synthetic peptide
ETGTLIVNSV

SEQ ID NO: 906 - protein, 11 aa, synthetic construct
  REGION 1..11: note = Description of Artificial Sequence: Synthetic peptide
ETICAPLTVFF

SEQ ID NO: 907 - protein, 11 aa, synthetic construct
  REGION 1..11: note = Description of Artificial Sequence: Synthetic peptide
ETIQITISSFK

SEQ ID NO: 908 - protein, 8 aa, synthetic construct
  REGION 1..8: note = Description of Artificial Sequence: Synthetic peptide
ETISLAGS

SEQ ID NO: 909 - protein, 8 aa, synthetic construct
  REGION 1..8: note = Description of Artificial Sequence: Synthetic peptide
ETIYNLLK

SEQ ID NO: 910 - protein, 8 aa, synthetic construct
  REGION 1..8: note = Description of Artificial Sequence: Synthetic peptide
ETKDVVEC

SEQ ID NO: 911 - protein, 10 aa, synthetic construct
  REGION 1..10: note = Description of Artificial Sequence: Synthetic peptide
ETKDVVECLK

SEQ ID NO: 912 - protein, 10 aa, synthetic construct
  REGION 1..10: note = Description of Artificial Sequence: Synthetic peptide
ETKFLTENLL

SEQ ID NO: 913 - protein, 12 aa, synthetic construct
  REGION 1..12: note = Description of Artificial Sequence: Synthetic peptide
ETKFLTENLLLY

SEQ ID NO: 914 - protein, 10 aa, synthetic construct
  REGION 1..10: note = Description of Artificial Sequence: Synthetic peptide
ETLGVLVPHV

SEQ ID NO: 915 - protein, 9 aa, synthetic construct
  REGION 1..9: note = Description of Artificial Sequence: Synthetic peptide
ETLPTEVLT

SEQ ID NO: 916 - protein, 11 aa, synthetic construct
  REGION 1..11: note = Description of Artificial Sequence: Synthetic peptide
ETLYCIDGALL

SEQ ID NO: 917 - protein, 10 aa, synthetic construct
  REGION 1..10: note = Description of Artificial Sequence: Synthetic peptide
ETNILLNVPL

SEQ ID NO: 918 - protein, 9 aa, synthetic construct
  REGION 1..9: note = Description of Artificial Sequence: Synthetic peptide
ETQALPQRQ

SEQ ID NO: 919 - protein, 10 aa, synthetic construct
  REGION 1..10: note = Description of Artificial Sequence: Synthetic peptide
ETQALPQRQK

SEQ ID NO: 920 - protein, 10 aa, synthetic construct
  REGION 1..10: note = Description of Artificial Sequence: Synthetic peptide
ETRKLMPVCV

SEQ ID NO: 921 - protein, 8 aa, synthetic construct
  REGION 1..8: note = Description of Artificial Sequence: Synthetic peptide
ETSNSFDV

SEQ ID NO: 922 - protein, 10 aa, synthetic construct
  REGION 1..10: note = Description of Artificial Sequence: Synthetic peptide
ETSNSFDVLK

SEQ ID NO: 923 - protein, 10 aa, synthetic construct
  REGION 1..10: note = Description of Artificial Sequence: Synthetic peptide
ETSWQTGDFV

SEQ ID NO: 924 - protein, 8 aa, synthetic construct
  REGION 1..8: note = Description of Artificial Sequence: Synthetic peptide
ETTADIVV

SEQ ID NO: 925 - protein, 10 aa, synthetic construct
  REGION 1..10: note = Description of Artificial Sequence: Synthetic peptide
ETTADIVVFD

SEQ ID NO: 926 - protein, 9 aa, synthetic construct
  REGION 1..9: note = Description of Artificial Sequence: Synthetic peptide
ETYFTQSRN

SEQ ID NO: 927 - protein, 8 aa, synthetic construct
  REGION 1..8: note = Description of Artificial Sequence: Synthetic peptide
EVARDLSL

SEQ ID NO: 928 - protein, 11 aa, synthetic construct
  REGION 1..11: note = Description of Artificial Sequence: Synthetic peptide
EVAVKMFDAYV

SEQ ID NO: 929 - protein, 8 aa, synthetic construct
  REGION 1..8: note = Description of Artificial Sequence: Synthetic peptide
EVFAQVKQ

SEQ ID NO: 930 - protein, 10 aa, synthetic construct
  REGION 1..10: note = Description of Artificial Sequence: Synthetic peptide
EVFNATRFAS

SEQ ID NO: 931 - protein, 11 aa, synthetic construct
  REGION 1..11: note = Description of Artificial Sequence: Synthetic peptide
EVFNATRFASV

SEQ ID NO: 932 - protein, 9 aa, synthetic construct
  REGION 1..9: note = Description of Artificial Sequence: Synthetic peptide
EVGKPRPPL

SEQ ID NO: 933 - protein, 11 aa, synthetic construct
  REGION 1..11: note = Description of Artificial Sequence: Synthetic peptide
EVGKPRPPLNR

SEQ ID NO: 934 - protein, 9 aa, synthetic construct
  REGION 1..9: note = Description of Artificial Sequence: Synthetic peptide
EVGPEHSLA

SEQ ID NO: 935 - protein, 10 aa, synthetic construct
  REGION 1..10: note = Description of Artificial Sequence: Synthetic peptide
EVITFDNLKT

SEQ ID NO: 936 - protein, 8 aa, synthetic construct
  REGION 1..8: note = Description of Artificial Sequence: Synthetic peptide
EVKILNNL

SEQ ID NO: 937 - protein, 10 aa, synthetic construct
  REGION 1..10: note = Description of Artificial Sequence: Synthetic peptide
EVKILNNLGV

SEQ ID NO: 938 - protein, 8 aa, synthetic construct
  REGION 1..8: note = Description of Artificial Sequence: Synthetic peptide
EVKPFITE

SEQ ID NO: 939 - protein, 8 aa, synthetic construct
  REGION 1..8: note = Description of Artificial Sequence: Synthetic peptide
EVLLAPLL

SEQ ID NO: 940 - protein, 10 aa, synthetic construct
  REGION 1..10: note = Description of Artificial Sequence: Synthetic peptide
EVLLAPLLSA

SEQ ID NO: 941 - protein, 9 aa, synthetic construct
  REGION 1..9: note = Description of Artificial Sequence: Synthetic peptide
EVLSDRELH

SEQ ID NO: 942 - protein, 10 aa, synthetic construct
  REGION 1..10: note = Description of Artificial Sequence: Synthetic peptide
EVLSDRELHL

SEQ ID NO: 943 - protein, 8 aa, synthetic construct
  REGION 1..8: note = Description of Artificial Sequence: Synthetic peptide
EVNEFACV

SEQ ID NO: 944 - protein, 8 aa, synthetic construct
  REGION 1..8: note = Description of Artificial Sequence: Synthetic peptide
EVPANSTV

SEQ ID NO: 945 - protein, 11 aa, synthetic construct
  REGION 1..11: note = Description of Artificial Sequence: Synthetic peptide
EVPVSIINNTV

SEQ ID NO: 946 - protein, 10 aa, synthetic construct
  REGION 1..10: note = Description of Artificial Sequence: Synthetic peptide
EVQELYSPIF

SEQ ID NO: 947 - protein, 11 aa, synthetic construct
  REGION 1..11: note = Description of Artificial Sequence: Synthetic peptide
EVQELYSPIFL

SEQ ID NO: 948 - protein, 10 aa, synthetic construct
  REGION 1..10: note = Description of Artificial Sequence: Synthetic peptide
EVQGYKSVNI

SEQ ID NO: 949 - protein, 10 aa, synthetic construct
  REGION 1..10: note = Description of Artificial Sequence: Synthetic peptide
EVQPQLEMEL

SEQ ID NO: 950 - protein, 9 aa, synthetic construct
  REGION 1..9: note = Description of Artificial Sequence: Synthetic peptide
EVRQIAPGQ

SEQ ID NO: 951 - protein, 9 aa, synthetic construct
  REGION 1..9: note = Description of Artificial Sequence: Synthetic peptide
EVRTIKVFT

SEQ ID NO: 952 - protein, 11 aa, synthetic construct
  REGION 1..11: note = Description of Artificial Sequence: Synthetic peptide
EVRTIKVFTTV

SEQ ID NO: 953 - protein, 11 aa, synthetic construct
  REGION 1..11: note = Description of Artificial Sequence: Synthetic peptide
EVTGDSCNNYM

SEQ ID NO: 954 - protein, 9 aa, synthetic construct
  REGION 1..9: note = Description of Artificial Sequence: Synthetic peptide
EVTTTLEET

SEQ ID NO: 955 - protein, 8 aa, synthetic construct
  REGION 1..8: note = Description of Artificial Sequence: Synthetic peptide
EVVDKYFD

SEQ ID NO: 956 - protein, 8 aa, synthetic construct
  REGION 1..8: note = Description of Artificial Sequence: Synthetic peptide
EVVENPTI

SEQ ID NO: 957 - protein, 9 aa, synthetic construct
  REGION 1..9: note = Description of Artificial Sequence: Synthetic peptide
EWKFYDAQP

SEQ ID NO: 958 - protein, 10 aa, synthetic construct
  REGION 1..10: note = Description of Artificial Sequence: Synthetic peptide
EYCRHGTCER

SEQ ID NO: 959 - protein, 8 aa, synthetic construct
  REGION 1..8: note = Description of Artificial Sequence: Synthetic peptide
EYDYVIFT

SEQ ID NO: 960 - protein, 9 aa, synthetic construct
  REGION 1..9: note = Description of Artificial Sequence: Synthetic peptide
EYDYVIFTQ

SEQ ID NO: 961 - protein, 8 aa, synthetic construct
  REGION 1..8: note = Description of Artificial Sequence: Synthetic peptide
EYFNSVCR

SEQ ID NO: 962 - protein, 9 aa, synthetic construct
  REGION 1..9: note = Description of Artificial Sequence: Synthetic peptide
EYRLYLDAY

SEQ ID NO: 963 - protein, 9 aa, synthetic construct
  REGION 1..9: note = Description of Artificial Sequence: Synthetic peptide
EYTDFATSA

SEQ ID NO: 964 - protein, 9 aa, synthetic construct
  REGION 1..9: note = Description of Artificial Sequence: Synthetic peptide
EYTFEKGDY

SEQ ID NO: 965 - protein, 8 aa, synthetic construct
  REGION 1..8: note = Description of Artificial Sequence: Synthetic peptide
EYVSQPFL

SEQ ID NO: 966 - protein, 8 aa, synthetic construct
  REGION 1..8: note = Description of Artificial Sequence: Synthetic peptide
FAAYSRYR

SEQ ID NO: 967 - protein, 11 aa, synthetic construct
  REGION 1..11: note = Description of Artificial Sequence: Synthetic peptide
FAFACPDGVKH

SEQ ID NO: 968 - protein, 8 aa, synthetic construct
  REGION 1..8: note = Description of Artificial Sequence: Synthetic peptide
FAKFLKTN

SEQ ID NO: 969 - protein, 9 aa, synthetic construct
  REGION 1..9: note = Description of Artificial Sequence: Synthetic peptide
FAKFLKTNC

SEQ ID NO: 970 - protein, 8 aa, synthetic construct
  REGION 1..8: note = Description of Artificial Sequence: Synthetic peptide
FAMMFVKH

SEQ ID NO: 971 - protein, 9 aa, synthetic construct
  REGION 1..9: note = Description of Artificial Sequence: Synthetic peptide
FANKHADFD

SEQ ID NO: 972 - protein, 11 aa, synthetic construct
  REGION 1..11: note = Description of Artificial Sequence: Synthetic peptide
FANKHADFDTW

SEQ ID NO: 973 - protein, 10 aa, synthetic construct
  REGION 1..10: note = Description of Artificial Sequence: Synthetic peptide
FASEAARVVR

SEQ ID NO: 974 - protein, 11 aa, synthetic construct
  REGION 1..11: note = Description of Artificial Sequence: Synthetic peptide
FASFYYVWKSY

SEQ ID NO: 975 - protein, 10 aa, synthetic construct
  REGION 1..10: note = Description of Artificial Sequence: Synthetic peptide
FATSACVLAA

SEQ ID NO: 976 - protein, 8 aa, synthetic construct
  REGION 1..8: note = Description of Artificial Sequence: Synthetic peptide
FAVDAAKA

SEQ ID NO: 977 - protein, 8 aa, synthetic construct
  REGION 1..8: note = Description of Artificial Sequence: Synthetic peptide
FAYANRNR

SEQ ID NO: 978 - protein, 11 aa, synthetic construct
  REGION 1..11: note = Description of Artificial Sequence: Synthetic peptide
FAYANRNRFLY

SEQ ID NO: 979 - protein, 12 aa, synthetic construct
  REGION 1..12: note = Description of Artificial Sequence: Synthetic peptide
FAYANRNRFLYI

SEQ ID NO: 980 - protein, 12 aa, synthetic construct
  REGION 1..12: note = Description of Artificial Sequence: Synthetic peptide
FAYTKRNVIPTI

SEQ ID NO: 981 - protein, 9 aa, synthetic construct
  REGION 1..9: note = Description of Artificial Sequence: Synthetic peptide
FCAFAVDAA

SEQ ID NO: 982 - protein, 8 aa, synthetic construct
  REGION 1..8: note = Description of Artificial Sequence: Synthetic peptide
FCGKGYHL

SEQ ID NO: 983 - protein, 9 aa, synthetic construct
  REGION 1..9: note = Description of Artificial Sequence: Synthetic peptide
FCLLNRYFR

SEQ ID NO: 984 - protein, 8 aa, synthetic construct
  REGION 1..8: note = Description of Artificial Sequence: Synthetic peptide
FCSQHTML

SEQ ID NO: 985 - protein, 10 aa, synthetic construct
  REGION 1..10: note = Description of Artificial Sequence: Synthetic peptide
FDEDDSEPVL

SEQ ID NO: 986 - protein, 9 aa, synthetic construct
  REGION 1..9: note = Description of Artificial Sequence: Synthetic peptide
FDEGNCDTL

SEQ ID NO: 987 - protein, 10 aa, synthetic construct
  REGION 1..10: note = Description of Artificial Sequence: Synthetic peptide
FDEISMATNY

SEQ ID NO: 988 - protein, 9 aa, synthetic construct
  REGION 1..9: note = Description of Artificial Sequence: Synthetic peptide
FDKSAFVNL

SEQ ID NO: 989 - protein, 9 aa, synthetic construct
  REGION 1..9: note = Description of Artificial Sequence: Synthetic peptide
FDRDAAMQR

SEQ ID NO: 990 - protein, 9 aa, synthetic construct
  REGION 1..9: note = Description of Artificial Sequence: Synthetic peptide
FDTRVLSNL

SEQ ID NO: 991 - protein, 10 aa, synthetic construct
  REGION 1..10: note = Description of Artificial Sequence: Synthetic peptide
FDVEGCHATR

SEQ ID NO: 992 - protein, 10 aa, synthetic construct
  REGION 1..10: note = Description of Artificial Sequence: Synthetic peptide
FEEAALCTFL

SEQ ID NO: 993 - protein, 8 aa, synthetic construct
  REGION 1..8: note = Description of Artificial Sequence: Synthetic peptide
FEHIVYGD

SEQ ID NO: 994 - protein, 9 aa, synthetic construct
  REGION 1..9: note = Description of Artificial Sequence: Synthetic peptide
FEKGDYGDA

SEQ ID NO: 995 - protein, 10 aa, synthetic construct
  REGION 1..10: note = Description of Artificial Sequence: Synthetic peptide
FEKGDYGDAV

SEQ ID NO: 996 - protein, 8 aa, synthetic construct
  REGION 1..8: note = Description of Artificial Sequence: Synthetic peptide
FELEDFIP

SEQ ID NO: 997 - protein, 8 aa, synthetic construct
  REGION 1..8: note = Description of Artificial Sequence: Synthetic peptide
FELLHAPA

SEQ ID NO: 998 - protein, 9 aa, synthetic construct
  REGION 1..9: note = Description of Artificial Sequence: Synthetic peptide
FELLHAPAT

SEQ ID NO: 999 - protein, 8 aa, synthetic construct
  REGION 1..8: note = Description of Artificial Sequence: Synthetic peptide
FELTSMKY

SEQ ID NO: 1000 - protein, 10 aa, synthetic construct
  REGION 1..10: note = Description of Artificial Sequence: Synthetic peptide
FELTSMKYFV

SEQ ID NO: 1001 - protein, 8 aa, synthetic construct
  REGION 1..8: note = Description of Artificial Sequence: Synthetic peptide
FELWAKRN

SEQ ID NO: 1002 - protein, 8 aa, synthetic construct
  REGION 1..8: note = Description of Artificial Sequence: Synthetic peptide
FENKTTLP

SEQ ID NO: 1003 - protein, 8 aa, synthetic construct
  REGION 1..8: note = Description of Artificial Sequence: Synthetic peptide
FFASFYYV

SEQ ID NO: 1004 - protein, 8 aa, synthetic construct
  REGION 1..8: note = Description of Artificial Sequence: Synthetic peptide
FFDGRVDG

SEQ ID NO: 1005 - protein, 9 aa, synthetic construct
  REGION 1..9: note = Description of Artificial Sequence: Synthetic peptide
FFDGRVDGQ

SEQ ID NO: 1006 - protein, 10 aa, synthetic construct
  REGION 1..10: note = Description of Artificial Sequence: Synthetic peptide
FFDGRVDGQV

SEQ ID NO: 1007 - protein, 8 aa, synthetic construct
  REGION 1..8: note = Description of Artificial Sequence: Synthetic peptide
FFIYNKIV

SEQ ID NO: 1008 - protein, 9 aa, synthetic construct
  REGION 1..9: note = Description of Artificial Sequence: Synthetic peptide
FFSNYLKRR

SEQ ID NO: 1009 - protein, 9 aa, synthetic construct
  REGION 1..9: note = Description of Artificial Sequence: Synthetic peptide
FFTLLLQLC

SEQ ID NO: 1010 - protein, 8 aa, synthetic construct
  REGION 1..8: note = Description of Artificial Sequence: Synthetic peptide
FFYVLGLA

SEQ ID NO: 1011 - protein, 11 aa, synthetic construct
  REGION 1..11: note = Description of Artificial Sequence: Synthetic peptide
FFYVLGLAAIM

SEQ ID NO: 1012 - protein, 10 aa, synthetic construct
  REGION 1..10: note = Description of Artificial Sequence: Synthetic peptide
FGADPIHSLR

SEQ ID NO: 1013 - protein, 10 aa, synthetic construct
  REGION 1..10: note = Description of Artificial Sequence: Synthetic peptide
FGDDTVIEVQ

SEQ ID NO: 1014 - protein, 8 aa, synthetic construct
  REGION 1..8: note = Description of Artificial Sequence: Synthetic peptide
FGDFIQTT

SEQ ID NO: 1015 - protein, 9 aa, synthetic construct
  REGION 1..9: note = Description of Artificial Sequence: Synthetic peptide
FGDFIQTTP

SEQ ID NO: 1016 - protein, 8 aa, synthetic construct
  REGION 1..8: note = Description of Artificial Sequence: Synthetic peptide
FGGCVFSY

SEQ ID NO: 1017 - protein, 9 aa, synthetic construct
  REGION 1..9: note = Description of Artificial Sequence: Synthetic peptide
FGLFCLLNR

SEQ ID NO: 1018 - protein, 10 aa, synthetic construct
  REGION 1..10: note = Description of Artificial Sequence: Synthetic peptide
FGLFCLLNRY

SEQ ID NO: 1019 - protein, 8 aa, synthetic construct
  REGION 1..8: note = Description of Artificial Sequence: Synthetic peptide
FGLVAEWF

SEQ ID NO: 1020 - protein, 9 aa, synthetic construct
  REGION 1..9: note = Description of Artificial Sequence: Synthetic peptide
FGPLVRKIF

SEQ ID NO: 1021 - protein, 9 aa, synthetic construct
  REGION 1..9: note = Description of Artificial Sequence: Synthetic peptide
FGWLIVGVA

SEQ ID NO: 1022 - protein, 9 aa, synthetic construct
  REGION 1..9: note = Description of Artificial Sequence: Synthetic peptide
FHAIHVSGT

SEQ ID NO: 1023 - protein, 9 aa, synthetic construct
  REGION 1..9: note = Description of Artificial Sequence: Synthetic peptide
FHLVDFQVT

SEQ ID NO: 1024 - protein, 10 aa, synthetic construct
  REGION 1..10: note = Description of Artificial Sequence: Synthetic peptide
FHLVDFQVTI

SEQ ID NO: 1025 - protein, 9 aa, synthetic construct
  REGION 1..9: note = Description of Artificial Sequence: Synthetic peptide
FHQKLLKSI

SEQ ID NO: 1026 - protein, 11 aa, synthetic construct
  REGION 1..11: note = Description of Artificial Sequence: Synthetic peptide
FHTPAFDKSAF

SEQ ID NO: 1027 - protein, 9 aa, synthetic construct
  REGION 1..9: note = Description of Artificial Sequence: Synthetic peptide
FIASFRLFA

SEQ ID NO: 1028 - protein, 10 aa, synthetic construct
  REGION 1..10: note = Description of Artificial Sequence: Synthetic peptide
FIDTKRGVYC

SEQ ID NO: 1029 - protein, 8 aa, synthetic construct
  REGION 1..8: note = Description of Artificial Sequence: Synthetic peptide
FIEDLLFN

SEQ ID NO: 1030 - protein, 11 aa, synthetic construct
  REGION 1..11: note = Description of Artificial Sequence: Synthetic peptide
FIETISLAGSY

SEQ ID NO: 1031 - protein, 9 aa, synthetic construct
  REGION 1..9: note = Description of Artificial Sequence: Synthetic peptide
FISDEVARD

SEQ ID NO: 1032 - protein, 10 aa, synthetic construct
  REGION 1..10: note = Description of Artificial Sequence: Synthetic peptide
FISDEVARDL

SEQ ID NO: 1033 - protein, 8 aa, synthetic construct
  REGION 1..8: note = Description of Artificial Sequence: Synthetic peptide
FISNSWLM

SEQ ID NO: 1034 - protein, 9 aa, synthetic construct
  REGION 1..9: note = Description of Artificial Sequence: Synthetic peptide
FISPYNSQN

SEQ ID NO: 1035 - protein, 9 aa, synthetic construct
  REGION 1..9: note = Description of Artificial Sequence: Synthetic peptide
FIYNKIVDE

SEQ ID NO: 1036 - protein, 9 aa, synthetic construct
  REGION 1..9: note = Description of Artificial Sequence: Synthetic peptide
FKDQVILLN

SEQ ID NO: 1037 - protein, 8 aa, synthetic construct
  REGION 1..8: note = Description of Artificial Sequence: Synthetic peptide
FKEELDKY

SEQ ID NO: 1038 - protein, 9 aa, synthetic construct
  REGION 1..9: note = Description of Artificial Sequence: Synthetic peptide
FKEELDKYF

SEQ ID NO: 1039 - protein, 9 aa, synthetic construct
  REGION 1..9: note = Description of Artificial Sequence: Synthetic peptide
FKELLVYAA

SEQ ID NO: 1040 - protein, 10 aa, synthetic construct
  REGION 1..10: note = Description of Artificial Sequence: Synthetic peptide
FKFVCDNIKF

SEQ ID NO: 1041 - protein, 8 aa, synthetic construct
  REGION 1..8: note = Description of Artificial Sequence: Synthetic peptide
FKHLIPLM

SEQ ID NO: 1042 - protein, 8 aa, synthetic construct
  REGION 1..8: note = Description of Artificial Sequence: Synthetic peptide
FKLASHMY

SEQ ID NO: 1043 - protein, 9 aa, synthetic construct
  REGION 1..9: note = Description of Artificial Sequence: Synthetic peptide
FKLNEEIAI

SEQ ID NO: 1044 - protein, 9 aa, synthetic construct
  REGION 1..9: note = Description of Artificial Sequence: Synthetic peptide
FKLSYGIAT

SEQ ID NO: 1045 - protein, 10 aa, synthetic construct
  REGION 1..10: note = Description of Artificial Sequence: Synthetic peptide
FKVNSTLEQY

SEQ ID NO: 1046 - protein, 10 aa, synthetic construct
  REGION 1..10: note = Description of Artificial Sequence: Synthetic peptide
FKVSIWNLDY

SEQ ID NO: 1047 - protein, 10 aa, synthetic construct
  REGION 1..10: note = Description of Artificial Sequence: Synthetic peptide
FKWDLTAFGL

SEQ ID NO: 1048 - protein, 9 aa, synthetic construct
  REGION 1..9: note = Description of Artificial Sequence: Synthetic peptide
FKYWDQTYH

SEQ ID NO: 1049 - protein, 8 aa, synthetic construct
  REGION 1..8: note = Description of Artificial Sequence: Synthetic peptide
FLAHIQWM

SEQ ID NO: 1050 - protein, 8 aa, synthetic construct
  REGION 1..8: note = Description of Artificial Sequence: Synthetic peptide
FLALITLA

SEQ ID NO: 1051 - protein, 10 aa, synthetic construct
  REGION 1..10: note = Description of Artificial Sequence: Synthetic peptide
FLALITLATC

SEQ ID NO: 1052 - protein, 12 aa, synthetic construct
  REGION 1..12: note = Description of Artificial Sequence: Synthetic peptide
FLAYILFTRFFY

SEQ ID NO: 1053 - protein, 11 aa, synthetic construct
  REGION 1..11: note = Description of Artificial Sequence: Synthetic peptide
FLEGETLPTEV

SEQ ID NO: 1054 - protein, 10 aa, synthetic construct
  REGION 1..10: note = Description of Artificial Sequence: Synthetic peptide
FLGIITTVAA

SEQ ID NO: 1055 - protein, 9 aa, synthetic construct
  REGION 1..9: note = Description of Artificial Sequence: Synthetic peptide
FLGYFCTCY

SEQ ID NO: 1056 - protein, 9 aa, synthetic construct
  REGION 1..9: note = Description of Artificial Sequence: Synthetic peptide
FLIGCNYLG

SEQ ID NO: 1057 - protein, 10 aa, synthetic construct
  REGION 1..10: note = Description of Artificial Sequence: Synthetic peptide
FLIGCNYLGK

SEQ ID NO: 1058 - protein, 8 aa, synthetic construct
  REGION 1..8: note = Description of Artificial Sequence: Synthetic peptide
FLKKDAPY

SEQ ID NO: 1059 - protein, 9 aa, synthetic construct
  REGION 1..9: note = Description of Artificial Sequence: Synthetic peptide
FLKTNCCRF

SEQ ID NO: 1060 - protein, 9 aa, synthetic construct
  REGION 1..9: note = Description of Artificial Sequence: Synthetic peptide
FLLKYNENG

SEQ ID NO: 1061 - protein, 8 aa, synthetic construct
  REGION 1..8: note = Description of Artificial Sequence: Synthetic peptide
FLLNKEMY

SEQ ID NO: 1062 - protein, 10 aa, synthetic construct
  REGION 1..10: note = Description of Artificial Sequence: Synthetic peptide
FLLNKEMYLK

SEQ ID NO: 1063 - protein, 10 aa, synthetic construct
  REGION 1..10: note = Description of Artificial Sequence: Synthetic peptide
FLLPSLATVA

SEQ ID NO: 1064 - protein, 8 aa, synthetic construct
  REGION 1..8: note = Description of Artificial Sequence: Synthetic peptide
FLLVTLAI

SEQ ID NO: 1065 - protein, 11 aa, synthetic construct
  REGION 1..11: note = Description of Artificial Sequence: Synthetic peptide
FLLVTLAILTA

SEQ ID NO: 1066 - protein, 9 aa, synthetic construct
  REGION 1..9: note = Description of Artificial Sequence: Synthetic peptide
FLMDLEGKQ

SEQ ID NO: 1067 - protein, 10 aa, synthetic construct
  REGION 1..10: note = Description of Artificial Sequence: Synthetic peptide
FLMDLEGKQG

SEQ ID NO: 1068 - protein, 8 aa, synthetic construct
  REGION 1..8: note = Description of Artificial Sequence: Synthetic peptide
FLNKVVST

SEQ ID NO: 1069 - protein, 8 aa, synthetic construct
  REGION 1..8: note = Description of Artificial Sequence: Synthetic peptide
FLNRVCGV

SEQ ID NO: 1070 - protein, 8 aa, synthetic construct
  REGION 1..8: note = Description of Artificial Sequence: Synthetic peptide
FLPFAMGI

SEQ ID NO: 1071 - protein, 9 aa, synthetic construct
  REGION 1..9: note = Description of Artificial Sequence: Synthetic peptide
FLPFFSNVT

SEQ ID NO: 1072 - protein, 11 aa, synthetic construct
  REGION 1..11: note = Description of Artificial Sequence: Synthetic peptide
FLPFFSNVTWF

SEQ ID NO: 1073 - protein, 12 aa, synthetic construct
  REGION 1..12: note = Description of Artificial Sequence: Synthetic peptide
FLPGVYSVIYLY

SEQ ID NO: 1074 - protein, 10 aa, synthetic construct
  REGION 1..10: note = Description of Artificial Sequence: Synthetic peptide
FLRDGWEIVK

SEQ ID NO: 1075 - protein, 11 aa, synthetic construct
  REGION 1..11: note = Description of Artificial Sequence: Synthetic peptide
FLRDGWEIVKF

SEQ ID NO: 1076 - protein, 10 aa, synthetic construct
  REGION 1..10: note = Description of Artificial Sequence: Synthetic peptide
FLVFLGIITT

SEQ ID NO: 1077 - protein, 8 aa, synthetic construct
  REGION 1..8: note = Description of Artificial Sequence: Synthetic peptide
FLVLIMLI

SEQ ID NO: 1078 - protein, 8 aa, synthetic construct
  REGION 1..8: note = Description of Artificial Sequence: Synthetic peptide
FLWLLWPV

SEQ ID NO: 1079 - protein, 9 aa, synthetic construct
  REGION 1..9: note = Description of Artificial Sequence: Synthetic peptide
FLWLLWPVT

SEQ ID NO: 1080 - protein, 11 aa, synthetic construct
  REGION 1..11: note = Description of Artificial Sequence: Synthetic peptide
FLYIIKLIFLW

SEQ ID NO: 1081 - protein, 8 aa, synthetic construct
  REGION 1..8: note = Description of Artificial Sequence: Synthetic peptide
FMRFRRAF

SEQ ID NO: 1082 - protein, 10 aa, synthetic construct
  REGION 1..10: note = Description of Artificial Sequence: Synthetic peptide
FMRIFTIGTV

SEQ ID NO: 1083 - protein, 9 aa, synthetic construct
  REGION 1..9: note = Description of Artificial Sequence: Synthetic peptide
FNDGVYFAS

SEQ ID NO: 1084 - protein, 9 aa, synthetic construct
  REGION 1..9: note = Description of Artificial Sequence: Synthetic peptide
FNICQAVTA

SEQ ID NO: 1085 - protein, 10 aa, synthetic construct
  REGION 1..10: note = Description of Artificial Sequence: Synthetic peptide
FNKWGKARLY

SEQ ID NO: 1086 - protein, 10 aa, synthetic construct
  REGION 1..10: note = Description of Artificial Sequence: Synthetic peptide
FNLVAMKYNY

SEQ ID NO: 1087 - protein, 11 aa, synthetic construct
  REGION 1..11: note = Description of Artificial Sequence: Synthetic peptide
FNPETNILLNV

SEQ ID NO: 1088 - protein, 10 aa, synthetic construct
  REGION 1..10: note = Description of Artificial Sequence: Synthetic peptide
FNPPALQDAY

SEQ ID NO: 1089 - protein, 10 aa, synthetic construct
  REGION 1..10: note = Description of Artificial Sequence: Synthetic peptide
FNVAITRAKV

SEQ ID NO: 1090 - protein, 9 aa, synthetic construct
  REGION 1..9: note = Description of Artificial Sequence: Synthetic peptide
FNYLKSPNF

SEQ ID NO: 1091 - protein, 8 aa, synthetic construct
  REGION 1..8: note = Description of Artificial Sequence: Synthetic peptide
FPDLNGDV

SEQ ID NO: 1092 - protein, 10 aa, synthetic construct
  REGION 1..10: note = Description of Artificial Sequence: Synthetic peptide
FPFNKWGKAR

SEQ ID NO: 1093 - protein, 12 aa, synthetic construct
  REGION 1..12: note = Description of Artificial Sequence: Synthetic peptide
FPFNKWGKARLY

SEQ ID NO: 1094 - protein, 10 aa, synthetic construct
  REGION 1..10: note = Description of Artificial Sequence: Synthetic peptide
FPKSDGTGTI

SEQ ID NO: 1095 - protein, 8 aa, synthetic construct
  REGION 1..8: note = Description of Artificial Sequence: Synthetic peptide
FPLQSYGF

SEQ ID NO: 1096 - protein, 10 aa, synthetic construct
  REGION 1..10: note = Description of Artificial Sequence: Synthetic peptide
FPLQSYGFQP

SEQ ID NO: 1097 - protein, 8 aa, synthetic construct
  REGION 1..8: note = Description of Artificial Sequence: Synthetic peptide
FPNITNLC

SEQ ID NO: 1098 - protein, 9 aa, synthetic construct
  REGION 1..9: note = Description of Artificial Sequence: Synthetic peptide
FPNITNLCP

SEQ ID NO: 1099 - protein, 8 aa, synthetic construct
  REGION 1..8: note = Description of Artificial Sequence: Synthetic peptide
FPNTYLEG

SEQ ID NO: 1100 - protein, 9 aa, synthetic construct
  REGION 1..9: note = Description of Artificial Sequence: Synthetic peptide
FPPTEPKKD

SEQ ID NO: 1101 - protein, 12 aa, synthetic construct
  REGION 1..12: note = Description of Artificial Sequence: Synthetic peptide
FPQSAPHGVVFL

SEQ ID NO: 1102 - protein, 8 aa, synthetic construct
  REGION 1..8: note = Description of Artificial Sequence: Synthetic peptide
FPSGKVEG

SEQ ID NO: 1103 - protein, 10 aa, synthetic construct
  REGION 1..10: note = Description of Artificial Sequence: Synthetic peptide
FQEKDEDDNL

SEQ ID NO: 1104 - protein, 8 aa, synthetic construct
  REGION 1..8: note = Description of Artificial Sequence: Synthetic peptide
FQQFGRDI

SEQ ID NO: 1105 - protein, 8 aa, synthetic construct
  REGION 1..8: note = Description of Artificial Sequence: Synthetic peptide
FQSASKII

SEQ ID NO: 1106 - protein, 9 aa, synthetic construct
  REGION 1..9: note = Description of Artificial Sequence: Synthetic peptide
FQTRAGCLI

SEQ ID NO: 1107 - protein, 9 aa, synthetic construct
  REGION 1..9: note = Description of Artificial Sequence: Synthetic peptide
FQTVKPGNF

SEQ ID NO: 1108 - protein, 8 aa, synthetic construct
  REGION 1..8: note = Description of Artificial Sequence: Synthetic peptide
FQVTIAEI

SEQ ID NO: 1109 - protein, 10 aa, synthetic construct
  REGION 1..10: note = Description of Artificial Sequence: Synthetic peptide
FQVTIAEILL

SEQ ID NO: 1110 - protein, 8 aa, synthetic construct
  REGION 1..8: note = Description of Artificial Sequence: Synthetic peptide
FRIDGDMV

SEQ ID NO: 1111 - protein, 10 aa, synthetic construct
  REGION 1..10: note = Description of Artificial Sequence: Synthetic peptide
FRIDGDMVPH

SEQ ID NO: 1112 - protein, 11 aa, synthetic construct
  REGION 1..11: note = Description of Artificial Sequence: Synthetic peptide
FRIDGDMVPHI

SEQ ID NO: 1113 - protein, 9 aa, synthetic construct
  REGION 1..9: note = Description of Artificial Sequence: Synthetic peptide
FRKMAFPSG

SEQ ID NO: 1114 - protein, 8 aa, synthetic construct
  REGION 1..8: note = Description of Artificial Sequence: Synthetic peptide
FRLTLGVY

SEQ ID NO: 1115 - protein, 9 aa, synthetic construct
  REGION 1..9: note = Description of Artificial Sequence: Synthetic peptide
FRLTLGVYD

SEQ ID NO: 1116 - protein, 8 aa, synthetic construct
  REGION 1..8: note = Description of Artificial Sequence: Synthetic peptide
FRRAFGEY

SEQ ID NO: 1117 - protein, 8 aa, synthetic construct
  REGION 1..8: note = Description of Artificial Sequence: Synthetic peptide
FRVQPTES

SEQ ID NO: 1118 - protein, 10 aa, synthetic construct
  REGION 1..10: note = Description of Artificial Sequence: Synthetic peptide
FRYMNSQGLL

SEQ ID NO: 1119 - protein, 9 aa, synthetic construct
  REGION 1..9: note = Description of Artificial Sequence: Synthetic peptide
FSALEPLVD

SEQ ID NO: 1120 - protein, 9 aa, synthetic construct
  REGION 1..9: note = Description of Artificial Sequence: Synthetic peptide
FSGYLKLTD

SEQ ID NO: 1121 - protein, 11 aa, synthetic construct
  REGION 1..11: note = Description of Artificial Sequence: Synthetic peptide
FSHSQLGGLHL

SEQ ID NO: 1122 - protein, 8 aa, synthetic construct
  REGION 1..8: note = Description of Artificial Sequence: Synthetic peptide
FSLELQDH

SEQ ID NO: 1123 - protein, 9 aa, synthetic construct
  REGION 1..9: note = Description of Artificial Sequence: Synthetic peptide
FSNVTWFHA

SEQ ID NO: 1124 - protein, 10 aa, synthetic construct
  REGION 1..10: note = Description of Artificial Sequence: Synthetic peptide
FSNVTWFHAI

SEQ ID NO: 1125 - protein, 10 aa, synthetic construct
  REGION 1..10: note = Description of Artificial Sequence: Synthetic peptide
FSNYLKRRVV

SEQ ID NO: 1126 - protein, 9 aa, synthetic construct
  REGION 1..9: note = Description of Artificial Sequence: Synthetic peptide
FSSLPSYAA

SEQ ID NO: 1127 - protein, 10 aa, synthetic construct
  REGION 1..10: note = Description of Artificial Sequence: Synthetic peptide
FSSNVANYQK

SEQ ID NO: 1128 - protein, 9 aa, synthetic construct
  REGION 1..9: note = Description of Artificial Sequence: Synthetic peptide
FSYVGCHNK

SEQ ID NO: 1129 - protein, 10 aa, synthetic construct
  REGION 1..10: note = Description of Artificial Sequence: Synthetic peptide
FTDGVCLFWN

SEQ ID NO: 1130 - protein, 10 aa, synthetic construct
  REGION 1..10: note = Description of Artificial Sequence: Synthetic peptide
FTEERLKLFD

SEQ ID NO: 1131 - protein, 12 aa, synthetic construct
  REGION 1..12: note = Description of Artificial Sequence: Synthetic peptide
FTGNLQSNHDLY

SEQ ID NO: 1132 - protein, 10 aa, synthetic construct
  REGION 1..10: note = Description of Artificial Sequence: Synthetic peptide
FTIGTVTLKQ

SEQ ID NO: 1133 - protein, 8 aa, synthetic construct
  REGION 1..8: note = Description of Artificial Sequence: Synthetic peptide
FTPLIQPI

SEQ ID NO: 1134 - protein, 11 aa, synthetic construct
  REGION 1..11: note = Description of Artificial Sequence: Synthetic peptide
FTPLIQPIGAL

SEQ ID NO: 1135 - protein, 10 aa, synthetic construct
  REGION 1..10: note = Description of Artificial Sequence: Synthetic peptide
FTRGVYYPDK

SEQ ID NO: 1136 - protein, 10 aa, synthetic construct
  REGION 1..10: note = Description of Artificial Sequence: Synthetic peptide
FTRSTNSRIK

SEQ ID NO: 1137 - protein, 8 aa, synthetic construct
  REGION 1..8: note = Description of Artificial Sequence: Synthetic peptide
FTSDLATN

SEQ ID NO: 1138 - protein, 8 aa, synthetic construct
  REGION 1..8: note = Description of Artificial Sequence: Synthetic peptide
FTVEKGIY

SEQ ID NO: 1139 - protein, 8 aa, synthetic construct
  REGION 1..8: note = Description of Artificial Sequence: Synthetic peptide
FTYASALW

SEQ ID NO: 1140 - protein, 10 aa, synthetic construct
  REGION 1..10: note = Description of Artificial Sequence: Synthetic peptide
FVCNLLLLFV

SEQ ID NO: 1141 - protein, 12 aa, synthetic construct
  REGION 1..12: note = Description of Artificial Sequence: Synthetic peptide
FVDDIVKTDGTL

SEQ ID NO: 1142 - protein, 11 aa, synthetic construct
  REGION 1..11: note = Description of Artificial Sequence: Synthetic peptide
FVDGVPFVVST

SEQ ID NO: 1143 - protein, 8 aa, synthetic construct
  REGION 1..8: note = Description of Artificial Sequence: Synthetic peptide
FVDRQTAQ

SEQ ID NO: 1144 - protein, 10 aa, synthetic construct
  REGION 1..10: note = Description of Artificial Sequence: Synthetic peptide
FVEIIKSQDL

SEQ ID NO: 1145 - protein, 9 aa, synthetic construct
  REGION 1..9: note = Description of Artificial Sequence: Synthetic peptide
FVETVKGLD

SEQ ID NO: 1146 - protein, 8 aa, synthetic construct
  REGION 1..8: note = Description of Artificial Sequence: Synthetic peptide
FVFLVLLP

SEQ ID NO: 1147 - protein, 8 aa, synthetic construct
  REGION 1..8: note = Description of Artificial Sequence: Synthetic peptide
FVIRGDEV

SEQ ID NO: 1148 - protein, 8 aa, synthetic construct
  REGION 1..8: note = Description of Artificial Sequence: Synthetic peptide
FVLTSHTV

SEQ ID NO: 1149 - protein, 9 aa, synthetic construct
  REGION 1..9: note = Description of Artificial Sequence: Synthetic peptide
FVMMSAPPA

SEQ ID NO: 1150 - protein, 9 aa, synthetic construct
  REGION 1..9: note = Description of Artificial Sequence: Synthetic peptide
FVNLDNLRA

SEQ ID NO: 1151 - protein, 11 aa, synthetic construct
  REGION 1..11: note = Description of Artificial Sequence: Synthetic peptide
FVNLKQLPFFY

SEQ ID NO: 1152 - protein, 12 aa, synthetic construct
  REGION 1..12: note = Description of Artificial Sequence: Synthetic peptide
FVNLKQLPFFYY

SEQ ID NO: 1153 - protein, 8 aa, synthetic construct
  REGION 1..8: note = Description of Artificial Sequence: Synthetic peptide
FVRATATI

SEQ ID NO: 1154 - protein, 10 aa, synthetic construct
  REGION 1..10: note = Description of Artificial Sequence: Synthetic peptide
FVSDADSTLI

SEQ ID NO: 1155 - protein, 10 aa, synthetic construct
  REGION 1..10: note = Description of Artificial Sequence: Synthetic peptide
FVSEETGTLI

SEQ ID NO: 1156 - protein, 10 aa, synthetic construct
  REGION 1..10: note = Description of Artificial Sequence: Synthetic peptide
FVSGNCDVVI

SEQ ID NO: 1157 - protein, 8 aa, synthetic construct
  REGION 1..8: note = Description of Artificial Sequence: Synthetic peptide
FVSLAIDA

SEQ ID NO: 1158 - protein, 10 aa, synthetic construct
  REGION 1..10: note = Description of Artificial Sequence: Synthetic peptide
FVSNGTHWFV

SEQ ID NO: 1159 - protein, 11 aa, synthetic construct
  REGION 1..11: note = Description of Artificial Sequence: Synthetic peptide
FVTDTPKGPKV

SEQ ID NO: 1160 - protein, 9 aa, synthetic construct
  REGION 1..9: note = Description of Artificial Sequence: Synthetic peptide
FVTNVNASS

SEQ ID NO: 1161 - protein, 8 aa, synthetic construct
  REGION 1..8: note = Description of Artificial Sequence: Synthetic peptide
FVVEVVDK

SEQ ID NO: 1162 - protein, 8 aa, synthetic construct
  REGION 1..8: note = Description of Artificial Sequence: Synthetic peptide
FVVFLLVT

SEQ ID NO: 1163 - protein, 10 aa, synthetic construct
  REGION 1..10: note = Description of Artificial Sequence: Synthetic peptide
FVVFLLVTLA

SEQ ID NO: 1164 - protein, 9 aa, synthetic construct
  REGION 1..9: note = Description of Artificial Sequence: Synthetic peptide
FVVKRHTFS

SEQ ID NO: 1165 - protein, 11 aa, synthetic construct
  REGION 1..11: note = Description of Artificial Sequence: Synthetic peptide
FVVKRHTFSNY

SEQ ID NO: 1166 - protein, 8 aa, synthetic construct
  REGION 1..8: note = Description of Artificial Sequence: Synthetic peptide
FVVPGLPG

SEQ ID NO: 1167 - protein, 12 aa, synthetic construct
  REGION 1..12: note = Description of Artificial Sequence: Synthetic peptide
FVVPGLPGTILR

SEQ ID NO: 1168 - protein, 12 aa, synthetic construct
  REGION 1..12: note = Description of Artificial Sequence: Synthetic peptide
FVVSTGYHFREL

SEQ ID NO: 1169 - protein, 9 aa, synthetic construct
  REGION 1..9: note = Description of Artificial Sequence: Synthetic peptide
FYDAQPCSD

SEQ ID NO: 1170 - protein, 11 aa, synthetic construct
  REGION 1..11: note = Description of Artificial Sequence: Synthetic peptide
FYDFAVSKGFF

SEQ ID NO: 1171 - protein, 8 aa, synthetic construct
  REGION 1..8: note = Description of Artificial Sequence: Synthetic peptide
FYFYTSKT

SEQ ID NO: 1172 - protein, 9 aa, synthetic construct
  REGION 1..9: note = Description of Artificial Sequence: Synthetic peptide
FYGPFVDRQ

SEQ ID NO: 1173 - protein, 10 aa, synthetic construct
  REGION 1..10: note = Description of Artificial Sequence: Synthetic peptide
FYILPSIISN

SEQ ID NO: 1174 - protein, 11 aa, synthetic construct
  REGION 1..11: note = Description of Artificial Sequence: Synthetic peptide
FYKENSYTTTI

SEQ ID NO: 1175 - protein, 9 aa, synthetic construct
  REGION 1..9: note = Description of Artificial Sequence: Synthetic peptide
FYKGVITHD

SEQ ID NO: 1176 - protein, 8 aa, synthetic construct
  REGION 1..8: note = Description of Artificial Sequence: Synthetic peptide
FYLTNDVS

SEQ ID NO: 1177 - protein, 10 aa, synthetic construct
  REGION 1..10: note = Description of Artificial Sequence: Synthetic peptide
FYPPDEDEEE

SEQ ID NO: 1178 - protein, 8 aa, synthetic construct
  REGION 1..8: note = Description of Artificial Sequence: Synthetic peptide
FYSKWYIR

SEQ ID NO: 1179 - protein, 11 aa, synthetic construct
  REGION 1..11: note = Description of Artificial Sequence: Synthetic peptide
FYSYATHSDKF

SEQ ID NO: 1180 - protein, 8 aa, synthetic construct
  REGION 1..8: note = Description of Artificial Sequence: Synthetic peptide
FYVYSRVK

SEQ ID NO: 1181 - protein, 10 aa, synthetic construct
  REGION 1..10: note = Description of Artificial Sequence: Synthetic peptide
GAAAYYVGYL

SEQ ID NO: 1182 - protein, 9 aa, synthetic construct
  REGION 1..9: note = Description of Artificial Sequence: Synthetic peptide
GAALQIPFA

SEQ ID NO: 1183 - protein, 8 aa, synthetic construct
  REGION 1..8: note = Description of Artificial Sequence: Synthetic peptide
GADLKSFD

SEQ ID NO: 1184 - protein, 9 aa, synthetic construct
  REGION 1..9: note = Description of Artificial Sequence: Synthetic peptide
GADVTKIKP

SEQ ID NO: 1185 - protein, 9 aa, synthetic construct
  REGION 1..9: note = Description of Artificial Sequence: Synthetic peptide
GAISSVLND

SEQ ID NO: 1186 - protein, 11 aa, synthetic construct
  REGION 1..11: note = Description of Artificial Sequence: Synthetic peptide
GAISSVLNDIL

SEQ ID NO: 1187 - protein, 9 aa, synthetic construct
  REGION 1..9: note = Description of Artificial Sequence: Synthetic peptide
GALDISASI

SEQ ID NO: 1188 - protein, 8 aa, synthetic construct
  REGION 1..8: note = Description of Artificial Sequence: Synthetic peptide
GATTCGYL

SEQ ID NO: 1189 - protein, 10 aa, synthetic construct
  REGION 1..10: note = Description of Artificial Sequence: Synthetic peptide
GAVILRGHLR

SEQ ID NO: 1190 - protein, 10 aa, synthetic construct
  REGION 1..10: note = Description of Artificial Sequence: Synthetic peptide
GAWNIGEQKS

SEQ ID NO: 1191 - protein, 10 aa, synthetic construct
  REGION 1..10: note = Description of Artificial Sequence: Synthetic peptide
GCDVTDVTQL

SEQ ID NO: 1192 - protein, 11 aa, synthetic construct
  REGION 1..11: note = Description of Artificial Sequence: Synthetic peptide
GCDVTDVTQLY

SEQ ID NO: 1193 - protein, 8 aa, synthetic construct
  REGION 1..8: note = Description of Artificial Sequence: Synthetic peptide
GCINANQV

SEQ ID NO: 1194 - protein, 8 aa, synthetic construct
  REGION 1..8: note = Description of Artificial Sequence: Synthetic peptide
GCVPLNII

SEQ ID NO: 1195 - protein, 10 aa, synthetic construct
  REGION 1..10: note = Description of Artificial Sequence: Synthetic peptide
GCVPLNIIPL

SEQ ID NO: 1196 - protein, 8 aa, synthetic construct
  REGION 1..8: note = Description of Artificial Sequence: Synthetic peptide
GDAALALL

SEQ ID NO: 1197 - protein, 9 aa, synthetic construct
  REGION 1..9: note = Description of Artificial Sequence: Synthetic peptide
GDAALALLL

SEQ ID NO: 1198 - protein, 8 aa, synthetic construct
  REGION 1..8: note = Description of Artificial Sequence: Synthetic peptide
GDCEEEEF

SEQ ID NO: 1199 - protein, 9 aa, synthetic construct
  REGION 1..9: note = Description of Artificial Sequence: Synthetic peptide
GDELGTDPY

SEQ ID NO: 1200 - protein, 9 aa, synthetic construct
  REGION 1..9: note = Description of Artificial Sequence: Synthetic peptide
GDELKINAA

SEQ ID NO: 1201 - protein, 8 aa, synthetic construct
  REGION 1..8: note = Description of Artificial Sequence: Synthetic peptide
GDFIQTTP

SEQ ID NO: 1202 - protein, 8 aa, synthetic construct
  REGION 1..8: note = Description of Artificial Sequence: Synthetic peptide
GDFLHFLP

SEQ ID NO: 1203 - protein, 9 aa, synthetic construct
  REGION 1..9: note = Description of Artificial Sequence: Synthetic peptide
GDFLHFLPR

SEQ ID NO: 1204 - protein, 10 aa, synthetic construct
  REGION 1..10: note = Description of Artificial Sequence: Synthetic peptide
GDFLHFLPRV

SEQ ID NO: 1205 - protein, 8 aa, synthetic construct
  REGION 1..8: note = Description of Artificial Sequence: Synthetic peptide
GDFVKATC

SEQ ID NO: 1206 - protein, 8 aa, synthetic construct
  REGION 1..8: note = Description of Artificial Sequence: Synthetic peptide
GDIAARDL

SEQ ID NO: 1207 - protein, 9 aa, synthetic construct
  REGION 1..9: note = Description of Artificial Sequence: Synthetic peptide
GDMVPHISR

SEQ ID NO: 1208 - protein, 8 aa, synthetic construct
  REGION 1..8: note = Description of Artificial Sequence: Synthetic peptide
GDQFKHLI

SEQ ID NO: 1209 - protein, 8 aa, synthetic construct
  REGION 1..8: note = Description of Artificial Sequence: Synthetic peptide
GDSAEVAV

SEQ ID NO: 1210 - protein, 8 aa, synthetic construct
  REGION 1..8: note = Description of Artificial Sequence: Synthetic peptide
GDSCNNYM

SEQ ID NO: 1211 - protein, 8 aa, synthetic construct
  REGION 1..8: note = Description of Artificial Sequence: Synthetic peptide
GDSEVVLK

SEQ ID NO: 1212 - protein, 10 aa, synthetic construct
  REGION 1..10: note = Description of Artificial Sequence: Synthetic peptide
GDSEVVLKKL

SEQ ID NO: 1213 - protein, 8 aa, synthetic construct
  REGION 1..8: note = Description of Artificial Sequence: Synthetic peptide
GDSVEEVL

SEQ ID NO: 1214 - protein, 9 aa, synthetic construct
  REGION 1..9: note = Description of Artificial Sequence: Synthetic peptide
GDVRETMSY

SEQ ID NO: 1215 - protein, 8 aa, synthetic construct
  REGION 1..8: note = Description of Artificial Sequence: Synthetic peptide
GDVVQEGV

SEQ ID NO: 1216 - protein, 9 aa, synthetic construct
  REGION 1..9: note = Description of Artificial Sequence: Synthetic peptide
GDYFVLTSH

SEQ ID NO: 1217 - protein, 11 aa, synthetic construct
  REGION 1..11: note = Description of Artificial Sequence: Synthetic peptide
GEGSEGLNDNL

SEQ ID NO: 1218 - protein, 12 aa, synthetic construct
  REGION 1..12: note = Description of Artificial Sequence: Synthetic peptide
GEGSEGLNDNLL

SEQ ID NO: 1219 - protein, 8 aa, synthetic construct
  REGION 1..8: note = Description of Artificial Sequence: Synthetic peptide
GEIPVAYR

SEQ ID NO: 1220 - protein, 10 aa, synthetic construct
  REGION 1..10: note = Description of Artificial Sequence: Synthetic peptide
GEQKSILSPL

SEQ ID NO: 1221 - protein, 11 aa, synthetic construct
  REGION 1..11: note = Description of Artificial Sequence: Synthetic peptide
GETFVTHSKGL

SEQ ID NO: 1222 - protein, 10 aa, synthetic construct
  REGION 1..10: note = Description of Artificial Sequence: Synthetic peptide
GETLPTEVLT

SEQ ID NO: 1223 - protein, 8 aa, synthetic construct
  REGION 1..8: note = Description of Artificial Sequence: Synthetic peptide
GEVFNATR

SEQ ID NO: 1224 - protein, 12 aa, synthetic construct
  REGION 1..12: note = Description of Artificial Sequence: Synthetic peptide
GEVPVSIINNTV

SEQ ID NO: 1225 - protein, 12 aa, synthetic construct
  REGION 1..12: note = Description of Artificial Sequence: Synthetic peptide
GEYSHVVAFNTL

SEQ ID NO: 1226 - protein, 10 aa, synthetic construct
  REGION 1..10: note = Description of Artificial Sequence: Synthetic peptide
GEYTFEKGDY

SEQ ID NO: 1227 - protein, 8 aa, synthetic construct
  REGION 1..8: note = Description of Artificial Sequence: Synthetic peptide
GFDVEGCH

SEQ ID NO: 1228 - protein, 8 aa, synthetic construct
  REGION 1..8: note = Description of Artificial Sequence: Synthetic peptide
GFDYVYNP

SEQ ID NO: 1229 - protein, 9 aa, synthetic construct
  REGION 1..9: note = Description of Artificial Sequence: Synthetic peptide
GFDYVYNPF

SEQ ID NO: 1230 - protein, 10 aa, synthetic construct
  REGION 1..10: note = Description of Artificial Sequence: Synthetic peptide
GFDYVYNPFM

SEQ ID NO: 1231 - protein, 11 aa, synthetic construct
  REGION 1..11: note = Description of Artificial Sequence: Synthetic peptide
GFFKEGSSVEL

SEQ ID NO: 1232 - protein, 8 aa, synthetic construct
  REGION 1..8: note = Description of Artificial Sequence: Synthetic peptide
GFLFLTWI

SEQ ID NO: 1233 - protein, 8 aa, synthetic construct
  REGION 1..8: note = Description of Artificial Sequence: Synthetic peptide
GFQPTNGV

SEQ ID NO: 1234 - protein, 8 aa, synthetic construct
  REGION 1..8: note = Description of Artificial Sequence: Synthetic peptide
GFSALEPL

SEQ ID NO: 1235 - protein, 9 aa, synthetic construct
  REGION 1..9: note = Description of Artificial Sequence: Synthetic peptide
GFSTGVNLV

SEQ ID NO: 1236 - protein, 8 aa, synthetic construct
  REGION 1..8: note = Description of Artificial Sequence: Synthetic peptide
GFTLKNTV

SEQ ID NO: 1237 - protein, 8 aa, synthetic construct
  REGION 1..8: note = Description of Artificial Sequence: Synthetic peptide
GGAYTRYV

SEQ ID NO: 1238 - protein, 9 aa, synthetic construct
  REGION 1..9: note = Description of Artificial Sequence: Synthetic peptide
GGDGKMKDL

SEQ ID NO: 1239 - protein, 8 aa, synthetic construct
  REGION 1..8: note = Description of Artificial Sequence: Synthetic peptide
GGFNFSQI

SEQ ID NO: 1240 - protein, 8 aa, synthetic construct
  REGION 1..8: note = Description of Artificial Sequence: Synthetic peptide
GGIVAIVV

SEQ ID NO: 1241 - protein, 9 aa, synthetic construct
  REGION 1..9: note = Description of Artificial Sequence: Synthetic peptide
GGIVAIVVT

SEQ ID NO: 1242 - protein, 9 aa, synthetic construct
  REGION 1..9: note = Description of Artificial Sequence: Synthetic peptide
GGKIVNNWL

SEQ ID NO: 1243 - protein, 8 aa, synthetic construct
  REGION 1..8: note = Description of Artificial Sequence: Synthetic peptide
GGKPCIKV

SEQ ID NO: 1244 - protein, 9 aa, synthetic construct
  REGION 1..9: note = Description of Artificial Sequence: Synthetic peptide
GGNYNYLYR

SEQ ID NO: 1245 - protein, 9 aa, synthetic construct
  REGION 1..9: note = Description of Artificial Sequence: Synthetic peptide
GGQPITNCV

SEQ ID NO: 1246 - protein, 9 aa, synthetic construct
  REGION 1..9: note = Description of Artificial Sequence: Synthetic peptide
GGRFVLALL

SEQ ID NO: 1247 - protein, 8 aa, synthetic construct
  REGION 1..8: note = Description of Artificial Sequence: Synthetic peptide
GGSVAIKI

SEQ ID NO: 1248 - protein, 9 aa, synthetic construct
  REGION 1..9: note = Description of Artificial Sequence: Synthetic peptide
GGTTEMLAK

SEQ ID NO: 1249 - protein, 9 aa, synthetic construct
  REGION 1..9: note = Description of Artificial Sequence: Synthetic peptide
GGVAGALNK

SEQ ID NO: 1250 - protein, 8 aa, synthetic construct
  REGION 1..8: note = Description of Artificial Sequence: Synthetic peptide
GHFAWWTA

SEQ ID NO: 1251 - protein, 10 aa, synthetic construct
  REGION 1..10: note = Description of Artificial Sequence: Synthetic peptide
GHFAWWTAFV

SEQ ID NO: 1252 - protein, 9 aa, synthetic construct
  REGION 1..9: note = Description of Artificial Sequence: Synthetic peptide
GHHLGRCDI

SEQ ID NO: 1253 - protein, 10 aa, synthetic construct
  REGION 1..10: note = Description of Artificial Sequence: Synthetic peptide
GHMLDMYSVM

SEQ ID NO: 1254 - protein, 11 aa, synthetic construct
  REGION 1..11: note = Description of Artificial Sequence: Synthetic peptide
GHMLDMYSVML

SEQ ID NO: 1255 - protein, 8 aa, synthetic construct
  REGION 1..8: note = Description of Artificial Sequence: Synthetic peptide
GHSMQNCV

SEQ ID NO: 1256 - protein, 11 aa, synthetic construct
  REGION 1..11: note = Description of Artificial Sequence: Synthetic peptide
GHSMQNCVLKL

SEQ ID NO: 1257 - protein, 8 aa, synthetic construct
  REGION 1..8: note = Description of Artificial Sequence: Synthetic peptide
GHTDLMAA

SEQ ID NO: 1258 - protein, 10 aa, synthetic construct
  REGION 1..10: note = Description of Artificial Sequence: Synthetic peptide
GHTDLMAAYV

SEQ ID NO: 1259 - protein, 9 aa, synthetic construct
  REGION 1..9: note = Description of Artificial Sequence: Synthetic peptide
GHVETFYPK

SEQ ID NO: 1260 - protein, 8 aa, synthetic construct
  REGION 1..8: note = Description of Artificial Sequence: Synthetic peptide
GHVMVELV

SEQ ID NO: 1261 - protein, 12 aa, synthetic construct
  REGION 1..12: note = Description of Artificial Sequence: Synthetic peptide
GIDLDEWSMATY

SEQ ID NO: 1262 - protein, 11 aa, synthetic construct
  REGION 1..11: note = Description of Artificial Sequence: Synthetic peptide
GIKIQEGVVDY

SEQ ID NO: 1263 - protein, 8 aa, synthetic construct
  REGION 1..8: note = Description of Artificial Sequence: Synthetic peptide
GIPKDMTY

SEQ ID NO: 1264 - protein, 9 aa, synthetic construct
  REGION 1..9: note = Description of Artificial Sequence: Synthetic peptide
GIVAIVVTC

SEQ ID NO: 1265 - protein, 8 aa, synthetic construct
  REGION 1..8: note = Description of Artificial Sequence: Synthetic peptide
GIVNNTVY

SEQ ID NO: 1266 - protein, 8 aa, synthetic construct
  REGION 1..8: note = Description of Artificial Sequence: Synthetic peptide
GIYQTSNF

SEQ ID NO: 1267 - protein, 9 aa, synthetic construct
  REGION 1..9: note = Description of Artificial Sequence: Synthetic peptide
GKASCTLSE

SEQ ID NO: 1268 - protein, 11 aa, synthetic construct
  REGION 1..11: note = Description of Artificial Sequence: Synthetic peptide
GKASCTLSEQL

SEQ ID NO: 1269 - protein, 11 aa, synthetic construct
  REGION 1..11: note = Description of Artificial Sequence: Synthetic peptide
GKFCLEASFNY

SEQ ID NO: 1270 - protein, 9 aa, synthetic construct
  REGION 1..9: note = Description of Artificial Sequence: Synthetic peptide
GKGYHLMSF

SEQ ID NO: 1271 - protein, 8 aa, synthetic construct
  REGION 1..8: note = Description of Artificial Sequence: Synthetic peptide
GKIADYNY

SEQ ID NO: 1272 - protein, 10 aa, synthetic construct
  REGION 1..10: note = Description of Artificial Sequence: Synthetic peptide
GKIADYNYKL

SEQ ID NO: 1273 - protein, 9 aa, synthetic construct
  REGION 1..9: note = Description of Artificial Sequence: Synthetic peptide
GKIQDSLSS

SEQ ID NO: 1274 - protein, 10 aa, synthetic construct
  REGION 1..10: note = Description of Artificial Sequence: Synthetic peptide
GKIQDSLSST

SEQ ID NO: 1275 - protein, 8 aa, synthetic construct
  REGION 1..8: note = Description of Artificial Sequence: Synthetic peptide
GKIVNNWL

SEQ ID NO: 1276 - protein, 11 aa, synthetic construct
  REGION 1..11: note = Description of Artificial Sequence: Synthetic peptide
GKIVNNWLKQL

SEQ ID NO: 1277 - protein, 11 aa, synthetic construct
  REGION 1..11: note = Description of Artificial Sequence: Synthetic peptide
GKMKDLSPRWY

SEQ ID NO: 1278 - protein, 9 aa, synthetic construct
  REGION 1..9: note = Description of Artificial Sequence: Synthetic peptide
GKPCIKVAT

SEQ ID NO: 1279 - protein, 10 aa, synthetic construct
  REGION 1..10: note = Description of Artificial Sequence: Synthetic peptide
GKPREQIDGY

SEQ ID NO: 1280 - protein, 8 aa, synthetic construct
  REGION 1..8: note = Description of Artificial Sequence: Synthetic peptide
GKPVPYCY

SEQ ID NO: 1281 - protein, 9 aa, synthetic construct
  REGION 1..9: note = Description of Artificial Sequence: Synthetic peptide
GKSHFAIGL

SEQ ID NO: 1282 - protein, 9 aa, synthetic construct
  REGION 1..9: note = Description of Artificial Sequence: Synthetic peptide
GKVEGCMVQ

SEQ ID NO: 1283 - protein, 10 aa, synthetic construct
  REGION 1..10: note = Description of Artificial Sequence: Synthetic peptide
GKVEGCMVQV

SEQ ID NO: 1284 - protein, 10 aa, synthetic construct
  REGION 1..10: note = Description of Artificial Sequence: Synthetic peptide
GKYEQYIKWP

SEQ ID NO: 1285 - protein, 12 aa, synthetic construct
  REGION 1..12: note = Description of Artificial Sequence: Synthetic peptide
GKYEQYIKWPWY

SEQ ID NO: 1286 - protein, 10 aa, synthetic construct
  REGION 1..10: note = Description of Artificial Sequence: Synthetic peptide
GKYVQIPTTC

SEQ ID NO: 1287 - protein, 10 aa, synthetic construct
  REGION 1..10: note = Description of Artificial Sequence: Synthetic peptide
GLAAIMQLFF

SEQ ID NO: 1288 - protein, 11 aa, synthetic construct
  REGION 1..11: note = Description of Artificial Sequence: Synthetic peptide
GLCVDIPGIPK

SEQ ID NO: 1289 - protein, 10 aa, synthetic construct
  REGION 1..10: note = Description of Artificial Sequence: Synthetic peptide
GLFCLLNRYF

SEQ ID NO: 1290 - protein, 8 aa, synthetic construct
  REGION 1..8: note = Description of Artificial Sequence: Synthetic peptide
GLHLLIGL

SEQ ID NO: 1291 - protein, 9 aa, synthetic construct
  REGION 1..9: note = Description of Artificial Sequence: Synthetic peptide
GLHLLIGLA

SEQ ID NO: 1292 - protein, 10 aa, synthetic construct
  REGION 1..10: note = Description of Artificial Sequence: Synthetic peptide
GLHLLIGLAK

SEQ ID NO: 1293 - protein, 8 aa, synthetic construct
  REGION 1..8: note = Description of Artificial Sequence: Synthetic peptide
GLHPTQAP

SEQ ID NO: 1294 - protein, 9 aa, synthetic construct
  REGION 1..9: note = Description of Artificial Sequence: Synthetic peptide
GLKTILRKG

SEQ ID NO: 1295 - protein, 10 aa, synthetic construct
  REGION 1..10: note = Description of Artificial Sequence: Synthetic peptide
GLKTLATHGL

SEQ ID NO: 1296 - protein, 10 aa, synthetic construct
  REGION 1..10: note = Description of Artificial Sequence: Synthetic peptide
GLLMPLKAPK

SEQ ID NO: 1297 - protein, 9 aa, synthetic construct
  REGION 1..9: note = Description of Artificial Sequence: Synthetic peptide
GLNGYTVEE

SEQ ID NO: 1298 - protein, 8 aa, synthetic construct
  REGION 1..8: note = Description of Artificial Sequence: Synthetic peptide
GLPGTILR

SEQ ID NO: 1299 - protein, 8 aa, synthetic construct
  REGION 1..8: note = Description of Artificial Sequence: Synthetic peptide
GLTGTGVL

SEQ ID NO: 1300 - protein, 9 aa, synthetic construct
  REGION 1..9: note = Description of Artificial Sequence: Synthetic peptide
GLTGTGVLT

SEQ ID NO: 1301 - protein, 8 aa, synthetic construct
  REGION 1..8: note = Description of Artificial Sequence: Synthetic peptide
GLVAEWFL

SEQ ID NO: 1302 - protein, 9 aa, synthetic construct
  REGION 1..9: note = Description of Artificial Sequence: Synthetic peptide
GLVAEWFLA

SEQ ID NO: 1303 - protein, 10 aa, synthetic construct
  REGION 1..10: note = Description of Artificial Sequence: Synthetic peptide
GLWLDDVVYC

SEQ ID NO: 1304 - protein, 9 aa, synthetic construct
  REGION 1..9: note = Description of Artificial Sequence: Synthetic peptide
GLYRKCVKS

SEQ ID NO: 1305 - protein, 10 aa, synthetic construct
  REGION 1..10: note = Description of Artificial Sequence: Synthetic peptide
GLYRKCVKSR

SEQ ID NO: 1306 - protein, 9 aa, synthetic construct
  REGION 1..9: note = Description of Artificial Sequence: Synthetic peptide
GMSRIGMEV

SEQ ID NO: 1307 - protein, 9 aa, synthetic construct
  REGION 1..9: note = Description of Artificial Sequence: Synthetic peptide
GMVLGSLAA

SEQ ID NO: 1308 - protein, 10 aa, synthetic construct
  REGION 1..10: note = Description of Artificial Sequence: Synthetic peptide
GNAAISDYDY

SEQ ID NO: 1309 - protein, 9 aa, synthetic construct
  REGION 1..9: note = Description of Artificial Sequence: Synthetic peptide
GNCDVVIGI

SEQ ID NO: 1310 - protein, 8 aa, synthetic construct
  REGION 1..8: note = Description of Artificial Sequence: Synthetic peptide
GNFGDQEL

SEQ ID NO: 1311 - protein, 9 aa, synthetic construct
  REGION 1..9: note = Description of Artificial Sequence: Synthetic peptide
GNFKVTKGK

SEQ ID NO: 1312 - protein, 8 aa, synthetic construct
  REGION 1..8: note = Description of Artificial Sequence: Synthetic peptide
GNFYGPFV

SEQ ID NO: 1313 - protein, 9 aa, synthetic construct
  REGION 1..9: note = Description of Artificial Sequence: Synthetic peptide
GNFYGPFVD

SEQ ID NO: 1314 - protein, 8 aa, synthetic construct
  REGION 1..8: note = Description of Artificial Sequence: Synthetic peptide
GNVQLRVI

SEQ ID NO: 1315 - protein, 9 aa, synthetic construct
  REGION 1..9: note = Description of Artificial Sequence: Synthetic peptide
GPDGYPLEC

SEQ ID NO: 1316 - protein, 8 aa, synthetic construct
  REGION 1..8: note = Description of Artificial Sequence: Synthetic peptide
GPEAGLPY

SEQ ID NO: 1317 - protein, 9 aa, synthetic construct
  REGION 1..9: note = Description of Artificial Sequence: Synthetic peptide
GPEQTQGNF

SEQ ID NO: 1318 - protein, 9 aa, synthetic construct
  REGION 1..9: note = Description of Artificial Sequence: Synthetic peptide
GPITDVFYK

SEQ ID NO: 1319 - protein, 10 aa, synthetic construct
  REGION 1..10: note = Description of Artificial Sequence: Synthetic peptide
GPKQASLNGV

SEQ ID NO: 1320 - protein, 12 aa, synthetic construct
  REGION 1..12: note = Description of Artificial Sequence: Synthetic peptide
GPKQASLNGVTL

SEQ ID NO: 1321 - protein, 8 aa, synthetic construct
  REGION 1..8: note = Description of Artificial Sequence: Synthetic peptide
GPKVKYLY

SEQ ID NO: 1322 - protein, 10 aa, synthetic construct
  REGION 1..10: note = Description of Artificial Sequence: Synthetic peptide
GPLKVGGSCV

SEQ ID NO: 1323 - protein, 11 aa, synthetic construct
  REGION 1..11: note = Description of Artificial Sequence: Synthetic peptide
GPLKVGGSCVL

SEQ ID NO: 1324 - protein, 8 aa, synthetic construct
  REGION 1..8: note = Description of Artificial Sequence: Synthetic peptide
GPLVRKIF

SEQ ID NO: 1325 - protein, 9 aa, synthetic construct
  REGION 1..9: note = Description of Artificial Sequence: Synthetic peptide
GPNVNKGED

SEQ ID NO: 1326 - protein, 8 aa, synthetic construct
  REGION 1..8: note = Description of Artificial Sequence: Synthetic peptide
GQAITVTP

SEQ ID NO: 1327 - protein, 9 aa, synthetic construct
  REGION 1..9: note = Description of Artificial Sequence: Synthetic peptide
GQINDMILS

SEQ ID NO: 1328 - protein, 9 aa, synthetic construct
  REGION 1..9: note = Description of Artificial Sequence: Synthetic peptide
GQIVTCAKE

SEQ ID NO: 1329 - protein, 10 aa, synthetic construct
  REGION 1..10: note = Description of Artificial Sequence: Synthetic peptide
GQKTYERHSL

SEQ ID NO: 1330 - protein, 9 aa, synthetic construct
  REGION 1..9: note = Description of Artificial Sequence: Synthetic peptide
GQQDGSEDN

SEQ ID NO: 1331 - protein, 8 aa, synthetic construct
  REGION 1..8: note = Description of Artificial Sequence: Synthetic peptide
GQQGEVPV

SEQ ID NO: 1332 - protein, 9 aa, synthetic construct
  REGION 1..9: note = Description of Artificial Sequence: Synthetic peptide
GQQGEVPVS

SEQ ID NO: 1333 - protein, 10 aa, synthetic construct
  REGION 1..10: note = Description of Artificial Sequence: Synthetic peptide
GQQGEVPVSI

SEQ ID NO: 1334 - protein, 11 aa, synthetic construct
  REGION 1..11: note = Description of Artificial Sequence: Synthetic peptide
GQQQQGQTVTK

SEQ ID NO: 1335 - protein, 9 aa, synthetic construct
  REGION 1..9: note = Description of Artificial Sequence: Synthetic peptide
GQQQTTLKG

SEQ ID NO: 1336 - protein, 11 aa, synthetic construct
  REGION 1..11: note = Description of Artificial Sequence: Synthetic peptide
GQSTQLGIEFL

SEQ ID NO: 1337 - protein, 9 aa, synthetic construct
  REGION 1..9: note = Description of Artificial Sequence: Synthetic peptide
GQTFSVLAC

SEQ ID NO: 1338 - protein, 10 aa, synthetic construct
  REGION 1..10: note = Description of Artificial Sequence: Synthetic peptide
GQTFSVLACY

SEQ ID NO: 1339 - protein, 11 aa, synthetic construct
  REGION 1..11: note = Description of Artificial Sequence: Synthetic peptide
GQTGKIADYNY

SEQ ID NO: 1340 - protein, 8 aa, synthetic construct
  REGION 1..8: note = Description of Artificial Sequence: Synthetic peptide
GQTVTKKS

SEQ ID NO: 1341 - protein, 8 aa, synthetic construct
  REGION 1..8: note = Description of Artificial Sequence: Synthetic peptide
GQVDLFRN

SEQ ID NO: 1342 - protein, 10 aa, synthetic construct
  REGION 1..10: note = Description of Artificial Sequence: Synthetic peptide
GQVDLFRNAR

SEQ ID NO: 1343 - protein, 9 aa, synthetic construct
  REGION 1..9: note = Description of Artificial Sequence: Synthetic peptide
GQVFGLYKN

SEQ ID NO: 1344 - protein, 10 aa, synthetic construct
  REGION 1..10: note = Description of Artificial Sequence: Synthetic peptide
GRCDIKDLPK

SEQ ID NO: 1345 - protein, 9 aa, synthetic construct
  REGION 1..9: note = Description of Artificial Sequence: Synthetic peptide
GRDIADTTD

SEQ ID NO: 1346 - protein, 9 aa, synthetic construct
  REGION 1..9: note = Description of Artificial Sequence: Synthetic peptide
GRFVLALLS

SEQ ID NO: 1347 - protein, 10 aa, synthetic construct
  REGION 1..10: note = Description of Artificial Sequence: Synthetic peptide
GRFVLALLSD

SEQ ID NO: 1348 - protein, 8 aa, synthetic construct
  REGION 1..8: note = Description of Artificial Sequence: Synthetic peptide
GRLIIREN

SEQ ID NO: 1349 - protein, 9 aa, synthetic construct
  REGION 1..9: note = Description of Artificial Sequence: Synthetic peptide
GRLIIRENN

SEQ ID NO: 1350 - protein, 10 aa, synthetic construct
  REGION 1..10: note = Description of Artificial Sequence: Synthetic peptide
GRLIIRENNR

SEQ ID NO: 1351 - protein, 10 aa, synthetic construct
  REGION 1..10: note = Description of Artificial Sequence: Synthetic peptide
GRLQSLQTYV

SEQ ID NO: 1352 - protein, 11 aa, synthetic construct
  REGION 1..11: note = Description of Artificial Sequence: Synthetic peptide
GRSGETLGVLV

SEQ ID NO: 1353 - protein, 9 aa, synthetic construct
  REGION 1..9: note = Description of Artificial Sequence: Synthetic peptide
GRTIAFGGC

SEQ ID NO: 1354 - protein, 10 aa, synthetic construct
  REGION 1..10: note = Description of Artificial Sequence: Synthetic peptide
GRTILGSALL

SEQ ID NO: 1355 - protein, 8 aa, synthetic construct
  REGION 1..8: note = Description of Artificial Sequence: Synthetic peptide
GRVDGQVD

SEQ ID NO: 1356 - protein, 11 aa, synthetic construct
  REGION 1..11: note = Description of Artificial Sequence: Synthetic peptide
GRVDGQVDLFR

SEQ ID NO: 1357 - protein, 9 aa, synthetic construct
  REGION 1..9: note = Description of Artificial Sequence: Synthetic peptide
GRWVLNNDY

SEQ ID NO: 1358 - protein, 10 aa, synthetic construct
  REGION 1..10: note = Description of Artificial Sequence: Synthetic peptide
GRWVLNNDYY

SEQ ID NO: 1359 - protein, 11 aa, synthetic construct
  REGION 1..11: note = Description of Artificial Sequence: Synthetic peptide
GRWVLNNDYYR

SEQ ID NO: 1360 - protein, 9 aa, synthetic construct
  REGION 1..9: note = Description of Artificial Sequence: Synthetic peptide
GRYMSALNH

SEQ ID NO: 1361 - protein, 10 aa, synthetic construct
  REGION 1..10: note = Description of Artificial Sequence: Synthetic peptide
GRYMSALNHT

SEQ ID NO: 1362 - protein, 11 aa, synthetic construct
  REGION 1..11: note = Description of Artificial Sequence: Synthetic peptide
GRYMSALNHTK

SEQ ID NO: 1363 - protein, 8 aa, synthetic construct
  REGION 1..8: note = Description of Artificial Sequence: Synthetic peptide
GSCGSVGF

SEQ ID NO: 1364 - protein, 9 aa, synthetic construct
  REGION 1..9: note = Description of Artificial Sequence: Synthetic peptide
GSEGLNDNL

SEQ ID NO: 1365 - protein, 9 aa, synthetic construct
  REGION 1..9: note = Description of Artificial Sequence: Synthetic peptide
GSEYDYVIF

SEQ ID NO: 1366 - protein, 8 aa, synthetic construct
  REGION 1..8: note = Description of Artificial Sequence: Synthetic peptide
GSGVPVVD

SEQ ID NO: 1367 - protein, 9 aa, synthetic construct
  REGION 1..9: note = Description of Artificial Sequence: Synthetic peptide
GSIHLYFDK

SEQ ID NO: 1368 - protein, 9 aa, synthetic construct
  REGION 1..9: note = Description of Artificial Sequence: Synthetic peptide
GSLIYSTAA

SEQ ID NO: 1369 - protein, 10 aa, synthetic construct
  REGION 1..10: note = Description of Artificial Sequence: Synthetic peptide
GSLVVRCSFY

SEQ ID NO: 1370 - protein, 10 aa, synthetic construct
  REGION 1..10: note = Description of Artificial Sequence: Synthetic peptide
GSLYVNKHAF

SEQ ID NO: 1371 - protein, 8 aa, synthetic construct
  REGION 1..8: note = Description of Artificial Sequence: Synthetic peptide
GSNVFQTR

SEQ ID NO: 1372 - protein, 9 aa, synthetic construct
  REGION 1..9: note = Description of Artificial Sequence: Synthetic peptide
GSRGGSQAS

SEQ ID NO: 1373 - protein, 10 aa, synthetic construct
  REGION 1..10: note = Description of Artificial Sequence: Synthetic peptide
GSSVELKHFF

SEQ ID NO: 1374 - protein, 8 aa, synthetic construct
  REGION 1..8: note = Description of Artificial Sequence: Synthetic peptide
GSTPCNGV

SEQ ID NO: 1375 - protein, 10 aa, synthetic construct
  REGION 1..10: note = Description of Artificial Sequence: Synthetic peptide
GTCGLVEVEK

SEQ ID NO: 1376 - protein, 10 aa, synthetic construct
  REGION 1..10: note = Description of Artificial Sequence: Synthetic peptide
GTDLEGNFYG

SEQ ID NO: 1377 - protein, 10 aa, synthetic construct
  REGION 1..10: note = Description of Artificial Sequence: Synthetic peptide
GTDTTITVNV

SEQ ID NO: 1378 - protein, 10 aa, synthetic construct
  REGION 1..10: note = Description of Artificial Sequence: Synthetic peptide
GTGVLTESNK

SEQ ID NO: 1379 - protein, 8 aa, synthetic construct
  REGION 1..8: note = Description of Artificial Sequence: Synthetic peptide
GTHHWLLL

SEQ ID NO: 1380 - protein, 11 aa, synthetic construct
  REGION 1..11: note = Description of Artificial Sequence: Synthetic peptide
GTHWFVTQRNF

SEQ ID NO: 1381 - protein, 9 aa, synthetic construct
  REGION 1..9: note = Description of Artificial Sequence: Synthetic peptide
GTILTRPLL

SEQ ID NO: 1382 - protein, 10 aa, synthetic construct
  REGION 1..10: note = Description of Artificial Sequence: Synthetic peptide
GTKRFDNPVL

SEQ ID NO: 1383 - protein, 8 aa, synthetic construct
  REGION 1..8: note = Description of Artificial Sequence: Synthetic peptide
GTLIVNSV

SEQ ID NO: 1384 - protein, 11 aa, synthetic construct
  REGION 1..11: note = Description of Artificial Sequence: Synthetic peptide
GTLIVNSVLLF

SEQ ID NO: 1385 - protein, 8 aa, synthetic construct
  REGION 1..8: note = Description of Artificial Sequence: Synthetic peptide
GTNGTKRF

SEQ ID NO: 1386 - protein, 9 aa, synthetic construct
  REGION 1..9: note = Description of Artificial Sequence: Synthetic peptide
GTNGTKRFD

SEQ ID NO: 1387 - protein, 12 aa, synthetic construct
  REGION 1..12: note = Description of Artificial Sequence: Synthetic peptide
GTNTSNQVAVLY

SEQ ID NO: 1388 - protein, 9 aa, synthetic construct
  REGION 1..9: note = Description of Artificial Sequence: Synthetic peptide
GTRNPANNA

SEQ ID NO: 1389 - protein, 8 aa, synthetic construct
  REGION 1..8: note = Description of Artificial Sequence: Synthetic peptide
GTSTDVVY

SEQ ID NO: 1390 - protein, 11 aa, synthetic construct
  REGION 1..11: note = Description of Artificial Sequence: Synthetic peptide
GTSTDVVYRAF

SEQ ID NO: 1391 - protein, 8 aa, synthetic construct
  REGION 1..8: note = Description of Artificial Sequence: Synthetic peptide
GTTEMLAK

SEQ ID NO: 1392 - protein, 8 aa, synthetic construct
  REGION 1..8: note = Description of Artificial Sequence: Synthetic peptide
GTTLPKGF

SEQ ID NO: 1393 - protein, 11 aa, synthetic construct
  REGION 1..11: note = Description of Artificial Sequence: Synthetic peptide
GTTSPISEHDY

SEQ ID NO: 1394 - protein, 9 aa, synthetic construct
  REGION 1..9: note = Description of Artificial Sequence: Synthetic peptide
GTTTYKLNV

SEQ ID NO: 1395 - protein, 10 aa, synthetic construct
  REGION 1..10: note = Description of Artificial Sequence: Synthetic peptide
GTVSWNLREM

SEQ ID NO: 1396 - protein, 8 aa, synthetic construct
  REGION 1..8: note = Description of Artificial Sequence: Synthetic peptide
GVAMPNLY

SEQ ID NO: 1397 - protein, 12 aa, synthetic construct
  REGION 1..12: note = Description of Artificial Sequence: Synthetic peptide
GVAPGTAVLRQW

SEQ ID NO: 1398 - protein, 10 aa, synthetic construct
  REGION 1..10: note = Description of Artificial Sequence: Synthetic peptide
GVCSMTDIAK

SEQ ID NO: 1399 - protein, 11 aa, synthetic construct
  REGION 1..11: note = Description of Artificial Sequence: Synthetic peptide
GVCSMTDIAKK

SEQ ID NO: 1400 - protein, 10 aa, synthetic construct
  REGION 1..10: note = Description of Artificial Sequence: Synthetic peptide
GVDIAANTVI

SEQ ID NO: 1401 - protein, 10 aa, synthetic construct
  REGION 1..10: note = Description of Artificial Sequence: Synthetic peptide
GVDVELFENK

SEQ ID NO: 1402 - protein, 9 aa, synthetic construct
  REGION 1..9: note = Description of Artificial Sequence: Synthetic peptide
GVEGFNCYF

SEQ ID NO: 1403 - protein, 8 aa, synthetic construct
  REGION 1..8: note = Description of Artificial Sequence: Synthetic peptide
GVEHVTFF

SEQ ID NO: 1404 - protein, 9 aa, synthetic construct
  REGION 1..9: note = Description of Artificial Sequence: Synthetic peptide
GVEHVTFFI

SEQ ID NO: 1405 - protein, 9 aa, synthetic construct
  REGION 1..9: note = Description of Artificial Sequence: Synthetic peptide
GVGYQPYRV

SEQ ID NO: 1406 - protein, 10 aa, synthetic construct
  REGION 1..10: note = Description of Artificial Sequence: Synthetic peptide
GVITHDVSSA

SEQ ID NO: 1407 - protein, 8 aa, synthetic construct
  REGION 1..8: note = Description of Artificial Sequence: Synthetic peptide
GVKHVYQL

SEQ ID NO: 1408 - protein, 11 aa, synthetic construct
  REGION 1..11: note = Description of Artificial Sequence: Synthetic peptide
GVKHVYQLRAR

SEQ ID NO: 1409 - protein, 8 aa, synthetic construct
  REGION 1..8: note = Description of Artificial Sequence: Synthetic peptide
GVLTAVVI

SEQ ID NO: 1410 - protein, 10 aa, synthetic construct
  REGION 1..10: note = Description of Artificial Sequence: Synthetic peptide
GVLTESNKKF

SEQ ID NO: 1411 - protein, 8 aa, synthetic construct
  REGION 1..8: note = Description of Artificial Sequence: Synthetic peptide
GVPVVDSY

SEQ ID NO: 1412 - protein, 10 aa, synthetic construct
  REGION 1..10: note = Description of Artificial Sequence: Synthetic peptide
GVQIPCTCGK

SEQ ID NO: 1413 - protein, 8 aa, synthetic construct
  REGION 1..8: note = Description of Artificial Sequence: Synthetic peptide
GVSAARLT

SEQ ID NO: 1414 - protein, 11 aa, synthetic construct
  REGION 1..11: note = Description of Artificial Sequence: Synthetic peptide
GVSICSTMTNR

SEQ ID NO: 1415 - protein, 9 aa, synthetic construct
  REGION 1..9: note = Description of Artificial Sequence: Synthetic peptide
GVSPTKLND

SEQ ID NO: 1416 - protein, 9 aa, synthetic construct
  REGION 1..9: note = Description of Artificial Sequence: Synthetic peptide
GVTFQSAVK

SEQ ID NO: 1417 - protein, 10 aa, synthetic construct
  REGION 1..10: note = Description of Artificial Sequence: Synthetic peptide
GVTRELMREL

SEQ ID NO: 1418 - protein, 10 aa, synthetic construct
  REGION 1..10: note = Description of Artificial Sequence: Synthetic peptide
GVVCTEIDPK

SEQ ID NO: 1419 - protein, 11 aa, synthetic construct
  REGION 1..11: note = Description of Artificial Sequence: Synthetic peptide
GVVDYGARFYF

SEQ ID NO: 1420 - protein, 10 aa, synthetic construct
  REGION 1..10: note = Description of Artificial Sequence: Synthetic peptide
GVVFLHVTYV

SEQ ID NO: 1421 - protein, 10 aa, synthetic construct
  REGION 1..10: note = Description of Artificial Sequence: Synthetic peptide
GVVGEGSEGL

SEQ ID NO: 1422 - protein, 8 aa, synthetic construct
  REGION 1..8: note = Description of Artificial Sequence: Synthetic peptide
GVVTTVMF

SEQ ID NO: 1423 - protein, 9 aa, synthetic construct
  REGION 1..9: note = Description of Artificial Sequence: Synthetic peptide
GVVTTVMFL

SEQ ID NO: 1424 - protein, 10 aa, synthetic construct
  REGION 1..10: note = Description of Artificial Sequence: Synthetic peptide
GVYDYLVSTQ

SEQ ID NO: 1425 - protein, 11 aa, synthetic construct
  REGION 1..11: note = Description of Artificial Sequence: Synthetic peptide
GVYYHKNNKSW

SEQ ID NO: 1426 - protein, 8 aa, synthetic construct
  REGION 1..8: note = Description of Artificial Sequence: Synthetic peptide
GWEIVKFI

SEQ ID NO: 1427 - protein, 10 aa, synthetic construct
  REGION 1..10: note = Description of Artificial Sequence: Synthetic peptide
GWLIVGVALL

SEQ ID NO: 1428 - protein, 11 aa, synthetic construct
  REGION 1..11: note = Description of Artificial Sequence: Synthetic peptide
GYKAIDGGVTR

SEQ ID NO: 1429 - protein, 10 aa, synthetic construct
  REGION 1..10: note = Description of Artificial Sequence: Synthetic peptide
GYKKPASREL

SEQ ID NO: 1430 - protein, 8 aa, synthetic construct
  REGION 1..8: note = Description of Artificial Sequence: Synthetic peptide
GYLNSTNV

SEQ ID NO: 1431 - protein, 11 aa, synthetic construct
  REGION 1..11: note = Description of Artificial Sequence: Synthetic peptide
GYLQPRTFLLK

SEQ ID NO: 1432 - protein, 12 aa, synthetic construct
  REGION 1..12: note = Description of Artificial Sequence: Synthetic peptide
GYLQPRTFLLKY

SEQ ID NO: 1433 - protein, 8 aa, synthetic construct
  REGION 1..8: note = Description of Artificial Sequence: Synthetic peptide
GYLTSSSK

SEQ ID NO: 1434 - protein, 9 aa, synthetic construct
  REGION 1..9: note = Description of Artificial Sequence: Synthetic peptide
GYREGYLNS

SEQ ID NO: 1435 - protein, 9 aa, synthetic construct
  REGION 1..9: note = Description of Artificial Sequence: Synthetic peptide
GYRVTKNSK

SEQ ID NO: 1436 - protein, 9 aa, synthetic construct
  REGION 1..9: note = Description of Artificial Sequence: Synthetic peptide
GYVMHANYI

SEQ ID NO: 1437 - protein, 10 aa, synthetic construct
  REGION 1..10: note = Description of Artificial Sequence: Synthetic peptide
HAASGNLLLD

SEQ ID NO: 1438 - protein, 9 aa, synthetic construct
  REGION 1..9: note = Description of Artificial Sequence: Synthetic peptide
HAAVDALCE

SEQ ID NO: 1439 - protein, 10 aa, synthetic construct
  REGION 1..10: note = Description of Artificial Sequence: Synthetic peptide
HADQLTPTWR

SEQ ID NO: 1440 - protein, 12 aa, synthetic construct
  REGION 1..12: note = Description of Artificial Sequence: Synthetic peptide
HADQLTPTWRVY

SEQ ID NO: 1441 - protein, 9 aa, synthetic construct
  REGION 1..9: note = Description of Artificial Sequence: Synthetic peptide
HAFHTPAFD

SEQ ID NO: 1442 - protein, 10 aa, synthetic construct
  REGION 1..10: note = Description of Artificial Sequence: Synthetic peptide
HAFLCLFLLP

SEQ ID NO: 1443 - protein, 10 aa, synthetic construct
  REGION 1..10: note = Description of Artificial Sequence: Synthetic peptide
HANEYRLYLD

SEQ ID NO: 1444 - protein, 9 aa, synthetic construct
  REGION 1..9: note = Description of Artificial Sequence: Synthetic peptide
HANLDSCKR

SEQ ID NO: 1445 - protein, 8 aa, synthetic construct
  REGION 1..8: note = Description of Artificial Sequence: Synthetic peptide
HDELTGHM

SEQ ID NO: 1446 - protein, 12 aa, synthetic construct
  REGION 1..12: note = Description of Artificial Sequence: Synthetic peptide
HDELTGHMLDMY

SEQ ID NO: 1447 - protein, 8 aa, synthetic construct
  REGION 1..8: note = Description of Artificial Sequence: Synthetic peptide
HDFFKFRI

SEQ ID NO: 1448 - protein, 9 aa, synthetic construct
  REGION 1..9: note = Description of Artificial Sequence: Synthetic peptide
HDFFKFRID

SEQ ID NO: 1449 - protein, 9 aa, synthetic construct
  REGION 1..9: note = Description of Artificial Sequence: Synthetic peptide
HDIGNPKAI

SEQ ID NO: 1450 - protein, 8 aa, synthetic construct
  REGION 1..8: note = Description of Artificial Sequence: Synthetic peptide
HDLYCQVH

SEQ ID NO: 1451 - protein, 8 aa, synthetic construct
  REGION 1..8: note = Description of Artificial Sequence: Synthetic peptide
HEFCSQHT

SEQ ID NO: 1452 - protein, 8 aa, synthetic construct
  REGION 1..8: note = Description of Artificial Sequence: Synthetic peptide
HEIAWYTE

SEQ ID NO: 1453 - protein, 10 aa, synthetic construct
  REGION 1..10: note = Description of Artificial Sequence: Synthetic peptide
HEVLLAPLLS

SEQ ID NO: 1454 - protein, 8 aa, synthetic construct
  REGION 1..8: note = Description of Artificial Sequence: Synthetic peptide
HFDEGNCD

SEQ ID NO: 1455 - protein, 9 aa, synthetic construct
  REGION 1..9: note = Description of Artificial Sequence: Synthetic peptide
HFDEGNCDT

SEQ ID NO: 1456 - protein, 10 aa, synthetic construct
  REGION 1..10: note = Description of Artificial Sequence: Synthetic peptide
HFISNSWLMW

SEQ ID NO: 1457 - protein, 8 aa, synthetic construct
  REGION 1..8: note = Description of Artificial Sequence: Synthetic peptide
HFYSKWYI

SEQ ID NO: 1458 - protein, 9 aa, synthetic construct
  REGION 1..9: note = Description of Artificial Sequence: Synthetic peptide
HGFELTSMK

SEQ ID NO: 1459 - protein, 9 aa, synthetic construct
  REGION 1..9: note = Description of Artificial Sequence: Synthetic peptide
HGGGVAGAL

SEQ ID NO: 1460 - protein, 9 aa, synthetic construct
  REGION 1..9: note = Description of Artificial Sequence: Synthetic peptide
HGHVMVELV

SEQ ID NO: 1461 - protein, 8 aa, synthetic construct
  REGION 1..8: note = Description of Artificial Sequence: Synthetic peptide
HGKQVVSD

SEQ ID NO: 1462 - protein, 9 aa, synthetic construct
  REGION 1..9: note = Description of Artificial Sequence: Synthetic peptide
HGLNLEEAA

SEQ ID NO: 1463 - protein, 11 aa, synthetic construct
  REGION 1..11: note = Description of Artificial Sequence: Synthetic peptide
HGLNLEEAARY

SEQ ID NO: 1464 - protein, 8 aa, synthetic construct
  REGION 1..8: note = Description of Artificial Sequence: Synthetic peptide
HGVVFLHV

SEQ ID NO: 1465 - protein, 8 aa, synthetic construct
  REGION 1..8: note = Description of Artificial Sequence: Synthetic peptide
HHMELPTG

SEQ ID NO: 1466 - protein, 10 aa, synthetic construct
  REGION 1..10: note = Description of Artificial Sequence: Synthetic peptide
HHSIGFDYVY

SEQ ID NO: 1467 - protein, 9 aa, synthetic construct
  REGION 1..9: note = Description of Artificial Sequence: Synthetic peptide
HIDAYKTFP

SEQ ID NO: 1468 - protein, 9 aa, synthetic construct
  REGION 1..9: note = Description of Artificial Sequence: Synthetic peptide
HIDHPNPKG

SEQ ID NO: 1469 - protein, 10 aa, synthetic construct
  REGION 1..10: note = Description of Artificial Sequence: Synthetic peptide
HIDHPNPKGF

SEQ ID NO: 1470 - protein, 9 aa, synthetic construct
  REGION 1..9: note = Description of Artificial Sequence: Synthetic peptide
HISRQRLTK

SEQ ID NO: 1471 - protein, 8 aa, synthetic construct
  REGION 1..8: note = Description of Artificial Sequence: Synthetic peptide
HITSKETL

SEQ ID NO: 1472 - protein, 10 aa, synthetic construct
  REGION 1..10: note = Description of Artificial Sequence: Synthetic peptide
HKHAFLCLFL

SEQ ID NO: 1473 - protein, 9 aa, synthetic construct
  REGION 1..9: note = Description of Artificial Sequence: Synthetic peptide
HKLVLSVNP

SEQ ID NO: 1474 - protein, 8 aa, synthetic construct
  REGION 1..8: note = Description of Artificial Sequence: Synthetic peptide
HKPIVWHV

SEQ ID NO: 1475 - protein, 9 aa, synthetic construct
  REGION 1..9: note = Description of Artificial Sequence: Synthetic peptide
HKPIVWHVN

SEQ ID NO: 1476 - protein, 8 aa, synthetic construct
  REGION 1..8: note = Description of Artificial Sequence: Synthetic peptide
HLIPLMYK

SEQ ID NO: 1477 - protein, 9 aa, synthetic construct
  REGION 1..9: note = Description of Artificial Sequence: Synthetic peptide
HLIPLMYKG

SEQ ID NO: 1478 - protein, 10 aa, synthetic construct
  REGION 1..10: note = Description of Artificial Sequence: Synthetic peptide
HLKDGTCGLV

SEQ ID NO: 1479 - protein, 12 aa, synthetic construct
  REGION 1..12: note = Description of Artificial Sequence: Synthetic peptide
HLKDGTCGLVEV

SEQ ID NO: 1480 - protein, 10 aa, synthetic construct
  REGION 1..10: note = Description of Artificial Sequence: Synthetic peptide
HLLIGLAKRF

SEQ ID NO: 1481 - protein, 9 aa, synthetic construct
  REGION 1..9: note = Description of Artificial Sequence: Synthetic peptide
HLMGWDYPK

SEQ ID NO: 1482 - protein, 9 aa, synthetic construct
  REGION 1..9: note = Description of Artificial Sequence: Synthetic peptide
HLRIAGHHL

SEQ ID NO: 1483 - protein, 9 aa, synthetic construct
  REGION 1..9: note = Description of Artificial Sequence: Synthetic peptide
HLSVDTKFK

SEQ ID NO: 1484 - protein, 9 aa, synthetic construct
  REGION 1..9: note = Description of Artificial Sequence: Synthetic peptide
HLSWEVGKP

SEQ ID NO: 1485 - protein, 10 aa, synthetic construct
  REGION 1..10: note = Description of Artificial Sequence: Synthetic peptide
HLVDFQVTIA

SEQ ID NO: 1486 - protein, 10 aa, synthetic construct
  REGION 1..10: note = Description of Artificial Sequence: Synthetic peptide
HLYFDKAGQK

SEQ ID NO: 1487 - protein, 8 aa, synthetic construct
  REGION 1..8: note = Description of Artificial Sequence: Synthetic peptide
HLYLQYIR

SEQ ID NO: 1488 - protein, 8 aa, synthetic construct
  REGION 1..8: note = Description of Artificial Sequence: Synthetic peptide
HMELPTGV

SEQ ID NO: 1489 - protein, 8 aa, synthetic construct
  REGION 1..8: note = Description of Artificial Sequence: Synthetic peptide
HMLDMYSV

SEQ ID NO: 1490 - protein, 9 aa, synthetic construct
  REGION 1..9: note = Description of Artificial Sequence: Synthetic peptide
HMLDMYSVM

SEQ ID NO: 1491 - protein, 10 aa, synthetic construct
  REGION 1..10: note = Description of Artificial Sequence: Synthetic peptide
HMLDMYSVML

SEQ ID NO: 1492 - protein, 8 aa, synthetic construct
  REGION 1..8: note = Description of Artificial Sequence: Synthetic peptide
HNLAKHCL

SEQ ID NO: 1493 - protein, 10 aa, synthetic construct
  REGION 1..10: note = Description of Artificial Sequence: Synthetic peptide
HNSHEGKTFY

SEQ ID NO: 1494 - protein, 8 aa, synthetic construct
  REGION 1..8: note = Description of Artificial Sequence: Synthetic peptide
HPTQAPTH

SEQ ID NO: 1495 - protein, 9 aa, synthetic construct
  REGION 1..9: note = Description of Artificial Sequence: Synthetic peptide
HQECSLQSC

SEQ ID NO: 1496 - protein, 10 aa, synthetic construct
  REGION 1..10: note = Description of Artificial Sequence: Synthetic peptide
HQSDIEVTGD

SEQ ID NO: 1497 - protein, 8 aa, synthetic construct
  REGION 1..8: note = Description of Artificial Sequence: Synthetic peptide
HRFYRLAN

SEQ ID NO: 1498 - protein, 9 aa, synthetic construct
  REGION 1..9: note = Description of Artificial Sequence: Synthetic peptide
HRFYRLANE

SEQ ID NO: 1499 - protein, 8 aa, synthetic construct
  REGION 1..8: note = Description of Artificial Sequence: Synthetic peptide
HRLYECLY

SEQ ID NO: 1500 - protein, 9 aa, synthetic construct
  REGION 1..9: note = Description of Artificial Sequence: Synthetic peptide
HRLYECLYR

SEQ ID NO: 1501 - protein, 11 aa, synthetic construct
  REGION 1..11: note = Description of Artificial Sequence: Synthetic peptide
HRLYECLYRNR

SEQ ID NO: 1502 - protein, 9 aa, synthetic construct
  REGION 1..9: note = Description of Artificial Sequence: Synthetic peptide
HSCNVNRFN

SEQ ID NO: 1503 - protein, 8 aa, synthetic construct
  REGION 1..8: note = Description of Artificial Sequence: Synthetic peptide
HSMQNCVL

SEQ ID NO: 1504 - protein, 10 aa, synthetic construct
  REGION 1..10: note = Description of Artificial Sequence: Synthetic peptide
HSSSSDNIAL

SEQ ID NO: 1505 - protein, 9 aa, synthetic construct
  REGION 1..9: note = Description of Artificial Sequence: Synthetic peptide
HSTQDLFLP

SEQ ID NO: 1506 - protein, 10 aa, synthetic construct
  REGION 1..10: note = Description of Artificial Sequence: Synthetic peptide
HSTQDLFLPF

SEQ ID NO: 1507 - protein, 11 aa, synthetic construct
  REGION 1..11: note = Description of Artificial Sequence: Synthetic peptide
HSTQDLFLPFF

SEQ ID NO: 1508 - protein, 10 aa, synthetic construct
  REGION 1..10: note = Description of Artificial Sequence: Synthetic peptide
HSWNADLYKL

SEQ ID NO: 1509 - protein, 10 aa, synthetic construct
  REGION 1..10: note = Description of Artificial Sequence: Synthetic peptide
HTGTGQAITV

SEQ ID NO: 1510 - protein, 10 aa, synthetic construct
  REGION 1..10: note = Description of Artificial Sequence: Synthetic peptide
HTKKWKYPQV

SEQ ID NO: 1511 - protein, 9 aa, synthetic construct
  REGION 1..9: note = Description of Artificial Sequence: Synthetic peptide
HTPINLVRD

SEQ ID NO: 1512 - protein, 10 aa, synthetic construct
  REGION 1..10: note = Description of Artificial Sequence: Synthetic peptide
HTPINLVRDL

SEQ ID NO: 1513 - protein, 11 aa, synthetic construct
  REGION 1..11: note = Description of Artificial Sequence: Synthetic peptide
HTTCCSLSHRF

SEQ ID NO: 1514 - protein, 9 aa, synthetic construct
  REGION 1..9: note = Description of Artificial Sequence: Synthetic peptide
HTTDPSFLG

SEQ ID NO: 1515 - protein, 9 aa, synthetic construct
  REGION 1..9: note = Description of Artificial Sequence: Synthetic peptide
HTVLQAVGA

SEQ ID NO: 1516 - protein, 8 aa, synthetic construct
  REGION 1..8: note = Description of Artificial Sequence: Synthetic peptide
HTVMPLSA

SEQ ID NO: 1517 - protein, 9 aa, synthetic construct
  REGION 1..9: note = Description of Artificial Sequence: Synthetic peptide
HTVMPLSAP

SEQ ID NO: 1518 - protein, 9 aa, synthetic construct
  REGION 1..9: note = Description of Artificial Sequence: Synthetic peptide
HVDILGPLS

SEQ ID NO: 1519 - protein, 8 aa, synthetic construct
  REGION 1..8: note = Description of Artificial Sequence: Synthetic peptide
HVDTDLTK

SEQ ID NO: 1520 - protein, 9 aa, synthetic construct
  REGION 1..9: note = Description of Artificial Sequence: Synthetic peptide
HVICTSEDM

SEQ ID NO: 1521 - protein, 10 aa, synthetic construct
  REGION 1..10: note = Description of Artificial Sequence: Synthetic peptide
HVISTSHKLV

SEQ ID NO: 1522 - protein, 8 aa, synthetic construct
  REGION 1..8: note = Description of Artificial Sequence: Synthetic peptide
HVMSKHTD

SEQ ID NO: 1523 - protein, 9 aa, synthetic construct
  REGION 1..9: note = Description of Artificial Sequence: Synthetic peptide
HVNNATNKA

SEQ ID NO: 1524 - protein, 11 aa, synthetic construct
  REGION 1..11: note = Description of Artificial Sequence: Synthetic peptide
HVNNATNKATY

SEQ ID NO: 1525 - protein, 8 aa, synthetic construct
  REGION 1..8: note = Description of Artificial Sequence: Synthetic peptide
HVRAWIGF

SEQ ID NO: 1526 - protein, 11 aa, synthetic construct
  REGION 1..11: note = Description of Artificial Sequence: Synthetic peptide
HVSGTNGTKRF

SEQ ID NO: 1527 - protein, 10 aa, synthetic construct
  REGION 1..10: note = Description of Artificial Sequence: Synthetic peptide
HVTFFIYNKI

SEQ ID NO: 1528 - protein, 9 aa, synthetic construct
  REGION 1..9: note = Description of Artificial Sequence: Synthetic peptide
HVTYVPAQE

SEQ ID NO: 1529 - protein, 10 aa, synthetic construct
  REGION 1..10: note = Description of Artificial Sequence: Synthetic peptide
HVTYVPAQEK

SEQ ID NO: 1530 - protein, 10 aa, synthetic construct
  REGION 1..10: note = Description of Artificial Sequence: Synthetic peptide
HVYQLRARSV

SEQ ID NO: 1531 - protein, 8 aa, synthetic construct
  REGION 1..8: note = Description of Artificial Sequence: Synthetic peptide
HWFVTQRN

SEQ ID NO: 1532 - protein, 10 aa, synthetic construct
  REGION 1..10: note = Description of Artificial Sequence: Synthetic peptide
HWFVTQRNFY

SEQ ID NO: 1533 - protein, 9 aa, synthetic construct
  REGION 1..9: note = Description of Artificial Sequence: Synthetic peptide
HYQECVRGT

SEQ ID NO: 1534 - protein, 9 aa, synthetic construct
  REGION 1..9: note = Description of Artificial Sequence: Synthetic peptide
HYVYIGDPA

SEQ ID NO: 1535 - protein, 9 aa, synthetic construct
  REGION 1..9: note = Description of Artificial Sequence: Synthetic peptide
IAARDLICA

SEQ ID NO: 1536 - protein, 12 aa, synthetic construct
  REGION 1..12: note = Description of Artificial Sequence: Synthetic peptide
IAARDLICAQKF

SEQ ID NO: 1537 - protein, 8 aa, synthetic construct
  REGION 1..8: note = Description of Artificial Sequence: Synthetic peptide
IADKYVRN

SEQ ID NO: 1538 - protein, 9 aa, synthetic construct
  REGION 1..9: note = Description of Artificial Sequence: Synthetic peptide
IADYNYKLP

SEQ ID NO: 1539 - protein, 9 aa, synthetic construct
  REGION 1..9: note = Description of Artificial Sequence: Synthetic peptide
IAFGGCVFS

SEQ ID NO: 1540 - protein, 10 aa, synthetic construct
  REGION 1..10: note = Description of Artificial Sequence: Synthetic peptide
IAGLIAIVMV

SEQ ID NO: 1541 - protein, 10 aa, synthetic construct
  REGION 1..10: note = Description of Artificial Sequence: Synthetic peptide
IAIILASFSA

SEQ ID NO: 1542 - protein, 8 aa, synthetic construct
  REGION 1..8: note = Description of Artificial Sequence: Synthetic peptide
IAKKPTET

SEQ ID NO: 1543 - protein, 10 aa, synthetic construct
  REGION 1..10: note = Description of Artificial Sequence: Synthetic peptide
IALIWNVKDF

SEQ ID NO: 1544 - protein, 8 aa, synthetic construct
  REGION 1..8: note = Description of Artificial Sequence: Synthetic peptide
IALKGGKI

SEQ ID NO: 1545 - protein, 12 aa, synthetic construct
  REGION 1..12: note = Description of Artificial Sequence: Synthetic peptide
IALKGGKIVNNW

SEQ ID NO: 1546 - protein, 11 aa, synthetic construct
  REGION 1..11: note = Description of Artificial Sequence: Synthetic peptide
IAMACLVGLMW

SEQ ID NO: 1547 - protein, 8 aa, synthetic construct
  REGION 1..8: note = Description of Artificial Sequence: Synthetic peptide
IANQFNSA

SEQ ID NO: 1548 - protein, 8 aa, synthetic construct
  REGION 1..8: note = Description of Artificial Sequence: Synthetic peptide
IANYAKPF

SEQ ID NO: 1549 - protein, 8 aa, synthetic construct
  REGION 1..8: note = Description of Artificial Sequence: Synthetic peptide
IAQFAPSA

SEQ ID NO: 1550 - protein, 11 aa, synthetic construct
  REGION 1..11: note = Description of Artificial Sequence: Synthetic peptide
IASEFSSLPSY

SEQ ID NO: 1551 - protein, 8 aa, synthetic construct
  REGION 1..8: note = Description of Artificial Sequence: Synthetic peptide
IASTDTCF

SEQ ID NO: 1552 - protein, 8 aa, synthetic construct
  REGION 1..8: note = Description of Artificial Sequence: Synthetic peptide
IAYIICIS

SEQ ID NO: 1553 - protein, 8 aa, synthetic construct
  REGION 1..8: note = Description of Artificial Sequence: Synthetic peptide
IAYTMSLG

SEQ ID NO: 1554 - protein, 9 aa, synthetic construct
  REGION 1..9: note = Description of Artificial Sequence: Synthetic peptide
IAYTMSLGA

SEQ ID NO: 1555 - protein, 8 aa, synthetic construct
  REGION 1..8: note = Description of Artificial Sequence: Synthetic peptide
ICHDGKAH

SEQ ID NO: 1556 - protein, 11 aa, synthetic construct
  REGION 1..11: note = Description of Artificial Sequence: Synthetic peptide
ICISTKHFYWF

SEQ ID NO: 1557 - protein, 9 aa, synthetic construct
  REGION 1..9: note = Description of Artificial Sequence: Synthetic peptide
ICLLQFAYA

SEQ ID NO: 1558 - protein, 8 aa, synthetic construct
  REGION 1..8: note = Description of Artificial Sequence: Synthetic peptide
IDAFKLNI

SEQ ID NO: 1559 - protein, 8 aa, synthetic construct
  REGION 1..8: note = Description of Artificial Sequence: Synthetic peptide
IDCSARHI

SEQ ID NO: 1560 - protein, 8 aa, synthetic construct
  REGION 1..8: note = Description of Artificial Sequence: Synthetic peptide
IDFYLCFL

SEQ ID NO: 1561 - protein, 10 aa, synthetic construct
  REGION 1..10: note = Description of Artificial Sequence: Synthetic peptide
IDFYLCFLAF

SEQ ID NO: 1562 - protein, 8 aa, synthetic construct
  REGION 1..8: note = Description of Artificial Sequence: Synthetic peptide
IDGGVTRD

SEQ ID NO: 1563 - protein, 8 aa, synthetic construct
  REGION 1..8: note = Description of Artificial Sequence: Synthetic peptide
IDLDEWSM

SEQ ID NO: 1564 - protein, 8 aa, synthetic construct
  REGION 1..8: note = Description of Artificial Sequence: Synthetic peptide
IDLLLDDF

SEQ ID NO: 1565 - protein, 9 aa, synthetic construct
  REGION 1..9: note = Description of Artificial Sequence: Synthetic peptide
IDLVPNQPY

SEQ ID NO: 1566 - protein, 8 aa, synthetic construct
  REGION 1..8: note = Description of Artificial Sequence: Synthetic peptide
IDVQQWGF

SEQ ID NO: 1567 - protein, 8 aa, synthetic construct
  REGION 1..8: note = Description of Artificial Sequence: Synthetic peptide
IDYKHYTP

SEQ ID NO: 1568 - protein, 10 aa, synthetic construct
  REGION 1..10: note = Description of Artificial Sequence: Synthetic peptide
IDYKHYTPSF

SEQ ID NO: 1569 - protein, 10 aa, synthetic construct
  REGION 1..10: note = Description of Artificial Sequence: Synthetic peptide
IEELFYSYAT

SEQ ID NO: 1570 - protein, 9 aa, synthetic construct
  REGION 1..9: note = Description of Artificial Sequence: Synthetic peptide
IEFLKRGDK

SEQ ID NO: 1571 - protein, 11 aa, synthetic construct
  REGION 1..11: note = Description of Artificial Sequence: Synthetic peptide
IEFLKRGDKSV

SEQ ID NO: 1572 - protein, 8 aa, synthetic construct
  REGION 1..8: note = Description of Artificial Sequence: Synthetic peptide
IELKFNPP

SEQ ID NO: 1573 - protein, 11 aa, synthetic construct
  REGION 1..11: note = Description of Artificial Sequence: Synthetic peptide
IELSLIDFYLC

SEQ ID NO: 1574 - protein, 12 aa, synthetic construct
  REGION 1..12: note = Description of Artificial Sequence: Synthetic peptide
IELSLIDFYLCF

SEQ ID NO: 1575 - protein, 8 aa, synthetic construct
  REGION 1..8: note = Description of Artificial Sequence: Synthetic peptide
IERFVSLA

SEQ ID NO: 1576 - protein, 9 aa, synthetic construct
  REGION 1..9: note = Description of Artificial Sequence: Synthetic peptide
IETISLAGS

SEQ ID NO: 1577 - protein, 10 aa, synthetic construct
  REGION 1..10: note = Description of Artificial Sequence: Synthetic peptide
IEVNSFSGYL

SEQ ID NO: 1578 - protein, 12 aa, synthetic construct
  REGION 1..12: note = Description of Artificial Sequence: Synthetic peptide
IEVNSFSGYLKL

SEQ ID NO: 1579 - protein, 8 aa, synthetic construct
  REGION 1..8: note = Description of Artificial Sequence: Synthetic peptide
IEVQGYKS

SEQ ID NO: 1580 - protein, 10 aa, synthetic construct
  REGION 1..10: note = Description of Artificial Sequence: Synthetic peptide
IEVQGYKSVN

SEQ ID NO: 1581 - protein, 8 aa, synthetic construct
  REGION 1..8: note = Description of Artificial Sequence: Synthetic peptide
IEVTGDSC

SEQ ID NO: 1582 - protein, 9 aa, synthetic construct
  REGION 1..9: note = Description of Artificial Sequence: Synthetic peptide
IEYPIIGDE

SEQ ID NO: 1583 - protein, 12 aa, synthetic construct
  REGION 1..12: note = Description of Artificial Sequence: Synthetic peptide
IEYPIIGDELKI

SEQ ID NO: 1584 - protein, 10 aa, synthetic construct
  REGION 1..10: note = Description of Artificial Sequence: Synthetic peptide
IFFASFYYVW

SEQ ID NO: 1585 - protein, 9 aa, synthetic construct
  REGION 1..9: note = Description of Artificial Sequence: Synthetic peptide
IFLEGETLP

SEQ ID NO: 1586 - protein, 9 aa, synthetic construct
  REGION 1..9: note = Description of Artificial Sequence: Synthetic peptide
IFLWLLWPV

SEQ ID NO: 1587 - protein, 9 aa, synthetic construct
  REGION 1..9: note = Description of Artificial Sequence: Synthetic peptide
IFWRNTNPI

SEQ ID NO: 1588 - protein, 10 aa, synthetic construct
  REGION 1..10: note = Description of Artificial Sequence: Synthetic peptide
IFYLITPVHV

SEQ ID NO: 1589 - protein, 10 aa, synthetic construct
  REGION 1..10: note = Description of Artificial Sequence: Synthetic peptide
IGAEHVNNSY

SEQ ID NO: 1590 - protein, 9 aa, synthetic construct
  REGION 1..9: note = Description of Artificial Sequence: Synthetic peptide
IGEAVKTQF

SEQ ID NO: 1591 - protein, 12 aa, synthetic construct
  REGION 1..12: note = Description of Artificial Sequence: Synthetic peptide
IGEAVKTQFNYY

SEQ ID NO: 1592 - protein, 8 aa, synthetic construct
  REGION 1..8: note = Description of Artificial Sequence: Synthetic peptide
IGEQKSIL

SEQ ID NO: 1593 - protein, 9 aa, synthetic construct
  REGION 1..9: note = Description of Artificial Sequence: Synthetic peptide
IGGAKLKAL

SEQ ID NO: 1594 - protein, 8 aa, synthetic construct
  REGION 1..8: note = Description of Artificial Sequence: Synthetic peptide
IGGYTEKW

SEQ ID NO: 1595 - protein, 8 aa, synthetic construct
  REGION 1..8: note = Description of Artificial Sequence: Synthetic peptide
IGKIQDSL

SEQ ID NO: 1596 - protein, 8 aa, synthetic construct
  REGION 1..8: note = Description of Artificial Sequence: Synthetic peptide
IGPERTCC

SEQ ID NO: 1597 - protein, 9 aa, synthetic construct
  REGION 1..9: note = Description of Artificial Sequence: Synthetic peptide
IGPERTCCL

SEQ ID NO: 1598 - protein, 8 aa, synthetic construct
  REGION 1..8: note = Description of Artificial Sequence: Synthetic peptide
IGVTQNVL

SEQ ID NO: 1599 - protein, 9 aa, synthetic construct
  REGION 1..9: note = Description of Artificial Sequence: Synthetic peptide
IGYYRRATR

SEQ ID NO: 1600 - protein, 9 aa, synthetic construct
  REGION 1..9: note = Description of Artificial Sequence: Synthetic peptide
IHFGAGSDK

SEQ ID NO: 1601 - protein, 8 aa, synthetic construct
  REGION 1..8: note = Description of Artificial Sequence: Synthetic peptide
IHFYSKWY

SEQ ID NO: 1602 - protein, 9 aa, synthetic construct
  REGION 1..9: note = Description of Artificial Sequence: Synthetic peptide
IHFYSKWYI

SEQ ID NO: 1603 - protein, 8 aa, synthetic construct
  REGION 1..8: note = Description of Artificial Sequence: Synthetic peptide
IHSLRVCV

SEQ ID NO: 1604 - protein, 9 aa, synthetic construct
  REGION 1..9: note = Description of Artificial Sequence: Synthetic peptide
IHTIDGSSG

SEQ ID NO: 1605 - protein, 10 aa, synthetic construct
  REGION 1..10: note = Description of Artificial Sequence: Synthetic peptide
IHTIDGSSGV

SEQ ID NO: 1606 - protein, 11 aa, synthetic construct
  REGION 1..11: note = Description of Artificial Sequence: Synthetic peptide
IHTIDGSSGVV

SEQ ID NO: 1607 - protein, 9 aa, synthetic construct
  REGION 1..9: note = Description of Artificial Sequence: Synthetic peptide
IHVSGTNGT

SEQ ID NO: 1608 - protein, 9 aa, synthetic construct
  REGION 1..9: note = Description of Artificial Sequence: Synthetic peptide
IICISTKHF

SEQ ID NO: 1609 - protein, 10 aa, synthetic construct
  REGION 1..10: note = Description of Artificial Sequence: Synthetic peptide
IICISTKHFY

SEQ ID NO: 1610 - protein, 8 aa, synthetic construct
  REGION 1..8: note = Description of Artificial Sequence: Synthetic peptide
IIGDELKI

SEQ ID NO: 1611 - protein, 8 aa, synthetic construct
  REGION 1..8: note = Description of Artificial Sequence: Synthetic peptide
IIKLIFLW

SEQ ID NO: 1612 - protein, 9 aa, synthetic construct
  REGION 1..9: note = Description of Artificial Sequence: Synthetic peptide
IIKSQDLSV

SEQ ID NO: 1613 - protein, 10 aa, synthetic construct
  REGION 1..10: note = Description of Artificial Sequence: Synthetic peptide
IIKSQDLSVV

SEQ ID NO: 1614 - protein, 8 aa, synthetic construct
  REGION 1..8: note = Description of Artificial Sequence: Synthetic peptide
IIKTIQPR

SEQ ID NO: 1615 - protein, 10 aa, synthetic construct
  REGION 1..10: note = Description of Artificial Sequence: Synthetic peptide
IILKPANNSL

SEQ ID NO: 1616 - protein, 10 aa, synthetic construct
  REGION 1..10: note = Description of Artificial Sequence: Synthetic peptide
IIMRLWLCWK

SEQ ID NO: 1617 - protein, 8 aa, synthetic construct
  REGION 1..8: note = Description of Artificial Sequence: Synthetic peptide
IIMRTFKV

SEQ ID NO: 1618 - protein, 8 aa, synthetic construct
  REGION 1..8: note = Description of Artificial Sequence: Synthetic peptide
IIPARARV

SEQ ID NO: 1619 - protein, 9 aa, synthetic construct
  REGION 1..9: note = Description of Artificial Sequence: Synthetic peptide
IIPARARVE

SEQ ID NO: 1620 - protein, 8 aa, synthetic construct
  REGION 1..8: note = Description of Artificial Sequence: Synthetic peptide
IIRENNRV

SEQ ID NO: 1621 - protein, 9 aa, synthetic construct
  REGION 1..9: note = Description of Artificial Sequence: Synthetic peptide
IISDMYDPK

SEQ ID NO: 1622 - protein, 11 aa, synthetic construct
  REGION 1..11: note = Description of Artificial Sequence: Synthetic peptide
IISDMYDPKTK

SEQ ID NO: 1623 - protein, 9 aa, synthetic construct
  REGION 1..9: note = Description of Artificial Sequence: Synthetic peptide
IISNEKQEI

SEQ ID NO: 1624 - protein, 8 aa, synthetic construct
  REGION 1..8: note = Description of Artificial Sequence: Synthetic peptide
IITTDNTF

SEQ ID NO: 1625 - protein, 8 aa, synthetic construct
  REGION 1..8: note = Description of Artificial Sequence: Synthetic peptide
IITTVAAF

SEQ ID NO: 1626 - protein, 8 aa, synthetic construct
  REGION 1..8: note = Description of Artificial Sequence: Synthetic peptide
IKESVQTF

SEQ ID NO: 1627 - protein, 9 aa, synthetic construct
  REGION 1..9: note = Description of Artificial Sequence: Synthetic peptide
IKESVQTFF

SEQ ID NO: 1628 - protein, 9 aa, synthetic construct
  REGION 1..9: note = Description of Artificial Sequence: Synthetic peptide
IKIQEGVVD

SEQ ID NO: 1629 - protein, 10 aa, synthetic construct
  REGION 1..10: note = Description of Artificial Sequence: Synthetic peptide
IKIQEGVVDY

SEQ ID NO: 1630 - protein, 10 aa, synthetic construct
  REGION 1..10: note = Description of Artificial Sequence: Synthetic peptide
IKLDDKDPNF

SEQ ID NO: 1631 - protein, 10 aa, synthetic construct
  REGION 1..10: note = Description of Artificial Sequence: Synthetic peptide
IKLIFLWLLW

SEQ ID NO: 1632 - protein, 9 aa, synthetic construct
  REGION 1..9: note = Description of Artificial Sequence: Synthetic peptide
IKNADIVEE

SEQ ID NO: 1633 - protein, 8 aa, synthetic construct
  REGION 1..8: note = Description of Artificial Sequence: Synthetic peptide
IKNLSKSL

SEQ ID NO: 1634 - protein, 8 aa, synthetic construct
  REGION 1..8: note = Description of Artificial Sequence: Synthetic peptide
IKPVTYKL

SEQ ID NO: 1635 - protein, 9 aa, synthetic construct
  REGION 1..9: note = Description of Artificial Sequence: Synthetic peptide
IKRSDARTA

SEQ ID NO: 1636 - protein, 8 aa, synthetic construct
  REGION 1..8: note = Description of Artificial Sequence: Synthetic peptide
IKTIQPRV

SEQ ID NO: 1637 - protein, 9 aa, synthetic construct
  REGION 1..9: note = Description of Artificial Sequence: Synthetic peptide
IKWADNNCY

SEQ ID NO: 1638 - protein, 9 aa, synthetic construct
  REGION 1..9: note = Description of Artificial Sequence: Synthetic peptide
ILASFSAST

SEQ ID NO: 1639 - protein, 11 aa, synthetic construct
  REGION 1..11: note = Description of Artificial Sequence: Synthetic peptide
ILCIMSDRDLY

SEQ ID NO: 1640 - protein, 10 aa, synthetic construct
  REGION 1..10: note = Description of Artificial Sequence: Synthetic peptide
ILFLALITLA

SEQ ID NO: 1641 - protein, 10 aa, synthetic construct
  REGION 1..10: note = Description of Artificial Sequence: Synthetic peptide
ILFTRFFYVL

SEQ ID NO: 1642 - protein, 10 aa, synthetic construct
  REGION 1..10: note = Description of Artificial Sequence: Synthetic peptide
ILGTVSWNLR

SEQ ID NO: 1643 - protein, 10 aa, synthetic construct
  REGION 1..10: note = Description of Artificial Sequence: Synthetic peptide
ILHCANFNVL

SEQ ID NO: 1644 - protein, 10 aa, synthetic construct
  REGION 1..10: note = Description of Artificial Sequence: Synthetic peptide
ILKPANNSLK

SEQ ID NO: 1645 - protein, 10 aa, synthetic construct
  REGION 1..10: note = Description of Artificial Sequence: Synthetic peptide
ILLAKDTTEA

SEQ ID NO: 1646 - protein, 10 aa, synthetic construct
  REGION 1..10: note = Description of Artificial Sequence: Synthetic peptide
ILLIIMRTFK

SEQ ID NO: 1647 - protein, 8 aa, synthetic construct
  REGION 1..8: note = Description of Artificial Sequence: Synthetic peptide
ILLLDQAL

SEQ ID NO: 1648 - protein, 9 aa, synthetic construct
  REGION 1..9: note = Description of Artificial Sequence: Synthetic peptide
ILLNKHIDA

SEQ ID NO: 1649 - protein, 8 aa, synthetic construct
  REGION 1..8: note = Description of Artificial Sequence: Synthetic peptide
ILMTARTV

SEQ ID NO: 1650 - protein, 8 aa, synthetic construct
  REGION 1..8: note = Description of Artificial Sequence: Synthetic peptide
ILPSIISN

SEQ ID NO: 1651 - protein, 8 aa, synthetic construct
  REGION 1..8: note = Description of Artificial Sequence: Synthetic peptide
ILPVSMTK

SEQ ID NO: 1652 - protein, 8 aa, synthetic construct
  REGION 1..8: note = Description of Artificial Sequence: Synthetic peptide
ILRGHLRI

SEQ ID NO: 1653 - protein, 8 aa, synthetic construct
  REGION 1..8: note = Description of Artificial Sequence: Synthetic peptide
ILSDDAVV

SEQ ID NO: 1654 - protein, 9 aa, synthetic construct
  REGION 1..9: note = Description of Artificial Sequence: Synthetic peptide
ILSLLSKGR

SEQ ID NO: 1655 - protein, 10 aa, synthetic construct
  REGION 1..10: note = Description of Artificial Sequence: Synthetic peptide
ILTALRLCAY

SEQ ID NO: 1656 - protein, 10 aa, synthetic construct
  REGION 1..10: note = Description of Artificial Sequence: Synthetic peptide
IMASLVLARK

SEQ ID NO: 1657 - protein, 8 aa, synthetic construct
  REGION 1..8: note = Description of Artificial Sequence: Synthetic peptide
IMLIIFWF

SEQ ID NO: 1658 - protein, 10 aa, synthetic construct
  REGION 1..10: note = Description of Artificial Sequence: Synthetic peptide
IMLIIFWFSL

SEQ ID NO: 1659 - protein, 8 aa, synthetic construct
  REGION 1..8: note = Description of Artificial Sequence: Synthetic peptide
IMMNVAKY

SEQ ID NO: 1660 - protein, 8 aa, synthetic construct
  REGION 1..8: note = Description of Artificial Sequence: Synthetic peptide
IMRLWLCW

SEQ ID NO: 1661 - protein, 9 aa, synthetic construct
  REGION 1..9: note = Description of Artificial Sequence: Synthetic peptide
IMRLWLCWK

SEQ ID NO: 1662 - protein, 9 aa, synthetic construct
  REGION 1..9: note = Description of Artificial Sequence: Synthetic peptide
IMRTFKVSI

SEQ ID NO: 1663 - protein, 10 aa, synthetic construct
  REGION 1..10: note = Description of Artificial Sequence: Synthetic peptide
IMRTFKVSIW

SEQ ID NO: 1664 - protein, 8 aa, synthetic construct
  REGION 1..8: note = Description of Artificial Sequence: Synthetic peptide
IMTRCLAV

SEQ ID NO: 1665 - protein, 11 aa, synthetic construct
  REGION 1..11: note = Description of Artificial Sequence: Synthetic peptide
INFVRIIMRLW

SEQ ID NO: 1666 - protein, 10 aa, synthetic construct
  REGION 1..10: note = Description of Artificial Sequence: Synthetic peptide
INGDRWFLNR

SEQ ID NO: 1667 - protein, 9 aa, synthetic construct
  REGION 1..9: note = Description of Artificial Sequence: Synthetic peptide
INGLMLLEI

SEQ ID NO: 1668 - protein, 8 aa, synthetic construct
  REGION 1..8: note = Description of Artificial Sequence: Synthetic peptide
INIIIWFL

SEQ ID NO: 1669 - protein, 8 aa, synthetic construct
  REGION 1..8: note = Description of Artificial Sequence: Synthetic peptide
INLHTQVV

SEQ ID NO: 1670 - protein, 9 aa, synthetic construct
  REGION 1..9: note = Description of Artificial Sequence: Synthetic peptide
INNTVYTKV

SEQ ID NO: 1671 - protein, 8 aa, synthetic construct
  REGION 1..8: note = Description of Artificial Sequence: Synthetic peptide
INRPQIGV

SEQ ID NO: 1672 - protein, 10 aa, synthetic construct
  REGION 1..10: note = Description of Artificial Sequence: Synthetic peptide
IPGIPKDMTY

SEQ ID NO: 1673 - protein, 11 aa, synthetic construct
  REGION 1..11: note = Description of Artificial Sequence: Synthetic peptide
IPIGAGICASY

SEQ ID NO: 1674 - protein, 10 aa, synthetic construct
  REGION 1..10: note = Description of Artificial Sequence: Synthetic peptide
IPKDMTYRRL

SEQ ID NO: 1675 - protein, 11 aa, synthetic construct
  REGION 1..11: note = Description of Artificial Sequence: Synthetic peptide
IPKDMTYRRLI

SEQ ID NO: 1676 - protein, 8 aa, synthetic construct
  REGION 1..8: note = Description of Artificial Sequence: Synthetic peptide
IPKEEVKP

SEQ ID NO: 1677 - protein, 10 aa, synthetic construct
  REGION 1..10: note = Description of Artificial Sequence: Synthetic peptide
IPKEEVKPFI

SEQ ID NO: 1678 - protein, 11 aa, synthetic construct
  REGION 1..11: note = Description of Artificial Sequence: Synthetic peptide
IPMDSTVKNYF

SEQ ID NO: 1679 - protein, 11 aa, synthetic construct
  REGION 1..11: note = Description of Artificial Sequence: Synthetic peptide
IPRRNVATLQA

SEQ ID NO: 1680 - protein, 11 aa, synthetic construct
  REGION 1..11: note = Description of Artificial Sequence: Synthetic peptide
IPTITQMNLKY

SEQ ID NO: 1681 - protein, 8 aa, synthetic construct
  REGION 1..8: note = Description of Artificial Sequence: Synthetic peptide
IPYNSVTS

SEQ ID NO: 1682 - protein, 11 aa, synthetic construct
  REGION 1..11: note = Description of Artificial Sequence: Synthetic peptide
IPYNSVTSSIV

SEQ ID NO: 1683 - protein, 12 aa, synthetic construct
  REGION 1..12: note = Description of Artificial Sequence: Synthetic peptide
IPYNSVTSSIVI

SEQ ID NO: 1684 - protein, 9 aa, synthetic construct
  REGION 1..9: note = Description of Artificial Sequence: Synthetic peptide
IQDSLSSTA

SEQ ID NO: 1685 - protein, 9 aa, synthetic construct
  REGION 1..9: note = Description of Artificial Sequence: Synthetic peptide
IQFPNTYLE

SEQ ID NO: 1686 - protein, 9 aa, synthetic construct
  REGION 1..9: note = Description of Artificial Sequence: Synthetic peptide
IQITISSFK

SEQ ID NO: 1687 - protein, 10 aa, synthetic construct
  REGION 1..10: note = Description of Artificial Sequence: Synthetic peptide
IQITISSFKW

SEQ ID NO: 1688 - protein, 8 aa, synthetic construct
  REGION 1..8: note = Description of Artificial Sequence: Synthetic peptide
IQKEIDRL

SEQ ID NO: 1689 - protein, 8 aa, synthetic construct
  REGION 1..8: note = Description of Artificial Sequence: Synthetic peptide
IQRKYKGI

SEQ ID NO: 1690 - protein, 10 aa, synthetic construct
  REGION 1..10: note = Description of Artificial Sequence: Synthetic peptide
IQRKYKGIKI

SEQ ID NO: 1691 - protein, 8 aa, synthetic construct
  REGION 1..8: note = Description of Artificial Sequence: Synthetic peptide
IQTIVEVQ

SEQ ID NO: 1692 - protein, 9 aa, synthetic construct
  REGION 1..9: note = Description of Artificial Sequence: Synthetic peptide
IQTTPGSGV

SEQ ID NO: 1693 - protein, 9 aa, synthetic construct
  REGION 1..9: note = Description of Artificial Sequence: Synthetic peptide
IQWMVMFTP

SEQ ID NO: 1694 - protein, 9 aa, synthetic construct
  REGION 1..9: note = Description of Artificial Sequence: Synthetic peptide
IRAAEIRAS

SEQ ID NO: 1695 - protein, 8 aa, synthetic construct
  REGION 1..8: note = Description of Artificial Sequence: Synthetic peptide
IRENNRVV

SEQ ID NO: 1696 - protein, 9 aa, synthetic construct
  REGION 1..9: note = Description of Artificial Sequence: Synthetic peptide
IRGGDGKMK

SEQ ID NO: 1697 - protein, 10 aa, synthetic construct
  REGION 1..10: note = Description of Artificial Sequence: Synthetic peptide
IRHVRAWIGF

SEQ ID NO: 1698 - protein, 9 aa, synthetic construct
  REGION 1..9: note = Description of Artificial Sequence: Synthetic peptide
IRQGTDYKH

SEQ ID NO: 1699 - protein, 9 aa, synthetic construct
  REGION 1..9: note = Description of Artificial Sequence: Synthetic peptide
IRVGARKSA

SEQ ID NO: 1700 - protein, 9 aa, synthetic construct
  REGION 1..9: note = Description of Artificial Sequence: Synthetic peptide
ISAARQGFV

SEQ ID NO: 1701 - protein, 11 aa, synthetic construct
  REGION 1..11: note = Description of Artificial Sequence: Synthetic peptide
ISAGFSLWVYK

SEQ ID NO: 1702 - protein, 10 aa, synthetic construct
  REGION 1..10: note = Description of Artificial Sequence: Synthetic peptide
ISAMVRMYIF

SEQ ID NO: 1703 - protein, 11 aa, synthetic construct
  REGION 1..11: note = Description of Artificial Sequence: Synthetic peptide
ISDEFSSNVAN

SEQ ID NO: 1704 - protein, 10 aa, synthetic construct
  REGION 1..10: note = Description of Artificial Sequence: Synthetic peptide
ISDEVARDLS

SEQ ID NO: 1705 - protein, 8 aa, synthetic construct
  REGION 1..8: note = Description of Artificial Sequence: Synthetic peptide
ISDYDYYR

SEQ ID NO: 1706 - protein, 8 aa, synthetic construct
  REGION 1..8: note = Description of Artificial Sequence: Synthetic peptide
ISFPLCAN

SEQ ID NO: 1707 - protein, 12 aa, synthetic construct
  REGION 1..12: note = Description of Artificial Sequence: Synthetic peptide
ISFPLCANGQVF

SEQ ID NO: 1708 - protein, 10 aa, synthetic construct
  REGION 1..10: note = Description of Artificial Sequence: Synthetic peptide
ISLAGSYKDW

SEQ ID NO: 1709 - protein, 9 aa, synthetic construct
  REGION 1..9: note = Description of Artificial Sequence: Synthetic peptide
ISMATNYDL

SEQ ID NO: 1710 - protein, 10 aa, synthetic construct
  REGION 1..10: note = Description of Artificial Sequence: Synthetic peptide
ISPYNSQNAV

SEQ ID NO: 1711 - protein, 8 aa, synthetic construct
  REGION 1..8: note = Description of Artificial Sequence: Synthetic peptide
ISRQRLTK

SEQ ID NO: 1712 - protein, 8 aa, synthetic construct
  REGION 1..8: note = Description of Artificial Sequence: Synthetic peptide
ISSDVLVN

SEQ ID NO: 1713 - protein, 8 aa, synthetic construct
  REGION 1..8: note = Description of Artificial Sequence: Synthetic peptide
ISTCACEI

SEQ ID NO: 1714 - protein, 9 aa, synthetic construct
  REGION 1..9: note = Description of Artificial Sequence: Synthetic peptide
ISTEIYQAG

SEQ ID NO: 1715 - protein, 8 aa, synthetic construct
  REGION 1..8: note = Description of Artificial Sequence: Synthetic peptide
ITDAQTGS

SEQ ID NO: 1716 - protein, 8 aa, synthetic construct
  REGION 1..8: note = Description of Artificial Sequence: Synthetic peptide
ITDVFYKE

SEQ ID NO: 1717 - protein, 11 aa, synthetic construct
  REGION 1..11: note = Description of Artificial Sequence: Synthetic peptide
ITEEVGHTDLM

SEQ ID NO: 1718 - protein, 11 aa, synthetic construct
  REGION 1..11: note = Description of Artificial Sequence: Synthetic peptide
ITFELDERIDK

SEQ ID NO: 1719 - protein, 8 aa, synthetic construct
  REGION 1..8: note = Description of Artificial Sequence: Synthetic peptide
ITGLYPTL

SEQ ID NO: 1720 - protein, 9 aa, synthetic construct
  REGION 1..9: note = Description of Artificial Sequence: Synthetic peptide
ITGNTLQCI

SEQ ID NO: 1721 - protein, 8 aa, synthetic construct
  REGION 1..8: note = Description of Artificial Sequence: Synthetic peptide
ITLATCEL

SEQ ID NO: 1722 - protein, 11 aa, synthetic construct
  REGION 1..11: note = Description of Artificial Sequence: Synthetic peptide
ITLATCELYHY

SEQ ID NO: 1723 - protein, 8 aa, synthetic construct
  REGION 1..8: note = Description of Artificial Sequence: Synthetic peptide
ITNCVKML

SEQ ID NO: 1724 - protein, 11 aa, synthetic construct
  REGION 1..11: note = Description of Artificial Sequence: Synthetic peptide
ITNLCPFGEVF

SEQ ID NO: 1725 - protein, 9 aa, synthetic construct
  REGION 1..9: note = Description of Artificial Sequence: Synthetic peptide
ITPCSFGGV

SEQ ID NO: 1726 - protein, 9 aa, synthetic construct
  REGION 1..9: note = Description of Artificial Sequence: Synthetic peptide
ITPGTNTSN

SEQ ID NO: 1727 - protein, 10 aa, synthetic construct
  REGION 1..10: note = Description of Artificial Sequence: Synthetic peptide
ITREVGFVVP

SEQ ID NO: 1728 - protein, 9 aa, synthetic construct
  REGION 1..9: note = Description of Artificial Sequence: Synthetic peptide
ITSGDGTTS

SEQ ID NO: 1729 - protein, 9 aa, synthetic construct
  REGION 1..9: note = Description of Artificial Sequence: Synthetic peptide
ITSKETLYC

SEQ ID NO: 1730 - protein, 10 aa, synthetic construct
  REGION 1..10: note = Description of Artificial Sequence: Synthetic peptide
ITSKETLYCI

SEQ ID NO: 1731 - protein, 8 aa, synthetic construct
  REGION 1..8: note = Description of Artificial Sequence: Synthetic peptide
ITTDNTFV

SEQ ID NO: 1732 - protein, 12 aa, synthetic construct
  REGION 1..12: note = Description of Artificial Sequence: Synthetic peptide
ITTYPGQGLNGY

SEQ ID NO: 1733 - protein, 11 aa, synthetic construct
  REGION 1..11: note = Description of Artificial Sequence: Synthetic peptide
ITVATSRTLSY

SEQ ID NO: 1734 - protein, 8 aa, synthetic construct
  REGION 1..8: note = Description of Artificial Sequence: Synthetic peptide
ITVEELKK

SEQ ID NO: 1735 - protein, 10 aa, synthetic construct
  REGION 1..10: note = Description of Artificial Sequence: Synthetic peptide
ITVEELKKLL

SEQ ID NO: 1736 - protein, 9 aa, synthetic construct
  REGION 1..9: note = Description of Artificial Sequence: Synthetic peptide
IVAAIVFIT

SEQ ID NO: 1737 - protein, 11 aa, synthetic construct
  REGION 1..11: note = Description of Artificial Sequence: Synthetic peptide
IVAGGIVAIVV

SEQ ID NO: 1738 - protein, 12 aa, synthetic construct
  REGION 1..12: note = Description of Artificial Sequence: Synthetic peptide
IVAIVVTCLAYY

SEQ ID NO: 1739 - protein, 8 aa, synthetic construct
  REGION 1..8: note = Description of Artificial Sequence: Synthetic peptide
IVEEAKKV

SEQ ID NO: 1740 - protein, 10 aa, synthetic construct
  REGION 1..10: note = Description of Artificial Sequence: Synthetic peptide
IVGDVVQEGV

SEQ ID NO: 1741 - protein, 9 aa, synthetic construct
  REGION 1..9: note = Description of Artificial Sequence: Synthetic peptide
IVGGQIVTC

SEQ ID NO: 1742 - protein, 10 aa, synthetic construct
  REGION 1..10: note = Description of Artificial Sequence: Synthetic peptide
IVGVALLAVF

SEQ ID NO: 1743 - protein, 9 aa, synthetic construct
  REGION 1..9: note = Description of Artificial Sequence: Synthetic peptide
IVKFISTCA

SEQ ID NO: 1744 - protein, 11 aa, synthetic construct
  REGION 1..11: note = Description of Artificial Sequence: Synthetic peptide
IVNNWLKQLIK

SEQ ID NO: 1745 - protein, 11 aa, synthetic construct
  REGION 1..11: note = Description of Artificial Sequence: Synthetic peptide
IVNSVLLFLAF

SEQ ID NO: 1746 - protein, 11 aa, synthetic construct
  REGION 1..11: note = Description of Artificial Sequence: Synthetic peptide
IVNVSLVKPSF

SEQ ID NO: 1747 - protein, 9 aa, synthetic construct
  REGION 1..9: note = Description of Artificial Sequence: Synthetic peptide
IVQLSEISM

SEQ ID NO: 1748 - protein, 9 aa, synthetic construct
  REGION 1..9: note = Description of Artificial Sequence: Synthetic peptide
IVQMLSDTL

SEQ ID NO: 1749 - protein, 10 aa, synthetic construct
  REGION 1..10: note = Description of Artificial Sequence: Synthetic peptide
IVRFPNITNL

SEQ ID NO: 1750 - protein, 10 aa, synthetic construct
  REGION 1..10: note = Description of Artificial Sequence: Synthetic peptide
IVSTIQRKYK

SEQ ID NO: 1751 - protein, 8 aa, synthetic construct
  REGION 1..8: note = Description of Artificial Sequence: Synthetic peptide
IVVTCLAY

SEQ ID NO: 1752 - protein, 11 aa, synthetic construct
  REGION 1..11: note = Description of Artificial Sequence: Synthetic peptide
IVWHVNNATNK

SEQ ID NO: 1753 - protein, 10 aa, synthetic construct
  REGION 1..10: note = Description of Artificial Sequence: Synthetic peptide
IVYTACSHAA

SEQ ID NO: 1754 - protein, 10 aa, synthetic construct
  REGION 1..10: note = Description of Artificial Sequence: Synthetic peptide
IWLGFIAGLI

SEQ ID NO: 1755 - protein, 10 aa, synthetic construct
  REGION 1..10: note = Description of Artificial Sequence: Synthetic peptide
IWNLDYIINL

SEQ ID NO: 1756 - protein, 8 aa, synthetic construct
  REGION 1..8: note = Description of Artificial Sequence: Synthetic peptide
IWNVKDFM

SEQ ID NO: 1757 - protein, 9 aa, synthetic construct
  REGION 1..9: note = Description of Artificial Sequence: Synthetic peptide
IYSKHTPIN

SEQ ID NO: 1758 - protein, 9 aa, synthetic construct
  REGION 1..9: note = Description of Artificial Sequence: Synthetic peptide
IYTELEPPC

SEQ ID NO: 1759 - protein, 9 aa, synthetic construct
  REGION 1..9: note = Description of Artificial Sequence: Synthetic peptide
KAHFPREGV

SEQ ID NO: 1760 - protein, 9 aa, synthetic construct
  REGION 1..9: note = Description of Artificial Sequence: Synthetic peptide
KAHKDKSAQ

SEQ ID NO: 1761 - protein, 11 aa, synthetic construct
  REGION 1..11: note = Description of Artificial Sequence: Synthetic peptide
KAHKDKSAQCF

SEQ ID NO: 1762 - protein, 8 aa, synthetic construct
  REGION 1..8: note = Description of Artificial Sequence: Synthetic peptide
KAIDGGVT

SEQ ID NO: 1763 - protein, 10 aa, synthetic construct
  REGION 1..10: note = Description of Artificial Sequence: Synthetic peptide
KAIDGGVTRD

SEQ ID NO: 1764 - protein, 11 aa, synthetic construct
  REGION 1..11: note = Description of Artificial Sequence: Synthetic peptide
KALRKVPTDNY

SEQ ID NO: 1765 - protein, 9 aa, synthetic construct
  REGION 1..9: note = Description of Artificial Sequence: Synthetic peptide
KARLYYDSM

SEQ ID NO: 1766 - protein, 10 aa, synthetic construct
  REGION 1..10: note = Description of Artificial Sequence: Synthetic peptide
KASCTLSEQL

SEQ ID NO: 1767 - protein, 10 aa, synthetic construct
  REGION 1..10: note = Description of Artificial Sequence: Synthetic peptide
KASMPTTIAK

SEQ ID NO: 1768 - protein, 9 aa, synthetic construct
  REGION 1..9: note = Description of Artificial Sequence: Synthetic peptide
KAYKDYLAS

SEQ ID NO: 1769 - protein, 8 aa, synthetic construct
  REGION 1..8: note = Description of Artificial Sequence: Synthetic peptide
KAYNVTQA

SEQ ID NO: 1770 - protein, 11 aa, synthetic construct
  REGION 1..11: note = Description of Artificial Sequence: Synthetic peptide
KAYNVTQAFGR

SEQ ID NO: 1771 - protein, 8 aa, synthetic construct
  REGION 1..8: note = Description of Artificial Sequence: Synthetic peptide
KCAYWVPR

SEQ ID NO: 1772 - protein, 10 aa, synthetic construct
  REGION 1..10: note = Description of Artificial Sequence: Synthetic peptide
KCDHCGETSW

SEQ ID NO: 1773 - protein, 9 aa, synthetic construct
  REGION 1..9: note = Description of Artificial Sequence: Synthetic peptide
KCDRAMPNM

SEQ ID NO: 1774 - protein, 10 aa, synthetic construct
  REGION 1..10: note = Description of Artificial Sequence: Synthetic peptide
KCEESSAKSA

SEQ ID NO: 1775 - protein, 8 aa, synthetic construct
  REGION 1..8: note = Description of Artificial Sequence: Synthetic peptide
KCKSAFYI

SEQ ID NO: 1776 - protein, 9 aa, synthetic construct
  REGION 1..9: note = Description of Artificial Sequence: Synthetic peptide
KCRSKNPLL

SEQ ID NO: 1777 - protein, 9 aa, synthetic construct
  REGION 1..9: note = Description of Artificial Sequence: Synthetic peptide
KCSRIIPAR

SEQ ID NO: 1778 - protein, 9 aa, synthetic construct
  REGION 1..9: note = Description of Artificial Sequence: Synthetic peptide
KDASGKPVP

SEQ ID NO: 1779 - protein, 10 aa, synthetic construct
  REGION 1..10: note = Description of Artificial Sequence: Synthetic peptide
KDASGKPVPY

SEQ ID NO: 1780 - protein, 8 aa, synthetic construct
  REGION 1..8: note = Description of Artificial Sequence: Synthetic peptide
KDATPSDF

SEQ ID NO: 1781 - protein, 10 aa, synthetic construct
  REGION 1..10: note = Description of Artificial Sequence: Synthetic peptide
KDATPSDFVR

SEQ ID NO: 1782 - protein, 8 aa, synthetic construct
  REGION 1..8: note = Description of Artificial Sequence: Synthetic peptide
KDCPAVAK

SEQ ID NO: 1783 - protein, 9 aa, synthetic construct
  REGION 1..9: note = Description of Artificial Sequence: Synthetic peptide
KDCPAVAKH

SEQ ID NO: 1784 - protein, 11 aa, synthetic construct
  REGION 1..11: note = Description of Artificial Sequence: Synthetic peptide
KDEDDNLIDSY

SEQ ID NO: 1785 - protein, 8 aa, synthetic construct
  REGION 1..8: note = Description of Artificial Sequence: Synthetic peptide
KDFMSLSE

SEQ ID NO: 1786 - protein, 8 aa, synthetic construct
  REGION 1..8: note = Description of Artificial Sequence: Synthetic peptide
KDFYDFAV

SEQ ID NO: 1787 - protein, 10 aa, synthetic construct
  REGION 1..10: note = Description of Artificial Sequence: Synthetic peptide
KDFYDFAVSK

SEQ ID NO: 1788 - protein, 9 aa, synthetic construct
  REGION 1..9: note = Description of Artificial Sequence: Synthetic peptide
KDGHVETFY

SEQ ID NO: 1789 - protein, 8 aa, synthetic construct
  REGION 1..8: note = Description of Artificial Sequence: Synthetic peptide
KDGIIWVA

SEQ ID NO: 1790 - protein, 8 aa, synthetic construct
  REGION 1..8: note = Description of Artificial Sequence: Synthetic peptide
KDGTCGLV

SEQ ID NO: 1791 - protein, 8 aa, synthetic construct
  REGION 1..8: note = Description of Artificial Sequence: Synthetic peptide
KDHIGTRN

SEQ ID NO: 1792 - protein, 8 aa, synthetic construct
  REGION 1..8: note = Description of Artificial Sequence: Synthetic peptide
KDKKKKAD

SEQ ID NO: 1793 - protein, 9 aa, synthetic construct
  REGION 1..9: note = Description of Artificial Sequence: Synthetic peptide
KDKSAQCFK

SEQ ID NO: 1794 - protein, 8 aa, synthetic construct
  REGION 1..8: note = Description of Artificial Sequence: Synthetic peptide
KDLLARAG

SEQ ID NO: 1795 - protein, 8 aa, synthetic construct
  REGION 1..8: note = Description of Artificial Sequence: Synthetic peptide
KDLPKEIT

SEQ ID NO: 1796 - protein, 9 aa, synthetic construct
  REGION 1..9: note = Description of Artificial Sequence: Synthetic peptide
KDMTYRRLI

SEQ ID NO: 1797 - protein, 11 aa, synthetic construct
  REGION 1..11: note = Description of Artificial Sequence: Synthetic peptide
KDMTYRRLISM

SEQ ID NO: 1798 - protein, 9 aa, synthetic construct
  REGION 1..9: note = Description of Artificial Sequence: Synthetic peptide
KDPNFKDQV

SEQ ID NO: 1799 - protein, 8 aa, synthetic construct
  REGION 1..8: note = Description of Artificial Sequence: Synthetic peptide
KDQVILLN

SEQ ID NO: 1800 - protein, 9 aa, synthetic construct
  REGION 1..9: note = Description of Artificial Sequence: Synthetic peptide
KDTEKYCAL

SEQ ID NO: 1801 - protein, 8 aa, synthetic construct
  REGION 1..8: note = Description of Artificial Sequence: Synthetic peptide
KDVLECNV

SEQ ID NO: 1802 - protein, 8 aa, synthetic construct
  REGION 1..8: note = Description of Artificial Sequence: Synthetic peptide
KDYLASGG

SEQ ID NO: 1803 - protein, 8 aa, synthetic construct
  REGION 1..8: note = Description of Artificial Sequence: Synthetic peptide
KEELDKYF

SEQ ID NO: 1804 - protein, 10 aa, synthetic construct
  REGION 1..10: note = Description of Artificial Sequence: Synthetic peptide
KEELDKYFKN

SEQ ID NO: 1805 - protein, 8 aa, synthetic construct
  REGION 1..8: note = Description of Artificial Sequence: Synthetic peptide
KEEVKPFI

SEQ ID NO: 1806 - protein, 9 aa, synthetic construct
  REGION 1..9: note = Description of Artificial Sequence: Synthetic peptide
KEEVKPFIT

SEQ ID NO: 1807 - protein, 9 aa, synthetic construct
  REGION 1..9: note = Description of Artificial Sequence: Synthetic peptide
KEGATTCGY

SEQ ID NO: 1808 - protein, 10 aa, synthetic construct
  REGION 1..10: note = Description of Artificial Sequence: Synthetic peptide
KEGATTCGYL

SEQ ID NO: 1809 - protein, 10 aa, synthetic construct
  REGION 1..10: note = Description of Artificial Sequence: Synthetic peptide
KEGQINDMIL

SEQ ID NO: 1810 - protein, 12 aa, synthetic construct
  REGION 1..12: note = Description of Artificial Sequence: Synthetic peptide
KEGQINDMILSL

SEQ ID NO: 1811 - protein, 9 aa, synthetic construct
  REGION 1..9: note = Description of Artificial Sequence: Synthetic peptide
KEGSSVELK

SEQ ID NO: 1812 - protein, 11 aa, synthetic construct
  REGION 1..11: note = Description of Artificial Sequence: Synthetic peptide
KEIKESVQTFF

SEQ ID NO: 1813 - protein, 10 aa, synthetic construct
  REGION 1..10: note = Description of Artificial Sequence: Synthetic peptide
KEILVTYNCC

SEQ ID NO: 1814 - protein, 8 aa, synthetic construct
  REGION 1..8: note = Description of Artificial Sequence: Synthetic peptide
KEITVATS

SEQ ID NO: 1815 - protein, 10 aa, synthetic construct
  REGION 1..10: note = Description of Artificial Sequence: Synthetic peptide
KELLVYAADP

SEQ ID NO: 1816 - protein, 10 aa, synthetic construct
  REGION 1..10: note = Description of Artificial Sequence: Synthetic peptide
KENDSKEGFF

SEQ ID NO: 1817 - protein, 11 aa, synthetic construct
  REGION 1..11: note = Description of Artificial Sequence: Synthetic peptide
KENSYTTTIKP

SEQ ID NO: 1818 - protein, 9 aa, synthetic construct
  REGION 1..9: note = Description of Artificial Sequence: Synthetic peptide
KEPCSSGTY

SEQ ID NO: 1819 - protein, 8 aa, synthetic construct
  REGION 1..8: note = Description of Artificial Sequence: Synthetic peptide
KESPFELE

SEQ ID NO: 1820 - protein, 11 aa, synthetic construct
  REGION 1..11: note = Description of Artificial Sequence: Synthetic peptide
KESPFELEDFI

SEQ ID NO: 1821 - protein, 11 aa, synthetic construct
  REGION 1..11: note = Description of Artificial Sequence: Synthetic peptide
KESVQTFFKLV

SEQ ID NO: 1822 - protein, 12 aa, synthetic construct
  REGION 1..12: note = Description of Artificial Sequence: Synthetic peptide
KFADDLNQLTGY

SEQ ID NO: 1823 - protein, 10 aa, synthetic construct
  REGION 1..10: note = Description of Artificial Sequence: Synthetic peptide
KFCLEASFNY

SEQ ID NO: 1824 - protein, 8 aa, synthetic construct
  REGION 1..8: note = Description of Artificial Sequence: Synthetic peptide
KFDEDDSE

SEQ ID NO: 1825 - protein, 9 aa, synthetic construct
  REGION 1..9: note = Description of Artificial Sequence: Synthetic peptide
KFDEDDSEP

SEQ ID NO: 1826 - protein, 8 aa, synthetic construct
  REGION 1..8: note = Description of Artificial Sequence: Synthetic peptide
KFDTFNGE

SEQ ID NO: 1827 - protein, 9 aa, synthetic construct
  REGION 1..9: note = Description of Artificial Sequence: Synthetic peptide
KFDTFNGEC

SEQ ID NO: 1828 - protein, 8 aa, synthetic construct
  REGION 1..8: note = Description of Artificial Sequence: Synthetic peptide
KFISTCAC

SEQ ID NO: 1829 - protein, 10 aa, synthetic construct
  REGION 1..10: note = Description of Artificial Sequence: Synthetic peptide
KFISTCACEI

SEQ ID NO: 1830 - protein, 9 aa, synthetic construct
  REGION 1..9: note = Description of Artificial Sequence: Synthetic peptide
KFKTEGLCV

SEQ ID NO: 1831 - protein, 9 aa, synthetic construct
  REGION 1..9: note = Description of Artificial Sequence: Synthetic peptide
KFLKTNCCR

SEQ ID NO: 1832 - protein, 9 aa, synthetic construct
  REGION 1..9: note = Description of Artificial Sequence: Synthetic peptide
KFLPFQQFG

SEQ ID NO: 1833 - protein, 11 aa, synthetic construct
  REGION 1..11: note = Description of Artificial Sequence: Synthetic peptide
KFLTENLLLYI

SEQ ID NO: 1834 - protein, 8 aa, synthetic construct
  REGION 1..8: note = Description of Artificial Sequence: Synthetic peptide
KFLVFLGI

SEQ ID NO: 1835 - protein, 9 aa, synthetic construct
  REGION 1..9: note = Description of Artificial Sequence: Synthetic peptide
KFLVFLGII

SEQ ID NO: 1836 - protein, 8 aa, synthetic construct
  REGION 1..8: note = Description of Artificial Sequence: Synthetic peptide
KFNPPALQ

SEQ ID NO: 1837 - protein, 12 aa, synthetic construct
  REGION 1..12: note = Description of Artificial Sequence: Synthetic peptide
KFNPPALQDAYY

SEQ ID NO: 1838 - protein, 8 aa, synthetic construct
  REGION 1..8: note = Description of Artificial Sequence: Synthetic peptide
KFPRGQGV

SEQ ID NO: 1839 - protein, 11 aa, synthetic construct
  REGION 1..11: note = Description of Artificial Sequence: Synthetic peptide
KFYDAQPCSDK

SEQ ID NO: 1840 - protein, 11 aa, synthetic construct
  REGION 1..11: note = Description of Artificial Sequence: Synthetic peptide
KFYGGWHNMLK

SEQ ID NO: 1841 - protein, 9 aa, synthetic construct
  REGION 1..9: note = Description of Artificial Sequence: Synthetic peptide
KGAKLLHKP

SEQ ID NO: 1842 - protein, 9 aa, synthetic construct
  REGION 1..9: note = Description of Artificial Sequence: Synthetic peptide
KGDYGDAVV

SEQ ID NO: 1843 - protein, 9 aa, synthetic construct
  REGION 1..9: note = Description of Artificial Sequence: Synthetic peptide
KGFCDLKGK

SEQ ID NO: 1844 - protein, 10 aa, synthetic construct
  REGION 1..10: note = Description of Artificial Sequence: Synthetic peptide
KGFCDLKGKY

SEQ ID NO: 1845 - protein, 10 aa, synthetic construct
  REGION 1..10: note = Description of Artificial Sequence: Synthetic peptide
KGGAPTKVTF

SEQ ID NO: 1846 - protein, 8 aa, synthetic construct
  REGION 1..8: note = Description of Artificial Sequence: Synthetic peptide
KGGRTIAF

SEQ ID NO: 1847 - protein, 9 aa, synthetic construct
  REGION 1..9: note = Description of Artificial Sequence: Synthetic peptide
KGIKIQEGV

SEQ ID NO: 1848 - protein, 10 aa, synthetic construct
  REGION 1..10: note = Description of Artificial Sequence: Synthetic peptide
KGIMMNVAKY

SEQ ID NO: 1849 - protein, 8 aa, synthetic construct
  REGION 1..8: note = Description of Artificial Sequence: Synthetic peptide
KGLDYKAF

SEQ ID NO: 1850 - protein, 9 aa, synthetic construct
  REGION 1..9: note = Description of Artificial Sequence: Synthetic peptide
KGLDYKAFK

SEQ ID NO: 1851 - protein, 8 aa, synthetic construct
  REGION 1..8: note = Description of Artificial Sequence: Synthetic peptide
KGLNNLNR

SEQ ID NO: 1852 - protein, 8 aa, synthetic construct
  REGION 1..8: note = Description of Artificial Sequence: Synthetic peptide
KGLPWNVV

SEQ ID NO: 1853 - protein, 11 aa, synthetic construct
  REGION 1..11: note = Description of Artificial Sequence: Synthetic peptide
KGLYRKCVKSR

SEQ ID NO: 1854 - protein, 9 aa, synthetic construct
  REGION 1..9: note = Description of Artificial Sequence: Synthetic peptide
KGPITDVFY

SEQ ID NO: 1855 - protein, 10 aa, synthetic construct
  REGION 1..10: note = Description of Artificial Sequence: Synthetic peptide
KGPKVKYLYF

SEQ ID NO: 1856 - protein, 9 aa, synthetic construct
  REGION 1..9: note = Description of Artificial Sequence: Synthetic peptide
KGVAPGTAV

SEQ ID NO: 1857 - protein, 10 aa, synthetic construct
  REGION 1..10: note = Description of Artificial Sequence: Synthetic peptide
KGVAPGTAVL

SEQ ID NO: 1858 - protein, 9 aa, synthetic construct
  REGION 1..9: note = Description of Artificial Sequence: Synthetic peptide
KGVEAVMYM

SEQ ID NO: 1859 - protein, 9 aa, synthetic construct
  REGION 1..9: note = Description of Artificial Sequence: Synthetic peptide
KGVHFVCNL

SEQ ID NO: 1860 - protein, 8 aa, synthetic construct
  REGION 1..8: note = Description of Artificial Sequence: Synthetic peptide
KHADFDTW

SEQ ID NO: 1861 - protein, 10 aa, synthetic construct
  REGION 1..10: note = Description of Artificial Sequence: Synthetic peptide
KHAFLCLFLL

SEQ ID NO: 1862 - protein, 9 aa, synthetic construct
  REGION 1..9: note = Description of Artificial Sequence: Synthetic peptide
KHDFFKFRI

SEQ ID NO: 1863 - protein, 9 aa, synthetic construct
  REGION 1..9: note = Description of Artificial Sequence: Synthetic peptide
KHFYWFFSN

SEQ ID NO: 1864 - protein, 9 aa, synthetic construct
  REGION 1..9: note = Description of Artificial Sequence: Synthetic peptide
KHKHAFLCL

SEQ ID NO: 1865 - protein, 8 aa, synthetic construct
  REGION 1..8: note = Description of Artificial Sequence: Synthetic peptide
KIADYNYK

SEQ ID NO: 1866 - protein, 9 aa, synthetic construct
  REGION 1..9: note = Description of Artificial Sequence: Synthetic peptide
KIALKGGKI

SEQ ID NO: 1867 - protein, 11 aa, synthetic construct
  REGION 1..11: note = Description of Artificial Sequence: Synthetic peptide
KIFVDGVPFVV

SEQ ID NO: 1868 - protein, 8 aa, synthetic construct
  REGION 1..8: note = Description of Artificial Sequence: Synthetic peptide
KILNNLGV

SEQ ID NO: 1869 - protein, 9 aa, synthetic construct
  REGION 1..9: note = Description of Artificial Sequence: Synthetic peptide
KINAACRKV

SEQ ID NO: 1870 - protein, 10 aa, synthetic construct
  REGION 1..10: note = Description of Artificial Sequence: Synthetic peptide
KIVDEPEEHV

SEQ ID NO: 1871 - protein, 8 aa, synthetic construct
  REGION 1..8: note = Description of Artificial Sequence: Synthetic peptide
KKAGGTTE

SEQ ID NO: 1872 - protein, 10 aa, synthetic construct
  REGION 1..10: note = Description of Artificial Sequence: Synthetic peptide
KKAGGTTEML

SEQ ID NO: 1873 - protein, 8 aa, synthetic construct
  REGION 1..8: note = Description of Artificial Sequence: Synthetic peptide
KKCKSAFY

SEQ ID NO: 1874 - protein, 10 aa, synthetic construct
  REGION 1..10: note = Description of Artificial Sequence: Synthetic peptide
KKCKSAFYIL

SEQ ID NO: 1875 - protein, 9 aa, synthetic construct
  REGION 1..9: note = Description of Artificial Sequence: Synthetic peptide
KKGAKLLHK

SEQ ID NO: 1876 - protein, 10 aa, synthetic construct
  REGION 1..10: note = Description of Artificial Sequence: Synthetic peptide
KKKLDGFMGR

SEQ ID NO: 1877 - protein, 9 aa, synthetic construct
  REGION 1..9: note = Description of Artificial Sequence: Synthetic peptide
KKLKKSLNV

SEQ ID NO: 1878 - protein, 8 aa, synthetic construct
  REGION 1..8: note = Description of Artificial Sequence: Synthetic peptide
KKRWQLAL

SEQ ID NO: 1879 - protein, 9 aa, synthetic construct
  REGION 1..9: note = Description of Artificial Sequence: Synthetic peptide
KKSTNLVKN

SEQ ID NO: 1880 - protein, 11 aa, synthetic construct
  REGION 1..11: note = Description of Artificial Sequence: Synthetic peptide
KLALGGSVAIK

SEQ ID NO: 1881 - protein, 11 aa, synthetic construct
  REGION 1..11: note = Description of Artificial Sequence: Synthetic peptide
KLASHMYCSFY

SEQ ID NO: 1882 - protein, 10 aa, synthetic construct
  REGION 1..10: note = Description of Artificial Sequence: Synthetic peptide
KLDDKDPNFK

SEQ ID NO: 1883 - protein, 8 aa, synthetic construct
  REGION 1..8: note = Description of Artificial Sequence: Synthetic peptide
KLDGVVCT

SEQ ID NO: 1884 - protein, 8 aa, synthetic construct
  REGION 1..8: note = Description of Artificial Sequence: Synthetic peptide
KLDNDALN

SEQ ID NO: 1885 - protein, 8 aa, synthetic construct
  REGION 1..8: note = Description of Artificial Sequence: Synthetic peptide
KLDNYYKK

SEQ ID NO: 1886 - protein, 9 aa, synthetic construct
  REGION 1..9: note = Description of Artificial Sequence: Synthetic peptide
KLDNYYKKD

SEQ ID NO: 1887 - protein, 9 aa, synthetic construct
  REGION 1..9: note = Description of Artificial Sequence: Synthetic peptide
KLEGYAFEH

SEQ ID NO: 1888 - protein, 10 aa, synthetic construct
  REGION 1..10: note = Description of Artificial Sequence: Synthetic peptide
KLEGYAFEHI

SEQ ID NO: 1889 - protein, 12 aa, synthetic construct
  REGION 1..12: note = Description of Artificial Sequence: Synthetic peptide
KLEGYAFEHIVY

SEQ ID NO: 1890 - protein, 8 aa, synthetic construct
  REGION 1..8: note = Description of Artificial Sequence: Synthetic peptide
KLGASQRV

SEQ ID NO: 1891 - protein, 11 aa, synthetic construct
  REGION 1..11: note = Description of Artificial Sequence: Synthetic peptide
KLGSLVVRCSF

SEQ ID NO: 1892 - protein, 10 aa, synthetic construct
  REGION 1..10: note = Description of Artificial Sequence: Synthetic peptide
KLHDELTGHM

SEQ ID NO: 1893 - protein, 9 aa, synthetic construct
  REGION 1..9: note = Description of Artificial Sequence: Synthetic peptide
KLHNWNCVN

SEQ ID NO: 1894 - protein, 10 aa, synthetic construct
  REGION 1..10: note = Description of Artificial Sequence: Synthetic peptide
KLIANQFNSA

SEQ ID NO: 1895 - protein, 12 aa, synthetic construct
  REGION 1..12: note = Description of Artificial Sequence: Synthetic peptide
KLINIIIWFLLL

SEQ ID NO: 1896 - protein, 11 aa, synthetic construct
  REGION 1..11: note = Description of Artificial Sequence: Synthetic peptide
KLKALNLGETF

SEQ ID NO: 1897 - protein, 8 aa, synthetic construct
  REGION 1..8: note = Description of Artificial Sequence: Synthetic peptide
KLKKSLNV

SEQ ID NO: 1898 - protein, 8 aa, synthetic construct
  REGION 1..8: note = Description of Artificial Sequence: Synthetic peptide
KLLGVGGK

SEQ ID NO: 1899 - protein, 9 aa, synthetic construct
  REGION 1..9: note = Description of Artificial Sequence: Synthetic peptide
KLLGVGGKP

SEQ ID NO: 1900 - protein, 10 aa, synthetic construct
  REGION 1..10: note = Description of Artificial Sequence: Synthetic peptide
KLLHKPIVWH

SEQ ID NO: 1901 - protein, 11 aa, synthetic construct
  REGION 1..11: note = Description of Artificial Sequence: Synthetic peptide
KLMGHFAWWTA

SEQ ID NO: 1902 - protein, 12 aa, synthetic construct
  REGION 1..12: note = Description of Artificial Sequence: Synthetic peptide
KLMGHFAWWTAF

SEQ ID NO: 1903 - protein, 12 aa, synthetic construct
  REGION 1..12: note = Description of Artificial Sequence: Synthetic peptide
KLMVVIPDYNTY

SEQ ID NO: 1904 - protein, 11 aa, synthetic construct
  REGION 1..11: note = Description of Artificial Sequence: Synthetic peptide
KLNEEIAIILA

SEQ ID NO: 1905 - protein, 9 aa, synthetic construct
  REGION 1..9: note = Description of Artificial Sequence: Synthetic peptide
KLNTDHSSS

SEQ ID NO: 1906 - protein, 8 aa, synthetic construct
  REGION 1..8: note = Description of Artificial Sequence: Synthetic peptide
KLNVGDYF

SEQ ID NO: 1907 - protein, 10 aa, synthetic construct
  REGION 1..10: note = Description of Artificial Sequence: Synthetic peptide
KLNVGDYFVL

SEQ ID NO: 1908 - protein, 10 aa, synthetic construct
  REGION 1..10: note = Description of Artificial Sequence: Synthetic peptide
KLQDVVNQNA

SEQ ID NO: 1909 - protein, 9 aa, synthetic construct
  REGION 1..9: note = Description of Artificial Sequence: Synthetic peptide
KLQNNELSP

SEQ ID NO: 1910 - protein, 11 aa, synthetic construct
  REGION 1..11: note = Description of Artificial Sequence: Synthetic peptide
KLRGTAVMSLK

SEQ ID NO: 1911 - protein, 8 aa, synthetic construct
  REGION 1..8: note = Description of Artificial Sequence: Synthetic peptide
KLRSDVLL

SEQ ID NO: 1912 - protein, 10 aa, synthetic construct
  REGION 1..10: note = Description of Artificial Sequence: Synthetic peptide
KLSHQSDIEV

SEQ ID NO: 1913 - protein, 8 aa, synthetic construct
  REGION 1..8: note = Description of Artificial Sequence: Synthetic peptide
KLTCATTR

SEQ ID NO: 1914 - protein, 8 aa, synthetic construct
  REGION 1..8: note = Description of Artificial Sequence: Synthetic peptide
KLTDNVYI

SEQ ID NO: 1915 - protein, 10 aa, synthetic construct
  REGION 1..10: note = Description of Artificial Sequence: Synthetic peptide
KLVLSVNPYV

SEQ ID NO: 1916 - protein, 10 aa, synthetic construct
  REGION 1..10: note = Description of Artificial Sequence: Synthetic peptide
KLVSSFLEMK

SEQ ID NO: 1917 - protein, 9 aa, synthetic construct
  REGION 1..9: note = Description of Artificial Sequence: Synthetic peptide
KMADQAMTQ

SEQ ID NO: 1918 - protein, 11 aa, synthetic construct
  REGION 1..11: note = Description of Artificial Sequence: Synthetic peptide
KMKDLSPRWYF

SEQ ID NO: 1919 - protein, 9 aa, synthetic construct
  REGION 1..9: note = Description of Artificial Sequence: Synthetic peptide
KMSECVLGQ

SEQ ID NO: 1920 - protein, 10 aa, synthetic construct
  REGION 1..10: note = Description of Artificial Sequence: Synthetic peptide
KMVSLLSVLL

SEQ ID NO: 1921 - protein, 8 aa, synthetic construct
  REGION 1..8: note = Description of Artificial Sequence: Synthetic peptide
KNLSDRVV

SEQ ID NO: 1922 - protein, 10 aa, synthetic construct
  REGION 1..10: note = Description of Artificial Sequence: Synthetic peptide
KNSKVQIGEY

SEQ ID NO: 1923 - protein, 9 aa, synthetic construct
  REGION 1..9: note = Description of Artificial Sequence: Synthetic peptide
KNTVKSVGK

SEQ ID NO: 1924 - protein, 11 aa, synthetic construct
  REGION 1..11: note = Description of Artificial Sequence: Synthetic peptide
KPASRELKVTF

SEQ ID NO: 1925 - protein, 9 aa, synthetic construct
  REGION 1..9: note = Description of Artificial Sequence: Synthetic peptide
KPGGTSSGD

SEQ ID NO: 1926 - protein, 9 aa, synthetic construct
  REGION 1..9: note = Description of Artificial Sequence: Synthetic peptide
KPIVWHVNN

SEQ ID NO: 1927 - protein, 11 aa, synthetic construct
  REGION 1..11: note = Description of Artificial Sequence: Synthetic peptide
KPLEFGATSAA

SEQ ID NO: 1928 - protein, 11 aa, synthetic construct
  REGION 1..11: note = Description of Artificial Sequence: Synthetic peptide
KPNELSRVLGL

SEQ ID NO: 1929 - protein, 9 aa, synthetic construct
  REGION 1..9: note = Description of Artificial Sequence: Synthetic peptide
KPNTWCIRC

SEQ ID NO: 1930 - protein, 11 aa, synthetic construct
  REGION 1..11: note = Description of Artificial Sequence: Synthetic peptide
KPPPGDQFKHL

SEQ ID NO: 1931 - protein, 11 aa, synthetic construct
  REGION 1..11: note = Description of Artificial Sequence: Synthetic peptide
KPREQIDGYVM

SEQ ID NO: 1932 - protein, 8 aa, synthetic construct
  REGION 1..8: note = Description of Artificial Sequence: Synthetic peptide
KPRSQMEI

SEQ ID NO: 1933 - protein, 10 aa, synthetic construct
  REGION 1..10: note = Description of Artificial Sequence: Synthetic peptide
KPRSQMEIDF

SEQ ID NO: 1934 - protein, 11 aa, synthetic construct
  REGION 1..11: note = Description of Artificial Sequence: Synthetic peptide
KPSKRSFIEDL

SEQ ID NO: 1935 - protein, 9 aa, synthetic construct
  REGION 1..9: note = Description of Artificial Sequence: Synthetic peptide
KPTETICAP

SEQ ID NO: 1936 - protein, 8 aa, synthetic construct
  REGION 1..8: note = Description of Artificial Sequence: Synthetic peptide
KPVPEVKI

SEQ ID NO: 1937 - protein, 8 aa, synthetic construct
  REGION 1..8: note = Description of Artificial Sequence: Synthetic peptide
KPVSEEVV

SEQ ID NO: 1938 - protein, 10 aa, synthetic construct
  REGION 1..10: note = Description of Artificial Sequence: Synthetic peptide
KPYIKWDLLK

SEQ ID NO: 1939 - protein, 9 aa, synthetic construct
  REGION 1..9: note = Description of Artificial Sequence: Synthetic peptide
KQARSEDKR

SEQ ID NO: 1940 - protein, 8 aa, synthetic construct
  REGION 1..8: note = Description of Artificial Sequence: Synthetic peptide
KQASLNGV

SEQ ID NO: 1941 - protein, 9 aa, synthetic construct
  REGION 1..9: note = Description of Artificial Sequence: Synthetic peptide
KQASLNGVT

SEQ ID NO: 1942 - protein, 8 aa, synthetic construct
  REGION 1..8: note = Description of Artificial Sequence: Synthetic peptide
KQATKYLV

SEQ ID NO: 1943 - protein, 9 aa, synthetic construct
  REGION 1..9: note = Description of Artificial Sequence: Synthetic peptide
KQATKYLVQ

SEQ ID NO: 1944 - protein, 9 aa, synthetic construct
  REGION 1..9: note = Description of Artificial Sequence: Synthetic peptide
KQIRSAAKK

SEQ ID NO: 1945 - protein, 10 aa, synthetic construct
  REGION 1..10: note = Description of Artificial Sequence: Synthetic peptide
KQIVESCGNF

SEQ ID NO: 1946 - protein, 10 aa, synthetic construct
  REGION 1..10: note = Description of Artificial Sequence: Synthetic peptide
KQIYKTPPIK

SEQ ID NO: 1947 - protein, 9 aa, synthetic construct
  REGION 1..9: note = Description of Artificial Sequence: Synthetic peptide
KQLPFFYYS

SEQ ID NO: 1948 - protein, 9 aa, synthetic construct
  REGION 1..9: note = Description of Artificial Sequence: Synthetic peptide
KQQTVTLLP

SEQ ID NO: 1949 - protein, 8 aa, synthetic construct
  REGION 1..8: note = Description of Artificial Sequence: Synthetic peptide
KQRRPQGL

SEQ ID NO: 1950 - protein, 9 aa, synthetic construct
  REGION 1..9: note = Description of Artificial Sequence: Synthetic peptide
KQVEQKIAE

SEQ ID NO: 1951 - protein, 10 aa, synthetic construct
  REGION 1..10: note = Description of Artificial Sequence: Synthetic peptide
KQYGDCLGDI

SEQ ID NO: 1952 - protein, 8 aa, synthetic construct
  REGION 1..8: note = Description of Artificial Sequence: Synthetic peptide
KRDAPAHI

SEQ ID NO: 1953 - protein, 8 aa, synthetic construct
  REGION 1..8: note = Description of Artificial Sequence: Synthetic peptide
KRFKESPF

SEQ ID NO: 1954 - protein, 10 aa, synthetic construct
  REGION 1..10: note = Description of Artificial Sequence: Synthetic peptide
KRHTFSNYQH

SEQ ID NO: 1955 - protein, 9 aa, synthetic construct
  REGION 1..9: note = Description of Artificial Sequence: Synthetic peptide
KRISNCVAD

SEQ ID NO: 1956 - protein, 8 aa, synthetic construct
  REGION 1..8: note = Description of Artificial Sequence: Synthetic peptide
KRNIKPVP

SEQ ID NO: 1957 - protein, 9 aa, synthetic construct
  REGION 1..9: note = Description of Artificial Sequence: Synthetic peptide
KRNIKPVPE

SEQ ID NO: 1958 - protein, 10 aa, synthetic construct
  REGION 1..10: note = Description of Artificial Sequence: Synthetic peptide
KRNIKPVPEV

SEQ ID NO: 1959 - protein, 11 aa, synthetic construct
  REGION 1..11: note = Description of Artificial Sequence: Synthetic peptide
KRNIKPVPEVK

SEQ ID NO: 1960 - protein, 9 aa, synthetic construct
  REGION 1..9: note = Description of Artificial Sequence: Synthetic peptide
KRNRATRVE

SEQ ID NO: 1961 - protein, 9 aa, synthetic construct
  REGION 1..9: note = Description of Artificial Sequence: Synthetic peptide
KRNVIPTIT

SEQ ID NO: 1962 - protein, 10 aa, synthetic construct
  REGION 1..10: note = Description of Artificial Sequence: Synthetic peptide
KRNVIPTITQ

SEQ ID NO: 1963 - protein, 11 aa, synthetic construct
  REGION 1..11: note = Description of Artificial Sequence: Synthetic peptide
KRNVIPTITQM

SEQ ID NO: 1964 - protein, 8 aa, synthetic construct
  REGION 1..8: note = Description of Artificial Sequence: Synthetic peptide
KRPINPTD

SEQ ID NO: 1965 - protein, 11 aa, synthetic construct
  REGION 1..11: note = Description of Artificial Sequence: Synthetic peptide
KRRVVFNGVSF

SEQ ID NO: 1966 - protein, 8 aa, synthetic construct
  REGION 1..8: note = Description of Artificial Sequence: Synthetic peptide
KRTATKAY

SEQ ID NO: 1967 - protein, 9 aa, synthetic construct
  REGION 1..9: note = Description of Artificial Sequence: Synthetic peptide
KRTIKGTHH

SEQ ID NO: 1968 - protein, 10 aa, synthetic construct
  REGION 1..10: note = Description of Artificial Sequence: Synthetic peptide
KRVDWTIEYP

SEQ ID NO: 1969 - protein, 9 aa, synthetic construct
  REGION 1..9: note = Description of Artificial Sequence: Synthetic peptide
KRVLNVVCK

SEQ ID NO: 1970 - protein, 10 aa, synthetic construct
  REGION 1..10: note = Description of Artificial Sequence: Synthetic peptide
KRWQLALSKG

SEQ ID NO: 1971 - protein, 11 aa, synthetic construct
  REGION 1..11: note = Description of Artificial Sequence: Synthetic peptide
KRWQLALSKGV

SEQ ID NO: 1972 - protein, 8 aa, synthetic construct
  REGION 1..8: note = Description of Artificial Sequence: Synthetic peptide
KSAFVNLK

SEQ ID NO: 1973 - protein, 10 aa, synthetic construct
  REGION 1..10: note = Description of Artificial Sequence: Synthetic peptide
KSAFYILPSI

SEQ ID NO: 1974 - protein, 10 aa, synthetic construct
  REGION 1..10: note = Description of Artificial Sequence: Synthetic peptide
KSAPLIELCV

SEQ ID NO: 1975 - protein, 11 aa, synthetic construct
  REGION 1..11: note = Description of Artificial Sequence: Synthetic peptide
KSAQCFKMFYK

SEQ ID NO: 1976 - protein, 11 aa, synthetic construct
  REGION 1..11: note = Description of Artificial Sequence: Synthetic peptide
KSDGTGTIYTE

SEQ ID NO: 1977 - protein, 9 aa, synthetic construct
  REGION 1..9: note = Description of Artificial Sequence: Synthetic peptide
KSEDAQGMD

SEQ ID NO: 1978 - protein, 12 aa, synthetic construct
  REGION 1..12: note = Description of Artificial Sequence: Synthetic peptide
KSEDAQGMDNLA

SEQ ID NO: 1979 - protein, 9 aa, synthetic construct
  REGION 1..9: note = Description of Artificial Sequence: Synthetic peptide
KSEFDRDAA

SEQ ID NO: 1980 - protein, 10 aa, synthetic construct
  REGION 1..10: note = Description of Artificial Sequence: Synthetic peptide
KSEFDRDAAM

SEQ ID NO: 1981 - protein, 9 aa, synthetic construct
  REGION 1..9: note = Description of Artificial Sequence: Synthetic peptide
KSEKQVEQK

SEQ ID NO: 1982 - protein, 10 aa, synthetic construct
  REGION 1..10: note = Description of Artificial Sequence: Synthetic peptide
KSEKQVEQKI

SEQ ID NO: 1983 - protein, 10 aa, synthetic construct
  REGION 1..10: note = Description of Artificial Sequence: Synthetic peptide
KSFDLGDELG

SEQ ID NO: 1984 - protein, 8 aa, synthetic construct
  REGION 1..8: note = Description of Artificial Sequence: Synthetic peptide
KSFTVEKG

SEQ ID NO: 1985 - protein, 12 aa, synthetic construct
  REGION 1..12: note = Description of Artificial Sequence: Synthetic peptide
KSHFAIGLALYY

SEQ ID NO: 1986 - protein, 8 aa, synthetic construct
  REGION 1..8: note = Description of Artificial Sequence: Synthetic peptide
KSIAATRG

SEQ ID NO: 1987 - protein, 9 aa, synthetic construct
  REGION 1..9: note = Description of Artificial Sequence: Synthetic peptide
KSILSPLYA

SEQ ID NO: 1988 - protein, 10 aa, synthetic construct
  REGION 1..10: note = Description of Artificial Sequence: Synthetic peptide
KSKCEESSAK

SEQ ID NO: 1989 - protein, 9 aa, synthetic construct
  REGION 1..9: note = Description of Artificial Sequence: Synthetic peptide
KSLTENKYS

SEQ ID NO: 1990 - protein, 9 aa, synthetic construct
  REGION 1..9: note = Description of Artificial Sequence: Synthetic peptide
KSPIQYIDI

SEQ ID NO: 1991 - protein, 12 aa, synthetic construct
  REGION 1..12: note = Description of Artificial Sequence: Synthetic peptide
KSPIQYIDIGNY

SEQ ID NO: 1992 - protein, 9 aa, synthetic construct
  REGION 1..9: note = Description of Artificial Sequence: Synthetic peptide
KSQDLSVVS

SEQ ID NO: 1993 - protein, 8 aa, synthetic construct
  REGION 1..8: note = Description of Artificial Sequence: Synthetic peptide
KSTNLVKN

SEQ ID NO: 1994 - protein, 11 aa, synthetic construct
  REGION 1..11: note = Description of Artificial Sequence: Synthetic peptide
KSYELQTPFEI

SEQ ID NO: 1995 - protein, 11 aa, synthetic construct
  REGION 1..11: note = Description of Artificial Sequence: Synthetic peptide
KTCGQQQTTLK

SEQ ID NO: 1996 - protein, 9 aa, synthetic construct
  REGION 1..9: note = Description of Artificial Sequence: Synthetic peptide
KTDGTLMIE

SEQ ID NO: 1997 - protein, 10 aa, synthetic construct
  REGION 1..10: note = Description of Artificial Sequence: Synthetic peptide
KTGDLQPLEQ

SEQ ID NO: 1998 - protein, 11 aa, synthetic construct
  REGION 1..11: note = Description of Artificial Sequence: Synthetic peptide
KTILRKGGRTI

SEQ ID NO: 1999 - protein, 8 aa, synthetic construct
  REGION 1..8: note = Description of Artificial Sequence: Synthetic peptide
KTIQPRVE

SEQ ID NO: 2000 - protein, 9 aa, synthetic construct
  REGION 1..9: note = Description of Artificial Sequence: Synthetic peptide
KTKNVTKEN

SEQ ID NO: 2001 - protein, 12 aa, synthetic construct
  REGION 1..12: note = Description of Artificial Sequence: Synthetic peptide
KTLLSLREVRTI

SEQ ID NO: 2002 - protein, 8 aa, synthetic construct
  REGION 1..8: note = Description of Artificial Sequence: Synthetic peptide
KTNCCRFQ

SEQ ID NO: 2003 - protein, 9 aa, synthetic construct
  REGION 1..9: note = Description of Artificial Sequence: Synthetic peptide
KTNCCRFQE

SEQ ID NO: 2004 - protein, 10 aa, synthetic construct
  REGION 1..10: note = Description of Artificial Sequence: Synthetic peptide
KTNCCRFQEK

SEQ ID NO: 2005 - protein, 11 aa, synthetic construct
  REGION 1..11: note = Description of Artificial Sequence: Synthetic peptide
KTPEEHFIETI

SEQ ID NO: 2006 - protein, 10 aa, synthetic construct
  REGION 1..10: note = Description of Artificial Sequence: Synthetic peptide
KTPKYKFVRI

SEQ ID NO: 2007 - protein, 8 aa, synthetic construct
  REGION 1..8: note = Description of Artificial Sequence: Synthetic peptide
KTSVDCTM

SEQ ID NO: 2008 - protein, 10 aa, synthetic construct
  REGION 1..10: note = Description of Artificial Sequence: Synthetic peptide
KTSVDCTMYI

SEQ ID NO: 2009 - protein, 8 aa, synthetic construct
  REGION 1..8: note = Description of Artificial Sequence: Synthetic peptide
KTTLPVNV

SEQ ID NO: 2010 - protein, 9 aa, synthetic construct
  REGION 1..9: note = Description of Artificial Sequence: Synthetic peptide
KTTLPVNVA

SEQ ID NO: 2011 - protein, 11 aa, synthetic construct
  REGION 1..11: note = Description of Artificial Sequence: Synthetic peptide
KTTVASLINTL

SEQ ID NO: 2012 - protein, 8 aa, synthetic construct
  REGION 1..8: note = Description of Artificial Sequence: Synthetic peptide
KTVGELGD

SEQ ID NO: 2013 - protein, 10 aa, synthetic construct
  REGION 1..10: note = Description of Artificial Sequence: Synthetic peptide
KTVGELGDVR

SEQ ID NO: 2014 - protein, 10 aa, synthetic construct
  REGION 1..10: note = Description of Artificial Sequence: Synthetic peptide
KTVQFCDAMR

SEQ ID NO: 2015 - protein, 8 aa, synthetic construct
  REGION 1..8: note = Description of Artificial Sequence: Synthetic peptide
KVDGVVQQ

SEQ ID NO: 2016 - protein, 9 aa, synthetic construct
  REGION 1..9: note = Description of Artificial Sequence: Synthetic peptide
KVDTANPKT

SEQ ID NO: 2017 - protein, 11 aa, synthetic construct
  REGION 1..11: note = Description of Artificial Sequence: Synthetic peptide
KVDTANPKTPK

SEQ ID NO: 2018 - protein, 12 aa, synthetic construct
  REGION 1..12: note = Description of Artificial Sequence: Synthetic peptide
KVDTANPKTPKY

SEQ ID NO: 2019 - protein, 8 aa, synthetic construct
  REGION 1..8: note = Description of Artificial Sequence: Synthetic peptide
KVEAEVQI

SEQ ID NO: 2020 - protein, 11 aa, synthetic construct
  REGION 1..11: note = Description of Artificial Sequence: Synthetic peptide
KVFTTVDNINL

SEQ ID NO: 2021 - protein, 8 aa, synthetic construct
  REGION 1..8: note = Description of Artificial Sequence: Synthetic peptide
KVGGSCVL

SEQ ID NO: 2022 - protein, 11 aa, synthetic construct
  REGION 1..11: note = Description of Artificial Sequence: Synthetic peptide
KVKPTVVVNAA

SEQ ID NO: 2023 - protein, 8 aa, synthetic construct
  REGION 1..8: note = Description of Artificial Sequence: Synthetic peptide
KVKYLYFI

SEQ ID NO: 2024 - protein, 10 aa, synthetic construct
  REGION 1..10: note = Description of Artificial Sequence: Synthetic peptide
KVKYLYFIKG

SEQ ID NO: 2025 - protein, 10 aa, synthetic construct
  REGION 1..10: note = Description of Artificial Sequence: Synthetic peptide
KVLLRKNGNK

SEQ ID NO: 2026 - protein, 10 aa, synthetic construct
  REGION 1..10: note = Description of Artificial Sequence: Synthetic peptide
KVNINIVGDF

SEQ ID NO: 2027 - protein, 8 aa, synthetic construct
  REGION 1..8: note = Description of Artificial Sequence: Synthetic peptide
KVQHMVVK

SEQ ID NO: 2028 - protein, 11 aa, synthetic construct
  REGION 1..11: note = Description of Artificial Sequence: Synthetic peptide
KVQIGEYTFEK

SEQ ID NO: 2029 - protein, 11 aa, synthetic construct
  REGION 1..11: note = Description of Artificial Sequence: Synthetic peptide
KVTSAMQTMLF

SEQ ID NO: 2030 - protein, 8 aa, synthetic construct
  REGION 1..8: note = Description of Artificial Sequence: Synthetic peptide
KVVSTTTN

SEQ ID NO: 2031 - protein, 12 aa, synthetic construct
  REGION 1..12: note = Description of Artificial Sequence: Synthetic peptide
KVVSTTTNIVTR

SEQ ID NO: 2032 - protein, 8 aa, synthetic construct
  REGION 1..8: note = Description of Artificial Sequence: Synthetic peptide
KWDLLKYD

SEQ ID NO: 2033 - protein, 8 aa, synthetic construct
  REGION 1..8: note = Description of Artificial Sequence: Synthetic peptide
KWDLTAFG

SEQ ID NO: 2034 - protein, 9 aa, synthetic construct
  REGION 1..9: note = Description of Artificial Sequence: Synthetic peptide
KWKYPQVNG

SEQ ID NO: 2035 - protein, 10 aa, synthetic construct
  REGION 1..10: note = Description of Artificial Sequence: Synthetic peptide
KWYIRVGARK

SEQ ID NO: 2036 - protein, 8 aa, synthetic construct
  REGION 1..8: note = Description of Artificial Sequence: Synthetic peptide
KYDFTEER

SEQ ID NO: 2037 - protein, 11 aa, synthetic construct
  REGION 1..11: note = Description of Artificial Sequence: Synthetic peptide
KYFDCYDGGCI

SEQ ID NO: 2038 - protein, 9 aa, synthetic construct
  REGION 1..9: note = Description of Artificial Sequence: Synthetic peptide
KYFSGAMDT

SEQ ID NO: 2039 - protein, 9 aa, synthetic construct
  REGION 1..9: note = Description of Artificial Sequence: Synthetic peptide
KYKFVRIQP

SEQ ID NO: 2040 - protein, 8 aa, synthetic construct
  REGION 1..8: note = Description of Artificial Sequence: Synthetic peptide
KYLPIDKC

SEQ ID NO: 2041 - protein, 9 aa, synthetic construct
  REGION 1..9: note = Description of Artificial Sequence: Synthetic peptide
KYLPIDKCS

SEQ ID NO: 2042 - protein, 10 aa, synthetic construct
  REGION 1..10: note = Description of Artificial Sequence: Synthetic peptide
KYLPIDKCSR

SEQ ID NO: 2043 - protein, 12 aa, synthetic construct
  REGION 1..12: note = Description of Artificial Sequence: Synthetic peptide
KYLYFIKGLNNL

SEQ ID NO: 2044 - protein, 9 aa, synthetic construct
  REGION 1..9: note = Description of Artificial Sequence: Synthetic peptide
KYPQVNGLT

SEQ ID NO: 2045 - protein, 8 aa, synthetic construct
  REGION 1..8: note = Description of Artificial Sequence: Synthetic peptide
KYTQLCQY

SEQ ID NO: 2046 - protein, 11 aa, synthetic construct
  REGION 1..11: note = Description of Artificial Sequence: Synthetic peptide
KYVRNLQHRLY

SEQ ID NO: 2047 - protein, 8 aa, synthetic construct
  REGION 1..8: note = Description of Artificial Sequence: Synthetic peptide
KYWDQTYH

SEQ ID NO: 2048 - protein, 11 aa, synthetic construct
  REGION 1..11: note = Description of Artificial Sequence: Synthetic peptide
KYWDQTYHPNC

SEQ ID NO: 2049 - protein, 10 aa, synthetic construct
  REGION 1..10: note = Description of Artificial Sequence: Synthetic peptide
LAAVYRINWI

SEQ ID NO: 2050 - protein, 8 aa, synthetic construct
  REGION 1..8: note = Description of Artificial Sequence: Synthetic peptide
LACFVLAA

SEQ ID NO: 2051 - protein, 11 aa, synthetic construct
  REGION 1..11: note = Description of Artificial Sequence: Synthetic peptide
LADKFPVLHDI

SEQ ID NO: 2052 - protein, 11 aa, synthetic construct
  REGION 1..11: note = Description of Artificial Sequence: Synthetic peptide
LAFLLFLVLIM

SEQ ID NO: 2053 - protein, 10 aa, synthetic construct
  REGION 1..10: note = Description of Artificial Sequence: Synthetic peptide
LAHAEETRKL

SEQ ID NO: 2054 - protein, 8 aa, synthetic construct
  REGION 1..8: note = Description of Artificial Sequence: Synthetic peptide
LAHIQWMV

SEQ ID NO: 2055 - protein, 9 aa, synthetic construct
  REGION 1..9: note = Description of Artificial Sequence: Synthetic peptide
LAKNVSLDN

SEQ ID NO: 2056 - protein, 8 aa, synthetic construct
  REGION 1..8: note = Description of Artificial Sequence: Synthetic peptide
LALCADSI

SEQ ID NO: 2057 - protein, 9 aa, synthetic construct
  REGION 1..9: note = Description of Artificial Sequence: Synthetic peptide
LALCADSII

SEQ ID NO: 2058 - protein, 10 aa, synthetic construct
  REGION 1..10: note = Description of Artificial Sequence: Synthetic peptide
LALCADSIII

SEQ ID NO: 2059 - protein, 8 aa, synthetic construct
  REGION 1..8: note = Description of Artificial Sequence: Synthetic peptide
LALGGSVA

SEQ ID NO: 2060 - protein, 12 aa, synthetic construct
  REGION 1..12: note = Description of Artificial Sequence: Synthetic peptide
LALLSDLQDLKW

SEQ ID NO: 2061 - protein, 10 aa, synthetic construct
  REGION 1..10: note = Description of Artificial Sequence: Synthetic peptide
LALSKGVHFV

SEQ ID NO: 2062 - protein, 10 aa, synthetic construct
  REGION 1..10: note = Description of Artificial Sequence: Synthetic peptide
LALYNKYKYF

SEQ ID NO: 2063 - protein, 8 aa, synthetic construct
  REGION 1..8: note = Description of Artificial Sequence: Synthetic peptide
LALYYPSA

SEQ ID NO: 2064 - protein, 9 aa, synthetic construct
  REGION 1..9: note = Description of Artificial Sequence: Synthetic peptide
LALYYPSAR

SEQ ID NO: 2065 - protein, 9 aa, synthetic construct
  REGION 1..9: note = Description of Artificial Sequence: Synthetic peptide
LARAGKASC

SEQ ID NO: 2066 - protein, 10 aa, synthetic construct
  REGION 1..10: note = Description of Artificial Sequence: Synthetic peptide
LATNNLVVMA

SEQ ID NO: 2067 - protein, 11 aa, synthetic construct
  REGION 1..11: note = Description of Artificial Sequence: Synthetic peptide
LATNNLVVMAY

SEQ ID NO: 2068 - protein, 8 aa, synthetic construct
  REGION 1..8: note = Description of Artificial Sequence: Synthetic peptide
LAVHECFV

SEQ ID NO: 2069 - protein, 10 aa, synthetic construct
  REGION 1..10: note = Description of Artificial Sequence: Synthetic peptide
LAVHECFVKR

SEQ ID NO: 2070 - protein, 12 aa, synthetic construct
  REGION 1..12: note = Description of Artificial Sequence: Synthetic peptide
LAVPYNMRVIHF

SEQ ID NO: 2071 - protein, 11 aa, synthetic construct
  REGION 1..11: note = Description of Artificial Sequence: Synthetic peptide
LAYILFTRFFY

SEQ ID NO: 2072 - protein, 8 aa, synthetic construct
  REGION 1..8: note = Description of Artificial Sequence: Synthetic peptide
LCADSIII

SEQ ID NO: 2073 - protein, 8 aa, synthetic construct
  REGION 1..8: note = Description of Artificial Sequence: Synthetic peptide
LCANGQVF

SEQ ID NO: 2074 - protein, 8 aa, synthetic construct
  REGION 1..8: note = Description of Artificial Sequence: Synthetic peptide
LCFLAFLL

SEQ ID NO: 2075 - protein, 8 aa, synthetic construct
  REGION 1..8: note = Description of Artificial Sequence: Synthetic peptide
LCNSQTSL

SEQ ID NO: 2076 - protein, 9 aa, synthetic construct
  REGION 1..9: note = Description of Artificial Sequence: Synthetic peptide
LCNSQTSLR

SEQ ID NO: 2077 - protein, 8 aa, synthetic construct
  REGION 1..8: note = Description of Artificial Sequence: Synthetic peptide
LCVDIPGI

SEQ ID NO: 2078 - protein, 8 aa, synthetic construct
  REGION 1..8: note = Description of Artificial Sequence: Synthetic peptide
LDDFVEII

SEQ ID NO: 2079 - protein, 9 aa, synthetic construct
  REGION 1..9: note = Description of Artificial Sequence: Synthetic peptide
LDERIDKVL

SEQ ID NO: 2080 - protein, 9 aa, synthetic construct
  REGION 1..9: note = Description of Artificial Sequence: Synthetic peptide
LDGEVITFD

SEQ ID NO: 2081 - protein, 9 aa, synthetic construct
  REGION 1..9: note = Description of Artificial Sequence: Synthetic peptide
LDGISQYSL

SEQ ID NO: 2082 - protein, 8 aa, synthetic construct
  REGION 1..8: note = Description of Artificial Sequence: Synthetic peptide
LDMYSVML

SEQ ID NO: 2083 - protein, 8 aa, synthetic construct
  REGION 1..8: note = Description of Artificial Sequence: Synthetic peptide
LDSKTQSL

SEQ ID NO: 2084 - protein, 9 aa, synthetic construct
  REGION 1..9: note = Description of Artificial Sequence: Synthetic peptide
LDSKVGGNY

SEQ ID NO: 2085 - protein, 9 aa, synthetic construct
  REGION 1..9: note = Description of Artificial Sequence: Synthetic peptide
LDYIINLII

SEQ ID NO: 2086 - protein, 9 aa, synthetic construct
  REGION 1..9: note = Description of Artificial Sequence: Synthetic peptide
LDYKAFKQI

SEQ ID NO: 2087 - protein, 9 aa, synthetic construct
  REGION 1..9: note = Description of Artificial Sequence: Synthetic peptide
LEASFNYLK

SEQ ID NO: 2088 - protein, 11 aa, synthetic construct
  REGION 1..11: note = Description of Artificial Sequence: Synthetic peptide
LEASFNYLKSP

SEQ ID NO: 2089 - protein, 10 aa, synthetic construct
  REGION 1..10: note = Description of Artificial Sequence: Synthetic peptide
LEDEFTPFDV

SEQ ID NO: 2090 - protein, 9 aa, synthetic construct
  REGION 1..9: note = Description of Artificial Sequence: Synthetic peptide
LEETKFLTE

SEQ ID NO: 2091 - protein, 11 aa, synthetic construct
  REGION 1..11: note = Description of Artificial Sequence: Synthetic peptide
LEGETLPTEVL

SEQ ID NO: 2092 - protein, 10 aa, synthetic construct
  REGION 1..10: note = Description of Artificial Sequence: Synthetic peptide
LEGSVAYESL

SEQ ID NO: 2093 - protein, 9 aa, synthetic construct
  REGION 1..9: note = Description of Artificial Sequence: Synthetic peptide
LEGSVRVVT

SEQ ID NO: 2094 - protein, 11 aa, synthetic construct
  REGION 1..11: note = Description of Artificial Sequence: Synthetic peptide
LEGYAFEHIVY

SEQ ID NO: 2095 - protein, 11 aa, synthetic construct
  REGION 1..11: note = Description of Artificial Sequence: Synthetic peptide
LEIPRRNVATL

SEQ ID NO: 2096 - protein, 9 aa, synthetic construct
  REGION 1..9: note = Description of Artificial Sequence: Synthetic peptide
LELAMDEFI

SEQ ID NO: 2097 - protein, 10 aa, synthetic construct
  REGION 1..10: note = Description of Artificial Sequence: Synthetic peptide
LELQDHNETC

SEQ ID NO: 2098 - protein, 8 aa, synthetic construct
  REGION 1..8: note = Description of Artificial Sequence: Synthetic peptide
LEMELTPV

SEQ ID NO: 2099 - protein, 8 aa, synthetic construct
  REGION 1..8: note = Description of Artificial Sequence: Synthetic peptide
LEQPTSEA

SEQ ID NO: 2100 - protein, 11 aa, synthetic construct
  REGION 1..11: note = Description of Artificial Sequence: Synthetic peptide
LEQPTSEAVEA

SEQ ID NO: 2101 - protein, 8 aa, synthetic construct
  REGION 1..8: note = Description of Artificial Sequence: Synthetic peptide
LEQPYVFI

SEQ ID NO: 2102 - protein, 9 aa, synthetic construct
  REGION 1..9: note = Description of Artificial Sequence: Synthetic peptide
LEQPYVFIK

SEQ ID NO: 2103 - protein, 8 aa, synthetic construct
  REGION 1..8: note = Description of Artificial Sequence: Synthetic peptide
LEQWNLVI

SEQ ID NO: 2104 - protein, 12 aa, synthetic construct
  REGION 1..12: note = Description of Artificial Sequence: Synthetic peptide
LEQWNLVIGFLF

SEQ ID NO: 2105 - protein, 11 aa, synthetic construct
  REGION 1..11: note = Description of Artificial Sequence: Synthetic peptide
LESELVIGAVI

SEQ ID NO: 2106 - protein, 11 aa, synthetic construct
  REGION 1..11: note = Description of Artificial Sequence: Synthetic peptide
LETAQNSVRVL

SEQ ID NO: 2107 - protein, 9 aa, synthetic construct
  REGION 1..9: note = Description of Artificial Sequence: Synthetic peptide
LETIQITIS

SEQ ID NO: 2108 - protein, 8 aa, synthetic construct
  REGION 1..8: note = Description of Artificial Sequence: Synthetic peptide
LFDMSKFP

SEQ ID NO: 2109 - protein, 11 aa, synthetic construct
  REGION 1..11: note = Description of Artificial Sequence: Synthetic peptide
LFDMSKFPLKL

SEQ ID NO: 2110 - protein, 9 aa, synthetic construct
  REGION 1..9: note = Description of Artificial Sequence: Synthetic peptide
LFDRYFKYW

SEQ ID NO: 2111 - protein, 9 aa, synthetic construct
  REGION 1..9: note = Description of Artificial Sequence: Synthetic peptide
LFFFLYENA

SEQ ID NO: 2112 - protein, 9 aa, synthetic construct
  REGION 1..9: note = Description of Artificial Sequence: Synthetic peptide
LFKDCSKVI

SEQ ID NO: 2113 - protein, 9 aa, synthetic construct
  REGION 1..9: note = Description of Artificial Sequence: Synthetic peptide
LFLLPSLAT

SEQ ID NO: 2114 - protein, 8 aa, synthetic construct
  REGION 1..8: note = Description of Artificial Sequence: Synthetic peptide
LFLMSFTV

SEQ ID NO: 2115 - protein, 12 aa, synthetic construct
  REGION 1..12: note = Description of Artificial Sequence: Synthetic peptide
LFLPFFSNVTWF

SEQ ID NO: 2116 - protein, 8 aa, synthetic construct
  REGION 1..8: note = Description of Artificial Sequence: Synthetic peptide
LFMRIFTI

SEQ ID NO: 2117 - protein, 8 aa, synthetic construct
  REGION 1..8: note = Description of Artificial Sequence: Synthetic peptide
LFTMLRKL

SEQ ID NO: 2118 - protein, 10 aa, synthetic construct
  REGION 1..10: note = Description of Artificial Sequence: Synthetic peptide
LFVAAIFYLI

SEQ ID NO: 2119 - protein, 10 aa, synthetic construct
  REGION 1..10: note = Description of Artificial Sequence: Synthetic peptide
LFVVEVVDKY

SEQ ID NO: 2120 - protein, 9 aa, synthetic construct
  REGION 1..9: note = Description of Artificial Sequence: Synthetic peptide
LFWNCNVDR

SEQ ID NO: 2121 - protein, 10 aa, synthetic construct
  REGION 1..10: note = Description of Artificial Sequence: Synthetic peptide
LFWNCNVDRY

SEQ ID NO: 2122 - protein, 9 aa, synthetic construct
  REGION 1..9: note = Description of Artificial Sequence: Synthetic peptide
LGERVRQAL

SEQ ID NO: 2123 - protein, 9 aa, synthetic construct
  REGION 1..9: note = Description of Artificial Sequence: Synthetic peptide
LGFIAGLIA

SEQ ID NO: 2124 - protein, 10 aa, synthetic construct
  REGION 1..10: note = Description of Artificial Sequence: Synthetic peptide
LGFSTGVNLV

SEQ ID NO: 2125 - protein, 8 aa, synthetic construct
  REGION 1..8: note = Description of Artificial Sequence: Synthetic peptide
LGGLHLLI

SEQ ID NO: 2126 - protein, 9 aa, synthetic construct
  REGION 1..9: note = Description of Artificial Sequence: Synthetic peptide
LGGSVAIKI

SEQ ID NO: 2127 - protein, 9 aa, synthetic construct
  REGION 1..9: note = Description of Artificial Sequence: Synthetic peptide
LGIITTVAA

SEQ ID NO: 2128 - protein, 9 aa, synthetic construct
  REGION 1..9: note = Description of Artificial Sequence: Synthetic peptide
LGLPTQTVD

SEQ ID NO: 2129 - protein, 8 aa, synthetic construct
  REGION 1..8: note = Description of Artificial Sequence: Synthetic peptide
LGQSKRVD

SEQ ID NO: 2130 - protein, 8 aa, synthetic construct
  REGION 1..8: note = Description of Artificial Sequence: Synthetic peptide
LGRYMSAL

SEQ ID NO: 2131 - protein, 9 aa, synthetic construct
  REGION 1..9: note = Description of Artificial Sequence: Synthetic peptide
LGTDPYEDF

SEQ ID NO: 2132 - protein, 8 aa, synthetic construct
  REGION 1..8: note = Description of Artificial Sequence: Synthetic peptide
LGTEVNEF

SEQ ID NO: 2133 - protein, 9 aa, synthetic construct
  REGION 1..9: note = Description of Artificial Sequence: Synthetic peptide
LHAPATVCG

SEQ ID NO: 2134 - protein, 10 aa, synthetic construct
  REGION 1..10: note = Description of Artificial Sequence: Synthetic peptide
LHCANFNVLF

SEQ ID NO: 2135 - protein, 9 aa, synthetic construct
  REGION 1..9: note = Description of Artificial Sequence: Synthetic peptide
LHDIGNPKA

SEQ ID NO: 2136 - protein, 10 aa, synthetic construct
  REGION 1..10: note = Description of Artificial Sequence: Synthetic peptide
LHDIGNPKAI

SEQ ID NO: 2137 - protein, 10 aa, synthetic construct
  REGION 1..10: note = Description of Artificial Sequence: Synthetic peptide
LHFLPRVFSA

SEQ ID NO: 2138 - protein, 9 aa, synthetic construct
  REGION 1..9: note = Description of Artificial Sequence: Synthetic peptide
LHLLIGLAK

SEQ ID NO: 2139 - protein, 8 aa, synthetic construct
  REGION 1..8: note = Description of Artificial Sequence: Synthetic peptide
LHNDILLA

SEQ ID NO: 2140 - protein, 10 aa, synthetic construct
  REGION 1..10: note = Description of Artificial Sequence: Synthetic peptide
LHPTQAPTHL

SEQ ID NO: 2141 - protein, 8 aa, synthetic construct
  REGION 1..8: note = Description of Artificial Sequence: Synthetic peptide
LHSSRLSF

SEQ ID NO: 2142 - protein, 8 aa, synthetic construct
  REGION 1..8: note = Description of Artificial Sequence: Synthetic peptide
LHTQVVDM

SEQ ID NO: 2143 - protein, 9 aa, synthetic construct
  REGION 1..9: note = Description of Artificial Sequence: Synthetic peptide
LHVTYVPAQ

SEQ ID NO: 2144 - protein, 8 aa, synthetic construct
  REGION 1..8: note = Description of Artificial Sequence: Synthetic peptide
LHVVGPNV

SEQ ID NO: 2145 - protein, 9 aa, synthetic construct
  REGION 1..9: note = Description of Artificial Sequence: Synthetic peptide
LHVVGPNVN

SEQ ID NO: 2146 - protein, 10 aa, synthetic construct
  REGION 1..10: note = Description of Artificial Sequence: Synthetic peptide
LIAAVITREV

SEQ ID NO: 2147 - protein, 11 aa, synthetic construct
  REGION 1..11: note = Description of Artificial Sequence: Synthetic peptide
LIDAMMFTSDL

SEQ ID NO: 2148 - protein, 11 aa, synthetic construct
  REGION 1..11: note = Description of Artificial Sequence: Synthetic peptide
LIDFYLCFLAF

SEQ ID NO: 2149 - protein, 8 aa, synthetic construct
  REGION 1..8: note = Description of Artificial Sequence: Synthetic peptide
LIDLQELG

SEQ ID NO: 2150 - protein, 9 aa, synthetic construct
  REGION 1..9: note = Description of Artificial Sequence: Synthetic peptide
LIDLQELGK

SEQ ID NO: 2151 - protein, 9 aa, synthetic construct
  REGION 1..9: note = Description of Artificial Sequence: Synthetic peptide
LIGCNYLGK

SEQ ID NO: 2152 - protein, 10 aa, synthetic construct
  REGION 1..10: note = Description of Artificial Sequence: Synthetic peptide
LIIKNLSKSL

SEQ ID NO: 2153 - protein, 8 aa, synthetic construct
  REGION 1..8: note = Description of Artificial Sequence: Synthetic peptide
LIINLVQM

SEQ ID NO: 2154 - protein, 9 aa, synthetic construct
  REGION 1..9: note = Description of Artificial Sequence: Synthetic peptide
LIINLVQMA

SEQ ID NO: 2155 - protein, 8 aa, synthetic construct
  REGION 1..8: note = Description of Artificial Sequence: Synthetic peptide
LIISVTSN

SEQ ID NO: 2156 - protein, 8 aa, synthetic construct
  REGION 1..8: note = Description of Artificial Sequence: Synthetic peptide
LINTLNDL

SEQ ID NO: 2157 - protein, 8 aa, synthetic construct
  REGION 1..8: note = Description of Artificial Sequence: Synthetic peptide
LIRQGTDY

SEQ ID NO: 2158 - protein, 10 aa, synthetic construct
  REGION 1..10: note = Description of Artificial Sequence: Synthetic peptide
LITPVHVMSK

SEQ ID NO: 2159 - protein, 10 aa, synthetic construct
  REGION 1..10: note = Description of Artificial Sequence: Synthetic peptide
LIVGVALLAV

SEQ ID NO: 2160 - protein, 10 aa, synthetic construct
  REGION 1..10: note = Description of Artificial Sequence: Synthetic peptide
LIVNSVLLFL

SEQ ID NO: 2161 - protein, 10 aa, synthetic construct
  REGION 1..10: note = Description of Artificial Sequence: Synthetic peptide
LKALNLGETF

SEQ ID NO: 2162 - protein, 8 aa, synthetic construct
  REGION 1..8: note = Description of Artificial Sequence: Synthetic peptide
LKATEETF

SEQ ID NO: 2163 - protein, 10 aa, synthetic construct
  REGION 1..10: note = Description of Artificial Sequence: Synthetic peptide
LKATEETFKL

SEQ ID NO: 2164 - protein, 10 aa, synthetic construct
  REGION 1..10: note = Description of Artificial Sequence: Synthetic peptide
LKEPCSSGTY

SEQ ID NO: 2165 - protein, 9 aa, synthetic construct
  REGION 1..9: note = Description of Artificial Sequence: Synthetic peptide
LKGVEAVMY

SEQ ID NO: 2166 - protein, 8 aa, synthetic construct
  REGION 1..8: note = Description of Artificial Sequence: Synthetic peptide
LKKLKKSL

SEQ ID NO: 2167 - protein, 9 aa, synthetic construct
  REGION 1..9: note = Description of Artificial Sequence: Synthetic peptide
LKLFAAETL

SEQ ID NO: 2168 - protein, 9 aa, synthetic construct
  REGION 1..9: note = Description of Artificial Sequence: Synthetic peptide
LKLRSDVLL

SEQ ID NO: 2169 - protein, 8 aa, synthetic construct
  REGION 1..8: note = Description of Artificial Sequence: Synthetic peptide
LKLTDNVY

SEQ ID NO: 2170 - protein, 10 aa, synthetic construct
  REGION 1..10: note = Description of Artificial Sequence: Synthetic peptide
LKNLSDRVVF

SEQ ID NO: 2171 - protein, 10 aa, synthetic construct
  REGION 1..10: note = Description of Artificial Sequence: Synthetic peptide
LKRGDKSVYY

SEQ ID NO: 2172 - protein, 9 aa, synthetic construct
  REGION 1..9: note = Description of Artificial Sequence: Synthetic peptide
LKYDFTEER

SEQ ID NO: 2173 - protein, 10 aa, synthetic construct
  REGION 1..10: note = Description of Artificial Sequence: Synthetic peptide
LKYDFTEERL

SEQ ID NO: 2174 - protein, 8 aa, synthetic construct
  REGION 1..8: note = Description of Artificial Sequence: Synthetic peptide
LLADKFPV

SEQ ID NO: 2175 - protein, 9 aa, synthetic construct
  REGION 1..9: note = Description of Artificial Sequence: Synthetic peptide
LLAGTITSG

SEQ ID NO: 2176 - protein, 10 aa, synthetic construct
  REGION 1..10: note = Description of Artificial Sequence: Synthetic peptide
LLAPLLSAGI

SEQ ID NO: 2177 - protein, 10 aa, synthetic construct
  REGION 1..10: note = Description of Artificial Sequence: Synthetic peptide
LLAVFQSASK

SEQ ID NO: 2178 - protein, 11 aa, synthetic construct
  REGION 1..11: note = Description of Artificial Sequence: Synthetic peptide
LLDDFVEIIKS

SEQ ID NO: 2179 - protein, 8 aa, synthetic construct
  REGION 1..8: note = Description of Artificial Sequence: Synthetic peptide
LLDKRTTC

SEQ ID NO: 2180 - protein, 8 aa, synthetic construct
  REGION 1..8: note = Description of Artificial Sequence: Synthetic peptide
LLDQALVS

SEQ ID NO: 2181 - protein, 10 aa, synthetic construct
  REGION 1..10: note = Description of Artificial Sequence: Synthetic peptide
LLDQALVSDV

SEQ ID NO: 2182 - protein, 9 aa, synthetic construct
  REGION 1..9: note = Description of Artificial Sequence: Synthetic peptide
LLDRLNQLE

SEQ ID NO: 2183 - protein, 10 aa, synthetic construct
  REGION 1..10: note = Description of Artificial Sequence: Synthetic peptide
LLDRLNQLES

SEQ ID NO: 2184 - protein, 8 aa, synthetic construct
  REGION 1..8: note = Description of Artificial Sequence: Synthetic peptide
LLEQWNLV

SEQ ID NO: 2185 - protein, 9 aa, synthetic construct
  REGION 1..9: note = Description of Artificial Sequence: Synthetic peptide
LLEQWNLVI

SEQ ID NO: 2186 - protein, 8 aa, synthetic construct
  REGION 1..8: note = Description of Artificial Sequence: Synthetic peptide
LLFLVLIM

SEQ ID NO: 2187 - protein, 10 aa, synthetic construct
  REGION 1..10: note = Description of Artificial Sequence: Synthetic peptide
LLFLVLIMLI

SEQ ID NO: 2188 - protein, 9 aa, synthetic construct
  REGION 1..9: note = Description of Artificial Sequence: Synthetic peptide
LLFVTVYSH

SEQ ID NO: 2189 - protein, 10 aa, synthetic construct
  REGION 1..10: note = Description of Artificial Sequence: Synthetic peptide
LLFVVEVVDK

SEQ ID NO: 2190 - protein, 11 aa, synthetic construct
  REGION 1..11: note = Description of Artificial Sequence: Synthetic peptide
LLFVVEVVDKY

SEQ ID NO: 2191 - protein, 8 aa, synthetic construct
  REGION 1..8: note = Description of Artificial Sequence: Synthetic peptide
LLHAPATV

SEQ ID NO: 2192 - protein, 8 aa, synthetic construct
  REGION 1..8: note = Description of Artificial Sequence: Synthetic peptide
LLHKPIVW

SEQ ID NO: 2193 - protein, 9 aa, synthetic construct
  REGION 1..9: note = Description of Artificial Sequence: Synthetic peptide
LLHKPIVWH

SEQ ID NO: 2194 - protein, 8 aa, synthetic construct
  REGION 1..8: note = Description of Artificial Sequence: Synthetic peptide
LLIGLAKR

SEQ ID NO: 2195 - protein, 9 aa, synthetic construct
  REGION 1..9: note = Description of Artificial Sequence: Synthetic peptide
LLIIMRTFK

SEQ ID NO: 2196 - protein, 8 aa, synthetic construct
  REGION 1..8: note = Description of Artificial Sequence: Synthetic peptide
LLKDCPAV

SEQ ID NO: 2197 - protein, 10 aa, synthetic construct
  REGION 1..10: note = Description of Artificial Sequence: Synthetic peptide
LLKDCPAVAK

SEQ ID NO: 2198 - protein, 8 aa, synthetic construct
  REGION 1..8: note = Description of Artificial Sequence: Synthetic peptide
LLKEPCSS

SEQ ID NO: 2199 - protein, 9 aa, synthetic construct
  REGION 1..9: note = Description of Artificial Sequence: Synthetic peptide
LLKEPCSSG

SEQ ID NO: 2200 - protein, 10 aa, synthetic construct
  REGION 1..10: note = Description of Artificial Sequence: Synthetic peptide
LLKEPCSSGT

SEQ ID NO: 2201 - protein, 11 aa, synthetic construct
  REGION 1..11: note = Description of Artificial Sequence: Synthetic peptide
LLKEPCSSGTY

SEQ ID NO: 2202 - protein, 8 aa, synthetic construct
  REGION 1..8: note = Description of Artificial Sequence: Synthetic peptide
LLKSIAAT

SEQ ID NO: 2203 - protein, 8 aa, synthetic construct
  REGION 1..8: note = Description of Artificial Sequence: Synthetic peptide
LLLDKRTT

SEQ ID NO: 2204 - protein, 8 aa, synthetic construct
  REGION 1..8: note = Description of Artificial Sequence: Synthetic peptide
LLLFVTVY

SEQ ID NO: 2205 - protein, 10 aa, synthetic construct
  REGION 1..10: note = Description of Artificial Sequence: Synthetic peptide
LLLLDRLNQL

SEQ ID NO: 2206 - protein, 8 aa, synthetic construct
  REGION 1..8: note = Description of Artificial Sequence: Synthetic peptide
LLLQLCTF

SEQ ID NO: 2207 - protein, 10 aa, synthetic construct
  REGION 1..10: note = Description of Artificial Sequence: Synthetic peptide
LLLQLCTFTR

SEQ ID NO: 2208 - protein, 10 aa, synthetic construct
  REGION 1..10: note = Description of Artificial Sequence: Synthetic peptide
LLLTILTSLL

SEQ ID NO: 2209 - protein, 8 aa, synthetic construct
  REGION 1..8: note = Description of Artificial Sequence: Synthetic peptide
LLLVAAGL

SEQ ID NO: 2210 - protein, 9 aa, synthetic construct
  REGION 1..9: note = Description of Artificial Sequence: Synthetic peptide
LLMPLKAPK

SEQ ID NO: 2211 - protein, 8 aa, synthetic construct
  REGION 1..8: note = Description of Artificial Sequence: Synthetic peptide
LLNKEMYL

SEQ ID NO: 2212 - protein, 10 aa, synthetic construct
  REGION 1..10: note = Description of Artificial Sequence: Synthetic peptide
LLNKEMYLKL

SEQ ID NO: 2213 - protein, 10 aa, synthetic construct
  REGION 1..10: note = Description of Artificial Sequence: Synthetic peptide
LLNRYFRLTL

SEQ ID NO: 2214 - protein, 9 aa, synthetic construct
  REGION 1..9: note = Description of Artificial Sequence: Synthetic peptide
LLPLTQYNR

SEQ ID NO: 2215 - protein, 11 aa, synthetic construct
  REGION 1..11: note = Description of Artificial Sequence: Synthetic peptide
LLPLTQYNRYL

SEQ ID NO: 2216 - protein, 8 aa, synthetic construct
  REGION 1..8: note = Description of Artificial Sequence: Synthetic peptide
LLPLVSSQ

SEQ ID NO: 2217 - protein, 10 aa, synthetic construct
  REGION 1..10: note = Description of Artificial Sequence: Synthetic peptide
LLPLVSSQCV

SEQ ID NO: 2218 - protein, 9 aa, synthetic construct
  REGION 1..9: note = Description of Artificial Sequence: Synthetic peptide
LLPPKNSID

SEQ ID NO: 2219 - protein, 9 aa, synthetic construct
  REGION 1..9: note = Description of Artificial Sequence: Synthetic peptide
LLSDLQDLK

SEQ ID NO: 2220 - protein, 10 aa, synthetic construct
  REGION 1..10: note = Description of Artificial Sequence: Synthetic peptide
LLSDLQDLKW

SEQ ID NO: 2221 - protein, 8 aa, synthetic construct
  REGION 1..8: note = Description of Artificial Sequence: Synthetic peptide
LLSKGRLI

SEQ ID NO: 2222 - protein, 10 aa, synthetic construct
  REGION 1..10: note = Description of Artificial Sequence: Synthetic peptide
LLSKGRLIIR

SEQ ID NO: 2223 - protein, 10 aa, synthetic construct
  REGION 1..10: note = Description of Artificial Sequence: Synthetic peptide
LLSLREVRTI

SEQ ID NO: 2224 - protein, 9 aa, synthetic construct
  REGION 1..9: note = Description of Artificial Sequence: Synthetic peptide
LLSTDGNKI

SEQ ID NO: 2225 - protein, 8 aa, synthetic construct
  REGION 1..8: note = Description of Artificial Sequence: Synthetic peptide
LLSVLLSM

SEQ ID NO: 2226 - protein, 9 aa, synthetic construct
  REGION 1..9: note = Description of Artificial Sequence: Synthetic peptide
LLTILTSLL

SEQ ID NO: 2227 - protein, 9 aa, synthetic construct
  REGION 1..9: note = Description of Artificial Sequence: Synthetic peptide
LLVAAGLEA

SEQ ID NO: 2228 - protein, 10 aa, synthetic construct
  REGION 1..10: note = Description of Artificial Sequence: Synthetic peptide
LLVDSDLNDF

SEQ ID NO: 2229 - protein, 10 aa, synthetic construct
  REGION 1..10: note = Description of Artificial Sequence: Synthetic peptide
LLVTLAILTA

SEQ ID NO: 2230 - protein, 11 aa, synthetic construct
  REGION 1..11: note = Description of Artificial Sequence: Synthetic peptide
LLYDANYFLCW

SEQ ID NO: 2231 - protein, 10 aa, synthetic construct
  REGION 1..10: note = Description of Artificial Sequence: Synthetic peptide
LMIERFVSLA

SEQ ID NO: 2232 - protein, 10 aa, synthetic construct
  REGION 1..10: note = Description of Artificial Sequence: Synthetic peptide
LMNVLTLVYK

SEQ ID NO: 2233 - protein, 8 aa, synthetic construct
  REGION 1..8: note = Description of Artificial Sequence: Synthetic peptide
LMSFPQSA

SEQ ID NO: 2234 - protein, 10 aa, synthetic construct
  REGION 1..10: note = Description of Artificial Sequence: Synthetic peptide
LMSNLGMPSY

SEQ ID NO: 2235 - protein, 8 aa, synthetic construct
  REGION 1..8: note = Description of Artificial Sequence: Synthetic peptide
LMWLSYFI

SEQ ID NO: 2236 - protein, 9 aa, synthetic construct
  REGION 1..9: note = Description of Artificial Sequence: Synthetic peptide
LMWLSYFIA

SEQ ID NO: 2237 - protein, 10 aa, synthetic construct
  REGION 1..10: note = Description of Artificial Sequence: Synthetic peptide
LMYKGLPWNV

SEQ ID NO: 2238 - protein, 9 aa, synthetic construct
  REGION 1..9: note = Description of Artificial Sequence: Synthetic peptide
LNDILSRLD

SEQ ID NO: 2239 - protein, 9 aa, synthetic construct
  REGION 1..9: note = Description of Artificial Sequence: Synthetic peptide
LNGDVVAID

SEQ ID NO: 2240 - protein, 10 aa, synthetic construct
  REGION 1..10: note = Description of Artificial Sequence: Synthetic peptide
LNGDVVAIDY

SEQ ID NO: 2241 - protein, 9 aa, synthetic construct
  REGION 1..9: note = Description of Artificial Sequence: Synthetic peptide
LNGGAYTRY

SEQ ID NO: 2242 - protein, 9 aa, synthetic construct
  REGION 1..9: note = Description of Artificial Sequence: Synthetic peptide
LNGYTVEEA

SEQ ID NO: 2243 - protein, 8 aa, synthetic construct
  REGION 1..8: note = Description of Artificial Sequence: Synthetic peptide
LNIKLLGV

SEQ ID NO: 2244 - protein, 9 aa, synthetic construct
  REGION 1..9: note = Description of Artificial Sequence: Synthetic peptide
LNKEMYLKL

SEQ ID NO: 2245 - protein, 8 aa, synthetic construct
  REGION 1..8: note = Description of Artificial Sequence: Synthetic peptide
LNTLTLAV

SEQ ID NO: 2246 - protein, 11 aa, synthetic construct
  REGION 1..11: note = Description of Artificial Sequence: Synthetic peptide
LPDDFTGCVIA

SEQ ID NO: 2247 - protein, 12 aa, synthetic construct
  REGION 1..12: note = Description of Artificial Sequence: Synthetic peptide
LPDPSKPSKRSF

SEQ ID NO: 2248 - protein, 10 aa, synthetic construct
  REGION 1..10: note = Description of Artificial Sequence: Synthetic peptide
LPETTADIVV

SEQ ID NO: 2249 - protein, 8 aa, synthetic construct
  REGION 1..8: note = Description of Artificial Sequence: Synthetic peptide
LPFAMGII

SEQ ID NO: 2250 - protein, 12 aa, synthetic construct
  REGION 1..12: note = Description of Artificial Sequence: Synthetic peptide
LPFAMGIIAMSA

SEQ ID NO: 2251 - protein, 12 aa, synthetic construct
  REGION 1..12: note = Description of Artificial Sequence: Synthetic peptide
LPFFSNVTWFHA

SEQ ID NO: 2252 - protein, 8 aa, synthetic construct
  REGION 1..8: note = Description of Artificial Sequence: Synthetic peptide
LPFFYYSD

SEQ ID NO: 2253 - protein, 8 aa, synthetic construct
  REGION 1..8: note = Description of Artificial Sequence: Synthetic peptide
LPFNDGVY

SEQ ID NO: 2254 - protein, 11 aa, synthetic construct
  REGION 1..11: note = Description of Artificial Sequence: Synthetic peptide
LPFQQFGRDIA

SEQ ID NO: 2255 - protein, 8 aa, synthetic construct
  REGION 1..8: note = Description of Artificial Sequence: Synthetic peptide
LPFTINCQ

SEQ ID NO: 2256 - protein, 10 aa, synthetic construct
  REGION 1..10: note = Description of Artificial Sequence: Synthetic peptide
LPFTINCQEP

SEQ ID NO: 2257 - protein, 8 aa, synthetic construct
  REGION 1..8: note = Description of Artificial Sequence: Synthetic peptide
LPGVFCGV

SEQ ID NO: 2258 - protein, 8 aa, synthetic construct
  REGION 1..8: note = Description of Artificial Sequence: Synthetic peptide
LPGVYSVI

SEQ ID NO: 2259 - protein, 11 aa, synthetic construct
  REGION 1..11: note = Description of Artificial Sequence: Synthetic peptide
LPGVYSVIYLY

SEQ ID NO: 2260 - protein, 12 aa, synthetic construct
  REGION 1..12: note = Description of Artificial Sequence: Synthetic peptide
LPIDKCSRIIPA

SEQ ID NO: 2261 - protein, 8 aa, synthetic construct
  REGION 1..8: note = Description of Artificial Sequence: Synthetic peptide
LPIGINIT

SEQ ID NO: 2262 - protein, 9 aa, synthetic construct
  REGION 1..9: note = Description of Artificial Sequence: Synthetic peptide
LPKGFYAEG

SEQ ID NO: 2263 - protein, 10 aa, synthetic construct
  REGION 1..10: note = Description of Artificial Sequence: Synthetic peptide
LPLQLGFSTG

SEQ ID NO: 2264 - protein, 10 aa, synthetic construct
  REGION 1..10: note = Description of Artificial Sequence: Synthetic peptide
LPLTQYNRYL

SEQ ID NO: 2265 - protein, 12 aa, synthetic construct
  REGION 1..12: note = Description of Artificial Sequence: Synthetic peptide
LPNDDTLRVEAF

SEQ ID NO: 2266 - protein, 11 aa, synthetic construct
  REGION 1..11: note = Description of Artificial Sequence: Synthetic peptide
LPNNTASWFTA

SEQ ID NO: 2267 - protein, 12 aa, synthetic construct
  REGION 1..12: note = Description of Artificial Sequence: Synthetic peptide
LPNNTASWFTAL

SEQ ID NO: 2268 - protein, 11 aa, synthetic construct
  REGION 1..11: note = Description of Artificial Sequence: Synthetic peptide
LPQGTTLPKGF

SEQ ID NO: 2269 - protein, 8 aa, synthetic construct
  REGION 1..8: note = Description of Artificial Sequence: Synthetic peptide
LPQLEQPY

SEQ ID NO: 2270 - protein, 10 aa, synthetic construct
  REGION 1..10: note = Description of Artificial Sequence: Synthetic peptide
LPQNAVVKIY

SEQ ID NO: 2271 - protein, 10 aa, synthetic construct
  REGION 1..10: note = Description of Artificial Sequence: Synthetic peptide
LPSLATVAYF

SEQ ID NO: 2272 - protein, 9 aa, synthetic construct
  REGION 1..9: note = Description of Artificial Sequence: Synthetic peptide
LPSYAAFAT

SEQ ID NO: 2273 - protein, 11 aa, synthetic construct
  REGION 1..11: note = Description of Artificial Sequence: Synthetic peptide
LPTEVLTEEVV

SEQ ID NO: 2274 - protein, 12 aa, synthetic construct
  REGION 1..12: note = Description of Artificial Sequence: Synthetic peptide
LPTEVLTEEVVL

SEQ ID NO: 2275 - protein, 9 aa, synthetic construct
  REGION 1..9: note = Description of Artificial Sequence: Synthetic peptide
LPTGVHAGT

SEQ ID NO: 2276 - protein, 10 aa, synthetic construct
  REGION 1..10: note = Description of Artificial Sequence: Synthetic peptide
LPTGVHAGTD

SEQ ID NO: 2277 - protein, 9 aa, synthetic construct
  REGION 1..9: note = Description of Artificial Sequence: Synthetic peptide
LPTQTVDSS

SEQ ID NO: 2278 - protein, 8 aa, synthetic construct
  REGION 1..8: note = Description of Artificial Sequence: Synthetic peptide
LPVLQVRD

SEQ ID NO: 2279 - protein, 11 aa, synthetic construct
  REGION 1..11: note = Description of Artificial Sequence: Synthetic peptide
LPVLQVRDVLV

SEQ ID NO: 2280 - protein, 11 aa, synthetic construct
  REGION 1..11: note = Description of Artificial Sequence: Synthetic peptide
LPVNVAFELWA

SEQ ID NO: 2281 - protein, 10 aa, synthetic construct
  REGION 1..10: note = Description of Artificial Sequence: Synthetic peptide
LPVSMTKTSV

SEQ ID NO: 2282 - protein, 8 aa, synthetic construct
  REGION 1..8: note = Description of Artificial Sequence: Synthetic peptide
LPYGANKD

SEQ ID NO: 2283 - protein, 10 aa, synthetic construct
  REGION 1..10: note = Description of Artificial Sequence: Synthetic peptide
LPYGANKDGI

SEQ ID NO: 2284 - protein, 8 aa, synthetic construct
  REGION 1..8: note = Description of Artificial Sequence: Synthetic peptide
LQCIMLVY

SEQ ID NO: 2285 - protein, 8 aa, synthetic construct
  REGION 1..8: note = Description of Artificial Sequence: Synthetic peptide
LQFAYANR

SEQ ID NO: 2286 - protein, 10 aa, synthetic construct
  REGION 1..10: note = Description of Artificial Sequence: Synthetic peptide
LQFAYANRNR

SEQ ID NO: 2287 - protein, 9 aa, synthetic construct
  REGION 1..9: note = Description of Artificial Sequence: Synthetic peptide
LQGPPGTGK

SEQ ID NO: 2288 - protein, 10 aa, synthetic construct
  REGION 1..10: note = Description of Artificial Sequence: Synthetic peptide
LQHRLYECLY

SEQ ID NO: 2289 - protein, 8 aa, synthetic construct
  REGION 1..8: note = Description of Artificial Sequence: Synthetic peptide
LQKAAITI

SEQ ID NO: 2290 - protein, 9 aa, synthetic construct
  REGION 1..9: note = Description of Artificial Sequence: Synthetic peptide
LQLGFSTGV

SEQ ID NO: 2291 - protein, 9 aa, synthetic construct
  REGION 1..9: note = Description of Artificial Sequence: Synthetic peptide
LQNNELSPV

SEQ ID NO: 2292 - protein, 9 aa, synthetic construct
  REGION 1..9: note = Description of Artificial Sequence: Synthetic peptide
LQPEEEQEE

SEQ ID NO: 2293 - protein, 8 aa, synthetic construct
  REGION 1..8: note = Description of Artificial Sequence: Synthetic peptide
LQPELDSF

SEQ ID NO: 2294 - protein, 9 aa, synthetic construct
  REGION 1..9: note = Description of Artificial Sequence: Synthetic peptide
LQPRTFLLK

SEQ ID NO: 2295 - protein, 8 aa, synthetic construct
  REGION 1..8: note = Description of Artificial Sequence: Synthetic peptide
LQQIELKF

SEQ ID NO: 2296 - protein, 8 aa, synthetic construct
  REGION 1..8: note = Description of Artificial Sequence: Synthetic peptide
LQSLQTYV

SEQ ID NO: 2297 - protein, 10 aa, synthetic construct
  REGION 1..10: note = Description of Artificial Sequence: Synthetic peptide
LQTYVTQQLI

SEQ ID NO: 2298 - protein, 8 aa, synthetic construct
  REGION 1..8: note = Description of Artificial Sequence: Synthetic peptide
LQVRDVLV

SEQ ID NO: 2299 - protein, 9 aa, synthetic construct
  REGION 1..9: note = Description of Artificial Sequence: Synthetic peptide
LQYGSFCTQ

SEQ ID NO: 2300 - protein, 8 aa, synthetic construct
  REGION 1..8: note = Description of Artificial Sequence: Synthetic peptide
LQYIRKLH

SEQ ID NO: 2301 - protein, 9 aa, synthetic construct
  REGION 1..9: note = Description of Artificial Sequence: Synthetic peptide
LRARSVSPK

SEQ ID NO: 2302 - protein, 11 aa, synthetic construct
  REGION 1..11: note = Description of Artificial Sequence: Synthetic peptide
LRARSVSPKLF

SEQ ID NO: 2303 - protein, 9 aa, synthetic construct
  REGION 1..9: note = Description of Artificial Sequence: Synthetic peptide
LRCGACIRR

SEQ ID NO: 2304 - protein, 8 aa, synthetic construct
  REGION 1..8: note = Description of Artificial Sequence: Synthetic peptide
LRDGWEIV

SEQ ID NO: 2305 - protein, 9 aa, synthetic construct
  REGION 1..9: note = Description of Artificial Sequence: Synthetic peptide
LREPMLQSA

SEQ ID NO: 2306 - protein, 10 aa, synthetic construct
  REGION 1..10: note = Description of Artificial Sequence: Synthetic peptide
LRIAGHHLGR

SEQ ID NO: 2307 - protein, 9 aa, synthetic construct
  REGION 1..9: note = Description of Artificial Sequence: Synthetic peptide
LRLIDAMMF

SEQ ID NO: 2308 - protein, 10 aa, synthetic construct
  REGION 1..10: note = Description of Artificial Sequence: Synthetic peptide
LRPDTRYVLM

SEQ ID NO: 2309 - protein, 9 aa, synthetic construct
  REGION 1..9: note = Description of Artificial Sequence: Synthetic peptide
LRQWLPTGT

SEQ ID NO: 2310 - protein, 10 aa, synthetic construct
  REGION 1..10: note = Description of Artificial Sequence: Synthetic peptide
LRTTNGDFLH

SEQ ID NO: 2311 - protein, 9 aa, synthetic construct
  REGION 1..9: note = Description of Artificial Sequence: Synthetic peptide
LRVCVDTVR

SEQ ID NO: 2312 - protein, 9 aa, synthetic construct
  REGION 1..9: note = Description of Artificial Sequence: Synthetic peptide
LRVIGHSMQ

SEQ ID NO: 2313 - protein, 11 aa, synthetic construct
  REGION 1..11: note = Description of Artificial Sequence: Synthetic peptide
LSAPTLVPQEH

SEQ ID NO: 2314 - protein, 10 aa, synthetic construct
  REGION 1..10: note = Description of Artificial Sequence: Synthetic peptide
LSAQTGIAVL

SEQ ID NO: 2315 - protein, 10 aa, synthetic construct
  REGION 1..10: note = Description of Artificial Sequence: Synthetic peptide
LSDDAVVCFN

SEQ ID NO: 2316 - protein, 8 aa, synthetic construct
  REGION 1..8: note = Description of Artificial Sequence: Synthetic peptide
LSDLQDLK

SEQ ID NO: 2317 - protein, 9 aa, synthetic construct
  REGION 1..9: note = Description of Artificial Sequence: Synthetic peptide
LSEISMDNS

SEQ ID NO: 2318 - protein, 8 aa, synthetic construct
  REGION 1..8: note = Description of Artificial Sequence: Synthetic peptide
LSEQLDFI

SEQ ID NO: 2319 - protein, 9 aa, synthetic construct
  REGION 1..9: note = Description of Artificial Sequence: Synthetic peptide
LSETKCTLK

SEQ ID NO: 2320 - protein, 8 aa, synthetic construct
  REGION 1..8: note = Description of Artificial Sequence: Synthetic peptide
LSFELLHA

SEQ ID NO: 2321 - protein, 10 aa, synthetic construct
  REGION 1..10: note = Description of Artificial Sequence: Synthetic peptide
LSFELLHAPA

SEQ ID NO: 2322 - protein, 8 aa, synthetic construct
  REGION 1..8: note = Description of Artificial Sequence: Synthetic peptide
LSGFKLKD

SEQ ID NO: 2323 - protein, 9 aa, synthetic construct
  REGION 1..9: note = Description of Artificial Sequence: Synthetic peptide
LSHQSDIEV

SEQ ID NO: 2324 - protein, 8 aa, synthetic construct
  REGION 1..8: note = Description of Artificial Sequence: Synthetic peptide
LSHRFYRL

SEQ ID NO: 2325 - protein, 8 aa, synthetic construct
  REGION 1..8: note = Description of Artificial Sequence: Synthetic peptide
LSKSLTEN

SEQ ID NO: 2326 - protein, 9 aa, synthetic construct
  REGION 1..9: note = Description of Artificial Sequence: Synthetic peptide
LSKSLTENK

SEQ ID NO: 2327 - protein, 8 aa, synthetic construct
  REGION 1..8: note = Description of Artificial Sequence: Synthetic peptide
LSLIDFYL

SEQ ID NO: 2328 - protein, 9 aa, synthetic construct
  REGION 1..9: note = Description of Artificial Sequence: Synthetic peptide
LSLIDFYLC

SEQ ID NO: 2329 - protein, 10 aa, synthetic construct
  REGION 1..10: note = Description of Artificial Sequence: Synthetic peptide
LSLIDFYLCF

SEQ ID NO: 2330 - protein, 10 aa, synthetic construct
  REGION 1..10: note = Description of Artificial Sequence: Synthetic peptide
LSLPVLQVRD

SEQ ID NO: 2331 - protein, 9 aa, synthetic construct
  REGION 1..9: note = Description of Artificial Sequence: Synthetic peptide
LSLQFKRPI

SEQ ID NO: 2332 - protein, 12 aa, synthetic construct
  REGION 1..12: note = Description of Artificial Sequence: Synthetic peptide
LSLREVRTIKVF

SEQ ID NO: 2333 - protein, 8 aa, synthetic construct
  REGION 1..8: note = Description of Artificial Sequence: Synthetic peptide
LSPRWYFY

SEQ ID NO: 2334 - protein, 10 aa, synthetic construct
  REGION 1..10: note = Description of Artificial Sequence: Synthetic peptide
LSPRWYFYYL

SEQ ID NO: 2335 - protein, 10 aa, synthetic construct
  REGION 1..10: note = Description of Artificial Sequence: Synthetic peptide
LSRVLGLKTL

SEQ ID NO: 2336 - protein, 8 aa, synthetic construct
  REGION 1..8: note = Description of Artificial Sequence: Synthetic peptide
LSSYSLFD

SEQ ID NO: 2337 - protein, 12 aa, synthetic construct
  REGION 1..12: note = Description of Artificial Sequence: Synthetic peptide
LSTDGNKIADKY

SEQ ID NO: 2338 - protein, 12 aa, synthetic construct
  REGION 1..12: note = Description of Artificial Sequence: Synthetic peptide
LSTDTGVEHVTF

SEQ ID NO: 2339 - protein, 9 aa, synthetic construct
  REGION 1..9: note = Description of Artificial Sequence: Synthetic peptide
LSVCLGSLI

SEQ ID NO: 2340 - protein, 8 aa, synthetic construct
  REGION 1..8: note = Description of Artificial Sequence: Synthetic peptide
LSVVNARL

SEQ ID NO: 2341 - protein, 8 aa, synthetic construct
  REGION 1..8: note = Description of Artificial Sequence: Synthetic peptide
LSYEQFKK

SEQ ID NO: 2342 - protein, 11 aa, synthetic construct
  REGION 1..11: note = Description of Artificial Sequence: Synthetic peptide
LSYFIASFRLF

SEQ ID NO: 2343 - protein, 8 aa, synthetic construct
  REGION 1..8: note = Description of Artificial Sequence: Synthetic peptide
LTAESHVD

SEQ ID NO: 2344 - protein, 8 aa, synthetic construct
  REGION 1..8: note = Description of Artificial Sequence: Synthetic peptide
LTAFGLVA

SEQ ID NO: 2345 - protein, 11 aa, synthetic construct
  REGION 1..11: note = Description of Artificial Sequence: Synthetic peptide
LTAFGLVAEWF

SEQ ID NO: 2346 - protein, 9 aa, synthetic construct
  REGION 1..9: note = Description of Artificial Sequence: Synthetic peptide
LTCATTRQV

SEQ ID NO: 2347 - protein, 10 aa, synthetic construct
  REGION 1..10: note = Description of Artificial Sequence: Synthetic peptide
LTDEMIAQYT

SEQ ID NO: 2348 - protein, 8 aa, synthetic construct
  REGION 1..8: note = Description of Artificial Sequence: Synthetic peptide
LTDNVYIK

SEQ ID NO: 2349 - protein, 8 aa, synthetic construct
  REGION 1..8: note = Description of Artificial Sequence: Synthetic peptide
LTEEVVLK

SEQ ID NO: 2350 - protein, 8 aa, synthetic construct
  REGION 1..8: note = Description of Artificial Sequence: Synthetic peptide
LTESNKKF

SEQ ID NO: 2351 - protein, 9 aa, synthetic construct
  REGION 1..9: note = Description of Artificial Sequence: Synthetic peptide
LTFYLTNDV

SEQ ID NO: 2352 - protein, 11 aa, synthetic construct
  REGION 1..11: note = Description of Artificial Sequence: Synthetic peptide
LTFYLTNDVSF

SEQ ID NO: 2353 - protein, 8 aa, synthetic construct
  REGION 1..8: note = Description of Artificial Sequence: Synthetic peptide
LTKEGATT

SEQ ID NO: 2354 - protein, 11 aa, synthetic construct
  REGION 1..11: note = Description of Artificial Sequence: Synthetic peptide
LTKGTLEPEYF

SEQ ID NO: 2355 - protein, 9 aa, synthetic construct
  REGION 1..9: note = Description of Artificial Sequence: Synthetic peptide
LTKPYIKWD

SEQ ID NO: 2356 - protein, 8 aa, synthetic construct
  REGION 1..8: note = Description of Artificial Sequence: Synthetic peptide
LTLDNQDL

SEQ ID NO: 2357 - protein, 9 aa, synthetic construct
  REGION 1..9: note = Description of Artificial Sequence: Synthetic peptide
LTLDNQDLN

SEQ ID NO: 2358 - protein, 12 aa, synthetic construct
  REGION 1..12: note = Description of Artificial Sequence: Synthetic peptide
LTLDNQDLNGNW

SEQ ID NO: 2359 - protein, 8 aa, synthetic construct
  REGION 1..8: note = Description of Artificial Sequence: Synthetic peptide
LTLGVYDY

SEQ ID NO: 2360 - protein, 10 aa, synthetic construct
  REGION 1..10: note = Description of Artificial Sequence: Synthetic peptide
LTNDNTSRYW

SEQ ID NO: 2361 - protein, 9 aa, synthetic construct
  REGION 1..9: note = Description of Artificial Sequence: Synthetic peptide
LTNDVSFLA

SEQ ID NO: 2362 - protein, 10 aa, synthetic construct
  REGION 1..10: note = Description of Artificial Sequence: Synthetic peptide
LTNDVSFLAH

SEQ ID NO: 2363 - protein, 9 aa, synthetic construct
  REGION 1..9: note = Description of Artificial Sequence: Synthetic peptide
LTPGDSSSG

SEQ ID NO: 2364 - protein, 11 aa, synthetic construct
  REGION 1..11: note = Description of Artificial Sequence: Synthetic peptide
LTPLGIDLDEW

SEQ ID NO: 2365 - protein, 10 aa, synthetic construct
  REGION 1..10: note = Description of Artificial Sequence: Synthetic peptide
LTPVVQTIEV

SEQ ID NO: 2366 - protein, 8 aa, synthetic construct
  REGION 1..8: note = Description of Artificial Sequence: Synthetic peptide
LTRPLLES

SEQ ID NO: 2367 - protein, 9 aa, synthetic construct
  REGION 1..9: note = Description of Artificial Sequence: Synthetic peptide
LTRPLLESE

SEQ ID NO: 2368 - protein, 9 aa, synthetic construct
  REGION 1..9: note = Description of Artificial Sequence: Synthetic peptide
LTSMKYFVK

SEQ ID NO: 2369 - protein, 9 aa, synthetic construct
  REGION 1..9: note = Description of Artificial Sequence: Synthetic peptide
LTSQWLTNI

SEQ ID NO: 2370 - protein, 10 aa, synthetic construct
  REGION 1..10: note = Description of Artificial Sequence: Synthetic peptide
LTSQWLTNIF

SEQ ID NO: 2371 - protein, 8 aa, synthetic construct
  REGION 1..8: note = Description of Artificial Sequence: Synthetic peptide
LTTAAKLM

SEQ ID NO: 2372 - protein, 9 aa, synthetic construct
  REGION 1..9: note = Description of Artificial Sequence: Synthetic peptide
LTTAAKLMV

SEQ ID NO: 2373 - protein, 9 aa, synthetic construct
  REGION 1..9: note = Description of Artificial Sequence: Synthetic peptide
LTVFFDGRV

SEQ ID NO: 2374 - protein, 10 aa, synthetic construct
  REGION 1..10: note = Description of Artificial Sequence: Synthetic peptide
LTVFFDGRVD

SEQ ID NO: 2375 - protein, 12 aa, synthetic construct
  REGION 1..12: note = Description of Artificial Sequence: Synthetic peptide
LVAAGLEAPFLY

SEQ ID NO: 2376 - protein, 9 aa, synthetic construct
  REGION 1..9: note = Description of Artificial Sequence: Synthetic peptide
LVAVPTGYV

SEQ ID NO: 2377 - protein, 8 aa, synthetic construct
  REGION 1..8: note = Description of Artificial Sequence: Synthetic peptide
LVKQGDDY

SEQ ID NO: 2378 - protein, 9 aa, synthetic construct
  REGION 1..9: note = Description of Artificial Sequence: Synthetic peptide
LVLARKHTT

SEQ ID NO: 2379 - protein, 8 aa, synthetic construct
  REGION 1..8: note = Description of Artificial Sequence: Synthetic peptide
LVLIMLII

SEQ ID NO: 2380 - protein, 10 aa, synthetic construct
  REGION 1..10: note = Description of Artificial Sequence: Synthetic peptide
LVLIMLIIFW

SEQ ID NO: 2381 - protein, 9 aa, synthetic construct
  REGION 1..9: note = Description of Artificial Sequence: Synthetic peptide
LVLLPLVSS

SEQ ID NO: 2382 - protein, 8 aa, synthetic construct
  REGION 1..8: note = Description of Artificial Sequence: Synthetic peptide
LVPFWITI

SEQ ID NO: 2383 - protein, 11 aa, synthetic construct
  REGION 1..11: note = Description of Artificial Sequence: Synthetic peptide
LVPFWITIAYI

SEQ ID NO: 2384 - protein, 8 aa, synthetic construct
  REGION 1..8: note = Description of Artificial Sequence: Synthetic peptide
LVPHVGEI

SEQ ID NO: 2385 - protein, 10 aa, synthetic construct
  REGION 1..10: note = Description of Artificial Sequence: Synthetic peptide
LVPHVGEIPV

SEQ ID NO: 2386 - protein, 8 aa, synthetic construct
  REGION 1..8: note = Description of Artificial Sequence: Synthetic peptide
LVPQEHYV

SEQ ID NO: 2387 - protein, 10 aa, synthetic construct
  REGION 1..10: note = Description of Artificial Sequence: Synthetic peptide
LVPQEHYVRI

SEQ ID NO: 2388 - protein, 8 aa, synthetic construct
  REGION 1..8: note = Description of Artificial Sequence: Synthetic peptide
LVRKIFVD

SEQ ID NO: 2389 - protein, 12 aa, synthetic construct
  REGION 1..12: note = Description of Artificial Sequence: Synthetic peptide
LVSDIDITFLKK

SEQ ID NO: 2390 - protein, 10 aa, synthetic construct
  REGION 1..10: note = Description of Artificial Sequence: Synthetic peptide
LVTLAILTAL

SEQ ID NO: 2391 - protein, 9 aa, synthetic construct
  REGION 1..9: note = Description of Artificial Sequence: Synthetic peptide
LVYAADPAM

SEQ ID NO: 2392 - protein, 10 aa, synthetic construct
  REGION 1..10: note = Description of Artificial Sequence: Synthetic peptide
LVYDNKLKAH

SEQ ID NO: 2393 - protein, 11 aa, synthetic construct
  REGION 1..11: note = Description of Artificial Sequence: Synthetic peptide
LVYDNKLKAHK

SEQ ID NO: 2394 - protein, 10 aa, synthetic construct
  REGION 1..10: note = Description of Artificial Sequence: Synthetic peptide
LVYFLQSINF

SEQ ID NO: 2395 - protein, 11 aa, synthetic construct
  REGION 1..11: note = Description of Artificial Sequence: Synthetic peptide
LWCKDGHVETF

SEQ ID NO: 2396 - protein, 10 aa, synthetic construct
  REGION 1..10: note = Description of Artificial Sequence: Synthetic peptide
LWLLWPVTLA

SEQ ID NO: 2397 - protein, 8 aa, synthetic construct
  REGION 1..8: note = Description of Artificial Sequence: Synthetic peptide
LWNTFTRL

SEQ ID NO: 2398 - protein, 9 aa, synthetic construct
  REGION 1..9: note = Description of Artificial Sequence: Synthetic peptide
LYALVYFLQ

SEQ ID NO: 2399 - protein, 8 aa, synthetic construct
  REGION 1..8: note = Description of Artificial Sequence: Synthetic peptide
LYDKLQFT

SEQ ID NO: 2400 - protein, 8 aa, synthetic construct
  REGION 1..8: note = Description of Artificial Sequence: Synthetic peptide
LYDKLVSS

SEQ ID NO: 2401 - protein, 8 aa, synthetic construct
  REGION 1..8: note = Description of Artificial Sequence: Synthetic peptide
LYIDINGN

SEQ ID NO: 2402 - protein, 11 aa, synthetic construct
  REGION 1..11: note = Description of Artificial Sequence: Synthetic peptide
LYIDINGNLHP

SEQ ID NO: 2403 - protein, 8 aa, synthetic construct
  REGION 1..8: note = Description of Artificial Sequence: Synthetic peptide
LYKLMGHF

SEQ ID NO: 2404 - protein, 8 aa, synthetic construct
  REGION 1..8: note = Description of Artificial Sequence: Synthetic peptide
LYKMQRML

SEQ ID NO: 2405 - protein, 11 aa, synthetic construct
  REGION 1..11: note = Description of Artificial Sequence: Synthetic peptide
LYPTLNISDEF

SEQ ID NO: 2406 - protein, 11 aa, synthetic construct
  REGION 1..11: note = Description of Artificial Sequence: Synthetic peptide
LYSPIFLIVAA

SEQ ID NO: 2407 - protein, 10 aa, synthetic construct
  REGION 1..10: note = Description of Artificial Sequence: Synthetic peptide
MADLVYALRH

SEQ ID NO: 2408 - protein, 8 aa, synthetic construct
  REGION 1..8: note = Description of Artificial Sequence: Synthetic peptide
MADQAMTQ

SEQ ID NO: 2409 - protein, 10 aa, synthetic construct
  REGION 1..10: note = Description of Artificial Sequence: Synthetic peptide
MAFPSGKVEG

SEQ ID NO: 2410 - protein, 9 aa, synthetic construct
  REGION 1..9: note = Description of Artificial Sequence: Synthetic peptide
MAGNGGDAA

SEQ ID NO: 2411 - protein, 10 aa, synthetic construct
  REGION 1..10: note = Description of Artificial Sequence: Synthetic peptide
MAGNGGDAAL

SEQ ID NO: 2412 - protein, 9 aa, synthetic construct
  REGION 1..9: note = Description of Artificial Sequence: Synthetic peptide
MAPISAMVR

SEQ ID NO: 2413 - protein, 8 aa, synthetic construct
  REGION 1..8: note = Description of Artificial Sequence: Synthetic peptide
MASLVLAR

SEQ ID NO: 2414 - protein, 9 aa, synthetic construct
  REGION 1..9: note = Description of Artificial Sequence: Synthetic peptide
MASLVLARK

SEQ ID NO: 2415 - protein, 10 aa, synthetic construct
  REGION 1..10: note = Description of Artificial Sequence: Synthetic peptide
MAYITGGVVQ

SEQ ID NO: 2416 - protein, 11 aa, synthetic construct
  REGION 1..11: note = Description of Artificial Sequence: Synthetic peptide
MAYITGGVVQL

SEQ ID NO: 2417 - protein, 8 aa, synthetic construct
  REGION 1..8: note = Description of Artificial Sequence: Synthetic peptide
MDGSIIQF

SEQ ID NO: 2418 - protein, 8 aa, synthetic construct
  REGION 1..8: note = Description of Artificial Sequence: Synthetic peptide
MDLFMRIF

SEQ ID NO: 2419 - protein, 9 aa, synthetic construct
  REGION 1..9: note = Description of Artificial Sequence: Synthetic peptide
MDNLACEDL

SEQ ID NO: 2420 - protein, 9 aa, synthetic construct
  REGION 1..9: note = Description of Artificial Sequence: Synthetic peptide
MDSTVKNYF

SEQ ID NO: 2421 - protein, 10 aa, synthetic construct
  REGION 1..10: note = Description of Artificial Sequence: Synthetic peptide
MEKLKTLVAT

SEQ ID NO: 2422 - protein, 10 aa, synthetic construct
  REGION 1..10: note = Description of Artificial Sequence: Synthetic peptide
MELPTGVHAG

SEQ ID NO: 2423 - protein, 8 aa, synthetic construct
  REGION 1..8: note = Description of Artificial Sequence: Synthetic peptide
MELTPVVQ

SEQ ID NO: 2424 - protein, 10 aa, synthetic construct
  REGION 1..10: note = Description of Artificial Sequence: Synthetic peptide
MESEFRVYSS

SEQ ID NO: 2425 - protein, 8 aa, synthetic construct
  REGION 1..8: note = Description of Artificial Sequence: Synthetic peptide
MFDAYVNT

SEQ ID NO: 2426 - protein, 8 aa, synthetic construct
  REGION 1..8: note = Description of Artificial Sequence: Synthetic peptide
MFLGTCRR

SEQ ID NO: 2427 - protein, 9 aa, synthetic construct
  REGION 1..9: note = Description of Artificial Sequence: Synthetic peptide
MFTPLIQPI

SEQ ID NO: 2428 - protein, 10 aa, synthetic construct
  REGION 1..10: note = Description of Artificial Sequence: Synthetic peptide
MFTPLVPFWI

SEQ ID NO: 2429 - protein, 8 aa, synthetic construct
  REGION 1..8: note = Description of Artificial Sequence: Synthetic peptide
MGIIAMSA

SEQ ID NO: 2430 - protein, 9 aa, synthetic construct
  REGION 1..9: note = Description of Artificial Sequence: Synthetic peptide
MGIIAMSAF

SEQ ID NO: 2431 - protein, 8 aa, synthetic construct
  REGION 1..8: note = Description of Artificial Sequence: Synthetic peptide
MHAASGNL

SEQ ID NO: 2432 - protein, 10 aa, synthetic construct
  REGION 1..10: note = Description of Artificial Sequence: Synthetic peptide
MHHMELPTGV

SEQ ID NO: 2433 - protein, 11 aa, synthetic construct
  REGION 1..11: note = Description of Artificial Sequence: Synthetic peptide
MISAGFSLWVY

SEQ ID NO: 2434 - protein, 9 aa, synthetic construct
  REGION 1..9: note = Description of Artificial Sequence: Synthetic peptide
MLAHAEETR

SEQ ID NO: 2435 - protein, 9 aa, synthetic construct
  REGION 1..9: note = Description of Artificial Sequence: Synthetic peptide
MLDNRATLQ

SEQ ID NO: 2436 - protein, 11 aa, synthetic construct
  REGION 1..11: note = Description of Artificial Sequence: Synthetic peptide
MLDNRATLQAI

SEQ ID NO: 2437 - protein, 8 aa, synthetic construct
  REGION 1..8: note = Description of Artificial Sequence: Synthetic peptide
MLFTMLRK

SEQ ID NO: 2438 - protein, 8 aa, synthetic construct
  REGION 1..8: note = Description of Artificial Sequence: Synthetic peptide
MLKTVYSD

SEQ ID NO: 2439 - protein, 9 aa, synthetic construct
  REGION 1..9: note = Description of Artificial Sequence: Synthetic peptide
MLKTVYSDV

SEQ ID NO: 2440 - protein, 10 aa, synthetic construct
  REGION 1..10: note = Description of Artificial Sequence: Synthetic peptide
MLLEIKDTEK

SEQ ID NO: 2441 - protein, 11 aa, synthetic construct
  REGION 1..11: note = Description of Artificial Sequence: Synthetic peptide
MLLEIKDTEKY

SEQ ID NO: 2442 - protein, 8 aa, synthetic construct
  REGION 1..8: note = Description of Artificial Sequence: Synthetic peptide
MLLEKCDL

SEQ ID NO: 2443 - protein, 8 aa, synthetic construct
  REGION 1..8: note = Description of Artificial Sequence: Synthetic peptide
MLRIMASL

SEQ ID NO: 2444 - protein, 9 aa, synthetic construct
  REGION 1..9: note = Description of Artificial Sequence: Synthetic peptide
MLWCKDGHV

SEQ ID NO: 2445 - protein, 8 aa, synthetic construct
  REGION 1..8: note = Description of Artificial Sequence: Synthetic peptide
MMFVKHKH

SEQ ID NO: 2446 - protein, 10 aa, synthetic construct
  REGION 1..10: note = Description of Artificial Sequence: Synthetic peptide
MMFVKHKHAF

SEQ ID NO: 2447 - protein, 10 aa, synthetic construct
  REGION 1..10: note = Description of Artificial Sequence: Synthetic peptide
MMISAGFSLW

SEQ ID NO: 2448 - protein, 9 aa, synthetic construct
  REGION 1..9: note = Description of Artificial Sequence: Synthetic peptide
MNLKYAISA

SEQ ID NO: 2449 - protein, 12 aa, synthetic construct
  REGION 1..12: note = Description of Artificial Sequence: Synthetic peptide
MPASWVMRIMTW

SEQ ID NO: 2450 - protein, 12 aa, synthetic construct
  REGION 1..12: note = Description of Artificial Sequence: Synthetic peptide
MPILTLTRALTA

SEQ ID NO: 2451 - protein, 8 aa, synthetic construct
  REGION 1..8: note = Description of Artificial Sequence: Synthetic peptide
MPLKAPKE

SEQ ID NO: 2452 - protein, 10 aa, synthetic construct
  REGION 1..10: note = Description of Artificial Sequence: Synthetic peptide
MPLKAPKEII

SEQ ID NO: 2453 - protein, 11 aa, synthetic construct
  REGION 1..11: note = Description of Artificial Sequence: Synthetic peptide
MPLKAPKEIIF

SEQ ID NO: 2454 - protein, 11 aa, synthetic construct
  REGION 1..11: note = Description of Artificial Sequence: Synthetic peptide
MPLSAPTLVPQ

SEQ ID NO: 2455 - protein, 9 aa, synthetic construct
  REGION 1..9: note = Description of Artificial Sequence: Synthetic peptide
MPNLYKMQR

SEQ ID NO: 2456 - protein, 11 aa, synthetic construct
  REGION 1..11: note = Description of Artificial Sequence: Synthetic peptide
MPNLYKMQRML

SEQ ID NO: 2457 - protein, 10 aa, synthetic construct
  REGION 1..10: note = Description of Artificial Sequence: Synthetic peptide
MPNMLRIMAS

SEQ ID NO: 2458 - protein, 11 aa, synthetic construct
  REGION 1..11: note = Description of Artificial Sequence: Synthetic peptide
MPNMLRIMASL

SEQ ID NO: 2459 - protein, 10 aa, synthetic construct
  REGION 1..10: note = Description of Artificial Sequence: Synthetic peptide
MPVCVETKAI

SEQ ID NO: 2460 - protein, 10 aa, synthetic construct
  REGION 1..10: note = Description of Artificial Sequence: Synthetic peptide
MQNCVLKLKV

SEQ ID NO: 2461 - protein, 8 aa, synthetic construct
  REGION 1..8: note = Description of Artificial Sequence: Synthetic peptide
MQRKLEKM

SEQ ID NO: 2462 - protein, 9 aa, synthetic construct
  REGION 1..9: note = Description of Artificial Sequence: Synthetic peptide
MQTMLFTML

SEQ ID NO: 2463 - protein, 8 aa, synthetic construct
  REGION 1..8: note = Description of Artificial Sequence: Synthetic peptide
MQVESDDY

SEQ ID NO: 2464 - protein, 9 aa, synthetic construct
  REGION 1..9: note = Description of Artificial Sequence: Synthetic peptide
MQVESDDYI

SEQ ID NO: 2465 - protein, 9 aa, synthetic construct
  REGION 1..9: note = Description of Artificial Sequence: Synthetic peptide
MRELNGGAY

SEQ ID NO: 2466 - protein, 9 aa, synthetic construct
  REGION 1..9: note = Description of Artificial Sequence: Synthetic peptide
MRLWLCWKC

SEQ ID NO: 2467 - protein, 10 aa, synthetic construct
  REGION 1..10: note = Description of Artificial Sequence: Synthetic peptide
MRLWLCWKCR

SEQ ID NO: 2468 - protein, 8 aa, synthetic construct
  REGION 1..8: note = Description of Artificial Sequence: Synthetic peptide
MRTFKVSI

SEQ ID NO: 2469 - protein, 11 aa, synthetic construct
  REGION 1..11: note = Description of Artificial Sequence: Synthetic peptide
MRTFKVSIWNL

SEQ ID NO: 2470 - protein, 8 aa, synthetic construct
  REGION 1..8: note = Description of Artificial Sequence: Synthetic peptide
MRVIHFGA

SEQ ID NO: 2471 - protein, 10 aa, synthetic construct
  REGION 1..10: note = Description of Artificial Sequence: Synthetic peptide
MSALNHTKKW

SEQ ID NO: 2472 - protein, 12 aa, synthetic construct
  REGION 1..12: note = Description of Artificial Sequence: Synthetic peptide
MSALNHTKKWKY

SEQ ID NO: 2473 - protein, 9 aa, synthetic construct
  REGION 1..9: note = Description of Artificial Sequence: Synthetic peptide
MSDNGPQNQ

SEQ ID NO: 2474 - protein, 8 aa, synthetic construct
  REGION 1..8: note = Description of Artificial Sequence: Synthetic peptide
MSDRDLYD

SEQ ID NO: 2475 - protein, 9 aa, synthetic construct
  REGION 1..9: note = Description of Artificial Sequence: Synthetic peptide
MSDRDLYDK

SEQ ID NO: 2476 - protein, 10 aa, synthetic construct
  REGION 1..10: note = Description of Artificial Sequence: Synthetic peptide
MSDRDLYDKL

SEQ ID NO: 2477 - protein, 11 aa, synthetic construct
  REGION 1..11: note = Description of Artificial Sequence: Synthetic peptide
MSDVKCTSVVL

SEQ ID NO: 2478 - protein, 8 aa, synthetic construct
  REGION 1..8: note = Description of Artificial Sequence: Synthetic peptide
MSLSEQLR

SEQ ID NO: 2479 - protein, 8 aa, synthetic construct
  REGION 1..8: note = Description of Artificial Sequence: Synthetic peptide
MSRIGMEV

SEQ ID NO: 2480 - protein, 12 aa, synthetic construct
  REGION 1..12: note = Description of Artificial Sequence: Synthetic peptide
MSYEDQDALFAY

SEQ ID NO: 2481 - protein, 8 aa, synthetic construct
  REGION 1..8: note = Description of Artificial Sequence: Synthetic peptide
MSYLFQHA

SEQ ID NO: 2482 - protein, 9 aa, synthetic construct
  REGION 1..9: note = Description of Artificial Sequence: Synthetic peptide
MSYLFQHAN

SEQ ID NO: 2483 - protein, 10 aa, synthetic construct
  REGION 1..10: note = Description of Artificial Sequence: Synthetic peptide
MTYRRLISMM

SEQ ID NO: 2484 - protein, 8 aa, synthetic construct
  REGION 1..8: note = Description of Artificial Sequence: Synthetic peptide
MVDTSLSG

SEQ ID NO: 2485 - protein, 11 aa, synthetic construct
  REGION 1..11: note = Description of Artificial Sequence: Synthetic peptide
MVDTSLSGFKL

SEQ ID NO: 2486 - protein, 10 aa, synthetic construct
  REGION 1..10: note = Description of Artificial Sequence: Synthetic peptide
MVLGSLAATV

SEQ ID NO: 2487 - protein, 11 aa, synthetic construct
  REGION 1..11: note = Description of Artificial Sequence: Synthetic peptide
MVMCGGSLYVK

SEQ ID NO: 2488 - protein, 8 aa, synthetic construct
  REGION 1..8: note = Description of Artificial Sequence: Synthetic peptide
MVMFTPLV

SEQ ID NO: 2489 - protein, 9 aa, synthetic construct
  REGION 1..9: note = Description of Artificial Sequence: Synthetic peptide
MVMFTPLVP

SEQ ID NO: 2490 - protein, 9 aa, synthetic construct
  REGION 1..9: note = Description of Artificial Sequence: Synthetic peptide
MVRMYIFFA

SEQ ID NO: 2491 - protein, 8 aa, synthetic construct
  REGION 1..8: note = Description of Artificial Sequence: Synthetic peptide
MVVKAALL

SEQ ID NO: 2492 - protein, 9 aa, synthetic construct
  REGION 1..9: note = Description of Artificial Sequence: Synthetic peptide
MWKGYGCSC

SEQ ID NO: 2493 - protein, 8 aa, synthetic construct
  REGION 1..8: note = Description of Artificial Sequence: Synthetic peptide
MWLSYFIA

SEQ ID NO: 2494 - protein, 8 aa, synthetic construct
  REGION 1..8: note = Description of Artificial Sequence: Synthetic peptide
MYDPKTKN

SEQ ID NO: 2495 - protein, 10 aa, synthetic construct
  REGION 1..10: note = Description of Artificial Sequence: Synthetic peptide
MYLKLRSDVL

SEQ ID NO: 2496 - protein, 9 aa, synthetic construct
  REGION 1..9: note = Description of Artificial Sequence: Synthetic peptide
MYTPHTVLQ

SEQ ID NO: 2497 - protein, 9 aa, synthetic construct
  REGION 1..9: note = Description of Artificial Sequence: Synthetic peptide
NAAIVLQLP

SEQ ID NO: 2498 - protein, 8 aa, synthetic construct
  REGION 1..8: note = Description of Artificial Sequence: Synthetic peptide
NAANVYLK

SEQ ID NO: 2499 - protein, 9 aa, synthetic construct
  REGION 1..9: note = Description of Artificial Sequence: Synthetic peptide
NADLYKLMG

SEQ ID NO: 2500 - protein, 8 aa, synthetic construct
  REGION 1..8: note = Description of Artificial Sequence: Synthetic peptide
NALPETTA

SEQ ID NO: 2501 - protein, 10 aa, synthetic construct
  REGION 1..10: note = Description of Artificial Sequence: Synthetic peptide
NANQVIVNNL

SEQ ID NO: 2502 - protein, 9 aa, synthetic construct
  REGION 1..9: note = Description of Artificial Sequence: Synthetic peptide
NAPGCDVTD

SEQ ID NO: 2503 - protein, 10 aa, synthetic construct
  REGION 1..10: note = Description of Artificial Sequence: Synthetic peptide
NAPGCDVTDV

SEQ ID NO: 2504 - protein, 9 aa, synthetic construct
  REGION 1..9: note = Description of Artificial Sequence: Synthetic peptide
NAQALNTLV

SEQ ID NO: 2505 - protein, 8 aa, synthetic construct
  REGION 1..8: note = Description of Artificial Sequence: Synthetic peptide
NARNGVLI

SEQ ID NO: 2506 - protein, 9 aa, synthetic construct
  REGION 1..9: note = Description of Artificial Sequence: Synthetic peptide
NARNGVLIT

SEQ ID NO: 2507 - protein, 8 aa, synthetic construct
  REGION 1..8: note = Description of Artificial Sequence: Synthetic peptide
NATNKATY

SEQ ID NO: 2508 - protein, 9 aa, synthetic construct
  REGION 1..9: note = Description of Artificial Sequence: Synthetic peptide
NATNKATYK

SEQ ID NO: 2509 - protein, 8 aa, synthetic construct
  REGION 1..8: note = Description of Artificial Sequence: Synthetic peptide
NATRFASV

SEQ ID NO: 2510 - protein, 8 aa, synthetic construct
  REGION 1..8: note = Description of Artificial Sequence: Synthetic peptide
NCDTLKEI

SEQ ID NO: 2511 - protein, 9 aa, synthetic construct
  REGION 1..9: note = Description of Artificial Sequence: Synthetic peptide
NCDVVIGIV

SEQ ID NO: 2512 - protein, 10 aa, synthetic construct
  REGION 1..10: note = Description of Artificial Sequence: Synthetic peptide
NCVADYSVLY

SEQ ID NO: 2513 - protein, 8 aa, synthetic construct
  REGION 1..8: note = Description of Artificial Sequence: Synthetic peptide
NCVLKLKV

SEQ ID NO: 2514 - protein, 9 aa, synthetic construct
  REGION 1..9: note = Description of Artificial Sequence: Synthetic peptide
NDFNLVAMK

SEQ ID NO: 2515 - protein, 8 aa, synthetic construct
  REGION 1..8: note = Description of Artificial Sequence: Synthetic peptide
NDLCFTNV

SEQ ID NO: 2516 - protein, 9 aa, synthetic construct
  REGION 1..9: note = Description of Artificial Sequence: Synthetic peptide
NDLCFTNVY

SEQ ID NO: 2517 - protein, 9 aa, synthetic construct
  REGION 1..9: note = Description of Artificial Sequence: Synthetic peptide
NDPFLGVYY

SEQ ID NO: 2518 - protein, 8 aa, synthetic construct
  REGION 1..8: note = Description of Artificial Sequence: Synthetic peptide
NDSKEGFF

SEQ ID NO: 2519 - protein, 10 aa, synthetic construct
  REGION 1..10: note = Description of Artificial Sequence: Synthetic peptide
NDSKEGFFTY

SEQ ID NO: 2520 - protein, 10 aa, synthetic construct
  REGION 1..10: note = Description of Artificial Sequence: Synthetic peptide
NEFACVVADA

SEQ ID NO: 2521 - protein, 8 aa, synthetic construct
  REGION 1..8: note = Description of Artificial Sequence: Synthetic peptide
NEFYAYLR

SEQ ID NO: 2522 - protein, 9 aa, synthetic construct
  REGION 1..9: note = Description of Artificial Sequence: Synthetic peptide
NEKQEILGT

SEQ ID NO: 2523 - protein, 9 aa, synthetic construct
  REGION 1..9: note = Description of Artificial Sequence: Synthetic peptide
NEKTHVQLS

SEQ ID NO: 2524 - protein, 8 aa, synthetic construct
  REGION 1..8: note = Description of Artificial Sequence: Synthetic peptide
NENGTITD

SEQ ID NO: 2525 - protein, 8 aa, synthetic construct
  REGION 1..8: note = Description of Artificial Sequence: Synthetic peptide
NESLIDLQ

SEQ ID NO: 2526 - protein, 8 aa, synthetic construct
  REGION 1..8: note = Description of Artificial Sequence: Synthetic peptide
NETLVTMP

SEQ ID NO: 2527 - protein, 8 aa, synthetic construct
  REGION 1..8: note = Description of Artificial Sequence: Synthetic peptide
NEVAKNLN

SEQ ID NO: 2528 - protein, 8 aa, synthetic construct
  REGION 1..8: note = Description of Artificial Sequence: Synthetic peptide
NEYRLYLD

SEQ ID NO: 2529 - protein, 9 aa, synthetic construct
  REGION 1..9: note = Description of Artificial Sequence: Synthetic peptide
NFGDQELIR

SEQ ID NO: 2530 - protein, 8 aa, synthetic construct
  REGION 1..8: note = Description of Artificial Sequence: Synthetic peptide
NFVRIIMR

SEQ ID NO: 2531 - protein, 10 aa, synthetic construct
  REGION 1..10: note = Description of Artificial Sequence: Synthetic peptide
NFYEPQIITT

SEQ ID NO: 2532 - protein, 9 aa, synthetic construct
  REGION 1..9: note = Description of Artificial Sequence: Synthetic peptide
NGDRWFLNR

SEQ ID NO: 2533 - protein, 9 aa, synthetic construct
  REGION 1..9: note = Description of Artificial Sequence: Synthetic peptide
NGGAYTRYV

SEQ ID NO: 2534 - protein, 8 aa, synthetic construct
  REGION 1..8: note = Description of Artificial Sequence: Synthetic peptide
NGLTGTGV

SEQ ID NO: 2535 - protein, 9 aa, synthetic construct
  REGION 1..9: note = Description of Artificial Sequence: Synthetic peptide
NGMNGRTIL

SEQ ID NO: 2536 - protein, 11 aa, synthetic construct
  REGION 1..11: note = Description of Artificial Sequence: Synthetic peptide
NGNKGAGGHSY

SEQ ID NO: 2537 - protein, 8 aa, synthetic construct
  REGION 1..8: note = Description of Artificial Sequence: Synthetic peptide
NGQVFGLY

SEQ ID NO: 2538 - protein, 8 aa, synthetic construct
  REGION 1..8: note = Description of Artificial Sequence: Synthetic peptide
NGSPSGVY

SEQ ID NO: 2539 - protein, 8 aa, synthetic construct
  REGION 1..8: note = Description of Artificial Sequence: Synthetic peptide
NGYLTSSS

SEQ ID NO: 2540 - protein, 8 aa, synthetic construct
  REGION 1..8: note = Description of Artificial Sequence: Synthetic peptide
NGYTVEEA

SEQ ID NO: 2541 - protein, 9 aa, synthetic construct
  REGION 1..9: note = Description of Artificial Sequence: Synthetic peptide
NHNFLVQAG

SEQ ID NO: 2542 - protein, 8 aa, synthetic construct
  REGION 1..8: note = Description of Artificial Sequence: Synthetic peptide
NHTKKWKY

SEQ ID NO: 2543 - protein, 9 aa, synthetic construct
  REGION 1..9: note = Description of Artificial Sequence: Synthetic peptide
NICYTPSKL

SEQ ID NO: 2544 - protein, 11 aa, synthetic construct
  REGION 1..11: note = Description of Artificial Sequence: Synthetic peptide
NIFGTVYEKLK

SEQ ID NO: 2545 - protein, 9 aa, synthetic construct
  REGION 1..9: note = Description of Artificial Sequence: Synthetic peptide
NIGEQKSIL

SEQ ID NO: 2546 - protein, 8 aa, synthetic construct
  REGION 1..8: note = Description of Artificial Sequence: Synthetic peptide
NIIIWFLL

SEQ ID NO: 2547 - protein, 8 aa, synthetic construct
  REGION 1..8: note = Description of Artificial Sequence: Synthetic peptide
NIIRGWIF

SEQ ID NO: 2548 - protein, 8 aa, synthetic construct
  REGION 1..8: note = Description of Artificial Sequence: Synthetic peptide
NIKFADDL

SEQ ID NO: 2549 - protein, 9 aa, synthetic construct
  REGION 1..9: note = Description of Artificial Sequence: Synthetic peptide
NIKPVPEVK

SEQ ID NO: 2550 - protein, 9 aa, synthetic construct
  REGION 1..9: note = Description of Artificial Sequence: Synthetic peptide
NINLHTQVV

SEQ ID NO: 2551 - protein, 9 aa, synthetic construct
  REGION 1..9: note = Description of Artificial Sequence: Synthetic peptide
NITRFQTLL

SEQ ID NO: 2552 - protein, 8 aa, synthetic construct
  REGION 1..8: note = Description of Artificial Sequence: Synthetic peptide
NIVNVSLV

SEQ ID NO: 2553 - protein, 9 aa, synthetic construct
  REGION 1..9: note = Description of Artificial Sequence: Synthetic peptide
NKDGIIWVA

SEQ ID NO: 2554 - protein, 8 aa, synthetic construct
  REGION 1..8: note = Description of Artificial Sequence: Synthetic peptide
NKFALTCF

SEQ ID NO: 2555 - protein, 8 aa, synthetic construct
  REGION 1..8: note = Description of Artificial Sequence: Synthetic peptide
NKGEDIQL

SEQ ID NO: 2556 - protein, 9 aa, synthetic construct
  REGION 1..9: note = Description of Artificial Sequence: Synthetic peptide
NKHADFDTW

SEQ ID NO: 2557 - protein, 10 aa, synthetic construct
  REGION 1..10: note = Description of Artificial Sequence: Synthetic peptide
NKHIDAYKTF

SEQ ID NO: 2558 - protein, 8 aa, synthetic construct
  REGION 1..8: note = Description of Artificial Sequence: Synthetic peptide
NKKDWYDF

SEQ ID NO: 2559 - protein, 10 aa, synthetic construct
  REGION 1..10: note = Description of Artificial Sequence: Synthetic peptide
NKKFLPFQQF

SEQ ID NO: 2560 - protein, 10 aa, synthetic construct
  REGION 1..10: note = Description of Artificial Sequence: Synthetic peptide
NKWGKARLYY

SEQ ID NO: 2561 - protein, 9 aa, synthetic construct
  REGION 1..9: note = Description of Artificial Sequence: Synthetic peptide
NKYKYFSGA

SEQ ID NO: 2562 - protein, 8 aa, synthetic construct
  REGION 1..8: note = Description of Artificial Sequence: Synthetic peptide
NLAWPLIV

SEQ ID NO: 2563 - protein, 11 aa, synthetic construct
  REGION 1..11: note = Description of Artificial Sequence: Synthetic peptide
NLAWPLIVTAL

SEQ ID NO: 2564 - protein, 9 aa, synthetic construct
  REGION 1..9: note = Description of Artificial Sequence: Synthetic peptide
NLDKSAGFP

SEQ ID NO: 2565 - protein, 8 aa, synthetic construct
  REGION 1..8: note = Description of Artificial Sequence: Synthetic peptide
NLDSCKRV

SEQ ID NO: 2566 - protein, 11 aa, synthetic construct
  REGION 1..11: note = Description of Artificial Sequence: Synthetic peptide
NLDSCKRVLNV

SEQ ID NO: 2567 - protein, 10 aa, synthetic construct
  REGION 1..10: note = Description of Artificial Sequence: Synthetic peptide
NLDYIINLII

SEQ ID NO: 2568 - protein, 10 aa, synthetic construct
  REGION 1..10: note = Description of Artificial Sequence: Synthetic peptide
NLHPDSATLV

SEQ ID NO: 2569 - protein, 8 aa, synthetic construct
  REGION 1..8: note = Description of Artificial Sequence: Synthetic peptide
NLIDSYFV

SEQ ID NO: 2570 - protein, 8 aa, synthetic construct
  REGION 1..8: note = Description of Artificial Sequence: Synthetic peptide
NLKYAISA

SEQ ID NO: 2571 - protein, 9 aa, synthetic construct
  REGION 1..9: note = Description of Artificial Sequence: Synthetic peptide
NLKYAISAK

SEQ ID NO: 2572 - protein, 9 aa, synthetic construct
  REGION 1..9: note = Description of Artificial Sequence: Synthetic peptide
NLLLDKRTT

SEQ ID NO: 2573 - protein, 8 aa, synthetic construct
  REGION 1..8: note = Description of Artificial Sequence: Synthetic peptide
NLPFKLTC

SEQ ID NO: 2574 - protein, 10 aa, synthetic construct
  REGION 1..10: note = Description of Artificial Sequence: Synthetic peptide
NLPGCDGGSL

SEQ ID NO: 2575 - protein, 8 aa, synthetic construct
  REGION 1..8: note = Description of Artificial Sequence: Synthetic peptide
NLPLQLGF

SEQ ID NO: 2576 - protein, 8 aa, synthetic construct
  REGION 1..8: note = Description of Artificial Sequence: Synthetic peptide
NLPTMCDI

SEQ ID NO: 2577 - protein, 11 aa, synthetic construct
  REGION 1..11: note = Description of Artificial Sequence: Synthetic peptide
NLPTMCDIRQL

SEQ ID NO: 2578 - protein, 8 aa, synthetic construct
  REGION 1..8: note = Description of Artificial Sequence: Synthetic peptide
NLREFVFK

SEQ ID NO: 2579 - protein, 10 aa, synthetic construct
  REGION 1..10: note = Description of Artificial Sequence: Synthetic peptide
NLREFVFKNI

SEQ ID NO: 2580 - protein, 8 aa, synthetic construct
  REGION 1..8: note = Description of Artificial Sequence: Synthetic peptide
NLREMLAH

SEQ ID NO: 2581 - protein, 9 aa, synthetic construct
  REGION 1..9: note = Description of Artificial Sequence: Synthetic peptide
NLSKSLTEN

SEQ ID NO: 2582 - protein, 9 aa, synthetic construct
  REGION 1..9: note = Description of Artificial Sequence: Synthetic peptide
NLVAMKYNY

SEQ ID NO: 2583 - protein, 8 aa, synthetic construct
  REGION 1..8: note = Description of Artificial Sequence: Synthetic peptide
NMFITREE

SEQ ID NO: 2584 - protein, 9 aa, synthetic construct
  REGION 1..9: note = Description of Artificial Sequence: Synthetic peptide
NMFTPLIQP

SEQ ID NO: 2585 - protein, 9 aa, synthetic construct
  REGION 1..9: note = Description of Artificial Sequence: Synthetic peptide
NMLRIMASL

SEQ ID NO: 2586 - protein, 9 aa, synthetic construct
  REGION 1..9: note = Description of Artificial Sequence: Synthetic peptide
NNATNKATY

SEQ ID NO: 2587 - protein, 9 aa, synthetic construct
  REGION 1..9: note = Description of Artificial Sequence: Synthetic peptide
NNATNVVIK

SEQ ID NO: 2588 - protein, 11 aa, synthetic construct
  REGION 1..11: note = Description of Artificial Sequence: Synthetic peptide
NNLDSKVGGNY

SEQ ID NO: 2589 - protein, 9 aa, synthetic construct
  REGION 1..9: note = Description of Artificial Sequence: Synthetic peptide
NPDILRVYA

SEQ ID NO: 2590 - protein, 8 aa, synthetic construct
  REGION 1..8: note = Description of Artificial Sequence: Synthetic peptide
NPIQLSSY

SEQ ID NO: 2591 - protein, 11 aa, synthetic construct
  REGION 1..11: note = Description of Artificial Sequence: Synthetic peptide
NPKAIKCVPQA

SEQ ID NO: 2592 - protein, 10 aa, synthetic construct
  REGION 1..10: note = Description of Artificial Sequence: Synthetic peptide
NPKTPKYKFV

SEQ ID NO: 2593 - protein, 9 aa, synthetic construct
  REGION 1..9: note = Description of Artificial Sequence: Synthetic peptide
NPLLYDANY

SEQ ID NO: 2594 - protein, 10 aa, synthetic construct
  REGION 1..10: note = Description of Artificial Sequence: Synthetic peptide
NPLLYDANYF

SEQ ID NO: 2595 - protein, 8 aa, synthetic construct
  REGION 1..8: note = Description of Artificial Sequence: Synthetic peptide
NPTDQSSY

SEQ ID NO: 2596 - protein, 11 aa, synthetic construct
  REGION 1..11: note = Description of Artificial Sequence: Synthetic peptide
NPVLPFNDGVY

SEQ ID NO: 2597 - protein, 12 aa, synthetic construct
  REGION 1..12: note = Description of Artificial Sequence: Synthetic peptide
NPVLPFNDGVYF

SEQ ID NO: 2598 - protein, 8 aa, synthetic construct
  REGION 1..8: note = Description of Artificial Sequence: Synthetic peptide
NPVMEPIY

SEQ ID NO: 2599 - protein, 9 aa, synthetic construct
  REGION 1..9: note = Description of Artificial Sequence: Synthetic peptide
NPVMEPIYD

SEQ ID NO: 2600 - protein, 10 aa, synthetic construct
  REGION 1..10: note = Description of Artificial Sequence: Synthetic peptide
NQFNSAIGKI

SEQ ID NO: 2601 - protein, 10 aa, synthetic construct
  REGION 1..10: note = Description of Artificial Sequence: Synthetic peptide
NQNAQALNTL

SEQ ID NO: 2602 - protein, 8 aa, synthetic construct
  REGION 1..8: note = Description of Artificial Sequence: Synthetic peptide
NQRNAPRI

SEQ ID NO: 2603 - protein, 8 aa, synthetic construct
  REGION 1..8: note = Description of Artificial Sequence: Synthetic peptide
NRARTVAG

SEQ ID NO: 2604 - protein, 9 aa, synthetic construct
  REGION 1..9: note = Description of Artificial Sequence: Synthetic peptide
NRATLQAIA

SEQ ID NO: 2605 - protein, 8 aa, synthetic construct
  REGION 1..8: note = Description of Artificial Sequence: Synthetic peptide
NRATRVEC

SEQ ID NO: 2606 - protein, 9 aa, synthetic construct
  REGION 1..9: note = Description of Artificial Sequence: Synthetic peptide
NRATRVECT

SEQ ID NO: 2607 - protein, 8 aa, synthetic construct
  REGION 1..8: note = Description of Artificial Sequence: Synthetic peptide
NRFLYIIK

SEQ ID NO: 2608 - protein, 11 aa, synthetic construct
  REGION 1..11: note = Description of Artificial Sequence: Synthetic peptide
NRFLYIIKLIF

SEQ ID NO: 2609 - protein, 10 aa, synthetic construct
  REGION 1..10: note = Description of Artificial Sequence: Synthetic peptide
NRFNVAITRA

SEQ ID NO: 2610 - protein, 9 aa, synthetic construct
  REGION 1..9: note = Description of Artificial Sequence: Synthetic peptide
NRFTTTLND

SEQ ID NO: 2611 - protein, 8 aa, synthetic construct
  REGION 1..8: note = Description of Artificial Sequence: Synthetic peptide
NRNRFLYI

SEQ ID NO: 2612 - protein, 10 aa, synthetic construct
  REGION 1..10: note = Description of Artificial Sequence: Synthetic peptide
NRNRFLYIIK

SEQ ID NO: 2613 - protein, 11 aa, synthetic construct
  REGION 1..11: note = Description of Artificial Sequence: Synthetic peptide
NRNRFLYIIKL

SEQ ID NO: 2614 - protein, 8 aa, synthetic construct
  REGION 1..8: note = Description of Artificial Sequence: Synthetic peptide
NRNYVFTG

SEQ ID NO: 2615 - protein, 11 aa, synthetic construct
  REGION 1..11: note = Description of Artificial Sequence: Synthetic peptide
NRPQIGVVREF

SEQ ID NO: 2616 - protein, 10 aa, synthetic construct
  REGION 1..10: note = Description of Artificial Sequence: Synthetic peptide
NRQFHQKLLK

SEQ ID NO: 2617 - protein, 10 aa, synthetic construct
  REGION 1..10: note = Description of Artificial Sequence: Synthetic peptide
NRVCGVSAAR

SEQ ID NO: 2618 - protein, 10 aa, synthetic construct
  REGION 1..10: note = Description of Artificial Sequence: Synthetic peptide
NRVCTNYMPY

SEQ ID NO: 2619 - protein, 8 aa, synthetic construct
  REGION 1..8: note = Description of Artificial Sequence: Synthetic peptide
NRVVISSD

SEQ ID NO: 2620 - protein, 10 aa, synthetic construct
  REGION 1..10: note = Description of Artificial Sequence: Synthetic peptide
NRVVISSDVL

SEQ ID NO: 2621 - protein, 11 aa, synthetic construct
  REGION 1..11: note = Description of Artificial Sequence: Synthetic peptide
NRYFRLTLGVY

SEQ ID NO: 2622 - protein, 8 aa, synthetic construct
  REGION 1..8: note = Description of Artificial Sequence: Synthetic peptide
NRYLALYN

SEQ ID NO: 2623 - protein, 10 aa, synthetic construct
  REGION 1..10: note = Description of Artificial Sequence: Synthetic peptide
NRYLALYNKY

SEQ ID NO: 2624 - protein, 10 aa, synthetic construct
  REGION 1..10: note = Description of Artificial Sequence: Synthetic peptide
NSEVGPEHSL

SEQ ID NO: 2625 - protein, 11 aa, synthetic construct
  REGION 1..11: note = Description of Artificial Sequence: Synthetic peptide
NSHEGKTFYVL

SEQ ID NO: 2626 - protein, 8 aa, synthetic construct
  REGION 1..8: note = Description of Artificial Sequence: Synthetic peptide
NSIAIPTN

SEQ ID NO: 2627 - protein, 10 aa, synthetic construct
  REGION 1..10: note = Description of Artificial Sequence: Synthetic peptide
NSIIKTIQPR

SEQ ID NO: 2628 - protein, 10 aa, synthetic construct
  REGION 1..10: note = Description of Artificial Sequence: Synthetic peptide
NSIVCRFDTR

SEQ ID NO: 2629 - protein, 9 aa, synthetic construct
  REGION 1..9: note = Description of Artificial Sequence: Synthetic peptide
NSNNLDSKV

SEQ ID NO: 2630 - protein, 9 aa, synthetic construct
  REGION 1..9: note = Description of Artificial Sequence: Synthetic peptide
NSPFHPLAD

SEQ ID NO: 2631 - protein, 9 aa, synthetic construct
  REGION 1..9: note = Description of Artificial Sequence: Synthetic peptide
NSQGLLPPK

SEQ ID NO: 2632 - protein, 10 aa, synthetic construct
  REGION 1..10: note = Description of Artificial Sequence: Synthetic peptide
NSVLLFLAFV

SEQ ID NO: 2633 - protein, 8 aa, synthetic construct
  REGION 1..8: note = Description of Artificial Sequence: Synthetic peptide
NSVRVLQK

SEQ ID NO: 2634 - protein, 8 aa, synthetic construct
  REGION 1..8: note = Description of Artificial Sequence: Synthetic peptide
NSVTSSIV

SEQ ID NO: 2635 - protein, 9 aa, synthetic construct
  REGION 1..9: note = Description of Artificial Sequence: Synthetic peptide
NSVTSSIVI

SEQ ID NO: 2636 - protein, 9 aa, synthetic construct
  REGION 1..9: note = Description of Artificial Sequence: Synthetic peptide
NSWLMWLII

SEQ ID NO: 2637 - protein, 10 aa, synthetic construct
  REGION 1..10: note = Description of Artificial Sequence: Synthetic peptide
NTCTERLKLF

SEQ ID NO: 2638 - protein, 8 aa, synthetic construct
  REGION 1..8: note = Description of Artificial Sequence: Synthetic peptide
NTDHSSSS

SEQ ID NO: 2639 - protein, 10 aa, synthetic construct
  REGION 1..10: note = Description of Artificial Sequence: Synthetic peptide
NTKGSLPINV

SEQ ID NO: 2640 - protein, 10 aa, synthetic construct
  REGION 1..10: note = Description of Artificial Sequence: Synthetic peptide
NTLNDLNETL

SEQ ID NO: 2641 - protein, 8 aa, synthetic construct
  REGION 1..8: note = Description of Artificial Sequence: Synthetic peptide
NTSNQVAV

SEQ ID NO: 2642 - protein, 10 aa, synthetic construct
  REGION 1..10: note = Description of Artificial Sequence: Synthetic peptide
NTSRYWEPEF

SEQ ID NO: 2643 - protein, 11 aa, synthetic construct
  REGION 1..11: note = Description of Artificial Sequence: Synthetic peptide
NTSRYWEPEFY

SEQ ID NO: 2644 - protein, 8 aa, synthetic construct
  REGION 1..8: note = Description of Artificial Sequence: Synthetic peptide
NTTKGGRF

SEQ ID NO: 2645 - protein, 9 aa, synthetic construct
  REGION 1..9: note = Description of Artificial Sequence: Synthetic peptide
NTTKGGRFV

SEQ ID NO: 2646 - protein, 10 aa, synthetic construct
  REGION 1..10: note = Description of Artificial Sequence: Synthetic peptide
NTTKGGRFVL

SEQ ID NO: 2647 - protein, 9 aa, synthetic construct
  REGION 1..9: note = Description of Artificial Sequence: Synthetic peptide
NTVCTVCGM

SEQ ID NO: 2648 - protein, 8 aa, synthetic construct
  REGION 1..8: note = Description of Artificial Sequence: Synthetic peptide
NTVKSVGK

SEQ ID NO: 2649 - protein, 10 aa, synthetic construct
  REGION 1..10: note = Description of Artificial Sequence: Synthetic peptide
NTYLEGSVRV

SEQ ID NO: 2650 - protein, 10 aa, synthetic construct
  REGION 1..10: note = Description of Artificial Sequence: Synthetic peptide
NVAFELWAKR

SEQ ID NO: 2651 - protein, 8 aa, synthetic construct
  REGION 1..8: note = Description of Artificial Sequence: Synthetic peptide
NVAFQTVK

SEQ ID NO: 2652 - protein, 9 aa, synthetic construct
  REGION 1..9: note = Description of Artificial Sequence: Synthetic peptide
NVAFQTVKP

SEQ ID NO: 2653 - protein, 9 aa, synthetic construct
  REGION 1..9: note = Description of Artificial Sequence: Synthetic peptide
NVAITRAKV

SEQ ID NO: 2654 - protein, 11 aa, synthetic construct
  REGION 1..11: note = Description of Artificial Sequence: Synthetic peptide
NVAKYTQLCQY

SEQ ID NO: 2655 - protein, 10 aa, synthetic construct
  REGION 1..10: note = Description of Artificial Sequence: Synthetic peptide
NVATLQAENV

SEQ ID NO: 2656 - protein, 10 aa, synthetic construct
  REGION 1..10: note = Description of Artificial Sequence: Synthetic peptide
NVDRYPANSI

SEQ ID NO: 2657 - protein, 9 aa, synthetic construct
  REGION 1..9: note = Description of Artificial Sequence: Synthetic peptide
NVGDYFVLT

SEQ ID NO: 2658 - protein, 11 aa, synthetic construct
  REGION 1..11: note = Description of Artificial Sequence: Synthetic peptide
NVIPTITQMNL

SEQ ID NO: 2659 - protein, 10 aa, synthetic construct
  REGION 1..10: note = Description of Artificial Sequence: Synthetic peptide
NVIVFDGKSK

SEQ ID NO: 2660 - protein, 8 aa, synthetic construct
  REGION 1..8: note = Description of Artificial Sequence: Synthetic peptide
NVKTTEVV

SEQ ID NO: 2661 - protein, 9 aa, synthetic construct
  REGION 1..9: note = Description of Artificial Sequence: Synthetic peptide
NVLAWLYAA

SEQ ID NO: 2662 - protein, 8 aa, synthetic construct
  REGION 1..8: note = Description of Artificial Sequence: Synthetic peptide
NVLEGSVA

SEQ ID NO: 2663 - protein, 11 aa, synthetic construct
  REGION 1..11: note = Description of Artificial Sequence: Synthetic peptide
NVLSTFISAAR

SEQ ID NO: 2664 - protein, 11 aa, synthetic construct
  REGION 1..11: note = Description of Artificial Sequence: Synthetic peptide
NVLTLVYKVYY

SEQ ID NO: 2665 - protein, 11 aa, synthetic construct
  REGION 1..11: note = Description of Artificial Sequence: Synthetic peptide
NVPLHGTILTR

SEQ ID NO: 2666 - protein, 8 aa, synthetic construct
  REGION 1..8: note = Description of Artificial Sequence: Synthetic peptide
NVTDFNAI

SEQ ID NO: 2667 - protein, 9 aa, synthetic construct
  REGION 1..9: note = Description of Artificial Sequence: Synthetic peptide
NVTDFNAIA

SEQ ID NO: 2668 - protein, 10 aa, synthetic construct
  REGION 1..10: note = Description of Artificial Sequence: Synthetic peptide
NVTWFHAIHV

SEQ ID NO: 2669 - protein, 9 aa, synthetic construct
  REGION 1..9: note = Description of Artificial Sequence: Synthetic peptide
NVVNKGHFD

SEQ ID NO: 2670 - protein, 9 aa, synthetic construct
  REGION 1..9: note = Description of Artificial Sequence: Synthetic peptide
NVVRIKIVQ

SEQ ID NO: 2671 - protein, 9 aa, synthetic construct
  REGION 1..9: note = Description of Artificial Sequence: Synthetic peptide
NVYIKNADI

SEQ ID NO: 2672 - protein, 10 aa, synthetic construct
  REGION 1..10: note = Description of Artificial Sequence: Synthetic peptide
NVYLKHGGGV

SEQ ID NO: 2673 - protein, 11 aa, synthetic construct
  REGION 1..11: note = Description of Artificial Sequence: Synthetic peptide
NWITGGIAIAM

SEQ ID NO: 2674 - protein, 10 aa, synthetic construct
  REGION 1..10: note = Description of Artificial Sequence: Synthetic peptide
NWNCVNCDTF

SEQ ID NO: 2675 - protein, 8 aa, synthetic construct
  REGION 1..8: note = Description of Artificial Sequence: Synthetic peptide
NYDLSVVN

SEQ ID NO: 2676 - protein, 9 aa, synthetic construct
  REGION 1..9: note = Description of Artificial Sequence: Synthetic peptide
NYDLSVVNA

SEQ ID NO: 2677 - protein, 10 aa, synthetic construct
  REGION 1..10: note = Description of Artificial Sequence: Synthetic peptide
NYDLSVVNAR

SEQ ID NO: 2678 - protein, 11 aa, synthetic construct
  REGION 1..11: note = Description of Artificial Sequence: Synthetic peptide
NYDLSVVNARL

SEQ ID NO: 2679 - protein, 8 aa, synthetic construct
  REGION 1..8: note = Description of Artificial Sequence: Synthetic peptide
NYEDLLIR

SEQ ID NO: 2680 - protein, 8 aa, synthetic construct
  REGION 1..8: note = Description of Artificial Sequence: Synthetic peptide
NYITTYPG

SEQ ID NO: 2681 - protein, 8 aa, synthetic construct
  REGION 1..8: note = Description of Artificial Sequence: Synthetic peptide
NYLYRLFR

SEQ ID NO: 2682 - protein, 9 aa, synthetic construct
  REGION 1..9: note = Description of Artificial Sequence: Synthetic peptide
NYMLTYNKV

SEQ ID NO: 2683 - protein, 9 aa, synthetic construct
  REGION 1..9: note = Description of Artificial Sequence: Synthetic peptide
NYQCGHYKH

SEQ ID NO: 2684 - protein, 10 aa, synthetic construct
  REGION 1..10: note = Description of Artificial Sequence: Synthetic peptide
NYQVNGYPNM

SEQ ID NO: 2685 - protein, 8 aa, synthetic construct
  REGION 1..8: note = Description of Artificial Sequence: Synthetic peptide
NYVFTGYR

SEQ ID NO: 2686 - protein, 9 aa, synthetic construct
  REGION 1..9: note = Description of Artificial Sequence: Synthetic peptide
NYVFTGYRV

SEQ ID NO: 2687 - protein, 9 aa, synthetic construct
  REGION 1..9: note = Description of Artificial Sequence: Synthetic peptide
NYYKKVDGV

SEQ ID NO: 2688 - protein, 8 aa, synthetic construct
  REGION 1..8: note = Description of Artificial Sequence: Synthetic peptide
PANSIVCR

SEQ ID NO: 2689 - protein, 10 aa, synthetic construct
  REGION 1..10: note = Description of Artificial Sequence: Synthetic peptide
PAQLPAPRTL

SEQ ID NO: 2690 - protein, 9 aa, synthetic construct
  REGION 1..9: note = Description of Artificial Sequence: Synthetic peptide
PARARVECF

SEQ ID NO: 2691 - protein, 9 aa, synthetic construct
  REGION 1..9: note = Description of Artificial Sequence: Synthetic peptide
PAVAKHDFF

SEQ ID NO: 2692 - protein, 8 aa, synthetic construct
  REGION 1..8: note = Description of Artificial Sequence: Synthetic peptide
PCIKVATV

SEQ ID NO: 2693 - protein, 9 aa, synthetic construct
  REGION 1..9: note = Description of Artificial Sequence: Synthetic peptide
PCSDKAYKI

SEQ ID NO: 2694 - protein, 8 aa, synthetic construct
  REGION 1..8: note = Description of Artificial Sequence: Synthetic peptide
PDGVKHVY

SEQ ID NO: 2695 - protein, 9 aa, synthetic construct
  REGION 1..9: note = Description of Artificial Sequence: Synthetic peptide
PDILRVYAN

SEQ ID NO: 2696 - protein, 10 aa, synthetic construct
  REGION 1..10: note = Description of Artificial Sequence: Synthetic peptide
PEEEQEEDWL

SEQ ID NO: 2697 - protein, 10 aa, synthetic construct
  REGION 1..10: note = Description of Artificial Sequence: Synthetic peptide
PEEHVQIHTI

SEQ ID NO: 2698 - protein, 8 aa, synthetic construct
  REGION 1..8: note = Description of Artificial Sequence: Synthetic peptide
PEFYEAMY

SEQ ID NO: 2699 - protein, 8 aa, synthetic construct
  REGION 1..8: note = Description of Artificial Sequence: Synthetic peptide
PEHSLAEY

SEQ ID NO: 2700 - protein, 10 aa, synthetic construct
  REGION 1..10: note = Description of Artificial Sequence: Synthetic peptide
PEYFNSVCRL

SEQ ID NO: 2701 - protein, 9 aa, synthetic construct
  REGION 1..9: note = Description of Artificial Sequence: Synthetic peptide
PFAMQMAYR

SEQ ID NO: 2702 - protein, 10 aa, synthetic construct
  REGION 1..10: note = Description of Artificial Sequence: Synthetic peptide
PFAMQMAYRF

SEQ ID NO: 2703 - protein, 8 aa, synthetic construct
  REGION 1..8: note = Description of Artificial Sequence: Synthetic peptide
PFDVVRQC

SEQ ID NO: 2704 - protein, 8 aa, synthetic construct
  REGION 1..8: note = Description of Artificial Sequence: Synthetic peptide
PFELEDFI

SEQ ID NO: 2705 - protein, 8 aa, synthetic construct
  REGION 1..8: note = Description of Artificial Sequence: Synthetic peptide
PFFSNVTW

SEQ ID NO: 2706 - protein, 9 aa, synthetic construct
  REGION 1..9: note = Description of Artificial Sequence: Synthetic peptide
PFLGVYYHK

SEQ ID NO: 2707 - protein, 9 aa, synthetic construct
  REGION 1..9: note = Description of Artificial Sequence: Synthetic peptide
PFLNKVVST

SEQ ID NO: 2708 - protein, 10 aa, synthetic construct
  REGION 1..10: note = Description of Artificial Sequence: Synthetic peptide
PFLYLYALVY

SEQ ID NO: 2709 - protein, 11 aa, synthetic construct
  REGION 1..11: note = Description of Artificial Sequence: Synthetic peptide
PFMIDVQQWGF

SEQ ID NO: 2710 - protein, 10 aa, synthetic construct
  REGION 1..10: note = Description of Artificial Sequence: Synthetic peptide
PFNKWGKARL

SEQ ID NO: 2711 - protein, 11 aa, synthetic construct
  REGION 1..11: note = Description of Artificial Sequence: Synthetic peptide
PFNKWGKARLY

SEQ ID NO: 2712 - protein, 9 aa, synthetic construct
  REGION 1..9: note = Description of Artificial Sequence: Synthetic peptide
PFWITIAYI

SEQ ID NO: 2713 - protein, 10 aa, synthetic construct
  REGION 1..10: note = Description of Artificial Sequence: Synthetic peptide
PGQTGKIADY

SEQ ID NO: 2714 - protein, 9 aa, synthetic construct
  REGION 1..9: note = Description of Artificial Sequence: Synthetic peptide
PGSGVPVVD

SEQ ID NO: 2715 - protein, 10 aa, synthetic construct
  REGION 1..10: note = Description of Artificial Sequence: Synthetic peptide
PHNSHEGKTF

SEQ ID NO: 2716 - protein, 9 aa, synthetic construct
  REGION 1..9: note = Description of Artificial Sequence: Synthetic peptide
PHVGEIPVA

SEQ ID NO: 2717 - protein, 8 aa, synthetic construct
  REGION 1..8: note = Description of Artificial Sequence: Synthetic peptide
PIDKCSRI

SEQ ID NO: 2718 - protein, 10 aa, synthetic construct
  REGION 1..10: note = Description of Artificial Sequence: Synthetic peptide
PIDLVPNQPY

SEQ ID NO: 2719 - protein, 8 aa, synthetic construct
  REGION 1..8: note = Description of Artificial Sequence: Synthetic peptide
PIFLIVAA

SEQ ID NO: 2720 - protein, 9 aa, synthetic construct
  REGION 1..9: note = Description of Artificial Sequence: Synthetic peptide
PIHFYSKWY

SEQ ID NO: 2721 - protein, 9 aa, synthetic construct
  REGION 1..9: note = Description of Artificial Sequence: Synthetic peptide
PIIGDELKI

SEQ ID NO: 2722 - protein, 9 aa, synthetic construct
  REGION 1..9: note = Description of Artificial Sequence: Synthetic peptide
PILLLDQAL

SEQ ID NO: 2723 - protein, 9 aa, synthetic construct
  REGION 1..9: note = Description of Artificial Sequence: Synthetic peptide
PILTLTRAL

SEQ ID NO: 2724 - protein, 10 aa, synthetic construct
  REGION 1..10: note = Description of Artificial Sequence: Synthetic peptide
PIQYIDIGNY

SEQ ID NO: 2725 - protein, 9 aa, synthetic construct
  REGION 1..9: note = Description of Artificial Sequence: Synthetic peptide
PISAMVRMY

SEQ ID NO: 2726 - protein, 9 aa, synthetic construct
  REGION 1..9: note = Description of Artificial Sequence: Synthetic peptide
PKGPKVKYL

SEQ ID NO: 2727 - protein, 9 aa, synthetic construct
  REGION 1..9: note = Description of Artificial Sequence: Synthetic peptide
PKLGSLVVR

SEQ ID NO: 2728 - protein, 10 aa, synthetic construct
  REGION 1..10: note = Description of Artificial Sequence: Synthetic peptide
PKSDGTGTIY

SEQ ID NO: 2729 - protein, 8 aa, synthetic construct
  REGION 1..8: note = Description of Artificial Sequence: Synthetic peptide
PLIVTALR

SEQ ID NO: 2730 - protein, 9 aa, synthetic construct
  REGION 1..9: note = Description of Artificial Sequence: Synthetic peptide
PLKLRGTAV

SEQ ID NO: 2731 - protein, 10 aa, synthetic construct
  REGION 1..10: note = Description of Artificial Sequence: Synthetic peptide
PLKSATCITR

SEQ ID NO: 2732 - protein, 8 aa, synthetic construct
  REGION 1..8: note = Description of Artificial Sequence: Synthetic peptide
PLLESELV

SEQ ID NO: 2733 - protein, 9 aa, synthetic construct
  REGION 1..9: note = Description of Artificial Sequence: Synthetic peptide
PLLYDANYF

SEQ ID NO: 2734 - protein, 9 aa, synthetic construct
  REGION 1..9: note = Description of Artificial Sequence: Synthetic peptide
PLSETKCTL

SEQ ID NO: 2735 - protein, 9 aa, synthetic construct
  REGION 1..9: note = Description of Artificial Sequence: Synthetic peptide
PLYAFASEA

SEQ ID NO: 2736 - protein, 8 aa, synthetic construct
  REGION 1..8: note = Description of Artificial Sequence: Synthetic peptide
PMEKLKTL

SEQ ID NO: 2737 - protein, 9 aa, synthetic construct
  REGION 1..9: note = Description of Artificial Sequence: Synthetic peptide
PNFKDQVIL

SEQ ID NO: 2738 - protein, 9 aa, synthetic construct
  REGION 1..9: note = Description of Artificial Sequence: Synthetic peptide
PNLAWPLIV

SEQ ID NO: 2739 - protein, 9 aa, synthetic construct
  REGION 1..9: note = Description of Artificial Sequence: Synthetic peptide
PNYEDLLIR

SEQ ID NO: 2740 - protein, 9 aa, synthetic construct
  REGION 1..9: note = Description of Artificial Sequence: Synthetic peptide
PPGDQFKHL

SEQ ID NO: 2741 - protein, 8 aa, synthetic construct
  REGION 1..8: note = Description of Artificial Sequence: Synthetic peptide
PPKNSIDA

SEQ ID NO: 2742 - protein, 8 aa, synthetic construct
  REGION 1..8: note = Description of Artificial Sequence: Synthetic peptide
PPLNRNYV

SEQ ID NO: 2743 - protein, 9 aa, synthetic construct
  REGION 1..9: note = Description of Artificial Sequence: Synthetic peptide
PPLNRNYVF

SEQ ID NO: 2744 - protein, 10 aa, synthetic construct
  REGION 1..10: note = Description of Artificial Sequence: Synthetic peptide
PQADVEWKFY

SEQ ID NO: 2745 - protein, 10 aa, synthetic construct
  REGION 1..10: note = Description of Artificial Sequence: Synthetic peptide
PQIITTDNTF

SEQ ID NO: 2746 - protein, 8 aa, synthetic construct
  REGION 1..8: note = Description of Artificial Sequence: Synthetic peptide
PQLEQPYV

SEQ ID NO: 2747 - protein, 9 aa, synthetic construct
  REGION 1..9: note = Description of Artificial Sequence: Synthetic peptide
PQNQRNAPR

SEQ ID NO: 2748 - protein, 9 aa, synthetic construct
  REGION 1..9: note = Description of Artificial Sequence: Synthetic peptide
PQTLEILDI

SEQ ID NO: 2749 - protein, 9 aa, synthetic construct
  REGION 1..9: note = Description of Artificial Sequence: Synthetic peptide
PQTSITSAV

SEQ ID NO: 2750 - protein, 10 aa, synthetic construct
  REGION 1..10: note = Description of Artificial Sequence: Synthetic peptide
PQTSITSAVL

SEQ ID NO: 2751 - protein, 9 aa, synthetic construct
  REGION 1..9: note = Description of Artificial Sequence: Synthetic peptide
PQVNGLTSI

SEQ ID NO: 2752 - protein, 8 aa, synthetic construct
  REGION 1..8: note = Description of Artificial Sequence: Synthetic peptide
PREGVFVS

SEQ ID NO: 2753 - protein, 10 aa, synthetic construct
  REGION 1..10: note = Description of Artificial Sequence: Synthetic peptide
PRPPLNRNYV

SEQ ID NO: 2754 - protein, 8 aa, synthetic construct
  REGION 1..8: note = Description of Artificial Sequence: Synthetic peptide
PRVEKKKL

SEQ ID NO: 2755 - protein, 9 aa, synthetic construct
  REGION 1..9: note = Description of Artificial Sequence: Synthetic peptide
PSDSTGSNQ

SEQ ID NO: 2756 - protein, 9 aa, synthetic construct
  REGION 1..9: note = Description of Artificial Sequence: Synthetic peptide
PSFKKGAKL

SEQ ID NO: 2757 - protein, 8 aa, synthetic construct
  REGION 1..8: note = Description of Artificial Sequence: Synthetic peptide
PSFLGRYM

SEQ ID NO: 2758 - protein, 10 aa, synthetic construct
  REGION 1..10: note = Description of Artificial Sequence: Synthetic peptide
PSFYVYSRVK

SEQ ID NO: 2759 - protein, 9 aa, synthetic construct
  REGION 1..9: note = Description of Artificial Sequence: Synthetic peptide
PSLATVAYF

SEQ ID NO: 2760 - protein, 8 aa, synthetic construct
  REGION 1..8: note = Description of Artificial Sequence: Synthetic peptide
PSLETIQI

SEQ ID NO: 2761 - protein, 8 aa, synthetic construct
  REGION 1..8: note = Description of Artificial Sequence: Synthetic peptide
PSVEQRKQ

SEQ ID NO: 2762 - protein, 9 aa, synthetic construct
  REGION 1..9: note = Description of Artificial Sequence: Synthetic peptide
PSYAAFATA

SEQ ID NO: 2763 - protein, 8 aa, synthetic construct
  REGION 1..8: note = Description of Artificial Sequence: Synthetic peptide
PTDQSSYI

SEQ ID NO: 2764 - protein, 9 aa, synthetic construct
  REGION 1..9: note = Description of Artificial Sequence: Synthetic peptide
PTITQMNLK

SEQ ID NO: 2765 - protein, 10 aa, synthetic construct
  REGION 1..10: note = Description of Artificial Sequence: Synthetic peptide
PTNGVGYQPY

SEQ ID NO: 2766 - protein, 10 aa, synthetic construct
  REGION 1..10: note = Description of Artificial Sequence: Synthetic peptide
PVLKGVKLHY

SEQ ID NO: 2767 - protein, 10 aa, synthetic construct
  REGION 1..10: note = Description of Artificial Sequence: Synthetic peptide
PVLPFNDGVY

SEQ ID NO: 2768 - protein, 11 aa, synthetic construct
  REGION 1..11: note = Description of Artificial Sequence: Synthetic peptide
PVLPFNDGVYF

SEQ ID NO: 2769 - protein, 9 aa, synthetic construct
  REGION 1..9: note = Description of Artificial Sequence: Synthetic peptide
PVPEVKILN

SEQ ID NO: 2770 - protein, 11 aa, synthetic construct
  REGION 1..11: note = Description of Artificial Sequence: Synthetic peptide
PVPEVKILNNL

SEQ ID NO: 2771 - protein, 9 aa, synthetic construct
  REGION 1..9: note = Description of Artificial Sequence: Synthetic peptide
PVSIINNTV

SEQ ID NO: 2772 - protein, 9 aa, synthetic construct
  REGION 1..9: note = Description of Artificial Sequence: Synthetic peptide
PYFFTLLLQ

SEQ ID NO: 2773 - protein, 9 aa, synthetic construct
  REGION 1..9: note = Description of Artificial Sequence: Synthetic peptide
PYGANKDGI

SEQ ID NO: 2774 - protein, 8 aa, synthetic construct
  REGION 1..8: note = Description of Artificial Sequence: Synthetic peptide
PYIKWDLL

SEQ ID NO: 2775 - protein, 11 aa, synthetic construct
  REGION 1..11: note = Description of Artificial Sequence: Synthetic peptide
PYNSVTSSIVI

SEQ ID NO: 2776 - protein, 10 aa, synthetic construct
  REGION 1..10: note = Description of Artificial Sequence: Synthetic peptide
PYPDPSRILG

SEQ ID NO: 2777 - protein, 9 aa, synthetic construct
  REGION 1..9: note = Description of Artificial Sequence: Synthetic peptide
PYPNASFDN

SEQ ID NO: 2778 - protein, 9 aa, synthetic construct
  REGION 1..9: note = Description of Artificial Sequence: Synthetic peptide
PYVFIKRSD

SEQ ID NO: 2779 - protein, 12 aa, synthetic construct
  REGION 1..12: note = Description of Artificial Sequence: Synthetic peptide
PYVVDDPCPIHF

SEQ ID NO: 2780 - protein, 8 aa, synthetic construct
  REGION 1..8: note = Description of Artificial Sequence: Synthetic peptide
QAENVTGL

SEQ ID NO: 2781 - protein, 8 aa, synthetic construct
  REGION 1..8: note = Description of Artificial Sequence: Synthetic peptide
QAGNATEV

SEQ ID NO: 2782 - protein, 10 aa, synthetic construct
  REGION 1..10: note = Description of Artificial Sequence: Synthetic peptide
QAGNVQLRVI

SEQ ID NO: 2783 - protein, 9 aa, synthetic construct
  REGION 1..9: note = Description of Artificial Sequence: Synthetic peptide
QAISMWALI

SEQ ID NO: 2784 - protein, 10 aa, synthetic construct
  REGION 1..10: note = Description of Artificial Sequence: Synthetic peptide
QAISMWALII

SEQ ID NO: 2785 - protein, 8 aa, synthetic construct
  REGION 1..8: note = Description of Artificial Sequence: Synthetic peptide
QALPQRQK

SEQ ID NO: 2786 - protein, 9 aa, synthetic construct
  REGION 1..9: note = Description of Artificial Sequence: Synthetic peptide
QALPQRQKK

SEQ ID NO: 2787 - protein, 9 aa, synthetic construct
  REGION 1..9: note = Description of Artificial Sequence: Synthetic peptide
QAPTHLSVD

SEQ ID NO: 2788 - protein, 9 aa, synthetic construct
  REGION 1..9: note = Description of Artificial Sequence: Synthetic peptide
QCIMLVYCF

SEQ ID NO: 2789 - protein, 9 aa, synthetic construct
  REGION 1..9: note = Description of Artificial Sequence: Synthetic peptide
QDDKKIKAC

SEQ ID NO: 2790 - protein, 8 aa, synthetic construct
  REGION 1..8: note = Description of Artificial Sequence: Synthetic peptide
QDKNTQEV

SEQ ID NO: 2791 - protein, 8 aa, synthetic construct
  REGION 1..8: note = Description of Artificial Sequence: Synthetic peptide
QDLFLPFF

SEQ ID NO: 2792 - protein, 8 aa, synthetic construct
  REGION 1..8: note = Description of Artificial Sequence: Synthetic peptide
QDLKWARF

SEQ ID NO: 2793 - protein, 9 aa, synthetic construct
  REGION 1..9: note = Description of Artificial Sequence: Synthetic peptide
QDLSVVSKV

SEQ ID NO: 2794 - protein, 12 aa, synthetic construct
  REGION 1..12: note = Description of Artificial Sequence: Synthetic peptide
QEGVVDYGARFY

SEQ ID NO: 2795 - protein, 8 aa, synthetic construct
  REGION 1..8: note = Description of Artificial Sequence: Synthetic peptide
QEHYVRIT

SEQ ID NO: 2796 - protein, 8 aa, synthetic construct
  REGION 1..8: note = Description of Artificial Sequence: Synthetic peptide
QEILGTVS

SEQ ID NO: 2797 - protein, 9 aa, synthetic construct
  REGION 1..9: note = Description of Artificial Sequence: Synthetic peptide
QEKDEDDNL

SEQ ID NO: 2798 - protein, 10 aa, synthetic construct
  REGION 1..10: note = Description of Artificial Sequence: Synthetic peptide
QEKDEDDNLI

SEQ ID NO: 2799 - protein, 10 aa, synthetic construct
  REGION 1..10: note = Description of Artificial Sequence: Synthetic peptide
QEKNFTTAPA

SEQ ID NO: 2800 - protein, 8 aa, synthetic construct
  REGION 1..8: note = Description of Artificial Sequence: Synthetic peptide
QENWNTKH

SEQ ID NO: 2801 - protein, 9 aa, synthetic construct
  REGION 1..9: note = Description of Artificial Sequence: Synthetic peptide
QENWNTKHS

SEQ ID NO: 2802 - protein, 9 aa, synthetic construct
  REGION 1..9: note = Description of Artificial Sequence: Synthetic peptide
QESPFVMMS

SEQ ID NO: 2803 - protein, 8 aa, synthetic construct
  REGION 1..8: note = Description of Artificial Sequence: Synthetic peptide
QEVFAQVK

SEQ ID NO: 2804 - protein, 10 aa, synthetic construct
  REGION 1..10: note = Description of Artificial Sequence: Synthetic peptide
QFAYANRNRF

SEQ ID NO: 2805 - protein, 8 aa, synthetic construct
  REGION 1..8: note = Description of Artificial Sequence: Synthetic peptide
QFCNDPFL

SEQ ID NO: 2806 - protein, 8 aa, synthetic construct
  REGION 1..8: note = Description of Artificial Sequence: Synthetic peptide
QFDTYNLW

SEQ ID NO: 2807 - protein, 10 aa, synthetic construct
  REGION 1..10: note = Description of Artificial Sequence: Synthetic peptide
QFKHLIPLMY

SEQ ID NO: 2808 - protein, 8 aa, synthetic construct
  REGION 1..8: note = Description of Artificial Sequence: Synthetic peptide
QFKKGVQI

SEQ ID NO: 2809 - protein, 8 aa, synthetic construct
  REGION 1..8: note = Description of Artificial Sequence: Synthetic peptide
QFNYYKKV

SEQ ID NO: 2810 - protein, 9 aa, synthetic construct
  REGION 1..9: note = Description of Artificial Sequence: Synthetic peptide
QFTSLEIPR

SEQ ID NO: 2811 - protein, 8 aa, synthetic construct
  REGION 1..8: note = Description of Artificial Sequence: Synthetic peptide
QGLNGYTV

SEQ ID NO: 2812 - protein, 10 aa, synthetic construct
  REGION 1..10: note = Description of Artificial Sequence: Synthetic peptide
QGLPNNTASW

SEQ ID NO: 2813 - protein, 9 aa, synthetic construct
  REGION 1..9: note = Description of Artificial Sequence: Synthetic peptide
QGNFGDQEL

SEQ ID NO: 2814 - protein, 10 aa, synthetic construct
  REGION 1..10: note = Description of Artificial Sequence: Synthetic peptide
QGTTLPKGFY

SEQ ID NO: 2815 - protein, 8 aa, synthetic construct
  REGION 1..8: note = Description of Artificial Sequence: Synthetic peptide
QGYKSVNI

SEQ ID NO: 2816 - protein, 9 aa, synthetic construct
  REGION 1..9: note = Description of Artificial Sequence: Synthetic peptide
QHGKEDLKF

SEQ ID NO: 2817 - protein, 10 aa, synthetic construct
  REGION 1..10: note = Description of Artificial Sequence: Synthetic peptide
QHLKDGTCGL

SEQ ID NO: 2818 - protein, 8 aa, synthetic construct
  REGION 1..8: note = Description of Artificial Sequence: Synthetic peptide
QHMVVKAA

SEQ ID NO: 2819 - protein, 8 aa, synthetic construct
  REGION 1..8: note = Description of Artificial Sequence: Synthetic peptide
QHQPYVVD

SEQ ID NO: 2820 - protein, 9 aa, synthetic construct
  REGION 1..9: note = Description of Artificial Sequence: Synthetic peptide
QHQPYVVDD

SEQ ID NO: 2821 - protein, 9 aa, synthetic construct
  REGION 1..9: note = Description of Artificial Sequence: Synthetic peptide
QIAQFAPSA

SEQ ID NO: 2822 - protein, 10 aa, synthetic construct
  REGION 1..10: note = Description of Artificial Sequence: Synthetic peptide
QIGYYRRATR

SEQ ID NO: 2823 - protein, 8 aa, synthetic construct
  REGION 1..8: note = Description of Artificial Sequence: Synthetic peptide
QIPFAMQM

SEQ ID NO: 2824 - protein, 9 aa, synthetic construct
  REGION 1..9: note = Description of Artificial Sequence: Synthetic peptide
QITISSFKW

SEQ ID NO: 2825 - protein, 8 aa, synthetic construct
  REGION 1..8: note = Description of Artificial Sequence: Synthetic peptide
QIYKTPPI

SEQ ID NO: 2826 - protein, 9 aa, synthetic construct
  REGION 1..9: note = Description of Artificial Sequence: Synthetic peptide
QIYKTPPIK

SEQ ID NO: 2827 - protein, 8 aa, synthetic construct
  REGION 1..8: note = Description of Artificial Sequence: Synthetic peptide
QKAAITIL

SEQ ID NO: 2828 - protein, 8 aa, synthetic construct
  REGION 1..8: note = Description of Artificial Sequence: Synthetic peptide
QKFNGLTV

SEQ ID NO: 2829 - protein, 8 aa, synthetic construct
  REGION 1..8: note = Description of Artificial Sequence: Synthetic peptide
QKLIANQF

SEQ ID NO: 2830 - protein, 9 aa, synthetic construct
  REGION 1..9: note = Description of Artificial Sequence: Synthetic peptide
QKRTATKAY

SEQ ID NO: 2831 - protein, 9 aa, synthetic construct
  REGION 1..9: note = Description of Artificial Sequence: Synthetic peptide
QKTYERHSL

SEQ ID NO: 2832 - protein, 8 aa, synthetic construct
  REGION 1..8: note = Description of Artificial Sequence: Synthetic peptide
QKVGMQKY

SEQ ID NO: 2833 - protein, 9 aa, synthetic construct
  REGION 1..9: note = Description of Artificial Sequence: Synthetic peptide
QLDEEQPME

SEQ ID NO: 2834 - protein, 9 aa, synthetic construct
  REGION 1..9: note = Description of Artificial Sequence: Synthetic peptide
QLDFIDTKR

SEQ ID NO: 2835 - protein, 8 aa, synthetic construct
  REGION 1..8: note = Description of Artificial Sequence: Synthetic peptide
QLGGLHLL

SEQ ID NO: 2836 - protein, 9 aa, synthetic construct
  REGION 1..9: note = Description of Artificial Sequence: Synthetic peptide
QLGGLHLLI

SEQ ID NO: 2837 - protein, 8 aa, synthetic construct
  REGION 1..8: note = Description of Artificial Sequence: Synthetic peptide
QLHNDILL

SEQ ID NO: 2838 - protein, 10 aa, synthetic construct
  REGION 1..10: note = Description of Artificial Sequence: Synthetic peptide
QLHNDILLAK

SEQ ID NO: 2839 - protein, 9 aa, synthetic construct
  REGION 1..9: note = Description of Artificial Sequence: Synthetic peptide
QLIRAAEIR

SEQ ID NO: 2840 - protein, 11 aa, synthetic construct
  REGION 1..11: note = Description of Artificial Sequence: Synthetic peptide
QLPAPRTLLTK

SEQ ID NO: 2841 - protein, 10 aa, synthetic construct
  REGION 1..10: note = Description of Artificial Sequence: Synthetic peptide
QLPETYFTQS

SEQ ID NO: 2842 - protein, 9 aa, synthetic construct
  REGION 1..9: note = Description of Artificial Sequence: Synthetic peptide
QLPPAYTNS

SEQ ID NO: 2843 - protein, 10 aa, synthetic construct
  REGION 1..10: note = Description of Artificial Sequence: Synthetic peptide
QLPQGTTLPK

SEQ ID NO: 2844 - protein, 10 aa, synthetic construct
  REGION 1..10: note = Description of Artificial Sequence: Synthetic peptide
QLRARSVSPK

SEQ ID NO: 2845 - protein, 10 aa, synthetic construct
  REGION 1..10: note = Description of Artificial Sequence: Synthetic peptide
QLREPMLQSA

SEQ ID NO: 2846 - protein, 9 aa, synthetic construct
  REGION 1..9: note = Description of Artificial Sequence: Synthetic peptide
QLRVESSSK

SEQ ID NO: 2847 - protein, 10 aa, synthetic construct
  REGION 1..10: note = Description of Artificial Sequence: Synthetic peptide
QLSLPVLQVR

SEQ ID NO: 2848 - protein, 10 aa, synthetic construct
  REGION 1..10: note = Description of Artificial Sequence: Synthetic peptide
QLTSQWLTNI

SEQ ID NO: 2849 - protein, 8 aa, synthetic construct
  REGION 1..8: note = Description of Artificial Sequence: Synthetic peptide
QMAPISAM

SEQ ID NO: 2850 - protein, 8 aa, synthetic construct
  REGION 1..8: note = Description of Artificial Sequence: Synthetic peptide
QMNLKYAI

SEQ ID NO: 2851 - protein, 8 aa, synthetic construct
  REGION 1..8: note = Description of Artificial Sequence: Synthetic peptide
QMYKQARS

SEQ ID NO: 2852 - protein, 9 aa, synthetic construct
  REGION 1..9: note = Description of Artificial Sequence: Synthetic peptide
QNCVLKLKV

SEQ ID NO: 2853 - protein, 9 aa, synthetic construct
  REGION 1..9: note = Description of Artificial Sequence: Synthetic peptide
QNGMNGRTI

SEQ ID NO: 2854 - protein, 9 aa, synthetic construct
  REGION 1..9: note = Description of Artificial Sequence: Synthetic peptide
QPIDLVPNQ

SEQ ID NO: 2855 - protein, 11 aa, synthetic construct
  REGION 1..11: note = Description of Artificial Sequence: Synthetic peptide
QPIDLVPNQPY

SEQ ID NO: 2856 - protein, 8 aa, synthetic construct
  REGION 1..8: note = Description of Artificial Sequence: Synthetic peptide
QPIGALDI

SEQ ID NO: 2857 - protein, 9 aa, synthetic construct
  REGION 1..9: note = Description of Artificial Sequence: Synthetic peptide
QPYPNASFD

SEQ ID NO: 2858 - protein, 9 aa, synthetic construct
  REGION 1..9: note = Description of Artificial Sequence: Synthetic peptide
QPYRVVVLS

SEQ ID NO: 2859 - protein, 8 aa, synthetic construct
  REGION 1..8: note = Description of Artificial Sequence: Synthetic peptide
QPYVFIKR

SEQ ID NO: 2860 - protein, 9 aa, synthetic construct
  REGION 1..9: note = Description of Artificial Sequence: Synthetic peptide
QPYVFIKRS

SEQ ID NO: 2861 - protein, 9 aa, synthetic construct
  REGION 1..9: note = Description of Artificial Sequence: Synthetic peptide
QQESPFVMM

SEQ ID NO: 2862 - protein, 8 aa, synthetic construct
  REGION 1..8: note = Description of Artificial Sequence: Synthetic peptide
QQGQTVTK

SEQ ID NO: 2863 - protein, 8 aa, synthetic construct
  REGION 1..8: note = Description of Artificial Sequence: Synthetic peptide
QQIELKFN

SEQ ID NO: 2864 - protein, 8 aa, synthetic construct
  REGION 1..8: note = Description of Artificial Sequence: Synthetic peptide
QQLPETYF

SEQ ID NO: 2865 - protein, 9 aa, synthetic construct
  REGION 1..9: note = Description of Artificial Sequence: Synthetic peptide
QQQGQTVTK

SEQ ID NO: 2866 - protein, 8 aa, synthetic construct
  REGION 1..8: note = Description of Artificial Sequence: Synthetic peptide
QQTTLKGV

SEQ ID NO: 2867 - protein, 8 aa, synthetic construct
  REGION 1..8: note = Description of Artificial Sequence: Synthetic peptide
QQTVTLLP

SEQ ID NO: 2868 - protein, 9 aa, synthetic construct
  REGION 1..9: note = Description of Artificial Sequence: Synthetic peptide
QQWGFTGNL

SEQ ID NO: 2869 - protein, 8 aa, synthetic construct
  REGION 1..8: note = Description of Artificial Sequence: Synthetic peptide
QRGGSYTN

SEQ ID NO: 2870 - protein, 9 aa, synthetic construct
  REGION 1..9: note = Description of Artificial Sequence: Synthetic peptide
QRKYKGIKI

SEQ ID NO: 2871 - protein, 8 aa, synthetic construct
  REGION 1..8: note = Description of Artificial Sequence: Synthetic peptide
QRLTKYTM

SEQ ID NO: 2872 - protein, 10 aa, synthetic construct
  REGION 1..10: note = Description of Artificial Sequence: Synthetic peptide
QRNFYEPQII

SEQ ID NO: 2873 - protein, 9 aa, synthetic construct
  REGION 1..9: note = Description of Artificial Sequence: Synthetic peptide
QRQKKQQTV

SEQ ID NO: 2874 - protein, 11 aa, synthetic construct
  REGION 1..11: note = Description of Artificial Sequence: Synthetic peptide
QSAPHGVVFLH

SEQ ID NO: 2875 - protein, 9 aa, synthetic construct
  REGION 1..9: note = Description of Artificial Sequence: Synthetic peptide
QSCTQHQPY

SEQ ID NO: 2876 - protein, 9 aa, synthetic construct
  REGION 1..9: note = Description of Artificial Sequence: Synthetic peptide
QSFLNGFAV

SEQ ID NO: 2877 - protein, 9 aa, synthetic construct
  REGION 1..9: note = Description of Artificial Sequence: Synthetic peptide
QSRNLQEFK

SEQ ID NO: 2878 - protein, 8 aa, synthetic construct
  REGION 1..8: note = Description of Artificial Sequence: Synthetic peptide
QTNSPRRA

SEQ ID NO: 2879 - protein, 10 aa, synthetic construct
  REGION 1..10: note = Description of Artificial Sequence: Synthetic peptide
QTPFEIKLAK

SEQ ID NO: 2880 - protein, 9 aa, synthetic construct
  REGION 1..9: note = Description of Artificial Sequence: Synthetic peptide
QTQTNSPRR

SEQ ID NO: 2881 - protein, 8 aa, synthetic construct
  REGION 1..8: note = Description of Artificial Sequence: Synthetic peptide
QTRAGCLI

SEQ ID NO: 2882 - protein, 8 aa, synthetic construct
  REGION 1..8: note = Description of Artificial Sequence: Synthetic peptide
QTSITSAV

SEQ ID NO: 2883 - protein, 10 aa, synthetic construct
  REGION 1..10: note = Description of Artificial Sequence: Synthetic peptide
QTTPGSGVPV

SEQ ID NO: 2884 - protein, 9 aa, synthetic construct
  REGION 1..9: note = Description of Artificial Sequence: Synthetic peptide
QTTTIQTIV

SEQ ID NO: 2885 - protein, 10 aa, synthetic construct
  REGION 1..10: note = Description of Artificial Sequence: Synthetic peptide
QTVKPGNFNK

SEQ ID NO: 2886 - protein, 8 aa, synthetic construct
  REGION 1..8: note = Description of Artificial Sequence: Synthetic peptide
QTYHPNCV

SEQ ID NO: 2887 - protein, 9 aa, synthetic construct
  REGION 1..9: note = Description of Artificial Sequence: Synthetic peptide
QVAVLYQDV

SEQ ID NO: 2888 - protein, 9 aa, synthetic construct
  REGION 1..9: note = Description of Artificial Sequence: Synthetic peptide
QVHGNAHVA

SEQ ID NO: 2889 - protein, 8 aa, synthetic construct
  REGION 1..8: note = Description of Artificial Sequence: Synthetic peptide
QVNGLTSI

SEQ ID NO: 2890 - protein, 9 aa, synthetic construct
  REGION 1..9: note = Description of Artificial Sequence: Synthetic peptide
QVTIAEILL

SEQ ID NO: 2891 - protein, 10 aa, synthetic construct
  REGION 1..10: note = Description of Artificial Sequence: Synthetic peptide
QVVNVVTTKI

SEQ ID NO: 2892 - protein, 10 aa, synthetic construct
  REGION 1..10: note = Description of Artificial Sequence: Synthetic peptide
QWLPTGTLLV

SEQ ID NO: 2893 - protein, 11 aa, synthetic construct
  REGION 1..11: note = Description of Artificial Sequence: Synthetic peptide
QWNLVIGFLFL

SEQ ID NO: 2894 - protein, 10 aa, synthetic construct
  REGION 1..10: note = Description of Artificial Sequence: Synthetic peptide
QYLNTLTLAV

SEQ ID NO: 2895 - protein, 8 aa, synthetic construct
  REGION 1..8: note = Description of Artificial Sequence: Synthetic peptide
RAFGEYSH

SEQ ID NO: 2896 - protein, 11 aa, synthetic construct
  REGION 1..11: note = Description of Artificial Sequence: Synthetic peptide
RAGEAANFCAL

SEQ ID NO: 2897 - protein, 8 aa, synthetic construct
  REGION 1..8: note = Description of Artificial Sequence: Synthetic peptide
RAKHYVYI

SEQ ID NO: 2898 - protein, 8 aa, synthetic construct
  REGION 1..8: note = Description of Artificial Sequence: Synthetic peptide
RALTAESH

SEQ ID NO: 2899 - protein, 8 aa, synthetic construct
  REGION 1..8: note = Description of Artificial Sequence: Synthetic peptide
RALTGIAV

SEQ ID NO: 2900 - protein, 8 aa, synthetic construct
  REGION 1..8: note = Description of Artificial Sequence: Synthetic peptide
RARAGEAA

SEQ ID NO: 2901 - protein, 10 aa, synthetic construct
  REGION 1..10: note = Description of Artificial Sequence: Synthetic peptide
RARAGEAANF

SEQ ID NO: 2902 - protein, 8 aa, synthetic construct
  REGION 1..8: note = Description of Artificial Sequence: Synthetic peptide
RARSVSPK

SEQ ID NO: 2903 - protein, 9 aa, synthetic construct
  REGION 1..9: note = Description of Artificial Sequence: Synthetic peptide
RCILHCANF

SEQ ID NO: 2904 - protein, 8 aa, synthetic construct
  REGION 1..8: note = Description of Artificial Sequence: Synthetic peptide
RCLAVHEC

SEQ ID NO: 2905 - protein, 8 aa, synthetic construct
  REGION 1..8: note = Description of Artificial Sequence: Synthetic peptide
RCSFYEDF

SEQ ID NO: 2906 - protein, 11 aa, synthetic construct
  REGION 1..11: note = Description of Artificial Sequence: Synthetic peptide
RCSFYEDFLEY

SEQ ID NO: 2907 - protein, 8 aa, synthetic construct
  REGION 1..8: note = Description of Artificial Sequence: Synthetic peptide
RDAAMQRK

SEQ ID NO: 2908 - protein, 8 aa, synthetic construct
  REGION 1..8: note = Description of Artificial Sequence: Synthetic peptide
RDAPAHIS

SEQ ID NO: 2909 - protein, 9 aa, synthetic construct
  REGION 1..9: note = Description of Artificial Sequence: Synthetic peptide
RDAPAHIST

SEQ ID NO: 2910 - protein, 10 aa, synthetic construct
  REGION 1..10: note = Description of Artificial Sequence: Synthetic peptide
RDAPAHISTI

SEQ ID NO: 2911 - protein, 9 aa, synthetic construct
  REGION 1..9: note = Description of Artificial Sequence: Synthetic peptide
RDIADTTDA

SEQ ID NO: 2912 - protein, 8 aa, synthetic construct
  REGION 1..8: note = Description of Artificial Sequence: Synthetic peptide
RDISTEIY

SEQ ID NO: 2913 - protein, 8 aa, synthetic construct
  REGION 1..8: note = Description of Artificial Sequence: Synthetic peptide
RDLICAQK

SEQ ID NO: 2914 - protein, 8 aa, synthetic construct
  REGION 1..8: note = Description of Artificial Sequence: Synthetic peptide
RDPQTLEI

SEQ ID NO: 2915 - protein, 8 aa, synthetic construct
  REGION 1..8: note = Description of Artificial Sequence: Synthetic peptide
RDVDTDFV

SEQ ID NO: 2916 - protein, 12 aa, synthetic construct
  REGION 1..12: note = Description of Artificial Sequence: Synthetic peptide
REAVGTNLPLQL

SEQ ID NO: 2917 - protein, 10 aa, synthetic construct
  REGION 1..10: note = Description of Artificial Sequence: Synthetic peptide
REETGLLMPL

SEQ ID NO: 2918 - protein, 8 aa, synthetic construct
  REGION 1..8: note = Description of Artificial Sequence: Synthetic peptide
REGYLNST

SEQ ID NO: 2919 - protein, 10 aa, synthetic construct
  REGION 1..10: note = Description of Artificial Sequence: Synthetic peptide
RELHLSWEVG

SEQ ID NO: 2920 - protein, 11 aa, synthetic construct
  REGION 1..11: note = Description of Artificial Sequence: Synthetic peptide
RELKVTFFPDL

SEQ ID NO: 2921 - protein, 8 aa, synthetic construct
  REGION 1..8: note = Description of Artificial Sequence: Synthetic peptide
RELMRELN

SEQ ID NO: 2922 - protein, 9 aa, synthetic construct
  REGION 1..9: note = Description of Artificial Sequence: Synthetic peptide
RELMRELNG

SEQ ID NO: 2923 - protein, 8 aa, synthetic construct
  REGION 1..8: note = Description of Artificial Sequence: Synthetic peptide
REMLAHAE

SEQ ID NO: 2924 - protein, 9 aa, synthetic construct
  REGION 1..9: note = Description of Artificial Sequence: Synthetic peptide
REMLAHAEE

SEQ ID NO: 2925 - protein, 10 aa, synthetic construct
  REGION 1..10: note = Description of Artificial Sequence: Synthetic peptide
RENNRVVISS

SEQ ID NO: 2926 - protein, 8 aa, synthetic construct
  REGION 1..8: note = Description of Artificial Sequence: Synthetic peptide
REQIDGYV

SEQ ID NO: 2927 - protein, 10 aa, synthetic construct
  REGION 1..10: note = Description of Artificial Sequence: Synthetic peptide
REQIDGYVMH

SEQ ID NO: 2928 - protein, 10 aa, synthetic construct
  REGION 1..10: note = Description of Artificial Sequence: Synthetic peptide
REVLSDRELH

SEQ ID NO: 2929 - protein, 10 aa, synthetic construct
  REGION 1..10: note = Description of Artificial Sequence: Synthetic peptide
REVRTIKVFT

SEQ ID NO: 2930 - protein, 8 aa, synthetic construct
  REGION 1..8: note = Description of Artificial Sequence: Synthetic peptide
RFDNPVLP

SEQ ID NO: 2931 - protein, 8 aa, synthetic construct
  REGION 1..8: note = Description of Artificial Sequence: Synthetic peptide
RFDTRVLS

SEQ ID NO: 2932 - protein, 10 aa, synthetic construct
  REGION 1..10: note = Description of Artificial Sequence: Synthetic peptide
RFDTRVLSNL

SEQ ID NO: 2933 - protein, 10 aa, synthetic construct
  REGION 1..10: note = Description of Artificial Sequence: Synthetic peptide
RFFYVLGLAA

SEQ ID NO: 2934 - protein, 11 aa, synthetic construct
  REGION 1..11: note = Description of Artificial Sequence: Synthetic peptide
RFLYIIKLIFL

SEQ ID NO: 2935 - protein, 11 aa, synthetic construct
  REGION 1..11: note = Description of Artificial Sequence: Synthetic peptide
RFPKSDGTGTI

SEQ ID NO: 2936 - protein, 11 aa, synthetic construct
  REGION 1..11: note = Description of Artificial Sequence: Synthetic peptide
RFPNITNLCPF

SEQ ID NO: 2937 - protein, 10 aa, synthetic construct
  REGION 1..10: note = Description of Artificial Sequence: Synthetic peptide
RFQTLLALHR

SEQ ID NO: 2938 - protein, 12 aa, synthetic construct
  REGION 1..12: note = Description of Artificial Sequence: Synthetic peptide
RFQTLLALHRSY

SEQ ID NO: 2939 - protein, 9 aa, synthetic construct
  REGION 1..9: note = Description of Artificial Sequence: Synthetic peptide
RGATVVIGT

SEQ ID NO: 2940 - protein, 9 aa, synthetic construct
  REGION 1..9: note = Description of Artificial Sequence: Synthetic peptide
RGDEVRQIA

SEQ ID NO: 2941 - protein, 9 aa, synthetic construct
  REGION 1..9: note = Description of Artificial Sequence: Synthetic peptide
RGGDGKMKD

SEQ ID NO: 2942 - protein, 8 aa, synthetic construct
  REGION 1..8: note = Description of Artificial Sequence: Synthetic peptide
RGIVFMCV

SEQ ID NO: 2943 - protein, 9 aa, synthetic construct
  REGION 1..9: note = Description of Artificial Sequence: Synthetic peptide
RGTAVMSLK

SEQ ID NO: 2944 - protein, 8 aa, synthetic construct
  REGION 1..8: note = Description of Artificial Sequence: Synthetic peptide
RGTTTYKL

SEQ ID NO: 2945 - protein, 9 aa, synthetic construct
  REGION 1..9: note = Description of Artificial Sequence: Synthetic peptide
RGVYYPDKV

SEQ ID NO: 2946 - protein, 9 aa, synthetic construct
  REGION 1..9: note = Description of Artificial Sequence: Synthetic peptide
RHFDEGNCD

SEQ ID NO: 2947 - protein, 8 aa, synthetic construct
  REGION 1..8: note = Description of Artificial Sequence: Synthetic peptide
RHINAQVA

SEQ ID NO: 2948 - protein, 10 aa, synthetic construct
  REGION 1..10: note = Description of Artificial Sequence: Synthetic peptide
RIAGHHLGRC

SEQ ID NO: 2949 - protein, 9 aa, synthetic construct
  REGION 1..9: note = Description of Artificial Sequence: Synthetic peptide
RIDGDMVPH

SEQ ID NO: 2950 - protein, 10 aa, synthetic construct
  REGION 1..10: note = Description of Artificial Sequence: Synthetic peptide
RIDKVLNEKC

SEQ ID NO: 2951 - protein, 8 aa, synthetic construct
  REGION 1..8: note = Description of Artificial Sequence: Synthetic peptide
RIIMRLWL

SEQ ID NO: 2952 - protein, 9 aa, synthetic construct
  REGION 1..9: note = Description of Artificial Sequence: Synthetic peptide
RIIMRLWLC

SEQ ID NO: 2953 - protein, 11 aa, synthetic construct
  REGION 1..11: note = Description of Artificial Sequence: Synthetic peptide
RIIMRLWLCWK

SEQ ID NO: 2954 - protein, 9 aa, synthetic construct
  REGION 1..9: note = Description of Artificial Sequence: Synthetic peptide
RIKASMPTT

SEQ ID NO: 2955 - protein, 10 aa, synthetic construct
  REGION 1..10: note = Description of Artificial Sequence: Synthetic peptide
RIKASMPTTI

SEQ ID NO: 2956 - protein, 12 aa, synthetic construct
  REGION 1..12: note = Description of Artificial Sequence: Synthetic peptide
RIKASMPTTIAK

SEQ ID NO: 2957 - protein, 9 aa, synthetic construct
  REGION 1..9: note = Description of Artificial Sequence: Synthetic peptide
RIMASLVLA

SEQ ID NO: 2958 - protein, 9 aa, synthetic construct
  REGION 1..9: note = Description of Artificial Sequence: Synthetic peptide
RINWITGGI

SEQ ID NO: 2959 - protein, 8 aa, synthetic construct
  REGION 1..8: note = Description of Artificial Sequence: Synthetic peptide
RIRGGDGK

SEQ ID NO: 2960 - protein, 9 aa, synthetic construct
  REGION 1..9: note = Description of Artificial Sequence: Synthetic peptide
RIRGGDGKM

SEQ ID NO: 2961 - protein, 10 aa, synthetic construct
  REGION 1..10: note = Description of Artificial Sequence: Synthetic peptide
RIRGGDGKMK

SEQ ID NO: 2962 - protein, 9 aa, synthetic construct
  REGION 1..9: note = Description of Artificial Sequence: Synthetic peptide
RKIFVDGVP

SEQ ID NO: 2963 - protein, 9 aa, synthetic construct
  REGION 1..9: note = Description of Artificial Sequence: Synthetic peptide
RKLDNDALN

SEQ ID NO: 2964 - protein, 9 aa, synthetic construct
  REGION 1..9: note = Description of Artificial Sequence: Synthetic peptide
RKLHDELTG

SEQ ID NO: 2965 - protein, 9 aa, synthetic construct
  REGION 1..9: note = Description of Artificial Sequence: Synthetic peptide
RKMAFPSGK

SEQ ID NO: 2966 - protein, 11 aa, synthetic construct
  REGION 1..11: note = Description of Artificial Sequence: Synthetic peptide
RKRISNCVADY

SEQ ID NO: 2967 - protein, 8 aa, synthetic construct
  REGION 1..8: note = Description of Artificial Sequence: Synthetic peptide
RKSNHNFL

SEQ ID NO: 2968 - protein, 10 aa, synthetic construct
  REGION 1..10: note = Description of Artificial Sequence: Synthetic peptide
RKSNLKPFER

SEQ ID NO: 2969 - protein, 8 aa, synthetic construct
  REGION 1..8: note = Description of Artificial Sequence: Synthetic peptide
RKVPTDNY

SEQ ID NO: 2970 - protein, 9 aa, synthetic construct
  REGION 1..9: note = Description of Artificial Sequence: Synthetic peptide
RKVPTDNYI

SEQ ID NO: 2971 - protein, 11 aa, synthetic construct
  REGION 1..11: note = Description of Artificial Sequence: Synthetic peptide
RKVPTDNYITT

SEQ ID NO: 2972 - protein, 12 aa, synthetic construct
  REGION 1..12: note = Description of Artificial Sequence: Synthetic peptide
RKVPTDNYITTY

SEQ ID NO: 2973 - protein, 10 aa, synthetic construct
  REGION 1..10: note = Description of Artificial Sequence: Synthetic peptide
RKYKGIKIQE

SEQ ID NO: 2974 - protein, 9 aa, synthetic construct
  REGION 1..9: note = Description of Artificial Sequence: Synthetic peptide
RLCAYCCNI

SEQ ID NO: 2975 - protein, 10 aa, synthetic construct
  REGION 1..10: note = Description of Artificial Sequence: Synthetic peptide
RLDKVEAEVQ

SEQ ID NO: 2976 - protein, 10 aa, synthetic construct
  REGION 1..10: note = Description of Artificial Sequence: Synthetic peptide
RLFARTRSMW

SEQ ID NO: 2977 - protein, 9 aa, synthetic construct
  REGION 1..9: note = Description of Artificial Sequence: Synthetic peptide
RLIDAMMFT

SEQ ID NO: 2978 - protein, 12 aa, synthetic construct
  REGION 1..12: note = Description of Artificial Sequence: Synthetic peptide
RLISMMGFKMNY

SEQ ID NO: 2979 - protein, 8 aa, synthetic construct
  REGION 1..8: note = Description of Artificial Sequence: Synthetic peptide
RLITGRLQ

SEQ ID NO: 2980 - protein, 10 aa, synthetic construct
  REGION 1..10: note = Description of Artificial Sequence: Synthetic peptide
RLKLFDRYFK

SEQ ID NO: 2981 - protein, 11 aa, synthetic construct
  REGION 1..11: note = Description of Artificial Sequence: Synthetic peptide
RLMKTIGPDMF

SEQ ID NO: 2982 - protein, 12 aa, synthetic construct
  REGION 1..12: note = Description of Artificial Sequence: Synthetic peptide
RLTKYTMADLVY

SEQ ID NO: 2983 - protein, 11 aa, synthetic construct
  REGION 1..11: note = Description of Artificial Sequence: Synthetic peptide
RLWLCWKCRSK

SEQ ID NO: 2984 - protein, 9 aa, synthetic construct
  REGION 1..9: note = Description of Artificial Sequence: Synthetic peptide
RMNSRNYIA

SEQ ID NO: 2985 - protein, 8 aa, synthetic construct
  REGION 1..8: note = Description of Artificial Sequence: Synthetic peptide
RNFYEPQI

SEQ ID NO: 2986 - protein, 9 aa, synthetic construct
  REGION 1..9: note = Description of Artificial Sequence: Synthetic peptide
RNPANNAAI

SEQ ID NO: 2987 - protein, 9 aa, synthetic construct
  REGION 1..9: note = Description of Artificial Sequence: Synthetic peptide
RNPAWRKAV

SEQ ID NO: 2988 - protein, 9 aa, synthetic construct
  REGION 1..9: note = Description of Artificial Sequence: Synthetic peptide
RNRATRVEC

SEQ ID NO: 2989 - protein, 8 aa, synthetic construct
  REGION 1..8: note = Description of Artificial Sequence: Synthetic peptide
RNRDVDTD

SEQ ID NO: 2990 - protein, 9 aa, synthetic construct
  REGION 1..9: note = Description of Artificial Sequence: Synthetic peptide
RNRFLYIIK

SEQ ID NO: 2991 - protein, 11 aa, synthetic construct
  REGION 1..11: note = Description of Artificial Sequence: Synthetic peptide
RNTNPIQLSSY

SEQ ID NO: 2992 - protein, 10 aa, synthetic construct
  REGION 1..10: note = Description of Artificial Sequence: Synthetic peptide
RNVIPTITQM

SEQ ID NO: 2993 - protein, 9 aa, synthetic construct
  REGION 1..9: note = Description of Artificial Sequence: Synthetic peptide
RPLLESELV

SEQ ID NO: 2994 - protein, 9 aa, synthetic construct
  REGION 1..9: note = Description of Artificial Sequence: Synthetic peptide
RPNFTIKGS

SEQ ID NO: 2995 - protein, 9 aa, synthetic construct
  REGION 1..9: note = Description of Artificial Sequence: Synthetic peptide
RPQGLPNNT

SEQ ID NO: 2996 - protein, 11 aa, synthetic construct
  REGION 1..11: note = Description of Artificial Sequence: Synthetic peptide
RPQIGVVREFL

SEQ ID NO: 2997 - protein, 9 aa, synthetic construct
  REGION 1..9: note = Description of Artificial Sequence: Synthetic peptide
RQCSGVTFQ

SEQ ID NO: 2998 - protein, 10 aa, synthetic construct
  REGION 1..10: note = Description of Artificial Sequence: Synthetic peptide
RQFHQKLLKS

SEQ ID NO: 2999 - protein, 9 aa, synthetic construct
  REGION 1..9: note = Description of Artificial Sequence: Synthetic peptide
RQGFVDSDV

SEQ ID NO: 3000 - protein, 9 aa, synthetic construct
  REGION 1..9: note = Description of Artificial Sequence: Synthetic peptide
RQHLKDGTC

SEQ ID NO: 3001 - protein, 9 aa, synthetic construct
  REGION 1..9: note = Description of Artificial Sequence: Synthetic peptide
RQKRTATKA

SEQ ID NO: 3002 - protein, 8 aa, synthetic construct
  REGION 1..8: note = Description of Artificial Sequence: Synthetic peptide
RQRLTKYT

SEQ ID NO: 3003 - protein, 8 aa, synthetic construct
  REGION 1..8: note = Description of Artificial Sequence: Synthetic peptide
RQVVNVVT

SEQ ID NO: 3004 - protein, 11 aa, synthetic construct
  REGION 1..11: note = Description of Artificial Sequence: Synthetic peptide
RQVVNVVTTKI

SEQ ID NO: 3005 - protein, 11 aa, synthetic construct
  REGION 1..11: note = Description of Artificial Sequence: Synthetic peptide
RQWLPTGTLLV

SEQ ID NO: 3006 - protein, 10 aa, synthetic construct
  REGION 1..10: note = Description of Artificial Sequence: Synthetic peptide
RRAFGEYSHV

SEQ ID NO: 3007 - protein, 9 aa, synthetic construct
  REGION 1..9: note = Description of Artificial Sequence: Synthetic peptide
RRARSVASQ

SEQ ID NO: 3008 - protein, 8 aa, synthetic construct
  REGION 1..8: note = Description of Artificial Sequence: Synthetic peptide
RRGPEQTQ

SEQ ID NO: 3009 - protein, 11 aa, synthetic construct
  REGION 1..11: note = Description of Artificial Sequence: Synthetic peptide
RRGPEQTQGNF

SEQ ID NO: 3010 - protein, 9 aa, synthetic construct
  REGION 1..9: note = Description of Artificial Sequence: Synthetic peptide
RRIRGGDGK

SEQ ID NO: 3011 - protein, 10 aa, synthetic construct
  REGION 1..10: note = Description of Artificial Sequence: Synthetic peptide
RRIRGGDGKM

SEQ ID NO: 3012 - protein, 11 aa, synthetic construct
  REGION 1..11: note = Description of Artificial Sequence: Synthetic peptide
RRIRGGDGKMK

SEQ ID NO: 3013 - protein, 10 aa, synthetic construct
  REGION 1..10: note = Description of Artificial Sequence: Synthetic peptide
RRLISMMGFK

SEQ ID NO: 3014 - protein, 11 aa, synthetic construct
  REGION 1..11: note = Description of Artificial Sequence: Synthetic peptide
RRLISMMGFKM

SEQ ID NO: 3015 - protein, 9 aa, synthetic construct
  REGION 1..9: note = Description of Artificial Sequence: Synthetic peptide
RRNVATLQA

SEQ ID NO: 3016 - protein, 10 aa, synthetic construct
  REGION 1..10: note = Description of Artificial Sequence: Synthetic peptide
RRPQGLPNNT

SEQ ID NO: 3017 - protein, 8 aa, synthetic construct
  REGION 1..8: note = Description of Artificial Sequence: Synthetic peptide
RRSFYVYA

SEQ ID NO: 3018 - protein, 8 aa, synthetic construct
  REGION 1..8: note = Description of Artificial Sequence: Synthetic peptide
RRVVFNGV

SEQ ID NO: 3019 - protein, 8 aa, synthetic construct
  REGION 1..8: note = Description of Artificial Sequence: Synthetic peptide
RRVWTLMN

SEQ ID NO: 3020 - protein, 9 aa, synthetic construct
  REGION 1..9: note = Description of Artificial Sequence: Synthetic peptide
RSDARTAPH

SEQ ID NO: 3021 - protein, 11 aa, synthetic construct
  REGION 1..11: note = Description of Artificial Sequence: Synthetic peptide
RSDARTAPHGH

SEQ ID NO: 3022 - protein, 10 aa, synthetic construct
  REGION 1..10: note = Description of Artificial Sequence: Synthetic peptide
RSDVLLPLTQ

SEQ ID NO: 3023 - protein, 8 aa, synthetic construct
  REGION 1..8: note = Description of Artificial Sequence: Synthetic peptide
RSEAGVCV

SEQ ID NO: 3024 - protein, 10 aa, synthetic construct
  REGION 1..10: note = Description of Artificial Sequence: Synthetic peptide
RSEKSYELQT

SEQ ID NO: 3025 - protein, 8 aa, synthetic construct
  REGION 1..8: note = Description of Artificial Sequence: Synthetic peptide
RSFYVYAN

SEQ ID NO: 3026 - protein, 9 aa, synthetic construct
  REGION 1..9: note = Description of Artificial Sequence: Synthetic peptide
RSFYVYANG

SEQ ID NO: 3027 - protein, 10 aa, synthetic construct
  REGION 1..10: note = Description of Artificial Sequence: Synthetic peptide
RSGETLGVLV

SEQ ID NO: 3028 - protein, 12 aa, synthetic construct
  REGION 1..12: note = Description of Artificial Sequence: Synthetic peptide
RSKNPLLYDANY

SEQ ID NO: 3029 - protein, 8 aa, synthetic construct
  REGION 1..8: note = Description of Artificial Sequence: Synthetic peptide
RSKQRRPQ

SEQ ID NO: 3030 - protein, 9 aa, synthetic construct
  REGION 1..9: note = Description of Artificial Sequence: Synthetic peptide
RSKQRRPQG

SEQ ID NO: 3031 - protein, 10 aa, synthetic construct
  REGION 1..10: note = Description of Artificial Sequence: Synthetic peptide
RSKQRRPQGL

SEQ ID NO: 3032 - protein, 10 aa, synthetic construct
  REGION 1..10: note = Description of Artificial Sequence: Synthetic peptide
RSLKVPATVS

SEQ ID NO: 3033 - protein, 11 aa, synthetic construct
  REGION 1..11: note = Description of Artificial Sequence: Synthetic peptide
RSQMEIDFLEL

SEQ ID NO: 3034 - protein, 9 aa, synthetic construct
  REGION 1..9: note = Description of Artificial Sequence: Synthetic peptide
RSRNSSRNS

SEQ ID NO: 3035 - protein, 9 aa, synthetic construct
  REGION 1..9: note = Description of Artificial Sequence: Synthetic peptide
RSSSRSRNS

SEQ ID NO: 3036 - protein, 9 aa, synthetic construct
  REGION 1..9: note = Description of Artificial Sequence: Synthetic peptide
RSSVLHSTQ

SEQ ID NO: 3037 - protein, 8 aa, synthetic construct
  REGION 1..8: note = Description of Artificial Sequence: Synthetic peptide
RSTNSRIK

SEQ ID NO: 3038 - protein, 9 aa, synthetic construct
  REGION 1..9: note = Description of Artificial Sequence: Synthetic peptide
RSTNSRIKA

SEQ ID NO: 3039 - protein, 8 aa, synthetic construct
  REGION 1..8: note = Description of Artificial Sequence: Synthetic peptide
RSYLTPGD

SEQ ID NO: 3040 - protein, 9 aa, synthetic construct
  REGION 1..9: note = Description of Artificial Sequence: Synthetic peptide
RTFLLKYNE

SEQ ID NO: 3041 - protein, 8 aa, synthetic construct
  REGION 1..8: note = Description of Artificial Sequence: Synthetic peptide
RTIKGTHH

SEQ ID NO: 3042 - protein, 8 aa, synthetic construct
  REGION 1..8: note = Description of Artificial Sequence: Synthetic peptide
RTLETAQN

SEQ ID NO: 3043 - protein, 10 aa, synthetic construct
  REGION 1..10: note = Description of Artificial Sequence: Synthetic peptide
RTLETAQNSV

SEQ ID NO: 3044 - protein, 11 aa, synthetic construct
  REGION 1..11: note = Description of Artificial Sequence: Synthetic peptide
RTNVYLAVFDK

SEQ ID NO: 3045 - protein, 9 aa, synthetic construct
  REGION 1..9: note = Description of Artificial Sequence: Synthetic peptide
RTRSMWSFN

SEQ ID NO: 3046 - protein, 11 aa, synthetic construct
  REGION 1..11: note = Description of Artificial Sequence: Synthetic peptide
RTTNGDFLHFL

SEQ ID NO: 3047 - protein, 12 aa, synthetic construct
  REGION 1..12: note = Description of Artificial Sequence: Synthetic peptide
RTVYDDGARRVW

SEQ ID NO: 3048 - protein, 9 aa, synthetic construct
  REGION 1..9: note = Description of Artificial Sequence: Synthetic peptide
RVAGDSGFA

SEQ ID NO: 3049 - protein, 10 aa, synthetic construct
  REGION 1..10: note = Description of Artificial Sequence: Synthetic peptide
RVAGDSGFAA

SEQ ID NO: 3050 - protein, 8 aa, synthetic construct
  REGION 1..8: note = Description of Artificial Sequence: Synthetic peptide
RVCGVSAA

SEQ ID NO: 3051 - protein, 11 aa, synthetic construct
  REGION 1..11: note = Description of Artificial Sequence: Synthetic peptide
RVCTNYMPYFF

SEQ ID NO: 3052 - protein, 12 aa, synthetic construct
  REGION 1..12: note = Description of Artificial Sequence: Synthetic peptide
RVCVDTVRTNVY

SEQ ID NO: 3053 - protein, 10 aa, synthetic construct
  REGION 1..10: note = Description of Artificial Sequence: Synthetic peptide
RVDFCGKGYH

SEQ ID NO: 3054 - protein, 12 aa, synthetic construct
  REGION 1..12: note = Description of Artificial Sequence: Synthetic peptide
RVDFCGKGYHLM

SEQ ID NO: 3055 - protein, 9 aa, synthetic construct
  REGION 1..9: note = Description of Artificial Sequence: Synthetic peptide
RVDWTIEYP

SEQ ID NO: 3056 - protein, 9 aa, synthetic construct
  REGION 1..9: note = Description of Artificial Sequence: Synthetic peptide
RVEAFEYYH

SEQ ID NO: 3057 - protein, 8 aa, synthetic construct
  REGION 1..8: note = Description of Artificial Sequence: Synthetic peptide
RVECFDKF

SEQ ID NO: 3058 - protein, 9 aa, synthetic construct
  REGION 1..9: note = Description of Artificial Sequence: Synthetic peptide
RVECFDKFK

SEQ ID NO: 3059 - protein, 9 aa, synthetic construct
  REGION 1..9: note = Description of Artificial Sequence: Synthetic peptide
RVECTTIVN

SEQ ID NO: 3060 - protein, 10 aa, synthetic construct
  REGION 1..10: note = Description of Artificial Sequence: Synthetic peptide
RVIHFGAGSD

SEQ ID NO: 3061 - protein, 10 aa, synthetic construct
  REGION 1..10: note = Description of Artificial Sequence: Synthetic peptide
RVKNLNSSRV

SEQ ID NO: 3062 - protein, 9 aa, synthetic construct
  REGION 1..9: note = Description of Artificial Sequence: Synthetic peptide
RVLGLKTLA

SEQ ID NO: 3063 - protein, 10 aa, synthetic construct
  REGION 1..10: note = Description of Artificial Sequence: Synthetic peptide
RVLGLKTLAT

SEQ ID NO: 3064 - protein, 8 aa, synthetic construct
  REGION 1..8: note = Description of Artificial Sequence: Synthetic peptide
RVTKNSKV

SEQ ID NO: 3065 - protein, 10 aa, synthetic construct
  REGION 1..10: note = Description of Artificial Sequence: Synthetic peptide
RVVVLSFELL

SEQ ID NO: 3066 - protein, 8 aa, synthetic construct
  REGION 1..8: note = Description of Artificial Sequence: Synthetic peptide
RVWTLMNV

SEQ ID NO: 3067 - protein, 11 aa, synthetic construct
  REGION 1..11: note = Description of Artificial Sequence: Synthetic peptide
RVWTLMNVLTL

SEQ ID NO: 3068 - protein, 10 aa, synthetic construct
  REGION 1..10: note = Description of Artificial Sequence: Synthetic peptide
RVYANLGERV

SEQ ID NO: 3069 - protein, 8 aa, synthetic construct
  REGION 1..8: note = Description of Artificial Sequence: Synthetic peptide
RWFLNRFT

SEQ ID NO: 3070 - protein, 9 aa, synthetic construct
  REGION 1..9: note = Description of Artificial Sequence: Synthetic peptide
RWFLNRFTT

SEQ ID NO: 3071 - protein, 12 aa, synthetic construct
  REGION 1..12: note = Description of Artificial Sequence: Synthetic peptide
RYFRLTLGVYDY

SEQ ID NO: 3072 - protein, 8 aa, synthetic construct
  REGION 1..8: note = Description of Artificial Sequence: Synthetic peptide
RYLALYNK

SEQ ID NO: 3073 - protein, 10 aa, synthetic construct
  REGION 1..10: note = Description of Artificial Sequence: Synthetic peptide
RYLALYNKYK

SEQ ID NO: 3074 - protein, 10 aa, synthetic construct
  REGION 1..10: note = Description of Artificial Sequence: Synthetic peptide
RYMNSQGLLP

SEQ ID NO: 3075 - protein, 8 aa, synthetic construct
  REGION 1..8: note = Description of Artificial Sequence: Synthetic peptide
RYRIGNYK

SEQ ID NO: 3076 - protein, 9 aa, synthetic construct
  REGION 1..9: note = Description of Artificial Sequence: Synthetic peptide
RYVDNNFCG

SEQ ID NO: 3077 - protein, 12 aa, synthetic construct
  REGION 1..12: note = Description of Artificial Sequence: Synthetic peptide
RYWEPEFYEAMY

SEQ ID NO: 3078 - protein, 8 aa, synthetic construct
  REGION 1..8: note = Description of Artificial Sequence: Synthetic peptide
SAAEASKK

SEQ ID NO: 3079 - protein, 10 aa, synthetic construct
  REGION 1..10: note = Description of Artificial Sequence: Synthetic peptide
SAAEASKKPR

SEQ ID NO: 3080 - protein, 12 aa, synthetic construct
  REGION 1..12: note = Description of Artificial Sequence: Synthetic peptide
SAEVAVKMFDAY

SEQ ID NO: 3081 - protein, 11 aa, synthetic construct
  REGION 1..11: note = Description of Artificial Sequence: Synthetic peptide
SAFAMMFVKHK

SEQ ID NO: 3082 - protein, 9 aa, synthetic construct
  REGION 1..9: note = Description of Artificial Sequence: Synthetic peptide
SAFVETVKG

SEQ ID NO: 3083 - protein, 8 aa, synthetic construct
  REGION 1..8: note = Description of Artificial Sequence: Synthetic peptide
SAGFPFNK

SEQ ID NO: 3084 - protein, 10 aa, synthetic construct
  REGION 1..10: note = Description of Artificial Sequence: Synthetic peptide
SAGFSLWVYK

SEQ ID NO: 3085 - protein, 8 aa, synthetic construct
  REGION 1..8: note = Description of Artificial Sequence: Synthetic peptide
SAKPPPGD

SEQ ID NO: 3086 - protein, 9 aa, synthetic construct
  REGION 1..9: note = Description of Artificial Sequence: Synthetic peptide
SAKPPPGDQ

SEQ ID NO: 3087 - protein, 8 aa, synthetic construct
  REGION 1..8: note = Description of Artificial Sequence: Synthetic peptide
SALGKLQD

SEQ ID NO: 3088 - protein, 8 aa, synthetic construct
  REGION 1..8: note = Description of Artificial Sequence: Synthetic peptide
SALLAGTI

SEQ ID NO: 3089 - protein, 8 aa, synthetic construct
  REGION 1..8: note = Description of Artificial Sequence: Synthetic peptide
SALLEDEF

SEQ ID NO: 3090 - protein, 10 aa, synthetic construct
  REGION 1..10: note = Description of Artificial Sequence: Synthetic peptide
SALVYDNKLK

SEQ ID NO: 3091 - protein, 8 aa, synthetic construct
  REGION 1..8: note = Description of Artificial Sequence: Synthetic peptide
SAPTLVPQ

SEQ ID NO: 3092 - protein, 10 aa, synthetic construct
  REGION 1..10: note = Description of Artificial Sequence: Synthetic peptide
SAPTLVPQEH

SEQ ID NO: 3093 - protein, 10 aa, synthetic construct
  REGION 1..10: note = Description of Artificial Sequence: Synthetic peptide
SAQCFKMFYK

SEQ ID NO: 3094 - protein, 8 aa, synthetic construct
  REGION 1..8: note = Description of Artificial Sequence: Synthetic peptide
SARIVYTA

SEQ ID NO: 3095 - protein, 9 aa, synthetic construct
  REGION 1..9: note = Description of Artificial Sequence: Synthetic peptide
SARIVYTAC

SEQ ID NO: 3096 - protein, 9 aa, synthetic construct
  REGION 1..9: note = Description of Artificial Sequence: Synthetic peptide
SASIVAGGI

SEQ ID NO: 3097 - protein, 11 aa, synthetic construct
  REGION 1..11: note = Description of Artificial Sequence: Synthetic peptide
SASKIITLKKR

SEQ ID NO: 3098 - protein, 8 aa, synthetic construct
  REGION 1..8: note = Description of Artificial Sequence: Synthetic peptide
SASTSAFV

SEQ ID NO: 3099 - protein, 8 aa, synthetic construct
  REGION 1..8: note = Description of Artificial Sequence: Synthetic peptide
SAVLQSGF

SEQ ID NO: 3100 - protein, 9 aa, synthetic construct
  REGION 1..9: note = Description of Artificial Sequence: Synthetic peptide
SAVLQSGFR

SEQ ID NO: 3101 - protein, 11 aa, synthetic construct
  REGION 1..11: note = Description of Artificial Sequence: Synthetic peptide
SAYENFNQHEV

SEQ ID NO: 3102 - protein, 12 aa, synthetic construct
  REGION 1..12: note = Description of Artificial Sequence: Synthetic peptide
SAYENFNQHEVL

SEQ ID NO: 3103 - protein, 9 aa, synthetic construct
  REGION 1..9: note = Description of Artificial Sequence: Synthetic peptide
SCGNFKVTK

SEQ ID NO: 3104 - protein, 8 aa, synthetic construct
  REGION 1..8: note = Description of Artificial Sequence: Synthetic peptide
SCKRVLNV

SEQ ID NO: 3105 - protein, 9 aa, synthetic construct
  REGION 1..9: note = Description of Artificial Sequence: Synthetic peptide
SCLPFTINC

SEQ ID NO: 3106 - protein, 8 aa, synthetic construct
  REGION 1..8: note = Description of Artificial Sequence: Synthetic peptide
SDADSTLI

SEQ ID NO: 3107 - protein, 8 aa, synthetic construct
  REGION 1..8: note = Description of Artificial Sequence: Synthetic peptide
SDDYIATN

SEQ ID NO: 3108 - protein, 8 aa, synthetic construct
  REGION 1..8: note = Description of Artificial Sequence: Synthetic peptide
SDEFSSNV

SEQ ID NO: 3109 - protein, 9 aa, synthetic construct
  REGION 1..9: note = Description of Artificial Sequence: Synthetic peptide
SDEFSSNVA

SEQ ID NO: 3110 - protein, 8 aa, synthetic construct
  REGION 1..8: note = Description of Artificial Sequence: Synthetic peptide
SDEVARDL

SEQ ID NO: 3111 - protein, 10 aa, synthetic construct
  REGION 1..10: note = Description of Artificial Sequence: Synthetic peptide
SDFVRATATI

SEQ ID NO: 3112 - protein, 8 aa, synthetic construct
  REGION 1..8: note = Description of Artificial Sequence: Synthetic peptide
SDGTGTIY

SEQ ID NO: 3113 - protein, 8 aa, synthetic construct
  REGION 1..8: note = Description of Artificial Sequence: Synthetic peptide
SDIEVTGD

SEQ ID NO: 3114 - protein, 8 aa, synthetic construct
  REGION 1..8: note = Description of Artificial Sequence: Synthetic peptide
SDKFTDGV

SEQ ID NO: 3115 - protein, 8 aa, synthetic construct
  REGION 1..8: note = Description of Artificial Sequence: Synthetic peptide
SDLATNNL

SEQ ID NO: 3116 - protein, 9 aa, synthetic construct
  REGION 1..9: note = Description of Artificial Sequence: Synthetic peptide
SDLATNNLV

SEQ ID NO: 3117 - protein, 11 aa, synthetic construct
  REGION 1..11: note = Description of Artificial Sequence: Synthetic peptide
SDRDLYDKLQF

SEQ ID NO: 3118 - protein, 9 aa, synthetic construct
  REGION 1..9: note = Description of Artificial Sequence: Synthetic peptide
SDRVVFVLW

SEQ ID NO: 3119 - protein, 8 aa, synthetic construct
  REGION 1..8: note = Description of Artificial Sequence: Synthetic peptide
SDSPCESH

SEQ ID NO: 3120 - protein, 8 aa, synthetic construct
  REGION 1..8: note = Description of Artificial Sequence: Synthetic peptide
SDVENPHL

SEQ ID NO: 3121 - protein, 8 aa, synthetic construct
  REGION 1..8: note = Description of Artificial Sequence: Synthetic peptide
SDVETKDV

SEQ ID NO: 3122 - protein, 9 aa, synthetic construct
  REGION 1..9: note = Description of Artificial Sequence: Synthetic peptide
SDVETKDVV

SEQ ID NO: 3123 - protein, 8 aa, synthetic construct
  REGION 1..8: note = Description of Artificial Sequence: Synthetic peptide
SDVKCTSV

SEQ ID NO: 3124 - protein, 9 aa, synthetic construct
  REGION 1..9: note = Description of Artificial Sequence: Synthetic peptide
SDVKCTSVV

SEQ ID NO: 3125 - protein, 10 aa, synthetic construct
  REGION 1..10: note = Description of Artificial Sequence: Synthetic peptide
SDVLLPLTQY

SEQ ID NO: 3126 - protein, 9 aa, synthetic construct
  REGION 1..9: note = Description of Artificial Sequence: Synthetic peptide
SEAFLIGCN

SEQ ID NO: 3127 - protein, 8 aa, synthetic construct
  REGION 1..8: note = Description of Artificial Sequence: Synthetic peptide
SEAGVCVS

SEQ ID NO: 3128 - protein, 11 aa, synthetic construct
  REGION 1..11: note = Description of Artificial Sequence: Synthetic peptide
SEAKCWTETDL

SEQ ID NO: 3129 - protein, 9 aa, synthetic construct
  REGION 1..9: note = Description of Artificial Sequence: Synthetic peptide
SECVLGQSK

SEQ ID NO: 3130 - protein, 11 aa, synthetic construct
  REGION 1..11: note = Description of Artificial Sequence: Synthetic peptide
SEDAQGMDNLA

SEQ ID NO: 3131 - protein, 10 aa, synthetic construct
  REGION 1..10: note = Description of Artificial Sequence: Synthetic peptide
SEDKRAKVTS

SEQ ID NO: 3132 - protein, 10 aa, synthetic construct
  REGION 1..10: note = Description of Artificial Sequence: Synthetic peptide
SEFDRDAAMQ

SEQ ID NO: 3133 - protein, 10 aa, synthetic construct
  REGION 1..10: note = Description of Artificial Sequence: Synthetic peptide
SEFSSLPSYA

SEQ ID NO: 3134 - protein, 8 aa, synthetic construct
  REGION 1..8: note = Description of Artificial Sequence: Synthetic peptide
SEHDYQIG

SEQ ID NO: 3135 - protein, 10 aa, synthetic construct
  REGION 1..10: note = Description of Artificial Sequence: Synthetic peptide
SEIIGYKAID

SEQ ID NO: 3136 - protein, 8 aa, synthetic construct
  REGION 1..8: note = Description of Artificial Sequence: Synthetic peptide
SEKQVEQK

SEQ ID NO: 3137 - protein, 9 aa, synthetic construct
  REGION 1..9: note = Description of Artificial Sequence: Synthetic peptide
SEKSYELQT

SEQ ID NO: 3138 - protein, 10 aa, synthetic construct
  REGION 1..10: note = Description of Artificial Sequence: Synthetic peptide
SEMVMCGGSL

SEQ ID NO: 3139 - protein, 12 aa, synthetic construct
  REGION 1..12: note = Description of Artificial Sequence: Synthetic peptide
SEPVLKGVKLHY

SEQ ID NO: 3140 - protein, 8 aa, synthetic construct
  REGION 1..8: note = Description of Artificial Sequence: Synthetic peptide
SEVGPEHS

SEQ ID NO: 3141 - protein, 10 aa, synthetic construct
  REGION 1..10: note = Description of Artificial Sequence: Synthetic peptide
SEVVLKKLKK

SEQ ID NO: 3142 - protein, 12 aa, synthetic construct
  REGION 1..12: note = Description of Artificial Sequence: Synthetic peptide
SEYDYVIFTQTT

SEQ ID NO: 3143 - protein, 8 aa, synthetic construct
  REGION 1..8: note = Description of Artificial Sequence: Synthetic peptide
SEYKGPIT

SEQ ID NO: 3144 - protein, 8 aa, synthetic construct
  REGION 1..8: note = Description of Artificial Sequence: Synthetic peptide
SEYTGNYQ

SEQ ID NO: 3145 - protein, 9 aa, synthetic construct
  REGION 1..9: note = Description of Artificial Sequence: Synthetic peptide
SFDLGDELG

SEQ ID NO: 3146 - protein, 8 aa, synthetic construct
  REGION 1..8: note = Description of Artificial Sequence: Synthetic peptide
SFDNFKFV

SEQ ID NO: 3147 - protein, 9 aa, synthetic construct
  REGION 1..9: note = Description of Artificial Sequence: Synthetic peptide
SFDNFKFVC

SEQ ID NO: 3148 - protein, 8 aa, synthetic construct
  REGION 1..8: note = Description of Artificial Sequence: Synthetic peptide
SFDVLKSE

SEQ ID NO: 3149 - protein, 9 aa, synthetic construct
  REGION 1..9: note = Description of Artificial Sequence: Synthetic peptide
SFDVLKSED

SEQ ID NO: 3150 - protein, 10 aa, synthetic construct
  REGION 1..10: note = Description of Artificial Sequence: Synthetic peptide
SFGPLVRKIF

SEQ ID NO: 3151 - protein, 10 aa, synthetic construct
  REGION 1..10: note = Description of Artificial Sequence: Synthetic peptide
SFKEELDKYF

SEQ ID NO: 3152 - protein, 9 aa, synthetic construct
  REGION 1..9: note = Description of Artificial Sequence: Synthetic peptide
SFLGRYMSA

SEQ ID NO: 3153 - protein, 11 aa, synthetic construct
  REGION 1..11: note = Description of Artificial Sequence: Synthetic peptide
SFLPGVYSVIY

SEQ ID NO: 3154 - protein, 11 aa, synthetic construct
  REGION 1..11: note = Description of Artificial Sequence: Synthetic peptide
SFVSEETGTLI

SEQ ID NO: 3155 - protein, 11 aa, synthetic construct
  REGION 1..11: note = Description of Artificial Sequence: Synthetic peptide
SFYVYSRVKNL

SEQ ID NO: 3156 - protein, 9 aa, synthetic construct
  REGION 1..9: note = Description of Artificial Sequence: Synthetic peptide
SGARSKQRR

SEQ ID NO: 3157 - protein, 9 aa, synthetic construct
  REGION 1..9: note = Description of Artificial Sequence: Synthetic peptide
SGETLGVLV

SEQ ID NO: 3158 - protein, 8 aa, synthetic construct
  REGION 1..8: note = Description of Artificial Sequence: Synthetic peptide
SGFAAYSR

SEQ ID NO: 3159 - protein, 10 aa, synthetic construct
  REGION 1..10: note = Description of Artificial Sequence: Synthetic peptide
SGFAAYSRYR

SEQ ID NO: 3160 - protein, 8 aa, synthetic construct
  REGION 1..8: note = Description of Artificial Sequence: Synthetic peptide
SGFRKMAF

SEQ ID NO: 3161 - protein, 8 aa, synthetic construct
  REGION 1..8: note = Description of Artificial Sequence: Synthetic peptide
SGINASVV

SEQ ID NO: 3162 - protein, 9 aa, synthetic construct
  REGION 1..9: note = Description of Artificial Sequence: Synthetic peptide
SGNLLLDKR

SEQ ID NO: 3163 - protein, 9 aa, synthetic construct
  REGION 1..9: note = Description of Artificial Sequence: Synthetic peptide
SGVTFQSAV

SEQ ID NO: 3164 - protein, 11 aa, synthetic construct
  REGION 1..11: note = Description of Artificial Sequence: Synthetic peptide
SGVTFQSAVKR

SEQ ID NO: 3165 - protein, 9 aa, synthetic construct
  REGION 1..9: note = Description of Artificial Sequence: Synthetic peptide
SGVVTTVMF

SEQ ID NO: 3166 - protein, 9 aa, synthetic construct
  REGION 1..9: note = Description of Artificial Sequence: Synthetic peptide
SGWTAGAAA

SEQ ID NO: 3167 - protein, 10 aa, synthetic construct
  REGION 1..10: note = Description of Artificial Sequence: Synthetic peptide
SGWTAGAAAY

SEQ ID NO: 3168 - protein, 11 aa, synthetic construct
  REGION 1..11: note = Description of Artificial Sequence: Synthetic peptide
SGWTAGAAAYY

SEQ ID NO: 3169 - protein, 8 aa, synthetic construct
  REGION 1..8: note = Description of Artificial Sequence: Synthetic peptide
SHEGKTFY

SEQ ID NO: 3170 - protein, 8 aa, synthetic construct
  REGION 1..8: note = Description of Artificial Sequence: Synthetic peptide
SHFAIGLA

SEQ ID NO: 3171 - protein, 9 aa, synthetic construct
  REGION 1..9: note = Description of Artificial Sequence: Synthetic peptide
SHGKQVVSD

SEQ ID NO: 3172 - protein, 9 aa, synthetic construct
  REGION 1..9: note = Description of Artificial Sequence: Synthetic peptide
SHKPPISFP

SEQ ID NO: 3173 - protein, 10 aa, synthetic construct
  REGION 1..10: note = Description of Artificial Sequence: Synthetic peptide
SHKPPISFPL

SEQ ID NO: 3174 - protein, 10 aa, synthetic construct
  REGION 1..10: note = Description of Artificial Sequence: Synthetic peptide
SHLLLVAAGL

SEQ ID NO: 3175 - protein, 10 aa, synthetic construct
  REGION 1..10: note = Description of Artificial Sequence: Synthetic peptide
SHNIALIWNV

SEQ ID NO: 3176 - protein, 10 aa, synthetic construct
  REGION 1..10: note = Description of Artificial Sequence: Synthetic peptide
SHQSDIEVTG

SEQ ID NO: 3177 - protein, 12 aa, synthetic construct
  REGION 1..12: note = Description of Artificial Sequence: Synthetic peptide
SHSQLGGLHLLI

SEQ ID NO: 3178 - protein, 12 aa, synthetic construct
  REGION 1..12: note = Description of Artificial Sequence: Synthetic peptide
SHTVMPLSAPTL

SEQ ID NO: 3179 - protein, 11 aa, synthetic construct
  REGION 1..11: note = Description of Artificial Sequence: Synthetic peptide
SHVVAFNTLLF

SEQ ID NO: 3180 - protein, 10 aa, synthetic construct
  REGION 1..10: note = Description of Artificial Sequence: Synthetic peptide
SIAATRGATV

SEQ ID NO: 3181 - protein, 11 aa, synthetic construct
  REGION 1..11: note = Description of Artificial Sequence: Synthetic peptide
SIDAFKLNIKL

SEQ ID NO: 3182 - protein, 10 aa, synthetic construct
  REGION 1..10: note = Description of Artificial Sequence: Synthetic peptide
SIFSRTLETA

SEQ ID NO: 3183 - protein, 10 aa, synthetic construct
  REGION 1..10: note = Description of Artificial Sequence: Synthetic peptide
SIIKTIQPRV

SEQ ID NO: 3184 - protein, 10 aa, synthetic construct
  REGION 1..10: note = Description of Artificial Sequence: Synthetic peptide
SIISNEKQEI

SEQ ID NO: 3185 - protein, 10 aa, synthetic construct
  REGION 1..10: note = Description of Artificial Sequence: Synthetic peptide
SIKWADNNCY

SEQ ID NO: 3186 - protein, 8 aa, synthetic construct
  REGION 1..8: note = Description of Artificial Sequence: Synthetic peptide
SINFVRII

SEQ ID NO: 3187 - protein, 9 aa, synthetic construct
  REGION 1..9: note = Description of Artificial Sequence: Synthetic peptide
SINFVRIIM

SEQ ID NO: 3188 - protein, 8 aa, synthetic construct
  REGION 1..8: note = Description of Artificial Sequence: Synthetic peptide
SIPCSVCL

SEQ ID NO: 3189 - protein, 8 aa, synthetic construct
  REGION 1..8: note = Description of Artificial Sequence: Synthetic peptide
SIVRFPNI

SEQ ID NO: 3190 - protein, 9 aa, synthetic construct
  REGION 1..9: note = Description of Artificial Sequence: Synthetic peptide
SIWNLDYII

SEQ ID NO: 3191 - protein, 8 aa, synthetic construct
  REGION 1..8: note = Description of Artificial Sequence: Synthetic peptide
SKFPLKLR

SEQ ID NO: 3192 - protein, 9 aa, synthetic construct
  REGION 1..9: note = Description of Artificial Sequence: Synthetic peptide
SKFPLKLRG

SEQ ID NO: 3193 - protein, 9 aa, synthetic construct
  REGION 1..9: note = Description of Artificial Sequence: Synthetic peptide
SKFYGGWHN

SEQ ID NO: 3194 - protein, 10 aa, synthetic construct
  REGION 1..10: note = Description of Artificial Sequence: Synthetic peptide
SKFYGGWHNM

SEQ ID NO: 3195 - protein, 11 aa, synthetic construct
  REGION 1..11: note = Description of Artificial Sequence: Synthetic peptide
SKFYGGWHNML

SEQ ID NO: 3196 - protein, 9 aa, synthetic construct
  REGION 1..9: note = Description of Artificial Sequence: Synthetic peptide
SKGRLIIRE

SEQ ID NO: 3197 - protein, 8 aa, synthetic construct
  REGION 1..8: note = Description of Artificial Sequence: Synthetic peptide
SKHTPINL

SEQ ID NO: 3198 - protein, 9 aa, synthetic construct
  REGION 1..9: note = Description of Artificial Sequence: Synthetic peptide
SKILGLPTQ

SEQ ID NO: 3199 - protein, 9 aa, synthetic construct
  REGION 1..9: note = Description of Artificial Sequence: Synthetic peptide
SKLIEYTDF

SEQ ID NO: 3200 - protein, 10 aa, synthetic construct
  REGION 1..10: note = Description of Artificial Sequence: Synthetic peptide
SKLINIIIWF

SEQ ID NO: 3201 - protein, 11 aa, synthetic construct
  REGION 1..11: note = Description of Artificial Sequence: Synthetic peptide
SKLINIIIWFL

SEQ ID NO: 3202 - protein, 10 aa, synthetic construct
  REGION 1..10: note = Description of Artificial Sequence: Synthetic peptide
SKLWAQCVQL

SEQ ID NO: 3203 - protein, 9 aa, synthetic construct
  REGION 1..9: note = Description of Artificial Sequence: Synthetic peptide
SKQRRPQGL

SEQ ID NO: 3204 - protein, 10 aa, synthetic construct
  REGION 1..10: note = Description of Artificial Sequence: Synthetic peptide
SKRSFIEDLL

SEQ ID NO: 3205 - protein, 9 aa, synthetic construct
  REGION 1..9: note = Description of Artificial Sequence: Synthetic peptide
SKRVDFCGK

SEQ ID NO: 3206 - protein, 8 aa, synthetic construct
  REGION 1..8: note = Description of Artificial Sequence: Synthetic peptide
SKSPIQYI

SEQ ID NO: 3207 - protein, 9 aa, synthetic construct
  REGION 1..9: note = Description of Artificial Sequence: Synthetic peptide
SKSPIQYID

SEQ ID NO: 3208 - protein, 8 aa, synthetic construct
  REGION 1..8: note = Description of Artificial Sequence: Synthetic peptide
SKTPEEHF

SEQ ID NO: 3209 - protein, 10 aa, synthetic construct
  REGION 1..10: note = Description of Artificial Sequence: Synthetic peptide
SKVGGNYNYL

SEQ ID NO: 3210 - protein, 10 aa, synthetic construct
  REGION 1..10: note = Description of Artificial Sequence: Synthetic peptide
SKVVKVTIDY

SEQ ID NO: 3211 - protein, 10 aa, synthetic construct
  REGION 1..10: note = Description of Artificial Sequence: Synthetic peptide
SLAATVRLQA

SEQ ID NO: 3212 - protein, 9 aa, synthetic construct
  REGION 1..9: note = Description of Artificial Sequence: Synthetic peptide
SLAGSYKDW

SEQ ID NO: 3213 - protein, 8 aa, synthetic construct
  REGION 1..8: note = Description of Artificial Sequence: Synthetic peptide
SLATVAYF

SEQ ID NO: 3214 - protein, 8 aa, synthetic construct
  REGION 1..8: note = Description of Artificial Sequence: Synthetic peptide
SLDNVLST

SEQ ID NO: 3215 - protein, 9 aa, synthetic construct
  REGION 1..9: note = Description of Artificial Sequence: Synthetic peptide
SLEIPRRNV

SEQ ID NO: 3216 - protein, 10 aa, synthetic construct
  REGION 1..10: note = Description of Artificial Sequence: Synthetic peptide
SLENVAFNVV

SEQ ID NO: 3217 - protein, 8 aa, synthetic construct
  REGION 1..8: note = Description of Artificial Sequence: Synthetic peptide
SLKEGQIN

SEQ ID NO: 3218 - protein, 9 aa, synthetic construct
  REGION 1..9: note = Description of Artificial Sequence: Synthetic peptide
SLKVPATVS

SEQ ID NO: 3219 - protein, 10 aa, synthetic construct
  REGION 1..10: note = Description of Artificial Sequence: Synthetic peptide
SLLLCRMNSR

SEQ ID NO: 3220 - protein, 10 aa, synthetic construct
  REGION 1..10: note = Description of Artificial Sequence: Synthetic peptide
SLLMPILTLT

SEQ ID NO: 3221 - protein, 11 aa, synthetic construct
  REGION 1..11: note = Description of Artificial Sequence: Synthetic peptide
SLLMPILTLTR

SEQ ID NO: 3222 - protein, 8 aa, synthetic construct
  REGION 1..8: note = Description of Artificial Sequence: Synthetic peptide
SLLSKGRL

SEQ ID NO: 3223 - protein, 10 aa, synthetic construct
  REGION 1..10: note = Description of Artificial Sequence: Synthetic peptide
SLLSKGRLII

SEQ ID NO: 3224 - protein, 9 aa, synthetic construct
  REGION 1..9: note = Description of Artificial Sequence: Synthetic peptide
SLNGVTLIG

SEQ ID NO: 3225 - protein, 8 aa, synthetic construct
  REGION 1..8: note = Description of Artificial Sequence: Synthetic peptide
SLPFGWLI

SEQ ID NO: 3226 - protein, 11 aa, synthetic construct
  REGION 1..11: note = Description of Artificial Sequence: Synthetic peptide
SLPFGWLIVGV

SEQ ID NO: 3227 - protein, 10 aa, synthetic construct
  REGION 1..10: note = Description of Artificial Sequence: Synthetic peptide
SLPSYAAFAT

SEQ ID NO: 3228 - protein, 8 aa, synthetic construct
  REGION 1..8: note = Description of Artificial Sequence: Synthetic peptide
SLPVLQVR

SEQ ID NO: 3229 - protein, 9 aa, synthetic construct
  REGION 1..9: note = Description of Artificial Sequence: Synthetic peptide
SLPVLQVRD

SEQ ID NO: 3230 - protein, 9 aa, synthetic construct
  REGION 1..9: note = Description of Artificial Sequence: Synthetic peptide
SLQTYVTQQ

SEQ ID NO: 3231 - protein, 10 aa, synthetic construct
  REGION 1..10: note = Description of Artificial Sequence: Synthetic peptide
SLQTYVTQQL

SEQ ID NO: 3232 - protein, 10 aa, synthetic construct
  REGION 1..10: note = Description of Artificial Sequence: Synthetic peptide
SLRCGACIRR

SEQ ID NO: 3233 - protein, 10 aa, synthetic construct
  REGION 1..10: note = Description of Artificial Sequence: Synthetic peptide
SLRVCVDTVR

SEQ ID NO: 3234 - protein, 10 aa, synthetic construct
  REGION 1..10: note = Description of Artificial Sequence: Synthetic peptide
SLSEQLRKQI

SEQ ID NO: 3235 - protein, 8 aa, synthetic construct
  REGION 1..8: note = Description of Artificial Sequence: Synthetic peptide
SLSGFKLK

SEQ ID NO: 3236 - protein, 9 aa, synthetic construct
  REGION 1..9: note = Description of Artificial Sequence: Synthetic peptide
SLSGFKLKD

SEQ ID NO: 3237 - protein, 11 aa, synthetic construct
  REGION 1..11: note = Description of Artificial Sequence: Synthetic peptide
SLSSTASALGK

SEQ ID NO: 3238 - protein, 8 aa, synthetic construct
  REGION 1..8: note = Description of Artificial Sequence: Synthetic peptide
SLVVRCSF

SEQ ID NO: 3239 - protein, 11 aa, synthetic construct
  REGION 1..11: note = Description of Artificial Sequence: Synthetic peptide
SLWVYKQFDTY

SEQ ID NO: 3240 - protein, 10 aa, synthetic construct
  REGION 1..10: note = Description of Artificial Sequence: Synthetic peptide
SMATNYDLSV

SEQ ID NO: 3241 - protein, 9 aa, synthetic construct
  REGION 1..9: note = Description of Artificial Sequence: Synthetic peptide
SMDNSPNLA

SEQ ID NO: 3242 - protein, 10 aa, synthetic construct
  REGION 1..10: note = Description of Artificial Sequence: Synthetic peptide
SMDNSPNLAW

SEQ ID NO: 3243 - protein, 8 aa, synthetic construct
  REGION 1..8: note = Description of Artificial Sequence: Synthetic peptide
SMKYFVKI

SEQ ID NO: 3244 - protein, 11 aa, synthetic construct
  REGION 1..11: note = Description of Artificial Sequence: Synthetic peptide
SMMGFKMNYQV

SEQ ID NO: 3245 - protein, 10 aa, synthetic construct
  REGION 1..10: note = Description of Artificial Sequence: Synthetic peptide
SMQGAVDINK

SEQ ID NO: 3246 - protein, 11 aa, synthetic construct
  REGION 1..11: note = Description of Artificial Sequence: Synthetic peptide
SNGTHWFVTQR

SEQ ID NO: 3247 - protein, 10 aa, synthetic construct
  REGION 1..10: note = Description of Artificial Sequence: Synthetic peptide
SNGTITVEEL

SEQ ID NO: 3248 - protein, 9 aa, synthetic construct
  REGION 1..9: note = Description of Artificial Sequence: Synthetic peptide
SNHDLYCQV

SEQ ID NO: 3249 - protein, 8 aa, synthetic construct
  REGION 1..8: note = Description of Artificial Sequence: Synthetic peptide
SNLKPFER

SEQ ID NO: 3250 - protein, 8 aa, synthetic construct
  REGION 1..8: note = Description of Artificial Sequence: Synthetic peptide
SNNLDSKV

SEQ ID NO: 3251 - protein, 8 aa, synthetic construct
  REGION 1..8: note = Description of Artificial Sequence: Synthetic peptide
SNPTTFHL

SEQ ID NO: 3252 - protein, 8 aa, synthetic construct
  REGION 1..8: note = Description of Artificial Sequence: Synthetic peptide
SNSGSDVL

SEQ ID NO: 3253 - protein, 9 aa, synthetic construct
  REGION 1..9: note = Description of Artificial Sequence: Synthetic peptide
SNVANYQKV

SEQ ID NO: 3254 - protein, 10 aa, synthetic construct
  REGION 1..10: note = Description of Artificial Sequence: Synthetic peptide
SNYLKRRVVF

SEQ ID NO: 3255 - protein, 10 aa, synthetic construct
  REGION 1..10: note = Description of Artificial Sequence: Synthetic peptide
SNYSGVVTTV

SEQ ID NO: 3256 - protein, 11 aa, synthetic construct
  REGION 1..11: note = Description of Artificial Sequence: Synthetic peptide
SPCESHGKQVV

SEQ ID NO: 3257 - protein, 10 aa, synthetic construct
  REGION 1..10: note = Description of Artificial Sequence: Synthetic peptide
SPFELEDFIP

SEQ ID NO: 3258 - protein, 11 aa, synthetic construct
  REGION 1..11: note = Description of Artificial Sequence: Synthetic peptide
SPFELEDFIPM

SEQ ID NO: 3259 - protein, 11 aa, synthetic construct
  REGION 1..11: note = Description of Artificial Sequence: Synthetic peptide
SPFVMMSAPPA

SEQ ID NO: 3260 - protein, 8 aa, synthetic construct
  REGION 1..8: note = Description of Artificial Sequence: Synthetic peptide
SPISEHDY

SEQ ID NO: 3261 - protein, 8 aa, synthetic construct
  REGION 1..8: note = Description of Artificial Sequence: Synthetic peptide
SPNECNQM

SEQ ID NO: 3262 - protein, 11 aa, synthetic construct
  REGION 1..11: note = Description of Artificial Sequence: Synthetic peptide
SPNFSKLINII

SEQ ID NO: 3263 - protein, 10 aa, synthetic construct
  REGION 1..10: note = Description of Artificial Sequence: Synthetic peptide
SPRRARSVAS

SEQ ID NO: 3264 - protein, 10 aa, synthetic construct
  REGION 1..10: note = Description of Artificial Sequence: Synthetic peptide
SPTKLNDLCF

SEQ ID NO: 3265 - protein, 8 aa, synthetic construct
  REGION 1..8: note = Description of Artificial Sequence: Synthetic peptide
SPYNSQNA

SEQ ID NO: 3266 - protein, 8 aa, synthetic construct
  REGION 1..8: note = Description of Artificial Sequence: Synthetic peptide
SQAWQPGV

SEQ ID NO: 3267 - protein, 10 aa, synthetic construct
  REGION 1..10: note = Description of Artificial Sequence: Synthetic peptide
SQAWQPGVAM

SEQ ID NO: 3268 - protein, 8 aa, synthetic construct
  REGION 1..8: note = Description of Artificial Sequence: Synthetic peptide
SQDLSVVS

SEQ ID NO: 3269 - protein, 8 aa, synthetic construct
  REGION 1..8: note = Description of Artificial Sequence: Synthetic peptide
SQGLVASI

SEQ ID NO: 3270 - protein, 9 aa, synthetic construct
  REGION 1..9: note = Description of Artificial Sequence: Synthetic peptide
SQGSEYDYV

SEQ ID NO: 3271 - protein, 9 aa, synthetic construct
  REGION 1..9: note = Description of Artificial Sequence: Synthetic peptide
SQHTMLVKQ

SEQ ID NO: 3272 - protein, 8 aa, synthetic construct
  REGION 1..8: note = Description of Artificial Sequence: Synthetic peptide
SQLMCQPI

SEQ ID NO: 3273 - protein, 9 aa, synthetic construct
  REGION 1..9: note = Description of Artificial Sequence: Synthetic peptide
SQLMCQPIL

SEQ ID NO: 3274 - protein, 10 aa, synthetic construct
  REGION 1..10: note = Description of Artificial Sequence: Synthetic peptide
SQLMCQPILL

SEQ ID NO: 3275 - protein, 8 aa, synthetic construct
  REGION 1..8: note = Description of Artificial Sequence: Synthetic peptide
SQMEIDFL

SEQ ID NO: 3276 - protein, 10 aa, synthetic construct
  REGION 1..10: note = Description of Artificial Sequence: Synthetic peptide
SQNAVASKIL

SEQ ID NO: 3277 - protein, 8 aa, synthetic construct
  REGION 1..8: note = Description of Artificial Sequence: Synthetic peptide
SQPFLMDL

SEQ ID NO: 3278 - protein, 9 aa, synthetic construct
  REGION 1..9: note = Description of Artificial Sequence: Synthetic peptide
SQQTVGQQD

SEQ ID NO: 3279 - protein, 12 aa, synthetic construct
  REGION 1..12: note = Description of Artificial Sequence: Synthetic peptide
SQWLTNIFGTVY

SEQ ID NO: 3280 - protein, 9 aa, synthetic construct
  REGION 1..9: note = Description of Artificial Sequence: Synthetic peptide
SQYSLRLID

SEQ ID NO: 3281 - protein, 8 aa, synthetic construct
  REGION 1..8: note = Description of Artificial Sequence: Synthetic peptide
SRGGSQAS

SEQ ID NO: 3282 - protein, 9 aa, synthetic construct
  REGION 1..9: note = Description of Artificial Sequence: Synthetic peptide
SRGGSQASS

SEQ ID NO: 3283 - protein, 10 aa, synthetic construct
  REGION 1..10: note = Description of Artificial Sequence: Synthetic peptide
SRGGSQASSR

SEQ ID NO: 3284 - protein, 8 aa, synthetic construct
  REGION 1..8: note = Description of Artificial Sequence: Synthetic peptide
SRIGMEVT

SEQ ID NO: 3285 - protein, 10 aa, synthetic construct
  REGION 1..10: note = Description of Artificial Sequence: Synthetic peptide
SRIIPARARV

SEQ ID NO: 3286 - protein, 11 aa, synthetic construct
  REGION 1..11: note = Description of Artificial Sequence: Synthetic peptide
SRIKASMPTTI

SEQ ID NO: 3287 - protein, 10 aa, synthetic construct
  REGION 1..10: note = Description of Artificial Sequence: Synthetic peptide
SRILGAGCFV

SEQ ID NO: 3288 - protein, 10 aa, synthetic construct
  REGION 1..10: note = Description of Artificial Sequence: Synthetic peptide
SRLDKVEAEV

SEQ ID NO: 3289 - protein, 10 aa, synthetic construct
  REGION 1..10: note = Description of Artificial Sequence: Synthetic peptide
SRLSFKELLV

SEQ ID NO: 3290 - protein, 11 aa, synthetic construct
  REGION 1..11: note = Description of Artificial Sequence: Synthetic peptide
SRLSFKELLVY

SEQ ID NO: 3291 - protein, 9 aa, synthetic construct
  REGION 1..9: note = Description of Artificial Sequence: Synthetic peptide
SRNLQEFKP

SEQ ID NO: 3292 - protein, 10 aa, synthetic construct
  REGION 1..10: note = Description of Artificial Sequence: Synthetic peptide
SRNLQEFKPR

SEQ ID NO: 3293 - protein, 9 aa, synthetic construct
  REGION 1..9: note = Description of Artificial Sequence: Synthetic peptide
SRNSSRNST

SEQ ID NO: 3294 - protein, 9 aa, synthetic construct
  REGION 1..9: note = Description of Artificial Sequence: Synthetic peptide
SRNSTPGSS

SEQ ID NO: 3295 - protein, 10 aa, synthetic construct
  REGION 1..10: note = Description of Artificial Sequence: Synthetic peptide
SRNSTPGSSR

SEQ ID NO: 3296 - protein, 10 aa, synthetic construct
  REGION 1..10: note = Description of Artificial Sequence: Synthetic peptide
SRNYIAQVDV

SEQ ID NO: 3297 - protein, 8 aa, synthetic construct
  REGION 1..8: note = Description of Artificial Sequence: Synthetic peptide
SRQRLTKY

SEQ ID NO: 3298 - protein, 10 aa, synthetic construct
  REGION 1..10: note = Description of Artificial Sequence: Synthetic peptide
SRQRLTKYTM

SEQ ID NO: 3299 - protein, 9 aa, synthetic construct
  REGION 1..9: note = Description of Artificial Sequence: Synthetic peptide
SRVKNLNSS

SEQ ID NO: 3300 - protein, 10 aa, synthetic construct
  REGION 1..10: note = Description of Artificial Sequence: Synthetic peptide
SRVKNLNSSR

SEQ ID NO: 3301 - protein, 8 aa, synthetic construct
  REGION 1..8: note = Description of Artificial Sequence: Synthetic peptide
SRVLGLKT

SEQ ID NO: 3302 - protein, 10 aa, synthetic construct
  REGION 1..10: note = Description of Artificial Sequence: Synthetic peptide
SRVLGLKTLA

SEQ ID NO: 3303 - protein, 10 aa, synthetic construct
  REGION 1..10: note = Description of Artificial Sequence: Synthetic peptide
SRYWEPEFYE

SEQ ID NO: 3304 - protein, 11 aa, synthetic construct
  REGION 1..11: note = Description of Artificial Sequence: Synthetic peptide
SRYWEPEFYEA

SEQ ID NO: 3305 - protein, 12 aa, synthetic construct
  REGION 1..12: note = Description of Artificial Sequence: Synthetic peptide
SRYWEPEFYEAM

SEQ ID NO: 3306 - protein, 9 aa, synthetic construct
  REGION 1..9: note = Description of Artificial Sequence: Synthetic peptide
SSAINRPQI

SEQ ID NO: 3307 - protein, 10 aa, synthetic construct
  REGION 1..10: note = Description of Artificial Sequence: Synthetic peptide
SSDNIALLVQ

SEQ ID NO: 3308 - protein, 8 aa, synthetic construct
  REGION 1..8: note = Description of Artificial Sequence: Synthetic peptide
SSDVLVNN

SEQ ID NO: 3309 - protein, 9 aa, synthetic construct
  REGION 1..9: note = Description of Artificial Sequence: Synthetic peptide
SSEAFLIGC

SEQ ID NO: 3310 - protein, 11 aa, synthetic construct
  REGION 1..11: note = Description of Artificial Sequence: Synthetic peptide
SSEAFLIGCNY

SEQ ID NO: 3311 - protein, 8 aa, synthetic construct
  REGION 1..8: note = Description of Artificial Sequence: Synthetic peptide
SSEIIGYK

SEQ ID NO: 3312 - protein, 9 aa, synthetic construct
  REGION 1..9: note = Description of Artificial Sequence: Synthetic peptide
SSEIIGYKA

SEQ ID NO: 3313 - protein, 8 aa, synthetic construct
  REGION 1..8: note = Description of Artificial Sequence: Synthetic peptide
SSGDATTA

SEQ ID NO: 3314 - protein, 8 aa, synthetic construct
  REGION 1..8: note = Description of Artificial Sequence: Synthetic peptide
SSGVVNPV

SEQ ID NO: 3315 - protein, 9 aa, synthetic construct
  REGION 1..9: note = Description of Artificial Sequence: Synthetic peptide
SSGVVNPVM

SEQ ID NO: 3316 - protein, 11 aa, synthetic construct
  REGION 1..11: note = Description of Artificial Sequence: Synthetic peptide
SSGWTAGAAAY

SEQ ID NO: 3317 - protein, 8 aa, synthetic construct
  REGION 1..8: note = Description of Artificial Sequence: Synthetic peptide
SSIVITSG

SEQ ID NO: 3318 - protein, 9 aa, synthetic construct
  REGION 1..9: note = Description of Artificial Sequence: Synthetic peptide
SSIVITSGD

SEQ ID NO: 3319 - protein, 9 aa, synthetic construct
  REGION 1..9: note = Description of Artificial Sequence: Synthetic peptide
SSKCVCSVI

SEQ ID NO: 3320 - protein, 8 aa, synthetic construct
  REGION 1..8: note = Description of Artificial Sequence: Synthetic peptide
SSKTPEEH

SEQ ID NO: 3321 - protein, 9 aa, synthetic construct
  REGION 1..9: note = Description of Artificial Sequence: Synthetic peptide
SSNFGAISS

SEQ ID NO: 3322 - protein, 9 aa, synthetic construct
  REGION 1..9: note = Description of Artificial Sequence: Synthetic peptide
SSNVANYQK

SEQ ID NO: 3323 - protein, 11 aa, synthetic construct
  REGION 1..11: note = Description of Artificial Sequence: Synthetic peptide
SSPDDQIGYYR

SEQ ID NO: 3324 - protein, 9 aa, synthetic construct
  REGION 1..9: note = Description of Artificial Sequence: Synthetic peptide
SSQAWQPGV

SEQ ID NO: 3325 - protein, 8 aa, synthetic construct
  REGION 1..8: note = Description of Artificial Sequence: Synthetic peptide
SSQGSEYD

SEQ ID NO: 3326 - protein, 8 aa, synthetic construct
  REGION 1..8: note = Description of Artificial Sequence: Synthetic peptide
SSRVPDLL

SEQ ID NO: 3327 - protein, 8 aa, synthetic construct
  REGION 1..8: note = Description of Artificial Sequence: Synthetic peptide
SSSEAFLI

SEQ ID NO: 3328 - protein, 9 aa, synthetic construct
  REGION 1..9: note = Description of Artificial Sequence: Synthetic peptide
SSSEAFLIG

SEQ ID NO: 3329 - protein, 12 aa, synthetic construct
  REGION 1..12: note = Description of Artificial Sequence: Synthetic peptide
SSSGWTAGAAAY

SEQ ID NO: 3330 - protein, 10 aa, synthetic construct
  REGION 1..10: note = Description of Artificial Sequence: Synthetic peptide
SSSKTPEEHF

SEQ ID NO: 3331 - protein, 10 aa, synthetic construct
  REGION 1..10: note = Description of Artificial Sequence: Synthetic peptide
SSSRSRNSSR

SEQ ID NO: 3332 - protein, 9 aa, synthetic construct
  REGION 1..9: note = Description of Artificial Sequence: Synthetic peptide
SSTCMMCYK

SEQ ID NO: 3333 - protein, 10 aa, synthetic construct
  REGION 1..10: note = Description of Artificial Sequence: Synthetic peptide
SSTFNVPMEK

SEQ ID NO: 3334 - protein, 8 aa, synthetic construct
  REGION 1..8: note = Description of Artificial Sequence: Synthetic peptide
SSVLHSTQ

SEQ ID NO: 3335 - protein, 9 aa, synthetic construct
  REGION 1..9: note = Description of Artificial Sequence: Synthetic peptide
SSVLHSTQD

SEQ ID NO: 3336 - protein, 11 aa, synthetic construct
  REGION 1..11: note = Description of Artificial Sequence: Synthetic peptide
SSVLHSTQDLF

SEQ ID NO: 3337 - protein, 8 aa, synthetic construct
  REGION 1..8: note = Description of Artificial Sequence: Synthetic peptide
SSVLNDIL

SEQ ID NO: 3338 - protein, 10 aa, synthetic construct
  REGION 1..10: note = Description of Artificial Sequence: Synthetic peptide
SSYSLFDMSK

SEQ ID NO: 3339 - protein, 9 aa, synthetic construct
  REGION 1..9: note = Description of Artificial Sequence: Synthetic peptide
STASDTYAC

SEQ ID NO: 3340 - protein, 10 aa, synthetic construct
  REGION 1..10: note = Description of Artificial Sequence: Synthetic peptide
STDGNKIADK

SEQ ID NO: 3341 - protein, 11 aa, synthetic construct
  REGION 1..11: note = Description of Artificial Sequence: Synthetic peptide
STEKSNIIRGW

SEQ ID NO: 3342 - protein, 11 aa, synthetic construct
  REGION 1..11: note = Description of Artificial Sequence: Synthetic peptide
STFISAARQGF

SEQ ID NO: 3343 - protein, 9 aa, synthetic construct
  REGION 1..9: note = Description of Artificial Sequence: Synthetic peptide
STGSNVFQT

SEQ ID NO: 3344 - protein, 8 aa, synthetic construct
  REGION 1..8: note = Description of Artificial Sequence: Synthetic peptide
STIQRKYK

SEQ ID NO: 3345 - protein, 10 aa, synthetic construct
  REGION 1..10: note = Description of Artificial Sequence: Synthetic peptide
STIQRKYKGI

SEQ ID NO: 3346 - protein, 8 aa, synthetic construct
  REGION 1..8: note = Description of Artificial Sequence: Synthetic peptide
STKHFYWF

SEQ ID NO: 3347 - protein, 12 aa, synthetic construct
  REGION 1..12: note = Description of Artificial Sequence: Synthetic peptide
STKHFYWFFSNY

SEQ ID NO: 3348 - protein, 9 aa, synthetic construct
  REGION 1..9: note = Description of Artificial Sequence: Synthetic peptide
STNSRIKAS

SEQ ID NO: 3349 - protein, 10 aa, synthetic construct
  REGION 1..10: note = Description of Artificial Sequence: Synthetic peptide
STQLGIEFLK

SEQ ID NO: 3350 - protein, 10 aa, synthetic construct
  REGION 1..10: note = Description of Artificial Sequence: Synthetic peptide
STQWSLFFFL

SEQ ID NO: 3351 - protein, 12 aa, synthetic construct
  REGION 1..12: note = Description of Artificial Sequence: Synthetic peptide
STQYEYGTEDDY

SEQ ID NO: 3352 - protein, 10 aa, synthetic construct
  REGION 1..10: note = Description of Artificial Sequence: Synthetic peptide
STSAFVETVK

SEQ ID NO: 3353 - protein, 8 aa, synthetic construct
  REGION 1..8: note = Description of Artificial Sequence: Synthetic peptide
STSGRWVL

SEQ ID NO: 3354 - protein, 9 aa, synthetic construct
  REGION 1..9: note = Description of Artificial Sequence: Synthetic peptide
STSHKLVLS

SEQ ID NO: 3355 - protein, 11 aa, synthetic construct
  REGION 1..11: note = Description of Artificial Sequence: Synthetic peptide
SVAIKITEHSW

SEQ ID NO: 3356 - protein, 9 aa, synthetic construct
  REGION 1..9: note = Description of Artificial Sequence: Synthetic peptide
SVASQSIIA

SEQ ID NO: 3357 - protein, 9 aa, synthetic construct
  REGION 1..9: note = Description of Artificial Sequence: Synthetic peptide
SVCRLMKTI

SEQ ID NO: 3358 - protein, 10 aa, synthetic construct
  REGION 1..10: note = Description of Artificial Sequence: Synthetic peptide
SVFNICQAVT

SEQ ID NO: 3359 - protein, 8 aa, synthetic construct
  REGION 1..8: note = Description of Artificial Sequence: Synthetic peptide
SVIDLLLD

SEQ ID NO: 3360 - protein, 11 aa, synthetic construct
  REGION 1..11: note = Description of Artificial Sequence: Synthetic peptide
SVIDLLLDDFV

SEQ ID NO: 3361 - protein, 11 aa, synthetic construct
  REGION 1..11: note = Description of Artificial Sequence: Synthetic peptide
SVLLFLAFVVF

SEQ ID NO: 3362 - protein, 9 aa, synthetic construct
  REGION 1..9: note = Description of Artificial Sequence: Synthetic peptide
SVLYYQNNV

SEQ ID NO: 3363 - protein, 10 aa, synthetic construct
  REGION 1..10: note = Description of Artificial Sequence: Synthetic peptide
SVLYYQNNVF

SEQ ID NO: 3364 - protein, 12 aa, synthetic construct
  REGION 1..12: note = Description of Artificial Sequence: Synthetic peptide
SVMLTNDNTSRY

SEQ ID NO: 3365 - protein, 11 aa, synthetic construct
  REGION 1..11: note = Description of Artificial Sequence: Synthetic peptide
SVNITFELDER

SEQ ID NO: 3366 - protein, 9 aa, synthetic construct
  REGION 1..9: note = Description of Artificial Sequence: Synthetic peptide
SVPWDTIAN

SEQ ID NO: 3367 - protein, 8 aa, synthetic construct
  REGION 1..8: note = Description of Artificial Sequence: Synthetic peptide
SVRVLQKA

SEQ ID NO: 3368 - protein, 10 aa, synthetic construct
  REGION 1..10: note = Description of Artificial Sequence: Synthetic peptide
SVSPKLFIRQ

SEQ ID NO: 3369 - protein, 10 aa, synthetic construct
  REGION 1..10: note = Description of Artificial Sequence: Synthetic peptide
SVSSPDAVTA

SEQ ID NO: 3370 - protein, 9 aa, synthetic construct
  REGION 1..9: note = Description of Artificial Sequence: Synthetic peptide
SVTVKNGSI

SEQ ID NO: 3371 - protein, 12 aa, synthetic construct
  REGION 1..12: note = Description of Artificial Sequence: Synthetic peptide
SVTVKNGSIHLY

SEQ ID NO: 3372 - protein, 9 aa, synthetic construct
  REGION 1..9: note = Description of Artificial Sequence: Synthetic peptide
SVVLLSVLQ

SEQ ID NO: 3373 - protein, 9 aa, synthetic construct
  REGION 1..9: note = Description of Artificial Sequence: Synthetic peptide
SVVNARLRA

SEQ ID NO: 3374 - protein, 11 aa, synthetic construct
  REGION 1..11: note = Description of Artificial Sequence: Synthetic peptide
SVVNIQKEIDR

SEQ ID NO: 3375 - protein, 10 aa, synthetic construct
  REGION 1..10: note = Description of Artificial Sequence: Synthetic peptide
SVVSKVVKVT

SEQ ID NO: 3376 - protein, 11 aa, synthetic construct
  REGION 1..11: note = Description of Artificial Sequence: Synthetic peptide
SVVSKVVKVTI

SEQ ID NO: 3377 - protein, 10 aa, synthetic construct
  REGION 1..10: note = Description of Artificial Sequence: Synthetic peptide
SVYAWNRKRI

SEQ ID NO: 3378 - protein, 11 aa, synthetic construct
  REGION 1..11: note = Description of Artificial Sequence: Synthetic peptide
SVYPVASPNEC

SEQ ID NO: 3379 - protein, 8 aa, synthetic construct
  REGION 1..8: note = Description of Artificial Sequence: Synthetic peptide
SWFTALTQ

SEQ ID NO: 3380 - protein, 9 aa, synthetic construct
  REGION 1..9: note = Description of Artificial Sequence: Synthetic peptide
SWNLREMLA

SEQ ID NO: 3381 - protein, 9 aa, synthetic construct
  REGION 1..9: note = Description of Artificial Sequence: Synthetic peptide
SWQTGDFVK

SEQ ID NO: 3382 - protein, 10 aa, synthetic construct
  REGION 1..10: note = Description of Artificial Sequence: Synthetic peptide
SWQTGDFVKA

SEQ ID NO: 3383 - protein, 10 aa, synthetic construct
  REGION 1..10: note = Description of Artificial Sequence: Synthetic peptide
SYELQTPFEI

SEQ ID NO: 3384 - protein, 9 aa, synthetic construct
  REGION 1..9: note = Description of Artificial Sequence: Synthetic peptide
SYFAVHFIS

SEQ ID NO: 3385 - protein, 9 aa, synthetic construct
  REGION 1..9: note = Description of Artificial Sequence: Synthetic peptide
SYFTEQPID

SEQ ID NO: 3386 - protein, 9 aa, synthetic construct
  REGION 1..9: note = Description of Artificial Sequence: Synthetic peptide
SYFVVKRHT

SEQ ID NO: 3387 - protein, 8 aa, synthetic construct
  REGION 1..8: note = Description of Artificial Sequence: Synthetic peptide
SYREAACC

SEQ ID NO: 3388 - protein, 9 aa, synthetic construct
  REGION 1..9: note = Description of Artificial Sequence: Synthetic peptide
SYREAACCH

SEQ ID NO: 3389 - protein, 11 aa, synthetic construct
  REGION 1..11: note = Description of Artificial Sequence: Synthetic peptide
SYTTTIKPVTY

SEQ ID NO: 3390 - protein, 9 aa, synthetic construct
  REGION 1..9: note = Description of Artificial Sequence: Synthetic peptide
SYVGCHNKC

SEQ ID NO: 3391 - protein, 11 aa, synthetic construct
  REGION 1..11: note = Description of Artificial Sequence: Synthetic peptide
SYVGCHNKCAY

SEQ ID NO: 3392 - protein, 9 aa, synthetic construct
  REGION 1..9: note = Description of Artificial Sequence: Synthetic peptide
SYYCKSHKP

SEQ ID NO: 3393 - protein, 10 aa, synthetic construct
  REGION 1..10: note = Description of Artificial Sequence: Synthetic peptide
SYYSLLMPIL

SEQ ID NO: 3394 - protein, 8 aa, synthetic construct
  REGION 1..8: note = Description of Artificial Sequence: Synthetic peptide
TACSHAAV

SEQ ID NO: 3395 - protein, 11 aa, synthetic construct
  REGION 1..11: note = Description of Artificial Sequence: Synthetic peptide
TACTDDNALAY

SEQ ID NO: 3396 - protein, 9 aa, synthetic construct
  REGION 1..9: note = Description of Artificial Sequence: Synthetic peptide
TADIVVFDE

SEQ ID NO: 3397 - protein, 9 aa, synthetic construct
  REGION 1..9: note = Description of Artificial Sequence: Synthetic peptide
TAFVTNVNA

SEQ ID NO: 3398 - protein, 9 aa, synthetic construct
  REGION 1..9: note = Description of Artificial Sequence: Synthetic peptide
TAGAAAYYV

SEQ ID NO: 3399 - protein, 9 aa, synthetic construct
  REGION 1..9: note = Description of Artificial Sequence: Synthetic peptide
TALLTLQQI

SEQ ID NO: 3400 - protein, 11 aa, synthetic construct
  REGION 1..11: note = Description of Artificial Sequence: Synthetic peptide
TALLTLQQIEL

SEQ ID NO: 3401 - protein, 8 aa, synthetic construct
  REGION 1..8: note = Description of Artificial Sequence: Synthetic peptide
TALRLCAY

SEQ ID NO: 3402 - protein, 8 aa, synthetic construct
  REGION 1..8: note = Description of Artificial Sequence: Synthetic peptide
TANKWDLI

SEQ ID NO: 3403 - protein, 8 aa, synthetic construct
  REGION 1..8: note = Description of Artificial Sequence: Synthetic peptide
TAQNSVRV

SEQ ID NO: 3404 - protein, 8 aa, synthetic construct
  REGION 1..8: note = Description of Artificial Sequence: Synthetic peptide
TASALGKL

SEQ ID NO: 3405 - protein, 9 aa, synthetic construct
  REGION 1..9: note = Description of Artificial Sequence: Synthetic peptide
TASALGKLQ

SEQ ID NO: 3406 - protein, 8 aa, synthetic construct
  REGION 1..8: note = Description of Artificial Sequence: Synthetic peptide
TATIPIQA

SEQ ID NO: 3407 - protein, 10 aa, synthetic construct
  REGION 1..10: note = Description of Artificial Sequence: Synthetic peptide
TATIPIQASL

SEQ ID NO: 3408 - protein, 10 aa, synthetic construct
  REGION 1..10: note = Description of Artificial Sequence: Synthetic peptide
TAYANSVFNI

SEQ ID NO: 3409 - protein, 10 aa, synthetic construct
  REGION 1..10: note = Description of Artificial Sequence: Synthetic peptide
TAYNGYLTSS

SEQ ID NO: 3410 - protein, 10 aa, synthetic construct
  REGION 1..10: note = Description of Artificial Sequence: Synthetic peptide
TCASEYTGNY

SEQ ID NO: 3411 - protein, 8 aa, synthetic construct
  REGION 1..8: note = Description of Artificial Sequence: Synthetic peptide
TCATTRQV

SEQ ID NO: 3412 - protein, 9 aa, synthetic construct
  REGION 1..9: note = Description of Artificial Sequence: Synthetic peptide
TCATTRQVV

SEQ ID NO: 3413 - protein, 10 aa, synthetic construct
  REGION 1..10: note = Description of Artificial Sequence: Synthetic peptide
TCDWTNAGDY

SEQ ID NO: 3414 - protein, 10 aa, synthetic construct
  REGION 1..10: note = Description of Artificial Sequence: Synthetic peptide
TCFSTASDTY

SEQ ID NO: 3415 - protein, 9 aa, synthetic construct
  REGION 1..9: note = Description of Artificial Sequence: Synthetic peptide
TCGKQATKY

SEQ ID NO: 3416 - protein, 8 aa, synthetic construct
  REGION 1..8: note = Description of Artificial Sequence: Synthetic peptide
TCTERLKL

SEQ ID NO: 3417 - protein, 9 aa, synthetic construct
  REGION 1..9: note = Description of Artificial Sequence: Synthetic peptide
TDAQTGSSK

SEQ ID NO: 3418 - protein, 10 aa, synthetic construct
  REGION 1..10: note = Description of Artificial Sequence: Synthetic peptide
TDAVRDPQTL

SEQ ID NO: 3419 - protein, 8 aa, synthetic construct
  REGION 1..8: note = Description of Artificial Sequence: Synthetic peptide
TDFATSAC

SEQ ID NO: 3420 - protein, 8 aa, synthetic construct
  REGION 1..8: note = Description of Artificial Sequence: Synthetic peptide
TDFSRVSA

SEQ ID NO: 3421 - protein, 10 aa, synthetic construct
  REGION 1..10: note = Description of Artificial Sequence: Synthetic peptide
TDFSSEIIGY

SEQ ID NO: 3422 - protein, 8 aa, synthetic construct
  REGION 1..8: note = Description of Artificial Sequence: Synthetic peptide
TDFVNEFY

SEQ ID NO: 3423 - protein, 10 aa, synthetic construct
  REGION 1..10: note = Description of Artificial Sequence: Synthetic peptide
TDFVNEFYAY

SEQ ID NO: 3424 - protein, 10 aa, synthetic construct
  REGION 1..10: note = Description of Artificial Sequence: Synthetic peptide
TDGNKIADKY

SEQ ID NO: 3425 - protein, 8 aa, synthetic construct
  REGION 1..8: note = Description of Artificial Sequence: Synthetic peptide
TDLEGNFY

SEQ ID NO: 3426 - protein, 8 aa, synthetic construct
  REGION 1..8: note = Description of Artificial Sequence: Synthetic peptide
TDLMAAYV

SEQ ID NO: 3427 - protein, 8 aa, synthetic construct
  REGION 1..8: note = Description of Artificial Sequence: Synthetic peptide
TDLTKPYI

SEQ ID NO: 3428 - protein, 8 aa, synthetic construct
  REGION 1..8: note = Description of Artificial Sequence: Synthetic peptide
TDQSSYIV

SEQ ID NO: 3429 - protein, 10 aa, synthetic construct
  REGION 1..10: note = Description of Artificial Sequence: Synthetic peptide
TDYKHWPQIA

SEQ ID NO: 3430 - protein, 9 aa, synthetic construct
  REGION 1..9: note = Description of Artificial Sequence: Synthetic peptide
TECSNLLLQ

SEQ ID NO: 3431 - protein, 12 aa, synthetic construct
  REGION 1..12: note = Description of Artificial Sequence: Synthetic peptide
TEDDYQGKPLEF

SEQ ID NO: 3432 - protein, 11 aa, synthetic construct
  REGION 1..11: note = Description of Artificial Sequence: Synthetic peptide
TEERLKLFDRY

SEQ ID NO: 3433 - protein, 8 aa, synthetic construct
  REGION 1..8: note = Description of Artificial Sequence: Synthetic peptide
TEEVGHTD

SEQ ID NO: 3434 - protein, 10 aa, synthetic construct
  REGION 1..10: note = Description of Artificial Sequence: Synthetic peptide
TEEVGHTDLM

SEQ ID NO: 3435 - protein, 11 aa, synthetic construct
  REGION 1..11: note = Description of Artificial Sequence: Synthetic peptide
TEEVGHTDLMA

SEQ ID NO: 3436 - protein, 8 aa, synthetic construct
  REGION 1..8: note = Description of Artificial Sequence: Synthetic peptide
TEEVVLKT

SEQ ID NO: 3437 - protein, 9 aa, synthetic construct
  REGION 1..9: note = Description of Artificial Sequence: Synthetic peptide
TEEVVLKTG

SEQ ID NO: 3438 - protein, 8 aa, synthetic construct
  REGION 1..8: note = Description of Artificial Sequence: Synthetic peptide
TEGLCVDI

SEQ ID NO: 3439 - protein, 11 aa, synthetic construct
  REGION 1..11: note = Description of Artificial Sequence: Synthetic peptide
TEGLCVDIPGI

SEQ ID NO: 3440 - protein, 8 aa, synthetic construct
  REGION 1..8: note = Description of Artificial Sequence: Synthetic peptide
TEHSWNAD

SEQ ID NO: 3441 - protein, 9 aa, synthetic construct
  REGION 1..9: note = Description of Artificial Sequence: Synthetic peptide
TEIYQAGST

SEQ ID NO: 3442 - protein, 9 aa, synthetic construct
  REGION 1..9: note = Description of Artificial Sequence: Synthetic peptide
TEKSNIIRG

SEQ ID NO: 3443 - protein, 8 aa, synthetic construct
  REGION 1..8: note = Description of Artificial Sequence: Synthetic peptide
TEKWESGV

SEQ ID NO: 3444 - protein, 8 aa, synthetic construct
  REGION 1..8: note = Description of Artificial Sequence: Synthetic peptide
TELEPPCR

SEQ ID NO: 3445 - protein, 9 aa, synthetic construct
  REGION 1..9: note = Description of Artificial Sequence: Synthetic peptide
TEMLAKALR

SEQ ID NO: 3446 - protein, 11 aa, synthetic construct
  REGION 1..11: note = Description of Artificial Sequence: Synthetic peptide
TEMLAKALRKV

SEQ ID NO: 3447 - protein, 8 aa, synthetic construct
  REGION 1..8: note = Description of Artificial Sequence: Synthetic peptide
TENLTKEG

SEQ ID NO: 3448 - protein, 8 aa, synthetic construct
  REGION 1..8: note = Description of Artificial Sequence: Synthetic peptide
TERSEKSY

SEQ ID NO: 3449 - protein, 8 aa, synthetic construct
  REGION 1..8: note = Description of Artificial Sequence: Synthetic peptide
TETDLTKG

SEQ ID NO: 3450 - protein, 8 aa, synthetic construct
  REGION 1..8: note = Description of Artificial Sequence: Synthetic peptide
TEVNEFAC

SEQ ID NO: 3451 - protein, 8 aa, synthetic construct
  REGION 1..8: note = Description of Artificial Sequence: Synthetic peptide
TEVPVAIH

SEQ ID NO: 3452 - protein, 11 aa, synthetic construct
  REGION 1..11: note = Description of Artificial Sequence: Synthetic peptide
TEVVGDIILKP

SEQ ID NO: 3453 - protein, 8 aa, synthetic construct
  REGION 1..8: note = Description of Artificial Sequence: Synthetic peptide
TFDSEYCR

SEQ ID NO: 3454 - protein, 9 aa, synthetic construct
  REGION 1..9: note = Description of Artificial Sequence: Synthetic peptide
TFDSEYCRH

SEQ ID NO: 3455 - protein, 8 aa, synthetic construct
  REGION 1..8: note = Description of Artificial Sequence: Synthetic peptide
TFEEAALC

SEQ ID NO: 3456 - protein, 8 aa, synthetic construct
  REGION 1..8: note = Description of Artificial Sequence: Synthetic peptide
TFELDERI

SEQ ID NO: 3457 - protein, 8 aa, synthetic construct
  REGION 1..8: note = Description of Artificial Sequence: Synthetic peptide
TFFIYNKI

SEQ ID NO: 3458 - protein, 9 aa, synthetic construct
  REGION 1..9: note = Description of Artificial Sequence: Synthetic peptide
TFFIYNKIV

SEQ ID NO: 3459 - protein, 10 aa, synthetic construct
  REGION 1..10: note = Description of Artificial Sequence: Synthetic peptide
TFFIYNKIVD

SEQ ID NO: 3460 - protein, 8 aa, synthetic construct
  REGION 1..8: note = Description of Artificial Sequence: Synthetic peptide
TFFKLVNK

SEQ ID NO: 3461 - protein, 9 aa, synthetic construct
  REGION 1..9: note = Description of Artificial Sequence: Synthetic peptide
TFFPDLNGD

SEQ ID NO: 3462 - protein, 8 aa, synthetic construct
  REGION 1..8: note = Description of Artificial Sequence: Synthetic peptide
TFHLDGEV

SEQ ID NO: 3463 - protein, 11 aa, synthetic construct
  REGION 1..11: note = Description of Artificial Sequence: Synthetic peptide
TFHLDGEVITF

SEQ ID NO: 3464 - protein, 11 aa, synthetic construct
  REGION 1..11: note = Description of Artificial Sequence: Synthetic peptide
TFKVSIWNLDY

SEQ ID NO: 3465 - protein, 10 aa, synthetic construct
  REGION 1..10: note = Description of Artificial Sequence: Synthetic peptide
TFLKKDAPYI

SEQ ID NO: 3466 - protein, 10 aa, synthetic construct
  REGION 1..10: note = Description of Artificial Sequence: Synthetic peptide
TFNGECPNFV

SEQ ID NO: 3467 - protein, 11 aa, synthetic construct
  REGION 1..11: note = Description of Artificial Sequence: Synthetic peptide
TFNGECPNFVF

SEQ ID NO: 3468 - protein, 8 aa, synthetic construct
  REGION 1..8: note = Description of Artificial Sequence: Synthetic peptide
TFNVPMEK

SEQ ID NO: 3469 - protein, 9 aa, synthetic construct
  REGION 1..9: note = Description of Artificial Sequence: Synthetic peptide
TFSSTFNVP

SEQ ID NO: 3470 - protein, 9 aa, synthetic construct
  REGION 1..9: note = Description of Artificial Sequence: Synthetic peptide
TFTYASALW

SEQ ID NO: 3471 - protein, 11 aa, synthetic construct
  REGION 1..11: note = Description of Artificial Sequence: Synthetic peptide
TFVTHSKGLYR

SEQ ID NO: 3472 - protein, 9 aa, synthetic construct
  REGION 1..9: note = Description of Artificial Sequence: Synthetic peptide
TGDFVKATC

SEQ ID NO: 3473 - protein, 9 aa, synthetic construct
  REGION 1..9: note = Description of Artificial Sequence: Synthetic peptide
TGDLQPLEQ

SEQ ID NO: 3474 - protein, 8 aa, synthetic construct
  REGION 1..8: note = Description of Artificial Sequence: Synthetic peptide
TGDSCNNY

SEQ ID NO: 3475 - protein, 9 aa, synthetic construct
  REGION 1..9: note = Description of Artificial Sequence: Synthetic peptide
TGDSCNNYM

SEQ ID NO: 3476 - protein, 9 aa, synthetic construct
  REGION 1..9: note = Description of Artificial Sequence: Synthetic peptide
TGKIADYNY

SEQ ID NO: 3477 - protein, 9 aa, synthetic construct
  REGION 1..9: note = Description of Artificial Sequence: Synthetic peptide
TGLLMPLKA

SEQ ID NO: 3478 - protein, 9 aa, synthetic construct
  REGION 1..9: note = Description of Artificial Sequence: Synthetic peptide
TGLYPTLNI

SEQ ID NO: 3479 - protein, 8 aa, synthetic construct
  REGION 1..8: note = Description of Artificial Sequence: Synthetic peptide
TGNTLQCI

SEQ ID NO: 3480 - protein, 9 aa, synthetic construct
  REGION 1..9: note = Description of Artificial Sequence: Synthetic peptide
TGNYQCGHY

SEQ ID NO: 3481 - protein, 9 aa, synthetic construct
  REGION 1..9: note = Description of Artificial Sequence: Synthetic peptide
TGQAITVTP

SEQ ID NO: 3482 - protein, 10 aa, synthetic construct
  REGION 1..10: note = Description of Artificial Sequence: Synthetic peptide
TGRLQSLQTY

SEQ ID NO: 3483 - protein, 8 aa, synthetic construct
  REGION 1..8: note = Description of Artificial Sequence: Synthetic peptide
TGYRVTKN

SEQ ID NO: 3484 - protein, 10 aa, synthetic construct
  REGION 1..10: note = Description of Artificial Sequence: Synthetic peptide
THDVSSAINR

SEQ ID NO: 3485 - protein, 11 aa, synthetic construct
  REGION 1..11: note = Description of Artificial Sequence: Synthetic peptide
THDVSSAINRP

SEQ ID NO: 3486 - protein, 9 aa, synthetic construct
  REGION 1..9: note = Description of Artificial Sequence: Synthetic peptide
THGLNLEEA

SEQ ID NO: 3487 - protein, 9 aa, synthetic construct
  REGION 1..9: note = Description of Artificial Sequence: Synthetic peptide
THSDKFTDG

SEQ ID NO: 3488 - protein, 9 aa, synthetic construct
  REGION 1..9: note = Description of Artificial Sequence: Synthetic peptide
THWFVTQRN

SEQ ID NO: 3489 - protein, 10 aa, synthetic construct
  REGION 1..10: note = Description of Artificial Sequence: Synthetic peptide
THWFVTQRNF

SEQ ID NO: 3490 - protein, 10 aa, synthetic construct
  REGION 1..10: note = Description of Artificial Sequence: Synthetic peptide
TIAEILLIIM

SEQ ID NO: 3491 - protein, 10 aa, synthetic construct
  REGION 1..10: note = Description of Artificial Sequence: Synthetic peptide
TIAKNTVKSV

SEQ ID NO: 3492 - protein, 9 aa, synthetic construct
  REGION 1..9: note = Description of Artificial Sequence: Synthetic peptide
TIANYAKPF

SEQ ID NO: 3493 - protein, 10 aa, synthetic construct
  REGION 1..10: note = Description of Artificial Sequence: Synthetic peptide
TIATYCTGSI

SEQ ID NO: 3494 - protein, 11 aa, synthetic construct
  REGION 1..11: note = Description of Artificial Sequence: Synthetic peptide
TIAYIICISTK

SEQ ID NO: 3495 - protein, 10 aa, synthetic construct
  REGION 1..10: note = Description of Artificial Sequence: Synthetic peptide
TIDGSSGVVN

SEQ ID NO: 3496 - protein, 11 aa, synthetic construct
  REGION 1..11: note = Description of Artificial Sequence: Synthetic peptide
TIEYPIIGDEL

SEQ ID NO: 3497 - protein, 8 aa, synthetic construct
  REGION 1..8: note = Description of Artificial Sequence: Synthetic peptide
TIGPDMFL

SEQ ID NO: 3498 - protein, 10 aa, synthetic construct
  REGION 1..10: note = Description of Artificial Sequence: Synthetic peptide
TIKKPNELSR

SEQ ID NO: 3499 - protein, 9 aa, synthetic construct
  REGION 1..9: note = Description of Artificial Sequence: Synthetic peptide
TIKVFTTVD

SEQ ID NO: 3500 - protein, 8 aa, synthetic construct
  REGION 1..8: note = Description of Artificial Sequence: Synthetic peptide
TILGSALL

SEQ ID NO: 3501 - protein, 10 aa, synthetic construct
  REGION 1..10: note = Description of Artificial Sequence: Synthetic peptide
TILRKGGRTI

SEQ ID NO: 3502 - protein, 8 aa, synthetic construct
  REGION 1..8: note = Description of Artificial Sequence: Synthetic peptide
TILTSLLV

SEQ ID NO: 3503 - protein, 10 aa, synthetic construct
  REGION 1..10: note = Description of Artificial Sequence: Synthetic peptide
TILTSLLVLV

SEQ ID NO: 3504 - protein, 9 aa, synthetic construct
  REGION 1..9: note = Description of Artificial Sequence: Synthetic peptide
TIQRKYKGI

SEQ ID NO: 3505 - protein, 8 aa, synthetic construct
  REGION 1..8: note = Description of Artificial Sequence: Synthetic peptide
TISVTTEI

SEQ ID NO: 3506 - protein, 9 aa, synthetic construct
  REGION 1..9: note = Description of Artificial Sequence: Synthetic peptide
TITVEELKK

SEQ ID NO: 3507 - protein, 8 aa, synthetic construct
  REGION 1..8: note = Description of Artificial Sequence: Synthetic peptide
TIYNLLKD

SEQ ID NO: 3508 - protein, 8 aa, synthetic construct
  REGION 1..8: note = Description of Artificial Sequence: Synthetic peptide
TIYSLLLC

SEQ ID NO: 3509 - protein, 8 aa, synthetic construct
  REGION 1..8: note = Description of Artificial Sequence: Synthetic peptide
TKAIVSTI

SEQ ID NO: 3510 - protein, 10 aa, synthetic construct
  REGION 1..10: note = Description of Artificial Sequence: Synthetic peptide
TKAIVSTIQR

SEQ ID NO: 3511 - protein, 8 aa, synthetic construct
  REGION 1..8: note = Description of Artificial Sequence: Synthetic peptide
TKFKTEGL

SEQ ID NO: 3512 - protein, 10 aa, synthetic construct
  REGION 1..10: note = Description of Artificial Sequence: Synthetic peptide
TKFLTENLLL

SEQ ID NO: 3513 - protein, 11 aa, synthetic construct
  REGION 1..11: note = Description of Artificial Sequence: Synthetic peptide
TKFLTENLLLY

SEQ ID NO: 3514 - protein, 8 aa, synthetic construct
  REGION 1..8: note = Description of Artificial Sequence: Synthetic peptide
TKGGRFVL

SEQ ID NO: 3515 - protein, 9 aa, synthetic construct
  REGION 1..9: note = Description of Artificial Sequence: Synthetic peptide
TKGSLPINV

SEQ ID NO: 3516 - protein, 9 aa, synthetic construct
  REGION 1..9: note = Description of Artificial Sequence: Synthetic peptide
TKGTLEPEY

SEQ ID NO: 3517 - protein, 11 aa, synthetic construct
  REGION 1..11: note = Description of Artificial Sequence: Synthetic peptide
TKHFYWFFSNY

SEQ ID NO: 3518 - protein, 9 aa, synthetic construct
  REGION 1..9: note = Description of Artificial Sequence: Synthetic peptide
TKIKPHNSH

SEQ ID NO: 3519 - protein, 8 aa, synthetic construct
  REGION 1..8: note = Description of Artificial Sequence: Synthetic peptide
TKMSECVL

SEQ ID NO: 3520 - protein, 11 aa, synthetic construct
  REGION 1..11: note = Description of Artificial Sequence: Synthetic peptide
TKNSKVQIGEY

SEQ ID NO: 3521 - protein, 9 aa, synthetic construct
  REGION 1..9: note = Description of Artificial Sequence: Synthetic peptide
TKRFDNPVL

SEQ ID NO: 3522 - protein, 9 aa, synthetic construct
  REGION 1..9: note = Description of Artificial Sequence: Synthetic peptide
TKTSVDCTM

SEQ ID NO: 3523 - protein, 10 aa, synthetic construct
  REGION 1..10: note = Description of Artificial Sequence: Synthetic peptide
TKTSVDCTMY

SEQ ID NO: 3524 - protein, 10 aa, synthetic construct
  REGION 1..10: note = Description of Artificial Sequence: Synthetic peptide
TKYTMADLVY

SEQ ID NO: 3525 - protein, 11 aa, synthetic construct
  REGION 1..11: note = Description of Artificial Sequence: Synthetic peptide
TLACFVLAAVY

SEQ ID NO: 3526 - protein, 10 aa, synthetic construct
  REGION 1..10: note = Description of Artificial Sequence: Synthetic peptide
TLADAGFIKQ

SEQ ID NO: 3527 - protein, 10 aa, synthetic construct
  REGION 1..10: note = Description of Artificial Sequence: Synthetic peptide
TLAILTALRL

SEQ ID NO: 3528 - protein, 8 aa, synthetic construct
  REGION 1..8: note = Description of Artificial Sequence: Synthetic peptide
TLDNQDLN

SEQ ID NO: 3529 - protein, 9 aa, synthetic construct
  REGION 1..9: note = Description of Artificial Sequence: Synthetic peptide
TLEETKFLT

SEQ ID NO: 3530 - protein, 9 aa, synthetic construct
  REGION 1..9: note = Description of Artificial Sequence: Synthetic peptide
TLETAQNSV

SEQ ID NO: 3531 - protein, 10 aa, synthetic construct
  REGION 1..10: note = Description of Artificial Sequence: Synthetic peptide
TLKEILVTYN

SEQ ID NO: 3532 - protein, 9 aa, synthetic construct
  REGION 1..9: note = Description of Artificial Sequence: Synthetic peptide
TLKGVEAVM

SEQ ID NO: 3533 - protein, 10 aa, synthetic construct
  REGION 1..10: note = Description of Artificial Sequence: Synthetic peptide
TLKQGEIKDA

SEQ ID NO: 3534 - protein, 8 aa, synthetic construct
  REGION 1..8: note = Description of Artificial Sequence: Synthetic peptide
TLKSFTVE

SEQ ID NO: 3535 - protein, 10 aa, synthetic construct
  REGION 1..10: note = Description of Artificial Sequence: Synthetic peptide
TLLALHRSYL

SEQ ID NO: 3536 - protein, 8 aa, synthetic construct
  REGION 1..8: note = Description of Artificial Sequence: Synthetic peptide
TLLFLMSF

SEQ ID NO: 3537 - protein, 11 aa, synthetic construct
  REGION 1..11: note = Description of Artificial Sequence: Synthetic peptide
TLLLQLCTFTR

SEQ ID NO: 3538 - protein, 8 aa, synthetic construct
  REGION 1..8: note = Description of Artificial Sequence: Synthetic peptide
TLLTKGTL

SEQ ID NO: 3539 - protein, 11 aa, synthetic construct
  REGION 1..11: note = Description of Artificial Sequence: Synthetic peptide
TLNDFNLVAMK

SEQ ID NO: 3540 - protein, 9 aa, synthetic construct
  REGION 1..9: note = Description of Artificial Sequence: Synthetic peptide
TLPKGFYAE

SEQ ID NO: 3541 - protein, 8 aa, synthetic construct
  REGION 1..8: note = Description of Artificial Sequence: Synthetic peptide
TLPKGIMM

SEQ ID NO: 3542 - protein, 9 aa, synthetic construct
  REGION 1..9: note = Description of Artificial Sequence: Synthetic peptide
TLPKGIMMN

SEQ ID NO: 3543 - protein, 11 aa, synthetic construct
  REGION 1..11: note = Description of Artificial Sequence: Synthetic peptide
TLPTEVLTEEV

SEQ ID NO: 3544 - protein, 9 aa, synthetic construct
  REGION 1..9: note = Description of Artificial Sequence: Synthetic peptide
TLVKQLSSN

SEQ ID NO: 3545 - protein, 8 aa, synthetic construct
  REGION 1..8: note = Description of Artificial Sequence: Synthetic peptide
TLVPQEHY

SEQ ID NO: 3546 - protein, 10 aa, synthetic construct
  REGION 1..10: note = Description of Artificial Sequence: Synthetic peptide
TLVTMPLGYV

SEQ ID NO: 3547 - protein, 10 aa, synthetic construct
  REGION 1..10: note = Description of Artificial Sequence: Synthetic peptide
TLYCIDGALL

SEQ ID NO: 3548 - protein, 8 aa, synthetic construct
  REGION 1..8: note = Description of Artificial Sequence: Synthetic peptide
TMADLVYA

SEQ ID NO: 3549 - protein, 8 aa, synthetic construct
  REGION 1..8: note = Description of Artificial Sequence: Synthetic peptide
TMLFTMLR

SEQ ID NO: 3550 - protein, 10 aa, synthetic construct
  REGION 1..10: note = Description of Artificial Sequence: Synthetic peptide
TMLVKQGDDY

SEQ ID NO: 3551 - protein, 9 aa, synthetic construct
  REGION 1..9: note = Description of Artificial Sequence: Synthetic peptide
TMPLGYVTH

SEQ ID NO: 3552 - protein, 9 aa, synthetic construct
  REGION 1..9: note = Description of Artificial Sequence: Synthetic peptide
TNDNTSRYW

SEQ ID NO: 3553 - protein, 9 aa, synthetic construct
  REGION 1..9: note = Description of Artificial Sequence: Synthetic peptide
TNDVSFLAH

SEQ ID NO: 3554 - protein, 8 aa, synthetic construct
  REGION 1..8: note = Description of Artificial Sequence: Synthetic peptide
TNGDFLHF

SEQ ID NO: 3555 - protein, 8 aa, synthetic construct
  REGION 1..8: note = Description of Artificial Sequence: Synthetic peptide
TNGTKRFD

SEQ ID NO: 3556 - protein, 9 aa, synthetic construct
  REGION 1..9: note = Description of Artificial Sequence: Synthetic peptide
TNGVGYQPY

SEQ ID NO: 3557 - protein, 8 aa, synthetic construct
  REGION 1..8: note = Description of Artificial Sequence: Synthetic peptide
TNIFGTVY

SEQ ID NO: 3558 - protein, 10 aa, synthetic construct
  REGION 1..10: note = Description of Artificial Sequence: Synthetic peptide
TNIFGTVYEK

SEQ ID NO: 3559 - protein, 8 aa, synthetic construct
  REGION 1..8: note = Description of Artificial Sequence: Synthetic peptide
TNMFTPLI

SEQ ID NO: 3560 - protein, 9 aa, synthetic construct
  REGION 1..9: note = Description of Artificial Sequence: Synthetic peptide
TNNVAFQTV

SEQ ID NO: 3561 - protein, 9 aa, synthetic construct
  REGION 1..9: note = Description of Artificial Sequence: Synthetic peptide
TNSFTRGVY

SEQ ID NO: 3562 - protein, 8 aa, synthetic construct
  REGION 1..8: note = Description of Artificial Sequence: Synthetic peptide
TNSPRRAR

SEQ ID NO: 3563 - protein, 9 aa, synthetic construct
  REGION 1..9: note = Description of Artificial Sequence: Synthetic peptide
TNSSPDDQI

SEQ ID NO: 3564 - protein, 9 aa, synthetic construct
  REGION 1..9: note = Description of Artificial Sequence: Synthetic peptide
TNVLEGSVA

SEQ ID NO: 3565 - protein, 8 aa, synthetic construct
  REGION 1..8: note = Description of Artificial Sequence: Synthetic peptide
TPAFDKSA

SEQ ID NO: 3566 - protein, 10 aa, synthetic construct
  REGION 1..10: note = Description of Artificial Sequence: Synthetic peptide
TPEANMDQES

SEQ ID NO: 3567 - protein, 9 aa, synthetic construct
  REGION 1..9: note = Description of Artificial Sequence: Synthetic peptide
TPGDSSSGW

SEQ ID NO: 3568 - protein, 10 aa, synthetic construct
  REGION 1..10: note = Description of Artificial Sequence: Synthetic peptide
TPGSSRGTSP

SEQ ID NO: 3569 - protein, 8 aa, synthetic construct
  REGION 1..8: note = Description of Artificial Sequence: Synthetic peptide
TPKDHIGT

SEQ ID NO: 3570 - protein, 12 aa, synthetic construct
  REGION 1..12: note = Description of Artificial Sequence: Synthetic peptide
TPKDHIGTRNPA

SEQ ID NO: 3571 - protein, 8 aa, synthetic construct
  REGION 1..8: note = Description of Artificial Sequence: Synthetic peptide
TPKYKFVR

SEQ ID NO: 3572 - protein, 10 aa, synthetic construct
  REGION 1..10: note = Description of Artificial Sequence: Synthetic peptide
TPKYKFVRIQ

SEQ ID NO: 3573 - protein, 8 aa, synthetic construct
  REGION 1..8: note = Description of Artificial Sequence: Synthetic peptide
TPLVPFWI

SEQ ID NO: 3574 - protein, 11 aa, synthetic construct
  REGION 1..11: note = Description of Artificial Sequence: Synthetic peptide
TPLVPFWITIA

SEQ ID NO: 3575 - protein, 12 aa, synthetic construct
  REGION 1..12: note = Description of Artificial Sequence: Synthetic peptide
TPLVPFWITIAY

SEQ ID NO: 3576 - protein, 10 aa, synthetic construct
  REGION 1..10: note = Description of Artificial Sequence: Synthetic peptide
TPNNTDFSRV

SEQ ID NO: 3577 - protein, 8 aa, synthetic construct
  REGION 1..8: note = Description of Artificial Sequence: Synthetic peptide
TPRDLGAC

SEQ ID NO: 3578 - protein, 11 aa, synthetic construct
  REGION 1..11: note = Description of Artificial Sequence: Synthetic peptide
TPSFKKGAKLL

SEQ ID NO: 3579 - protein, 9 aa, synthetic construct
  REGION 1..9: note = Description of Artificial Sequence: Synthetic peptide
TPSKLIEYT

SEQ ID NO: 3580 - protein, 11 aa, synthetic construct
  REGION 1..11: note = Description of Artificial Sequence: Synthetic peptide
TPVYSFLPGVY

SEQ ID NO: 3581 - protein, 8 aa, synthetic construct
  REGION 1..8: note = Description of Artificial Sequence: Synthetic peptide
TQEVFAQV

SEQ ID NO: 3582 - protein, 8 aa, synthetic construct
  REGION 1..8: note = Description of Artificial Sequence: Synthetic peptide
TQFNYYKK

SEQ ID NO: 3583 - protein, 10 aa, synthetic construct
  REGION 1..10: note = Description of Artificial Sequence: Synthetic peptide
TQGNFGDQEL

SEQ ID NO: 3584 - protein, 11 aa, synthetic construct
  REGION 1..11: note = Description of Artificial Sequence: Synthetic peptide
TQGNFGDQELI

SEQ ID NO: 3585 - protein, 10 aa, synthetic construct
  REGION 1..10: note = Description of Artificial Sequence: Synthetic peptide
TQHGKEDLKF

SEQ ID NO: 3586 - protein, 11 aa, synthetic construct
  REGION 1..11: note = Description of Artificial Sequence: Synthetic peptide
TQLPPAYTNSF

SEQ ID NO: 3587 - protein, 9 aa, synthetic construct
  REGION 1..9: note = Description of Artificial Sequence: Synthetic peptide
TQLSTDTGV

SEQ ID NO: 3588 - protein, 11 aa, synthetic construct
  REGION 1..11: note = Description of Artificial Sequence: Synthetic peptide
TQLYLGGMSYY

SEQ ID NO: 3589 - protein, 8 aa, synthetic construct
  REGION 1..8: note = Description of Artificial Sequence: Synthetic peptide
TQQLIRAA

SEQ ID NO: 3590 - protein, 10 aa, synthetic construct
  REGION 1..10: note = Description of Artificial Sequence: Synthetic peptide
TQRNFYEPQI

SEQ ID NO: 3591 - protein, 9 aa, synthetic construct
  REGION 1..9: note = Description of Artificial Sequence: Synthetic peptide
TQSLLIVNN

SEQ ID NO: 3592 - protein, 11 aa, synthetic construct
  REGION 1..11: note = Description of Artificial Sequence: Synthetic peptide
TQYEYGTEDDY

SEQ ID NO: 3593 - protein, 9 aa, synthetic construct
  REGION 1..9: note = Description of Artificial Sequence: Synthetic peptide
TRAGCLIGA

SEQ ID NO: 3594 - protein, 9 aa, synthetic construct
  REGION 1..9: note = Description of Artificial Sequence: Synthetic peptide
TRCLAVHEC

SEQ ID NO: 3595 - protein, 9 aa, synthetic construct
  REGION 1..9: note = Description of Artificial Sequence: Synthetic peptide
TRCNLGGAV

SEQ ID NO: 3596 - protein, 8 aa, synthetic construct
  REGION 1..8: note = Description of Artificial Sequence: Synthetic peptide
TRDIASTD

SEQ ID NO: 3597 - protein, 9 aa, synthetic construct
  REGION 1..9: note = Description of Artificial Sequence: Synthetic peptide
TRDIASTDT

SEQ ID NO: 3598 - protein, 11 aa, synthetic construct
  REGION 1..11: note = Description of Artificial Sequence: Synthetic peptide
TRDIASTDTCF

SEQ ID NO: 3599 - protein, 8 aa, synthetic construct
  REGION 1..8: note = Description of Artificial Sequence: Synthetic peptide
TREVGFVV

SEQ ID NO: 3600 - protein, 11 aa, synthetic construct
  REGION 1..11: note = Description of Artificial Sequence: Synthetic peptide
TRFASVYAWNR

SEQ ID NO: 3601 - protein, 10 aa, synthetic construct
  REGION 1..10: note = Description of Artificial Sequence: Synthetic peptide
TRFQTLLALH

SEQ ID NO: 3602 - protein, 11 aa, synthetic construct
  REGION 1..11: note = Description of Artificial Sequence: Synthetic peptide
TRFQTLLALHR

SEQ ID NO: 3603 - protein, 9 aa, synthetic construct
  REGION 1..9: note = Description of Artificial Sequence: Synthetic peptide
TRGATVVIG

SEQ ID NO: 3604 - protein, 9 aa, synthetic construct
  REGION 1..9: note = Description of Artificial Sequence: Synthetic peptide
TRKLMPVCV

SEQ ID NO: 3605 - protein, 11 aa, synthetic construct
  REGION 1..11: note = Description of Artificial Sequence: Synthetic peptide
TRLQSLENVAF

SEQ ID NO: 3606 - protein, 9 aa, synthetic construct
  REGION 1..9: note = Description of Artificial Sequence: Synthetic peptide
TRNPANNAA

SEQ ID NO: 3607 - protein, 11 aa, synthetic construct
  REGION 1..11: note = Description of Artificial Sequence: Synthetic peptide
TRNPAWRKAVF

SEQ ID NO: 3608 - protein, 9 aa, synthetic construct
  REGION 1..9: note = Description of Artificial Sequence: Synthetic peptide
TRQVVNVVT

SEQ ID NO: 3609 - protein, 8 aa, synthetic construct
  REGION 1..8: note = Description of Artificial Sequence: Synthetic peptide
TRSTNSRI

SEQ ID NO: 3610 - protein, 9 aa, synthetic construct
  REGION 1..9: note = Description of Artificial Sequence: Synthetic peptide
TRYVDNNFC

SEQ ID NO: 3611 - protein, 9 aa, synthetic construct
  REGION 1..9: note = Description of Artificial Sequence: Synthetic peptide
TSALLAGTI

SEQ ID NO: 3612 - protein, 8 aa, synthetic construct
  REGION 1..8: note = Description of Artificial Sequence: Synthetic peptide
TSAMQTML

SEQ ID NO: 3613 - protein, 11 aa, synthetic construct
  REGION 1..11: note = Description of Artificial Sequence: Synthetic peptide
TSDLATNNLVV

SEQ ID NO: 3614 - protein, 11 aa, synthetic construct
  REGION 1..11: note = Description of Artificial Sequence: Synthetic peptide
TSFGPLVRKIF

SEQ ID NO: 3615 - protein, 8 aa, synthetic construct
  REGION 1..8: note = Description of Artificial Sequence: Synthetic peptide
TSGDGTTS

SEQ ID NO: 3616 - protein, 8 aa, synthetic construct
  REGION 1..8: note = Description of Artificial Sequence: Synthetic peptide
TSHTVMPL

SEQ ID NO: 3617 - protein, 9 aa, synthetic construct
  REGION 1..9: note = Description of Artificial Sequence: Synthetic peptide
TSITSAVLQ

SEQ ID NO: 3618 - protein, 10 aa, synthetic construct
  REGION 1..10: note = Description of Artificial Sequence: Synthetic peptide
TSLEIPRRNV

SEQ ID NO: 3619 - protein, 8 aa, synthetic construct
  REGION 1..8: note = Description of Artificial Sequence: Synthetic peptide
TSLLVLVQ

SEQ ID NO: 3620 - protein, 8 aa, synthetic construct
  REGION 1..8: note = Description of Artificial Sequence: Synthetic peptide
TSNPTTFH

SEQ ID NO: 3621 - protein, 10 aa, synthetic construct
  REGION 1..10: note = Description of Artificial Sequence: Synthetic peptide
TSNPTTFHLD

SEQ ID NO: 3622 - protein, 9 aa, synthetic construct
  REGION 1..9: note = Description of Artificial Sequence: Synthetic peptide
TSPDVDLGD

SEQ ID NO: 3623 - protein, 8 aa, synthetic construct
  REGION 1..8: note = Description of Artificial Sequence: Synthetic peptide
TSQWLTNI

SEQ ID NO: 3624 - protein, 9 aa, synthetic construct
  REGION 1..9: note = Description of Artificial Sequence: Synthetic peptide
TSQWLTNIF

SEQ ID NO: 3625 - protein, 9 aa, synthetic construct
  REGION 1..9: note = Description of Artificial Sequence: Synthetic peptide
TSSIVITSG

SEQ ID NO: 3626 - protein, 9 aa, synthetic construct
  REGION 1..9: note = Description of Artificial Sequence: Synthetic peptide
TSTDVVYRA

SEQ ID NO: 3627 - protein, 10 aa, synthetic construct
  REGION 1..10: note = Description of Artificial Sequence: Synthetic peptide
TSWQTGDFVK

SEQ ID NO: 3628 - protein, 8 aa, synthetic construct
  REGION 1..8: note = Description of Artificial Sequence: Synthetic peptide
TTAAKLMV

SEQ ID NO: 3629 - protein, 11 aa, synthetic construct
  REGION 1..11: note = Description of Artificial Sequence: Synthetic peptide
TTADIVVFDEI

SEQ ID NO: 3630 - protein, 9 aa, synthetic construct
  REGION 1..9: note = Description of Artificial Sequence: Synthetic peptide
TTAPAICHD

SEQ ID NO: 3631 - protein, 11 aa, synthetic construct
  REGION 1..11: note = Description of Artificial Sequence: Synthetic peptide
TTAPAICHDGK

SEQ ID NO: 3632 - protein, 8 aa, synthetic construct
  REGION 1..8: note = Description of Artificial Sequence: Synthetic peptide
TTAYANSV

SEQ ID NO: 3633 - protein, 8 aa, synthetic construct
  REGION 1..8: note = Description of Artificial Sequence: Synthetic peptide
TTDNTFVS

SEQ ID NO: 3634 - protein, 11 aa, synthetic construct
  REGION 1..11: note = Description of Artificial Sequence: Synthetic peptide
TTDPSFLGRYM

SEQ ID NO: 3635 - protein, 10 aa, synthetic construct
  REGION 1..10: note = Description of Artificial Sequence: Synthetic peptide
TTEMLAKALR

SEQ ID NO: 3636 - protein, 8 aa, synthetic construct
  REGION 1..8: note = Description of Artificial Sequence: Synthetic peptide
TTETAHSC

SEQ ID NO: 3637 - protein, 11 aa, synthetic construct
  REGION 1..11: note = Description of Artificial Sequence: Synthetic peptide
TTEVVGDIILK

SEQ ID NO: 3638 - protein, 9 aa, synthetic construct
  REGION 1..9: note = Description of Artificial Sequence: Synthetic peptide
TTFHLDGEV

SEQ ID NO: 3639 - protein, 10 aa, synthetic construct
  REGION 1..10: note = Description of Artificial Sequence: Synthetic peptide
TTFHLDGEVI

SEQ ID NO: 3640 - protein, 12 aa, synthetic construct
  REGION 1..12: note = Description of Artificial Sequence: Synthetic peptide
TTFHLDGEVITF

SEQ ID NO: 3641 - protein, 8 aa, synthetic construct
  REGION 1..8: note = Description of Artificial Sequence: Synthetic peptide
TTKGGRFV

SEQ ID NO: 3642 - protein, 12 aa, synthetic construct
  REGION 1..12: note = Description of Artificial Sequence: Synthetic peptide
TTLPVNVAFELW

SEQ ID NO: 3643 - protein, 11 aa, synthetic construct
  REGION 1..11: note = Description of Artificial Sequence: Synthetic peptide
TTNIVTRCLNR

SEQ ID NO: 3644 - protein, 8 aa, synthetic construct
  REGION 1..8: note = Description of Artificial Sequence: Synthetic peptide
TTRQVVNV

SEQ ID NO: 3645 - protein, 9 aa, synthetic construct
  REGION 1..9: note = Description of Artificial Sequence: Synthetic peptide
TTSPISEHD

SEQ ID NO: 3646 - protein, 8 aa, synthetic construct
  REGION 1..8: note = Description of Artificial Sequence: Synthetic peptide
TTTIQTIV

SEQ ID NO: 3647 - protein, 8 aa, synthetic construct
  REGION 1..8: note = Description of Artificial Sequence: Synthetic peptide
TTTLNGLW

SEQ ID NO: 3648 - protein, 10 aa, synthetic construct
  REGION 1..10: note = Description of Artificial Sequence: Synthetic peptide
TTTNIVTRCL

SEQ ID NO: 3649 - protein, 11 aa, synthetic construct
  REGION 1..11: note = Description of Artificial Sequence: Synthetic peptide
TTTYKLNVGDY

SEQ ID NO: 3650 - protein, 9 aa, synthetic construct
  REGION 1..9: note = Description of Artificial Sequence: Synthetic peptide
TTYKLNVGD

SEQ ID NO: 3651 - protein, 9 aa, synthetic construct
  REGION 1..9: note = Description of Artificial Sequence: Synthetic peptide
TTYPGQGLN

SEQ ID NO: 3652 - protein, 9 aa, synthetic construct
  REGION 1..9: note = Description of Artificial Sequence: Synthetic peptide
TVAAFHQEC

SEQ ID NO: 3653 - protein, 8 aa, synthetic construct
  REGION 1..8: note = Description of Artificial Sequence: Synthetic peptide
TVAYFNMV

SEQ ID NO: 3654 - protein, 9 aa, synthetic construct
  REGION 1..9: note = Description of Artificial Sequence: Synthetic peptide
TVCTVCGMW

SEQ ID NO: 3655 - protein, 8 aa, synthetic construct
  REGION 1..8: note = Description of Artificial Sequence: Synthetic peptide
TVDNINLH

SEQ ID NO: 3656 - protein, 9 aa, synthetic construct
  REGION 1..9: note = Description of Artificial Sequence: Synthetic peptide
TVDNINLHT

SEQ ID NO: 3657 - protein, 12 aa, synthetic construct
  REGION 1..12: note = Description of Artificial Sequence: Synthetic peptide
TVDSSQGSEYDY

SEQ ID NO: 3658 - protein, 8 aa, synthetic construct
  REGION 1..8: note = Description of Artificial Sequence: Synthetic peptide
TVFFDGRV

SEQ ID NO: 3659 - protein, 8 aa, synthetic construct
  REGION 1..8: note = Description of Artificial Sequence: Synthetic peptide
TVHTANKW

SEQ ID NO: 3660 - protein, 11 aa, synthetic construct
  REGION 1..11: note = Description of Artificial Sequence: Synthetic peptide
TVIEVQGYKSV

SEQ ID NO: 3661 - protein, 9 aa, synthetic construct
  REGION 1..9: note = Description of Artificial Sequence: Synthetic peptide
TVKGLDYKA

SEQ ID NO: 3662 - protein, 9 aa, synthetic construct
  REGION 1..9: note = Description of Artificial Sequence: Synthetic peptide
TVKNYFITD

SEQ ID NO: 3663 - protein, 10 aa, synthetic construct
  REGION 1..10: note = Description of Artificial Sequence: Synthetic peptide
TVKSVGKFCL

SEQ ID NO: 3664 - protein, 9 aa, synthetic construct
  REGION 1..9: note = Description of Artificial Sequence: Synthetic peptide
TVLKKCKSA

SEQ ID NO: 3665 - protein, 10 aa, synthetic construct
  REGION 1..10: note = Description of Artificial Sequence: Synthetic peptide
TVLKKCKSAF

SEQ ID NO: 3666 - protein, 10 aa, synthetic construct
  REGION 1..10: note = Description of Artificial Sequence: Synthetic peptide
TVLSFCAFAV

SEQ ID NO: 3667 - protein, 9 aa, synthetic construct
  REGION 1..9: note = Description of Artificial Sequence: Synthetic peptide
TVMFLARGI

SEQ ID NO: 3668 - protein, 11 aa, synthetic construct
  REGION 1..11: note = Description of Artificial Sequence: Synthetic peptide
TVRTNVYLAVF

SEQ ID NO: 3669 - protein, 10 aa, synthetic construct
  REGION 1..10: note = Description of Artificial Sequence: Synthetic peptide
TVSALVYDNK

SEQ ID NO: 3670 - protein, 8 aa, synthetic construct
  REGION 1..8: note = Description of Artificial Sequence: Synthetic peptide
TVVIGTSK

SEQ ID NO: 3671 - protein, 10 aa, synthetic construct
  REGION 1..10: note = Description of Artificial Sequence: Synthetic peptide
TVVIGTSKFY

SEQ ID NO: 3672 - protein, 9 aa, synthetic construct
  REGION 1..9: note = Description of Artificial Sequence: Synthetic peptide
TVVVNAANV

SEQ ID NO: 3673 - protein, 10 aa, synthetic construct
  REGION 1..10: note = Description of Artificial Sequence: Synthetic peptide
TVVVNAANVY

SEQ ID NO: 3674 - protein, 10 aa, synthetic construct
  REGION 1..10: note = Description of Artificial Sequence: Synthetic peptide
TVYEKLKPVL

SEQ ID NO: 3675 - protein, 9 aa, synthetic construct
  REGION 1..9: note = Description of Artificial Sequence: Synthetic peptide
TVYSDVENP

SEQ ID NO: 3676 - protein, 11 aa, synthetic construct
  REGION 1..11: note = Description of Artificial Sequence: Synthetic peptide
TVYSHLLLVAA

SEQ ID NO: 3677 - protein, 10 aa, synthetic construct
  REGION 1..10: note = Description of Artificial Sequence: Synthetic peptide
TWICLLQFAY

SEQ ID NO: 3678 - protein, 10 aa, synthetic construct
  REGION 1..10: note = Description of Artificial Sequence: Synthetic peptide
TWLDMVDTSL

SEQ ID NO: 3679 - protein, 9 aa, synthetic construct
  REGION 1..9: note = Description of Artificial Sequence: Synthetic peptide
TWLTYTGAI

SEQ ID NO: 3680 - protein, 11 aa, synthetic construct
  REGION 1..11: note = Description of Artificial Sequence: Synthetic peptide
TWLTYTGAIKL

SEQ ID NO: 3681 - protein, 9 aa, synthetic construct
  REGION 1..9: note = Description of Artificial Sequence: Synthetic peptide
TYERHSLSH

SEQ ID NO: 3682 - protein, 11 aa, synthetic construct
  REGION 1..11: note = Description of Artificial Sequence: Synthetic peptide
TYGQQFGPTYL

SEQ ID NO: 3683 - protein, 10 aa, synthetic construct
  REGION 1..10: note = Description of Artificial Sequence: Synthetic peptide
TYKLNVGDYF

SEQ ID NO: 3684 - protein, 9 aa, synthetic construct
  REGION 1..9: note = Description of Artificial Sequence: Synthetic peptide
TYNCCDDDY

SEQ ID NO: 3685 - protein, 9 aa, synthetic construct
  REGION 1..9: note = Description of Artificial Sequence: Synthetic peptide
TYTGAIKLD

SEQ ID NO: 3686 - protein, 11 aa, synthetic construct
  REGION 1..11: note = Description of Artificial Sequence: Synthetic peptide
TYYLFDESGEF

SEQ ID NO: 3687 - protein, 8 aa, synthetic construct
  REGION 1..8: note = Description of Artificial Sequence: Synthetic peptide
VAAIFYLI

SEQ ID NO: 3688 - protein, 11 aa, synthetic construct
  REGION 1..11: note = Description of Artificial Sequence: Synthetic peptide
VAAIVFITLCF

SEQ ID NO: 3689 - protein, 9 aa, synthetic construct
  REGION 1..9: note = Description of Artificial Sequence: Synthetic peptide
VAALTNNVA

SEQ ID NO: 3690 - protein, 10 aa, synthetic construct
  REGION 1..10: note = Description of Artificial Sequence: Synthetic peptide
VADAVIKTLQ

SEQ ID NO: 3691 - protein, 10 aa, synthetic construct
  REGION 1..10: note = Description of Artificial Sequence: Synthetic peptide
VAEWFLAYIL

SEQ ID NO: 3692 - protein, 10 aa, synthetic construct
  REGION 1..10: note = Description of Artificial Sequence: Synthetic peptide
VAFELWAKRN

SEQ ID NO: 3693 - protein, 9 aa, synthetic construct
  REGION 1..9: note = Description of Artificial Sequence: Synthetic peptide
VAGDSGFAA

SEQ ID NO: 3694 - protein, 9 aa, synthetic construct
  REGION 1..9: note = Description of Artificial Sequence: Synthetic peptide
VAGFAKFLK

SEQ ID NO: 3695 - protein, 9 aa, synthetic construct
  REGION 1..9: note = Description of Artificial Sequence: Synthetic peptide
VAGVSICST

SEQ ID NO: 3696 - protein, 10 aa, synthetic construct
  REGION 1..10: note = Description of Artificial Sequence: Synthetic peptide
VAIDYKHYTP

SEQ ID NO: 3697 - protein, 12 aa, synthetic construct
  REGION 1..12: note = Description of Artificial Sequence: Synthetic peptide
VAIHADQLTPTW

SEQ ID NO: 3698 - protein, 10 aa, synthetic construct
  REGION 1..10: note = Description of Artificial Sequence: Synthetic peptide
VAKSHNIALI

SEQ ID NO: 3699 - protein, 11 aa, synthetic construct
  REGION 1..11: note = Description of Artificial Sequence: Synthetic peptide
VAKSHNIALIW

SEQ ID NO: 3700 - protein, 10 aa, synthetic construct
  REGION 1..10: note = Description of Artificial Sequence: Synthetic peptide
VALLAVFQSA

SEQ ID NO: 3701 - protein, 10 aa, synthetic construct
  REGION 1..10: note = Description of Artificial Sequence: Synthetic peptide
VAMKYNYEPL

SEQ ID NO: 3702 - protein, 11 aa, synthetic construct
  REGION 1..11: note = Description of Artificial Sequence: Synthetic peptide
VANGDSEVVLK

SEQ ID NO: 3703 - protein, 9 aa, synthetic construct
  REGION 1..9: note = Description of Artificial Sequence: Synthetic peptide
VANYQKVGM

SEQ ID NO: 3704 - protein, 11 aa, synthetic construct
  REGION 1..11: note = Description of Artificial Sequence: Synthetic peptide
VAPGTAVLRQW

SEQ ID NO: 3705 - protein, 10 aa, synthetic construct
  REGION 1..10: note = Description of Artificial Sequence: Synthetic peptide
VARDLSLQFK

SEQ ID NO: 3706 - protein, 10 aa, synthetic construct
  REGION 1..10: note = Description of Artificial Sequence: Synthetic peptide
VASCDAIMTR

SEQ ID NO: 3707 - protein, 10 aa, synthetic construct
  REGION 1..10: note = Description of Artificial Sequence: Synthetic peptide
VASPNECNQM

SEQ ID NO: 3708 - protein, 9 aa, synthetic construct
  REGION 1..9: note = Description of Artificial Sequence: Synthetic peptide
VAVLYQDVN

SEQ ID NO: 3709 - protein, 10 aa, synthetic construct
  REGION 1..10: note = Description of Artificial Sequence: Synthetic peptide
VAYSNNSIAI

SEQ ID NO: 3710 - protein, 8 aa, synthetic construct
  REGION 1..8: note = Description of Artificial Sequence: Synthetic peptide
VCRFDTRV

SEQ ID NO: 3711 - protein, 9 aa, synthetic construct
  REGION 1..9: note = Description of Artificial Sequence: Synthetic peptide
VCRFDTRVL

SEQ ID NO: 3712 - protein, 8 aa, synthetic construct
  REGION 1..8: note = Description of Artificial Sequence: Synthetic peptide
VCRLMKTI

SEQ ID NO: 3713 - protein, 8 aa, synthetic construct
  REGION 1..8: note = Description of Artificial Sequence: Synthetic peptide
VCSVIDLL

SEQ ID NO: 3714 - protein, 9 aa, synthetic construct
  REGION 1..9: note = Description of Artificial Sequence: Synthetic peptide
VCTNYMPYF

SEQ ID NO: 3715 - protein, 10 aa, synthetic construct
  REGION 1..10: note = Description of Artificial Sequence: Synthetic peptide
VCTNYMPYFF

SEQ ID NO: 3716 - protein, 8 aa, synthetic construct
  REGION 1..8: note = Description of Artificial Sequence: Synthetic peptide
VCVETKAI

SEQ ID NO: 3717 - protein, 9 aa, synthetic construct
  REGION 1..9: note = Description of Artificial Sequence: Synthetic peptide
VDALCEKAL

SEQ ID NO: 3718 - protein, 8 aa, synthetic construct
  REGION 1..8: note = Description of Artificial Sequence: Synthetic peptide
VDDIVKTD

SEQ ID NO: 3719 - protein, 8 aa, synthetic construct
  REGION 1..8: note = Description of Artificial Sequence: Synthetic peptide
VDGQVDLF

SEQ ID NO: 3720 - protein, 8 aa, synthetic construct
  REGION 1..8: note = Description of Artificial Sequence: Synthetic peptide
VDGVVQQL

SEQ ID NO: 3721 - protein, 8 aa, synthetic construct
  REGION 1..8: note = Description of Artificial Sequence: Synthetic peptide
VDNSSLTI

SEQ ID NO: 3722 - protein, 8 aa, synthetic construct
  REGION 1..8: note = Description of Artificial Sequence: Synthetic peptide
VDSDLNDF

SEQ ID NO: 3723 - protein, 8 aa, synthetic construct
  REGION 1..8: note = Description of Artificial Sequence: Synthetic peptide
VDSVTVKN

SEQ ID NO: 3724 - protein, 8 aa, synthetic construct
  REGION 1..8: note = Description of Artificial Sequence: Synthetic peptide
VDSYYSLL

SEQ ID NO: 3725 - protein, 9 aa, synthetic construct
  REGION 1..9: note = Description of Artificial Sequence: Synthetic peptide
VDSYYSLLM

SEQ ID NO: 3726 - protein, 9 aa, synthetic construct
  REGION 1..9: note = Description of Artificial Sequence: Synthetic peptide
VDTDLTKPY

SEQ ID NO: 3727 - protein, 8 aa, synthetic construct
  REGION 1..8: note = Description of Artificial Sequence: Synthetic peptide
VDTSLSGF

SEQ ID NO: 3728 - protein, 9 aa, synthetic construct
  REGION 1..9: note = Description of Artificial Sequence: Synthetic peptide
VDTVRTNVY

SEQ ID NO: 3729 - protein, 8 aa, synthetic construct
  REGION 1..8: note = Description of Artificial Sequence: Synthetic peptide
VDTVSALV

SEQ ID NO: 3730 - protein, 9 aa, synthetic construct
  REGION 1..9: note = Description of Artificial Sequence: Synthetic peptide
VDVELFENK

SEQ ID NO: 3731 - protein, 8 aa, synthetic construct
  REGION 1..8: note = Description of Artificial Sequence: Synthetic peptide
VDVVNFNL

SEQ ID NO: 3732 - protein, 8 aa, synthetic construct
  REGION 1..8: note = Description of Artificial Sequence: Synthetic peptide
VEAEVQID

SEQ ID NO: 3733 - protein, 9 aa, synthetic construct
  REGION 1..9: note = Description of Artificial Sequence: Synthetic peptide
VEAEVQIDR

SEQ ID NO: 3734 - protein, 9 aa, synthetic construct
  REGION 1..9: note = Description of Artificial Sequence: Synthetic peptide
VEAFEYYHT

SEQ ID NO: 3735 - protein, 10 aa, synthetic construct
  REGION 1..10: note = Description of Artificial Sequence: Synthetic peptide
VEAFEYYHTT

SEQ ID NO: 3736 - protein, 8 aa, synthetic construct
  REGION 1..8: note = Description of Artificial Sequence: Synthetic peptide
VECTTIVN

SEQ ID NO: 3737 - protein, 10 aa, synthetic construct
  REGION 1..10: note = Description of Artificial Sequence: Synthetic peptide
VECTTIVNGV

SEQ ID NO: 3738 - protein, 9 aa, synthetic construct
  REGION 1..9: note = Description of Artificial Sequence: Synthetic peptide
VEEAKTVLK

SEQ ID NO: 3739 - protein, 8 aa, synthetic construct
  REGION 1..8: note = Description of Artificial Sequence: Synthetic peptide
VEEVLSEA

SEQ ID NO: 3740 - protein, 8 aa, synthetic construct
  REGION 1..8: note = Description of Artificial Sequence: Synthetic peptide
VEFLRDGW

SEQ ID NO: 3741 - protein, 8 aa, synthetic construct
  REGION 1..8: note = Description of Artificial Sequence: Synthetic peptide
VEGFNCYF

SEQ ID NO: 3742 - protein, 8 aa, synthetic construct
  REGION 1..8: note = Description of Artificial Sequence: Synthetic peptide
VEIIKSQD

SEQ ID NO: 3743 - protein, 11 aa, synthetic construct
  REGION 1..11: note = Description of Artificial Sequence: Synthetic peptide
VEIIKSQDLSV

SEQ ID NO: 3744 - protein, 9 aa, synthetic construct
  REGION 1..9: note = Description of Artificial Sequence: Synthetic peptide
VEKGIYQTS

SEQ ID NO: 3745 - protein, 8 aa, synthetic construct
  REGION 1..8: note = Description of Artificial Sequence: Synthetic peptide
VELGTEVN

SEQ ID NO: 3746 - protein, 8 aa, synthetic construct
  REGION 1..8: note = Description of Artificial Sequence: Synthetic peptide
VENPTIQK

SEQ ID NO: 3747 - protein, 10 aa, synthetic construct
  REGION 1..10: note = Description of Artificial Sequence: Synthetic peptide
VENPTIQKDV

SEQ ID NO: 3748 - protein, 11 aa, synthetic construct
  REGION 1..11: note = Description of Artificial Sequence: Synthetic peptide
VENPTIQKDVL

SEQ ID NO: 3749 - protein, 8 aa, synthetic construct
  REGION 1..8: note = Description of Artificial Sequence: Synthetic peptide
VESDDYIA

SEQ ID NO: 3750 - protein, 8 aa, synthetic construct
  REGION 1..8: note = Description of Artificial Sequence: Synthetic peptide
VESSSKLW

SEQ ID NO: 3751 - protein, 8 aa, synthetic construct
  REGION 1..8: note = Description of Artificial Sequence: Synthetic peptide
VETKAIVS

SEQ ID NO: 3752 - protein, 11 aa, synthetic construct
  REGION 1..11: note = Description of Artificial Sequence: Synthetic peptide
VEVEKGVLPQL

SEQ ID NO: 3753 - protein, 11 aa, synthetic construct
  REGION 1..11: note = Description of Artificial Sequence: Synthetic peptide
VEVQPQLEMEL

SEQ ID NO: 3754 - protein, 8 aa, synthetic construct
  REGION 1..8: note = Description of Artificial Sequence: Synthetic peptide
VEVVDKYF

SEQ ID NO: 3755 - protein, 8 aa, synthetic construct
  REGION 1..8: note = Description of Artificial Sequence: Synthetic peptide
VEWKFYDA

SEQ ID NO: 3756 - protein, 11 aa, synthetic construct
  REGION 1..11: note = Description of Artificial Sequence: Synthetic peptide
VEYCPIFFITG

SEQ ID NO: 3757 - protein, 8 aa, synthetic construct
  REGION 1..8: note = Description of Artificial Sequence: Synthetic peptide
VFAFPFTI

SEQ ID NO: 3758 - protein, 11 aa, synthetic construct
  REGION 1..11: note = Description of Artificial Sequence: Synthetic peptide
VFAFPFTIYSL

SEQ ID NO: 3759 - protein, 8 aa, synthetic construct
  REGION 1..8: note = Description of Artificial Sequence: Synthetic peptide
VFAQVKQI

SEQ ID NO: 3760 - protein, 8 aa, synthetic construct
  REGION 1..8: note = Description of Artificial Sequence: Synthetic peptide
VFDEISMA

SEQ ID NO: 3761 - protein, 10 aa, synthetic construct
  REGION 1..10: note = Description of Artificial Sequence: Synthetic peptide
VFDEISMATN

SEQ ID NO: 3762 - protein, 9 aa, synthetic construct
  REGION 1..9: note = Description of Artificial Sequence: Synthetic peptide
VFDGKSKCE

SEQ ID NO: 3763 - protein, 8 aa, synthetic construct
  REGION 1..8: note = Description of Artificial Sequence: Synthetic peptide
VFDKNLYD

SEQ ID NO: 3764 - protein, 9 aa, synthetic construct
  REGION 1..9: note = Description of Artificial Sequence: Synthetic peptide
VFDKNLYDK

SEQ ID NO: 3765 - protein, 10 aa, synthetic construct
  REGION 1..10: note = Description of Artificial Sequence: Synthetic peptide
VFDKNLYDKL

SEQ ID NO: 3766 - protein, 10 aa, synthetic construct
  REGION 1..10: note = Description of Artificial Sequence: Synthetic peptide
VFITLCFTLK

SEQ ID NO: 3767 - protein, 10 aa, synthetic construct
  REGION 1..10: note = Description of Artificial Sequence: Synthetic peptide
VFKNIDGYFK

SEQ ID NO: 3768 - protein, 11 aa, synthetic construct
  REGION 1..11: note = Description of Artificial Sequence: Synthetic peptide
VFKNIDGYFKI

SEQ ID NO: 3769 - protein, 10 aa, synthetic construct
  REGION 1..10: note = Description of Artificial Sequence: Synthetic peptide
VFLGIITTVA

SEQ ID NO: 3770 - protein, 9 aa, synthetic construct
  REGION 1..9: note = Description of Artificial Sequence: Synthetic peptide
VFLHVTYVP

SEQ ID NO: 3771 - protein, 8 aa, synthetic construct
  REGION 1..8: note = Description of Artificial Sequence: Synthetic peptide
VFNATRFA

SEQ ID NO: 3772 - protein, 10 aa, synthetic construct
  REGION 1..10: note = Description of Artificial Sequence: Synthetic peptide
VFNATRFASV

SEQ ID NO: 3773 - protein, 11 aa, synthetic construct
  REGION 1..11: note = Description of Artificial Sequence: Synthetic peptide
VFNATRFASVY

SEQ ID NO: 3774 - protein, 8 aa, synthetic construct
  REGION 1..8: note = Description of Artificial Sequence: Synthetic peptide
VFNGVSFS

SEQ ID NO: 3775 - protein, 9 aa, synthetic construct
  REGION 1..9: note = Description of Artificial Sequence: Synthetic peptide
VFNGVSFST

SEQ ID NO: 3776 - protein, 9 aa, synthetic construct
  REGION 1..9: note = Description of Artificial Sequence: Synthetic peptide
VFPLNSIIK

SEQ ID NO: 3777 - protein, 10 aa, synthetic construct
  REGION 1..10: note = Description of Artificial Sequence: Synthetic peptide
VFSAVGNICY

SEQ ID NO: 3778 - protein, 9 aa, synthetic construct
  REGION 1..9: note = Description of Artificial Sequence: Synthetic peptide
VFTGYRVTK

SEQ ID NO: 3779 - protein, 11 aa, synthetic construct
  REGION 1..11: note = Description of Artificial Sequence: Synthetic peptide
VFVLWAHGFEL

SEQ ID NO: 3780 - protein, 10 aa, synthetic construct
  REGION 1..10: note = Description of Artificial Sequence: Synthetic peptide
VGDFKLNEEI

SEQ ID NO: 3781 - protein, 9 aa, synthetic construct
  REGION 1..9: note = Description of Artificial Sequence: Synthetic peptide
VGEIPVAYR

SEQ ID NO: 3782 - protein, 10 aa, synthetic construct
  REGION 1..10: note = Description of Artificial Sequence: Synthetic peptide
VGHTDLMAAY

SEQ ID NO: 3783 - protein, 10 aa, synthetic construct
  REGION 1..10: note = Description of Artificial Sequence: Synthetic peptide
VGKPRPPLNR

SEQ ID NO: 3784 - protein, 9 aa, synthetic construct
  REGION 1..9: note = Description of Artificial Sequence: Synthetic peptide
VGPEHSLAE

SEQ ID NO: 3785 - protein, 8 aa, synthetic construct
  REGION 1..8: note = Description of Artificial Sequence: Synthetic peptide
VGPKQASL

SEQ ID NO: 3786 - protein, 8 aa, synthetic construct
  REGION 1..8: note = Description of Artificial Sequence: Synthetic peptide
VGYLQPRT

SEQ ID NO: 3787 - protein, 11 aa, synthetic construct
  REGION 1..11: note = Description of Artificial Sequence: Synthetic peptide
VGYQPYRVVVL

SEQ ID NO: 3788 - protein, 8 aa, synthetic construct
  REGION 1..8: note = Description of Artificial Sequence: Synthetic peptide
VHFISNSW

SEQ ID NO: 3789 - protein, 10 aa, synthetic construct
  REGION 1..10: note = Description of Artificial Sequence: Synthetic peptide
VHFISNSWLM

SEQ ID NO: 3790 - protein, 10 aa, synthetic construct
  REGION 1..10: note = Description of Artificial Sequence: Synthetic peptide
VHFVCNLLLL

SEQ ID NO: 3791 - protein, 11 aa, synthetic construct
  REGION 1..11: note = Description of Artificial Sequence: Synthetic peptide
VHFVCNLLLLF

SEQ ID NO: 3792 - protein, 9 aa, synthetic construct
  REGION 1..9: note = Description of Artificial Sequence: Synthetic peptide
VHNQDVNLH

SEQ ID NO: 3793 - protein, 8 aa, synthetic construct
  REGION 1..8: note = Description of Artificial Sequence: Synthetic peptide
VIDLLLDD

SEQ ID NO: 3794 - protein, 8 aa, synthetic construct
  REGION 1..8: note = Description of Artificial Sequence: Synthetic peptide
VIGAVILR

SEQ ID NO: 3795 - protein, 9 aa, synthetic construct
  REGION 1..9: note = Description of Artificial Sequence: Synthetic peptide
VIHFGAGSD

SEQ ID NO: 3796 - protein, 9 aa, synthetic construct
  REGION 1..9: note = Description of Artificial Sequence: Synthetic peptide
VIKVCEFQF

SEQ ID NO: 3797 - protein, 8 aa, synthetic construct
  REGION 1..8: note = Description of Artificial Sequence: Synthetic peptide
VILLNKHI

SEQ ID NO: 3798 - protein, 8 aa, synthetic construct
  REGION 1..8: note = Description of Artificial Sequence: Synthetic peptide
VISTSHKL

SEQ ID NO: 3799 - protein, 8 aa, synthetic construct
  REGION 1..8: note = Description of Artificial Sequence: Synthetic peptide
VIWDYKRD

SEQ ID NO: 3800 - protein, 10 aa, synthetic construct
  REGION 1..10: note = Description of Artificial Sequence: Synthetic peptide
VIYLYLTFYL

SEQ ID NO: 3801 - protein, 8 aa, synthetic construct
  REGION 1..8: note = Description of Artificial Sequence: Synthetic peptide
VKDCVVLH

SEQ ID NO: 3802 - protein, 9 aa, synthetic construct
  REGION 1..9: note = Description of Artificial Sequence: Synthetic peptide
VKGLDYKAF

SEQ ID NO: 3803 - protein, 9 aa, synthetic construct
  REGION 1..9: note = Description of Artificial Sequence: Synthetic peptide
VKIGPERTC

SEQ ID NO: 3804 - protein, 8 aa, synthetic construct
  REGION 1..8: note = Description of Artificial Sequence: Synthetic peptide
VKLQNNEL

SEQ ID NO: 3805 - protein, 8 aa, synthetic construct
  REGION 1..8: note = Description of Artificial Sequence: Synthetic peptide
VKNGSIHL

SEQ ID NO: 3806 - protein, 10 aa, synthetic construct
  REGION 1..10: note = Description of Artificial Sequence: Synthetic peptide
VKNGSIHLYF

SEQ ID NO: 3807 - protein, 8 aa, synthetic construct
  REGION 1..8: note = Description of Artificial Sequence: Synthetic peptide
VKNKCVNF

SEQ ID NO: 3808 - protein, 9 aa, synthetic construct
  REGION 1..9: note = Description of Artificial Sequence: Synthetic peptide
VKPGGTSSG

SEQ ID NO: 3809 - protein, 8 aa, synthetic construct
  REGION 1..8: note = Description of Artificial Sequence: Synthetic peptide
VKPTVVVN

SEQ ID NO: 3810 - protein, 10 aa, synthetic construct
  REGION 1..10: note = Description of Artificial Sequence: Synthetic peptide
VKQGDDYVYL

SEQ ID NO: 3811 - protein, 9 aa, synthetic construct
  REGION 1..9: note = Description of Artificial Sequence: Synthetic peptide
VKRHTFSNY

SEQ ID NO: 3812 - protein, 9 aa, synthetic construct
  REGION 1..9: note = Description of Artificial Sequence: Synthetic peptide
VKSREETGL

SEQ ID NO: 3813 - protein, 10 aa, synthetic construct
  REGION 1..10: note = Description of Artificial Sequence: Synthetic peptide
VKSREETGLL

SEQ ID NO: 3814 - protein, 9 aa, synthetic construct
  REGION 1..9: note = Description of Artificial Sequence: Synthetic peptide
VKSVGKFCL

SEQ ID NO: 3815 - protein, 10 aa, synthetic construct
  REGION 1..10: note = Description of Artificial Sequence: Synthetic peptide
VKYLYFIKGL

SEQ ID NO: 3816 - protein, 8 aa, synthetic construct
  REGION 1..8: note = Description of Artificial Sequence: Synthetic peptide
VLAAVYRI

SEQ ID NO: 3817 - protein, 10 aa, synthetic construct
  REGION 1..10: note = Description of Artificial Sequence: Synthetic peptide
VLCNSQTSLR

SEQ ID NO: 3818 - protein, 9 aa, synthetic construct
  REGION 1..9: note = Description of Artificial Sequence: Synthetic peptide
VLDMCASLK

SEQ ID NO: 3819 - protein, 10 aa, synthetic construct
  REGION 1..10: note = Description of Artificial Sequence: Synthetic peptide
VLGSLAATVR

SEQ ID NO: 3820 - protein, 10 aa, synthetic construct
  REGION 1..10: note = Description of Artificial Sequence: Synthetic peptide
VLHDIGNPKA

SEQ ID NO: 3821 - protein, 10 aa, synthetic construct
  REGION 1..10: note = Description of Artificial Sequence: Synthetic peptide
VLHSTQDLFL

SEQ ID NO: 3822 - protein, 8 aa, synthetic construct
  REGION 1..8: note = Description of Artificial Sequence: Synthetic peptide
VLKKCKSA

SEQ ID NO: 3823 - protein, 8 aa, synthetic construct
  REGION 1..8: note = Description of Artificial Sequence: Synthetic peptide
VLKLKVDT

SEQ ID NO: 3824 - protein, 10 aa, synthetic construct
  REGION 1..10: note = Description of Artificial Sequence: Synthetic peptide
VLKTGDLQPL

SEQ ID NO: 3825 - protein, 11 aa, synthetic construct
  REGION 1..11: note = Description of Artificial Sequence: Synthetic peptide
VLLFLAFVVFL

SEQ ID NO: 3826 - protein, 8 aa, synthetic construct
  REGION 1..8: note = Description of Artificial Sequence: Synthetic peptide
VLLILMTA

SEQ ID NO: 3827 - protein, 8 aa, synthetic construct
  REGION 1..8: note = Description of Artificial Sequence: Synthetic peptide
VLLPLVSS

SEQ ID NO: 3828 - protein, 9 aa, synthetic construct
  REGION 1..9: note = Description of Artificial Sequence: Synthetic peptide
VLLRKNGNK

SEQ ID NO: 3829 - protein, 9 aa, synthetic construct
  REGION 1..9: note = Description of Artificial Sequence: Synthetic peptide
VLMDGSIIQ

SEQ ID NO: 3830 - protein, 11 aa, synthetic construct
  REGION 1..11: note = Description of Artificial Sequence: Synthetic peptide
VLMSNLGMPSY

SEQ ID NO: 3831 - protein, 8 aa, synthetic construct
  REGION 1..8: note = Description of Artificial Sequence: Synthetic peptide
VLPFNDGV

SEQ ID NO: 3832 - protein, 10 aa, synthetic construct
  REGION 1..10: note = Description of Artificial Sequence: Synthetic peptide
VLQKAAITIL

SEQ ID NO: 3833 - protein, 8 aa, synthetic construct
  REGION 1..8: note = Description of Artificial Sequence: Synthetic peptide
VLQVRDVL

SEQ ID NO: 3834 - protein, 11 aa, synthetic construct
  REGION 1..11: note = Description of Artificial Sequence: Synthetic peptide
VLSDRELHLSW

SEQ ID NO: 3835 - protein, 10 aa, synthetic construct
  REGION 1..10: note = Description of Artificial Sequence: Synthetic peptide
VLSEARQHLK

SEQ ID NO: 3836 - protein, 10 aa, synthetic construct
  REGION 1..10: note = Description of Artificial Sequence: Synthetic peptide
VLSTFISAAR

SEQ ID NO: 3837 - protein, 8 aa, synthetic construct
  REGION 1..8: note = Description of Artificial Sequence: Synthetic peptide
VLSVNPYV

SEQ ID NO: 3838 - protein, 10 aa, synthetic construct
  REGION 1..10: note = Description of Artificial Sequence: Synthetic peptide
VLTAVVIPTK

SEQ ID NO: 3839 - protein, 11 aa, synthetic construct
  REGION 1..11: note = Description of Artificial Sequence: Synthetic peptide
VLTAVVIPTKK

SEQ ID NO: 3840 - protein, 11 aa, synthetic construct
  REGION 1..11: note = Description of Artificial Sequence: Synthetic peptide
VLVPHVGEIPV

SEQ ID NO: 3841 - protein, 10 aa, synthetic construct
  REGION 1..10: note = Description of Artificial Sequence: Synthetic peptide
VLYENQKLIA

SEQ ID NO: 3842 - protein, 11 aa, synthetic construct
  REGION 1..11: note = Description of Artificial Sequence: Synthetic peptide
VLYNSASFSTF

SEQ ID NO: 3843 - protein, 12 aa, synthetic construct
  REGION 1..12: note = Description of Artificial Sequence: Synthetic peptide
VLYNSASFSTFK

SEQ ID NO: 3844 - protein, 11 aa, synthetic construct
  REGION 1..11: note = Description of Artificial Sequence: Synthetic peptide
VLYQDVNCTEV

SEQ ID NO: 3845 - protein, 8 aa, synthetic construct
  REGION 1..8: note = Description of Artificial Sequence: Synthetic peptide
VLYYQNNV

SEQ ID NO: 3846 - protein, 9 aa, synthetic construct
  REGION 1..9: note = Description of Artificial Sequence: Synthetic peptide
VMAYITGGV

SEQ ID NO: 3847 - protein, 9 aa, synthetic construct
  REGION 1..9: note = Description of Artificial Sequence: Synthetic peptide
VMCGGSLYV

SEQ ID NO: 3848 - protein, 10 aa, synthetic construct
  REGION 1..10: note = Description of Artificial Sequence: Synthetic peptide
VMCGGSLYVK

SEQ ID NO: 3849 - protein, 10 aa, synthetic construct
  REGION 1..10: note = Description of Artificial Sequence: Synthetic peptide
VMFTPLVPFW

SEQ ID NO: 3850 - protein, 10 aa, synthetic construct
  REGION 1..10: note = Description of Artificial Sequence: Synthetic peptide
VMHANYIFWR

SEQ ID NO: 3851 - protein, 10 aa, synthetic construct
  REGION 1..10: note = Description of Artificial Sequence: Synthetic peptide
VMLTNDNTSR

SEQ ID NO: 3852 - protein, 11 aa, synthetic construct
  REGION 1..11: note = Description of Artificial Sequence: Synthetic peptide
VMLTNDNTSRY

SEQ ID NO: 3853 - protein, 10 aa, synthetic construct
  REGION 1..10: note = Description of Artificial Sequence: Synthetic peptide
VMPLSAPTLV

SEQ ID NO: 3854 - protein, 8 aa, synthetic construct
  REGION 1..8: note = Description of Artificial Sequence: Synthetic peptide
VMRIMTWL

SEQ ID NO: 3855 - protein, 10 aa, synthetic construct
  REGION 1..10: note = Description of Artificial Sequence: Synthetic peptide
VMYASAVVLL

SEQ ID NO: 3856 - protein, 8 aa, synthetic construct
  REGION 1..8: note = Description of Artificial Sequence: Synthetic peptide
VNAANVYL

SEQ ID NO: 3857 - protein, 9 aa, synthetic construct
  REGION 1..9: note = Description of Artificial Sequence: Synthetic peptide
VNAANVYLK

SEQ ID NO: 3858 - protein, 9 aa, synthetic construct
  REGION 1..9: note = Description of Artificial Sequence: Synthetic peptide
VNASSSEAF

SEQ ID NO: 3859 - protein, 8 aa, synthetic construct
  REGION 1..8: note = Description of Artificial Sequence: Synthetic peptide
VNEFYAYL

SEQ ID NO: 3860 - protein, 9 aa, synthetic construct
  REGION 1..9: note = Description of Artificial Sequence: Synthetic peptide
VNINIVGDF

SEQ ID NO: 3861 - protein, 9 aa, synthetic construct
  REGION 1..9: note = Description of Artificial Sequence: Synthetic peptide
VNKGEDIQL

SEQ ID NO: 3862 - protein, 10 aa, synthetic construct
  REGION 1..10: note = Description of Artificial Sequence: Synthetic peptide
VNLHSSRLSF

SEQ ID NO: 3863 - protein, 10 aa, synthetic construct
  REGION 1..10: note = Description of Artificial Sequence: Synthetic peptide
VNLKQLPFFY

SEQ ID NO: 3864 - protein, 11 aa, synthetic construct
  REGION 1..11: note = Description of Artificial Sequence: Synthetic peptide
VNLKQLPFFYY

SEQ ID NO: 3865 - protein, 10 aa, synthetic construct
  REGION 1..10: note = Description of Artificial Sequence: Synthetic peptide
VNLVAVPTGY

SEQ ID NO: 3866 - protein, 10 aa, synthetic construct
  REGION 1..10: note = Description of Artificial Sequence: Synthetic peptide
VNNATNKATY

SEQ ID NO: 3867 - protein, 8 aa, synthetic construct
  REGION 1..8: note = Description of Artificial Sequence: Synthetic peptide
VNNATNVV

SEQ ID NO: 3868 - protein, 9 aa, synthetic construct
  REGION 1..9: note = Description of Artificial Sequence: Synthetic peptide
VNSFSGYLK

SEQ ID NO: 3869 - protein, 10 aa, synthetic construct
  REGION 1..10: note = Description of Artificial Sequence: Synthetic peptide
VNSTLEQYVF

SEQ ID NO: 3870 - protein, 8 aa, synthetic construct
  REGION 1..8: note = Description of Artificial Sequence: Synthetic peptide
VNSVLLFL

SEQ ID NO: 3871 - protein, 10 aa, synthetic construct
  REGION 1..10: note = Description of Artificial Sequence: Synthetic peptide
VNSVLLFLAF

SEQ ID NO: 3872 - protein, 8 aa, synthetic construct
  REGION 1..8: note = Description of Artificial Sequence: Synthetic peptide
VNVVTTKI

SEQ ID NO: 3873 - protein, 9 aa, synthetic construct
  REGION 1..9: note = Description of Artificial Sequence: Synthetic peptide
VPANSTVLS

SEQ ID NO: 3874 - protein, 8 aa, synthetic construct
  REGION 1..8: note = Description of Artificial Sequence: Synthetic peptide
VPAQEKNF

SEQ ID NO: 3875 - protein, 10 aa, synthetic construct
  REGION 1..10: note = Description of Artificial Sequence: Synthetic peptide
VPATVSVSSP

SEQ ID NO: 3876 - protein, 9 aa, synthetic construct
  REGION 1..9: note = Description of Artificial Sequence: Synthetic peptide
VPEVKILNN

SEQ ID NO: 3877 - protein, 8 aa, synthetic construct
  REGION 1..8: note = Description of Artificial Sequence: Synthetic peptide
VPFVVSTG

SEQ ID NO: 3878 - protein, 11 aa, synthetic construct
  REGION 1..11: note = Description of Artificial Sequence: Synthetic peptide
VPFWITIAYII

SEQ ID NO: 3879 - protein, 8 aa, synthetic construct
  REGION 1..8: note = Description of Artificial Sequence: Synthetic peptide
VPGLPGTI

SEQ ID NO: 3880 - protein, 10 aa, synthetic construct
  REGION 1..10: note = Description of Artificial Sequence: Synthetic peptide
VPGLPGTILR

SEQ ID NO: 3881 - protein, 11 aa, synthetic construct
  REGION 1..11: note = Description of Artificial Sequence: Synthetic peptide
VPHVGEIPVAY

SEQ ID NO: 3882 - protein, 9 aa, synthetic construct
  REGION 1..9: note = Description of Artificial Sequence: Synthetic peptide
VPINTNSSP

SEQ ID NO: 3883 - protein, 9 aa, synthetic construct
  REGION 1..9: note = Description of Artificial Sequence: Synthetic peptide
VPLKSATCI

SEQ ID NO: 3884 - protein, 10 aa, synthetic construct
  REGION 1..10: note = Description of Artificial Sequence: Synthetic peptide
VPLNIIPLTT

SEQ ID NO: 3885 - protein, 12 aa, synthetic construct
  REGION 1..12: note = Description of Artificial Sequence: Synthetic peptide
VPLNIIPLTTAA

SEQ ID NO: 3886 - protein, 10 aa, synthetic construct
  REGION 1..10: note = Description of Artificial Sequence: Synthetic peptide
VPQEHYVRIT

SEQ ID NO: 3887 - protein, 8 aa, synthetic construct
  REGION 1..8: note = Description of Artificial Sequence: Synthetic peptide
VPVAIHAD

SEQ ID NO: 3888 - protein, 11 aa, synthetic construct
  REGION 1..11: note = Description of Artificial Sequence: Synthetic peptide
VPVSIINNTVY

SEQ ID NO: 3889 - protein, 9 aa, synthetic construct
  REGION 1..9: note = Description of Artificial Sequence: Synthetic peptide
VPYNMRVIH

SEQ ID NO: 3890 - protein, 10 aa, synthetic construct
  REGION 1..10: note = Description of Artificial Sequence: Synthetic peptide
VQAGNVQLRV

SEQ ID NO: 3891 - protein, 9 aa, synthetic construct
  REGION 1..9: note = Description of Artificial Sequence: Synthetic peptide
VQELYSPIF

SEQ ID NO: 3892 - protein, 10 aa, synthetic construct
  REGION 1..10: note = Description of Artificial Sequence: Synthetic peptide
VQELYSPIFL

SEQ ID NO: 3893 - protein, 9 aa, synthetic construct
  REGION 1..9: note = Description of Artificial Sequence: Synthetic peptide
VQHMVVKAA

SEQ ID NO: 3894 - protein, 10 aa, synthetic construct
  REGION 1..10: note = Description of Artificial Sequence: Synthetic peptide
VQIGEYTFEK

SEQ ID NO: 3895 - protein, 9 aa, synthetic construct
  REGION 1..9: note = Description of Artificial Sequence: Synthetic peptide
VQIPCTCGK

SEQ ID NO: 3896 - protein, 8 aa, synthetic construct
  REGION 1..8: note = Description of Artificial Sequence: Synthetic peptide
VQIPTTCA

SEQ ID NO: 3897 - protein, 11 aa, synthetic construct
  REGION 1..11: note = Description of Artificial Sequence: Synthetic peptide
VQLHNDILLAK

SEQ ID NO: 3898 - protein, 10 aa, synthetic construct
  REGION 1..10: note = Description of Artificial Sequence: Synthetic peptide
VQLRVIGHSM

SEQ ID NO: 3899 - protein, 8 aa, synthetic construct
  REGION 1..8: note = Description of Artificial Sequence: Synthetic peptide
VQLSEISM

SEQ ID NO: 3900 - protein, 9 aa, synthetic construct
  REGION 1..9: note = Description of Artificial Sequence: Synthetic peptide
VQLSLPVLQ

SEQ ID NO: 3901 - protein, 11 aa, synthetic construct
  REGION 1..11: note = Description of Artificial Sequence: Synthetic peptide
VQLSLPVLQVR

SEQ ID NO: 3902 - protein, 11 aa, synthetic construct
  REGION 1..11: note = Description of Artificial Sequence: Synthetic peptide
VQMAPISAMVR

SEQ ID NO: 3903 - protein, 9 aa, synthetic construct
  REGION 1..9: note = Description of Artificial Sequence: Synthetic peptide
VQMLSDTLK

SEQ ID NO: 3904 - protein, 8 aa, synthetic construct
  REGION 1..8: note = Description of Artificial Sequence: Synthetic peptide
VQPTESIV

SEQ ID NO: 3905 - protein, 8 aa, synthetic construct
  REGION 1..8: note = Description of Artificial Sequence: Synthetic peptide
VQQESPFV

SEQ ID NO: 3906 - protein, 8 aa, synthetic construct
  REGION 1..8: note = Description of Artificial Sequence: Synthetic peptide
VQSKMSDV

SEQ ID NO: 3907 - protein, 10 aa, synthetic construct
  REGION 1..10: note = Description of Artificial Sequence: Synthetic peptide
VQSTQWSLFF

SEQ ID NO: 3908 - protein, 8 aa, synthetic construct
  REGION 1..8: note = Description of Artificial Sequence: Synthetic peptide
VQTFFKLV

SEQ ID NO: 3909 - protein, 10 aa, synthetic construct
  REGION 1..10: note = Description of Artificial Sequence: Synthetic peptide
VQTFFKLVNK

SEQ ID NO: 3910 - protein, 10 aa, synthetic construct
  REGION 1..10: note = Description of Artificial Sequence: Synthetic peptide
VQVTCGTTTL

SEQ ID NO: 3911 - protein, 11 aa, synthetic construct
  REGION 1..11: note = Description of Artificial Sequence: Synthetic peptide
VRDLPQGFSAL

SEQ ID NO: 3912 - protein, 10 aa, synthetic construct
  REGION 1..10: note = Description of Artificial Sequence: Synthetic peptide
VRFPNITNLC

SEQ ID NO: 3913 - protein, 9 aa, synthetic construct
  REGION 1..9: note = Description of Artificial Sequence: Synthetic peptide
VRKIFVDGV

SEQ ID NO: 3914 - protein, 9 aa, synthetic construct
  REGION 1..9: note = Description of Artificial Sequence: Synthetic peptide
VRLQAGNAT

SEQ ID NO: 3915 - protein, 10 aa, synthetic construct
  REGION 1..10: note = Description of Artificial Sequence: Synthetic peptide
VRMYIFFASF

SEQ ID NO: 3916 - protein, 10 aa, synthetic construct
  REGION 1..10: note = Description of Artificial Sequence: Synthetic peptide
VRTNVYLAVF

SEQ ID NO: 3917 - protein, 8 aa, synthetic construct
  REGION 1..8: note = Description of Artificial Sequence: Synthetic peptide
VRVLQKAA

SEQ ID NO: 3918 - protein, 9 aa, synthetic construct
  REGION 1..9: note = Description of Artificial Sequence: Synthetic peptide
VSAKPPPGD

SEQ ID NO: 3919 - protein, 9 aa, synthetic construct
  REGION 1..9: note = Description of Artificial Sequence: Synthetic peptide
VSALVYDNK

SEQ ID NO: 3920 - protein, 9 aa, synthetic construct
  REGION 1..9: note = Description of Artificial Sequence: Synthetic peptide
VSELLTPLG

SEQ ID NO: 3921 - protein, 9 aa, synthetic construct
  REGION 1..9: note = Description of Artificial Sequence: Synthetic peptide
VSGNCDVVI

SEQ ID NO: 3922 - protein, 10 aa, synthetic construct
  REGION 1..10: note = Description of Artificial Sequence: Synthetic peptide
VSGTNGTKRF

SEQ ID NO: 3923 - protein, 11 aa, synthetic construct
  REGION 1..11: note = Description of Artificial Sequence: Synthetic peptide
VSIINNTVYTK

SEQ ID NO: 3924 - protein, 8 aa, synthetic construct
  REGION 1..8: note = Description of Artificial Sequence: Synthetic peptide
VSKVVKVT

SEQ ID NO: 3925 - protein, 11 aa, synthetic construct
  REGION 1..11: note = Description of Artificial Sequence: Synthetic peptide
VSKVVKVTIDY

SEQ ID NO: 3926 - protein, 10 aa, synthetic construct
  REGION 1..10: note = Description of Artificial Sequence: Synthetic peptide
VSLAIDAYPL

SEQ ID NO: 3927 - protein, 9 aa, synthetic construct
  REGION 1..9: note = Description of Artificial Sequence: Synthetic peptide
VSLLSVLLS

SEQ ID NO: 3928 - protein, 10 aa, synthetic construct
  REGION 1..10: note = Description of Artificial Sequence: Synthetic peptide
VSLLSVLLSM

SEQ ID NO: 3929 - protein, 8 aa, synthetic construct
  REGION 1..8: note = Description of Artificial Sequence: Synthetic peptide
VSMTKTSV

SEQ ID NO: 3930 - protein, 9 aa, synthetic construct
  REGION 1..9: note = Description of Artificial Sequence: Synthetic peptide
VSTIQRKYK

SEQ ID NO: 3931 - protein, 8 aa, synthetic construct
  REGION 1..8: note = Description of Artificial Sequence: Synthetic peptide
VSTQEFRY

SEQ ID NO: 3932 - protein, 8 aa, synthetic construct
  REGION 1..8: note = Description of Artificial Sequence: Synthetic peptide
VTCLAYYF

SEQ ID NO: 3933 - protein, 9 aa, synthetic construct
  REGION 1..9: note = Description of Artificial Sequence: Synthetic peptide
VTFFPDLNG

SEQ ID NO: 3934 - protein, 11 aa, synthetic construct
  REGION 1..11: note = Description of Artificial Sequence: Synthetic peptide
VTFGDDTVIEV

SEQ ID NO: 3935 - protein, 8 aa, synthetic construct
  REGION 1..8: note = Description of Artificial Sequence: Synthetic peptide
VTFQSAVK

SEQ ID NO: 3936 - protein, 11 aa, synthetic construct
  REGION 1..11: note = Description of Artificial Sequence: Synthetic peptide
VTFQSAVKRTI

SEQ ID NO: 3937 - protein, 10 aa, synthetic construct
  REGION 1..10: note = Description of Artificial Sequence: Synthetic peptide
VTHSKGLYRK

SEQ ID NO: 3938 - protein, 11 aa, synthetic construct
  REGION 1..11: note = Description of Artificial Sequence: Synthetic peptide
VTIDYTEISFM

SEQ ID NO: 3939 - protein, 8 aa, synthetic construct
  REGION 1..8: note = Description of Artificial Sequence: Synthetic peptide
VTKGKAKK

SEQ ID NO: 3940 - protein, 12 aa, synthetic construct
  REGION 1..12: note = Description of Artificial Sequence: Synthetic peptide
VTKNSKVQIGEY

SEQ ID NO: 3941 - protein, 8 aa, synthetic construct
  REGION 1..8: note = Description of Artificial Sequence: Synthetic peptide
VTLACFVL

SEQ ID NO: 3942 - protein, 8 aa, synthetic construct
  REGION 1..8: note = Description of Artificial Sequence: Synthetic peptide
VTLADAGF

SEQ ID NO: 3943 - protein, 9 aa, synthetic construct
  REGION 1..9: note = Description of Artificial Sequence: Synthetic peptide
VTLADAGFI

SEQ ID NO: 3944 - protein, 12 aa, synthetic construct
  REGION 1..12: note = Description of Artificial Sequence: Synthetic peptide
VTLADAGFIKQY

SEQ ID NO: 3945 - protein, 8 aa, synthetic construct
  REGION 1..8: note = Description of Artificial Sequence: Synthetic peptide
VTLIGEAV

SEQ ID NO: 3946 - protein, 9 aa, synthetic construct
  REGION 1..9: note = Description of Artificial Sequence: Synthetic peptide
VTLIGEAVK

SEQ ID NO: 3947 - protein, 8 aa, synthetic construct
  REGION 1..8: note = Description of Artificial Sequence: Synthetic peptide
VTLKQGEI

SEQ ID NO: 3948 - protein, 9 aa, synthetic construct
  REGION 1..9: note = Description of Artificial Sequence: Synthetic peptide
VTLKQGEIK

SEQ ID NO: 3949 - protein, 11 aa, synthetic construct
  REGION 1..11: note = Description of Artificial Sequence: Synthetic peptide
VTQNVLYENQK

SEQ ID NO: 3950 - protein, 9 aa, synthetic construct
  REGION 1..9: note = Description of Artificial Sequence: Synthetic peptide
VTQQLIRAA

SEQ ID NO: 3951 - protein, 8 aa, synthetic construct
  REGION 1..8: note = Description of Artificial Sequence: Synthetic peptide
VTRCLNRV

SEQ ID NO: 3952 - protein, 9 aa, synthetic construct
  REGION 1..9: note = Description of Artificial Sequence: Synthetic peptide
VTRCLNRVC

SEQ ID NO: 3953 - protein, 8 aa, synthetic construct
  REGION 1..8: note = Description of Artificial Sequence: Synthetic peptide
VTRDIAST

SEQ ID NO: 3954 - protein, 8 aa, synthetic construct
  REGION 1..8: note = Description of Artificial Sequence: Synthetic peptide
VTSAMQTM

SEQ ID NO: 3955 - protein, 9 aa, synthetic construct
  REGION 1..9: note = Description of Artificial Sequence: Synthetic peptide
VTSNYSGVV

SEQ ID NO: 3956 - protein, 9 aa, synthetic construct
  REGION 1..9: note = Description of Artificial Sequence: Synthetic peptide
VTTTLEETK

SEQ ID NO: 3957 - protein, 9 aa, synthetic construct
  REGION 1..9: note = Description of Artificial Sequence: Synthetic peptide
VTYKLDGVV

SEQ ID NO: 3958 - protein, 10 aa, synthetic construct
  REGION 1..10: note = Description of Artificial Sequence: Synthetic peptide
VTYNCCDDDY

SEQ ID NO: 3959 - protein, 11 aa, synthetic construct
  REGION 1..11: note = Description of Artificial Sequence: Synthetic peptide
VVDGCNSSTCM

SEQ ID NO: 3960 - protein, 9 aa, synthetic construct
  REGION 1..9: note = Description of Artificial Sequence: Synthetic peptide
VVDMSMTYG

SEQ ID NO: 3961 - protein, 8 aa, synthetic construct
  REGION 1..8: note = Description of Artificial Sequence: Synthetic peptide
VVFVLWAH

SEQ ID NO: 3962 - protein, 8 aa, synthetic construct
  REGION 1..8: note = Description of Artificial Sequence: Synthetic peptide
VVGPNVNK

SEQ ID NO: 3963 - protein, 8 aa, synthetic construct
  REGION 1..8: note = Description of Artificial Sequence: Synthetic peptide
VVIGIVNN

SEQ ID NO: 3964 - protein, 9 aa, synthetic construct
  REGION 1..9: note = Description of Artificial Sequence: Synthetic peptide
VVIGIVNNT

SEQ ID NO: 3965 - protein, 10 aa, synthetic construct
  REGION 1..10: note = Description of Artificial Sequence: Synthetic peptide
VVIGIVNNTV

SEQ ID NO: 3966 - protein, 9 aa, synthetic construct
  REGION 1..9: note = Description of Artificial Sequence: Synthetic peptide
VVIPTKKAG

SEQ ID NO: 3967 - protein, 8 aa, synthetic construct
  REGION 1..8: note = Description of Artificial Sequence: Synthetic peptide
VVKAALLA

SEQ ID NO: 3968 - protein, 9 aa, synthetic construct
  REGION 1..9: note = Description of Artificial Sequence: Synthetic peptide
VVKAALLAD

SEQ ID NO: 3969 - protein, 11 aa, synthetic construct
  REGION 1..11: note = Description of Artificial Sequence: Synthetic peptide
VVLHSYFTSDY

SEQ ID NO: 3970 - protein, 10 aa, synthetic construct
  REGION 1..10: note = Description of Artificial Sequence: Synthetic peptide
VVLKKLKKSL

SEQ ID NO: 3971 - protein, 8 aa, synthetic construct
  REGION 1..8: note = Description of Artificial Sequence: Synthetic peptide
VVLKTGDL

SEQ ID NO: 3972 - protein, 11 aa, synthetic construct
  REGION 1..11: note = Description of Artificial Sequence: Synthetic peptide
VVNARLRAKHY

SEQ ID NO: 3973 - protein, 10 aa, synthetic construct
  REGION 1..10: note = Description of Artificial Sequence: Synthetic peptide
VVQQLPETYF

SEQ ID NO: 3974 - protein, 9 aa, synthetic construct
  REGION 1..9: note = Description of Artificial Sequence: Synthetic peptide
VVREFLTRN

SEQ ID NO: 3975 - protein, 8 aa, synthetic construct
  REGION 1..8: note = Description of Artificial Sequence: Synthetic peptide
VVRIKIVQ

SEQ ID NO: 3976 - protein, 8 aa, synthetic construct
  REGION 1..8: note = Description of Artificial Sequence: Synthetic peptide
VVSDIDYV

SEQ ID NO: 3977 - protein, 8 aa, synthetic construct
  REGION 1..8: note = Description of Artificial Sequence: Synthetic peptide
VVSTGYHF

SEQ ID NO: 3978 - protein, 8 aa, synthetic construct
  REGION 1..8: note = Description of Artificial Sequence: Synthetic peptide
VVTCLAYY

SEQ ID NO: 3979 - protein, 8 aa, synthetic construct
  REGION 1..8: note = Description of Artificial Sequence: Synthetic peptide
VVTTVMFL

SEQ ID NO: 3980 - protein, 10 aa, synthetic construct
  REGION 1..10: note = Description of Artificial Sequence: Synthetic peptide
VVVNAANVYL

SEQ ID NO: 3981 - protein, 11 aa, synthetic construct
  REGION 1..11: note = Description of Artificial Sequence: Synthetic peptide
VVVNAANVYLK

SEQ ID NO: 3982 - protein, 10 aa, synthetic construct
  REGION 1..10: note = Description of Artificial Sequence: Synthetic peptide
VWTLMNVLTL

SEQ ID NO: 3983 - protein, 9 aa, synthetic construct
  REGION 1..9: note = Description of Artificial Sequence: Synthetic peptide
VYAADPAMH

SEQ ID NO: 3984 - protein, 8 aa, synthetic construct
  REGION 1..8: note = Description of Artificial Sequence: Synthetic peptide
VYANLGER

SEQ ID NO: 3985 - protein, 9 aa, synthetic construct
  REGION 1..9: note = Description of Artificial Sequence: Synthetic peptide
VYCCREHEH

SEQ ID NO: 3986 - protein, 9 aa, synthetic construct
  REGION 1..9: note = Description of Artificial Sequence: Synthetic peptide
VYCFLGYFC

SEQ ID NO: 3987 - protein, 8 aa, synthetic construct
  REGION 1..8: note = Description of Artificial Sequence: Synthetic peptide
VYDDGARR

SEQ ID NO: 3988 - protein, 8 aa, synthetic construct
  REGION 1..8: note = Description of Artificial Sequence: Synthetic peptide
VYDNKLKA

SEQ ID NO: 3989 - protein, 8 aa, synthetic construct
  REGION 1..8: note = Description of Artificial Sequence: Synthetic peptide
VYDPLQPE

SEQ ID NO: 3990 - protein, 12 aa, synthetic construct
  REGION 1..12: note = Description of Artificial Sequence: Synthetic peptide
VYDPLQPELDSF

SEQ ID NO: 3991 - protein, 8 aa, synthetic construct
  REGION 1..8: note = Description of Artificial Sequence: Synthetic peptide
VYDYLVST

SEQ ID NO: 3992 - protein, 9 aa, synthetic construct
  REGION 1..9: note = Description of Artificial Sequence: Synthetic peptide
VYFASTEKS

SEQ ID NO: 3993 - protein, 11 aa, synthetic construct
  REGION 1..11: note = Description of Artificial Sequence: Synthetic peptide
VYFASTEKSNI

SEQ ID NO: 3994 - protein, 11 aa, synthetic construct
  REGION 1..11: note = Description of Artificial Sequence: Synthetic peptide
VYFLQSINFVR

SEQ ID NO: 3995 - protein, 8 aa, synthetic construct
  REGION 1..8: note = Description of Artificial Sequence: Synthetic peptide
VYIGDPAQ

SEQ ID NO: 3996 - protein, 11 aa, synthetic construct
  REGION 1..11: note = Description of Artificial Sequence: Synthetic peptide
VYKQFDTYNLW

SEQ ID NO: 3997 - protein, 11 aa, synthetic construct
  REGION 1..11: note = Description of Artificial Sequence: Synthetic peptide
VYLAVFDKNLY

SEQ ID NO: 3998 - protein, 8 aa, synthetic construct
  REGION 1..8: note = Description of Artificial Sequence: Synthetic peptide
VYNPFMID

SEQ ID NO: 3999 - protein, 10 aa, synthetic construct
  REGION 1..10: note = Description of Artificial Sequence: Synthetic peptide
VYNPFMIDVQ

SEQ ID NO: 4000 - protein, 12 aa, synthetic construct
  REGION 1..12: note = Description of Artificial Sequence: Synthetic peptide
VYNPFMIDVQQW

SEQ ID NO: 4001 - protein, 9 aa, synthetic construct
  REGION 1..9: note = Description of Artificial Sequence: Synthetic peptide
VYQCAMRPN

SEQ ID NO: 4002 - protein, 8 aa, synthetic construct
  REGION 1..8: note = Description of Artificial Sequence: Synthetic peptide
VYRAFDIY

SEQ ID NO: 4003 - protein, 10 aa, synthetic construct
  REGION 1..10: note = Description of Artificial Sequence: Synthetic peptide
VYSVIYLYLT

SEQ ID NO: 4004 - protein, 9 aa, synthetic construct
  REGION 1..9: note = Description of Artificial Sequence: Synthetic peptide
VYYSQLMCQ

SEQ ID NO: 4005 - protein, 12 aa, synthetic construct
  REGION 1..12: note = Description of Artificial Sequence: Synthetic peptide
VYYTSNPTTFHL

SEQ ID NO: 4006 - protein, 9 aa, synthetic construct
  REGION 1..9: note = Description of Artificial Sequence: Synthetic peptide
WCKDGHVET

SEQ ID NO: 4007 - protein, 8 aa, synthetic construct
  REGION 1..8: note = Description of Artificial Sequence: Synthetic peptide
WDLIISDM

SEQ ID NO: 4008 - protein, 8 aa, synthetic construct
  REGION 1..8: note = Description of Artificial Sequence: Synthetic peptide
WDLLKYDF

SEQ ID NO: 4009 - protein, 8 aa, synthetic construct
  REGION 1..8: note = Description of Artificial Sequence: Synthetic peptide
WDLTAFGL

SEQ ID NO: 4010 - protein, 10 aa, synthetic construct
  REGION 1..10: note = Description of Artificial Sequence: Synthetic peptide
WEIVKFISTC

SEQ ID NO: 4011 - protein, 8 aa, synthetic construct
  REGION 1..8: note = Description of Artificial Sequence: Synthetic peptide
WEPEFYEA

SEQ ID NO: 4012 - protein, 10 aa, synthetic construct
  REGION 1..10: note = Description of Artificial Sequence: Synthetic peptide
WESGVKDCVV

SEQ ID NO: 4013 - protein, 11 aa, synthetic construct
  REGION 1..11: note = Description of Artificial Sequence: Synthetic peptide
WESGVKDCVVL

SEQ ID NO: 4014 - protein, 8 aa, synthetic construct
  REGION 1..8: note = Description of Artificial Sequence: Synthetic peptide
WEVGKPRP

SEQ ID NO: 4015 - protein, 10 aa, synthetic construct
  REGION 1..10: note = Description of Artificial Sequence: Synthetic peptide
WEVGKPRPPL

SEQ ID NO: 4016 - protein, 9 aa, synthetic construct
  REGION 1..9: note = Description of Artificial Sequence: Synthetic peptide
WFHAIHVSG

SEQ ID NO: 4017 - protein, 9 aa, synthetic construct
  REGION 1..9: note = Description of Artificial Sequence: Synthetic peptide
WFLAYILFT

SEQ ID NO: 4018 - protein, 9 aa, synthetic construct
  REGION 1..9: note = Description of Artificial Sequence: Synthetic peptide
WFLNRFTTT

SEQ ID NO: 4019 - protein, 8 aa, synthetic construct
  REGION 1..8: note = Description of Artificial Sequence: Synthetic peptide
WHNMLKTV

SEQ ID NO: 4020 - protein, 9 aa, synthetic construct
  REGION 1..9: note = Description of Artificial Sequence: Synthetic peptide
WHNMLKTVY

SEQ ID NO: 4021 - protein, 10 aa, synthetic construct
  REGION 1..10: note = Description of Artificial Sequence: Synthetic peptide
WHTNCYDYCI

SEQ ID NO: 4022 - protein, 9 aa, synthetic construct
  REGION 1..9: note = Description of Artificial Sequence: Synthetic peptide
WICLLQFAY

SEQ ID NO: 4023 - protein, 9 aa, synthetic construct
  REGION 1..9: note = Description of Artificial Sequence: Synthetic peptide
WKSYVHVVD

SEQ ID NO: 4024 - protein, 9 aa, synthetic construct
  REGION 1..9: note = Description of Artificial Sequence: Synthetic peptide
WLCWKCRSK

SEQ ID NO: 4025 - protein, 10 aa, synthetic construct
  REGION 1..10: note = Description of Artificial Sequence: Synthetic peptide
WLDDVVYCPR

SEQ ID NO: 4026 - protein, 11 aa, synthetic construct
  REGION 1..11: note = Description of Artificial Sequence: Synthetic peptide
WLDDVVYCPRH

SEQ ID NO: 4027 - protein, 12 aa, synthetic construct
  REGION 1..12: note = Description of Artificial Sequence: Synthetic peptide
WLDDVVYCPRHV

SEQ ID NO: 4028 - protein, 10 aa, synthetic construct
  REGION 1..10: note = Description of Artificial Sequence: Synthetic peptide
WLDMVDTSLS

SEQ ID NO: 4029 - protein, 9 aa, synthetic construct
  REGION 1..9: note = Description of Artificial Sequence: Synthetic peptide
WLGFIAGLI

SEQ ID NO: 4030 - protein, 9 aa, synthetic construct
  REGION 1..9: note = Description of Artificial Sequence: Synthetic peptide
WLKQLIKVT

SEQ ID NO: 4031 - protein, 11 aa, synthetic construct
  REGION 1..11: note = Description of Artificial Sequence: Synthetic peptide
WLKQLIKVTLV

SEQ ID NO: 4032 - protein, 9 aa, synthetic construct
  REGION 1..9: note = Description of Artificial Sequence: Synthetic peptide
WLLWPVTLA

SEQ ID NO: 4033 - protein, 10 aa, synthetic construct
  REGION 1..10: note = Description of Artificial Sequence: Synthetic peptide
WLSYFIASFR

SEQ ID NO: 4034 - protein, 9 aa, synthetic construct
  REGION 1..9: note = Description of Artificial Sequence: Synthetic peptide
WMVMFTPLV

SEQ ID NO: 4035 - protein, 10 aa, synthetic construct
  REGION 1..10: note = Description of Artificial Sequence: Synthetic peptide
WNLVIGFLFL

SEQ ID NO: 4036 - protein, 9 aa, synthetic construct
  REGION 1..9: note = Description of Artificial Sequence: Synthetic peptide
WNVKDFMSL

SEQ ID NO: 4037 - protein, 9 aa, synthetic construct
  REGION 1..9: note = Description of Artificial Sequence: Synthetic peptide
WNVVRIKIV

SEQ ID NO: 4038 - protein, 10 aa, synthetic construct
  REGION 1..10: note = Description of Artificial Sequence: Synthetic peptide
WPLIVTALRA

SEQ ID NO: 4039 - protein, 9 aa, synthetic construct
  REGION 1..9: note = Description of Artificial Sequence: Synthetic peptide
WPQIAQFAP

SEQ ID NO: 4040 - protein, 11 aa, synthetic construct
  REGION 1..11: note = Description of Artificial Sequence: Synthetic peptide
WPQIAQFAPSA

SEQ ID NO: 4041 - protein, 9 aa, synthetic construct
  REGION 1..9: note = Description of Artificial Sequence: Synthetic peptide
WPVTLACFV

SEQ ID NO: 4042 - protein, 11 aa, synthetic construct
  REGION 1..11: note = Description of Artificial Sequence: Synthetic peptide
WPVTLACFVLA

SEQ ID NO: 4043 - protein, 10 aa, synthetic construct
  REGION 1..10: note = Description of Artificial Sequence: Synthetic peptide
WPWYIWLGFI

SEQ ID NO: 4044 - protein, 11 aa, synthetic construct
  REGION 1..11: note = Description of Artificial Sequence: Synthetic peptide
WPWYIWLGFIA

SEQ ID NO: 4045 - protein, 9 aa, synthetic construct
  REGION 1..9: note = Description of Artificial Sequence: Synthetic peptide
WQTGDFVKA

SEQ ID NO: 4046 - protein, 10 aa, synthetic construct
  REGION 1..10: note = Description of Artificial Sequence: Synthetic peptide
WRVYSTGSNV

SEQ ID NO: 4047 - protein, 10 aa, synthetic construct
  REGION 1..10: note = Description of Artificial Sequence: Synthetic peptide
WSFNPETNIL

SEQ ID NO: 4048 - protein, 9 aa, synthetic construct
  REGION 1..9: note = Description of Artificial Sequence: Synthetic peptide
WSLFFFLYE

SEQ ID NO: 4049 - protein, 9 aa, synthetic construct
  REGION 1..9: note = Description of Artificial Sequence: Synthetic peptide
WSYSGQSTQ

SEQ ID NO: 4050 - protein, 8 aa, synthetic construct
  REGION 1..8: note = Description of Artificial Sequence: Synthetic peptide
WTAFVTNV

SEQ ID NO: 4051 - protein, 10 aa, synthetic construct
  REGION 1..10: note = Description of Artificial Sequence: Synthetic peptide
WTAFVTNVNA

SEQ ID NO: 4052 - protein, 10 aa, synthetic construct
  REGION 1..10: note = Description of Artificial Sequence: Synthetic peptide
WTAGAAAYYV

SEQ ID NO: 4053 - protein, 9 aa, synthetic construct
  REGION 1..9: note = Description of Artificial Sequence: Synthetic peptide
WTIEYPIIG

SEQ ID NO: 4054 - protein, 11 aa, synthetic construct
  REGION 1..11: note = Description of Artificial Sequence: Synthetic peptide
WTLMNVLTLVY

SEQ ID NO: 4055 - protein, 8 aa, synthetic construct
  REGION 1..8: note = Description of Artificial Sequence: Synthetic peptide
WVATEGAL

SEQ ID NO: 4056 - protein, 8 aa, synthetic construct
  REGION 1..8: note = Description of Artificial Sequence: Synthetic peptide
WVLNNDYY

SEQ ID NO: 4057 - protein, 8 aa, synthetic construct
  REGION 1..8: note = Description of Artificial Sequence: Synthetic peptide
WYDFGDFI

SEQ ID NO: 4058 - protein, 8 aa, synthetic construct
  REGION 1..8: note = Description of Artificial Sequence: Synthetic peptide
WYDFVENP

SEQ ID NO: 4059 - protein, 8 aa, synthetic construct
  REGION 1..8: note = Description of Artificial Sequence: Synthetic peptide
WYIRVGAR

SEQ ID NO: 4060 - protein, 9 aa, synthetic construct
  REGION 1..9: note = Description of Artificial Sequence: Synthetic peptide
WYIRVGARK

SEQ ID NO: 4061 - protein, 9 aa, synthetic construct
  REGION 1..9: note = Description of Artificial Sequence: Synthetic peptide
WYIWLGFIA

SEQ ID NO: 4062 - protein, 10 aa, synthetic construct
  REGION 1..10: note = Description of Artificial Sequence: Synthetic peptide
WYTERSEKSY

SEQ ID NO: 4063 - protein, 11 aa, synthetic construct
  REGION 1..11: note = Description of Artificial Sequence: Synthetic peptide
YAADPAMHAAS

SEQ ID NO: 4064 - protein, 8 aa, synthetic construct
  REGION 1..8: note = Description of Artificial Sequence: Synthetic peptide
YAAFATAQ

SEQ ID NO: 4065 - protein, 11 aa, synthetic construct
  REGION 1..11: note = Description of Artificial Sequence: Synthetic peptide
YAAFATAQEAY

SEQ ID NO: 4066 - protein, 9 aa, synthetic construct
  REGION 1..9: note = Description of Artificial Sequence: Synthetic peptide
YAAVINGDR

SEQ ID NO: 4067 - protein, 10 aa, synthetic construct
  REGION 1..10: note = Description of Artificial Sequence: Synthetic peptide
YADSFVIRGD

SEQ ID NO: 4068 - protein, 8 aa, synthetic construct
  REGION 1..8: note = Description of Artificial Sequence: Synthetic peptide
YAFASEAA

SEQ ID NO: 4069 - protein, 10 aa, synthetic construct
  REGION 1..10: note = Description of Artificial Sequence: Synthetic peptide
YAFEHIVYGD

SEQ ID NO: 4070 - protein, 11 aa, synthetic construct
  REGION 1..11: note = Description of Artificial Sequence: Synthetic peptide
YAFEHIVYGDF

SEQ ID NO: 4071 - protein, 10 aa, synthetic construct
  REGION 1..10: note = Description of Artificial Sequence: Synthetic peptide
YALVYFLQSI

SEQ ID NO: 4072 - protein, 9 aa, synthetic construct
  REGION 1..9: note = Description of Artificial Sequence: Synthetic peptide
YANGGKGFC

SEQ ID NO: 4073 - protein, 11 aa, synthetic construct
  REGION 1..11: note = Description of Artificial Sequence: Synthetic peptide
YANGGKGFCKL

SEQ ID NO: 4074 - protein, 11 aa, synthetic construct
  REGION 1..11: note = Description of Artificial Sequence: Synthetic peptide
YASAVVLLILM

SEQ ID NO: 4075 - protein, 10 aa, synthetic construct
  REGION 1..10: note = Description of Artificial Sequence: Synthetic peptide
YASQGLVASI

SEQ ID NO: 4076 - protein, 10 aa, synthetic construct
  REGION 1..10: note = Description of Artificial Sequence: Synthetic peptide
YATHSDKFTD

SEQ ID NO: 4077 - protein, 9 aa, synthetic construct
  REGION 1..9: note = Description of Artificial Sequence: Synthetic peptide
YAWNRKRIS

SEQ ID NO: 4078 - protein, 9 aa, synthetic construct
  REGION 1..9: note = Description of Artificial Sequence: Synthetic peptide
YAYLRKHFS

SEQ ID NO: 4079 - protein, 9 aa, synthetic construct
  REGION 1..9: note = Description of Artificial Sequence: Synthetic peptide
YCALAPNMM

SEQ ID NO: 4080 - protein, 9 aa, synthetic construct
  REGION 1..9: note = Description of Artificial Sequence: Synthetic peptide
YCPACHNSE

SEQ ID NO: 4081 - protein, 10 aa, synthetic construct
  REGION 1..10: note = Description of Artificial Sequence: Synthetic peptide
YCPACHNSEV

SEQ ID NO: 4082 - protein, 9 aa, synthetic construct
  REGION 1..9: note = Description of Artificial Sequence: Synthetic peptide
YCPIFFITG

SEQ ID NO: 4083 - protein, 12 aa, synthetic construct
  REGION 1..12: note = Description of Artificial Sequence: Synthetic peptide
YCPIFFITGNTL

SEQ ID NO: 4084 - protein, 9 aa, synthetic construct
  REGION 1..9: note = Description of Artificial Sequence: Synthetic peptide
YCRHGTCER

SEQ ID NO: 4085 - protein, 9 aa, synthetic construct
  REGION 1..9: note = Description of Artificial Sequence: Synthetic peptide
YDANYFLCW

SEQ ID NO: 4086 - protein, 9 aa, synthetic construct
  REGION 1..9: note = Description of Artificial Sequence: Synthetic peptide
YDDGARRVW

SEQ ID NO: 4087 - protein, 9 aa, synthetic construct
  REGION 1..9: note = Description of Artificial Sequence: Synthetic peptide
YDHVISTSH

SEQ ID NO: 4088 - protein, 9 aa, synthetic construct
  REGION 1..9: note = Description of Artificial Sequence: Synthetic peptide
YDKLVSSFL

SEQ ID NO: 4089 - protein, 8 aa, synthetic construct
  REGION 1..8: note = Description of Artificial Sequence: Synthetic peptide
YDNKLKAH

SEQ ID NO: 4090 - protein, 8 aa, synthetic construct
  REGION 1..8: note = Description of Artificial Sequence: Synthetic peptide
YDPKTKNV

SEQ ID NO: 4091 - protein, 8 aa, synthetic construct
  REGION 1..8: note = Description of Artificial Sequence: Synthetic peptide
YDSMSYED

SEQ ID NO: 4092 - protein, 8 aa, synthetic construct
  REGION 1..8: note = Description of Artificial Sequence: Synthetic peptide
YDYVIFTQ

SEQ ID NO: 4093 - protein, 8 aa, synthetic construct
  REGION 1..8: note = Description of Artificial Sequence: Synthetic peptide
YDYYRYNL

SEQ ID NO: 4094 - protein, 9 aa, synthetic construct
  REGION 1..9: note = Description of Artificial Sequence: Synthetic peptide
YDYYRYNLP

SEQ ID NO: 4095 - protein, 11 aa, synthetic construct
  REGION 1..11: note = Description of Artificial Sequence: Synthetic peptide
YEAMYTPHTVL

SEQ ID NO: 4096 - protein, 11 aa, synthetic construct
  REGION 1..11: note = Description of Artificial Sequence: Synthetic peptide
YECDIPIGAGI

SEQ ID NO: 4097 - protein, 9 aa, synthetic construct
  REGION 1..9: note = Description of Artificial Sequence: Synthetic peptide
YECLYRNRD

SEQ ID NO: 4098 - protein, 9 aa, synthetic construct
  REGION 1..9: note = Description of Artificial Sequence: Synthetic peptide
YEDFQENWN

SEQ ID NO: 4099 - protein, 8 aa, synthetic construct
  REGION 1..8: note = Description of Artificial Sequence: Synthetic peptide
YEDLLIRK

SEQ ID NO: 4100 - protein, 10 aa, synthetic construct
  REGION 1..10: note = Description of Artificial Sequence: Synthetic peptide
YEDLLIRKSN

SEQ ID NO: 4101 - protein, 9 aa, synthetic construct
  REGION 1..9: note = Description of Artificial Sequence: Synthetic peptide
YEGNSPFHP

SEQ ID NO: 4102 - protein, 10 aa, synthetic construct
  REGION 1..10: note = Description of Artificial Sequence: Synthetic peptide
YEGNSPFHPL

SEQ ID NO: 4103 - protein, 9 aa, synthetic construct
  REGION 1..9: note = Description of Artificial Sequence: Synthetic peptide
YELKHGTFT

SEQ ID NO: 4104 - protein, 10 aa, synthetic construct
  REGION 1..10: note = Description of Artificial Sequence: Synthetic peptide
YELKHGTFTC

SEQ ID NO: 4105 - protein, 11 aa, synthetic construct
  REGION 1..11: note = Description of Artificial Sequence: Synthetic peptide
YELKHGTFTCA

SEQ ID NO: 4106 - protein, 11 aa, synthetic construct
  REGION 1..11: note = Description of Artificial Sequence: Synthetic peptide
YENFNQHEVLL

SEQ ID NO: 4107 - protein, 8 aa, synthetic construct
  REGION 1..8: note = Description of Artificial Sequence: Synthetic peptide
YEPLTQDH

SEQ ID NO: 4108 - protein, 8 aa, synthetic construct
  REGION 1..8: note = Description of Artificial Sequence: Synthetic peptide
YEPQIITT

SEQ ID NO: 4109 - protein, 9 aa, synthetic construct
  REGION 1..9: note = Description of Artificial Sequence: Synthetic peptide
YEQAVANGD

SEQ ID NO: 4110 - protein, 9 aa, synthetic construct
  REGION 1..9: note = Description of Artificial Sequence: Synthetic peptide
YEQFKKGVQ

SEQ ID NO: 4111 - protein, 11 aa, synthetic construct
  REGION 1..11: note = Description of Artificial Sequence: Synthetic peptide
YEQFKKGVQIP

SEQ ID NO: 4112 - protein, 8 aa, synthetic construct
  REGION 1..8: note = Description of Artificial Sequence: Synthetic peptide
YEQYIKWP

SEQ ID NO: 4113 - protein, 8 aa, synthetic construct
  REGION 1..8: note = Description of Artificial Sequence: Synthetic peptide
YERHSLSH

SEQ ID NO: 4114 - protein, 10 aa, synthetic construct
  REGION 1..10: note = Description of Artificial Sequence: Synthetic peptide
YERHSLSHFV

SEQ ID NO: 4115 - protein, 8 aa, synthetic construct
  REGION 1..8: note = Description of Artificial Sequence: Synthetic peptide
YFDCYDGG

SEQ ID NO: 4116 - protein, 9 aa, synthetic construct
  REGION 1..9: note = Description of Artificial Sequence: Synthetic peptide
YFDCYDGGC

SEQ ID NO: 4117 - protein, 10 aa, synthetic construct
  REGION 1..10: note = Description of Artificial Sequence: Synthetic peptide
YFDCYDGGCI

SEQ ID NO: 4118 - protein, 8 aa, synthetic construct
  REGION 1..8: note = Description of Artificial Sequence: Synthetic peptide
YFDKAGQK

SEQ ID NO: 4119 - protein, 9 aa, synthetic construct
  REGION 1..9: note = Description of Artificial Sequence: Synthetic peptide
YFDKAGQKT

SEQ ID NO: 4120 - protein, 8 aa, synthetic construct
  REGION 1..8: note = Description of Artificial Sequence: Synthetic peptide
YFFTLLLQ

SEQ ID NO: 4121 - protein, 10 aa, synthetic construct
  REGION 1..10: note = Description of Artificial Sequence: Synthetic peptide
YFFTLLLQLC

SEQ ID NO: 4122 - protein, 10 aa, synthetic construct
  REGION 1..10: note = Description of Artificial Sequence: Synthetic peptide
YFGLFCLLNR

SEQ ID NO: 4123 - protein, 11 aa, synthetic construct
  REGION 1..11: note = Description of Artificial Sequence: Synthetic peptide
YFIASFRLFAR

SEQ ID NO: 4124 - protein, 11 aa, synthetic construct
  REGION 1..11: note = Description of Artificial Sequence: Synthetic peptide
YFIKGLNNLNR

SEQ ID NO: 4125 - protein, 8 aa, synthetic construct
  REGION 1..8: note = Description of Artificial Sequence: Synthetic peptide
YFKNHTSP

SEQ ID NO: 4126 - protein, 10 aa, synthetic construct
  REGION 1..10: note = Description of Artificial Sequence: Synthetic peptide
YFLQSINFVR

SEQ ID NO: 4127 - protein, 11 aa, synthetic construct
  REGION 1..11: note = Description of Artificial Sequence: Synthetic peptide
YFLQSINFVRI

SEQ ID NO: 4128 - protein, 8 aa, synthetic construct
  REGION 1..8: note = Description of Artificial Sequence: Synthetic peptide
YFRLTLGV

SEQ ID NO: 4129 - protein, 11 aa, synthetic construct
  REGION 1..11: note = Description of Artificial Sequence: Synthetic peptide
YFRLTLGVYDY

SEQ ID NO: 4130 - protein, 11 aa, synthetic construct
  REGION 1..11: note = Description of Artificial Sequence: Synthetic peptide
YFTQSRNLQEF

SEQ ID NO: 4131 - protein, 11 aa, synthetic construct
  REGION 1..11: note = Description of Artificial Sequence: Synthetic peptide
YFYTSKTTVAS

SEQ ID NO: 4132 - protein, 12 aa, synthetic construct
  REGION 1..12: note = Description of Artificial Sequence: Synthetic peptide
YFYTSKTTVASL

SEQ ID NO: 4133 - protein, 10 aa, synthetic construct
  REGION 1..10: note = Description of Artificial Sequence: Synthetic peptide
YGADLKSFDL

SEQ ID NO: 4134 - protein, 8 aa, synthetic construct
  REGION 1..8: note = Description of Artificial Sequence: Synthetic peptide
YGDFSHSQ

SEQ ID NO: 4135 - protein, 8 aa, synthetic construct
  REGION 1..8: note = Description of Artificial Sequence: Synthetic peptide
YGDSATLP

SEQ ID NO: 4136 - protein, 9 aa, synthetic construct
  REGION 1..9: note = Description of Artificial Sequence: Synthetic peptide
YGFQPTNGV

SEQ ID NO: 4137 - protein, 11 aa, synthetic construct
  REGION 1..11: note = Description of Artificial Sequence: Synthetic peptide
YGFQPTNGVGY

SEQ ID NO: 4138 - protein, 10 aa, synthetic construct
  REGION 1..10: note = Description of Artificial Sequence: Synthetic peptide
YHDVRVVLDF

SEQ ID NO: 4139 - protein, 11 aa, synthetic construct
  REGION 1..11: note = Description of Artificial Sequence: Synthetic peptide
YHDVRVVLDFI

SEQ ID NO: 4140 - protein, 8 aa, synthetic construct
  REGION 1..8: note = Description of Artificial Sequence: Synthetic peptide
YHTTDPSF

SEQ ID NO: 4141 - protein, 8 aa, synthetic construct
  REGION 1..8: note = Description of Artificial Sequence: Synthetic peptide
YHYQECVR

SEQ ID NO: 4142 - protein, 9 aa, synthetic construct
  REGION 1..9: note = Description of Artificial Sequence: Synthetic peptide
YICGDSTEC

SEQ ID NO: 4143 - protein, 10 aa, synthetic construct
  REGION 1..10: note = Description of Artificial Sequence: Synthetic peptide
YIDIGNYTVS

SEQ ID NO: 4144 - protein, 11 aa, synthetic construct
  REGION 1..11: note = Description of Artificial Sequence: Synthetic peptide
YIDIGNYTVSC

SEQ ID NO: 4145 - protein, 10 aa, synthetic construct
  REGION 1..10: note = Description of Artificial Sequence: Synthetic peptide
YIFFASFYYV

SEQ ID NO: 4146 - protein, 10 aa, synthetic construct
  REGION 1..10: note = Description of Artificial Sequence: Synthetic peptide
YILANTCTER

SEQ ID NO: 4147 - protein, 8 aa, synthetic construct
  REGION 1..8: note = Description of Artificial Sequence: Synthetic peptide
YIRVGARK

SEQ ID NO: 4148 - protein, 10 aa, synthetic construct
  REGION 1..10: note = Description of Artificial Sequence: Synthetic peptide
YITTYPGQGL

SEQ ID NO: 4149 - protein, 8 aa, synthetic construct
  REGION 1..8: note = Description of Artificial Sequence: Synthetic peptide
YIWLGFIA

SEQ ID NO: 4150 - protein, 9 aa, synthetic construct
  REGION 1..9: note = Description of Artificial Sequence: Synthetic peptide
YKAFKQIVE

SEQ ID NO: 4151 - protein, 10 aa, synthetic construct
  REGION 1..10: note = Description of Artificial Sequence: Synthetic peptide
YKAIDGGVTR

SEQ ID NO: 4152 - protein, 9 aa, synthetic construct
  REGION 1..9: note = Description of Artificial Sequence: Synthetic peptide
YKENSYTTT

SEQ ID NO: 4153 - protein, 10 aa, synthetic construct
  REGION 1..10: note = Description of Artificial Sequence: Synthetic peptide
YKENSYTTTI

SEQ ID NO: 4154 - protein, 10 aa, synthetic construct
  REGION 1..10: note = Description of Artificial Sequence: Synthetic peptide
YKHITSKETL

SEQ ID NO: 4155 - protein, 10 aa, synthetic construct
  REGION 1..10: note = Description of Artificial Sequence: Synthetic peptide
YKHWPQIAQF

SEQ ID NO: 4156 - protein, 9 aa, synthetic construct
  REGION 1..9: note = Description of Artificial Sequence: Synthetic peptide
YKKVDGVVQ

SEQ ID NO: 4157 - protein, 9 aa, synthetic construct
  REGION 1..9: note = Description of Artificial Sequence: Synthetic peptide
YKLEGYAFE

SEQ ID NO: 4158 - protein, 9 aa, synthetic construct
  REGION 1..9: note = Description of Artificial Sequence: Synthetic peptide
YKLMGHFAW

SEQ ID NO: 4159 - protein, 8 aa, synthetic construct
  REGION 1..8: note = Description of Artificial Sequence: Synthetic peptide
YKLNVGDY

SEQ ID NO: 4160 - protein, 11 aa, synthetic construct
  REGION 1..11: note = Description of Artificial Sequence: Synthetic peptide
YKLNVGDYFVL

SEQ ID NO: 4161 - protein, 10 aa, synthetic construct
  REGION 1..10: note = Description of Artificial Sequence: Synthetic peptide
YKLPDDFTGC

SEQ ID NO: 4162 - protein, 10 aa, synthetic construct
  REGION 1..10: note = Description of Artificial Sequence: Synthetic peptide
YKNTCDGTTF

SEQ ID NO: 4163 - protein, 12 aa, synthetic construct
  REGION 1..12: note = Description of Artificial Sequence: Synthetic peptide
YKNTCDGTTFTY

SEQ ID NO: 4164 - protein, 10 aa, synthetic construct
  REGION 1..10: note = Description of Artificial Sequence: Synthetic peptide
YKSVNITFEL

SEQ ID NO: 4165 - protein, 8 aa, synthetic construct
  REGION 1..8: note = Description of Artificial Sequence: Synthetic peptide
YKYFSGAM

SEQ ID NO: 4166 - protein, 9 aa, synthetic construct
  REGION 1..9: note = Description of Artificial Sequence: Synthetic peptide
YKYFSGAMD

SEQ ID NO: 4167 - protein, 9 aa, synthetic construct
  REGION 1..9: note = Description of Artificial Sequence: Synthetic peptide
YLALYNKYK

SEQ ID NO: 4168 - protein, 10 aa, synthetic construct
  REGION 1..10: note = Description of Artificial Sequence: Synthetic peptide
YLASGGQPIT

SEQ ID NO: 4169 - protein, 8 aa, synthetic construct
  REGION 1..8: note = Description of Artificial Sequence: Synthetic peptide
YLDGADVT

SEQ ID NO: 4170 - protein, 9 aa, synthetic construct
  REGION 1..9: note = Description of Artificial Sequence: Synthetic peptide
YLGKPREQI

SEQ ID NO: 4171 - protein, 10 aa, synthetic construct
  REGION 1..10: note = Description of Artificial Sequence: Synthetic peptide
YLGTGPEAGL

SEQ ID NO: 4172 - protein, 11 aa, synthetic construct
  REGION 1..11: note = Description of Artificial Sequence: Synthetic peptide
YLITPVHVMSK

SEQ ID NO: 4173 - protein, 11 aa, synthetic construct
  REGION 1..11: note = Description of Artificial Sequence: Synthetic peptide
YLKHGGGVAGA

SEQ ID NO: 4174 - protein, 8 aa, synthetic construct
  REGION 1..8: note = Description of Artificial Sequence: Synthetic peptide
YLKLRSDV

SEQ ID NO: 4175 - protein, 9 aa, synthetic construct
  REGION 1..9: note = Description of Artificial Sequence: Synthetic peptide
YLKLRSDVL

SEQ ID NO: 4176 - protein, 10 aa, synthetic construct
  REGION 1..10: note = Description of Artificial Sequence: Synthetic peptide
YLKLRSDVLL

SEQ ID NO: 4177 - protein, 10 aa, synthetic construct
  REGION 1..10: note = Description of Artificial Sequence: Synthetic peptide
YLNSTNVTIA

SEQ ID NO: 4178 - protein, 8 aa, synthetic construct
  REGION 1..8: note = Description of Artificial Sequence: Synthetic peptide
YLNTLTLA

SEQ ID NO: 4179 - protein, 9 aa, synthetic construct
  REGION 1..9: note = Description of Artificial Sequence: Synthetic peptide
YLPIDKCSR

SEQ ID NO: 4180 - protein, 11 aa, synthetic construct
  REGION 1..11: note = Description of Artificial Sequence: Synthetic peptide
YLPYPDPSRIL

SEQ ID NO: 4181 - protein, 8 aa, synthetic construct
  REGION 1..8: note = Description of Artificial Sequence: Synthetic peptide
YLRKHFSM

SEQ ID NO: 4182 - protein, 9 aa, synthetic construct
  REGION 1..9: note = Description of Artificial Sequence: Synthetic peptide
YLRKHFSMM

SEQ ID NO: 4183 - protein, 9 aa, synthetic construct
  REGION 1..9: note = Description of Artificial Sequence: Synthetic peptide
YLVQQESPF

SEQ ID NO: 4184 - protein, 10 aa, synthetic construct
  REGION 1..10: note = Description of Artificial Sequence: Synthetic peptide
YLVQQESPFV

SEQ ID NO: 4185 - protein, 10 aa, synthetic construct
  REGION 1..10: note = Description of Artificial Sequence: Synthetic peptide
YLYALVYFLQ

SEQ ID NO: 4186 - protein, 9 aa, synthetic construct
  REGION 1..9: note = Description of Artificial Sequence: Synthetic peptide
YLYRLFRKS

SEQ ID NO: 4187 - protein, 10 aa, synthetic construct
  REGION 1..10: note = Description of Artificial Sequence: Synthetic peptide
YMGTLSYEQF

SEQ ID NO: 4188 - protein, 10 aa, synthetic construct
  REGION 1..10: note = Description of Artificial Sequence: Synthetic peptide
YMPASWVMRI

SEQ ID NO: 4189 - protein, 9 aa, synthetic construct
  REGION 1..9: note = Description of Artificial Sequence: Synthetic peptide
YMRSLKVPA

SEQ ID NO: 4190 - protein, 11 aa, synthetic construct
  REGION 1..11: note = Description of Artificial Sequence: Synthetic peptide
YMRSLKVPATV

SEQ ID NO: 4191 - protein, 9 aa, synthetic construct
  REGION 1..9: note = Description of Artificial Sequence: Synthetic peptide
YNLWNTFTR

SEQ ID NO: 4192 - protein, 8 aa, synthetic construct
  REGION 1..8: note = Description of Artificial Sequence: Synthetic peptide
YNYEPLTQ

SEQ ID NO: 4193 - protein, 9 aa, synthetic construct
  REGION 1..9: note = Description of Artificial Sequence: Synthetic peptide
YNYKLPDDF

SEQ ID NO: 4194 - protein, 9 aa, synthetic construct
  REGION 1..9: note = Description of Artificial Sequence: Synthetic peptide
YNYLYRLFR

SEQ ID NO: 4195 - protein, 8 aa, synthetic construct
  REGION 1..8: note = Description of Artificial Sequence: Synthetic peptide
YPANSIVC

SEQ ID NO: 4196 - protein, 11 aa, synthetic construct
  REGION 1..11: note = Description of Artificial Sequence: Synthetic peptide
YPGQGLNGYTV

SEQ ID NO: 4197 - protein, 10 aa, synthetic construct
  REGION 1..10: note = Description of Artificial Sequence: Synthetic peptide
YPLECIKDLL

SEQ ID NO: 4198 - protein, 11 aa, synthetic construct
  REGION 1..11: note = Description of Artificial Sequence: Synthetic peptide
YPLECIKDLLA

SEQ ID NO: 4199 - protein, 11 aa, synthetic construct
  REGION 1..11: note = Description of Artificial Sequence: Synthetic peptide
YPLTKHPNQEY

SEQ ID NO: 4200 - protein, 11 aa, synthetic construct
  REGION 1..11: note = Description of Artificial Sequence: Synthetic peptide
YPNMFITREEA

SEQ ID NO: 4201 - protein, 10 aa, synthetic construct
  REGION 1..10: note = Description of Artificial Sequence: Synthetic peptide
YPSLETIQIT

SEQ ID NO: 4202 - protein, 11 aa, synthetic construct
  REGION 1..11: note = Description of Artificial Sequence: Synthetic peptide
YPSLETIQITI

SEQ ID NO: 4203 - protein, 8 aa, synthetic construct
  REGION 1..8: note = Description of Artificial Sequence: Synthetic peptide
YPTLNISD

SEQ ID NO: 4204 - protein, 9 aa, synthetic construct
  REGION 1..9: note = Description of Artificial Sequence: Synthetic peptide
YQCAMRPNF

SEQ ID NO: 4205 - protein, 9 aa, synthetic construct
  REGION 1..9: note = Description of Artificial Sequence: Synthetic peptide
YQCGHYKHI

SEQ ID NO: 4206 - protein, 9 aa, synthetic construct
  REGION 1..9: note = Description of Artificial Sequence: Synthetic peptide
YQLYSTQLS

SEQ ID NO: 4207 - protein, 8 aa, synthetic construct
  REGION 1..8: note = Description of Artificial Sequence: Synthetic peptide
YQPYRVVV

SEQ ID NO: 4208 - protein, 10 aa, synthetic construct
  REGION 1..10: note = Description of Artificial Sequence: Synthetic peptide
YRAFDIYNDK

SEQ ID NO: 4209 - protein, 9 aa, synthetic construct
  REGION 1..9: note = Description of Artificial Sequence: Synthetic peptide
YREAACCHL

SEQ ID NO: 4210 - protein, 9 aa, synthetic construct
  REGION 1..9: note = Description of Artificial Sequence: Synthetic peptide
YREGYLNST

SEQ ID NO: 4211 - protein, 9 aa, synthetic construct
  REGION 1..9: note = Description of Artificial Sequence: Synthetic peptide
YRINWITGG

SEQ ID NO: 4212 - protein, 9 aa, synthetic construct
  REGION 1..9: note = Description of Artificial Sequence: Synthetic peptide
YRKVLLRKN

SEQ ID NO: 4213 - protein, 10 aa, synthetic construct
  REGION 1..10: note = Description of Artificial Sequence: Synthetic peptide
YRLANECAQV

SEQ ID NO: 4214 - protein, 11 aa, synthetic construct
  REGION 1..11: note = Description of Artificial Sequence: Synthetic peptide
YRLANECAQVL

SEQ ID NO: 4215 - protein, 10 aa, synthetic construct
  REGION 1..10: note = Description of Artificial Sequence: Synthetic peptide
YRLFRKSNLK

SEQ ID NO: 4216 - protein, 8 aa, synthetic construct
  REGION 1..8: note = Description of Artificial Sequence: Synthetic peptide
YRLYLDAY

SEQ ID NO: 4217 - protein, 9 aa, synthetic construct
  REGION 1..9: note = Description of Artificial Sequence: Synthetic peptide
YRNRDVDTD

SEQ ID NO: 4218 - protein, 8 aa, synthetic construct
  REGION 1..8: note = Description of Artificial Sequence: Synthetic peptide
YRRLISMM

SEQ ID NO: 4219 - protein, 11 aa, synthetic construct
  REGION 1..11: note = Description of Artificial Sequence: Synthetic peptide
YRVVVLSFELL

SEQ ID NO: 4220 - protein, 8 aa, synthetic construct
  REGION 1..8: note = Description of Artificial Sequence: Synthetic peptide
YSDSPCES

SEQ ID NO: 4221 - protein, 10 aa, synthetic construct
  REGION 1..10: note = Description of Artificial Sequence: Synthetic peptide
YSDSPCESHG

SEQ ID NO: 4222 - protein, 12 aa, synthetic construct
  REGION 1..12: note = Description of Artificial Sequence: Synthetic peptide
YSDVENPHLMGW

SEQ ID NO: 4223 - protein, 12 aa, synthetic construct
  REGION 1..12: note = Description of Artificial Sequence: Synthetic peptide
YSFLPGVYSVIY

SEQ ID NO: 4224 - protein, 8 aa, synthetic construct
  REGION 1..8: note = Description of Artificial Sequence: Synthetic peptide
YSFVSEET

SEQ ID NO: 4225 - protein, 8 aa, synthetic construct
  REGION 1..8: note = Description of Artificial Sequence: Synthetic peptide
YSLLLCRM

SEQ ID NO: 4226 - protein, 9 aa, synthetic construct
  REGION 1..9: note = Description of Artificial Sequence: Synthetic peptide
YSLRLIDAM

SEQ ID NO: 4227 - protein, 10 aa, synthetic construct
  REGION 1..10: note = Description of Artificial Sequence: Synthetic peptide
YSPIFLIVAA

SEQ ID NO: 4228 - protein, 11 aa, synthetic construct
  REGION 1..11: note = Description of Artificial Sequence: Synthetic peptide
YSVIYLYLTFY

SEQ ID NO: 4229 - protein, 8 aa, synthetic construct
  REGION 1..8: note = Description of Artificial Sequence: Synthetic peptide
YSVLYNSA

SEQ ID NO: 4230 - protein, 10 aa, synthetic construct
  REGION 1..10: note = Description of Artificial Sequence: Synthetic peptide
YTDFATSACV

SEQ ID NO: 4231 - protein, 11 aa, synthetic construct
  REGION 1..11: note = Description of Artificial Sequence: Synthetic peptide
YTDFATSACVL

SEQ ID NO: 4232 - protein, 10 aa, synthetic construct
  REGION 1..10: note = Description of Artificial Sequence: Synthetic peptide
YTEISFMLWC

SEQ ID NO: 4233 - protein, 9 aa, synthetic construct
  REGION 1..9: note = Description of Artificial Sequence: Synthetic peptide
YTEKWESGV

SEQ ID NO: 4234 - protein, 10 aa, synthetic construct
  REGION 1..10: note = Description of Artificial Sequence: Synthetic peptide
YTEKWESGVK

SEQ ID NO: 4235 - protein, 9 aa, synthetic construct
  REGION 1..9: note = Description of Artificial Sequence: Synthetic peptide
YTELEPPCR

SEQ ID NO: 4236 - protein, 10 aa, synthetic construct
  REGION 1..10: note = Description of Artificial Sequence: Synthetic peptide
YTELEPPCRF

SEQ ID NO: 4237 - protein, 8 aa, synthetic construct
  REGION 1..8: note = Description of Artificial Sequence: Synthetic peptide
YTERSEKS

SEQ ID NO: 4238 - protein, 10 aa, synthetic construct
  REGION 1..10: note = Description of Artificial Sequence: Synthetic peptide
YTGNYQCGHY

SEQ ID NO: 4239 - protein, 10 aa, synthetic construct
  REGION 1..10: note = Description of Artificial Sequence: Synthetic peptide
YTKRNVIPTI

SEQ ID NO: 4240 - protein, 12 aa, synthetic construct
  REGION 1..12: note = Description of Artificial Sequence: Synthetic peptide
YTKVDGVDVELF

SEQ ID NO: 4241 - protein, 9 aa, synthetic construct
  REGION 1..9: note = Description of Artificial Sequence: Synthetic peptide
YTMADLVYA

SEQ ID NO: 4242 - protein, 9 aa, synthetic construct
  REGION 1..9: note = Description of Artificial Sequence: Synthetic peptide
YTPHTVLQA

SEQ ID NO: 4243 - protein, 9 aa, synthetic construct
  REGION 1..9: note = Description of Artificial Sequence: Synthetic peptide
YTSALLAGT

SEQ ID NO: 4244 - protein, 10 aa, synthetic construct
  REGION 1..10: note = Description of Artificial Sequence: Synthetic peptide
YTSKTTVASL

SEQ ID NO: 4245 - protein, 9 aa, synthetic construct
  REGION 1..9: note = Description of Artificial Sequence: Synthetic peptide
YTSNPTTFH

SEQ ID NO: 4246 - protein, 8 aa, synthetic construct
  REGION 1..8: note = Description of Artificial Sequence: Synthetic peptide
YTTTIKPV

SEQ ID NO: 4247 - protein, 12 aa, synthetic construct
  REGION 1..12: note = Description of Artificial Sequence: Synthetic peptide
YTVELGTEVNEF

SEQ ID NO: 4248 - protein, 10 aa, synthetic construct
  REGION 1..10: note = Description of Artificial Sequence: Synthetic peptide
YTVSCLPFTI

SEQ ID NO: 4249 - protein, 10 aa, synthetic construct
  REGION 1..10: note = Description of Artificial Sequence: Synthetic peptide
YVDNSSLTIK

SEQ ID NO: 4250 - protein, 11 aa, synthetic construct
  REGION 1..11: note = Description of Artificial Sequence: Synthetic peptide
YVDNSSLTIKK

SEQ ID NO: 4251 - protein, 10 aa, synthetic construct
  REGION 1..10: note = Description of Artificial Sequence: Synthetic peptide
YVGCHNKCAY

SEQ ID NO: 4252 - protein, 10 aa, synthetic construct
  REGION 1..10: note = Description of Artificial Sequence: Synthetic peptide
YVMHANYIFW

SEQ ID NO: 4253 - protein, 8 aa, synthetic construct
  REGION 1..8: note = Description of Artificial Sequence: Synthetic peptide
YVPLKSAT

SEQ ID NO: 4254 - protein, 9 aa, synthetic construct
  REGION 1..9: note = Description of Artificial Sequence: Synthetic peptide
YVPLKSATC

SEQ ID NO: 4255 - protein, 10 aa, synthetic construct
  REGION 1..10: note = Description of Artificial Sequence: Synthetic peptide
YVSQPFLMDL

SEQ ID NO: 4256 - protein, 10 aa, synthetic construct
  REGION 1..10: note = Description of Artificial Sequence: Synthetic peptide
YVTQQLIRAA

SEQ ID NO: 4257 - protein, 8 aa, synthetic construct
  REGION 1..8: note = Description of Artificial Sequence: Synthetic peptide
YVYIGDPA

SEQ ID NO: 4258 - protein, 9 aa, synthetic construct
  REGION 1..9: note = Description of Artificial Sequence: Synthetic peptide
YVYIGDPAQ

SEQ ID NO: 4259 - protein, 8 aa, synthetic construct
  REGION 1..8: note = Description of Artificial Sequence: Synthetic peptide
YVYNPFMI

SEQ ID NO: 4260 - protein, 10 aa, synthetic construct
  REGION 1..10: note = Description of Artificial Sequence: Synthetic peptide
YVYNPFMIDV

SEQ ID NO: 4261 - protein, 8 aa, synthetic construct
  REGION 1..8: note = Description of Artificial Sequence: Synthetic peptide
YWDQTYHP

SEQ ID NO: 4262 - protein, 9 aa, synthetic construct
  REGION 1..9: note = Description of Artificial Sequence: Synthetic peptide
YWDQTYHPN

SEQ ID NO: 4263 - protein, 11 aa, synthetic construct
  REGION 1..11: note = Description of Artificial Sequence: Synthetic peptide
YWEPEFYEAMY

SEQ ID NO: 4264 - protein, 9 aa, synthetic construct
  REGION 1..9: note = Description of Artificial Sequence: Synthetic peptide
YWFFSNYLK

SEQ ID NO: 4265 - protein, 10 aa, synthetic construct
  REGION 1..10: note = Description of Artificial Sequence: Synthetic peptide
YWFFSNYLKR

SEQ ID NO: 4266 - protein, 8 aa, synthetic construct
  REGION 1..8: note = Description of Artificial Sequence: Synthetic peptide
YYDSMSYE

SEQ ID NO: 4267 - protein, 9 aa, synthetic construct
  REGION 1..9: note = Description of Artificial Sequence: Synthetic peptide
YYDSMSYED

SEQ ID NO: 4268 - protein, 8 aa, synthetic construct
  REGION 1..8: note = Description of Artificial Sequence: Synthetic peptide
YYFMRFRR

SEQ ID NO: 4269 - protein, 9 aa, synthetic construct
  REGION 1..9: note = Description of Artificial Sequence: Synthetic peptide
YYFMRFRRA

SEQ ID NO: 4270 - protein, 8 aa, synthetic construct
  REGION 1..8: note = Description of Artificial Sequence: Synthetic peptide
YYGNALDQ

SEQ ID NO: 4271 - protein, 10 aa, synthetic construct
  REGION 1..10: note = Description of Artificial Sequence: Synthetic peptide
YYGNALDQAI

SEQ ID NO: 4272 - protein, 8 aa, synthetic construct
  REGION 1..8: note = Description of Artificial Sequence: Synthetic peptide
YYHTTDPS

SEQ ID NO: 4273 - protein, 8 aa, synthetic construct
  REGION 1..8: note = Description of Artificial Sequence: Synthetic peptide
YYLFDESG

SEQ ID NO: 4274 - protein, 8 aa, synthetic construct
  REGION 1..8: note = Description of Artificial Sequence: Synthetic peptide
YYLGTGPE

SEQ ID NO: 4275 - protein, 11 aa, synthetic construct
  REGION 1..11: note = Description of Artificial Sequence: Synthetic peptide
YYLGTGPEAGL

SEQ ID NO: 4276 - protein, 9 aa, synthetic construct
  REGION 1..9: note = Description of Artificial Sequence: Synthetic peptide
YYNTTKGGR

SEQ ID NO: 4277 - protein, 9 aa, synthetic construct
  REGION 1..9: note = Description of Artificial Sequence: Synthetic peptide
YYRARAGEA

SEQ ID NO: 4278 - protein, 8 aa, synthetic construct
  REGION 1..8: note = Description of Artificial Sequence: Synthetic peptide
YYRRATRR

SEQ ID NO: 4279 - protein, 8 aa, synthetic construct
  REGION 1..8: note = Description of Artificial Sequence: Synthetic peptide
YYRSLPGV

SEQ ID NO: 4280 - protein, 11 aa, synthetic construct
  REGION 1..11: note = Description of Artificial Sequence: Synthetic peptide
YYSLLMPILTL

SEQ ID NO: 4281 - protein, 8 aa, synthetic construct
  REGION 1..8: note = Description of Artificial Sequence: Synthetic peptide
AAAYYVGY

SEQ ID NO: 4282 - protein, 8 aa, synthetic construct
  REGION 1..8: note = Description of Artificial Sequence: Synthetic peptide
AADPAMHA

SEQ ID NO: 4283 - protein, 9 aa, synthetic construct
  REGION 1..9: note = Description of Artificial Sequence: Synthetic peptide
AAFATAQEA

SEQ ID NO: 4284 - protein, 10 aa, synthetic construct
  REGION 1..10: note = Description of Artificial Sequence: Synthetic peptide
AAIMQLFFSY

SEQ ID NO: 4285 - protein, 11 aa, synthetic construct
  REGION 1..11: note = Description of Artificial Sequence: Synthetic peptide
AAISDYDYYRY

SEQ ID NO: 4286 - protein, 8 aa, synthetic construct
  REGION 1..8: note = Description of Artificial Sequence: Synthetic peptide
AAKLMVVI

SEQ ID NO: 4287 - protein, 9 aa, synthetic construct
  REGION 1..9: note = Description of Artificial Sequence: Synthetic peptide
AAKLMVVIP

SEQ ID NO: 4288 - protein, 9 aa, synthetic construct
  REGION 1..9: note = Description of Artificial Sequence: Synthetic peptide
AALALLLLD

SEQ ID NO: 4289 - protein, 10 aa, synthetic construct
  REGION 1..10: note = Description of Artificial Sequence: Synthetic peptide
AALCTFLLNK

SEQ ID NO: 4290 - protein, 10 aa, synthetic construct
  REGION 1..10: note = Description of Artificial Sequence: Synthetic peptide
AALGVLMSNL

SEQ ID NO: 4291 - protein, 8 aa, synthetic construct
  REGION 1..8: note = Description of Artificial Sequence: Synthetic peptide
AALLADKF

SEQ ID NO: 4292 - protein, 11 aa, synthetic construct
  REGION 1..11: note = Description of Artificial Sequence: Synthetic peptide
AALLADKFPVL

SEQ ID NO: 4293 - protein, 11 aa, synthetic construct
  REGION 1..11: note = Description of Artificial Sequence: Synthetic peptide
AANFCALILAY

SEQ ID NO: 4294 - protein, 8 aa, synthetic construct
  REGION 1..8: note = Description of Artificial Sequence: Synthetic peptide
AAYSRYRI

SEQ ID NO: 4295 - protein, 9 aa, synthetic construct
  REGION 1..9: note = Description of Artificial Sequence: Synthetic peptide
AAYSRYRIG

SEQ ID NO: 4296 - protein, 8 aa, synthetic construct
  REGION 1..8: note = Description of Artificial Sequence: Synthetic peptide
ACFVLAAV

SEQ ID NO: 4297 - protein, 10 aa, synthetic construct
  REGION 1..10: note = Description of Artificial Sequence: Synthetic peptide
ADDLNQLTGY

SEQ ID NO: 4298 - protein, 10 aa, synthetic construct
  REGION 1..10: note = Description of Artificial Sequence: Synthetic peptide
ADLDDFSKQL

SEQ ID NO: 4299 - protein, 10 aa, synthetic construct
  REGION 1..10: note = Description of Artificial Sequence: Synthetic peptide
ADLVYALRHF

SEQ ID NO: 4300 - protein, 9 aa, synthetic construct
  REGION 1..9: note = Description of Artificial Sequence: Synthetic peptide
ADSFVIRGD

SEQ ID NO: 4301 - protein, 9 aa, synthetic construct
  REGION 1..9: note = Description of Artificial Sequence: Synthetic peptide
ADVEWKFYD

SEQ ID NO: 4302 - protein, 10 aa, synthetic construct
  REGION 1..10: note = Description of Artificial Sequence: Synthetic peptide
AEETRKLMPV

SEQ ID NO: 4303 - protein, 10 aa, synthetic construct
  REGION 1..10: note = Description of Artificial Sequence: Synthetic peptide
AEHVNNSYEC

SEQ ID NO: 4304 - protein, 12 aa, synthetic construct
  REGION 1..12: note = Description of Artificial Sequence: Synthetic peptide
AEILLIIMRTFK

SEQ ID NO: 4305 - protein, 11 aa, synthetic construct
  REGION 1..11: note = Description of Artificial Sequence: Synthetic peptide
AEIPKEEVKPF

SEQ ID NO: 4306 - protein, 12 aa, synthetic construct
  REGION 1..12: note = Description of Artificial Sequence: Synthetic peptide
AEIVDTVSALVY

SEQ ID NO: 4307 - protein, 10 aa, synthetic construct
  REGION 1..10: note = Description of Artificial Sequence: Synthetic peptide
AELAKNVSLD

SEQ ID NO: 4308 - protein, 12 aa, synthetic construct
  REGION 1..12: note = Description of Artificial Sequence: Synthetic peptide
AELEGIQYGRSG

SEQ ID NO: 4309 - protein, 9 aa, synthetic construct
  REGION 1..9: note = Description of Artificial Sequence: Synthetic peptide
AETLKATEE

SEQ ID NO: 4310 - protein, 11 aa, synthetic construct
  REGION 1..11: note = Description of Artificial Sequence: Synthetic peptide
AETLKATEETF

SEQ ID NO: 4311 - protein, 11 aa, synthetic construct
  REGION 1..11: note = Description of Artificial Sequence: Synthetic peptide
AEVAVKMFDAY

SEQ ID NO: 4312 - protein, 10 aa, synthetic construct
  REGION 1..10: note = Description of Artificial Sequence: Synthetic peptide
AEVQIDRLIT

SEQ ID NO: 4313 - protein, 11 aa, synthetic construct
  REGION 1..11: note = Description of Artificial Sequence: Synthetic peptide
AEWFLAYILFT

SEQ ID NO: 4314 - protein, 12 aa, synthetic construct
  REGION 1..12: note = Description of Artificial Sequence: Synthetic peptide
AEYHNESGLKTI

SEQ ID NO: 4315 - protein, 8 aa, synthetic construct
  REGION 1..8: note = Description of Artificial Sequence: Synthetic peptide
AFATAQEA

SEQ ID NO: 4316 - protein, 8 aa, synthetic construct
  REGION 1..8: note = Description of Artificial Sequence: Synthetic peptide
AFDKSAFV

SEQ ID NO: 4317 - protein, 10 aa, synthetic construct
  REGION 1..10: note = Description of Artificial Sequence: Synthetic peptide
AFDKSAFVNL

SEQ ID NO: 4318 - protein, 10 aa, synthetic construct
  REGION 1..10: note = Description of Artificial Sequence: Synthetic peptide
AFFGMSRIGM

SEQ ID NO: 4319 - protein, 8 aa, synthetic construct
  REGION 1..8: note = Description of Artificial Sequence: Synthetic peptide
AFKLNIKL

SEQ ID NO: 4320 - protein, 8 aa, synthetic construct
  REGION 1..8: note = Description of Artificial Sequence: Synthetic peptide
AFLIGCNY

SEQ ID NO: 4321 - protein, 8 aa, synthetic construct
  REGION 1..8: note = Description of Artificial Sequence: Synthetic peptide
AFPFTIYS

SEQ ID NO: 4322 - protein, 8 aa, synthetic construct
  REGION 1..8: note = Description of Artificial Sequence: Synthetic peptide
AFPSGKVE

SEQ ID NO: 4323 - protein, 9 aa, synthetic construct
  REGION 1..9: note = Description of Artificial Sequence: Synthetic peptide
AFPSGKVEG

SEQ ID NO: 4324 - protein, 8 aa, synthetic construct
  REGION 1..8: note = Description of Artificial Sequence: Synthetic peptide
AFQTVKPG

SEQ ID NO: 4325 - protein, 11 aa, synthetic construct
  REGION 1..11: note = Description of Artificial Sequence: Synthetic peptide
AFVETVKGLDY

SEQ ID NO: 4326 - protein, 8 aa, synthetic construct
  REGION 1..8: note = Description of Artificial Sequence: Synthetic peptide
AFVNLKQL

SEQ ID NO: 4327 - protein, 9 aa, synthetic construct
  REGION 1..9: note = Description of Artificial Sequence: Synthetic peptide
AFVTNVNAS

SEQ ID NO: 4328 - protein, 8 aa, synthetic construct
  REGION 1..8: note = Description of Artificial Sequence: Synthetic peptide
AGFPFNKW

SEQ ID NO: 4329 - protein, 10 aa, synthetic construct
  REGION 1..10: note = Description of Artificial Sequence: Synthetic peptide
AGFPFNKWGK

SEQ ID NO: 4330 - protein, 9 aa, synthetic construct
  REGION 1..9: note = Description of Artificial Sequence: Synthetic peptide
AGGIVAIVV

SEQ ID NO: 4331 - protein, 9 aa, synthetic construct
  REGION 1..9: note = Description of Artificial Sequence: Synthetic peptide
AGLIAIVMV

SEQ ID NO: 4332 - protein, 8 aa, synthetic construct
  REGION 1..8: note = Description of Artificial Sequence: Synthetic peptide
AGNVQLRV

SEQ ID NO: 4333 - protein, 9 aa, synthetic construct
  REGION 1..9: note = Description of Artificial Sequence: Synthetic peptide
AGNVQLRVI

SEQ ID NO: 4334 - protein, 9 aa, synthetic construct
  REGION 1..9: note = Description of Artificial Sequence: Synthetic peptide
AGSDKGVAP

SEQ ID NO: 4335 - protein, 10 aa, synthetic construct
  REGION 1..10: note = Description of Artificial Sequence: Synthetic peptide
AGTDLEGNFY

SEQ ID NO: 4336 - protein, 8 aa, synthetic construct
  REGION 1..8: note = Description of Artificial Sequence: Synthetic peptide
AHIQWMVM

SEQ ID NO: 4337 - protein, 8 aa, synthetic construct
  REGION 1..8: note = Description of Artificial Sequence: Synthetic peptide
AHISTIGV

SEQ ID NO: 4338 - protein, 10 aa, synthetic construct
  REGION 1..10: note = Description of Artificial Sequence: Synthetic peptide
AHKDKSAQCF

SEQ ID NO: 4339 - protein, 9 aa, synthetic construct
  REGION 1..9: note = Description of Artificial Sequence: Synthetic peptide
AHVASCDAI

SEQ ID NO: 4340 - protein, 10 aa, synthetic construct
  REGION 1..10: note = Description of Artificial Sequence: Synthetic peptide
AIAMACLVGL

SEQ ID NO: 4341 - protein, 9 aa, synthetic construct
  REGION 1..9: note = Description of Artificial Sequence: Synthetic peptide
AIGKIQDSL

SEQ ID NO: 4342 - protein, 11 aa, synthetic construct
  REGION 1..11: note = Description of Artificial Sequence: Synthetic peptide
AINRPQIGVVR

SEQ ID NO: 4343 - protein, 10 aa, synthetic construct
  REGION 1..10: note = Description of Artificial Sequence: Synthetic peptide
AIPTNFTISV

SEQ ID NO: 4344 - protein, 11 aa, synthetic construct
  REGION 1..11: note = Description of Artificial Sequence: Synthetic peptide
AITILDGISQY

SEQ ID NO: 4345 - protein, 8 aa, synthetic construct
  REGION 1..8: note = Description of Artificial Sequence: Synthetic peptide
AKDTTEAF

SEQ ID NO: 4346 - protein, 8 aa, synthetic construct
  REGION 1..8: note = Description of Artificial Sequence: Synthetic peptide
AKHDFFKF

SEQ ID NO: 4347 - protein, 9 aa, synthetic construct
  REGION 1..9: note = Description of Artificial Sequence: Synthetic peptide
AKHDFFKFR

SEQ ID NO: 4348 - protein, 9 aa, synthetic construct
  REGION 1..9: note = Description of Artificial Sequence: Synthetic peptide
AKKVKPTVV

SEQ ID NO: 4349 - protein, 8 aa, synthetic construct
  REGION 1..8: note = Description of Artificial Sequence: Synthetic peptide
AKNLNESL

SEQ ID NO: 4350 - protein, 9 aa, synthetic construct
  REGION 1..9: note = Description of Artificial Sequence: Synthetic peptide
AKNRARTVA

SEQ ID NO: 4351 - protein, 9 aa, synthetic construct
  REGION 1..9: note = Description of Artificial Sequence: Synthetic peptide
AKSHNIALI

SEQ ID NO: 4352 - protein, 10 aa, synthetic construct
  REGION 1..10: note = Description of Artificial Sequence: Synthetic peptide
ALALLLLDRL

SEQ ID NO: 4353 - protein, 9 aa, synthetic construct
  REGION 1..9: note = Description of Artificial Sequence: Synthetic peptide
ALAPNMMVT

SEQ ID NO: 4354 - protein, 10 aa, synthetic construct
  REGION 1..10: note = Description of Artificial Sequence: Synthetic peptide
ALDPLSETKC

SEQ ID NO: 4355 - protein, 11 aa, synthetic construct
  REGION 1..11: note = Description of Artificial Sequence: Synthetic peptide
ALDQAISMWAL

SEQ ID NO: 4356 - protein, 9 aa, synthetic construct
  REGION 1..9: note = Description of Artificial Sequence: Synthetic peptide
ALEPLVDLP

SEQ ID NO: 4357 - protein, 8 aa, synthetic construct
  REGION 1..8: note = Description of Artificial Sequence: Synthetic peptide
ALFAYTKR

SEQ ID NO: 4358 - protein, 9 aa, synthetic construct
  REGION 1..9: note = Description of Artificial Sequence: Synthetic peptide
ALFAYTKRN

SEQ ID NO: 4359 - protein, 10 aa, synthetic construct
  REGION 1..10: note = Description of Artificial Sequence: Synthetic peptide
ALFAYTKRNV

SEQ ID NO: 4360 - protein, 9 aa, synthetic construct
  REGION 1..9: note = Description of Artificial Sequence: Synthetic peptide
ALGGSVAIK

SEQ ID NO: 4361 - protein, 9 aa, synthetic construct
  REGION 1..9: note = Description of Artificial Sequence: Synthetic peptide
ALGKLQDVV

SEQ ID NO: 4362 - protein, 9 aa, synthetic construct
  REGION 1..9: note = Description of Artificial Sequence: Synthetic peptide
ALIISVTSN

SEQ ID NO: 4363 - protein, 10 aa, synthetic construct
  REGION 1..10: note = Description of Artificial Sequence: Synthetic peptide
ALITLATCEL

SEQ ID NO: 4364 - protein, 8 aa, synthetic construct
  REGION 1..8: note = Description of Artificial Sequence: Synthetic peptide
ALKGGKIV

SEQ ID NO: 4365 - protein, 9 aa, synthetic construct
  REGION 1..9: note = Description of Artificial Sequence: Synthetic peptide
ALKGGKIVN

SEQ ID NO: 4366 - protein, 10 aa, synthetic construct
  REGION 1..10: note = Description of Artificial Sequence: Synthetic peptide
ALKGGKIVNN

SEQ ID NO: 4367 - protein, 9 aa, synthetic construct
  REGION 1..9: note = Description of Artificial Sequence: Synthetic peptide
ALLADKFPV

SEQ ID NO: 4368 - protein, 9 aa, synthetic construct
  REGION 1..9: note = Description of Artificial Sequence: Synthetic peptide
ALLAGTITS

SEQ ID NO: 4369 - protein, 8 aa, synthetic construct
  REGION 1..8: note = Description of Artificial Sequence: Synthetic peptide
ALLLLDRL

SEQ ID NO: 4370 - protein, 10 aa, synthetic construct
  REGION 1..10: note = Description of Artificial Sequence: Synthetic peptide
ALLSDLQDLK

SEQ ID NO: 4371 - protein, 9 aa, synthetic construct
  REGION 1..9: note = Description of Artificial Sequence: Synthetic peptide
ALLSTDGNK

SEQ ID NO: 4372 - protein, 10 aa, synthetic construct
  REGION 1..10: note = Description of Artificial Sequence: Synthetic peptide
ALLSTDGNKI

SEQ ID NO: 4373 - protein, 10 aa, synthetic construct
  REGION 1..10: note = Description of Artificial Sequence: Synthetic peptide
ALLTKSSEYK

SEQ ID NO: 4374 - protein, 8 aa, synthetic construct
  REGION 1..8: note = Description of Artificial Sequence: Synthetic peptide
ALLTLQQI

SEQ ID NO: 4375 - protein, 9 aa, synthetic construct
  REGION 1..9: note = Description of Artificial Sequence: Synthetic peptide
ALNDFSNSG

SEQ ID NO: 4376 - protein, 8 aa, synthetic construct
  REGION 1..8: note = Description of Artificial Sequence: Synthetic peptide
ALPETTAD

SEQ ID NO: 4377 - protein, 10 aa, synthetic construct
  REGION 1..10: note = Description of Artificial Sequence: Synthetic peptide
ALPETTADIV

SEQ ID NO: 4378 - protein, 11 aa, synthetic construct
  REGION 1..11: note = Description of Artificial Sequence: Synthetic peptide
ALPETTADIVV

SEQ ID NO: 4379 - protein, 8 aa, synthetic construct
  REGION 1..8: note = Description of Artificial Sequence: Synthetic peptide
ALQDAYYR

SEQ ID NO: 4380 - protein, 10 aa, synthetic construct
  REGION 1..10: note = Description of Artificial Sequence: Synthetic peptide
ALQDAYYRAR

SEQ ID NO: 4381 - protein, 9 aa, synthetic construct
  REGION 1..9: note = Description of Artificial Sequence: Synthetic peptide
ALRANSAVK

SEQ ID NO: 4382 - protein, 10 aa, synthetic construct
  REGION 1..10: note = Description of Artificial Sequence: Synthetic peptide
ALRKVPTDNY

SEQ ID NO: 4383 - protein, 8 aa, synthetic construct
  REGION 1..8: note = Description of Artificial Sequence: Synthetic peptide
ALSKGVHF

SEQ ID NO: 4384 - protein, 9 aa, synthetic construct
  REGION 1..9: note = Description of Artificial Sequence: Synthetic peptide
ALTCFSTQF

SEQ ID NO: 4385 - protein, 8 aa, synthetic construct
  REGION 1..8: note = Description of Artificial Sequence: Synthetic peptide
ALTNNVAF

SEQ ID NO: 4386 - protein, 8 aa, synthetic construct
  REGION 1..8: note = Description of Artificial Sequence: Synthetic peptide
ALYYPSAR

SEQ ID NO: 4387 - protein, 8 aa, synthetic construct
  REGION 1..8: note = Description of Artificial Sequence: Synthetic peptide
AMACLVGL

SEQ ID NO: 4388 - protein, 8 aa, synthetic construct
  REGION 1..8: note = Description of Artificial Sequence: Synthetic peptide
AMMFTSDL

SEQ ID NO: 4389 - protein, 9 aa, synthetic construct
  REGION 1..9: note = Description of Artificial Sequence: Synthetic peptide
AMPNMLRIM

SEQ ID NO: 4390 - protein, 10 aa, synthetic construct
  REGION 1..10: note = Description of Artificial Sequence: Synthetic peptide
ANGDSEVVLK

SEQ ID NO: 4391 - protein, 8 aa, synthetic construct
  REGION 1..8: note = Description of Artificial Sequence: Synthetic peptide
ANGQVFGL

SEQ ID NO: 4392 - protein, 10 aa, synthetic construct
  REGION 1..10: note = Description of Artificial Sequence: Synthetic peptide
ANGQVFGLYK

SEQ ID NO: 4393 - protein, 10 aa, synthetic construct
  REGION 1..10: note = Description of Artificial Sequence: Synthetic peptide
ANKDGIIWVA

SEQ ID NO: 4394 - protein, 8 aa, synthetic construct
  REGION 1..8: note = Description of Artificial Sequence: Synthetic peptide
ANSTVLSF

SEQ ID NO: 4395 - protein, 10 aa, synthetic construct
  REGION 1..10: note = Description of Artificial Sequence: Synthetic peptide
ANYAKPFLNK

SEQ ID NO: 4396 - protein, 10 aa, synthetic construct
  REGION 1..10: note = Description of Artificial Sequence: Synthetic peptide
ANYQKVGMQK

SEQ ID NO: 4397 - protein, 8 aa, synthetic construct
  REGION 1..8: note = Description of Artificial Sequence: Synthetic peptide
APFLYLYA

SEQ ID NO: 4398 - protein, 9 aa, synthetic construct
  REGION 1..9: note = Description of Artificial Sequence: Synthetic peptide
APGQTGKIA

SEQ ID NO: 4399 - protein, 11 aa, synthetic construct
  REGION 1..11: note = Description of Artificial Sequence: Synthetic peptide
APGTAVLRQWL

SEQ ID NO: 4400 - protein, 9 aa, synthetic construct
  REGION 1..9: note = Description of Artificial Sequence: Synthetic peptide
APHGHVMVE

SEQ ID NO: 4401 - protein, 9 aa, synthetic construct
  REGION 1..9: note = Description of Artificial Sequence: Synthetic peptide
APKEIIFLE

SEQ ID NO: 4402 - protein, 9 aa, synthetic construct
  REGION 1..9: note = Description of Artificial Sequence: Synthetic peptide
APLLSAGIF

SEQ ID NO: 4403 - protein, 11 aa, synthetic construct
  REGION 1..11: note = Description of Artificial Sequence: Synthetic peptide
APNMMVTNNTF

SEQ ID NO: 4404 - protein, 8 aa, synthetic construct
  REGION 1..8: note = Description of Artificial Sequence: Synthetic peptide
APRTLLTK

SEQ ID NO: 4405 - protein, 9 aa, synthetic construct
  REGION 1..9: note = Description of Artificial Sequence: Synthetic peptide
APRTLLTKG

SEQ ID NO: 4406 - protein, 8 aa, synthetic construct
  REGION 1..8: note = Description of Artificial Sequence: Synthetic peptide
APSASAFF

SEQ ID NO: 4407 - protein, 10 aa, synthetic construct
  REGION 1..10: note = Description of Artificial Sequence: Synthetic peptide
APSASAFFGM

SEQ ID NO: 4408 - protein, 8 aa, synthetic construct
  REGION 1..8: note = Description of Artificial Sequence: Synthetic peptide
APYIVGDV

SEQ ID NO: 4409 - protein, 10 aa, synthetic construct
  REGION 1..10: note = Description of Artificial Sequence: Synthetic peptide
APYIVGDVVQ

SEQ ID NO: 4410 - protein, 10 aa, synthetic construct
  REGION 1..10: note = Description of Artificial Sequence: Synthetic peptide
AQAAGTDTTI

SEQ ID NO: 4411 - protein, 8 aa, synthetic construct
  REGION 1..8: note = Description of Artificial Sequence: Synthetic peptide
AQALNTLV

SEQ ID NO: 4412 - protein, 9 aa, synthetic construct
  REGION 1..9: note = Description of Artificial Sequence: Synthetic peptide
AQCFKMFYK

SEQ ID NO: 4413 - protein, 11 aa, synthetic construct
  REGION 1..11: note = Description of Artificial Sequence: Synthetic peptide
AQDGNAAISDY

SEQ ID NO: 4414 - protein, 9 aa, synthetic construct
  REGION 1..9: note = Description of Artificial Sequence: Synthetic peptide
AQEAYEQAV

SEQ ID NO: 4415 - protein, 9 aa, synthetic construct
  REGION 1..9: note = Description of Artificial Sequence: Synthetic peptide
AQNSVRVLQ

SEQ ID NO: 4416 - protein, 8 aa, synthetic construct
  REGION 1..8: note = Description of Artificial Sequence: Synthetic peptide
AQSFLNRV

SEQ ID NO: 4417 - protein, 9 aa, synthetic construct
  REGION 1..9: note = Description of Artificial Sequence: Synthetic peptide
AQTGIAVLD

SEQ ID NO: 4418 - protein, 9 aa, synthetic construct
  REGION 1..9: note = Description of Artificial Sequence: Synthetic peptide
AQVAKSHNI

SEQ ID NO: 4419 - protein, 9 aa, synthetic construct
  REGION 1..9: note = Description of Artificial Sequence: Synthetic peptide
AQVDVVNFN

SEQ ID NO: 4420 - protein, 9 aa, synthetic construct
  REGION 1..9: note = Description of Artificial Sequence: Synthetic peptide
AQVKQIYKT

SEQ ID NO: 4421 - protein, 9 aa, synthetic construct
  REGION 1..9: note = Description of Artificial Sequence: Synthetic peptide
AQYTSALLA

SEQ ID NO: 4422 - protein, 10 aa, synthetic construct
  REGION 1..10: note = Description of Artificial Sequence: Synthetic peptide
ARAGKASCTL

SEQ ID NO: 4423 - protein, 10 aa, synthetic construct
  REGION 1..10: note = Description of Artificial Sequence: Synthetic peptide
ARDGCVPLNI

SEQ ID NO: 4424 - protein, 8 aa, synthetic construct
  REGION 1..8: note = Description of Artificial Sequence: Synthetic peptide
ARHINAQV

SEQ ID NO: 4425 - protein, 10 aa, synthetic construct
  REGION 1..10: note = Description of Artificial Sequence: Synthetic peptide
ARLRAKHYVY

SEQ ID NO: 4426 - protein, 8 aa, synthetic construct
  REGION 1..8: note = Description of Artificial Sequence: Synthetic peptide
ARNGVLIT

SEQ ID NO: 4427 - protein, 10 aa, synthetic construct
  REGION 1..10: note = Description of Artificial Sequence: Synthetic peptide
ARNGVLITEG

SEQ ID NO: 4428 - protein, 10 aa, synthetic construct
  REGION 1..10: note = Description of Artificial Sequence: Synthetic peptide
ASAVVLLILM

SEQ ID NO: 4429 - protein, 9 aa, synthetic construct
  REGION 1..9: note = Description of Artificial Sequence: Synthetic peptide
ASDTYACWH

SEQ ID NO: 4430 - protein, 9 aa, synthetic construct
  REGION 1..9: note = Description of Artificial Sequence: Synthetic peptide
ASEAARVVR

SEQ ID NO: 4431 - protein, 8 aa, synthetic construct
  REGION 1..8: note = Description of Artificial Sequence: Synthetic peptide
ASEFSSLP

SEQ ID NO: 4432 - protein, 8 aa, synthetic construct
  REGION 1..8: note = Description of Artificial Sequence: Synthetic peptide
ASEYTGNY

SEQ ID NO: 4433 - protein, 9 aa, synthetic construct
  REGION 1..9: note = Description of Artificial Sequence: Synthetic peptide
ASEYTGNYQ

SEQ ID NO: 4434 - protein, 8 aa, synthetic construct
  REGION 1..8: note = Description of Artificial Sequence: Synthetic peptide
ASFYYVWK

SEQ ID NO: 4435 - protein, 8 aa, synthetic construct
  REGION 1..8: note = Description of Artificial Sequence: Synthetic peptide
ASGKPVPY

SEQ ID NO: 4436 - protein, 9 aa, synthetic construct
  REGION 1..9: note = Description of Artificial Sequence: Synthetic peptide
ASGNLLLDK

SEQ ID NO: 4437 - protein, 8 aa, synthetic construct
  REGION 1..8: note = Description of Artificial Sequence: Synthetic peptide
ASKKPRQK

SEQ ID NO: 4438 - protein, 10 aa, synthetic construct
  REGION 1..10: note = Description of Artificial Sequence: Synthetic peptide
ASLPFGWLIV

SEQ ID NO: 4439 - protein, 9 aa, synthetic construct
  REGION 1..9: note = Description of Artificial Sequence: Synthetic peptide
ASLVLARKH

SEQ ID NO: 4440 - protein, 8 aa, synthetic construct
  REGION 1..8: note = Description of Artificial Sequence: Synthetic peptide
ASSSEAFL

SEQ ID NO: 4441 - protein, 10 aa, synthetic construct
  REGION 1..10: note = Description of Artificial Sequence: Synthetic peptide
ASTDTCFANK

SEQ ID NO: 4442 - protein, 9 aa, synthetic construct
  REGION 1..9: note = Description of Artificial Sequence: Synthetic peptide
ATALLTLQQ

SEQ ID NO: 4443 - protein, 11 aa, synthetic construct
  REGION 1..11: note = Description of Artificial Sequence: Synthetic peptide
ATCDWTNAGDY

SEQ ID NO: 4444 - protein, 11 aa, synthetic construct
  REGION 1..11: note = Description of Artificial Sequence: Synthetic peptide
ATCFSTASDTY

SEQ ID NO: 4445 - protein, 9 aa, synthetic construct
  REGION 1..9: note = Description of Artificial Sequence: Synthetic peptide
ATEETFKLS

SEQ ID NO: 4446 - protein, 9 aa, synthetic construct
  REGION 1..9: note = Description of Artificial Sequence: Synthetic peptide
ATEGALNTP

SEQ ID NO: 4447 - protein, 11 aa, synthetic construct
  REGION 1..11: note = Description of Artificial Sequence: Synthetic peptide
ATLVSDIDITF

SEQ ID NO: 4448 - protein, 8 aa, synthetic construct
  REGION 1..8: note = Description of Artificial Sequence: Synthetic peptide
ATNNAMQV

SEQ ID NO: 4449 - protein, 9 aa, synthetic construct
  REGION 1..9: note = Description of Artificial Sequence: Synthetic peptide
ATNNLVVMA

SEQ ID NO: 4450 - protein, 11 aa, synthetic construct
  REGION 1..11: note = Description of Artificial Sequence: Synthetic peptide
ATNVVIKVCEF

SEQ ID NO: 4451 - protein, 9 aa, synthetic construct
  REGION 1..9: note = Description of Artificial Sequence: Synthetic peptide
ATTAYANSV

SEQ ID NO: 4452 - protein, 9 aa, synthetic construct
  REGION 1..9: note = Description of Artificial Sequence: Synthetic peptide
ATVAYFNMV

SEQ ID NO: 4453 - protein, 10 aa, synthetic construct
  REGION 1..10: note = Description of Artificial Sequence: Synthetic peptide
ATVAYFNMVY

SEQ ID NO: 4454 - protein, 9 aa, synthetic construct
  REGION 1..9: note = Description of Artificial Sequence: Synthetic peptide
ATVREVLSD

SEQ ID NO: 4455 - protein, 8 aa, synthetic construct
  REGION 1..8: note = Description of Artificial Sequence: Synthetic peptide
AVAKHDFF

SEQ ID NO: 4456 - protein, 9 aa, synthetic construct
  REGION 1..9: note = Description of Artificial Sequence: Synthetic peptide
AVAKHDFFK

SEQ ID NO: 4457 - protein, 11 aa, synthetic construct
  REGION 1..11: note = Description of Artificial Sequence: Synthetic peptide
AVANGDSEVVL

SEQ ID NO: 4458 - protein, 12 aa, synthetic construct
  REGION 1..12: note = Description of Artificial Sequence: Synthetic peptide
AVANGDSEVVLK

SEQ ID NO: 4459 - protein, 10 aa, synthetic construct
  REGION 1..10: note = Description of Artificial Sequence: Synthetic peptide
AVCRHHANEY

SEQ ID NO: 4460 - protein, 9 aa, synthetic construct
  REGION 1..9: note = Description of Artificial Sequence: Synthetic peptide
AVDAAKAYK

SEQ ID NO: 4461 - protein, 12 aa, synthetic construct
  REGION 1..12: note = Description of Artificial Sequence: Synthetic peptide
AVINGDRWFLNR

SEQ ID NO: 4462 - protein, 8 aa, synthetic construct
  REGION 1..8: note = Description of Artificial Sequence: Synthetic peptide
AVKMFDAY

SEQ ID NO: 4463 - protein, 10 aa, synthetic construct
  REGION 1..10: note = Description of Artificial Sequence: Synthetic peptide
AVKTQFNYYK

SEQ ID NO: 4464 - protein, 11 aa, synthetic construct
  REGION 1..11: note = Description of Artificial Sequence: Synthetic peptide
AVKTQFNYYKK

SEQ ID NO: 4465 - protein, 9 aa, synthetic construct
  REGION 1..9: note = Description of Artificial Sequence: Synthetic peptide
AVLQSGFRK

SEQ ID NO: 4466 - protein, 9 aa, synthetic construct
  REGION 1..9: note = Description of Artificial Sequence: Synthetic peptide
AVRDPQTLE

SEQ ID NO: 4467 - protein, 9 aa, synthetic construct
  REGION 1..9: note = Description of Artificial Sequence: Synthetic peptide
AVSKGFFKE

SEQ ID NO: 4468 - protein, 8 aa, synthetic construct
  REGION 1..8: note = Description of Artificial Sequence: Synthetic peptide
AVVIPTKK

SEQ ID NO: 4469 - protein, 9 aa, synthetic construct
  REGION 1..9: note = Description of Artificial Sequence: Synthetic peptide
AVVIPTKKA

SEQ ID NO: 4470 - protein, 11 aa, synthetic construct
  REGION 1..11: note = Description of Artificial Sequence: Synthetic peptide
AVVYRGTTTYK

SEQ ID NO: 4471 - protein, 8 aa, synthetic construct
  REGION 1..8: note = Description of Artificial Sequence: Synthetic peptide
AVYRINWI

SEQ ID NO: 4472 - protein, 9 aa, synthetic construct
  REGION 1..9: note = Description of Artificial Sequence: Synthetic peptide
AWQPGVAMP

SEQ ID NO: 4473 - protein, 10 aa, synthetic construct
  REGION 1..10: note = Description of Artificial Sequence: Synthetic peptide
AYANRNRFLY

SEQ ID NO: 4474 - protein, 11 aa, synthetic construct
  REGION 1..11: note = Description of Artificial Sequence: Synthetic peptide
AYANRNRFLYI

SEQ ID NO: 4475 - protein, 10 aa, synthetic construct
  REGION 1..10: note = Description of Artificial Sequence: Synthetic peptide
AYCNKTVGEL

SEQ ID NO: 4476 - protein, 8 aa, synthetic construct
  REGION 1..8: note = Description of Artificial Sequence: Synthetic peptide
AYIICIST

SEQ ID NO: 4477 - protein, 12 aa, synthetic construct
  REGION 1..12: note = Description of Artificial Sequence: Synthetic peptide
AYIICISTKHFY

SEQ ID NO: 4478 - protein, 8 aa, synthetic construct
  REGION 1..8: note = Description of Artificial Sequence: Synthetic peptide
AYITGGVV

SEQ ID NO: 4479 - protein, 11 aa, synthetic construct
  REGION 1..11: note = Description of Artificial Sequence: Synthetic peptide
AYKIEELFYSY

SEQ ID NO: 4480 - protein, 8 aa, synthetic construct
  REGION 1..8: note = Description of Artificial Sequence: Synthetic peptide
AYNGYLTS

SEQ ID NO: 4481 - protein, 8 aa, synthetic construct
  REGION 1..8: note = Description of Artificial Sequence: Synthetic peptide
AYNMMISA

SEQ ID NO: 4482 - protein, 9 aa, synthetic construct
  REGION 1..9: note = Description of Artificial Sequence: Synthetic peptide
AYNMMISAG

SEQ ID NO: 4483 - protein, 10 aa, synthetic construct
  REGION 1..10: note = Description of Artificial Sequence: Synthetic peptide
AYNVTQAFGR

SEQ ID NO: 4484 - protein, 8 aa, synthetic construct
  REGION 1..8: note = Description of Artificial Sequence: Synthetic peptide
AYPLTKHP

SEQ ID NO: 4485 - protein, 9 aa, synthetic construct
  REGION 1..9: note = Description of Artificial Sequence: Synthetic peptide
AYPLTKHPN

SEQ ID NO: 4486 - protein, 9 aa, synthetic construct
  REGION 1..9: note = Description of Artificial Sequence: Synthetic peptide
AYRFNGIGV

SEQ ID NO: 4487 - protein, 8 aa, synthetic construct
  REGION 1..8: note = Description of Artificial Sequence: Synthetic peptide
AYRKVLLR

SEQ ID NO: 4488 - protein, 10 aa, synthetic construct
  REGION 1..10: note = Description of Artificial Sequence: Synthetic peptide
AYTRYVDNNF

SEQ ID NO: 4489 - protein, 9 aa, synthetic construct
  REGION 1..9: note = Description of Artificial Sequence: Synthetic peptide
AYVDNSSLT

SEQ ID NO: 4490 - protein, 8 aa, synthetic construct
  REGION 1..8: note = Description of Artificial Sequence: Synthetic peptide
AYWVPRAS

SEQ ID NO: 4491 - protein, 10 aa, synthetic construct
  REGION 1..10: note = Description of Artificial Sequence: Synthetic peptide
AYYFMRFRRA

SEQ ID NO: 4492 - protein, 11 aa, synthetic construct
  REGION 1..11: note = Description of Artificial Sequence: Synthetic peptide
AYYFMRFRRAF

SEQ ID NO: 4493 - protein, 11 aa, synthetic construct
  REGION 1..11: note = Description of Artificial Sequence: Synthetic peptide
AYYNTTKGGRF

SEQ ID NO: 4494 - protein, 8 aa, synthetic construct
  REGION 1..8: note = Description of Artificial Sequence: Synthetic peptide
AYYRARAG

SEQ ID NO: 4495 - protein, 10 aa, synthetic construct
  REGION 1..10: note = Description of Artificial Sequence: Synthetic peptide
AYYVGYLQPR

SEQ ID NO: 4496 - protein, 10 aa, synthetic construct
  REGION 1..10: note = Description of Artificial Sequence: Synthetic peptide
CANGQVFGLY

SEQ ID NO: 4497 - protein, 8 aa, synthetic construct
  REGION 1..8: note = Description of Artificial Sequence: Synthetic peptide
CASLKELL

SEQ ID NO: 4498 - protein, 10 aa, synthetic construct
  REGION 1..10: note = Description of Artificial Sequence: Synthetic peptide
CATVHTANKW

SEQ ID NO: 4499 - protein, 8 aa, synthetic construct
  REGION 1..8: note = Description of Artificial Sequence: Synthetic peptide
CAYWVPRA

SEQ ID NO: 4500 - protein, 9 aa, synthetic construct
  REGION 1..9: note = Description of Artificial Sequence: Synthetic peptide
CAYWVPRAS

SEQ ID NO: 4501 - protein, 9 aa, synthetic construct
  REGION 1..9: note = Description of Artificial Sequence: Synthetic peptide
CCDDDYFNK

SEQ ID NO: 4502 - protein, 9 aa, synthetic construct
  REGION 1..9: note = Description of Artificial Sequence: Synthetic peptide
CCYDHVIST

SEQ ID NO: 4503 - protein, 8 aa, synthetic construct
  REGION 1..8: note = Description of Artificial Sequence: Synthetic peptide
CDNIKFAD

SEQ ID NO: 4504 - protein, 9 aa, synthetic construct
  REGION 1..9: note = Description of Artificial Sequence: Synthetic peptide
CDVTDVTQL

SEQ ID NO: 4505 - protein, 8 aa, synthetic construct
  REGION 1..8: note = Description of Artificial Sequence: Synthetic peptide
CEEEEFEP

SEQ ID NO: 4506 - protein, 9 aa, synthetic construct
  REGION 1..9: note = Description of Artificial Sequence: Synthetic peptide
CEEMLDNRA

SEQ ID NO: 4507 - protein, 9 aa, synthetic construct
  REGION 1..9: note = Description of Artificial Sequence: Synthetic peptide
CEFQFCNDP

SEQ ID NO: 4508 - protein, 8 aa, synthetic construct
  REGION 1..8: note = Description of Artificial Sequence: Synthetic peptide
CEIVGGQI

SEQ ID NO: 4509 - protein, 8 aa, synthetic construct
  REGION 1..8: note = Description of Artificial Sequence: Synthetic peptide
CFSTQFAF

SEQ ID NO: 4510 - protein, 10 aa, synthetic construct
  REGION 1..10: note = Description of Artificial Sequence: Synthetic peptide
CFTNVYADSF

SEQ ID NO: 4511 - protein, 8 aa, synthetic construct
  REGION 1..8: note = Description of Artificial Sequence: Synthetic peptide
CFVLAAVY

SEQ ID NO: 4512 - protein, 9 aa, synthetic construct
  REGION 1..9: note = Description of Artificial Sequence: Synthetic peptide
CFVLAAVYR

SEQ ID NO: 4513 - protein, 8 aa, synthetic construct
  REGION 1..8: note = Description of Artificial Sequence: Synthetic peptide
CGFIQQKL

SEQ ID NO: 4514 - protein, 8 aa, synthetic construct
  REGION 1..8: note = Description of Artificial Sequence: Synthetic peptide
CGPDGYPL

SEQ ID NO: 4515 - protein, 8 aa, synthetic construct
  REGION 1..8: note = Description of Artificial Sequence: Synthetic peptide
CHDGKAHF

SEQ ID NO: 4516 - protein, 9 aa, synthetic construct
  REGION 1..9: note = Description of Artificial Sequence: Synthetic peptide
CIDCSARHI

SEQ ID NO: 4517 - protein, 8 aa, synthetic construct
  REGION 1..8: note = Description of Artificial Sequence: Synthetic peptide
CIKDLLAR

SEQ ID NO: 4518 - protein, 9 aa, synthetic construct
  REGION 1..9: note = Description of Artificial Sequence: Synthetic peptide
CLAYYFMRF

SEQ ID NO: 4519 - protein, 9 aa, synthetic construct
  REGION 1..9: note = Description of Artificial Sequence: Synthetic peptide
CLDDRCILH

SEQ ID NO: 4520 - protein, 10 aa, synthetic construct
  REGION 1..10: note = Description of Artificial Sequence: Synthetic peptide
CLDDRCILHC

SEQ ID NO: 4521 - protein, 8 aa, synthetic construct
  REGION 1..8: note = Description of Artificial Sequence: Synthetic peptide
CLEASFNY

SEQ ID NO: 4522 - protein, 9 aa, synthetic construct
  REGION 1..9: note = Description of Artificial Sequence: Synthetic peptide
CLEASFNYL

SEQ ID NO: 4523 - protein, 10 aa, synthetic construct
  REGION 1..10: note = Description of Artificial Sequence: Synthetic peptide
CLLQFAYANR

SEQ ID NO: 4524 - protein, 8 aa, synthetic construct
  REGION 1..8: note = Description of Artificial Sequence: Synthetic peptide
CLTPVYSF

SEQ ID NO: 4525 - protein, 9 aa, synthetic construct
  REGION 1..9: note = Description of Artificial Sequence: Synthetic peptide
CMMCYKRNR

SEQ ID NO: 4526 - protein, 9 aa, synthetic construct
  REGION 1..9: note = Description of Artificial Sequence: Synthetic peptide
CNIVNVSLV

SEQ ID NO: 4527 - protein, 8 aa, synthetic construct
  REGION 1..8: note = Description of Artificial Sequence: Synthetic peptide
CNLLLLFV

SEQ ID NO: 4528 - protein, 11 aa, synthetic construct
  REGION 1..11: note = Description of Artificial Sequence: Synthetic peptide
CPAEIVDTVSA

SEQ ID NO: 4529 - protein, 11 aa, synthetic construct
  REGION 1..11: note = Description of Artificial Sequence: Synthetic peptide
CPDGVKHVYQL

SEQ ID NO: 4530 - protein, 9 aa, synthetic construct
  REGION 1..9: note = Description of Artificial Sequence: Synthetic peptide
CPFGEVFNA

SEQ ID NO: 4531 - protein, 11 aa, synthetic construct
  REGION 1..11: note = Description of Artificial Sequence: Synthetic peptide
CPIFFITGNTL

SEQ ID NO: 4532 - protein, 9 aa, synthetic construct
  REGION 1..9: note = Description of Artificial Sequence: Synthetic peptide
CPIHFYSKW

SEQ ID NO: 4533 - protein, 8 aa, synthetic construct
  REGION 1..8: note = Description of Artificial Sequence: Synthetic peptide
CPLIAAVI

SEQ ID NO: 4534 - protein, 9 aa, synthetic construct
  REGION 1..9: note = Description of Artificial Sequence: Synthetic peptide
CRFDTRVLS

SEQ ID NO: 4535 - protein, 8 aa, synthetic construct
  REGION 1..8: note = Description of Artificial Sequence: Synthetic peptide
CRSKNPLL

SEQ ID NO: 4536 - protein, 8 aa, synthetic construct
  REGION 1..8: note = Description of Artificial Sequence: Synthetic peptide
CSDKAYKI

SEQ ID NO: 4537 - protein, 8 aa, synthetic construct
  REGION 1..8: note = Description of Artificial Sequence: Synthetic peptide
CSVIDLLL

SEQ ID NO: 4538 - protein, 9 aa, synthetic construct
  REGION 1..9: note = Description of Artificial Sequence: Synthetic peptide
CTCGKQATK

SEQ ID NO: 4539 - protein, 11 aa, synthetic construct
  REGION 1..11: note = Description of Artificial Sequence: Synthetic peptide
CTEIDPKLDNY

SEQ ID NO: 4540 - protein, 12 aa, synthetic construct
  REGION 1..12: note = Description of Artificial Sequence: Synthetic peptide
CTEIDPKLDNYY

SEQ ID NO: 4541 - protein, 9 aa, synthetic construct
  REGION 1..9: note = Description of Artificial Sequence: Synthetic peptide
CTFEYVSQP

SEQ ID NO: 4542 - protein, 9 aa, synthetic construct
  REGION 1..9: note = Description of Artificial Sequence: Synthetic peptide
CTFLLNKEM

SEQ ID NO: 4543 - protein, 10 aa, synthetic construct
  REGION 1..10: note = Description of Artificial Sequence: Synthetic peptide
CTVCGMWKGY

SEQ ID NO: 4544 - protein, 11 aa, synthetic construct
  REGION 1..11: note = Description of Artificial Sequence: Synthetic peptide
CVFSYVGCHNK

SEQ ID NO: 4545 - protein, 11 aa, synthetic construct
  REGION 1..11: note = Description of Artificial Sequence: Synthetic peptide
CVLAAECTIFK

SEQ ID NO: 4546 - protein, 10 aa, synthetic construct
  REGION 1..10: note = Description of Artificial Sequence: Synthetic peptide
CVLSGHNLAK

SEQ ID NO: 4547 - protein, 9 aa, synthetic construct
  REGION 1..9: note = Description of Artificial Sequence: Synthetic peptide
CVVADAVIK

SEQ ID NO: 4548 - protein, 11 aa, synthetic construct
  REGION 1..11: note = Description of Artificial Sequence: Synthetic peptide
CYFGLFCLLNR

SEQ ID NO: 4549 - protein, 9 aa, synthetic construct
  REGION 1..9: note = Description of Artificial Sequence: Synthetic peptide
CYKRNRATR

SEQ ID NO: 4550 - protein, 9 aa, synthetic construct
  REGION 1..9: note = Description of Artificial Sequence: Synthetic peptide
CYNGSPSGV

SEQ ID NO: 4551 - protein, 10 aa, synthetic construct
  REGION 1..10: note = Description of Artificial Sequence: Synthetic peptide
CYNGSPSGVY

SEQ ID NO: 4552 - protein, 8 aa, synthetic construct
  REGION 1..8: note = Description of Artificial Sequence: Synthetic peptide
DAAMQRKL

SEQ ID NO: 4553 - protein, 9 aa, synthetic construct
  REGION 1..9: note = Description of Artificial Sequence: Synthetic peptide
DALFAYTKR

SEQ ID NO: 4554 - protein, 9 aa, synthetic construct
  REGION 1..9: note = Description of Artificial Sequence: Synthetic peptide
DALNNIINN

SEQ ID NO: 4555 - protein, 11 aa, synthetic construct
  REGION 1..11: note = Description of Artificial Sequence: Synthetic peptide
DALNNIINNAR

SEQ ID NO: 4556 - protein, 9 aa, synthetic construct
  REGION 1..9: note = Description of Artificial Sequence: Synthetic peptide
DAMMFTSDL

SEQ ID NO: 4557 - protein, 8 aa, synthetic construct
  REGION 1..8: note = Description of Artificial Sequence: Synthetic peptide
DANYFLCW

SEQ ID NO: 4558 - protein, 9 aa, synthetic construct
  REGION 1..9: note = Description of Artificial Sequence: Synthetic peptide
DAPYIVGDV

SEQ ID NO: 4559 - protein, 8 aa, synthetic construct
  REGION 1..8: note = Description of Artificial Sequence: Synthetic peptide
DAQSFLNR

SEQ ID NO: 4560 - protein, 9 aa, synthetic construct
  REGION 1..9: note = Description of Artificial Sequence: Synthetic peptide
DATPSDFVR

SEQ ID NO: 4561 - protein, 9 aa, synthetic construct
  REGION 1..9: note = Description of Artificial Sequence: Synthetic peptide
DAYPLTKHP

SEQ ID NO: 4562 - protein, 10 aa, synthetic construct
  REGION 1..10: note = Description of Artificial Sequence: Synthetic peptide
DDFTGCVIAW

SEQ ID NO: 4563 - protein, 9 aa, synthetic construct
  REGION 1..9: note = Description of Artificial Sequence: Synthetic peptide
DDPCPIHFY

SEQ ID NO: 4564 - protein, 10 aa, synthetic construct
  REGION 1..10: note = Description of Artificial Sequence: Synthetic peptide
DDYQGKPLEF

SEQ ID NO: 4565 - protein, 8 aa, synthetic construct
  REGION 1..8: note = Description of Artificial Sequence: Synthetic peptide
DEFTPFDV

SEQ ID NO: 4566 - protein, 10 aa, synthetic construct
  REGION 1..10: note = Description of Artificial Sequence: Synthetic peptide
DEFTPFDVVR

SEQ ID NO: 4567 - protein, 11 aa, synthetic construct
  REGION 1..11: note = Description of Artificial Sequence: Synthetic peptide
DEFTPFDVVRQ

SEQ ID NO: 4568 - protein, 9 aa, synthetic construct
  REGION 1..9: note = Description of Artificial Sequence: Synthetic peptide
DELTGHMLD

SEQ ID NO: 4569 - protein, 10 aa, synthetic construct
  REGION 1..10: note = Description of Artificial Sequence: Synthetic peptide
DEMIAQYTSA

SEQ ID NO: 4570 - protein, 8 aa, synthetic construct
  REGION 1..8: note = Description of Artificial Sequence: Synthetic peptide
DESGEFKL

SEQ ID NO: 4571 - protein, 8 aa, synthetic construct
  REGION 1..8: note = Description of Artificial Sequence: Synthetic peptide
DEVRQIAP

SEQ ID NO: 4572 - protein, 11 aa, synthetic construct
  REGION 1..11: note = Description of Artificial Sequence: Synthetic peptide
DEWSMATYYLF

SEQ ID NO: 4573 - protein, 9 aa, synthetic construct
  REGION 1..9: note = Description of Artificial Sequence: Synthetic peptide
DFATSACVL

SEQ ID NO: 4574 - protein, 10 aa, synthetic construct
  REGION 1..10: note = Description of Artificial Sequence: Synthetic peptide
DFLELAMDEF

SEQ ID NO: 4575 - protein, 9 aa, synthetic construct
  REGION 1..9: note = Description of Artificial Sequence: Synthetic peptide
DFLHFLPRV

SEQ ID NO: 4576 - protein, 10 aa, synthetic construct
  REGION 1..10: note = Description of Artificial Sequence: Synthetic peptide
DFMSLSEQLR

SEQ ID NO: 4577 - protein, 9 aa, synthetic construct
  REGION 1..9: note = Description of Artificial Sequence: Synthetic peptide
DFTGCVIAW

SEQ ID NO: 4578 - protein, 9 aa, synthetic construct
  REGION 1..9: note = Description of Artificial Sequence: Synthetic peptide
DFVENPDIL

SEQ ID NO: 4579 - protein, 10 aa, synthetic construct
  REGION 1..10: note = Description of Artificial Sequence: Synthetic peptide
DFVENPDILR

SEQ ID NO: 4580 - protein, 9 aa, synthetic construct
  REGION 1..9: note = Description of Artificial Sequence: Synthetic peptide
DFVRATATI

SEQ ID NO: 4581 - protein, 8 aa, synthetic construct
  REGION 1..8: note = Description of Artificial Sequence: Synthetic peptide
DGADVTKI

SEQ ID NO: 4582 - protein, 8 aa, synthetic construct
  REGION 1..8: note = Description of Artificial Sequence: Synthetic peptide
DGISQYSL

SEQ ID NO: 4583 - protein, 9 aa, synthetic construct
  REGION 1..9: note = Description of Artificial Sequence: Synthetic peptide
DGNAAISDY

SEQ ID NO: 4584 - protein, 9 aa, synthetic construct
  REGION 1..9: note = Description of Artificial Sequence: Synthetic peptide
DGYFKIYSK

SEQ ID NO: 4585 - protein, 10 aa, synthetic construct
  REGION 1..10: note = Description of Artificial Sequence: Synthetic peptide
DIAKKPTETI

SEQ ID NO: 4586 - protein, 9 aa, synthetic construct
  REGION 1..9: note = Description of Artificial Sequence: Synthetic peptide
DIASTDTCF

SEQ ID NO: 4587 - protein, 9 aa, synthetic construct
  REGION 1..9: note = Description of Artificial Sequence: Synthetic peptide
DILGPLSAQ

SEQ ID NO: 4588 - protein, 9 aa, synthetic construct
  REGION 1..9: note = Description of Artificial Sequence: Synthetic peptide
DILRVYANL

SEQ ID NO: 4589 - protein, 9 aa, synthetic construct
  REGION 1..9: note = Description of Artificial Sequence: Synthetic peptide
DIPGIPKDM

SEQ ID NO: 4590 - protein, 9 aa, synthetic construct
  REGION 1..9: note = Description of Artificial Sequence: Synthetic peptide
DIQLLKSAY

SEQ ID NO: 4591 - protein, 9 aa, synthetic construct
  REGION 1..9: note = Description of Artificial Sequence: Synthetic peptide
DIVKTDGTL

SEQ ID NO: 4592 - protein, 10 aa, synthetic construct
  REGION 1..10: note = Description of Artificial Sequence: Synthetic peptide
DIYNDKVAGF

SEQ ID NO: 4593 - protein, 9 aa, synthetic construct
  REGION 1..9: note = Description of Artificial Sequence: Synthetic peptide
DKFPVLHDI

SEQ ID NO: 4594 - protein, 8 aa, synthetic construct
  REGION 1..8: note = Description of Artificial Sequence: Synthetic peptide
DKLQFTSL

SEQ ID NO: 4595 - protein, 9 aa, synthetic construct
  REGION 1..9: note = Description of Artificial Sequence: Synthetic peptide
DKVFRSSVL

SEQ ID NO: 4596 - protein, 9 aa, synthetic construct
  REGION 1..9: note = Description of Artificial Sequence: Synthetic peptide
DLEGKQGNF

SEQ ID NO: 4597 - protein, 9 aa, synthetic construct
  REGION 1..9: note = Description of Artificial Sequence: Synthetic peptide
DLGDELGTD

SEQ ID NO: 4598 - protein, 9 aa, synthetic construct
  REGION 1..9: note = Description of Artificial Sequence: Synthetic peptide
DLNDFVSDA

SEQ ID NO: 4599 - protein, 8 aa, synthetic construct
  REGION 1..8: note = Description of Artificial Sequence: Synthetic peptide
DLNQLTGY

SEQ ID NO: 4600 - protein, 10 aa, synthetic construct
  REGION 1..10: note = Description of Artificial Sequence: Synthetic peptide
DLQDLKWARF

SEQ ID NO: 4601 - protein, 11 aa, synthetic construct
  REGION 1..11: note = Description of Artificial Sequence: Synthetic peptide
DLQELGKYEQY

SEQ ID NO: 4602 - protein, 9 aa, synthetic construct
  REGION 1..9: note = Description of Artificial Sequence: Synthetic peptide
DLSVVNARL

SEQ ID NO: 4603 - protein, 10 aa, synthetic construct
  REGION 1..10: note = Description of Artificial Sequence: Synthetic peptide
DLSVVNARLR

SEQ ID NO: 4604 - protein, 9 aa, synthetic construct
  REGION 1..9: note = Description of Artificial Sequence: Synthetic peptide
DLTKPYIKW

SEQ ID NO: 4605 - protein, 9 aa, synthetic construct
  REGION 1..9: note = Description of Artificial Sequence: Synthetic peptide
DLVYALRHF

SEQ ID NO: 4606 - protein, 11 aa, synthetic construct
  REGION 1..11: note = Description of Artificial Sequence: Synthetic peptide
DLYDKLQFTSL

SEQ ID NO: 4607 - protein, 9 aa, synthetic construct
  REGION 1..9: note = Description of Artificial Sequence: Synthetic peptide
DLYKLMGHF

SEQ ID NO: 4608 - protein, 10 aa, synthetic construct
  REGION 1..10: note = Description of Artificial Sequence: Synthetic peptide
DMSKFPLKLR

SEQ ID NO: 4609 - protein, 10 aa, synthetic construct
  REGION 1..10: note = Description of Artificial Sequence: Synthetic peptide
DMVDTSLSGF

SEQ ID NO: 4610 - protein, 9 aa, synthetic construct
  REGION 1..9: note = Description of Artificial Sequence: Synthetic peptide
DMVPHISRQ

SEQ ID NO: 4611 - protein, 10 aa, synthetic construct
  REGION 1..10: note = Description of Artificial Sequence: Synthetic peptide
DMVPHISRQR

SEQ ID NO: 4612 - protein, 9 aa, synthetic construct
  REGION 1..9: note = Description of Artificial Sequence: Synthetic peptide
DNINLHTQV

SEQ ID NO: 4613 - protein, 9 aa, synthetic construct
  REGION 1..9: note = Description of Artificial Sequence: Synthetic peptide
DNLLEILQK

SEQ ID NO: 4614 - protein, 9 aa, synthetic construct
  REGION 1..9: note = Description of Artificial Sequence: Synthetic peptide
DPAQLPAPR

SEQ ID NO: 4615 - protein, 10 aa, synthetic construct
  REGION 1..10: note = Description of Artificial Sequence: Synthetic peptide
DPLQPELDSF

SEQ ID NO: 4616 - protein, 10 aa, synthetic construct
  REGION 1..10: note = Description of Artificial Sequence: Synthetic peptide
DPLSETKCTL

SEQ ID NO: 4617 - protein, 8 aa, synthetic construct
  REGION 1..8: note = Description of Artificial Sequence: Synthetic peptide
DPNFKDQV

SEQ ID NO: 4618 - protein, 9 aa, synthetic construct
  REGION 1..9: note = Description of Artificial Sequence: Synthetic peptide
DQIGYYRRA

SEQ ID NO: 4619 - protein, 9 aa, synthetic construct
  REGION 1..9: note = Description of Artificial Sequence: Synthetic peptide
DQLTPTWRV

SEQ ID NO: 4620 - protein, 10 aa, synthetic construct
  REGION 1..10: note = Description of Artificial Sequence: Synthetic peptide
DQLTPTWRVY

SEQ ID NO: 4621 - protein, 8 aa, synthetic construct
  REGION 1..8: note = Description of Artificial Sequence: Synthetic peptide
DRAMPNML

SEQ ID NO: 4622 - protein, 8 aa, synthetic construct
  REGION 1..8: note = Description of Artificial Sequence: Synthetic peptide
DRDLYDKL

SEQ ID NO: 4623 - protein, 10 aa, synthetic construct
  REGION 1..10: note = Description of Artificial Sequence: Synthetic peptide
DRDLYDKLQF

SEQ ID NO: 4624 - protein, 8 aa, synthetic construct
  REGION 1..8: note = Description of Artificial Sequence: Synthetic peptide
DRELHLSW

SEQ ID NO: 4625 - protein, 9 aa, synthetic construct
  REGION 1..9: note = Description of Artificial Sequence: Synthetic peptide
DRLNQLESK

SEQ ID NO: 4626 - protein, 9 aa, synthetic construct
  REGION 1..9: note = Description of Artificial Sequence: Synthetic peptide
DRVVFVLWA

SEQ ID NO: 4627 - protein, 10 aa, synthetic construct
  REGION 1..10: note = Description of Artificial Sequence: Synthetic peptide
DRYPANSIVC

SEQ ID NO: 4628 - protein, 10 aa, synthetic construct
  REGION 1..10: note = Description of Artificial Sequence: Synthetic peptide
DSAEVAVKMF

SEQ ID NO: 4629 - protein, 9 aa, synthetic construct
  REGION 1..9: note = Description of Artificial Sequence: Synthetic peptide
DSGFAAYSR

SEQ ID NO: 4630 - protein, 9 aa, synthetic construct
  REGION 1..9: note = Description of Artificial Sequence: Synthetic peptide
DSIIIGGAK

SEQ ID NO: 4631 - protein, 10 aa, synthetic construct
  REGION 1..10: note = Description of Artificial Sequence: Synthetic peptide
DSIIIGGAKL

SEQ ID NO: 4632 - protein, 8 aa, synthetic construct
  REGION 1..8: note = Description of Artificial Sequence: Synthetic peptide
DSSQGSEY

SEQ ID NO: 4633 - protein, 9 aa, synthetic construct
  REGION 1..9: note = Description of Artificial Sequence: Synthetic peptide
DSVEEVLSE

SEQ ID NO: 4634 - protein, 8 aa, synthetic construct
  REGION 1..8: note = Description of Artificial Sequence: Synthetic peptide
DSYFVVKR

SEQ ID NO: 4635 - protein, 10 aa, synthetic construct
  REGION 1..10: note = Description of Artificial Sequence: Synthetic peptide
DTANPKTPKY

SEQ ID NO: 4636 - protein, 11 aa, synthetic construct
  REGION 1..11: note = Description of Artificial Sequence: Synthetic peptide
DTDFVNEFYAY

SEQ ID NO: 4637 - protein, 8 aa, synthetic construct
  REGION 1..8: note = Description of Artificial Sequence: Synthetic peptide
DTDLTKPY

SEQ ID NO: 4638 - protein, 10 aa, synthetic construct
  REGION 1..10: note = Description of Artificial Sequence: Synthetic peptide
DTFNGECPNF

SEQ ID NO: 4639 - protein, 10 aa, synthetic construct
  REGION 1..10: note = Description of Artificial Sequence: Synthetic peptide
DTGVEHVTFF

SEQ ID NO: 4640 - protein, 9 aa, synthetic construct
  REGION 1..9: note = Description of Artificial Sequence: Synthetic peptide
DTIANYAKP

SEQ ID NO: 4641 - protein, 10 aa, synthetic construct
  REGION 1..10: note = Description of Artificial Sequence: Synthetic peptide
DTIANYAKPF

SEQ ID NO: 4642 - protein, 9 aa, synthetic construct
  REGION 1..9: note = Description of Artificial Sequence: Synthetic peptide
DTLKEILVT

SEQ ID NO: 4643 - protein, 10 aa, synthetic construct
  REGION 1..10: note = Description of Artificial Sequence: Synthetic peptide
DTLRVEAFEY

SEQ ID NO: 4644 - protein, 8 aa, synthetic construct
  REGION 1..8: note = Description of Artificial Sequence: Synthetic peptide
DTPKGPKV

SEQ ID NO: 4645 - protein, 9 aa, synthetic construct
  REGION 1..9: note = Description of Artificial Sequence: Synthetic peptide
DTPKGPKVK

SEQ ID NO: 4646 - protein, 10 aa, synthetic construct
  REGION 1..10: note = Description of Artificial Sequence: Synthetic peptide
DTPKGPKVKY

SEQ ID NO: 4647 - protein, 10 aa, synthetic construct
  REGION 1..10: note = Description of Artificial Sequence: Synthetic peptide
DTPNNTDFSR

SEQ ID NO: 4648 - protein, 9 aa, synthetic construct
  REGION 1..9: note = Description of Artificial Sequence: Synthetic peptide
DTSLSGFKL

SEQ ID NO: 4649 - protein, 9 aa, synthetic construct
  REGION 1..9: note = Description of Artificial Sequence: Synthetic peptide
DTTDAVRDP

SEQ ID NO: 4650 - protein, 11 aa, synthetic construct
  REGION 1..11: note = Description of Artificial Sequence: Synthetic peptide
DTWFSQRGGSY

SEQ ID NO: 4651 - protein, 11 aa, synthetic construct
  REGION 1..11: note = Description of Artificial Sequence: Synthetic peptide
DVDTDFVNEFY

SEQ ID NO: 4652 - protein, 9 aa, synthetic construct
  REGION 1..9: note = Description of Artificial Sequence: Synthetic peptide
DVEGCHATR

SEQ ID NO: 4653 - protein, 10 aa, synthetic construct
  REGION 1..10: note = Description of Artificial Sequence: Synthetic peptide
DVENPHLMGW

SEQ ID NO: 4654 - protein, 10 aa, synthetic construct
  REGION 1..10: note = Description of Artificial Sequence: Synthetic peptide
DVFHLYLQYI

SEQ ID NO: 4655 - protein, 8 aa, synthetic construct
  REGION 1..8: note = Description of Artificial Sequence: Synthetic peptide
DVNLHSSR

SEQ ID NO: 4656 - protein, 9 aa, synthetic construct
  REGION 1..9: note = Description of Artificial Sequence: Synthetic peptide
DVNLHSSRL

SEQ ID NO: 4657 - protein, 9 aa, synthetic construct
  REGION 1..9: note = Description of Artificial Sequence: Synthetic peptide
DVRETMSYL

SEQ ID NO: 4658 - protein, 10 aa, synthetic construct
  REGION 1..10: note = Description of Artificial Sequence: Synthetic peptide
DVRETMSYLF

SEQ ID NO: 4659 - protein, 10 aa, synthetic construct
  REGION 1..10: note = Description of Artificial Sequence: Synthetic peptide
DVSFLAHIQW

SEQ ID NO: 4660 - protein, 10 aa, synthetic construct
  REGION 1..10: note = Description of Artificial Sequence: Synthetic peptide
DVTQLYLGGM

SEQ ID NO: 4661 - protein, 9 aa, synthetic construct
  REGION 1..9: note = Description of Artificial Sequence: Synthetic peptide
DVVECLKLS

SEQ ID NO: 4662 - protein, 11 aa, synthetic construct
  REGION 1..11: note = Description of Artificial Sequence: Synthetic peptide
DVVECLKLSHQ

SEQ ID NO: 4663 - protein, 9 aa, synthetic construct
  REGION 1..9: note = Description of Artificial Sequence: Synthetic peptide
DVVNQNAQA

SEQ ID NO: 4664 - protein, 10 aa, synthetic construct
  REGION 1..10: note = Description of Artificial Sequence: Synthetic peptide
DVVQEGVLTA

SEQ ID NO: 4665 - protein, 11 aa, synthetic construct
  REGION 1..11: note = Description of Artificial Sequence: Synthetic peptide
DVVQEGVLTAV

SEQ ID NO: 4666 - protein, 11 aa, synthetic construct
  REGION 1..11: note = Description of Artificial Sequence: Synthetic peptide
DVVRQCSGVTF

SEQ ID NO: 4667 - protein, 10 aa, synthetic construct
  REGION 1..10: note = Description of Artificial Sequence: Synthetic peptide
DVVYRAFDIY

SEQ ID NO: 4668 - protein, 8 aa, synthetic construct
  REGION 1..8: note = Description of Artificial Sequence: Synthetic peptide
DWYDFVEN

SEQ ID NO: 4669 - protein, 9 aa, synthetic construct
  REGION 1..9: note = Description of Artificial Sequence: Synthetic peptide
DYDCVSFCY

SEQ ID NO: 4670 - protein, 9 aa, synthetic construct
  REGION 1..9: note = Description of Artificial Sequence: Synthetic peptide
DYIATNGPL

SEQ ID NO: 4671 - protein, 8 aa, synthetic construct
  REGION 1..8: note = Description of Artificial Sequence: Synthetic peptide
DYIINLII

SEQ ID NO: 4672 - protein, 9 aa, synthetic construct
  REGION 1..9: note = Description of Artificial Sequence: Synthetic peptide
DYPKCDRAM

SEQ ID NO: 4673 - protein, 8 aa, synthetic construct
  REGION 1..8: note = Description of Artificial Sequence: Synthetic peptide
DYTEISFM

SEQ ID NO: 4674 - protein, 10 aa, synthetic construct
  REGION 1..10: note = Description of Artificial Sequence: Synthetic peptide
DYTEISFMLW

SEQ ID NO: 4675 - protein, 9 aa, synthetic construct
  REGION 1..9: note = Description of Artificial Sequence: Synthetic peptide
DYVYNPFMI

SEQ ID NO: 4676 - protein, 9 aa, synthetic construct
  REGION 1..9: note = Description of Artificial Sequence: Synthetic peptide
EAALCTFLL

SEQ ID NO: 4677 - protein, 10 aa, synthetic construct
  REGION 1..10: note = Description of Artificial Sequence: Synthetic peptide
EAANFCALIL

SEQ ID NO: 4678 - protein, 9 aa, synthetic construct
  REGION 1..9: note = Description of Artificial Sequence: Synthetic peptide
EAEVQIDRL

SEQ ID NO: 4679 - protein, 11 aa, synthetic construct
  REGION 1..11: note = Description of Artificial Sequence: Synthetic peptide
EAGVCVSTSGR

SEQ ID NO: 4680 - protein, 10 aa, synthetic construct
  REGION 1..10: note = Description of Artificial Sequence: Synthetic peptide
EAMYTPHTVL

SEQ ID NO: 4681 - protein, 10 aa, synthetic construct
  REGION 1..10: note = Description of Artificial Sequence: Synthetic peptide
EAPFLYLYAL

SEQ ID NO: 4682 - protein, 9 aa, synthetic construct
  REGION 1..9: note = Description of Artificial Sequence: Synthetic peptide
EAPLVGTPV

SEQ ID NO: 4683 - protein, 9 aa, synthetic construct
  REGION 1..9: note = Description of Artificial Sequence: Synthetic peptide
EASKKPRQK

SEQ ID NO: 4684 - protein, 10 aa, synthetic construct
  REGION 1..10: note = Description of Artificial Sequence: Synthetic peptide
EASKKPRQKR

SEQ ID NO: 4685 - protein, 10 aa, synthetic construct
  REGION 1..10: note = Description of Artificial Sequence: Synthetic peptide
EAVKTQFNYY

SEQ ID NO: 4686 - protein, 9 aa, synthetic construct
  REGION 1..9: note = Description of Artificial Sequence: Synthetic peptide
EAVMYMGTL

SEQ ID NO: 4687 - protein, 8 aa, synthetic construct
  REGION 1..8: note = Description of Artificial Sequence: Synthetic peptide
ECFDKFKV

SEQ ID NO: 4688 - protein, 9 aa, synthetic construct
  REGION 1..9: note = Description of Artificial Sequence: Synthetic peptide
ECPNFVFPL

SEQ ID NO: 4689 - protein, 9 aa, synthetic construct
  REGION 1..9: note = Description of Artificial Sequence: Synthetic peptide
ECVLGQSKR

SEQ ID NO: 4690 - protein, 8 aa, synthetic construct
  REGION 1..8: note = Description of Artificial Sequence: Synthetic peptide
EDLLFNKV

SEQ ID NO: 4691 - protein, 8 aa, synthetic construct
  REGION 1..8: note = Description of Artificial Sequence: Synthetic peptide
EEAIRHVR

SEQ ID NO: 4692 - protein, 10 aa, synthetic construct
  REGION 1..10: note = Description of Artificial Sequence: Synthetic peptide
EEAKTVLKKC

SEQ ID NO: 4693 - protein, 11 aa, synthetic construct
  REGION 1..11: note = Description of Artificial Sequence: Synthetic peptide
EEEEFEPSTQY

SEQ ID NO: 4694 - protein, 10 aa, synthetic construct
  REGION 1..10: note = Description of Artificial Sequence: Synthetic peptide
EEEFEPSTQY

SEQ ID NO: 4695 - protein, 10 aa, synthetic construct
  REGION 1..10: note = Description of Artificial Sequence: Synthetic peptide
EEFEPSTQYE

SEQ ID NO: 4696 - protein, 10 aa, synthetic construct
  REGION 1..10: note = Description of Artificial Sequence: Synthetic peptide
EEGDCEEEEF

SEQ ID NO: 4697 - protein, 11 aa, synthetic construct
  REGION 1..11: note = Description of Artificial Sequence: Synthetic peptide
EEIAIILASFS

SEQ ID NO: 4698 - protein, 10 aa, synthetic construct
  REGION 1..10: note = Description of Artificial Sequence: Synthetic peptide
EELDKYFKNH

SEQ ID NO: 4699 - protein, 9 aa, synthetic construct
  REGION 1..9: note = Description of Artificial Sequence: Synthetic peptide
EELFYSYAT

SEQ ID NO: 4700 - protein, 10 aa, synthetic construct
  REGION 1..10: note = Description of Artificial Sequence: Synthetic peptide
EELKKLLEQW

SEQ ID NO: 4701 - protein, 8 aa, synthetic construct
  REGION 1..8: note = Description of Artificial Sequence: Synthetic peptide
EESSAKSA

SEQ ID NO: 4702 - protein, 10 aa, synthetic construct
  REGION 1..10: note = Description of Artificial Sequence: Synthetic peptide
EESSAKSASV

SEQ ID NO: 4703 - protein, 11 aa, synthetic construct
  REGION 1..11: note = Description of Artificial Sequence: Synthetic peptide
EESSAKSASVY

SEQ ID NO: 4704 - protein, 10 aa, synthetic construct
  REGION 1..10: note = Description of Artificial Sequence: Synthetic peptide
EETFKLSYGI

SEQ ID NO: 4705 - protein, 8 aa, synthetic construct
  REGION 1..8: note = Description of Artificial Sequence: Synthetic peptide
EETGLLMP

SEQ ID NO: 4706 - protein, 10 aa, synthetic construct
  REGION 1..10: note = Description of Artificial Sequence: Synthetic peptide
EETKFLTENL

SEQ ID NO: 4707 - protein, 8 aa, synthetic construct
  REGION 1..8: note = Description of Artificial Sequence: Synthetic peptide
EETRKLMP

SEQ ID NO: 4708 - protein, 9 aa, synthetic construct
  REGION 1..9: note = Description of Artificial Sequence: Synthetic peptide
EETRKLMPV

SEQ ID NO: 4709 - protein, 9 aa, synthetic construct
  REGION 1..9: note = Description of Artificial Sequence: Synthetic peptide
EEVLSEARQ

SEQ ID NO: 4710 - protein, 11 aa, synthetic construct
  REGION 1..11: note = Description of Artificial Sequence: Synthetic peptide
EEVLSEARQHL

SEQ ID NO: 4711 - protein, 10 aa, synthetic construct
  REGION 1..10: note = Description of Artificial Sequence: Synthetic peptide
EEVQELYSPI

SEQ ID NO: 4712 - protein, 11 aa, synthetic construct
  REGION 1..11: note = Description of Artificial Sequence: Synthetic peptide
EEVQELYSPIF

SEQ ID NO: 4713 - protein, 12 aa, synthetic construct
  REGION 1..12: note = Description of Artificial Sequence: Synthetic peptide
EEVTTTLEETKF

SEQ ID NO: 4714 - protein, 10 aa, synthetic construct
  REGION 1..10: note = Description of Artificial Sequence: Synthetic peptide
EEVVLKTGDL

SEQ ID NO: 4715 - protein, 10 aa, synthetic construct
  REGION 1..10: note = Description of Artificial Sequence: Synthetic peptide
EFEPSTQYEY

SEQ ID NO: 4716 - protein, 9 aa, synthetic construct
  REGION 1..9: note = Description of Artificial Sequence: Synthetic peptide
EFGATSAAL

SEQ ID NO: 4717 - protein, 11 aa, synthetic construct
  REGION 1..11: note = Description of Artificial Sequence: Synthetic peptide
EFIERYKLEGY

SEQ ID NO: 4718 - protein, 9 aa, synthetic construct
  REGION 1..9: note = Description of Artificial Sequence: Synthetic peptide
EFLRDGWEI

SEQ ID NO: 4719 - protein, 9 aa, synthetic construct
  REGION 1..9: note = Description of Artificial Sequence: Synthetic peptide
EFTPFDVVR

SEQ ID NO: 4720 - protein, 10 aa, synthetic construct
  REGION 1..10: note = Description of Artificial Sequence: Synthetic peptide
EFVFKNIDGY

SEQ ID NO: 4721 - protein, 9 aa, synthetic construct
  REGION 1..9: note = Description of Artificial Sequence: Synthetic peptide
EFYEAMYTP

SEQ ID NO: 4722 - protein, 8 aa, synthetic construct
  REGION 1..8: note = Description of Artificial Sequence: Synthetic peptide
EGYAFEHI

SEQ ID NO: 4723 - protein, 9 aa, synthetic construct
  REGION 1..9: note = Description of Artificial Sequence: Synthetic peptide
EGYAFEHIV

SEQ ID NO: 4724 - protein, 8 aa, synthetic construct
  REGION 1..8: note = Description of Artificial Sequence: Synthetic peptide
EHEHEIAW

SEQ ID NO: 4725 - protein, 8 aa, synthetic construct
  REGION 1..8: note = Description of Artificial Sequence: Synthetic peptide
EHSWNADL

SEQ ID NO: 4726 - protein, 11 aa, synthetic construct
  REGION 1..11: note = Description of Artificial Sequence: Synthetic peptide
EHSWNADLYKL

SEQ ID NO: 4727 - protein, 8 aa, synthetic construct
  REGION 1..8: note = Description of Artificial Sequence: Synthetic peptide
EIAWYTER

SEQ ID NO: 4728 - protein, 10 aa, synthetic construct
  REGION 1..10: note = Description of Artificial Sequence: Synthetic peptide
EIKDATPSDF

SEQ ID NO: 4729 - protein, 10 aa, synthetic construct
  REGION 1..10: note = Description of Artificial Sequence: Synthetic peptide
EIKESVQTFF

SEQ ID NO: 4730 - protein, 11 aa, synthetic construct
  REGION 1..11: note = Description of Artificial Sequence: Synthetic peptide
EILGTVSWNLR

SEQ ID NO: 4731 - protein, 8 aa, synthetic construct
  REGION 1..8: note = Description of Artificial Sequence: Synthetic peptide
EILLIIMR

SEQ ID NO: 4732 - protein, 10 aa, synthetic construct
  REGION 1..10: note = Description of Artificial Sequence: Synthetic peptide
EIPKEEVKPF

SEQ ID NO: 4733 - protein, 9 aa, synthetic construct
  REGION 1..9: note = Description of Artificial Sequence: Synthetic peptide
EIPVAYRKV

SEQ ID NO: 4734 - protein, 8 aa, synthetic construct
  REGION 1..8: note = Description of Artificial Sequence: Synthetic peptide
EITVATSR

SEQ ID NO: 4735 - protein, 10 aa, synthetic construct
  REGION 1..10: note = Description of Artificial Sequence: Synthetic peptide
EIVDTVSALV

SEQ ID NO: 4736 - protein, 11 aa, synthetic construct
  REGION 1..11: note = Description of Artificial Sequence: Synthetic peptide
EIVDTVSALVY

SEQ ID NO: 4737 - protein, 9 aa, synthetic construct
  REGION 1..9: note = Description of Artificial Sequence: Synthetic peptide
EIYQAGSTP

SEQ ID NO: 4738 - protein, 10 aa, synthetic construct
  REGION 1..10: note = Description of Artificial Sequence: Synthetic peptide
EKFKEGVEFL

SEQ ID NO: 4739 - protein, 11 aa, synthetic construct
  REGION 1..11: note = Description of Artificial Sequence: Synthetic peptide
ELAMDEFIERY

SEQ ID NO: 4740 - protein, 11 aa, synthetic construct
  REGION 1..11: note = Description of Artificial Sequence: Synthetic peptide
ELGDVRETMSY

SEQ ID NO: 4741 - protein, 9 aa, synthetic construct
  REGION 1..9: note = Description of Artificial Sequence: Synthetic peptide
ELKFNPPAL

SEQ ID NO: 4742 - protein, 9 aa, synthetic construct
  REGION 1..9: note = Description of Artificial Sequence: Synthetic peptide
ELKKLLEQW

SEQ ID NO: 4743 - protein, 10 aa, synthetic construct
  REGION 1..10: note = Description of Artificial Sequence: Synthetic peptide
ELLQNGMNGR

SEQ ID NO: 4744 - protein, 9 aa, synthetic construct
  REGION 1..9: note = Description of Artificial Sequence: Synthetic peptide
ELSPVALRQ

SEQ ID NO: 4745 - protein, 9 aa, synthetic construct
  REGION 1..9: note = Description of Artificial Sequence: Synthetic peptide
ELSRVLGLK

SEQ ID NO: 4746 - protein, 10 aa, synthetic construct
  REGION 1..10: note = Description of Artificial Sequence: Synthetic peptide
ELTGHMLDMY

SEQ ID NO: 4747 - protein, 9 aa, synthetic construct
  REGION 1..9: note = Description of Artificial Sequence: Synthetic peptide
ELYHYQECV

SEQ ID NO: 4748 - protein, 8 aa, synthetic construct
  REGION 1..8: note = Description of Artificial Sequence: Synthetic peptide
ENFNQHEV

SEQ ID NO: 4749 - protein, 8 aa, synthetic construct
  REGION 1..8: note = Description of Artificial Sequence: Synthetic peptide
EPEEHVQI

SEQ ID NO: 4750 - protein, 8 aa, synthetic construct
  REGION 1..8: note = Description of Artificial Sequence: Synthetic peptide
EPKLGSLV

SEQ ID NO: 4751 - protein, 10 aa, synthetic construct
  REGION 1..10: note = Description of Artificial Sequence: Synthetic peptide
EPKLGSLVVR

SEQ ID NO: 4752 - protein, 8 aa, synthetic construct
  REGION 1..8: note = Description of Artificial Sequence: Synthetic peptide
EPTTTTSV

SEQ ID NO: 4753 - protein, 9 aa, synthetic construct
  REGION 1..9: note = Description of Artificial Sequence: Synthetic peptide
EQLDFIDTK

SEQ ID NO: 4754 - protein, 8 aa, synthetic construct
  REGION 1..8: note = Description of Artificial Sequence: Synthetic peptide
ERFVSLAI

SEQ ID NO: 4755 - protein, 9 aa, synthetic construct
  REGION 1..9: note = Description of Artificial Sequence: Synthetic peptide
ERHSLSHFV

SEQ ID NO: 4756 - protein, 9 aa, synthetic construct
  REGION 1..9: note = Description of Artificial Sequence: Synthetic peptide
ERIDKVLNE

SEQ ID NO: 4757 - protein, 10 aa, synthetic construct
  REGION 1..10: note = Description of Artificial Sequence: Synthetic peptide
ERIDKVLNEK

SEQ ID NO: 4758 - protein, 9 aa, synthetic construct
  REGION 1..9: note = Description of Artificial Sequence: Synthetic peptide
ESELVIGAV

SEQ ID NO: 4759 - protein, 9 aa, synthetic construct
  REGION 1..9: note = Description of Artificial Sequence: Synthetic peptide
ESIVRFPNI

SEQ ID NO: 4760 - protein, 9 aa, synthetic construct
  REGION 1..9: note = Description of Artificial Sequence: Synthetic peptide
ESLRPDTRY

SEQ ID NO: 4761 - protein, 11 aa, synthetic construct
  REGION 1..11: note = Description of Artificial Sequence: Synthetic peptide
ETAHSCNVNRF

SEQ ID NO: 4762 - protein, 8 aa, synthetic construct
  REGION 1..8: note = Description of Artificial Sequence: Synthetic peptide
ETAQNSVR

SEQ ID NO: 4763 - protein, 8 aa, synthetic construct
  REGION 1..8: note = Description of Artificial Sequence: Synthetic peptide
ETFVTHSK

SEQ ID NO: 4764 - protein, 10 aa, synthetic construct
  REGION 1..10: note = Description of Artificial Sequence: Synthetic peptide
ETFVTHSKGL

SEQ ID NO: 4765 - protein, 10 aa, synthetic construct
  REGION 1..10: note = Description of Artificial Sequence: Synthetic peptide
ETFYPKLQSS

SEQ ID NO: 4766 - protein, 10 aa, synthetic construct
  REGION 1..10: note = Description of Artificial Sequence: Synthetic peptide
ETICAPLTVF

SEQ ID NO: 4767 - protein, 11 aa, synthetic construct
  REGION 1..11: note = Description of Artificial Sequence: Synthetic peptide
ETKDVVECLKL

SEQ ID NO: 4768 - protein, 10 aa, synthetic construct
  REGION 1..10: note = Description of Artificial Sequence: Synthetic peptide
ETLVTMPLGY

SEQ ID NO: 4769 - protein, 10 aa, synthetic construct
  REGION 1..10: note = Description of Artificial Sequence: Synthetic peptide
ETMSYLFQHA

SEQ ID NO: 4770 - protein, 8 aa, synthetic construct
  REGION 1..8: note = Description of Artificial Sequence: Synthetic peptide
ETNILLNV

SEQ ID NO: 4771 - protein, 8 aa, synthetic construct
  REGION 1..8: note = Description of Artificial Sequence: Synthetic peptide
ETQALPQR

SEQ ID NO: 4772 - protein, 9 aa, synthetic construct
  REGION 1..9: note = Description of Artificial Sequence: Synthetic peptide
ETSWQTGDF

SEQ ID NO: 4773 - protein, 8 aa, synthetic construct
  REGION 1..8: note = Description of Artificial Sequence: Synthetic peptide
ETVKGLDY

SEQ ID NO: 4774 - protein, 11 aa, synthetic construct
  REGION 1..11: note = Description of Artificial Sequence: Synthetic peptide
ETVKGLDYKAF

SEQ ID NO: 4775 - protein, 8 aa, synthetic construct
  REGION 1..8: note = Description of Artificial Sequence: Synthetic peptide
ETYFTQSR

SEQ ID NO: 4776 - protein, 10 aa, synthetic construct
  REGION 1..10: note = Description of Artificial Sequence: Synthetic peptide
EVAVKMFDAY

SEQ ID NO: 4777 - protein, 10 aa, synthetic construct
  REGION 1..10: note = Description of Artificial Sequence: Synthetic peptide
EVEKGVLPQL

SEQ ID NO: 4778 - protein, 9 aa, synthetic construct
  REGION 1..9: note = Description of Artificial Sequence: Synthetic peptide
EVFNATRFA

SEQ ID NO: 4779 - protein, 9 aa, synthetic construct
  REGION 1..9: note = Description of Artificial Sequence: Synthetic peptide
EVGFVVPGL

SEQ ID NO: 4780 - protein, 11 aa, synthetic construct
  REGION 1..11: note = Description of Artificial Sequence: Synthetic peptide
EVGHTDLMAAY

SEQ ID NO: 4781 - protein, 8 aa, synthetic construct
  REGION 1..8: note = Description of Artificial Sequence: Synthetic peptide
EVITFDNL

SEQ ID NO: 4782 - protein, 11 aa, synthetic construct
  REGION 1..11: note = Description of Artificial Sequence: Synthetic peptide
EVITFDNLKTL

SEQ ID NO: 4783 - protein, 10 aa, synthetic construct
  REGION 1..10: note = Description of Artificial Sequence: Synthetic peptide
EVKPFITESK

SEQ ID NO: 4784 - protein, 8 aa, synthetic construct
  REGION 1..8: note = Description of Artificial Sequence: Synthetic peptide
EVLSDREL

SEQ ID NO: 4785 - protein, 10 aa, synthetic construct
  REGION 1..10: note = Description of Artificial Sequence: Synthetic peptide
EVLSEARQHL

SEQ ID NO: 4786 - protein, 9 aa, synthetic construct
  REGION 1..9: note = Description of Artificial Sequence: Synthetic peptide
EVNEFACVV

SEQ ID NO: 4787 - protein, 11 aa, synthetic construct
  REGION 1..11: note = Description of Artificial Sequence: Synthetic peptide
EVNSFSGYLKL

SEQ ID NO: 4788 - protein, 11 aa, synthetic construct
  REGION 1..11: note = Description of Artificial Sequence: Synthetic peptide
EVPANSTVLSF

SEQ ID NO: 4789 - protein, 9 aa, synthetic construct
  REGION 1..9: note = Description of Artificial Sequence: Synthetic peptide
EVPVAIHAD

SEQ ID NO: 4790 - protein, 9 aa, synthetic construct
  REGION 1..9: note = Description of Artificial Sequence: Synthetic peptide
EVPVSIINN

SEQ ID NO: 4791 - protein, 11 aa, synthetic construct
  REGION 1..11: note = Description of Artificial Sequence: Synthetic peptide
EVQIDRLITGR

SEQ ID NO: 4792 - protein, 8 aa, synthetic construct
  REGION 1..8: note = Description of Artificial Sequence: Synthetic peptide
EVTPSGTW

SEQ ID NO: 4793 - protein, 11 aa, synthetic construct
  REGION 1..11: note = Description of Artificial Sequence: Synthetic peptide
EVTPSGTWLTY

SEQ ID NO: 4794 - protein, 10 aa, synthetic construct
  REGION 1..10: note = Description of Artificial Sequence: Synthetic peptide
EVVDKYFDCY

SEQ ID NO: 4795 - protein, 9 aa, synthetic construct
  REGION 1..9: note = Description of Artificial Sequence: Synthetic peptide
EVVENPTIQ

SEQ ID NO: 4796 - protein, 11 aa, synthetic construct
  REGION 1..11: note = Description of Artificial Sequence: Synthetic peptide
EWFLAYILFTR

SEQ ID NO: 4797 - protein, 10 aa, synthetic construct
  REGION 1..10: note = Description of Artificial Sequence: Synthetic peptide
EWSMATYYLF

SEQ ID NO: 4798 - protein, 8 aa, synthetic construct
  REGION 1..8: note = Description of Artificial Sequence: Synthetic peptide
EYCPIFFI

SEQ ID NO: 4799 - protein, 11 aa, synthetic construct
  REGION 1..11: note = Description of Artificial Sequence: Synthetic peptide
EYHDVRVVLDF

SEQ ID NO: 4800 - protein, 8 aa, synthetic construct
  REGION 1..8: note = Description of Artificial Sequence: Synthetic peptide
EYHNESGL

SEQ ID NO: 4801 - protein, 9 aa, synthetic construct
  REGION 1..9: note = Description of Artificial Sequence: Synthetic peptide
EYKGPITDV

SEQ ID NO: 4802 - protein, 11 aa, synthetic construct
  REGION 1..11: note = Description of Artificial Sequence: Synthetic peptide
EYSHVVAFNTL

SEQ ID NO: 4803 - protein, 10 aa, synthetic construct
  REGION 1..10: note = Description of Artificial Sequence: Synthetic peptide
EYYHTTDPSF

SEQ ID NO: 4804 - protein, 10 aa, synthetic construct
  REGION 1..10: note = Description of Artificial Sequence: Synthetic peptide
FADDLNQLTG

SEQ ID NO: 4805 - protein, 9 aa, synthetic construct
  REGION 1..9: note = Description of Artificial Sequence: Synthetic peptide
FALTCFSTQ

SEQ ID NO: 4806 - protein, 10 aa, synthetic construct
  REGION 1..10: note = Description of Artificial Sequence: Synthetic peptide
FAMGIIAMSA

SEQ ID NO: 4807 - protein, 9 aa, synthetic construct
  REGION 1..9: note = Description of Artificial Sequence: Synthetic peptide
FASTEKSNI

SEQ ID NO: 4808 - protein, 9 aa, synthetic construct
  REGION 1..9: note = Description of Artificial Sequence: Synthetic peptide
FATSACVLA

SEQ ID NO: 4809 - protein, 8 aa, synthetic construct
  REGION 1..8: note = Description of Artificial Sequence: Synthetic peptide
FCDLKGKY

SEQ ID NO: 4810 - protein, 9 aa, synthetic construct
  REGION 1..9: note = Description of Artificial Sequence: Synthetic peptide
FCLEASFNY

SEQ ID NO: 4811 - protein, 11 aa, synthetic construct
  REGION 1..11: note = Description of Artificial Sequence: Synthetic peptide
FCNDPFLGVYY

SEQ ID NO: 4812 - protein, 8 aa, synthetic construct
  REGION 1..8: note = Description of Artificial Sequence: Synthetic peptide
FDAYVNTF

SEQ ID NO: 4813 - protein, 9 aa, synthetic construct
  REGION 1..9: note = Description of Artificial Sequence: Synthetic peptide
FDESGEFKL

SEQ ID NO: 4814 - protein, 8 aa, synthetic construct
  REGION 1..8: note = Description of Artificial Sequence: Synthetic peptide
FEKMVSLL

SEQ ID NO: 4815 - protein, 10 aa, synthetic construct
  REGION 1..10: note = Description of Artificial Sequence: Synthetic peptide
FEKMVSLLSV

SEQ ID NO: 4816 - protein, 11 aa, synthetic construct
  REGION 1..11: note = Description of Artificial Sequence: Synthetic peptide
FELDERIDKVL

SEQ ID NO: 4817 - protein, 10 aa, synthetic construct
  REGION 1..10: note = Description of Artificial Sequence: Synthetic peptide
FERDISTEIY

SEQ ID NO: 4818 - protein, 8 aa, synthetic construct
  REGION 1..8: note = Description of Artificial Sequence: Synthetic peptide
FEYYHTTD

SEQ ID NO: 4819 - protein, 9 aa, synthetic construct
  REGION 1..9: note = Description of Artificial Sequence: Synthetic peptide
FFGMSRIGM

SEQ ID NO: 4820 - protein, 9 aa, synthetic construct
  REGION 1..9: note = Description of Artificial Sequence: Synthetic peptide
FFITGNTLQ

SEQ ID NO: 4821 - protein, 10 aa, synthetic construct
  REGION 1..10: note = Description of Artificial Sequence: Synthetic peptide
FFITGNTLQC

SEQ ID NO: 4822 - protein, 9 aa, synthetic construct
  REGION 1..9: note = Description of Artificial Sequence: Synthetic peptide
FFIYNKIVD

SEQ ID NO: 4823 - protein, 9 aa, synthetic construct
  REGION 1..9: note = Description of Artificial Sequence: Synthetic peptide
FFKEGSSVE

SEQ ID NO: 4824 - protein, 11 aa, synthetic construct
  REGION 1..11: note = Description of Artificial Sequence: Synthetic peptide
FFLYENAFLPF

SEQ ID NO: 4825 - protein, 8 aa, synthetic construct
  REGION 1..8: note = Description of Artificial Sequence: Synthetic peptide
FFYYSDSP

SEQ ID NO: 4826 - protein, 9 aa, synthetic construct
  REGION 1..9: note = Description of Artificial Sequence: Synthetic peptide
FFYYSDSPC

SEQ ID NO: 4827 - protein, 9 aa, synthetic construct
  REGION 1..9: note = Description of Artificial Sequence: Synthetic peptide
FGAGAALQI

SEQ ID NO: 4828 - protein, 8 aa, synthetic construct
  REGION 1..8: note = Description of Artificial Sequence: Synthetic peptide
FGATSAAL

SEQ ID NO: 4829 - protein, 9 aa, synthetic construct
  REGION 1..9: note = Description of Artificial Sequence: Synthetic peptide
FGLVAEWFL

SEQ ID NO: 4830 - protein, 9 aa, synthetic construct
  REGION 1..9: note = Description of Artificial Sequence: Synthetic peptide
FHPLADNKF

SEQ ID NO: 4831 - protein, 11 aa, synthetic construct
  REGION 1..11: note = Description of Artificial Sequence: Synthetic peptide
FIAGLIAIVMV

SEQ ID NO: 4832 - protein, 8 aa, synthetic construct
  REGION 1..8: note = Description of Artificial Sequence: Synthetic peptide
FIDTKRGV

SEQ ID NO: 4833 - protein, 10 aa, synthetic construct
  REGION 1..10: note = Description of Artificial Sequence: Synthetic peptide
FIEDLLFNKV

SEQ ID NO: 4834 - protein, 10 aa, synthetic construct
  REGION 1..10: note = Description of Artificial Sequence: Synthetic peptide
FIERYKLEGY

SEQ ID NO: 4835 - protein, 10 aa, synthetic construct
  REGION 1..10: note = Description of Artificial Sequence: Synthetic peptide
FIKGLNNLNR

SEQ ID NO: 4836 - protein, 8 aa, synthetic construct
  REGION 1..8: note = Description of Artificial Sequence: Synthetic peptide
FIPMDSTV

SEQ ID NO: 4837 - protein, 8 aa, synthetic construct
  REGION 1..8: note = Description of Artificial Sequence: Synthetic peptide
FISDEVAR

SEQ ID NO: 4838 - protein, 9 aa, synthetic construct
  REGION 1..9: note = Description of Artificial Sequence: Synthetic peptide
FISNSWLMW

SEQ ID NO: 4839 - protein, 9 aa, synthetic construct
  REGION 1..9: note = Description of Artificial Sequence: Synthetic peptide
FITGNTLQC

SEQ ID NO: 4840 - protein, 9 aa, synthetic construct
  REGION 1..9: note = Description of Artificial Sequence: Synthetic peptide
FITLCFTLK

SEQ ID NO: 4841 - protein, 8 aa, synthetic construct
  REGION 1..8: note = Description of Artificial Sequence: Synthetic peptide
FIYNKIVD

SEQ ID NO: 4842 - protein, 8 aa, synthetic construct
  REGION 1..8: note = Description of Artificial Sequence: Synthetic peptide
FKESPFEL

SEQ ID NO: 4843 - protein, 8 aa, synthetic construct
  REGION 1..8: note = Description of Artificial Sequence: Synthetic peptide
FKKGAKLL

SEQ ID NO: 4844 - protein, 9 aa, synthetic construct
  REGION 1..9: note = Description of Artificial Sequence: Synthetic peptide
FKLKDCVMY

SEQ ID NO: 4845 - protein, 10 aa, synthetic construct
  REGION 1..10: note = Description of Artificial Sequence: Synthetic peptide
FKLVNKFLAL

SEQ ID NO: 4846 - protein, 9 aa, synthetic construct
  REGION 1..9: note = Description of Artificial Sequence: Synthetic peptide
FKNLREFVF

SEQ ID NO: 4847 - protein, 8 aa, synthetic construct
  REGION 1..8: note = Description of Artificial Sequence: Synthetic peptide
FKYWDQTY

SEQ ID NO: 4848 - protein, 9 aa, synthetic construct
  REGION 1..9: note = Description of Artificial Sequence: Synthetic peptide
FLALITLAT

SEQ ID NO: 4849 - protein, 10 aa, synthetic construct
  REGION 1..10: note = Description of Artificial Sequence: Synthetic peptide
FLAYILFTRF

SEQ ID NO: 4850 - protein, 10 aa, synthetic construct
  REGION 1..10: note = Description of Artificial Sequence: Synthetic peptide
FLEYHDVRVV

SEQ ID NO: 4851 - protein, 9 aa, synthetic construct
  REGION 1..9: note = Description of Artificial Sequence: Synthetic peptide
FLGIITTVA

SEQ ID NO: 4852 - protein, 9 aa, synthetic construct
  REGION 1..9: note = Description of Artificial Sequence: Synthetic peptide
FLKKDAPYI

SEQ ID NO: 4853 - protein, 10 aa, synthetic construct
  REGION 1..10: note = Description of Artificial Sequence: Synthetic peptide
FLKKDAPYIV

SEQ ID NO: 4854 - protein, 9 aa, synthetic construct
  REGION 1..9: note = Description of Artificial Sequence: Synthetic peptide
FLKRGDKSV

SEQ ID NO: 4855 - protein, 11 aa, synthetic construct
  REGION 1..11: note = Description of Artificial Sequence: Synthetic peptide
FLLNKEMYLKL

SEQ ID NO: 4856 - protein, 11 aa, synthetic construct
  REGION 1..11: note = Description of Artificial Sequence: Synthetic peptide
FLLPSLATVAY

SEQ ID NO: 4857 - protein, 10 aa, synthetic construct
  REGION 1..10: note = Description of Artificial Sequence: Synthetic peptide
FLNRVCGVSA

SEQ ID NO: 4858 - protein, 9 aa, synthetic construct
  REGION 1..9: note = Description of Artificial Sequence: Synthetic peptide
FLPFAMGII

SEQ ID NO: 4859 - protein, 8 aa, synthetic construct
  REGION 1..8: note = Description of Artificial Sequence: Synthetic peptide
FLPFFSNV

SEQ ID NO: 4860 - protein, 10 aa, synthetic construct
  REGION 1..10: note = Description of Artificial Sequence: Synthetic peptide
FLPFFSNVTW

SEQ ID NO: 4861 - protein, 10 aa, synthetic construct
  REGION 1..10: note = Description of Artificial Sequence: Synthetic peptide
FLTWICLLQF

SEQ ID NO: 4862 - protein, 11 aa, synthetic construct
  REGION 1..11: note = Description of Artificial Sequence: Synthetic peptide
FLVFLGIITTV

SEQ ID NO: 4863 - protein, 9 aa, synthetic construct
  REGION 1..9: note = Description of Artificial Sequence: Synthetic peptide
FLVLIMLII

SEQ ID NO: 4864 - protein, 10 aa, synthetic construct
  REGION 1..10: note = Description of Artificial Sequence: Synthetic peptide
FLVLIMLIIF

SEQ ID NO: 4865 - protein, 11 aa, synthetic construct
  REGION 1..11: note = Description of Artificial Sequence: Synthetic peptide
FLYENAFLPFA

SEQ ID NO: 4866 - protein, 8 aa, synthetic construct
  REGION 1..8: note = Description of Artificial Sequence: Synthetic peptide
FMGRIRSV

SEQ ID NO: 4867 - protein, 9 aa, synthetic construct
  REGION 1..9: note = Description of Artificial Sequence: Synthetic peptide
FNGECPNFV

SEQ ID NO: 4868 - protein, 9 aa, synthetic construct
  REGION 1..9: note = Description of Artificial Sequence: Synthetic peptide
FNGVSFSTF

SEQ ID NO: 4869 - protein, 8 aa, synthetic construct
  REGION 1..8: note = Description of Artificial Sequence: Synthetic peptide
FNQHEVLL

SEQ ID NO: 4870 - protein, 8 aa, synthetic construct
  REGION 1..8: note = Description of Artificial Sequence: Synthetic peptide
FNVLFSTV

SEQ ID NO: 4871 - protein, 8 aa, synthetic construct
  REGION 1..8: note = Description of Artificial Sequence: Synthetic peptide
FNVPMEKL

SEQ ID NO: 4872 - protein, 10 aa, synthetic construct
  REGION 1..10: note = Description of Artificial Sequence: Synthetic peptide
FPDLNGDVVA

SEQ ID NO: 4873 - protein, 11 aa, synthetic construct
  REGION 1..11: note = Description of Artificial Sequence: Synthetic peptide
FPFNKWGKARL

SEQ ID NO: 4874 - protein, 11 aa, synthetic construct
  REGION 1..11: note = Description of Artificial Sequence: Synthetic peptide
FPKSDGTGTIY

SEQ ID NO: 4875 - protein, 9 aa, synthetic construct
  REGION 1..9: note = Description of Artificial Sequence: Synthetic peptide
FPLCANGQV

SEQ ID NO: 4876 - protein, 9 aa, synthetic construct
  REGION 1..9: note = Description of Artificial Sequence: Synthetic peptide
FPLKLRGTA

SEQ ID NO: 4877 - protein, 10 aa, synthetic construct
  REGION 1..10: note = Description of Artificial Sequence: Synthetic peptide
FPNITNLCPF

SEQ ID NO: 4878 - protein, 10 aa, synthetic construct
  REGION 1..10: note = Description of Artificial Sequence: Synthetic peptide
FPPTSFGPLV

SEQ ID NO: 4879 - protein, 10 aa, synthetic construct
  REGION 1..10: note = Description of Artificial Sequence: Synthetic peptide
FPQSAPHGVV

SEQ ID NO: 4880 - protein, 9 aa, synthetic construct
  REGION 1..9: note = Description of Artificial Sequence: Synthetic peptide
FPREGVFVS

SEQ ID NO: 4881 - protein, 9 aa, synthetic construct
  REGION 1..9: note = Description of Artificial Sequence: Synthetic peptide
FPSGKVEGC

SEQ ID NO: 4882 - protein, 9 aa, synthetic construct
  REGION 1..9: note = Description of Artificial Sequence: Synthetic peptide
FPVLHDIGN

SEQ ID NO: 4883 - protein, 10 aa, synthetic construct
  REGION 1..10: note = Description of Artificial Sequence: Synthetic peptide
FSALEPLVDL

SEQ ID NO: 4884 - protein, 10 aa, synthetic construct
  REGION 1..10: note = Description of Artificial Sequence: Synthetic peptide
FSGAMDTTSY

SEQ ID NO: 4885 - protein, 8 aa, synthetic construct
  REGION 1..8: note = Description of Artificial Sequence: Synthetic peptide
FSNSGSDV

SEQ ID NO: 4886 - protein, 9 aa, synthetic construct
  REGION 1..9: note = Description of Artificial Sequence: Synthetic peptide
FSSEIIGYK

SEQ ID NO: 4887 - protein, 8 aa, synthetic construct
  REGION 1..8: note = Description of Artificial Sequence: Synthetic peptide
FSTASDTY

SEQ ID NO: 4888 - protein, 9 aa, synthetic construct
  REGION 1..9: note = Description of Artificial Sequence: Synthetic peptide
FTALTQHGK

SEQ ID NO: 4889 - protein, 12 aa, synthetic construct
  REGION 1..12: note = Description of Artificial Sequence: Synthetic peptide
FTEERLKLFDRY

SEQ ID NO: 4890 - protein, 10 aa, synthetic construct
  REGION 1..10: note = Description of Artificial Sequence: Synthetic peptide
FTIYSLLLCR

SEQ ID NO: 4891 - protein, 10 aa, synthetic construct
  REGION 1..10: note = Description of Artificial Sequence: Synthetic peptide
FTLLLQLCTF

SEQ ID NO: 4892 - protein, 9 aa, synthetic construct
  REGION 1..9: note = Description of Artificial Sequence: Synthetic peptide
FTPLVPFWI

SEQ ID NO: 4893 - protein, 8 aa, synthetic construct
  REGION 1..8: note = Description of Artificial Sequence: Synthetic peptide
FTRSTNSR

SEQ ID NO: 4894 - protein, 10 aa, synthetic construct
  REGION 1..10: note = Description of Artificial Sequence: Synthetic peptide
FTSDLATNNL

SEQ ID NO: 4895 - protein, 8 aa, synthetic construct
  REGION 1..8: note = Description of Artificial Sequence: Synthetic peptide
FTTTLNDF

SEQ ID NO: 4896 - protein, 9 aa, synthetic construct
  REGION 1..9: note = Description of Artificial Sequence: Synthetic peptide
FTVLCLTPV

SEQ ID NO: 4897 - protein, 9 aa, synthetic construct
  REGION 1..9: note = Description of Artificial Sequence: Synthetic peptide
FVCDNIKFA

SEQ ID NO: 4898 - protein, 9 aa, synthetic construct
  REGION 1..9: note = Description of Artificial Sequence: Synthetic peptide
FVDRQTAQA

SEQ ID NO: 4899 - protein, 11 aa, synthetic construct
  REGION 1..11: note = Description of Artificial Sequence: Synthetic peptide
FVFKNIDGYFK

SEQ ID NO: 4900 - protein, 9 aa, synthetic construct
  REGION 1..9: note = Description of Artificial Sequence: Synthetic peptide
FVIRGDEVR

SEQ ID NO: 4901 - protein, 8 aa, synthetic construct
  REGION 1..8: note = Description of Artificial Sequence: Synthetic peptide
FVLWAHGF

SEQ ID NO: 4902 - protein, 10 aa, synthetic construct
  REGION 1..10: note = Description of Artificial Sequence: Synthetic peptide
FVNLKQLPFF

SEQ ID NO: 4903 - protein, 8 aa, synthetic construct
  REGION 1..8: note = Description of Artificial Sequence: Synthetic peptide
FVTHSKGL

SEQ ID NO: 4904 - protein, 10 aa, synthetic construct
  REGION 1..10: note = Description of Artificial Sequence: Synthetic peptide
FVTHSKGLYR

SEQ ID NO: 4905 - protein, 9 aa, synthetic construct
  REGION 1..9: note = Description of Artificial Sequence: Synthetic peptide
FVVPGLPGT

SEQ ID NO: 4906 - protein, 10 aa, synthetic construct
  REGION 1..10: note = Description of Artificial Sequence: Synthetic peptide
FVVSTGYHFR

SEQ ID NO: 4907 - protein, 8 aa, synthetic construct
  REGION 1..8: note = Description of Artificial Sequence: Synthetic peptide
FWITIAYI

SEQ ID NO: 4908 - protein, 10 aa, synthetic construct
  REGION 1..10: note = Description of Artificial Sequence: Synthetic peptide
FWRNTNPIQL

SEQ ID NO: 4909 - protein, 9 aa, synthetic construct
  REGION 1..9: note = Description of Artificial Sequence: Synthetic peptide
FYDFAVSKG

SEQ ID NO: 4910 - protein, 10 aa, synthetic construct
  REGION 1..10: note = Description of Artificial Sequence: Synthetic peptide
FYDFAVSKGF

SEQ ID NO: 4911 - protein, 9 aa, synthetic construct
  REGION 1..9: note = Description of Artificial Sequence: Synthetic peptide
FYEAMYTPH

SEQ ID NO: 4912 - protein, 9 aa, synthetic construct
  REGION 1..9: note = Description of Artificial Sequence: Synthetic peptide
FYFYTSKTT

SEQ ID NO: 4913 - protein, 10 aa, synthetic construct
  REGION 1..10: note = Description of Artificial Sequence: Synthetic peptide
FYFYTSKTTV

SEQ ID NO: 4914 - protein, 8 aa, synthetic construct
  REGION 1..8: note = Description of Artificial Sequence: Synthetic peptide
FYGPFVDR

SEQ ID NO: 4915 - protein, 9 aa, synthetic construct
  REGION 1..9: note = Description of Artificial Sequence: Synthetic peptide
FYKENSYTT

SEQ ID NO: 4916 - protein, 10 aa, synthetic construct
  REGION 1..10: note = Description of Artificial Sequence: Synthetic peptide
FYLCFLAFLL

SEQ ID NO: 4917 - protein, 8 aa, synthetic construct
  REGION 1..8: note = Description of Artificial Sequence: Synthetic peptide
FYLITPVH

SEQ ID NO: 4918 - protein, 8 aa, synthetic construct
  REGION 1..8: note = Description of Artificial Sequence: Synthetic peptide
FYPPDEDE

SEQ ID NO: 4919 - protein, 8 aa, synthetic construct
  REGION 1..8: note = Description of Artificial Sequence: Synthetic peptide
FYRLANEC

SEQ ID NO: 4920 - protein, 9 aa, synthetic construct
  REGION 1..9: note = Description of Artificial Sequence: Synthetic peptide
FYSKWYIRV

SEQ ID NO: 4921 - protein, 9 aa, synthetic construct
  REGION 1..9: note = Description of Artificial Sequence: Synthetic peptide
FYSYATHSD

SEQ ID NO: 4922 - protein, 8 aa, synthetic construct
  REGION 1..8: note = Description of Artificial Sequence: Synthetic peptide
FYTSKTTV

SEQ ID NO: 4923 - protein, 11 aa, synthetic construct
  REGION 1..11: note = Description of Artificial Sequence: Synthetic peptide
FYTSKTTVASL

SEQ ID NO: 4924 - protein, 10 aa, synthetic construct
  REGION 1..10: note = Description of Artificial Sequence: Synthetic peptide
FYVLGLAAIM

SEQ ID NO: 4925 - protein, 11 aa, synthetic construct
  REGION 1..11: note = Description of Artificial Sequence: Synthetic peptide
FYVYANGGKGF

SEQ ID NO: 4926 - protein, 10 aa, synthetic construct
  REGION 1..10: note = Description of Artificial Sequence: Synthetic peptide
FYVYSRVKNL

SEQ ID NO: 4927 - protein, 8 aa, synthetic construct
  REGION 1..8: note = Description of Artificial Sequence: Synthetic peptide
FYYLGTGP

SEQ ID NO: 4928 - protein, 9 aa, synthetic construct
  REGION 1..9: note = Description of Artificial Sequence: Synthetic peptide
FYYLGTGPE

SEQ ID NO: 4929 - protein, 8 aa, synthetic construct
  REGION 1..8: note = Description of Artificial Sequence: Synthetic peptide
FYYSDSPC

SEQ ID NO: 4930 - protein, 10 aa, synthetic construct
  REGION 1..10: note = Description of Artificial Sequence: Synthetic peptide
FYYVWKSYVH

SEQ ID NO: 4931 - protein, 8 aa, synthetic construct
  REGION 1..8: note = Description of Artificial Sequence: Synthetic peptide
GAALQIPF

SEQ ID NO: 4932 - protein, 8 aa, synthetic construct
  REGION 1..8: note = Description of Artificial Sequence: Synthetic peptide
GAENSVAY

SEQ ID NO: 4933 - protein, 10 aa, synthetic construct
  REGION 1..10: note = Description of Artificial Sequence: Synthetic peptide
GALLTKSSEY

SEQ ID NO: 4934 - protein, 9 aa, synthetic construct
  REGION 1..9: note = Description of Artificial Sequence: Synthetic peptide
GCFVDDIVK

SEQ ID NO: 4935 - protein, 8 aa, synthetic construct
  REGION 1..8: note = Description of Artificial Sequence: Synthetic peptide
GDDTVIEV

SEQ ID NO: 4936 - protein, 10 aa, synthetic construct
  REGION 1..10: note = Description of Artificial Sequence: Synthetic peptide
GDYGDAVVYR

SEQ ID NO: 4937 - protein, 8 aa, synthetic construct
  REGION 1..8: note = Description of Artificial Sequence: Synthetic peptide
GEAANFCA

SEQ ID NO: 4938 - protein, 11 aa, synthetic construct
  REGION 1..11: note = Description of Artificial Sequence: Synthetic peptide
GEAANFCALIL

SEQ ID NO: 4939 - protein, 10 aa, synthetic construct
  REGION 1..10: note = Description of Artificial Sequence: Synthetic peptide
GEAVKTQFNY

SEQ ID NO: 4940 - protein, 10 aa, synthetic construct
  REGION 1..10: note = Description of Artificial Sequence: Synthetic peptide
GECPNFVFPL

SEQ ID NO: 4941 - protein, 11 aa, synthetic construct
  REGION 1..11: note = Description of Artificial Sequence: Synthetic peptide
GEDIQLLKSAY

SEQ ID NO: 4942 - protein, 11 aa, synthetic construct
  REGION 1..11: note = Description of Artificial Sequence: Synthetic peptide
GEQKSILSPLY

SEQ ID NO: 4943 - protein, 9 aa, synthetic construct
  REGION 1..9: note = Description of Artificial Sequence: Synthetic peptide
GERSGARSK

SEQ ID NO: 4944 - protein, 9 aa, synthetic construct
  REGION 1..9: note = Description of Artificial Sequence: Synthetic peptide
GETFVTHSK

SEQ ID NO: 4945 - protein, 9 aa, synthetic construct
  REGION 1..9: note = Description of Artificial Sequence: Synthetic peptide
GETSWQTGD

SEQ ID NO: 4946 - protein, 10 aa, synthetic construct
  REGION 1..10: note = Description of Artificial Sequence: Synthetic peptide
GEVFNATRFA

SEQ ID NO: 4947 - protein, 8 aa, synthetic construct
  REGION 1..8: note = Description of Artificial Sequence: Synthetic peptide
GEYTFEKG

SEQ ID NO: 4948 - protein, 8 aa, synthetic construct
  REGION 1..8: note = Description of Artificial Sequence: Synthetic peptide
GFAAYSRY

SEQ ID NO: 4949 - protein, 9 aa, synthetic construct
  REGION 1..9: note = Description of Artificial Sequence: Synthetic peptide
GFAAYSRYR

SEQ ID NO: 4950 - protein, 9 aa, synthetic construct
  REGION 1..9: note = Description of Artificial Sequence: Synthetic peptide
GFCDLKGKY

SEQ ID NO: 4951 - protein, 8 aa, synthetic construct
  REGION 1..8: note = Description of Artificial Sequence: Synthetic peptide
GFNEKTHV

SEQ ID NO: 4952 - protein, 8 aa, synthetic construct
  REGION 1..8: note = Description of Artificial Sequence: Synthetic peptide
GGAKLKAL

SEQ ID NO: 4953 - protein, 8 aa, synthetic construct
  REGION 1..8: note = Description of Artificial Sequence: Synthetic peptide
GGDAALAL

SEQ ID NO: 4954 - protein, 9 aa, synthetic construct
  REGION 1..9: note = Description of Artificial Sequence: Synthetic peptide
GGHSYGADL

SEQ ID NO: 4955 - protein, 9 aa, synthetic construct
  REGION 1..9: note = Description of Artificial Sequence: Synthetic peptide
GGLHLLIGL

SEQ ID NO: 4956 - protein, 8 aa, synthetic construct
  REGION 1..8: note = Description of Artificial Sequence: Synthetic peptide
GGRFVLAL

SEQ ID NO: 4957 - protein, 8 aa, synthetic construct
  REGION 1..8: note = Description of Artificial Sequence: Synthetic peptide
GHFDGQQG

SEQ ID NO: 4958 - protein, 10 aa, synthetic construct
  REGION 1..10: note = Description of Artificial Sequence: Synthetic peptide
GHFDGQQGEV

SEQ ID NO: 4959 - protein, 10 aa, synthetic construct
  REGION 1..10: note = Description of Artificial Sequence: Synthetic peptide
GHLRIAGHHL

SEQ ID NO: 4960 - protein, 8 aa, synthetic construct
  REGION 1..8: note = Description of Artificial Sequence: Synthetic peptide
GHSYGADL

SEQ ID NO: 4961 - protein, 9 aa, synthetic construct
  REGION 1..9: note = Description of Artificial Sequence: Synthetic peptide
GHVMVELVA

SEQ ID NO: 4962 - protein, 10 aa, synthetic construct
  REGION 1..10: note = Description of Artificial Sequence: Synthetic peptide
GIGVTQNVLY

SEQ ID NO: 4963 - protein, 11 aa, synthetic construct
  REGION 1..11: note = Description of Artificial Sequence: Synthetic peptide
GINASVVNIQK

SEQ ID NO: 4964 - protein, 9 aa, synthetic construct
  REGION 1..9: note = Description of Artificial Sequence: Synthetic peptide
GISQYSLRL

SEQ ID NO: 4965 - protein, 9 aa, synthetic construct
  REGION 1..9: note = Description of Artificial Sequence: Synthetic peptide
GKFCLEASF

SEQ ID NO: 4966 - protein, 9 aa, synthetic construct
  REGION 1..9: note = Description of Artificial Sequence: Synthetic peptide
GKQGNFKNL

SEQ ID NO: 4967 - protein, 9 aa, synthetic construct
  REGION 1..9: note = Description of Artificial Sequence: Synthetic peptide
GKYVQIPTT

SEQ ID NO: 4968 - protein, 9 aa, synthetic construct
  REGION 1..9: note = Description of Artificial Sequence: Synthetic peptide
GLALYYPSA

SEQ ID NO: 4969 - protein, 11 aa, synthetic construct
  REGION 1..11: note = Description of Artificial Sequence: Synthetic peptide
GLDSLDTYPSL

SEQ ID NO: 4970 - protein, 8 aa, synthetic construct
  REGION 1..8: note = Description of Artificial Sequence: Synthetic peptide
GLFCLLNR

SEQ ID NO: 4971 - protein, 9 aa, synthetic construct
  REGION 1..9: note = Description of Artificial Sequence: Synthetic peptide
GLIAIVMVT

SEQ ID NO: 4972 - protein, 8 aa, synthetic construct
  REGION 1..8: note = Description of Artificial Sequence: Synthetic peptide
GLKTILRK

SEQ ID NO: 4973 - protein, 9 aa, synthetic construct
  REGION 1..9: note = Description of Artificial Sequence: Synthetic peptide
GLMWLSYFI

SEQ ID NO: 4974 - protein, 10 aa, synthetic construct
  REGION 1..10: note = Description of Artificial Sequence: Synthetic peptide
GLNGYTVEEA

SEQ ID NO: 4975 - protein, 9 aa, synthetic construct
  REGION 1..9: note = Description of Artificial Sequence: Synthetic peptide
GLNLEEAAR

SEQ ID NO: 4976 - protein, 9 aa, synthetic construct
  REGION 1..9: note = Description of Artificial Sequence: Synthetic peptide
GLQPSVGPK

SEQ ID NO: 4977 - protein, 10 aa, synthetic construct
  REGION 1..10: note = Description of Artificial Sequence: Synthetic peptide
GLVEVEKGVL

SEQ ID NO: 4978 - protein, 8 aa, synthetic construct
  REGION 1..8: note = Description of Artificial Sequence: Synthetic peptide
GLYKNTCV

SEQ ID NO: 4979 - protein, 9 aa, synthetic construct
  REGION 1..9: note = Description of Artificial Sequence: Synthetic peptide
GLYPTLNIS

SEQ ID NO: 4980 - protein, 10 aa, synthetic construct
  REGION 1..10: note = Description of Artificial Sequence: Synthetic peptide
GNKGAGGHSY

SEQ ID NO: 4981 - protein, 10 aa, synthetic construct
  REGION 1..10: note = Description of Artificial Sequence: Synthetic peptide
GNLQSNHDLY

SEQ ID NO: 4982 - protein, 9 aa, synthetic construct
  REGION 1..9: note = Description of Artificial Sequence: Synthetic peptide
GNYNYLYRL

SEQ ID NO: 4983 - protein, 9 aa, synthetic construct
  REGION 1..9: note = Description of Artificial Sequence: Synthetic peptide
GNYQCGHYK

SEQ ID NO: 4984 - protein, 9 aa, synthetic construct
  REGION 1..9: note = Description of Artificial Sequence: Synthetic peptide
GPKKSTNLV

SEQ ID NO: 4985 - protein, 9 aa, synthetic construct
  REGION 1..9: note = Description of Artificial Sequence: Synthetic peptide
GPLVRKIFV

SEQ ID NO: 4986 - protein, 9 aa, synthetic construct
  REGION 1..9: note = Description of Artificial Sequence: Synthetic peptide
GPPGTGKSH

SEQ ID NO: 4987 - protein, 9 aa, synthetic construct
  REGION 1..9: note = Description of Artificial Sequence: Synthetic peptide
GQGLNGYTV

SEQ ID NO: 4988 - protein, 9 aa, synthetic construct
  REGION 1..9: note = Description of Artificial Sequence: Synthetic peptide
GQGVPINTN

SEQ ID NO: 4989 - protein, 8 aa, synthetic construct
  REGION 1..8: note = Description of Artificial Sequence: Synthetic peptide
GQINDMIL

SEQ ID NO: 4990 - protein, 10 aa, synthetic construct
  REGION 1..10: note = Description of Artificial Sequence: Synthetic peptide
GQIVTCAKEI

SEQ ID NO: 4991 - protein, 8 aa, synthetic construct
  REGION 1..8: note = Description of Artificial Sequence: Synthetic peptide
GQPITNCV

SEQ ID NO: 4992 - protein, 8 aa, synthetic construct
  REGION 1..8: note = Description of Artificial Sequence: Synthetic peptide
GQSKRVDF

SEQ ID NO: 4993 - protein, 8 aa, synthetic construct
  REGION 1..8: note = Description of Artificial Sequence: Synthetic peptide
GQSTQLGI

SEQ ID NO: 4994 - protein, 10 aa, synthetic construct
  REGION 1..10: note = Description of Artificial Sequence: Synthetic peptide
GQSTQLGIEF

SEQ ID NO: 4995 - protein, 9 aa, synthetic construct
  REGION 1..9: note = Description of Artificial Sequence: Synthetic peptide
GRIRSVYPV

SEQ ID NO: 4996 - protein, 9 aa, synthetic construct
  REGION 1..9: note = Description of Artificial Sequence: Synthetic peptide
GRRGPEQTQ

SEQ ID NO: 4997 - protein, 10 aa, synthetic construct
  REGION 1..10: note = Description of Artificial Sequence: Synthetic peptide
GRSGETLGVL

SEQ ID NO: 4998 - protein, 9 aa, synthetic construct
  REGION 1..9: note = Description of Artificial Sequence: Synthetic peptide
GSALLEDEF

SEQ ID NO: 4999 - protein, 9 aa, synthetic construct
  REGION 1..9: note = Description of Artificial Sequence: Synthetic peptide
GSDNVTDFN

SEQ ID NO: 5000 - protein, 10 aa, synthetic construct
  REGION 1..10: note = Description of Artificial Sequence: Synthetic peptide
GSGVPVVDSY

SEQ ID NO: 5001 - protein, 9 aa, synthetic construct
  REGION 1..9: note = Description of Artificial Sequence: Synthetic peptide
GSSGVVNPV

SEQ ID NO: 5002 - protein, 11 aa, synthetic construct
  REGION 1..11: note = Description of Artificial Sequence: Synthetic peptide
GSTPCNGVEGF

SEQ ID NO: 5003 - protein, 8 aa, synthetic construct
  REGION 1..8: note = Description of Artificial Sequence: Synthetic peptide
GSVAYESL

SEQ ID NO: 5004 - protein, 9 aa, synthetic construct
  REGION 1..9: note = Description of Artificial Sequence: Synthetic peptide
GSVAYESLR

SEQ ID NO: 5005 - protein, 9 aa, synthetic construct
  REGION 1..9: note = Description of Artificial Sequence: Synthetic peptide
GTAVLRQWL

SEQ ID NO: 5006 - protein, 9 aa, synthetic construct
  REGION 1..9: note = Description of Artificial Sequence: Synthetic peptide
GTDPYEDFQ

SEQ ID NO: 5007 - protein, 12 aa, synthetic construct
  REGION 1..12: note = Description of Artificial Sequence: Synthetic peptide
GTDPYEDFQENW

SEQ ID NO: 5008 - protein, 9 aa, synthetic construct
  REGION 1..9: note = Description of Artificial Sequence: Synthetic peptide
GTDTTITVN

SEQ ID NO: 5009 - protein, 9 aa, synthetic construct
  REGION 1..9: note = Description of Artificial Sequence: Synthetic peptide
GTEDDYQGK

SEQ ID NO: 5010 - protein, 10 aa, synthetic construct
  REGION 1..10: note = Description of Artificial Sequence: Synthetic peptide
GTGTSTDVVY

SEQ ID NO: 5011 - protein, 8 aa, synthetic construct
  REGION 1..8: note = Description of Artificial Sequence: Synthetic peptide
GTILTRPL

SEQ ID NO: 5012 - protein, 10 aa, synthetic construct
  REGION 1..10: note = Description of Artificial Sequence: Synthetic peptide
GTLIVNSVLL

SEQ ID NO: 5013 - protein, 10 aa, synthetic construct
  REGION 1..10: note = Description of Artificial Sequence: Synthetic peptide
GTLSYEQFKK

SEQ ID NO: 5014 - protein, 10 aa, synthetic construct
  REGION 1..10: note = Description of Artificial Sequence: Synthetic peptide
GTNLPLQLGF

SEQ ID NO: 5015 - protein, 9 aa, synthetic construct
  REGION 1..9: note = Description of Artificial Sequence: Synthetic peptide
GTPVCINGL

SEQ ID NO: 5016 - protein, 11 aa, synthetic construct
  REGION 1..11: note = Description of Artificial Sequence: Synthetic peptide
GTSSGDATTAY

SEQ ID NO: 5017 - protein, 9 aa, synthetic construct
  REGION 1..9: note = Description of Artificial Sequence: Synthetic peptide
GTTSPISEH

SEQ ID NO: 5018 - protein, 9 aa, synthetic construct
  REGION 1..9: note = Description of Artificial Sequence: Synthetic peptide
GTTTLNGLW

SEQ ID NO: 5019 - protein, 8 aa, synthetic construct
  REGION 1..8: note = Description of Artificial Sequence: Synthetic peptide
GTVSWNLR

SEQ ID NO: 5020 - protein, 9 aa, synthetic construct
  REGION 1..9: note = Description of Artificial Sequence: Synthetic peptide
GVAGALNKA

SEQ ID NO: 5021 - protein, 8 aa, synthetic construct
  REGION 1..8: note = Description of Artificial Sequence: Synthetic peptide
GVALLAVF

SEQ ID NO: 5022 - protein, 9 aa, synthetic construct
  REGION 1..9: note = Description of Artificial Sequence: Synthetic peptide
GVDAVNLLT

SEQ ID NO: 5023 - protein, 8 aa, synthetic construct
  REGION 1..8: note = Description of Artificial Sequence: Synthetic peptide
GVEGFNCY

SEQ ID NO: 5024 - protein, 10 aa, synthetic construct
  REGION 1..10: note = Description of Artificial Sequence: Synthetic peptide
GVFVSNGTHW

SEQ ID NO: 5025 - protein, 11 aa, synthetic construct
  REGION 1..11: note = Description of Artificial Sequence: Synthetic peptide
GVFVSNGTHWF

SEQ ID NO: 5026 - protein, 9 aa, synthetic construct
  REGION 1..9: note = Description of Artificial Sequence: Synthetic peptide
GVGGKPCIK

SEQ ID NO: 5027 - protein, 9 aa, synthetic construct
  REGION 1..9: note = Description of Artificial Sequence: Synthetic peptide
GVKDCVVLH

SEQ ID NO: 5028 - protein, 10 aa, synthetic construct
  REGION 1..10: note = Description of Artificial Sequence: Synthetic peptide
GVLITEGSVK

SEQ ID NO: 5029 - protein, 10 aa, synthetic construct
  REGION 1..10: note = Description of Artificial Sequence: Synthetic peptide
GVLPQLEQPY

SEQ ID NO: 5030 - protein, 11 aa, synthetic construct
  REGION 1..11: note = Description of Artificial Sequence: Synthetic peptide
GVLTAVVIPTK

SEQ ID NO: 5031 - protein, 12 aa, synthetic construct
  REGION 1..12: note = Description of Artificial Sequence: Synthetic peptide
GVLTAVVIPTKK

SEQ ID NO: 5032 - protein, 10 aa, synthetic construct
  REGION 1..10: note = Description of Artificial Sequence: Synthetic peptide
GVTFQSAVKR

SEQ ID NO: 5033 - protein, 9 aa, synthetic construct
  REGION 1..9: note = Description of Artificial Sequence: Synthetic peptide
GVTLIGEAV

SEQ ID NO: 5034 - protein, 8 aa, synthetic construct
  REGION 1..8: note = Description of Artificial Sequence: Synthetic peptide
GVTQNVLY

SEQ ID NO: 5035 - protein, 11 aa, synthetic construct
  REGION 1..11: note = Description of Artificial Sequence: Synthetic peptide
GVVTTVMFLAR

SEQ ID NO: 5036 - protein, 8 aa, synthetic construct
  REGION 1..8: note = Description of Artificial Sequence: Synthetic peptide
GVYYPDKV

SEQ ID NO: 5037 - protein, 10 aa, synthetic construct
  REGION 1..10: note = Description of Artificial Sequence: Synthetic peptide
GWTAGAAAYY

SEQ ID NO: 5038 - protein, 9 aa, synthetic construct
  REGION 1..9: note = Description of Artificial Sequence: Synthetic peptide
GYINVFAFP

SEQ ID NO: 5039 - protein, 8 aa, synthetic construct
  REGION 1..8: note = Description of Artificial Sequence: Synthetic peptide
GYKKPASR

SEQ ID NO: 5040 - protein, 10 aa, synthetic construct
  REGION 1..10: note = Description of Artificial Sequence: Synthetic peptide
GYLKLTDNVY

SEQ ID NO: 5041 - protein, 10 aa, synthetic construct
  REGION 1..10: note = Description of Artificial Sequence: Synthetic peptide
GYLNSTNVTI

SEQ ID NO: 5042 - protein, 10 aa, synthetic construct
  REGION 1..10: note = Description of Artificial Sequence: Synthetic peptide
GYLPQNAVVK

SEQ ID NO: 5043 - protein, 11 aa, synthetic construct
  REGION 1..11: note = Description of Artificial Sequence: Synthetic peptide
GYLPQNAVVKI

SEQ ID NO: 5044 - protein, 10 aa, synthetic construct
  REGION 1..10: note = Description of Artificial Sequence: Synthetic peptide
GYLQPRTFLL

SEQ ID NO: 5045 - protein, 11 aa, synthetic construct
  REGION 1..11: note = Description of Artificial Sequence: Synthetic peptide
GYVDTPNNTDF

SEQ ID NO: 5046 - protein, 8 aa, synthetic construct
  REGION 1..8: note = Description of Artificial Sequence: Synthetic peptide
GYVMHANY

SEQ ID NO: 5047 - protein, 10 aa, synthetic construct
  REGION 1..10: note = Description of Artificial Sequence: Synthetic peptide
GYVMHANYIF

SEQ ID NO: 5048 - protein, 8 aa, synthetic construct
  REGION 1..8: note = Description of Artificial Sequence: Synthetic peptide
GYYRRATR

SEQ ID NO: 5049 - protein, 9 aa, synthetic construct
  REGION 1..9: note = Description of Artificial Sequence: Synthetic peptide
GYYRRATRR

SEQ ID NO: 5050 - protein, 9 aa, synthetic construct
  REGION 1..9: note = Description of Artificial Sequence: Synthetic peptide
HAIHVSGTN

SEQ ID NO: 5051 - protein, 8 aa, synthetic construct
  REGION 1..8: note = Description of Artificial Sequence: Synthetic peptide
HANYIFWR

SEQ ID NO: 5052 - protein, 9 aa, synthetic construct
  REGION 1..9: note = Description of Artificial Sequence: Synthetic peptide
HANYIFWRN

SEQ ID NO: 5053 - protein, 9 aa, synthetic construct
  REGION 1..9: note = Description of Artificial Sequence: Synthetic peptide
HDELTGHML

SEQ ID NO: 5054 - protein, 8 aa, synthetic construct
  REGION 1..8: note = Description of Artificial Sequence: Synthetic peptide
HDVRVVLD

SEQ ID NO: 5055 - protein, 10 aa, synthetic construct
  REGION 1..10: note = Description of Artificial Sequence: Synthetic peptide
HECFVKRVDW

SEQ ID NO: 5056 - protein, 10 aa, synthetic construct
  REGION 1..10: note = Description of Artificial Sequence: Synthetic peptide
HEGKTFYVLP

SEQ ID NO: 5057 - protein, 9 aa, synthetic construct
  REGION 1..9: note = Description of Artificial Sequence: Synthetic peptide
HFAWWTAFV

SEQ ID NO: 5058 - protein, 12 aa, synthetic construct
  REGION 1..12: note = Description of Artificial Sequence: Synthetic peptide
HFIETISLAGSY

SEQ ID NO: 5059 - protein, 10 aa, synthetic construct
  REGION 1..10: note = Description of Artificial Sequence: Synthetic peptide
HFLPRVFSAV

SEQ ID NO: 5060 - protein, 8 aa, synthetic construct
  REGION 1..8: note = Description of Artificial Sequence: Synthetic peptide
HFRELGVV

SEQ ID NO: 5061 - protein, 10 aa, synthetic construct
  REGION 1..10: note = Description of Artificial Sequence: Synthetic peptide
HFYWFFSNYL

SEQ ID NO: 5062 - protein, 9 aa, synthetic construct
  REGION 1..9: note = Description of Artificial Sequence: Synthetic peptide
HGLAAVNSV

SEQ ID NO: 5063 - protein, 8 aa, synthetic construct
  REGION 1..8: note = Description of Artificial Sequence: Synthetic peptide
HGLNLEEA

SEQ ID NO: 5064 - protein, 10 aa, synthetic construct
  REGION 1..10: note = Description of Artificial Sequence: Synthetic peptide
HGVVFLHVTY

SEQ ID NO: 5065 - protein, 9 aa, synthetic construct
  REGION 1..9: note = Description of Artificial Sequence: Synthetic peptide
HKHAFLCLF

SEQ ID NO: 5066 - protein, 8 aa, synthetic construct
  REGION 1..8: note = Description of Artificial Sequence: Synthetic peptide
HLDGEVIT

SEQ ID NO: 5067 - protein, 8 aa, synthetic construct
  REGION 1..8: note = Description of Artificial Sequence: Synthetic peptide
HLLIGLAK

SEQ ID NO: 5068 - protein, 8 aa, synthetic construct
  REGION 1..8: note = Description of Artificial Sequence: Synthetic peptide
HMVVKAAL

SEQ ID NO: 5069 - protein, 9 aa, synthetic construct
  REGION 1..9: note = Description of Artificial Sequence: Synthetic peptide
HMVVKAALL

SEQ ID NO: 5070 - protein, 9 aa, synthetic construct
  REGION 1..9: note = Description of Artificial Sequence: Synthetic peptide
HNESGLKTI

SEQ ID NO: 5071 - protein, 8 aa, synthetic construct
  REGION 1..8: note = Description of Artificial Sequence: Synthetic peptide
HNMLKTVY

SEQ ID NO: 5072 - protein, 9 aa, synthetic construct
  REGION 1..9: note = Description of Artificial Sequence: Synthetic peptide
HPDSATLVS

SEQ ID NO: 5073 - protein, 10 aa, synthetic construct
  REGION 1..10: note = Description of Artificial Sequence: Synthetic peptide
HPDSATLVSD

SEQ ID NO: 5074 - protein, 9 aa, synthetic construct
  REGION 1..9: note = Description of Artificial Sequence: Synthetic peptide
HPLADNKFA

SEQ ID NO: 5075 - protein, 9 aa, synthetic construct
  REGION 1..9: note = Description of Artificial Sequence: Synthetic peptide
HPNCVNCLD

SEQ ID NO: 5076 - protein, 11 aa, synthetic construct
  REGION 1..11: note = Description of Artificial Sequence: Synthetic peptide
HPTQAPTHLSV

SEQ ID NO: 5077 - protein, 8 aa, synthetic construct
  REGION 1..8: note = Description of Artificial Sequence: Synthetic peptide
HSCNVNRF

SEQ ID NO: 5078 - protein, 11 aa, synthetic construct
  REGION 1..11: note = Description of Artificial Sequence: Synthetic peptide
HSDKFTDGVCL

SEQ ID NO: 5079 - protein, 10 aa, synthetic construct
  REGION 1..10: note = Description of Artificial Sequence: Synthetic peptide
HSMQNCVLKL

SEQ ID NO: 5080 - protein, 10 aa, synthetic construct
  REGION 1..10: note = Description of Artificial Sequence: Synthetic peptide
HSQLGGLHLL

SEQ ID NO: 5081 - protein, 10 aa, synthetic construct
  REGION 1..10: note = Description of Artificial Sequence: Synthetic peptide
HSSRLSFKEL

SEQ ID NO: 5082 - protein, 8 aa, synthetic construct
  REGION 1..8: note = Description of Artificial Sequence: Synthetic peptide
HSTQDLFL

SEQ ID NO: 5083 - protein, 9 aa, synthetic construct
  REGION 1..9: note = Description of Artificial Sequence: Synthetic peptide
HSWNADLYK

SEQ ID NO: 5084 - protein, 12 aa, synthetic construct
  REGION 1..12: note = Description of Artificial Sequence: Synthetic peptide
HSYFTSDYYQLY

SEQ ID NO: 5085 - protein, 9 aa, synthetic construct
  REGION 1..9: note = Description of Artificial Sequence: Synthetic peptide
HTANKWDLI

SEQ ID NO: 5086 - protein, 11 aa, synthetic construct
  REGION 1..11: note = Description of Artificial Sequence: Synthetic peptide
HTDFSSEIIGY

SEQ ID NO: 5087 - protein, 9 aa, synthetic construct
  REGION 1..9: note = Description of Artificial Sequence: Synthetic peptide
HTFSNYQHE

SEQ ID NO: 5088 - protein, 9 aa, synthetic construct
  REGION 1..9: note = Description of Artificial Sequence: Synthetic peptide
HTQVVDMSM

SEQ ID NO: 5089 - protein, 9 aa, synthetic construct
  REGION 1..9: note = Description of Artificial Sequence: Synthetic peptide
HVASCDAIM

SEQ ID NO: 5090 - protein, 10 aa, synthetic construct
  REGION 1..10: note = Description of Artificial Sequence: Synthetic peptide
HVDILGPLSA

SEQ ID NO: 5091 - protein, 8 aa, synthetic construct
  REGION 1..8: note = Description of Artificial Sequence: Synthetic peptide
HVGEIPVA

SEQ ID NO: 5092 - protein, 10 aa, synthetic construct
  REGION 1..10: note = Description of Artificial Sequence: Synthetic peptide
HVMVELVAEL

SEQ ID NO: 5093 - protein, 9 aa, synthetic construct
  REGION 1..9: note = Description of Artificial Sequence: Synthetic peptide
HVVDGCNSS

SEQ ID NO: 5094 - protein, 10 aa, synthetic construct
  REGION 1..10: note = Description of Artificial Sequence: Synthetic peptide
HVVDGCNSST

SEQ ID NO: 5095 - protein, 9 aa, synthetic construct
  REGION 1..9: note = Description of Artificial Sequence: Synthetic peptide
HYTPSFKKG

SEQ ID NO: 5096 - protein, 11 aa, synthetic construct
  REGION 1..11: note = Description of Artificial Sequence: Synthetic peptide
HYVYIGDPAQL

SEQ ID NO: 5097 - protein, 9 aa, synthetic construct
  REGION 1..9: note = Description of Artificial Sequence: Synthetic peptide
IADTTDAVR

SEQ ID NO: 5098 - protein, 10 aa, synthetic construct
  REGION 1..10: note = Description of Artificial Sequence: Synthetic peptide
IADTTDAVRD

SEQ ID NO: 5099 - protein, 8 aa, synthetic construct
  REGION 1..8: note = Description of Artificial Sequence: Synthetic peptide
IAEILLII

SEQ ID NO: 5100 - protein, 8 aa, synthetic construct
  REGION 1..8: note = Description of Artificial Sequence: Synthetic peptide
IAGLIAIV

SEQ ID NO: 5101 - protein, 9 aa, synthetic construct
  REGION 1..9: note = Description of Artificial Sequence: Synthetic peptide
IALKGGKIV

SEQ ID NO: 5102 - protein, 10 aa, synthetic construct
  REGION 1..10: note = Description of Artificial Sequence: Synthetic peptide
ICISTKHFYW

SEQ ID NO: 5103 - protein, 9 aa, synthetic construct
  REGION 1..9: note = Description of Artificial Sequence: Synthetic peptide
ICYTPSKLI

SEQ ID NO: 5104 - protein, 8 aa, synthetic construct
  REGION 1..8: note = Description of Artificial Sequence: Synthetic peptide
IDFLELAM

SEQ ID NO: 5105 - protein, 9 aa, synthetic construct
  REGION 1..9: note = Description of Artificial Sequence: Synthetic peptide
IDLQELGKY

SEQ ID NO: 5106 - protein, 9 aa, synthetic construct
  REGION 1..9: note = Description of Artificial Sequence: Synthetic peptide
IDSYFVVKR

SEQ ID NO: 5107 - protein, 8 aa, synthetic construct
  REGION 1..8: note = Description of Artificial Sequence: Synthetic peptide
IDYTEISF

SEQ ID NO: 5108 - protein, 11 aa, synthetic construct
  REGION 1..11: note = Description of Artificial Sequence: Synthetic peptide
IEDLLFNKVTL

SEQ ID NO: 5109 - protein, 8 aa, synthetic construct
  REGION 1..8: note = Description of Artificial Sequence: Synthetic peptide
IELSLIDF

SEQ ID NO: 5110 - protein, 9 aa, synthetic construct
  REGION 1..9: note = Description of Artificial Sequence: Synthetic peptide
IERYKLEGY

SEQ ID NO: 5111 - protein, 10 aa, synthetic construct
  REGION 1..10: note = Description of Artificial Sequence: Synthetic peptide
IETISLAGSY

SEQ ID NO: 5112 - protein, 9 aa, synthetic construct
  REGION 1..9: note = Description of Artificial Sequence: Synthetic peptide
IEYTDFATS

SEQ ID NO: 5113 - protein, 11 aa, synthetic construct
  REGION 1..11: note = Description of Artificial Sequence: Synthetic peptide
IFLWLLWPVTL

SEQ ID NO: 5114 - protein, 11 aa, synthetic construct
  REGION 1..11: note = Description of Artificial Sequence: Synthetic peptide
IFYLITPVHVM

SEQ ID NO: 5115 - protein, 9 aa, synthetic construct
  REGION 1..9: note = Description of Artificial Sequence: Synthetic peptide
IGFLFLTWI

SEQ ID NO: 5116 - protein, 8 aa, synthetic construct
  REGION 1..8: note = Description of Artificial Sequence: Synthetic peptide
IGIVNNTV

SEQ ID NO: 5117 - protein, 9 aa, synthetic construct
  REGION 1..9: note = Description of Artificial Sequence: Synthetic peptide
IGNYTVSCL

SEQ ID NO: 5118 - protein, 8 aa, synthetic construct
  REGION 1..8: note = Description of Artificial Sequence: Synthetic peptide
IHADQLTP

SEQ ID NO: 5119 - protein, 9 aa, synthetic construct
  REGION 1..9: note = Description of Artificial Sequence: Synthetic peptide
IIIWFLLLS

SEQ ID NO: 5120 - protein, 8 aa, synthetic construct
  REGION 1..8: note = Description of Artificial Sequence: Synthetic peptide
IILFLALI

SEQ ID NO: 5121 - protein, 10 aa, synthetic construct
  REGION 1..10: note = Description of Artificial Sequence: Synthetic peptide
IILFLALITL

SEQ ID NO: 5122 - protein, 9 aa, synthetic construct
  REGION 1..9: note = Description of Artificial Sequence: Synthetic peptide
IIMRLWLCW

SEQ ID NO: 5123 - protein, 9 aa, synthetic construct
  REGION 1..9: note = Description of Artificial Sequence: Synthetic peptide
IIPLTTAAK

SEQ ID NO: 5124 - protein, 10 aa, synthetic construct
  REGION 1..10: note = Description of Artificial Sequence: Synthetic peptide
IIPLTTAAKL

SEQ ID NO: 5125 - protein, 8 aa, synthetic construct
  REGION 1..8: note = Description of Artificial Sequence: Synthetic peptide
IIQFPNTY

SEQ ID NO: 5126 - protein, 8 aa, synthetic construct
  REGION 1..8: note = Description of Artificial Sequence: Synthetic peptide
IISVTSNY

SEQ ID NO: 5127 - protein, 10 aa, synthetic construct
  REGION 1..10: note = Description of Artificial Sequence: Synthetic peptide
IKFADDLNQL

SEQ ID NO: 5128 - protein, 9 aa, synthetic construct
  REGION 1..9: note = Description of Artificial Sequence: Synthetic peptide
IKGTHHWLL

SEQ ID NO: 5129 - protein, 10 aa, synthetic construct
  REGION 1..10: note = Description of Artificial Sequence: Synthetic peptide
IKNFKSVLYY

SEQ ID NO: 5130 - protein, 11 aa, synthetic construct
  REGION 1..11: note = Description of Artificial Sequence: Synthetic peptide
IKWPWYIWLGF

SEQ ID NO: 5131 - protein, 10 aa, synthetic construct
  REGION 1..10: note = Description of Artificial Sequence: Synthetic peptide
ILANTCTERL

SEQ ID NO: 5132 - protein, 9 aa, synthetic construct
  REGION 1..9: note = Description of Artificial Sequence: Synthetic peptide
ILDGISQYS

SEQ ID NO: 5133 - protein, 8 aa, synthetic construct
  REGION 1..8: note = Description of Artificial Sequence: Synthetic peptide
ILFTRFFY

SEQ ID NO: 5134 - protein, 10 aa, synthetic construct
  REGION 1..10: note = Description of Artificial Sequence: Synthetic peptide
ILLNVPLHGT

SEQ ID NO: 5135 - protein, 9 aa, synthetic construct
  REGION 1..9: note = Description of Artificial Sequence: Synthetic peptide
ILNNLGVDI

SEQ ID NO: 5136 - protein, 10 aa, synthetic construct
  REGION 1..10: note = Description of Artificial Sequence: Synthetic peptide
ILPDPSKPSK

SEQ ID NO: 5137 - protein, 9 aa, synthetic construct
  REGION 1..9: note = Description of Artificial Sequence: Synthetic peptide
ILPSIISNE

SEQ ID NO: 5138 - protein, 10 aa, synthetic construct
  REGION 1..10: note = Description of Artificial Sequence: Synthetic peptide
ILPSIISNEK

SEQ ID NO: 5139 - protein, 9 aa, synthetic construct
  REGION 1..9: note = Description of Artificial Sequence: Synthetic peptide
ILPVSMTKT

SEQ ID NO: 5140 - protein, 9 aa, synthetic construct
  REGION 1..9: note = Description of Artificial Sequence: Synthetic peptide
ILRGHLRIA

SEQ ID NO: 5141 - protein, 10 aa, synthetic construct
  REGION 1..10: note = Description of Artificial Sequence: Synthetic peptide
IMLVYCFLGY

SEQ ID NO: 5142 - protein, 8 aa, synthetic construct
  REGION 1..8: note = Description of Artificial Sequence: Synthetic peptide
IMQLFFSY

SEQ ID NO: 5143 - protein, 9 aa, synthetic construct
  REGION 1..9: note = Description of Artificial Sequence: Synthetic peptide
IMQLFFSYF

SEQ ID NO: 5144 - protein, 10 aa, synthetic construct
  REGION 1..10: note = Description of Artificial Sequence: Synthetic peptide
INASVVNIQK

SEQ ID NO: 5145 - protein, 8 aa, synthetic construct
  REGION 1..8: note = Description of Artificial Sequence: Synthetic peptide
INLIIKNL

SEQ ID NO: 5146 - protein, 9 aa, synthetic construct
  REGION 1..9: note = Description of Artificial Sequence: Synthetic peptide
INRPQIGVV

SEQ ID NO: 5147 - protein, 10 aa, synthetic construct
  REGION 1..10: note = Description of Artificial Sequence: Synthetic peptide
IPARARVECF

SEQ ID NO: 5148 - protein, 9 aa, synthetic construct
  REGION 1..9: note = Description of Artificial Sequence: Synthetic peptide
IPDYNTYKN

SEQ ID NO: 5149 - protein, 8 aa, synthetic construct
  REGION 1..8: note = Description of Artificial Sequence: Synthetic peptide
IPFAMQMA

SEQ ID NO: 5150 - protein, 11 aa, synthetic construct
  REGION 1..11: note = Description of Artificial Sequence: Synthetic peptide
IPFAMQMAYRF

SEQ ID NO: 5151 - protein, 10 aa, synthetic construct
  REGION 1..10: note = Description of Artificial Sequence: Synthetic peptide
IPMDSTVKNY

SEQ ID NO: 5152 - protein, 8 aa, synthetic construct
  REGION 1..8: note = Description of Artificial Sequence: Synthetic peptide
IPVAYRKV

SEQ ID NO: 5153 - protein, 10 aa, synthetic construct
  REGION 1..10: note = Description of Artificial Sequence: Synthetic peptide
IPYNSVTSSI

SEQ ID NO: 5154 - protein, 8 aa, synthetic construct
  REGION 1..8: note = Description of Artificial Sequence: Synthetic peptide
IQEGVVDY

SEQ ID NO: 5155 - protein, 8 aa, synthetic construct
  REGION 1..8: note = Description of Artificial Sequence: Synthetic peptide
IQKDVLEC

SEQ ID NO: 5156 - protein, 8 aa, synthetic construct
  REGION 1..8: note = Description of Artificial Sequence: Synthetic peptide
IQLLKSAY

SEQ ID NO: 5157 - protein, 10 aa, synthetic construct
  REGION 1..10: note = Description of Artificial Sequence: Synthetic peptide
IQPGQTFSVL

SEQ ID NO: 5158 - protein, 9 aa, synthetic construct
  REGION 1..9: note = Description of Artificial Sequence: Synthetic peptide
IQPIGALDI

SEQ ID NO: 5159 - protein, 9 aa, synthetic construct
  REGION 1..9: note = Description of Artificial Sequence: Synthetic peptide
IRASANLAA

SEQ ID NO: 5160 - protein, 9 aa, synthetic construct
  REGION 1..9: note = Description of Artificial Sequence: Synthetic peptide
IRENNRVVI

SEQ ID NO: 5161 - protein, 10 aa, synthetic construct
  REGION 1..10: note = Description of Artificial Sequence: Synthetic peptide
IRQEEVQELY

SEQ ID NO: 5162 - protein, 8 aa, synthetic construct
  REGION 1..8: note = Description of Artificial Sequence: Synthetic peptide
IRQLLFVV

SEQ ID NO: 5163 - protein, 10 aa, synthetic construct
  REGION 1..10: note = Description of Artificial Sequence: Synthetic peptide
IRQLLFVVEV

SEQ ID NO: 5164 - protein, 9 aa, synthetic construct
  REGION 1..9: note = Description of Artificial Sequence: Synthetic peptide
ISAMVRMYI

SEQ ID NO: 5165 - protein, 10 aa, synthetic construct
  REGION 1..10: note = Description of Artificial Sequence: Synthetic peptide
ISDEFSSNVA

SEQ ID NO: 5166 - protein, 12 aa, synthetic construct
  REGION 1..12: note = Description of Artificial Sequence: Synthetic peptide
ISDEFSSNVANY

SEQ ID NO: 5167 - protein, 11 aa, synthetic construct
  REGION 1..11: note = Description of Artificial Sequence: Synthetic peptide
ISEHDYQIGGY

SEQ ID NO: 5168 - protein, 9 aa, synthetic construct
  REGION 1..9: note = Description of Artificial Sequence: Synthetic peptide
ISGINASVV

SEQ ID NO: 5169 - protein, 9 aa, synthetic construct
  REGION 1..9: note = Description of Artificial Sequence: Synthetic peptide
ISLAGSYKD

SEQ ID NO: 5170 - protein, 11 aa, synthetic construct
  REGION 1..11: note = Description of Artificial Sequence: Synthetic peptide
ISMDNSPNLAW

SEQ ID NO: 5171 - protein, 10 aa, synthetic construct
  REGION 1..10: note = Description of Artificial Sequence: Synthetic peptide
ISMMGFKMNY

SEQ ID NO: 5172 - protein, 8 aa, synthetic construct
  REGION 1..8: note = Description of Artificial Sequence: Synthetic peptide
ISNCVADY

SEQ ID NO: 5173 - protein, 8 aa, synthetic construct
  REGION 1..8: note = Description of Artificial Sequence: Synthetic peptide
ISNSWLMW

SEQ ID NO: 5174 - protein, 8 aa, synthetic construct
  REGION 1..8: note = Description of Artificial Sequence: Synthetic peptide
ISQYSLRL

SEQ ID NO: 5175 - protein, 9 aa, synthetic construct
  REGION 1..9: note = Description of Artificial Sequence: Synthetic peptide
ISSVLNDIL

SEQ ID NO: 5176 - protein, 8 aa, synthetic construct
  REGION 1..8: note = Description of Artificial Sequence: Synthetic peptide
ISTKHFYW

SEQ ID NO: 5177 - protein, 9 aa, synthetic construct
  REGION 1..9: note = Description of Artificial Sequence: Synthetic peptide
ITDAQTGSS

SEQ ID NO: 5178 - protein, 10 aa, synthetic construct
  REGION 1..10: note = Description of Artificial Sequence: Synthetic peptide
ITDAQTGSSK

SEQ ID NO: 5179 - protein, 11 aa, synthetic construct
  REGION 1..11: note = Description of Artificial Sequence: Synthetic peptide
ITDAQTGSSKC

SEQ ID NO: 5180 - protein, 9 aa, synthetic construct
  REGION 1..9: note = Description of Artificial Sequence: Synthetic peptide
ITDVFYKEN

SEQ ID NO: 5181 - protein, 11 aa, synthetic construct
  REGION 1..11: note = Description of Artificial Sequence: Synthetic peptide
ITDVFYKENSY

SEQ ID NO: 5182 - protein, 11 aa, synthetic construct
  REGION 1..11: note = Description of Artificial Sequence: Synthetic peptide
ITEHSWNADLY

SEQ ID NO: 5183 - protein, 10 aa, synthetic construct
  REGION 1..10: note = Description of Artificial Sequence: Synthetic peptide
ITFDNLKTLL

SEQ ID NO: 5184 - protein, 9 aa, synthetic construct
  REGION 1..9: note = Description of Artificial Sequence: Synthetic peptide
ITGGIAIAM

SEQ ID NO: 5185 - protein, 8 aa, synthetic construct
  REGION 1..8: note = Description of Artificial Sequence: Synthetic peptide
ITGRLQSL

SEQ ID NO: 5186 - protein, 9 aa, synthetic construct
  REGION 1..9: note = Description of Artificial Sequence: Synthetic peptide
ITILDGISQ

SEQ ID NO: 5187 - protein, 8 aa, synthetic construct
  REGION 1..8: note = Description of Artificial Sequence: Synthetic peptide
ITLCFTLK

SEQ ID NO: 5188 - protein, 10 aa, synthetic construct
  REGION 1..10: note = Description of Artificial Sequence: Synthetic peptide
ITLCFTLKRK

SEQ ID NO: 5189 - protein, 8 aa, synthetic construct
  REGION 1..8: note = Description of Artificial Sequence: Synthetic peptide
ITQMNLKY

SEQ ID NO: 5190 - protein, 9 aa, synthetic construct
  REGION 1..9: note = Description of Artificial Sequence: Synthetic peptide
ITREEAIRH

SEQ ID NO: 5191 - protein, 10 aa, synthetic construct
  REGION 1..10: note = Description of Artificial Sequence: Synthetic peptide
ITREEAIRHV

SEQ ID NO: 5192 - protein, 8 aa, synthetic construct
  REGION 1..8: note = Description of Artificial Sequence: Synthetic peptide
ITVNVLAW

SEQ ID NO: 5193 - protein, 8 aa, synthetic construct
  REGION 1..8: note = Description of Artificial Sequence: Synthetic peptide
IVAGGIVA

SEQ ID NO: 5194 - protein, 10 aa, synthetic construct
  REGION 1..10: note = Description of Artificial Sequence: Synthetic peptide
IVAGGIVAIV

SEQ ID NO: 5195 - protein, 11 aa, synthetic construct
  REGION 1..11: note = Description of Artificial Sequence: Synthetic peptide
IVAIVVTCLAY

SEQ ID NO: 5196 - protein, 10 aa, synthetic construct
  REGION 1..10: note = Description of Artificial Sequence: Synthetic peptide
IVDEPEEHVQ

SEQ ID NO: 5197 - protein, 8 aa, synthetic construct
  REGION 1..8: note = Description of Artificial Sequence: Synthetic peptide
IVDSVTVK

SEQ ID NO: 5198 - protein, 8 aa, synthetic construct
  REGION 1..8: note = Description of Artificial Sequence: Synthetic peptide
IVEVQPQL

SEQ ID NO: 5199 - protein, 11 aa, synthetic construct
  REGION 1..11: note = Description of Artificial Sequence: Synthetic peptide
IVFITLCFTLK

SEQ ID NO: 5200 - protein, 8 aa, synthetic construct
  REGION 1..8: note = Description of Artificial Sequence: Synthetic peptide
IVFMCVEY

SEQ ID NO: 5201 - protein, 11 aa, synthetic construct
  REGION 1..11: note = Description of Artificial Sequence: Synthetic peptide
IVNNATNVVIK

SEQ ID NO: 5202 - protein, 10 aa, synthetic construct
  REGION 1..10: note = Description of Artificial Sequence: Synthetic peptide
IVVTCLAYYF

SEQ ID NO: 5203 - protein, 10 aa, synthetic construct
  REGION 1..10: note = Description of Artificial Sequence: Synthetic peptide
IWNVKDFMSL

SEQ ID NO: 5204 - protein, 9 aa, synthetic construct
  REGION 1..9: note = Description of Artificial Sequence: Synthetic peptide
IWVATEGAL

SEQ ID NO: 5205 - protein, 10 aa, synthetic construct
  REGION 1..10: note = Description of Artificial Sequence: Synthetic peptide
IYDEPTTTTS

SEQ ID NO: 5206 - protein, 11 aa, synthetic construct
  REGION 1..11: note = Description of Artificial Sequence: Synthetic peptide
IYDEPTTTTSV

SEQ ID NO: 5207 - protein, 9 aa, synthetic construct
  REGION 1..9: note = Description of Artificial Sequence: Synthetic peptide
IYKTPPIKD

SEQ ID NO: 5208 - protein, 10 aa, synthetic construct
  REGION 1..10: note = Description of Artificial Sequence: Synthetic peptide
IYKTPPIKDF

SEQ ID NO: 5209 - protein, 10 aa, synthetic construct
  REGION 1..10: note = Description of Artificial Sequence: Synthetic peptide
IYLYLTFYLT

SEQ ID NO: 5210 - protein, 8 aa, synthetic construct
  REGION 1..8: note = Description of Artificial Sequence: Synthetic peptide
IYNDKVAG

SEQ ID NO: 5211 - protein, 12 aa, synthetic construct
  REGION 1..12: note = Description of Artificial Sequence: Synthetic peptide
IYNDKVAGFAKF

SEQ ID NO: 5212 - protein, 8 aa, synthetic construct
  REGION 1..8: note = Description of Artificial Sequence: Synthetic peptide
IYQAGSTP

SEQ ID NO: 5213 - protein, 9 aa, synthetic construct
  REGION 1..9: note = Description of Artificial Sequence: Synthetic peptide
IYQAGSTPC

SEQ ID NO: 5214 - protein, 8 aa, synthetic construct
  REGION 1..8: note = Description of Artificial Sequence: Synthetic peptide
IYQTSNFR

SEQ ID NO: 5215 - protein, 9 aa, synthetic construct
  REGION 1..9: note = Description of Artificial Sequence: Synthetic peptide
IYSLLLCRM

SEQ ID NO: 5216 - protein, 9 aa, synthetic construct
  REGION 1..9: note = Description of Artificial Sequence: Synthetic peptide
IYSTAALGV

SEQ ID NO: 5217 - protein, 10 aa, synthetic construct
  REGION 1..10: note = Description of Artificial Sequence: Synthetic peptide
IYSTAALGVL

SEQ ID NO: 5218 - protein, 11 aa, synthetic construct
  REGION 1..11: note = Description of Artificial Sequence: Synthetic peptide
IYTELEPPCRF

SEQ ID NO: 5219 - protein, 8 aa, synthetic construct
  REGION 1..8: note = Description of Artificial Sequence: Synthetic peptide
KACPLIAA

SEQ ID NO: 5220 - protein, 10 aa, synthetic construct
  REGION 1..10: note = Description of Artificial Sequence: Synthetic peptide
KAFKQIVESC

SEQ ID NO: 5221 - protein, 11 aa, synthetic construct
  REGION 1..11: note = Description of Artificial Sequence: Synthetic peptide
KAIVSTIQRKY

SEQ ID NO: 5222 - protein, 9 aa, synthetic construct
  REGION 1..9: note = Description of Artificial Sequence: Synthetic peptide
KALRKVPTD

SEQ ID NO: 5223 - protein, 11 aa, synthetic construct
  REGION 1..11: note = Description of Artificial Sequence: Synthetic peptide
KATEETFKLSY

SEQ ID NO: 5224 - protein, 10 aa, synthetic construct
  REGION 1..10: note = Description of Artificial Sequence: Synthetic peptide
KCDRAMPNML

SEQ ID NO: 5225 - protein, 9 aa, synthetic construct
  REGION 1..9: note = Description of Artificial Sequence: Synthetic peptide
KCKSAFYIL

SEQ ID NO: 5226 - protein, 9 aa, synthetic construct
  REGION 1..9: note = Description of Artificial Sequence: Synthetic peptide
KDAPYIVGD

SEQ ID NO: 5227 - protein, 8 aa, synthetic construct
  REGION 1..8: note = Description of Artificial Sequence: Synthetic peptide
KDKSAQCF

SEQ ID NO: 5228 - protein, 8 aa, synthetic construct
  REGION 1..8: note = Description of Artificial Sequence: Synthetic peptide
KDLSPRWY

SEQ ID NO: 5229 - protein, 8 aa, synthetic construct
  REGION 1..8: note = Description of Artificial Sequence: Synthetic peptide
KDMTYRRL

SEQ ID NO: 5230 - protein, 9 aa, synthetic construct
  REGION 1..9: note = Description of Artificial Sequence: Synthetic peptide
KDVVECLKL

SEQ ID NO: 5231 - protein, 9 aa, synthetic construct
  REGION 1..9: note = Description of Artificial Sequence: Synthetic peptide
KEDLKFPRG

SEQ ID NO: 5232 - protein, 9 aa, synthetic construct
  REGION 1..9: note = Description of Artificial Sequence: Synthetic peptide
KEELDKYFK

SEQ ID NO: 5233 - protein, 8 aa, synthetic construct
  REGION 1..8: note = Description of Artificial Sequence: Synthetic peptide
KEGFFTYI

SEQ ID NO: 5234 - protein, 8 aa, synthetic construct
  REGION 1..8: note = Description of Artificial Sequence: Synthetic peptide
KEGQINDM

SEQ ID NO: 5235 - protein, 9 aa, synthetic construct
  REGION 1..9: note = Description of Artificial Sequence: Synthetic peptide
KEGQINDMI

SEQ ID NO: 5236 - protein, 11 aa, synthetic construct
  REGION 1..11: note = Description of Artificial Sequence: Synthetic peptide
KEGSSVELKHF

SEQ ID NO: 5237 - protein, 9 aa, synthetic construct
  REGION 1..9: note = Description of Artificial Sequence: Synthetic peptide
KEGVEFLRD

SEQ ID NO: 5238 - protein, 12 aa, synthetic construct
  REGION 1..12: note = Description of Artificial Sequence: Synthetic peptide
KENDSKEGFFTY

SEQ ID NO: 5239 - protein, 8 aa, synthetic construct
  REGION 1..8: note = Description of Artificial Sequence: Synthetic peptide
KESVQTFF

SEQ ID NO: 5240 - protein, 10 aa, synthetic construct
  REGION 1..10: note = Description of Artificial Sequence: Synthetic peptide
KETLYCIDGA

SEQ ID NO: 5241 - protein, 10 aa, synthetic construct
  REGION 1..10: note = Description of Artificial Sequence: Synthetic peptide
KFKEGVEFLR

SEQ ID NO: 5242 - protein, 10 aa, synthetic construct
  REGION 1..10: note = Description of Artificial Sequence: Synthetic peptide
KFLKTNCCRF

SEQ ID NO: 5243 - protein, 10 aa, synthetic construct
  REGION 1..10: note = Description of Artificial Sequence: Synthetic peptide
KFLPFQQFGR

SEQ ID NO: 5244 - protein, 9 aa, synthetic construct
  REGION 1..9: note = Description of Artificial Sequence: Synthetic peptide
KFNGLTVLP

SEQ ID NO: 5245 - protein, 11 aa, synthetic construct
  REGION 1..11: note = Description of Artificial Sequence: Synthetic peptide
KFNPPALQDAY

SEQ ID NO: 5246 - protein, 10 aa, synthetic construct
  REGION 1..10: note = Description of Artificial Sequence: Synthetic peptide
KFTDGVCLFW

SEQ ID NO: 5247 - protein, 11 aa, synthetic construct
  REGION 1..11: note = Description of Artificial Sequence: Synthetic peptide
KFVRIQPGQTF

SEQ ID NO: 5248 - protein, 8 aa, synthetic construct
  REGION 1..8: note = Description of Artificial Sequence: Synthetic peptide
KFYDAQPC

SEQ ID NO: 5249 - protein, 9 aa, synthetic construct
  REGION 1..9: note = Description of Artificial Sequence: Synthetic peptide
KGRLIIREN

SEQ ID NO: 5250 - protein, 9 aa, synthetic construct
  REGION 1..9: note = Description of Artificial Sequence: Synthetic peptide
KGSLPINVI

SEQ ID NO: 5251 - protein, 8 aa, synthetic construct
  REGION 1..8: note = Description of Artificial Sequence: Synthetic peptide
KGVEAVMY

SEQ ID NO: 5252 - protein, 8 aa, synthetic construct
  REGION 1..8: note = Description of Artificial Sequence: Synthetic peptide
KGYHLMSF

SEQ ID NO: 5253 - protein, 8 aa, synthetic construct
  REGION 1..8: note = Description of Artificial Sequence: Synthetic peptide
KHFSMMIL

SEQ ID NO: 5254 - protein, 10 aa, synthetic construct
  REGION 1..10: note = Description of Artificial Sequence: Synthetic peptide
KHITSKETLY

SEQ ID NO: 5255 - protein, 8 aa, synthetic construct
  REGION 1..8: note = Description of Artificial Sequence: Synthetic peptide
KHLIPLMY

SEQ ID NO: 5256 - protein, 8 aa, synthetic construct
  REGION 1..8: note = Description of Artificial Sequence: Synthetic peptide
KHSSGVTR

SEQ ID NO: 5257 - protein, 10 aa, synthetic construct
  REGION 1..10: note = Description of Artificial Sequence: Synthetic peptide
KHSSGVTREL

SEQ ID NO: 5258 - protein, 9 aa, synthetic construct
  REGION 1..9: note = Description of Artificial Sequence: Synthetic peptide
KHTPINLVR

SEQ ID NO: 5259 - protein, 9 aa, synthetic construct
  REGION 1..9: note = Description of Artificial Sequence: Synthetic peptide
KHVYQLRAR

SEQ ID NO: 5260 - protein, 8 aa, synthetic construct
  REGION 1..8: note = Description of Artificial Sequence: Synthetic peptide
KIADKYVR

SEQ ID NO: 5261 - protein, 9 aa, synthetic construct
  REGION 1..9: note = Description of Artificial Sequence: Synthetic peptide
KIADKYVRN

SEQ ID NO: 5262 - protein, 8 aa, synthetic construct
  REGION 1..8: note = Description of Artificial Sequence: Synthetic peptide
KIITLKKR

SEQ ID NO: 5263 - protein, 9 aa, synthetic construct
  REGION 1..9: note = Description of Artificial Sequence: Synthetic peptide
KILGLPTQT

SEQ ID NO: 5264 - protein, 9 aa, synthetic construct
  REGION 1..9: note = Description of Artificial Sequence: Synthetic peptide
KIQDSLSST

SEQ ID NO: 5265 - protein, 12 aa, synthetic construct
  REGION 1..12: note = Description of Artificial Sequence: Synthetic peptide
KITEHSWNADLY

SEQ ID NO: 5266 - protein, 10 aa, synthetic construct
  REGION 1..10: note = Description of Artificial Sequence: Synthetic peptide
KIVNNWLKQL

SEQ ID NO: 5267 - protein, 11 aa, synthetic construct
  REGION 1..11: note = Description of Artificial Sequence: Synthetic peptide
KIYSKHTPINL

SEQ ID NO: 5268 - protein, 9 aa, synthetic construct
  REGION 1..9: note = Description of Artificial Sequence: Synthetic peptide
KKFDTFNGE

SEQ ID NO: 5269 - protein, 9 aa, synthetic construct
  REGION 1..9: note = Description of Artificial Sequence: Synthetic peptide
KKIKACVEE

SEQ ID NO: 5270 - protein, 10 aa, synthetic construct
  REGION 1..10: note = Description of Artificial Sequence: Synthetic peptide
KKKADETQAL

SEQ ID NO: 5271 - protein, 9 aa, synthetic construct
  REGION 1..9: note = Description of Artificial Sequence: Synthetic peptide
KKLLEQWNL

SEQ ID NO: 5272 - protein, 9 aa, synthetic construct
  REGION 1..9: note = Description of Artificial Sequence: Synthetic peptide
KKPNELSRV

SEQ ID NO: 5273 - protein, 10 aa, synthetic construct
  REGION 1..10: note = Description of Artificial Sequence: Synthetic peptide
KKPNELSRVL

SEQ ID NO: 5274 - protein, 9 aa, synthetic construct
  REGION 1..9: note = Description of Artificial Sequence: Synthetic peptide
KKQQTVTLL

SEQ ID NO: 5275 - protein, 8 aa, synthetic construct
  REGION 1..8: note = Description of Artificial Sequence: Synthetic peptide
KKVDGVVQ

SEQ ID NO: 5276 - protein, 9 aa, synthetic construct
  REGION 1..9: note = Description of Artificial Sequence: Synthetic peptide
KKVDGVVQQ

SEQ ID NO: 5277 - protein, 10 aa, synthetic construct
  REGION 1..10: note = Description of Artificial Sequence: Synthetic peptide
KKVDGVVQQL

SEQ ID NO: 5278 - protein, 9 aa, synthetic construct
  REGION 1..9: note = Description of Artificial Sequence: Synthetic peptide
KKVKPTVVV

SEQ ID NO: 5279 - protein, 9 aa, synthetic construct
  REGION 1..9: note = Description of Artificial Sequence: Synthetic peptide
KKWKYPQVN

SEQ ID NO: 5280 - protein, 10 aa, synthetic construct
  REGION 1..10: note = Description of Artificial Sequence: Synthetic peptide
KLALGGSVAI

SEQ ID NO: 5281 - protein, 10 aa, synthetic construct
  REGION 1..10: note = Description of Artificial Sequence: Synthetic peptide
KLCEEMLDNR

SEQ ID NO: 5282 - protein, 8 aa, synthetic construct
  REGION 1..8: note = Description of Artificial Sequence: Synthetic peptide
KLDGFMGR

SEQ ID NO: 5283 - protein, 10 aa, synthetic construct
  REGION 1..10: note = Description of Artificial Sequence: Synthetic peptide
KLDGFMGRIR

SEQ ID NO: 5284 - protein, 9 aa, synthetic construct
  REGION 1..9: note = Description of Artificial Sequence: Synthetic peptide
KLDGVVCTE

SEQ ID NO: 5285 - protein, 9 aa, synthetic construct
  REGION 1..9: note = Description of Artificial Sequence: Synthetic peptide
KLDNDALNN

SEQ ID NO: 5286 - protein, 12 aa, synthetic construct
  REGION 1..12: note = Description of Artificial Sequence: Synthetic peptide
KLDNYYKKDNSY

SEQ ID NO: 5287 - protein, 10 aa, synthetic construct
  REGION 1..10: note = Description of Artificial Sequence: Synthetic peptide
KLFAAETLKA

SEQ ID NO: 5288 - protein, 8 aa, synthetic construct
  REGION 1..8: note = Description of Artificial Sequence: Synthetic peptide
KLGSLVVR

SEQ ID NO: 5289 - protein, 11 aa, synthetic construct
  REGION 1..11: note = Description of Artificial Sequence: Synthetic peptide
KLHDELTGHML

SEQ ID NO: 5290 - protein, 11 aa, synthetic construct
  REGION 1..11: note = Description of Artificial Sequence: Synthetic peptide
KLINIIIWFLL

SEQ ID NO: 5291 - protein, 9 aa, synthetic construct
  REGION 1..9: note = Description of Artificial Sequence: Synthetic peptide
KLKKSLNVA

SEQ ID NO: 5292 - protein, 10 aa, synthetic construct
  REGION 1..10: note = Description of Artificial Sequence: Synthetic peptide
KLKKSLNVAK

SEQ ID NO: 5293 - protein, 8 aa, synthetic construct
  REGION 1..8: note = Description of Artificial Sequence: Synthetic peptide
KLKPVLDW

SEQ ID NO: 5294 - protein, 10 aa, synthetic construct
  REGION 1..10: note = Description of Artificial Sequence: Synthetic peptide
KLKVDTANPK

SEQ ID NO: 5295 - protein, 11 aa, synthetic construct
  REGION 1..11: note = Description of Artificial Sequence: Synthetic peptide
KLLHKPIVWHV

SEQ ID NO: 5296 - protein, 10 aa, synthetic construct
  REGION 1..10: note = Description of Artificial Sequence: Synthetic peptide
KLLKSIAATR

SEQ ID NO: 5297 - protein, 8 aa, synthetic construct
  REGION 1..8: note = Description of Artificial Sequence: Synthetic peptide
KLMGHFAW

SEQ ID NO: 5298 - protein, 9 aa, synthetic construct
  REGION 1..9: note = Description of Artificial Sequence: Synthetic peptide
KLQFTSLEI

SEQ ID NO: 5299 - protein, 10 aa, synthetic construct
  REGION 1..10: note = Description of Artificial Sequence: Synthetic peptide
KLQNNELSPV

SEQ ID NO: 5300 - protein, 8 aa, synthetic construct
  REGION 1..8: note = Description of Artificial Sequence: Synthetic peptide
KLQSSQAW

SEQ ID NO: 5301 - protein, 10 aa, synthetic construct
  REGION 1..10: note = Description of Artificial Sequence: Synthetic peptide
KLRSDVLLPL

SEQ ID NO: 5302 - protein, 10 aa, synthetic construct
  REGION 1..10: note = Description of Artificial Sequence: Synthetic peptide
KLSYGIATVR

SEQ ID NO: 5303 - protein, 10 aa, synthetic construct
  REGION 1..10: note = Description of Artificial Sequence: Synthetic peptide
KLWAQCVQLH

SEQ ID NO: 5304 - protein, 9 aa, synthetic construct
  REGION 1..9: note = Description of Artificial Sequence: Synthetic peptide
KMFDAYVNT

SEQ ID NO: 5305 - protein, 10 aa, synthetic construct
  REGION 1..10: note = Description of Artificial Sequence: Synthetic peptide
KMFYKGVITH

SEQ ID NO: 5306 - protein, 8 aa, synthetic construct
  REGION 1..8: note = Description of Artificial Sequence: Synthetic peptide
KMKDLSPR

SEQ ID NO: 5307 - protein, 9 aa, synthetic construct
  REGION 1..9: note = Description of Artificial Sequence: Synthetic peptide
KMQRMLLEK

SEQ ID NO: 5308 - protein, 10 aa, synthetic construct
  REGION 1..10: note = Description of Artificial Sequence: Synthetic peptide
KMSDVKCTSV

SEQ ID NO: 5309 - protein, 8 aa, synthetic construct
  REGION 1..8: note = Description of Artificial Sequence: Synthetic peptide
KMVSLLSV

SEQ ID NO: 5310 - protein, 9 aa, synthetic construct
  REGION 1..9: note = Description of Artificial Sequence: Synthetic peptide
KNADIVEEA

SEQ ID NO: 5311 - protein, 10 aa, synthetic construct
  REGION 1..10: note = Description of Artificial Sequence: Synthetic peptide
KNIDGYFKIY

SEQ ID NO: 5312 - protein, 9 aa, synthetic construct
  REGION 1..9: note = Description of Artificial Sequence: Synthetic peptide
KNKCVNFNF

SEQ ID NO: 5313 - protein, 8 aa, synthetic construct
  REGION 1..8: note = Description of Artificial Sequence: Synthetic peptide
KNLREFVF

SEQ ID NO: 5314 - protein, 9 aa, synthetic construct
  REGION 1..9: note = Description of Artificial Sequence: Synthetic peptide
KPFLNKVVS

SEQ ID NO: 5315 - protein, 10 aa, synthetic construct
  REGION 1..10: note = Description of Artificial Sequence: Synthetic peptide
KPFLNKVVST

SEQ ID NO: 5316 - protein, 9 aa, synthetic construct
  REGION 1..9: note = Description of Artificial Sequence: Synthetic peptide
KPGNFNKDF

SEQ ID NO: 5317 - protein, 11 aa, synthetic construct
  REGION 1..11: note = Description of Artificial Sequence: Synthetic peptide
KPHNSHEGKTF

SEQ ID NO: 5318 - protein, 10 aa, synthetic construct
  REGION 1..10: note = Description of Artificial Sequence: Synthetic peptide
KPIVWHVNNA

SEQ ID NO: 5319 - protein, 10 aa, synthetic construct
  REGION 1..10: note = Description of Artificial Sequence: Synthetic peptide
KPLEFGATSA

SEQ ID NO: 5320 - protein, 8 aa, synthetic construct
  REGION 1..8: note = Description of Artificial Sequence: Synthetic peptide
KPPISFPL

SEQ ID NO: 5321 - protein, 9 aa, synthetic construct
  REGION 1..9: note = Description of Artificial Sequence: Synthetic peptide
KPSFYVYSR

SEQ ID NO: 5322 - protein, 10 aa, synthetic construct
  REGION 1..10: note = Description of Artificial Sequence: Synthetic peptide
KPSKRSFIED

SEQ ID NO: 5323 - protein, 8 aa, synthetic construct
  REGION 1..8: note = Description of Artificial Sequence: Synthetic peptide
KPTETICA

SEQ ID NO: 5324 - protein, 10 aa, synthetic construct
  REGION 1..10: note = Description of Artificial Sequence: Synthetic peptide
KPTETICAPL

SEQ ID NO: 5325 - protein, 8 aa, synthetic construct
  REGION 1..8: note = Description of Artificial Sequence: Synthetic peptide
KPTVVVNA

SEQ ID NO: 5326 - protein, 9 aa, synthetic construct
  REGION 1..9: note = Description of Artificial Sequence: Synthetic peptide
KQDDKKIKA

SEQ ID NO: 5327 - protein, 8 aa, synthetic construct
  REGION 1..8: note = Description of Artificial Sequence: Synthetic peptide
KQEILGTV

SEQ ID NO: 5328 - protein, 12 aa, synthetic construct
  REGION 1..12: note = Description of Artificial Sequence: Synthetic peptide
KQFDTYNLWNTF

SEQ ID NO: 5329 - protein, 9 aa, synthetic construct
  REGION 1..9: note = Description of Artificial Sequence: Synthetic peptide
KQGNFKNLR

SEQ ID NO: 5330 - protein, 9 aa, synthetic construct
  REGION 1..9: note = Description of Artificial Sequence: Synthetic peptide
KQIYKTPPI

SEQ ID NO: 5331 - protein, 9 aa, synthetic construct
  REGION 1..9: note = Description of Artificial Sequence: Synthetic peptide
KQYGDCLGD

SEQ ID NO: 5332 - protein, 9 aa, synthetic construct
  REGION 1..9: note = Description of Artificial Sequence: Synthetic peptide
KRAKVTSAM

SEQ ID NO: 5333 - protein, 8 aa, synthetic construct
  REGION 1..8: note = Description of Artificial Sequence: Synthetic peptide
KRHTFSNY

SEQ ID NO: 5334 - protein, 10 aa, synthetic construct
  REGION 1..10: note = Description of Artificial Sequence: Synthetic peptide
KRISNCVADY

SEQ ID NO: 5335 - protein, 8 aa, synthetic construct
  REGION 1..8: note = Description of Artificial Sequence: Synthetic peptide
KRNVIPTI

SEQ ID NO: 5336 - protein, 9 aa, synthetic construct
  REGION 1..9: note = Description of Artificial Sequence: Synthetic peptide
KRRVVFNGV

SEQ ID NO: 5337 - protein, 8 aa, synthetic construct
  REGION 1..8: note = Description of Artificial Sequence: Synthetic peptide
KRSFIEDL

SEQ ID NO: 5338 - protein, 10 aa, synthetic construct
  REGION 1..10: note = Description of Artificial Sequence: Synthetic peptide
KRSFIEDLLF

SEQ ID NO: 5339 - protein, 8 aa, synthetic construct
  REGION 1..8: note = Description of Artificial Sequence: Synthetic peptide
KSAQCFKM

SEQ ID NO: 5340 - protein, 10 aa, synthetic construct
  REGION 1..10: note = Description of Artificial Sequence: Synthetic peptide
KSAQCFKMFY

SEQ ID NO: 5341 - protein, 8 aa, synthetic construct
  REGION 1..8: note = Description of Artificial Sequence: Synthetic peptide
KSATCITR

SEQ ID NO: 5342 - protein, 9 aa, synthetic construct
  REGION 1..9: note = Description of Artificial Sequence: Synthetic peptide
KSAYENFNQ

SEQ ID NO: 5343 - protein, 10 aa, synthetic construct
  REGION 1..10: note = Description of Artificial Sequence: Synthetic peptide
KSDGTGTIYT

SEQ ID NO: 5344 - protein, 12 aa, synthetic construct
  REGION 1..12: note = Description of Artificial Sequence: Synthetic peptide
KSDGTGTIYTEL

SEQ ID NO: 5345 - protein, 9 aa, synthetic construct
  REGION 1..9: note = Description of Artificial Sequence: Synthetic peptide
KSIAATRGA

SEQ ID NO: 5346 - protein, 9 aa, synthetic construct
  REGION 1..9: note = Description of Artificial Sequence: Synthetic peptide
KSLNVAKSE

SEQ ID NO: 5347 - protein, 8 aa, synthetic construct
  REGION 1..8: note = Description of Artificial Sequence: Synthetic peptide
KSNHNFLV

SEQ ID NO: 5348 - protein, 9 aa, synthetic construct
  REGION 1..9: note = Description of Artificial Sequence: Synthetic peptide
KSNHNFLVQ

SEQ ID NO: 5349 - protein, 9 aa, synthetic construct
  REGION 1..9: note = Description of Artificial Sequence: Synthetic peptide
KSNIIRGWI

SEQ ID NO: 5350 - protein, 9 aa, synthetic construct
  REGION 1..9: note = Description of Artificial Sequence: Synthetic peptide
KSTNLVKNK

SEQ ID NO: 5351 - protein, 11 aa, synthetic construct
  REGION 1..11: note = Description of Artificial Sequence: Synthetic peptide
KSVLYYQNNVF

SEQ ID NO: 5352 - protein, 9 aa, synthetic construct
  REGION 1..9: note = Description of Artificial Sequence: Synthetic peptide
KSWMESEFR

SEQ ID NO: 5353 - protein, 9 aa, synthetic construct
  REGION 1..9: note = Description of Artificial Sequence: Synthetic peptide
KSYVHVVDG

SEQ ID NO: 5354 - protein, 9 aa, synthetic construct
  REGION 1..9: note = Description of Artificial Sequence: Synthetic peptide
KTHVQLSLP

SEQ ID NO: 5355 - protein, 9 aa, synthetic construct
  REGION 1..9: note = Description of Artificial Sequence: Synthetic peptide
KTILRKGGR

SEQ ID NO: 5356 - protein, 8 aa, synthetic construct
  REGION 1..8: note = Description of Artificial Sequence: Synthetic peptide
KTPEEHFI

SEQ ID NO: 5357 - protein, 9 aa, synthetic construct
  REGION 1..9: note = Description of Artificial Sequence: Synthetic peptide
KTPKYKFVR

SEQ ID NO: 5358 - protein, 9 aa, synthetic construct
  REGION 1..9: note = Description of Artificial Sequence: Synthetic peptide
KTQFNYYKK

SEQ ID NO: 5359 - protein, 8 aa, synthetic construct
  REGION 1..8: note = Description of Artificial Sequence: Synthetic peptide
KTTEVVGD

SEQ ID NO: 5360 - protein, 12 aa, synthetic construct
  REGION 1..12: note = Description of Artificial Sequence: Synthetic peptide
KTTEVVGDIILK

SEQ ID NO: 5361 - protein, 8 aa, synthetic construct
  REGION 1..8: note = Description of Artificial Sequence: Synthetic peptide
KTTVASLI

SEQ ID NO: 5362 - protein, 9 aa, synthetic construct
  REGION 1..9: note = Description of Artificial Sequence: Synthetic peptide
KTVQFCDAM

SEQ ID NO: 5363 - protein, 9 aa, synthetic construct
  REGION 1..9: note = Description of Artificial Sequence: Synthetic peptide
KTYERHSLS

SEQ ID NO: 5364 - protein, 8 aa, synthetic construct
  REGION 1..8: note = Description of Artificial Sequence: Synthetic peptide
KVATVQSK

SEQ ID NO: 5365 - protein, 11 aa, synthetic construct
  REGION 1..11: note = Description of Artificial Sequence: Synthetic peptide
KVGGNYNYLYR

SEQ ID NO: 5366 - protein, 8 aa, synthetic construct
  REGION 1..8: note = Description of Artificial Sequence: Synthetic peptide
KVPATVSV

SEQ ID NO: 5367 - protein, 11 aa, synthetic construct
  REGION 1..11: note = Description of Artificial Sequence: Synthetic peptide
KVTIDYTEISF

SEQ ID NO: 5368 - protein, 9 aa, synthetic construct
  REGION 1..9: note = Description of Artificial Sequence: Synthetic peptide
KVTKGKAKK

SEQ ID NO: 5369 - protein, 9 aa, synthetic construct
  REGION 1..9: note = Description of Artificial Sequence: Synthetic peptide
KVYYGNALD

SEQ ID NO: 5370 - protein, 8 aa, synthetic construct
  REGION 1..8: note = Description of Artificial Sequence: Synthetic peptide
KWADNNCY

SEQ ID NO: 5371 - protein, 8 aa, synthetic construct
  REGION 1..8: note = Description of Artificial Sequence: Synthetic peptide
KWDLIISD

SEQ ID NO: 5372 - protein, 10 aa, synthetic construct
  REGION 1..10: note = Description of Artificial Sequence: Synthetic peptide
KWDLTAFGLV

SEQ ID NO: 5373 - protein, 12 aa, synthetic construct
  REGION 1..12: note = Description of Artificial Sequence: Synthetic peptide
KYFSGAMDTTSY

SEQ ID NO: 5374 - protein, 10 aa, synthetic construct
  REGION 1..10: note = Description of Artificial Sequence: Synthetic peptide
KYFVKIGPER

SEQ ID NO: 5375 - protein, 11 aa, synthetic construct
  REGION 1..11: note = Description of Artificial Sequence: Synthetic peptide
KYLPIDKCSRI

SEQ ID NO: 5376 - protein, 9 aa, synthetic construct
  REGION 1..9: note = Description of Artificial Sequence: Synthetic peptide
KYLVQQESP

SEQ ID NO: 5377 - protein, 10 aa, synthetic construct
  REGION 1..10: note = Description of Artificial Sequence: Synthetic peptide
KYNENGTITD

SEQ ID NO: 5378 - protein, 10 aa, synthetic construct
  REGION 1..10: note = Description of Artificial Sequence: Synthetic peptide
KYPQVNGLTS

SEQ ID NO: 5379 - protein, 11 aa, synthetic construct
  REGION 1..11: note = Description of Artificial Sequence: Synthetic peptide
KYPQVNGLTSI

SEQ ID NO: 5380 - protein, 10 aa, synthetic construct
  REGION 1..10: note = Description of Artificial Sequence: Synthetic peptide
KYVRNLQHRL

SEQ ID NO: 5381 - protein, 9 aa, synthetic construct
  REGION 1..9: note = Description of Artificial Sequence: Synthetic peptide
LAAECTIFK

SEQ ID NO: 5382 - protein, 11 aa, synthetic construct
  REGION 1..11: note = Description of Artificial Sequence: Synthetic peptide
LAAIMQLFFSY

SEQ ID NO: 5383 - protein, 9 aa, synthetic construct
  REGION 1..9: note = Description of Artificial Sequence: Synthetic peptide
LAATKMSEC

SEQ ID NO: 5384 - protein, 9 aa, synthetic construct
  REGION 1..9: note = Description of Artificial Sequence: Synthetic peptide
LAATVRLQA

SEQ ID NO: 5385 - protein, 9 aa, synthetic construct
  REGION 1..9: note = Description of Artificial Sequence: Synthetic peptide
LACEDLKPV

SEQ ID NO: 5386 - protein, 10 aa, synthetic construct
  REGION 1..10: note = Description of Artificial Sequence: Synthetic peptide
LACFVLAAVY

SEQ ID NO: 5387 - protein, 9 aa, synthetic construct
  REGION 1..9: note = Description of Artificial Sequence: Synthetic peptide
LADNKFALT

SEQ ID NO: 5388 - protein, 10 aa, synthetic construct
  REGION 1..10: note = Description of Artificial Sequence: Synthetic peptide
LAHIQWMVMF

SEQ ID NO: 5389 - protein, 9 aa, synthetic construct
  REGION 1..9: note = Description of Artificial Sequence: Synthetic peptide
LAIDAYPLT

SEQ ID NO: 5390 - protein, 10 aa, synthetic construct
  REGION 1..10: note = Description of Artificial Sequence: Synthetic peptide
LAIDAYPLTK

SEQ ID NO: 5391 - protein, 8 aa, synthetic construct
  REGION 1..8: note = Description of Artificial Sequence: Synthetic peptide
LAKALNDF

SEQ ID NO: 5392 - protein, 8 aa, synthetic construct
  REGION 1..8: note = Description of Artificial Sequence: Synthetic peptide
LAKDTTEA

SEQ ID NO: 5393 - protein, 8 aa, synthetic construct
  REGION 1..8: note = Description of Artificial Sequence: Synthetic peptide
LAKHCLHV

SEQ ID NO: 5394 - protein, 8 aa, synthetic construct
  REGION 1..8: note = Description of Artificial Sequence: Synthetic peptide
LALITLAT

SEQ ID NO: 5395 - protein, 10 aa, synthetic construct
  REGION 1..10: note = Description of Artificial Sequence: Synthetic peptide
LALLSDLQDL

SEQ ID NO: 5396 - protein, 8 aa, synthetic construct
  REGION 1..8: note = Description of Artificial Sequence: Synthetic peptide
LANECAQV

SEQ ID NO: 5397 - protein, 8 aa, synthetic construct
  REGION 1..8: note = Description of Artificial Sequence: Synthetic peptide
LAPLLSAG

SEQ ID NO: 5398 - protein, 9 aa, synthetic construct
  REGION 1..9: note = Description of Artificial Sequence: Synthetic peptide
LAPLLSAGI

SEQ ID NO: 5399 - protein, 8 aa, synthetic construct
  REGION 1..8: note = Description of Artificial Sequence: Synthetic peptide
LATHGLAA

SEQ ID NO: 5400 - protein, 9 aa, synthetic construct
  REGION 1..9: note = Description of Artificial Sequence: Synthetic peptide
LCDRRATCF

SEQ ID NO: 5401 - protein, 8 aa, synthetic construct
  REGION 1..8: note = Description of Artificial Sequence: Synthetic peptide
LCEKALKY

SEQ ID NO: 5402 - protein, 8 aa, synthetic construct
  REGION 1..8: note = Description of Artificial Sequence: Synthetic peptide
LCPFGEVF

SEQ ID NO: 5403 - protein, 9 aa, synthetic construct
  REGION 1..9: note = Description of Artificial Sequence: Synthetic peptide
LDEWSMATY

SEQ ID NO: 5404 - protein, 10 aa, synthetic construct
  REGION 1..10: note = Description of Artificial Sequence: Synthetic peptide
LDEWSMATYY

SEQ ID NO: 5405 - protein, 9 aa, synthetic construct
  REGION 1..9: note = Description of Artificial Sequence: Synthetic peptide
LDISASIVA

SEQ ID NO: 5406 - protein, 8 aa, synthetic construct
  REGION 1..8: note = Description of Artificial Sequence: Synthetic peptide
LDSCKRVL

SEQ ID NO: 5407 - protein, 8 aa, synthetic construct
  REGION 1..8: note = Description of Artificial Sequence: Synthetic peptide
LDSFKEEL

SEQ ID NO: 5408 - protein, 8 aa, synthetic construct
  REGION 1..8: note = Description of Artificial Sequence: Synthetic peptide
LDWLEEKF

SEQ ID NO: 5409 - protein, 8 aa, synthetic construct
  REGION 1..8: note = Description of Artificial Sequence: Synthetic peptide
LEASFNYL

SEQ ID NO: 5410 - protein, 8 aa, synthetic construct
  REGION 1..8: note = Description of Artificial Sequence: Synthetic peptide
LEDEFTPF

SEQ ID NO: 5411 - protein, 10 aa, synthetic construct
  REGION 1..10: note = Description of Artificial Sequence: Synthetic peptide
LEGETLPTEV

SEQ ID NO: 5412 - protein, 9 aa, synthetic construct
  REGION 1..9: note = Description of Artificial Sequence: Synthetic peptide
LEGYAFEHI

SEQ ID NO: 5413 - protein, 8 aa, synthetic construct
  REGION 1..8: note = Description of Artificial Sequence: Synthetic peptide
LEILDITP

SEQ ID NO: 5414 - protein, 9 aa, synthetic construct
  REGION 1..9: note = Description of Artificial Sequence: Synthetic peptide
LEILDITPC

SEQ ID NO: 5415 - protein, 11 aa, synthetic construct
  REGION 1..11: note = Description of Artificial Sequence: Synthetic peptide
LEILDITPCSF

SEQ ID NO: 5416 - protein, 10 aa, synthetic construct
  REGION 1..10: note = Description of Artificial Sequence: Synthetic peptide
LEIPRRNVAT

SEQ ID NO: 5417 - protein, 9 aa, synthetic construct
  REGION 1..9: note = Description of Artificial Sequence: Synthetic peptide
LEKCDLQNY

SEQ ID NO: 5418 - protein, 8 aa, synthetic construct
  REGION 1..8: note = Description of Artificial Sequence: Synthetic peptide
LELAMDEF

SEQ ID NO: 5419 - protein, 8 aa, synthetic construct
  REGION 1..8: note = Description of Artificial Sequence: Synthetic peptide
LEPPCRFV

SEQ ID NO: 5420 - protein, 10 aa, synthetic construct
  REGION 1..10: note = Description of Artificial Sequence: Synthetic peptide
LEQWNLVIGF

SEQ ID NO: 5421 - protein, 11 aa, synthetic construct
  REGION 1..11: note = Description of Artificial Sequence: Synthetic peptide
LEQYVFCTVNA

SEQ ID NO: 5422 - protein, 10 aa, synthetic construct
  REGION 1..10: note = Description of Artificial Sequence: Synthetic peptide
LETAQNSVRV

SEQ ID NO: 5423 - protein, 11 aa, synthetic construct
  REGION 1..11: note = Description of Artificial Sequence: Synthetic peptide
LETIQITISSF

SEQ ID NO: 5424 - protein, 8 aa, synthetic construct
  REGION 1..8: note = Description of Artificial Sequence: Synthetic peptide
LFARTRSM

SEQ ID NO: 5425 - protein, 9 aa, synthetic construct
  REGION 1..9: note = Description of Artificial Sequence: Synthetic peptide
LFDESGEFK

SEQ ID NO: 5426 - protein, 9 aa, synthetic construct
  REGION 1..9: note = Description of Artificial Sequence: Synthetic peptide
LFDMSKFPL

SEQ ID NO: 5427 - protein, 8 aa, synthetic construct
  REGION 1..8: note = Description of Artificial Sequence: Synthetic peptide
LFFSYFAV

SEQ ID NO: 5428 - protein, 8 aa, synthetic construct
  REGION 1..8: note = Description of Artificial Sequence: Synthetic peptide
LFIRQEEV

SEQ ID NO: 5429 - protein, 10 aa, synthetic construct
  REGION 1..10: note = Description of Artificial Sequence: Synthetic peptide
LFLAFVVFLL

SEQ ID NO: 5430 - protein, 9 aa, synthetic construct
  REGION 1..9: note = Description of Artificial Sequence: Synthetic peptide
LFLALITLA

SEQ ID NO: 5431 - protein, 11 aa, synthetic construct
  REGION 1..11: note = Description of Artificial Sequence: Synthetic peptide
LFSTVFPPTSF

SEQ ID NO: 5432 - protein, 9 aa, synthetic construct
  REGION 1..9: note = Description of Artificial Sequence: Synthetic peptide
LFTRFFYVL

SEQ ID NO: 5433 - protein, 8 aa, synthetic construct
  REGION 1..8: note = Description of Artificial Sequence: Synthetic peptide
LFVTVYSH

SEQ ID NO: 5434 - protein, 10 aa, synthetic construct
  REGION 1..10: note = Description of Artificial Sequence: Synthetic peptide
LFVTVYSHLL

SEQ ID NO: 5435 - protein, 8 aa, synthetic construct
  REGION 1..8: note = Description of Artificial Sequence: Synthetic peptide
LFYSYATH

SEQ ID NO: 5436 - protein, 9 aa, synthetic construct
  REGION 1..9: note = Description of Artificial Sequence: Synthetic peptide
LFYSYATHS

SEQ ID NO: 5437 - protein, 10 aa, synthetic construct
  REGION 1..10: note = Description of Artificial Sequence: Synthetic peptide
LGDELGTDPY

SEQ ID NO: 5438 - protein, 10 aa, synthetic construct
  REGION 1..10: note = Description of Artificial Sequence: Synthetic peptide
LGDVRETMSY

SEQ ID NO: 5439 - protein, 8 aa, synthetic construct
  REGION 1..8: note = Description of Artificial Sequence: Synthetic peptide
LGFIAGLI

SEQ ID NO: 5440 - protein, 9 aa, synthetic construct
  REGION 1..9: note = Description of Artificial Sequence: Synthetic peptide
LGLAAIMQL

SEQ ID NO: 5441 - protein, 8 aa, synthetic construct
  REGION 1..8: note = Description of Artificial Sequence: Synthetic peptide
LGSLAATV

SEQ ID NO: 5442 - protein, 8 aa, synthetic construct
  REGION 1..8: note = Description of Artificial Sequence: Synthetic peptide
LGVLVPHV

SEQ ID NO: 5443 - protein, 8 aa, synthetic construct
  REGION 1..8: note = Description of Artificial Sequence: Synthetic peptide
LGYVTHGL

SEQ ID NO: 5444 - protein, 8 aa, synthetic construct
  REGION 1..8: note = Description of Artificial Sequence: Synthetic peptide
LHAPATVC

SEQ ID NO: 5445 - protein, 9 aa, synthetic construct
  REGION 1..9: note = Description of Artificial Sequence: Synthetic peptide
LHNDILLAK

SEQ ID NO: 5446 - protein, 9 aa, synthetic construct
  REGION 1..9: note = Description of Artificial Sequence: Synthetic peptide
LIAIVMVTI

SEQ ID NO: 5447 - protein, 9 aa, synthetic construct
  REGION 1..9: note = Description of Artificial Sequence: Synthetic peptide
LIANQFNSA

SEQ ID NO: 5448 - protein, 9 aa, synthetic construct
  REGION 1..9: note = Description of Artificial Sequence: Synthetic peptide
LIIMRTFKV

SEQ ID NO: 5449 - protein, 10 aa, synthetic construct
  REGION 1..10: note = Description of Artificial Sequence: Synthetic peptide
LIKVTLVFLF

SEQ ID NO: 5450 - protein, 9 aa, synthetic construct
  REGION 1..9: note = Description of Artificial Sequence: Synthetic peptide
LIPLMYKGL

SEQ ID NO: 5451 - protein, 8 aa, synthetic construct
  REGION 1..8: note = Description of Artificial Sequence: Synthetic peptide
LIVAAIVF

SEQ ID NO: 5452 - protein, 10 aa, synthetic construct
  REGION 1..10: note = Description of Artificial Sequence: Synthetic peptide
LKAPKEIIFL

SEQ ID NO: 5453 - protein, 8 aa, synthetic construct
  REGION 1..8: note = Description of Artificial Sequence: Synthetic peptide
LKFNPPAL

SEQ ID NO: 5454 - protein, 9 aa, synthetic construct
  REGION 1..9: note = Description of Artificial Sequence: Synthetic peptide
LKFPRGQGV

SEQ ID NO: 5455 - protein, 8 aa, synthetic construct
  REGION 1..8: note = Description of Artificial Sequence: Synthetic peptide
LKPANNSL

SEQ ID NO: 5456 - protein, 9 aa, synthetic construct
  REGION 1..9: note = Description of Artificial Sequence: Synthetic peptide
LKQLIKVTL

SEQ ID NO: 5457 - protein, 9 aa, synthetic construct
  REGION 1..9: note = Description of Artificial Sequence: Synthetic peptide
LKQLPFFYY

SEQ ID NO: 5458 - protein, 10 aa, synthetic construct
  REGION 1..10: note = Description of Artificial Sequence: Synthetic peptide
LLADKFPVLH

SEQ ID NO: 5459 - protein, 9 aa, synthetic construct
  REGION 1..9: note = Description of Artificial Sequence: Synthetic peptide
LLAKDTTEA

SEQ ID NO: 5460 - protein, 10 aa, synthetic construct
  REGION 1..10: note = Description of Artificial Sequence: Synthetic peptide
LLAKDTTEAF

SEQ ID NO: 5461 - protein, 9 aa, synthetic construct
  REGION 1..9: note = Description of Artificial Sequence: Synthetic peptide
LLAPLLSAG

SEQ ID NO: 5462 - protein, 10 aa, synthetic construct
  REGION 1..10: note = Description of Artificial Sequence: Synthetic peptide
LLEKCDLQNY

SEQ ID NO: 5463 - protein, 8 aa, synthetic construct
  REGION 1..8: note = Description of Artificial Sequence: Synthetic peptide
LLFLAFVV

SEQ ID NO: 5464 - protein, 9 aa, synthetic construct
  REGION 1..9: note = Description of Artificial Sequence: Synthetic peptide
LLKDCPAVA

SEQ ID NO: 5465 - protein, 9 aa, synthetic construct
  REGION 1..9: note = Description of Artificial Sequence: Synthetic peptide
LLKSAYENF

SEQ ID NO: 5466 - protein, 9 aa, synthetic construct
  REGION 1..9: note = Description of Artificial Sequence: Synthetic peptide
LLLCRMNSR

SEQ ID NO: 5467 - protein, 10 aa, synthetic construct
  REGION 1..10: note = Description of Artificial Sequence: Synthetic peptide
LLLDDFVEII

SEQ ID NO: 5468 - protein, 10 aa, synthetic construct
  REGION 1..10: note = Description of Artificial Sequence: Synthetic peptide
LLLDQALVSD

SEQ ID NO: 5469 - protein, 10 aa, synthetic construct
  REGION 1..10: note = Description of Artificial Sequence: Synthetic peptide
LLMPILTLTR

SEQ ID NO: 5470 - protein, 10 aa, synthetic construct
  REGION 1..10: note = Description of Artificial Sequence: Synthetic peptide
LLPLTQYNRY

SEQ ID NO: 5471 - protein, 9 aa, synthetic construct
  REGION 1..9: note = Description of Artificial Sequence: Synthetic peptide
LLPLVSSQC

SEQ ID NO: 5472 - protein, 9 aa, synthetic construct
  REGION 1..9: note = Description of Artificial Sequence: Synthetic peptide
LLPSLATVA

SEQ ID NO: 5473 - protein, 9 aa, synthetic construct
  REGION 1..9: note = Description of Artificial Sequence: Synthetic peptide
LLQFAYANR

SEQ ID NO: 5474 - protein, 9 aa, synthetic construct
  REGION 1..9: note = Description of Artificial Sequence: Synthetic peptide
LLQLCTFTR

SEQ ID NO: 5475 - protein, 9 aa, synthetic construct
  REGION 1..9: note = Description of Artificial Sequence: Synthetic peptide
LLQNGMNGR

SEQ ID NO: 5476 - protein, 9 aa, synthetic construct
  REGION 1..9: note = Description of Artificial Sequence: Synthetic peptide
LLSKGRLII

SEQ ID NO: 5477 - protein, 11 aa, synthetic construct
  REGION 1..11: note = Description of Artificial Sequence: Synthetic peptide
LLSVCLGSLIY

SEQ ID NO: 5478 - protein, 9 aa, synthetic construct
  REGION 1..9: note = Description of Artificial Sequence: Synthetic peptide
LLSVLQQLR

SEQ ID NO: 5479 - protein, 9 aa, synthetic construct
  REGION 1..9: note = Description of Artificial Sequence: Synthetic peptide
LLTNMFTPL

SEQ ID NO: 5480 - protein, 8 aa, synthetic construct
  REGION 1..8: note = Description of Artificial Sequence: Synthetic peptide
LLWPVTLA

SEQ ID NO: 5481 - protein, 10 aa, synthetic construct
  REGION 1..10: note = Description of Artificial Sequence: Synthetic peptide
LLWPVTLACF

SEQ ID NO: 5482 - protein, 8 aa, synthetic construct
  REGION 1..8: note = Description of Artificial Sequence: Synthetic peptide
LMCQPILL

SEQ ID NO: 5483 - protein, 10 aa, synthetic construct
  REGION 1..10: note = Description of Artificial Sequence: Synthetic peptide
LMRELNGGAY

SEQ ID NO: 5484 - protein, 10 aa, synthetic construct
  REGION 1..10: note = Description of Artificial Sequence: Synthetic peptide
LNDLCFTNVY

SEQ ID NO: 5485 - protein, 8 aa, synthetic construct
  REGION 1..8: note = Description of Artificial Sequence: Synthetic peptide
LNDNLLEI

SEQ ID NO: 5486 - protein, 9 aa, synthetic construct
  REGION 1..9: note = Description of Artificial Sequence: Synthetic peptide
LNHTKKWKY

SEQ ID NO: 5487 - protein, 9 aa, synthetic construct
  REGION 1..9: note = Description of Artificial Sequence: Synthetic peptide
LNIIPLTTA

SEQ ID NO: 5488 - protein, 9 aa, synthetic construct
  REGION 1..9: note = Description of Artificial Sequence: Synthetic peptide
LNRVCGVSA

SEQ ID NO: 5489 - protein, 8 aa, synthetic construct
  REGION 1..8: note = Description of Artificial Sequence: Synthetic peptide
LNSIIKTI

SEQ ID NO: 5490 - protein, 10 aa, synthetic construct
  REGION 1..10: note = Description of Artificial Sequence: Synthetic peptide
LPAPRTLLTK

SEQ ID NO: 5491 - protein, 10 aa, synthetic construct
  REGION 1..10: note = Description of Artificial Sequence: Synthetic peptide
LPDDFTGCVI

SEQ ID NO: 5492 - protein, 9 aa, synthetic construct
  REGION 1..9: note = Description of Artificial Sequence: Synthetic peptide
LPETTADIV

SEQ ID NO: 5493 - protein, 8 aa, synthetic construct
  REGION 1..8: note = Description of Artificial Sequence: Synthetic peptide
LPFFSNVT

SEQ ID NO: 5494 - protein, 11 aa, synthetic construct
  REGION 1..11: note = Description of Artificial Sequence: Synthetic peptide
LPFGWLIVGVA

SEQ ID NO: 5495 - protein, 8 aa, synthetic construct
  REGION 1..8: note = Description of Artificial Sequence: Synthetic peptide
LPFKLTCA

SEQ ID NO: 5496 - protein, 10 aa, synthetic construct
  REGION 1..10: note = Description of Artificial Sequence: Synthetic peptide
LPFNDGVYFA

SEQ ID NO: 5497 - protein, 9 aa, synthetic construct
  REGION 1..9: note = Description of Artificial Sequence: Synthetic peptide
LPFQQFGRD

SEQ ID NO: 5498 - protein, 10 aa, synthetic construct
  REGION 1..10: note = Description of Artificial Sequence: Synthetic peptide
LPFQQFGRDI

SEQ ID NO: 5499 - protein, 10 aa, synthetic construct
  REGION 1..10: note = Description of Artificial Sequence: Synthetic peptide
LPGCDGGSLY

SEQ ID NO: 5500 - protein, 10 aa, synthetic construct
  REGION 1..10: note = Description of Artificial Sequence: Synthetic peptide
LPGVFCGVDA

SEQ ID NO: 5501 - protein, 10 aa, synthetic construct
  REGION 1..10: note = Description of Artificial Sequence: Synthetic peptide
LPKGIMMNVA

SEQ ID NO: 5502 - protein, 9 aa, synthetic construct
  REGION 1..9: note = Description of Artificial Sequence: Synthetic peptide
LPLQLGFST

SEQ ID NO: 5503 - protein, 11 aa, synthetic construct
  REGION 1..11: note = Description of Artificial Sequence: Synthetic peptide
LPNDDTLRVEA

SEQ ID NO: 5504 - protein, 9 aa, synthetic construct
  REGION 1..9: note = Description of Artificial Sequence: Synthetic peptide
LPPKNSIDA

SEQ ID NO: 5505 - protein, 10 aa, synthetic construct
  REGION 1..10: note = Description of Artificial Sequence: Synthetic peptide
LPPKNSIDAF

SEQ ID NO: 5506 - protein, 9 aa, synthetic construct
  REGION 1..9: note = Description of Artificial Sequence: Synthetic peptide
LPRVFSAVG

SEQ ID NO: 5507 - protein, 8 aa, synthetic construct
  REGION 1..8: note = Description of Artificial Sequence: Synthetic peptide
LPSLATVA

SEQ ID NO: 5508 - protein, 8 aa, synthetic construct
  REGION 1..8: note = Description of Artificial Sequence: Synthetic peptide
LPSYAAFA

SEQ ID NO: 5509 - protein, 10 aa, synthetic construct
  REGION 1..10: note = Description of Artificial Sequence: Synthetic peptide
LPSYAAFATA

SEQ ID NO: 5510 - protein, 8 aa, synthetic construct
  REGION 1..8: note = Description of Artificial Sequence: Synthetic peptide
LPTEVLTE

SEQ ID NO: 5511 - protein, 10 aa, synthetic construct
  REGION 1..10: note = Description of Artificial Sequence: Synthetic peptide
LPTEVLTEEV

SEQ ID NO: 5512 - protein, 11 aa, synthetic construct
  REGION 1..11: note = Description of Artificial Sequence: Synthetic peptide
LPTGVHAGTDL

SEQ ID NO: 5513 - protein, 10 aa, synthetic construct
  REGION 1..10: note = Description of Artificial Sequence: Synthetic peptide
LPTMCDIRQL

SEQ ID NO: 5514 - protein, 10 aa, synthetic construct
  REGION 1..10: note = Description of Artificial Sequence: Synthetic peptide
LPVNVAFELW

SEQ ID NO: 5515 - protein, 12 aa, synthetic construct
  REGION 1..12: note = Description of Artificial Sequence: Synthetic peptide
LPYPDPSRILGA

SEQ ID NO: 5516 - protein, 9 aa, synthetic construct
  REGION 1..9: note = Description of Artificial Sequence: Synthetic peptide
LQDLKWARF

SEQ ID NO: 5517 - protein, 10 aa, synthetic construct
  REGION 1..10: note = Description of Artificial Sequence: Synthetic peptide
LQELGKYEQY

SEQ ID NO: 5518 - protein, 11 aa, synthetic construct
  REGION 1..11: note = Description of Artificial Sequence: Synthetic peptide
LQIPFAMQMAY

SEQ ID NO: 5519 - protein, 9 aa, synthetic construct
  REGION 1..9: note = Description of Artificial Sequence: Synthetic peptide
LQTYVTQQL

SEQ ID NO: 5520 - protein, 8 aa, synthetic construct
  REGION 1..8: note = Description of Artificial Sequence: Synthetic peptide
LRAKHYVY

SEQ ID NO: 5521 - protein, 9 aa, synthetic construct
  REGION 1..9: note = Description of Artificial Sequence: Synthetic peptide
LRAKHYVYI

SEQ ID NO: 5522 - protein, 9 aa, synthetic construct
  REGION 1..9: note = Description of Artificial Sequence: Synthetic peptide
LRDGWEIVK

SEQ ID NO: 5523 - protein, 9 aa, synthetic construct
  REGION 1..9: note = Description of Artificial Sequence: Synthetic peptide
LREVRTIKV

SEQ ID NO: 5524 - protein, 8 aa, synthetic construct
  REGION 1..8: note = Description of Artificial Sequence: Synthetic peptide
LRKGGRTI

SEQ ID NO: 5525 - protein, 8 aa, synthetic construct
  REGION 1..8: note = Description of Artificial Sequence: Synthetic peptide
LRPDTRYV

SEQ ID NO: 5526 - protein, 8 aa, synthetic construct
  REGION 1..8: note = Description of Artificial Sequence: Synthetic peptide
LRSDVLLP

SEQ ID NO: 5527 - protein, 8 aa, synthetic construct
  REGION 1..8: note = Description of Artificial Sequence: Synthetic peptide
LRVEAFEY

SEQ ID NO: 5528 - protein, 8 aa, synthetic construct
  REGION 1..8: note = Description of Artificial Sequence: Synthetic peptide
LRVIGHSM

SEQ ID NO: 5529 - protein, 12 aa, synthetic construct
  REGION 1..12: note = Description of Artificial Sequence: Synthetic peptide
LSAPTLVPQEHY

SEQ ID NO: 5530 - protein, 9 aa, synthetic construct
  REGION 1..9: note = Description of Artificial Sequence: Synthetic peptide
LSAQTGIAV

SEQ ID NO: 5531 - protein, 9 aa, synthetic construct
  REGION 1..9: note = Description of Artificial Sequence: Synthetic peptide
LSDTLKNLS

SEQ ID NO: 5532 - protein, 10 aa, synthetic construct
  REGION 1..10: note = Description of Artificial Sequence: Synthetic peptide
LSDTLKNLSD

SEQ ID NO: 5533 - protein, 8 aa, synthetic construct
  REGION 1..8: note = Description of Artificial Sequence: Synthetic peptide
LSEARQHL

SEQ ID NO: 5534 - protein, 9 aa, synthetic construct
  REGION 1..9: note = Description of Artificial Sequence: Synthetic peptide
LSEARQHLK

SEQ ID NO: 5535 - protein, 12 aa, synthetic construct
  REGION 1..12: note = Description of Artificial Sequence: Synthetic peptide
LSEMVMCGGSLY

SEQ ID NO: 5536 - protein, 8 aa, synthetic construct
  REGION 1..8: note = Description of Artificial Sequence: Synthetic peptide
LSETKCTL

SEQ ID NO: 5537 - protein, 9 aa, synthetic construct
  REGION 1..9: note = Description of Artificial Sequence: Synthetic peptide
LSFELLHAP

SEQ ID NO: 5538 - protein, 8 aa, synthetic construct
  REGION 1..8: note = Description of Artificial Sequence: Synthetic peptide
LSKGRLII

SEQ ID NO: 5539 - protein, 8 aa, synthetic construct
  REGION 1..8: note = Description of Artificial Sequence: Synthetic peptide
LSKGVHFV

SEQ ID NO: 5540 - protein, 9 aa, synthetic construct
  REGION 1..9: note = Description of Artificial Sequence: Synthetic peptide
LSKGVHFVC

SEQ ID NO: 5541 - protein, 10 aa, synthetic construct
  REGION 1..10: note = Description of Artificial Sequence: Synthetic peptide
LSKSLTENKY

SEQ ID NO: 5542 - protein, 10 aa, synthetic construct
  REGION 1..10: note = Description of Artificial Sequence: Synthetic peptide
LSLLSKGRLI

SEQ ID NO: 5543 - protein, 9 aa, synthetic construct
  REGION 1..9: note = Description of Artificial Sequence: Synthetic peptide
LSMQGAVDI

SEQ ID NO: 5544 - protein, 9 aa, synthetic construct
  REGION 1..9: note = Description of Artificial Sequence: Synthetic peptide
LSPVALRQM

SEQ ID NO: 5545 - protein, 9 aa, synthetic construct
  REGION 1..9: note = Description of Artificial Sequence: Synthetic peptide
LSRLDKVEA

SEQ ID NO: 5546 - protein, 8 aa, synthetic construct
  REGION 1..8: note = Description of Artificial Sequence: Synthetic peptide
LSTDGNKI

SEQ ID NO: 5547 - protein, 8 aa, synthetic construct
  REGION 1..8: note = Description of Artificial Sequence: Synthetic peptide
LSVCLGSL

SEQ ID NO: 5548 - protein, 10 aa, synthetic construct
  REGION 1..10: note = Description of Artificial Sequence: Synthetic peptide
LSVCLGSLIY

SEQ ID NO: 5549 - protein, 9 aa, synthetic construct
  REGION 1..9: note = Description of Artificial Sequence: Synthetic peptide
LSVLQQLRV

SEQ ID NO: 5550 - protein, 8 aa, synthetic construct
  REGION 1..8: note = Description of Artificial Sequence: Synthetic peptide
LSVVSKVV

SEQ ID NO: 5551 - protein, 9 aa, synthetic construct
  REGION 1..9: note = Description of Artificial Sequence: Synthetic peptide
LSWEVGKPR

SEQ ID NO: 5552 - protein, 10 aa, synthetic construct
  REGION 1..10: note = Description of Artificial Sequence: Synthetic peptide
LTAVVIPTKK

SEQ ID NO: 5553 - protein, 8 aa, synthetic construct
  REGION 1..8: note = Description of Artificial Sequence: Synthetic peptide
LTDEMIAQ

SEQ ID NO: 5554 - protein, 9 aa, synthetic construct
  REGION 1..9: note = Description of Artificial Sequence: Synthetic peptide
LTDNVYIKN

SEQ ID NO: 5555 - protein, 9 aa, synthetic construct
  REGION 1..9: note = Description of Artificial Sequence: Synthetic peptide
LTEEVVLKT

SEQ ID NO: 5556 - protein, 10 aa, synthetic construct
  REGION 1..10: note = Description of Artificial Sequence: Synthetic peptide
LTKGTLEPEY

SEQ ID NO: 5557 - protein, 8 aa, synthetic construct
  REGION 1..8: note = Description of Artificial Sequence: Synthetic peptide
LTLVYKVY

SEQ ID NO: 5558 - protein, 10 aa, synthetic construct
  REGION 1..10: note = Description of Artificial Sequence: Synthetic peptide
LTNNVAFQTV

SEQ ID NO: 5559 - protein, 8 aa, synthetic construct
  REGION 1..8: note = Description of Artificial Sequence: Synthetic peptide
LTPLGIDL

SEQ ID NO: 5560 - protein, 8 aa, synthetic construct
  REGION 1..8: note = Description of Artificial Sequence: Synthetic peptide
LTPTWRVY

SEQ ID NO: 5561 - protein, 8 aa, synthetic construct
  REGION 1..8: note = Description of Artificial Sequence: Synthetic peptide
LTPVYSFL

SEQ ID NO: 5562 - protein, 8 aa, synthetic construct
  REGION 1..8: note = Description of Artificial Sequence: Synthetic peptide
LTQYNRYL

SEQ ID NO: 5563 - protein, 11 aa, synthetic construct
  REGION 1..11: note = Description of Artificial Sequence: Synthetic peptide
LTQYNRYLALY

SEQ ID NO: 5564 - protein, 9 aa, synthetic construct
  REGION 1..9: note = Description of Artificial Sequence: Synthetic peptide
LTSHTVMPL

SEQ ID NO: 5565 - protein, 8 aa, synthetic construct
  REGION 1..8: note = Description of Artificial Sequence: Synthetic peptide
LTSLLVLV

SEQ ID NO: 5566 - protein, 8 aa, synthetic construct
  REGION 1..8: note = Description of Artificial Sequence: Synthetic peptide
LTVLPPLL

SEQ ID NO: 5567 - protein, 11 aa, synthetic construct
  REGION 1..11: note = Description of Artificial Sequence: Synthetic peptide
LTWICLLQFAY

SEQ ID NO: 5568 - protein, 9 aa, synthetic construct
  REGION 1..9: note = Description of Artificial Sequence: Synthetic peptide
LTYNKVENM

SEQ ID NO: 5569 - protein, 8 aa, synthetic construct
  REGION 1..8: note = Description of Artificial Sequence: Synthetic peptide
LVAAGLEA

SEQ ID NO: 5570 - protein, 9 aa, synthetic construct
  REGION 1..9: note = Description of Artificial Sequence: Synthetic peptide
LVDFQVTIA

SEQ ID NO: 5571 - protein, 11 aa, synthetic construct
  REGION 1..11: note = Description of Artificial Sequence: Synthetic peptide
LVDFQVTIAEI

SEQ ID NO: 5572 - protein, 9 aa, synthetic construct
  REGION 1..9: note = Description of Artificial Sequence: Synthetic peptide
LVDLPIGIN

SEQ ID NO: 5573 - protein, 10 aa, synthetic construct
  REGION 1..10: note = Description of Artificial Sequence: Synthetic peptide
LVDLPIGINI

SEQ ID NO: 5574 - protein, 10 aa, synthetic construct
  REGION 1..10: note = Description of Artificial Sequence: Synthetic peptide
LVDSDLNDFV

SEQ ID NO: 5575 - protein, 8 aa, synthetic construct
  REGION 1..8: note = Description of Artificial Sequence: Synthetic peptide
LVFLFVAA

SEQ ID NO: 5576 - protein, 11 aa, synthetic construct
  REGION 1..11: note = Description of Artificial Sequence: Synthetic peptide
LVFLFVAAIFY

SEQ ID NO: 5577 - protein, 9 aa, synthetic construct
  REGION 1..9: note = Description of Artificial Sequence: Synthetic peptide
LVIGFLFLT

SEQ ID NO: 5578 - protein, 11 aa, synthetic construct
  REGION 1..11: note = Description of Artificial Sequence: Synthetic peptide
LVKPSFYVYSR

SEQ ID NO: 5579 - protein, 11 aa, synthetic construct
  REGION 1..11: note = Description of Artificial Sequence: Synthetic peptide
LVLIMLIIFWF

SEQ ID NO: 5580 - protein, 9 aa, synthetic construct
  REGION 1..9: note = Description of Artificial Sequence: Synthetic peptide
LVLVQSTQW

SEQ ID NO: 5581 - protein, 10 aa, synthetic construct
  REGION 1..10: note = Description of Artificial Sequence: Synthetic peptide
LVQAGNVQLR

SEQ ID NO: 5582 - protein, 9 aa, synthetic construct
  REGION 1..9: note = Description of Artificial Sequence: Synthetic peptide
LVQMAPISA

SEQ ID NO: 5583 - protein, 9 aa, synthetic construct
  REGION 1..9: note = Description of Artificial Sequence: Synthetic peptide
LVRGFGDSV

SEQ ID NO: 5584 - protein, 11 aa, synthetic construct
  REGION 1..11: note = Description of Artificial Sequence: Synthetic peptide
LVSDIDITFLK

SEQ ID NO: 5585 - protein, 9 aa, synthetic construct
  REGION 1..9: note = Description of Artificial Sequence: Synthetic peptide
LVSDVGDSA

SEQ ID NO: 5586 - protein, 8 aa, synthetic construct
  REGION 1..8: note = Description of Artificial Sequence: Synthetic peptide
LVSSFLEM

SEQ ID NO: 5587 - protein, 9 aa, synthetic construct
  REGION 1..9: note = Description of Artificial Sequence: Synthetic peptide
LVSSFLEMK

SEQ ID NO: 5588 - protein, 9 aa, synthetic construct
  REGION 1..9: note = Description of Artificial Sequence: Synthetic peptide
LVSSQCVNL

SEQ ID NO: 5589 - protein, 9 aa, synthetic construct
  REGION 1..9: note = Description of Artificial Sequence: Synthetic peptide
LVTLAILTA

SEQ ID NO: 5590 - protein, 9 aa, synthetic construct
  REGION 1..9: note = Description of Artificial Sequence: Synthetic peptide
LWAKRNIKP

SEQ ID NO: 5591 - protein, 8 aa, synthetic construct
  REGION 1..8: note = Description of Artificial Sequence: Synthetic peptide
LWLDDVVY

SEQ ID NO: 5592 - protein, 8 aa, synthetic construct
  REGION 1..8: note = Description of Artificial Sequence: Synthetic peptide
LWPVTLAC

SEQ ID NO: 5593 - protein, 8 aa, synthetic construct
  REGION 1..8: note = Description of Artificial Sequence: Synthetic peptide
LYAFASEA

SEQ ID NO: 5594 - protein, 8 aa, synthetic construct
  REGION 1..8: note = Description of Artificial Sequence: Synthetic peptide
LYCIDGAL

SEQ ID NO: 5595 - protein, 10 aa, synthetic construct
  REGION 1..10: note = Description of Artificial Sequence: Synthetic peptide
LYDKLVSSFL

SEQ ID NO: 5596 - protein, 9 aa, synthetic construct
  REGION 1..9: note = Description of Artificial Sequence: Synthetic peptide
LYECLYRNR

SEQ ID NO: 5597 - protein, 9 aa, synthetic construct
  REGION 1..9: note = Description of Artificial Sequence: Synthetic peptide
LYFDKAGQK

SEQ ID NO: 5598 - protein, 9 aa, synthetic construct
  REGION 1..9: note = Description of Artificial Sequence: Synthetic peptide
LYFIKGLNN

SEQ ID NO: 5599 - protein, 10 aa, synthetic construct
  REGION 1..10: note = Description of Artificial Sequence: Synthetic peptide
LYIDINGNLH

SEQ ID NO: 5600 - protein, 9 aa, synthetic construct
  REGION 1..9: note = Description of Artificial Sequence: Synthetic peptide
LYKMQRMLL

SEQ ID NO: 5601 - protein, 10 aa, synthetic construct
  REGION 1..10: note = Description of Artificial Sequence: Synthetic peptide
LYLDAYNMMI

SEQ ID NO: 5602 - protein, 10 aa, synthetic construct
  REGION 1..10: note = Description of Artificial Sequence: Synthetic peptide
LYLYALVYFL

SEQ ID NO: 5603 - protein, 8 aa, synthetic construct
  REGION 1..8: note = Description of Artificial Sequence: Synthetic peptide
LYQDVNCT

SEQ ID NO: 5604 - protein, 10 aa, synthetic construct
  REGION 1..10: note = Description of Artificial Sequence: Synthetic peptide
LYQDVNCTEV

SEQ ID NO: 5605 - protein, 8 aa, synthetic construct
  REGION 1..8: note = Description of Artificial Sequence: Synthetic peptide
LYQPPQTS

SEQ ID NO: 5606 - protein, 9 aa, synthetic construct
  REGION 1..9: note = Description of Artificial Sequence: Synthetic peptide
LYRKCVKSR

SEQ ID NO: 5607 - protein, 10 aa, synthetic construct
  REGION 1..10: note = Description of Artificial Sequence: Synthetic peptide
LYSPIFLIVA

SEQ ID NO: 5608 - protein, 9 aa, synthetic construct
  REGION 1..9: note = Description of Artificial Sequence: Synthetic peptide
LYVNKHAFH

SEQ ID NO: 5609 - protein, 9 aa, synthetic construct
  REGION 1..9: note = Description of Artificial Sequence: Synthetic peptide
LYYDSMSYE

SEQ ID NO: 5610 - protein, 8 aa, synthetic construct
  REGION 1..8: note = Description of Artificial Sequence: Synthetic peptide
MAPISAMV

SEQ ID NO: 5611 - protein, 10 aa, synthetic construct
  REGION 1..10: note = Description of Artificial Sequence: Synthetic peptide
MATNYDLSVV

SEQ ID NO: 5612 - protein, 8 aa, synthetic construct
  REGION 1..8: note = Description of Artificial Sequence: Synthetic peptide
MAYITGGV

SEQ ID NO: 5613 - protein, 8 aa, synthetic construct
  REGION 1..8: note = Description of Artificial Sequence: Synthetic peptide
MAYRFNGI

SEQ ID NO: 5614 - protein, 10 aa, synthetic construct
  REGION 1..10: note = Description of Artificial Sequence: Synthetic peptide
MAYRFNGIGV

SEQ ID NO: 5615 - protein, 8 aa, synthetic construct
  REGION 1..8: note = Description of Artificial Sequence: Synthetic peptide
MCASLKEL

SEQ ID NO: 5616 - protein, 9 aa, synthetic construct
  REGION 1..9: note = Description of Artificial Sequence: Synthetic peptide
MCASLKELL

SEQ ID NO: 5617 - protein, 9 aa, synthetic construct
  REGION 1..9: note = Description of Artificial Sequence: Synthetic peptide
MDNSPNLAW

SEQ ID NO: 5618 - protein, 8 aa, synthetic construct
  REGION 1..8: note = Description of Artificial Sequence: Synthetic peptide
MDSTVKNY

SEQ ID NO: 5619 - protein, 8 aa, synthetic construct
  REGION 1..8: note = Description of Artificial Sequence: Synthetic peptide
MELPTGVH

SEQ ID NO: 5620 - protein, 9 aa, synthetic construct
  REGION 1..9: note = Description of Artificial Sequence: Synthetic peptide
MESEFRVYS

SEQ ID NO: 5621 - protein, 8 aa, synthetic construct
  REGION 1..8: note = Description of Artificial Sequence: Synthetic peptide
MESLVPGF

SEQ ID NO: 5622 - protein, 12 aa, synthetic construct
  REGION 1..12: note = Description of Artificial Sequence: Synthetic peptide
MEVTPSGTWLTY

SEQ ID NO: 5623 - protein, 8 aa, synthetic construct
  REGION 1..8: note = Description of Artificial Sequence: Synthetic peptide
MFITREEA

SEQ ID NO: 5624 - protein, 9 aa, synthetic construct
  REGION 1..9: note = Description of Artificial Sequence: Synthetic peptide
MFITREEAI

SEQ ID NO: 5625 - protein, 9 aa, synthetic construct
  REGION 1..9: note = Description of Artificial Sequence: Synthetic peptide
MGHFAWWTA

SEQ ID NO: 5626 - protein, 9 aa, synthetic construct
  REGION 1..9: note = Description of Artificial Sequence: Synthetic peptide
MHHMELPTG

SEQ ID NO: 5627 - protein, 10 aa, synthetic construct
  REGION 1..10: note = Description of Artificial Sequence: Synthetic peptide
MIELSLIDFY

SEQ ID NO: 5628 - protein, 8 aa, synthetic construct
  REGION 1..8: note = Description of Artificial Sequence: Synthetic peptide
MILSLLSK

SEQ ID NO: 5629 - protein, 10 aa, synthetic construct
  REGION 1..10: note = Description of Artificial Sequence: Synthetic peptide
MILSLLSKGR

SEQ ID NO: 5630 - protein, 9 aa, synthetic construct
  REGION 1..9: note = Description of Artificial Sequence: Synthetic peptide
MISAGFSLW

SEQ ID NO: 5631 - protein, 9 aa, synthetic construct
  REGION 1..9: note = Description of Artificial Sequence: Synthetic peptide
MKDLSPRWY

SEQ ID NO: 5632 - protein, 9 aa, synthetic construct
  REGION 1..9: note = Description of Artificial Sequence: Synthetic peptide
MKFLVFLGI

SEQ ID NO: 5633 - protein, 9 aa, synthetic construct
  REGION 1..9: note = Description of Artificial Sequence: Synthetic peptide
MLTNDNTSR

SEQ ID NO: 5634 - protein, 10 aa, synthetic construct
  REGION 1..10: note = Description of Artificial Sequence: Synthetic peptide
MPASWVMRIM

SEQ ID NO: 5635 - protein, 8 aa, synthetic construct
  REGION 1..8: note = Description of Artificial Sequence: Synthetic peptide
MPILTLTR

SEQ ID NO: 5636 - protein, 9 aa, synthetic construct
  REGION 1..9: note = Description of Artificial Sequence: Synthetic peptide
MPILTLTRA

SEQ ID NO: 5637 - protein, 8 aa, synthetic construct
  REGION 1..8: note = Description of Artificial Sequence: Synthetic peptide
MPLGYVTH

SEQ ID NO: 5638 - protein, 9 aa, synthetic construct
  REGION 1..9: note = Description of Artificial Sequence: Synthetic peptide
MPLGYVTHG

SEQ ID NO: 5639 - protein, 10 aa, synthetic construct
  REGION 1..10: note = Description of Artificial Sequence: Synthetic peptide
MPLSAPTLVP

SEQ ID NO: 5640 - protein, 10 aa, synthetic construct
  REGION 1..10: note = Description of Artificial Sequence: Synthetic peptide
MPNLYKMQRM

SEQ ID NO: 5641 - protein, 8 aa, synthetic construct
  REGION 1..8: note = Description of Artificial Sequence: Synthetic peptide
MPNMLRIM

SEQ ID NO: 5642 - protein, 9 aa, synthetic construct
  REGION 1..9: note = Description of Artificial Sequence: Synthetic peptide
MPNMLRIMA

SEQ ID NO: 5643 - protein, 10 aa, synthetic construct
  REGION 1..10: note = Description of Artificial Sequence: Synthetic peptide
MPTTIAKNTV

SEQ ID NO: 5644 - protein, 10 aa, synthetic construct
  REGION 1..10: note = Description of Artificial Sequence: Synthetic peptide
MPYFFTLLLQ

SEQ ID NO: 5645 - protein, 8 aa, synthetic construct
  REGION 1..8: note = Description of Artificial Sequence: Synthetic peptide
MQNCVLKL

SEQ ID NO: 5646 - protein, 11 aa, synthetic construct
  REGION 1..11: note = Description of Artificial Sequence: Synthetic peptide
MRIFTIGTVTL

SEQ ID NO: 5647 - protein, 9 aa, synthetic construct
  REGION 1..9: note = Description of Artificial Sequence: Synthetic peptide
MRPNFTIKG

SEQ ID NO: 5648 - protein, 9 aa, synthetic construct
  REGION 1..9: note = Description of Artificial Sequence: Synthetic peptide
MSALNHTKK

SEQ ID NO: 5649 - protein, 10 aa, synthetic construct
  REGION 1..10: note = Description of Artificial Sequence: Synthetic peptide
MSDVKCTSVV

SEQ ID NO: 5650 - protein, 9 aa, synthetic construct
  REGION 1..9: note = Description of Artificial Sequence: Synthetic peptide
MSLSEQLRK

SEQ ID NO: 5651 - protein, 9 aa, synthetic construct
  REGION 1..9: note = Description of Artificial Sequence: Synthetic peptide
MTNRQFHQK

SEQ ID NO: 5652 - protein, 9 aa, synthetic construct
  REGION 1..9: note = Description of Artificial Sequence: Synthetic peptide
MTPRDLGAC

SEQ ID NO: 5653 - protein, 11 aa, synthetic construct
  REGION 1..11: note = Description of Artificial Sequence: Synthetic peptide
MTYGQQFGPTY

SEQ ID NO: 5654 - protein, 8 aa, synthetic construct
  REGION 1..8: note = Description of Artificial Sequence: Synthetic peptide
MVLGSLAA

SEQ ID NO: 5655 - protein, 10 aa, synthetic construct
  REGION 1..10: note = Description of Artificial Sequence: Synthetic peptide
MVPHISRQRL

SEQ ID NO: 5656 - protein, 9 aa, synthetic construct
  REGION 1..9: note = Description of Artificial Sequence: Synthetic peptide
MVYMPASWV

SEQ ID NO: 5657 - protein, 10 aa, synthetic construct
  REGION 1..10: note = Description of Artificial Sequence: Synthetic peptide
MYASAVVLLI

SEQ ID NO: 5658 - protein, 9 aa, synthetic construct
  REGION 1..9: note = Description of Artificial Sequence: Synthetic peptide
MYDPKTKNV

SEQ ID NO: 5659 - protein, 10 aa, synthetic construct
  REGION 1..10: note = Description of Artificial Sequence: Synthetic peptide
MYIFFASFYY

SEQ ID NO: 5660 - protein, 11 aa, synthetic construct
  REGION 1..11: note = Description of Artificial Sequence: Synthetic peptide
MYKGLPWNVVR

SEQ ID NO: 5661 - protein, 11 aa, synthetic construct
  REGION 1..11: note = Description of Artificial Sequence: Synthetic peptide
MYMGTLSYEQF

SEQ ID NO: 5662 - protein, 9 aa, synthetic construct
  REGION 1..9: note = Description of Artificial Sequence: Synthetic peptide
NAAISDYDY

SEQ ID NO: 5663 - protein, 9 aa, synthetic construct
  REGION 1..9: note = Description of Artificial Sequence: Synthetic peptide
NAANVYLKH

SEQ ID NO: 5664 - protein, 9 aa, synthetic construct
  REGION 1..9: note = Description of Artificial Sequence: Synthetic peptide
NADIVEEAK

SEQ ID NO: 5665 - protein, 9 aa, synthetic construct
  REGION 1..9: note = Description of Artificial Sequence: Synthetic peptide
NALPETTAD

SEQ ID NO: 5666 - protein, 9 aa, synthetic construct
  REGION 1..9: note = Description of Artificial Sequence: Synthetic peptide
NARLRAKHY

SEQ ID NO: 5667 - protein, 8 aa, synthetic construct
  REGION 1..8: note = Description of Artificial Sequence: Synthetic peptide
NASSSEAF

SEQ ID NO: 5668 - protein, 9 aa, synthetic construct
  REGION 1..9: note = Description of Artificial Sequence: Synthetic peptide
NASVVNIQK

SEQ ID NO: 5669 - protein, 8 aa, synthetic construct
  REGION 1..8: note = Description of Artificial Sequence: Synthetic peptide
NCDVVIGI

SEQ ID NO: 5670 - protein, 9 aa, synthetic construct
  REGION 1..9: note = Description of Artificial Sequence: Synthetic peptide
NCYLATALL

SEQ ID NO: 5671 - protein, 10 aa, synthetic construct
  REGION 1..10: note = Description of Artificial Sequence: Synthetic peptide
NDFNLVAMKY

SEQ ID NO: 5672 - protein, 8 aa, synthetic construct
  REGION 1..8: note = Description of Artificial Sequence: Synthetic peptide
NDMILSLL

SEQ ID NO: 5673 - protein, 11 aa, synthetic construct
  REGION 1..11: note = Description of Artificial Sequence: Synthetic peptide
NEEIAIILASF

SEQ ID NO: 5674 - protein, 10 aa, synthetic construct
  REGION 1..10: note = Description of Artificial Sequence: Synthetic peptide
NEFYAYLRKH

SEQ ID NO: 5675 - protein, 11 aa, synthetic construct
  REGION 1..11: note = Description of Artificial Sequence: Synthetic peptide
NEFYAYLRKHF

SEQ ID NO: 5676 - protein, 12 aa, synthetic construct
  REGION 1..12: note = Description of Artificial Sequence: Synthetic peptide
NEKQEILGTVSW

SEQ ID NO: 5677 - protein, 10 aa, synthetic construct
  REGION 1..10: note = Description of Artificial Sequence: Synthetic peptide
NELSPVALRQ

SEQ ID NO: 5678 - protein, 11 aa, synthetic construct
  REGION 1..11: note = Description of Artificial Sequence: Synthetic peptide
NELSPVALRQM

SEQ ID NO: 5679 - protein, 12 aa, synthetic construct
  REGION 1..12: note = Description of Artificial Sequence: Synthetic peptide
NELSRVLGLKTL

SEQ ID NO: 5680 - protein, 10 aa, synthetic construct
  REGION 1..10: note = Description of Artificial Sequence: Synthetic peptide
NESGLKTILR

SEQ ID NO: 5681 - protein, 11 aa, synthetic construct
  REGION 1..11: note = Description of Artificial Sequence: Synthetic peptide
NETLVTMPLGY

SEQ ID NO: 5682 - protein, 11 aa, synthetic construct
  REGION 1..11: note = Description of Artificial Sequence: Synthetic peptide
NEVAKNLNESL

SEQ ID NO: 5683 - protein, 8 aa, synthetic construct
  REGION 1..8: note = Description of Artificial Sequence: Synthetic peptide
NFGAISSV

SEQ ID NO: 5684 - protein, 10 aa, synthetic construct
  REGION 1..10: note = Description of Artificial Sequence: Synthetic peptide
NFKNLREFVF

SEQ ID NO: 5685 - protein, 9 aa, synthetic construct
  REGION 1..9: note = Description of Artificial Sequence: Synthetic peptide
NFLVQAGNV

SEQ ID NO: 5686 - protein, 9 aa, synthetic construct
  REGION 1..9: note = Description of Artificial Sequence: Synthetic peptide
NFNFNGLTG

SEQ ID NO: 5687 - protein, 8 aa, synthetic construct
  REGION 1..8: note = Description of Artificial Sequence: Synthetic peptide
NFTIKGSF

SEQ ID NO: 5688 - protein, 8 aa, synthetic construct
  REGION 1..8: note = Description of Artificial Sequence: Synthetic peptide
NFTTAPAI

SEQ ID NO: 5689 - protein, 9 aa, synthetic construct
  REGION 1..9: note = Description of Artificial Sequence: Synthetic peptide
NGDSEVVLK

SEQ ID NO: 5690 - protein, 9 aa, synthetic construct
  REGION 1..9: note = Description of Artificial Sequence: Synthetic peptide
NGDVVAIDY

SEQ ID NO: 5691 - protein, 9 aa, synthetic construct
  REGION 1..9: note = Description of Artificial Sequence: Synthetic peptide
NGIGVTQNV

SEQ ID NO: 5692 - protein, 9 aa, synthetic construct
  REGION 1..9: note = Description of Artificial Sequence: Synthetic peptide
NGLTGTGVL

SEQ ID NO: 5693 - protein, 8 aa, synthetic construct
  REGION 1..8: note = Description of Artificial Sequence: Synthetic peptide
NGMNGRTI

SEQ ID NO: 5694 - protein, 9 aa, synthetic construct
  REGION 1..9: note = Description of Artificial Sequence: Synthetic peptide
NGTITVEEL

SEQ ID NO: 5695 - protein, 8 aa, synthetic construct
  REGION 1..8: note = Description of Artificial Sequence: Synthetic peptide
NGVSFSTF

SEQ ID NO: 5696 - protein, 8 aa, synthetic construct
  REGION 1..8: note = Description of Artificial Sequence: Synthetic peptide
NGYPNMFI

SEQ ID NO: 5697 - protein, 8 aa, synthetic construct
  REGION 1..8: note = Description of Artificial Sequence: Synthetic peptide
NHDLYCQV

SEQ ID NO: 5698 - protein, 8 aa, synthetic construct
  REGION 1..8: note = Description of Artificial Sequence: Synthetic peptide
NHNFLVQA

SEQ ID NO: 5699 - protein, 8 aa, synthetic construct
  REGION 1..8: note = Description of Artificial Sequence: Synthetic peptide
NIDGYFKI

SEQ ID NO: 5700 - protein, 10 aa, synthetic construct
  REGION 1..10: note = Description of Artificial Sequence: Synthetic peptide
NIFGTVYEKL

SEQ ID NO: 5701 - protein, 10 aa, synthetic construct
  REGION 1..10: note = Description of Artificial Sequence: Synthetic peptide
NIIPLTTAAK

SEQ ID NO: 5702 - protein, 8 aa, synthetic construct
  REGION 1..8: note = Description of Artificial Sequence: Synthetic peptide
NILLNVPL

SEQ ID NO: 5703 - protein, 9 aa, synthetic construct
  REGION 1..9: note = Description of Artificial Sequence: Synthetic peptide
NIQKEIDRL

SEQ ID NO: 5704 - protein, 9 aa, synthetic construct
  REGION 1..9: note = Description of Artificial Sequence: Synthetic peptide
NITFELDER

SEQ ID NO: 5705 - protein, 8 aa, synthetic construct
  REGION 1..8: note = Description of Artificial Sequence: Synthetic peptide
NITRFQTL

SEQ ID NO: 5706 - protein, 9 aa, synthetic construct
  REGION 1..9: note = Description of Artificial Sequence: Synthetic peptide
NIVTRCLNR

SEQ ID NO: 5707 - protein, 9 aa, synthetic construct
  REGION 1..9: note = Description of Artificial Sequence: Synthetic peptide
NKSWMESEF

SEQ ID NO: 5708 - protein, 9 aa, synthetic construct
  REGION 1..9: note = Description of Artificial Sequence: Synthetic peptide
NKWDLIISD

SEQ ID NO: 5709 - protein, 10 aa, synthetic construct
  REGION 1..10: note = Description of Artificial Sequence: Synthetic peptide
NLAWPLIVTA

SEQ ID NO: 5710 - protein, 8 aa, synthetic construct
  REGION 1..8: note = Description of Artificial Sequence: Synthetic peptide
NLDKSAGF

SEQ ID NO: 5711 - protein, 12 aa, synthetic construct
  REGION 1..12: note = Description of Artificial Sequence: Synthetic peptide
NLDSKVGGNYNY

SEQ ID NO: 5712 - protein, 9 aa, synthetic construct
  REGION 1..9: note = Description of Artificial Sequence: Synthetic peptide
NLEEAARYM

SEQ ID NO: 5713 - protein, 9 aa, synthetic construct
  REGION 1..9: note = Description of Artificial Sequence: Synthetic peptide
NLGERVRQA

SEQ ID NO: 5714 - protein, 9 aa, synthetic construct
  REGION 1..9: note = Description of Artificial Sequence: Synthetic peptide
NLGETFVTH

SEQ ID NO: 5715 - protein, 9 aa, synthetic construct
  REGION 1..9: note = Description of Artificial Sequence: Synthetic peptide
NLKPFERDI

SEQ ID NO: 5716 - protein, 9 aa, synthetic construct
  REGION 1..9: note = Description of Artificial Sequence: Synthetic peptide
NLKQLPFFY

SEQ ID NO: 5717 - protein, 10 aa, synthetic construct
  REGION 1..10: note = Description of Artificial Sequence: Synthetic peptide
NLKQLPFFYY

SEQ ID NO: 5718 - protein, 11 aa, synthetic construct
  REGION 1..11: note = Description of Artificial Sequence: Synthetic peptide
NLLEILQKEKV

SEQ ID NO: 5719 - protein, 10 aa, synthetic construct
  REGION 1..10: note = Description of Artificial Sequence: Synthetic peptide
NLLLLFVTVY

SEQ ID NO: 5720 - protein, 8 aa, synthetic construct
  REGION 1..8: note = Description of Artificial Sequence: Synthetic peptide
NLNRGMVL

SEQ ID NO: 5721 - protein, 9 aa, synthetic construct
  REGION 1..9: note = Description of Artificial Sequence: Synthetic peptide
NLPFKLTCA

SEQ ID NO: 5722 - protein, 9 aa, synthetic construct
  REGION 1..9: note = Description of Artificial Sequence: Synthetic peptide
NLQHRLYEC

SEQ ID NO: 5723 - protein, 9 aa, synthetic construct
  REGION 1..9: note = Description of Artificial Sequence: Synthetic peptide
NLREFVFKN

SEQ ID NO: 5724 - protein, 9 aa, synthetic construct
  REGION 1..9: note = Description of Artificial Sequence: Synthetic peptide
NLREMLAHA

SEQ ID NO: 5725 - protein, 8 aa, synthetic construct
  REGION 1..8: note = Description of Artificial Sequence: Synthetic peptide
NLSDRVVF

SEQ ID NO: 5726 - protein, 8 aa, synthetic construct
  REGION 1..8: note = Description of Artificial Sequence: Synthetic peptide
NLTTRTQL

SEQ ID NO: 5727 - protein, 8 aa, synthetic construct
  REGION 1..8: note = Description of Artificial Sequence: Synthetic peptide
NNLVVMAY

SEQ ID NO: 5728 - protein, 9 aa, synthetic construct
  REGION 1..9: note = Description of Artificial Sequence: Synthetic peptide
NPETNILLN

SEQ ID NO: 5729 - protein, 9 aa, synthetic construct
  REGION 1..9: note = Description of Artificial Sequence: Synthetic peptide
NPHLMGWDY

SEQ ID NO: 5730 - protein, 9 aa, synthetic construct
  REGION 1..9: note = Description of Artificial Sequence: Synthetic peptide
NPKAIKCVP

SEQ ID NO: 5731 - protein, 8 aa, synthetic construct
  REGION 1..8: note = Description of Artificial Sequence: Synthetic peptide
NPKGFCDL

SEQ ID NO: 5732 - protein, 9 aa, synthetic construct
  REGION 1..9: note = Description of Artificial Sequence: Synthetic peptide
NPPALQDAY

SEQ ID NO: 5733 - protein, 9 aa, synthetic construct
  REGION 1..9: note = Description of Artificial Sequence: Synthetic peptide
NPTDQSSYI

SEQ ID NO: 5734 - protein, 11 aa, synthetic construct
  REGION 1..11: note = Description of Artificial Sequence: Synthetic peptide
NQEYADVFHLY

SEQ ID NO: 5735 - protein, 8 aa, synthetic construct
  REGION 1..8: note = Description of Artificial Sequence: Synthetic peptide
NQHEVLLA

SEQ ID NO: 5736 - protein, 9 aa, synthetic construct
  REGION 1..9: note = Description of Artificial Sequence: Synthetic peptide
NQHEVLLAP

SEQ ID NO: 5737 - protein, 10 aa, synthetic construct
  REGION 1..10: note = Description of Artificial Sequence: Synthetic peptide
NQRNAPRITF

SEQ ID NO: 5738 - protein, 9 aa, synthetic construct
  REGION 1..9: note = Description of Artificial Sequence: Synthetic peptide
NRARTVAGV

SEQ ID NO: 5739 - protein, 8 aa, synthetic construct
  REGION 1..8: note = Description of Artificial Sequence: Synthetic peptide
NRDVDTDF

SEQ ID NO: 5740 - protein, 9 aa, synthetic construct
  REGION 1..9: note = Description of Artificial Sequence: Synthetic peptide
NRDVDTDFV

SEQ ID NO: 5741 - protein, 10 aa, synthetic construct
  REGION 1..10: note = Description of Artificial Sequence: Synthetic peptide
NRFLYIIKLI

SEQ ID NO: 5742 - protein, 8 aa, synthetic construct
  REGION 1..8: note = Description of Artificial Sequence: Synthetic peptide
NRFNVAIT

SEQ ID NO: 5743 - protein, 10 aa, synthetic construct
  REGION 1..10: note = Description of Artificial Sequence: Synthetic peptide
NRFTTTLNDF

SEQ ID NO: 5744 - protein, 8 aa, synthetic construct
  REGION 1..8: note = Description of Artificial Sequence: Synthetic peptide
NRVCGVSA

SEQ ID NO: 5745 - protein, 9 aa, synthetic construct
  REGION 1..9: note = Description of Artificial Sequence: Synthetic peptide
NRVVISSDV

SEQ ID NO: 5746 - protein, 9 aa, synthetic construct
  REGION 1..9: note = Description of Artificial Sequence: Synthetic peptide
NRYFRLTLG

SEQ ID NO: 5747 - protein, 10 aa, synthetic construct
  REGION 1..10: note = Description of Artificial Sequence: Synthetic peptide
NRYFRLTLGV

SEQ ID NO: 5748 - protein, 9 aa, synthetic construct
  REGION 1..9: note = Description of Artificial Sequence: Synthetic peptide
NRYLALYNK

SEQ ID NO: 5749 - protein, 9 aa, synthetic construct
  REGION 1..9: note = Description of Artificial Sequence: Synthetic peptide
NSASFSTFK

SEQ ID NO: 5750 - protein, 9 aa, synthetic construct
  REGION 1..9: note = Description of Artificial Sequence: Synthetic peptide
NSFDVLKSE

SEQ ID NO: 5751 - protein, 8 aa, synthetic construct
  REGION 1..8: note = Description of Artificial Sequence: Synthetic peptide
NSGSDVLY

SEQ ID NO: 5752 - protein, 9 aa, synthetic construct
  REGION 1..9: note = Description of Artificial Sequence: Synthetic peptide
NSLKITEEV

SEQ ID NO: 5753 - protein, 9 aa, synthetic construct
  REGION 1..9: note = Description of Artificial Sequence: Synthetic peptide
NSPRRARSV

SEQ ID NO: 5754 - protein, 9 aa, synthetic construct
  REGION 1..9: note = Description of Artificial Sequence: Synthetic peptide
NSQNAVASK

SEQ ID NO: 5755 - protein, 8 aa, synthetic construct
  REGION 1..8: note = Description of Artificial Sequence: Synthetic peptide
NSTPGSSR

SEQ ID NO: 5756 - protein, 8 aa, synthetic construct
  REGION 1..8: note = Description of Artificial Sequence: Synthetic peptide
NSVPWDTI

SEQ ID NO: 5757 - protein, 8 aa, synthetic construct
  REGION 1..8: note = Description of Artificial Sequence: Synthetic peptide
NSWLMWLI

SEQ ID NO: 5758 - protein, 9 aa, synthetic construct
  REGION 1..9: note = Description of Artificial Sequence: Synthetic peptide
NTDFSRVSA

SEQ ID NO: 5759 - protein, 9 aa, synthetic construct
  REGION 1..9: note = Description of Artificial Sequence: Synthetic peptide
NTDHSSSSD

SEQ ID NO: 5760 - protein, 9 aa, synthetic construct
  REGION 1..9: note = Description of Artificial Sequence: Synthetic peptide
NTLQCIMLV

SEQ ID NO: 5761 - protein, 9 aa, synthetic construct
  REGION 1..9: note = Description of Artificial Sequence: Synthetic peptide
NTLTLAVPY

SEQ ID NO: 5762 - protein, 10 aa, synthetic construct
  REGION 1..10: note = Description of Artificial Sequence: Synthetic peptide
NTPKDHIGTR

SEQ ID NO: 5763 - protein, 10 aa, synthetic construct
  REGION 1..10: note = Description of Artificial Sequence: Synthetic peptide
NTQEVFAQVK

SEQ ID NO: 5764 - protein, 8 aa, synthetic construct
  REGION 1..8: note = Description of Artificial Sequence: Synthetic peptide
NTWCIRCL

SEQ ID NO: 5765 - protein, 9 aa, synthetic construct
  REGION 1..9: note = Description of Artificial Sequence: Synthetic peptide
NVAKSEFDR

SEQ ID NO: 5766 - protein, 8 aa, synthetic construct
  REGION 1..8: note = Description of Artificial Sequence: Synthetic peptide
NVANYQKV

SEQ ID NO: 5767 - protein, 9 aa, synthetic construct
  REGION 1..9: note = Description of Artificial Sequence: Synthetic peptide
NVATLQAEN

SEQ ID NO: 5768 - protein, 9 aa, synthetic construct
  REGION 1..9: note = Description of Artificial Sequence: Synthetic peptide
NVLYENQKL

SEQ ID NO: 5769 - protein, 10 aa, synthetic construct
  REGION 1..10: note = Description of Artificial Sequence: Synthetic peptide
NVNKGEDIQL

SEQ ID NO: 5770 - protein, 9 aa, synthetic construct
  REGION 1..9: note = Description of Artificial Sequence: Synthetic peptide
NVNRFNVAI

SEQ ID NO: 5771 - protein, 11 aa, synthetic construct
  REGION 1..11: note = Description of Artificial Sequence: Synthetic peptide
NVNRFNVAITR

SEQ ID NO: 5772 - protein, 8 aa, synthetic construct
  REGION 1..8: note = Description of Artificial Sequence: Synthetic peptide
NVSLDNVL

SEQ ID NO: 5773 - protein, 10 aa, synthetic construct
  REGION 1..10: note = Description of Artificial Sequence: Synthetic peptide
NVSLVKPSFY

SEQ ID NO: 5774 - protein, 8 aa, synthetic construct
  REGION 1..8: note = Description of Artificial Sequence: Synthetic peptide
NVTQAFGR

SEQ ID NO: 5775 - protein, 9 aa, synthetic construct
  REGION 1..9: note = Description of Artificial Sequence: Synthetic peptide
NVTQAFGRR

SEQ ID NO: 5776 - protein, 10 aa, synthetic construct
  REGION 1..10: note = Description of Artificial Sequence: Synthetic peptide
NVVTTKIALK

SEQ ID NO: 5777 - protein, 8 aa, synthetic construct
  REGION 1..8: note = Description of Artificial Sequence: Synthetic peptide
NVYIKNAD

SEQ ID NO: 5778 - protein, 9 aa, synthetic construct
  REGION 1..9: note = Description of Artificial Sequence: Synthetic peptide
NYEDLLIRK

SEQ ID NO: 5779 - protein, 8 aa, synthetic construct
  REGION 1..8: note = Description of Artificial Sequence: Synthetic peptide
NYFITDAQ

SEQ ID NO: 5780 - protein, 11 aa, synthetic construct
  REGION 1..11: note = Description of Artificial Sequence: Synthetic peptide
NYFLCWHTNCY

SEQ ID NO: 5781 - protein, 9 aa, synthetic construct
  REGION 1..9: note = Description of Artificial Sequence: Synthetic peptide
NYGDSATLP

SEQ ID NO: 5782 - protein, 8 aa, synthetic construct
  REGION 1..8: note = Description of Artificial Sequence: Synthetic peptide
NYIAQVDV

SEQ ID NO: 5783 - protein, 9 aa, synthetic construct
  REGION 1..9: note = Description of Artificial Sequence: Synthetic peptide
NYIAQVDVV

SEQ ID NO: 5784 - protein, 10 aa, synthetic construct
  REGION 1..10: note = Description of Artificial Sequence: Synthetic peptide
NYLGKPREQI

SEQ ID NO: 5785 - protein, 9 aa, synthetic construct
  REGION 1..9: note = Description of Artificial Sequence: Synthetic peptide
NYLKSPNFS

SEQ ID NO: 5786 - protein, 11 aa, synthetic construct
  REGION 1..11: note = Description of Artificial Sequence: Synthetic peptide
NYLKSPNFSKL

SEQ ID NO: 5787 - protein, 9 aa, synthetic construct
  REGION 1..9: note = Description of Artificial Sequence: Synthetic peptide
NYLYRLFRK

SEQ ID NO: 5788 - protein, 11 aa, synthetic construct
  REGION 1..11: note = Description of Artificial Sequence: Synthetic peptide
NYMPYFFTLLL

SEQ ID NO: 5789 - protein, 10 aa, synthetic construct
  REGION 1..10: note = Description of Artificial Sequence: Synthetic peptide
NYNYLYRLFR

SEQ ID NO: 5790 - protein, 8 aa, synthetic construct
  REGION 1..8: note = Description of Artificial Sequence: Synthetic peptide
NYQHEETI

SEQ ID NO: 5791 - protein, 11 aa, synthetic construct
  REGION 1..11: note = Description of Artificial Sequence: Synthetic peptide
NYQHEETIYNL

SEQ ID NO: 5792 - protein, 9 aa, synthetic construct
  REGION 1..9: note = Description of Artificial Sequence: Synthetic peptide
NYQVNGYPN

SEQ ID NO: 5793 - protein, 11 aa, synthetic construct
  REGION 1..11: note = Description of Artificial Sequence: Synthetic peptide
NYSGVVTTVMF

SEQ ID NO: 5794 - protein, 9 aa, synthetic construct
  REGION 1..9: note = Description of Artificial Sequence: Synthetic peptide
PALQDAYYR

SEQ ID NO: 5795 - protein, 8 aa, synthetic construct
  REGION 1..8: note = Description of Artificial Sequence: Synthetic peptide
PDDQIGYY

SEQ ID NO: 5796 - protein, 10 aa, synthetic construct
  REGION 1..10: note = Description of Artificial Sequence: Synthetic peptide
PELDSFKEEL

SEQ ID NO: 5797 - protein, 9 aa, synthetic construct
  REGION 1..9: note = Description of Artificial Sequence: Synthetic peptide
PETNILLNV

SEQ ID NO: 5798 - protein, 9 aa, synthetic construct
  REGION 1..9: note = Description of Artificial Sequence: Synthetic peptide
PFAMGIIAM

SEQ ID NO: 5799 - protein, 10 aa, synthetic construct
  REGION 1..10: note = Description of Artificial Sequence: Synthetic peptide
PFHPLADNKF

SEQ ID NO: 5800 - protein, 8 aa, synthetic construct
  REGION 1..8: note = Description of Artificial Sequence: Synthetic peptide
PFLYLYAL

SEQ ID NO: 5801 - protein, 9 aa, synthetic construct
  REGION 1..9: note = Description of Artificial Sequence: Synthetic peptide
PFMIDVQQW

SEQ ID NO: 5802 - protein, 9 aa, synthetic construct
  REGION 1..9: note = Description of Artificial Sequence: Synthetic peptide
PFNKWGKAR

SEQ ID NO: 5803 - protein, 9 aa, synthetic construct
  REGION 1..9: note = Description of Artificial Sequence: Synthetic peptide
PFTIYSLLL

SEQ ID NO: 5804 - protein, 10 aa, synthetic construct
  REGION 1..10: note = Description of Artificial Sequence: Synthetic peptide
PFVVSTGYHF

SEQ ID NO: 5805 - protein, 8 aa, synthetic construct
  REGION 1..8: note = Description of Artificial Sequence: Synthetic peptide
PFWITIAY

SEQ ID NO: 5806 - protein, 9 aa, synthetic construct
  REGION 1..9: note = Description of Artificial Sequence: Synthetic peptide
PGCDGGSLY

SEQ ID NO: 5807 - protein, 8 aa, synthetic construct
  REGION 1..8: note = Description of Artificial Sequence: Synthetic peptide
PGLPGTIL

SEQ ID NO: 5808 - protein, 9 aa, synthetic construct
  REGION 1..9: note = Description of Artificial Sequence: Synthetic peptide
PIFLIVAAI

SEQ ID NO: 5809 - protein, 9 aa, synthetic construct
  REGION 1..9: note = Description of Artificial Sequence: Synthetic peptide
PIYDEPTTT

SEQ ID NO: 5810 - protein, 9 aa, synthetic construct
  REGION 1..9: note = Description of Artificial Sequence: Synthetic peptide
PLCANGQVF

SEQ ID NO: 5811 - protein, 9 aa, synthetic construct
  REGION 1..9: note = Description of Artificial Sequence: Synthetic peptide
PLLESELVI

SEQ ID NO: 5812 - protein, 9 aa, synthetic construct
  REGION 1..9: note = Description of Artificial Sequence: Synthetic peptide
PMDSTVKNY

SEQ ID NO: 5813 - protein, 9 aa, synthetic construct
  REGION 1..9: note = Description of Artificial Sequence: Synthetic peptide
PPISFPLCA

SEQ ID NO: 5814 - protein, 9 aa, synthetic construct
  REGION 1..9: note = Description of Artificial Sequence: Synthetic peptide
PPKNSIDAF

SEQ ID NO: 5815 - protein, 9 aa, synthetic construct
  REGION 1..9: note = Description of Artificial Sequence: Synthetic peptide
PPQTSITSA

SEQ ID NO: 5816 - protein, 8 aa, synthetic construct
  REGION 1..8: note = Description of Artificial Sequence: Synthetic peptide
PPTSFGPL

SEQ ID NO: 5817 - protein, 8 aa, synthetic construct
  REGION 1..8: note = Description of Artificial Sequence: Synthetic peptide
PQNAVVKI

SEQ ID NO: 5818 - protein, 10 aa, synthetic construct
  REGION 1..10: note = Description of Artificial Sequence: Synthetic peptide
PQSAPHGVVF

SEQ ID NO: 5819 - protein, 8 aa, synthetic construct
  REGION 1..8: note = Description of Artificial Sequence: Synthetic peptide
PRRNVATL

SEQ ID NO: 5820 - protein, 8 aa, synthetic construct
  REGION 1..8: note = Description of Artificial Sequence: Synthetic peptide
PRWYFYYL

SEQ ID NO: 5821 - protein, 8 aa, synthetic construct
  REGION 1..8: note = Description of Artificial Sequence: Synthetic peptide
PSGTWLTY

SEQ ID NO: 5822 - protein, 10 aa, synthetic construct
  REGION 1..10: note = Description of Artificial Sequence: Synthetic peptide
PTSFGPLVRK

SEQ ID NO: 5823 - protein, 10 aa, synthetic construct
  REGION 1..10: note = Description of Artificial Sequence: Synthetic peptide
PVAYRKVLLR

SEQ ID NO: 5824 - protein, 8 aa, synthetic construct
  REGION 1..8: note = Description of Artificial Sequence: Synthetic peptide
PVLKGVKL

SEQ ID NO: 5825 - protein, 9 aa, synthetic construct
  REGION 1..9: note = Description of Artificial Sequence: Synthetic peptide
PVNVAFELW

SEQ ID NO: 5826 - protein, 8 aa, synthetic construct
  REGION 1..8: note = Description of Artificial Sequence: Synthetic peptide
PVPEVKIL

SEQ ID NO: 5827 - protein, 9 aa, synthetic construct
  REGION 1..9: note = Description of Artificial Sequence: Synthetic peptide
PYEDFQENW

SEQ ID NO: 5828 - protein, 10 aa, synthetic construct
  REGION 1..10: note = Description of Artificial Sequence: Synthetic peptide
PYFFTLLLQL

SEQ ID NO: 5829 - protein, 9 aa, synthetic construct
  REGION 1..9: note = Description of Artificial Sequence: Synthetic peptide
PYIKWDLLK

SEQ ID NO: 5830 - protein, 8 aa, synthetic construct
  REGION 1..8: note = Description of Artificial Sequence: Synthetic peptide
PYIVGDVV

SEQ ID NO: 5831 - protein, 10 aa, synthetic construct
  REGION 1..10: note = Description of Artificial Sequence: Synthetic peptide
PYPNASFDNF

SEQ ID NO: 5832 - protein, 9 aa, synthetic construct
  REGION 1..9: note = Description of Artificial Sequence: Synthetic peptide
QAENVTGLF

SEQ ID NO: 5833 - protein, 9 aa, synthetic construct
  REGION 1..9: note = Description of Artificial Sequence: Synthetic peptide
QAITVTPEA

SEQ ID NO: 5834 - protein, 9 aa, synthetic construct
  REGION 1..9: note = Description of Artificial Sequence: Synthetic peptide
QASSRSSSR

SEQ ID NO: 5835 - protein, 10 aa, synthetic construct
  REGION 1..10: note = Description of Artificial Sequence: Synthetic peptide
QAVTANVNAL

SEQ ID NO: 5836 - protein, 8 aa, synthetic construct
  REGION 1..8: note = Description of Artificial Sequence: Synthetic peptide
QEAYEQAV

SEQ ID NO: 5837 - protein, 10 aa, synthetic construct
  REGION 1..10: note = Description of Artificial Sequence: Synthetic peptide
QEAYEQAVAN

SEQ ID NO: 5838 - protein, 8 aa, synthetic construct
  REGION 1..8: note = Description of Artificial Sequence: Synthetic peptide
QEEVQELY

SEQ ID NO: 5839 - protein, 8 aa, synthetic construct
  REGION 1..8: note = Description of Artificial Sequence: Synthetic peptide
QEFKPRSQ

SEQ ID NO: 5840 - protein, 9 aa, synthetic construct
  REGION 1..9: note = Description of Artificial Sequence: Synthetic peptide
QEGVVDYGA

SEQ ID NO: 5841 - protein, 11 aa, synthetic construct
  REGION 1..11: note = Description of Artificial Sequence: Synthetic peptide
QEGVVDYGARF

SEQ ID NO: 5842 - protein, 11 aa, synthetic construct
  REGION 1..11: note = Description of Artificial Sequence: Synthetic peptide
QEHYVRITGLY

SEQ ID NO: 5843 - protein, 10 aa, synthetic construct
  REGION 1..10: note = Description of Artificial Sequence: Synthetic peptide
QEILGTVSWN

SEQ ID NO: 5844 - protein, 8 aa, synthetic construct
  REGION 1..8: note = Description of Artificial Sequence: Synthetic peptide
QEKNFTTA

SEQ ID NO: 5845 - protein, 12 aa, synthetic construct
  REGION 1..12: note = Description of Artificial Sequence: Synthetic peptide
QELGKYEQYIKW

SEQ ID NO: 5846 - protein, 10 aa, synthetic construct
  REGION 1..10: note = Description of Artificial Sequence: Synthetic peptide
QELIRQGTDY

SEQ ID NO: 5847 - protein, 8 aa, synthetic construct
  REGION 1..8: note = Description of Artificial Sequence: Synthetic peptide
QELYSPIF

SEQ ID NO: 5848 - protein, 8 aa, synthetic construct
  REGION 1..8: note = Description of Artificial Sequence: Synthetic peptide
QEPKLGSL

SEQ ID NO: 5849 - protein, 9 aa, synthetic construct
  REGION 1..9: note = Description of Artificial Sequence: Synthetic peptide
QEPKLGSLV

SEQ ID NO: 5850 - protein, 10 aa, synthetic construct
  REGION 1..10: note = Description of Artificial Sequence: Synthetic peptide
QEPKLGSLVV

SEQ ID NO: 5851 - protein, 8 aa, synthetic construct
  REGION 1..8: note = Description of Artificial Sequence: Synthetic peptide
QESPFVMM

SEQ ID NO: 5852 - protein, 11 aa, synthetic construct
  REGION 1..11: note = Description of Artificial Sequence: Synthetic peptide
QEVFAQVKQIY

SEQ ID NO: 5853 - protein, 11 aa, synthetic construct
  REGION 1..11: note = Description of Artificial Sequence: Synthetic peptide
QEYADVFHLYL

SEQ ID NO: 5854 - protein, 10 aa, synthetic construct
  REGION 1..10: note = Description of Artificial Sequence: Synthetic peptide
QFAPSASAFF

SEQ ID NO: 5855 - protein, 11 aa, synthetic construct
  REGION 1..11: note = Description of Artificial Sequence: Synthetic peptide
QFDTYNLWNTF

SEQ ID NO: 5856 - protein, 8 aa, synthetic construct
  REGION 1..8: note = Description of Artificial Sequence: Synthetic peptide
QFKHLIPL

SEQ ID NO: 5857 - protein, 9 aa, synthetic construct
  REGION 1..9: note = Description of Artificial Sequence: Synthetic peptide
QFPNTYLEG

SEQ ID NO: 5858 - protein, 9 aa, synthetic construct
  REGION 1..9: note = Description of Artificial Sequence: Synthetic peptide
QGAVDINKL

SEQ ID NO: 5859 - protein, 10 aa, synthetic construct
  REGION 1..10: note = Description of Artificial Sequence: Synthetic peptide
QGDDYVYLPY

SEQ ID NO: 5860 - protein, 9 aa, synthetic construct
  REGION 1..9: note = Description of Artificial Sequence: Synthetic peptide
QHEVLLAPL

SEQ ID NO: 5861 - protein, 10 aa, synthetic construct
  REGION 1..10: note = Description of Artificial Sequence: Synthetic peptide
QHEVLLAPLL

SEQ ID NO: 5862 - protein, 10 aa, synthetic construct
  REGION 1..10: note = Description of Artificial Sequence: Synthetic peptide
QHMVVKAALL

SEQ ID NO: 5863 - protein, 11 aa, synthetic construct
  REGION 1..11: note = Description of Artificial Sequence: Synthetic peptide
QIDGYVMHANY

SEQ ID NO: 5864 - protein, 9 aa, synthetic construct
  REGION 1..9: note = Description of Artificial Sequence: Synthetic peptide
QIGEYTFEK

SEQ ID NO: 5865 - protein, 9 aa, synthetic construct
  REGION 1..9: note = Description of Artificial Sequence: Synthetic peptide
QIGGYTEKW

SEQ ID NO: 5866 - protein, 9 aa, synthetic construct
  REGION 1..9: note = Description of Artificial Sequence: Synthetic peptide
QIVESCGNF

SEQ ID NO: 5867 - protein, 8 aa, synthetic construct
  REGION 1..8: note = Description of Artificial Sequence: Synthetic peptide
QLDEEQPM

SEQ ID NO: 5868 - protein, 12 aa, synthetic construct
  REGION 1..12: note = Description of Artificial Sequence: Synthetic peptide
QLDFIDTKRGVY

SEQ ID NO: 5869 - protein, 9 aa, synthetic construct
  REGION 1..9: note = Description of Artificial Sequence: Synthetic peptide
QLGIEFLKR

SEQ ID NO: 5870 - protein, 10 aa, synthetic construct
  REGION 1..10: note = Description of Artificial Sequence: Synthetic peptide
QLMCQPILLL

SEQ ID NO: 5871 - protein, 9 aa, synthetic construct
  REGION 1..9: note = Description of Artificial Sequence: Synthetic peptide
QLNRALTGI

SEQ ID NO: 5872 - protein, 9 aa, synthetic construct
  REGION 1..9: note = Description of Artificial Sequence: Synthetic peptide
QLPETYFTQ

SEQ ID NO: 5873 - protein, 9 aa, synthetic construct
  REGION 1..9: note = Description of Artificial Sequence: Synthetic peptide
QLRKQIRSA

SEQ ID NO: 5874 - protein, 9 aa, synthetic construct
  REGION 1..9: note = Description of Artificial Sequence: Synthetic peptide
QLRVIGHSM

SEQ ID NO: 5875 - protein, 8 aa, synthetic construct
  REGION 1..8: note = Description of Artificial Sequence: Synthetic peptide
QLTPTWRV

SEQ ID NO: 5876 - protein, 10 aa, synthetic construct
  REGION 1..10: note = Description of Artificial Sequence: Synthetic peptide
QMAPISAMVR

SEQ ID NO: 5877 - protein, 9 aa, synthetic construct
  REGION 1..9: note = Description of Artificial Sequence: Synthetic peptide
QNAQALNTL

SEQ ID NO: 5878 - protein, 9 aa, synthetic construct
  REGION 1..9: note = Description of Artificial Sequence: Synthetic peptide
QNYGDSATL

SEQ ID NO: 5879 - protein, 9 aa, synthetic construct
  REGION 1..9: note = Description of Artificial Sequence: Synthetic peptide
QPEEEQEED

SEQ ID NO: 5880 - protein, 10 aa, synthetic construct
  REGION 1..10: note = Description of Artificial Sequence: Synthetic peptide
QPIGALDISA

SEQ ID NO: 5881 - protein, 9 aa, synthetic construct
  REGION 1..9: note = Description of Artificial Sequence: Synthetic peptide
QPILLLDQA

SEQ ID NO: 5882 - protein, 9 aa, synthetic construct
  REGION 1..9: note = Description of Artificial Sequence: Synthetic peptide
QPITNCVKM

SEQ ID NO: 5883 - protein, 10 aa, synthetic construct
  REGION 1..10: note = Description of Artificial Sequence: Synthetic peptide
QPLEQPTSEA

SEQ ID NO: 5884 - protein, 11 aa, synthetic construct
  REGION 1..11: note = Description of Artificial Sequence: Synthetic peptide
QPSVGPKQASL

SEQ ID NO: 5885 - protein, 10 aa, synthetic construct
  REGION 1..10: note = Description of Artificial Sequence: Synthetic peptide
QPVSELLTPL

SEQ ID NO: 5886 - protein, 9 aa, synthetic construct
  REGION 1..9: note = Description of Artificial Sequence: Synthetic peptide
QQQTTLKGV

SEQ ID NO: 5887 - protein, 9 aa, synthetic construct
  REGION 1..9: note = Description of Artificial Sequence: Synthetic peptide
QRNFYEPQI

SEQ ID NO: 5888 - protein, 9 aa, synthetic construct
  REGION 1..9: note = Description of Artificial Sequence: Synthetic peptide
QRVAGDSGF

SEQ ID NO: 5889 - protein, 11 aa, synthetic construct
  REGION 1..11: note = Description of Artificial Sequence: Synthetic peptide
QSADAQSFLNR

SEQ ID NO: 5890 - protein, 8 aa, synthetic construct
  REGION 1..8: note = Description of Artificial Sequence: Synthetic peptide
QSAPHGVV

SEQ ID NO: 5891 - protein, 8 aa, synthetic construct
  REGION 1..8: note = Description of Artificial Sequence: Synthetic peptide
QSAVKRTI

SEQ ID NO: 5892 - protein, 9 aa, synthetic construct
  REGION 1..9: note = Description of Artificial Sequence: Synthetic peptide
QSDIEVTGD

SEQ ID NO: 5893 - protein, 8 aa, synthetic construct
  REGION 1..8: note = Description of Artificial Sequence: Synthetic peptide
QSFLNRVC

SEQ ID NO: 5894 - protein, 9 aa, synthetic construct
  REGION 1..9: note = Description of Artificial Sequence: Synthetic peptide
QSYGFQPTN

SEQ ID NO: 5895 - protein, 8 aa, synthetic construct
  REGION 1..8: note = Description of Artificial Sequence: Synthetic peptide
QTLEILDI

SEQ ID NO: 5896 - protein, 10 aa, synthetic construct
  REGION 1..10: note = Description of Artificial Sequence: Synthetic peptide
QTMLFTMLRK

SEQ ID NO: 5897 - protein, 9 aa, synthetic construct
  REGION 1..9: note = Description of Artificial Sequence: Synthetic peptide
QTSITSAVL

SEQ ID NO: 5898 - protein, 9 aa, synthetic construct
  REGION 1..9: note = Description of Artificial Sequence: Synthetic peptide
QTTETAHSC

SEQ ID NO: 5899 - protein, 8 aa, synthetic construct
  REGION 1..8: note = Description of Artificial Sequence: Synthetic peptide
QTTTIQTI

SEQ ID NO: 5900 - protein, 11 aa, synthetic construct
  REGION 1..11: note = Description of Artificial Sequence: Synthetic peptide
QTVDSSQGSEY

SEQ ID NO: 5901 - protein, 10 aa, synthetic construct
  REGION 1..10: note = Description of Artificial Sequence: Synthetic peptide
QVAKSHNIAL

SEQ ID NO: 5902 - protein, 9 aa, synthetic construct
  REGION 1..9: note = Description of Artificial Sequence: Synthetic peptide
QVEQKIAEI

SEQ ID NO: 5903 - protein, 9 aa, synthetic construct
  REGION 1..9: note = Description of Artificial Sequence: Synthetic peptide
QVIVNNLDK

SEQ ID NO: 5904 - protein, 9 aa, synthetic construct
  REGION 1..9: note = Description of Artificial Sequence: Synthetic peptide
QVNGLTSIK

SEQ ID NO: 5905 - protein, 9 aa, synthetic construct
  REGION 1..9: note = Description of Artificial Sequence: Synthetic peptide
QVNGYPNMF

SEQ ID NO: 5906 - protein, 12 aa, synthetic construct
  REGION 1..12: note = Description of Artificial Sequence: Synthetic peptide
QVNGYPNMFITR

SEQ ID NO: 5907 - protein, 9 aa, synthetic construct
  REGION 1..9: note = Description of Artificial Sequence: Synthetic peptide
QVVDADSKI

SEQ ID NO: 5908 - protein, 9 aa, synthetic construct
  REGION 1..9: note = Description of Artificial Sequence: Synthetic peptide
QWMVMFTPL

SEQ ID NO: 5909 - protein, 9 aa, synthetic construct
  REGION 1..9: note = Description of Artificial Sequence: Synthetic peptide
QWNLVIGFL

SEQ ID NO: 5910 - protein, 8 aa, synthetic construct
  REGION 1..8: note = Description of Artificial Sequence: Synthetic peptide
QYIKWPWY

SEQ ID NO: 5911 - protein, 10 aa, synthetic construct
  REGION 1..10: note = Description of Artificial Sequence: Synthetic peptide
QYIKWPWYIW

SEQ ID NO: 5912 - protein, 11 aa, synthetic construct
  REGION 1..11: note = Description of Artificial Sequence: Synthetic peptide
QYIKWPWYIWL

SEQ ID NO: 5913 - protein, 10 aa, synthetic construct
  REGION 1..10: note = Description of Artificial Sequence: Synthetic peptide
QYIRKLHDEL

SEQ ID NO: 5914 - protein, 9 aa, synthetic construct
  REGION 1..9: note = Description of Artificial Sequence: Synthetic peptide
QYLNTLTLA

SEQ ID NO: 5915 - protein, 10 aa, synthetic construct
  REGION 1..10: note = Description of Artificial Sequence: Synthetic peptide
QYVFCTVNAL

SEQ ID NO: 5916 - protein, 10 aa, synthetic construct
  REGION 1..10: note = Description of Artificial Sequence: Synthetic peptide
RAFDIYNDKV

SEQ ID NO: 5917 - protein, 8 aa, synthetic construct
  REGION 1..8: note = Description of Artificial Sequence: Synthetic peptide
RAGEAANF

SEQ ID NO: 5918 - protein, 8 aa, synthetic construct
  REGION 1..8: note = Description of Artificial Sequence: Synthetic peptide
RAMPNMLR

SEQ ID NO: 5919 - protein, 10 aa, synthetic construct
  REGION 1..10: note = Description of Artificial Sequence: Synthetic peptide
RARSVASQSI

SEQ ID NO: 5920 - protein, 10 aa, synthetic construct
  REGION 1..10: note = Description of Artificial Sequence: Synthetic peptide
RARTVAGVSI

SEQ ID NO: 5921 - protein, 10 aa, synthetic construct
  REGION 1..10: note = Description of Artificial Sequence: Synthetic peptide
RARVECFDKF

SEQ ID NO: 5922 - protein, 10 aa, synthetic construct
  REGION 1..10: note = Description of Artificial Sequence: Synthetic peptide
RATRVECTTI

SEQ ID NO: 5923 - protein, 10 aa, synthetic construct
  REGION 1..10: note = Description of Artificial Sequence: Synthetic peptide
RCNLGGAVCR

SEQ ID NO: 5924 - protein, 9 aa, synthetic construct
  REGION 1..9: note = Description of Artificial Sequence: Synthetic peptide
RDLPQGFSA

SEQ ID NO: 5925 - protein, 10 aa, synthetic construct
  REGION 1..10: note = Description of Artificial Sequence: Synthetic peptide
RDLPQGFSAL

SEQ ID NO: 5926 - protein, 9 aa, synthetic construct
  REGION 1..9: note = Description of Artificial Sequence: Synthetic peptide
RDPQTLEIL

SEQ ID NO: 5927 - protein, 11 aa, synthetic construct
  REGION 1..11: note = Description of Artificial Sequence: Synthetic peptide
REFVFKNIDGY

SEQ ID NO: 5928 - protein, 9 aa, synthetic construct
  REGION 1..9: note = Description of Artificial Sequence: Synthetic peptide
REGYLNSTN

SEQ ID NO: 5929 - protein, 11 aa, synthetic construct
  REGION 1..11: note = Description of Artificial Sequence: Synthetic peptide
RELNGGAYTRY

SEQ ID NO: 5930 - protein, 11 aa, synthetic construct
  REGION 1..11: note = Description of Artificial Sequence: Synthetic peptide
REQIDGYVMHA

SEQ ID NO: 5931 - protein, 8 aa, synthetic construct
  REGION 1..8: note = Description of Artificial Sequence: Synthetic peptide
RETMSYLF

SEQ ID NO: 5932 - protein, 11 aa, synthetic construct
  REGION 1..11: note = Description of Artificial Sequence: Synthetic peptide
REVLSDRELHL

SEQ ID NO: 5933 - protein, 8 aa, synthetic construct
  REGION 1..8: note = Description of Artificial Sequence: Synthetic peptide
RFASVYAW

SEQ ID NO: 5934 - protein, 9 aa, synthetic construct
  REGION 1..9: note = Description of Artificial Sequence: Synthetic peptide
RFDTRVLSN

SEQ ID NO: 5935 - protein, 8 aa, synthetic construct
  REGION 1..8: note = Description of Artificial Sequence: Synthetic peptide
RFQTLLAL

SEQ ID NO: 5936 - protein, 9 aa, synthetic construct
  REGION 1..9: note = Description of Artificial Sequence: Synthetic peptide
RFQTLLALH

SEQ ID NO: 5937 - protein, 10 aa, synthetic construct
  REGION 1..10: note = Description of Artificial Sequence: Synthetic peptide
RFVSLAIDAY

SEQ ID NO: 5938 - protein, 8 aa, synthetic construct
  REGION 1..8: note = Description of Artificial Sequence: Synthetic peptide
RFYFYTSK

SEQ ID NO: 5939 - protein, 9 aa, synthetic construct
  REGION 1..9: note = Description of Artificial Sequence: Synthetic peptide
RGGSQASSR

SEQ ID NO: 5940 - protein, 8 aa, synthetic construct
  REGION 1..8: note = Description of Artificial Sequence: Synthetic peptide
RHSLSHFV

SEQ ID NO: 5941 - protein, 10 aa, synthetic construct
  REGION 1..10: note = Description of Artificial Sequence: Synthetic peptide
RIDGDMVPHI

SEQ ID NO: 5942 - protein, 10 aa, synthetic construct
  REGION 1..10: note = Description of Artificial Sequence: Synthetic peptide
RIIMRLWLCW

SEQ ID NO: 5943 - protein, 8 aa, synthetic construct
  REGION 1..8: note = Description of Artificial Sequence: Synthetic peptide
RIIPARAR

SEQ ID NO: 5944 - protein, 8 aa, synthetic construct
  REGION 1..8: note = Description of Artificial Sequence: Synthetic peptide
RIKIVQML

SEQ ID NO: 5945 - protein, 9 aa, synthetic construct
  REGION 1..9: note = Description of Artificial Sequence: Synthetic peptide
RILGAGCFV

SEQ ID NO: 5946 - protein, 11 aa, synthetic construct
  REGION 1..11: note = Description of Artificial Sequence: Synthetic peptide
RIMASLVLARK

SEQ ID NO: 5947 - protein, 10 aa, synthetic construct
  REGION 1..10: note = Description of Artificial Sequence: Synthetic peptide
RIQPGQTFSV

SEQ ID NO: 5948 - protein, 9 aa, synthetic construct
  REGION 1..9: note = Description of Artificial Sequence: Synthetic peptide
RIRSVYPVA

SEQ ID NO: 5949 - protein, 9 aa, synthetic construct
  REGION 1..9: note = Description of Artificial Sequence: Synthetic peptide
RKHFSMMIL

SEQ ID NO: 5950 - protein, 9 aa, synthetic construct
  REGION 1..9: note = Description of Artificial Sequence: Synthetic peptide
RKHTTCCSL

SEQ ID NO: 5951 - protein, 10 aa, synthetic construct
  REGION 1..10: note = Description of Artificial Sequence: Synthetic peptide
RKIFVDGVPF

SEQ ID NO: 5952 - protein, 8 aa, synthetic construct
  REGION 1..8: note = Description of Artificial Sequence: Synthetic peptide
RKLDNDAL

SEQ ID NO: 5953 - protein, 9 aa, synthetic construct
  REGION 1..9: note = Description of Artificial Sequence: Synthetic peptide
RKVQHMVVK

SEQ ID NO: 5954 - protein, 9 aa, synthetic construct
  REGION 1..9: note = Description of Artificial Sequence: Synthetic peptide
RKYKGIKIQ

SEQ ID NO: 5955 - protein, 9 aa, synthetic construct
  REGION 1..9: note = Description of Artificial Sequence: Synthetic peptide
RLIIRENNR

SEQ ID NO: 5956 - protein, 10 aa, synthetic construct
  REGION 1..10: note = Description of Artificial Sequence: Synthetic peptide
RLIIRENNRV

SEQ ID NO: 5957 - protein, 9 aa, synthetic construct
  REGION 1..9: note = Description of Artificial Sequence: Synthetic peptide
RLISMMGFK

SEQ ID NO: 5958 - protein, 9 aa, synthetic construct
  REGION 1..9: note = Description of Artificial Sequence: Synthetic peptide
RLITGRLQS

SEQ ID NO: 5959 - protein, 10 aa, synthetic construct
  REGION 1..10: note = Description of Artificial Sequence: Synthetic peptide
RLKLFAAETL

SEQ ID NO: 5960 - protein, 11 aa, synthetic construct
  REGION 1..11: note = Description of Artificial Sequence: Synthetic peptide
RLKLFDRYFKY

SEQ ID NO: 5961 - protein, 10 aa, synthetic construct
  REGION 1..10: note = Description of Artificial Sequence: Synthetic peptide
RLQAGNATEV

SEQ ID NO: 5962 - protein, 9 aa, synthetic construct
  REGION 1..9: note = Description of Artificial Sequence: Synthetic peptide
RLWLCWKCR

SEQ ID NO: 5963 - protein, 9 aa, synthetic construct
  REGION 1..9: note = Description of Artificial Sequence: Synthetic peptide
RLYLDAYNM

SEQ ID NO: 5964 - protein, 8 aa, synthetic construct
  REGION 1..8: note = Description of Artificial Sequence: Synthetic peptide
RNAGIVGV

SEQ ID NO: 5965 - protein, 9 aa, synthetic construct
  REGION 1..9: note = Description of Artificial Sequence: Synthetic peptide
RNARNGVLI

SEQ ID NO: 5966 - protein, 9 aa, synthetic construct
  REGION 1..9: note = Description of Artificial Sequence: Synthetic peptide
RNLQEFKPR

SEQ ID NO: 5967 - protein, 10 aa, synthetic construct
  REGION 1..10: note = Description of Artificial Sequence: Synthetic peptide
RNRFLYIIKL

SEQ ID NO: 5968 - protein, 8 aa, synthetic construct
  REGION 1..8: note = Description of Artificial Sequence: Synthetic peptide
RNTNPIQL

SEQ ID NO: 5969 - protein, 8 aa, synthetic construct
  REGION 1..8: note = Description of Artificial Sequence: Synthetic peptide
RNYIAQVD

SEQ ID NO: 5970 - protein, 9 aa, synthetic construct
  REGION 1..9: note = Description of Artificial Sequence: Synthetic peptide
RNYIAQVDV

SEQ ID NO: 5971 - protein, 9 aa, synthetic construct
  REGION 1..9: note = Description of Artificial Sequence: Synthetic peptide
RNYVFTGYR

SEQ ID NO: 5972 - protein, 10 aa, synthetic construct
  REGION 1..10: note = Description of Artificial Sequence: Synthetic peptide
RPQGLPNNTA

SEQ ID NO: 5973 - protein, 9 aa, synthetic construct
  REGION 1..9: note = Description of Artificial Sequence: Synthetic peptide
RPQIGVVRE

SEQ ID NO: 5974 - protein, 9 aa, synthetic construct
  REGION 1..9: note = Description of Artificial Sequence: Synthetic peptide
RQALLKTVQ

SEQ ID NO: 5975 - protein, 8 aa, synthetic construct
  REGION 1..8: note = Description of Artificial Sequence: Synthetic peptide
RQLLFVVE

SEQ ID NO: 5976 - protein, 10 aa, synthetic construct
  REGION 1..10: note = Description of Artificial Sequence: Synthetic peptide
RQLLFVVEVV

SEQ ID NO: 5977 - protein, 10 aa, synthetic construct
  REGION 1..10: note = Description of Artificial Sequence: Synthetic peptide
RQVVNVVTTK

SEQ ID NO: 5978 - protein, 9 aa, synthetic construct
  REGION 1..9: note = Description of Artificial Sequence: Synthetic peptide
RRAFGEYSH

SEQ ID NO: 5979 - protein, 9 aa, synthetic construct
  REGION 1..9: note = Description of Artificial Sequence: Synthetic peptide
RRATCFSTA

SEQ ID NO: 5980 - protein, 9 aa, synthetic construct
  REGION 1..9: note = Description of Artificial Sequence: Synthetic peptide
RRCPAEIVD

SEQ ID NO: 5981 - protein, 9 aa, synthetic construct
  REGION 1..9: note = Description of Artificial Sequence: Synthetic peptide
RRGPEQTQG

SEQ ID NO: 5982 - protein, 9 aa, synthetic construct
  REGION 1..9: note = Description of Artificial Sequence: Synthetic peptide
RRLISMMGF

SEQ ID NO: 5983 - protein, 9 aa, synthetic construct
  REGION 1..9: note = Description of Artificial Sequence: Synthetic peptide
RRSFYVYAN

SEQ ID NO: 5984 - protein, 9 aa, synthetic construct
  REGION 1..9: note = Description of Artificial Sequence: Synthetic peptide
RRVWTLMNV

SEQ ID NO: 5985 - protein, 10 aa, synthetic construct
  REGION 1..10: note = Description of Artificial Sequence: Synthetic peptide
RRVWTLMNVL

SEQ ID NO: 5986 - protein, 9 aa, synthetic construct
  REGION 1..9: note = Description of Artificial Sequence: Synthetic peptide
RSDVLLPLT

SEQ ID NO: 5987 - protein, 9 aa, synthetic construct
  REGION 1..9: note = Description of Artificial Sequence: Synthetic peptide
RSEKSYELQ

SEQ ID NO: 5988 - protein, 11 aa, synthetic construct
  REGION 1..11: note = Description of Artificial Sequence: Synthetic peptide
RSFIEDLLFNK

SEQ ID NO: 5989 - protein, 9 aa, synthetic construct
  REGION 1..9: note = Description of Artificial Sequence: Synthetic peptide
RSGARSKQR

SEQ ID NO: 5990 - protein, 9 aa, synthetic construct
  REGION 1..9: note = Description of Artificial Sequence: Synthetic peptide
RSKNPLLYD

SEQ ID NO: 5991 - protein, 8 aa, synthetic construct
  REGION 1..8: note = Description of Artificial Sequence: Synthetic peptide
RSLPGVFC

SEQ ID NO: 5992 - protein, 10 aa, synthetic construct
  REGION 1..10: note = Description of Artificial Sequence: Synthetic peptide
RSLPGVFCGV

SEQ ID NO: 5993 - protein, 8 aa, synthetic construct
  REGION 1..8: note = Description of Artificial Sequence: Synthetic peptide
RSSVLHST

SEQ ID NO: 5994 - protein, 9 aa, synthetic construct
  REGION 1..9: note = Description of Artificial Sequence: Synthetic peptide
RSVASQSII

SEQ ID NO: 5995 - protein, 11 aa, synthetic construct
  REGION 1..11: note = Description of Artificial Sequence: Synthetic peptide
RSVASQSIIAY

SEQ ID NO: 5996 - protein, 9 aa, synthetic construct
  REGION 1..9: note = Description of Artificial Sequence: Synthetic peptide
RSVYPVASP

SEQ ID NO: 5997 - protein, 8 aa, synthetic construct
  REGION 1..8: note = Description of Artificial Sequence: Synthetic peptide
RTAPHGHV

SEQ ID NO: 5998 - protein, 11 aa, synthetic construct
  REGION 1..11: note = Description of Artificial Sequence: Synthetic peptide
RTAPHGHVMVE

SEQ ID NO: 5999 - protein, 9 aa, synthetic construct
  REGION 1..9: note = Description of Artificial Sequence: Synthetic peptide
RTCCLCDRR

SEQ ID NO: 6000 - protein, 12 aa, synthetic construct
  REGION 1..12: note = Description of Artificial Sequence: Synthetic peptide
RTFKVSIWNLDY

SEQ ID NO: 6001 - protein, 9 aa, synthetic construct
  REGION 1..9: note = Description of Artificial Sequence: Synthetic peptide
RTIAFGGCV

SEQ ID NO: 6002 - protein, 8 aa, synthetic construct
  REGION 1..8: note = Description of Artificial Sequence: Synthetic peptide
RTIKVFTT

SEQ ID NO: 6003 - protein, 9 aa, synthetic construct
  REGION 1..9: note = Description of Artificial Sequence: Synthetic peptide
RTLETAQNS

SEQ ID NO: 6004 - protein, 11 aa, synthetic construct
  REGION 1..11: note = Description of Artificial Sequence: Synthetic peptide
RTLETAQNSVR

SEQ ID NO: 6005 - protein, 8 aa, synthetic construct
  REGION 1..8: note = Description of Artificial Sequence: Synthetic peptide
RTNVYLAV

SEQ ID NO: 6006 - protein, 8 aa, synthetic construct
  REGION 1..8: note = Description of Artificial Sequence: Synthetic peptide
RTQLPPAY

SEQ ID NO: 6007 - protein, 9 aa, synthetic construct
  REGION 1..9: note = Description of Artificial Sequence: Synthetic peptide
RTVAGVSIC

SEQ ID NO: 6008 - protein, 9 aa, synthetic construct
  REGION 1..9: note = Description of Artificial Sequence: Synthetic peptide
RTVYDDGAR

SEQ ID NO: 6009 - protein, 10 aa, synthetic construct
  REGION 1..10: note = Description of Artificial Sequence: Synthetic peptide
RTVYDDGARR

SEQ ID NO: 6010 - protein, 8 aa, synthetic construct
  REGION 1..8: note = Description of Artificial Sequence: Synthetic peptide
RVAGDSGF

SEQ ID NO: 6011 - protein, 10 aa, synthetic construct
  REGION 1..10: note = Description of Artificial Sequence: Synthetic peptide
RVCGVSAARL

SEQ ID NO: 6012 - protein, 8 aa, synthetic construct
  REGION 1..8: note = Description of Artificial Sequence: Synthetic peptide
RVCVDTVR

SEQ ID NO: 6013 - protein, 9 aa, synthetic construct
  REGION 1..9: note = Description of Artificial Sequence: Synthetic peptide
RVIGHSMQN

SEQ ID NO: 6014 - protein, 11 aa, synthetic construct
  REGION 1..11: note = Description of Artificial Sequence: Synthetic peptide
RVIHFGAGSDK

SEQ ID NO: 6015 - protein, 10 aa, synthetic construct
  REGION 1..10: note = Description of Artificial Sequence: Synthetic peptide
RVLQKAAITI

SEQ ID NO: 6016 - protein, 9 aa, synthetic construct
  REGION 1..9: note = Description of Artificial Sequence: Synthetic peptide
RVVFVLWAH

SEQ ID NO: 6017 - protein, 11 aa, synthetic construct
  REGION 1..11: note = Description of Artificial Sequence: Synthetic peptide
RVVFVLWAHGF

SEQ ID NO: 6018 - protein, 11 aa, synthetic construct
  REGION 1..11: note = Description of Artificial Sequence: Synthetic peptide
RVYANLGERVR

SEQ ID NO: 6019 - protein, 10 aa, synthetic construct
  REGION 1..10: note = Description of Artificial Sequence: Synthetic peptide
RYFRLTLGVY

SEQ ID NO: 6020 - protein, 11 aa, synthetic construct
  REGION 1..11: note = Description of Artificial Sequence: Synthetic peptide
RYLALYNKYKY

SEQ ID NO: 6021 - protein, 8 aa, synthetic construct
  REGION 1..8: note = Description of Artificial Sequence: Synthetic peptide
RYMSALNH

SEQ ID NO: 6022 - protein, 9 aa, synthetic construct
  REGION 1..9: note = Description of Artificial Sequence: Synthetic peptide
RYMSALNHT

SEQ ID NO: 6023 - protein, 8 aa, synthetic construct
  REGION 1..8: note = Description of Artificial Sequence: Synthetic peptide
RYPANSIV

SEQ ID NO: 6024 - protein, 10 aa, synthetic construct
  REGION 1..10: note = Description of Artificial Sequence: Synthetic peptide
RYPANSIVCR

SEQ ID NO: 6025 - protein, 11 aa, synthetic construct
  REGION 1..11: note = Description of Artificial Sequence: Synthetic peptide
RYPANSIVCRF

SEQ ID NO: 6026 - protein, 12 aa, synthetic construct
  REGION 1..12: note = Description of Artificial Sequence: Synthetic peptide
RYVLMDGSIIQF

SEQ ID NO: 6027 - protein, 10 aa, synthetic construct
  REGION 1..10: note = Description of Artificial Sequence: Synthetic peptide
SAAKKNNLPF

SEQ ID NO: 6028 - protein, 9 aa, synthetic construct
  REGION 1..9: note = Description of Artificial Sequence: Synthetic peptide
SADAQSFLN

SEQ ID NO: 6029 - protein, 10 aa, synthetic construct
  REGION 1..10: note = Description of Artificial Sequence: Synthetic peptide
SADAQSFLNR

SEQ ID NO: 6030 - protein, 8 aa, synthetic construct
  REGION 1..8: note = Description of Artificial Sequence: Synthetic peptide
SAINRPQI

SEQ ID NO: 6031 - protein, 9 aa, synthetic construct
  REGION 1..9: note = Description of Artificial Sequence: Synthetic peptide
SAINRPQIG

SEQ ID NO: 6032 - protein, 10 aa, synthetic construct
  REGION 1..10: note = Description of Artificial Sequence: Synthetic peptide
SAINRPQIGV

SEQ ID NO: 6033 - protein, 11 aa, synthetic construct
  REGION 1..11: note = Description of Artificial Sequence: Synthetic peptide
SALNHTKKWKY

SEQ ID NO: 6034 - protein, 10 aa, synthetic construct
  REGION 1..10: note = Description of Artificial Sequence: Synthetic peptide
SAMVRMYIFF

SEQ ID NO: 6035 - protein, 8 aa, synthetic construct
  REGION 1..8: note = Description of Artificial Sequence: Synthetic peptide
SAQTGIAV

SEQ ID NO: 6036 - protein, 10 aa, synthetic construct
  REGION 1..10: note = Description of Artificial Sequence: Synthetic peptide
SASAFFGMSR

SEQ ID NO: 6037 - protein, 10 aa, synthetic construct
  REGION 1..10: note = Description of Artificial Sequence: Synthetic peptide
SASKIITLKK

SEQ ID NO: 6038 - protein, 9 aa, synthetic construct
  REGION 1..9: note = Description of Artificial Sequence: Synthetic peptide
SAVGNICYT

SEQ ID NO: 6039 - protein, 10 aa, synthetic construct
  REGION 1..10: note = Description of Artificial Sequence: Synthetic peptide
SAVKLQNNEL

SEQ ID NO: 6040 - protein, 10 aa, synthetic construct
  REGION 1..10: note = Description of Artificial Sequence: Synthetic peptide
SAVLQSGFRK

SEQ ID NO: 6041 - protein, 9 aa, synthetic construct
  REGION 1..9: note = Description of Artificial Sequence: Synthetic peptide
SDFVRATAT

SEQ ID NO: 6042 - protein, 8 aa, synthetic construct
  REGION 1..8: note = Description of Artificial Sequence: Synthetic peptide
SDIDYVPL

SEQ ID NO: 6043 - protein, 8 aa, synthetic construct
  REGION 1..8: note = Description of Artificial Sequence: Synthetic peptide
SDNIALLV

SEQ ID NO: 6044 - protein, 9 aa, synthetic construct
  REGION 1..9: note = Description of Artificial Sequence: Synthetic peptide
SDRELHLSW

SEQ ID NO: 6045 - protein, 9 aa, synthetic construct
  REGION 1..9: note = Description of Artificial Sequence: Synthetic peptide
SDVENPHLM

SEQ ID NO: 6046 - protein, 9 aa, synthetic construct
  REGION 1..9: note = Description of Artificial Sequence: Synthetic peptide
SDYDYYRYN

SEQ ID NO: 6047 - protein, 8 aa, synthetic construct
  REGION 1..8: note = Description of Artificial Sequence: Synthetic peptide
SEAARVVR

SEQ ID NO: 6048 - protein, 11 aa, synthetic construct
  REGION 1..11: note = Description of Artificial Sequence: Synthetic peptide
SEAARVVRSIF

SEQ ID NO: 6049 - protein, 10 aa, synthetic construct
  REGION 1..10: note = Description of Artificial Sequence: Synthetic peptide
SEDAQGMDNL

SEQ ID NO: 6050 - protein, 11 aa, synthetic construct
  REGION 1..11: note = Description of Artificial Sequence: Synthetic peptide
SEDKRAKVTSA

SEQ ID NO: 6051 - protein, 8 aa, synthetic construct
  REGION 1..8: note = Description of Artificial Sequence: Synthetic peptide
SEDNQTTT

SEQ ID NO: 6052 - protein, 10 aa, synthetic construct
  REGION 1..10: note = Description of Artificial Sequence: Synthetic peptide
SEETGTLIVN

SEQ ID NO: 6053 - protein, 8 aa, synthetic construct
  REGION 1..8: note = Description of Artificial Sequence: Synthetic peptide
SEEVVENP

SEQ ID NO: 6054 - protein, 11 aa, synthetic construct
  REGION 1..11: note = Description of Artificial Sequence: Synthetic peptide
SEFSSLPSYAA

SEQ ID NO: 6055 - protein, 12 aa, synthetic construct
  REGION 1..12: note = Description of Artificial Sequence: Synthetic peptide
SEFSSLPSYAAF

SEQ ID NO: 6056 - protein, 11 aa, synthetic construct
  REGION 1..11: note = Description of Artificial Sequence: Synthetic peptide
SEGLNDNLLEI

SEQ ID NO: 6057 - protein, 11 aa, synthetic construct
  REGION 1..11: note = Description of Artificial Sequence: Synthetic peptide
SEMVMCGGSLY

SEQ ID NO: 6058 - protein, 11 aa, synthetic construct
  REGION 1..11: note = Description of Artificial Sequence: Synthetic peptide
SEQLRKQIRSA

SEQ ID NO: 6059 - protein, 12 aa, synthetic construct
  REGION 1..12: note = Description of Artificial Sequence: Synthetic peptide
SEVGPEHSLAEY

SEQ ID NO: 6060 - protein, 9 aa, synthetic construct
  REGION 1..9: note = Description of Artificial Sequence: Synthetic peptide
SEVVLKKLK

SEQ ID NO: 6061 - protein, 11 aa, synthetic construct
  REGION 1..11: note = Description of Artificial Sequence: Synthetic peptide
SEYKGPITDVF

SEQ ID NO: 6062 - protein, 8 aa, synthetic construct
  REGION 1..8: note = Description of Artificial Sequence: Synthetic peptide
SFCTQLNR

SEQ ID NO: 6063 - protein, 10 aa, synthetic construct
  REGION 1..10: note = Description of Artificial Sequence: Synthetic peptide
SFCTQLNRAL

SEQ ID NO: 6064 - protein, 10 aa, synthetic construct
  REGION 1..10: note = Description of Artificial Sequence: Synthetic peptide
SFGGASCCLY

SEQ ID NO: 6065 - protein, 8 aa, synthetic construct
  REGION 1..8: note = Description of Artificial Sequence: Synthetic peptide
SFLAHIQW

SEQ ID NO: 6066 - protein, 10 aa, synthetic construct
  REGION 1..10: note = Description of Artificial Sequence: Synthetic peptide
SFLGRYMSAL

SEQ ID NO: 6067 - protein, 8 aa, synthetic construct
  REGION 1..8: note = Description of Artificial Sequence: Synthetic peptide
SFLNGFAV

SEQ ID NO: 6068 - protein, 8 aa, synthetic construct
  REGION 1..8: note = Description of Artificial Sequence: Synthetic peptide
SFLNGSCG

SEQ ID NO: 6069 - protein, 9 aa, synthetic construct
  REGION 1..9: note = Description of Artificial Sequence: Synthetic peptide
SFLNRVCGV

SEQ ID NO: 6070 - protein, 8 aa, synthetic construct
  REGION 1..8: note = Description of Artificial Sequence: Synthetic peptide
SFLPGVYS

SEQ ID NO: 6071 - protein, 10 aa, synthetic construct
  REGION 1..10: note = Description of Artificial Sequence: Synthetic peptide
SFLPGVYSVI

SEQ ID NO: 6072 - protein, 8 aa, synthetic construct
  REGION 1..8: note = Description of Artificial Sequence: Synthetic peptide
SFPQSAPH

SEQ ID NO: 6073 - protein, 10 aa, synthetic construct
  REGION 1..10: note = Description of Artificial Sequence: Synthetic peptide
SFSTFEEAAL

SEQ ID NO: 6074 - protein, 8 aa, synthetic construct
  REGION 1..8: note = Description of Artificial Sequence: Synthetic peptide
SFSTFKCY

SEQ ID NO: 6075 - protein, 9 aa, synthetic construct
  REGION 1..9: note = Description of Artificial Sequence: Synthetic peptide
SFVIRGDEV

SEQ ID NO: 6076 - protein, 9 aa, synthetic construct
  REGION 1..9: note = Description of Artificial Sequence: Synthetic peptide
SFYVYANGG

SEQ ID NO: 6077 - protein, 8 aa, synthetic construct
  REGION 1..8: note = Description of Artificial Sequence: Synthetic peptide
SGDATTAY

SEQ ID NO: 6078 - protein, 9 aa, synthetic construct
  REGION 1..9: note = Description of Artificial Sequence: Synthetic peptide
SGDGTTSPI

SEQ ID NO: 6079 - protein, 8 aa, synthetic construct
  REGION 1..8: note = Description of Artificial Sequence: Synthetic peptide
SGLKTILR

SEQ ID NO: 6080 - protein, 9 aa, synthetic construct
  REGION 1..9: note = Description of Artificial Sequence: Synthetic peptide
SGLKTILRK

SEQ ID NO: 6081 - protein, 9 aa, synthetic construct
  REGION 1..9: note = Description of Artificial Sequence: Synthetic peptide
SGTNGTKRF

SEQ ID NO: 6082 - protein, 10 aa, synthetic construct
  REGION 1..10: note = Description of Artificial Sequence: Synthetic peptide
SGVPVVDSYY

SEQ ID NO: 6083 - protein, 8 aa, synthetic construct
  REGION 1..8: note = Description of Artificial Sequence: Synthetic peptide
SGYLKLTD

SEQ ID NO: 6084 - protein, 9 aa, synthetic construct
  REGION 1..9: note = Description of Artificial Sequence: Synthetic peptide
SHAAVDALC

SEQ ID NO: 6085 - protein, 11 aa, synthetic construct
  REGION 1..11: note = Description of Artificial Sequence: Synthetic peptide
SHFAIGLALYY

SEQ ID NO: 6086 - protein, 8 aa, synthetic construct
  REGION 1..8: note = Description of Artificial Sequence: Synthetic peptide
SHNIALIW

SEQ ID NO: 6087 - protein, 8 aa, synthetic construct
  REGION 1..8: note = Description of Artificial Sequence: Synthetic peptide
SHQSDIEV

SEQ ID NO: 6088 - protein, 8 aa, synthetic construct
  REGION 1..8: note = Description of Artificial Sequence: Synthetic peptide
SHSQLGGL

SEQ ID NO: 6089 - protein, 9 aa, synthetic construct
  REGION 1..9: note = Description of Artificial Sequence: Synthetic peptide
SHSQLGGLH

SEQ ID NO: 6090 - protein, 9 aa, synthetic construct
  REGION 1..9: note = Description of Artificial Sequence: Synthetic peptide
SHTVMPLSA

SEQ ID NO: 6091 - protein, 8 aa, synthetic construct
  REGION 1..8: note = Description of Artificial Sequence: Synthetic peptide
SIAIPTNF

SEQ ID NO: 6092 - protein, 10 aa, synthetic construct
  REGION 1..10: note = Description of Artificial Sequence: Synthetic peptide
SIDAFKLNIK

SEQ ID NO: 6093 - protein, 10 aa, synthetic construct
  REGION 1..10: note = Description of Artificial Sequence: Synthetic peptide
SIVAGGIVAI

SEQ ID NO: 6094 - protein, 8 aa, synthetic construct
  REGION 1..8: note = Description of Artificial Sequence: Synthetic peptide
SKEGFFTY

SEQ ID NO: 6095 - protein, 9 aa, synthetic construct
  REGION 1..9: note = Description of Artificial Sequence: Synthetic peptide
SKHTPINLV

SEQ ID NO: 6096 - protein, 10 aa, synthetic construct
  REGION 1..10: note = Description of Artificial Sequence: Synthetic peptide
SKIITLKKRW

SEQ ID NO: 6097 - protein, 9 aa, synthetic construct
  REGION 1..9: note = Description of Artificial Sequence: Synthetic peptide
SKSLTENKY

SEQ ID NO: 6098 - protein, 9 aa, synthetic construct
  REGION 1..9: note = Description of Artificial Sequence: Synthetic peptide
SKTPEEHFI

SEQ ID NO: 6099 - protein, 8 aa, synthetic construct
  REGION 1..8: note = Description of Artificial Sequence: Synthetic peptide
SKTTVASL

SEQ ID NO: 6100 - protein, 9 aa, synthetic construct
  REGION 1..9: note = Description of Artificial Sequence: Synthetic peptide
SKVGGNYNY

SEQ ID NO: 6101 - protein, 8 aa, synthetic construct
  REGION 1..8: note = Description of Artificial Sequence: Synthetic peptide
SKVQIGEY

SEQ ID NO: 6102 - protein, 9 aa, synthetic construct
  REGION 1..9: note = Description of Artificial Sequence: Synthetic peptide
SLAATVRLQ

SEQ ID NO: 6103 - protein, 9 aa, synthetic construct
  REGION 1..9: note = Description of Artificial Sequence: Synthetic peptide
SLAEYHNES

SEQ ID NO: 6104 - protein, 11 aa, synthetic construct
  REGION 1..11: note = Description of Artificial Sequence: Synthetic peptide
SLAGSYKDWSY

SEQ ID NO: 6105 - protein, 9 aa, synthetic construct
  REGION 1..9: note = Description of Artificial Sequence: Synthetic peptide
SLAIDAYPL

SEQ ID NO: 6106 - protein, 11 aa, synthetic construct
  REGION 1..11: note = Description of Artificial Sequence: Synthetic peptide
SLAIDAYPLTK

SEQ ID NO: 6107 - protein, 11 aa, synthetic construct
  REGION 1..11: note = Description of Artificial Sequence: Synthetic peptide
SLDTYPSLETI

SEQ ID NO: 6108 - protein, 10 aa, synthetic construct
  REGION 1..10: note = Description of Artificial Sequence: Synthetic peptide
SLFDMSKFPL

SEQ ID NO: 6109 - protein, 12 aa, synthetic construct
  REGION 1..12: note = Description of Artificial Sequence: Synthetic peptide
SLIDFYLCFLAF

SEQ ID NO: 6110 - protein, 9 aa, synthetic construct
  REGION 1..9: note = Description of Artificial Sequence: Synthetic peptide
SLKEGQIND

SEQ ID NO: 6111 - protein, 10 aa, synthetic construct
  REGION 1..10: note = Description of Artificial Sequence: Synthetic peptide
SLKEGQINDM

SEQ ID NO: 6112 - protein, 8 aa, synthetic construct
  REGION 1..8: note = Description of Artificial Sequence: Synthetic peptide
SLKELLQN

SEQ ID NO: 6113 - protein, 8 aa, synthetic construct
  REGION 1..8: note = Description of Artificial Sequence: Synthetic peptide
SLKITEEV

SEQ ID NO: 6114 - protein, 11 aa, synthetic construct
  REGION 1..11: note = Description of Artificial Sequence: Synthetic peptide
SLLSKGRLIIR

SEQ ID NO: 6115 - protein, 9 aa, synthetic construct
  REGION 1..9: note = Description of Artificial Sequence: Synthetic peptide
SLLVLVQST

SEQ ID NO: 6116 - protein, 8 aa, synthetic construct
  REGION 1..8: note = Description of Artificial Sequence: Synthetic peptide
SLPINVIV

SEQ ID NO: 6117 - protein, 9 aa, synthetic construct
  REGION 1..9: note = Description of Artificial Sequence: Synthetic peptide
SLPSYAAFA

SEQ ID NO: 6118 - protein, 9 aa, synthetic construct
  REGION 1..9: note = Description of Artificial Sequence: Synthetic peptide
SLRCGACIR

SEQ ID NO: 6119 - protein, 11 aa, synthetic construct
  REGION 1..11: note = Description of Artificial Sequence: Synthetic peptide
SLREVRTIKVF

SEQ ID NO: 6120 - protein, 10 aa, synthetic construct
  REGION 1..10: note = Description of Artificial Sequence: Synthetic peptide
SLRPDTRYVL

SEQ ID NO: 6121 - protein, 8 aa, synthetic construct
  REGION 1..8: note = Description of Artificial Sequence: Synthetic peptide
SLSEQLRK

SEQ ID NO: 6122 - protein, 8 aa, synthetic construct
  REGION 1..8: note = Description of Artificial Sequence: Synthetic peptide
SLSHRFYR

SEQ ID NO: 6123 - protein, 10 aa, synthetic construct
  REGION 1..10: note = Description of Artificial Sequence: Synthetic peptide
SLTIKKPNEL

SEQ ID NO: 6124 - protein, 8 aa, synthetic construct
  REGION 1..8: note = Description of Artificial Sequence: Synthetic peptide
SLVKPSFY

SEQ ID NO: 6125 - protein, 8 aa, synthetic construct
  REGION 1..8: note = Description of Artificial Sequence: Synthetic peptide
SLWVYKQF

SEQ ID NO: 6126 - protein, 9 aa, synthetic construct
  REGION 1..9: note = Description of Artificial Sequence: Synthetic peptide
SLYVKPGGT

SEQ ID NO: 6127 - protein, 9 aa, synthetic construct
  REGION 1..9: note = Description of Artificial Sequence: Synthetic peptide
SNYQHEETI

SEQ ID NO: 6128 - protein, 9 aa, synthetic construct
  REGION 1..9: note = Description of Artificial Sequence: Synthetic peptide
SPDAVTAYN

SEQ ID NO: 6129 - protein, 9 aa, synthetic construct
  REGION 1..9: note = Description of Artificial Sequence: Synthetic peptide
SPDVDLGDI

SEQ ID NO: 6130 - protein, 11 aa, synthetic construct
  REGION 1..11: note = Description of Artificial Sequence: Synthetic peptide
SPFHPLADNKF

SEQ ID NO: 6131 - protein, 9 aa, synthetic construct
  REGION 1..9: note = Description of Artificial Sequence: Synthetic peptide
SPFVMMSAP

SEQ ID NO: 6132 - protein, 10 aa, synthetic construct
  REGION 1..10: note = Description of Artificial Sequence: Synthetic peptide
SPIFLIVAAI

SEQ ID NO: 6133 - protein, 12 aa, synthetic construct
  REGION 1..12: note = Description of Artificial Sequence: Synthetic peptide
SPIFLIVAAIVF

SEQ ID NO: 6134 - protein, 8 aa, synthetic construct
  REGION 1..8: note = Description of Artificial Sequence: Synthetic peptide
SPKLFIRQ

SEQ ID NO: 6135 - protein, 9 aa, synthetic construct
  REGION 1..9: note = Description of Artificial Sequence: Synthetic peptide
SPKLFIRQE

SEQ ID NO: 6136 - protein, 9 aa, synthetic construct
  REGION 1..9: note = Description of Artificial Sequence: Synthetic peptide
SPLYAFASE

SEQ ID NO: 6137 - protein, 10 aa, synthetic construct
  REGION 1..10: note = Description of Artificial Sequence: Synthetic peptide
SPLYAFASEA

SEQ ID NO: 6138 - protein, 8 aa, synthetic construct
  REGION 1..8: note = Description of Artificial Sequence: Synthetic peptide
SPNFSKLI

SEQ ID NO: 6139 - protein, 10 aa, synthetic construct
  REGION 1..10: note = Description of Artificial Sequence: Synthetic peptide
SPNFSKLINI

SEQ ID NO: 6140 - protein, 12 aa, synthetic construct
  REGION 1..12: note = Description of Artificial Sequence: Synthetic peptide
SPNLAWPLIVTA

SEQ ID NO: 6141 - protein, 9 aa, synthetic construct
  REGION 1..9: note = Description of Artificial Sequence: Synthetic peptide
SPRRARSVA

SEQ ID NO: 6142 - protein, 10 aa, synthetic construct
  REGION 1..10: note = Description of Artificial Sequence: Synthetic peptide
SPYNSQNAVA

SEQ ID NO: 6143 - protein, 10 aa, synthetic construct
  REGION 1..10: note = Description of Artificial Sequence: Synthetic peptide
SQASSRSSSR

SEQ ID NO: 6144 - protein, 9 aa, synthetic construct
  REGION 1..9: note = Description of Artificial Sequence: Synthetic peptide
SQLDEEQPM

SEQ ID NO: 6145 - protein, 9 aa, synthetic construct
  REGION 1..9: note = Description of Artificial Sequence: Synthetic peptide
SQRGGSYTN

SEQ ID NO: 6146 - protein, 10 aa, synthetic construct
  REGION 1..10: note = Description of Artificial Sequence: Synthetic peptide
SQRVAGDSGF

SEQ ID NO: 6147 - protein, 8 aa, synthetic construct
  REGION 1..8: note = Description of Artificial Sequence: Synthetic peptide
SREETGLL

SEQ ID NO: 6148 - protein, 9 aa, synthetic construct
  REGION 1..9: note = Description of Artificial Sequence: Synthetic peptide
SRGTSPARM

SEQ ID NO: 6149 - protein, 9 aa, synthetic construct
  REGION 1..9: note = Description of Artificial Sequence: Synthetic peptide
SRILGAGCF

SEQ ID NO: 6150 - protein, 9 aa, synthetic construct
  REGION 1..9: note = Description of Artificial Sequence: Synthetic peptide
SRLDKVEAE

SEQ ID NO: 6151 - protein, 8 aa, synthetic construct
  REGION 1..8: note = Description of Artificial Sequence: Synthetic peptide
SRYRIGNY

SEQ ID NO: 6152 - protein, 9 aa, synthetic construct
  REGION 1..9: note = Description of Artificial Sequence: Synthetic peptide
SRYRIGNYK

SEQ ID NO: 6153 - protein, 10 aa, synthetic construct
  REGION 1..10: note = Description of Artificial Sequence: Synthetic peptide
SSFLEMKSEK

SEQ ID NO: 6154 - protein, 8 aa, synthetic construct
  REGION 1..8: note = Description of Artificial Sequence: Synthetic peptide
SSKCVCSV

SEQ ID NO: 6155 - protein, 9 aa, synthetic construct
  REGION 1..9: note = Description of Artificial Sequence: Synthetic peptide
SSKLWAQCV

SEQ ID NO: 6156 - protein, 9 aa, synthetic construct
  REGION 1..9: note = Description of Artificial Sequence: Synthetic peptide
SSRVPDLLV

SEQ ID NO: 6157 - protein, 10 aa, synthetic construct
  REGION 1..10: note = Description of Artificial Sequence: Synthetic peptide
SSSSDNIALL

SEQ ID NO: 6158 - protein, 9 aa, synthetic construct
  REGION 1..9: note = Description of Artificial Sequence: Synthetic peptide
SSTASALGK

SEQ ID NO: 6159 - protein, 8 aa, synthetic construct
  REGION 1..8: note = Description of Artificial Sequence: Synthetic peptide
SSYIVDSV

SEQ ID NO: 6160 - protein, 10 aa, synthetic construct
  REGION 1..10: note = Description of Artificial Sequence: Synthetic peptide
SSYIVDSVTV

SEQ ID NO: 6161 - protein, 11 aa, synthetic construct
  REGION 1..11: note = Description of Artificial Sequence: Synthetic peptide
SSYIVDSVTVK

SEQ ID NO: 6162 - protein, 9 aa, synthetic construct
  REGION 1..9: note = Description of Artificial Sequence: Synthetic peptide
STDGNKIAD

SEQ ID NO: 6163 - protein, 12 aa, synthetic construct
  REGION 1..12: note = Description of Artificial Sequence: Synthetic peptide
STDVVYRAFDIY

SEQ ID NO: 6164 - protein, 8 aa, synthetic construct
  REGION 1..8: note = Description of Artificial Sequence: Synthetic peptide
STECSNLL

SEQ ID NO: 6165 - protein, 11 aa, synthetic construct
  REGION 1..11: note = Description of Artificial Sequence: Synthetic peptide
STECSNLLLQY

SEQ ID NO: 6166 - protein, 9 aa, synthetic construct
  REGION 1..9: note = Description of Artificial Sequence: Synthetic peptide
STGVNLVAV

SEQ ID NO: 6167 - protein, 8 aa, synthetic construct
  REGION 1..8: note = Description of Artificial Sequence: Synthetic peptide
STIGVCSM

SEQ ID NO: 6168 - protein, 9 aa, synthetic construct
  REGION 1..9: note = Description of Artificial Sequence: Synthetic peptide
STKPVETSN

SEQ ID NO: 6169 - protein, 9 aa, synthetic construct
  REGION 1..9: note = Description of Artificial Sequence: Synthetic peptide
STLEQYVFC

SEQ ID NO: 6170 - protein, 11 aa, synthetic construct
  REGION 1..11: note = Description of Artificial Sequence: Synthetic peptide
STLQGPPGTGK

SEQ ID NO: 6171 - protein, 11 aa, synthetic construct
  REGION 1..11: note = Description of Artificial Sequence: Synthetic peptide
STMTNRQFHQK

SEQ ID NO: 6172 - protein, 8 aa, synthetic construct
  REGION 1..8: note = Description of Artificial Sequence: Synthetic peptide
STNLVKNK

SEQ ID NO: 6173 - protein, 10 aa, synthetic construct
  REGION 1..10: note = Description of Artificial Sequence: Synthetic peptide
STPCNGVEGF

SEQ ID NO: 6174 - protein, 10 aa, synthetic construct
  REGION 1..10: note = Description of Artificial Sequence: Synthetic peptide
STQDLFLPFF

SEQ ID NO: 6175 - protein, 8 aa, synthetic construct
  REGION 1..8: note = Description of Artificial Sequence: Synthetic peptide
STSHKLVL

SEQ ID NO: 6176 - protein, 10 aa, synthetic construct
  REGION 1..10: note = Description of Artificial Sequence: Synthetic peptide
STSHKLVLSV

SEQ ID NO: 6177 - protein, 8 aa, synthetic construct
  REGION 1..8: note = Description of Artificial Sequence: Synthetic peptide
STYASQGL

SEQ ID NO: 6178 - protein, 9 aa, synthetic construct
  REGION 1..9: note = Description of Artificial Sequence: Synthetic peptide
SVAYSNNSI

SEQ ID NO: 6179 - protein, 8 aa, synthetic construct
  REGION 1..8: note = Description of Artificial Sequence: Synthetic peptide
SVDCTMYI

SEQ ID NO: 6180 - protein, 8 aa, synthetic construct
  REGION 1..8: note = Description of Artificial Sequence: Synthetic peptide
SVELKHFF

SEQ ID NO: 6181 - protein, 9 aa, synthetic construct
  REGION 1..9: note = Description of Artificial Sequence: Synthetic peptide
SVELKHFFF

SEQ ID NO: 6182 - protein, 9 aa, synthetic construct
  REGION 1..9: note = Description of Artificial Sequence: Synthetic peptide
SVLHSTQDL

SEQ ID NO: 6183 - protein, 10 aa, synthetic construct
  REGION 1..10: note = Description of Artificial Sequence: Synthetic peptide
SVLHSTQDLF

SEQ ID NO: 6184 - protein, 8 aa, synthetic construct
  REGION 1..8: note = Description of Artificial Sequence: Synthetic peptide
SVLQQLRV

SEQ ID NO: 6185 - protein, 9 aa, synthetic construct
  REGION 1..9: note = Description of Artificial Sequence: Synthetic peptide
SVNITFELD

SEQ ID NO: 6186 - protein, 9 aa, synthetic construct
  REGION 1..9: note = Description of Artificial Sequence: Synthetic peptide
SVNPYVCNA

SEQ ID NO: 6187 - protein, 9 aa, synthetic construct
  REGION 1..9: note = Description of Artificial Sequence: Synthetic peptide
SVRVLQKAA

SEQ ID NO: 6188 - protein, 8 aa, synthetic construct
  REGION 1..8: note = Description of Artificial Sequence: Synthetic peptide
SVYAWNRK

SEQ ID NO: 6189 - protein, 8 aa, synthetic construct
  REGION 1..8: note = Description of Artificial Sequence: Synthetic peptide
SVYPVASP

SEQ ID NO: 6190 - protein, 9 aa, synthetic construct
  REGION 1..9: note = Description of Artificial Sequence: Synthetic peptide
SVYPVASPN

SEQ ID NO: 6191 - protein, 9 aa, synthetic construct
  REGION 1..9: note = Description of Artificial Sequence: Synthetic peptide
SVYYSQLMC

SEQ ID NO: 6192 - protein, 9 aa, synthetic construct
  REGION 1..9: note = Description of Artificial Sequence: Synthetic peptide
SWEVGKPRP

SEQ ID NO: 6193 - protein, 9 aa, synthetic construct
  REGION 1..9: note = Description of Artificial Sequence: Synthetic peptide
SWFTALTQH

SEQ ID NO: 6194 - protein, 11 aa, synthetic construct
  REGION 1..11: note = Description of Artificial Sequence: Synthetic peptide
SWFTALTQHGK

SEQ ID NO: 6195 - protein, 10 aa, synthetic construct
  REGION 1..10: note = Description of Artificial Sequence: Synthetic peptide
SWLMWLIINL

SEQ ID NO: 6196 - protein, 9 aa, synthetic construct
  REGION 1..9: note = Description of Artificial Sequence: Synthetic peptide
SWMESEFRV

SEQ ID NO: 6197 - protein, 8 aa, synthetic construct
  REGION 1..8: note = Description of Artificial Sequence: Synthetic peptide
SWNLREML

SEQ ID NO: 6198 - protein, 9 aa, synthetic construct
  REGION 1..9: note = Description of Artificial Sequence: Synthetic peptide
SYAAFATAQ

SEQ ID NO: 6199 - protein, 11 aa, synthetic construct
  REGION 1..11: note = Description of Artificial Sequence: Synthetic peptide
SYEDQDALFAY

SEQ ID NO: 6200 - protein, 8 aa, synthetic construct
  REGION 1..8: note = Description of Artificial Sequence: Synthetic peptide
SYFTEQPI

SEQ ID NO: 6201 - protein, 11 aa, synthetic construct
  REGION 1..11: note = Description of Artificial Sequence: Synthetic peptide
SYFTSDYYQLY

SEQ ID NO: 6202 - protein, 8 aa, synthetic construct
  REGION 1..8: note = Description of Artificial Sequence: Synthetic peptide
SYGIATVR

SEQ ID NO: 6203 - protein, 8 aa, synthetic construct
  REGION 1..8: note = Description of Artificial Sequence: Synthetic peptide
SYIVDSVT

SEQ ID NO: 6204 - protein, 10 aa, synthetic construct
  REGION 1..10: note = Description of Artificial Sequence: Synthetic peptide
SYIVDSVTVK

SEQ ID NO: 6205 - protein, 8 aa, synthetic construct
  REGION 1..8: note = Description of Artificial Sequence: Synthetic peptide
SYLFQHAN

SEQ ID NO: 6206 - protein, 9 aa, synthetic construct
  REGION 1..9: note = Description of Artificial Sequence: Synthetic peptide
SYQTQTNSP

SEQ ID NO: 6207 - protein, 10 aa, synthetic construct
  REGION 1..10: note = Description of Artificial Sequence: Synthetic peptide
SYSLFDMSKF

SEQ ID NO: 6208 - protein, 10 aa, synthetic construct
  REGION 1..10: note = Description of Artificial Sequence: Synthetic peptide
SYTNDKACPL

SEQ ID NO: 6209 - protein, 9 aa, synthetic construct
  REGION 1..9: note = Description of Artificial Sequence: Synthetic peptide
SYTTTIKPV

SEQ ID NO: 6210 - protein, 9 aa, synthetic construct
  REGION 1..9: note = Description of Artificial Sequence: Synthetic peptide
SYYKLGASQ

SEQ ID NO: 6211 - protein, 9 aa, synthetic construct
  REGION 1..9: note = Description of Artificial Sequence: Synthetic peptide
TAESHVDTD

SEQ ID NO: 6212 - protein, 10 aa, synthetic construct
  REGION 1..10: note = Description of Artificial Sequence: Synthetic peptide
TAESHVDTDL

SEQ ID NO: 6213 - protein, 10 aa, synthetic construct
  REGION 1..10: note = Description of Artificial Sequence: Synthetic peptide
TAHSCNVNRF

SEQ ID NO: 6214 - protein, 11 aa, synthetic construct
  REGION 1..11: note = Description of Artificial Sequence: Synthetic peptide
TAPHGHVMVEL

SEQ ID NO: 6215 - protein, 9 aa, synthetic construct
  REGION 1..9: note = Description of Artificial Sequence: Synthetic peptide
TAVVIPTKK

SEQ ID NO: 6216 - protein, 9 aa, synthetic construct
  REGION 1..9: note = Description of Artificial Sequence: Synthetic peptide
TCYFGLFCL

SEQ ID NO: 6217 - protein, 8 aa, synthetic construct
  REGION 1..8: note = Description of Artificial Sequence: Synthetic peptide
TDDNALAY

SEQ ID NO: 6218 - protein, 9 aa, synthetic construct
  REGION 1..9: note = Description of Artificial Sequence: Synthetic peptide
TDFSRVSAK

SEQ ID NO: 6219 - protein, 9 aa, synthetic construct
  REGION 1..9: note = Description of Artificial Sequence: Synthetic peptide
TDGTLMIER

SEQ ID NO: 6220 - protein, 10 aa, synthetic construct
  REGION 1..10: note = Description of Artificial Sequence: Synthetic peptide
TDLTKGPHEF

SEQ ID NO: 6221 - protein, 8 aa, synthetic construct
  REGION 1..8: note = Description of Artificial Sequence: Synthetic peptide
TDVTQLYL

SEQ ID NO: 6222 - protein, 8 aa, synthetic construct
  REGION 1..8: note = Description of Artificial Sequence: Synthetic peptide
TDVVYRAF

SEQ ID NO: 6223 - protein, 9 aa, synthetic construct
  REGION 1..9: note = Description of Artificial Sequence: Synthetic peptide
TDYKHWPQI

SEQ ID NO: 6224 - protein, 9 aa, synthetic construct
  REGION 1..9: note = Description of Artificial Sequence: Synthetic peptide
TEAFEKMVS

SEQ ID NO: 6225 - protein, 10 aa, synthetic construct
  REGION 1..10: note = Description of Artificial Sequence: Synthetic peptide
TECSNLLLQY

SEQ ID NO: 6226 - protein, 9 aa, synthetic construct
  REGION 1..9: note = Description of Artificial Sequence: Synthetic peptide
TEERLKLFD

SEQ ID NO: 6227 - protein, 8 aa, synthetic construct
  REGION 1..8: note = Description of Artificial Sequence: Synthetic peptide
TEGALNTP

SEQ ID NO: 6228 - protein, 9 aa, synthetic construct
  REGION 1..9: note = Description of Artificial Sequence: Synthetic peptide
TEGLCVDIP

SEQ ID NO: 6229 - protein, 8 aa, synthetic construct
  REGION 1..8: note = Description of Artificial Sequence: Synthetic peptide
TEIDPKLD

SEQ ID NO: 6230 - protein, 11 aa, synthetic construct
  REGION 1..11: note = Description of Artificial Sequence: Synthetic peptide
TEIDPKLDNYY

SEQ ID NO: 6231 - protein, 10 aa, synthetic construct
  REGION 1..10: note = Description of Artificial Sequence: Synthetic peptide
TERSEKSYEL

SEQ ID NO: 6232 - protein, 8 aa, synthetic construct
  REGION 1..8: note = Description of Artificial Sequence: Synthetic peptide
TESIVRFP

SEQ ID NO: 6233 - protein, 10 aa, synthetic construct
  REGION 1..10: note = Description of Artificial Sequence: Synthetic peptide
TESIVRFPNI

SEQ ID NO: 6234 - protein, 10 aa, synthetic construct
  REGION 1..10: note = Description of Artificial Sequence: Synthetic peptide
TESNKKFLPF

SEQ ID NO: 6235 - protein, 12 aa, synthetic construct
  REGION 1..12: note = Description of Artificial Sequence: Synthetic peptide
TETDLTKGPHEF

SEQ ID NO: 6236 - protein, 11 aa, synthetic construct
  REGION 1..11: note = Description of Artificial Sequence: Synthetic peptide
TEVNEFACVVA

SEQ ID NO: 6237 - protein, 8 aa, synthetic construct
  REGION 1..8: note = Description of Artificial Sequence: Synthetic peptide
TEVPANST

SEQ ID NO: 6238 - protein, 12 aa, synthetic construct
  REGION 1..12: note = Description of Artificial Sequence: Synthetic peptide
TEVPANSTVLSF

SEQ ID NO: 6239 - protein, 12 aa, synthetic construct
  REGION 1..12: note = Description of Artificial Sequence: Synthetic peptide
TEVPVAIHADQL

SEQ ID NO: 6240 - protein, 8 aa, synthetic construct
  REGION 1..8: note = Description of Artificial Sequence: Synthetic peptide
TEVVGDII

SEQ ID NO: 6241 - protein, 9 aa, synthetic construct
  REGION 1..9: note = Description of Artificial Sequence: Synthetic peptide
TFCAGSTFI

SEQ ID NO: 6242 - protein, 8 aa, synthetic construct
  REGION 1..8: note = Description of Artificial Sequence: Synthetic peptide
TFLLNKEM

SEQ ID NO: 6243 - protein, 8 aa, synthetic construct
  REGION 1..8: note = Description of Artificial Sequence: Synthetic peptide
TFPPTEPK

SEQ ID NO: 6244 - protein, 9 aa, synthetic construct
  REGION 1..9: note = Description of Artificial Sequence: Synthetic peptide
TFPPTEPKK

SEQ ID NO: 6245 - protein, 8 aa, synthetic construct
  REGION 1..8: note = Description of Artificial Sequence: Synthetic peptide
TFQSAVKR

SEQ ID NO: 6246 - protein, 8 aa, synthetic construct
  REGION 1..8: note = Description of Artificial Sequence: Synthetic peptide
TFSVLACY

SEQ ID NO: 6247 - protein, 8 aa, synthetic construct
  REGION 1..8: note = Description of Artificial Sequence: Synthetic peptide
TFTCASEY

SEQ ID NO: 6248 - protein, 8 aa, synthetic construct
  REGION 1..8: note = Description of Artificial Sequence: Synthetic peptide
TFTRLQSL

SEQ ID NO: 6249 - protein, 9 aa, synthetic construct
  REGION 1..9: note = Description of Artificial Sequence: Synthetic peptide
TFTRSTNSR

SEQ ID NO: 6250 - protein, 10 aa, synthetic construct
  REGION 1..10: note = Description of Artificial Sequence: Synthetic peptide
TFVTHSKGLY

SEQ ID NO: 6251 - protein, 8 aa, synthetic construct
  REGION 1..8: note = Description of Artificial Sequence: Synthetic peptide
TGTIYTEL

SEQ ID NO: 6252 - protein, 9 aa, synthetic construct
  REGION 1..9: note = Description of Artificial Sequence: Synthetic peptide
TGTLIVNSV

SEQ ID NO: 6253 - protein, 9 aa, synthetic construct
  REGION 1..9: note = Description of Artificial Sequence: Synthetic peptide
TGTSTDVVY

SEQ ID NO: 6254 - protein, 10 aa, synthetic construct
  REGION 1..10: note = Description of Artificial Sequence: Synthetic peptide
TGTSTDVVYR

SEQ ID NO: 6255 - protein, 8 aa, synthetic construct
  REGION 1..8: note = Description of Artificial Sequence: Synthetic peptide
TGVNLVAV

SEQ ID NO: 6256 - protein, 10 aa, synthetic construct
  REGION 1..10: note = Description of Artificial Sequence: Synthetic peptide
THGLAAVNSV

SEQ ID NO: 6257 - protein, 8 aa, synthetic construct
  REGION 1..8: note = Description of Artificial Sequence: Synthetic peptide
THSDKFTD

SEQ ID NO: 6258 - protein, 9 aa, synthetic construct
  REGION 1..9: note = Description of Artificial Sequence: Synthetic peptide
THSKGLYRK

SEQ ID NO: 6259 - protein, 9 aa, synthetic construct
  REGION 1..9: note = Description of Artificial Sequence: Synthetic peptide
THVQLSLPV

SEQ ID NO: 6260 - protein, 8 aa, synthetic construct
  REGION 1..8: note = Description of Artificial Sequence: Synthetic peptide
THWFVTQR

SEQ ID NO: 6261 - protein, 8 aa, synthetic construct
  REGION 1..8: note = Description of Artificial Sequence: Synthetic peptide
TICAPLTV

SEQ ID NO: 6262 - protein, 8 aa, synthetic construct
  REGION 1..8: note = Description of Artificial Sequence: Synthetic peptide
TIDGSSGV

SEQ ID NO: 6263 - protein, 10 aa, synthetic construct
  REGION 1..10: note = Description of Artificial Sequence: Synthetic peptide
TIDYTEISFM

SEQ ID NO: 6264 - protein, 10 aa, synthetic construct
  REGION 1..10: note = Description of Artificial Sequence: Synthetic peptide
TIEVNSFSGY

SEQ ID NO: 6265 - protein, 8 aa, synthetic construct
  REGION 1..8: note = Description of Artificial Sequence: Synthetic peptide
TIKVFTTV

SEQ ID NO: 6266 - protein, 9 aa, synthetic construct
  REGION 1..9: note = Description of Artificial Sequence: Synthetic peptide
TINCQEPKL

SEQ ID NO: 6267 - protein, 8 aa, synthetic construct
  REGION 1..8: note = Description of Artificial Sequence: Synthetic peptide
TIPIQASL

SEQ ID NO: 6268 - protein, 9 aa, synthetic construct
  REGION 1..9: note = Description of Artificial Sequence: Synthetic peptide
TIQPRVEKK

SEQ ID NO: 6269 - protein, 8 aa, synthetic construct
  REGION 1..8: note = Description of Artificial Sequence: Synthetic peptide
TIQTIVEV

SEQ ID NO: 6270 - protein, 9 aa, synthetic construct
  REGION 1..9: note = Description of Artificial Sequence: Synthetic peptide
TISVTTEIL

SEQ ID NO: 6271 - protein, 8 aa, synthetic construct
  REGION 1..8: note = Description of Artificial Sequence: Synthetic peptide
TITSGWTF

SEQ ID NO: 6272 - protein, 11 aa, synthetic construct
  REGION 1..11: note = Description of Artificial Sequence: Synthetic peptide
TITVNVLAWLY

SEQ ID NO: 6273 - protein, 8 aa, synthetic construct
  REGION 1..8: note = Description of Artificial Sequence: Synthetic peptide
TIVNGVRR

SEQ ID NO: 6274 - protein, 10 aa, synthetic construct
  REGION 1..10: note = Description of Artificial Sequence: Synthetic peptide
TIVNGVRRSF

SEQ ID NO: 6275 - protein, 11 aa, synthetic construct
  REGION 1..11: note = Description of Artificial Sequence: Synthetic peptide
TKVDGVDVELF

SEQ ID NO: 6276 - protein, 8 aa, synthetic construct
  REGION 1..8: note = Description of Artificial Sequence: Synthetic peptide
TLATCELY

SEQ ID NO: 6277 - protein, 10 aa, synthetic construct
  REGION 1..10: note = Description of Artificial Sequence: Synthetic peptide
TLAVPYNMRV

SEQ ID NO: 6278 - protein, 12 aa, synthetic construct
  REGION 1..12: note = Description of Artificial Sequence: Synthetic peptide
TLDNQDLNGNWY

SEQ ID NO: 6279 - protein, 9 aa, synthetic construct
  REGION 1..9: note = Description of Artificial Sequence: Synthetic peptide
TLGVYDYLV

SEQ ID NO: 6280 - protein, 9 aa, synthetic construct
  REGION 1..9: note = Description of Artificial Sequence: Synthetic peptide
TLIGEAVKT

SEQ ID NO: 6281 - protein, 8 aa, synthetic construct
  REGION 1..8: note = Description of Artificial Sequence: Synthetic peptide
TLKEILVT

SEQ ID NO: 6282 - protein, 9 aa, synthetic construct
  REGION 1..9: note = Description of Artificial Sequence: Synthetic peptide
TLKGGAPTK

SEQ ID NO: 6283 - protein, 10 aa, synthetic construct
  REGION 1..10: note = Description of Artificial Sequence: Synthetic peptide
TLKGGAPTKV

SEQ ID NO: 6284 - protein, 8 aa, synthetic construct
  REGION 1..8: note = Description of Artificial Sequence: Synthetic peptide
TLKGVEAV

SEQ ID NO: 6285 - protein, 8 aa, synthetic construct
  REGION 1..8: note = Description of Artificial Sequence: Synthetic peptide
TLKKRWQL

SEQ ID NO: 6286 - protein, 9 aa, synthetic construct
  REGION 1..9: note = Description of Artificial Sequence: Synthetic peptide
TLKKRWQLA

SEQ ID NO: 6287 - protein, 9 aa, synthetic construct
  REGION 1..9: note = Description of Artificial Sequence: Synthetic peptide
TLKNLSDRV

SEQ ID NO: 6288 - protein, 10 aa, synthetic construct
  REGION 1..10: note = Description of Artificial Sequence: Synthetic peptide
TLLFLMSFTV

SEQ ID NO: 6289 - protein, 8 aa, synthetic construct
  REGION 1..8: note = Description of Artificial Sequence: Synthetic peptide
TLLPAADL

SEQ ID NO: 6290 - protein, 10 aa, synthetic construct
  REGION 1..10: note = Description of Artificial Sequence: Synthetic peptide
TLMIERFVSL

SEQ ID NO: 6291 - protein, 11 aa, synthetic construct
  REGION 1..11: note = Description of Artificial Sequence: Synthetic peptide
TLMNVLTLVYK

SEQ ID NO: 6292 - protein, 8 aa, synthetic construct
  REGION 1..8: note = Description of Artificial Sequence: Synthetic peptide
TLNDFNLV

SEQ ID NO: 6293 - protein, 8 aa, synthetic construct
  REGION 1..8: note = Description of Artificial Sequence: Synthetic peptide
TLNISDEF

SEQ ID NO: 6294 - protein, 9 aa, synthetic construct
  REGION 1..9: note = Description of Artificial Sequence: Synthetic peptide
TLPTEVLTE

SEQ ID NO: 6295 - protein, 10 aa, synthetic construct
  REGION 1..10: note = Description of Artificial Sequence: Synthetic peptide
TLPVNVAFEL

SEQ ID NO: 6296 - protein, 10 aa, synthetic construct
  REGION 1..10: note = Description of Artificial Sequence: Synthetic peptide
TLQGPPGTGK

SEQ ID NO: 6297 - protein, 10 aa, synthetic construct
  REGION 1..10: note = Description of Artificial Sequence: Synthetic peptide
TLVSDIDITF

SEQ ID NO: 6298 - protein, 11 aa, synthetic construct
  REGION 1..11: note = Description of Artificial Sequence: Synthetic peptide
TLVSDIDITFL

SEQ ID NO: 6299 - protein, 9 aa, synthetic construct
  REGION 1..9: note = Description of Artificial Sequence: Synthetic peptide
TLYCIDGAL

SEQ ID NO: 6300 - protein, 8 aa, synthetic construct
  REGION 1..8: note = Description of Artificial Sequence: Synthetic peptide
TMCDIRQL

SEQ ID NO: 6301 - protein, 9 aa, synthetic construct
  REGION 1..9: note = Description of Artificial Sequence: Synthetic peptide
TMLFTMLRK

SEQ ID NO: 6302 - protein, 8 aa, synthetic construct
  REGION 1..8: note = Description of Artificial Sequence: Synthetic peptide
TNDNTSRY

SEQ ID NO: 6303 - protein, 8 aa, synthetic construct
  REGION 1..8: note = Description of Artificial Sequence: Synthetic peptide
TNVTIATY

SEQ ID NO: 6304 - protein, 11 aa, synthetic construct
  REGION 1..11: note = Description of Artificial Sequence: Synthetic peptide
TNYDLSVVNAR

SEQ ID NO: 6305 - protein, 10 aa, synthetic construct
  REGION 1..10: note = Description of Artificial Sequence: Synthetic peptide
TPFEIKLAKK

SEQ ID NO: 6306 - protein, 11 aa, synthetic construct
  REGION 1..11: note = Description of Artificial Sequence: Synthetic peptide
TPFEIKLAKKF

SEQ ID NO: 6307 - protein, 8 aa, synthetic construct
  REGION 1..8: note = Description of Artificial Sequence: Synthetic peptide
TPHTVLQA

SEQ ID NO: 6308 - protein, 11 aa, synthetic construct
  REGION 1..11: note = Description of Artificial Sequence: Synthetic peptide
TPHTVLQAVGA

SEQ ID NO: 6309 - protein, 8 aa, synthetic construct
  REGION 1..8: note = Description of Artificial Sequence: Synthetic peptide
TPKGPKVK

SEQ ID NO: 6310 - protein, 10 aa, synthetic construct
  REGION 1..10: note = Description of Artificial Sequence: Synthetic peptide
TPLGIDLDEW

SEQ ID NO: 6311 - protein, 9 aa, synthetic construct
  REGION 1..9: note = Description of Artificial Sequence: Synthetic peptide
TPLIQPIGA

SEQ ID NO: 6312 - protein, 8 aa, synthetic construct
  REGION 1..8: note = Description of Artificial Sequence: Synthetic peptide
TPSDFVRA

SEQ ID NO: 6313 - protein, 10 aa, synthetic construct
  REGION 1..10: note = Description of Artificial Sequence: Synthetic peptide
TPSDFVRATA

SEQ ID NO: 6314 - protein, 8 aa, synthetic construct
  REGION 1..8: note = Description of Artificial Sequence: Synthetic peptide
TPVCINGL

SEQ ID NO: 6315 - protein, 9 aa, synthetic construct
  REGION 1..9: note = Description of Artificial Sequence: Synthetic peptide
TPVCINGLM

SEQ ID NO: 6316 - protein, 9 aa, synthetic construct
  REGION 1..9: note = Description of Artificial Sequence: Synthetic peptide
TPVHVMSKH

SEQ ID NO: 6317 - protein, 10 aa, synthetic construct
  REGION 1..10: note = Description of Artificial Sequence: Synthetic peptide
TPVYSFLPGV

SEQ ID NO: 6318 - protein, 9 aa, synthetic construct
  REGION 1..9: note = Description of Artificial Sequence: Synthetic peptide
TQALPQRQK

SEQ ID NO: 6319 - protein, 8 aa, synthetic construct
  REGION 1..8: note = Description of Artificial Sequence: Synthetic peptide
TQDLFLPF

SEQ ID NO: 6320 - protein, 9 aa, synthetic construct
  REGION 1..9: note = Description of Artificial Sequence: Synthetic peptide
TQHQPYVVD

SEQ ID NO: 6321 - protein, 9 aa, synthetic construct
  REGION 1..9: note = Description of Artificial Sequence: Synthetic peptide
TQMNLKYAI

SEQ ID NO: 6322 - protein, 10 aa, synthetic construct
  REGION 1..10: note = Description of Artificial Sequence: Synthetic peptide
TRAKVGILCI

SEQ ID NO: 6323 - protein, 9 aa, synthetic construct
  REGION 1..9: note = Description of Artificial Sequence: Synthetic peptide
TRALTAESH

SEQ ID NO: 6324 - protein, 9 aa, synthetic construct
  REGION 1..9: note = Description of Artificial Sequence: Synthetic peptide
TREVGFVVP

SEQ ID NO: 6325 - protein, 8 aa, synthetic construct
  REGION 1..8: note = Description of Artificial Sequence: Synthetic peptide
TRFASVYA

SEQ ID NO: 6326 - protein, 8 aa, synthetic construct
  REGION 1..8: note = Description of Artificial Sequence: Synthetic peptide
TRFQTLLA

SEQ ID NO: 6327 - protein, 8 aa, synthetic construct
  REGION 1..8: note = Description of Artificial Sequence: Synthetic peptide
TRGATVVI

SEQ ID NO: 6328 - protein, 10 aa, synthetic construct
  REGION 1..10: note = Description of Artificial Sequence: Synthetic peptide
TRNPANNAAI

SEQ ID NO: 6329 - protein, 9 aa, synthetic construct
  REGION 1..9: note = Description of Artificial Sequence: Synthetic peptide
TRTQLPPAY

SEQ ID NO: 6330 - protein, 9 aa, synthetic construct
  REGION 1..9: note = Description of Artificial Sequence: Synthetic peptide
TSAFVETVK

SEQ ID NO: 6331 - protein, 8 aa, synthetic construct
  REGION 1..8: note = Description of Artificial Sequence: Synthetic peptide
TSDLATNN

SEQ ID NO: 6332 - protein, 9 aa, synthetic construct
  REGION 1..9: note = Description of Artificial Sequence: Synthetic peptide
TSDYYQLYS

SEQ ID NO: 6333 - protein, 9 aa, synthetic construct
  REGION 1..9: note = Description of Artificial Sequence: Synthetic peptide
TSEAVEAPL

SEQ ID NO: 6334 - protein, 10 aa, synthetic construct
  REGION 1..10: note = Description of Artificial Sequence: Synthetic peptide
TSEDMLNPNY

SEQ ID NO: 6335 - protein, 9 aa, synthetic construct
  REGION 1..9: note = Description of Artificial Sequence: Synthetic peptide
TSGDGTTSP

SEQ ID NO: 6336 - protein, 9 aa, synthetic construct
  REGION 1..9: note = Description of Artificial Sequence: Synthetic peptide
TSKETLYCI

SEQ ID NO: 6337 - protein, 9 aa, synthetic construct
  REGION 1..9: note = Description of Artificial Sequence: Synthetic peptide
TSLEIPRRN

SEQ ID NO: 6338 - protein, 8 aa, synthetic construct
  REGION 1..8: note = Description of Artificial Sequence: Synthetic peptide
TSLSGFKL

SEQ ID NO: 6339 - protein, 9 aa, synthetic construct
  REGION 1..9: note = Description of Artificial Sequence: Synthetic peptide
TSNSFDVLK

SEQ ID NO: 6340 - protein, 9 aa, synthetic construct
  REGION 1..9: note = Description of Artificial Sequence: Synthetic peptide
TSRTLSYYK

SEQ ID NO: 6341 - protein, 10 aa, synthetic construct
  REGION 1..10: note = Description of Artificial Sequence: Synthetic peptide
TSRYWEPEFY

SEQ ID NO: 6342 - protein, 10 aa, synthetic construct
  REGION 1..10: note = Description of Artificial Sequence: Synthetic peptide
TTAAKLMVVI

SEQ ID NO: 6343 - protein, 10 aa, synthetic construct
  REGION 1..10: note = Description of Artificial Sequence: Synthetic peptide
TTADIVVFDE

SEQ ID NO: 6344 - protein, 9 aa, synthetic construct
  REGION 1..9: note = Description of Artificial Sequence: Synthetic peptide
TTDNTFVSG

SEQ ID NO: 6345 - protein, 8 aa, synthetic construct
  REGION 1..8: note = Description of Artificial Sequence: Synthetic peptide
TTDPSFLG

SEQ ID NO: 6346 - protein, 8 aa, synthetic construct
  REGION 1..8: note = Description of Artificial Sequence: Synthetic peptide
TTEAFEKM

SEQ ID NO: 6347 - protein, 8 aa, synthetic construct
  REGION 1..8: note = Description of Artificial Sequence: Synthetic peptide
TTIAKNTV

SEQ ID NO: 6348 - protein, 9 aa, synthetic construct
  REGION 1..9: note = Description of Artificial Sequence: Synthetic peptide
TTITVNVLA

SEQ ID NO: 6349 - protein, 12 aa, synthetic construct
  REGION 1..12: note = Description of Artificial Sequence: Synthetic peptide
TTITVNVLAWLY

SEQ ID NO: 6350 - protein, 11 aa, synthetic construct
  REGION 1..11: note = Description of Artificial Sequence: Synthetic peptide
TTIVNGVRRSF

SEQ ID NO: 6351 - protein, 9 aa, synthetic construct
  REGION 1..9: note = Description of Artificial Sequence: Synthetic peptide
TTLKGVEAV

SEQ ID NO: 6352 - protein, 9 aa, synthetic construct
  REGION 1..9: note = Description of Artificial Sequence: Synthetic peptide
TTLNDFNLV

SEQ ID NO: 6353 - protein, 8 aa, synthetic construct
  REGION 1..8: note = Description of Artificial Sequence: Synthetic peptide
TTLPKGFY

SEQ ID NO: 6354 - protein, 10 aa, synthetic construct
  REGION 1..10: note = Description of Artificial Sequence: Synthetic peptide
TTNGDFLHFL

SEQ ID NO: 6355 - protein, 9 aa, synthetic construct
  REGION 1..9: note = Description of Artificial Sequence: Synthetic peptide
TTPGSGVPV

SEQ ID NO: 6356 - protein, 10 aa, synthetic construct
  REGION 1..10: note = Description of Artificial Sequence: Synthetic peptide
TTPGSGVPVV

SEQ ID NO: 6357 - protein, 10 aa, synthetic construct
  REGION 1..10: note = Description of Artificial Sequence: Synthetic peptide
TTRTQLPPAY

SEQ ID NO: 6358 - protein, 10 aa, synthetic construct
  REGION 1..10: note = Description of Artificial Sequence: Synthetic peptide
TTTIKPVTYK

SEQ ID NO: 6359 - protein, 10 aa, synthetic construct
  REGION 1..10: note = Description of Artificial Sequence: Synthetic peptide
TTTIQTIVEV

SEQ ID NO: 6360 - protein, 9 aa, synthetic construct
  REGION 1..9: note = Description of Artificial Sequence: Synthetic peptide
TTTNIVTRC

SEQ ID NO: 6361 - protein, 10 aa, synthetic construct
  REGION 1..10: note = Description of Artificial Sequence: Synthetic peptide
TTVASLINTL

SEQ ID NO: 6362 - protein, 8 aa, synthetic construct
  REGION 1..8: note = Description of Artificial Sequence: Synthetic peptide
TTVMFLAR

SEQ ID NO: 6363 - protein, 9 aa, synthetic construct
  REGION 1..9: note = Description of Artificial Sequence: Synthetic peptide
TVAGVSICS

SEQ ID NO: 6364 - protein, 10 aa, synthetic construct
  REGION 1..10: note = Description of Artificial Sequence: Synthetic peptide
TVAGVSICST

SEQ ID NO: 6365 - protein, 11 aa, synthetic construct
  REGION 1..11: note = Description of Artificial Sequence: Synthetic peptide
TVEEAKTVLKK

SEQ ID NO: 6366 - protein, 9 aa, synthetic construct
  REGION 1..9: note = Description of Artificial Sequence: Synthetic peptide
TVFPPTSFG

SEQ ID NO: 6367 - protein, 8 aa, synthetic construct
  REGION 1..8: note = Description of Artificial Sequence: Synthetic peptide
TVIWDYKR

SEQ ID NO: 6368 - protein, 9 aa, synthetic construct
  REGION 1..9: note = Description of Artificial Sequence: Synthetic peptide
TVIWDYKRD

SEQ ID NO: 6369 - protein, 8 aa, synthetic construct
  REGION 1..8: note = Description of Artificial Sequence: Synthetic peptide
TVKSVGKF

SEQ ID NO: 6370 - protein, 9 aa, synthetic construct
  REGION 1..9: note = Description of Artificial Sequence: Synthetic peptide
TVKSVGKFC

SEQ ID NO: 6371 - protein, 8 aa, synthetic construct
  REGION 1..8: note = Description of Artificial Sequence: Synthetic peptide
TVREVLSD

SEQ ID NO: 6372 - protein, 9 aa, synthetic construct
  REGION 1..9: note = Description of Artificial Sequence: Synthetic peptide
TVSCLPFTI

SEQ ID NO: 6373 - protein, 8 aa, synthetic construct
  REGION 1..8: note = Description of Artificial Sequence: Synthetic peptide
TVTLLPAA

SEQ ID NO: 6374 - protein, 8 aa, synthetic construct
  REGION 1..8: note = Description of Artificial Sequence: Synthetic peptide
TVYDDGAR

SEQ ID NO: 6375 - protein, 8 aa, synthetic construct
  REGION 1..8: note = Description of Artificial Sequence: Synthetic peptide
TWFHAIHV

SEQ ID NO: 6376 - protein, 11 aa, synthetic construct
  REGION 1..11: note = Description of Artificial Sequence: Synthetic peptide
TYACWHHSIGF

SEQ ID NO: 6377 - protein, 11 aa, synthetic construct
  REGION 1..11: note = Description of Artificial Sequence: Synthetic peptide
TYASQGLVASI

SEQ ID NO: 6378 - protein, 9 aa, synthetic construct
  REGION 1..9: note = Description of Artificial Sequence: Synthetic peptide
TYCTGSIPC

SEQ ID NO: 6379 - protein, 10 aa, synthetic construct
  REGION 1..10: note = Description of Artificial Sequence: Synthetic peptide
TYERHSLSHF

SEQ ID NO: 6380 - protein, 12 aa, synthetic construct
  REGION 1..12: note = Description of Artificial Sequence: Synthetic peptide
TYFTQSRNLQEF

SEQ ID NO: 6381 - protein, 10 aa, synthetic construct
  REGION 1..10: note = Description of Artificial Sequence: Synthetic peptide
TYGQQFGPTY

SEQ ID NO: 6382 - protein, 9 aa, synthetic construct
  REGION 1..9: note = Description of Artificial Sequence: Synthetic peptide
TYHPNCVNC

SEQ ID NO: 6383 - protein, 10 aa, synthetic construct
  REGION 1..10: note = Description of Artificial Sequence: Synthetic peptide
TYICGFIQQK

SEQ ID NO: 6384 - protein, 11 aa, synthetic construct
  REGION 1..11: note = Description of Artificial Sequence: Synthetic peptide
TYICGFIQQKL

SEQ ID NO: 6385 - protein, 11 aa, synthetic construct
  REGION 1..11: note = Description of Artificial Sequence: Synthetic peptide
TYKNTCDGTTF

SEQ ID NO: 6386 - protein, 9 aa, synthetic construct
  REGION 1..9: note = Description of Artificial Sequence: Synthetic peptide
TYKPNTWCI

SEQ ID NO: 6387 - protein, 10 aa, synthetic construct
  REGION 1..10: note = Description of Artificial Sequence: Synthetic peptide
TYKPNTWCIR

SEQ ID NO: 6388 - protein, 8 aa, synthetic construct
  REGION 1..8: note = Description of Artificial Sequence: Synthetic peptide
TYLDGADV

SEQ ID NO: 6389 - protein, 11 aa, synthetic construct
  REGION 1..11: note = Description of Artificial Sequence: Synthetic peptide
TYLDGADVTKI

SEQ ID NO: 6390 - protein, 10 aa, synthetic construct
  REGION 1..10: note = Description of Artificial Sequence: Synthetic peptide
TYNCCDDDYF

SEQ ID NO: 6391 - protein, 11 aa, synthetic construct
  REGION 1..11: note = Description of Artificial Sequence: Synthetic peptide
TYNLWNTFTRL

SEQ ID NO: 6392 - protein, 10 aa, synthetic construct
  REGION 1..10: note = Description of Artificial Sequence: Synthetic peptide
TYPSLETIQI

SEQ ID NO: 6393 - protein, 8 aa, synthetic construct
  REGION 1..8: note = Description of Artificial Sequence: Synthetic peptide
TYVPAQEK

SEQ ID NO: 6394 - protein, 9 aa, synthetic construct
  REGION 1..9: note = Description of Artificial Sequence: Synthetic peptide
TYVPAQEKN

SEQ ID NO: 6395 - protein, 10 aa, synthetic construct
  REGION 1..10: note = Description of Artificial Sequence: Synthetic peptide
TYVPAQEKNF

SEQ ID NO: 6396 - protein, 8 aa, synthetic construct
  REGION 1..8: note = Description of Artificial Sequence: Synthetic peptide
TYVTQQLI

SEQ ID NO: 6397 - protein, 9 aa, synthetic construct
  REGION 1..9: note = Description of Artificial Sequence: Synthetic peptide
TYVTQQLIR

SEQ ID NO: 6398 - protein, 8 aa, synthetic construct
  REGION 1..8: note = Description of Artificial Sequence: Synthetic peptide
VAAFHQEC

SEQ ID NO: 6399 - protein, 10 aa, synthetic construct
  REGION 1..10: note = Description of Artificial Sequence: Synthetic peptide
VAAFHQECSL

SEQ ID NO: 6400 - protein, 11 aa, synthetic construct
  REGION 1..11: note = Description of Artificial Sequence: Synthetic peptide
VAAGLEAPFLY

SEQ ID NO: 6401 - protein, 9 aa, synthetic construct
  REGION 1..9: note = Description of Artificial Sequence: Synthetic peptide
VAAIFYLIT

SEQ ID NO: 6402 - protein, 8 aa, synthetic construct
  REGION 1..8: note = Description of Artificial Sequence: Synthetic peptide
VAALTNNV

SEQ ID NO: 6403 - protein, 8 aa, synthetic construct
  REGION 1..8: note = Description of Artificial Sequence: Synthetic peptide
VADAVIKT

SEQ ID NO: 6404 - protein, 8 aa, synthetic construct
  REGION 1..8: note = Description of Artificial Sequence: Synthetic peptide
VAFELWAK

SEQ ID NO: 6405 - protein, 10 aa, synthetic construct
  REGION 1..10: note = Description of Artificial Sequence: Synthetic peptide
VAFNTLLFLM

SEQ ID NO: 6406 - protein, 9 aa, synthetic construct
  REGION 1..9: note = Description of Artificial Sequence: Synthetic peptide
VAITRAKVG

SEQ ID NO: 6407 - protein, 8 aa, synthetic construct
  REGION 1..8: note = Description of Artificial Sequence: Synthetic peptide
VATVQSKM

SEQ ID NO: 6408 - protein, 8 aa, synthetic construct
  REGION 1..8: note = Description of Artificial Sequence: Synthetic peptide
VAYESLRP

SEQ ID NO: 6409 - protein, 10 aa, synthetic construct
  REGION 1..10: note = Description of Artificial Sequence: Synthetic peptide
VAYRKVLLRK

SEQ ID NO: 6410 - protein, 9 aa, synthetic construct
  REGION 1..9: note = Description of Artificial Sequence: Synthetic peptide
VAYSNNSIA

SEQ ID NO: 6411 - protein, 8 aa, synthetic construct
  REGION 1..8: note = Description of Artificial Sequence: Synthetic peptide
VCNLLLLF

SEQ ID NO: 6412 - protein, 9 aa, synthetic construct
  REGION 1..9: note = Description of Artificial Sequence: Synthetic peptide
VCNLLLLFV

SEQ ID NO: 6413 - protein, 9 aa, synthetic construct
  REGION 1..9: note = Description of Artificial Sequence: Synthetic peptide
VCSVIDLLL

SEQ ID NO: 6414 - protein, 9 aa, synthetic construct
  REGION 1..9: note = Description of Artificial Sequence: Synthetic peptide
VCVSTSGRW

SEQ ID NO: 6415 - protein, 8 aa, synthetic construct
  REGION 1..8: note = Description of Artificial Sequence: Synthetic peptide
VDIAANTV

SEQ ID NO: 6416 - protein, 9 aa, synthetic construct
  REGION 1..9: note = Description of Artificial Sequence: Synthetic peptide
VDLPIGINI

SEQ ID NO: 6417 - protein, 11 aa, synthetic construct
  REGION 1..11: note = Description of Artificial Sequence: Synthetic peptide
VDMSMTYGQQF

SEQ ID NO: 6418 - protein, 9 aa, synthetic construct
  REGION 1..9: note = Description of Artificial Sequence: Synthetic peptide
VDTPNNTDF

SEQ ID NO: 6419 - protein, 9 aa, synthetic construct
  REGION 1..9: note = Description of Artificial Sequence: Synthetic peptide
VDTVSALVY

SEQ ID NO: 6420 - protein, 9 aa, synthetic construct
  REGION 1..9: note = Description of Artificial Sequence: Synthetic peptide
VDYGARFYF

SEQ ID NO: 6421 - protein, 10 aa, synthetic construct
  REGION 1..10: note = Description of Artificial Sequence: Synthetic peptide
VDYGARFYFY

SEQ ID NO: 6422 - protein, 11 aa, synthetic construct
  REGION 1..11: note = Description of Artificial Sequence: Synthetic peptide
VEAEVQIDRLI

SEQ ID NO: 6423 - protein, 10 aa, synthetic construct
  REGION 1..10: note = Description of Artificial Sequence: Synthetic peptide
VEGCHATREA

SEQ ID NO: 6424 - protein, 9 aa, synthetic construct
  REGION 1..9: note = Description of Artificial Sequence: Synthetic peptide
VEGFNCYFP

SEQ ID NO: 6425 - protein, 8 aa, synthetic construct
  REGION 1..8: note = Description of Artificial Sequence: Synthetic peptide
VELKHFFF

SEQ ID NO: 6426 - protein, 10 aa, synthetic construct
  REGION 1..10: note = Description of Artificial Sequence: Synthetic peptide
VELVAELEGI

SEQ ID NO: 6427 - protein, 11 aa, synthetic construct
  REGION 1..11: note = Description of Artificial Sequence: Synthetic peptide
VENPHLMGWDY

SEQ ID NO: 6428 - protein, 9 aa, synthetic construct
  REGION 1..9: note = Description of Artificial Sequence: Synthetic peptide
VESDDYIAT

SEQ ID NO: 6429 - protein, 10 aa, synthetic construct
  REGION 1..10: note = Description of Artificial Sequence: Synthetic peptide
VETKAIVSTI

SEQ ID NO: 6430 - protein, 10 aa, synthetic construct
  REGION 1..10: note = Description of Artificial Sequence: Synthetic peptide
VETKDVVECL

SEQ ID NO: 6431 - protein, 10 aa, synthetic construct
  REGION 1..10: note = Description of Artificial Sequence: Synthetic peptide
VETSNSFDVL

SEQ ID NO: 6432 - protein, 8 aa, synthetic construct
  REGION 1..8: note = Description of Artificial Sequence: Synthetic peptide
VEYCPIFF

SEQ ID NO: 6433 - protein, 9 aa, synthetic construct
  REGION 1..9: note = Description of Artificial Sequence: Synthetic peptide
VFDEISMAT

SEQ ID NO: 6434 - protein, 8 aa, synthetic construct
  REGION 1..8: note = Description of Artificial Sequence: Synthetic peptide
VFDGKSKC

SEQ ID NO: 6435 - protein, 9 aa, synthetic construct
  REGION 1..9: note = Description of Artificial Sequence: Synthetic peptide
VFFDGRVDG

SEQ ID NO: 6436 - protein, 8 aa, synthetic construct
  REGION 1..8: note = Description of Artificial Sequence: Synthetic peptide
VFLGIITT

SEQ ID NO: 6437 - protein, 8 aa, synthetic construct
  REGION 1..8: note = Description of Artificial Sequence: Synthetic peptide
VFMCVEYC

SEQ ID NO: 6438 - protein, 9 aa, synthetic construct
  REGION 1..9: note = Description of Artificial Sequence: Synthetic peptide
VFPPTSFGP

SEQ ID NO: 6439 - protein, 9 aa, synthetic construct
  REGION 1..9: note = Description of Artificial Sequence: Synthetic peptide
VFQSASKII

SEQ ID NO: 6440 - protein, 8 aa, synthetic construct
  REGION 1..8: note = Description of Artificial Sequence: Synthetic peptide
VFQTRAGC

SEQ ID NO: 6441 - protein, 8 aa, synthetic construct
  REGION 1..8: note = Description of Artificial Sequence: Synthetic peptide
VFYKENSY

SEQ ID NO: 6442 - protein, 9 aa, synthetic construct
  REGION 1..9: note = Description of Artificial Sequence: Synthetic peptide
VGDVVQEGV

SEQ ID NO: 6443 - protein, 10 aa, synthetic construct
  REGION 1..10: note = Description of Artificial Sequence: Synthetic peptide
VGDVVQEGVL

SEQ ID NO: 6444 - protein, 9 aa, synthetic construct
  REGION 1..9: note = Description of Artificial Sequence: Synthetic peptide
VGFTLKNTV

SEQ ID NO: 6445 - protein, 8 aa, synthetic construct
  REGION 1..8: note = Description of Artificial Sequence: Synthetic peptide
VGFVVPGL

SEQ ID NO: 6446 - protein, 9 aa, synthetic construct
  REGION 1..9: note = Description of Artificial Sequence: Synthetic peptide
VGGNYNYLY

SEQ ID NO: 6447 - protein, 9 aa, synthetic construct
  REGION 1..9: note = Description of Artificial Sequence: Synthetic peptide
VGLMWLSYF

SEQ ID NO: 6448 - protein, 8 aa, synthetic construct
  REGION 1..8: note = Description of Artificial Sequence: Synthetic peptide
VGVALLAV

SEQ ID NO: 6449 - protein, 8 aa, synthetic construct
  REGION 1..8: note = Description of Artificial Sequence: Synthetic peptide
VGYQPYRV

SEQ ID NO: 6450 - protein, 9 aa, synthetic construct
  REGION 1..9: note = Description of Artificial Sequence: Synthetic peptide
VHTANKWDL

SEQ ID NO: 6451 - protein, 10 aa, synthetic construct
  REGION 1..10: note = Description of Artificial Sequence: Synthetic peptide
VIGIVNNTVY

SEQ ID NO: 6452 - protein, 8 aa, synthetic construct
  REGION 1..8: note = Description of Artificial Sequence: Synthetic peptide
VILRGHLR

SEQ ID NO: 6453 - protein, 8 aa, synthetic construct
  REGION 1..8: note = Description of Artificial Sequence: Synthetic peptide
VIPTITQM

SEQ ID NO: 6454 - protein, 10 aa, synthetic construct
  REGION 1..10: note = Description of Artificial Sequence: Synthetic peptide
VIPTITQMNL

SEQ ID NO: 6455 - protein, 8 aa, synthetic construct
  REGION 1..8: note = Description of Artificial Sequence: Synthetic peptide
VKCTSVVL

SEQ ID NO: 6456 - protein, 8 aa, synthetic construct
  REGION 1..8: note = Description of Artificial Sequence: Synthetic peptide
VKPSFYVY

SEQ ID NO: 6457 - protein, 10 aa, synthetic construct
  REGION 1..10: note = Description of Artificial Sequence: Synthetic peptide
VLAAECTIFK

SEQ ID NO: 6458 - protein, 8 aa, synthetic construct
  REGION 1..8: note = Description of Artificial Sequence: Synthetic peptide
VLALLSDL

SEQ ID NO: 6459 - protein, 11 aa, synthetic construct
  REGION 1..11: note = Description of Artificial Sequence: Synthetic peptide
VLDMCASLKEL

SEQ ID NO: 6460 - protein, 8 aa, synthetic construct
  REGION 1..8: note = Description of Artificial Sequence: Synthetic peptide
VLDWLEEK

SEQ ID NO: 6461 - protein, 8 aa, synthetic construct
  REGION 1..8: note = Description of Artificial Sequence: Synthetic peptide
VLHSTQDL

SEQ ID NO: 6462 - protein, 9 aa, synthetic construct
  REGION 1..9: note = Description of Artificial Sequence: Synthetic peptide
VLHSYFTSD

SEQ ID NO: 6463 - protein, 11 aa, synthetic construct
  REGION 1..11: note = Description of Artificial Sequence: Synthetic peptide
VLHSYFTSDYY

SEQ ID NO: 6464 - protein, 10 aa, synthetic construct
  REGION 1..10: note = Description of Artificial Sequence: Synthetic peptide
VLIMLIIFWF

SEQ ID NO: 6465 - protein, 10 aa, synthetic construct
  REGION 1..10: note = Description of Artificial Sequence: Synthetic peptide
VLKKCKSAFY

SEQ ID NO: 6466 - protein, 9 aa, synthetic construct
  REGION 1..9: note = Description of Artificial Sequence: Synthetic peptide
VLKLKVDTA

SEQ ID NO: 6467 - protein, 8 aa, synthetic construct
  REGION 1..8: note = Description of Artificial Sequence: Synthetic peptide
VLLFLAFV

SEQ ID NO: 6468 - protein, 10 aa, synthetic construct
  REGION 1..10: note = Description of Artificial Sequence: Synthetic peptide
VLLFLAFVVF

SEQ ID NO: 6469 - protein, 10 aa, synthetic construct
  REGION 1..10: note = Description of Artificial Sequence: Synthetic peptide
VLLPLTQYNR

SEQ ID NO: 6470 - protein, 11 aa, synthetic construct
  REGION 1..11: note = Description of Artificial Sequence: Synthetic peptide
VLLPLTQYNRY

SEQ ID NO: 6471 - protein, 9 aa, synthetic construct
  REGION 1..9: note = Description of Artificial Sequence: Synthetic peptide
VLLSMQGAV

SEQ ID NO: 6472 - protein, 11 aa, synthetic construct
  REGION 1..11: note = Description of Artificial Sequence: Synthetic peptide
VLLSVLQQLRV

SEQ ID NO: 6473 - protein, 8 aa, synthetic construct
  REGION 1..8: note = Description of Artificial Sequence: Synthetic peptide
VLNEKCSA

SEQ ID NO: 6474 - protein, 8 aa, synthetic construct
  REGION 1..8: note = Description of Artificial Sequence: Synthetic peptide
VLNNDYYR

SEQ ID NO: 6475 - protein, 9 aa, synthetic construct
  REGION 1..9: note = Description of Artificial Sequence: Synthetic peptide
VLPPLLTDE

SEQ ID NO: 6476 - protein, 10 aa, synthetic construct
  REGION 1..10: note = Description of Artificial Sequence: Synthetic peptide
VLPPLLTDEM

SEQ ID NO: 6477 - protein, 10 aa, synthetic construct
  REGION 1..10: note = Description of Artificial Sequence: Synthetic peptide
VLPQLEQPYV

SEQ ID NO: 6478 - protein, 10 aa, synthetic construct
  REGION 1..10: note = Description of Artificial Sequence: Synthetic peptide
VLQLPQGTTL

SEQ ID NO: 6479 - protein, 9 aa, synthetic construct
  REGION 1..9: note = Description of Artificial Sequence: Synthetic peptide
VLQSGFRKM

SEQ ID NO: 6480 - protein, 10 aa, synthetic construct
  REGION 1..10: note = Description of Artificial Sequence: Synthetic peptide
VLQVRDVLVR

SEQ ID NO: 6481 - protein, 9 aa, synthetic construct
  REGION 1..9: note = Description of Artificial Sequence: Synthetic peptide
VLRQWLPTG

SEQ ID NO: 6482 - protein, 9 aa, synthetic construct
  REGION 1..9: note = Description of Artificial Sequence: Synthetic peptide
VLSFCAFAV

SEQ ID NO: 6483 - protein, 9 aa, synthetic construct
  REGION 1..9: note = Description of Artificial Sequence: Synthetic peptide
VLSGHNLAK

SEQ ID NO: 6484 - protein, 8 aa, synthetic construct
  REGION 1..8: note = Description of Artificial Sequence: Synthetic peptide
VLTLVYKV

SEQ ID NO: 6485 - protein, 10 aa, synthetic construct
  REGION 1..10: note = Description of Artificial Sequence: Synthetic peptide
VLTLVYKVYY

SEQ ID NO: 6486 - protein, 10 aa, synthetic construct
  REGION 1..10: note = Description of Artificial Sequence: Synthetic peptide
VLYQPPQTSI

SEQ ID NO: 6487 - protein, 10 aa, synthetic construct
  REGION 1..10: note = Description of Artificial Sequence: Synthetic peptide
VMFLARGIVF

SEQ ID NO: 6488 - protein, 10 aa, synthetic construct
  REGION 1..10: note = Description of Artificial Sequence: Synthetic peptide
VMMSAPPAQY

SEQ ID NO: 6489 - protein, 8 aa, synthetic construct
  REGION 1..8: note = Description of Artificial Sequence: Synthetic peptide
VMYASAVV

SEQ ID NO: 6490 - protein, 9 aa, synthetic construct
  REGION 1..9: note = Description of Artificial Sequence: Synthetic peptide
VNLKQLPFF

SEQ ID NO: 6491 - protein, 8 aa, synthetic construct
  REGION 1..8: note = Description of Artificial Sequence: Synthetic peptide
VNQNAQAL

SEQ ID NO: 6492 - protein, 11 aa, synthetic construct
  REGION 1..11: note = Description of Artificial Sequence: Synthetic peptide
VPAQEKNFTTA

SEQ ID NO: 6493 - protein, 10 aa, synthetic construct
  REGION 1..10: note = Description of Artificial Sequence: Synthetic peptide
VPEVKILNNL

SEQ ID NO: 6494 - protein, 10 aa, synthetic construct
  REGION 1..10: note = Description of Artificial Sequence: Synthetic peptide
VPHVGEIPVA

SEQ ID NO: 6495 - protein, 9 aa, synthetic construct
  REGION 1..9: note = Description of Artificial Sequence: Synthetic peptide
VPLHGTILT

SEQ ID NO: 6496 - protein, 11 aa, synthetic construct
  REGION 1..11: note = Description of Artificial Sequence: Synthetic peptide
VPLNIIPLTTA

SEQ ID NO: 6497 - protein, 11 aa, synthetic construct
  REGION 1..11: note = Description of Artificial Sequence: Synthetic peptide
VPMEKLKTLVA

SEQ ID NO: 6498 - protein, 11 aa, synthetic construct
  REGION 1..11: note = Description of Artificial Sequence: Synthetic peptide
VPNQPYPNASF

SEQ ID NO: 6499 - protein, 10 aa, synthetic construct
  REGION 1..10: note = Description of Artificial Sequence: Synthetic peptide
VPQADVEWKF

SEQ ID NO: 6500 - protein, 8 aa, synthetic construct
  REGION 1..8: note = Description of Artificial Sequence: Synthetic peptide
VPRASANI

SEQ ID NO: 6501 - protein, 9 aa, synthetic construct
  REGION 1..9: note = Description of Artificial Sequence: Synthetic peptide
VPVSIINNT

SEQ ID NO: 6502 - protein, 8 aa, synthetic construct
  REGION 1..8: note = Description of Artificial Sequence: Synthetic peptide
VPWDTIAN

SEQ ID NO: 6503 - protein, 10 aa, synthetic construct
  REGION 1..10: note = Description of Artificial Sequence: Synthetic peptide
VPWDTIANYA

SEQ ID NO: 6504 - protein, 9 aa, synthetic construct
  REGION 1..9: note = Description of Artificial Sequence: Synthetic peptide
VPYCYDTNV

SEQ ID NO: 6505 - protein, 10 aa, synthetic construct
  REGION 1..10: note = Description of Artificial Sequence: Synthetic peptide
VQIDRLITGR

SEQ ID NO: 6506 - protein, 9 aa, synthetic construct
  REGION 1..9: note = Description of Artificial Sequence: Synthetic peptide
VQIPTTCAN

SEQ ID NO: 6507 - protein, 10 aa, synthetic construct
  REGION 1..10: note = Description of Artificial Sequence: Synthetic peptide
VQLSLPVLQV

SEQ ID NO: 6508 - protein, 8 aa, synthetic construct
  REGION 1..8: note = Description of Artificial Sequence: Synthetic peptide
VQLTSQWL

SEQ ID NO: 6509 - protein, 9 aa, synthetic construct
  REGION 1..9: note = Description of Artificial Sequence: Synthetic peptide
VQPTESIVR

SEQ ID NO: 6510 - protein, 8 aa, synthetic construct
  REGION 1..8: note = Description of Artificial Sequence: Synthetic peptide
VQSTQWSL

SEQ ID NO: 6511 - protein, 8 aa, synthetic construct
  REGION 1..8: note = Description of Artificial Sequence: Synthetic peptide
VRDLPQGF

SEQ ID NO: 6512 - protein, 10 aa, synthetic construct
  REGION 1..10: note = Description of Artificial Sequence: Synthetic peptide
VRITGLYPTL

SEQ ID NO: 6513 - protein, 8 aa, synthetic construct
  REGION 1..8: note = Description of Artificial Sequence: Synthetic peptide
VRNLQHRL

SEQ ID NO: 6514 - protein, 9 aa, synthetic construct
  REGION 1..9: note = Description of Artificial Sequence: Synthetic peptide
VRQALLKTV

SEQ ID NO: 6515 - protein, 8 aa, synthetic construct
  REGION 1..8: note = Description of Artificial Sequence: Synthetic peptide
VRRSFYVY

SEQ ID NO: 6516 - protein, 10 aa, synthetic construct
  REGION 1..10: note = Description of Artificial Sequence: Synthetic peptide
VSDADSTLIG

SEQ ID NO: 6517 - protein, 10 aa, synthetic construct
  REGION 1..10: note = Description of Artificial Sequence: Synthetic peptide
VSDIDYVPLK

SEQ ID NO: 6518 - protein, 8 aa, synthetic construct
  REGION 1..8: note = Description of Artificial Sequence: Synthetic peptide
VSDVGDSA

SEQ ID NO: 6519 - protein, 10 aa, synthetic construct
  REGION 1..10: note = Description of Artificial Sequence: Synthetic peptide
VSEETGTLIV

SEQ ID NO: 6520 - protein, 8 aa, synthetic construct
  REGION 1..8: note = Description of Artificial Sequence: Synthetic peptide
VSEEVVEN

SEQ ID NO: 6521 - protein, 8 aa, synthetic construct
  REGION 1..8: note = Description of Artificial Sequence: Synthetic peptide
VSFLAHIQ

SEQ ID NO: 6522 - protein, 9 aa, synthetic construct
  REGION 1..9: note = Description of Artificial Sequence: Synthetic peptide
VSFSTFEEA

SEQ ID NO: 6523 - protein, 10 aa, synthetic construct
  REGION 1..10: note = Description of Artificial Sequence: Synthetic peptide
VSICSTMTNR

SEQ ID NO: 6524 - protein, 8 aa, synthetic construct
  REGION 1..8: note = Description of Artificial Sequence: Synthetic peptide
VSIINNTV

SEQ ID NO: 6525 - protein, 9 aa, synthetic construct
  REGION 1..9: note = Description of Artificial Sequence: Synthetic peptide
VSIWNLDYI

SEQ ID NO: 6526 - protein, 9 aa, synthetic construct
  REGION 1..9: note = Description of Artificial Sequence: Synthetic peptide
VSKGFFKEG

SEQ ID NO: 6527 - protein, 8 aa, synthetic construct
  REGION 1..8: note = Description of Artificial Sequence: Synthetic peptide
VSLAIDAY

SEQ ID NO: 6528 - protein, 9 aa, synthetic construct
  REGION 1..9: note = Description of Artificial Sequence: Synthetic peptide
VSPTKLNDL

SEQ ID NO: 6529 - protein, 8 aa, synthetic construct
  REGION 1..8: note = Description of Artificial Sequence: Synthetic peptide
VSSQCVNL

SEQ ID NO: 6530 - protein, 11 aa, synthetic construct
  REGION 1..11: note = Description of Artificial Sequence: Synthetic peptide
VSSQCVNLTTR

SEQ ID NO: 6531 - protein, 8 aa, synthetic construct
  REGION 1..8: note = Description of Artificial Sequence: Synthetic peptide
VSTTTNIV

SEQ ID NO: 6532 - protein, 9 aa, synthetic construct
  REGION 1..9: note = Description of Artificial Sequence: Synthetic peptide
VSVSSPDAV

SEQ ID NO: 6533 - protein, 10 aa, synthetic construct
  REGION 1..10: note = Description of Artificial Sequence: Synthetic peptide
VTDFNAIATC

SEQ ID NO: 6534 - protein, 9 aa, synthetic construct
  REGION 1..9: note = Description of Artificial Sequence: Synthetic peptide
VTDTPKGPK

SEQ ID NO: 6535 - protein, 12 aa, synthetic construct
  REGION 1..12: note = Description of Artificial Sequence: Synthetic peptide
VTDTPKGPKVKY

SEQ ID NO: 6536 - protein, 10 aa, synthetic construct
  REGION 1..10: note = Description of Artificial Sequence: Synthetic peptide
VTDVTQLYLG

SEQ ID NO: 6537 - protein, 8 aa, synthetic construct
  REGION 1..8: note = Description of Artificial Sequence: Synthetic peptide
VTFFIYNK

SEQ ID NO: 6538 - protein, 10 aa, synthetic construct
  REGION 1..10: note = Description of Artificial Sequence: Synthetic peptide
VTFFIYNKIV

SEQ ID NO: 6539 - protein, 11 aa, synthetic construct
  REGION 1..11: note = Description of Artificial Sequence: Synthetic peptide
VTKENDSKEGF

SEQ ID NO: 6540 - protein, 9 aa, synthetic construct
  REGION 1..9: note = Description of Artificial Sequence: Synthetic peptide
VTKNSKVQI

SEQ ID NO: 6541 - protein, 10 aa, synthetic construct
  REGION 1..10: note = Description of Artificial Sequence: Synthetic peptide
VTLADAGFIK

SEQ ID NO: 6542 - protein, 8 aa, synthetic construct
  REGION 1..8: note = Description of Artificial Sequence: Synthetic peptide
VTLVFLFV

SEQ ID NO: 6543 - protein, 9 aa, synthetic construct
  REGION 1..9: note = Description of Artificial Sequence: Synthetic peptide
VTLVFLFVA

SEQ ID NO: 6544 - protein, 8 aa, synthetic construct
  REGION 1..8: note = Description of Artificial Sequence: Synthetic peptide
VTMPLGYV

SEQ ID NO: 6545 - protein, 12 aa, synthetic construct
  REGION 1..12: note = Description of Artificial Sequence: Synthetic peptide
VTQLYLGGMSYY

SEQ ID NO: 6546 - protein, 9 aa, synthetic construct
  REGION 1..9: note = Description of Artificial Sequence: Synthetic peptide
VTSAMQTML

SEQ ID NO: 6547 - protein, 10 aa, synthetic construct
  REGION 1..10: note = Description of Artificial Sequence: Synthetic peptide
VTTEILPVSM

SEQ ID NO: 6548 - protein, 8 aa, synthetic construct
  REGION 1..8: note = Description of Artificial Sequence: Synthetic peptide
VTTFDSEY

SEQ ID NO: 6549 - protein, 10 aa, synthetic construct
  REGION 1..10: note = Description of Artificial Sequence: Synthetic peptide
VTVKNGSIHL

SEQ ID NO: 6550 - protein, 10 aa, synthetic construct
  REGION 1..10: note = Description of Artificial Sequence: Synthetic peptide
VTVYSHLLLV

SEQ ID NO: 6551 - protein, 10 aa, synthetic construct
  REGION 1..10: note = Description of Artificial Sequence: Synthetic peptide
VTYKLDGVVC

SEQ ID NO: 6552 - protein, 8 aa, synthetic construct
  REGION 1..8: note = Description of Artificial Sequence: Synthetic peptide
VVADAVIK

SEQ ID NO: 6553 - protein, 8 aa, synthetic construct
  REGION 1..8: note = Description of Artificial Sequence: Synthetic peptide
VVAFNTLL

SEQ ID NO: 6554 - protein, 8 aa, synthetic construct
  REGION 1..8: note = Description of Artificial Sequence: Synthetic peptide
VVCFNSTY

SEQ ID NO: 6555 - protein, 9 aa, synthetic construct
  REGION 1..9: note = Description of Artificial Sequence: Synthetic peptide
VVCTEIDPK

SEQ ID NO: 6556 - protein, 8 aa, synthetic construct
  REGION 1..8: note = Description of Artificial Sequence: Synthetic peptide
VVDADSKI

SEQ ID NO: 6557 - protein, 9 aa, synthetic construct
  REGION 1..9: note = Description of Artificial Sequence: Synthetic peptide
VVDGCNSST

SEQ ID NO: 6558 - protein, 11 aa, synthetic construct
  REGION 1..11: note = Description of Artificial Sequence: Synthetic peptide
VVDYGARFYFY

SEQ ID NO: 6559 - protein, 8 aa, synthetic construct
  REGION 1..8: note = Description of Artificial Sequence: Synthetic peptide
VVEVVDKY

SEQ ID NO: 6560 - protein, 12 aa, synthetic construct
  REGION 1..12: note = Description of Artificial Sequence: Synthetic peptide
VVEVVDKYFDCY

SEQ ID NO: 6561 - protein, 12 aa, synthetic construct
  REGION 1..12: note = Description of Artificial Sequence: Synthetic peptide
VVFDEISMATNY

SEQ ID NO: 6562 - protein, 8 aa, synthetic construct
  REGION 1..8: note = Description of Artificial Sequence: Synthetic peptide
VVKVTIDY

SEQ ID NO: 6563 - protein, 9 aa, synthetic construct
  REGION 1..9: note = Description of Artificial Sequence: Synthetic peptide
VVLLILMTA

SEQ ID NO: 6564 - protein, 9 aa, synthetic construct
  REGION 1..9: note = Description of Artificial Sequence: Synthetic peptide
VVLLSVLQQ

SEQ ID NO: 6565 - protein, 10 aa, synthetic construct
  REGION 1..10: note = Description of Artificial Sequence: Synthetic peptide
VVNAANVYLK

SEQ ID NO: 6566 - protein, 8 aa, synthetic construct
  REGION 1..8: note = Description of Artificial Sequence: Synthetic peptide
VVNIQKEI

SEQ ID NO: 6567 - protein, 9 aa, synthetic construct
  REGION 1..9: note = Description of Artificial Sequence: Synthetic peptide
VVQLTSQWL

SEQ ID NO: 6568 - protein, 9 aa, synthetic construct
  REGION 1..9: note = Description of Artificial Sequence: Synthetic peptide
VVRSIFSRT

SEQ ID NO: 6569 - protein, 10 aa, synthetic construct
  REGION 1..10: note = Description of Artificial Sequence: Synthetic peptide
VVSDIDYVPL

SEQ ID NO: 6570 - protein, 11 aa, synthetic construct
  REGION 1..11: note = Description of Artificial Sequence: Synthetic peptide
VVSDIDYVPLK

SEQ ID NO: 6571 - protein, 10 aa, synthetic construct
  REGION 1..10: note = Description of Artificial Sequence: Synthetic peptide
VVSKVVKVTI

SEQ ID NO: 6572 - protein, 9 aa, synthetic construct
  REGION 1..9: note = Description of Artificial Sequence: Synthetic peptide
VVTCLAYYF

SEQ ID NO: 6573 - protein, 10 aa, synthetic construct
  REGION 1..10: note = Description of Artificial Sequence: Synthetic peptide
VVYRGTTTYK

SEQ ID NO: 6574 - protein, 8 aa, synthetic construct
  REGION 1..8: note = Description of Artificial Sequence: Synthetic peptide
VWTLMNVL

SEQ ID NO: 6575 - protein, 10 aa, synthetic construct
  REGION 1..10: note = Description of Artificial Sequence: Synthetic peptide
VYANLGERVR

SEQ ID NO: 6576 - protein, 9 aa, synthetic construct
  REGION 1..9: note = Description of Artificial Sequence: Synthetic peptide
VYAWNRKRI

SEQ ID NO: 6577 - protein, 10 aa, synthetic construct
  REGION 1..10: note = Description of Artificial Sequence: Synthetic peptide
VYDPLQPELD

SEQ ID NO: 6578 - protein, 9 aa, synthetic construct
  REGION 1..9: note = Description of Artificial Sequence: Synthetic peptide
VYDYLVSTQ

SEQ ID NO: 6579 - protein, 8 aa, synthetic construct
  REGION 1..8: note = Description of Artificial Sequence: Synthetic peptide
VYFASTEK

SEQ ID NO: 6580 - protein, 10 aa, synthetic construct
  REGION 1..10: note = Description of Artificial Sequence: Synthetic peptide
VYIGDPAQLP

SEQ ID NO: 6581 - protein, 8 aa, synthetic construct
  REGION 1..8: note = Description of Artificial Sequence: Synthetic peptide
VYIKNADI

SEQ ID NO: 6582 - protein, 9 aa, synthetic construct
  REGION 1..9: note = Description of Artificial Sequence: Synthetic peptide
VYIKNADIV

SEQ ID NO: 6583 - protein, 10 aa, synthetic construct
  REGION 1..10: note = Description of Artificial Sequence: Synthetic peptide
VYKQFDTYNL

SEQ ID NO: 6584 - protein, 10 aa, synthetic construct
  REGION 1..10: note = Description of Artificial Sequence: Synthetic peptide
VYLAVFDKNL

SEQ ID NO: 6585 - protein, 10 aa, synthetic construct
  REGION 1..10: note = Description of Artificial Sequence: Synthetic peptide
VYLPYPDPSR

SEQ ID NO: 6586 - protein, 11 aa, synthetic construct
  REGION 1..11: note = Description of Artificial Sequence: Synthetic peptide
VYLPYPDPSRI

SEQ ID NO: 6587 - protein, 11 aa, synthetic construct
  REGION 1..11: note = Description of Artificial Sequence: Synthetic peptide
VYMPASWVMRI

SEQ ID NO: 6588 - protein, 8 aa, synthetic construct
  REGION 1..8: note = Description of Artificial Sequence: Synthetic peptide
VYPVASPN

SEQ ID NO: 6589 - protein, 9 aa, synthetic construct
  REGION 1..9: note = Description of Artificial Sequence: Synthetic peptide
VYRGTTTYK

SEQ ID NO: 6590 - protein, 10 aa, synthetic construct
  REGION 1..10: note = Description of Artificial Sequence: Synthetic peptide
VYRGTTTYKL

SEQ ID NO: 6591 - protein, 11 aa, synthetic construct
  REGION 1..11: note = Description of Artificial Sequence: Synthetic peptide
VYSDVENPHLM

SEQ ID NO: 6592 - protein, 9 aa, synthetic construct
  REGION 1..9: note = Description of Artificial Sequence: Synthetic peptide
VYSRVKNLN

SEQ ID NO: 6593 - protein, 10 aa, synthetic construct
  REGION 1..10: note = Description of Artificial Sequence: Synthetic peptide
VYSSANNCTF

SEQ ID NO: 6594 - protein, 8 aa, synthetic construct
  REGION 1..8: note = Description of Artificial Sequence: Synthetic peptide
VYSTGSNV

SEQ ID NO: 6595 - protein, 9 aa, synthetic construct
  REGION 1..9: note = Description of Artificial Sequence: Synthetic peptide
VYYHKNNKS

SEQ ID NO: 6596 - protein, 10 aa, synthetic construct
  REGION 1..10: note = Description of Artificial Sequence: Synthetic peptide
VYYPDKVFRS

SEQ ID NO: 6597 - protein, 8 aa, synthetic construct
  REGION 1..8: note = Description of Artificial Sequence: Synthetic peptide
VYYSQLMC

SEQ ID NO: 6598 - protein, 8 aa, synthetic construct
  REGION 1..8: note = Description of Artificial Sequence: Synthetic peptide
VYYTSNPT

SEQ ID NO: 6599 - protein, 8 aa, synthetic construct
  REGION 1..8: note = Description of Artificial Sequence: Synthetic peptide
WEIQQVVD

SEQ ID NO: 6600 - protein, 9 aa, synthetic construct
  REGION 1..9: note = Description of Artificial Sequence: Synthetic peptide
WESGVKDCV

SEQ ID NO: 6601 - protein, 10 aa, synthetic construct
  REGION 1..10: note = Description of Artificial Sequence: Synthetic peptide
WFFSNYLKRR

SEQ ID NO: 6602 - protein, 10 aa, synthetic construct
  REGION 1..10: note = Description of Artificial Sequence: Synthetic peptide
WFLAYILFTR

SEQ ID NO: 6603 - protein, 8 aa, synthetic construct
  REGION 1..8: note = Description of Artificial Sequence: Synthetic peptide
WFVTQRNF

SEQ ID NO: 6604 - protein, 10 aa, synthetic construct
  REGION 1..10: note = Description of Artificial Sequence: Synthetic peptide
WIFGTTLDSK

SEQ ID NO: 6605 - protein, 9 aa, synthetic construct
  REGION 1..9: note = Description of Artificial Sequence: Synthetic peptide
WLDDVVYCP

SEQ ID NO: 6606 - protein, 8 aa, synthetic construct
  REGION 1..8: note = Description of Artificial Sequence: Synthetic peptide
WLKQLIKV

SEQ ID NO: 6607 - protein, 10 aa, synthetic construct
  REGION 1..10: note = Description of Artificial Sequence: Synthetic peptide
WLLLTILTSL

SEQ ID NO: 6608 - protein, 9 aa, synthetic construct
  REGION 1..9: note = Description of Artificial Sequence: Synthetic peptide
WPLIVTALR

SEQ ID NO: 6609 - protein, 10 aa, synthetic construct
  REGION 1..10: note = Description of Artificial Sequence: Synthetic peptide
WPVTLACFVL

SEQ ID NO: 6610 - protein, 9 aa, synthetic construct
  REGION 1..9: note = Description of Artificial Sequence: Synthetic peptide
WQLALSKGV

SEQ ID NO: 6611 - protein, 10 aa, synthetic construct
  REGION 1..10: note = Description of Artificial Sequence: Synthetic peptide
WRKAVFISPY

SEQ ID NO: 6612 - protein, 9 aa, synthetic construct
  REGION 1..9: note = Description of Artificial Sequence: Synthetic peptide
WSFNPETNI

SEQ ID NO: 6613 - protein, 8 aa, synthetic construct
  REGION 1..8: note = Description of Artificial Sequence: Synthetic peptide
WSLFFFLY

SEQ ID NO: 6614 - protein, 8 aa, synthetic construct
  REGION 1..8: note = Description of Artificial Sequence: Synthetic peptide
WSMATYYL

SEQ ID NO: 6615 - protein, 8 aa, synthetic construct
  REGION 1..8: note = Description of Artificial Sequence: Synthetic peptide
WSYSGQST

SEQ ID NO: 6616 - protein, 10 aa, synthetic construct
  REGION 1..10: note = Description of Artificial Sequence: Synthetic peptide
WTIEYPIIGD

SEQ ID NO: 6617 - protein, 9 aa, synthetic construct
  REGION 1..9: note = Description of Artificial Sequence: Synthetic peptide
WTNAGDYIL

SEQ ID NO: 6618 - protein, 8 aa, synthetic construct
  REGION 1..8: note = Description of Artificial Sequence: Synthetic peptide
YAISAKNR

SEQ ID NO: 6619 - protein, 9 aa, synthetic construct
  REGION 1..9: note = Description of Artificial Sequence: Synthetic peptide
YAISAKNRA

SEQ ID NO: 6620 - protein, 10 aa, synthetic construct
  REGION 1..10: note = Description of Artificial Sequence: Synthetic peptide
YAISAKNRAR

SEQ ID NO: 6621 - protein, 9 aa, synthetic construct
  REGION 1..9: note = Description of Artificial Sequence: Synthetic peptide
YASALWEIQ

SEQ ID NO: 6622 - protein, 8 aa, synthetic construct
  REGION 1..8: note = Description of Artificial Sequence: Synthetic peptide
YASQGLVA

SEQ ID NO: 6623 - protein, 10 aa, synthetic construct
  REGION 1..10: note = Description of Artificial Sequence: Synthetic peptide
YCIDGALLTK

SEQ ID NO: 6624 - protein, 9 aa, synthetic construct
  REGION 1..9: note = Description of Artificial Sequence: Synthetic peptide
YDFAVSKGF

SEQ ID NO: 6625 - protein, 9 aa, synthetic construct
  REGION 1..9: note = Description of Artificial Sequence: Synthetic peptide
YDLSVVNAR

SEQ ID NO: 6626 - protein, 8 aa, synthetic construct
  REGION 1..8: note = Description of Artificial Sequence: Synthetic peptide
YDYLVSTQ

SEQ ID NO: 6627 - protein, 10 aa, synthetic construct
  REGION 1..10: note = Description of Artificial Sequence: Synthetic peptide
YECLYRNRDV

SEQ ID NO: 6628 - protein, 10 aa, synthetic construct
  REGION 1..10: note = Description of Artificial Sequence: Synthetic peptide
YEDFLEYHDV

SEQ ID NO: 6629 - protein, 10 aa, synthetic construct
  REGION 1..10: note = Description of Artificial Sequence: Synthetic peptide
YEKLKPVLDW

SEQ ID NO: 6630 - protein, 11 aa, synthetic construct
  REGION 1..11: note = Description of Artificial Sequence: Synthetic peptide
YELQTPFEIKL

SEQ ID NO: 6631 - protein, 9 aa, synthetic construct
  REGION 1..9: note = Description of Artificial Sequence: Synthetic peptide
YEPLTQDHV

SEQ ID NO: 6632 - protein, 9 aa, synthetic construct
  REGION 1..9: note = Description of Artificial Sequence: Synthetic peptide
YERHSLSHF

SEQ ID NO: 6633 - protein, 9 aa, synthetic construct
  REGION 1..9: note = Description of Artificial Sequence: Synthetic peptide
YESLRPDTR

SEQ ID NO: 6634 - protein, 10 aa, synthetic construct
  REGION 1..10: note = Description of Artificial Sequence: Synthetic peptide
YFCTCYFGLF

SEQ ID NO: 6635 - protein, 10 aa, synthetic construct
  REGION 1..10: note = Description of Artificial Sequence: Synthetic peptide
YFDKAGQKTY

SEQ ID NO: 6636 - protein, 8 aa, synthetic construct
  REGION 1..8: note = Description of Artificial Sequence: Synthetic peptide
YFGLFCLL

SEQ ID NO: 6637 - protein, 8 aa, synthetic construct
  REGION 1..8: note = Description of Artificial Sequence: Synthetic peptide
YFIKGLNN

SEQ ID NO: 6638 - protein, 9 aa, synthetic construct
  REGION 1..9: note = Description of Artificial Sequence: Synthetic peptide
YFITDAQTG

SEQ ID NO: 6639 - protein, 8 aa, synthetic construct
  REGION 1..8: note = Description of Artificial Sequence: Synthetic peptide
YFNKKDWY

SEQ ID NO: 6640 - protein, 8 aa, synthetic construct
  REGION 1..8: note = Description of Artificial Sequence: Synthetic peptide
YFPLQSYG

SEQ ID NO: 6641 - protein, 10 aa, synthetic construct
  REGION 1..10: note = Description of Artificial Sequence: Synthetic peptide
YFTSDYYQLY

SEQ ID NO: 6642 - protein, 10 aa, synthetic construct
  REGION 1..10: note = Description of Artificial Sequence: Synthetic peptide
YFVLTSHTVM

SEQ ID NO: 6643 - protein, 8 aa, synthetic construct
  REGION 1..8: note = Description of Artificial Sequence: Synthetic peptide
YFYTSKTT

SEQ ID NO: 6644 - protein, 8 aa, synthetic construct
  REGION 1..8: note = Description of Artificial Sequence: Synthetic peptide
YGRSGETL

SEQ ID NO: 6645 - protein, 9 aa, synthetic construct
  REGION 1..9: note = Description of Artificial Sequence: Synthetic peptide
YHKNNKSWM

SEQ ID NO: 6646 - protein, 11 aa, synthetic construct
  REGION 1..11: note = Description of Artificial Sequence: Synthetic peptide
YHNESGLKTIL

SEQ ID NO: 6647 - protein, 9 aa, synthetic construct
  REGION 1..9: note = Description of Artificial Sequence: Synthetic peptide
YHYQECVRG

SEQ ID NO: 6648 - protein, 8 aa, synthetic construct
  REGION 1..8: note = Description of Artificial Sequence: Synthetic peptide
YIDIGNYT

SEQ ID NO: 6649 - protein, 9 aa, synthetic construct
  REGION 1..9: note = Description of Artificial Sequence: Synthetic peptide
YIICISTKH

SEQ ID NO: 6650 - protein, 9 aa, synthetic construct
  REGION 1..9: note = Description of Artificial Sequence: Synthetic peptide
YIKWPWYIW

SEQ ID NO: 6651 - protein, 8 aa, synthetic construct
  REGION 1..8: note = Description of Artificial Sequence: Synthetic peptide
YILFTRFF

SEQ ID NO: 6652 - protein, 9 aa, synthetic construct
  REGION 1..9: note = Description of Artificial Sequence: Synthetic peptide
YIWLGFIAG

SEQ ID NO: 6653 - protein, 10 aa, synthetic construct
  REGION 1..10: note = Description of Artificial Sequence: Synthetic peptide
YKGPITDVFY

SEQ ID NO: 6654 - protein, 9 aa, synthetic construct
  REGION 1..9: note = Description of Artificial Sequence: Synthetic peptide
YKHWPQIAQ

SEQ ID NO: 6655 - protein, 8 aa, synthetic construct
  REGION 1..8: note = Description of Artificial Sequence: Synthetic peptide
YKLDGVVC

SEQ ID NO: 6656 - protein, 9 aa, synthetic construct
  REGION 1..9: note = Description of Artificial Sequence: Synthetic peptide
YKLDGVVCT

SEQ ID NO: 6657 - protein, 8 aa, synthetic construct
  REGION 1..8: note = Description of Artificial Sequence: Synthetic peptide
YKSVNITF

SEQ ID NO: 6658 - protein, 8 aa, synthetic construct
  REGION 1..8: note = Description of Artificial Sequence: Synthetic peptide
YLGGMSYY

SEQ ID NO: 6659 - protein, 9 aa, synthetic construct
  REGION 1..9: note = Description of Artificial Sequence: Synthetic peptide
YLKHGGGVA

SEQ ID NO: 6660 - protein, 9 aa, synthetic construct
  REGION 1..9: note = Description of Artificial Sequence: Synthetic peptide
YLKRRVVFN

SEQ ID NO: 6661 - protein, 8 aa, synthetic construct
  REGION 1..8: note = Description of Artificial Sequence: Synthetic peptide
YLPQNAVV

SEQ ID NO: 6662 - protein, 9 aa, synthetic construct
  REGION 1..9: note = Description of Artificial Sequence: Synthetic peptide
YLPQNAVVK

SEQ ID NO: 6663 - protein, 9 aa, synthetic construct
  REGION 1..9: note = Description of Artificial Sequence: Synthetic peptide
YLPYPDPSR

SEQ ID NO: 6664 - protein, 10 aa, synthetic construct
  REGION 1..10: note = Description of Artificial Sequence: Synthetic peptide
YLPYPDPSRI

SEQ ID NO: 6665 - protein, 10 aa, synthetic construct
  REGION 1..10: note = Description of Artificial Sequence: Synthetic peptide
YLQPRTFLLK

SEQ ID NO: 6666 - protein, 11 aa, synthetic construct
  REGION 1..11: note = Description of Artificial Sequence: Synthetic peptide
YLYFIKGLNNL

SEQ ID NO: 6667 - protein, 8 aa, synthetic construct
  REGION 1..8: note = Description of Artificial Sequence: Synthetic peptide
YMLTYNKV

SEQ ID NO: 6668 - protein, 10 aa, synthetic construct
  REGION 1..10: note = Description of Artificial Sequence: Synthetic peptide
YMPYFFTLLL

SEQ ID NO: 6669 - protein, 9 aa, synthetic construct
  REGION 1..9: note = Description of Artificial Sequence: Synthetic peptide
YNVTQAFGR

SEQ ID NO: 6670 - protein, 9 aa, synthetic construct
  REGION 1..9: note = Description of Artificial Sequence: Synthetic peptide
YNYEPLTQD

SEQ ID NO: 6671 - protein, 10 aa, synthetic construct
  REGION 1..10: note = Description of Artificial Sequence: Synthetic peptide
YPANSIVCRF

SEQ ID NO: 6672 - protein, 11 aa, synthetic construct
  REGION 1..11: note = Description of Artificial Sequence: Synthetic peptide
YPDKVFRSSVL

SEQ ID NO: 6673 - protein, 9 aa, synthetic construct
  REGION 1..9: note = Description of Artificial Sequence: Synthetic peptide
YPGQGLNGY

SEQ ID NO: 6674 - protein, 9 aa, synthetic construct
  REGION 1..9: note = Description of Artificial Sequence: Synthetic peptide
YPIIGDELK

SEQ ID NO: 6675 - protein, 8 aa, synthetic construct
  REGION 1..8: note = Description of Artificial Sequence: Synthetic peptide
YPKCDRAM

SEQ ID NO: 6676 - protein, 8 aa, synthetic construct
  REGION 1..8: note = Description of Artificial Sequence: Synthetic peptide
YPLECIKD

SEQ ID NO: 6677 - protein, 11 aa, synthetic construct
  REGION 1..11: note = Description of Artificial Sequence: Synthetic peptide
YPNASFDNFKF

SEQ ID NO: 6678 - protein, 9 aa, synthetic construct
  REGION 1..9: note = Description of Artificial Sequence: Synthetic peptide
YPPDEDEEE

SEQ ID NO: 6679 - protein, 9 aa, synthetic construct
  REGION 1..9: note = Description of Artificial Sequence: Synthetic peptide
YPQVNGLTS

SEQ ID NO: 6680 - protein, 8 aa, synthetic construct
  REGION 1..8: note = Description of Artificial Sequence: Synthetic peptide
YPSARIVY

SEQ ID NO: 6681 - protein, 10 aa, synthetic construct
  REGION 1..10: note = Description of Artificial Sequence: Synthetic peptide
YPSARIVYTA

SEQ ID NO: 6682 - protein, 10 aa, synthetic construct
  REGION 1..10: note = Description of Artificial Sequence: Synthetic peptide
YPTLNISDEF

SEQ ID NO: 6683 - protein, 9 aa, synthetic construct
  REGION 1..9: note = Description of Artificial Sequence: Synthetic peptide
YQHEETIYN

SEQ ID NO: 6684 - protein, 8 aa, synthetic construct
  REGION 1..8: note = Description of Artificial Sequence: Synthetic peptide
YQLRARSV

SEQ ID NO: 6685 - protein, 8 aa, synthetic construct
  REGION 1..8: note = Description of Artificial Sequence: Synthetic peptide
YQTSNFRV

SEQ ID NO: 6686 - protein, 9 aa, synthetic construct
  REGION 1..9: note = Description of Artificial Sequence: Synthetic peptide
YRAFDIYND

SEQ ID NO: 6687 - protein, 9 aa, synthetic construct
  REGION 1..9: note = Description of Artificial Sequence: Synthetic peptide
YRARAGEAA

SEQ ID NO: 6688 - protein, 9 aa, synthetic construct
  REGION 1..9: note = Description of Artificial Sequence: Synthetic peptide
YRIGNYKLN

SEQ ID NO: 6689 - protein, 10 aa, synthetic construct
  REGION 1..10: note = Description of Artificial Sequence: Synthetic peptide
YRLYLDAYNM

SEQ ID NO: 6690 - protein, 8 aa, synthetic construct
  REGION 1..8: note = Description of Artificial Sequence: Synthetic peptide
YRRATRRI

SEQ ID NO: 6691 - protein, 8 aa, synthetic construct
  REGION 1..8: note = Description of Artificial Sequence: Synthetic peptide
YRSLPGVF

SEQ ID NO: 6692 - protein, 9 aa, synthetic construct
  REGION 1..9: note = Description of Artificial Sequence: Synthetic peptide
YRSLPGVFC

SEQ ID NO: 6693 - protein, 8 aa, synthetic construct
  REGION 1..8: note = Description of Artificial Sequence: Synthetic peptide
YSDVENPH

SEQ ID NO: 6694 - protein, 11 aa, synthetic construct
  REGION 1..11: note = Description of Artificial Sequence: Synthetic peptide
YSDVENPHLMG

SEQ ID NO: 6695 - protein, 10 aa, synthetic construct
  REGION 1..10: note = Description of Artificial Sequence: Synthetic peptide
YSFLPGVYSV

SEQ ID NO: 6696 - protein, 10 aa, synthetic construct
  REGION 1..10: note = Description of Artificial Sequence: Synthetic peptide
YSGVVTTVMF

SEQ ID NO: 6697 - protein, 8 aa, synthetic construct
  REGION 1..8: note = Description of Artificial Sequence: Synthetic peptide
YSHLLLVA

SEQ ID NO: 6698 - protein, 11 aa, synthetic construct
  REGION 1..11: note = Description of Artificial Sequence: Synthetic peptide
YSSANNCTFEY

SEQ ID NO: 6699 - protein, 8 aa, synthetic construct
  REGION 1..8: note = Description of Artificial Sequence: Synthetic peptide
YSTAALGV

SEQ ID NO: 6700 - protein, 11 aa, synthetic construct
  REGION 1..11: note = Description of Artificial Sequence: Synthetic peptide
YSTGSNVFQTR

SEQ ID NO: 6701 - protein, 10 aa, synthetic construct
  REGION 1..10: note = Description of Artificial Sequence: Synthetic peptide
YSVLYNSASF

SEQ ID NO: 6702 - protein, 8 aa, synthetic construct
  REGION 1..8: note = Description of Artificial Sequence: Synthetic peptide
YSYATHSD

SEQ ID NO: 6703 - protein, 10 aa, synthetic construct
  REGION 1..10: note = Description of Artificial Sequence: Synthetic peptide
YSYATHSDKF

SEQ ID NO: 6704 - protein, 9 aa, synthetic construct
  REGION 1..9: note = Description of Artificial Sequence: Synthetic peptide
YTACSHAAV

SEQ ID NO: 6705 - protein, 8 aa, synthetic construct
  REGION 1..8: note = Description of Artificial Sequence: Synthetic peptide
YTFEKGDY

SEQ ID NO: 6706 - protein, 9 aa, synthetic construct
  REGION 1..9: note = Description of Artificial Sequence: Synthetic peptide
YTKVDGVDV

SEQ ID NO: 6707 - protein, 10 aa, synthetic construct
  REGION 1..10: note = Description of Artificial Sequence: Synthetic peptide
YTMADLVYAL

SEQ ID NO: 6708 - protein, 11 aa, synthetic construct
  REGION 1..11: note = Description of Artificial Sequence: Synthetic peptide
YTNSFTRGVYY

SEQ ID NO: 6709 - protein, 10 aa, synthetic construct
  REGION 1..10: note = Description of Artificial Sequence: Synthetic peptide
YTPHTVLQAV

SEQ ID NO: 6710 - protein, 8 aa, synthetic construct
  REGION 1..8: note = Description of Artificial Sequence: Synthetic peptide
YTQLCQYL

SEQ ID NO: 6711 - protein, 11 aa, synthetic construct
  REGION 1..11: note = Description of Artificial Sequence: Synthetic peptide
YTVEEAKTVLK

SEQ ID NO: 6712 - protein, 8 aa, synthetic construct
  REGION 1..8: note = Description of Artificial Sequence: Synthetic peptide
YTVSCLPF

SEQ ID NO: 6713 - protein, 12 aa, synthetic construct
  REGION 1..12: note = Description of Artificial Sequence: Synthetic peptide
YVDNNFCGPDGY

SEQ ID NO: 6714 - protein, 8 aa, synthetic construct
  REGION 1..8: note = Description of Artificial Sequence: Synthetic peptide
YVDNSSLT

SEQ ID NO: 6715 - protein, 8 aa, synthetic construct
  REGION 1..8: note = Description of Artificial Sequence: Synthetic peptide
YVDTPNNT

SEQ ID NO: 6716 - protein, 8 aa, synthetic construct
  REGION 1..8: note = Description of Artificial Sequence: Synthetic peptide
YVFIKRSD

SEQ ID NO: 6717 - protein, 8 aa, synthetic construct
  REGION 1..8: note = Description of Artificial Sequence: Synthetic peptide
YVFTGYRV

SEQ ID NO: 6718 - protein, 9 aa, synthetic construct
  REGION 1..9: note = Description of Artificial Sequence: Synthetic peptide
YVFTGYRVT

SEQ ID NO: 6719 - protein, 10 aa, synthetic construct
  REGION 1..10: note = Description of Artificial Sequence: Synthetic peptide
YVGYLQPRTF

SEQ ID NO: 6720 - protein, 10 aa, synthetic construct
  REGION 1..10: note = Description of Artificial Sequence: Synthetic peptide
YVKPGGTSSG

SEQ ID NO: 6721 - protein, 8 aa, synthetic construct
  REGION 1..8: note = Description of Artificial Sequence: Synthetic peptide
YVLGLAAI

SEQ ID NO: 6722 - protein, 8 aa, synthetic construct
  REGION 1..8: note = Description of Artificial Sequence: Synthetic peptide
YVRNLQHR

SEQ ID NO: 6723 - protein, 9 aa, synthetic construct
  REGION 1..9: note = Description of Artificial Sequence: Synthetic peptide
YVTQQLIRA

SEQ ID NO: 6724 - protein, 9 aa, synthetic construct
  REGION 1..9: note = Description of Artificial Sequence: Synthetic peptide
YWVPRASAN

SEQ ID NO: 6725 - protein, 10 aa, synthetic construct
  REGION 1..10: note = Description of Artificial Sequence: Synthetic peptide
YWVPRASANI

SEQ ID NO: 6726 - protein, 10 aa, synthetic construct
  REGION 1..10: note = Description of Artificial Sequence: Synthetic peptide
YYHKNNKSWM

SEQ ID NO: 6727 - protein, 8 aa, synthetic construct
  REGION 1..8: note = Description of Artificial Sequence: Synthetic peptide
YYKLGASQ

SEQ ID NO: 6728 - protein, 11 aa, synthetic construct
  REGION 1..11: note = Description of Artificial Sequence: Synthetic peptide
YYPDKVFRSSV

SEQ ID NO: 6729 - protein, 12 aa, synthetic construct
  REGION 1..12: note = Description of Artificial Sequence: Synthetic peptide
YYPDKVFRSSVL

SEQ ID NO: 6730 - protein, 8 aa, synthetic construct
  REGION 1..8: note = Description of Artificial Sequence: Synthetic peptide
YYQLYSTQ

SEQ ID NO: 6731 - protein, 10 aa, synthetic construct
  REGION 1..10: note = Description of Artificial Sequence: Synthetic peptide
YYSDSPCESH

SEQ ID NO: 6732 - protein, 11 aa, synthetic construct
  REGION 1..11: note = Description of Artificial Sequence: Synthetic peptide
YYTSNPTTFHL

SEQ ID NO: 6733 - protein, 8 aa, synthetic construct
  REGION 1..8: note = Description of Artificial Sequence: Synthetic peptide
YYVWKSYV

SEQ ID NO: 6734 - protein, 10 aa, synthetic construct
  REGION 1..10: note = Description of Artificial Sequence: Synthetic peptide
AAGLEAPFLY

SEQ ID NO: 6735 - protein, 9 aa, synthetic construct
  REGION 1..9: note = Description of Artificial Sequence: Synthetic peptide
AAVINGDRW

SEQ ID NO: 6736 - protein, 9 aa, synthetic construct
  REGION 1..9: note = Description of Artificial Sequence: Synthetic peptide
AAVYRINWI

SEQ ID NO: 6737 - protein, 10 aa, synthetic construct
  REGION 1..10: note = Description of Artificial Sequence: Synthetic peptide
ACFVLAAVYR

SEQ ID NO: 6738 - protein, 8 aa, synthetic construct
  REGION 1..8: note = Description of Artificial Sequence: Synthetic peptide
ACPLIAAV

SEQ ID NO: 6739 - protein, 9 aa, synthetic construct
  REGION 1..9: note = Description of Artificial Sequence: Synthetic peptide
ACWHHSIGF

SEQ ID NO: 6740 - protein, 8 aa, synthetic construct
  REGION 1..8: note = Description of Artificial Sequence: Synthetic peptide
ADKYVRNL

SEQ ID NO: 6741 - protein, 9 aa, synthetic construct
  REGION 1..9: note = Description of Artificial Sequence: Synthetic peptide
ADSNGTITV

SEQ ID NO: 6742 - protein, 9 aa, synthetic construct
  REGION 1..9: note = Description of Artificial Sequence: Synthetic peptide
AEETRKLMP

SEQ ID NO: 6743 - protein, 10 aa, synthetic construct
  REGION 1..10: note = Description of Artificial Sequence: Synthetic peptide
AEGSRGGSQA

SEQ ID NO: 6744 - protein, 10 aa, synthetic construct
  REGION 1..10: note = Description of Artificial Sequence: Synthetic peptide
AEILLIIMRT

SEQ ID NO: 6745 - protein, 11 aa, synthetic construct
  REGION 1..11: note = Description of Artificial Sequence: Synthetic peptide
AEIRASANLAA

SEQ ID NO: 6746 - protein, 11 aa, synthetic construct
  REGION 1..11: note = Description of Artificial Sequence: Synthetic peptide
AEIVDTVSALV

SEQ ID NO: 6747 - protein, 10 aa, synthetic construct
  REGION 1..10: note = Description of Artificial Sequence: Synthetic peptide
AELEGIQYGR

SEQ ID NO: 6748 - protein, 8 aa, synthetic construct
  REGION 1..8: note = Description of Artificial Sequence: Synthetic peptide
AENVTGLF

SEQ ID NO: 6749 - protein, 10 aa, synthetic construct
  REGION 1..10: note = Description of Artificial Sequence: Synthetic peptide
AENVTGLFKD

SEQ ID NO: 6750 - protein, 10 aa, synthetic construct
  REGION 1..10: note = Description of Artificial Sequence: Synthetic peptide
AEVAVKMFDA

SEQ ID NO: 6751 - protein, 8 aa, synthetic construct
  REGION 1..8: note = Description of Artificial Sequence: Synthetic peptide
AFGEYSHV

SEQ ID NO: 6752 - protein, 9 aa, synthetic construct
  REGION 1..9: note = Description of Artificial Sequence: Synthetic peptide
AFGEYSHVV

SEQ ID NO: 6753 - protein, 11 aa, synthetic construct
  REGION 1..11: note = Description of Artificial Sequence: Synthetic peptide
AFGEYSHVVAF

SEQ ID NO: 6754 - protein, 8 aa, synthetic construct
  REGION 1..8: note = Description of Artificial Sequence: Synthetic peptide
AFGLVAEW

SEQ ID NO: 6755 - protein, 8 aa, synthetic construct
  REGION 1..8: note = Description of Artificial Sequence: Synthetic peptide
AFHQECSL

SEQ ID NO: 6756 - protein, 8 aa, synthetic construct
  REGION 1..8: note = Description of Artificial Sequence: Synthetic peptide
AFLCLFLL

SEQ ID NO: 6757 - protein, 9 aa, synthetic construct
  REGION 1..9: note = Description of Artificial Sequence: Synthetic peptide
AFLCLFLLP

SEQ ID NO: 6758 - protein, 10 aa, synthetic construct
  REGION 1..10: note = Description of Artificial Sequence: Synthetic peptide
AFNVVNKGHF

SEQ ID NO: 6759 - protein, 10 aa, synthetic construct
  REGION 1..10: note = Description of Artificial Sequence: Synthetic peptide
AFQTVKPGNF

SEQ ID NO: 6760 - protein, 10 aa, synthetic construct
  REGION 1..10: note = Description of Artificial Sequence: Synthetic peptide
AFVNLKQLPF

SEQ ID NO: 6761 - protein, 8 aa, synthetic construct
  REGION 1..8: note = Description of Artificial Sequence: Synthetic peptide
AFVVFLLV

SEQ ID NO: 6762 - protein, 10 aa, synthetic construct
  REGION 1..10: note = Description of Artificial Sequence: Synthetic peptide
AFVVFLLVTL

SEQ ID NO: 6763 - protein, 9 aa, synthetic construct
  REGION 1..9: note = Description of Artificial Sequence: Synthetic peptide
AGFSLWVYK

SEQ ID NO: 6764 - protein, 9 aa, synthetic construct
  REGION 1..9: note = Description of Artificial Sequence: Synthetic peptide
AGLPYGANK

SEQ ID NO: 6765 - protein, 8 aa, synthetic construct
  REGION 1..8: note = Description of Artificial Sequence: Synthetic peptide
AHFPREGV

SEQ ID NO: 6766 - protein, 10 aa, synthetic construct
  REGION 1..10: note = Description of Artificial Sequence: Synthetic peptide
AHFPREGVFV

SEQ ID NO: 6767 - protein, 9 aa, synthetic construct
  REGION 1..9: note = Description of Artificial Sequence: Synthetic peptide
AHGFELTSM

SEQ ID NO: 6768 - protein, 9 aa, synthetic construct
  REGION 1..9: note = Description of Artificial Sequence: Synthetic peptide
AIDGGVTRD

SEQ ID NO: 6769 - protein, 8 aa, synthetic construct
  REGION 1..8: note = Description of Artificial Sequence: Synthetic peptide
AIGLALYY

SEQ ID NO: 6770 - protein, 9 aa, synthetic construct
  REGION 1..9: note = Description of Artificial Sequence: Synthetic peptide
AIHADQLTP

SEQ ID NO: 6771 - protein, 9 aa, synthetic construct
  REGION 1..9: note = Description of Artificial Sequence: Synthetic peptide
AIILASFSA

SEQ ID NO: 6772 - protein, 8 aa, synthetic construct
  REGION 1..8: note = Description of Artificial Sequence: Synthetic peptide
AILTALRL

SEQ ID NO: 6773 - protein, 9 aa, synthetic construct
  REGION 1..9: note = Description of Artificial Sequence: Synthetic peptide
AISAKNRAR

SEQ ID NO: 6774 - protein, 9 aa, synthetic construct
  REGION 1..9: note = Description of Artificial Sequence: Synthetic peptide
AISMWALII

SEQ ID NO: 6775 - protein, 10 aa, synthetic construct
  REGION 1..10: note = Description of Artificial Sequence: Synthetic peptide
AIVVTCLAYY

SEQ ID NO: 6776 - protein, 9 aa, synthetic construct
  REGION 1..9: note = Description of Artificial Sequence: Synthetic peptide
AKPPPGDQF

SEQ ID NO: 6777 - protein, 8 aa, synthetic construct
  REGION 1..8: note = Description of Artificial Sequence: Synthetic peptide
AKSHNIAL

SEQ ID NO: 6778 - protein, 9 aa, synthetic construct
  REGION 1..9: note = Description of Artificial Sequence: Synthetic peptide
AKYTQLCQY

SEQ ID NO: 6779 - protein, 8 aa, synthetic construct
  REGION 1..8: note = Description of Artificial Sequence: Synthetic peptide
ALAPNMMV

SEQ ID NO: 6780 - protein, 9 aa, synthetic construct
  REGION 1..9: note = Description of Artificial Sequence: Synthetic peptide
ALAYYNTTK

SEQ ID NO: 6781 - protein, 9 aa, synthetic construct
  REGION 1..9: note = Description of Artificial Sequence: Synthetic peptide
ALCTFLLNK

SEQ ID NO: 6782 - protein, 8 aa, synthetic construct
  REGION 1..8: note = Description of Artificial Sequence: Synthetic peptide
ALDISASI

SEQ ID NO: 6783 - protein, 9 aa, synthetic construct
  REGION 1..9: note = Description of Artificial Sequence: Synthetic peptide
ALGVLMSNL

SEQ ID NO: 6784 - protein, 9 aa, synthetic construct
  REGION 1..9: note = Description of Artificial Sequence: Synthetic peptide
ALILAYCNK

SEQ ID NO: 6785 - protein, 9 aa, synthetic construct
  REGION 1..9: note = Description of Artificial Sequence: Synthetic peptide
ALKYLPIDK

SEQ ID NO: 6786 - protein, 10 aa, synthetic construct
  REGION 1..10: note = Description of Artificial Sequence: Synthetic peptide
ALLADKFPVL

SEQ ID NO: 6787 - protein, 9 aa, synthetic construct
  REGION 1..9: note = Description of Artificial Sequence: Synthetic peptide
ALLEDEFTP

SEQ ID NO: 6788 - protein, 9 aa, synthetic construct
  REGION 1..9: note = Description of Artificial Sequence: Synthetic peptide
ALLKTVQFC

SEQ ID NO: 6789 - protein, 10 aa, synthetic construct
  REGION 1..10: note = Description of Artificial Sequence: Synthetic peptide
ALLTLQQIEL

SEQ ID NO: 6790 - protein, 8 aa, synthetic construct
  REGION 1..8: note = Description of Artificial Sequence: Synthetic peptide
ALNLGETF

SEQ ID NO: 6791 - protein, 10 aa, synthetic construct
  REGION 1..10: note = Description of Artificial Sequence: Synthetic peptide
ALNNIINNAR

SEQ ID NO: 6792 - protein, 9 aa, synthetic construct
  REGION 1..9: note = Description of Artificial Sequence: Synthetic peptide
ALQDAYYRA

SEQ ID NO: 6793 - protein, 9 aa, synthetic construct
  REGION 1..9: note = Description of Artificial Sequence: Synthetic peptide
ALVYDNKLK

SEQ ID NO: 6794 - protein, 9 aa, synthetic construct
  REGION 1..9: note = Description of Artificial Sequence: Synthetic peptide
AMQVESDDY

SEQ ID NO: 6795 - protein, 9 aa, synthetic construct
  REGION 1..9: note = Description of Artificial Sequence: Synthetic peptide
AMRPNFTIK

SEQ ID NO: 6796 - protein, 10 aa, synthetic construct
  REGION 1..10: note = Description of Artificial Sequence: Synthetic peptide
ANDPVGFTLK

SEQ ID NO: 6797 - protein, 8 aa, synthetic construct
  REGION 1..8: note = Description of Artificial Sequence: Synthetic peptide
ANNAAIVL

SEQ ID NO: 6798 - protein, 8 aa, synthetic construct
  REGION 1..8: note = Description of Artificial Sequence: Synthetic peptide
APAHISTI

SEQ ID NO: 6799 - protein, 10 aa, synthetic construct
  REGION 1..10: note = Description of Artificial Sequence: Synthetic peptide
APHGVVFLHV

SEQ ID NO: 6800 - protein, 8 aa, synthetic construct
  REGION 1..8: note = Description of Artificial Sequence: Synthetic peptide
APLVGTPV

SEQ ID NO: 6801 - protein, 9 aa, synthetic construct
  REGION 1..9: note = Description of Artificial Sequence: Synthetic peptide
APLVGTPVC

SEQ ID NO: 6802 - protein, 9 aa, synthetic construct
  REGION 1..9: note = Description of Artificial Sequence: Synthetic peptide
APTLVPQEH

SEQ ID NO: 6803 - protein, 9 aa, synthetic construct
  REGION 1..9: note = Description of Artificial Sequence: Synthetic peptide
AQALNTLVK

SEQ ID NO: 6804 - protein, 8 aa, synthetic construct
  REGION 1..8: note = Description of Artificial Sequence: Synthetic peptide
AQDGNAAI

SEQ ID NO: 6805 - protein, 10 aa, synthetic construct
  REGION 1..10: note = Description of Artificial Sequence: Synthetic peptide
AQKFNGLTVL

SEQ ID NO: 6806 - protein, 9 aa, synthetic construct
  REGION 1..9: note = Description of Artificial Sequence: Synthetic peptide
AQPCSDKAY

SEQ ID NO: 6807 - protein, 8 aa, synthetic construct
  REGION 1..8: note = Description of Artificial Sequence: Synthetic peptide
AQSFLNGF

SEQ ID NO: 6808 - protein, 9 aa, synthetic construct
  REGION 1..9: note = Description of Artificial Sequence: Synthetic peptide
AQVLSEMVM

SEQ ID NO: 6809 - protein, 10 aa, synthetic construct
  REGION 1..10: note = Description of Artificial Sequence: Synthetic peptide
ARDLICAQKF

SEQ ID NO: 6810 - protein, 10 aa, synthetic construct
  REGION 1..10: note = Description of Artificial Sequence: Synthetic peptide
ARKSAPLIEL

SEQ ID NO: 6811 - protein, 10 aa, synthetic construct
  REGION 1..10: note = Description of Artificial Sequence: Synthetic peptide
ARLYYDSMSY

SEQ ID NO: 6812 - protein, 8 aa, synthetic construct
  REGION 1..8: note = Description of Artificial Sequence: Synthetic peptide
ARSVSPKL

SEQ ID NO: 6813 - protein, 10 aa, synthetic construct
  REGION 1..10: note = Description of Artificial Sequence: Synthetic peptide
ARTAPHGHVM

SEQ ID NO: 6814 - protein, 9 aa, synthetic construct
  REGION 1..9: note = Description of Artificial Sequence: Synthetic peptide
ARTVAGVSI

SEQ ID NO: 6815 - protein, 9 aa, synthetic construct
  REGION 1..9: note = Description of Artificial Sequence: Synthetic peptide
ARVECFDKF

SEQ ID NO: 6816 - protein, 9 aa, synthetic construct
  REGION 1..9: note = Description of Artificial Sequence: Synthetic peptide
ASANLAATK

SEQ ID NO: 6817 - protein, 8 aa, synthetic construct
  REGION 1..8: note = Description of Artificial Sequence: Synthetic peptide
ASDTYACW

SEQ ID NO: 6818 - protein, 10 aa, synthetic construct
  REGION 1..10: note = Description of Artificial Sequence: Synthetic peptide
ASEFSSLPSY

SEQ ID NO: 6819 - protein, 9 aa, synthetic construct
  REGION 1..9: note = Description of Artificial Sequence: Synthetic peptide
ASFNYLKSP

SEQ ID NO: 6820 - protein, 8 aa, synthetic construct
  REGION 1..8: note = Description of Artificial Sequence: Synthetic peptide
ASFRLFAR

SEQ ID NO: 6821 - protein, 9 aa, synthetic construct
  REGION 1..9: note = Description of Artificial Sequence: Synthetic peptide
ASFSASTSA

SEQ ID NO: 6822 - protein, 9 aa, synthetic construct
  REGION 1..9: note = Description of Artificial Sequence: Synthetic peptide
ASKIITLKK

SEQ ID NO: 6823 - protein, 9 aa, synthetic construct
  REGION 1..9: note = Description of Artificial Sequence: Synthetic peptide
ASLKELLQN

SEQ ID NO: 6824 - protein, 10 aa, synthetic construct
  REGION 1..10: note = Description of Artificial Sequence: Synthetic peptide
ASRELKVTFF

SEQ ID NO: 6825 - protein, 8 aa, synthetic construct
  REGION 1..8: note = Description of Artificial Sequence: Synthetic peptide
ATNVVIKV

SEQ ID NO: 6826 - protein, 9 aa, synthetic construct
  REGION 1..9: note = Description of Artificial Sequence: Synthetic peptide
ATNVVIKVC

SEQ ID NO: 6827 - protein, 9 aa, synthetic construct
  REGION 1..9: note = Description of Artificial Sequence: Synthetic peptide
ATTRQVVNV

SEQ ID NO: 6828 - protein, 8 aa, synthetic construct
  REGION 1..8: note = Description of Artificial Sequence: Synthetic peptide
AVDAAKAY

SEQ ID NO: 6829 - protein, 10 aa, synthetic construct
  REGION 1..10: note = Description of Artificial Sequence: Synthetic peptide
AVFDKNLYDK

SEQ ID NO: 6830 - protein, 8 aa, synthetic construct
  REGION 1..8: note = Description of Artificial Sequence: Synthetic peptide
AVFQSASK

SEQ ID NO: 6831 - protein, 9 aa, synthetic construct
  REGION 1..9: note = Description of Artificial Sequence: Synthetic peptide
AVIKTLQPV

SEQ ID NO: 6832 - protein, 9 aa, synthetic construct
  REGION 1..9: note = Description of Artificial Sequence: Synthetic peptide
AVKMFDAYV

SEQ ID NO: 6833 - protein, 10 aa, synthetic construct
  REGION 1..10: note = Description of Artificial Sequence: Synthetic peptide
AVLDMCASLK

SEQ ID NO: 6834 - protein, 9 aa, synthetic construct
  REGION 1..9: note = Description of Artificial Sequence: Synthetic peptide
AVPYNMRVI

SEQ ID NO: 6835 - protein, 10 aa, synthetic construct
  REGION 1..10: note = Description of Artificial Sequence: Synthetic peptide
AVRDPQTLEI

SEQ ID NO: 6836 - protein, 9 aa, synthetic construct
  REGION 1..9: note = Description of Artificial Sequence: Synthetic peptide
AWYTERSEK

SEQ ID NO: 6837 - protein, 9 aa, synthetic construct
  REGION 1..9: note = Description of Artificial Sequence: Synthetic peptide
AYCCNIVNV

SEQ ID NO: 6838 - protein, 9 aa, synthetic construct
  REGION 1..9: note = Description of Artificial Sequence: Synthetic peptide
AYKDYLASG

SEQ ID NO: 6839 - protein, 8 aa, synthetic construct
  REGION 1..8: note = Description of Artificial Sequence: Synthetic peptide
AYKIEELF

SEQ ID NO: 6840 - protein, 9 aa, synthetic construct
  REGION 1..9: note = Description of Artificial Sequence: Synthetic peptide
AYKTFPPTE

SEQ ID NO: 6841 - protein, 10 aa, synthetic construct
  REGION 1..10: note = Description of Artificial Sequence: Synthetic peptide
AYNMMISAGF

SEQ ID NO: 6842 - protein, 9 aa, synthetic construct
  REGION 1..9: note = Description of Artificial Sequence: Synthetic peptide
AYRKVLLRK

SEQ ID NO: 6843 - protein, 9 aa, synthetic construct
  REGION 1..9: note = Description of Artificial Sequence: Synthetic peptide
AYVNTFSST

SEQ ID NO: 6844 - protein, 8 aa, synthetic construct
  REGION 1..8: note = Description of Artificial Sequence: Synthetic peptide
CAPLTVFF

SEQ ID NO: 6845 - protein, 8 aa, synthetic construct
  REGION 1..8: note = Description of Artificial Sequence: Synthetic peptide
CAYCCNIV

SEQ ID NO: 6846 - protein, 9 aa, synthetic construct
  REGION 1..9: note = Description of Artificial Sequence: Synthetic peptide
CEESSAKSA

SEQ ID NO: 6847 - protein, 10 aa, synthetic construct
  REGION 1..10: note = Description of Artificial Sequence: Synthetic peptide
CEIVGGQIVT

SEQ ID NO: 6848 - protein, 9 aa, synthetic construct
  REGION 1..9: note = Description of Artificial Sequence: Synthetic peptide
CEKALKYLP

SEQ ID NO: 6849 - protein, 9 aa, synthetic construct
  REGION 1..9: note = Description of Artificial Sequence: Synthetic peptide
CELYHYQEC

SEQ ID NO: 6850 - protein, 8 aa, synthetic construct
  REGION 1..8: note = Description of Artificial Sequence: Synthetic peptide
CESHGKQV

SEQ ID NO: 6851 - protein, 9 aa, synthetic construct
  REGION 1..9: note = Description of Artificial Sequence: Synthetic peptide
CGVDAVNLL

SEQ ID NO: 6852 - protein, 9 aa, synthetic construct
  REGION 1..9: note = Description of Artificial Sequence: Synthetic peptide
CIDGALLTK

SEQ ID NO: 6853 - protein, 8 aa, synthetic construct
  REGION 1..8: note = Description of Artificial Sequence: Synthetic peptide
CINGLMLL

SEQ ID NO: 6854 - protein, 8 aa, synthetic construct
  REGION 1..8: note = Description of Artificial Sequence: Synthetic peptide
CLDDRCIL

SEQ ID NO: 6855 - protein, 8 aa, synthetic construct
  REGION 1..8: note = Description of Artificial Sequence: Synthetic peptide
CLFLLPSL

SEQ ID NO: 6856 - protein, 9 aa, synthetic construct
  REGION 1..9: note = Description of Artificial Sequence: Synthetic peptide
CLLNRYFRL

SEQ ID NO: 6857 - protein, 9 aa, synthetic construct
  REGION 1..9: note = Description of Artificial Sequence: Synthetic peptide
CNDPFLGVY

SEQ ID NO: 6858 - protein, 10 aa, synthetic construct
  REGION 1..10: note = Description of Artificial Sequence: Synthetic peptide
CNDPFLGVYY

SEQ ID NO: 6859 - protein, 9 aa, synthetic construct
  REGION 1..9: note = Description of Artificial Sequence: Synthetic peptide
CNLGGAVCR

SEQ ID NO: 6860 - protein, 9 aa, synthetic construct
  REGION 1..9: note = Description of Artificial Sequence: Synthetic peptide
CPAVAKHDF

SEQ ID NO: 6861 - protein, 8 aa, synthetic construct
  REGION 1..8: note = Description of Artificial Sequence: Synthetic peptide
CSFGGVSV

SEQ ID NO: 6862 - protein, 9 aa, synthetic construct
  REGION 1..9: note = Description of Artificial Sequence: Synthetic peptide
CSHAAVDAL

SEQ ID NO: 6863 - protein, 9 aa, synthetic construct
  REGION 1..9: note = Description of Artificial Sequence: Synthetic peptide
CSLSHRFYR

SEQ ID NO: 6864 - protein, 9 aa, synthetic construct
  REGION 1..9: note = Description of Artificial Sequence: Synthetic peptide
CSMTDIAKK

SEQ ID NO: 6865 - protein, 9 aa, synthetic construct
  REGION 1..9: note = Description of Artificial Sequence: Synthetic peptide
CSTMTNRQF

SEQ ID NO: 6866 - protein, 10 aa, synthetic construct
  REGION 1..10: note = Description of Artificial Sequence: Synthetic peptide
CTCGKQATKY

SEQ ID NO: 6867 - protein, 10 aa, synthetic construct
  REGION 1..10: note = Description of Artificial Sequence: Synthetic peptide
CTFEYVSQPF

SEQ ID NO: 6868 - protein, 10 aa, synthetic construct
  REGION 1..10: note = Description of Artificial Sequence: Synthetic peptide
CTFTRSTNSR

SEQ ID NO: 6869 - protein, 9 aa, synthetic construct
  REGION 1..9: note = Description of Artificial Sequence: Synthetic peptide
CTGSIPCSV

SEQ ID NO: 6870 - protein, 9 aa, synthetic construct
  REGION 1..9: note = Description of Artificial Sequence: Synthetic peptide
CVCSVIDLL

SEQ ID NO: 6871 - protein, 9 aa, synthetic construct
  REGION 1..9: note = Description of Artificial Sequence: Synthetic peptide
CVDTVRTNV

SEQ ID NO: 6872 - protein, 10 aa, synthetic construct
  REGION 1..10: note = Description of Artificial Sequence: Synthetic peptide
CVDTVRTNVY

SEQ ID NO: 6873 - protein, 10 aa, synthetic construct
  REGION 1..10: note = Description of Artificial Sequence: Synthetic peptide
CVRGTTVLLK

SEQ ID NO: 6874 - protein, 8 aa, synthetic construct
  REGION 1..8: note = Description of Artificial Sequence: Synthetic peptide
CYFGLFCL

SEQ ID NO: 6875 - protein, 10 aa, synthetic construct
  REGION 1..10: note = Description of Artificial Sequence: Synthetic peptide
CYFPLQSYGF

SEQ ID NO: 6876 - protein, 8 aa, synthetic construct
  REGION 1..8: note = Description of Artificial Sequence: Synthetic peptide
DALCEKAL

SEQ ID NO: 6877 - protein, 10 aa, synthetic construct
  REGION 1..10: note = Description of Artificial Sequence: Synthetic peptide
DALCEKALKY

SEQ ID NO: 6878 - protein, 9 aa, synthetic construct
  REGION 1..9: note = Description of Artificial Sequence: Synthetic peptide
DAQSFLNRV

SEQ ID NO: 6879 - protein, 8 aa, synthetic construct
  REGION 1..8: note = Description of Artificial Sequence: Synthetic peptide
DAYPLTKH

SEQ ID NO: 6880 - protein, 9 aa, synthetic construct
  REGION 1..9: note = Description of Artificial Sequence: Synthetic peptide
DCLGDIAAR

SEQ ID NO: 6881 - protein, 9 aa, synthetic construct
  REGION 1..9: note = Description of Artificial Sequence: Synthetic peptide
DDLNQLTGY

SEQ ID NO: 6882 - protein, 8 aa, synthetic construct
  REGION 1..8: note = Description of Artificial Sequence: Synthetic peptide
DEAGSKSP

SEQ ID NO: 6883 - protein, 8 aa, synthetic construct
  REGION 1..8: note = Description of Artificial Sequence: Synthetic peptide
DEFSSNVA

SEQ ID NO: 6884 - protein, 10 aa, synthetic construct
  REGION 1..10: note = Description of Artificial Sequence: Synthetic peptide
DEFSSNVANY

SEQ ID NO: 6885 - protein, 8 aa, synthetic construct
  REGION 1..8: note = Description of Artificial Sequence: Synthetic peptide
DELKINAA

SEQ ID NO: 6886 - protein, 9 aa, synthetic construct
  REGION 1..9: note = Description of Artificial Sequence: Synthetic peptide
DELKINAAC

SEQ ID NO: 6887 - protein, 8 aa, synthetic construct
  REGION 1..8: note = Description of Artificial Sequence: Synthetic peptide
DERIDKVL

SEQ ID NO: 6888 - protein, 11 aa, synthetic construct
  REGION 1..11: note = Description of Artificial Sequence: Synthetic peptide
DEVARDLSLQF

SEQ ID NO: 6889 - protein, 9 aa, synthetic construct
  REGION 1..9: note = Description of Artificial Sequence: Synthetic peptide
DEWSMATYY

SEQ ID NO: 6890 - protein, 9 aa, synthetic construct
  REGION 1..9: note = Description of Artificial Sequence: Synthetic peptide
DFDTWFSQR

SEQ ID NO: 6891 - protein, 10 aa, synthetic construct
  REGION 1..10: note = Description of Artificial Sequence: Synthetic peptide
DFIDTKRGVY

SEQ ID NO: 6892 - protein, 9 aa, synthetic construct
  REGION 1..9: note = Description of Artificial Sequence: Synthetic peptide
DFNLVAMKY

SEQ ID NO: 6893 - protein, 9 aa, synthetic construct
  REGION 1..9: note = Description of Artificial Sequence: Synthetic peptide
DFQVTIAEI

SEQ ID NO: 6894 - protein, 9 aa, synthetic construct
  REGION 1..9: note = Description of Artificial Sequence: Synthetic peptide
DFTEERLKL

SEQ ID NO: 6895 - protein, 10 aa, synthetic construct
  REGION 1..10: note = Description of Artificial Sequence: Synthetic peptide
DFTEERLKLF

SEQ ID NO: 6896 - protein, 9 aa, synthetic construct
  REGION 1..9: note = Description of Artificial Sequence: Synthetic peptide
DFVEIIKSQ

SEQ ID NO: 6897 - protein, 9 aa, synthetic construct
  REGION 1..9: note = Description of Artificial Sequence: Synthetic peptide
DGISQYSLR

SEQ ID NO: 6898 - protein, 9 aa, synthetic construct
  REGION 1..9: note = Description of Artificial Sequence: Synthetic peptide
DGNKIADKY

SEQ ID NO: 6899 - protein, 9 aa, synthetic construct
  REGION 1..9: note = Description of Artificial Sequence: Synthetic peptide
DGVKHVYQL

SEQ ID NO: 6900 - protein, 8 aa, synthetic construct
  REGION 1..8: note = Description of Artificial Sequence: Synthetic peptide
DGYPLECI

SEQ ID NO: 6901 - protein, 9 aa, synthetic construct
  REGION 1..9: note = Description of Artificial Sequence: Synthetic peptide
DHSSSSDNI

SEQ ID NO: 6902 - protein, 11 aa, synthetic construct
  REGION 1..11: note = Description of Artificial Sequence: Synthetic peptide
DHSSSSDNIAL

SEQ ID NO: 6903 - protein, 10 aa, synthetic construct
  REGION 1..10: note = Description of Artificial Sequence: Synthetic peptide
DHVISTSHKL

SEQ ID NO: 6904 - protein, 9 aa, synthetic construct
  REGION 1..9: note = Description of Artificial Sequence: Synthetic peptide
DIAANTVIW

SEQ ID NO: 6905 - protein, 9 aa, synthetic construct
  REGION 1..9: note = Description of Artificial Sequence: Synthetic peptide
DIADTTDAV

SEQ ID NO: 6906 - protein, 10 aa, synthetic construct
  REGION 1..10: note = Description of Artificial Sequence: Synthetic peptide
DIADTTDAVR

SEQ ID NO: 6907 - protein, 9 aa, synthetic construct
  REGION 1..9: note = Description of Artificial Sequence: Synthetic peptide
DIKDLPKEI

SEQ ID NO: 6908 - protein, 9 aa, synthetic construct
  REGION 1..9: note = Description of Artificial Sequence: Synthetic peptide
DKFTDGVCL

SEQ ID NO: 6909 - protein, 9 aa, synthetic construct
  REGION 1..9: note = Description of Artificial Sequence: Synthetic peptide
DLATNNLVV

SEQ ID NO: 6910 - protein, 11 aa, synthetic construct
  REGION 1..11: note = Description of Artificial Sequence: Synthetic peptide
DLDEWSMATYY

SEQ ID NO: 6911 - protein, 9 aa, synthetic construct
  REGION 1..9: note = Description of Artificial Sequence: Synthetic peptide
DMFLGTCRR

SEQ ID NO: 6912 - protein, 9 aa, synthetic construct
  REGION 1..9: note = Description of Artificial Sequence: Synthetic peptide
DMSKFPLKL

SEQ ID NO: 6913 - protein, 8 aa, synthetic construct
  REGION 1..8: note = Description of Artificial Sequence: Synthetic peptide
DMVPHISR

SEQ ID NO: 6914 - protein, 9 aa, synthetic construct
  REGION 1..9: note = Description of Artificial Sequence: Synthetic peptide
DPFLGVYYH

SEQ ID NO: 6915 - protein, 8 aa, synthetic construct
  REGION 1..8: note = Description of Artificial Sequence: Synthetic peptide
DPQTLEIL

SEQ ID NO: 6916 - protein, 9 aa, synthetic construct
  REGION 1..9: note = Description of Artificial Sequence: Synthetic peptide
DQFKHLIPL

SEQ ID NO: 6917 - protein, 9 aa, synthetic construct
  REGION 1..9: note = Description of Artificial Sequence: Synthetic peptide
DRAMPNMLR

SEQ ID NO: 6918 - protein, 11 aa, synthetic construct
  REGION 1..11: note = Description of Artificial Sequence: Synthetic peptide
DRYPANSIVCR

SEQ ID NO: 6919 - protein, 10 aa, synthetic construct
  REGION 1..10: note = Description of Artificial Sequence: Synthetic peptide
DSFKEELDKY

SEQ ID NO: 6920 - protein, 9 aa, synthetic construct
  REGION 1..9: note = Description of Artificial Sequence: Synthetic peptide
DTANPKTPK

SEQ ID NO: 6921 - protein, 9 aa, synthetic construct
  REGION 1..9: note = Description of Artificial Sequence: Synthetic peptide
DTDFVNEFY

SEQ ID NO: 6922 - protein, 9 aa, synthetic construct
  REGION 1..9: note = Description of Artificial Sequence: Synthetic peptide
DTKFKTEGL

SEQ ID NO: 6923 - protein, 9 aa, synthetic construct
  REGION 1..9: note = Description of Artificial Sequence: Synthetic peptide
DTLKNLSDR

SEQ ID NO: 6924 - protein, 8 aa, synthetic construct
  REGION 1..8: note = Description of Artificial Sequence: Synthetic peptide
DTVRTNVY

SEQ ID NO: 6925 - protein, 9 aa, synthetic construct
  REGION 1..9: note = Description of Artificial Sequence: Synthetic peptide
DTVRTNVYL

SEQ ID NO: 6926 - protein, 10 aa, synthetic construct
  REGION 1..10: note = Description of Artificial Sequence: Synthetic peptide
DTYACWHHSI

SEQ ID NO: 6927 - protein, 8 aa, synthetic construct
  REGION 1..8: note = Description of Artificial Sequence: Synthetic peptide
DVSSAINR

SEQ ID NO: 6928 - protein, 9 aa, synthetic construct
  REGION 1..9: note = Description of Artificial Sequence: Synthetic peptide
DVSSAINRP

SEQ ID NO: 6929 - protein, 10 aa, synthetic construct
  REGION 1..10: note = Description of Artificial Sequence: Synthetic peptide
DVTDVTQLYL

SEQ ID NO: 6930 - protein, 9 aa, synthetic construct
  REGION 1..9: note = Description of Artificial Sequence: Synthetic peptide
DVVAIDYKH

SEQ ID NO: 6931 - protein, 10 aa, synthetic construct
  REGION 1..10: note = Description of Artificial Sequence: Synthetic peptide
DVVAIDYKHY

SEQ ID NO: 6932 - protein, 10 aa, synthetic construct
  REGION 1..10: note = Description of Artificial Sequence: Synthetic peptide
DVVNQNAQAL

SEQ ID NO: 6933 - protein, 9 aa, synthetic construct
  REGION 1..9: note = Description of Artificial Sequence: Synthetic peptide
DVVQEGVLT

SEQ ID NO: 6934 - protein, 9 aa, synthetic construct
  REGION 1..9: note = Description of Artificial Sequence: Synthetic peptide
DVVRQCSGV

SEQ ID NO: 6935 - protein, 9 aa, synthetic construct
  REGION 1..9: note = Description of Artificial Sequence: Synthetic peptide
DYTEISFML

SEQ ID NO: 6936 - protein, 8 aa, synthetic construct
  REGION 1..8: note = Description of Artificial Sequence: Synthetic peptide
EAVEAPLV

SEQ ID NO: 6937 - protein, 9 aa, synthetic construct
  REGION 1..9: note = Description of Artificial Sequence: Synthetic peptide
EAVKTQFNY

SEQ ID NO: 6938 - protein, 9 aa, synthetic construct
  REGION 1..9: note = Description of Artificial Sequence: Synthetic peptide
EAYEQAVAN

SEQ ID NO: 6939 - protein, 9 aa, synthetic construct
  REGION 1..9: note = Description of Artificial Sequence: Synthetic peptide
ECAQVLSEM

SEQ ID NO: 6940 - protein, 9 aa, synthetic construct
  REGION 1..9: note = Description of Artificial Sequence: Synthetic peptide
ECIKDLLAR

SEQ ID NO: 6941 - protein, 9 aa, synthetic construct
  REGION 1..9: note = Description of Artificial Sequence: Synthetic peptide
EDDNLIDSY

SEQ ID NO: 6942 - protein, 8 aa, synthetic construct
  REGION 1..8: note = Description of Artificial Sequence: Synthetic peptide
EEAALCTF

SEQ ID NO: 6943 - protein, 8 aa, synthetic construct
  REGION 1..8: note = Description of Artificial Sequence: Synthetic peptide
EEAKKVKP

SEQ ID NO: 6944 - protein, 10 aa, synthetic construct
  REGION 1..10: note = Description of Artificial Sequence: Synthetic peptide
EEAKKVKPTV

SEQ ID NO: 6945 - protein, 8 aa, synthetic construct
  REGION 1..8: note = Description of Artificial Sequence: Synthetic peptide
EEFEPSTQ

SEQ ID NO: 6946 - protein, 11 aa, synthetic construct
  REGION 1..11: note = Description of Artificial Sequence: Synthetic peptide
EEFEPSTQYEY

SEQ ID NO: 6947 - protein, 8 aa, synthetic construct
  REGION 1..8: note = Description of Artificial Sequence: Synthetic peptide
EEKFKEGV

SEQ ID NO: 6948 - protein, 9 aa, synthetic construct
  REGION 1..9: note = Description of Artificial Sequence: Synthetic peptide
EEMLDNRAT

SEQ ID NO: 6949 - protein, 9 aa, synthetic construct
  REGION 1..9: note = Description of Artificial Sequence: Synthetic peptide
EEQEEDWLD

SEQ ID NO: 6950 - protein, 10 aa, synthetic construct
  REGION 1..10: note = Description of Artificial Sequence: Synthetic peptide
EERLKLFDRY

SEQ ID NO: 6951 - protein, 8 aa, synthetic construct
  REGION 1..8: note = Description of Artificial Sequence: Synthetic peptide
EETFKLSY

SEQ ID NO: 6952 - protein, 9 aa, synthetic construct
  REGION 1..9: note = Description of Artificial Sequence: Synthetic peptide
EETGLLMPL

SEQ ID NO: 6953 - protein, 8 aa, synthetic construct
  REGION 1..8: note = Description of Artificial Sequence: Synthetic peptide
EETIYNLL

SEQ ID NO: 6954 - protein, 9 aa, synthetic construct
  REGION 1..9: note = Description of Artificial Sequence: Synthetic peptide
EETIYNLLK

SEQ ID NO: 6955 - protein, 8 aa, synthetic construct
  REGION 1..8: note = Description of Artificial Sequence: Synthetic peptide
EEVGHTDL

SEQ ID NO: 6956 - protein, 10 aa, synthetic construct
  REGION 1..10: note = Description of Artificial Sequence: Synthetic peptide
EEVLSEARQH

SEQ ID NO: 6957 - protein, 9 aa, synthetic construct
  REGION 1..9: note = Description of Artificial Sequence: Synthetic peptide
EFLTRNPAW

SEQ ID NO: 6958 - protein, 9 aa, synthetic construct
  REGION 1..9: note = Description of Artificial Sequence: Synthetic peptide
EHVNNSYEC

SEQ ID NO: 6959 - protein, 9 aa, synthetic construct
  REGION 1..9: note = Description of Artificial Sequence: Synthetic peptide
EIDFLELAM

SEQ ID NO: 6960 - protein, 10 aa, synthetic construct
  REGION 1..10: note = Description of Artificial Sequence: Synthetic peptide
EIDPKLDNYY

SEQ ID NO: 6961 - protein, 10 aa, synthetic construct
  REGION 1..10: note = Description of Artificial Sequence: Synthetic peptide
EILDITPCSF

SEQ ID NO: 6962 - protein, 10 aa, synthetic construct
  REGION 1..10: note = Description of Artificial Sequence: Synthetic peptide
EIPRRNVATL

SEQ ID NO: 6963 - protein, 9 aa, synthetic construct
  REGION 1..9: note = Description of Artificial Sequence: Synthetic peptide
EIVGGQIVT

SEQ ID NO: 6964 - protein, 9 aa, synthetic construct
  REGION 1..9: note = Description of Artificial Sequence: Synthetic peptide
EIVKFISTC

SEQ ID NO: 6965 - protein, 9 aa, synthetic construct
  REGION 1..9: note = Description of Artificial Sequence: Synthetic peptide
EKTHVQLSL

SEQ ID NO: 6966 - protein, 10 aa, synthetic construct
  REGION 1..10: note = Description of Artificial Sequence: Synthetic peptide
ELAMDEFIER

SEQ ID NO: 6967 - protein, 9 aa, synthetic construct
  REGION 1..9: note = Description of Artificial Sequence: Synthetic peptide
ELEGIQYGR

SEQ ID NO: 6968 - protein, 9 aa, synthetic construct
  REGION 1..9: note = Description of Artificial Sequence: Synthetic peptide
ELPTGVHAG

SEQ ID NO: 6969 - protein, 8 aa, synthetic construct
  REGION 1..8: note = Description of Artificial Sequence: Synthetic peptide
ELSPVALR

SEQ ID NO: 6970 - protein, 10 aa, synthetic construct
  REGION 1..10: note = Description of Artificial Sequence: Synthetic peptide
ELVIGAVILR

SEQ ID NO: 6971 - protein, 8 aa, synthetic construct
  REGION 1..8: note = Description of Artificial Sequence: Synthetic peptide
ELYSPIFL

SEQ ID NO: 6972 - protein, 10 aa, synthetic construct
  REGION 1..10: note = Description of Artificial Sequence: Synthetic peptide
ELYSPIFLIV

SEQ ID NO: 6973 - protein, 8 aa, synthetic construct
  REGION 1..8: note = Description of Artificial Sequence: Synthetic peptide
ENPDILRV

SEQ ID NO: 6974 - protein, 9 aa, synthetic construct
  REGION 1..9: note = Description of Artificial Sequence: Synthetic peptide
EPEEHVQIH

SEQ ID NO: 6975 - protein, 11 aa, synthetic construct
  REGION 1..11: note = Description of Artificial Sequence: Synthetic peptide
EPEEHVQIHTI

SEQ ID NO: 6976 - protein, 8 aa, synthetic construct
  REGION 1..8: note = Description of Artificial Sequence: Synthetic peptide
EPEYFNSV

SEQ ID NO: 6977 - protein, 9 aa, synthetic construct
  REGION 1..9: note = Description of Artificial Sequence: Synthetic peptide
EQPYVFIKR

SEQ ID NO: 6978 - protein, 8 aa, synthetic construct
  REGION 1..8: note = Description of Artificial Sequence: Synthetic peptide
EQYVFCTV

SEQ ID NO: 6979 - protein, 8 aa, synthetic construct
  REGION 1..8: note = Description of Artificial Sequence: Synthetic peptide
ERDISTEI

SEQ ID NO: 6980 - protein, 9 aa, synthetic construct
  REGION 1..9: note = Description of Artificial Sequence: Synthetic peptide
ERLKLFDRY

SEQ ID NO: 6981 - protein, 10 aa, synthetic construct
  REGION 1..10: note = Description of Artificial Sequence: Synthetic peptide
ERYKLEGYAF

SEQ ID NO: 6982 - protein, 9 aa, synthetic construct
  REGION 1..9: note = Description of Artificial Sequence: Synthetic peptide
ESGLKTILR

SEQ ID NO: 6983 - protein, 10 aa, synthetic construct
  REGION 1..10: note = Description of Artificial Sequence: Synthetic peptide
ESLVPGFNEK

SEQ ID NO: 6984 - protein, 9 aa, synthetic construct
  REGION 1..9: note = Description of Artificial Sequence: Synthetic peptide
ESNKKFLPF

SEQ ID NO: 6985 - protein, 9 aa, synthetic construct
  REGION 1..9: note = Description of Artificial Sequence: Synthetic peptide
ESVQTFFKL

SEQ ID NO: 6986 - protein, 9 aa, synthetic construct
  REGION 1..9: note = Description of Artificial Sequence: Synthetic peptide
ETAQNSVRV

SEQ ID NO: 6987 - protein, 10 aa, synthetic construct
  REGION 1..10: note = Description of Artificial Sequence: Synthetic peptide
ETAQNSVRVL

SEQ ID NO: 6988 - protein, 9 aa, synthetic construct
  REGION 1..9: note = Description of Artificial Sequence: Synthetic peptide
ETFKLSYGI

SEQ ID NO: 6989 - protein, 9 aa, synthetic construct
  REGION 1..9: note = Description of Artificial Sequence: Synthetic peptide
ETGTLIVNS

SEQ ID NO: 6990 - protein, 9 aa, synthetic construct
  REGION 1..9: note = Description of Artificial Sequence: Synthetic peptide
ETIYNLLKD

SEQ ID NO: 6991 - protein, 11 aa, synthetic construct
  REGION 1..11: note = Description of Artificial Sequence: Synthetic peptide
ETKAIVSTIQR

SEQ ID NO: 6992 - protein, 9 aa, synthetic construct
  REGION 1..9: note = Description of Artificial Sequence: Synthetic peptide
ETKCTLKSF

SEQ ID NO: 6993 - protein, 9 aa, synthetic construct
  REGION 1..9: note = Description of Artificial Sequence: Synthetic peptide
ETKFLTENL

SEQ ID NO: 6994 - protein, 10 aa, synthetic construct
  REGION 1..10: note = Description of Artificial Sequence: Synthetic peptide
ETLKATEETF

SEQ ID NO: 6995 - protein, 8 aa, synthetic construct
  REGION 1..8: note = Description of Artificial Sequence: Synthetic peptide
ETLPTEVL

SEQ ID NO: 6996 - protein, 9 aa, synthetic construct
  REGION 1..9: note = Description of Artificial Sequence: Synthetic peptide
ETSNSFDVL

SEQ ID NO: 6997 - protein, 9 aa, synthetic construct
  REGION 1..9: note = Description of Artificial Sequence: Synthetic peptide
EVAKNLNES

SEQ ID NO: 6998 - protein, 10 aa, synthetic construct
  REGION 1..10: note = Description of Artificial Sequence: Synthetic peptide
EVAKNLNESL

SEQ ID NO: 6999 - protein, 9 aa, synthetic construct
  REGION 1..9: note = Description of Artificial Sequence: Synthetic peptide
EVARDLSLQ

SEQ ID NO: 7000 - protein, 10 aa, synthetic construct
  REGION 1..10: note = Description of Artificial Sequence: Synthetic peptide
EVARDLSLQF

SEQ ID NO: 7001 - protein, 10 aa, synthetic construct
  REGION 1..10: note = Description of Artificial Sequence: Synthetic peptide
EVFAQVKQIY

SEQ ID NO: 7002 - protein, 8 aa, synthetic construct
  REGION 1..8: note = Description of Artificial Sequence: Synthetic peptide
EVGPEHSL

SEQ ID NO: 7003 - protein, 11 aa, synthetic construct
  REGION 1..11: note = Description of Artificial Sequence: Synthetic peptide
EVGPEHSLAEY

SEQ ID NO: 7004 - protein, 9 aa, synthetic construct
  REGION 1..9: note = Description of Artificial Sequence: Synthetic peptide
EVLSEARQH

SEQ ID NO: 7005 - protein, 9 aa, synthetic construct
  REGION 1..9: note = Description of Artificial Sequence: Synthetic peptide
EVNSFSGYL

SEQ ID NO: 7006 - protein, 10 aa, synthetic construct
  REGION 1..10: note = Description of Artificial Sequence: Synthetic peptide
EVNSFSGYLK

SEQ ID NO: 7007 - protein, 9 aa, synthetic construct
  REGION 1..9: note = Description of Artificial Sequence: Synthetic peptide
EVQELYSPI

SEQ ID NO: 7008 - protein, 10 aa, synthetic construct
  REGION 1..10: note = Description of Artificial Sequence: Synthetic peptide
EVTGDSCNNY

SEQ ID NO: 7009 - protein, 11 aa, synthetic construct
  REGION 1..11: note = Description of Artificial Sequence: Synthetic peptide
EVVENPTIQKD

SEQ ID NO: 7010 - protein, 8 aa, synthetic construct
  REGION 1..8: note = Description of Artificial Sequence: Synthetic peptide
EVVGDIIL

SEQ ID NO: 7011 - protein, 9 aa, synthetic construct
  REGION 1..9: note = Description of Artificial Sequence: Synthetic peptide
EVVLKKLKK

SEQ ID NO: 7012 - protein, 9 aa, synthetic construct
  REGION 1..9: note = Description of Artificial Sequence: Synthetic peptide
EVVLKTGDL

SEQ ID NO: 7013 - protein, 8 aa, synthetic construct
  REGION 1..8: note = Description of Artificial Sequence: Synthetic peptide
EWFLAYIL

SEQ ID NO: 7014 - protein, 9 aa, synthetic construct
  REGION 1..9: note = Description of Artificial Sequence: Synthetic peptide
EWSMATYYL

SEQ ID NO: 7015 - protein, 10 aa, synthetic construct
  REGION 1..10: note = Description of Artificial Sequence: Synthetic peptide
EYADVFHLYL

SEQ ID NO: 7016 - protein, 9 aa, synthetic construct
  REGION 1..9: note = Description of Artificial Sequence: Synthetic peptide
EYCPIFFIT

SEQ ID NO: 7017 - protein, 10 aa, synthetic construct
  REGION 1..10: note = Description of Artificial Sequence: Synthetic peptide
EYKGPITDVF

SEQ ID NO: 7018 - protein, 11 aa, synthetic construct
  REGION 1..11: note = Description of Artificial Sequence: Synthetic peptide
FACPDGVKHVY

SEQ ID NO: 7019 - protein, 11 aa, synthetic construct
  REGION 1..11: note = Description of Artificial Sequence: Synthetic peptide
FADDLNQLTGY

SEQ ID NO: 7020 - protein, 12 aa, synthetic construct
  REGION 1..12: note = Description of Artificial Sequence: Synthetic peptide
FAFPFTIYSLLL

SEQ ID NO: 7021 - protein, 9 aa, synthetic construct
  REGION 1..9: note = Description of Artificial Sequence: Synthetic peptide
FAMGIIAMS

SEQ ID NO: 7022 - protein, 11 aa, synthetic construct
  REGION 1..11: note = Description of Artificial Sequence: Synthetic peptide
FAMGIIAMSAF

SEQ ID NO: 7023 - protein, 9 aa, synthetic construct
  REGION 1..9: note = Description of Artificial Sequence: Synthetic peptide
FAMMFVKHK

SEQ ID NO: 7024 - protein, 8 aa, synthetic construct
  REGION 1..8: note = Description of Artificial Sequence: Synthetic peptide
FAQDGNAA

SEQ ID NO: 7025 - protein, 8 aa, synthetic construct
  REGION 1..8: note = Description of Artificial Sequence: Synthetic peptide
FAQVKQIY

SEQ ID NO: 7026 - protein, 10 aa, synthetic construct
  REGION 1..10: note = Description of Artificial Sequence: Synthetic peptide
FARTRSMWSF

SEQ ID NO: 7027 - protein, 9 aa, synthetic construct
  REGION 1..9: note = Description of Artificial Sequence: Synthetic peptide
FASVYAWNR

SEQ ID NO: 7028 - protein, 11 aa, synthetic construct
  REGION 1..11: note = Description of Artificial Sequence: Synthetic peptide
FAVHFISNSWL

SEQ ID NO: 7029 - protein, 8 aa, synthetic construct
  REGION 1..8: note = Description of Artificial Sequence: Synthetic peptide
FCALILAY

SEQ ID NO: 7030 - protein, 9 aa, synthetic construct
  REGION 1..9: note = Description of Artificial Sequence: Synthetic peptide
FCDLKGKYV

SEQ ID NO: 7031 - protein, 9 aa, synthetic construct
  REGION 1..9: note = Description of Artificial Sequence: Synthetic peptide
FCGVDAVNL

SEQ ID NO: 7032 - protein, 10 aa, synthetic construct
  REGION 1..10: note = Description of Artificial Sequence: Synthetic peptide
FCLEASFNYL

SEQ ID NO: 7033 - protein, 10 aa, synthetic construct
  REGION 1..10: note = Description of Artificial Sequence: Synthetic peptide
FCNDPFLGVY

SEQ ID NO: 7034 - protein, 9 aa, synthetic construct
  REGION 1..9: note = Description of Artificial Sequence: Synthetic peptide
FCSQHTMLV

SEQ ID NO: 7035 - protein, 8 aa, synthetic construct
  REGION 1..8: note = Description of Artificial Sequence: Synthetic peptide
FDNLKTLL

SEQ ID NO: 7036 - protein, 9 aa, synthetic construct
  REGION 1..9: note = Description of Artificial Sequence: Synthetic peptide
FEHIVYGDF

SEQ ID NO: 7037 - protein, 9 aa, synthetic construct
  REGION 1..9: note = Description of Artificial Sequence: Synthetic peptide
FEYYHTTDP

SEQ ID NO: 7038 - protein, 9 aa, synthetic construct
  REGION 1..9: note = Description of Artificial Sequence: Synthetic peptide
FFAQDGNAA

SEQ ID NO: 7039 - protein, 10 aa, synthetic construct
  REGION 1..10: note = Description of Artificial Sequence: Synthetic peptide
FFFAQDGNAA

SEQ ID NO: 7040 - protein, 10 aa, synthetic construct
  REGION 1..10: note = Description of Artificial Sequence: Synthetic peptide
FFFLYENAFL

SEQ ID NO: 7041 - protein, 8 aa, synthetic construct
  REGION 1..8: note = Description of Artificial Sequence: Synthetic peptide
FFKLVNKF

SEQ ID NO: 7042 - protein, 9 aa, synthetic construct
  REGION 1..9: note = Description of Artificial Sequence: Synthetic peptide
FFKLVNKFL

SEQ ID NO: 7043 - protein, 8 aa, synthetic construct
  REGION 1..8: note = Description of Artificial Sequence: Synthetic peptide
FFLYENAF

SEQ ID NO: 7044 - protein, 8 aa, synthetic construct
  REGION 1..8: note = Description of Artificial Sequence: Synthetic peptide
FFPDLNGD

SEQ ID NO: 7045 - protein, 10 aa, synthetic construct
  REGION 1..10: note = Description of Artificial Sequence: Synthetic peptide
FFPDLNGDVV

SEQ ID NO: 7046 - protein, 9 aa, synthetic construct
  REGION 1..9: note = Description of Artificial Sequence: Synthetic peptide
FFSNVTWFH

SEQ ID NO: 7047 - protein, 8 aa, synthetic construct
  REGION 1..8: note = Description of Artificial Sequence: Synthetic peptide
FFTYICGF

SEQ ID NO: 7048 - protein, 10 aa, synthetic construct
  REGION 1..10: note = Description of Artificial Sequence: Synthetic peptide
FFYVLGLAAI

SEQ ID NO: 7049 - protein, 8 aa, synthetic construct
  REGION 1..8: note = Description of Artificial Sequence: Synthetic peptide
FGDDTVIE

SEQ ID NO: 7050 - protein, 8 aa, synthetic construct
  REGION 1..8: note = Description of Artificial Sequence: Synthetic peptide
FGPLVRKI

SEQ ID NO: 7051 - protein, 8 aa, synthetic construct
  REGION 1..8: note = Description of Artificial Sequence: Synthetic peptide
FGWLIVGV

SEQ ID NO: 7052 - protein, 8 aa, synthetic construct
  REGION 1..8: note = Description of Artificial Sequence: Synthetic peptide
FHLDGEVI

SEQ ID NO: 7053 - protein, 10 aa, synthetic construct
  REGION 1..10: note = Description of Artificial Sequence: Synthetic peptide
FIAGLIAIVM

SEQ ID NO: 7054 - protein, 10 aa, synthetic construct
  REGION 1..10: note = Description of Artificial Sequence: Synthetic peptide
FIASFRLFAR

SEQ ID NO: 7055 - protein, 9 aa, synthetic construct
  REGION 1..9: note = Description of Artificial Sequence: Synthetic peptide
FIEDLLFNK

SEQ ID NO: 7056 - protein, 9 aa, synthetic construct
  REGION 1..9: note = Description of Artificial Sequence: Synthetic peptide
FIKQYGDCL

SEQ ID NO: 7057 - protein, 10 aa, synthetic construct
  REGION 1..10: note = Description of Artificial Sequence: Synthetic peptide
FIRQEEVQEL

SEQ ID NO: 7058 - protein, 8 aa, synthetic construct
  REGION 1..8: note = Description of Artificial Sequence: Synthetic peptide
FKEGVEFL

SEQ ID NO: 7059 - protein, 8 aa, synthetic construct
  REGION 1..8: note = Description of Artificial Sequence: Synthetic peptide
FKLNIKLL

SEQ ID NO: 7060 - protein, 8 aa, synthetic construct
  REGION 1..8: note = Description of Artificial Sequence: Synthetic peptide
FKVSIWNL

SEQ ID NO: 7061 - protein, 9 aa, synthetic construct
  REGION 1..9: note = Description of Artificial Sequence: Synthetic peptide
FLELAMDEF

SEQ ID NO: 7062 - protein, 8 aa, synthetic construct
  REGION 1..8: note = Description of Artificial Sequence: Synthetic peptide
FLFVAAIF

SEQ ID NO: 7063 - protein, 8 aa, synthetic construct
  REGION 1..8: note = Description of Artificial Sequence: Synthetic peptide
FLHFLPRV

SEQ ID NO: 7064 - protein, 9 aa, synthetic construct
  REGION 1..9: note = Description of Artificial Sequence: Synthetic peptide
FLHVTYVPA

SEQ ID NO: 7065 - protein, 10 aa, synthetic construct
  REGION 1..10: note = Description of Artificial Sequence: Synthetic peptide
FLKRGDKSVY

SEQ ID NO: 7066 - protein, 10 aa, synthetic construct
  REGION 1..10: note = Description of Artificial Sequence: Synthetic peptide
FLLFLVLIML

SEQ ID NO: 7067 - protein, 8 aa, synthetic construct
  REGION 1..8: note = Description of Artificial Sequence: Synthetic peptide
FLLLSVCL

SEQ ID NO: 7068 - protein, 8 aa, synthetic construct
  REGION 1..8: note = Description of Artificial Sequence: Synthetic peptide
FLQSINFV

SEQ ID NO: 7069 - protein, 10 aa, synthetic construct
  REGION 1..10: note = Description of Artificial Sequence: Synthetic peptide
FLQSINFVRI

SEQ ID NO: 7070 - protein, 8 aa, synthetic construct
  REGION 1..8: note = Description of Artificial Sequence: Synthetic peptide
FLRDGWEI

SEQ ID NO: 7071 - protein, 8 aa, synthetic construct
  REGION 1..8: note = Description of Artificial Sequence: Synthetic peptide
FLTWICLL

SEQ ID NO: 7072 - protein, 8 aa, synthetic construct
  REGION 1..8: note = Description of Artificial Sequence: Synthetic peptide
FLVLLPLV

SEQ ID NO: 7073 - protein, 9 aa, synthetic construct
  REGION 1..9: note = Description of Artificial Sequence: Synthetic peptide
FLYENAFLP

SEQ ID NO: 7074 - protein, 9 aa, synthetic construct
  REGION 1..9: note = Description of Artificial Sequence: Synthetic peptide
FMGRIRSVY

SEQ ID NO: 7075 - protein, 9 aa, synthetic construct
  REGION 1..9: note = Description of Artificial Sequence: Synthetic peptide
FNATRFASV

SEQ ID NO: 7076 - protein, 10 aa, synthetic construct
  REGION 1..10: note = Description of Artificial Sequence: Synthetic peptide
FNIDYDCVSF

SEQ ID NO: 7077 - protein, 11 aa, synthetic construct
  REGION 1..11: note = Description of Artificial Sequence: Synthetic peptide
FPDLNGDVVAI

SEQ ID NO: 7078 - protein, 9 aa, synthetic construct
  REGION 1..9: note = Description of Artificial Sequence: Synthetic peptide
FPFNKWGKA

SEQ ID NO: 7079 - protein, 10 aa, synthetic construct
  REGION 1..10: note = Description of Artificial Sequence: Synthetic peptide
FPLCANGQVF

SEQ ID NO: 7080 - protein, 9 aa, synthetic construct
  REGION 1..9: note = Description of Artificial Sequence: Synthetic peptide
FPLNSIIKT

SEQ ID NO: 7081 - protein, 10 aa, synthetic construct
  REGION 1..10: note = Description of Artificial Sequence: Synthetic peptide
FPLNSIIKTI

SEQ ID NO: 7082 - protein, 9 aa, synthetic construct
  REGION 1..9: note = Description of Artificial Sequence: Synthetic peptide
FRIDGDMVP

SEQ ID NO: 7083 - protein, 9 aa, synthetic construct
  REGION 1..9: note = Description of Artificial Sequence: Synthetic peptide
FRKSNLKPF

SEQ ID NO: 7084 - protein, 10 aa, synthetic construct
  REGION 1..10: note = Description of Artificial Sequence: Synthetic peptide
FRLTLGVYDY

SEQ ID NO: 7085 - protein, 9 aa, synthetic construct
  REGION 1..9: note = Description of Artificial Sequence: Synthetic peptide
FRSSVLHST

SEQ ID NO: 7086 - protein, 8 aa, synthetic construct
  REGION 1..8: note = Description of Artificial Sequence: Synthetic peptide
FSALEPLV

SEQ ID NO: 7087 - protein, 10 aa, synthetic construct
  REGION 1..10: note = Description of Artificial Sequence: Synthetic peptide
FSKLINIIIW

SEQ ID NO: 7088 - protein, 10 aa, synthetic construct
  REGION 1..10: note = Description of Artificial Sequence: Synthetic peptide
FSSLPSYAAF

SEQ ID NO: 7089 - protein, 10 aa, synthetic construct
  REGION 1..10: note = Description of Artificial Sequence: Synthetic peptide
FSTVFPPTSF

SEQ ID NO: 7090 - protein, 9 aa, synthetic construct
  REGION 1..9: note = Description of Artificial Sequence: Synthetic peptide
FTSLEIPRR

SEQ ID NO: 7091 - protein, 11 aa, synthetic construct
  REGION 1..11: note = Description of Artificial Sequence: Synthetic peptide
FTYICGFIQQK

SEQ ID NO: 7092 - protein, 10 aa, synthetic construct
  REGION 1..10: note = Description of Artificial Sequence: Synthetic peptide
FVDGVPFVVS

SEQ ID NO: 7093 - protein, 8 aa, synthetic construct
  REGION 1..8: note = Description of Artificial Sequence: Synthetic peptide
FVDSDVET

SEQ ID NO: 7094 - protein, 10 aa, synthetic construct
  REGION 1..10: note = Description of Artificial Sequence: Synthetic peptide
FVENPDILRV

SEQ ID NO: 7095 - protein, 11 aa, synthetic construct
  REGION 1..11: note = Description of Artificial Sequence: Synthetic peptide
FVENPDILRVY

SEQ ID NO: 7096 - protein, 8 aa, synthetic construct
  REGION 1..8: note = Description of Artificial Sequence: Synthetic peptide
FVETVKGL

SEQ ID NO: 7097 - protein, 10 aa, synthetic construct
  REGION 1..10: note = Description of Artificial Sequence: Synthetic peptide
FVETVKGLDY

SEQ ID NO: 7098 - protein, 10 aa, synthetic construct
  REGION 1..10: note = Description of Artificial Sequence: Synthetic peptide
FVFKNIDGYF

SEQ ID NO: 7099 - protein, 8 aa, synthetic construct
  REGION 1..8: note = Description of Artificial Sequence: Synthetic peptide
FVKATCEF

SEQ ID NO: 7100 - protein, 8 aa, synthetic construct
  REGION 1..8: note = Description of Artificial Sequence: Synthetic peptide
FVLAAVYR

SEQ ID NO: 7101 - protein, 8 aa, synthetic construct
  REGION 1..8: note = Description of Artificial Sequence: Synthetic peptide
FVRIIMRL

SEQ ID NO: 7102 - protein, 9 aa, synthetic construct
  REGION 1..9: note = Description of Artificial Sequence: Synthetic peptide
FVRIIMRLW

SEQ ID NO: 7103 - protein, 10 aa, synthetic construct
  REGION 1..10: note = Description of Artificial Sequence: Synthetic peptide
FVTVYSHLLL

SEQ ID NO: 7104 - protein, 8 aa, synthetic construct
  REGION 1..8: note = Description of Artificial Sequence: Synthetic peptide
FYKGVITH

SEQ ID NO: 7105 - protein, 11 aa, synthetic construct
  REGION 1..11: note = Description of Artificial Sequence: Synthetic peptide
FYLCFLAFLLF

SEQ ID NO: 7106 - protein, 8 aa, synthetic construct
  REGION 1..8: note = Description of Artificial Sequence: Synthetic peptide
FYPKLQSS

SEQ ID NO: 7107 - protein, 9 aa, synthetic construct
  REGION 1..9: note = Description of Artificial Sequence: Synthetic peptide
FYPKLQSSQ

SEQ ID NO: 7108 - protein, 9 aa, synthetic construct
  REGION 1..9: note = Description of Artificial Sequence: Synthetic peptide
FYTSKTTVA

SEQ ID NO: 7109 - protein, 8 aa, synthetic construct
  REGION 1..8: note = Description of Artificial Sequence: Synthetic peptide
FYVLGLAA

SEQ ID NO: 7110 - protein, 10 aa, synthetic construct
  REGION 1..10: note = Description of Artificial Sequence: Synthetic peptide
FYVLPNDDTL

SEQ ID NO: 7111 - protein, 10 aa, synthetic construct
  REGION 1..10: note = Description of Artificial Sequence: Synthetic peptide
FYYLGTGPEA

SEQ ID NO: 7112 - protein, 9 aa, synthetic construct
  REGION 1..9: note = Description of Artificial Sequence: Synthetic peptide
GADLKSFDL

SEQ ID NO: 7113 - protein, 10 aa, synthetic construct
  REGION 1..10: note = Description of Artificial Sequence: Synthetic peptide
GADPIHSLRV

SEQ ID NO: 7114 - protein, 8 aa, synthetic construct
  REGION 1..8: note = Description of Artificial Sequence: Synthetic peptide
GAPTKVTF

SEQ ID NO: 7115 - protein, 9 aa, synthetic construct
  REGION 1..9: note = Description of Artificial Sequence: Synthetic peptide
GAWNIGEQK

SEQ ID NO: 7116 - protein, 8 aa, synthetic construct
  REGION 1..8: note = Description of Artificial Sequence: Synthetic peptide
GCDGGSLY

SEQ ID NO: 7117 - protein, 9 aa, synthetic construct
  REGION 1..9: note = Description of Artificial Sequence: Synthetic peptide
GCDGGSLYV

SEQ ID NO: 7118 - protein, 9 aa, synthetic construct
  REGION 1..9: note = Description of Artificial Sequence: Synthetic peptide
GDDYVYLPY

SEQ ID NO: 7119 - protein, 9 aa, synthetic construct
  REGION 1..9: note = Description of Artificial Sequence: Synthetic peptide
GDFKLNEEI

SEQ ID NO: 7120 - protein, 8 aa, synthetic construct
  REGION 1..8: note = Description of Artificial Sequence: Synthetic peptide
GDFSHSQL

SEQ ID NO: 7121 - protein, 10 aa, synthetic construct
  REGION 1..10: note = Description of Artificial Sequence: Synthetic peptide
GEAANFCALI

SEQ ID NO: 7122 - protein, 9 aa, synthetic construct
  REGION 1..9: note = Description of Artificial Sequence: Synthetic peptide
GEAVKTQFN

SEQ ID NO: 7123 - protein, 8 aa, synthetic construct
  REGION 1..8: note = Description of Artificial Sequence: Synthetic peptide
GEIKDATP

SEQ ID NO: 7124 - protein, 12 aa, synthetic construct
  REGION 1..12: note = Description of Artificial Sequence: Synthetic peptide
GEIPVAYRKVLL

SEQ ID NO: 7125 - protein, 10 aa, synthetic construct
  REGION 1..10: note = Description of Artificial Sequence: Synthetic peptide
GELGDVRETM

SEQ ID NO: 7126 - protein, 12 aa, synthetic construct
  REGION 1..12: note = Description of Artificial Sequence: Synthetic peptide
GEVITFDNLKTL

SEQ ID NO: 7127 - protein, 10 aa, synthetic construct
  REGION 1..10: note = Description of Artificial Sequence: Synthetic peptide
GEVPVSIINN

SEQ ID NO: 7128 - protein, 9 aa, synthetic construct
  REGION 1..9: note = Description of Artificial Sequence: Synthetic peptide
GEYTFEKGD

SEQ ID NO: 7129 - protein, 9 aa, synthetic construct
  REGION 1..9: note = Description of Artificial Sequence: Synthetic peptide
GFELTSMKY

SEQ ID NO: 7130 - protein, 9 aa, synthetic construct
  REGION 1..9: note = Description of Artificial Sequence: Synthetic peptide
GFFKEGSSV

SEQ ID NO: 7131 - protein, 10 aa, synthetic construct
  REGION 1..10: note = Description of Artificial Sequence: Synthetic peptide
GFMGRIRSVY

SEQ ID NO: 7132 - protein, 10 aa, synthetic construct
  REGION 1..10: note = Description of Artificial Sequence: Synthetic peptide
GFNEKTHVQL

SEQ ID NO: 7133 - protein, 8 aa, synthetic construct
  REGION 1..8: note = Description of Artificial Sequence: Synthetic peptide
GFNFSQIL

SEQ ID NO: 7134 - protein, 8 aa, synthetic construct
  REGION 1..8: note = Description of Artificial Sequence: Synthetic peptide
GFSTGVNL

SEQ ID NO: 7135 - protein, 9 aa, synthetic construct
  REGION 1..9: note = Description of Artificial Sequence: Synthetic peptide
GHMLDMYSV

SEQ ID NO: 7136 - protein, 9 aa, synthetic construct
  REGION 1..9: note = Description of Artificial Sequence: Synthetic peptide
GHNLAKHCL

SEQ ID NO: 7137 - protein, 9 aa, synthetic construct
  REGION 1..9: note = Description of Artificial Sequence: Synthetic peptide
GHTDLMAAY

SEQ ID NO: 7138 - protein, 10 aa, synthetic construct
  REGION 1..10: note = Description of Artificial Sequence: Synthetic peptide
GHVETFYPKL

SEQ ID NO: 7139 - protein, 8 aa, synthetic construct
  REGION 1..8: note = Description of Artificial Sequence: Synthetic peptide
GIATVREV

SEQ ID NO: 7140 - protein, 11 aa, synthetic construct
  REGION 1..11: note = Description of Artificial Sequence: Synthetic peptide
GIFGADPIHSL

SEQ ID NO: 7141 - protein, 8 aa, synthetic construct
  REGION 1..8: note = Description of Artificial Sequence: Synthetic peptide
GIIAMSAF

SEQ ID NO: 7142 - protein, 9 aa, synthetic construct
  REGION 1..9: note = Description of Artificial Sequence: Synthetic peptide
GINASVVNI

SEQ ID NO: 7143 - protein, 8 aa, synthetic construct
  REGION 1..8: note = Description of Artificial Sequence: Synthetic peptide
GLDSLDTY

SEQ ID NO: 7144 - protein, 8 aa, synthetic construct
  REGION 1..8: note = Description of Artificial Sequence: Synthetic peptide
GLEAPFLY

SEQ ID NO: 7145 - protein, 10 aa, synthetic construct
  REGION 1..10: note = Description of Artificial Sequence: Synthetic peptide
GLIAIVMVTI

SEQ ID NO: 7146 - protein, 10 aa, synthetic construct
  REGION 1..10: note = Description of Artificial Sequence: Synthetic peptide
GLNDNLLEIL

SEQ ID NO: 7147 - protein, 10 aa, synthetic construct
  REGION 1..10: note = Description of Artificial Sequence: Synthetic peptide
GLNLEEAARY

SEQ ID NO: 7148 - protein, 9 aa, synthetic construct
  REGION 1..9: note = Description of Artificial Sequence: Synthetic peptide
GLPGTILRT

SEQ ID NO: 7149 - protein, 9 aa, synthetic construct
  REGION 1..9: note = Description of Artificial Sequence: Synthetic peptide
GLVASIKNF

SEQ ID NO: 7150 - protein, 9 aa, synthetic construct
  REGION 1..9: note = Description of Artificial Sequence: Synthetic peptide
GMPSYCTGY

SEQ ID NO: 7151 - protein, 9 aa, synthetic construct
  REGION 1..9: note = Description of Artificial Sequence: Synthetic peptide
GNFGDQELI

SEQ ID NO: 7152 - protein, 9 aa, synthetic construct
  REGION 1..9: note = Description of Artificial Sequence: Synthetic peptide
GPFVDRQTA

SEQ ID NO: 7153 - protein, 9 aa, synthetic construct
  REGION 1..9: note = Description of Artificial Sequence: Synthetic peptide
GQVDLFRNA

SEQ ID NO: 7154 - protein, 8 aa, synthetic construct
  REGION 1..8: note = Description of Artificial Sequence: Synthetic peptide
GRCDIKDL

SEQ ID NO: 7155 - protein, 10 aa, synthetic construct
  REGION 1..10: note = Description of Artificial Sequence: Synthetic peptide
GRVDGQVDLF

SEQ ID NO: 7156 - protein, 9 aa, synthetic construct
  REGION 1..9: note = Description of Artificial Sequence: Synthetic peptide
GSSVELKHF

SEQ ID NO: 7157 - protein, 8 aa, synthetic construct
  REGION 1..8: note = Description of Artificial Sequence: Synthetic peptide
GTAVLRQW

SEQ ID NO: 7158 - protein, 8 aa, synthetic construct
  REGION 1..8: note = Description of Artificial Sequence: Synthetic peptide
GTDLEGNF

SEQ ID NO: 7159 - protein, 8 aa, synthetic construct
  REGION 1..8: note = Description of Artificial Sequence: Synthetic peptide
GTDTTITV

SEQ ID NO: 7160 - protein, 10 aa, synthetic construct
  REGION 1..10: note = Description of Artificial Sequence: Synthetic peptide
GTGPEAGLPY

SEQ ID NO: 7161 - protein, 11 aa, synthetic construct
  REGION 1..11: note = Description of Artificial Sequence: Synthetic peptide
GTGTSTDVVYR

SEQ ID NO: 7162 - protein, 8 aa, synthetic construct
  REGION 1..8: note = Description of Artificial Sequence: Synthetic peptide
GTITVEEL

SEQ ID NO: 7163 - protein, 9 aa, synthetic construct
  REGION 1..9: note = Description of Artificial Sequence: Synthetic peptide
GTITVEELK

SEQ ID NO: 7164 - protein, 8 aa, synthetic construct
  REGION 1..8: note = Description of Artificial Sequence: Synthetic peptide
GTLMIERF

SEQ ID NO: 7165 - protein, 8 aa, synthetic construct
  REGION 1..8: note = Description of Artificial Sequence: Synthetic peptide
GTLSYEQF

SEQ ID NO: 7166 - protein, 9 aa, synthetic construct
  REGION 1..9: note = Description of Artificial Sequence: Synthetic peptide
GTLSYEQFK

SEQ ID NO: 7167 - protein, 8 aa, synthetic construct
  REGION 1..8: note = Description of Artificial Sequence: Synthetic peptide
GTNLPLQL

SEQ ID NO: 7168 - protein, 9 aa, synthetic construct
  REGION 1..9: note = Description of Artificial Sequence: Synthetic peptide
GTSKFYGGW

SEQ ID NO: 7169 - protein, 8 aa, synthetic construct
  REGION 1..8: note = Description of Artificial Sequence: Synthetic peptide
GVAGALNK

SEQ ID NO: 7170 - protein, 10 aa, synthetic construct
  REGION 1..10: note = Description of Artificial Sequence: Synthetic peptide
GVEHVTFFIY

SEQ ID NO: 7171 - protein, 9 aa, synthetic construct
  REGION 1..9: note = Description of Artificial Sequence: Synthetic peptide
GVLTESNKK

SEQ ID NO: 7172 - protein, 9 aa, synthetic construct
  REGION 1..9: note = Description of Artificial Sequence: Synthetic peptide
GVYYHKNNK

SEQ ID NO: 7173 - protein, 9 aa, synthetic construct
  REGION 1..9: note = Description of Artificial Sequence: Synthetic peptide
GWTAGAAAY

SEQ ID NO: 7174 - protein, 8 aa, synthetic construct
  REGION 1..8: note = Description of Artificial Sequence: Synthetic peptide
GYFCTCYF

SEQ ID NO: 7175 - protein, 8 aa, synthetic construct
  REGION 1..8: note = Description of Artificial Sequence: Synthetic peptide
GYLPQNAV

SEQ ID NO: 7176 - protein, 8 aa, synthetic construct
  REGION 1..8: note = Description of Artificial Sequence: Synthetic peptide
GYQPYRVV

SEQ ID NO: 7177 - protein, 9 aa, synthetic construct
  REGION 1..9: note = Description of Artificial Sequence: Synthetic peptide
HAEETRKLM

SEQ ID NO: 7178 - protein, 9 aa, synthetic construct
  REGION 1..9: note = Description of Artificial Sequence: Synthetic peptide
HDVSSAINR

SEQ ID NO: 7179 - protein, 10 aa, synthetic construct
  REGION 1..10: note = Description of Artificial Sequence: Synthetic peptide
HEHEIAWYTE

SEQ ID NO: 7180 - protein, 11 aa, synthetic construct
  REGION 1..11: note = Description of Artificial Sequence: Synthetic peptide
HEVLLAPLLSA

SEQ ID NO: 7181 - protein, 8 aa, synthetic construct
  REGION 1..8: note = Description of Artificial Sequence: Synthetic peptide
HFAWWTAF

SEQ ID NO: 7182 - protein, 9 aa, synthetic construct
  REGION 1..9: note = Description of Artificial Sequence: Synthetic peptide
HFDGQQGEV

SEQ ID NO: 7183 - protein, 8 aa, synthetic construct
  REGION 1..8: note = Description of Artificial Sequence: Synthetic peptide
HFISNSWL

SEQ ID NO: 7184 - protein, 8 aa, synthetic construct
  REGION 1..8: note = Description of Artificial Sequence: Synthetic peptide
HFPREGVF

SEQ ID NO: 7185 - protein, 9 aa, synthetic construct
  REGION 1..9: note = Description of Artificial Sequence: Synthetic peptide
HFPREGVFV

SEQ ID NO: 7186 - protein, 8 aa, synthetic construct
  REGION 1..8: note = Description of Artificial Sequence: Synthetic peptide
HFVCNLLL

SEQ ID NO: 7187 - protein, 10 aa, synthetic construct
  REGION 1..10: note = Description of Artificial Sequence: Synthetic peptide
HFVCNLLLLF

SEQ ID NO: 7188 - protein, 8 aa, synthetic construct
  REGION 1..8: note = Description of Artificial Sequence: Synthetic peptide
HFVNLDNL

SEQ ID NO: 7189 - protein, 9 aa, synthetic construct
  REGION 1..9: note = Description of Artificial Sequence: Synthetic peptide
HFVNLDNLR

SEQ ID NO: 7190 - protein, 9 aa, synthetic construct
  REGION 1..9: note = Description of Artificial Sequence: Synthetic peptide
HFYSKWYIR

SEQ ID NO: 7191 - protein, 8 aa, synthetic construct
  REGION 1..8: note = Description of Artificial Sequence: Synthetic peptide
HGHVMVEL

SEQ ID NO: 7192 - protein, 10 aa, synthetic construct
  REGION 1..10: note = Description of Artificial Sequence: Synthetic peptide
HHANEYRLYL

SEQ ID NO: 7193 - protein, 9 aa, synthetic construct
  REGION 1..9: note = Description of Artificial Sequence: Synthetic peptide
HHSIGFDYV

SEQ ID NO: 7194 - protein, 8 aa, synthetic construct
  REGION 1..8: note = Description of Artificial Sequence: Synthetic peptide
HIDAYKTF

SEQ ID NO: 7195 - protein, 9 aa, synthetic construct
  REGION 1..9: note = Description of Artificial Sequence: Synthetic peptide
HLAKALNDF

SEQ ID NO: 7196 - protein, 9 aa, synthetic construct
  REGION 1..9: note = Description of Artificial Sequence: Synthetic peptide
HLYLQYIRK

SEQ ID NO: 7197 - protein, 8 aa, synthetic construct
  REGION 1..8: note = Description of Artificial Sequence: Synthetic peptide
HPLADNKF

SEQ ID NO: 7198 - protein, 9 aa, synthetic construct
  REGION 1..9: note = Description of Artificial Sequence: Synthetic peptide
HPNPKGFCD

SEQ ID NO: 7199 - protein, 8 aa, synthetic construct
  REGION 1..8: note = Description of Artificial Sequence: Synthetic peptide
HQKLLKSI

SEQ ID NO: 7200 - protein, 8 aa, synthetic construct
  REGION 1..8: note = Description of Artificial Sequence: Synthetic peptide
HQSDIEVT

SEQ ID NO: 7201 - protein, 9 aa, synthetic construct
  REGION 1..9: note = Description of Artificial Sequence: Synthetic peptide
HSDKFTDGV

SEQ ID NO: 7202 - protein, 9 aa, synthetic construct
  REGION 1..9: note = Description of Artificial Sequence: Synthetic peptide
HSMQNCVLK

SEQ ID NO: 7203 - protein, 8 aa, synthetic construct
  REGION 1..8: note = Description of Artificial Sequence: Synthetic peptide
HTDLMAAY

SEQ ID NO: 7204 - protein, 10 aa, synthetic construct
  REGION 1..10: note = Description of Artificial Sequence: Synthetic peptide
HTIDGSSGVV

SEQ ID NO: 7205 - protein, 10 aa, synthetic construct
  REGION 1..10: note = Description of Artificial Sequence: Synthetic peptide
HTPAFDKSAF

SEQ ID NO: 7206 - protein, 11 aa, synthetic construct
  REGION 1..11: note = Description of Artificial Sequence: Synthetic peptide
HTQVVDMSMTY

SEQ ID NO: 7207 - protein, 8 aa, synthetic construct
  REGION 1..8: note = Description of Artificial Sequence: Synthetic peptide
HTSPDVDL

SEQ ID NO: 7208 - protein, 8 aa, synthetic construct
  REGION 1..8: note = Description of Artificial Sequence: Synthetic peptide
HVDILGPL

SEQ ID NO: 7209 - protein, 10 aa, synthetic construct
  REGION 1..10: note = Description of Artificial Sequence: Synthetic peptide
HVDTDLTKPY

SEQ ID NO: 7210 - protein, 9 aa, synthetic construct
  REGION 1..9: note = Description of Artificial Sequence: Synthetic peptide
HVSGTNGTK

SEQ ID NO: 7211 - protein, 8 aa, synthetic construct
  REGION 1..8: note = Description of Artificial Sequence: Synthetic peptide
HVYQLRAR

SEQ ID NO: 7212 - protein, 8 aa, synthetic construct
  REGION 1..8: note = Description of Artificial Sequence: Synthetic peptide
IADTTDAV

SEQ ID NO: 7213 - protein, 8 aa, synthetic construct
  REGION 1..8: note = Description of Artificial Sequence: Synthetic peptide
IAMSAFAM

SEQ ID NO: 7214 - protein, 9 aa, synthetic construct
  REGION 1..9: note = Description of Artificial Sequence: Synthetic peptide
IASFRLFAR

SEQ ID NO: 7215 - protein, 10 aa, synthetic construct
  REGION 1..10: note = Description of Artificial Sequence: Synthetic peptide
IAVLDMCASL

SEQ ID NO: 7216 - protein, 10 aa, synthetic construct
  REGION 1..10: note = Description of Artificial Sequence: Synthetic peptide
IAYIICISTK

SEQ ID NO: 7217 - protein, 9 aa, synthetic construct
  REGION 1..9: note = Description of Artificial Sequence: Synthetic peptide
ICISTKHFY

SEQ ID NO: 7218 - protein, 9 aa, synthetic construct
  REGION 1..9: note = Description of Artificial Sequence: Synthetic peptide
IDYVPLKSA

SEQ ID NO: 7219 - protein, 8 aa, synthetic construct
  REGION 1..8: note = Description of Artificial Sequence: Synthetic peptide
IEELFYSY

SEQ ID NO: 7220 - protein, 9 aa, synthetic construct
  REGION 1..9: note = Description of Artificial Sequence: Synthetic peptide
IEELFYSYA

SEQ ID NO: 7221 - protein, 9 aa, synthetic construct
  REGION 1..9: note = Description of Artificial Sequence: Synthetic peptide
IELKFNPPA

SEQ ID NO: 7222 - protein, 10 aa, synthetic construct
  REGION 1..10: note = Description of Artificial Sequence: Synthetic peptide
IELKFNPPAL

SEQ ID NO: 7223 - protein, 10 aa, synthetic construct
  REGION 1..10: note = Description of Artificial Sequence: Synthetic peptide
IELSLIDFYL

SEQ ID NO: 7224 - protein, 9 aa, synthetic construct
  REGION 1..9: note = Description of Artificial Sequence: Synthetic peptide
IERFVSLAI

SEQ ID NO: 7225 - protein, 10 aa, synthetic construct
  REGION 1..10: note = Description of Artificial Sequence: Synthetic peptide
IEYTDFATSA

SEQ ID NO: 7226 - protein, 8 aa, synthetic construct
  REGION 1..8: note = Description of Artificial Sequence: Synthetic peptide
IFFASFYY

SEQ ID NO: 7227 - protein, 9 aa, synthetic construct
  REGION 1..9: note = Description of Artificial Sequence: Synthetic peptide
IFYLITPVH

SEQ ID NO: 7228 - protein, 9 aa, synthetic construct
  REGION 1..9: note = Description of Artificial Sequence: Synthetic peptide
IGIVNNTVY

SEQ ID NO: 7229 - protein, 9 aa, synthetic construct
  REGION 1..9: note = Description of Artificial Sequence: Synthetic peptide
IGVTQNVLY

SEQ ID NO: 7230 - protein, 10 aa, synthetic construct
  REGION 1..10: note = Description of Artificial Sequence: Synthetic peptide
IHADQLTPTW

SEQ ID NO: 7231 - protein, 8 aa, synthetic construct
  REGION 1..8: note = Description of Artificial Sequence: Synthetic peptide
IIAYTMSL

SEQ ID NO: 7232 - protein, 9 aa, synthetic construct
  REGION 1..9: note = Description of Artificial Sequence: Synthetic peptide
IKDATPSDF

SEQ ID NO: 7233 - protein, 8 aa, synthetic construct
  REGION 1..8: note = Description of Artificial Sequence: Synthetic peptide
IKDLPKEI

SEQ ID NO: 7234 - protein, 9 aa, synthetic construct
  REGION 1..9: note = Description of Artificial Sequence: Synthetic peptide
IKNFKSVLY

SEQ ID NO: 7235 - protein, 8 aa, synthetic construct
  REGION 1..8: note = Description of Artificial Sequence: Synthetic peptide
IKWDLLKY

SEQ ID NO: 7236 - protein, 9 aa, synthetic construct
  REGION 1..9: note = Description of Artificial Sequence: Synthetic peptide
ILAYCNKTV

SEQ ID NO: 7237 - protein, 9 aa, synthetic construct
  REGION 1..9: note = Description of Artificial Sequence: Synthetic peptide
ILHCANFNV

SEQ ID NO: 7238 - protein, 9 aa, synthetic construct
  REGION 1..9: note = Description of Artificial Sequence: Synthetic peptide
ILLLDQALV

SEQ ID NO: 7239 - protein, 9 aa, synthetic construct
  REGION 1..9: note = Description of Artificial Sequence: Synthetic peptide
ILPDPSKPS

SEQ ID NO: 7240 - protein, 9 aa, synthetic construct
  REGION 1..9: note = Description of Artificial Sequence: Synthetic peptide
ILQKEKVNI

SEQ ID NO: 7241 - protein, 9 aa, synthetic construct
  REGION 1..9: note = Description of Artificial Sequence: Synthetic peptide
ILSDDAVVC

SEQ ID NO: 7242 - protein, 9 aa, synthetic construct
  REGION 1..9: note = Description of Artificial Sequence: Synthetic peptide
ILSPLYAFA

SEQ ID NO: 7243 - protein, 8 aa, synthetic construct
  REGION 1..8: note = Description of Artificial Sequence: Synthetic peptide
ILTLTRAL

SEQ ID NO: 7244 - protein, 8 aa, synthetic construct
  REGION 1..8: note = Description of Artificial Sequence: Synthetic peptide
IMSDRDLY

SEQ ID NO: 7245 - protein, 9 aa, synthetic construct
  REGION 1..9: note = Description of Artificial Sequence: Synthetic peptide
INIIIWFLL

SEQ ID NO: 7246 - protein, 10 aa, synthetic construct
  REGION 1..10: note = Description of Artificial Sequence: Synthetic peptide
INIIIWFLLL

SEQ ID NO: 7247 - protein, 9 aa, synthetic construct
  REGION 1..9: note = Description of Artificial Sequence: Synthetic peptide
IPARARVEC

SEQ ID NO: 7248 - protein, 10 aa, synthetic construct
  REGION 1..10: note = Description of Artificial Sequence: Synthetic peptide
IPCSVCLSGL

SEQ ID NO: 7249 - protein, 9 aa, synthetic construct
  REGION 1..9: note = Description of Artificial Sequence: Synthetic peptide
IPCTCGKQA

SEQ ID NO: 7250 - protein, 9 aa, synthetic construct
  REGION 1..9: note = Description of Artificial Sequence: Synthetic peptide
IPIGAGICA

SEQ ID NO: 7251 - protein, 8 aa, synthetic construct
  REGION 1..8: note = Description of Artificial Sequence: Synthetic peptide
IPLMYKGL

SEQ ID NO: 7252 - protein, 9 aa, synthetic construct
  REGION 1..9: note = Description of Artificial Sequence: Synthetic peptide
IPMDSTVKN

SEQ ID NO: 7253 - protein, 9 aa, synthetic construct
  REGION 1..9: note = Description of Artificial Sequence: Synthetic peptide
IPYNSVTSS

SEQ ID NO: 7254 - protein, 9 aa, synthetic construct
  REGION 1..9: note = Description of Artificial Sequence: Synthetic peptide
IQASLPFGW

SEQ ID NO: 7255 - protein, 8 aa, synthetic construct
  REGION 1..8: note = Description of Artificial Sequence: Synthetic peptide
IQLSSYSL

SEQ ID NO: 7256 - protein, 10 aa, synthetic construct
  REGION 1..10: note = Description of Artificial Sequence: Synthetic peptide
IRGWIFGTTL

SEQ ID NO: 7257 - protein, 8 aa, synthetic construct
  REGION 1..8: note = Description of Artificial Sequence: Synthetic peptide
IRKLHDEL

SEQ ID NO: 7258 - protein, 8 aa, synthetic construct
  REGION 1..8: note = Description of Artificial Sequence: Synthetic peptide
ISAARQGF

SEQ ID NO: 7259 - protein, 8 aa, synthetic construct
  REGION 1..8: note = Description of Artificial Sequence: Synthetic peptide
ISAMVRMY

SEQ ID NO: 7260 - protein, 9 aa, synthetic construct
  REGION 1..9: note = Description of Artificial Sequence: Synthetic peptide
ISQYSLRLI

SEQ ID NO: 7261 - protein, 9 aa, synthetic construct
  REGION 1..9: note = Description of Artificial Sequence: Synthetic peptide
ISSDVLVNN

SEQ ID NO: 7262 - protein, 10 aa, synthetic construct
  REGION 1..10: note = Description of Artificial Sequence: Synthetic peptide
ISTKHFYWFF

SEQ ID NO: 7263 - protein, 8 aa, synthetic construct
  REGION 1..8: note = Description of Artificial Sequence: Synthetic peptide
ISTSHKLV

SEQ ID NO: 7264 - protein, 9 aa, synthetic construct
  REGION 1..9: note = Description of Artificial Sequence: Synthetic peptide
ITEGSVKGL

SEQ ID NO: 7265 - protein, 8 aa, synthetic construct
  REGION 1..8: note = Description of Artificial Sequence: Synthetic peptide
ITFELDER

SEQ ID NO: 7266 - protein, 8 aa, synthetic construct
  REGION 1..8: note = Description of Artificial Sequence: Synthetic peptide
ITISSFKW

SEQ ID NO: 7267 - protein, 9 aa, synthetic construct
  REGION 1..9: note = Description of Artificial Sequence: Synthetic peptide
ITPVHVMSK

SEQ ID NO: 7268 - protein, 10 aa, synthetic construct
  REGION 1..10: note = Description of Artificial Sequence: Synthetic peptide
ITSAVLQSGF

SEQ ID NO: 7269 - protein, 8 aa, synthetic construct
  REGION 1..8: note = Description of Artificial Sequence: Synthetic peptide
IVAAIVFI

SEQ ID NO: 7270 - protein, 11 aa, synthetic construct
  REGION 1..11: note = Description of Artificial Sequence: Synthetic peptide
IVDEPEEHVQI

SEQ ID NO: 7271 - protein, 9 aa, synthetic construct
  REGION 1..9: note = Description of Artificial Sequence: Synthetic peptide
IVFDGKSKC

SEQ ID NO: 7272 - protein, 8 aa, synthetic construct
  REGION 1..8: note = Description of Artificial Sequence: Synthetic peptide
IVMVTIML

SEQ ID NO: 7273 - protein, 10 aa, synthetic construct
  REGION 1..10: note = Description of Artificial Sequence: Synthetic peptide
IVNGVRRSFY

SEQ ID NO: 7274 - protein, 9 aa, synthetic construct
  REGION 1..9: note = Description of Artificial Sequence: Synthetic peptide
IVNNATNVV

SEQ ID NO: 7275 - protein, 9 aa, synthetic construct
  REGION 1..9: note = Description of Artificial Sequence: Synthetic peptide
IVVFDEISM

SEQ ID NO: 7276 - protein, 8 aa, synthetic construct
  REGION 1..8: note = Description of Artificial Sequence: Synthetic peptide
IYDEPTTT

SEQ ID NO: 7277 - protein, 8 aa, synthetic construct
  REGION 1..8: note = Description of Artificial Sequence: Synthetic peptide
IYLYLTFY

SEQ ID NO: 7278 - protein, 10 aa, synthetic construct
  REGION 1..10: note = Description of Artificial Sequence: Synthetic peptide
IYSKHTPINL

SEQ ID NO: 7279 - protein, 9 aa, synthetic construct
  REGION 1..9: note = Description of Artificial Sequence: Synthetic peptide
KAGQKTYER

SEQ ID NO: 7280 - protein, 9 aa, synthetic construct
  REGION 1..9: note = Description of Artificial Sequence: Synthetic peptide
KAKKGAWNI

SEQ ID NO: 7281 - protein, 8 aa, synthetic construct
  REGION 1..8: note = Description of Artificial Sequence: Synthetic peptide
KASMPTTI

SEQ ID NO: 7282 - protein, 10 aa, synthetic construct
  REGION 1..10: note = Description of Artificial Sequence: Synthetic peptide
KCVPQADVEW

SEQ ID NO: 7283 - protein, 9 aa, synthetic construct
  REGION 1..9: note = Description of Artificial Sequence: Synthetic peptide
KCYGVSPTK

SEQ ID NO: 7284 - protein, 8 aa, synthetic construct
  REGION 1..8: note = Description of Artificial Sequence: Synthetic peptide
KDFGGFNF

SEQ ID NO: 7285 - protein, 8 aa, synthetic construct
  REGION 1..8: note = Description of Artificial Sequence: Synthetic peptide
KDGHVETF

SEQ ID NO: 7286 - protein, 9 aa, synthetic construct
  REGION 1..9: note = Description of Artificial Sequence: Synthetic peptide
KDQVILLNK

SEQ ID NO: 7287 - protein, 9 aa, synthetic construct
  REGION 1..9: note = Description of Artificial Sequence: Synthetic peptide
KEGFFTYIC

SEQ ID NO: 7288 - protein, 8 aa, synthetic construct
  REGION 1..8: note = Description of Artificial Sequence: Synthetic peptide
KEIIFLEG

SEQ ID NO: 7289 - protein, 9 aa, synthetic construct
  REGION 1..9: note = Description of Artificial Sequence: Synthetic peptide
KEIIFLEGE

SEQ ID NO: 7290 - protein, 11 aa, synthetic construct
  REGION 1..11: note = Description of Artificial Sequence: Synthetic peptide
KEIIFLEGETL

SEQ ID NO: 7291 - protein, 8 aa, synthetic construct
  REGION 1..8: note = Description of Artificial Sequence: Synthetic peptide
KEILVTYN

SEQ ID NO: 7292 - protein, 11 aa, synthetic construct
  REGION 1..11: note = Description of Artificial Sequence: Synthetic peptide
KEITVATSRTL

SEQ ID NO: 7293 - protein, 8 aa, synthetic construct
  REGION 1..8: note = Description of Artificial Sequence: Synthetic peptide
KEKVNINI

SEQ ID NO: 7294 - protein, 8 aa, synthetic construct
  REGION 1..8: note = Description of Artificial Sequence: Synthetic peptide
KFCLEASF

SEQ ID NO: 7295 - protein, 8 aa, synthetic construct
  REGION 1..8: note = Description of Artificial Sequence: Synthetic peptide
KFKVNSTL

SEQ ID NO: 7296 - protein, 9 aa, synthetic construct
  REGION 1..9: note = Description of Artificial Sequence: Synthetic peptide
KFNPPALQD

SEQ ID NO: 7297 - protein, 8 aa, synthetic construct
  REGION 1..8: note = Description of Artificial Sequence: Synthetic peptide
KFPVLHDI

SEQ ID NO: 7298 - protein, 8 aa, synthetic construct
  REGION 1..8: note = Description of Artificial Sequence: Synthetic peptide
KGEDIQLL

SEQ ID NO: 7299 - protein, 9 aa, synthetic construct
  REGION 1..9: note = Description of Artificial Sequence: Synthetic peptide
KGLPWNVVR

SEQ ID NO: 7300 - protein, 10 aa, synthetic construct
  REGION 1..10: note = Description of Artificial Sequence: Synthetic peptide
KGLPWNVVRI

SEQ ID NO: 7301 - protein, 8 aa, synthetic construct
  REGION 1..8: note = Description of Artificial Sequence: Synthetic peptide
KGPKVKYL

SEQ ID NO: 7302 - protein, 9 aa, synthetic construct
  REGION 1..9: note = Description of Artificial Sequence: Synthetic peptide
KGTHHWLLL

SEQ ID NO: 7303 - protein, 9 aa, synthetic construct
  REGION 1..9: note = Description of Artificial Sequence: Synthetic peptide
KGTLEPEYF

SEQ ID NO: 7304 - protein, 10 aa, synthetic construct
  REGION 1..10: note = Description of Artificial Sequence: Synthetic peptide
KHFYWFFSNY

SEQ ID NO: 7305 - protein, 9 aa, synthetic construct
  REGION 1..9: note = Description of Artificial Sequence: Synthetic peptide
KHLIPLMYK

SEQ ID NO: 7306 - protein, 9 aa, synthetic construct
  REGION 1..9: note = Description of Artificial Sequence: Synthetic peptide
KHYTPSFKK

SEQ ID NO: 7307 - protein, 9 aa, synthetic construct
  REGION 1..9: note = Description of Artificial Sequence: Synthetic peptide
KIAEIPKEE

SEQ ID NO: 7308 - protein, 10 aa, synthetic construct
  REGION 1..10: note = Description of Artificial Sequence: Synthetic peptide
KIFVDGVPFV

SEQ ID NO: 7309 - protein, 9 aa, synthetic construct
  REGION 1..9: note = Description of Artificial Sequence: Synthetic peptide
KIKACVEEV

SEQ ID NO: 7310 - protein, 9 aa, synthetic construct
  REGION 1..9: note = Description of Artificial Sequence: Synthetic peptide
KIVDEPEEH

SEQ ID NO: 7311 - protein, 9 aa, synthetic construct
  REGION 1..9: note = Description of Artificial Sequence: Synthetic peptide
KIYSKHTPI

SEQ ID NO: 7312 - protein, 9 aa, synthetic construct
  REGION 1..9: note = Description of Artificial Sequence: Synthetic peptide
KKAGGTTEM

SEQ ID NO: 7313 - protein, 8 aa, synthetic construct
  REGION 1..8: note = Description of Artificial Sequence: Synthetic peptide
KKQQTVTL

SEQ ID NO: 7314 - protein, 9 aa, synthetic construct
  REGION 1..9: note = Description of Artificial Sequence: Synthetic peptide
KLALGGSVA

SEQ ID NO: 7315 - protein, 10 aa, synthetic construct
  REGION 1..10: note = Description of Artificial Sequence: Synthetic peptide
KLASHMYCSF

SEQ ID NO: 7316 - protein, 10 aa, synthetic construct
  REGION 1..10: note = Description of Artificial Sequence: Synthetic peptide
KLDNDALNNI

SEQ ID NO: 7317 - protein, 8 aa, synthetic construct
  REGION 1..8: note = Description of Artificial Sequence: Synthetic peptide
KLFDRYFK

SEQ ID NO: 7318 - protein, 9 aa, synthetic construct
  REGION 1..9: note = Description of Artificial Sequence: Synthetic peptide
KLIEYTDFA

SEQ ID NO: 7319 - protein, 8 aa, synthetic construct
  REGION 1..8: note = Description of Artificial Sequence: Synthetic peptide
KLINIIIW

SEQ ID NO: 7320 - protein, 9 aa, synthetic construct
  REGION 1..9: note = Description of Artificial Sequence: Synthetic peptide
KLKDCVMYA

SEQ ID NO: 7321 - protein, 9 aa, synthetic construct
  REGION 1..9: note = Description of Artificial Sequence: Synthetic peptide
KLLKSIAAT

SEQ ID NO: 7322 - protein, 9 aa, synthetic construct
  REGION 1..9: note = Description of Artificial Sequence: Synthetic peptide
KLMPVCVET

SEQ ID NO: 7323 - protein, 10 aa, synthetic construct
  REGION 1..10: note = Description of Artificial Sequence: Synthetic peptide
KLMPVCVETK

SEQ ID NO: 7324 - protein, 9 aa, synthetic construct
  REGION 1..9: note = Description of Artificial Sequence: Synthetic peptide
KLNDLCFTN

SEQ ID NO: 7325 - protein, 9 aa, synthetic construct
  REGION 1..9: note = Description of Artificial Sequence: Synthetic peptide
KLNVGDYFV

SEQ ID NO: 7326 - protein, 10 aa, synthetic construct
  REGION 1..10: note = Description of Artificial Sequence: Synthetic peptide
KLPDDFTGCV

SEQ ID NO: 7327 - protein, 10 aa, synthetic construct
  REGION 1..10: note = Description of Artificial Sequence: Synthetic peptide
KLRGTAVMSL

SEQ ID NO: 7328 - protein, 9 aa, synthetic construct
  REGION 1..9: note = Description of Artificial Sequence: Synthetic peptide
KLRSDVLLP

SEQ ID NO: 7329 - protein, 11 aa, synthetic construct
  REGION 1..11: note = Description of Artificial Sequence: Synthetic peptide
KMADQAMTQMY

SEQ ID NO: 7330 - protein, 9 aa, synthetic construct
  REGION 1..9: note = Description of Artificial Sequence: Synthetic peptide
KNLREFVFK

SEQ ID NO: 7331 - protein, 8 aa, synthetic construct
  REGION 1..8: note = Description of Artificial Sequence: Synthetic peptide
KNNLPFKL

SEQ ID NO: 7332 - protein, 9 aa, synthetic construct
  REGION 1..9: note = Description of Artificial Sequence: Synthetic peptide
KNSIDAFKL

SEQ ID NO: 7333 - protein, 9 aa, synthetic construct
  REGION 1..9: note = Description of Artificial Sequence: Synthetic peptide
KPLEFGATS

SEQ ID NO: 7334 - protein, 9 aa, synthetic construct
  REGION 1..9: note = Description of Artificial Sequence: Synthetic peptide
KPRPPLNRN

SEQ ID NO: 7335 - protein, 8 aa, synthetic construct
  REGION 1..8: note = Description of Artificial Sequence: Synthetic peptide
KPRQKRTA

SEQ ID NO: 7336 - protein, 9 aa, synthetic construct
  REGION 1..9: note = Description of Artificial Sequence: Synthetic peptide
KPRQKRTAT

SEQ ID NO: 7337 - protein, 9 aa, synthetic construct
  REGION 1..9: note = Description of Artificial Sequence: Synthetic peptide
KPTVVVNAA

SEQ ID NO: 7338 - protein, 10 aa, synthetic construct
  REGION 1..10: note = Description of Artificial Sequence: Synthetic peptide
KQEILGTVSW

SEQ ID NO: 7339 - protein, 8 aa, synthetic construct
  REGION 1..8: note = Description of Artificial Sequence: Synthetic peptide
KQQTVTLL

SEQ ID NO: 7340 - protein, 10 aa, synthetic construct
  REGION 1..10: note = Description of Artificial Sequence: Synthetic peptide
KQVEQKIAEI

SEQ ID NO: 7341 - protein, 9 aa, synthetic construct
  REGION 1..9: note = Description of Artificial Sequence: Synthetic peptide
KQVVSDIDY

SEQ ID NO: 7342 - protein, 8 aa, synthetic construct
  REGION 1..8: note = Description of Artificial Sequence: Synthetic peptide
KRGDKSVY

SEQ ID NO: 7343 - protein, 8 aa, synthetic construct
  REGION 1..8: note = Description of Artificial Sequence: Synthetic peptide
KRSDARTA

SEQ ID NO: 7344 - protein, 10 aa, synthetic construct
  REGION 1..10: note = Description of Artificial Sequence: Synthetic peptide
KRTIKGTHHW

SEQ ID NO: 7345 - protein, 10 aa, synthetic construct
  REGION 1..10: note = Description of Artificial Sequence: Synthetic peptide
KRVDFCGKGY

SEQ ID NO: 7346 - protein, 9 aa, synthetic construct
  REGION 1..9: note = Description of Artificial Sequence: Synthetic peptide
KRWQLALSK

SEQ ID NO: 7347 - protein, 9 aa, synthetic construct
  REGION 1..9: note = Description of Artificial Sequence: Synthetic peptide
KSASVYYSQ

SEQ ID NO: 7348 - protein, 8 aa, synthetic construct
  REGION 1..8: note = Description of Artificial Sequence: Synthetic peptide
KSHFAIGL

SEQ ID NO: 7349 - protein, 11 aa, synthetic construct
  REGION 1..11: note = Description of Artificial Sequence: Synthetic peptide
KSHFAIGLALY

SEQ ID NO: 7350 - protein, 8 aa, synthetic construct
  REGION 1..8: note = Description of Artificial Sequence: Synthetic peptide
KSVGKFCL

SEQ ID NO: 7351 - protein, 8 aa, synthetic construct
  REGION 1..8: note = Description of Artificial Sequence: Synthetic peptide
KSWMESEF

SEQ ID NO: 7352 - protein, 8 aa, synthetic construct
  REGION 1..8: note = Description of Artificial Sequence: Synthetic peptide
KSYVHVVD

SEQ ID NO: 7353 - protein, 10 aa, synthetic construct
  REGION 1..10: note = Description of Artificial Sequence: Synthetic peptide
KTDGTLMIER

SEQ ID NO: 7354 - protein, 8 aa, synthetic construct
  REGION 1..8: note = Description of Artificial Sequence: Synthetic peptide
KTFPPTEP

SEQ ID NO: 7355 - protein, 10 aa, synthetic construct
  REGION 1..10: note = Description of Artificial Sequence: Synthetic peptide
KTIQPRVEKK

SEQ ID NO: 7356 - protein, 10 aa, synthetic construct
  REGION 1..10: note = Description of Artificial Sequence: Synthetic peptide
KTLLSLREVR

SEQ ID NO: 7357 - protein, 8 aa, synthetic construct
  REGION 1..8: note = Description of Artificial Sequence: Synthetic peptide
KTQSLLIV

SEQ ID NO: 7358 - protein, 9 aa, synthetic construct
  REGION 1..9: note = Description of Artificial Sequence: Synthetic peptide
KTQSLLIVN

SEQ ID NO: 7359 - protein, 9 aa, synthetic construct
  REGION 1..9: note = Description of Artificial Sequence: Synthetic peptide
KTTEVVGDI

SEQ ID NO: 7360 - protein, 10 aa, synthetic construct
  REGION 1..10: note = Description of Artificial Sequence: Synthetic peptide
KTTEVVGDII

SEQ ID NO: 7361 - protein, 10 aa, synthetic construct
  REGION 1..10: note = Description of Artificial Sequence: Synthetic peptide
KTYERHSLSH

SEQ ID NO: 7362 - protein, 10 aa, synthetic construct
  REGION 1..10: note = Description of Artificial Sequence: Synthetic peptide
KVAGFAKFLK

SEQ ID NO: 7363 - protein, 9 aa, synthetic construct
  REGION 1..9: note = Description of Artificial Sequence: Synthetic peptide
KVEGCMVQV

SEQ ID NO: 7364 - protein, 9 aa, synthetic construct
  REGION 1..9: note = Description of Artificial Sequence: Synthetic peptide
KVFTTVDNI

SEQ ID NO: 7365 - protein, 8 aa, synthetic construct
  REGION 1..8: note = Description of Artificial Sequence: Synthetic peptide
KVGGNYNY

SEQ ID NO: 7366 - protein, 10 aa, synthetic construct
  REGION 1..10: note = Description of Artificial Sequence: Synthetic peptide
KVKPTVVVNA

SEQ ID NO: 7367 - protein, 10 aa, synthetic construct
  REGION 1..10: note = Description of Artificial Sequence: Synthetic peptide
KVLNEKCSAY

SEQ ID NO: 7368 - protein, 9 aa, synthetic construct
  REGION 1..9: note = Description of Artificial Sequence: Synthetic peptide
KVNINIVGD

SEQ ID NO: 7369 - protein, 11 aa, synthetic construct
  REGION 1..11: note = Description of Artificial Sequence: Synthetic peptide
KVNSTLEQYVF

SEQ ID NO: 7370 - protein, 9 aa, synthetic construct
  REGION 1..9: note = Description of Artificial Sequence: Synthetic peptide
KVTLADAGF

SEQ ID NO: 7371 - protein, 9 aa, synthetic construct
  REGION 1..9: note = Description of Artificial Sequence: Synthetic peptide
KVTSAMQTM

SEQ ID NO: 7372 - protein, 9 aa, synthetic construct
  REGION 1..9: note = Description of Artificial Sequence: Synthetic peptide
KVVSTTTNI

SEQ ID NO: 7373 - protein, 10 aa, synthetic construct
  REGION 1..10: note = Description of Artificial Sequence: Synthetic peptide
KWDLIISDMY

SEQ ID NO: 7374 - protein, 8 aa, synthetic construct
  REGION 1..8: note = Description of Artificial Sequence: Synthetic peptide
KWGKARLY

SEQ ID NO: 7375 - protein, 8 aa, synthetic construct
  REGION 1..8: note = Description of Artificial Sequence: Synthetic peptide
KWPWYIWL

SEQ ID NO: 7376 - protein, 9 aa, synthetic construct
  REGION 1..9: note = Description of Artificial Sequence: Synthetic peptide
KWYIRVGAR

SEQ ID NO: 7377 - protein, 9 aa, synthetic construct
  REGION 1..9: note = Description of Artificial Sequence: Synthetic peptide
KYAISAKNR

SEQ ID NO: 7378 - protein, 9 aa, synthetic construct
  REGION 1..9: note = Description of Artificial Sequence: Synthetic peptide
KYCALAPNM

SEQ ID NO: 7379 - protein, 9 aa, synthetic construct
  REGION 1..9: note = Description of Artificial Sequence: Synthetic peptide
KYFKNHTSP

SEQ ID NO: 7380 - protein, 9 aa, synthetic construct
  REGION 1..9: note = Description of Artificial Sequence: Synthetic peptide
KYKGIKIQE

SEQ ID NO: 7381 - protein, 9 aa, synthetic construct
  REGION 1..9: note = Description of Artificial Sequence: Synthetic peptide
KYNYEPLTQ

SEQ ID NO: 7382 - protein, 9 aa, synthetic construct
  REGION 1..9: note = Description of Artificial Sequence: Synthetic peptide
KYTQLCQYL

SEQ ID NO: 7383 - protein, 9 aa, synthetic construct
  REGION 1..9: note = Description of Artificial Sequence: Synthetic peptide
KYVQIPTTC

SEQ ID NO: 7384 - protein, 9 aa, synthetic construct
  REGION 1..9: note = Description of Artificial Sequence: Synthetic peptide
KYVRNLQHR

SEQ ID NO: 7385 - protein, 9 aa, synthetic construct
  REGION 1..9: note = Description of Artificial Sequence: Synthetic peptide
KYWDQTYHP

SEQ ID NO: 7386 - protein, 9 aa, synthetic construct
  REGION 1..9: note = Description of Artificial Sequence: Synthetic peptide
LAAVYRINW

SEQ ID NO: 7387 - protein, 10 aa, synthetic construct
  REGION 1..10: note = Description of Artificial Sequence: Synthetic peptide
LAFVVFLLVT

SEQ ID NO: 7388 - protein, 9 aa, synthetic construct
  REGION 1..9: note = Description of Artificial Sequence: Synthetic peptide
LAGTITSGW

SEQ ID NO: 7389 - protein, 8 aa, synthetic construct
  REGION 1..8: note = Description of Artificial Sequence: Synthetic peptide
LAVFDKNL

SEQ ID NO: 7390 - protein, 8 aa, synthetic construct
  REGION 1..8: note = Description of Artificial Sequence: Synthetic peptide
LAYILFTR

SEQ ID NO: 7391 - protein, 9 aa, synthetic construct
  REGION 1..9: note = Description of Artificial Sequence: Synthetic peptide
LDDDSQQTV

SEQ ID NO: 7392 - protein, 8 aa, synthetic construct
  REGION 1..8: note = Description of Artificial Sequence: Synthetic peptide
LDDFSKQL

SEQ ID NO: 7393 - protein, 8 aa, synthetic construct
  REGION 1..8: note = Description of Artificial Sequence: Synthetic peptide
LDGEVITF

SEQ ID NO: 7394 - protein, 8 aa, synthetic construct
  REGION 1..8: note = Description of Artificial Sequence: Synthetic peptide
LDNVLSTF

SEQ ID NO: 7395 - protein, 10 aa, synthetic construct
  REGION 1..10: note = Description of Artificial Sequence: Synthetic peptide
LEAPFLYLYA

SEQ ID NO: 7396 - protein, 11 aa, synthetic construct
  REGION 1..11: note = Description of Artificial Sequence: Synthetic peptide
LEAPFLYLYAL

SEQ ID NO: 7397 - protein, 9 aa, synthetic construct
  REGION 1..9: note = Description of Artificial Sequence: Synthetic peptide
LECIKDLLA

SEQ ID NO: 7398 - protein, 9 aa, synthetic construct
  REGION 1..9: note = Description of Artificial Sequence: Synthetic peptide
LEMKSEKQV

SEQ ID NO: 7399 - protein, 8 aa, synthetic construct
  REGION 1..8: note = Description of Artificial Sequence: Synthetic peptide
LENVAFNV

SEQ ID NO: 7400 - protein, 8 aa, synthetic construct
  REGION 1..8: note = Description of Artificial Sequence: Synthetic peptide
LEYHDVRV

SEQ ID NO: 7401 - protein, 10 aa, synthetic construct
  REGION 1..10: note = Description of Artificial Sequence: Synthetic peptide
LEYHDVRVVL

SEQ ID NO: 7402 - protein, 9 aa, synthetic construct
  REGION 1..9: note = Description of Artificial Sequence: Synthetic peptide
LFFSYFAVH

SEQ ID NO: 7403 - protein, 11 aa, synthetic construct
  REGION 1..11: note = Description of Artificial Sequence: Synthetic peptide
LFLPFFSNVTW

SEQ ID NO: 7404 - protein, 8 aa, synthetic construct
  REGION 1..8: note = Description of Artificial Sequence: Synthetic peptide
LFLTWICL

SEQ ID NO: 7405 - protein, 11 aa, synthetic construct
  REGION 1..11: note = Description of Artificial Sequence: Synthetic peptide
LFLTWICLLQF

SEQ ID NO: 7406 - protein, 8 aa, synthetic construct
  REGION 1..8: note = Description of Artificial Sequence: Synthetic peptide
LFLVLIML

SEQ ID NO: 7407 - protein, 9 aa, synthetic construct
  REGION 1..9: note = Description of Artificial Sequence: Synthetic peptide
LFLVLIMLI

SEQ ID NO: 7408 - protein, 8 aa, synthetic construct
  REGION 1..8: note = Description of Artificial Sequence: Synthetic peptide
LFVAAIFY

SEQ ID NO: 7409 - protein, 9 aa, synthetic construct
  REGION 1..9: note = Description of Artificial Sequence: Synthetic peptide
LGDIAARDL

SEQ ID NO: 7410 - protein, 8 aa, synthetic construct
  REGION 1..8: note = Description of Artificial Sequence: Synthetic peptide
LGDVRETM

SEQ ID NO: 7411 - protein, 8 aa, synthetic construct
  REGION 1..8: note = Description of Artificial Sequence: Synthetic peptide
LGLPTQTV

SEQ ID NO: 7412 - protein, 9 aa, synthetic construct
  REGION 1..9: note = Description of Artificial Sequence: Synthetic peptide
LHCANFNVL

SEQ ID NO: 7413 - protein, 9 aa, synthetic construct
  REGION 1..9: note = Description of Artificial Sequence: Synthetic peptide
LHSTQDLFL

SEQ ID NO: 7414 - protein, 8 aa, synthetic construct
  REGION 1..8: note = Description of Artificial Sequence: Synthetic peptide
LIAAVITR

SEQ ID NO: 7415 - protein, 8 aa, synthetic construct
  REGION 1..8: note = Description of Artificial Sequence: Synthetic peptide
LIDSYFVV

SEQ ID NO: 7416 - protein, 9 aa, synthetic construct
  REGION 1..9: note = Description of Artificial Sequence: Synthetic peptide
LIRKSNHNF

SEQ ID NO: 7417 - protein, 8 aa, synthetic construct
  REGION 1..8: note = Description of Artificial Sequence: Synthetic peptide
LITPVHVM

SEQ ID NO: 7418 - protein, 9 aa, synthetic construct
  REGION 1..9: note = Description of Artificial Sequence: Synthetic peptide
LIVAAIVFI

SEQ ID NO: 7419 - protein, 8 aa, synthetic construct
  REGION 1..8: note = Description of Artificial Sequence: Synthetic peptide
LIVGVALL

SEQ ID NO: 7420 - protein, 8 aa, synthetic construct
  REGION 1..8: note = Description of Artificial Sequence: Synthetic peptide
LIVNSVLL

SEQ ID NO: 7421 - protein, 8 aa, synthetic construct
  REGION 1..8: note = Description of Artificial Sequence: Synthetic peptide
LKEILVTY

SEQ ID NO: 7422 - protein, 9 aa, synthetic construct
  REGION 1..9: note = Description of Artificial Sequence: Synthetic peptide
LKRGDKSVY

SEQ ID NO: 7423 - protein, 9 aa, synthetic construct
  REGION 1..9: note = Description of Artificial Sequence: Synthetic peptide
LKVGGSCVL

SEQ ID NO: 7424 - protein, 9 aa, synthetic construct
  REGION 1..9: note = Description of Artificial Sequence: Synthetic peptide
LKVPATVSV

SEQ ID NO: 7425 - protein, 9 aa, synthetic construct
  REGION 1..9: note = Description of Artificial Sequence: Synthetic peptide
LLALHRSYL

SEQ ID NO: 7426 - protein, 9 aa, synthetic construct
  REGION 1..9: note = Description of Artificial Sequence: Synthetic peptide
LLDQALVSD

SEQ ID NO: 7427 - protein, 10 aa, synthetic construct
  REGION 1..10: note = Description of Artificial Sequence: Synthetic peptide
LLEIKDTEKY

SEQ ID NO: 7428 - protein, 8 aa, synthetic construct
  REGION 1..8: note = Description of Artificial Sequence: Synthetic peptide
LLFVVEVV

SEQ ID NO: 7429 - protein, 9 aa, synthetic construct
  REGION 1..9: note = Description of Artificial Sequence: Synthetic peptide
LLKSIAATR

SEQ ID NO: 7430 - protein, 8 aa, synthetic construct
  REGION 1..8: note = Description of Artificial Sequence: Synthetic peptide
LLLDQALV

SEQ ID NO: 7431 - protein, 10 aa, synthetic construct
  REGION 1..10: note = Description of Artificial Sequence: Synthetic peptide
LLLSVCLGSL

SEQ ID NO: 7432 - protein, 8 aa, synthetic construct
  REGION 1..8: note = Description of Artificial Sequence: Synthetic peptide
LLPPKNSI

SEQ ID NO: 7433 - protein, 8 aa, synthetic construct
  REGION 1..8: note = Description of Artificial Sequence: Synthetic peptide
LLPSLATV

SEQ ID NO: 7434 - protein, 10 aa, synthetic construct
  REGION 1..10: note = Description of Artificial Sequence: Synthetic peptide
LLPSLATVAY

SEQ ID NO: 7435 - protein, 9 aa, synthetic construct
  REGION 1..9: note = Description of Artificial Sequence: Synthetic peptide
LLSAGIFGA

SEQ ID NO: 7436 - protein, 9 aa, synthetic construct
  REGION 1..9: note = Description of Artificial Sequence: Synthetic peptide
LLSVCLGSL

SEQ ID NO: 7437 - protein, 8 aa, synthetic construct
  REGION 1..8: note = Description of Artificial Sequence: Synthetic peptide
LLSVLQQL

SEQ ID NO: 7438 - protein, 8 aa, synthetic construct
  REGION 1..8: note = Description of Artificial Sequence: Synthetic peptide
LLTKSSEY

SEQ ID NO: 7439 - protein, 8 aa, synthetic construct
  REGION 1..8: note = Description of Artificial Sequence: Synthetic peptide
LLVTLAIL

SEQ ID NO: 7440 - protein, 8 aa, synthetic construct
  REGION 1..8: note = Description of Artificial Sequence: Synthetic peptide
LMNVLTLV

SEQ ID NO: 7441 - protein, 8 aa, synthetic construct
  REGION 1..8: note = Description of Artificial Sequence: Synthetic peptide
LMWLIINL

SEQ ID NO: 7442 - protein, 8 aa, synthetic construct
  REGION 1..8: note = Description of Artificial Sequence: Synthetic peptide
LNDILSRL

SEQ ID NO: 7443 - protein, 9 aa, synthetic construct
  REGION 1..9: note = Description of Artificial Sequence: Synthetic peptide
LNLEEAARY

SEQ ID NO: 7444 - protein, 9 aa, synthetic construct
  REGION 1..9: note = Description of Artificial Sequence: Synthetic peptide
LNRYFRLTL

SEQ ID NO: 7445 - protein, 9 aa, synthetic construct
  REGION 1..9: note = Description of Artificial Sequence: Synthetic peptide
LNVGDYFVL

SEQ ID NO: 7446 - protein, 9 aa, synthetic construct
  REGION 1..9: note = Description of Artificial Sequence: Synthetic peptide
LPDDFTGCV

SEQ ID NO: 7447 - protein, 9 aa, synthetic construct
  REGION 1..9: note = Description of Artificial Sequence: Synthetic peptide
LPFKLTCAT

SEQ ID NO: 7448 - protein, 9 aa, synthetic construct
  REGION 1..9: note = Description of Artificial Sequence: Synthetic peptide
LPGVYSVIY

SEQ ID NO: 7449 - protein, 10 aa, synthetic construct
  REGION 1..10: note = Description of Artificial Sequence: Synthetic peptide
LPGVYSVIYL

SEQ ID NO: 7450 - protein, 9 aa, synthetic construct
  REGION 1..9: note = Description of Artificial Sequence: Synthetic peptide
LPIDKCSRI

SEQ ID NO: 7451 - protein, 9 aa, synthetic construct
  REGION 1..9: note = Description of Artificial Sequence: Synthetic peptide
LPLTQYNRY

SEQ ID NO: 7452 - protein, 9 aa, synthetic construct
  REGION 1..9: note = Description of Artificial Sequence: Synthetic peptide
LPLVSSQCV

SEQ ID NO: 7453 - protein, 8 aa, synthetic construct
  REGION 1..8: note = Description of Artificial Sequence: Synthetic peptide
LPNNTASW

SEQ ID NO: 7454 - protein, 9 aa, synthetic construct
  REGION 1..9: note = Description of Artificial Sequence: Synthetic peptide
LPQLEQPYV

SEQ ID NO: 7455 - protein, 10 aa, synthetic construct
  REGION 1..10: note = Description of Artificial Sequence: Synthetic peptide
LPQLEQPYVF

SEQ ID NO: 7456 - protein, 8 aa, synthetic construct
  REGION 1..8: note = Description of Artificial Sequence: Synthetic peptide
LPTGTLLV

SEQ ID NO: 7457 - protein, 10 aa, synthetic construct
  REGION 1..10: note = Description of Artificial Sequence: Synthetic peptide
LPVLQVRDVL

SEQ ID NO: 7458 - protein, 8 aa, synthetic construct
  REGION 1..8: note = Description of Artificial Sequence: Synthetic peptide
LPWNVVRI

SEQ ID NO: 7459 - protein, 9 aa, synthetic construct
  REGION 1..9: note = Description of Artificial Sequence: Synthetic peptide
LPWNVVRIK

SEQ ID NO: 7460 - protein, 10 aa, synthetic construct
  REGION 1..10: note = Description of Artificial Sequence: Synthetic peptide
LPWNVVRIKI

SEQ ID NO: 7461 - protein, 11 aa, synthetic construct
  REGION 1..11: note = Description of Artificial Sequence: Synthetic peptide
LPWNVVRIKIV

SEQ ID NO: 7462 - protein, 8 aa, synthetic construct
  REGION 1..8: note = Description of Artificial Sequence: Synthetic peptide
LPYPDPSR

SEQ ID NO: 7463 - protein, 8 aa, synthetic construct
  REGION 1..8: note = Description of Artificial Sequence: Synthetic peptide
LQAIASEF

SEQ ID NO: 7464 - protein, 9 aa, synthetic construct
  REGION 1..9: note = Description of Artificial Sequence: Synthetic peptide
LQSINFVRI

SEQ ID NO: 7465 - protein, 8 aa, synthetic construct
  REGION 1..8: note = Description of Artificial Sequence: Synthetic peptide
LRIAGHHL

SEQ ID NO: 7466 - protein, 9 aa, synthetic construct
  REGION 1..9: note = Description of Artificial Sequence: Synthetic peptide
LSDRELHLS

SEQ ID NO: 7467 - protein, 8 aa, synthetic construct
  REGION 1..8: note = Description of Artificial Sequence: Synthetic peptide
LSFKELLV

SEQ ID NO: 7468 - protein, 9 aa, synthetic construct
  REGION 1..9: note = Description of Artificial Sequence: Synthetic peptide
LSKGRLIIR

SEQ ID NO: 7469 - protein, 9 aa, synthetic construct
  REGION 1..9: note = Description of Artificial Sequence: Synthetic peptide
LSPRWYFYY

SEQ ID NO: 7470 - protein, 9 aa, synthetic construct
  REGION 1..9: note = Description of Artificial Sequence: Synthetic peptide
LSTDTGVEH

SEQ ID NO: 7471 - protein, 9 aa, synthetic construct
  REGION 1..9: note = Description of Artificial Sequence: Synthetic peptide
LSYFIASFR

SEQ ID NO: 7472 - protein, 10 aa, synthetic construct
  REGION 1..10: note = Description of Artificial Sequence: Synthetic peptide
LTAFGLVAEW

SEQ ID NO: 7473 - protein, 9 aa, synthetic construct
  REGION 1..9: note = Description of Artificial Sequence: Synthetic peptide
LTALRLCAY

SEQ ID NO: 7474 - protein, 9 aa, synthetic construct
  REGION 1..9: note = Description of Artificial Sequence: Synthetic peptide
LTENKYSQL

SEQ ID NO: 7475 - protein, 8 aa, synthetic construct
  REGION 1..8: note = Description of Artificial Sequence: Synthetic peptide
LTENLLLY

SEQ ID NO: 7476 - protein, 9 aa, synthetic construct
  REGION 1..9: note = Description of Artificial Sequence: Synthetic peptide
LTENLLLYI

SEQ ID NO: 7477 - protein, 9 aa, synthetic construct
  REGION 1..9: note = Description of Artificial Sequence: Synthetic peptide
LTESNKKFL

SEQ ID NO: 7478 - protein, 9 aa, synthetic construct
  REGION 1..9: note = Description of Artificial Sequence: Synthetic peptide
LTGHMLDMY

SEQ ID NO: 7479 - protein, 9 aa, synthetic construct
  REGION 1..9: note = Description of Artificial Sequence: Synthetic peptide
LTILTSLLV

SEQ ID NO: 7480 - protein, 9 aa, synthetic construct
  REGION 1..9: note = Description of Artificial Sequence: Synthetic peptide
LTKEGATTC

SEQ ID NO: 7481 - protein, 9 aa, synthetic construct
  REGION 1..9: note = Description of Artificial Sequence: Synthetic peptide
LTLQQIELK

SEQ ID NO: 7482 - protein, 10 aa, synthetic construct
  REGION 1..10: note = Description of Artificial Sequence: Synthetic peptide
LTLQQIELKF

SEQ ID NO: 7483 - protein, 8 aa, synthetic construct
  REGION 1..8: note = Description of Artificial Sequence: Synthetic peptide
LTNDNTSR

SEQ ID NO: 7484 - protein, 8 aa, synthetic construct
  REGION 1..8: note = Description of Artificial Sequence: Synthetic peptide
LTNMFTPL

SEQ ID NO: 7485 - protein, 8 aa, synthetic construct
  REGION 1..8: note = Description of Artificial Sequence: Synthetic peptide
LTPVVQTI

SEQ ID NO: 7486 - protein, 9 aa, synthetic construct
  REGION 1..9: note = Description of Artificial Sequence: Synthetic peptide
LTRNPAWRK

SEQ ID NO: 7487 - protein, 10 aa, synthetic construct
  REGION 1..10: note = Description of Artificial Sequence: Synthetic peptide
LVAEWFLAYI

SEQ ID NO: 7488 - protein, 8 aa, synthetic construct
  REGION 1..8: note = Description of Artificial Sequence: Synthetic peptide
LVASIKNF

SEQ ID NO: 7489 - protein, 9 aa, synthetic construct
  REGION 1..9: note = Description of Artificial Sequence: Synthetic peptide
LVASIKNFK

SEQ ID NO: 7490 - protein, 8 aa, synthetic construct
  REGION 1..8: note = Description of Artificial Sequence: Synthetic peptide
LVAVPTGY

SEQ ID NO: 7491 - protein, 8 aa, synthetic construct
  REGION 1..8: note = Description of Artificial Sequence: Synthetic peptide
LVDFQVTI

SEQ ID NO: 7492 - protein, 8 aa, synthetic construct
  REGION 1..8: note = Description of Artificial Sequence: Synthetic peptide
LVDLPIGI

SEQ ID NO: 7493 - protein, 9 aa, synthetic construct
  REGION 1..9: note = Description of Artificial Sequence: Synthetic peptide
LVEVEKGVL

SEQ ID NO: 7494 - protein, 10 aa, synthetic construct
  REGION 1..10: note = Description of Artificial Sequence: Synthetic peptide
LVFLFVAAIF

SEQ ID NO: 7495 - protein, 10 aa, synthetic construct
  REGION 1..10: note = Description of Artificial Sequence: Synthetic peptide
LVKQGDDYVY

SEQ ID NO: 7496 - protein, 9 aa, synthetic construct
  REGION 1..9: note = Description of Artificial Sequence: Synthetic peptide
LVKQLSSNF

SEQ ID NO: 7497 - protein, 10 aa, synthetic construct
  REGION 1..10: note = Description of Artificial Sequence: Synthetic peptide
LVPFWITIAY

SEQ ID NO: 7498 - protein, 9 aa, synthetic construct
  REGION 1..9: note = Description of Artificial Sequence: Synthetic peptide
LWLDDVVYC

SEQ ID NO: 7499 - protein, 8 aa, synthetic construct
  REGION 1..8: note = Description of Artificial Sequence: Synthetic peptide
LYDANYFL

SEQ ID NO: 7500 - protein, 11 aa, synthetic construct
  REGION 1..11: note = Description of Artificial Sequence: Synthetic peptide
LYFDKAGQKTY

SEQ ID NO: 7501 - protein, 8 aa, synthetic construct
  REGION 1..8: note = Description of Artificial Sequence: Synthetic peptide
LYLDAYNM

SEQ ID NO: 7502 - protein, 9 aa, synthetic construct
  REGION 1..9: note = Description of Artificial Sequence: Synthetic peptide
LYPTLNISD

SEQ ID NO: 7503 - protein, 8 aa, synthetic construct
  REGION 1..8: note = Description of Artificial Sequence: Synthetic peptide
MADSNGTI

SEQ ID NO: 7504 - protein, 9 aa, synthetic construct
  REGION 1..9: note = Description of Artificial Sequence: Synthetic peptide
MADSNGTIT

SEQ ID NO: 7505 - protein, 8 aa, synthetic construct
  REGION 1..8: note = Description of Artificial Sequence: Synthetic peptide
MAFPSGKV

SEQ ID NO: 7506 - protein, 8 aa, synthetic construct
  REGION 1..8: note = Description of Artificial Sequence: Synthetic peptide
MCDIRQLL

SEQ ID NO: 7507 - protein, 8 aa, synthetic construct
  REGION 1..8: note = Description of Artificial Sequence: Synthetic peptide
MDEFIERY

SEQ ID NO: 7508 - protein, 10 aa, synthetic construct
  REGION 1..10: note = Description of Artificial Sequence: Synthetic peptide
MEVTPSGTWL

SEQ ID NO: 7509 - protein, 8 aa, synthetic construct
  REGION 1..8: note = Description of Artificial Sequence: Synthetic peptide
MFVFLVLL

SEQ ID NO: 7510 - protein, 9 aa, synthetic construct
  REGION 1..9: note = Description of Artificial Sequence: Synthetic peptide
MFYKGVITH

SEQ ID NO: 7511 - protein, 9 aa, synthetic construct
  REGION 1..9: note = Description of Artificial Sequence: Synthetic peptide
MHAASGNLL

SEQ ID NO: 7512 - protein, 10 aa, synthetic construct
  REGION 1..10: note = Description of Artificial Sequence: Synthetic peptide
MHAASGNLLL

SEQ ID NO: 7513 - protein, 8 aa, synthetic construct
  REGION 1..8: note = Description of Artificial Sequence: Synthetic peptide
MISAGFSL

SEQ ID NO: 7514 - protein, 8 aa, synthetic construct
  REGION 1..8: note = Description of Artificial Sequence: Synthetic peptide
MLDMYSVM

SEQ ID NO: 7515 - protein, 10 aa, synthetic construct
  REGION 1..10: note = Description of Artificial Sequence: Synthetic peptide
MLTNDNTSRY

SEQ ID NO: 7516 - protein, 9 aa, synthetic construct
  REGION 1..9: note = Description of Artificial Sequence: Synthetic peptide
MLVKQGDDY

SEQ ID NO: 7517 - protein, 9 aa, synthetic construct
  REGION 1..9: note = Description of Artificial Sequence: Synthetic peptide
MPVCVETKA

SEQ ID NO: 7518 - protein, 11 aa, synthetic construct
  REGION 1..11: note = Description of Artificial Sequence: Synthetic peptide
MPYFFTLLLQL

SEQ ID NO: 7519 - protein, 9 aa, synthetic construct
  REGION 1..9: note = Description of Artificial Sequence: Synthetic peptide
MSAFAMMFV

SEQ ID NO: 7520 - protein, 9 aa, synthetic construct
  REGION 1..9: note = Description of Artificial Sequence: Synthetic peptide
MSKFPLKLR

SEQ ID NO: 7521 - protein, 10 aa, synthetic construct
  REGION 1..10: note = Description of Artificial Sequence: Synthetic peptide
MSYEDQDALF

SEQ ID NO: 7522 - protein, 9 aa, synthetic construct
  REGION 1..9: note = Description of Artificial Sequence: Synthetic peptide
MTQMYKQAR

SEQ ID NO: 7523 - protein, 10 aa, synthetic construct
  REGION 1..10: note = Description of Artificial Sequence: Synthetic peptide
MVTNNTFTLK

SEQ ID NO: 7524 - protein, 11 aa, synthetic construct
  REGION 1..11: note = Description of Artificial Sequence: Synthetic peptide
MVYMPASWVMR

SEQ ID NO: 7525 - protein, 9 aa, synthetic construct
  REGION 1..9: note = Description of Artificial Sequence: Synthetic peptide
MYKGLPWNV

SEQ ID NO: 7526 - protein, 8 aa, synthetic construct
  REGION 1..8: note = Description of Artificial Sequence: Synthetic peptide
NADIVEEA

SEQ ID NO: 7527 - protein, 8 aa, synthetic construct
  REGION 1..8: note = Description of Artificial Sequence: Synthetic peptide
NADLYKLM

SEQ ID NO: 7528 - protein, 9 aa, synthetic construct
  REGION 1..9: note = Description of Artificial Sequence: Synthetic peptide
NAGDYILAN

SEQ ID NO: 7529 - protein, 8 aa, synthetic construct
  REGION 1..8: note = Description of Artificial Sequence: Synthetic peptide
NAGIVGVL

SEQ ID NO: 7530 - protein, 10 aa, synthetic construct
  REGION 1..10: note = Description of Artificial Sequence: Synthetic peptide
NALDQAISMW

SEQ ID NO: 7531 - protein, 10 aa, synthetic construct
  REGION 1..10: note = Description of Artificial Sequence: Synthetic peptide
NAVASKILGL

SEQ ID NO: 7532 - protein, 9 aa, synthetic construct
  REGION 1..9: note = Description of Artificial Sequence: Synthetic peptide
NCTEVPVAI

SEQ ID NO: 7533 - protein, 8 aa, synthetic construct
  REGION 1..8: note = Description of Artificial Sequence: Synthetic peptide
NDFNLVAM

SEQ ID NO: 7534 - protein, 8 aa, synthetic construct
  REGION 1..8: note = Description of Artificial Sequence: Synthetic peptide
NDNLLEIL

SEQ ID NO: 7535 - protein, 9 aa, synthetic construct
  REGION 1..9: note = Description of Artificial Sequence: Synthetic peptide
NEFYAYLRK

SEQ ID NO: 7536 - protein, 10 aa, synthetic construct
  REGION 1..10: note = Description of Artificial Sequence: Synthetic peptide
NEKTHVQLSL

SEQ ID NO: 7537 - protein, 9 aa, synthetic construct
  REGION 1..9: note = Description of Artificial Sequence: Synthetic peptide
NENGTITDA

SEQ ID NO: 7538 - protein, 9 aa, synthetic construct
  REGION 1..9: note = Description of Artificial Sequence: Synthetic peptide
NETLVTMPL

SEQ ID NO: 7539 - protein, 10 aa, synthetic construct
  REGION 1..10: note = Description of Artificial Sequence: Synthetic peptide
NEYRLYLDAY

SEQ ID NO: 7540 - protein, 8 aa, synthetic construct
  REGION 1..8: note = Description of Artificial Sequence: Synthetic peptide
NFKSVLYY

SEQ ID NO: 7541 - protein, 9 aa, synthetic construct
  REGION 1..9: note = Description of Artificial Sequence: Synthetic peptide
NFNVLFSTV

SEQ ID NO: 7542 - protein, 9 aa, synthetic construct
  REGION 1..9: note = Description of Artificial Sequence: Synthetic peptide
NFSKLINII

SEQ ID NO: 7543 - protein, 9 aa, synthetic construct
  REGION 1..9: note = Description of Artificial Sequence: Synthetic peptide
NFYGPFVDR

SEQ ID NO: 7544 - protein, 8 aa, synthetic construct
  REGION 1..8: note = Description of Artificial Sequence: Synthetic peptide
NGDFLHFL

SEQ ID NO: 7545 - protein, 8 aa, synthetic construct
  REGION 1..8: note = Description of Artificial Sequence: Synthetic peptide
NGLMLLEI

SEQ ID NO: 7546 - protein, 10 aa, synthetic construct
  REGION 1..10: note = Description of Artificial Sequence: Synthetic peptide
NGYPNMFITR

SEQ ID NO: 7547 - protein, 9 aa, synthetic construct
  REGION 1..9: note = Description of Artificial Sequence: Synthetic peptide
NHDLYCQVH

SEQ ID NO: 7548 - protein, 9 aa, synthetic construct
  REGION 1..9: note = Description of Artificial Sequence: Synthetic peptide
NHTSPDVDL

SEQ ID NO: 7549 - protein, 9 aa, synthetic construct
  REGION 1..9: note = Description of Artificial Sequence: Synthetic peptide
NIALIWNVK

SEQ ID NO: 7550 - protein, 8 aa, synthetic construct
  REGION 1..8: note = Description of Artificial Sequence: Synthetic peptide
NIIPLTTA

SEQ ID NO: 7551 - protein, 8 aa, synthetic construct
  REGION 1..8: note = Description of Artificial Sequence: Synthetic peptide
NINLHTQV

SEQ ID NO: 7552 - protein, 9 aa, synthetic construct
  REGION 1..9: note = Description of Artificial Sequence: Synthetic peptide
NIVNVSLVK

SEQ ID NO: 7553 - protein, 9 aa, synthetic construct
  REGION 1..9: note = Description of Artificial Sequence: Synthetic peptide
NKGAGGHSY

SEQ ID NO: 7554 - protein, 10 aa, synthetic construct
  REGION 1..10: note = Description of Artificial Sequence: Synthetic peptide
NLAKHCLHVV

SEQ ID NO: 7555 - protein, 11 aa, synthetic construct
  REGION 1..11: note = Description of Artificial Sequence: Synthetic peptide
NLIDSYFVVKR

SEQ ID NO: 7556 - protein, 9 aa, synthetic construct
  REGION 1..9: note = Description of Artificial Sequence: Synthetic peptide
NLIIKNLSK

SEQ ID NO: 7557 - protein, 8 aa, synthetic construct
  REGION 1..8: note = Description of Artificial Sequence: Synthetic peptide
NLLEILQK

SEQ ID NO: 7558 - protein, 9 aa, synthetic construct
  REGION 1..9: note = Description of Artificial Sequence: Synthetic peptide
NLLKDCPAV

SEQ ID NO: 7559 - protein, 9 aa, synthetic construct
  REGION 1..9: note = Description of Artificial Sequence: Synthetic peptide
NLLLQYGSF

SEQ ID NO: 7560 - protein, 10 aa, synthetic construct
  REGION 1..10: note = Description of Artificial Sequence: Synthetic peptide
NLSDRVVFVL

SEQ ID NO: 7561 - protein, 8 aa, synthetic construct
  REGION 1..8: note = Description of Artificial Sequence: Synthetic peptide
NLWNTFTR

SEQ ID NO: 7562 - protein, 9 aa, synthetic construct
  REGION 1..9: note = Description of Artificial Sequence: Synthetic peptide
NLYKMQRML

SEQ ID NO: 7563 - protein, 8 aa, synthetic construct
  REGION 1..8: note = Description of Artificial Sequence: Synthetic peptide
NNDYYRSL

SEQ ID NO: 7564 - protein, 9 aa, synthetic construct
  REGION 1..9: note = Description of Artificial Sequence: Synthetic peptide
NNLDKSAGF

SEQ ID NO: 7565 - protein, 9 aa, synthetic construct
  REGION 1..9: note = Description of Artificial Sequence: Synthetic peptide
NNLNRGMVL

SEQ ID NO: 7566 - protein, 8 aa, synthetic construct
  REGION 1..8: note = Description of Artificial Sequence: Synthetic peptide
NPDILRVY

SEQ ID NO: 7567 - protein, 10 aa, synthetic construct
  REGION 1..10: note = Description of Artificial Sequence: Synthetic peptide
NPFMIDVQQW

SEQ ID NO: 7568 - protein, 9 aa, synthetic construct
  REGION 1..9: note = Description of Artificial Sequence: Synthetic peptide
NQKLIANQF

SEQ ID NO: 7569 - protein, 8 aa, synthetic construct
  REGION 1..8: note = Description of Artificial Sequence: Synthetic peptide
NQMCLSTL

SEQ ID NO: 7570 - protein, 8 aa, synthetic construct
  REGION 1..8: note = Description of Artificial Sequence: Synthetic peptide
NRATLQAI

SEQ ID NO: 7571 - protein, 9 aa, synthetic construct
  REGION 1..9: note = Description of Artificial Sequence: Synthetic peptide
NRNYVFTGY

SEQ ID NO: 7572 - protein, 8 aa, synthetic construct
  REGION 1..8: note = Description of Artificial Sequence: Synthetic peptide
NRPQIGVV

SEQ ID NO: 7573 - protein, 8 aa, synthetic construct
  REGION 1..8: note = Description of Artificial Sequence: Synthetic peptide
NRQFHQKL

SEQ ID NO: 7574 - protein, 9 aa, synthetic construct
  REGION 1..9: note = Description of Artificial Sequence: Synthetic peptide
NRVCGVSAA

SEQ ID NO: 7575 - protein, 8 aa, synthetic construct
  REGION 1..8: note = Description of Artificial Sequence: Synthetic peptide
NSFSGYLK

SEQ ID NO: 7576 - protein, 8 aa, synthetic construct
  REGION 1..8: note = Description of Artificial Sequence: Synthetic peptide
NSFTRGVY

SEQ ID NO: 7577 - protein, 9 aa, synthetic construct
  REGION 1..9: note = Description of Artificial Sequence: Synthetic peptide
NSPNLAWPL

SEQ ID NO: 7578 - protein, 9 aa, synthetic construct
  REGION 1..9: note = Description of Artificial Sequence: Synthetic peptide
NSRNYIAQV

SEQ ID NO: 7579 - protein, 11 aa, synthetic construct
  REGION 1..11: note = Description of Artificial Sequence: Synthetic peptide
NSSPDDQIGYY

SEQ ID NO: 7580 - protein, 10 aa, synthetic construct
  REGION 1..10: note = Description of Artificial Sequence: Synthetic peptide
NSTNVTIATY

SEQ ID NO: 7581 - protein, 11 aa, synthetic construct
  REGION 1..11: note = Description of Artificial Sequence: Synthetic peptide
NSVPWDTIANY

SEQ ID NO: 7582 - protein, 9 aa, synthetic construct
  REGION 1..9: note = Description of Artificial Sequence: Synthetic peptide
NTFSSTFNV

SEQ ID NO: 7583 - protein, 9 aa, synthetic construct
  REGION 1..9: note = Description of Artificial Sequence: Synthetic peptide
NTVIWDYKR

SEQ ID NO: 7584 - protein, 8 aa, synthetic construct
  REGION 1..8: note = Description of Artificial Sequence: Synthetic peptide
NVAKYTQL

SEQ ID NO: 7585 - protein, 8 aa, synthetic construct
  REGION 1..8: note = Description of Artificial Sequence: Synthetic peptide
NVGDYFVL

SEQ ID NO: 7586 - protein, 9 aa, synthetic construct
  REGION 1..9: note = Description of Artificial Sequence: Synthetic peptide
NVLSTFISA

SEQ ID NO: 7587 - protein, 8 aa, synthetic construct
  REGION 1..8: note = Description of Artificial Sequence: Synthetic peptide
NVLTLVYK

SEQ ID NO: 7588 - protein, 10 aa, synthetic construct
  REGION 1..10: note = Description of Artificial Sequence: Synthetic peptide
NVPMEKLKTL

SEQ ID NO: 7589 - protein, 9 aa, synthetic construct
  REGION 1..9: note = Description of Artificial Sequence: Synthetic peptide
NVSLVKPSF

SEQ ID NO: 7590 - protein, 9 aa, synthetic construct
  REGION 1..9: note = Description of Artificial Sequence: Synthetic peptide
NVYADSFVI

SEQ ID NO: 7591 - protein, 9 aa, synthetic construct
  REGION 1..9: note = Description of Artificial Sequence: Synthetic peptide
NVYLAVFDK

SEQ ID NO: 7592 - protein, 9 aa, synthetic construct
  REGION 1..9: note = Description of Artificial Sequence: Synthetic peptide
NWLKQLIKV

SEQ ID NO: 7593 - protein, 8 aa, synthetic construct
  REGION 1..8: note = Description of Artificial Sequence: Synthetic peptide
NWYDFGDF

SEQ ID NO: 7594 - protein, 9 aa, synthetic construct
  REGION 1..9: note = Description of Artificial Sequence: Synthetic peptide
NWYDFGDFI

SEQ ID NO: 7595 - protein, 11 aa, synthetic construct
  REGION 1..11: note = Description of Artificial Sequence: Synthetic peptide
NYIAQVDVVNF

SEQ ID NO: 7596 - protein, 9 aa, synthetic construct
  REGION 1..9: note = Description of Artificial Sequence: Synthetic peptide
NYIFWRNTN

SEQ ID NO: 7597 - protein, 8 aa, synthetic construct
  REGION 1..8: note = Description of Artificial Sequence: Synthetic peptide
NYKLPDDF

SEQ ID NO: 7598 - protein, 10 aa, synthetic construct
  REGION 1..10: note = Description of Artificial Sequence: Synthetic peptide
NYQKVGMQKY

SEQ ID NO: 7599 - protein, 9 aa, synthetic construct
  REGION 1..9: note = Description of Artificial Sequence: Synthetic peptide
PASWVMRIM

SEQ ID NO: 7600 - protein, 9 aa, synthetic construct
  REGION 1..9: note = Description of Artificial Sequence: Synthetic peptide
PAYTNSFTR

SEQ ID NO: 7601 - protein, 9 aa, synthetic construct
  REGION 1..9: note = Description of Artificial Sequence: Synthetic peptide
PEAGLPYGA

SEQ ID NO: 7602 - protein, 9 aa, synthetic construct
  REGION 1..9: note = Description of Artificial Sequence: Synthetic peptide
PETTADIVV

SEQ ID NO: 7603 - protein, 10 aa, synthetic construct
  REGION 1..10: note = Description of Artificial Sequence: Synthetic peptide
PETTADIVVF

SEQ ID NO: 7604 - protein, 9 aa, synthetic construct
  REGION 1..9: note = Description of Artificial Sequence: Synthetic peptide
PGIPKDMTY

SEQ ID NO: 7605 - protein, 9 aa, synthetic construct
  REGION 1..9: note = Description of Artificial Sequence: Synthetic peptide
PGLPGTILR

SEQ ID NO: 7606 - protein, 9 aa, synthetic construct
  REGION 1..9: note = Description of Artificial Sequence: Synthetic peptide
PHGHVMVEL

SEQ ID NO: 7607 - protein, 9 aa, synthetic construct
  REGION 1..9: note = Description of Artificial Sequence: Synthetic peptide
PLADNKFAL

SEQ ID NO: 7608 - protein, 9 aa, synthetic construct
  REGION 1..9: note = Description of Artificial Sequence: Synthetic peptide
PLHGTILTR

SEQ ID NO: 7609 - protein, 9 aa, synthetic construct
  REGION 1..9: note = Description of Artificial Sequence: Synthetic peptide
PLQPELDSF

SEQ ID NO: 7610 - protein, 9 aa, synthetic construct
  REGION 1..9: note = Description of Artificial Sequence: Synthetic peptide
PPIKDFGGF

SEQ ID NO: 7611 - protein, 9 aa, synthetic construct
  REGION 1..9: note = Description of Artificial Sequence: Synthetic peptide
PPTSFGPLV

SEQ ID NO: 7612 - protein, 9 aa, synthetic construct
  REGION 1..9: note = Description of Artificial Sequence: Synthetic peptide
PQNAVVKIY

SEQ ID NO: 7613 - protein, 9 aa, synthetic construct
  REGION 1..9: note = Description of Artificial Sequence: Synthetic peptide
PRPPLNRNY

SEQ ID NO: 7614 - protein, 10 aa, synthetic construct
  REGION 1..10: note = Description of Artificial Sequence: Synthetic peptide
PTITQMNLKY

SEQ ID NO: 7615 - protein, 9 aa, synthetic construct
  REGION 1..9: note = Description of Artificial Sequence: Synthetic peptide
PTLVPQEHY

SEQ ID NO: 7616 - protein, 9 aa, synthetic construct
  REGION 1..9: note = Description of Artificial Sequence: Synthetic peptide
PTMCDIRQL

SEQ ID NO: 7617 - protein, 9 aa, synthetic construct
  REGION 1..9: note = Description of Artificial Sequence: Synthetic peptide
PTSFGPLVR

SEQ ID NO: 7618 - protein, 9 aa, synthetic construct
  REGION 1..9: note = Description of Artificial Sequence: Synthetic peptide
PVAYRKVLL

SEQ ID NO: 7619 - protein, 9 aa, synthetic construct
  REGION 1..9: note = Description of Artificial Sequence: Synthetic peptide
PVLDWLEEK

SEQ ID NO: 7620 - protein, 9 aa, synthetic construct
  REGION 1..9: note = Description of Artificial Sequence: Synthetic peptide
PVSELLTPL

SEQ ID NO: 7621 - protein, 10 aa, synthetic construct
  REGION 1..10: note = Description of Artificial Sequence: Synthetic peptide
PVYSFLPGVY

SEQ ID NO: 7622 - protein, 8 aa, synthetic construct
  REGION 1..8: note = Description of Artificial Sequence: Synthetic peptide
PWDTIANY

SEQ ID NO: 7623 - protein, 8 aa, synthetic construct
  REGION 1..8: note = Description of Artificial Sequence: Synthetic peptide
PYFFTLLL

SEQ ID NO: 7624 - protein, 10 aa, synthetic construct
  REGION 1..10: note = Description of Artificial Sequence: Synthetic peptide
PYIKWDLLKY

SEQ ID NO: 7625 - protein, 8 aa, synthetic construct
  REGION 1..8: note = Description of Artificial Sequence: Synthetic peptide
PYPDPSRI

SEQ ID NO: 7626 - protein, 9 aa, synthetic construct
  REGION 1..9: note = Description of Artificial Sequence: Synthetic peptide
QAAGTDTTI

SEQ ID NO: 7627 - protein, 8 aa, synthetic construct
  REGION 1..8: note = Description of Artificial Sequence: Synthetic peptide
QADVEWKF

SEQ ID NO: 7628 - protein, 9 aa, synthetic construct
  REGION 1..9: note = Description of Artificial Sequence: Synthetic peptide
QADVEWKFY

SEQ ID NO: 7629 - protein, 8 aa, synthetic construct
  REGION 1..8: note = Description of Artificial Sequence: Synthetic peptide
QAPTHLSV

SEQ ID NO: 7630 - protein, 10 aa, synthetic construct
  REGION 1..10: note = Description of Artificial Sequence: Synthetic peptide
QECVRGTTVL

SEQ ID NO: 7631 - protein, 10 aa, synthetic construct
  REGION 1..10: note = Description of Artificial Sequence: Synthetic peptide
QEEVQELYSP

SEQ ID NO: 7632 - protein, 9 aa, synthetic construct
  REGION 1..9: note = Description of Artificial Sequence: Synthetic peptide
QEFRYMNSQ

SEQ ID NO: 7633 - protein, 11 aa, synthetic construct
  REGION 1..11: note = Description of Artificial Sequence: Synthetic peptide
QEFRYMNSQGL

SEQ ID NO: 7634 - protein, 11 aa, synthetic construct
  REGION 1..11: note = Description of Artificial Sequence: Synthetic peptide
QEILGTVSWNL

SEQ ID NO: 7635 - protein, 9 aa, synthetic construct
  REGION 1..9: note = Description of Artificial Sequence: Synthetic peptide
QEKNFTTAP

SEQ ID NO: 7636 - protein, 9 aa, synthetic construct
  REGION 1..9: note = Description of Artificial Sequence: Synthetic peptide
QELIRQGTD

SEQ ID NO: 7637 - protein, 10 aa, synthetic construct
  REGION 1..10: note = Description of Artificial Sequence: Synthetic peptide
QESPFVMMSA

SEQ ID NO: 7638 - protein, 10 aa, synthetic construct
  REGION 1..10: note = Description of Artificial Sequence: Synthetic peptide
QEVFAQVKQI

SEQ ID NO: 7639 - protein, 9 aa, synthetic construct
  REGION 1..9: note = Description of Artificial Sequence: Synthetic peptide
QFAYANRNR

SEQ ID NO: 7640 - protein, 9 aa, synthetic construct
  REGION 1..9: note = Description of Artificial Sequence: Synthetic peptide
QHEETIYNL

SEQ ID NO: 7641 - protein, 10 aa, synthetic construct
  REGION 1..10: note = Description of Artificial Sequence: Synthetic peptide
QHEETIYNLL

SEQ ID NO: 7642 - protein, 9 aa, synthetic construct
  REGION 1..9: note = Description of Artificial Sequence: Synthetic peptide
QHMVVKAAL

SEQ ID NO: 7643 - protein, 9 aa, synthetic construct
  REGION 1..9: note = Description of Artificial Sequence: Synthetic peptide
QIAPGQTGK

SEQ ID NO: 7644 - protein, 9 aa, synthetic construct
  REGION 1..9: note = Description of Artificial Sequence: Synthetic peptide
QKKQQTVTL

SEQ ID NO: 7645 - protein, 10 aa, synthetic construct
  REGION 1..10: note = Description of Artificial Sequence: Synthetic peptide
QLDEEQPMEI

SEQ ID NO: 7646 - protein, 9 aa, synthetic construct
  REGION 1..9: note = Description of Artificial Sequence: Synthetic peptide
QLHNDILLA

SEQ ID NO: 7647 - protein, 9 aa, synthetic construct
  REGION 1..9: note = Description of Artificial Sequence: Synthetic peptide
QLPAPRTLL

SEQ ID NO: 7648 - protein, 10 aa, synthetic construct
  REGION 1..10: note = Description of Artificial Sequence: Synthetic peptide
QLPPAYTNSF

SEQ ID NO: 7649 - protein, 8 aa, synthetic construct
  REGION 1..8: note = Description of Artificial Sequence: Synthetic peptide
QLPQGTTL

SEQ ID NO: 7650 - protein, 9 aa, synthetic construct
  REGION 1..9: note = Description of Artificial Sequence: Synthetic peptide
QMAPISAMV

SEQ ID NO: 7651 - protein, 9 aa, synthetic construct
  REGION 1..9: note = Description of Artificial Sequence: Synthetic peptide
QPGVAMPNL

SEQ ID NO: 7652 - protein, 10 aa, synthetic construct
  REGION 1..10: note = Description of Artificial Sequence: Synthetic peptide
QPITNCVKML

SEQ ID NO: 7653 - protein, 10 aa, synthetic construct
  REGION 1..10: note = Description of Artificial Sequence: Synthetic peptide
QPPQTSITSA

SEQ ID NO: 7654 - protein, 8 aa, synthetic construct
  REGION 1..8: note = Description of Artificial Sequence: Synthetic peptide
QPQLEMEL

SEQ ID NO: 7655 - protein, 9 aa, synthetic construct
  REGION 1..9: note = Description of Artificial Sequence: Synthetic peptide
QPRTFLLKY

SEQ ID NO: 7656 - protein, 9 aa, synthetic construct
  REGION 1..9: note = Description of Artificial Sequence: Synthetic peptide
QPSVGPKQA

SEQ ID NO: 7657 - protein, 9 aa, synthetic construct
  REGION 1..9: note = Description of Artificial Sequence: Synthetic peptide
QPTSEAVEA

SEQ ID NO: 7658 - protein, 9 aa, synthetic construct
  REGION 1..9: note = Description of Artificial Sequence: Synthetic peptide
QQLIRAAEI

SEQ ID NO: 7659 - protein, 8 aa, synthetic construct
  REGION 1..8: note = Description of Artificial Sequence: Synthetic peptide
QQQQGQTV

SEQ ID NO: 7660 - protein, 10 aa, synthetic construct
  REGION 1..10: note = Description of Artificial Sequence: Synthetic peptide
QSASKIITLK

SEQ ID NO: 7661 - protein, 8 aa, synthetic construct
  REGION 1..8: note = Description of Artificial Sequence: Synthetic peptide
QSIIAYTM

SEQ ID NO: 7662 - protein, 8 aa, synthetic construct
  REGION 1..8: note = Description of Artificial Sequence: Synthetic peptide
QSINFVRI

SEQ ID NO: 7663 - protein, 11 aa, synthetic construct
  REGION 1..11: note = Description of Artificial Sequence: Synthetic peptide
QSINFVRIIMR

SEQ ID NO: 7664 - protein, 9 aa, synthetic construct
  REGION 1..9: note = Description of Artificial Sequence: Synthetic peptide
QSSYIVDSV

SEQ ID NO: 7665 - protein, 10 aa, synthetic construct
  REGION 1..10: note = Description of Artificial Sequence: Synthetic peptide
QTFFKLVNKF

SEQ ID NO: 7666 - protein, 10 aa, synthetic construct
  REGION 1..10: note = Description of Artificial Sequence: Synthetic peptide
QTLLALHRSY

SEQ ID NO: 7667 - protein, 9 aa, synthetic construct
  REGION 1..9: note = Description of Artificial Sequence: Synthetic peptide
QTNSPRRAR

SEQ ID NO: 7668 - protein, 9 aa, synthetic construct
  REGION 1..9: note = Description of Artificial Sequence: Synthetic peptide
QVDLFRNAR

SEQ ID NO: 7669 - protein, 8 aa, synthetic construct
  REGION 1..8: note = Description of Artificial Sequence: Synthetic peptide
QVRDVLVR

SEQ ID NO: 7670 - protein, 9 aa, synthetic construct
  REGION 1..9: note = Description of Artificial Sequence: Synthetic peptide
QVTCGTTTL

SEQ ID NO: 7671 - protein, 9 aa, synthetic construct
  REGION 1..9: note = Description of Artificial Sequence: Synthetic peptide
QVVSDIDYV

SEQ ID NO: 7672 - protein, 8 aa, synthetic construct
  REGION 1..8: note = Description of Artificial Sequence: Synthetic peptide
QWLPTGTL

SEQ ID NO: 7673 - protein, 8 aa, synthetic construct
  REGION 1..8: note = Description of Artificial Sequence: Synthetic peptide
QWNLVIGF

SEQ ID NO: 7674 - protein, 9 aa, synthetic construct
  REGION 1..9: note = Description of Artificial Sequence: Synthetic peptide
QYIDIGNYT

SEQ ID NO: 7675 - protein, 10 aa, synthetic construct
  REGION 1..10: note = Description of Artificial Sequence: Synthetic peptide
QYIDIGNYTV

SEQ ID NO: 7676 - protein, 8 aa, synthetic construct
  REGION 1..8: note = Description of Artificial Sequence: Synthetic peptide
QYNRYLAL

SEQ ID NO: 7677 - protein, 9 aa, synthetic construct
  REGION 1..9: note = Description of Artificial Sequence: Synthetic peptide
RAAEIRASA

SEQ ID NO: 7678 - protein, 8 aa, synthetic construct
  REGION 1..8: note = Description of Artificial Sequence: Synthetic peptide
RAFDIYND

SEQ ID NO: 7679 - protein, 10 aa, synthetic construct
  REGION 1..10: note = Description of Artificial Sequence: Synthetic peptide
RAFGEYSHVV

SEQ ID NO: 7680 - protein, 8 aa, synthetic construct
  REGION 1..8: note = Description of Artificial Sequence: Synthetic peptide
RAKVTSAM

SEQ ID NO: 7681 - protein, 9 aa, synthetic construct
  REGION 1..9: note = Description of Artificial Sequence: Synthetic peptide
RALTGIAVE

SEQ ID NO: 7682 - protein, 9 aa, synthetic construct
  REGION 1..9: note = Description of Artificial Sequence: Synthetic peptide
RDAAMQRKL

SEQ ID NO: 7683 - protein, 8 aa, synthetic construct
  REGION 1..8: note = Description of Artificial Sequence: Synthetic peptide
REAACCHL

SEQ ID NO: 7684 - protein, 9 aa, synthetic construct
  REGION 1..9: note = Description of Artificial Sequence: Synthetic peptide
REAACCHLA

SEQ ID NO: 7685 - protein, 11 aa, synthetic construct
  REGION 1..11: note = Description of Artificial Sequence: Synthetic peptide
REAACCHLAKA

SEQ ID NO: 7686 - protein, 10 aa, synthetic construct
  REGION 1..10: note = Description of Artificial Sequence: Synthetic peptide
REAVGTNLPL

SEQ ID NO: 7687 - protein, 11 aa, synthetic construct
  REGION 1..11: note = Description of Artificial Sequence: Synthetic peptide
REEAIRHVRAW

SEQ ID NO: 7688 - protein, 10 aa, synthetic construct
  REGION 1..10: note = Description of Artificial Sequence: Synthetic peptide
REGYLNSTNV

SEQ ID NO: 7689 - protein, 8 aa, synthetic construct
  REGION 1..8: note = Description of Artificial Sequence: Synthetic peptide
RELGVVHN

SEQ ID NO: 7690 - protein, 8 aa, synthetic construct
  REGION 1..8: note = Description of Artificial Sequence: Synthetic peptide
RELNGGAY

SEQ ID NO: 7691 - protein, 9 aa, synthetic construct
  REGION 1..9: note = Description of Artificial Sequence: Synthetic peptide
RELNGGAYT

SEQ ID NO: 7692 - protein, 10 aa, synthetic construct
  REGION 1..10: note = Description of Artificial Sequence: Synthetic peptide
RFASVYAWNR

SEQ ID NO: 7693 - protein, 10 aa, synthetic construct
  REGION 1..10: note = Description of Artificial Sequence: Synthetic peptide
RFLYIIKLIF

SEQ ID NO: 7694 - protein, 9 aa, synthetic construct
  REGION 1..9: note = Description of Artificial Sequence: Synthetic peptide
RFYRLANEC

SEQ ID NO: 7695 - protein, 9 aa, synthetic construct
  REGION 1..9: note = Description of Artificial Sequence: Synthetic peptide
RGFGDSVEE

SEQ ID NO: 7696 - protein, 10 aa, synthetic construct
  REGION 1..10: note = Description of Artificial Sequence: Synthetic peptide
RGIVFMCVEY

SEQ ID NO: 7697 - protein, 11 aa, synthetic construct
  REGION 1..11: note = Description of Artificial Sequence: Synthetic peptide
RHFDEGNCDTL

SEQ ID NO: 7698 - protein, 10 aa, synthetic construct
  REGION 1..10: note = Description of Artificial Sequence: Synthetic peptide
RHHANEYRLY

SEQ ID NO: 7699 - protein, 9 aa, synthetic construct
  REGION 1..9: note = Description of Artificial Sequence: Synthetic peptide
RHVRAWIGF

SEQ ID NO: 7700 - protein, 9 aa, synthetic construct
  REGION 1..9: note = Description of Artificial Sequence: Synthetic peptide
RIMTWLDMV

SEQ ID NO: 7701 - protein, 9 aa, synthetic construct
  REGION 1..9: note = Description of Artificial Sequence: Synthetic peptide
RKGGRTIAF

SEQ ID NO: 7702 - protein, 10 aa, synthetic construct
  REGION 1..10: note = Description of Artificial Sequence: Synthetic peptide
RLANECAQVL

SEQ ID NO: 7703 - protein, 8 aa, synthetic construct
  REGION 1..8: note = Description of Artificial Sequence: Synthetic peptide
RLIDAMMF

SEQ ID NO: 7704 - protein, 8 aa, synthetic construct
  REGION 1..8: note = Description of Artificial Sequence: Synthetic peptide
RLISMMGF

SEQ ID NO: 7705 - protein, 8 aa, synthetic construct
  REGION 1..8: note = Description of Artificial Sequence: Synthetic peptide
RLKLFDRY

SEQ ID NO: 7706 - protein, 9 aa, synthetic construct
  REGION 1..9: note = Description of Artificial Sequence: Synthetic peptide
RLNQLESKM

SEQ ID NO: 7707 - protein, 10 aa, synthetic construct
  REGION 1..10: note = Description of Artificial Sequence: Synthetic peptide
RLQSLENVAF

SEQ ID NO: 7708 - protein, 8 aa, synthetic construct
  REGION 1..8: note = Description of Artificial Sequence: Synthetic peptide
RLYECLYR

SEQ ID NO: 7709 - protein, 10 aa, synthetic construct
  REGION 1..10: note = Description of Artificial Sequence: Synthetic peptide
RLYECLYRNR

SEQ ID NO: 7710 - protein, 11 aa, synthetic construct
  REGION 1..11: note = Description of Artificial Sequence: Synthetic peptide
RMYIFFASFYY

SEQ ID NO: 7711 - protein, 8 aa, synthetic construct
  REGION 1..8: note = Description of Artificial Sequence: Synthetic peptide
RNLQHRLY

SEQ ID NO: 7712 - protein, 9 aa, synthetic construct
  REGION 1..9: note = Description of Artificial Sequence: Synthetic peptide
RNSTPGSSR

SEQ ID NO: 7713 - protein, 8 aa, synthetic construct
  REGION 1..8: note = Description of Artificial Sequence: Synthetic peptide
RNYVFTGY

SEQ ID NO: 7714 - protein, 11 aa, synthetic construct
  REGION 1..11: note = Description of Artificial Sequence: Synthetic peptide
RPINPTDQSSY

SEQ ID NO: 7715 - protein, 8 aa, synthetic construct
  REGION 1..8: note = Description of Artificial Sequence: Synthetic peptide
RPLLESEL

SEQ ID NO: 7716 - protein, 10 aa, synthetic construct
  REGION 1..10: note = Description of Artificial Sequence: Synthetic peptide
RPNFTIKGSF

SEQ ID NO: 7717 - protein, 11 aa, synthetic construct
  REGION 1..11: note = Description of Artificial Sequence: Synthetic peptide
RPNFTIKGSFL

SEQ ID NO: 7718 - protein, 9 aa, synthetic construct
  REGION 1..9: note = Description of Artificial Sequence: Synthetic peptide
RPPLNRNYV

SEQ ID NO: 7719 - protein, 10 aa, synthetic construct
  REGION 1..10: note = Description of Artificial Sequence: Synthetic peptide
RPPLNRNYVF

SEQ ID NO: 7720 - protein, 8 aa, synthetic construct
  REGION 1..8: note = Description of Artificial Sequence: Synthetic peptide
RPQIGVVR

SEQ ID NO: 7721 - protein, 8 aa, synthetic construct
  REGION 1..8: note = Description of Artificial Sequence: Synthetic peptide
RQALLKTV

SEQ ID NO: 7722 - protein, 8 aa, synthetic construct
  REGION 1..8: note = Description of Artificial Sequence: Synthetic peptide
RQKKQQTV

SEQ ID NO: 7723 - protein, 9 aa, synthetic construct
  REGION 1..9: note = Description of Artificial Sequence: Synthetic peptide
RQKKQQTVT

SEQ ID NO: 7724 - protein, 10 aa, synthetic construct
  REGION 1..10: note = Description of Artificial Sequence: Synthetic peptide
RQKRTATKAY

SEQ ID NO: 7725 - protein, 9 aa, synthetic construct
  REGION 1..9: note = Description of Artificial Sequence: Synthetic peptide
RQRLTKYTM

SEQ ID NO: 7726 - protein, 11 aa, synthetic construct
  REGION 1..11: note = Description of Artificial Sequence: Synthetic peptide
RSDVLLPLTQY

SEQ ID NO: 7727 - protein, 8 aa, synthetic construct
  REGION 1..8: note = Description of Artificial Sequence: Synthetic peptide
RSGETLGV

SEQ ID NO: 7728 - protein, 10 aa, synthetic construct
  REGION 1..10: note = Description of Artificial Sequence: Synthetic peptide
RSVSPKLFIR

SEQ ID NO: 7729 - protein, 8 aa, synthetic construct
  REGION 1..8: note = Description of Artificial Sequence: Synthetic peptide
RTTNGDFL

SEQ ID NO: 7730 - protein, 8 aa, synthetic construct
  REGION 1..8: note = Description of Artificial Sequence: Synthetic peptide
RTVAGVSI

SEQ ID NO: 7731 - protein, 11 aa, synthetic construct
  REGION 1..11: note = Description of Artificial Sequence: Synthetic peptide
RVDFCGKGYHL

SEQ ID NO: 7732 - protein, 10 aa, synthetic construct
  REGION 1..10: note = Description of Artificial Sequence: Synthetic peptide
RVDGQVDLFR

SEQ ID NO: 7733 - protein, 8 aa, synthetic construct
  REGION 1..8: note = Description of Artificial Sequence: Synthetic peptide
RVEAFEYY

SEQ ID NO: 7734 - protein, 8 aa, synthetic construct
  REGION 1..8: note = Description of Artificial Sequence: Synthetic peptide
RVESSSKL

SEQ ID NO: 7735 - protein, 8 aa, synthetic construct
  REGION 1..8: note = Description of Artificial Sequence: Synthetic peptide
RVLNVVCK

SEQ ID NO: 7736 - protein, 9 aa, synthetic construct
  REGION 1..9: note = Description of Artificial Sequence: Synthetic peptide
RVLNVVCKT

SEQ ID NO: 7737 - protein, 9 aa, synthetic construct
  REGION 1..9: note = Description of Artificial Sequence: Synthetic peptide
RVLSNLNLP

SEQ ID NO: 7738 - protein, 8 aa, synthetic construct
  REGION 1..8: note = Description of Artificial Sequence: Synthetic peptide
RVQPTESI

SEQ ID NO: 7739 - protein, 9 aa, synthetic construct
  REGION 1..9: note = Description of Artificial Sequence: Synthetic peptide
RVQPTESIV

SEQ ID NO: 7740 - protein, 8 aa, synthetic construct
  REGION 1..8: note = Description of Artificial Sequence: Synthetic peptide
RVRQALLK

SEQ ID NO: 7741 - protein, 9 aa, synthetic construct
  REGION 1..9: note = Description of Artificial Sequence: Synthetic peptide
RVRQALLKT

SEQ ID NO: 7742 - protein, 10 aa, synthetic construct
  REGION 1..10: note = Description of Artificial Sequence: Synthetic peptide
RVRQALLKTV

SEQ ID NO: 7743 - protein, 11 aa, synthetic construct
  REGION 1..11: note = Description of Artificial Sequence: Synthetic peptide
RVYSSANNCTF

SEQ ID NO: 7744 - protein, 9 aa, synthetic construct
  REGION 1..9: note = Description of Artificial Sequence: Synthetic peptide
RWVLNNDYY

SEQ ID NO: 7745 - protein, 9 aa, synthetic construct
  REGION 1..9: note = Description of Artificial Sequence: Synthetic peptide
RYWEPEFYE

SEQ ID NO: 7746 - protein, 8 aa, synthetic construct
  REGION 1..8: note = Description of Artificial Sequence: Synthetic peptide
SAEVAVKM

SEQ ID NO: 7747 - protein, 8 aa, synthetic construct
  REGION 1..8: note = Description of Artificial Sequence: Synthetic peptide
SAFFGMSR

SEQ ID NO: 7748 - protein, 10 aa, synthetic construct
  REGION 1..10: note = Description of Artificial Sequence: Synthetic peptide
SAFYILPSII

SEQ ID NO: 7749 - protein, 9 aa, synthetic construct
  REGION 1..9: note = Description of Artificial Sequence: Synthetic peptide
SAGFPFNKW

SEQ ID NO: 7750 - protein, 9 aa, synthetic construct
  REGION 1..9: note = Description of Artificial Sequence: Synthetic peptide
SAIGKIQDS

SEQ ID NO: 7751 - protein, 9 aa, synthetic construct
  REGION 1..9: note = Description of Artificial Sequence: Synthetic peptide
SARHINAQV

SEQ ID NO: 7752 - protein, 8 aa, synthetic construct
  REGION 1..8: note = Description of Artificial Sequence: Synthetic peptide
SAVGNICY

SEQ ID NO: 7753 - protein, 9 aa, synthetic construct
  REGION 1..9: note = Description of Artificial Sequence: Synthetic peptide
SCKRVLNVV

SEQ ID NO: 7754 - protein, 8 aa, synthetic construct
  REGION 1..8: note = Description of Artificial Sequence: Synthetic peptide
SDDAVVCF

SEQ ID NO: 7755 - protein, 8 aa, synthetic construct
  REGION 1..8: note = Description of Artificial Sequence: Synthetic peptide
SDRVVFVL

SEQ ID NO: 7756 - protein, 10 aa, synthetic construct
  REGION 1..10: note = Description of Artificial Sequence: Synthetic peptide
SEAFLIGCNY

SEQ ID NO: 7757 - protein, 11 aa, synthetic construct
  REGION 1..11: note = Description of Artificial Sequence: Synthetic peptide
SEAFLIGCNYL

SEQ ID NO: 7758 - protein, 9 aa, synthetic construct
  REGION 1..9: note = Description of Artificial Sequence: Synthetic peptide
SEAKCWTET

SEQ ID NO: 7759 - protein, 8 aa, synthetic construct
  REGION 1..8: note = Description of Artificial Sequence: Synthetic peptide
SEETGTLI

SEQ ID NO: 7760 - protein, 8 aa, synthetic construct
  REGION 1..8: note = Description of Artificial Sequence: Synthetic peptide
SEFRVYSS

SEQ ID NO: 7761 - protein, 8 aa, synthetic construct
  REGION 1..8: note = Description of Artificial Sequence: Synthetic peptide
SEGLNDNL

SEQ ID NO: 7762 - protein, 11 aa, synthetic construct
  REGION 1..11: note = Description of Artificial Sequence: Synthetic peptide
SEISMDNSPNL

SEQ ID NO: 7763 - protein, 10 aa, synthetic construct
  REGION 1..10: note = Description of Artificial Sequence: Synthetic peptide
SEKQVEQKIA

SEQ ID NO: 7764 - protein, 10 aa, synthetic construct
  REGION 1..10: note = Description of Artificial Sequence: Synthetic peptide
SEKSYELQTP

SEQ ID NO: 7765 - protein, 11 aa, synthetic construct
  REGION 1..11: note = Description of Artificial Sequence: Synthetic peptide
SELLTPLGIDL

SEQ ID NO: 7766 - protein, 9 aa, synthetic construct
  REGION 1..9: note = Description of Artificial Sequence: Synthetic peptide
SEQLDFIDT

SEQ ID NO: 7767 - protein, 8 aa, synthetic construct
  REGION 1..8: note = Description of Artificial Sequence: Synthetic peptide
SFCYMHHM

SEQ ID NO: 7768 - protein, 10 aa, synthetic construct
  REGION 1..10: note = Description of Artificial Sequence: Synthetic peptide
SFCYMHHMEL

SEQ ID NO: 7769 - protein, 9 aa, synthetic construct
  REGION 1..9: note = Description of Artificial Sequence: Synthetic peptide
SFGGASCCL

SEQ ID NO: 7770 - protein, 8 aa, synthetic construct
  REGION 1..8: note = Description of Artificial Sequence: Synthetic peptide
SFGGVSVI

SEQ ID NO: 7771 - protein, 9 aa, synthetic construct
  REGION 1..9: note = Description of Artificial Sequence: Synthetic peptide
SFIEDLLFN

SEQ ID NO: 7772 - protein, 10 aa, synthetic construct
  REGION 1..10: note = Description of Artificial Sequence: Synthetic peptide
SFIEDLLFNK

SEQ ID NO: 7773 - protein, 8 aa, synthetic construct
  REGION 1..8: note = Description of Artificial Sequence: Synthetic peptide
SFKKGAKL

SEQ ID NO: 7774 - protein, 9 aa, synthetic construct
  REGION 1..9: note = Description of Artificial Sequence: Synthetic peptide
SFLEMKSEK

SEQ ID NO: 7775 - protein, 10 aa, synthetic construct
  REGION 1..10: note = Description of Artificial Sequence: Synthetic peptide
SFNYLKSPNF

SEQ ID NO: 7776 - protein, 8 aa, synthetic construct
  REGION 1..8: note = Description of Artificial Sequence: Synthetic peptide
SFTRGVYY

SEQ ID NO: 7777 - protein, 9 aa, synthetic construct
  REGION 1..9: note = Description of Artificial Sequence: Synthetic peptide
SFTVEKGIY

SEQ ID NO: 7778 - protein, 10 aa, synthetic construct
  REGION 1..10: note = Description of Artificial Sequence: Synthetic peptide
SFVSEETGTL

SEQ ID NO: 7779 - protein, 8 aa, synthetic construct
  REGION 1..8: note = Description of Artificial Sequence: Synthetic peptide
SFYPPDED

SEQ ID NO: 7780 - protein, 9 aa, synthetic construct
  REGION 1..9: note = Description of Artificial Sequence: Synthetic peptide
SGVKDCVVL

SEQ ID NO: 7781 - protein, 8 aa, synthetic construct
  REGION 1..8: note = Description of Artificial Sequence: Synthetic peptide
SHAAVDAL

SEQ ID NO: 7782 - protein, 9 aa, synthetic construct
  REGION 1..9: note = Description of Artificial Sequence: Synthetic peptide
SHEGKTFYV

SEQ ID NO: 7783 - protein, 10 aa, synthetic construct
  REGION 1..10: note = Description of Artificial Sequence: Synthetic peptide
SHEGKTFYVL

SEQ ID NO: 7784 - protein, 9 aa, synthetic construct
  REGION 1..9: note = Description of Artificial Sequence: Synthetic peptide
SHFVNLDNL

SEQ ID NO: 7785 - protein, 9 aa, synthetic construct
  REGION 1..9: note = Description of Artificial Sequence: Synthetic peptide
SHQSDIEVT

SEQ ID NO: 7786 - protein, 10 aa, synthetic construct
  REGION 1..10: note = Description of Artificial Sequence: Synthetic peptide
SHSQLGGLHL

SEQ ID NO: 7787 - protein, 11 aa, synthetic construct
  REGION 1..11: note = Description of Artificial Sequence: Synthetic peptide
SHSQLGGLHLL

SEQ ID NO: 7788 - protein, 10 aa, synthetic construct
  REGION 1..10: note = Description of Artificial Sequence: Synthetic peptide
SHVVAFNTLL

SEQ ID NO: 7789 - protein, 9 aa, synthetic construct
  REGION 1..9: note = Description of Artificial Sequence: Synthetic peptide
SIFSRTLET

SEQ ID NO: 7790 - protein, 10 aa, synthetic construct
  REGION 1..10: note = Description of Artificial Sequence: Synthetic peptide
SIINNTVYTK

SEQ ID NO: 7791 - protein, 10 aa, synthetic construct
  REGION 1..10: note = Description of Artificial Sequence: Synthetic peptide
SIIQFPNTYL

SEQ ID NO: 7792 - protein, 11 aa, synthetic construct
  REGION 1..11: note = Description of Artificial Sequence: Synthetic peptide
SIKNFKSVLYY

SEQ ID NO: 7793 - protein, 9 aa, synthetic construct
  REGION 1..9: note = Description of Artificial Sequence: Synthetic peptide
SKLINIIIW

SEQ ID NO: 7794 - protein, 8 aa, synthetic construct
  REGION 1..8: note = Description of Artificial Sequence: Synthetic peptide
SKPSKRSF

SEQ ID NO: 7795 - protein, 9 aa, synthetic construct
  REGION 1..9: note = Description of Artificial Sequence: Synthetic peptide
SKRSFIEDL

SEQ ID NO: 7796 - protein, 10 aa, synthetic construct
  REGION 1..10: note = Description of Artificial Sequence: Synthetic peptide
SKVQIGEYTF

SEQ ID NO: 7797 - protein, 11 aa, synthetic construct
  REGION 1..11: note = Description of Artificial Sequence: Synthetic peptide
SLAEYHNESGL

SEQ ID NO: 7798 - protein, 10 aa, synthetic construct
  REGION 1..10: note = Description of Artificial Sequence: Synthetic peptide
SLDNVLSTFI

SEQ ID NO: 7799 - protein, 11 aa, synthetic construct
  REGION 1..11: note = Description of Artificial Sequence: Synthetic peptide
SLFDMSKFPLK

SEQ ID NO: 7800 - protein, 12 aa, synthetic construct
  REGION 1..12: note = Description of Artificial Sequence: Synthetic peptide
SLFDMSKFPLKL

SEQ ID NO: 7801 - protein, 10 aa, synthetic construct
  REGION 1..10: note = Description of Artificial Sequence: Synthetic peptide
SLGAENSVAY

SEQ ID NO: 7802 - protein, 9 aa, synthetic construct
  REGION 1..9: note = Description of Artificial Sequence: Synthetic peptide
SLIDLQELG

SEQ ID NO: 7803 - protein, 9 aa, synthetic construct
  REGION 1..9: note = Description of Artificial Sequence: Synthetic peptide
SLKELLQNG

SEQ ID NO: 7804 - protein, 8 aa, synthetic construct
  REGION 1..8: note = Description of Artificial Sequence: Synthetic peptide
SLKVPATV

SEQ ID NO: 7805 - protein, 8 aa, synthetic construct
  REGION 1..8: note = Description of Artificial Sequence: Synthetic peptide
SLPSYAAF

SEQ ID NO: 7806 - protein, 10 aa, synthetic construct
  REGION 1..10: note = Description of Artificial Sequence: Synthetic peptide
SLPVLQVRDV

SEQ ID NO: 7807 - protein, 9 aa, synthetic construct
  REGION 1..9: note = Description of Artificial Sequence: Synthetic peptide
SLREVRTIK

SEQ ID NO: 7808 - protein, 9 aa, synthetic construct
  REGION 1..9: note = Description of Artificial Sequence: Synthetic peptide
SLRVCVDTV

SEQ ID NO: 7809 - protein, 9 aa, synthetic construct
  REGION 1..9: note = Description of Artificial Sequence: Synthetic peptide
SLSEQLRKQ

SEQ ID NO: 7810 - protein, 8 aa, synthetic construct
  REGION 1..8: note = Description of Artificial Sequence: Synthetic peptide
SLSHFVNL

SEQ ID NO: 7811 - protein, 9 aa, synthetic construct
  REGION 1..9: note = Description of Artificial Sequence: Synthetic peptide
SLVVRCSFY

SEQ ID NO: 7812 - protein, 9 aa, synthetic construct
  REGION 1..9: note = Description of Artificial Sequence: Synthetic peptide
SNHNFLVQA

SEQ ID NO: 7813 - protein, 8 aa, synthetic construct
  REGION 1..8: note = Description of Artificial Sequence: Synthetic peptide
SNYLKRRV

SEQ ID NO: 7814 - protein, 10 aa, synthetic construct
  REGION 1..10: note = Description of Artificial Sequence: Synthetic peptide
SPCESHGKQV

SEQ ID NO: 7815 - protein, 8 aa, synthetic construct
  REGION 1..8: note = Description of Artificial Sequence: Synthetic peptide
SPFVMMSA

SEQ ID NO: 7816 - protein, 8 aa, synthetic construct
  REGION 1..8: note = Description of Artificial Sequence: Synthetic peptide
SPIFLIVA

SEQ ID NO: 7817 - protein, 10 aa, synthetic construct
  REGION 1..10: note = Description of Artificial Sequence: Synthetic peptide
SPISEHDYQI

SEQ ID NO: 7818 - protein, 8 aa, synthetic construct
  REGION 1..8: note = Description of Artificial Sequence: Synthetic peptide
SPNLAWPL

SEQ ID NO: 7819 - protein, 10 aa, synthetic construct
  REGION 1..10: note = Description of Artificial Sequence: Synthetic peptide
SPSGVYQCAM

SEQ ID NO: 7820 - protein, 9 aa, synthetic construct
  REGION 1..9: note = Description of Artificial Sequence: Synthetic peptide
SQCVNLTTR

SEQ ID NO: 7821 - protein, 10 aa, synthetic construct
  REGION 1..10: note = Description of Artificial Sequence: Synthetic peptide
SQDLSVVSKV

SEQ ID NO: 7822 - protein, 9 aa, synthetic construct
  REGION 1..9: note = Description of Artificial Sequence: Synthetic peptide
SQILPDPSK

SEQ ID NO: 7823 - protein, 10 aa, synthetic construct
  REGION 1..10: note = Description of Artificial Sequence: Synthetic peptide
SQLGGLHLLI

SEQ ID NO: 7824 - protein, 9 aa, synthetic construct
  REGION 1..9: note = Description of Artificial Sequence: Synthetic peptide
SQNAVASKI

SEQ ID NO: 7825 - protein, 8 aa, synthetic construct
  REGION 1..8: note = Description of Artificial Sequence: Synthetic peptide
SQWLTNIF

SEQ ID NO: 7826 - protein, 9 aa, synthetic construct
  REGION 1..9: note = Description of Artificial Sequence: Synthetic peptide
SRELKVTFF

SEQ ID NO: 7827 - protein, 9 aa, synthetic construct
  REGION 1..9: note = Description of Artificial Sequence: Synthetic peptide
SRIGMEVTP

SEQ ID NO: 7828 - protein, 9 aa, synthetic construct
  REGION 1..9: note = Description of Artificial Sequence: Synthetic peptide
SRIIPARAR

SEQ ID NO: 7829 - protein, 8 aa, synthetic construct
  REGION 1..8: note = Description of Artificial Sequence: Synthetic peptide
SRNYIAQV

SEQ ID NO: 7830 - protein, 9 aa, synthetic construct
  REGION 1..9: note = Description of Artificial Sequence: Synthetic peptide
SRNYIAQVD

SEQ ID NO: 7831 - protein, 8 aa, synthetic construct
  REGION 1..8: note = Description of Artificial Sequence: Synthetic peptide
SRVPDLLV

SEQ ID NO: 7832 - protein, 10 aa, synthetic construct
  REGION 1..10: note = Description of Artificial Sequence: Synthetic peptide
SRYRIGNYKL

SEQ ID NO: 7833 - protein, 8 aa, synthetic construct
  REGION 1..8: note = Description of Artificial Sequence: Synthetic peptide
SRYWEPEF

SEQ ID NO: 7834 - protein, 9 aa, synthetic construct
  REGION 1..9: note = Description of Artificial Sequence: Synthetic peptide
SSRGTSPAR

SEQ ID NO: 7835 - protein, 9 aa, synthetic construct
  REGION 1..9: note = Description of Artificial Sequence: Synthetic peptide
SSRSRNSSR

SEQ ID NO: 7836 - protein, 10 aa, synthetic construct
  REGION 1..10: note = Description of Artificial Sequence: Synthetic peptide
SSSDNIALLV

SEQ ID NO: 7837 - protein, 10 aa, synthetic construct
  REGION 1..10: note = Description of Artificial Sequence: Synthetic peptide
SSVELKHFFF

SEQ ID NO: 7838 - protein, 8 aa, synthetic construct
  REGION 1..8: note = Description of Artificial Sequence: Synthetic peptide
STASALGK

SEQ ID NO: 7839 - protein, 10 aa, synthetic construct
  REGION 1..10: note = Description of Artificial Sequence: Synthetic peptide
STASDTYACW

SEQ ID NO: 7840 - protein, 11 aa, synthetic construct
  REGION 1..11: note = Description of Artificial Sequence: Synthetic peptide
STDGNKIADKY

SEQ ID NO: 7841 - protein, 11 aa, synthetic construct
  REGION 1..11: note = Description of Artificial Sequence: Synthetic peptide
STFNVPMEKLK

SEQ ID NO: 7842 - protein, 11 aa, synthetic construct
  REGION 1..11: note = Description of Artificial Sequence: Synthetic peptide
STKPVETSNSF

SEQ ID NO: 7843 - protein, 8 aa, synthetic construct
  REGION 1..8: note = Description of Artificial Sequence: Synthetic peptide
STMTNRQF

SEQ ID NO: 7844 - protein, 11 aa, synthetic construct
  REGION 1..11: note = Description of Artificial Sequence: Synthetic peptide
STQLGIEFLKR

SEQ ID NO: 7845 - protein, 9 aa, synthetic construct
  REGION 1..9: note = Description of Artificial Sequence: Synthetic peptide
STYASQGLV

SEQ ID NO: 7846 - protein, 9 aa, synthetic construct
  REGION 1..9: note = Description of Artificial Sequence: Synthetic peptide
SVEEVLSEA

SEQ ID NO: 7847 - protein, 9 aa, synthetic construct
  REGION 1..9: note = Description of Artificial Sequence: Synthetic peptide
SVITPGTNT

SEQ ID NO: 7848 - protein, 11 aa, synthetic construct
  REGION 1..11: note = Description of Artificial Sequence: Synthetic peptide
SVMLTNDNTSR

SEQ ID NO: 7849 - protein, 11 aa, synthetic construct
  REGION 1..11: note = Description of Artificial Sequence: Synthetic peptide
SVQTFFKLVNK

SEQ ID NO: 7850 - protein, 10 aa, synthetic construct
  REGION 1..10: note = Description of Artificial Sequence: Synthetic peptide
SVVNARLRAK

SEQ ID NO: 7851 - protein, 9 aa, synthetic construct
  REGION 1..9: note = Description of Artificial Sequence: Synthetic peptide
SVVNIQKEI

SEQ ID NO: 7852 - protein, 8 aa, synthetic construct
  REGION 1..8: note = Description of Artificial Sequence: Synthetic peptide
SVVSKVVK

SEQ ID NO: 7853 - protein, 10 aa, synthetic construct
  REGION 1..10: note = Description of Artificial Sequence: Synthetic peptide
SYCTGYREGY

SEQ ID NO: 7854 - protein, 8 aa, synthetic construct
  REGION 1..8: note = Description of Artificial Sequence: Synthetic peptide
SYELQTPF

SEQ ID NO: 7855 - protein, 8 aa, synthetic construct
  REGION 1..8: note = Description of Artificial Sequence: Synthetic peptide
SYFVVKRH

SEQ ID NO: 7856 - protein, 10 aa, synthetic construct
  REGION 1..10: note = Description of Artificial Sequence: Synthetic peptide
SYGIATVREV

SEQ ID NO: 7857 - protein, 9 aa, synthetic construct
  REGION 1..9: note = Description of Artificial Sequence: Synthetic peptide
SYKDWSYSG

SEQ ID NO: 7858 - protein, 8 aa, synthetic construct
  REGION 1..8: note = Description of Artificial Sequence: Synthetic peptide
TAALGVLM

SEQ ID NO: 7859 - protein, 8 aa, synthetic construct
  REGION 1..8: note = Description of Artificial Sequence: Synthetic peptide
TADIVVFD

SEQ ID NO: 7860 - protein, 10 aa, synthetic construct
  REGION 1..10: note = Description of Artificial Sequence: Synthetic peptide
TADIVVFDEI

SEQ ID NO: 7861 - protein, 8 aa, synthetic construct
  REGION 1..8: note = Description of Artificial Sequence: Synthetic peptide
TANVNALL

SEQ ID NO: 7862 - protein, 9 aa, synthetic construct
  REGION 1..9: note = Description of Artificial Sequence: Synthetic peptide
TAYNGYLTS

SEQ ID NO: 7863 - protein, 9 aa, synthetic construct
  REGION 1..9: note = Description of Artificial Sequence: Synthetic peptide
TCCSLSHRF

SEQ ID NO: 7864 - protein, 9 aa, synthetic construct
  REGION 1..9: note = Description of Artificial Sequence: Synthetic peptide
TDDNALAYY

SEQ ID NO: 7865 - protein, 8 aa, synthetic construct
  REGION 1..8: note = Description of Artificial Sequence: Synthetic peptide
TDNYITTY

SEQ ID NO: 7866 - protein, 8 aa, synthetic construct
  REGION 1..8: note = Description of Artificial Sequence: Synthetic peptide
TEAFEKMV

SEQ ID NO: 7867 - protein, 11 aa, synthetic construct
  REGION 1..11: note = Description of Artificial Sequence: Synthetic peptide
TEAFEKMVSLL

SEQ ID NO: 7868 - protein, 8 aa, synthetic construct
  REGION 1..8: note = Description of Artificial Sequence: Synthetic peptide
TECSNLLL

SEQ ID NO: 7869 - protein, 8 aa, synthetic construct
  REGION 1..8: note = Description of Artificial Sequence: Synthetic peptide
TEGSVKGL

SEQ ID NO: 7870 - protein, 10 aa, synthetic construct
  REGION 1..10: note = Description of Artificial Sequence: Synthetic peptide
TEGSVKGLQP

SEQ ID NO: 7871 - protein, 10 aa, synthetic construct
  REGION 1..10: note = Description of Artificial Sequence: Synthetic peptide
TEIYQAGSTP

SEQ ID NO: 7872 - protein, 9 aa, synthetic construct
  REGION 1..9: note = Description of Artificial Sequence: Synthetic peptide
TEKYCALAP

SEQ ID NO: 7873 - protein, 10 aa, synthetic construct
  REGION 1..10: note = Description of Artificial Sequence: Synthetic peptide
TELEPPCRFV

SEQ ID NO: 7874 - protein, 10 aa, synthetic construct
  REGION 1..10: note = Description of Artificial Sequence: Synthetic peptide
TENLLLYIDI

SEQ ID NO: 7875 - protein, 9 aa, synthetic construct
  REGION 1..9: note = Description of Artificial Sequence: Synthetic peptide
TESNKKFLP

SEQ ID NO: 7876 - protein, 10 aa, synthetic construct
  REGION 1..10: note = Description of Artificial Sequence: Synthetic peptide
TETICAPLTV

SEQ ID NO: 7877 - protein, 11 aa, synthetic construct
  REGION 1..11: note = Description of Artificial Sequence: Synthetic peptide
TETICAPLTVF

SEQ ID NO: 7878 - protein, 10 aa, synthetic construct
  REGION 1..10: note = Description of Artificial Sequence: Synthetic peptide
TFEEAALCTF

SEQ ID NO: 7879 - protein, 8 aa, synthetic construct
  REGION 1..8: note = Description of Artificial Sequence: Synthetic peptide
TFGAGAAL

SEQ ID NO: 7880 - protein, 9 aa, synthetic construct
  REGION 1..9: note = Description of Artificial Sequence: Synthetic peptide
TFISDEVAR

SEQ ID NO: 7881 - protein, 9 aa, synthetic construct
  REGION 1..9: note = Description of Artificial Sequence: Synthetic peptide
TFLLNKEMY

SEQ ID NO: 7882 - protein, 8 aa, synthetic construct
  REGION 1..8: note = Description of Artificial Sequence: Synthetic peptide
TFTYASAL

SEQ ID NO: 7883 - protein, 9 aa, synthetic construct
  REGION 1..9: note = Description of Artificial Sequence: Synthetic peptide
TFVTHSKGL

SEQ ID NO: 7884 - protein, 9 aa, synthetic construct
  REGION 1..9: note = Description of Artificial Sequence: Synthetic peptide
TGSNVFQTR

SEQ ID NO: 7885 - protein, 9 aa, synthetic construct
  REGION 1..9: note = Description of Artificial Sequence: Synthetic peptide
TGYKKPASR

SEQ ID NO: 7886 - protein, 9 aa, synthetic construct
  REGION 1..9: note = Description of Artificial Sequence: Synthetic peptide
THDVSSAIN

SEQ ID NO: 7887 - protein, 10 aa, synthetic construct
  REGION 1..10: note = Description of Artificial Sequence: Synthetic peptide
THHWLLLTIL

SEQ ID NO: 7888 - protein, 12 aa, synthetic construct
  REGION 1..12: note = Description of Artificial Sequence: Synthetic peptide
THSDKFTDGVCL

SEQ ID NO: 7889 - protein, 9 aa, synthetic construct
  REGION 1..9: note = Description of Artificial Sequence: Synthetic peptide
THTGTGQAI

SEQ ID NO: 7890 - protein, 11 aa, synthetic construct
  REGION 1..11: note = Description of Artificial Sequence: Synthetic peptide
THTGTGQAITV

SEQ ID NO: 7891 - protein, 10 aa, synthetic construct
  REGION 1..10: note = Description of Artificial Sequence: Synthetic peptide
THVQLSLPVL

SEQ ID NO: 7892 - protein, 9 aa, synthetic construct
  REGION 1..9: note = Description of Artificial Sequence: Synthetic peptide
TIDGSSGVV

SEQ ID NO: 7893 - protein, 9 aa, synthetic construct
  REGION 1..9: note = Description of Artificial Sequence: Synthetic peptide
TIFKDASGK

SEQ ID NO: 7894 - protein, 8 aa, synthetic construct
  REGION 1..8: note = Description of Artificial Sequence: Synthetic peptide
TISLAGSY

SEQ ID NO: 7895 - protein, 9 aa, synthetic construct
  REGION 1..9: note = Description of Artificial Sequence: Synthetic peptide
TISLAGSYK

SEQ ID NO: 7896 - protein, 9 aa, synthetic construct
  REGION 1..9: note = Description of Artificial Sequence: Synthetic peptide
TITQMNLKY

SEQ ID NO: 7897 - protein, 9 aa, synthetic construct
  REGION 1..9: note = Description of Artificial Sequence: Synthetic peptide
TITVNVLAW

SEQ ID NO: 7898 - protein, 8 aa, synthetic construct
  REGION 1..8: note = Description of Artificial Sequence: Synthetic peptide
TKDVVECL

SEQ ID NO: 7899 - protein, 8 aa, synthetic construct
  REGION 1..8: note = Description of Artificial Sequence: Synthetic peptide
TKHPNQEY

SEQ ID NO: 7900 - protein, 9 aa, synthetic construct
  REGION 1..9: note = Description of Artificial Sequence: Synthetic peptide
TKPYIKWDL

SEQ ID NO: 7901 - protein, 10 aa, synthetic construct
  REGION 1..10: note = Description of Artificial Sequence: Synthetic peptide
TKVDGVDVEL

SEQ ID NO: 7902 - protein, 9 aa, synthetic construct
  REGION 1..9: note = Description of Artificial Sequence: Synthetic peptide
TLADAGFIK

SEQ ID NO: 7903 - protein, 11 aa, synthetic construct
  REGION 1..11: note = Description of Artificial Sequence: Synthetic peptide
TLADAGFIKQY

SEQ ID NO: 7904 - protein, 10 aa, synthetic construct
  REGION 1..10: note = Description of Artificial Sequence: Synthetic peptide
TLEPEYFNSV

SEQ ID NO: 7905 - protein, 8 aa, synthetic construct
  REGION 1..8: note = Description of Artificial Sequence: Synthetic peptide
TLIVNSVL

SEQ ID NO: 7906 - protein, 9 aa, synthetic construct
  REGION 1..9: note = Description of Artificial Sequence: Synthetic peptide
TLKATEETF

SEQ ID NO: 7907 - protein, 10 aa, synthetic construct
  REGION 1..10: note = Description of Artificial Sequence: Synthetic peptide
TLKKRWQLAL

SEQ ID NO: 7908 - protein, 9 aa, synthetic construct
  REGION 1..9: note = Description of Artificial Sequence: Synthetic peptide
TLLSLREVR

SEQ ID NO: 7909 - protein, 10 aa, synthetic construct
  REGION 1..10: note = Description of Artificial Sequence: Synthetic peptide
TLNGLWLDDV

SEQ ID NO: 7910 - protein, 10 aa, synthetic construct
  REGION 1..10: note = Description of Artificial Sequence: Synthetic peptide
TLQAENVTGL

SEQ ID NO: 7911 - protein, 9 aa, synthetic construct
  REGION 1..9: note = Description of Artificial Sequence: Synthetic peptide
TLSYEQFKK

SEQ ID NO: 7912 - protein, 9 aa, synthetic construct
  REGION 1..9: note = Description of Artificial Sequence: Synthetic peptide
TLVFLFVAA

SEQ ID NO: 7913 - protein, 10 aa, synthetic construct
  REGION 1..10: note = Description of Artificial Sequence: Synthetic peptide
TMCDIRQLLF

SEQ ID NO: 7914 - protein, 9 aa, synthetic construct
  REGION 1..9: note = Description of Artificial Sequence: Synthetic peptide
TNNLVVMAY

SEQ ID NO: 7915 - protein, 9 aa, synthetic construct
  REGION 1..9: note = Description of Artificial Sequence: Synthetic peptide
TPLVPFWIT

SEQ ID NO: 7916 - protein, 10 aa, synthetic construct
  REGION 1..10: note = Description of Artificial Sequence: Synthetic peptide
TPLVPFWITI

SEQ ID NO: 7917 - protein, 9 aa, synthetic construct
  REGION 1..9: note = Description of Artificial Sequence: Synthetic peptide
TPTWRVYST

SEQ ID NO: 7918 - protein, 8 aa, synthetic construct
  REGION 1..8: note = Description of Artificial Sequence: Synthetic peptide
TQLGIEFL

SEQ ID NO: 7919 - protein, 9 aa, synthetic construct
  REGION 1..9: note = Description of Artificial Sequence: Synthetic peptide
TQLGIEFLK

SEQ ID NO: 7920 - protein, 10 aa, synthetic construct
  REGION 1..10: note = Description of Artificial Sequence: Synthetic peptide
TQVVDMSMTY

SEQ ID NO: 7921 - protein, 10 aa, synthetic construct
  REGION 1..10: note = Description of Artificial Sequence: Synthetic peptide
TQWSLFFFLY

SEQ ID NO: 7922 - protein, 9 aa, synthetic construct
  REGION 1..9: note = Description of Artificial Sequence: Synthetic peptide
TRAKVGILC

SEQ ID NO: 7923 - protein, 9 aa, synthetic construct
  REGION 1..9: note = Description of Artificial Sequence: Synthetic peptide
TREEAIRHV

SEQ ID NO: 7924 - protein, 9 aa, synthetic construct
  REGION 1..9: note = Description of Artificial Sequence: Synthetic peptide
TRLQSLENV

SEQ ID NO: 7925 - protein, 8 aa, synthetic construct
  REGION 1..8: note = Description of Artificial Sequence: Synthetic peptide
TRQVVNVV

SEQ ID NO: 7926 - protein, 8 aa, synthetic construct
  REGION 1..8: note = Description of Artificial Sequence: Synthetic peptide
TRVECTTI

SEQ ID NO: 7927 - protein, 9 aa, synthetic construct
  REGION 1..9: note = Description of Artificial Sequence: Synthetic peptide
TRVECTTIV

SEQ ID NO: 7928 - protein, 8 aa, synthetic construct
  REGION 1..8: note = Description of Artificial Sequence: Synthetic peptide
TSAFVETV

SEQ ID NO: 7929 - protein, 9 aa, synthetic construct
  REGION 1..9: note = Description of Artificial Sequence: Synthetic peptide
TSAMQTMLF

SEQ ID NO: 7930 - protein, 10 aa, synthetic construct
  REGION 1..10: note = Description of Artificial Sequence: Synthetic peptide
TSDLATNNLV

SEQ ID NO: 7931 - protein, 10 aa, synthetic construct
  REGION 1..10: note = Description of Artificial Sequence: Synthetic peptide
TSFGPLVRKI

SEQ ID NO: 7932 - protein, 8 aa, synthetic construct
  REGION 1..8: note = Description of Artificial Sequence: Synthetic peptide
TSLEIPRR

SEQ ID NO: 7933 - protein, 8 aa, synthetic construct
  REGION 1..8: note = Description of Artificial Sequence: Synthetic peptide
TSNSFDVL

SEQ ID NO: 7934 - protein, 9 aa, synthetic construct
  REGION 1..9: note = Description of Artificial Sequence: Synthetic peptide
TSPISEHDY

SEQ ID NO: 7935 - protein, 10 aa, synthetic construct
  REGION 1..10: note = Description of Artificial Sequence: Synthetic peptide
TSSGDATTAY

SEQ ID NO: 7936 - protein, 8 aa, synthetic construct
  REGION 1..8: note = Description of Artificial Sequence: Synthetic peptide
TSTDVVYR

SEQ ID NO: 7937 - protein, 9 aa, synthetic construct
  REGION 1..9: note = Description of Artificial Sequence: Synthetic peptide
TSVDCTMYI

SEQ ID NO: 7938 - protein, 8 aa, synthetic construct
  REGION 1..8: note = Description of Artificial Sequence: Synthetic peptide
TSVVLLSV

SEQ ID NO: 7939 - protein, 9 aa, synthetic construct
  REGION 1..9: note = Description of Artificial Sequence: Synthetic peptide
TTCCSLSHR

SEQ ID NO: 7940 - protein, 9 aa, synthetic construct
  REGION 1..9: note = Description of Artificial Sequence: Synthetic peptide
TTCFSVAAL

SEQ ID NO: 7941 - protein, 10 aa, synthetic construct
  REGION 1..10: note = Description of Artificial Sequence: Synthetic peptide
TTFTYASALW

SEQ ID NO: 7942 - protein, 9 aa, synthetic construct
  REGION 1..9: note = Description of Artificial Sequence: Synthetic peptide
TTIAKNTVK

SEQ ID NO: 7943 - protein, 10 aa, synthetic construct
  REGION 1..10: note = Description of Artificial Sequence: Synthetic peptide
TTIKPVTYKL

SEQ ID NO: 7944 - protein, 10 aa, synthetic construct
  REGION 1..10: note = Description of Artificial Sequence: Synthetic peptide
TTLDSKTQSL

SEQ ID NO: 7945 - protein, 8 aa, synthetic construct
  REGION 1..8: note = Description of Artificial Sequence: Synthetic peptide
TTLEETKF

SEQ ID NO: 7946 - protein, 8 aa, synthetic construct
  REGION 1..8: note = Description of Artificial Sequence: Synthetic peptide
TTLNGLWL

SEQ ID NO: 7947 - protein, 9 aa, synthetic construct
  REGION 1..9: note = Description of Artificial Sequence: Synthetic peptide
TTTLEETKF

SEQ ID NO: 7948 - protein, 8 aa, synthetic construct
  REGION 1..8: note = Description of Artificial Sequence: Synthetic peptide
TTVDNINL

SEQ ID NO: 7949 - protein, 10 aa, synthetic construct
  REGION 1..10: note = Description of Artificial Sequence: Synthetic peptide
TTYKLNVGDY

SEQ ID NO: 7950 - protein, 10 aa, synthetic construct
  REGION 1..10: note = Description of Artificial Sequence: Synthetic peptide
TVCTVCGMWK

SEQ ID NO: 7951 - protein, 10 aa, synthetic construct
  REGION 1..10: note = Description of Artificial Sequence: Synthetic peptide
TVEEAKTVLK

SEQ ID NO: 7952 - protein, 8 aa, synthetic construct
  REGION 1..8: note = Description of Artificial Sequence: Synthetic peptide
TVELGTEV

SEQ ID NO: 7953 - protein, 9 aa, synthetic construct
  REGION 1..9: note = Description of Artificial Sequence: Synthetic peptide
TVFFDGRVD

SEQ ID NO: 7954 - protein, 10 aa, synthetic construct
  REGION 1..10: note = Description of Artificial Sequence: Synthetic peptide
TVMPLSAPTL

SEQ ID NO: 7955 - protein, 8 aa, synthetic construct
  REGION 1..8: note = Description of Artificial Sequence: Synthetic peptide
TVNVLAWL

SEQ ID NO: 7956 - protein, 9 aa, synthetic construct
  REGION 1..9: note = Description of Artificial Sequence: Synthetic peptide
TVQFCDAMR

SEQ ID NO: 7957 - protein, 11 aa, synthetic construct
  REGION 1..11: note = Description of Artificial Sequence: Synthetic peptide
TVYDDGARRVW

SEQ ID NO: 7958 - protein, 9 aa, synthetic construct
  REGION 1..9: note = Description of Artificial Sequence: Synthetic peptide
TVYDPLQPE

SEQ ID NO: 7959 - protein, 10 aa, synthetic construct
  REGION 1..10: note = Description of Artificial Sequence: Synthetic peptide
TVYSHLLLVA

SEQ ID NO: 7960 - protein, 9 aa, synthetic construct
  REGION 1..9: note = Description of Artificial Sequence: Synthetic peptide
TVYTKVDGV

SEQ ID NO: 7961 - protein, 10 aa, synthetic construct
  REGION 1..10: note = Description of Artificial Sequence: Synthetic peptide
TWFSQRGGSY

SEQ ID NO: 7962 - protein, 8 aa, synthetic construct
  REGION 1..8: note = Description of Artificial Sequence: Synthetic peptide
TWICLLQF

SEQ ID NO: 7963 - protein, 9 aa, synthetic construct
  REGION 1..9: note = Description of Artificial Sequence: Synthetic peptide
TYASALWEI

SEQ ID NO: 7964 - protein, 8 aa, synthetic construct
  REGION 1..8: note = Description of Artificial Sequence: Synthetic peptide
TYEGNSPF

SEQ ID NO: 7965 - protein, 9 aa, synthetic construct
  REGION 1..9: note = Description of Artificial Sequence: Synthetic peptide
TYICGFIQQ

SEQ ID NO: 7966 - protein, 9 aa, synthetic construct
  REGION 1..9: note = Description of Artificial Sequence: Synthetic peptide
TYKLNVGDY

SEQ ID NO: 7967 - protein, 10 aa, synthetic construct
  REGION 1..10: note = Description of Artificial Sequence: Synthetic peptide
TYLDGADVTK

SEQ ID NO: 7968 - protein, 10 aa, synthetic construct
  REGION 1..10: note = Description of Artificial Sequence: Synthetic peptide
TYLEGSVRVV

SEQ ID NO: 7969 - protein, 8 aa, synthetic construct
  REGION 1..8: note = Description of Artificial Sequence: Synthetic peptide
TYNKVENM

SEQ ID NO: 7970 - protein, 10 aa, synthetic construct
  REGION 1..10: note = Description of Artificial Sequence: Synthetic peptide
TYNLWNTFTR

SEQ ID NO: 7971 - protein, 8 aa, synthetic construct
  REGION 1..8: note = Description of Artificial Sequence: Synthetic peptide
TYRRLISM

SEQ ID NO: 7972 - protein, 10 aa, synthetic construct
  REGION 1..10: note = Description of Artificial Sequence: Synthetic peptide
VAALTNNVAF

SEQ ID NO: 7973 - protein, 9 aa, synthetic construct
  REGION 1..9: note = Description of Artificial Sequence: Synthetic peptide
VAFNVVNKG

SEQ ID NO: 7974 - protein, 8 aa, synthetic construct
  REGION 1..8: note = Description of Artificial Sequence: Synthetic peptide
VAITRAKV

SEQ ID NO: 7975 - protein, 10 aa, synthetic construct
  REGION 1..10: note = Description of Artificial Sequence: Synthetic peptide
VAKYTQLCQY

SEQ ID NO: 7976 - protein, 8 aa, synthetic construct
  REGION 1..8: note = Description of Artificial Sequence: Synthetic peptide
VANGDSEV

SEQ ID NO: 7977 - protein, 9 aa, synthetic construct
  REGION 1..9: note = Description of Artificial Sequence: Synthetic peptide
VAYESLRPD

SEQ ID NO: 7978 - protein, 8 aa, synthetic construct
  REGION 1..8: note = Description of Artificial Sequence: Synthetic peptide
VAYSNNSI

SEQ ID NO: 7979 - protein, 9 aa, synthetic construct
  REGION 1..9: note = Description of Artificial Sequence: Synthetic peptide
VCTEIDPKL

SEQ ID NO: 7980 - protein, 10 aa, synthetic construct
  REGION 1..10: note = Description of Artificial Sequence: Synthetic peptide
VDDPCPIHFY

SEQ ID NO: 7981 - protein, 9 aa, synthetic construct
  REGION 1..9: note = Description of Artificial Sequence: Synthetic peptide
VDILGPLSA

SEQ ID NO: 7982 - protein, 8 aa, synthetic construct
  REGION 1..8: note = Description of Artificial Sequence: Synthetic peptide
VDYGARFY

SEQ ID NO: 7983 - protein, 8 aa, synthetic construct
  REGION 1..8: note = Description of Artificial Sequence: Synthetic peptide
VEGCMVQV

SEQ ID NO: 7984 - protein, 8 aa, synthetic construct
  REGION 1..8: note = Description of Artificial Sequence: Synthetic peptide
VEHVTFFI

SEQ ID NO: 7985 - protein, 9 aa, synthetic construct
  REGION 1..9: note = Description of Artificial Sequence: Synthetic peptide
VEHVTFFIY

SEQ ID NO: 7986 - protein, 9 aa, synthetic construct
  REGION 1..9: note = Description of Artificial Sequence: Synthetic peptide
VEKKKLDGF

SEQ ID NO: 7987 - protein, 9 aa, synthetic construct
  REGION 1..9: note = Description of Artificial Sequence: Synthetic peptide
VELKHFFFA

SEQ ID NO: 7988 - protein, 10 aa, synthetic construct
  REGION 1..10: note = Description of Artificial Sequence: Synthetic peptide
VEQDKNTQEV

SEQ ID NO: 7989 - protein, 9 aa, synthetic construct
  REGION 1..9: note = Description of Artificial Sequence: Synthetic peptide
VEQKIAEIP

SEQ ID NO: 7990 - protein, 9 aa, synthetic construct
  REGION 1..9: note = Description of Artificial Sequence: Synthetic peptide
VESSSKLWA

SEQ ID NO: 7991 - protein, 9 aa, synthetic construct
  REGION 1..9: note = Description of Artificial Sequence: Synthetic peptide
VETSNSFDV

SEQ ID NO: 7992 - protein, 10 aa, synthetic construct
  REGION 1..10: note = Description of Artificial Sequence: Synthetic peptide
VEWKFYDAQP

SEQ ID NO: 7993 - protein, 9 aa, synthetic construct
  REGION 1..9: note = Description of Artificial Sequence: Synthetic peptide
VFAQVKQIY

SEQ ID NO: 7994 - protein, 8 aa, synthetic construct
  REGION 1..8: note = Description of Artificial Sequence: Synthetic peptide
VFCGVDAV

SEQ ID NO: 7995 - protein, 8 aa, synthetic construct
  REGION 1..8: note = Description of Artificial Sequence: Synthetic peptide
VFCTVNAL

SEQ ID NO: 7996 - protein, 11 aa, synthetic construct
  REGION 1..11: note = Description of Artificial Sequence: Synthetic peptide
VFDEISMATNY

SEQ ID NO: 7997 - protein, 8 aa, synthetic construct
  REGION 1..8: note = Description of Artificial Sequence: Synthetic peptide
VFHLYLQY

SEQ ID NO: 7998 - protein, 8 aa, synthetic construct
  REGION 1..8: note = Description of Artificial Sequence: Synthetic peptide
VFKNIDGY

SEQ ID NO: 7999 - protein, 8 aa, synthetic construct
  REGION 1..8: note = Description of Artificial Sequence: Synthetic peptide
VFLFVAAI

SEQ ID NO: 8000 - protein, 10 aa, synthetic construct
  REGION 1..10: note = Description of Artificial Sequence: Synthetic peptide
VFLLVTLAIL

SEQ ID NO: 8001 - protein, 8 aa, synthetic construct
  REGION 1..8: note = Description of Artificial Sequence: Synthetic peptide
VFPLNSII

SEQ ID NO: 8002 - protein, 8 aa, synthetic construct
  REGION 1..8: note = Description of Artificial Sequence: Synthetic peptide
VFPPTSFG

SEQ ID NO: 8003 - protein, 11 aa, synthetic construct
  REGION 1..11: note = Description of Artificial Sequence: Synthetic peptide
VFQSASKIITL

SEQ ID NO: 8004 - protein, 9 aa, synthetic construct
  REGION 1..9: note = Description of Artificial Sequence: Synthetic peptide
VFQTRAGCL

SEQ ID NO: 8005 - protein, 10 aa, synthetic construct
  REGION 1..10: note = Description of Artificial Sequence: Synthetic peptide
VFTTVDNINL

SEQ ID NO: 8006 - protein, 9 aa, synthetic construct
  REGION 1..9: note = Description of Artificial Sequence: Synthetic peptide
VGSDNVTDF

SEQ ID NO: 8007 - protein, 8 aa, synthetic construct
  REGION 1..8: note = Description of Artificial Sequence: Synthetic peptide
VHFVCNLL

SEQ ID NO: 8008 - protein, 9 aa, synthetic construct
  REGION 1..9: note = Description of Artificial Sequence: Synthetic peptide
VHFVCNLLL

SEQ ID NO: 8009 - protein, 8 aa, synthetic construct
  REGION 1..8: note = Description of Artificial Sequence: Synthetic peptide
VHNQDVNL

SEQ ID NO: 8010 - protein, 9 aa, synthetic construct
  REGION 1..9: note = Description of Artificial Sequence: Synthetic peptide
VIAWNSNNL

SEQ ID NO: 8011 - protein, 9 aa, synthetic construct
  REGION 1..9: note = Description of Artificial Sequence: Synthetic peptide
VILRGHLRI

SEQ ID NO: 8012 - protein, 11 aa, synthetic construct
  REGION 1..11: note = Description of Artificial Sequence: Synthetic peptide
VINGDRWFLNR

SEQ ID NO: 8013 - protein, 9 aa, synthetic construct
  REGION 1..9: note = Description of Artificial Sequence: Synthetic peptide
VIVFDGKSK

SEQ ID NO: 8014 - protein, 10 aa, synthetic construct
  REGION 1..10: note = Description of Artificial Sequence: Synthetic peptide
VKDCVVLHSY

SEQ ID NO: 8015 - protein, 9 aa, synthetic construct
  REGION 1..9: note = Description of Artificial Sequence: Synthetic peptide
VKQGDDYVY

SEQ ID NO: 8016 - protein, 10 aa, synthetic construct
  REGION 1..10: note = Description of Artificial Sequence: Synthetic peptide
VKRVDWTIEY

SEQ ID NO: 8017 - protein, 9 aa, synthetic construct
  REGION 1..9: note = Description of Artificial Sequence: Synthetic peptide
VLAAECTIF

SEQ ID NO: 8018 - protein, 9 aa, synthetic construct
  REGION 1..9: note = Description of Artificial Sequence: Synthetic peptide
VLHSTQDLF

SEQ ID NO: 8019 - protein, 10 aa, synthetic construct
  REGION 1..10: note = Description of Artificial Sequence: Synthetic peptide
VLHSYFTSDY

SEQ ID NO: 8020 - protein, 9 aa, synthetic construct
  REGION 1..9: note = Description of Artificial Sequence: Synthetic peptide
VLITEGSVK

SEQ ID NO: 8021 - protein, 9 aa, synthetic construct
  REGION 1..9: note = Description of Artificial Sequence: Synthetic peptide
VLKKCKSAF

SEQ ID NO: 8022 - protein, 9 aa, synthetic construct
  REGION 1..9: note = Description of Artificial Sequence: Synthetic peptide
VLLFLAFVV

SEQ ID NO: 8023 - protein, 9 aa, synthetic construct
  REGION 1..9: note = Description of Artificial Sequence: Synthetic peptide
VLLILMTAR

SEQ ID NO: 8024 - protein, 10 aa, synthetic construct
  REGION 1..10: note = Description of Artificial Sequence: Synthetic peptide
VLLSVLQQLR

SEQ ID NO: 8025 - protein, 10 aa, synthetic construct
  REGION 1..10: note = Description of Artificial Sequence: Synthetic peptide
VLNNDYYRSL

SEQ ID NO: 8026 - protein, 8 aa, synthetic construct
  REGION 1..8: note = Description of Artificial Sequence: Synthetic peptide
VLPNDDTL

SEQ ID NO: 8027 - protein, 9 aa, synthetic construct
  REGION 1..9: note = Description of Artificial Sequence: Synthetic peptide
VLPNDDTLR

SEQ ID NO: 8028 - protein, 10 aa, synthetic construct
  REGION 1..10: note = Description of Artificial Sequence: Synthetic peptide
VLPNDDTLRV

SEQ ID NO: 8029 - protein, 8 aa, synthetic construct
  REGION 1..8: note = Description of Artificial Sequence: Synthetic peptide
VLPPLLTD

SEQ ID NO: 8030 - protein, 9 aa, synthetic construct
  REGION 1..9: note = Description of Artificial Sequence: Synthetic peptide
VLPQLEQPY

SEQ ID NO: 8031 - protein, 9 aa, synthetic construct
  REGION 1..9: note = Description of Artificial Sequence: Synthetic peptide
VLQAVGACV

SEQ ID NO: 8032 - protein, 9 aa, synthetic construct
  REGION 1..9: note = Description of Artificial Sequence: Synthetic peptide
VLQKAAITI

SEQ ID NO: 8033 - protein, 9 aa, synthetic construct
  REGION 1..9: note = Description of Artificial Sequence: Synthetic peptide
VLQVRDVLV

SEQ ID NO: 8034 - protein, 9 aa, synthetic construct
  REGION 1..9: note = Description of Artificial Sequence: Synthetic peptide
VLSFELLHA

SEQ ID NO: 8035 - protein, 9 aa, synthetic construct
  REGION 1..9: note = Description of Artificial Sequence: Synthetic peptide
VLSTFISAA

SEQ ID NO: 8036 - protein, 9 aa, synthetic construct
  REGION 1..9: note = Description of Artificial Sequence: Synthetic peptide
VLYQPPQTS

SEQ ID NO: 8037 - protein, 8 aa, synthetic construct
  REGION 1..8: note = Description of Artificial Sequence: Synthetic peptide
VMCGGSLY

SEQ ID NO: 8038 - protein, 8 aa, synthetic construct
  REGION 1..8: note = Description of Artificial Sequence: Synthetic peptide
VMFLARGI

SEQ ID NO: 8039 - protein, 8 aa, synthetic construct
  REGION 1..8: note = Description of Artificial Sequence: Synthetic peptide
VPFWITIA

SEQ ID NO: 8040 - protein, 9 aa, synthetic construct
  REGION 1..9: note = Description of Artificial Sequence: Synthetic peptide
VPNQPYPNA

SEQ ID NO: 8041 - protein, 8 aa, synthetic construct
  REGION 1..8: note = Description of Artificial Sequence: Synthetic peptide
VPQADVEW

SEQ ID NO: 8042 - protein, 10 aa, synthetic construct
  REGION 1..10: note = Description of Artificial Sequence: Synthetic peptide
VPVSIINNTV

SEQ ID NO: 8043 - protein, 9 aa, synthetic construct
  REGION 1..9: note = Description of Artificial Sequence: Synthetic peptide
VQIDRLITG

SEQ ID NO: 8044 - protein, 9 aa, synthetic construct
  REGION 1..9: note = Description of Artificial Sequence: Synthetic peptide
VQLHNDILL

SEQ ID NO: 8045 - protein, 9 aa, synthetic construct
  REGION 1..9: note = Description of Artificial Sequence: Synthetic peptide
VQQESPFVM

SEQ ID NO: 8046 - protein, 8 aa, synthetic construct
  REGION 1..8: note = Description of Artificial Sequence: Synthetic peptide
VQQLPETY

SEQ ID NO: 8047 - protein, 9 aa, synthetic construct
  REGION 1..9: note = Description of Artificial Sequence: Synthetic peptide
VQQLPETYF

SEQ ID NO: 8048 - protein, 9 aa, synthetic construct
  REGION 1..9: note = Description of Artificial Sequence: Synthetic peptide
VRAWIGFDV

SEQ ID NO: 8049 - protein, 9 aa, synthetic construct
  REGION 1..9: note = Description of Artificial Sequence: Synthetic peptide
VRCSFYEDF

SEQ ID NO: 8050 - protein, 9 aa, synthetic construct
  REGION 1..9: note = Description of Artificial Sequence: Synthetic peptide
VRETMSYLF

SEQ ID NO: 8051 - protein, 8 aa, synthetic construct
  REGION 1..8: note = Description of Artificial Sequence: Synthetic peptide
VRIKIVQM

SEQ ID NO: 8052 - protein, 9 aa, synthetic construct
  REGION 1..9: note = Description of Artificial Sequence: Synthetic peptide
VRTNVYLAV

SEQ ID NO: 8053 - protein, 8 aa, synthetic construct
  REGION 1..8: note = Description of Artificial Sequence: Synthetic peptide
VSCLPFTI

SEQ ID NO: 8054 - protein, 10 aa, synthetic construct
  REGION 1..10: note = Description of Artificial Sequence: Synthetic peptide
VSDIDITFLK

SEQ ID NO: 8055 - protein, 11 aa, synthetic construct
  REGION 1..11: note = Description of Artificial Sequence: Synthetic peptide
VSDIDITFLKK

SEQ ID NO: 8056 - protein, 9 aa, synthetic construct
  REGION 1..9: note = Description of Artificial Sequence: Synthetic peptide
VSDVGDSAE

SEQ ID NO: 8057 - protein, 9 aa, synthetic construct
  REGION 1..9: note = Description of Artificial Sequence: Synthetic peptide
VSGTNGTKR

SEQ ID NO: 8058 - protein, 9 aa, synthetic construct
  REGION 1..9: note = Description of Artificial Sequence: Synthetic peptide
VSNGTHWFV

SEQ ID NO: 8059 - protein, 8 aa, synthetic construct
  REGION 1..8: note = Description of Artificial Sequence: Synthetic peptide
VSTSGRWV

SEQ ID NO: 8060 - protein, 9 aa, synthetic construct
  REGION 1..9: note = Description of Artificial Sequence: Synthetic peptide
VSWNLREML

SEQ ID NO: 8061 - protein, 9 aa, synthetic construct
  REGION 1..9: note = Description of Artificial Sequence: Synthetic peptide
VTDFNAIAT

SEQ ID NO: 8062 - protein, 10 aa, synthetic construct
  REGION 1..10: note = Description of Artificial Sequence: Synthetic peptide
VTDTPKGPKV

SEQ ID NO: 8063 - protein, 8 aa, synthetic construct
  REGION 1..8: note = Description of Artificial Sequence: Synthetic peptide
VTHSKGLY

SEQ ID NO: 8064 - protein, 9 aa, synthetic construct
  REGION 1..9: note = Description of Artificial Sequence: Synthetic peptide
VTLLPAADL

SEQ ID NO: 8065 - protein, 9 aa, synthetic construct
  REGION 1..9: note = Description of Artificial Sequence: Synthetic peptide
VTMPLGYVT

SEQ ID NO: 8066 - protein, 10 aa, synthetic construct
  REGION 1..10: note = Description of Artificial Sequence: Synthetic peptide
VTMPLGYVTH

SEQ ID NO: 8067 - protein, 11 aa, synthetic construct
  REGION 1..11: note = Description of Artificial Sequence: Synthetic peptide
VTQLYLGGMSY

SEQ ID NO: 8068 - protein, 9 aa, synthetic construct
  REGION 1..9: note = Description of Artificial Sequence: Synthetic peptide
VTRDIASTD

SEQ ID NO: 8069 - protein, 8 aa, synthetic construct
  REGION 1..8: note = Description of Artificial Sequence: Synthetic peptide
VTTEILPV

SEQ ID NO: 8070 - protein, 8 aa, synthetic construct
  REGION 1..8: note = Description of Artificial Sequence: Synthetic peptide
VTVYSHLL

SEQ ID NO: 8071 - protein, 9 aa, synthetic construct
  REGION 1..9: note = Description of Artificial Sequence: Synthetic peptide
VVDADSKIV

SEQ ID NO: 8072 - protein, 11 aa, synthetic construct
  REGION 1..11: note = Description of Artificial Sequence: Synthetic peptide
VVDADSKIVQL

SEQ ID NO: 8073 - protein, 8 aa, synthetic construct
  REGION 1..8: note = Description of Artificial Sequence: Synthetic peptide
VVDDPCPI

SEQ ID NO: 8074 - protein, 9 aa, synthetic construct
  REGION 1..9: note = Description of Artificial Sequence: Synthetic peptide
VVDDPCPIH

SEQ ID NO: 8075 - protein, 10 aa, synthetic construct
  REGION 1..10: note = Description of Artificial Sequence: Synthetic peptide
VVDYGARFYF

SEQ ID NO: 8076 - protein, 8 aa, synthetic construct
  REGION 1..8: note = Description of Artificial Sequence: Synthetic peptide
VVFDEISM

SEQ ID NO: 8077 - protein, 9 aa, synthetic construct
  REGION 1..9: note = Description of Artificial Sequence: Synthetic peptide
VVFLLVTLA

SEQ ID NO: 8078 - protein, 11 aa, synthetic construct
  REGION 1..11: note = Description of Artificial Sequence: Synthetic peptide
VVFNGVSFSTF

SEQ ID NO: 8079 - protein, 10 aa, synthetic construct
  REGION 1..10: note = Description of Artificial Sequence: Synthetic peptide
VVIPDYNTYK

SEQ ID NO: 8080 - protein, 10 aa, synthetic construct
  REGION 1..10: note = Description of Artificial Sequence: Synthetic peptide
VVKRHTFSNY

SEQ ID NO: 8081 - protein, 10 aa, synthetic construct
  REGION 1..10: note = Description of Artificial Sequence: Synthetic peptide
VVLLILMTAR

SEQ ID NO: 8082 - protein, 9 aa, synthetic construct
  REGION 1..9: note = Description of Artificial Sequence: Synthetic peptide
VVLSFELLH

SEQ ID NO: 8083 - protein, 8 aa, synthetic construct
  REGION 1..8: note = Description of Artificial Sequence: Synthetic peptide
VVNAANVY

SEQ ID NO: 8084 - protein, 9 aa, synthetic construct
  REGION 1..9: note = Description of Artificial Sequence: Synthetic peptide
VVNARLRAK

SEQ ID NO: 8085 - protein, 10 aa, synthetic construct
  REGION 1..10: note = Description of Artificial Sequence: Synthetic peptide
VVNPVMEPIY

SEQ ID NO: 8086 - protein, 9 aa, synthetic construct
  REGION 1..9: note = Description of Artificial Sequence: Synthetic peptide
VVNVVTTKI

SEQ ID NO: 8087 - protein, 9 aa, synthetic construct
  REGION 1..9: note = Description of Artificial Sequence: Synthetic peptide
VVPGLPGTI

SEQ ID NO: 8088 - protein, 8 aa, synthetic construct
  REGION 1..8: note = Description of Artificial Sequence: Synthetic peptide
VVREFLTR

SEQ ID NO: 8089 - protein, 10 aa, synthetic construct
  REGION 1..10: note = Description of Artificial Sequence: Synthetic peptide
VVRQCSGVTF

SEQ ID NO: 8090 - protein, 8 aa, synthetic construct
  REGION 1..8: note = Description of Artificial Sequence: Synthetic peptide
VVRSIFSR

SEQ ID NO: 8091 - protein, 10 aa, synthetic construct
  REGION 1..10: note = Description of Artificial Sequence: Synthetic peptide
VVRSIFSRTL

SEQ ID NO: 8092 - protein, 8 aa, synthetic construct
  REGION 1..8: note = Description of Artificial Sequence: Synthetic peptide
VVYCPRHV

SEQ ID NO: 8093 - protein, 9 aa, synthetic construct
  REGION 1..9: note = Description of Artificial Sequence: Synthetic peptide
VVYCPRHVI

SEQ ID NO: 8094 - protein, 8 aa, synthetic construct
  REGION 1..8: note = Description of Artificial Sequence: Synthetic peptide
VYAADPAM

SEQ ID NO: 8095 - protein, 9 aa, synthetic construct
  REGION 1..9: note = Description of Artificial Sequence: Synthetic peptide
VYANLGERV

SEQ ID NO: 8096 - protein, 9 aa, synthetic construct
  REGION 1..9: note = Description of Artificial Sequence: Synthetic peptide
VYCPRHVIC

SEQ ID NO: 8097 - protein, 10 aa, synthetic construct
  REGION 1..10: note = Description of Artificial Sequence: Synthetic peptide
VYDDGARRVW

SEQ ID NO: 8098 - protein, 9 aa, synthetic construct
  REGION 1..9: note = Description of Artificial Sequence: Synthetic peptide
VYDNKLKAH

SEQ ID NO: 8099 - protein, 11 aa, synthetic construct
  REGION 1..11: note = Description of Artificial Sequence: Synthetic peptide
VYDYLVSTQEF

SEQ ID NO: 8100 - protein, 9 aa, synthetic construct
  REGION 1..9: note = Description of Artificial Sequence: Synthetic peptide
VYLAVFDKN

SEQ ID NO: 8101 - protein, 9 aa, synthetic construct
  REGION 1..9: note = Description of Artificial Sequence: Synthetic peptide
VYLKHGGGV

SEQ ID NO: 8102 - protein, 9 aa, synthetic construct
  REGION 1..9: note = Description of Artificial Sequence: Synthetic peptide
VYLPYPDPS

SEQ ID NO: 8103 - protein, 8 aa, synthetic construct
  REGION 1..8: note = Description of Artificial Sequence: Synthetic peptide
VYMPASWV

SEQ ID NO: 8104 - protein, 10 aa, synthetic construct
  REGION 1..10: note = Description of Artificial Sequence: Synthetic peptide
VYMPASWVMR

SEQ ID NO: 8105 - protein, 9 aa, synthetic construct
  REGION 1..9: note = Description of Artificial Sequence: Synthetic peptide
VYPVASPNE

SEQ ID NO: 8106 - protein, 10 aa, synthetic construct
  REGION 1..10: note = Description of Artificial Sequence: Synthetic peptide
VYPVASPNEC

SEQ ID NO: 8107 - protein, 9 aa, synthetic construct
  REGION 1..9: note = Description of Artificial Sequence: Synthetic peptide
VYQLRARSV

SEQ ID NO: 8108 - protein, 9 aa, synthetic construct
  REGION 1..9: note = Description of Artificial Sequence: Synthetic peptide
VYSDVENPH

SEQ ID NO: 8109 - protein, 11 aa, synthetic construct
  REGION 1..11: note = Description of Artificial Sequence: Synthetic peptide
VYSVIYLYLTF

SEQ ID NO: 8110 - protein, 9 aa, synthetic construct
  REGION 1..9: note = Description of Artificial Sequence: Synthetic peptide
VYYGNALDQ

SEQ ID NO: 8111 - protein, 10 aa, synthetic construct
  REGION 1..10: note = Description of Artificial Sequence: Synthetic peptide
VYYHKNNKSW

SEQ ID NO: 8112 - protein, 10 aa, synthetic construct
  REGION 1..10: note = Description of Artificial Sequence: Synthetic peptide
WAHGFELTSM

SEQ ID NO: 8113 - protein, 9 aa, synthetic construct
  REGION 1..9: note = Description of Artificial Sequence: Synthetic peptide
WAKRNIKPV

SEQ ID NO: 8114 - protein, 9 aa, synthetic construct
  REGION 1..9: note = Description of Artificial Sequence: Synthetic peptide
WEVGKPRPP

SEQ ID NO: 8115 - protein, 9 aa, synthetic construct
  REGION 1..9: note = Description of Artificial Sequence: Synthetic peptide
WFFSNYLKR

SEQ ID NO: 8116 - protein, 11 aa, synthetic construct
  REGION 1..11: note = Description of Artificial Sequence: Synthetic peptide
WFLAYILFTRF

SEQ ID NO: 8117 - protein, 9 aa, synthetic construct
  REGION 1..9: note = Description of Artificial Sequence: Synthetic peptide
WFLLLSVCL

SEQ ID NO: 8118 - protein, 10 aa, synthetic construct
  REGION 1..10: note = Description of Artificial Sequence: Synthetic peptide
WFLNRFTTTL

SEQ ID NO: 8119 - protein, 9 aa, synthetic construct
  REGION 1..9: note = Description of Artificial Sequence: Synthetic peptide
WHHSIGFDY

SEQ ID NO: 8120 - protein, 9 aa, synthetic construct
  REGION 1..9: note = Description of Artificial Sequence: Synthetic peptide
WLDDDSQQT

SEQ ID NO: 8121 - protein, 10 aa, synthetic construct
  REGION 1..10: note = Description of Artificial Sequence: Synthetic peptide
WLDDDSQQTV

SEQ ID NO: 8122 - protein, 10 aa, synthetic construct
  REGION 1..10: note = Description of Artificial Sequence: Synthetic peptide
WLKQLIKVTL

SEQ ID NO: 8123 - protein, 8 aa, synthetic construct
  REGION 1..8: note = Description of Artificial Sequence: Synthetic peptide
WLPTGTLL

SEQ ID NO: 8124 - protein, 10 aa, synthetic construct
  REGION 1..10: note = Description of Artificial Sequence: Synthetic peptide
WSYSGQSTQL

SEQ ID NO: 8125 - protein, 8 aa, synthetic construct
  REGION 1..8: note = Description of Artificial Sequence: Synthetic peptide
WVMRIMTW

SEQ ID NO: 8126 - protein, 9 aa, synthetic construct
  REGION 1..9: note = Description of Artificial Sequence: Synthetic peptide
WWTAFVTNV

SEQ ID NO: 8127 - protein, 10 aa, synthetic construct
  REGION 1..10: note = Description of Artificial Sequence: Synthetic peptide
YAADPAMHAA

SEQ ID NO: 8128 - protein, 10 aa, synthetic construct
  REGION 1..10: note = Description of Artificial Sequence: Synthetic peptide
YAAVINGDRW

SEQ ID NO: 8129 - protein, 9 aa, synthetic construct
  REGION 1..9: note = Description of Artificial Sequence: Synthetic peptide
YACWHHSIG

SEQ ID NO: 8130 - protein, 9 aa, synthetic construct
  REGION 1..9: note = Description of Artificial Sequence: Synthetic peptide
YAFASEAAR

SEQ ID NO: 8131 - protein, 10 aa, synthetic construct
  REGION 1..10: note = Description of Artificial Sequence: Synthetic peptide
YAFASEAARV

SEQ ID NO: 8132 - protein, 8 aa, synthetic construct
  REGION 1..8: note = Description of Artificial Sequence: Synthetic peptide
YAKPFLNK

SEQ ID NO: 8133 - protein, 10 aa, synthetic construct
  REGION 1..10: note = Description of Artificial Sequence: Synthetic peptide
YAKPFLNKVV

SEQ ID NO: 8134 - protein, 9 aa, synthetic construct
  REGION 1..9: note = Description of Artificial Sequence: Synthetic peptide
YALRHFDEG

SEQ ID NO: 8135 - protein, 9 aa, synthetic construct
  REGION 1..9: note = Description of Artificial Sequence: Synthetic peptide
YALVYFLQS

SEQ ID NO: 8136 - protein, 9 aa, synthetic construct
  REGION 1..9: note = Description of Artificial Sequence: Synthetic peptide
YANLGERVR

SEQ ID NO: 8137 - protein, 10 aa, synthetic construct
  REGION 1..10: note = Description of Artificial Sequence: Synthetic peptide
YANRNRFLYI

SEQ ID NO: 8138 - protein, 8 aa, synthetic construct
  REGION 1..8: note = Description of Artificial Sequence: Synthetic peptide
YANSVFNI

SEQ ID NO: 8139 - protein, 8 aa, synthetic construct
  REGION 1..8: note = Description of Artificial Sequence: Synthetic peptide
YATHSDKF

SEQ ID NO: 8140 - protein, 8 aa, synthetic construct
  REGION 1..8: note = Description of Artificial Sequence: Synthetic peptide
YCIPYNSV

SEQ ID NO: 8141 - protein, 9 aa, synthetic construct
  REGION 1..9: note = Description of Artificial Sequence: Synthetic peptide
YCQVHGNAH

SEQ ID NO: 8142 - protein, 8 aa, synthetic construct
  REGION 1..8: note = Description of Artificial Sequence: Synthetic peptide
YDDGARRV

SEQ ID NO: 8143 - protein, 8 aa, synthetic construct
  REGION 1..8: note = Description of Artificial Sequence: Synthetic peptide
YDFTEERL

SEQ ID NO: 8144 - protein, 9 aa, synthetic construct
  REGION 1..9: note = Description of Artificial Sequence: Synthetic peptide
YDKLQFTSL

SEQ ID NO: 8145 - protein, 8 aa, synthetic construct
  REGION 1..8: note = Description of Artificial Sequence: Synthetic peptide
YDKLVSSF

SEQ ID NO: 8146 - protein, 10 aa, synthetic construct
  REGION 1..10: note = Description of Artificial Sequence: Synthetic peptide
YDYLVSTQEF

SEQ ID NO: 8147 - protein, 8 aa, synthetic construct
  REGION 1..8: note = Description of Artificial Sequence: Synthetic peptide
YEDQDALF

SEQ ID NO: 8148 - protein, 9 aa, synthetic construct
  REGION 1..9: note = Description of Artificial Sequence: Synthetic peptide
YEKLKPVLD

SEQ ID NO: 8149 - protein, 8 aa, synthetic construct
  REGION 1..8: note = Description of Artificial Sequence: Synthetic peptide
YELKHGTF

SEQ ID NO: 8150 - protein, 8 aa, synthetic construct
  REGION 1..8: note = Description of Artificial Sequence: Synthetic peptide
YENAFLPF

SEQ ID NO: 8151 - protein, 10 aa, synthetic construct
  REGION 1..10: note = Description of Artificial Sequence: Synthetic peptide
YENAFLPFAM

SEQ ID NO: 8152 - protein, 8 aa, synthetic construct
  REGION 1..8: note = Description of Artificial Sequence: Synthetic peptide
YENQKLIA

SEQ ID NO: 8153 - protein, 11 aa, synthetic construct
  REGION 1..11: note = Description of Artificial Sequence: Synthetic peptide
YENQKLIANQF

SEQ ID NO: 8154 - protein, 10 aa, synthetic construct
  REGION 1..10: note = Description of Artificial Sequence: Synthetic peptide
YEQYIKWPWY

SEQ ID NO: 8155 - protein, 10 aa, synthetic construct
  REGION 1..10: note = Description of Artificial Sequence: Synthetic peptide
YESLRPDTRY

SEQ ID NO: 8156 - protein, 9 aa, synthetic construct
  REGION 1..9: note = Description of Artificial Sequence: Synthetic peptide
YEYGTEDDY

SEQ ID NO: 8157 - protein, 9 aa, synthetic construct
  REGION 1..9: note = Description of Artificial Sequence: Synthetic peptide
YFAVHFISN

SEQ ID NO: 8158 - protein, 9 aa, synthetic construct
  REGION 1..9: note = Description of Artificial Sequence: Synthetic peptide
YFKNHTSPD

SEQ ID NO: 8159 - protein, 9 aa, synthetic construct
  REGION 1..9: note = Description of Artificial Sequence: Synthetic peptide
YFLCWHTNC

SEQ ID NO: 8160 - protein, 10 aa, synthetic construct
  REGION 1..10: note = Description of Artificial Sequence: Synthetic peptide
YFLCWHTNCY

SEQ ID NO: 8161 - protein, 10 aa, synthetic construct
  REGION 1..10: note = Description of Artificial Sequence: Synthetic peptide
YFNKKDWYDF

SEQ ID NO: 8162 - protein, 8 aa, synthetic construct
  REGION 1..8: note = Description of Artificial Sequence: Synthetic peptide
YFNSVCRL

SEQ ID NO: 8163 - protein, 9 aa, synthetic construct
  REGION 1..9: note = Description of Artificial Sequence: Synthetic peptide
YFNSVCRLM

SEQ ID NO: 8164 - protein, 11 aa, synthetic construct
  REGION 1..11: note = Description of Artificial Sequence: Synthetic peptide
YFSGAMDTTSY

SEQ ID NO: 8165 - protein, 8 aa, synthetic construct
  REGION 1..8: note = Description of Artificial Sequence: Synthetic peptide
YFTQSRNL

SEQ ID NO: 8166 - protein, 9 aa, synthetic construct
  REGION 1..9: note = Description of Artificial Sequence: Synthetic peptide
YFVKIGPER

SEQ ID NO: 8167 - protein, 10 aa, synthetic construct
  REGION 1..10: note = Description of Artificial Sequence: Synthetic peptide
YFYTSKTTVA

SEQ ID NO: 8168 - protein, 9 aa, synthetic construct
  REGION 1..9: note = Description of Artificial Sequence: Synthetic peptide
YFYYLGTGP

SEQ ID NO: 8169 - protein, 8 aa, synthetic construct
  REGION 1..8: note = Description of Artificial Sequence: Synthetic peptide
YHFRELGV

SEQ ID NO: 8170 - protein, 9 aa, synthetic construct
  REGION 1..9: note = Description of Artificial Sequence: Synthetic peptide
YHNESGLKT

SEQ ID NO: 8171 - protein, 10 aa, synthetic construct
  REGION 1..10: note = Description of Artificial Sequence: Synthetic peptide
YHNESGLKTI

SEQ ID NO: 8172 - protein, 9 aa, synthetic construct
  REGION 1..9: note = Description of Artificial Sequence: Synthetic peptide
YIATNGPLK

SEQ ID NO: 8173 - protein, 10 aa, synthetic construct
  REGION 1..10: note = Description of Artificial Sequence: Synthetic peptide
YIDINGNLHP

SEQ ID NO: 8174 - protein, 9 aa, synthetic construct
  REGION 1..9: note = Description of Artificial Sequence: Synthetic peptide
YILFTRFFY

SEQ ID NO: 8175 - protein, 8 aa, synthetic construct
  REGION 1..8: note = Description of Artificial Sequence: Synthetic peptide
YKHYTPSF

SEQ ID NO: 8176 - protein, 8 aa, synthetic construct
  REGION 1..8: note = Description of Artificial Sequence: Synthetic peptide
YKIEELFY

SEQ ID NO: 8177 - protein, 8 aa, synthetic construct
  REGION 1..8: note = Description of Artificial Sequence: Synthetic peptide
YKKDNSYF

SEQ ID NO: 8178 - protein, 9 aa, synthetic construct
  REGION 1..9: note = Description of Artificial Sequence: Synthetic peptide
YKLNVGDYF

SEQ ID NO: 8179 - protein, 9 aa, synthetic construct
  REGION 1..9: note = Description of Artificial Sequence: Synthetic peptide
YKQFDTYNL

SEQ ID NO: 8180 - protein, 10 aa, synthetic construct
  REGION 1..10: note = Description of Artificial Sequence: Synthetic peptide
YLALYNKYKY

SEQ ID NO: 8181 - protein, 10 aa, synthetic construct
  REGION 1..10: note = Description of Artificial Sequence: Synthetic peptide
YLCFLAFLLF

SEQ ID NO: 8182 - protein, 10 aa, synthetic construct
  REGION 1..10: note = Description of Artificial Sequence: Synthetic peptide
YLFDESGEFK

SEQ ID NO: 8183 - protein, 8 aa, synthetic construct
  REGION 1..8: note = Description of Artificial Sequence: Synthetic peptide
YLKRRVVF

SEQ ID NO: 8184 - protein, 9 aa, synthetic construct
  REGION 1..9: note = Description of Artificial Sequence: Synthetic peptide
YLKSPNFSK

SEQ ID NO: 8185 - protein, 10 aa, synthetic construct
  REGION 1..10: note = Description of Artificial Sequence: Synthetic peptide
YLKSPNFSKL

SEQ ID NO: 8186 - protein, 10 aa, synthetic construct
  REGION 1..10: note = Description of Artificial Sequence: Synthetic peptide
YLPQNAVVKI

SEQ ID NO: 8187 - protein, 8 aa, synthetic construct
  REGION 1..8: note = Description of Artificial Sequence: Synthetic peptide
YLTNDVSF

SEQ ID NO: 8188 - protein, 10 aa, synthetic construct
  REGION 1..10: note = Description of Artificial Sequence: Synthetic peptide
YLVSTQEFRY

SEQ ID NO: 8189 - protein, 8 aa, synthetic construct
  REGION 1..8: note = Description of Artificial Sequence: Synthetic peptide
YMPASWVM

SEQ ID NO: 8190 - protein, 8 aa, synthetic construct
  REGION 1..8: note = Description of Artificial Sequence: Synthetic peptide
YNDKVAGF

SEQ ID NO: 8191 - protein, 9 aa, synthetic construct
  REGION 1..9: note = Description of Artificial Sequence: Synthetic peptide
YNGSPSGVY

SEQ ID NO: 8192 - protein, 9 aa, synthetic construct
  REGION 1..9: note = Description of Artificial Sequence: Synthetic peptide
YPDKVFRSS

SEQ ID NO: 8193 - protein, 10 aa, synthetic construct
  REGION 1..10: note = Description of Artificial Sequence: Synthetic peptide
YPDKVFRSSV

SEQ ID NO: 8194 - protein, 9 aa, synthetic construct
  REGION 1..9: note = Description of Artificial Sequence: Synthetic peptide
YPKLQSSQA

SEQ ID NO: 8195 - protein, 8 aa, synthetic construct
  REGION 1..8: note = Description of Artificial Sequence: Synthetic peptide
YPNMFITR

SEQ ID NO: 8196 - protein, 9 aa, synthetic construct
  REGION 1..9: note = Description of Artificial Sequence: Synthetic peptide
YPNMFITRE

SEQ ID NO: 8197 - protein, 10 aa, synthetic construct
  REGION 1..10: note = Description of Artificial Sequence: Synthetic peptide
YQIGGYTEKW

SEQ ID NO: 8198 - protein, 8 aa, synthetic construct
  REGION 1..8: note = Description of Artificial Sequence: Synthetic peptide
YQPPQTSI

SEQ ID NO: 8199 - protein, 9 aa, synthetic construct
  REGION 1..9: note = Description of Artificial Sequence: Synthetic peptide
YQVNGYPNM

SEQ ID NO: 8200 - protein, 10 aa, synthetic construct
  REGION 1..10: note = Description of Artificial Sequence: Synthetic peptide
YQVNGYPNMF

SEQ ID NO: 8201 - protein, 8 aa, synthetic construct
  REGION 1..8: note = Description of Artificial Sequence: Synthetic peptide
YRFNGIGV

SEQ ID NO: 8202 - protein, 10 aa, synthetic construct
  REGION 1..10: note = Description of Artificial Sequence: Synthetic peptide
YRFNGIGVTQ

SEQ ID NO: 8203 - protein, 10 aa, synthetic construct
  REGION 1..10: note = Description of Artificial Sequence: Synthetic peptide
YRVVVLSFEL

SEQ ID NO: 8204 - protein, 8 aa, synthetic construct
  REGION 1..8: note = Description of Artificial Sequence: Synthetic peptide
YSGVVTTV

SEQ ID NO: 8205 - protein, 10 aa, synthetic construct
  REGION 1..10: note = Description of Artificial Sequence: Synthetic peptide
YSVIYLYLTF

SEQ ID NO: 8206 - protein, 8 aa, synthetic construct
  REGION 1..8: note = Description of Artificial Sequence: Synthetic peptide
YTDFATSA

SEQ ID NO: 8207 - protein, 8 aa, synthetic construct
  REGION 1..8: note = Description of Artificial Sequence: Synthetic peptide
YTEISFML

SEQ ID NO: 8208 - protein, 9 aa, synthetic construct
  REGION 1..9: note = Description of Artificial Sequence: Synthetic peptide
YTERSEKSY

SEQ ID NO: 8209 - protein, 9 aa, synthetic construct
  REGION 1..9: note = Description of Artificial Sequence: Synthetic peptide
YTRYVDNNF

SEQ ID NO: 8210 - protein, 10 aa, synthetic construct
  REGION 1..10: note = Description of Artificial Sequence: Synthetic peptide
YTSNPTTFHL

SEQ ID NO: 8211 - protein, 9 aa, synthetic construct
  REGION 1..9: note = Description of Artificial Sequence: Synthetic peptide
YVMHANYIF

SEQ ID NO: 8212 - protein, 9 aa, synthetic construct
  REGION 1..9: note = Description of Artificial Sequence: Synthetic peptide
YVPAQEKNF

SEQ ID NO: 8213 - protein, 8 aa, synthetic construct
  REGION 1..8: note = Description of Artificial Sequence: Synthetic peptide
YVRITGLY

SEQ ID NO: 8214 - protein, 10 aa, synthetic construct
  REGION 1..10: note = Description of Artificial Sequence: Synthetic peptide
YVRNLQHRLY

SEQ ID NO: 8215 - protein, 9 aa, synthetic construct
  REGION 1..9: note = Description of Artificial Sequence: Synthetic peptide
YVVDDPCPI

SEQ ID NO: 8216 - protein, 12 aa, synthetic construct
  REGION 1..12: note = Description of Artificial Sequence: Synthetic peptide
YVVDDPCPIHFY

SEQ ID NO: 8217 - protein, 10 aa, synthetic construct
  REGION 1..10: note = Description of Artificial Sequence: Synthetic peptide
YVWKSYVHVV

SEQ ID NO: 8218 - protein, 9 aa, synthetic construct
  REGION 1..9: note = Description of Artificial Sequence: Synthetic peptide
YVYNPFMID

SEQ ID NO: 8219 - protein, 8 aa, synthetic construct
  REGION 1..8: note = Description of Artificial Sequence: Synthetic peptide
YWVPRASA

SEQ ID NO: 8220 - protein, 10 aa, synthetic construct
  REGION 1..10: note = Description of Artificial Sequence: Synthetic peptide
YYFMRFRRAF

SEQ ID NO: 8221 - protein, 8 aa, synthetic construct
  REGION 1..8: note = Description of Artificial Sequence: Synthetic peptide
YYKKDNSY

SEQ ID NO: 8222 - protein, 9 aa, synthetic construct
  REGION 1..9: note = Description of Artificial Sequence: Synthetic peptide
YYRRATRRI

SEQ ID NO: 8223 - protein, 9 aa, synthetic construct
  REGION 1..9: note = Description of Artificial Sequence: Synthetic peptide
YYSDSPCES

SEQ ID NO: 8224 - protein, 9 aa, synthetic construct
  REGION 1..9: note = Description of Artificial Sequence: Synthetic peptide
AACRKVQHM

SEQ ID NO: 8225 - protein, 9 aa, synthetic construct
  REGION 1..9: note = Description of Artificial Sequence: Synthetic peptide
AADLDDFSK

SEQ ID NO: 8226 - protein, 10 aa, synthetic construct
  REGION 1..10: note = Description of Artificial Sequence: Synthetic peptide
AAFATAQEAY

SEQ ID NO: 8227 - protein, 9 aa, synthetic construct
  REGION 1..9: note = Description of Artificial Sequence: Synthetic peptide
AAIFYLITP

SEQ ID NO: 8228 - protein, 8 aa, synthetic construct
  REGION 1..8: note = Description of Artificial Sequence: Synthetic peptide
AAKAYKDY

SEQ ID NO: 8229 - protein, 9 aa, synthetic construct
  REGION 1..9: note = Description of Artificial Sequence: Synthetic peptide
AAKKNNLPF

SEQ ID NO: 8230 - protein, 8 aa, synthetic construct
  REGION 1..8: note = Description of Artificial Sequence: Synthetic peptide
AARVVRSI

SEQ ID NO: 8231 - protein, 9 aa, synthetic construct
  REGION 1..9: note = Description of Artificial Sequence: Synthetic peptide
AATRGATVV

SEQ ID NO: 8232 - protein, 9 aa, synthetic construct
  REGION 1..9: note = Description of Artificial Sequence: Synthetic peptide
AAVDALCEK

SEQ ID NO: 8233 - protein, 8 aa, synthetic construct
  REGION 1..8: note = Description of Artificial Sequence: Synthetic peptide
ADAVIKTL

SEQ ID NO: 8234 - protein, 10 aa, synthetic construct
  REGION 1..10: note = Description of Artificial Sequence: Synthetic peptide
ADFDTWFSQR

SEQ ID NO: 8235 - protein, 8 aa, synthetic construct
  REGION 1..8: note = Description of Artificial Sequence: Synthetic peptide
ADSKIVQL

SEQ ID NO: 8236 - protein, 11 aa, synthetic construct
  REGION 1..11: note = Description of Artificial Sequence: Synthetic peptide
AEAELAKNVSL

SEQ ID NO: 8237 - protein, 9 aa, synthetic construct
  REGION 1..9: note = Description of Artificial Sequence: Synthetic peptide
AECTIFKDA

SEQ ID NO: 8238 - protein, 11 aa, synthetic construct
  REGION 1..11: note = Description of Artificial Sequence: Synthetic peptide
AEILLIIMRTF

SEQ ID NO: 8239 - protein, 10 aa, synthetic construct
  REGION 1..10: note = Description of Artificial Sequence: Synthetic peptide
AEIRASANLA

SEQ ID NO: 8240 - protein, 9 aa, synthetic construct
  REGION 1..9: note = Description of Artificial Sequence: Synthetic peptide
AESHVDTDL

SEQ ID NO: 8241 - protein, 8 aa, synthetic construct
  REGION 1..8: note = Description of Artificial Sequence: Synthetic peptide
AEWFLAYI

SEQ ID NO: 8242 - protein, 9 aa, synthetic construct
  REGION 1..9: note = Description of Artificial Sequence: Synthetic peptide
AFATAQEAY

SEQ ID NO: 8243 - protein, 10 aa, synthetic construct
  REGION 1..10: note = Description of Artificial Sequence: Synthetic peptide
AFAVDAAKAY

SEQ ID NO: 8244 - protein, 8 aa, synthetic construct
  REGION 1..8: note = Description of Artificial Sequence: Synthetic peptide
AFEKMVSL

SEQ ID NO: 8245 - protein, 9 aa, synthetic construct
  REGION 1..9: note = Description of Artificial Sequence: Synthetic peptide
AFLPFAMGI

SEQ ID NO: 8246 - protein, 8 aa, synthetic construct
  REGION 1..8: note = Description of Artificial Sequence: Synthetic peptide
AFNTLLFL

SEQ ID NO: 8247 - protein, 8 aa, synthetic construct
  REGION 1..8: note = Description of Artificial Sequence: Synthetic peptide
AFYILPSI

SEQ ID NO: 8248 - protein, 9 aa, synthetic construct
  REGION 1..9: note = Description of Artificial Sequence: Synthetic peptide
AGNGGDAAL

SEQ ID NO: 8249 - protein, 9 aa, synthetic construct
  REGION 1..9: note = Description of Artificial Sequence: Synthetic peptide
AGSKSPIQY

SEQ ID NO: 8250 - protein, 9 aa, synthetic construct
  REGION 1..9: note = Description of Artificial Sequence: Synthetic peptide
AGTDTTITV

SEQ ID NO: 8251 - protein, 9 aa, synthetic construct
  REGION 1..9: note = Description of Artificial Sequence: Synthetic peptide
AHISTIGVC

SEQ ID NO: 8252 - protein, 9 aa, synthetic construct
  REGION 1..9: note = Description of Artificial Sequence: Synthetic peptide
AHSCNVNRF

SEQ ID NO: 8253 - protein, 9 aa, synthetic construct
  REGION 1..9: note = Description of Artificial Sequence: Synthetic peptide
AIDAYPLTK

SEQ ID NO: 8254 - protein, 9 aa, synthetic construct
  REGION 1..9: note = Description of Artificial Sequence: Synthetic peptide
AIMTRCLAV

SEQ ID NO: 8255 - protein, 8 aa, synthetic construct
  REGION 1..8: note = Description of Artificial Sequence: Synthetic peptide
AISDYDYY

SEQ ID NO: 8256 - protein, 10 aa, synthetic construct
  REGION 1..10: note = Description of Artificial Sequence: Synthetic peptide
AISDYDYYRY

SEQ ID NO: 8257 - protein, 9 aa, synthetic construct
  REGION 1..9: note = Description of Artificial Sequence: Synthetic peptide
ALALLLLDR

SEQ ID NO: 8258 - protein, 10 aa, synthetic construct
  REGION 1..10: note = Description of Artificial Sequence: Synthetic peptide
ALCEKALKYL

SEQ ID NO: 8259 - protein, 8 aa, synthetic construct
  REGION 1..8: note = Description of Artificial Sequence: Synthetic peptide
ALDQAISM

SEQ ID NO: 8260 - protein, 8 aa, synthetic construct
  REGION 1..8: note = Description of Artificial Sequence: Synthetic peptide
ALLKTVQF

SEQ ID NO: 8261 - protein, 10 aa, synthetic construct
  REGION 1..10: note = Description of Artificial Sequence: Synthetic peptide
ALNHTKKWKY

SEQ ID NO: 8262 - protein, 9 aa, synthetic construct
  REGION 1..9: note = Description of Artificial Sequence: Synthetic peptide
ALNLGETFV

SEQ ID NO: 8263 - protein, 9 aa, synthetic construct
  REGION 1..9: note = Description of Artificial Sequence: Synthetic peptide
ALYYPSARI

SEQ ID NO: 8264 - protein, 8 aa, synthetic construct
  REGION 1..8: note = Description of Artificial Sequence: Synthetic peptide
AMDEFIER

SEQ ID NO: 8265 - protein, 9 aa, synthetic construct
  REGION 1..9: note = Description of Artificial Sequence: Synthetic peptide
ANGQVFGLY

SEQ ID NO: 8266 - protein, 10 aa, synthetic construct
  REGION 1..10: note = Description of Artificial Sequence: Synthetic peptide
APAHISTIGV

SEQ ID NO: 8267 - protein, 10 aa, synthetic construct
  REGION 1..10: note = Description of Artificial Sequence: Synthetic peptide
APHGHVMVEL

SEQ ID NO: 8268 - protein, 8 aa, synthetic construct
  REGION 1..8: note = Description of Artificial Sequence: Synthetic peptide
APPAQYEL

SEQ ID NO: 8269 - protein, 10 aa, synthetic construct
  REGION 1..10: note = Description of Artificial Sequence: Synthetic peptide
AQNSVRVLQK

SEQ ID NO: 8270 - protein, 8 aa, synthetic construct
  REGION 1..8: note = Description of Artificial Sequence: Synthetic peptide
AQYTSALL

SEQ ID NO: 8271 - protein, 8 aa, synthetic construct
  REGION 1..8: note = Description of Artificial Sequence: Synthetic peptide
ARDGCVPL

SEQ ID NO: 8272 - protein, 8 aa, synthetic construct
  REGION 1..8: note = Description of Artificial Sequence: Synthetic peptide
ARDLSLQF

SEQ ID NO: 8273 - protein, 9 aa, synthetic construct
  REGION 1..9: note = Description of Artificial Sequence: Synthetic peptide
ARHINAQVA

SEQ ID NO: 8274 - protein, 9 aa, synthetic construct
  REGION 1..9: note = Description of Artificial Sequence: Synthetic peptide
ARNGVLITE

SEQ ID NO: 8275 - protein, 9 aa, synthetic construct
  REGION 1..9: note = Description of Artificial Sequence: Synthetic peptide
ARTRSMWSF

SEQ ID NO: 8276 - protein, 8 aa, synthetic construct
  REGION 1..8: note = Description of Artificial Sequence: Synthetic peptide
ASAVVLLI

SEQ ID NO: 8277 - protein, 10 aa, synthetic construct
  REGION 1..10: note = Description of Artificial Sequence: Synthetic peptide
ASFRLFARTR

SEQ ID NO: 8278 - protein, 10 aa, synthetic construct
  REGION 1..10: note = Description of Artificial Sequence: Synthetic peptide
ASFYYVWKSY

SEQ ID NO: 8279 - protein, 9 aa, synthetic construct
  REGION 1..9: note = Description of Artificial Sequence: Synthetic peptide
ASKKPRQKR

SEQ ID NO: 8280 - protein, 9 aa, synthetic construct
  REGION 1..9: note = Description of Artificial Sequence: Synthetic peptide
ASMPTTIAK

SEQ ID NO: 8281 - protein, 9 aa, synthetic construct
  REGION 1..9: note = Description of Artificial Sequence: Synthetic peptide
ASSSEAFLI

SEQ ID NO: 8282 - protein, 9 aa, synthetic construct
  REGION 1..9: note = Description of Artificial Sequence: Synthetic peptide
ATAEAELAK

SEQ ID NO: 8283 - protein, 8 aa, synthetic construct
  REGION 1..8: note = Description of Artificial Sequence: Synthetic peptide
ATCELYHY

SEQ ID NO: 8284 - protein, 8 aa, synthetic construct
  REGION 1..8: note = Description of Artificial Sequence: Synthetic peptide
ATEETFKL

SEQ ID NO: 8285 - protein, 10 aa, synthetic construct
  REGION 1..10: note = Description of Artificial Sequence: Synthetic peptide
ATLQAIASEF

SEQ ID NO: 8286 - protein, 8 aa, synthetic construct
  REGION 1..8: note = Description of Artificial Sequence: Synthetic peptide
ATNGPLKV

SEQ ID NO: 8287 - protein, 8 aa, synthetic construct
  REGION 1..8: note = Description of Artificial Sequence: Synthetic peptide
ATNNLVVM

SEQ ID NO: 8288 - protein, 9 aa, synthetic construct
  REGION 1..9: note = Description of Artificial Sequence: Synthetic peptide
ATNYDLSVV

SEQ ID NO: 8289 - protein, 8 aa, synthetic construct
  REGION 1..8: note = Description of Artificial Sequence: Synthetic peptide
ATRFASVY

SEQ ID NO: 8290 - protein, 9 aa, synthetic construct
  REGION 1..9: note = Description of Artificial Sequence: Synthetic peptide
ATRGATVVI

SEQ ID NO: 8291 - protein, 8 aa, synthetic construct
  REGION 1..8: note = Description of Artificial Sequence: Synthetic peptide
ATSRTLSY

SEQ ID NO: 8292 - protein, 10 aa, synthetic construct
  REGION 1..10: note = Description of Artificial Sequence: Synthetic peptide
AVDALCEKAL

SEQ ID NO: 8293 - protein, 8 aa, synthetic construct
  REGION 1..8: note = Description of Artificial Sequence: Synthetic peptide
AYANRNRF

SEQ ID NO: 8294 - protein, 9 aa, synthetic construct
  REGION 1..9: note = Description of Artificial Sequence: Synthetic peptide
AYANSVFNI

SEQ ID NO: 8295 - protein, 8 aa, synthetic construct
  REGION 1..8: note = Description of Artificial Sequence: Synthetic peptide
AYFNMVYM

SEQ ID NO: 8296 - protein, 9 aa, synthetic construct
  REGION 1..9: note = Description of Artificial Sequence: Synthetic peptide
AYFNMVYMP

SEQ ID NO: 8297 - protein, 9 aa, synthetic construct
  REGION 1..9: note = Description of Artificial Sequence: Synthetic peptide
AYIICISTK

SEQ ID NO: 8298 - protein, 11 aa, synthetic construct
  REGION 1..11: note = Description of Artificial Sequence: Synthetic peptide
AYIICISTKHF

SEQ ID NO: 8299 - protein, 9 aa, synthetic construct
  REGION 1..9: note = Description of Artificial Sequence: Synthetic peptide
AYITGGVVQ

SEQ ID NO: 8300 - protein, 9 aa, synthetic construct
  REGION 1..9: note = Description of Artificial Sequence: Synthetic peptide
AYNGYLTSS

SEQ ID NO: 8301 - protein, 9 aa, synthetic construct
  REGION 1..9: note = Description of Artificial Sequence: Synthetic peptide
AYSNNSIAI

SEQ ID NO: 8302 - protein, 10 aa, synthetic construct
  REGION 1..10: note = Description of Artificial Sequence: Synthetic peptide
AYVDNSSLTI

SEQ ID NO: 8303 - protein, 10 aa, synthetic construct
  REGION 1..10: note = Description of Artificial Sequence: Synthetic peptide
AYVNTFSSTF

SEQ ID NO: 8304 - protein, 9 aa, synthetic construct
  REGION 1..9: note = Description of Artificial Sequence: Synthetic peptide
AYYFMRFRR

SEQ ID NO: 8305 - protein, 9 aa, synthetic construct
  REGION 1..9: note = Description of Artificial Sequence: Synthetic peptide
CCNIVNVSL

SEQ ID NO: 8306 - protein, 9 aa, synthetic construct
  REGION 1..9: note = Description of Artificial Sequence: Synthetic peptide
CEFCGTENL

SEQ ID NO: 8307 - protein, 9 aa, synthetic construct
  REGION 1..9: note = Description of Artificial Sequence: Synthetic peptide
CFSTASDTY

SEQ ID NO: 8308 - protein, 9 aa, synthetic construct
  REGION 1..9: note = Description of Artificial Sequence: Synthetic peptide
CLHVVGPNV

SEQ ID NO: 8309 - protein, 10 aa, synthetic construct
  REGION 1..10: note = Description of Artificial Sequence: Synthetic peptide
CLVGLMWLSY

SEQ ID NO: 8310 - protein, 8 aa, synthetic construct
  REGION 1..8: note = Description of Artificial Sequence: Synthetic peptide
CSNLLLQY

SEQ ID NO: 8311 - protein, 9 aa, synthetic construct
  REGION 1..9: note = Description of Artificial Sequence: Synthetic peptide
CTSVVLLSV

SEQ ID NO: 8312 - protein, 9 aa, synthetic construct
  REGION 1..9: note = Description of Artificial Sequence: Synthetic peptide
CVDIPGIPK

SEQ ID NO: 8313 - protein, 9 aa, synthetic construct
  REGION 1..9: note = Description of Artificial Sequence: Synthetic peptide
CVPLNIIPL

SEQ ID NO: 8314 - protein, 9 aa, synthetic construct
  REGION 1..9: note = Description of Artificial Sequence: Synthetic peptide
CVRGTTVLL

SEQ ID NO: 8315 - protein, 8 aa, synthetic construct
  REGION 1..8: note = Description of Artificial Sequence: Synthetic peptide
CYLATALL

SEQ ID NO: 8316 - protein, 10 aa, synthetic construct
  REGION 1..10: note = Description of Artificial Sequence: Synthetic peptide
CYLATALLTL

SEQ ID NO: 8317 - protein, 10 aa, synthetic construct
  REGION 1..10: note = Description of Artificial Sequence: Synthetic peptide
CYTPSKLIEY

SEQ ID NO: 8318 - protein, 9 aa, synthetic construct
  REGION 1..9: note = Description of Artificial Sequence: Synthetic peptide
DAAKAYKDY

SEQ ID NO: 8319 - protein, 9 aa, synthetic construct
  REGION 1..9: note = Description of Artificial Sequence: Synthetic peptide
DAYNMMISA

SEQ ID NO: 8320 - protein, 9 aa, synthetic construct
  REGION 1..9: note = Description of Artificial Sequence: Synthetic peptide
DDTLRVEAF

SEQ ID NO: 8321 - protein, 10 aa, synthetic construct
  REGION 1..10: note = Description of Artificial Sequence: Synthetic peptide
DEDDNLIDSY

SEQ ID NO: 8322 - protein, 9 aa, synthetic construct
  REGION 1..9: note = Description of Artificial Sequence: Synthetic peptide
DEFSSNVAN

SEQ ID NO: 8323 - protein, 9 aa, synthetic construct
  REGION 1..9: note = Description of Artificial Sequence: Synthetic peptide
DEISMATNY

SEQ ID NO: 8324 - protein, 8 aa, synthetic construct
  REGION 1..8: note = Description of Artificial Sequence: Synthetic peptide
DELTGHML

SEQ ID NO: 8325 - protein, 9 aa, synthetic construct
  REGION 1..9: note = Description of Artificial Sequence: Synthetic peptide
DEPTTTTSV

SEQ ID NO: 8326 - protein, 9 aa, synthetic construct
  REGION 1..9: note = Description of Artificial Sequence: Synthetic peptide
DFMSLSEQL

SEQ ID NO: 8327 - protein, 9 aa, synthetic construct
  REGION 1..9: note = Description of Artificial Sequence: Synthetic peptide
DISGINASV

SEQ ID NO: 8328 - protein, 9 aa, synthetic construct
  REGION 1..9: note = Description of Artificial Sequence: Synthetic peptide
DIVEEAKKV

SEQ ID NO: 8329 - protein, 9 aa, synthetic construct
  REGION 1..9: note = Description of Artificial Sequence: Synthetic peptide
DKFKVNSTL

SEQ ID NO: 8330 - protein, 9 aa, synthetic construct
  REGION 1..9: note = Description of Artificial Sequence: Synthetic peptide
DKVAGFAKF

SEQ ID NO: 8331 - protein, 9 aa, synthetic construct
  REGION 1..9: note = Description of Artificial Sequence: Synthetic peptide
DLKGKYVQI

SEQ ID NO: 8332 - protein, 9 aa, synthetic construct
  REGION 1..9: note = Description of Artificial Sequence: Synthetic peptide
DLPQGFSAL

SEQ ID NO: 8333 - protein, 9 aa, synthetic construct
  REGION 1..9: note = Description of Artificial Sequence: Synthetic peptide
DLQDLKWAR

SEQ ID NO: 8334 - protein, 8 aa, synthetic construct
  REGION 1..8: note = Description of Artificial Sequence: Synthetic peptide
DLQELGKY

SEQ ID NO: 8335 - protein, 10 aa, synthetic construct
  REGION 1..10: note = Description of Artificial Sequence: Synthetic peptide
DLSPRWYFYY

SEQ ID NO: 8336 - protein, 8 aa, synthetic construct
  REGION 1..8: note = Description of Artificial Sequence: Synthetic peptide
DLYDKLQF

SEQ ID NO: 8337 - protein, 9 aa, synthetic construct
  REGION 1..9: note = Description of Artificial Sequence: Synthetic peptide
DLYDKLQFT

SEQ ID NO: 8338 - protein, 9 aa, synthetic construct
  REGION 1..9: note = Description of Artificial Sequence: Synthetic peptide
DMILSLLSK

SEQ ID NO: 8339 - protein, 9 aa, synthetic construct
  REGION 1..9: note = Description of Artificial Sequence: Synthetic peptide
DNLKTLLSL

SEQ ID NO: 8340 - protein, 8 aa, synthetic construct
  REGION 1..8: note = Description of Artificial Sequence: Synthetic peptide
DPCPIHFY

SEQ ID NO: 8341 - protein, 8 aa, synthetic construct
  REGION 1..8: note = Description of Artificial Sequence: Synthetic peptide
DPFLGVYY

SEQ ID NO: 8342 - protein, 9 aa, synthetic construct
  REGION 1..9: note = Description of Artificial Sequence: Synthetic peptide
DPIHSLRVC

SEQ ID NO: 8343 - protein, 10 aa, synthetic construct
  REGION 1..10: note = Description of Artificial Sequence: Synthetic peptide
DPNFKDQVIL

SEQ ID NO: 8344 - protein, 9 aa, synthetic construct
  REGION 1..9: note = Description of Artificial Sequence: Synthetic peptide
DPSFLGRYM

SEQ ID NO: 8345 - protein, 9 aa, synthetic construct
  REGION 1..9: note = Description of Artificial Sequence: Synthetic peptide
DPVGFTLKN

SEQ ID NO: 8346 - protein, 9 aa, synthetic construct
  REGION 1..9: note = Description of Artificial Sequence: Synthetic peptide
DQAISMWAL

SEQ ID NO: 8347 - protein, 8 aa, synthetic construct
  REGION 1..8: note = Description of Artificial Sequence: Synthetic peptide
DSNGTITV

SEQ ID NO: 8348 - protein, 8 aa, synthetic construct
  REGION 1..8: note = Description of Artificial Sequence: Synthetic peptide
DTDFVNEF

SEQ ID NO: 8349 - protein, 9 aa, synthetic construct
  REGION 1..9: note = Description of Artificial Sequence: Synthetic peptide
DTTEAFEKM

SEQ ID NO: 8350 - protein, 9 aa, synthetic construct
  REGION 1..9: note = Description of Artificial Sequence: Synthetic peptide
DTTITVNVL

SEQ ID NO: 8351 - protein, 9 aa, synthetic construct
  REGION 1..9: note = Description of Artificial Sequence: Synthetic peptide
DTVSALVYD

SEQ ID NO: 8352 - protein, 11 aa, synthetic construct
  REGION 1..11: note = Description of Artificial Sequence: Synthetic peptide
DTYNLWNTFTR

SEQ ID NO: 8353 - protein, 10 aa, synthetic construct
  REGION 1..10: note = Description of Artificial Sequence: Synthetic peptide
DVDTDFVNEF

SEQ ID NO: 8354 - protein, 9 aa, synthetic construct
  REGION 1..9: note = Description of Artificial Sequence: Synthetic peptide
DVKCTSVVL

SEQ ID NO: 8355 - protein, 9 aa, synthetic construct
  REGION 1..9: note = Description of Artificial Sequence: Synthetic peptide
DYFNKKDWY

SEQ ID NO: 8356 - protein, 8 aa, synthetic construct
  REGION 1..8: note = Description of Artificial Sequence: Synthetic peptide
DYFVLTSH

SEQ ID NO: 8357 - protein, 9 aa, synthetic construct
  REGION 1..9: note = Description of Artificial Sequence: Synthetic peptide
DYGDAVVYR

SEQ ID NO: 8358 - protein, 8 aa, synthetic construct
  REGION 1..8: note = Description of Artificial Sequence: Synthetic peptide
EAANFCAL

SEQ ID NO: 8359 - protein, 9 aa, synthetic construct
  REGION 1..9: note = Description of Artificial Sequence: Synthetic peptide
EDQDALFAY

SEQ ID NO: 8360 - protein, 9 aa, synthetic construct
  REGION 1..9: note = Description of Artificial Sequence: Synthetic peptide
EEAALCTFL

SEQ ID NO: 8361 - protein, 10 aa, synthetic construct
  REGION 1..10: note = Description of Artificial Sequence: Synthetic peptide
EEAALCTFLL

SEQ ID NO: 8362 - protein, 9 aa, synthetic construct
  REGION 1..9: note = Description of Artificial Sequence: Synthetic peptide
EEAKTVLKK

SEQ ID NO: 8363 - protein, 9 aa, synthetic construct
  REGION 1..9: note = Description of Artificial Sequence: Synthetic peptide
EEEQEEDWL

SEQ ID NO: 8364 - protein, 8 aa, synthetic construct
  REGION 1..8: note = Description of Artificial Sequence: Synthetic peptide
EEHFIETI

SEQ ID NO: 8365 - protein, 10 aa, synthetic construct
  REGION 1..10: note = Description of Artificial Sequence: Synthetic peptide
EEKFKEGVEF

SEQ ID NO: 8366 - protein, 9 aa, synthetic construct
  REGION 1..9: note = Description of Artificial Sequence: Synthetic peptide
EELDKYFKN

SEQ ID NO: 8367 - protein, 9 aa, synthetic construct
  REGION 1..9: note = Description of Artificial Sequence: Synthetic peptide
EELKKLLEQ

SEQ ID NO: 8368 - protein, 10 aa, synthetic construct
  REGION 1..10: note = Description of Artificial Sequence: Synthetic peptide
EEMLDNRATL

SEQ ID NO: 8369 - protein, 9 aa, synthetic construct
  REGION 1..9: note = Description of Artificial Sequence: Synthetic peptide
EETKFLTEN

SEQ ID NO: 8370 - protein, 9 aa, synthetic construct
  REGION 1..9: note = Description of Artificial Sequence: Synthetic peptide
EEVVLKTGD

SEQ ID NO: 8371 - protein, 9 aa, synthetic construct
  REGION 1..9: note = Description of Artificial Sequence: Synthetic peptide
EHDYQIGGY

SEQ ID NO: 8372 - protein, 9 aa, synthetic construct
  REGION 1..9: note = Description of Artificial Sequence: Synthetic peptide
EHEHEIAWY

SEQ ID NO: 8373 - protein, 8 aa, synthetic construct
  REGION 1..8: note = Description of Artificial Sequence: Synthetic peptide
EHVQIHTI

SEQ ID NO: 8374 - protein, 10 aa, synthetic construct
  REGION 1..10: note = Description of Artificial Sequence: Synthetic peptide
EIIFLEGETL

SEQ ID NO: 8375 - protein, 8 aa, synthetic construct
  REGION 1..8: note = Description of Artificial Sequence: Synthetic peptide
EIKDTEKY

SEQ ID NO: 8376 - protein, 10 aa, synthetic construct
  REGION 1..10: note = Description of Artificial Sequence: Synthetic peptide
EILLIIMRTF

SEQ ID NO: 8377 - protein, 10 aa, synthetic construct
  REGION 1..10: note = Description of Artificial Sequence: Synthetic peptide
EIVGGQIVTC

SEQ ID NO: 8378 - protein, 9 aa, synthetic construct
  REGION 1..9: note = Description of Artificial Sequence: Synthetic peptide
EKSNIIRGW

SEQ ID NO: 8379 - protein, 8 aa, synthetic construct
  REGION 1..8: note = Description of Artificial Sequence: Synthetic peptide
ELAKNVSL

SEQ ID NO: 8380 - protein, 9 aa, synthetic construct
  REGION 1..9: note = Description of Artificial Sequence: Synthetic peptide
ELGTEVNEF

SEQ ID NO: 8381 - protein, 9 aa, synthetic construct
  REGION 1..9: note = Description of Artificial Sequence: Synthetic peptide
ELIRQGTDY

SEQ ID NO: 8382 - protein, 9 aa, synthetic construct
  REGION 1..9: note = Description of Artificial Sequence: Synthetic peptide
ELLHAPATV

SEQ ID NO: 8383 - protein, 10 aa, synthetic construct
  REGION 1..10: note = Description of Artificial Sequence: Synthetic peptide
ELNGGAYTRY

SEQ ID NO: 8384 - protein, 9 aa, synthetic construct
  REGION 1..9: note = Description of Artificial Sequence: Synthetic peptide
ELVAELEGI

SEQ ID NO: 8385 - protein, 9 aa, synthetic construct
  REGION 1..9: note = Description of Artificial Sequence: Synthetic peptide
ENFNQHEVL

SEQ ID NO: 8386 - protein, 9 aa, synthetic construct
  REGION 1..9: note = Description of Artificial Sequence: Synthetic peptide
EQYIKWPWY

SEQ ID NO: 8387 - protein, 9 aa, synthetic construct
  REGION 1..9: note = Description of Artificial Sequence: Synthetic peptide
ERDISTEIY

SEQ ID NO: 8388 - protein, 9 aa, synthetic construct
  REGION 1..9: note = Description of Artificial Sequence: Synthetic peptide
ERSEAGVCV

SEQ ID NO: 8389 - protein, 9 aa, synthetic construct
  REGION 1..9: note = Description of Artificial Sequence: Synthetic peptide
ESKPSVEQR

SEQ ID NO: 8390 - protein, 10 aa, synthetic construct
  REGION 1..10: note = Description of Artificial Sequence: Synthetic peptide
ETAHSCNVNR

SEQ ID NO: 8391 - protein, 9 aa, synthetic construct
  REGION 1..9: note = Description of Artificial Sequence: Synthetic peptide
ETICAPLTV

SEQ ID NO: 8392 - protein, 10 aa, synthetic construct
  REGION 1..10: note = Description of Artificial Sequence: Synthetic peptide
ETISLAGSYK

SEQ ID NO: 8393 - protein, 9 aa, synthetic construct
  REGION 1..9: note = Description of Artificial Sequence: Synthetic peptide
ETLGVLVPH

SEQ ID NO: 8394 - protein, 9 aa, synthetic construct
  REGION 1..9: note = Description of Artificial Sequence: Synthetic peptide
ETVKGLDYK

SEQ ID NO: 8395 - protein, 11 aa, synthetic construct
  REGION 1..11: note = Description of Artificial Sequence: Synthetic peptide
EVFAQVKQIYK

SEQ ID NO: 8396 - protein, 8 aa, synthetic construct
  REGION 1..8: note = Description of Artificial Sequence: Synthetic peptide
EVFNATRF

SEQ ID NO: 8397 - protein, 8 aa, synthetic construct
  REGION 1..8: note = Description of Artificial Sequence: Synthetic peptide
EVNSFSGY

SEQ ID NO: 8398 - protein, 9 aa, synthetic construct
  REGION 1..9: note = Description of Artificial Sequence: Synthetic peptide
EVPANSTVL

SEQ ID NO: 8399 - protein, 9 aa, synthetic construct
  REGION 1..9: note = Description of Artificial Sequence: Synthetic peptide
EVVDKYFDC

SEQ ID NO: 8400 - protein, 10 aa, synthetic construct
  REGION 1..10: note = Description of Artificial Sequence: Synthetic peptide
EVVGDIILKP

SEQ ID NO: 8401 - protein, 8 aa, synthetic construct
  REGION 1..8: note = Description of Artificial Sequence: Synthetic peptide
EYHDVRVV

SEQ ID NO: 8402 - protein, 9 aa, synthetic construct
  REGION 1..9: note = Description of Artificial Sequence: Synthetic peptide
EYVSQPFLM

SEQ ID NO: 8403 - protein, 8 aa, synthetic construct
  REGION 1..8: note = Description of Artificial Sequence: Synthetic peptide
FAAETLKA

SEQ ID NO: 8404 - protein, 10 aa, synthetic construct
  REGION 1..10: note = Description of Artificial Sequence: Synthetic peptide
FACPDGVKHV

SEQ ID NO: 8405 - protein, 9 aa, synthetic construct
  REGION 1..9: note = Description of Artificial Sequence: Synthetic peptide
FASFYYVWK

SEQ ID NO: 8406 - protein, 8 aa, synthetic construct
  REGION 1..8: note = Description of Artificial Sequence: Synthetic peptide
FATAQEAY

SEQ ID NO: 8407 - protein, 9 aa, synthetic construct
  REGION 1..9: note = Description of Artificial Sequence: Synthetic peptide
FAVHFISNS

SEQ ID NO: 8408 - protein, 10 aa, synthetic construct
  REGION 1..10: note = Description of Artificial Sequence: Synthetic peptide
FAWWTAFVTN

SEQ ID NO: 8409 - protein, 9 aa, synthetic construct
  REGION 1..9: note = Description of Artificial Sequence: Synthetic peptide
FCGPDGYPL

SEQ ID NO: 8410 - protein, 9 aa, synthetic construct
  REGION 1..9: note = Description of Artificial Sequence: Synthetic peptide
FCTQLNRAL

SEQ ID NO: 8411 - protein, 9 aa, synthetic construct
  REGION 1..9: note = Description of Artificial Sequence: Synthetic peptide
FDKAGQKTY

SEQ ID NO: 8412 - protein, 8 aa, synthetic construct
  REGION 1..8: note = Description of Artificial Sequence: Synthetic peptide
FDYVYNPF

SEQ ID NO: 8413 - protein, 9 aa, synthetic construct
  REGION 1..9: note = Description of Artificial Sequence: Synthetic peptide
FEEAALCTF

SEQ ID NO: 8414 - protein, 10 aa, synthetic construct
  REGION 1..10: note = Description of Artificial Sequence: Synthetic peptide
FELDERIDKV

SEQ ID NO: 8415 - protein, 10 aa, synthetic construct
  REGION 1..10: note = Description of Artificial Sequence: Synthetic peptide
FELLHAPATV

SEQ ID NO: 8416 - protein, 9 aa, synthetic construct
  REGION 1..9: note = Description of Artificial Sequence: Synthetic peptide
FELTSMKYF

SEQ ID NO: 8417 - protein, 9 aa, synthetic construct
  REGION 1..9: note = Description of Artificial Sequence: Synthetic peptide
FENKTTLPV

SEQ ID NO: 8418 - protein, 9 aa, synthetic construct
  REGION 1..9: note = Description of Artificial Sequence: Synthetic peptide
FEPSTQYEY

SEQ ID NO: 8419 - protein, 9 aa, synthetic construct
  REGION 1..9: note = Description of Artificial Sequence: Synthetic peptide
FERDISTEI

SEQ ID NO: 8420 - protein, 9 aa, synthetic construct
  REGION 1..9: note = Description of Artificial Sequence: Synthetic peptide
FFPDLNGDV

SEQ ID NO: 8421 - protein, 8 aa, synthetic construct
  REGION 1..8: note = Description of Artificial Sequence: Synthetic peptide
FFSNVTWF

SEQ ID NO: 8422 - protein, 8 aa, synthetic construct
  REGION 1..8: note = Description of Artificial Sequence: Synthetic peptide
FGAISSVL

SEQ ID NO: 8423 - protein, 8 aa, synthetic construct
  REGION 1..8: note = Description of Artificial Sequence: Synthetic peptide
FGDSVEEV

SEQ ID NO: 8424 - protein, 9 aa, synthetic construct
  REGION 1..9: note = Description of Artificial Sequence: Synthetic peptide
FHLDGEVIT

SEQ ID NO: 8425 - protein, 8 aa, synthetic construct
  REGION 1..8: note = Description of Artificial Sequence: Synthetic peptide
FIASFRLF

SEQ ID NO: 8426 - protein, 9 aa, synthetic construct
  REGION 1..9: note = Description of Artificial Sequence: Synthetic peptide
FISAARQGF

SEQ ID NO: 8427 - protein, 8 aa, synthetic construct
  REGION 1..8: note = Description of Artificial Sequence: Synthetic peptide
FKWDLTAF

SEQ ID NO: 8428 - protein, 8 aa, synthetic construct
  REGION 1..8: note = Description of Artificial Sequence: Synthetic peptide
FLARGIVF

SEQ ID NO: 8429 - protein, 9 aa, synthetic construct
  REGION 1..9: note = Description of Artificial Sequence: Synthetic peptide
FLCWHTNCY

SEQ ID NO: 8430 - protein, 9 aa, synthetic construct
  REGION 1..9: note = Description of Artificial Sequence: Synthetic peptide
FLEYHDVRV

SEQ ID NO: 8431 - protein, 10 aa, synthetic construct
  REGION 1..10: note = Description of Artificial Sequence: Synthetic peptide
FLIVAAIVFI

SEQ ID NO: 8432 - protein, 9 aa, synthetic construct
  REGION 1..9: note = Description of Artificial Sequence: Synthetic peptide
FLMSFTVLC

SEQ ID NO: 8433 - protein, 9 aa, synthetic construct
  REGION 1..9: note = Description of Artificial Sequence: Synthetic peptide
FLNKVVSTT

SEQ ID NO: 8434 - protein, 10 aa, synthetic construct
  REGION 1..10: note = Description of Artificial Sequence: Synthetic peptide
FLPGVYSVIY

SEQ ID NO: 8435 - protein, 11 aa, synthetic construct
  REGION 1..11: note = Description of Artificial Sequence: Synthetic peptide
FLPGVYSVIYL

SEQ ID NO: 8436 - protein, 9 aa, synthetic construct
  REGION 1..9: note = Description of Artificial Sequence: Synthetic peptide
FLQSINFVR

SEQ ID NO: 8437 - protein, 10 aa, synthetic construct
  REGION 1..10: note = Description of Artificial Sequence: Synthetic peptide
FLTENLLLYI

SEQ ID NO: 8438 - protein, 10 aa, synthetic construct
  REGION 1..10: note = Description of Artificial Sequence: Synthetic peptide
FLVQAGNVQL

SEQ ID NO: 8439 - protein, 8 aa, synthetic construct
  REGION 1..8: note = Description of Artificial Sequence: Synthetic peptide
FLYLYALV

SEQ ID NO: 8440 - protein, 8 aa, synthetic construct
  REGION 1..8: note = Description of Artificial Sequence: Synthetic peptide
FMIDVQQW

SEQ ID NO: 8441 - protein, 10 aa, synthetic construct
  REGION 1..10: note = Description of Artificial Sequence: Synthetic peptide
FPLKLRGTAV

SEQ ID NO: 8442 - protein, 10 aa, synthetic construct
  REGION 1..10: note = Description of Artificial Sequence: Synthetic peptide
FPREGVFVSN

SEQ ID NO: 8443 - protein, 9 aa, synthetic construct
  REGION 1..9: note = Description of Artificial Sequence: Synthetic peptide
FRNARNGVL

SEQ ID NO: 8444 - protein, 9 aa, synthetic construct
  REGION 1..9: note = Description of Artificial Sequence: Synthetic peptide
FSASTSAFV

SEQ ID NO: 8445 - protein, 9 aa, synthetic construct
  REGION 1..9: note = Description of Artificial Sequence: Synthetic peptide
FSHSQLGGL

SEQ ID NO: 8446 - protein, 8 aa, synthetic construct
  REGION 1..8: note = Description of Artificial Sequence: Synthetic peptide
FSKLINII

SEQ ID NO: 8447 - protein, 9 aa, synthetic construct
  REGION 1..9: note = Description of Artificial Sequence: Synthetic peptide
FSKLINIII

SEQ ID NO: 8448 - protein, 9 aa, synthetic construct
  REGION 1..9: note = Description of Artificial Sequence: Synthetic peptide
FSNYLKRRV

SEQ ID NO: 8449 - protein, 8 aa, synthetic construct
  REGION 1..8: note = Description of Artificial Sequence: Synthetic peptide
FSQRGGSY

SEQ ID NO: 8450 - protein, 8 aa, synthetic construct
  REGION 1..8: note = Description of Artificial Sequence: Synthetic peptide
FSSNVANY

SEQ ID NO: 8451 - protein, 9 aa, synthetic construct
  REGION 1..9: note = Description of Artificial Sequence: Synthetic peptide
FSTGVNLVA

SEQ ID NO: 8452 - protein, 10 aa, synthetic construct
  REGION 1..10: note = Description of Artificial Sequence: Synthetic peptide
FSTGVNLVAV

SEQ ID NO: 8453 - protein, 9 aa, synthetic construct
  REGION 1..9: note = Description of Artificial Sequence: Synthetic peptide
FTEQPIDLV

SEQ ID NO: 8454 - protein, 10 aa, synthetic construct
  REGION 1..10: note = Description of Artificial Sequence: Synthetic peptide
FTISVTTEIL

SEQ ID NO: 8455 - protein, 9 aa, synthetic construct
  REGION 1..9: note = Description of Artificial Sequence: Synthetic peptide
FTIYSLLLC

SEQ ID NO: 8456 - protein, 10 aa, synthetic construct
  REGION 1..10: note = Description of Artificial Sequence: Synthetic peptide
FTQSRNLQEF

SEQ ID NO: 8457 - protein, 8 aa, synthetic construct
  REGION 1..8: note = Description of Artificial Sequence: Synthetic peptide
FVCDNIKF

SEQ ID NO: 8458 - protein, 9 aa, synthetic construct
  REGION 1..9: note = Description of Artificial Sequence: Synthetic peptide
FVENPDILR

SEQ ID NO: 8459 - protein, 10 aa, synthetic construct
  REGION 1..10: note = Description of Artificial Sequence: Synthetic peptide
FVFPLNSIIK

SEQ ID NO: 8460 - protein, 8 aa, synthetic construct
  REGION 1..8: note = Description of Artificial Sequence: Synthetic peptide
FVKHKHAF

SEQ ID NO: 8461 - protein, 9 aa, synthetic construct
  REGION 1..9: note = Description of Artificial Sequence: Synthetic peptide
FVLAAVYRI

SEQ ID NO: 8462 - protein, 10 aa, synthetic construct
  REGION 1..10: note = Description of Artificial Sequence: Synthetic peptide
FVLWAHGFEL

SEQ ID NO: 8463 - protein, 10 aa, synthetic construct
  REGION 1..10: note = Description of Artificial Sequence: Synthetic peptide
FVNEFYAYLR

SEQ ID NO: 8464 - protein, 9 aa, synthetic construct
  REGION 1..9: note = Description of Artificial Sequence: Synthetic peptide
FVNLKQLPF

SEQ ID NO: 8465 - protein, 10 aa, synthetic construct
  REGION 1..10: note = Description of Artificial Sequence: Synthetic peptide
FVRIQPGQTF

SEQ ID NO: 8466 - protein, 9 aa, synthetic construct
  REGION 1..9: note = Description of Artificial Sequence: Synthetic peptide
FVSGNCDVV

SEQ ID NO: 8467 - protein, 10 aa, synthetic construct
  REGION 1..10: note = Description of Artificial Sequence: Synthetic peptide
FVVPGLPGTI

SEQ ID NO: 8468 - protein, 9 aa, synthetic construct
  REGION 1..9: note = Description of Artificial Sequence: Synthetic peptide
FWNCNVDRY

SEQ ID NO: 8469 - protein, 8 aa, synthetic construct
  REGION 1..8: note = Description of Artificial Sequence: Synthetic peptide
FYDFAVSK

SEQ ID NO: 8470 - protein, 9 aa, synthetic construct
  REGION 1..9: note = Description of Artificial Sequence: Synthetic peptide
FYEDFLEYH

SEQ ID NO: 8471 - protein, 8 aa, synthetic construct
  REGION 1..8: note = Description of Artificial Sequence: Synthetic peptide
FYGGWHNM

SEQ ID NO: 8472 - protein, 8 aa, synthetic construct
  REGION 1..8: note = Description of Artificial Sequence: Synthetic peptide
FYILPSII

SEQ ID NO: 8473 - protein, 8 aa, synthetic construct
  REGION 1..8: note = Description of Artificial Sequence: Synthetic peptide
FYWFFSNY

SEQ ID NO: 8474 - protein, 9 aa, synthetic construct
  REGION 1..9: note = Description of Artificial Sequence: Synthetic peptide
GANKDGIIW

SEQ ID NO: 8475 - protein, 8 aa, synthetic construct
  REGION 1..8: note = Description of Artificial Sequence: Synthetic peptide
GEAVKTQF

SEQ ID NO: 8476 - protein, 8 aa, synthetic construct
  REGION 1..8: note = Description of Artificial Sequence: Synthetic peptide
GECPNFVF

SEQ ID NO: 8477 - protein, 9 aa, synthetic construct
  REGION 1..9: note = Description of Artificial Sequence: Synthetic peptide
GEDIQLLKS

SEQ ID NO: 8478 - protein, 10 aa, synthetic construct
  REGION 1..10: note = Description of Artificial Sequence: Synthetic peptide
GEDIQLLKSA

SEQ ID NO: 8479 - protein, 10 aa, synthetic construct
  REGION 1..10: note = Description of Artificial Sequence: Synthetic peptide
GEFKLASHMY

SEQ ID NO: 8480 - protein, 11 aa, synthetic construct
  REGION 1..11: note = Description of Artificial Sequence: Synthetic peptide
GEIPVAYRKVL

SEQ ID NO: 8481 - protein, 9 aa, synthetic construct
  REGION 1..9: note = Description of Artificial Sequence: Synthetic peptide
GGDAALALL

SEQ ID NO: 8482 - protein, 9 aa, synthetic construct
  REGION 1..9: note = Description of Artificial Sequence: Synthetic peptide
GGFNFSQIL

SEQ ID NO: 8483 - protein, 9 aa, synthetic construct
  REGION 1..9: note = Description of Artificial Sequence: Synthetic peptide
GHFDGQQGE

SEQ ID NO: 8484 - protein, 9 aa, synthetic construct
  REGION 1..9: note = Description of Artificial Sequence: Synthetic peptide
GHSMQNCVL

SEQ ID NO: 8485 - protein, 9 aa, synthetic construct
  REGION 1..9: note = Description of Artificial Sequence: Synthetic peptide
GIATVREVL

SEQ ID NO: 8486 - protein, 9 aa, synthetic construct
  REGION 1..9: note = Description of Artificial Sequence: Synthetic peptide
GIDLDEWSM

SEQ ID NO: 8487 - protein, 9 aa, synthetic construct
  REGION 1..9: note = Description of Artificial Sequence: Synthetic peptide
GIVFMCVEY

SEQ ID NO: 8488 - protein, 9 aa, synthetic construct
  REGION 1..9: note = Description of Artificial Sequence: Synthetic peptide
GIYQTSNFR

SEQ ID NO: 8489 - protein, 9 aa, synthetic construct
  REGION 1..9: note = Description of Artificial Sequence: Synthetic peptide
GKYEQYIKW

SEQ ID NO: 8490 - protein, 8 aa, synthetic construct
  REGION 1..8: note = Description of Artificial Sequence: Synthetic peptide
GLAAIMQL

SEQ ID NO: 8491 - protein, 8 aa, synthetic construct
  REGION 1..8: note = Description of Artificial Sequence: Synthetic peptide
GLAAVNSV

SEQ ID NO: 8492 - protein, 9 aa, synthetic construct
  REGION 1..9: note = Description of Artificial Sequence: Synthetic peptide
GLCVDIPGI

SEQ ID NO: 8493 - protein, 10 aa, synthetic construct
  REGION 1..10: note = Description of Artificial Sequence: Synthetic peptide
GLEAPFLYLY

SEQ ID NO: 8494 - protein, 9 aa, synthetic construct
  REGION 1..9: note = Description of Artificial Sequence: Synthetic peptide
GLFKDCSKV

SEQ ID NO: 8495 - protein, 8 aa, synthetic construct
  REGION 1..8: note = Description of Artificial Sequence: Synthetic peptide
GLIAIVMV

SEQ ID NO: 8496 - protein, 9 aa, synthetic construct
  REGION 1..9: note = Description of Artificial Sequence: Synthetic peptide
GLPNNTASW

SEQ ID NO: 8497 - protein, 8 aa, synthetic construct
  REGION 1..8: note = Description of Artificial Sequence: Synthetic peptide
GLYPTLNI

SEQ ID NO: 8498 - protein, 9 aa, synthetic construct
  REGION 1..9: note = Description of Artificial Sequence: Synthetic peptide
GPEHSLAEY

SEQ ID NO: 8499 - protein, 8 aa, synthetic construct
  REGION 1..8: note = Description of Artificial Sequence: Synthetic peptide
GPKKSTNL

SEQ ID NO: 8500 - protein, 8 aa, synthetic construct
  REGION 1..8: note = Description of Artificial Sequence: Synthetic peptide
GQQFGPTY

SEQ ID NO: 8501 - protein, 9 aa, synthetic construct
  REGION 1..9: note = Description of Artificial Sequence: Synthetic peptide
GQQFGPTYL

SEQ ID NO: 8502 - protein, 9 aa, synthetic construct
  REGION 1..9: note = Description of Artificial Sequence: Synthetic peptide
GQTGKIADY

SEQ ID NO: 8503 - protein, 9 aa, synthetic construct
  REGION 1..9: note = Description of Artificial Sequence: Synthetic peptide
GRSGETLGV

SEQ ID NO: 8504 - protein, 9 aa, synthetic construct
  REGION 1..9: note = Description of Artificial Sequence: Synthetic peptide
GSFCTQLNR

SEQ ID NO: 8505 - protein, 8 aa, synthetic construct
  REGION 1..8: note = Description of Artificial Sequence: Synthetic peptide
GSLPINVI

SEQ ID NO: 8506 - protein, 9 aa, synthetic construct
  REGION 1..9: note = Description of Artificial Sequence: Synthetic peptide
GTDLEGNFY

SEQ ID NO: 8507 - protein, 9 aa, synthetic construct
  REGION 1..9: note = Description of Artificial Sequence: Synthetic peptide
GTGTIYTEL

SEQ ID NO: 8508 - protein, 10 aa, synthetic construct
  REGION 1..10: note = Description of Artificial Sequence: Synthetic peptide
GTITVEELKK

SEQ ID NO: 8509 - protein, 8 aa, synthetic construct
  REGION 1..8: note = Description of Artificial Sequence: Synthetic peptide
GTLEPEYF

SEQ ID NO: 8510 - protein, 9 aa, synthetic construct
  REGION 1..9: note = Description of Artificial Sequence: Synthetic peptide
GTLIVNSVL

SEQ ID NO: 8511 - protein, 9 aa, synthetic construct
  REGION 1..9: note = Description of Artificial Sequence: Synthetic peptide
GTTLPKGFY

SEQ ID NO: 8512 - protein, 9 aa, synthetic construct
  REGION 1..9: note = Description of Artificial Sequence: Synthetic peptide
GVAMPNLYK

SEQ ID NO: 8513 - protein, 9 aa, synthetic construct
  REGION 1..9: note = Description of Artificial Sequence: Synthetic peptide
GVCVSTSGR

SEQ ID NO: 8514 - protein, 9 aa, synthetic construct
  REGION 1..9: note = Description of Artificial Sequence: Synthetic peptide
GVKHVYQLR

SEQ ID NO: 8515 - protein, 10 aa, synthetic construct
  REGION 1..10: note = Description of Artificial Sequence: Synthetic peptide
GVPFVVSTGY

SEQ ID NO: 8516 - protein, 10 aa, synthetic construct
  REGION 1..10: note = Description of Artificial Sequence: Synthetic peptide
GVVDYGARFY

SEQ ID NO: 8517 - protein, 9 aa, synthetic construct
  REGION 1..9: note = Description of Artificial Sequence: Synthetic peptide
GVYFASTEK

SEQ ID NO: 8518 - protein, 9 aa, synthetic construct
  REGION 1..9: note = Description of Artificial Sequence: Synthetic peptide
GWHNMLKTV

SEQ ID NO: 8519 - protein, 9 aa, synthetic construct
  REGION 1..9: note = Description of Artificial Sequence: Synthetic peptide
GYLPQNAVV

SEQ ID NO: 8520 - protein, 9 aa, synthetic construct
  REGION 1..9: note = Description of Artificial Sequence: Synthetic peptide
HADFDTWFS

SEQ ID NO: 8521 - protein, 8 aa, synthetic construct
  REGION 1..8: note = Description of Artificial Sequence: Synthetic peptide
HCANFNVL

SEQ ID NO: 8522 - protein, 9 aa, synthetic construct
  REGION 1..9: note = Description of Artificial Sequence: Synthetic peptide
HDVRVVLDF

SEQ ID NO: 8523 - protein, 8 aa, synthetic construct
  REGION 1..8: note = Description of Artificial Sequence: Synthetic peptide
HDYQIGGY

SEQ ID NO: 8524 - protein, 8 aa, synthetic construct
  REGION 1..8: note = Description of Artificial Sequence: Synthetic peptide
HEETIYNL

SEQ ID NO: 8525 - protein, 10 aa, synthetic construct
  REGION 1..10: note = Description of Artificial Sequence: Synthetic peptide
HEFCSQHTML

SEQ ID NO: 8526 - protein, 8 aa, synthetic construct
  REGION 1..8: note = Description of Artificial Sequence: Synthetic peptide
HEGKTFYV

SEQ ID NO: 8527 - protein, 8 aa, synthetic construct
  REGION 1..8: note = Description of Artificial Sequence: Synthetic peptide
HEHEIAWY

SEQ ID NO: 8528 - protein, 9 aa, synthetic construct
  REGION 1..9: note = Description of Artificial Sequence: Synthetic peptide
HFISNSWLM

SEQ ID NO: 8529 - protein, 9 aa, synthetic construct
  REGION 1..9: note = Description of Artificial Sequence: Synthetic peptide
HFRELGVVH

SEQ ID NO: 8530 - protein, 10 aa, synthetic construct
  REGION 1..10: note = Description of Artificial Sequence: Synthetic peptide
HGFELTSMKY

SEQ ID NO: 8531 - protein, 8 aa, synthetic construct
  REGION 1..8: note = Description of Artificial Sequence: Synthetic peptide
HHANEYRL

SEQ ID NO: 8532 - protein, 10 aa, synthetic construct
  REGION 1..10: note = Description of Artificial Sequence: Synthetic peptide
HISRQRLTKY

SEQ ID NO: 8533 - protein, 9 aa, synthetic construct
  REGION 1..9: note = Description of Artificial Sequence: Synthetic peptide
HKDKSAQCF

SEQ ID NO: 8534 - protein, 9 aa, synthetic construct
  REGION 1..9: note = Description of Artificial Sequence: Synthetic peptide
HKPPISFPL

SEQ ID NO: 8535 - protein, 10 aa, synthetic construct
  REGION 1..10: note = Description of Artificial Sequence: Synthetic peptide
HLIPLMYKGL

SEQ ID NO: 8536 - protein, 9 aa, synthetic construct
  REGION 1..9: note = Description of Artificial Sequence: Synthetic peptide
HNIALIWNV

SEQ ID NO: 8537 - protein, 9 aa, synthetic construct
  REGION 1..9: note = Description of Artificial Sequence: Synthetic peptide
HNSHEGKTF

SEQ ID NO: 8538 - protein, 8 aa, synthetic construct
  REGION 1..8: note = Description of Artificial Sequence: Synthetic peptide
HPNCVNCL

SEQ ID NO: 8539 - protein, 10 aa, synthetic construct
  REGION 1..10: note = Description of Artificial Sequence: Synthetic peptide
HPNQEYADVF

SEQ ID NO: 8540 - protein, 8 aa, synthetic construct
  REGION 1..8: note = Description of Artificial Sequence: Synthetic peptide
HSIGFDYV

SEQ ID NO: 8541 - protein, 8 aa, synthetic construct
  REGION 1..8: note = Description of Artificial Sequence: Synthetic peptide
HSWNADLY

SEQ ID NO: 8542 - protein, 9 aa, synthetic construct
  REGION 1..9: note = Description of Artificial Sequence: Synthetic peptide
HTSPDVDLG

SEQ ID NO: 8543 - protein, 11 aa, synthetic construct
  REGION 1..11: note = Description of Artificial Sequence: Synthetic peptide
HTTDPSFLGRY

SEQ ID NO: 8544 - protein, 9 aa, synthetic construct
  REGION 1..9: note = Description of Artificial Sequence: Synthetic peptide
HVDTDLTKP

SEQ ID NO: 8545 - protein, 9 aa, synthetic construct
  REGION 1..9: note = Description of Artificial Sequence: Synthetic peptide
IAANTVIWD

SEQ ID NO: 8546 - protein, 10 aa, synthetic construct
  REGION 1..10: note = Description of Artificial Sequence: Synthetic peptide
IAANTVIWDY

SEQ ID NO: 8547 - protein, 9 aa, synthetic construct
  REGION 1..9: note = Description of Artificial Sequence: Synthetic peptide
IAPGQTGKI

SEQ ID NO: 8548 - protein, 9 aa, synthetic construct
  REGION 1..9: note = Description of Artificial Sequence: Synthetic peptide
ICHDGKAHF

SEQ ID NO: 8549 - protein, 8 aa, synthetic construct
  REGION 1..8: note = Description of Artificial Sequence: Synthetic peptide
ICYTPSKL

SEQ ID NO: 8550 - protein, 9 aa, synthetic construct
  REGION 1..9: note = Description of Artificial Sequence: Synthetic peptide
IDHPNPKGF

SEQ ID NO: 8551 - protein, 8 aa, synthetic construct
  REGION 1..8: note = Description of Artificial Sequence: Synthetic peptide
IDYDCVSF

SEQ ID NO: 8552 - protein, 8 aa, synthetic construct
  REGION 1..8: note = Description of Artificial Sequence: Synthetic peptide
IEFLKRGD

SEQ ID NO: 8553 - protein, 9 aa, synthetic construct
  REGION 1..9: note = Description of Artificial Sequence: Synthetic peptide
IFFASFYYV

SEQ ID NO: 8554 - protein, 10 aa, synthetic construct
  REGION 1..10: note = Description of Artificial Sequence: Synthetic peptide
IFGADPIHSL

SEQ ID NO: 8555 - protein, 8 aa, synthetic construct
  REGION 1..8: note = Description of Artificial Sequence: Synthetic peptide
IFLIVAAI

SEQ ID NO: 8556 - protein, 9 aa, synthetic construct
  REGION 1..9: note = Description of Artificial Sequence: Synthetic peptide
IFLIVAAIV

SEQ ID NO: 8557 - protein, 8 aa, synthetic construct
  REGION 1..8: note = Description of Artificial Sequence: Synthetic peptide
IGFLFLTW

SEQ ID NO: 8558 - protein, 8 aa, synthetic construct
  REGION 1..8: note = Description of Artificial Sequence: Synthetic peptide
IGINITRF

SEQ ID NO: 8559 - protein, 9 aa, synthetic construct
  REGION 1..9: note = Description of Artificial Sequence: Synthetic peptide
IIIGGAKLK

SEQ ID NO: 8560 - protein, 9 aa, synthetic construct
  REGION 1..9: note = Description of Artificial Sequence: Synthetic peptide
IINNTVYTK

SEQ ID NO: 8561 - protein, 9 aa, synthetic construct
  REGION 1..9: note = Description of Artificial Sequence: Synthetic peptide
IKLIFLWLL

SEQ ID NO: 8562 - protein, 9 aa, synthetic construct
  REGION 1..9: note = Description of Artificial Sequence: Synthetic peptide
ILANTCTER

SEQ ID NO: 8563 - protein, 10 aa, synthetic construct
  REGION 1..10: note = Description of Artificial Sequence: Synthetic peptide
ILLNKHIDAY

SEQ ID NO: 8564 - protein, 9 aa, synthetic construct
  REGION 1..9: note = Description of Artificial Sequence: Synthetic peptide
ILLNVPLHG

SEQ ID NO: 8565 - protein, 10 aa, synthetic construct
  REGION 1..10: note = Description of Artificial Sequence: Synthetic peptide
ILSDDAVVCF

SEQ ID NO: 8566 - protein, 8 aa, synthetic construct
  REGION 1..8: note = Description of Artificial Sequence: Synthetic peptide
INDMILSL

SEQ ID NO: 8567 - protein, 9 aa, synthetic construct
  REGION 1..9: note = Description of Artificial Sequence: Synthetic peptide
INDMILSLL

SEQ ID NO: 8568 - protein, 9 aa, synthetic construct
  REGION 1..9: note = Description of Artificial Sequence: Synthetic peptide
INFVRIIMR

SEQ ID NO: 8569 - protein, 9 aa, synthetic construct
  REGION 1..9: note = Description of Artificial Sequence: Synthetic peptide
IPIQASLPF

SEQ ID NO: 8570 - protein, 9 aa, synthetic construct
  REGION 1..9: note = Description of Artificial Sequence: Synthetic peptide
IPKEEVKPF

SEQ ID NO: 8571 - protein, 9 aa, synthetic construct
  REGION 1..9: note = Description of Artificial Sequence: Synthetic peptide
IQPGQTFSV

SEQ ID NO: 8572 - protein, 9 aa, synthetic construct
  REGION 1..9: note = Description of Artificial Sequence: Synthetic peptide
IRKSNHNFL

SEQ ID NO: 8573 - protein, 8 aa, synthetic construct
  REGION 1..8: note = Description of Artificial Sequence: Synthetic peptide
ISAGFSLW

SEQ ID NO: 8574 - protein, 8 aa, synthetic construct
  REGION 1..8: note = Description of Artificial Sequence: Synthetic peptide
ISDEFSSN

SEQ ID NO: 8575 - protein, 8 aa, synthetic construct
  REGION 1..8: note = Description of Artificial Sequence: Synthetic peptide
ISDEVARD

SEQ ID NO: 8576 - protein, 11 aa, synthetic construct
  REGION 1..11: note = Description of Artificial Sequence: Synthetic peptide
ISDEVARDLSL

SEQ ID NO: 8577 - protein, 8 aa, synthetic construct
  REGION 1..8: note = Description of Artificial Sequence: Synthetic peptide
ISMWALII

SEQ ID NO: 8578 - protein, 8 aa, synthetic construct
  REGION 1..8: note = Description of Artificial Sequence: Synthetic peptide
ISVTTEIL

SEQ ID NO: 8579 - protein, 10 aa, synthetic construct
  REGION 1..10: note = Description of Artificial Sequence: Synthetic peptide
ITEEVGHTDL

SEQ ID NO: 8580 - protein, 9 aa, synthetic construct
  REGION 1..9: note = Description of Artificial Sequence: Synthetic peptide
ITHDVSSAI

SEQ ID NO: 8581 - protein, 11 aa, synthetic construct
  REGION 1..11: note = Description of Artificial Sequence: Synthetic peptide
ITHDVSSAINR

SEQ ID NO: 8582 - protein, 8 aa, synthetic construct
  REGION 1..8: note = Description of Artificial Sequence: Synthetic peptide
ITSKETLY

SEQ ID NO: 8583 - protein, 9 aa, synthetic construct
  REGION 1..9: note = Description of Artificial Sequence: Synthetic peptide
ITTYPGQGL

SEQ ID NO: 8584 - protein, 8 aa, synthetic construct
  REGION 1..8: note = Description of Artificial Sequence: Synthetic peptide
IVDEPEEH

SEQ ID NO: 8585 - protein, 8 aa, synthetic construct
  REGION 1..8: note = Description of Artificial Sequence: Synthetic peptide
IVFDGKSK

SEQ ID NO: 8586 - protein, 8 aa, synthetic construct
  REGION 1..8: note = Description of Artificial Sequence: Synthetic peptide
IVFITLCF

SEQ ID NO: 8587 - protein, 9 aa, synthetic construct
  REGION 1..9: note = Description of Artificial Sequence: Synthetic peptide
IVGVALLAV

SEQ ID NO: 8588 - protein, 9 aa, synthetic construct
  REGION 1..9: note = Description of Artificial Sequence: Synthetic peptide
IVKTDGTLM

SEQ ID NO: 8589 - protein, 9 aa, synthetic construct
  REGION 1..9: note = Description of Artificial Sequence: Synthetic peptide
IYQTSNFRV

SEQ ID NO: 8590 - protein, 9 aa, synthetic construct
  REGION 1..9: note = Description of Artificial Sequence: Synthetic peptide
KADETQALP

SEQ ID NO: 8591 - protein, 8 aa, synthetic construct
  REGION 1..8: note = Description of Artificial Sequence: Synthetic peptide
KAPKEIIF

SEQ ID NO: 8592 - protein, 9 aa, synthetic construct
  REGION 1..9: note = Description of Artificial Sequence: Synthetic peptide
KATNNAMQV

SEQ ID NO: 8593 - protein, 8 aa, synthetic construct
  REGION 1..8: note = Description of Artificial Sequence: Synthetic peptide
KAVFISPY

SEQ ID NO: 8594 - protein, 8 aa, synthetic construct
  REGION 1..8: note = Description of Artificial Sequence: Synthetic peptide
KCTSVVLL

SEQ ID NO: 8595 - protein, 10 aa, synthetic construct
  REGION 1..10: note = Description of Artificial Sequence: Synthetic peptide
KCYGVSPTKL

SEQ ID NO: 8596 - protein, 10 aa, synthetic construct
  REGION 1..10: note = Description of Artificial Sequence: Synthetic peptide
KESPFELEDF

SEQ ID NO: 8597 - protein, 9 aa, synthetic construct
  REGION 1..9: note = Description of Artificial Sequence: Synthetic peptide
KGEDIQLLK

SEQ ID NO: 8598 - protein, 9 aa, synthetic construct
  REGION 1..9: note = Description of Artificial Sequence: Synthetic peptide
KGGKIVNNW

SEQ ID NO: 8599 - protein, 9 aa, synthetic construct
  REGION 1..9: note = Description of Artificial Sequence: Synthetic peptide
KGGRFVLAL

SEQ ID NO: 8600 - protein, 9 aa, synthetic construct
  REGION 1..9: note = Description of Artificial Sequence: Synthetic peptide
KHTDFSSEI

SEQ ID NO: 8601 - protein, 10 aa, synthetic construct
  REGION 1..10: note = Description of Artificial Sequence: Synthetic peptide
KIAEIPKEEV

SEQ ID NO: 8602 - protein, 9 aa, synthetic construct
  REGION 1..9: note = Description of Artificial Sequence: Synthetic peptide
KIITLKKRW

SEQ ID NO: 8603 - protein, 10 aa, synthetic construct
  REGION 1..10: note = Description of Artificial Sequence: Synthetic peptide
KILGLPTQTV

SEQ ID NO: 8604 - protein, 9 aa, synthetic construct
  REGION 1..9: note = Description of Artificial Sequence: Synthetic peptide
KKLDGFMGR

SEQ ID NO: 8605 - protein, 8 aa, synthetic construct
  REGION 1..8: note = Description of Artificial Sequence: Synthetic peptide
KKPASREL

SEQ ID NO: 8606 - protein, 10 aa, synthetic construct
  REGION 1..10: note = Description of Artificial Sequence: Synthetic peptide
KLDGVVCTEI

SEQ ID NO: 8607 - protein, 9 aa, synthetic construct
  REGION 1..9: note = Description of Artificial Sequence: Synthetic peptide
KLFAAETLK

SEQ ID NO: 8608 - protein, 8 aa, synthetic construct
  REGION 1..8: note = Description of Artificial Sequence: Synthetic peptide
KLIEYTDF

SEQ ID NO: 8609 - protein, 8 aa, synthetic construct
  REGION 1..8: note = Description of Artificial Sequence: Synthetic peptide
KLIFLWLL

SEQ ID NO: 8610 - protein, 9 aa, synthetic construct
  REGION 1..9: note = Description of Artificial Sequence: Synthetic peptide
KLKTLVATA

SEQ ID NO: 8611 - protein, 10 aa, synthetic construct
  REGION 1..10: note = Description of Artificial Sequence: Synthetic peptide
KLLEQWNLVI

SEQ ID NO: 8612 - protein, 11 aa, synthetic construct
  REGION 1..11: note = Description of Artificial Sequence: Synthetic peptide
KLNDLCFTNVY

SEQ ID NO: 8613 - protein, 9 aa, synthetic construct
  REGION 1..9: note = Description of Artificial Sequence: Synthetic peptide
KLTDNVYIK

SEQ ID NO: 8614 - protein, 9 aa, synthetic construct
  REGION 1..9: note = Description of Artificial Sequence: Synthetic peptide
KNVSLDNVL

SEQ ID NO: 8615 - protein, 9 aa, synthetic construct
  REGION 1..9: note = Description of Artificial Sequence: Synthetic peptide
KPANNSLKI

SEQ ID NO: 8616 - protein, 8 aa, synthetic construct
  REGION 1..8: note = Description of Artificial Sequence: Synthetic peptide
KPPPGDQF

SEQ ID NO: 8617 - protein, 10 aa, synthetic construct
  REGION 1..10: note = Description of Artificial Sequence: Synthetic peptide
KPRPPLNRNY

SEQ ID NO: 8618 - protein, 9 aa, synthetic construct
  REGION 1..9: note = Description of Artificial Sequence: Synthetic peptide
KRFDNPVLP

SEQ ID NO: 8619 - protein, 9 aa, synthetic construct
  REGION 1..9: note = Description of Artificial Sequence: Synthetic peptide
KRSFIEDLL

SEQ ID NO: 8620 - protein, 9 aa, synthetic construct
  REGION 1..9: note = Description of Artificial Sequence: Synthetic peptide
KSAFVNLKQ

SEQ ID NO: 8621 - protein, 9 aa, synthetic construct
  REGION 1..9: note = Description of Artificial Sequence: Synthetic peptide
KSATCITRC

SEQ ID NO: 8622 - protein, 8 aa, synthetic construct
  REGION 1..8: note = Description of Artificial Sequence: Synthetic peptide
KSEDAQGM

SEQ ID NO: 8623 - protein, 10 aa, synthetic construct
  REGION 1..10: note = Description of Artificial Sequence: Synthetic peptide
KSFTVEKGIY

SEQ ID NO: 8624 - protein, 10 aa, synthetic construct
  REGION 1..10: note = Description of Artificial Sequence: Synthetic peptide
KSHFAIGLAL

SEQ ID NO: 8625 - protein, 10 aa, synthetic construct
  REGION 1..10: note = Description of Artificial Sequence: Synthetic peptide
KSNIIRGWIF

SEQ ID NO: 8626 - protein, 10 aa, synthetic construct
  REGION 1..10: note = Description of Artificial Sequence: Synthetic peptide
KSQDLSVVSK

SEQ ID NO: 8627 - protein, 8 aa, synthetic construct
  REGION 1..8: note = Description of Artificial Sequence: Synthetic peptide
KSREETGL

SEQ ID NO: 8628 - protein, 9 aa, synthetic construct
  REGION 1..9: note = Description of Artificial Sequence: Synthetic peptide
KTCGQQQTT

SEQ ID NO: 8629 - protein, 10 aa, synthetic construct
  REGION 1..10: note = Description of Artificial Sequence: Synthetic peptide
KTCGQQQTTL

SEQ ID NO: 8630 - protein, 10 aa, synthetic construct
  REGION 1..10: note = Description of Artificial Sequence: Synthetic peptide
KTFPPTEPKK

SEQ ID NO: 8631 - protein, 9 aa, synthetic construct
  REGION 1..9: note = Description of Artificial Sequence: Synthetic peptide
KTFYVLPND

SEQ ID NO: 8632 - protein, 8 aa, synthetic construct
  REGION 1..8: note = Description of Artificial Sequence: Synthetic peptide
KTGDLQPL

SEQ ID NO: 8633 - protein, 8 aa, synthetic construct
  REGION 1..8: note = Description of Artificial Sequence: Synthetic peptide
KTIGPDMF

SEQ ID NO: 8634 - protein, 9 aa, synthetic construct
  REGION 1..9: note = Description of Artificial Sequence: Synthetic peptide
KTLLSLREV

SEQ ID NO: 8635 - protein, 10 aa, synthetic construct
  REGION 1..10: note = Description of Artificial Sequence: Synthetic peptide
KTLQPVSELL

SEQ ID NO: 8636 - protein, 10 aa, synthetic construct
  REGION 1..10: note = Description of Artificial Sequence: Synthetic peptide
KTTLPVNVAF

SEQ ID NO: 8637 - protein, 9 aa, synthetic construct
  REGION 1..9: note = Description of Artificial Sequence: Synthetic peptide
KVFRSSVLH

SEQ ID NO: 8638 - protein, 11 aa, synthetic construct
  REGION 1..11: note = Description of Artificial Sequence: Synthetic peptide
KVPTDNYITTY

SEQ ID NO: 8639 - protein, 9 aa, synthetic construct
  REGION 1..9: note = Description of Artificial Sequence: Synthetic peptide
KVTIDYTEI

SEQ ID NO: 8640 - protein, 8 aa, synthetic construct
  REGION 1..8: note = Description of Artificial Sequence: Synthetic peptide
KVTLVFLF

SEQ ID NO: 8641 - protein, 9 aa, synthetic construct
  REGION 1..9: note = Description of Artificial Sequence: Synthetic peptide
KWDLIISDM

SEQ ID NO: 8642 - protein, 9 aa, synthetic construct
  REGION 1..9: note = Description of Artificial Sequence: Synthetic peptide
KWDLTAFGL

SEQ ID NO: 8643 - protein, 9 aa, synthetic construct
  REGION 1..9: note = Description of Artificial Sequence: Synthetic peptide
KWGKARLYY

SEQ ID NO: 8644 - protein, 10 aa, synthetic construct
  REGION 1..10: note = Description of Artificial Sequence: Synthetic peptide
KYLVQQESPF

SEQ ID NO: 8645 - protein, 8 aa, synthetic construct
  REGION 1..8: note = Description of Artificial Sequence: Synthetic peptide
KYNENGTI

SEQ ID NO: 8646 - protein, 9 aa, synthetic construct
  REGION 1..9: note = Description of Artificial Sequence: Synthetic peptide
KYNENGTIT

SEQ ID NO: 8647 - protein, 9 aa, synthetic construct
  REGION 1..9: note = Description of Artificial Sequence: Synthetic peptide
LAAVNSVPW

SEQ ID NO: 8648 - protein, 11 aa, synthetic construct
  REGION 1..11: note = Description of Artificial Sequence: Synthetic peptide
LAFVVFLLVTL

SEQ ID NO: 8649 - protein, 9 aa, synthetic construct
  REGION 1..9: note = Description of Artificial Sequence: Synthetic peptide
LALYNKYKY

SEQ ID NO: 8650 - protein, 8 aa, synthetic construct
  REGION 1..8: note = Description of Artificial Sequence: Synthetic peptide
LATNNLVV

SEQ ID NO: 8651 - protein, 10 aa, synthetic construct
  REGION 1..10: note = Description of Artificial Sequence: Synthetic peptide
LAVPYNMRVI

SEQ ID NO: 8652 - protein, 8 aa, synthetic construct
  REGION 1..8: note = Description of Artificial Sequence: Synthetic peptide
LAWLYAAV

SEQ ID NO: 8653 - protein, 8 aa, synthetic construct
  REGION 1..8: note = Description of Artificial Sequence: Synthetic peptide
LAYCNKTV

SEQ ID NO: 8654 - protein, 9 aa, synthetic construct
  REGION 1..9: note = Description of Artificial Sequence: Synthetic peptide
LAYYFMRFR

SEQ ID NO: 8655 - protein, 8 aa, synthetic construct
  REGION 1..8: note = Description of Artificial Sequence: Synthetic peptide
LDYIINLI

SEQ ID NO: 8656 - protein, 9 aa, synthetic construct
  REGION 1..9: note = Description of Artificial Sequence: Synthetic peptide
LEFGATSAA

SEQ ID NO: 8657 - protein, 10 aa, synthetic construct
  REGION 1..10: note = Description of Artificial Sequence: Synthetic peptide
LEFGATSAAL

SEQ ID NO: 8658 - protein, 8 aa, synthetic construct
  REGION 1..8: note = Description of Artificial Sequence: Synthetic peptide
LEGSVRVV

SEQ ID NO: 8659 - protein, 8 aa, synthetic construct
  REGION 1..8: note = Description of Artificial Sequence: Synthetic peptide
LETAQNSV

SEQ ID NO: 8660 - protein, 8 aa, synthetic construct
  REGION 1..8: note = Description of Artificial Sequence: Synthetic peptide
LETIQITI

SEQ ID NO: 8661 - protein, 8 aa, synthetic construct
  REGION 1..8: note = Description of Artificial Sequence: Synthetic peptide
LFDRYFKY

SEQ ID NO: 8662 - protein, 8 aa, synthetic construct
  REGION 1..8: note = Description of Artificial Sequence: Synthetic peptide
LFENKTTL

SEQ ID NO: 8663 - protein, 10 aa, synthetic construct
  REGION 1..10: note = Description of Artificial Sequence: Synthetic peptide
LFFFLYENAF

SEQ ID NO: 8664 - protein, 9 aa, synthetic construct
  REGION 1..9: note = Description of Artificial Sequence: Synthetic peptide
LFLPFFSNV

SEQ ID NO: 8665 - protein, 9 aa, synthetic construct
  REGION 1..9: note = Description of Artificial Sequence: Synthetic peptide
LGFSTGVNL

SEQ ID NO: 8666 - protein, 10 aa, synthetic construct
  REGION 1..10: note = Description of Artificial Sequence: Synthetic peptide
LIDLQELGKY

SEQ ID NO: 8667 - protein, 10 aa, synthetic construct
  REGION 1..10: note = Description of Artificial Sequence: Synthetic peptide
LIIFWFSLEL

SEQ ID NO: 8668 - protein, 9 aa, synthetic construct
  REGION 1..9: note = Description of Artificial Sequence: Synthetic peptide
LITLATCEL

SEQ ID NO: 8669 - protein, 9 aa, synthetic construct
  REGION 1..9: note = Description of Artificial Sequence: Synthetic peptide
LKAPKEIIF

SEQ ID NO: 8670 - protein, 9 aa, synthetic construct
  REGION 1..9: note = Description of Artificial Sequence: Synthetic peptide
LKSPNFSKL

SEQ ID NO: 8671 - protein, 8 aa, synthetic construct
  REGION 1..8: note = Description of Artificial Sequence: Synthetic peptide
LLALHRSY

SEQ ID NO: 8672 - protein, 10 aa, synthetic construct
  REGION 1..10: note = Description of Artificial Sequence: Synthetic peptide
LLFLAFVVFL

SEQ ID NO: 8673 - protein, 9 aa, synthetic construct
  REGION 1..9: note = Description of Artificial Sequence: Synthetic peptide
LLFLMSFTV

SEQ ID NO: 8674 - protein, 10 aa, synthetic construct
  REGION 1..10: note = Description of Artificial Sequence: Synthetic peptide
LLHKPIVWHV

SEQ ID NO: 8675 - protein, 9 aa, synthetic construct
  REGION 1..9: note = Description of Artificial Sequence: Synthetic peptide
LLLDKRTTC

SEQ ID NO: 8676 - protein, 8 aa, synthetic construct
  REGION 1..8: note = Description of Artificial Sequence: Synthetic peptide
LLSDLQDL

SEQ ID NO: 8677 - protein, 8 aa, synthetic construct
  REGION 1..8: note = Description of Artificial Sequence: Synthetic peptide
LLTILTSL

SEQ ID NO: 8678 - protein, 9 aa, synthetic construct
  REGION 1..9: note = Description of Artificial Sequence: Synthetic peptide
LLTLQQIEL

SEQ ID NO: 8679 - protein, 9 aa, synthetic construct
  REGION 1..9: note = Description of Artificial Sequence: Synthetic peptide
LMCQPILLL

SEQ ID NO: 8680 - protein, 9 aa, synthetic construct
  REGION 1..9: note = Description of Artificial Sequence: Synthetic peptide
LNDFNLVAM

SEQ ID NO: 8681 - protein, 8 aa, synthetic construct
  REGION 1..8: note = Description of Artificial Sequence: Synthetic peptide
LNDLNETL

SEQ ID NO: 8682 - protein, 9 aa, synthetic construct
  REGION 1..9: note = Description of Artificial Sequence: Synthetic peptide
LNDLNETLV

SEQ ID NO: 8683 - protein, 9 aa, synthetic construct
  REGION 1..9: note = Description of Artificial Sequence: Synthetic peptide
LPDPSKPSK

SEQ ID NO: 8684 - protein, 11 aa, synthetic construct
  REGION 1..11: note = Description of Artificial Sequence: Synthetic peptide
LPETTADIVVF

SEQ ID NO: 8685 - protein, 8 aa, synthetic construct
  REGION 1..8: note = Description of Artificial Sequence: Synthetic peptide
LPFGWLIV

SEQ ID NO: 8686 - protein, 12 aa, synthetic construct
  REGION 1..12: note = Description of Artificial Sequence: Synthetic peptide
LPFGWLIVGVAL

SEQ ID NO: 8687 - protein, 9 aa, synthetic construct
  REGION 1..9: note = Description of Artificial Sequence: Synthetic peptide
LPGTILRTT

SEQ ID NO: 8688 - protein, 10 aa, synthetic construct
  REGION 1..10: note = Description of Artificial Sequence: Synthetic peptide
LPIDKCSRII

SEQ ID NO: 8689 - protein, 9 aa, synthetic construct
  REGION 1..9: note = Description of Artificial Sequence: Synthetic peptide
LPKGIMMNV

SEQ ID NO: 8690 - protein, 9 aa, synthetic construct
  REGION 1..9: note = Description of Artificial Sequence: Synthetic peptide
LPPLLTDEM

SEQ ID NO: 8691 - protein, 9 aa, synthetic construct
  REGION 1..9: note = Description of Artificial Sequence: Synthetic peptide
LPVLQVRDV

SEQ ID NO: 8692 - protein, 8 aa, synthetic construct
  REGION 1..8: note = Description of Artificial Sequence: Synthetic peptide
LQFTSLEI

SEQ ID NO: 8693 - protein, 9 aa, synthetic construct
  REGION 1..9: note = Description of Artificial Sequence: Synthetic peptide
LQKAAITIL

SEQ ID NO: 8694 - protein, 9 aa, synthetic construct
  REGION 1..9: note = Description of Artificial Sequence: Synthetic peptide
LQSLENVAF

SEQ ID NO: 8695 - protein, 9 aa, synthetic construct
  REGION 1..9: note = Description of Artificial Sequence: Synthetic peptide
LRGTAVMSL

SEQ ID NO: 8696 - protein, 10 aa, synthetic construct
  REGION 1..10: note = Description of Artificial Sequence: Synthetic peptide
LSDRELHLSW

SEQ ID NO: 8697 - protein, 8 aa, synthetic construct
  REGION 1..8: note = Description of Artificial Sequence: Synthetic peptide
LSDRVVFV

SEQ ID NO: 8698 - protein, 10 aa, synthetic construct
  REGION 1..10: note = Description of Artificial Sequence: Synthetic peptide
LSGLDSLDTY

SEQ ID NO: 8699 - protein, 8 aa, synthetic construct
  REGION 1..8: note = Description of Artificial Sequence: Synthetic peptide
LTILTSLL

SEQ ID NO: 8700 - protein, 10 aa, synthetic construct
  REGION 1..10: note = Description of Artificial Sequence: Synthetic peptide
LTILTSLLVL

SEQ ID NO: 8701 - protein, 8 aa, synthetic construct
  REGION 1..8: note = Description of Artificial Sequence: Synthetic peptide
LTKPYIKW

SEQ ID NO: 8702 - protein, 9 aa, synthetic construct
  REGION 1..9: note = Description of Artificial Sequence: Synthetic peptide
LVFLGIITT

SEQ ID NO: 8703 - protein, 9 aa, synthetic construct
  REGION 1..9: note = Description of Artificial Sequence: Synthetic peptide
LVKNKCVNF

SEQ ID NO: 8704 - protein, 9 aa, synthetic construct
  REGION 1..9: note = Description of Artificial Sequence: Synthetic peptide
LVSTQEFRY

SEQ ID NO: 8705 - protein, 8 aa, synthetic construct
  REGION 1..8: note = Description of Artificial Sequence: Synthetic peptide
LWAHGFEL

SEQ ID NO: 8706 - protein, 9 aa, synthetic construct
  REGION 1..9: note = Description of Artificial Sequence: Synthetic peptide
LYDANYFLC

SEQ ID NO: 8707 - protein, 10 aa, synthetic construct
  REGION 1..10: note = Description of Artificial Sequence: Synthetic peptide
LYDKLQFTSL

SEQ ID NO: 8708 - protein, 10 aa, synthetic construct
  REGION 1..10: note = Description of Artificial Sequence: Synthetic peptide
LYFIKGLNNL

SEQ ID NO: 8709 - protein, 10 aa, synthetic construct
  REGION 1..10: note = Description of Artificial Sequence: Synthetic peptide
LYIIKLIFLW

SEQ ID NO: 8710 - protein, 9 aa, synthetic construct
  REGION 1..9: note = Description of Artificial Sequence: Synthetic peptide
LYLDAYNMM

SEQ ID NO: 8711 - protein, 9 aa, synthetic construct
  REGION 1..9: note = Description of Artificial Sequence: Synthetic peptide
LYLTFYLTN

SEQ ID NO: 8712 - protein, 8 aa, synthetic construct
  REGION 1..8: note = Description of Artificial Sequence: Synthetic peptide
LYNKYKYF

SEQ ID NO: 8713 - protein, 10 aa, synthetic construct
  REGION 1..10: note = Description of Artificial Sequence: Synthetic peptide
LYNSASFSTF

SEQ ID NO: 8714 - protein, 9 aa, synthetic construct
  REGION 1..9: note = Description of Artificial Sequence: Synthetic peptide
LYYQNNVFM

SEQ ID NO: 8715 - protein, 10 aa, synthetic construct
  REGION 1..10: note = Description of Artificial Sequence: Synthetic peptide
MADQAMTQMY

SEQ ID NO: 8716 - protein, 9 aa, synthetic construct
  REGION 1..9: note = Description of Artificial Sequence: Synthetic peptide
MAFPSGKVE

SEQ ID NO: 8717 - protein, 8 aa, synthetic construct
  REGION 1..8: note = Description of Artificial Sequence: Synthetic peptide
MEKLKTLV

SEQ ID NO: 8718 - protein, 9 aa, synthetic construct
  REGION 1..9: note = Description of Artificial Sequence: Synthetic peptide
MEKLKTLVA

SEQ ID NO: 8719 - protein, 10 aa, synthetic construct
  REGION 1..10: note = Description of Artificial Sequence: Synthetic peptide
MELTPVVQTI

SEQ ID NO: 8720 - protein, 9 aa, synthetic construct
  REGION 1..9: note = Description of Artificial Sequence: Synthetic peptide
MGYINVFAF

SEQ ID NO: 8721 - protein, 9 aa, synthetic construct
  REGION 1..9: note = Description of Artificial Sequence: Synthetic peptide
MIDVQQWGF

SEQ ID NO: 8722 - protein, 8 aa, synthetic construct
  REGION 1..8: note = Description of Artificial Sequence: Synthetic peptide
MIERFVSL

SEQ ID NO: 8723 - protein, 8 aa, synthetic construct
  REGION 1..8: note = Description of Artificial Sequence: Synthetic peptide
MLDNRATL

SEQ ID NO: 8724 - protein, 10 aa, synthetic construct
  REGION 1..10: note = Description of Artificial Sequence: Synthetic peptide
MPLGYVTHGL

SEQ ID NO: 8725 - protein, 9 aa, synthetic construct
  REGION 1..9: note = Description of Artificial Sequence: Synthetic peptide
MRIFTIGTV

SEQ ID NO: 8726 - protein, 9 aa, synthetic construct
  REGION 1..9: note = Description of Artificial Sequence: Synthetic peptide
MRNAGIVGV

SEQ ID NO: 8727 - protein, 10 aa, synthetic construct
  REGION 1..10: note = Description of Artificial Sequence: Synthetic peptide
MRNAGIVGVL

SEQ ID NO: 8728 - protein, 9 aa, synthetic construct
  REGION 1..9: note = Description of Artificial Sequence: Synthetic peptide
MSDVKCTSV

SEQ ID NO: 8729 - protein, 8 aa, synthetic construct
  REGION 1..8: note = Description of Artificial Sequence: Synthetic peptide
MVSLLSVL

SEQ ID NO: 8730 - protein, 8 aa, synthetic construct
  REGION 1..8: note = Description of Artificial Sequence: Synthetic peptide
MWLIINLV

SEQ ID NO: 8731 - protein, 10 aa, synthetic construct
  REGION 1..10: note = Description of Artificial Sequence: Synthetic peptide
MWLSYFIASF

SEQ ID NO: 8732 - protein, 8 aa, synthetic construct
  REGION 1..8: note = Description of Artificial Sequence: Synthetic peptide
MYMGTLSY

SEQ ID NO: 8733 - protein, 9 aa, synthetic construct
  REGION 1..9: note = Description of Artificial Sequence: Synthetic peptide
NANQVIVNN

SEQ ID NO: 8734 - protein, 8 aa, synthetic construct
  REGION 1..8: note = Description of Artificial Sequence: Synthetic peptide
NAVASKIL

SEQ ID NO: 8735 - protein, 8 aa, synthetic construct
  REGION 1..8: note = Description of Artificial Sequence: Synthetic peptide
NDPVGFTL

SEQ ID NO: 8736 - protein, 9 aa, synthetic construct
  REGION 1..9: note = Description of Artificial Sequence: Synthetic peptide
NEFACVVAD

SEQ ID NO: 8737 - protein, 9 aa, synthetic construct
  REGION 1..9: note = Description of Artificial Sequence: Synthetic peptide
NEYRLYLDA

SEQ ID NO: 8738 - protein, 9 aa, synthetic construct
  REGION 1..9: note = Description of Artificial Sequence: Synthetic peptide
NFCALILAY

SEQ ID NO: 8739 - protein, 8 aa, synthetic construct
  REGION 1..8: note = Description of Artificial Sequence: Synthetic peptide
NFKNLREF

SEQ ID NO: 8740 - protein, 9 aa, synthetic construct
  REGION 1..9: note = Description of Artificial Sequence: Synthetic peptide
NFVFPLNSI

SEQ ID NO: 8741 - protein, 9 aa, synthetic construct
  REGION 1..9: note = Description of Artificial Sequence: Synthetic peptide
NFVRIIMRL

SEQ ID NO: 8742 - protein, 9 aa, synthetic construct
  REGION 1..9: note = Description of Artificial Sequence: Synthetic peptide
NGVEGFNCY

SEQ ID NO: 8743 - protein, 8 aa, synthetic construct
  REGION 1..8: note = Description of Artificial Sequence: Synthetic peptide
NIKPVPEV

SEQ ID NO: 8744 - protein, 9 aa, synthetic construct
  REGION 1..9: note = Description of Artificial Sequence: Synthetic peptide
NKWGKARLY

SEQ ID NO: 8745 - protein, 9 aa, synthetic construct
  REGION 1..9: note = Description of Artificial Sequence: Synthetic peptide
NLAKHCLHV

SEQ ID NO: 8746 - protein, 10 aa, synthetic construct
  REGION 1..10: note = Description of Artificial Sequence: Synthetic peptide
NLDSKVGGNY

SEQ ID NO: 8747 - protein, 8 aa, synthetic construct
  REGION 1..8: note = Description of Artificial Sequence: Synthetic peptide
NLEEAARY

SEQ ID NO: 8748 - protein, 10 aa, synthetic construct
  REGION 1..10: note = Description of Artificial Sequence: Synthetic peptide
NLIDSYFVVK

SEQ ID NO: 8749 - protein, 8 aa, synthetic construct
  REGION 1..8: note = Description of Artificial Sequence: Synthetic peptide
NLKTLLSL

SEQ ID NO: 8750 - protein, 9 aa, synthetic construct
  REGION 1..9: note = Description of Artificial Sequence: Synthetic peptide
NLKTLLSLR

SEQ ID NO: 8751 - protein, 9 aa, synthetic construct
  REGION 1..9: note = Description of Artificial Sequence: Synthetic peptide
NLLEILQKE

SEQ ID NO: 8752 - protein, 11 aa, synthetic construct
  REGION 1..11: note = Description of Artificial Sequence: Synthetic peptide
NLPGCDGGSLY

SEQ ID NO: 8753 - protein, 9 aa, synthetic construct
  REGION 1..9: note = Description of Artificial Sequence: Synthetic peptide
NLQSNHDLY

SEQ ID NO: 8754 - protein, 8 aa, synthetic construct
  REGION 1..8: note = Description of Artificial Sequence: Synthetic peptide
NPETNILL

SEQ ID NO: 8755 - protein, 9 aa, synthetic construct
  REGION 1..9: note = Description of Artificial Sequence: Synthetic peptide
NPFMIDVQQ

SEQ ID NO: 8756 - protein, 8 aa, synthetic construct
  REGION 1..8: note = Description of Artificial Sequence: Synthetic peptide
NPKAIKCV

SEQ ID NO: 8757 - protein, 9 aa, synthetic construct
  REGION 1..9: note = Description of Artificial Sequence: Synthetic peptide
NPNYEDLLI

SEQ ID NO: 8758 - protein, 9 aa, synthetic construct
  REGION 1..9: note = Description of Artificial Sequence: Synthetic peptide
NQFNSAIGK

SEQ ID NO: 8759 - protein, 9 aa, synthetic construct
  REGION 1..9: note = Description of Artificial Sequence: Synthetic peptide
NQPYPNASF

SEQ ID NO: 8760 - protein, 8 aa, synthetic construct
  REGION 1..8: note = Description of Artificial Sequence: Synthetic peptide
NQVIVNNL

SEQ ID NO: 8761 - protein, 9 aa, synthetic construct
  REGION 1..9: note = Description of Artificial Sequence: Synthetic peptide
NRGMVLGSL

SEQ ID NO: 8762 - protein, 9 aa, synthetic construct
  REGION 1..9: note = Description of Artificial Sequence: Synthetic peptide
NRNRFLYII

SEQ ID NO: 8763 - protein, 9 aa, synthetic construct
  REGION 1..9: note = Description of Artificial Sequence: Synthetic peptide
NRPQIGVVR

SEQ ID NO: 8764 - protein, 9 aa, synthetic construct
  REGION 1..9: note = Description of Artificial Sequence: Synthetic peptide
NSTLEQYVF

SEQ ID NO: 8765 - protein, 8 aa, synthetic construct
  REGION 1..8: note = Description of Artificial Sequence: Synthetic peptide
NTCDGTTF

SEQ ID NO: 8766 - protein, 10 aa, synthetic construct
  REGION 1..10: note = Description of Artificial Sequence: Synthetic peptide
NTKHSSGVTR

SEQ ID NO: 8767 - protein, 10 aa, synthetic construct
  REGION 1..10: note = Description of Artificial Sequence: Synthetic peptide
NTSNQVAVLY

SEQ ID NO: 8768 - protein, 9 aa, synthetic construct
  REGION 1..9: note = Description of Artificial Sequence: Synthetic peptide
NTWCIRCLW

SEQ ID NO: 8769 - protein, 9 aa, synthetic construct
  REGION 1..9: note = Description of Artificial Sequence: Synthetic peptide
NTYLEGSVR

SEQ ID NO: 8770 - protein, 9 aa, synthetic construct
  REGION 1..9: note = Description of Artificial Sequence: Synthetic peptide
NVAFELWAK

SEQ ID NO: 8771 - protein, 9 aa, synthetic construct
  REGION 1..9: note = Description of Artificial Sequence: Synthetic peptide
NVLTLVYKV

SEQ ID NO: 8772 - protein, 10 aa, synthetic construct
  REGION 1..10: note = Description of Artificial Sequence: Synthetic peptide
NVLTLVYKVY

SEQ ID NO: 8773 - protein, 11 aa, synthetic construct
  REGION 1..11: note = Description of Artificial Sequence: Synthetic peptide
NYITTYPGQGL

SEQ ID NO: 8774 - protein, 9 aa, synthetic construct
  REGION 1..9: note = Description of Artificial Sequence: Synthetic peptide
NYLGKPREQ

SEQ ID NO: 8775 - protein, 8 aa, synthetic construct
  REGION 1..8: note = Description of Artificial Sequence: Synthetic peptide
NYLKRRVV

SEQ ID NO: 8776 - protein, 8 aa, synthetic construct
  REGION 1..8: note = Description of Artificial Sequence: Synthetic peptide
NYLKSPNF

SEQ ID NO: 8777 - protein, 8 aa, synthetic construct
  REGION 1..8: note = Description of Artificial Sequence: Synthetic peptide
NYNYLYRL

SEQ ID NO: 8778 - protein, 9 aa, synthetic construct
  REGION 1..9: note = Description of Artificial Sequence: Synthetic peptide
NYQKVGMQK

SEQ ID NO: 8779 - protein, 11 aa, synthetic construct
  REGION 1..11: note = Description of Artificial Sequence: Synthetic peptide
NYQVNGYPNMF

SEQ ID NO: 8780 - protein, 10 aa, synthetic construct
  REGION 1..10: note = Description of Artificial Sequence: Synthetic peptide
NYSGVVTTVM

SEQ ID NO: 8781 - protein, 9 aa, synthetic construct
  REGION 1..9: note = Description of Artificial Sequence: Synthetic peptide
NYTVSCLPF

SEQ ID NO: 8782 - protein, 10 aa, synthetic construct
  REGION 1..10: note = Description of Artificial Sequence: Synthetic peptide
NYYKKDNSYF

SEQ ID NO: 8783 - protein, 8 aa, synthetic construct
  REGION 1..8: note = Description of Artificial Sequence: Synthetic peptide
PAFDKSAF

SEQ ID NO: 8784 - protein, 9 aa, synthetic construct
  REGION 1..9: note = Description of Artificial Sequence: Synthetic peptide
PAFDKSAFV

SEQ ID NO: 8785 - protein, 9 aa, synthetic construct
  REGION 1..9: note = Description of Artificial Sequence: Synthetic peptide
PEEHFIETI

SEQ ID NO: 8786 - protein, 9 aa, synthetic construct
  REGION 1..9: note = Description of Artificial Sequence: Synthetic peptide
PFFSNVTWF

SEQ ID NO: 8787 - protein, 10 aa, synthetic construct
  REGION 1..10: note = Description of Artificial Sequence: Synthetic peptide
PINPTDQSSY

SEQ ID NO: 8788 - protein, 9 aa, synthetic construct
  REGION 1..9: note = Description of Artificial Sequence: Synthetic peptide
PLIAAVITR

SEQ ID NO: 8789 - protein, 9 aa, synthetic construct
  REGION 1..9: note = Description of Artificial Sequence: Synthetic peptide
PLIQPIGAL

SEQ ID NO: 8790 - protein, 9 aa, synthetic construct
  REGION 1..9: note = Description of Artificial Sequence: Synthetic peptide
PLNSIIKTI

SEQ ID NO: 8791 - protein, 9 aa, synthetic construct
  REGION 1..9: note = Description of Artificial Sequence: Synthetic peptide
PLVDLPIGI

SEQ ID NO: 8792 - protein, 9 aa, synthetic construct
  REGION 1..9: note = Description of Artificial Sequence: Synthetic peptide
PTLNISDEF

SEQ ID NO: 8793 - protein, 9 aa, synthetic construct
  REGION 1..9: note = Description of Artificial Sequence: Synthetic peptide
PYCYDTNVL

SEQ ID NO: 8794 - protein, 9 aa, synthetic construct
  REGION 1..9: note = Description of Artificial Sequence: Synthetic peptide
PYNSVTSSI

SEQ ID NO: 8795 - protein, 9 aa, synthetic construct
  REGION 1..9: note = Description of Artificial Sequence: Synthetic peptide
QAGNVQLRV

SEQ ID NO: 8796 - protein, 9 aa, synthetic construct
  REGION 1..9: note = Description of Artificial Sequence: Synthetic peptide
QEAYEQAVA

SEQ ID NO: 8797 - protein, 8 aa, synthetic construct
  REGION 1..8: note = Description of Artificial Sequence: Synthetic peptide
QEGVLTAV

SEQ ID NO: 8798 - protein, 10 aa, synthetic construct
  REGION 1..10: note = Description of Artificial Sequence: Synthetic peptide
QEGVLTAVVI

SEQ ID NO: 8799 - protein, 9 aa, synthetic construct
  REGION 1..9: note = Description of Artificial Sequence: Synthetic peptide
QEHYVRITG

SEQ ID NO: 8800 - protein, 10 aa, synthetic construct
  REGION 1..10: note = Description of Artificial Sequence: Synthetic peptide
QEHYVRITGL

SEQ ID NO: 8801 - protein, 10 aa, synthetic construct
  REGION 1..10: note = Description of Artificial Sequence: Synthetic peptide
QELGKYEQYI

SEQ ID NO: 8802 - protein, 10 aa, synthetic construct
  REGION 1..10: note = Description of Artificial Sequence: Synthetic peptide
QELYSPIFLI

SEQ ID NO: 8803 - protein, 8 aa, synthetic construct
  REGION 1..8: note = Description of Artificial Sequence: Synthetic peptide
QGDDYVYL

SEQ ID NO: 8804 - protein, 9 aa, synthetic construct
  REGION 1..9: note = Description of Artificial Sequence: Synthetic peptide
QIDRLITGR

SEQ ID NO: 8805 - protein, 9 aa, synthetic construct
  REGION 1..9: note = Description of Artificial Sequence: Synthetic peptide
QLCQYLNTL

SEQ ID NO: 8806 - protein, 8 aa, synthetic construct
  REGION 1..8: note = Description of Artificial Sequence: Synthetic peptide
QLIKVTLV

SEQ ID NO: 8807 - protein, 8 aa, synthetic construct
  REGION 1..8: note = Description of Artificial Sequence: Synthetic peptide
QLLFVVEV

SEQ ID NO: 8808 - protein, 10 aa, synthetic construct
  REGION 1..10: note = Description of Artificial Sequence: Synthetic peptide
QPILLLDQAL

SEQ ID NO: 8809 - protein, 9 aa, synthetic construct
  REGION 1..9: note = Description of Artificial Sequence: Synthetic peptide
QPRVEKKKL

SEQ ID NO: 8810 - protein, 9 aa, synthetic construct
  REGION 1..9: note = Description of Artificial Sequence: Synthetic peptide
QPVSELLTP

SEQ ID NO: 8811 - protein, 9 aa, synthetic construct
  REGION 1..9: note = Description of Artificial Sequence: Synthetic peptide
QRNAPRITF

SEQ ID NO: 8812 - protein, 9 aa, synthetic construct
  REGION 1..9: note = Description of Artificial Sequence: Synthetic peptide
QSTQWSLFF

SEQ ID NO: 8813 - protein, 11 aa, synthetic construct
  REGION 1..11: note = Description of Artificial Sequence: Synthetic peptide
QTIEVNSFSGY

SEQ ID NO: 8814 - protein, 8 aa, synthetic construct
  REGION 1..8: note = Description of Artificial Sequence: Synthetic peptide
QTYVTQQL

SEQ ID NO: 8815 - protein, 9 aa, synthetic construct
  REGION 1..9: note = Description of Artificial Sequence: Synthetic peptide
QTYVTQQLI

SEQ ID NO: 8816 - protein, 10 aa, synthetic construct
  REGION 1..10: note = Description of Artificial Sequence: Synthetic peptide
QVRDVLVRGF

SEQ ID NO: 8817 - protein, 10 aa, synthetic construct
  REGION 1..10: note = Description of Artificial Sequence: Synthetic peptide
QWNLVIGFLF

SEQ ID NO: 8818 - protein, 9 aa, synthetic construct
  REGION 1..9: note = Description of Artificial Sequence: Synthetic peptide
QYELKHGTF

SEQ ID NO: 8819 - protein, 9 aa, synthetic construct
  REGION 1..9: note = Description of Artificial Sequence: Synthetic peptide
QYGSFCTQL

SEQ ID NO: 8820 - protein, 8 aa, synthetic construct
  REGION 1..8: note = Description of Artificial Sequence: Synthetic peptide
QYIDIGNY

SEQ ID NO: 8821 - protein, 9 aa, synthetic construct
  REGION 1..9: note = Description of Artificial Sequence: Synthetic peptide
QYIKWPWYI

SEQ ID NO: 8822 - protein, 9 aa, synthetic construct
  REGION 1..9: note = Description of Artificial Sequence: Synthetic peptide
QYNRYLALY

SEQ ID NO: 8823 - protein, 9 aa, synthetic construct
  REGION 1..9: note = Description of Artificial Sequence: Synthetic peptide
RAFDIYNDK

SEQ ID NO: 8824 - protein, 10 aa, synthetic construct
  REGION 1..10: note = Description of Artificial Sequence: Synthetic peptide
RAMPNMLRIM

SEQ ID NO: 8825 - protein, 9 aa, synthetic construct
  REGION 1..9: note = Description of Artificial Sequence: Synthetic peptide
RDLSLQFKR

SEQ ID NO: 8826 - protein, 8 aa, synthetic construct
  REGION 1..8: note = Description of Artificial Sequence: Synthetic peptide
RDVLVRGF

SEQ ID NO: 8827 - protein, 10 aa, synthetic construct
  REGION 1..10: note = Description of Artificial Sequence: Synthetic peptide
REEAIRHVRA

SEQ ID NO: 8828 - protein, 9 aa, synthetic construct
  REGION 1..9: note = Description of Artificial Sequence: Synthetic peptide
REFLTRNPA

SEQ ID NO: 8829 - protein, 8 aa, synthetic construct
  REGION 1..8: note = Description of Artificial Sequence: Synthetic peptide
REGVFVSN

SEQ ID NO: 8830 - protein, 9 aa, synthetic construct
  REGION 1..9: note = Description of Artificial Sequence: Synthetic peptide
RELKVTFFP

SEQ ID NO: 8831 - protein, 10 aa, synthetic construct
  REGION 1..10: note = Description of Artificial Sequence: Synthetic peptide
RELNGGAYTR

SEQ ID NO: 8832 - protein, 8 aa, synthetic construct
  REGION 1..8: note = Description of Artificial Sequence: Synthetic peptide
REPMLQSA

SEQ ID NO: 8833 - protein, 9 aa, synthetic construct
  REGION 1..9: note = Description of Artificial Sequence: Synthetic peptide
RFPNITNLC

SEQ ID NO: 8834 - protein, 8 aa, synthetic construct
  REGION 1..8: note = Description of Artificial Sequence: Synthetic peptide
RGDKSVYY

SEQ ID NO: 8835 - protein, 9 aa, synthetic construct
  REGION 1..9: note = Description of Artificial Sequence: Synthetic peptide
RHINAQVAK

SEQ ID NO: 8836 - protein, 10 aa, synthetic construct
  REGION 1..10: note = Description of Artificial Sequence: Synthetic peptide
RHSLSHFVNL

SEQ ID NO: 8837 - protein, 8 aa, synthetic construct
  REGION 1..8: note = Description of Artificial Sequence: Synthetic peptide
RIFTIGTV

SEQ ID NO: 8838 - protein, 11 aa, synthetic construct
  REGION 1..11: note = Description of Artificial Sequence: Synthetic peptide
RIFTIGTVTLK

SEQ ID NO: 8839 - protein, 8 aa, synthetic construct
  REGION 1..8: note = Description of Artificial Sequence: Synthetic peptide
RIMASLVL

SEQ ID NO: 8840 - protein, 10 aa, synthetic construct
  REGION 1..10: note = Description of Artificial Sequence: Synthetic peptide
RIMASLVLAR

SEQ ID NO: 8841 - protein, 8 aa, synthetic construct
  REGION 1..8: note = Description of Artificial Sequence: Synthetic peptide
RKYKGIKI

SEQ ID NO: 8842 - protein, 9 aa, synthetic construct
  REGION 1..9: note = Description of Artificial Sequence: Synthetic peptide
RLANECAQV

SEQ ID NO: 8843 - protein, 9 aa, synthetic construct
  REGION 1..9: note = Description of Artificial Sequence: Synthetic peptide
RLFRKSNLK

SEQ ID NO: 8844 - protein, 8 aa, synthetic construct
  REGION 1..8: note = Description of Artificial Sequence: Synthetic peptide
RLQSLENV

SEQ ID NO: 8845 - protein, 9 aa, synthetic construct
  REGION 1..9: note = Description of Artificial Sequence: Synthetic peptide
RNFYEPQII

SEQ ID NO: 8846 - protein, 9 aa, synthetic construct
  REGION 1..9: note = Description of Artificial Sequence: Synthetic peptide
RNRDVDTDF

SEQ ID NO: 8847 - protein, 10 aa, synthetic construct
  REGION 1..10: note = Description of Artificial Sequence: Synthetic peptide
RQALLKTVQF

SEQ ID NO: 8848 - protein, 8 aa, synthetic construct
  REGION 1..8: note = Description of Artificial Sequence: Synthetic peptide
RQCSGVTF

SEQ ID NO: 8849 - protein, 8 aa, synthetic construct
  REGION 1..8: note = Description of Artificial Sequence: Synthetic peptide
RQFHQKLL

SEQ ID NO: 8850 - protein, 9 aa, synthetic construct
  REGION 1..9: note = Description of Artificial Sequence: Synthetic peptide
RQGTDYKHW

SEQ ID NO: 8851 - protein, 9 aa, synthetic construct
  REGION 1..9: note = Description of Artificial Sequence: Synthetic peptide
RQIAPGQTG

SEQ ID NO: 8852 - protein, 10 aa, synthetic construct
  REGION 1..10: note = Description of Artificial Sequence: Synthetic peptide
RQKKQQTVTL

SEQ ID NO: 8853 - protein, 9 aa, synthetic construct
  REGION 1..9: note = Description of Artificial Sequence: Synthetic peptide
RQVVNVVTT

SEQ ID NO: 8854 - protein, 10 aa, synthetic construct
  REGION 1..10: note = Description of Artificial Sequence: Synthetic peptide
RQWLPTGTLL

SEQ ID NO: 8855 - protein, 10 aa, synthetic construct
  REGION 1..10: note = Description of Artificial Sequence: Synthetic peptide
RRVVFNGVSF

SEQ ID NO: 8856 - protein, 9 aa, synthetic construct
  REGION 1..9: note = Description of Artificial Sequence: Synthetic peptide
RSEDKRAKV

SEQ ID NO: 8857 - protein, 9 aa, synthetic construct
  REGION 1..9: note = Description of Artificial Sequence: Synthetic peptide
RSQMEIDFL

SEQ ID NO: 8858 - protein, 8 aa, synthetic construct
  REGION 1..8: note = Description of Artificial Sequence: Synthetic peptide
RSVASQSI

SEQ ID NO: 8859 - protein, 12 aa, synthetic construct
  REGION 1..12: note = Description of Artificial Sequence: Synthetic peptide
RTIAFGGCVFSY

SEQ ID NO: 8860 - protein, 9 aa, synthetic construct
  REGION 1..9: note = Description of Artificial Sequence: Synthetic peptide
RTLLTKGTL

SEQ ID NO: 8861 - protein, 9 aa, synthetic construct
  REGION 1..9: note = Description of Artificial Sequence: Synthetic peptide
RTTNGDFLH

SEQ ID NO: 8862 - protein, 9 aa, synthetic construct
  REGION 1..9: note = Description of Artificial Sequence: Synthetic peptide
RVDFCGKGY

SEQ ID NO: 8863 - protein, 9 aa, synthetic construct
  REGION 1..9: note = Description of Artificial Sequence: Synthetic peptide
RVESSSKLW

SEQ ID NO: 8864 - protein, 10 aa, synthetic construct
  REGION 1..10: note = Description of Artificial Sequence: Synthetic peptide
RVQPTESIVR

SEQ ID NO: 8865 - protein, 10 aa, synthetic construct
  REGION 1..10: note = Description of Artificial Sequence: Synthetic peptide
RVVTTFDSEY

SEQ ID NO: 8866 - protein, 9 aa, synthetic construct
  REGION 1..9: note = Description of Artificial Sequence: Synthetic peptide
RYFRLTLGV

SEQ ID NO: 8867 - protein, 8 aa, synthetic construct
  REGION 1..8: note = Description of Artificial Sequence: Synthetic peptide
RYMNSQGL

SEQ ID NO: 8868 - protein, 9 aa, synthetic construct
  REGION 1..9: note = Description of Artificial Sequence: Synthetic peptide
RYRIGNYKL

SEQ ID NO: 8869 - protein, 10 aa, synthetic construct
  REGION 1..10: note = Description of Artificial Sequence: Synthetic peptide
RYWEPEFYEA

SEQ ID NO: 8870 - protein, 8 aa, synthetic construct
  REGION 1..8: note = Description of Artificial Sequence: Synthetic peptide
SAAKKNNL

SEQ ID NO: 8871 - protein, 9 aa, synthetic construct
  REGION 1..9: note = Description of Artificial Sequence: Synthetic peptide
SAFAMMFVK

SEQ ID NO: 8872 - protein, 8 aa, synthetic construct
  REGION 1..8: note = Description of Artificial Sequence: Synthetic peptide
SAMQTMLF

SEQ ID NO: 8873 - protein, 9 aa, synthetic construct
  REGION 1..9: note = Description of Artificial Sequence: Synthetic peptide
SAMVRMYIF

SEQ ID NO: 8874 - protein, 9 aa, synthetic construct
  REGION 1..9: note = Description of Artificial Sequence: Synthetic peptide
SCVLSGHNL

SEQ ID NO: 8875 - protein, 9 aa, synthetic construct
  REGION 1..9: note = Description of Artificial Sequence: Synthetic peptide
SDIDITFLK

SEQ ID NO: 8876 - protein, 10 aa, synthetic construct
  REGION 1..10: note = Description of Artificial Sequence: Synthetic peptide
SDIDITFLKK

SEQ ID NO: 8877 - protein, 9 aa, synthetic construct
  REGION 1..9: note = Description of Artificial Sequence: Synthetic peptide
SDIDYVPLK

SEQ ID NO: 8878 - protein, 9 aa, synthetic construct
  REGION 1..9: note = Description of Artificial Sequence: Synthetic peptide
SDNGPQNQR

SEQ ID NO: 8879 - protein, 8 aa, synthetic construct
  REGION 1..8: note = Description of Artificial Sequence: Synthetic peptide
SDYDYYRY

SEQ ID NO: 8880 - protein, 8 aa, synthetic construct
  REGION 1..8: note = Description of Artificial Sequence: Synthetic peptide
SEAFLIGC

SEQ ID NO: 8881 - protein, 12 aa, synthetic construct
  REGION 1..12: note = Description of Artificial Sequence: Synthetic peptide
SEDNQTTTIQTI

SEQ ID NO: 8882 - protein, 8 aa, synthetic construct
  REGION 1..8: note = Description of Artificial Sequence: Synthetic peptide
SEPVLKGV

SEQ ID NO: 8883 - protein, 10 aa, synthetic construct
  REGION 1..10: note = Description of Artificial Sequence: Synthetic peptide
SEPVLKGVKL

SEQ ID NO: 8884 - protein, 10 aa, synthetic construct
  REGION 1..10: note = Description of Artificial Sequence: Synthetic peptide
SETKCTLKSF

SEQ ID NO: 8885 - protein, 10 aa, synthetic construct
  REGION 1..10: note = Description of Artificial Sequence: Synthetic peptide
SEVGPEHSLA

SEQ ID NO: 8886 - protein, 9 aa, synthetic construct
  REGION 1..9: note = Description of Artificial Sequence: Synthetic peptide
SFLAHIQWM

SEQ ID NO: 8887 - protein, 8 aa, synthetic construct
  REGION 1..8: note = Description of Artificial Sequence: Synthetic peptide
SFNPETNI

SEQ ID NO: 8888 - protein, 11 aa, synthetic construct
  REGION 1..11: note = Description of Artificial Sequence: Synthetic peptide
SFPLCANGQVF

SEQ ID NO: 8889 - protein, 8 aa, synthetic construct
  REGION 1..8: note = Description of Artificial Sequence: Synthetic peptide
SFSGYLKL

SEQ ID NO: 8890 - protein, 8 aa, synthetic construct
  REGION 1..8: note = Description of Artificial Sequence: Synthetic peptide
SFYVYSRV

SEQ ID NO: 8891 - protein, 9 aa, synthetic construct
  REGION 1..9: note = Description of Artificial Sequence: Synthetic peptide
SFYVYSRVK

SEQ ID NO: 8892 - protein, 9 aa, synthetic construct
  REGION 1..9: note = Description of Artificial Sequence: Synthetic peptide
SGAMDTTSY

SEQ ID NO: 8893 - protein, 10 aa, synthetic construct
  REGION 1..10: note = Description of Artificial Sequence: Synthetic peptide
SIIIGGAKLK

SEQ ID NO: 8894 - protein, 9 aa, synthetic construct
  REGION 1..9: note = Description of Artificial Sequence: Synthetic peptide
SIVCRFDTR

SEQ ID NO: 8895 - protein, 9 aa, synthetic construct
  REGION 1..9: note = Description of Artificial Sequence: Synthetic peptide
SLDTYPSLE

SEQ ID NO: 8896 - protein, 9 aa, synthetic construct
  REGION 1..9: note = Description of Artificial Sequence: Synthetic peptide
SLENVAFNV

SEQ ID NO: 8897 - protein, 9 aa, synthetic construct
  REGION 1..9: note = Description of Artificial Sequence: Synthetic peptide
SLETIQITI

SEQ ID NO: 8898 - protein, 10 aa, synthetic construct
  REGION 1..10: note = Description of Artificial Sequence: Synthetic peptide
SLIDLQELGK

SEQ ID NO: 8899 - protein, 11 aa, synthetic construct
  REGION 1..11: note = Description of Artificial Sequence: Synthetic peptide
SLIDLQELGKY

SEQ ID NO: 8900 - protein, 10 aa, synthetic construct
  REGION 1..10: note = Description of Artificial Sequence: Synthetic peptide
SLKVPATVSV

SEQ ID NO: 8901 - protein, 8 aa, synthetic construct
  REGION 1..8: note = Description of Artificial Sequence: Synthetic peptide
SLNGVTLI

SEQ ID NO: 8902 - protein, 8 aa, synthetic construct
  REGION 1..8: note = Description of Artificial Sequence: Synthetic peptide
SLRPDTRY

SEQ ID NO: 8903 - protein, 9 aa, synthetic construct
  REGION 1..9: note = Description of Artificial Sequence: Synthetic peptide
SLVKPSFYV

SEQ ID NO: 8904 - protein, 8 aa, synthetic construct
  REGION 1..8: note = Description of Artificial Sequence: Synthetic peptide
SMDNSPNL

SEQ ID NO: 8905 - protein, 9 aa, synthetic construct
  REGION 1..9: note = Description of Artificial Sequence: Synthetic peptide
SMMGFKMNY

SEQ ID NO: 8906 - protein, 9 aa, synthetic construct
  REGION 1..9: note = Description of Artificial Sequence: Synthetic peptide
SMQNCVLKL

SEQ ID NO: 8907 - protein, 9 aa, synthetic construct
  REGION 1..9: note = Description of Artificial Sequence: Synthetic peptide
SNSGSDVLY

SEQ ID NO: 8908 - protein, 8 aa, synthetic construct
  REGION 1..8: note = Description of Artificial Sequence: Synthetic peptide
SPDAVTAY

SEQ ID NO: 8909 - protein, 8 aa, synthetic construct
  REGION 1..8: note = Description of Artificial Sequence: Synthetic peptide
SPFELEDF

SEQ ID NO: 8910 - protein, 8 aa, synthetic construct
  REGION 1..8: note = Description of Artificial Sequence: Synthetic peptide
SPFHPLAD

SEQ ID NO: 8911 - protein, 9 aa, synthetic construct
  REGION 1..9: note = Description of Artificial Sequence: Synthetic peptide
SPFHPLADN

SEQ ID NO: 8912 - protein, 11 aa, synthetic construct
  REGION 1..11: note = Description of Artificial Sequence: Synthetic peptide
SPIQYIDIGNY

SEQ ID NO: 8913 - protein, 9 aa, synthetic construct
  REGION 1..9: note = Description of Artificial Sequence: Synthetic peptide
SPNECNQMC

SEQ ID NO: 8914 - protein, 10 aa, synthetic construct
  REGION 1..10: note = Description of Artificial Sequence: Synthetic peptide
SPNECNQMCL

SEQ ID NO: 8915 - protein, 9 aa, synthetic construct
  REGION 1..9: note = Description of Artificial Sequence: Synthetic peptide
SPNLAWPLI

SEQ ID NO: 8916 - protein, 8 aa, synthetic construct
  REGION 1..8: note = Description of Artificial Sequence: Synthetic peptide
SPTKLNDL

SEQ ID NO: 8917 - protein, 8 aa, synthetic construct
  REGION 1..8: note = Description of Artificial Sequence: Synthetic peptide
SRELKVTF

SEQ ID NO: 8918 - protein, 8 aa, synthetic construct
  REGION 1..8: note = Description of Artificial Sequence: Synthetic peptide
SRLDKVEA

SEQ ID NO: 8919 - protein, 10 aa, synthetic construct
  REGION 1..10: note = Description of Artificial Sequence: Synthetic peptide
SSAKSASVYY

SEQ ID NO: 8920 - protein, 9 aa, synthetic construct
  REGION 1..9: note = Description of Artificial Sequence: Synthetic peptide
SSQGSEYDY

SEQ ID NO: 8921 - protein, 10 aa, synthetic construct
  REGION 1..10: note = Description of Artificial Sequence: Synthetic peptide
SSVLNDILSR

SEQ ID NO: 8922 - protein, 9 aa, synthetic construct
  REGION 1..9: note = Description of Artificial Sequence: Synthetic peptide
STECSNLLL

SEQ ID NO: 8923 - protein, 11 aa, synthetic construct
  REGION 1..11: note = Description of Artificial Sequence: Synthetic peptide
STFEEAALCTF

SEQ ID NO: 8924 - protein, 8 aa, synthetic construct
  REGION 1..8: note = Description of Artificial Sequence: Synthetic peptide
STFISAAR

SEQ ID NO: 8925 - protein, 8 aa, synthetic construct
  REGION 1..8: note = Description of Artificial Sequence: Synthetic peptide
STLEQYVF

SEQ ID NO: 8926 - protein, 9 aa, synthetic construct
  REGION 1..9: note = Description of Artificial Sequence: Synthetic peptide
STVLSFCAF

SEQ ID NO: 8927 - protein, 8 aa, synthetic construct
  REGION 1..8: note = Description of Artificial Sequence: Synthetic peptide
SVAYESLR

SEQ ID NO: 8928 - protein, 9 aa, synthetic construct
  REGION 1..9: note = Description of Artificial Sequence: Synthetic peptide
SVIDLLLDD

SEQ ID NO: 8929 - protein, 10 aa, synthetic construct
  REGION 1..10: note = Description of Artificial Sequence: Synthetic peptide
SVPWDTIANY

SEQ ID NO: 8930 - protein, 9 aa, synthetic construct
  REGION 1..9: note = Description of Artificial Sequence: Synthetic peptide
SVQTFFKLV

SEQ ID NO: 8931 - protein, 11 aa, synthetic construct
  REGION 1..11: note = Description of Artificial Sequence: Synthetic peptide
SVSSPDAVTAY

SEQ ID NO: 8932 - protein, 9 aa, synthetic construct
  REGION 1..9: note = Description of Artificial Sequence: Synthetic peptide
SVTSNYSGV

SEQ ID NO: 8933 - protein, 8 aa, synthetic construct
  REGION 1..8: note = Description of Artificial Sequence: Synthetic peptide
SVVNARLR

SEQ ID NO: 8934 - protein, 8 aa, synthetic construct
  REGION 1..8: note = Description of Artificial Sequence: Synthetic peptide
SYEDQDAL

SEQ ID NO: 8935 - protein, 8 aa, synthetic construct
  REGION 1..8: note = Description of Artificial Sequence: Synthetic peptide
SYFIASFR

SEQ ID NO: 8936 - protein, 9 aa, synthetic construct
  REGION 1..9: note = Description of Artificial Sequence: Synthetic peptide
SYLTPGDSS

SEQ ID NO: 8937 - protein, 10 aa, synthetic construct
  REGION 1..10: note = Description of Artificial Sequence: Synthetic peptide
SYYKLGASQR

SEQ ID NO: 8938 - protein, 9 aa, synthetic construct
  REGION 1..9: note = Description of Artificial Sequence: Synthetic peptide
SYYSLLMPI

SEQ ID NO: 8939 - protein, 9 aa, synthetic construct
  REGION 1..9: note = Description of Artificial Sequence: Synthetic peptide
TACTDDNAL

SEQ ID NO: 8940 - protein, 10 aa, synthetic construct
  REGION 1..10: note = Description of Artificial Sequence: Synthetic peptide
TAFGLVAEWF

SEQ ID NO: 8941 - protein, 9 aa, synthetic construct
  REGION 1..9: note = Description of Artificial Sequence: Synthetic peptide
TAHSCNVNR

SEQ ID NO: 8942 - protein, 9 aa, synthetic construct
  REGION 1..9: note = Description of Artificial Sequence: Synthetic peptide
TANKWDLII

SEQ ID NO: 8943 - protein, 9 aa, synthetic construct
  REGION 1..9: note = Description of Artificial Sequence: Synthetic peptide
TASDTYACW

SEQ ID NO: 8944 - protein, 9 aa, synthetic construct
  REGION 1..9: note = Description of Artificial Sequence: Synthetic peptide
TCGQQQTTL

SEQ ID NO: 8945 - protein, 9 aa, synthetic construct
  REGION 1..9: note = Description of Artificial Sequence: Synthetic peptide
TCLAYYFMR

SEQ ID NO: 8946 - protein, 9 aa, synthetic construct
  REGION 1..9: note = Description of Artificial Sequence: Synthetic peptide
TDPSFLGRY

SEQ ID NO: 8947 - protein, 9 aa, synthetic construct
  REGION 1..9: note = Description of Artificial Sequence: Synthetic peptide
TEDDYQGKP

SEQ ID NO: 8948 - protein, 9 aa, synthetic construct
  REGION 1..9: note = Description of Artificial Sequence: Synthetic peptide
TEEVGHTDL

SEQ ID NO: 8949 - protein, 10 aa, synthetic construct
  REGION 1..10: note = Description of Artificial Sequence: Synthetic peptide
TEHSWNADLY

SEQ ID NO: 8950 - protein, 8 aa, synthetic construct
  REGION 1..8: note = Description of Artificial Sequence: Synthetic peptide
TEISFMLW

SEQ ID NO: 8951 - protein, 8 aa, synthetic construct
  REGION 1..8: note = Description of Artificial Sequence: Synthetic peptide
TENKYSQL

SEQ ID NO: 8952 - protein, 8 aa, synthetic construct
  REGION 1..8: note = Description of Artificial Sequence: Synthetic peptide
TENLLLYI

SEQ ID NO: 8953 - protein, 9 aa, synthetic construct
  REGION 1..9: note = Description of Artificial Sequence: Synthetic peptide
TENLLLYID

SEQ ID NO: 8954 - protein, 9 aa, synthetic construct
  REGION 1..9: note = Description of Artificial Sequence: Synthetic peptide
TENLTKEGA

SEQ ID NO: 8955 - protein, 9 aa, synthetic construct
  REGION 1..9: note = Description of Artificial Sequence: Synthetic peptide
TERLKLFAA

SEQ ID NO: 8956 - protein, 8 aa, synthetic construct
  REGION 1..8: note = Description of Artificial Sequence: Synthetic peptide
TESNKKFL

SEQ ID NO: 8957 - protein, 10 aa, synthetic construct
  REGION 1..10: note = Description of Artificial Sequence: Synthetic peptide
TEVNEFACVV

SEQ ID NO: 8958 - protein, 8 aa, synthetic construct
  REGION 1..8: note = Description of Artificial Sequence: Synthetic peptide
TFCAGSTF

SEQ ID NO: 8959 - protein, 10 aa, synthetic construct
  REGION 1..10: note = Description of Artificial Sequence: Synthetic peptide
TFISAARQGF

SEQ ID NO: 8960 - protein, 9 aa, synthetic construct
  REGION 1..9: note = Description of Artificial Sequence: Synthetic peptide
TFLKKDAPY

SEQ ID NO: 8961 - protein, 8 aa, synthetic construct
  REGION 1..8: note = Description of Artificial Sequence: Synthetic peptide
TFYLTNDV

SEQ ID NO: 8962 - protein, 9 aa, synthetic construct
  REGION 1..9: note = Description of Artificial Sequence: Synthetic peptide
TFYPKLQSS

SEQ ID NO: 8963 - protein, 8 aa, synthetic construct
  REGION 1..8: note = Description of Artificial Sequence: Synthetic peptide
THDVSSAI

SEQ ID NO: 8964 - protein, 11 aa, synthetic construct
  REGION 1..11: note = Description of Artificial Sequence: Synthetic peptide
TIAEILLIIMR

SEQ ID NO: 8965 - protein, 8 aa, synthetic construct
  REGION 1..8: note = Description of Artificial Sequence: Synthetic peptide
TIKKPNEL

SEQ ID NO: 8966 - protein, 9 aa, synthetic construct
  REGION 1..9: note = Description of Artificial Sequence: Synthetic peptide
TKHSSGVTR

SEQ ID NO: 8967 - protein, 9 aa, synthetic construct
  REGION 1..9: note = Description of Artificial Sequence: Synthetic peptide
TLACFVLAA

SEQ ID NO: 8968 - protein, 10 aa, synthetic construct
  REGION 1..10: note = Description of Artificial Sequence: Synthetic peptide
TLACFVLAAV

SEQ ID NO: 8969 - protein, 10 aa, synthetic construct
  REGION 1..10: note = Description of Artificial Sequence: Synthetic peptide
TLATCELYHY

SEQ ID NO: 8970 - protein, 9 aa, synthetic construct
  REGION 1..9: note = Description of Artificial Sequence: Synthetic peptide
TLATHGLAA

SEQ ID NO: 8971 - protein, 10 aa, synthetic construct
  REGION 1..10: note = Description of Artificial Sequence: Synthetic peptide
TLATHGLAAV

SEQ ID NO: 8972 - protein, 9 aa, synthetic construct
  REGION 1..9: note = Description of Artificial Sequence: Synthetic peptide
TLAVPYNMR

SEQ ID NO: 8973 - protein, 8 aa, synthetic construct
  REGION 1..8: note = Description of Artificial Sequence: Synthetic peptide
TLEETKFL

SEQ ID NO: 8974 - protein, 9 aa, synthetic construct
  REGION 1..9: note = Description of Artificial Sequence: Synthetic peptide
TLGVLVPHV

SEQ ID NO: 8975 - protein, 10 aa, synthetic construct
  REGION 1..10: note = Description of Artificial Sequence: Synthetic peptide
TLKGVEAVMY

SEQ ID NO: 8976 - protein, 9 aa, synthetic construct
  REGION 1..9: note = Description of Artificial Sequence: Synthetic peptide
TLNDFNLVA

SEQ ID NO: 8977 - protein, 10 aa, synthetic construct
  REGION 1..10: note = Description of Artificial Sequence: Synthetic peptide
TLNDFNLVAM

SEQ ID NO: 8978 - protein, 10 aa, synthetic construct
  REGION 1..10: note = Description of Artificial Sequence: Synthetic peptide
TLPKGIMMNV

SEQ ID NO: 8979 - protein, 9 aa, synthetic construct
  REGION 1..9: note = Description of Artificial Sequence: Synthetic peptide
TLSEQLDFI

SEQ ID NO: 8980 - protein, 10 aa, synthetic construct
  REGION 1..10: note = Description of Artificial Sequence: Synthetic peptide
TMADLVYALR

SEQ ID NO: 8981 - protein, 9 aa, synthetic construct
  REGION 1..9: note = Description of Artificial Sequence: Synthetic peptide
TNPIQLSSY

SEQ ID NO: 8982 - protein, 9 aa, synthetic construct
  REGION 1..9: note = Description of Artificial Sequence: Synthetic peptide
TPCGTGTST

SEQ ID NO: 8983 - protein, 9 aa, synthetic construct
  REGION 1..9: note = Description of Artificial Sequence: Synthetic peptide
TPCNGVEGF

SEQ ID NO: 8984 - protein, 9 aa, synthetic construct
  REGION 1..9: note = Description of Artificial Sequence: Synthetic peptide
TPEEHFIET

SEQ ID NO: 8985 - protein, 10 aa, synthetic construct
  REGION 1..10: note = Description of Artificial Sequence: Synthetic peptide
TPEEHFIETI

SEQ ID NO: 8986 - protein, 8 aa, synthetic construct
  REGION 1..8: note = Description of Artificial Sequence: Synthetic peptide
TPFDVVRQ

SEQ ID NO: 8987 - protein, 8 aa, synthetic construct
  REGION 1..8: note = Description of Artificial Sequence: Synthetic peptide
TPFEIKLA

SEQ ID NO: 8988 - protein, 8 aa, synthetic construct
  REGION 1..8: note = Description of Artificial Sequence: Synthetic peptide
TPGSGVPV

SEQ ID NO: 8989 - protein, 10 aa, synthetic construct
  REGION 1..10: note = Description of Artificial Sequence: Synthetic peptide
TPKGPKVKYL

SEQ ID NO: 8990 - protein, 10 aa, synthetic construct
  REGION 1..10: note = Description of Artificial Sequence: Synthetic peptide
TPLIQPIGAL

SEQ ID NO: 8991 - protein, 9 aa, synthetic construct
  REGION 1..9: note = Description of Artificial Sequence: Synthetic peptide
TPNNTDFSR

SEQ ID NO: 8992 - protein, 9 aa, synthetic construct
  REGION 1..9: note = Description of Artificial Sequence: Synthetic peptide
TPRDLGACI

SEQ ID NO: 8993 - protein, 10 aa, synthetic construct
  REGION 1..10: note = Description of Artificial Sequence: Synthetic peptide
TPSFKKGAKL

SEQ ID NO: 8994 - protein, 8 aa, synthetic construct
  REGION 1..8: note = Description of Artificial Sequence: Synthetic peptide
TPSKLIEY

SEQ ID NO: 8995 - protein, 8 aa, synthetic construct
  REGION 1..8: note = Description of Artificial Sequence: Synthetic peptide
TQHQPYVV

SEQ ID NO: 8996 - protein, 10 aa, synthetic construct
  REGION 1..10: note = Description of Artificial Sequence: Synthetic peptide
TQLYLGGMSY

SEQ ID NO: 8997 - protein, 10 aa, synthetic construct
  REGION 1..10: note = Description of Artificial Sequence: Synthetic peptide
TQYNRYLALY

SEQ ID NO: 8998 - protein, 8 aa, synthetic construct
  REGION 1..8: note = Description of Artificial Sequence: Synthetic peptide
TRAKVGIL

SEQ ID NO: 8999 - protein, 8 aa, synthetic construct
  REGION 1..8: note = Description of Artificial Sequence: Synthetic peptide
TRELMREL

SEQ ID NO: 9000 - protein, 9 aa, synthetic construct
  REGION 1..9: note = Description of Artificial Sequence: Synthetic peptide
TRNPAWRKA

SEQ ID NO: 9001 - protein, 9 aa, synthetic construct
  REGION 1..9: note = Description of Artificial Sequence: Synthetic peptide
TSAVLQSGF

SEQ ID NO: 9002 - protein, 8 aa, synthetic construct
  REGION 1..8: note = Description of Artificial Sequence: Synthetic peptide
TSDYYQLY

SEQ ID NO: 9003 - protein, 8 aa, synthetic construct
  REGION 1..8: note = Description of Artificial Sequence: Synthetic peptide
TSFGPLVR

SEQ ID NO: 9004 - protein, 8 aa, synthetic construct
  REGION 1..8: note = Description of Artificial Sequence: Synthetic peptide
TSRTLSYY

SEQ ID NO: 9005 - protein, 10 aa, synthetic construct
  REGION 1..10: note = Description of Artificial Sequence: Synthetic peptide
TSTDVVYRAF

SEQ ID NO: 9006 - protein, 9 aa, synthetic construct
  REGION 1..9: note = Description of Artificial Sequence: Synthetic peptide
TTEILPVSM

SEQ ID NO: 9007 - protein, 10 aa, synthetic construct
  REGION 1..10: note = Description of Artificial Sequence: Synthetic peptide
TTITVNVLAW

SEQ ID NO: 9008 - protein, 9 aa, synthetic construct
  REGION 1..9: note = Description of Artificial Sequence: Synthetic peptide
TTRQVVNVV

SEQ ID NO: 9009 - protein, 10 aa, synthetic construct
  REGION 1..10: note = Description of Artificial Sequence: Synthetic peptide
TTSPISEHDY

SEQ ID NO: 9010 - protein, 8 aa, synthetic construct
  REGION 1..8: note = Description of Artificial Sequence: Synthetic peptide
TTTNIVTR

SEQ ID NO: 9011 - protein, 11 aa, synthetic construct
  REGION 1..11: note = Description of Artificial Sequence: Synthetic peptide
TVATSRTLSYY

SEQ ID NO: 9012 - protein, 9 aa, synthetic construct
  REGION 1..9: note = Description of Artificial Sequence: Synthetic peptide
TVCGMWKGY

SEQ ID NO: 9013 - protein, 10 aa, synthetic construct
  REGION 1..10: note = Description of Artificial Sequence: Synthetic peptide
TVDSSQGSEY

SEQ ID NO: 9014 - protein, 8 aa, synthetic construct
  REGION 1..8: note = Description of Artificial Sequence: Synthetic peptide
TVEEAKTV

SEQ ID NO: 9015 - protein, 8 aa, synthetic construct
  REGION 1..8: note = Description of Artificial Sequence: Synthetic peptide
TVEELKKL

SEQ ID NO: 9016 - protein, 9 aa, synthetic construct
  REGION 1..9: note = Description of Artificial Sequence: Synthetic peptide
TVGELGDVR

SEQ ID NO: 9017 - protein, 10 aa, synthetic construct
  REGION 1..10: note = Description of Artificial Sequence: Synthetic peptide
TVYDDGARRV

SEQ ID NO: 9018 - protein, 9 aa, synthetic construct
  REGION 1..9: note = Description of Artificial Sequence: Synthetic peptide
TYACWHHSI

SEQ ID NO: 9019 - protein, 10 aa, synthetic construct
  REGION 1..10: note = Description of Artificial Sequence: Synthetic peptide
TYHPNCVNCL

SEQ ID NO: 9020 - protein, 9 aa, synthetic construct
  REGION 1..9: note = Description of Artificial Sequence: Synthetic peptide
TYLDGADVT

SEQ ID NO: 9021 - protein, 8 aa, synthetic construct
  REGION 1..8: note = Description of Artificial Sequence: Synthetic peptide
TYLEGSVR

SEQ ID NO: 9022 - protein, 9 aa, synthetic construct
  REGION 1..9: note = Description of Artificial Sequence: Synthetic peptide
TYPGQGLNG

SEQ ID NO: 9023 - protein, 8 aa, synthetic construct
  REGION 1..8: note = Description of Artificial Sequence: Synthetic peptide
VAEWFLAY

SEQ ID NO: 9024 - protein, 9 aa, synthetic construct
  REGION 1..9: note = Description of Artificial Sequence: Synthetic peptide
VAEWFLAYI

SEQ ID NO: 9025 - protein, 8 aa, synthetic construct
  REGION 1..8: note = Description of Artificial Sequence: Synthetic peptide
VAFNVVNK

SEQ ID NO: 9026 - protein, 8 aa, synthetic construct
  REGION 1..8: note = Description of Artificial Sequence: Synthetic peptide
VAGFAKFL

SEQ ID NO: 9027 - protein, 10 aa, synthetic construct
  REGION 1..10: note = Description of Artificial Sequence: Synthetic peptide
VAGGIVAIVV

SEQ ID NO: 9028 - protein, 8 aa, synthetic construct
  REGION 1..8: note = Description of Artificial Sequence: Synthetic peptide
VAIKITEH

SEQ ID NO: 9029 - protein, 10 aa, synthetic construct
  REGION 1..10: note = Description of Artificial Sequence: Synthetic peptide
VAIKITEHSW

SEQ ID NO: 9030 - protein, 10 aa, synthetic construct
  REGION 1..10: note = Description of Artificial Sequence: Synthetic peptide
VAIVVTCLAY

SEQ ID NO: 9031 - protein, 10 aa, synthetic construct
  REGION 1..10: note = Description of Artificial Sequence: Synthetic peptide
VATSRTLSYY

SEQ ID NO: 9032 - protein, 8 aa, synthetic construct
  REGION 1..8: note = Description of Artificial Sequence: Synthetic peptide
VAVPTGYV

SEQ ID NO: 9033 - protein, 9 aa, synthetic construct
  REGION 1..9: note = Description of Artificial Sequence: Synthetic peptide
VCLSGLDSL

SEQ ID NO: 9034 - protein, 9 aa, synthetic construct
  REGION 1..9: note = Description of Artificial Sequence: Synthetic peptide
VCRHHANEY

SEQ ID NO: 9035 - protein, 10 aa, synthetic construct
  REGION 1..10: note = Description of Artificial Sequence: Synthetic peptide
VDADSKIVQL

SEQ ID NO: 9036 - protein, 9 aa, synthetic construct
  REGION 1..9: note = Description of Artificial Sequence: Synthetic peptide
VDGVDVELF

SEQ ID NO: 9037 - protein, 9 aa, synthetic construct
  REGION 1..9: note = Description of Artificial Sequence: Synthetic peptide
VDSSQGSEY

SEQ ID NO: 9038 - protein, 9 aa, synthetic construct
  REGION 1..9: note = Description of Artificial Sequence: Synthetic peptide
VEAPLVGTP

SEQ ID NO: 9039 - protein, 10 aa, synthetic construct
  REGION 1..10: note = Description of Artificial Sequence: Synthetic peptide
VEFLRDGWEI

SEQ ID NO: 9040 - protein, 9 aa, synthetic construct
  REGION 1..9: note = Description of Artificial Sequence: Synthetic peptide
VELFENKTT

SEQ ID NO: 9041 - protein, 9 aa, synthetic construct
  REGION 1..9: note = Description of Artificial Sequence: Synthetic peptide
VENMTPRDL

SEQ ID NO: 9042 - protein, 8 aa, synthetic construct
  REGION 1..8: note = Description of Artificial Sequence: Synthetic peptide
VEQKIAEI

SEQ ID NO: 9043 - protein, 8 aa, synthetic construct
  REGION 1..8: note = Description of Artificial Sequence: Synthetic peptide
VETFYPKL

SEQ ID NO: 9044 - protein, 9 aa, synthetic construct
  REGION 1..9: note = Description of Artificial Sequence: Synthetic peptide
VETKAIVST

SEQ ID NO: 9045 - protein, 9 aa, synthetic construct
  REGION 1..9: note = Description of Artificial Sequence: Synthetic peptide
VETVKGLDY

SEQ ID NO: 9046 - protein, 10 aa, synthetic construct
  REGION 1..10: note = Description of Artificial Sequence: Synthetic peptide
VFCGVDAVNL

SEQ ID NO: 9047 - protein, 8 aa, synthetic construct
  REGION 1..8: note = Description of Artificial Sequence: Synthetic peptide
VFFDGRVD

SEQ ID NO: 9048 - protein, 9 aa, synthetic construct
  REGION 1..9: note = Description of Artificial Sequence: Synthetic peptide
VFISPYNSQ

SEQ ID NO: 9049 - protein, 10 aa, synthetic construct
  REGION 1..10: note = Description of Artificial Sequence: Synthetic peptide
VFLFVAAIFY

SEQ ID NO: 9050 - protein, 8 aa, synthetic construct
  REGION 1..8: note = Description of Artificial Sequence: Synthetic peptide
VFLHVTYV

SEQ ID NO: 9051 - protein, 8 aa, synthetic construct
  REGION 1..8: note = Description of Artificial Sequence: Synthetic peptide
VFLVLLPL

SEQ ID NO: 9052 - protein, 9 aa, synthetic construct
  REGION 1..9: note = Description of Artificial Sequence: Synthetic peptide
VFMSEAKCW

SEQ ID NO: 9053 - protein, 8 aa, synthetic construct
  REGION 1..8: note = Description of Artificial Sequence: Synthetic peptide
VFNICQAV

SEQ ID NO: 9054 - protein, 8 aa, synthetic construct
  REGION 1..8: note = Description of Artificial Sequence: Synthetic peptide
VFQSASKI

SEQ ID NO: 9055 - protein, 10 aa, synthetic construct
  REGION 1..10: note = Description of Artificial Sequence: Synthetic peptide
VGPEHSLAEY

SEQ ID NO: 9056 - protein, 9 aa, synthetic construct
  REGION 1..9: note = Description of Artificial Sequence: Synthetic peptide
VGVALLAVF

SEQ ID NO: 9057 - protein, 9 aa, synthetic construct
  REGION 1..9: note = Description of Artificial Sequence: Synthetic peptide
VHFISNSWL

SEQ ID NO: 9058 - protein, 9 aa, synthetic construct
  REGION 1..9: note = Description of Artificial Sequence: Synthetic peptide
VIDLLLDDF

SEQ ID NO: 9059 - protein, 9 aa, synthetic construct
  REGION 1..9: note = Description of Artificial Sequence: Synthetic peptide
VIPDYNTYK

SEQ ID NO: 9060 - protein, 9 aa, synthetic construct
  REGION 1..9: note = Description of Artificial Sequence: Synthetic peptide
VKCTSVVLL

SEQ ID NO: 9061 - protein, 9 aa, synthetic construct
  REGION 1..9: note = Description of Artificial Sequence: Synthetic peptide
VLAWLYAAV

SEQ ID NO: 9062 - protein, 8 aa, synthetic construct
  REGION 1..8: note = Description of Artificial Sequence: Synthetic peptide
VLDMCASL

SEQ ID NO: 9063 - protein, 9 aa, synthetic construct
  REGION 1..9: note = Description of Artificial Sequence: Synthetic peptide
VLHDIGNPK

SEQ ID NO: 9064 - protein, 8 aa, synthetic construct
  REGION 1..8: note = Description of Artificial Sequence: Synthetic peptide
VLIMLIIF

SEQ ID NO: 9065 - protein, 9 aa, synthetic construct
  REGION 1..9: note = Description of Artificial Sequence: Synthetic peptide
VLLPLTQYN

SEQ ID NO: 9066 - protein, 9 aa, synthetic construct
  REGION 1..9: note = Description of Artificial Sequence: Synthetic peptide
VLLPLVSSQ

SEQ ID NO: 9067 - protein, 10 aa, synthetic construct
  REGION 1..10: note = Description of Artificial Sequence: Synthetic peptide
VLPFNDGVYF

SEQ ID NO: 9068 - protein, 9 aa, synthetic construct
  REGION 1..9: note = Description of Artificial Sequence: Synthetic peptide
VLTESNKKF

SEQ ID NO: 9069 - protein, 9 aa, synthetic construct
  REGION 1..9: note = Description of Artificial Sequence: Synthetic peptide
VPATVSVSS

SEQ ID NO: 9070 - protein, 10 aa, synthetic construct
  REGION 1..10: note = Description of Artificial Sequence: Synthetic peptide
VPFWITIAYI

SEQ ID NO: 9071 - protein, 9 aa, synthetic construct
  REGION 1..9: note = Description of Artificial Sequence: Synthetic peptide
VPHVGEIPV

SEQ ID NO: 9072 - protein, 9 aa, synthetic construct
  REGION 1..9: note = Description of Artificial Sequence: Synthetic peptide
VPLNIIPLT

SEQ ID NO: 9073 - protein, 9 aa, synthetic construct
  REGION 1..9: note = Description of Artificial Sequence: Synthetic peptide
VPTDNYITT

SEQ ID NO: 9074 - protein, 10 aa, synthetic construct
  REGION 1..10: note = Description of Artificial Sequence: Synthetic peptide
VPTDNYITTY

SEQ ID NO: 9075 - protein, 10 aa, synthetic construct
  REGION 1..10: note = Description of Artificial Sequence: Synthetic peptide
VPVAIHADQL

SEQ ID NO: 9076 - protein, 8 aa, synthetic construct
  REGION 1..8: note = Description of Artificial Sequence: Synthetic peptide
VPYNMRVI

SEQ ID NO: 9077 - protein, 9 aa, synthetic construct
  REGION 1..9: note = Description of Artificial Sequence: Synthetic peptide
VQEGVLTAV

SEQ ID NO: 9078 - protein, 8 aa, synthetic construct
  REGION 1..8: note = Description of Artificial Sequence: Synthetic peptide
VQLSLPVL

SEQ ID NO: 9079 - protein, 9 aa, synthetic construct
  REGION 1..9: note = Description of Artificial Sequence: Synthetic peptide
VQPQLEMEL

SEQ ID NO: 9080 - protein, 10 aa, synthetic construct
  REGION 1..10: note = Description of Artificial Sequence: Synthetic peptide
VQPTESIVRF

SEQ ID NO: 9081 - protein, 10 aa, synthetic construct
  REGION 1..10: note = Description of Artificial Sequence: Synthetic peptide
VRDPQTLEIL

SEQ ID NO: 9082 - protein, 8 aa, synthetic construct
  REGION 1..8: note = Description of Artificial Sequence: Synthetic peptide
VRFPNITN

SEQ ID NO: 9083 - protein, 8 aa, synthetic construct
  REGION 1..8: note = Description of Artificial Sequence: Synthetic peptide
VRGTTVLL

SEQ ID NO: 9084 - protein, 9 aa, synthetic construct
  REGION 1..9: note = Description of Artificial Sequence: Synthetic peptide
VRGTTVLLK

SEQ ID NO: 9085 - protein, 9 aa, synthetic construct
  REGION 1..9: note = Description of Artificial Sequence: Synthetic peptide
VRIIMRLWL

SEQ ID NO: 9086 - protein, 10 aa, synthetic construct
  REGION 1..10: note = Description of Artificial Sequence: Synthetic peptide
VSDVGDSAEV

SEQ ID NO: 9087 - protein, 8 aa, synthetic construct
  REGION 1..8: note = Description of Artificial Sequence: Synthetic peptide
VSELLTPL

SEQ ID NO: 9088 - protein, 9 aa, synthetic construct
  REGION 1..9: note = Description of Artificial Sequence: Synthetic peptide
VSFCYMHHM

SEQ ID NO: 9089 - protein, 8 aa, synthetic construct
  REGION 1..8: note = Description of Artificial Sequence: Synthetic peptide
VSIWNLDY

SEQ ID NO: 9090 - protein, 9 aa, synthetic construct
  REGION 1..9: note = Description of Artificial Sequence: Synthetic peptide
VSLDNVLST

SEQ ID NO: 9091 - protein, 10 aa, synthetic construct
  REGION 1..10: note = Description of Artificial Sequence: Synthetic peptide
VSTTTNIVTR

SEQ ID NO: 9092 - protein, 9 aa, synthetic construct
  REGION 1..9: note = Description of Artificial Sequence: Synthetic peptide
VTGDSCNNY

SEQ ID NO: 9093 - protein, 10 aa, synthetic construct
  REGION 1..10: note = Description of Artificial Sequence: Synthetic peptide
VTTTLEETKF

SEQ ID NO: 9094 - protein, 9 aa, synthetic construct
  REGION 1..9: note = Description of Artificial Sequence: Synthetic peptide
VTTVMFLAR

SEQ ID NO: 9095 - protein, 9 aa, synthetic construct
  REGION 1..9: note = Description of Artificial Sequence: Synthetic peptide
VVADAVIKT

SEQ ID NO: 9096 - protein, 10 aa, synthetic construct
  REGION 1..10: note = Description of Artificial Sequence: Synthetic peptide
VVAFNTLLFL

SEQ ID NO: 9097 - protein, 9 aa, synthetic construct
  REGION 1..9: note = Description of Artificial Sequence: Synthetic peptide
VVDKYFDCY

SEQ ID NO: 9098 - protein, 8 aa, synthetic construct
  REGION 1..8: note = Description of Artificial Sequence: Synthetic peptide
VVDMSMTY

SEQ ID NO: 9099 - protein, 9 aa, synthetic construct
  REGION 1..9: note = Description of Artificial Sequence: Synthetic peptide
VVENPTIQK

SEQ ID NO: 9100 - protein, 9 aa, synthetic construct
  REGION 1..9: note = Description of Artificial Sequence: Synthetic peptide
VVEVVDKYF

SEQ ID NO: 9101 - protein, 8 aa, synthetic construct
  REGION 1..8: note = Description of Artificial Sequence: Synthetic peptide
VVGDIILK

SEQ ID NO: 9102 - protein, 9 aa, synthetic construct
  REGION 1..9: note = Description of Artificial Sequence: Synthetic peptide
VVHNQDVNL

SEQ ID NO: 9103 - protein, 11 aa, synthetic construct
  REGION 1..11: note = Description of Artificial Sequence: Synthetic peptide
VVIGIVNNTVY

SEQ ID NO: 9104 - protein, 8 aa, synthetic construct
  REGION 1..8: note = Description of Artificial Sequence: Synthetic peptide
VVISSDVL

SEQ ID NO: 9105 - protein, 8 aa, synthetic construct
  REGION 1..8: note = Description of Artificial Sequence: Synthetic peptide
VVLSFELL

SEQ ID NO: 9106 - protein, 10 aa, synthetic construct
  REGION 1..10: note = Description of Artificial Sequence: Synthetic peptide
VVPGLPGTIL

SEQ ID NO: 9107 - protein, 11 aa, synthetic construct
  REGION 1..11: note = Description of Artificial Sequence: Synthetic peptide
VVPGLPGTILR

SEQ ID NO: 9108 - protein, 8 aa, synthetic construct
  REGION 1..8: note = Description of Artificial Sequence: Synthetic peptide
VVTTKIAL

SEQ ID NO: 9109 - protein, 9 aa, synthetic construct
  REGION 1..9: note = Description of Artificial Sequence: Synthetic peptide
VVTTKIALK

SEQ ID NO: 9110 - protein, 10 aa, synthetic construct
  REGION 1..10: note = Description of Artificial Sequence: Synthetic peptide
VVTTVMFLAR

SEQ ID NO: 9111 - protein, 8 aa, synthetic construct
  REGION 1..8: note = Description of Artificial Sequence: Synthetic peptide
VYCFLGYF

SEQ ID NO: 9112 - protein, 8 aa, synthetic construct
  REGION 1..8: note = Description of Artificial Sequence: Synthetic peptide
VYCPRHVI

SEQ ID NO: 9113 - protein, 8 aa, synthetic construct
  REGION 1..8: note = Description of Artificial Sequence: Synthetic peptide
VYKQFDTY

SEQ ID NO: 9114 - protein, 10 aa, synthetic construct
  REGION 1..10: note = Description of Artificial Sequence: Synthetic peptide
VYKVYYGNAL

SEQ ID NO: 9115 - protein, 10 aa, synthetic construct
  REGION 1..10: note = Description of Artificial Sequence: Synthetic peptide
VYQCAMRPNF

SEQ ID NO: 9116 - protein, 10 aa, synthetic construct
  REGION 1..10: note = Description of Artificial Sequence: Synthetic peptide
VYSDVENPHL

SEQ ID NO: 9117 - protein, 9 aa, synthetic construct
  REGION 1..9: note = Description of Artificial Sequence: Synthetic peptide
VYSHLLLVA

SEQ ID NO: 9118 - protein, 9 aa, synthetic construct
  REGION 1..9: note = Description of Artificial Sequence: Synthetic peptide
VYYTSNPTT

SEQ ID NO: 9119 - protein, 9 aa, synthetic construct
  REGION 1..9: note = Description of Artificial Sequence: Synthetic peptide
WEIQQVVDA

SEQ ID NO: 9120 - protein, 9 aa, synthetic construct
  REGION 1..9: note = Description of Artificial Sequence: Synthetic peptide
WFSQRGGSY

SEQ ID NO: 9121 - protein, 9 aa, synthetic construct
  REGION 1..9: note = Description of Artificial Sequence: Synthetic peptide
WFVTQRNFY

SEQ ID NO: 9122 - protein, 8 aa, synthetic construct
  REGION 1..8: note = Description of Artificial Sequence: Synthetic peptide
WLLWPVTL

SEQ ID NO: 9123 - protein, 10 aa, synthetic construct
  REGION 1..10: note = Description of Artificial Sequence: Synthetic peptide
WLMWLIINLV

SEQ ID NO: 9124 - protein, 10 aa, synthetic construct
  REGION 1..10: note = Description of Artificial Sequence: Synthetic peptide
WLTNIFGTVY

SEQ ID NO: 9125 - protein, 9 aa, synthetic construct
  REGION 1..9: note = Description of Artificial Sequence: Synthetic peptide
WSMATYYLF

SEQ ID NO: 9126 - protein, 9 aa, synthetic construct
  REGION 1..9: note = Description of Artificial Sequence: Synthetic peptide
WVMRIMTWL

SEQ ID NO: 9127 - protein, 11 aa, synthetic construct
  REGION 1..11: note = Description of Artificial Sequence: Synthetic peptide
YADVFHLYLQY

SEQ ID NO: 9128 - protein, 8 aa, synthetic construct
  REGION 1..8: note = Description of Artificial Sequence: Synthetic peptide
YAWNRKRI

SEQ ID NO: 9129 - protein, 9 aa, synthetic construct
  REGION 1..9: note = Description of Artificial Sequence: Synthetic peptide
YEDQDALFA

SEQ ID NO: 9130 - protein, 10 aa, synthetic construct
  REGION 1..10: note = Description of Artificial Sequence: Synthetic peptide
YEDQDALFAY

SEQ ID NO: 9131 - protein, 9 aa, synthetic construct
  REGION 1..9: note = Description of Artificial Sequence: Synthetic peptide
YENAFLPFA

SEQ ID NO: 9132 - protein, 10 aa, synthetic construct
  REGION 1..10: note = Description of Artificial Sequence: Synthetic peptide
YENFNQHEVL

SEQ ID NO: 9133 - protein, 9 aa, synthetic construct
  REGION 1..9: note = Description of Artificial Sequence: Synthetic peptide
YEPQIITTD

SEQ ID NO: 9134 - protein, 8 aa, synthetic construct
  REGION 1..8: note = Description of Artificial Sequence: Synthetic peptide
YEQFKKGV

SEQ ID NO: 9135 - protein, 10 aa, synthetic construct
  REGION 1..10: note = Description of Artificial Sequence: Synthetic peptide
YEQFKKGVQI

SEQ ID NO: 9136 - protein, 9 aa, synthetic construct
  REGION 1..9: note = Description of Artificial Sequence: Synthetic peptide
YEQYIKWPW

SEQ ID NO: 9137 - protein, 9 aa, synthetic construct
  REGION 1..9: note = Description of Artificial Sequence: Synthetic peptide
YFCTCYFGL

SEQ ID NO: 9138 - protein, 8 aa, synthetic construct
  REGION 1..8: note = Description of Artificial Sequence: Synthetic peptide
YFIASFRL

SEQ ID NO: 9139 - protein, 9 aa, synthetic construct
  REGION 1..9: note = Description of Artificial Sequence: Synthetic peptide
YFVLTSHTV

SEQ ID NO: 9140 - protein, 8 aa, synthetic construct
  REGION 1..8: note = Description of Artificial Sequence: Synthetic peptide
YGVSPTKL

SEQ ID NO: 9141 - protein, 9 aa, synthetic construct
  REGION 1..9: note = Description of Artificial Sequence: Synthetic peptide
YHDVRVVLD

SEQ ID NO: 9142 - protein, 9 aa, synthetic construct
  REGION 1..9: note = Description of Artificial Sequence: Synthetic peptide
YICGFIQQK

SEQ ID NO: 9143 - protein, 9 aa, synthetic construct
  REGION 1..9: note = Description of Artificial Sequence: Synthetic peptide
YIDINGNLH

SEQ ID NO: 9144 - protein, 9 aa, synthetic construct
  REGION 1..9: note = Description of Artificial Sequence: Synthetic peptide
YIVDSVTVK

SEQ ID NO: 9145 - protein, 8 aa, synthetic construct
  REGION 1..8: note = Description of Artificial Sequence: Synthetic peptide
YLALYNKY

SEQ ID NO: 9146 - protein, 10 aa, synthetic construct
  REGION 1..10: note = Description of Artificial Sequence: Synthetic peptide
YLAVFDKNLY

SEQ ID NO: 9147 - protein, 8 aa, synthetic construct
  REGION 1..8: note = Description of Artificial Sequence: Synthetic peptide
YLDAYNMM

SEQ ID NO: 9148 - protein, 8 aa, synthetic construct
  REGION 1..8: note = Description of Artificial Sequence: Synthetic peptide
YLEGSVRV

SEQ ID NO: 9149 - protein, 9 aa, synthetic construct
  REGION 1..9: note = Description of Artificial Sequence: Synthetic peptide
YLKLTDNVY

SEQ ID NO: 9150 - protein, 11 aa, synthetic construct
  REGION 1..11: note = Description of Artificial Sequence: Synthetic peptide
YLQPRTFLLKY

SEQ ID NO: 9151 - protein, 8 aa, synthetic construct
  REGION 1..8: note = Description of Artificial Sequence: Synthetic peptide
YLQYIRKL

SEQ ID NO: 9152 - protein, 8 aa, synthetic construct
  REGION 1..8: note = Description of Artificial Sequence: Synthetic peptide
YNYLYRLF

SEQ ID NO: 9153 - protein, 9 aa, synthetic construct
  REGION 1..9: note = Description of Artificial Sequence: Synthetic peptide
YPANSIVCR

SEQ ID NO: 9154 - protein, 10 aa, synthetic construct
  REGION 1..10: note = Description of Artificial Sequence: Synthetic peptide
YPDPSRILGA

SEQ ID NO: 9155 - protein, 10 aa, synthetic construct
  REGION 1..10: note = Description of Artificial Sequence: Synthetic peptide
YPIIGDELKI

SEQ ID NO: 9156 - protein, 9 aa, synthetic construct
  REGION 1..9: note = Description of Artificial Sequence: Synthetic peptide
YPSARIVYT

SEQ ID NO: 9157 - protein, 8 aa, synthetic construct
  REGION 1..8: note = Description of Artificial Sequence: Synthetic peptide
YQHEETIY

SEQ ID NO: 9158 - protein, 9 aa, synthetic construct
  REGION 1..9: note = Description of Artificial Sequence: Synthetic peptide
YRLFRKSNL

SEQ ID NO: 9159 - protein, 9 aa, synthetic construct
  REGION 1..9: note = Description of Artificial Sequence: Synthetic peptide
YRVTKNSKV

SEQ ID NO: 9160 - protein, 9 aa, synthetic construct
  REGION 1..9: note = Description of Artificial Sequence: Synthetic peptide
YRYNLPTMC

SEQ ID NO: 9161 - protein, 9 aa, synthetic construct
  REGION 1..9: note = Description of Artificial Sequence: Synthetic peptide
YSDSPCESH

SEQ ID NO: 9162 - protein, 10 aa, synthetic construct
  REGION 1..10: note = Description of Artificial Sequence: Synthetic peptide
YSDVENPHLM

SEQ ID NO: 9163 - protein, 8 aa, synthetic construct
  REGION 1..8: note = Description of Artificial Sequence: Synthetic peptide
YSGQSTQL

SEQ ID NO: 9164 - protein, 9 aa, synthetic construct
  REGION 1..9: note = Description of Artificial Sequence: Synthetic peptide
YSHLLLVAA

SEQ ID NO: 9165 - protein, 8 aa, synthetic construct
  REGION 1..8: note = Description of Artificial Sequence: Synthetic peptide
YSKWYIRV

SEQ ID NO: 9166 - protein, 8 aa, synthetic construct
  REGION 1..8: note = Description of Artificial Sequence: Synthetic peptide
YSNNSIAI

SEQ ID NO: 9167 - protein, 9 aa, synthetic construct
  REGION 1..9: note = Description of Artificial Sequence: Synthetic peptide
YTEISFMLW

SEQ ID NO: 9168 - protein, 8 aa, synthetic construct
  REGION 1..8: note = Description of Artificial Sequence: Synthetic peptide
YTMADLVY

SEQ ID NO: 9169 - protein, 10 aa, synthetic construct
  REGION 1..10: note = Description of Artificial Sequence: Synthetic peptide
YTVEEAKTVL

SEQ ID NO: 9170 - protein, 9 aa, synthetic construct
  REGION 1..9: note = Description of Artificial Sequence: Synthetic peptide
YVDTPNNTD

SEQ ID NO: 9171 - protein, 10 aa, synthetic construct
  REGION 1..10: note = Description of Artificial Sequence: Synthetic peptide
YVDTPNNTDF

SEQ ID NO: 9172 - protein, 10 aa, synthetic construct
  REGION 1..10: note = Description of Artificial Sequence: Synthetic peptide
YVFTGYRVTK

SEQ ID NO: 9173 - protein, 9 aa, synthetic construct
  REGION 1..9: note = Description of Artificial Sequence: Synthetic peptide
YVLGLAAIM

SEQ ID NO: 9174 - protein, 10 aa, synthetic construct
  REGION 1..10: note = Description of Artificial Sequence: Synthetic peptide
YVLPNDDTLR

SEQ ID NO: 9175 - protein, 11 aa, synthetic construct
  REGION 1..11: note = Description of Artificial Sequence: Synthetic peptide
YVMHANYIFWR

SEQ ID NO: 9176 - protein, 8 aa, synthetic construct
  REGION 1..8: note = Description of Artificial Sequence: Synthetic peptide
YVTHGLNL

SEQ ID NO: 9177 - protein, 9 aa, synthetic construct
  REGION 1..9: note = Description of Artificial Sequence: Synthetic peptide
YYHKNNKSW

SEQ ID NO: 9178 - protein, 9 aa, synthetic construct
  REGION 1..9: note = Description of Artificial Sequence: Synthetic peptide
YYKLGASQR

SEQ ID NO: 9179 - protein, 8 aa, synthetic construct
  REGION 1..8: note = Description of Artificial Sequence: Synthetic peptide
YYQNNVFM

SEQ ID NO: 9180 - protein, 9 aa, synthetic construct
  REGION 1..9: note = Description of Artificial Sequence: Synthetic peptide
YYQNNVFMS

SEQ ID NO: 9181 - protein, 9 aa, synthetic construct
  REGION 1..9: note = Description of Artificial Sequence: Synthetic peptide
YYVGYLQPR

SEQ ID NO: 9182 - protein, 11 aa, synthetic construct
  REGION 1..11: note = Description of Artificial Sequence: Synthetic peptide
YYVGYLQPRTF

SEQ ID NO: 9183 - protein, 9 aa, synthetic construct
  REGION 1..9: note = Description of Artificial Sequence: Synthetic peptide
AAIVFITLC

SEQ ID NO: 9184 - protein, 10 aa, synthetic construct
  REGION 1..10: note = Description of Artificial Sequence: Synthetic peptide
AAIVFITLCF

SEQ ID NO: 9185 - protein, 9 aa, synthetic construct
  REGION 1..9: note = Description of Artificial Sequence: Synthetic peptide
AAKAYKDYL

SEQ ID NO: 9186 - protein, 8 aa, synthetic construct
  REGION 1..8: note = Description of Artificial Sequence: Synthetic peptide
AAVITREV

SEQ ID NO: 9187 - protein, 10 aa, synthetic construct
  REGION 1..10: note = Description of Artificial Sequence: Synthetic peptide
ACTDDNALAY

SEQ ID NO: 9188 - protein, 9 aa, synthetic construct
  REGION 1..9: note = Description of Artificial Sequence: Synthetic peptide
ADAQSFLNR

SEQ ID NO: 9189 - protein, 8 aa, synthetic construct
  REGION 1..8: note = Description of Artificial Sequence: Synthetic peptide
AEAELAKN

SEQ ID NO: 9190 - protein, 10 aa, synthetic construct
  REGION 1..10: note = Description of Artificial Sequence: Synthetic peptide
AEAELAKNVS

SEQ ID NO: 9191 - protein, 8 aa, synthetic construct
  REGION 1..8: note = Description of Artificial Sequence: Synthetic peptide
AEHVNNSY

SEQ ID NO: 9192 - protein, 10 aa, synthetic construct
  REGION 1..10: note = Description of Artificial Sequence: Synthetic peptide
AEIVDTVSAL

SEQ ID NO: 9193 - protein, 9 aa, synthetic construct
  REGION 1..9: note = Description of Artificial Sequence: Synthetic peptide
AENSVAYSN

SEQ ID NO: 9194 - protein, 9 aa, synthetic construct
  REGION 1..9: note = Description of Artificial Sequence: Synthetic peptide
AENVTGLFK

SEQ ID NO: 9195 - protein, 8 aa, synthetic construct
  REGION 1..8: note = Description of Artificial Sequence: Synthetic peptide
AEVAVKMF

SEQ ID NO: 9196 - protein, 10 aa, synthetic construct
  REGION 1..10: note = Description of Artificial Sequence: Synthetic peptide
AEWFLAYILF

SEQ ID NO: 9197 - protein, 9 aa, synthetic construct
  REGION 1..9: note = Description of Artificial Sequence: Synthetic peptide
AFEKMVSLL

SEQ ID NO: 9198 - protein, 9 aa, synthetic construct
  REGION 1..9: note = Description of Artificial Sequence: Synthetic peptide
AFGLVAEWF

SEQ ID NO: 9199 - protein, 9 aa, synthetic construct
  REGION 1..9: note = Description of Artificial Sequence: Synthetic peptide
AFLIGCNYL

SEQ ID NO: 9200 - protein, 9 aa, synthetic construct
  REGION 1..9: note = Description of Artificial Sequence: Synthetic peptide
AFYILPSII

SEQ ID NO: 9201 - protein, 8 aa, synthetic construct
  REGION 1..8: note = Description of Artificial Sequence: Synthetic peptide
AGFSLWVY

SEQ ID NO: 9202 - protein, 8 aa, synthetic construct
  REGION 1..8: note = Description of Artificial Sequence: Synthetic peptide
AIDGGVTR

SEQ ID NO: 9203 - protein, 9 aa, synthetic construct
  REGION 1..9: note = Description of Artificial Sequence: Synthetic peptide
AISDYDYYR

SEQ ID NO: 9204 - protein, 8 aa, synthetic construct
  REGION 1..8: note = Description of Artificial Sequence: Synthetic peptide
AIVSTIQR

SEQ ID NO: 9205 - protein, 9 aa, synthetic construct
  REGION 1..9: note = Description of Artificial Sequence: Synthetic peptide
AIVSTIQRK

SEQ ID NO: 9206 - protein, 8 aa, synthetic construct
  REGION 1..8: note = Description of Artificial Sequence: Synthetic peptide
ALDPLSET

SEQ ID NO: 9207 - protein, 10 aa, synthetic construct
  REGION 1..10: note = Description of Artificial Sequence: Synthetic peptide
ALIISVTSNY

SEQ ID NO: 9208 - protein, 9 aa, synthetic construct
  REGION 1..9: note = Description of Artificial Sequence: Synthetic peptide
ALIWNVKDF

SEQ ID NO: 9209 - protein, 10 aa, synthetic construct
  REGION 1..10: note = Description of Artificial Sequence: Synthetic peptide
ALLEDEFTPF

SEQ ID NO: 9210 - protein, 9 aa, synthetic construct
  REGION 1..9: note = Description of Artificial Sequence: Synthetic peptide
ALNNIINNA

SEQ ID NO: 9211 - protein, 9 aa, synthetic construct
  REGION 1..9: note = Description of Artificial Sequence: Synthetic peptide
ALPETTADI

SEQ ID NO: 9212 - protein, 8 aa, synthetic construct
  REGION 1..8: note = Description of Artificial Sequence: Synthetic peptide
ALYNKYKY

SEQ ID NO: 9213 - protein, 11 aa, synthetic construct
  REGION 1..11: note = Description of Artificial Sequence: Synthetic peptide
ALYYPSARIVY

SEQ ID NO: 9214 - protein, 8 aa, synthetic construct
  REGION 1..8: note = Description of Artificial Sequence: Synthetic peptide
AMYTPHTV

SEQ ID NO: 9215 - protein, 8 aa, synthetic construct
  REGION 1..8: note = Description of Artificial Sequence: Synthetic peptide
APHGHVMV

SEQ ID NO: 9216 - protein, 8 aa, synthetic construct
  REGION 1..8: note = Description of Artificial Sequence: Synthetic peptide
APHGVVFL

SEQ ID NO: 9217 - protein, 9 aa, synthetic construct
  REGION 1..9: note = Description of Artificial Sequence: Synthetic peptide
APISAMVRM

SEQ ID NO: 9218 - protein, 8 aa, synthetic construct
  REGION 1..8: note = Description of Artificial Sequence: Synthetic peptide
APKEIIFL

SEQ ID NO: 9219 - protein, 9 aa, synthetic construct
  REGION 1..9: note = Description of Artificial Sequence: Synthetic peptide
AQEKNFTTA

SEQ ID NO: 9220 - protein, 10 aa, synthetic construct
  REGION 1..10: note = Description of Artificial Sequence: Synthetic peptide
AQFAPSASAF

SEQ ID NO: 9221 - protein, 8 aa, synthetic construct
  REGION 1..8: note = Description of Artificial Sequence: Synthetic peptide
AQVDVVNF

SEQ ID NO: 9222 - protein, 9 aa, synthetic construct
  REGION 1..9: note = Description of Artificial Sequence: Synthetic peptide
AQYELKHGT

SEQ ID NO: 9223 - protein, 10 aa, synthetic construct
  REGION 1..10: note = Description of Artificial Sequence: Synthetic peptide
AQYELKHGTF

SEQ ID NO: 9224 - protein, 9 aa, synthetic construct
  REGION 1..9: note = Description of Artificial Sequence: Synthetic peptide
ARAGEAANF

SEQ ID NO: 9225 - protein, 9 aa, synthetic construct
  REGION 1..9: note = Description of Artificial Sequence: Synthetic peptide
ARFYFYTSK

SEQ ID NO: 9226 - protein, 9 aa, synthetic construct
  REGION 1..9: note = Description of Artificial Sequence: Synthetic peptide
ARSVASQSI

SEQ ID NO: 9227 - protein, 9 aa, synthetic construct
  REGION 1..9: note = Description of Artificial Sequence: Synthetic peptide
ASAFFGMSR

SEQ ID NO: 9228 - protein, 9 aa, synthetic construct
  REGION 1..9: note = Description of Artificial Sequence: Synthetic peptide
ASCDAIMTR

SEQ ID NO: 9229 - protein, 8 aa, synthetic construct
  REGION 1..8: note = Description of Artificial Sequence: Synthetic peptide
ASVYYSQL

SEQ ID NO: 9230 - protein, 10 aa, synthetic construct
  REGION 1..10: note = Description of Artificial Sequence: Synthetic peptide
ASWVMRIMTW

SEQ ID NO: 9231 - protein, 10 aa, synthetic construct
  REGION 1..10: note = Description of Artificial Sequence: Synthetic peptide
ATEETFKLSY

SEQ ID NO: 9232 - protein, 9 aa, synthetic construct
  REGION 1..9: note = Description of Artificial Sequence: Synthetic peptide
ATVHTANKW

SEQ ID NO: 9233 - protein, 9 aa, synthetic construct
  REGION 1..9: note = Description of Artificial Sequence: Synthetic peptide
ATVVIGTSK

SEQ ID NO: 9234 - protein, 8 aa, synthetic construct
  REGION 1..8: note = Description of Artificial Sequence: Synthetic peptide
ATYKPNTW

SEQ ID NO: 9235 - protein, 9 aa, synthetic construct
  REGION 1..9: note = Description of Artificial Sequence: Synthetic peptide
AVANGDSEV

SEQ ID NO: 9236 - protein, 9 aa, synthetic construct
  REGION 1..9: note = Description of Artificial Sequence: Synthetic peptide
AVDCALDPL

SEQ ID NO: 9237 - protein, 9 aa, synthetic construct
  REGION 1..9: note = Description of Artificial Sequence: Synthetic peptide
AVFQSASKI

SEQ ID NO: 9238 - protein, 9 aa, synthetic construct
  REGION 1..9: note = Description of Artificial Sequence: Synthetic peptide
AVHFISNSW

SEQ ID NO: 9239 - protein, 9 aa, synthetic construct
  REGION 1..9: note = Description of Artificial Sequence: Synthetic peptide
AVKLQNNEL

SEQ ID NO: 9240 - protein, 9 aa, synthetic construct
  REGION 1..9: note = Description of Artificial Sequence: Synthetic peptide
AVNLLTNMF

SEQ ID NO: 9241 - protein, 9 aa, synthetic construct
  REGION 1..9: note = Description of Artificial Sequence: Synthetic peptide
AYWVPRASA

SEQ ID NO: 9242 - protein, 9 aa, synthetic construct
  REGION 1..9: note = Description of Artificial Sequence: Synthetic peptide
AYYVGYLQP

SEQ ID NO: 9243 - protein, 9 aa, synthetic construct
  REGION 1..9: note = Description of Artificial Sequence: Synthetic peptide
CAKEIKESV

SEQ ID NO: 9244 - protein, 9 aa, synthetic construct
  REGION 1..9: note = Description of Artificial Sequence: Synthetic peptide
CASEYTGNY

SEQ ID NO: 9245 - protein, 9 aa, synthetic construct
  REGION 1..9: note = Description of Artificial Sequence: Synthetic peptide
CIMSDRDLY

SEQ ID NO: 9246 - protein, 8 aa, synthetic construct
  REGION 1..8: note = Description of Artificial Sequence: Synthetic peptide
CRFDTRVL

SEQ ID NO: 9247 - protein, 10 aa, synthetic construct
  REGION 1..10: note = Description of Artificial Sequence: Synthetic peptide
CSFYEDFLEY

SEQ ID NO: 9248 - protein, 9 aa, synthetic construct
  REGION 1..9: note = Description of Artificial Sequence: Synthetic peptide
CTLSEQLDF

SEQ ID NO: 9249 - protein, 8 aa, synthetic construct
  REGION 1..8: note = Description of Artificial Sequence: Synthetic peptide
CYMHHMEL

SEQ ID NO: 9250 - protein, 8 aa, synthetic construct
  REGION 1..8: note = Description of Artificial Sequence: Synthetic peptide
DAIMTRCL

SEQ ID NO: 9251 - protein, 9 aa, synthetic construct
  REGION 1..9: note = Description of Artificial Sequence: Synthetic peptide
DAVNLLTNM

SEQ ID NO: 9252 - protein, 9 aa, synthetic construct
  REGION 1..9: note = Description of Artificial Sequence: Synthetic peptide
DAVTAYNGY

SEQ ID NO: 9253 - protein, 9 aa, synthetic construct
  REGION 1..9: note = Description of Artificial Sequence: Synthetic peptide
DCSKVITGL

SEQ ID NO: 9254 - protein, 9 aa, synthetic construct
  REGION 1..9: note = Description of Artificial Sequence: Synthetic peptide
DESGEFKLA

SEQ ID NO: 9255 - protein, 9 aa, synthetic construct
  REGION 1..9: note = Description of Artificial Sequence: Synthetic peptide
DFVKATCEF

SEQ ID NO: 9256 - protein, 9 aa, synthetic construct
  REGION 1..9: note = Description of Artificial Sequence: Synthetic peptide
DGARRVWTL

SEQ ID NO: 9257 - protein, 9 aa, synthetic construct
  REGION 1..9: note = Description of Artificial Sequence: Synthetic peptide
DIDITFLKK

SEQ ID NO: 9258 - protein, 9 aa, synthetic construct
  REGION 1..9: note = Description of Artificial Sequence: Synthetic peptide
DILSRLDKV

SEQ ID NO: 9259 - protein, 9 aa, synthetic construct
  REGION 1..9: note = Description of Artificial Sequence: Synthetic peptide
DKAYKIEEL

SEQ ID NO: 9260 - protein, 10 aa, synthetic construct
  REGION 1..10: note = Description of Artificial Sequence: Synthetic peptide
DLDEWSMATY

SEQ ID NO: 9261 - protein, 9 aa, synthetic construct
  REGION 1..9: note = Description of Artificial Sequence: Synthetic peptide
DLLFNKVTL

SEQ ID NO: 9262 - protein, 9 aa, synthetic construct
  REGION 1..9: note = Description of Artificial Sequence: Synthetic peptide
DPNFKDQVI

SEQ ID NO: 9263 - protein, 10 aa, synthetic construct
  REGION 1..10: note = Description of Artificial Sequence: Synthetic peptide
DPSKPSKRSF

SEQ ID NO: 9264 - protein, 9 aa, synthetic construct
  REGION 1..9: note = Description of Artificial Sequence: Synthetic peptide
DRYPANSIV

SEQ ID NO: 9265 - protein, 9 aa, synthetic construct
  REGION 1..9: note = Description of Artificial Sequence: Synthetic peptide
DTGVEHVTF

SEQ ID NO: 9266 - protein, 8 aa, synthetic construct
  REGION 1..8: note = Description of Artificial Sequence: Synthetic peptide
DTVSALVY

SEQ ID NO: 9267 - protein, 8 aa, synthetic construct
  REGION 1..8: note = Description of Artificial Sequence: Synthetic peptide
DVRETMSY

SEQ ID NO: 9268 - protein, 8 aa, synthetic construct
  REGION 1..8: note = Description of Artificial Sequence: Synthetic peptide
DVVECLKL

SEQ ID NO: 9269 - protein, 8 aa, synthetic construct
  REGION 1..8: note = Description of Artificial Sequence: Synthetic peptide
DYGDAVVY

SEQ ID NO: 9270 - protein, 11 aa, synthetic construct
  REGION 1..11: note = Description of Artificial Sequence: Synthetic peptide
DYKHWPQIAQF

SEQ ID NO: 9271 - protein, 9 aa, synthetic construct
  REGION 1..9: note = Description of Artificial Sequence: Synthetic peptide
DYKHYTPSF

SEQ ID NO: 9272 - protein, 9 aa, synthetic construct
  REGION 1..9: note = Description of Artificial Sequence: Synthetic peptide
DYLVSTQEF

SEQ ID NO: 9273 - protein, 9 aa, synthetic construct
  REGION 1..9: note = Description of Artificial Sequence: Synthetic peptide
EAKKVKPTV

SEQ ID NO: 9274 - protein, 9 aa, synthetic construct
  REGION 1..9: note = Description of Artificial Sequence: Synthetic peptide
ECSNLLLQY

SEQ ID NO: 9275 - protein, 8 aa, synthetic construct
  REGION 1..8: note = Description of Artificial Sequence: Synthetic peptide
EEIAIILA

SEQ ID NO: 9276 - protein, 8 aa, synthetic construct
  REGION 1..8: note = Description of Artificial Sequence: Synthetic peptide
EETGTLIV

SEQ ID NO: 9277 - protein, 9 aa, synthetic construct
  REGION 1..9: note = Description of Artificial Sequence: Synthetic peptide
EETGTLIVN

SEQ ID NO: 9278 - protein, 9 aa, synthetic construct
  REGION 1..9: note = Description of Artificial Sequence: Synthetic peptide
EEVGHTDLM

SEQ ID NO: 9279 - protein, 9 aa, synthetic construct
  REGION 1..9: note = Description of Artificial Sequence: Synthetic peptide
EEVQELYSP

SEQ ID NO: 9280 - protein, 9 aa, synthetic construct
  REGION 1..9: note = Description of Artificial Sequence: Synthetic peptide
EFSSNVANY

SEQ ID NO: 9281 - protein, 9 aa, synthetic construct
  REGION 1..9: note = Description of Artificial Sequence: Synthetic peptide
EILPVSMTK

SEQ ID NO: 9282 - protein, 9 aa, synthetic construct
  REGION 1..9: note = Description of Artificial Sequence: Synthetic peptide
ELNGGAYTR

SEQ ID NO: 9283 - protein, 9 aa, synthetic construct
  REGION 1..9: note = Description of Artificial Sequence: Synthetic peptide
ELVIGAVIL

SEQ ID NO: 9284 - protein, 9 aa, synthetic construct
  REGION 1..9: note = Description of Artificial Sequence: Synthetic peptide
EQDKNTQEV

SEQ ID NO: 9285 - protein, 9 aa, synthetic construct
  REGION 1..9: note = Description of Artificial Sequence: Synthetic peptide
ETIQITISS

SEQ ID NO: 9286 - protein, 9 aa, synthetic construct
  REGION 1..9: note = Description of Artificial Sequence: Synthetic peptide
ETKDVVECL

SEQ ID NO: 9287 - protein, 9 aa, synthetic construct
  REGION 1..9: note = Description of Artificial Sequence: Synthetic peptide
EVITFDNLK

SEQ ID NO: 9288 - protein, 9 aa, synthetic construct
  REGION 1..9: note = Description of Artificial Sequence: Synthetic peptide
EVKPFITES

SEQ ID NO: 9289 - protein, 10 aa, synthetic construct
  REGION 1..10: note = Description of Artificial Sequence: Synthetic peptide
EVLTEEVVLK

SEQ ID NO: 9290 - protein, 8 aa, synthetic construct
  REGION 1..8: note = Description of Artificial Sequence: Synthetic peptide
EVRTIKVF

SEQ ID NO: 9291 - protein, 8 aa, synthetic construct
  REGION 1..8: note = Description of Artificial Sequence: Synthetic peptide
EYSHVVAF

SEQ ID NO: 9292 - protein, 9 aa, synthetic construct
  REGION 1..9: note = Description of Artificial Sequence: Synthetic peptide
FAAYSRYRI

SEQ ID NO: 9293 - protein, 8 aa, synthetic construct
  REGION 1..8: note = Description of Artificial Sequence: Synthetic peptide
FASFYYVW

SEQ ID NO: 9294 - protein, 9 aa, synthetic construct
  REGION 1..9: note = Description of Artificial Sequence: Synthetic peptide
FAVSKGFFK

SEQ ID NO: 9295 - protein, 9 aa, synthetic construct
  REGION 1..9: note = Description of Artificial Sequence: Synthetic peptide
FELWAKRNI

SEQ ID NO: 9296 - protein, 8 aa, synthetic construct
  REGION 1..8: note = Description of Artificial Sequence: Synthetic peptide
FEYVSQPF

SEQ ID NO: 9297 - protein, 8 aa, synthetic construct
  REGION 1..8: note = Description of Artificial Sequence: Synthetic peptide
FFKEGSSV

SEQ ID NO: 9298 - protein, 9 aa, synthetic construct
  REGION 1..9: note = Description of Artificial Sequence: Synthetic peptide
FFLYENAFL

SEQ ID NO: 9299 - protein, 9 aa, synthetic construct
  REGION 1..9: note = Description of Artificial Sequence: Synthetic peptide
FFYVLGLAA

SEQ ID NO: 9300 - protein, 10 aa, synthetic construct
  REGION 1..10: note = Description of Artificial Sequence: Synthetic peptide
FGWLIVGVAL

SEQ ID NO: 9301 - protein, 8 aa, synthetic construct
  REGION 1..8: note = Description of Artificial Sequence: Synthetic peptide
FIAGLIAI

SEQ ID NO: 9302 - protein, 10 aa, synthetic construct
  REGION 1..10: note = Description of Artificial Sequence: Synthetic peptide
FISNSWLMWL

SEQ ID NO: 9303 - protein, 8 aa, synthetic construct
  REGION 1..8: note = Description of Artificial Sequence: Synthetic peptide
FITLCFTL

SEQ ID NO: 9304 - protein, 9 aa, synthetic construct
  REGION 1..9: note = Description of Artificial Sequence: Synthetic peptide
FKHLIPLMY

SEQ ID NO: 9305 - protein, 10 aa, synthetic construct
  REGION 1..10: note = Description of Artificial Sequence: Synthetic peptide
FLCLFLLPSL

SEQ ID NO: 9306 - protein, 10 aa, synthetic construct
  REGION 1..10: note = Description of Artificial Sequence: Synthetic peptide
FLFVAAIFYL

SEQ ID NO: 9307 - protein, 8 aa, synthetic construct
  REGION 1..8: note = Description of Artificial Sequence: Synthetic peptide
FLIGCNYL

SEQ ID NO: 9308 - protein, 8 aa, synthetic construct
  REGION 1..8: note = Description of Artificial Sequence: Synthetic peptide
FLLFLVLI

SEQ ID NO: 9309 - protein, 10 aa, synthetic construct
  REGION 1..10: note = Description of Artificial Sequence: Synthetic peptide
FLMSFTVLCL

SEQ ID NO: 9310 - protein, 9 aa, synthetic construct
  REGION 1..9: note = Description of Artificial Sequence: Synthetic peptide
FLNGSCGSV

SEQ ID NO: 9311 - protein, 9 aa, synthetic construct
  REGION 1..9: note = Description of Artificial Sequence: Synthetic peptide
FLPRVFSAV

SEQ ID NO: 9312 - protein, 9 aa, synthetic construct
  REGION 1..9: note = Description of Artificial Sequence: Synthetic peptide
FLRDGWEIV

SEQ ID NO: 9313 - protein, 10 aa, synthetic construct
  REGION 1..10: note = Description of Artificial Sequence: Synthetic peptide
FLYLYALVYF

SEQ ID NO: 9314 - protein, 10 aa, synthetic construct
  REGION 1..10: note = Description of Artificial Sequence: Synthetic peptide
FMIDVQQWGF

SEQ ID NO: 9315 - protein, 9 aa, synthetic construct
  REGION 1..9: note = Description of Artificial Sequence: Synthetic peptide
FNVLFSTVF

SEQ ID NO: 9316 - protein, 9 aa, synthetic construct
  REGION 1..9: note = Description of Artificial Sequence: Synthetic peptide
FQFCNDPFL

SEQ ID NO: 9317 - protein, 9 aa, synthetic construct
  REGION 1..9: note = Description of Artificial Sequence: Synthetic peptide
FQSAVKRTI

SEQ ID NO: 9318 - protein, 9 aa, synthetic construct
  REGION 1..9: note = Description of Artificial Sequence: Synthetic peptide
FRVQPTESI

SEQ ID NO: 9319 - protein, 10 aa, synthetic construct
  REGION 1..10: note = Description of Artificial Sequence: Synthetic peptide
FSNSGSDVLY

SEQ ID NO: 9320 - protein, 9 aa, synthetic construct
  REGION 1..9: note = Description of Artificial Sequence: Synthetic peptide
FSSTFNVPM

SEQ ID NO: 9321 - protein, 9 aa, synthetic construct
  REGION 1..9: note = Description of Artificial Sequence: Synthetic peptide
FTVEKGIYQ

SEQ ID NO: 9322 - protein, 9 aa, synthetic construct
  REGION 1..9: note = Description of Artificial Sequence: Synthetic peptide
FVTHSKGLY

SEQ ID NO: 9323 - protein, 8 aa, synthetic construct
  REGION 1..8: note = Description of Artificial Sequence: Synthetic peptide
FVTVYSHL

SEQ ID NO: 9324 - protein, 11 aa, synthetic construct
  REGION 1..11: note = Description of Artificial Sequence: Synthetic peptide
FVVPGLPGTIL

SEQ ID NO: 9325 - protein, 9 aa, synthetic construct
  REGION 1..9: note = Description of Artificial Sequence: Synthetic peptide
FWITIAYII

SEQ ID NO: 9326 - protein, 9 aa, synthetic construct
  REGION 1..9: note = Description of Artificial Sequence: Synthetic peptide
FYAYLRKHF

SEQ ID NO: 9327 - protein, 9 aa, synthetic construct
  REGION 1..9: note = Description of Artificial Sequence: Synthetic peptide
FYEPQIITT

SEQ ID NO: 9328 - protein, 10 aa, synthetic construct
  REGION 1..10: note = Description of Artificial Sequence: Synthetic peptide
FYLITPVHVM

SEQ ID NO: 9329 - protein, 10 aa, synthetic construct
  REGION 1..10: note = Description of Artificial Sequence: Synthetic peptide
FYLTNDVSFL

SEQ ID NO: 9330 - protein, 9 aa, synthetic construct
  REGION 1..9: note = Description of Artificial Sequence: Synthetic peptide
FYPPDEDEE

SEQ ID NO: 9331 - protein, 8 aa, synthetic construct
  REGION 1..8: note = Description of Artificial Sequence: Synthetic peptide
FYYVWKSY

SEQ ID NO: 9332 - protein, 9 aa, synthetic construct
  REGION 1..9: note = Description of Artificial Sequence: Synthetic peptide
GADPIHSLR

SEQ ID NO: 9333 - protein, 9 aa, synthetic construct
  REGION 1..9: note = Description of Artificial Sequence: Synthetic peptide
GAMDTTSYR

SEQ ID NO: 9334 - protein, 9 aa, synthetic construct
  REGION 1..9: note = Description of Artificial Sequence: Synthetic peptide
GCINANQVI

SEQ ID NO: 9335 - protein, 9 aa, synthetic construct
  REGION 1..9: note = Description of Artificial Sequence: Synthetic peptide
GDSEVVLKK

SEQ ID NO: 9336 - protein, 8 aa, synthetic construct
  REGION 1..8: note = Description of Artificial Sequence: Synthetic peptide
GEFKLASH

SEQ ID NO: 9337 - protein, 9 aa, synthetic construct
  REGION 1..9: note = Description of Artificial Sequence: Synthetic peptide
GEQKSILSP

SEQ ID NO: 9338 - protein, 8 aa, synthetic construct
  REGION 1..8: note = Description of Artificial Sequence: Synthetic peptide
GERVRQAL

SEQ ID NO: 9339 - protein, 9 aa, synthetic construct
  REGION 1..9: note = Description of Artificial Sequence: Synthetic peptide
GERVRQALL

SEQ ID NO: 9340 - protein, 8 aa, synthetic construct
  REGION 1..8: note = Description of Artificial Sequence: Synthetic peptide
GETLPTEV

SEQ ID NO: 9341 - protein, 9 aa, synthetic construct
  REGION 1..9: note = Description of Artificial Sequence: Synthetic peptide
GEVITFDNL

SEQ ID NO: 9342 - protein, 8 aa, synthetic construct
  REGION 1..8: note = Description of Artificial Sequence: Synthetic peptide
GEVPVSII

SEQ ID NO: 9343 - protein, 8 aa, synthetic construct
  REGION 1..8: note = Description of Artificial Sequence: Synthetic peptide
GEYSHVVA

SEQ ID NO: 9344 - protein, 9 aa, synthetic construct
  REGION 1..9: note = Description of Artificial Sequence: Synthetic peptide
GFFTYICGF

SEQ ID NO: 9345 - protein, 9 aa, synthetic construct
  REGION 1..9: note = Description of Artificial Sequence: Synthetic peptide
GFIAGLIAI

SEQ ID NO: 9346 - protein, 9 aa, synthetic construct
  REGION 1..9: note = Description of Artificial Sequence: Synthetic peptide
GFIQQKLAL

SEQ ID NO: 9347 - protein, 10 aa, synthetic construct
  REGION 1..10: note = Description of Artificial Sequence: Synthetic peptide
GFQPTNGVGY

SEQ ID NO: 9348 - protein, 9 aa, synthetic construct
  REGION 1..9: note = Description of Artificial Sequence: Synthetic peptide
GHFAWWTAF

SEQ ID NO: 9349 - protein, 9 aa, synthetic construct
  REGION 1..9: note = Description of Artificial Sequence: Synthetic peptide
GHYKHITSK

SEQ ID NO: 9350 - protein, 9 aa, synthetic construct
  REGION 1..9: note = Description of Artificial Sequence: Synthetic peptide
GLAAIMQLF

SEQ ID NO: 9351 - protein, 9 aa, synthetic construct
  REGION 1..9: note = Description of Artificial Sequence: Synthetic peptide
GLTVLPPLL

SEQ ID NO: 9352 - protein, 9 aa, synthetic construct
  REGION 1..9: note = Description of Artificial Sequence: Synthetic peptide
GLVEVEKGV

SEQ ID NO: 9353 - protein, 9 aa, synthetic construct
  REGION 1..9: note = Description of Artificial Sequence: Synthetic peptide
GLWLDDVVY

SEQ ID NO: 9354 - protein, 9 aa, synthetic construct
  REGION 1..9: note = Description of Artificial Sequence: Synthetic peptide
GPKVKYLYF

SEQ ID NO: 9355 - protein, 9 aa, synthetic construct
  REGION 1..9: note = Description of Artificial Sequence: Synthetic peptide
GQQQQGQTV

SEQ ID NO: 9356 - protein, 8 aa, synthetic construct
  REGION 1..8: note = Description of Artificial Sequence: Synthetic peptide
GRFVLALL

SEQ ID NO: 9357 - protein, 8 aa, synthetic construct
  REGION 1..8: note = Description of Artificial Sequence: Synthetic peptide
GSDNVTDF

SEQ ID NO: 9358 - protein, 10 aa, synthetic construct
  REGION 1..10: note = Description of Artificial Sequence: Synthetic peptide
GSIIQFPNTY

SEQ ID NO: 9359 - protein, 9 aa, synthetic construct
  REGION 1..9: note = Description of Artificial Sequence: Synthetic peptide
GSKSPIQYI

SEQ ID NO: 9360 - protein, 9 aa, synthetic construct
  REGION 1..9: note = Description of Artificial Sequence: Synthetic peptide
GSLAATVRL

SEQ ID NO: 9361 - protein, 9 aa, synthetic construct
  REGION 1..9: note = Description of Artificial Sequence: Synthetic peptide
GSLVVRCSF

SEQ ID NO: 9362 - protein, 8 aa, synthetic construct
  REGION 1..8: note = Description of Artificial Sequence: Synthetic peptide
GTDPYEDF

SEQ ID NO: 9363 - protein, 9 aa, synthetic construct
  REGION 1..9: note = Description of Artificial Sequence: Synthetic peptide
GTHWFVTQR

SEQ ID NO: 9364 - protein, 8 aa, synthetic construct
  REGION 1..8: note = Description of Artificial Sequence: Synthetic peptide
GVAPGTAV

SEQ ID NO: 9365 - protein, 8 aa, synthetic construct
  REGION 1..8: note = Description of Artificial Sequence: Synthetic peptide
GVDAVNLL

SEQ ID NO: 9366 - protein, 9 aa, synthetic construct
  REGION 1..9: note = Description of Artificial Sequence: Synthetic peptide
GVFCGVDAV

SEQ ID NO: 9367 - protein, 9 aa, synthetic construct
  REGION 1..9: note = Description of Artificial Sequence: Synthetic peptide
GVPVVDSYY

SEQ ID NO: 9368 - protein, 9 aa, synthetic construct
  REGION 1..9: note = Description of Artificial Sequence: Synthetic peptide
GVVQLTSQW

SEQ ID NO: 9369 - protein, 10 aa, synthetic construct
  REGION 1..10: note = Description of Artificial Sequence: Synthetic peptide
GVVQQLPETY

SEQ ID NO: 9370 - protein, 8 aa, synthetic construct
  REGION 1..8: note = Description of Artificial Sequence: Synthetic peptide
GVYSVIYL

SEQ ID NO: 9371 - protein, 10 aa, synthetic construct
  REGION 1..10: note = Description of Artificial Sequence: Synthetic peptide
GVYYPDKVFR

SEQ ID NO: 9372 - protein, 8 aa, synthetic construct
  REGION 1..8: note = Description of Artificial Sequence: Synthetic peptide
GYINVFAF

SEQ ID NO: 9373 - protein, 10 aa, synthetic construct
  REGION 1..10: note = Description of Artificial Sequence: Synthetic peptide
GYINVFAFPF

SEQ ID NO: 9374 - protein, 9 aa, synthetic construct
  REGION 1..9: note = Description of Artificial Sequence: Synthetic peptide
GYLQPRTFL

SEQ ID NO: 9375 - protein, 8 aa, synthetic construct
  REGION 1..8: note = Description of Artificial Sequence: Synthetic peptide
HECFVKRV

SEQ ID NO: 9376 - protein, 10 aa, synthetic construct
  REGION 1..10: note = Description of Artificial Sequence: Synthetic peptide
HFAIGLALYY

SEQ ID NO: 9377 - protein, 10 aa, synthetic construct
  REGION 1..10: note = Description of Artificial Sequence: Synthetic peptide
HFDEGNCDTL

SEQ ID NO: 9378 - protein, 9 aa, synthetic construct
  REGION 1..9: note = Description of Artificial Sequence: Synthetic peptide
HFIETISLA

SEQ ID NO: 9379 - protein, 8 aa, synthetic construct
  REGION 1..8: note = Description of Artificial Sequence: Synthetic peptide
HGFELTSM

SEQ ID NO: 9380 - protein, 9 aa, synthetic construct
  REGION 1..9: note = Description of Artificial Sequence: Synthetic peptide
HHMELPTGV

SEQ ID NO: 9381 - protein, 9 aa, synthetic construct
  REGION 1..9: note = Description of Artificial Sequence: Synthetic peptide
HITSKETLY

SEQ ID NO: 9382 - protein, 9 aa, synthetic construct
  REGION 1..9: note = Description of Artificial Sequence: Synthetic peptide
HLLIGLAKR

SEQ ID NO: 9383 - protein, 9 aa, synthetic construct
  REGION 1..9: note = Description of Artificial Sequence: Synthetic peptide
HLLLVAAGL

SEQ ID NO: 9384 - protein, 9 aa, synthetic construct
  REGION 1..9: note = Description of Artificial Sequence: Synthetic peptide
HLMSFPQSA

SEQ ID NO: 9385 - protein, 10 aa, synthetic construct
  REGION 1..10: note = Description of Artificial Sequence: Synthetic peptide
HLYLQYIRKL

SEQ ID NO: 9386 - protein, 8 aa, synthetic construct
  REGION 1..8: note = Description of Artificial Sequence: Synthetic peptide
HPDSATLV

SEQ ID NO: 9387 - protein, 10 aa, synthetic construct
  REGION 1..10: note = Description of Artificial Sequence: Synthetic peptide
HPLADNKFAL

SEQ ID NO: 9388 - protein, 10 aa, synthetic construct
  REGION 1..10: note = Description of Artificial Sequence: Synthetic peptide
HPNPKGFCDL

SEQ ID NO: 9389 - protein, 9 aa, synthetic construct
  REGION 1..9: note = Description of Artificial Sequence: Synthetic peptide
HPNQEYADV

SEQ ID NO: 9390 - protein, 9 aa, synthetic construct
  REGION 1..9: note = Description of Artificial Sequence: Synthetic peptide
HSKGLYRKC

SEQ ID NO: 9391 - protein, 8 aa, synthetic construct
  REGION 1..8: note = Description of Artificial Sequence: Synthetic peptide
HSYFTSDY

SEQ ID NO: 9392 - protein, 8 aa, synthetic construct
  REGION 1..8: note = Description of Artificial Sequence: Synthetic peptide
HTDFSSEI

SEQ ID NO: 9393 - protein, 9 aa, synthetic construct
  REGION 1..9: note = Description of Artificial Sequence: Synthetic peptide
HTDFSSEII

SEQ ID NO: 9394 - protein, 9 aa, synthetic construct
  REGION 1..9: note = Description of Artificial Sequence: Synthetic peptide
HTDLMAAYV

SEQ ID NO: 9395 - protein, 10 aa, synthetic construct
  REGION 1..10: note = Description of Artificial Sequence: Synthetic peptide
HVSGTNGTKR

SEQ ID NO: 9396 - protein, 10 aa, synthetic construct
  REGION 1..10: note = Description of Artificial Sequence: Synthetic peptide
HVVAFNTLLF

SEQ ID NO: 9397 - protein, 8 aa, synthetic construct
  REGION 1..8: note = Description of Artificial Sequence: Synthetic peptide
HWPQIAQF

SEQ ID NO: 9398 - protein, 9 aa, synthetic construct
  REGION 1..9: note = Description of Artificial Sequence: Synthetic peptide
HYVRITGLY

SEQ ID NO: 9399 - protein, 8 aa, synthetic construct
  REGION 1..8: note = Description of Artificial Sequence: Synthetic peptide
IAANTVIW

SEQ ID NO: 9400 - protein, 9 aa, synthetic construct
  REGION 1..9: note = Description of Artificial Sequence: Synthetic peptide
IAATRGATV

SEQ ID NO: 9401 - protein, 9 aa, synthetic construct
  REGION 1..9: note = Description of Artificial Sequence: Synthetic peptide
IAEIPKEEV

SEQ ID NO: 9402 - protein, 10 aa, synthetic construct
  REGION 1..10: note = Description of Artificial Sequence: Synthetic peptide
IAIVMVTIML

SEQ ID NO: 9403 - protein, 9 aa, synthetic construct
  REGION 1..9: note = Description of Artificial Sequence: Synthetic peptide
IANQFNSAI

SEQ ID NO: 9404 - protein, 9 aa, synthetic construct
  REGION 1..9: note = Description of Artificial Sequence: Synthetic peptide
IAQYTSALL

SEQ ID NO: 9405 - protein, 9 aa, synthetic construct
  REGION 1..9: note = Description of Artificial Sequence: Synthetic peptide
IAYIICIST

SEQ ID NO: 9406 - protein, 9 aa, synthetic construct
  REGION 1..9: note = Description of Artificial Sequence: Synthetic peptide
IFGTVYEKL

SEQ ID NO: 9407 - protein, 8 aa, synthetic construct
  REGION 1..8: note = Description of Artificial Sequence: Synthetic peptide
IFVDGVPF

SEQ ID NO: 9408 - protein, 8 aa, synthetic construct
  REGION 1..8: note = Description of Artificial Sequence: Synthetic peptide
IFWFSLEL

SEQ ID NO: 9409 - protein, 8 aa, synthetic construct
  REGION 1..8: note = Description of Artificial Sequence: Synthetic peptide
IFYLITPV

SEQ ID NO: 9410 - protein, 9 aa, synthetic construct
  REGION 1..9: note = Description of Artificial Sequence: Synthetic peptide
IGAGICASY

SEQ ID NO: 9411 - protein, 10 aa, synthetic construct
  REGION 1..10: note = Description of Artificial Sequence: Synthetic peptide
IIIWFLLLSV

SEQ ID NO: 9412 - protein, 9 aa, synthetic construct
  REGION 1..9: note = Description of Artificial Sequence: Synthetic peptide
IIKTIQPRV

SEQ ID NO: 9413 - protein, 9 aa, synthetic construct
  REGION 1..9: note = Description of Artificial Sequence: Synthetic peptide
IIRENNRVV

SEQ ID NO: 9414 - protein, 9 aa, synthetic construct
  REGION 1..9: note = Description of Artificial Sequence: Synthetic peptide
IKDFGGFNF

SEQ ID NO: 9415 - protein, 10 aa, synthetic construct
  REGION 1..10: note = Description of Artificial Sequence: Synthetic peptide
ILDGISQYSL

SEQ ID NO: 9416 - protein, 9 aa, synthetic construct
  REGION 1..9: note = Description of Artificial Sequence: Synthetic peptide
ILGLPTQTV

SEQ ID NO: 9417 - protein, 9 aa, synthetic construct
  REGION 1..9: note = Description of Artificial Sequence: Synthetic peptide
ILGTVSWNL

SEQ ID NO: 9418 - protein, 9 aa, synthetic construct
  REGION 1..9: note = Description of Artificial Sequence: Synthetic peptide
ILRKGGRTI

SEQ ID NO: 9419 - protein, 8 aa, synthetic construct
  REGION 1..8: note = Description of Artificial Sequence: Synthetic peptide
ILTSLLVL

SEQ ID NO: 9420 - protein, 9 aa, synthetic construct
  REGION 1..9: note = Description of Artificial Sequence: Synthetic peptide
IMASLVLAR

SEQ ID NO: 9421 - protein, 9 aa, synthetic construct
  REGION 1..9: note = Description of Artificial Sequence: Synthetic peptide
INPTDQSSY

SEQ ID NO: 9422 - protein, 9 aa, synthetic construct
  REGION 1..9: note = Description of Artificial Sequence: Synthetic peptide
IPTITQMNL

SEQ ID NO: 9423 - protein, 10 aa, synthetic construct
  REGION 1..10: note = Description of Artificial Sequence: Synthetic peptide
IQYGRSGETL

SEQ ID NO: 9424 - protein, 9 aa, synthetic construct
  REGION 1..9: note = Description of Artificial Sequence: Synthetic peptide
ITIAYIICI

SEQ ID NO: 9425 - protein, 9 aa, synthetic construct
  REGION 1..9: note = Description of Artificial Sequence: Synthetic peptide
ITLKKRWQL

SEQ ID NO: 9426 - protein, 9 aa, synthetic construct
  REGION 1..9: note = Description of Artificial Sequence: Synthetic peptide
IVDSVTVKN

SEQ ID NO: 9427 - protein, 9 aa, synthetic construct
  REGION 1..9: note = Description of Artificial Sequence: Synthetic peptide
IWLGFIAGL

SEQ ID NO: 9428 - protein, 9 aa, synthetic construct
  REGION 1..9: note = Description of Artificial Sequence: Synthetic peptide
IYDEPTTTT

SEQ ID NO: 9429 - protein, 9 aa, synthetic construct
  REGION 1..9: note = Description of Artificial Sequence: Synthetic peptide
KAFKQIVES

SEQ ID NO: 9430 - protein, 8 aa, synthetic construct
  REGION 1..8: note = Description of Artificial Sequence: Synthetic peptide
KAGGTTEM

SEQ ID NO: 9431 - protein, 9 aa, synthetic construct
  REGION 1..9: note = Description of Artificial Sequence: Synthetic peptide
KAIVSTIQR

SEQ ID NO: 9432 - protein, 10 aa, synthetic construct
  REGION 1..10: note = Description of Artificial Sequence: Synthetic peptide
KCRSKNPLLY

SEQ ID NO: 9433 - protein, 9 aa, synthetic construct
  REGION 1..9: note = Description of Artificial Sequence: Synthetic peptide
KDCVVLHSY

SEQ ID NO: 9434 - protein, 9 aa, synthetic construct
  REGION 1..9: note = Description of Artificial Sequence: Synthetic peptide
KDLPKEITV

SEQ ID NO: 9435 - protein, 9 aa, synthetic construct
  REGION 1..9: note = Description of Artificial Sequence: Synthetic peptide
KDLSPRWYF

SEQ ID NO: 9436 - protein, 10 aa, synthetic construct
  REGION 1..10: note = Description of Artificial Sequence: Synthetic peptide
KEIDRLNEVA

SEQ ID NO: 9437 - protein, 8 aa, synthetic construct
  REGION 1..8: note = Description of Artificial Sequence: Synthetic peptide
KELLQNGM

SEQ ID NO: 9438 - protein, 8 aa, synthetic construct
  REGION 1..8: note = Description of Artificial Sequence: Synthetic peptide
KELLVYAA

SEQ ID NO: 9439 - protein, 9 aa, synthetic construct
  REGION 1..9: note = Description of Artificial Sequence: Synthetic peptide
KELLVYAAD

SEQ ID NO: 9440 - protein, 10 aa, synthetic construct
  REGION 1..10: note = Description of Artificial Sequence: Synthetic peptide
KESVQTFFKL

SEQ ID NO: 9441 - protein, 8 aa, synthetic construct
  REGION 1..8: note = Description of Artificial Sequence: Synthetic peptide
KFLTENLL

SEQ ID NO: 9442 - protein, 8 aa, synthetic construct
  REGION 1..8: note = Description of Artificial Sequence: Synthetic peptide
KFNGLTVL

SEQ ID NO: 9443 - protein, 8 aa, synthetic construct
  REGION 1..8: note = Description of Artificial Sequence: Synthetic peptide
KFTDGVCL

SEQ ID NO: 9444 - protein, 10 aa, synthetic construct
  REGION 1..10: note = Description of Artificial Sequence: Synthetic peptide
KFYGGWHNML

SEQ ID NO: 9445 - protein, 9 aa, synthetic construct
  REGION 1..9: note = Description of Artificial Sequence: Synthetic peptide
KGFCKLHNW

SEQ ID NO: 9446 - protein, 9 aa, synthetic construct
  REGION 1..9: note = Description of Artificial Sequence: Synthetic peptide
KGIYQTSNF

SEQ ID NO: 9447 - protein, 9 aa, synthetic construct
  REGION 1..9: note = Description of Artificial Sequence: Synthetic peptide
KGPKVKYLY

SEQ ID NO: 9448 - protein, 9 aa, synthetic construct
  REGION 1..9: note = Description of Artificial Sequence: Synthetic peptide
KHAFLCLFL

SEQ ID NO: 9449 - protein, 8 aa, synthetic construct
  REGION 1..8: note = Description of Artificial Sequence: Synthetic peptide
KHTPINLV

SEQ ID NO: 9450 - protein, 10 aa, synthetic construct
  REGION 1..10: note = Description of Artificial Sequence: Synthetic peptide
KIADKYVRNL

SEQ ID NO: 9451 - protein, 9 aa, synthetic construct
  REGION 1..9: note = Description of Artificial Sequence: Synthetic peptide
KIILFLALI

SEQ ID NO: 9452 - protein, 9 aa, synthetic construct
  REGION 1..9: note = Description of Artificial Sequence: Synthetic peptide
KLDGFMGRI

SEQ ID NO: 9453 - protein, 9 aa, synthetic construct
  REGION 1..9: note = Description of Artificial Sequence: Synthetic peptide
KLGSLVVRC

SEQ ID NO: 9454 - protein, 8 aa, synthetic construct
  REGION 1..8: note = Description of Artificial Sequence: Synthetic peptide
KLKDCVMY

SEQ ID NO: 9455 - protein, 8 aa, synthetic construct
  REGION 1..8: note = Description of Artificial Sequence: Synthetic peptide
KLLEQWNL

SEQ ID NO: 9456 - protein, 10 aa, synthetic construct
  REGION 1..10: note = Description of Artificial Sequence: Synthetic peptide
KLNEEIAIIL

SEQ ID NO: 9457 - protein, 9 aa, synthetic construct
  REGION 1..9: note = Description of Artificial Sequence: Synthetic peptide
KLVSSFLEM

SEQ ID NO: 9458 - protein, 10 aa, synthetic construct
  REGION 1..10: note = Description of Artificial Sequence: Synthetic peptide
KMKDLSPRWY

SEQ ID NO: 9459 - protein, 8 aa, synthetic construct
  REGION 1..8: note = Description of Artificial Sequence: Synthetic peptide
KNFKSVLY

SEQ ID NO: 9460 - protein, 8 aa, synthetic construct
  REGION 1..8: note = Description of Artificial Sequence: Synthetic peptide
KNGSIHLY

SEQ ID NO: 9461 - protein, 9 aa, synthetic construct
  REGION 1..9: note = Description of Artificial Sequence: Synthetic peptide
KPCIKVATV

SEQ ID NO: 9462 - protein, 9 aa, synthetic construct
  REGION 1..9: note = Description of Artificial Sequence: Synthetic peptide
KPFERDIST

SEQ ID NO: 9463 - protein, 8 aa, synthetic construct
  REGION 1..8: note = Description of Artificial Sequence: Synthetic peptide
KPFLNKVV

SEQ ID NO: 9464 - protein, 8 aa, synthetic construct
  REGION 1..8: note = Description of Artificial Sequence: Synthetic peptide
KPNELSRV

SEQ ID NO: 9465 - protein, 9 aa, synthetic construct
  REGION 1..9: note = Description of Artificial Sequence: Synthetic peptide
KPYIKWDLL

SEQ ID NO: 9466 - protein, 8 aa, synthetic construct
  REGION 1..8: note = Description of Artificial Sequence: Synthetic peptide
KQGDDYVY

SEQ ID NO: 9467 - protein, 9 aa, synthetic construct
  REGION 1..9: note = Description of Artificial Sequence: Synthetic peptide
KQLIKVTLV

SEQ ID NO: 9468 - protein, 10 aa, synthetic construct
  REGION 1..10: note = Description of Artificial Sequence: Synthetic peptide
KQLIKVTLVF

SEQ ID NO: 9469 - protein, 8 aa, synthetic construct
  REGION 1..8: note = Description of Artificial Sequence: Synthetic peptide
KQLPFFYY

SEQ ID NO: 9470 - protein, 10 aa, synthetic construct
  REGION 1..10: note = Description of Artificial Sequence: Synthetic peptide
KRFDNPVLPF

SEQ ID NO: 9471 - protein, 10 aa, synthetic construct
  REGION 1..10: note = Description of Artificial Sequence: Synthetic peptide
KRFKESPFEL

SEQ ID NO: 9472 - protein, 10 aa, synthetic construct
  REGION 1..10: note = Description of Artificial Sequence: Synthetic peptide
KSAFVNLKQL

SEQ ID NO: 9473 - protein, 10 aa, synthetic construct
  REGION 1..10: note = Description of Artificial Sequence: Synthetic peptide
KSAGFPFNKW

SEQ ID NO: 9474 - protein, 10 aa, synthetic construct
  REGION 1..10: note = Description of Artificial Sequence: Synthetic peptide
KSASVYYSQL

SEQ ID NO: 9475 - protein, 8 aa, synthetic construct
  REGION 1..8: note = Description of Artificial Sequence: Synthetic peptide
KSDGTGTI

SEQ ID NO: 9476 - protein, 9 aa, synthetic construct
  REGION 1..9: note = Description of Artificial Sequence: Synthetic peptide
KSFTVEKGI

SEQ ID NO: 9477 - protein, 8 aa, synthetic construct
  REGION 1..8: note = Description of Artificial Sequence: Synthetic peptide
KSHNIALI

SEQ ID NO: 9478 - protein, 10 aa, synthetic construct
  REGION 1..10: note = Description of Artificial Sequence: Synthetic peptide
KSILSPLYAF

SEQ ID NO: 9479 - protein, 10 aa, synthetic construct
  REGION 1..10: note = Description of Artificial Sequence: Synthetic peptide
KSLNVAKSEF

SEQ ID NO: 9480 - protein, 8 aa, synthetic construct
  REGION 1..8: note = Description of Artificial Sequence: Synthetic peptide
KSPNFSKL

SEQ ID NO: 9481 - protein, 9 aa, synthetic construct
  REGION 1..9: note = Description of Artificial Sequence: Synthetic peptide
KSPNFSKLI

SEQ ID NO: 9482 - protein, 8 aa, synthetic construct
  REGION 1..8: note = Description of Artificial Sequence: Synthetic peptide
KSQDLSVV

SEQ ID NO: 9483 - protein, 10 aa, synthetic construct
  REGION 1..10: note = Description of Artificial Sequence: Synthetic peptide
KSREETGLLM

SEQ ID NO: 9484 - protein, 11 aa, synthetic construct
  REGION 1..11: note = Description of Artificial Sequence: Synthetic peptide
KSWMESEFRVY

SEQ ID NO: 9485 - protein, 11 aa, synthetic construct
  REGION 1..11: note = Description of Artificial Sequence: Synthetic peptide
KTDGTLMIERF

SEQ ID NO: 9486 - protein, 8 aa, synthetic construct
  REGION 1..8: note = Description of Artificial Sequence: Synthetic peptide
KTHVQLSL

SEQ ID NO: 9487 - protein, 8 aa, synthetic construct
  REGION 1..8: note = Description of Artificial Sequence: Synthetic peptide
KTLATHGL

SEQ ID NO: 9488 - protein, 8 aa, synthetic construct
  REGION 1..8: note = Description of Artificial Sequence: Synthetic peptide
KTPPIKDF

SEQ ID NO: 9489 - protein, 11 aa, synthetic construct
  REGION 1..11: note = Description of Artificial Sequence: Synthetic peptide
KTYERHSLSHF

SEQ ID NO: 9490 - protein, 8 aa, synthetic construct
  REGION 1..8: note = Description of Artificial Sequence: Synthetic peptide
KVFRSSVL

SEQ ID NO: 9491 - protein, 10 aa, synthetic construct
  REGION 1..10: note = Description of Artificial Sequence: Synthetic peptide
KVGGNYNYLY

SEQ ID NO: 9492 - protein, 9 aa, synthetic construct
  REGION 1..9: note = Description of Artificial Sequence: Synthetic peptide
KVKYLYFIK

SEQ ID NO: 9493 - protein, 9 aa, synthetic construct
  REGION 1..9: note = Description of Artificial Sequence: Synthetic peptide
KVTLVFLFV

SEQ ID NO: 9494 - protein, 9 aa, synthetic construct
  REGION 1..9: note = Description of Artificial Sequence: Synthetic peptide
KWADNNCYL

SEQ ID NO: 9495 - protein, 9 aa, synthetic construct
  REGION 1..9: note = Description of Artificial Sequence: Synthetic peptide
KWDLLKYDF

SEQ ID NO: 9496 - protein, 9 aa, synthetic construct
  REGION 1..9: note = Description of Artificial Sequence: Synthetic peptide
KYKYFSGAM

SEQ ID NO: 9497 - protein, 9 aa, synthetic construct
  REGION 1..9: note = Description of Artificial Sequence: Synthetic peptide
KYTMADLVY

SEQ ID NO: 9498 - protein, 9 aa, synthetic construct
  REGION 1..9: note = Description of Artificial Sequence: Synthetic peptide
LADAGFIKQ

SEQ ID NO: 9499 - protein, 10 aa, synthetic construct
  REGION 1..10: note = Description of Artificial Sequence: Synthetic peptide
LADAGFIKQY

SEQ ID NO: 9500 - protein, 10 aa, synthetic construct
  REGION 1..10: note = Description of Artificial Sequence: Synthetic peptide
LAFLLFLVLI

SEQ ID NO: 9501 - protein, 8 aa, synthetic construct
  REGION 1..8: note = Description of Artificial Sequence: Synthetic peptide
LAKKFDTF

SEQ ID NO: 9502 - protein, 8 aa, synthetic construct
  REGION 1..8: note = Description of Artificial Sequence: Synthetic peptide
LALHRSYL

SEQ ID NO: 9503 - protein, 9 aa, synthetic construct
  REGION 1..9: note = Description of Artificial Sequence: Synthetic peptide
LALITLATC

SEQ ID NO: 9504 - protein, 9 aa, synthetic construct
  REGION 1..9: note = Description of Artificial Sequence: Synthetic peptide
LATCELYHY

SEQ ID NO: 9505 - protein, 10 aa, synthetic construct
  REGION 1..10: note = Description of Artificial Sequence: Synthetic peptide
LAYILFTRFF

SEQ ID NO: 9506 - protein, 9 aa, synthetic construct
  REGION 1..9: note = Description of Artificial Sequence: Synthetic peptide
LCLFLLPSL

SEQ ID NO: 9507 - protein, 9 aa, synthetic construct
  REGION 1..9: note = Description of Artificial Sequence: Synthetic peptide
LEEKFKEGV

SEQ ID NO: 9508 - protein, 8 aa, synthetic construct
  REGION 1..8: note = Description of Artificial Sequence: Synthetic peptide
LEFGATSA

SEQ ID NO: 9509 - protein, 9 aa, synthetic construct
  REGION 1..9: note = Description of Artificial Sequence: Synthetic peptide
LEQPTSEAV

SEQ ID NO: 9510 - protein, 9 aa, synthetic construct
  REGION 1..9: note = Description of Artificial Sequence: Synthetic peptide
LEQYVFCTV

SEQ ID NO: 9511 - protein, 9 aa, synthetic construct
  REGION 1..9: note = Description of Artificial Sequence: Synthetic peptide
LFCLLNRYF

SEQ ID NO: 9512 - protein, 10 aa, synthetic construct
  REGION 1..10: note = Description of Artificial Sequence: Synthetic peptide
LFDESGEFKL

SEQ ID NO: 9513 - protein, 10 aa, synthetic construct
  REGION 1..10: note = Description of Artificial Sequence: Synthetic peptide
LFFSYFAVHF

SEQ ID NO: 9514 - protein, 9 aa, synthetic construct
  REGION 1..9: note = Description of Artificial Sequence: Synthetic peptide
LFVAAIFYL

SEQ ID NO: 9515 - protein, 9 aa, synthetic construct
  REGION 1..9: note = Description of Artificial Sequence: Synthetic peptide
LFVTVYSHL

SEQ ID NO: 9516 - protein, 9 aa, synthetic construct
  REGION 1..9: note = Description of Artificial Sequence: Synthetic peptide
LHDELTGHM

SEQ ID NO: 9517 - protein, 9 aa, synthetic construct
  REGION 1..9: note = Description of Artificial Sequence: Synthetic peptide
LHPDSATLV

SEQ ID NO: 9518 - protein, 8 aa, synthetic construct
  REGION 1..8: note = Description of Artificial Sequence: Synthetic peptide
LIDFYLCF

SEQ ID NO: 9519 - protein, 9 aa, synthetic construct
  REGION 1..9: note = Description of Artificial Sequence: Synthetic peptide
LIDSYFVVK

SEQ ID NO: 9520 - protein, 8 aa, synthetic construct
  REGION 1..8: note = Description of Artificial Sequence: Synthetic peptide
LIIFWFSL

SEQ ID NO: 9521 - protein, 8 aa, synthetic construct
  REGION 1..8: note = Description of Artificial Sequence: Synthetic peptide
LIKVTLVF

SEQ ID NO: 9522 - protein, 8 aa, synthetic construct
  REGION 1..8: note = Description of Artificial Sequence: Synthetic peptide
LINIIIWF

SEQ ID NO: 9523 - protein, 8 aa, synthetic construct
  REGION 1..8: note = Description of Artificial Sequence: Synthetic peptide
LIQPIGAL

SEQ ID NO: 9524 - protein, 9 aa, synthetic construct
  REGION 1..9: note = Description of Artificial Sequence: Synthetic peptide
LLEDEFTPF

SEQ ID NO: 9525 - protein, 9 aa, synthetic construct
  REGION 1..9: note = Description of Artificial Sequence: Synthetic peptide
LLFNKVTLA

SEQ ID NO: 9526 - protein, 8 aa, synthetic construct
  REGION 1..8: note = Description of Artificial Sequence: Synthetic peptide
LLIIMRTF

SEQ ID NO: 9527 - protein, 8 aa, synthetic construct
  REGION 1..8: note = Description of Artificial Sequence: Synthetic peptide
LLLLFVTV

SEQ ID NO: 9528 - protein, 9 aa, synthetic construct
  REGION 1..9: note = Description of Artificial Sequence: Synthetic peptide
LLMPILTLT

SEQ ID NO: 9529 - protein, 10 aa, synthetic construct
  REGION 1..10: note = Description of Artificial Sequence: Synthetic peptide
LLTDEMIAQY

SEQ ID NO: 9530 - protein, 8 aa, synthetic construct
  REGION 1..8: note = Description of Artificial Sequence: Synthetic peptide
LLYDANYF

SEQ ID NO: 9531 - protein, 9 aa, synthetic construct
  REGION 1..9: note = Description of Artificial Sequence: Synthetic peptide
LNEEIAIIL

SEQ ID NO: 9532 - protein, 9 aa, synthetic construct
  REGION 1..9: note = Description of Artificial Sequence: Synthetic peptide
LPAPRTLLT

SEQ ID NO: 9533 - protein, 10 aa, synthetic construct
  REGION 1..10: note = Description of Artificial Sequence: Synthetic peptide
LPFFSNVTWF

SEQ ID NO: 9534 - protein, 9 aa, synthetic construct
  REGION 1..9: note = Description of Artificial Sequence: Synthetic peptide
LPGCDGGSL

SEQ ID NO: 9535 - protein, 8 aa, synthetic construct
  REGION 1..8: note = Description of Artificial Sequence: Synthetic peptide
LPKEITVA

SEQ ID NO: 9536 - protein, 9 aa, synthetic construct
  REGION 1..9: note = Description of Artificial Sequence: Synthetic peptide
LPNNTASWF

SEQ ID NO: 9537 - protein, 9 aa, synthetic construct
  REGION 1..9: note = Description of Artificial Sequence: Synthetic peptide
LQAGNATEV

SEQ ID NO: 9538 - protein, 9 aa, synthetic construct
  REGION 1..9: note = Description of Artificial Sequence: Synthetic peptide
LQAVGACVL

SEQ ID NO: 9539 - protein, 9 aa, synthetic construct
  REGION 1..9: note = Description of Artificial Sequence: Synthetic peptide
LRVEAFEYY

SEQ ID NO: 9540 - protein, 8 aa, synthetic construct
  REGION 1..8: note = Description of Artificial Sequence: Synthetic peptide
LSDDAVVC

SEQ ID NO: 9541 - protein, 8 aa, synthetic construct
  REGION 1..8: note = Description of Artificial Sequence: Synthetic peptide
LSLPVLQV

SEQ ID NO: 9542 - protein, 8 aa, synthetic construct
  REGION 1..8: note = Description of Artificial Sequence: Synthetic peptide
LSSTASAL

SEQ ID NO: 9543 - protein, 9 aa, synthetic construct
  REGION 1..9: note = Description of Artificial Sequence: Synthetic peptide
LSVVNARLR

SEQ ID NO: 9544 - protein, 9 aa, synthetic construct
  REGION 1..9: note = Description of Artificial Sequence: Synthetic peptide
LSYGIATVR

SEQ ID NO: 9545 - protein, 9 aa, synthetic construct
  REGION 1..9: note = Description of Artificial Sequence: Synthetic peptide
LTAVVIPTK

SEQ ID NO: 9546 - protein, 9 aa, synthetic construct
  REGION 1..9: note = Description of Artificial Sequence: Synthetic peptide
LTLGVYDYL

SEQ ID NO: 9547 - protein, 10 aa, synthetic construct
  REGION 1..10: note = Description of Artificial Sequence: Synthetic peptide
LVFLGIITTV

SEQ ID NO: 9548 - protein, 9 aa, synthetic construct
  REGION 1..9: note = Description of Artificial Sequence: Synthetic peptide
LVQSTQWSL

SEQ ID NO: 9549 - protein, 8 aa, synthetic construct
  REGION 1..8: note = Description of Artificial Sequence: Synthetic peptide
LVYALRHF

SEQ ID NO: 9550 - protein, 9 aa, synthetic construct
  REGION 1..9: note = Description of Artificial Sequence: Synthetic peptide
LVYDNKLKA

SEQ ID NO: 9551 - protein, 9 aa, synthetic construct
  REGION 1..9: note = Description of Artificial Sequence: Synthetic peptide
LYCIDGALL

SEQ ID NO: 9552 - protein, 8 aa, synthetic construct
  REGION 1..8: note = Description of Artificial Sequence: Synthetic peptide
LYLGGMSY

SEQ ID NO: 9553 - protein, 9 aa, synthetic construct
  REGION 1..9: note = Description of Artificial Sequence: Synthetic peptide
LYLGGMSYY

SEQ ID NO: 9554 - protein, 8 aa, synthetic construct
  REGION 1..8: note = Description of Artificial Sequence: Synthetic peptide
LYLYALVY

SEQ ID NO: 9555 - protein, 9 aa, synthetic construct
  REGION 1..9: note = Description of Artificial Sequence: Synthetic peptide
LYQPPQTSI

SEQ ID NO: 9556 - protein, 8 aa, synthetic construct
  REGION 1..8: note = Description of Artificial Sequence: Synthetic peptide
LYVNKHAF

SEQ ID NO: 9557 - protein, 9 aa, synthetic construct
  REGION 1..9: note = Description of Artificial Sequence: Synthetic peptide
MACLVGLMW

SEQ ID NO: 9558 - protein, 9 aa, synthetic construct
  REGION 1..9: note = Description of Artificial Sequence: Synthetic peptide
MADLVYALR

SEQ ID NO: 9559 - protein, 8 aa, synthetic construct
  REGION 1..8: note = Description of Artificial Sequence: Synthetic peptide
MCQPILLL

SEQ ID NO: 9560 - protein, 9 aa, synthetic construct
  REGION 1..9: note = Description of Artificial Sequence: Synthetic peptide
MELPTGVHA

SEQ ID NO: 9561 - protein, 9 aa, synthetic construct
  REGION 1..9: note = Description of Artificial Sequence: Synthetic peptide
MELTPVVQT

SEQ ID NO: 9562 - protein, 8 aa, synthetic construct
  REGION 1..8: note = Description of Artificial Sequence: Synthetic peptide
MESEFRVY

SEQ ID NO: 9563 - protein, 8 aa, synthetic construct
  REGION 1..8: note = Description of Artificial Sequence: Synthetic peptide
MFTPLVPF

SEQ ID NO: 9564 - protein, 9 aa, synthetic construct
  REGION 1..9: note = Description of Artificial Sequence: Synthetic peptide
MFTPLVPFW

SEQ ID NO: 9565 - protein, 9 aa, synthetic construct
  REGION 1..9: note = Description of Artificial Sequence: Synthetic peptide
MLAKALRKV

SEQ ID NO: 9566 - protein, 9 aa, synthetic construct
  REGION 1..9: note = Description of Artificial Sequence: Synthetic peptide
MLNPNYEDL

SEQ ID NO: 9567 - protein, 9 aa, synthetic construct
  REGION 1..9: note = Description of Artificial Sequence: Synthetic peptide
MMSAPPAQY

SEQ ID NO: 9568 - protein, 9 aa, synthetic construct
  REGION 1..9: note = Description of Artificial Sequence: Synthetic peptide
MPASWVMRI

SEQ ID NO: 9569 - protein, 10 aa, synthetic construct
  REGION 1..10: note = Description of Artificial Sequence: Synthetic peptide
MPILTLTRAL

SEQ ID NO: 9570 - protein, 9 aa, synthetic construct
  REGION 1..9: note = Description of Artificial Sequence: Synthetic peptide
MPLKAPKEI

SEQ ID NO: 9571 - protein, 9 aa, synthetic construct
  REGION 1..9: note = Description of Artificial Sequence: Synthetic peptide
MPLSAPTLV

SEQ ID NO: 9572 - protein, 8 aa, synthetic construct
  REGION 1..8: note = Description of Artificial Sequence: Synthetic peptide
MSKFPLKL

SEQ ID NO: 9573 - protein, 8 aa, synthetic construct
  REGION 1..8: note = Description of Artificial Sequence: Synthetic peptide
MVELVAEL

SEQ ID NO: 9574 - protein, 9 aa, synthetic construct
  REGION 1..9: note = Description of Artificial Sequence: Synthetic peptide
MVPHISRQR

SEQ ID NO: 9575 - protein, 10 aa, synthetic construct
  REGION 1..10: note = Description of Artificial Sequence: Synthetic peptide
MVVIPDYNTY

SEQ ID NO: 9576 - protein, 8 aa, synthetic construct
  REGION 1..8: note = Description of Artificial Sequence: Synthetic peptide
MWALIISV

SEQ ID NO: 9577 - protein, 9 aa, synthetic construct
  REGION 1..9: note = Description of Artificial Sequence: Synthetic peptide
MYIFFASFY

SEQ ID NO: 9578 - protein, 9 aa, synthetic construct
  REGION 1..9: note = Description of Artificial Sequence: Synthetic peptide
NCVADYSVL

SEQ ID NO: 9579 - protein, 9 aa, synthetic construct
  REGION 1..9: note = Description of Artificial Sequence: Synthetic peptide
NCYDYCIPY

SEQ ID NO: 9580 - protein, 8 aa, synthetic construct
  REGION 1..8: note = Description of Artificial Sequence: Synthetic peptide
NEEIAIIL

SEQ ID NO: 9581 - protein, 9 aa, synthetic construct
  REGION 1..9: note = Description of Artificial Sequence: Synthetic peptide
NEKCSAYTV

SEQ ID NO: 9582 - protein, 9 aa, synthetic construct
  REGION 1..9: note = Description of Artificial Sequence: Synthetic peptide
NELSPVALR

SEQ ID NO: 9583 - protein, 8 aa, synthetic construct
  REGION 1..8: note = Description of Artificial Sequence: Synthetic peptide
NESGLKTI

SEQ ID NO: 9584 - protein, 10 aa, synthetic construct
  REGION 1..10: note = Description of Artificial Sequence: Synthetic peptide
NESLIDLQEL

SEQ ID NO: 9585 - protein, 8 aa, synthetic construct
  REGION 1..8: note = Description of Artificial Sequence: Synthetic peptide
NFNQHEVL

SEQ ID NO: 9586 - protein, 10 aa, synthetic construct
  REGION 1..10: note = Description of Artificial Sequence: Synthetic peptide
NFNVLFSTVF

SEQ ID NO: 9587 - protein, 9 aa, synthetic construct
  REGION 1..9: note = Description of Artificial Sequence: Synthetic peptide
NFTIKGSFL

SEQ ID NO: 9588 - protein, 9 aa, synthetic construct
  REGION 1..9: note = Description of Artificial Sequence: Synthetic peptide
NGGDAALAL

SEQ ID NO: 9589 - protein, 9 aa, synthetic construct
  REGION 1..9: note = Description of Artificial Sequence: Synthetic peptide
NIDGYFKIY

SEQ ID NO: 9590 - protein, 9 aa, synthetic construct
  REGION 1..9: note = Description of Artificial Sequence: Synthetic peptide
NIFGTVYEK

SEQ ID NO: 9591 - protein, 9 aa, synthetic construct
  REGION 1..9: note = Description of Artificial Sequence: Synthetic peptide
NIIPLTTAA

SEQ ID NO: 9592 - protein, 9 aa, synthetic construct
  REGION 1..9: note = Description of Artificial Sequence: Synthetic peptide
NPANNAAIV

SEQ ID NO: 9593 - protein, 10 aa, synthetic construct
  REGION 1..10: note = Description of Artificial Sequence: Synthetic peptide
NPANNAAIVL

SEQ ID NO: 9594 - protein, 8 aa, synthetic construct
  REGION 1..8: note = Description of Artificial Sequence: Synthetic peptide
NPAWRKAV

SEQ ID NO: 9595 - protein, 10 aa, synthetic construct
  REGION 1..10: note = Description of Artificial Sequence: Synthetic peptide
NPIQLSSYSL

SEQ ID NO: 9596 - protein, 9 aa, synthetic construct
  REGION 1..9: note = Description of Artificial Sequence: Synthetic peptide
NPKTPKYKF

SEQ ID NO: 9597 - protein, 9 aa, synthetic construct
  REGION 1..9: note = Description of Artificial Sequence: Synthetic peptide
NQDLNGNWY

SEQ ID NO: 9598 - protein, 9 aa, synthetic construct
  REGION 1..9: note = Description of Artificial Sequence: Synthetic peptide
NRALTGIAV

SEQ ID NO: 9599 - protein, 10 aa, synthetic construct
  REGION 1..10: note = Description of Artificial Sequence: Synthetic peptide
NSSPDDQIGY

SEQ ID NO: 9600 - protein, 9 aa, synthetic construct
  REGION 1..9: note = Description of Artificial Sequence: Synthetic peptide
NSSRVPDLL

SEQ ID NO: 9601 - protein, 9 aa, synthetic construct
  REGION 1..9: note = Description of Artificial Sequence: Synthetic peptide
NTQEVFAQV

SEQ ID NO: 9602 - protein, 10 aa, synthetic construct
  REGION 1..10: note = Description of Artificial Sequence: Synthetic peptide
NVVRIKIVQM

SEQ ID NO: 9603 - protein, 10 aa, synthetic construct
  REGION 1..10: note = Description of Artificial Sequence: Synthetic peptide
NYMPYFFTLL

SEQ ID NO: 9604 - protein, 9 aa, synthetic construct
  REGION 1..9: note = Description of Artificial Sequence: Synthetic peptide
NYQHEETIY

SEQ ID NO: 9605 - protein, 9 aa, synthetic construct
  REGION 1..9: note = Description of Artificial Sequence: Synthetic peptide
PEVKILNNL

SEQ ID NO: 9606 - protein, 8 aa, synthetic construct
  REGION 1..8: note = Description of Artificial Sequence: Synthetic peptide
PFNDGVYF

SEQ ID NO: 9607 - protein, 9 aa, synthetic construct
  REGION 1..9: note = Description of Artificial Sequence: Synthetic peptide
PLVPFWITI

SEQ ID NO: 9608 - protein, 9 aa, synthetic construct
  REGION 1..9: note = Description of Artificial Sequence: Synthetic peptide
PQLEQPYVF

SEQ ID NO: 9609 - protein, 9 aa, synthetic construct
  REGION 1..9: note = Description of Artificial Sequence: Synthetic peptide
PVVDSYYSL

SEQ ID NO: 9610 - protein, 10 aa, synthetic construct
  REGION 1..10: note = Description of Artificial Sequence: Synthetic peptide
QAIASEFSSL

SEQ ID NO: 9611 - protein, 8 aa, synthetic construct
  REGION 1..8: note = Description of Artificial Sequence: Synthetic peptide
QAISMWAL

SEQ ID NO: 9612 - protein, 9 aa, synthetic construct
  REGION 1..9: note = Description of Artificial Sequence: Synthetic peptide
QASLPFGWL

SEQ ID NO: 9613 - protein, 9 aa, synthetic construct
  REGION 1..9: note = Description of Artificial Sequence: Synthetic peptide
QELGKYEQY

SEQ ID NO: 9614 - protein, 10 aa, synthetic construct
  REGION 1..10: note = Description of Artificial Sequence: Synthetic peptide
QEYADVFHLY

SEQ ID NO: 9615 - protein, 9 aa, synthetic construct
  REGION 1..9: note = Description of Artificial Sequence: Synthetic peptide
QLFFSYFAV

SEQ ID NO: 9616 - protein, 9 aa, synthetic construct
  REGION 1..9: note = Description of Artificial Sequence: Synthetic peptide
QLLFVVEVV

SEQ ID NO: 9617 - protein, 8 aa, synthetic construct
  REGION 1..8: note = Description of Artificial Sequence: Synthetic peptide
QLPAPRTL

SEQ ID NO: 9618 - protein, 10 aa, synthetic construct
  REGION 1..10: note = Description of Artificial Sequence: Synthetic peptide
QLYLGGMSYY

SEQ ID NO: 9619 - protein, 9 aa, synthetic construct
  REGION 1..9: note = Description of Artificial Sequence: Synthetic peptide
QMEIDFLEL

SEQ ID NO: 9620 - protein, 8 aa, synthetic construct
  REGION 1..8: note = Description of Artificial Sequence: Synthetic peptide
QPYPNASF

SEQ ID NO: 9621 - protein, 8 aa, synthetic construct
  REGION 1..8: note = Description of Artificial Sequence: Synthetic peptide
QQFGPTYL

SEQ ID NO: 9622 - protein, 8 aa, synthetic construct
  REGION 1..8: note = Description of Artificial Sequence: Synthetic peptide
QSLENVAF

SEQ ID NO: 9623 - protein, 9 aa, synthetic construct
  REGION 1..9: note = Description of Artificial Sequence: Synthetic peptide
QTMLFTMLR

SEQ ID NO: 9624 - protein, 9 aa, synthetic construct
  REGION 1..9: note = Description of Artificial Sequence: Synthetic peptide
QVDVVNFNL

SEQ ID NO: 9625 - protein, 9 aa, synthetic construct
  REGION 1..9: note = Description of Artificial Sequence: Synthetic peptide
QVVNVVTTK

SEQ ID NO: 9626 - protein, 9 aa, synthetic construct
  REGION 1..9: note = Description of Artificial Sequence: Synthetic peptide
RANNTKGSL

SEQ ID NO: 9627 - protein, 10 aa, synthetic construct
  REGION 1..10: note = Description of Artificial Sequence: Synthetic peptide
RARSVSPKLF

SEQ ID NO: 9628 - protein, 9 aa, synthetic construct
  REGION 1..9: note = Description of Artificial Sequence: Synthetic peptide
RCLAVHECF

SEQ ID NO: 9629 - protein, 9 aa, synthetic construct
  REGION 1..9: note = Description of Artificial Sequence: Synthetic peptide
RDGWEIVKF

SEQ ID NO: 9630 - protein, 8 aa, synthetic construct
  REGION 1..8: note = Description of Artificial Sequence: Synthetic peptide
REAVGTNL

SEQ ID NO: 9631 - protein, 9 aa, synthetic construct
  REGION 1..9: note = Description of Artificial Sequence: Synthetic peptide
REEAIRHVR

SEQ ID NO: 9632 - protein, 8 aa, synthetic construct
  REGION 1..8: note = Description of Artificial Sequence: Synthetic peptide
REETGLLM

SEQ ID NO: 9633 - protein, 10 aa, synthetic construct
  REGION 1..10: note = Description of Artificial Sequence: Synthetic peptide
REFLTRNPAW

SEQ ID NO: 9634 - protein, 8 aa, synthetic construct
  REGION 1..8: note = Description of Artificial Sequence: Synthetic peptide
REFVFKNI

SEQ ID NO: 9635 - protein, 8 aa, synthetic construct
  REGION 1..8: note = Description of Artificial Sequence: Synthetic peptide
RELKVTFF

SEQ ID NO: 9636 - protein, 9 aa, synthetic construct
  REGION 1..9: note = Description of Artificial Sequence: Synthetic peptide
RENNRVVIS

SEQ ID NO: 9637 - protein, 9 aa, synthetic construct
  REGION 1..9: note = Description of Artificial Sequence: Synthetic peptide
REVGFVVPG

SEQ ID NO: 9638 - protein, 10 aa, synthetic construct
  REGION 1..10: note = Description of Artificial Sequence: Synthetic peptide
REVGFVVPGL

SEQ ID NO: 9639 - protein, 9 aa, synthetic construct
  REGION 1..9: note = Description of Artificial Sequence: Synthetic peptide
RFNGIGVTQ

SEQ ID NO: 9640 - protein, 8 aa, synthetic construct
  REGION 1..8: note = Description of Artificial Sequence: Synthetic peptide
RFNVAITR

SEQ ID NO: 9641 - protein, 9 aa, synthetic construct
  REGION 1..9: note = Description of Artificial Sequence: Synthetic peptide
RFRRAFGEY

SEQ ID NO: 9642 - protein, 9 aa, synthetic construct
  REGION 1..9: note = Description of Artificial Sequence: Synthetic peptide
RFTTTLNDF

SEQ ID NO: 9643 - protein, 8 aa, synthetic construct
  REGION 1..8: note = Description of Artificial Sequence: Synthetic peptide
RGDEVRQI

SEQ ID NO: 9644 - protein, 9 aa, synthetic construct
  REGION 1..9: note = Description of Artificial Sequence: Synthetic peptide
RHHANEYRL

SEQ ID NO: 9645 - protein, 9 aa, synthetic construct
  REGION 1..9: note = Description of Artificial Sequence: Synthetic peptide
RIDKVLNEK

SEQ ID NO: 9646 - protein, 9 aa, synthetic construct
  REGION 1..9: note = Description of Artificial Sequence: Synthetic peptide
RIFTIGTVT

SEQ ID NO: 9647 - protein, 9 aa, synthetic construct
  REGION 1..9: note = Description of Artificial Sequence: Synthetic peptide
RKAVFISPY

SEQ ID NO: 9648 - protein, 9 aa, synthetic construct
  REGION 1..9: note = Description of Artificial Sequence: Synthetic peptide
RLKLFDRYF

SEQ ID NO: 9649 - protein, 9 aa, synthetic construct
  REGION 1..9: note = Description of Artificial Sequence: Synthetic peptide
RQFHQKLLK

SEQ ID NO: 9650 - protein, 10 aa, synthetic construct
  REGION 1..10: note = Description of Artificial Sequence: Synthetic peptide
RQIAPGQTGK

SEQ ID NO: 9651 - protein, 8 aa, synthetic construct
  REGION 1..8: note = Description of Artificial Sequence: Synthetic peptide
RSFIEDLL

SEQ ID NO: 9652 - protein, 9 aa, synthetic construct
  REGION 1..9: note = Description of Artificial Sequence: Synthetic peptide
RSLPGVFCG

SEQ ID NO: 9653 - protein, 8 aa, synthetic construct
  REGION 1..8: note = Description of Artificial Sequence: Synthetic peptide
RSVSPKLF

SEQ ID NO: 9654 - protein, 10 aa, synthetic construct
  REGION 1..10: note = Description of Artificial Sequence: Synthetic peptide
RTAPHGHVMV

SEQ ID NO: 9655 - protein, 8 aa, synthetic construct
  REGION 1..8: note = Description of Artificial Sequence: Synthetic peptide
RTFKVSIW

SEQ ID NO: 9656 - protein, 9 aa, synthetic construct
  REGION 1..9: note = Description of Artificial Sequence: Synthetic peptide
RTFKVSIWN

SEQ ID NO: 9657 - protein, 10 aa, synthetic construct
  REGION 1..10: note = Description of Artificial Sequence: Synthetic peptide
RTIKGTHHWL

SEQ ID NO: 9658 - protein, 8 aa, synthetic construct
  REGION 1..8: note = Description of Artificial Sequence: Synthetic peptide
RTLSYYKL

SEQ ID NO: 9659 - protein, 8 aa, synthetic construct
  REGION 1..8: note = Description of Artificial Sequence: Synthetic peptide
RTRSMWSF

SEQ ID NO: 9660 - protein, 11 aa, synthetic construct
  REGION 1..11: note = Description of Artificial Sequence: Synthetic peptide
RVAGDSGFAAY

SEQ ID NO: 9661 - protein, 9 aa, synthetic construct
  REGION 1..9: note = Description of Artificial Sequence: Synthetic peptide
RVCGVSAAR

SEQ ID NO: 9662 - protein, 9 aa, synthetic construct
  REGION 1..9: note = Description of Artificial Sequence: Synthetic peptide
RVCTNYMPY

SEQ ID NO: 9663 - protein, 9 aa, synthetic construct
  REGION 1..9: note = Description of Artificial Sequence: Synthetic peptide
RVFSAVGNI

SEQ ID NO: 9664 - protein, 9 aa, synthetic construct
  REGION 1..9: note = Description of Artificial Sequence: Synthetic peptide
RVYSSANNC

SEQ ID NO: 9665 - protein, 9 aa, synthetic construct
  REGION 1..9: note = Description of Artificial Sequence: Synthetic peptide
RYPANSIVC

SEQ ID NO: 9666 - protein, 8 aa, synthetic construct
  REGION 1..8: note = Description of Artificial Sequence: Synthetic peptide
SAFAMMFV

SEQ ID NO: 9667 - protein, 9 aa, synthetic construct
  REGION 1..9: note = Description of Artificial Sequence: Synthetic peptide
SALVYDNKL

SEQ ID NO: 9668 - protein, 9 aa, synthetic construct
  REGION 1..9: note = Description of Artificial Sequence: Synthetic peptide
SAPLIELCV

SEQ ID NO: 9669 - protein, 9 aa, synthetic construct
  REGION 1..9: note = Description of Artificial Sequence: Synthetic peptide
SAQCFKMFY

SEQ ID NO: 9670 - protein, 9 aa, synthetic construct
  REGION 1..9: note = Description of Artificial Sequence: Synthetic peptide
SEAGVCVST

SEQ ID NO: 9671 - protein, 9 aa, synthetic construct
  REGION 1..9: note = Description of Artificial Sequence: Synthetic peptide
SEDKRAKVT

SEQ ID NO: 9672 - protein, 9 aa, synthetic construct
  REGION 1..9: note = Description of Artificial Sequence: Synthetic peptide
SEDMLNPNY

SEQ ID NO: 9673 - protein, 10 aa, synthetic construct
  REGION 1..10: note = Description of Artificial Sequence: Synthetic peptide
SEEVVENPTI

SEQ ID NO: 9674 - protein, 8 aa, synthetic construct
  REGION 1..8: note = Description of Artificial Sequence: Synthetic peptide
SEFDRDAA

SEQ ID NO: 9675 - protein, 9 aa, synthetic construct
  REGION 1..9: note = Description of Artificial Sequence: Synthetic peptide
SEGLNDNLL

SEQ ID NO: 9676 - protein, 10 aa, synthetic construct
  REGION 1..10: note = Description of Artificial Sequence: Synthetic peptide
SEHDYQIGGY

SEQ ID NO: 9677 - protein, 9 aa, synthetic construct
  REGION 1..9: note = Description of Artificial Sequence: Synthetic peptide
SEISMDNSP

SEQ ID NO: 9678 - protein, 8 aa, synthetic construct
  REGION 1..8: note = Description of Artificial Sequence: Synthetic peptide
SEQLRKQI

SEQ ID NO: 9679 - protein, 9 aa, synthetic construct
  REGION 1..9: note = Description of Artificial Sequence: Synthetic peptide
SEQLRKQIR

SEQ ID NO: 9680 - protein, 10 aa, synthetic construct
  REGION 1..10: note = Description of Artificial Sequence: Synthetic peptide
SEYDYVIFTQ

SEQ ID NO: 9681 - protein, 10 aa, synthetic construct
  REGION 1..10: note = Description of Artificial Sequence: Synthetic peptide
SFNPETNILL

SEQ ID NO: 9682 - protein, 9 aa, synthetic construct
  REGION 1..9: note = Description of Artificial Sequence: Synthetic peptide
SGFAAYSRY

SEQ ID NO: 9683 - protein, 8 aa, synthetic construct
  REGION 1..8: note = Description of Artificial Sequence: Synthetic peptide
SHKLVLSV

SEQ ID NO: 9684 - protein, 8 aa, synthetic construct
  REGION 1..8: note = Description of Artificial Sequence: Synthetic peptide
SHLLLVAA

SEQ ID NO: 9685 - protein, 9 aa, synthetic construct
  REGION 1..9: note = Description of Artificial Sequence: Synthetic peptide
SHVDTDLTK

SEQ ID NO: 9686 - protein, 9 aa, synthetic construct
  REGION 1..9: note = Description of Artificial Sequence: Synthetic peptide
SICSTMTNR

SEQ ID NO: 9687 - protein, 9 aa, synthetic construct
  REGION 1..9: note = Description of Artificial Sequence: Synthetic peptide
SIDAFKLNI

SEQ ID NO: 9688 - protein, 8 aa, synthetic construct
  REGION 1..8: note = Description of Artificial Sequence: Synthetic peptide
SIKNFKSV

SEQ ID NO: 9689 - protein, 9 aa, synthetic construct
  REGION 1..9: note = Description of Artificial Sequence: Synthetic peptide
SIVAGGIVA

SEQ ID NO: 9690 - protein, 9 aa, synthetic construct
  REGION 1..9: note = Description of Artificial Sequence: Synthetic peptide
SLFFFLYEN

SEQ ID NO: 9691 - protein, 10 aa, synthetic construct
  REGION 1..10: note = Description of Artificial Sequence: Synthetic peptide
SLIDFYLCFL

SEQ ID NO: 9692 - protein, 8 aa, synthetic construct
  REGION 1..8: note = Description of Artificial Sequence: Synthetic peptide
SLREVRTI

SEQ ID NO: 9693 - protein, 10 aa, synthetic construct
  REGION 1..10: note = Description of Artificial Sequence: Synthetic peptide
SLTENKYSQL

SEQ ID NO: 9694 - protein, 9 aa, synthetic construct
  REGION 1..9: note = Description of Artificial Sequence: Synthetic peptide
SLVPGFNEK

SEQ ID NO: 9695 - protein, 8 aa, synthetic construct
  REGION 1..8: note = Description of Artificial Sequence: Synthetic peptide
SPDDQIGY

SEQ ID NO: 9696 - protein, 9 aa, synthetic construct
  REGION 1..9: note = Description of Artificial Sequence: Synthetic peptide
SPFELEDFI

SEQ ID NO: 9697 - protein, 10 aa, synthetic construct
  REGION 1..10: note = Description of Artificial Sequence: Synthetic peptide
SPNLAWPLIV

SEQ ID NO: 9698 - protein, 8 aa, synthetic construct
  REGION 1..8: note = Description of Artificial Sequence: Synthetic peptide
SQLGGLHL

SEQ ID NO: 9699 - protein, 8 aa, synthetic construct
  REGION 1..8: note = Description of Artificial Sequence: Synthetic peptide
SQYSLRLI

SEQ ID NO: 9700 - protein, 9 aa, synthetic construct
  REGION 1..9: note = Description of Artificial Sequence: Synthetic peptide
SREETGLLM

SEQ ID NO: 9701 - protein, 8 aa, synthetic construct
  REGION 1..8: note = Description of Artificial Sequence: Synthetic peptide
SRLSFKEL

SEQ ID NO: 9702 - protein, 8 aa, synthetic construct
  REGION 1..8: note = Description of Artificial Sequence: Synthetic peptide
SSANNCTF

SEQ ID NO: 9703 - protein, 10 aa, synthetic construct
  REGION 1..10: note = Description of Artificial Sequence: Synthetic peptide
SSANNCTFEY

SEQ ID NO: 9704 - protein, 9 aa, synthetic construct
  REGION 1..9: note = Description of Artificial Sequence: Synthetic peptide
SSKTPEEHF

SEQ ID NO: 9705 - protein, 10 aa, synthetic construct
  REGION 1..10: note = Description of Artificial Sequence: Synthetic peptide
SSQCVNLTTR

SEQ ID NO: 9706 - protein, 9 aa, synthetic construct
  REGION 1..9: note = Description of Artificial Sequence: Synthetic peptide
SSRSSSRSR

SEQ ID NO: 9707 - protein, 9 aa, synthetic construct
  REGION 1..9: note = Description of Artificial Sequence: Synthetic peptide
STCMMCYKR

SEQ ID NO: 9708 - protein, 9 aa, synthetic construct
  REGION 1..9: note = Description of Artificial Sequence: Synthetic peptide
STDTCFANK

SEQ ID NO: 9709 - protein, 8 aa, synthetic construct
  REGION 1..8: note = Description of Artificial Sequence: Synthetic peptide
STDTGVEH

SEQ ID NO: 9710 - protein, 11 aa, synthetic construct
  REGION 1..11: note = Description of Artificial Sequence: Synthetic peptide
STDTGVEHVTF

SEQ ID NO: 9711 - protein, 9 aa, synthetic construct
  REGION 1..9: note = Description of Artificial Sequence: Synthetic peptide
STEKSNIIR

SEQ ID NO: 9712 - protein, 10 aa, synthetic construct
  REGION 1..10: note = Description of Artificial Sequence: Synthetic peptide
STFISDEVAR

SEQ ID NO: 9713 - protein, 10 aa, synthetic construct
  REGION 1..10: note = Description of Artificial Sequence: Synthetic peptide
STFNVPMEKL

SEQ ID NO: 9714 - protein, 10 aa, synthetic construct
  REGION 1..10: note = Description of Artificial Sequence: Synthetic peptide
STGSNVFQTR

SEQ ID NO: 9715 - protein, 9 aa, synthetic construct
  REGION 1..9: note = Description of Artificial Sequence: Synthetic peptide
STQLGIEFL

SEQ ID NO: 9716 - protein, 11 aa, synthetic construct
  REGION 1..11: note = Description of Artificial Sequence: Synthetic peptide
STQWSLFFFLY

SEQ ID NO: 9717 - protein, 9 aa, synthetic construct
  REGION 1..9: note = Description of Artificial Sequence: Synthetic peptide
SVAALTNNV

SEQ ID NO: 9718 - protein, 9 aa, synthetic construct
  REGION 1..9: note = Description of Artificial Sequence: Synthetic peptide
SVAIKITEH

SEQ ID NO: 9719 - protein, 10 aa, synthetic construct
  REGION 1..10: note = Description of Artificial Sequence: Synthetic peptide
SVIDLLLDDF

SEQ ID NO: 9720 - protein, 9 aa, synthetic construct
  REGION 1..9: note = Description of Artificial Sequence: Synthetic peptide
SVLLFLAFV

SEQ ID NO: 9721 - protein, 10 aa, synthetic construct
  REGION 1..10: note = Description of Artificial Sequence: Synthetic peptide
SVLNDILSRL

SEQ ID NO: 9722 - protein, 8 aa, synthetic construct
  REGION 1..8: note = Description of Artificial Sequence: Synthetic peptide
SVNITFEL

SEQ ID NO: 9723 - protein, 9 aa, synthetic construct
  REGION 1..9: note = Description of Artificial Sequence: Synthetic peptide
SYLFQHANL

SEQ ID NO: 9724 - protein, 8 aa, synthetic construct
  REGION 1..8: note = Description of Artificial Sequence: Synthetic peptide
TAAKLMVV

SEQ ID NO: 9725 - protein, 9 aa, synthetic construct
  REGION 1..9: note = Description of Artificial Sequence: Synthetic peptide
TCANDPVGF

SEQ ID NO: 9726 - protein, 8 aa, synthetic construct
  REGION 1..8: note = Description of Artificial Sequence: Synthetic peptide
TCFSVAAL

SEQ ID NO: 9727 - protein, 9 aa, synthetic construct
  REGION 1..9: note = Description of Artificial Sequence: Synthetic peptide
TCTERLKLF

SEQ ID NO: 9728 - protein, 10 aa, synthetic construct
  REGION 1..10: note = Description of Artificial Sequence: Synthetic peptide
TEDDYQGKPL

SEQ ID NO: 9729 - protein, 8 aa, synthetic construct
  REGION 1..8: note = Description of Artificial Sequence: Synthetic peptide
TEERLKLF

SEQ ID NO: 9730 - protein, 9 aa, synthetic construct
  REGION 1..9: note = Description of Artificial Sequence: Synthetic peptide
TEHSWNADL

SEQ ID NO: 9731 - protein, 10 aa, synthetic construct
  REGION 1..10: note = Description of Artificial Sequence: Synthetic peptide
TEIDPKLDNY

SEQ ID NO: 9732 - protein, 9 aa, synthetic construct
  REGION 1..9: note = Description of Artificial Sequence: Synthetic peptide
TEILPVSMT

SEQ ID NO: 9733 - protein, 10 aa, synthetic construct
  REGION 1..10: note = Description of Artificial Sequence: Synthetic peptide
TEKSNIIRGW

SEQ ID NO: 9734 - protein, 9 aa, synthetic construct
  REGION 1..9: note = Description of Artificial Sequence: Synthetic peptide
TENKYSQLD

SEQ ID NO: 9735 - protein, 8 aa, synthetic construct
  REGION 1..8: note = Description of Artificial Sequence: Synthetic peptide
TEQPIDLV

SEQ ID NO: 9736 - protein, 9 aa, synthetic construct
  REGION 1..9: note = Description of Artificial Sequence: Synthetic peptide
TEQPIDLVP

SEQ ID NO: 9737 - protein, 9 aa, synthetic construct
  REGION 1..9: note = Description of Artificial Sequence: Synthetic peptide
TETAHSCNV

SEQ ID NO: 9738 - protein, 9 aa, synthetic construct
  REGION 1..9: note = Description of Artificial Sequence: Synthetic peptide
TEVNEFACV

SEQ ID NO: 9739 - protein, 8 aa, synthetic construct
  REGION 1..8: note = Description of Artificial Sequence: Synthetic peptide
TFDNLKTL

SEQ ID NO: 9740 - protein, 9 aa, synthetic construct
  REGION 1..9: note = Description of Artificial Sequence: Synthetic peptide
TFHLDGEVI

SEQ ID NO: 9741 - protein, 9 aa, synthetic construct
  REGION 1..9: note = Description of Artificial Sequence: Synthetic peptide
TFKVSIWNL

SEQ ID NO: 9742 - protein, 9 aa, synthetic construct
  REGION 1..9: note = Description of Artificial Sequence: Synthetic peptide
TFNGECPNF

SEQ ID NO: 9743 - protein, 9 aa, synthetic construct
  REGION 1..9: note = Description of Artificial Sequence: Synthetic peptide
TFNVPMEKL

SEQ ID NO: 9744 - protein, 10 aa, synthetic construct
  REGION 1..10: note = Description of Artificial Sequence: Synthetic peptide
TFYLTNDVSF

SEQ ID NO: 9745 - protein, 9 aa, synthetic construct
  REGION 1..9: note = Description of Artificial Sequence: Synthetic peptide
TGPEAGLPY

SEQ ID NO: 9746 - protein, 9 aa, synthetic construct
  REGION 1..9: note = Description of Artificial Sequence: Synthetic peptide
THHWLLLTI

SEQ ID NO: 9747 - protein, 8 aa, synthetic construct
  REGION 1..8: note = Description of Artificial Sequence: Synthetic peptide
TIAEILLI

SEQ ID NO: 9748 - protein, 9 aa, synthetic construct
  REGION 1..9: note = Description of Artificial Sequence: Synthetic peptide
TICAPLTVF

SEQ ID NO: 9749 - protein, 9 aa, synthetic construct
  REGION 1..9: note = Description of Artificial Sequence: Synthetic peptide
TKFLTENLL

SEQ ID NO: 9750 - protein, 9 aa, synthetic construct
  REGION 1..9: note = Description of Artificial Sequence: Synthetic peptide
TLAILTALR

SEQ ID NO: 9751 - protein, 10 aa, synthetic construct
  REGION 1..10: note = Description of Artificial Sequence: Synthetic peptide
TLDSKTQSLL

SEQ ID NO: 9752 - protein, 9 aa, synthetic construct
  REGION 1..9: note = Description of Artificial Sequence: Synthetic peptide
TLKNTVCTV

SEQ ID NO: 9753 - protein, 9 aa, synthetic construct
  REGION 1..9: note = Description of Artificial Sequence: Synthetic peptide
TLLLQLCTF

SEQ ID NO: 9754 - protein, 8 aa, synthetic construct
  REGION 1..8: note = Description of Artificial Sequence: Synthetic peptide
TLLSLREV

SEQ ID NO: 9755 - protein, 10 aa, synthetic construct
  REGION 1..10: note = Description of Artificial Sequence: Synthetic peptide
TLMNVLTLVY

SEQ ID NO: 9756 - protein, 10 aa, synthetic construct
  REGION 1..10: note = Description of Artificial Sequence: Synthetic peptide
TLNDLNETLV

SEQ ID NO: 9757 - protein, 9 aa, synthetic construct
  REGION 1..9: note = Description of Artificial Sequence: Synthetic peptide
TLQQIELKF

SEQ ID NO: 9758 - protein, 9 aa, synthetic construct
  REGION 1..9: note = Description of Artificial Sequence: Synthetic peptide
TLRVEAFEY

SEQ ID NO: 9759 - protein, 8 aa, synthetic construct
  REGION 1..8: note = Description of Artificial Sequence: Synthetic peptide
TNYDLSVV

SEQ ID NO: 9760 - protein, 9 aa, synthetic construct
  REGION 1..9: note = Description of Artificial Sequence: Synthetic peptide
TPSDFVRAT

SEQ ID NO: 9761 - protein, 10 aa, synthetic construct
  REGION 1..10: note = Description of Artificial Sequence: Synthetic peptide
TPVCINGLML

SEQ ID NO: 9762 - protein, 9 aa, synthetic construct
  REGION 1..9: note = Description of Artificial Sequence: Synthetic peptide
TQDLFLPFF

SEQ ID NO: 9763 - protein, 9 aa, synthetic construct
  REGION 1..9: note = Description of Artificial Sequence: Synthetic peptide
TQFNYYKKV

SEQ ID NO: 9764 - protein, 9 aa, synthetic construct
  REGION 1..9: note = Description of Artificial Sequence: Synthetic peptide
TREAVGTNL

SEQ ID NO: 9765 - protein, 8 aa, synthetic construct
  REGION 1..8: note = Description of Artificial Sequence: Synthetic peptide
TSITSAVL

SEQ ID NO: 9766 - protein, 8 aa, synthetic construct
  REGION 1..8: note = Description of Artificial Sequence: Synthetic peptide
TSNQVAVL

SEQ ID NO: 9767 - protein, 9 aa, synthetic construct
  REGION 1..9: note = Description of Artificial Sequence: Synthetic peptide
TSRYWEPEF

SEQ ID NO: 9768 - protein, 9 aa, synthetic construct
  REGION 1..9: note = Description of Artificial Sequence: Synthetic peptide
TTFDSEYCR

SEQ ID NO: 9769 - protein, 9 aa, synthetic construct
  REGION 1..9: note = Description of Artificial Sequence: Synthetic peptide
TTNIVTRCL

SEQ ID NO: 9770 - protein, 9 aa, synthetic construct
  REGION 1..9: note = Description of Artificial Sequence: Synthetic peptide
TTTLNGLWL

SEQ ID NO: 9771 - protein, 9 aa, synthetic construct
  REGION 1..9: note = Description of Artificial Sequence: Synthetic peptide
TTVDNINLH

SEQ ID NO: 9772 - protein, 8 aa, synthetic construct
  REGION 1..8: note = Description of Artificial Sequence: Synthetic peptide
TVATSRTL

SEQ ID NO: 9773 - protein, 10 aa, synthetic construct
  REGION 1..10: note = Description of Artificial Sequence: Synthetic peptide
TVKGLDYKAF

SEQ ID NO: 9774 - protein, 9 aa, synthetic construct
  REGION 1..9: note = Description of Artificial Sequence: Synthetic peptide
TVLCLTPVY

SEQ ID NO: 9775 - protein, 9 aa, synthetic construct
  REGION 1..9: note = Description of Artificial Sequence: Synthetic peptide
TVSWNLREM

SEQ ID NO: 9776 - protein, 8 aa, synthetic construct
  REGION 1..8: note = Description of Artificial Sequence: Synthetic peptide
TVYSHLLL

SEQ ID NO: 9777 - protein, 10 aa, synthetic construct
  REGION 1..10: note = Description of Artificial Sequence: Synthetic peptide
TYPGQGLNGY

SEQ ID NO: 9778 - protein, 8 aa, synthetic construct
  REGION 1..8: note = Description of Artificial Sequence: Synthetic peptide
TYPSLETI

SEQ ID NO: 9779 - protein, 9 aa, synthetic construct
  REGION 1..9: note = Description of Artificial Sequence: Synthetic peptide
VAIDYKHYT

SEQ ID NO: 9780 - protein, 9 aa, synthetic construct
  REGION 1..9: note = Description of Artificial Sequence: Synthetic peptide
VAPGTAVLR

SEQ ID NO: 9781 - protein, 8 aa, synthetic construct
  REGION 1..8: note = Description of Artificial Sequence: Synthetic peptide
VAYFNMVY

SEQ ID NO: 9782 - protein, 8 aa, synthetic construct
  REGION 1..8: note = Description of Artificial Sequence: Synthetic peptide
VCINGLML

SEQ ID NO: 9783 - protein, 9 aa, synthetic construct
  REGION 1..9: note = Description of Artificial Sequence: Synthetic peptide
VECFDKFKV

SEQ ID NO: 9784 - protein, 9 aa, synthetic construct
  REGION 1..9: note = Description of Artificial Sequence: Synthetic peptide
VEEAKKVKP

SEQ ID NO: 9785 - protein, 8 aa, synthetic construct
  REGION 1..8: note = Description of Artificial Sequence: Synthetic peptide
VEEAKTVL

SEQ ID NO: 9786 - protein, 8 aa, synthetic construct
  REGION 1..8: note = Description of Artificial Sequence: Synthetic peptide
VEELKKLL

SEQ ID NO: 9787 - protein, 10 aa, synthetic construct
  REGION 1..10: note = Description of Artificial Sequence: Synthetic peptide
VELFENKTTL

SEQ ID NO: 9788 - protein, 9 aa, synthetic construct
  REGION 1..9: note = Description of Artificial Sequence: Synthetic peptide
VESCGNFKV

SEQ ID NO: 9789 - protein, 9 aa, synthetic construct
  REGION 1..9: note = Description of Artificial Sequence: Synthetic peptide
VETKDVVEC

SEQ ID NO: 9790 - protein, 9 aa, synthetic construct
  REGION 1..9: note = Description of Artificial Sequence: Synthetic peptide
VFHLYLQYI

SEQ ID NO: 9791 - protein, 9 aa, synthetic construct
  REGION 1..9: note = Description of Artificial Sequence: Synthetic peptide
VFKNIDGYF

SEQ ID NO: 9792 - protein, 9 aa, synthetic construct
  REGION 1..9: note = Description of Artificial Sequence: Synthetic peptide
VFVSNGTHW

SEQ ID NO: 9793 - protein, 10 aa, synthetic construct
  REGION 1..10: note = Description of Artificial Sequence: Synthetic peptide
VFVSNGTHWF

SEQ ID NO: 9794 - protein, 9 aa, synthetic construct
  REGION 1..9: note = Description of Artificial Sequence: Synthetic peptide
VGDSAEVAV

SEQ ID NO: 9795 - protein, 9 aa, synthetic construct
  REGION 1..9: note = Description of Artificial Sequence: Synthetic peptide
VGYQPYRVV

SEQ ID NO: 9796 - protein, 8 aa, synthetic construct
  REGION 1..8: note = Description of Artificial Sequence: Synthetic peptide
VLEGSVAY

SEQ ID NO: 9797 - protein, 9 aa, synthetic construct
  REGION 1..9: note = Description of Artificial Sequence: Synthetic peptide
VLGSLAATV

SEQ ID NO: 9798 - protein, 8 aa, synthetic construct
  REGION 1..8: note = Description of Artificial Sequence: Synthetic peptide
VLNDILSR

SEQ ID NO: 9799 - protein, 9 aa, synthetic construct
  REGION 1..9: note = Description of Artificial Sequence: Synthetic peptide
VLTLVYKVY

SEQ ID NO: 9800 - protein, 9 aa, synthetic construct
  REGION 1..9: note = Description of Artificial Sequence: Synthetic peptide
VPQEHYVRI

SEQ ID NO: 9801 - protein, 10 aa, synthetic construct
  REGION 1..10: note = Description of Artificial Sequence: Synthetic peptide
VPVVDSYYSL

SEQ ID NO: 9802 - protein, 10 aa, synthetic construct
  REGION 1..10: note = Description of Artificial Sequence: Synthetic peptide
VPYCYDTNVL

SEQ ID NO: 9803 - protein, 10 aa, synthetic construct
  REGION 1..10: note = Description of Artificial Sequence: Synthetic peptide
VPYNMRVIHF

SEQ ID NO: 9804 - protein, 8 aa, synthetic construct
  REGION 1..8: note = Description of Artificial Sequence: Synthetic peptide
VQIGEYTF

SEQ ID NO: 9805 - protein, 9 aa, synthetic construct
  REGION 1..9: note = Description of Artificial Sequence: Synthetic peptide
VQMAPISAM

SEQ ID NO: 9806 - protein, 9 aa, synthetic construct
  REGION 1..9: note = Description of Artificial Sequence: Synthetic peptide
VQSTQWSLF

SEQ ID NO: 9807 - protein, 9 aa, synthetic construct
  REGION 1..9: note = Description of Artificial Sequence: Synthetic peptide
VRNLQHRLY

SEQ ID NO: 9808 - protein, 9 aa, synthetic construct
  REGION 1..9: note = Description of Artificial Sequence: Synthetic peptide
VSKVVKVTI

SEQ ID NO: 9809 - protein, 8 aa, synthetic construct
  REGION 1..8: note = Description of Artificial Sequence: Synthetic peptide
VSLVKPSF

SEQ ID NO: 9810 - protein, 9 aa, synthetic construct
  REGION 1..9: note = Description of Artificial Sequence: Synthetic peptide
VSSPDAVTA

SEQ ID NO: 9811 - protein, 9 aa, synthetic construct
  REGION 1..9: note = Description of Artificial Sequence: Synthetic peptide
VSTQEFRYM

SEQ ID NO: 9812 - protein, 8 aa, synthetic construct
  REGION 1..8: note = Description of Artificial Sequence: Synthetic peptide
VSWNLREM

SEQ ID NO: 9813 - protein, 8 aa, synthetic construct
  REGION 1..8: note = Description of Artificial Sequence: Synthetic peptide
VTANVNAL

SEQ ID NO: 9814 - protein, 8 aa, synthetic construct
  REGION 1..8: note = Description of Artificial Sequence: Synthetic peptide
VTCGTTTL

SEQ ID NO: 9815 - protein, 8 aa, synthetic construct
  REGION 1..8: note = Description of Artificial Sequence: Synthetic peptide
VTIDYTEI

SEQ ID NO: 9816 - protein, 10 aa, synthetic construct
  REGION 1..10: note = Description of Artificial Sequence: Synthetic peptide
VTLAILTALR

SEQ ID NO: 9817 - protein, 8 aa, synthetic construct
  REGION 1..8: note = Description of Artificial Sequence: Synthetic peptide
VTPSGTWL

SEQ ID NO: 9818 - protein, 9 aa, synthetic construct
  REGION 1..9: note = Description of Artificial Sequence: Synthetic peptide
VTSSIVITS

SEQ ID NO: 9819 - protein, 11 aa, synthetic construct
  REGION 1..11: note = Description of Artificial Sequence: Synthetic peptide
VTVKNGSIHLY

SEQ ID NO: 9820 - protein, 9 aa, synthetic construct
  REGION 1..9: note = Description of Artificial Sequence: Synthetic peptide
VTYVPAQEK

SEQ ID NO: 9821 - protein, 10 aa, synthetic construct
  REGION 1..10: note = Description of Artificial Sequence: Synthetic peptide
VVDSYYSLLM

SEQ ID NO: 9822 - protein, 8 aa, synthetic construct
  REGION 1..8: note = Description of Artificial Sequence: Synthetic peptide
VVDYGARF

SEQ ID NO: 9823 - protein, 9 aa, synthetic construct
  REGION 1..9: note = Description of Artificial Sequence: Synthetic peptide
VVGDIILKP

SEQ ID NO: 9824 - protein, 9 aa, synthetic construct
  REGION 1..9: note = Description of Artificial Sequence: Synthetic peptide
VVGEGSEGL

SEQ ID NO: 9825 - protein, 9 aa, synthetic construct
  REGION 1..9: note = Description of Artificial Sequence: Synthetic peptide
VVISSDVLV

SEQ ID NO: 9826 - protein, 10 aa, synthetic construct
  REGION 1..10: note = Description of Artificial Sequence: Synthetic peptide
VVQEGVLTAV

SEQ ID NO: 9827 - protein, 10 aa, synthetic construct
  REGION 1..10: note = Description of Artificial Sequence: Synthetic peptide
VVQTIEVNSF

SEQ ID NO: 9828 - protein, 8 aa, synthetic construct
  REGION 1..8: note = Description of Artificial Sequence: Synthetic peptide
VVSKVVKV

SEQ ID NO: 9829 - protein, 9 aa, synthetic construct
  REGION 1..9: note = Description of Artificial Sequence: Synthetic peptide
VVSTGYHFR

SEQ ID NO: 9830 - protein, 11 aa, synthetic construct
  REGION 1..11: note = Description of Artificial Sequence: Synthetic peptide
VVSTTTNIVTR

SEQ ID NO: 9831 - protein, 9 aa, synthetic construct
  REGION 1..9: note = Description of Artificial Sequence: Synthetic peptide
VVVLSFELL

SEQ ID NO: 9832 - protein, 9 aa, synthetic construct
  REGION 1..9: note = Description of Artificial Sequence: Synthetic peptide
VVYRAFDIY

SEQ ID NO: 9833 - protein, 8 aa, synthetic construct
  REGION 1..8: note = Description of Artificial Sequence: Synthetic peptide
VYADSFVI

SEQ ID NO: 9834 - protein, 9 aa, synthetic construct
  REGION 1..9: note = Description of Artificial Sequence: Synthetic peptide
VYGDFSHSQ

SEQ ID NO: 9835 - protein, 10 aa, synthetic construct
  REGION 1..10: note = Description of Artificial Sequence: Synthetic peptide
VYGDFSHSQL

SEQ ID NO: 9836 - protein, 8 aa, synthetic construct
  REGION 1..8: note = Description of Artificial Sequence: Synthetic peptide
VYSHLLLV

SEQ ID NO: 9837 - protein, 8 aa, synthetic construct
  REGION 1..8: note = Description of Artificial Sequence: Synthetic peptide
VYSRVKNL

SEQ ID NO: 9838 - protein, 9 aa, synthetic construct
  REGION 1..9: note = Description of Artificial Sequence: Synthetic peptide
WEPEFYEAM

SEQ ID NO: 9839 - protein, 8 aa, synthetic construct
  REGION 1..8: note = Description of Artificial Sequence: Synthetic peptide
WFLAYILF

SEQ ID NO: 9840 - protein, 9 aa, synthetic construct
  REGION 1..9: note = Description of Artificial Sequence: Synthetic peptide
WMESEFRVY

SEQ ID NO: 9841 - protein, 9 aa, synthetic construct
  REGION 1..9: note = Description of Artificial Sequence: Synthetic peptide
WNLVIGFLF

SEQ ID NO: 9842 - protein, 8 aa, synthetic construct
  REGION 1..8: note = Description of Artificial Sequence: Synthetic peptide
WTAGAAAY

SEQ ID NO: 9843 - protein, 9 aa, synthetic construct
  REGION 1..9: note = Description of Artificial Sequence: Synthetic peptide
WVLNNDYYR

SEQ ID NO: 9844 - protein, 8 aa, synthetic construct
  REGION 1..8: note = Description of Artificial Sequence: Synthetic peptide
YAADPAMH

SEQ ID NO: 9845 - protein, 10 aa, synthetic construct
  REGION 1..10: note = Description of Artificial Sequence: Synthetic peptide
YACWHHSIGF

SEQ ID NO: 9846 - protein, 8 aa, synthetic construct
  REGION 1..8: note = Description of Artificial Sequence: Synthetic peptide
YADSFVIR

SEQ ID NO: 9847 - protein, 8 aa, synthetic construct
  REGION 1..8: note = Description of Artificial Sequence: Synthetic peptide
YANLGERV

SEQ ID NO: 9848 - protein, 8 aa, synthetic construct
  REGION 1..8: note = Description of Artificial Sequence: Synthetic peptide
YASALWEI

SEQ ID NO: 9849 - protein, 9 aa, synthetic construct
  REGION 1..9: note = Description of Artificial Sequence: Synthetic peptide
YASQGLVAS

SEQ ID NO: 9850 - protein, 8 aa, synthetic construct
  REGION 1..8: note = Description of Artificial Sequence: Synthetic peptide
YDPLQPEL

SEQ ID NO: 9851 - protein, 10 aa, synthetic construct
  REGION 1..10: note = Description of Artificial Sequence: Synthetic peptide
YEAMYTPHTV

SEQ ID NO: 9852 - protein, 9 aa, synthetic construct
  REGION 1..9: note = Description of Artificial Sequence: Synthetic peptide
YFLQSINFV

SEQ ID NO: 9853 - protein, 9 aa, synthetic construct
  REGION 1..9: note = Description of Artificial Sequence: Synthetic peptide
YGQQFGPTY

SEQ ID NO: 9854 - protein, 9 aa, synthetic construct
  REGION 1..9: note = Description of Artificial Sequence: Synthetic peptide
YHFRELGVV

SEQ ID NO: 9855 - protein, 10 aa, synthetic construct
  REGION 1..10: note = Description of Artificial Sequence: Synthetic peptide
YIATNGPLKV

SEQ ID NO: 9856 - protein, 9 aa, synthetic construct
  REGION 1..9: note = Description of Artificial Sequence: Synthetic peptide
YILPSIISN

SEQ ID NO: 9857 - protein, 9 aa, synthetic construct
  REGION 1..9: note = Description of Artificial Sequence: Synthetic peptide
YINVFAFPF

SEQ ID NO: 9858 - protein, 9 aa, synthetic construct
  REGION 1..9: note = Description of Artificial Sequence: Synthetic peptide
YKGPITDVF

SEQ ID NO: 9859 - protein, 10 aa, synthetic construct
  REGION 1..10: note = Description of Artificial Sequence: Synthetic peptide
YKIEELFYSY

SEQ ID NO: 9860 - protein, 8 aa, synthetic construct
  REGION 1..8: note = Description of Artificial Sequence: Synthetic peptide
YKLEGYAF

SEQ ID NO: 9861 - protein, 9 aa, synthetic construct
  REGION 1..9: note = Description of Artificial Sequence: Synthetic peptide
YLASGGQPI

SEQ ID NO: 9862 - protein, 9 aa, synthetic construct
  REGION 1..9: note = Description of Artificial Sequence: Synthetic peptide
YLAVFDKNL

SEQ ID NO: 9863 - protein, 8 aa, synthetic construct
  REGION 1..8: note = Description of Artificial Sequence: Synthetic peptide
YLCFLAFL

SEQ ID NO: 9864 - protein, 9 aa, synthetic construct
  REGION 1..9: note = Description of Artificial Sequence: Synthetic peptide
YLDGADVTK

SEQ ID NO: 9865 - protein, 8 aa, synthetic construct
  REGION 1..8: note = Description of Artificial Sequence: Synthetic peptide
YLITPVHV

SEQ ID NO: 9866 - protein, 9 aa, synthetic construct
  REGION 1..9: note = Description of Artificial Sequence: Synthetic peptide
YNSASFSTF

SEQ ID NO: 9867 - protein, 9 aa, synthetic construct
  REGION 1..9: note = Description of Artificial Sequence: Synthetic peptide
YPDPSRILG

SEQ ID NO: 9868 - protein, 10 aa, synthetic construct
  REGION 1..10: note = Description of Artificial Sequence: Synthetic peptide
YPQVNGLTSI

SEQ ID NO: 9869 - protein, 8 aa, synthetic construct
  REGION 1..8: note = Description of Artificial Sequence: Synthetic peptide
YQGKPLEF

SEQ ID NO: 9870 - protein, 9 aa, synthetic construct
  REGION 1..9: note = Description of Artificial Sequence: Synthetic peptide
YRFNGIGVT

SEQ ID NO: 9871 - protein, 9 aa, synthetic construct
  REGION 1..9: note = Description of Artificial Sequence: Synthetic peptide
YRGTTTYKL

SEQ ID NO: 9872 - protein, 8 aa, synthetic construct
  REGION 1..8: note = Description of Artificial Sequence: Synthetic peptide
YRIGNYKL

SEQ ID NO: 9873 - protein, 9 aa, synthetic construct
  REGION 1..9: note = Description of Artificial Sequence: Synthetic peptide
YSKWYIRVG

SEQ ID NO: 9874 - protein, 9 aa, synthetic construct
  REGION 1..9: note = Description of Artificial Sequence: Synthetic peptide
YSLFDMSKF

SEQ ID NO: 9875 - protein, 10 aa, synthetic construct
  REGION 1..10: note = Description of Artificial Sequence: Synthetic peptide
YSLLMPILTL

SEQ ID NO: 9876 - protein, 9 aa, synthetic construct
  REGION 1..9: note = Description of Artificial Sequence: Synthetic peptide
YSPIFLIVA

SEQ ID NO: 9877 - protein, 9 aa, synthetic construct
  REGION 1..9: note = Description of Artificial Sequence: Synthetic peptide
YSRYRIGNY

SEQ ID NO: 9878 - protein, 9 aa, synthetic construct
  REGION 1..9: note = Description of Artificial Sequence: Synthetic peptide
YTDFATSAC

SEQ ID NO: 9879 - protein, 9 aa, synthetic construct
  REGION 1..9: note = Description of Artificial Sequence: Synthetic peptide
YWEPEFYEA

SEQ ID NO: 9880 - protein, 10 aa, synthetic construct
  REGION 1..10: note = Description of Artificial Sequence: Synthetic peptide
YYLFDESGEF

SEQ ID NO: 9881 - protein, 9 aa, synthetic construct
  REGION 1..9: note = Description of Artificial Sequence: Synthetic peptide
YYLGTGPEA

SEQ ID NO: 9882 - protein, 8 aa, synthetic construct
  REGION 1..8: note = Description of Artificial Sequence: Synthetic peptide
YYPDKVFR

SEQ ID NO: 9883 - protein, 10 aa, synthetic construct
  REGION 1..10: note = Description of Artificial Sequence: Synthetic peptide
YYPDKVFRSS

SEQ ID NO: 9884 - protein, 9 aa, synthetic construct
  REGION 1..9: note = Description of Artificial Sequence: Synthetic peptide
YYRYNLPTM

SEQ ID NO: 9885 - protein, 9 aa, synthetic construct
  REGION 1..9: note = Description of Artificial Sequence: Synthetic peptide
YYVWKSYVH

SEQ ID NO: 9886 - protein, 9 aa, synthetic construct
  REGION 1..9: note = Description of Artificial Sequence: Synthetic peptide
AADPAMHAA

SEQ ID NO: 9887 - protein, 8 aa, synthetic construct
  REGION 1..8: note = Description of Artificial Sequence: Synthetic peptide
AARYMRSL

SEQ ID NO: 9888 - protein, 9 aa, synthetic construct
  REGION 1..9: note = Description of Artificial Sequence: Synthetic peptide
ACPDGVKHV

SEQ ID NO: 9889 - protein, 9 aa, synthetic construct
  REGION 1..9: note = Description of Artificial Sequence: Synthetic peptide
AEYHNESGL

SEQ ID NO: 9890 - protein, 9 aa, synthetic construct
  REGION 1..9: note = Description of Artificial Sequence: Synthetic peptide
AFGGCVFSY

SEQ ID NO: 9891 - protein, 9 aa, synthetic construct
  REGION 1..9: note = Description of Artificial Sequence: Synthetic peptide
AFKLNIKLL

SEQ ID NO: 9892 - protein, 9 aa, synthetic construct
  REGION 1..9: note = Description of Artificial Sequence: Synthetic peptide
AFLLFLVLI

SEQ ID NO: 9893 - protein, 10 aa, synthetic construct
  REGION 1..10: note = Description of Artificial Sequence: Synthetic peptide
AFPFTIYSLL

SEQ ID NO: 9894 - protein, 9 aa, synthetic construct
  REGION 1..9: note = Description of Artificial Sequence: Synthetic peptide
AGDSGFAAY

SEQ ID NO: 9895 - protein, 9 aa, synthetic construct
  REGION 1..9: note = Description of Artificial Sequence: Synthetic peptide
AIKITEHSW

SEQ ID NO: 9896 - protein, 9 aa, synthetic construct
  REGION 1..9: note = Description of Artificial Sequence: Synthetic peptide
AIVFITLCF

SEQ ID NO: 9897 - protein, 9 aa, synthetic construct
  REGION 1..9: note = Description of Artificial Sequence: Synthetic peptide
APYIVGDVV

SEQ ID NO: 9898 - protein, 9 aa, synthetic construct
  REGION 1..9: note = Description of Artificial Sequence: Synthetic peptide
AQFAPSASA

SEQ ID NO: 9899 - protein, 9 aa, synthetic construct
  REGION 1..9: note = Description of Artificial Sequence: Synthetic peptide
ARSVSPKLF

SEQ ID NO: 9900 - protein, 9 aa, synthetic construct
  REGION 1..9: note = Description of Artificial Sequence: Synthetic peptide
ARYMRSLKV

SEQ ID NO: 9901 - protein, 10 aa, synthetic construct
  REGION 1..10: note = Description of Artificial Sequence: Synthetic peptide
ATNNLVVMAY

SEQ ID NO: 9902 - protein, 9 aa, synthetic construct
  REGION 1..9: note = Description of Artificial Sequence: Synthetic peptide
AVFDKNLYD

SEQ ID NO: 9903 - protein, 9 aa, synthetic construct
  REGION 1..9: note = Description of Artificial Sequence: Synthetic peptide
AVILRGHLR

SEQ ID NO: 9904 - protein, 10 aa, synthetic construct
  REGION 1..10: note = Description of Artificial Sequence: Synthetic peptide
AVVYRGTTTY

SEQ ID NO: 9905 - protein, 8 aa, synthetic construct
  REGION 1..8: note = Description of Artificial Sequence: Synthetic peptide
AWQPGVAM

SEQ ID NO: 9906 - protein, 10 aa, synthetic construct
  REGION 1..10: note = Description of Artificial Sequence: Synthetic peptide
AYILFTRFFY

SEQ ID NO: 9907 - protein, 10 aa, synthetic construct
  REGION 1..10: note = Description of Artificial Sequence: Synthetic peptide
CANDPVGFTL

SEQ ID NO: 9908 - protein, 9 aa, synthetic construct
  REGION 1..9: note = Description of Artificial Sequence: Synthetic peptide
CFANKHADF

SEQ ID NO: 9909 - protein, 8 aa, synthetic construct
  REGION 1..8: note = Description of Artificial Sequence: Synthetic peptide
CFLAFLLF

SEQ ID NO: 9910 - protein, 9 aa, synthetic construct
  REGION 1..9: note = Description of Artificial Sequence: Synthetic peptide
CFLAFLLFL

SEQ ID NO: 9911 - protein, 9 aa, synthetic construct
  REGION 1..9: note = Description of Artificial Sequence: Synthetic peptide
CKDGHVETF

SEQ ID NO: 9912 - protein, 9 aa, synthetic construct
  REGION 1..9: note = Description of Artificial Sequence: Synthetic peptide
CRSKNPLLY

SEQ ID NO: 9913 - protein, 8 aa, synthetic construct
  REGION 1..8: note = Description of Artificial Sequence: Synthetic peptide
CSAYTVEL

SEQ ID NO: 9914 - protein, 10 aa, synthetic construct
  REGION 1..10: note = Description of Artificial Sequence: Synthetic peptide
CTDDNALAYY

SEQ ID NO: 9915 - protein, 9 aa, synthetic construct
  REGION 1..9: note = Description of Artificial Sequence: Synthetic peptide
CTNYMPYFF

SEQ ID NO: 9916 - protein, 8 aa, synthetic construct
  REGION 1..8: note = Description of Artificial Sequence: Synthetic peptide
CVADYSVL

SEQ ID NO: 9917 - protein, 9 aa, synthetic construct
  REGION 1..9: note = Description of Artificial Sequence: Synthetic peptide
CYFGLFCLL

SEQ ID NO: 9918 - protein, 9 aa, synthetic construct
  REGION 1..9: note = Description of Artificial Sequence: Synthetic peptide
CYGVSPTKL

SEQ ID NO: 9919 - protein, 9 aa, synthetic construct
  REGION 1..9: note = Description of Artificial Sequence: Synthetic peptide
DAQSFLNGF

SEQ ID NO: 9920 - protein, 9 aa, synthetic construct
  REGION 1..9: note = Description of Artificial Sequence: Synthetic peptide
DEPEEHVQI

SEQ ID NO: 9921 - protein, 9 aa, synthetic construct
  REGION 1..9: note = Description of Artificial Sequence: Synthetic peptide
DFVNEFYAY

SEQ ID NO: 9922 - protein, 8 aa, synthetic construct
  REGION 1..8: note = Description of Artificial Sequence: Synthetic peptide
DGWEIVKF

SEQ ID NO: 9923 - protein, 9 aa, synthetic construct
  REGION 1..9: note = Description of Artificial Sequence: Synthetic peptide
DHVDILGPL

SEQ ID NO: 9924 - protein, 9 aa, synthetic construct
  REGION 1..9: note = Description of Artificial Sequence: Synthetic peptide
DLSPRWYFY

SEQ ID NO: 9925 - protein, 9 aa, synthetic construct
  REGION 1..9: note = Description of Artificial Sequence: Synthetic peptide
DPYEDFQEN

SEQ ID NO: 9926 - protein, 8 aa, synthetic construct
  REGION 1..8: note = Description of Artificial Sequence: Synthetic peptide
DRYPANSI

SEQ ID NO: 9927 - protein, 9 aa, synthetic construct
  REGION 1..9: note = Description of Artificial Sequence: Synthetic peptide
DSLDTYPSL

SEQ ID NO: 9928 - protein, 10 aa, synthetic construct
  REGION 1..10: note = Description of Artificial Sequence: Synthetic peptide
DTLKEILVTY

SEQ ID NO: 9929 - protein, 8 aa, synthetic construct
  REGION 1..8: note = Description of Artificial Sequence: Synthetic peptide
DVTDVTQL

SEQ ID NO: 9930 - protein, 9 aa, synthetic construct
  REGION 1..9: note = Description of Artificial Sequence: Synthetic peptide
DVVIGIVNN

SEQ ID NO: 9931 - protein, 9 aa, synthetic construct
  REGION 1..9: note = Description of Artificial Sequence: Synthetic peptide
EAFEYYHTT

SEQ ID NO: 9932 - protein, 9 aa, synthetic construct
  REGION 1..9: note = Description of Artificial Sequence: Synthetic peptide
EAMYTPHTV

SEQ ID NO: 9933 - protein, 9 aa, synthetic construct
  REGION 1..9: note = Description of Artificial Sequence: Synthetic peptide
ECVRGTTVL

SEQ ID NO: 9934 - protein, 10 aa, synthetic construct
  REGION 1..10: note = Description of Artificial Sequence: Synthetic peptide
EEAARYMRSL

SEQ ID NO: 9935 - protein, 10 aa, synthetic construct
  REGION 1..10: note = Description of Artificial Sequence: Synthetic peptide
EEHFIETISL

SEQ ID NO: 9936 - protein, 9 aa, synthetic construct
  REGION 1..9: note = Description of Artificial Sequence: Synthetic peptide
EEVKPFITE

SEQ ID NO: 9937 - protein, 9 aa, synthetic construct
  REGION 1..9: note = Description of Artificial Sequence: Synthetic peptide
EIDPKLDNY

SEQ ID NO: 9938 - protein, 9 aa, synthetic construct
  REGION 1..9: note = Description of Artificial Sequence: Synthetic peptide
EQIDGYVMH

SEQ ID NO: 9939 - protein, 9 aa, synthetic construct
  REGION 1..9: note = Description of Artificial Sequence: Synthetic peptide
ETKAIVSTI

SEQ ID NO: 9940 - protein, 9 aa, synthetic construct
  REGION 1..9: note = Description of Artificial Sequence: Synthetic peptide
ETMSYLFQH

SEQ ID NO: 9941 - protein, 9 aa, synthetic construct
  REGION 1..9: note = Description of Artificial Sequence: Synthetic peptide
EVFAQVKQI

SEQ ID NO: 9942 - protein, 9 aa, synthetic construct
  REGION 1..9: note = Description of Artificial Sequence: Synthetic peptide
EVLTEEVVL

SEQ ID NO: 9943 - protein, 10 aa, synthetic construct
  REGION 1..10: note = Description of Artificial Sequence: Synthetic peptide
EVVENPTIQK

SEQ ID NO: 9944 - protein, 8 aa, synthetic construct
  REGION 1..8: note = Description of Artificial Sequence: Synthetic peptide
FAVSKGFF

SEQ ID NO: 9945 - protein, 8 aa, synthetic construct
  REGION 1..8: note = Description of Artificial Sequence: Synthetic peptide
FAYTKRNV

SEQ ID NO: 9946 - protein, 8 aa, synthetic construct
  REGION 1..8: note = Description of Artificial Sequence: Synthetic peptide
FDNPVLPF

SEQ ID NO: 9947 - protein, 9 aa, synthetic construct
  REGION 1..9: note = Description of Artificial Sequence: Synthetic peptide
FEYVSQPFL

SEQ ID NO: 9948 - protein, 10 aa, synthetic construct
  REGION 1..10: note = Description of Artificial Sequence: Synthetic peptide
FFKEGSSVEL

SEQ ID NO: 9949 - protein, 8 aa, synthetic construct
  REGION 1..8: note = Description of Artificial Sequence: Synthetic peptide
FFTLLLQL

SEQ ID NO: 9950 - protein, 8 aa, synthetic construct
  REGION 1..8: note = Description of Artificial Sequence: Synthetic peptide
FIKGLNNL

SEQ ID NO: 9951 - protein, 8 aa, synthetic construct
  REGION 1..8: note = Description of Artificial Sequence: Synthetic peptide
FKDQVILL

SEQ ID NO: 9952 - protein, 10 aa, synthetic construct
  REGION 1..10: note = Description of Artificial Sequence: Synthetic peptide
FLAFLLFLVL

SEQ ID NO: 9953 - protein, 10 aa, synthetic construct
  REGION 1..10: note = Description of Artificial Sequence: Synthetic peptide
FLAFVVFLLV

SEQ ID NO: 9954 - protein, 10 aa, synthetic construct
  REGION 1..10: note = Description of Artificial Sequence: Synthetic peptide
FLFLTWICLL

SEQ ID NO: 9955 - protein, 8 aa, synthetic construct
  REGION 1..8: note = Description of Artificial Sequence: Synthetic peptide
FLGIITTV

SEQ ID NO: 9956 - protein, 9 aa, synthetic construct
  REGION 1..9: note = Description of Artificial Sequence: Synthetic peptide
FLLFLVLIM

SEQ ID NO: 9957 - protein, 9 aa, synthetic construct
  REGION 1..9: note = Description of Artificial Sequence: Synthetic peptide
FLLNKEMYL

SEQ ID NO: 9958 - protein, 9 aa, synthetic construct
  REGION 1..9: note = Description of Artificial Sequence: Synthetic peptide
FLPGVYSVI

SEQ ID NO: 9959 - protein, 10 aa, synthetic construct
  REGION 1..10: note = Description of Artificial Sequence: Synthetic peptide
FLYENAFLPF

SEQ ID NO: 9960 - protein, 8 aa, synthetic construct
  REGION 1..8: note = Description of Artificial Sequence: Synthetic peptide
FLYIIKLI

SEQ ID NO: 9961 - protein, 9 aa, synthetic construct
  REGION 1..9: note = Description of Artificial Sequence: Synthetic peptide
FNEKTHVQL

SEQ ID NO: 9962 - protein, 10 aa, synthetic construct
  REGION 1..10: note = Description of Artificial Sequence: Synthetic peptide
FPFTIYSLLL

SEQ ID NO: 9963 - protein, 9 aa, synthetic construct
  REGION 1..9: note = Description of Artificial Sequence: Synthetic peptide
FPPTSFGPL

SEQ ID NO: 9964 - protein, 8 aa, synthetic construct
  REGION 1..8: note = Description of Artificial Sequence: Synthetic peptide
FPREGVFV

SEQ ID NO: 9965 - protein, 9 aa, synthetic construct
  REGION 1..9: note = Description of Artificial Sequence: Synthetic peptide
FPRGQGVPI

SEQ ID NO: 9966 - protein, 10 aa, synthetic construct
  REGION 1..10: note = Description of Artificial Sequence: Synthetic peptide
FQSASKIITL

SEQ ID NO: 9967 - protein, 9 aa, synthetic construct
  REGION 1..9: note = Description of Artificial Sequence: Synthetic peptide
FSKQLQQSM

SEQ ID NO: 9968 - protein, 9 aa, synthetic construct
  REGION 1..9: note = Description of Artificial Sequence: Synthetic peptide
FSTFEEAAL

SEQ ID NO: 9969 - protein, 8 aa, synthetic construct
  REGION 1..8: note = Description of Artificial Sequence: Synthetic peptide
FSTGVNLV

SEQ ID NO: 9970 - protein, 8 aa, synthetic construct
  REGION 1..8: note = Description of Artificial Sequence: Synthetic peptide
FTEQPIDL

SEQ ID NO: 9971 - protein, 8 aa, synthetic construct
  REGION 1..8: note = Description of Artificial Sequence: Synthetic peptide
FTRFFYVL

SEQ ID NO: 9972 - protein, 8 aa, synthetic construct
  REGION 1..8: note = Description of Artificial Sequence: Synthetic peptide
FVDDIVKT

SEQ ID NO: 9973 - protein, 8 aa, synthetic construct
  REGION 1..8: note = Description of Artificial Sequence: Synthetic peptide
FVENPDIL

SEQ ID NO: 9974 - protein, 10 aa, synthetic construct
  REGION 1..10: note = Description of Artificial Sequence: Synthetic peptide
FVVEVVDKYF

SEQ ID NO: 9975 - protein, 8 aa, synthetic construct
  REGION 1..8: note = Description of Artificial Sequence: Synthetic peptide
FVVKRHTF

SEQ ID NO: 9976 - protein, 9 aa, synthetic construct
  REGION 1..9: note = Description of Artificial Sequence: Synthetic peptide
FYVLGLAAI

SEQ ID NO: 9977 - protein, 9 aa, synthetic construct
  REGION 1..9: note = Description of Artificial Sequence: Synthetic peptide
FYYVWKSYV

SEQ ID NO: 9978 - protein, 9 aa, synthetic construct
  REGION 1..9: note = Description of Artificial Sequence: Synthetic peptide
GAEHVNNSY

SEQ ID NO: 9979 - protein, 9 aa, synthetic construct
  REGION 1..9: note = Description of Artificial Sequence: Synthetic peptide
GAKLKALNL

SEQ ID NO: 9980 - protein, 9 aa, synthetic construct
  REGION 1..9: note = Description of Artificial Sequence: Synthetic peptide
GECPNFVFP

SEQ ID NO: 9981 - protein, 9 aa, synthetic construct
  REGION 1..9: note = Description of Artificial Sequence: Synthetic peptide
GEFKLASHM

SEQ ID NO: 9982 - protein, 9 aa, synthetic construct
  REGION 1..9: note = Description of Artificial Sequence: Synthetic peptide
GFGDSVEEV

SEQ ID NO: 9983 - protein, 9 aa, synthetic construct
  REGION 1..9: note = Description of Artificial Sequence: Synthetic peptide
GFMGRIRSV

SEQ ID NO: 9984 - protein, 9 aa, synthetic construct
  REGION 1..9: note = Description of Artificial Sequence: Synthetic peptide
GIMMNVAKY

SEQ ID NO: 9985 - protein, 9 aa, synthetic construct
  REGION 1..9: note = Description of Artificial Sequence: Synthetic peptide
GLPWNVVRI

SEQ ID NO: 9986 - protein, 10 aa, synthetic construct
  REGION 1..10: note = Description of Artificial Sequence: Synthetic peptide
GLVAEWFLAY

SEQ ID NO: 9987 - protein, 9 aa, synthetic construct
  REGION 1..9: note = Description of Artificial Sequence: Synthetic peptide
GRLQSLQTY

SEQ ID NO: 9988 - protein, 9 aa, synthetic construct
  REGION 1..9: note = Description of Artificial Sequence: Synthetic peptide
GRTILGSAL

SEQ ID NO: 9989 - protein, 9 aa, synthetic construct
  REGION 1..9: note = Description of Artificial Sequence: Synthetic peptide
GSVGFNIDY

SEQ ID NO: 9990 - protein, 8 aa, synthetic construct
  REGION 1..8: note = Description of Artificial Sequence: Synthetic peptide
GSYKDWSY

SEQ ID NO: 9991 - protein, 9 aa, synthetic construct
  REGION 1..9: note = Description of Artificial Sequence: Synthetic peptide
GTSTDVVYR

SEQ ID NO: 9992 - protein, 10 aa, synthetic construct
  REGION 1..10: note = Description of Artificial Sequence: Synthetic peptide
GVAPGTAVLR

SEQ ID NO: 9993 - protein, 11 aa, synthetic construct
  REGION 1..11: note = Description of Artificial Sequence: Synthetic peptide
GVKDCVVLHSY

SEQ ID NO: 9994 - protein, 9 aa, synthetic construct
  REGION 1..9: note = Description of Artificial Sequence: Synthetic peptide
GVRRSFYVY

SEQ ID NO: 9995 - protein, 9 aa, synthetic construct
  REGION 1..9: note = Description of Artificial Sequence: Synthetic peptide
GVVREFLTR

SEQ ID NO: 9996 - protein, 9 aa, synthetic construct
  REGION 1..9: note = Description of Artificial Sequence: Synthetic peptide
GVYYPDKVF

SEQ ID NO: 9997 - protein, 8 aa, synthetic construct
  REGION 1..8: note = Description of Artificial Sequence: Synthetic peptide
GYLQPRTF

SEQ ID NO: 9998 - protein, 9 aa, synthetic construct
  REGION 1..9: note = Description of Artificial Sequence: Synthetic peptide
GYPNMFITR

SEQ ID NO: 9999 - protein, 9 aa, synthetic construct
  REGION 1..9: note = Description of Artificial Sequence: Synthetic peptide
GYQPYRVVV

SEQ ID NO: 10000 - protein, 9 aa, synthetic construct
  REGION 1..9: note = Description of Artificial Sequence: Synthetic peptide
GYVTHGLNL

SEQ ID NO: 10001 - protein, 8 aa, synthetic construct
  REGION 1..8: note = Description of Artificial Sequence: Synthetic peptide
HADFDTWF

SEQ ID NO: 10002 - protein, 9 aa, synthetic construct
  REGION 1..9: note = Description of Artificial Sequence: Synthetic peptide
HECFVKRVD

SEQ ID NO: 10003 - protein, 8 aa, synthetic construct
  REGION 1..8: note = Description of Artificial Sequence: Synthetic peptide
HEVLLAPL

SEQ ID NO: 10004 - protein, 9 aa, synthetic construct
  REGION 1..9: note = Description of Artificial Sequence: Synthetic peptide
HFLPRVFSA

SEQ ID NO: 10005 - protein, 9 aa, synthetic construct
  REGION 1..9: note = Description of Artificial Sequence: Synthetic peptide
HFVCNLLLL

SEQ ID NO: 10006 - protein, 9 aa, synthetic construct
  REGION 1..9: note = Description of Artificial Sequence: Synthetic peptide
HHWLLLTIL

SEQ ID NO: 10007 - protein, 9 aa, synthetic construct
  REGION 1..9: note = Description of Artificial Sequence: Synthetic peptide
HQSDIEVTG

SEQ ID NO: 10008 - protein, 11 aa, synthetic construct
  REGION 1..11: note = Description of Artificial Sequence: Synthetic peptide
HVASCDAIMTR

SEQ ID NO: 10009 - protein, 9 aa, synthetic construct
  REGION 1..9: note = Description of Artificial Sequence: Synthetic peptide
HVETFYPKL

SEQ ID NO: 10010 - protein, 9 aa, synthetic construct
  REGION 1..9: note = Description of Artificial Sequence: Synthetic peptide
HVTFFIYNK

SEQ ID NO: 10011 - protein, 9 aa, synthetic construct
  REGION 1..9: note = Description of Artificial Sequence: Synthetic peptide
HVVGPNVNK

SEQ ID NO: 10012 - protein, 8 aa, synthetic construct
  REGION 1..8: note = Description of Artificial Sequence: Synthetic peptide
HWLLLTIL

SEQ ID NO: 10013 - protein, 8 aa, synthetic construct
  REGION 1..8: note = Description of Artificial Sequence: Synthetic peptide
HYVRITGL

SEQ ID NO: 10014 - protein, 9 aa, synthetic construct
  REGION 1..9: note = Description of Artificial Sequence: Synthetic peptide
IAIAMACLV

SEQ ID NO: 10015 - protein, 9 aa, synthetic construct
  REGION 1..9: note = Description of Artificial Sequence: Synthetic peptide
IAMSAFAMM

SEQ ID NO: 10016 - protein, 9 aa, synthetic construct
  REGION 1..9: note = Description of Artificial Sequence: Synthetic peptide
IELSLIDFY

SEQ ID NO: 10017 - protein, 9 aa, synthetic construct
  REGION 1..9: note = Description of Artificial Sequence: Synthetic peptide
IEVQGYKSV

SEQ ID NO: 10018 - protein, 8 aa, synthetic construct
  REGION 1..8: note = Description of Artificial Sequence: Synthetic peptide
IEYPIIGD

SEQ ID NO: 10019 - protein, 10 aa, synthetic construct
  REGION 1..10: note = Description of Artificial Sequence: Synthetic peptide
IFLIVAAIVF

SEQ ID NO: 10020 - protein, 9 aa, synthetic construct
  REGION 1..9: note = Description of Artificial Sequence: Synthetic peptide
IIKNLSKSL

SEQ ID NO: 10021 - protein, 9 aa, synthetic construct
  REGION 1..9: note = Description of Artificial Sequence: Synthetic peptide
IIQFPNTYL

SEQ ID NO: 10022 - protein, 9 aa, synthetic construct
  REGION 1..9: note = Description of Artificial Sequence: Synthetic peptide
IKVTLVFLF

SEQ ID NO: 10023 - protein, 8 aa, synthetic construct
  REGION 1..8: note = Description of Artificial Sequence: Synthetic peptide
ILSPLYAF

SEQ ID NO: 10024 - protein, 9 aa, synthetic construct
  REGION 1..9: note = Description of Artificial Sequence: Synthetic peptide
IPLTTAAKL

SEQ ID NO: 10025 - protein, 10 aa, synthetic construct
  REGION 1..10: note = Description of Artificial Sequence: Synthetic peptide
IPVAYRKVLL

SEQ ID NO: 10026 - protein, 9 aa, synthetic construct
  REGION 1..9: note = Description of Artificial Sequence: Synthetic peptide
IQLSSYSLF

SEQ ID NO: 10027 - protein, 9 aa, synthetic construct
  REGION 1..9: note = Description of Artificial Sequence: Synthetic peptide
IQYIDIGNY

SEQ ID NO: 10028 - protein, 9 aa, synthetic construct
  REGION 1..9: note = Description of Artificial Sequence: Synthetic peptide
IRGDEVRQI

SEQ ID NO: 10029 - protein, 9 aa, synthetic construct
  REGION 1..9: note = Description of Artificial Sequence: Synthetic peptide
ISAGFSLWV

SEQ ID NO: 10030 - protein, 8 aa, synthetic construct
  REGION 1..8: note = Description of Artificial Sequence: Synthetic peptide
ISNEKQEI

SEQ ID NO: 10031 - protein, 9 aa, synthetic construct
  REGION 1..9: note = Description of Artificial Sequence: Synthetic peptide
ITEEVGHTD

SEQ ID NO: 10032 - protein, 9 aa, synthetic construct
  REGION 1..9: note = Description of Artificial Sequence: Synthetic peptide
ITFELDERI

SEQ ID NO: 10033 - protein, 9 aa, synthetic construct
  REGION 1..9: note = Description of Artificial Sequence: Synthetic peptide
ITLCFTLKR

SEQ ID NO: 10034 - protein, 10 aa, synthetic construct
  REGION 1..10: note = Description of Artificial Sequence: Synthetic peptide
ITVNVLAWLY

SEQ ID NO: 10035 - protein, 9 aa, synthetic construct
  REGION 1..9: note = Description of Artificial Sequence: Synthetic peptide
IYLYLTFYL

SEQ ID NO: 10036 - protein, 9 aa, synthetic construct
  REGION 1..9: note = Description of Artificial Sequence: Synthetic peptide
KEILVTYNC

SEQ ID NO: 10037 - protein, 9 aa, synthetic construct
  REGION 1..9: note = Description of Artificial Sequence: Synthetic peptide
KEITVATSR

SEQ ID NO: 10038 - protein, 9 aa, synthetic construct
  REGION 1..9: note = Description of Artificial Sequence: Synthetic peptide
KEKVNINIV

SEQ ID NO: 10039 - protein, 9 aa, synthetic construct
  REGION 1..9: note = Description of Artificial Sequence: Synthetic peptide
KFVCDNIKF

SEQ ID NO: 10040 - protein, 9 aa, synthetic construct
  REGION 1..9: note = Description of Artificial Sequence: Synthetic peptide
KFYGGWHNM

SEQ ID NO: 10041 - protein, 8 aa, synthetic construct
  REGION 1..8: note = Description of Artificial Sequence: Synthetic peptide
KGAGGHSY

SEQ ID NO: 10042 - protein, 10 aa, synthetic construct
  REGION 1..10: note = Description of Artificial Sequence: Synthetic peptide
KGDYGDAVVY

SEQ ID NO: 10043 - protein, 9 aa, synthetic construct
  REGION 1..9: note = Description of Artificial Sequence: Synthetic peptide
KHAFHTPAF

SEQ ID NO: 10044 - protein, 9 aa, synthetic construct
  REGION 1..9: note = Description of Artificial Sequence: Synthetic peptide
KKADETQAL

SEQ ID NO: 10045 - protein, 10 aa, synthetic construct
  REGION 1..10: note = Description of Artificial Sequence: Synthetic peptide
KLNDLCFTNV

SEQ ID NO: 10046 - protein, 9 aa, synthetic construct
  REGION 1..9: note = Description of Artificial Sequence: Synthetic peptide
KLNEEIAII

SEQ ID NO: 10047 - protein, 9 aa, synthetic construct
  REGION 1..9: note = Description of Artificial Sequence: Synthetic peptide
KLPDDFTGC

SEQ ID NO: 10048 - protein, 9 aa, synthetic construct
  REGION 1..9: note = Description of Artificial Sequence: Synthetic peptide
KLVLSVNPY

SEQ ID NO: 10049 - protein, 9 aa, synthetic construct
  REGION 1..9: note = Description of Artificial Sequence: Synthetic peptide
KMKDLSPRW

SEQ ID NO: 10050 - protein, 9 aa, synthetic construct
  REGION 1..9: note = Description of Artificial Sequence: Synthetic peptide
KMNYQVNGY

SEQ ID NO: 10051 - protein, 9 aa, synthetic construct
  REGION 1..9: note = Description of Artificial Sequence: Synthetic peptide
KNGSIHLYF

SEQ ID NO: 10052 - protein, 9 aa, synthetic construct
  REGION 1..9: note = Description of Artificial Sequence: Synthetic peptide
KNIDGYFKI

SEQ ID NO: 10053 - protein, 9 aa, synthetic construct
  REGION 1..9: note = Description of Artificial Sequence: Synthetic peptide
KPASRELKV

SEQ ID NO: 10054 - protein, 10 aa, synthetic construct
  REGION 1..10: note = Description of Artificial Sequence: Synthetic peptide
KPNTWCIRCL

SEQ ID NO: 10055 - protein, 8 aa, synthetic construct
  REGION 1..8: note = Description of Artificial Sequence: Synthetic peptide
KPYIKWDL

SEQ ID NO: 10056 - protein, 8 aa, synthetic construct
  REGION 1..8: note = Description of Artificial Sequence: Synthetic peptide
KRFDNPVL

SEQ ID NO: 10057 - protein, 9 aa, synthetic construct
  REGION 1..9: note = Description of Artificial Sequence: Synthetic peptide
KSAAEASKK

SEQ ID NO: 10058 - protein, 9 aa, synthetic construct
  REGION 1..9: note = Description of Artificial Sequence: Synthetic peptide
KSAQCFKMF

SEQ ID NO: 10059 - protein, 8 aa, synthetic construct
  REGION 1..8: note = Description of Artificial Sequence: Synthetic peptide
KSILSPLY

SEQ ID NO: 10060 - protein, 8 aa, synthetic construct
  REGION 1..8: note = Description of Artificial Sequence: Synthetic peptide
KSLTENKY

SEQ ID NO: 10061 - protein, 8 aa, synthetic construct
  REGION 1..8: note = Description of Artificial Sequence: Synthetic peptide
KSNIIRGW

SEQ ID NO: 10062 - protein, 9 aa, synthetic construct
  REGION 1..9: note = Description of Artificial Sequence: Synthetic peptide
KSNLKPFER

SEQ ID NO: 10063 - protein, 8 aa, synthetic construct
  REGION 1..8: note = Description of Artificial Sequence: Synthetic peptide
KSYELQTP

SEQ ID NO: 10064 - protein, 8 aa, synthetic construct
  REGION 1..8: note = Description of Artificial Sequence: Synthetic peptide
KTDGTLMI

SEQ ID NO: 10065 - protein, 9 aa, synthetic construct
  REGION 1..9: note = Description of Artificial Sequence: Synthetic peptide
KVGGNYNYL

SEQ ID NO: 10066 - protein, 8 aa, synthetic construct
  REGION 1..8: note = Description of Artificial Sequence: Synthetic peptide
LAAIMQLF

SEQ ID NO: 10067 - protein, 9 aa, synthetic construct
  REGION 1..9: note = Description of Artificial Sequence: Synthetic peptide
LACFVLAAV

SEQ ID NO: 10068 - protein, 8 aa, synthetic construct
  REGION 1..8: note = Description of Artificial Sequence: Synthetic peptide
LAFLLFLV

SEQ ID NO: 10069 - protein, 8 aa, synthetic construct
  REGION 1..8: note = Description of Artificial Sequence: Synthetic peptide
LAKALRKV

SEQ ID NO: 10070 - protein, 9 aa, synthetic construct
  REGION 1..9: note = Description of Artificial Sequence: Synthetic peptide
LAKHCLHVV

SEQ ID NO: 10071 - protein, 9 aa, synthetic construct
  REGION 1..9: note = Description of Artificial Sequence: Synthetic peptide
LALLLLDRL

SEQ ID NO: 10072 - protein, 10 aa, synthetic construct
  REGION 1..10: note = Description of Artificial Sequence: Synthetic peptide
LAMDEFIERY

SEQ ID NO: 10073 - protein, 8 aa, synthetic construct
  REGION 1..8: note = Description of Artificial Sequence: Synthetic peptide
LARGIVFM

SEQ ID NO: 10074 - protein, 8 aa, synthetic construct
  REGION 1..8: note = Description of Artificial Sequence: Synthetic peptide
LAWPLIVT

SEQ ID NO: 10075 - protein, 9 aa, synthetic construct
  REGION 1..9: note = Description of Artificial Sequence: Synthetic peptide
LEIPRRNVA

SEQ ID NO: 10076 - protein, 9 aa, synthetic construct
  REGION 1..9: note = Description of Artificial Sequence: Synthetic peptide
LENVAFNVV

SEQ ID NO: 10077 - protein, 8 aa, synthetic construct
  REGION 1..8: note = Description of Artificial Sequence: Synthetic peptide
LFDESGEF

SEQ ID NO: 10078 - protein, 9 aa, synthetic construct
  REGION 1..9: note = Description of Artificial Sequence: Synthetic peptide
LFLMSFTVL

SEQ ID NO: 10079 - protein, 9 aa, synthetic construct
  REGION 1..9: note = Description of Artificial Sequence: Synthetic peptide
LFLTWICLL

SEQ ID NO: 10080 - protein, 9 aa, synthetic construct
  REGION 1..9: note = Description of Artificial Sequence: Synthetic peptide
LGAENSVAY

SEQ ID NO: 10081 - protein, 10 aa, synthetic construct
  REGION 1..10: note = Description of Artificial Sequence: Synthetic peptide
LHDELTGHML

SEQ ID NO: 10082 - protein, 9 aa, synthetic construct
  REGION 1..9: note = Description of Artificial Sequence: Synthetic peptide
LIMLIIFWF

SEQ ID NO: 10083 - protein, 8 aa, synthetic construct
  REGION 1..8: note = Description of Artificial Sequence: Synthetic peptide
LIYSTAAL

SEQ ID NO: 10084 - protein, 8 aa, synthetic construct
  REGION 1..8: note = Description of Artificial Sequence: Synthetic peptide
LLAPLLSA

SEQ ID NO: 10085 - protein, 8 aa, synthetic construct
  REGION 1..8: note = Description of Artificial Sequence: Synthetic peptide
LLDRLNQL

SEQ ID NO: 10086 - protein, 9 aa, synthetic construct
  REGION 1..9: note = Description of Artificial Sequence: Synthetic peptide
LLIGLAKRF

SEQ ID NO: 10087 - protein, 9 aa, synthetic construct
  REGION 1..9: note = Description of Artificial Sequence: Synthetic peptide
LLWPVTLAC

SEQ ID NO: 10088 - protein, 9 aa, synthetic construct
  REGION 1..9: note = Description of Artificial Sequence: Synthetic peptide
LMWLIINLV

SEQ ID NO: 10089 - protein, 9 aa, synthetic construct
  REGION 1..9: note = Description of Artificial Sequence: Synthetic peptide
LNDNLLEIL

SEQ ID NO: 10090 - protein, 9 aa, synthetic construct
  REGION 1..9: note = Description of Artificial Sequence: Synthetic peptide
LPAADLDDF

SEQ ID NO: 10091 - protein, 9 aa, synthetic construct
  REGION 1..9: note = Description of Artificial Sequence: Synthetic peptide
LPINVIVFD

SEQ ID NO: 10092 - protein, 8 aa, synthetic construct
  REGION 1..8: note = Description of Artificial Sequence: Synthetic peptide
LPQGFSAL

SEQ ID NO: 10093 - protein, 9 aa, synthetic construct
  REGION 1..9: note = Description of Artificial Sequence: Synthetic peptide
LPQNAVVKI

SEQ ID NO: 10094 - protein, 8 aa, synthetic construct
  REGION 1..8: note = Description of Artificial Sequence: Synthetic peptide
LPRVFSAV

SEQ ID NO: 10095 - protein, 9 aa, synthetic construct
  REGION 1..9: note = Description of Artificial Sequence: Synthetic peptide
LPSLATVAY

SEQ ID NO: 10096 - protein, 9 aa, synthetic construct
  REGION 1..9: note = Description of Artificial Sequence: Synthetic peptide
LPTEVLTEE

SEQ ID NO: 10097 - protein, 9 aa, synthetic construct
  REGION 1..9: note = Description of Artificial Sequence: Synthetic peptide
LQSADAQSF

SEQ ID NO: 10098 - protein, 10 aa, synthetic construct
  REGION 1..10: note = Description of Artificial Sequence: Synthetic peptide
LRDGWEIVKF

SEQ ID NO: 10099 - protein, 9 aa, synthetic construct
  REGION 1..9: note = Description of Artificial Sequence: Synthetic peptide
LRVESSSKL

SEQ ID NO: 10100 - protein, 10 aa, synthetic construct
  REGION 1..10: note = Description of Artificial Sequence: Synthetic peptide
LSDRVVFVLW

SEQ ID NO: 10101 - protein, 8 aa, synthetic construct
  REGION 1..8: note = Description of Artificial Sequence: Synthetic peptide
LSDTLKNL

SEQ ID NO: 10102 - protein, 9 aa, synthetic construct
  REGION 1..9: note = Description of Artificial Sequence: Synthetic peptide
LSLREVRTI

SEQ ID NO: 10103 - protein, 8 aa, synthetic construct
  REGION 1..8: note = Description of Artificial Sequence: Synthetic peptide
LTLQQIEL

SEQ ID NO: 10104 - protein, 9 aa, synthetic construct
  REGION 1..9: note = Description of Artificial Sequence: Synthetic peptide
LTLVYKVYY

SEQ ID NO: 10105 - protein, 9 aa, synthetic construct
  REGION 1..9: note = Description of Artificial Sequence: Synthetic peptide
LTQDHVDIL

SEQ ID NO: 10106 - protein, 9 aa, synthetic construct
  REGION 1..9: note = Description of Artificial Sequence: Synthetic peptide
LTWICLLQF

SEQ ID NO: 10107 - protein, 9 aa, synthetic construct
  REGION 1..9: note = Description of Artificial Sequence: Synthetic peptide
LVFLFVAAI

SEQ ID NO: 10108 - protein, 9 aa, synthetic construct
  REGION 1..9: note = Description of Artificial Sequence: Synthetic peptide
LVGLMWLSY

SEQ ID NO: 10109 - protein, 10 aa, synthetic construct
  REGION 1..10: note = Description of Artificial Sequence: Synthetic peptide
LVIGFLFLTW

SEQ ID NO: 10110 - protein, 9 aa, synthetic construct
  REGION 1..9: note = Description of Artificial Sequence: Synthetic peptide
LVLIMLIIF

SEQ ID NO: 10111 - protein, 9 aa, synthetic construct
  REGION 1..9: note = Description of Artificial Sequence: Synthetic peptide
LVLSVNPYV

SEQ ID NO: 10112 - protein, 8 aa, synthetic construct
  REGION 1..8: note = Description of Artificial Sequence: Synthetic peptide
LVYCFLGY

SEQ ID NO: 10113 - protein, 9 aa, synthetic construct
  REGION 1..9: note = Description of Artificial Sequence: Synthetic peptide
LVYCFLGYF

SEQ ID NO: 10114 - protein, 8 aa, synthetic construct
  REGION 1..8: note = Description of Artificial Sequence: Synthetic peptide
LVYFLQSI

SEQ ID NO: 10115 - protein, 9 aa, synthetic construct
  REGION 1..9: note = Description of Artificial Sequence: Synthetic peptide
LWPVTLACF

SEQ ID NO: 10116 - protein, 8 aa, synthetic construct
  REGION 1..8: note = Description of Artificial Sequence: Synthetic peptide
LYALVYFL

SEQ ID NO: 10117 - protein, 9 aa, synthetic construct
  REGION 1..9: note = Description of Artificial Sequence: Synthetic peptide
LYENAFLPF

SEQ ID NO: 10118 - protein, 9 aa, synthetic construct
  REGION 1..9: note = Description of Artificial Sequence: Synthetic peptide
LYIDINGNL

SEQ ID NO: 10119 - protein, 8 aa, synthetic construct
  REGION 1..8: note = Description of Artificial Sequence: Synthetic peptide
LYIIKLIF

SEQ ID NO: 10120 - protein, 8 aa, synthetic construct
  REGION 1..8: note = Description of Artificial Sequence: Synthetic peptide
LYSPIFLI

SEQ ID NO: 10121 - protein, 8 aa, synthetic construct
  REGION 1..8: note = Description of Artificial Sequence: Synthetic peptide
LYYQNNVF

SEQ ID NO: 10122 - protein, 9 aa, synthetic construct
  REGION 1..9: note = Description of Artificial Sequence: Synthetic peptide
MATNYDLSV

SEQ ID NO: 10123 - protein, 9 aa, synthetic construct
  REGION 1..9: note = Description of Artificial Sequence: Synthetic peptide
MAYITGGVV

SEQ ID NO: 10124 - protein, 9 aa, synthetic construct
  REGION 1..9: note = Description of Artificial Sequence: Synthetic peptide
MCDIRQLLF

SEQ ID NO: 10125 - protein, 10 aa, synthetic construct
  REGION 1..10: note = Description of Artificial Sequence: Synthetic peptide
MEIDFLELAM

SEQ ID NO: 10126 - protein, 9 aa, synthetic construct
  REGION 1..9: note = Description of Artificial Sequence: Synthetic peptide
MFLARGIVF

SEQ ID NO: 10127 - protein, 9 aa, synthetic construct
  REGION 1..9: note = Description of Artificial Sequence: Synthetic peptide
MKIILFLAL

SEQ ID NO: 10128 - protein, 10 aa, synthetic construct
  REGION 1..10: note = Description of Artificial Sequence: Synthetic peptide
MSAPPAQYEL

SEQ ID NO: 10129 - protein, 9 aa, synthetic construct
  REGION 1..9: note = Description of Artificial Sequence: Synthetic peptide
MSYEDQDAL

SEQ ID NO: 10130 - protein, 8 aa, synthetic construct
  REGION 1..8: note = Description of Artificial Sequence: Synthetic peptide
MYIFFASF

SEQ ID NO: 10131 - protein, 8 aa, synthetic construct
  REGION 1..8: note = Description of Artificial Sequence: Synthetic peptide
NAFLPFAM

SEQ ID NO: 10132 - protein, 9 aa, synthetic construct
  REGION 1..9: note = Description of Artificial Sequence: Synthetic peptide
NCDTLKEIL

SEQ ID NO: 10133 - protein, 9 aa, synthetic construct
  REGION 1..9: note = Description of Artificial Sequence: Synthetic peptide
NEEIAIILA

SEQ ID NO: 10134 - protein, 8 aa, synthetic construct
  REGION 1..8: note = Description of Artificial Sequence: Synthetic peptide
NEFACVVA

SEQ ID NO: 10135 - protein, 8 aa, synthetic construct
  REGION 1..8: note = Description of Artificial Sequence: Synthetic peptide
NEKTHVQL

SEQ ID NO: 10136 - protein, 8 aa, synthetic construct
  REGION 1..8: note = Description of Artificial Sequence: Synthetic peptide
NFKDQVIL

SEQ ID NO: 10137 - protein, 9 aa, synthetic construct
  REGION 1..9: note = Description of Artificial Sequence: Synthetic peptide
NFNKDFYDF

SEQ ID NO: 10138 - protein, 8 aa, synthetic construct
  REGION 1..8: note = Description of Artificial Sequence: Synthetic peptide
NFYEPQII

SEQ ID NO: 10139 - protein, 8 aa, synthetic construct
  REGION 1..8: note = Description of Artificial Sequence: Synthetic peptide
NGDSEVVL

SEQ ID NO: 10140 - protein, 9 aa, synthetic construct
  REGION 1..9: note = Description of Artificial Sequence: Synthetic peptide
NIDYDCVSF

SEQ ID NO: 10141 - protein, 9 aa, synthetic construct
  REGION 1..9: note = Description of Artificial Sequence: Synthetic peptide
NKGEDIQLL

SEQ ID NO: 10142 - protein, 9 aa, synthetic construct
  REGION 1..9: note = Description of Artificial Sequence: Synthetic peptide
NLDSCKRVL

SEQ ID NO: 10143 - protein, 8 aa, synthetic construct
  REGION 1..8: note = Description of Artificial Sequence: Synthetic peptide
NLDYIINL

SEQ ID NO: 10144 - protein, 9 aa, synthetic construct
  REGION 1..9: note = Description of Artificial Sequence: Synthetic peptide
NLYDKLVSS

SEQ ID NO: 10145 - protein, 9 aa, synthetic construct
  REGION 1..9: note = Description of Artificial Sequence: Synthetic peptide
NMMVTNNTF

SEQ ID NO: 10146 - protein, 9 aa, synthetic construct
  REGION 1..9: note = Description of Artificial Sequence: Synthetic peptide
NNELSPVAL

SEQ ID NO: 10147 - protein, 9 aa, synthetic construct
  REGION 1..9: note = Description of Artificial Sequence: Synthetic peptide
NPTIQKDVL

SEQ ID NO: 10148 - protein, 9 aa, synthetic construct
  REGION 1..9: note = Description of Artificial Sequence: Synthetic peptide
NRQFHQKLL

SEQ ID NO: 10149 - protein, 8 aa, synthetic construct
  REGION 1..8: note = Description of Artificial Sequence: Synthetic peptide
NRYFRLTL

SEQ ID NO: 10150 - protein, 8 aa, synthetic construct
  REGION 1..8: note = Description of Artificial Sequence: Synthetic peptide
NSASFSTF

SEQ ID NO: 10151 - protein, 9 aa, synthetic construct
  REGION 1..9: note = Description of Artificial Sequence: Synthetic peptide
NSHEGKTFY

SEQ ID NO: 10152 - protein, 9 aa, synthetic construct
  REGION 1..9: note = Description of Artificial Sequence: Synthetic peptide
NVAFNVVNK

SEQ ID NO: 10153 - protein, 10 aa, synthetic construct
  REGION 1..10: note = Description of Artificial Sequence: Synthetic peptide
NVYADSFVIR

SEQ ID NO: 10154 - protein, 9 aa, synthetic construct
  REGION 1..9: note = Description of Artificial Sequence: Synthetic peptide
NYYKKDNSY

SEQ ID NO: 10155 - protein, 9 aa, synthetic construct
  REGION 1..9: note = Description of Artificial Sequence: Synthetic peptide
PANSIVCRF

SEQ ID NO: 10156 - protein, 9 aa, synthetic construct
  REGION 1..9: note = Description of Artificial Sequence: Synthetic peptide
PVYSFLPGV

SEQ ID NO: 10157 - protein, 9 aa, synthetic construct
  REGION 1..9: note = Description of Artificial Sequence: Synthetic peptide
PYNMRVIHF

SEQ ID NO: 10158 - protein, 9 aa, synthetic construct
  REGION 1..9: note = Description of Artificial Sequence: Synthetic peptide
QALLKTVQF

SEQ ID NO: 10159 - protein, 9 aa, synthetic construct
  REGION 1..9: note = Description of Artificial Sequence: Synthetic peptide
QEGVLTAVV

SEQ ID NO: 10160 - protein, 9 aa, synthetic construct
  REGION 1..9: note = Description of Artificial Sequence: Synthetic peptide
QELYSPIFL

SEQ ID NO: 10161 - protein, 9 aa, synthetic construct
  REGION 1..9: note = Description of Artificial Sequence: Synthetic peptide
QESFGGASC

SEQ ID NO: 10162 - protein, 9 aa, synthetic construct
  REGION 1..9: note = Description of Artificial Sequence: Synthetic peptide
QEVFAQVKQ

SEQ ID NO: 10163 - protein, 10 aa, synthetic construct
  REGION 1..10: note = Description of Artificial Sequence: Synthetic peptide
QLIKVTLVFL

SEQ ID NO: 10164 - protein, 9 aa, synthetic construct
  REGION 1..9: note = Description of Artificial Sequence: Synthetic peptide
QPGQTFSVL

SEQ ID NO: 10165 - protein, 10 aa, synthetic construct
  REGION 1..10: note = Description of Artificial Sequence: Synthetic peptide
QPYRVVVLSF

SEQ ID NO: 10166 - protein, 9 aa, synthetic construct
  REGION 1..9: note = Description of Artificial Sequence: Synthetic peptide
QQGEVPVSI

SEQ ID NO: 10167 - protein, 9 aa, synthetic construct
  REGION 1..9: note = Description of Artificial Sequence: Synthetic peptide
QSINFVRII

SEQ ID NO: 10168 - protein, 9 aa, synthetic construct
  REGION 1..9: note = Description of Artificial Sequence: Synthetic peptide
QSTQLGIEF

SEQ ID NO: 10169 - protein, 9 aa, synthetic construct
  REGION 1..9: note = Description of Artificial Sequence: Synthetic peptide
QYGRSGETL

SEQ ID NO: 10170 - protein, 8 aa, synthetic construct
  REGION 1..8: note = Description of Artificial Sequence: Synthetic peptide
QYLNTLTL

SEQ ID NO: 10171 - protein, 9 aa, synthetic construct
  REGION 1..9: note = Description of Artificial Sequence: Synthetic peptide
RAFGEYSHV

SEQ ID NO: 10172 - protein, 9 aa, synthetic construct
  REGION 1..9: note = Description of Artificial Sequence: Synthetic peptide
RAGKASCTL

SEQ ID NO: 10173 - protein, 9 aa, synthetic construct
  REGION 1..9: note = Description of Artificial Sequence: Synthetic peptide
RDLICAQKF

SEQ ID NO: 10174 - protein, 9 aa, synthetic construct
  REGION 1..9: note = Description of Artificial Sequence: Synthetic peptide
RDLYDKLQF

SEQ ID NO: 10175 - protein, 9 aa, synthetic construct
  REGION 1..9: note = Description of Artificial Sequence: Synthetic peptide
REAVGTNLP

SEQ ID NO: 10176 - protein, 8 aa, synthetic construct
  REGION 1..8: note = Description of Artificial Sequence: Synthetic peptide
REEAIRHV

SEQ ID NO: 10177 - protein, 9 aa, synthetic construct
  REGION 1..9: note = Description of Artificial Sequence: Synthetic peptide
REETGLLMP

SEQ ID NO: 10178 - protein, 8 aa, synthetic construct
  REGION 1..8: note = Description of Artificial Sequence: Synthetic peptide
REFLTRNP

SEQ ID NO: 10179 - protein, 8 aa, synthetic construct
  REGION 1..8: note = Description of Artificial Sequence: Synthetic peptide
REHEHEIA

SEQ ID NO: 10180 - protein, 8 aa, synthetic construct
  REGION 1..8: note = Description of Artificial Sequence: Synthetic peptide
RENNRVVI

SEQ ID NO: 10181 - protein, 8 aa, synthetic construct
  REGION 1..8: note = Description of Artificial Sequence: Synthetic peptide
RFFYVLGL

SEQ ID NO: 10182 - protein, 8 aa, synthetic construct
  REGION 1..8: note = Description of Artificial Sequence: Synthetic peptide
RFLYIIKL

SEQ ID NO: 10183 - protein, 8 aa, synthetic construct
  REGION 1..8: note = Description of Artificial Sequence: Synthetic peptide
RFPNITNL

SEQ ID NO: 10184 - protein, 9 aa, synthetic construct
  REGION 1..9: note = Description of Artificial Sequence: Synthetic peptide
RIAGHHLGR

SEQ ID NO: 10185 - protein, 9 aa, synthetic construct
  REGION 1..9: note = Description of Artificial Sequence: Synthetic peptide
RISNCVADY

SEQ ID NO: 10186 - protein, 9 aa, synthetic construct
  REGION 1..9: note = Description of Artificial Sequence: Synthetic peptide
RLSFKELLV

SEQ ID NO: 10187 - protein, 10 aa, synthetic construct
  REGION 1..10: note = Description of Artificial Sequence: Synthetic peptide
RLSFKELLVY

SEQ ID NO: 10188 - protein, 9 aa, synthetic construct
  REGION 1..9: note = Description of Artificial Sequence: Synthetic peptide
RLTLGVYDY

SEQ ID NO: 10189 - protein, 10 aa, synthetic construct
  REGION 1..10: note = Description of Artificial Sequence: Synthetic peptide
RMYIFFASFY

SEQ ID NO: 10190 - protein, 9 aa, synthetic construct
  REGION 1..9: note = Description of Artificial Sequence: Synthetic peptide
RNAGIVGVL

SEQ ID NO: 10191 - protein, 8 aa, synthetic construct
  REGION 1..8: note = Description of Artificial Sequence: Synthetic peptide
RPDTRYVL

SEQ ID NO: 10192 - protein, 10 aa, synthetic construct
  REGION 1..10: note = Description of Artificial Sequence: Synthetic peptide
RPQIGVVREF

SEQ ID NO: 10193 - protein, 9 aa, synthetic construct
  REGION 1..9: note = Description of Artificial Sequence: Synthetic peptide
RSAAKKNNL

SEQ ID NO: 10194 - protein, 8 aa, synthetic construct
  REGION 1..8: note = Description of Artificial Sequence: Synthetic peptide
RSEKSYEL

SEQ ID NO: 10195 - protein, 9 aa, synthetic construct
  REGION 1..9: note = Description of Artificial Sequence: Synthetic peptide
RSVSPKLFI

SEQ ID NO: 10196 - protein, 9 aa, synthetic construct
  REGION 1..9: note = Description of Artificial Sequence: Synthetic peptide
RTATKAYNV

SEQ ID NO: 10197 - protein, 9 aa, synthetic construct
  REGION 1..9: note = Description of Artificial Sequence: Synthetic peptide
RVKNLNSSR

SEQ ID NO: 10198 - protein, 8 aa, synthetic construct
  REGION 1..8: note = Description of Artificial Sequence: Synthetic peptide
RVLSNLNL

SEQ ID NO: 10199 - protein, 11 aa, synthetic construct
  REGION 1..11: note = Description of Artificial Sequence: Synthetic peptide
RVQPTESIVRF

SEQ ID NO: 10200 - protein, 9 aa, synthetic construct
  REGION 1..9: note = Description of Artificial Sequence: Synthetic peptide
RVVISSDVL

SEQ ID NO: 10201 - protein, 9 aa, synthetic construct
  REGION 1..9: note = Description of Artificial Sequence: Synthetic peptide
RYMNSQGLL

SEQ ID NO: 10202 - protein, 9 aa, synthetic construct
  REGION 1..9: note = Description of Artificial Sequence: Synthetic peptide
SAEVAVKMF

SEQ ID NO: 10203 - protein, 10 aa, synthetic construct
  REGION 1..10: note = Description of Artificial Sequence: Synthetic peptide
SAIGKIQDSL

SEQ ID NO: 10204 - protein, 10 aa, synthetic construct
  REGION 1..10: note = Description of Artificial Sequence: Synthetic peptide
SAKPPPGDQF

SEQ ID NO: 10205 - protein, 9 aa, synthetic construct
  REGION 1..9: note = Description of Artificial Sequence: Synthetic peptide
SALGKLQDV

SEQ ID NO: 10206 - protein, 9 aa, synthetic construct
  REGION 1..9: note = Description of Artificial Sequence: Synthetic peptide
SALNHTKKW

SEQ ID NO: 10207 - protein, 9 aa, synthetic construct
  REGION 1..9: note = Description of Artificial Sequence: Synthetic peptide
SANLAATKM

SEQ ID NO: 10208 - protein, 8 aa, synthetic construct
  REGION 1..8: note = Description of Artificial Sequence: Synthetic peptide
SDIDITFL

SEQ ID NO: 10209 - protein, 9 aa, synthetic construct
  REGION 1..9: note = Description of Artificial Sequence: Synthetic peptide
SEETGTLIV

SEQ ID NO: 10210 - protein, 8 aa, synthetic construct
  REGION 1..8: note = Description of Artificial Sequence: Synthetic peptide
SEIIGYKA

SEQ ID NO: 10211 - protein, 9 aa, synthetic construct
  REGION 1..9: note = Description of Artificial Sequence: Synthetic peptide
SEYCRHGTC

SEQ ID NO: 10212 - protein, 10 aa, synthetic construct
  REGION 1..10: note = Description of Artificial Sequence: Synthetic peptide
SEYKGPITDV

SEQ ID NO: 10213 - protein, 8 aa, synthetic construct
  REGION 1..8: note = Description of Artificial Sequence: Synthetic peptide
SFDLGDEL

SEQ ID NO: 10214 - protein, 8 aa, synthetic construct
  REGION 1..8: note = Description of Artificial Sequence: Synthetic peptide
SFIEDLLF

SEQ ID NO: 10215 - protein, 9 aa, synthetic construct
  REGION 1..9: note = Description of Artificial Sequence: Synthetic peptide
SFKEELDKY

SEQ ID NO: 10216 - protein, 9 aa, synthetic construct
  REGION 1..9: note = Description of Artificial Sequence: Synthetic peptide
SFKELLVYA

SEQ ID NO: 10217 - protein, 9 aa, synthetic construct
  REGION 1..9: note = Description of Artificial Sequence: Synthetic peptide
SFSASTSAF

SEQ ID NO: 10218 - protein, 9 aa, synthetic construct
  REGION 1..9: note = Description of Artificial Sequence: Synthetic peptide
SGLDSLDTY

SEQ ID NO: 10219 - protein, 9 aa, synthetic construct
  REGION 1..9: note = Description of Artificial Sequence: Synthetic peptide
SIIKTIQPR

SEQ ID NO: 10220 - protein, 8 aa, synthetic construct
  REGION 1..8: note = Description of Artificial Sequence: Synthetic peptide
SIINNTVY

SEQ ID NO: 10221 - protein, 10 aa, synthetic construct
  REGION 1..10: note = Description of Artificial Sequence: Synthetic peptide
SIKNFKSVLY

SEQ ID NO: 10222 - protein, 10 aa, synthetic construct
  REGION 1..10: note = Description of Artificial Sequence: Synthetic peptide
SINFVRIIMR

SEQ ID NO: 10223 - protein, 8 aa, synthetic construct
  REGION 1..8: note = Description of Artificial Sequence: Synthetic peptide
SLAATVRL

SEQ ID NO: 10224 - protein, 8 aa, synthetic construct
  REGION 1..8: note = Description of Artificial Sequence: Synthetic peptide
SLFDMSKF

SEQ ID NO: 10225 - protein, 9 aa, synthetic construct
  REGION 1..9: note = Description of Artificial Sequence: Synthetic peptide
SLNVAKSEF

SEQ ID NO: 10226 - protein, 9 aa, synthetic construct
  REGION 1..9: note = Description of Artificial Sequence: Synthetic peptide
SLPFGWLIV

SEQ ID NO: 10227 - protein, 10 aa, synthetic construct
  REGION 1..10: note = Description of Artificial Sequence: Synthetic peptide
SLREVRTIKV

SEQ ID NO: 10228 - protein, 9 aa, synthetic construct
  REGION 1..9: note = Description of Artificial Sequence: Synthetic peptide
SLSHRFYRL

SEQ ID NO: 10229 - protein, 10 aa, synthetic construct
  REGION 1..10: note = Description of Artificial Sequence: Synthetic peptide
SLVKPSFYVY

SEQ ID NO: 10230 - protein, 8 aa, synthetic construct
  REGION 1..8: note = Description of Artificial Sequence: Synthetic peptide
SPRRARSV

SEQ ID NO: 10231 - protein, 9 aa, synthetic construct
  REGION 1..9: note = Description of Artificial Sequence: Synthetic peptide
SPRWYFYYL

SEQ ID NO: 10232 - protein, 8 aa, synthetic construct
  REGION 1..8: note = Description of Artificial Sequence: Synthetic peptide
SPVALRQM

SEQ ID NO: 10233 - protein, 9 aa, synthetic construct
  REGION 1..9: note = Description of Artificial Sequence: Synthetic peptide
SQDLSVVSK

SEQ ID NO: 10234 - protein, 9 aa, synthetic construct
  REGION 1..9: note = Description of Artificial Sequence: Synthetic peptide
SRTLSYYKL

SEQ ID NO: 10235 - protein, 9 aa, synthetic construct
  REGION 1..9: note = Description of Artificial Sequence: Synthetic peptide
SRYWEPEFY

SEQ ID NO: 10236 - protein, 10 aa, synthetic construct
  REGION 1..10: note = Description of Artificial Sequence: Synthetic peptide
SSPDDQIGYY

SEQ ID NO: 10237 - protein, 9 aa, synthetic construct
  REGION 1..9: note = Description of Artificial Sequence: Synthetic peptide
STASALGKL

SEQ ID NO: 10238 - protein, 8 aa, synthetic construct
  REGION 1..8: note = Description of Artificial Sequence: Synthetic peptide
STFEEAAL

SEQ ID NO: 10239 - protein, 8 aa, synthetic construct
  REGION 1..8: note = Description of Artificial Sequence: Synthetic peptide
STQLGIEF

SEQ ID NO: 10240 - protein, 9 aa, synthetic construct
  REGION 1..9: note = Description of Artificial Sequence: Synthetic peptide
STQWSLFFF

SEQ ID NO: 10241 - protein, 8 aa, synthetic construct
  REGION 1..8: note = Description of Artificial Sequence: Synthetic peptide
SVLLFLAF

SEQ ID NO: 10242 - protein, 9 aa, synthetic construct
  REGION 1..9: note = Description of Artificial Sequence: Synthetic peptide
SVLYNSASF

SEQ ID NO: 10243 - protein, 9 aa, synthetic construct
  REGION 1..9: note = Description of Artificial Sequence: Synthetic peptide
SYATHSDKF

SEQ ID NO: 10244 - protein, 10 aa, synthetic construct
  REGION 1..10: note = Description of Artificial Sequence: Synthetic peptide
SYFTEQPIDL

SEQ ID NO: 10245 - protein, 8 aa, synthetic construct
  REGION 1..8: note = Description of Artificial Sequence: Synthetic peptide
SYFTSDYY

SEQ ID NO: 10246 - protein, 10 aa, synthetic construct
  REGION 1..10: note = Description of Artificial Sequence: Synthetic peptide
SYFTSDYYQL

SEQ ID NO: 10247 - protein, 9 aa, synthetic construct
  REGION 1..9: note = Description of Artificial Sequence: Synthetic peptide
SYGADLKSF

SEQ ID NO: 10248 - protein, 8 aa, synthetic construct
  REGION 1..8: note = Description of Artificial Sequence: Synthetic peptide
TAPHGHVM

SEQ ID NO: 10249 - protein, 8 aa, synthetic construct
  REGION 1..8: note = Description of Artificial Sequence: Synthetic peptide
TAVLRQWL

SEQ ID NO: 10250 - protein, 10 aa, synthetic construct
  REGION 1..10: note = Description of Artificial Sequence: Synthetic peptide
TEAFEKMVSL

SEQ ID NO: 10251 - protein, 9 aa, synthetic construct
  REGION 1..9: note = Description of Artificial Sequence: Synthetic peptide
TESKPSVEQ

SEQ ID NO: 10252 - protein, 10 aa, synthetic construct
  REGION 1..10: note = Description of Artificial Sequence: Synthetic peptide
TEVLTEEVVL

SEQ ID NO: 10253 - protein, 10 aa, synthetic construct
  REGION 1..10: note = Description of Artificial Sequence: Synthetic peptide
TEVPVAIHAD

SEQ ID NO: 10254 - protein, 9 aa, synthetic construct
  REGION 1..9: note = Description of Artificial Sequence: Synthetic peptide
TFDNLKTLL

SEQ ID NO: 10255 - protein, 9 aa, synthetic construct
  REGION 1..9: note = Description of Artificial Sequence: Synthetic peptide
TFEYVSQPF

SEQ ID NO: 10256 - protein, 9 aa, synthetic construct
  REGION 1..9: note = Description of Artificial Sequence: Synthetic peptide
TIAFGGCVF

SEQ ID NO: 10257 - protein, 9 aa, synthetic construct
  REGION 1..9: note = Description of Artificial Sequence: Synthetic peptide
TIYSLLLCR

SEQ ID NO: 10258 - protein, 8 aa, synthetic construct
  REGION 1..8: note = Description of Artificial Sequence: Synthetic peptide
TLAILTAL

SEQ ID NO: 10259 - protein, 9 aa, synthetic construct
  REGION 1..9: note = Description of Artificial Sequence: Synthetic peptide
TLIGDCATV

SEQ ID NO: 10260 - protein, 10 aa, synthetic construct
  REGION 1..10: note = Description of Artificial Sequence: Synthetic peptide
TLIVNSVLLF

SEQ ID NO: 10261 - protein, 9 aa, synthetic construct
  REGION 1..9: note = Description of Artificial Sequence: Synthetic peptide
TLKSFTVEK

SEQ ID NO: 10262 - protein, 9 aa, synthetic construct
  REGION 1..9: note = Description of Artificial Sequence: Synthetic peptide
TLQAIASEF

SEQ ID NO: 10263 - protein, 9 aa, synthetic construct
  REGION 1..9: note = Description of Artificial Sequence: Synthetic peptide
TLQCIMLVY

SEQ ID NO: 10264 - protein, 9 aa, synthetic construct
  REGION 1..9: note = Description of Artificial Sequence: Synthetic peptide
TLVPQEHYV

SEQ ID NO: 10265 - protein, 10 aa, synthetic construct
  REGION 1..10: note = Description of Artificial Sequence: Synthetic peptide
TPCSFGGVSV

SEQ ID NO: 10266 - protein, 9 aa, synthetic construct
  REGION 1..9: note = Description of Artificial Sequence: Synthetic peptide
TPKDHIGTR

SEQ ID NO: 10267 - protein, 9 aa, synthetic construct
  REGION 1..9: note = Description of Artificial Sequence: Synthetic peptide
TPKYKFVRI

SEQ ID NO: 10268 - protein, 8 aa, synthetic construct
  REGION 1..8: note = Description of Artificial Sequence: Synthetic peptide
TQDHVDIL

SEQ ID NO: 10269 - protein, 9 aa, synthetic construct
  REGION 1..9: note = Description of Artificial Sequence: Synthetic peptide
TQWSLFFFL

SEQ ID NO: 10270 - protein, 9 aa, synthetic construct
  REGION 1..9: note = Description of Artificial Sequence: Synthetic peptide
TQYEYGTED

SEQ ID NO: 10271 - protein, 9 aa, synthetic construct
  REGION 1..9: note = Description of Artificial Sequence: Synthetic peptide
TRVLSNLNL

SEQ ID NO: 10272 - protein, 9 aa, synthetic construct
  REGION 1..9: note = Description of Artificial Sequence: Synthetic peptide
TSHKLVLSV

SEQ ID NO: 10273 - protein, 9 aa, synthetic construct
  REGION 1..9: note = Description of Artificial Sequence: Synthetic peptide
TSMKYFVKI

SEQ ID NO: 10274 - protein, 9 aa, synthetic construct
  REGION 1..9: note = Description of Artificial Sequence: Synthetic peptide
TTAYANSVF

SEQ ID NO: 10275 - protein, 8 aa, synthetic construct
  REGION 1..8: note = Description of Artificial Sequence: Synthetic peptide
TTITVNVL

SEQ ID NO: 10276 - protein, 9 aa, synthetic construct
  REGION 1..9: note = Description of Artificial Sequence: Synthetic peptide
TTIVNGVRR

SEQ ID NO: 10277 - protein, 9 aa, synthetic construct
  REGION 1..9: note = Description of Artificial Sequence: Synthetic peptide
TTLEETKFL

SEQ ID NO: 10278 - protein, 9 aa, synthetic construct
  REGION 1..9: note = Description of Artificial Sequence: Synthetic peptide
TVLPPLLTD

SEQ ID NO: 10279 - protein, 9 aa, synthetic construct
  REGION 1..9: note = Description of Artificial Sequence: Synthetic peptide
TVREVLSDR

SEQ ID NO: 10280 - protein, 9 aa, synthetic construct
  REGION 1..9: note = Description of Artificial Sequence: Synthetic peptide
TYASQGLVA

SEQ ID NO: 10281 - protein, 8 aa, synthetic construct
  REGION 1..8: note = Description of Artificial Sequence: Synthetic peptide
TYNLWNTF

SEQ ID NO: 10282 - protein, 9 aa, synthetic construct
  REGION 1..9: note = Description of Artificial Sequence: Synthetic peptide
VADYSVLYN

SEQ ID NO: 10283 - protein, 9 aa, synthetic construct
  REGION 1..9: note = Description of Artificial Sequence: Synthetic peptide
VAFELWAKR

SEQ ID NO: 10284 - protein, 10 aa, synthetic construct
  REGION 1..10: note = Description of Artificial Sequence: Synthetic peptide
VAGDSGFAAY

SEQ ID NO: 10285 - protein, 8 aa, synthetic construct
  REGION 1..8: note = Description of Artificial Sequence: Synthetic peptide
VAGGIVAI

SEQ ID NO: 10286 - protein, 8 aa, synthetic construct
  REGION 1..8: note = Description of Artificial Sequence: Synthetic peptide
VAIHADQL

SEQ ID NO: 10287 - protein, 9 aa, synthetic construct
  REGION 1..9: note = Description of Artificial Sequence: Synthetic peptide
VDDPCPIHF

SEQ ID NO: 10288 - protein, 10 aa, synthetic construct
  REGION 1..10: note = Description of Artificial Sequence: Synthetic peptide
VEAEVQIDRL

SEQ ID NO: 10289 - protein, 8 aa, synthetic construct
  REGION 1..8: note = Description of Artificial Sequence: Synthetic peptide
VEVEKGVL

SEQ ID NO: 10290 - protein, 9 aa, synthetic construct
  REGION 1..9: note = Description of Artificial Sequence: Synthetic peptide
VEVEKGVLP

SEQ ID NO: 10291 - protein, 9 aa, synthetic construct
  REGION 1..9: note = Description of Artificial Sequence: Synthetic peptide
VEYCPIFFI

SEQ ID NO: 10292 - protein, 9 aa, synthetic construct
  REGION 1..9: note = Description of Artificial Sequence: Synthetic peptide
VFAFPFTIY

SEQ ID NO: 10293 - protein, 9 aa, synthetic construct
  REGION 1..9: note = Description of Artificial Sequence: Synthetic peptide
VFITLCFTL

SEQ ID NO: 10294 - protein, 9 aa, synthetic construct
  REGION 1..9: note = Description of Artificial Sequence: Synthetic peptide
VFLLVTLAI

SEQ ID NO: 10295 - protein, 9 aa, synthetic construct
  REGION 1..9: note = Description of Artificial Sequence: Synthetic peptide
VFLVLLPLV

SEQ ID NO: 10296 - protein, 10 aa, synthetic construct
  REGION 1..10: note = Description of Artificial Sequence: Synthetic peptide
VFPPTSFGPL

SEQ ID NO: 10297 - protein, 9 aa, synthetic construct
  REGION 1..9: note = Description of Artificial Sequence: Synthetic peptide
VFVLWAHGF

SEQ ID NO: 10298 - protein, 9 aa, synthetic construct
  REGION 1..9: note = Description of Artificial Sequence: Synthetic peptide
VGMQKYSTL

SEQ ID NO: 10299 - protein, 9 aa, synthetic construct
  REGION 1..9: note = Description of Artificial Sequence: Synthetic peptide
VGTNLPLQL

SEQ ID NO: 10300 - protein, 9 aa, synthetic construct
  REGION 1..9: note = Description of Artificial Sequence: Synthetic peptide
VIGFLFLTW

SEQ ID NO: 10301 - protein, 9 aa, synthetic construct
  REGION 1..9: note = Description of Artificial Sequence: Synthetic peptide
VLCNSQTSL

SEQ ID NO: 10302 - protein, 9 aa, synthetic construct
  REGION 1..9: note = Description of Artificial Sequence: Synthetic peptide
VLPFNDGVY

SEQ ID NO: 10303 - protein, 9 aa, synthetic construct
  REGION 1..9: note = Description of Artificial Sequence: Synthetic peptide
VLYYQNNVF

SEQ ID NO: 10304 - protein, 10 aa, synthetic construct
  REGION 1..10: note = Description of Artificial Sequence: Synthetic peptide
VPANSTVLSF

SEQ ID NO: 10305 - protein, 9 aa, synthetic construct
  REGION 1..9: note = Description of Artificial Sequence: Synthetic peptide
VPGLPGTIL

SEQ ID NO: 10306 - protein, 8 aa, synthetic construct
  REGION 1..8: note = Description of Artificial Sequence: Synthetic peptide
VPLHGTIL

SEQ ID NO: 10307 - protein, 9 aa, synthetic construct
  REGION 1..9: note = Description of Artificial Sequence: Synthetic peptide
VQAGNVQLR

SEQ ID NO: 10308 - protein, 9 aa, synthetic construct
  REGION 1..9: note = Description of Artificial Sequence: Synthetic peptide
VQTIEVNSF

SEQ ID NO: 10309 - protein, 9 aa, synthetic construct
  REGION 1..9: note = Description of Artificial Sequence: Synthetic peptide
VRQCSGVTF

SEQ ID NO: 10310 - protein, 8 aa, synthetic construct
  REGION 1..8: note = Description of Artificial Sequence: Synthetic peptide
VSEETGTL

SEQ ID NO: 10311 - protein, 9 aa, synthetic construct
  REGION 1..9: note = Description of Artificial Sequence: Synthetic peptide
VSEETGTLI

SEQ ID NO: 10312 - protein, 9 aa, synthetic construct
  REGION 1..9: note = Description of Artificial Sequence: Synthetic peptide
VSFLAHIQW

SEQ ID NO: 10313 - protein, 8 aa, synthetic construct
  REGION 1..8: note = Description of Artificial Sequence: Synthetic peptide
VSLLSVLL

SEQ ID NO: 10314 - protein, 10 aa, synthetic construct
  REGION 1..10: note = Description of Artificial Sequence: Synthetic peptide
VSTGYHFREL

SEQ ID NO: 10315 - protein, 8 aa, synthetic construct
  REGION 1..8: note = Description of Artificial Sequence: Synthetic peptide
VSTIQRKY

SEQ ID NO: 10316 - protein, 9 aa, synthetic construct
  REGION 1..9: note = Description of Artificial Sequence: Synthetic peptide
VTFFIYNKI

SEQ ID NO: 10317 - protein, 9 aa, synthetic construct
  REGION 1..9: note = Description of Artificial Sequence: Synthetic peptide
VTFGDDTVI

SEQ ID NO: 10318 - protein, 9 aa, synthetic construct
  REGION 1..9: note = Description of Artificial Sequence: Synthetic peptide
VTHSKGLYR

SEQ ID NO: 10319 - protein, 8 aa, synthetic construct
  REGION 1..8: note = Description of Artificial Sequence: Synthetic peptide
VTNNTFTL

SEQ ID NO: 10320 - protein, 9 aa, synthetic construct
  REGION 1..9: note = Description of Artificial Sequence: Synthetic peptide
VTNNTFTLK

SEQ ID NO: 10321 - protein, 9 aa, synthetic construct
  REGION 1..9: note = Description of Artificial Sequence: Synthetic peptide
VTWFHAIHV

SEQ ID NO: 10322 - protein, 8 aa, synthetic construct
  REGION 1..8: note = Description of Artificial Sequence: Synthetic peptide
VVIKVCEF

SEQ ID NO: 10323 - protein, 10 aa, synthetic construct
  REGION 1..10: note = Description of Artificial Sequence: Synthetic peptide
VVIKVCEFQF

SEQ ID NO: 10324 - protein, 9 aa, synthetic construct
  REGION 1..9: note = Description of Artificial Sequence: Synthetic peptide
VVTTFDSEY

SEQ ID NO: 10325 - protein, 8 aa, synthetic construct
  REGION 1..8: note = Description of Artificial Sequence: Synthetic peptide
VVVLSFEL

SEQ ID NO: 10326 - protein, 9 aa, synthetic construct
  REGION 1..9: note = Description of Artificial Sequence: Synthetic peptide
VWKSYVHVV

SEQ ID NO: 10327 - protein, 9 aa, synthetic construct
  REGION 1..9: note = Description of Artificial Sequence: Synthetic peptide
VYMPASWVM

SEQ ID NO: 10328 - protein, 9 aa, synthetic construct
  REGION 1..9: note = Description of Artificial Sequence: Synthetic peptide
VYSFLPGVY

SEQ ID NO: 10329 - protein, 8 aa, synthetic construct
  REGION 1..8: note = Description of Artificial Sequence: Synthetic peptide
VYYPDKVF

SEQ ID NO: 10330 - protein, 9 aa, synthetic construct
  REGION 1..9: note = Description of Artificial Sequence: Synthetic peptide
VYYPDKVFR

SEQ ID NO: 10331 - protein, 10 aa, synthetic construct
  REGION 1..10: note = Description of Artificial Sequence: Synthetic peptide
WCKDGHVETF

SEQ ID NO: 10332 - protein, 9 aa, synthetic construct
  REGION 1..9: note = Description of Artificial Sequence: Synthetic peptide
WEIVKFIST

SEQ ID NO: 10333 - protein, 9 aa, synthetic construct
  REGION 1..9: note = Description of Artificial Sequence: Synthetic peptide
WLIINLVQM

SEQ ID NO: 10334 - protein, 9 aa, synthetic construct
  REGION 1..9: note = Description of Artificial Sequence: Synthetic peptide
WLSYFIASF

SEQ ID NO: 10335 - protein, 9 aa, synthetic construct
  REGION 1..9: note = Description of Artificial Sequence: Synthetic peptide
WLTNIFGTV

SEQ ID NO: 10336 - protein, 9 aa, synthetic construct
  REGION 1..9: note = Description of Artificial Sequence: Synthetic peptide
WPWYIWLGF

SEQ ID NO: 10337 - protein, 8 aa, synthetic construct
  REGION 1..8: note = Description of Artificial Sequence: Synthetic peptide
YACWHHSI

SEQ ID NO: 10338 - protein, 8 aa, synthetic construct
  REGION 1..8: note = Description of Artificial Sequence: Synthetic peptide
YAYLRKHF

SEQ ID NO: 10339 - protein, 10 aa, synthetic construct
  REGION 1..10: note = Description of Artificial Sequence: Synthetic peptide
YAYLRKHFSM

SEQ ID NO: 10340 - protein, 9 aa, synthetic construct
  REGION 1..9: note = Description of Artificial Sequence: Synthetic peptide
YECDIPIGA

SEQ ID NO: 10341 - protein, 9 aa, synthetic construct
  REGION 1..9: note = Description of Artificial Sequence: Synthetic peptide
YELQTPFEI

SEQ ID NO: 10342 - protein, 9 aa, synthetic construct
  REGION 1..9: note = Description of Artificial Sequence: Synthetic peptide
YFPLQSYGF

SEQ ID NO: 10343 - protein, 10 aa, synthetic construct
  REGION 1..10: note = Description of Artificial Sequence: Synthetic peptide
YIAQVDVVNF

SEQ ID NO: 10344 - protein, 8 aa, synthetic construct
  REGION 1..8: note = Description of Artificial Sequence: Synthetic peptide
YIDINGNL

SEQ ID NO: 10345 - protein, 8 aa, synthetic construct
  REGION 1..8: note = Description of Artificial Sequence: Synthetic peptide
YIFFASFY

SEQ ID NO: 10346 - protein, 10 aa, synthetic construct
  REGION 1..10: note = Description of Artificial Sequence: Synthetic peptide
YIICISTKHF

SEQ ID NO: 10347 - protein, 9 aa, synthetic construct
  REGION 1..9: note = Description of Artificial Sequence: Synthetic peptide
YIRKLHDEL

SEQ ID NO: 10348 - protein, 9 aa, synthetic construct
  REGION 1..9: note = Description of Artificial Sequence: Synthetic peptide
YKTPPIKDF

SEQ ID NO: 10349 - protein, 9 aa, synthetic construct
  REGION 1..9: note = Description of Artificial Sequence: Synthetic peptide
YLCFLAFLL

SEQ ID NO: 10350 - protein, 8 aa, synthetic construct
  REGION 1..8: note = Description of Artificial Sequence: Synthetic peptide
YLFQHANL

SEQ ID NO: 10351 - protein, 8 aa, synthetic construct
  REGION 1..8: note = Description of Artificial Sequence: Synthetic peptide
YLVSTQEF

SEQ ID NO: 10352 - protein, 8 aa, synthetic construct
  REGION 1..8: note = Description of Artificial Sequence: Synthetic peptide
YLYFIKGL

SEQ ID NO: 10353 - protein, 10 aa, synthetic construct
  REGION 1..10: note = Description of Artificial Sequence: Synthetic peptide
YQHEETIYNL

SEQ ID NO: 10354 - protein, 9 aa, synthetic construct
  REGION 1..9: note = Description of Artificial Sequence: Synthetic peptide
YQIGGYTEK

SEQ ID NO: 10355 - protein, 9 aa, synthetic construct
  REGION 1..9: note = Description of Artificial Sequence: Synthetic peptide
YQKVGMQKY

SEQ ID NO: 10356 - protein, 8 aa, synthetic construct
  REGION 1..8: note = Description of Artificial Sequence: Synthetic peptide
YQLYSTQL

SEQ ID NO: 10357 - protein, 10 aa, synthetic construct
  REGION 1..10: note = Description of Artificial Sequence: Synthetic peptide
YSHVVAFNTL

SEQ ID NO: 10358 - protein, 8 aa, synthetic construct
  REGION 1..8: note = Description of Artificial Sequence: Synthetic peptide
YSLLMPIL

SEQ ID NO: 10359 - protein, 8 aa, synthetic construct
  REGION 1..8: note = Description of Artificial Sequence: Synthetic peptide
YSPIFLIV

SEQ ID NO: 10360 - protein, 8 aa, synthetic construct
  REGION 1..8: note = Description of Artificial Sequence: Synthetic peptide
YSTGSNVF

SEQ ID NO: 10361 - protein, 10 aa, synthetic construct
  REGION 1..10: note = Description of Artificial Sequence: Synthetic peptide
YTNSFTRGVY

SEQ ID NO: 10362 - protein, 9 aa, synthetic construct
  REGION 1..9: note = Description of Artificial Sequence: Synthetic peptide
YVKPGGTSS

SEQ ID NO: 10363 - protein, 11 aa, synthetic construct
  REGION 1..11: note = Description of Artificial Sequence: Synthetic peptide
YVVDDPCPIHF

SEQ ID NO: 10364 - protein, 9 aa, synthetic construct
  REGION 1..9: note = Description of Artificial Sequence: Synthetic peptide
YVWKSYVHV

SEQ ID NO: 10365 - protein, 10 aa, synthetic construct
  REGION 1..10: note = Description of Artificial Sequence: Synthetic peptide
YVYANGGKGF

SEQ ID NO: 10366 - protein, 10 aa, synthetic construct
  REGION 1..10: note = Description of Artificial Sequence: Synthetic peptide
YYHTTDPSFL

SEQ ID NO: 10367 - protein, 10 aa, synthetic construct
  REGION 1..10: note = Description of Artificial Sequence: Synthetic peptide
YYNTTKGGRF

SEQ ID NO: 10368 - protein, 8 aa, synthetic construct
  REGION 1..8: note = Description of Artificial Sequence: Synthetic peptide
YYPSARIV

SEQ ID NO: 10369 - protein, 9 aa, synthetic construct
  REGION 1..9: note = Description of Artificial Sequence: Synthetic peptide
AAGLEAPFL

SEQ ID NO: 10370 - protein, 8 aa, synthetic construct
  REGION 1..8: note = Description of Artificial Sequence: Synthetic peptide
AAIMQLFF

SEQ ID NO: 10371 - protein, 10 aa, synthetic construct
  REGION 1..10: note = Description of Artificial Sequence: Synthetic peptide
ACPDGVKHVY

SEQ ID NO: 10372 - protein, 9 aa, synthetic construct
  REGION 1..9: note = Description of Artificial Sequence: Synthetic peptide
AEASKKPRQ

SEQ ID NO: 10373 - protein, 9 aa, synthetic construct
  REGION 1..9: note = Description of Artificial Sequence: Synthetic peptide
AELEGIQYG

SEQ ID NO: 10374 - protein, 8 aa, synthetic construct
  REGION 1..8: note = Description of Artificial Sequence: Synthetic peptide
AEVQIDRL

SEQ ID NO: 10375 - protein, 8 aa, synthetic construct
  REGION 1..8: note = Description of Artificial Sequence: Synthetic peptide
AFLLFLVL

SEQ ID NO: 10376 - protein, 9 aa, synthetic construct
  REGION 1..9: note = Description of Artificial Sequence: Synthetic peptide
AFNTLLFLM

SEQ ID NO: 10377 - protein, 9 aa, synthetic construct
  REGION 1..9: note = Description of Artificial Sequence: Synthetic peptide
AFVETVKGL

SEQ ID NO: 10378 - protein, 9 aa, synthetic construct
  REGION 1..9: note = Description of Artificial Sequence: Synthetic peptide
AHIQWMVMF

SEQ ID NO: 10379 - protein, 9 aa, synthetic construct
  REGION 1..9: note = Description of Artificial Sequence: Synthetic peptide
AIVMVTIML

SEQ ID NO: 10380 - protein, 10 aa, synthetic construct
  REGION 1..10: note = Description of Artificial Sequence: Synthetic peptide
AIVSTIQRKY

SEQ ID NO: 10381 - protein, 9 aa, synthetic construct
  REGION 1..9: note = Description of Artificial Sequence: Synthetic peptide
ALDPLSETK

SEQ ID NO: 10382 - protein, 9 aa, synthetic construct
  REGION 1..9: note = Description of Artificial Sequence: Synthetic peptide
ALDQAISMW

SEQ ID NO: 10383 - protein, 9 aa, synthetic construct
  REGION 1..9: note = Description of Artificial Sequence: Synthetic peptide
ALLAVFQSA

SEQ ID NO: 10384 - protein, 9 aa, synthetic construct
  REGION 1..9: note = Description of Artificial Sequence: Synthetic peptide
ALSKGVHFV

SEQ ID NO: 10385 - protein, 8 aa, synthetic construct
  REGION 1..8: note = Description of Artificial Sequence: Synthetic peptide
ALWEIQQV

SEQ ID NO: 10386 - protein, 10 aa, synthetic construct
  REGION 1..10: note = Description of Artificial Sequence: Synthetic peptide
ASFSASTSAF

SEQ ID NO: 10387 - protein, 9 aa, synthetic construct
  REGION 1..9: note = Description of Artificial Sequence: Synthetic peptide
ASHMYCSFY

SEQ ID NO: 10388 - protein, 8 aa, synthetic construct
  REGION 1..8: note = Description of Artificial Sequence: Synthetic peptide
ASLPFGWL

SEQ ID NO: 10389 - protein, 9 aa, synthetic construct
  REGION 1..9: note = Description of Artificial Sequence: Synthetic peptide
ATATIPIQA

SEQ ID NO: 10390 - protein, 10 aa, synthetic construct
  REGION 1..10: note = Description of Artificial Sequence: Synthetic peptide
ATVVIGTSKF

SEQ ID NO: 10391 - protein, 10 aa, synthetic construct
  REGION 1..10: note = Description of Artificial Sequence: Synthetic peptide
AVAKHDFFKF

SEQ ID NO: 10392 - protein, 9 aa, synthetic construct
  REGION 1..9: note = Description of Artificial Sequence: Synthetic peptide
AYANRNRFL

SEQ ID NO: 10393 - protein, 8 aa, synthetic construct
  REGION 1..8: note = Description of Artificial Sequence: Synthetic peptide
AYILFTRF

SEQ ID NO: 10394 - protein, 9 aa, synthetic construct
  REGION 1..9: note = Description of Artificial Sequence: Synthetic peptide
AYLRKHFSM

SEQ ID NO: 10395 - protein, 8 aa, synthetic construct
  REGION 1..8: note = Description of Artificial Sequence: Synthetic peptide
AYNVTQAF

SEQ ID NO: 10396 - protein, 8 aa, synthetic construct
  REGION 1..8: note = Description of Artificial Sequence: Synthetic peptide
AYVDNSSL

SEQ ID NO: 10397 - protein, 9 aa, synthetic construct
  REGION 1..9: note = Description of Artificial Sequence: Synthetic peptide
CANGQVFGL

SEQ ID NO: 10398 - protein, 9 aa, synthetic construct
  REGION 1..9: note = Description of Artificial Sequence: Synthetic peptide
CLTPVYSFL

SEQ ID NO: 10399 - protein, 8 aa, synthetic construct
  REGION 1..8: note = Description of Artificial Sequence: Synthetic peptide
DAALALLL

SEQ ID NO: 10400 - protein, 10 aa, synthetic construct
  REGION 1..10: note = Description of Artificial Sequence: Synthetic peptide
DAFKLNIKLL

SEQ ID NO: 10401 - protein, 9 aa, synthetic construct
  REGION 1..9: note = Description of Artificial Sequence: Synthetic peptide
DAPAHISTI

SEQ ID NO: 10402 - protein, 9 aa, synthetic construct
  REGION 1..9: note = Description of Artificial Sequence: Synthetic peptide
DASGKPVPY

SEQ ID NO: 10403 - protein, 9 aa, synthetic construct
  REGION 1..9: note = Description of Artificial Sequence: Synthetic peptide
DEVARDLSL

SEQ ID NO: 10404 - protein, 9 aa, synthetic construct
  REGION 1..9: note = Description of Artificial Sequence: Synthetic peptide
DFSSEIIGY

SEQ ID NO: 10405 - protein, 9 aa, synthetic construct
  REGION 1..9: note = Description of Artificial Sequence: Synthetic peptide
DFYDFAVSK

SEQ ID NO: 10406 - protein, 9 aa, synthetic construct
  REGION 1..9: note = Description of Artificial Sequence: Synthetic peptide
DLKPVSEEV

SEQ ID NO: 10407 - protein, 9 aa, synthetic construct
  REGION 1..9: note = Description of Artificial Sequence: Synthetic peptide
DSAEVAVKM

SEQ ID NO: 10408 - protein, 9 aa, synthetic construct
  REGION 1..9: note = Description of Artificial Sequence: Synthetic peptide
DTFCAGSTF

SEQ ID NO: 10409 - protein, 9 aa, synthetic construct
  REGION 1..9: note = Description of Artificial Sequence: Synthetic peptide
EANMDQESF

SEQ ID NO: 10410 - protein, 9 aa, synthetic construct
  REGION 1..9: note = Description of Artificial Sequence: Synthetic peptide
EAVGTNLPL

SEQ ID NO: 10411 - protein, 9 aa, synthetic construct
  REGION 1..9: note = Description of Artificial Sequence: Synthetic peptide
EEAIRHVRA

SEQ ID NO: 10412 - protein, 10 aa, synthetic construct
  REGION 1..10: note = Description of Artificial Sequence: Synthetic peptide
EEAIRHVRAW

SEQ ID NO: 10413 - protein, 9 aa, synthetic construct
  REGION 1..9: note = Description of Artificial Sequence: Synthetic peptide
EEIAIILAS

SEQ ID NO: 10414 - protein, 10 aa, synthetic construct
  REGION 1..10: note = Description of Artificial Sequence: Synthetic peptide
EEIAIILASF

SEQ ID NO: 10415 - protein, 9 aa, synthetic construct
  REGION 1..9: note = Description of Artificial Sequence: Synthetic peptide
EEVVENPTI

SEQ ID NO: 10416 - protein, 9 aa, synthetic construct
  REGION 1..9: note = Description of Artificial Sequence: Synthetic peptide
EHYVRITGL

SEQ ID NO: 10417 - protein, 9 aa, synthetic construct
  REGION 1..9: note = Description of Artificial Sequence: Synthetic peptide
EPKLGSLVV

SEQ ID NO: 10418 - protein, 9 aa, synthetic construct
  REGION 1..9: note = Description of Artificial Sequence: Synthetic peptide
EQWNLVIGF

SEQ ID NO: 10419 - protein, 9 aa, synthetic construct
  REGION 1..9: note = Description of Artificial Sequence: Synthetic peptide
EVTPSGTWL

SEQ ID NO: 10420 - protein, 9 aa, synthetic construct
  REGION 1..9: note = Description of Artificial Sequence: Synthetic peptide
EYPIIGDEL

SEQ ID NO: 10421 - protein, 9 aa, synthetic construct
  REGION 1..9: note = Description of Artificial Sequence: Synthetic peptide
FACVVADAV

SEQ ID NO: 10422 - protein, 9 aa, synthetic construct
  REGION 1..9: note = Description of Artificial Sequence: Synthetic peptide
FAFACPDGV

SEQ ID NO: 10423 - protein, 8 aa, synthetic construct
  REGION 1..8: note = Description of Artificial Sequence: Synthetic peptide
FANKHADF

SEQ ID NO: 10424 - protein, 8 aa, synthetic construct
  REGION 1..8: note = Description of Artificial Sequence: Synthetic peptide
FASEAARV

SEQ ID NO: 10425 - protein, 8 aa, synthetic construct
  REGION 1..8: note = Description of Artificial Sequence: Synthetic peptide
FAVHFISN

SEQ ID NO: 10426 - protein, 10 aa, synthetic construct
  REGION 1..10: note = Description of Artificial Sequence: Synthetic peptide
FAVHFISNSW

SEQ ID NO: 10427 - protein, 8 aa, synthetic construct
  REGION 1..8: note = Description of Artificial Sequence: Synthetic peptide
FAWWTAFV

SEQ ID NO: 10428 - protein, 9 aa, synthetic construct
  REGION 1..9: note = Description of Artificial Sequence: Synthetic peptide
FAWWTAFVT

SEQ ID NO: 10429 - protein, 9 aa, synthetic construct
  REGION 1..9: note = Description of Artificial Sequence: Synthetic peptide
FFASFYYVW

SEQ ID NO: 10430 - protein, 9 aa, synthetic construct
  REGION 1..9: note = Description of Artificial Sequence: Synthetic peptide
FFFLYENAF

SEQ ID NO: 10431 - protein, 9 aa, synthetic construct
  REGION 1..9: note = Description of Artificial Sequence: Synthetic peptide
FIDTKRGVY

SEQ ID NO: 10432 - protein, 8 aa, synthetic construct
  REGION 1..8: note = Description of Artificial Sequence: Synthetic peptide
FIQQKLAL

SEQ ID NO: 10433 - protein, 9 aa, synthetic construct
  REGION 1..9: note = Description of Artificial Sequence: Synthetic peptide
FITESKPSV

SEQ ID NO: 10434 - protein, 9 aa, synthetic construct
  REGION 1..9: note = Description of Artificial Sequence: Synthetic peptide
FLARGIVFM

SEQ ID NO: 10435 - protein, 9 aa, synthetic construct
  REGION 1..9: note = Description of Artificial Sequence: Synthetic peptide
FLGRYMSAL

SEQ ID NO: 10436 - protein, 8 aa, synthetic construct
  REGION 1..8: note = Description of Artificial Sequence: Synthetic peptide
FLPGVYSV

SEQ ID NO: 10437 - protein, 9 aa, synthetic construct
  REGION 1..9: note = Description of Artificial Sequence: Synthetic peptide
FPQSAPHGV

SEQ ID NO: 10438 - protein, 11 aa, synthetic construct
  REGION 1..11: note = Description of Artificial Sequence: Synthetic peptide
FPQSAPHGVVF

SEQ ID NO: 10439 - protein, 9 aa, synthetic construct
  REGION 1..9: note = Description of Artificial Sequence: Synthetic peptide
FTIGTVTLK

SEQ ID NO: 10440 - protein, 9 aa, synthetic construct
  REGION 1..9: note = Description of Artificial Sequence: Synthetic peptide
FTTVDNINL

SEQ ID NO: 10441 - protein, 9 aa, synthetic construct
  REGION 1..9: note = Description of Artificial Sequence: Synthetic peptide
FVDDIVKTD

SEQ ID NO: 10442 - protein, 9 aa, synthetic construct
  REGION 1..9: note = Description of Artificial Sequence: Synthetic peptide
FVDSDVETK

SEQ ID NO: 10443 - protein, 10 aa, synthetic construct
  REGION 1..10: note = Description of Artificial Sequence: Synthetic peptide
FVFLVLLPLV

SEQ ID NO: 10444 - protein, 8 aa, synthetic construct
  REGION 1..8: note = Description of Artificial Sequence: Synthetic peptide
FYLCFLAF

SEQ ID NO: 10445 - protein, 8 aa, synthetic construct
  REGION 1..8: note = Description of Artificial Sequence: Synthetic peptide
GAMDTTSY

SEQ ID NO: 10446 - protein, 8 aa, synthetic construct
  REGION 1..8: note = Description of Artificial Sequence: Synthetic peptide
GETLGVLV

SEQ ID NO: 10447 - protein, 9 aa, synthetic construct
  REGION 1..9: note = Description of Artificial Sequence: Synthetic peptide
GETLGVLVP

SEQ ID NO: 10448 - protein, 9 aa, synthetic construct
  REGION 1..9: note = Description of Artificial Sequence: Synthetic peptide
GEVPVSIIN

SEQ ID NO: 10449 - protein, 9 aa, synthetic construct
  REGION 1..9: note = Description of Artificial Sequence: Synthetic peptide
GLEAPFLYL

SEQ ID NO: 10450 - protein, 9 aa, synthetic construct
  REGION 1..9: note = Description of Artificial Sequence: Synthetic peptide
GLLPPKNSI

SEQ ID NO: 10451 - protein, 8 aa, synthetic construct
  REGION 1..8: note = Description of Artificial Sequence: Synthetic peptide
GSKSPIQY

SEQ ID NO: 10452 - protein, 9 aa, synthetic construct
  REGION 1..9: note = Description of Artificial Sequence: Synthetic peptide
GSLPINVIV

SEQ ID NO: 10453 - protein, 9 aa, synthetic construct
  REGION 1..9: note = Description of Artificial Sequence: Synthetic peptide
GVDIAANTV

SEQ ID NO: 10454 - protein, 8 aa, synthetic construct
  REGION 1..8: note = Description of Artificial Sequence: Synthetic peptide
GVKDCVVL

SEQ ID NO: 10455 - protein, 10 aa, synthetic construct
  REGION 1..10: note = Description of Artificial Sequence: Synthetic peptide
GYQPYRVVVL

SEQ ID NO: 10456 - protein, 9 aa, synthetic construct
  REGION 1..9: note = Description of Artificial Sequence: Synthetic peptide
HEHEIAWYT

SEQ ID NO: 10457 - protein, 8 aa, synthetic construct
  REGION 1..8: note = Description of Artificial Sequence: Synthetic peptide
HHWLLLTI

SEQ ID NO: 10458 - protein, 9 aa, synthetic construct
  REGION 1..9: note = Description of Artificial Sequence: Synthetic peptide
HPTQAPTHL

SEQ ID NO: 10459 - protein, 10 aa, synthetic construct
  REGION 1..10: note = Description of Artificial Sequence: Synthetic peptide
HSYGADLKSF

SEQ ID NO: 10460 - protein, 10 aa, synthetic construct
  REGION 1..10: note = Description of Artificial Sequence: Synthetic peptide
HTTDPSFLGR

SEQ ID NO: 10461 - protein, 10 aa, synthetic construct
  REGION 1..10: note = Description of Artificial Sequence: Synthetic peptide
HVGEIPVAYR

SEQ ID NO: 10462 - protein, 8 aa, synthetic construct
  REGION 1..8: note = Description of Artificial Sequence: Synthetic peptide
IAIAMACL

SEQ ID NO: 10463 - protein, 8 aa, synthetic construct
  REGION 1..8: note = Description of Artificial Sequence: Synthetic peptide
IAIVMVTI

SEQ ID NO: 10464 - protein, 9 aa, synthetic construct
  REGION 1..9: note = Description of Artificial Sequence: Synthetic peptide
IAKKPTETI

SEQ ID NO: 10465 - protein, 8 aa, synthetic construct
  REGION 1..8: note = Description of Artificial Sequence: Synthetic peptide
IATVREVL

SEQ ID NO: 10466 - protein, 8 aa, synthetic construct
  REGION 1..8: note = Description of Artificial Sequence: Synthetic peptide
IAWNSNNL

SEQ ID NO: 10467 - protein, 9 aa, synthetic construct
  REGION 1..9: note = Description of Artificial Sequence: Synthetic peptide
IEVNSFSGY

SEQ ID NO: 10468 - protein, 10 aa, synthetic construct
  REGION 1..10: note = Description of Artificial Sequence: Synthetic peptide
IEYPIIGDEL

SEQ ID NO: 10469 - protein, 8 aa, synthetic construct
  REGION 1..8: note = Description of Artificial Sequence: Synthetic peptide
IFLEGETL

SEQ ID NO: 10470 - protein, 8 aa, synthetic construct
  REGION 1..8: note = Description of Artificial Sequence: Synthetic peptide
IIIGGAKL

SEQ ID NO: 10471 - protein, 9 aa, synthetic construct
  REGION 1..9: note = Description of Artificial Sequence: Synthetic peptide
IINLIIKNL

SEQ ID NO: 10472 - protein, 9 aa, synthetic construct
  REGION 1..9: note = Description of Artificial Sequence: Synthetic peptide
IPTNFTISV

SEQ ID NO: 10473 - protein, 9 aa, synthetic construct
  REGION 1..9: note = Description of Artificial Sequence: Synthetic peptide
IPVAYRKVL

SEQ ID NO: 10474 - protein, 9 aa, synthetic construct
  REGION 1..9: note = Description of Artificial Sequence: Synthetic peptide
ISDYDYYRY

SEQ ID NO: 10475 - protein, 9 aa, synthetic construct
  REGION 1..9: note = Description of Artificial Sequence: Synthetic peptide
ITLATCELY

SEQ ID NO: 10476 - protein, 9 aa, synthetic construct
  REGION 1..9: note = Description of Artificial Sequence: Synthetic peptide
ITREVGFVV

SEQ ID NO: 10477 - protein, 9 aa, synthetic construct
  REGION 1..9: note = Description of Artificial Sequence: Synthetic peptide
IVDTVSALV

SEQ ID NO: 10478 - protein, 9 aa, synthetic construct
  REGION 1..9: note = Description of Artificial Sequence: Synthetic peptide
KAGGTTEML

SEQ ID NO: 10479 - protein, 9 aa, synthetic construct
  REGION 1..9: note = Description of Artificial Sequence: Synthetic peptide
KCSAYTVEL

SEQ ID NO: 10480 - protein, 8 aa, synthetic construct
  REGION 1..8: note = Description of Artificial Sequence: Synthetic peptide
KEGSSVEL

SEQ ID NO: 10481 - protein, 9 aa, synthetic construct
  REGION 1..9: note = Description of Artificial Sequence: Synthetic peptide
KEIKESVQT

SEQ ID NO: 10482 - protein, 9 aa, synthetic construct
  REGION 1..9: note = Description of Artificial Sequence: Synthetic peptide
KESPFELED

SEQ ID NO: 10483 - protein, 10 aa, synthetic construct
  REGION 1..10: note = Description of Artificial Sequence: Synthetic peptide
KFLTENLLLY

SEQ ID NO: 10484 - protein, 9 aa, synthetic construct
  REGION 1..9: note = Description of Artificial Sequence: Synthetic peptide
KKNNLPFKL

SEQ ID NO: 10485 - protein, 8 aa, synthetic construct
  REGION 1..8: note = Description of Artificial Sequence: Synthetic peptide
KLFAAETL

SEQ ID NO: 10486 - protein, 10 aa, synthetic construct
  REGION 1..10: note = Description of Artificial Sequence: Synthetic peptide
KLFDRYFKYW

SEQ ID NO: 10487 - protein, 9 aa, synthetic construct
  REGION 1..9: note = Description of Artificial Sequence: Synthetic peptide
KLMGHFAWW

SEQ ID NO: 10488 - protein, 9 aa, synthetic construct
  REGION 1..9: note = Description of Artificial Sequence: Synthetic peptide
KNTCDGTTF

SEQ ID NO: 10489 - protein, 9 aa, synthetic construct
  REGION 1..9: note = Description of Artificial Sequence: Synthetic peptide
KPREQIDGY

SEQ ID NO: 10490 - protein, 9 aa, synthetic construct
  REGION 1..9: note = Description of Artificial Sequence: Synthetic peptide
KRGDKSVYY

SEQ ID NO: 10491 - protein, 9 aa, synthetic construct
  REGION 1..9: note = Description of Artificial Sequence: Synthetic peptide
KSREETGLL

SEQ ID NO: 10492 - protein, 9 aa, synthetic construct
  REGION 1..9: note = Description of Artificial Sequence: Synthetic peptide
KTFPPTEPK

SEQ ID NO: 10493 - protein, 9 aa, synthetic construct
  REGION 1..9: note = Description of Artificial Sequence: Synthetic peptide
KTSVDCTMY

SEQ ID NO: 10494 - protein, 9 aa, synthetic construct
  REGION 1..9: note = Description of Artificial Sequence: Synthetic peptide
KVQIGEYTF

SEQ ID NO: 10495 - protein, 8 aa, synthetic construct
  REGION 1..8: note = Description of Artificial Sequence: Synthetic peptide
KVYYGNAL

SEQ ID NO: 10496 - protein, 9 aa, synthetic construct
  REGION 1..9: note = Description of Artificial Sequence: Synthetic peptide
KYDFTEERL

SEQ ID NO: 10497 - protein, 9 aa, synthetic construct
  REGION 1..9: note = Description of Artificial Sequence: Synthetic peptide
LADKFPVLH

SEQ ID NO: 10498 - protein, 9 aa, synthetic construct
  REGION 1..9: note = Description of Artificial Sequence: Synthetic peptide
LAHIQWMVM

SEQ ID NO: 10499 - protein, 9 aa, synthetic construct
  REGION 1..9: note = Description of Artificial Sequence: Synthetic peptide
LASHMYCSF

SEQ ID NO: 10500 - protein, 9 aa, synthetic construct
  REGION 1..9: note = Description of Artificial Sequence: Synthetic peptide
LAVFDKNLY

SEQ ID NO: 10501 - protein, 9 aa, synthetic construct
  REGION 1..9: note = Description of Artificial Sequence: Synthetic peptide
LAWLYAAVI

SEQ ID NO: 10502 - protein, 9 aa, synthetic construct
  REGION 1..9: note = Description of Artificial Sequence: Synthetic peptide
LCLTPVYSF

SEQ ID NO: 10503 - protein, 9 aa, synthetic construct
  REGION 1..9: note = Description of Artificial Sequence: Synthetic peptide
LEILQKEKV

SEQ ID NO: 10504 - protein, 8 aa, synthetic construct
  REGION 1..8: note = Description of Artificial Sequence: Synthetic peptide
LEIPRRNV

SEQ ID NO: 10505 - protein, 9 aa, synthetic construct
  REGION 1..9: note = Description of Artificial Sequence: Synthetic peptide
LESELVIGA

SEQ ID NO: 10506 - protein, 8 aa, synthetic construct
  REGION 1..8: note = Description of Artificial Sequence: Synthetic peptide
LFLAFVVF

SEQ ID NO: 10507 - protein, 9 aa, synthetic construct
  REGION 1..9: note = Description of Artificial Sequence: Synthetic peptide
LHKPIVWHV

SEQ ID NO: 10508 - protein, 8 aa, synthetic construct
  REGION 1..8: note = Description of Artificial Sequence: Synthetic peptide
LHPDSATL

SEQ ID NO: 10509 - protein, 8 aa, synthetic construct
  REGION 1..8: note = Description of Artificial Sequence: Synthetic peptide
LLDDFVEI

SEQ ID NO: 10510 - protein, 9 aa, synthetic construct
  REGION 1..9: note = Description of Artificial Sequence: Synthetic peptide
LLDKRTTCF

SEQ ID NO: 10511 - protein, 9 aa, synthetic construct
  REGION 1..9: note = Description of Artificial Sequence: Synthetic peptide
LLNKHIDAY

SEQ ID NO: 10512 - protein, 9 aa, synthetic construct
  REGION 1..9: note = Description of Artificial Sequence: Synthetic peptide
LLTPLGIDL

SEQ ID NO: 10513 - protein, 9 aa, synthetic construct
  REGION 1..9: note = Description of Artificial Sequence: Synthetic peptide
LLYDANYFL

SEQ ID NO: 10514 - protein, 9 aa, synthetic construct
  REGION 1..9: note = Description of Artificial Sequence: Synthetic peptide
LPFAMGIIA

SEQ ID NO: 10515 - protein, 9 aa, synthetic construct
  REGION 1..9: note = Description of Artificial Sequence: Synthetic peptide
LPFGWLIVG

SEQ ID NO: 10516 - protein, 10 aa, synthetic construct
  REGION 1..10: note = Description of Artificial Sequence: Synthetic peptide
LPFGWLIVGV

SEQ ID NO: 10517 - protein, 10 aa, synthetic construct
  REGION 1..10: note = Description of Artificial Sequence: Synthetic peptide
LPIGINITRF

SEQ ID NO: 10518 - protein, 9 aa, synthetic construct
  REGION 1..9: note = Description of Artificial Sequence: Synthetic peptide
LPTGTLLVD

SEQ ID NO: 10519 - protein, 9 aa, synthetic construct
  REGION 1..9: note = Description of Artificial Sequence: Synthetic peptide
LRANSAVKL

SEQ ID NO: 10520 - protein, 9 aa, synthetic construct
  REGION 1..9: note = Description of Artificial Sequence: Synthetic peptide
LRPDTRYVL

SEQ ID NO: 10521 - protein, 8 aa, synthetic construct
  REGION 1..8: note = Description of Artificial Sequence: Synthetic peptide
LSDRELHL

SEQ ID NO: 10522 - protein, 9 aa, synthetic construct
  REGION 1..9: note = Description of Artificial Sequence: Synthetic peptide
LSLPVLQVR

SEQ ID NO: 10523 - protein, 9 aa, synthetic construct
  REGION 1..9: note = Description of Artificial Sequence: Synthetic peptide
LVIGAVILR

SEQ ID NO: 10524 - protein, 10 aa, synthetic construct
  REGION 1..10: note = Description of Artificial Sequence: Synthetic peptide
LVSDIDITFL

SEQ ID NO: 10525 - protein, 8 aa, synthetic construct
  REGION 1..8: note = Description of Artificial Sequence: Synthetic peptide
LYYPSARI

SEQ ID NO: 10526 - protein, 10 aa, synthetic construct
  REGION 1..10: note = Description of Artificial Sequence: Synthetic peptide
LYYPSARIVY

SEQ ID NO: 10527 - protein, 10 aa, synthetic construct
  REGION 1..10: note = Description of Artificial Sequence: Synthetic peptide
MAAYVDNSSL

SEQ ID NO: 10528 - protein, 10 aa, synthetic construct
  REGION 1..10: note = Description of Artificial Sequence: Synthetic peptide
MADSNGTITV

SEQ ID NO: 10529 - protein, 9 aa, synthetic construct
  REGION 1..9: note = Description of Artificial Sequence: Synthetic peptide
MEVTPSGTW

SEQ ID NO: 10530 - protein, 9 aa, synthetic construct
  REGION 1..9: note = Description of Artificial Sequence: Synthetic peptide
MFVKHKHAF

SEQ ID NO: 10531 - protein, 9 aa, synthetic construct
  REGION 1..9: note = Description of Artificial Sequence: Synthetic peptide
MHANYIFWR

SEQ ID NO: 10532 - protein, 9 aa, synthetic construct
  REGION 1..9: note = Description of Artificial Sequence: Synthetic peptide
MLDMYSVML

SEQ ID NO: 10533 - protein, 9 aa, synthetic construct
  REGION 1..9: note = Description of Artificial Sequence: Synthetic peptide
MLVYCFLGY

SEQ ID NO: 10534 - protein, 9 aa, synthetic construct
  REGION 1..9: note = Description of Artificial Sequence: Synthetic peptide
MSNLGMPSY

SEQ ID NO: 10535 - protein, 9 aa, synthetic construct
  REGION 1..9: note = Description of Artificial Sequence: Synthetic peptide
MVMCGGSLY

SEQ ID NO: 10536 - protein, 9 aa, synthetic construct
  REGION 1..9: note = Description of Artificial Sequence: Synthetic peptide
MVTNNTFTL

SEQ ID NO: 10537 - protein, 10 aa, synthetic construct
  REGION 1..10: note = Description of Artificial Sequence: Synthetic peptide
NAGIVGVLTL

SEQ ID NO: 10538 - protein, 8 aa, synthetic construct
  REGION 1..8: note = Description of Artificial Sequence: Synthetic peptide
NAQALNTL

SEQ ID NO: 10539 - protein, 9 aa, synthetic construct
  REGION 1..9: note = Description of Artificial Sequence: Synthetic peptide
NATRFASVY

SEQ ID NO: 10540 - protein, 8 aa, synthetic construct
  REGION 1..8: note = Description of Artificial Sequence: Synthetic peptide
NCYLATAL

SEQ ID NO: 10541 - protein, 9 aa, synthetic construct
  REGION 1..9: note = Description of Artificial Sequence: Synthetic peptide
NFGAISSVL

SEQ ID NO: 10542 - protein, 9 aa, synthetic construct
  REGION 1..9: note = Description of Artificial Sequence: Synthetic peptide
NFNQHEVLL

SEQ ID NO: 10543 - protein, 9 aa, synthetic construct
  REGION 1..9: note = Description of Artificial Sequence: Synthetic peptide
NLLLLFVTV

SEQ ID NO: 10544 - protein, 9 aa, synthetic construct
  REGION 1..9: note = Description of Artificial Sequence: Synthetic peptide
NLVAVPTGY

SEQ ID NO: 10545 - protein, 9 aa, synthetic construct
  REGION 1..9: note = Description of Artificial Sequence: Synthetic peptide
NPAWRKAVF

SEQ ID NO: 10546 - protein, 10 aa, synthetic construct
  REGION 1..10: note = Description of Artificial Sequence: Synthetic peptide
NTCDGTTFTY

SEQ ID NO: 10547 - protein, 9 aa, synthetic construct
  REGION 1..9: note = Description of Artificial Sequence: Synthetic peptide
NTVKSVGKF

SEQ ID NO: 10548 - protein, 9 aa, synthetic construct
  REGION 1..9: note = Description of Artificial Sequence: Synthetic peptide
NVVIKVCEF

SEQ ID NO: 10549 - protein, 9 aa, synthetic construct
  REGION 1..9: note = Description of Artificial Sequence: Synthetic peptide
NVVTTKIAL

SEQ ID NO: 10550 - protein, 9 aa, synthetic construct
  REGION 1..9: note = Description of Artificial Sequence: Synthetic peptide
NYAKPFLNK

SEQ ID NO: 10551 - protein, 9 aa, synthetic construct
  REGION 1..9: note = Description of Artificial Sequence: Synthetic peptide
PSKPSKRSF

SEQ ID NO: 10552 - protein, 9 aa, synthetic construct
  REGION 1..9: note = Description of Artificial Sequence: Synthetic peptide
PYRVVVLSF

SEQ ID NO: 10553 - protein, 8 aa, synthetic construct
  REGION 1..8: note = Description of Artificial Sequence: Synthetic peptide
QAVGACVL

SEQ ID NO: 10554 - protein, 9 aa, synthetic construct
  REGION 1..9: note = Description of Artificial Sequence: Synthetic peptide
QEFKPRSQM

SEQ ID NO: 10555 - protein, 9 aa, synthetic construct
  REGION 1..9: note = Description of Artificial Sequence: Synthetic peptide
QEYADVFHL

SEQ ID NO: 10556 - protein, 9 aa, synthetic construct
  REGION 1..9: note = Description of Artificial Sequence: Synthetic peptide
QFAPSASAF

SEQ ID NO: 10557 - protein, 9 aa, synthetic construct
  REGION 1..9: note = Description of Artificial Sequence: Synthetic peptide
QLSLPVLQV

SEQ ID NO: 10558 - protein, 8 aa, synthetic construct
  REGION 1..8: note = Description of Artificial Sequence: Synthetic peptide
QSADAQSF

SEQ ID NO: 10559 - protein, 8 aa, synthetic construct
  REGION 1..8: note = Description of Artificial Sequence: Synthetic peptide
QSRNLQEF

SEQ ID NO: 10560 - protein, 9 aa, synthetic construct
  REGION 1..9: note = Description of Artificial Sequence: Synthetic peptide
QTFFKLVNK

SEQ ID NO: 10561 - protein, 9 aa, synthetic construct
  REGION 1..9: note = Description of Artificial Sequence: Synthetic peptide
QWSLFFFLY

SEQ ID NO: 10562 - protein, 9 aa, synthetic construct
  REGION 1..9: note = Description of Artificial Sequence: Synthetic peptide
RAKVGILCI

SEQ ID NO: 10563 - protein, 9 aa, synthetic construct
  REGION 1..9: note = Description of Artificial Sequence: Synthetic peptide
RELGVVHNQ

SEQ ID NO: 10564 - protein, 8 aa, synthetic construct
  REGION 1..8: note = Description of Artificial Sequence: Synthetic peptide
REVGFVVP

SEQ ID NO: 10565 - protein, 9 aa, synthetic construct
  REGION 1..9: note = Description of Artificial Sequence: Synthetic peptide
RFDNPVLPF

SEQ ID NO: 10566 - protein, 9 aa, synthetic construct
  REGION 1..9: note = Description of Artificial Sequence: Synthetic peptide
RFLYIIKLI

SEQ ID NO: 10567 - protein, 8 aa, synthetic construct
  REGION 1..8: note = Description of Artificial Sequence: Synthetic peptide
RLQSLQTY

SEQ ID NO: 10568 - protein, 9 aa, synthetic construct
  REGION 1..9: note = Description of Artificial Sequence: Synthetic peptide
RLRAKHYVY

SEQ ID NO: 10569 - protein, 9 aa, synthetic construct
  REGION 1..9: note = Description of Artificial Sequence: Synthetic peptide
RLYECLYRN

SEQ ID NO: 10570 - protein, 9 aa, synthetic construct
  REGION 1..9: note = Description of Artificial Sequence: Synthetic peptide
RNIKPVPEV

SEQ ID NO: 10571 - protein, 8 aa, synthetic construct
  REGION 1..8: note = Description of Artificial Sequence: Synthetic peptide
RTILGSAL

SEQ ID NO: 10572 - protein, 11 aa, synthetic construct
  REGION 1..11: note = Description of Artificial Sequence: Synthetic peptide
RVFSAVGNICY

SEQ ID NO: 10573 - protein, 9 aa, synthetic construct
  REGION 1..9: note = Description of Artificial Sequence: Synthetic peptide
RVVRSIFSR

SEQ ID NO: 10574 - protein, 9 aa, synthetic construct
  REGION 1..9: note = Description of Artificial Sequence: Synthetic peptide
RVYANLGER

SEQ ID NO: 10575 - protein, 8 aa, synthetic construct
  REGION 1..8: note = Description of Artificial Sequence: Synthetic peptide
RYWEPEFY

SEQ ID NO: 10576 - protein, 9 aa, synthetic construct
  REGION 1..9: note = Description of Artificial Sequence: Synthetic peptide
SAFFGMSRI

SEQ ID NO: 10577 - protein, 9 aa, synthetic construct
  REGION 1..9: note = Description of Artificial Sequence: Synthetic peptide
SASKIITLK

SEQ ID NO: 10578 - protein, 9 aa, synthetic construct
  REGION 1..9: note = Description of Artificial Sequence: Synthetic peptide
SEARQHLKD

SEQ ID NO: 10579 - protein, 8 aa, synthetic construct
  REGION 1..8: note = Description of Artificial Sequence: Synthetic peptide
SEDKRAKV

SEQ ID NO: 10580 - protein, 9 aa, synthetic construct
  REGION 1..9: note = Description of Artificial Sequence: Synthetic peptide
SEFRVYSSA

SEQ ID NO: 10581 - protein, 9 aa, synthetic construct
  REGION 1..9: note = Description of Artificial Sequence: Synthetic peptide
SEKQVEQKI

SEQ ID NO: 10582 - protein, 8 aa, synthetic construct
  REGION 1..8: note = Description of Artificial Sequence: Synthetic peptide
SELVIGAV

SEQ ID NO: 10583 - protein, 10 aa, synthetic construct
  REGION 1..10: note = Description of Artificial Sequence: Synthetic peptide
SELVIGAVIL

SEQ ID NO: 10584 - protein, 9 aa, synthetic construct
  REGION 1..9: note = Description of Artificial Sequence: Synthetic peptide
SEYKGPITD

SEQ ID NO: 10585 - protein, 9 aa, synthetic construct
  REGION 1..9: note = Description of Artificial Sequence: Synthetic peptide
SFKKGAKLL

SEQ ID NO: 10586 - protein, 9 aa, synthetic construct
  REGION 1..9: note = Description of Artificial Sequence: Synthetic peptide
SHVVAFNTL

SEQ ID NO: 10587 - protein, 9 aa, synthetic construct
  REGION 1..9: note = Description of Artificial Sequence: Synthetic peptide
SLLSKGRLI

SEQ ID NO: 10588 - protein, 9 aa, synthetic construct
  REGION 1..9: note = Description of Artificial Sequence: Synthetic peptide
SLRPDTRYV

SEQ ID NO: 10589 - protein, 9 aa, synthetic construct
  REGION 1..9: note = Description of Artificial Sequence: Synthetic peptide
SPDDQIGYY

SEQ ID NO: 10590 - protein, 9 aa, synthetic construct
  REGION 1..9: note = Description of Artificial Sequence: Synthetic peptide
SPSGVYQCA

SEQ ID NO: 10591 - protein, 9 aa, synthetic construct
  REGION 1..9: note = Description of Artificial Sequence: Synthetic peptide
SQSIIAYTM

SEQ ID NO: 10592 - protein, 9 aa, synthetic construct
  REGION 1..9: note = Description of Artificial Sequence: Synthetic peptide
SRLSFKELL

SEQ ID NO: 10593 - protein, 9 aa, synthetic construct
  REGION 1..9: note = Description of Artificial Sequence: Synthetic peptide
SRVLGLKTL

SEQ ID NO: 10594 - protein, 9 aa, synthetic construct
  REGION 1..9: note = Description of Artificial Sequence: Synthetic peptide
STTTNIVTR

SEQ ID NO: 10595 - protein, 10 aa, synthetic construct
  REGION 1..10: note = Description of Artificial Sequence: Synthetic peptide
SVIYLYLTFY

SEQ ID NO: 10596 - protein, 9 aa, synthetic construct
  REGION 1..9: note = Description of Artificial Sequence: Synthetic peptide
SVKGLQPSV

SEQ ID NO: 10597 - protein, 8 aa, synthetic construct
  REGION 1..8: note = Description of Artificial Sequence: Synthetic peptide
SVRVVTTF

SEQ ID NO: 10598 - protein, 9 aa, synthetic construct
  REGION 1..9: note = Description of Artificial Sequence: Synthetic peptide
SVTTEILPV

SEQ ID NO: 10599 - protein, 9 aa, synthetic construct
  REGION 1..9: note = Description of Artificial Sequence: Synthetic peptide
SVYAWNRKR

SEQ ID NO: 10600 - protein, 10 aa, synthetic construct
  REGION 1..10: note = Description of Artificial Sequence: Synthetic peptide
SWMESEFRVY

SEQ ID NO: 10601 - protein, 9 aa, synthetic construct
  REGION 1..9: note = Description of Artificial Sequence: Synthetic peptide
SWVMRIMTW

SEQ ID NO: 10602 - protein, 8 aa, synthetic construct
  REGION 1..8: note = Description of Artificial Sequence: Synthetic peptide
SYFAVHFI

SEQ ID NO: 10603 - protein, 10 aa, synthetic construct
  REGION 1..10: note = Description of Artificial Sequence: Synthetic peptide
SYFVVKRHTF

SEQ ID NO: 10604 - protein, 9 aa, synthetic construct
  REGION 1..9: note = Description of Artificial Sequence: Synthetic peptide
TEIDPKLDN

SEQ ID NO: 10605 - protein, 8 aa, synthetic construct
  REGION 1..8: note = Description of Artificial Sequence: Synthetic peptide
TEMLAKAL

SEQ ID NO: 10606 - protein, 9 aa, synthetic construct
  REGION 1..9: note = Description of Artificial Sequence: Synthetic peptide
TETDLTKGP

SEQ ID NO: 10607 - protein, 9 aa, synthetic construct
  REGION 1..9: note = Description of Artificial Sequence: Synthetic peptide
TEVLTEEVV

SEQ ID NO: 10608 - protein, 9 aa, synthetic construct
  REGION 1..9: note = Description of Artificial Sequence: Synthetic peptide
TGVEHVTFF

SEQ ID NO: 10609 - protein, 9 aa, synthetic construct
  REGION 1..9: note = Description of Artificial Sequence: Synthetic peptide
THLSVDTKF

SEQ ID NO: 10610 - protein, 9 aa, synthetic construct
  REGION 1..9: note = Description of Artificial Sequence: Synthetic peptide
TIKGTHHWL

SEQ ID NO: 10611 - protein, 9 aa, synthetic construct
  REGION 1..9: note = Description of Artificial Sequence: Synthetic peptide
TIQITISSF

SEQ ID NO: 10612 - protein, 9 aa, synthetic construct
  REGION 1..9: note = Description of Artificial Sequence: Synthetic peptide
TLLALHRSY

SEQ ID NO: 10613 - protein, 8 aa, synthetic construct
  REGION 1..8: note = Description of Artificial Sequence: Synthetic peptide
TLPVNVAF

SEQ ID NO: 10614 - protein, 9 aa, synthetic construct
  REGION 1..9: note = Description of Artificial Sequence: Synthetic peptide
TNGDFLHFL

SEQ ID NO: 10615 - protein, 9 aa, synthetic construct
  REGION 1..9: note = Description of Artificial Sequence: Synthetic peptide
TNLPLQLGF

SEQ ID NO: 10616 - protein, 9 aa, synthetic construct
  REGION 1..9: note = Description of Artificial Sequence: Synthetic peptide
TPAFDKSAF

SEQ ID NO: 10617 - protein, 9 aa, synthetic construct
  REGION 1..9: note = Description of Artificial Sequence: Synthetic peptide
TPGSGVPVV

SEQ ID NO: 10618 - protein, 10 aa, synthetic construct
  REGION 1..10: note = Description of Artificial Sequence: Synthetic peptide
TQLGIEFLKR

SEQ ID NO: 10619 - protein, 9 aa, synthetic construct
  REGION 1..9: note = Description of Artificial Sequence: Synthetic peptide
TQSRNLQEF

SEQ ID NO: 10620 - protein, 9 aa, synthetic construct
  REGION 1..9: note = Description of Artificial Sequence: Synthetic peptide
TRFASVYAW

SEQ ID NO: 10621 - protein, 9 aa, synthetic construct
  REGION 1..9: note = Description of Artificial Sequence: Synthetic peptide
TRFFYVLGL

SEQ ID NO: 10622 - protein, 9 aa, synthetic construct
  REGION 1..9: note = Description of Artificial Sequence: Synthetic peptide
TSFGPLVRK

SEQ ID NO: 10623 - protein, 9 aa, synthetic construct
  REGION 1..9: note = Description of Artificial Sequence: Synthetic peptide
TSKTTVASL

SEQ ID NO: 10624 - protein, 9 aa, synthetic construct
  REGION 1..9: note = Description of Artificial Sequence: Synthetic peptide
TSLSGFKLK

SEQ ID NO: 10625 - protein, 9 aa, synthetic construct
  REGION 1..9: note = Description of Artificial Sequence: Synthetic peptide
TTAAKLMVV

SEQ ID NO: 10626 - protein, 9 aa, synthetic construct
  REGION 1..9: note = Description of Artificial Sequence: Synthetic peptide
TTADIVVFD

SEQ ID NO: 10627 - protein, 9 aa, synthetic construct
  REGION 1..9: note = Description of Artificial Sequence: Synthetic peptide
TTIKPVTYK

SEQ ID NO: 10628 - protein, 11 aa, synthetic construct
  REGION 1..11: note = Description of Artificial Sequence: Synthetic peptide
TTYPGQGLNGY

SEQ ID NO: 10629 - protein, 10 aa, synthetic construct
  REGION 1..10: note = Description of Artificial Sequence: Synthetic peptide
TVATSRTLSY

SEQ ID NO: 10630 - protein, 9 aa, synthetic construct
  REGION 1..9: note = Description of Artificial Sequence: Synthetic peptide
TVIEVQGYK

SEQ ID NO: 10631 - protein, 9 aa, synthetic construct
  REGION 1..9: note = Description of Artificial Sequence: Synthetic peptide
TVKPGNFNK

SEQ ID NO: 10632 - protein, 8 aa, synthetic construct
  REGION 1..8: note = Description of Artificial Sequence: Synthetic peptide
TYTGAIKL

SEQ ID NO: 10633 - protein, 8 aa, synthetic construct
  REGION 1..8: note = Description of Artificial Sequence: Synthetic peptide
VAIDYKHY

SEQ ID NO: 10634 - protein, 9 aa, synthetic construct
  REGION 1..9: note = Description of Artificial Sequence: Synthetic peptide
VANGDSEVV

SEQ ID NO: 10635 - protein, 9 aa, synthetic construct
  REGION 1..9: note = Description of Artificial Sequence: Synthetic peptide
VAVPTGYVD

SEQ ID NO: 10636 - protein, 10 aa, synthetic construct
  REGION 1..10: note = Description of Artificial Sequence: Synthetic peptide
VELGTEVNEF

SEQ ID NO: 10637 - protein, 10 aa, synthetic construct
  REGION 1..10: note = Description of Artificial Sequence: Synthetic peptide
VENPDILRVY

SEQ ID NO: 10638 - protein, 9 aa, synthetic construct
  REGION 1..9: note = Description of Artificial Sequence: Synthetic peptide
VEVQPQLEM

SEQ ID NO: 10639 - protein, 9 aa, synthetic construct
  REGION 1..9: note = Description of Artificial Sequence: Synthetic peptide
VFLFVAAIF

SEQ ID NO: 10640 - protein, 10 aa, synthetic construct
  REGION 1..10: note = Description of Artificial Sequence: Synthetic peptide
VFNGVSFSTF

SEQ ID NO: 10641 - protein, 9 aa, synthetic construct
  REGION 1..9: note = Description of Artificial Sequence: Synthetic peptide
VINGDRWFL

SEQ ID NO: 10642 - protein, 8 aa, synthetic construct
  REGION 1..8: note = Description of Artificial Sequence: Synthetic peptide
VIPDYNTY

SEQ ID NO: 10643 - protein, 9 aa, synthetic construct
  REGION 1..9: note = Description of Artificial Sequence: Synthetic peptide
VKNGSIHLY

SEQ ID NO: 10644 - protein, 9 aa, synthetic construct
  REGION 1..9: note = Description of Artificial Sequence: Synthetic peptide
VLSEARQHL

SEQ ID NO: 10645 - protein, 9 aa, synthetic construct
  REGION 1..9: note = Description of Artificial Sequence: Synthetic peptide
VLTEEVVLK

SEQ ID NO: 10646 - protein, 9 aa, synthetic construct
  REGION 1..9: note = Description of Artificial Sequence: Synthetic peptide
VLVPHVGEI

SEQ ID NO: 10647 - protein, 8 aa, synthetic construct
  REGION 1..8: note = Description of Artificial Sequence: Synthetic peptide
VLYNSASF

SEQ ID NO: 10648 - protein, 8 aa, synthetic construct
  REGION 1..8: note = Description of Artificial Sequence: Synthetic peptide
VPANSTVL

SEQ ID NO: 10649 - protein, 9 aa, synthetic construct
  REGION 1..9: note = Description of Artificial Sequence: Synthetic peptide
VPHISRQRL

SEQ ID NO: 10650 - protein, 10 aa, synthetic construct
  REGION 1..10: note = Description of Artificial Sequence: Synthetic peptide
VSLDNVLSTF

SEQ ID NO: 10651 - protein, 8 aa, synthetic construct
  REGION 1..8: note = Description of Artificial Sequence: Synthetic peptide
VTDVTQLY

SEQ ID NO: 10652 - protein, 9 aa, synthetic construct
  REGION 1..9: note = Description of Artificial Sequence: Synthetic peptide
VTFQSAVKR

SEQ ID NO: 10653 - protein, 8 aa, synthetic construct
  REGION 1..8: note = Description of Artificial Sequence: Synthetic peptide
VTIAEILL

SEQ ID NO: 10654 - protein, 11 aa, synthetic construct
  REGION 1..11: note = Description of Artificial Sequence: Synthetic peptide
VVDDPCPIHFY

SEQ ID NO: 10655 - protein, 10 aa, synthetic construct
  REGION 1..10: note = Description of Artificial Sequence: Synthetic peptide
VVFVLWAHGF

SEQ ID NO: 10656 - protein, 8 aa, synthetic construct
  REGION 1..8: note = Description of Artificial Sequence: Synthetic peptide
VVIGTSKF

SEQ ID NO: 10657 - protein, 9 aa, synthetic construct
  REGION 1..9: note = Description of Artificial Sequence: Synthetic peptide
VVRIKIVQM

SEQ ID NO: 10658 - protein, 9 aa, synthetic construct
  REGION 1..9: note = Description of Artificial Sequence: Synthetic peptide
VYEKLKPVL

SEQ ID NO: 10659 - protein, 10 aa, synthetic construct
  REGION 1..10: note = Description of Artificial Sequence: Synthetic peptide
VYYTSNPTTF

SEQ ID NO: 10660 - protein, 8 aa, synthetic construct
  REGION 1..8: note = Description of Artificial Sequence: Synthetic peptide
WADNNCYL

SEQ ID NO: 10661 - protein, 9 aa, synthetic construct
  REGION 1..9: note = Description of Artificial Sequence: Synthetic peptide
WKYPQVNGL

SEQ ID NO: 10662 - protein, 8 aa, synthetic construct
  REGION 1..8: note = Description of Artificial Sequence: Synthetic peptide
WLDDVVYC

SEQ ID NO: 10663 - protein, 8 aa, synthetic construct
  REGION 1..8: note = Description of Artificial Sequence: Synthetic peptide
WLIVGVAL

SEQ ID NO: 10664 - protein, 9 aa, synthetic construct
  REGION 1..9: note = Description of Artificial Sequence: Synthetic peptide
WLPTGTLLV

SEQ ID NO: 10665 - protein, 8 aa, synthetic construct
  REGION 1..8: note = Description of Artificial Sequence: Synthetic peptide
YEKLKPVL

SEQ ID NO: 10666 - protein, 9 aa, synthetic construct
  REGION 1..9: note = Description of Artificial Sequence: Synthetic peptide
YENQKLIAN

SEQ ID NO: 10667 - protein, 8 aa, synthetic construct
  REGION 1..8: note = Description of Artificial Sequence: Synthetic peptide
YFLQSINF

SEQ ID NO: 10668 - protein, 9 aa, synthetic construct
  REGION 1..9: note = Description of Artificial Sequence: Synthetic peptide
YFMRFRRAF

SEQ ID NO: 10669 - protein, 9 aa, synthetic construct
  REGION 1..9: note = Description of Artificial Sequence: Synthetic peptide
YFRLTLGVY

SEQ ID NO: 10670 - protein, 9 aa, synthetic construct
  REGION 1..9: note = Description of Artificial Sequence: Synthetic peptide
YFYTSKTTV

SEQ ID NO: 10671 - protein, 8 aa, synthetic construct
  REGION 1..8: note = Description of Artificial Sequence: Synthetic peptide
YGADLKSF

SEQ ID NO: 10672 - protein, 9 aa, synthetic construct
  REGION 1..9: note = Description of Artificial Sequence: Synthetic peptide
YHTTDPSFL

SEQ ID NO: 10673 - protein, 10 aa, synthetic construct
  REGION 1..10: note = Description of Artificial Sequence: Synthetic peptide
YIKWPWYIWL

SEQ ID NO: 10674 - protein, 9 aa, synthetic construct
  REGION 1..9: note = Description of Artificial Sequence: Synthetic peptide
YLDAYNMMI

SEQ ID NO: 10675 - protein, 9 aa, synthetic construct
  REGION 1..9: note = Description of Artificial Sequence: Synthetic peptide
YLEGSVRVV

SEQ ID NO: 10676 - protein, 8 aa, synthetic construct
  REGION 1..8: note = Description of Artificial Sequence: Synthetic peptide
YMPYFFTL

SEQ ID NO: 10677 - protein, 9 aa, synthetic construct
  REGION 1..9: note = Description of Artificial Sequence: Synthetic peptide
YPVASPNEC

SEQ ID NO: 10678 - protein, 9 aa, synthetic construct
  REGION 1..9: note = Description of Artificial Sequence: Synthetic peptide
YTNSFTRGV

SEQ ID NO: 10679 - protein, 8 aa, synthetic construct
  REGION 1..8: note = Description of Artificial Sequence: Synthetic peptide
YWFFSNYL

SEQ ID NO: 10680 - protein, 9 aa, synthetic construct
  REGION 1..9: note = Description of Artificial Sequence: Synthetic peptide
YYKKDNSYF

SEQ ID NO: 10681 - protein, 9 aa, synthetic construct
  REGION 1..9: note = Description of Artificial Sequence: Synthetic peptide
YYPDKVFRS

SEQ ID NO: 10682 - protein, 9 aa, synthetic construct
  REGION 1..9: note = Description of Artificial Sequence: Synthetic peptide
AAAYYVGYL

SEQ ID NO: 10683 - protein, 9 aa, synthetic construct
  REGION 1..9: note = Description of Artificial Sequence: Synthetic peptide
AALQIPFAM

SEQ ID NO: 10684 - protein, 8 aa, synthetic construct
  REGION 1..8: note = Description of Artificial Sequence: Synthetic peptide
AAYYVGYL

SEQ ID NO: 10685 - protein, 8 aa, synthetic construct
  REGION 1..8: note = Description of Artificial Sequence: Synthetic peptide
AEILLIIM

SEQ ID NO: 10686 - protein, 9 aa, synthetic construct
  REGION 1..9: note = Description of Artificial Sequence: Synthetic peptide
AEIPKEEVK

SEQ ID NO: 10687 - protein, 10 aa, synthetic construct
  REGION 1..10: note = Description of Artificial Sequence: Synthetic peptide
AEIPKEEVKP

SEQ ID NO: 10688 - protein, 9 aa, synthetic construct
  REGION 1..9: note = Description of Artificial Sequence: Synthetic peptide
AHFPREGVF

SEQ ID NO: 10689 - protein, 9 aa, synthetic construct
  REGION 1..9: note = Description of Artificial Sequence: Synthetic peptide
AIVVTCLAY

SEQ ID NO: 10690 - protein, 8 aa, synthetic construct
  REGION 1..8: note = Description of Artificial Sequence: Synthetic peptide
ALEPLVDL

SEQ ID NO: 10691 - protein, 9 aa, synthetic construct
  REGION 1..9: note = Description of Artificial Sequence: Synthetic peptide
ALLSDLQDL

SEQ ID NO: 10692 - protein, 9 aa, synthetic construct
  REGION 1..9: note = Description of Artificial Sequence: Synthetic peptide
AQKFNGLTV

SEQ ID NO: 10693 - protein, 8 aa, synthetic construct
  REGION 1..8: note = Description of Artificial Sequence: Synthetic peptide
AQTGIAVL

SEQ ID NO: 10694 - protein, 9 aa, synthetic construct
  REGION 1..9: note = Description of Artificial Sequence: Synthetic peptide
ASIKNFKSV

SEQ ID NO: 10695 - protein, 8 aa, synthetic construct
  REGION 1..8: note = Description of Artificial Sequence: Synthetic peptide
ASQSIIAY

SEQ ID NO: 10696 - protein, 9 aa, synthetic construct
  REGION 1..9: note = Description of Artificial Sequence: Synthetic peptide
AVHECFVKR

SEQ ID NO: 10697 - protein, 9 aa, synthetic construct
  REGION 1..9: note = Description of Artificial Sequence: Synthetic peptide
AVITREVGF

SEQ ID NO: 10698 - protein, 9 aa, synthetic construct
  REGION 1..9: note = Description of Artificial Sequence: Synthetic peptide
AYKIEELFY

SEQ ID NO: 10699 - protein, 8 aa, synthetic construct
  REGION 1..8: note = Description of Artificial Sequence: Synthetic peptide
CANDPVGF

SEQ ID NO: 10700 - protein, 9 aa, synthetic construct
  REGION 1..9: note = Description of Artificial Sequence: Synthetic peptide
CEIVGGQIV

SEQ ID NO: 10701 - protein, 9 aa, synthetic construct
  REGION 1..9: note = Description of Artificial Sequence: Synthetic peptide
CESHGKQVV

SEQ ID NO: 10702 - protein, 9 aa, synthetic construct
  REGION 1..9: note = Description of Artificial Sequence: Synthetic peptide
CPDGVKHVY

SEQ ID NO: 10703 - protein, 9 aa, synthetic construct
  REGION 1..9: note = Description of Artificial Sequence: Synthetic peptide
DEFIERYKL

SEQ ID NO: 10704 - protein, 9 aa, synthetic construct
  REGION 1..9: note = Description of Artificial Sequence: Synthetic peptide
DLNGDVVAI

SEQ ID NO: 10705 - protein, 9 aa, synthetic construct
  REGION 1..9: note = Description of Artificial Sequence: Synthetic peptide
DVFYKENSY

SEQ ID NO: 10706 - protein, 9 aa, synthetic construct
  REGION 1..9: note = Description of Artificial Sequence: Synthetic peptide
DYQGKPLEF

SEQ ID NO: 10707 - protein, 9 aa, synthetic construct
  REGION 1..9: note = Description of Artificial Sequence: Synthetic peptide
EAARYMRSL

SEQ ID NO: 10708 - protein, 9 aa, synthetic construct
  REGION 1..9: note = Description of Artificial Sequence: Synthetic peptide
EKFKEGVEF

SEQ ID NO: 10709 - protein, 9 aa, synthetic construct
  REGION 1..9: note = Description of Artificial Sequence: Synthetic peptide
EMLDNRATL

SEQ ID NO: 10710 - protein, 9 aa, synthetic construct
  REGION 1..9: note = Description of Artificial Sequence: Synthetic peptide
ENPDILRVY

SEQ ID NO: 10711 - protein, 9 aa, synthetic construct
  REGION 1..9: note = Description of Artificial Sequence: Synthetic peptide
EQFKKGVQI

SEQ ID NO: 10712 - protein, 10 aa, synthetic construct
  REGION 1..10: note = Description of Artificial Sequence: Synthetic peptide
ETIQITISSF

SEQ ID NO: 10713 - protein, 9 aa, synthetic construct
  REGION 1..9: note = Description of Artificial Sequence: Synthetic peptide
EVVGDIILK

SEQ ID NO: 10714 - protein, 9 aa, synthetic construct
  REGION 1..9: note = Description of Artificial Sequence: Synthetic peptide
EWFLAYILF

SEQ ID NO: 10715 - protein, 8 aa, synthetic construct
  REGION 1..8: note = Description of Artificial Sequence: Synthetic peptide
EYADVFHL

SEQ ID NO: 10716 - protein, 9 aa, synthetic construct
  REGION 1..9: note = Description of Artificial Sequence: Synthetic peptide
EYFNSVCRL

SEQ ID NO: 10717 - protein, 9 aa, synthetic construct
  REGION 1..9: note = Description of Artificial Sequence: Synthetic peptide
FAAETLKAT

SEQ ID NO: 10718 - protein, 11 aa, synthetic construct
  REGION 1..11: note = Description of Artificial Sequence: Synthetic peptide
FAFPFTIYSLL

SEQ ID NO: 10719 - protein, 9 aa, synthetic construct
  REGION 1..9: note = Description of Artificial Sequence: Synthetic peptide
FEIKLAKKF

SEQ ID NO: 10720 - protein, 9 aa, synthetic construct
  REGION 1..9: note = Description of Artificial Sequence: Synthetic peptide
FELEDFIPM

SEQ ID NO: 10721 - protein, 9 aa, synthetic construct
  REGION 1..9: note = Description of Artificial Sequence: Synthetic peptide
FLAHIQWMV

SEQ ID NO: 10722 - protein, 9 aa, synthetic construct
  REGION 1..9: note = Description of Artificial Sequence: Synthetic peptide
FLAYILFTR

SEQ ID NO: 10723 - protein, 8 aa, synthetic construct
  REGION 1..8: note = Description of Artificial Sequence: Synthetic peptide
FNPETNIL

SEQ ID NO: 10724 - protein, 9 aa, synthetic construct
  REGION 1..9: note = Description of Artificial Sequence: Synthetic peptide
FPDLNGDVV

SEQ ID NO: 10725 - protein, 9 aa, synthetic construct
  REGION 1..9: note = Description of Artificial Sequence: Synthetic peptide
FQPTNGVGY

SEQ ID NO: 10726 - protein, 9 aa, synthetic construct
  REGION 1..9: note = Description of Artificial Sequence: Synthetic peptide
FRYMNSQGL

SEQ ID NO: 10727 - protein, 8 aa, synthetic construct
  REGION 1..8: note = Description of Artificial Sequence: Synthetic peptide
FSASTSAF

SEQ ID NO: 10728 - protein, 8 aa, synthetic construct
  REGION 1..8: note = Description of Artificial Sequence: Synthetic peptide
FTDGVCLF

SEQ ID NO: 10729 - protein, 9 aa, synthetic construct
  REGION 1..9: note = Description of Artificial Sequence: Synthetic peptide
FVAAIFYLI

SEQ ID NO: 10730 - protein, 9 aa, synthetic construct
  REGION 1..9: note = Description of Artificial Sequence: Synthetic peptide
FVLALLSDL

SEQ ID NO: 10731 - protein, 9 aa, synthetic construct
  REGION 1..9: note = Description of Artificial Sequence: Synthetic peptide
FVSLAIDAY

SEQ ID NO: 10732 - protein, 8 aa, synthetic construct
  REGION 1..8: note = Description of Artificial Sequence: Synthetic peptide
FYEDFLEY

SEQ ID NO: 10733 - protein, 9 aa, synthetic construct
  REGION 1..9: note = Description of Artificial Sequence: Synthetic peptide
FYLTNDVSF

SEQ ID NO: 10734 - protein, 9 aa, synthetic construct
  REGION 1..9: note = Description of Artificial Sequence: Synthetic peptide
GEAANFCAL

SEQ ID NO: 10735 - protein, 9 aa, synthetic construct
  REGION 1..9: note = Description of Artificial Sequence: Synthetic peptide
GEIPVAYRK

SEQ ID NO: 10736 - protein, 10 aa, synthetic construct
  REGION 1..10: note = Description of Artificial Sequence: Synthetic peptide
GEIPVAYRKV

SEQ ID NO: 10737 - protein, 9 aa, synthetic construct
  REGION 1..9: note = Description of Artificial Sequence: Synthetic peptide
GELGDVRET

SEQ ID NO: 10738 - protein, 9 aa, synthetic construct
  REGION 1..9: note = Description of Artificial Sequence: Synthetic peptide
GEVFNATRF

SEQ ID NO: 10739 - protein, 9 aa, synthetic construct
  REGION 1..9: note = Description of Artificial Sequence: Synthetic peptide
GIITTVAAF

SEQ ID NO: 10740 - protein, 9 aa, synthetic construct
  REGION 1..9: note = Description of Artificial Sequence: Synthetic peptide
GNFKNLREF

SEQ ID NO: 10741 - protein, 10 aa, synthetic construct
  REGION 1..10: note = Description of Artificial Sequence: Synthetic peptide
GVYSVIYLYL

SEQ ID NO: 10742 - protein, 8 aa, synthetic construct
  REGION 1..8: note = Description of Artificial Sequence: Synthetic peptide
GWIFGTTL

SEQ ID NO: 10743 - protein, 9 aa, synthetic construct
  REGION 1..9: note = Description of Artificial Sequence: Synthetic peptide
GYAFEHIVY

SEQ ID NO: 10744 - protein, 9 aa, synthetic construct
  REGION 1..9: note = Description of Artificial Sequence: Synthetic peptide
HEFCSQHTM

SEQ ID NO: 10745 - protein, 9 aa, synthetic construct
  REGION 1..9: note = Description of Artificial Sequence: Synthetic peptide
HFAIGLALY

SEQ ID NO: 10746 - protein, 9 aa, synthetic construct
  REGION 1..9: note = Description of Artificial Sequence: Synthetic peptide
HSYFTSDYY

SEQ ID NO: 10747 - protein, 8 aa, synthetic construct
  REGION 1..8: note = Description of Artificial Sequence: Synthetic peptide
HTTDPSFL

SEQ ID NO: 10748 - protein, 9 aa, synthetic construct
  REGION 1..9: note = Description of Artificial Sequence: Synthetic peptide
HVQLSLPVL

SEQ ID NO: 10749 - protein, 8 aa, synthetic construct
  REGION 1..8: note = Description of Artificial Sequence: Synthetic peptide
IADYNYKL

SEQ ID NO: 10750 - protein, 9 aa, synthetic construct
  REGION 1..9: note = Description of Artificial Sequence: Synthetic peptide
IAEILLIIM

SEQ ID NO: 10751 - protein, 8 aa, synthetic construct
  REGION 1..8: note = Description of Artificial Sequence: Synthetic peptide
IIIWFLLL

SEQ ID NO: 10752 - protein, 9 aa, synthetic construct
  REGION 1..9: note = Description of Artificial Sequence: Synthetic peptide
ILFTRFFYV

SEQ ID NO: 10753 - protein, 9 aa, synthetic construct
  REGION 1..9: note = Description of Artificial Sequence: Synthetic peptide
ILTSLLVLV

SEQ ID NO: 10754 - protein, 9 aa, synthetic construct
  REGION 1..9: note = Description of Artificial Sequence: Synthetic peptide
IPRRNVATL

SEQ ID NO: 10755 - protein, 8 aa, synthetic construct
  REGION 1..8: note = Description of Artificial Sequence: Synthetic peptide
IQITISSF

SEQ ID NO: 10756 - protein, 9 aa, synthetic construct
  REGION 1..9: note = Description of Artificial Sequence: Synthetic peptide
ISDEFSSNV

SEQ ID NO: 10757 - protein, 10 aa, synthetic construct
  REGION 1..10: note = Description of Artificial Sequence: Synthetic peptide
IVDTVSALVY

SEQ ID NO: 10758 - protein, 9 aa, synthetic construct
  REGION 1..9: note = Description of Artificial Sequence: Synthetic peptide
IVVTCLAYY

SEQ ID NO: 10759 - protein, 9 aa, synthetic construct
  REGION 1..9: note = Description of Artificial Sequence: Synthetic peptide
KAALLADKF

SEQ ID NO: 10760 - protein, 9 aa, synthetic construct
  REGION 1..9: note = Description of Artificial Sequence: Synthetic peptide
KATYKPNTW

SEQ ID NO: 10761 - protein, 10 aa, synthetic construct
  REGION 1..10: note = Description of Artificial Sequence: Synthetic peptide
KAYKIEELFY

SEQ ID NO: 10762 - protein, 9 aa, synthetic construct
  REGION 1..9: note = Description of Artificial Sequence: Synthetic peptide
KFLTENLLL

SEQ ID NO: 10763 - protein, 8 aa, synthetic construct
  REGION 1..8: note = Description of Artificial Sequence: Synthetic peptide
KIILFLAL

SEQ ID NO: 10764 - protein, 9 aa, synthetic construct
  REGION 1..9: note = Description of Artificial Sequence: Synthetic peptide
KKFLPFQQF

SEQ ID NO: 10765 - protein, 9 aa, synthetic construct
  REGION 1..9: note = Description of Artificial Sequence: Synthetic peptide
KLDDKDPNF

SEQ ID NO: 10766 - protein, 9 aa, synthetic construct
  REGION 1..9: note = Description of Artificial Sequence: Synthetic peptide
KLFIRQEEV

SEQ ID NO: 10767 - protein, 9 aa, synthetic construct
  REGION 1..9: note = Description of Artificial Sequence: Synthetic peptide
KLLHKPIVW

SEQ ID NO: 10768 - protein, 9 aa, synthetic construct
  REGION 1..9: note = Description of Artificial Sequence: Synthetic peptide
KLMVVIPDY

SEQ ID NO: 10769 - protein, 9 aa, synthetic construct
  REGION 1..9: note = Description of Artificial Sequence: Synthetic peptide
KLQDVVNQN

SEQ ID NO: 10770 - protein, 9 aa, synthetic construct
  REGION 1..9: note = Description of Artificial Sequence: Synthetic peptide
KNLSDRVVF

SEQ ID NO: 10771 - protein, 10 aa, synthetic construct
  REGION 1..10: note = Description of Artificial Sequence: Synthetic peptide
KQASLNGVTL

SEQ ID NO: 10772 - protein, 8 aa, synthetic construct
  REGION 1..8: note = Description of Artificial Sequence: Synthetic peptide
KQFDTYNL

SEQ ID NO: 10773 - protein, 9 aa, synthetic construct
  REGION 1..9: note = Description of Artificial Sequence: Synthetic peptide
KSAGFPFNK

SEQ ID NO: 10774 - protein, 9 aa, synthetic construct
  REGION 1..9: note = Description of Artificial Sequence: Synthetic peptide
KSAPLIELC

SEQ ID NO: 10775 - protein, 8 aa, synthetic construct
  REGION 1..8: note = Description of Artificial Sequence: Synthetic peptide
KVAGFAKF

SEQ ID NO: 10776 - protein, 8 aa, synthetic construct
  REGION 1..8: note = Description of Artificial Sequence: Synthetic peptide
KVKPTVVV

SEQ ID NO: 10777 - protein, 9 aa, synthetic construct
  REGION 1..9: note = Description of Artificial Sequence: Synthetic peptide
KVKPTVVVN

SEQ ID NO: 10778 - protein, 9 aa, synthetic construct
  REGION 1..9: note = Description of Artificial Sequence: Synthetic peptide
KYLYFIKGL

SEQ ID NO: 10779 - protein, 8 aa, synthetic construct
  REGION 1..8: note = Description of Artificial Sequence: Synthetic peptide
KYPQVNGL

SEQ ID NO: 10780 - protein, 8 aa, synthetic construct
  REGION 1..8: note = Description of Artificial Sequence: Synthetic peptide
LAAECTIF

SEQ ID NO: 10781 - protein, 9 aa, synthetic construct
  REGION 1..9: note = Description of Artificial Sequence: Synthetic peptide
LALGGSVAI

SEQ ID NO: 10782 - protein, 9 aa, synthetic construct
  REGION 1..9: note = Description of Artificial Sequence: Synthetic peptide
LATHGLAAV

SEQ ID NO: 10783 - protein, 9 aa, synthetic construct
  REGION 1..9: note = Description of Artificial Sequence: Synthetic peptide
LAVPYNMRV

SEQ ID NO: 10784 - protein, 9 aa, synthetic construct
  REGION 1..9: note = Description of Artificial Sequence: Synthetic peptide
LCFLAFLLF

SEQ ID NO: 10785 - protein, 9 aa, synthetic construct
  REGION 1..9: note = Description of Artificial Sequence: Synthetic peptide
LEMELTPVV

SEQ ID NO: 10786 - protein, 9 aa, synthetic construct
  REGION 1..9: note = Description of Artificial Sequence: Synthetic peptide
LEPEYFNSV

SEQ ID NO: 10787 - protein, 8 aa, synthetic construct
  REGION 1..8: note = Description of Artificial Sequence: Synthetic peptide
LHFLPRVF

SEQ ID NO: 10788 - protein, 9 aa, synthetic construct
  REGION 1..9: note = Description of Artificial Sequence: Synthetic peptide
LIDFYLCFL

SEQ ID NO: 10789 - protein, 9 aa, synthetic construct
  REGION 1..9: note = Description of Artificial Sequence: Synthetic peptide
LIKVTLVFL

SEQ ID NO: 10790 - protein, 9 aa, synthetic construct
  REGION 1..9: note = Description of Artificial Sequence: Synthetic peptide
LINIIIWFL

SEQ ID NO: 10791 - protein, 8 aa, synthetic construct
  REGION 1..8: note = Description of Artificial Sequence: Synthetic peptide
LPAPRTLL

SEQ ID NO: 10792 - protein, 10 aa, synthetic construct
  REGION 1..10: note = Description of Artificial Sequence: Synthetic peptide
LPFAMGIIAM

SEQ ID NO: 10793 - protein, 9 aa, synthetic construct
  REGION 1..9: note = Description of Artificial Sequence: Synthetic peptide
LPIGINITR

SEQ ID NO: 10794 - protein, 9 aa, synthetic construct
  REGION 1..9: note = Description of Artificial Sequence: Synthetic peptide
LPKEITVAT

SEQ ID NO: 10795 - protein, 9 aa, synthetic construct
  REGION 1..9: note = Description of Artificial Sequence: Synthetic peptide
LPNDDTLRV

SEQ ID NO: 10796 - protein, 9 aa, synthetic construct
  REGION 1..9: note = Description of Artificial Sequence: Synthetic peptide
LPYPDPSRI

SEQ ID NO: 10797 - protein, 10 aa, synthetic construct
  REGION 1..10: note = Description of Artificial Sequence: Synthetic peptide
LPYPDPSRIL

SEQ ID NO: 10798 - protein, 9 aa, synthetic construct
  REGION 1..9: note = Description of Artificial Sequence: Synthetic peptide
LQIPFAMQM

SEQ ID NO: 10799 - protein, 9 aa, synthetic construct
  REGION 1..9: note = Description of Artificial Sequence: Synthetic peptide
LRIMASLVL

SEQ ID NO: 10800 - protein, 9 aa, synthetic construct
  REGION 1..9: note = Description of Artificial Sequence: Synthetic peptide
LSDLQDLKW

SEQ ID NO: 10801 - protein, 8 aa, synthetic construct
  REGION 1..8: note = Description of Artificial Sequence: Synthetic peptide
LSYFIASF

SEQ ID NO: 10802 - protein, 8 aa, synthetic construct
  REGION 1..8: note = Description of Artificial Sequence: Synthetic peptide
LSYGIATV

SEQ ID NO: 10803 - protein, 9 aa, synthetic construct
  REGION 1..9: note = Description of Artificial Sequence: Synthetic peptide
LVATAEAEL

SEQ ID NO: 10804 - protein, 9 aa, synthetic construct
  REGION 1..9: note = Description of Artificial Sequence: Synthetic peptide
LYLYALVYF

SEQ ID NO: 10805 - protein, 8 aa, synthetic construct
  REGION 1..8: note = Description of Artificial Sequence: Synthetic peptide
LYYDSMSY

SEQ ID NO: 10806 - protein, 9 aa, synthetic construct
  REGION 1..9: note = Description of Artificial Sequence: Synthetic peptide
MADQAMTQM

SEQ ID NO: 10807 - protein, 9 aa, synthetic construct
  REGION 1..9: note = Description of Artificial Sequence: Synthetic peptide
MLSDTLKNL

SEQ ID NO: 10808 - protein, 8 aa, synthetic construct
  REGION 1..8: note = Description of Artificial Sequence: Synthetic peptide
MPLSAPTL

SEQ ID NO: 10809 - protein, 8 aa, synthetic construct
  REGION 1..8: note = Description of Artificial Sequence: Synthetic peptide
MPYFFTLL

SEQ ID NO: 10810 - protein, 9 aa, synthetic construct
  REGION 1..9: note = Description of Artificial Sequence: Synthetic peptide
MSMTYGQQF

SEQ ID NO: 10811 - protein, 9 aa, synthetic construct
  REGION 1..9: note = Description of Artificial Sequence: Synthetic peptide
MTYRRLISM

SEQ ID NO: 10812 - protein, 9 aa, synthetic construct
  REGION 1..9: note = Description of Artificial Sequence: Synthetic peptide
MVSLLSVLL

SEQ ID NO: 10813 - protein, 8 aa, synthetic construct
  REGION 1..8: note = Description of Artificial Sequence: Synthetic peptide
MYASAVVL

SEQ ID NO: 10814 - protein, 9 aa, synthetic construct
  REGION 1..9: note = Description of Artificial Sequence: Synthetic peptide
NARDGCVPL

SEQ ID NO: 10815 - protein, 8 aa, synthetic construct
  REGION 1..8: note = Description of Artificial Sequence: Synthetic peptide
NELSPVAL

SEQ ID NO: 10816 - protein, 9 aa, synthetic construct
  REGION 1..9: note = Description of Artificial Sequence: Synthetic peptide
NLHSSRLSF

SEQ ID NO: 10817 - protein, 9 aa, synthetic construct
  REGION 1..9: note = Description of Artificial Sequence: Synthetic peptide
NLIDSYFVV

(The sequence listing continues in the following parts.)
